United States Patent Application Publication US 2013/0267429 A1 - sequence listing, part 10

SEQ ID NO: 213180 - DNA, 60 bp, Artificial
  Synthetic oligonucleotide
ccaccgtgttgtccgaagccgcactgatatgtcgtcatcagtcccacctgcactggcctt

SEQ ID NO: 213181 - DNA, 50 bp, Artificial
  Synthetic oligonucleotide
aactgtcacgcccgccgagcacacaacggttttcagttgggccgactgac

SEQ ID NO: 213182 - DNA, 50 bp, Artificial
  Synthetic oligonucleotide
cctgaaggcacggagccctggtcgatcccgggtactctgacaggcatgga

SEQ ID NO: 213183 - DNA, 50 bp, Artificial
  Synthetic oligonucleotide
attcgttgtccctgcacgcactcttagcctgcggaaggactgcaccccga

SEQ ID NO: 213184 - DNA, 50 bp, Artificial
  Synthetic oligonucleotide
cggctgccacacgaagccgtgggcctttgcgatcagggtcgccacacgat

SEQ ID NO: 213185 - DNA, 50 bp, Artificial
  Synthetic oligonucleotide
attcggcgtgtcaggactgaacggacttggcctggggtttcaacgagccc

SEQ ID NO: 213186 - DNA, 50 bp, Artificial
  Synthetic oligonucleotide
cctgcgcagtgctcggctggcgattgggtaggtgtccatcgccgaggggg

SEQ ID NO: 213187 - DNA, 50 bp, Artificial
  Synthetic oligonucleotide
aagccgtctcaatcgaatcccgcacgcgaacaacacaagacgcgccgcgt

SEQ ID NO: 213188 - DNA, 50 bp, Artificial
  Synthetic oligonucleotide
aagcgccacaatacgaaaggccattccatgactgcccccgcagatccgca

SEQ ID NO: 213189 - DNA, 50 bp, Artificial
  Synthetic oligonucleotide
aagcgtcgtactctcgcgtgatcccgtcgcatgaacaaccggcacggaag

SEQ ID NO: 213190 - DNA, 50 bp, Artificial
  Synthetic oligonucleotide
aagctatctcagctgccgggcatctggcatcccaccccacgacgtcgatc

SEQ ID NO: 213191 - DNA, 56 bp, Artificial
  Synthetic oligonucleotide
cggacgtagtcatccgtcgcgtgcgggtatttgaaccgccagcggtccaaccaggc

SEQ ID NO: 213192 - DNA, 50 bp, Artificial
  Synthetic oligonucleotide
catctagagccgtcttggcagatggaattactaactccgcgcgcgcaatc

SEQ ID NO: 213193 - DNA, 50 bp, Artificial
  Synthetic oligonucleotide
aagctggagcctcacgcattcgtgtcgcaagcacacgtacgtccgtccaa

SEQ ID NO: 213194 - DNA, 50 bp, Artificial
  Synthetic oligonucleotide
aaggacggatccgttccggcggaggagacatcatgcgaattggtgtgccc

SEQ ID NO: 213195 - DNA, 50 bp, Artificial
  Synthetic oligonucleotide
attacctcactgtcgcggccagtaggaattggccactgccgtacgctccc

SEQ ID NO: 213196 - DNA, 50 bp, Artificial
  Synthetic oligonucleotide
aaggagtaccgccagcgggagtgcgagagcgatagtgccgaacaagtgcc

SEQ ID NO: 213197 - DNA, 50 bp, Artificial
  Synthetic oligonucleotide
aaggcctggttgtgcacgttgtcctccgttgtcggatcggtcgactcacg

SEQ ID NO: 213198 - DNA, 50 bp, Artificial
  Synthetic oligonucleotide
tctcggtcgagccacccggctatccacctgccaggctgtcagacaggtgc

SEQ ID NO: 213199 - DNA, 50 bp, Artificial
  Synthetic oligonucleotide
cgcctacgatcggccaccgaccatcctcctggcttcgcgaaatctgttcc

SEQ ID NO: 213200 - DNA, 50 bp, Artificial
  Synthetic oligonucleotide
aacgatcggattcgggcgtctcgtatcgggtttcgtcgtgtgccgacgcc

SEQ ID NO: 213201 - DNA, 50 bp, Artificial
  Synthetic oligonucleotide
caacggttgaccggtgttcgccgacacaccagcggatcgcaacgcggccg

SEQ ID NO: 213202 - DNA, 56 bp, Artificial
  Synthetic oligonucleotide
cggatctcccgacagacccgaatccgcggtgaactcggcgtaccgaacatctggga

SEQ ID NO: 213203 - DNA, 50 bp, Artificial
  Synthetic oligonucleotide
tggactcgagccagcacgaaaccgccacctcaccacagggtgactgttcg

SEQ ID NO: 213204 - DNA, 50 bp, Artificial
  Synthetic oligonucleotide
cgctcgccagcatacctagaccacccgaaacccacggactcaaccgcggg

SEQ ID NO: 213205 - DNA, 50 bp, Artificial
  Synthetic oligonucleotide
caaccctgaggagtcgcattggccgagacacgacgcgcacaactggtgcc

SEQ ID NO: 213206 - DNA, 50 bp, Artificial
  Synthetic oligonucleotide
aacgccgtcccctgtgggggtattccggacgttcggagtgatgtaggcca

SEQ ID NO: 213207 - DNA, 50 bp, Artificial
  Synthetic oligonucleotide
aacgcggagccaactgggatatcggcctcttgtcggaggcgttacagccg

SEQ ID NO: 213208 - DNA, 50 bp, Artificial
  Synthetic oligonucleotide
aacgctagcgaaggtgacatggggcgggcctttggtgagagtgcggttgc

SEQ ID NO: 213209 - DNA, 50 bp, Artificial
  Synthetic oligonucleotide
aacgggactgtcgccgttcgacaatccgggatggatctacgcgcctcaca

SEQ ID NO: 213210 - DNA, 50 bp, Artificial
  Synthetic oligonucleotide
aacgggcgtgtccgtaactacgactactcggaccggcagacacccctctc

SEQ ID NO: 213211 - DNA, 50 bp, Artificial
  Synthetic oligonucleotide
aacgggtcctcgcaacccctcggcacgcatcagcgctcgaagtgcaccag

SEQ ID NO: 213212 - DNA, 50 bp, Artificial
  Synthetic oligonucleotide
aacggtccgctacgtcccagtccgcctgatgccatctcgtgcccactcct

SEQ ID NO: 213213 - DNA, 60 bp, Artificial
  Synthetic oligonucleotide
aggggggtgcctcagtcagtgaggcaggggtgcctcagtcagtgaggcaggggtgcctca

SEQ ID NO: 213214 - DNA, 59 bp, Artificial
  Synthetic oligonucleotide
cggcccactcatcggtgtccggcctcccccggttcgcctctggtgcactgcaccacaca

SEQ ID NO: 213215 - DNA, 50 bp, Artificial
  Synthetic oligonucleotide
aactcgctgataacgtccgcgatgtgcagccgaggtggatctttgcgggc

SEQ ID NO: 213216 - DNA, 50 bp, Artificial
  Synthetic oligonucleotide
cctctcgggtgagacccggcacggtgtcaggagcacgaccgtaatcacta

SEQ ID NO: 213217 - DNA, 50 bp, Artificial
  Synthetic oligonucleotide
agggatcgcgcggagtagtcacccctcaattctggcgtacaacgcggtcg

SEQ ID NO: 213218 - DNA, 50 bp, Artificial
  Synthetic oligonucleotide
actcagctacacgtggaccccggagcgtggcttcgaggggaagttcggaa

SEQ ID NO: 213219 - DNA, 50 bp, Artificial
  Synthetic oligonucleotide
actcccctggcctgacctaggccgctcccgcatcacatctttaccccacg

SEQ ID NO: 213220 - DNA, 50 bp, Artificial
  Synthetic oligonucleotide
actccggaaacggtcacgagcgccatagcgcatccctcacatcgtccgct

SEQ ID NO: 213221 - DNA, 50 bp, Artificial
  Synthetic oligonucleotide
actcctagagtacggggcggttaacggggtcatacgggatccggagcgga

SEQ ID NO: 213222 - DNA, 50 bp, Artificial
  Synthetic oligonucleotide
actcctgcgtacgcgcgggatcctggttgctctcctcatgggtgccacca

SEQ ID NO: 213223 - DNA, 50 bp, Artificial
  Synthetic oligonucleotide
actcgaccgagacggcgtacaaccgaaacgggccggacaacggggtccac

SEQ ID NO: 213224 - DNA, 50 bp, Artificial
  Synthetic oligonucleotide
actcgccacacccgtcgaaccgccctgacatgcgcccctgcctcccgggc

SEQ ID NO: 213225 - DNA, 56 bp, Artificial
  Synthetic oligonucleotide
cggcgcacctggccccggttggcacggaacctcaaactcgcactgcgcgacgacgt

SEQ ID NO: 213226 - DNA, 50 bp, Artificial
  Synthetic oligonucleotide
actcgccttccgatcgaggatgctgcaacgcctctcaggacgctcccgag

SEQ ID NO: 213227 - DNA, 50 bp, Artificial
  Synthetic oligonucleotide
actcgcggggcgcagtcgtccttcccctatagttccacctggcacatacg

SEQ ID NO: 213228 - DNA, 50 bp, Artificial
  Synthetic oligonucleotide
actcgcgtccgcaggcatggaccgaactgtgccacaacgactgccgcaga

SEQ ID NO: 213229 - DNA, 50 bp, Artificial
  Synthetic oligonucleotide
actcggctccgtcatgtcgcctccgtacccgcataggtcctgaaaggctc

SEQ ID NO: 213230 - DNA, 50 bp, Artificial
  Synthetic oligonucleotide
agggataccgacaatcatctacgggccgggggacacagcgcttgcgcaca

SEQ ID NO: 213231 - DNA, 50 bp, Artificial
  Synthetic oligonucleotide
actcgtccgagggtagggcggaaccgctcgacaagaaaggccggattgaa

SEQ ID NO: 213232 - DNA, 50 bp, Artificial
  Synthetic oligonucleotide
cgaggggagccggaatctgtgcggtagtcggcatgggcgcaagtcccggg

SEQ ID NO: 213233 - DNA, 50 bp, Artificial
  Synthetic oligonucleotide
actgatcacccgatcctcgggcctgacagtcactctgggcacaacgcacc

SEQ ID NO: 213234 - DNA, 50 bp, Artificial
  Synthetic oligonucleotide
actgcactcgacaccgtcaagtacgagtggcgagccaagcccgtcggttt

SEQ ID NO: 213235 - DNA, 50 bp, Artificial
  Synthetic oligonucleotide
acgggcgtaagcagtcacgagcgctgttcggctgggtccctcattgtcca

SEQ ID NO: 213236 - DNA, 60 bp, Artificial
  Synthetic oligonucleotide
cattcaccccacaccattaggagaacccatgctcgtacacgatgcccccgatgcggcatt

SEQ ID NO: 213237 - DNA, 50 bp, Artificial
  Synthetic oligonucleotide
gccggtccgcttgcaggatgggtgctgggacgattgcgaagtctcggccg

SEQ ID NO: 213238 - DNA, 50 bp, Artificial
  Synthetic oligonucleotide
acggggcgtagacgtcctctcgggtgagacccggcacggtgtcaggagca

SEQ ID NO: 213239 - DNA, 50 bp, Artificial
  Synthetic oligonucleotide
acggttcggccgacccaccacagactctcagaactaccgccgaagcacac

SEQ ID NO: 213240 - DNA, 50 bp, Artificial
  Synthetic oligonucleotide
acgtacgtggtaatcatcgttgtaccggagggagccgcacgcgccacggt

SEQ ID NO: 213241 - DNA, 50 bp, Artificial
  Synthetic oligonucleotide
agggtgctttcccagactcgactccacttaccgccccgcggttcggacaa

SEQ ID NO: 213242 - DNA, 50 bp, Artificial
  Synthetic oligonucleotide
gcctgaggatgcgtgggcctcttgtgcgactccagcctagtgtgcggtcg

SEQ ID NO: 213243 - DNA, 50 bp, Artificial
  Synthetic oligonucleotide
cgactggggcgaggggttgggcctggtctcggcaatggtcgatcgagtca

SEQ ID NO: 213244 - DNA, 50 bp, Artificial
  Synthetic oligonucleotide
agggcagtgcagtagggcagtgcggtagggccaggagcgatcgtgaagtt

SEQ ID NO: 213245 - DNA, 50 bp, Artificial
  Synthetic oligonucleotide
acgtccccgaacatcaagtctccctcctcgaaccgaaaggacccgctcgc

SEQ ID NO: 213246 - DNA, 50 bp, Artificial
  Synthetic oligonucleotide
agggatgaggccaaccgtggaggcccggacacagcgaagtgagtggttca

SEQ ID NO: 213247 - DNA, 60 bp, Artificial
  Synthetic oligonucleotide
catgagttattagacctgcatcagggcgtgagataccctgggctctgtccacgagacagt

SEQ ID NO: 213248 - DNA, 50 bp, Artificial
  Synthetic oligonucleotide
acgtctgccggtaggtgtagtcgagcgactgcccccagtagtcaccgagg

SEQ ID NO: 213249 - DNA, 50 bp, Artificial
  Synthetic oligonucleotide
acgtgatcgcgccgagtgtctggaggccgtgtgcgagttggtacttcgca

SEQ ID NO: 213250 - DNA, 50 bp, Artificial
  Synthetic oligonucleotide
acgtggcaccacccctattcaggaggatgagtcgtgggcgttcggtcagg

SEQ ID NO: 213251 - DNA, 50 bp, Artificial
  Synthetic oligonucleotide
acgtgtttccccggttcgacttgtttccgcaggacgtggcaccaccccta

SEQ ID NO: 213252 - DNA, 50 bp, Artificial
  Synthetic oligonucleotide
acgttcccagaaaggctgaccaggcccagatggtccggggaggcatacgc

SEQ ID NO: 213253 - DNA, 50 bp, Artificial
  Synthetic oligonucleotide
acgtttttccgcgggcccgattcacataatcccgtgagctctggcgcccg

SEQ ID NO: 213254 - DNA, 50 bp, Artificial
  Synthetic oligonucleotide
actagcccgggcaggaaaaccttccacgcggtggtcatacgctcaggcag

SEQ ID NO: 213255 - DNA, 50 bp, Artificial
  Synthetic oligonucleotide
ggcacgagagttcttcgagcgggcacggacggcctatgtcgggttgggct

SEQ ID NO: 213256 - DNA, 50 bp, Artificial
  Synthetic oligonucleotide
cgagctagctgctgccccagaccctcgcaacgaatcaacccccgccgtca

SEQ ID NO: 213257 - DNA, 50 bp, Artificial
  Synthetic oligonucleotide
agcacctgtgaaccatctatgcacgtgtaggtgtggtcgtgcgcgtcggg

SEQ ID NO: 213258 - DNA, 60 bp, Artificial
  Synthetic oligonucleotide
cagtgcgtcagtgagattcagcgaacagacgcacagatcgtgtgggtagctctgggaacg

SEQ ID NO: 213259 - DNA, 50 bp, Artificial
  Synthetic oligonucleotide
ggatctcggtggagtgcattcatcggtgcgggtccttccagggtcggtgc

SEQ ID NO: 213260 - DNA, 50 bp, Artificial
  Synthetic oligonucleotide
agcagtcgaggagatgcagcggaccgactacgtgctttgcggacaggaca

SEQ ID NO: 213261 - DNA, 50 bp, Artificial
  Synthetic oligonucleotide
aggaacgacaagacctgggcgtggtcataccgcggtgcgagagtgccggc

SEQ ID NO: 213262 - DNA, 50 bp, Artificial
  Synthetic oligonucleotide
agcccgggcgaaaaaggcaccccctaacgttaagacccatggcacgtcgt

SEQ ID NO: 213263 - DNA, 50 bp, Artificial
  Synthetic oligonucleotide
gctaggcgacacctctcctccgcgaatctgaaccaggcggtcgtatgcct

SEQ ID NO: 213264 - DNA, 50 bp, Artificial
  Synthetic oligonucleotide
agccctactgaacagtaggtggcggatcacactcggccacggttgtgtgc

SEQ ID NO: 213265 - DNA, 50 bp, Artificial
  Synthetic oligonucleotide
agcgggggacacgacacgtccccgaacatcaagtctccctcctcgaaccg

SEQ ID NO: 213266 - DNA, 50 bp, Artificial
  Synthetic oligonucleotide
gctcgaataccggcgtgtcacgttcaaaactgccacaaaaggtcacactc

SEQ ID NO: 213267 - DNA, 50 bp, Artificial
  Synthetic oligonucleotide
agcctcgcagaatagggggccacccggaacatcatgcgacgaacctccac

SEQ ID NO: 213268 - DNA, 50 bp, Artificial
  Synthetic oligonucleotide
agcgggaatgatgcatcccccaactttgcggggtccacgacggctctctt

SEQ ID NO: 213269 - DNA, 51 bp, Artificial
  Synthetic oligonucleotide
cggggggactggtgggagtcccgttcaccgtagtaaccctcaaggagtgag

SEQ ID NO: 213270 - DNA, 50 bp, Artificial
  Synthetic oligonucleotide
agcgatactcaacggctgcgaagtatggcggacgctccacgatactgggc

SEQ ID NO: 213271 - DNA, 50 bp, Artificial
  Synthetic oligonucleotide
agcgaaccatcgccccaaccccgaatgcggacggtggttgctagaaccta

SEQ ID NO: 213272 - DNA, 50 bp, Artificial
  Synthetic oligonucleotide
gctgcaccgttgcagccgccaaacacccggcaccgtcgcggaatagtcgt

SEQ ID NO: 213273 - DNA, 50 bp, Artificial
  Synthetic oligonucleotide
actgcgcacccgacgactgacccatcgcagcaggataggtcagttccccg

SEQ ID NO: 213274 - DNA, 50 bp, Artificial
  Synthetic oligonucleotide
actgcggcgtaggtgagatccgagaggaccagccacatcggcagagtggg

SEQ ID NO: 213275 - DNA, 50 bp, Artificial
  Synthetic oligonucleotide
acttccgtacctcgctgtgggtcccgggtgtcctcatggtggagcactgg

SEQ ID NO: 213276 - DNA, 50 bp, Artificial
  Synthetic oligonucleotide
agaaactgtgcggttcgtccactgccgcgatctcccagtagcccgcgtac

SEQ ID NO: 213277 - DNA, 50 bp, Artificial
  Synthetic oligonucleotide
gcgggggttgcttgcacctggaatagttgagcaagtacgtgaacgggcgg

SEQ ID NO: 213278 - DNA, 50 bp, Artificial
  Synthetic oligonucleotide
agacacgcacgtgctgacacgagcttagcgggaccagagggattgatgcg

SEQ ID NO: 213279 - DNA, 50 bp, Artificial
  Synthetic oligonucleotide
agaccataggagggtgagggcatcttggcgaactggacgcaccaccgcgc

SEQ ID NO: 213280 - DNA, 58 bp, Artificial
  Synthetic oligonucleotide
cggtccgtagatcgaattcgcgtagttcatgggccgatagggcgacggaatccacatc

SEQ ID NO: 213281 - DNA, 50 bp, Artificial
  Synthetic oligonucleotide
agaccccagaggcaattcacgctcccctagcgtcgggcgtcgacactgcc

SEQ ID NO: 213282 - DNA, 50 bp, Artificial
  Synthetic oligonucleotide
agacccggcacggtgtcaggagcacgaccgtaatcactacgcacccagat

SEQ ID NO: 213283 - DNA, 50 bp, Artificial
  Synthetic oligonucleotide
agaccggacggttcaagacggtgcgacagccgaattcgttggccgtagac

SEQ ID NO: 213284 - DNA, 50 bp, Artificial
  Synthetic oligonucleotide
ggcggaatctcatcggactcgaaaatgcgctccaaggtcgcgataacact

SEQ ID NO: 213285 - DNA, 50 bp, Artificial
  Synthetic oligonucleotide
aggcggcatccaccctgactccaattggtcatctccgctcgggcattgcc

SEQ ID NO: 213286 - DNA, 50 bp, Artificial
  Synthetic oligonucleotide
agaggccctctagcgggggacacgacacgtccccgaacatcaagtctccc

SEQ ID NO: 213287 - DNA, 50 bp, Artificial
  Synthetic oligonucleotide
ggccgacaccgaatgccgactgaaatgggccgcgtgcctctcgctcagtc

SEQ ID NO: 213288 - DNA, 50 bp, Artificial
  Synthetic oligonucleotide
agagggcggtaaacagtggtagagagcagacggttcctgtggcaggggcg

SEQ ID NO: 213289 - DNA, 50 bp, Artificial
  Synthetic oligonucleotide
agagtaagcagttgttcggcgcaagacggggcacggatagagtcggggcg

SEQ ID NO: 213290 - DNA, 50 bp, Artificial
  Synthetic oligonucleotide
aggcgccctgtctctcggagggtccaatggccgctcgccctgctacgggg

SEQ ID NO: 213291 - DNA, 57 bp, Artificial
  Synthetic oligonucleotide
cagggacaccgcgaaacgcgggcacggacttaggtcacctaagtctccatcttgctc

SEQ ID NO: 213292 - DNA, 50 bp, Artificial
  Synthetic oligonucleotide
gcgtagcagggtatctgagctgcatcgcatcgtgtctcagtatctggtct

SEQ ID NO: 213293 - DNA, 50 bp, Artificial
  Synthetic oligonucleotide
aggaggacgacacaaccgaatcgactgtcccatgacacgcaggacggccc

SEQ ID NO: 213294 - DNA, 50 bp, Artificial
  Synthetic oligonucleotide
acccgatcacgtaggacggtgttgccctcccgtagccgctgccgcgactc

SEQ ID NO: 213295 - DNA, 50 bp, Artificial
  Synthetic oligonucleotide
acccgcgagtcgcaactgcacggaatcgtcagggagacaggcgctctgct

SEQ ID NO: 213296 - DNA, 50 bp, Artificial
  Synthetic oligonucleotide
acccgcgcgctcccctagagtcgagtctcgtgccagacgacgtgacagcc

SEQ ID NO: 213297 - DNA, 50 bp, Artificial
  Synthetic oligonucleotide
acccggagcccccggtcgggtatgacatgtcgtcgtctcctaggtcgagt

SEQ ID NO: 213298 - DNA, 50 bp, Artificial
  Synthetic oligonucleotide
acccgtaccgccgaaatgcaaacgtcgcggggtgacagcagcgtgcatgg

SEQ ID NO: 213299 - DNA, 50 bp, Artificial
  Synthetic oligonucleotide
gtgtccgccggaacgcgggcctcgtctatttacacgctcgcatactacgg

SEQ ID NO: 213300 - DNA, 50 bp, Artificial
  Synthetic oligonucleotide
gtggtgggtggacctgcaaactcaggttgctccgacgcacgggcagccga

SEQ ID NO: 213301 - DNA, 50 bp, Artificial
  Synthetic oligonucleotide
cagtcatctgtgaacccgttcgcaccccggtgggcggattcggcggagtc

SEQ ID NO: 213302 - DNA, 55 bp, Artificial
  Synthetic oligonucleotide
cagctcaaagtaacaacccgtcgggaatacaggggcacttgttaacactagccag

SEQ ID NO: 213303 - DNA, 50 bp, Artificial
  Synthetic oligonucleotide
cgaacgtgtcggagacttctctcgggctgacctggcgcccaggacgtatc

SEQ ID NO: 213304 - DNA, 50 bp, Artificial
  Synthetic oligonucleotide
accgatccgacaacggaggacaacgtgcacaaccaggccttccggcccgc

SEQ ID NO: 213305 - DNA, 50 bp, Artificial
  Synthetic oligonucleotide
atccccagtcaccgaagctcggcacgaaaacgtgatagggcgagacgctc

SEQ ID NO: 213306 - DNA, 50 bp, Artificial
  Synthetic oligonucleotide
accgatgcagcgagccttgtccaggtaaccgagcaacagggtgagcacgc

SEQ ID NO: 213307 - DNA, 50 bp, Artificial
  Synthetic oligonucleotide
accgcattggtgtgtaggaatcgggcattccgctaggtggtgcctgcgct

SEQ ID NO: 213308 - DNA, 50 bp, Artificial
  Synthetic oligonucleotide
accgccgtgctacgatgtggtccggctaacgtatagccctccatgctcga

SEQ ID NO: 213309 - DNA, 50 bp, Artificial
  Synthetic oligonucleotide
atccccacctgaaacggtgagccggccgcgacagaccccgaatcagtctc

SEQ ID NO: 213310 - DNA, 50 bp, Artificial
  Synthetic oligonucleotide
cgcaaggcgacagccgactcgaaatccttgcgagtgaggcagatccggaa

SEQ ID NO: 213311 - DNA, 50 bp, Artificial
  Synthetic oligonucleotide
ccacccgaaacccacggactcaaccgcgggctcgatacctgcgtacctgc

SEQ ID NO: 213312 - DNA, 50 bp, Artificial
  Synthetic oligonucleotide
accgctcgtgccaagcaactatgcccgcatactcgcttccaagcatggga

SEQ ID NO: 213313 - DNA, 55 bp, Artificial
  Synthetic oligonucleotide
cgtaccccaatattttttcgagtctgcggcgtgtcgcacaccaatatttggttcc

SEQ ID NO: 213314 - DNA, 50 bp, Artificial
  Synthetic oligonucleotide
ccccgtggagaccggacggttcaagacggtgcgacagccgaattcgttgg

SEQ ID NO: 213315 - DNA, 50 bp, Artificial
  Synthetic oligonucleotide
tacctagagtgtagtcgtacagttttccatttctagaaactagaaatcca

SEQ ID NO: 213316 - DNA, 50 bp, Artificial
  Synthetic oligonucleotide
acatccaccccgcgtggtactgcggcccacgtccgacatcgatcgacctc

SEQ ID NO: 213317 - DNA, 50 bp, Artificial
  Synthetic oligonucleotide
atcgatgtgtgcacggggctacacgctgcgctgggtgtcctctccgcctt

SEQ ID NO: 213318 - DNA, 50 bp, Artificial
  Synthetic oligonucleotide
acatgctcgcagcgacgttaggggtctcgaggagcccacatcaaaccggc

SEQ ID NO: 213319 - DNA, 50 bp, Artificial
  Synthetic oligonucleotide
accactgggcgtgaggccgcgttctactcggcggaacaactgcacttacc

SEQ ID NO: 213320 - DNA, 50 bp, Artificial
  Synthetic oligonucleotide
accaggacaaagcgccttttcggggtgctacgaccggactccgcccgaat

SEQ ID NO: 213321 - DNA, 50 bp, Artificial
  Synthetic oligonucleotide
accagggggcgtcctccgactcgtgttcccctcgacgggacaggtccgct

SEQ ID NO: 213322 - DNA, 50 bp, Artificial
  Synthetic oligonucleotide
accagtggcgaagcagtctacggggcaaacgctccgctcggctgaacgaa

SEQ ID NO: 213323 - DNA, 50 bp, Artificial
  Synthetic oligonucleotide
accatgggtccggtcaggtcgggaggacccgccacgcacgagaggaaccc

SEQ ID NO: 213324 - DNA, 52 bp, Artificial
  Synthetic oligonucleotide
cggttcattgtctcgttcgggtcccggaacgtgtaccagtccgaggaccgaa

SEQ ID NO: 213325 - DNA, 55 bp, Artificial
  Synthetic oligonucleotide
gacgggaactgagtgcaacgaactcttgaccgggcgtgatgcggtagggaggatc

SEQ ID NO: 213326 - DNA, 51 bp, Artificial
  Synthetic oligonucleotide
tacgcccaggtcgtgaaacggctccgtccctcgaagccagcaagctgacgt

SEQ ID NO: 213327 - DNA, 50 bp, Artificial
  Synthetic oligonucleotide
cagcccggattgactgactcgagggacgctaggaggcccaggtgtatcgc

SEQ ID NO: 213328 - DNA, 50 bp, Artificial
  Synthetic oligonucleotide
cacgtcggacctccgggtctcggttcgaggggtgtgatcgcgaccacatc

SEQ ID NO: 213329 - DNA, 50 bp, Artificial
  Synthetic oligonucleotide
attgacggcgggaggtcgagagggaccgactgactacggtggccacgtga

SEQ ID NO: 213330 - DNA, 50 bp, Artificial
  Synthetic oligonucleotide
atgcgacggcgtgcctcgtggtacacccggctggtttcgttgaccgaacg

SEQ ID NO: 213331 - DNA, 50 bp, Artificial
  Synthetic oligonucleotide
atctgccgtgcccagtgacaagttgccgtgccggctccgtaatttcgcga

SEQ ID NO: 213332 - DNA, 50 bp, Artificial
  Synthetic oligonucleotide
atcggcaaggctagtccagcgccccagcaaatgcagactgccggggtggt

SEQ ID NO: 213333 - DNA, 50 bp, Artificial
  Synthetic oligonucleotide
atcgaggcccgatcaggtcagggtcccaagcgggtccgtagggctggtgc

SEQ ID NO: 213334 - DNA, 50 bp, Artificial
  Synthetic oligonucleotide
atcgagcctagggccgccaagtttgacatcagccgtcgcatctcgcgtgt

SEQ ID NO: 213335 - DNA, 50 bp, Artificial
  Synthetic oligonucleotide
ataggtgtcgtccctcgccagggtcacgaaagcgagagcgcccccgtcgc

SEQ ID NO: 213336 - DNA, 55 bp, Artificial
  Synthetic oligonucleotide
gagctccggcagagtcttctcgagcgtggattgcagggtcggactgaggagcgga

SEQ ID NO: 213337 - DNA, 50 bp, Artificial
  Synthetic oligonucleotide
tcttgggtcactggcccgtgaagttcgtactcacttgcaagcacgttcgt

SEQ ID NO: 213338 - DNA, 50 bp, Artificial
  Synthetic oligonucleotide
agtgtgccccgcagcctgggtgggtcgtgtgcctgagcacgcgccatagc

SEQ ID NO: 213339 - DNA, 50 bp, Artificial
  Synthetic oligonucleotide
agtgcctgggcccgttgaccgagccgcctgctgtgtgagtcgcgtcacgc

SEQ ID NO: 213340 - DNA, 50 bp, Artificial
  Synthetic oligonucleotide
cgtacgggatttgtggccgagtagcgggtgacgctggaacgatggcgaaa

SEQ ID NO: 213341 - DNA, 50 bp, Artificial
  Synthetic oligonucleotide
cgtgtcggcagtgggttgcgcactccttctgtgggctgcggcagttctgg

SEQ ID NO: 213342 - DNA, 50 bp, Artificial
  Synthetic oligonucleotide
cgttatgcgctcggcagctcccctgatagacgggttccgtcgcgccatct

SEQ ID NO: 213343 - DNA, 50 bp, Artificial
  Synthetic oligonucleotide
ccttcggatgagagatgtcagggggttcgcgtcagacgaaccgcaccgga

SEQ ID NO: 213344 - DNA, 50 bp, Artificial
  Synthetic oligonucleotide
cctactgcgcaacaaggctcgcagcgggggcccactcgattcaccgacct

SEQ ID NO: 213345 - DNA, 50 bp, Artificial
  Synthetic oligonucleotide
gcaaacatccatcagcaagggaggccacggtgcagccttcagagcacctg

SEQ ID NO: 213346 - DNA, 50 bp, Artificial
  Synthetic oligonucleotide
ccgtgtcgccaccttatgcccgttcgggaccacgcccgttacttaggtca

SEQ ID NO: 213347 - DNA, 55 bp, Artificial
  Synthetic oligonucleotide
cctcgagcggacaagccacgtcttgcgatatatgcgtccccattaggggcagccg

SEQ ID NO: 213348 - DNA, 50 bp, Artificial
  Synthetic oligonucleotide
ccggtataggctgacgccgtcaccttgtctggtacccctcgcgggactgg

SEQ ID NO: 213349 - DNA, 50 bp, Artificial
  Synthetic oligonucleotide
ccggcttgttccggatccgagggacagccctgacgttgtgcgctcttcgg

SEQ ID NO: 213350 - DNA, 50 bp, Artificial
  Synthetic oligonucleotide
ccgcgcgaagttacggagccggcacgggagatggtcactgggcacggcag

SEQ ID NO: 213351 - DNA, 50 bp, Artificial
  Synthetic oligonucleotide
cccgtgatgtagccccggttcattgtctcgttcgggtcccggaacgtgta

SEQ ID NO: 213352 - DNA, 50 bp, Artificial
  Synthetic oligonucleotide
ccccatgtcttgcggggtacagagaagccatcgtgtgccggccaccggaa

SEQ ID NO: 213353 - DNA, 50 bp, Artificial
  Synthetic oligonucleotide
ccattcggtgcccctcctaccgccgggccacggattcggttgctcaccta

SEQ ID NO: 213354 - DNA, 50 bp, Artificial
  Synthetic oligonucleotide
ccatccgcccaccctagaggtgtcgtccgccacacggaggtgccccgacg

SEQ ID NO: 213355 - DNA, 50 bp, Artificial
  Synthetic oligonucleotide
ccacgggtgacgattcgactacgtctggtcaaaacggggcacaagggggc

SEQ ID NO: 213356 - DNA, 50 bp, Artificial
  Synthetic oligonucleotide
ccaagaacagctgggtcgtggaccaaccggcgtcagttagcactgctccg

SEQ ID NO: 213357 - DNA, 50 bp, Artificial
  Synthetic oligonucleotide
acaaggggatatcccgggtcctggtgggttctacctccgcatgccgacgg

SEQ ID NO: 213358 - DNA, 55 bp, Artificial
  Synthetic oligonucleotide
cctcgaagtagcaagtaacccgaaaggaaactagccgtgatcccaatggctatcg

SEQ ID NO: 213359 - DNA, 50 bp, Artificial
  Synthetic oligonucleotide
acacatccgtacgtttccccacccgtgctcagcttccccacgctccggag

SEQ ID NO: 213360 - DNA, 50 bp, Artificial
  Synthetic oligonucleotide
acaccccgacctggcggactgcttcagcgcaccgtttgcgacctacgcca

SEQ ID NO: 213361 - DNA, 50 bp, Artificial
  Synthetic oligonucleotide
acacctgctcggaccaaggagcgcacagaccatggactcgtcccctaagg

SEQ ID NO: 213362 - DNA, 50 bp, Artificial
  Synthetic oligonucleotide
acacggatggcacacggcggctcagaaacggccccggttgctcgccccgg

SEQ ID NO: 213363 - DNA, 50 bp, Artificial
  Synthetic oligonucleotide
acactatgccgtcggaccacccactcagtcaaggaccgacccggggtctc

SEQ ID NO: 213364 - DNA, 50 bp, Artificial
  Synthetic oligonucleotide
acagcgtgagctgcgacactgccgcacgaaatgtgaccggcgcaacccct

SEQ ID NO: 213365 - DNA, 50 bp, Artificial
  Synthetic oligonucleotide
acagcgttgacgcgggcgcatccaacggtccttaatgtggagcgcaccac

SEQ ID NO: 213366 - DNA, 50 bp, Artificial
  Synthetic oligonucleotide
acaggagtaaccctatctcagcagaggggccaccgggtagccgtttgcga

SEQ ID NO: 213367 - DNA, 50 bp, Artificial
  Synthetic oligonucleotide
acatccctcgagtgggggacaggggcccgaattcgccggtttggtgacac

SEQ ID NO: 213368 - DNA, 50 bp, Artificial
  Synthetic oligonucleotide
acatccgcccgcctagcggccctccgccgaggaagttggttcgacgtgcg

SEQ ID NO: 213369 - DNA, 55 bp, Artificial
  Synthetic oligonucleotide
cctaatgctgagaacggacgatgggacgttcctccgccgtcaatacagcctgcag

SEQ ID NO: 213370 - DNA, 50 bp, Artificial
  Synthetic oligonucleotide
acatcgggaccgttcgcctgggccccacgtcagccgagttccgctgactg

SEQ ID NO: 213371 - DNA, 50 bp, Artificial
  Synthetic oligonucleotide
acatcgtgacgccggacacacttcccggtatcgcggccccaaggttaggc

SEQ ID NO: 213372 - DNA, 50 bp, Artificial
  Synthetic oligonucleotide
acatgcggaggtggggtgaaggccttgcgaggaaggcggatcccgatcga

SEQ ID NO: 213373 - DNA, 50 bp, Artificial
  Synthetic oligonucleotide
acatgcgggatgccccactcgtcacggcagagcccatttgatgggggcgt

SEQ ID NO: 213374 - DNA, 50 bp, Artificial
  Synthetic oligonucleotide
accagcgcactgacggttcccgaggcccgatccgtgacgttgacccgttc

SEQ ID NO: 213375 - DNA, 50 bp, Artificial
  Synthetic oligonucleotide
accagtctggtcccagcgaggcaccatgcccattacgcagtcaggcaagg

SEQ ID NO: 213376 - DNA, 50 bp, Artificial
  Synthetic oligonucleotide
accagttccgggcgatctctcccagacaggacccgctctccccgtggtcc

SEQ ID NO: 213377 - DNA, 50 bp, Artificial
  Synthetic oligonucleotide
accatcgcaagccctgaggcctgccggtatagaccgctgaggtagccgat

SEQ ID NO: 213378 - DNA, 50 bp, Artificial
  Synthetic oligonucleotide
acccccacggacgtccagtaacgaaagccgttgacaccacttgggtcgcg

SEQ ID NO: 213379 - DNA, 50 bp, Artificial
  Synthetic oligonucleotide
accccgacgatgggcttctgagtggcgctccgaacgcgtgtgaagagctc

SEQ ID NO: 213380 - DNA, 55 bp, Artificial
  Synthetic oligonucleotide
gcaaccgtcaaaacctcggaaagccagctgagtgtgaactgacggcccggatacc

SEQ ID NO: 213381 - DNA, 50 bp, Artificial
  Synthetic oligonucleotide
accccggaacgatagtccctgacgtttgtgtggtgtgggagcgtgcccac

SEQ ID NO: 213382 - DNA, 50 bp, Artificial
  Synthetic oligonucleotide
acccgatcagggcaaggctgtccaatggggtccaacactatgccgtcgga

SEQ ID NO: 213383 - DNA, 50 bp, Artificial
  Synthetic oligonucleotide
acccgggggttcgaacatccgtgagcaacggacggacagcttcgaccaga

SEQ ID NO: 213384 - DNA, 50 bp, Artificial
  Synthetic oligonucleotide
accgacgaaggagggcacgtgatgcatgcgttgctcgagctaggtgtgga

SEQ ID NO: 213385 - DNA, 50 bp, Artificial
  Synthetic oligonucleotide
accgatcgtggctgtgtggctctggcgccgcgaaggtaaacaactcgact

SEQ ID NO: 213386 - DNA, 50 bp, Artificial
  Synthetic oligonucleotide
accggcgcgtgggtagacacagtcaacggggaccgcggacagggtatttc

SEQ ID NO: 213387 - DNA, 50 bp, Artificial
  Synthetic oligonucleotide
accggttgggtgacgtggtcctaggtgcgcctttcctcggcttgagctat

SEQ ID NO: 213388 - DNA, 50 bp, Artificial
  Synthetic oligonucleotide
accgtacgcgaccccatggcgtgttgagaaccgccaatacgtgagcccga

SEQ ID NO: 213389 - DNA, 50 bp, Artificial
  Synthetic oligonucleotide
accgtgcaggcaaccagacatcgtgacgccggacacacttcccggtatcg

SEQ ID NO: 213390 - DNA, 50 bp, Artificial
  Synthetic oligonucleotide
aaaaccggttgaacggccccggatcgcgacgtaggttcggagtacacgcg

SEQ ID NO: 213391 - DNA, 55 bp, Artificial
  Synthetic oligonucleotide
ccgtaatccacagggagatattcctcccgaaaagtccgcacgatttgtggtccca

SEQ ID NO: 213392 - DNA, 50 bp, Artificial
  Synthetic oligonucleotide
aaacatggcgactccgagggtcgtggtgtgggagatgagcccccgagacg

SEQ ID NO: 213393 - DNA, 50 bp, Artificial
  Synthetic oligonucleotide
aaagtgccccggaccctcacacagccgacggaaggagccggcgtggctac

SEQ ID NO: 213394 - DNA, 50 bp, Artificial
  Synthetic oligonucleotide
aaatcggcacccaaccttccgccgggctcgatacgtgtaagccatcggac

SEQ ID NO: 213395 - DNA, 50 bp, Artificial
  Synthetic oligonucleotide
aaattacggagccggcacggcaacttgtcactgggcacggcagatctgcc

SEQ ID NO: 213396 - DNA, 50 bp, Artificial
  Synthetic oligonucleotide
aacacccctgcggcacccataggttggtcccgtgaatgagcgactcccga

SEQ ID NO: 213397 - DNA, 50 bp, Artificial
  Synthetic oligonucleotide
aacacggaaaagtcaaccggggcagggatccgggcgtctcctgagtgacg

SEQ ID NO: 213398 - DNA, 50 bp, Artificial
  Synthetic oligonucleotide
aacatgtgagcgcagcccagaagcgagcggccctgtacctccgcatcagt

SEQ ID NO: 213399 - DNA, 50 bp, Artificial
  Synthetic oligonucleotide
aacgccaggaggatcctgagacgctcctgccaagtcagtccgcgcgaaga

SEQ ID NO: 213400 - DNA, 50 bp, Artificial
  Synthetic oligonucleotide
aacggatctcgtgggttcactggatcgcatgaccacctcacactccgccc

SEQ ID NO: 213401 - DNA, 50 bp, Artificial
  Synthetic oligonucleotide
aacggcttccctcatgcccgctgacagcacgacccaagaagcctcgctta

SEQ ID NO: 213402 - DNA, 55 bp, Artificial
  Synthetic oligonucleotide
gcactcatatcgaaagagtcaagcgccgagggacgtgtccgcccgcaaaccactc

SEQ ID NO: 213403 - DNA, 50 bp, Artificial
  Synthetic oligonucleotide
aacgggcctggtgtgtcaaggctcactgcgccgttctggacaactgtgtc

SEQ ID NO: 213404 - DNA, 50 bp, Artificial
  Synthetic oligonucleotide
aacgtaggtaaatacgcgaacgcgtgctcttggtctcgggctggagccga

SEQ ID NO: 213405 - DNA, 50 bp, Artificial
  Synthetic oligonucleotide
aagacaggagaggtcacccccgatgactgcagggattgcaccgagccgtt

SEQ ID NO: 213406 - DNA, 50 bp, Artificial
  Synthetic oligonucleotide
aagacgagcccgggagtcctccgtgaacgaccgtttcacctggtccgaag

SEQ ID NO: 213407 - DNA, 50 bp, Artificial
  Synthetic oligonucleotide
aagacgagtcgaacgacactcagcgtgctcggtcccgctacgtggcctcg

SEQ ID NO: 213408 - DNA, 50 bp, Artificial
  Synthetic oligonucleotide
aagagccgcggaccacattctgccacgggcctccagagatcccagcagtc

SEQ ID NO: 213409 - DNA, 50 bp, Artificial
  Synthetic oligonucleotide
aagagttgacgaacgggcctggtgtgtcaaggctcactgcgccgttctgg

SEQ ID NO: 213410 - DNA, 50 bp, Artificial
  Synthetic oligonucleotide
aagcactcatggcggttgattgtcgctccaggcctgtcgagctgtcgagg

SEQ ID NO: 213411 - DNA, 50 bp, Artificial
  Synthetic oligonucleotide
aagcatggccccaccctaggcgctgccccaacccccgtcagttagcaaca

SEQ ID NO: 213412 - DNA, 50 bp, Artificial
  Synthetic oligonucleotide
aagccggattggctgcagtggtcgggttcatcgttgcgaccgttggcgta

SEQ ID NO: 213413 - DNA, 55 bp, Artificial
  Synthetic oligonucleotide
cccacccttgacagtcttccagacgccacgttacatagcagatgtaacatctcgc

SEQ ID NO: 213414 - DNA, 50 bp, Artificial
  Synthetic oligonucleotide
aaggctaggcccaaacgccgcgtaatcgcagtgctgggggtcactcgaga

SEQ ID NO: 213415 - DNA, 50 bp, Artificial
  Synthetic oligonucleotide
aaggctcgtgggggtagcgaccgcctggggacaaccggaaacgttctcgc

SEQ ID NO: 213416 - DNA, 50 bp, Artificial
  Synthetic oligonucleotide
aagggcgccatgtaggtacggtcaactccccggaagtggtgtaagcgctg

SEQ ID NO: 213417 - DNA, 50 bp, Artificial
  Synthetic oligonucleotide
aaggtagcaccacgaacacgccgtggtccaaggtcgaagttgtgcaccgg

SEQ ID NO: 213418 - DNA, 50 bp, Artificial
  Synthetic oligonucleotide
aaggttctaccccatgcgtccttccgtcgcttgagtgtcgcagcgcgcgg

SEQ ID NO: 213419 - DNA, 50 bp, Artificial
  Synthetic oligonucleotide
aatgacgatcgggagacggaacgcaaggtcgggaggatgcctggccggga

SEQ ID NO: 213420 - DNA, 50 bp, Artificial
  Synthetic oligonucleotide
aatgctgcccggacgtagatgtacgcctggtcgaggctgtgctgggtcgc

SEQ ID NO: 213421 - DNA, 50 bp, Artificial
  Synthetic oligonucleotide
aatggggtccaacactatgccgtcggaccacccactcagtcaaggaccga

SEQ ID NO: 213422 - DNA, 50 bp, Artificial
  Synthetic oligonucleotide
aatgtgcccgagttcggtccgctgagattccgcgtggttcccagccctga

SEQ ID NO: 213423 - DNA, 50 bp, Artificial
  Synthetic oligonucleotide
actcgtacgacgctttggcctcggcgcatgctgacgtagtgtcctcggcc

SEQ ID NO: 213424 - DNA, 55 bp, Artificial
  Synthetic oligonucleotide
catgctgggaactaggacgtccggctagcgaacgccaggaggatcctgagacgct

SEQ ID NO: 213425 - DNA, 50 bp, Artificial
  Synthetic oligonucleotide
actcgtgtggtgcaggtcacttcggtggcttgtcacatcgggtcggccgc

SEQ ID NO: 213426 - DNA, 50 bp, Artificial
  Synthetic oligonucleotide
actgaggtcctacgcagtcaccgccagaccaaccgcggcactgctaacgc

SEQ ID NO: 213427 - DNA, 50 bp, Artificial
  Synthetic oligonucleotide
actgattggggagcttggtgcgactctcagctaccgtcccgctgctcgct

SEQ ID NO: 213428 - DNA, 50 bp, Artificial
  Synthetic oligonucleotide
actgcacaggctaccaatcccaggccccacgccaactccctgaggccgga

SEQ ID NO: 213429 - DNA, 50 bp, Artificial
  Synthetic oligonucleotide
actgcttcagcgcaccgtttgcgacctacgccacgagcctcgagtctgca

SEQ ID NO: 213430 - DNA, 50 bp, Artificial
  Synthetic oligonucleotide
acttgccgtcgggacgtgtcggtaactacacggagcgaagccgtgctgct

SEQ ID NO: 213431 - DNA, 50 bp, Artificial
  Synthetic oligonucleotide
acttggagatgctgcggtgcgctagtgctcggttctcagtgccatgcgga

SEQ ID NO: 213432 - DNA, 50 bp, Artificial
  Synthetic oligonucleotide
agaactccggtggcacccggctctgcttgggaacgatgtactgcgagtca

SEQ ID NO: 213433 - DNA, 50 bp, Artificial
  Synthetic oligonucleotide
agacacttgcgcaaattggccttagggtcgagcgggatggccccgagcac

SEQ ID NO: 213434 - DNA, 50 bp, Artificial
  Synthetic oligonucleotide
agacgtggtgcgtggcatccttcgtggcatcaacctgggcgtacgtatgg

SEQ ID NO: 213435 - DNA, 58 bp, Artificial
  Synthetic oligonucleotide
tgcgttgtgtgcctggactcgcgccttggaaacacgcgggcgcaaacgacgtacggga

SEQ ID NO: 213436 - DNA, 55 bp, Artificial
  Synthetic oligonucleotide
gcgagattacggagccggcacggagtcctgtcactgggcacgggagatctgccgt

SEQ ID NO: 213437 - DNA, 50 bp, Artificial
  Synthetic oligonucleotide
agaggggctaccggcaaccccaaggtccctagggcgacaaggcatccatc

SEQ ID NO: 213438 - DNA, 50 bp, Artificial
  Synthetic oligonucleotide
agagtccccaccgagacctaggcacagaccaatgcggggtggccaagccc

SEQ ID NO: 213439 - DNA, 50 bp, Artificial
  Synthetic oligonucleotide
agcacgacccaagaagcctcgcttacgaactgtcggggtgtgacggagga

SEQ ID NO: 213440 - DNA, 50 bp, Artificial
  Synthetic oligonucleotide
agccagacccaagcagggctccacttctgaccaggatcgctgaccaagga

SEQ ID NO: 213441 - DNA, 50 bp, Artificial
  Synthetic oligonucleotide
agcccatccggaccgtacgcaccgagagctccagcgctgcccatgaagca

SEQ ID NO: 213442 - DNA, 50 bp, Artificial
  Synthetic oligonucleotide
agccgattgagatgggttcgaataggaccctgtgatgagcagccgggggc

SEQ ID NO: 213443 - DNA, 50 bp, Artificial
  Synthetic oligonucleotide
agcgagttcacagaaccgtcacacagcgttgacgcgggcgcatccaacgg

SEQ ID NO: 213444 - DNA, 50 bp, Artificial
  Synthetic oligonucleotide
agcttgaggtttacggcaagcggctaggcgcactcaacgagagcattact

SEQ ID NO: 213445 - DNA, 50 bp, Artificial
  Synthetic oligonucleotide
aggacgtccggctagcgaacgccaggaggatcctgagacgctcctgccaa

SEQ ID NO: 213446 - DNA, 50 bp, Artificial
  Synthetic oligonucleotide
aggcggtcgacgtcattacgcccggttgcggcggcaaacctcaccatgtg

SEQ ID NO: 213447 - DNA, 55 bp, Artificial
  Synthetic oligonucleotide
catccatcagcaagggaggccacggtgcagccttcagagcacctgtcgtcggtac

SEQ ID NO: 213448 - DNA, 50 bp, Artificial
  Synthetic oligonucleotide
aggggcccggattgtccgttcgcagcgccaatcctgttcggtctgtacgg

SEQ ID NO: 213449 - DNA, 50 bp, Artificial
  Synthetic oligonucleotide
aggggtcgagtcggcgcaaactgcccgcctgtccacagcacctggggacc

SEQ ID NO: 213450 - DNA, 50 bp, Artificial
  Synthetic oligonucleotide
aggtcctggctcatggagtgctgcacccttcgtgtggttgtccgatcgta

SEQ ID NO: 213451 - DNA, 50 bp, Artificial
  Synthetic oligonucleotide
aggtgacactccgtcatgggtccgtgctcgtcccggacttctccaggcaa

SEQ ID NO: 213452 - DNA, 50 bp, Artificial
  Synthetic oligonucleotide
agtcgggagagccgatcctggagtgaagttccgtcgggtgtgcaacgcgc

SEQ ID NO: 213453 - DNA, 50 bp, Artificial
  Synthetic oligonucleotide
agtctacgaacgagtgttgcaggcctgggtttccgtcgtcaaggcacccg

SEQ ID NO: 213454 - DNA, 50 bp, Artificial
  Synthetic oligonucleotide
agtgcccgagcgtcggaggtggagcgttcgacccgagggaacggtggatc

SEQ ID NO: 213455 - DNA, 50 bp, Artificial
  Synthetic oligonucleotide
acctgttgcccaagatctgagcctccgggcacccgatgacctagggtctg

SEQ ID NO: 213456 - DNA, 50 bp, Artificial
  Synthetic oligonucleotide
acctttcctgcccaggccgcgtaggcaaccgcgtcgtgccaggtgacatg

SEQ ID NO: 213457 - DNA, 50 bp, Artificial
  Synthetic oligonucleotide
acgaatctgcgctacttggcccgaatgccgggatctcctgccccaagcta

SEQ ID NO: 213458 - DNA, 55 bp, Artificial
  Synthetic oligonucleotide
caggccgtgtgcgatggactggtcatgagagttcaacatctagccctgagtcccc

SEQ ID NO: 213459 - DNA, 50 bp, Artificial
  Synthetic oligonucleotide
acgaccgaaagcccaggaacccgagcgtaggagggaccaccgacactttc

SEQ ID NO: 213460 - DNA, 50 bp, Artificial
  Synthetic oligonucleotide
acgacggttcccccgctgcggtggctgccctccaatgggccgctgagaca

SEQ ID NO: 213461 - DNA, 50 bp, Artificial
  Synthetic oligonucleotide
acgactgtgaagctgcgaacgggactggccgcgttgctcggagttgttct

SEQ ID NO: 213462 - DNA, 50 bp, Artificial
  Synthetic oligonucleotide
acgagcgaaacctccagcataggcgacacgcccacgcatggggataggag

SEQ ID NO: 213463 - DNA, 50 bp, Artificial
  Synthetic oligonucleotide
acgaggattcatggcagcagcgtagagcccggcacggacatcagtcgcca

SEQ ID NO: 213464 - DNA, 50 bp, Artificial
  Synthetic oligonucleotide
acgaggggtggggtgtcgagcggtaaggcaacccgtagagactacaggcg

SEQ ID NO: 213465 - DNA, 50 bp, Artificial
  Synthetic oligonucleotide
acgcagtgcttcgcgcttcgtctggagtgcctgtgctcatctggaccagc

SEQ ID NO: 213466 - DNA, 50 bp, Artificial
  Synthetic oligonucleotide
acgccgctgagagaacggcaacccctgccagcgggtagtcacacaccgct

SEQ ID NO: 213467 - DNA, 50 bp, Artificial
  Synthetic oligonucleotide
acgccggacgggagtcccacacatccgaccctggtagcaattcagtcctg

SEQ ID NO: 213468 - DNA, 50 bp, Artificial
  Synthetic oligonucleotide
acgcgctagcgtctgggggaggtttccccacagttgaaatcttggcggca

SEQ ID NO: 213469 - DNA, 55 bp, Artificial
  Synthetic oligonucleotide
acaggtccccagacacgtccccggaagcattaggcccagggtctacgctcgactc

SEQ ID NO: 213470 - DNA, 50 bp, Artificial
  Synthetic oligonucleotide
acgcggcgggacctctggcactgacgacgtgtagttcggtctcactaccc

SEQ ID NO: 213471 - DNA, 50 bp, Artificial
  Synthetic oligonucleotide
acgctaggaggcccaggtgtatcgccggatggggcttggtgaacgcaagg

SEQ ID NO: 213472 - DNA, 50 bp, Artificial
  Synthetic oligonucleotide
acgctggcatcatccgtgagtcatctgccaatgtcgccgggccaaaccgc

SEQ ID NO: 213473 - DNA, 50 bp, Artificial
  Synthetic oligonucleotide
acgggacagtaacggaccccacgatgccccgccgttccaccgcggataga

SEQ ID NO: 213474 - DNA, 50 bp, Artificial
  Synthetic oligonucleotide
acgggtctcggcccgggtcacagcactggtcacggggacacagtagggaa

SEQ ID NO: 213475 - DNA, 50 bp, Artificial
  Synthetic oligonucleotide
acgggttagggcatcccgatgtcaggtcccgagccgaagtcgtgtcggcg

SEQ ID NO: 213476 - DNA, 50 bp, Artificial
  Synthetic oligonucleotide
acggttcccgggggtgctcggaccgcagggcttgcaggcctagacttccc

SEQ ID NO: 213477 - DNA, 50 bp, Artificial
  Synthetic oligonucleotide
acggttgcgaacccctgaccgcttagttttggtctccggtgtccggaggg

SEQ ID NO: 213478 - DNA, 50 bp, Artificial
  Synthetic oligonucleotide
acgtcctaaccgagcagcggccctggacaccaacttcaggaggttcgtcc

SEQ ID NO: 213479 - DNA, 50 bp, Artificial
  Synthetic oligonucleotide
acgtcctcccggactcccgcgtatcgcccgtcgagaagtgcggtcagtga

SEQ ID NO: 213480 - DNA, 55 bp, Artificial
  Synthetic oligonucleotide
cagcctctgactgatccggtctcgagcggcttctgagcgactgggtctcgatacg

SEQ ID NO: 213481 - DNA, 50 bp, Artificial
  Synthetic oligonucleotide
acgtgtcgaggtgcaaagtaacagtcggacggatcagacgtcgcgccgga

SEQ ID NO: 213482 - DNA, 50 bp, Artificial
  Synthetic oligonucleotide
acgttcacctgaccttcaccccgttcccgcttcggatccctagcctcgcg

SEQ ID NO: 213483 - DNA, 50 bp, Artificial
  Synthetic oligonucleotide
actcaatggggtggggcaaccggggttacgggcgagtagcccgcttctgc

SEQ ID NO: 213484 - DNA, 50 bp, Artificial
  Synthetic oligonucleotide
actccatcggggcgcaacacggaagcggcgtctacacgtccagccaggac

SEQ ID NO: 213485 - DNA, 50 bp, Artificial
  Synthetic oligonucleotide
actccgtggcccagagctcctttgctcgcgacatctccgagctcacagga

SEQ ID NO: 213486 - DNA, 49 bp, Artificial
  Synthetic oligonucleotide
actccgtgttacccggcggacgaaaatagggcccgggaattacctcggc

SEQ ID NO: 213487 - DNA, 55 bp, Artificial
  Synthetic oligonucleotide
cgcttcttgtcacgccacactggggcggatccttctgagctcgttccgggatcac

SEQ ID NO: 213488 - DNA, 55 bp, Artificial
  Synthetic oligonucleotide
cggctattctggaataccgttccgcacaacgcaacaggagggactcggtgttgac

SEQ ID NO: 213489 - DNA, 55 bp, Artificial
  Synthetic oligonucleotide
cgcgacctcaatgcagtacgggatcgactcagtcagcgaactcacgcctagcgag

SEQ ID NO: 213490 - DNA, 55 bp, Artificial
  Synthetic oligonucleotide
cgagccaccacaagacacgcacccctgtgatccgtgtgacgggagtggccactgc

SEQ ID NO: 213491 - DNA, 54 bp, Artificial
  Synthetic oligonucleotide
cgtacgttcgtctcaattacttcgagtggtacgtcccgatccccgtggagattc

SEQ ID NO: 213492 - DNA, 60 bp, Artificial
  Synthetic oligonucleotide
gccctagcggcgccgtactgaagcgctaatgcgcggattgtgtggcatactaaagtgacg

SEQ ID NO: 213493 - DNA, 54 bp, Artificial
  Synthetic oligonucleotide
cgtcaccggaccgtaacactcagtcttcctggggctagacatttcggtaacgcg

SEQ ID NO: 213494 - DNA, 55 bp, Artificial
  Synthetic oligonucleotide
cgtcttccgtcgtccatcccatgtcgctatcatggcaggtagtcctgacgttggg

SEQ ID NO: 213495 - DNA, 55 bp, Artificial
  Synthetic oligonucleotide
acgacggccacctgctaacgtccgcgtcgtactcgggttcgctgaccacagccaa

SEQ ID NO: 213496 - DNA, 55 bp, Artificial
  Synthetic oligonucleotide
acggcgtgcctcgtggtacacccggctggtttcgttgaccgaacgatcgatccac

SEQ ID NO: 213497 - DNA, 55 bp, Artificial
  Synthetic oligonucleotide
cgagacaaccgacggaggtgaaacagcgatgcgcattctcaaccacgagatcccc

SEQ ID NO: 213498 - DNA, 53 bp, Artificial
  Synthetic oligonucleotide
acgaacgagtgttgcaggcctgggtttccgtcgtcaaggcacccggtcgggta

SEQ ID NO: 213499 - DNA, 55 bp, Artificial
  Synthetic oligonucleotide
ctccaaggatccaaatcggggaataggcgatacggcgatagacccaccagacgag

SEQ ID NO: 213500 - DNA, 55 bp, Artificial
  Synthetic oligonucleotide
ctctgacggtcagcgaccctactctcgacatgcacgctttcctcgtgacgcgctg

SEQ ID NO: 213501 - DNA, 55 bp, Artificial
  Synthetic oligonucleotide
ctgaaagtcaacgtatcgacaactagtatatcagtgctagggttccggccatgtc

SEQ ID NO: 213502 - DNA, 55 bp, Artificial
  Synthetic oligonucleotide
cgaaacgctccctgtgccggacgtctgaatgacgatcgggagacggaacgcaagg

SEQ ID NO: 213503 - DNA, 59 bp, Artificial
  Synthetic oligonucleotide
tcgtcgttgaagagctgacgtagctcatcggtcccccagaggtgtccgtacagtccgga

SEQ ID NO: 213504 - DNA, 54 bp, Artificial
  Synthetic oligonucleotide
cctggattttccccacatccgcgggtattacaccgggaatcctatctgtggaac

SEQ ID NO: 213505 - DNA, 55 bp, Artificial
  Synthetic oligonucleotide
cctcgtgattcgatcgttatcccgcccggggtatcagcgcatgccgaagatcggg

SEQ ID NO: 213506 - DNA, 55 bp, Artificial
  Synthetic oligonucleotide
gaaggaagtggcaccgtttcacctgtcccgttgtatggcttcgcaggtgaaccta

SEQ ID NO: 213507 - DNA, 55 bp, Artificial
  Synthetic oligonucleotide
gaccgctcgttgaaggaatctgcaactcctatagagtgcggcgcatcacccgagg

SEQ ID NO: 213508 - DNA, 54 bp, Artificial
  Synthetic oligonucleotide
tcaggtcagggtcccaagcgggtccgtagggctggtgctcccgataaggtcggg

SEQ ID NO: 213509 - DNA, 55 bp, Artificial
  Synthetic oligonucleotide
tcagttcggcgccggttggcacggttcagcacgggaacgggactcgctgacttca

SEQ ID NO: 213510 - DNA, 55 bp, Artificial
  Synthetic oligonucleotide
aggaacgaacgaacccgtgtcgagaccaacgcagtcccctcggcgctcgacagga

SEQ ID NO: 213511 - DNA, 53 bp, Artificial
  Synthetic oligonucleotide
aggaccgagagttccccgggccgttctgtgtcggttccgcacactgtctcggt

SEQ ID NO: 213512 - DNA, 55 bp, Artificial
  Synthetic oligonucleotide
tcgaccatgtcagtcataggttccgagcctatacgggtgggaccgctgtgtatat

SEQ ID NO: 213513 - DNA, 55 bp, Artificial
  Synthetic oligonucleotide
tcgcttacgcagcgagtgctcccgagaacctcgtcgattcgtgtgcacgacgtgc

SEQ ID NO: 213514 - DNA, 59 bp, Artificial
  Synthetic oligonucleotide
agtatgatgcgtcccaacgggagcccaggtcgcctcgtgaacatggttgcgcgaccaag

SEQ ID NO: 213515 - DNA, 55 bp, Artificial
  Synthetic oligonucleotide
aactccgaccttcactgctcgcccttcttccgtgtccagggaatgcggcccacgt

SEQ ID NO: 213516 - DNA, 55 bp, Artificial
  Synthetic oligonucleotide
aacgtggagcgcgatccgagggtctcgctggctctcgaggacggcagaaacccag

SEQ ID NO: 213517 - DNA, 55 bp, Artificial
  Synthetic oligonucleotide
tcgtgcgacggacccacggacggtgccgcctttagccgtggatgcgatttcaact

SEQ ID NO: 213518 - DNA, 55 bp, Artificial
  Synthetic oligonucleotide
tctatgtggtgccccatctcgctgggaccgatgtgccacctaccgtgacggggat

SEQ ID NO: 213519 - DNA, 55 bp, Artificial
  Synthetic oligonucleotide
tctgactcgttaactcccgtgatgtagccccggttcattgtctcgttcgggtccc

SEQ ID NO: 213520 - DNA, 55 bp, Artificial
  Synthetic oligonucleotide
agtcgacgattaggcgcaagttgatggcgttgggaagcgacttcagccggaccag

SEQ ID NO: 213521 - DNA, 55 bp, Artificial
  Synthetic oligonucleotide
tgaacagtgtgaggctcatgatgattctgatcggtcggagcagttgggtgccacc

SEQ ID NO: 213522 - DNA, 53 bp, Artificial
  Synthetic oligonucleotide
tgacgtcgtgttacccggtgggaacacttgtctcacgggtggtcggggccgac

SEQ ID NO: 213523 - DNA, 54 bp, Artificial
  Synthetic oligonucleotide
tggcccaccggtcaggtaccgaacgttcgaccgaagtgggaccgtggagcgatc

SEQ ID NO: 213524 - DNA, 54 bp, Artificial
  Synthetic oligonucleotide
agtcgtcggctgtatgtcgacgacggggtctgtcgcggttgttacgtgttcggg

SEQ ID NO: 213525 - DNA, 58 bp, Artificial
  Synthetic oligonucleotide
tggtccgagacgctggctaggcgccgagacccgttcacgcttgcattccgtacctagg

SEQ ID NO: 213526 - DNA, 55 bp, Artificial
  Synthetic oligonucleotide
ttcttcgtcctgacaggactagcacccgacccgaggggtcagtccgcagacgagt

SEQ ID NO: 213527 - DNA, 55 bp, Artificial
  Synthetic oligonucleotide
ttgggtcggttgacattgacggcgggaggtcgagagggaccgactgactacggtg

SEQ ID NO: 213528 - DNA, 55 bp, Artificial
  Synthetic oligonucleotide
ttgtcatgacttcagcctgccgagccgcccaccccacgaacagtgcgtgctgaac

SEQ ID NO: 213529 - DNA, 55 bp, Artificial
  Synthetic oligonucleotide
ggaaggaacagatcgggcacaaagacccatcaggacggttctcaagcgcgtgcgt

SEQ ID NO: 213530 - DNA, 55 bp, Artificial
  Synthetic oligonucleotide
ggaatccctagagagttccaagtccacaaatggttcgagcggcccaacctgggga

SEQ ID NO: 213531 - DNA, 55 bp, Artificial
  Synthetic oligonucleotide
ggcagcccccgactccgatagacgctccccaatttgcggctgagagggcgaccgg

SEQ ID NO: 213532 - DNA, 55 bp, Artificial
  Synthetic oligonucleotide
ggccacactaggtaccgagtcgcccacgcgacagcgatactttggcatgagaagt

SEQ ID NO: 213533 - DNA, 55 bp, Artificial
  Synthetic oligonucleotide
ggcctatgcagttcgaacctcgcaatcagaggatgctcgtgacacgaatccgtgt

SEQ ID NO: 213534 - DNA, 55 bp, Artificial
  Synthetic oligonucleotide
gggctccacttctgaccaggatcgctgaccaaggatcaaggctcggtagcaagcg

SEQ ID NO: 213535 - DNA, 55 bp, Artificial
  Synthetic oligonucleotide
agcgtcaaccttgtactccaaggcgacgacccgcgtgcaccgagttcagtcgtgg

SEQ ID NO: 213536 - DNA, 58 bp, Artificial
  Synthetic oligonucleotide
cacgtcctcatgcccccgaccccactcgagccgactcacgcgccgccagcccagtcgt

SEQ ID NO: 213537 - DNA, 55 bp, Artificial
  Synthetic oligonucleotide
ggggcgaaccgctagttgacgtgcaggctcattgcgaagtactcatcgagttccc

SEQ ID NO: 213538 - DNA, 51 bp, Artificial
  Synthetic oligonucleotide
gtatgacgaaccccttccgggatcaccaagcgccggcggggaacctttccc

SEQ ID NO: 213539 - DNA, 55 bp, Artificial
  Synthetic oligonucleotide
gtgaaccggcgtctcgaggcactcaaacgacgagagccatcgacattccttgggg

SEQ ID NO: 213540 - DNA, 55 bp, Artificial
  Synthetic oligonucleotide
gtggatttctcttagtggtgagcgaaattccctggacaactagcttagtgctgag

SEQ ID NO: 213541 - DNA, 55 bp, Artificial
  Synthetic oligonucleotide
gtgtcctgacaacgggtcgattcgcggactgggttcgtgagctacgttggtggcc

SEQ ID NO: 213542 - DNA, 55 bp, Artificial
  Synthetic oligonucleotide
gttgcacaccggtctttctgtcggcttccaacggacttcacggcccttgaccagg

SEQ ID NO: 213543 - DNA, 55 bp, Artificial
  Synthetic oligonucleotide
tacttcgcctgacttgccaccgttgttgagccgaactgacttcacgtaggaccac

SEQ ID NO: 213544 - DNA, 55 bp, Artificial
  Synthetic oligonucleotide
taggctaggcgcgaatctcagaccaccctgcctggaggtacgcccggtgtccgct

SEQ ID NO: 213545 - DNA, 55 bp, Artificial
  Synthetic oligonucleotide
tcaaacgtgatcgggcgttgcacaccgggcttgagtcgagtgtcgagccctcgca

SEQ ID NO: 213546 - DNA, 53 bp, Artificial
  Synthetic oligonucleotide
tcaccctcccgtcgggaaacgagtaggtgtcgtggagtgcgaactggaacggg

SEQ ID NO: 213547 - DNA, 57 bp, Artificial
  Synthetic oligonucleotide
cgacgacgcggtgtcagggtcgactcgtggtgtgtccacgggagactgctgagctgg

SEQ ID NO: 213548 - DNA, 55 bp, Artificial
  Synthetic oligonucleotide
tcagccggagcgtctgtagggtcgggttgtgagtgggttgcagcggtggcatgtg

SEQ ID NO: 213549 - DNA, 54 bp, Artificial
  Synthetic oligonucleotide
agctaggcccgacgttagggtggggccgtgcctgcatcgttgaaggaagtcatc

SEQ ID NO: 213550 - DNA, 53 bp, Artificial
  Synthetic oligonucleotide
cgttatcaccggggaccgtgggttcaaggtttcctgaagagccaatgggttga

SEQ ID NO: 213551 - DNA, 54 bp, Artificial
  Synthetic oligonucleotide
ctgacccggaacgtctgagcgctgccgagatcactcacgtgctccgcatcggag

SEQ ID NO: 213552 - DNA, 53 bp, Artificial
  Synthetic oligonucleotide
tccgaccaaggtcggaccccgggtcatggggtggtcgtggcacgaacgcgacc

SEQ ID NO: 213553 - DNA, 53 bp, Artificial
  Synthetic oligonucleotide
gatctcgtcataccgagggatatggacggatctcgaaagaccgcagccgacca

SEQ ID NO: 213554 - DNA, 53 bp, Artificial
  Synthetic oligonucleotide
agcacggtcgttgctgagttcgtccctgacccgagcaaggaatcgacgtatca

SEQ ID NO: 213555 - DNA, 53 bp, Artificial
  Synthetic oligonucleotide
cgaccgcgagaaacgaccaaaaggtgcacgaatcgcggggagaaccggcctca

SEQ ID NO: 213556 - DNA, 53 bp, Artificial
  Synthetic oligonucleotide
aacttcagtttcgtcgcccacaactgatttctcgtcctccagaactacggact

SEQ ID NO: 213557 - DNA, 52 bp, Artificial
  Synthetic oligonucleotide
ggggcattccgggataaccagcaactcaatcctcatgcagcccatagtgcgc

SEQ ID NO: 213558 - DNA, 55 bp, Artificial
  Synthetic oligonucleotide
cctcggaaatctttgactcctcaattctcggtattgccccgaaatgcggtcgcgc

SEQ ID NO: 213559 - DNA, 52 bp, Artificial
  Synthetic oligonucleotide
tcctgcgtttctcacgggttggcccgcgagaggcagggttggcctaccaaat

SEQ ID NO: 213560 - DNA, 52 bp, Artificial
  Synthetic oligonucleotide
actggatcccgaaatccgagcaccaagaattcctcctggacgatacgtaaag

SEQ ID NO: 213561 - DNA, 52 bp, Artificial
  Synthetic oligonucleotide
atccgactagccggaccaccacgagtgggtcatccgactttgagatgcttcc

SEQ ID NO: 213562 - DNA, 51 bp, Artificial
  Synthetic oligonucleotide
gaaccgccagctactcccggctcatccactcccgtcgctgccagtttgtga

SEQ ID NO: 213563 - DNA, 51 bp, Artificial
  Synthetic oligonucleotide
atacccctgcggggtatgaacagggccggtcggccgatcgttcgcgggccc

SEQ ID NO: 213564 - DNA, 51 bp, Artificial
  Synthetic oligonucleotide
agcccctgcgctgagggtcaggatcgtcgaggaggctcaacgtctcgtatc

SEQ ID NO: 213565 - DNA, 51 bp, Artificial
  Synthetic oligonucleotide
tgggcctcggtcgcagcaggtcactcctcgagcggaacgacgatgggcgtc

SEQ ID NO: 213566 - DNA, 51 bp, Artificial
  Synthetic oligonucleotide
cgagtcccgccatcgttaggtggaaacctagcccgaatacgtgtcagttgt

SEQ ID NO: 213567 - DNA, 51 bp, Artificial
  Synthetic oligonucleotide
gcgacgaatgtgtcggctcagccgcggctcatgtgtcctgaggatggcaac

SEQ ID NO: 213568 - DNA, 51 bp, Artificial
  Synthetic oligonucleotide
caccgcgtagatccgtacgtcgaagctggtctccatcggagcgggtgcctt

SEQ ID NO: 213569 - DNA, 49 bp, Artificial
  Synthetic oligonucleotide
tacagggcccgttacgaggttcgtaacgccccccgtaacgggccctgta

SEQ ID NO: 213570 - DNA, 56 bp, Artificial
  Synthetic oligonucleotide
ggtcaccgtatcccgcgtggtgccgtctctacggcgacactgccccccgtgcccac

SEQ ID NO: 213571 - DNA, 53 bp, Artificial
  Synthetic oligonucleotide
gtggacacgtcagtacggcagcacgggatgcaggccagggacgattccgcctg

SEQ ID NO: 213572 - DNA, 52 bp, Artificial
  Synthetic oligonucleotide
tagcaggtggaaccgttcacagaccagggtcttctccgggccaatgaattcg

SEQ ID NO: 213573 - DNA, 52 bp, Artificial
  Synthetic oligonucleotide
tacgagtggcaggtggacccgtagaagaggcccaggcgcatgcctgggcttc

SEQ ID NO: 213574 - DNA, 52 bp, Artificial
  Synthetic oligonucleotide
tactgaatcaggtgatgctaaccacgctggtggtcttgggtcccttcgggga

SEQ ID NO: 213575 - DNA, 52 bp, Artificial
  Synthetic oligonucleotide
gtcggcgaagagacgtgctctcgcgaccaccggaaggcacacggacgtcatt

SEQ ID NO: 213576 - DNA, 52 bp, Artificial
  Synthetic oligonucleotide
tacgtgcgaaccacctagaccatccttccgtctgctccgtcggcgaactgtg

SEQ ID NO: 213577 - DNA, 52 bp, Artificial
  Synthetic oligonucleotide
gaacggtagtgtcgacgtggccacaaagcaatgtgcatacatcgataagggg

SEQ ID NO: 213578 - DNA, 51 bp, Artificial
  Synthetic oligonucleotide
atttcgtcccaaccgtctcgggttccgttgaaaacgcagccatgttaaccc

SEQ ID NO: 213579 - DNA, 52 bp, Artificial
  Synthetic oligonucleotide
aggtcgctacagtgcccagacatgacgaagggccgggaggtcgcaactcccg

SEQ ID NO: 213580 - DNA, 51 bp, Artificial
  Synthetic oligonucleotide
agtcaaagaggtacggctgacaccttgcatcaacgcacctctgcctgctga

SEQ ID NO: 213581 - DNA, 48 bp, Artificial
  Synthetic oligonucleotide
gggtgcgttacagggcccgttacgaggttcgtaacgccccccgtaacg

SEQ ID NO: 213582 - DNA, 50 bp, Artificial
  Synthetic oligonucleotide
acacggctccgtccgatcaggacgctcagctccgcccatcgaaaactctg

SEQ ID NO: 213583 - DNA, 50 bp, Artificial
  Synthetic oligonucleotide
acaatgccatgcgggggtttacctgcaacgcttcggaacgcgggttttgc

SEQ ID NO: 213584 - DNA, 50 bp, Artificial
  Synthetic oligonucleotide
acaacgcctcagctcgccctagggtggcttccgaaagccgtatccccgca

SEQ ID NO: 213585 - DNA, 50 bp, Artificial
  Synthetic oligonucleotide
aatgcggggctctgcgctgatgggacccctccctcatgtttcgtcgggtt

SEQ ID NO: 213586 - DNA, 50 bp, Artificial
  Synthetic oligonucleotide
aatgccaggcgattaccgacctgtgtcgggagtggcgatcagtggcggag

SEQ ID NO: 213587 - DNA, 50 bp, Artificial
  Synthetic oligonucleotide
aaagccggtacggcagggccaggtctagggtcggaagcaggagtgcacga

SEQ ID NO: 213588 - DNA, 50 bp, Artificial
  Synthetic oligonucleotide
aacccgcggataccggagaccgccaactctgcgacgtacaagaaacgctc

SEQ ID NO: 213589 - DNA, 50 bp, Artificial
  Synthetic oligonucleotide
aacgaccctttcgtgaacccatcgcccccgtctgcgcgtcaaaccgttag

SEQ ID NO: 213590 - DNA, 50 bp, Artificial
  Synthetic oligonucleotide
aagtccgcgaccccaagaacgtgacttcgctgctcgtccggcacagccgt

SEQ ID NO: 213591 - DNA, 50 bp, Artificial
  Synthetic oligonucleotide
aacgtggctcgactaatgtgcatcccagagaaggggcatgcggaaccccg

SEQ ID NO: 213592 - DNA, 55 bp, Artificial
  Synthetic oligonucleotide
ggggtgtctctgagtcaccccgtttcgagggcggctacaccgtgagcggggtgtc

SEQ ID NO: 213593 - DNA, 50 bp, Artificial
  Synthetic oligonucleotide
tgacttccgataagtcaaccttctaggaagccagaccccacggcgagacg

SEQ ID NO: 213594 - DNA, 50 bp, Artificial
  Synthetic oligonucleotide
aagcctgtgatcaccgtagtgttcgcggccaggagagtgcgctgctctct

SEQ ID NO: 213595 - DNA, 50 bp, Artificial
  Synthetic oligonucleotide
aaggcacacgacgcgggtgctccccacggaccgacagccccactaacgtc

SEQ ID NO: 213596 - DNA, 50 bp, Artificial
  Synthetic oligonucleotide
aaggttgcccctcgggctatctacgaccgcactcccagcaaggatgcgct

SEQ ID NO: 213597 - DNA, 50 bp, Artificial
  Synthetic oligonucleotide
aaggcacgacccggtcctacggtgacaccctgccgtatgtgtccgtgggg

SEQ ID NO: 213598 - DNA, 50 bp, Artificial
  Synthetic oligonucleotide
actagctgacgttggcccggagcacagccacggcgagagtttcgaccccc

SEQ ID NO: 213599 - DNA, 50 bp, Artificial
  Synthetic oligonucleotide
actacactccttcagcgcgcaacagtcccacggcaagggacacggagggg

SEQ ID NO: 213600 - DNA, 50 bp, Artificial
  Synthetic oligonucleotide
acgtgccgcgtcactccggggtagaggtgatgccgaaggacgactcgata

SEQ ID NO: 213601 - DNA, 50 bp, Artificial
  Synthetic oligonucleotide
acggtgacaccctgccgtatgtgtccgtggggccgactcctcacaccgag

SEQ ID NO: 213602 - DNA, 50 bp, Artificial
  Synthetic oligonucleotide
acgggtgcgagaaccgtgcgggccgggctaggtcagttgaggatcaagcc

SEQ ID NO: 213603 - DNA, 54 bp, Artificial
  Synthetic oligonucleotide
cacgctggtggtcttgggtcccttcggggagctttgacttactggtctgggaac

SEQ ID NO: 213604 - DNA, 50 bp, Artificial
  Synthetic oligonucleotide
acggggtaggggcggatcaggggtcggtccaacaccggtgactctcctac

SEQ ID NO: 213605 - DNA, 50 bp, Artificial
  Synthetic oligonucleotide
acgggcctctcacccgtgccatgagtcggggaccagcgcaccaggccgtc

SEQ ID NO: 213606 - DNA, 50 bp, Artificial
  Synthetic oligonucleotide
acggctcagggcgacctacatcgtgggcttgtggcacgaagtcgacggag

SEQ ID NO: 213607 - DNA, 50 bp, Artificial
  Synthetic oligonucleotide
acggaccagaggggttacggggttcgggcaggctcatggcaccaaccgta

SEQ ID NO: 213608 - DNA, 50 bp, Artificial
  Synthetic oligonucleotide
acgcctgtgcccacgtttacctgtcctttcgcgtcacggggatcagctca

SEQ ID NO: 213609 - DNA, 50 bp, Artificial
  Synthetic oligonucleotide
acgcctgtctcaaaacgaccctttcgtgaacccatcgcccccgtctgcgc

SEQ ID NO: 213610 - DNA, 50 bp, Artificial
  Synthetic oligonucleotide
acgccatgggagacgttccggtccagcggagagttccactagcgtgaacg

SEQ ID NO: 213611 - DNA, 50 bp, Artificial
  Synthetic oligonucleotide
acgatgcggcagctcactgcgggcggctggtccctttggtccgggcggaa

SEQ ID NO: 213612 - DNA, 50 bp, Artificial
  Synthetic oligonucleotide
accttcgggcaggctccccaaagtccgggatttcagtaacccccgagact

SEQ ID NO: 213613 - DNA, 50 bp, Artificial
  Synthetic oligonucleotide
acctcctcgtcactggctgatcgggggaagacctcggaacgtcccgaacc

SEQ ID NO: 213614 - DNA, 60 bp, Artificial
  Synthetic oligonucleotide
gggcaggacccgtaatgcagtaattccgtggacacgtcagtacggcagcacgggatgcag

SEQ ID NO: 213615 - DNA, 50 bp, Artificial
  Synthetic oligonucleotide
acccgacgtgggacccttcaccggccgacagtactgtgctccacatcacg

SEQ ID NO: 213616 - DNA, 50 bp, Artificial
  Synthetic oligonucleotide
accccctgctgtcctggtcgcaccggggtcgtgtggagtgcgggccgcgg

SEQ ID NO: 213617 - DNA, 50 bp, Artificial
  Synthetic oligonucleotide
acaggtgcggaacgttactgcccggtccacaaaagcccgaatgtgcggct

SEQ ID NO: 213618 - DNA, 50 bp, Artificial
  Synthetic oligonucleotide
acacgtctggctgcgctgagccgccctgcttcgctcctgcaccgcctaag

SEQ ID NO: 213619 - DNA, 57 bp, Artificial
  Synthetic oligonucleotide
actgtcgtccacgaaatcgctccgattattcgggcagccaccgcccgctatacgaag

SEQ ID NO: 213620 - DNA, 50 bp, Artificial
  Synthetic oligonucleotide
agacggcgttacgggccgttgttacgaggctgtctcgacccccgttacgg

SEQ ID NO: 213621 - DNA, 58 bp, Artificial
  Synthetic oligonucleotide
ggaagccagaccccacggcgagacgaagcgtctcgccagcagggcacaagaaagcccc

SEQ ID NO: 213622 - DNA, 55 bp, Artificial
  Synthetic oligonucleotide
aggtgatgctaaccacgctggtggtcttgggtcccttcggggagctttgacttac

SEQ ID NO: 213623 - DNA, 58 bp, Artificial
  Synthetic oligonucleotide
tacgaaggccgcccgagagcgcgggcagagccgcggcgcgttcgcaaccgaggtcacc

SEQ ID NO: 213624 - DNA, 48 bp, Artificial
  Synthetic oligonucleotide
cccggggacgcgtccggtacgaccacggggtttctgtctccgggaccc

SEQ ID NO: 213625 - DNA, 60 bp, Artificial
  Synthetic oligonucleotide
tacgtcagttggcctgttgtgctctaggcacattggtagtacaactcattagacgtagta

SEQ ID NO: 213626 - DNA, 60 bp, Artificial
  Synthetic oligonucleotide
ccgcccgaagtagccacatgggtgcagtgtgtagctatacgctcgctccgtgttcactac

SEQ ID NO: 213627 - DNA, 59 bp, Artificial
  Synthetic oligonucleotide
ctcggatcgatggacgcaacgttccgttgcgcgttccagtgtagcaacgttccgttgca

SEQ ID NO: 213628 - DNA, 50 bp, Artificial
  Synthetic oligonucleotide
ttacgggccgttgttacgaggctgtctcgacccccgttacgggggtgcgt

SEQ ID NO: 213629 - DNA, 54 bp, Artificial
  Synthetic oligonucleotide
aacgactcggctcaaccccagtggtggccgaccccaggaacagtgacgcgggtg

SEQ ID NO: 213630 - DNA, 56 bp, Artificial
  Synthetic oligonucleotide
cgaatcgattcgatgaacgggcaccatggtaggaaccacacccccgtgtgacaacc

SEQ ID NO: 213631 - DNA, 54 bp, Artificial
  Synthetic oligonucleotide
tggaggggggttcggcggccgaccgttacagcaccgcgtaaccgcaggccagac

SEQ ID NO: 213632 - DNA, 57 bp, Artificial
  Synthetic oligonucleotide
cgcgcggacaccgaggtctcgcggttctggccacgcccggggccggagtagtgcgca

SEQ ID NO: 213633 - DNA, 56 bp, Artificial
  Synthetic oligonucleotide
tcgggtacgtccggtgtcaaaccgggggcaaacgatgtctatgatgtccggtatgc

SEQ ID NO: 213634 - DNA, 59 bp, Artificial
  Synthetic oligonucleotide
cagacagtgcggctcccgagtcacagcaggacctcagcgaccacgagacgcacctagaa

SEQ ID NO: 213635 - DNA, 55 bp, Artificial
  Synthetic oligonucleotide
accgtgcagaaccggtctcgggctcctctaccggctccggttcgtgttctgcctg

SEQ ID NO: 213636 - DNA, 58 bp, Artificial
  Synthetic oligonucleotide
tgcgactaatgtcgccgtataactacaacgtcaggccgctacaccgaaggaagggcag

SEQ ID NO: 213637 - DNA, 58 bp, Artificial
  Synthetic oligonucleotide
gcgtgcgcgagcgtggccacggggagccccgcagcgcggatgatcacgtgagtggcac

SEQ ID NO: 213638 - DNA, 53 bp, Artificial
  Synthetic oligonucleotide
ctctgagtcacccaattccccgcttgtaccccccgcttcaccatcctcccccc

SEQ ID NO: 213639 - DNA, 55 bp, Artificial
  Synthetic oligonucleotide
ctgttcgcaggtaggggatttcggttgacgtgttcgtgacgtgtggggaaggaga

SEQ ID NO: 213640 - DNA, 58 bp, Artificial
  Synthetic oligonucleotide
cccgaggattaaccgtcgaatttcagggattgatcatggcggagcggtttgtgctgtc

SEQ ID NO: 213641 - DNA, 55 bp, Artificial
  Synthetic oligonucleotide
ggcacaagaaagcccccgcaaccatccgttgcgggggctcggttcagtaggtgct

SEQ ID NO: 213642 - DNA, 50 bp, Artificial
  Synthetic oligonucleotide
ccgggtgaaagtcctgttcggaggggctacccgcaattaaccgaacctgg

SEQ ID NO: 213643 - DNA, 55 bp, Artificial
  Synthetic oligonucleotide
ctgcgtggcggatactggctacagttggtagcgcgaaggacaccctcagggacgt

SEQ ID NO: 213644 - DNA, 55 bp, Artificial
  Synthetic oligonucleotide
gcagtaattccgtggacacgtcagtacggcagcacgggatgcaggccagggacga

SEQ ID NO: 213645 - DNA, 55 bp, Artificial
  Synthetic oligonucleotide
gcacagcaacaagtcagccgtctacatcaacaacctccttgggcgtggcacacga

SEQ ID NO: 213646 - DNA, 58 bp, Artificial
  Synthetic oligonucleotide
ccatagcaaaggtcgaacaccgcgcgaaccatgttttccgccggtggaagacatggca

SEQ ID NO: 213647 - DNA, 55 bp, Artificial
  Synthetic oligonucleotide
gcccgagtatggcgtgtcgtagggacatgggtagaggatagcgccaatatatgcg

SEQ ID NO: 213648 - DNA, 54 bp, Artificial
  Synthetic oligonucleotide
ctctcccgtaccacgttgttctaatggttacacgatatcgcctaagagtccggg

SEQ ID NO: 213649 - DNA, 55 bp, Artificial
  Synthetic oligonucleotide
gcctacttgcacaacctctggttgtgtccggtggatcgtgcggttgtttgaccac

SEQ ID NO: 213650 - DNA, 55 bp, Artificial
  Synthetic oligonucleotide
cttaggtatgcctcaactaagggcacacctcaatgtacgtcaaactctcgtcccc

SEQ ID NO: 213651 - DNA, 55 bp, Artificial
  Synthetic oligonucleotide
gacccctgaggcgttaccggagtgacatctccgcgggtcccacgacccacaggag

SEQ ID NO: 213652 - DNA, 55 bp, Artificial
  Synthetic oligonucleotide
gcgggcagagccgcggcgcgttcgcaaccgaggtcaccgagatgggacacgttcc

SEQ ID NO: 213653 - DNA, 55 bp, Artificial
  Synthetic oligonucleotide
ctcgggctggcgattcaggcacgcacacagaaccgatcaatggagacgcgtggac

SEQ ID NO: 213654 - DNA, 55 bp, Artificial
  Synthetic oligonucleotide
gaaggtaccggctagacgttgatgtgttcccgagtagcgcggagcccgtgaaagt

SEQ ID NO: 213655 - DNA, 55 bp, Artificial
  Synthetic oligonucleotide
gcgtatgagccccgacgacagattccctcttattggattgcattaacggagcaaa

SEQ ID NO: 213656 - DNA, 55 bp, Artificial
  Synthetic oligonucleotide
ttgttccgttttgcaacggccaccggaaggagagcgtgtatgcccagcacagggg

SEQ ID NO: 213657 - DNA, 60 bp, Artificial
  Synthetic oligonucleotide
gtgtctctgagtcacctcgcggggtgtcttgaagtcacctcgcggggtgtctctgagtca

SEQ ID NO: 213658 - DNA, 55 bp, Artificial
  Synthetic oligonucleotide
ttctcccacactgattgatcgcccgaccatcagggtcattcaccgtggcgccccg

SEQ ID NO: 213659 - DNA, 55 bp, Artificial
  Synthetic oligonucleotide
tgtgtagacggccttcttcttgcgatcgctgcgggacttgggcacggtcgctgct

SEQ ID NO: 213660 - DNA, 55 bp, Artificial
  Synthetic oligonucleotide
tgtcgcaccgtgcggggtatcatggagacggttcttcagacgcctgtagccggtc

SEQ ID NO: 213661 - DNA, 55 bp, Artificial
  Synthetic oligonucleotide
tgagagaccgctcctggctcgtgttcgcacgatcagggaacagccctaggcgtgt

SEQ ID NO: 213662 - DNA, 50 bp, Artificial
  Synthetic oligonucleotide
tcgaaagggttcgtccggagggttcgcggtacctccccagaggtaaccca

SEQ ID NO: 213663 - DNA, 55 bp, Artificial
  Synthetic oligonucleotide
tcccgacagcacttggtcgtgtaacgctcggtgttgccgtgtgtggcccggcagg

SEQ ID NO: 213664 - DNA, 55 bp, Artificial
  Synthetic oligonucleotide
tccatgtcagaacgcctcctggggaaggcccatgcgctcccagagcgctcggtgt

SEQ ID NO: 213665 - DNA, 55 bp, Artificial
  Synthetic oligonucleotide
tccatcacgtggcgtggaccgccgacaaccgtccagtcgaggtcactgtccacgt

SEQ ID NO: 213666 - DNA, 55 bp, Artificial
  Synthetic oligonucleotide
tcatgtcgcggacggggctggaagtccgtccgccctcggcgcttggtcgtcgttc

SEQ ID NO: 213667 - DNA, 55 bp, Artificial
  Synthetic oligonucleotide
tcagtgacaactttcgtccttcgtgtgacagacggcctccgtgcaccgtccggag

SEQ ID NO: 213668 - DNA, 58 bp, Artificial
  Synthetic oligonucleotide
gagaaccggagtcagctaccgggcgtcgacctacgtcagttggcctgttgtgctctag

SEQ ID NO: 213669 - DNA, 54 bp, Artificial
  Synthetic oligonucleotide
gtttcaccggttctgttctaccaccaggaccatccactgaaggcggttaccacc

SEQ ID NO: 213670 - DNA, 55 bp, Artificial
  Synthetic oligonucleotide
gttccgttgcgcgttccagtgtagcaacgttccgttgcactcttaggagggcacc

SEQ ID NO: 213671 - DNA, 54 bp, Artificial
  Synthetic oligonucleotide
gttcccagaccagtaagtcaaagctccccgaagggacccaagaccaccagcgtg

SEQ ID NO: 213672 - DNA, 55 bp, Artificial
  Synthetic oligonucleotide
gtgtcttgtccgcacggcaaaggtgtcccttcacacggatacccttgtgcgagga

SEQ ID NO: 213673 - DNA, 55 bp, Artificial
  Synthetic oligonucleotide
gtgaccggaacgtgatgttcggaccctgctgtcgggattggaaacatcccatgac

SEQ ID NO: 213674 - DNA, 55 bp, Artificial
  Synthetic oligonucleotide
gtcgctgtcccatgacgggatctccttgagtgtgtttgtgacgcacccagcgcag

SEQ ID NO: 213675 - DNA, 55 bp, Artificial
  Synthetic oligonucleotide
gtccagcaccggccaactcctatgtgattcgcttcagctactggtccccgggagg

SEQ ID NO: 213676 - DNA, 55 bp, Artificial
  Synthetic oligonucleotide
gggtcaaggaaactcctctgagctgcgttgacatccgtttgacgtcacgtcgggc

SEQ ID NO: 213677 - DNA, 55 bp, Artificial
  Synthetic oligonucleotide
ggggtccatcaggttctgttggcgcggcgaacgaatccgtaacttctaggcaaca

SEQ ID NO: 213678 - DNA, 55 bp, Artificial
  Synthetic oligonucleotide
ggggagggacggcctcctgggaacgaagaccagtgtcagtgagccgctgagaact

SEQ ID NO: 213679 - DNA, 56 bp, Artificial
  Synthetic oligonucleotide
gtctgacatttttctgacccggttctgacttccgataagtcaaccttctaggaagc

SEQ ID NO: 213680 - DNA, 55 bp, Artificial
  Synthetic oligonucleotide
gggctcctgaaccggttcacatgcgagcatgcaccagctaccaggagcgctagtg

SEQ ID NO: 213681 - DNA, 55 bp, Artificial
  Synthetic oligonucleotide
ggcggtaaccatctgataacgggtgtgtgttttcggctccgcgcggatcctgtta

SEQ ID NO: 213682 - DNA, 55 bp, Artificial
  Synthetic oligonucleotide
ggaatccgtccgaattccggtgattcgtaagcttttaatggtgacagagcgggtc

SEQ ID NO: 213683 - DNA, 55 bp, Artificial
  Synthetic oligonucleotide
gctctaggcacattggtagtacaactcattagacgtagtacgtcaagtaggctgg

SEQ ID NO: 213684 - DNA, 55 bp, Artificial
  Synthetic oligonucleotide
gcgtgaacggtgtcgttacctcgtagttattctttgcgctccggatgctagcagc

SEQ ID NO: 213685 - DNA, 55 bp, Artificial
  Synthetic oligonucleotide
acggcctcctcagggtcgtctaaggagaggagggtctgcacatcccgcacaattt

SEQ ID NO: 213686 - DNA, 55 bp, Artificial
  Synthetic oligonucleotide
aataacccacacagggacctaagctgtggataacctcgtccctgcgtgagagccg

SEQ ID NO: 213687 - DNA, 54 bp, Artificial
  Synthetic oligonucleotide
actcaaattgtgtcccggtgtgttctaggggtaaccggatggaaggatgtccgc

SEQ ID NO: 213688 - DNA, 55 bp, Artificial
  Synthetic oligonucleotide
aggcatccggtcagggactgtcctggtatcgcgggccggcagactggggtctgga

SEQ ID NO: 213689 - DNA, 53 bp, Artificial
  Synthetic oligonucleotide
agtgcggcctaagtttgggacacctaaccttattaaccttcagaaaggcttgc

SEQ ID NO: 213690 - DNA, 57 bp, Artificial
  Synthetic oligonucleotide
gcacgttgcgggggctcctcttttttgcaacgttccgttgcgcctactgcgacagaa

SEQ ID NO: 213691 - DNA, 55 bp, Artificial
  Synthetic oligonucleotide
atgacccctcgagaatatgcccgcttgatgggagcaggcgagtataagcttgacg

SEQ ID NO: 213692 - DNA, 52 bp, Artificial
  Synthetic oligonucleotide
atggtacccaacgtgccaacccgtacccctgcgactgtcgccgggggtgccc

SEQ ID NO: 213693 - DNA, 55 bp, Artificial
  Synthetic oligonucleotide
cactcgaccggtcaagtagttgagtgaacatcacaaggaaggttgttcagatggc

SEQ ID NO: 213694 - DNA, 55 bp, Artificial
  Synthetic oligonucleotide
cagggacgattccgcctgatatcggacccagggcggaggatgaggacatggacac

SEQ ID NO: 213695 - DNA, 55 bp, Artificial
  Synthetic oligonucleotide
catcgtgcttgctcacgtcatccctccgtcagaacaggttgttgagcgtgggggt

SEQ ID NO: 213696 - DNA, 55 bp, Artificial
  Synthetic oligonucleotide
ccaacccctcagtgactccggctgagcaggactaatcccacgactgtcgcggaga

SEQ ID NO: 213697 - DNA, 55 bp, Artificial
  Synthetic oligonucleotide
ccaagaactctccggggcacgattccgggtcacaggagggagcgtggaacgtgaa

SEQ ID NO: 213698 - DNA, 55 bp, Artificial
  Synthetic oligonucleotide
ccatgtccttaccgatcctgaccggtcatcaagtcgatattcacgtcacttaacc

SEQ ID NO: 213699 - DNA, 53 bp, Artificial
  Synthetic oligonucleotide
ctccgttgtcgtgttcatcccggcatgttaggaaccttccccgagggcggacg

SEQ ID NO: 213700 - DNA, 52 bp, Artificial
  Synthetic oligonucleotide
cgggacatgagccttccttcggtgtggtgttccccggtttccctgcttcccc

SEQ ID NO: 213701 - DNA, 58 bp, Artificial
  Synthetic oligonucleotide
ggtgaaacgggcaggacccgtaatgcagtaattccgtggacacgtcagtacggcagca

SEQ ID NO: 213702 - DNA, 55 bp, Artificial
  Synthetic oligonucleotide
ccggaggtctccctgaaacaccccgcgaatccgcgacatatcttgagttcgccgc

SEQ ID NO: 213703 - DNA, 55 bp, Artificial
  Synthetic oligonucleotide
cgagcggaagaacggttcgcataggtcgatgagcccacggggtagaatgggtgac

SEQ ID NO: 213704 - DNA, 55 bp, Artificial
  Synthetic oligonucleotide
cgcggtcgcgaaatgctttcgcgttatggccacgcggagcgagggagtatggcta

SEQ ID NO: 213705 - DNA, 55 bp, Artificial
  Synthetic oligonucleotide
cgggaaggctccattcgaacacacatccgaatagggaccggcatatccgggcatt

SEQ ID NO: 213706 - DNA, 55 bp, Artificial
  Synthetic oligonucleotide
cggacgtgttaccgggtctatggaccgctcatcctggagatcaggttccatctcg

SEQ ID NO: 213707 - DNA, 54 bp, Artificial
  Synthetic oligonucleotide
ggtgatactcagaccgacactaacctcacggtcggagtcgtggaagagacaacc

SEQ ID NO: 213708 - DNA, 54 bp, Artificial
  Synthetic oligonucleotide
actcatttctctgaacgctacggccgtgaagaggaggaccggtttattgctgag

SEQ ID NO: 213709 - DNA, 52 bp, Artificial
  Synthetic oligonucleotide
ccccggtgcggagtgcgtttctttgacgcccttcccctatccgatccccgta

SEQ ID NO: 213710 - DNA, 53 bp, Artificial
  Synthetic oligonucleotide
tcagtacggcagcacgggatgcaggccagggacgattccgcctgatatcggac

SEQ ID NO: 213711 - DNA, 53 bp, Artificial
  Synthetic oligonucleotide
tccgcaggaggtttcccaatgtcctcaagtaaccccttagaaaggcgtgtccc

SEQ ID NO: 213712 - DNA, 57 bp, Artificial
  Synthetic oligonucleotide
attagagtcatcttcataaagaaatcccgcaaatctttctcgtaagcccgccgagta

SEQ ID NO: 213713 - DNA, 56 bp, Artificial
  Synthetic oligonucleotide
gggtgctgtgggtgtaggttgtgcccgactcggactaacagaaagacctaaagcca

SEQ ID NO: 213714 - DNA, 56 bp, Artificial
  Synthetic oligonucleotide
ccgagccaattagatcaacgctcctacagtctgccaccacgtttaggtttggttat

SEQ ID NO: 213715 - DNA, 60 bp, Artificial
  Synthetic oligonucleotide
gcattatacttacacgactgcataggtcgagatgaccttagagaacgccaaggtcattat

SEQ ID NO: 213716 - DNA, 60 bp, Artificial
  Synthetic oligonucleotide
gcatatatgatgctaaaccagttcattgcatagatgcagtagattgggagttgcaatgca

SEQ ID NO: 213717 - DNA, 60 bp, Artificial
  Synthetic oligonucleotide
gcataaaatatgccatgtctgcaatactacaatctgttgcagacatacacgatgacctag

SEQ ID NO: 213718 - DNA, 56 bp, Artificial
  Synthetic oligonucleotide
gcactaggattgacggtaaattacgtgattattcgcggcgaaaaactccaactcaa

SEQ ID NO: 213719 - DNA, 57 bp, Artificial
  Synthetic oligonucleotide
gcaatcattctaggtgggggagcgggtacaagactgtaccccctgactaagctcagg

SEQ ID NO: 213720 - DNA, 58 bp, Artificial
  Synthetic oligonucleotide
gatttacaactgcctgaatgatgttctctagggtcattaattaggaaatccggcttac

SEQ ID NO: 213721 - DNA, 59 bp, Artificial
  Synthetic oligonucleotide
gattcaccttaaaggtgaatcgcactgattcctgtggactgcctcgtaaacacccactg

SEQ ID NO: 213722 - DNA, 60 bp, Artificial
  Synthetic oligonucleotide
gattagataatgtctatacttgtatagatagcagtataaactattgtctatattagtgtc

SEQ ID NO: 213723 - DNA, 59 bp, Artificial
  Synthetic oligonucleotide
cctgatattggtacgattccggtatcaggactgatgccccattaccgaggtaggcatac

SEQ ID NO: 213724 - DNA, 60 bp, Artificial
  Synthetic oligonucleotide
gggtagacagtcgccgtgtgttgactgcgcgtactcagatagacagccgcatacattacc

SEQ ID NO: 213725 - DNA, 58 bp, Artificial
  Synthetic oligonucleotide
gatagtcgtgctactaccagatggttagaagaaagacagttaggtaagataaccagga

SEQ ID NO: 213726 - DNA, 60 bp, Artificial
  Synthetic oligonucleotide
gagcgccacacccgaacgagctagtgaaggacacaaggcaatcctctcttaaatcgccag

SEQ ID NO: 213727 - DNA, 60 bp, Artificial
  Synthetic oligonucleotide
cgatgctctggtgtctgagtctgatgaacccatacccatacatggggatttacacagcat

SEQ ID NO: 213728 - DNA, 57 bp, Artificial
  Synthetic oligonucleotide
actgggtatcgtgccacacgaaatgcgccgtgatgagttaactacactaaacctact

SEQ ID NO: 213729 - DNA, 60 bp, Artificial
  Synthetic oligonucleotide
tctccgccagagtagtagtacacgcctgcataaccccgcaagtctccactacccagacta

SEQ ID NO: 213730 - DNA, 58 bp, Artificial
  Synthetic oligonucleotide
ttccccagtttaaaggatgagtgtgaaattgcaccggaatggctgggtaagctggcta

SEQ ID NO: 213731 - DNA, 48 bp, Artificial
  Synthetic oligonucleotide
aactctactaaaaacctttaacaccgtaagattagtgtagtttaaccg

SEQ ID NO: 213732 - DNA, 60 bp, Artificial
  Synthetic oligonucleotide
taggcagactaacaatgttgcagccctaaggtaagcaggtggtatttctcggagactgcg

SEQ ID NO: 213733 - DNA, 60 bp, Artificial
  Synthetic oligonucleotide
actgtgagtttagcgctagccattagtgtcaagcgcatggctacccaaaatgccttagta

SEQ ID NO: 213734 - DNA, 60 bp, Artificial
  Synthetic oligonucleotide
tctgtcgcagaataaccatgcacaatctcgcaggttttttgcgcgacatggctctattaa

SEQ ID NO: 213735 - DNA, 56 bp, Artificial
  Synthetic oligonucleotide
caataaatggctgccgaggtagggtttgaacctacaaactcctgtttcagagacag

SEQ ID NO: 213736 - DNA, 60 bp, Artificial
  Synthetic oligonucleotide
tctttgtcatgcggaatcttgatggtcagcgtaacggtgcattcttacggggaactagag

SEQ ID NO: 213737 - DNA, 55 bp, Artificial
  Synthetic oligonucleotide
tgaaaatagcggggtttttccctaccatgtactctgctagtaactctttagacca

SEQ ID NO: 213738 - DNA, 60 bp, Artificial
  Synthetic oligonucleotide
tgaccaagctgaatcagggtcaagtcgggattagattcctgttaacatcgcgtagttgcg

SEQ ID NO: 213739 - DNA, 57 bp, Artificial
  Synthetic oligonucleotide
aactggcgattccagtctcgaccagtcagcacttccctctaaacccggtggagagcg

SEQ ID NO: 213740 - DNA, 57 bp, Artificial
  Synthetic oligonucleotide
aacttagggtatctgggaattcagacgcagcaacctctgcccccgcggtcagctagt

SEQ ID NO: 213741 - DNA, 55 bp, Artificial
  Synthetic oligonucleotide
acttggctacgaacagaaaaacgtgtggactgacggtagtagcaagaagttctgg

SEQ ID NO: 213742 - DNA, 57 bp, Artificial
  Synthetic oligonucleotide
aaatcaactgttcaagcccaaagaaagcggcggcgacttggtgaacggactgcacgc

SEQ ID NO: 213743 - DNA, 58 bp, Artificial
  Synthetic oligonucleotide
tagcataatttgttgttaaagtctagagacttatttagtcaataagtctctagactta

SEQ ID NO: 213744 - DNA, 59 bp, Artificial
  Synthetic oligonucleotide
tgaccttaatgctagtatcaatgtatggtctactaatggtttaccaagtagaatacaaa

SEQ ID NO: 213745 - DNA, 58 bp, Artificial
  Synthetic oligonucleotide
aacttgttccggcatagctccaaaacctgcaactagttatctttgtatgcttagtagc

SEQ ID NO: 213746 - DNA, 60 bp, Artificial
  Synthetic oligonucleotide
ggggctagcaatcttcagactccatctgtagatatcctagcaggtatcgcggggaaacac

SEQ ID NO: 213747 - DNA, 60 bp, Artificial
  Synthetic oligonucleotide
ttgggataaacaccgggctaatgctgataaggtgtcagctttttatgctggcagtgagtt

SEQ ID NO: 213748 - DNA, 60 bp, Artificial
  Synthetic oligonucleotide
acgacagccatgaacacggtctaaaactgattcggctgctagacgttcatcagtactagc

SEQ ID NO: 213749 - DNA, 56 bp, Artificial
  Synthetic oligonucleotide
ttgcatgacttagtgtaataaatgggtttaaactattgcttcaaactagtaactta

SEQ ID NO: 213750 - DNA, 59 bp, Artificial
  Synthetic oligonucleotide
tatgctgcccagcggtgaaaaacgctttggaattgagggtacagtcttgctcttgggta

SEQ ID NO: 213751 - DNA, 56 bp, Artificial
  Synthetic oligonucleotide
tattaaacctgttacctgccaaataccaacgaacaaattctgttaacagtgctgag

SEQ ID NO: 213752 - DNA, 56 bp, Artificial
  Synthetic oligonucleotide
tcaagtagttgacgaatagccgtggtgttacggttgtgcttacaaaattcgtcaaa

SEQ ID NO: 213753 - DNA, 59 bp, Artificial
  Synthetic oligonucleotide
tcccatctgccaaccgtaccagctataccgacaattcccacaggtggagctaaggaagc

SEQ ID NO: 213754 - DNA, 53 bp, Artificial
  Synthetic oligonucleotide
tcccccaaaagtttcgcctcctggggtgaaatcattcccctcgcgaacctctc

SEQ ID NO: 213755 - DNA, 60 bp, Artificial
  Synthetic oligonucleotide
tcctgcaaagttgatgccagcccgactgtgtgggatgctttaccgctatacagcccgttt

SEQ ID NO: 213756 - DNA, 56 bp, Artificial
  Synthetic oligonucleotide
ttgtctttaccccaagaacaagcctcaactgctaagttggctcattttcgccttcc

SEQ ID NO: 213757 - DNA, 58 bp, Artificial
  Synthetic oligonucleotide
cacacaacatcgatgggtgttccacaagggggtacaatttcgccgctattagcgaata

SEQ ID NO: 213758 - DNA, 55 bp, Artificial
  Synthetic oligonucleotide
aaatttactaagaagatgacactagctaaacgccctcctaatattttggaatgga

SEQ ID NO: 213759 - DNA, 60 bp, Artificial
  Synthetic oligonucleotide
aaattagtgaccattgcgctaagtgccgatttattgggctgtgtagattgcactgtttca

SEQ ID NO: 213760 - DNA, 60 bp, Artificial
  Synthetic oligonucleotide
tcgcctcgacaggagcggtcgggggtacgatgcttgtgggagataacatccagactaaca

SEQ ID NO: 213761 - DNA, 58 bp, Artificial
  Synthetic oligonucleotide
ttcgggaagtaccttttgattcccatcgacgaatgatgacagttttgctagaaggaca

SEQ ID NO: 213762 - DNA, 60 bp, Artificial
  Synthetic oligonucleotide
aaatgtagtgccgttcaaatccaacatttcaatgctgcgactgagtatcgtaccatcgtt

SEQ ID NO: 213763 - DNA, 58 bp, Artificial
  Synthetic oligonucleotide
tagtgtttcgcctttaatgtccgttgtttggagtgctagagcttcactaacgcggcaa

SEQ ID NO: 213764 - DNA, 56 bp, Artificial
  Synthetic oligonucleotide
tagtgtaccgatcgtaatcccaccacgcctaaaactgcggattttggcacgaatgt

SEQ ID NO: 213765 - DNA, 60 bp, Artificial
  Synthetic oligonucleotide
agatcctaatggacttggtgaaggccagccaagtgtaggatttggttatcgtatgatgga

SEQ ID NO: 213766 - DNA, 60 bp, Artificial
  Synthetic oligonucleotide
agattggcaggctgtgatcactatatgatctactagtgtctgtccgcttaattggcgaaa

SEQ ID NO: 213767 - DNA, 53 bp, Artificial
  Synthetic oligonucleotide
agatttggaaggtcgtttggttgcctattcgtcgggtttaagtgccattatac

SEQ ID NO: 213768 - DNA, 55 bp, Artificial
  Synthetic oligonucleotide
ggggaatccgtgggcatatcaagtaggtagattggggggtgaatgataagtttag

SEQ ID NO: 213769 - DNA, 53 bp, Artificial
  Synthetic oligonucleotide
ttaggactactagaaggtttggtgggtataacaggatttctcttagtttggtg

SEQ ID NO: 213770 - DNA, 60 bp, Artificial
  Synthetic oligonucleotide
ttagacgaaaatgcacaagcctctaggaggcactacaagaccgcagaccacagcgacaga

SEQ ID NO: 213771 - DNA, 56 bp, Artificial
  Synthetic oligonucleotide
aagttagcagatttaccctgggctgattacagcattaccttacagttaagggtgcg

SEQ ID NO: 213772 - DNA, 55 bp, Artificial
  Synthetic oligonucleotide
aagttattactatgatgtctgcgttgagtcagggtttgggggtgactaattttaa

SEQ ID NO: 213773 - DNA, 60 bp, Artificial
  Synthetic oligonucleotide
agcacgattttgtagagtacgtcattgtccagtttgtcagtggcggcgcagtcttatgtg

SEQ ID NO: 213774 - DNA, 53 bp, Artificial
  Synthetic oligonucleotide
taccgccaaaccacggtgggccagtttgtaacccatgtataggaagtggaacc

SEQ ID NO: 213775 - DNA, 58 bp, Artificial
  Synthetic oligonucleotide
aatgcctagcgtttaccattgacgtgagcgacgcggtttggcgcgagttcggtgaaca

SEQ ID NO: 213776 - DNA, 58 bp, Artificial
  Synthetic oligonucleotide
tttcgtattctttgaggcgttttattagtcttgttcaatgttcagatggtagcttgga

SEQ ID NO: 213777 - DNA, 60 bp, Artificial
  Synthetic oligonucleotide
tttggttacggctgcccgtgtcgtcttggctaagtgagggtgcgagcgtggcgctgtggc

SEQ ID NO: 213778 - DNA, 52 bp, Artificial
  Synthetic oligonucleotide
ttttttggtgaccaggggttaatctgggaaccagctaaaccgatgttcgcgg

SEQ ID NO: 213779 - DNA, 55 bp, Artificial
  Synthetic oligonucleotide
gggcgtattcaccgctaacactggagtgagtttactaacgagtttatccattggg

SEQ ID NO: 213780 - DNA, 58 bp, Artificial
  Synthetic oligonucleotide
taagtgcttacgggttgactatagcccagtgttggatgtacaggccatcaaaaaggga

SEQ ID NO: 213781 - DNA, 60 bp, Artificial
  Synthetic oligonucleotide
tgttacatcgttatatgagttagagccattgccattagttgtggtagggctattgagttt

SEQ ID NO: 213782 - DNA, 56 bp, Artificial
  Synthetic oligonucleotide
ttgttgatggtgcaaccggggtattttggcaaaaactatattaaacagtctgaatg

SEQ ID NO: 213783 - DNA, 60 bp, Artificial
  Synthetic oligonucleotide
aaagcagttgcttgcgatattcctcttagtggttcttttttagatgcttatatgctgccc

SEQ ID NO: 213784 - DNA, 56 bp, Artificial
  Synthetic oligonucleotide
tagaactgacgggctttttacgagtccgtttcgcttgagatggtggtttgtcagat

SEQ ID NO: 213785 - DNA, 57 bp, Artificial
  Synthetic oligonucleotide
tgctcgtcaaagcgttactgttacacgtgtgttagattggttacaacgccaagttat

SEQ ID NO: 213786 - DNA, 60 bp, Artificial
  Synthetic oligonucleotide
tacgtgcagccctcaattcactagctacagtcgcgcccgattggttgcgttcatgggtac

SEQ ID NO: 213787 - DNA, 56 bp, Artificial
  Synthetic oligonucleotide
ttcacaaaacggttgcccccatcaaaaactactcgcggtcttatctgtccgtgctg

SEQ ID NO: 213788 - DNA, 53 bp, Artificial
  Synthetic oligonucleotide
acaaccacgccgttggtttgaccccgaaaaaatgtcacaccttgtgcagtcgg

SEQ ID NO: 213789 - DNA, 55 bp, Artificial
  Synthetic oligonucleotide
agactaagtaccttgttgtagtaaagatcgaaagcgcggtagcggtagataaaca

SEQ ID NO: 213790 - DNA, 60 bp, Artificial
  Synthetic oligonucleotide
gggcatcgcttggcagtctagtgttacttccttggatgggttaagatgtggttataatca

SEQ ID NO: 213791 - DNA, 58 bp, Artificial
  Synthetic oligonucleotide
agactaatactcgtctagtagcgttcttatatagagtacaggaacacataaagactaa

SEQ ID NO: 213792 - DNA, 57 bp, Artificial
  Synthetic oligonucleotide
ttatgtatgggagaaaatcaacgctcacaagtcaccgttgccagacttaacccaaaa

SEQ ID NO: 213793 - DNA, 57 bp, Artificial
  Synthetic oligonucleotide
aaactacgccctatctcatctcttccccgtgtcactacagccaccaccgaccaaaca

SEQ ID NO: 213794 - DNA, 51 bp, Artificial
  Synthetic oligonucleotide
tggctaagggttcccccaaaagtttcgcctcctggggtgaaatcattcccc

SEQ ID NO: 213795 - DNA, 57 bp, Artificial
  Synthetic oligonucleotide
tttaataaatggtttgagtctaatatggataggtcggttgaacgtttctctcgcaca

SEQ ID NO: 213796 - DNA, 60 bp, Artificial
  Synthetic oligonucleotide
tttacagcacaacatccagttacccgaaaagtaagtagaatcagctaccatacattgcat

SEQ ID NO: 213797 - DNA, 55 bp, Artificial
  Synthetic oligonucleotide
ttagtagctaatttgtcaagtaataaccgtatatgcaatatcggtaaaccgtact

SEQ ID NO: 213798 - DNA, 59 bp, Artificial
  Synthetic oligonucleotide
cgcttgagatggtggtttgtcagatttcggaggcgatgctaccacatctgctgcgccct

SEQ ID NO: 213799 - DNA, 59 bp, Artificial
  Synthetic oligonucleotide
gaaattcccccagtacttgataaagtaggaatcggtatgtgattagcagatgtatggac

SEQ ID NO: 213800 - DNA, 58 bp, Artificial
  Synthetic oligonucleotide
caaatgagcatccgtgcagaaacttacgttaaagctgaaaaccttactgtataggcat

SEQ ID NO: 213801 - DNA, 56 bp, Artificial
  Synthetic oligonucleotide
cactttattgtcctctatccctggcgacgatacctaagtctacgaatttagtctaa

SEQ ID NO: 213802 - DNA, 59 bp, Artificial
  Synthetic oligonucleotide
tcatacccacgcatagcggcgtatcctgctagtttgggtgcttgccctttagcgtcagc

SEQ ID NO: 213803 - DNA, 59 bp, Artificial
  Synthetic oligonucleotide
tcgtggccatcatgtgctaccgctgccacagcccgtataagccagtctttgagtacccc

SEQ ID NO: 213804 - DNA, 58 bp, Artificial
  Synthetic oligonucleotide
aatcacccgactcaataatagtagatatgccgggggcatcaagcaataaaactaggga

SEQ ID NO: 213805 - DNA, 53 bp, Artificial
  Synthetic oligonucleotide
tgataccgtgggtcgtaggaagaaattcggcgtaccattccctgtaaacctag

SEQ ID NO: 213806 - DNA, 59 bp, Artificial
  Synthetic oligonucleotide
cgtttggggagtggttgcaacaacccattacgcctcatcaactcactcgctgacattcc

SEQ ID NO: 213807 - DNA, 54 bp, Artificial
  Synthetic oligonucleotide
agggttcttttgggaatgcctagcgtttaccattgacgtgagcgacgcggtttg

SEQ ID NO: 213808 - DNA, 59 bp, Artificial
  Synthetic oligonucleotide
gtctcggctgtctgtggatgtgaaagcggtactaacaatcttcctttgcctgtagccgg

SEQ ID NO: 213809 - DNA, 55 bp, Artificial
  Synthetic oligonucleotide
aacatttaagaaccgattatacggagaaatagcaatacctcacctaattcgtcag

SEQ ID NO: 213810 - DNA, 59 bp, Artificial
  Synthetic oligonucleotide
ctctgactgtaatgccaccagctaaagctagatcgcattgataactcaataagctatcg

SEQ ID NO: 213811 - DNA, 57 bp, Artificial
  Synthetic oligonucleotide
cgctctccaccttagagagataccgcgatgacttaattaacttgaaagtgccgaagt

SEQ ID NO: 213812 - DNA, 60 bp, Artificial
  Synthetic oligonucleotide
ggcgcgagtgagatgagtgacgtgagctattcctgcaaagttgatgccagcccgactgtg

SEQ ID NO: 213813 - DNA, 58 bp, Artificial
  Synthetic oligonucleotide
ttaccagtagcaaatagcttgagcgactgaatcttatcgagtcgtgtggtctgtgggt

SEQ ID NO: 213814 - DNA, 53 bp, Artificial
  Synthetic oligonucleotide
agcaatttgggcgtagggtttcaactgttccgccgtttgggtggggtctgtca

SEQ ID NO: 213815 - DNA, 57 bp, Artificial
  Synthetic oligonucleotide
cttatcaactggattgtacactttacaagagactgttaaccgattatgtaaagctac

SEQ ID NO: 213816 - DNA, 56 bp, Artificial
  Synthetic oligonucleotide
gtcgcgcccgattggttgcgttcatgggtaccttcagaatggtacgagcgttacgg

SEQ ID NO: 213817 - DNA, 58 bp, Artificial
  Synthetic oligonucleotide
ttgaggtagataatcagttgattatacgccgtctctagttgctccacgcgtaagctga

SEQ ID NO: 213818 - DNA, 58 bp, Artificial
  Synthetic oligonucleotide
ccagcagacactagaccagacaccacccagacaccaagtgtctaatacgtgtccgcta

SEQ ID NO: 213819 - DNA, 57 bp, Artificial
  Synthetic oligonucleotide
aaagtcccattgctgtgcgtaaaactccaggcgcaacaccccacgatttaggcgcac

SEQ ID NO: 213820 - DNA, 58 bp, Artificial
  Synthetic oligonucleotide
tagcggcgtatcctgctagtttgggtgcttgccctttagcgtcagctgtagccgattc

SEQ ID NO: 213821 - DNA, 52 bp, Artificial
  Synthetic oligonucleotide
ggattattccacccagtaacccgaataaaccgctttggggtctagccgcagt

SEQ ID NO: 213822 - DNA, 58 bp, Artificial
  Synthetic oligonucleotide
tatctattgcaacttcttaatgtaggtacgtaatgcatatatgcaatgtatatgtgcg

SEQ ID NO: 213823 - DNA, 58 bp, Artificial
  Synthetic oligonucleotide
attgctcactcggtcggtgggagacaaacgaatgaacccacccaagccagatataaga

SEQ ID NO: 213824 - DNA, 60 bp, Artificial
  Synthetic oligonucleotide
cagagtgccttgagtataggataatctgatgcgcttagtccccccatgtagcctgtgggt

SEQ ID NO: 213825 - DNA, 57 bp, Artificial
  Synthetic oligonucleotide
cacctagagccaaacgcatataactaccgtgtttattcaagacatcctgtgcttccc

SEQ ID NO: 213826 - DNA, 57 bp, Artificial
  Synthetic oligonucleotide
ataatcccgcagcgactaaacttgcggtgctagcaccaattaagctagtgaaaaacc

SEQ ID NO: 213827 - DNA, 56 bp, Artificial
  Synthetic oligonucleotide
cgccggttagctcagggagtggagttctcggccaaaacccgcatgagtggaactaa

SEQ ID NO: 213828 - DNA, 57 bp, Artificial
  Synthetic oligonucleotide
ggagaatgcccaatagctcaatgagtgtacgactactaaccgcagctaggtattaac

SEQ ID NO: 213829 - DNA, 57 bp, Artificial
  Synthetic oligonucleotide
aattttctatacgagatagaaatcgagttatgtctgatagtctcctagcggtgggcg

SEQ ID NO: 213830 - DNA, 57 bp, Artificial
  Synthetic oligonucleotide
tactgacccccatgagcattattgccggtcggttagcagtacaatttggcgcacgct

SEQ ID NO: 213831 - DNA, 57 bp, Artificial
  Synthetic oligonucleotide
tgctgtgcgtaaaactccaggcgcaacaccccacgatttaggcgcacccaatgaaca

SEQ ID NO: 213832 - DNA, 57 bp, Artificial
  Synthetic oligonucleotide
tacggtatcaactgggattgcgacttcaaacacgcgagtaaatgggtccaagagaac

SEQ ID NO: 213833 - DNA, 57 bp, Artificial
  Synthetic oligonucleotide
ttatgtctgcgttcagtaatctgtttacaggccagcttacgagctgctgttttctcc

SEQ ID NO: 213834 - DNA, 57 bp, Artificial
  Synthetic oligonucleotide
acaactcgtgtgagtaagaaagcggcaagattagccaacggtcttccttcctcagac

SEQ ID NO: 213835 - DNA, 60 bp, Artificial
  Synthetic oligonucleotide
ggcgatcgcgtaaccctgatggtagatcacagtttcgcgctggcaggcacagcattagaa

SEQ ID NO: 213836 - DNA, 57 bp, Artificial
  Synthetic oligonucleotide
acgcacatctgctacgtgattcattcgactgcacatcggatacgcttgtgtatcccc

SEQ ID NO: 213837 - DNA, 54 bp, Artificial
  Synthetic oligonucleotide
atgaattactgatgggcggcgtttagcggcttaccacccagtagcgggggaaac

SEQ ID NO: 213838 - DNA, 54 bp, Artificial
  Synthetic oligonucleotide
ccgccctttacgcttgaactcagtccgtaaagcagttaggttattacaagttgc

SEQ ID NO: 213839 - DNA, 57 bp, Artificial
  Synthetic oligonucleotide
tcgcacacatgaagctcttattcaagagtgtcgtagatatgccgcctctaatgcaga

SEQ ID NO: 213840 - DNA, 57 bp, Artificial
  Synthetic oligonucleotide
ggtgccttagttcatacacttggggttgttatggtattgagccgagatgcacaactt

SEQ ID NO: 213841 - DNA, 55 bp, Artificial
  Synthetic oligonucleotide
gccccatatccaaacgcaacagtggtaaaccccacaggcgggatgttgttttggc

SEQ ID NO: 213842 - DNA, 56 bp, Artificial
  Synthetic oligonucleotide
gtactgtctcagttagttattcgagaaaatttaacttgggcaactacgaatcaatc

SEQ ID NO: 213843 - DNA, 54 bp, Artificial
  Synthetic oligonucleotide
atcttgagggtcaaactagcggtgcatttttacggggaactagaggggagaaca

SEQ ID NO: 213844 - DNA, 57 bp, Artificial
  Synthetic oligonucleotide
agcattagaagttgtgggcatcaatgacagatacatcagatgcttaagatgtgaccg

SEQ ID NO: 213845 - DNA, 56 bp, Artificial
  Synthetic oligonucleotide
cagtagtatatgcaacaggtagacatacagagttcggtcatgtagctcatcttaca

SEQ ID NO: 213846 - DNA, 53 bp, Artificial
  Synthetic oligonucleotide
ggcgaaatgactttagggagattttgaccaatttagttttttggtaactgaca

SEQ ID NO: 213847 - DNA, 54 bp, Artificial
  Synthetic oligonucleotide
aattacttacccataaggagataacatccacttaatagaagggcgagtttggga

SEQ ID NO: 213848 - DNA, 50 bp, Artificial
  Synthetic oligonucleotide
ggtttaccactaaaacaacggcgataaaaacctaataggtttccacagaa

SEQ ID NO: 213849 - DNA, 56 bp, Artificial
  Synthetic oligonucleotide
agctaaggtaaaactcgatagttctaacgaatggcttgatgttattctgccgagtt

SEQ ID NO: 213850 - DNA, 56 bp, Artificial
  Synthetic oligonucleotide
tatgacatgagtaccaaagtcagtgctaaccatcctgcaacccaagcatagatggg

SEQ ID NO: 213851 - DNA, 56 bp, Artificial
  Synthetic oligonucleotide
cattgctgactgggcgcacggctagtacaagaccaccaaccgatatccggtgggta

SEQ ID NO: 213852 - DNA, 56 bp, Artificial
  Synthetic oligonucleotide
ccaaaaaagcttagaccagcctaattgcgctggatatatttctattaaccagcgat

SEQ ID NO: 213853 - DNA, 56 bp, Artificial
  Synthetic oligonucleotide
ttggcgatccacgagtggctgtctgcaatcacctcggtgtaagcgagggcatggtc

SEQ ID NO: 213854 - DNA, 56 bp, Artificial
  Synthetic oligonucleotide
tacggcccaagcaacatggccaagagcttgcgggacttgtcctggttcttgcgcta

SEQ ID NO: 213855 - DNA, 56 bp, Artificial
  Synthetic oligonucleotide
ctttgattgataagcgtttgcggtcaattttaggcggctactaagtccactaccta

SEQ ID NO: 213856 - DNA, 56 bp, Artificial
  Synthetic oligonucleotide
gctcagttcacaaacacacataagtacacgtacacgccatgaagtatatcctagtc

SEQ ID NO: 213857 - DNA, 60 bp, Artificial
  Synthetic oligonucleotide
ggagatcatagaacgcctctggcagtgtaacaagggcggttcagccgcttgtcaggaagc

SEQ ID NO: 213858 - DNA, 56 bp, Artificial
  Synthetic oligonucleotide
ctacgcgaacgctgcgctaacagcagttacgctcgttcgctcttagtgtctcccct

SEQ ID NO: 213859 - DNA, 56 bp, Artificial
  Synthetic oligonucleotide
gagtcagccctgactggcgctcacgtcaaattagggttttggggcgttaggctatc

SEQ ID NO: 213860 - DNA, 56 bp, Artificial
  Synthetic oligonucleotide
atactatagcgctcacggtagatttcctcactaagcacaggataacagtgttaaaa

SEQ ID NO: 213861 - DNA, 56 bp, Artificial
  Synthetic oligonucleotide
cccggctcaattcttgcctttcgccagagggcaggacgtgcggggaggcaggaagc

SEQ ID NO: 213862 - DNA, 56 bp, Artificial
  Synthetic oligonucleotide
tagttcgcattcttgaggactagtgagtcctttatagttttcggatacttcatact

SEQ ID NO: 213863 - DNA, 56 bp, Artificial
  Synthetic oligonucleotide
gaatctataggggcagtagtcgaaaaacacgaccaatacggcgcggctgtagtctc

SEQ ID NO: 213864 - DNA, 56 bp, Artificial
  Synthetic oligonucleotide
ggctttacggctgcgcccttctcctgtcgcagacgctatgcgtagcttgcttccac

SEQ ID NO: 213865 - DNA, 54 bp, Artificial
  Synthetic oligonucleotide
agtgttttaggatgttacgcctgggtaagtttgcagttagccacgccaagtcct

SEQ ID NO: 213866 - DNA, 56 bp, Artificial
  Synthetic oligonucleotide
aatctttaacatcagctgcactagcatcgagattgctagcttcgagggctaatcct

SEQ ID NO: 213867 - DNA, 56 bp, Artificial
  Synthetic oligonucleotide
ccctatatggggacaatatatgagatacaaaatccttacacagcaagagttagaag

SEQ ID NO: 213868 - DNA, 59 bp, Artificial
  Synthetic oligonucleotide
ggacttggataccgacccaaatcaatgtccacttgatagaaatacatctacaagggatg

SEQ ID NO: 213869 - DNA, 56 bp, Artificial
  Synthetic oligonucleotide
tccttttaataaaggatgtccagctactggacgagtagtaacaacttcctctggct

SEQ ID NO: 213870 - DNA, 55 bp, Artificial
  Synthetic oligonucleotide
gatgccacgtcttacgctttgcaaacagcgttaacagtggtgaagtggtgtagac

SEQ ID NO: 213871 - DNA, 55 bp, Artificial
  Synthetic oligonucleotide
gccagattttggttgcacgtagaaacacccgtcttgctgattgcgcttaccgtta

SEQ ID NO: 213872 - DNA, 53 bp, Artificial
  Synthetic oligonucleotide
gatgttctctagggtcattaattaggaaatccggcttaccttccgaggggtaa

SEQ ID NO: 213873 - DNA, 55 bp, Artificial
  Synthetic oligonucleotide
gccaagcttatcaatcgttgcacggtaaaatcaggctttcgacgtaaggacagaa

SEQ ID NO: 213874 - DNA, 55 bp, Artificial
  Synthetic oligonucleotide
gcattcccaatgattagcacactaacgttgtagtaactaagtgtcatccaagtac

SEQ ID NO: 213875 - DNA, 55 bp, Artificial
  Synthetic oligonucleotide
ctcggtctctccctaccattgttacttagcagtagtattcgagcagaagagtgta

SEQ ID NO: 213876 - DNA, 55 bp, Artificial
  Synthetic oligonucleotide
ctattgagagcatcacaatgtccgcattgattcagaagtcagcaggcttgttctc

SEQ ID NO: 213877 - DNA, 53 bp, Artificial
  Synthetic oligonucleotide
gcaacggtaaaagcacttcccctattcgggagactggttatcaaacgagtaaa

SEQ ID NO: 213878 - DNA, 55 bp, Artificial
  Synthetic oligonucleotide
gcatgggttagtcgcttttaccaacccattaacgcccatagctgggtcacgcact

SEQ ID NO: 213879 - DNA, 60 bp, Artificial
  Synthetic oligonucleotide
catgtcatggcgaccgtccatttgagatagcacacattgaccatacgcaactggatattg

SEQ ID NO: 213880 - DNA, 55 bp, Artificial
  Synthetic oligonucleotide
gatttccaacagatcggctatcatcctatcaataatccgggtttgatggcgggcc

SEQ ID NO: 213881 - DNA, 55 bp, Artificial
  Synthetic oligonucleotide
ttagacctatttctggcacattcgctctttaaagcggtagctaatggagcgcaac

SEQ ID NO: 213882 - DNA, 55 bp, Artificial
  Synthetic oligonucleotide
ctcatcgagactacgaaactagagcaaatccgccgattttgcaccgtaaggaaac

SEQ ID NO: 213883 - DNA, 55 bp, Artificial
  Synthetic oligonucleotide
gccaagatgtttagctatgttgacgtatttacggctttccaaactccaactcaca

SEQ ID NO: 213884 - DNA, 55 bp, Artificial
  Synthetic oligonucleotide
gccaagaaattaacaaacgtggtttatatcacgatgtttggcaagccttcgccgt

SEQ ID NO: 213885 - DNA, 55 bp, Artificial
  Synthetic oligonucleotide
gcattcgcgcagattggtgtccgagccttgaatccgtcagtggcattcccaatgg

SEQ ID NO: 213886 - DNA, 55 bp, Artificial
  Synthetic oligonucleotide
ttaagtctcgctagtatgctcagcgcctgtgaaggtggcagcgaacctgctggta

SEQ ID NO: 213887 - DNA, 55 bp, Artificial
  Synthetic oligonucleotide
gcacctttatgcaccttctatggtttcgtcgagatttgcgtttaactgataacga

SEQ ID NO: 213888 - DNA, 55 bp, Artificial
  Synthetic oligonucleotide
ctcccagcacaggagtagcatgaaatacgcttgcaactaccaaaccaatcacggc

SEQ ID NO: 213889 - DNA, 55 bp, Artificial
  Synthetic oligonucleotide
gcagttccgcattatcagccgttcaggtggcatatttggcgaacagaagatttac

SEQ ID NO: 213890 - DNA, 60 bp, Artificial
  Synthetic oligonucleotide
cattcaatcattaagagatatcgccagtaatcatccggaggctaccccattaatagaaag

SEQ ID NO: 213891 - DNA, 55 bp, Artificial
  Synthetic oligonucleotide
gattgtgtgtggcgatcgcctctcttaaaccactatacaatggtactgacagggt

SEQ ID NO: 213892 - DNA, 55 bp, Artificial
  Synthetic oligonucleotide
ctttaccctcgtcttgacgttagggtagctcccgtcgagtctctgcaccttccga

SEQ ID NO: 213893 - DNA, 55 bp, Artificial
  Synthetic oligonucleotide
ctttatctagacgttgttcaatattgtctatacgctgttcgagggatgtgtctag

SEQ ID NO: 213894 - DNA, 55 bp, Artificial
  Synthetic oligonucleotide
cttcagcagggtagaggagcccatgtggtgactctcaatgcggaaatgactatgc

SEQ ID NO: 213895 - DNA, 55 bp, Artificial
  Synthetic oligonucleotide
gaaaatcagcgcgattccattacagtgacgattccccaagttaacgcccgtactg

SEQ ID NO: 213896 - DNA, 55 bp, Artificial
  Synthetic oligonucleotide
ctgtagccttgaacgcgctaactaataacggatgcccagagggattggctcagtc

SEQ ID NO: 213897 - DNA, 55 bp, Artificial
  Synthetic oligonucleotide
ctgggcgaaaatcggagtaaatcaggtctgttgggccgtgaacgcgatttaacca

SEQ ID NO: 213898 - DNA, 55 bp, Artificial
  Synthetic oligonucleotide
gaaatatcacttttggttactctcatattgacccgccattgattgaggacttcag

SEQ ID NO: 213899 - DNA, 55 bp, Artificial
  Synthetic oligonucleotide
gaactcatgtttgtgaatgcggatttgtgatggatagagattggaacgcagcgat

SEQ ID NO: 213900 - DNA, 55 bp, Artificial
  Synthetic oligonucleotide
ctgcttaactgtcctaccttgaatgggcaaatagggcggcgtagcgaagatattc

SEQ ID NO: 213901 - DNA, 52 bp, Artificial
  Synthetic oligonucleotide
ccaaaacggtttgcatgggttagtcgcttttaccaacccattaacgcccata

SEQ ID NO: 213902 - DNA, 55 bp, Artificial
  Synthetic oligonucleotide
gaagcgatagtgaagcgctccgtaggaatcccagaatggccggccacctatagcg

SEQ ID NO: 213903 - DNA, 55 bp, Artificial
  Synthetic oligonucleotide
gaaggtttggtgggtataacaggatttctcttagtttggtggatgtggggctatg

SEQ ID NO: 213904 - DNA, 55 bp, Artificial
  Synthetic oligonucleotide
gaatcaacaaacaaacgccccgaatcatccttgaggactcgcttactccgtccgg

SEQ ID NO: 213905 - DNA, 55 bp, Artificial
  Synthetic oligonucleotide
ttcgcgttatactttcggctcaagaagctgagactatataccaaactaaagcggc

SEQ ID NO: 213906 - DNA, 55 bp, Artificial
  Synthetic oligonucleotide
ctgctcataatttaaactatcgcgatccagctaccattagacccacagaatgggc

SEQ ID NO: 213907 - DNA, 55 bp, Artificial
  Synthetic oligonucleotide
gacattacgactgcgatacgccaatagcccagacccctccaaagccccgttaaaa

SEQ ID NO: 213908 - DNA, 55 bp, Artificial
  Synthetic oligonucleotide
ctgcggctaaagatgattctagttcaccgagaaacagacttaagacaacggtgac

SEQ ID NO: 213909 - DNA, 55 bp, Artificial
  Synthetic oligonucleotide
ctgcgcccttctcctgtcgcagacgctatgcgtagcttgcttccacaaagtggta

SEQ ID NO: 213910 - DNA, 55 bp, Artificial
  Synthetic oligonucleotide
gaccaacgaggcttaacgaaactagtgtccgcagattccggcacttttcgaccac

SEQ ID NO: 213911 - DNA, 54 bp, Artificial
  Synthetic oligonucleotide
gacccgacaaatgtacaagagtagaacgatttctacgggtggactacttaagga

SEQ ID NO: 213912 - DNA, 60 bp, Artificial
  Synthetic oligonucleotide
agcccgactgtgtgggatgctttaccgctatacagcccgtttagcttatcggctgatggc

SEQ ID NO: 213913 - DNA, 54 bp, Artificial
  Synthetic oligonucleotide
gacgacaatattttaatccgttctttggtagacccgctgattcggaagcacctt

SEQ ID NO: 213914 - DNA, 55 bp, Artificial
  Synthetic oligonucleotide
gactaaatctagcctaccagaagtgtttcgctggagacaagaactgctagatcgg

SEQ ID NO: 213915 - DNA, 55 bp, Artificial
  Synthetic oligonucleotide
gagaaacgggatgagctttggttttatgcgatgcaattgtatagacttggctacc

SEQ ID NO: 213916 - DNA, 55 bp, Artificial
  Synthetic oligonucleotide
ttccaatgctgcaattcggttataagctgccgttaattgtgcagtgagtcgttgg

SEQ ID NO: 213917 - DNA, 55 bp, Artificial
  Synthetic oligonucleotide
gagcgaggcaaatcgtcaactctcagaccagctcgatacctcaatctactcgcaa

SEQ ID NO: 213918 - DNA, 55 bp, Artificial
  Synthetic oligonucleotide
ctgaccctagaagcaggtagcctggaattacaagggcaactggtagcagggagag

SEQ ID NO: 213919 - DNA, 55 bp, Artificial
  Synthetic oligonucleotide
gagcttagtcgctgcttcacacgttattattcctgttgaaacacaatacaaatgc

SEQ ID NO: 213920 - DNA, 55 bp, Artificial
  Synthetic oligonucleotide
gagttattgctgagtgagggttatctagaaactattgtgggttcggggacgtttg

SEQ ID NO: 213921 - DNA, 55 bp, Artificial
  Synthetic oligonucleotide
gatacaaatagcgaatgggttcaatggcatagctaagaggattgagagtggcgat

SEQ ID NO: 213922 - DNA, 55 bp, Artificial
  Synthetic oligonucleotide
ttatcatcgatgtcgctaagaatgatcacttgagtattggtgggatcttcaacat

SEQ ID NO: 213923 - DNA, 54 bp, Artificial
  Synthetic oligonucleotide
taacgttttaatcgctgggtgttttggttacggctgcccgtgtcgtcttggcta

SEQ ID NO: 213924 - DNA, 55 bp, Artificial
  Synthetic oligonucleotide
gtaaatgcaatccgttggacgtaaaatttcatagcgatctactctgccaaaaccc

SEQ ID NO: 213925 - DNA, 55 bp, Artificial
  Synthetic oligonucleotide
gtaaataccgcccagtagattttatgcctatttgtaggcgagtcgtctctaaacc

SEQ ID NO: 213926 - DNA, 55 bp, Artificial
  Synthetic oligonucleotide
ggtttgacttaggggtggggatattatctctcacatcttctgatgaacaacgtcg

SEQ ID NO: 213927 - DNA, 55 bp, Artificial
  Synthetic oligonucleotide
ggtttctcgttgtgtgggttgttcgcactgcttacatacgaagttgaaaacgcgg

SEQ ID NO: 213928 - DNA, 55 bp, Artificial
  Synthetic oligonucleotide
tatgcagttggcgacggagtggactgacagacaacgctgtgaagagaattccctc

SEQ ID NO: 213929 - DNA, 55 bp, Artificial
  Synthetic oligonucleotide
ggtgtccttctcatgttagttctgttgcttctaccttttcgtattctttgaggcg

SEQ ID NO: 213930 - DNA, 55 bp, Artificial
  Synthetic oligonucleotide
ggtggccgcttaattagagcaattgctggacttgaggccattttagccccacccg

SEQ ID NO: 213931 - DNA, 55 bp, Artificial
  Synthetic oligonucleotide
ggtgcctgtggcggacggcattgctcacagtagagtggtcgaacaccaaaggttt

SEQ ID NO: 213932 - DNA, 55 bp, Artificial
  Synthetic oligonucleotide
ggtgagaacccctaagactttactgatcggcaatgttaggatttgaacgccaaac

SEQ ID NO: 213933 - DNA, 55 bp, Artificial
  Synthetic oligonucleotide
ggtgaatcgcactgattcctgtggactgcctcgtaaacacccactggaatcgcct

SEQ ID NO: 213934 - DNA, 60 bp, Artificial
  Synthetic oligonucleotide
ggtatgccttgaatgctgtcgctgaagttgcacctatttggctgaagtcactagctccgg

SEQ ID NO: 213935 - DNA, 56 bp, Artificial
  Synthetic oligonucleotide
agcgatttctaatagggttcttttgggaatgcctagcgtttaccattgacgtgagc

SEQ ID NO: 213936 - DNA, 55 bp, Artificial
  Synthetic oligonucleotide
ggtctgtagcctttagctattgtggcgtaagccattaaattgggattgaagcgat

SEQ ID NO: 213937 - DNA, 55 bp, Artificial
  Synthetic oligonucleotide
ggtctattgatgcaactatcgtacatagttaccccggctcaattcttgcctttcg

SEQ ID NO: 213938 - DNA, 55 bp, Artificial
  Synthetic oligonucleotide
ggtcacagatgagaggagtaaatcgacggttagctgcttatacactgggtgtggg

SEQ ID NO: 213939 - DNA, 55 bp, Artificial
  Synthetic oligonucleotide
tatgttgtgctgtacttgttttgctgtagctatcccattgagagtcaaggagcca

SEQ ID NO: 213940 - DNA, 55 bp, Artificial
  Synthetic oligonucleotide
ggtagtaatgcttgtggcgctgtcaaaggatcgaggtttgcccacatgacattgt

SEQ ID NO: 213941 - DNA, 54 bp, Artificial
  Synthetic oligonucleotide
ggtaggtgacgtgtacagtagtttccgtaatcccgtacatatttactaactgtg

SEQ ID NO: 213942 - DNA, 55 bp, Artificial
  Synthetic oligonucleotide
tcatcgcggtttcatagaataagctggttgcctctactggaattacactggtaga

SEQ ID NO: 213943 - DNA, 55 bp, Artificial
  Synthetic oligonucleotide
ggtaacagtaggtgtatgagtgcgactaccagcagtagtgcagataaagttgcgg

SEQ ID NO: 213944 - DNA, 55 bp, Artificial
  Synthetic oligonucleotide
ggtaaaagtgtgattggtgataactttcggcgtatagttcaaagcgttggcgggc

SEQ ID NO: 213945 - DNA, 48 bp, Artificial
  Synthetic oligonucleotide
ggggtgacgtttaccactttgtttacccgtaccacctagggttacacc

SEQ ID NO: 213946 - DNA, 57 bp, Artificial
  Synthetic oligonucleotide
gttctcggagtgaccagtttccggttgcaccttgtaaatcaacatcccacacaccaa

SEQ ID NO: 213947 - DNA, 53 bp, Artificial
  Synthetic oligonucleotide
ggggtaagccgcgtaacaaaggatacactctatagaaagacaaccttcctacc

SEQ ID NO: 213948 - DNA, 55 bp, Artificial
  Synthetic oligonucleotide
ggggcggcaaatcatgtgcgtgggtgtgaaagtcgctctgggtaccgcagtaggt

SEQ ID NO: 213949 - DNA, 55 bp, Artificial
  Synthetic oligonucleotide
gggctgtggtacatttgttgacacgacagtaaatttgagtgcaacacctttcggt

SEQ ID NO: 213950 - DNA, 55 bp, Artificial
  Synthetic oligonucleotide
gggctgcaaaacctacacatattgcaccgatttcctgggttcgcttacaggcgag

SEQ ID NO: 213951 - DNA, 55 bp, Artificial
  Synthetic oligonucleotide
tctgaaactagccttgggtactacgggtcacgtaggaacctggatctatgatccg

SEQ ID NO: 213952 - DNA, 55 bp, Artificial
  Synthetic oligonucleotide
taccatgccgaatcgggtcaatgcctttgttttgggcggtgaggcattacacgct

SEQ ID NO: 213953 - DNA, 55 bp, Artificial
  Synthetic oligonucleotide
taaaacctctttgttgccagtagcgactaaactggtcatattgagatctgcgagc

SEQ ID NO: 213954 - DNA, 55 bp, Artificial
  Synthetic oligonucleotide
gttgtatcgtctaaagtgccggcgatgtggaaaattccccgcaccggatactgca

SEQ ID NO: 213955 - DNA, 55 bp, Artificial
  Synthetic oligonucleotide
gttgccagcttgccctgcgacatcacctagttctaggaatggacactctttaccc

SEQ ID NO: 213956 - DNA, 55 bp, Artificial
  Synthetic oligonucleotide
gttgatcactggttttagtcagccgctattgtcgcaattactcaccatagacttg

SEQ ID NO: 213957 - DNA, 58 bp, Artificial
  Synthetic oligonucleotide
agcgtaaatatgcccacaacagtcgcgatcgctactagctaaacttccttaaacacta

SEQ ID NO: 213958 - DNA, 55 bp, Artificial
  Synthetic oligonucleotide
gttctggacgagtggtacattccttggtgggtcgagcacctgttaataaattggg

SEQ ID NO: 213959 - DNA, 55 bp, Artificial
  Synthetic oligonucleotide
gttagagccattgccattagttgtggtagggctattgagtttgtcgggttcgtcg

SEQ ID NO: 213960 - DNA, 55 bp, Artificial
  Synthetic oligonucleotide
gtgttcagtacgaatagcaatgttgctgggattggctcggatctcgtcagagcta

SEQ ID NO: 213961 - DNA, 55 bp, Artificial
  Synthetic oligonucleotide
gtgtcgatgaaccaagaatcctcgtaccttcagctggaggagtgtcaacccaata

SEQ ID NO: 213962 - DNA, 55 bp, Artificial
  Synthetic oligonucleotide
gtgtcccgcaagcgatagccgaacaagcgtccttagtcgtagccaacgatgaccc

SEQ ID NO: 213963 - DNA, 55 bp, Artificial
  Synthetic oligonucleotide
gtggtgtcattacaggggcttgataagtacccataggggcattgttaaccattcc

SEQ ID NO: 213964 - DNA, 55 bp, Artificial
  Synthetic oligonucleotide
gtggcgtaagtgcttacgggttgactatagcccagtgttggatgtacaggccatc

SEQ ID NO: 213965 - DNA, 55 bp, Artificial
  Synthetic oligonucleotide
gtgcaacatctaccgcgaacaattcaccctaacaacgatgtcagcagcacggcgg

SEQ ID NO: 213966 - DNA, 55 bp, Artificial
  Synthetic oligonucleotide
gtgaaagtacgttggtagataacatagcagcgtttggtcttcgcttttctcgcgg

SEQ ID NO: 213967 - DNA, 55 bp, Artificial
  Synthetic oligonucleotide
gtctgcgtttgtacaattccgccgtttgtgacatccaggaaacgagtttgcaagt

SEQ ID NO: 213968 - DNA, 58 bp, Artificial
  Synthetic oligonucleotide
gttagggttgagtaatcgctcacagatattacctgacgtagaacgcaaccaaggcgaa

SEQ ID NO: 213969 - DNA, 55 bp, Artificial
  Synthetic oligonucleotide
gtctcccgccaataatcatgcaatgtatggtagctgattctacttacttttcggg

SEQ ID NO: 213970 - DNA, 55 bp, Artificial
  Synthetic oligonucleotide
gtctaaacgagtatggtctatttgccagacttgattgctacgctcaactactaac

SEQ ID NO: 213971 - DNA, 55 bp, Artificial
  Synthetic oligonucleotide
gtcgtacccgcaacgcaattcgctcactgatggatttgactccacctactgctac

SEQ ID NO: 213972 - DNA, 55 bp, Artificial
  Synthetic oligonucleotide
gtcgcttatacatgatgactatcgtctacgtttcgggattgagagtagttatcgt

SEQ ID NO: 213973 - DNA, 55 bp, Artificial
  Synthetic oligonucleotide
gtcgccacggggtgtcaaatctccccatgttaactcacaaatttcacttgcccgt

SEQ ID NO: 213974 - DNA, 55 bp, Artificial
  Synthetic oligonucleotide
gtcatatcatacaatctagctatacgacagcttatcccggctgtaccccactaac

SEQ ID NO: 213975 - DNA, 55 bp, Artificial
  Synthetic oligonucleotide
gtattgctcttgacccactggggtgtgcaagctgactctaattctcttctctagc

SEQ ID NO: 213976 - DNA, 55 bp, Artificial
  Synthetic oligonucleotide
tagtgtggagtacctttgcctgttagcacccgaacgttgtaaacttagtgagtcc

SEQ ID NO: 213977 - DNA, 55 bp, Artificial
  Synthetic oligonucleotide
gtagctgtcagggatatcggtgggatcagtagtgccaactgccaaatccaaagct

SEQ ID NO: 213978 - DNA, 55 bp, Artificial
  Synthetic oligonucleotide
gtaacgaatactggtaacaatgtccgaaaatggacgctctccagtggtacctgac

SEQ ID NO: 213979 - DNA, 55 bp, Artificial
  Synthetic oligonucleotide
agctagttggcaacactaagaattttttcgggggcagaggttgttggcggctgaa

SEQ ID NO: 213980 - DNA, 55 bp, Artificial
  Synthetic oligonucleotide
tgggcgcacggctagtacaagaccaccaaccgatatccggtgggtaaaggtgcta

SEQ ID NO: 213981 - DNA, 55 bp, Artificial
  Synthetic oligonucleotide
gcgggtccagcaaggacaattaatgctacacaggtcaattgaaacacgacttccc

SEQ ID NO: 213982 - DNA, 55 bp, Artificial
  Synthetic oligonucleotide
tggggttgttggagttagcacatccttaggttatgcagagaactggtttggcaga

SEQ ID NO: 213983 - DNA, 55 bp, Artificial
  Synthetic oligonucleotide
gcggcgttgcaattgcaaatctgcattaaagcgcttcctcgctagaaagccgaca

SEQ ID NO: 213984 - DNA, 55 bp, Artificial
  Synthetic oligonucleotide
gcggactaattgaaattttccgcccaatgggaataaaagggcgcaactcattcca

SEQ ID NO: 213985 - DNA, 55 bp, Artificial
  Synthetic oligonucleotide
gcgctttggaatcagtttaggctaaaacgatatgtcccggtgagttactggattg

SEQ ID NO: 213986 - DNA, 55 bp, Artificial
  Synthetic oligonucleotide
tgtagcagccgttctttaatcttagtcgggttagtgtcgaggtatccaaatgggg

SEQ ID NO: 213987 - DNA, 55 bp, Artificial
  Synthetic oligonucleotide
gcgctagccattagtgtcaagcgcatggctacccaaaatgccttagtacgtcgtc

SEQ ID NO: 213988 - DNA, 55 bp, Artificial
  Synthetic oligonucleotide
gcgagttgaaccttcaagggtagtacgaataggggtacgtttgactgccgctaca

SEQ ID NO: 213989 - DNA, 55 bp, Artificial
  Synthetic oligonucleotide
gcgaggatgctttattagtaaactggtgtgaattggccattactcgctctgatgg

SEQ ID NO: 213990 - DNA, 60 bp, Artificial
  Synthetic oligonucleotide
agctgtgtatcgcttgcggatagtaagcagtatcacgtaaatcaggacgtaggcaataga

SEQ ID NO: 213991 - DNA, 55 bp, Artificial
  Synthetic oligonucleotide
gcctttgagatactgacgataaactttcatattgtccctcttgcaccatcttgag

SEQ ID NO: 213992 - DNA, 55 bp, Artificial
  Synthetic oligonucleotide
gcctggcctgcaaagggtgcaatcagcattgctgcccctagcaagtaagctattg

SEQ ID NO: 213993 - DNA, 54 bp, Artificial
  Synthetic oligonucleotide
gccgtccagctaacgttttaatcgctgggtgttttggttacggctgcccgtgtc

SEQ ID NO: 213994 - DNA, 55 bp, Artificial
  Synthetic oligonucleotide
gccgtaatttattgttggctgactctagttctttgcgggcgtaaaattctgagcg

SEQ ID NO: 213995 - DNA, 55 bp, Artificial
  Synthetic oligonucleotide
tgtcgtcttggctaagtgagggtgcgagcgtggcgctgtggcatcagggtctgga

SEQ ID NO: 213996 - DNA, 55 bp, Artificial
  Synthetic oligonucleotide
gccgatttgagtggggctaatttgcagggagcctatttaaaccgtgcgaacctcc

SEQ ID NO: 213997 - DNA, 55 bp, Artificial
  Synthetic oligonucleotide
gccgatttacgagtccttatcgtctagggcaaccagaacgcttgggttatagtgt

SEQ ID NO: 213998 - DNA, 55 bp, Artificial
  Synthetic oligonucleotide
gccgagcgttgcacaataggcatacaacacattagttgccagtttacctgctgtg

SEQ ID NO: 213999 - DNA, 55 bp, Artificial
  Synthetic oligonucleotide
gccctcacagttgtagtcggagacttgctcgcaggactagtaacaggctgatacg

SEQ ID NO: 214000 - DNA, 55 bp, Artificial
  Synthetic oligonucleotide
gccctcaatcggattggtttagtgacgaccattctggcacgggtgataaggatgc

SEQ ID NO: 214001 - DNA, 59 bp, Artificial
  Synthetic oligonucleotide
agcttgcctggcgtggatttgtacaaggacgtattgaaacttcgtggcttgcgccacga

SEQ ID NO: 214002 - DNA, 55 bp, Artificial
  Synthetic oligonucleotide
gcccatacggacaaccttgttcccatttacaagcatcgaccatatagtaagtgtt

SEQ ID NO: 214003 - DNA, 55 bp, Artificial
  Synthetic oligonucleotide
gccatctcgcaggagggattcggcgctgactagacgttccgatgccatcaaatag

SEQ ID NO: 214004 - DNA, 55 bp, Artificial
  Synthetic oligonucleotide
gccatcaattagcacgacagtcataatctcaaaccactacggttactaacgcact

SEQ ID NO: 214005 - DNA, 55 bp, Artificial
  Synthetic oligonucleotide
tgtttatttcgcacaggtgtaggagtaaacatcatttacccctcacgtattatca

SEQ ID NO: 214006 - DNA, 55 bp, Artificial
  Synthetic oligonucleotide
ttaacacgtaatgcgactaatttgccactttacatgaccgtagcacgggctttga

SEQ ID NO: 214007 - DNA, 55 bp, Artificial
  Synthetic oligonucleotide
tctgcgaaaccataacagaagatacctactcagaaagccaactcccagcacttga

SEQ ID NO: 214008 - DNA, 55 bp, Artificial
  Synthetic oligonucleotide
gggagcatgaggcttgggaatatctcatgtacagtgaccatctgccacgcacgaa

SEQ ID NO: 214009 - DNA, 55 bp, Artificial
  Synthetic oligonucleotide
gggacaaggctggtagggtagaagtgggtggtgctagaggaacaatgcaccaaag

SEQ ID NO: 214010 - DNA, 55 bp, Artificial
  Synthetic oligonucleotide
ggctggttccactaccataaacgcgctcccaaactggaatggttccagaatgtgg

SEQ ID NO: 214011 - DNA, 55 bp, Artificial
  Synthetic oligonucleotide
ggctaatgcgctaattgatagagcaattccagtgtcggaggctaaacttacagct

SEQ ID NO: 214012 - DNA, 60 bp, Artificial
  Synthetic oligonucleotide
gtgctgtgtgtaggcgtttgagctactagagatgactgtataggtagttggtgtgagtgc

SEQ ID NO: 214013 - DNA, 55 bp, Artificial
  Synthetic oligonucleotide
ggcgtataaggtattgcctaagattgttgctgaatatccgacttataggtggttg

SEQ ID NO: 214014 - DNA, 55 bp, Artificial
  Synthetic oligonucleotide
ggcgcgtcaaattggaatgtatctcatgcgtcaacacacatctctgagtttgccg

SEQ ID NO: 214015 - DNA, 55 bp, Artificial
  Synthetic oligonucleotide
tgaaactggggcaagtcggatgcactgacgggaactggtgggtgaaaaggcgtta

SEQ ID NO: 214016 - DNA, 55 bp, Artificial
  Synthetic oligonucleotide
tgaacgtcatcaagcctgggtgtctcaatatgcaaccgagaggggaattagcgtc

SEQ ID NO: 214017 - DNA, 55 bp, Artificial
  Synthetic oligonucleotide
ggcaatgctcaataagcaagcagctgtgattgaggacatttaccaggatgctcga

SEQ ID NO: 214018 - DNA, 55 bp, Artificial
  Synthetic oligonucleotide
ggcaatgcctcaccgtatgttgggtgaatgtgaaccgattgttcaagtacctgcc

SEQ ID NO: 214019 - DNA, 55 bp, Artificial
  Synthetic oligonucleotide
ggatgagctttggttttatgcgatgcaattgtatagacttggctaccaatggcat

SEQ ID NO: 214020 - DNA, 55 bp, Artificial
  Synthetic oligonucleotide
ggatatctaggtttggtgcaagatatgagcctcccacgcgcgtgatcgcacactc

SEQ ID NO: 214021 - DNA, 55 bp, Artificial
  Synthetic oligonucleotide
tgaccataccacaagagaatgtcgcatctactcaacacgtccccgtttctgccgt

SEQ ID NO: 214022 - DNA, 55 bp, Artificial
  Synthetic oligonucleotide
ggactaactctggagtttaatgtaccaataggtaatatctctcgtaactgtgcca

SEQ ID NO: 214023 - DNA, 56 bp, Artificial
  Synthetic oligonucleotide
aggctgtcgttgaaagcataagtttgtccctcgacttgggagtagaactcgatatt

SEQ ID NO: 214024 - DNA, 55 bp, Artificial
  Synthetic oligonucleotide
ggaagcgtgtcgaagacagacgctacgtgttaagcgtcggcgcagcctctccgac

SEQ ID NO: 214025 - DNA, 55 bp, Artificial
  Synthetic oligonucleotide
gctgtttactcaagagtgcatcgcgtcctttggcattatctacaaaaccttctgg

SEQ ID NO: 214026 - DNA, 55 bp, Artificial
  Synthetic oligonucleotide
gctgtcgctgaagttgcacctatttggctgaagtcactagctccggtcgagtggt

SEQ ID NO: 214027 - DNA, 55 bp, Artificial
  Synthetic oligonucleotide
gctctcaaggtacgttgcagtattctgcgtcttcctacaaactcctgtggtgtgg

SEQ ID NO: 214028 - DNA, 55 bp, Artificial
  Synthetic oligonucleotide
gctacgctatgaccagcaacaaacagacgtaagacatagccttgagtatgagcta

SEQ ID NO: 214029 - DNA, 55 bp, Artificial
  Synthetic oligonucleotide
gctacaagcaactaagatgaagtctagctttgagtatctagaagacctgcttgcg

SEQ ID NO: 214030 - DNA, 54 bp, Artificial
  Synthetic oligonucleotide
gctaaccatctctgaaagacctacattttggttttacgttccctacacacggga

SEQ ID NO: 214031 - DNA, 55 bp, Artificial
  Synthetic oligonucleotide
gcgttagctcttggggctatccaccctagcaatgcgaagcttatcagtgggacac

SEQ ID NO: 214032 - DNA, 55 bp, Artificial
  Synthetic oligonucleotide
gcgtctacagacaattaatcgcggccattgatggcaattagcaaccgcaagataa

SEQ ID NO: 214033 - DNA, 55 bp, Artificial
  Synthetic oligonucleotide
gcgtcgcaaaagtcggatttgagctgctactacattactaacgcgttctgcacta

SEQ ID NO: 214034 - DNA, 58 bp, Artificial
  Synthetic oligonucleotide
gtgcgattgcttggttgtctgctccagtaaccttgtcgttcgggtcaatcgtcccttg

SEQ ID NO: 214035 - DNA, 55 bp, Artificial
  Synthetic oligonucleotide
atgtgtcgcaacgggataccggcgctagacatttggttgagggcagtacggcgga

SEQ ID NO: 214036 - DNA, 55 bp, Artificial
  Synthetic oligonucleotide
ccgatatcctcagggttagagcgaaatggcgcatctgcttgcacgtaaacccggt

SEQ ID NO: 214037 - DNA, 54 bp, Artificial
  Synthetic oligonucleotide
ccgaggggcagccaaacagtagtaatacccatcactgaaggtaggaacgttacg

SEQ ID NO: 214038 - DNA, 55 bp, Artificial
  Synthetic oligonucleotide
attcaacgctgtcctgatgataacgaagcactgtttaaatcagttgggttatctc

SEQ ID NO: 214039 - DNA, 54 bp, Artificial
  Synthetic oligonucleotide
aatcaagacaacgtagtttcttttcaccctgacaggtcacttgacaacttaccc

SEQ ID NO: 214040 - DNA, 55 bp, Artificial
  Synthetic oligonucleotide
ccgagctaaatcgtaggtgacttgactatttgcgatcgcatcgcttaaacccttc

SEQ ID NO: 214041 - DNA, 55 bp, Artificial
  Synthetic oligonucleotide
ccgacttacccaattgacgcactacgcggagacaattctgtacagttccttgttc

SEQ ID NO: 214042 - DNA, 55 bp, Artificial
  Synthetic oligonucleotide
ccgacagttgtatgaaggactgctagatttgcccgcagctgaggtgcccttgcac

SEQ ID NO: 214043 - DNA, 55 bp, Artificial
  Synthetic oligonucleotide
aatccgggctataactgcgacttttggcccgcctccactaccatagctagacaac

SEQ ID NO: 214044 - DNA, 55 bp, Artificial
  Synthetic oligonucleotide
caacagtaatatccgatggtttgagagcccctcttgctacgtcttccataccctc

SEQ ID NO: 214045 - DNA, 58 bp, Artificial
  Synthetic oligonucleotide
attgggcttggttctaatggtaaagatgctctccgcgagtgtgtatcaactatttacg

SEQ ID NO: 214046 - DNA, 59 bp, Artificial
  Synthetic oligonucleotide
agggaaattatcgtactagctgaccaagtgcagttgaccaactcataacgactgcgact

SEQ ID NO: 214047 - DNA, 55 bp, Artificial
  Synthetic oligonucleotide
aatcttagatcctgtgcagcgaacccgtatgaaggttgatcaacatatagctgcg

SEQ ID NO: 214048 - DNA, 55 bp, Artificial
  Synthetic oligonucleotide
cccgaaggaacagtgatatctcgtattgatcaagagagtgactttgcccctggta

SEQ ID NO: 214049 - DNA, 55 bp, Artificial
  Synthetic oligonucleotide
ccccgatcaaagagcgatcgcacacaccaaacaattagacttccacctacagacc

SEQ ID NO: 214050 - DNA, 55 bp, Artificial
  Synthetic oligonucleotide
ccccaagtagttccaatcaagcctggggcaacgacgttaaccgcatggtacagta

SEQ ID NO: 214051 - DNA, 55 bp, Artificial
  Synthetic oligonucleotide
caacttaatatgttggagaatcaggtcctgggtagcacggatacccttacccgta

SEQ ID NO: 214052 - DNA, 55 bp, Artificial
  Synthetic oligonucleotide
caagcacagttaaatacctgtcgcgctcaactgcaaggctttaaagacggggtga

SEQ ID NO: 214053 - DNA, 52 bp, Artificial
  Synthetic oligonucleotide
accagggaatgcaacacaaacaatctacccttacggaaaaacccaatgggta

SEQ ID NO: 214054 - DNA, 55 bp, Artificial
  Synthetic oligonucleotide
caatcccaatttaatggcttacgccacaatagctaaaggctacagaccaagtgga

SEQ ID NO: 214055 - DNA, 55 bp, Artificial
  Synthetic oligonucleotide
caatctctctgctcgcgtcactaactacagcttagggcttcctcaagtggccgtt

SEQ ID NO: 214056 - DNA, 55 bp, Artificial
  Synthetic oligonucleotide
cgaatgcgcctaacttacttcgtgatagagcctaagacacgccttagccatacgc

SEQ ID NO: 214057 - DNA, 60 bp, Artificial
  Synthetic oligonucleotide
agggactgtcacggtgatgcccaatacgagagtcagccctgactggcgctcacgtcaaat

SEQ ID NO: 214058 - DNA, 54 bp, Artificial
  Synthetic oligonucleotide
cgaacctttagcagtagcgacaaaagctaaatcacccctaagcccttctccctc

SEQ ID NO: 214059 - DNA, 55 bp, Artificial
  Synthetic oligonucleotide
ccttgccagttagtctcgcgccatccattctcgtatggcaactcaccaccagcta

SEQ ID NO: 214060 - DNA, 55 bp, Artificial
  Synthetic oligonucleotide
atgctctaacaggtacggaaacagtagtttgggcattccaaagggcataattggc

SEQ ID NO: 214061 - DNA, 55 bp, Artificial
  Synthetic oligonucleotide
cctcgcatcatgaccctaaatgccgatttaggcttaccaaattgtgccaacttgc

SEQ ID NO: 214062 - DNA, 55 bp, Artificial
  Synthetic oligonucleotide
cctaatcgtttactatacccctggacagtgctggcagttccgcattatcagccgt

SEQ ID NO: 214063 - DNA, 55 bp, Artificial
  Synthetic oligonucleotide
cctaacagattgtacaattgcttgtaggtaacaagattctctacagcttgagagt

SEQ ID NO: 214064 - DNA, 53 bp, Artificial
  Synthetic oligonucleotide
ccgtggtgttacggttgtgcttacaaaattcgtcaaactcctgtaaccgctcg

SEQ ID NO: 214065 - DNA, 55 bp, Artificial
  Synthetic oligonucleotide
atgggctacgccccgctacgctaacgtaattactacttcattggcaggaaagagc

SEQ ID NO: 214066 - DNA, 55 bp, Artificial
  Synthetic oligonucleotide
aagtgtacaccgagtatatgaccgaagtacagaccgtcaacaatggcactgtacc

SEQ ID NO: 214067 - DNA, 55 bp, Artificial
  Synthetic oligonucleotide
aataacctagtcatcgccgagtttgaccacattgaaaccagggaactagacccgc

SEQ ID NO: 214068 - DNA, 59 bp, Artificial
  Synthetic oligonucleotide
gtgcaaactttagctatgccgacattcgaggggcaaactttagcggtgctaacttgata

SEQ ID NO: 214069 - DNA, 52 bp, Artificial
  Synthetic oligonucleotide
ccgtcccaccgaactaccaaccgagggttatgtagagtacctagaaggagac

SEQ ID NO: 214070 - DNA, 51 bp, Artificial
  Synthetic oligonucleotide
ccggttctcagaaagggtatatgataccaccgggtttaggatttgtttccg

SEQ ID NO: 214071 - DNA, 55 bp, Artificial
  Synthetic oligonucleotide
aatatcctccatgtgctttagccctggttcgtcacggtcgggacagagaactagg

SEQ ID NO: 214072 - DNA, 55 bp, Artificial
  Synthetic oligonucleotide
ccggtggagctaatcaacagttaattgtgctgcgagcccagggttttgctcgtcg

SEQ ID NO: 214073 - DNA, 52 bp, Artificial
  Synthetic oligonucleotide
ccgctaactctcaagcttaccgtttgtgcggcaacccctttgggaacccgaa

SEQ ID NO: 214074 - DNA, 55 bp, Artificial
  Synthetic oligonucleotide
ccgctaactacacttaccgcacccatcgctgcccttaagtcaccttcgctacctc

SEQ ID NO: 214075 - DNA, 55 bp, Artificial
  Synthetic oligonucleotide
ccgcgtcttctagactggagcttgtctgatcctaccctagctacatatcgtcagg

SEQ ID NO: 214076 - DNA, 55 bp, Artificial
  Synthetic oligonucleotide
ccgcctcttgtgtcgatgctccgcgatcctctattgcaagaacgctatgacgcac

SEQ ID NO: 214077 - DNA, 55 bp, Artificial
  Synthetic oligonucleotide
ccgccaactgtaactttgtgatggtatgccgtgcagtaacaacaccggtagtaag

SEQ ID NO: 214078 - DNA, 55 bp, Artificial
  Synthetic oligonucleotide
cacgaattactaatgttgtgcccgtaacaatcgtttgatcggtctttgtcggtgc

SEQ ID NO: 214079 - DNA, 56 bp, Artificial
  Synthetic oligonucleotide
agtaaggttagatggtcgctaaggggtatctaggtagtatatagcccatagtccgc

SEQ ID NO: 214080 - DNA, 55 bp, Artificial
  Synthetic oligonucleotide
ccacagcgttacccacgacatttacgaacttgagggtgccatttgttagaccagc

SEQ ID NO: 214081 - DNA, 55 bp, Artificial
  Synthetic oligonucleotide
ccaaggagcataccactgccaccaattgatagtacagtgcctaagacagtagtgg

SEQ ID NO: 214082 - DNA, 55 bp, Artificial
  Synthetic oligonucleotide
accaacgcagatactattggggaacgcctacaagcaatagatagattcagtcgtt

SEQ ID NO: 214083 - DNA, 55 bp, Artificial
  Synthetic oligonucleotide
ccaactcccagcacttgaactaacaatcgaggcattactagaagaacgccgtcag

SEQ ID NO: 214084 - DNA, 55 bp, Artificial
  Synthetic oligonucleotide
acataattcaatcagcacgaatcgcttttggtggggtagcacccaaaccttggcg

SEQ ID NO: 214085 - DNA, 55 bp, Artificial
  Synthetic oligonucleotide
ccaaatataccacctgaacggctgataatgcggaactgccagcactgtccagggg

SEQ ID NO: 214086 - DNA, 55 bp, Artificial
  Synthetic oligonucleotide
catggtcggatttatatcgctccacctgactaccacttactggtagaatcggtat

SEQ ID NO: 214087 - DNA, 55 bp, Artificial
  Synthetic oligonucleotide
catgccagggaacagggttcccggtttggggtgatagtcagccatgagtgcggct

SEQ ID NO: 214088 - DNA, 55 bp, Artificial
  Synthetic oligonucleotide
catcacatcttgtaaatagactgctagacgctctaactctgacttatttccttgt

SEQ ID NO: 214089 - DNA, 55 bp, Artificial
  Synthetic oligonucleotide
cataaagaaatcccgcaaatctttctcgtaagcccgccgagtattggggttgcgc

SEQ ID NO: 214090 - DNA, 54 bp, Artificial
  Synthetic oligonucleotide
agtcgcctgagttcgtcggaggtgagtattttggctcgtccgttgccgttaacc

SEQ ID NO: 214091 - DNA, 55 bp, Artificial
  Synthetic oligonucleotide
cagtttatggagtcaggtactagagcgcctacagatagaactatctcgccccacc

SEQ ID NO: 214092 - DNA, 52 bp, Artificial
  Synthetic oligonucleotide
caggtacagcgtaacgtcctcttcctaaagttccctgggaacgaaaacgata

SEQ ID NO: 214093 - DNA, 55 bp, Artificial
  Synthetic oligonucleotide
cacgctgatttgggtcagtgggtaaaaggtcagcaatgggttgaatgagaagttt

SEQ ID NO: 214094 - DNA, 55 bp, Artificial
  Synthetic oligonucleotide
cactaccacctttaatgctcaaccttcctttatttggtcgcctatcaacgctgcg

SEQ ID NO: 214095 - DNA, 55 bp, Artificial
  Synthetic oligonucleotide
caggacggctgccgaactagcattagagatgcccaagattgcgagtagattgagg

SEQ ID NO: 214096 - DNA, 55 bp, Artificial
  Synthetic oligonucleotide
cagacgatgcttaatgaaatgttcggtcaggtcttaagtgatcttcaacgccgga

SEQ ID NO: 214097 - DNA, 55 bp, Artificial
  Synthetic oligonucleotide
cagagcaatttatactccttatcctactcagtcacaggcaatagtgggaatgggg

SEQ ID NO: 214098 - DNA, 55 bp, Artificial
  Synthetic oligonucleotide
cagacgtgctacctgaaatgctagccaatggggtgtagtattacccgccgccaat

SEQ ID NO: 214099 - DNA, 55 bp, Artificial
  Synthetic oligonucleotide
caatgctcaccgatttcgtcttaggaagccgctttaagcaattttgggatgcagc

SEQ ID NO: 214100 - DNA, 55 bp, Artificial
  Synthetic oligonucleotide
cccatccgtagagctttgtagagcctttccggtggtctaaccgataggtggaata

SEQ ID NO: 214101 - DNA, 60 bp, Artificial
  Synthetic oligonucleotide
agtcggacagtgtaaaagcgcttggcattgagggtgacggcgctatccggcagaacttca

SEQ ID NO: 214102 - DNA, 54 bp, Artificial
  Synthetic oligonucleotide
cacaatccaatactgataagtagttccttaacctagttttggtggaaggggagc

SEQ ID NO: 214103 - DNA, 55 bp, Artificial
  Synthetic oligonucleotide
cccatcccaacagtggaatcgcttactcattgaactacaggatactcgaagctgg

SEQ ID NO: 214104 - DNA, 55 bp, Artificial
  Synthetic oligonucleotide
cccagtgacaaaaacgtaaagggcattaaccaagtcatcgccagaatcgctcaac

SEQ ID NO: 214105 - DNA, 53 bp, Artificial
  Synthetic oligonucleotide
cccagcttggaaaatagttcgtaaatcttctaagttaacaacctctgaaggat

SEQ ID NO: 214106 - DNA, 55 bp, Artificial
  Synthetic oligonucleotide
cacacccgcgttttcaacttcgtatgtaagcagtgcgaacaacccacgcaaagag

SEQ ID NO: 214107 - DNA, 55 bp, Artificial
  Synthetic oligonucleotide
cccagcatccattgcttgatctaactcatcttgacaccaataactcgtaagagcc

SEQ ID NO: 214108 - DNA, 55 bp, Artificial
  Synthetic oligonucleotide
acaatccaaacgctgatactacagattgcgaccgattacttgagtgtttggatag

SEQ ID NO: 214109 - DNA, 55 bp, Artificial
  Synthetic oligonucleotide
acaattgcgcaccaaagcagaacgcaatgccactacccagtcctatttagtggag

SEQ ID NO: 214110 - DNA, 54 bp, Artificial
  Synthetic oligonucleotide
cccagactggccaactttgatttagttttcacctatcgtcgtatttggagtccc

SEQ ID NO: 214111 - DNA, 55 bp, Artificial
  Synthetic oligonucleotide
cccaaactcaagcgagtaaaagtcaagtatatggcttattcatggagccactagg

SEQ ID NO: 214112 - DNA, 60 bp, Artificial
  Synthetic oligonucleotide
gtcaaactcctgtaaccgctcggcactcatgagcgagcgaatctggtctaccctatgttg

SEQ ID NO: 214113 - DNA, 55 bp, Artificial
  Synthetic oligonucleotide
ccattggtgatagccaaaactggacaacagctaccggacgttatggaattgggga

SEQ ID NO: 214114 - DNA, 55 bp, Artificial
  Synthetic oligonucleotide
caccgcctctcgaattgcttccacactatttcccgaaacggttgttgctccacga

SEQ ID NO: 214115 - DNA, 55 bp, Artificial
  Synthetic oligonucleotide
ccaggggttaatctgggaaccagctaaaccgatgttcgcgggcatcgcttggcag

SEQ ID NO: 214116 - DNA, 55 bp, Artificial
  Synthetic oligonucleotide
cacctatcgctagtcagcatatcgacgaaatacccttacttttcgaggaacatgg

SEQ ID NO: 214117 - DNA, 55 bp, Artificial
  Synthetic oligonucleotide
ccagaaccaagagatgaaaccctagcaaaagtggtaaaagcctgtctggaagcgg

SEQ ID NO: 214118 - DNA, 55 bp, Artificial
  Synthetic oligonucleotide
ccacttggtacggttgttactgaaagagggttacacagtcaaagcgctggtacgc

SEQ ID NO: 214119 - DNA, 55 bp, Artificial
  Synthetic oligonucleotide
caccttggaggatattaagggtgagactgtcattaagtaccgagataccagtggg

SEQ ID NO: 214120 - DNA, 55 bp, Artificial
  Synthetic oligonucleotide
ccaccctcggtttgcagatgattaccattcgtggattcaagtcgggatggcactc

SEQ ID NO: 214121 - DNA, 55 bp, Artificial
  Synthetic oligonucleotide
cgcgctcacaagagcatagctgtaggttgggcaagtgtagcgcgattgacttggg

SEQ ID NO: 214122 - DNA, 55 bp, Artificial
  Synthetic oligonucleotide
cgctagctttggatgcttgggaacatcaatatccgcgtccagaggacaaggcatc

SEQ ID NO: 214123 - DNA, 55 bp, Artificial
  Synthetic oligonucleotide
agtttttgagtgttgagcgacttgctgaatgtttggagtttattgctagtttttt

SEQ ID NO: 214124 - DNA, 55 bp, Artificial
  Synthetic oligonucleotide
aacgctttggaattgagggtacagtcttgctcttgggtatactgaacgctggttt

SEQ ID NO: 214125 - DNA, 55 bp, Artificial
  Synthetic oligonucleotide
cgctattaactgcattaatatagcgtcggtgtatatctaaatgctcctctaaagc

SEQ ID NO: 214126 - DNA, 55 bp, Artificial
  Synthetic oligonucleotide
cgctcacagatattacctgacgtagaacgcaaccaaggcgaaccccatagcctag

SEQ ID NO: 214127 - DNA, 55 bp, Artificial
  Synthetic oligonucleotide
cgctgacagcgacaattatggaagtggcagaaagcatttaccgcgctgggtttag

SEQ ID NO: 214128 - DNA, 52 bp, Artificial
  Synthetic oligonucleotide
cgcttgacaacctacccgaagaatggcgaatcgttcctacctttggtaaacg

SEQ ID NO: 214129 - DNA, 55 bp, Artificial
  Synthetic oligonucleotide
agggagatgattacagacctcctgaaagcaactggcctaacagttacccatgcca

SEQ ID NO: 214130 - DNA, 55 bp, Artificial
  Synthetic oligonucleotide
cggacgattcaaagagccaacataagccgtctctaagttgtgacattcaattacg

SEQ ID NO: 214131 - DNA, 55 bp, Artificial
  Synthetic oligonucleotide
cggagtgcctacgagtgcctatccatgccatagaaacatgagtagcggaggcttt

SEQ ID NO: 214132 - DNA, 55 bp, Artificial
  Synthetic oligonucleotide
cggcaagaaagccacagaagcaacggtagtgaagcgtttaccccaagcgcgattt

SEQ ID NO: 214133 - DNA, 55 bp, Artificial
  Synthetic oligonucleotide
cggcgagcgcggtaggttgtgttcatttacctaatttcgagcgaacttgaccacc

SEQ ID NO: 214134 - DNA, 57 bp, Artificial
  Synthetic oligonucleotide
atactctaagttgccctagcttgctaattgcagttgggatagttccgtcaaggtggt

SEQ ID NO: 214135 - DNA, 55 bp, Artificial
  Synthetic oligonucleotide
cgggcatctactcatgaaattcggcgaagacttgagctaaacccgcaaggtaatt

SEQ ID NO: 214136 - DNA, 55 bp, Artificial
  Synthetic oligonucleotide
actggttgggtatgcccactgtcgcccttaagcataaggaaactgcgtaaatccc

SEQ ID NO: 214137 - DNA, 55 bp, Artificial
  Synthetic oligonucleotide
agcgatcgcatcaatgattgttcagagttattagatttccgtcttgtaccagatg

SEQ ID NO: 214138 - DNA, 55 bp, Artificial
  Synthetic oligonucleotide
agcctttctacaacaggtttgatcccaagagcaatcctgacgtgggtagtttcgt

SEQ ID NO: 214139 - DNA, 55 bp, Artificial
  Synthetic oligonucleotide
ctatgggtagtacagtatacctacgttccgcaccaagtgcgggaggattgtatcc

SEQ ID NO: 214140 - DNA, 55 bp, Artificial
  Synthetic oligonucleotide
ctatgccgacattcgaggggcaaactttagcggtgctaacttgataggggcaaac

SEQ ID NO: 214141 - DNA, 55 bp, Artificial
  Synthetic oligonucleotide
ctaggagaattaataagcctacctcctttaagatttacagtcataggtgttcgcg

SEQ ID NO: 214142 - DNA, 55 bp, Artificial
  Synthetic oligonucleotide
aaacaccctggtctcgcagacaagagacccattggtcattgttagtaatcacatc

SEQ ID NO: 214143 - DNA, 55 bp, Artificial
  Synthetic oligonucleotide
ctagatgcactcgcccgattattagcaccacctaacagtgtacgaccgaagttgt

SEQ ID NO: 214144 - DNA, 55 bp, Artificial
  Synthetic oligonucleotide
ctagagcgacttcatgaaaacagccagtaaactcatactcgtgaccgtcttctga

SEQ ID NO: 214145 - DNA, 60 bp, Artificial
  Synthetic oligonucleotide
atagccgagtggtatgaggcgcaagtttccaacactattgccgcagatgtgaggcgcgaa

SEQ ID NO: 214146 - DNA, 55 bp, Artificial
  Synthetic oligonucleotide
ctacgctacaccgaaagagcgatggcgtaacgcaagagcgtagctgatcgtcagc

SEQ ID NO: 214147 - DNA, 54 bp, Artificial
  Synthetic oligonucleotide
ctaatagtccctgtaactcccacaacaattcttgaccactggtttgacctaggg

SEQ ID NO: 214148 - DNA, 55 bp, Artificial
  Synthetic oligonucleotide
ctaagctatatagtgatagtcacagtacacatcagttactacccagtaccatgac

SEQ ID NO: 214149 - DNA, 52 bp, Artificial
  Synthetic oligonucleotide
cgttgggttctgggaaagtattccccaacatcccaaaagccgaagtagtgaa

SEQ ID NO: 214150 - DNA, 55 bp, Artificial
  Synthetic oligonucleotide
cgtgtccagcacttgccaatggtgcaagatgcgtctcaaatggtagatatcgcgc

SEQ ID NO: 214151 - DNA, 55 bp, Artificial
  Synthetic oligonucleotide
cgtggttataacggtcagcgcgtccgttctgacattgtagctatgttggatggcg

SEQ ID NO: 214152 - DNA, 55 bp, Artificial
  Synthetic oligonucleotide
cgtcctgatgctacatagtcaaagaccactacatttcgagtacggaaatactgga

SEQ ID NO: 214153 - DNA, 53 bp, Artificial
  Synthetic oligonucleotide
cgtcctccgggcaatgggtttaccatacaccaccctccacggttcgattcgct

SEQ ID NO: 214154 - DNA, 55 bp, Artificial
  Synthetic oligonucleotide
agccgtgagtatggctacggtagcatggctggttaatcaaggcgatcgcaacttt

SEQ ID NO: 214155 - DNA, 54 bp, Artificial
  Synthetic oligonucleotide
aaaggggtgcattcgtccattagggaaaactaccaagcctcaaaggagtagctg

SEQ ID NO: 214156 - DNA, 53 bp, Artificial
  Synthetic oligonucleotide
atttagagaattgctactaccgtcccaccgaactaccaaccgagggttatgta

SEQ ID NO: 214157 - DNA, 60 bp, Artificial
  Synthetic oligonucleotide
atattctgccgtaaaagatgacttacgtctaagtacgatagttcatttactgcatcgcac

SEQ ID NO: 214158 - DNA, 55 bp, Artificial
  Synthetic oligonucleotide
cgagctaatccaatgccaccgatgtagagttccccaggcacccacactggacggg

SEQ ID NO: 214159 - DNA, 55 bp, Artificial
  Synthetic oligonucleotide
cgaggaatgctgagtaagctaatccgtaaaggtcgagtccgcaaaatggaggatg

SEQ ID NO: 214160 - DNA, 51 bp, Artificial
  Synthetic oligonucleotide
aagtagaacgagtagacctggtaacccgtttagttaatgatcccaaagtta

SEQ ID NO: 214161 - DNA, 55 bp, Artificial
  Synthetic oligonucleotide
atcattcatattttacgagaacctgcaacacctacctaaatcaacgagatgcttc

SEQ ID NO: 214162 - DNA, 55 bp, Artificial
  Synthetic oligonucleotide
cgatagtagccagacattgagagcgataatcgggacactcagaccataaattagc

SEQ ID NO: 214163 - DNA, 55 bp, Artificial
  Synthetic oligonucleotide
cgatcgctcgcattaaacagcatactagatttgcattgcgaagcaaacgccatgc

SEQ ID NO: 214164 - DNA, 55 bp, Artificial
  Synthetic oligonucleotide
cgatgtaaccttcattaaccccaattaggttaggacacaactcattagctgtcgc

SEQ ID NO: 214165 - DNA, 55 bp, Artificial
  Synthetic oligonucleotide
atcaagacgaatagaagatattcgtgaagtacttgtcagttggggagttgagata

SEQ ID NO: 214166 - DNA, 55 bp, Artificial
  Synthetic oligonucleotide
cgcacacagttcgttaaagcgtctctggtcttccgctagataggttctaccaaat

SEQ ID NO: 214167 - DNA, 55 bp, Artificial
  Synthetic oligonucleotide
cgcacccttgagacgatgaaaaccacgttcagcaatccattcgtctcgataagtc

SEQ ID NO: 214168 - DNA, 60 bp, Artificial
  Synthetic oligonucleotide
gtatcatgccagcaatggttttgaattctctattggggtagacagtcgccgtgtgttgac

SEQ ID NO: 214169 - DNA, 55 bp, Artificial
  Synthetic oligonucleotide
cgcaccggaggcgggtagtcaacggatgcgcgatattattaacaaaggtctaacc

SEQ ID NO: 214170 - DNA, 55 bp, Artificial
  Synthetic oligonucleotide
cgcactgaagcaggacagatattagcacaacatctgacagcctatactaaccgag

SEQ ID NO: 214171 - DNA, 55 bp, Artificial
  Synthetic oligonucleotide
aagagtcgcctaatctggacagtacgctaaacccttaatgaatacccaaccgcca

SEQ ID NO: 214172 - DNA, 55 bp, Artificial
  Synthetic oligonucleotide
cgcgatcgtttgtaccgttaatcgttaacatcgatatggaagttcgaggctggca

SEQ ID NO: 214173 - DNA, 55 bp, Artificial
  Synthetic oligonucleotide
agtcgatgagaggacaggtgatggaataatatacccgtcatgctaatcatgcggg

SEQ ID NO: 214174 - DNA, 55 bp, Artificial
  Synthetic oligonucleotide
cgcctggttgccattcacgacgggtagagcgtcccaatggttcggtttcgctatc

SEQ ID NO: 214175 - DNA, 55 bp, Artificial
  Synthetic oligonucleotide
agtgaagttattgggcaagaacatatcgttcgcactctcataaatgcgatcgcat

SEQ ID NO: 214176 - DNA, 55 bp, Artificial
  Synthetic oligonucleotide
aagaaacgcttgcttaagctaacgtgaaccctatacagcgtaagcataagggaag

SEQ ID NO: 214177 - DNA, 54 bp, Artificial
  Synthetic oligonucleotide
acacaggactctctttgcttgaacaggtgaaagttggctgtaattctactaggc

SEQ ID NO: 214178 - DNA, 54 bp, Artificial
  Synthetic oligonucleotide
aaggctgccccacactccacaaaaaccacaccgcgagactgagaacgcaactct

SEQ ID NO: 214179 - DNA, 57 bp, Artificial
  Synthetic oligonucleotide
gtagaatcagttgctacagacggttaattcgtaatttaagtcgagccaccaagacac

SEQ ID NO: 214180 - DNA, 54 bp, Artificial
  Synthetic oligonucleotide
tgccacattactacaccttctacactggcacaagctaagatgggatcccctgta

SEQ ID NO: 214181 - DNA, 54 bp, Artificial
  Synthetic oligonucleotide
gaccgaataacaaccgggatgctacttggtgctggaacggtgagtgctggctta

SEQ ID NO: 214182 - DNA, 54 bp, Artificial
  Synthetic oligonucleotide
agaacgttatagcgagcgcatggaagactatcatctaccgacttcaaaagcagc

SEQ ID NO: 214183 - DNA, 54 bp, Artificial
  Synthetic oligonucleotide
accatgcgttgcgtacccaatgccagggtaacggtaatcacggcgggtaagcct

SEQ ID NO: 214184 - DNA, 54 bp, Artificial
  Synthetic oligonucleotide
ccgtgcgatcgctcgtgccttggtgtactcaagcctccctgaacgcactacttc

SEQ ID NO: 214185 - DNA, 54 bp, Artificial
  Synthetic oligonucleotide
tctgcactaccggaaatttgcgccacaggcttttgactacctcccaccacctcc

SEQ ID NO: 214186 - DNA, 54 bp, Artificial
  Synthetic oligonucleotide
tgcaagcgatagtacagatgcgtctgaaacaccagcccagggtaagtgtccgac

SEQ ID NO: 214187 - DNA, 54 bp, Artificial
  Synthetic oligonucleotide
tactcttgcgctactgcccaaaactcttgccacatacaccccggtttaactagc

SEQ ID NO: 214188 - DNA, 54 bp, Artificial
  Synthetic oligonucleotide
tttccgtaggtcttcctgcgcttgtaccgtaaccccgataatcataagccaaca

SEQ ID NO: 214189 - DNA, 54 bp, Artificial
  Synthetic oligonucleotide
acccgcagcgtaactggcaaccgatggagtggggacgattcaaaccctccaacc

SEQ ID NO: 214190 - DNA, 57 bp, Artificial
  Synthetic oligonucleotide
atgactgcggtgagtggttcactgttaaccgcttggtaatattctttgactttagtg

SEQ ID NO: 214191 - DNA, 54 bp, Artificial
  Synthetic oligonucleotide
ggaagcctgactacgtgtacccaaggtgaatttggtatatgttcaatcttaatc

SEQ ID NO: 214192 - DNA, 54 bp, Artificial
  Synthetic oligonucleotide
tctagtattgctaagactatcagtattagagattttaataaggttatcgcttac

SEQ ID NO: 214193 - DNA, 54 bp, Artificial
  Synthetic oligonucleotide
aaacactagatatttccagggttacagcgattatgtacccttgatgccaaatat

SEQ ID NO: 214194 - DNA, 54 bp, Artificial
  Synthetic oligonucleotide
ctcctggagataatgccgatctgcgctaacactacggtgctggctcgtctacac

SEQ ID NO: 214195 - DNA, 54 bp, Artificial
  Synthetic oligonucleotide
agcagtgatttgtcgttgtgctaatttccgagctatttccggattacccagggg

SEQ ID NO: 214196 - DNA, 54 bp, Artificial
  Synthetic oligonucleotide
gtaatcattgcgctgcccttctaccgaaggttgagtgagtgattggcgagtctg

SEQ ID NO: 214197 - DNA, 54 bp, Artificial
  Synthetic oligonucleotide
atctctggctgattgcttggcgggcgagaaattacattcaccaccccagccgga

SEQ ID NO: 214198 - DNA, 54 bp, Artificial
  Synthetic oligonucleotide
acagcttgactcgtaagctacaagactggctttaggaacttgggcaacttccgg

SEQ ID NO: 214199 - DNA, 54 bp, Artificial
  Synthetic oligonucleotide
acccggtggtaaacctcgttttggctcagtagttgagagattattcggcacaac

SEQ ID NO: 214200 - DNA, 54 bp, Artificial
  Synthetic oligonucleotide
tgtcttcttgagttgccatgcacaattgaaatacgcctccaactcaacttctac

SEQ ID NO: 214201 - DNA, 60 bp, Artificial
  Synthetic oligonucleotide
ggttaagcaaataacattcaataggtactggactgagacatttccaaatgatcagcccag

SEQ ID NO: 214202 - DNA, 54 bp, Artificial
  Synthetic oligonucleotide
cggaaaccactcgataagcacgggattggaaatagtccttgagttgacccatca

SEQ ID NO: 214203 - DNA, 53 bp, Artificial
  Synthetic oligonucleotide
cggggattacctttaactgtaggacgatatccaggtaacttgactgaaccagg

SEQ ID NO: 214204 - DNA, 54 bp, Artificial
  Synthetic oligonucleotide
ggggaatctcaccgcgccgcccttagagtgattgagattgatgcaacaaaggca

SEQ ID NO: 214205 - DNA, 54 bp, Artificial
  Synthetic oligonucleotide
aggacccgcattccctagttagcacgagtcatcactcacaaccactgtacactt

SEQ ID NO: 214206 - DNA, 54 bp, Artificial
  Synthetic oligonucleotide
actaaaagttagcaccctgtaaatggttatcgcttggattacgcatcaaaagcg

SEQ ID NO: 214207 - DNA, 54 bp, Artificial
  Synthetic oligonucleotide
cggtaaagcaaccgccctaatttgtgaggaagtaaccacctacggcgactgcat

SEQ ID NO: 214208 - DNA, 54 bp, Artificial
  Synthetic oligonucleotide
ggggaactcaaacttgtgctagagacgaatgggacttttcaactaggatactcc

SEQ ID NO: 214209 - DNA, 54 bp, Artificial
  Synthetic oligonucleotide
atgtggatatcgggactagacccgcagcgtaactggcaaccgatggagtgggga

SEQ ID NO: 214210 - DNA, 54 bp, Artificial
  Synthetic oligonucleotide
agttgccctacttgacgacgcgctgcattcagaccgtaaacgctgaaccgccag

SEQ ID NO: 214211 - DNA, 54 bp, Artificial
  Synthetic oligonucleotide
ccattggggcagaaagtcccattgctgtgcgtaaaactccaggcgcaacacccc

SEQ ID NO: 214212 - DNA, 60 bp, Artificial
  Synthetic oligonucleotide
atggtgctaccttccgacgtgatagaagggatgctctagcatctaagcgaattcgtgcta

SEQ ID NO: 214213 - DNA, 54 bp, Artificial
  Synthetic oligonucleotide
tagcacccctttgcaaagtgcaaaaatgcggctctctgactccaggcgctacga

SEQ ID NO: 214214 - DNA, 53 bp, Artificial
  Synthetic oligonucleotide
aggcggaatcaccgtatgggtgcagttagtcagtggcggacggctacctttcg

SEQ ID NO: 214215 - DNA, 53 bp, Artificial
  Synthetic oligonucleotide
gtcgaaaaggtcgattatggattcttactacgccaattacccagaacgccttt

SEQ ID NO: 214216 - DNA, 53 bp, Artificial
  Synthetic oligonucleotide
tacctggcgtgattcaacccttaacctggtcgattaatcgccccttgacttgt

SEQ ID NO: 214217 - DNA, 53 bp, Artificial
  Synthetic oligonucleotide
gtccgtcgaatcactgcataatatctatcaatggttcctaaagtgttgcgctt

SEQ ID NO: 214218 - DNA, 53 bp, Artificial
  Synthetic oligonucleotide
agggcatcaccgctcatcagcagtccctctgttctgcgtactggcgtgggttt

SEQ ID NO: 214219 - DNA, 53 bp, Artificial
  Synthetic oligonucleotide
gtcaagtcgcttctctacaagatgttgcgcgttaatggcgcaggcgtaacgct

SEQ ID NO: 214220 - DNA, 53 bp, Artificial
  Synthetic oligonucleotide
tctttcgtgttgggagagcgggtactgttgcaatttggcgatcgcggtacaaa

SEQ ID NO: 214221 - DNA, 53 bp, Artificial
  Synthetic oligonucleotide
taccaccagtccctgtccaacgagaaatccccaacatggtgactcggccgctc

SEQ ID NO: 214222 - DNA, 53 bp, Artificial
  Synthetic oligonucleotide
tactctggacacggttcccaggtacaagaccccgatcgcgattcaccggatgg

SEQ ID NO: 214223 - DNA, 60 bp, Artificial
  Synthetic oligonucleotide
ggtgtagcgagaatatttgaacctgggtgtaaggttgacatgatgcctatcttctacggc

SEQ ID NO: 214224 - DNA, 53 bp, Artificial
  Synthetic oligonucleotide
caacttagttcgactatgagaacgaattagccgcagcactctaacccattgat

SEQ ID NO: 214225 - DNA, 53 bp, Artificial
  Synthetic oligonucleotide
gtaatcgtcattgttgttcaagcgaacactcaccgggacttcagttgcgatcg

SEQ ID NO: 214226 - DNA, 53 bp, Artificial
  Synthetic oligonucleotide
acagtattagctggtaatacggaggcgacaccagtgccaggattggcttgcac

SEQ ID NO: 214227 - DNA, 53 bp, Artificial
  Synthetic oligonucleotide
tcctctggatatggtcttagatgaccgcacagctcgtacctataatttagatt

SEQ ID NO: 214228 - DNA, 53 bp, Artificial
  Synthetic oligonucleotide
caccaccccagccggactacttctaccatagagggtactttgggggcctcgca

SEQ ID NO: 214229 - DNA, 53 bp, Artificial
  Synthetic oligonucleotide
tcctgtcaggaggcataagcatgattaaccaagtcccgaatctagaaacttgt

SEQ ID NO: 214230 - DNA, 53 bp, Artificial
  Synthetic oligonucleotide
gttaccagatgtaagcagttacaaaatggttatgccccggttacagtctgtaa

SEQ ID NO: 214231 - DNA, 53 bp, Artificial
  Synthetic oligonucleotide
actgccgatactacaggtagggaagtcaccactaccctgacagcacaagtatt

SEQ ID NO: 214232 - DNA, 53 bp, Artificial
  Synthetic oligonucleotide
tcaccgccggattaagggagaagcgccaagcattactgaatcgtgccaagtat

SEQ ID NO: 214233 - DNA, 53 bp, Artificial
  Synthetic oligonucleotide
agctaatgcgcctggttgccattcacgacgggtagagcgtcccaatggttcgg

SEQ ID NO: 214234 - DNA, 60 bp, Artificial
  Synthetic oligonucleotide
cgattcgttgattagtgaatcacggtatccagtccgtacataactaatccagctagcaat

SEQ ID NO: 214235 - DNA, 53 bp, Artificial
  Synthetic oligonucleotide
tcaccccagggtcgtgagcaattaaatgccagggccttgaagcccgacgaacg

SEQ ID NO: 214236 - DNA, 53 bp, Artificial
  Synthetic oligonucleotide
tcgattgcttaggtgcctgtggcggacggcattgctcacagtagagtggtcga

SEQ ID NO: 214237 - DNA, 53 bp, Artificial
  Synthetic oligonucleotide
gcctggaggacaggctactgtcacagtgcgatcgcctctcacgacactgccag

SEQ ID NO: 214238 - DNA, 53 bp, Artificial
  Synthetic oligonucleotide
gaaatggataaacgccgtcctgtactgattgtcagcaatgacgctaataatca

SEQ ID NO: 214239 - DNA, 53 bp, Artificial
  Synthetic oligonucleotide
gccctgtaagggcgaggcttgtatgtttcgctccgcttcacggctactaggca

SEQ ID NO: 214240 - DNA, 53 bp, Artificial
  Synthetic oligonucleotide
cgctgatactcagctacggaggatgctgctggtctagcacgctgtctggccca

SEQ ID NO: 214241 - DNA, 53 bp, Artificial
  Synthetic oligonucleotide
ccctcaattgaggtctgatttggcctctggtgctaactgtgatgcttcagccc

SEQ ID NO: 214242 - DNA, 53 bp, Artificial
  Synthetic oligonucleotide
tgttcctgtgaccaaacatcaatacagctagttgggaagtgcgtaaccagtct

SEQ ID NO: 214243 - DNA, 53 bp, Artificial
  Synthetic oligonucleotide
gaatccttagtgaaaacatccggtagcttgtcggaccaaccgttgattgaact

SEQ ID NO: 214244 - DNA, 53 bp, Artificial
  Synthetic oligonucleotide
ccgactatttgagcgaagcggttaagagttgcgccatcacctagagggaaatt

SEQ ID NO: 214245 - DNA, 60 bp, Artificial
  Synthetic oligonucleotide
gagaaccagtttggagtgtatgctcgataaggaatgacatcatctaacacggttgtagct

SEQ ID NO: 214246 - DNA, 53 bp, Artificial
  Synthetic oligonucleotide
ccgccgctacaaaattaaagcaggaatgataaccgtctacttgggcggtatgt

SEQ ID NO: 214247 - DNA, 53 bp, Artificial
  Synthetic oligonucleotide
gactgtcgagccgtcgagcgatagtgctgatgaatcggcgttcaccgcgcaca

SEQ ID NO: 214248 - DNA, 53 bp, Artificial
  Synthetic oligonucleotide
ttagaatctcgcctagaggctctagaaaaaattccagggtttgacccagacct

SEQ ID NO: 214249 - DNA, 53 bp, Artificial
  Synthetic oligonucleotide
ccttcgtcacagcacaaaattgccgtgcgaaagctgcactcgaccccatgcgc

SEQ ID NO: 214250 - DNA, 53 bp, Artificial
  Synthetic oligonucleotide
aagtgagaaaggcgattgcataccaagagaaatgtaatcgccacccaaacgaa

SEQ ID NO: 214251 - DNA, 53 bp, Artificial
  Synthetic oligonucleotide
cgcaacgttgtgaagcgtccccaaagttctagattgcccattaaggaaccaaa

SEQ ID NO: 214252 - DNA, 53 bp, Artificial
  Synthetic oligonucleotide
gaggcgatcgctgcacgttgcgccccaacctcaccaaatcgctccctcaacca

SEQ ID NO: 214253 - DNA, 53 bp, Artificial
  Synthetic oligonucleotide
cgtccgcacccaagtacccaaatgcccccgatagtgtgggccactggtaggca

SEQ ID NO: 214254 - DNA, 53 bp, Artificial
  Synthetic oligonucleotide
ccaccatttgggcaatagcgtctactccccagccgtcaaacccacgcttccat

SEQ ID NO: 214255 - DNA, 52 bp, Artificial
  Synthetic oligonucleotide
ctccccttatccttagatttacgcttaggggacaactacgacaccgaactag

SEQ ID NO: 214256 - DNA, 54 bp, Artificial
  Synthetic oligonucleotide
gactttccgccttcacttgaattatgagggataacgggcggacgaagttagccc

SEQ ID NO: 214257 - DNA, 53 bp, Artificial
  Synthetic oligonucleotide
gctacgcttgcgatgccacgggtagagcatggggtggattcggtcagagagtt

SEQ ID NO: 214258 - DNA, 53 bp, Artificial
  Synthetic oligonucleotide
ccaggaagcacctctgcctgcgattattcattggaaaggttaccactgggtag

SEQ ID NO: 214259 - DNA, 53 bp, Artificial
  Synthetic oligonucleotide
ttgccgtgcgaaagctgcactcgaccccatgcgctctaacactgcgctcttgg

SEQ ID NO: 214260 - DNA, 50 bp, Artificial
  Synthetic oligonucleotide
tttgaccacggaattctaaacggttcactttgtttaggggtagtgttacg

SEQ ID NO: 214261 - DNA, 53 bp, Artificial
  Synthetic oligonucleotide
ctgcgatcgcctctggtgctgtgctccgcgcaaccgctaatttatctggccac

SEQ ID NO: 214262 - DNA, 53 bp, Artificial
  Synthetic oligonucleotide
gcttctctatggtttgtttggtttcagcccattgcaaaagccaccctgctagg

SEQ ID NO: 214263 - DNA, 53 bp, Artificial
  Synthetic oligonucleotide
aacaccagtctggtttagagcagtgggggcatgggctagttttggtaacttct

SEQ ID NO: 214264 - DNA, 52 bp, Artificial
  Synthetic oligonucleotide
cgccagcgaatttagccgcttgcaattgcatcacagccgcgcctcctactga

SEQ ID NO: 214265 - DNA, 52 bp, Artificial
  Synthetic oligonucleotide
aagctacccgtgcgcggccactgactgaaccctgtcctagtcctattccctg

SEQ ID NO: 214266 - DNA, 52 bp, Artificial
  Synthetic oligonucleotide
tactggctgccagtgccattaaaggtaagggacccagggtagctggacaatc

SEQ ID NO: 214267 - DNA, 55 bp, Artificial
  Synthetic oligonucleotide
atttcgttgtcctacagttttaaattctggcggtataggttcatctaacactgtc

SEQ ID NO: 214268 - DNA, 60 bp, Artificial
  Synthetic oligonucleotide
gacgtgagctattcctgcaaagttgatgccagcccgactgtgtgggatgctttaccgcta

SEQ ID NO: 214269 - DNA, 52 bp, Artificial
  Synthetic oligonucleotide
tttgagaaggtgaattatgtgcaacctgagttacccttaaatcaatggggac

SEQ ID NO: 214270 - DNA, 52 bp, Artificial
  Synthetic oligonucleotide
tccaaggttaggaaacgaccaagggtaatatcccgctattcattttgtacaa

SEQ ID NO: 214271 - DNA, 52 bp, Artificial
  Synthetic oligonucleotide
tccatgccccacacacggctcaccaatagcaccggataacctaacgtgacgc

SEQ ID NO: 214272 - DNA, 52 bp, Artificial
  Synthetic oligonucleotide
ttagtcggcccaacaaatcaatagtgatcgcgtcgcctagcaaggatgcccc

SEQ ID NO: 214273 - DNA, 52 bp, Artificial
  Synthetic oligonucleotide
tcccagctacacccagactgtgcaagtacccgccgaatgtcactaaccgcct

SEQ ID NO: 214274 - DNA, 52 bp, Artificial
  Synthetic oligonucleotide
tacccctggacagtgctggcagttccgcattatcagccgttcaggtggcata

SEQ ID NO: 214275 - DNA, 52 bp, Artificial
  Synthetic oligonucleotide
gaccggaaaatcattctcgtcgcactcagtttatgaagcgggttgtagattt

SEQ ID NO: 214276 - DNA, 52 bp, Artificial
  Synthetic oligonucleotide
aactactcattaagagacaataggactggtccatacctctacctacgcgccc

SEQ ID NO: 214277 - DNA, 52 bp, Artificial
  Synthetic oligonucleotide
ttcgccatgttagctgtgaaagacccacataccgattttcaactcccgctgc

SEQ ID NO: 214278 - DNA, 52 bp, Artificial
  Synthetic oligonucleotide
aggtttgcaccccggaagttttccccttgcaggttagcggtgctgaggtcaa

SEQ ID NO: 214279 - DNA, 58 bp, Artificial
  Synthetic oligonucleotide
gaattgaacagtatcgatttcgcagagaccccaaggcttacttggctaatctagaaag

SEQ ID NO: 214280 - DNA, 52 bp, Artificial
  Synthetic oligonucleotide
agaaagtccgaaattgcgttaactcttgtcacttaaaggatattgtggccgt

SEQ ID NO: 214281 - DNA, 52 bp, Artificial
  Synthetic oligonucleotide
acctaacccaacagtcgatgtcccgactgcgtgactggggacaaagccccta

SEQ ID NO: 214282 - DNA, 52 bp, Artificial
  Synthetic oligonucleotide
gttgcattcggggagtatgccccggataggatgaattgttgtagtacgattt

SEQ ID NO: 214283 - DNA, 52 bp, Artificial
  Synthetic oligonucleotide
ttgcgacgggcgggaggtatgtgtattcttgcgggaccagcaacgctggata

SEQ ID NO: 214284 - DNA, 52 bp, Artificial
  Synthetic oligonucleotide
tatccgaattggggtaaatccagcaagctgccaagcacgggtttgggcgcaa

SEQ ID NO: 214285 - DNA, 52 bp, Artificial
  Synthetic oligonucleotide
agggaaaggtataacgtttccaaagtccggaacgtgtgcagagttctagaac

SEQ ID NO: 214286 - DNA, 52 bp, Artificial
  Synthetic oligonucleotide
actgatgtgaagtcgcccacaatctcattcacttggggatgcaacggtaggc

SEQ ID NO: 214287 - DNA, 52 bp, Artificial
  Synthetic oligonucleotide
aggactgacgagttctccacaggcgtttagagcctccgggatacccacggcg

SEQ ID NO: 214288 - DNA, 50 bp, Artificial
  Synthetic oligonucleotide
cgggggttagtttccgcataaccaaacggagggcgaggcgctacccaaac

SEQ ID NO: 214289 - DNA, 52 bp, Artificial
  Synthetic oligonucleotide
gtgtgagtgctttaagcaattaactagacaatcaccgtaattgaccaacagt

SEQ ID NO: 214290 - DNA, 60 bp, Artificial
  Synthetic oligonucleotide
gaattactcacgctagatatgcccctccagcgtatgaaacgcagtgcttgggtagcgatg

SEQ ID NO: 214291 - DNA, 52 bp, Artificial
  Synthetic oligonucleotide
cttgatacgcgatcgcttctaacacggcgcgtactagatgctctggttggac

SEQ ID NO: 214292 - DNA, 52 bp, Artificial
  Synthetic oligonucleotide
gcgggaggaatgtggatatcgggactagacccgcagcgtaactggcaaccga

SEQ ID NO: 214293 - DNA, 52 bp, Artificial
  Synthetic oligonucleotide
tgcggagaagctgactcttgtggcaatagcgcaagcacccacatccaagcgc

SEQ ID NO: 214294 - DNA, 52 bp, Artificial
  Synthetic oligonucleotide
tgcgatcgccaaaattcccaaccactgacgaggataccattatcatccaagc

SEQ ID NO: 214295 - DNA, 52 bp, Artificial
  Synthetic oligonucleotide
acaattggtcggatcaatttagcttatacaccaccagagtatcgtcgtaaag

SEQ ID NO: 214296 - DNA, 52 bp, Artificial
  Synthetic oligonucleotide
tgggaggcagttcaactaaggcagtggcgcagatttacccggagggggttcc

SEQ ID NO: 214297 - DNA, 52 bp, Artificial
  Synthetic oligonucleotide
aatttctcctgagaagccgctagttgatcttattgaggagcctcacatatca

SEQ ID NO: 214298 - DNA, 52 bp, Artificial
  Synthetic oligonucleotide
gccttacaggcagatggtttcacagcttaccagattgaagttagtgtaccgc

SEQ ID NO: 214299 - DNA, 52 bp, Artificial
  Synthetic oligonucleotide
gcctgaagtttcagtctgattgcttgacggtaatcttctgggctaaaggttg

SEQ ID NO: 214300 - DNA, 52 bp, Artificial
  Synthetic oligonucleotide
gccgtcactacctgtggtgatggctcggctgagtatatcataggaactagtt

SEQ ID NO: 214301 - DNA, 57 bp, Artificial
  Synthetic oligonucleotide
gaatgaaccgacaggtgaaccactaaaagaagatgtacaaagtagttcacctagtga

SEQ ID NO: 214302 - DNA, 52 bp, Artificial
  Synthetic oligonucleotide
tggtgcgctggatgattctcgacagccatgagagtgaaccagatccggtaaa

SEQ ID NO: 214303 - DNA, 52 bp, Artificial
  Synthetic oligonucleotide
aattgtagtttctgggcgaattgtgcggactggggaagacatcaaatcccta

SEQ ID NO: 214304 - DNA, 52 bp, Artificial
  Synthetic oligonucleotide
ggtaactgcaagcctaatgtggaatcccgcctagcatagctggtcatggata

SEQ ID NO: 214305 - DNA, 52 bp, Artificial
  Synthetic oligonucleotide
caaaaagctgtcagctgtgagttgggtattcacaagcgcacagtgcgacgac

SEQ ID NO: 214306 - DNA, 52 bp, Artificial
  Synthetic oligonucleotide
attgctcggcagtgcgtagttctataaccaatgatggtcatccaccgttaga

SEQ ID NO: 214307 - DNA, 52 bp, Artificial
  Synthetic oligonucleotide
ccgaccttgattagctgtccggtcttttagtttattgtcagttccgcagtta

SEQ ID NO: 214308 - DNA, 52 bp, Artificial
  Synthetic oligonucleotide
accggtgtggggactccctgcatcaataaccgccgcgctactggcacattac

SEQ ID NO: 214309 - DNA, 52 bp, Artificial
  Synthetic oligonucleotide
gagggcattagcactgtaactattggtcgaaatcaatacccgcttttgtaca

SEQ ID NO: 214310 - DNA, 52 bp, Artificial
  Synthetic oligonucleotide
tccccaaccatctccgcttgcagttcggggaggtaatcaagtgtgagtaaat

SEQ ID NO: 214311 - DNA, 52 bp, Artificial
  Synthetic oligonucleotide
cgaagcaaccttccacgctcggagctacggttttaggactggacgtgcggca

SEQ ID NO: 214312 - DNA, 60 bp, Artificial
  Synthetic oligonucleotide
gaagatgtattctcgccgctacagctaacagtcaagacttcttgcgtgactcatccggcg

SEQ ID NO: 214313 - DNA, 52 bp, Artificial
  Synthetic oligonucleotide
gcaggtaagattatgcgatcgccgctaaactccctcattggtttagcgttgg

SEQ ID NO: 214314 - DNA, 52 bp, Artificial
  Synthetic oligonucleotide
ccgcataaccaaacggagggcgaggcgctacccaaacgtgcatcgggacgtt

SEQ ID NO: 214315 - DNA, 52 bp, Artificial
  Synthetic oligonucleotide
attactggttgtagtcctatctccatcaccagcatgagtaagagcaatccca

SEQ ID NO: 214316 - DNA, 52 bp, Artificial
  Synthetic oligonucleotide
attaggagtccgcaacccgatgtagtaaacctgtgcgccagccgggacaata

SEQ ID NO: 214317 - DNA, 52 bp, Artificial
  Synthetic oligonucleotide
cagcataggagtaatcgcccacttacaacaaaaaccagtaccacgtaaacgc

SEQ ID NO: 214318 - DNA, 52 bp, Artificial
  Synthetic oligonucleotide
gccaccgttgggtaagccaccgttgggtgagccatcgtcggacaacccacct

SEQ ID NO: 214319 - DNA, 52 bp, Artificial
  Synthetic oligonucleotide
ggctgcacttctaggacattgataatccccatacatcactaataccacggcg

SEQ ID NO: 214320 - DNA, 52 bp, Artificial
  Synthetic oligonucleotide
ggattgaaggcggaatcaccgtatgggtgcagctagtcagtggcggacggct

SEQ ID NO: 214321 - DNA, 51 bp, Artificial
  Synthetic oligonucleotide
aaacccacgccaattcaaatgcaggccattccggcggtattgtcgggtggg

SEQ ID NO: 214322 - DNA, 51 bp, Artificial
  Synthetic oligonucleotide
tgagggtggcgcggcttaaatcgctacgagtcatgaggacgcggctgaggt

SEQ ID NO: 214323 - DNA, 58 bp, Artificial
  Synthetic oligonucleotide
cggatatgcgattgtacccggtattaaggagcatttctctattgaatgccccccagtc

SEQ ID NO: 214324 - DNA, 51 bp, Artificial
  Synthetic oligonucleotide
tacgtagcgcgtcagaaggcttatcacccagtagctaattacttgtcatcc

SEQ ID NO: 214325 - DNA, 51 bp, Artificial
  Synthetic oligonucleotide
tactggggaaatagccattcccgcaggaacacaggtaactatcgctatgat

SEQ ID NO: 214326 - DNA, 51 bp, Artificial
  Synthetic oligonucleotide
tagatagggaaaactgctgcggggagtcctgcgtcagtggtgcggatcaac

SEQ ID NO: 214327 - DNA, 51 bp, Artificial
  Synthetic oligonucleotide
accaagacataccaaaattgctggttattcctgtgccaattgaaccactcc

SEQ ID NO: 214328 - DNA, 51 bp, Artificial
  Synthetic oligonucleotide
agagtatcctgttcgcgcttgataaaggagtccgctttcagcccagaccat

SEQ ID NO: 214329 - DNA, 51 bp, Artificial
  Synthetic oligonucleotide
acagatcccagctcaccctggcatggtaccaccggcaagtgctgaagccag

SEQ ID NO: 214330 - DNA, 51 bp, Artificial
  Synthetic oligonucleotide
ttttccctaccatgtactctgctagtaactctttagaccaaagaaccctag

SEQ ID NO: 214331 - DNA, 51 bp, Artificial
  Synthetic oligonucleotide
acagcacctgtccaccattgacgcgcttcacgttgtccactccagctgcta

SEQ ID NO: 214332 - DNA, 51 bp, Artificial
  Synthetic oligonucleotide
tagcgatcgctcggatccccaaccgtcattctatcggcattacccgtgcga

SEQ ID NO: 214333 - DNA, 51 bp, Artificial
  Synthetic oligonucleotide
tccgaaccacttcattaaacccgattgttgtgactcagataactgtttatg

SEQ ID NO: 214334 - DNA, 59 bp, Artificial
  Synthetic oligonucleotide
cttttctatcgatacagccattgtatgtgaaatctggttataggtattgacgggtagta

SEQ ID NO: 214335 - DNA, 51 bp, Artificial
  Synthetic oligonucleotide
tcctagccgcagcttctagcaccgaccttgccctagttggtgccgtagccc

SEQ ID NO: 214336 - DNA, 51 bp, Artificial
  Synthetic oligonucleotide
tcagtctctgcgcttacgtggcaagggatggcccctacccaagggcggtcg

SEQ ID NO: 214337 - DNA, 51 bp, Artificial
  Synthetic oligonucleotide
tcactgctggggtgacagattttgcacccagtgtacgtcgtgctgcggcta

SEQ ID NO: 214338 - DNA, 51 bp, Artificial
  Synthetic oligonucleotide
ttaagggcttgaggctgatatgtacctaataggctaaatggtctatagacg

SEQ ID NO: 214339 - DNA, 51 bp, Artificial
  Synthetic oligonucleotide
tcgcactcggtacaatgaaccgcccgcagccgtcagaaatcggactgcttt

SEQ ID NO: 214340 - DNA, 51 bp, Artificial
  Synthetic oligonucleotide
tctgctagaaaaccccttgcgcgttggcctacaacaacaagggatgcccga

SEQ ID NO: 214341 - DNA, 51 bp, Artificial
  Synthetic oligonucleotide
aatgctgttagcggatagctaaggtttagcccgtggggagtggagaatagt

SEQ ID NO: 214342 - DNA, 51 bp, Artificial
  Synthetic oligonucleotide
aatttatacataggcaagaaggtgttagattgtcacggcaacagcgtcaag

SEQ ID NO: 214343 - DNA, 51 bp, Artificial
  Synthetic oligonucleotide
aaccttgggctgaagtcttagcagaaagagcaggggttaattatacaactt

SEQ ID NO: 214344 - DNA, 51 bp, Artificial
  Synthetic oligonucleotide
actatcgcgggaatctgccaccatgcgatatgctttggcgagggcatgggg

SEQ ID NO: 214345 - DNA, 55 bp, Artificial
  Synthetic oligonucleotide
cggcgtacagattatagtaatgccaagctacaacgggtagaaaagcgtttgggga

SEQ ID NO: 214346 - DNA, 51 bp, Artificial
  Synthetic oligonucleotide
aacctgcggctacagctacccggttattgccctgagcgtagacaaggcggt

SEQ ID NO: 214347 - DNA, 51 bp, Artificial
  Synthetic oligonucleotide
aaccgcactcgtagcacttggcgaattgacagggtgatgttaggccgggct

SEQ ID NO: 214348 - DNA, 51 bp, Artificial
  Synthetic oligonucleotide
ttgggcggataactttggcgggccgaaaaacttcgtcggtggggcaattga

SEQ ID NO: 214349 - DNA, 51 bp, Artificial
  Synthetic oligonucleotide
actgttcactgatttaataccttcagcccttcttgcttgttacaccctatc

SEQ ID NO: 214350 - DNA, 51 bp, Artificial
  Synthetic oligonucleotide
gggaatcacgatgctaacgccaaacgtctgctagctgttgacctagacacc

SEQ ID NO: 214351 - DNA, 51 bp, Artificial
  Synthetic oligonucleotide
cgtaagtcccaatcagaatgtgtagcactcccgtaacattggtcatggact

SEQ ID NO: 214352 - DNA, 51 bp, Artificial
  Synthetic oligonucleotide
cgggtaattaatccgctcatcgcagaacttgaaagcgggtgcgtgggtagg

SEQ ID NO: 214353 - DNA, 51 bp, Artificial
  Synthetic oligonucleotide
cttgcccggtagcttgtccttctgcctgaactaccgggctttcgattttcc

SEQ ID NO: 214354 - DNA, 51 bp, Artificial
  Synthetic oligonucleotide
gaatcatccttaagaactcgcttactgcgaccagtaacttcagccacttgc

SEQ ID NO: 214355 - DNA, 51 bp, Artificial
  Synthetic oligonucleotide
atttacaccactacctcgcgctacctccctagcagaagcggctgagtatgg

SEQ ID NO: 214356 - DNA, 53 bp, Artificial
  Synthetic oligonucleotide
cggcttaccttccgaggggtaagccgcgtaacaaaggatacactctatagaaa

SEQ ID NO: 214357 - DNA, 51 bp, Artificial
  Synthetic oligonucleotide
ggtatccgcgatagaggtactttagaatctgcactggctcaacctcggatg

SEQ ID NO: 214358 - DNA, 51 bp, Artificial
  Synthetic oligonucleotide
gacactaccgccgtcacccttgcggtcgaaccagagggaatcatcaccgac

SEQ ID NO: 214359 - DNA, 51 bp, Artificial
  Synthetic oligonucleotide
attggctgctgataaggctctagtctgtttttgtgattcgctgtgaatcga

SEQ ID NO: 214360 - DNA, 51 bp, Artificial
  Synthetic oligonucleotide
aggtacgactacaggtgatggctgtaaacatactgacaccaactcctaaag

SEQ ID NO: 214361 - DNA, 51 bp, Artificial
  Synthetic oligonucleotide
ggtcatcccaaagtattgcacctgcgtcagtgggctaattctatcacaaca

SEQ ID NO: 214362 - DNA, 51 bp, Artificial
  Synthetic oligonucleotide
gccgtcggcaacactacgactccctgtcttcccgctaatttccaagccgct

SEQ ID NO: 214363 - DNA, 51 bp, Artificial
  Synthetic oligonucleotide
cgagtccctatcccaccccctagtcgggacatggcacggcctctgccggtg

SEQ ID NO: 214364 - DNA, 51 bp, Artificial
  Synthetic oligonucleotide
gatgctgctggtctagcacgctgtctggcccaatcccttaaggctgtgacc

SEQ ID NO: 214365 - DNA, 51 bp, Artificial
  Synthetic oligonucleotide
atcccaccccctagtcgggacatggcacggcctctgccggtgagtcgtggc

SEQ ID NO: 214366 - DNA, 51 bp, Artificial
  Synthetic oligonucleotide
gtaattgcctagcggtaagaatttcaaagttctgctgatggatttgaactg

SEQ ID NO: 214367 - DNA, 60 bp, Artificial
  Synthetic oligonucleotide
cttccttaccactgatagagagacctagtgtgactctggcaataccactgtccacagcac

SEQ ID NO: 214368 - DNA, 48 bp, Artificial
  Synthetic oligonucleotide
ccgtccgcgaactaccccttttcccctaccggaagtggtgcttttccc

SEQ ID NO: 214369 - DNA, 51 bp, Artificial
  Synthetic oligonucleotide
ccctgcgtggcaagcagcaccaagtcttgtgttgcggtatcgagaatttgc

SEQ ID NO: 214370 - DNA, 51 bp, Artificial
  Synthetic oligonucleotide
ccgaattggatcgactcgtttagttgcgactcgttcagagaatcgtgttcc

SEQ ID NO: 214371 - DNA, 51 bp, Artificial
  Synthetic oligonucleotide
taagaatctactttaccgttgttgtcttctaaggagcgtgctttagcaagt

SEQ ID NO: 214372 - DNA, 51 bp, Artificial
  Synthetic oligonucleotide
ccataattggtctttcttcggcacttttgactttgatgcgaatagtcactc

SEQ ID NO: 214373 - DNA, 51 bp, Artificial
  Synthetic oligonucleotide
taacccagacgtaacagcacccatccaggccgcacgtttaccccagcgtaa

SEQ ID NO: 214374 - DNA, 51 bp, Artificial
  Synthetic oligonucleotide
ctagatgttgatctaagtcggtgatactacgcgccacttgtagataacccg

SEQ ID NO: 214375 - DNA, 51 bp, Artificial
  Synthetic oligonucleotide
ctatccatcacaaatccgcattcacaaacatgagttcttgtggatagagat

SEQ ID NO: 214376 - DNA, 51 bp, Artificial
  Synthetic oligonucleotide
taaagatgcgatcgctccatgccccacacacggctcaccaatagcaccgga

SEQ ID NO: 214377 - DNA, 51 bp, Artificial
  Synthetic oligonucleotide
ctcgcattgtcgtgatgaccctggcttcaggggaacgcagagaagcgggag

SEQ ID NO: 214378 - DNA, 55 bp, Artificial
  Synthetic oligonucleotide
caaaatgcgccgtaaactacccctagtatccctctactgtacccaatgacagtcg

SEQ ID NO: 214379 - DNA, 55 bp, Artificial
  Synthetic oligonucleotide
cgggtctaaacgaccaggccaaagttccccacgttcgcacttactcatcgccaca

SEQ ID NO: 214380 - DNA, 51 bp, Artificial
  Synthetic oligonucleotide
tacccgcagccgtcggcaacactacgactccctgtcttcccgctaatttcc

SEQ ID NO: 214381 - DNA, 51 bp, Artificial
  Synthetic oligonucleotide
taaacagcgtgagaggacgtggcgatagggatgggagcgagcttcttcggg

SEQ ID NO: 214382 - DNA, 51 bp, Artificial
  Synthetic oligonucleotide
ctcgctctcccgcataatactcggttgaagttggcattgagccgagatgtg

SEQ ID NO: 214383 - DNA, 51 bp, Artificial
  Synthetic oligonucleotide
gctgtctctacgccaaagtacacctataggaggctcaatcttacttacggg

SEQ ID NO: 214384 - DNA, 51 bp, Artificial
  Synthetic oligonucleotide
catcgttatttacatcgtcagcttggtcgttactaaatgtccggttggcaa

SEQ ID NO: 214385 - DNA, 51 bp, Artificial
  Synthetic oligonucleotide
ggcttgcgtcctggctcccaatcggctaactcttctagcaactgtgcggct

SEQ ID NO: 214386 - DNA, 51 bp, Artificial
  Synthetic oligonucleotide
ccaagccctcaccgaaccgccccctaacccccaattctgggaggacaagaa

SEQ ID NO: 214387 - DNA, 50 bp, Artificial
  Synthetic oligonucleotide
gccggaaccacggattgctgtaacttcgatgcggtacacgcgatcgccta

SEQ ID NO: 214388 - DNA, 50 bp, Artificial
  Synthetic oligonucleotide
gccgcgatccctcagcgttccacactttgctgcgccaagagcaagttacg

SEQ ID NO: 214389 - DNA, 50 bp, Artificial
  Synthetic oligonucleotide
cccgcagcaagtaccgccaggttcgactactagcgcggctcctgctacta

SEQ ID NO: 214390 - DNA, 55 bp, Artificial
  Synthetic oligonucleotide
ctggattcttggggtaactcatcccagtaacccatctcttcaaatcggttataaa

SEQ ID NO: 214391 - DNA, 50 bp, Artificial
  Synthetic oligonucleotide
ccagtggatgagacgggtaggatcgcccaggcggtatggacgcagcgatc

SEQ ID NO: 214392 - DNA, 50 bp, Artificial
  Synthetic oligonucleotide
aatcgtcgcgagacgcagaacggcagtccctaggaaggtcgacccaggaa

SEQ ID NO: 214393 - DNA, 50 bp, Artificial
  Synthetic oligonucleotide
gccggactggggaggcaatcgctctacagtggaagcatatcgcaccggat

SEQ ID NO: 214394 - DNA, 50 bp, Artificial
  Synthetic oligonucleotide
ccccaacgtccagcactcctataacagtggtgacacccccaacgtccagc

SEQ ID NO: 214395 - DNA, 50 bp, Artificial
  Synthetic oligonucleotide
gcgacagtcctacccaacgggtgggggagcgacctgctacccattttagc

SEQ ID NO: 214396 - DNA, 50 bp, Artificial
  Synthetic oligonucleotide
gcgcatcacgaggctgcaccttacccgaagggataggacgatgacgcgtc

SEQ ID NO: 214397 - DNA, 50 bp, Artificial
  Synthetic oligonucleotide
tggctctgggtttgccatgttcctcctcccgacgctgttgacgctcccgt

SEQ ID NO: 214398 - DNA, 50 bp, Artificial
  Synthetic oligonucleotide
acaaagttgagaaccgccgaggcattggtgtagcgcccagcgagagccta

SEQ ID NO: 214399 - DNA, 50 bp, Artificial
  Synthetic oligonucleotide
ccatgccacaaaaagcggtggcggcaactttgctgtctgttcgcgcagag

SEQ ID NO: 214400 - DNA, 50 bp, Artificial
  Synthetic oligonucleotide
cccacagggcgaactacaacgccccctatccctagactaaacgctgtcgg

SEQ ID NO: 214401 - DNA, 57 bp, Artificial
  Synthetic oligonucleotide
ctgctttttctagataggagcgtgctttttcccattgtcctaatcgtccatataaag

SEQ ID NO: 214402 - DNA, 50 bp, Artificial
  Synthetic oligonucleotide
gcgctatccatgagttccgcccgacgcttgactaggtgtaacccagccga

SEQ ID NO: 214403 - DNA, 50 bp, Artificial
  Synthetic oligonucleotide
gcgctgacggctctggtactgtctgagttgtcggtggctctgggggaata

SEQ ID NO: 214404 - DNA, 50 bp, Artificial
  Synthetic oligonucleotide
tgctttatgccaggaaacccctccacctgagtggctccccaagaccacgc

SEQ ID NO: 214405 - DNA, 50 bp, Artificial
  Synthetic oligonucleotide
aaaacccgcctaatgcaccagttccgaggatggcgtacctgcgttcgcgg

SEQ ID NO: 214406 - DNA, 50 bp, Artificial
  Synthetic oligonucleotide
ttttcgttaccttacaaacagcaccactcggacgcagcttctggcgtaag

SEQ ID NO: 214407 - DNA, 50 bp, Artificial
  Synthetic oligonucleotide
ctcgcacgggctaaaagttgttgtcgtttctctctcagtcccgtagtaat

SEQ ID NO: 214408 - DNA, 50 bp, Artificial
  Synthetic oligonucleotide
ctaatacgaccttgctgatacaagcttgcgaattcctcactaaagcagtg

SEQ ID NO: 214409 - DNA, 50 bp, Artificial
  Synthetic oligonucleotide
ctgcttggagaatatcgtaccatctacattagccaggattgcaacctagc

SEQ ID NO: 214410 - DNA, 50 bp, Artificial
  Synthetic oligonucleotide
aaacgcaagcgacaaggcatagcgtagctgtcggcgtgtccgcgtgaggg

SEQ ID NO: 214411 - DNA, 50 bp, Artificial
  Synthetic oligonucleotide
ctggcagggcaaatgcacgcctaatagaatcagccgtaaatcgttgtgtg

SEQ ID NO: 214412 - DNA, 57 bp, Artificial
  Synthetic oligonucleotide
ctgcttgtaagtcgtggtgtaattgggctgcaacttcggctagtccgtgcttacgtt

SEQ ID NO: 214413 - DNA, 50 bp, Artificial
  Synthetic oligonucleotide
ctggcgaggcagaccattgaccagcttacaagttgtgattaatctaattc

SEQ ID NO: 214414 - DNA, 50 bp, Artificial
  Synthetic oligonucleotide
cgtagctatgccgcaggctttacggctgcgcccttctcctgtcgcagacg

SEQ ID NO: 214415 - DNA, 50 bp, Artificial
  Synthetic oligonucleotide
aaccatctgcaagggcagcttggacggctgtacgagattgggcgatcgca

SEQ ID NO: 214416 - DNA, 50 bp, Artificial
  Synthetic oligonucleotide
ctggtccgccagtggatgagacgggtaggatcgcccaggcggtatggacg

SEQ ID NO: 214417 - DNA, 50 bp, Artificial
  Synthetic oligonucleotide
cgggtgttggtgaggtcgtgattcaagtgggtgcggcgacaacttgcggc

SEQ ID NO: 214418 - DNA, 50 bp, Artificial
  Synthetic oligonucleotide
aacgccgattttccataaccacccgccgcagttacaccgacaagccgcac

SEQ ID NO: 214419 - DNA, 50 bp, Artificial
  Synthetic oligonucleotide
aacggttgcgatcgcctatggtggggcgtagcccatcgcctacatcaagg

SEQ ID NO: 214420 - DNA, 50 bp, Artificial
  Synthetic oligonucleotide
cgcgagctcctgtagggagtgcaatgcgatcgcccgtagggagtgcaatg

SEQ ID NO: 214421 - DNA, 50 bp, Artificial
  Synthetic oligonucleotide
cgccggtgtgttcccctgtttcatagttgggtgggttgttgcgactgcgg

SEQ ID NO: 214422 - DNA, 50 bp, Artificial
  Synthetic oligonucleotide
cgccggctttatccttatgggcgcgggctgctgaacgttggcatcctaac

SEQ ID NO: 214423 - DNA, 59 bp, Artificial
  Synthetic oligonucleotide
cgtgatacagttggattaccacaccacaactaatcacggatttttgtgccatgtccgaa

SEQ ID NO: 214424 - DNA, 50 bp, Artificial
  Synthetic oligonucleotide
gacgcagaacggcagtccctaggaaggtcgacccaggaaccgccccgcag

SEQ ID NO: 214425 - DNA, 50 bp, Artificial
  Synthetic oligonucleotide
aagcgagcgatcgtatttggctccccggcgcactggcccagttaaccgcc

SEQ ID NO: 214426 - DNA, 50 bp, Artificial
  Synthetic oligonucleotide
gacggaggtgtaaccacattataagtcggttgtaacgcctcattcgtaga

SEQ ID NO: 214427 - DNA, 50 bp, Artificial
  Synthetic oligonucleotide
gactgtctgcatcgagacgagcctgattgtgtggtgcggggcgactggga

SEQ ID NO: 214428 - DNA, 50 bp, Artificial
  Synthetic oligonucleotide
aagggttgatcccctgcttgggcattgccaataacgcgcacactgcgact

SEQ ID NO: 214429 - DNA, 50 bp, Artificial
  Synthetic oligonucleotide
gaggagttttggcaatacgaaagctgagtttaggtcgagtggggttactg

SEQ ID NO: 214430 - DNA, 50 bp, Artificial
  Synthetic oligonucleotide
gcacccgtaattctccgtaacgagcgctggtccgccagtggatgagacgg

SEQ ID NO: 214431 - DNA, 50 bp, Artificial
  Synthetic oligonucleotide
gcaccgacactcaagccgacaagtgccattcccaccttcctcgcccggcg

SEQ ID NO: 214432 - DNA, 50 bp, Artificial
  Synthetic oligonucleotide
gcagcagctacaggcagtattagcgtacctgtaaccgcagaacgttccat

SEQ ID NO: 214433 - DNA, 50 bp, Artificial
  Synthetic oligonucleotide
gccacggtcagacagtttcccccagcgaaattctgcgcgaagtttggggc

SEQ ID NO: 214434 - DNA, 60 bp, Artificial
  Synthetic oligonucleotide
ctaactatgagcctgactattgggatattgatttgcgcttagattctgatgactttccgc

SEQ ID NO: 214435 - DNA, 50 bp, Artificial
  Synthetic oligonucleotide
gccagggtttgttatatcgcggtccagaccccaagggacaggcggcgatt

SEQ ID NO: 214436 - DNA, 50 bp, Artificial
  Synthetic oligonucleotide
accgtcggggctaaatgccacgccccaaaccgaactgctatgaccagtga

SEQ ID NO: 214437 - DNA, 50 bp, Artificial
  Synthetic oligonucleotide
agtgccaagcggatttcccccatgagcaagtggcgtggatttggcgtgga

SEQ ID NO: 214438 - DNA, 50 bp, Artificial
  Synthetic oligonucleotide
agtgcagcgggatgttttgtgggtagcaacctctagtgctgcttgggcgc

SEQ ID NO: 214439 - DNA, 50 bp, Artificial
  Synthetic oligonucleotide
agtcgctacaacagggggaacccccgcaacgcgccagctcatgaatcgcg

SEQ ID NO: 214440 - DNA, 50 bp, Artificial
  Synthetic oligonucleotide
agggctagttatggcacgccagttgattcaagcaggagcgcgtttggcga

SEQ ID NO: 214441 - DNA, 50 bp, Artificial
  Synthetic oligonucleotide
agggcgtacatatgctgcgctaccaacgaagtggcggttcccagtgctgc

SEQ ID NO: 214442 - DNA, 50 bp, Artificial
  Synthetic oligonucleotide
acctggcctgtgcgtccgcgtaataccgtcatcccatctgccgccaaaaa

SEQ ID NO: 214443 - DNA, 50 bp, Artificial
  Synthetic oligonucleotide
acgaatagttccacagtggcgttagcgtagcttattctatgtatcgtatc

SEQ ID NO: 214444 - DNA, 50 bp, Artificial
  Synthetic oligonucleotide
acgcaccgtgttcaactccttagcaaaccgcaaacgttcacccgggggcg

SEQ ID NO: 214445 - DNA, 57 bp, Artificial
  Synthetic oligonucleotide
ctaacttgaactggtttgataagcttggctgaagccaaaatatttctcggagtgctt

SEQ ID NO: 214446 - DNA, 50 bp, Artificial
  Synthetic oligonucleotide
acggcccaatccattgcactaccatcaccgcgccctaaatagcggtgcgc

SEQ ID NO: 214447 - DNA, 50 bp, Artificial
  Synthetic oligonucleotide
acggtacgcgctgaccactcagccatgctagtagcgggacgatgagtgcg

SEQ ID NO: 214448 - DNA, 50 bp, Artificial
  Synthetic oligonucleotide
acgtcccacaaccgcatgagtgcgattgtcccccaacccacaacgacggc

SEQ ID NO: 214449 - DNA, 50 bp, Artificial
  Synthetic oligonucleotide
agggaaatccggcgcgagtgcgaaccctcaaccttgtgggactcaaacgg

SEQ ID NO: 214450 - DNA, 50 bp, Artificial
  Synthetic oligonucleotide
aggattcgatattgcgataatcttgactactgctaataagccgcagtgta

SEQ ID NO: 214451 - DNA, 50 bp, Artificial
  Synthetic oligonucleotide
agcttgtctcgcctagctactccggctcaagccctaggtacggggctcct

SEQ ID NO: 214452 - DNA, 50 bp, Artificial
  Synthetic oligonucleotide
agcttgcttccacgttcgcgtagcgtcccgtagggaagtggtacggctgc

SEQ ID NO: 214453 - DNA, 50 bp, Artificial
  Synthetic oligonucleotide
tagtgtggccctgatggaagcagcacaactcctgggacacgaggtctgga

SEQ ID NO: 214454 - DNA, 50 bp, Artificial
  Synthetic oligonucleotide
gttaccgggtatatccaattccttaagctatcgtaacggctctgggcccc

SEQ ID NO: 214455 - DNA, 50 bp, Artificial
  Synthetic oligonucleotide
agctagactatgccacttccccgccgtagcgggtcgtactcacgcctcaa

SEQ ID NO: 214456 - DNA, 50 bp, Artificial
  Synthetic oligonucleotide
ctaagtaaatttacgttgggttctgggaaagtattccccaacatcccaaa

SEQ ID NO: 214457 - DNA, 50 bp, Artificial
  Synthetic oligonucleotide
agcgcgagagcgtacctgttggctgcaaggtgagacagcgctgcccagag

SEQ ID NO: 214458 - DNA, 50 bp, Artificial
  Synthetic oligonucleotide
agcctttccggtgcgatgacaccagcaggatttggggtttcagcgcttgc

SEQ ID NO: 214459 - DNA, 50 bp, Artificial
  Synthetic oligonucleotide
gttgggtggtacattgtcgggtgctgtgctatcgggatctgtattactag

SEQ ID NO: 214460 - DNA, 50 bp, Artificial
  Synthetic oligonucleotide
agcctacacgcgatcgctctggcatagttgctgctgtgggtgtctgccat

SEQ ID NO: 214461 - DNA, 50 bp, Artificial
  Synthetic oligonucleotide
agaaccaacgggcgatcgctgactataaccaagccattcgcctcgcgcct

SEQ ID NO: 214462 - DNA, 50 bp, Artificial
  Synthetic oligonucleotide
agcccgcacttcggctgcgctcagtgaccgtcgtagacatcgctttggga

SEQ ID NO: 214463 - DNA, 50 bp, Artificial
  Synthetic oligonucleotide
agcatcactcccggacaagcggcggtgtggtacgacggcgagaaagtctt

SEQ ID NO: 214464 - DNA, 50 bp, Artificial
  Synthetic oligonucleotide
agacgcttcaacagccgcaaacccgcaagcgcaagagactttgtggcagc

SEQ ID NO: 214465 - DNA, 50 bp, Artificial
  Synthetic oligonucleotide
agcaggccgtacccgcaggtataggagtttccactgtagcagttgcggcg

SEQ ID NO: 214466 - DNA, 50 bp, Artificial
  Synthetic oligonucleotide
agcaaccaggggatttggtcgccgcaggaactctgaacgagtcaggagcg

SEQ ID NO: 214467 - DNA, 60 bp, Artificial
  Synthetic oligonucleotide
ctgatataaagtttggcagcataagtctagattgttataagcttaatacgcatcagtttg

SEQ ID NO: 214468 - DNA, 50 bp, Artificial
  Synthetic oligonucleotide
ccagagtcgccctggtgcgctcatgttggtgattcgcggctgtatcgctt

SEQ ID NO: 214469 - DNA, 50 bp, Artificial
  Synthetic oligonucleotide
tgattagacggactgcgaagttgaacataccaatcgctgtcataacttac

SEQ ID NO: 214470 - DNA, 50 bp, Artificial
  Synthetic oligonucleotide
acaccccgactgcctagccaaatggcagctatggcgtgacccttggcccg

SEQ ID NO: 214471 - DNA, 50 bp, Artificial
  Synthetic oligonucleotide
caggggacctcctagggttccgacggcactagctaccacggcgtaggggt

SEQ ID NO: 214472 - DNA, 50 bp, Artificial
  Synthetic oligonucleotide
cagccgcttccgtatgccctgcgcgtttgagtacgcccccagctttcgcc

SEQ ID NO: 214473 - DNA, 50 bp, Artificial
  Synthetic oligonucleotide
cacgatggcgacctaaaggcgggcaactctacacccggctcggtaacacc

SEQ ID NO: 214474 - DNA, 50 bp, Artificial
  Synthetic oligonucleotide
gggaagtgtgccatcctccaagttgacgggccacagcataagggccaacg

SEQ ID NO: 214475 - DNA, 50 bp, Artificial
  Synthetic oligonucleotide
caccagttccgaggatggcgtacctgcgttcgcggagcagtccgaaggaa

SEQ ID NO: 214476 - DNA, 50 bp, Artificial
  Synthetic oligonucleotide
caagcgcatatttcactggctgtccggtattccacaagctaccacgcgaa

SEQ ID NO: 214477 - DNA, 50 bp, Artificial
  Synthetic oligonucleotide
accattgggtggccaacgacaccccaccagcccactgttttgccctactg

SEQ ID NO: 214478 - DNA, 57 bp, Artificial
  Synthetic oligonucleotide
ctaatcgcttgggcaaccgagattttagaacagcgccgggaggaaatgccccatgcc

SEQ ID NO: 214479 - DNA, 50 bp, Artificial
  Synthetic oligonucleotide
ggtcctgcggcttgttgtggtgtggtgggaatcaaaccagcgcggggaag

SEQ ID NO: 214480 - DNA, 50 bp, Artificial
  Synthetic oligonucleotide
acccgcaggagtgcgttctggtcagtctctgcgcttacgtggcaagggat

SEQ ID NO: 214481 - DNA, 50 bp, Artificial
  Synthetic oligonucleotide
tcggcggtatgggtttggccacgataaccgcgcacctccctagaaccgga

SEQ ID NO: 214482 - DNA, 50 bp, Artificial
  Synthetic oligonucleotide
acccgctcccgaacaacgatttcctgatgcccgccaagcgctgaatgctc

SEQ ID NO: 214483 - DNA, 50 bp, Artificial
  Synthetic oligonucleotide
attgccctcggtttgggagccggagcagatacacgtcgtccccttggttt

SEQ ID NO: 214484 - DNA, 50 bp, Artificial
  Synthetic oligonucleotide
attgagtcctttaccggagtcagcgccccctacgaaccacccaaagcgcc

SEQ ID NO: 214485 - DNA, 50 bp, Artificial
  Synthetic oligonucleotide
atggtttctcaaccgtagggtgggtatagcccaaggggcatggctgcgct

SEQ ID NO: 214486 - DNA, 50 bp, Artificial
  Synthetic oligonucleotide
acccgtgggatgggttggcaactggcatgagaacccaaagcctcagtggg

SEQ ID NO: 214487 - DNA, 50 bp, Artificial
  Synthetic oligonucleotide
atggtggcgtagcattcccggcgcaccattcttacttccccggatgggag

SEQ ID NO: 214488 - DNA, 49 bp, Artificial
  Synthetic oligonucleotide
accggcgggaaatggcttgggctaccgtcttcaggttaaccccaacggg

SEQ ID NO: 214489 - DNA, 55 bp, Artificial
  Synthetic oligonucleotide
ggtagcgaagcgtgtccagccgtccagctaacgttttaatcgctgggtgttttgg

SEQ ID NO: 214490 - DNA, 60 bp, Artificial
  Synthetic oligonucleotide
ctcttgatgtcaaacaatctgtagggtggcgttgctctaagtgtggcttacagtgcattc

SEQ ID NO: 214491 - DNA, 50 bp, Artificial
  Synthetic oligonucleotide
atgccgggaacctacggtgaagaggcaacactccaagtcttgcggggagc

SEQ ID NO: 214492 - DNA, 50 bp, Artificial
  Synthetic oligonucleotide
atgaggcgtatcgctggatagcgccgcagactcaagccgctagagttgcg

SEQ ID NO: 214493 - DNA, 50 bp, Artificial
  Synthetic oligonucleotide
tccgacttggctgctatgggcgcctctcccctaggaattaccgtcgccct

SEQ ID NO: 214494 - DNA, 50 bp, Artificial
  Synthetic oligonucleotide
atcggcccatgtcgggtatagcgcaccgtttgcacaatcggctgactccc

SEQ ID NO: 214495 - DNA, 50 bp, Artificial
  Synthetic oligonucleotide
tcccccacacagggcacaaaactggttcttgggttgccaacccgctgtta

SEQ ID NO: 214496 - DNA, 50 bp, Artificial
  Synthetic oligonucleotide
accggctgcacttaaagcggtaattgcggcactcgcccccggaataggta

SEQ ID NO: 214497 - DNA, 50 bp, Artificial
  Synthetic oligonucleotide
atccctggcccggctgtggtaaaaactaccgtagggcgatcgctcgcaaa

SEQ ID NO: 214498 - DNA, 50 bp, Artificial
  Synthetic oligonucleotide
atcagcggtggcatcgtagttggtttgccgcatccgcccctgggtatcga

SEQ ID NO: 214499 - DNA, 50 bp, Artificial
  Synthetic oligonucleotide
ataagacgatgccacattctggtgtcaccaactctccgcccccggtggct

SEQ ID NO: 214500 - DNA, 50 bp, Artificial
  Synthetic oligonucleotide
tcatgaggtggctggctaccgtggggaggttgctagacccacccgcgaca

SEQ ID NO: 214501 - DNA, 58 bp, Artificial
  Synthetic oligonucleotide
ctactgaaaatcctaaaatatcagcctatgttcctcaagtagtttatgactccttcaa

SEQ ID NO: 214502 - DNA, 50 bp, Artificial
  Synthetic oligonucleotide
accgtaaatgattgccgcagattgttaatatagttgtgctaccgaaaacg

SEQ ID NO: 214503 - DNA, 56 bp, Artificial
  Synthetic oligonucleotide
ctcagtccaactaccgactcagttcgctcctaccttaaagaaatcggtcgctatcc

SEQ ID NO: 214504 - DNA, 60 bp, Artificial
  Synthetic oligonucleotide
ctatcctggttatggcaacctcaaacctgctatgttaattgctgggaatgatgtccccgc

SEQ ID NO: 214505 - DNA, 58 bp, Artificial
  Synthetic oligonucleotide
ctatcgtacatagttaccccggctcaattcttgcctttcgccagagggcaggacgtgc

SEQ ID NO: 214506 - DNA, 58 bp, Artificial
  Synthetic oligonucleotide
gctttatctgaaagaggtttagagaacttaattagcgatgcttttagtgggcagccgc

SEQ ID NO: 214507 - DNA, 60 bp, Artificial
  Synthetic oligonucleotide
ccaacgccaggtgtagactgatcctgccgctaaagcagactccaactgcacatgggctga

SEQ ID NO: 214508 - DNA, 55 bp, Artificial
  Synthetic oligonucleotide
gctgtacaaggataattttctcaaagcggaatggtgttaaacccgattattagag

SEQ ID NO: 214509 - DNA, 59 bp, Artificial
  Synthetic oligonucleotide
ccaattttaccgagcatccgagagtctgagaagtttaagagtgcaatccgacaaggcaa

SEQ ID NO: 214510 - DNA, 60 bp, Artificial
  Synthetic oligonucleotide
gctatcacatgattggtgtccttctcatgttagttctgttgcttctaccttttcgtattc

SEQ ID NO: 214511 - DNA, 53 bp, Artificial
  Synthetic oligonucleotide
caaccgaagtcaacaacagccaacccgtaacactacccaccgttggcgaatcc

SEQ ID NO: 214512 - DNA, 58 bp, Artificial
  Synthetic oligonucleotide
ccagagctgttgaagtattgcaccaaggaaagtgatttggtttgtgatcggcggtggt

SEQ ID NO: 214513 - DNA, 59 bp, Artificial
  Synthetic oligonucleotide
gcgggttttggagtgtatgccgggcgactgttgtgtggcctgcatgagtaaacttgttc

SEQ ID NO: 214514 - DNA, 60 bp, Artificial
  Synthetic oligonucleotide
gcggctttttggcaatagagatcgtatgcagatcatgcgtagtactttcttcgaccttaa

SEQ ID NO: 214515 - DNA, 60 bp, Artificial
  Synthetic oligonucleotide
gcgctgtggcatcagggtctggagcgtggtgctgatgtgagcgtggcgctgtggcatcag

SEQ ID NO: 214516 - DNA, 59 bp, Artificial
  Synthetic oligonucleotide
cccagcatgatcgcgaaaggtagcaggtaataaagcgatcaccacaccactaactaacc

SEQ ID NO: 214517 - DNA, 59 bp, Artificial
  Synthetic oligonucleotide
gccgccgagagggaggttgatctttagtactacaagagggactgtcacggtgatgccca

SEQ ID NO: 214518 - DNA, 58 bp, Artificial
  Synthetic oligonucleotide
cccccagtcgcgtcaccgctttagtcttgcgacgaccagaattaatacagcctaatga

SEQ ID NO: 214519 - DNA, 57 bp, Artificial
  Synthetic oligonucleotide
cccgtttgcagtaatgctttagaccgtaattgacgtaatattgtcaaagcttgtcta

SEQ ID NO: 214520 - DNA, 55 bp, Artificial
  Synthetic oligonucleotide
ccgaagtcatagtaagttcgtagctctgacctaagttgccctcaaccgtcgtaac

SEQ ID NO: 214521 - DNA, 60 bp, Artificial
  Synthetic oligonucleotide
gccagcatgactcgacagccgcctttacgggcagtggcacatttacgccctactaacctc

SEQ ID NO: 214522 - DNA, 58 bp, Artificial
  Synthetic oligonucleotide
ggccacattggcggattgttgcttagtcccacaagtggccaatgctctgcgtttcggc

SEQ ID NO: 214523 - DNA, 55 bp, Artificial
  Synthetic oligonucleotide
gcccaaggcgacgccatagaagcctccggctaattcatcgtcgagccaaacttcg

SEQ ID NO: 214524 - DNA, 55 bp, Artificial
  Synthetic oligonucleotide
agacagctcacaaggcttattcgtaccttccctaggcttccagctcttttggact

SEQ ID NO: 214525 - DNA, 55 bp, Artificial
  Synthetic oligonucleotide
gtgatgacttgattcgtcagtattcgttgtgtagcgaccctgcagacaccagtgc

SEQ ID NO: 214526 - DNA, 55 bp, Artificial
  Synthetic oligonucleotide
gtggccatgttaggacgaatcatacccgccccttttgagatcccaccgacagtat

SEQ ID NO: 214527 - DNA, 55 bp, Artificial
  Synthetic oligonucleotide
aacccataatggtcacattcaagctttcaagacaagtgctcgacacttctggagc

SEQ ID NO: 214528 - DNA, 55 bp, Artificial
  Synthetic oligonucleotide
gtgttccagcagagactgacgatctggctaagacgttagattacgaagctatctc

SEQ ID NO: 214529 - DNA, 51 bp, Artificial
  Synthetic oligonucleotide
aaggttggaggtaatgacttccaaaggttcgataaccgtggggtgaaatgg

SEQ ID NO: 214530 - DNA, 55 bp, Artificial
  Synthetic oligonucleotide
tctatggctcttcggtgctcttgccattgcactgatgtcactggttcgcctaact

SEQ ID NO: 214531 - DNA, 55 bp, Artificial
  Synthetic oligonucleotide
tgcgagctctctttgtcaatggtgtcgcagttaacctttcccacagttctgcggc

SEQ ID NO: 214532 - DNA, 55 bp, Artificial
  Synthetic oligonucleotide
tcgacatagatcaacctttagtgccttactttgcgtggaaagacgtgttaactcc

SEQ ID NO: 214533 - DNA, 55 bp, Artificial
  Synthetic oligonucleotide
acagtattctaggagttagtatgtctcgagttgctaatagtcccgtgacgcttcc

SEQ ID NO: 214534 - DNA, 55 bp, Artificial
  Synthetic oligonucleotide
gccagcctaaaatcttgttcggtatctatatctagtgcggaacgttggcttacac

SEQ ID NO: 214535 - DNA, 55 bp, Artificial
  Synthetic oligonucleotide
tgcttccacatgtctggaattaacgccgatggtacccaatctaaaacgtgattat

SEQ ID NO: 214536 - DNA, 55 bp, Artificial
  Synthetic oligonucleotide
acatgcggtacaacacggtaagagtattctgactcacccagacacgggacaagcc

SEQ ID NO: 214537 - DNA, 55 bp, Artificial
  Synthetic oligonucleotide
accacgatttatcctgaagggccgaccgaacaagctattcgctatgacgaacgac

SEQ ID NO: 214538 - DNA, 55 bp, Artificial
  Synthetic oligonucleotide
tatgggtagctagggaacctgcgaataagtcggcaacatgaggcaatctcaccga

SEQ ID NO: 214539 - DNA, 55 bp, Artificial
  Synthetic oligonucleotide
accctcacgcagcgagcggaatactgacacttcggcgacagacgatacgctctca

SEQ ID NO: 214540 - DNA, 55 bp, Artificial
  Synthetic oligonucleotide
tgtacatgaaatgagcggggaaaggtaggagccccggtaggtggggctcctgact

SEQ ID NO: 214541 - DNA, 55 bp, Artificial
  Synthetic oligonucleotide
tactgacccacataaccatgctgttagtaaagcgttgggttgagttgtcatatga

SEQ ID NO: 214542 - DNA, 53 bp, Artificial
  Synthetic oligonucleotide
acctgagtgttgtacataagaaggttgggaccccattggaagggaacaccgta

SEQ ID NO: 214543 - DNA, 55 bp, Artificial
  Synthetic oligonucleotide
tacgccactggaatttagtatggcgagcgtactaataaatcgggatgtgttgaaa

SEQ ID NO: 214544 - DNA, 55 bp, Artificial
  Synthetic oligonucleotide
taagtgcgcctaatcgatttgtgttggattgggtgagtaacaagtatcaaactcg

SEQ ID NO: 214545 - DNA, 55 bp, Artificial
  Synthetic oligonucleotide
ccagagagccagcggattaggttggcgggcacgcaagtagacattattgagccta

SEQ ID NO: 214546 - DNA, 55 bp, Artificial
  Synthetic oligonucleotide
gttttactttgcggcctctatgggtgctcattacaactcgtatcgccgtttgacc

SEQ ID NO: 214547 - DNA, 54 bp, Artificial
  Synthetic oligonucleotide
gttagcatctaggttttcaccactaaaacggggtaagaactgacgagcgtcgcc

SEQ ID NO: 214548 - DNA, 55 bp, Artificial
  Synthetic oligonucleotide
ggtgcggttaccacggcacacatcatcgtaaaataacccagttttgcgtagaaag

SEQ ID NO: 214549 - DNA, 55 bp, Artificial
  Synthetic oligonucleotide
ggtgcgccgacttggacactagaagatccaatcagtgggcaattttatcgtctcg

SEQ ID NO: 214550 - DNA, 55 bp, Artificial
  Synthetic oligonucleotide
ggtctggataaaccgcgctattagtcttaatcataatgtcgctacctcggtctct

SEQ ID NO: 214551 - DNA, 55 bp, Artificial
  Synthetic oligonucleotide
ggttccgttttaggcagcgttagcatagcgaatgcggctacgatagatttgcgtc

SEQ ID NO: 214552 - DNA, 55 bp, Artificial
  Synthetic oligonucleotide
gggtcgtactgaagtggtacgagctattacaggggcggatcctattgcctccggg

SEQ ID NO: 214553 - DNA, 55 bp, Artificial
  Synthetic oligonucleotide
ggggagcggaattttagtgtctgctctaggtagatacatcctggcccaggaagct

SEQ ID NO: 214554 - DNA, 55 bp, Artificial
  Synthetic oligonucleotide
ggctagcattacggcatgcatgactaacacaactagggtaattcgcgcacgcagc

SEQ ID NO: 214555 - DNA, 55 bp, Artificial
  Synthetic oligonucleotide
ggcgctgattacacggcctttctcatccgttttaacgtctacatcagtaggagcg

SEQ ID NO: 214556 - DNA, 55 bp, Artificial
  Synthetic oligonucleotide
gcatcgaatggggcttagacagtgaacagtcccgttctgaagtcattagttacgg

SEQ ID NO: 214557 - DNA, 55 bp, Artificial
  Synthetic oligonucleotide
ggcctgcagagattgctcggtcctatgagcagggcggagccgcttgcctatctgt

SEQ ID NO: 214558 - DNA, 55 bp, Artificial
  Synthetic oligonucleotide
ggccagaggctgtaccgtgataccaagtgttgccggttgcaaaccccgattcaga

SEQ ID NO: 214559 - DNA, 55 bp, Artificial
  Synthetic oligonucleotide
ggcagtaaatactttcgtgatagatccgactcgataaggcgtatcaagaccggtc

SEQ ID NO: 214560 - DNA, 54 bp, Artificial
  Synthetic oligonucleotide
gaatgatcaccaagcgagaagtgcgtttggcgattctatcgtatttaggggcag

SEQ ID NO: 214561 - DNA, 54 bp, Artificial
  Synthetic oligonucleotide
cgctaccggttctgcctctatactcaggtgcactagcgaatcgttcgacgttca

SEQ ID NO: 214562 - DNA, 54 bp, Artificial
  Synthetic oligonucleotide
ccggcgaagttcgctatgcgtctaattactttgatcagttctacgagtgggctc

SEQ ID NO: 214563 - DNA, 54 bp, Artificial
  Synthetic oligonucleotide
gttgctcaggcatggcaatactccgctgttgtgggcgagctagacgtttcatgg

SEQ ID NO: 214564 - DNA, 54 bp, Artificial
  Synthetic oligonucleotide
ggcagtgtgttgtcgaactgggcaacccagcgtgtcactgaattgttcccgatt

SEQ ID NO: 214565 - DNA, 54 bp, Artificial
  Synthetic oligonucleotide
cgtgtagccgatatgctatttgggctacttgccggcctcaatacgttttgtaat

SEQ ID NO: 214566 - DNA, 54 bp, Artificial
  Synthetic oligonucleotide
gtaaccctacgatcgcaggtgcttgagcatcgtacatcgaaagctcgaaatcca

SEQ ID NO: 214567 - DNA, 55 bp, Artificial
  Synthetic oligonucleotide
ccatgccgctgtaaccagcttaattgtactcgccattattacggcaattgctttg

SEQ ID NO: 214568 - DNA, 54 bp, Artificial
  Synthetic oligonucleotide
gtaaacactacgccacagcatttcgcgtggaagaacttgcagcgacagtgaata

SEQ ID NO: 214569 - DNA, 53 bp, Artificial
  Synthetic oligonucleotide
tcgcgcaactatggcgagagatcttagacagtgaggctggtcttgctgctcgg

SEQ ID NO: 214570 - DNA, 53 bp, Artificial
  Synthetic oligonucleotide
caggcaccttgaaccctaagggatgggcttgtattgaaggctgccctaatgcg

SEQ ID NO: 214571 - DNA, 53 bp, Artificial
  Synthetic oligonucleotide
aagctgtaaccggattcgcatgacagtggaaggcagattgctactatgtcttg

SEQ ID NO: 214572 - DNA, 53 bp, Artificial
  Synthetic oligonucleotide
tcctgataacgacattgagctaagcaatgatctggatgctaaaggttctctct

SEQ ID NO: 214573 - DNA, 53 bp, Artificial
  Synthetic oligonucleotide
agtgaaacgaacggttgatattttccgtggcagtatcgtagacatgacgccat

SEQ ID NO: 214574 - DNA, 53 bp, Artificial
  Synthetic oligonucleotide
ttcgcgtacaagaatggacgtcgaacaagtcagtctctgcgattgctcattaa

SEQ ID NO: 214575 - DNA, 53 bp, Artificial
  Synthetic oligonucleotide
ctaccctaaaattgaacgcattcgattcgatcataagggagcttccgattttg

SEQ ID NO: 214576 - DNA, 53 bp, Artificial
  Synthetic oligonucleotide
aaaatgtgcggggctgattccgagtacggattcaaaactgtattgtaaggttc

SEQ ID NO: 214577 - DNA, 53 bp, Artificial
  Synthetic oligonucleotide
caattcgggcaacttaaacacctgtaaatcatccccgtgaccgtgatagccct

SEQ ID NO: 214578 - DNA, 55 bp, Artificial
  Synthetic oligonucleotide
cccacaacaggcttggtgaatcatggtgacctgcgcccaacatgactacattgag

SEQ ID NO: 214579 - DNA, 52 bp, Artificial
  Synthetic oligonucleotide
aacaggcatactttctgctgccccacatgcaaccttgctcacggtcgcattt

SEQ ID NO: 214580 - DNA, 52 bp, Artificial
  Synthetic oligonucleotide
caacgtgtcagtaattacgcaatttcccaattcgttaacgccataaaacctc

SEQ ID NO: 214581 - DNA, 52 bp, Artificial
  Synthetic oligonucleotide
accaagcgccaacgttttcacacttagatcaggctcggttctttggcaatca

SEQ ID NO: 214582 - DNA, 52 bp, Artificial
  Synthetic oligonucleotide
gaacgagttgccctgtctcatctagtatggggacttcgcccaataggactga

SEQ ID NO: 214583 - DNA, 52 bp, Artificial
  Synthetic oligonucleotide
aactaggtcatgtgttacgccgaagttgttgcgtgcgtaatgataggcgtcg

SEQ ID NO: 214584 - DNA, 51 bp, Artificial
  Synthetic oligonucleotide
ccccgtctgggacaaaggtatacccgttaaatcgacccttgtttgctgtag

SEQ ID NO: 214585 - DNA, 52 bp, Artificial
  Synthetic oligonucleotide
ggttcatggaccattgcgtgaccctcaaggatttggctttcctgagtcggcc

SEQ ID NO: 214586 - DNA, 52 bp, Artificial
  Synthetic oligonucleotide
tgtagccaggacgctgcatcgccacaccgaattgaatagcttcaactgcacg

SEQ ID NO: 214587 - DNA, 52 bp, Artificial
  Synthetic oligonucleotide
gtctaggaataacaacggtatcgccgccttttagcttaggcatggcttgatc

SEQ ID NO: 214588 - DNA, 52 bp, Artificial
  Synthetic oligonucleotide
acgcgtctgtacttgtgatggcttcgcgtactagctccggccctttgtatat

SEQ ID NO: 214589 - DNA, 55 bp, Artificial
  Synthetic oligonucleotide
cccagcgtcacatcatttgaaaagagtcgaaccgcactatgatctggagcaaccc

SEQ ID NO: 214590 - DNA, 52 bp, Artificial
  Synthetic oligonucleotide
acgtcgtaagttgttggattaccttaagcgtaaagacgcagcacgttacact

SEQ ID NO: 214591 - DNA, 51 bp, Artificial
  Synthetic oligonucleotide
cccgcacttcttggtcgagcgccaatcaaaatggcgtagtccgccccatta

SEQ ID NO: 214592 - DNA, 51 bp, Artificial
  Synthetic oligonucleotide
gtgagtcatgtttgatgacaaagtacgcgaattgccaaccttacggtgggc

SEQ ID NO: 214593 - DNA, 51 bp, Artificial
  Synthetic oligonucleotide
agctgcggcggagtgcttcagcctttgtgcagattcccatagggtacgagg

SEQ ID NO: 214594 - DNA, 51 bp, Artificial
  Synthetic oligonucleotide
agatgctggcacctctgccttagaaggaacccgctcctcggcttgggcttg

SEQ ID NO: 214595 - DNA, 51 bp, Artificial
  Synthetic oligonucleotide
aggcgccaccctagacgcctgtataacaaagctccaagaggccggcgctat

SEQ ID NO: 214596 - DNA, 51 bp, Artificial
  Synthetic oligonucleotide
gcgcagtggcagacattggtgcctcttcaccagtttcgagccaagtcagcg

SEQ ID NO: 214597 - DNA, 51 bp, Artificial
  Synthetic oligonucleotide
agggccctcaccataaggattggtgtgaagctgaccttggggcatcgccat

SEQ ID NO: 214598 - DNA, 51 bp, Artificial
  Synthetic oligonucleotide
agttgggcggtgtgaggctggctaaataagcaagtgccgcttctgggccat

SEQ ID NO: 214599 - DNA, 51 bp, Artificial
  Synthetic oligonucleotide
tttcttccgcaatggtttctagtaaaagcgcacgagtctcagggctagttg

SEQ ID NO: 214600 - DNA, 55 bp, Artificial
  Synthetic oligonucleotide
gcagtatcggataaagcgggtcaatatcgagagtctgattatatagagcctggcg

SEQ ID NO: 214601 - DNA, 51 bp, Artificial
  Synthetic oligonucleotide
aagcccaacaaaccactggcgcaatgagcgacgctaagacgaggcaaacgc

SEQ ID NO: 214602 - DNA, 51 bp, Artificial
  Synthetic oligonucleotide
actcgctagaatcgtaatgcctaagtctgagctcatctcaatcggaattgc

SEQ ID NO: 214603 - DNA, 51 bp, Artificial
  Synthetic oligonucleotide
gccaagacggtgcataaagtaatgccctgtcatttcaaccgtggcttcccc

SEQ ID NO: 214604 - DNA, 51 bp, Artificial
  Synthetic oligonucleotide
ccccaaatctaattgtcaccaacctcgataattccaaaagccatctttact

SEQ ID NO: 214605 - DNA, 51 bp, Artificial
  Synthetic oligonucleotide
tgttgcctaaagaaccgggcagaagggaaagacgctttcaaagcacactgt

SEQ ID NO: 214606 - DNA, 51 bp, Artificial
  Synthetic oligonucleotide
ggttgatctaccccggcgctgtattgacggattcagtattagagcattggt

SEQ ID NO: 214607 - DNA, 51 bp, Artificial
  Synthetic oligonucleotide
aacgctctggtgttctttgggggctaggctctgatgccgctgtcgtagcgc

SEQ ID NO: 214608 - DNA, 51 bp, Artificial
  Synthetic oligonucleotide
accgcgcgccaagttgtccaatctgagccaaaggcatccgcagacgtagta

SEQ ID NO: 214609 - DNA, 51 bp, Artificial
  Synthetic oligonucleotide
aaagcgtcattttactttcgaatttacctcaaccggtgaagcgagatacca

SEQ ID NO: 214610 - DNA, 51 bp, Artificial
  Synthetic oligonucleotide
cccgcactcagtaccgtctgccacgttgcccctccgacactgcccatcgcc

SEQ ID NO: 214611 - DNA, 55 bp, Artificial
  Synthetic oligonucleotide
cccttgtagggcggttagtgctggtccatcacctttatatgggatgctgatgtag

SEQ ID NO: 214612 - DNA, 51 bp, Artificial
  Synthetic oligonucleotide
cgtcacaggcagactaggacgaaataaacgctgccccgctaatcgctcgcc

SEQ ID NO: 214613 - DNA, 51 bp, Artificial
  Synthetic oligonucleotide
aaagccgagggcgttacgcaagtgaacggtaggcgcaagatgcctatccgc

SEQ ID NO: 214614 - DNA, 50 bp, Artificial
  Synthetic oligonucleotide
ctcgctggatcgatcagaaccaataacttccgctacggcttgtgagtaat

SEQ ID NO: 214615 - DNA, 50 bp, Artificial
  Synthetic oligonucleotide
tgtgccgtcaggggcagtgactccattgcacggggcgataacctaagcca

SEQ ID NO: 214616 - DNA, 50 bp, Artificial
  Synthetic oligonucleotide
tgtgcccgttccgtcacagcgaggacatacgtggccgctggtttcgccaa

SEQ ID NO: 214617 - DNA, 50 bp, Artificial
  Synthetic oligonucleotide
tttggggcagcggtgctggttgcaatgatgtgtagccaagcttggggcct

SEQ ID NO: 214618 - DNA, 50 bp, Artificial
  Synthetic oligonucleotide
ctcactcagcccctaagcctatccagattaccttgggcgagtggccgccc

SEQ ID NO: 214619 - DNA, 50 bp, Artificial
  Synthetic oligonucleotide
ctcgctacgaacggcggttagccagatatccggcgcttgctctgccatcg

SEQ ID NO: 214620 - DNA, 50 bp, Artificial
  Synthetic oligonucleotide
gcttgctctaacatggccaagcgatgtgtcgagtgggttaacgccccgcc

SEQ ID NO: 214621 - DNA, 50 bp, Artificial
  Synthetic oligonucleotide
ggctggctaatcgagtgaggttgatccagcctgggcggctgcaaacatga

SEQ ID NO: 214622 - DNA, 55 bp, Artificial
  Synthetic oligonucleotide
gcaatcaatgatttcgttgcagactcgttttccccgcaagagaacgaccaagagc

SEQ ID NO: 214623 - DNA, 50 bp, Artificial
  Synthetic oligonucleotide
gcgttgattgacaaaccaactactcacatcaatcggagagcgagcgacat

SEQ ID NO: 214624 - DNA, 50 bp, Artificial
  Synthetic oligonucleotide
ggtcaaagcttgctaccatgcggcccttagcgttgcagcatgcccctcgt

SEQ ID NO: 214625 - DNA, 50 bp, Artificial
  Synthetic oligonucleotide
gcggcaccgcgaatgtggctcgctctccgatcgacgtcagtagctggttt

SEQ ID NO: 214626 - DNA, 50 bp, Artificial
  Synthetic oligonucleotide
gcgcgccctaatctgtgtgctcgctgtactactcggcggcatgctaggta

SEQ ID NO: 214627 - DNA, 50 bp, Artificial
  Synthetic oligonucleotide
gcgccggtttggtacctagctgaatatccgccggaggtacgtgtaccgcg

SEQ ID NO: 214628 - DNA, 50 bp, Artificial
  Synthetic oligonucleotide
gcgattaaagagcccgcactcagtaccgtctgccacgttgcccctccgac

SEQ ID NO: 214629 - DNA, 50 bp, Artificial
  Synthetic oligonucleotide
gcctgcgcttgcacacgtcgctcacccaaaccagactcatacgccattcg

SEQ ID NO: 214630 - DNA, 50 bp, Artificial
  Synthetic oligonucleotide
gcctccggtgctatctaagtccccacccgcggcttggttgatgcgatcag

SEQ ID NO: 214631 - DNA, 50 bp, Artificial
  Synthetic oligonucleotide
gccgcacattgtacgcgctgagggttctggtctcaatgccaaggccgact

SEQ ID NO: 214632 - DNA, 50 bp, Artificial
  Synthetic oligonucleotide
gccgcaactgcagcatcacgcacttgaccaagctgagcgtagcgagccat

SEQ ID NO: 214633 - DNA, 55 bp, Artificial
  Synthetic oligonucleotide
cagacgagttaaaacgaagattagcacgggatgcgtggatagtaaggcggctcgc

SEQ ID NO: 214634 - DNA, 54 bp, Artificial
  Synthetic oligonucleotide
ccgccacgaagtcatagctgtctcctgggaaccaagaacgggtaaattcgaccg

SEQ ID NO: 214635 - DNA, 50 bp, Artificial
  Synthetic oligonucleotide
gccccacaatgggcgctgtaggccacgtaagaacaaaaccagaggcccaa

SEQ ID NO: 214636 - DNA, 50 bp, Artificial
  Synthetic oligonucleotide
gcccaacttgaccgccatgtctggtgaaacagcgggctttgcagtaggcg

SEQ ID NO: 214637 - DNA, 50 bp, Artificial
  Synthetic oligonucleotide
gcatcgcaagggtcaccaggcttcgggttttgcgatccaggtcttcgcgt

SEQ ID NO: 214638 - DNA, 50 bp, Artificial
  Synthetic oligonucleotide
gcataaaccgcagcgggtccgttggtagcaccaccacgggacacacttga

SEQ ID NO: 214639 - DNA, 50 bp, Artificial
  Synthetic oligonucleotide
gcagcgtccagcattggttagtggcagcccagcgggatggcgtgcctatc

SEQ ID NO: 214640 - DNA, 50 bp, Artificial
  Synthetic oligonucleotide
gcacttgcacccgcctcgaccccaatgagacccggtgacgccagtgcatt

SEQ ID NO: 214641 - DNA, 50 bp, Artificial
  Synthetic oligonucleotide
taatgcgattacgggtgctgtcgaaagtttggcctgggatgcagcggatt

SEQ ID NO: 214642 - DNA, 50 bp, Artificial
  Synthetic oligonucleotide
tacgggctccgggtaaatgaccaccgcgagcgcttacggctttttcaccc

SEQ ID NO: 214643 - DNA, 50 bp, Artificial
  Synthetic oligonucleotide
tagagccccttggcaccattcgttggctgcttgaccgccactctcccgct

SEQ ID NO: 214644 - DNA, 50 bp, Artificial
  Synthetic oligonucleotide
gacacaccatgctcatccaagcctgtccctcgccccgtcgtcagtgtggc

SEQ ID NO: 214645 - DNA, 55 bp, Artificial
  Synthetic oligonucleotide
ccgcctctcttaaactaatggaatcgcccataaacaacggaatgtctccgtcaga

SEQ ID NO: 214646 - DNA, 50 bp, Artificial
  Synthetic oligonucleotide
gaaccaacagcccaaaacaggcagccgcgttgtcaggaatggcgcagtta

SEQ ID NO: 214647 - DNA, 50 bp, Artificial
  Synthetic oligonucleotide
gaacaagcgacgcacaaagctcttgcgcggtttatccccgtgtgctcggg

SEQ ID NO: 214648 - DNA, 50 bp, Artificial
  Synthetic oligonucleotide
tcgacacctgcccacgagcaatttgcaggggatggtattgcacctcgtgg

SEQ ID NO: 214649 - DNA, 50 bp, Artificial
  Synthetic oligonucleotide
cttgggcgcgaacggaaggtaaacgcgtattgggcaagtaggcccgcgac

SEQ ID NO: 214650 - DNA, 50 bp, Artificial
  Synthetic oligonucleotide
tcgggcgccattggtatggtcgtggatgcaggtttagccactacggtgcc

SEQ ID NO: 214651 - DNA, 50 bp, Artificial
  Synthetic oligonucleotide
tcttggcgaaaccagtggcattgtgtgccctcgctgtacaggccaaggct

SEQ ID NO: 214652 - DNA, 50 bp, Artificial
  Synthetic oligonucleotide
agccacggtccggttaaagcaacattgcgtagcgaaggcacacgccagga

SEQ ID NO: 214653 - DNA, 50 bp, Artificial
  Synthetic oligonucleotide
agccggggattgtggcagactggaaagacagtcggcatagccatgtgggc

SEQ ID NO: 214654 - DNA, 50 bp, Artificial
  Synthetic oligonucleotide
agcgccctagcccacgttccaatccaccaaagcttggccgtcacagggtc

SEQ ID NO: 214655 - DNA, 50 bp, Artificial
  Synthetic oligonucleotide
agcgcgtttcgctggtgtagtccatcgcgtagcgtgttgccgtgtaggtc

SEQ ID NO: 214656 - DNA, 55 bp, Artificial
  Synthetic oligonucleotide
gcaaatgttgtcgcatttgcgtttaaaagtggcgggtgaacaagcctttatattg

SEQ ID NO: 214657 - DNA, 50 bp, Artificial
  Synthetic oligonucleotide
agcgctctattgagagcttcgcccgcactggttgggtcggcactgacatt

SEQ ID NO: 214658 - DNA, 50 bp, Artificial
  Synthetic oligonucleotide
agctagggggcgctagacgtcacaagcctggcaccgaatgcgaccaggat

SEQ ID NO: 214659 - DNA, 50 bp, Artificial
  Synthetic oligonucleotide
aggcacacgattaagtacctcggccgccttggtaatgccgccactgagga

SEQ ID NO: 214660 - DNA, 50 bp, Artificial
  Synthetic oligonucleotide
aggcagggcgctcaccattgggtcggacaggcaaaatggttgcagaggtt

SEQ ID NO: 214661 - DNA, 50 bp, Artificial
  Synthetic oligonucleotide
aggccggcagtcagcaaagtttcaccaagatggtcaactccagccgccac

SEQ ID NO: 214662 - DNA, 50 bp, Artificial
  Synthetic oligonucleotide
aggcctcatgacgcccttggaagcttgggtgtcgactccccactatcgct

SEQ ID NO: 214663 - DNA, 50 bp, Artificial
  Synthetic oligonucleotide
aggcggttgttctgatgcgggttttacctcgtctatgggcgtgcccacct

SEQ ID NO: 214664 - DNA, 50 bp, Artificial
  Synthetic oligonucleotide
aggctcggctgaactcataactacgggctccgggtaaatgaccaccgcga

SEQ ID NO: 214665 - DNA, 50 bp, Artificial
  Synthetic oligonucleotide
aggctgtttacactgcccaggtggcccaaagacgcaccgcggttgtagta

SEQ ID NO: 214666 - DNA, 50 bp, Artificial
  Synthetic oligonucleotide
agggcaccagccaaatagcgcaatcaaaatgaccggtacgcccagccagc

SEQ ID NO: 214667 - DNA, 55 bp, Artificial
  Synthetic oligonucleotide
ggcaatctcacactccctcaaaccacgtcagaaatagatacaacactgttgtcta

SEQ ID NO: 214668 - DNA, 50 bp, Artificial
  Synthetic oligonucleotide
agggcgcgaagctccttgctctttagtccgtgtcctcgcgtcctgcctta

SEQ ID NO: 214669 - DNA, 50 bp, Artificial
  Synthetic oligonucleotide
aggggccgcctttttatcgcagggtaggccctagctaagcagggcacttc

SEQ ID NO: 214670 - DNA, 50 bp, Artificial
  Synthetic oligonucleotide
agggggaggccgtgagctttgacacgccccatgggcatacagtgaagggg

SEQ ID NO: 214671 - DNA, 50 bp, Artificial
  Synthetic oligonucleotide
aggggtaacgcgtgccgcagaggcattgcatcgggtaccgtctaacgtta

SEQ ID NO: 214672 - DNA, 50 bp, Artificial
  Synthetic oligonucleotide
agggttcgaacgcggctacaagtaaaccgcccactgccccagcactacca

SEQ ID NO: 214673 - DNA, 50 bp, Artificial
  Synthetic oligonucleotide
aggtaccgagctgaagcccccagaggcaaccgctaagggaacagccacat

SEQ ID NO: 214674 - DNA, 50 bp, Artificial
  Synthetic oligonucleotide
agtagcccatccccagcggatataggccctggctcaatggatgcagcgct

SEQ ID NO: 214675 - DNA, 50 bp, Artificial
  Synthetic oligonucleotide
agtgtatgatagccccgtaccgtgtgccggggtggtagctggcattggta

SEQ ID NO: 214676 - DNA, 50 bp, Artificial
  Synthetic oligonucleotide
ataggacggattccaggcgcaagagagcctgcccgaaccctgtcgctacc

SEQ ID NO: 214677 - DNA, 50 bp, Artificial
  Synthetic oligonucleotide
ataggcctcgggtgtcatcaagcgaacaagcgtcggacctgtggccgcaa

SEQ ID NO: 214678 - DNA, 55 bp, Artificial
  Synthetic oligonucleotide
ggcaaccaaagccgttgaatggtgtgaacaagcccacatgtacgagatcatacgt

SEQ ID NO: 214679 - DNA, 50 bp, Artificial
  Synthetic oligonucleotide
atagggattggccgttagtccctgttccgcccccacgagggctgagtaca

SEQ ID NO: 214680 - DNA, 50 bp, Artificial
  Synthetic oligonucleotide
atcgcccttcacccaatgcaagtaccacgcgattttgctcgccacctcga

SEQ ID NO: 214681 - DNA, 50 bp, Artificial
  Synthetic oligonucleotide
atcgcctcttcgctacgccagacgctatgacattgcgcgacacgctccga

SEQ ID NO: 214682 - DNA, 50 bp, Artificial
  Synthetic oligonucleotide
atctgagcggcccaataagcggtggcagcttgcacatccagctggcttgc

SEQ ID NO: 214683 - DNA, 50 bp, Artificial
  Synthetic oligonucleotide
atgaacgcacgttagcaccacagccgattcgaggggcagggcaaatgggt

SEQ ID NO: 214684 - DNA, 50 bp, Artificial
  Synthetic oligonucleotide
atgagcatccgcttgtgcgtcctctggccaatgggcttggtttagcccag

SEQ ID NO: 214685 - DNA, 50 bp, Artificial
  Synthetic oligonucleotide
atgatgccgtaaatcaaggccggttcgagcttgtaacggttcgcggccgc

SEQ ID NO: 214686 - DNA, 50 bp, Artificial
  Synthetic oligonucleotide
atgcaagccagttgggcggtgtgaggctggctaaataagcaagtgccgct

SEQ ID NO: 214687 - DNA, 50 bp, Artificial
  Synthetic oligonucleotide
aaaatccgtcaatgggctagtcgcctgcgcttgcacacgtcgctcaccca

SEQ ID NO: 214688 - DNA, 50 bp, Artificial
  Synthetic oligonucleotide
aaagtgattgctggcccgattagtggcgtgcaaccagcgccgtgtccacc

SEQ ID NO: 214689 - DNA, 55 bp, Artificial
  Synthetic oligonucleotide
ggatccagcaaacatggctcagcggtgtcatatgaacatagataccactccgatt

SEQ ID NO: 214690 - DNA, 50 bp, Artificial
  Synthetic oligonucleotide
aacaacgccgttttggaatttcgcgctggtggcaggggccgctgttggtc

SEQ ID NO: 214691 - DNA, 50 bp, Artificial
  Synthetic oligonucleotide
aacacagcccaaccagtttggttgcaggaccgggcagcgctttttggcct

SEQ ID NO: 214692 - DNA, 50 bp, Artificial
  Synthetic oligonucleotide
aacacggcctgaagctgtgcatacttagccacccccaacccattggctga

SEQ ID NO: 214693 - DNA, 50 bp, Artificial
  Synthetic oligonucleotide
aaccaatcggacgcgtcggcttcaaacgccatcaggtttcccggcacaat

SEQ ID NO: 214694 - DNA, 50 bp, Artificial
  Synthetic oligonucleotide
aaccgttgctaagcgcttgggcctgttaccacaaacagctaccgcacccg

SEQ ID NO: 214695 - DNA, 50 bp, Artificial
  Synthetic oligonucleotide
aacgcggaccggcctgtcctcccaagccactcatatcggtaccaaagcct

SEQ ID NO: 214696 - DNA, 50 bp, Artificial
  Synthetic oligonucleotide
aacggccgagctgtgctggttgatccccatacggttgcggtaggtgacaa

SEQ ID NO: 214697 - DNA, 50 bp, Artificial
  Synthetic oligonucleotide
aagccgcacctatgtctggcgaccccggtcgtatgggggaaaatctgcgt

SEQ ID NO: 214698 - DNA, 50 bp, Artificial
  Synthetic oligonucleotide
aaggggcgcacgagcgtctatagcaaccatatgtgcttgggtcgggtcgc

SEQ ID NO: 214699 - DNA, 50 bp, Artificial
  Synthetic oligonucleotide
aagtgccgtctcgcatcacagcttgagctcgaatgcctgcggggtagcgt

SEQ ID NO: 214700 - DNA, 55 bp, Artificial
  Synthetic oligonucleotide
ggatatccatcctcgtatctggcgtgacagacgcgtcgtttatgaactctttcgc

SEQ ID NO: 214701 - DNA, 50 bp, Artificial
  Synthetic oligonucleotide
aataggttgtaggcttccacaagatctcgggctgcctgctgagccccgct

SEQ ID NO: 214702 - DNA, 50 bp, Artificial
  Synthetic oligonucleotide
aatcgtgcagcaagcgtctccggcgtccacccttgcgtgcgttttacata

SEQ ID NO: 214703 - DNA, 50 bp, Artificial
  Synthetic oligonucleotide
aatgatacgatggcacttggtgcggaggccgcgttaaaagcagcgggtcg

SEQ ID NO: 214704 - DNA, 50 bp, Artificial
  Synthetic oligonucleotide
aatgggcggcaagcaaaccggctcacgcttgatcacgttaactgtggggg

SEQ ID NO: 214705 - DNA, 50 bp, Artificial
  Synthetic oligonucleotide
agccaatgccttgccagctagcccagtccactaaagcactggccactgta

SEQ ID NO: 214706 - DNA, 50 bp, Artificial
  Synthetic oligonucleotide
agcaaccccctcaactaaatccgcttcagcacacgggataacgcgcgcct

SEQ ID NO: 214707 - DNA, 50 bp, Artificial
  Synthetic oligonucleotide
agaagtggatgaacgcacgttagcaccacagccgattcgaggggcagggc

SEQ ID NO: 214708 - DNA, 50 bp, Artificial
  Synthetic oligonucleotide
actgttcacgcgtaggttgccacccacctttacgccctcaccaagcggcc

SEQ ID NO: 214709 - DNA, 50 bp, Artificial
  Synthetic oligonucleotide
actcgcgaagcgaccgcagctggcgtacactcttcgggtcacatgagcac

SEQ ID NO: 214710 - DNA, 50 bp, Artificial
  Synthetic oligonucleotide
acggctgcttccagatagcccgttggaaagagcgcgggttagggcgcttg

SEQ ID NO: 214711 - DNA, 55 bp, Artificial
  Synthetic oligonucleotide
ggaagcgggcttgagtctgcggttgaagtcgctgagcgtatccgaatggaggtca

SEQ ID NO: 214712 - DNA, 50 bp, Artificial
  Synthetic oligonucleotide
acgctcctcaaacgcaccactcgacgccagcaccttacccccgcgggcca

SEQ ID NO: 214713 - DNA, 50 bp, Artificial
  Synthetic oligonucleotide
acgcgcattcctgccaaacgatatgggccttggcggtaagaccggtcact

SEQ ID NO: 214714 - DNA, 50 bp, Artificial
  Synthetic oligonucleotide
acgcataactgatggtgccgacaaccccgccaatcaatgaggccagccct

SEQ ID NO: 214715 - DNA, 50 bp, Artificial
  Synthetic oligonucleotide
acgcaggcaccgtcgctatgcctgatccacgcctggataacctagcagcg

SEQ ID NO: 214716 - DNA, 50 bp, Artificial
  Synthetic oligonucleotide
acgaaccgagggggaggccgtgagctttgacacgccccatgggcatacag

SEQ ID NO: 214717 - DNA, 50 bp, Artificial
  Synthetic oligonucleotide
accgcgcgatccaagcagttcacgcaaacggcctgtcagtaccaggcttt

SEQ ID NO: 214718 - DNA, 50 bp, Artificial
  Synthetic oligonucleotide
accgcctcggctgagttcggcatccgattcattaaacgcgtcgccaccaa

SEQ ID NO: 214719 - DNA, 50 bp, Artificial
  Synthetic oligonucleotide
acccttgtcacccgcgcctgccatagagaaccaagcgtcggtgaatcgcc

SEQ ID NO: 214720 - DNA, 50 bp, Artificial
  Synthetic oligonucleotide
accagtccgcgctgagacacgcgccatgccaactgaaacgggtacatcta

SEQ ID NO: 214721 - DNA, 50 bp, Artificial
  Synthetic oligonucleotide
accaatcgcaccgtacaaagccgggtcgcctgactgcaaacgagccacat

SEQ ID NO: 214722 - DNA, 55 bp, Artificial
  Synthetic oligonucleotide
gcttgctagaactctgtgatgatagtgacgccagccgcacttgacgtatcgatgg

SEQ ID NO: 214723 - DNA, 50 bp, Artificial
  Synthetic oligonucleotide
acaacgtcgggaccggttttagagagggcaggcgatttggcggcactgct

SEQ ID NO: 214724 - DNA, 50 bp, Artificial
  Synthetic oligonucleotide
ccgatgcccgccccatttagtaatcgctcgcccttgtctcgcttgtcggg

SEQ ID NO: 214725 - DNA, 50 bp, Artificial
  Synthetic oligonucleotide
ccgcggaggatgccagcgcattgaccgttaacaggttcagtgatggcggg

SEQ ID NO: 214726 - DNA, 50 bp, Artificial
  Synthetic oligonucleotide
ccggcggtacactactgcgttggccggggttagtagcggggatgttgtat

SEQ ID NO: 214727 - DNA, 50 bp, Artificial
  Synthetic oligonucleotide
ccgtaccgtgtgccggggtggtagctggcattggtatggtttcaggccaa

SEQ ID NO: 214728 - DNA, 50 bp, Artificial
  Synthetic oligonucleotide
ccgtgaggctgtaggaccggatgcgatgcatcctcgtaccgtgttggagc

SEQ ID NO: 214729 - DNA, 50 bp, Artificial
  Synthetic oligonucleotide
ccgtgtcccgtcactacgctcagaaccccgtcgggtaatccggcttcctt

SEQ ID NO: 214730 - DNA, 50 bp, Artificial
  Synthetic oligonucleotide
ccgttagctctgcaacgcgcgccagtaagaatggcgtcgactccttgcca

SEQ ID NO: 214731 - DNA, 50 bp, Artificial
  Synthetic oligonucleotide
ccgttgttgaaattggttgcggttggggcagctttgcggagattgccgcc

SEQ ID NO: 214732 - DNA, 50 bp, Artificial
  Synthetic oligonucleotide
cctgcatggacggaccactgccgccaatgtcaccactgcccacattgatc

SEQ ID NO: 214733 - DNA, 55 bp, Artificial
  Synthetic oligonucleotide
gctacactggattcatgactgccagatttctcggcgacggactgacatccgctta

SEQ ID NO: 214734 - DNA, 50 bp, Artificial
  Synthetic oligonucleotide
cctgcatggctttcgcttgggcgcgaacggaaggtaaacgcgtattgggc

SEQ ID NO: 214735 - DNA, 50 bp, Artificial
  Synthetic oligonucleotide
cgacccgcgcggcggaaaagctaagaggggagaagcggctcgcaagagtg

SEQ ID NO: 214736 - DNA, 50 bp, Artificial
  Synthetic oligonucleotide
cgagggcgcaaatgccaccggacgaccatttcgatagcgaccgttacgcg

SEQ ID NO: 214737 - DNA, 50 bp, Artificial
  Synthetic oligonucleotide
cgatcaatagcctgcccggtttaacgcgcctccccgaggcacagctcagc

SEQ ID NO: 214738 - DNA, 50 bp, Artificial
  Synthetic oligonucleotide
cgatgctccacagcactactgttgcggccataagccccaccaacgcacat

SEQ ID NO: 214739 - DNA, 50 bp, Artificial
  Synthetic oligonucleotide
cgcagtcgagggagcgttcgggtttggagagtctgcggtttatccccgtg

SEQ ID NO: 214740 - DNA, 50 bp, Artificial
  Synthetic oligonucleotide
cgcccccacaggacccgttccgcataaggtgggcacgcccatagacgagg

SEQ ID NO: 214741 - DNA, 50 bp, Artificial
  Synthetic oligonucleotide
cgccccgcatagatgcccacggatttagcggcttcaacgttgccaccaac

SEQ ID NO: 214742 - DNA, 50 bp, Artificial
  Synthetic oligonucleotide
cgccttgttgaaacgtggcgagccattaacggcacaagcccagcgcgaga

SEQ ID NO: 214743 - DNA, 50 bp, Artificial
  Synthetic oligonucleotide
cgcgcaccatgtatccgacgacttggcgggaagcaattgtggcatccgaa

SEQ ID NO: 214744 - DNA, 55 bp, Artificial
  Synthetic oligonucleotide
cagcgcgttctgacacatggcgtaaacggtcaaagttaacattagcacccgagtt

SEQ ID NO: 214745 - DNA, 55 bp, Artificial
  Synthetic oligonucleotide
atgcgatcgtcaatcgtattttgtggatgcaagacgcttacccaatggatgagcg

SEQ ID NO: 214746 - DNA, 50 bp, Artificial
  Synthetic oligonucleotide
cgcggtcaatactcgcgggtaacaattgattggccccggccccatgagca

SEQ ID NO: 214747 - DNA, 50 bp, Artificial
  Synthetic oligonucleotide
cgcgtcaaagccgtgcgctgtgtagacaaagtgtcgcgcgaaaccgtcgt

SEQ ID NO: 214748 - DNA, 50 bp, Artificial
  Synthetic oligonucleotide
cgcttcggtgaaaagtccaagccaagctgtcgatagggcgggggcagtgt

SEQ ID NO: 214749 - DNA, 50 bp, Artificial
  Synthetic oligonucleotide
cggaggtcaatggcgtgcgagctgggtttaccgcgaccgcagtatgcagc

SEQ ID NO: 214750 - DNA, 50 bp, Artificial
  Synthetic oligonucleotide
cggcatcagctaagcggattgtggccattggtgcatctacgggcggaacc

SEQ ID NO: 214751 - DNA, 50 bp, Artificial
  Synthetic oligonucleotide
cgggggacacactggctggaccgaacctgagttcatccctgtcagttgcc

SEQ ID NO: 214752 - DNA, 50 bp, Artificial
  Synthetic oligonucleotide
cgggttttacctcgtctatgggcgtgcccaccttatgcggaacagggccg

SEQ ID NO: 214753 - DNA, 50 bp, Artificial
  Synthetic oligonucleotide
cgtatccgcaacaaatgcaacgcgcctcggtaccaacacgtcacgcccaa

SEQ ID NO: 214754 - DNA, 50 bp, Artificial
  Synthetic oligonucleotide
cgtattagagctgcgcttgcctcgtgttatggcggcgtttgctacgggcg

SEQ ID NO: 214755 - DNA, 50 bp, Artificial
  Synthetic oligonucleotide
cgtgtcgccgcttattggactgccggtgtgcgtcactggtatggcaagca

SEQ ID NO: 214756 - DNA, 55 bp, Artificial
  Synthetic oligonucleotide
gcgtttgtccgttagagttttcataaacgcaaccaaggcgtcgattcgttgctct

SEQ ID NO: 214757 - DNA, 50 bp, Artificial
  Synthetic oligonucleotide
ctaaccctgccttacctacgccagcgtgaagcgtgccatgtcgagtcgct

SEQ ID NO: 214758 - DNA, 50 bp, Artificial
  Synthetic oligonucleotide
ctaacggtgggggatactgtggtgcgagtggtgccgactcgtggtatggc

SEQ ID NO: 214759 - DNA, 50 bp, Artificial
  Synthetic oligonucleotide
ctagacaaagcggcagacaatccaggaccaccttgcacgcgccccgtcaa

SEQ ID NO: 214760 - DNA, 50 bp, Artificial
  Synthetic oligonucleotide
atgcacattatccccctctcggcccctaaaacgacggctaccccggttga

SEQ ID NO: 214761 - DNA, 50 bp, Artificial
  Synthetic oligonucleotide
atgcccacgcgcagtgtccacactgtagttcccgaaatacacgccgggta

SEQ ID NO: 214762 - DNA, 50 bp, Artificial
  Synthetic oligonucleotide
atgcccggtggcctaagccgcgtgggtggtcaaggtaatgagcgaattgt

SEQ ID NO: 214763 - DNA, 50 bp, Artificial
  Synthetic oligonucleotide
atgcggtgggtttggcagtcgcctttggccctcttcgcgcttaacttacc

SEQ ID NO: 214764 - DNA, 50 bp, Artificial
  Synthetic oligonucleotide
atgctacagagcgcgacaacaacaaaagcctcgcagacgggcggctatgc

SEQ ID NO: 214765 - DNA, 50 bp, Artificial
  Synthetic oligonucleotide
atggcacggtcaatgatgtggcgatgtctggcgcggtgcctaagcaccta

SEQ ID NO: 214766 - DNA, 50 bp, Artificial
  Synthetic oligonucleotide
atggcgtgcgagctgggtttaccgcgaccgcagtatgcagcgttagtgat

SEQ ID NO: 214767 - DNA, 55 bp, Artificial
  Synthetic oligonucleotide
atgctctaaatgcgctttcgacatccccactccacgatctttgaacgtcagtgtc

SEQ ID NO: 214768 - DNA, 50 bp, Artificial
  Synthetic oligonucleotide
atgtcgcggattgtgcccgttccgtcacagcgaggacatacgtggccgct

SEQ ID NO: 214769 - DNA, 50 bp, Artificial
  Synthetic oligonucleotide
atgtggtcgttgtgaagccatgtgtccggcgtttgcagctgggcaaccgc

SEQ ID NO: 214770 - DNA, 50 bp, Artificial
  Synthetic oligonucleotide
attgcgccggtcgctaagccactggttggcccggtatgggctcgactacg

SEQ ID NO: 214771 - DNA, 50 bp, Artificial
  Synthetic oligonucleotide
caacgagccatctttgacccgacgggcgtttgtcattaccgaggcggccg

SEQ ID NO: 214772 - DNA, 50 bp, Artificial
  Synthetic oligonucleotide
caagggcgtctcggtttaccacggcgtagcggcaggctctatgtcagcgg

SEQ ID NO: 214773 - DNA, 50 bp, Artificial
  Synthetic oligonucleotide
caccaccgcgtgcttacccgacaagtcatccatctgccgcttcagcatga

SEQ ID NO: 214774 - DNA, 50 bp, Artificial
  Synthetic oligonucleotide
caccctgcgggccttttgccatcaggtcctgacgtgctgcaccattgttc

SEQ ID NO: 214775 - DNA, 50 bp, Artificial
  Synthetic oligonucleotide
caccgacgaatgcgataccagcaccgagcaagccaactgccctgatggca

SEQ ID NO: 214776 - DNA, 50 bp, Artificial
  Synthetic oligonucleotide
cacggcgcctgaagcggtacctaatcgggtattcaccggttgccttgcta

SEQ ID NO: 214777 - DNA, 50 bp, Artificial
  Synthetic oligonucleotide
cccggctaagccatcagagtcggcgcctgttgctcaactgcatgctgcgc

SEQ ID NO: 214778 - DNA, 55 bp, Artificial
  Synthetic oligonucleotide
gcggggttatgcgcaaaaggaggactggtgcatcgtttagcagtcccatggatag

SEQ ID NO: 214779 - DNA, 50 bp, Artificial
  Synthetic oligonucleotide
cccgcccggtgagaaagctagtccgtcaggcccagtttattgcacgcggg

SEQ ID NO: 214780 - DNA, 50 bp, Artificial
  Synthetic oligonucleotide
ccccgtgtgctcggggaacgctcgcgtggagtagggcgaccaaaatcata

SEQ ID NO: 214781 - DNA, 50 bp, Artificial
  Synthetic oligonucleotide
cccacttggcgctcacgcggcataaagccatcgtccaccgcaacacgact

SEQ ID NO: 214782 - DNA, 50 bp, Artificial
  Synthetic oligonucleotide
ccaggcaatcacgaacacccagcacgcgccgtctttggtgcaggcatcct

SEQ ID NO: 214783 - DNA, 50 bp, Artificial
  Synthetic oligonucleotide
ccacgggagcgaggggattaccgaggcatgctattcagggcttacccctc

SEQ ID NO: 214784 - DNA, 50 bp, Artificial
  Synthetic oligonucleotide
ccacagtcgcggcacgttgtgatgcatccgcagggccaagtaaacgcaat

SEQ ID NO: 214785 - DNA, 50 bp, Artificial
  Synthetic oligonucleotide
ccacacccgatgcacgcgagatggatgtgttgctgtctacgggggagcag

SEQ ID NO: 214786 - DNA, 50 bp, Artificial
  Synthetic oligonucleotide
ccaagcctatgtcggctaaccccaaactgacggccacagcggagccagat

SEQ ID NO: 214787 - DNA, 50 bp, Artificial
  Synthetic oligonucleotide
ccaacgaccagcgccccaatcaaggtaccgtagatagaaccgcgcccacc

SEQ ID NO: 214788 - DNA, 50 bp, Artificial
  Synthetic oligonucleotide
ccaaccagctacctgcaacccatcccgagcaatcgcctcagctgtcagca

SEQ ID NO: 214789 - DNA, 55 bp, Artificial
  Synthetic oligonucleotide
gcggcatagacctgacccacaacggctgtaaatagttgctctctttgagttggca

SEQ ID NO: 214790 - DNA, 50 bp, Artificial
  Synthetic oligonucleotide
catgccggggaggactttagcaccaccgccgatccacacacggttaccta

SEQ ID NO: 214791 - DNA, 50 bp, Artificial
  Synthetic oligonucleotide
catccgccggcctagtgttgcggggctacgttgagtagatcttgccgccg

SEQ ID NO: 214792 - DNA, 50 bp, Artificial
  Synthetic oligonucleotide
catagatcgcgctggactagtcggagaagacggtcctacccacgcgggcg

SEQ ID NO: 214793 - DNA, 50 bp, Artificial
  Synthetic oligonucleotide
cagggttgctctgcctcatccatgagccccctttagccagccaccgctcc

SEQ ID NO: 214794 - DNA, 50 bp, Artificial
  Synthetic oligonucleotide
cagacagcggccatccaagcgtccatgccagtccaaacagggttgtcgct

SEQ ID NO: 214795 - DNA, 50 bp, Artificial
  Synthetic oligonucleotide
cactcgcgcgattccttggttagcacaaggcacgccatttacgtgcggcc

SEQ ID NO: 214796 - DNA, 52 bp, Artificial
  Synthetic oligonucleotide
attaactgcgcccaaacgtaaagtacaggtggaaggtggtattaaccacggc

SEQ ID NO: 214797 - DNA, 55 bp, Artificial
  Synthetic oligonucleotide
gcgcctcgacgagttttaccatgcataacggcaaagccgtgaggaatgcccagta

SEQ ID NO: 214798 - DNA, 55 bp, Artificial
  Synthetic oligonucleotide
caaccgaatgagccccgtcaatacagaccgacactcagttggcttccttacaacc

SEQ ID NO: 214799 - DNA, 55 bp, Artificial
  Synthetic oligonucleotide
caattcccaaggactcggggcgtttaggctgattcaataagtattcgtccatcac

SEQ ID NO: 214800 - DNA, 55 bp, Artificial
  Synthetic oligonucleotide
gcgaaaactcgctgcatggtttaatggaatacaccaactggcaaaccattacacg

SEQ ID NO: 214801 - DNA, 55 bp, Artificial
  Synthetic oligonucleotide
cagctgaagaaatgactgcggaaccagaacttatcgctgtaagcgctaactaatc

SEQ ID NO: 214802 - DNA, 54 bp, Artificial
  Synthetic oligonucleotide
cacgagtatcgcggtaaagacaaacctaccaacgtcctatctttcccattcgag

SEQ ID NO: 214803 - DNA, 55 bp, Artificial
  Synthetic oligonucleotide
cactaagcgtgcggaaagtgtaaccaaatactatgacgatttaatcgaaggcgtt

SEQ ID NO: 214804 - DNA, 55 bp, Artificial
  Synthetic oligonucleotide
gcctattgatatcgcgacaatcgaaggtctaagagagtcgactaccacggtacta

SEQ ID NO: 214805 - DNA, 55 bp, Artificial
  Synthetic oligonucleotide
cacttcaactttagttatcaagtgagccaagtagaccgtcgaaacattcccgcca

SEQ ID NO: 214806 - DNA, 55 bp, Artificial
  Synthetic oligonucleotide
gcctactttaatcggttcttcctctgcacagccaacgagcagagtgaacagacat

SEQ ID NO: 214807 - DNA, 55 bp, Artificial
  Synthetic oligonucleotide
cgcgtcctttagcggtatcatttatggacctgacggagtgcttgcggatgctcaa

SEQ ID NO: 214808 - DNA, 55 bp, Artificial
  Synthetic oligonucleotide
cgcgtctatttcaccgtcttttactcttttgtagcggcgctgaagcgcttgtttc

SEQ ID NO: 214809 - DNA, 55 bp, Artificial
  Synthetic oligonucleotide
cgctatgagacggctttagagtcatttgaaatacggcctgaggatactgatcatg

SEQ ID NO: 214810 - DNA, 55 bp, Artificial
  Synthetic oligonucleotide
cgctcccacctcggatcttgcagtatcaaccgaattcatcgtgtttcgcacactc

SEQ ID NO: 214811 - DNA, 55 bp, Artificial
  Synthetic oligonucleotide
cgctcgtacgcatttagtgatcgattgtcagtgtagtcacgaacaatttgacgct

SEQ ID NO: 214812 - DNA, 55 bp, Artificial
  Synthetic oligonucleotide
catactagccccgctctttcacataaggtcgaccaacggctttaggagcaaccgc

SEQ ID NO: 214813 - DNA, 55 bp, Artificial
  Synthetic oligonucleotide
cgctgtcactcaccccagcgggtgaagtgttcttacaaagcgcagaactcattac

SEQ ID NO: 214814 - DNA, 54 bp, Artificial
  Synthetic oligonucleotide
ctgtcggcgtttgattactggagcgacgttaccattcccaaagggaaacgctac

SEQ ID NO: 214815 - DNA, 55 bp, Artificial
  Synthetic oligonucleotide
cgctttgttacgccgtttagccgtctggtggagagtagtcttgaccttcacgcga

SEQ ID NO: 214816 - DNA, 55 bp, Artificial
  Synthetic oligonucleotide
ctgtcggatagcaaagctaattaaaggcttaaccgctgaaacctcccagtctcgt

SEQ ID NO: 214817 - DNA, 55 bp, Artificial
  Synthetic oligonucleotide
ctggtcttcaaccagtgtccgataatctcctcattgcgcccctgatactcagcgg

SEQ ID NO: 214818 - DNA, 55 bp, Artificial
  Synthetic oligonucleotide
cggccagctgggctcgagttatctcccgccttagtgcccaacaattgaactaggg

SEQ ID NO: 214819 - DNA, 55 bp, Artificial
  Synthetic oligonucleotide
cggcgagttttgatgctagcgtagcgtcaccaataacttggatggccaccattgc

SEQ ID NO: 214820 - DNA, 55 bp, Artificial
  Synthetic oligonucleotide
cggctaacatagattgctctactagccaatcttcaacataggtatgcccagcctc

SEQ ID NO: 214821 - DNA, 55 bp, Artificial
  Synthetic oligonucleotide
ctggcacgttgcgtatatccgctccctcagaccttggacgtaacgtactcttacc

SEQ ID NO: 214822 - DNA, 55 bp, Artificial
  Synthetic oligonucleotide
ctggataggctaaatcattaggggccaatggtacgcagttcatagcggcaccttc

SEQ ID NO: 214823 - DNA, 55 bp, Artificial
  Synthetic oligonucleotide
gcccgttggattagcaggagatgctaaccacattcccgtcgtactctcattccaa

SEQ ID NO: 214824 - DNA, 55 bp, Artificial
  Synthetic oligonucleotide
cggtattcatgtcacgacgaggttggaacttacccttagacagccaatcaacagg

SEQ ID NO: 214825 - DNA, 54 bp, Artificial
  Synthetic oligonucleotide
cggttagtccggataacgaagagggcaaacccgcctaatatcacaagaataggc

SEQ ID NO: 214826 - DNA, 53 bp, Artificial
  Synthetic oligonucleotide
ctcgtcgtagcctgaggggcaatacgttcagtaggtactttaaggttttctag

SEQ ID NO: 214827 - DNA, 53 bp, Artificial
  Synthetic oligonucleotide
cgtcaagtattaaaggcgtacccaatcggtttgcttatacggcaagtaaagcc

SEQ ID NO: 214828 - DNA, 55 bp, Artificial
  Synthetic oligonucleotide
cgttggcagagtgaaataaatcgactatgcgaactgcgaactcagaataagtccg

SEQ ID NO: 214829 - DNA, 55 bp, Artificial
  Synthetic oligonucleotide
ctccttgaagccgtgttcattaggcttgttagaaagtggcttgccgttcctaccg

SEQ ID NO: 214830 - DNA, 53 bp, Artificial
  Synthetic oligonucleotide
ctacgccgttccggaccgaaataactcgattgggccttaagggcacgatagcc

SEQ ID NO: 214831 - DNA, 55 bp, Artificial
  Synthetic oligonucleotide
ccgctaaccgatggtttaacacaaaccaagattcgccagttgtgtgagcaagccc

SEQ ID NO: 214832 - DNA, 55 bp, Artificial
  Synthetic oligonucleotide
ccgctgaagtacgcctatatgataggttatttaatgaagaggctcctgacgctaa

SEQ ID NO: 214833 - DNA, 55 bp, Artificial
  Synthetic oligonucleotide
gatgcactgtgcggatccatggtacgagccatagcgatcgcaccgactttgttgc

SEQ ID NO: 214834 - DNA, 55 bp, Artificial
  Synthetic oligonucleotide
catgacgggcaccgttattgtcgagattcgagccataggaatccggtgcgtcacc

SEQ ID NO: 214835 - DNA, 55 bp, Artificial
  Synthetic oligonucleotide
gagtctatttctctcgtactctaacaggttcttcagcggagtttgcggtctgcgc

SEQ ID NO: 214836 - DNA, 55 bp, Artificial
  Synthetic oligonucleotide
gaggcgtctcgtcgttatcaagagagcgagcgtattcagaaaaggccgcgtaggt

SEQ ID NO: 214837 - DNA, 55 bp, Artificial
  Synthetic oligonucleotide
gagcgaataacggtacgttttgtggctgtgatctaaatcgctgtgtctaagccgc

SEQ ID NO: 214838 - DNA, 55 bp, Artificial
  Synthetic oligonucleotide
gagacgggacaggtatggccagtgaaattaacaggctatgaacgccactggtccg

SEQ ID NO: 214839 - DNA, 55 bp, Artificial
  Synthetic oligonucleotide
gactgggaaatccattataactccagccgcacaggggttagattgatcggcccca

SEQ ID NO: 214840 - DNA, 55 bp, Artificial
  Synthetic oligonucleotide
gacgtcaccgcagcaggcattgaattagcctgtcgtgaagggtttgaatccattg

SEQ ID NO: 214841 - DNA, 55 bp, Artificial
  Synthetic oligonucleotide
gacgacactcatatccaacaataatgacgccatgcctgctgataatcctaggcga

SEQ ID NO: 214842 - DNA, 55 bp, Artificial
  Synthetic oligonucleotide
gacccgcggaacaccatcgcttaagtagttaatcatgcccagagctttgactgta

SEQ ID NO: 214843 - DNA, 55 bp, Artificial
  Synthetic oligonucleotide
cgataatgctgggcagatactcgaacaaaatcttaataccaacctgcttaaccag

SEQ ID NO: 214844 - DNA, 55 bp, Artificial
  Synthetic oligonucleotide
cgatgctagtcatcaccctagtagatacattaggtagcgcttcccacaacgtcgg

SEQ ID NO: 214845 - DNA, 55 bp, Artificial
  Synthetic oligonucleotide
gcccggtaccgacattagttctgtttgtagcgcttctgtggcgcgggatgcagtc

SEQ ID NO: 214846 - DNA, 55 bp, Artificial
  Synthetic oligonucleotide
cgatttgtgagtttaaaccacagactcagtagcgacgaagccctaacagataaaa

SEQ ID NO: 214847 - DNA, 55 bp, Artificial
  Synthetic oligonucleotide
gaaccaccatgagaggttgtatcacccatacgagcagcgggaacacttccaatta

SEQ ID NO: 214848 - DNA, 55 bp, Artificial
  Synthetic oligonucleotide
cgccagctttgactcaactctcccaactgtcatatctggcacattcgataaccac

SEQ ID NO: 214849 - DNA, 55 bp, Artificial
  Synthetic oligonucleotide
cgccgttttgttcggttatgtagaatgtatcttcaatgcgttcgccaagtgtcgc

SEQ ID NO: 214850 - DNA, 55 bp, Artificial
  Synthetic oligonucleotide
cgcctagctctagtgtgtgtcttaagcattggcacagatggtgagcttaaccatt

SEQ ID NO: 214851 - DNA, 55 bp, Artificial
  Synthetic oligonucleotide
cttttcaagtgaaaccgttttctgctgtgctgtgccatatggatgccaacgctaa

SEQ ID NO: 214852 - DNA, 55 bp, Artificial
  Synthetic oligonucleotide
cgcgcgataacgccagacttcgttagagagtcactaaaagacttgctagccttgc

SEQ ID NO: 214853 - DNA, 55 bp, Artificial
  Synthetic oligonucleotide
cttggaatgtgtctgtcgcaggcaaaacgttggatttagatcgctacttaccgcc

SEQ ID NO: 214854 - DNA, 55 bp, Artificial
  Synthetic oligonucleotide
cttgatcgcttgccaattttaaggtgcttccttcgcctaatgctcgctgaacggt

SEQ ID NO: 214855 - DNA, 55 bp, Artificial
  Synthetic oligonucleotide
gtaagctaccttctggcaacaaacctgattcatgcattaatctcaccgttgcttc

SEQ ID NO: 214856 - DNA, 55 bp, Artificial
  Synthetic oligonucleotide
catttccgcccaagccatacgccacgttccgaaagtcgaattgctttacattgcc

SEQ ID NO: 214857 - DNA, 55 bp, Artificial
  Synthetic oligonucleotide
gtaatccgcgttaaagggttgcagtgggtgttctgtcaccacatgggacatcata

SEQ ID NO: 214858 - DNA, 55 bp, Artificial
  Synthetic oligonucleotide
gtacgggtgagaatgcggtgctccccggaacggttactatccgagagcagtcgga

SEQ ID NO: 214859 - DNA, 55 bp, Artificial
  Synthetic oligonucleotide
gtagtgcctaaggggaagtattcgcagttgcttgtgtattttcgtgtgcctagta

SEQ ID NO: 214860 - DNA, 55 bp, Artificial
  Synthetic oligonucleotide
agcgctaaaaggtcgtatgccagtctctgaatttatgccttacaactggtacgac

SEQ ID NO: 214861 - DNA, 55 bp, Artificial
  Synthetic oligonucleotide
gtcagcgagttgcctggcaagactatctagcgctttgtaagcctaaggttgttct

SEQ ID NO: 214862 - DNA, 55 bp, Artificial
  Synthetic oligonucleotide
gtcgatacggtcaacacgccttaccctggaattgactatcaccctggcgcgatcc

SEQ ID NO: 214863 - DNA, 55 bp, Artificial
  Synthetic oligonucleotide
ttcagccggttttcttatcagtggcacagcaggcgcgggaatgattctgcacaag

SEQ ID NO: 214864 - DNA, 55 bp, Artificial
  Synthetic oligonucleotide
gtctcgaggtattagtttcgaggtattagtctcaaggtattagcactaaaagtgc

SEQ ID NO: 214865 - DNA, 55 bp, Artificial
  Synthetic oligonucleotide
gtcttgtgcaatgcttaagttgcttacacgcaactgcggtaaacgatagtaaggc

SEQ ID NO: 214866 - DNA, 55 bp, Artificial
  Synthetic oligonucleotide
agagtagcaatccgtttgagtcagcgtactgcgacttccttccgtcatggtcggc

SEQ ID NO: 214867 - DNA, 55 bp, Artificial
  Synthetic oligonucleotide
gcgcttcgtcagtaacgctaagcaacccacggttctttctccgctctctcagtcc

SEQ ID NO: 214868 - DNA, 55 bp, Artificial
  Synthetic oligonucleotide
ccgagccggagaaactcgtggggtcgaagtactcgcagttcacgtattatcatac

SEQ ID NO: 214869 - DNA, 50 bp, Artificial
  Synthetic oligonucleotide
acagaatgacgtcagctctgtccaacccgcgcctgtcccgtgcccagtct

SEQ ID NO: 214870 - DNA, 50 bp, Artificial
  Synthetic oligonucleotide
acactgcatagggagccttcccttcactcgttgctggggagcgttgcgcc

SEQ ID NO: 214871 - DNA, 50 bp, Artificial
  Synthetic oligonucleotide
acacgctggaccgtccccggcaaactcacctgcaacggaccctacaccct

SEQ ID NO: 214872 - DNA, 50 bp, Artificial
  Synthetic oligonucleotide
acacgagtgccccgggtggatgctcccgtaaagctggatggacgggccag

SEQ ID NO: 214873 - DNA, 50 bp, Artificial
  Synthetic oligonucleotide
acaatttccgcgcagcgtttgggcgggaacagtcaaggggagcggagagc

SEQ ID NO: 214874 - DNA, 50 bp, Artificial
  Synthetic oligonucleotide
acaatgcaacgccagctatcaacgccgccccgattggggaacggacgggg

SEQ ID NO: 214875 - DNA, 50 bp, Artificial
  Synthetic oligonucleotide
aatgggcgtgacactgtctgacgtcggcccgtgtggctccttcgtcactt

SEQ ID NO: 214876 - DNA, 50 bp, Artificial
  Synthetic oligonucleotide
aatcctcctgatcccatgaaacgccccgaggctgctccgcgtcccggcaa

SEQ ID NO: 214877 - DNA, 50 bp, Artificial
  Synthetic oligonucleotide
aatccagccgggcatgtcctgccgctcactgccgattacgagacgcaagg

SEQ ID NO: 214878 - DNA, 50 bp, Artificial
  Synthetic oligonucleotide
aatccaacttcggtcttacccccggtggctgcacccaaaaccccgccgta

SEQ ID NO: 214879 - DNA, 55 bp, Artificial
  Synthetic oligonucleotide
ccctcttgcggaacattggcactatctgtaacatccacgcaagtagcgtgatttg

SEQ ID NO: 214880 - DNA, 50 bp, Artificial
  Synthetic oligonucleotide
aagtggatggagtggcacgcccagaaagacaccacgctgcatcgcgtcac

SEQ ID NO: 214881 - DNA, 55 bp, Artificial
  Synthetic oligonucleotide
ccccgtccctgttcggacgaacacctctgtgcacgatgcttccgccgtatccgat

SEQ ID NO: 214882 - DNA, 54 bp, Artificial
  Synthetic oligonucleotide
ccaggggcataaacccagtctacgcgaaaccccgcaccctgaccttagcgaatc

SEQ ID NO: 214883 - DNA, 55 bp, Artificial
  Synthetic oligonucleotide
caagacagcgacggcatgtggcaccaagatctcaccgacacgacttcctacgtcg

SEQ ID NO: 214884 - DNA, 55 bp, Artificial
  Synthetic oligonucleotide
atttgcctatttggagagttttcacggccatctgtcgtgcgttgcgcactacggc

SEQ ID NO: 214885 - DNA, 55 bp, Artificial
  Synthetic oligonucleotide
acacataacaaacccggacgaatatctgctattattcgcagtgcaatttcgtcac

SEQ ID NO: 214886 - DNA, 55 bp, Artificial
  Synthetic oligonucleotide
agccttcatctgagagcatagctcaggagcgatctgccgaagggttcgtggcgaa

SEQ ID NO: 214887 - DNA, 55 bp, Artificial
  Synthetic oligonucleotide
accgatcgtgaatcaccaccgtaccgtgcaaaccgtcccagcgcacacgcacgag

SEQ ID NO: 214888 - DNA, 55 bp, Artificial
  Synthetic oligonucleotide
gcggaaaggacgaactcggatagggcgtttcatcgtaggccgtcgtcacgtcaga

SEQ ID NO: 214889 - DNA, 55 bp, Artificial
  Synthetic oligonucleotide
gccgactggattcgtttctatcgcatcctatcatcttcagtctgatcggggcgac

SEQ ID NO: 214890 - DNA, 55 bp, Artificial
  Synthetic oligonucleotide
ggcataaggttttcgtaaggcggcccactctccgctcacgtggtcagaaccgtca

SEQ ID NO: 214891 - DNA, 55 bp, Artificial
  Synthetic oligonucleotide
ggcatgctgcacgtcaccagttaattggaacactccgcttcgattccggttcaac

SEQ ID NO: 214892 - DNA, 55 bp, Artificial
  Synthetic oligonucleotide
aacccgcgatcaccccgactcatgacggtcgcattcctacggtcagaatccgcgg

SEQ ID NO: 214893 - DNA, 55 bp, Artificial
  Synthetic oligonucleotide
gggcaggggatttgtggcgtcttaattctgtgcctatcgaaaatggggtgtgtcg

SEQ ID NO: 214894 - DNA, 51 bp, Artificial
  Synthetic oligonucleotide
ggggcaaggccgtaaacaaagtttacgtctattggggacggcccgatcaac

SEQ ID NO: 214895 - DNA, 55 bp, Artificial
  Synthetic oligonucleotide
tggacagtcggcagtggacggtgggcctcgaactccaaactccgaacccgagact

SEQ ID NO: 214896 - DNA, 55 bp, Artificial
  Synthetic oligonucleotide
tgcgggagtaatcggaaggcaagcgtgcaacttggagatgcgatggtccacgccg

SEQ ID NO: 214897 - DNA, 55 bp, Artificial
  Synthetic oligonucleotide
gggttgcagtaaccggcgtcgtaattgggaatctgcattcgggccacgccgtctt

SEQ ID NO: 214898 - DNA, 55 bp, Artificial
  Synthetic oligonucleotide
gtcttggcgaaagggttcataaggaagtgcgtgggcatcttagtagaacgagggg

SEQ ID NO: 214899 - DNA, 55 bp, Artificial
  Synthetic oligonucleotide
gtgcgttgctcggctagcttatagctttccgcctaccgcttattgcttccgcgat

SEQ ID NO: 214900 - DNA, 55 bp, Artificial
  Synthetic oligonucleotide
gcagcaacccgtcatttggtataggaccgcctattactcgggacagtggttgcgt

SEQ ID NO: 214901 - DNA, 53 bp, Artificial
  Synthetic oligonucleotide
tccgtgtaacccgtggttggtcggagggcgcatccttagcgttagggttggga

SEQ ID NO: 214902 - DNA, 54 bp, Artificial
  Synthetic oligonucleotide
agacagcgccgcaaaaccagtaagaagtgcctcgtcacgccaatgtaacacaag

SEQ ID NO: 214903 - DNA, 53 bp, Artificial
  Synthetic oligonucleotide
ttttcggttgccacgtagatcggtggggacggtgctcataggctctcaacacc

SEQ ID NO: 214904 - DNA, 52 bp, Artificial
  Synthetic oligonucleotide
aacacgttcgaattctagacttcggtcgcgatgtaggagcgtcatacctcat

SEQ ID NO: 214905 - DNA, 52 bp, Artificial
  Synthetic oligonucleotide
ttggatttcgagccaagggaacgcacgcgcagccaagacagcttacccgctg

SEQ ID NO: 214906 - DNA, 52 bp, Artificial
  Synthetic oligonucleotide
cctagacccggacatctctcgcgcggttctctgacgccgtgggagcgcttta

SEQ ID NO: 214907 - DNA, 52 bp, Artificial
  Synthetic oligonucleotide
tgcggtagacgagcccttgctccacgaacgaggcaaacgtccggagaatgtc

SEQ ID NO: 214908 - DNA, 51 bp, Artificial
  Synthetic oligonucleotide
gggtagtgcccacatgtaaaaccagtcgtcaggattctcccgttcgagagt

SEQ ID NO: 214909 - DNA, 51 bp, Artificial
  Synthetic oligonucleotide
ttacgaacaggtaacatctttactcgcattgaggcatgacggaacacgaca

SEQ ID NO: 214910 - DNA, 51 bp, Artificial
  Synthetic oligonucleotide
attggtcaatgtcccacgcgccgtccacccaatccgtgcacgagagtcgga

SEQ ID NO: 214911 - DNA, 55 bp, Artificial
  Synthetic oligonucleotide
gacgctgtaatctgggtgcctaggtcccgcaatggagccccgtgctcctgcctat

SEQ ID NO: 214912 - DNA, 50 bp, Artificial
  Synthetic oligonucleotide
accgcagacagtgccccctatgtcgggcgcaacacccctgccaaagtcgg

SEQ ID NO: 214913 - DNA, 50 bp, Artificial
  Synthetic oligonucleotide
accgccactgacgcacccctcattgccacaggacgggactacccgctcat

SEQ ID NO: 214914 - DNA, 50 bp, Artificial
  Synthetic oligonucleotide
accgcgaacccgcggtgctcttgcctcggatcgcccttggtattcctcct

SEQ ID NO: 214915 - DNA, 50 bp, Artificial
  Synthetic oligonucleotide
accggggtcagctcgcatcgccttacgggctgccttttacgcgttcacct

SEQ ID NO: 214916 - DNA, 50 bp, Artificial
  Synthetic oligonucleotide
acctgtgcaatcggcacgtagaccgtcgcatcgctgttcaagcggagcag

SEQ ID NO: 214917 - DNA, 50 bp, Artificial
  Synthetic oligonucleotide
acctgtggcgagttcggctcagtgcttggacgctgtgtgaccggcggcct

SEQ ID NO: 214918 - DNA, 50 bp, Artificial
  Synthetic oligonucleotide
acgaacagtaacccgttcgcttttccggctgtccgcagtgccgagcgaca

SEQ ID NO: 214919 - DNA, 50 bp, Artificial
  Synthetic oligonucleotide
acgaacggactcatcgtcgaacccgctcgccccaccacgctcaagacccg

SEQ ID NO: 214920 - DNA, 50 bp, Artificial
  Synthetic oligonucleotide
acgaatggcactttgtcgccttcgtgcaccacgaactctgccaccgtgga

SEQ ID NO: 214921 - DNA, 50 bp, Artificial
  Synthetic oligonucleotide
acgacaactcggaaagttgtgcgacgcgctcccaattctccgcgcccaat

SEQ ID NO: 214922 - DNA, 52 bp, Artificial
  Synthetic oligonucleotide
ctttcccctccgcatggtttcgcaacaaggaagaccgttttatcaacccgaa

SEQ ID NO: 214923 - DNA, 50 bp, Artificial
  Synthetic oligonucleotide
acgacataagaaccacggctgcgaagcctccggcggcccaagtccaacag

SEQ ID NO: 214924 - DNA, 50 bp, Artificial
  Synthetic oligonucleotide
acgacggtactggttcgaagagggtccgaccgacacagccgctgtggtgc

SEQ ID NO: 214925 - DNA, 50 bp, Artificial
  Synthetic oligonucleotide
acgcactgccctcagcctcggtaagacggcgggaaatgcgcaggcactcc

SEQ ID NO: 214926 - DNA, 50 bp, Artificial
  Synthetic oligonucleotide
acgcccaagcggcgggttcgggaatgggagcgacgacaaattgagccgag

SEQ ID NO: 214927 - DNA, 50 bp, Artificial
  Synthetic oligonucleotide
acgcccggcgaatacagctaccccgccatcattcaaaccaccgacggact

SEQ ID NO: 214928 - DNA, 50 bp, Artificial
  Synthetic oligonucleotide
acgctgcggacaacgggggaaaactgcccgacacaagttaccggggctca

SEQ ID NO: 214929 - DNA, 50 bp, Artificial
  Synthetic oligonucleotide
acgctgtcgggccagccttggcggataggataatcgctgccggtgttttt

SEQ ID NO: 214930 - DNA, 50 bp, Artificial
  Synthetic oligonucleotide
ggggcggaatcgggagagggattgtcaacaaatcgccgcgtcacgctttt

SEQ ID NO: 214931 - DNA, 50 bp, Artificial
  Synthetic oligonucleotide
aagtgcgatagtcgagtgcctgtcgcaagtgatcggcccacagtccgagc

SEQ ID NO: 214932 - DNA, 50 bp, Artificial
  Synthetic oligonucleotide
aagtcgggccgcgaaagtcaaaggtcgagtcttgccccgctggggacggt

SEQ ID NO: 214933 - DNA, 55 bp, Artificial
  Synthetic oligonucleotide
cttcgtccgaccgcgtggtgccaacctgcacgcgcccgttgaaatcacaaactcg

SEQ ID NO: 214934 - DNA, 50 bp, Artificial
  Synthetic oligonucleotide
aaggggcggagcgttagctcgacacggtagcgcatggcgggtgcctttcg

SEQ ID NO: 214935 - DNA, 50 bp, Artificial
  Synthetic oligonucleotide
aaggactgcccctcgaaatcgtgcgacgtctccaagcgatgggaggcgcc

SEQ ID NO: 214936 - DNA, 50 bp, Artificial
  Synthetic oligonucleotide
aaggactcggacgccagagtccagagcgaatcgcagccgtcggtcgggcc

SEQ ID NO: 214937 - DNA, 50 bp, Artificial
  Synthetic oligonucleotide
aagcgaagtcgggcaaaggggcggagcgttagctcgacacggtagcgcat

SEQ ID NO: 214938 - DNA, 50 bp, Artificial
  Synthetic oligonucleotide
aacttggagatgcgatggtccacgccgacagattcgtcaggcggcgagag

SEQ ID NO: 214939 - DNA, 50 bp, Artificial
  Synthetic oligonucleotide
aacgggtacgcggatacaggcgcggaaggaactccctgccgcatctggtt

SEQ ID NO: 214940 - DNA, 50 bp, Artificial
  Synthetic oligonucleotide
aacgatgtgcgctacagggctcttgtcccgggtttatgacgggcttgcca

SEQ ID NO: 214941 - DNA, 50 bp, Artificial
  Synthetic oligonucleotide
aacgagggggacgcggtggctcgggatgtcatggggtcaacgtgagcgac

SEQ ID NO: 214942 - DNA, 50 bp, Artificial
  Synthetic oligonucleotide
aacgacggagcgccccgcttgcggtgaaactttacaacgaatgccgcaaa

SEQ ID NO: 214943 - DNA, 50 bp, Artificial
  Synthetic oligonucleotide
aaccgccctcagcttcccgcgattcccaagccatgaacatcggtgcccat

SEQ ID NO: 214944 - DNA, 55 bp, Artificial
  Synthetic oligonucleotide
ctgctattttcgcgacaaaatatgcgaaagctaggcgcttgggatttcgggaggc

SEQ ID NO: 214945 - DNA, 50 bp, Artificial
  Synthetic oligonucleotide
aaccgccacggagatccatataccaaagccccgcgccatgagtcaccgtg

SEQ ID NO: 214946 - DNA, 50 bp, Artificial
  Synthetic oligonucleotide
aaccaccgaggggagtggcatgggcgtccggtctgaagcttcgatcccca

SEQ ID NO: 214947 - DNA, 50 bp, Artificial
  Synthetic oligonucleotide
aaccaaggcgccgccgaagtttgcgacaccagtcgggcttaaggatttga

SEQ ID NO: 214948 - DNA, 50 bp, Artificial
  Synthetic oligonucleotide
aaattcgtccgggagggaagtcccgtgagggccaatactgcaccggtacc

SEQ ID NO: 214949 - DNA, 50 bp, Artificial
  Synthetic oligonucleotide
aaagggaccggcagccaccgctcctcgcgtccgtaatagcggcacgtgcg

SEQ ID NO: 214950 - DNA, 50 bp, Artificial
  Synthetic oligonucleotide
aaaggacgggatcgagtcgccgcaccccggactacgcccgaaatgtccgt

SEQ ID NO: 214951 - DNA, 50 bp, Artificial
  Synthetic oligonucleotide
aaagcggtgccaagtgcgatagtcgagtgcctgtcgcaagtgatcggccc

SEQ ID NO: 214952 - DNA, 50 bp, Artificial
  Synthetic oligonucleotide
aaacttcccacgtgtagtcgaactgccacagcgcacgagtgacgcgacgg

SEQ ID NO: 214953 - DNA, 50 bp, Artificial
  Synthetic oligonucleotide
aaactgacacgaaccggaggcatttggccgacgcttctgcaactgggcac

SEQ ID NO: 214954 - DNA, 50 bp, Artificial
  Synthetic oligonucleotide
aaactacgcggcacggacgccaggaggggaatcatcgcgaatcggaaggg

SEQ ID NO: 214955 - DNA, 55 bp, Artificial
  Synthetic oligonucleotide
cggcctcccggagcgacaagtgaattctctgcgcgtcccgtgttatcttcgcgac

SEQ ID NO: 214956 - DNA, 50 bp, Artificial
  Synthetic oligonucleotide
aaacgtctatccctcgattgccgactgccctcgctaccccacgcccacct

SEQ ID NO: 214957 - DNA, 50 bp, Artificial
  Synthetic oligonucleotide
aaaatcgtccggcggcccccagtttgattggagagactggcaacgcgggg

SEQ ID NO: 214958 - DNA, 50 bp, Artificial
  Synthetic oligonucleotide
aaaagccgacgacccgtcgcaacaaaacagcaagcccgagggtgcggaca

SEQ ID NO: 214959 - DNA, 50 bp, Artificial
  Synthetic oligonucleotide
aaaactccgggtctgcggttgcctcttcgtgtgcgaggtagccgtggtag

SEQ ID NO: 214960 - DNA, 50 bp, Artificial
  Synthetic oligonucleotide
aaaaccctacttgtccccgttgatttctcgggtgccacgcgcgccctttt

SEQ ID NO: 214961 - DNA, 50 bp, Artificial
  Synthetic oligonucleotide
acccgtggttcaccagcccagatgaacgcacgtttacggtgggcacccag

SEQ ID NO: 214962 - DNA, 50 bp, Artificial
  Synthetic oligonucleotide
acccggtcgtaattcgacctcggtctaacacaccagcggaggcgcaccct

SEQ ID NO: 214963 - DNA, 50 bp, Artificial
  Synthetic oligonucleotide
acccctctcccgcgggtggctgcatagatggctcgcatgccccgtcgctc

SEQ ID NO: 214964 - DNA, 50 bp, Artificial
  Synthetic oligonucleotide
accccacggactcaaacgcagtctgccctgtcagcgcacccatgcatccg

SEQ ID NO: 214965 - DNA, 50 bp, Artificial
  Synthetic oligonucleotide
acccatcggccttttgaccccgcccagccatcgctcagtgatggacaacc

SEQ ID NO: 214966 - DNA, 55 bp, Artificial
  Synthetic oligonucleotide
ccgcaaaatgtgtgggtaggatttcagatcgtcttccagtatccgtttgcggacg

SEQ ID NO: 214967 - DNA, 50 bp, Artificial
  Synthetic oligonucleotide
accattgcccgtaaagggtacggcgaagggcacccgaaagcagtcacgtg

SEQ ID NO: 214968 - DNA, 50 bp, Artificial
  Synthetic oligonucleotide
accatccgcctgtatgggacggcgaacctctgcccgcactcagtgccatc

SEQ ID NO: 214969 - DNA, 50 bp, Artificial
  Synthetic oligonucleotide
accagcctttgggcctcatcactatgccaaaatcgtccggcggcccccag

SEQ ID NO: 214970 - DNA, 50 bp, Artificial
  Synthetic oligonucleotide
accacgcgcataaaagagcggcgacggttgcctgtgtttgagatcgcggg

SEQ ID NO: 214971 - DNA, 50 bp, Artificial
  Synthetic oligonucleotide
acatcgaatgtcaggtcctcctcgcctacacacccgcatgggcagcggac

SEQ ID NO: 214972 - DNA, 50 bp, Artificial
  Synthetic oligonucleotide
acatccgagcaatgggaagccgcgtccgagtgatgggacgtgacatccga

SEQ ID NO: 214973 - DNA, 50 bp, Artificial
  Synthetic oligonucleotide
acaggcgggcggacttcgtggcatccgataacgacgcaatgccgttttcg

SEQ ID NO: 214974 - DNA, 50 bp, Artificial
  Synthetic oligonucleotide
acaggcgcaaggtaatcagggccgggcatcgcatagcctcccctgtaata

SEQ ID NO: 214975 - DNA, 50 bp, Artificial
  Synthetic oligonucleotide
acaggagccctgaatcccggcgcacatcccggaggttttaacggccagga

SEQ ID NO: 214976 - DNA, 50 bp, Artificial
  Synthetic oligonucleotide
acagcagctcggtgctcgcgtggaccacctcccatccggttaactctagc

SEQ ID NO: 214977 - DNA, 55 bp, Artificial
  Synthetic oligonucleotide
atcttgtcctttcgacagcagtatcgattcaggtcatcatcggaacctcagacgg

SEQ ID NO: 214978 - DNA, 53 bp, Artificial
  Synthetic oligonucleotide
cgttacccgtggcggatgcgttacttttccgcgctcccaattgaaatacccgc

SEQ ID NO: 214979 - DNA, 55 bp, Artificial
  Synthetic oligonucleotide
ctaataggacgatccagagccgattgtgtggcatgggaaacataggacatgcctt

SEQ ID NO: 214980 - DNA, 55 bp, Artificial
  Synthetic oligonucleotide
ctcacgtcggtgcggttgcttatcatcaccaagtgcccgttcaaattccttgcca

SEQ ID NO: 214981 - DNA, 55 bp, Artificial
  Synthetic oligonucleotide
ctcgttagccgtgggaattgctcaccagtgcgtataatccaactgctgcgcactg

SEQ ID NO: 214982 - DNA, 52 bp, Artificial
  Synthetic oligonucleotide
tggcgaacgaaccgggtaagagcctaaaccaggccggtgtcaaggggccacc

SEQ ID NO: 214983 - DNA, 55 bp, Artificial
  Synthetic oligonucleotide
cttggtgcccactataccagccgcgccgacattctcttgattgtcgagccagtct

SEQ ID NO: 214984 - DNA, 55 bp, Artificial
  Synthetic oligonucleotide
gactctgatcaatacttatgaagggttgagcaggccacgtagcatgcagaccggc

SEQ ID NO: 214985 - DNA, 55 bp, Artificial
  Synthetic oligonucleotide
gatctgtgtttcagcatattcccaggatgagccaattctatcggatggttcaaga

SEQ ID NO: 214986 - DNA, 55 bp, Artificial
  Synthetic oligonucleotide
gcaaacctagcacagactaggaactgttcacactcctgagaaccataacgtgagc

SEQ ID NO: 214987 - DNA, 55 bp, Artificial
  Synthetic oligonucleotide
gcggctaaagaccgagcgatggttgacccgacaattgagcgccatccccgcgcat

SEQ ID NO: 214988 - DNA, 55 bp, Artificial
  Synthetic oligonucleotide
caacatttgcctatgcgacatgtccggcgaagcattcatctagcacaggtatgct

SEQ ID NO: 214989 - DNA, 55 bp, Artificial
  Synthetic oligonucleotide
tgccaaacggaatggccccgctataggcaacgggcatgctgcgccagtggtactg

SEQ ID NO: 214990 - DNA, 55 bp, Artificial
  Synthetic oligonucleotide
ggccgcgcatattcccagcgcgtcgctaattcaaccaggggtaactcattgggag

SEQ ID NO: 214991 - DNA, 55 bp, Artificial
  Synthetic oligonucleotide
gtaacgcataagcgagcatcgcagtgctaaccagattgataccgtgttagggcac

SEQ ID NO: 214992 - DNA, 55 bp, Artificial
  Synthetic oligonucleotide
gtaaggtgatctcgattcaggcggtgggaagtaatctggttgacattagcgccac

SEQ ID NO: 214993 - DNA, 54 bp, Artificial
  Synthetic oligonucleotide
gtctaccggcggcggggtcacatgttggggttgggatgtgtacggccagttggg

SEQ ID NO: 214994 - DNA, 53 bp, Artificial
  Synthetic oligonucleotide
tacatattgtaagcactgggagtctcctctatgtccaagccgactagtgcccc

SEQ ID NO: 214995 - DNA, 51 bp, Artificial
  Synthetic oligonucleotide
tcaaccccggtttgtcagacggcaagtatacgacctcttttgcaaccgcac

SEQ ID NO: 214996 - DNA, 51 bp, Artificial
  Synthetic oligonucleotide
ctggccgcgcatatcaaacgcgatcagccgatccaagccgacactactgcg

SEQ ID NO: 214997 - DNA, 50 bp, Artificial
  Synthetic oligonucleotide
cccggatcgtatcgcctaaatcaccagtaagaaggagcaacccgtatgac

SEQ ID NO: 214998 - DNA, 50 bp, Artificial
  Synthetic oligonucleotide
cgcaccaatctcgcatcctgcatcaacgctaggcaaaggagctaagcgat

SEQ ID NO: 214999 - DNA, 55 bp, Artificial
  Synthetic oligonucleotide
ccgatatgggtatgcgggcaacatctctatcatctgactgtacctattgctggtc

SEQ ID NO: 215000 - DNA, 50 bp, Artificial
  Synthetic oligonucleotide
acccaaacatttcacgttcgacattcatttcctcgtacaacccgtcactg

SEQ ID NO: 215001 - DNA, 50 bp, Artificial
  Synthetic oligonucleotide
acatcgggtgggtgcggggtctcaaagatccagcggtaggggcagatctg

SEQ ID NO: 215002 - DNA, 50 bp, Artificial
  Synthetic oligonucleotide
acatccccgctacgcccaccacgcttctctgcaaggcgaatgtcgctgat

SEQ ID NO: 215003 - DNA, 50 bp, Artificial
  Synthetic oligonucleotide
acagggagcgcggacgatgcacgcccgaccataagtgtaaggagtcctcc

SEQ ID NO: 215004 - DNA, 50 bp, Artificial
  Synthetic oligonucleotide
aactttgggcgcacgatgggggttgacattaccggggaagcgccggggtt

SEQ ID NO: 215005 - DNA, 50 bp, Artificial
  Synthetic oligonucleotide
aactgcgcgggaagggatagaacgaaccgtgcacaaccgtcttttgcgga

SEQ ID NO: 215006 - DNA, 50 bp, Artificial
  Synthetic oligonucleotide
aacgtgggcgagttccaaacgtgcccgcaggtgttcttgggtcagatcga

SEQ ID NO: 215007 - DNA, 50 bp, Artificial
  Synthetic oligonucleotide
aacgcgtcattccaggggtagggccaggcatcgggcgagtagaagtgctg

SEQ ID NO: 215008 - DNA, 50 bp, Artificial
  Synthetic oligonucleotide
aacgcgctacccccggatcggagtggccccaatgggatgttccgaaagcc

SEQ ID NO: 215009 - DNA, 50 bp, Artificial
  Synthetic oligonucleotide
aacgcgcatgtggcatgcagaatccgcaataaccaggctagggcgctgcg

SEQ ID NO: 215010 - DNA, 55 bp, Artificial
  Synthetic oligonucleotide
aaggctcgatcccattagaaatcacgactcccattgaacccaacctgagcgacat

SEQ ID NO: 215011 - DNA, 50 bp, Artificial
  Synthetic oligonucleotide
aacgcacaacccaaggtgagacgccgcgttcagtgtggacgtggttcctg

SEQ ID NO: 215012 - DNA, 50 bp, Artificial
  Synthetic oligonucleotide
aaccggggtaaggtagtctgcgggaaccttaaagctcgcgcccacctggg

SEQ ID NO: 215013 - DNA, 50 bp, Artificial
  Synthetic oligonucleotide
aacccgatgttgactcggtcgtggtagctgagtggcccgatggtggtggt

SEQ ID NO: 215014 - DNA, 50 bp, Artificial
  Synthetic oligonucleotide
aacatagcctggggcgttcggcactctgtgatgtggtcatcccgcgtcat

SEQ ID NO: 215015 - DNA, 50 bp, Artificial
  Synthetic oligonucleotide
aaagggtgccccggttgtagctgtggcccaaggagctagtgtatgcgcgt

SEQ ID NO: 215016 - DNA, 50 bp, Artificial
  Synthetic oligonucleotide
aaagggcacaatctgcacaagcgccaataggttggctcccgccgctaggg

SEQ ID NO: 215017 - DNA, 50 bp, Artificial
  Synthetic oligonucleotide
aaaggcgctacgcagcgtcggttgggtcaacgcagctaggttggtaggga

SEQ ID NO: 215018 - DNA, 50 bp, Artificial
  Synthetic oligonucleotide
aaagctactaccgcgatgtctaccagggccaagccaccgttagcccgcgt

SEQ ID NO: 215019 - DNA, 50 bp, Artificial
  Synthetic oligonucleotide
aaactggtagggggccaagagaagggtcgcgcccgcatttacctccatcc

SEQ ID NO: 215020 - DNA, 50 bp, Artificial
  Synthetic oligonucleotide
aaaaccgcgtcagaacggggtaagttccgaaagcctcaaatccgcccggc

SEQ ID NO: 215021 - DNA, 55 bp, Artificial
  Synthetic oligonucleotide
cctaagatatgcccgtatagccctaacctcaacgcatattcttgccgaaataacc

SEQ ID NO: 215022 - DNA, 50 bp, Artificial
  Synthetic oligonucleotide
acagatcgcccatccttcagtgctacgcggctttccgcctcagtgcgttg

SEQ ID NO: 215023 - DNA, 50 bp, Artificial
  Synthetic oligonucleotide
acacggtggcatctaccaccttgagtgcatcgcggcacagcggttccgaa

SEQ ID NO: 215024 - DNA, 50 bp, Artificial
  Synthetic oligonucleotide
acaccccggtggcagtacgggtaaagcgaacctcaccgctgatgtcacgc

SEQ ID NO: 215025 - DNA, 50 bp, Artificial
  Synthetic oligonucleotide
acacactcgcgccctcggcaaaacggatcaactcctggtgccgttccgca

SEQ ID NO: 215026 - DNA, 50 bp, Artificial
  Synthetic oligonucleotide
acacaatctggcgggagcctttagcgttgaggcatgggagcggatggctg

SEQ ID NO: 215027 - DNA, 50 bp, Artificial
  Synthetic oligonucleotide
aattagccaggatcgccaaggggtgcccgcgcttgtctttgggaatgagg

SEQ ID NO: 215028 - DNA, 50 bp, Artificial
  Synthetic oligonucleotide
aatgtggcataatagccgccggttagccctacggagaaaggagcgccccc

SEQ ID NO: 215029 - DNA, 50 bp, Artificial
  Synthetic oligonucleotide
aatcgtggcacggtgcgctttgaggtcataggttggcacgggcgttacgg

SEQ ID NO: 215030 - DNA, 50 bp, Artificial
  Synthetic oligonucleotide
aataccctccagagcgatacgcatggggcgctcatccaggtggagttgcc

SEQ ID NO: 215031 - DNA, 50 bp, Artificial
  Synthetic oligonucleotide
aagtgcggcacatcgggtgggtgcggggtctcaaagatccagcggtaggg

SEQ ID NO: 215032 - DNA, 55 bp, Artificial
  Synthetic oligonucleotide
cctcatcaatcggttggattgacggatcttcggtatcatactcgtcttggatttc

SEQ ID NO: 215033 - DNA, 50 bp, Artificial
  Synthetic oligonucleotide
aagcccgtactcctgtggatctggccacgccactgaatgcccaggcgatc

SEQ ID NO: 215034 - DNA, 50 bp, Artificial
  Synthetic oligonucleotide
aagccaacatcgggtggcccgtgagtgcgctgagtggatcaggcagaaag

SEQ ID NO: 215035 - DNA, 50 bp, Artificial
  Synthetic oligonucleotide
aagcactgggagtctcctctatgtccaagccgactagtgccccctggccc

SEQ ID NO: 215036 - DNA, 50 bp, Artificial
  Synthetic oligonucleotide
aagcacggctaaaggcgctacgcagcgtcggttgggtcaacgcagctagg

SEQ ID NO: 215037 - DNA, 50 bp, Artificial
  Synthetic oligonucleotide
aagatggcacccccttagtggaggacgagcgtgggcaatgggtggaatgg

SEQ ID NO: 215038 - DNA, 50 bp, Artificial
  Synthetic oligonucleotide
aagagtggcaagcgctcggaatagttgcgggcatgcttcgagctacgcgc

SEQ ID NO: 215039 - DNA, 50 bp, Artificial
  Synthetic oligonucleotide
aagaccctcaacggcgggccactgttaccacacactgttgccaggagcat

SEQ ID NO: 215040 - DNA, 55 bp, Artificial
  Synthetic oligonucleotide
cgactcccaggagatgcggatgctcaaaggggctaggcgcaactagatcgggatt

SEQ ID NO: 215041 - DNA, 55 bp, Artificial
  Synthetic oligonucleotide
cgatggcgggtgatccgagtctgccctttagtcgtgagcagggctatgccttgat

SEQ ID NO: 215042 - DNA, 55 bp, Artificial
  Synthetic oligonucleotide
cgcgtgccccggcgttatggatacgatccgagagcgtcttgtcactaaagccgcc

SEQ ID NO: 215043 - DNA, 57 bp, Artificial
  Synthetic oligonucleotide
gctaggaacgccttacagagccgctaacgcggctttacggcggcacagccgcccgga

SEQ ID NO: 215044 - DNA, 60 bp, Artificial
  Synthetic oligonucleotide
ggatgataagcgtcggaaacggcgcagacacaactaatattacgcctgtacagaagacca

SEQ ID NO: 215045 - DNA, 58 bp, Artificial
  Synthetic oligonucleotide
agcctacggaaagcctgtcagcctgtcaagcgtctttcgcggcataaccgcctacggc

SEQ ID NO: 215046 - DNA, 60 bp, Artificial
  Synthetic oligonucleotide
catagtggtaagctgtgtatctgcttgtatcagcttaaatctcttgcggaagcaaacgct

SEQ ID NO: 215047 - DNA, 60 bp, Artificial
  Synthetic oligonucleotide
aatggctttctcatatatcatttcaagcaccgctacaggacaaagctacacgcgaagata

SEQ ID NO: 215048 - DNA, 60 bp, Artificial
  Synthetic oligonucleotide
tagacgcggagattattgacaacttgcgccgtatcggaagtgatggtaagtatctatcta

SEQ ID NO: 215049 - DNA, 58 bp, Artificial
  Synthetic oligonucleotide
cgccagttgagcgtgaacaatttaatccgggggctgaatttgctatccgctatgaaat

SEQ ID NO: 215050 - DNA, 58 bp, Artificial
  Synthetic oligonucleotide
gacgtgccttgcgataaattgccggaattaaaggcaatgttcggattttgatactcac

SEQ ID NO: 215051 - DNA, 57 bp, Artificial
  Synthetic oligonucleotide
agtatgccgcaatgcgtcctctggacgataaaggacggccgacagatgaagcgaccg

SEQ ID NO: 215052 - DNA, 57 bp, Artificial
  Synthetic oligonucleotide
tatgcagagcattactcggcttgttgagtgcggggcgttacggagaattgcgggcgt

SEQ ID NO: 215053 - DNA, 52 bp, Artificial
  Synthetic oligonucleotide
acgccgacctcatttctcctttatgtgggttcgccctgtaccccggagaaag

SEQ ID NO: 215054 - DNA, 57 bp, Artificial
  Synthetic oligonucleotide
ttgcgggcttatggttcaggtaattgcttacggacgcatgtttgaactctacgttta

SEQ ID NO: 215055 - DNA, 53 bp, Artificial
  Synthetic oligonucleotide
ccctatcggaacgccgacctcatttctcctttatgtgggttcgccctgtaccc

SEQ ID NO: 215056 - DNA, 55 bp, Artificial
  Synthetic oligonucleotide
agtcctgccccatcggaacttaccagatggaagcgtgggacgtgtatctaaatgg

SEQ ID NO: 215057 - DNA, 55 bp, Artificial
  Synthetic oligonucleotide
cggggcagcataccgcgcagcactgcattttgtggtgtcaggcgtatctgacggc

SEQ ID NO: 215058 - DNA, 55 bp, Artificial
  Synthetic oligonucleotide
ctgccatgtctccggagattcttattgtaaacgccagctaggaatacgaggtata

SEQ ID NO: 215059 - DNA, 55 bp, Artificial
  Synthetic oligonucleotide
ctttggcgctgtgcggtctgtgaaaatttccggagaaccagagtgtggagtaggt

SEQ ID NO: 215060 - DNA, 55 bp, Artificial
  Synthetic oligonucleotide
atagttgcgctgtaaacatggtaggacggaacaaagatcgccaaatgtcggggct

SEQ ID NO: 215061 - DNA, 55 bp, Artificial
  Synthetic oligonucleotide
atttcgatctccgggtctgttccgagttctccctttgccagacaggcgacgatcg

SEQ ID NO: 215062 - DNA, 55 bp, Artificial
  Synthetic oligonucleotide
cagacaccggacttcaatcccctagtggacccaaaatgtagttgggcactggccc

SEQ ID NO: 215063 - DNA, 54 bp, Artificial
  Synthetic oligonucleotide
cccatatttgtaaagctttgcgcaaaatcgtcccgacccgctctgtttcccgaa

SEQ ID NO: 215064 - DNA, 55 bp, Artificial
  Synthetic oligonucleotide
cccatgggcatcagagtccgggtcatttcctccggggtctgtgatttcaaatcgg

SEQ ID NO: 215065 - DNA, 56 bp, Artificial
  Synthetic oligonucleotide
ttcctttagtgaagcccttgaccgctggacaggcggtaaaatcgacaaagatacaa

SEQ ID NO: 215066 - DNA, 55 bp, Artificial
  Synthetic oligonucleotide
ccgcttgttaagcatcccgtctctcctttccgcattgtacgccttacaccgtatc

SEQ ID NO: 215067 - DNA, 53 bp, Artificial
  Synthetic oligonucleotide
ccgtggggaatacgacttgataaaacgttgaatgaaagaagtgctaaaccgtg

SEQ ID NO: 215068 - DNA, 55 bp, Artificial
  Synthetic oligonucleotide
ccttactgtatttacgccgaacaagaatggcaacttacttgccctacacacccgc

SEQ ID NO: 215069 - DNA, 55 bp, Artificial
  Synthetic oligonucleotide
cgcaaggcgatgacagaggttatcctgcggggtatgggacttacccgcgtggagg

SEQ ID NO: 215070 - DNA, 55 bp, Artificial
  Synthetic oligonucleotide
tgtggcaggcgtcgtttggggatgtcagcggtacattgacggacaacacgtctat

SEQ ID NO: 215071 - DNA, 55 bp, Artificial
  Synthetic oligonucleotide
gaatctcccgagtgcagttcataatttggggcagcgggtactccgttcaccagac

SEQ ID NO: 215072 - DNA, 55 bp, Artificial
  Synthetic oligonucleotide
gaattccgtagccgacgtctggacaaacgtcctcacccagctgaaacgcgacctc

SEQ ID NO: 215073 - DNA, 55 bp, Artificial
  Synthetic oligonucleotide
gacacactacgggatgacggtctggagtatgcgacccgcttgctccactctggta

SEQ ID NO: 215074 - DNA, 53 bp, Artificial
  Synthetic oligonucleotide
tcgccggggagaatagcgccctcttccgggaacacgacctttactgccacccc

SEQ ID NO: 215075 - DNA, 55 bp, Artificial
  Synthetic oligonucleotide
aatccctgatgtggggttgcttcatatggtttatcagcgttgcgtattggtttac

SEQ ID NO: 215076 - DNA, 60 bp, Artificial
  Synthetic oligonucleotide
ttactcaatatccccgcacggacaactatgcagagcattactcggcttgttgagtgcggg

SEQ ID NO: 215077 - DNA, 55 bp, Artificial
  Synthetic oligonucleotide
gtcaacggttctgatgttcgtggatttctccgtcccgtttatgccctcgttcatc

SEQ ID NO: 215078 - DNA, 54 bp, Artificial
  Synthetic oligonucleotide
acggcgcaagcggaccggttaccacgcggagtgaaaatagacccagattcccga

SEQ ID NO: 215079 - DNA, 55 bp, Artificial
  Synthetic oligonucleotide
gggacatgatgtacttacattcaccctcaatatggacgggctatatgaacttctt

SEQ ID NO: 215080 - DNA, 55 bp, Artificial
  Synthetic oligonucleotide
ggacatgatgttggcccggagaattataatcaacgtgcaaagcattgcggtacgg

SEQ ID NO: 215081 - DNA, 55 bp, Artificial
  Synthetic oligonucleotide
gcaacggtgagggtatttatacggttggtggacttgtccagacatttacgcaaaa

SEQ ID NO: 215082 - DNA, 55 bp, Artificial
  Synthetic oligonucleotide
gcgtaaacagtatgcgttccagggcattaacaaggtcacatcagcctgaaggccg

SEQ ID NO: 215083 - DNA, 55 bp, Artificial
  Synthetic oligonucleotide
gctaaagctaatacgaatttggcatagtagccgttacttcccttggactcacccc

SEQ ID NO: 215084 - DNA, 54 bp, Artificial
  Synthetic oligonucleotide
aatcgtcttattatagcccagcacatggggccattcggcaggcagacccgtcag

SEQ ID NO: 215085 - DNA, 54 bp, Artificial
  Synthetic oligonucleotide
cgttggcaagtttgggaaagggacgtggaatgctgcatcgcttgtccgcgagaa

SEQ ID NO: 215086 - DNA, 54 bp, Artificial
  Synthetic oligonucleotide
gaatcagcgcacgtaagaaacaaccacccgccggtttggctccgtaccgataga

SEQ ID NO: 215087 - DNA, 59 bp, Artificial
  Synthetic oligonucleotide
cgatgaatgcacaacatattatcggctacaaggtaaacggtcaggaacgctctatcttt

SEQ ID NO: 215088 - DNA, 53 bp, Artificial
  Synthetic oligonucleotide
aattccgttatggtcatgagggcgaattgaacatcgactttgagtttatcaag

SEQ ID NO: 215089 - DNA, 53 bp, Artificial
  Synthetic oligonucleotide
cagaggtgtggagcaaccgtgaatgtggctgactctccgacacttcccggcta

SEQ ID NO: 215090 - DNA, 53 bp, Artificial
  Synthetic oligonucleotide
cgcgcgtgtgaaagcactgctaaaacgctgcaatatagccgcgtcaaagatta

SEQ ID NO: 215091 - DNA, 53 bp, Artificial
  Synthetic oligonucleotide
tatcagacgcggctgtccgtttccgcggacatacatgccattatacgccagga

SEQ ID NO: 215092 - DNA, 52 bp, Artificial
  Synthetic oligonucleotide
agcgaccgaactttatcgcgcaaagcccattactaccgaggacggggaagct

SEQ ID NO: 215093 - DNA, 52 bp, Artificial
  Synthetic oligonucleotide
gagccgcgcctctcaggtggagcaatgtgtacggccatagactggagagcgg

SEQ ID NO: 215094 - DNA, 52 bp, Artificial
  Synthetic oligonucleotide
tagtgccgagcttttacatagaggagtgtgcactggagggattatgcaccaa

SEQ ID NO: 215095 - DNA, 52 bp, Artificial
  Synthetic oligonucleotide
tttcccaaaatgcaaaccgccccggtgagtgcggtcagaccggcctttacgt

SEQ ID NO: 215096 - DNA, 51 bp, Artificial
  Synthetic oligonucleotide
tatgatgggagttgggcgttctccatcaatcaagattctggaaacacgttt

SEQ ID NO: 215097 - DNA, 51 bp, Artificial
  Synthetic oligonucleotide
gacacagtttgtccgtgagaaaaaacgatacacggattactgttaccttgc

SEQ ID NO: 215098 - DNA, 57 bp, Artificial
  Synthetic oligonucleotide
gcttatctgaaatagggccaaatccaacagatacgggctataactttcgtgattaaa

SEQ ID NO: 215099 - DNA, 50 bp, Artificial
  Synthetic oligonucleotide
tggattgcggtgggtttttttaatgatctaagcaaagcgtcgaaagaaac

SEQ ID NO: 215100 - DNA, 50 bp, Artificial
  Synthetic oligonucleotide
accgggatagggggccgtgcggtccattttgtgagcgtcgtaatacgcca

SEQ ID NO: 215101 - DNA, 50 bp, Artificial
  Synthetic oligonucleotide
accatcgccgtgactgcctgcgctttagcggttttctccgtactgccggc

SEQ ID NO: 215102 - DNA, 50 bp, Artificial
  Synthetic oligonucleotide
accactacctgccactccggataccgaactcaccggcccatctgccgccc

SEQ ID NO: 215103 - DNA, 50 bp, Artificial
  Synthetic oligonucleotide
acagctgtcctcgctacgggaccagcgtcgtcagcgtatcccgcaccgcg

SEQ ID NO: 215104 - DNA, 50 bp, Artificial
  Synthetic oligonucleotide
aattgcgggattgttatgtccgacatccgtaaaagcgcgggtgcgccgga

SEQ ID NO: 215105 - DNA, 50 bp, Artificial
  Synthetic oligonucleotide
aattcccgggcgggaggttaccgtgggcgacgtggtgtgtctggatgcag

SEQ ID NO: 215106 - DNA, 50 bp, Artificial
  Synthetic oligonucleotide
aatgtgctgtgcaagccgccctacaccgcttacggtatcgcgtgggacaa

SEQ ID NO: 215107 - DNA, 50 bp, Artificial
  Synthetic oligonucleotide
aatcccctgcggtcgtgaaattcgtgatgtgccccacgccctgaacagcg

SEQ ID NO: 215108 - DNA, 50 bp, Artificial
  Synthetic oligonucleotide
aagttggacggtgtgtcgcaccactcccgcactacgtagccccggacgga

SEQ ID NO: 215109 - DNA, 55 bp, Artificial
  Synthetic oligonucleotide
cctaatagcgttcggtgctaccctatcggaacgccgacctcatttctcctttatg

SEQ ID NO: 215110 - DNA, 50 bp, Artificial
  Synthetic oligonucleotide
aagcgtatttgcacggtgctccggcgaaactgcctgcccactgggacgga

SEQ ID NO: 215111 - DNA, 50 bp, Artificial
  Synthetic oligonucleotide
aactcctcggagacgccggtatacagcaaacgccgggagctgtacgctct

SEQ ID NO: 215112 - DNA, 50 bp, Artificial
  Synthetic oligonucleotide
aacctccgcagggcggttgtctgactgccggatttccgcacacagctcca

SEQ ID NO: 215113 - DNA, 50 bp, Artificial
  Synthetic oligonucleotide
aaattacttctgcctgcgtaagctgcggctcctgtgcggacgtttgcccc

SEQ ID NO: 215114 - DNA, 50 bp, Artificial
  Synthetic oligonucleotide
aaacggcggctccctaatatgcagagcagccaacaggttgtagcgggcca

SEQ ID NO: 215115 - DNA, 50 bp, Artificial
  Synthetic oligonucleotide
aaacggacgccctgcagatgctgacgcggttacaggggtgcaagcatatg

SEQ ID NO: 215116 - DNA, 50 bp, Artificial
  Synthetic oligonucleotide
aaacgatcggacgggcaaagggcggtgcatccacccgcatatgatagggc

SEQ ID NO: 215117 - DNA, 50 bp, Artificial
  Synthetic oligonucleotide
aaacagagcgcaccgcaccggaggacgtcctgaacagggagctgtccgac

SEQ ID NO: 215118 - DNA, 50 bp, Artificial
  Synthetic oligonucleotide
aaaagccgcaggtccgcaacgttgccgtccgctccatacgcataaagtcc

SEQ ID NO: 215119 - DNA, 50 bp, Artificial
  Synthetic oligonucleotide
cacagcagaacgcgcttataacggcggcctatgcggaactgccgtcccta

SEQ ID NO: 215120 - DNA, 57 bp, Artificial
  Synthetic oligonucleotide
caaatcggaaatgcggggttatgagacggaattgcgcgttgattctgtttctccgtg

SEQ ID NO: 215121 - DNA, 50 bp, Artificial
  Synthetic oligonucleotide
agccatggagcactgggacaccctatgcccgggaggcctccgtttttgct

SEQ ID NO: 215122 - DNA, 50 bp, Artificial
  Synthetic oligonucleotide
agccaggtgaacacctgtttcccgcgaaatgcaggctcccccatgggcat

SEQ ID NO: 215123 - DNA, 50 bp, Artificial
  Synthetic oligonucleotide
agcacccatgcagcggagccgtgctctttacgtctcgcacctaccagagg

SEQ ID NO: 215124 - DNA, 50 bp, Artificial
  Synthetic oligonucleotide
agagcgaagcttttcctttgcccgaaagcccggagctgacacgcagcttg

SEQ ID NO: 215125 - DNA, 50 bp, Artificial
  Synthetic oligonucleotide
agaactttgatgttattgggcgcgaccttatggacaccgccgaaattcgc

SEQ ID NO: 215126 - DNA, 50 bp, Artificial
  Synthetic oligonucleotide
actgttccgtccggactgcaacgcacgccgcatgaacaacacccaggatc

SEQ ID NO: 215127 - DNA, 50 bp, Artificial
  Synthetic oligonucleotide
actgggagccggagcgtacttgcggaacgattccccacttgcgatacggg

SEQ ID NO: 215128 - DNA, 50 bp, Artificial
  Synthetic oligonucleotide
actgctcctttcgtgcccccgttggcgtgggatcgtcggtttcggtttcc

SEQ ID NO: 215129 - DNA, 50 bp, Artificial
  Synthetic oligonucleotide
actcgtcccgacccagcatccgattgatcgctgtaacagcttcggcccgg

SEQ ID NO: 215130 - DNA, 50 bp, Artificial
  Synthetic oligonucleotide
acgttgcatcgcctgccttggtgacggtaagtgtcgtcgagccggccttt

SEQ ID NO: 215131 - DNA, 60 bp, Artificial
  Synthetic oligonucleotide
ctcgttagagaataagtatccacacgctcatttgactgacgcatcgaaagctgataagac

SEQ ID NO: 215132 - DNA, 50 bp, Artificial
  Synthetic oligonucleotide
acgtattccacatcccagagggtacagccccgttccgcaatgacgggggc

SEQ ID NO: 215133 - DNA, 50 bp, Artificial
  Synthetic oligonucleotide
acgggtgccgtctctttgcgttgcccccgcagggacgtggggagcggtga

SEQ ID NO: 215134 - DNA, 50 bp, Artificial
  Synthetic oligonucleotide
acggggctggtcgtcctccgtagacccgatggctccccgaaccatgtacc

SEQ ID NO: 215135 - DNA, 50 bp, Artificial
  Synthetic oligonucleotide
acgctgtaaaacgccgccatgtccacctcacggaagggaggcgtccgtat

SEQ ID NO: 215136 - DNA, 50 bp, Artificial
  Synthetic oligonucleotide
acgctcccggaactccacacgatccgtgggagggcatttatgccgccgta

SEQ ID NO: 215137 - DNA, 50 bp, Artificial
  Synthetic oligonucleotide
acctgtttcccgcgaaatgcaggctcccccatgggcatcagagtccgggt

SEQ ID NO: 215138 - DNA, 50 bp, Artificial
  Synthetic oligonucleotide
acctgggagcgggtggtgcagtgcctgtccattgggacggaaggtattta

SEQ ID NO: 215139 - DNA, 60 bp, Artificial
  Synthetic oligonucleotide
tgaagcgccttgcagagccacatcgtccttgtgatgaaccacggccgagagacgttcttt

SEQ ID NO: 215140 - DNA, 60 bp, Artificial
  Synthetic oligonucleotide
acgagcttgcgaaaccgcacgttcagcatgaaaacaccatgcggaaaatcctgcacacgc

SEQ ID NO: 215141 - DNA, 55 bp, Artificial
  Synthetic oligonucleotide
gtatacgtgcgattcgtaatcaagaaggattgaggttcgttgaatagccttgggg

SEQ ID NO: 215142 - DNA, 55 bp, Artificial
  Synthetic oligonucleotide
gttgtatgcaatgccaccggcagaaacggtttgcaggccacctgagctgacgatg

SEQ ID NO: 215143 - DNA, 55 bp, Artificial
  Synthetic oligonucleotide
gtccgcaatcggccaatttgaggcattcaattgtcctcatacaatgcgtatcccg

SEQ ID NO: 215144 - DNA, 55 bp, Artificial
  Synthetic oligonucleotide
aaaccgtaccttctatccggtcagtgccgaatgcaagaacgggaagctgcatggc

SEQ ID NO: 215145 - DNA, 55 bp, Artificial
  Synthetic oligonucleotide
gtcctcatgtgggcatcacgctcacttggaagacgttgtagtgcaaacgactgac

SEQ ID NO: 215146 - DNA, 55 bp, Artificial
  Synthetic oligonucleotide
gtcgcgcctatcagcatcgaaataaagtaggcagtgcccgcaccattacgcggtg

SEQ ID NO: 215147 - DNA, 55 bp, Artificial
  Synthetic oligonucleotide
gtcgtgttaccaccgcaacacgcgacaaaagcgatcacatttcccgatgcgtccc

SEQ ID NO: 215148 - DNA, 55 bp, Artificial
  Synthetic oligonucleotide
gttgcgctgaggacactctagggaccgtaaaagtggctgtcaataggcattcaac

SEQ ID NO: 215149 - DNA, 55 bp, Artificial
  Synthetic oligonucleotide
gtgcagatttcgatttctggctttatgcgttttgccatcgacagtactccatacg

SEQ ID NO: 215150 - DNA, 55 bp, Artificial
  Synthetic oligonucleotide
gttcagctgtggcatattagacgtcaagtccagattggctgaccagaaagaatcg

SEQ ID NO: 215151 - DNA, 59 bp, Artificial
  Synthetic oligonucleotide
tttccgattgagattgtacacctcctactgcacaatataacatacataatccatctaat

SEQ ID NO: 215152 - DNA, 55 bp, Artificial
  Synthetic oligonucleotide
gcttgtggatggagaacagacattcacgaccatactggaagcgatttccaacgcg

SEQ ID NO: 215153 - DNA, 55 bp, Artificial
  Synthetic oligonucleotide
gcttttgttacgcaggaagtgaatgtcacgatcgaaggcacgaacgatggcccca

SEQ ID NO: 215154 - DNA, 55 bp, Artificial
  Synthetic oligonucleotide
aacggcatgtgaactactcgtcttactcatgtcactctcctcgggttaagtggtg

SEQ ID NO: 215155 - DNA, 55 bp, Artificial
  Synthetic oligonucleotide
acctaccgcgaaggtatggtgcagccactggaagtacagtaagcccgcgtatgcg

SEQ ID NO: 215156 - DNA, 55 bp, Artificial
  Synthetic oligonucleotide
ggaatcgcgtcttttcgtaatgaccaggcgcgactatcactggcattcactgacg

SEQ ID NO: 215157 - DNA, 55 bp, Artificial
  Synthetic oligonucleotide
accggttccttgtaatgccaagtaggtggatcgatcgtattcagcgtctgacagc

SEQ ID NO: 215158 - DNA, 55 bp, Artificial
  Synthetic oligonucleotide
ggacgcgaagtgaaattggcagataacgcggagaacatggacttaactcgtattc

SEQ ID NO: 215159 - DNA, 55 bp, Artificial
  Synthetic oligonucleotide
tgcgccttgccatcacgtcttattggatgccgggtgtttcgtcacaaattgtcga

SEQ ID NO: 215160 - DNA, 55 bp, Artificial
  Synthetic oligonucleotide
ggatatacgctgtcgctgtcgcaacccttgctggatgtcgcggcctggcaaacgt

SEQ ID NO: 215161 - DNA, 55 bp, Artificial
  Synthetic oligonucleotide
ggatcgtcctttcatgctgaaccattttctgggattgagtcctgcagacagaaga

SEQ ID NO: 215162 - DNA, 59 bp, Artificial
  Synthetic oligonucleotide
catagtagctgaatgtattaaagcagatataggtgttggacctcacatagtattaggta

SEQ ID NO: 215163 - DNA, 55 bp, Artificial
  Synthetic oligonucleotide
ggatctaactatgcaattggtcaaaacccaacgagacgcgctgttacgtccgctg

SEQ ID NO: 215164 - DNA, 55 bp, Artificial
  Synthetic oligonucleotide
ggatggagatcaatatcaggtggaatgtggagtgcttgaagacagggaagcgctg

SEQ ID NO: 215165 - DNA, 55 bp, Artificial
  Synthetic oligonucleotide
tatggttgaatccggaaacgaaatcagaggcttgacatgatttgacaagcgcggc

SEQ ID NO: 215166 - DNA, 55 bp, Artificial
  Synthetic oligonucleotide
tattaaggggaattcggctgaactcttgagtatccaagttatcaaacgatgagat

SEQ ID NO: 215167 - DNA, 55 bp, Artificial
  Synthetic oligonucleotide
ttacgaggtgacgtcatgctgttaactcgcaaaagcaacgctgcagagcgttcgc

SEQ ID NO: 215168 - DNA, 55 bp, Artificial
  Synthetic oligonucleotide
ggcttcgcgtgtgaagagctttgtccccagctcttgttcgagtgcggagatacgg

SEQ ID NO: 215169 - DNA, 55 bp, Artificial
  Synthetic oligonucleotide
ggctactacgcttggttcaaatttagcgccggccgatgtcattgccgcacttttg

SEQ ID NO: 215170 - DNA, 55 bp, Artificial
  Synthetic oligonucleotide
tggcaaaacgagcgcggaaggtctagcggacgatgtaggcgccggtgctgtgcag

SEQ ID NO: 215171 - DNA, 55 bp, Artificial
  Synthetic oligonucleotide
aactttcgcgctcgcaaacgcaagtgccgggagggcactcggtacgtatagggag

SEQ ID NO: 215172 - DNA, 55 bp, Artificial
  Synthetic oligonucleotide
ggcgcaggacgcaaaccctgctgttggaaacggacattgccagacgcgacactgg

SEQ ID NO: 215173 - DNA, 55 bp, Artificial
  Synthetic oligonucleotide
ctgtcggaaatccctgttattggcgtccggcgactcatccatgaacagacggtcg

SEQ ID NO: 215174 - DNA, 55 bp, Artificial
  Synthetic oligonucleotide
ggccagcgaggcgccccgtatatttgttcgcgtcactcatgattggatgaccagt

SEQ ID NO: 215175 - DNA, 55 bp, Artificial
  Synthetic oligonucleotide
ggcaaaaccgtctccgtgtatgtcagttcagcgatggtccatgaccaacccaagg

SEQ ID NO: 215176 - DNA, 54 bp, Artificial
  Synthetic oligonucleotide
tacatacgtcaggacagccacggtgaaaaccacgactgccagagccaggtaata

SEQ ID NO: 215177 - DNA, 54 bp, Artificial
  Synthetic oligonucleotide
taatatttcttatacaattacctgatgtttgtatacaatgcatattacaagaag

SEQ ID NO: 215178 - DNA, 54 bp, Artificial
  Synthetic oligonucleotide
ttgttgaggcgtattcgtaaatgttggattcgttacctgcgaaccagtacggac

SEQ ID NO: 215179 - DNA, 54 bp, Artificial
  Synthetic oligonucleotide
tccaagaagccatcgttttccaccatttgcatctagatccgctccaccgaatag

SEQ ID NO: 215180 - DNA, 54 bp, Artificial
  Synthetic oligonucleotide
tggtctacatacaaactgaacctccgcacaatgctagattccgagttgccgtcg

SEQ ID NO: 215181 - DNA, 54 bp, Artificial
  Synthetic oligonucleotide
ccgggagtttcatacaccagattgcgatacgccttgtatgccagttccgataac

SEQ ID NO: 215182 - DNA, 54 bp, Artificial
  Synthetic oligonucleotide
cggcttgtattatcgtaccgctgattctcggtgcagcgctgcaactacccaaag

SEQ ID NO: 215183 - DNA, 54 bp, Artificial
  Synthetic oligonucleotide
tatcgtctcgactagccatcacctaggagtgcttgggcatgccacagatcccta

SEQ ID NO: 215184 - DNA, 55 bp, Artificial
  Synthetic oligonucleotide
gaaaatcaaccttcgtggattatttcgcttccgcgaggctccataccttggcttg

SEQ ID NO: 215185 - DNA, 54 bp, Artificial
  Synthetic oligonucleotide
ttttatccggggagacaaacggatagtgcgtgagagcgaaggaagcacttacca

SEQ ID NO: 215186 - DNA, 54 bp, Artificial
  Synthetic oligonucleotide
gatgaatgcggggaaatgcaatgtggcctgtcaggctaaatgatccgtctgatc

SEQ ID NO: 215187 - DNA, 54 bp, Artificial
  Synthetic oligonucleotide
ggcgctcatttcatgagccgaatccggacgccgagacttttggcctgcgatctg

SEQ ID NO: 215188 - DNA, 54 bp, Artificial
  Synthetic oligonucleotide
ttttcgacctgcttgcgctacattgcaaacgatagaacaacaacgagccgggac

SEQ ID NO: 215189 - DNA, 54 bp, Artificial
  Synthetic oligonucleotide
cttgtttgaactgaagttgctatccgcgacatcgactgtcacaccacttgtcga

SEQ ID NO: 215190 - DNA, 54 bp, Artificial
  Synthetic oligonucleotide
agacagacgcaacacccggttaaagcaggaaagcgctgttgatggcaaacacgc

SEQ ID NO: 215191 - DNA, 54 bp, Artificial
  Synthetic oligonucleotide
gtatcacaacgaggagttgactcaacggagactaaacttgatgagccaatttct

SEQ ID NO: 215192 - DNA, 53 bp, Artificial
  Synthetic oligonucleotide
atcaaatagtcctgcacgaacgtgatattaggcgtgattcaggacccttcacg

SEQ ID NO: 215193 - DNA, 53 bp, Artificial
  Synthetic oligonucleotide
tcattgagcatggcgtcagcgggaaggctgctgtgcaaactatcgtaatcacc

SEQ ID NO: 215194 - DNA, 53 bp, Artificial
  Synthetic oligonucleotide
ggtagcgatccgcgagtaacggaatcaagttgcgatacatgaacgacgacgtc

SEQ ID NO: 215195 - DNA, 55 bp, Artificial
  Synthetic oligonucleotide
actgccaaccttattttacgagtgcgaacgatgacgtctagcatagcatgtgatg

SEQ ID NO: 215196 - DNA, 53 bp, Artificial
  Synthetic oligonucleotide
agtcgggcactttccttgataagcgccgtgctgcggtactcataggccaccgt

SEQ ID NO: 215197 - DNA, 53 bp, Artificial
  Synthetic oligonucleotide
atatatacaatgggtagcaaatttgtgaaaatgagccaatccttaaagtatat

SEQ ID NO: 215198 - DNA, 53 bp, Artificial
  Synthetic oligonucleotide
ggtttgagtaatcacaggcatccggaaacaattcgcgtgtcctgcgtgtaatt

SEQ ID NO: 215199 - DNA, 52 bp, Artificial
  Synthetic oligonucleotide
gccttccgaagggaaaatttcaggacgaactgttgtgcgaattacccgaagg

SEQ ID NO: 215200 - DNA, 53 bp, Artificial
  Synthetic oligonucleotide
gtacagttctggcagggaagcgtaccggtatagattccgttgggtgtccgaat

SEQ ID NO: 215201 - DNA, 53 bp, Artificial
  Synthetic oligonucleotide
taggatgctggaaagaacgaccaatttgcgcattgtgtgactccgatatgtgg

SEQ ID NO: 215202 - DNA, 53 bp, Artificial
  Synthetic oligonucleotide
aagtcgaatgagtacagagctcgtgctgtccgcagatcagaacggtactaccc

SEQ ID NO: 215203 - DNA, 52 bp, Artificial
  Synthetic oligonucleotide
agccataaggtgacgctgggttattttgggtatgccgatagccaatggcaga

SEQ ID NO: 215204 - DNA, 52 bp, Artificial
  Synthetic oligonucleotide
aagttcaaggatagttccacggcaggccggctatatgatccatgtcaaatgc

SEQ ID NO: 215205 - DNA, 52 bp, Artificial
  Synthetic oligonucleotide
tagtttcgccaacttatttgatcggcttatcgcttgcctctatcgatcctac

SEQ ID NO: 215206 - DNA, 55 bp, Artificial
  Synthetic oligonucleotide
ctggacgacatacgcaacaggttcgccgtatcatcagtgaaactctcccgttgct

SEQ ID NO: 215207 - DNA, 52 bp, Artificial
  Synthetic oligonucleotide
gggacgtcagtatcctggggaagtaccgctactgcttaacgcttcttactac

SEQ ID NO: 215208 - DNA, 52 bp, Artificial
  Synthetic oligonucleotide
atgagcaagaggccaagccagcgtatgcatatgcgcaagccagtttgtcccc

SEQ ID NO: 215209 - DNA, 52 bp, Artificial
  Synthetic oligonucleotide
catgacggttgagaacacttctttcgctgtgaactccgtaaacccgtggttg

SEQ ID NO: 215210 - DNA, 52 bp, Artificial
  Synthetic oligonucleotide
ggagtgaccgccaaccaccagttctaaggaagtgaagcgatgccggatatta

SEQ ID NO: 215211 - DNA, 52 bp, Artificial
  Synthetic oligonucleotide
tccaaaagagtgacctgtttgtcagacaattaacgcgcctgatagtaaccgc

SEQ ID NO: 215212 - DNA, 52 bp, Artificial
  Synthetic oligonucleotide
cagccgtctggatcatcagtggctggcccgaagggtattacattccgacata

SEQ ID NO: 215213 - DNA, 52 bp, Artificial
  Synthetic oligonucleotide
taaattgctcgcacctttcggcgtcgactttagtgatgcacgcaagaatgcg

SEQ ID NO: 215214 - DNA, 51 bp, Artificial
  Synthetic oligonucleotide
agtcgcgcgttctctctgatcacgtttcctttggttgcgcgccacttgtcg

SEQ ID NO: 215215 - DNA, 51 bp, Artificial
  Synthetic oligonucleotide
ttaccagtattcaggtctaccagtacgcccgaagtcgaattcgtatagccg

SEQ ID NO: 215216 - DNA, 51 bp, Artificial
  Synthetic oligonucleotide
accatttccaccctatcgcctgcatcgttaaaccggactgcctcaatcaaa

SEQ ID NO: 215217 - DNA, 55 bp, Artificial
  Synthetic oligonucleotide
ctgcttcggatgcatgcctcaaacttcgcggttacggacgactccgcaacggcaa

SEQ ID NO: 215218 - DNA, 51 bp, Artificial
  Synthetic oligonucleotide
ccgctttcttttgcacgtttgatatcttccgggcttgtgttgtccgttaaa

SEQ ID NO: 215219 - DNA, 51 bp, Artificial
  Synthetic oligonucleotide
tcaagatgcaaaatcccgaggaaatgactcgatgctacctggcgccattcg

SEQ ID NO: 215220 - DNA, 51 bp, Artificial
  Synthetic oligonucleotide
tcagcctatgcagggaaattcgactgttacttaatccagcccacaagggag

SEQ ID NO: 215221 - DNA, 51 bp, Artificial
  Synthetic oligonucleotide
aggtcttccggtctttccacggccaatcagtttcagggtacggttagccgt

SEQ ID NO: 215222 - DNA, 51 bp, Artificial
  Synthetic oligonucleotide
gtgctacatccgttggcgggcaaaccactgctgtcccacgtgattgatact

SEQ ID NO: 215223 - DNA, 51 bp, Artificial
  Synthetic oligonucleotide
tcggcagaaacgccatgacaaccagtaccgctggacagacacgcacttcat

SEQ ID NO: 215224 - DNA, 51 bp, Artificial
  Synthetic oligonucleotide
agtgggacggtcggccgcttagcgtgtcgtggtacgcctaaccagtcgcca

SEQ ID NO: 215225 - DNA, 51 bp, Artificial
  Synthetic oligonucleotide
gacaattgggagttcatcaagaccaaggcgaagtacgcgatggcgcatgtc

SEQ ID NO: 215226 - DNA, 51 bp, Artificial
  Synthetic oligonucleotide
caaaatgggattgccagagtatgttacgttgcaaaatacgatggtttcgaa

SEQ ID NO: 215227 - DNA, 51 bp, Artificial
  Synthetic oligonucleotide
ggaaacgctttgggcagacgcgtcgtgtaaacaactcagaccccgttacac

SEQ ID NO: 215228 - DNA, 55 bp, Artificial
  Synthetic oligonucleotide
ctgccatcctcgctaccgtcatggttttgcgaaatactggtcaggctataacgcc

SEQ ID NO: 215229 - DNA, 51 bp, Artificial
  Synthetic oligonucleotide
gtccctcacggaatcaataacatgcaacaggagacaggcgagtccgactca

SEQ ID NO: 215230 - DNA, 51 bp, Artificial
  Synthetic oligonucleotide
ctcgtaataaacaccgacacgtccatgttccatgaaggtcgacggaaacaa

SEQ ID NO: 215231 - DNA, 51 bp, Artificial
  Synthetic oligonucleotide
aacgctggcttgaaatggcacgggaaaaggaaacgcactcgtaacggtcct

SEQ ID NO: 215232 - DNA, 51 bp, Artificial
  Synthetic oligonucleotide
tgattcccagcaagacacccaatgcagtcgcgacaccttttccgcccttga

SEQ ID NO: 215233 - DNA, 51 bp, Artificial
  Synthetic oligonucleotide
caattgcactttagggcaaggtatcccgccattagtgcggcaatccgggac

SEQ ID NO: 215234 - DNA, 51 bp, Artificial
  Synthetic oligonucleotide
gtagcgtatcaggaagcgtcgaatgctccgccatgtgtggctgtttacctg

SEQ ID NO: 215235 - DNA, 51 bp, Artificial
  Synthetic oligonucleotide
taggaaccctgaataacagcggcttactgacttctccggttgatgcaatct

SEQ ID NO: 215236 - DNA, 51 bp, Artificial
  Synthetic oligonucleotide
cccctcacgctcgaaataaaccggctcccgaccgttctgaaacgatgggga

SEQ ID NO: 215237 - DNA, 50 bp, Artificial
  Synthetic oligonucleotide
tggccaaccgttgtttatcatcggctaatagatggcagcaggggctatac

SEQ ID NO: 215238 - DNA, 50 bp, Artificial
  Synthetic oligonucleotide
catccgccgaccccatccgtcttagaatcagcgccgtccggtgcatcagg

SEQ ID NO: 215239 - DNA, 55 bp, Artificial
  Synthetic oligonucleotide
ctataaatggtataggagctataggttcaggaggtatttatgcacaatcttcagc

SEQ ID NO: 215240 - DNA, 50 bp, Artificial
  Synthetic oligonucleotide
cagggagggtattcatcagcgggtaacggtgcagccgggatcacgacggt

SEQ ID NO: 215241 - DNA, 50 bp, Artificial
  Synthetic oligonucleotide
ttttcgatgggaaccggctgcctagttgtcttttaagcgccaatcaccgc

SEQ ID NO: 215242 - DNA, 50 bp, Artificial
  Synthetic oligonucleotide
ttactacccggaagccataggtactctttgccaaactcgactggatttgt

SEQ ID NO: 215243 - DNA, 50 bp, Artificial
  Synthetic oligonucleotide
ttcaagggaaaattctgcacgatcgagcaagggaacgtggccgaatgcga

SEQ ID NO: 215244 - DNA, 50 bp, Artificial
  Synthetic oligonucleotide
cagaccgggagcgcccagaatgcgcggtttcattccgaaacgggcttggg

SEQ ID NO: 215245 - DNA, 50 bp, Artificial
  Synthetic oligonucleotide
cacgggcccgatcatgcctcccagcgtcgtacaaacgacccatgtcgtgt

SEQ ID NO: 215246 - DNA, 50 bp, Artificial
  Synthetic oligonucleotide
attgaaacgctggccgttgcggggcgaatgcacccctgacacccggtaag

SEQ ID NO: 215247 - DNA, 50 bp, Artificial
  Synthetic oligonucleotide
caatcccacgttccgggtgacatgaccgtatcgcctccgtccaacggcac

SEQ ID NO: 215248 - DNA, 50 bp, Artificial
  Synthetic oligonucleotide
caagcgcgggacaactcgcgttatcgggcctaatagctgccttgccatgc

SEQ ID NO: 215249 - DNA, 50 bp, Artificial
  Synthetic oligonucleotide
attggccagaacgtaaatatcgaccggataaaccgtatcgggttccggag

SEQ ID NO: 215250 - DNA, 60 bp, Artificial
  Synthetic oligonucleotide
gcccgatctaaattggctaccctgttgttagccaccctaaatagccatgtatgtgcattg

SEQ ID NO: 215251 - DNA, 55 bp, Artificial
  Synthetic oligonucleotide
ctaatggggaaagcatagtgaggaagcgactgaagtaaggtgctggtttggtgac

SEQ ID NO: 215252 - DNA, 50 bp, Artificial
  Synthetic oligonucleotide
attggcctgagacggtcggggcggcaaccggagattccggtgttatcggg

SEQ ID NO: 215253 - DNA, 50 bp, Artificial
  Synthetic oligonucleotide
attgttcctaccaatgaaccggcccattgccagtgagcgtgcgcggcaag

SEQ ID NO: 215254 - DNA, 50 bp, Artificial
  Synthetic oligonucleotide
ccgttttccctgtccggcgcgtgaaacagccgtatccttattggcagggg

SEQ ID NO: 215255 - DNA, 50 bp, Artificial
  Synthetic oligonucleotide
cctgcacgaaccgtcccggattcgcgactgtctcggcaagatatcggcgt

SEQ ID NO: 215256 - DNA, 50 bp, Artificial
  Synthetic oligonucleotide
cctgtcgtggtagcgtcacctgtgcctgcagtcgtgtatagcgcaccggt

SEQ ID NO: 215257 - DNA, 50 bp, Artificial
  Synthetic oligonucleotide
cctgttcgtgctcaggatccgtgaaccccaaacgccacgccccttcaagg

SEQ ID NO: 215258 - DNA, 50 bp, Artificial
  Synthetic oligonucleotide
ccttccgccccggcatgctttcagagaagcggacacgtttttccgcgcct

SEQ ID NO: 215259 - DNA, 50 bp, Artificial
  Synthetic oligonucleotide
cgacttgccgctcatcctttccgggcatgccacgaatgatccgtgcaacc

SEQ ID NO: 215260 - DNA, 50 bp, Artificial
  Synthetic oligonucleotide
cgcaccataccgctcaggctttccgatttggcacctcccgaggtactgga

SEQ ID NO: 215261 - DNA, 50 bp, Artificial
  Synthetic oligonucleotide
cgcgcataggagtctaagtgcaagagctgcttccctactatgaacgcgaa

SEQ ID NO: 215262 - DNA, 55 bp, Artificial
  Synthetic oligonucleotide
cgtttgaacggccctgcaacagacacggatatgcccttgtcttcctagattacag

SEQ ID NO: 215263 - DNA, 50 bp, Artificial
  Synthetic oligonucleotide
taaggagagcgcgaacttatactttatgcgtcagcaggtgacagagcgat

SEQ ID NO: 215264 - DNA, 50 bp, Artificial
  Synthetic oligonucleotide
cggcctccgtcgcgcccactactcgcttgatccgaaaccagacgagcatt

SEQ ID NO: 215265 - DNA, 50 bp, Artificial
  Synthetic oligonucleotide
cggcgcagggtgacagttttgtggaaatcggcgggaaacgctacgggcat

SEQ ID NO: 215266 - DNA, 50 bp, Artificial
  Synthetic oligonucleotide
cgggagcgtcccgtctggcaagacagctggaacgaaaggggatgaaggct

SEQ ID NO: 215267 - DNA, 50 bp, Artificial
  Synthetic oligonucleotide
gtgtttacgatcgttgccttcgctacgctcaacagtcgcttcggtcatag

SEQ ID NO: 215268 - DNA, 50 bp, Artificial
  Synthetic oligonucleotide
cgtcacctgtgcctgcagtcgtgtatagcgcaccggtggtacccgtaacc

SEQ ID NO: 215269 - DNA, 50 bp, Artificial
  Synthetic oligonucleotide
cgtcagccgtaccctggctcaaacgatggaaccgcatgcagcagcggacg

SEQ ID NO: 215270 - DNA, 50 bp, Artificial
  Synthetic oligonucleotide
cgtcgcgccgacgttcaggggtggccggtttttcgttcgcatatcccaat

SEQ ID NO: 215271 - DNA, 50 bp, Artificial
  Synthetic oligonucleotide
cgtctggcgtagtattttggataagtcgttccgattgacagaggcctcac

SEQ ID NO: 215272 - DNA, 50 bp, Artificial
  Synthetic oligonucleotide
gacacagttcggaagtcatgtcgttcacaaggatctggatttgacgatca

SEQ ID NO: 215273 - DNA, 55 bp, Artificial
  Synthetic oligonucleotide
cgttagtctgattaaggaatcggatccgcggacaaccactgaactgctgtcggag

SEQ ID NO: 215274 - DNA, 50 bp, Artificial
  Synthetic oligonucleotide
ccattttccggcaacatgcggataaccgtcccgttctctcgcgcgacagc

SEQ ID NO: 215275 - DNA, 50 bp, Artificial
  Synthetic oligonucleotide
cccaccatcccgtacttctgggatcgccctcatacagaccggccacatga

SEQ ID NO: 215276 - DNA, 50 bp, Artificial
  Synthetic oligonucleotide
cccatacaggctgcgccgacacacgtcatgacacaatcccacgttccggg

SEQ ID NO: 215277 - DNA, 50 bp, Artificial
  Synthetic oligonucleotide
ccccatgtcggctgcgtccggcccgttcatgtaatccatcagttcccgcg

SEQ ID NO: 215278 - DNA, 50 bp, Artificial
  Synthetic oligonucleotide
cccgggtccatccattggcccggattgtgcggacgtactgcctgcgctga

SEQ ID NO: 215279 - DNA, 50 bp, Artificial
  Synthetic oligonucleotide
ccctcaggccgggaacaaaaacggactattccggcaacccgcctatccgg

SEQ ID NO: 215280 - DNA, 50 bp, Artificial
  Synthetic oligonucleotide
ccgagtgcatacttgttgacgttgccgtcacgcgcggttttgtcgaggga

SEQ ID NO: 215281 - DNA, 50 bp, Artificial
  Synthetic oligonucleotide
ccgatcacgattcgtacaggcgttttgccgaggacacacggttccgcgct

SEQ ID NO: 215282 - DNA, 50 bp, Artificial
  Synthetic oligonucleotide
ccgcacagtcctgcaaagagccgcgtttttaccggttgtccaccccacaa

SEQ ID NO: 215283 - DNA, 50 bp, Artificial
  Synthetic oligonucleotide
ccgctccagagctgaccgtttggcaatcacagaaggcctgctggatggta

SEQ ID NO: 215284 - DNA, 55 bp, Artificial
  Synthetic oligonucleotide
cgtgctgattcactcggtggtatgggcagtcgccttgaatacgcattccggcttc

SEQ ID NO: 215285 - DNA, 50 bp, Artificial
  Synthetic oligonucleotide
ccggagactcatccgcaacgattgccaaacgggtttgcgatgcctggcgc

SEQ ID NO: 215286 - DNA, 50 bp, Artificial
  Synthetic oligonucleotide
ccggagattttgcccacatgggaaaaccggccaatacccgactcgggagc

SEQ ID NO: 215287 - DNA, 50 bp, Artificial
  Synthetic oligonucleotide
ccggcaaggcagtccatatcccggcttgtgctcctgtcagcgccgttcgt

SEQ ID NO: 215288 - DNA, 50 bp, Artificial
  Synthetic oligonucleotide
ccggcaagggctgaaaacgcgaaaagccggaatgtgcgacaattcagcga

SEQ ID NO: 215289 - DNA, 50 bp, Artificial
  Synthetic oligonucleotide
ccggcataagacccgggaaaacttcctcggcacgattgacgcctgtcgct

SEQ ID NO: 215290 - DNA, 50 bp, Artificial
  Synthetic oligonucleotide
ccggggacttgccagggtatcgactgtccggccgacaagccaagcagtgc

SEQ ID NO: 215291 - DNA, 50 bp, Artificial
  Synthetic oligonucleotide
ccggtgcctcctttcacaggtctggactgaagcggcgcccttacagggcg

SEQ ID NO: 215292 - DNA, 50 bp, Artificial
  Synthetic oligonucleotide
ccggttttccgccgtctccccgcataccccattcatctcgcttgtcctgc

SEQ ID NO: 215293 - DNA, 50 bp, Artificial
  Synthetic oligonucleotide
acgagcggtcttacgcgatggggttttggagttttgacccgccccggcca

SEQ ID NO: 215294 - DNA, 50 bp, Artificial
  Synthetic oligonucleotide
acgaaggacatgtgctgagttgcctcggctggggtacgcatgcgctggca

SEQ ID NO: 215295 - DNA, 55 bp, Artificial
  Synthetic oligonucleotide
cgtcggccgtacatagcctggagtgttgaatttcggcatatcagcctactgcatg

SEQ ID NO: 215296 - DNA, 50 bp, Artificial
  Synthetic oligonucleotide
acgaaacaacggcgttatggttctcgaacgctctcggcaccgcgtgcaga

SEQ ID NO: 215297 - DNA, 50 bp, Artificial
  Synthetic oligonucleotide
acctcctcaggcgcactgtaattgcagccgtcctcggtatgggcgcaggg

SEQ ID NO: 215298 - DNA, 50 bp, Artificial
  Synthetic oligonucleotide
accgtgcagctcggtaccagtattccactgggccagggcgctatcctcgc

SEQ ID NO: 215299 - DNA, 50 bp, Artificial
  Synthetic oligonucleotide
accggacacagtttcgccaattcgggggccttgaacgtggttccgtggcc

SEQ ID NO: 215300 - DNA, 50 bp, Artificial
  Synthetic oligonucleotide
accgctggatggttgcggccaatcacgcaccaggccatcgtgtgtatcgg

SEQ ID NO: 215301 - DNA, 50 bp, Artificial
  Synthetic oligonucleotide
accgcgtgagtaactcggagagcccacgcttgaaggcttacgccggggca

SEQ ID NO: 215302 - DNA, 50 bp, Artificial
  Synthetic oligonucleotide
accgcggatggagacgcgaagagcttgcgcgccaaactggatctggtatg

SEQ ID NO: 215303 - DNA, 50 bp, Artificial
  Synthetic oligonucleotide
accgattcgacaaaggtggcgcaaacgctgacgccagtacgctaccgcgt

SEQ ID NO: 215304 - DNA, 50 bp, Artificial
  Synthetic oligonucleotide
accgaccggtcactcgtcacgtcctgtgtgcagagccagcgcagataagc

SEQ ID NO: 215305 - DNA, 50 bp, Artificial
  Synthetic oligonucleotide
accgacacagtgggcacgcgcttcaaatcgggaccgtggggtttcaatct

SEQ ID NO: 215306 - DNA, 54 bp, Artificial
  Synthetic oligonucleotide
agacgcataaatgggtttcaaacgggccagtttggtgtacgctacaatatcttt

SEQ ID NO: 215307 - DNA, 50 bp, Artificial
  Synthetic oligonucleotide
acccttgcgtgcaggttttgccgcaacgatcacgcgaccagtcgtgctgt

SEQ ID NO: 215308 - DNA, 50 bp, Artificial
  Synthetic oligonucleotide
acccggcccaacgcattcaccggctgaactgaacaacgacaccccagtct

SEQ ID NO: 215309 - DNA, 50 bp, Artificial
  Synthetic oligonucleotide
acccgcctggaaatgtggcgtatcggcatgcaattggcgccccaacactt

SEQ ID NO: 215310 - DNA, 50 bp, Artificial
  Synthetic oligonucleotide
acccgcaaaggaccaaagggcgcgctcggagtgccattgacaccgcagag

SEQ ID NO: 215311 - DNA, 50 bp, Artificial
  Synthetic oligonucleotide
accattaccctgtggccggcaaccgacgacacattaacgaactggccgga

SEQ ID NO: 215312 - DNA, 50 bp, Artificial
  Synthetic oligonucleotide
accatggcccgctaaccccatcgcgttacaatgccacgccaaccggttca

SEQ ID NO: 215313 - DNA, 50 bp, Artificial
  Synthetic oligonucleotide
accatcttgcgtctggcacgcgtagtaggtgtggggcatcggctgtccat

SEQ ID NO: 215314 - DNA, 50 bp, Artificial
  Synthetic oligonucleotide
accacgaccggtgtacgtacagcctcgccccgtgtatgtccatccacgcc

SEQ ID NO: 215315 - DNA, 50 bp, Artificial
  Synthetic oligonucleotide
accaatgaaccggcccattgccagtgagcgtgcgcggcaagtacaccttt

SEQ ID NO: 215316 - DNA, 50 bp, Artificial
  Synthetic oligonucleotide
acattgagcgacacctgggtcgagagctccaggccggaggacgtgatgta

SEQ ID NO: 215317 - DNA, 55 bp, Artificial
  Synthetic oligonucleotide
agcaatagaaagagcgtcctgaatatctgagacgttaattccaagtcttgcggcc

SEQ ID NO: 215318 - DNA, 50 bp, Artificial
  Synthetic oligonucleotide
acattccggaccccgccggaaaaatcatgttttgcgcgccagccaacgac

SEQ ID NO: 215319 - DNA, 50 bp, Artificial
  Synthetic oligonucleotide
acataattgcgcggcggcccgataaccgctatcgagcgaccagtctcccg

SEQ ID NO: 215320 - DNA, 50 bp, Artificial
  Synthetic oligonucleotide
acagggctctcccgccgatgcgagcagggtcgtcaagcggagtcggctca

SEQ ID NO: 215321 - DNA, 50 bp, Artificial
  Synthetic oligonucleotide
acagcggttcagagactcgtacgcggacccagcggtactgcctgaggggg

SEQ ID NO: 215322 - DNA, 50 bp, Artificial
  Synthetic oligonucleotide
actcgtacgcggacccagcggtactgcctgagggggcaagatgcagccgg

SEQ ID NO: 215323 - DNA, 50 bp, Artificial
  Synthetic oligonucleotide
actcgattcgcaaaccggcaagctggtgcgttccctcgcactcgctaacc

SEQ ID NO: 215324 - DNA, 50 bp, Artificial
  Synthetic oligonucleotide
actatggataacagcagcgaccatttgacgatgtaatacagtggtttgtt

SEQ ID NO: 215325 - DNA, 50 bp, Artificial
  Synthetic oligonucleotide
actacatgtcgaagggctttcgcgagagaggcttgccgggtggccgcttc

SEQ ID NO: 215326 - DNA, 50 bp, Artificial
  Synthetic oligonucleotide
acgtttggttacggtgcccggccttgtggatctctcggttgagcggcaag

SEQ ID NO: 215327 - DNA, 50 bp, Artificial
  Synthetic oligonucleotide
acgtgactgaattggcctgagacggtcggggcggcaaccggagattccgg

SEQ ID NO: 215328 - DNA, 55 bp, Artificial
  Synthetic oligonucleotide
cgtcgccagactgtcgactttgcccagtaaggccgttaccggaattttgacgatc

SEQ ID NO: 215329 - DNA, 50 bp, Artificial
  Synthetic oligonucleotide
acgtccctgtcttgcgggggtgatttgcctggtgccagaagtgacggtgt

SEQ ID NO: 215330 - DNA, 50 bp, Artificial
  Synthetic oligonucleotide
acgtcaacaaccgtcaagtcgggcgccgcatgagcgggggtggcttcaga

SEQ ID NO: 215331 - DNA, 50 bp, Artificial
  Synthetic oligonucleotide
acgtaggctgggacacgaggggcgcatgagcgaatggccgccttcggaag

SEQ ID NO: 215332 - DNA, 50 bp, Artificial
  Synthetic oligonucleotide
acggtgaacatgcctgcatgcatcgtggttccttttgcggtgtggcagcc

SEQ ID NO: 215333 - DNA, 50 bp, Artificial
  Synthetic oligonucleotide
acggtccgcaacaggaacaaggtccgtgtccatgctgcacgtggcgaaaa

SEQ ID NO: 215334 - DNA, 50 bp, Artificial
  Synthetic oligonucleotide
acggcgttatggttctcgaacgctctcggcaccgcgtgcagactggtacg

SEQ ID NO: 215335 - DNA, 50 bp, Artificial
  Synthetic oligonucleotide
acggattgctagctcaggacaggggaaaaccggggaggacggaaaggcgc

SEQ ID NO: 215336 - DNA, 50 bp, Artificial
  Synthetic oligonucleotide
acggaccacggagtacgtgcggtggcattcgatagtcttcgttggccgct

SEQ ID NO: 215337 - DNA, 50 bp, Artificial
  Synthetic oligonucleotide
acggaaatggcgtcaaccgtcgccagcacagtccgccaggaaacagtcgc

SEQ ID NO: 215338 - DNA, 50 bp, Artificial
  Synthetic oligonucleotide
acgctaacctccgacagaggccgtatgccacggactggactgacaggggg

SEQ ID NO: 215339 - DNA, 55 bp, Artificial
  Synthetic oligonucleotide
gcttcctccacgaatgacgacgttgccttcatgcgttcggatcgtgagtttaatg

SEQ ID NO: 215340 - DNA, 50 bp, Artificial
  Synthetic oligonucleotide
acgcgcgtaaccgttcagcccccagtttgctgcacgtgtcgtttcgccta

SEQ ID NO: 215341 - DNA, 50 bp, Artificial
  Synthetic oligonucleotide
acgccccgtgcgtccagctaaagaagcggcgacagggcaccgttagagtg

SEQ ID NO: 215342 - DNA, 50 bp, Artificial
  Synthetic oligonucleotide
acgccaattggagtagaatccggcccacgacaaggactgcgcaagcagcc

SEQ ID NO: 215343 - DNA, 50 bp, Artificial
  Synthetic oligonucleotide
acgcattgcttcacccagcagtgattgcggtcgcttgactgcgaacggga

SEQ ID NO: 215344 - DNA, 50 bp, Artificial
  Synthetic oligonucleotide
acgcatgtgacggcccgaggaactcaggaaatcacgtgccccaccgaagg

SEQ ID NO: 215345 - DNA, 50 bp, Artificial
  Synthetic oligonucleotide
acgcatggtcgatgggccgaagaacggcaacacaacgtacgggcctgatt

SEQ ID NO: 215346 - DNA, 50 bp, Artificial
  Synthetic oligonucleotide
acgcagggcaaaggacagtggaccgaagcagtaggcagagaggcgcccga

SEQ ID NO: 215347 - DNA, 50 bp, Artificial
  Synthetic oligonucleotide
acgattcccggccggttgggcgttatggtcgactggaccaatgaaacggc

SEQ ID NO: 215348 - DNA, 50 bp, Artificial
  Synthetic oligonucleotide
acgatgaggccgtgcccaccctacggtccgtacaggatcgcaacgttagc

SEQ ID NO: 215349 - DNA, 50 bp, Artificial
  Synthetic oligonucleotide
acgaggggcgcatgagcgaatggccgccttcggaagacgatggaaggtgg

SEQ ID NO: 215350 - DNA, 55 bp, Artificial
  Synthetic oligonucleotide
gctcaagtaaggcttggttcccgcttagttcccattcccacgccaatcccagtag

SEQ ID NO: 215351 - DNA, 50 bp, Artificial
  Synthetic oligonucleotide
aagctcaccacacaaagccaatccgctgcgacgagacaaaggctgccgca

SEQ ID NO: 215352 - DNA, 50 bp, Artificial
  Synthetic oligonucleotide
aagcgcatcctaggcaccccttaccggagcagcgacgcgtgacaaatctc

SEQ ID NO: 215353 - DNA, 50 bp, Artificial
  Synthetic oligonucleotide
aagcctgccgtcgcgtgtgaccgctatgtcgacgccagtcgtggcgaact

SEQ ID NO: 215354 - DNA, 50 bp, Artificial
  Synthetic oligonucleotide
aagcaagaaacatcgcgcgtcacgcagccccacttaaaccgtgccccctt

SEQ ID NO: 215355 - DNA, 50 bp, Artificial
  Synthetic oligonucleotide
aagatgcaacgcgcaggcgtaaaacggcccaggcgcaaagatgagcgaat

SEQ ID NO: 215356 - DNA, 50 bp, Artificial
  Synthetic oligonucleotide
aagagagtcgctccttcgccctttggcctatccatgtcccatagcggcgc

SEQ ID NO: 215357 - DNA, 50 bp, Artificial
  Synthetic oligonucleotide
aactgcgcggcactggtcgtctctgcatccagcaccgtaaacctgggtgt

SEQ ID NO: 215358 - DNA, 50 bp, Artificial
  Synthetic oligonucleotide
aacgggcactgccagcatcgtaagcatcagcccgctcgtgacacccgata

SEQ ID NO: 215359 - DNA, 50 bp, Artificial
  Synthetic oligonucleotide
aacgctctcggcaccgcgtgcagactggtacgctttcatccgaacgcaca

SEQ ID NO: 215360 - DNA, 50 bp, Artificial
  Synthetic oligonucleotide
aacgccatgacagacgatggcactcccgtgcttcatccggggacgccgac

SEQ ID NO: 215361 - DNA, 58 bp, Artificial
  Synthetic oligonucleotide
agaaaattagttgatgtatctcaggatattgtagtaagagaaaaagattgtggtagta

SEQ ID NO: 215362 - DNA, 55 bp, Artificial
  Synthetic oligonucleotide
gctagcgaactgtagcgaaggatccggattgccacctgtactaccaaaatcgtcg

SEQ ID NO: 215363 - DNA, 50 bp, Artificial
  Synthetic oligonucleotide
aacgccagggaacgtccactgcctttgaaatgccgattctcggcccggca

SEQ ID NO: 215364 - DNA, 50 bp, Artificial
  Synthetic oligonucleotide
aacgcactacagcagggcctgtagccggtttgtcgcaatcgtccagagga

SEQ ID NO: 215365 - DNA, 50 bp, Artificial
  Synthetic oligonucleotide
aacgaactcttcacgggcattcgaggccgagactgggggcagacaagtgc

SEQ ID NO: 215366 - DNA, 50 bp, Artificial
  Synthetic oligonucleotide
aaccgttgatccctaccgcggatggagacgcgaagagcttgcgcgccaaa

SEQ ID NO: 215367 - DNA, 50 bp, Artificial
  Synthetic oligonucleotide
aaccccaaacgccacgccccttcaaggtaccgctctatccgctcgtcccc

SEQ ID NO: 215368 - DNA, 50 bp, Artificial
  Synthetic oligonucleotide
aacccagtaactgaaacggcgtgagcccgctttcccctgccatcgccggc

SEQ ID NO: 215369 - DNA, 50 bp, Artificial
  Synthetic oligonucleotide
aaccagtggcccgcgtcggatgggtctttgcggcgtgccgtcaacatgcg

SEQ ID NO: 215370 - DNA, 50 bp, Artificial
  Synthetic oligonucleotide
aaccagcggacgccggcattagtcaggcgcgtacattcaggatgagcgat

SEQ ID NO: 215371 - DNA, 50 bp, Artificial
  Synthetic oligonucleotide
aaatgggaaagttgtgcggaggcgctgcgtattttgcgggagagcaggcc

SEQ ID NO: 215372 - DNA, 50 bp, Artificial
  Synthetic oligonucleotide
aaatgcgccattcgcaggattgccgcagacagccgcgcctcctttcatcc

SEQ ID NO: 215373 - DNA, 55 bp, Artificial
  Synthetic oligonucleotide
gcgtcttcgatacgcggcaaagccgctactcagtccgaacggtagtggattaatt

SEQ ID NO: 215374 - DNA, 50 bp, Artificial
  Synthetic oligonucleotide
aaagggcgcgctcggagtgccattgacaccgcagaggtcgattgccgttg

SEQ ID NO: 215375 - DNA, 50 bp, Artificial
  Synthetic oligonucleotide
aaaccgggggaggctggacatacaccggttcgggcgcgtaggcatacgga

SEQ ID NO: 215376 - DNA, 50 bp, Artificial
  Synthetic oligonucleotide
aaacaggccagaccgttttccctgtccggcgcgtgaaacagccgtatcct

SEQ ID NO: 215377 - DNA, 50 bp, Artificial
  Synthetic oligonucleotide
aaaatcgtaaaccgggcaacagggacgaaacgttcaggccgggcaaccgc

SEQ ID NO: 215378 - DNA, 50 bp, Artificial
  Synthetic oligonucleotide
aaaagccttttccggcgatgcatgggacgcattgctgcagctgggtttga

SEQ ID NO: 215379 - DNA, 50 bp, Artificial
  Synthetic oligonucleotide
aaaacggccgttatggtactcgaacggtgcgatgctttccgccgtccgga

SEQ ID NO: 215380 - DNA, 50 bp, Artificial
  Synthetic oligonucleotide
acagcggcttatccgcatcctccatgaggcgtccttgcagcactgggatg

SEQ ID NO: 215381 - DNA, 50 bp, Artificial
  Synthetic oligonucleotide
acagccagcccggagattttgcccacatgggaaaaccggccaatacccga

SEQ ID NO: 215382 - DNA, 50 bp, Artificial
  Synthetic oligonucleotide
acagcaaagcgtaccggtgcagtcgtcaagggacccgtgccactgccaac

SEQ ID NO: 215383 - DNA, 50 bp, Artificial
  Synthetic oligonucleotide
acacgaaaacgacaggggcggacccgatatttcgcatcggggtggcatgc

SEQ ID NO: 215384 - DNA, 55 bp, Artificial
  Synthetic oligonucleotide
gcgaggcacgaatctctgggttaccaacaacactcttcttcgacagcgaaggtcg

SEQ ID NO: 215385 - DNA, 50 bp, Artificial
  Synthetic oligonucleotide
acaccgtgttttccggaggctcgcagcgtattttcgcaggcggctcagcg

SEQ ID NO: 215386 - DNA, 50 bp, Artificial
  Synthetic oligonucleotide
acaccggtacgggtagagacacggggtggtcagttgtcgattgcgtggga

SEQ ID NO: 215387 - DNA, 50 bp, Artificial
  Synthetic oligonucleotide
acaagtcggagaagcgcctgtggcccgcatcggatggggatcctgtgcag

SEQ ID NO: 215388 - DNA, 50 bp, Artificial
  Synthetic oligonucleotide
acaaggttcctgccaccccacgcaaggaacccgtgatctactgggtcggc

SEQ ID NO: 215389 - DNA, 50 bp, Artificial
  Synthetic oligonucleotide
acaagatgggaaccgtgccagacggagacctgcctcctgcaacctcgcct

SEQ ID NO: 215390 - DNA, 50 bp, Artificial
  Synthetic oligonucleotide
acaaccgggttaagggaaaactgccccggctaggtttgttgagcgcccga

SEQ ID NO: 215391 - DNA, 50 bp, Artificial
  Synthetic oligonucleotide
acaaacaggatccggaggcaatcctgcgctgacgctggctccagcaaacg

SEQ ID NO: 215392 - DNA, 50 bp, Artificial
  Synthetic oligonucleotide
aattggcgcactgtatgcgtaaccagtggcccgcgtcggatgggtctttg

SEQ ID NO: 215393 - DNA, 50 bp, Artificial
  Synthetic oligonucleotide
aatgtcggcgagactatgctgcagatgcaccggttcgcaggtacgcgcat

SEQ ID NO: 215394 - DNA, 50 bp, Artificial
  Synthetic oligonucleotide
aatggtcgccatggacatgcgtcaagagcacggcatcaatggaggcggga

SEQ ID NO: 215395 - DNA, 55 bp, Artificial
  Synthetic oligonucleotide
gcctgaacccatcttcctttgatgcactggaataccgaatggatacgaaaatctt

SEQ ID NO: 215396 - DNA, 50 bp, Artificial
  Synthetic oligonucleotide
aatggggcgttatgctgagaatcggtgccataggccgctcccgggctgct

SEQ ID NO: 215397 - DNA, 50 bp, Artificial
  Synthetic oligonucleotide
aatgacggagacgccggaagcaagaccaccgtaaaagtcaccctggcgga

SEQ ID NO: 215398 - DNA, 50 bp, Artificial
  Synthetic oligonucleotide
aatcaggggccgacatcgactgacccactcgggactttggcaagccttgc

SEQ ID NO: 215399 - DNA, 50 bp, Artificial
  Synthetic oligonucleotide
aatcaccaggcccttggctaccgtcgtcagataggcgcgtggttcctgta

SEQ ID NO: 215400 - DNA, 50 bp, Artificial
  Synthetic oligonucleotide
aatagccccgccgcagctaggcgcttcaaccggttcgcgagaatgttcga

SEQ ID NO: 215401 - DNA, 50 bp, Artificial
  Synthetic oligonucleotide
aagtcaggacagatgcgccggctccaataccgcaagagaccagtgcaccg

SEQ ID NO: 215402 - DNA, 50 bp, Artificial
  Synthetic oligonucleotide
aaggtacgcctgcctgcttccgtatgccagcaagagcgccttcgctcata

SEQ ID NO: 215403 - DNA, 50 bp, Artificial
  Synthetic oligonucleotide
aagggtcatcacagcggtcaggaagcgtgctccggcatttgaaaccggct

SEQ ID NO: 215404 - DNA, 50 bp, Artificial
  Synthetic oligonucleotide
aaggcggtttgggagtgtgccagtgagccactacgggatgcgatggactt

SEQ ID NO: 215405 - DNA, 50 bp, Artificial
  Synthetic oligonucleotide
aaggcgctatccggcgtccaatgagttcgcagcctaccaacgcggggcct

SEQ ID NO: 215406 - DNA, 55 bp, Artificial
  Synthetic oligonucleotide
gccgtatccaataccaatagcgcaccaccctaacatttgtaagagcggggagaga

SEQ ID NO: 215407 - DNA, 50 bp, Artificial
  Synthetic oligonucleotide
aagctgcgaaccgcaatcgccgagagccggcatattgtgtttccgccgaa

SEQ ID NO: 215408 - DNA, 50 bp, Artificial
  Synthetic oligonucleotide
ataccacgtcgcaccaaggtcgaaacgagccgcgcttgcccttccggacc

SEQ ID NO: 215409 - DNA, 50 bp, Artificial
  Synthetic oligonucleotide
ataaggctcatgcgctctcgcattatgccgcacccttggcttcggtccta

SEQ ID NO: 215410 - DNA, 50 bp, Artificial
  Synthetic oligonucleotide
agtttgggtgaagaggtggtcggcatcgcgtcaggcattgctaccggaga

SEQ ID NO: 215411 - DNA, 50 bp, Artificial
  Synthetic oligonucleotide
agttgtgcggaggcgctgcgtattttgcgggagagcaggccaaggccagt

SEQ ID NO: 215412 - DNA, 50 bp, Artificial
  Synthetic oligonucleotide
agtgccgtatcgaccggtcacaactccagggcctttgacaccgacctccg

SEQ ID NO: 215413 - DNA, 50 bp, Artificial
  Synthetic oligonucleotide
agtgcaagcgctgtgttgtgcatggcgagcggtgctatctatgcgcagga

SEQ ID NO: 215414 - DNA, 50 bp, Artificial
  Synthetic oligonucleotide
agtgattgcggtcgcttgactgcgaacgggaatgccagcgagccgactag

SEQ ID NO: 215415 - DNA, 50 bp, Artificial
  Synthetic oligonucleotide
agtgacttgtgttcccgcggccaggcccgagactgagccaccgatggagt

SEQ ID NO: 215416 - DNA, 50 bp, Artificial
  Synthetic oligonucleotide
agtctgtctggtcggccgtggataccgttttctcgcttgacaggcaggcg

SEQ ID NO: 215417 - DNA, 55 bp, Artificial
  Synthetic oligonucleotide
gcatcgtcctatgaatcactcgcccctaacttgccacgcttgatgaaagcctgac

SEQ ID NO: 215418 - DNA, 50 bp, Artificial
  Synthetic oligonucleotide
agtctggggatacggtctcgccggagggatcgtctgcgctctggcaggcg

SEQ ID NO: 215419 - DNA, 50 bp, Artificial
  Synthetic oligonucleotide
agtcgggccaggaactggagccaacaaccggggcgcgcaaacacaagaag

SEQ ID NO: 215420 - DNA, 50 bp, Artificial
  Synthetic oligonucleotide
agtcggagtgccaagacccggtgtgacgctggtatgcccttcgagcgtgt

SEQ ID NO: 215421 - DNA, 50 bp, Artificial
  Synthetic oligonucleotide
agtcatccgggcggagatagaacgcggccaaccactggtaagagaccggc

SEQ ID NO: 215422 - DNA, 50 bp, Artificial
  Synthetic oligonucleotide
agtcaacgcagtgacacgcgcatcaatgtacgatgttccggccgcaagcg

SEQ ID NO: 215423 - DNA, 50 bp, Artificial
  Synthetic oligonucleotide
agtagccggaaggagtctggcgacttgaagccaaaggacggacaaccggg

SEQ ID NO: 215424 - DNA, 50 bp, Artificial
  Synthetic oligonucleotide
aggtggcgcactcagatcgaaactgcgcatgcggtcctggaccagccaat

SEQ ID NO: 215425 - DNA, 50 bp, Artificial
  Synthetic oligonucleotide
aggtgcctcgcactacgaaaccttatcgcgtcctgtacgagggcagccta

SEQ ID NO: 215426 - DNA, 50 bp, Artificial
  Synthetic oligonucleotide
aggtcgggtagtcagccattccggagaagccgtgggcgttacaaggccaa

SEQ ID NO: 215427 - DNA, 50 bp, Artificial
  Synthetic oligonucleotide
aggtcgacatgccatggaaataagcactacgagggcacctgcgggcctcg

SEQ ID NO: 215428 - DNA, 55 bp, Artificial
  Synthetic oligonucleotide
gcatcacggactaacgcgaatatctatgcgtccttgttgtctgacgctgccaagc

SEQ ID NO: 215429 - DNA, 50 bp, Artificial
  Synthetic oligonucleotide
aggtcgaaacgagccgcgcttgcccttccggacccatcgacgttagagag

SEQ ID NO: 215430 - DNA, 50 bp, Artificial
  Synthetic oligonucleotide
aggggtgcgtcagcggcaatttgagcgcactgcgggtagagtgcgataaa

SEQ ID NO: 215431 - DNA, 50 bp, Artificial
  Synthetic oligonucleotide
aggggcgtaatccgtgctctttcggcggagggctacataccggatgcact

SEQ ID NO: 215432 - DNA, 50 bp, Artificial
  Synthetic oligonucleotide
aggggcggtgcgaatccggtggaataaagggccacggcacaggccggtac

SEQ ID NO: 215433 - DNA, 50 bp, Artificial
  Synthetic oligonucleotide
agggcgccaggggactgaagtcgagagagaagttcatgggctgccgggtc

SEQ ID NO: 215434 - DNA, 50 bp, Artificial
  Synthetic oligonucleotide
agggcgatcaggacggtttttcgggttgcgttcatggaggggctagacgg

SEQ ID NO: 215435 - DNA, 50 bp, Artificial
  Synthetic oligonucleotide
agggccgaactgccacgtatttcgcaggggtattggcgtcactctcccgt

SEQ ID NO: 215436 - DNA, 50 bp, Artificial
  Synthetic oligonucleotide
attccggctcagtctgccgcccctttcccccaaaacgcaattcgcccata

SEQ ID NO: 215437 - DNA, 50 bp, Artificial
  Synthetic oligonucleotide
attcagcgcgacccttcccgcctccgtcaaaaccagtcttcgtccctgtg

SEQ ID NO: 215438 - DNA, 50 bp, Artificial
  Synthetic oligonucleotide
atgtgtatcggatgccacgccatcccgggctacaaagcgacctttccgga

SEQ ID NO: 215439 - DNA, 55 bp, Artificial
  Synthetic oligonucleotide
gcaggatcttcgctcaacatcaggtaaaaccgcatacagtggcattggtcgacca

SEQ ID NO: 215440 - DNA, 50 bp, Artificial
  Synthetic oligonucleotide
atgtcgccctacccgtcactggatcacgcgccacacccgatctaccagcc

SEQ ID NO: 215441 - DNA, 50 bp, Artificial
  Synthetic oligonucleotide
atgggcgccattgttcctaccaatgaaccggcccattgccagtgagcgtg

SEQ ID NO: 215442 - DNA, 50 bp, Artificial
  Synthetic oligonucleotide
atgcgctcgctaccgcgcaaattccaccccacactcagactgcgtttggc

SEQ ID NO: 215443 - DNA, 50 bp, Artificial
  Synthetic oligonucleotide
atgccggcaatacccccactcctgcgctctcacaagatgggaaccgtgcc

SEQ ID NO: 215444 - DNA, 50 bp, Artificial
  Synthetic oligonucleotide
atgccaaagcccggtatctgctaggggacgcctatgaaacagggcacggc

SEQ ID NO: 215445 - DNA, 50 bp, Artificial
  Synthetic oligonucleotide
atgcacgacacggaatgagtggtggccgcagggacgcactagtgcaaagg

SEQ ID NO: 215446 - DNA, 50 bp, Artificial
  Synthetic oligonucleotide
atgaaccaagcttggggacgctacttggaacataccgggccgcgacagga

SEQ ID NO: 215447 - DNA, 50 bp, Artificial
  Synthetic oligonucleotide
atcgtgacacgggcgcgaacggagagacgttcctttgcttcccgggcttt

SEQ ID NO: 215448 - DNA, 50 bp, Artificial
  Synthetic oligonucleotide
atccttcccggtcacgagtaccagcaagccgaaaaacaccgggcaccaga

SEQ ID NO: 215449 - DNA, 50 bp, Artificial
  Synthetic oligonucleotide
atcctgtggaaaacccggtgcataaatccggagcggcccagcattcacgc

SEQ ID NO: 215450 - DNA, 55 bp, Artificial
  Synthetic oligonucleotide
gcaatccggacgggaacaattcagcaaacagccgtcattcgacaatagtctgagg

SEQ ID NO: 215451 - DNA, 50 bp, Artificial
  Synthetic oligonucleotide
atccgtgggtacccgcctggaaatgtggcgtatcggcatgcaattggcgc

SEQ ID NO: 215452 - DNA, 50 bp, Artificial
  Synthetic oligonucleotide
atccgccaaccggggcagagcagccaactacgaccgccagaactcgtaac

SEQ ID NO: 215453 - DNA, 50 bp, Artificial
  Synthetic oligonucleotide
atcccgatgttaatgaccggtggcaggcccgggtatccctcacgcgcctg

SEQ ID NO: 215454 - DNA, 50 bp, Artificial
  Synthetic oligonucleotide
atcatggtggcctgtcacgcctgcatccgaccggacctctcttgcgtata

SEQ ID NO: 215455 - DNA, 50 bp, Artificial
  Synthetic oligonucleotide
atcagtccgtggatcctggcttatggcatgcgacacggctggcgtcctat

SEQ ID NO: 215456 - DNA, 50 bp, Artificial
  Synthetic oligonucleotide
atcagctgtcggcactagaggggaagcaagcgacgctggtaaccatgggc

SEQ ID NO: 215457 - DNA, 50 bp, Artificial
  Synthetic oligonucleotide
atcagcccagcatttctcggatcacgccgcatcgggacagagcgcaactt

SEQ ID NO: 215458 - DNA, 50 bp, Artificial
  Synthetic oligonucleotide
atcactttaggcacgccgcatcacgggacggcactggcacgcggaggtat

SEQ ID NO: 215459 - DNA, 50 bp, Artificial
  Synthetic oligonucleotide
atcaccccgcgcatcgcatcgctctcatttaaacgggctcacgccaccgt

SEQ ID NO: 215460 - DNA, 50 bp, Artificial
  Synthetic oligonucleotide
atcaaccccacagcgccggagttaccgatacaccgtttccccgggccgtt

SEQ ID NO: 215461 - DNA, 55 bp, Artificial
  Synthetic oligonucleotide
gatgggacgggagtcggctgggtatttgaatatgcactggtcgaccgtagcgggc

SEQ ID NO: 215462 - DNA, 50 bp, Artificial
  Synthetic oligonucleotide
atatggggcgcgtggctctcaggtggtttaatgtgccgcaacgtgggcat

SEQ ID NO: 215463 - DNA, 50 bp, Artificial
  Synthetic oligonucleotide
atatcgaggatagggcgtacgtgcaaggtaccgacgctggcgtgtgcgta

SEQ ID NO: 215464 - DNA, 50 bp, Artificial
  Synthetic oligonucleotide
agcgcttagggtcccggtagggaaatacacggggtttacgccattgggcg

SEQ ID NO: 215465 - DNA, 50 bp, Artificial
  Synthetic oligonucleotide
agcgcgttgtcgccactccgacggcttttgtgcgtcgatatacaggcggg

SEQ ID NO: 215466 - DNA, 50 bp, Artificial
  Synthetic oligonucleotide
agcgcgccccgtaggcgctttcacacgaccgctgacaatccagtcgaggt

SEQ ID NO: 215467 - DNA, 50 bp, Artificial
  Synthetic oligonucleotide
agcgaactgttattccacgatttgtggctgcgcccagcattggcgccacg

SEQ ID NO: 215468 - DNA, 50 bp, Artificial
  Synthetic oligonucleotide
agcccgtgttgggcggaacggggagaagggtctccgtattgagcatggcc

SEQ ID NO: 215469 - DNA, 50 bp, Artificial
  Synthetic oligonucleotide
agccccgtatcctggcacagcaacaccccgtcgcccgtttcctatggcgt

SEQ ID NO: 215470 - DNA, 50 bp, Artificial
  Synthetic oligonucleotide
agccatatcaaggcagtggctattccgcgttatgcctgcgacgcttgccg

SEQ ID NO: 215471 - DNA, 50 bp, Artificial
  Synthetic oligonucleotide
agccagttgcgagaatgtcatggatgctcttccgaatggcgtggcgccac

SEQ ID NO: 215472 - DNA, 60 bp, Artificial
  Synthetic oligonucleotide
cggcacccgtcgaaatcgcgtagccggtcatagtgatgtagagcgttacccctgtcagca

SEQ ID NO: 215473 - DNA, 55 bp, Artificial
  Synthetic oligonucleotide
gatggacgcccgtccgtacagatagctcaacctggctgagtccagtcgcgaccat

SEQ ID NO: 215474 - DNA, 50 bp, Artificial
  Synthetic oligonucleotide
agcatttctcggatcacgccgcatcgggacagagcgcaactttgcctgct

SEQ ID NO: 215475 - DNA, 50 bp, Artificial
  Synthetic oligonucleotide
agcatctaccctgtcagtgccgggtcgggccatcaggcgtatgcaatgac

SEQ ID NO: 215476 - DNA, 50 bp, Artificial
  Synthetic oligonucleotide
agcagtacgtcggactggccaaccgcttgcctgtcgtcgcgtaatcccgg

SEQ ID NO: 215477 - DNA, 50 bp, Artificial
  Synthetic oligonucleotide
agcaatatctattgtaattccttgatctttttctgattctaagccatctg

SEQ ID NO: 215478 - DNA, 50 bp, Artificial
  Synthetic oligonucleotide
agatcgttgcgtggcgcactgggtcgtcgaattgccgcgggcgggacttc

SEQ ID NO: 215479 - DNA, 50 bp, Artificial
  Synthetic oligonucleotide
agaccgggttccagcctccgttcaattgcgaatggcgaacgtgtccggga

SEQ ID NO: 215480 - DNA, 50 bp, Artificial
  Synthetic oligonucleotide
acttgttaaaatgcgccattcgcaggattgccgcagacagccgcgcctcc

SEQ ID NO: 215481 - DNA, 50 bp, Artificial
  Synthetic oligonucleotide
acttgtcgggtgaacgggcagcctcgagcctcgcttgtgccacttccggc

SEQ ID NO: 215482 - DNA, 50 bp, Artificial
  Synthetic oligonucleotide
acttctcagcaccgtgttgtccctgcggtcctggctcaatccccagcaca

SEQ ID NO: 215483 - DNA, 50 bp, Artificial
  Synthetic oligonucleotide
acttcaggcaaccgtcgaaaaatggcatcctcccgtctacacggcccgga

SEQ ID NO: 215484 - DNA, 54 bp, Artificial
  Synthetic oligonucleotide
gatacttttaccaaccggcccgacactttggtcagggtcgaatcgaagttgctc

SEQ ID NO: 215485 - DNA, 50 bp, Artificial
  Synthetic oligonucleotide
actgtccatcttccgttcgcatgtccctgctgcgcgtaccgtgcaacagc

SEQ ID NO: 215486 - DNA, 50 bp, Artificial
  Synthetic oligonucleotide
actggtggctgcgtcaatgggaccgattcgacaaaggtggcgcaaacgct

SEQ ID NO: 215487 - DNA, 50 bp, Artificial
  Synthetic oligonucleotide
actggagccaacaaccggggcgcgcaaacacaagaagtcactggcgggag

SEQ ID NO: 215488 - DNA, 50 bp, Artificial
  Synthetic oligonucleotide
actgcgcgtagtgcttaggacgcgtcggtatcgctatccggggtgctgga

SEQ ID NO: 215489 - DNA, 50 bp, Artificial
  Synthetic oligonucleotide
actgcgcgcgtggccatttgtacgcttacacgtgtcacttcacgggaggc

SEQ ID NO: 215490 - DNA, 50 bp, Artificial
  Synthetic oligonucleotide
actgcccccttggcctggtgatacgcatcacgcctggtctgctgccgatc

SEQ ID NO: 215491 - DNA, 50 bp, Artificial
  Synthetic oligonucleotide
actgaagacgggcaggctatcttgcgcatccaggattcggggccaggcat

SEQ ID NO: 215492 - DNA, 50 bp, Artificial
  Synthetic oligonucleotide
actctcaaggtagccgccccgtgcgccgtcaaacacgcaatcggtactga

SEQ ID NO: 215493 - DNA, 50 bp, Artificial
  Synthetic oligonucleotide
agggccatagcgccaacccggaccgtagtaagggccgtaccagtatgggt

SEQ ID NO: 215494 - DNA, 50 bp, Artificial
  Synthetic oligonucleotide
aggctggctcgatagtgcgccacaaagtaacgcgccgacgtgtccgtccc

SEQ ID NO: 215495 - DNA, 55 bp, Artificial
  Synthetic oligonucleotide
gacgattgacagaatcggcaaggtaagttcccgcgacattatggggaatggagac

SEQ ID NO: 215496 - DNA, 50 bp, Artificial
  Synthetic oligonucleotide
aggctaccgatgctggtgcgactttccgcgacggattgggccgatcatgg

SEQ ID NO: 215497 - DNA, 50 bp, Artificial
  Synthetic oligonucleotide
aggcgtgcccccataaggcggtctgctcacatgagtggttgcggactaaa

SEQ ID NO: 215498 - DNA, 50 bp, Artificial
  Synthetic oligonucleotide
aggcgtgcatacgcatgctggtggcgagattacgttgtcatcgggagcgg

SEQ ID NO: 215499 - DNA, 50 bp, Artificial
  Synthetic oligonucleotide
aggcgctcgcggcaatccggtgggttttggtgcaaagcacatatccgaat

SEQ ID NO: 215500 - DNA, 50 bp, Artificial
  Synthetic oligonucleotide
aggcgctaatggagggccgaactgccacgtatttcgcaggggtattggcg

SEQ ID NO: 215501 - DNA, 50 bp, Artificial
  Synthetic oligonucleotide
aggcgaccgaagaaaggccagtcggaagcagtggcggacagcggcactat

SEQ ID NO: 215502 - DNA, 50 bp, Artificial
  Synthetic oligonucleotide
aggccaagccagcgtatgcatatgcgcaagccagtttgtcccccgccgtc

SEQ ID NO: 215503 - DNA, 50 bp, Artificial
  Synthetic oligonucleotide
aggcagctgcgatgaatgcctggcccagaggggcgtgggttaaaaggaga

SEQ ID NO: 215504 - DNA, 50 bp, Artificial
  Synthetic oligonucleotide
aggcagatacctgattcgaccggggcggcgggattagccttagccaggtt

SEQ ID NO: 215505 - DNA, 50 bp, Artificial
  Synthetic oligonucleotide
aggcactgcttgcgaacaaagcagaaggcccgctagtggcgatcgtttcg

SEQ ID NO: 215506 - DNA, 55 bp, Artificial
  Synthetic oligonucleotide
gaccctctttcggtcgcgtccaataaagtcgctgcaccaaaactgcaccgaaccc

SEQ ID NO: 215507 - DNA, 50 bp, Artificial
  Synthetic oligonucleotide
aggcaactggtcgccgcaaatcgtcaacctgggagaactcggagcgccgc

SEQ ID NO: 215508 - DNA, 50 bp, Artificial
  Synthetic oligonucleotide
aggatggttgctgatctgcccgggtgcaacgcaggatgccgtatcgacac

SEQ ID NO: 215509 - DNA, 50 bp, Artificial
  Synthetic oligonucleotide
aggataactcgccacccgtcgaggccaggcggcgcttaaagtctgccttg

SEQ ID NO: 215510 - DNA, 50 bp, Artificial
  Synthetic oligonucleotide
aggagagtttgtgtccggcccgtgtggcttcgcaacggctgagatcgtaa

SEQ ID NO: 215511 - DNA, 50 bp, Artificial
  Synthetic oligonucleotide
agctcgcgacaaacctatgacaacagtcgcggccagttaggcaccctcga

SEQ ID NO: 215512 - DNA, 50 bp, Artificial
  Synthetic oligonucleotide
agctccaggccggaggacgtgatgtaggtcgccccgacaaagggggaata

SEQ ID NO: 215513 - DNA, 50 bp, Artificial
  Synthetic oligonucleotide
agctacgcggtaggtttcctggcacgaccgttgggcggcgcaattttcgg

SEQ ID NO: 215514 - DNA, 50 bp, Artificial
  Synthetic oligonucleotide
agcgtttccggataagcgctgcgggtagcgtgctgcttgtcttcgcccag

SEQ ID NO: 215515 - DNA, 50 bp, Artificial
  Synthetic oligonucleotide
agcgttccaaggcaggtgtttgacctcgcccttcaacacaggcggctctg

SEQ ID NO: 215516 - DNA, 50 bp, Artificial
  Synthetic oligonucleotide
agcgtcggacaacgtacccaagaagccacgacagcgccctagcccgggcg

SEQ ID NO: 215517 - DNA, 55 bp, Artificial
  Synthetic oligonucleotide
gaatggcgaaaagcagtggaaagttgatccacgtctaatcaaggacttaggtgat

SEQ ID NO: 215518 - DNA, 50 bp, Artificial
  Synthetic oligonucleotide
agcgtcccgttatcgtccgccagaacgtcatcggacaaggcatgtctgcc

SEQ ID NO: 215519 - DNA, 50 bp, Artificial
  Synthetic oligonucleotide
agcgggtggcaggatcgctgggcgtatgggcgatgtcaacacaataggcc

SEQ ID NO: 215520 - DNA, 50 bp, Artificial
  Synthetic oligonucleotide
agcgggtcgcctgtgccttgcacgaaggagtcgccgacaaagcagatacg

SEQ ID NO: 215521 - DNA, 50 bp, Artificial
  Synthetic oligonucleotide
agcgctttcggccatgcctacgcactggactaccaatcaattggcgctgc

SEQ ID NO: 215522 - DNA, 55 bp, Artificial
  Synthetic oligonucleotide
gaagcgatcgaacatgtgatgcatggtctgtcggtcaagtcgaataccagaggca

SEQ ID NO: 215523 - DNA, 55 bp, Artificial
  Synthetic oligonucleotide
gaacgtggggccaatttgccgtcggtagagacgttgctgcctgaatcgaggtcag

SEQ ID NO: 215524 - DNA, 55 bp, Artificial
  Synthetic oligonucleotide
ccgcacgttcagcatgaaaacaccatgcggaaaatcctgcacacgcaggacaggc

SEQ ID NO: 215525 - DNA, 55 bp, Artificial
  Synthetic oligonucleotide
ccgacgcgggtttagggagcgtcagcaaaagcgggctcattggcggcaaatcggt

SEQ ID NO: 215526 - DNA, 54 bp, Artificial
  Synthetic oligonucleotide
ccctttgcactacgctaccctgcccgtcgaaaccgtcttttgatatcggtgaac

SEQ ID NO: 215527 - DNA, 53 bp, Artificial
  Synthetic oligonucleotide
gaaggtttttcaataagaattacaggacaagatgtaagtagaggtactttttc

SEQ ID NO: 215528 - DNA, 55 bp, Artificial
  Synthetic oligonucleotide
cccgaagccctcaccggatgtaatgaccgaaacgtcaggcttatgccttggcaat

SEQ ID NO: 215529 - DNA, 54 bp, Artificial
  Synthetic oligonucleotide
ccatacggagcaagacgataggccggtcgccggaaataccctgtccccacaaac

SEQ ID NO: 215530 - DNA, 55 bp, Artificial
  Synthetic oligonucleotide
ataactgttgtatgcgtgtatgcaaaccacggaagggtttgccgtgtgacggcag

SEQ ID NO: 215531 - DNA, 55 bp, Artificial
  Synthetic oligonucleotide
ccataacgggttgctggcgtctagttcaccaccagtctgattggctaatgtggat

SEQ ID NO: 215532 - DNA, 55 bp, Artificial
  Synthetic oligonucleotide
ccaggcaagcggttcgacagatcgaacaaaacaggtatcaatcagccccgatgtc

SEQ ID NO: 215533 - DNA, 55 bp, Artificial
  Synthetic oligonucleotide
ccagcgatcacgcttgccgttcgggtttagctgttcattcgccatttctcctgcg

SEQ ID NO: 215534 - DNA, 55 bp, Artificial
  Synthetic oligonucleotide
ccaccggtaagttgctcccgccgcgttatccatccgttaaccagcagtttgtcgc

SEQ ID NO: 215535 - DNA, 55 bp, Artificial
  Synthetic oligonucleotide
ccaacgcgctgttcctcatgtcgtcctatttcgggttgacggcatatgcccgttt

SEQ ID NO: 215536 - DNA, 55 bp, Artificial
  Synthetic oligonucleotide
cagtgctccttgctacgcgaatgaacacaaagacttggctagccatccgaaataa

SEQ ID NO: 215537 - DNA, 55 bp, Artificial
  Synthetic oligonucleotide
cagctgtccagcacctatgcgttaccgacccgggtctcgacgatgctctatccgg

SEQ ID NO: 215538 - DNA, 60 bp, Artificial
  Synthetic oligonucleotide
atgaaaacaccatgcggaaaatcctgcacacgcaggacaggctagaaggcaatcgggcct

SEQ ID NO: 215539 - DNA, 55 bp, Artificial
  Synthetic oligonucleotide
cagctcgcttgaattgacttactttgctcctgcgcgggaatactacattctcccg

SEQ ID NO: 215540 - DNA, 55 bp, Artificial
  Synthetic oligonucleotide
cagcgggcaggatacgttccggtttgacgatagatgccaggtcattcaatctgtt

SEQ ID NO: 215541 - DNA, 52 bp, Artificial
  Synthetic oligonucleotide
caattgcactcgaaattcgggtaactgttcggtaactacccgtcaacttacc

SEQ ID NO: 215542 - DNA, 55 bp, Artificial
  Synthetic oligonucleotide
caactgttgtcgtgatggtcgtgtacgtatcaccattgcgccaccaatagccctc

SEQ ID NO: 215543 - DNA, 55 bp, Artificial
  Synthetic oligonucleotide
atgctggacaaggcctgtaattttacgcaccattataatccgcgttaaagacccc

SEQ ID NO: 215544 - DNA, 55 bp, Artificial
  Synthetic oligonucleotide
attatgcggcttcgtatttcttcctgcggacactctgcaccagaataacggccta

SEQ ID NO: 215545 - DNA, 55 bp, Artificial
  Synthetic oligonucleotide
attcgggtacccgacaaattgcatgacccaatcaatgtacacgtgccattttgcg

SEQ ID NO: 215546 - DNA, 55 bp, Artificial
  Synthetic oligonucleotide
cgtccagtaggtgctaatcggaaggcgagccaatattctgtggttattcgttggg

SEQ ID NO: 215547 - DNA, 55 bp, Artificial
  Synthetic oligonucleotide
agccagcgattctggaacatcgtggcaacgtattaccccgactataaacacgcgc

SEQ ID NO: 215548 - DNA, 55 bp, Artificial
  Synthetic oligonucleotide
cgtagtctgtccctgatacaaacgagctgccgtccattgaagctggccgtcatag

SEQ ID NO: 215549 - DNA, 56 bp, Artificial
  Synthetic oligonucleotide
gctaattggaaccactcttaaccattccgaacaagatagtgaaacgattatacgcc

SEQ ID NO: 215550 - DNA, 55 bp, Artificial
  Synthetic oligonucleotide
cggtgagtagcccgtccttgatctagcgaaagctgttggctggcttaccgagtgt

SEQ ID NO: 215551 - DNA, 55 bp, Artificial
  Synthetic oligonucleotide
cggcgatacaccatatcgcaaagccctaactgcattacattcgtcacctaactta

SEQ ID NO: 215552 - DNA, 55 bp, Artificial
  Synthetic oligonucleotide
cgctcagcggatctagaggagtcccagacccaaaataccgcttctctgtcgcaga

SEQ ID NO: 215553 - DNA, 55 bp, Artificial
  Synthetic oligonucleotide
cgcggaaaggttatcagccgtgccaaggtcagtgaacgcacgaaccgtggtgccg

SEQ ID NO: 215554 - DNA, 55 bp, Artificial
  Synthetic oligonucleotide
agcggtagctgaagcgaaatccatcataccggcatcaatcagttcgaaagtcgaa

SEQ ID NO: 215555 - DNA, 55 bp, Artificial
  Synthetic oligonucleotide
cgattgtcacaagtcagtcagcgtccggtaattggcccgtcatcttcccgtctta

SEQ ID NO: 215556 - DNA, 55 bp, Artificial
  Synthetic oligonucleotide
cgacttgcaacagatatttcttccggactgacctgtcaaaacgcaaaacatatgc

SEQ ID NO: 215557 - DNA, 55 bp, Artificial
  Synthetic oligonucleotide
cgaccatttgcagcgtactagagcgagccaatgaagcgcatcctgttgacgtggg

SEQ ID NO: 215558 - DNA, 55 bp, Artificial
  Synthetic oligonucleotide
cgacacgccctgatatccgccaacacgaggctattcttagatcagagaacgcaag

SEQ ID NO: 215559 - DNA, 55 bp, Artificial
  Synthetic oligonucleotide
cgacaaaacatctaccctcgcgcatcagaagtatgattgccggccgcagtcaagg

SEQ ID NO: 215560 - DNA, 60 bp, Artificial
  Synthetic oligonucleotide
cgtagccggtcatagtgatgtagagcgttacccctgtcagcacgaccatttgcagtgcga

SEQ ID NO: 215561 - DNA, 55 bp, Artificial
  Synthetic oligonucleotide
cctgacctataacgtcgcaaggtggctggcatgaatcacgcgctgtggtggcaat

SEQ ID NO: 215562 - DNA, 55 bp, Artificial
  Synthetic oligonucleotide
ccgtcacaaacgtcgccgaggtatagatataccgctgttccgtgaaagacacgaa

SEQ ID NO: 215563 - DNA, 53 bp, Artificial
  Synthetic oligonucleotide
ccggtatttacgcgccaagaacctttcttttgagcccaacatgaaactcttcc

SEQ ID NO: 215564 - DNA, 55 bp, Artificial
  Synthetic oligonucleotide
ccggctttggtagcgaaattcctggtttcgatctggtgtgatccacactgcgggc

SEQ ID NO: 215565 - DNA, 55 bp, Artificial
  Synthetic oligonucleotide
ccggccttagtggacataacttgcgatgaggtcgttataatgcatctgaacccgg

SEQ ID NO: 215566 - DNA, 55 bp, Artificial
  Synthetic oligonucleotide
ccgcttcaaggctgtatgtcgtaaacagctgaaaactcgacagttcgagaaccca

SEQ ID NO: 215567 - DNA, 55 bp, Artificial
  Synthetic oligonucleotide
ccgccatgatttcccctctggcgaccccttgattgccagcttgataaagacttgg

SEQ ID NO: 215568 - DNA, 55 bp, Artificial
  Synthetic oligonucleotide
gggcatcagcacataagcgtgaatggcgaccttgaattgcttcgcggcctctttc

SEQ ID NO: 215569 - DNA, 55 bp, Artificial
  Synthetic oligonucleotide
gggtatcaagtgatcggagatggagtgcaacgggatattacgtcatcggccggac

SEQ ID NO: 215570 - DNA, 55 bp, Artificial
  Synthetic oligonucleotide
ggtggcggagacactgaagacttacggcgcgtatgtagtggatcgcaatttcggc

SEQ ID NO: 215571 - DNA, 57 bp, Artificial
  Synthetic oligonucleotide
tttaggtgatgtattagaacctataaatggtataggagctataggttcaggaggtat

SEQ ID NO: 215572 - DNA, 55 bp, Artificial
  Synthetic oligonucleotide
tatgctgtgcaagactccacgcaagcattgatcgctgccgcgaagcccgagagct

SEQ ID NO: 215573 - DNA, 55 bp, Artificial
  Synthetic oligonucleotide
ggtgggccgcgtacctttgagcagtggcaagcctacctgaatggtttgaactatc

SEQ ID NO: 215574 - DNA, 55 bp, Artificial
  Synthetic oligonucleotide
acatcttgataaatcacgggatattcgcgtcaggcgtataatgcacgctgtcctg

SEQ ID NO: 215575 - DNA, 55 bp, Artificial
  Synthetic oligonucleotide
ggttgcagctgcaaacgagtcgttggataaatactgcggcatgaatcttcgaaag

SEQ ID NO: 215576 - DNA, 55 bp, Artificial
  Synthetic oligonucleotide
acataaaatcgccacatcaacttcgttgagaagttgtcgacgcacgtgttctttt

SEQ ID NO: 215577 - DNA, 55 bp, Artificial
  Synthetic oligonucleotide
ggtttccagtcccgttggcccgatatatgtaggcatcaattcgggaagcaccggc

SEQ ID NO: 215578 - DNA, 55 bp, Artificial
  Synthetic oligonucleotide
tatacattgcgaggagattaccatgctcaacattctcatacccgtagatggttcg

SEQ ID NO: 215579 - DNA, 55 bp, Artificial
  Synthetic oligonucleotide
ggtttgctccaggcaaggaatggtatccggtacgcatacgctttgccgagccctc

SEQ ID NO: 215580 - DNA, 55 bp, Artificial
  Synthetic oligonucleotide
ttgccatgactacacgccgccgttttatatacgcagctctagcagttgcggtact

SEQ ID NO: 215581 - DNA, 55 bp, Artificial
  Synthetic oligonucleotide
ttggctaccctgttgttagccaccctaaatagccatgtatgtgcattgacgatgc

SEQ ID NO: 215582 - DNA, 57 bp, Artificial
  Synthetic oligonucleotide
taccacgcaaagccactaagggacccatgtcaaggggcaaaccgcagccaatggaac

SEQ ID NO: 215583 - DNA, 60 bp, Artificial
  Synthetic oligonucleotide
tctggctaataaggcgttcaaacagtttatacgcaagctgaatgggcatgtgtatgggcg

SEQ ID NO: 215584 - DNA, 55 bp, Artificial
  Synthetic oligonucleotide
gattgaccttcttcgtttcagacccctttacagccacctcttgtgacagccgact

SEQ ID NO: 215585 - DNA, 55 bp, Artificial
  Synthetic oligonucleotide
ctgcgagcgcagagaaacacgaaaacctcaaccgaaaaggaatcgcgcaaggatc

SEQ ID NO: 215586 - DNA, 55 bp, Artificial
  Synthetic oligonucleotide
ctgctgtatgtacctgtcttaatatcctctttcacgaaaccaccatccagagggt

SEQ ID NO: 215587 - DNA, 55 bp, Artificial
  Synthetic oligonucleotide
ctggccaacgcatctccggaagttgtctttctgcaattgcacacgtgaaaggtca

SEQ ID NO: 215588 - DNA, 55 bp, Artificial
  Synthetic oligonucleotide
agacgcacctatctacgttcgcaaggcccgttctaccacagagcaactcatcaac

SEQ ID NO: 215589 - DNA, 55 bp, Artificial
  Synthetic oligonucleotide
ctgtcagtcttgtgtaagcaggcttccgggctatgaggcggcaatgccttacgtt

SEQ ID NO: 215590 - DNA, 55 bp, Artificial
  Synthetic oligonucleotide
acttccagcgatcctctgctgtcataaacctgtttcgtcgaatggcgaacgaccg

SEQ ID NO: 215591 - DNA, 55 bp, Artificial
  Synthetic oligonucleotide
ctgttgtcatacgttcaagccaaaggcgtaatcgcttcctaggttgaaagaatcc

SEQ ID NO: 215592 - DNA, 55 bp, Artificial
  Synthetic oligonucleotide
actgcggccggcacaccatacacagggccgatcaaagtaacgggtcttaccgtga

SEQ ID NO: 215593 - DNA, 55 bp, Artificial
  Synthetic oligonucleotide
cttagttgcaagcctgacgtccgtatcatttactttcttccgagcagttataccc

SEQ ID NO: 215594 - DNA, 59 bp, Artificial
  Synthetic oligonucleotide
cctgaatggattaaggggctttctgagggcgattctgacgatctgagtggtaagtatag

SEQ ID NO: 215595 - DNA, 55 bp, Artificial
  Synthetic oligonucleotide
acgtgattgaagcagccaaccgatacaatgtggatgtggactatatactccagcg

SEQ ID NO: 215596 - DNA, 55 bp, Artificial
  Synthetic oligonucleotide
acgtccgaatccttggaaggatgcatacaggagggttcgttgttcttttctggct

SEQ ID NO: 215597 - DNA, 55 bp, Artificial
  Synthetic oligonucleotide
cttgatgccgaagacaaagacgacatgttgaatgatgtctgtgatttgattgatg

SEQ ID NO: 215598 - DNA, 55 bp, Artificial
  Synthetic oligonucleotide
cttgggcagaaagctaaatacgtacgagtaatcgaacggtgcacccatggacccc

SEQ ID NO: 215599 - DNA, 55 bp, Artificial
  Synthetic oligonucleotide
acgtacgcctgttggcaattccaagattacttcacggctaccatctttcttaacg

SEQ ID NO: 215600 - DNA, 55 bp, Artificial
  Synthetic oligonucleotide
cttttgatgacgagaccgaagcgatccttcgggaaggcacaggaaataagcctgc

SEQ ID NO: 215601 - DNA, 55 bp, Artificial
  Synthetic oligonucleotide
gaacggaaatatggtcgaagcgatttcgacaaagaaacaggcgaattaaaatgac

SEQ ID NO: 215602 - DNA, 55 bp, Artificial
  Synthetic oligonucleotide
gaagcctagtccgtaatgtttctcccgcatatccacctaccccttcggattgagt

SEQ ID NO: 215603 - DNA, 55 bp, Artificial
  Synthetic oligonucleotide
gaagctcgtagatgacacatgttgtattcggaaatctgctgtatgtacctgtctt

SEQ ID NO: 215604 - DNA, 60 bp, Artificial
  Synthetic oligonucleotide
cagtcgcaagcagaggagatcgcgacgcatgttacggtgcattgggataaggtagattat

SEQ ID NO: 215605 - DNA, 55 bp, Artificial
  Synthetic oligonucleotide
gaagtgttttctacggaattaatggttcggcgcaccagctgatatcgtaatgcgc

SEQ ID NO: 215606 - DNA, 55 bp, Artificial
  Synthetic oligonucleotide
gaagttgcacttatcctaacttaatgtgcaaactctcctgtaacacctttacgtg

SEQ ID NO: 215607 - DNA, 55 bp, Artificial
  Synthetic oligonucleotide
gaatagccaatcggtttgttaccattataaaataacagcgtcgcagacaggaaaa

SEQ ID NO: 215608 - DNA, 54 bp, Artificial
  Synthetic oligonucleotide
acgacttggtactaacccgggaagcttggccatagaatgataatagttcaaacc

SEQ ID NO: 215609 - DNA, 55 bp, Artificial
  Synthetic oligonucleotide
cgaggtaatcgtacagtagaagcagatatgctgaacatcatcgcccaaacgctag

SEQ ID NO: 215610 - DNA, 55 bp, Artificial
  Synthetic oligonucleotide
cgagcaggcacgctccgagttttcatgggacgaaatcgagagacattttacttgg

SEQ ID NO: 215611 - DNA, 55 bp, Artificial
  Synthetic oligonucleotide
cgagactacagtagacgatcttacctcttggctaaacatcactgctacatctcag

SEQ ID NO: 215612 - DNA, 55 bp, Artificial
  Synthetic oligonucleotide
cgacgtgagcagtgtacccagcattgctccttgtaatggaatcccggcatctgcc

SEQ ID NO: 215613 - DNA, 55 bp, Artificial
  Synthetic oligonucleotide
cgacaggcggcataggtacggttcctggcgttatggctggtgtattgatctttgg

SEQ ID NO: 215614 - DNA, 55 bp, Artificial
  Synthetic oligonucleotide
cgacaacagttacggtggagccggagattatagacgctgtaaatgccgtcgagta

SEQ ID NO: 215615 - DNA, 57 bp, Artificial
  Synthetic oligonucleotide
gcggataaattgggagccgttgcggttggctggtgatgccttgactcgtaaattccc

SEQ ID NO: 215616 - DNA, 55 bp, Artificial
  Synthetic oligonucleotide
cgaatcgcgaggatacgctggaatctcgcgttgcgtctacggcagccgctgcact

SEQ ID NO: 215617 - DNA, 55 bp, Artificial
  Synthetic oligonucleotide
cgtcaagtcaaatccttcactatgaccgaaccggtcactcaaatcacttcggtta

SEQ ID NO: 215618 - DNA, 55 bp, Artificial
  Synthetic oligonucleotide
cctggctaacaagcatgacttgcagccgaacctgctcgtattccgcgtgaacccg

SEQ ID NO: 215619 - DNA, 55 bp, Artificial
  Synthetic oligonucleotide
cgtcccaggcgttctcataatcctccagtggaatctcgtaggagtcatagcttgt

SEQ ID NO: 215620 - DNA, 55 bp, Artificial
  Synthetic oligonucleotide
cctcacagcggcccatcgcctgtctgtactgatccacgaccagcattttcccctc

SEQ ID NO: 215621 - DNA, 55 bp, Artificial
  Synthetic oligonucleotide
cctcaatagactccgccaaagtctacgaggctcagttcgatactgattatctcgg

SEQ ID NO: 215622 - DNA, 55 bp, Artificial
  Synthetic oligonucleotide
cctacacgctgggtaacggatataacaagttgagcgccgtcgtatatgatgcgag

SEQ ID NO: 215623 - DNA, 55 bp, Artificial
  Synthetic oligonucleotide
cgtctggggagggtaagacatattcctaacggtccacgaaccattgatctggact

SEQ ID NO: 215624 - DNA, 53 bp, Artificial
  Synthetic oligonucleotide
ccggtttaaatccattctcgcgaacaaacgtaacagcttcaacgtacgcggtg

SEQ ID NO: 215625 - DNA, 55 bp, Artificial
  Synthetic oligonucleotide
ccggttaagcaggaacatctccacgtacgttccgccggacaccagcataacgagc

SEQ ID NO: 215626 - DNA, 59 bp, Artificial
  Synthetic oligonucleotide
tgggggtagcaacgcctgctggtgattgggtgagtgtgcgaccgggcaatccggtggta

SEQ ID NO: 215627 - DNA, 55 bp, Artificial
  Synthetic oligonucleotide
ccggtcgcgcggattaaagggctgatctgacgtcagcttcctctcatagatggcg

SEQ ID NO: 215628 - DNA, 55 bp, Artificial
  Synthetic oligonucleotide
ccggtacgctcttaaacggtcggtacaagagtcgcaaattgtccgcattgcatct

SEQ ID NO: 215629 - DNA, 52 bp, Artificial
  Synthetic oligonucleotide
ccggcggaagcgtatcgttaaccggtattcgactaagcctccttttaccatc

SEQ ID NO: 215630 - DNA, 55 bp, Artificial
  Synthetic oligonucleotide
ccggcactcatttgctaatcgattatattggcaacggggtagctttgttttatcc

SEQ ID NO: 215631 - DNA, 55 bp, Artificial
  Synthetic oligonucleotide
ccgcttagctgcctcttgtgccgtattcgaaataaagccatgcgaatgtgtagca

SEQ ID NO: 215632 - DNA, 55 bp, Artificial
  Synthetic oligonucleotide
cgtggaaccagtaatgtcagatatgctaaaataccgttttggtgctggatcaggg

SEQ ID NO: 215633 - DNA, 55 bp, Artificial
  Synthetic oligonucleotide
ccgctccccaatgtgcattcatcgcccaatctccctcgtacgtataaacaactac

SEQ ID NO: 215634 - DNA, 55 bp, Artificial
  Synthetic oligonucleotide
ccgcaagtaatgctgccatgtatcgttcactaaaggattgcatccgatcactgga

SEQ ID NO: 215635 - DNA, 55 bp, Artificial
  Synthetic oligonucleotide
ccgagctctgtccatgctttaaatacgagttcgcgagggacatcgaatacacgcg

SEQ ID NO: 215636 - DNA, 55 bp, Artificial
  Synthetic oligonucleotide
cgggctacctttaagcctattacgacaggtggggaggggctgcgcaaatgagaga

SEQ ID NO: 215637 - DNA, 57 bp, Artificial
  Synthetic oligonucleotide
tgggggagggtcgagccgtggcccgtccctcgtttgtacatagcatctctaccatac

SEQ ID NO: 215638 - DNA, 55 bp, Artificial
  Synthetic oligonucleotide
cgggagagagcgcagatgcacgtttatgtaaacggaacgatttgtccggctcatg

SEQ ID NO: 215639 - DNA, 55 bp, Artificial
  Synthetic oligonucleotide
cgggtcaagcggttagtttggatatatctgcgtcctctactatatcagcgcaatc

SEQ ID NO: 215640 - DNA, 55 bp, Artificial
  Synthetic oligonucleotide
cgggacacgtttgcgtactgtaggcttcgatcgcttttgttaccgaaatgccctg

SEQ ID NO: 215641 - DNA, 55 bp, Artificial
  Synthetic oligonucleotide
cgggtcgcgggtatcgttaaaatatttcggcaggatgcttgcggcacccatgacc

SEQ ID NO: 215642 - DNA, 55 bp, Artificial
  Synthetic oligonucleotide
cggcgtgtatgggaaatcactccataacaccaatggattttagcactaactccgc

SEQ ID NO: 215643 - DNA, 55 bp, Artificial
  Synthetic oligonucleotide
cggtactcgccacaatcaaacttgttgtaggatggacttgtgatctttagttcca

SEQ ID NO: 215644 - DNA, 55 bp, Artificial
  Synthetic oligonucleotide
cggcacgtgagttggccaaaagtaagctgagaggcatacaacaaacgatatcggt

SEQ ID NO: 215645 - DNA, 55 bp, Artificial
  Synthetic oligonucleotide
cggtccatgaaggagtatcttgaatcgattataagccagacggctgatgcgatcc

SEQ ID NO: 215646 - DNA, 55 bp, Artificial
  Synthetic oligonucleotide
cggagagcttctgcatgaaaggtaccctcaggatcgcaagaagtaacggtcgtag

SEQ ID NO: 215647 - DNA, 55 bp, Artificial
  Synthetic oligonucleotide
cggacttggtctctttacaggtacagagctcttagccaaacgtacggagagtgga

SEQ ID NO: 215648 - DNA, 60 bp, Artificial
  Synthetic oligonucleotide
tcgtttgtcgaaaacgaacatgcagaggttgcaggatatggcaggtcggtatggcatgag

SEQ ID NO: 215649 - DNA, 55 bp, Artificial
  Synthetic oligonucleotide
cggacgagattatccgactcttcacagaaaaccgacagcaagtagctggcgagcc

SEQ ID NO: 215650 - DNA, 55 bp, Artificial
  Synthetic oligonucleotide
cggaattgaaaagttttcacactgatttagatagacacttgaaagagcgaatccc

SEQ ID NO: 215651 - DNA, 55 bp, Artificial
  Synthetic oligonucleotide
cggaaagatgtaaaggtgtgctgtgagtggatcgtcacactgcctgaatcgcttc

SEQ ID NO: 215652 - DNA, 55 bp, Artificial
  Synthetic oligonucleotide
cgctgagacttgttgacggcttaactcttacgacaaggatgttaagtgatggggc

SEQ ID NO: 215653 - DNA, 55 bp, Artificial
  Synthetic oligonucleotide
cggtgaccctacaagatgcggaggcgtgggcacagcatacggatcagcaatttcg

SEQ ID NO: 215654 - DNA, 55 bp, Artificial
  Synthetic oligonucleotide
cgcggtctcgactcaaacttccaggtttgtcctccctgtcttctcataagtggtt

SEQ ID NO: 215655 - DNA, 53 bp, Artificial
  Synthetic oligonucleotide
cggtgcttaccttttcgatgggatacgtcatgggttaccgccccggcggaggc

SEQ ID NO: 215656 - DNA, 55 bp, Artificial
  Synthetic oligonucleotide
cggttccgatgtgccaacgggcctgcatgatttcgtaaatctagttgtgcctatt

SEQ ID NO: 215657 - DNA, 55 bp, Artificial
  Synthetic oligonucleotide
cgccacgatttctagctactatcaggaacgtacacaaggggaacgctcagataca

SEQ ID NO: 215658 - DNA, 55 bp, Artificial
  Synthetic oligonucleotide
cgcatgcatgaacatcccttcccaccaagtaacgagctccccgaacccttcaacc

SEQ ID NO: 215659 - DNA, 60 bp, Artificial
  Synthetic oligonucleotide
ccgagtggtcggagttatggagagatgcagcacgattggattatgacccgattgtcgatg

SEQ ID NO: 215660 - DNA, 55 bp, Artificial
  Synthetic oligonucleotide
cgcatagcagtacatttccaacgcccatccgattcagcagcttggtaatggcaat

SEQ ID NO: 215661 - DNA, 55 bp, Artificial
  Synthetic oligonucleotide
cggttgtacgtttcgtacaatcccgaatacaacttgatcccgctcaaacatggag

SEQ ID NO: 215662 - DNA, 55 bp, Artificial
  Synthetic oligonucleotide
cgatgtgtgggtggagacggtcgttaaaagttgcgcatcaggttaagcgtgtggc

SEQ ID NO: 215663 - DNA, 55 bp, Artificial
  Synthetic oligonucleotide
cggttttagttcatgtggtttattgagatacaaaagatgttcaacaaacgggcca

SEQ ID NO: 215664 - DNA, 55 bp, Artificial
  Synthetic oligonucleotide
cgtactgcaagaggggatttggcggcttattgaggccgctgctgcgcttagtatg

SEQ ID NO: 215665 - DNA, 55 bp, Artificial
  Synthetic oligonucleotide
cataactggcactccactctataaaggcaagacgaccgtcagaccgacatacggt

SEQ ID NO: 215666 - DNA, 53 bp, Artificial
  Synthetic oligonucleotide
cagttttacccggaattacacggcggttgcaatggatcgctccctggttaatt

SEQ ID NO: 215667 - DNA, 55 bp, Artificial
  Synthetic oligonucleotide
cagtgcgattgtcaagacaggcgaccgggagggaatcgcgaaggttgccaatacg

SEQ ID NO: 215668 - DNA, 55 bp, Artificial
  Synthetic oligonucleotide
cagtctgaagctcgtcccgacgatatggcttgtatatctgtcaacattggatgac

SEQ ID NO: 215669 - DNA, 55 bp, Artificial
  Synthetic oligonucleotide
ctagttttcggtcggactctgtaagcgaaagcagaaagtcaaagggtgccatccc

SEQ ID NO: 215670 - DNA, 55 bp, Artificial
  Synthetic oligonucleotide
aatacgtgttccggttaacgctggaaaggcggcagagcttacttcaggttcagcc

SEQ ID NO: 215671 - DNA, 55 bp, Artificial
  Synthetic oligonucleotide
ctatgtcccattggtagtaagtagctgcacgtgcgacattcgtaagtccacagag

SEQ ID NO: 215672 - DNA, 55 bp, Artificial
  Synthetic oligonucleotide
caggagtcgttgttactagttggctgatcaccttgaatgtatataaacgaagaca

SEQ ID NO: 215673 - DNA, 55 bp, Artificial
  Synthetic oligonucleotide
ctcaaatgttcgtattgttccgcagagtgagaattatgtaatcgaaaggttgggg

SEQ ID NO: 215674 - DNA, 55 bp, Artificial
  Synthetic oligonucleotide
cagcaggggagtcctgagcgtgaggatgagatagcgtagtggaattggtgagggc

SEQ ID NO: 215675 - DNA, 55 bp, Artificial
  Synthetic oligonucleotide
cagatcgttatggaggacaggagaacgtcgtttcagcgaatgtccacaatgatga

SEQ ID NO: 215676 - DNA, 55 bp, Artificial
  Synthetic oligonucleotide
cagatcaatactgttttccgcatagatgtcgaacaattccggcctgtgtgacaac

SEQ ID NO: 215677 - DNA, 55 bp, Artificial
  Synthetic oligonucleotide
cagagtcgaccggatatatatgacacaagggaacgaattaccgcctgtggatgca

SEQ ID NO: 215678 - DNA, 55 bp, Artificial
  Synthetic oligonucleotide
cagagtaaggaaagccttccattaaggcagcctgcgcctcttcgtggaacgattc

SEQ ID NO: 215679 - DNA, 55 bp, Artificial
  Synthetic oligonucleotide
cacgtaagttaattgcttctggtcccttgtttggaacgacaatggacagcttgcc

SEQ ID NO: 215680 - DNA, 55 bp, Artificial
  Synthetic oligonucleotide
cacctaaggatggtgacgccgcaacgacctcatgaccttgatcacgaaggttgct

SEQ ID NO: 215681 - DNA, 52 bp, Artificial
  Synthetic oligonucleotide
acgatttgataaatacaaatcaaaagctgttgaagaaattaaaaatttaaaa

SEQ ID NO: 215682 - DNA, 55 bp, Artificial
  Synthetic oligonucleotide
caccaagtgtcggagctaagctaggaggagccgataccacttgggaaggaagctc

SEQ ID NO: 215683 - DNA, 55 bp, Artificial
  Synthetic oligonucleotide
cacacctggaacgaggcatccaaccgagccacttttatagagcattggtgtttgt

SEQ ID NO: 215684 - DNA, 55 bp, Artificial
  Synthetic oligonucleotide
cacaagcggtatatattttgttctacttcgtatgaggccaagaacccacttgggt

SEQ ID NO: 215685 - DNA, 55 bp, Artificial
  Synthetic oligonucleotide
caagcgcgtgaagattgtatcaacgtgcttcaggtgccacgttgggttgaatgcg

SEQ ID NO: 215686 - DNA, 55 bp, Artificial
  Synthetic oligonucleotide
caactcgcctgtcgagtacatctgttctagcaccgatcgcgatgtattgtttccg

SEQ ID NO: 215687 - DNA, 55 bp, Artificial
  Synthetic oligonucleotide
caactccaacaggtggcatattaagcatcgggaagtttccctcccgtagatcgta

SEQ ID NO: 215688 - DNA, 55 bp, Artificial
  Synthetic oligonucleotide
caactaagtactgctgcaattggcagtgtgattattttccctggagcaatgagcg

SEQ ID NO: 215689 - DNA, 54 bp, Artificial
  Synthetic oligonucleotide
caaacgtcttgaaatctcgggaaaaataatggatctatccctgggcattacggg

SEQ ID NO: 215690 - DNA, 55 bp, Artificial
  Synthetic oligonucleotide
caaacagctcgtccgctcgactgagattgtcgccccgggctttatgaatctgcgc

SEQ ID NO: 215691 - DNA, 55 bp, Artificial
  Synthetic oligonucleotide
ccgactcaatcgcgctggataaatcgataagtatatcggatgccgccgtgtcgcc

SEQ ID NO: 215692 - DNA, 60 bp, Artificial
  Synthetic oligonucleotide
gccctggacgtctcagattgtctgatagtttgattagctaggtacgacacatagggggct

SEQ ID NO: 215693 - DNA, 60 bp, Artificial
  Synthetic oligonucleotide
ctgatgcttatcgttcgttctgatcgggttgagagggggtgcgaggggatgcctgccgca

SEQ ID NO: 215694 - DNA, 55 bp, Artificial
  Synthetic oligonucleotide
ccgacgctgcgtcaatcaggcgtaccgtaatcccctgctcgacagggaatgtgga

SEQ ID NO: 215695 - DNA, 55 bp, Artificial
  Synthetic oligonucleotide
cccggcaaaggaatggttacttctacagtgtgcaaatctctggttgtgcttaacg

SEQ ID NO: 215696 - DNA, 55 bp, Artificial
  Synthetic oligonucleotide
cccgatataatcccaggatggcggacaaaagaccaatgggaatgtactgtgcgcc

SEQ ID NO: 215697 - DNA, 55 bp, Artificial
  Synthetic oligonucleotide
cccgagctgaatcacgtcataagcagccagctccactggtgaatataccgcctcg

SEQ ID NO: 215698 - DNA, 55 bp, Artificial
  Synthetic oligonucleotide
cccgacgactactcgtttattccaggtgaacatgcacgaggatacttcgtactcg

SEQ ID NO: 215699 - DNA, 55 bp, Artificial
  Synthetic oligonucleotide
cccctaatgaaccacatgtctagcgttcccgcggacaaccggatatccgtagtta

SEQ ID NO: 215700 - DNA, 55 bp, Artificial
  Synthetic oligonucleotide
cgttaaagctcctgtttgttcgttgatagcataaacggcgatactgtcatgtccg

SEQ ID NO: 215701 - DNA, 51 bp, Artificial
  Synthetic oligonucleotide
ccccgcattaaaccgtacgaggttaaagagcggttgaggacgtttctaggc

SEQ ID NO: 215702 - DNA, 55 bp, Artificial
  Synthetic oligonucleotide
ccccgcatccgcttttcggatcttctctccctcgagtgtgacccaataaccaggt

SEQ ID NO: 215703 - DNA, 55 bp, Artificial
  Synthetic oligonucleotide
ccccgatatccaatacgcgtaatcgcttgccggtaatgtattcgtcaaaataacg

SEQ ID NO: 215704 - DNA, 56 bp, Artificial
  Synthetic oligonucleotide
caaagccactaagggacccatgtcaaggggcaaaccgcagccaatggaacgtagcg

SEQ ID NO: 215705 - DNA, 55 bp, Artificial
  Synthetic oligonucleotide
ccccagagatgggagccaatccggtatctgttatcgtcccattcacctggcccgg

SEQ ID NO: 215706 - DNA, 55 bp, Artificial
  Synthetic oligonucleotide
cgttccggacaagctgagttcaccattaacggaatggatgccaacgaatatccac

SEQ ID NO: 215707 - DNA, 55 bp, Artificial
  Synthetic oligonucleotide
cccagacacgcccatcgaaactaatttaatcgagcatggattattttcggctggc

SEQ ID NO: 215708 - DNA, 53 bp, Artificial
  Synthetic oligonucleotide
cccaatactgctgccacttcggttcaatggctaacgggttatacccctggttt

SEQ ID NO: 215709 - DNA, 55 bp, Artificial
  Synthetic oligonucleotide
ccagatgagcaagaagcacttatcgcattgcttgcattaggaggatataatccgg

SEQ ID NO: 215710 - DNA, 55 bp, Artificial
  Synthetic oligonucleotide
ccacttctttgcgagttccgacccgtattggagcagtcaggtctccatatactgg

SEQ ID NO: 215711 - DNA, 55 bp, Artificial
  Synthetic oligonucleotide
ccacgggcaaaataaagccgtggataggtcataaaagcgccacaatgctgcttag

SEQ ID NO: 215712 - DNA, 55 bp, Artificial
  Synthetic oligonucleotide
cgttcctcaggaatagtcacgtatccgtcggctgtgtattccttctgggtaattg

SEQ ID NO: 215713 - DNA, 55 bp, Artificial
  Synthetic oligonucleotide
ccaaagccacctgttgacctagtttcagttcactggctatggtttctactactgc

SEQ ID NO: 215714 - DNA, 60 bp, Artificial
  Synthetic oligonucleotide
tgagcggttgcatggtcgcaagtgttacctggtctcgaaagggttacatcagccagaaga

SEQ ID NO: 215715 - DNA, 55 bp, Artificial
  Synthetic oligonucleotide
cgttcgtccacggattcgttgttcgtcgtcatgagcctgttcctagcaactggcg

SEQ ID NO: 215716 - DNA, 55 bp, Artificial
  Synthetic oligonucleotide
catgtatcaaatacataaggagtattacgacgtagcggtgcagcaacagtggtgg

SEQ ID NO: 215717 - DNA, 55 bp, Artificial
  Synthetic oligonucleotide
cgtttgcttacattcggtttaaatgtaggtctcatctgaactgcacctcccgtat

SEQ ID NO: 215718 - DNA, 55 bp, Artificial
  Synthetic oligonucleotide
ctaactatttgtggaaacaccccactactcatactcgccagcttagtgaagtaac

SEQ ID NO: 215719 - DNA, 55 bp, Artificial
  Synthetic oligonucleotide
gtgatatacagcgattgtacaggtgtcgaatacgccagtctgttctgtccggtgg

SEQ ID NO: 215720 - DNA, 55 bp, Artificial
  Synthetic oligonucleotide
gtgcaggaatgtcgttccgtggtgttgttcggctatatcacgaatcggcttgggt

SEQ ID NO: 215721 - DNA, 55 bp, Artificial
  Synthetic oligonucleotide
gtggctgataggattgccgacccgggacgcggaaagacatgtagtcatcacttgc

SEQ ID NO: 215722 - DNA, 55 bp, Artificial
  Synthetic oligonucleotide
gtgtgattgcagtatcgtctgtggatcaaaatatggttcgtagcagttcatctgc

SEQ ID NO: 215723 - DNA, 55 bp, Artificial
  Synthetic oligonucleotide
gttcctgttattccgaagtataaggcacttaggatgcctgcgatacccatcgcgg

SEQ ID NO: 215724 - DNA, 55 bp, Artificial
  Synthetic oligonucleotide
aagcaatggcttatcccacatatggtcattgtgaacaaacaggacccaccagacc

SEQ ID NO: 215725 - DNA, 55 bp, Artificial
  Synthetic oligonucleotide
agcctttgggggcaaggcttcatcaaggtcaattcgatgaaaaaacgggatggta

SEQ ID NO: 215726 - DNA, 55 bp, Artificial
  Synthetic oligonucleotide
gttcgtcatttcgcagcagtatttaggtctgcgggaggggatatcaagttaaccc

SEQ ID NO: 215727 - DNA, 55 bp, Artificial
  Synthetic oligonucleotide
gttgatcttactgggaattggtacgaatctaaggatggaaaatgggcacacccaa

SEQ ID NO: 215728 - DNA, 54 bp, Artificial
  Synthetic oligonucleotide
gtttcaagtagtttgaaacaaaaggaagctggtgccggaatgagtttgcttaat

SEQ ID NO: 215729 - DNA, 55 bp, Artificial
  Synthetic oligonucleotide
gtttctcgtctatttgatgacgatgcttatgcctttccaggttactctggtcccg

SEQ ID NO: 215730 - DNA, 52 bp, Artificial
  Synthetic oligonucleotide
gtttgttccaaggagtccggaattaagatggaatgtacctttcaacccgtaa

SEQ ID NO: 215731 - DNA, 52 bp, Artificial
  Synthetic oligonucleotide
aactgcagttcctacagaaaagtctttacccgggttaaatttgatctactcc

SEQ ID NO: 215732 - DNA, 55 bp, Artificial
  Synthetic oligonucleotide
tacgtggtattgacccttataacttatacctacttgttgagggcgttgctgttag

SEQ ID NO: 215733 - DNA, 55 bp, Artificial
  Synthetic oligonucleotide
tagcccaagctcttggagggagtagacgcgatgtttataccccagacacaggacc

SEQ ID NO: 215734 - DNA, 55 bp, Artificial
  Synthetic oligonucleotide
taggagctgcacctaataaaatgatcgccgaaaatggaacaaccatcgatgcctc

SEQ ID NO: 215735 - DNA, 55 bp, Artificial
  Synthetic oligonucleotide
taggcgagacagcttcgacgtacaaataatacacgtctcgtacggccttgatgcc

SEQ ID NO: 215736 - DNA, 60 bp, Artificial
  Synthetic oligonucleotide
aaaatcacaatatttgtgcatgtgacgtactggcgacagcagcgcacgcggttaaaatcg

SEQ ID NO: 215737 - DNA, 55 bp, Artificial
  Synthetic oligonucleotide
aacggcgtaaactcgtacatgcatttggactgataccatcatatgtatcccctcc

SEQ ID NO: 215738 - DNA, 53 bp, Artificial
  Synthetic oligonucleotide
tataacctccggagttcaaagccgcctaagcggtattaaggtaaagatagtac

SEQ ID NO: 215739 - DNA, 55 bp, Artificial
  Synthetic oligonucleotide
tatcgccagccaaacgaaagaacctattatcgtgtttgctgcacctatccgtacg

SEQ ID NO: 215740 - DNA, 55 bp, Artificial
  Synthetic oligonucleotide
tcacactcggcttattccccattacatatcgatctaccaagacatctcgttgacg

SEQ ID NO: 215741 - DNA, 55 bp, Artificial
  Synthetic oligonucleotide
tcactgatgtgcccaactttgataccagagagttcactcagccgtgtcatcgtgc

SEQ ID NO: 215742 - DNA, 55 bp, Artificial
  Synthetic oligonucleotide
gggttgctcgtgagatatggcaaagggttatttacactatttgggaggtagttta

SEQ ID NO: 215743 - DNA, 55 bp, Artificial
  Synthetic oligonucleotide
ggtaaatgaggtagcccttggatgaactcatcctattgttgaagtgactagcagt

SEQ ID NO: 215744 - DNA, 55 bp, Artificial
  Synthetic oligonucleotide
ggtaagcataggaacctttaagctgacaacctcgctcaatcgtgaggctaaaggg

SEQ ID NO: 215745 - DNA, 55 bp, Artificial
  Synthetic oligonucleotide
ggtacagtagcagggtttatctctatggttccttacatgatgaaagatgtacatc

SEQ ID NO: 215746 - DNA, 55 bp, Artificial
  Synthetic oligonucleotide
ggtatccgtgaagctgtggttcgtcgctttctcagtcgtatccacgtactttgag

SEQ ID NO: 215747 - DNA, 54 bp, Artificial
  Synthetic oligonucleotide
ataccgttggcttactttggtaactgtgccccgtcaccggatgaggcggtgtac

SEQ ID NO: 215748 - DNA, 55 bp, Artificial
  Synthetic oligonucleotide
ggtatgatccaaatacacgaatcattgccttttcaggcactctacacttctccat

SEQ ID NO: 215749 - DNA, 55 bp, Artificial
  Synthetic oligonucleotide
ggtcattgacgcttccggtaacccatggctttccttcggttcatggaattcgggc

SEQ ID NO: 215750 - DNA, 55 bp, Artificial
  Synthetic oligonucleotide
ggtgcatttggcgatttgcagaccaccgcacttactgctcttggtgctgtcggag

SEQ ID NO: 215751 - DNA, 55 bp, Artificial
  Synthetic oligonucleotide
ggtgggtaactgttaagatcggcgagaggatggtgcactggggaagggagtccgt

SEQ ID NO: 215752 - DNA, 55 bp, Artificial
  Synthetic oligonucleotide
ggtggtttattatctgtacgcttactgaatcagaagttgctacctatggaccttg

SEQ ID NO: 215753 - DNA, 55 bp, Artificial
  Synthetic oligonucleotide
ggttatcgatcattgttttggacatttgctccgcggttccgtcgcaattctgtag

SEQ ID NO: 215754 - DNA, 55 bp, Artificial
  Synthetic oligonucleotide
gtacgccaaatcgtacatgccctgtatcagataaaatccggccagcgtgagccat

SEQ ID NO: 215755 - DNA, 54 bp, Artificial
  Synthetic oligonucleotide
gtaggccaccccgttcggtgcttaatgggaaggtgctggcacccggaacctcag

SEQ ID NO: 215756 - DNA, 55 bp, Artificial
  Synthetic oligonucleotide
gtcacgtaaattgtgaaaccttcctcgtatcctagcacgtcaggaagataccgtg

SEQ ID NO: 215757 - DNA, 55 bp, Artificial
  Synthetic oligonucleotide
gtccaccacaatatgatggatccctagaaacaatagattcccttcacccgtccgg

SEQ ID NO: 215758 - DNA, 52 bp, Artificial
  Synthetic oligonucleotide
acgataacaagccttgcacggtaacgtttcagattaacaaacgttttgacgg

SEQ ID NO: 215759 - DNA, 55 bp, Artificial
  Synthetic oligonucleotide
gtccgaaccttttagcacatcggatgaagctgcatttgccacaatcggatttacg

SEQ ID NO: 215760 - DNA, 55 bp, Artificial
  Synthetic oligonucleotide
gtcctagctacggctgtaagctccgctttgcttaatccggacttgttggactcat

SEQ ID NO: 215761 - DNA, 55 bp, Artificial
  Synthetic oligonucleotide
gtccttacgaggagggtacacatcaacataaggtactacataagcccatggaaat

SEQ ID NO: 215762 - DNA, 55 bp, Artificial
  Synthetic oligonucleotide
gtccttagctctgctgtggggctgaaactagctagggcctgtacgcaaactgtac

SEQ ID NO: 215763 - DNA, 55 bp, Artificial
  Synthetic oligonucleotide
gtctgtataccatccagctataagcaatcgagtcaatggaatcgccaaaacggga

SEQ ID NO: 215764 - DNA, 55 bp, Artificial
  Synthetic oligonucleotide
gtctgtcctctgcggccaattagcataccgagcgatggaccggagatatccagag

SEQ ID NO: 215765 - DNA, 55 bp, Artificial
  Synthetic oligonucleotide
tggaagcgcattcaaactagggagggatacgatggaagccaatcatagcctaacg

SEQ ID NO: 215766 - DNA, 55 bp, Artificial
  Synthetic oligonucleotide
tggaatccgtatacatgcgggtaaaccctggaagggacctagtacaagctcagtc

SEQ ID NO: 215767 - DNA, 55 bp, Artificial
  Synthetic oligonucleotide
tgtacctgtcttaatatcctctttcacgaaaccaccatccagagggttattgggg

SEQ ID NO: 215768 - DNA, 55 bp, Artificial
  Synthetic oligonucleotide
tgtgtactacaatctggtacctacgctaactcattgcaggcttatgcacaatcgg

SEQ ID NO: 215769 - DNA, 60 bp, Artificial
  Synthetic oligonucleotide
cggtcatacctggtgtgggtacaggcagtcctgctatccctggtgtggttagtccagcca

SEQ ID NO: 215770 - DNA, 55 bp, Artificial
  Synthetic oligonucleotide
aaatccgctcgtaagcattatattccgctcccgccaaaacgtgcctatctttccc

SEQ ID NO: 215771 - DNA, 55 bp, Artificial
  Synthetic oligonucleotide
ttatacgatggacaacgcatacggacagggcttaaccatcatccgcacgatgtat

SEQ ID NO: 215772 - DNA, 55 bp, Artificial
  Synthetic oligonucleotide
ttccaccgtatgttcaaacgtagcttgggcgtgacacccacagattttcgccgtt

SEQ ID NO: 215773 - DNA, 55 bp, Artificial
  Synthetic oligonucleotide
ttccatcctattcgtataggttacatcaagcggtcgtctattcacggcctgtcac

SEQ ID NO: 215774 - DNA, 55 bp, Artificial
  Synthetic oligonucleotide
ttcccgtccaaagagaccaacgtcaaagcgacccatccactatgcatcataacca

SEQ ID NO: 215775 - DNA, 55 bp, Artificial
  Synthetic oligonucleotide
ttcctgagttcgcgttggaggcaatcaggcaaagcagcgcaaagtacgtggtcga

SEQ ID NO: 215776 - DNA, 55 bp, Artificial
  Synthetic oligonucleotide
ttcctggtcttgcttgtacaagggtaatgattctcattagtcggatcagtcggtc

SEQ ID NO: 215777 - DNA, 55 bp, Artificial
  Synthetic oligonucleotide
ttcgggttccgtatggctgaatgacagtaacgaccggctgaacaattatgcagcc

SEQ ID NO: 215778 - DNA, 55 bp, Artificial
  Synthetic oligonucleotide
ttgcaaatgattttaataaatcaccggcgagtacaaactgggtgaacacagcctt

SEQ ID NO: 215779 - DNA, 55 bp, Artificial
  Synthetic oligonucleotide
ttggaacgagtgtccggtttgagcgccgattgaagcactcagtggagaaggtgtg

SEQ ID NO: 215780 - DNA, 58 bp, Artificial
  Synthetic oligonucleotide
gaacttgctgggtaaattggtgggtaactgttaagatcggcgagaggatggtgcactg

SEQ ID NO: 215781 - DNA, 55 bp, Artificial
  Synthetic oligonucleotide
ttggacgacccaccactcaatcaaccccgtaatggaaacggataagaattgcgcc

SEQ ID NO: 215782 - DNA, 55 bp, Artificial
  Synthetic oligonucleotide
ttgggaaactcgttaaccagctgtacgcgcggaatgcacgatactttaggtgtcg

SEQ ID NO: 215783 - DNA, 55 bp, Artificial
  Synthetic oligonucleotide
ttggtgagggcaaacccttgacatggggtggcgtgtggtagcctgatcgggctgc

SEQ ID NO: 215784 - DNA, 55 bp, Artificial
  Synthetic oligonucleotide
tttgtggctgtctgctgttacgactggcgaggaaaccgtgcatgtacgttttgat

SEQ ID NO: 215785 - DNA, 55 bp, Artificial
  Synthetic oligonucleotide
aaaagtggcaccggccccagttttaagctggcagtagaaggcatctctttgcggt

SEQ ID NO: 215786 - DNA, 54 bp, Artificial
  Synthetic oligonucleotide
aaaaggagggaaacagatgctaaccgttactgatattcgtaagacctttatgaa

SEQ ID NO: 215787 - DNA, 53 bp, Artificial
  Synthetic oligonucleotide
aaaacctcggatgcggtattcaggggcacgttagcctcgtcccaccctaaagc

SEQ ID NO: 215788 - DNA, 55 bp, Artificial
  Synthetic oligonucleotide
tcactgtacaagcgttataagcagcttccgggtaatctgaccgtactgccggccc

SEQ ID NO: 215789 - DNA, 55 bp, Artificial
  Synthetic oligonucleotide
tcagatgtagcgttggttaggcattctcgaatctttgaatttattcgggtagggg

SEQ ID NO: 215790 - DNA, 55 bp, Artificial
  Synthetic oligonucleotide
tccaaagtactaccctggttctctaatcgcatatcctgctagcccgtcgtaatgg

SEQ ID NO: 215791 - DNA, 56 bp, Artificial
  Synthetic oligonucleotide
gatactcgtcctttaggtcgtccgaaagtggttgatagccctgtgtctcgcgtagt

SEQ ID NO: 215792 - DNA, 55 bp, Artificial
  Synthetic oligonucleotide
tccattacggggttgattgagtggtgggtcatccaatctatgccatatacgccag

SEQ ID NO: 215793 - DNA, 55 bp, Artificial
  Synthetic oligonucleotide
tcccagtgaggatggtgagttgtataagccagttttcatgacgctgacgtttgcg

SEQ ID NO: 215794 - DNA, 55 bp, Artificial
  Synthetic oligonucleotide
tccgaccttcctgcacaacaaatatgtcgcaagcttccatattacggaaaccggt

SEQ ID NO: 215795 - DNA, 55 bp, Artificial
  Synthetic oligonucleotide
tccggatcgcagagcagttcgctcagtttatcgtagcggtccgccaatgattgca

SEQ ID NO: 215796 - DNA, 55 bp, Artificial
  Synthetic oligonucleotide
tcctgattgtaaaattggacatagcgagctatccctttgcggagtgcgcgagggt

SEQ ID NO: 215797 - DNA, 55 bp, Artificial
  Synthetic oligonucleotide
tcgcccgaccatgattaccagacgagtagaggaaatcgcgacaagttgggaaaag

SEQ ID NO: 215798 - DNA, 55 bp, Artificial
  Synthetic oligonucleotide
aaccggaactccgatacatcccatgtcacccgtaaccaaactgatgtggatgcgg

SEQ ID NO: 215799 - DNA, 55 bp, Artificial
  Synthetic oligonucleotide
tcggaggactgcgtgcgtcgacatataatgcggtaccctatgaatcctgcaaggc

SEQ ID NO: 215800 - DNA, 55 bp, Artificial
  Synthetic oligonucleotide
tcgtacgcagaacatcatacttgcgaatcagctcgttaaaacttttctcaaggga

SEQ ID NO: 215801 - DNA, 55 bp, Artificial
  Synthetic oligonucleotide
tcgtagagcctgtccgatttaatccactcaccgtaatactccctctggtttcgcc

SEQ ID NO: 215802 - DNA, 60 bp, Artificial
  Synthetic oligonucleotide
cattgttcgggaaatggttcagcaggggagtcctgagcgtgaggatgagatagcgtagtg

SEQ ID NO: 215803 - DNA, 60 bp, Artificial
  Synthetic oligonucleotide
cggagatgtcaaagtatacagttaaggccgctgattacttggttgaggatgatgttgagt

SEQ ID NO: 215804 - DNA, 55 bp, Artificial
  Synthetic oligonucleotide
tcgtagatgcgatgtatctcaaggtccgtgaagacggtcgtgtacgctcacgagg

SEQ ID NO: 215805 - DNA, 55 bp, Artificial
  Synthetic oligonucleotide
tcgtttcagaccactttatagccacctcttgtgaaagccgactaacaagttcccc

SEQ ID NO: 215806 - DNA, 54 bp, Artificial
  Synthetic oligonucleotide
aacccgtgttaccagttacaccgatcggcccggttgcaccaatggctccagccg

SEQ ID NO: 215807 - DNA, 55 bp, Artificial
  Synthetic oligonucleotide
tctcgtgagccagtctgagccgggcttttattgccctgtcaccttgtcgatgtca

SEQ ID NO: 215808 - DNA, 55 bp, Artificial
  Synthetic oligonucleotide
tcttttataattggtgtcctttgtggaggacttatatttggtacagtagcagggt

SEQ ID NO: 215809 - DNA, 55 bp, Artificial
  Synthetic oligonucleotide
tgacgtacggcgattatttacagctcgatcaaatcttatcgagtcaacagcttca

SEQ ID NO: 215810 - DNA, 55 bp, Artificial
  Synthetic oligonucleotide
tgagtataaacggattcttaaagcaggacagtagttgaatgtaccaggccggcaa

SEQ ID NO: 215811 - DNA, 55 bp, Artificial
  Synthetic oligonucleotide
tgcagcctatcgctcaccggagatgttagtcggaatcatggctattcttaaggca

SEQ ID NO: 215812 - DNA, 55 bp, Artificial
  Synthetic oligonucleotide
ggccgcctgtatttcaggccagcatgactttataacagaaaggttgcgttccatg

SEQ ID NO: 215813 - DNA, 55 bp, Artificial
  Synthetic oligonucleotide
gccatcagcccctccgtctagcgttaatttggggtatgtaacgtggttaattgat

SEQ ID NO: 215814 - DNA, 60 bp, Artificial
  Synthetic oligonucleotide
accagtgcgcgtgtgtccgcactgtggaggggctgtgacgcgtccggataatgcggcaat

SEQ ID NO: 215815 - DNA, 55 bp, Artificial
  Synthetic oligonucleotide
gcccgatgcagtaaccgcacggtggataccggggtaacagggattttccagcacg

SEQ ID NO: 215816 - DNA, 55 bp, Artificial
  Synthetic oligonucleotide
ggccaagtctgccgtcgtgtaagaattgtgggccgtctgagcacatccggacagc

SEQ ID NO: 215817 - DNA, 55 bp, Artificial
  Synthetic oligonucleotide
gcccgcattctctatggtttcatacacgcattctaggaataggcgctcctgaggg

SEQ ID NO: 215818 - DNA, 54 bp, Artificial
  Synthetic oligonucleotide
ggcacggaattacgccttataagattgaatccggccaagttcttaaagccgtag

SEQ ID NO: 215819 - DNA, 55 bp, Artificial
  Synthetic oligonucleotide
gccgatgcaagctgccaaatccttcgtaaacgtcgggcagccaacttgatcgttc

SEQ ID NO: 215820 - DNA, 55 bp, Artificial
  Synthetic oligonucleotide
gccgcaaattgacagtgacggttacatacgaagcgatggcacaacgatactcggc

SEQ ID NO: 215821 - DNA, 55 bp, Artificial
  Synthetic oligonucleotide
ggcacccgctaatgaaccacatgtctagcgttcccgcggacaaccggatatccgt

SEQ ID NO: 215822 - DNA, 55 bp, Artificial
  Synthetic oligonucleotide
gccggctgcccaaataatcgtctacggatacccatgtgctccctttgcctaccgc

SEQ ID NO: 215823 - DNA, 55 bp, Artificial
  Synthetic oligonucleotide
ggatattctgctgctaagtgccacgtcccataaccacccatgcttagccccgtca

SEQ ID NO: 215824 - DNA, 60 bp, Artificial
  Synthetic oligonucleotide
agaaaaattgcgagcctcaatagactccgccaaagtctacgaggctcagttcgatactga

SEQ ID NO: 215825 - DNA, 55 bp, Artificial
  Synthetic oligonucleotide
gcctcctttaaagcacgcaggtgatacgaagtatttgatttcgtagtatcgcgaa

SEQ ID NO: 215826 - DNA, 55 bp, Artificial
  Synthetic oligonucleotide
gcgaaactcgtctgtgtccggcgagatccggatcagtgctcaagaacagcaggcg

SEQ ID NO: 215827 - DNA, 55 bp, Artificial
  Synthetic oligonucleotide
ggagcctagcgcagctggagatacgttcgagcctaacgcttcaggcgatacgtta

SEQ ID NO: 215828 - DNA, 55 bp, Artificial
  Synthetic oligonucleotide
gcgcttgcaaaatagtcacggatgtacgtaacatactggcccagatcaaaggaat

SEQ ID NO: 215829 - DNA, 55 bp, Artificial
  Synthetic oligonucleotide
ggagccctgcgatgcaacccacaatcatggtctctgcattaaacacccttccgat

SEQ ID NO: 215830 - DNA, 55 bp, Artificial
  Synthetic oligonucleotide
gcggttagcttgaatggaacccatagaacctggacctctgtggtaacgcgagccg

SEQ ID NO: 215831 - DNA, 55 bp, Artificial
  Synthetic oligonucleotide
ggacccgtccggtattcaggaaattcgggagttaattatgagcctgcctgatgct

SEQ ID NO: 215832 - DNA, 55 bp, Artificial
  Synthetic oligonucleotide
gcgtacgagggtgaagctacatatctctcattcacagattaccggggcaggttcg

SEQ ID NO: 215833 - DNA, 55 bp, Artificial
  Synthetic oligonucleotide
ggacccatgtcaaggggcaaaccgcagccaatggaacgtagcggggaaagcggga

SEQ ID NO: 215834 - DNA, 60 bp, Artificial
  Synthetic oligonucleotide
atggcatgagtgctaattcgcttgtgtcttatattctcggtcaatggctcgataataact

SEQ ID NO: 215835 - DNA, 55 bp, Artificial
  Synthetic oligonucleotide
gcgtacttccgccagtcctatgaataagtgagtttcttgcgatctgcgcgatccg

SEQ ID NO: 215836 - DNA, 55 bp, Artificial
  Synthetic oligonucleotide
gcgtgatgacttgcgggagcgaaacgtcgaggagtcactcgtgttggccattacg

SEQ ID NO: 215837 - DNA, 55 bp, Artificial
  Synthetic oligonucleotide
gcgttcaaacagtttatacgcaagctgaatgggcatgtgtatgggcgtggtaggg

SEQ ID NO: 215838 - DNA, 55 bp, Artificial
  Synthetic oligonucleotide
gcgttgaccgtaatccctctcgtagctacttcgacagcaagtgtcgtcgttaggg

SEQ ID NO: 215839 - DNA, 55 bp, Artificial
  Synthetic oligonucleotide
ggacaattggatcggattacggctgcgatggggttgcctgaaggacacttttacg

SEQ ID NO: 215840 - DNA, 55 bp, Artificial
  Synthetic oligonucleotide
gcttttcgcctcgcagagcacgtccagaagaattctggtataccgtgttatacca

SEQ ID NO: 215841 - DNA, 55 bp, Artificial
  Synthetic oligonucleotide
gctcccgcctccctactgtggatagtttggtacattatatgaggagcgtgcctat

SEQ ID NO: 215842 - DNA, 55 bp, Artificial
  Synthetic oligonucleotide
aatcatcagaaacccgcacaatgctggtactgaagctcaagtaacccatgagttc

SEQ ID NO: 215843 - DNA, 55 bp, Artificial
  Synthetic oligonucleotide
gctattacgagcagattgcggataacttgtccgagattagagagctggaacggcg

SEQ ID NO: 215844 - DNA, 55 bp, Artificial
  Synthetic oligonucleotide
gcaactgcaggctgctctaaacggttctgctcgccattacggtaccatatcatcc

SEQ ID NO: 215845 - DNA, 58 bp, Artificial
  Synthetic oligonucleotide
tacgacacatagggggctggggatgtatccccagtgttaccctttcgtgtgggcatga

SEQ ID NO: 215846 - DNA, 49 bp, Artificial
  Synthetic oligonucleotide
gggtcttccggtcgtgttaacgggcgattttaacgttgaaccggcaaac

SEQ ID NO: 215847 - DNA, 55 bp, Artificial
  Synthetic oligonucleotide
gctgggttaatcagatcactgcccttagtctaagcggtactaaaatgtttcctgg

SEQ ID NO: 215848 - DNA, 55 bp, Artificial
  Synthetic oligonucleotide
gggtccattcggggaaattcgtatcactcctgtagcaacgtctacatcataagtc

SEQ ID NO: 215849 - DNA, 55 bp, Artificial
  Synthetic oligonucleotide
ggggctttctgagggcgattctgacgatctgagtggtaagtatagggatgattcg

SEQ ID NO: 215850 - DNA, 55 bp, Artificial
  Synthetic oligonucleotide
ggggcaaatgtcaggtatgaatcgaggaataataagtgcgattgtgaccgggaat

SEQ ID NO: 215851 - DNA, 55 bp, Artificial
  Synthetic oligonucleotide
ggggatcaaacgcctgtacgaaaacgaactgcgtagtttataatggaatgcagca

SEQ ID NO: 215852 - DNA, 50 bp, Artificial
  Synthetic oligonucleotide
ggggaaacttttccctcgtgggtttgggcaaagcccatgatcttttcttt

SEQ ID NO: 215853 - DNA, 55 bp, Artificial
  Synthetic oligonucleotide
gcaaggaggagctgtaatcggttggacacgcgatattcccctctctggtgtaacc

SEQ ID NO: 215854 - DNA, 55 bp, Artificial
  Synthetic oligonucleotide
gggcagtgcgttggcagttacgagataacaacgtaataagaatgggaacatcgcc

SEQ ID NO: 215855 - DNA, 55 bp, Artificial
  Synthetic oligonucleotide
gggattctatgctgactggaaggcggatgaactgacggagctaattgatcatatg

SEQ ID NO: 215856 - DNA, 59 bp, Artificial
  Synthetic oligonucleotide
gctcgaacgctcaggacgtccgctgtaacggacctctgtgcctttaggtgcaatttcac

SEQ ID NO: 215857 - DNA, 54 bp, Artificial
  Synthetic oligonucleotide
gggatcggtacgtaactactacgaccatctgtcggaatgtaagggtccgcccga

SEQ ID NO: 215858 - DNA, 55 bp, Artificial
  Synthetic oligonucleotide
gggataaccttgttctggccatctgataggtatggcgcatataacgccgaaacgc

SEQ ID NO: 215859 - DNA, 55 bp, Artificial
  Synthetic oligonucleotide
gggaggactttgctctacctgcgcgtgaccttaattcccgattgcacacagaagc

SEQ ID NO: 215860 - DNA, 55 bp, Artificial
  Synthetic oligonucleotide
gcagaaatacttcagcagcatacccgtcattgtatgggtgacgaacggtatcacg

SEQ ID NO: 215861 - DNA, 55 bp, Artificial
  Synthetic oligonucleotide
gggagcaccgtctgcatacctttcctccgttctgaacataaaaggtgaacgattc

SEQ ID NO: 215862 - DNA, 51 bp, Artificial
  Synthetic oligonucleotide
gctcggaatacccggggaggagcttccgaaagtaacccattattaccggga

SEQ ID NO: 215863 - DNA, 55 bp, Artificial
  Synthetic oligonucleotide
ggcgccgtcaagtcctgcacactctccgatgagagcaagcgattctcgcccacca

SEQ ID NO: 215864 - DNA, 55 bp, Artificial
  Synthetic oligonucleotide
gcttgtaccccatggtggctgtggctacgcgaagtgtaccgtaatcaagtgtgcc

SEQ ID NO: 215865 - DNA, 55 bp, Artificial
  Synthetic oligonucleotide
gccaaaaggaaagatgtcaaacaaacctgagggttattccgcttcgcagttcact

SEQ ID NO: 215866 - DNA, 55 bp, Artificial
  Synthetic oligonucleotide
ggctacgaagttcgcaaaagcggcagccggccaaatattcgcggcccagttgtcc

SEQ ID NO: 215867 - DNA, 58 bp, Artificial
  Synthetic oligonucleotide
ttacggttgtccagcctaagcgtgcagatgcgtttttgccagcgttggtgataccagt

SEQ ID NO: 215868 - DNA, 55 bp, Artificial
  Synthetic oligonucleotide
gcattctacacggaagagaactgggaagccgcttgcgaacgctgcatcgggattc

SEQ ID NO: 215869 - DNA, 55 bp, Artificial
  Synthetic oligonucleotide
aaggcgtatgtccgcgtccggtctagcggcaatagtccccttggatcggcggcta

SEQ ID NO: 215870 - DNA, 55 bp, Artificial
  Synthetic oligonucleotide
ggctgttggcccaatccactgccgggttgcccttcgtataatgcagactcgccgg

SEQ ID NO: 215871 - DNA, 55 bp, Artificial
  Synthetic oligonucleotide
gggaatacccctacatacacgtagggcccacggggctacaatgaactcaaggcag

SEQ ID NO: 215872 - DNA, 55 bp, Artificial
  Synthetic oligonucleotide
gcagtcgcttcaaagaagcatgtcgtcaataaccaaggaagagtgccagactcag

SEQ ID NO: 215873 - DNA, 55 bp, Artificial
  Synthetic oligonucleotide
gcagggttggtgcaggatatcattaactttgtactgacttgtgtagtgtttgcgg

SEQ ID NO: 215874 - DNA, 55 bp, Artificial
  Synthetic oligonucleotide
gggacgacgtctgtttgcgtttggtgggatgctcaaggatgtttatgagtggctt

SEQ ID NO: 215875 - DNA, 55 bp, Artificial
  Synthetic oligonucleotide
gcaggcgccttgatcaagctactgttgggtctagattacacgacctccgtattga

SEQ ID NO: 215876 - DNA, 55 bp, Artificial
  Synthetic oligonucleotide
gcagctgcatttccagcactcgtgatggttgtagttgcgcgctatattccaaagg

SEQ ID NO: 215877 - DNA, 55 bp, Artificial
  Synthetic oligonucleotide
gggactggagcattccccttctatccgtcccgtgaaaggcgacctgtctctgcct

SEQ ID NO: 215878 - DNA, 56 bp, Artificial
  Synthetic oligonucleotide
gagattgaacagcagaaagaggaaatggctaacgaatttaagagttttaaatatcc

SEQ ID NO: 215879 - DNA, 54 bp, Artificial
  Synthetic oligonucleotide
tccgtattcaatacgtaccacgagctgccgccaaggttcgatgcatgcgttgct

SEQ ID NO: 215880 - DNA, 54 bp, Artificial
  Synthetic oligonucleotide
cgtgtacaaacggaaattggctccgatgatacttaatctcgtgttagagtgtga

SEQ ID NO: 215881 - DNA, 54 bp, Artificial
  Synthetic oligonucleotide
gcttcccatgatgaaaagtcctggatcgttaagaggtgctcataaacatgaata

SEQ ID NO: 215882 - DNA, 54 bp, Artificial
  Synthetic oligonucleotide
ccgctagcagggctcgaacgctcaggacgtccgctgtaacggacctctgtgcct

SEQ ID NO: 215883 - DNA, 54 bp, Artificial
  Synthetic oligonucleotide
gctaggctcatagttagtgaggcctaacgggtacagaaggcggagatgcttact

SEQ ID NO: 215884 - DNA, 54 bp, Artificial
  Synthetic oligonucleotide
tctacaatagggaaatgcccgcagtacataggaagcctatccttggatttagga

SEQ ID NO: 215885 - DNA, 54 bp, Artificial
  Synthetic oligonucleotide
gccgtaaaacgcgataagctgctgtataactgacataatcggagtatatccgcc

SEQ ID NO: 215886 - DNA, 52 bp, Artificial
  Synthetic oligonucleotide
gagtagtttacgagccaacgtaatcccagggacgtacgtctttctggtttta

SEQ ID NO: 215887 - DNA, 54 bp, Artificial
  Synthetic oligonucleotide
ttccgtaacataagttgtcgcgtatggttccggcaatcatcggactttcctgcg

SEQ ID NO: 215888 - DNA, 54 bp, Artificial
  Synthetic oligonucleotide
acagctatgagtaagacaatattgagcagtcccaccacaagcccgatcaggaca

SEQ ID NO: 215889 - DNA, 54 bp, Artificial
  Synthetic oligonucleotide
gatttaatgagcatgcacaagtgcggattatggctggatgttttagaaaccacg

SEQ ID NO: 215890 - DNA, 54 bp, Artificial
  Synthetic oligonucleotide
atatccgtatgacagggattcaagatatagcaacaccgcggcgtacgaaggaaa

SEQ ID NO: 215891 - DNA, 54 bp, Artificial
  Synthetic oligonucleotide
ggtaaaaccacaccatctcgattcgtttacaggtgtgtgtccgtaccatggcaa

SEQ ID NO: 215892 - DNA, 54 bp, Artificial
  Synthetic oligonucleotide
gtcttgcataatggaagtcctatccgctcatgcagctttacgagccaaggttgg

SEQ ID NO: 215893 - DNA, 54 bp, Artificial
  Synthetic oligonucleotide
cacggtgtgcgcatatacctcggaagaaggtcttacctcaggtagcatgatttt

SEQ ID NO: 215894 - DNA, 54 bp, Artificial
  Synthetic oligonucleotide
gttgagactttgaacgcagaacgactcaaggatgccaatatttatcacgtccac

SEQ ID NO: 215895 - DNA, 54 bp, Artificial
  Synthetic oligonucleotide
tacatcccggaatatgagttgttcgctacattttgacccagcccttccggtggg

SEQ ID NO: 215896 - DNA, 54 bp, Artificial
  Synthetic oligonucleotide
ggataaccaatcgaataacgaagagcctatgcacaaactattcacatgtggata

SEQ ID NO: 215897 - DNA, 52 bp, Artificial
  Synthetic oligonucleotide
ggacgaaattcacttttccgggacggggcgacaaatactccgctttcaaatg

SEQ ID NO: 215898 - DNA, 54 bp, Artificial
  Synthetic oligonucleotide
tatctgtacatttccgatccggaggagagttagcagaatgggacaagtaatcag

SEQ ID NO: 215899 - DNA, 58 bp, Artificial
  Synthetic oligonucleotide
gtcaatgatctcagtagttatagtcatgatattatgaacgtatttgccagtagacgtc

SEQ ID NO: 215900 - DNA, 54 bp, Artificial
  Synthetic oligonucleotide
tccattccctatgaagtacggttgagatggctgtccacgctggttaaggacatg

SEQ ID NO: 215901 - DNA, 53 bp, Artificial
  Synthetic oligonucleotide
gcggatagctcgtgatagtgattttagggtactacaatcctatgcggtccaag

SEQ ID NO: 215902 - DNA, 53 bp, Artificial
  Synthetic oligonucleotide
catacgcaagacggcgtttagttacatcgtgattcgtaatttcgccaccgccg

SEQ ID NO: 215903 - DNA, 53 bp, Artificial
  Synthetic oligonucleotide
tgcttacacctccgctccacagttctgccacgcttctcagccactgcccccgt

SEQ ID NO: 215904 - DNA, 53 bp, Artificial
  Synthetic oligonucleotide
aagtagcttcaccggcttttctactcctcgtagatcccaattatcccctgtac

SEQ ID NO: 215905 - DNA, 53 bp, Artificial
  Synthetic oligonucleotide
caggaattggcttcacgcattatgtcagacaagatgacgaatcttctagctcc

SEQ ID NO: 215906 - DNA, 53 bp, Artificial
  Synthetic oligonucleotide
gtttaagcggaaccatgagctttccgtcgatcaataccttgctgtctataggc

SEQ ID NO: 215907 - DNA, 53 bp, Artificial
  Synthetic oligonucleotide
cgcgcgacttttgtcgtataatctgacgcaagagggttacgatacgactgtca

SEQ ID NO: 215908 - DNA, 53 bp, Artificial
  Synthetic oligonucleotide
ctggcgccttatatcgatcgaagcaagctgtaccctgggagcgattacgatat

SEQ ID NO: 215909 - DNA, 53 bp, Artificial
  Synthetic oligonucleotide
gccactgcccccgttctccgcccccggttttgtacattggtaatgtacgcatg

SEQ ID NO: 215910 - DNA, 59 bp, Artificial
  Synthetic oligonucleotide
tagcgtagtggaattggtgagggcaaacccttgacatggggtggcgtgtggtagcctga

SEQ ID NO: 215911 - DNA, 53 bp, Artificial
  Synthetic oligonucleotide
cgggccatttaacggaataagtgatgaaaactgaatttaaaacttagtctgta

SEQ ID NO: 215912 - DNA, 53 bp, Artificial
  Synthetic oligonucleotide
cgctgccttatacgcttcccatcgctccgggcaagcatccggcacaggggtat

SEQ ID NO: 215913 - DNA, 53 bp, Artificial
  Synthetic oligonucleotide
gccacgcttctcagccactgcccccgttctccgcccccggttttgtacattgg

SEQ ID NO: 215914 - DNA, 53 bp, Artificial
  Synthetic oligonucleotide
cacagcgatccaccgtttcccggtatttcgcctcctgcaggtacagttccgcg

SEQ ID NO: 215915 - DNA, 53 bp, Artificial
  Synthetic oligonucleotide
gtcctctatgtttaaaaggttcgttgacgtcacaagtagacgtaattagccca

SEQ ID NO: 215916 - DNA, 53 bp, Artificial
  Synthetic oligonucleotide
ttggccgtcgctgtgatttgtttcaaggctacgcgcagctcccagtttgctgt

SEQ ID NO: 215917 - DNA, 53 bp, Artificial
  Synthetic oligonucleotide
agcggtactatcctgttgttgatgcaggcacgatgactcctgttgtacctaaa

SEQ ID NO: 215918 - DNA, 53 bp, Artificial
  Synthetic oligonucleotide
gggccaatacggcgtacgcaatgacctgcgcttctgaataaccgaatacgctc

SEQ ID NO: 215919 - DNA, 53 bp, Artificial
  Synthetic oligonucleotide
aagcggagcgatcacgggcaagcaatatcgcggacggttggctgagcttagtc

SEQ ID NO: 215920 - DNA, 53 bp, Artificial
  Synthetic oligonucleotide
tccagcccaatgtagcgcttcctcccgttagccggatatccgcatcaccacga

SEQ ID NO: 215921 - DNA, 53 bp, Artificial
  Synthetic oligonucleotide
cgttccggttgtaggagctgtctggttcatcgtatattatttcgttttccgct

SEQ ID NO: 215922 - DNA, 57 bp, Artificial
  Synthetic oligonucleotide
taaagctgccagtcggctgtcgtctcccgatgctgtcagataactgtcgcaccccgt

SEQ ID NO: 215923 - DNA, 53 bp, Artificial
  Synthetic oligonucleotide
tcagtaatcagagacatacaggcggatgacgtgcctatggcaagtgtgccggt

SEQ ID NO: 215924 - DNA, 53 bp, Artificial
  Synthetic oligonucleotide
tctccaagactcgttatccagcaaataaacgctgcaaggcggccactcccggg

SEQ ID NO: 215925 - DNA, 53 bp, Artificial
  Synthetic oligonucleotide
ccccatcgaactgcgtcacataatggcccgtcgcaacgttcagcagccggtaa

SEQ ID NO: 215926 - DNA, 52 bp, Artificial
  Synthetic oligonucleotide
tcgggcttggactgaggtcatttttggccaacgagatgcgatccgggagacg

SEQ ID NO: 215927 - DNA, 52 bp, Artificial
  Synthetic oligonucleotide
tccattccacaagacggataccaaggtaacatgacttcctatgagaacggtt

SEQ ID NO: 215928 - DNA, 52 bp, Artificial
  Synthetic oligonucleotide
cgctcgctgtttgtcgtaaatcggcgataagggctccgcgtgaaacctcccc

SEQ ID NO: 215929 - DNA, 52 bp, Artificial
  Synthetic oligonucleotide
ggcgtatccgttggttgaggcaaacaagaccacggaagacagcatccttttc

SEQ ID NO: 215930 - DNA, 52 bp, Artificial
  Synthetic oligonucleotide
tcgctgaacgggagccttccatcgagtggcgtcccaaatccaaggaaccacc

SEQ ID NO: 215931 - DNA, 52 bp, Artificial
  Synthetic oligonucleotide
ccgctgcgttcgttggccgtccagtggatgacgactccttttgggacgatct

SEQ ID NO: 215932 - DNA, 52 bp, Artificial
  Synthetic oligonucleotide
ccagcttcgattccatggcccacggcagtgcgcgtgtcatcccgacgggtat

SEQ ID NO: 215933 - DNA, 57 bp, Artificial
  Synthetic oligonucleotide
gaagttgccagttggctgtcgtcccctaaagctgccagtcggctgtcgtctcccgat

SEQ ID NO: 215934 - DNA, 52 bp, Artificial
  Synthetic oligonucleotide
agcgcgacgggaaatcgaagctcgattggcaaaattattgggtcgagcgtag

SEQ ID NO: 215935 - DNA, 52 bp, Artificial
  Synthetic oligonucleotide
tcgccctcttgccgatccaaacccaccggctaaccttatcccattccaccgt

SEQ ID NO: 215936 - DNA, 51 bp, Artificial
  Synthetic oligonucleotide
gtccggcatcctttccggtataacccataaccaagaaggtaaacccgtctc

SEQ ID NO: 215937 - DNA, 52 bp, Artificial
  Synthetic oligonucleotide
tcctaccgggtttcaccggcagatgaagcctagaggatccaaccaaccttag

SEQ ID NO: 215938 - DNA, 52 bp, Artificial
  Synthetic oligonucleotide
attcgtgtgtcactcgcggaggaatttggtatgccgtttggtaccctaacac

SEQ ID NO: 215939 - DNA, 52 bp, Artificial
  Synthetic oligonucleotide
cggcttcatattaggctcatgctgacggatcccatccatataagcctcgtag

SEQ ID NO: 215940 - DNA, 52 bp, Artificial
  Synthetic oligonucleotide
tttcttgtctgtaagcaagatcggcaaatcctaatcgcggaccgtttgcgta

SEQ ID NO: 215941 - DNA, 52 bp, Artificial
  Synthetic oligonucleotide
tcgaatccacgagagcgcggtaataatccgttatgtattcctgaatcaccgg

SEQ ID NO: 215942 - DNA, 52 bp, Artificial
  Synthetic oligonucleotide
cccatccgatgcttacacctccgctccacagttctgccacgcttctcagcca

SEQ ID NO: 215943 - DNA, 52 bp, Artificial
  Synthetic oligonucleotide
ccccgcgctctagcgcccaaccattcccttatctcggcactcagtttggaca

SEQ ID NO: 215944 - DNA, 57 bp, Artificial
  Synthetic oligonucleotide
gctgtcgtctcccgatgctgtcagataactgtcgcaccccgtggttaccagttggct

SEQ ID NO: 215945 - DNA, 52 bp, Artificial
  Synthetic oligonucleotide
cgggagccttccatcgagtggcgtcccaaatccaaggaaccacctcgtagga

SEQ ID NO: 215946 - DNA, 52 bp, Artificial
  Synthetic oligonucleotide
tcttatgttcggtatcggttcgcgtatggaacggcatttggagaggcttgga

SEQ ID NO: 215947 - DNA, 52 bp, Artificial
  Synthetic oligonucleotide
gcgcggagttgtgcggtccttctcacggtttcatggaattccgggtgaaagc

SEQ ID NO: 215948 - DNA, 52 bp, Artificial
  Synthetic oligonucleotide
tccatcggccatatgcataaggcggcggatcaatttgaaagtcggtttgcaa

SEQ ID NO: 215949 - DNA, 52 bp, Artificial
  Synthetic oligonucleotide
cgaactgatgattcgcggccgactttccgtaccggtacaccttgtcaaagta

SEQ ID NO: 215950 - DNA, 52 bp, Artificial
  Synthetic oligonucleotide
tgctttgtctcacttacagcccaaatatcgctcgattatgatcttgcgttat

SEQ ID NO: 215951 - DNA, 52 bp, Artificial
  Synthetic oligonucleotide
aagaacgtctagtagagtaatccatccggattttctgcctttcacgccggtt

SEQ ID NO: 215952 - DNA, 52 bp, Artificial
  Synthetic oligonucleotide
tggtcccacatgttggtttaacgggaatgcttggcgaatcgcttctgtaatg

SEQ ID NO: 215953 - DNA, 52 bp, Artificial
  Synthetic oligonucleotide
aatcaacagcgctttactacaggattggaatccatcttacactgtctatccc

SEQ ID NO: 215954 - DNA, 52 bp, Artificial
  Synthetic oligonucleotide
tccgataccagctaccagcgtgacgcgaatattgcgggctgcgataatcccc

SEQ ID NO: 215955 - DNA, 57 bp, Artificial
  Synthetic oligonucleotide
aaccggcaaacgctaaaacggctgggcgattgtcacacacctatggagcctgacata

SEQ ID NO: 215956 - DNA, 52 bp, Artificial
  Synthetic oligonucleotide
ctggctcttgtccaaacagtccctttaacgcttctaaaacgtaataccaaaa

SEQ ID NO: 215957 - DNA, 52 bp, Artificial
  Synthetic oligonucleotide
ttccaaccggaggacctgcctccagctgcttcgtcaagatactcgcttccgg

SEQ ID NO: 215958 - DNA, 52 bp, Artificial
  Synthetic oligonucleotide
aaatagttggagcgcgataaagatggcgtctgtcatgattctccgttacccc

SEQ ID NO: 215959 - DNA, 51 bp, Artificial
  Synthetic oligonucleotide
tcgggtgttattagctttactgtaggcgggaaaagcatgatgcatgtgggt

SEQ ID NO: 215960 - DNA, 51 bp, Artificial
  Synthetic oligonucleotide
ttttgtagctcgggacaacgataagatgcggttgatgcatgacttatcgga

SEQ ID NO: 215961 - DNA, 51 bp, Artificial
  Synthetic oligonucleotide
tcactccggtaacccctatgagcggtacaaccgattcctatttgccgcttc

SEQ ID NO: 215962 - DNA, 51 bp, Artificial
  Synthetic oligonucleotide
ttcaaaggcatacctactcgtggattcatcatttatattcgtgtactgctg

SEQ ID NO: 215963 - DNA, 51 bp, Artificial
  Synthetic oligonucleotide
tgatgcttcacagtctcgtctccggtcttgaagagcaatactttcacggat

SEQ ID NO: 215964 - DNA, 51 bp, Artificial
  Synthetic oligonucleotide
tccgatgtctccgtcagctcaaggaaatcttggtaagatacccattctcct

SEQ ID NO: 215965 - DNA, 51 bp, Artificial
  Synthetic oligonucleotide
tataaatcagaatggtacggacgcacattgaaagtagccgacacctttgct

SEQ ID NO: 215966 - DNA, 57 bp, Artificial
  Synthetic oligonucleotide
gacttgtctcattttgacttggtcgcgtcgataacacgctggtttttggttatcgcg

SEQ ID NO: 215967 - DNA, 51 bp, Artificial
  Synthetic oligonucleotide
tttctccagtacggttgtacgcatggcttctaatcgaatgtacagcgaatt

SEQ ID NO: 215968 - DNA, 51 bp, Artificial
  Synthetic oligonucleotide
cgggttccctcgcactgccggataactgctgctcccaacgggtccagatgg

SEQ ID NO: 215969 - DNA, 51 bp, Artificial
  Synthetic oligonucleotide
tatacgagagaatgaccggaggacaaaaggagctacgtcgggaacagaaat

SEQ ID NO: 215970 - DNA, 51 bp, Artificial
  Synthetic oligonucleotide
gaacatgtgaatcgcatatccatacggattcaacgtccacactgcttgcaa

SEQ ID NO: 215971 - DNA, 51 bp, Artificial
  Synthetic oligonucleotide
tcccggattggggcgaagccaacgccaagctaacggcttaccatcactcgg

SEQ ID NO: 215972 - DNA, 51 bp, Artificial
  Synthetic oligonucleotide
ttaaagctcttgcggccatctggtaagctcgctgcacattaataagctccg

SEQ ID NO: 215973 - DNA, 51 bp, Artificial
  Synthetic oligonucleotide
cccgtaaggccgaagtgacgcagtaccgcgagcgacaactgaaacagcgaa

SEQ ID NO: 215974 - DNA, 49 bp, Artificial
  Synthetic oligonucleotide
ccccggtttagtctggaccggacctcctgaaacccggttgttaggctgg

SEQ ID NO: 215975 - DNA, 51 bp, Artificial
  Synthetic oligonucleotide
ccatagcggaggattaccttctacatgaagtgccgcaacatcaaattccga

SEQ ID NO: 215976 - DNA, 51 bp, Artificial
  Synthetic oligonucleotide
cattgggcttggcacacggattctccgtacagaaacggcagccatggtagg

SEQ ID NO: 215977 - DNA, 57 bp, Artificial
  Synthetic oligonucleotide
agttggctgtcgtcccctaaagctgccagtcggctgtcgtctcccgatgctgtcaga

SEQ ID NO: 215978 - DNA, 51 bp, Artificial
  Synthetic oligonucleotide
catgaacgggaggaacggcgaatacctggctctccgattttcgcggtgcct

SEQ ID NO: 215979 - DNA, 51 bp, Artificial
  Synthetic oligonucleotide
caggccagtacccctccggcaaacatttgacccgaaattctgggcccgata

SEQ ID NO: 215980 - DNA, 51 bp, Artificial
  Synthetic oligonucleotide
acccctacgccggcagaaggcatcgggaattgttgggaatggccggtttta

SEQ ID NO: 215981 - DNA, 51 bp, Artificial
  Synthetic oligonucleotide
attcaagggaggtacaaccgggtgtagcacttgtgtccatagggatcgtag

SEQ ID NO: 215982 - DNA, 51 bp, Artificial
  Synthetic oligonucleotide
atctccgcttaaagcgcacattcccgaacactgtgttgacgcttgtttcac

SEQ ID NO: 215983 - DNA, 51 bp, Artificial
  Synthetic oligonucleotide
atatgggtccgaagagttaaatacctctatgtcttcgcgtggataaccaac

SEQ ID NO: 215984 - DNA, 51 bp, Artificial
  Synthetic oligonucleotide
atagctccacggatggcctcccaatctggagttcccccgggtgtcagctgc

SEQ ID NO: 215985 - DNA, 51 bp, Artificial
  Synthetic oligonucleotide
aggaccatcctaggctagcgggatcgctggtcgacgagtggtgtgacgagc

SEQ ID NO: 215986 - DNA, 51 bp, Artificial
  Synthetic oligonucleotide
agcgggctcccttgcctttacggcggatttgatccagcaatttggtccgga

SEQ ID NO: 215987 - DNA, 51 bp, Artificial
  Synthetic oligonucleotide
agatcctctatttgtattcccaaaagacgagccatttggcagacttctgct

SEQ ID NO: 215988 - DNA, 56 bp, Artificial
  Synthetic oligonucleotide
cctgaagattgggaaatgaaattagaatcaattggtttgccgattgcaattagtcc

SEQ ID NO: 215989 - DNA, 51 bp, Artificial
  Synthetic oligonucleotide
accgtccaaccgcttggaaccttaagagacgacatccagtcattcggaatt

SEQ ID NO: 215990 - DNA, 51 bp, Artificial
  Synthetic oligonucleotide
agaagtccacgcaaccaaaattccgccattaaccttacttaatcgctagcc

SEQ ID NO: 215991 - DNA, 51 bp, Artificial
  Synthetic oligonucleotide
acggtgatttcgggctctacagttttgagcggcacggtaaactgcaacgta

SEQ ID NO: 215992 - DNA, 51 bp, Artificial
  Synthetic oligonucleotide
acattctaacgtttctgggtttgacgaaggaccagggtttcgcccaatggg

SEQ ID NO: 215993 - DNA, 51 bp, Artificial
  Synthetic oligonucleotide
ccgctcttaggaaaccgcccgtactcgccagcttagtggcgcgaaaccctt

SEQ ID NO: 215994 - DNA, 51 bp, Artificial
  Synthetic oligonucleotide
ccgtgctccgttaagtgagagtttcctttcaggctcccctctagctttcgt

SEQ ID NO: 215995 - DNA, 51 bp, Artificial
  Synthetic oligonucleotide
cctgcagccgtgcttaacgctccgccagaaacagcatacgggccaagtcgt

SEQ ID NO: 215996 - DNA, 51 bp, Artificial
  Synthetic oligonucleotide
aaaagtggtagccgggtacgtagcgcgagcacggttgcgtttcttttgccc

SEQ ID NO: 215997 - DNA, 51 bp, Artificial
  Synthetic oligonucleotide
cgggactggctttcgctaaagagcaggtgatccggcctaagcccgcttgaa

SEQ ID NO: 215998 - DNA, 51 bp, Artificial
  Synthetic oligonucleotide
aacgctcgtgccaacggtacccgaggatgggcttaatccggaaatcgaagg

SEQ ID NO: 215999 - DNA, 56 bp, Artificial
  Synthetic oligonucleotide
tcccattggaaaagcatcagatgtgggctccgcccgtaggtcttccacaacatgga

SEQ ID NO: 216000 - DNA, 51 bp, Artificial
  Synthetic oligonucleotide
aaacctcgacgaagtgttgataatcggatccccaagggtcttccataccgc

SEQ ID NO: 216001 - DNA, 51 bp, Artificial
  Synthetic oligonucleotide
cgatgcgaaaagactgctattgcaggatttcctaacaagaaatgaagagcg

SEQ ID NO: 216002 - DNA, 50 bp, Artificial
  Synthetic oligonucleotide
aacgtcccccggtaaacccagctccgtccgccatccgcagacgtggcgac

SEQ ID NO: 216003 - DNA, 50 bp, Artificial
  Synthetic oligonucleotide
tactgggtgtaacagcgactccggacaggggagacatgcggaacctgggc

SEQ ID NO: 216004 - DNA, 50 bp, Artificial
  Synthetic oligonucleotide
tactagcccgcctgtgattacgcctgctacccaaccacggcgaaacgcca

SEQ ID NO: 216005 - DNA, 50 bp, Artificial
  Synthetic oligonucleotide
aacgtctctttggaacaccgcagggttaacgggctgtccctcaggggcgg

SEQ ID NO: 216006 - DNA, 50 bp, Artificial
  Synthetic oligonucleotide
aacgtcttcactgatcaggcagagggcacggacggcaaaggcaccccgaa

SEQ ID NO: 216007 - DNA, 50 bp, Artificial
  Synthetic oligonucleotide
aacggactgcacgaagcgatcacagccgtaatcgcaggctacggggcaaa

SEQ ID NO: 216008 - DNA, 50 bp, Artificial
  Synthetic oligonucleotide
aactaccgagcgatgcggagccctgaaccgtaagcaggcccgtaaccgtc

SEQ ID NO: 216009 - DNA, 50 bp, Artificial
  Synthetic oligonucleotide
aactatgaggatggtagccttgcggcgtcccggaacggtcagcgggttcc

SEQ ID NO: 216010 - DNA, 55 bp, Artificial
  Synthetic oligonucleotide
agtcgataaaatccgtatgaagccatataccaaacggatgggcatagtgaattgg

SEQ ID NO: 216011 - DNA, 50 bp, Artificial
  Synthetic oligonucleotide
taaggcacagcgcgtacagcaaaccgttccgcttgtactaaccacccgct

SEQ ID NO: 216012 - DNA, 50 bp, Artificial
  Synthetic oligonucleotide
taaggaccaagggcagcctatgcagtttgtacggggcgacacggagcagg

SEQ ID NO: 216013 - DNA, 50 bp, Artificial
  Synthetic oligonucleotide
aactgcgctcggctcagtcggctggaattatgggatacgtcagctcgggg

SEQ ID NO: 216014 - DNA, 50 bp, Artificial
  Synthetic oligonucleotide
taaacgttggttcggaacgagtgacaacattaccgctgccaaatcgtaaa

SEQ ID NO: 216015 - DNA, 50 bp, Artificial
  Synthetic oligonucleotide
aagaaccggtatgccggtcgctggcaacgaacttgacacgcccgagctca

SEQ ID NO: 216016 - DNA, 50 bp, Artificial
  Synthetic oligonucleotide
aagaacgaaccctgacaggtccgcttgcaaatccaccgtacgccgcgccg

SEQ ID NO: 216017 - DNA, 50 bp, Artificial
  Synthetic oligonucleotide
aagaccctgcttgctcctcagccctgccacggacagggccataatgacgc

SEQ ID NO: 216018 - DNA, 50 bp, Artificial
  Synthetic oligonucleotide
aagacgtccggcaagcttttccggccaacggacagttcatcagacgccta

SEQ ID NO: 216019 - DNA, 50 bp, Artificial
  Synthetic oligonucleotide
tattcgcttttctcccctttacggtacccgccagccggatcgcacctccg

SEQ ID NO: 216020 - DNA, 50 bp, Artificial
  Synthetic oligonucleotide
aacggcaagtcccgtcacaagcagcagcgtcttagccctgtccgtgtagg

SEQ ID NO: 216021 - DNA, 60 bp, Artificial
  Synthetic oligonucleotide
agggaaaattgtgacttatgatgtgcggagatatatgaatgatgttgtagaaaatcataa

SEQ ID NO: 216022 - DNA, 55 bp, Artificial
  Synthetic oligonucleotide
ctcggcagttaagcctgcgattgccgattccagagaagcatgtacgctctcaaag

SEQ ID NO: 216023 - DNA, 50 bp, Artificial
  Synthetic oligonucleotide
aacggcagagatgacgcttgctttggagcgagaggctaggtccgcaggcg

SEQ ID NO: 216024 - DNA, 50 bp, Artificial
  Synthetic oligonucleotide
aacggccggatgaaccccgtgaaggctctctcccgggctttactgccgtg

SEQ ID NO: 216025 - DNA, 50 bp, Artificial
  Synthetic oligonucleotide
aacggccgttcacggatatcgctaaggacgcgtggtatgccgctgagctc

SEQ ID NO: 216026 - DNA, 50 bp, Artificial
  Synthetic oligonucleotide
tcaacggggtaactgccgtgtggcatcacaaaaatagggcgccttccccc

SEQ ID NO: 216027 - DNA, 50 bp, Artificial
  Synthetic oligonucleotide
aacggcgcagcacccttacccgagcgaccgctgggttcggtccatgacac

SEQ ID NO: 216028 - DNA, 50 bp, Artificial
  Synthetic oligonucleotide
aacggagttgccgtctgggtacgtggagccttgaccgtacatcggccagt

SEQ ID NO: 216029 - DNA, 50 bp, Artificial
  Synthetic oligonucleotide
taggtggtcaccttccgccgtatggaataagccggcatggataagcggcc

SEQ ID NO: 216030 - DNA, 50 bp, Artificial
  Synthetic oligonucleotide
tcacgaatggacccacgaagggttaccttggttgggacctacgcgagggg

SEQ ID NO: 216031 - DNA, 50 bp, Artificial
  Synthetic oligonucleotide
aacggtgaaggacctcaatcatcgtccgccaagcgagcgggtcaagccct

SEQ ID NO: 216032 - DNA, 50 bp, Artificial
  Synthetic oligonucleotide
tcacgatacacggggaacgggtctggctaatgtagtagcggccctgcacc

SEQ ID NO: 216033 - DNA, 55 bp, Artificial
  Synthetic oligonucleotide
agtacgacaggcgatagggtctcctttatcgttcgggccagattatccttgcccg

SEQ ID NO: 216034 - DNA, 50 bp, Artificial
  Synthetic oligonucleotide
aacggaggcactccctccatactgcggtcatagctcaccctcccaccgac

SEQ ID NO: 216035 - DNA, 50 bp, Artificial
  Synthetic oligonucleotide
taggagggcggctcctttattcccaacgcttagcagctcaagcggggttt

SEQ ID NO: 216036 - DNA, 50 bp, Artificial
  Synthetic oligonucleotide
aacggtgttagcgcaccgccgactgtcacgtttggagccgcgactacaca

SEQ ID NO: 216037 - DNA, 50 bp, Artificial
  Synthetic oligonucleotide
tagctggacccgtgcctccgtagaatatgcttgggcacatccggaagcgt

SEQ ID NO: 216038 - DNA, 50 bp, Artificial
  Synthetic oligonucleotide
aacgtacggcagtaagtccgcacgggaggccccttcccgatgagtccttg

SEQ ID NO: 216039 - DNA, 50 bp, Artificial
  Synthetic oligonucleotide
aacggagagcttgaccgtgttcctgcagcaattgggccggggacttcgct

SEQ ID NO: 216040 - DNA, 50 bp, Artificial
  Synthetic oligonucleotide
aacggagaagcggctaaggcacggacgaaccagcgccccgtcgtgttccc

SEQ ID NO: 216041 - DNA, 50 bp, Artificial
  Synthetic oligonucleotide
tagccggcgcccacccttttacgttggcaagcgttatgctgacgaccaca

SEQ ID NO: 216042 - DNA, 50 bp, Artificial
  Synthetic oligonucleotide
aagccgcttgccggacttatactcgtacgcccgtaccatcaacgccgcca

SEQ ID NO: 216043 - DNA, 50 bp, Artificial
  Synthetic oligonucleotide
aagccggatgcaggattgcggagtggccggatagagaccgctgtcacccg

SEQ ID NO: 216044 - DNA, 55 bp, Artificial
  Synthetic oligonucleotide
agtaacggtccacaacctgcgtatgctccgctggggccagagcacgcccgaagca

SEQ ID NO: 216045 - DNA, 50 bp, Artificial
  Synthetic oligonucleotide
aagccggtcgtgctggcagtatggctaccgtcaaacgctgggcagatcaa

SEQ ID NO: 216046 - DNA, 50 bp, Artificial
  Synthetic oligonucleotide
aagcctaccgccgtgtaacgtgggatgcttcggcgtacaagggagagctc

SEQ ID NO: 216047 - DNA, 50 bp, Artificial
  Synthetic oligonucleotide
aagcctacgcagcccccggtccatttgggtgcgccgtccacgtaaggagc

SEQ ID NO: 216048 - DNA, 50 bp, Artificial
  Synthetic oligonucleotide
aagcctgacggaacaggcactcccccgctccagccgattacggtggccag

SEQ ID NO: 216049 - DNA, 50 bp, Artificial
  Synthetic oligonucleotide
aagcctggttaatgccgggcaactgcttggagggttggaagccgggagtg

SEQ ID NO: 216050 - DNA, 50 bp, Artificial
  Synthetic oligonucleotide
aagccttccctaacgcgcgtccgaattggtcgttcgtaaccggttcggga

SEQ ID NO: 216051 - DNA, 50 bp, Artificial
  Synthetic oligonucleotide
aagcgagcacaacggagggtgtgacgtggaacctgggtcgtcttcccttt

SEQ ID NO: 216052 - DNA, 50 bp, Artificial
  Synthetic oligonucleotide
ggtatatgagacgccgggcggaacgattctgttcacggctcatcgcaaaa

SEQ ID NO: 216053 - DNA, 50 bp, Artificial
  Synthetic oligonucleotide
aagcgagtgaccaatcaggccaaacccggttacgtccgtgcacgcatgca

SEQ ID NO: 216054 - DNA, 50 bp, Artificial
  Synthetic oligonucleotide
aagcgcgttgctcagagcccgtccgggggccgtcagcatgcttccgttgg

SEQ ID NO: 216055 - DNA, 55 bp, Artificial
  Synthetic oligonucleotide
agggttggacttttaccaagtgcgacaaaccctgcattaacttctgtacgtgcca

SEQ ID NO: 216056 - DNA, 50 bp, Artificial
  Synthetic oligonucleotide
aagcggcggttattttaagcgagcattcccgcagggctcagttccagccg

SEQ ID NO: 216057 - DNA, 50 bp, Artificial
  Synthetic oligonucleotide
aagcggctttacggtttggagcacgccagcctccagataggaactgccga

SEQ ID NO: 216058 - DNA, 50 bp, Artificial
  Synthetic oligonucleotide
aagcggggcgaaacgcgatatacgctgcggctaattccagcgggcggatt

SEQ ID NO: 216059 - DNA, 50 bp, Artificial
  Synthetic oligonucleotide
aagcgtacccgatcccaacggggccagacggcaaagcgggaagacacggc

SEQ ID NO: 216060 - DNA, 50 bp, Artificial
  Synthetic oligonucleotide
aagcgtcagactgatcagcatccgcacccataacggaagccggacctccg

SEQ ID NO: 216061 - DNA, 50 bp, Artificial
  Synthetic oligonucleotide
aagcgtgtcgcttactctctccccgctgttgtcggttcttacgggccgca

SEQ ID NO: 216062 - DNA, 50 bp, Artificial
  Synthetic oligonucleotide
ggggcccctccaattcaacagccgccggcatgtgataagctagctgtgct

SEQ ID NO: 216063 - DNA, 50 bp, Artificial
  Synthetic oligonucleotide
aagctagccccgcaaggtgctgtaacggagcgggtagttgacgctgaacg

SEQ ID NO: 216064 - DNA, 50 bp, Artificial
  Synthetic oligonucleotide
aagactccgccaaccgcgagcggaacagcaaggatgtaccagccccatac

SEQ ID NO: 216065 - DNA, 50 bp, Artificial
  Synthetic oligonucleotide
aagagacgctgtcgccaccggggacccgttcagatggctccctcgaacac

SEQ ID NO: 216066 - DNA, 55 bp, Artificial
  Synthetic oligonucleotide
ctctatcggacccggtagtcatcggcgtgtatcagccgatactcagcgtaaccaa

SEQ ID NO: 216067 - DNA, 50 bp, Artificial
  Synthetic oligonucleotide
aagagcccccgggatcaagggaacacgctggcctataaaggattggggct

SEQ ID NO: 216068 - DNA, 50 bp, Artificial
  Synthetic oligonucleotide
aagcaccctccagaacggacttcgcgcatagacctccgggcaaatcccgt

SEQ ID NO: 216069 - DNA, 50 bp, Artificial
  Synthetic oligonucleotide
aagcacgcatcttctagccggtgaaagtccggtcgcgggaagggccaagc

SEQ ID NO: 216070 - DNA, 50 bp, Artificial
  Synthetic oligonucleotide
aagcagcggatctggttctggaccgcactggtactctggtacgcggctga

SEQ ID NO: 216071 - DNA, 50 bp, Artificial
  Synthetic oligonucleotide
aagcagctgggagccattcacgcaaggcggagcggcaacgttccaaacgg

SEQ ID NO: 216072 - DNA, 50 bp, Artificial
  Synthetic oligonucleotide
aagcaggggatggggcggccggtacacgcttacgagctgacgaggcttgc

SEQ ID NO: 216073 - DNA, 50 bp, Artificial
  Synthetic oligonucleotide
aagcatacgggcaccgattcccctatcacgcatgtcatcggggacgtgga

SEQ ID NO: 216074 - DNA, 50 bp, Artificial
  Synthetic oligonucleotide
aagcatgatagatgccgggctctgccccggtttcatcccgccaatccggc

SEQ ID NO: 216075 - DNA, 50 bp, Artificial
  Synthetic oligonucleotide
aagccacagcgtaaggcagtccaccactacggccggagcatctgaaaccg

SEQ ID NO: 216076 - DNA, 50 bp, Artificial
  Synthetic oligonucleotide
aagccaccggggtcggagacaatgagcggcaccttcgcgcttccttcata

SEQ ID NO: 216077 - DNA, 55 bp, Artificial
  Synthetic oligonucleotide
ctctgttcacgtatccatcaatacgtgttccggttaacgctggaaaggcggcaga

SEQ ID NO: 216078 - DNA, 50 bp, Artificial
  Synthetic oligonucleotide
aagccagctccgtgcgattcagtaagttcccgggtggttagccggcagat

SEQ ID NO: 216079 - DNA, 50 bp, Artificial
  Synthetic oligonucleotide
aagccagtaaggtcgcttgctcgttgaaagcgtcgagcagaggctccccc

SEQ ID NO: 216080 - DNA, 50 bp, Artificial
  Synthetic oligonucleotide
aagcccacttcgagcggggtgatctcaggtcccaattcctggccgtacag

SEQ ID NO: 216081 - DNA, 50 bp, Artificial
  Synthetic oligonucleotide
aagcccctacaaacgcgccatccagacgatcgaaggcctggcagacttgc

SEQ ID NO: 216082 - DNA, 50 bp, Artificial
  Synthetic oligonucleotide
aagccctgatgagtcgcgcctccgatcggttcccccgtaaccggctcgaa

SEQ ID NO: 216083 - DNA, 50 bp, Artificial
  Synthetic oligonucleotide
aagccctgcggaattggggctggttaagccgatccaccgggccaaagtaa

SEQ ID NO: 216084 - DNA, 50 bp, Artificial
  Synthetic oligonucleotide
aagccgagccgatgaatctcgtgctgcttcctccccatgcggaacggacg

SEQ ID NO: 216085 - DNA, 50 bp, Artificial
  Synthetic oligonucleotide
aagccgattccatgcgttcagccctggaacagtcttttgctcggggtgcg

SEQ ID NO: 216086 - DNA, 50 bp, Artificial
  Synthetic oligonucleotide
gtattcacccgtaatttgggcatcagcatttcaaacaacgtcggtcacct

SEQ ID NO: 216087 - DNA, 50 bp, Artificial
  Synthetic oligonucleotide
aaatcgcttgcaccggaccgcatccaagcaccctcgccgcttgaataagc

SEQ ID NO: 216088 - DNA, 55 bp, Artificial
  Synthetic oligonucleotide
ctctttctccgccaagtttaaaccactccgcttggcataaggaggctctacgttg

SEQ ID NO: 216089 - DNA, 50 bp, Artificial
  Synthetic oligonucleotide
aaatcggggtatcgcctgctggttgcccctgatcgcttgtccgcagcaga

SEQ ID NO: 216090 - DNA, 50 bp, Artificial
  Synthetic oligonucleotide
tgtcgagataagagcttcgatcgtcatccgggatgtctacctgcttgagc

SEQ ID NO: 216091 - DNA, 50 bp, Artificial
  Synthetic oligonucleotide
aaatggtcgtaagccgccctagctcggtcggtcgtccgatcccgccaatc

SEQ ID NO: 216092 - DNA, 50 bp, Artificial
  Synthetic oligonucleotide
tgtaaatggggaacggcaaatgacaccctacccagtgttgagtttagtag

SEQ ID NO: 216093 - DNA, 50 bp, Artificial
  Synthetic oligonucleotide
aacaacagcggtggcggtattaccacaatagcgggagggaccaggctcgg

SEQ ID NO: 216094 - DNA, 50 bp, Artificial
  Synthetic oligonucleotide
aacaagccgcttatagccgtccggcccccgtattcgggagaaccttccct

SEQ ID NO: 216095 - DNA, 50 bp, Artificial
  Synthetic oligonucleotide
aacaaggtccgcaatatggcggagcgggtctaccatcccgaacgggtgct

SEQ ID NO: 216096 - DNA, 50 bp, Artificial
  Synthetic oligonucleotide
aacacccggtcctcaatcgccgccgtacctagaatgacccggctcacgcc

SEQ ID NO: 216097 - DNA, 50 bp, Artificial
  Synthetic oligonucleotide
aacacgcctgtggcccttaccgagacggccatgtatcaccacatgaccga

SEQ ID NO: 216098 - DNA, 50 bp, Artificial
  Synthetic oligonucleotide
aacagcaatgacgatggcagtcgccacgcccgaaacatctgcggaaggct

SEQ ID NO: 216099 - DNA, 53 bp, Artificial
  Synthetic oligonucleotide
agcgaaaggaatttaaggagttgacaattttgctacacccgaaccctcttggc

SEQ ID NO: 216100 - DNA, 50 bp, Artificial
  Synthetic oligonucleotide
aacagcggccaagccccatggtccatccatacccgcggaatattgttgcg

SEQ ID NO: 216101 - DNA, 50 bp, Artificial
  Synthetic oligonucleotide
aacagggatcgattaggaggggctggcattggaccccggctgggtacatt

SEQ ID NO: 216102 - DNA, 50 bp, Artificial
  Synthetic oligonucleotide
aacagtagcgggcgacgtgaagagcacgctggcaaaagcaattccgctcg

SEQ ID NO: 216103 - DNA, 50 bp, Artificial
  Synthetic oligonucleotide
aaccaaggcggggtacgaaactcacggcgtcgcgtcaagagaacagcctt

SEQ ID NO: 216104 - DNA, 50 bp, Artificial
  Synthetic oligonucleotide
aaccaccggactggaccaaagtggttatggcacttcggccaaccagccgt

SEQ ID NO: 216105 - DNA, 50 bp, Artificial
  Synthetic oligonucleotide
aaccaggtcgttaccacgtccgaacggctgtcagcgggtgcgaagcaaac

SEQ ID NO: 216106 - DNA, 50 bp, Artificial
  Synthetic oligonucleotide
aaccccacgatcgacagctggtcaggaaccgcaacctccatgcgcagtgc

SEQ ID NO: 216107 - DNA, 50 bp, Artificial
  Synthetic oligonucleotide
aaccccagttggagaagcctgtgtagttcggcgtgccaggcaaagcgtta

SEQ ID NO: 216108 - DNA, 50 bp, Artificial
  Synthetic oligonucleotide
aaaagcagcacaaccgccgaaccccatagccataagacagcgtcgccggt

SEQ ID NO: 216109 - DNA, 50 bp, Artificial
  Synthetic oligonucleotide
aaaagtggtagccgctacgtcgcatgggcacggttgcgtttcttttgccc

SEQ ID NO: 216110 - DNA, 55 bp, Artificial
  Synthetic oligonucleotide
ctgcccattcttcacgaatacgccggtcgtgaatttcgatacggccaagacgagt

SEQ ID NO: 216111 - DNA, 50 bp, Artificial
  Synthetic oligonucleotide
aaacccgcgcggtagaggagccaagcagccagacggttattcgggggccg

SEQ ID NO: 216112 - DNA, 50 bp, Artificial
  Synthetic oligonucleotide
aaaccgccagaatgtccggtgacaacagatcggtccgcgttccaagccgc

SEQ ID NO: 216113 - DNA, 50 bp, Artificial
  Synthetic oligonucleotide
aaaccgggaagtgggtcactggagccggtatccccgatggattcggagga

SEQ ID NO: 216114 - DNA, 50 bp, Artificial
  Synthetic oligonucleotide
aaacgcccgctgccacggatgcgttcagggaattaagacggccgtgcatc

SEQ ID NO: 216115 - DNA, 50 bp, Artificial
  Synthetic oligonucleotide
aaacgccgacgccccaagcttcatggctggttacgctatccgctacctta

SEQ ID NO: 216116 - DNA, 50 bp, Artificial
  Synthetic oligonucleotide
aaacgcgccatccagacgatcgaaggcctggcagacttgcttggcatcga

SEQ ID NO: 216117 - DNA, 50 bp, Artificial
  Synthetic oligonucleotide
aaactgttccacgctccgcagccgggacatttgccgagccacttcggggt

SEQ ID NO: 216118 - DNA, 50 bp, Artificial
  Synthetic oligonucleotide
aaagaggccgtccatgaagcgtccgaaagactgtccgcccagggggccgc

SEQ ID NO: 216119 - DNA, 50 bp, Artificial
  Synthetic oligonucleotide
aaagcatcccacgtcgttttgcggatcaccgtgtcatcttcacgccgcgc

SEQ ID NO: 216120 - DNA, 50 bp, Artificial
  Synthetic oligonucleotide
aaagccaatccccgttcgtccgccggataagcggatcgtaccgttccacg

SEQ ID NO: 216121 - DNA, 55 bp, Artificial
  Synthetic oligonucleotide
caaacacaggtttgccatggagcgaaccgcgatcatgtcattgatgaccaccggc

SEQ ID NO: 216122 - DNA, 50 bp, Artificial
  Synthetic oligonucleotide
aaagcgccgtatcattacggctgggattgggggccgcgctttgtgaccag

SEQ ID NO: 216123 - DNA, 50 bp, Artificial
  Synthetic oligonucleotide
aaagctggttcccgggaccgtatgggatgaatcggctagcggccagactt

SEQ ID NO: 216124 - DNA, 50 bp, Artificial
  Synthetic oligonucleotide
aaaggcggcacgtagactctccggcagatccatgccccttcgcctacgga

SEQ ID NO: 216125 - DNA, 50 bp, Artificial
  Synthetic oligonucleotide
aaagtatccttcaggccgtgagcgccaaacgccccgagagctacggctaa

SEQ ID NO: 216126 - DNA, 50 bp, Artificial
  Synthetic oligonucleotide
aaagttgcctaaccaccgtatgcagcccccgtcccccgctgagctcatca

SEQ ID NO: 216127 - DNA, 50 bp, Artificial
  Synthetic oligonucleotide
aaatcacctccagactgaccgacgcctccaacgtccgagacgcgctctcc

SEQ ID NO: 216128 - DNA, 50 bp, Artificial
  Synthetic oligonucleotide
aaatcctctccgtcatgcttttcgccccgcccggctttaagcccaaacgg

SEQ ID NO: 216129 - DNA, 50 bp, Artificial
  Synthetic oligonucleotide
aaccgtcgagcgggtacttagttctacagccgtccgtagcgcccgcatgc

SEQ ID NO: 216130 - DNA, 50 bp, Artificial
  Synthetic oligonucleotide
tccgtacataactgaggggacttccgcattccttgtgaatataacgcatg

SEQ ID NO: 216131 - DNA, 50 bp, Artificial
  Synthetic oligonucleotide
aaccgttacgtgaccgtgggatacgagctgacgtgcaccagcacgggagt

SEQ ID NO: 216132 - DNA, 58 bp, Artificial
  Synthetic oligonucleotide
gcttgatgagggagttcgaaaggtgtctcttcctttacttgatactatagaaacatcg

SEQ ID NO: 216133 - DNA, 55 bp, Artificial
  Synthetic oligonucleotide
attgccaaggagtacatctccttaccagacgctgcattcgtctcctgtttagccg

SEQ ID NO: 216134 - DNA, 50 bp, Artificial
  Synthetic oligonucleotide
aacgaacagacgggggcgatgtaccacgaatacaccggcgttctgccgca

SEQ ID NO: 216135 - DNA, 50 bp, Artificial
  Synthetic oligonucleotide
aacgaagcgggagcagttgcccgaactaaggcggattccctggacggaag

SEQ ID NO: 216136 - DNA, 50 bp, Artificial
  Synthetic oligonucleotide
aacgaccgatggagccattcatggcacggcaacgcaaggggacgatgtgt

SEQ ID NO: 216137 - DNA, 50 bp, Artificial
  Synthetic oligonucleotide
tcccttacgaagacggtcataggccgcaacgatagtgggcgtctgagcgg

SEQ ID NO: 216138 - DNA, 50 bp, Artificial
  Synthetic oligonucleotide
aacgacttctccacctcttgctcgatccgcacacgcagcgttgcctcgtc

SEQ ID NO: 216139 - DNA, 50 bp, Artificial
  Synthetic oligonucleotide
tcccctatcaaataccgaatcgcttcatgggaaacggtcccttccggaag

SEQ ID NO: 216140 - DNA, 50 bp, Artificial
  Synthetic oligonucleotide
aacgatgccggccgctctcgcatcccaatcaagtttcggatcttgtgcgg

SEQ ID NO: 216141 - DNA, 50 bp, Artificial
  Synthetic oligonucleotide
aacgccggctttagcggccaatacgacaagagcgccttccgtcggatctc

SEQ ID NO: 216142 - DNA, 50 bp, Artificial
  Synthetic oligonucleotide
aacgcctgacttgccctggcccgctctgagccggactgtcgctcttgcca

SEQ ID NO: 216143 - DNA, 50 bp, Artificial
  Synthetic oligonucleotide
aacgcgaacagggacaagggtgcgtccgttggagatgagcggaggaactt

SEQ ID NO: 216144 - DNA, 55 bp, Artificial
  Synthetic oligonucleotide
attcgtataggttacatcaagcggtcgtctgttcacggcctgtcacttcctctcc

SEQ ID NO: 216145 - DNA, 50 bp, Artificial
  Synthetic oligonucleotide
aacgcgaaccgattaaactcggtggccatcccgggcgttggaacaaccac

SEQ ID NO: 216146 - DNA, 50 bp, Artificial
  Synthetic oligonucleotide
aacgcggcttccgtcatgttgagtcgggaccgctggtacggagctcctac

SEQ ID NO: 216147 - DNA, 50 bp, Artificial
  Synthetic oligonucleotide
aacgctccgcacggcggattcgggatataccccctgggaggcatactcga

SEQ ID NO: 216148 - DNA, 50 bp, Artificial
  Synthetic oligonucleotide
tccacctgctagagcggcttgggtgattgtatgatgtggcgcacgcaggg

SEQ ID NO: 216149 - DNA, 50 bp, Artificial
  Synthetic oligonucleotide
tccaaatactcccggcagatcatgccccagcggccaaaacctaccccgat

SEQ ID NO: 216150 - DNA, 50 bp, Artificial
  Synthetic oligonucleotide
aacgctggaggatcggtcgcagtttccgttcgcgatccgtctgatgagcg

SEQ ID NO: 216151 - DNA, 50 bp, Artificial
  Synthetic oligonucleotide
tctggtcatagcactgcagccaggagtccgcttcctgcgaaactcccaga

SEQ ID NO: 216152 - DNA, 50 bp, Artificial
  Synthetic oligonucleotide
aaccccatagccagcggccccaagagccttccaccagttgtaatcgcccc

SEQ ID NO: 216153 - DNA, 50 bp, Artificial
  Synthetic oligonucleotide
aaccccggggctggtggaaaatttgtgcttgcccgttctgcgaacttcgg

SEQ ID NO: 216154 - DNA, 50 bp, Artificial
  Synthetic oligonucleotide
aaccctcgaactgcaattccgtaaacttgggtaccggcggaggcccgcct

SEQ ID NO: 216155 - DNA, 55 bp, Artificial
  Synthetic oligonucleotide
attccttgcaagacctcttttagcttccgattaatcatagcgacatcattcgcat

SEQ ID NO: 216156 - DNA, 50 bp, Artificial
  Synthetic oligonucleotide
aaccctgcagcgggtaaggcgggaaggatgaagcttggggttgggccatc

SEQ ID NO: 216157 - DNA, 50 bp, Artificial
  Synthetic oligonucleotide
aacccttacgtgaatggaaccgtacactgggacgcaggaggacacgcgga

SEQ ID NO: 216158 - DNA, 50 bp, Artificial
  Synthetic oligonucleotide
aaccgaccccaagcaactggcgggcacagtacaatttgggtgacctgctg

SEQ ID NO: 216159 - DNA, 50 bp, Artificial
  Synthetic oligonucleotide
aaccgacggatcctccaacagccattgcgctccattggacagcgggtcta

SEQ ID NO: 216160 - DNA, 50 bp, Artificial
  Synthetic oligonucleotide
aaccgatgagctcagcttccagcgggtacgccatgtgctgcaacccccat

SEQ ID NO: 216161 - DNA, 50 bp, Artificial
  Synthetic oligonucleotide
aaccgcaaaccaccatcgctctctcgccctattcgccatcctcagcgtcg

SEQ ID NO: 216162 - DNA, 50 bp, Artificial
  Synthetic oligonucleotide
aaccgcagcggtacaaacacgcgctcctgcttaacccgggctggaacatc

SEQ ID NO: 216163 - DNA, 50 bp, Artificial
  Synthetic oligonucleotide
aaccgccaaggtaagacgcttggggcggaaggcccagacgaacgtccagc

SEQ ID NO: 216164 - DNA, 50 bp, Artificial
  Synthetic oligonucleotide
tcggcgtgaaatcgatgacggcaggcgactttgagggtactggggtcgat

SEQ ID NO: 216165 - DNA, 50 bp, Artificial
  Synthetic oligonucleotide
aaccgccatttgaccgtcccgctgataattgcggaccggcgcataagggc

SEQ ID NO: 216166 - DNA, 55 bp, Artificial
  Synthetic oligonucleotide
ctcagcagcggcacgacagaagaaaacgaaaagcagatctagtggcatggagttg

SEQ ID NO: 216167 - DNA, 50 bp, Artificial
  Synthetic oligonucleotide
aaccgcggatgttaacttcgcttgccgggtggaacatggccgtctgtgcc

SEQ ID NO: 216168 - DNA, 49 bp, Artificial
  Synthetic oligonucleotide
aaccggccccgctgtacctgacgaccactaccttcccccgcgtaaaacc

SEQ ID NO: 216169 - DNA, 50 bp, Artificial
  Synthetic oligonucleotide
aaccggcggtccgcacgagagaaaggacgggatcagatgacagtggagca

SEQ ID NO: 216170 - DNA, 50 bp, Artificial
  Synthetic oligonucleotide
aaccgggacttgccggttacgtgggaagagacgctgtcgccaccggggac

SEQ ID NO: 216171 - DNA, 47 bp, Artificial
  Synthetic oligonucleotide
aaccggtcctggcttcgacgggggacgttttcccgggtttacattgg

SEQ ID NO: 216172 - DNA, 50 bp, Artificial
  Synthetic oligonucleotide
aaccgtcgaccgcgccttgcctcccgcatatcgcacatcgcgcaccccaa

SEQ ID NO: 216173 - DNA, 50 bp, Artificial
  Synthetic oligonucleotide
accctggtagctggagcacagcgcacgcaaactcaccgcgagctttggtc

SEQ ID NO: 216174 - DNA, 50 bp, Artificial
  Synthetic oligonucleotide
accgatgcagccaaactatccaccgccacgggtaagccccttgcaaccga

SEQ ID NO: 216175 - DNA, 50 bp, Artificial
  Synthetic oligonucleotide
accgcatccctgaacccgttctctacggaacggccagccgacagcgatga

SEQ ID NO: 216176 - DNA, 50 bp, Artificial
  Synthetic oligonucleotide
accgccactacggatctgttgctgacgcctacgccaggagccatagtggg

SEQ ID NO: 216177 - DNA, 54 bp, Artificial
  Synthetic oligonucleotide
atgtaacagggttcaattaaaagagggaaacgtatcattagccctataaactgc

SEQ ID NO: 216178 - DNA, 50 bp, Artificial
  Synthetic oligonucleotide
accgtccagggagctgggtcagcgcttgttttccacagcccttcactcgc

SEQ ID NO: 216179 - DNA, 50 bp, Artificial
  Synthetic oligonucleotide
gacggcaagagcgccggtagttgggtctgcctcctgacctccgtgaagag

SEQ ID NO: 216180 - DNA, 50 bp, Artificial
  Synthetic oligonucleotide
acctatgcaccttgcgctcgtttggtgtcccgtatatggctccgctggcc

SEQ ID NO: 216181 - DNA, 50 bp, Artificial
  Synthetic oligonucleotide
acctctacgcggccgttgcagctcccttgactgcgccacgctctttctcc

SEQ ID NO: 216182 - DNA, 50 bp, Artificial
  Synthetic oligonucleotide
acctctcctgtcacttgtccccgggcagcaacgatcgattggcgctcctc

SEQ ID NO: 216183 - DNA, 50 bp, Artificial
  Synthetic oligonucleotide
gaccagatagcatccgattgacgcgatcgtaaataggatcagggcaggta

SEQ ID NO: 216184 - DNA, 50 bp, Artificial
  Synthetic oligonucleotide
gaccaaagccgtcgcgtttccgcggcaaattgccatgtacttgtcccgcg

SEQ ID NO: 216185 - DNA, 50 bp, Artificial
  Synthetic oligonucleotide
acgcagccaactcaaacggtcgccgagacaaaggttcccgacaagcccca

SEQ ID NO: 216186 - DNA, 50 bp, Artificial
  Synthetic oligonucleotide
acgccgctgtaagcttggctaagcctggccgggtctgctcggttgtcaga

SEQ ID NO: 216187 - DNA, 50 bp, Artificial
  Synthetic oligonucleotide
acgcctgagagggtccgtgcaaacccaaggtacgatcaacgccgagcgag

SEQ ID NO: 216188 - DNA, 55 bp, Artificial
  Synthetic oligonucleotide
atgcgaatcggagcaatgtgacccgtacacaagcgtattatgactgctataagtc

SEQ ID NO: 216189 - DNA, 50 bp, Artificial
  Synthetic oligonucleotide
acgctgttccgcgtacaagtgtgggggatgcctctccgctgtccaacgta

SEQ ID NO: 216190 - DNA, 50 bp, Artificial
  Synthetic oligonucleotide
acggagcccgccagcctgtacgttgtcttaaccaaagttcccgcaccaga

SEQ ID NO: 216191 - DNA, 50 bp, Artificial
  Synthetic oligonucleotide
acggagcccggctgcaagtggcgagtcccaacggcctcatccgctagtat

SEQ ID NO: 216192 - DNA, 50 bp, Artificial
  Synthetic oligonucleotide
acggattccgacccaaacggagcgcacaccacgcgatgaaacgaagccaa

SEQ ID NO: 216193 - DNA, 50 bp, Artificial
  Synthetic oligonucleotide
acggcgactgccaagccgagcggttacgcctgagagggtccgtgcaaacc

SEQ ID NO: 216194 - DNA, 50 bp, Artificial
  Synthetic oligonucleotide
acagccaaagctgcgggtcctaccgtacctgccgttaccggagaggaggg

SEQ ID NO: 216195 - DNA, 50 bp, Artificial
  Synthetic oligonucleotide
acagctcccgaggaaggtgccaatacgtccggcgcgagggggtgttttta

SEQ ID NO: 216196 - DNA, 50 bp, Artificial
  Synthetic oligonucleotide
acagctcccggccagccgtggccataaccgccaacaggacctgtcatttc

SEQ ID NO: 216197 - DNA, 50 bp, Artificial
  Synthetic oligonucleotide
acagcttccaggtatccgcggtgaacaatgcggggcaggagtctccgctg

SEQ ID NO: 216198 - DNA, 50 bp, Artificial
  Synthetic oligonucleotide
acaggctccgcagcaagcggttgggtttacagtggtcgagcatggaccga

SEQ ID NO: 216199 - DNA, 55 bp, Artificial
  Synthetic oligonucleotide
atgaggtataccttctatagttgaatagtcgacgaagcgaagttcatcgtctagg

SEQ ID NO: 216200 - DNA, 50 bp, Artificial
  Synthetic oligonucleotide
acagggcatgtcggcggattagccgtgagcggccgttacttgtgggcgac

SEQ ID NO: 216201 - DNA, 50 bp, Artificial
  Synthetic oligonucleotide
acagggcgacgtaccttccaatgcgcggatcgtcccattcctagcgctta

SEQ ID NO: 216202 - DNA, 50 bp, Artificial
  Synthetic oligonucleotide
acagtatgccgcgtgtctcagccgtctcatccggacctgaggccgacaat

SEQ ID NO: 216203 - DNA, 50 bp, Artificial
  Synthetic oligonucleotide
accaagggcgaccctgtgccgtgatccaggtgtatccgggcgcggtggga

SEQ ID NO: 216204 - DNA, 50 bp, Artificial
  Synthetic oligonucleotide
accacgtccgaacggctgtcagcgggtgcgaagcaaacggtggacacgat

SEQ ID NO: 216205 - DNA, 50 bp, Artificial
  Synthetic oligonucleotide
accaggagagtggccgcaaggacttggaacggtacgccccgaaggtgatt

SEQ ID NO: 216206 - DNA, 49 bp, Artificial
  Synthetic oligonucleotide
acccccaccggggttctcaccctcctgggaacgcaaaaacactctccgt

SEQ ID NO: 216207 - DNA, 50 bp, Artificial
  Synthetic oligonucleotide
acccccgtaccattgttcgggtggaagtccctcgccaaattggaagggga

SEQ ID NO: 216208 - DNA, 50 bp, Artificial
  Synthetic oligonucleotide
accccgttgcgatgcgccaacagcttgcgataccacggctgcacctgcat

SEQ ID NO: 216209 - DNA, 50 bp, Artificial
  Synthetic oligonucleotide
gagggccataccgtctgccgggcgggtgaatcgttcatgccatttccccc

SEQ ID NO: 216210 - DNA, 55 bp, Artificial
  Synthetic oligonucleotide
ctcatccgtttgtgtgccgcgtacttgagccagatacagacccaacagataaaac

SEQ ID NO: 216211 - DNA, 50 bp, Artificial
  Synthetic oligonucleotide
acccgccaagccttgatacgggcagcccaggaggcaacatcggattacga

SEQ ID NO: 216212 - DNA, 50 bp, Artificial
  Synthetic oligonucleotide
acccgttacctgctggttgcggctttggcggaagggacaagcacggttta

SEQ ID NO: 216213 - DNA, 50 bp, Artificial
  Synthetic oligonucleotide
accctaccgatccgggtacaggtaaccctaccgatccgggcacagggaat

SEQ ID NO: 216214 - DNA, 50 bp, Artificial
  Synthetic oligonucleotide
gagcagaacaggatgcatgggcctatcgcagccagcaacgtgcggctaaa

SEQ ID NO: 216215 - DNA, 50 bp, Artificial
  Synthetic oligonucleotide
gagattttcagtccccgcccgtcgcttacgttcctgtgctcccccgtgta

SEQ ID NO: 216216 - DNA, 50 bp, Artificial
  Synthetic oligonucleotide
ctattatctggttgccttcccgcttgaacacttccccgagaaagtcaaca

SEQ ID NO: 216217 - DNA, 50 bp, Artificial
  Synthetic oligonucleotide
caggtcgcaacaccgctccgccacccgtgattatcacgcgacgatttccg

SEQ ID NO: 216218 - DNA, 50 bp, Artificial
  Synthetic oligonucleotide
catgacccggtccgtaatacggagcttggattcactgaggagccgcgccc

SEQ ID NO: 216219 - DNA, 50 bp, Artificial
  Synthetic oligonucleotide
cgtttcccggtatttcgcctcctgcaggtacagttccgcgcccatgccta

SEQ ID NO: 216220 - DNA, 50 bp, Artificial
  Synthetic oligonucleotide
ccaacttgctgttgtataccggatctggcaacacgtctcttttggtaact

SEQ ID NO: 216221 - DNA, 55 bp, Artificial
  Synthetic oligonucleotide
ctcccacaaggattaatacggtttgtccgacgtagtttgtcaatgccatgcgccc

SEQ ID NO: 216222 - DNA, 50 bp, Artificial
  Synthetic oligonucleotide
ccccactacccgtaagagtaaacgccgccgcgtctgtagccccacctgga

SEQ ID NO: 216223 - DNA, 50 bp, Artificial
  Synthetic oligonucleotide
ccctgccggacgattcgcgagttccaatgattcgggcaaaaccatggccc

SEQ ID NO: 216224 - DNA, 50 bp, Artificial
  Synthetic oligonucleotide
cgtgggaaccccgcaagcggcgacaaagttaccatcgctaacaccacctg

SEQ ID NO: 216225 - DNA, 50 bp, Artificial
  Synthetic oligonucleotide
cctgtagccgggagcggcacacccaaaaatgggggaagcttggtaatcgc

SEQ ID NO: 216226 - DNA, 50 bp, Artificial
  Synthetic oligonucleotide
cgatacctggtttaaagcgaccaaagcttccttcgtgaacgattcgctct

SEQ ID NO: 216227 - DNA, 50 bp, Artificial
  Synthetic oligonucleotide
cgcagctgctactccgactagaagcgccccaactaatcccgggccatagg

SEQ ID NO: 216228 - DNA, 50 bp, Artificial
  Synthetic oligonucleotide
cgcctgtgattacgcctgctacccaaccacggcgaaacgccaagagagct

SEQ ID NO: 216229 - DNA, 50 bp, Artificial
  Synthetic oligonucleotide
cgcgggtgccaacgcttgccgtctaaatccgcaagtggcgaaccttgatg

SEQ ID NO: 216230 - DNA, 50 bp, Artificial
  Synthetic oligonucleotide
cgctccctttgcttctttcgcttgacgagtaaaggtggtcgccaattgcg

SEQ ID NO: 216231 - DNA, 50 bp, Artificial
  Synthetic oligonucleotide
cggcacacgttgcggcgctacatgttggtggtcgaactacatgcggccct

SEQ ID NO: 216232 - DNA, 55 bp, Artificial
  Synthetic oligonucleotide
atcgaacatcatcgggaccccgcttcgtttacacacggacagcgtttcttcggcc

SEQ ID NO: 216233 - DNA, 50 bp, Artificial
  Synthetic oligonucleotide
cggccaaattcgccgcacgccacccaaatgtggccgtattggacctgtcc

SEQ ID NO: 216234 - DNA, 50 bp, Artificial
  Synthetic oligonucleotide
cggccgcgggagtcgcaatcaatccggattactccgtcactacccaagcc

SEQ ID NO: 216235 - DNA, 50 bp, Artificial
  Synthetic oligonucleotide
cggcggaatgcccgctacgctttgcgctcggtttcctaataccgcgaggg

SEQ ID NO: 216236 - DNA, 50 bp, Artificial
  Synthetic oligonucleotide
cggcttgggtgattgtatgatgtggcgcacgcagggggcgagtctcaata

SEQ ID NO: 216237 - DNA, 50 bp, Artificial
  Synthetic oligonucleotide
acgggccaacgtttgccgtaagcattccctgccgtccgcgaacaatgtcg

SEQ ID NO: 216238 - DNA, 50 bp, Artificial
  Synthetic oligonucleotide
acggtcgccgagacaaaggttcccgacaagccccacggtcctgaggtgcc

SEQ ID NO: 216239 - DNA, 50 bp, Artificial
  Synthetic oligonucleotide
acgtagcacgagcacggttgcgtttcttttgcccgcgaatcccttctccg

SEQ ID NO: 216240 - DNA, 50 bp, Artificial
  Synthetic oligonucleotide
acgtcccggcgaaaaggggtgcgcgtgtgtacgactcctgccgcaaatgc

SEQ ID NO: 216241 - DNA, 50 bp, Artificial
  Synthetic oligonucleotide
actcccacacagagacatggtcaggaacctcgggcgcaccgattgcacct

SEQ ID NO: 216242 - DNA, 50 bp, Artificial
  Synthetic oligonucleotide
actgtccgctccgaagggattcgcggggaaacgcaaaagtggtagccgct

SEQ ID NO: 216243 - DNA, 60 bp, Artificial
  Synthetic oligonucleotide
acgaacatgcagaggttgcaggatatggcaggtcggtatggcatgagtgctaattcgctt

SEQ ID NO: 216244 - DNA, 55 bp, Artificial
  Synthetic oligonucleotide
atcccttggctgtaaggattcgcttgatgagtggacgaatgacctccccgagaac

SEQ ID NO: 216245 - DNA, 50 bp, Artificial
  Synthetic oligonucleotide
ctgttgcattcacgggcgtggaatccgtggcccaagaactgacgcggctc

SEQ ID NO: 216246 - DNA, 50 bp, Artificial
  Synthetic oligonucleotide
agactaggctcagtgctccgtcccgctgagggttgggactgtccgctccg

SEQ ID NO: 216247 - DNA, 50 bp, Artificial
  Synthetic oligonucleotide
agaggaacgccaacgcattgcccgtgacttgcacgatacgttggggcaga

SEQ ID NO: 216248 - DNA, 50 bp, Artificial
  Synthetic oligonucleotide
agaggagctgacccagacatacgggaattcaccgttgtgccgcgcgatgg

SEQ ID NO: 216249 - DNA, 50 bp, Artificial
  Synthetic oligonucleotide
ctgctgccacgattcccggtccatccggacaggagatcagcatgcgggca

SEQ ID NO: 216250 - DNA, 50 bp, Artificial
  Synthetic oligonucleotide
agcacggttgcgtttcttttgcccgcgaatcccttcgcagctcggtagga

SEQ ID NO: 216251 - DNA, 50 bp, Artificial
  Synthetic oligonucleotide
agcatcactgctacgtcgggaggagtcttgccctgtacagccgcctgcac

SEQ ID NO: 216252 - DNA, 50 bp, Artificial
  Synthetic oligonucleotide
agccgtacgggggtcagtacgatggggtgatcggcgtattgggtggacta

SEQ ID NO: 216253 - DNA, 50 bp, Artificial
  Synthetic oligonucleotide
aggatgtgcttcctagctggaggtggattgcggagagcgacggaactgcc

SEQ ID NO: 216254 - DNA, 50 bp, Artificial
  Synthetic oligonucleotide
ctcggttttacgccgttccttttcgaggatctgttgcctaacaaactcgc

SEQ ID NO: 216255 - DNA, 55 bp, Artificial
  Synthetic oligonucleotide
atcattcgtctgatggcaggtcccgattaccggatgattgttccgttatctgcac

SEQ ID NO: 216256 - DNA, 50 bp, Artificial
  Synthetic oligonucleotide
agtatgcgctcagcaccgtattgcggcccactcgaaacagcgcgcttagc

SEQ ID NO: 216257 - DNA, 50 bp, Artificial
  Synthetic oligonucleotide
atactgctgcgtgggcccggatgaccaagcggccagcgaccaaatcacaa

SEQ ID NO: 216258 - DNA, 50 bp, Artificial
  Synthetic oligonucleotide
atgagagcaccgcaagtccggtgaagcccacgttcatatagcctacgaac

SEQ ID NO: 216259 - DNA, 50 bp, Artificial
  Synthetic oligonucleotide
cagctcatccattccgctgtgcccgctggactgctgctggtacatcgcga

SEQ ID NO: 216260 - DNA, 50 bp, Artificial
  Synthetic oligonucleotide
aagggtgccgtgccactcatgcaagaaaagaccgccgggtatcgtccccg

SEQ ID NO: 216261 - DNA, 50 bp, Artificial
  Synthetic oligonucleotide
aaggtctccctccgattcgtatccgtacagctcgcgctccggtgcctgcc

SEQ ID NO: 216262 - DNA, 50 bp, Artificial
  Synthetic oligonucleotide
aagtccgagggaggcggtccgcactgcttcaggctacaccaacaccgaag

SEQ ID NO: 216263 - DNA, 50 bp, Artificial
  Synthetic oligonucleotide
ggatcgtaagccccgtccgttttgccttcgggcagcctccagcccgcggg

SEQ ID NO: 216264 - DNA, 50 bp, Artificial
  Synthetic oligonucleotide
aagtcgagcctgtggcctttgatggccgaaccggtatccgctactacgcc

SEQ ID NO: 216265 - DNA, 50 bp, Artificial
  Synthetic oligonucleotide
aagtgcaggggcgcaggcttgacctgtgcggctccgttaggggcgtccgg

SEQ ID NO: 216266 - DNA, 55 bp, Artificial
  Synthetic oligonucleotide
atattgcttatcgaatccaatgacctggcgatcataccaatctcacggagaacgt

SEQ ID NO: 216267 - DNA, 50 bp, Artificial
  Synthetic oligonucleotide
aagtgcggctaagcatgcgtcggccatactcgggaagactgtcgtccctg

SEQ ID NO: 216268 - DNA, 50 bp, Artificial
  Synthetic oligonucleotide
aagtggtgacgccacgagtcgaatgacgctcgcagcactgagtccttgcc

SEQ ID NO: 216269 - DNA, 50 bp, Artificial
  Synthetic oligonucleotide
aataagcaccgcacttcgtcgcatactgcccgagctcctcacacgcggtc

SEQ ID NO: 216270 - DNA, 50 bp, Artificial
  Synthetic oligonucleotide
aataatcgcgctgctctgtccgcgacgacagccgaaacggctcgagctgc

SEQ ID NO: 216271 - DNA, 50 bp, Artificial
  Synthetic oligonucleotide
aatacgatccaggggatgttcccggaagggccggatatgcttggcgcgat

SEQ ID NO: 216272 - DNA, 50 bp, Artificial
  Synthetic oligonucleotide
aatagccgaccaaatcagagcctccgcgcgcattgccgatagctgcgaac

SEQ ID NO: 216273 - DNA, 50 bp, Artificial
  Synthetic oligonucleotide
aatcaatcggagctgggctgcgcgaatatcggatggctccagcgttcccg

SEQ ID NO: 216274 - DNA, 50 bp, Artificial
  Synthetic oligonucleotide
aatcccatcgccccaaagcccaggcgcgaaacctgctttcctgatcgtcc

SEQ ID NO: 216275 - DNA, 50 bp, Artificial
  Synthetic oligonucleotide
aatcccgttaaccgacccgttggcaggcgtattaggggcgcaaaacgcga

SEQ ID NO: 216276 - DNA, 50 bp, Artificial
  Synthetic oligonucleotide
aatccgcccatcgtgcggtaggtcgacagctgggtacgttcaaccggatc

SEQ ID NO: 216277 - DNA, 55 bp, Artificial
  Synthetic oligonucleotide
ctccgattccgtgcagtctatcgcggagcaagcggggtacctgcaggtcatttcc

SEQ ID NO: 216278 - DNA, 50 bp, Artificial
  Synthetic oligonucleotide
aatccgcgggaccgctccttcccttcgctatacggggattctgcgtgtct

SEQ ID NO: 216279 - DNA, 50 bp, Artificial
  Synthetic oligonucleotide
aatccgctaaccgtccaaaagccggagggggacagccaagggatatccct

SEQ ID NO: 216280 - DNA, 50 bp, Artificial
  Synthetic oligonucleotide
aatccggccaatagagcgcgcttaggaagcacgcaataatcgctgcccgc

SEQ ID NO: 216281 - DNA, 50 bp, Artificial
  Synthetic oligonucleotide
aagctccctaagcgcatcccctaacccgcctacggcgtcaatcagcccgt

SEQ ID NO: 216282 - DNA, 50 bp, Artificial
  Synthetic oligonucleotide
aagctgcccgcgcctgaaccaacaaccgctttccgcggatcatgcccgta

SEQ ID NO: 216283 - DNA, 50 bp, Artificial
  Synthetic oligonucleotide
aagctgcgagttgaacggcgactgccaagccgagcggttacgcctgagag

SEQ ID NO: 216284 - DNA, 50 bp, Artificial
  Synthetic oligonucleotide
aagcttgagtcacggccgctcatgcggcattcgtaacattcggctcccgg

SEQ ID NO: 216285 - DNA, 50 bp, Artificial
  Synthetic oligonucleotide
aaggaaacgactccgtattcacgggcgctcacggtacatccgcgcacact

SEQ ID NO: 216286 - DNA, 50 bp, Artificial
  Synthetic oligonucleotide
aaggaagcacaaccttgcaccgtcacgtgcccggactgaagccatgcgca

SEQ ID NO: 216287 - DNA, 50 bp, Artificial
  Synthetic oligonucleotide
aaggaatgctccgcgtatctaggcagcgggcgatggatgtagcccgactg

SEQ ID NO: 216288 - DNA, 55 bp, Artificial
  Synthetic oligonucleotide
atatgaggtaaccggtgcggtgcctgcgaatgcggcttatgcctcttttctggtg

SEQ ID NO: 216289 - DNA, 50 bp, Artificial
  Synthetic oligonucleotide
aaggacaatgaggtgcgagtccgcattcatgcagcggccgtaacgccgtc

SEQ ID NO: 216290 - DNA, 50 bp, Artificial
  Synthetic oligonucleotide
aaggcaggtgccatacagcaggggagcggggtgagatgcaccgcagaagg

SEQ ID NO: 216291 - DNA, 50 bp, Artificial
  Synthetic oligonucleotide
aaggcatgcggggcaccagttcttggccatccgacgccactgtctccgag

SEQ ID NO: 216292 - DNA, 50 bp, Artificial
  Synthetic oligonucleotide
aaggccgcctctgaatgaggcaagctttgcgggacgccattgttctctgg

SEQ ID NO: 216293 - DNA, 50 bp, Artificial
  Synthetic oligonucleotide
gggacacgaatcaaccagtcaaaagccgaatccgggttgcgatcgcggcc

SEQ ID NO: 216294 - DNA, 50 bp, Artificial
  Synthetic oligonucleotide
aaggcctcacgcaaagcggctactccatggacccccaagcaagcgcaata

SEQ ID NO: 216295 - DNA, 50 bp, Artificial
  Synthetic oligonucleotide
aaggcgcttaaagtaccacccgccagagtagcatccaccgttcctccgga

SEQ ID NO: 216296 - DNA, 50 bp, Artificial
  Synthetic oligonucleotide
aaggcttggacaggctggcatccgaaccggcagttggaggacacgattcc

SEQ ID NO: 216297 - DNA, 50 bp, Artificial
  Synthetic oligonucleotide
aagggatggttccggtggaagcaaaaagagggcggccgcgtaacgtggag

SEQ ID NO: 216298 - DNA, 50 bp, Artificial
  Synthetic oligonucleotide
aagggcggctcatacgcggttccgacgaactcggcccctttatgcacgga

SEQ ID NO: 216299 - DNA, 55 bp, Artificial
  Synthetic oligonucleotide
atatcccgttcctcatatgcccttttatcagtcatccgcttatagaattcgatcc

SEQ ID NO: 216300 - DNA, 50 bp, Artificial
  Synthetic oligonucleotide
ggcctccccaacgcttgacgaagcagctccgttaccgtcctggctgagcg

SEQ ID NO: 216301 - DNA, 50 bp, Artificial
  Synthetic oligonucleotide
aaggggacgatgctcctcagcctcggcttaacgaagacggacgacgcgga

SEQ ID NO: 216302 - DNA, 50 bp, Artificial
  Synthetic oligonucleotide
aaggggcgttacattcgagcctggaatccgtggacggaaggggagcggaa

SEQ ID NO: 216303 - DNA, 50 bp, Artificial
  Synthetic oligonucleotide
gccttgaggtccagtaacgccttgaggtccggtgatgccttgaggtccag

SEQ ID NO: 216304 - DNA, 50 bp, Artificial
  Synthetic oligonucleotide
aattccgggacccgctgtcctgttaactgcgacgcgtaccgttcagggag

SEQ ID NO: 216305 - DNA, 50 bp, Artificial
  Synthetic oligonucleotide
aattcgtaaatccgggccgccgtatccccgccctggctcgctttaacgat

SEQ ID NO: 216306 - DNA, 50 bp, Artificial
  Synthetic oligonucleotide
aattgacgacccgctagggcagcaagcggatagctcggtaggcgcggaat

SEQ ID NO: 216307 - DNA, 50 bp, Artificial
  Synthetic oligonucleotide
aattgatgtccggcctccgcttgctcgttgcccagccgaccggcaatatg

SEQ ID NO: 216308 - DNA, 50 bp, Artificial
  Synthetic oligonucleotide
aattgcgcgtccgcccagctatgcagtccaacacgcccgctagtgtacgt

SEQ ID NO: 216309 - DNA, 50 bp, Artificial
  Synthetic oligonucleotide
aattggcttgcgctctctcgcgcccgaaaagttgagagggacacgcggga

SEQ ID NO: 216310 - DNA, 55 bp, Artificial
  Synthetic oligonucleotide
atagggtgtgtggtccagaataacactatcttgcaccgtcgtttagtcctagaca

SEQ ID NO: 216311 - DNA, 50 bp, Artificial
  Synthetic oligonucleotide
gcccgcgagagcctgcgaccggtctttggtcaagcgcttaagccgtttat

SEQ ID NO: 216312 - DNA, 50 bp, Artificial
  Synthetic oligonucleotide
aattggggcaaaggggcgctcgtctggattggtatcgatccgcgcgatcc

SEQ ID NO: 216313 - DNA, 50 bp, Artificial
  Synthetic oligonucleotide
aattggtcgctttcccgacagttagccctccggcacgcaacacgatgggg

SEQ ID NO: 216314 - DNA, 50 bp, Artificial
  Synthetic oligonucleotide
acaaaggcatacgccaggttatgacgagcgtcccagagctgcgccctcgc

SEQ ID NO: 216315 - DNA, 50 bp, Artificial
  Synthetic oligonucleotide
acaacggagggtgcggagacgtccgagagctcgggtcaatagtggggtgg

SEQ ID NO: 216316 - DNA, 50 bp, Artificial
  Synthetic oligonucleotide
acaagcagcggctatcgcggaagcgaacgacgtggtcttgttaagcccgg

SEQ ID NO: 216317 - DNA, 50 bp, Artificial
  Synthetic oligonucleotide
acaagccagcgcgactgattaccccgcaaggaacaattgacggcgtgcca

SEQ ID NO: 216318 - DNA, 50 bp, Artificial
  Synthetic oligonucleotide
acaaggtggccggagaccaatttgtgacgctgtcccgaaccgacagcccg

SEQ ID NO: 216319 - DNA, 50 bp, Artificial
  Synthetic oligonucleotide
acaatccggtccaatcccaggtaatcgctccgccggctttgtgccccttg

SEQ ID NO: 216320 - DNA, 50 bp, Artificial
  Synthetic oligonucleotide
acacagggtccaggccgggggcccgaatctctggtcgtccagtcgattcc

SEQ ID NO: 216321 - DNA, 55 bp, Artificial
  Synthetic oligonucleotide
ctccgttatcacacgccatatgtcgtcaccgactatgggctcatccgccgaatcg

SEQ ID NO: 216322 - DNA, 50 bp, Artificial
  Synthetic oligonucleotide
acaccggcatctctggcgttgctaagtcacgcttatccggctccggcaga

SEQ ID NO: 216323 - DNA, 50 bp, Artificial
  Synthetic oligonucleotide
acacgcctgcgggaagccatctcgttacgcagagaggactggttgcagcc

SEQ ID NO: 216324 - DNA, 50 bp, Artificial
  Synthetic oligonucleotide
acactccacggcacgaatacgacaggccgcactagcgcttacggggtgca

SEQ ID NO: 216325 - DNA, 50 bp, Artificial
  Synthetic oligonucleotide
gctgcgctcgggtgttcgcctaccgaacggagacgcaagccaaatggtgt

SEQ ID NO: 216326 - DNA, 50 bp, Artificial
  Synthetic oligonucleotide
aatccggccgtgagacatcattgcggagcgcatgctcattcccgcatgga

SEQ ID NO: 216327 - DNA, 50 bp, Artificial
  Synthetic oligonucleotide
aatcctccgattttggctcgcgccgtgacccgatcacaggccgtaccgca

SEQ ID NO: 216328 - DNA, 50 bp, Artificial
  Synthetic oligonucleotide
aatcgccccgggtaggatgagtgcccacaagctgtccagcaaatggagct

SEQ ID NO: 216329 - DNA, 50 bp, Artificial
  Synthetic oligonucleotide
aatcgccgcccggggaggaaacgcatggggaatatgctcattcgcaatgc

SEQ ID NO: 216330 - DNA, 50 bp, Artificial
  Synthetic oligonucleotide
aatcgccgccgtacctagaatgacccggctcacgccaagcgacaacagcc

SEQ ID NO: 216331 - DNA, 50 bp, Artificial
  Synthetic oligonucleotide
aatcggctggcagctttgcatgccgcgttgtggaatggcggggttttcct

SEQ ID NO: 216332 - DNA, 55 bp, Artificial
  Synthetic oligonucleotide
ctcctgagcagcaccttcctgcctaaccggtactttattacgggctacgatcttc

SEQ ID NO: 216333 - DNA, 50 bp, Artificial
  Synthetic oligonucleotide
aatcgggtcagccttacctcatcgggaagcaggcgcccgtgttcgtcgca

SEQ ID NO: 216334 - DNA, 50 bp, Artificial
  Synthetic oligonucleotide
aatcggtcacggaccgcttgtccgcgctcgaaccagcctacctcaacgaa

SEQ ID NO: 216335 - DNA, 50 bp, Artificial
  Synthetic oligonucleotide
aatcgtctcgcggattggccacagccacgcaaggtcgatatgcgcatgcc

SEQ ID NO: 216336 - DNA, 50 bp, Artificial
  Synthetic oligonucleotide
gcgtacgttaatcgggcaccatgtacgccgttccattgttctgtcgagca

SEQ ID NO: 216337 - DNA, 50 bp, Artificial
  Synthetic oligonucleotide
aatctcacggcagtcggacgcctgggcttgtcgaatccgcatccgcttca

SEQ ID NO: 216338 - DNA, 50 bp, Artificial
  Synthetic oligonucleotide
aatctcgcttaagcccgtccgtacctcgaaggccctctcccactgccgga

SEQ ID NO: 216339 - DNA, 50 bp, Artificial
  Synthetic oligonucleotide
aatctggccgatggtacggcgtgccgcgtgttttaccaccgtaatcccga

SEQ ID NO: 216340 - DNA, 50 bp, Artificial
  Synthetic oligonucleotide
aatgccgcgtgatctctggatggagcgtactctgccggaagcccgcatat

SEQ ID NO: 216341 - DNA, 50 bp, Artificial
  Synthetic oligonucleotide
aatgcgagttgccgttgccgaggctcccgatggataaacggagcttgccg

SEQ ID NO: 216342 - DNA, 50 bp, Artificial
  Synthetic oligonucleotide
gcgctctagtgcgagggaaacgacaatgcgtgtagccgtaggtgcggtgg

SEQ ID NO: 216343 - DNA, 54 bp, Artificial
  Synthetic oligonucleotide
acctttaggagggataaccgatggccgaaacgactgttgcagccaaaacggtga

SEQ ID NO: 216344 - DNA, 50 bp, Artificial
  Synthetic oligonucleotide
aatgctctgcggggacgaatctttgcgtgaccgcgttgacaagccggtta

SEQ ID NO: 216345 - DNA, 50 bp, Artificial
  Synthetic oligonucleotide
gcgatatgtctacagcaggtgggggtagcgggaccgcttgtgcatccaga

SEQ ID NO: 216346 - DNA, 50 bp, Artificial
  Synthetic oligonucleotide
aatggcgcgcacgaaggatcgcgcattgcctaatggacgggtaaagccag

SEQ ID NO: 216347 - DNA, 60 bp, Artificial
  Synthetic oligonucleotide
aatgtgtacaagcatcccagtgaggatggtgagttgtataagccagttttcatgacgctg

SEQ ID NO: 216348 - DNA, 55 bp, Artificial
  Synthetic oligonucleotide
gaccttcgttttgaaaataccgcctctatatgcattcccttctcttgtgtaagcg

SEQ ID NO: 216349 - DNA, 55 bp, Artificial
  Synthetic oligonucleotide
gacgcggtcattacccggtgtaacgctcgcatcctccccgattccggcatcctct

SEQ ID NO: 216350 - DNA, 55 bp, Artificial
  Synthetic oligonucleotide
gactatcgtcttagaagtggagaccatcgtttccagatcctttctgccacttgcc

SEQ ID NO: 216351 - DNA, 55 bp, Artificial
  Synthetic oligonucleotide
gactgcctttactaacggctatacaaattatccggcaagctttaaactggacgta

SEQ ID NO: 216352 - DNA, 55 bp, Artificial
  Synthetic oligonucleotide
gacttccggagatgactcgctgtcaccgggaataatgaccactttacgaagcccg

SEQ ID NO: 216353 - DNA, 54 bp, Artificial
  Synthetic oligonucleotide
accgattgggaagtccgattttccgagctggatgaacgctttatcgaaacaaac

SEQ ID NO: 216354 - DNA, 55 bp, Artificial
  Synthetic oligonucleotide
gagataaccatcgaagtccacaatgaaggcaatatcggggaggtccagtgcgagg

SEQ ID NO: 216355 - DNA, 55 bp, Artificial
  Synthetic oligonucleotide
gagccctagcttaacaatcgagccgaccagggtattcaccagagcatttccgggc

SEQ ID NO: 216356 - DNA, 55 bp, Artificial
  Synthetic oligonucleotide
gagcgaagactgttttgcgtgaaagagagttagggattggctaacacaattcaga

SEQ ID NO: 216357 - DNA, 58 bp, Artificial
  Synthetic oligonucleotide
caggcgtaggtagtccggtcatacctggtgtgggtacaggcagtcctgctatccctgg

SEQ ID NO: 216358 - DNA, 55 bp, Artificial
  Synthetic oligonucleotide
gagctatcacgcgcttgaggacatcatcgcttggttagataagggcaaatatgtc

SEQ ID NO: 216359 - DNA, 50 bp, Artificial
  Synthetic oligonucleotide
gaggggatcagtccaagtcttaggggaaaaggaacctttggtatccccgg

SEQ ID NO: 216360 - DNA, 55 bp, Artificial
  Synthetic oligonucleotide
gaggggtgtatgggcatgtataaacgaaactatcgtaactttcagcgggatagcc

SEQ ID NO: 216361 - DNA, 55 bp, Artificial
  Synthetic oligonucleotide
gagttgcttgcatgctgtgcggatcattggagggcttaacttactttagagactc

SEQ ID NO: 216362 - DNA, 55 bp, Artificial
  Synthetic oligonucleotide
gataggtcggttgacggggacactcattttcttgggcgtcctaagtatcagcaag

SEQ ID NO: 216363 - DNA, 55 bp, Artificial
  Synthetic oligonucleotide
gatcagaagtgtggaagcttaagcacctgacctgcctgcactccccgatcctcca

SEQ ID NO: 216364 - DNA, 55 bp, Artificial
  Synthetic oligonucleotide
gatgagtcacccataagttcgcacttttgtaagtgatgcataatagataccggtt

SEQ ID NO: 216365 - DNA, 55 bp, Artificial
  Synthetic oligonucleotide
gatggagcaagcgatccgtaatgcttcttttaccgatgtatgtaatgcgctcggg

SEQ ID NO: 216366 - DNA, 54 bp, Artificial
  Synthetic oligonucleotide
gattatggtaacaggggaggaacacgtgttgtcgaacaagccttttgtgccttt

SEQ ID NO: 216367 - DNA, 55 bp, Artificial
  Synthetic oligonucleotide
gattcacgaatgtaacgtttcttccgttcattcaggtacaacttcatggcctgcc

SEQ ID NO: 216368 - DNA, 59 bp, Artificial
  Synthetic oligonucleotide
tgcaaagcggttaagggtgtcaaatgcgctaacccgtcatccgcgactttgtcacagcc

SEQ ID NO: 216369 - DNA, 56 bp, Artificial
  Synthetic oligonucleotide
cctcttccgtttcccccgtggcatgaagtgcaaccgtattgctccatcggatggta

SEQ ID NO: 216370 - DNA, 56 bp, Artificial
  Synthetic oligonucleotide
ggtaaaagtacttcgacttgtttactaatgcgttggcattctattgaaaaggcatc

SEQ ID NO: 216371 - DNA, 55 bp, Artificial
  Synthetic oligonucleotide
gccccaattcatacaacgcgtttaaagccgctaggcgaatagagattgttcccga

SEQ ID NO: 216372 - DNA, 55 bp, Artificial
  Synthetic oligonucleotide
gcacacgtgcttgctcaagccattttacgcatatggcccgatgctcaaccgacga

SEQ ID NO: 216373 - DNA, 55 bp, Artificial
  Synthetic oligonucleotide
gattaacgcatttaatgtccttagtcgctttgcaatgcttaagtctgagcggttg

SEQ ID NO: 216374 - DNA, 55 bp, Artificial
  Synthetic oligonucleotide
gagatcagcaagcgttgttcctcgtatgcaaaaggccacgtccgcggtatgttcg

SEQ ID NO: 216375 - DNA, 55 bp, Artificial
  Synthetic oligonucleotide
ctgcttcgaccactcctggagtgacaacttctaattggtaagaacggaaatctgg

SEQ ID NO: 216376 - DNA, 55 bp, Artificial
  Synthetic oligonucleotide
ctctgttcaattcgcgtcaatgtcgttaaactcactataaacgtgttgtcttgaa

SEQ ID NO: 216377 - DNA, 55 bp, Artificial
  Synthetic oligonucleotide
ctaggtgttcactcggggatgcttccttgatcgagatgggaatacgctgtacctt

SEQ ID NO: 216378 - DNA, 51 bp, Artificial
  Synthetic oligonucleotide
ctaaaacaatcaggttaagggatacggggtatatcggttaagaggtgttta

SEQ ID NO: 216379 - DNA, 54 bp, Artificial
  Synthetic oligonucleotide
tccggcacaagggctgcccgtctttacttacatcggggctaaacaccgctccgg

SEQ ID NO: 216380 - DNA, 55 bp, Artificial
  Synthetic oligonucleotide
gcgtgtattcgcgtcgtgtcctggaatggtcagtacatcttttgctcagcgggcc

SEQ ID NO: 216381 - DNA, 55 bp, Artificial
  Synthetic oligonucleotide
ggacctctggcaatcgcagttggcacagagcaactcggcctttctcctcaatgga

SEQ ID NO: 216382 - DNA, 55 bp, Artificial
  Synthetic oligonucleotide
ggatttaattgtgtgatatcaataaggtcatacccatgaaggctgcctggttgcg

SEQ ID NO: 216383 - DNA, 55 bp, Artificial
  Synthetic oligonucleotide
ggcgataaaatgtgtcaaccatctgaagggttagatcgctgtccggtagtcgcca

SEQ ID NO: 216384 - DNA, 55 bp, Artificial
  Synthetic oligonucleotide
ggctatgagcaattaaagtcacatctgccccaggcacaacaatctgtgctttccc

SEQ ID NO: 216385 - DNA, 55 bp, Artificial
  Synthetic oligonucleotide
gggattgctctccccgttatccttctcgcaaatgcaagtttatgtgttgtaggcg

SEQ ID NO: 216386 - DNA, 55 bp, Artificial
  Synthetic oligonucleotide
ggtattaaaatatcgagccgacttgcgttttattcaacctatgggccacacgcgc

SEQ ID NO: 216387 - DNA, 55 bp, Artificial
  Synthetic oligonucleotide
gtgccaatcctgtcctcgtaaggagcgtacatgtagatgtttaaccgaatctaaa

SEQ ID NO: 216388 - DNA, 55 bp, Artificial
  Synthetic oligonucleotide
gtgctgcgacatcgacgcgtgcattgacaaatgcgacaatggaatacacgcttga

SEQ ID NO: 216389 - DNA, 55 bp, Artificial
  Synthetic oligonucleotide
gtggtgaatacaggctttacgaatacagaagaaggaatgcgctttctcgcggaag

SEQ ID NO: 216390 - DNA, 60 bp, Artificial
  Synthetic oligonucleotide
gggagagatcgccacaagcactattgacacaaataccatggcccggccagcattgctgtc

SEQ ID NO: 216391 - DNA, 55 bp, Artificial
  Synthetic oligonucleotide
tttcagatctcaaagggcattggttgactcgacatcattatgcagtcaatgcagg

SEQ ID NO: 216392 - DNA, 55 bp, Artificial
  Synthetic oligonucleotide
aagcgagcgaaggcactccgtcccaccttaattccatgttgtaactcagtcctcc

SEQ ID NO: 216393 - DNA, 55 bp, Artificial
  Synthetic oligonucleotide
aagggggaatgatagggctgcctgctgtcgtaatgatggcgtcaaagggcgcttt

SEQ ID NO: 216394 - DNA, 55 bp, Artificial
  Synthetic oligonucleotide
acacatggattacagcctttgaaccagggggcacgtcgctctgccgcctcagcat

SEQ ID NO: 216395 - DNA, 55 bp, Artificial
  Synthetic oligonucleotide
attagaggaataatgcgactcaactctgcttcactgacagttcccgtaccaaaag

SEQ ID NO: 216396 - DNA, 55 bp, Artificial
  Synthetic oligonucleotide
caagttttcttatgaggtttctgctctgccggaagtaattcaatgaagccgcccg

SEQ ID NO: 216397 - DNA, 55 bp, Artificial
  Synthetic oligonucleotide
caatccgccaaggaggaaatatgtctggcttatctgatctcaaagcatgcgtttt

SEQ ID NO: 216398 - DNA, 55 bp, Artificial
  Synthetic oligonucleotide
cacacacgacattttacccgctctcctcgaactattccgtctagattaagaccgt

SEQ ID NO: 216399 - DNA, 55 bp, Artificial
  Synthetic oligonucleotide
caggcgtcttatcaagatactccttacattaatttgcctagtggcccttaatcgg

SEQ ID NO: 216400 - DNA, 55 bp, Artificial
  Synthetic oligonucleotide
ccacaattcaagcgaattggagaagcttgtgagtcgattattagatcacataggc

SEQ ID NO: 216401 - DNA, 56 bp, Artificial
  Synthetic oligonucleotide
gcgttagtactaaacccacacatttgtgatcagatttagcaacaacctttaatacc

SEQ ID NO: 216402 - DNA, 55 bp, Artificial
  Synthetic oligonucleotide
ccacaatttgaagccttgatgagctttgtatgcgctggagacactgtactcgtcc

SEQ ID NO: 216403 - DNA, 55 bp, Artificial
  Synthetic oligonucleotide
ccccaatccttacctgttctacctatcgctgttacctgtgcacctaacgaaatta

SEQ ID NO: 216404 - DNA, 55 bp, Artificial
  Synthetic oligonucleotide
cccttcgcgggttaattctggaccaacaccccctcttgacagacctgcaatgcga

SEQ ID NO: 216405 - DNA, 55 bp, Artificial
  Synthetic oligonucleotide
cggatgtagagattcaatggtatgtttatcaagcgggatcgagtgcaatggaagc

SEQ ID NO: 216406 - DNA, 55 bp, Artificial
  Synthetic oligonucleotide
ccgacctgcttgactaaaagttgtgcggcactgctatccatggatttcccttcaa

SEQ ID NO: 216407 - DNA, 55 bp, Artificial
  Synthetic oligonucleotide
cgagttgttgcggctcgtcctattcgtgtattgccagtgcgacccttgccggtgc

SEQ ID NO: 216408 - DNA, 55 bp, Artificial
  Synthetic oligonucleotide
cctacaatctgttggccatgcctataattctttacggcaacatagggcgctataa

SEQ ID NO: 216409 - DNA, 55 bp, Artificial
  Synthetic oligonucleotide
cgaggttctgcagaaatgtccaaagttaatcggtctagatgtcagccgtacacgc

SEQ ID NO: 216410 - DNA, 54 bp, Artificial
  Synthetic oligonucleotide
cggcacgcattgcggggcacttgagccctccgacgcagctagcccgctttgaag

SEQ ID NO: 216411 - DNA, 54 bp, Artificial
  Synthetic oligonucleotide
tcgagcactccgcttcggattgtcccaacacgggaaactctttaggattcaaga

SEQ ID NO: 216412 - DNA, 56 bp, Artificial
  Synthetic oligonucleotide
tgagcaaccttactcgcgttacccccaacacgacgggccctatcacgaagctccca

SEQ ID NO: 216413 - DNA, 54 bp, Artificial
  Synthetic oligonucleotide
gcaacaagaatcgctgggtctcctggcctacgatcagcctccacaactcgaaca

SEQ ID NO: 216414 - DNA, 54 bp, Artificial
  Synthetic oligonucleotide
gacatccccgatgaaaagtgaggtgcaagaccttaggagatgcgtctaacatgc

SEQ ID NO: 216415 - DNA, 54 bp, Artificial
  Synthetic oligonucleotide
atttgggctaggcgtctacgttgcatacagattgaccatccctctagccaacgc

SEQ ID NO: 216416 - DNA, 54 bp, Artificial
  Synthetic oligonucleotide
acgttagcgccggattttcagtcgccctgctaagcgttcctcaagccatggcct

SEQ ID NO: 216417 - DNA, 54 bp, Artificial
  Synthetic oligonucleotide
gtcgggttttgtgtcgtcgttgtataacggccactgatagatgtagccgaactt

SEQ ID NO: 216418 - DNA, 53 bp, Artificial
  Synthetic oligonucleotide
tcatcccagccgcttctagcagcgttggcttagcagccatccagctgtgtaac

SEQ ID NO: 216419 - DNA, 53 bp, Artificial
  Synthetic oligonucleotide
tactaaggacctcaaatgcgccaatccatcgtcagtgagcttatcgcaccagt

SEQ ID NO: 216420 - DNA, 53 bp, Artificial
  Synthetic oligonucleotide
gtcccctcggcttttccataactgatcgctggctaaaacgggcggggctcgat

SEQ ID NO: 216421 - DNA, 53 bp, Artificial
  Synthetic oligonucleotide
ggggtgacaggctttgcaacgttcatgggttttattcccgaacttcaaattgg

SEQ ID NO: 216422 - DNA, 53 bp, Artificial
  Synthetic oligonucleotide
cccatttgaaacccttagttgctttaacgcatttgagtctaggtgaatgcgtt

SEQ ID NO: 216423 - DNA, 56 bp, Artificial
  Synthetic oligonucleotide
aatggtggggacaaccagtccaaagccgagccctagacaacctgtcgcacagagta

SEQ ID NO: 216424 - DNA, 52 bp, Artificial
  Synthetic oligonucleotide
atagccttcataggaggcacgtgcaacggggtgagcgcttttgtattgccgt

SEQ ID NO: 216425 - DNA, 52 bp, Artificial
  Synthetic oligonucleotide
ggctaatagaaaaccgattcgtggcggaactaggcaagaaagctgtactccc

SEQ ID NO: 216426 - DNA, 52 bp, Artificial
  Synthetic oligonucleotide
aatctccttccaacggaacaaagctaactgaatccaaattacgtgggttgat

SEQ ID NO: 216427 - DNA, 51 bp, Artificial
  Synthetic oligonucleotide
agttgtcgaatttcctgcagatagtatcgcggttgcgatactcccattagt

SEQ ID NO: 216428 - DNA, 51 bp, Artificial
  Synthetic oligonucleotide
aatgtaagtagcatctctatcgttggtgcaggggacgttattccggggaat

SEQ ID NO: 216429 - DNA, 51 bp, Artificial
  Synthetic oligonucleotide
gctctaatctcactgacgctggattagcgcatttgactctcttagtagctt

SEQ ID NO: 216430 - DNA, 51 bp, Artificial
  Synthetic oligonucleotide
tggattctgtatcgccacagtatttcaccacaactttgcgtaagtcgcgtc

SEQ ID NO: 216431 - DNA, 50 bp, Artificial
  Synthetic oligonucleotide
atgggaatctcccaagtttattgcgggagaaagctatgggacgacaagag

SEQ ID NO: 216432 - DNA, 50 bp, Artificial
  Synthetic oligonucleotide
ggcatatgtggattttcccacacaaatcgtcaaaacattttcagggatgc

SEQ ID NO: 216433 - DNA, 50 bp, Artificial
  Synthetic oligonucleotide
cactcgttccaataaaatggcttcgcgtgggttagtggctgttccaaaca

SEQ ID NO: 216434 - DNA, 56 bp, Artificial
  Synthetic oligonucleotide
tacgcgccgttcttttatagaaggcagccgcatctcatctgttcgcgacgcaagcg

SEQ ID NO: 216435 - DNA, 50 bp, Artificial
  Synthetic oligonucleotide
gcttgccttcgtgagaacgaaagattttccccgctgcacgccccaacgct

SEQ ID NO: 216436 - DNA, 56 bp, Artificial
  Synthetic oligonucleotide
gccgtatttgggaatagtgccacggcagaaggattgcgagggggagcaacatccgt

SEQ ID NO: 216437 - DNA, 56 bp, Artificial
  Synthetic oligonucleotide
agtgccacggcagaaggattgcgagggggagcaacatccgtaagagtcacacgtac

SEQ ID NO: 216438 - DNA, 55 bp, Artificial
  Synthetic oligonucleotide
atccgttcccgcgtggactgtcgttgcaggcaaccccgcccatagtgtcgcaacg

SEQ ID NO: 216439 - DNA, 55 bp, Artificial
  Synthetic oligonucleotide
cgaataaagagcgcttcgagagattcaggcgtgatgaggagaacaccccgagggc

SEQ ID NO: 216440 - DNA, 55 bp, Artificial
  Synthetic oligonucleotide
cgcactgccatgcgcccagcccctcttatcaacattatagtcaattaagcggcaa

SEQ ID NO: 216441 - DNA, 55 bp, Artificial
  Synthetic oligonucleotide
cgctgcgattccatatagtgagcgcctcatcgttcgccctttcctggggttggca

SEQ ID NO: 216442 - DNA, 53 bp, Artificial
  Synthetic oligonucleotide
cggcaaaacaacgacctagagacgttctaccactcaagtttacttaagacggc

SEQ ID NO: 216443 - DNA, 55 bp, Artificial
  Synthetic oligonucleotide
ttatacattgtttaaaccgcctgcccctaacatcgttcctacggccgataagcgc

SEQ ID NO: 216444 - DNA, 55 bp, Artificial
  Synthetic oligonucleotide
tgcgcgtaggaagcgagatatgatccccgataaggttagcctcgatctggctctc

SEQ ID NO: 216445 - DNA, 55 bp, Artificial
  Synthetic oligonucleotide
gttgatactttccgtaggtgaatatcccgaattgtcgactgaggccgcgtccctt

SEQ ID NO: 216446 - DNA, 55 bp, Artificial
  Synthetic oligonucleotide
gtcgaccctttcccctggtctgttgcagatctcgacgaatggggaggccaagcgc

SEQ ID NO: 216447 - DNA, 55 bp, Artificial
  Synthetic oligonucleotide
gtccgagaatcgatggtccatgaggcagactcgctttcgttccgagttcgatcag

SEQ ID NO: 216448 - DNA, 55 bp, Artificial
  Synthetic oligonucleotide
gtccctcgggtctctcatatgcgagcgtagcgggccctcagcggtgatgctctat

SEQ ID NO: 216449 - DNA, 55 bp, Artificial
  Synthetic oligonucleotide
caccgtttcaggtcaatcggaggcgtgaaccgtctttagacctttggcttgtcgc

SEQ ID NO: 216450 - DNA, 55 bp, Artificial
  Synthetic oligonucleotide
ggttcggtataggtgcagtgaccggcctccgaaaattcgatcagggtacagttgg

SEQ ID NO: 216451 - DNA, 55 bp, Artificial
  Synthetic oligonucleotide
ggtcgacgatccctccacggagtggctattgggcggttcggcgccgctatatttg

SEQ ID NO: 216452 - DNA, 55 bp, Artificial
  Synthetic oligonucleotide
gcctcgggcgcatttctacaaattcctcgcatacccatattcgggatcaatgagg

SEQ ID NO: 216453 - DNA, 55 bp, Artificial
  Synthetic oligonucleotide
gattggggtgcccctcgcctttatcgcagtgagtttagggctgtggctgacgacc

SEQ ID NO: 216454 - DNA, 55 bp, Artificial
  Synthetic oligonucleotide
gaagaatccctaggcgataattaaggcgcctcgggaatactcgtctccgcaacag

SEQ ID NO: 216455 - DNA, 55 bp, Artificial
  Synthetic oligonucleotide
cggtcccagctactgccattcgatcgaattcctttactcagcgccaacgctcgtc

SEQ ID NO: 216456 - DNA, 54 bp, Artificial
  Synthetic oligonucleotide
cggccttccctgtttgtacgccggcgcttttggaccgggtagaatgctcggatg

SEQ ID NO: 216457 - DNA, 53 bp, Artificial
  Synthetic oligonucleotide
tcatcattcatccgccacaattccgcaaagcagacctctgcctggcttcgggt

SEQ ID NO: 216458 - DNA, 52 bp, Artificial
  Synthetic oligonucleotide
ccaccaaccgtcatccgttacatcgagagggagagacgaaaggaggcgcggg

SEQ ID NO: 216459 - DNA, 51 bp, Artificial
  Synthetic oligonucleotide
ccccatgaggaaatgctgatccgtcgcttggtcgggctcatctatctggag

SEQ ID NO: 216460 - DNA, 55 bp, Artificial
  Synthetic oligonucleotide
cagcggctaccgaccgtcggggaaaagagctgtacggatcgatatgctcgagcgg

SEQ ID NO: 216461 - DNA, 50 bp, Artificial
  Synthetic oligonucleotide
agacggaggcgttgccgcttatctgcccgtcggtcgtctcaacaatgtcg

SEQ ID NO: 216462 - DNA, 50 bp, Artificial
  Synthetic oligonucleotide
actgtgctcgcccttaccttgcttgaggcgattagccccctggacgtcga

SEQ ID NO: 216463 - DNA, 50 bp, Artificial
  Synthetic oligonucleotide
actgtcccatgaggcggtgaccctaaccgtctcccgcgcgaatttgaccc

SEQ ID NO: 216464 - DNA, 50 bp, Artificial
  Synthetic oligonucleotide
aaagcgtgaccatcgtccccgctcgcaacgaagcctaagggctgacctca

SEQ ID NO: 216465 - DNA, 50 bp, Artificial
  Synthetic oligonucleotide
aaagcttgcccgaggcgagaggccaattgatccgtcgtctgacgcggtaa

SEQ ID NO: 216466 - DNA, 50 bp, Artificial
  Synthetic oligonucleotide
aaagggccttctttgcgagggtttgggcgtccgaacgactttcaacccgc

SEQ ID NO: 216467 - DNA, 50 bp, Artificial
  Synthetic oligonucleotide
aaatcgcgctttcgcgtatccgctgagccgtgcaaacgtgtgctgagctt

SEQ ID NO: 216468 - DNA, 50 bp, Artificial
  Synthetic oligonucleotide
aacaatccgatctcggcgcattatggcggggcgatgatcccacgagaggg

SEQ ID NO: 216469 - DNA, 50 bp, Artificial
  Synthetic oligonucleotide
aaccgacctgtcgctggttggggccgctacctagttcgcggaatatcccc

SEQ ID NO: 216470 - DNA, 50 bp, Artificial
  Synthetic oligonucleotide
aaccgcgctgaattgagctcgcatctcggcttgccccacatgccacgtaa

SEQ ID NO: 216471 - DNA, 55 bp, Artificial
  Synthetic oligonucleotide
ccatctggtggcgggtcgaccccgatcaacgcaacaagctctatgatgcgcgggt

SEQ ID NO: 216472 - DNA, 50 bp, Artificial
  Synthetic oligonucleotide
aagagggcatgcagacgtcccttgatttcgaccgcgatagcgcccttccc

SEQ ID NO: 216473 - DNA, 50 bp, Artificial
  Synthetic oligonucleotide
aaggccccaggtccgttgcctcacgctaacggcgaaaggacattggcccc

SEQ ID NO: 216474 - DNA, 50 bp, Artificial
  Synthetic oligonucleotide
aagggcgggcacgcgtagaaaacctaaatgtcggcggggcccttctctac

SEQ ID NO: 216475 - DNA, 50 bp, Artificial
  Synthetic oligonucleotide
aaggtacgtcagaccggcagtccgatccggcgtcccaaggatcaagccgc

SEQ ID NO: 216476 - DNA, 50 bp, Artificial
  Synthetic oligonucleotide
aagtcaggccagacagcatctgtttcggcaccaatacgcagaaaccgggt

SEQ ID NO: 216477 - DNA, 50 bp, Artificial
  Synthetic oligonucleotide
aatcgggggatccttgccgctatggatgagcgggaaagcgcctctgacct

SEQ ID NO: 216478 - DNA, 50 bp, Artificial
  Synthetic oligonucleotide
aatggctatgagctggggtcgggggcgatcagaaaccacctgccggaggt

SEQ ID NO: 216479 - DNA, 50 bp, Artificial
  Synthetic oligonucleotide
accaccgaaccactaggactacggcgtccgccagagatgcagtcacccgt

SEQ ID NO: 216480 - DNA, 50 bp, Artificial
  Synthetic oligonucleotide
acccgaaaaggacgcctaatcgttgggctgcatgctcgataggggtgcgc

SEQ ID NO: 216481 - DNA, 50 bp, Artificial
  Synthetic oligonucleotide
acgtgtgctgagcttccagcctactctgagcgctggcgagtgcgtttcgc

SEQ ID NO: 216482 - DNA, 55 bp, Artificial
  Synthetic oligonucleotide
ccgaaggaggcacagccctatcggtttcccacccattgtcccgtctgtggctctg

SEQ ID NO: 216483 - DNA, 50 bp, Artificial
  Synthetic oligonucleotide
acgtaccccgatgcgccatgtcgctcgcgaatctcagctgcgattgcaat

SEQ ID NO: 216484 - DNA, 50 bp, Artificial
  Synthetic oligonucleotide
acgggctcattgattttcggtgggcggagcgcatagcgcgggtcgggagc

SEQ ID NO: 216485 - DNA, 50 bp, Artificial
  Synthetic oligonucleotide
acggctgggaaaacggaaagcaaggcggttagcggtgcctcttcagggac

SEQ ID NO: 216486 - DNA, 50 bp, Artificial
  Synthetic oligonucleotide
acggccctccggtggatgtgctcggggcgtcggtattggaacatgcccct

SEQ ID NO: 216487 - DNA, 49 bp, Artificial
  Synthetic oligonucleotide
acggaccgtgttcccaaacccctccgccttcgaacggtcctccaatccg

SEQ ID NO: 216488 - DNA, 50 bp, Artificial
  Synthetic oligonucleotide
acgctttctcaccgatgagggaggggcctacgaacgcaaagggatccccg

SEQ ID NO: 216489 - DNA, 50 bp, Artificial
  Synthetic oligonucleotide
acgcgcaggggccgacagctaagaggggtccgctgagtagcgcagtgccc

SEQ ID NO: 216490 - DNA, 50 bp, Artificial
  Synthetic oligonucleotide
acgatggtcgctcacagccacggggagaggtgggatctggctcgctgaca

SEQ ID NO: 216491 - DNA, 50 bp, Artificial
  Synthetic oligonucleotide
acgagccgacagtcgtcaacaggaccgttgtcgcgttacggttccgtgcc

SEQ ID NO: 216492 - DNA, 50 bp, Artificial
  Synthetic oligonucleotide
acgaccaagtgcgacgctttctcaccgatgagggaggggcctacgaacgc

SEQ ID NO: 216493 - DNA, 49 bp, Artificial
  Synthetic oligonucleotide
ccgacccagcgaacccatacggaaccgttggttttctccgtaaacgaaa

SEQ ID NO: 216494 - DNA, 50 bp, Artificial
  Synthetic oligonucleotide
acgacaaaggacagtgtcgcattcggatgggcttcccaccgcacaccgcc

SEQ ID NO: 216495 - DNA, 50 bp, Artificial
  Synthetic oligonucleotide
accttgcgaatggtccggggccacatccaacagccatactgcttcacggg

SEQ ID NO: 216496 - DNA, 50 bp, Artificial
  Synthetic oligonucleotide
accgtacctgggctagtccattgggcgttgcctcaagcgtcgatgcgccc

SEQ ID NO: 216497 - DNA, 50 bp, Artificial
  Synthetic oligonucleotide
accggtgccgaccctgtgatcgtcgactatttgaaggcgggctggacaga

SEQ ID NO: 216498 - DNA, 50 bp, Artificial
  Synthetic oligonucleotide
accgccttcacccagcgtttggggttcgacgacacaggacgggtcgttct

SEQ ID NO: 216499 - DNA, 50 bp, Artificial
  Synthetic oligonucleotide
acccgctcccacacgtaggccaacgccaaatcaaaccccggcacagtgat

SEQ ID NO: 216500 - DNA, 55 bp, Artificial
  Synthetic oligonucleotide
ccggtcaatccatcgagcctgcccgtatttcggtccacccgcgtgatatcttcac

SEQ ID NO: 216501 - DNA, 55 bp, Artificial
  Synthetic oligonucleotide
cctccgaacaatgaagacgacctctctctaccctcgccagttacaatgagcaggt

SEQ ID NO: 216502 - DNA, 55 bp, Artificial
  Synthetic oligonucleotide
ccttcgcgtgtaagagacggtcccgccctatcgcccctcgaaatgatcgaaacgc

SEQ ID NO: 216503 - DNA, 59 bp, Artificial
  Synthetic oligonucleotide
gaattttgccattcggtcatctcttgataggcgttcttcgcctgccacgtcaaaacgcc

SEQ ID NO: 216504 - DNA, 57 bp, Artificial
  Synthetic oligonucleotide
cttctagcaaattgatacaagattttgcccaatcaaattcggcttgcgaacctttta

SEQ ID NO: 216505 - DNA, 58 bp, Artificial
  Synthetic oligonucleotide
caaacttacgcttacgccctagatcctttgcttgtatggaaaggctataacacatcga

SEQ ID NO: 216506 - DNA, 55 bp, Artificial
  Synthetic oligonucleotide
ctgcacctataattgcaccttgtggcaatttcaattcagaaaccttgcgcccaat

SEQ ID NO: 216507 - DNA, 55 bp, Artificial
  Synthetic oligonucleotide
gaaatcgcttattccgagagaaagaacctattaccagcagttaaaatcctatgag

SEQ ID NO: 216508 - DNA, 55 bp, Artificial
  Synthetic oligonucleotide
ctcggaatattccgcttggcctaagagcacacggggagccgtcgagaagaagacg

SEQ ID NO: 216509 - DNA, 55 bp, Artificial
  Synthetic oligonucleotide
actgcccacaatacaacaaattgcacgattaacgaatcaaacattggcaactccg

SEQ ID NO: 216510 - DNA, 55 bp, Artificial
  Synthetic oligonucleotide
cgtaaacgccattctgcacgacctaaggcgtagaaaccgctaccaagttgttgag

SEQ ID NO: 216511 - DNA, 55 bp, Artificial
  Synthetic oligonucleotide
cggtttaaccggtcagcttagcgcggattcaaactgtgatgtggatcgcgatatg

SEQ ID NO: 216512 - DNA, 55 bp, Artificial
  Synthetic oligonucleotide
gaaaaccacgggttatccacttgatcgctccgcaggattaattgggacagcgggc

SEQ ID NO: 216513 - DNA, 53 bp, Artificial
  Synthetic oligonucleotide
agaaaccacattacgtgaattaaccccagctaaagtaacaggtacattaagcg

SEQ ID NO: 216514 - DNA, 55 bp, Artificial
  Synthetic oligonucleotide
cttccggttgtgcgccctgagttaccccataatctagcgattggttttagtgttg

SEQ ID NO: 216515 - DNA, 55 bp, Artificial
  Synthetic oligonucleotide
actatgggggagttgaattgcataagttatctcatggcgaatcaatgaatgcact

SEQ ID NO: 216516 - DNA, 55 bp, Artificial
  Synthetic oligonucleotide
cctaaaaaacctcagcaagaatatgttttacgagttgaagactttgcacaagatt

SEQ ID NO: 216517 - DNA, 50 bp, Artificial
  Synthetic oligonucleotide
cggttaaaggtggtgtaatttacggttaaaggtggtgtaatttgacatta

SEQ ID NO: 216518 - DNA, 55 bp, Artificial
  Synthetic oligonucleotide
ctttccggttgatctctgccttgattgcgagtcgcattccaccaattgagtccgt

SEQ ID NO: 216519 - DNA, 55 bp, Artificial
  Synthetic oligonucleotide
cttgtgccgactatcattactaaaccttgaatagtatcggttagcaccaccgctc

SEQ ID NO: 216520 - DNA, 54 bp, Artificial
  Synthetic oligonucleotide
gaagcaaccttactgaaagacttgcaaaatattagtaaatacgtcaaagacccc

SEQ ID NO: 216521 - DNA, 55 bp, Artificial
  Synthetic oligonucleotide
cttggttatccggcgcgtgccatgctccctcacctaacgccacaacacccgggat

SEQ ID NO: 216522 - DNA, 55 bp, Artificial
  Synthetic oligonucleotide
ctatgtgcactataaccaggtgctggcttacgttcaatagggaatgtgccgtcca

SEQ ID NO: 216523 - DNA, 55 bp, Artificial
  Synthetic oligonucleotide
ctcagccgaatgaacatttaatgacactcgagcctgaatttgccgttaatctaag

SEQ ID NO: 216524 - DNA, 55 bp, Artificial
  Synthetic oligonucleotide
ctatgtgtttgtcaggccatcgccgtttcccatttggcacgcgggatcaggcaac

SEQ ID NO: 216525 - DNA, 55 bp, Artificial
  Synthetic oligonucleotide
gaactctagtaaccgtggtgtaagtcgtcttgcattacgtatgccacctagcgca

SEQ ID NO: 216526 - DNA, 55 bp, Artificial
  Synthetic oligonucleotide
cttccgtcaatcacaaagtcttcagtacgaacaatcacaccagcaataagtgcgt

SEQ ID NO: 216527 - DNA, 60 bp, Artificial
  Synthetic oligonucleotide
cctagacaagtcatatcttagcaaagggtagctagtaatgcaagagattgcgaagcgtcc

SEQ ID NO: 216528 - DNA, 55 bp, Artificial
  Synthetic oligonucleotide
cggtgcctaccgcgtattcccgtaccatcagtaaatcttcaccgtcgataggcaa

SEQ ID NO: 216529 - DNA, 55 bp, Artificial
  Synthetic oligonucleotide
cggtgcaatgacatgcggattgatgcgtatattcattttaggatctgtcattgct

SEQ ID NO: 216530 - DNA, 55 bp, Artificial
  Synthetic oligonucleotide
cttgcgcaacaaacacgtacgccggaacaattgacaaacgttgctcgcggtggtt

SEQ ID NO: 216531 - DNA, 55 bp, Artificial
  Synthetic oligonucleotide
ctcaccaagctacttgctcgcctctcaactccttttatgcgagccgcggttatgc

SEQ ID NO: 216532 - DNA, 55 bp, Artificial
  Synthetic oligonucleotide
actgattaaggtgtagcgtccgtcacgtaccacttcggtattcgaggtagtctgt

SEQ ID NO: 216533 - DNA, 55 bp, Artificial
  Synthetic oligonucleotide
cttcgggaataatttgaaagcgatcgacataccacataaatccggcaatcactag

SEQ ID NO: 216534 - DNA, 55 bp, Artificial
  Synthetic oligonucleotide
gaccaatcttggtttgagttccgccgtcagttggactataaaacgcaatggctag

SEQ ID NO: 216535 - DNA, 55 bp, Artificial
  Synthetic oligonucleotide
gaccaaatcgaacaaaatcggcagttaatgagcccgcactaataaaggagcctac

SEQ ID NO: 216536 - DNA, 55 bp, Artificial
  Synthetic oligonucleotide
ctccccaattatcgtgagttgttatcatggcgtgagcagccgaaatgtggcgact

SEQ ID NO: 216537 - DNA, 54 bp, Artificial
  Synthetic oligonucleotide
gaataccgtgtattgcgttgttgtattgaccaaacaggcttaggggagaaaccc

SEQ ID NO: 216538 - DNA, 60 bp, Artificial
  Synthetic oligonucleotide
cctatgtcagattgaacactcaaggcatcgaagcttcacagggttcgctgctaatctttt

SEQ ID NO: 216539 - DNA, 55 bp, Artificial
  Synthetic oligonucleotide
gaataccattggaacgcaatccctgctgaagctcttatacgggctgggttcccgt

SEQ ID NO: 216540 - DNA, 55 bp, Artificial
  Synthetic oligonucleotide
cgtactcagggtactctgggtatagcattgatgttctccgttactgccagataag

SEQ ID NO: 216541 - DNA, 55 bp, Artificial
  Synthetic oligonucleotide
actgtatctgctgttcctttgtcattgcgtgtaaggcttcggggcttgcagatac

SEQ ID NO: 216542 - DNA, 55 bp, Artificial
  Synthetic oligonucleotide
ctgtctaattcatccatgccaatacgcgttttcccggtgactggaattttgaccc

SEQ ID NO: 216543 - DNA, 55 bp, Artificial
  Synthetic oligonucleotide
cgtacgcatagttcggtgtaatggtttcgctaccggctttcactttcattacgta

SEQ ID NO: 216544 - DNA, 53 bp, Artificial
  Synthetic oligonucleotide
ctgttcgtaccgttgtggtgaaaggtaaaactaaacgccgtggtgctaagatg

SEQ ID NO: 216545 - DNA, 54 bp, Artificial
  Synthetic oligonucleotide
ctaggaaagcggtcagttaataaataagcggttgcacccggcgtaattaccatc

SEQ ID NO: 216546 - DNA, 55 bp, Artificial
  Synthetic oligonucleotide
cgtaagcaaggtaagctacctgcaatagacgaacggcaaatcgaaatccctacgg

SEQ ID NO: 216547 - DNA, 55 bp, Artificial
  Synthetic oligonucleotide
cgtacagatccgaaaatgagttcagctgaatacggcaactatgcaagagattgct

SEQ ID NO: 216548 - DNA, 55 bp, Artificial
  Synthetic oligonucleotide
ctccactacgtttcaattacttaatcaaactcccttgcctactgacaaggcgtgc

SEQ ID NO: 216549 - DNA, 59 bp, Artificial
  Synthetic oligonucleotide
cctgcgggtcgtattggaaagccattgaaaagctgatggataactctgcgagttaccca

SEQ ID NO: 216550 - DNA, 55 bp, Artificial
  Synthetic oligonucleotide
ctaggcattgcgtacattaacccatcgttcgaactactataatccttgcccgccg

SEQ ID NO: 216551 - DNA, 54 bp, Artificial
  Synthetic oligonucleotide
gttattagctggtgcgcagaacacagaaagcgggcgcttagtggatttagatga

SEQ ID NO: 216552 - DNA, 54 bp, Artificial
  Synthetic oligonucleotide
aaaattcccgcctattcaaggtggcgccctgattttattgacgctggctttatc

SEQ ID NO: 216553 - DNA, 54 bp, Artificial
  Synthetic oligonucleotide
aatctattattcgtaaaagagggattgtttacgttggtttagacgcgctatctg

SEQ ID NO: 216554 - DNA, 54 bp, Artificial
  Synthetic oligonucleotide
ataatccctaacaagagttatacagttgtcatgtggtgtctatgcaaatctcgg

SEQ ID NO: 216555 - DNA, 54 bp, Artificial
  Synthetic oligonucleotide
acgaatatgatttaacccaaccgccgcgttatgacggcgaatgtaagcttatca

SEQ ID NO: 216556 - DNA, 54 bp, Artificial
  Synthetic oligonucleotide
gttatatcgacgctatcagcggacagttacagattgcggttgccttaccttccg

SEQ ID NO: 216557 - DNA, 54 bp, Artificial
  Synthetic oligonucleotide
ccgaaagattggcatatatcaacgacactaacgccttacgcacacaaatctttg

SEQ ID NO: 216558 - DNA, 54 bp, Artificial
  Synthetic oligonucleotide
ttcgcacactaaagagcggtcaagacgttctgagtgtaataatcgcgttgcacg

SEQ ID NO: 216559 - DNA, 54 bp, Artificial
  Synthetic oligonucleotide
gttacaagcgaaggatatggtcaaactcggtcaattaatggcgggttcgcacga

SEQ ID NO: 216560 - DNA, 60 bp, Artificial
  Synthetic oligonucleotide
ccttaaattatgccttcttgataattgttagcatgatgccaatggtcttagctaacaacc

SEQ ID NO: 216561 - DNA, 54 bp, Artificial
  Synthetic oligonucleotide
ttcccgatactgagatcggtaatctaaattgtcgcaccgccggtgttttagcac

SEQ ID NO: 216562 - DNA, 54 bp, Artificial
  Synthetic oligonucleotide
ccggcggccgaaccctctgcaaatcaaggcacattatcgtctaacgagctaaaa

SEQ ID NO: 216563 - DNA, 54 bp, Artificial
  Synthetic oligonucleotide
tagcttaacctccaataggtgcgccccttgtgtctgttataccatgggttagtg

SEQ ID NO: 216564 - DNA, 54 bp, Artificial
  Synthetic oligonucleotide
aaaggcgatatcattgtcgttagtgaaatctcaagaattgagcgttctacactt

SEQ ID NO: 216565 - DNA, 54 bp, Artificial
  Synthetic oligonucleotide
ctcagaaacctctggtgtaacaaatacgctacgtaaatggctaggtacaatcaa

SEQ ID NO: 216566 - DNA, 54 bp, Artificial
  Synthetic oligonucleotide
taatgccagacgaatcagaaacgccaacacagccacttaaaacgacttggtctt

SEQ ID NO: 216567 - DNA, 54 bp, Artificial
  Synthetic oligonucleotide
ttgcccataggcggcaatccacacacttggattagaaagttttgaccaatctgg

SEQ ID NO: 216568 - DNA, 54 bp, Artificial
  Synthetic oligonucleotide
attacgaatgttacaccggtgcttagtcgggttgagcaatataccgcacgtcag

SEQ ID NO: 216569 - DNA, 54 bp, Artificial
  Synthetic oligonucleotide
aggcggtacattaaccacccaagcggacggtcgcacctcgaccaatgcacttgg

SEQ ID NO: 216570 - DNA, 54 bp, Artificial
  Synthetic oligonucleotide
gtatcgtccgtccggtgaaaatttgatccaattgagttatcgttatgccagcaa

SEQ ID NO: 216571 - DNA, 54 bp, Artificial
  Synthetic oligonucleotide
cgaagcgtccctactaccaaaaaaccattcaacgacgctaaacagacaaacgca

SEQ ID NO: 216572 - DNA, 53 bp, Artificial
  Synthetic oligonucleotide
ccccctaaatgataggttactttcgtttataagacttatgtctcggagtataa

SEQ ID NO: 216573 - DNA, 54 bp, Artificial
  Synthetic oligonucleotide
ccctgtccttttaaatgcgcacggctcgccggaatgcctatccccgtcgcactc

SEQ ID NO: 216574 - DNA, 54 bp, Artificial
  Synthetic oligonucleotide
aaagcggggttggttgccaccatgaaaagcgctggaataagtgtgtaatgcagt

SEQ ID NO: 216575 - DNA, 54 bp, Artificial
  Synthetic oligonucleotide
gtggatattttaaacggtggtcgcaaagccttagaagtggcaaacgtggaatta

SEQ ID NO: 216576 - DNA, 54 bp, Artificial
  Synthetic oligonucleotide
attcacccgtaaattatcacgaatacgatcatcggtcgaattcagcgctttact

SEQ ID NO: 216577 - DNA, 54 bp, Artificial
  Synthetic oligonucleotide
tacttataaggttcgcattgaggcagcgaaacaccactctataaagttcgcatt

SEQ ID NO: 216578 - DNA, 54 bp, Artificial
  Synthetic oligonucleotide
catggttaatttgcattgtccgattacgcaagtggctcccttgctgccgcatag

SEQ ID NO: 216579 - DNA, 54 bp, Artificial
  Synthetic oligonucleotide
aagccggctgccgcttgtgccactaatactcggttcattcccattggtcctgct

SEQ ID NO: 216580 - DNA, 54 bp, Artificial
  Synthetic oligonucleotide
ggcgtttgtaggttaaattgccgttagcgtgcatacgaagtgtgccaatctctc

SEQ ID NO: 216581 - DNA, 54 bp, Artificial
  Synthetic oligonucleotide
tttcgatgttatagctcgaattagagcgttctacgatacgagggtttccgatat

SEQ ID NO: 216582 - DNA, 52 bp, Artificial
  Synthetic oligonucleotide
cgagaattaagcctatgatcgtcaaattttttaagaaacacggtaagggaaa

SEQ ID NO: 216583 - DNA, 54 bp, Artificial
  Synthetic oligonucleotide
tcgagtacgcatgtcgtcacaagaacgtcgccttattgatcgcgcattaatgtt

SEQ ID NO: 216584 - DNA, 54 bp, Artificial
  Synthetic oligonucleotide
atccatacggtttgcgtagcaaattaagccgttaaatcgtccataagtttgatc

SEQ ID NO: 216585 - DNA, 54 bp, Artificial
  Synthetic oligonucleotide
cataagtgctgtcaacggcattcgctttcggcatgcctactgttgcataagtac

SEQ ID NO: 216586 - DNA, 54 bp, Artificial
  Synthetic oligonucleotide
cgcgacatggatgaagtcttgcacgccgaatccgggcacatgccggagttcgtc

SEQ ID NO: 216587 - DNA, 54 bp, Artificial
  Synthetic oligonucleotide
acgtattgaaccaggtagagccggctcttacgctccaacagactcactattgca

SEQ ID NO: 216588 - DNA, 54 bp, Artificial
  Synthetic oligonucleotide
aagcaagttggcttacttgtggatcaggcaaagctaacaatgttacggtgtctc

SEQ ID NO: 216589 - DNA, 54 bp, Artificial
  Synthetic oligonucleotide
gcggtcgataaaacaatcggtgtggctaccgctcccgttctagggtcggtgcgg

SEQ ID NO: 216590 - DNA, 54 bp, Artificial
  Synthetic oligonucleotide
aagataggctggagaaagctactggaacacacttattcagcactaagaaagggg

SEQ ID NO: 216591 - DNA, 54 bp, Artificial
  Synthetic oligonucleotide
accactataatcctttgcactatatccgccgtgatatgaaatatcgagacggcg

SEQ ID NO: 216592 - DNA, 54 bp, Artificial
  Synthetic oligonucleotide
tctgactatccctgaattccgccaatttagtgaagtagtgggagatgatgttta

SEQ ID NO: 216593 - DNA, 54 bp, Artificial
  Synthetic oligonucleotide
cgataggcgaacttatagggttcgtgtataggcgaaccctataagttcgcctat

SEQ ID NO: 216594 - DNA, 54 bp, Artificial
  Synthetic oligonucleotide
cggcaatcaagcacaactattcactcaagttcttgctcgttctagcgaagaaat

SEQ ID NO: 216595 - DNA, 54 bp, Artificial
  Synthetic oligonucleotide
cttatgcatccgtagtagaagctcgtccggagtttaatggcaacagtaccgata

SEQ ID NO: 216596 - DNA, 54 bp, Artificial
  Synthetic oligonucleotide
agcacggtgacaacaggcgcagtcaaccgcgaaaccgtatccgtggcacgctta

SEQ ID NO: 216597 - DNA, 54 bp, Artificial
  Synthetic oligonucleotide
agcaagctcctgccttgggcgtggatactgcacaagatttagcgcgagtacggc

SEQ ID NO: 216598 - DNA, 54 bp, Artificial
  Synthetic oligonucleotide
cggtgtgattatgtatgcgattgcaatcagtttgacggcatatgcttttcagcg

SEQ ID NO: 216599 - DNA, 54 bp, Artificial
  Synthetic oligonucleotide
agattgtggtgcttatgtaatggtacacggtgcgttgaaacgtactgcggttaa

SEQ ID NO: 216600 - DNA, 54 bp, Artificial
  Synthetic oligonucleotide
cggtggaagtctgctacaagtgaaccaatatagcgagaggcgtaagggcgattg

SEQ ID NO: 216601 - DNA, 52 bp, Artificial
  Synthetic oligonucleotide
agtttaacaaaacgtccgtatctattcttgtgtggaaatctagggcgtttag

SEQ ID NO: 216602 - DNA, 54 bp, Artificial
  Synthetic oligonucleotide
accgaccgatttagcacagattgacacgctatatagccatccacaagtgattca

SEQ ID NO: 216603 - DNA, 54 bp, Artificial
  Synthetic oligonucleotide
aaaacctcacattgcatcggcgcaagcatgttcgtgataatgttgatcgcgatt

SEQ ID NO: 216604 - DNA, 58 bp, Artificial
  Synthetic oligonucleotide
cgattagttggcttgttgtaataccctgactattggcaaaggctttcaaatcagcgtg

SEQ ID NO: 216605 - DNA, 54 bp, Artificial
  Synthetic oligonucleotide
ttttgctacttatcgtgactatacgatacgagtttcacaaccgctgagattcgg

SEQ ID NO: 216606 - DNA, 54 bp, Artificial
  Synthetic oligonucleotide
gctcgaaatacttgtgatcgtacttagtttagtgcccattgtgttcatcagcta

SEQ ID NO: 216607 - DNA, 54 bp, Artificial
  Synthetic oligonucleotide
ccagccacttatgaaagactgaacggggtttagcctccacctatcctagaaaat

SEQ ID NO: 216608 - DNA, 54 bp, Artificial
  Synthetic oligonucleotide
ggggctctgcgggattagcaggtaaagtgcgcgttgtccatcatttagcgggta

SEQ ID NO: 216609 - DNA, 49 bp, Artificial
  Synthetic oligonucleotide
ggggaccggacaattggggcaggttcgaaaagtaggttatagggtttcg

SEQ ID NO: 216610 - DNA, 54 bp, Artificial
  Synthetic oligonucleotide
ccagtaacgttaggaaacattgtgggtggtgcggtttgtatcggcttattccaa

SEQ ID NO: 216611 - DNA, 54 bp, Artificial
  Synthetic oligonucleotide
ccataacccagtaactgaatgcgatgttcgtccagtggttcacgactcatcaca

SEQ ID NO: 216612 - DNA, 54 bp, Artificial
  Synthetic oligonucleotide
cgatgtgccgtaagcgcgcacttaattgcataagatgttgccgtttcgcctgaa

SEQ ID NO: 216613 - DNA, 54 bp, Artificial
  Synthetic oligonucleotide
ttaatatgcgggcagccattggcacgtcatcattttgtggcgcctttcttggtt

SEQ ID NO: 216614 - DNA, 54 bp, Artificial
  Synthetic oligonucleotide
caaccctcgtgagcatagtagcgtaggtttgtgggtgtatcattatgggcgagc

SEQ ID NO: 216615 - DNA, 59 bp, Artificial
  Synthetic oligonucleotide
cttatcggacaccgaatggccgtcttattgatgcaccaaattacgtttcatctcgtgaa

SEQ ID NO: 216616 - DNA, 60 bp, Artificial
  Synthetic oligonucleotide
cgcaaattttcgtcgtggattataaacgctcaactgaaatctatatgcgtgcttatggag

SEQ ID NO: 216617 - DNA, 54 bp, Artificial
  Synthetic oligonucleotide
ggtcggattatgaagcattttgcgtttcgctccggtaggtgtcataccttggcg

SEQ ID NO: 216618 - DNA, 54 bp, Artificial
  Synthetic oligonucleotide
cgtcctttagcagaacagggagatgggattgcacaggggatgttagcggtgtta

SEQ ID NO: 216619 - DNA, 54 bp, Artificial
  Synthetic oligonucleotide
gcgattaacaattttcacgcgagccacttctacttgttccccttcaaggaattc

SEQ ID NO: 216620 - DNA, 54 bp, Artificial
  Synthetic oligonucleotide
gcaaagagagcgtttctcaagctgaatttgatcggtttcttatcgagaattggc

SEQ ID NO: 216621 - DNA, 54 bp, Artificial
  Synthetic oligonucleotide
ccaagcggttacgccaagccaacgtggtacatattcaggtgtgggggcttgccc

SEQ ID NO: 216622 - DNA, 54 bp, Artificial
  Synthetic oligonucleotide
gggaaaatgcacgtaacttagcgctattggataaccgatccatcattaaggtaa

SEQ ID NO: 216623 - DNA, 54 bp, Artificial
  Synthetic oligonucleotide
ggtatgcaacgcccaagtatccgttacctgtaagcctgttggctcgctatctaa

SEQ ID NO: 216624 - DNA, 53 bp, Artificial
  Synthetic oligonucleotide
aacgctctaagccataggttatttcaccagttaccggtttacattccaagcct

SEQ ID NO: 216625 - DNA, 53 bp, Artificial
  Synthetic oligonucleotide
gttcgggcaataggcttggattgtcggctattagtgtttgaagcgttggactg

SEQ ID NO: 216626 - DNA, 53 bp, Artificial
  Synthetic oligonucleotide
aattcccggagtaataacagctcaatgcgtcgttgacactgccgctacgttga

SEQ ID NO: 216627 - DNA, 59 bp, Artificial
  Synthetic oligonucleotide
cgcaagtaaccgcattgaatgtaccgtgaacgaagaagaacatttggcaatgttagagc

SEQ ID NO: 216628 - DNA, 53 bp, Artificial
  Synthetic oligonucleotide
ctcagctgcggcaatacgtttataaaaggataaacgcatattcacatcaccta

SEQ ID NO: 216629 - DNA, 52 bp, Artificial
  Synthetic oligonucleotide
agttggataaaccttcttaataagcgtgtctaaagagagtttcccggctccc

SEQ ID NO: 216630 - DNA, 50 bp, Artificial
  Synthetic oligonucleotide
aacatttgagaaccgaatagaaatcttttagtaaaaagcgttcttttggg

SEQ ID NO: 216631 - DNA, 53 bp, Artificial
  Synthetic oligonucleotide
acgttttgacattgtggtcaccagcaatctattcggtgatattctcacggatc

SEQ ID NO: 216632 - DNA, 53 bp, Artificial
  Synthetic oligonucleotide
acttgctctgccacagcttgagatttcgccgcgatgtgaccacggataaatgc

SEQ ID NO: 216633 - DNA, 53 bp, Artificial
  Synthetic oligonucleotide
caccgtagtcgtaataatcaggtgttgtggcacgcattggcagatattgaacc

SEQ ID NO: 216634 - DNA, 53 bp, Artificial
  Synthetic oligonucleotide
cttggcgcaaaaggtatcgtgaaaatcggtaatgatggcttacaagtggttct

SEQ ID NO: 216635 - DNA, 53 bp, Artificial
  Synthetic oligonucleotide
ataatatccacttcgttgagtttacctttatagtcggtcactgcgcaggaatc

SEQ ID NO: 216636 - DNA, 53 bp, Artificial
  Synthetic oligonucleotide
aacaaatcacagtgcaaactaaagaccgtcgcagtgttcacgcccaattagca

SEQ ID NO: 216637 - DNA, 53 bp, Artificial
  Synthetic oligonucleotide
aaagtttccacggtacgattgaattctgattgaatccaacgatccgctaatga

SEQ ID NO: 216638 - DNA, 53 bp, Artificial
  Synthetic oligonucleotide
cgctcaaagcgtttaaacttgttttaaatgctttgagggttgaacaactgaaa

SEQ ID NO: 216639 - DNA, 53 bp, Artificial
  Synthetic oligonucleotide
aggtaagggaaatggcttatgtgtgctatatacgcaaattaaccgccaattcc

SEQ ID NO: 216640 - DNA, 53 bp, Artificial
  Synthetic oligonucleotide
gagctagaaccattacaacttggcgaccttcgagtttgcctggggcagactct

SEQ ID NO: 216641 - DNA, 53 bp, Artificial
  Synthetic oligonucleotide
aagggcgcggtgctttcctctgcagtggttgcctttccattggttgttcgtgc

SEQ ID NO: 216642 - DNA, 53 bp, Artificial
  Synthetic oligonucleotide
tacgctaaatgctggtgtgaactgcgcttgtaatgccacacctgttgtaacga

SEQ ID NO: 216643 - DNA, 53 bp, Artificial
  Synthetic oligonucleotide
gattatttgtggtgatccaaccgctgatactgagcatgaacgtaaaggactca

SEQ ID NO: 216644 - DNA, 53 bp, Artificial
  Synthetic oligonucleotide
tcggctgaccttgcaccgcaccgcagccgtaagaaatacaaccttggtcgtta

SEQ ID NO: 216645 - DNA, 53 bp, Artificial
  Synthetic oligonucleotide
ccaatgtaggaggaatgttagattcgctattgccatcgtggttagaatggttg

SEQ ID NO: 216646 - DNA, 53 bp, Artificial
  Synthetic oligonucleotide
tactctgcggtaagcgatagtcgcacccgccctgcgcatttggcattaaacgg

SEQ ID NO: 216647 - DNA, 53 bp, Artificial
  Synthetic oligonucleotide
tcaatgcggaaatttatcaattgacggcggtaatgaatatcctcgtaggttgt

SEQ ID NO: 216648 - DNA, 53 bp, Artificial
  Synthetic oligonucleotide
cccgcaaattcttaatggtttagcataccgttaccccctcatttgtgctaaag

SEQ ID NO: 216649 - DNA, 60 bp, Artificial
  Synthetic oligonucleotide
cgctggcttgctgagaagattggaaacccacgcatcgtagagcgcgctaattcgagctat

SEQ ID NO: 216650 - DNA, 53 bp, Artificial
  Synthetic oligonucleotide
ccacttgcatccctcggtaaagcaccggcgcatctacttcaatcccacgcgca

SEQ ID NO: 216651 - DNA, 53 bp, Artificial
  Synthetic oligonucleotide
taacgcggagtcaaaccaaaacgagatcgtgtggaagccaccgtttgaggatc

SEQ ID NO: 216652 - DNA, 52 bp, Artificial
  Synthetic oligonucleotide
taacgcccgaatggcaccacccgttccttgttacctttcccgataacccgca

SEQ ID NO: 216653 - DNA, 53 bp, Artificial
  Synthetic oligonucleotide
acgggtgattgtaccaaacgttcaagattgctatagcgtgctaggaattatcc

SEQ ID NO: 216654 - DNA, 53 bp, Artificial
  Synthetic oligonucleotide
tggtacgcgattttgttctgcttacgcagaaattaggcttcacaccaattctg

SEQ ID NO: 216655 - DNA, 53 bp, Artificial
  Synthetic oligonucleotide
acgctgtgatgtttgttatcgtgtctgcccgttaatcgataaagcgattacgc

SEQ ID NO: 216656 - DNA, 53 bp, Artificial
  Synthetic oligonucleotide
tgttagttaaagcctgccaagccgcccaaattagttttgacggacaccaagcc

SEQ ID NO: 216657 - DNA, 53 bp, Artificial
  Synthetic oligonucleotide
aacaacgaatgctacaactaacggtaagacaagagaggtgatcgatgagtaac

SEQ ID NO: 216658 - DNA, 53 bp, Artificial
  Synthetic oligonucleotide
atcgtcgcattcacaacctgccatccaatttgccaagcgtgaccggcgcaaaa

SEQ ID NO: 216659 - DNA, 53 bp, Artificial
  Synthetic oligonucleotide
cgtacttatcttcatttgaatgtaaatcgtgtgcctgtggctcattttgcccc

SEQ ID NO: 216660 - DNA, 58 bp, Artificial
  Synthetic oligonucleotide
cggacgtagaacagcgtgggttatcttggtggcattatgggcgttccgctctttcagc

SEQ ID NO: 216661 - DNA, 53 bp, Artificial
  Synthetic oligonucleotide
gcggtaatcaggtacaggtttcgtcccaagtcgcggggaatatagcccgaatt

SEQ ID NO: 216662 - DNA, 53 bp, Artificial
  Synthetic oligonucleotide
ggcacagtcgcacgaccggaaaccgcacgtacgctcacgatagtcgcatcgtg

SEQ ID NO: 216663 - DNA, 53 bp, Artificial
  Synthetic oligonucleotide
gcggcgtagccagtctagcttttctgccataaccaagctcccccggcgctact

SEQ ID NO: 216664 - DNA, 53 bp, Artificial
  Synthetic oligonucleotide
attcgtaaacccgcgacgaaaggaatggaaaatcacacgcctgttgtgctaca

SEQ ID NO: 216665 - DNA, 53 bp, Artificial
  Synthetic oligonucleotide
atcattgccagtaatgtcacgacggaaaccaatccgcccagggtccccgatac

SEQ ID NO: 216666 - DNA, 53 bp, Artificial
  Synthetic oligonucleotide
atgcgagcggggattcctgctgcggtagtgtgatccggtacggcttgtaagac

SEQ ID NO: 216667 - DNA, 53 bp, Artificial
  Synthetic oligonucleotide
cgccattatctgaagacggtctattagagatcggtgaaaaggcgattcaagtg

SEQ ID NO: 216668 - DNA, 53 bp, Artificial
  Synthetic oligonucleotide
gtagggcaaacaagttcgcccaaccgactgaaaagaccgttggatcttcgagt

SEQ ID NO: 216669 - DNA, 53 bp, Artificial
  Synthetic oligonucleotide
cgtcctataatgcgagcggggattcctgctgcggtagtgtgatccggtacggc

SEQ ID NO: 216670 - DNA, 53 bp, Artificial
  Synthetic oligonucleotide
aaaatcgagatcgagcaagagtcagaggtatcgaaattgcttcacgtctagaa

SEQ ID NO: 216671 - DNA, 58 bp, Artificial
  Synthetic oligonucleotide
cggactacaagtatcctggtcatctaaaaattccgtaccatcaatgccaaatacggca

SEQ ID NO: 216672 - DNA, 53 bp, Artificial
  Synthetic oligonucleotide
cctgcctctcaactgacttatgagccacaattggataaccaacgtgatccaaa

SEQ ID NO: 216673 - DNA, 53 bp, Artificial
  Synthetic oligonucleotide
gtaactgaccggcgttgattccttgccggctttggataattacattcgcttta

SEQ ID NO: 216674 - DNA, 53 bp, Artificial
  Synthetic oligonucleotide
gcgcgcagcatgaatatcgcccaagttatagcaagccgaatcgtgcagcggcg

SEQ ID NO: 216675 - DNA, 53 bp, Artificial
  Synthetic oligonucleotide
ggttcggtgtggcggacagtagtaaacataaacaccttcgtgagtaagggtaa

SEQ ID NO: 216676 - DNA, 53 bp, Artificial
  Synthetic oligonucleotide
gggcggggcagcattattaacgggggcattaggtttcgcgatcgctcgtggat

SEQ ID NO: 216677 - DNA, 53 bp, Artificial
  Synthetic oligonucleotide
attatactcggggcgcatgtgcaacccgccggaaacattgccgtcggttttta

SEQ ID NO: 216678 - DNA, 53 bp, Artificial
  Synthetic oligonucleotide
gggctttactgaaggattaatgatgcgtgaccgtcgtaaatttggtgcgggca

SEQ ID NO: 216679 - DNA, 53 bp, Artificial
  Synthetic oligonucleotide
gacgaacctacgtaataagcatggttgtaacttgccaacagtttagcgccggg

SEQ ID NO: 216680 - DNA, 53 bp, Artificial
  Synthetic oligonucleotide
cgttgaccatatagcgtaaggacactgcttgtgagaagcgtacaaaagtatca

SEQ ID NO: 216681 - DNA, 53 bp, Artificial
  Synthetic oligonucleotide
ggggtagtgatcctctgtaagtgacatgggagtgaagaagggcgcgtatccac

SEQ ID NO: 216682 - DNA, 59 bp, Artificial
  Synthetic oligonucleotide
cggcaatcagactgcaagagcctgaccaaccgtgtaacagtataacataaaccgcctaa

SEQ ID NO: 216683 - DNA, 53 bp, Artificial
  Synthetic oligonucleotide
gggttgttccacacctattttttgcgccagcttacgcgttgttaatccttcaa

SEQ ID NO: 216684 - DNA, 53 bp, Artificial
  Synthetic oligonucleotide
ttcgtccggtaaggcactaattagaattcgcccggcttccgtactgtggatat

SEQ ID NO: 216685 - DNA, 53 bp, Artificial
  Synthetic oligonucleotide
ctcaataagtcgccattcatagcctattaaacctacatcagattgcttatatt

SEQ ID NO: 216686 - DNA, 53 bp, Artificial
  Synthetic oligonucleotide
gcccttcgtaaatggacaaaggttcaaccccttcactaacaattacactaggc

SEQ ID NO: 216687 - DNA, 53 bp, Artificial
  Synthetic oligonucleotide
attgctaagtgttcttcttcgtccacaataccttcaatgcggttacttgcgtg

SEQ ID NO: 216688 - DNA, 53 bp, Artificial
  Synthetic oligonucleotide
cggggcgcatgtgcaacccgccggaaacattgccgtcggtttttagcgttaag

SEQ ID NO: 216689 - DNA, 53 bp, Artificial
  Synthetic oligonucleotide
gctgattaatccgtcgccgggtgtggcattgtttgcggatagccgcccgattg

SEQ ID NO: 216690 - DNA, 53 bp, Artificial
  Synthetic oligonucleotide
ttttggtaaaactcgtcttggaacttccctagctctgttggaccgtcaatgaa

SEQ ID NO: 216691 - DNA, 53 bp, Artificial
  Synthetic oligonucleotide
ggagcgtcatcgacttgcgttcgatgtagtgagaagcaaagagatcacgaaaa

SEQ ID NO: 216692 - DNA, 53 bp, Artificial
  Synthetic oligonucleotide
accctcagatggaatactcggtaaggttttaatagaatagtgcgcgcgtggat

SEQ ID NO: 216693 - DNA, 59 bp, Artificial
  Synthetic oligonucleotide
cggcagaacgctatgccaaaaggcacttggatgacttgccaagctcaagttaaacctac

SEQ ID NO: 216694 - DNA, 52 bp, Artificial
  Synthetic oligonucleotide
ccacaggcgtaacagatttagtacaaagcctaagttctggtgttgtgcaaag

SEQ ID NO: 216695 - DNA, 52 bp, Artificial
  Synthetic oligonucleotide
gctgtctgacggcaatcagactgcaagagcctgaccaaccgtgtaacagtat

SEQ ID NO: 216696 - DNA, 52 bp, Artificial
  Synthetic oligonucleotide
tcaccgagtgagccgttggttagaacgtgcaaatggcactttggcgatggac

SEQ ID NO: 216697 - DNA, 52 bp, Artificial
  Synthetic oligonucleotide
tgtggcgtgggcagaagaccaattcgatgcgtccctttggggaggcggttcg

SEQ ID NO: 216698 - DNA, 52 bp, Artificial
  Synthetic oligonucleotide
gggaggcataacgcccgaatggcaccacccgttccttgttacctttcccgat

SEQ ID NO: 216699 - DNA, 52 bp, Artificial
  Synthetic oligonucleotide
gcttaatcgcttgtttcggcgcaacttcacaaccggataagactgaactcgg

SEQ ID NO: 216700 - DNA, 52 bp, Artificial
  Synthetic oligonucleotide
gggagctgctactccctagtatgttgtcttattagtaagcgggcaggctcac

SEQ ID NO: 216701 - DNA, 51 bp, Artificial
  Synthetic oligonucleotide
aaaatcatcggggagaatttacaaacggttcgggctctaattgaaacgaac

SEQ ID NO: 216702 - DNA, 52 bp, Artificial
  Synthetic oligonucleotide
gctcaaacgtttacacaacgccaccgctcgccgtagcacgttggcaacacta

SEQ ID NO: 216703 - DNA, 52 bp, Artificial
  Synthetic oligonucleotide
cgcaacgcatatgttagaagcaagtcaagatttacgagcggtgcaagaacta

SEQ ID NO: 216704 - DNA, 57 bp, Artificial
  Synthetic oligonucleotide
catcgccatttgtttgggtgtactcgtatcacgaatatcgttgggtttggcttgatt

SEQ ID NO: 216705 - DNA, 52 bp, Artificial
  Synthetic oligonucleotide
tgccacttcgatttatgatgcgttgttacgagaaggtgtaattgttcgccca

SEQ ID NO: 216706 - DNA, 52 bp, Artificial
  Synthetic oligonucleotide
tcaaaggttaattgtactaagcggcgagtgcttggctccatcgtagtttcac

SEQ ID NO: 216707 - DNA, 52 bp, Artificial
  Synthetic oligonucleotide
gcgccttgcgttgcacggctataaagtgggcgcaccggatcttcaagcaatc

SEQ ID NO: 216708 - DNA, 52 bp, Artificial
  Synthetic oligonucleotide
caccggaatgccgtcaataaacactggcacgcgattggctttaaatccgcgt

SEQ ID NO: 216709 - DNA, 52 bp, Artificial
  Synthetic oligonucleotide
caccgccataactgaaggcaatctcaggtgattgcaacattacagctccgtc

SEQ ID NO: 216710 - DNA, 52 bp, Artificial
  Synthetic oligonucleotide
ggggctaagactttatcattccaacagagagttgaggcatcgacttaaatta

SEQ ID NO: 216711 - DNA, 52 bp, Artificial
  Synthetic oligonucleotide
caccatttcgttcattacgtccgcgttctccacggaaatcgcccccacggcc

SEQ ID NO: 216712 - DNA, 52 bp, Artificial
  Synthetic oligonucleotide
gcgcacgccctaaatcttaatcaagactgtgacggcaaaatctgtcacgccg

SEQ ID NO: 216713 - DNA, 52 bp, Artificial
  Synthetic oligonucleotide
cgagactttatcggatagcattgaacagcaggattggaatagtactaaacag

SEQ ID NO: 216714 - DNA, 52 bp, Artificial
  Synthetic oligonucleotide
agtctagcttttctgccataaccaagctcccccggcgctactcggcgtacgc

SEQ ID NO: 216715 - DNA, 53 bp, Artificial
  Synthetic oligonucleotide
cattccccaaaaaactcacgttttttagcgaatgacggattttatatcgtgcc

SEQ ID NO: 216716 - DNA, 52 bp, Artificial
  Synthetic oligonucleotide
cagggcgtggcaatatcatcgctttctcaggcggttttcacggtatgaccca

SEQ ID NO: 216717 - DNA, 52 bp, Artificial
  Synthetic oligonucleotide
caggtgggggataatccccctccttgaccgaccccctttgagaccgagcgat

SEQ ID NO: 216718 - DNA, 52 bp, Artificial
  Synthetic oligonucleotide
cgctttagcgaccgcagggcatattaacgacagacaggacgttataaacgcc

SEQ ID NO: 216719 - DNA, 52 bp, Artificial
  Synthetic oligonucleotide
tctagtccgtttaggactgattcagcgcgcgttgctccaccatgaaccaagc

SEQ ID NO: 216720 - DNA, 52 bp, Artificial
  Synthetic oligonucleotide
tggtcgctctagtggcgattttcggtatgtacgccatgggtaaagataccga

SEQ ID NO: 216721 - DNA, 52 bp, Artificial
  Synthetic oligonucleotide
cgctcggcgataacttggcccgccgttgagtaaggttaagccctctggcgtg

SEQ ID NO: 216722 - DNA, 52 bp, Artificial
  Synthetic oligonucleotide
tcgtggctttatgcaatcggcgaactggttggtaaccattccggggcttgcg

SEQ ID NO: 216723 - DNA, 52 bp, Artificial
  Synthetic oligonucleotide
agtcggagcaaggatcgccacttgtttatggttcattaccgccaagaaggtc

SEQ ID NO: 216724 - DNA, 52 bp, Artificial
  Synthetic oligonucleotide
cgctttagtgaacttcgccgagctattgatggtgtaagcgagcgaatgttaa

SEQ ID NO: 216725 - DNA, 52 bp, Artificial
  Synthetic oligonucleotide
atcggctgtaatcggcgctgactaggcgcaacccgcactttaggcaaaacgg

SEQ ID NO: 216726 - DNA, 60 bp, Artificial
  Synthetic oligonucleotide
ctgtcgatgataatgcgcaagggaaattacaaggtactctggtgagcctaaccaatatta

SEQ ID NO: 216727 - DNA, 58 bp, Artificial
  Synthetic oligonucleotide
ccactgctacacaaggctttatccctttctccgttttgcaagttgatagcttgatccc

SEQ ID NO: 216728 - DNA, 52 bp, Artificial
  Synthetic oligonucleotide
accagttaggcttacaatttggtgtgaatggtaccccaagtattgtgaccga

SEQ ID NO: 216729 - DNA, 52 bp, Artificial
  Synthetic oligonucleotide
tcgcgcaatgctactgtagaacgatcgctgccacttgcaacagttggttccg

SEQ ID NO: 216730 - DNA, 52 bp, Artificial
  Synthetic oligonucleotide
atcgctgccacggcaagcggtttgcatcacgcactcgccgcccatcacctac

SEQ ID NO: 216731 - DNA, 52 bp, Artificial
  Synthetic oligonucleotide
tcgactataatggaatctctagccgtacaccttggatgcccagccgaaggag

SEQ ID NO: 216732 - DNA, 52 bp, Artificial
  Synthetic oligonucleotide
tgtaccggaaagcacgtcaggcgttaaggtatatttcatacgttttactgca

SEQ ID NO: 216733 - DNA, 52 bp, Artificial
  Synthetic oligonucleotide
aaaacctggcaattctgacccaagataacgtaattcatagtcgcattacggt

SEQ ID NO: 216734 - DNA, 52 bp, Artificial
  Synthetic oligonucleotide
tgtatagtggcttaaagctccctttcggcgatacaaaccctattgcgtccgt

SEQ ID NO: 216735 - DNA, 51 bp, Artificial
  Synthetic oligonucleotide
accccaacggggtagccttaaaattagcctaggatatacctaccctaggca

SEQ ID NO: 216736 - DNA, 52 bp, Artificial
  Synthetic oligonucleotide
cggcttaattggtgcagtgcctcgcgttgacggataggaagaagaactcatt

SEQ ID NO: 216737 - DNA, 52 bp, Artificial
  Synthetic oligonucleotide
caacttgccagcggtttagcgggcggattgattagtgacagcaccgcagggg

SEQ ID NO: 216738 - DNA, 55 bp, Artificial
  Synthetic oligonucleotide
ccagaaaatgcccgtttagtcattcgtccagatagcggtaacttttttgcgatta

SEQ ID NO: 216739 - DNA, 52 bp, Artificial
  Synthetic oligonucleotide
caacgcattttgaattgggcgtggcgtgcgaccttgacccgtccaagtttta

SEQ ID NO: 216740 - DNA, 52 bp, Artificial
  Synthetic oligonucleotide
gcttatcaacgtactaatcagccaactaattatgccgatgctagctcacgtc

SEQ ID NO: 216741 - DNA, 52 bp, Artificial
  Synthetic oligonucleotide
tccattagagagaacgaacgacaaagaattagagaacgagaacaaacgataa

SEQ ID NO: 216742 - DNA, 52 bp, Artificial
  Synthetic oligonucleotide
cgtgaattttacgtccttgttttataggctcataagtaatattaagatcgga

SEQ ID NO: 216743 - DNA, 52 bp, Artificial
  Synthetic oligonucleotide
tgtgcctgtcaccgattatgctgccgtagtcaccgcattccgtcgtggcgaa

SEQ ID NO: 216744 - DNA, 52 bp, Artificial
  Synthetic oligonucleotide
ccccatcggcctaaattcaagatggattccgtgtgcagaacaagatttagat

SEQ ID NO: 216745 - DNA, 52 bp, Artificial
  Synthetic oligonucleotide
gtttgtgcatacttgagattagaaaccagcgtcccaatccacttcaattgtt

SEQ ID NO: 216746 - DNA, 52 bp, Artificial
  Synthetic oligonucleotide
ttagcgggacatttgcaggtagaagtaccggtaagaatgggtgaaatcctcg

SEQ ID NO: 216747 - DNA, 52 bp, Artificial
  Synthetic oligonucleotide
ctcgtcgttatcagggcatttaggggtttgtgctacggctgtgccgcttaaa

SEQ ID NO: 216748 - DNA, 52 bp, Artificial
  Synthetic oligonucleotide
gcagattgcccggacgctggccagcgagtacgacgccgacccggccagcgcc

SEQ ID NO: 216749 - DNA, 57 bp, Artificial
  Synthetic oligonucleotide
ccatgtaagaaatgccctggctagttttgctttggaaggggaatatccctctaatga

SEQ ID NO: 216750 - DNA, 52 bp, Artificial
  Synthetic oligonucleotide
gtgggttttcggcagagtagtggctaaacgcaggtttccttcgttggtcact

SEQ ID NO: 216751 - DNA, 52 bp, Artificial
  Synthetic oligonucleotide
acgcccgaatgggaacttggcacaggcttactgcaacaacgccacggcaatc

SEQ ID NO: 216752 - DNA, 52 bp, Artificial
  Synthetic oligonucleotide
atttgtcaatatcgtcgcacgtgcattagttgaattgggaaatcgcccaaac

SEQ ID NO: 216753 - DNA, 52 bp, Artificial
  Synthetic oligonucleotide
ttgccaattactcgccaagtcgtgtcgccaaattttcctcttgcaacaccgc

SEQ ID NO: 216754 - DNA, 52 bp, Artificial
  Synthetic oligonucleotide
gttggttaagcccaatggggctaagttatggcggtttaactattacaagcct

SEQ ID NO: 216755 - DNA, 52 bp, Artificial
  Synthetic oligonucleotide
attggggttgcatcatctcacgacacttcataaatcttggacggataattgg

SEQ ID NO: 216756 - DNA, 52 bp, Artificial
  Synthetic oligonucleotide
gcatataaggtgatttaggagtatttgcgcttactttgcctggtggaaccgt

SEQ ID NO: 216757 - DNA, 52 bp, Artificial
  Synthetic oligonucleotide
aaacttgcccgttgccggaggagagacaaccgtcaccacgcttagttgcacc

SEQ ID NO: 216758 - DNA, 52 bp, Artificial
  Synthetic oligonucleotide
atttcatgtctctcattattcgtttcccgtcgtgcaagcgctcaaagattgg

SEQ ID NO: 216759 - DNA, 52 bp, Artificial
  Synthetic oligonucleotide
atggcaagtggttactgactcaatgggcgcattacgcttaaaagttggtcgt

SEQ ID NO: 216760 - DNA, 55 bp, Artificial
  Synthetic oligonucleotide
ccatttttactgctccttagtaccacgtttgtacatcattctaacgttatcttcc

SEQ ID NO: 216761 - DNA, 51 bp, Artificial
  Synthetic oligonucleotide
attgcggcaggccttaaaacccgtcagttggggcatggcaacgcagttgga

SEQ ID NO: 216762 - DNA, 51 bp, Artificial
  Synthetic oligonucleotide
taaaatcaggcgaggttggatattcgttcgcatttaaccaaatatcgcctt

SEQ ID NO: 216763 - DNA, 51 bp, Artificial
  Synthetic oligonucleotide
atcggtaatgcgattttagcccttgcaacactggggtttgtcaacgtagga

SEQ ID NO: 216764 - DNA, 51 bp, Artificial
  Synthetic oligonucleotide
ggcggtacggtgaaaaccagtgcaggacaatacacgcccgtacctgaggcg

SEQ ID NO: 216765 - DNA, 51 bp, Artificial
  Synthetic oligonucleotide
acaatgaagcatagctgtagtaacacaacctatactgtttccccacgttac

SEQ ID NO: 216766 - DNA, 51 bp, Artificial
  Synthetic oligonucleotide
aaagctagtgcgctgtttgcccgaatcaaccgactacgctgccccgggcaa

SEQ ID NO: 216767 - DNA, 51 bp, Artificial
  Synthetic oligonucleotide
gacaaggcgtggaataattgtcgtttaccaagcataatggcttcgtcacga

SEQ ID NO: 216768 - DNA, 51 bp, Artificial
  Synthetic oligonucleotide
ttgagatgcgggaatataattcattccagctacattgcccttaagttcagc

SEQ ID NO: 216769 - DNA, 51 bp, Artificial
  Synthetic oligonucleotide
ggatctgtttatcccggtccaatcggttccgtgctgtcgccgcttctcggc

SEQ ID NO: 216770 - DNA, 51 bp, Artificial
  Synthetic oligonucleotide
tcgccattcggcagataaatagcgcgcccgcccatgtagtgagagatagca

SEQ ID NO: 216771 - DNA, 52 bp, Artificial
  Synthetic oligonucleotide
cccccgtactaactgtcacgccccctgcaataacagtcacgaaccccctgtt

SEQ ID NO: 216772 - DNA, 51 bp, Artificial
  Synthetic oligonucleotide
aatcctgtggcgtgggcagaagaccaattcgatgcatccctttggggagaa

SEQ ID NO: 216773 - DNA, 51 bp, Artificial
  Synthetic oligonucleotide
acaacaaacgggcattttacaaggtatgacgggcgttcgtgatatggcagg

SEQ ID NO: 216774 - DNA, 51 bp, Artificial
  Synthetic oligonucleotide
ctggtctttggtgcacgtgagtaagtggagcgcttgggcgttattggtcgt

SEQ ID NO: 216775 - DNA, 51 bp, Artificial
  Synthetic oligonucleotide
atccaataagagcggttactatccaacgtaatatcagtttgagtacctgct

SEQ ID NO: 216776 - DNA, 51 bp, Artificial
  Synthetic oligonucleotide
aatcggctatctcctttgtccagacgtaattgaggtgtaaccgtcttacgc

SEQ ID NO: 216777 - DNA, 51 bp, Artificial
  Synthetic oligonucleotide
ccgtagatcaaaatgccattgctcgttatagggaagtagtgcctgcgacaa

SEQ ID NO: 216778 - DNA, 51 bp, Artificial
  Synthetic oligonucleotide
aatcgcagtatcccgctgagttattactgctaacagacgctcgaataagcc

SEQ ID NO: 216779 - DNA, 51 bp, Artificial
  Synthetic oligonucleotide
cgtagcgaaattagcggatgaacgtaaatcactcggcaatattttgcttgg

SEQ ID NO: 216780 - DNA, 51 bp, Artificial
  Synthetic oligonucleotide
gataacgactgaaactctattggggttaagatagcggaatgagtaaaagtc

SEQ ID NO: 216781 - DNA, 51 bp, Artificial
  Synthetic oligonucleotide
agcttaatcagcaaattcgcctcgcctgcttgcttaccggcagaaagctcc

SEQ ID NO: 216782 - DNA, 56 bp, Artificial
  Synthetic oligonucleotide
ccccttagtgctataagcctaaggcaatcgggcaacgtgctaaggacacgttacac

SEQ ID NO: 216783 - DNA, 51 bp, Artificial
  Synthetic oligonucleotide
ttttcgataatctgtatctcgcgttctttgctatgatgccagaccctaagc

SEQ ID NO: 216784 - DNA, 51 bp, Artificial
  Synthetic oligonucleotide
cttccgtcatattcagcatttcggcaattctagcccacttcacaggcggat

SEQ ID NO: 216785 - DNA, 51 bp, Artificial
  Synthetic oligonucleotide
aattggaattccggcgccctaccggcaccgaccgcacaataaccccaatcc

SEQ ID NO: 216786 - DNA, 51 bp, Artificial
  Synthetic oligonucleotide
atttagcttcgccgatcagactcatttgcattggacgattaagcacgcggg

SEQ ID NO: 216787 - DNA, 51 bp, Artificial
  Synthetic oligonucleotide
accctttgctatgattagattgttcacgtctggatcatagcaaagacgtac

SEQ ID NO: 216788 - DNA, 51 bp, Artificial
  Synthetic oligonucleotide
ccgcattgtcatttaatcttttcagaacgacaattagacggaattgagcgt

SEQ ID NO: 216789 - DNA, 51 bp, Artificial
  Synthetic oligonucleotide
gccctaaaccgcttaaatctaacttagctaaggcggtttcgagccctttac

SEQ ID NO: 216790 - DNA, 51 bp, Artificial
  Synthetic oligonucleotide
gtgtgagctacgtgagaaaatttatagcactcatcgaataataaggcacca

SEQ ID NO: 216791 - DNA, 51 bp, Artificial
  Synthetic oligonucleotide
acgggttgcatatcatacggcttgccacgtcgaaaaagcagggtgggcgcc

SEQ ID NO: 216792 - DNA, 51 bp, Artificial
  Synthetic oligonucleotide
tgcaaacaccctagaaatgtacgataattccgctacctagtcaatgtttca

SEQ ID NO: 216793 - DNA, 60 bp, Artificial
  Synthetic oligonucleotide
ccccttgagtgcgtagtcagcgatttagagcggttatgagcgtgcttgtgcggtgagcta

SEQ ID NO: 216794 - DNA, 51 bp, Artificial
  Synthetic oligonucleotide
aacgggttcagcgctgcataacgaggtacggcctgcaccgtatggaaagcc

SEQ ID NO: 216795 - DNA, 51 bp, Artificial
  Synthetic oligonucleotide
attggcggggcaaagctctgtttccgagcgggcgcaaaccacattaactgc

SEQ ID NO: 216796 - DNA, 51 bp, Artificial
  Synthetic oligonucleotide
ttctagtacacgatgattttcgctgataacgtgttttgcacgtttgtaggc

SEQ ID NO: 216797 - DNA, 51 bp, Artificial
  Synthetic oligonucleotide
atcgcttgaagaactcccgctgctggtcggcgcttgcggtctgccaccact

SEQ ID NO: 216798 - DNA, 51 bp, Artificial
  Synthetic oligonucleotide
cttttgtcgctttggtttccacatattcagagcttacttcataggcaagta

SEQ ID NO: 216799 - DNA, 51 bp, Artificial
  Synthetic oligonucleotide
ccgaaaagtatcgggcggattgtgtgaagtgcgttgaatatctgattacgg

SEQ ID NO: 216800 - DNA, 51 bp, Artificial
  Synthetic oligonucleotide
ccctttgctaaggctgcgagcactccgtaaccagcctctgtcgcgtaagcg

SEQ ID NO: 216801 - DNA, 51 bp, Artificial
  Synthetic oligonucleotide
gatcacaactcgccatcgcctctgcttgtgccggatcctgcgaccagacaa

SEQ ID NO: 216802 - DNA, 51 bp, Artificial
  Synthetic oligonucleotide
caagcggtttgcatcacgcactcgccgcccatcacctactgcaaggggtgg

SEQ ID NO: 216803 - DNA, 51 bp, Artificial
  Synthetic oligonucleotide
aatgggcaatgcaagtgggcgagcagcaagttgaaactgtatatattcccg

SEQ ID NO: 216804 - DNA, 60 bp, Artificial
  Synthetic oligonucleotide
cccgcaatgctacgcattaaaggagctcgatgagcggtggcttgtgcaaggcgttctagt

SEQ ID NO: 216805 - DNA, 51 bp, Artificial
  Synthetic oligonucleotide
aacaaatccccggacttgcggacgcaatcgcgaaaggtttgggcgtaacga

SEQ ID NO: 216806 - DNA, 51 bp, Artificial
  Synthetic oligonucleotide
aagggaaattacaaggtactctggtgagcctaaccaatattaccgggatca

SEQ ID NO: 216807 - DNA, 51 bp, Artificial
  Synthetic oligonucleotide
cgaatgcgattattgtaacgacacgttatcaagatcactgtattaccacga

SEQ ID NO: 216808 - DNA, 51 bp, Artificial
  Synthetic oligonucleotide
ccaagcttcgaaggaatatgaaacagcagattcttaaacctattgatgagg

SEQ ID NO: 216809 - DNA, 51 bp, Artificial
  Synthetic oligonucleotide
ccagtataattaatgggcttgtgctttcgctgatggttggtatcggttttg

SEQ ID NO: 216810 - DNA, 51 bp, Artificial
  Synthetic oligonucleotide
tacgataacgggagctttagcctacaaggaaagattacaagcaaggtgata

SEQ ID NO: 216811 - DNA, 51 bp, Artificial
  Synthetic oligonucleotide
aacacgtcccgaaaagtagccacgaagcaccaccaacaaccggcatattaa

SEQ ID NO: 216812 - DNA, 51 bp, Artificial
  Synthetic oligonucleotide
tttagcccgaattgaatagaacttatttaacggcggatgacattccggcgt

SEQ ID NO: 216813 - DNA, 51 bp, Artificial
  Synthetic oligonucleotide
gcgacctatacccaacacgatgtgctaagcggtcgcccacggttgcaggta

SEQ ID NO: 216814 - DNA, 51 bp, Artificial
  Synthetic oligonucleotide
tgttgtaacatgtcataacattagtaacacatataacgttgcaaagcatgg

SEQ ID NO: 216815 - DNA, 59 bp, Artificial
  Synthetic oligonucleotide
ccctaccgcctttggctagttattcaagtgctaccaagctgtcgggctgtagagcaaca

SEQ ID NO: 216816 - DNA, 51 bp, Artificial
  Synthetic oligonucleotide
gggaggtgtcacttttaagcccatacgtaaacattcgtcgtacaaccctac

SEQ ID NO: 216817 - DNA, 51 bp, Artificial
  Synthetic oligonucleotide
cgaatgcaaaagtggaaaagtggcgtagggcttgaatgtaggtcattgcat

SEQ ID NO: 216818 - DNA, 51 bp, Artificial
  Synthetic oligonucleotide
ggtttacgttgcatcatattgcctccgttataggtcgtaattgtgtgggtc

SEQ ID NO: 216819 - DNA, 51 bp, Artificial
  Synthetic oligonucleotide
tagacggtgaaccaagcattatgtaccctacttatacagggctacttatgg

SEQ ID NO: 216820 - DNA, 51 bp, Artificial
  Synthetic oligonucleotide
tagccgatcagcggtcgcgccactccccatatggttgttcaagccaattgc

SEQ ID NO: 216821 - DNA, 51 bp, Artificial
  Synthetic oligonucleotide
gaaccgatgtaagcattcacatgacgggcttaccattaacttacactgcga

SEQ ID NO: 216822 - DNA, 51 bp, Artificial
  Synthetic oligonucleotide
tcaaaaaatgatgctaactgagcttggatggctttctgatagtctaacgag

SEQ ID NO: 216823 - DNA, 51 bp, Artificial
  Synthetic oligonucleotide
gaatatgcgtgtcgcctttcgtccgcaaaacggaatgcaggttctggttcg

SEQ ID NO: 216824 - DNA, 51 bp, Artificial
  Synthetic oligonucleotide
cgtgggcaagtaccaccgctgaattggctggacgttatagcgtggcggagg

SEQ ID NO: 216825 - DNA, 51 bp, Artificial
  Synthetic oligonucleotide
tagctcgctgaagctacccagtgcaccatcaagattacctaacacactcgg

SEQ ID NO: 216826 - DNA, 60 bp, Artificial
  Synthetic oligonucleotide
ccgactcactcggcagacaagaacctgaggggtgattatgagccacaataatcgccgcgg

SEQ ID NO: 216827 - DNA, 51 bp, Artificial
  Synthetic oligonucleotide
cgatctaaaatttctacgtgacgtaatgcggattctaataatgcctctggt

SEQ ID NO: 216828 - DNA, 51 bp, Artificial
  Synthetic oligonucleotide
taggtctaatcgcccaatgtcaggcagaagtcgctcgcccgttggtcgctt

SEQ ID NO: 216829 - DNA, 51 bp, Artificial
  Synthetic oligonucleotide
cgtatgtgcatcagcgatgagtgatgtgactcccgctaaaaatcgaactcg

SEQ ID NO: 216830 - DNA, 51 bp, Artificial
  Synthetic oligonucleotide
ttgggtacagccggtggtgcgagcctccaaccctaatccacgtcgtaccgc

SEQ ID NO: 216831 - DNA, 51 bp, Artificial
  Synthetic oligonucleotide
ggctacgaccattacaggacgatgtcagtgagagtaacatgatactttatg

SEQ ID NO: 216832 - DNA, 51 bp, Artificial
  Synthetic oligonucleotide
tccggatgtcgggactttgcgtatcgccaccaccaatacgcaagcgcgcta

SEQ ID NO: 216833 - DNA, 51 bp, Artificial
  Synthetic oligonucleotide
tccgcctctacccgtcaacctcggcgcgatgtgctgctatctgtcggtgat

SEQ ID NO: 216834 - DNA, 51 bp, Artificial
  Synthetic oligonucleotide
cctatcgggtaacctccgatgccctctacacgccctttaaccaacataacg

SEQ ID NO: 216835 - DNA, 51 bp, Artificial
  Synthetic oligonucleotide
cctctgaatttgatcgctaataacccttccgagtactttgttgccatccct

SEQ ID NO: 216836 - DNA, 51 bp, Artificial
  Synthetic oligonucleotide
cgtgaaccaatccagtcaagatctctatcttgaacctcattggttttaacg

SEQ ID NO: 216837 - DNA, 59 bp, Artificial
  Synthetic oligonucleotide
ctgataagcgagatttaaggatacagcggaattgattgtttaagtctgcaattcccacc

SEQ ID NO: 216838 - DNA, 55 bp, Artificial
  Synthetic oligonucleotide
ccgcaggttgcttgtcttttgaagaaagcgacctacccgaaatacaaaagcgtga

SEQ ID NO: 216839 - DNA, 51 bp, Artificial
  Synthetic oligonucleotide
tagggatagagattttataaaagccgttcgcaaaacgtggagcgaacaggc

SEQ ID NO: 216840 - DNA, 51 bp, Artificial
  Synthetic oligonucleotide
acagtgatccgaacgaagacgggttaacctaccgaaaagtggttggcgtgc

SEQ ID NO: 216841 - DNA, 51 bp, Artificial
  Synthetic oligonucleotide
ggcttaaattgtaacgcgtaatcgcctatttcgtgtgttagcgtcatatta

SEQ ID NO: 216842 - DNA, 51 bp, Artificial
  Synthetic oligonucleotide
ttaacgctttccttccgtctgtttgatttccggggtggtgtataagcgatg

SEQ ID NO: 216843 - DNA, 51 bp, Artificial
  Synthetic oligonucleotide
gaaacttcggcgtgtacctggtaatcgtgctccagttcggatacctggagc

SEQ ID NO: 216844 - DNA, 51 bp, Artificial
  Synthetic oligonucleotide
agggcgttgaatgtttgccgaatcgttcttatattcttgcacaattctcac

SEQ ID NO: 216845 - DNA, 51 bp, Artificial
  Synthetic oligonucleotide
aaattaatttgctaagtgttagttcgatattagttagagcgtaggtaacta

SEQ ID NO: 216846 - DNA, 51 bp, Artificial
  Synthetic oligonucleotide
taccttgttgggcgttctgtcctaaatcgtgccacacaaaatcaactcccc

SEQ ID NO: 216847 - DNA, 51 bp, Artificial
  Synthetic oligonucleotide
gcgctggttgggaatgcgtcgagtaaaacgccctaacagcggttggagcgc

SEQ ID NO: 216848 - DNA, 50 bp, Artificial
  Synthetic oligonucleotide
atatcttcaccggtcgtcccatcgccccgagttgcagcctgtaccagctg

SEQ ID NO: 216849 - DNA, 54 bp, Artificial
  Synthetic oligonucleotide
ccgcatttgcttaactgcccgtgtataattttcgtttacccaatctgtttccgc

SEQ ID NO: 216850 - DNA, 50 bp, Artificial
  Synthetic oligonucleotide
gagatccggcggtaccggaatgtgcagctcagccgccaattcgccaaagg

SEQ ID NO: 216851 - DNA, 50 bp, Artificial
  Synthetic oligonucleotide
gaccacctgcgtgggcgactgaaaggcacgtgggggaaatcgcacaaggt

SEQ ID NO: 216852 - DNA, 50 bp, Artificial
  Synthetic oligonucleotide
aaccaacgcgaatcccaacggcgatcccttaaacggcaaccgcccgcgta

SEQ ID NO: 216853 - DNA, 50 bp, Artificial
  Synthetic oligonucleotide
atcaccccgtatggggcggcacgcctgatgagggcagtatggcacgaatc

SEQ ID NO: 216854 - DNA, 50 bp, Artificial
  Synthetic oligonucleotide
gacttgcggacgcaatcgcgaaaggtttgggcgtaacgaccggcgaactt

SEQ ID NO: 216855 - DNA, 50 bp, Artificial
  Synthetic oligonucleotide
attttattgcccgcacggcgaaaattcaggcgtgggcggacagcgaacgc

SEQ ID NO: 216856 - DNA, 50 bp, Artificial
  Synthetic oligonucleotide
tttgctcgataacgcttgattaatagagtcctcgttagaatccggacaca

SEQ ID NO: 216857 - DNA, 50 bp, Artificial
  Synthetic oligonucleotide
aaaagaaatcccctagactgttaagtttggcgactagacacaatctaagg

SEQ ID NO: 216858 - DNA, 50 bp, Artificial
  Synthetic oligonucleotide
aaataccttgccccctcagtcactacgtggcagctcccccggctttgtgg

SEQ ID NO: 216859 - DNA, 50 bp, Artificial
  Synthetic oligonucleotide
atacggagccggataccgagtgccatacgcaggcaaccgcacaagctacc

SEQ ID NO: 216860 - DNA, 60 bp, Artificial
  Synthetic oligonucleotide
ccgccctatcgtgaacattacggatgagtcgcatatcattaccgtaaatccacttctagc

SEQ ID NO: 216861 - DNA, 50 bp, Artificial
  Synthetic oligonucleotide
caagcgagaagcaaggattacgcctgttaagccagagagtaagccgctgg

SEQ ID NO: 216862 - DNA, 50 bp, Artificial
  Synthetic oligonucleotide
attgcgccggtgcaggttgggcattaagtttgaccaattcgcccatgcga

SEQ ID NO: 216863 - DNA, 50 bp, Artificial
  Synthetic oligonucleotide
ttatgccacaaggctattttagaacgttaaaccaatgctggctttccagc

SEQ ID NO: 216864 - DNA, 50 bp, Artificial
  Synthetic oligonucleotide
atgcggtggcggctaacagggcatccagtccttcccgactaatactgcga

SEQ ID NO: 216865 - DNA, 50 bp, Artificial
  Synthetic oligonucleotide
gactgtaataatccacccgagcaaactgcaaccaagctcgtaagattaat

SEQ ID NO: 216866 - DNA, 50 bp, Artificial
  Synthetic oligonucleotide
atttgtgtacatggcacgtgcgattcccagcggactgacgccgccgtgtt

SEQ ID NO: 216867 - DNA, 50 bp, Artificial
  Synthetic oligonucleotide
atacggaaggggtattgccggggccattaaaagtcgcccgacgtgcggct

SEQ ID NO: 216868 - DNA, 50 bp, Artificial
  Synthetic oligonucleotide
gaaaattcaggcgtgggcggacagcgaacgccgcgatattcccgacgaac

SEQ ID NO: 216869 - DNA, 50 bp, Artificial
  Synthetic oligonucleotide
actagcggggcagcataggcggaaagtgccatgccgaaaaggacggcgcc

SEQ ID NO: 216870 - DNA, 50 bp, Artificial
  Synthetic oligonucleotide
tggaggcggggcagcaactgattgcacagacacagaacgaaccggctgct

SEQ ID NO: 216871 - DNA, 60 bp, Artificial
  Synthetic oligonucleotide
tgttcattcggtaacgtctaatccgcagcctgctagtgcgcctgtgcaacaatcagccac

SEQ ID NO: 216872 - DNA, 50 bp, Artificial
  Synthetic oligonucleotide
tgtggtaattggcttaaggcggcccgtaatcgggtgagatcccgtgggcg

SEQ ID NO: 216873 - DNA, 50 bp, Artificial
  Synthetic oligonucleotide
ggttagagattctcatgggcgaacctgatcaaaagccgacacaaatgcta

SEQ ID NO: 216874 - DNA, 50 bp, Artificial
  Synthetic oligonucleotide
agcgatccgtactgtaatgggctgggttgctacggtgcgagggcttgcga

SEQ ID NO: 216875 - DNA, 50 bp, Artificial
  Synthetic oligonucleotide
gcgacgccaccaaaccggatgattggctcccaaatgctgccgaacggctt

SEQ ID NO: 216876 - DNA, 50 bp, Artificial
  Synthetic oligonucleotide
gccttgcgaacgggcggacggaagactgagcggatccacggcataactgc

SEQ ID NO: 216877 - DNA, 50 bp, Artificial
  Synthetic oligonucleotide
agcgctctttgccgagcgtcctcaagccattgttcgtctttgggccaccg

SEQ ID NO: 216878 - DNA, 50 bp, Artificial
  Synthetic oligonucleotide
agcggttcgactgatgaattaggtgcaaacggcttaaatggttgggtaga

SEQ ID NO: 216879 - DNA, 50 bp, Artificial
  Synthetic oligonucleotide
ctacattgtaagtacattgcatttatattctagcacaatttttgaacagc

SEQ ID NO: 216880 - DNA, 50 bp, Artificial
  Synthetic oligonucleotide
ctaccggcgggcatacggcgcaacacgtcagctatgtgacggacggttgc

SEQ ID NO: 216881 - DNA, 50 bp, Artificial
  Synthetic oligonucleotide
ccgttgctacacgcaatgcgccacggcaacccgcaacaagccgagcttat

SEQ ID NO: 216882 - DNA, 60 bp, Artificial
  Synthetic oligonucleotide
tgttataccaatcgtagcaataactcctgaagttatcccagatagagcttcggctgtatt

SEQ ID NO: 216883 - DNA, 50 bp, Artificial
  Synthetic oligonucleotide
gccgctttcgctatgagcgccgctttcgtacaaacgggtttggggcgtcg

SEQ ID NO: 216884 - DNA, 50 bp, Artificial
  Synthetic oligonucleotide
gccgcatttcccgggcggaagtcacattaattcgggtcacccccgccggc

SEQ ID NO: 216885 - DNA, 50 bp, Artificial
  Synthetic oligonucleotide
acaacgcaacgccggctcttgtgcccctcgcaaggtaaagcgtgccacat

SEQ ID NO: 216886 - DNA, 50 bp, Artificial
  Synthetic oligonucleotide
gccgagcgtcctcaagccattgttcgtctttgggccaccgttgccatgtc

SEQ ID NO: 216887 - DNA, 50 bp, Artificial
  Synthetic oligonucleotide
gtgagggcatccgtcgctcgcttatattcaccgccagtcccccactggtc

SEQ ID NO: 216888 - DNA, 50 bp, Artificial
  Synthetic oligonucleotide
gtgcacaggcatcggaaaccgttgaaccgatcccgggcgccttgggtatg

SEQ ID NO: 216889 - DNA, 50 bp, Artificial
  Synthetic oligonucleotide
gtgcatcacaagagttcgtatctaaagagcgtggcttacctgcgaaatca

SEQ ID NO: 216890 - DNA, 50 bp, Artificial
  Synthetic oligonucleotide
acaaacgctaaccaataccacggctgaacaatctccgcttgcttttgatc

SEQ ID NO: 216891 - DNA, 50 bp, Artificial
  Synthetic oligonucleotide
ctatagacagatacttttacgcctaaagccagatgttgccgatatgtttg

SEQ ID NO: 216892 - DNA, 50 bp, Artificial
  Synthetic oligonucleotide
ccgcttgtgtgagggcatccgtcgctcgcttatattcaccgccagtcccc

SEQ ID NO: 216893 - DNA, 60 bp, Artificial
  Synthetic oligonucleotide
tgtggctgattgttgcacaggcgcactagcaggctgcggattagacgttaccgaatgaac

SEQ ID NO: 216894 - DNA, 50 bp, Artificial
  Synthetic oligonucleotide
gtgggcgactgaaaggcacgtgggggaaatcgcacaaggtagcggtgtta

SEQ ID NO: 216895 - DNA, 50 bp, Artificial
  Synthetic oligonucleotide
ccgcgttatacggaatacagcgcgaccctgcacaaactggtggcgtcggc

SEQ ID NO: 216896 - DNA, 50 bp, Artificial
  Synthetic oligonucleotide
ccgccgcagtggcctcaatcgacccgtggtgtaagcgaaacccgactggc

SEQ ID NO: 216897 - DNA, 50 bp, Artificial
  Synthetic oligonucleotide
aattggagggcggggcaggttgctatttgtatccgtgcggtgcggctgcc

SEQ ID NO: 216898 - DNA, 50 bp, Artificial
  Synthetic oligonucleotide
gcccgtaaacccggtaggaagcgcgcgacaaagagcactcttgaaccgta

SEQ ID NO: 216899 - DNA, 50 bp, Artificial
  Synthetic oligonucleotide
gttcatagtgtgagcctagtcgcttagccttatagtgctaagggggtgat

SEQ ID NO: 216900 - DNA, 50 bp, Artificial
  Synthetic oligonucleotide
ctcaccgcaacccgttggtggattggctttggacattggcgcgggaacgc

SEQ ID NO: 216901 - DNA, 50 bp, Artificial
  Synthetic oligonucleotide
acttggataatgcttgaagtagattgctgattcacttggttaagcggcat

SEQ ID NO: 216902 - DNA, 50 bp, Artificial
  Synthetic oligonucleotide
gttctggagaaacggtcacctacacgccaccggatcacaccactccggga

SEQ ID NO: 216903 - DNA, 50 bp, Artificial
  Synthetic oligonucleotide
gttgggactgcccgtcactcaagggcttgccattgcgtccggattaggct

SEQ ID NO: 216904 - DNA, 53 bp, Artificial
  Synthetic oligonucleotide
tgtgcgtttatccctgacgtaagggcaagttacgccttgcccgaaaacaacgg

SEQ ID NO: 216905 - DNA, 50 bp, Artificial
  Synthetic oligonucleotide
gctccgcattgataaccgcccccttaagattcgtgtcacgcccactgcga

SEQ ID NO: 216906 - DNA, 50 bp, Artificial
  Synthetic oligonucleotide
gctcggctaactgcggtgtcgtccaaggtttaccaggaatatctaacgtc

SEQ ID NO: 216907 - DNA, 50 bp, Artificial
  Synthetic oligonucleotide
cggtcgtcccctcccgaaacgcaccaacatcgttctgtcccgccaacctt

SEQ ID NO: 216908 - DNA, 50 bp, Artificial
  Synthetic oligonucleotide
cggtccggcaaaaagccgtaatgtaggggcggagcacgcacaacacgact

SEQ ID NO: 216909 - DNA, 50 bp, Artificial
  Synthetic oligonucleotide
accgcacttacgggcggaacaatcttcggtccccgttgggggctgggtta

SEQ ID NO: 216910 - DNA, 50 bp, Artificial
  Synthetic oligonucleotide
accggggttcgggtaggagccgggatagcccaagggttagctcttggggc

SEQ ID NO: 216911 - DNA, 50 bp, Artificial
  Synthetic oligonucleotide
gctgaacaaggacgtgtggccatggtgttacctatggaggcggggcagca

SEQ ID NO: 216912 - DNA, 50 bp, Artificial
  Synthetic oligonucleotide
cggcgaacgcattcacgtagagcttgcgaaagaagtgcctgcagtggggg

SEQ ID NO: 216913 - DNA, 50 bp, Artificial
  Synthetic oligonucleotide
ggaacatacccagacgggagacatcacgcaatccacgttactattgacgg

SEQ ID NO: 216914 - DNA, 50 bp, Artificial
  Synthetic oligonucleotide
agcacttcgaagtttactaacatgtggcgacgaatatcgctcaacacaga

SEQ ID NO: 216915 - DNA, 60 bp, Artificial
  Synthetic oligonucleotide
tggtgtggagccgaatgaacgcgatattatgcttccgttaggcgaccgtggcggtcatac

SEQ ID NO: 216916 - DNA, 50 bp, Artificial
  Synthetic oligonucleotide
accggtggaaatgacgcaactcgaacgctggggttgtccttggtcgcgta

SEQ ID NO: 216917 - DNA, 50 bp, Artificial
  Synthetic oligonucleotide
gcgtgaaccggcttatcctcaggttgtggtgggcacgcaaatcggcgaac

SEQ ID NO: 216918 - DNA, 50 bp, Artificial
  Synthetic oligonucleotide
cgctgcataacgaggtacggcctgcaccgtatggaaagcctgtggcgcca

SEQ ID NO: 216919 - DNA, 50 bp, Artificial
  Synthetic oligonucleotide
gcggtgctaaggccatcgagccaacaaccatgccgactaatccggcacta

SEQ ID NO: 216920 - DNA, 50 bp, Artificial
  Synthetic oligonucleotide
cgcgttcgttaggcatcaatctcttccgtttacgctggtacgctaacatc

SEQ ID NO: 216921 - DNA, 50 bp, Artificial
  Synthetic oligonucleotide
cgcgtatgcggcaatgtttggtagttggatggagcgcgttggcccacgta

SEQ ID NO: 216922 - DNA, 50 bp, Artificial
  Synthetic oligonucleotide
cgccgtggaagcgggtttggagcccttggcggatttgctttggtcggaac

SEQ ID NO: 216923 - DNA, 50 bp, Artificial
  Synthetic oligonucleotide
cgccggagacgattgactggctcgaatcgccgaaacatgcctcgcaggca

SEQ ID NO: 216924 - DNA, 50 bp, Artificial
  Synthetic oligonucleotide
ggcgaccacataataccgcgtgccccaaacctttcgcattgccttggcgg

SEQ ID NO: 216925 - DNA, 50 bp, Artificial
  Synthetic oligonucleotide
cgccgccctgatgtggcattacgcggccatctaatcgccacgctagaaag

SEQ ID NO: 216926 - DNA, 60 bp, Artificial
  Synthetic oligonucleotide
tggcatagctttgtgtgtttggattacttagcgtgttggcatagctttgtgtgtttggat

SEQ ID NO: 216927 - DNA, 50 bp, Artificial
  Synthetic oligonucleotide
cgcccgcaccaagacctttcgtcgttgcggcaccgatttgaaccgtttgc

SEQ ID NO: 216928 - DNA, 50 bp, Artificial
  Synthetic oligonucleotide
gcgctatcaattgcaagcgtccggcagaacgctccgccaaagcttgcccg

SEQ ID NO: 216929 - DNA, 50 bp, Artificial
  Synthetic oligonucleotide
agccgcaaccgttaaccgctcaccggcagtcgaacgttgatacagccata

SEQ ID NO: 216930 - DNA, 50 bp, Artificial
  Synthetic oligonucleotide
agccgttaaggcgcaacttgaggcgacaggcgagttggagcgtttggata

SEQ ID NO: 216931 - DNA, 50 bp, Artificial
  Synthetic oligonucleotide
gcgcccgaacatccagcggtcccagcatacccgctttcaaatcaccggct

SEQ ID NO: 216932 - DNA, 50 bp, Artificial
  Synthetic oligonucleotide
agcgaagggattaaacggcacagtgacggggcggaaggaagtcacggcaa

SEQ ID NO: 216933 - DNA, 50 bp, Artificial
  Synthetic oligonucleotide
cgactgatttccgccagtccccgggtaatcagcgcagtacgtgcgttggc

SEQ ID NO: 216934 - DNA, 50 bp, Artificial
  Synthetic oligonucleotide
ggttaccgggatggtagccggggcccataaagccgcccattgcacgggcg

SEQ ID NO: 216935 - DNA, 50 bp, Artificial
  Synthetic oligonucleotide
tcaatttgaacgtacgccacttaaccgccgttaccttgccgagttgtgcc

SEQ ID NO: 216936 - DNA, 50 bp, Artificial
  Synthetic oligonucleotide
tcacgatctaacgcaccgcttggacaggcgtgagcacaagggatgtccgg

SEQ ID NO: 216937 - DNA, 60 bp, Artificial
  Synthetic oligonucleotide
tggcaggccccggctcaatcagtgctacaattgtgtttggctcgacacaacatcaggctc

SEQ ID NO: 216938 - DNA, 50 bp, Artificial
  Synthetic oligonucleotide
tcacgcacaatgtgagcaacgttttccggcgcggaaccaccgtcaagtgc

SEQ ID NO: 216939 - DNA, 50 bp, Artificial
  Synthetic oligonucleotide
ctgcacgctccgtttgggcgaattggcggacgcaagctatatcgcacgcc

SEQ ID NO: 216940 - DNA, 50 bp, Artificial
  Synthetic oligonucleotide
ccaatcgccgaacccgcgttgtgacccagcgtccagattacgagcaacgc

SEQ ID NO: 216941 - DNA, 50 bp, Artificial
  Synthetic oligonucleotide
ccaacgcttgccagcgatcgacaacaaacgtatctcgcttgtttaactca

SEQ ID NO: 216942 - DNA, 50 bp, Artificial
  Synthetic oligonucleotide
ccaaccaaccggacagcgatagcctgcgttggtcgggcgaaaaacacgcc

SEQ ID NO: 216943 - DNA, 50 bp, Artificial
  Synthetic oligonucleotide
tcccctgcatagccgcctcttgcactggttacgcctttaccacgcacgcg

SEQ ID NO: 216944 - DNA, 50 bp, Artificial
  Synthetic oligonucleotide
catctcgcgagctcccaccagaatgttaagaaatacagtccaaactgaat

SEQ ID NO: 216945 - DNA, 50 bp, Artificial
  Synthetic oligonucleotide
tcgcgggtcagtatttcccctcgcccgagagtcgccacgcacactaaggt

SEQ ID NO: 216946 - DNA, 50 bp, Artificial
  Synthetic oligonucleotide
cagtcaaggcttaggtgctgatagcaaaggtatcgcagcgttcctgatgc

SEQ ID NO: 216947 - DNA, 50 bp, Artificial
  Synthetic oligonucleotide
cttacattggatcaagctcgctcgaaaatactcgaacagattcccttccc

SEQ ID NO: 216948 - DNA, 60 bp, Artificial
  Synthetic oligonucleotide
ctcttgagcctttgattattgagcttgctagggttggcaataacttaaatcagataacaa

SEQ ID NO: 216949 - DNA, 57 bp, Artificial
  Synthetic oligonucleotide
tggaacacaacttctatcggtatgtctttggcggttctgggtgtattacatattttc

SEQ ID NO: 216950 - DNA, 50 bp, Artificial
  Synthetic oligonucleotide
cagcgcttggctgcttgactggcaatgggtggacgtagtcgccagcgtca

SEQ ID NO: 216951 - DNA, 50 bp, Artificial
  Synthetic oligonucleotide
cagcaattcaacctgccgaacggcgattgcctggtggggattcgtccgga

SEQ ID NO: 216952 - DNA, 50 bp, Artificial
  Synthetic oligonucleotide
cagataacaaaggcttctaatgctacattgcggtttttcaatcattacaa

SEQ ID NO: 216953 - DNA, 50 bp, Artificial
  Synthetic oligonucleotide
cagacgtggtgactaatacttcccgttcctcgttcggcattttgacaatg

SEQ ID NO: 216954 - DNA, 50 bp, Artificial
  Synthetic oligonucleotide
gatatctcaggctacatcaatatctccagcggcgcaaatgttactataca

SEQ ID NO: 216955 - DNA, 50 bp, Artificial
  Synthetic oligonucleotide
aacggtcacctacacgccaccggatcacaccactccgggacgtaccgtaa

SEQ ID NO: 216956 - DNA, 50 bp, Artificial
  Synthetic oligonucleotide
aacggtagatttagcgcgtacgccgccgcttgcccaacaaattccggcgg

SEQ ID NO: 216957 - DNA, 50 bp, Artificial
  Synthetic oligonucleotide
tgattgtgttgtttgcgggcaaaaggttccgcctgaacgcggtcggaaaa

SEQ ID NO: 216958 - DNA, 50 bp, Artificial
  Synthetic oligonucleotide
tgcaacgcccacaatattcccagttccaatcgttgctgctaatgcggtac

SEQ ID NO: 216959 - DNA, 50 bp, Artificial
  Synthetic oligonucleotide
tgcagaaatcatagatttaattctgttcttgataacaacgttcatttgac

SEQ ID NO: 216960 - DNA, 59 bp, Artificial
  Synthetic oligonucleotide
tgcttttggtgttggccttattatcggcccaatgctagggggattattaggtgatatca

SEQ ID NO: 216961 - DNA, 50 bp, Artificial
  Synthetic oligonucleotide
tgccatcctactatacgctctcacacatatcatccgtcgctaatgtactg

SEQ ID NO: 216962 - DNA, 50 bp, Artificial
  Synthetic oligonucleotide
aacgaattggcaaacttaatagatggacatcaggtgtatgcggcagtgtc

SEQ ID NO: 216963 - DNA, 50 bp, Artificial
  Synthetic oligonucleotide
aaccgcacaatcggggtcatcccttcgccaagggaaatgccacgccaaga

SEQ ID NO: 216964 - DNA, 50 bp, Artificial
  Synthetic oligonucleotide
aaccgaaacgcccgcctgtgttatggattggcgcgcaagaatgtacgggg

SEQ ID NO: 216965 - DNA, 50 bp, Artificial
  Synthetic oligonucleotide
gccagacattcggggattacgccgtacaggcttggcggggtggaaaggta

SEQ ID NO: 216966 - DNA, 50 bp, Artificial
  Synthetic oligonucleotide
gttggtttcgccctgtgcttcctattgcgtgaccgccctgcttccatggg

SEQ ID NO: 216967 - DNA, 50 bp, Artificial
  Synthetic oligonucleotide
gccaacgaagcccccactaaacacgccaccacaatgcgcggagaacgaat

SEQ ID NO: 216968 - DNA, 50 bp, Artificial
  Synthetic oligonucleotide
gcattgcccccagaaatcccacgtggcgcagtgacagtacgcctttgtgc

SEQ ID NO: 216969 - DNA, 50 bp, Artificial
  Synthetic oligonucleotide
acgccgtttgacggacgtggcaatgcaaacctgtgccgccccgagttatg

SEQ ID NO: 216970 - DNA, 50 bp, Artificial
  Synthetic oligonucleotide
cccgttgtccgataccttgcgtccgggctttgttattggcgcctttcgga

SEQ ID NO: 216971 - DNA, 58 bp, Artificial
  Synthetic oligonucleotide
tgctatcggcaaacggtgtaacgtgtccttagcacgttgcccgattgccttaggctta

SEQ ID NO: 216972 - DNA, 50 bp, Artificial
  Synthetic oligonucleotide
gcatgatgcaggcagtggacggtagttccgatggtggcaacgccagctgg

SEQ ID NO: 216973 - DNA, 50 bp, Artificial
  Synthetic oligonucleotide
cccgatgaatcgccatacccaccgttaagcttagcccgtccgtggggacg

SEQ ID NO: 216974 - DNA, 50 bp, Artificial
  Synthetic oligonucleotide
taataccggttgttctcccattaaagggacacctttaccggccaaccaag

SEQ ID NO: 216975 - DNA, 50 bp, Artificial
  Synthetic oligonucleotide
tacacactaagcgtcgccactagctttagccgtaaacaacaagacgggag

SEQ ID NO: 216976 - DNA, 50 bp, Artificial
  Synthetic oligonucleotide
tacattaggatttgcgcccgcaccaagacctttcgtcgttgcggcaccga

SEQ ID NO: 216977 - DNA, 50 bp, Artificial
  Synthetic oligonucleotide
ccccgcccctaaataaaccaagcgtcctccctgttgaaaggctgcggtga

SEQ ID NO: 216978 - DNA, 50 bp, Artificial
  Synthetic oligonucleotide
tacctgtcagtgcacaggcatcggaaaccgttgaaccgatcccgggcgcc

SEQ ID NO: 216979 - DNA, 50 bp, Artificial
  Synthetic oligonucleotide
aatcccaacggcgatcccttaaacggcaaccgcccgcgtaccgattttgc

SEQ ID NO: 216980 - DNA, 50 bp, Artificial
  Synthetic oligonucleotide
ctcggcgtgctactaactactgaaacttcgtctaacactgcaacatcgtt

SEQ ID NO: 216981 - DNA, 50 bp, Artificial
  Synthetic oligonucleotide
gcaggtctcagcgcttggctgcttgactggcaatgggtggacgtagtcgc

SEQ ID NO: 216982 - DNA, 55 bp, Artificial
  Synthetic oligonucleotide
tgcgttattgtccaaccaattccacaaaatcgttttttgcgattcggttaatgtg

SEQ ID NO: 216983 - DNA, 50 bp, Artificial
  Synthetic oligonucleotide
cccacaaggtactcagctagtgatatttactcgctaatggagtatcccgt

SEQ ID NO: 216984 - DNA, 50 bp, Artificial
  Synthetic oligonucleotide
aagttcgcgttgtgcaacatatggctgggcgtatttccgtcaaatcgatg

SEQ ID NO: 216985 - DNA, 50 bp, Artificial
  Synthetic oligonucleotide
taggcggtgcattgggcgtaattgccgttttggtccgccaggagttgtta

SEQ ID NO: 216986 - DNA, 50 bp, Artificial
  Synthetic oligonucleotide
ccattttaatcatcaacgcaaacacgccgtaaggggttaagcgaatcaca

SEQ ID NO: 216987 - DNA, 50 bp, Artificial
  Synthetic oligonucleotide
acttgccaatctaggcacgccggatagcccaacaccgaagtcaattagcc

SEQ ID NO: 216988 - DNA, 50 bp, Artificial
  Synthetic oligonucleotide
aggggcattaggcccggggattcttatggcatccgcagcggtaggcggtt

SEQ ID NO: 216989 - DNA, 50 bp, Artificial
  Synthetic oligonucleotide
tatatcgctctaggatcaccttgcaccgcggctcgactgtaccaccgata

SEQ ID NO: 216990 - DNA, 50 bp, Artificial
  Synthetic oligonucleotide
ctgaaaatgcccgtccgccacatagcaagccggtgccagctcgggattta

SEQ ID NO: 216991 - DNA, 50 bp, Artificial
  Synthetic oligonucleotide
ctgacacatgcggcgtttttaccgacgcggggcaatatgcctgcggagtt

SEQ ID NO: 216992 - DNA, 50 bp, Artificial
  Synthetic oligonucleotide
tatgacctatcaccccgtatggggcggcacgcctgatgagggcagtatgg

SEQ ID NO: 216993 - DNA, 54 bp, Artificial
  Synthetic oligonucleotide
tgcgtctcccaaacctagccccccctcaacttcgctgataaattcgtttgggtg

SEQ ID NO: 216994 - DNA, 50 bp, Artificial
  Synthetic oligonucleotide
tatgccgcccaaccggtaccgactaaaactgcaccggaatgttcctgccg

SEQ ID NO: 216995 - DNA, 50 bp, Artificial
  Synthetic oligonucleotide
tatggcaagtccgccgcagtggcctcaatcgacccgtggtgtaagcgaaa

SEQ ID NO: 216996 - DNA, 50 bp, Artificial
  Synthetic oligonucleotide
ccacttgtgcgccttgttttaatgcacgaagctggatgtcataacgttgg

SEQ ID NO: 216997 - DNA, 50 bp, Artificial
  Synthetic oligonucleotide
agggtttcttccgtttgtgcgtcggaaaccgcacccgaatgcaactcgga

SEQ ID NO: 216998 - DNA, 59 bp, Artificial
  Synthetic oligonucleotide
tgcgactggctttgcgttcgcctatatcaaacaaccctgaataaataccacgataaatg

SEQ ID NO: 216999 - DNA, 52 bp, Artificial
  Synthetic oligonucleotide
tgcgaaacactttatcgaattaaaccaacgttaccgaaagcgtgccaaaatt

SEQ ID NO: 217000 - DNA, 60 bp, Artificial
  Synthetic oligonucleotide
tgcaacggtgaaagtggtcgtcaatactccgggatcaacgtacttctgctttggatgagc

SEQ ID NO: 217001 - DNA, 53 bp, Artificial
  Synthetic oligonucleotide
tgatttttttagtatcactctcggggcttttggtgtactattgtctaaaattt

SEQ ID NO: 217002 - DNA, 57 bp, Artificial
  Synthetic oligonucleotide
tcccctcaaagaccttatgacgcttaatccgccggttatggcatacagatagtttgg

SEQ ID NO: 217003 - DNA, 60 bp, Artificial
  Synthetic oligonucleotide
ctctgcgtcaagtccatataacttattacgcaatgttgctaacataacactagcttgtta

SEQ ID NO: 217004 - DNA, 60 bp, Artificial
  Synthetic oligonucleotide
tcctgttccaccccaagtaaaagcatatcgtaaatactcatcataacactctgccatgat

SEQ ID NO: 217005 - DNA, 56 bp, Artificial
  Synthetic oligonucleotide
tccttcaaagctatgtgtttctggttttactaaggttccccataatgaacacgaga

SEQ ID NO: 217006 - DNA, 59 bp, Artificial
  Synthetic oligonucleotide
tcgggcttcacagagggcgggatttgtattcatctgaacggaagggatattccattaga

SEQ ID NO: 217007 - DNA, 53 bp, Artificial
  Synthetic oligonucleotide
tcgggtaaattaaattggcattacccttttcacttaaccaatctaccgtgcag

SEQ ID NO: 217008 - DNA, 56 bp, Artificial
  Synthetic oligonucleotide
tcgtgtaattgttcatttatacgaaaactagctttctgtttcatagcggaataccg

SEQ ID NO: 217009 - DNA, 54 bp, Artificial
  Synthetic oligonucleotide
tcgttccccgtgtccacggttgatgcggctcggggaagtaaaattctacaccca

SEQ ID NO: 217010 - DNA, 60 bp, Artificial
  Synthetic oligonucleotide
tctaatcgtgttattcgtgttgctctacagcccgacagcttggtagcacttgaataacta

SEQ ID NO: 217011 - DNA, 55 bp, Artificial
  Synthetic oligonucleotide
tctgaccgctacggaactcaccgaacacggtagaacctttttcaatcagtagtac

SEQ ID NO: 217012 - DNA, 60 bp, Artificial
  Synthetic oligonucleotide
tctgcatacttgacacgccgactgccgctcgggtaatagacttggattgtcggctattaa

SEQ ID NO: 217013 - DNA, 60 bp, Artificial
  Synthetic oligonucleotide
tcttgagtttccagtacggagcctaatgtaaaatgcgcaatagagcttaatgcatacacg

SEQ ID NO: 217014 - DNA, 58 bp, Artificial
  Synthetic oligonucleotide
ctcagccgaaatagccaaagaacagagtggggggatcaagctatcaacctgtcaaacg

SEQ ID NO: 217015 - DNA, 59 bp, Artificial
  Synthetic oligonucleotide
tgaaacaggaggttatatatgcgtagatgaacggtacactggttcggaatggaactgcc

SEQ ID NO: 217016 - DNA, 53 bp, Artificial
  Synthetic oligonucleotide
tgagaaaatccacgttaaaacgtggattttctcttaaatagaccccgaataca

SEQ ID NO: 217017 - DNA, 57 bp, Artificial
  Synthetic oligonucleotide
tgagtctggttgagcgtaggttaatgtatcatgtgttaagccggataaaccctaaaa

SEQ ID NO: 217018 - DNA, 56 bp, Artificial
  Synthetic oligonucleotide
tgatcgggcatacaatggaattaggtcgggggcaggttgcaatcctacccccttcc

SEQ ID NO: 217019 - DNA, 60 bp, Artificial
  Synthetic oligonucleotide
tgattgtagattgtgccagaacccatctgtggaaaatcttgtgcaaagtcttcaactcgt

SEQ ID NO: 217020 - DNA, 53 bp, Artificial
  Synthetic oligonucleotide
tgattttttagtatcactctcggggcttttggggtactattgtctaaaagtta

SEQ ID NO: 217021 - DNA, 57 bp, Artificial
  Synthetic oligonucleotide
ttgggcgtgcagttttgataatcgatgagagcaacttcccacctaaaaaacctaata

SEQ ID NO: 217022 - DNA, 60 bp, Artificial
  Synthetic oligonucleotide
ttggtgtaaaaactctgaaggacaagatataggatttgagcctatggcgaatacatccga

SEQ ID NO: 217023 - DNA, 53 bp, Artificial
  Synthetic oligonucleotide
ttgtcgttatcaaataacgcaacctaacaaccgattttgacccccaaatgaat

SEQ ID NO: 217024 - DNA, 55 bp, Artificial
  Synthetic oligonucleotide
ttgtgcgtatgcgtggcgtaaaccgtgatttttaacttcaccgactttagcggtc

SEQ ID NO: 217025 - DNA, 56 bp, Artificial
  Synthetic oligonucleotide
cggcggaagcgcagacggaagcccaacggtgctaagcggtcgttagattgaaagcc

SEQ ID NO: 217026 - DNA, 60 bp, Artificial
  Synthetic oligonucleotide
ttgtgtgcgctcaacaatgaaagagcgttctaattcagcaaacaagccaagaaggtgaat

SEQ ID NO: 217027 - DNA, 47 bp, Artificial
  Synthetic oligonucleotide
tttcactgtaaccccaaaagaagcggaaaaacccgttaaaaaacgcc

SEQ ID NO: 217028 - DNA, 60 bp, Artificial
  Synthetic oligonucleotide
tttcgcactatggcggcggctcgcactaccgttcatagtgtgagcctagtcgcttagcct

SEQ ID NO: 217029 - DNA, 57 bp, Artificial
  Synthetic oligonucleotide
tttgccggtattcggcaacgcctgatcacgcttcggatcataagggaattccggacg

SEQ ID NO: 217030 - DNA, 60 bp, Artificial
  Synthetic oligonucleotide
tttgctatgatgccagaccctaagcaagtcacatcatagcaaagggtagctagtaatgca

SEQ ID NO: 217031 - DNA, 59 bp, Artificial
  Synthetic oligonucleotide
tttggatgcgccccgattgaaatcccgtggatagcaaccacacgaccttgcataccgtg

SEQ ID NO: 217032 - DNA, 60 bp, Artificial
  Synthetic oligonucleotide
tttggctagttattcaagtgctaccaagctgtcgggctgtagagcaacacgaataacacg

SEQ ID NO: 217033 - DNA, 57 bp, Artificial
  Synthetic oligonucleotide
ttttacttacacagcggacgtgttcagtcttaacccatcgttctcttttctcataga

SEQ ID NO: 217034 - DNA, 56 bp, Artificial
  Synthetic oligonucleotide
ttttatatatcacttctcggggcttttggtgtactattgtcttttgtaatagcaag

SEQ ID NO: 217035 - DNA, 57 bp, Artificial
  Synthetic oligonucleotide
ttttcacaaaggtgtacgcccatctattccgttcttgcgtggtgagagtgtcgggct

SEQ ID NO: 217036 - DNA, 54 bp, Artificial
  Synthetic oligonucleotide
cggctaggaagggaatagggtagcaacctgttcccgacctttcccattgtatgc

SEQ ID NO: 217037 - DNA, 60 bp, Artificial
  Synthetic oligonucleotide
ttttctcttagcgaggacacatagccccgtatctgcgatactgtcggctatggtctcgca

SEQ ID NO: 217038 - DNA, 54 bp, Artificial
  Synthetic oligonucleotide
ttttttccggggtcggttcgttgagttgtgcatgaacacgttcaacataactgg

SEQ ID NO: 217039 - DNA, 57 bp, Artificial
  Synthetic oligonucleotide
ttttttgccctgtgcgagtaaaatcattatcttttctcgctcgtttattgtaagatg

SEQ ID NO: 217040 - DNA, 54 bp, Artificial
  Synthetic oligonucleotide
ttaaacggctcctgaagggcctgtaagcgtttttgctgctgggctagggtttcc

SEQ ID NO: 217041 - DNA, 57 bp, Artificial
  Synthetic oligonucleotide
ttacaccgtttgccgatagcacaaggaagattttatcacataaccgcctaacagggc

SEQ ID NO: 217042 - DNA, 56 bp, Artificial
  Synthetic oligonucleotide
ttaccgtgtgtccagcggtttccgtgtccccgctttttatgagctgtacggcgtgc

SEQ ID NO: 217043 - DNA, 60 bp, Artificial
  Synthetic oligonucleotide
ttactctgttcagcaatgtattcagctttagtcattaacctatcaagagcggtttgtcgc

SEQ ID NO: 217044 - DNA, 60 bp, Artificial
  Synthetic oligonucleotide
ttagatcagtgaatgtaagaatgttgagctgtactcaattctattcactactcttaattc

SEQ ID NO: 217045 - DNA, 55 bp, Artificial
  Synthetic oligonucleotide
ttaggcgataacgtaacccataccaatcggctagaacccgatttaaatcaagcca

SEQ ID NO: 217046 - DNA, 54 bp, Artificial
  Synthetic oligonucleotide
ttagggaggagcttaccccacgctttgcgtgcggttgggctatatttcaccctt

SEQ ID NO: 217047 - DNA, 58 bp, Artificial
  Synthetic oligonucleotide
cgggcaatggtctgaacctgaaacagtaaacggacatattccacctgaaatgcgtata

SEQ ID NO: 217048 - DNA, 56 bp, Artificial
  Synthetic oligonucleotide
ttagggctttcaatctaacgaccgcttagcaccgttgggcttccgtctgcgcttcc

SEQ ID NO: 217049 - DNA, 60 bp, Artificial
  Synthetic oligonucleotide
ttatagcgtcgcttattgggatggtctgttatggctgatgggggcaatactttatgctat

SEQ ID NO: 217050 - DNA, 53 bp, Artificial
  Synthetic oligonucleotide
ttcaactcgtaaaacatattcttgctgaggttttttagggtttatccggctta

SEQ ID NO: 217051 - DNA, 58 bp, Artificial
  Synthetic oligonucleotide
ttcacttaaccaatctaccgtgcagtggtttgtgtgtaatcttccaacagaattacga

SEQ ID NO: 217052 - DNA, 57 bp, Artificial
  Synthetic oligonucleotide
ttcccgccgtttttaggtgatgtaagtcccgatagctgctcaaatcgtctttgtgcg

SEQ ID NO: 217053 - DNA, 59 bp, Artificial
  Synthetic oligonucleotide
ttcgagctatggcatcgataatcgaaaatacgtagataaccataccaataaggctaaaa

SEQ ID NO: 217054 - DNA, 53 bp, Artificial
  Synthetic oligonucleotide
ttcgccctcagagagttttctagaggtttttccaccgttcttaggggaagata

SEQ ID NO: 217055 - DNA, 60 bp, Artificial
  Synthetic oligonucleotide
ttcggcaaattcttcattgctaatcggctctttcgctcgctctaacattgccaaatgttc

SEQ ID NO: 217056 - DNA, 56 bp, Artificial
  Synthetic oligonucleotide
ttgaatcccctaaagactttatgcgtgagggcggtcatcattcggcgaacgtttta

SEQ ID NO: 217057 - DNA, 60 bp, Artificial
  Synthetic oligonucleotide
ttgatatgtgtggggatcacttttctacgtctgaaatgttaaggcagattattgagcgtg

SEQ ID NO: 217058 - DNA, 53 bp, Artificial
  Synthetic oligonucleotide
gaagatgtaccgaatgaagatttacgtaattactgggtatttttagaaactaa

SEQ ID NO: 217059 - DNA, 58 bp, Artificial
  Synthetic oligonucleotide
cggtctatcaagcgagaaatgaacgtgttgggcgttctgtcctaaatcgtgtcaaaca

SEQ ID NO: 217060 - DNA, 58 bp, Artificial
  Synthetic oligonucleotide
gtccagctttgccacagcgtccacaagttctaaaaggttcgcaagccgaatttgattg

SEQ ID NO: 217061 - DNA, 51 bp, Artificial
  Synthetic oligonucleotide
gtcgttaaaccataaatttctagtcgttaaaccataaatttctagtcgtta

SEQ ID NO: 217062 - DNA, 59 bp, Artificial
  Synthetic oligonucleotide
gtgaaattatcgaaagaattagagagcttgcgagccgaaaacgccttgatacaacaaca

SEQ ID NO: 217063 - DNA, 60 bp, Artificial
  Synthetic oligonucleotide
gtgagcagtagtatcattacgaagtattgtaatgcgttcacatagatcacccccttagtg

SEQ ID NO: 217064 - DNA, 57 bp, Artificial
  Synthetic oligonucleotide
gtgccggaaaacgtgcttttaggctttcacgactttaatgacatggcatacttgacg

SEQ ID NO: 217065 - DNA, 58 bp, Artificial
  Synthetic oligonucleotide
gtgctgaaatacagcgtaacaagttagggcgtatcataacttgtgtagttttgaatgt

SEQ ID NO: 217066 - DNA, 59 bp, Artificial
  Synthetic oligonucleotide
gtgtcgatgaattatcaacatttcgttatttaatggcaaaatttccgcataatatgttg

SEQ ID NO: 217067 - DNA, 48 bp, Artificial
  Synthetic oligonucleotide
gttaaaggtggtgtaatttacggttaaaggtggtgtaatttacggtta

SEQ ID NO: 217068 - DNA, 58 bp, Artificial
  Synthetic oligonucleotide
gttaatcactatttgtgtgcgattatcaaaggtgattgtaaatactgaaccttgcgtt

SEQ ID NO: 217069 - DNA, 60 bp, Artificial
  Synthetic oligonucleotide
gttatctacgtattttcgattatcgatgccatagctcgaattatcgcgctctacgatgcg

SEQ ID NO: 217070 - DNA, 58 bp, Artificial
  Synthetic oligonucleotide
cggttaaatcaggaacttcaccacgctcaataatctgccttaacatttcagacgtaga

SEQ ID NO: 217071 - DNA, 52 bp, Artificial
  Synthetic oligonucleotide
gtttcaccgctaatttggaagaacggacaccgaatgaaaaagcgaaccaaac

SEQ ID NO: 217072 - DNA, 56 bp, Artificial
  Synthetic oligonucleotide
gtttctaacagagcaacgaatgaaagagcctagttatagggggggagctttgtaca

SEQ ID NO: 217073 - DNA, 60 bp, Artificial
  Synthetic oligonucleotide
gtttgactgatgactaacccggctttgagcttatcatcaatttgcatacgtgcttgcact

SEQ ID NO: 217074 - DNA, 56 bp, Artificial
  Synthetic oligonucleotide
gttttcgagttcttaccattctcgacctaattacttacatcttgaatagattgtcc

SEQ ID NO: 217075 - DNA, 54 bp, Artificial
  Synthetic oligonucleotide
taaaacgaagtcgccttcggctccgctgattttttagtatcactctcggggctt

SEQ ID NO: 217076 - DNA, 55 bp, Artificial
  Synthetic oligonucleotide
taaaacgttgtggcgtttatcagggtgggaattgcagacttaaacaatcaattcc

SEQ ID NO: 217077 - DNA, 60 bp, Artificial
  Synthetic oligonucleotide
ggagtgactctaatcgataataactcaccgtgatgattgataatcgcgtgcagtttaaat

SEQ ID NO: 217078 - DNA, 58 bp, Artificial
  Synthetic oligonucleotide
ggcaacacccgctaccactaaggtgcttggtaagccgatgtattgtgccaccgctccc

SEQ ID NO: 217079 - DNA, 55 bp, Artificial
  Synthetic oligonucleotide
ggctaaacgtccgtaggcttttgtagatgaaataggggcaacaaccacgctataa

SEQ ID NO: 217080 - DNA, 60 bp, Artificial
  Synthetic oligonucleotide
ggctcgtgtaagccttccggcattctggcatcataagctgggcgtaaaccctctgggtga

SEQ ID NO: 217081 - DNA, 57 bp, Artificial
  Synthetic oligonucleotide
cgtaccattagctaaatcgctaatccgtttatctacactgtcacgtgtaacatttcc

SEQ ID NO: 217082 - DNA, 57 bp, Artificial
  Synthetic oligonucleotide
ggcttgccgaaaggcgataattcaattcttgcgacaaggtagaatttttggcttgta

SEQ ID NO: 217083 - DNA, 60 bp, Artificial
  Synthetic oligonucleotide
gggaagttgcacaggtattagctttgtggatgccaccaaactatctgtatgccataaccg

SEQ ID NO: 217084 - DNA, 53 bp, Artificial
  Synthetic oligonucleotide
ggggcttttggtgtactattgtcttttgtaatagcaaggacacaaaaagggta

SEQ ID NO: 217085 - DNA, 55 bp, Artificial
  Synthetic oligonucleotide
gggttcgggaaattgccctagaacagcaacctaatcgacagccgaaagtaatcga

SEQ ID NO: 217086 - DNA, 53 bp, Artificial
  Synthetic oligonucleotide
ggtaagttattacgccaaacagactttgatgaaattcggcaaaacttgttagt

SEQ ID NO: 217087 - DNA, 55 bp, Artificial
  Synthetic oligonucleotide
ggtatagaaaaatgcggtcaatggtatagaataataaaaatactatgcctttaac

SEQ ID NO: 217088 - DNA, 57 bp, Artificial
  Synthetic oligonucleotide
ggtggtgtaatttgacattaccacttaaatgagtgtaacatctaccgtaaatctcac

SEQ ID NO: 217089 - DNA, 53 bp, Artificial
  Synthetic oligonucleotide
ggttagtttcttcacggatgacaatttacacgtagtggaaaagctaccgtctt

SEQ ID NO: 217090 - DNA, 51 bp, Artificial
  Synthetic oligonucleotide
gtacattttgagactcaaaacaccgtgcaaccctacggtttttccggggaa

SEQ ID NO: 217091 - DNA, 60 bp, Artificial
  Synthetic oligonucleotide
gtactgtgaacgaagaagaacatttggcaatgttagagcgagcgaaagagcctattagcg

SEQ ID NO: 217092 - DNA, 60 bp, Artificial
  Synthetic oligonucleotide
cgtagattttgacatctacgccctttttcgataatctgtatctcgcgttctttgctatga

SEQ ID NO: 217093 - DNA, 58 bp, Artificial
  Synthetic oligonucleotide
gtagtcaatttcttctggtttaagagcgtatagcttgttacgcaagcctgctaataac

SEQ ID NO: 217094 - DNA, 60 bp, Artificial
  Synthetic oligonucleotide
tagcgaggacacatagccccgtatctgcgatactgtcggctatggtctcgcaaaggggat

SEQ ID NO: 217095 - DNA, 60 bp, Artificial
  Synthetic oligonucleotide
tagctgttttgtgcgttcgttgcactgtagctttctagagcgtgtcgtttcagctcgcga

SEQ ID NO: 217096 - DNA, 60 bp, Artificial
  Synthetic oligonucleotide
tagcttgttacgcaagcctgctaataactcgctatcttcgtttctaccacctgtttgagc

SEQ ID NO: 217097 - DNA, 60 bp, Artificial
  Synthetic oligonucleotide
taggcttatagcactaagggggtgatctatgtgaacgcattacaatacttcgtaatgata

SEQ ID NO: 217098 - DNA, 57 bp, Artificial
  Synthetic oligonucleotide
tagtaatgcaagagattgcgaagcgtccctactaccaaaaaaccattcaacgacgta

SEQ ID NO: 217099 - DNA, 60 bp, Artificial
  Synthetic oligonucleotide
tagtgcactggttgaatcggtgatcatgcttaacatgatggcattaccgaaacgttccca

SEQ ID NO: 217100 - DNA, 60 bp, Artificial
  Synthetic oligonucleotide
tatcacgaatcagaaatggcacaacctcgcgcaacggtaaaatactgacagtgaccgcac

SEQ ID NO: 217101 - DNA, 60 bp, Artificial
  Synthetic oligonucleotide
tatgaatgatgatgaactatttttgtgtgagctacgtgagaaaatttatagcactcatcg

SEQ ID NO: 217102 - DNA, 59 bp, Artificial
  Synthetic oligonucleotide
tatggcgttctgcagctgtaccaaagcttccgtctttgttgtgtttacacaagacggaa

SEQ ID NO: 217103 - DNA, 53 bp, Artificial
  Synthetic oligonucleotide
cgttacttcaattccacccaaacgaatttatcagcgaagttgagggggggcta

SEQ ID NO: 217104 - DNA, 60 bp, Artificial
  Synthetic oligonucleotide
tatgtcgctaatatatcaagtcatttttcgtaatccttatatgttcagagagtaaacgga

SEQ ID NO: 217105 - DNA, 50 bp, Artificial
  Synthetic oligonucleotide
tcaattacgttaccgtcaatttaaagggtttttcataaaattacacggta

SEQ ID NO: 217106 - DNA, 60 bp, Artificial
  Synthetic oligonucleotide
tcacgtcaactattgcagtttcgccgtcacgctagaatggatatggttccgaaggtctgc

SEQ ID NO: 217107 - DNA, 60 bp, Artificial
  Synthetic oligonucleotide
tcagcgatttagagcggttatgagcgtgcttgtgcggtgagctataccgtaatcataaca

SEQ ID NO: 217108 - DNA, 60 bp, Artificial
  Synthetic oligonucleotide
tcagcgtgtaattgactatttatgcgaaagctagctttctctttcatagtaataccatcg

SEQ ID NO: 217109 - DNA, 56 bp, Artificial
  Synthetic oligonucleotide
tcagtacagtttaacccctattatcccctattatctgatatggtacaagacctact

SEQ ID NO: 217110 - DNA, 60 bp, Artificial
  Synthetic oligonucleotide
tcatacagctttaacgaatattcgctttttagcgagccgaacgtatcaagcaacattgac

SEQ ID NO: 217111 - DNA, 60 bp, Artificial
  Synthetic oligonucleotide
tcatcaatgaatacaacgtaactcagcttgcacctgaataatctgcacaagatatgatac

SEQ ID NO: 217112 - DNA, 60 bp, Artificial
  Synthetic oligonucleotide
taaaactagcaatagtgcttgggctatactgctctaacaatctcgcttttaatcctacgc

SEQ ID NO: 217113 - DNA, 55 bp, Artificial
  Synthetic oligonucleotide
taaaagatttctattcggttctcaaatgttgcgtgaatggggcaacaataaaacg

SEQ ID NO: 217114 - DNA, 60 bp, Artificial
  Synthetic oligonucleotide
cgtttcacgccgaagagtaaatgtgcgagctcagagcgtcccgcgcccactaatccagac

SEQ ID NO: 217115 - DNA, 60 bp, Artificial
  Synthetic oligonucleotide
taaatcgagtgcagtgcatttatattgggttagtccccttgagtgcgtagtcagcgattt

SEQ ID NO: 217116 - DNA, 60 bp, Artificial
  Synthetic oligonucleotide
taaatcgttcataaatcaaccttacagtgataggatttagtgtattggtgctataatatc

SEQ ID NO: 217117 - DNA, 60 bp, Artificial
  Synthetic oligonucleotide
taactaatacaggtatttcaccattcttatgaggatagacatgagacagataagaggctt

SEQ ID NO: 217118 - DNA, 57 bp, Artificial
  Synthetic oligonucleotide
taaggacacgttacaccgtttgccgatagcacaaggaagattttatcacataaccgc

SEQ ID NO: 217119 - DNA, 60 bp, Artificial
  Synthetic oligonucleotide
taaggcatattgcgatatacgccgtagttgatagcgaggctacctaagccaccgccgcct

SEQ ID NO: 217120 - DNA, 55 bp, Artificial
  Synthetic oligonucleotide
taagggtagagtgcaaccaagctaacaccccacggacgtagaacagcgtgggtta

SEQ ID NO: 217121 - DNA, 57 bp, Artificial
  Synthetic oligonucleotide
taatccgtgataaaacgttcgccgaatgatgaccgccctcacgcataaagtctttag

SEQ ID NO: 217122 - DNA, 55 bp, Artificial
  Synthetic oligonucleotide
tacacacatccaagtacctgatatcgtggtaaaaaaaggaactagatttcctaag

SEQ ID NO: 217123 - DNA, 60 bp, Artificial
  Synthetic oligonucleotide
tacgaaaaagacacgattgaaccactacgcaagcaaatagagcagatgaaagccgataat

SEQ ID NO: 217124 - DNA, 57 bp, Artificial
  Synthetic oligonucleotide
tacgaccttcagataacacgttaccccaagatggatttggtggctgaacaccggcgc

SEQ ID NO: 217125 - DNA, 57 bp, Artificial
  Synthetic oligonucleotide
ctaaaacataacgaacgcccaatgcaacaactaaaaagccaccgactgcagcaccca

SEQ ID NO: 217126 - DNA, 60 bp, Artificial
  Synthetic oligonucleotide
tactcttggatctttcctatcaacgatagtagccgatctcgctattttgtgagtcttaag

SEQ ID NO: 217127 - DNA, 58 bp, Artificial
  Synthetic oligonucleotide
tacttatttcttgaaaagcaaactcctcatcactaattggagattttgctctttccaa

SEQ ID NO: 217128 - DNA, 60 bp, Artificial
  Synthetic oligonucleotide
tacttcttgctgctaacagaggtcgctttagactctcaatgacggcataatcagggcagg

SEQ ID NO: 217129 - DNA, 59 bp, Artificial
  Synthetic oligonucleotide
tagaaacgaagatagcgagttattagcaggcttgcgtaacaagctatacgctcttaaac

SEQ ID NO: 217130 - DNA, 60 bp, Artificial
  Synthetic oligonucleotide
agagttcttatcccatcagcctgaatttgcaattcacttagagtatctagatcaagttgt

SEQ ID NO: 217131 - DNA, 58 bp, Artificial
  Synthetic oligonucleotide
aagggggagctagatcacccgtgtatacctgttcagtgtgcggagcgaaacatggagg

SEQ ID NO: 217132 - DNA, 60 bp, Artificial
  Synthetic oligonucleotide
aaggggccatttagcggccatttcagcggctgtgatgctgatagtggccgtggtgtccct

SEQ ID NO: 217133 - DNA, 52 bp, Artificial
  Synthetic oligonucleotide
acacctttgtgaaaatccatacacctttcttaccgtgtaattttatgaaaat

SEQ ID NO: 217134 - DNA, 60 bp, Artificial
  Synthetic oligonucleotide
acagacactattcctgcactctcttttgttgaagcgtattatggttcaagcagtctaatt

SEQ ID NO: 217135 - DNA, 54 bp, Artificial
  Synthetic oligonucleotide
aagccttctaaacgagtggtaggaacaagcgtcactggcgtttagtcgtattaa

SEQ ID NO: 217136 - DNA, 55 bp, Artificial
  Synthetic oligonucleotide
ctaacaccccacggacgtagaacagcgtgggttatcttggtggcattatgggcgt

SEQ ID NO: 217137 - DNA, 55 bp, Artificial
  Synthetic oligonucleotide
agcgataatggaacggatttcacgtttctttaggacaaaagaaatgaacggtgca

SEQ ID NO: 217138 - DNA, 60 bp, Artificial
  Synthetic oligonucleotide
acggacataccgcacgcattgacgagcgtagctatcaagaacagggcattgataaagagc

SEQ ID NO: 217139 - DNA, 58 bp, Artificial
  Synthetic oligonucleotide
aagacggaaaccgaatagaccagatcgcgcataatgctctccgataaatgttgttaag

SEQ ID NO: 217140 - DNA, 58 bp, Artificial
  Synthetic oligonucleotide
aacttgggccgttacgcagtgagattacatttacgcttcatacccagtatgcaactcg

SEQ ID NO: 217141 - DNA, 57 bp, Artificial
  Synthetic oligonucleotide
agtcgtaaacgacaaatttgtagtcgttaaaatctctcaagcattgcaaatcaaggc

SEQ ID NO: 217142 - DNA, 53 bp, Artificial
  Synthetic oligonucleotide
agtcgtcaaacgacaaatttgtagtcgtcaaacgacaaatttgtagtcgtaaa

SEQ ID NO: 217143 - DNA, 52 bp, Artificial
  Synthetic oligonucleotide
acagtcacgaaccccctgtttaactgtcacgccccccctgtttaactgtcac

SEQ ID NO: 217144 - DNA, 60 bp, Artificial
  Synthetic oligonucleotide
aactgtgtgtatcgctgccataaagtccactaagtaacgagctgtcaagccatctcgcga

SEQ ID NO: 217145 - DNA, 54 bp, Artificial
  Synthetic oligonucleotide
aactacccccttcccgattgtcttaggacaatctattcaagatgtaagtaatta

SEQ ID NO: 217146 - DNA, 57 bp, Artificial
  Synthetic oligonucleotide
acttcctaccgacatcttacaataaacgagcgagaaaagataatgattttactcgca

SEQ ID NO: 217147 - DNA, 57 bp, Artificial
  Synthetic oligonucleotide
ctacacttgccgtgtaatactcataggattttaactgctggtaataggttctttctc

SEQ ID NO: 217148 - DNA, 55 bp, Artificial
  Synthetic oligonucleotide
agcacaaatgagggggtaacggtatgctaaaccattaagaatttgcgggtgattg

SEQ ID NO: 217149 - DNA, 58 bp, Artificial
  Synthetic oligonucleotide
aacgttgccctgcggagtcaaaggcggagttcaacacatctgccaccacttgttcgcc

SEQ ID NO: 217150 - DNA, 52 bp, Artificial
  Synthetic oligonucleotide
agttacccacgagctttccaacagctttccaacactaaaaacctaccgccca

SEQ ID NO: 217151 - DNA, 60 bp, Artificial
  Synthetic oligonucleotide
acataaatcacctccttagcactacaaggctaagcggctaggctcacactattagcggta

SEQ ID NO: 217152 - DNA, 56 bp, Artificial
  Synthetic oligonucleotide
acatatcatcctttaagggaacttattctataagactttatgagcttttaactcaa

SEQ ID NO: 217153 - DNA, 55 bp, Artificial
  Synthetic oligonucleotide
aacgccaaaaacagcgaagtaagggaatgagcctatgacaccaaccgaaacggca

SEQ ID NO: 217154 - DNA, 59 bp, Artificial
  Synthetic oligonucleotide
agcctttgatcacggctatttccaaggtccgacgacgggtcttgagcgcattgacctca

SEQ ID NO: 217155 - DNA, 60 bp, Artificial
  Synthetic oligonucleotide
acggattatgatgtccgaacgtggtattcagccagtcgaagaacagggcgaataatcgca

SEQ ID NO: 217156 - DNA, 53 bp, Artificial
  Synthetic oligonucleotide
agtttcaattaacgagcgtccgttaagtaacgcctcatcaataggtttaagaa

SEQ ID NO: 217157 - DNA, 52 bp, Artificial
  Synthetic oligonucleotide
agcctgaccaaccgtgtaacagtataacataaaccgcctaacagggcggttt

SEQ ID NO: 217158 - DNA, 60 bp, Artificial
  Synthetic oligonucleotide
ctacgatgcgtgggtttccaatcttctcagcaagccagcgaagatgactcattcggtttt

SEQ ID NO: 217159 - DNA, 60 bp, Artificial
  Synthetic oligonucleotide
ataaaggctctagagatttatagatgtagtaattgacggtgatagatgtagtaattgacg

SEQ ID NO: 217160 - DNA, 60 bp, Artificial
  Synthetic oligonucleotide
aacagtaccaatatagtcattatctctggtacacttatcttgcatgctcttaatcgcttt

SEQ ID NO: 217161 - DNA, 58 bp, Artificial
  Synthetic oligonucleotide
aacagcaacctaagcgacagccgaaagtaatcgaccctgcgttactgttcgagctgaa

SEQ ID NO: 217162 - DNA, 56 bp, Artificial
  Synthetic oligonucleotide
ataaatggtatttctcaaacactcggcttaatcgtggctcaaacaggtggtagaaa

SEQ ID NO: 217163 - DNA, 58 bp, Artificial
  Synthetic oligonucleotide
ataagcctgaaagagtttcgtaacgtctctgtgcatatgcgtgtcgtaaaccgtgatt

SEQ ID NO: 217164 - DNA, 58 bp, Artificial
  Synthetic oligonucleotide
actgcaagggattgtcgtaatagctgcttgtgttacggctttacttacaacagtcgta

SEQ ID NO: 217165 - DNA, 60 bp, Artificial
  Synthetic oligonucleotide
agctcctgactaatctgcaatctagccattaaatctacctgtttttcgctctcagaaagc

SEQ ID NO: 217166 - DNA, 60 bp, Artificial
  Synthetic oligonucleotide
agctgatattaaactcaacaccaacaattttacgaccacgcttgataggctcatatttca

SEQ ID NO: 217167 - DNA, 60 bp, Artificial
  Synthetic oligonucleotide
acaaatattggctctcgaagttcattattgaacgagaatcttatgattggcagctcgtgc

SEQ ID NO: 217168 - DNA, 60 bp, Artificial
  Synthetic oligonucleotide
agcgtgtttgcatgattgccgattgccaacactagctgtaatgttcatgctaagccattc

SEQ ID NO: 217169 - DNA, 57 bp, Artificial
  Synthetic oligonucleotide
gaacgtgaattcatttcgcaacgtacaaaaaacgcattagccaaactcaaagctgac

SEQ ID NO: 217170 - DNA, 60 bp, Artificial
  Synthetic oligonucleotide
ctactgcgtcatacgaattttgcacgagctgccaatcataagattctcgttcaataatga

SEQ ID NO: 217171 - DNA, 55 bp, Artificial
  Synthetic oligonucleotide
aattcttgttgtaatcgtagtgagtatttaacgaaatcgttcgttaagctgtcta

SEQ ID NO: 217172 - DNA, 57 bp, Artificial
  Synthetic oligonucleotide
agcttacccagtggggcaaaatgtaatccccatcagggtggacgattcattcaactg

SEQ ID NO: 217173 - DNA, 60 bp, Artificial
  Synthetic oligonucleotide
accttttggtaagaaatcagcaatgatgacaatatcttcaatcacgatgaactttactga

SEQ ID NO: 217174 - DNA, 53 bp, Artificial
  Synthetic oligonucleotide
aattcagaatgtagggggactgaatacggagaacgggaatcaaatccccccac

SEQ ID NO: 217175 - DNA, 55 bp, Artificial
  Synthetic oligonucleotide
aatggttttttggtagtagggacgcttcgcaatctcttgcattactagctaccct

SEQ ID NO: 217176 - DNA, 60 bp, Artificial
  Synthetic oligonucleotide
aatgggacaaagcgattaagagcatgcaagataagtgtaccagagataatgactatattg

SEQ ID NO: 217177 - DNA, 54 bp, Artificial
  Synthetic oligonucleotide
aggatagcttttttccttacattgtccgacaaattgccgaccaatatagaaaaa

SEQ ID NO: 217178 - DNA, 55 bp, Artificial
  Synthetic oligonucleotide
agaggtaagacaagtatgggttggttttacggatttaaactgcacgcgattatca

SEQ ID NO: 217179 - DNA, 60 bp, Artificial
  Synthetic oligonucleotide
aatgatcaaggcgttttcggctcgcaagctctctaattctttcgataatttcactcgctc

SEQ ID NO: 217180 - DNA, 53 bp, Artificial
  Synthetic oligonucleotide
aggcgaaaacgacagtacccctgatgtgtacaaagctccccccctataactag

SEQ ID NO: 217181 - DNA, 59 bp, Artificial
  Synthetic oligonucleotide
ctagtaataagcgtgttattaacttcaaatcgcagttgtctaatgtcaggactgcaagg

SEQ ID NO: 217182 - DNA, 60 bp, Artificial
  Synthetic oligonucleotide
agacaatccaacattagccgataagttaaaagataatgatacttatcttgcaatggcaag

SEQ ID NO: 217183 - DNA, 57 bp, Artificial
  Synthetic oligonucleotide
aagtaatattgtgtttggcgttggtgcacaaacctatcaacgtaatacacgtgatac

SEQ ID NO: 217184 - DNA, 58 bp, Artificial
  Synthetic oligonucleotide
actttactgaatgaccgtattttagcggatagatatgaaaatcaccgtcagcgtaagc

SEQ ID NO: 217185 - DNA, 54 bp, Artificial
  Synthetic oligonucleotide
aagtcctgtccgctcttaataacgttgataggactttatttttatcgcaattaa

SEQ ID NO: 217186 - DNA, 60 bp, Artificial
  Synthetic oligonucleotide
aagttcacttaatagaattaaacagctagagaatctcgtagagactatgctagtcgcaca

SEQ ID NO: 217187 - DNA, 48 bp, Artificial
  Synthetic oligonucleotide
acaatggtttaaggttgttcaaggttggttaaagttggttgaaaaggg

SEQ ID NO: 217188 - DNA, 55 bp, Artificial
  Synthetic oligonucleotide
agagtggggggatcaagctatcaacttgcaaaacggagaaagggataaagccttg

SEQ ID NO: 217189 - DNA, 58 bp, Artificial
  Synthetic oligonucleotide
aagttcgcatttgttgctcatagtttttatgagcgggtatcagtgattttgttccttg

SEQ ID NO: 217190 - DNA, 56 bp, Artificial
  Synthetic oligonucleotide
agaaagcccaatttggcgttctggttgacgggtaatgtcgcctgagcgcggtacga

SEQ ID NO: 217191 - DNA, 55 bp, Artificial
  Synthetic oligonucleotide
aagtttctcaggctttattttagtgtcgaaattcccgataaggtgaatgataaga

SEQ ID NO: 217192 - DNA, 60 bp, Artificial
  Synthetic oligonucleotide
ctattatccaacccgatactatgcacgctttagtctcaacagagagtgcttataatccgt

SEQ ID NO: 217193 - DNA, 55 bp, Artificial
  Synthetic oligonucleotide
agaaagcccggatttgcttagtgtgccttttgttaatttactcatattgaactcc

SEQ ID NO: 217194 - DNA, 53 bp, Artificial
  Synthetic oligonucleotide
aataaaacaaaaccgccctgttaggcggttatgtgataaaatcttccttgtgc

SEQ ID NO: 217195 - DNA, 53 bp, Artificial
  Synthetic oligonucleotide
agaaaggtgcacgaattttcataaaattacacggtaagaaaggtgtatggatt

SEQ ID NO: 217196 - DNA, 57 bp, Artificial
  Synthetic oligonucleotide
aatatgtccgtttactgtttcaggttcagaccattgcccgaaatcacattccaacag

SEQ ID NO: 217197 - DNA, 58 bp, Artificial
  Synthetic oligonucleotide
aatatgttgtcaattgtgtcagatactacagacttttggcataacattaccgttaatt

SEQ ID NO: 217198 - DNA, 55 bp, Artificial
  Synthetic oligonucleotide
aatccccacagggcgtgcaattcgatcagctgtcgttaaaattggtttttaacgc

SEQ ID NO: 217199 - DNA, 55 bp, Artificial
  Synthetic oligonucleotide
acaagatcatcaactgaacttagaatttcgttttgcttttcagtaggtaaagaaa

SEQ ID NO: 217200 - DNA, 56 bp, Artificial
  Synthetic oligonucleotide
aatcctacgcctggtttatcccaccattcattgcatttcgggaatccgcctttgcc

SEQ ID NO: 217201 - DNA, 60 bp, Artificial
  Synthetic oligonucleotide
agccgataatccgcacctagaacagcgtaatcatcagcaactaatggcaatgaagttcaa

SEQ ID NO: 217202 - DNA, 59 bp, Artificial
  Synthetic oligonucleotide
ataccgtaaatttttgacgttagaatgacgatagcataaatgtctaatgcaggatagct

SEQ ID NO: 217203 - DNA, 56 bp, Artificial
  Synthetic oligonucleotide
ctcacggcagtggagattctcgtgttcattatggggaaccttagtaaaaccagaaa

SEQ ID NO: 217204 - DNA, 51 bp, Artificial
  Synthetic oligonucleotide
accaatattaccgggatcattggtccccttttatttgcctttatttatagt

SEQ ID NO: 217205 - DNA, 60 bp, Artificial
  Synthetic oligonucleotide
atattaaatacctacgtcgcataacagcagattatgtgtaaattctcgtgcaggaggtga

SEQ ID NO: 217206 - DNA, 60 bp, Artificial
  Synthetic oligonucleotide
atcaattcaaatctggcaaaacgagcatgctcattttgccagttttggctgcctgttaat

SEQ ID NO: 217207 - DNA, 55 bp, Artificial
  Synthetic oligonucleotide
aaacaccactctataaagttcgcattaaggtagcgaaacacctaaattcacataa

SEQ ID NO: 217208 - DNA, 57 bp, Artificial
  Synthetic oligonucleotide
acggtaagtttgtgaagctagatcgtatcgatcctaaaatgagttcggctgaatacg

SEQ ID NO: 217209 - DNA, 57 bp, Artificial
  Synthetic oligonucleotide
atcacttctacgcctgtttattcttccgaagtccgagctgaagactgtttgatttaa

SEQ ID NO: 217210 - DNA, 55 bp, Artificial
  Synthetic oligonucleotide
atcaggggatagggcatacaatgggaaaggtcgggaacaggttgctaccctattc

SEQ ID NO: 217211 - DNA, 53 bp, Artificial
  Synthetic oligonucleotide
aaacccattttaaccacgttggcatactcgcctcctttcagttggggttgata

SEQ ID NO: 217212 - DNA, 56 bp, Artificial
  Synthetic oligonucleotide
actaggttaaatgccacgacgttttattgttgccccattcaagcaacattagagaa

SEQ ID NO: 217213 - DNA, 60 bp, Artificial
  Synthetic oligonucleotide
agccgatgtattgtgccaccgctccccagcttaaactacccaacgtcattgcaccattga

SEQ ID NO: 217214 - DNA, 59 bp, Artificial
  Synthetic oligonucleotide
gcctatgcggttcagctcgaacagtaacgcagggtcgattactttcggctgtcgcttag

SEQ ID NO: 217215 - DNA, 57 bp, Artificial
  Synthetic oligonucleotide
acgtaagacgaaagcaaggcttgctgaatgggttcgggaagttgccctagaacagca

SEQ ID NO: 217216 - DNA, 58 bp, Artificial
  Synthetic oligonucleotide
aaaatcaggcgctttcgactggtacgctgaaaaaccgaatgagtcatcttcgctggct

SEQ ID NO: 217217 - DNA, 57 bp, Artificial
  Synthetic oligonucleotide
acgttgacggaaccagtctgcagtctctctcaacccgccacctaacgcctgaccaag

SEQ ID NO: 217218 - DNA, 60 bp, Artificial
  Synthetic oligonucleotide
aacacaacggatagcaatccttgaatcattggcaacgcttgccgcattgcgtcaaaaccg

SEQ ID NO: 217219 - DNA, 57 bp, Artificial
  Synthetic oligonucleotide
aaaaagctgtttatcgttgttacgataaacacctgaacttgcagttggctcaagcta

SEQ ID NO: 217220 - DNA, 60 bp, Artificial
  Synthetic oligonucleotide
aacaatgggtgccctttgtgtcaatttgatgccacagatataaccgattaatggccacaa

SEQ ID NO: 217221 - DNA, 53 bp, Artificial
  Synthetic oligonucleotide
aaaacaatcaacagtagttcaaaacgacaaatttgtagtcgtcaaacgacaaa

SEQ ID NO: 217222 - DNA, 58 bp, Artificial
  Synthetic oligonucleotide
aaaacgccttaatcattcaacaataccacgaaatcagcgagcaattaacgacattaca

SEQ ID NO: 217223 - DNA, 60 bp, Artificial
  Synthetic oligonucleotide
atatagcaacaaaagtgcttgctaccactcttggcatgatcgctgaaattgaacgtgaat

SEQ ID NO: 217224 - DNA, 52 bp, Artificial
  Synthetic oligonucleotide
aaaactgggggattaaaggggggcgtagcaccaccctttacgagcgatgtgc

SEQ ID NO: 217225 - DNA, 53 bp, Artificial
  Synthetic oligonucleotide
gcctcttatgggggttattagggggctttgccccctgatagaagcgaacgaag

SEQ ID NO: 217226 - DNA, 54 bp, Artificial
  Synthetic oligonucleotide
agcccgacagcttggtagcacttgaataactagccaaaaggggcggacttaggt

SEQ ID NO: 217227 - DNA, 55 bp, Artificial
  Synthetic oligonucleotide
aaaagcccttaattcgctcccattcgcttcctgaacgctttttcccattatatca

SEQ ID NO: 217228 - DNA, 60 bp, Artificial
  Synthetic oligonucleotide
actcccatatcgtaagggacaccacggccactatcagcatcacagccgctgaaatggccg

SEQ ID NO: 217229 - DNA, 60 bp, Artificial
  Synthetic oligonucleotide
agccaatctatactgaagcaacgctcctaaaagatttgcagcgtgtcgcccgatatattg

SEQ ID NO: 217230 - DNA, 60 bp, Artificial
  Synthetic oligonucleotide
ataccaattgatcgagactttttgctgtctgacggcaatcagactgcaagagcctgacca

SEQ ID NO: 217231 - DNA, 59 bp, Artificial
  Synthetic oligonucleotide
tccattgtgcccgcaatgctacgcattaaaggagctcgatgagcggtggcttgtgcaag

SEQ ID NO: 217232 - DNA, 59 bp, Artificial
  Synthetic oligonucleotide
ttccaaccacgcgtgccacatacggctgctgaacaatagagagcacttgctcaggttga

SEQ ID NO: 217233 - DNA, 58 bp, Artificial
  Synthetic oligonucleotide
cagtggtttgtgtgtaatcttccaacagaattacgataacgcatttgcgaaagtgctt

SEQ ID NO: 217234 - DNA, 57 bp, Artificial
  Synthetic oligonucleotide
ggtacagaagttttagataatcctgcggtaatcaatccgcttgcgttttatctctta

SEQ ID NO: 217235 - DNA, 54 bp, Artificial
  Synthetic oligonucleotide
aagtttccacgctttagggcggtaacgtgcgactgggtggaaaactgcgacata

SEQ ID NO: 217236 - DNA, 60 bp, Artificial
  Synthetic oligonucleotide
gcctgaactgatccaagaaactagcttctatgagaaaagagaacgatgggttaagactga

SEQ ID NO: 217237 - DNA, 59 bp, Artificial
  Synthetic oligonucleotide
taccgatgcttgccaaatttgtcacaagtctgccaaaacgatccgcacttttggcgcgc

SEQ ID NO: 217238 - DNA, 48 bp, Artificial
  Synthetic oligonucleotide
tttagggttacaggtataaaaatttagggttacaggtataaaaattta

SEQ ID NO: 217239 - DNA, 58 bp, Artificial
  Synthetic oligonucleotide
taaaggtaggacctgtgacgtgaaaccacagctaggtatagagttatagcggagacta

SEQ ID NO: 217240 - DNA, 59 bp, Artificial
  Synthetic oligonucleotide
atgacctgggctggaattcgagtgggtggcgagcttagcgctgccattgcgaaaggaac

SEQ ID NO: 217241 - DNA, 56 bp, Artificial
  Synthetic oligonucleotide
ccgttaaaaactatcctaaatcacaaccgagatgggagctttggcacacaagccga

SEQ ID NO: 217242 - DNA, 59 bp, Artificial
  Synthetic oligonucleotide
gacagccgattccattgtgcccgcaatgctacgcattaaaggagctcgatgagcggtgg

SEQ ID NO: 217243 - DNA, 59 bp, Artificial
  Synthetic oligonucleotide
acaacaacaatacagcgaaataatgcaagcattgaagaatttaaacagcacgtggaaga

SEQ ID NO: 217244 - DNA, 59 bp, Artificial
  Synthetic oligonucleotide
agctaattctcccaatactgcccccgcctcaacagaggctaattgcgcttgatcgccta

SEQ ID NO: 217245 - DNA, 58 bp, Artificial
  Synthetic oligonucleotide
cgcaaaagacaaagcaggggtatgagcagataaaacaagggggagaattatggcaaca

SEQ ID NO: 217246 - DNA, 59 bp, Artificial
  Synthetic oligonucleotide
cttcagcgaaatcttattaaatttggtgctagcatcagtcaaatgaaaagatggtttgg

SEQ ID NO: 217247 - DNA, 50 bp, Artificial
  Synthetic oligonucleotide
gcgagatttaaaggtggtgtaatttacggttaaaggtggtgtaatttacg

SEQ ID NO: 217248 - DNA, 59 bp, Artificial
  Synthetic oligonucleotide
ttagtccccatccatgtaggctctaataactcattgcaacgtgtcttatagtcctgatc

SEQ ID NO: 217249 - DNA, 57 bp, Artificial
  Synthetic oligonucleotide
gggttgtgaatggcggctaaagtgcggtctaactggcaagcgtttttaatgtgccgc

SEQ ID NO: 217250 - DNA, 56 bp, Artificial
  Synthetic oligonucleotide
gataatccacgctatgaagaatgttggaaacactattacgaacttactaaacgtaa

SEQ ID NO: 217251 - DNA, 56 bp, Artificial
  Synthetic oligonucleotide
agtttcgtaacgtctctgtgcatatgcgtgtcgtaaaccgtgattttttaactcac

SEQ ID NO: 217252 - DNA, 58 bp, Artificial
  Synthetic oligonucleotide
atgactggtgcaggcaacactgtatttcggcgtagtttcttcctcgcttgtggcggct

SEQ ID NO: 217253 - DNA, 58 bp, Artificial
  Synthetic oligonucleotide
tgcggtgggtattaacggcagatgtgcagctagacagtaatggctccgcccgtgcgga

SEQ ID NO: 217254 - DNA, 57 bp, Artificial
  Synthetic oligonucleotide
cccgctaaatgatggacaacgcgcactttacctgctaatcccgcagagccccaaggt

SEQ ID NO: 217255 - DNA, 58 bp, Artificial
  Synthetic oligonucleotide
catgtgtgacttgatagctttaagattctttccgctgcttgtaattttaaccataacc

SEQ ID NO: 217256 - DNA, 56 bp, Artificial
  Synthetic oligonucleotide
agcggttggaagcgaaattatcggaacaatcgaaagaattaaatcagctatcgtta

SEQ ID NO: 217257 - DNA, 58 bp, Artificial
  Synthetic oligonucleotide
tgctgatacaccggctcgtgtaagccttccggcattctggcatcataagctgggcgta

SEQ ID NO: 217258 - DNA, 60 bp, Artificial
  Synthetic oligonucleotide
gcggagtcaaaggcggagttcaacacatctgccaccacttgttcgccgagggcagaacta

SEQ ID NO: 217259 - DNA, 54 bp, Artificial
  Synthetic oligonucleotide
cacgacaaggcgaagtgctgggcgttcgaattacggaacatcaagaaacccccg

SEQ ID NO: 217260 - DNA, 52 bp, Artificial
  Synthetic oligonucleotide
gattttcgaataagggttgaagttgtggctttctaaacttgacttaacaatt

SEQ ID NO: 217261 - DNA, 58 bp, Artificial
  Synthetic oligonucleotide
ccacctgcgaaaagcaccgcactcactggtgcaacacgccataatccacgcacttgat

SEQ ID NO: 217262 - DNA, 58 bp, Artificial
  Synthetic oligonucleotide
ggcgaagttgctcagtgatacgatcgacaaagccaagatcaaccatcgatctgtcggt

SEQ ID NO: 217263 - DNA, 56 bp, Artificial
  Synthetic oligonucleotide
accgcgtttcaaccttggggctctgcgggattagcaggtaaagtgcgcgttgtcca

SEQ ID NO: 217264 - DNA, 57 bp, Artificial
  Synthetic oligonucleotide
ctcaatccaatttgcgaaacacggtaaagaattcgatattgacgtggcattaaataa

SEQ ID NO: 217265 - DNA, 58 bp, Artificial
  Synthetic oligonucleotide
gatatcttccatatcccacgatttagcgtgtctacggcttttgtgttctgctggtcga

SEQ ID NO: 217266 - DNA, 53 bp, Artificial
  Synthetic oligonucleotide
actcaccaaagccgagtaccgacttatgcaataacaggaacggggggaactat

SEQ ID NO: 217267 - DNA, 58 bp, Artificial
  Synthetic oligonucleotide
ccgacaatgcaacagtcaaaagccgagcattgaccttgttagcgtgttggcgaccttg

SEQ ID NO: 217268 - DNA, 52 bp, Artificial
  Synthetic oligonucleotide
attccgtagcgttgttgtatctatcggtaaatttaacggtaaaagtgaagtg

SEQ ID NO: 217269 - DNA, 55 bp, Artificial
  Synthetic oligonucleotide
gcggagtgggttcgggaagttgccctagaacagcaacctaagcgacagccgaaag

SEQ ID NO: 217270 - DNA, 58 bp, Artificial
  Synthetic oligonucleotide
agacgctggaatgactggcggtctagctgagctttatactgctatcgccccttgcgct

SEQ ID NO: 217271 - DNA, 57 bp, Artificial
  Synthetic oligonucleotide
cggcataaggaccaaccgcttttacgccacgaggaccacgcactgcatcacaagcca

SEQ ID NO: 217272 - DNA, 57 bp, Artificial
  Synthetic oligonucleotide
cgatatacgccgtagttgatagcgaggctacctaagccaccgccgccttgtgtcccc

SEQ ID NO: 217273 - DNA, 51 bp, Artificial
  Synthetic oligonucleotide
gtggtatggaaatgtttccccaaccggggcaaccggtgtggggcaatttac

SEQ ID NO: 217274 - DNA, 57 bp, Artificial
  Synthetic oligonucleotide
ttcagctgggggcgagtgtgcgaaccttggcggagtgtgttgaggtgggcagagcgg

SEQ ID NO: 217275 - DNA, 57 bp, Artificial
  Synthetic oligonucleotide
tgtccagtcagccagctctgctaacgtgcctatttccacgccctctgccaacggtaa

SEQ ID NO: 217276 - DNA, 56 bp, Artificial
  Synthetic oligonucleotide
ccaccggagttgcaccggaaactgccgagcgagggttgattaaatccatcgggcta

SEQ ID NO: 217277 - DNA, 56 bp, Artificial
  Synthetic oligonucleotide
cctagcctgtactaggtaggtttaacttgagcttggcaagtcatccaagtggccct

SEQ ID NO: 217278 - DNA, 57 bp, Artificial
  Synthetic oligonucleotide
ttcctggagaacgcagaacgaatgctccggaatatctaacgaccaacttcttcttaa

SEQ ID NO: 217279 - DNA, 57 bp, Artificial
  Synthetic oligonucleotide
gcccaaattaattgctgccgacttcaccccaatgcccgacacacttcgtgttgccct

SEQ ID NO: 217280 - DNA, 49 bp, Artificial
  Synthetic oligonucleotide
gaaccgcctaaaagggcggtttttgttttatgtaaacccttgtcaagcg

SEQ ID NO: 217281 - DNA, 59 bp, Artificial
  Synthetic oligonucleotide
gcgtgggttatcttggtggcattatgggcgttccgctctttcagccgtcaaggtcaagc

SEQ ID NO: 217282 - DNA, 57 bp, Artificial
  Synthetic oligonucleotide
cccacttagaaaatacgtcggaatcaaagtgacaaacagaaataatgcaatattggc

SEQ ID NO: 217283 - DNA, 57 bp, Artificial
  Synthetic oligonucleotide
gtagcggggctaggtgttgcgttccacgctaaacctaaagtgcaacaacaagcgcaa

SEQ ID NO: 217284 - DNA, 57 bp, Artificial
  Synthetic oligonucleotide
aagcgacagccgaaagtaatcgaccctgcattactgttcgagctgaaccgcataggc

SEQ ID NO: 217285 - DNA, 53 bp, Artificial
  Synthetic oligonucleotide
gtaaatccgcgcgattactgccagcccttacaccccggttgcttagggttggt

SEQ ID NO: 217286 - DNA, 57 bp, Artificial
  Synthetic oligonucleotide
ctcatgattgccatcacaatcggtttgcgatttggtatgcgaaccaccgcaatatca

SEQ ID NO: 217287 - DNA, 57 bp, Artificial
  Synthetic oligonucleotide
cagtaattgcttatgtaaataacaatttgaacaacgatcattttgtcatcattaatg

SEQ ID NO: 217288 - DNA, 57 bp, Artificial
  Synthetic oligonucleotide
gctaaatccccctgtacttgcagtaggctcacggctacgccgtaactaccgcacttc

SEQ ID NO: 217289 - DNA, 57 bp, Artificial
  Synthetic oligonucleotide
taaggtgaatatcgccgccggctttggtacacatcgctccaccttacaacatggcga

SEQ ID NO: 217290 - DNA, 57 bp, Artificial
  Synthetic oligonucleotide
ttgttgttgttctagtttgcttaatctttcgcttgtcataatagcccctattgagtg

SEQ ID NO: 217291 - DNA, 57 bp, Artificial
  Synthetic oligonucleotide
ggatacaatgaggacaacatgacagattcagatatttcaattagagttcgcacaaac

SEQ ID NO: 217292 - DNA, 55 bp, Artificial
  Synthetic oligonucleotide
gcgttacgtttgaattttcgatatttctattatccaatttggcaaggcttaatag

SEQ ID NO: 217293 - DNA, 55 bp, Artificial
  Synthetic oligonucleotide
ggtgatcgccctttttgtcttcggcggcccgacaatccatagtttctcgttggcc

SEQ ID NO: 217294 - DNA, 57 bp, Artificial
  Synthetic oligonucleotide
ccgttccacccgaaccggcttgcaaatccaaatagcaatcggcactgtcgtgtgggc

SEQ ID NO: 217295 - DNA, 55 bp, Artificial
  Synthetic oligonucleotide
ttcttggacgaaagggggacgagcgagagctattccgattagaacggaatcccaa

SEQ ID NO: 217296 - DNA, 55 bp, Artificial
  Synthetic oligonucleotide
gaagggttactacccgggcctctgaaagtggtacgccgtgccagtgggctacgca

SEQ ID NO: 217297 - DNA, 56 bp, Artificial
  Synthetic oligonucleotide
ggagattctagttaaattacctacggatgaacttgagttgctattcaagtggtaca

SEQ ID NO: 217298 - DNA, 56 bp, Artificial
  Synthetic oligonucleotide
tacgtgatgcccttcaaatgttagcagggccggcttatgaaattactatcaatgac

SEQ ID NO: 217299 - DNA, 56 bp, Artificial
  Synthetic oligonucleotide
atggacaacgcgcactttacctgctaatcccgcagagccccaaggttgaaacgcgg

SEQ ID NO: 217300 - DNA, 48 bp, Artificial
  Synthetic oligonucleotide
agggacgttgtcccttaaaccctagttaagacttaaaaccagtcttaa

SEQ ID NO: 217301 - DNA, 56 bp, Artificial
  Synthetic oligonucleotide
acgggggctgagccgtttggctatttcaggcgaacagcggaaagtgcggtctaatc

SEQ ID NO: 217302 - DNA, 56 bp, Artificial
  Synthetic oligonucleotide
taccccaagatggatttggtggctgaacaccggcgcctaagaaagagagcgatgct

SEQ ID NO: 217303 - DNA, 57 bp, Artificial
  Synthetic oligonucleotide
gctcacgatgttcgcctaataaaacgaagtcgcctatcggctccgctgattttttta

SEQ ID NO: 217304 - DNA, 56 bp, Artificial
  Synthetic oligonucleotide
caaactcctcatcactaattggagattttgctctttccaacatagaagcaaattcc

SEQ ID NO: 217305 - DNA, 55 bp, Artificial
  Synthetic oligonucleotide
cccgagttcactactcacttgcaatcgagcctttaaatttgcttgtttttcgctt

SEQ ID NO: 217306 - DNA, 56 bp, Artificial
  Synthetic oligonucleotide
gggctcaattgcagatcctagcaatgcacgccacattctcgacttaggcacgggga

SEQ ID NO: 217307 - DNA, 56 bp, Artificial
  Synthetic oligonucleotide
aatgtaaaatgcgcaatagagcttaatgcatacacggcttgagatagactaaaccc

SEQ ID NO: 217308 - DNA, 50 bp, Artificial
  Synthetic oligonucleotide
gttcggggattagttaaatacgacctaaaggacgtggttttacggcacga

SEQ ID NO: 217309 - DNA, 54 bp, Artificial
  Synthetic oligonucleotide
gataatggactatgtaaccgtagttaataaagatacgataaccgaattagacgg

SEQ ID NO: 217310 - DNA, 56 bp, Artificial
  Synthetic oligonucleotide
cttgaagatttctattcaaacattgaagacgtaccgaatgaagatttgctttacta

SEQ ID NO: 217311 - DNA, 54 bp, Artificial
  Synthetic oligonucleotide
cttttaagctcgttgtaccctagagggcaactaaactgattaagggcttgtgcg

SEQ ID NO: 217312 - DNA, 53 bp, Artificial
  Synthetic oligonucleotide
cagtaagtgataaaacgacgtggaagtaacgcgtaccggttgccaacgatttg

SEQ ID NO: 217313 - DNA, 56 bp, Artificial
  Synthetic oligonucleotide
cagtctccttttaagtaaatacatcatttccctgtatactaagcgaaatcgctagg

SEQ ID NO: 217314 - DNA, 60 bp, Artificial
  Synthetic oligonucleotide
gctcgtgtaggcattcgttgctctgtaagagatcttgccccaatggtgggaaacgtgcct

SEQ ID NO: 217315 - DNA, 56 bp, Artificial
  Synthetic oligonucleotide
cggggcgaagccaagataagtaaatatgccatcatcgtacgcatagttcggtgtaa

SEQ ID NO: 217316 - DNA, 52 bp, Artificial
  Synthetic oligonucleotide
ccttgcaaaagggctttgcccccttgacccccgaccgctttcagcggtcaaa

SEQ ID NO: 217317 - DNA, 56 bp, Artificial
  Synthetic oligonucleotide
ctcccaccagaattggcgtatggggagcaaggggctggacagattccaccaaatgc

SEQ ID NO: 217318 - DNA, 56 bp, Artificial
  Synthetic oligonucleotide
cttgtgggattgcaaatttcagctgggggcgagtgtgcgaaccttggcggagtgtg

SEQ ID NO: 217319 - DNA, 51 bp, Artificial
  Synthetic oligonucleotide
acgcacttttaaaaccactaacgcttaaaagctcgtattgcgtaaaaccta

SEQ ID NO: 217320 - DNA, 56 bp, Artificial
  Synthetic oligonucleotide
tgcagatcctagcaatgcacgccacattctcgacttaggcacggggacagggctta

SEQ ID NO: 217321 - DNA, 56 bp, Artificial
  Synthetic oligonucleotide
acatcaacgcacgacgttctctttttgtgcttacgctgcgagtacgtttaccgtta

SEQ ID NO: 217322 - DNA, 56 bp, Artificial
  Synthetic oligonucleotide
aaacaagttgattgctaaaagacttttcgacactccgccttttgcacttgctatag

SEQ ID NO: 217323 - DNA, 56 bp, Artificial
  Synthetic oligonucleotide
cgatcagcaaatttaggttgaaatttaattgactcttctcttcttagtccaaattc

SEQ ID NO: 217324 - DNA, 55 bp, Artificial
  Synthetic oligonucleotide
ggaaaggtgcacggattttcataaaaggtgcacggattttcataaaggtgcacgg

SEQ ID NO: 217325 - DNA, 60 bp, Artificial
  Synthetic oligonucleotide
gctctctaatgtgaaataagacgctccataagcacgcatatagatttcagttgagcgttt

SEQ ID NO: 217326 - DNA, 55 bp, Artificial
  Synthetic oligonucleotide
gctgttgcgcttggttggcaatctaaagctaaggcgagtatcgatggtgcaattg

SEQ ID NO: 217327 - DNA, 55 bp, Artificial
  Synthetic oligonucleotide
gcgtaagcgtatcgtccaattgttagcgtattgtctcctaatgcgaccgaatacg

SEQ ID NO: 217328 - DNA, 53 bp, Artificial
  Synthetic oligonucleotide
gcttgaaagccggtttagccgttttagaacaggtcggtcaatttaatgcggaa

SEQ ID NO: 217329 - DNA, 55 bp, Artificial
  Synthetic oligonucleotide
ggagtcggtaatttgcgtggtaataaataagcttttacgcctgcacccgccataa

SEQ ID NO: 217330 - DNA, 55 bp, Artificial
  Synthetic oligonucleotide
ggcaatgcaagtgtgcgaagcttatgtgaaagtgacagagaaacttggcgtgcct

SEQ ID NO: 217331 - DNA, 55 bp, Artificial
  Synthetic oligonucleotide
ggacgcttacaagtgtccgaattcagctcgattatcggtttaattaaacgtgcgc

SEQ ID NO: 217332 - DNA, 55 bp, Artificial
  Synthetic oligonucleotide
gcttggacaagttcaagatgtgcttaaaacgggtaccgagctgattagttcatcc

SEQ ID NO: 217333 - DNA, 55 bp, Artificial
  Synthetic oligonucleotide
gcggtacttaatcgcctcattcattcgtagttgatcagccttcatatttgctctg

SEQ ID NO: 217334 - DNA, 55 bp, Artificial
  Synthetic oligonucleotide
ggcacaacgcttacccactcatttctaggtcgtcgtcaaatcgactaatcttctc

SEQ ID NO: 217335 - DNA, 55 bp, Artificial
  Synthetic oligonucleotide
ggagaagtcgtttgtttatttccgtggaatttaccagcggatgattcagattaca

SEQ ID NO: 217336 - DNA, 60 bp, Artificial
  Synthetic oligonucleotide
gctcttgcggtggctgaacacctacttataaggttcgcattgaggcagcgaaacaccact

SEQ ID NO: 217337 - DNA, 55 bp, Artificial
  Synthetic oligonucleotide
gcggctgtgtggctggatcgaccccggcaaaaccggcaaggcttccatagatacc

SEQ ID NO: 217338 - DNA, 55 bp, Artificial
  Synthetic oligonucleotide
ggagtcagttgtactggacgtgaccgtgctacgtttaatcgtcacttcgtgtaac

SEQ ID NO: 217339 - DNA, 55 bp, Artificial
  Synthetic oligonucleotide
gcggctaacacttgaacgttgtctaatttcgccattgcttttaaaagagcggtct

SEQ ID NO: 217340 - DNA, 55 bp, Artificial
  Synthetic oligonucleotide
gcggcaatatggcgggagttagaggagcgtggagaggatttaagcgagttacgcc

SEQ ID NO: 217341 - DNA, 55 bp, Artificial
  Synthetic oligonucleotide
gcttgtccatagcgtttatgttgtggatcagcaataaacaaatgtgtggcattac

SEQ ID NO: 217342 - DNA, 55 bp, Artificial
  Synthetic oligonucleotide
acctagaatggcgcaaagcgacatgaaaggttgttcaagcaacccgaacgttgag

SEQ ID NO: 217343 - DNA, 54 bp, Artificial
  Synthetic oligonucleotide
accttaaccgcaccttacgtaaagccgaacgtgattatcatacacaacgtgaat

SEQ ID NO: 217344 - DNA, 55 bp, Artificial
  Synthetic oligonucleotide
gctttataagcggtcgattttgctctgactgttgattaacttgttgcgcaatcgg

SEQ ID NO: 217345 - DNA, 55 bp, Artificial
  Synthetic oligonucleotide
ggagccgatgcaaaccaaactgcttactttgtcgataacgtaaacgtaaataatg

SEQ ID NO: 217346 - DNA, 55 bp, Artificial
  Synthetic oligonucleotide
gcggacagtggatctaatccgacataagtctggaatacaaattgatagctatagg

SEQ ID NO: 217347 - DNA, 58 bp, Artificial
  Synthetic oligonucleotide
gctgatggataactcttcgagttacccacgagctttccaacagctttccaacactaaa

SEQ ID NO: 217348 - DNA, 55 bp, Artificial
  Synthetic oligonucleotide
gcggaattggcgatagattgtgccacatccaggatataacctaattccacggtgt

SEQ ID NO: 217349 - DNA, 55 bp, Artificial
  Synthetic oligonucleotide
gcggaaagtatgaatgccacgcacgaaagcgaaccaagcccatacgaggctttgg

SEQ ID NO: 217350 - DNA, 55 bp, Artificial
  Synthetic oligonucleotide
gctttggctggactcgtaggttaattgcagcggtacgcataagaatctccatagt

SEQ ID NO: 217351 - DNA, 55 bp, Artificial
  Synthetic oligonucleotide
accgtgcagtggtttgtgtgtaatcttccaacagaattacgataacgcatttgcg

SEQ ID NO: 217352 - DNA, 55 bp, Artificial
  Synthetic oligonucleotide
gctcacatcctataaatgggtctgcatcggcgactacactagccgcgcataacaa

SEQ ID NO: 217353 - DNA, 55 bp, Artificial
  Synthetic oligonucleotide
ggatccaattggttaaaatcgtgctgggttcattagcaaaggctaaaggcacgac

SEQ ID NO: 217354 - DNA, 55 bp, Artificial
  Synthetic oligonucleotide
ggatcatgggtatagtgttctaaacgtaaacgtaatacacctgcgataaagggaa

SEQ ID NO: 217355 - DNA, 55 bp, Artificial
  Synthetic oligonucleotide
gctcagcgctaaggtttgaccggagacggaatacagctgttgttcaaacgtatag

SEQ ID NO: 217356 - DNA, 55 bp, Artificial
  Synthetic oligonucleotide
gctctacagcccgacagcttggtagcacttgaataactagccaaaaggggcggac

SEQ ID NO: 217357 - DNA, 55 bp, Artificial
  Synthetic oligonucleotide
ggattcttaatgtgttccttcattaccattacttcatccttgtttgcccaagctc

SEQ ID NO: 217358 - DNA, 58 bp, Artificial
  Synthetic oligonucleotide
gctgtaaccttaaatctcgcttatcaggtgtgggctgtactacttaaagaccgtgcca

SEQ ID NO: 217359 - DNA, 55 bp, Artificial
  Synthetic oligonucleotide
gcgtttccattaaacggtgtgtgcgatacttatagttgggcacaagcaattcgtt

SEQ ID NO: 217360 - DNA, 55 bp, Artificial
  Synthetic oligonucleotide
ggattacaacctaatccgaagaccgcttcggtaggataagcaaccactcgattcc

SEQ ID NO: 217361 - DNA, 55 bp, Artificial
  Synthetic oligonucleotide
gcgtgataccgtcttgcgccaagacttctaacaacgtatcgacaattaacgggtc

SEQ ID NO: 217362 - DNA, 55 bp, Artificial
  Synthetic oligonucleotide
ggaacatatagaacgagaaattgttttagcgaaagtaagagcagtggggtcatct

SEQ ID NO: 217363 - DNA, 55 bp, Artificial
  Synthetic oligonucleotide
accgattagagcgtaggtaaccgataaaatgtgctgaaatacagcgtaacaagtt

SEQ ID NO: 217364 - DNA, 55 bp, Artificial
  Synthetic oligonucleotide
gctcaagttggcatgctgaaaggttctgatatcacccgtcaacgctatgctgcag

SEQ ID NO: 217365 - DNA, 55 bp, Artificial
  Synthetic oligonucleotide
gctgcaatgttgactacgcaaggcggagcctggttacaaatgaagactactagtg

SEQ ID NO: 217366 - DNA, 55 bp, Artificial
  Synthetic oligonucleotide
gctattcttggcgagtaatttaacgcaggtaaccccgcacttctcacatccgtat

SEQ ID NO: 217367 - DNA, 55 bp, Artificial
  Synthetic oligonucleotide
ggataccatttgcaacggggtaaatcgaccacgcgaggatccgttaagaattgcc

SEQ ID NO: 217368 - DNA, 54 bp, Artificial
  Synthetic oligonucleotide
ggaaaacgcatcaattacgtgttgcgatgaaaagtttaggtagcccgattttgg

SEQ ID NO: 217369 - DNA, 60 bp, Artificial
  Synthetic oligonucleotide
gctgtgcaagcacaaggggggggcggctatgcgacactcaaaatcctatatgtcttaatt

SEQ ID NO: 217370 - DNA, 55 bp, Artificial
  Synthetic oligonucleotide
ggcaaaggagcacaaaacctttgcggttactaatccagcgaaccaacaaatcatt

SEQ ID NO: 217371 - DNA, 55 bp, Artificial
  Synthetic oligonucleotide
accactacgcaagcaaatagagcagatgaaagccgataatccgcacctagaacag

SEQ ID NO: 217372 - DNA, 55 bp, Artificial
  Synthetic oligonucleotide
gctgcggatccgattgtgatcaagttttctcacgtggtagcggaagatacaccta

SEQ ID NO: 217373 - DNA, 55 bp, Artificial
  Synthetic oligonucleotide
gctacttacgccgataccaagcgatctaaaacatcaagtggcggaaaatgcctca

SEQ ID NO: 217374 - DNA, 55 bp, Artificial
  Synthetic oligonucleotide
gctgtaagattagcattctctagcgttatttcgccgtaagttaattgacgcaagc

SEQ ID NO: 217375 - DNA, 55 bp, Artificial
  Synthetic oligonucleotide
gctgttacgaagtaacgtacaaatctatgctcgcttaagatactgaatgcgagtg

SEQ ID NO: 217376 - DNA, 55 bp, Artificial
  Synthetic oligonucleotide
ggaacgtcggtgccaagcgttccatccccattacggcaatgtgcgttttcggtag

SEQ ID NO: 217377 - DNA, 55 bp, Artificial
  Synthetic oligonucleotide
gcgtcggacaaatcaaacattgcttgtcgttcaggcgtgcttaacgctacttgat

SEQ ID NO: 217378 - DNA, 55 bp, Artificial
  Synthetic oligonucleotide
ggacgcaagatgtggatacatcaggcaatctcgctcgtgtaggcatccgctgctc

SEQ ID NO: 217379 - DNA, 55 bp, Artificial
  Synthetic oligonucleotide
ggcaatctctaccgaaccgtttgtattggcggtaacacttgcctctggagctgtc

SEQ ID NO: 217380 - DNA, 54 bp, Artificial
  Synthetic oligonucleotide
gctttcgcctttctaaccgtagcacgaaacggagacagagcttaattttcgtat

SEQ ID NO: 217381 - DNA, 55 bp, Artificial
  Synthetic oligonucleotide
gatatggttcggctgctatcactataccttgttcatctgttcttagccttgtgaa

SEQ ID NO: 217382 - DNA, 55 bp, Artificial
  Synthetic oligonucleotide
gatcaaattcaggttgtgcgttcggttatagaaagacaatttgtatccaatgagc

SEQ ID NO: 217383 - DNA, 55 bp, Artificial
  Synthetic oligonucleotide
gatcggaacaatattgatatgctacagggctaatcagtcacgtgtatcggctggg

SEQ ID NO: 217384 - DNA, 55 bp, Artificial
  Synthetic oligonucleotide
gatctgagccatgacgaacaatttctgaaacacgaacgacgacttggtgagtttg

SEQ ID NO: 217385 - DNA, 55 bp, Artificial
  Synthetic oligonucleotide
gatgcttcacttggcggagaataccctgttatttgcgttgtgctactcaatccga

SEQ ID NO: 217386 - DNA, 55 bp, Artificial
  Synthetic oligonucleotide
gatgtaaaacaggctagtcgtcgtccaaaatctgggcaaattcgtaaagcggtaa

SEQ ID NO: 217387 - DNA, 55 bp, Artificial
  Synthetic oligonucleotide
gattgaatttactttgttcatagctaaagccaccgaccactgcttcaatcgcgcc

SEQ ID NO: 217388 - DNA, 55 bp, Artificial
  Synthetic oligonucleotide
acggcctagcgcggtaccaccagttgctactgacgtcacactactgtgtgcacct

SEQ ID NO: 217389 - DNA, 55 bp, Artificial
  Synthetic oligonucleotide
gatttacagtctattgcctacgaactgaatttcgcaggggcaaaactagcgcgtt

SEQ ID NO: 217390 - DNA, 55 bp, Artificial
  Synthetic oligonucleotide
gatttgcctgagaagcaatatacatttagtgctgaggtcaaacccgaaagaactg

SEQ ID NO: 217391 - DNA, 57 bp, Artificial
  Synthetic oligonucleotide
gaaactcaggtgctacaatttaccttaaccttgagaaggatttgtgatataatactc

SEQ ID NO: 217392 - DNA, 54 bp, Artificial
  Synthetic oligonucleotide
ggaagaataaacaggcgtagaagtgataacgttcttaatacgaaaattaagctc

SEQ ID NO: 217393 - DNA, 55 bp, Artificial
  Synthetic oligonucleotide
gattttgcccaatcaaattcggcttgcgaaccttttagaacttgtggacgctgtg

SEQ ID NO: 217394 - DNA, 55 bp, Artificial
  Synthetic oligonucleotide
gcaaagcaaccaataactgttggggaaatgcgatcacgctacttaaaacaaacac

SEQ ID NO: 217395 - DNA, 55 bp, Artificial
  Synthetic oligonucleotide
gcaacaaacggaaagtgcggtcgttattcaagcgattttagctatcgtcgctacc

SEQ ID NO: 217396 - DNA, 55 bp, Artificial
  Synthetic oligonucleotide
gcaacaacgaagtgtattgttcggcatgccaattttacgtcctttgttaggcttt

SEQ ID NO: 217397 - DNA, 55 bp, Artificial
  Synthetic oligonucleotide
gcaacctatttggtgccaattctggcgtattattcactcacgcggtgtggggaga

SEQ ID NO: 217398 - DNA, 55 bp, Artificial
  Synthetic oligonucleotide
gcaacgcgtaacaatgacatgaattcggcaaattccttgcctttcatcgccggaa

SEQ ID NO: 217399 - DNA, 55 bp, Artificial
  Synthetic oligonucleotide
gcaagaaggagcgaaactcaccgtatttaaagcgacagccggtggttgataacgt

SEQ ID NO: 217400 - DNA, 55 bp, Artificial
  Synthetic oligonucleotide
gcaagactcgcagcgaacccgtagaaagccatgctccagccgcccgcattggaga

SEQ ID NO: 217401 - DNA, 55 bp, Artificial
  Synthetic oligonucleotide
gcaagcgtcagatatttacgaacgagcaaacgcccgtgtttgtacggaaattgtg

SEQ ID NO: 217402 - DNA, 55 bp, Artificial
  Synthetic oligonucleotide
gcaatggactcacttgcgtaccacgtaattttaaacgctcgctaaataaaacata

SEQ ID NO: 217403 - DNA, 56 bp, Artificial
  Synthetic oligonucleotide
gacacgataggggactttttctagcgaaaaaatcaaccctatctgccttgcaggtg

SEQ ID NO: 217404 - DNA, 55 bp, Artificial
  Synthetic oligonucleotide
gcaatggccccaaaatagacgatacctcttcaataatttgcgttatactgttcgc

SEQ ID NO: 217405 - DNA, 55 bp, Artificial
  Synthetic oligonucleotide
gcaatgtagcattagaagcctttgttatctgatttaagttattgccaaccctagc

SEQ ID NO: 217406 - DNA, 55 bp, Artificial
  Synthetic oligonucleotide
gcacaattagccggtgcgacattcggtttatgggaaatctcccttatgtggggcg

SEQ ID NO: 217407 - DNA, 55 bp, Artificial
  Synthetic oligonucleotide
gcagatagacatacctaagggtgcactaatatccgctgtaggaacggcacgaaga

SEQ ID NO: 217408 - DNA, 55 bp, Artificial
  Synthetic oligonucleotide
gacccaggataaagatactgcccggcattccactcaccaagttagacatataatc

SEQ ID NO: 217409 - DNA, 55 bp, Artificial
  Synthetic oligonucleotide
gaccctaagcaagtcacatcatagcaaagggtagctagtaatgcaagagattgcg

SEQ ID NO: 217410 - DNA, 55 bp, Artificial
  Synthetic oligonucleotide
gaccgtattttagcggatagatatgaaaatcaccgtcagcgtaagctgctgcaac

SEQ ID NO: 217411 - DNA, 50 bp, Artificial
  Synthetic oligonucleotide
acgtacgtttattcgtattaataaacaagtttgtattccactgccccggg

SEQ ID NO: 217412 - DNA, 55 bp, Artificial
  Synthetic oligonucleotide
gaccgttggcttacaaacctccaccattgcgttaatcggtatcggcgcaacttgc

SEQ ID NO: 217413 - DNA, 55 bp, Artificial
  Synthetic oligonucleotide
gacgcttaatccgccggttatggcatacagatagtttggtggcatccacaaagct

SEQ ID NO: 217414 - DNA, 56 bp, Artificial
  Synthetic oligonucleotide
gaccgtgccacgaaacggagacagagcctagatttcgttctaggtacgttatcact

SEQ ID NO: 217415 - DNA, 55 bp, Artificial
  Synthetic oligonucleotide
gacggcgtagagattgtgaaagaatcattccacacgcttttgcctaagtttagcg

SEQ ID NO: 217416 - DNA, 55 bp, Artificial
  Synthetic oligonucleotide
gacggtggtgaccccttctcatgaattgcacattgaagtcactggtggttgttgg

SEQ ID NO: 217417 - DNA, 55 bp, Artificial
  Synthetic oligonucleotide
gactacgcgctactaatgcgtaatttggtgaatactaacacacgtcaaccacaca

SEQ ID NO: 217418 - DNA, 55 bp, Artificial
  Synthetic oligonucleotide
gagaagatagttacggtcacatacggtaaacagaaagttacgtgggcaagtagta

SEQ ID NO: 217419 - DNA, 55 bp, Artificial
  Synthetic oligonucleotide
gagagtttgcgaaccgaaaacgccttaatcattcaacaataccacgaaatcagcg

SEQ ID NO: 217420 - DNA, 55 bp, Artificial
  Synthetic oligonucleotide
gagccatacccctccgctttggtatttgccccgatagcaatagattgtgccttac

SEQ ID NO: 217421 - DNA, 55 bp, Artificial
  Synthetic oligonucleotide
gagccctgctatggtggcagccgcagctgtagccggtcatttagtagatgtgcgt

SEQ ID NO: 217422 - DNA, 55 bp, Artificial
  Synthetic oligonucleotide
gagcctttatgcaggtattcaccgcacacttccgcttgacggcgataaaatacga

SEQ ID NO: 217423 - DNA, 55 bp, Artificial
  Synthetic oligonucleotide
gagcttcaacataatcagtaggcagacgacaaaactaatcagtaaggattgccat

SEQ ID NO: 217424 - DNA, 55 bp, Artificial
  Synthetic oligonucleotide
gagcttgctagggttggcaataacttaaatcagataacaaaggcttctaatgcta

SEQ ID NO: 217425 - DNA, 60 bp, Artificial
  Synthetic oligonucleotide
gacgattgcccaattatgtgaagcagccgtgcggtttagcgacaacagcgcgaccaattt

SEQ ID NO: 217426 - DNA, 55 bp, Artificial
  Synthetic oligonucleotide
gaggccgtcaccgctgatgccatggtggtcaaaggtagctatcgggcgctggcaa

SEQ ID NO: 217427 - DNA, 55 bp, Artificial
  Synthetic oligonucleotide
gaggcgatataccgcttccacgacttgttgcggtttaatcacgccagaagtgcgg

SEQ ID NO: 217428 - DNA, 55 bp, Artificial
  Synthetic oligonucleotide
gaggcgtctttcgtaaaagtgcaagcctctagcgcatggattcgtacttatgcag

SEQ ID NO: 217429 - DNA, 55 bp, Artificial
  Synthetic oligonucleotide
gagggtaatcgctatttggatatgcttagtgcctactcagcggctaatcaagggc

SEQ ID NO: 217430 - DNA, 55 bp, Artificial
  Synthetic oligonucleotide
gagtatcttcgatggtgcctaggcgttcatgcaacggaatataatcgaccagggc

SEQ ID NO: 217431 - DNA, 55 bp, Artificial
  Synthetic oligonucleotide
gagttatttagccgttttcttgttagcttgctatttagcgctttaccctctcacg

SEQ ID NO: 217432 - DNA, 54 bp, Artificial
  Synthetic oligonucleotide
gataaagagtgcgaaacactttatcgaattaaaccaacgttaccgaaagcgtgc

SEQ ID NO: 217433 - DNA, 55 bp, Artificial
  Synthetic oligonucleotide
gataccgctaaatccattatcgaagatacgatagatattatcgtgcatatcggca

SEQ ID NO: 217434 - DNA, 55 bp, Artificial
  Synthetic oligonucleotide
gccgtcataagcagcacggctgtaaaattgcgaatagctacaccacgcaacgact

SEQ ID NO: 217435 - DNA, 55 bp, Artificial
  Synthetic oligonucleotide
gcctacgttttgcacactgtggggccgattatcagtggtgcgttatcggcaaaag

SEQ ID NO: 217436 - DNA, 52 bp, Artificial
  Synthetic oligonucleotide
gactatattggtactgtttcatcaattacgttaccgtcaatttaaagggttt

SEQ ID NO: 217437 - DNA, 55 bp, Artificial
  Synthetic oligonucleotide
acgagcatgctcattttgccagttttggctgcctgttaattgcgctcaaacatcc

SEQ ID NO: 217438 - DNA, 55 bp, Artificial
  Synthetic oligonucleotide
gcctcatcgcatttatccggtggatatttgaataatctcaacgttacacgcacca

SEQ ID NO: 217439 - DNA, 55 bp, Artificial
  Synthetic oligonucleotide
acgacggctaaactgtgccgcttgttgattaatacgctcttgtagcacataaaga

SEQ ID NO: 217440 - DNA, 55 bp, Artificial
  Synthetic oligonucleotide
gccttctatctgcgattggaccctctgacttggggttgatgttcatgccgcctgt

SEQ ID NO: 217441 - DNA, 55 bp, Artificial
  Synthetic oligonucleotide
gccttgcaaacctaaatcaagcagtaggcgttctttcggcaaaatgccacgtgca

SEQ ID NO: 217442 - DNA, 52 bp, Artificial
  Synthetic oligonucleotide
gccttggggcaatcggggttggattaactgtcgggttgagaaaaggtggtac

SEQ ID NO: 217443 - DNA, 55 bp, Artificial
  Synthetic oligonucleotide
gcgaagtaagggaatgagcctatgacaccaaccgaaacggcattaaagcggattg

SEQ ID NO: 217444 - DNA, 55 bp, Artificial
  Synthetic oligonucleotide
gcgaccctaattaccgtgtaacaatcgacaagcaaacagggcaatcgatatttag

SEQ ID NO: 217445 - DNA, 55 bp, Artificial
  Synthetic oligonucleotide
gcgacgattggtacacatgatgtgccttccttgcaaagtttctggcattgccgtg

SEQ ID NO: 217446 - DNA, 55 bp, Artificial
  Synthetic oligonucleotide
gcgacgtaaacctaagcgagcgatagttgaagtataaagctcaagattagtacgt

SEQ ID NO: 217447 - DNA, 55 bp, Artificial
  Synthetic oligonucleotide
gatagctacccgaaagggtgaaatatagcccaaccgcacgcaaagcgtggggtaa

SEQ ID NO: 217448 - DNA, 55 bp, Artificial
  Synthetic oligonucleotide
gcgagatttaacgattttatcaacgacaaactgttaagcggtgcgattgacacac

SEQ ID NO: 217449 - DNA, 53 bp, Artificial
  Synthetic oligonucleotide
gcgagcgctaagggtggagtttcgaaaagccttttagccgttaatttgtacga

SEQ ID NO: 217450 - DNA, 55 bp, Artificial
  Synthetic oligonucleotide
gcgaggcagtgtagcaggtctcaatcacagcaccaaaatcgcatttagccttgag

SEQ ID NO: 217451 - DNA, 55 bp, Artificial
  Synthetic oligonucleotide
gcgatgtacaggcggcatcctattctctctggggctttaatgcggggctactaag

SEQ ID NO: 217452 - DNA, 55 bp, Artificial
  Synthetic oligonucleotide
gcgattccgccaccgaatgtaacgggttccctacacatgggacacgctttccaac

SEQ ID NO: 217453 - DNA, 55 bp, Artificial
  Synthetic oligonucleotide
gcgccataccatcaaccgaaatcactttagcgccattcttaacagctaattcacc

SEQ ID NO: 217454 - DNA, 55 bp, Artificial
  Synthetic oligonucleotide
gcgcctaaccaccaactgcctgcaaaggaggcaatcaatggctacccataagcct

SEQ ID NO: 217455 - DNA, 55 bp, Artificial
  Synthetic oligonucleotide
gcgcgatatgccgagcgcatgaaggccaaagggatgcgtcagcgcaagttctggc

SEQ ID NO: 217456 - DNA, 55 bp, Artificial
  Synthetic oligonucleotide
gcgctctgtcggcagatttaacgaaaattcccgctctttcgcccatgagacgagc

SEQ ID NO: 217457 - DNA, 53 bp, Artificial
  Synthetic oligonucleotide
gatcctccgcctctttagaggggtattccccttccaaagcgaaactagccagg

SEQ ID NO: 217458 - DNA, 55 bp, Artificial
  Synthetic oligonucleotide
gcgctttgggtaattgctattccgttagttgatatggtggcgattatttaccgtc

SEQ ID NO: 217459 - DNA, 55 bp, Artificial
  Synthetic oligonucleotide
gcagatcaggatatgagagacttaatggatctcgcctatatcaccggacaacgtc

SEQ ID NO: 217460 - DNA, 55 bp, Artificial
  Synthetic oligonucleotide
gcagattctttaatgaacagatgctcaaacagaggatataccttacggcttcccc

SEQ ID NO: 217461 - DNA, 55 bp, Artificial
  Synthetic oligonucleotide
gcagggtagtgttccaagtataaacctgacacgctatcgcccaaattcatttcac

SEQ ID NO: 217462 - DNA, 55 bp, Artificial
  Synthetic oligonucleotide
gcaggtgcgacagacgtcatactagatatcaagcgacttctcctatcccctggga

SEQ ID NO: 217463 - DNA, 55 bp, Artificial
  Synthetic oligonucleotide
gcataatccgtcttttccgctctatttaacgcattttgcgcaagtggaaataagg

SEQ ID NO: 217464 - DNA, 55 bp, Artificial
  Synthetic oligonucleotide
gcatagcaggattaggcggtgccgtattccctactgcttgcaaattaagtctggc

SEQ ID NO: 217465 - DNA, 55 bp, Artificial
  Synthetic oligonucleotide
gcatagccggcaatacgagccgaatcgaaatttacgttggttaatgtggcgaaga

SEQ ID NO: 217466 - DNA, 55 bp, Artificial
  Synthetic oligonucleotide
acgctgttgtagaaccacgagattattttgccctgtcggttcaacgattttcgaa

SEQ ID NO: 217467 - DNA, 55 bp, Artificial
  Synthetic oligonucleotide
gcatcagaacggtaatctcgataaccagtacttacatgatttggcaacactggtg

SEQ ID NO: 217468 - DNA, 60 bp, Artificial
  Synthetic oligonucleotide
gattaaccgttgccaagatacgattaaattcattgcgtaattctgtaatgttatgatcaa

SEQ ID NO: 217469 - DNA, 55 bp, Artificial
  Synthetic oligonucleotide
gcatctgtggcgatagcattaacacctacggcgctaatatcttgaaaggttaggc

SEQ ID NO: 217470 - DNA, 55 bp, Artificial
  Synthetic oligonucleotide
gccaagtgcggtaacaaatggtactcaaaacacaccgcactatcttggttcgact

SEQ ID NO: 217471 - DNA, 55 bp, Artificial
  Synthetic oligonucleotide
gccactgcattacagggaaacttgactatttccgtaccacgtgattttggcttgc

SEQ ID NO: 217472 - DNA, 55 bp, Artificial
  Synthetic oligonucleotide
gcccaaccaatactaactccggcttgtaatgccacaccttgagaaagtacggtcc

SEQ ID NO: 217473 - DNA, 55 bp, Artificial
  Synthetic oligonucleotide
gcccagattttagacgacgactagcctgttttacatctaatttcgtttcagtctc

SEQ ID NO: 217474 - DNA, 55 bp, Artificial
  Synthetic oligonucleotide
gccccgaagtgcttgacggattaaccgtgccacccgtgctgatgtcgggacacca

SEQ ID NO: 217475 - DNA, 55 bp, Artificial
  Synthetic oligonucleotide
acgatcgacttttcgatgactgtccaacactttctgccagtaattgatcgctaaa

SEQ ID NO: 217476 - DNA, 55 bp, Artificial
  Synthetic oligonucleotide
gccctaaactgcgcgctaatttatcttgtgcggtaagtgaatgccacattgcggc

SEQ ID NO: 217477 - DNA, 55 bp, Artificial
  Synthetic oligonucleotide
gccctagatcctttgcttgtatggaaaggctataacacatcgaaagactatgcgg

SEQ ID NO: 217478 - DNA, 55 bp, Artificial
  Synthetic oligonucleotide
gccctgatatcagcgtagctggttgtgccaatggtacactgcttcattccgacat

SEQ ID NO: 217479 - DNA, 54 bp, Artificial
  Synthetic oligonucleotide
gatttaaggggtgcgtttgagttctatccctttcgggtgcttgttgaatggtat

SEQ ID NO: 217480 - DNA, 55 bp, Artificial
  Synthetic oligonucleotide
gcccttgaaaatccgatactttcaactcagcccaaagttgttctaaacgttgcac

SEQ ID NO: 217481 - DNA, 53 bp, Artificial
  Synthetic oligonucleotide
acgagcgatttcgaattattaccgaaatttactcaggttcttgaacgaccaag

SEQ ID NO: 217482 - DNA, 55 bp, Artificial
  Synthetic oligonucleotide
gccgatcaaatgatgagcaatgcctcggaactgcgtgggctacatggcgatctgc

SEQ ID NO: 217483 - DNA, 55 bp, Artificial
  Synthetic oligonucleotide
gccgggttaacctaacgaataagctcagtcaattaatgaatgcaagctctaaccc

SEQ ID NO: 217484 - DNA, 55 bp, Artificial
  Synthetic oligonucleotide
gccgtaatatgcccatctctcatctgatggaattttattgacgaaggtatttgcg

SEQ ID NO: 217485 - DNA, 55 bp, Artificial
  Synthetic oligonucleotide
tcgctccgtggtgggtaacattagctcgccacgagcaacctcgtgaacccgttgc

SEQ ID NO: 217486 - DNA, 55 bp, Artificial
  Synthetic oligonucleotide
tcgctgcagagcttgccgccgccgcaggtggagctgacttcatccgcacacacga

SEQ ID NO: 217487 - DNA, 55 bp, Artificial
  Synthetic oligonucleotide
tcggcattggtaaattgattggacctagcgaccccgtccctgcaccaactactgc

SEQ ID NO: 217488 - DNA, 55 bp, Artificial
  Synthetic oligonucleotide
tcggtattaccggttatcgctgaagtaagccgtcacaacggcattcgtcccgaac

SEQ ID NO: 217489 - DNA, 55 bp, Artificial
  Synthetic oligonucleotide
tcggtgatgacctcagcaagtgcgactttatcgccgcgcagaagctggccagccg

SEQ ID NO: 217490 - DNA, 54 bp, Artificial
  Synthetic oligonucleotide
gatttgtacgttacttcgtaacaacaaatcgctcgtaaagggtggtgctacgcc

SEQ ID NO: 217491 - DNA, 55 bp, Artificial
  Synthetic oligonucleotide
aagacgctcagcgtcgaatggattacgaaggctacatctcacgtagtctgcttaa

SEQ ID NO: 217492 - DNA, 53 bp, Artificial
  Synthetic oligonucleotide
aagaccgaagcgaggtaggtagggtaagtgctcaggacgggttgcccggaggc

SEQ ID NO: 217493 - DNA, 55 bp, Artificial
  Synthetic oligonucleotide
aacttattacgcaatgttgctaacataacactagcttgttacgcaagcctgctaa

SEQ ID NO: 217494 - DNA, 55 bp, Artificial
  Synthetic oligonucleotide
tctgtatcgaaatcctcatcgagaatagcgtaaaatgcagaaacggagatgatgt

SEQ ID NO: 217495 - DNA, 55 bp, Artificial
  Synthetic oligonucleotide
tcttaatcacttacaaacgaaagtatcgccgactgattacagcacttggctacgc

SEQ ID NO: 217496 - DNA, 55 bp, Artificial
  Synthetic oligonucleotide
tctttgagcagcaaattggtcgcgctgttgtcgctaaaccgcacggctgcttcac

SEQ ID NO: 217497 - DNA, 55 bp, Artificial
  Synthetic oligonucleotide
tgaaaatcgaaccatgcacggcgattagttgtcgttgccagctcaagatccgccg

SEQ ID NO: 217498 - DNA, 55 bp, Artificial
  Synthetic oligonucleotide
tgaactccaaagcctcgtatgggcttggttcgctttcgtgcgtggcattcacact

SEQ ID NO: 217499 - DNA, 55 bp, Artificial
  Synthetic oligonucleotide
tgaagttcaaagggttagagcaatgggctaaagataagttacagcgtgaacagag

SEQ ID NO: 217500 - DNA, 55 bp, Artificial
  Synthetic oligonucleotide
tgaatgcgttgtccagcttaatttatcaggaggcgttagcgcgtcatttgggcag

SEQ ID NO: 217501 - DNA, 59 bp, Artificial
  Synthetic oligonucleotide
ctttgttgtgtttacacaagacggaaaccgaatagaccagatcgcgcataatgctctcc

SEQ ID NO: 217502 - DNA, 60 bp, Artificial
  Synthetic oligonucleotide
gcacccacggcaacaatgcctgtagaggcactttctaggtttattttgccagtgatgcta

SEQ ID NO: 217503 - DNA, 55 bp, Artificial
  Synthetic oligonucleotide
tgagcgtgcttgtgcggtgagctataccgtaatcataacagcgagagagatagcc

SEQ ID NO: 217504 - DNA, 55 bp, Artificial
  Synthetic oligonucleotide
aacgtagatgacgccaagcaacaaaagccatatctaccagtgccaatggactgac

SEQ ID NO: 217505 - DNA, 55 bp, Artificial
  Synthetic oligonucleotide
tgatcagacagtgcatgtgggatcaagtctgagtcagtacagtttaacccctatt

SEQ ID NO: 217506 - DNA, 55 bp, Artificial
  Synthetic oligonucleotide
tgcactgtagctttctagagcgtgtcgtttcagctcgcgagaaatggtgctggag

SEQ ID NO: 217507 - DNA, 55 bp, Artificial
  Synthetic oligonucleotide
tgcagccgcttataatgcaggggcaaatcgagtaggaaaatggttaagtcgtgcg

SEQ ID NO: 217508 - DNA, 55 bp, Artificial
  Synthetic oligonucleotide
tgccaccgcattcacataatgcggctgatctctaccacagaccggcttactaccg

SEQ ID NO: 217509 - DNA, 55 bp, Artificial
  Synthetic oligonucleotide
tgcccgagatccgaatacgacaccagctcatcttgagcatacagcacagccaaca

SEQ ID NO: 217510 - DNA, 55 bp, Artificial
  Synthetic oligonucleotide
tgccgaaagaacgcctactgcttgatttaggtttgcaaggctcagaatggaatgc

SEQ ID NO: 217511 - DNA, 55 bp, Artificial
  Synthetic oligonucleotide
tgccgcacttgaacgattaacgaagaaagcacgcaatacagaaagcgatccttgc

SEQ ID NO: 217512 - DNA, 55 bp, Artificial
  Synthetic oligonucleotide
tatattgggttagtccccttgagtgcgtagtcagcgatttagagcggttatgagc

SEQ ID NO: 217513 - DNA, 57 bp, Artificial
  Synthetic oligonucleotide
gcatatgatgatagtaaaaccctttaaattgacggtaacgtaattgatgaaacagta

SEQ ID NO: 217514 - DNA, 55 bp, Artificial
  Synthetic oligonucleotide
tatcaggttcgcgcttagctaaatcaccgcgcattggaaagctggtttccggtag

SEQ ID NO: 217515 - DNA, 55 bp, Artificial
  Synthetic oligonucleotide
tatcccacttcgcaaatcattaaacgagccgtgcattttacctctaaacccgatt

SEQ ID NO: 217516 - DNA, 55 bp, Artificial
  Synthetic oligonucleotide
tatcgcccaaatggactggttgcaatatctcaactatgactggacatccccttac

SEQ ID NO: 217517 - DNA, 55 bp, Artificial
  Synthetic oligonucleotide
aagtagtaatgccatcaaagcaatcacgaagtacacgcagtacacacggaagtcg

SEQ ID NO: 217518 - DNA, 55 bp, Artificial
  Synthetic oligonucleotide
tatgacattgacacccactgaattagcgattgcgaatgtgggcgatttactaggg

SEQ ID NO: 217519 - DNA, 53 bp, Artificial
  Synthetic oligonucleotide
tatggcgaaagagaacccgcttaaggttacccgtgtacattacgaactgaacc

SEQ ID NO: 217520 - DNA, 55 bp, Artificial
  Synthetic oligonucleotide
aaggtgatcgctgacgccatacacggcataggaatacccacttcgatagacttcg

SEQ ID NO: 217521 - DNA, 55 bp, Artificial
  Synthetic oligonucleotide
tattaggtttgcgacagttgcacctgttataagttcttcgctgttacggcctgcg

SEQ ID NO: 217522 - DNA, 55 bp, Artificial
  Synthetic oligonucleotide
tattcgctaaaataacacgtcttggatcttgttccgaacaaataaagtgcggtgc

SEQ ID NO: 217523 - DNA, 55 bp, Artificial
  Synthetic oligonucleotide
tcaaccataatacctacacggttttcatctacaccacgaacagcataaccacttg

SEQ ID NO: 217524 - DNA, 60 bp, Artificial
  Synthetic oligonucleotide
gcatgcaagataagtgtaccagagataatgactatattggtactgtttcatcaattacgt

SEQ ID NO: 217525 - DNA, 55 bp, Artificial
  Synthetic oligonucleotide
tcaatcagacctagttccaccgcttgtaagtgcgtgtcgaatggaccgccaaacc

SEQ ID NO: 217526 - DNA, 55 bp, Artificial
  Synthetic oligonucleotide
tcactgatggatttactcgcttacggtggcgcagctatcgggattttaaccgcac

SEQ ID NO: 217527 - DNA, 55 bp, Artificial
  Synthetic oligonucleotide
tcatcggtcgcatggaggccatcgccgccgataccgggtgctctatcgtgttcct

SEQ ID NO: 217528 - DNA, 55 bp, Artificial
  Synthetic oligonucleotide
tccacggtggaaacaatatttgcttcacaggaagtaatttcaccttgacgtaaat

SEQ ID NO: 217529 - DNA, 55 bp, Artificial
  Synthetic oligonucleotide
tccattgcgaaattatttattgccggcttcatcccgggtgtcttagtcaccatcg

SEQ ID NO: 217530 - DNA, 55 bp, Artificial
  Synthetic oligonucleotide
aagccttgcccgcaaaattattttcgtcggaatgttgcctgcattgctgattagt

SEQ ID NO: 217531 - DNA, 55 bp, Artificial
  Synthetic oligonucleotide
tccccttgcgcccaacgcaatgcttgcgtgaggttatggccatcccgaccaaaac

SEQ ID NO: 217532 - DNA, 55 bp, Artificial
  Synthetic oligonucleotide
tccgcatactgttttaaccgacaggccagtgcgtgattagcgtaatgtggagagc

SEQ ID NO: 217533 - DNA, 55 bp, Artificial
  Synthetic oligonucleotide
tccgtttctccatataccatttgtgcggaattgaccaactcaagggctaattttc

SEQ ID NO: 217534 - DNA, 55 bp, Artificial
  Synthetic oligonucleotide
tcgaatatcctcaactggcctgattacaaagtgctccaggtatccgaactggagc

SEQ ID NO: 217535 - DNA, 59 bp, Artificial
  Synthetic oligonucleotide
gcattgagattaaagctaaatgcttgcttgatgttgggtaaaatactcaacaaatgggg

SEQ ID NO: 217536 - DNA, 55 bp, Artificial
  Synthetic oligonucleotide
tcgaccagcagaaggcgctggcgtccgagttcgcccagcacctgaccggtgccga

SEQ ID NO: 217537 - DNA, 55 bp, Artificial
  Synthetic oligonucleotide
tcgaccggactgaccatagccaagcccgcacaaacaatggttaccccggcaatcg

SEQ ID NO: 217538 - DNA, 55 bp, Artificial
  Synthetic oligonucleotide
tcgccagagaagtaaccctgatcgattattttgaacaaaatctctgagctccgtg

SEQ ID NO: 217539 - DNA, 55 bp, Artificial
  Synthetic oligonucleotide
ttccaaagacgtgttgcatactgagtatgaagcgtaaatgtaatctcactgcgta

SEQ ID NO: 217540 - DNA, 55 bp, Artificial
  Synthetic oligonucleotide
aaagcggaccaaaacagcgtaactctcgctttaggcggtgatgtatcaaaactgg

SEQ ID NO: 217541 - DNA, 55 bp, Artificial
  Synthetic oligonucleotide
aaagagttgcgggaggtagccgccgaggtgagcagcgccgcgcagagcgcccgga

SEQ ID NO: 217542 - DNA, 55 bp, Artificial
  Synthetic oligonucleotide
ttcgcttatgtggcggagcaatggaaggcaagcaaagaggacgttataaaaccgc

SEQ ID NO: 217543 - DNA, 55 bp, Artificial
  Synthetic oligonucleotide
aaactacatcaaaggtcgaaattttgcccgccacacgacgattatccaagcgtag

SEQ ID NO: 217544 - DNA, 55 bp, Artificial
  Synthetic oligonucleotide
ttgagaacgttaaattaccgggcgaagacgactaactgattgaggtggctaatgg

SEQ ID NO: 217545 - DNA, 55 bp, Artificial
  Synthetic oligonucleotide
aaacagttttaaatcccgttccgtatcgctacaaacaatcacatgcacttcatcc

SEQ ID NO: 217546 - DNA, 60 bp, Artificial
  Synthetic oligonucleotide
gccaatctttctccacaggctcgcagacagcttgggcgaaaaatcgggcaagccttacga

SEQ ID NO: 217547 - DNA, 55 bp, Artificial
  Synthetic oligonucleotide
ttgcgatccaatggtttatttatggcggttcagtattaggcgtaggcttactctt

SEQ ID NO: 217548 - DNA, 55 bp, Artificial
  Synthetic oligonucleotide
ttgctacattttatccgattatcttttgcttcgcaatgcggcatgggcgcactca

SEQ ID NO: 217549 - DNA, 55 bp, Artificial
  Synthetic oligonucleotide
ttgggatattaaggtgttgctctattccttagctattccgctgttccgccggacc

SEQ ID NO: 217550 - DNA, 55 bp, Artificial
  Synthetic oligonucleotide
aaaatcatgtcgtgttggctgaacaaaacccgaatactcactttgaacaagaagt

SEQ ID NO: 217551 - DNA, 55 bp, Artificial
  Synthetic oligonucleotide
ttgtttggatcaaataagaacttcacataacgtaactcttgccaaagttcgggag

SEQ ID NO: 217552 - DNA, 55 bp, Artificial
  Synthetic oligonucleotide
tttaacggaatgaaccgtccagcaatggtattcggtgttccaatggttgctgcct

SEQ ID NO: 217553 - DNA, 55 bp, Artificial
  Synthetic oligonucleotide
tttacgcccgttattgcacaatggcgtatcgttccgactagaccgtaaagatccg

SEQ ID NO: 217554 - DNA, 55 bp, Artificial
  Synthetic oligonucleotide
tttacgtcacataggtttcttgggtgcagtaccacctgcagttaagggactcgct

SEQ ID NO: 217555 - DNA, 55 bp, Artificial
  Synthetic oligonucleotide
tttcactctgccgtgacaggcatagagcatttcgatgggttgcgcccatgtggcg

SEQ ID NO: 217556 - DNA, 55 bp, Artificial
  Synthetic oligonucleotide
tttccgcaacgccgagattatcacccgaattaagacgagaacgaatcaaactttc

SEQ ID NO: 217557 - DNA, 57 bp, Artificial
  Synthetic oligonucleotide
gccataaccggcggattaagcgtcataaggtctttgaggggattgctcaaagaggta

SEQ ID NO: 217558 - DNA, 55 bp, Artificial
  Synthetic oligonucleotide
tttcggctttagttgagccttccggcaaatgctcaacgacgcgtgaaatcggata

SEQ ID NO: 217559 - DNA, 51 bp, Artificial
  Synthetic oligonucleotide
tttcgggtttgggaagggctaagttcatgattaaccaaaactaccgttgcg

SEQ ID NO: 217560 - DNA, 55 bp, Artificial
  Synthetic oligonucleotide
tttctcttcgagaaactggcctaacggccacccttcgggcggtgcgctctccgag

SEQ ID NO: 217561 - DNA, 55 bp, Artificial
  Synthetic oligonucleotide
aaaagaggtttctcgcattgatgtagagaacctaaacttcgcttacggcgaagaa

SEQ ID NO: 217562 - DNA, 55 bp, Artificial
  Synthetic oligonucleotide
tttggtagcgtattgacaataggttcaacggttgcgttatagcgacctacacttg

SEQ ID NO: 217563 - DNA, 55 bp, Artificial
  Synthetic oligonucleotide
tttgtgtgcgattatcaaaggtgattgtaaatactgaaccttgcgtttcgcaatc

SEQ ID NO: 217564 - DNA, 55 bp, Artificial
  Synthetic oligonucleotide
ttttagagggtttagagcctcgcactaagccaccaaaagatggtgaagtgaaatc

SEQ ID NO: 217565 - DNA, 55 bp, Artificial
  Synthetic oligonucleotide
tgcgcacggctcgccggaatgcctatccccgtcgcactcacttgcgtatctaatt

SEQ ID NO: 217566 - DNA, 55 bp, Artificial
  Synthetic oligonucleotide
tgcgtctggatggatttgtgtttcctccgaatttcgttgagtgtaaatggcgacg

SEQ ID NO: 217567 - DNA, 55 bp, Artificial
  Synthetic oligonucleotide
aaccaaccgaacgtgctttcaatcagcatacattgagccataacaagagtaaata

SEQ ID NO: 217568 - DNA, 54 bp, Artificial
  Synthetic oligonucleotide
gccccgctaaagattccgcctattccgcgtaatccggcggaataagcgacaccc

SEQ ID NO: 217569 - DNA, 55 bp, Artificial
  Synthetic oligonucleotide
tgcttgccgagtaggcgcattgcgacatctacgcctttgcgaataagaggttctc

SEQ ID NO: 217570 - DNA, 55 bp, Artificial
  Synthetic oligonucleotide
aacatcgtattaaatggtgcatggtgggcgacaacctttgcaggtgtgatgattc

SEQ ID NO: 217571 - DNA, 55 bp, Artificial
  Synthetic oligonucleotide
tggacaagcgtgtacgtgcttatatgaaagaacacaatgtgtcttatgtcaccgc

SEQ ID NO: 217572 - DNA, 55 bp, Artificial
  Synthetic oligonucleotide
tggagcacggcaacactgctacttacccgaatatctcgttagaactcggttacgt

SEQ ID NO: 217573 - DNA, 55 bp, Artificial
  Synthetic oligonucleotide
aacaggcttatagtcgtcgcaaggcaacgttaattgaaatcaaaacgaatccgag

SEQ ID NO: 217574 - DNA, 55 bp, Artificial
  Synthetic oligonucleotide
tggcggtctttatgtaacgtttgtgtgtttagttccttatattatgacatcggct

SEQ ID NO: 217575 - DNA, 55 bp, Artificial
  Synthetic oligonucleotide
tgggcaagatactgcctgaactacgcgacattcttaatcaactcccagtttcagc

SEQ ID NO: 217576 - DNA, 55 bp, Artificial
  Synthetic oligonucleotide
tggtcgcgttcaaggtacgcatccattgccgccatgagccgatcctccggccact

SEQ ID NO: 217577 - DNA, 55 bp, Artificial
  Synthetic oligonucleotide
tgtaagtcccgatagctgctcaaatcgtctttgtgcgtatgcgtggcgtaaaccg

SEQ ID NO: 217578 - DNA, 55 bp, Artificial
  Synthetic oligonucleotide
tgtgaggtaatactagaccaattaacaaacctacgcccaacacagaaccgccata

SEQ ID NO: 217579 - DNA, 49 bp, Artificial
  Synthetic oligonucleotide
gccctttttgcaaaagggtactcactaccctttttctacgaaaaagacg

SEQ ID NO: 217580 - DNA, 55 bp, Artificial
  Synthetic oligonucleotide
tgtgccggctgccactttaccgattaaaggtaggcttaagtcttgagttacgtct

SEQ ID NO: 217581 - DNA, 55 bp, Artificial
  Synthetic oligonucleotide
tgtgcgttgattgtcatggtcgcgaatttccgtcagttgttgggtggtgtaaaca

SEQ ID NO: 217582 - DNA, 55 bp, Artificial
  Synthetic oligonucleotide
tgttcacctggggccgaacgtggtggagatggaaggccggggcatccgcaccgac

SEQ ID NO: 217583 - DNA, 55 bp, Artificial
  Synthetic oligonucleotide
ttacatcgcgtaggaattaaagatcatcgtgatattatggcaagctatcctaacg

SEQ ID NO: 217584 - DNA, 55 bp, Artificial
  Synthetic oligonucleotide
ttacgataaacacctgaacttgcagttggctcaagctaccgcccaccctaacggc

SEQ ID NO: 217585 - DNA, 55 bp, Artificial
  Synthetic oligonucleotide
aaatcgccacatctggcataggaatccccgctttctgcgcttggcgactaacggt

SEQ ID NO: 217586 - DNA, 55 bp, Artificial
  Synthetic oligonucleotide
ttagagttggcacgtaattgtacgatttgcccgtcagccggaatcgaatcaggcg

SEQ ID NO: 217587 - DNA, 55 bp, Artificial
  Synthetic oligonucleotide
aaatacggcgttcattacgcaaccaagcgtgagaaattgcactttgttctgcgtg

SEQ ID NO: 217588 - DNA, 55 bp, Artificial
  Synthetic oligonucleotide
ttaggactctctcagcttgcacgaatcgcacaacaatacaccccgaatgtgactc

SEQ ID NO: 217589 - DNA, 55 bp, Artificial
  Synthetic oligonucleotide
ttagtttagggcagttagatagtcgtgatttaactcaaaaacacgttattctata

SEQ ID NO: 217590 - DNA, 59 bp, Artificial
  Synthetic oligonucleotide
cataaatcacccccttagcactataaggctaagcgactaggctcacactatgaacggta

SEQ ID NO: 217591 - DNA, 55 bp, Artificial
  Synthetic oligonucleotide
aaagcgtttaaacacggatttattcggcacactcaccattatgtgagtaagtggt

SEQ ID NO: 217592 - DNA, 55 bp, Artificial
  Synthetic oligonucleotide
ttcaatagactcacgttgtgtacctaattggctgttcggataaacacgaatgacg

SEQ ID NO: 217593 - DNA, 55 bp, Artificial
  Synthetic oligonucleotide
ggggatcacttttctacgtctgaaatgttaaggcagattattgagcgtggtgaag

SEQ ID NO: 217594 - DNA, 55 bp, Artificial
  Synthetic oligonucleotide
ggggcggatggcatatctaacgcctctgtcgtactatgattttctactggagcgg

SEQ ID NO: 217595 - DNA, 55 bp, Artificial
  Synthetic oligonucleotide
gggtattccccttccaaagcgaaactagccagggcatttcttacatggtatgccc

SEQ ID NO: 217596 - DNA, 55 bp, Artificial
  Synthetic oligonucleotide
gggttggttttacggatttaaactgcacgcgattatcaatcatcacggtgagtta

SEQ ID NO: 217597 - DNA, 55 bp, Artificial
  Synthetic oligonucleotide
ggtagtagggacgcttcgcaatctcttgcattactagctaccctttgctatgatt

SEQ ID NO: 217598 - DNA, 55 bp, Artificial
  Synthetic oligonucleotide
ggtccacagcttatgtgattagtgattgtgaaatgcgtgtagcgaatcatcaacc

SEQ ID NO: 217599 - DNA, 55 bp, Artificial
  Synthetic oligonucleotide
ggtcgctttagactctcaatgacggcataatcagggcaggacgtgcccgtagcgt

SEQ ID NO: 217600 - DNA, 55 bp, Artificial
  Synthetic oligonucleotide
ggtcttggcttgccaataagcggtcgtaataaagcgtagaaatgttgcgatcaag

SEQ ID NO: 217601 - DNA, 53 bp, Artificial
  Synthetic oligonucleotide
cagtttaaatccgtaaaaccaacccatacttgtcttacctctttgagcaatcc

SEQ ID NO: 217602 - DNA, 55 bp, Artificial
  Synthetic oligonucleotide
ggtgcggttgcaactctctggacgtgtatgactccagcactcttagcctataaaa

SEQ ID NO: 217603 - DNA, 55 bp, Artificial
  Synthetic oligonucleotide
ggtgcgtttatccttagaggcagtgagtttcgttttagcaaccgccaaatcatac

SEQ ID NO: 217604 - DNA, 55 bp, Artificial
  Synthetic oligonucleotide
ggtgctgtaccgaataagcctgagaataagctactgattgagtctgaagttaggg

SEQ ID NO: 217605 - DNA, 55 bp, Artificial
  Synthetic oligonucleotide
acagtaacgcagggtcgattactttcggctgtcgcttaggttgctgttctagggc

SEQ ID NO: 217606 - DNA, 55 bp, Artificial
  Synthetic oligonucleotide
ggtgtaaccgcatttggtacttttgtcgatatagacccaatttgtgaagatcgtg

SEQ ID NO: 217607 - DNA, 55 bp, Artificial
  Synthetic oligonucleotide
acagccttttgtaataagccctcaaattcgctatccgtccaacgtgaatagttag

SEQ ID NO: 217608 - DNA, 55 bp, Artificial
  Synthetic oligonucleotide
gtaaagctacacctaacattggcaaagcggctatttctatcggagcctgccaacg

SEQ ID NO: 217609 - DNA, 55 bp, Artificial
  Synthetic oligonucleotide
gtaagccgtagtcattacgtaaaccttcttcagatagtgcagtgttcagttcagc

SEQ ID NO: 217610 - DNA, 55 bp, Artificial
  Synthetic oligonucleotide
gtaattatggcaatacagacctagagtattacgcggcagaacttaatcggtggct

SEQ ID NO: 217611 - DNA, 53 bp, Artificial
  Synthetic oligonucleotide
gtacacccataccctctttcgtcggattaaaaccgcttattaaggctcgcatt

SEQ ID NO: 217612 - DNA, 58 bp, Artificial
  Synthetic oligonucleotide
ctttattcaaaggaaggttgtaggttgcaccaacaagtgaccaaagcgcaatcgcatg

SEQ ID NO: 217613 - DNA, 52 bp, Artificial
  Synthetic oligonucleotide
caggttgttaaaggttctcaagcggaaacagattgggtaaacgaaaattata

SEQ ID NO: 217614 - DNA, 53 bp, Artificial
  Synthetic oligonucleotide
acaccggaactattcgccgactggttaaaacagttacatcaggcgggcgtaaa

SEQ ID NO: 217615 - DNA, 55 bp, Artificial
  Synthetic oligonucleotide
gtacgaaaatacgatgagatgcgaactaagcgattaagttttattcgcccgatgg

SEQ ID NO: 217616 - DNA, 55 bp, Artificial
  Synthetic oligonucleotide
gtacgcataagcggtgcggcttgcacgtttaaacctttcattgaaagctcggcag

SEQ ID NO: 217617 - DNA, 55 bp, Artificial
  Synthetic oligonucleotide
gtactctggttagatgcagacgaacgcgttacgcccaagctacaacaggctatct

SEQ ID NO: 217618 - DNA, 55 bp, Artificial
  Synthetic oligonucleotide
acacacccattaaatttgattgcgtgccaccagaggtaaacacgcccgaggtgcc

SEQ ID NO: 217619 - DNA, 55 bp, Artificial
  Synthetic oligonucleotide
ggcacaggcatgacaactaatcacgacgttcgtattactaaagatttggacggcg

SEQ ID NO: 217620 - DNA, 55 bp, Artificial
  Synthetic oligonucleotide
ggcactaatgcccgctcccgcccaaatcaaaccactgtttagcgtactaagagtt

SEQ ID NO: 217621 - DNA, 55 bp, Artificial
  Synthetic oligonucleotide
ggccctttaatcggacctaatgagatcaagccaatcgcacgtaatcgctgtgctg

SEQ ID NO: 217622 - DNA, 55 bp, Artificial
  Synthetic oligonucleotide
ggccgagttaattattgtgccgaactctgcctgtattggtaaaaccactgcagag

SEQ ID NO: 217623 - DNA, 55 bp, Artificial
  Synthetic oligonucleotide
ggcctactggcacaagctcatcacctgtggataacacggcaactttcaaacgagg

SEQ ID NO: 217624 - DNA, 60 bp, Artificial
  Synthetic oligonucleotide
cagggcgtatcatatcttgtgcagattattcaggtgcaagctgagttacgttgtattcat

SEQ ID NO: 217625 - DNA, 55 bp, Artificial
  Synthetic oligonucleotide
ggcgaaacacggtatttccgccgcatgtcattcgcatatgttgccaagcgtattc

SEQ ID NO: 217626 - DNA, 55 bp, Artificial
  Synthetic oligonucleotide
ggcggcccgacaatccatagtttctcgttggccctcttaataggtatcggattcg

SEQ ID NO: 217627 - DNA, 55 bp, Artificial
  Synthetic oligonucleotide
ggcgtagtaatacgccctttcaacgtatgactatcagcgtttataacgcaacaac

SEQ ID NO: 217628 - DNA, 55 bp, Artificial
  Synthetic oligonucleotide
ggcgtgttatagccagttgtcggaaagccgaagatgttcaaaggttacagcaaga

SEQ ID NO: 217629 - DNA, 55 bp, Artificial
  Synthetic oligonucleotide
accacggtggacgccaactagatggtgcattatcgagtgctaaagcattaccttc

SEQ ID NO: 217630 - DNA, 55 bp, Artificial
  Synthetic oligonucleotide
ggctaaatggctactttgtggacagcaacggtaatattcgcttacatctagacag

SEQ ID NO: 217631 - DNA, 55 bp, Artificial
  Synthetic oligonucleotide
ggctcggattggaagccgcaagataaggcgatacttaataccgacccagcttggc

SEQ ID NO: 217632 - DNA, 55 bp, Artificial
  Synthetic oligonucleotide
ggctcggtaaaccatatgtggacggttagtgccttacaactgcacaaacgaggca

SEQ ID NO: 217633 - DNA, 54 bp, Artificial
  Synthetic oligonucleotide
accacggaataaacggaaaagcacggaagtcactgtaacgccctctgtgctttc

SEQ ID NO: 217634 - DNA, 55 bp, Artificial
  Synthetic oligonucleotide
ggctctcgaagttcattattgaacgagaatcttatgactggcagcttgtgcaaaa

SEQ ID NO: 217635 - DNA, 60 bp, Artificial
  Synthetic oligonucleotide
caggctcagttgtgacttgatcagacagtgcatgtgggatcaagtctgagtcagtacagt

SEQ ID NO: 217636 - DNA, 55 bp, Artificial
  Synthetic oligonucleotide
ggctgtcgcgaatgttcggacgcgccgttgatgtggtgtcccgcaatgccgtcaa

SEQ ID NO: 217637 - DNA, 53 bp, Artificial
  Synthetic oligonucleotide
ggcttacccgatactaaccctgatttaaagcacgggattttaatgttaatgga

SEQ ID NO: 217638 - DNA, 55 bp, Artificial
  Synthetic oligonucleotide
ggcttacgcaaagtcagcaattttgggcggagcgtttgacagaagagtggacagt

SEQ ID NO: 217639 - DNA, 55 bp, Artificial
  Synthetic oligonucleotide
gggacctatgcctttgcggcaggtcatgattctatcgcaattggtactaatgccc

SEQ ID NO: 217640 - DNA, 55 bp, Artificial
  Synthetic oligonucleotide
gggagttctttacgcaaccaggggcgttaattgatattacaggcattccgtttga

SEQ ID NO: 217641 - DNA, 55 bp, Artificial
  Synthetic oligonucleotide
gggatccgattgaaatccgtatgggagaacgcggcttagatcctgcggttcatgc

SEQ ID NO: 217642 - DNA, 55 bp, Artificial
  Synthetic oligonucleotide
gggcacttgcgcgagttgcatcgtttatatctggcgttagccaatgcccgtaaac

SEQ ID NO: 217643 - DNA, 55 bp, Artificial
  Synthetic oligonucleotide
gggcctggtgctattactattggtcagttctcagacgctagtggtaggactgcta

SEQ ID NO: 217644 - DNA, 55 bp, Artificial
  Synthetic oligonucleotide
ggggaagacgtcaaccatgttatagttgaatttcacgacgcccaataagtgaatg

SEQ ID NO: 217645 - DNA, 55 bp, Artificial
  Synthetic oligonucleotide
gttcattaacacgccaatttgcgaagagcgaccattattcggcacttccagaccg

SEQ ID NO: 217646 - DNA, 55 bp, Artificial
  Synthetic oligonucleotide
caggcacaattccgatcactttgcgtaaaccctcaaaaactcgttttactgttga

SEQ ID NO: 217647 - DNA, 55 bp, Artificial
  Synthetic oligonucleotide
gttcgtcgtaagaaatgatgcgatttgtgaccgcacttttaaatgaacgtccgtg

SEQ ID NO: 217648 - DNA, 55 bp, Artificial
  Synthetic oligonucleotide
gttggccatcgctattggtggaggtaatagaggtaatgcaagcggagctattgcg

SEQ ID NO: 217649 - DNA, 55 bp, Artificial
  Synthetic oligonucleotide
gttggctagcaatatctgtacctagatctaactggtcatccattaaaccggctat

SEQ ID NO: 217650 - DNA, 55 bp, Artificial
  Synthetic oligonucleotide
gttggtgacgggaattgatggtatccaatactgcgtaacaaacgccaggacgcaa

SEQ ID NO: 217651 - DNA, 52 bp, Artificial
  Synthetic oligonucleotide
gtttaaccagaaaccggctctaaccatttcactctgtttaacttgccccgta

SEQ ID NO: 217652 - DNA, 55 bp, Artificial
  Synthetic oligonucleotide
gtttgagacgagaaactgtgcattagcataagaacgcgagacgccacaggcgata

SEQ ID NO: 217653 - DNA, 55 bp, Artificial
  Synthetic oligonucleotide
gtttgtgcaaactgtggtgcataagtttctgggaacgcataacctaaactaccgc

SEQ ID NO: 217654 - DNA, 55 bp, Artificial
  Synthetic oligonucleotide
gtttgtttgattctggtaccgcttcacatttcatcactttcgccacacgtaaatc

SEQ ID NO: 217655 - DNA, 55 bp, Artificial
  Synthetic oligonucleotide
aatgcctaatgccgtgtagcaatcttctaacgttggcactattacccgcacagcc

SEQ ID NO: 217656 - DNA, 55 bp, Artificial
  Synthetic oligonucleotide
taaagttaccttaccagattactggggcaatgtagaaacccttgatgccacccca

SEQ ID NO: 217657 - DNA, 60 bp, Artificial
  Synthetic oligonucleotide
cactttcagttgctatgattcaccttcttggcttgtttgctgaattagaacgctctttca

SEQ ID NO: 217658 - DNA, 55 bp, Artificial
  Synthetic oligonucleotide
taagctcgctggtaagctcgctggtaagctcgctggtaagctctgtcaatgtgtc

SEQ ID NO: 217659 - DNA, 55 bp, Artificial
  Synthetic oligonucleotide
taatgcacagattgtgccaccgttaaggcgaaaagtaacatcgtgaattgccgtg

SEQ ID NO: 217660 - DNA, 55 bp, Artificial
  Synthetic oligonucleotide
taatggacgagtttacgtcgattggttttatggaacaataccaagtagcgatagc

SEQ ID NO: 217661 - DNA, 55 bp, Artificial
  Synthetic oligonucleotide
taccacgtttgtacatcattctaacgttatcttccgtcatattcagcatttcggc

SEQ ID NO: 217662 - DNA, 55 bp, Artificial
  Synthetic oligonucleotide
aataggcgttttccgacaaatctttcagagcgtcggaagctaactgaagcgcggt

SEQ ID NO: 217663 - DNA, 55 bp, Artificial
  Synthetic oligonucleotide
aatacgaattgcggtttcagcttcacatccacaaaattccgctacttctcggtag

SEQ ID NO: 217664 - DNA, 55 bp, Artificial
  Synthetic oligonucleotide
tagaacgcgaccgctgatcccgcgatgtcgtcgaactctgccaaagcgccgttcg

SEQ ID NO: 217665 - DNA, 52 bp, Artificial
  Synthetic oligonucleotide
aagttttctcaagggttgctaacacccaagccgaaacgatagttggaataac

SEQ ID NO: 217666 - DNA, 55 bp, Artificial
  Synthetic oligonucleotide
tagaggcgaataacacgataccgcccgattcggctaaaccgtattccccatagac

SEQ ID NO: 217667 - DNA, 55 bp, Artificial
  Synthetic oligonucleotide
taggatgaagctcggttaatagtgcgcgatcttgtgggcgcaacaattcagcggc

SEQ ID NO: 217668 - DNA, 60 bp, Artificial
  Synthetic oligonucleotide
cacggataacgcagtatcgggatgaacaagcggggcgcacatcgcaatcagttgtaaggc

SEQ ID NO: 217669 - DNA, 55 bp, Artificial
  Synthetic oligonucleotide
taggcttgggtatggggcggagcattttgagtgtccatcgccatagcagagtggt

SEQ ID NO: 217670 - DNA, 55 bp, Artificial
  Synthetic oligonucleotide
taggttgggcggcaacttacacctatttctcatttactatggcgtggggtgacaa

SEQ ID NO: 217671 - DNA, 54 bp, Artificial
  Synthetic oligonucleotide
aagtgataacgttcttaatacgaaaattaagctctgtctccgtttcgtgctacg

SEQ ID NO: 217672 - DNA, 55 bp, Artificial
  Synthetic oligonucleotide
gtagcattgcaggcacaatggaatcggctgtcacgcagaactttgaagtgggtgg

SEQ ID NO: 217673 - DNA, 55 bp, Artificial
  Synthetic oligonucleotide
gtagttaatgtcgtcaaaattaggaacgggctagcatcaattcaatgcgagatcc

SEQ ID NO: 217674 - DNA, 55 bp, Artificial
  Synthetic oligonucleotide
gtatgtctttggcggttctgggtgtattacatattttctttcaggcgattgtcgc

SEQ ID NO: 217675 - DNA, 55 bp, Artificial
  Synthetic oligonucleotide
gtatttacttgcaacccatataacggcttagacactcgatcatttactctgcgtg

SEQ ID NO: 217676 - DNA, 55 bp, Artificial
  Synthetic oligonucleotide
gtatttagacgcggcgataaaattgctcccagtagggttagcgtggaaacgagcg

SEQ ID NO: 217677 - DNA, 55 bp, Artificial
  Synthetic oligonucleotide
gtcatattcggtgttggcgcttcaagctcaatcacggcgcgtaaaatcaagcgac

SEQ ID NO: 217678 - DNA, 55 bp, Artificial
  Synthetic oligonucleotide
gtccgaacgtggtattcagccagtcgaagaacagggcgaataatcgcacaaagtg

SEQ ID NO: 217679 - DNA, 54 bp, Artificial
  Synthetic oligonucleotide
cacctcatcgtttacgcgccaaagtacgtaaaaacactcgtctatacggcaaac

SEQ ID NO: 217680 - DNA, 55 bp, Artificial
  Synthetic oligonucleotide
gtccgtttctatatgtggttgcaatttgtggcacaacaacagcttaaagcctgta

SEQ ID NO: 217681 - DNA, 55 bp, Artificial
  Synthetic oligonucleotide
gtcgatccgcaagggaagcgtaccgtagaggacaacacaaatgcaacagctggcg

SEQ ID NO: 217682 - DNA, 55 bp, Artificial
  Synthetic oligonucleotide
gtcggaatttggctaatcataggtttagccttccacttagcagcagtggggatca

SEQ ID NO: 217683 - DNA, 55 bp, Artificial
  Synthetic oligonucleotide
gtgaagcctaagaacaagcacagcctcagccacgtccggcacgacccggcgcact

SEQ ID NO: 217684 - DNA, 55 bp, Artificial
  Synthetic oligonucleotide
gtgaagctagatcgtatcgatcctaaaatgagttcggctgaatacggcagttacg

SEQ ID NO: 217685 - DNA, 55 bp, Artificial
  Synthetic oligonucleotide
gtgcaatcgggttaggtaaacaaatggttgtttcacattgctcaactaccgcgcg

SEQ ID NO: 217686 - DNA, 55 bp, Artificial
  Synthetic oligonucleotide
gtgcgccaggtatagcgtttaatacggcagattatcaaggcgaacactttactgc

SEQ ID NO: 217687 - DNA, 55 bp, Artificial
  Synthetic oligonucleotide
gtgcttatagggctttgagagaagcagtttacaagttgagtgagagatgggttag

SEQ ID NO: 217688 - DNA, 55 bp, Artificial
  Synthetic oligonucleotide
gtgcttgctaccactcttggcatgatcgctgaaattgaacgtgaattcatttcgc

SEQ ID NO: 217689 - DNA, 55 bp, Artificial
  Synthetic oligonucleotide
gtgggcaagttatagtcctttagataacgcttggagtgtcgcgagttctgctacg

SEQ ID NO: 217690 - DNA, 53 bp, Artificial
  Synthetic oligonucleotide
caccgaataaccggaatttaatactaacgaattaactaggctatctgaagaaa

SEQ ID NO: 217691 - DNA, 55 bp, Artificial
  Synthetic oligonucleotide
gtgggcaatttacacaacacaatttggggcgcgattgaagaagtacgccgttatg

SEQ ID NO: 217692 - DNA, 55 bp, Artificial
  Synthetic oligonucleotide
aatttgcgaggataactacgtacgttggattccattacatcttggcgatctaaaa

SEQ ID NO: 217693 - DNA, 54 bp, Artificial
  Synthetic oligonucleotide
gtgtggtatttcccgttggaactaactcaatccctgcacgatttaaacgtgaaa

SEQ ID NO: 217694 - DNA, 55 bp, Artificial
  Synthetic oligonucleotide
gtgtttggattacttatagcgtgtttggatagctttgagtgtgttcgcatagctt

SEQ ID NO: 217695 - DNA, 55 bp, Artificial
  Synthetic oligonucleotide
aatttgcaggcgtgagtgatgcaaatggtcctaactatatgggcggtaaagcaca

SEQ ID NO: 217696 - DNA, 55 bp, Artificial
  Synthetic oligonucleotide
gttatatcgacgagctgtattaggcggtgagcatattactaatgcaagttcaggc

SEQ ID NO: 217697 - DNA, 55 bp, Artificial
  Synthetic oligonucleotide
gttatgccggatcgctcacctaatatcacgacacatgatcctttcggcagcttgt

SEQ ID NO: 217698 - DNA, 53 bp, Artificial
  Synthetic oligonucleotide
gttcagctattcaccaccggacggggcacgccttacggtcttaaagcggtacc

SEQ ID NO: 217699 - DNA, 53 bp, Artificial
  Synthetic oligonucleotide
ccgttttcaggtttcttagcccaatgaacgagtcaaaggttaagcctacacac

SEQ ID NO: 217700 - DNA, 55 bp, Artificial
  Synthetic oligonucleotide
cctaaagcaccactaccattcatgacagaatttgcccctttctgtacttttaccg

SEQ ID NO: 217701 - DNA, 58 bp, Artificial
  Synthetic oligonucleotide
caatcgatcgctatcacgggaaatttcagctgaattacataccaggaaaaatttataa

SEQ ID NO: 217702 - DNA, 55 bp, Artificial
  Synthetic oligonucleotide
cctaaagcagttaacggatctagatttggcgaccacatacctcgctcacctttca

SEQ ID NO: 217703 - DNA, 55 bp, Artificial
  Synthetic oligonucleotide
cctaacaccttaggagaaattttacagcctcaaccagcaccatgactaaactgcg

SEQ ID NO: 217704 - DNA, 55 bp, Artificial
  Synthetic oligonucleotide
cctacccgagagccaaaagcgtgagattatggcacgctttgaaaaggcaatgttc

SEQ ID NO: 217705 - DNA, 55 bp, Artificial
  Synthetic oligonucleotide
cctactgatagtggtgcggttgtcattaaaagtgtgtcacaaggacgttgtgtca

SEQ ID NO: 217706 - DNA, 55 bp, Artificial
  Synthetic oligonucleotide
cctacttgttgcacaatactcagcaccgttgagcctacaccgctttgtgcctgtg

SEQ ID NO: 217707 - DNA, 55 bp, Artificial
  Synthetic oligonucleotide
cctatcctgcattagtcaaaatcggttgtggtcggtagggcaaacaagttcgccc

SEQ ID NO: 217708 - DNA, 55 bp, Artificial
  Synthetic oligonucleotide
cctattatcccctattatctgatatggtacaagacctacttgacctgtttaacgg

SEQ ID NO: 217709 - DNA, 55 bp, Artificial
  Synthetic oligonucleotide
cctcggataaactgattttacgtagcggagacgatagccaaacgctaggcggcgc

SEQ ID NO: 217710 - DNA, 55 bp, Artificial
  Synthetic oligonucleotide
cctgacgatcaattttggtatgcccagttccgtatcggcgtttatccgaatatga

SEQ ID NO: 217711 - DNA, 55 bp, Artificial
  Synthetic oligonucleotide
cctgcatgtaagcgtaatagattggcgtaagtcagagtcatatcggtaaggcttt

SEQ ID NO: 217712 - DNA, 55 bp, Artificial
  Synthetic oligonucleotide
caatatcgggaaaatccctatcctgcattagtcaaaatcggttgtggtcggtagg

SEQ ID NO: 217713 - DNA, 55 bp, Artificial
  Synthetic oligonucleotide
agcgatgaagaatttacgcatagagaaatgagccgtatttatgccagatatgggg

SEQ ID NO: 217714 - DNA, 55 bp, Artificial
  Synthetic oligonucleotide
cctggcagctgggtttatacagatactgaagctatgatgctctggatatgagcca

SEQ ID NO: 217715 - DNA, 55 bp, Artificial
  Synthetic oligonucleotide
cctgtgatgctgttaccttcgtccttacctaagaccttatccgcgctttgatcgg

SEQ ID NO: 217716 - DNA, 55 bp, Artificial
  Synthetic oligonucleotide
cctgttggctcgctatctaatgttacaagcgatttgttttgggcgttaatttgcg

SEQ ID NO: 217717 - DNA, 55 bp, Artificial
  Synthetic oligonucleotide
cctgtttaatgctggaatggcgacaactaatacagagcaattctgttcagactgt

SEQ ID NO: 217718 - DNA, 55 bp, Artificial
  Synthetic oligonucleotide
ccttcataaatgctacgataatccttcgcaacttcatcactactcatcatttgcg

SEQ ID NO: 217719 - DNA, 54 bp, Artificial
  Synthetic oligonucleotide
ccttgcgttgttccccgcgattttctacgggatgtacaatgtgggtaaccaagc

SEQ ID NO: 217720 - DNA, 55 bp, Artificial
  Synthetic oligonucleotide
cctttactaaatacaatccgacttaaaggcgcttgtgcagtagcatatatccgcg

SEQ ID NO: 217721 - DNA, 55 bp, Artificial
  Synthetic oligonucleotide
cgaaacgatcaaatattacacggatattggcaatattatgcaaacgcgtttagcg

SEQ ID NO: 217722 - DNA, 53 bp, Artificial
  Synthetic oligonucleotide
cgaagttattatttcggcagtacaggacaaacttcgaattcgtcgggctaaag

SEQ ID NO: 217723 - DNA, 50 bp, Artificial
  Synthetic oligonucleotide
cttggcaccaaagttcggggattagttaaatacgacctaaaggacgtggt

SEQ ID NO: 217724 - DNA, 58 bp, Artificial
  Synthetic oligonucleotide
caagacttgcggagtggattagggaagtcgctttagagcaacaacctaagcgacagcc

SEQ ID NO: 217725 - DNA, 55 bp, Artificial
  Synthetic oligonucleotide
ccgaatcgccatagaatacgttagccacgaggcgttcaaacacgccaccgcgcga

SEQ ID NO: 217726 - DNA, 55 bp, Artificial
  Synthetic oligonucleotide
ccgagcatttacgccaaatgcacaaaccacggtactttgtggcgatacgatgtac

SEQ ID NO: 217727 - DNA, 55 bp, Artificial
  Synthetic oligonucleotide
ccgataatcctgtcatagtcctatcgcaatcgtttgcccgatatgctattcttac

SEQ ID NO: 217728 - DNA, 55 bp, Artificial
  Synthetic oligonucleotide
ccgatgcattcgccctccgcgataatcggcgaaggatccgtttcatgtcgtaaca

SEQ ID NO: 217729 - DNA, 55 bp, Artificial
  Synthetic oligonucleotide
ccgattgccaacactagctgtaatgttcatgctaagccattcatgctatttataa

SEQ ID NO: 217730 - DNA, 54 bp, Artificial
  Synthetic oligonucleotide
ccgcaaagttttaaccgtgcgatacttcaacaagccgttcaggcaagttccgaa

SEQ ID NO: 217731 - DNA, 55 bp, Artificial
  Synthetic oligonucleotide
ccgcacataccaaatgcccgaaagattattcaggtaaatgatggtggtgatgagt

SEQ ID NO: 217732 - DNA, 55 bp, Artificial
  Synthetic oligonucleotide
ccgcactatctccatgcaccgtaattggtaacacttgagaacgttcaacgtcctg

SEQ ID NO: 217733 - DNA, 55 bp, Artificial
  Synthetic oligonucleotide
ccgcactattaaagtcagtgggttgttttacccagccatctactacgcctatcgc

SEQ ID NO: 217734 - DNA, 55 bp, Artificial
  Synthetic oligonucleotide
ccgcactttatccgcaagacctcgtggaaatatgcaacgagaggagcgtaattca

SEQ ID NO: 217735 - DNA, 58 bp, Artificial
  Synthetic oligonucleotide
caacgttgcacaccttaatagccgacaatccaagtctattacccgagcggcagtcggc

SEQ ID NO: 217736 - DNA, 55 bp, Artificial
  Synthetic oligonucleotide
ccgcagtcttccgcttttaaccctctagcacggagccattcgcgctctatcttgg

SEQ ID NO: 217737 - DNA, 55 bp, Artificial
  Synthetic oligonucleotide
ccgcggcacacgaattacgatgacacgaccattcggatcatttgccggaccttgg

SEQ ID NO: 217738 - DNA, 55 bp, Artificial
  Synthetic oligonucleotide
ccgcgtccttgcaatactgtgtttacatacagtctatcgcttagcggaaagttct

SEQ ID NO: 217739 - DNA, 55 bp, Artificial
  Synthetic oligonucleotide
ccgcttggttagaatcaaccattctaaacactgctcgtcttggtacatttagctc

SEQ ID NO: 217740 - DNA, 52 bp, Artificial
  Synthetic oligonucleotide
ccggaaacgcataacgtaataccgaaccgccgaattgttttgccacgctaaa

SEQ ID NO: 217741 - DNA, 55 bp, Artificial
  Synthetic oligonucleotide
ccggagtaaacaccaaaccgtaaggcgattcgctgatggttacagttcccacatc

SEQ ID NO: 217742 - DNA, 55 bp, Artificial
  Synthetic oligonucleotide
ccggtgcaaccttaggcggatactccacaaactcgattgcctttggtgtgggcgc

SEQ ID NO: 217743 - DNA, 55 bp, Artificial
  Synthetic oligonucleotide
ccggttgagatcaatcaagaatatgctttcccttgcacagtcatccgtaatccgc

SEQ ID NO: 217744 - DNA, 55 bp, Artificial
  Synthetic oligonucleotide
ccgtaacgttattagtcatgtgtctaaggcaagtatcggttataaacatccgttc

SEQ ID NO: 217745 - DNA, 55 bp, Artificial
  Synthetic oligonucleotide
ccgtaatgtgcaatttccggcttataaggtaaaagtgcggtcatgattgcggcta

SEQ ID NO: 217746 - DNA, 56 bp, Artificial
  Synthetic oligonucleotide
caaaggctcacgatgttcgcctaataaaacgaagtcgccttcggctccgctgattt

SEQ ID NO: 217747 - DNA, 55 bp, Artificial
  Synthetic oligonucleotide
ccgtggtgctcactttcagtcggaatatctagcgagctgtgttcgatgccacgtt

SEQ ID NO: 217748 - DNA, 55 bp, Artificial
  Synthetic oligonucleotide
ccgttacacataacctgcaacaaaacggtattttgcgttacagtgtggttgatag

SEQ ID NO: 217749 - DNA, 55 bp, Artificial
  Synthetic oligonucleotide
cgcctgttggatgagcaataagctcaggcttgtctgaggtccaaccgtcatcccc

SEQ ID NO: 217750 - DNA, 55 bp, Artificial
  Synthetic oligonucleotide
cgcggtcttcactgcgtgatcgagttgatcgacacccgccgtgacacgctccatg

SEQ ID NO: 217751 - DNA, 55 bp, Artificial
  Synthetic oligonucleotide
cgcgtgctttcttgagcgctctgatttggcgttgacggcccaagagttcaaattg

SEQ ID NO: 217752 - DNA, 55 bp, Artificial
  Synthetic oligonucleotide
cgcgtggtgaagtagtcaaaatacgcactcaatcaggtaaagacattgcgctggg

SEQ ID NO: 217753 - DNA, 55 bp, Artificial
  Synthetic oligonucleotide
cgctaatagacgacccacgcaatagcgtgtttatcggtgcaacgcttttaaaagc

SEQ ID NO: 217754 - DNA, 55 bp, Artificial
  Synthetic oligonucleotide
cgctagaaagtggtcgtggattagtggatattgtcagccgttatacgcatacgtt

SEQ ID NO: 217755 - DNA, 55 bp, Artificial
  Synthetic oligonucleotide
cgctcgcccgcgtgtcactttccaatacacagccaatggtccggaaggcttgcta

SEQ ID NO: 217756 - DNA, 55 bp, Artificial
  Synthetic oligonucleotide
cgctgttatagcgtggcatacccagcgcaatgtctttacctgattgagtgcgtat

SEQ ID NO: 217757 - DNA, 56 bp, Artificial
  Synthetic oligonucleotide
caaagcgtgccataatctcacgcttttgtatttcgggtaggtcgctttcttcaaaa

SEQ ID NO: 217758 - DNA, 55 bp, Artificial
  Synthetic oligonucleotide
cgcttatcaggtgtgggctgtactacttaaagaccgtgccacgaaacggagacag

SEQ ID NO: 217759 - DNA, 55 bp, Artificial
  Synthetic oligonucleotide
cggaactacgtgtgaagaatgcagttaccccactttcgcgtacacaagtccacac

SEQ ID NO: 217760 - DNA, 55 bp, Artificial
  Synthetic oligonucleotide
cggagtaaccacctaacagtgcgattgacggcacggcaatcacagaaagtgcggt

SEQ ID NO: 217761 - DNA, 55 bp, Artificial
  Synthetic oligonucleotide
cggatatttacacagactatcagcctgagcgtacagaagtgttacgtgaaggtcg

SEQ ID NO: 217762 - DNA, 55 bp, Artificial
  Synthetic oligonucleotide
cggatgcactaagagaggctattgacaagttggatcccgatgatttaagccctaa

SEQ ID NO: 217763 - DNA, 55 bp, Artificial
  Synthetic oligonucleotide
cggcaactagcaggcacaaggcataaattgtgccgtcagaaaccatatgggcggg

SEQ ID NO: 217764 - DNA, 55 bp, Artificial
  Synthetic oligonucleotide
cggcgttacataaccctgtggctgctggtacagtaggaattagcctaccgttctt

SEQ ID NO: 217765 - DNA, 55 bp, Artificial
  Synthetic oligonucleotide
cgggagtggtggttcagtaggtttgcaattcttagatgaccaatatttaagaatg

SEQ ID NO: 217766 - DNA, 55 bp, Artificial
  Synthetic oligonucleotide
cgggcgtcgtgcgtatcacgctaccgaaattacgtgatcaggaggaaattctatt

SEQ ID NO: 217767 - DNA, 53 bp, Artificial
  Synthetic oligonucleotide
cggggcttttggggtactattgtctaaaagttagagcaaggacacacagaccc

SEQ ID NO: 217768 - DNA, 60 bp, Artificial
  Synthetic oligonucleotide
atgacttcaatatcgattttataaccaagcttcgaaggaatatgaaacagcagattctta

SEQ ID NO: 217769 - DNA, 52 bp, Artificial
  Synthetic oligonucleotide
cgggtgttaaggagtggttaacttcaccgggtaatggtagtatggaacagtg

SEQ ID NO: 217770 - DNA, 55 bp, Artificial
  Synthetic oligonucleotide
cggtactgagcgcattcgtcgccaacaaatgtccgatagccgagatttagtccgt

SEQ ID NO: 217771 - DNA, 55 bp, Artificial
  Synthetic oligonucleotide
cggtagtcagcgttagcgaagatggttctatcttagtcggtctggccgcccgcga

SEQ ID NO: 217772 - DNA, 52 bp, Artificial
  Synthetic oligonucleotide
cggtcgattccgaacaacatttacagtctgttgagtttaaaaccggattaaa

SEQ ID NO: 217773 - DNA, 55 bp, Artificial
  Synthetic oligonucleotide
cgaccaacgaaacgatcaaatattacacggatattggcaatattatgcaaacgcg

SEQ ID NO: 217774 - DNA, 55 bp, Artificial
  Synthetic oligonucleotide
cgacgaaacctaaatccaccatcgtgcgatcggtcacaataaccacgcgctccat

SEQ ID NO: 217775 - DNA, 55 bp, Artificial
  Synthetic oligonucleotide
cgagcgtccgttaagtaacgcctcatcaataggtttaagaatctgctgtttcata

SEQ ID NO: 217776 - DNA, 55 bp, Artificial
  Synthetic oligonucleotide
cgagctgttaatgtgcggcggaacttatcgtccgaaatccggatcgtttcacggt

SEQ ID NO: 217777 - DNA, 55 bp, Artificial
  Synthetic oligonucleotide
cgaggctactgctgtcggtgcgttagcccatgcgcaagatagaaatactacagcg

SEQ ID NO: 217778 - DNA, 55 bp, Artificial
  Synthetic oligonucleotide
cgatacttgccttagacacatgactaataacgttacggatagtttcagaatacgg

SEQ ID NO: 217779 - DNA, 60 bp, Artificial
  Synthetic oligonucleotide
atgagtcctgctaaaagattagcagcgaaccctgtgaagcttcgatgccttgagtgttca

SEQ ID NO: 217780 - DNA, 55 bp, Artificial
  Synthetic oligonucleotide
cgatcatcacttcttgttcaaagtgagtattcgggttttgttcagccaacacgac

SEQ ID NO: 217781 - DNA, 55 bp, Artificial
  Synthetic oligonucleotide
cgattatcgatgccatagctcgaattatcgcgctctacgatgcgtgggtttccaa

SEQ ID NO: 217782 - DNA, 55 bp, Artificial
  Synthetic oligonucleotide
cgcaacatggtcgctgccaataccggcgtcactttaatgccacagcttgccgtgc

SEQ ID NO: 217783 - DNA, 55 bp, Artificial
  Synthetic oligonucleotide
cgcaaggcgtggggaattttaaatcgatgtttgtgaattcgcctgatggtcatcc

SEQ ID NO: 217784 - DNA, 55 bp, Artificial
  Synthetic oligonucleotide
cgcaatagattctacacgcgtgctatccccttccgtagcttcctgcacttgtaaa

SEQ ID NO: 217785 - DNA, 55 bp, Artificial
  Synthetic oligonucleotide
cgcacagcattcggtttacaactcgctaaatagcgccagctcattgtgtaagcgc

SEQ ID NO: 217786 - DNA, 52 bp, Artificial
  Synthetic oligonucleotide
cgcacccaacacaacattaaagacgtacaagacgttaaagaggttttggaaa

SEQ ID NO: 217787 - DNA, 55 bp, Artificial
  Synthetic oligonucleotide
cgcagtgaccgactataaaggtaaactcaacgaagtggacattatcgttgcgtcc

SEQ ID NO: 217788 - DNA, 55 bp, Artificial
  Synthetic oligonucleotide
cgcagttttcatcaattacgcataaagcggattgatacgatctacattcaaaccg

SEQ ID NO: 217789 - DNA, 55 bp, Artificial
  Synthetic oligonucleotide
cgcattaaggtagcgaaacacctaaattcacataaacagatataacggcttatgc

SEQ ID NO: 217790 - DNA, 60 bp, Artificial
  Synthetic oligonucleotide
atgatgactagcacagattttgtgcaacacgttaaaacgccacaaatgagccgttttgaa

SEQ ID NO: 217791 - DNA, 55 bp, Artificial
  Synthetic oligonucleotide
cgccaaacagactttgatgaaattcggcaaaacttgttagttagtcgcactacgc

SEQ ID NO: 217792 - DNA, 55 bp, Artificial
  Synthetic oligonucleotide
cgccacagcattacagctcggcagcactgatatttgggcggttatcggtagtgaa

SEQ ID NO: 217793 - DNA, 55 bp, Artificial
  Synthetic oligonucleotide
cgccagcatcgaactgaaaaggccgtagatgacgacaccctcaggacggttggca

SEQ ID NO: 217794 - DNA, 55 bp, Artificial
  Synthetic oligonucleotide
cgcccatctattccgttcttgcgtggtgagagtgtcgggcttcacagagggcggg

SEQ ID NO: 217795 - DNA, 55 bp, Artificial
  Synthetic oligonucleotide
cgccgctatctacaagcgtacaaataatctcaaaagagcggtcaaaagtagggtc

SEQ ID NO: 217796 - DNA, 55 bp, Artificial
  Synthetic oligonucleotide
cgcctaggtaacgacccggaattgcgaacaatgccaaacggcgatacaaccgcca

SEQ ID NO: 217797 - DNA, 54 bp, Artificial
  Synthetic oligonucleotide
caaggtgatattttcggaaattccccgacgtttgaagccagttctgcaagaaag

SEQ ID NO: 217798 - DNA, 55 bp, Artificial
  Synthetic oligonucleotide
caagtcgggtctgtttggggtcatggtgcataccaagcgccagactggacggcag

SEQ ID NO: 217799 - DNA, 55 bp, Artificial
  Synthetic oligonucleotide
caagtgcataatcatgtaagaagccgatacctactgctgtttcacctcgtgctgc

SEQ ID NO: 217800 - DNA, 55 bp, Artificial
  Synthetic oligonucleotide
caagtgcggtctgttttgtcggtgtaatgaagctcaaatattggtttcgatacga

SEQ ID NO: 217801 - DNA, 54 bp, Artificial
  Synthetic oligonucleotide
atgttttattcggggctaaattgctagacttttgcgcttaaattcgccaaaatc

SEQ ID NO: 217802 - DNA, 55 bp, Artificial
  Synthetic oligonucleotide
caagtgcgtgaatgtgcttctttcctcactcgttatgcgaaaactcgccaagtgg

SEQ ID NO: 217803 - DNA, 55 bp, Artificial
  Synthetic oligonucleotide
caatagcgagtgttgcacctttaagttgcgctttagtgaggtttaagtggaatac

SEQ ID NO: 217804 - DNA, 55 bp, Artificial
  Synthetic oligonucleotide
caatccccatcgtttgccccgatatttaaatagtctccgcgtgaagcatagatcg

SEQ ID NO: 217805 - DNA, 55 bp, Artificial
  Synthetic oligonucleotide
caatggatctaatgctcccgtgtgtcctgctttgttagcttgaaacacccgtttg

SEQ ID NO: 217806 - DNA, 55 bp, Artificial
  Synthetic oligonucleotide
caatttccagccgctatagtccgcatccaactctgcacggcggttgtccgaagct

SEQ ID NO: 217807 - DNA, 55 bp, Artificial
  Synthetic oligonucleotide
cacaggaggaatgggacacgttaatatcggcgcaagtttattgctctctggtatg

SEQ ID NO: 217808 - DNA, 55 bp, Artificial
  Synthetic oligonucleotide
caccaagttggcgaatgataagttggggcataggttacaataccattctcacgcc

SEQ ID NO: 217809 - DNA, 55 bp, Artificial
  Synthetic oligonucleotide
caccacggataaccagctgtgttcccgttcggcggtttgtctggcggctataccc

SEQ ID NO: 217810 - DNA, 55 bp, Artificial
  Synthetic oligonucleotide
caccgagagtttccattgcgactaatgaggcacccacggcaatggctggacggat

SEQ ID NO: 217811 - DNA, 55 bp, Artificial
  Synthetic oligonucleotide
caccgtctgatagcaccctcatcgtgccattaccggttatcgacactcctttcat

SEQ ID NO: 217812 - DNA, 60 bp, Artificial
  Synthetic oligonucleotide
attagcggtagtgcgagccgccgccatagtgcgagaatgattttagcatagaaccgccta

SEQ ID NO: 217813 - DNA, 54 bp, Artificial
  Synthetic oligonucleotide
cacggatgacaatttacacgtagtggaaaagctaccgtctttattcaaaggaag

SEQ ID NO: 217814 - DNA, 55 bp, Artificial
  Synthetic oligonucleotide
cacggtcgtcgagctattagcttaacggatcatgcaggtaatattcgagtgttgg

SEQ ID NO: 217815 - DNA, 55 bp, Artificial
  Synthetic oligonucleotide
cacgttatctttggacggcgatcctgtagacgtgctagtgcctactccttatccg

SEQ ID NO: 217816 - DNA, 55 bp, Artificial
  Synthetic oligonucleotide
cactctcggggcttttggtgtactattgtctaaaattttctcttagcgaggacac

SEQ ID NO: 217817 - DNA, 55 bp, Artificial
  Synthetic oligonucleotide
cagcgaccgtactaattgggatcgaacaacactgaacaaggcgcacccgagatgg

SEQ ID NO: 217818 - DNA, 55 bp, Artificial
  Synthetic oligonucleotide
cagctgcattgcggaaggttaattctcctttatcgacttcggtataacccgttgg

SEQ ID NO: 217819 - DNA, 55 bp, Artificial
  Synthetic oligonucleotide
caggatgattgattgggaatcctttcacataaggtttcaccatacgtggatcaac

SEQ ID NO: 217820 - DNA, 55 bp, Artificial
  Synthetic oligonucleotide
agtgggtgttgtggatcgcaaatttattaccccaactgcgaatcgtaccgctgac

SEQ ID NO: 217821 - DNA, 55 bp, Artificial
  Synthetic oligonucleotide
atccgttaaattcacattaccgttcaagtttgcattgtccactgttgcatttgcg

SEQ ID NO: 217822 - DNA, 55 bp, Artificial
  Synthetic oligonucleotide
atcgacaacgtgctaaaagtcgccaccacaatgattgtgcaagacagcctcgctt

SEQ ID NO: 217823 - DNA, 55 bp, Artificial
  Synthetic oligonucleotide
attagtagagttggagagtttgcgaaccgaaaacgccttaatcattcaacaatac

SEQ ID NO: 217824 - DNA, 55 bp, Artificial
  Synthetic oligonucleotide
atcgtctatttgcggggaaaatatcgtcataccgaagaagatctcgtgttggcgg

SEQ ID NO: 217825 - DNA, 54 bp, Artificial
  Synthetic oligonucleotide
atctcaatattaccaaagtccccttttagagcgagaccaaactcttggttacga

SEQ ID NO: 217826 - DNA, 55 bp, Artificial
  Synthetic oligonucleotide
atgatagctgttgctcgctacaccgcgactttgacgatgacgcatagcgttagtc

SEQ ID NO: 217827 - DNA, 55 bp, Artificial
  Synthetic oligonucleotide
atgctgccctaaagggcaaactatatgtaacctagagtaacacgttaccttaggc

SEQ ID NO: 217828 - DNA, 55 bp, Artificial
  Synthetic oligonucleotide
atggcggtagattcgattgaggctcgtcatattgtggggagttcgatcactgcgg

SEQ ID NO: 217829 - DNA, 55 bp, Artificial
  Synthetic oligonucleotide
atgttgagctgtactcaattctattcactactcttaattcggaggacgaacttca

SEQ ID NO: 217830 - DNA, 54 bp, Artificial
  Synthetic oligonucleotide
atcatcagaagcccctcaagacgggtacgaatacgacgacccaaacattccttt

SEQ ID NO: 217831 - DNA, 55 bp, Artificial
  Synthetic oligonucleotide
attctttaccgagcaggcggaaatcacgaatttccaagaggtaatgaaatgcgat

SEQ ID NO: 217832 - DNA, 55 bp, Artificial
  Synthetic oligonucleotide
atatgttttacgagttgaagactttgcacaagattttccacagatgggttctggc

SEQ ID NO: 217833 - DNA, 55 bp, Artificial
  Synthetic oligonucleotide
attggcgaaatcatctgccaaactcgtcgttatgcattcggtgcaagacgggcag

SEQ ID NO: 217834 - DNA, 57 bp, Artificial
  Synthetic oligonucleotide
cttgaatcatacgaaatcgcttattccgagagaaagaacctattaccagcagttaaa

SEQ ID NO: 217835 - DNA, 55 bp, Artificial
  Synthetic oligonucleotide
attcccaccctgataaacgccacaacgttttattgttgccccattcacgcaacat

SEQ ID NO: 217836 - DNA, 55 bp, Artificial
  Synthetic oligonucleotide
atttctgcgttcctggcgaaagggcgggaatttgtgatatagcctggcgtttcac

SEQ ID NO: 217837 - DNA, 55 bp, Artificial
  Synthetic oligonucleotide
atacgttgggcaacggaggtgcctggtgttactagagcttggtgtttcgaacgct

SEQ ID NO: 217838 - DNA, 55 bp, Artificial
  Synthetic oligonucleotide
attttagataacaaaccatctgcgattgcattaaatatcgtacgtggcgactcga

SEQ ID NO: 217839 - DNA, 55 bp, Artificial
  Synthetic oligonucleotide
attttcttcgctgatgatgccaatacacccgattattactatgctaaacgtcgcc

SEQ ID NO: 217840 - DNA, 55 bp, Artificial
  Synthetic oligonucleotide
caaacggaaatgtcctggttcatccgaagtgatatgtaacgggccaagtggaacg

SEQ ID NO: 217841 - DNA, 55 bp, Artificial
  Synthetic oligonucleotide
caaacgtgtagataacacatatcctgtgcagcgtaatcctgcacctgatcatagt

SEQ ID NO: 217842 - DNA, 55 bp, Artificial
  Synthetic oligonucleotide
caaatagcgataggcttgctgattacgctccgttaaatctgtaatatccgttttg

SEQ ID NO: 217843 - DNA, 55 bp, Artificial
  Synthetic oligonucleotide
caacatccccacaagcttgctcgcctgtattgggaccgacaacatggtaaccacg

SEQ ID NO: 217844 - DNA, 55 bp, Artificial
  Synthetic oligonucleotide
caaccaacgccccttcttcacgtgctcgtagataaatatcacacacgacaggtaa

SEQ ID NO: 217845 - DNA, 55 bp, Artificial
  Synthetic oligonucleotide
caacctgttcacgaagcaactcgtaaattcgtgtcacaaccaatcggtaaagcga

SEQ ID NO: 217846 - DNA, 56 bp, Artificial
  Synthetic oligonucleotide
attgaacaggtatgtaaaaaattcttttgtcgctttggtttccacatattcagagc

SEQ ID NO: 217847 - DNA, 55 bp, Artificial
  Synthetic oligonucleotide
caagaactttgcgaaatcataccgcttgtatattactcgtccgaatatggggacg

SEQ ID NO: 217848 - DNA, 55 bp, Artificial
  Synthetic oligonucleotide
ccattccttctatgtgtctttccgggcatcgtcgttttcctttcggcagccgtga

SEQ ID NO: 217849 - DNA, 55 bp, Artificial
  Synthetic oligonucleotide
ccattcttatgaggatagacatgagacagataagaggcttcctcctcatcatacc

SEQ ID NO: 217850 - DNA, 54 bp, Artificial
  Synthetic oligonucleotide
cccaagttgaacaagctcacacccctattcgtgactatttccgtaaattagccc

SEQ ID NO: 217851 - DNA, 55 bp, Artificial
  Synthetic oligonucleotide
cccaagttgggcgttgcgggcgttagttcgctacgattattggctttatcagcgt

SEQ ID NO: 217852 - DNA, 55 bp, Artificial
  Synthetic oligonucleotide
cccaatcatcaggtggggttttacttgcaaaaccacctattcttgcagcggttcg

SEQ ID NO: 217853 - DNA, 55 bp, Artificial
  Synthetic oligonucleotide
cccacccggttgcaatgcattcacaatacgttgcatcacttgcgttctttgcggt

SEQ ID NO: 217854 - DNA, 52 bp, Artificial
  Synthetic oligonucleotide
cccaccctttagtccttagacattacgcggtattagcgacagtttcccgtcg

SEQ ID NO: 217855 - DNA, 55 bp, Artificial
  Synthetic oligonucleotide
cccacgccgagcatcaccatatagaggctcaacgtgagttggatcatagcgggcg

SEQ ID NO: 217856 - DNA, 54 bp, Artificial
  Synthetic oligonucleotide
cccataccaatcggctagaacccgatttaaatcaagccaaacccaacgatattc

SEQ ID NO: 217857 - DNA, 56 bp, Artificial
  Synthetic oligonucleotide
attgaagcgattttcacgatactcgccctacgggatcaagtcgctcccccaacgag

SEQ ID NO: 217858 - DNA, 55 bp, Artificial
  Synthetic oligonucleotide
cccatggtcggtaatactgtgactgggtgttttacctcgactatggcttaattta

SEQ ID NO: 217859 - DNA, 54 bp, Artificial
  Synthetic oligonucleotide
ccccaatcgtggggtagcctaaacgataaaactgacctcaatccgaaatgttga

SEQ ID NO: 217860 - DNA, 55 bp, Artificial
  Synthetic oligonucleotide
ccccttgtgttttaatagtcggtaatgcttaatatgctggggagcttaaaagcat

SEQ ID NO: 217861 - DNA, 51 bp, Artificial
  Synthetic oligonucleotide
cccgaaatttctgcccgttataacccagtaggacgctttaatcgtatttcg

SEQ ID NO: 217862 - DNA, 55 bp, Artificial
  Synthetic oligonucleotide
cccgaggaacgtaagtgggccaacaagtgcagtcgacactgacgttaaaattgcc

SEQ ID NO: 217863 - DNA, 55 bp, Artificial
  Synthetic oligonucleotide
cccggctttgagcttatcatcaatttgcatacgtgcttgcactagctctatcgaa

SEQ ID NO: 217864 - DNA, 55 bp, Artificial
  Synthetic oligonucleotide
cccgttcattgatattatgttggtgctacttgcgattgtgctgattacggcatct

SEQ ID NO: 217865 - DNA, 55 bp, Artificial
  Synthetic oligonucleotide
ccctcaaataacgatcgatcggattgttggccatagtcacgttgctcccggtaga

SEQ ID NO: 217866 - DNA, 54 bp, Artificial
  Synthetic oligonucleotide
ccctgacgtaagggcaagttacgccttgcccgaaaacaacggtctatcaagcga

SEQ ID NO: 217867 - DNA, 55 bp, Artificial
  Synthetic oligonucleotide
ccctttacgccaggtgattcgcgaattccgtattggatgtggacaacgtgctgac

SEQ ID NO: 217868 - DNA, 56 bp, Artificial
  Synthetic oligonucleotide
attgcccaggttcaaggttatttattacgtagcttaccctcctctgactctatgaa

SEQ ID NO: 217869 - DNA, 55 bp, Artificial
  Synthetic oligonucleotide
ccgaaagtaatcgaccctgcgttactgttcgagctgaaccgcataggcgttaacc

SEQ ID NO: 217870 - DNA, 55 bp, Artificial
  Synthetic oligonucleotide
cagtccgccagtaagcacctagcgggctgttttagtagatctttacgtttaatgt

SEQ ID NO: 217871 - DNA, 54 bp, Artificial
  Synthetic oligonucleotide
agtcggcttgtggagtggtacgctcaaggtaaaaggcgacaacggtcttacttc

SEQ ID NO: 217872 - DNA, 55 bp, Artificial
  Synthetic oligonucleotide
cataaaattacacggtaagaaagtgtatggattttcacaaaggtgtacgcccatc

SEQ ID NO: 217873 - DNA, 55 bp, Artificial
  Synthetic oligonucleotide
cataaggcagaattaaatggatccggcccgtattggttaagcaatcagccgctag

SEQ ID NO: 217874 - DNA, 55 bp, Artificial
  Synthetic oligonucleotide
catagaagcacctagcggtaactttgagcaagatccgatccctaaagtagcattc

SEQ ID NO: 217875 - DNA, 55 bp, Artificial
  Synthetic oligonucleotide
catcagattcgggttgtgaatggcggctaaagtgcggtctaactggcaagcgttt

SEQ ID NO: 217876 - DNA, 55 bp, Artificial
  Synthetic oligonucleotide
catccgggcgatctaacatataagtgatttggcggaacccctctgcttcacattg

SEQ ID NO: 217877 - DNA, 55 bp, Artificial
  Synthetic oligonucleotide
aggtgcgggcgctggacagcgaaaccgcccgcctgctgcaccagcggctgtgtgg

SEQ ID NO: 217878 - DNA, 55 bp, Artificial
  Synthetic oligonucleotide
catgccgcctataaatgttacgtacaagtcaacccgacaacactacctcaaggct

SEQ ID NO: 217879 - DNA, 59 bp, Artificial
  Synthetic oligonucleotide
attgttccacgccacccaattctttgagcagcaaattggtcgcgctgttgtcgctaaac

SEQ ID NO: 217880 - DNA, 55 bp, Artificial
  Synthetic oligonucleotide
catgtaagtactggttatcgagattaccgttctgatgcaccgagtaaaactgagc

SEQ ID NO: 217881 - DNA, 55 bp, Artificial
  Synthetic oligonucleotide
cattacccttttcacttaaccaatctaccgtgcagtggtttgtgtgtaatcttcc

SEQ ID NO: 217882 - DNA, 55 bp, Artificial
  Synthetic oligonucleotide
ccaacccatacttgtcttacctctttgagcaatcccctcaaagaccttatgacgc

SEQ ID NO: 217883 - DNA, 55 bp, Artificial
  Synthetic oligonucleotide
ccaacgttctgccaccgatttaggcagtaagcgggttggatcgcaacttagcata

SEQ ID NO: 217884 - DNA, 55 bp, Artificial
  Synthetic oligonucleotide
ccaagagtttggtctcgctctaaaaggggattttggtaatattgagatcagtcat

SEQ ID NO: 217885 - DNA, 55 bp, Artificial
  Synthetic oligonucleotide
ccaatgggtgtattattggggcgcaagcactaccgccgaaaggagacggttacca

SEQ ID NO: 217886 - DNA, 55 bp, Artificial
  Synthetic oligonucleotide
ccacgatacataagcctgattacacatattagcgatatgttcgacgtttgcgcgg

SEQ ID NO: 217887 - DNA, 55 bp, Artificial
  Synthetic oligonucleotide
ccacgatgttgtccgttcgcctatcgcgttgagcctctcctcatcgagtacttgt

SEQ ID NO: 217888 - DNA, 55 bp, Artificial
  Synthetic oligonucleotide
ccacgttggcatactcgcctcctttcagttggggttgataccaattgatcgagac

SEQ ID NO: 217889 - DNA, 54 bp, Artificial
  Synthetic oligonucleotide
ccagctcaaaattcggagggaaatagtgcggtggaaaatgaacctaaaattcaa

SEQ ID NO: 217890 - DNA, 59 bp, Artificial
  Synthetic oligonucleotide
atttcgcatacctaacagcttgatcgctaattcgtacatacgaatagaatacgcacttt

SEQ ID NO: 217891 - DNA, 55 bp, Artificial
  Synthetic oligonucleotide
ccataatctggcgatgggttttaacgttgtcttatcccatagagttacgccaccg

SEQ ID NO: 217892 - DNA, 55 bp, Artificial
  Synthetic oligonucleotide
ccatgaagttaaatccagtggaagcatatcataaattgaaggcgcagctcgcctt

SEQ ID NO: 217893 - DNA, 55 bp, Artificial
  Synthetic oligonucleotide
ccatgcaggaaacgaattatccgttagatggctcacacaatgtgacggtatgggg

SEQ ID NO: 217894 - DNA, 55 bp, Artificial
  Synthetic oligonucleotide
cgtttaagcattccctgtattaacggcaacgaattacatattctggacactccgg

SEQ ID NO: 217895 - DNA, 53 bp, Artificial
  Synthetic oligonucleotide
cgtttaggtgcggttattgaggattactatcctccgaaacattggaaccgtaa

SEQ ID NO: 217896 - DNA, 55 bp, Artificial
  Synthetic oligonucleotide
agacattgcgctgggtatgccacgctataacagcgattccctacaattaattaag

SEQ ID NO: 217897 - DNA, 55 bp, Artificial
  Synthetic oligonucleotide
ctcgccctcttatacttagctcgctatcaacctcgctaatttgtgatacggcttg

SEQ ID NO: 217898 - DNA, 55 bp, Artificial
  Synthetic oligonucleotide
cgtgataggtaatttgcccaccacgaaccgattgcaccacagggatttcactacg

SEQ ID NO: 217899 - DNA, 55 bp, Artificial
  Synthetic oligonucleotide
ctgcactctcttttgttgaagcgtattatggttcaagcagtctaattggcacgtc

SEQ ID NO: 217900 - DNA, 55 bp, Artificial
  Synthetic oligonucleotide
ctgccaggcaatccggtttcagctttagtgacgttctatcaacttgtgcagcccg

SEQ ID NO: 217901 - DNA, 54 bp, Artificial
  Synthetic oligonucleotide
atttgtagtcgtcaaacgacaaatttgtagtcgtcaaacgacaaatttgtagtc

SEQ ID NO: 217902 - DNA, 55 bp, Artificial
  Synthetic oligonucleotide
agaagcgacattacttgcttcggcaaccattatgactagccctgcttatgcaggc

SEQ ID NO: 217903 - DNA, 55 bp, Artificial
  Synthetic oligonucleotide
ctaagcgaccgcctaaggcgccaaataatgtcacttccgcaagtggataacgggc

SEQ ID NO: 217904 - DNA, 55 bp, Artificial
  Synthetic oligonucleotide
cgtcggaccgattttaaatgcgtatgtgagtgccggtttgggtgatgctatcgtg

SEQ ID NO: 217905 - DNA, 55 bp, Artificial
  Synthetic oligonucleotide
cgtcgcataacagcagattatgtgtaaattctcgtgcaggaggtgattttactgc

SEQ ID NO: 217906 - DNA, 55 bp, Artificial
  Synthetic oligonucleotide
ctgccggttatctatcctaagaaataccgataagacgggctgtcggtaacatcct

SEQ ID NO: 217907 - DNA, 55 bp, Artificial
  Synthetic oligonucleotide
ctgctatggcgatggacactcaaaatgctccgccccatacccaagcctatcttgc

SEQ ID NO: 217908 - DNA, 55 bp, Artificial
  Synthetic oligonucleotide
ctggcacggcagaacacggtcataattttacacaaacacgagtaaccgccaaagg

SEQ ID NO: 217909 - DNA, 55 bp, Artificial
  Synthetic oligonucleotide
ctaatacggcgtgcatttactaaagaatgcgcatctttcgcactcataaagcgtg

SEQ ID NO: 217910 - DNA, 55 bp, Artificial
  Synthetic oligonucleotide
ctggcattccaacgtgtccgcagttttaaaaggttcttgtaagattgccataccc

SEQ ID NO: 217911 - DNA, 55 bp, Artificial
  Synthetic oligonucleotide
ctggcgtgacggtaaggcaacaatcagatcgagatattgttatttactggcgtgc

SEQ ID NO: 217912 - DNA, 52 bp, Artificial
  Synthetic oligonucleotide
attttgctaaaacgccctgaattttggtaatcatcaacagtaaaacgagttt

SEQ ID NO: 217913 - DNA, 55 bp, Artificial
  Synthetic oligonucleotide
cgtagtttggatttatctcggctgcgtcaatttattgccgatttgcgtttgtcgt

SEQ ID NO: 217914 - DNA, 55 bp, Artificial
  Synthetic oligonucleotide
ctggcgtttcataggcacgttgttgtaagaacacatagtaccaagtctgactatt

SEQ ID NO: 217915 - DNA, 55 bp, Artificial
  Synthetic oligonucleotide
ctactcggtaagagagataaacgctaccgtatacccctttgcgttccactcgcac

SEQ ID NO: 217916 - DNA, 55 bp, Artificial
  Synthetic oligonucleotide
agagagcttgcgagccgaaaacgccttgatacaacaacaatacagcgaaataatg

SEQ ID NO: 217917 - DNA, 55 bp, Artificial
  Synthetic oligonucleotide
ctagataggcgagtttatctcgtaaacgcataagccttgccggtgcttgatcacc

SEQ ID NO: 217918 - DNA, 55 bp, Artificial
  Synthetic oligonucleotide
ctcgccaactttcttgcactaaagaaccggcgccccattgcgccaaacctcgcga

SEQ ID NO: 217919 - DNA, 55 bp, Artificial
  Synthetic oligonucleotide
ctagcggtttgcagaaaagtgtgccacaataaactaaccttatcgcaccgcttgc

SEQ ID NO: 217920 - DNA, 55 bp, Artificial
  Synthetic oligonucleotide
ctagctagccatataccaaacatattcccttctgtaccgccatttgtcacatatc

SEQ ID NO: 217921 - DNA, 54 bp, Artificial
  Synthetic oligonucleotide
cgttacttactcaaattacacgagaaagaaacgacccgtactgaccgtatgcaa

SEQ ID NO: 217922 - DNA, 55 bp, Artificial
  Synthetic oligonucleotide
cgtgtggcagattggggcgaattactccgtatcttcgttaatccgccatatagca

SEQ ID NO: 217923 - DNA, 54 bp, Artificial
  Synthetic oligonucleotide
caaacctctacgaattggggcaagggttatttatccgcttcaagacttagacaa

SEQ ID NO: 217924 - DNA, 55 bp, Artificial
  Synthetic oligonucleotide
ctctctgttggcgttaagctgttacgttggttaattgccccgacggtgcgatagg

SEQ ID NO: 217925 - DNA, 55 bp, Artificial
  Synthetic oligonucleotide
gaatcataacgcgacttaatacccgcagagaatgaccatcccgtttcgtgtgtcc

SEQ ID NO: 217926 - DNA, 55 bp, Artificial
  Synthetic oligonucleotide
ctctgccgtaatggggacgattgggaatggcttattcggtcaagtaaaagaggcg

SEQ ID NO: 217927 - DNA, 55 bp, Artificial
  Synthetic oligonucleotide
cgttagtctttccaatatcgctttagatgaagcgtacttatcccagttaccgtgt

SEQ ID NO: 217928 - DNA, 53 bp, Artificial
  Synthetic oligonucleotide
cgttccggtaaattagatatgacactattttcggaagcactcgaaacttacgg

SEQ ID NO: 217929 - DNA, 55 bp, Artificial
  Synthetic oligonucleotide
acttgcaaaccataaacccaatgaaaggcttgggcgtctcccatttgaatacgcc

SEQ ID NO: 217930 - DNA, 55 bp, Artificial
  Synthetic oligonucleotide
cgtgtactccgcgcactttatgcttcgctaataacactatcggtgccgcactact

SEQ ID NO: 217931 - DNA, 55 bp, Artificial
  Synthetic oligonucleotide
cgtggtttctactggctgacttttatctaaggattggaactgcacagggatttca

SEQ ID NO: 217932 - DNA, 55 bp, Artificial
  Synthetic oligonucleotide
ctctttggctcaagatgctaaccacgaaaattgggaaacgcatatcgatgagtgg

SEQ ID NO: 217933 - DNA, 55 bp, Artificial
  Synthetic oligonucleotide
cgttgcgtaaggggttgctccgttccatccatattgagaggtaatccgacaacta

SEQ ID NO: 217934 - DNA, 53 bp, Artificial
  Synthetic oligonucleotide
caaacgacaaatttgtagtcgtcaaacgacaaatttgtagtcgtaaacgacaa

SEQ ID NO: 217935 - DNA, 55 bp, Artificial
  Synthetic oligonucleotide
cgttgtttcgttggtgcgagtatgttctacatagctataaacaggcacatctacg

SEQ ID NO: 217936 - DNA, 55 bp, Artificial
  Synthetic oligonucleotide
ctctctaagatcttcgcttatcgaacaaataatgctgccccgccacttatcggca

SEQ ID NO: 217937 - DNA, 55 bp, Artificial
  Synthetic oligonucleotide
ctcgtttagcaagtcgtcgagagggaaatgaaggttcaacaggtttatctagtcc

SEQ ID NO: 217938 - DNA, 55 bp, Artificial
  Synthetic oligonucleotide
ctcgttggatccgcccttggacaatggtcgcttggggatttctaaccgcaggcat

SEQ ID NO: 217939 - DNA, 55 bp, Artificial
  Synthetic oligonucleotide
actaaggtatgaccgccacggtcgcctaatggaagcataatatcgcgttcattcg

SEQ ID NO: 217940 - DNA, 55 bp, Artificial
  Synthetic oligonucleotide
ctcggcttaatagctgcatatctaatccgccattttcgcgtacaaattgggcgag

SEQ ID NO: 217941 - DNA, 55 bp, Artificial
  Synthetic oligonucleotide
ctgagtgatctatccgcgtaagtggcgtgaagattcttcaaacggctccattcgg

SEQ ID NO: 217942 - DNA, 55 bp, Artificial
  Synthetic oligonucleotide
ctgatgcaatgggcgcgttacgtttgaaattaggtcgtgatcttggcttaactcg

SEQ ID NO: 217943 - DNA, 55 bp, Artificial
  Synthetic oligonucleotide
gaattgctcacttaaccctcaagcggtgcacgctcgaatatctgcaacttggaag

SEQ ID NO: 217944 - DNA, 55 bp, Artificial
  Synthetic oligonucleotide
cgtggattttctcttaaatagaccccgaatacacttaccaaggcatcgcacctta

SEQ ID NO: 217945 - DNA, 58 bp, Artificial
  Synthetic oligonucleotide
ggcggcataagcacgtcgcaacaaccccgtggagaagagctggggcgtctgaacccta

SEQ ID NO: 217946 - DNA, 50 bp, Artificial
  Synthetic oligonucleotide
aattcctgaaaaggattgggagagtccccgggaaggaacaggtccgaatt

SEQ ID NO: 217947 - DNA, 59 bp, Artificial
  Synthetic oligonucleotide
agacagtcatacgggaacgaaaatgcttcaactcgcgtaaggaagccgtcagcatagcc

SEQ ID NO: 217948 - DNA, 60 bp, Artificial
  Synthetic oligonucleotide
agaagaatcgcaagaagttccgcattggttacgtgctgtgggccctgtgctatcattcgt

SEQ ID NO: 217949 - DNA, 57 bp, Artificial
  Synthetic oligonucleotide
acaatagccacccaccctatctgcctcggttgtacgccccaatacagcccctattca

SEQ ID NO: 217950 - DNA, 57 bp, Artificial
  Synthetic oligonucleotide
acaccgtccatagggagttgacggttttcccccattggactgatgaggtcatgttga

SEQ ID NO: 217951 - DNA, 56 bp, Artificial
  Synthetic oligonucleotide
ccatagtatcggatacagaaaacctccgagaaatctgttcccgacggcattacggc

SEQ ID NO: 217952 - DNA, 55 bp, Artificial
  Synthetic oligonucleotide
cggagggctgtgataactacggagggacccctgttggtaatggcaggtgcgggca

SEQ ID NO: 217953 - DNA, 54 bp, Artificial
  Synthetic oligonucleotide
caacaagagaatagggggtacttctatcccatccttcatccatcgttccccctt

SEQ ID NO: 217954 - DNA, 55 bp, Artificial
  Synthetic oligonucleotide
actgtctgatgctttctataggtggttcgattcactgatctcctcgacccctacc

SEQ ID NO: 217955 - DNA, 55 bp, Artificial
  Synthetic oligonucleotide
gagggacccctgttggtaatggcaggtgcgggcagtgggaagacacgtgtcctta

SEQ ID NO: 217956 - DNA, 55 bp, Artificial
  Synthetic oligonucleotide
gcggaaacaatcaatacagcgccccccgtatcaaaataacctacgaaatcctgga

SEQ ID NO: 217957 - DNA, 55 bp, Artificial
  Synthetic oligonucleotide
gatggccttatgctgacaagtggtggggatccatccccctcctgttgggacgagg

SEQ ID NO: 217958 - DNA, 53 bp, Artificial
  Synthetic oligonucleotide
gataactacggagggacccctgttggtaatggcaggtgcgggcagtgggaaga

SEQ ID NO: 217959 - DNA, 53 bp, Artificial
  Synthetic oligonucleotide
gaaccctacacaattttgaacgcggcaacgtacgaaccacacatccccgttgg

SEQ ID NO: 217960 - DNA, 52 bp, Artificial
  Synthetic oligonucleotide
catcccaacatacccgccagattcggaatccaactaccagatatatcgagta

SEQ ID NO: 217961 - DNA, 54 bp, Artificial
  Synthetic oligonucleotide
gccatcaagtttccccctacacccgtctttcaatgttcacgtaggtattcccca

SEQ ID NO: 217962 - DNA, 54 bp, Artificial
  Synthetic oligonucleotide
gaacgggctcaacccttctcgaaaattcggatctgggagggtgtacccgatgac

SEQ ID NO: 217963 - DNA, 57 bp, Artificial
  Synthetic oligonucleotide
ctgttggtaatggcaggtgcgggcagtgggaagacacgtgtccttacctaccgagta

SEQ ID NO: 217964 - DNA, 59 bp, Artificial
  Synthetic oligonucleotide
ctattgcggaacgttgtgatggccttatgctgacaagtggtggggatccatccccctcc

SEQ ID NO: 217965 - DNA, 60 bp, Artificial
  Synthetic oligonucleotide
cggtttcgacatcactatggactgtctgatgctttctataggtggttcgattcactgatc

SEQ ID NO: 217966 - DNA, 56 bp, Artificial
  Synthetic oligonucleotide
ccactctcaatgaacaacaacggagggctgtgataactacggagggacccctgttg

SEQ ID NO: 217967 - DNA, 55 bp, Artificial
  Synthetic oligonucleotide
ccacggtataggggtgtaacgctgatacttcctcgcaataaagcgggggtcagaa

SEQ ID NO: 217968 - DNA, 60 bp, Artificial
  Synthetic oligonucleotide
catcaattcaaataacgagcggcttgtaaaaagttcaacctcgaagcgcggcacatgaga

SEQ ID NO: 217969 - DNA, 60 bp, Artificial
  Synthetic oligonucleotide
ctatctcagcttccacatacatgttgcggtggacaccctaacgcgctacactctgcaaaa

SEQ ID NO: 217970 - DNA, 52 bp, Artificial
  Synthetic oligonucleotide
tcttggcatgggaatccgccgattacaaggtcagcgctttggggcatctcag

SEQ ID NO: 217971 - DNA, 52 bp, Artificial
  Synthetic oligonucleotide
aagcaaatcgaaggcgctgatagtgcccaagcattctagaaacgggctgtca

SEQ ID NO: 217972 - DNA, 52 bp, Artificial
  Synthetic oligonucleotide
tcgcgccacggttcagtatgacccacaggcaacgaacattgagtcgctcagc

SEQ ID NO: 217973 - DNA, 51 bp, Artificial
  Synthetic oligonucleotide
gtcgctcagccaggtagtacgagacttggggtatgatgtaattgttcccaa

SEQ ID NO: 217974 - DNA, 51 bp, Artificial
  Synthetic oligonucleotide
aagatgtgaaccctgtaacgctatcaatcttcacccatttaccggggaggc

SEQ ID NO: 217975 - DNA, 51 bp, Artificial
  Synthetic oligonucleotide
taccctcatcccaggtctctagcgcatgtgcggcaatacccgtccgtaggt

SEQ ID NO: 217976 - DNA, 51 bp, Artificial
  Synthetic oligonucleotide
tccgaggcttaagcgttggtaggtcacaggtattctcgcacgccgcgaaag

SEQ ID NO: 217977 - DNA, 51 bp, Artificial
  Synthetic oligonucleotide
tcgggagaacccacagtcaacgatttatccgcctctactataaccggctca

SEQ ID NO: 217978 - DNA, 51 bp, Artificial
  Synthetic oligonucleotide
ggggtgttcgaaccatttgcgggtacgctcaaaaccgtcataacacattcc

SEQ ID NO: 217979 - DNA, 50 bp, Artificial
  Synthetic oligonucleotide
aaggcagaggttgccgcgtaagcaattgtcggaaagaacatggggcgcgg

SEQ ID NO: 217980 - DNA, 60 bp, Artificial
  Synthetic oligonucleotide
ctggccccctactagcagcaggtccgattaccctcatcccaggtctctagcgcatgtgcg

SEQ ID NO: 217981 - DNA, 50 bp, Artificial
  Synthetic oligonucleotide
aaggatggcccctccgatcaatgtggttcgccccggtcccagtctttcga

SEQ ID NO: 217982 - DNA, 50 bp, Artificial
  Synthetic oligonucleotide
aaggagcacatggggcagttgcttgggaaatccgaacgcggtgtcgttgc

SEQ ID NO: 217983 - DNA, 50 bp, Artificial
  Synthetic oligonucleotide
aaggccatacaggtcagcaagtccgcacacttggaaacagtcgcgggcgg

SEQ ID NO: 217984 - DNA, 50 bp, Artificial
  Synthetic oligonucleotide
aaggggtggcactcgccgtgtcggtacccagctcatttccgtcacgatca

SEQ ID NO: 217985 - DNA, 50 bp, Artificial
  Synthetic oligonucleotide
aaggtacggggtcagggaggtcagtccatcgctttctgccgcacacaggg

SEQ ID NO: 217986 - DNA, 50 bp, Artificial
  Synthetic oligonucleotide
aagtctgcccggtgtgcgaagccaatacaccgttgagcgtttcacgcaga

SEQ ID NO: 217987 - DNA, 50 bp, Artificial
  Synthetic oligonucleotide
aatccggccaactcccagtgccccgtagtcgtgtctttccccttggatcg

SEQ ID NO: 217988 - DNA, 50 bp, Artificial
  Synthetic oligonucleotide
aattatggcgatttctgggggtacaacggggagcggggaggcgcatctcg

SEQ ID NO: 217989 - DNA, 50 bp, Artificial
  Synthetic oligonucleotide
gcctggggtaaaaccgtccgtggtcttcgcgacacccttgctccgaaagg

SEQ ID NO: 217990 - DNA, 50 bp, Artificial
  Synthetic oligonucleotide
acacttgccagtgcctccagtgggagcgacacgagcgttgcacggtagaa

SEQ ID NO: 217991 - DNA, 60 bp, Artificial
  Synthetic oligonucleotide
gctccgcgagccagagatcgtattgcgcctgctggatcagccagctgtcagcggtcgttt

SEQ ID NO: 217992 - DNA, 50 bp, Artificial
  Synthetic oligonucleotide
acagctggcggctctttggtccgcccaagcatgtttcgtccgacatggta

SEQ ID NO: 217993 - DNA, 50 bp, Artificial
  Synthetic oligonucleotide
accactaaccgcgatcctcgcaatcccgccaggtcgtttgttgggctgcg

SEQ ID NO: 217994 - DNA, 50 bp, Artificial
  Synthetic oligonucleotide
accaggtaccgcggggcttgacaaccttactcagccgaccctgctcgtaa

SEQ ID NO: 217995 - DNA, 50 bp, Artificial
  Synthetic oligonucleotide
acccgcagtgtaccatacaatcggcacagcgtgcatcccgcccggttcca

SEQ ID NO: 217996 - DNA, 49 bp, Artificial
  Synthetic oligonucleotide
aaaaccggggaggggatattgcgacgtgagtttcgggtggaacgggccg

SEQ ID NO: 217997 - DNA, 50 bp, Artificial
  Synthetic oligonucleotide
aaaccgacttaccacccgcacccaacgtgccgacgagaacggttctccat

SEQ ID NO: 217998 - DNA, 50 bp, Artificial
  Synthetic oligonucleotide
aaacgcatcggggaaaggtgtgagtctggccctcgcacacggcgattgtc

SEQ ID NO: 217999 - DNA, 50 bp, Artificial
  Synthetic oligonucleotide
aaacgtccgagggttacgatgacgcggggccggatagcggctaactggcg

SEQ ID NO: 218000 - DNA, 50 bp, Artificial
  Synthetic oligonucleotide
aaagcaggcaccgccaccgtccctcgggcaatagcgtagcgaaccctgca

SEQ ID NO: 218001 - DNA, 50 bp, Artificial
  Synthetic oligonucleotide
aaccgcaccgtgcttacggcaccaacagggttgcgctcaacgtgtgcctc

SEQ ID NO: 218002 - DNA, 54 bp, Artificial
  Synthetic oligonucleotide
gtaatagaaggctttcgccccatcgcccctccaactgtgccaacctccgggtat

SEQ ID NO: 218003 - DNA, 50 bp, Artificial
  Synthetic oligonucleotide
aacctttgatgacgtggggcgttctttgggccctgaatctttccgcgggg

SEQ ID NO: 218004 - DNA, 50 bp, Artificial
  Synthetic oligonucleotide
gttgggcaaagttattacggcaggaatcgttcgattccattgcgtgatgg

SEQ ID NO: 218005 - DNA, 50 bp, Artificial
  Synthetic oligonucleotide
aacgagggactttccgggtttgaaggcaaactgcgccagggggaatggct

SEQ ID NO: 218006 - DNA, 50 bp, Artificial
  Synthetic oligonucleotide
aacgatcccgcgttccgcccgtgcgccccgttctcgccattgctggatgt

SEQ ID NO: 218007 - DNA, 50 bp, Artificial
  Synthetic oligonucleotide
aacgcccgacggccccctttagcggaacccatgaagcgctttattgccga

SEQ ID NO: 218008 - DNA, 50 bp, Artificial
  Synthetic oligonucleotide
aacgcttcgaaaccgatgcttggccattgtaccaagtcgggccagggggt

SEQ ID NO: 218009 - DNA, 50 bp, Artificial
  Synthetic oligonucleotide
aacggaagtcgacagctggggcggtgggaggaacatggtttcatggaggc

SEQ ID NO: 218010 - DNA, 50 bp, Artificial
  Synthetic oligonucleotide
aagcagcgacgctgtcctgtgtctcgtttgccgctctacccgtcgccatg

SEQ ID NO: 218011 - DNA, 50 bp, Artificial
  Synthetic oligonucleotide
aagccgcaggggatgacctcccatgctgtggtaggacgtatcaggcgcct

SEQ ID NO: 218012 - DNA, 50 bp, Artificial
  Synthetic oligonucleotide
aagcgcggcggtcatccatcgggtatactgtaagcgggtgacccgggaaa

SEQ ID NO: 218013 - DNA, 54 bp, Artificial
  Synthetic oligonucleotide
ctcaaccctagcccgacacatgttccacggaaagtcaaaaccctgttgacggag

SEQ ID NO: 218014 - DNA, 50 bp, Artificial
  Synthetic oligonucleotide
aagcggagaccatcggcaggaccgccagtgccctggaactatgggagagt

SEQ ID NO: 218015 - DNA, 50 bp, Artificial
  Synthetic oligonucleotide
acgtccttgccccatccctgacgcggaaactcgccctgtgtataccgcaa

SEQ ID NO: 218016 - DNA, 50 bp, Artificial
  Synthetic oligonucleotide
acgttatcgaaccgaacaacctgaggcgccgtgtggccccgttgtccgct

SEQ ID NO: 218017 - DNA, 50 bp, Artificial
  Synthetic oligonucleotide
acgttgccatgcctaccgttgcatcacggggatgcggtcccttccgcaaa

SEQ ID NO: 218018 - DNA, 50 bp, Artificial
  Synthetic oligonucleotide
actgagcgcagcgaatcttgtccacccgcccgtcggttgcgcagtgaagg

SEQ ID NO: 218019 - DNA, 50 bp, Artificial
  Synthetic oligonucleotide
actgccgggttgcccagacttccccgcgcttatggccacggtttccggtt

SEQ ID NO: 218020 - DNA, 50 bp, Artificial
  Synthetic oligonucleotide
actggagcgactatggtgctggcggttacggaacctacggtatccgggga

SEQ ID NO: 218021 - DNA, 50 bp, Artificial
  Synthetic oligonucleotide
acttgtcctgtcgggtgttccgcacgtgagagcctcgtcccttccccacg

SEQ ID NO: 218022 - DNA, 50 bp, Artificial
  Synthetic oligonucleotide
agaccgcctgtgcgcagaacaaagcatggcagcttgcaggttatccgccc

SEQ ID NO: 218023 - DNA, 50 bp, Artificial
  Synthetic oligonucleotide
agacgcataacccgttaaccctgaaggtgtgcccgtagtcggaacgccgc

SEQ ID NO: 218024 - DNA, 58 bp, Artificial
  Synthetic oligonucleotide
ccccaaatccatgccaccacatcctgagaacagggatacgacagtaatcatatgtttt

SEQ ID NO: 218025 - DNA, 50 bp, Artificial
  Synthetic oligonucleotide
agactgcgggcgaagttgctcacaaccccctggtcgcgtctgcaaagact

SEQ ID NO: 218026 - DNA, 50 bp, Artificial
  Synthetic oligonucleotide
agcaggctgggagcggcctcgaatacacactgattggccgacgaacgcgt

SEQ ID NO: 218027 - DNA, 50 bp, Artificial
  Synthetic oligonucleotide
agccaccgatcgagcctaggcctgccacactaccgcgagaattcatggcg

SEQ ID NO: 218028 - DNA, 50 bp, Artificial
  Synthetic oligonucleotide
agccccatgtagcttgcggtctgggtaaacaccatgcggccccagtagta

SEQ ID NO: 218029 - DNA, 50 bp, Artificial
  Synthetic oligonucleotide
agccgggacccagcttgagttcggtaccaccctgatcttcccccaccggg

SEQ ID NO: 218030 - DNA, 50 bp, Artificial
  Synthetic oligonucleotide
agcggaatgtggcgcggagaacgaccgtgacgagacttgagcggcagagc

SEQ ID NO: 218031 - DNA, 50 bp, Artificial
  Synthetic oligonucleotide
agcggggtaaggccccctgacgaggagacagtcaaccgtgcctttcagat

SEQ ID NO: 218032 - DNA, 50 bp, Artificial
  Synthetic oligonucleotide
agcgtatctgatgggagtcaggcgacaggccggagatgcggagtaaggcc

SEQ ID NO: 218033 - DNA, 50 bp, Artificial
  Synthetic oligonucleotide
agcttcccgcgcgaagagcggcaattgacacatcacccccgtcatggcag

SEQ ID NO: 218034 - DNA, 50 bp, Artificial
  Synthetic oligonucleotide
aggagcgattcaacggagcagaccacacgcatccatccggggcgagtcac

SEQ ID NO: 218035 - DNA, 57 bp, Artificial
  Synthetic oligonucleotide
agtcaatgataatcgacgtatcagactgtatggcttcttgtaacacttcacgaaccc

SEQ ID NO: 218036 - DNA, 50 bp, Artificial
  Synthetic oligonucleotide
aggcagagcgaagcactacagaaggcggcgctccaaaggtacgaggctgc

SEQ ID NO: 218037 - DNA, 50 bp, Artificial
  Synthetic oligonucleotide
aggccgcacactagcacagcagggagtacaatgcaaaccggcaggacggg

SEQ ID NO: 218038 - DNA, 49 bp, Artificial
  Synthetic oligonucleotide
agggagggaaccccgtagtacacctcccggtagccgcgggacggtatag

SEQ ID NO: 218039 - DNA, 50 bp, Artificial
  Synthetic oligonucleotide
acccgcgcaccccgacactaccttaccggtggaccaggaacatcaatcct

SEQ ID NO: 218040 - DNA, 50 bp, Artificial
  Synthetic oligonucleotide
accctgcgtgtcagcacgaattgcttaccccgctcggtatccgacccctc

SEQ ID NO: 218041 - DNA, 50 bp, Artificial
  Synthetic oligonucleotide
accctgttgatccttctcacgccggctcccgacgctgtcctgccaaccat

SEQ ID NO: 218042 - DNA, 50 bp, Artificial
  Synthetic oligonucleotide
accgcaccaacgggacgcacctcttgctcctgaagagcccgtagtaacct

SEQ ID NO: 218043 - DNA, 50 bp, Artificial
  Synthetic oligonucleotide
accggactggattggcagggctccgtcgcgcaacgactgcgaaaaatgcg

SEQ ID NO: 218044 - DNA, 50 bp, Artificial
  Synthetic oligonucleotide
accgtaagcgtaccctgggactggctcgggccaatatggatggcttgcta

SEQ ID NO: 218045 - DNA, 50 bp, Artificial
  Synthetic oligonucleotide
accgtgcgcaaaatcgcaacgatccgctccactctcagccccggtctaca

SEQ ID NO: 218046 - DNA, 56 bp, Artificial
  Synthetic oligonucleotide
acgagagggatacttacctccgcgggaaagaatatagctggtacgtctgcagcgtg

SEQ ID NO: 218047 - DNA, 50 bp, Artificial
  Synthetic oligonucleotide
gaattcttatcgagcgattcttgacaaggagacaaacatgcgtgtgattg

SEQ ID NO: 218048 - DNA, 50 bp, Artificial
  Synthetic oligonucleotide
accgtgttgaccggcttgacagcgggagggtttgcggctattgtcagctt

SEQ ID NO: 218049 - DNA, 50 bp, Artificial
  Synthetic oligonucleotide
acctcgttgtacacccccacaagcacggcacgaagtctctgccggccgtt

SEQ ID NO: 218050 - DNA, 50 bp, Artificial
  Synthetic oligonucleotide
acgcaagacctgacgccattctcttcccgcccttctaccagccgccgata

SEQ ID NO: 218051 - DNA, 50 bp, Artificial
  Synthetic oligonucleotide
acgcacagttcgactccgccttcgcaatggcacctggcacgccgcagtgg

SEQ ID NO: 218052 - DNA, 50 bp, Artificial
  Synthetic oligonucleotide
acgcacgcctcgaatgggaatgcgggaggtgatcaggggcaccgatgcgt

SEQ ID NO: 218053 - DNA, 50 bp, Artificial
  Synthetic oligonucleotide
acgcgacccggcccatgaggcaccggaactgtgggtcctcaaaaacgtcg

SEQ ID NO: 218054 - DNA, 50 bp, Artificial
  Synthetic oligonucleotide
acgcgtctgccaaacacccccttcagcctgcgaaccgaggattggctgca

SEQ ID NO: 218055 - DNA, 50 bp, Artificial
  Synthetic oligonucleotide
acgctcgaccggatggggatacgctatgccgcggaagtcaagggggtact

SEQ ID NO: 218056 - DNA, 50 bp, Artificial
  Synthetic oligonucleotide
acggacaccgtctttggccagaacgcgggtagccttcagaccctcgccgg

SEQ ID NO: 218057 - DNA, 55 bp, Artificial
  Synthetic oligonucleotide
cgatcaatttcgagagttttactggtgcctctcgccagtatggcacccattttat

SEQ ID NO: 218058 - DNA, 50 bp, Artificial
  Synthetic oligonucleotide
acggcttatctcggtcctcaagtcagccgggcgctgcgacgcagatggtt

SEQ ID NO: 218059 - DNA, 50 bp, Artificial
  Synthetic oligonucleotide
acggttccccggaacacgacgtaaacggacgcccggagcatggcatgaac

SEQ ID NO: 218060 - DNA, 50 bp, Artificial
  Synthetic oligonucleotide
acggttgacggcaaagggttcgcgtcgacattccggaccggtgatcccct

SEQ ID NO: 218061 - DNA, 50 bp, Artificial
  Synthetic oligonucleotide
acgtagacccgctctgaagccggcagtttcccccttagcgcctcgatgcc

SEQ ID NO: 218062 - DNA, 55 bp, Artificial
  Synthetic oligonucleotide
tgttctacgaaccaggtacaacctcatcagttcgcgccaatcatctggtgaatcg

SEQ ID NO: 218063 - DNA, 56 bp, Artificial
  Synthetic oligonucleotide
caggagtctcagggaacagggcataggccgggaaccggagcggcacctggggccaa

SEQ ID NO: 218064 - DNA, 55 bp, Artificial
  Synthetic oligonucleotide
cgatgcgagttcgtatccagccgaaaggtccgtcatggatcctatccgcagttcg

SEQ ID NO: 218065 - DNA, 55 bp, Artificial
  Synthetic oligonucleotide
actgtgaggattgcgctcaagcgctcttatcaatcacactaccggcggatgctcc

SEQ ID NO: 218066 - DNA, 55 bp, Artificial
  Synthetic oligonucleotide
cgcacttcctcgtttctctcagctacgcttcaagaaacggtgcgctctccgaggg

SEQ ID NO: 218067 - DNA, 52 bp, Artificial
  Synthetic oligonucleotide
cgccacccttgaataactccgggaggttcggttttcggtaatggccacgaga

SEQ ID NO: 218068 - DNA, 55 bp, Artificial
  Synthetic oligonucleotide
cggagcagccgtaactggtgggatatggccgacttggttgtgctgagaaggctgg

SEQ ID NO: 218069 - DNA, 55 bp, Artificial
  Synthetic oligonucleotide
tggatttaataacgctgttgcataagcctgcacacttgccagcatactaccagcg

SEQ ID NO: 218070 - DNA, 55 bp, Artificial
  Synthetic oligonucleotide
cggcagaagctcataagtcgaaatcactcatcccgaactgacccgatctacgggg

SEQ ID NO: 218071 - DNA, 55 bp, Artificial
  Synthetic oligonucleotide
cggcattgccgcaatcaaatgcttctcggttatgctgtttggaaatcggctcttc

SEQ ID NO: 218072 - DNA, 55 bp, Artificial
  Synthetic oligonucleotide
aaagcggcggagcacgcatgtcaacgtgtcattgttgcctcccacttccgcagat

SEQ ID NO: 218073 - DNA, 55 bp, Artificial
  Synthetic oligonucleotide
cgggcggattctcaaagacattcgattgttctcttttacggccactcttggcatg

SEQ ID NO: 218074 - DNA, 60 bp, Artificial
  Synthetic oligonucleotide
atttgatagcactggccccctactagcagcaggtccgattaccctcatcccaggtctcta

SEQ ID NO: 218075 - DNA, 55 bp, Artificial
  Synthetic oligonucleotide
cggtaaacaggcattgcgaggttgggaattgccgtccatcggacaataccacccc

SEQ ID NO: 218076 - DNA, 55 bp, Artificial
  Synthetic oligonucleotide
cgtttgtccggaacaggccatcgattttcccgagagactttgtggcgaatggatg

SEQ ID NO: 218077 - DNA, 55 bp, Artificial
  Synthetic oligonucleotide
ctacgtcctcggcaagcgtttcaagatcaccaatagcttccttcgctgttatatg

SEQ ID NO: 218078 - DNA, 55 bp, Artificial
  Synthetic oligonucleotide
aaccaggtccgccgatccagacggcccgggcgacctctccaggaacacaacatct

SEQ ID NO: 218079 - DNA, 55 bp, Artificial
  Synthetic oligonucleotide
tgaaccacagcgaaaccgactttcagggcggaatcgagcattacaagctgggact

SEQ ID NO: 218080 - DNA, 55 bp, Artificial
  Synthetic oligonucleotide
aaaacgtcaggtaaatcctctgcagttaggtctctatcgtaaatggaaacattcg

SEQ ID NO: 218081 - DNA, 55 bp, Artificial
  Synthetic oligonucleotide
cagcggcagcgcaacgagagacatggctacaacgacaggtggagaatctgaccga

SEQ ID NO: 218082 - DNA, 55 bp, Artificial
  Synthetic oligonucleotide
caccgttaattgcggcatgccctgttaccatggcaggcattataattctgttgcg

SEQ ID NO: 218083 - DNA, 55 bp, Artificial
  Synthetic oligonucleotide
caaccgttacagcccggagcgggtctcctgcaggagtctcagggaacagggcata

SEQ ID NO: 218084 - DNA, 55 bp, Artificial
  Synthetic oligonucleotide
ataaccagttgccctccattgaagctgagccgagcgccattttccgtagcaccgg

SEQ ID NO: 218085 - DNA, 60 bp, Artificial
  Synthetic oligonucleotide
ccaggttatctcgctctgcgagagtcgctcccagtccattttatgcctagggagttaatc

SEQ ID NO: 218086 - DNA, 55 bp, Artificial
  Synthetic oligonucleotide
agggctaaggtagaagtcacaagggccgaggcaaatctgtacgcggccaggactg

SEQ ID NO: 218087 - DNA, 55 bp, Artificial
  Synthetic oligonucleotide
ccaatccgtcataccaggcctgtcccggatacaccgacggcagatgataatgcat

SEQ ID NO: 218088 - DNA, 53 bp, Artificial
  Synthetic oligonucleotide
cccggtttcaacatggtcggacacctcaaacccttcatggaacgattggcccg

SEQ ID NO: 218089 - DNA, 53 bp, Artificial
  Synthetic oligonucleotide
cccgttaaaactgtccagaaaagaccatccaaaccgtgaggacgaactggata

SEQ ID NO: 218090 - DNA, 55 bp, Artificial
  Synthetic oligonucleotide
cccgttctgtcaggttgccttgactgatattctgcgctgcctgggataaccgcac

SEQ ID NO: 218091 - DNA, 54 bp, Artificial
  Synthetic oligonucleotide
cccttaacgcggcctgaacggcccatagaccgggagcaaccatgaaaggcaccg

SEQ ID NO: 218092 - DNA, 54 bp, Artificial
  Synthetic oligonucleotide
aaacggacatcgacacttttgtgcgggaataaacaaaccgcgaaacagcacaac

SEQ ID NO: 218093 - DNA, 53 bp, Artificial
  Synthetic oligonucleotide
ccgcggactttcggggcgatagttccgaaggctggtcttacaccataacgccc

SEQ ID NO: 218094 - DNA, 49 bp, Artificial
  Synthetic oligonucleotide
ccggcgaaccgcaaaacctaagaaaccaaatcacccctcccaaaaccta

SEQ ID NO: 218095 - DNA, 55 bp, Artificial
  Synthetic oligonucleotide
ccggtctaaccggttttcaatagtcaggtcagctatctggagactatcggcttca

SEQ ID NO: 218096 - DNA, 60 bp, Artificial
  Synthetic oligonucleotide
agcggcagaagcagagaaagcggtatatctagaagaggcaaagcgccataattggtgtac

SEQ ID NO: 218097 - DNA, 55 bp, Artificial
  Synthetic oligonucleotide
ccttggaaagctcagcaacagcgaccggaacaagtatatagaattaaccttccca

SEQ ID NO: 218098 - DNA, 55 bp, Artificial
  Synthetic oligonucleotide
agcaaggagttgaacacggtaactgaagcggcgaccgcacatgcgcttgacttga

SEQ ID NO: 218099 - DNA, 52 bp, Artificial
  Synthetic oligonucleotide
cgaaccgatgcaacgataatttccgtatcgaacccgtaattttcgaaaatag

SEQ ID NO: 218100 - DNA, 55 bp, Artificial
  Synthetic oligonucleotide
ggtcatgccgctacggccattttcgcctccaaactctattcggaatcggagcgta

SEQ ID NO: 218101 - DNA, 55 bp, Artificial
  Synthetic oligonucleotide
gggtcagatcactggtatgttccggagaaatatgaggttgacaggctggcggaaa

SEQ ID NO: 218102 - DNA, 55 bp, Artificial
  Synthetic oligonucleotide
gggaggtctccaagatgtttgctctgaaacaatgttcatcggtaaacctctcgcc

SEQ ID NO: 218103 - DNA, 53 bp, Artificial
  Synthetic oligonucleotide
ggctctattgaagatcgaattcccgattaaaacctacaaagcccgtttaggcg

SEQ ID NO: 218104 - DNA, 55 bp, Artificial
  Synthetic oligonucleotide
ggcacggtgcacatgacgacggattcgggtatcgtgttcgatactgagaccctcg

SEQ ID NO: 218105 - DNA, 55 bp, Artificial
  Synthetic oligonucleotide
ggatttcacctataatttcatcgcgctaacttttctagacagaaccgagctaccc

SEQ ID NO: 218106 - DNA, 55 bp, Artificial
  Synthetic oligonucleotide
ggagaggtgcgttatgcgaaaagcggctgccattagtcttaggattgagccggaa

SEQ ID NO: 218107 - DNA, 60 bp, Artificial
  Synthetic oligonucleotide
cgatcagagcccagtctaaaagatgcggatgaactctattcctgtccgatgcacccctgg

SEQ ID NO: 218108 - DNA, 55 bp, Artificial
  Synthetic oligonucleotide
ggacatcaccgcttcaccccatacaaacagacggcgcagctccgttcccgccgta

SEQ ID NO: 218109 - DNA, 55 bp, Artificial
  Synthetic oligonucleotide
ggttttcccgtgagaccagggtgctgcatgatgtccaggcgtcgaaggatacgat

SEQ ID NO: 218110 - DNA, 55 bp, Artificial
  Synthetic oligonucleotide
gcgcttggtggcatataacgccatgataggtaagcaaatataaaaccacgtcatc

SEQ ID NO: 218111 - DNA, 55 bp, Artificial
  Synthetic oligonucleotide
gcgcttcaacgacaaagacctggctacaatcatcaagagagccgttaccgaaaac

SEQ ID NO: 218112 - DNA, 55 bp, Artificial
  Synthetic oligonucleotide
gccggaatgctgtcaggtacacaaggacgatggacacgtaactcaggtagatata

SEQ ID NO: 218113 - DNA, 55 bp, Artificial
  Synthetic oligonucleotide
ggttttctgcgtggggccttgatttcttggcgaatagcggatcctgtggtggctt

SEQ ID NO: 218114 - DNA, 55 bp, Artificial
  Synthetic oligonucleotide
gccccaacactgccgtgttgtatccatttgcgaaaccgtttcagcgtgacatctg

SEQ ID NO: 218115 - DNA, 55 bp, Artificial
  Synthetic oligonucleotide
gcagtctgtagcatcatcaagtcggatgaagtcgcagttagacttctcgaaggac

SEQ ID NO: 218116 - DNA, 55 bp, Artificial
  Synthetic oligonucleotide
gcacgtgccataaagctatggtttatcgtacgacaccccgcttgacggaaaagct

SEQ ID NO: 218117 - DNA, 55 bp, Artificial
  Synthetic oligonucleotide
gcaagactatcaggggtagcccgttcgaccctttaccgtaagcatgaacaaggca

SEQ ID NO: 218118 - DNA, 60 bp, Artificial
  Synthetic oligonucleotide
acgttcaccaatgagcctggacctgtatatgtggctaacattccgcaacagctatttgaa

SEQ ID NO: 218119 - DNA, 55 bp, Artificial
  Synthetic oligonucleotide
gatcagcgatacggacccggacattaccgcaacctcataagctctgcttgccccg

SEQ ID NO: 218120 - DNA, 55 bp, Artificial
  Synthetic oligonucleotide
gagcctgcatcgtactctctccagttgaagctttcgactggcacatacaaccagg

SEQ ID NO: 218121 - DNA, 55 bp, Artificial
  Synthetic oligonucleotide
gtgtgcggaactcgtcatagctaattcccatcaattcaaataacgagcggcttgt

SEQ ID NO: 218122 - DNA, 55 bp, Artificial
  Synthetic oligonucleotide
gacctctctgagcgagtaaaggaatatcgacgcaaacaggtttgggagccagccg

SEQ ID NO: 218123 - DNA, 55 bp, Artificial
  Synthetic oligonucleotide
gacaccttcacgatctggaacagcaagggtgaagtaccgagtacgcataccctca

SEQ ID NO: 218124 - DNA, 55 bp, Artificial
  Synthetic oligonucleotide
gacaagtgtcggccaggaccattactgcaactttcggacgctggaggcaaccgcg

SEQ ID NO: 218125 - DNA, 55 bp, Artificial
  Synthetic oligonucleotide
cttgacacgattacgtgtgacagccctgccaactttgcgactaacagtcagtccc

SEQ ID NO: 218126 - DNA, 55 bp, Artificial
  Synthetic oligonucleotide
ctggggtacatctcaaccgtatccaacccttccggttcgataaatgcctggtggc

SEQ ID NO: 218127 - DNA, 55 bp, Artificial
  Synthetic oligonucleotide
gtatgacctcagagctgtcactgactggtatcaggcacgaggaaactacacaccg

SEQ ID NO: 218128 - DNA, 55 bp, Artificial
  Synthetic oligonucleotide
acgaattgtcgatttgaggttcaaatgacgcaggggcgggtctgatggcccgccc

SEQ ID NO: 218129 - DNA, 51 bp, Artificial
  Synthetic oligonucleotide
cggcgggaacttgttcaaaacttcatccgcgaacaactttccggccacccc

SEQ ID NO: 218130 - DNA, 55 bp, Artificial
  Synthetic oligonucleotide
gtcccgatccatgggcataaaacaagcgcccgattttgttaggattatccgccat

SEQ ID NO: 218131 - DNA, 55 bp, Artificial
  Synthetic oligonucleotide
ctggacctgtatatgtggctaacattccgcaacagctatttgaagacaccaacgg

SEQ ID NO: 218132 - DNA, 55 bp, Artificial
  Synthetic oligonucleotide
ctcttctccccgccatatccccgttaggtcatatcttgagttaagcagcaaggta

SEQ ID NO: 218133 - DNA, 55 bp, Artificial
  Synthetic oligonucleotide
gtgtcccggtctccataggtcgtccctgggcaatatcctgtaaggcgttggtccg

SEQ ID NO: 218134 - DNA, 54 bp, Artificial
  Synthetic oligonucleotide
ttgtaggcatacggaaggcgcttagtgtcgaaccggcagaagcgttgggtggtt

SEQ ID NO: 218135 - DNA, 54 bp, Artificial
  Synthetic oligonucleotide
tgttggtcgaatacggcaggggcggcctataaaataagccttaccgttgccagt

SEQ ID NO: 218136 - DNA, 52 bp, Artificial
  Synthetic oligonucleotide
cggggcgatagttccgaaggctggtcttacaccataacgcccgcggtttcct

SEQ ID NO: 218137 - DNA, 54 bp, Artificial
  Synthetic oligonucleotide
tcgacgcaaacaggtttgggagccagccgtaaagagggagcttgtgtcccaaca

SEQ ID NO: 218138 - DNA, 54 bp, Artificial
  Synthetic oligonucleotide
acgccaatagaggtcttcttgcgccagaggttcgcattcgacacgaaagaccgg

SEQ ID NO: 218139 - DNA, 52 bp, Artificial
  Synthetic oligonucleotide
ggtaaaagctcgcggccatctttcaaagttacgcctcgggcttccgggtccg

SEQ ID NO: 218140 - DNA, 60 bp, Artificial
  Synthetic oligonucleotide
ctagcagcaggtccgattaccctcatcccaggtctctagcgcatgtgcggcaatacccgt

SEQ ID NO: 218141 - DNA, 53 bp, Artificial
  Synthetic oligonucleotide
tccacttgcccatcgtcccctgtaacccgtgtccggataatgcgataagcccg

SEQ ID NO: 218142 - DNA, 53 bp, Artificial
  Synthetic oligonucleotide
gccctccattgaagctgagccgagcgccattttccgtagcaccggtacgctta

SEQ ID NO: 218143 - DNA, 53 bp, Artificial
  Synthetic oligonucleotide
cggaaactatgatccccgtgtcggtctagccaggcaaagcatggatcatactt

SEQ ID NO: 218144 - DNA, 53 bp, Artificial
  Synthetic oligonucleotide
gacagcatagcaacgttgctttcgtccgcctcgatcatgtccacaatgcgctc

SEQ ID NO: 218145 - DNA, 53 bp, Artificial
  Synthetic oligonucleotide
gtggctctccgagccagccgcggaaaatcttcagtttttccgcgtgcacgagc

SEQ ID NO: 218146 - DNA, 53 bp, Artificial
  Synthetic oligonucleotide
tttggtccgtattctccgggagcaaaggcgacaactcaccaaaagttatcgtc

SEQ ID NO: 218147 - DNA, 53 bp, Artificial
  Synthetic oligonucleotide
aaccgactgaatcgaacgttcgagacttttggagagtcaatgaagtcacgcgg

SEQ ID NO: 218148 - DNA, 52 bp, Artificial
  Synthetic oligonucleotide
gggcgccgtgtaatgtcatccgaagatagcagacggtccggtgtatttccac

SEQ ID NO: 218149 - DNA, 52 bp, Artificial
  Synthetic oligonucleotide
gaggcgactaaggatgagcgagaggcattacttgatctgttggaacagacaa

SEQ ID NO: 218150 - DNA, 52 bp, Artificial
  Synthetic oligonucleotide
tgctggtgagcgtaaaatcgcagagttgcagctagaacttcgattgacacgt

SEQ ID NO: 218151 - DNA, 55 bp, Artificial
  Synthetic oligonucleotide
ctttctttccgagctgatcatgtcggcagacgtcttcaaggaggctactggtctt

SEQ ID NO: 218152 - DNA, 51 bp, Artificial
  Synthetic oligonucleotide
ctcctgcgttccctgacgggtttcgtagaatacgtaagaaagaaagggtta

SEQ ID NO: 218153 - DNA, 55 bp, Artificial
  Synthetic oligonucleotide
cgctcttaatcgtgcaccaggcctaaagagggactttatcgctgagaaatggccc

SEQ ID NO: 218154 - DNA, 55 bp, Artificial
  Synthetic oligonucleotide
cgctcgagtagggaaagctgctctgatgtttcgtagagtccggagtccgtgtgga

SEQ ID NO: 218155 - DNA, 55 bp, Artificial
  Synthetic oligonucleotide
cgctaccttagtctcgtcgtgttggaaacatccttgacatagttttacagggttg

SEQ ID NO: 218156 - DNA, 55 bp, Artificial
  Synthetic oligonucleotide
cgcctgctctgacacccgagcttcgaaatcgcatgagcgaggtttcctgtaacgc

SEQ ID NO: 218157 - DNA, 55 bp, Artificial
  Synthetic oligonucleotide
cgccggccctaacatgaggagacttattttatcccgcttccacaggcggttgatg

SEQ ID NO: 218158 - DNA, 52 bp, Artificial
  Synthetic oligonucleotide
cgcccaaatccttaacgccccggtccatcctaagcccaagcccaccgctaag

SEQ ID NO: 218159 - DNA, 55 bp, Artificial
  Synthetic oligonucleotide
cgcaaagacgaccactgttcatgaacttggcctttatatgtcaggcgccaaacgc

SEQ ID NO: 218160 - DNA, 55 bp, Artificial
  Synthetic oligonucleotide
cgagcctaatccatttgcagtctatgtgcaagctggggcagtcggtggggacggc

SEQ ID NO: 218161 - DNA, 55 bp, Artificial
  Synthetic oligonucleotide
cgacatgcgccggcagaggtgagttcggggtcatggcacaacgtaggaactggaa

SEQ ID NO: 218162 - DNA, 55 bp, Artificial
  Synthetic oligonucleotide
cgacagcgaaacaaaaggcttctaccgctccatagggattgaagactggtcaagg

SEQ ID NO: 218163 - DNA, 55 bp, Artificial
  Synthetic oligonucleotide
ctagttgacctaacatgatgtttatcccaacgtctggaggtagtgagaccgatgc

SEQ ID NO: 218164 - DNA, 54 bp, Artificial
  Synthetic oligonucleotide
cctttccttgtacttagctggaaggtacagaagcacgaacaaagggtactcgaa

SEQ ID NO: 218165 - DNA, 55 bp, Artificial
  Synthetic oligonucleotide
ccttatatataacgccataggccaccggagaatagcgtcctccttcgatagtatg

SEQ ID NO: 218166 - DNA, 55 bp, Artificial
  Synthetic oligonucleotide
cctctgtggcggtcttagtgatacgatggccgttaatatcagcagaatggcgaat

SEQ ID NO: 218167 - DNA, 55 bp, Artificial
  Synthetic oligonucleotide
cctcggttcgagccaagtagaaggtgtgcgtattcgagaagttaaaactagtgaa

SEQ ID NO: 218168 - DNA, 55 bp, Artificial
  Synthetic oligonucleotide
cctcgctaatgcgtcggcatcaaaatgtaaccattgtggaggccagtgaacagat

SEQ ID NO: 218169 - DNA, 51 bp, Artificial
  Synthetic oligonucleotide
cctcctccgggttgggcccttacgacaacaggctgaaccaccccgtattcc

SEQ ID NO: 218170 - DNA, 55 bp, Artificial
  Synthetic oligonucleotide
cctccggtgagagttcgaagatgttcttaccgattcgttcataaggagatatgcc

SEQ ID NO: 218171 - DNA, 55 bp, Artificial
  Synthetic oligonucleotide
ccggttgggtacctcatgccaccggcactgagtgtttcataaacattgataagac

SEQ ID NO: 218172 - DNA, 55 bp, Artificial
  Synthetic oligonucleotide
ccggtccggaacgatgcacatcgcacctggggtacagttgataatcgtcagagca

SEQ ID NO: 218173 - DNA, 53 bp, Artificial
  Synthetic oligonucleotide
ccggtcagaaaggttgagcgggaatatgagcttaaaccgtactttacgcgtcg

SEQ ID NO: 218174 - DNA, 55 bp, Artificial
  Synthetic oligonucleotide
ctagctcgaggtttctaccccttacttgttcaatcgttgtgcgtctttgtggcgc

SEQ ID NO: 218175 - DNA, 52 bp, Artificial
  Synthetic oligonucleotide
ccggccctctaagcgggataaataaagggcctctgcaaaacttaactcggcc

SEQ ID NO: 218176 - DNA, 52 bp, Artificial
  Synthetic oligonucleotide
ccggccccagcaagtatgaaaacgataccctgacggtgttaaaccggacatt

SEQ ID NO: 218177 - DNA, 55 bp, Artificial
  Synthetic oligonucleotide
ccggccagaatcggcaatatatagtaagggtccttcacgctaaggttgggcaccc

SEQ ID NO: 218178 - DNA, 55 bp, Artificial
  Synthetic oligonucleotide
ccgctccgttgcaacgagctattcctccaaagtggcttttctcggcgatatgtcg

SEQ ID NO: 218179 - DNA, 53 bp, Artificial
  Synthetic oligonucleotide
ccgcctggacttcgaggggcggaaaatcaccgttggggcaatgcgtaatcccg

SEQ ID NO: 218180 - DNA, 55 bp, Artificial
  Synthetic oligonucleotide
ccctatgctttacgatgacggcgcttacagtatttcttcgtctaagatccggtcg

SEQ ID NO: 218181 - DNA, 55 bp, Artificial
  Synthetic oligonucleotide
cccggtttgcaatagcataacagcaccgatggggtacgactgtaagacactggcc

SEQ ID NO: 218182 - DNA, 55 bp, Artificial
  Synthetic oligonucleotide
ccccgataattataaccatggcggaagtcactgccatgcctcgcgaaaatctcat

SEQ ID NO: 218183 - DNA, 54 bp, Artificial
  Synthetic oligonucleotide
ccccgaacatagtaataggtccctagcgcatagggtgagctttccggacgtttg

SEQ ID NO: 218184 - DNA, 55 bp, Artificial
  Synthetic oligonucleotide
tagttttacagcggaagtaataccaaaggcgctttccagaaaaggcaacatgccg

SEQ ID NO: 218185 - DNA, 55 bp, Artificial
  Synthetic oligonucleotide
ctacatttagctactgcgcactaactatctggcaccgattaaaggaacactccgc

SEQ ID NO: 218186 - DNA, 55 bp, Artificial
  Synthetic oligonucleotide
tactgaagtgacaggagtgaaacgaatctactagcctagaaccgttctaccacac

SEQ ID NO: 218187 - DNA, 55 bp, Artificial
  Synthetic oligonucleotide
tacggacatttctagatttcgtcagagagtgtccataaagggaaccctttgcgga

SEQ ID NO: 218188 - DNA, 55 bp, Artificial
  Synthetic oligonucleotide
tacgattttggacgaagacaaccttaagtgatgaccctggttatggtttgaacac

SEQ ID NO: 218189 - DNA, 55 bp, Artificial
  Synthetic oligonucleotide
taagcgcattcttgggattctatctcctcctagtcgcttacactccttgccatgg

SEQ ID NO: 218190 - DNA, 55 bp, Artificial
  Synthetic oligonucleotide
gtttctgtaaaatggcccggcaatagtgacaacgatttactctatgcgggagcag

SEQ ID NO: 218191 - DNA, 55 bp, Artificial
  Synthetic oligonucleotide
gtttctaaccgggcaaaactggtttcttatgccatgagcagaggccttgtaagcg

SEQ ID NO: 218192 - DNA, 54 bp, Artificial
  Synthetic oligonucleotide
gtttaccgggccgctcagtccgggtgttataaggccggttggcagtacagacta

SEQ ID NO: 218193 - DNA, 55 bp, Artificial
  Synthetic oligonucleotide
aagaccagtggactttgctgctgatggtctctacctctgtggtttggctcatgga

SEQ ID NO: 218194 - DNA, 55 bp, Artificial
  Synthetic oligonucleotide
gttgatcagtcgtgtaagccgcatggtttcatggagcatatgattgtaatagcgg

SEQ ID NO: 218195 - DNA, 55 bp, Artificial
  Synthetic oligonucleotide
gttcaacgggtggtacgatcaccctgcaaattggggcaacctccgcttccgccga

SEQ ID NO: 218196 - DNA, 52 bp, Artificial
  Synthetic oligonucleotide
cgttttgcgtcggggttcccttgcccaccagcaaaggtccctcaacccgcaa

SEQ ID NO: 218197 - DNA, 55 bp, Artificial
  Synthetic oligonucleotide
gtgccctatgtgtatgacgattataccgaagaactgaaatcatggttgggagggc

SEQ ID NO: 218198 - DNA, 55 bp, Artificial
  Synthetic oligonucleotide
gtcttggcaacacctgtactgtacatggctccgacaaagtttaaaattgccgtca

SEQ ID NO: 218199 - DNA, 55 bp, Artificial
  Synthetic oligonucleotide
gtctagactgtcatacaggcggcagcaatccgaaggctccggtacacaaggcaga

SEQ ID NO: 218200 - DNA, 55 bp, Artificial
  Synthetic oligonucleotide
aagcaagggggtcagtggttgcctaatcagtatggcgggagggaaaatctggccg

SEQ ID NO: 218201 - DNA, 52 bp, Artificial
  Synthetic oligonucleotide
gtcccgtctcaaaagtaagtccgactttggtgttaatcggtatttgacttac

SEQ ID NO: 218202 - DNA, 55 bp, Artificial
  Synthetic oligonucleotide
gtattgcctggcgcctgccaaggatcaggtgcccatgtatttcggttactggtgc

SEQ ID NO: 218203 - DNA, 53 bp, Artificial
  Synthetic oligonucleotide
gtagggtttcgatcgcctttaacagatcccggttcaaacgagtaaaccaatca

SEQ ID NO: 218204 - DNA, 55 bp, Artificial
  Synthetic oligonucleotide
gtagccctcttgcatagtcttccctatctttggttttgggaactcgtgttgatct

SEQ ID NO: 218205 - DNA, 55 bp, Artificial
  Synthetic oligonucleotide
ggttttggcatgccccaggaggctgctcacgttaacagggttttctccgtcgtcc

SEQ ID NO: 218206 - DNA, 55 bp, Artificial
  Synthetic oligonucleotide
ggtttgaacagcaatcttaggtcagccgaatccaattgctaaaaccggatctgcg

SEQ ID NO: 218207 - DNA, 55 bp, Artificial
  Synthetic oligonucleotide
cgttgaaccacacggtatggtacatgagaaggcctactggaccagcgataaaacc

SEQ ID NO: 218208 - DNA, 55 bp, Artificial
  Synthetic oligonucleotide
ggtcttggacaccttatccgcagctccattagttaagacattcgtcggggtctcc

SEQ ID NO: 218209 - DNA, 54 bp, Artificial
  Synthetic oligonucleotide
ggtctgcgcacccggaaatctggtccttaccgttacgtggaccttcacttggtg

SEQ ID NO: 218210 - DNA, 55 bp, Artificial
  Synthetic oligonucleotide
ggtcaatgtatacaaccgctctgggtgcatagattgttgtaggagaaatctgacc

SEQ ID NO: 218211 - DNA, 55 bp, Artificial
  Synthetic oligonucleotide
ggtaggcttcggtgacatagtccataagggtctggtcggacatatccaccgcacg

SEQ ID NO: 218212 - DNA, 55 bp, Artificial
  Synthetic oligonucleotide
aaggcgttggaacctccaggtccgtgtcaagacttagtaggcgatctcccagccg

SEQ ID NO: 218213 - DNA, 55 bp, Artificial
  Synthetic oligonucleotide
ggtagcaataacttccgcaatggccaagcccgcctctacgtctccaccaacagta

SEQ ID NO: 218214 - DNA, 55 bp, Artificial
  Synthetic oligonucleotide
ggtagaaacctcgagctagtcaatctcggtcaggcaaattagttattgacaacgc

SEQ ID NO: 218215 - DNA, 55 bp, Artificial
  Synthetic oligonucleotide
tttataccatgcttcgggctccacaactaagtactctactactccgttgtccggg

SEQ ID NO: 218216 - DNA, 55 bp, Artificial
  Synthetic oligonucleotide
ttgacgcccgaaacgttttaaggttatgcgtcccatgtccggagcgtgtgtcagc

SEQ ID NO: 218217 - DNA, 55 bp, Artificial
  Synthetic oligonucleotide
aaaccgcccagctgccaattgccggtaccgctatacgaatccggggacaggctgt

SEQ ID NO: 218218 - DNA, 55 bp, Artificial
  Synthetic oligonucleotide
cgtccacggatcgcagagatagtcagtgctcccacggggcaagattcccctaaag

SEQ ID NO: 218219 - DNA, 55 bp, Artificial
  Synthetic oligonucleotide
ttgaccttatagtattgggcgaccgctttggctgcctccaattcccgttgatgcc

SEQ ID NO: 218220 - DNA, 55 bp, Artificial
  Synthetic oligonucleotide
ttagaagggcctctcacagaagccctggatcggcctaataagagcttccaaggag

SEQ ID NO: 218221 - DNA, 55 bp, Artificial
  Synthetic oligonucleotide
ttaattcctgacgcatggtacgatatacttgcgtactaactcttcgatacgcata

SEQ ID NO: 218222 - DNA, 55 bp, Artificial
  Synthetic oligonucleotide
ttaagcgggctatggctatcactttaagcgtgcgaagcgcactagcttgagagac

SEQ ID NO: 218223 - DNA, 55 bp, Artificial
  Synthetic oligonucleotide
tgttaagtacgcttttgggcatgggaacgactaaataggggtgaatgatggtgcg

SEQ ID NO: 218224 - DNA, 55 bp, Artificial
  Synthetic oligonucleotide
aaagtgcagcgttgtcctaaggtactgactaaagggagtataatatgccaagatt

SEQ ID NO: 218225 - DNA, 55 bp, Artificial
  Synthetic oligonucleotide
aaatagcgaaaacattgtaaatagcgttacgaggacgattctctgcttccatgtg

SEQ ID NO: 218226 - DNA, 55 bp, Artificial
  Synthetic oligonucleotide
tggccgttcttaaacttacaaaccctggcatagtaaagtcggcatgaagctgtgc

SEQ ID NO: 218227 - DNA, 55 bp, Artificial
  Synthetic oligonucleotide
tggcagtacgtctaaatacttaatgcccgtgtggatgattgcctctttggcagtc

SEQ ID NO: 218228 - DNA, 54 bp, Artificial
  Synthetic oligonucleotide
aaatttatccgcgtatccccgcgtaaagcccgcatggtagtcgatttgattcgg

SEQ ID NO: 218229 - DNA, 54 bp, Artificial
  Synthetic oligonucleotide
cgtcagaggtaaagaatttggccggataaacaggaaccttcactccgagcttag

SEQ ID NO: 218230 - DNA, 55 bp, Artificial
  Synthetic oligonucleotide
tggcagcggtggctgtggttaaggctttgtatcgtaccctcggtcttagggcaca

SEQ ID NO: 218231 - DNA, 55 bp, Artificial
  Synthetic oligonucleotide
tgcctcaagaggaattaatgaccgcggcgaaagaaatgggtgctccttatgacct

SEQ ID NO: 218232 - DNA, 55 bp, Artificial
  Synthetic oligonucleotide
tgagacgcttcgatgctctcaatccctgcccggataatttcacagatatacgccc

SEQ ID NO: 218233 - DNA, 55 bp, Artificial
  Synthetic oligonucleotide
tgaatcatccaggatataatcgtcctgaccttcggtattcttgtggactttcccc

SEQ ID NO: 218234 - DNA, 55 bp, Artificial
  Synthetic oligonucleotide
tgaagcttcggaatctgccccgtggtctgaaaccccgcggtctcaagttggtcgg

SEQ ID NO: 218235 - DNA, 55 bp, Artificial
  Synthetic oligonucleotide
tctgaagtggagggtgtaaccggcatgagtggaggtcttgtaggagatcttgcac

SEQ ID NO: 218236 - DNA, 55 bp, Artificial
  Synthetic oligonucleotide
tcggtcctaaggatggctctctccgtttggaatcgaccgtctttgtccagaaccg

SEQ ID NO: 218237 - DNA, 55 bp, Artificial
  Synthetic oligonucleotide
tcgctcacggggaccacctgtcctgaaatagtactcgcccggggtttgcacgtgc

SEQ ID NO: 218238 - DNA, 55 bp, Artificial
  Synthetic oligonucleotide
tattccctcgcttcacgacatagtcattttagaaatctacggcgggagggatcat

SEQ ID NO: 218239 - DNA, 55 bp, Artificial
  Synthetic oligonucleotide
tatgttctatgatgtacggaaagacaaggcagtgtttcattcctttctgacccgc

SEQ ID NO: 218240 - DNA, 54 bp, Artificial
  Synthetic oligonucleotide
cgtatgttttgctttcgacaccgcgaagtatttagcctagccggaaaattagcg

SEQ ID NO: 218241 - DNA, 55 bp, Artificial
  Synthetic oligonucleotide
tatcgcaggatgggtatattgtgactaatgagcacgtaatagacggggccgagca

SEQ ID NO: 218242 - DNA, 55 bp, Artificial
  Synthetic oligonucleotide
tatcctgcatatgggccttaatacagtcgttaggacagccggtaatggctatttt

SEQ ID NO: 218243 - DNA, 55 bp, Artificial
  Synthetic oligonucleotide
tatcctcattagagatctccactaatagcgttgaactcggtctatctcccgcaac

SEQ ID NO: 218244 - DNA, 55 bp, Artificial
  Synthetic oligonucleotide
tatcacacccataccgatgaatcttatgtaccgacagacgggaaggccgctatcc

SEQ ID NO: 218245 - DNA, 55 bp, Artificial
  Synthetic oligonucleotide
tataccgttcctatgagaactttagacagcttgtcccaaattcgtcaccggtgac

SEQ ID NO: 218246 - DNA, 55 bp, Artificial
  Synthetic oligonucleotide
ggcgctcaaaattgggagcgtctgtcaaacataatattgtatactagtctggcag

SEQ ID NO: 218247 - DNA, 55 bp, Artificial
  Synthetic oligonucleotide
ggcgaacttagattctcccttccgagacgggtgcatctcttcagtggtgaagacc

SEQ ID NO: 218248 - DNA, 55 bp, Artificial
  Synthetic oligonucleotide
aatcttaactgtattcggctgcatcagtacaacccggccacgactgtcagttcgc

SEQ ID NO: 218249 - DNA, 55 bp, Artificial
  Synthetic oligonucleotide
ggccttacgggcctggtttcttataaggtcttgagccagctgaaaaggtccagcc

SEQ ID NO: 218250 - DNA, 55 bp, Artificial
  Synthetic oligonucleotide
ggcctacgggcagcgggaggatctaccctatatcgaggaacacccgttggaaggc

SEQ ID NO: 218251 - DNA, 55 bp, Artificial
  Synthetic oligonucleotide
cggtgcctgcgctgtgatttatgtatagcctgtggccaatgtgtggacagttgcc

SEQ ID NO: 218252 - DNA, 55 bp, Artificial
  Synthetic oligonucleotide
ggccgtactgaatctcactaatgtgggtttgttcgcctggtgcacagtgggtacc

SEQ ID NO: 218253 - DNA, 55 bp, Artificial
  Synthetic oligonucleotide
ggcaatgagaaggcgtgcgtatcgaatcaccggattgtatggcgtcctatcgggg

SEQ ID NO: 218254 - DNA, 55 bp, Artificial
  Synthetic oligonucleotide
ggagttgtctggaaccgcctaccaaccaccccaagaaggcgacctgatcctctca

SEQ ID NO: 218255 - DNA, 55 bp, Artificial
  Synthetic oligonucleotide
ggagtgaaacacgtcagttccactgtttccgaaggagtttctcagacggtggtcc

SEQ ID NO: 218256 - DNA, 55 bp, Artificial
  Synthetic oligonucleotide
acaccccatttattcgtaattgtcatgccaggtcccggtgctaagggtagatcca

SEQ ID NO: 218257 - DNA, 55 bp, Artificial
  Synthetic oligonucleotide
ggaggtcggtcatcggaggtcagaagtcagattaagaagcaattggccagaggcc

SEQ ID NO: 218258 - DNA, 55 bp, Artificial
  Synthetic oligonucleotide
ggaggcacaccgctccgaatttcgggttgcgaagatggctgaggtgctccaggta

SEQ ID NO: 218259 - DNA, 55 bp, Artificial
  Synthetic oligonucleotide
ggaggagtacgaatactatgacccaggcacgggcaagattgttaatcccgagaac

SEQ ID NO: 218260 - DNA, 55 bp, Artificial
  Synthetic oligonucleotide
ggagagctctgcctcaaaagggatctcggatactctgatatcccaaaccacggca

SEQ ID NO: 218261 - DNA, 55 bp, Artificial
  Synthetic oligonucleotide
ggactttatccgggctaatcaccgttgcagcggatacatcactgctaaccccgac

SEQ ID NO: 218262 - DNA, 55 bp, Artificial
  Synthetic oligonucleotide
ctttatggggctgcatatcgtgtcccaaaagatagcggggacacagatccgtaca

SEQ ID NO: 218263 - DNA, 55 bp, Artificial
  Synthetic oligonucleotide
cggtgaccactgctggtcagccgtggaaattgctgccgaagactatgtacaactt

SEQ ID NO: 218264 - DNA, 52 bp, Artificial
  Synthetic oligonucleotide
ggaatgtattcaaagttggggaattcggccaccacagtccggtagtccgggg

SEQ ID NO: 218265 - DNA, 53 bp, Artificial
  Synthetic oligonucleotide
ggaatctcgacgcgcaacttttgttaccgtttccccgagcgaatctaaaacgc

SEQ ID NO: 218266 - DNA, 55 bp, Artificial
  Synthetic oligonucleotide
ggaatacatcataaggagccacagtcctcgacccattgaagcatccgatgtgggg

SEQ ID NO: 218267 - DNA, 55 bp, Artificial
  Synthetic oligonucleotide
ggaaggcacgggttcggctgagattactcttgtaaagagttgaaccgcagtactg

SEQ ID NO: 218268 - DNA, 52 bp, Artificial
  Synthetic oligonucleotide
ggaacaacatatggggcagacccgtttaaataattaaccacttcttgtaggt

SEQ ID NO: 218269 - DNA, 55 bp, Artificial
  Synthetic oligonucleotide
gctggaggataatttgttccgattgctggccgaccaagaggagcaggtactttgg

SEQ ID NO: 218270 - DNA, 55 bp, Artificial
  Synthetic oligonucleotide
gcgggcatcattcctttatgaagcgcggaaagctgaaactgcggattcccaaccc

SEQ ID NO: 218271 - DNA, 55 bp, Artificial
  Synthetic oligonucleotide
gcgggcatagttcacaaatccgtcacttaggcttgcttcggcctcagtctccctg

SEQ ID NO: 218272 - DNA, 55 bp, Artificial
  Synthetic oligonucleotide
gcggcttcagcacaagctgttgaggagcacctgactaaccgcaagattggaggta

SEQ ID NO: 218273 - DNA, 53 bp, Artificial
  Synthetic oligonucleotide
gcggatttccccgtaaccatactcccggcatacctgccgggttagttcctcca

SEQ ID NO: 218274 - DNA, 54 bp, Artificial
  Synthetic oligonucleotide
cggtgaaggctacccaaaagggcttaactccgccggcatccacgagttttcaca

SEQ ID NO: 218275 - DNA, 55 bp, Artificial
  Synthetic oligonucleotide
gcgccgtagtgaacggtctgcggcatagtgaatgcgtactgcacaaccggcagga

SEQ ID NO: 218276 - DNA, 55 bp, Artificial
  Synthetic oligonucleotide
gcgcatagccctgataccattacccggggagtgcatgggacaccaatcgttggag

SEQ ID NO: 218277 - DNA, 55 bp, Artificial
  Synthetic oligonucleotide
gcgcacccacatatagtgtattgttaggccgttcctctaactgttcaactatgac

SEQ ID NO: 218278 - DNA, 55 bp, Artificial
  Synthetic oligonucleotide
gcgacacaggcaccgcactctgtacaggtctcatagtcaattaccgggtaccagt

SEQ ID NO: 218279 - DNA, 55 bp, Artificial
  Synthetic oligonucleotide
gcctcccctaaagacttcggcgcactcaggagcgaatcccggacaagggaatccg

SEQ ID NO: 218280 - DNA, 55 bp, Artificial
  Synthetic oligonucleotide
gggcggaagggattgatcccgcatacttcccgaagattaaggatgaatggcagcg

SEQ ID NO: 218281 - DNA, 55 bp, Artificial
  Synthetic oligonucleotide
gggcacgagagcctttaggcgatagcgatagcgtaagccttagttacccttatgc

SEQ ID NO: 218282 - DNA, 55 bp, Artificial
  Synthetic oligonucleotide
aagtgttctcctgagttgatcaagataatccccgcaaagccagctattaggccaa

SEQ ID NO: 218283 - DNA, 53 bp, Artificial
  Synthetic oligonucleotide
ggggtatttatccgggctccctacctggaatctgtcgggtccgatgtggaagt

SEQ ID NO: 218284 - DNA, 55 bp, Artificial
  Synthetic oligonucleotide
aagttaacgagccaagtggcagctccaatcattgccgaaggggatccgattgggg

SEQ ID NO: 218285 - DNA, 55 bp, Artificial
  Synthetic oligonucleotide
cggtcggatcccggcgctggaattggaaatctatgaccgtaagcttataaccatg

SEQ ID NO: 218286 - DNA, 54 bp, Artificial
  Synthetic oligonucleotide
gggtaaaagagggcgaggaagttgtaattgcaaaagccggcacgccagtagccc

SEQ ID NO: 218287 - DNA, 55 bp, Artificial
  Synthetic oligonucleotide
gggcaaccagtactacactttagccggtccctgtactgtaatgtgtttattggag

SEQ ID NO: 218288 - DNA, 55 bp, Artificial
  Synthetic oligonucleotide
gggatgacgccatgcgggctcatttaaaggtttgccgggagaaactgccctacca

SEQ ID NO: 218289 - DNA, 55 bp, Artificial
  Synthetic oligonucleotide
ggtaatatctgtattttgccatacgacattcatcgaccttctaagcgagtggtcg

SEQ ID NO: 218290 - DNA, 55 bp, Artificial
  Synthetic oligonucleotide
ggtaatccgtcagtcctggagtagccattcagacgtggagatagaatgccagcca

SEQ ID NO: 218291 - DNA, 55 bp, Artificial
  Synthetic oligonucleotide
ggtaccatgagtttggcgaatatccggtattactactggacgatgtcttattcga

SEQ ID NO: 218292 - DNA, 52 bp, Artificial
  Synthetic oligonucleotide
aaggggttaggttaccccactcaattaactgtttcacagacggccccagcac

SEQ ID NO: 218293 - DNA, 55 bp, Artificial
  Synthetic oligonucleotide
ggctccggtcaagtttcccatggctagtgtgtccttgccacgacgaatccaaagg

SEQ ID NO: 218294 - DNA, 52 bp, Artificial
  Synthetic oligonucleotide
aaaaccacctcgatgggttttaagcagtacactaaacatcccttacagggaa

SEQ ID NO: 218295 - DNA, 54 bp, Artificial
  Synthetic oligonucleotide
tggattatgatgcagccgccgagttaaggtacggggcagacttcccaccccggg

SEQ ID NO: 218296 - DNA, 55 bp, Artificial
  Synthetic oligonucleotide
cggctttggtgcgtaaaacacgatttatgctttgccgttagacccgcataagctg

SEQ ID NO: 218297 - DNA, 54 bp, Artificial
  Synthetic oligonucleotide
tggcaagagggccgaaatttctccggagttgtgctcccaatgtggcacctgtga

SEQ ID NO: 218298 - DNA, 54 bp, Artificial
  Synthetic oligonucleotide
catgggacgggccatctgttacggcggccgggatctaaccccactacggatagg

SEQ ID NO: 218299 - DNA, 54 bp, Artificial
  Synthetic oligonucleotide
ttggtaatcccctctgcaaagtaatgccgtccactgggtttattccccatgtcc

SEQ ID NO: 218300 - DNA, 54 bp, Artificial
  Synthetic oligonucleotide
agtgcttaagtctggcgtcatacaagtcgcatgagtaaccacttagtaatacgg

SEQ ID NO: 218301 - DNA, 54 bp, Artificial
  Synthetic oligonucleotide
aaatgaagcgctgtcttacggtaaaacgggcggggctcttaaccggctgatatc

SEQ ID NO: 218302 - DNA, 54 bp, Artificial
  Synthetic oligonucleotide
ataacccggtggttaattagggccagcatatattcacgccagatgggagctgcc

SEQ ID NO: 218303 - DNA, 54 bp, Artificial
  Synthetic oligonucleotide
cacgtacggacgcacctttcgggcctgttggccttcatactgctggtcaaggcc

SEQ ID NO: 218304 - DNA, 54 bp, Artificial
  Synthetic oligonucleotide
ctaatggaaatgtccgagggcgatttgcgtcttatcgctaccgatacacaccgt

SEQ ID NO: 218305 - DNA, 54 bp, Artificial
  Synthetic oligonucleotide
tgttattccccgacggtaccatccaacacgccggagtagttgtggcggctgcac

SEQ ID NO: 218306 - DNA, 53 bp, Artificial
  Synthetic oligonucleotide
atacgtgctttccgggttttgaccggtgaccctctgtgatcccctgatttctt

SEQ ID NO: 218307 - DNA, 55 bp, Artificial
  Synthetic oligonucleotide
cggctgcaacacagtacctaaatcaccgttccaacatgcgtaaccgctatcttcg

SEQ ID NO: 218308 - DNA, 54 bp, Artificial
  Synthetic oligonucleotide
ttaacctctacaggattagagaagctgtccactcccgtaagtgtaaattttctc

SEQ ID NO: 218309 - DNA, 54 bp, Artificial
  Synthetic oligonucleotide
atgacctccgtaattcttccgatttcctgggatcgatcacccagtctaacaacc

SEQ ID NO: 218310 - DNA, 54 bp, Artificial
  Synthetic oligonucleotide
atcaacaaccaggatgcagcatgtgccactacgtaagcaggcagaacgccgcag

SEQ ID NO: 218311 - DNA, 54 bp, Artificial
  Synthetic oligonucleotide
gacgccgccaagccttggctaccaggcttcgccaccgtatcccataaggtgctg

SEQ ID NO: 218312 - DNA, 54 bp, Artificial
  Synthetic oligonucleotide
aatggtctgggccgaagccttaagacctatcagcaccccgttttgttgtaacat

SEQ ID NO: 218313 - DNA, 54 bp, Artificial
  Synthetic oligonucleotide
aagttcacgtaggtagtagagtttggcacggcgtacgataccgcggcgtattac

SEQ ID NO: 218314 - DNA, 54 bp, Artificial
  Synthetic oligonucleotide
cttcggccccaatttgcgtacaattactgagcataataaccggtgtgggagttt

SEQ ID NO: 218315 - DNA, 54 bp, Artificial
  Synthetic oligonucleotide
tagggacagccggtatagggtgcacatcacctttgccgttacagcccccgtttt

SEQ ID NO: 218316 - DNA, 52 bp, Artificial
  Synthetic oligonucleotide
tccggttcggttgtggaggtaactacctggttaaaatgccggactgcctccg

SEQ ID NO: 218317 - DNA, 54 bp, Artificial
  Synthetic oligonucleotide
tcgcaaatcctctgttatatgatgccgtacaccccgcgaagccacacttgaact

SEQ ID NO: 218318 - DNA, 55 bp, Artificial
  Synthetic oligonucleotide
cggctctgtcaatgtgcccctagcaattatgcccagggtacctgtcatatgccgc

SEQ ID NO: 218319 - DNA, 54 bp, Artificial
  Synthetic oligonucleotide
tactccgttatgcagtgctaactcgaaaatcttaggcaggttgaaatacccggt

SEQ ID NO: 218320 - DNA, 54 bp, Artificial
  Synthetic oligonucleotide
tctatattacgtacatattcaggctggcagattccccgtctgagactatgttac

SEQ ID NO: 218321 - DNA, 54 bp, Artificial
  Synthetic oligonucleotide
gggccatgccgcgttcctatgcatcgaaagattgcgagaactggtgcaagccgg

SEQ ID NO: 218322 - DNA, 54 bp, Artificial
  Synthetic oligonucleotide
gtacctgaacggttaggcgatacggtattaccgctggttgatacagtctccacc

SEQ ID NO: 218323 - DNA, 54 bp, Artificial
  Synthetic oligonucleotide
gtacctctatcttgcttggtaacggtggcttcacccccaaggggtcctgggcta

SEQ ID NO: 218324 - DNA, 54 bp, Artificial
  Synthetic oligonucleotide
tgccgagagagcttttgatttagcaaggactcgccttaatagtaattcgctgca

SEQ ID NO: 218325 - DNA, 53 bp, Artificial
  Synthetic oligonucleotide
ggcgtatgcagccggccgatgttatttaacgtcctggggttcatggactgggg

SEQ ID NO: 218326 - DNA, 53 bp, Artificial
  Synthetic oligonucleotide
cgatagtgagctcgcccaacgcgtctatgtccccgcagtaattcctggagcgg

SEQ ID NO: 218327 - DNA, 53 bp, Artificial
  Synthetic oligonucleotide
agtaccggcatacgcagaccctgtcacggtaaccataataagggtaacaatca

SEQ ID NO: 218328 - DNA, 53 bp, Artificial
  Synthetic oligonucleotide
aggctactaagggcgaagtaactatcgtttctgtaggggcagatgtagaacaa

SEQ ID NO: 218329 - DNA, 55 bp, Artificial
  Synthetic oligonucleotide
cggcggaccatgccccgtgattcagagacgaccatggacgggagtcccttaaacg

SEQ ID NO: 218330 - DNA, 53 bp, Artificial
  Synthetic oligonucleotide
ctttgttcatcataggccggagagaccttaaatcctaaccgttcaaatagcct

SEQ ID NO: 218331 - DNA, 53 bp, Artificial
  Synthetic oligonucleotide
ggccgcccattttcaatgacacagtcgatagctgcacagtggtcttttacatg

SEQ ID NO: 218332 - DNA, 51 bp, Artificial
  Synthetic oligonucleotide
aggcccgtcgtaaggtggccgtggctaaaaacgtactccaacaacttggcg

SEQ ID NO: 218333 - DNA, 53 bp, Artificial
  Synthetic oligonucleotide
acgtgtagcttagcagggacacctatgcaggtcttacttgatcagtataaagt

SEQ ID NO: 218334 - DNA, 53 bp, Artificial
  Synthetic oligonucleotide
attttggaactgatctgcaaaggttaccactgctgttgcgttgagggagtccg

SEQ ID NO: 218335 - DNA, 53 bp, Artificial
  Synthetic oligonucleotide
ttacaagttctgtgggaccaggtgcaaatgtcatagctataccatatggcgtc

SEQ ID NO: 218336 - DNA, 53 bp, Artificial
  Synthetic oligonucleotide
cttatcgaagtatggagttttcagtggtcaataatcggctggtcagtcacgcc

SEQ ID NO: 218337 - DNA, 53 bp, Artificial
  Synthetic oligonucleotide
caactcctttaatagtatgactgcccgctgacaatgttccaatactgtagtta

SEQ ID NO: 218338 - DNA, 53 bp, Artificial
  Synthetic oligonucleotide
ccaattccacagtcgtattttctcgaagtatcatcgcccgggatcgacaggcc

SEQ ID NO: 218339 - DNA, 53 bp, Artificial
  Synthetic oligonucleotide
ggggccggggaggtggattatgatgcagccgccgagttaaggtacggggcaga

SEQ ID NO: 218340 - DNA, 55 bp, Artificial
  Synthetic oligonucleotide
cggccgttatagtttatcactcctgcccggtacagtcctgccacggcgtccagta

SEQ ID NO: 218341 - DNA, 53 bp, Artificial
  Synthetic oligonucleotide
agctgtactaagtgtacgccagcactgtcagacgcgttcaccgctgataatat

SEQ ID NO: 218342 - DNA, 52 bp, Artificial
  Synthetic oligonucleotide
ccgctgattggaccggttttggcagcgcaatttggttacctacccggtaccc

SEQ ID NO: 218343 - DNA, 53 bp, Artificial
  Synthetic oligonucleotide
tggtgcgggctgcaaacatatagaccatgttagcacccagttgccctatgcca

SEQ ID NO: 218344 - DNA, 53 bp, Artificial
  Synthetic oligonucleotide
ggttcaacagccatggttgtaacgggctgttcaaaggcatatgaagcggggta

SEQ ID NO: 218345 - DNA, 52 bp, Artificial
  Synthetic oligonucleotide
ccagtatccaaccgagcttgttgctaactggttctacccggttgaggcgact

SEQ ID NO: 218346 - DNA, 52 bp, Artificial
  Synthetic oligonucleotide
ttttgcacaggtctggggaacattctccttagccacttgagaattagggtta

SEQ ID NO: 218347 - DNA, 51 bp, Artificial
  Synthetic oligonucleotide
taaactccgggaaagattagccactaaccgggcggcattcaacccgttaac

SEQ ID NO: 218348 - DNA, 52 bp, Artificial
  Synthetic oligonucleotide
ttgccccaccagtgtgttgtaccaccaccagtccgtcagtgaaggcagggct

SEQ ID NO: 218349 - DNA, 52 bp, Artificial
  Synthetic oligonucleotide
cccgcaagctgttagtccgatcctggtaatattcttgcagtgcccggtcccc

SEQ ID NO: 218350 - DNA, 52 bp, Artificial
  Synthetic oligonucleotide
gcggttcaaaggaaataaatcggaccttcgcattcactttccgcaaggaatc

SEQ ID NO: 218351 - DNA, 55 bp, Artificial
  Synthetic oligonucleotide
cggcataacgggtaggcgccaagggagacatatagggtacgccaaagctttccag

SEQ ID NO: 218352 - DNA, 52 bp, Artificial
  Synthetic oligonucleotide
cttggaacgatgctacagaatattgtaagaatgtccctctatacagatccct

SEQ ID NO: 218353 - DNA, 52 bp, Artificial
  Synthetic oligonucleotide
ccgcgaaatacggtgtaatagttcgcagcgggcataagtcaggattgttatt

SEQ ID NO: 218354 - DNA, 52 bp, Artificial
  Synthetic oligonucleotide
cgtgacaaaacagggccttggtttagacgaggtacaaaaggtcggtgttata

SEQ ID NO: 218355 - DNA, 52 bp, Artificial
  Synthetic oligonucleotide
cgggagtaatggccactagaccagccacagcacccgatacacagcccaggac

SEQ ID NO: 218356 - DNA, 52 bp, Artificial
  Synthetic oligonucleotide
atggctggcgttgaggcgtacccgctggggatatgaggttaccgtgatcggg

SEQ ID NO: 218357 - DNA, 52 bp, Artificial
  Synthetic oligonucleotide
attatccttccacgcagatacgtaccactggttaacactactctcccggatt

SEQ ID NO: 218358 - DNA, 52 bp, Artificial
  Synthetic oligonucleotide
ttgaacggcaatccggttcttgctttaacaatagaccttcgcccagcttggg

SEQ ID NO: 218359 - DNA, 52 bp, Artificial
  Synthetic oligonucleotide
ggtatatgtcagtggcgcggcgggacagaagatggcggtcacacttttgggc

SEQ ID NO: 218360 - DNA, 52 bp, Artificial
  Synthetic oligonucleotide
caacaacattgcctagaatggacgccatgctccgatccctacaacatcgttc

SEQ ID NO: 218361 - DNA, 52 bp, Artificial
  Synthetic oligonucleotide
agccacccgcgagaatagcctcccgcaggcgattataaaccttatcgcgcac

SEQ ID NO: 218362 - DNA, 52 bp, Artificial
  Synthetic oligonucleotide
cggcaaaagcccgaaaggaagaaagtttgtcgccacgaaagtccctaatggc

SEQ ID NO: 218363 - DNA, 52 bp, Artificial
  Synthetic oligonucleotide
aggaatcataacccaggaaatgagctaaatccggagtaactgcctgtatctg

SEQ ID NO: 218364 - DNA, 52 bp, Artificial
  Synthetic oligonucleotide
actgcgttactcttgtaacggttaaaccgcgtgacgttgtcgatatcgggcc

SEQ ID NO: 218365 - DNA, 52 bp, Artificial
  Synthetic oligonucleotide
aaggtcctgggaacaatatctaataacggaaacaacaagcgagcggagaggt

SEQ ID NO: 218366 - DNA, 52 bp, Artificial
  Synthetic oligonucleotide
aaggtacaatgtaccacccgggcagataacgcgctccctgacgcatttagag

SEQ ID NO: 218367 - DNA, 51 bp, Artificial
  Synthetic oligonucleotide
gggaaggaaaccgggtagaagtggcccaaccggataactgtgtaggatgcg

SEQ ID NO: 218368 - DNA, 51 bp, Artificial
  Synthetic oligonucleotide
gcggcattcggcatagtcggaattgtaatcatgatggttatcccggtcccg

SEQ ID NO: 218369 - DNA, 51 bp, Artificial
  Synthetic oligonucleotide
tcgcccgtaggctgcttccccaacataaatgaagtagccgcaataaagtcg

SEQ ID NO: 218370 - DNA, 51 bp, Artificial
  Synthetic oligonucleotide
tcctaaagtgcatccgtcacccggagattcccggttatattgattgcttcc

SEQ ID NO: 218371 - DNA, 51 bp, Artificial
  Synthetic oligonucleotide
tccgcagtttaagatgaccgagccgagaatttattacggagaacttacgaa

SEQ ID NO: 218372 - DNA, 51 bp, Artificial
  Synthetic oligonucleotide
tccagtagtttctccattgataccacggttcaacatttgatacccggtact

SEQ ID NO: 218373 - DNA, 52 bp, Artificial
  Synthetic oligonucleotide
cttaatccgaatcactacccttttcaccgtgtgccgttttaggaacgtgaac

SEQ ID NO: 218374 - DNA, 55 bp, Artificial
  Synthetic oligonucleotide
actgtgagcaacccaacgacaaacggatttacagtggcgatgagtccagccctag

SEQ ID NO: 218375 - DNA, 51 bp, Artificial
  Synthetic oligonucleotide
agcttgacggagtacatgtctcactggcctttctttggggtcggctgttag

SEQ ID NO: 218376 - DNA, 51 bp, Artificial
  Synthetic oligonucleotide
cccgtagttctgccgatcggtgcaatcacgtctttcctgggagctccgtta

SEQ ID NO: 218377 - DNA, 51 bp, Artificial
  Synthetic oligonucleotide
gaacgggaacttatcatacgaaccctaaagcaggtcaatggcaatcgatca

SEQ ID NO: 218378 - DNA, 51 bp, Artificial
  Synthetic oligonucleotide
gcacttaggacattttgcccagagaccatccggaagttctttcttcacagg

SEQ ID NO: 218379 - DNA, 51 bp, Artificial
  Synthetic oligonucleotide
aactcctgtggctaaacgtcccaaggctatcaggtgttcggattgtctcag

SEQ ID NO: 218380 - DNA, 51 bp, Artificial
  Synthetic oligonucleotide
aagacggcgcgggggaacggagccacaggttaacatcaaggtactacccgg

SEQ ID NO: 218381 - DNA, 51 bp, Artificial
  Synthetic oligonucleotide
acttccgcaccccttgacctggggtcatacaatactatcggtttcccgtga

SEQ ID NO: 218382 - DNA, 51 bp, Artificial
  Synthetic oligonucleotide
agaaccttgttcaaggagtaaccacagcccaacggggtgtatcagccaaaa

SEQ ID NO: 218383 - DNA, 51 bp, Artificial
  Synthetic oligonucleotide
aaagggcagtcgtgctgtccagtggcggatatgaatataatctccccatgc

SEQ ID NO: 218384 - DNA, 51 bp, Artificial
  Synthetic oligonucleotide
ttgtcagctcgacccctatcagtccttggacatccccgattatggccaaca

SEQ ID NO: 218385 - DNA, 55 bp, Artificial
  Synthetic oligonucleotide
cggaggagtattatcaaagggtcatcaatttgcccatatgtccggatatggatcg

SEQ ID NO: 218386 - DNA, 51 bp, Artificial
  Synthetic oligonucleotide
ccagccgaatattcggtgcgagacggttcccaggaaattgggacattaagt

SEQ ID NO: 218387 - DNA, 50 bp, Artificial
  Synthetic oligonucleotide
acagacggtgcaaccggtcccacaggtccgactggtactgcaggtacaga

SEQ ID NO: 218388 - DNA, 50 bp, Artificial
  Synthetic oligonucleotide
accccggcgcacgtccgtaccccgcactataaccgtatatgttcccctgg

SEQ ID NO: 218389 - DNA, 50 bp, Artificial
  Synthetic oligonucleotide
accccggtaaagcccagcctggttcctgtcccgacaatgccgggacccat

SEQ ID NO: 218390 - DNA, 50 bp, Artificial
  Synthetic oligonucleotide
acccgaggaccgggggcaaagcccgttggagacagcggctaatgcataaa

SEQ ID NO: 218391 - DNA, 50 bp, Artificial
  Synthetic oligonucleotide
acccgcggggtcttatccgaaggccggctggttagctggggatccctaaa

SEQ ID NO: 218392 - DNA, 50 bp, Artificial
  Synthetic oligonucleotide
acagaccggaacttaattcccaccagagccgcctattattgtgtttgggg

SEQ ID NO: 218393 - DNA, 50 bp, Artificial
  Synthetic oligonucleotide
accgcccgacggctacctggctggcgtaaggcaactctgttccagatacg

SEQ ID NO: 218394 - DNA, 48 bp, Artificial
  Synthetic oligonucleotide
acccgggtaccgccttaacagaacccggtcgggaataccacggcacgg

SEQ ID NO: 218395 - DNA, 50 bp, Artificial
  Synthetic oligonucleotide
acacgggttaacgccttggcaacagcccttaacgtccagcccccttccgc

SEQ ID NO: 218396 - DNA, 55 bp, Artificial
  Synthetic oligonucleotide
acttccctggtaaacttcggtgcactgacgggcttcctgctactacacatctcgg

SEQ ID NO: 218397 - DNA, 50 bp, Artificial
  Synthetic oligonucleotide
accgccaaaggtaccggctgtacggtcagcggagtttgcggcaaaaagcc

SEQ ID NO: 218398 - DNA, 50 bp, Artificial
  Synthetic oligonucleotide
acacgggcagttgcggggctgcataggcacaattctgccgactacggaga

SEQ ID NO: 218399 - DNA, 50 bp, Artificial
  Synthetic oligonucleotide
acccgttgaccagacagcgtatagctcaggtgctgccgacaggcgtgcgg

SEQ ID NO: 218400 - DNA, 50 bp, Artificial
  Synthetic oligonucleotide
accctctgttaggcggcggaccatgccccgtgattcagagacgaccatgg

SEQ ID NO: 218401 - DNA, 50 bp, Artificial
  Synthetic oligonucleotide
accctgggcccattcatagcatcgcccagcttgataagcgcgccgtatgc

SEQ ID NO: 218402 - DNA, 50 bp, Artificial
  Synthetic oligonucleotide
accgaagttacctgcccgcgaccaacccggacacgtaattccaccctgcc

SEQ ID NO: 218403 - DNA, 50 bp, Artificial
  Synthetic oligonucleotide
acacggaaaggctgtttggctgtacggagcagcgggccactttgatcgga

SEQ ID NO: 218404 - DNA, 50 bp, Artificial
  Synthetic oligonucleotide
accgacgcttcacggaactccagacccaatcccccggccaattccccaat

SEQ ID NO: 218405 - DNA, 50 bp, Artificial
  Synthetic oligonucleotide
accgactcccggcacccgtcaagggaacatttgggctcgctcgaacccca

SEQ ID NO: 218406 - DNA, 50 bp, Artificial
  Synthetic oligonucleotide
accaaccagcaatccctccccatacggcgccacttaatccacccgccaga

SEQ ID NO: 218407 - DNA, 55 bp, Artificial
  Synthetic oligonucleotide
gccgtaacagtatttagaaggcgggctgtacggtgagattcttctcggaaacagt

SEQ ID NO: 218408 - DNA, 50 bp, Artificial
  Synthetic oligonucleotide
accaatccctgcccgggccaaactttccaccacgtaggacccaacccctc

SEQ ID NO: 218409 - DNA, 50 bp, Artificial
  Synthetic oligonucleotide
acatcggatgccacgtaagccgccgcaggtggtttgatgagggcccccgg

SEQ ID NO: 218410 - DNA, 50 bp, Artificial
  Synthetic oligonucleotide
accacgggggtttcgttcaggtaatgctgttcgccgtgccatggggactc

SEQ ID NO: 218411 - DNA, 50 bp, Artificial
  Synthetic oligonucleotide
acaggtcctaccggtactgcaggagtagacggtgcaacaggccccacggg

SEQ ID NO: 218412 - DNA, 50 bp, Artificial
  Synthetic oligonucleotide
accactcactccagtgctccgcgccgacagcacttactgcttgcttcggg

SEQ ID NO: 218413 - DNA, 50 bp, Artificial
  Synthetic oligonucleotide
accactggctccgctaacccgcgccggcttgtgggcttttatcgcctctc

SEQ ID NO: 218414 - DNA, 50 bp, Artificial
  Synthetic oligonucleotide
accagacagcgtatagctcaggtgctgccgacaggcgtgcgggctatcga

SEQ ID NO: 218415 - DNA, 50 bp, Artificial
  Synthetic oligonucleotide
accagcccacgtctcggtggaatgaaaagccgaccacactcggtcccacg

SEQ ID NO: 218416 - DNA, 50 bp, Artificial
  Synthetic oligonucleotide
accaggtcttctactgctacaccctggctccgggcgaagcccaaagcagc

SEQ ID NO: 218417 - DNA, 50 bp, Artificial
  Synthetic oligonucleotide
accagttcagctcccgttcgcaagcgtagtgtgctgctgtcaaagcggga

SEQ ID NO: 218418 - DNA, 55 bp, Artificial
  Synthetic oligonucleotide
gccggctctcacgcggtattcagcttaccggcttattcattcagcctgcccgtgc

SEQ ID NO: 218419 - DNA, 50 bp, Artificial
  Synthetic oligonucleotide
acaggtccgactggtactgcaggtacagacggtgcaaccggtcccacagg

SEQ ID NO: 218420 - DNA, 50 bp, Artificial
  Synthetic oligonucleotide
accatacgtcccgggcgggcacagatcacactccttacgggcacggtacg

SEQ ID NO: 218421 - DNA, 50 bp, Artificial
  Synthetic oligonucleotide
accatagcccccaccccgctgcgagggtcggtgatcagaagcacatcgga

SEQ ID NO: 218422 - DNA, 50 bp, Artificial
  Synthetic oligonucleotide
acccattgcatggagaggcggtaaaagcccacaagacggcgcgggggaac

SEQ ID NO: 218423 - DNA, 50 bp, Artificial
  Synthetic oligonucleotide
acagggttacacggccgcaaccacccttacctgcgaaccggtggaattcc

SEQ ID NO: 218424 - DNA, 50 bp, Artificial
  Synthetic oligonucleotide
accccacggcgttacggccaacacggtaggcccttatttgggcgaatcgg

SEQ ID NO: 218425 - DNA, 50 bp, Artificial
  Synthetic oligonucleotide
acaggcgtgctgggggcattattcaaagtaccgtcgccggcgctgaaagg

SEQ ID NO: 218426 - DNA, 50 bp, Artificial
  Synthetic oligonucleotide
acaggcggccaggttgcatccgaagaagtgggcgttaagctggacagcgt

SEQ ID NO: 218427 - DNA, 50 bp, Artificial
  Synthetic oligonucleotide
acccccgagaagaaacggggtgtcggggtgtccatcggcgtatacggctg

SEQ ID NO: 218428 - DNA, 50 bp, Artificial
  Synthetic oligonucleotide
acgcgaataccgggggactttaacccgacccggcatcgagagccctcatc

SEQ ID NO: 218429 - DNA, 55 bp, Artificial
  Synthetic oligonucleotide
gccgcccaccaatacgtagttggacggcattcgtaagacaatccaactggaagct

SEQ ID NO: 218430 - DNA, 50 bp, Artificial
  Synthetic oligonucleotide
acgcggagcccacaccatgaatacgccaatcgtgccgctcccgtcgctaa

SEQ ID NO: 218431 - DNA, 50 bp, Artificial
  Synthetic oligonucleotide
acgcggtgcgagttccgttttgccagactattgaagcggaagccctggga

SEQ ID NO: 218432 - DNA, 50 bp, Artificial
  Synthetic oligonucleotide
acgctgctgcgaaccgagttttatgcctggcaaatcccgggcgtcaccta

SEQ ID NO: 218433 - DNA, 50 bp, Artificial
  Synthetic oligonucleotide
ctcggctatgttcccctgaccgctttcaaagacggcttaaggatgactgt

SEQ ID NO: 218434 - DNA, 50 bp, Artificial
  Synthetic oligonucleotide
acggacgtcattcccggctgctgaggcagttcgctcaaatcccctgtcct

SEQ ID NO: 218435 - DNA, 50 bp, Artificial
  Synthetic oligonucleotide
acggcaaaatcggggtgctggcaacaggggttactctggcgggggagcgg

SEQ ID NO: 218436 - DNA, 50 bp, Artificial
  Synthetic oligonucleotide
acggcccggcccgactctgaggatgcctatgcggggaccttcctttccct

SEQ ID NO: 218437 - DNA, 50 bp, Artificial
  Synthetic oligonucleotide
acggccggggaatctggtgttccgtgattttgcaccccgcggtaaacccc

SEQ ID NO: 218438 - DNA, 50 bp, Artificial
  Synthetic oligonucleotide
acggcgcctgccagtgtgtggtccactgttccggttttgctgtgtaccag

SEQ ID NO: 218439 - DNA, 50 bp, Artificial
  Synthetic oligonucleotide
ctaacaataccatgtcgcggttcgaggacctaagttcgcgctcacacctc

SEQ ID NO: 218440 - DNA, 55 bp, Artificial
  Synthetic oligonucleotide
gccgccaaccacactgagtcattcacatcggttgtgtgtacgttgggcatgcggg

SEQ ID NO: 218441 - DNA, 50 bp, Artificial
  Synthetic oligonucleotide
acggcttccgaggtgcgacccatctcgttgagcacgtttccccgcatacc

SEQ ID NO: 218442 - DNA, 50 bp, Artificial
  Synthetic oligonucleotide
acgggcgccttggggtcaaatataccctgtcccctgccgcctaccaagtc

SEQ ID NO: 218443 - DNA, 50 bp, Artificial
  Synthetic oligonucleotide
acgggtcacgtggcgaccccgttgcagcttagggctgatctctcccgtac

SEQ ID NO: 218444 - DNA, 50 bp, Artificial
  Synthetic oligonucleotide
acggtatacgcccagccgtttttgtgccagtgaatcccccaacccgcgtg

SEQ ID NO: 218445 - DNA, 50 bp, Artificial
  Synthetic oligonucleotide
acggtggtgacccaggtaaaccgcggggatcgtctgacggtgttggggaa

SEQ ID NO: 218446 - DNA, 50 bp, Artificial
  Synthetic oligonucleotide
acgtccgggcacaccgcagtttgttacctccctgcgttccggatatgcta

SEQ ID NO: 218447 - DNA, 50 bp, Artificial
  Synthetic oligonucleotide
acgtgcctgtggaaatcgacctcgctctgtgccgctggcagggcccggat

SEQ ID NO: 218448 - DNA, 50 bp, Artificial
  Synthetic oligonucleotide
acgtggccggagcatctagccgaaatcttgtcggagcaccgggacatggc

SEQ ID NO: 218449 - DNA, 50 bp, Artificial
  Synthetic oligonucleotide
acgttaccacaattatctctcccatgataaagcctacctttcctgtaatc

SEQ ID NO: 218450 - DNA, 50 bp, Artificial
  Synthetic oligonucleotide
acgttggctctgcatgcccgctggcaagctgcggctctgggtaaactggg

SEQ ID NO: 218451 - DNA, 55 bp, Artificial
  Synthetic oligonucleotide
gcccgcccgaattttatcccaagcctatcagttcaggtcccaccagggcatggta

SEQ ID NO: 218452 - DNA, 50 bp, Artificial
  Synthetic oligonucleotide
actctaccgccggggcagttgccgtccgctatatgaaacgccacgaggga

SEQ ID NO: 218453 - DNA, 50 bp, Artificial
  Synthetic oligonucleotide
actctggcgggggagcggtttaatgcgcttgtcaggcggtatggaagggg

SEQ ID NO: 218454 - DNA, 50 bp, Artificial
  Synthetic oligonucleotide
actcttcaccccggtcaataagcacctcgctacagggcccgcacggtcct

SEQ ID NO: 218455 - DNA, 50 bp, Artificial
  Synthetic oligonucleotide
accgcctcaggcaggtgcatgtagcgaggggctactgcgcccaataacgc

SEQ ID NO: 218456 - DNA, 50 bp, Artificial
  Synthetic oligonucleotide
accgcggaccactgtaatggggtcagcctcaccgggattaacgccgccac

SEQ ID NO: 218457 - DNA, 50 bp, Artificial
  Synthetic oligonucleotide
accggaggaaccttgcccggttcgtacggtattccagcgggaccgtgaca

SEQ ID NO: 218458 - DNA, 50 bp, Artificial
  Synthetic oligonucleotide
accggattgtggtggcctcctgtagcccgcgtacccacgaacccatgttc

SEQ ID NO: 218459 - DNA, 50 bp, Artificial
  Synthetic oligonucleotide
accggcacctcgatacgtcccgcccacttccccgactgcatagagctgag

SEQ ID NO: 218460 - DNA, 50 bp, Artificial
  Synthetic oligonucleotide
accggcacggcagggtcccaccccgccactggtaacgataagctccaccc

SEQ ID NO: 218461 - DNA, 50 bp, Artificial
  Synthetic oligonucleotide
accggcagcgcttctgttgtaggagccgtgggatgcatcagcacaatcgc

SEQ ID NO: 218462 - DNA, 55 bp, Artificial
  Synthetic oligonucleotide
gcccctataaccaaaacggtttcatactggcctgatgctatatactgggctccgg

SEQ ID NO: 218463 - DNA, 50 bp, Artificial
  Synthetic oligonucleotide
accggcgggaggaaggcacggggcgcattcagtaactaggcagggtttga

SEQ ID NO: 218464 - DNA, 50 bp, Artificial
  Synthetic oligonucleotide
accgggatatttcgggcctgcccaagtccgtgcaactctctagccacggc

SEQ ID NO: 218465 - DNA, 50 bp, Artificial
  Synthetic oligonucleotide
accgggatttcgactgcgggcatcatggagtctgcgctcagcagccgtct

SEQ ID NO: 218466 - DNA, 49 bp, Artificial
  Synthetic oligonucleotide
accggggcttccagaggaagagggaccgcaaccctcgaaaccggtaccg

SEQ ID NO: 218467 - DNA, 50 bp, Artificial
  Synthetic oligonucleotide
accggtactgcaggagtagacggtgcaacaggccccacgggtcctaccgg

SEQ ID NO: 218468 - DNA, 50 bp, Artificial
  Synthetic oligonucleotide
accgtcacagcggttaggacccccgccggaccgataccggccagacgcgc

SEQ ID NO: 218469 - DNA, 50 bp, Artificial
  Synthetic oligonucleotide
accgtggcgtcttgtcccggaggaacgtagggtacggtcatggagtgggg

SEQ ID NO: 218470 - DNA, 50 bp, Artificial
  Synthetic oligonucleotide
gaaccctttggcaagatcccttatatctacgcctcggtaaatcaaacggc

SEQ ID NO: 218471 - DNA, 50 bp, Artificial
  Synthetic oligonucleotide
acctcagcgccgctctcgcttatgtccgggagaaccccgaaatcagggat

SEQ ID NO: 218472 - DNA, 50 bp, Artificial
  Synthetic oligonucleotide
acctggggccgcctgtcaagcacgcacaggaggtgggtcctgtactccgc

SEQ ID NO: 218473 - DNA, 55 bp, Artificial
  Synthetic oligonucleotide
gccccggggtagacaccattatctgagtaccggccgacccattaaggatcaggcg

SEQ ID NO: 218474 - DNA, 50 bp, Artificial
  Synthetic oligonucleotide
accttgccaattcctacgactgggtggggccaactacgggggtccccaat

SEQ ID NO: 218475 - DNA, 50 bp, Artificial
  Synthetic oligonucleotide
acgaacctccggcttgggaaaagacgggcgggccagatagtacccctggc

SEQ ID NO: 218476 - DNA, 50 bp, Artificial
  Synthetic oligonucleotide
acgatcttacctgtcaccggcacctcgatacgtcccgcccacttccccga

SEQ ID NO: 218477 - DNA, 50 bp, Artificial
  Synthetic oligonucleotide
acgcacaggaggtgggtcctgtactccgcgtccgtcgcattgtaccaggc

SEQ ID NO: 218478 - DNA, 50 bp, Artificial
  Synthetic oligonucleotide
acgcccgttcaacaaccgggagctgcggcgtatactgggctacaacgcct

SEQ ID NO: 218479 - DNA, 50 bp, Artificial
  Synthetic oligonucleotide
acgccgcctacggtaagcagtgtcgtgcccaggaatgccaaagcacccag

SEQ ID NO: 218480 - DNA, 50 bp, Artificial
  Synthetic oligonucleotide
acgccgcggttggggcattaaacgcaacgacaaccaccagcaaccggaaa

SEQ ID NO: 218481 - DNA, 50 bp, Artificial
  Synthetic oligonucleotide
acgcctgggccgaagtatgcaggtacactgccctgtgcaccccgatttcc

SEQ ID NO: 218482 - DNA, 50 bp, Artificial
  Synthetic oligonucleotide
aaccatccgggatcacttgagccgcgagggtgtgctggtcagactgcgca

SEQ ID NO: 218483 - DNA, 50 bp, Artificial
  Synthetic oligonucleotide
tctggagcgtccctaaattcaaatacggatccagcttcgacctggttgat

SEQ ID NO: 218484 - DNA, 55 bp, Artificial
  Synthetic oligonucleotide
cttaaatatttacccctgagcaatatcgagccaatcacctctaatcagcgccgtg

SEQ ID NO: 218485 - DNA, 55 bp, Artificial
  Synthetic oligonucleotide
gccccaggtgaagcatattcaccgacattaatgcttttggccgttaccctgccat

SEQ ID NO: 218486 - DNA, 50 bp, Artificial
  Synthetic oligonucleotide
aacccaataagctggccctagtccgcaggtccgcgcttgggattgccgac

SEQ ID NO: 218487 - DNA, 50 bp, Artificial
  Synthetic oligonucleotide
aacccagggaaggctcccgacggcagcggatacacgatgaaccagaaagc

SEQ ID NO: 218488 - DNA, 50 bp, Artificial
  Synthetic oligonucleotide
aacccgcgccggcttgtgggcttttaccgcctctccatgcaatgggttcg

SEQ ID NO: 218489 - DNA, 48 bp, Artificial
  Synthetic oligonucleotide
aacccgttgggtcccgtcccgaaccttaaccaggtcagaccggactcc

SEQ ID NO: 218490 - DNA, 50 bp, Artificial
  Synthetic oligonucleotide
aaccgcgcgcaacgttactggtgatggaacactagaccgtcggaggggta

SEQ ID NO: 218491 - DNA, 50 bp, Artificial
  Synthetic oligonucleotide
aaccgtcccggcggctagcccgttagtttgacaccctatcccgcgtcacg

SEQ ID NO: 218492 - DNA, 50 bp, Artificial
  Synthetic oligonucleotide
aacctgccgggagccgggggcgataacgagactcacccggggatgcacca

SEQ ID NO: 218493 - DNA, 50 bp, Artificial
  Synthetic oligonucleotide
tatggaagaatcgggccagactctcaattgcgccagagattcatttgccc

SEQ ID NO: 218494 - DNA, 50 bp, Artificial
  Synthetic oligonucleotide
aaccttcttgcaacactgtcttcgcacgtgctgactcagcggaggggcct

SEQ ID NO: 218495 - DNA, 50 bp, Artificial
  Synthetic oligonucleotide
aacgagggaacgggcgtgcaagcgtatgcaagcgggaacggttcttggtt

SEQ ID NO: 218496 - DNA, 55 bp, Artificial
  Synthetic oligonucleotide
gcattcgtaagtaccgttatgcagtggcatcgggtttaacagcggattttaccac

SEQ ID NO: 218497 - DNA, 50 bp, Artificial
  Synthetic oligonucleotide
aacgcttcctcggacatgggccggactatgcctgtggttcccagtatgga

SEQ ID NO: 218498 - DNA, 50 bp, Artificial
  Synthetic oligonucleotide
aacggaagccgccattgctctcaatatgacaccctggcagcgaacccggt

SEQ ID NO: 218499 - DNA, 50 bp, Artificial
  Synthetic oligonucleotide
aacggcctctggccccagttccggataagcgaccaccctggctgcctgta

SEQ ID NO: 218500 - DNA, 50 bp, Artificial
  Synthetic oligonucleotide
aacggcggcccgggaaagactgtttccgacgctccctatccctgcggcaa

SEQ ID NO: 218501 - DNA, 50 bp, Artificial
  Synthetic oligonucleotide
aacggggtgtagccagcaagtagagggcaaacggtactgtcagcagcgcg

SEQ ID NO: 218502 - DNA, 50 bp, Artificial
  Synthetic oligonucleotide
aacgtcagggcaaaggacccggggaggcatgatagggtaagcagggggcg

SEQ ID NO: 218503 - DNA, 50 bp, Artificial
  Synthetic oligonucleotide
aactacggcgggaactgggccgcaatgggcaacttcgagctatgtgcggc

SEQ ID NO: 218504 - DNA, 50 bp, Artificial
  Synthetic oligonucleotide
taatttcaacgcccgcgtagaactgtgaccggcctaaacttttggctaag

SEQ ID NO: 218505 - DNA, 50 bp, Artificial
  Synthetic oligonucleotide
taaccccaacatcggcagactaatagcccaccatagaaagaagcgtcagc

SEQ ID NO: 218506 - DNA, 50 bp, Artificial
  Synthetic oligonucleotide
aaaagccaaacttgccggtgggtaccggacgcagggtgcacatcacggga

SEQ ID NO: 218507 - DNA, 55 bp, Artificial
  Synthetic oligonucleotide
gcagtgaggacactgtctgacgggaagctccaataatacaggccaactcctcctg

SEQ ID NO: 218508 - DNA, 50 bp, Artificial
  Synthetic oligonucleotide
aaaagccgggatgacaaggtttccccctgcttggtgagcctcgcgaatga

SEQ ID NO: 218509 - DNA, 50 bp, Artificial
  Synthetic oligonucleotide
aaacacgtggtgggctacagctcccatacgcacggccaggtcggttaacg

SEQ ID NO: 218510 - DNA, 50 bp, Artificial
  Synthetic oligonucleotide
aaacccggggatttgaaggatgtggctgtgcgggctccctggtggacctt

SEQ ID NO: 218511 - DNA, 50 bp, Artificial
  Synthetic oligonucleotide
aaacccggtatgaccgcccaggccaatgagggaaaccgtactgcgacgaa

SEQ ID NO: 218512 - DNA, 50 bp, Artificial
  Synthetic oligonucleotide
aaaccgctgctcaggttggacttcgggcgtgtatacgggtcactggtggg

SEQ ID NO: 218513 - DNA, 50 bp, Artificial
  Synthetic oligonucleotide
aaacgcaggagatttacggtggctgcggaattccccgaggggatggcccc

SEQ ID NO: 218514 - DNA, 50 bp, Artificial
  Synthetic oligonucleotide
aaagcacgcccgggctaaagctctggtcgcagaactctggcaatcgggca

SEQ ID NO: 218515 - DNA, 50 bp, Artificial
  Synthetic oligonucleotide
aaagcccacgacacaaccccgagccgggtagagagggccatacggcacgc

SEQ ID NO: 218516 - DNA, 50 bp, Artificial
  Synthetic oligonucleotide
aaagcgccccgttccgtacagcacagcgactgctgacagctctaatgccg

SEQ ID NO: 218517 - DNA, 50 bp, Artificial
  Synthetic oligonucleotide
aaagctgccggtgtcaggacccacggggtcagagcaatcccgatagccgg

SEQ ID NO: 218518 - DNA, 55 bp, Artificial
  Synthetic oligonucleotide
gcaacagcggcaaaattcgcttaacaatcgtagcgttaaccccagctcctagttc

SEQ ID NO: 218519 - DNA, 50 bp, Artificial
  Synthetic oligonucleotide
aaaggccccaccgtaccgatcccaacgccgatcacatatccgtgcccccg

SEQ ID NO: 218520 - DNA, 49 bp, Artificial
  Synthetic oligonucleotide
aaagggcggttaaaggccagaagggtaccggtgctttccccggattggc

SEQ ID NO: 218521 - DNA, 50 bp, Artificial
  Synthetic oligonucleotide
tgtcatgcacaaccaactttcacgacttaccggaacaacctcagatggta

SEQ ID NO: 218522 - DNA, 50 bp, Artificial
  Synthetic oligonucleotide
aaatacatccctatgcacccacctgctatcgtccctgggggcgtgccctg

SEQ ID NO: 218523 - DNA, 50 bp, Artificial
  Synthetic oligonucleotide
aaatcgcggaacagagcccttgcaggcaaaaccgtgtctcccgccggatt

SEQ ID NO: 218524 - DNA, 50 bp, Artificial
  Synthetic oligonucleotide
tggccgtataaatttaagtaggtgccagaaggggatcgacccgccgaaaa

SEQ ID NO: 218525 - DNA, 50 bp, Artificial
  Synthetic oligonucleotide
aaatggattttgcgcccggactcagggaagaacgctgtccctgggccaaa

SEQ ID NO: 218526 - DNA, 50 bp, Artificial
  Synthetic oligonucleotide
aacaccggcgggttaggcccggtaacggtatggagggtttgccgtacata

SEQ ID NO: 218527 - DNA, 50 bp, Artificial
  Synthetic oligonucleotide
aacagacccggtccgggcagcgcaatttccggcctttctctgatgggtac

SEQ ID NO: 218528 - DNA, 50 bp, Artificial
  Synthetic oligonucleotide
aacagccctccaacccaccgtgccggttagccatacccggtcattgacac

SEQ ID NO: 218529 - DNA, 53 bp, Artificial
  Synthetic oligonucleotide
gatttataccgtccactcgacaatgggaaagtaagtgggccggggtgacaacc

SEQ ID NO: 218530 - DNA, 50 bp, Artificial
  Synthetic oligonucleotide
aaccaagtccggatgaccgttccgcccgagcctttcggtacgcagggcca

SEQ ID NO: 218531 - DNA, 50 bp, Artificial
  Synthetic oligonucleotide
aaccacgcccattgtcactgccccgatgccttcaccggtacttcccggca

SEQ ID NO: 218532 - DNA, 50 bp, Artificial
  Synthetic oligonucleotide
aaccacgggcctaaggcattgctgctatggtcgcctggttgccagtgaac

SEQ ID NO: 218533 - DNA, 50 bp, Artificial
  Synthetic oligonucleotide
aaggggaggagtaagggcacgttgggaaccgcccgggttggttatggcta

SEQ ID NO: 218534 - DNA, 50 bp, Artificial
  Synthetic oligonucleotide
aagggggcaactggtgatgattgcttccgctcccttggcagtggcagagt

SEQ ID NO: 218535 - DNA, 50 bp, Artificial
  Synthetic oligonucleotide
gggtttcttccgaattaaagttaagaggccacctttcagactgacggcgg

SEQ ID NO: 218536 - DNA, 50 bp, Artificial
  Synthetic oligonucleotide
aagtcctggcaacgggcgcccttccacggatgatcacggcaactgtctgt

SEQ ID NO: 218537 - DNA, 50 bp, Artificial
  Synthetic oligonucleotide
aagtctcagccggccacctttcactgaccagaccgattcagcccaggcaa

SEQ ID NO: 218538 - DNA, 50 bp, Artificial
  Synthetic oligonucleotide
aagtgagaggtgggaccggcgggaggaaggcacggggcgcattcagtaac

SEQ ID NO: 218539 - DNA, 50 bp, Artificial
  Synthetic oligonucleotide
aagtgagttggccaggacatcgctgagcagatccccgcagtaagctcccc

SEQ ID NO: 218540 - DNA, 55 bp, Artificial
  Synthetic oligonucleotide
gatgttgagtcagcttcaaagtcagggaacgcaagtcttcgtcctcgatacaggc

SEQ ID NO: 218541 - DNA, 50 bp, Artificial
  Synthetic oligonucleotide
aagtgcgggaccacggagcgcaacaccggaatgatactgcccacgggaac

SEQ ID NO: 218542 - DNA, 50 bp, Artificial
  Synthetic oligonucleotide
aagtgctgggtccacgctcactccctggctttcgcgctgacagcattcca

SEQ ID NO: 218543 - DNA, 50 bp, Artificial
  Synthetic oligonucleotide
aataccgactctgccacccaggtagcagcgccggatttccacagggtcgt

SEQ ID NO: 218544 - DNA, 50 bp, Artificial
  Synthetic oligonucleotide
aatataccctgtcccctgccgcctaccaagtccgcagcactgcattccgc

SEQ ID NO: 218545 - DNA, 50 bp, Artificial
  Synthetic oligonucleotide
aatccccggcagttcgcttgttccttaacagtcctgccgctacggccctg

SEQ ID NO: 218546 - DNA, 50 bp, Artificial
  Synthetic oligonucleotide
aatcccggagtgtttactgccgttgctccggcaatatccctggcccggtc

SEQ ID NO: 218547 - DNA, 50 bp, Artificial
  Synthetic oligonucleotide
aatccggcaggccaggataagccatttctgggtctgcgcccctggtagcg

SEQ ID NO: 218548 - DNA, 50 bp, Artificial
  Synthetic oligonucleotide
aatcctggcgtagcgcagggtcatttctggggaggcgtgggccatccact

SEQ ID NO: 218549 - DNA, 50 bp, Artificial
  Synthetic oligonucleotide
aatgccgggaaggggcattcctagacgcccgcaggaccttatttcaccgc

SEQ ID NO: 218550 - DNA, 50 bp, Artificial
  Synthetic oligonucleotide
aatggccctcgtggaggaaatggtggccgcgttgtaccgggaaaccacgg

SEQ ID NO: 218551 - DNA, 55 bp, Artificial
  Synthetic oligonucleotide
gatgggtcttgtgtggattggggcattatcgagagttatcgggaagaatgtgccg

SEQ ID NO: 218552 - DNA, 50 bp, Artificial
  Synthetic oligonucleotide
ggccgttattaccggtgtatccgtagcttactctactgaaaaggcggtgg

SEQ ID NO: 218553 - DNA, 50 bp, Artificial
  Synthetic oligonucleotide
aatgggcgccttaccgccgaggggaggttattggccgcctccgacacgcg

SEQ ID NO: 218554 - DNA, 50 bp, Artificial
  Synthetic oligonucleotide
aattaaccgtgcagggggcttttgacccgcaggccgtttacttggcagga

SEQ ID NO: 218555 - DNA, 50 bp, Artificial
  Synthetic oligonucleotide
aattgctaggccgtggggacatgctctatctggccgccggcagctcaaaa

SEQ ID NO: 218556 - DNA, 50 bp, Artificial
  Synthetic oligonucleotide
acaaccggaccgcagtttttacgctgaatgggggcgcatcctgcccaacg

SEQ ID NO: 218557 - DNA, 50 bp, Artificial
  Synthetic oligonucleotide
acacccatattgctacctgtccggcccggtacctctcggctcccattccg

SEQ ID NO: 218558 - DNA, 50 bp, Artificial
  Synthetic oligonucleotide
acacctttctctgctgcggctggcccaaaaggcccgaaggccggatcagg

SEQ ID NO: 218559 - DNA, 50 bp, Artificial
  Synthetic oligonucleotide
aactgccctaacgcttgcccggggttctgtccgctccctggagtaggaaa

SEQ ID NO: 218560 - DNA, 50 bp, Artificial
  Synthetic oligonucleotide
aactgtgttcccgaatcgccgggtgaaactcccgtacgcgcggaaggttg

SEQ ID NO: 218561 - DNA, 50 bp, Artificial
  Synthetic oligonucleotide
aacttccgccccgaaacccctggctgtttccgctatctccctgtcgtcag

SEQ ID NO: 218562 - DNA, 55 bp, Artificial
  Synthetic oligonucleotide
gatgcccgctggctaagaggtacgagtttcctcggttatggctctactcttacgg

SEQ ID NO: 218563 - DNA, 50 bp, Artificial
  Synthetic oligonucleotide
aacttccgctcaagcgaccgacccgagacacggggcagcgcacaaggacg

SEQ ID NO: 218564 - DNA, 50 bp, Artificial
  Synthetic oligonucleotide
aagaccgccaggcaccgttccgaagtggtttcttggcccgtgactttgta

SEQ ID NO: 218565 - DNA, 50 bp, Artificial
  Synthetic oligonucleotide
aagagagggcgcaccctactgcctgggtggaccgtcacctactcctactg

SEQ ID NO: 218566 - DNA, 50 bp, Artificial
  Synthetic oligonucleotide
aagagctgtgagtaagcgcccgggttaaaagcccctcatcgcgccatgca

SEQ ID NO: 218567 - DNA, 50 bp, Artificial
  Synthetic oligonucleotide
aagatgccgggtgtcggggcggaaaccagaccaggtctcgctttcggaga

SEQ ID NO: 218568 - DNA, 50 bp, Artificial
  Synthetic oligonucleotide
aagcagggactcccctcggtgatccggattaaagtaccggacgcaggcca

SEQ ID NO: 218569 - DNA, 50 bp, Artificial
  Synthetic oligonucleotide
aagcatggtacgccctgccatcccaggctgcgctgtaagtggcctgtgtc

SEQ ID NO: 218570 - DNA, 50 bp, Artificial
  Synthetic oligonucleotide
aagccatttctgggtctgcgcccctggtagcgccgccataaaaacctgca

SEQ ID NO: 218571 - DNA, 50 bp, Artificial
  Synthetic oligonucleotide
aagcccacaagacggcgcgggggaacggagccacaggttaacatcaaggt

SEQ ID NO: 218572 - DNA, 50 bp, Artificial
  Synthetic oligonucleotide
aagcccagagatgccgtgccgtaagcggtaacatgtaccccggctccaat

SEQ ID NO: 218573 - DNA, 54 bp, Artificial
  Synthetic oligonucleotide
gatctccctgtactggacctttgcagcggtcttaatcggtttggttccccgggc

SEQ ID NO: 218574 - DNA, 50 bp, Artificial
  Synthetic oligonucleotide
aagcccggtcaaaggacccggatcctccgaagctttccgcccaggcccct

SEQ ID NO: 218575 - DNA, 50 bp, Artificial
  Synthetic oligonucleotide
gtaacgtttgttttacgcgttgggccattgccgacttgacaggcttatca

SEQ ID NO: 218576 - DNA, 50 bp, Artificial
  Synthetic oligonucleotide
aagccgcacatagctcgaagttgcccattgcggcccagttcccgccgtag

SEQ ID NO: 218577 - DNA, 50 bp, Artificial
  Synthetic oligonucleotide
aagccggcgcgggtaagtggagccacggttcacctcaggtattacccgga

SEQ ID NO: 218578 - DNA, 50 bp, Artificial
  Synthetic oligonucleotide
aagcctacaagccggcgcgggtaagtggagccacggttcacctcaggtat

SEQ ID NO: 218579 - DNA, 50 bp, Artificial
  Synthetic oligonucleotide
aagcgggactcatgatctgagcgcggcctttaaggagtaccaggccagcg

SEQ ID NO: 218580 - DNA, 50 bp, Artificial
  Synthetic oligonucleotide
aagctggatgaggtagcccccggaactctgcaccgtcccatcagggttta

SEQ ID NO: 218581 - DNA, 50 bp, Artificial
  Synthetic oligonucleotide
aagcttcgccgtgggagcttcgggtagggtggtaggcctcgaatcggtac

SEQ ID NO: 218582 - DNA, 50 bp, Artificial
  Synthetic oligonucleotide
aaggagagcgcggtcccggcaggttgcgtgaaaatgtgccgctataccag

SEQ ID NO: 218583 - DNA, 50 bp, Artificial
  Synthetic oligonucleotide
aaggccagcaccctcaaacctctgcttaaacccgccaaaaagccggtgga

SEQ ID NO: 218584 - DNA, 55 bp, Artificial
  Synthetic oligonucleotide
gatccggcgggaaccaaattcttaggtgttacagaccactggcgcatgctattgc

SEQ ID NO: 218585 - DNA, 50 bp, Artificial
  Synthetic oligonucleotide
aagggctgggcgcaaaaccacgggcctaaggcattgctgctatggtcgcc

SEQ ID NO: 218586 - DNA, 50 bp, Artificial
  Synthetic oligonucleotide
agcttgccggtatgttggaggttggcgacggttcccccaagctcagtcac

SEQ ID NO: 218587 - DNA, 50 bp, Artificial
  Synthetic oligonucleotide
caacgctagttgttccgctggctcagatgcaaaaggctcttccgcgccgc

SEQ ID NO: 218588 - DNA, 50 bp, Artificial
  Synthetic oligonucleotide
caaccgctcccgtagctcacgggcagcagtctcgtccatcatcacagcga

SEQ ID NO: 218589 - DNA, 50 bp, Artificial
  Synthetic oligonucleotide
caacaacctacgctgcgggtgtagctgtgcccaaaaccgtgaccgggtta

SEQ ID NO: 218590 - DNA, 50 bp, Artificial
  Synthetic oligonucleotide
aggactgtggacgcgcacttactatgtcggcacagccggcactgtatccg

SEQ ID NO: 218591 - DNA, 50 bp, Artificial
  Synthetic oligonucleotide
aggaggtgcccgcagggttcaaggtcagctacgggtgcacctacactacc

SEQ ID NO: 218592 - DNA, 50 bp, Artificial
  Synthetic oligonucleotide
caaaactgccttcggtccgggatatggcccaagaggcggctgttaacccc

SEQ ID NO: 218593 - DNA, 50 bp, Artificial
  Synthetic oligonucleotide
aggatcgggagctgtggagtcatctcccccgggaaaggtctgagtgggat

SEQ ID NO: 218594 - DNA, 50 bp, Artificial
  Synthetic oligonucleotide
atttgctccgcagcttcgctgctatcacgccgggcctaaacactccctta

SEQ ID NO: 218595 - DNA, 55 bp, Artificial
  Synthetic oligonucleotide
ctgggcatatggggagaggtttgctcgactaagcccgctggccgttgatctagcc

SEQ ID NO: 218596 - DNA, 54 bp, Artificial
  Synthetic oligonucleotide
gagttgggtttaactcctaacaagccttatagtaaatcggcacgtcttgttgga

SEQ ID NO: 218597 - DNA, 50 bp, Artificial
  Synthetic oligonucleotide
aggattgccggtcgttgaaaagcttcgcctgactgcgtcagccagcctca

SEQ ID NO: 218598 - DNA, 50 bp, Artificial
  Synthetic oligonucleotide
aggcagcgattagctctgacatcagaggacgcgggcattctggtgctccc

SEQ ID NO: 218599 - DNA, 50 bp, Artificial
  Synthetic oligonucleotide
attgcccgtttggcacccggggatccgctgcaatcttattacggcgatgc

SEQ ID NO: 218600 - DNA, 50 bp, Artificial
  Synthetic oligonucleotide
attcgctgccccgcctgcattcgccgggaaggggttaatgtcacctcctg

SEQ ID NO: 218601 - DNA, 50 bp, Artificial
  Synthetic oligonucleotide
aggcatatgcggtacaatcagccgcaaagagcagctctcctccggccaga

SEQ ID NO: 218602 - DNA, 50 bp, Artificial
  Synthetic oligonucleotide
attaacgtaggtccggcaccgctcaatgccacccctttggctccggctaa

SEQ ID NO: 218603 - DNA, 50 bp, Artificial
  Synthetic oligonucleotide
atggtacagtccaccacccgaagtccggtgcatccttacctgggcacgga

SEQ ID NO: 218604 - DNA, 50 bp, Artificial
  Synthetic oligonucleotide
atggctgtgataaagacgaccgacgcacggagggaaggctgctccgcttc

SEQ ID NO: 218605 - DNA, 50 bp, Artificial
  Synthetic oligonucleotide
aggcatgggtttggcctccgctgctaaatccagctcttgcggggtcaaat

SEQ ID NO: 218606 - DNA, 50 bp, Artificial
  Synthetic oligonucleotide
atggctgcagtgccgccctcaacagcgaataagtcgtatttgccaggggg

SEQ ID NO: 218607 - DNA, 55 bp, Artificial
  Synthetic oligonucleotide
gagtattctcaaccttacccttatattcctctatccaggagtcaacatcccagcc

SEQ ID NO: 218608 - DNA, 50 bp, Artificial
  Synthetic oligonucleotide
atggcggggatgcgtgagaatcgaacacacctcggaacgttctgcgtccc

SEQ ID NO: 218609 - DNA, 50 bp, Artificial
  Synthetic oligonucleotide
atgcgtgatggcaaggacgtaaccgccatgctgccgtatctaagcgcgta

SEQ ID NO: 218610 - DNA, 50 bp, Artificial
  Synthetic oligonucleotide
atgcgcatacaacttgctgggagaaaggcccgagagcataggcaccggca

SEQ ID NO: 218611 - DNA, 50 bp, Artificial
  Synthetic oligonucleotide
atgccgggtataaatgggcaccccggcccgaactactttggctgcatgga

SEQ ID NO: 218612 - DNA, 50 bp, Artificial
  Synthetic oligonucleotide
atgcatgacctcccggaaagtagccgccaggccacgtgtcggacctgccg

SEQ ID NO: 218613 - DNA, 50 bp, Artificial
  Synthetic oligonucleotide
catacagtcaccgggactgacggcctgggaggaatcgaaacccggggtca

SEQ ID NO: 218614 - DNA, 50 bp, Artificial
  Synthetic oligonucleotide
cagtttggcctcacaaggtctaggactctcaccgcgcctgtccccgaccc

SEQ ID NO: 218615 - DNA, 50 bp, Artificial
  Synthetic oligonucleotide
cagtactgactgcaatggtagccgcgcccggacccacaactgtcaccaga

SEQ ID NO: 218616 - DNA, 50 bp, Artificial
  Synthetic oligonucleotide
caggtggtgccgcttccccacagtgaaccaccggaaattgcccgagggga

SEQ ID NO: 218617 - DNA, 50 bp, Artificial
  Synthetic oligonucleotide
cagggggctgggaaccgtcaaacgtgcaatcctgggcagtgtggcaactc

SEQ ID NO: 218618 - DNA, 55 bp, Artificial
  Synthetic oligonucleotide
gaggtgaagtgaagcatggcggtaaaacctcacggcggaaccttgatcgaccggg

SEQ ID NO: 218619 - DNA, 50 bp, Artificial
  Synthetic oligonucleotide
agcgatttccgggcagggacgattaaacagtggccgcccaaaagcccatg

SEQ ID NO: 218620 - DNA, 50 bp, Artificial
  Synthetic oligonucleotide
caggccaatgcagcctccattcgtgcggtaaccctgctatcgaaggggcg

SEQ ID NO: 218621 - DNA, 50 bp, Artificial
  Synthetic oligonucleotide
caggaccgcttaaagcgccggagggcactgtccagtgtttcgttcttgcc

SEQ ID NO: 218622 - DNA, 50 bp, Artificial
  Synthetic oligonucleotide
cagctcactgagccgcaaaccgcgagtcctgtttgggtcggaagcagtcc

SEQ ID NO: 218623 - DNA, 50 bp, Artificial
  Synthetic oligonucleotide
cagccccggagctatggagtacgcgttgggcgtaaagctacacaacccgg

SEQ ID NO: 218624 - DNA, 50 bp, Artificial
  Synthetic oligonucleotide
cagagcggtctccagcccatgcgcatagcccattgtcccggcgtagagaa

SEQ ID NO: 218625 - DNA, 50 bp, Artificial
  Synthetic oligonucleotide
cacttagccccaaccaacggggacccagggggttatagggactgcctcct

SEQ ID NO: 218626 - DNA, 50 bp, Artificial
  Synthetic oligonucleotide
agcgcgacgtctctacgtaagcagcccagcaaacttccgctcaagcgacc

SEQ ID NO: 218627 - DNA, 50 bp, Artificial
  Synthetic oligonucleotide
agcggttaaggctgatgtgcgccgcttggtgctggaggatcttttggcca

SEQ ID NO: 218628 - DNA, 50 bp, Artificial
  Synthetic oligonucleotide
agcgtatacaagtggcccaacggatggatcaggtggttggctccccggca

SEQ ID NO: 218629 - DNA, 55 bp, Artificial
  Synthetic oligonucleotide
gagagtgcagtatagtgaataacatggaaacggcttggaagttaacgaacggtgg

SEQ ID NO: 218630 - DNA, 50 bp, Artificial
  Synthetic oligonucleotide
cacggctccttctctataccggggcagtgtggtgggggcctatgctctgc

SEQ ID NO: 218631 - DNA, 50 bp, Artificial
  Synthetic oligonucleotide
agcgtgttcagggtcctccctggtgagcaaaagcaaaaggctggcgcccg

SEQ ID NO: 218632 - DNA, 50 bp, Artificial
  Synthetic oligonucleotide
agcgttacgcaatcgctgctcaagcagaactgggcgtgaccggtgctgat

SEQ ID NO: 218633 - DNA, 50 bp, Artificial
  Synthetic oligonucleotide
agctaccgctgcgtggctgagcacatactcctgtcggagttgcctcgcta

SEQ ID NO: 218634 - DNA, 50 bp, Artificial
  Synthetic oligonucleotide
agctccttggtagcggagaacccctcccacccttccgtggtcgaagggaa

SEQ ID NO: 218635 - DNA, 50 bp, Artificial
  Synthetic oligonucleotide
caaggtctaggactctcaccgcgcctgtccccgaccctacctgagagggc

SEQ ID NO: 218636 - DNA, 50 bp, Artificial
  Synthetic oligonucleotide
caaggggtcccacatggtcaaaaatggccgccaggtgttgtttggccgta

SEQ ID NO: 218637 - DNA, 50 bp, Artificial
  Synthetic oligonucleotide
caagcgtcattgcgagccatgcgccgctccgccgtaccactgtgccgcca

SEQ ID NO: 218638 - DNA, 50 bp, Artificial
  Synthetic oligonucleotide
caagaacgagactgcctgccccggtcaccgtccattgggcactcatcgcc

SEQ ID NO: 218639 - DNA, 50 bp, Artificial
  Synthetic oligonucleotide
aggcctggttgtaataagcggctgccccttaggcagaagtccggccacac

SEQ ID NO: 218640 - DNA, 52 bp, Artificial
  Synthetic oligonucleotide
gacttttaaggggaccgtgttggtaagaagggtaactcccctgacatcatat

SEQ ID NO: 218641 - DNA, 50 bp, Artificial
  Synthetic oligonucleotide
aggcgggttgtactgtctccgttgggttagaagacgcttcccgggccgac

SEQ ID NO: 218642 - DNA, 50 bp, Artificial
  Synthetic oligonucleotide
atacgtgcatgccttttcgctcccggcattctccggccacaccggggccc

SEQ ID NO: 218643 - DNA, 50 bp, Artificial
  Synthetic oligonucleotide
atacggtccaaatcgcggtctctgcccaacacagggaggtccaggccaat

SEQ ID NO: 218644 - DNA, 50 bp, Artificial
  Synthetic oligonucleotide
atacccgtcgggaaaatctcacgcccagggaatactggcaggacggcacg

SEQ ID NO: 218645 - DNA, 50 bp, Artificial
  Synthetic oligonucleotide
aggcggtaaaagcccacaagacggcgcgggggaacggagccacaggttaa

SEQ ID NO: 218646 - DNA, 50 bp, Artificial
  Synthetic oligonucleotide
atacaggtcggctggccaaagccaggatatcgccgctccggatgtccatt

SEQ ID NO: 218647 - DNA, 50 bp, Artificial
  Synthetic oligonucleotide
ataagcgaaaccaccgtagtcagtacccagagcccttgtcccgctgccga

SEQ ID NO: 218648 - DNA, 50 bp, Artificial
  Synthetic oligonucleotide
aggctatcaagcggcggcccccggaattttgcctgccgtccaaagtttat

SEQ ID NO: 218649 - DNA, 50 bp, Artificial
  Synthetic oligonucleotide
ataaaggtcccccggaggtcctcctttagagccggcttccccatccccgc

SEQ ID NO: 218650 - DNA, 50 bp, Artificial
  Synthetic oligonucleotide
agttatggccgccggctggtcgtaaaaccgggcctctgcccaaaggaccg

SEQ ID NO: 218651 - DNA, 55 bp, Artificial
  Synthetic oligonucleotide
gactagggtgtatttcatatcaagagtccggcatgtggaagaatcattgtactgc

SEQ ID NO: 218652 - DNA, 50 bp, Artificial
  Synthetic oligonucleotide
agtggtacccgagctcttttagcatatccatattccgccggaccaccctg

SEQ ID NO: 218653 - DNA, 50 bp, Artificial
  Synthetic oligonucleotide
aggctccccagcggctgactctgctaaagtcctgccctccgtagagaagg

SEQ ID NO: 218654 - DNA, 50 bp, Artificial
  Synthetic oligonucleotide
agtgctccgcgccgacagcacttactgcttgcttcgggcgaaattgggcc

SEQ ID NO: 218655 - DNA, 50 bp, Artificial
  Synthetic oligonucleotide
agtgcgactctgcacgggggctgaattgcaaaccccttaaggcatgcggg

SEQ ID NO: 218656 - DNA, 50 bp, Artificial
  Synthetic oligonucleotide
agtgccgaccgccctggtccgtttaagcgggataggcgcaattagccgca

SEQ ID NO: 218657 - DNA, 50 bp, Artificial
  Synthetic oligonucleotide
agtgaggggttgcgccacgaattaccgcccccaagcaaataacgccatcg

SEQ ID NO: 218658 - DNA, 50 bp, Artificial
  Synthetic oligonucleotide
aggctcgcccactcaccagcgcgggagctagccttcagcggataagtatt

SEQ ID NO: 218659 - DNA, 50 bp, Artificial
  Synthetic oligonucleotide
aggctgaaacgtggattagcctcacccgaagcagagacgcacgggccttg

SEQ ID NO: 218660 - DNA, 50 bp, Artificial
  Synthetic oligonucleotide
agggcaattaacgacccaaccgccagagcgattaccagagccagccagga

SEQ ID NO: 218661 - DNA, 50 bp, Artificial
  Synthetic oligonucleotide
agtcccctcgtctcccaccattggggcatatacaatcgctgcatcgggct

SEQ ID NO: 218662 - DNA, 55 bp, Artificial
  Synthetic oligonucleotide
gaccaaagaacacacctccgaggaaaacaaagcctggttgcggcagttaccagag

SEQ ID NO: 218663 - DNA, 50 bp, Artificial
  Synthetic oligonucleotide
agggccatgcccggggacttggtaagtgctagcaatagagatggcaccgc

SEQ ID NO: 218664 - DNA, 50 bp, Artificial
  Synthetic oligonucleotide
aggggctccggcaaagcaccctctgctagggccccatagataaaccccat

SEQ ID NO: 218665 - DNA, 50 bp, Artificial
  Synthetic oligonucleotide
agggctcccaccgtatccccgcccacaaagctcccaatgttaggcagtat

SEQ ID NO: 218666 - DNA, 50 bp, Artificial
  Synthetic oligonucleotide
agggcggtgttacagcagccattgaccccggtgaggtacatgctgtagct

SEQ ID NO: 218667 - DNA, 50 bp, Artificial
  Synthetic oligonucleotide
atgacttacgggcgcaagcaggacaccccgtttctgggccgagacctggc

SEQ ID NO: 218668 - DNA, 50 bp, Artificial
  Synthetic oligonucleotide
aggccgggaagagattggttgtccctccgattcctcccaaagtggcgggg

SEQ ID NO: 218669 - DNA, 50 bp, Artificial
  Synthetic oligonucleotide
atgaagcggtgttcccgtacccggtggattttgggacagcaggggcgtag

SEQ ID NO: 218670 - DNA, 50 bp, Artificial
  Synthetic oligonucleotide
atctttcccaggacagtgcacccctcaagtccgcccaaaccgtcctgcaa

SEQ ID NO: 218671 - DNA, 50 bp, Artificial
  Synthetic oligonucleotide
atcttctccgccccattcgccccaagccgttccggaggccaataaaccta

SEQ ID NO: 218672 - DNA, 50 bp, Artificial
  Synthetic oligonucleotide
atctgcctggagtatttctacctgcgattcgcttcgtgcgggcccgagga

SEQ ID NO: 218673 - DNA, 55 bp, Artificial
  Synthetic oligonucleotide
gacatttaacagccggccgggcatagcgcgctcgatcatctgaataacactggct

SEQ ID NO: 218674 - DNA, 50 bp, Artificial
  Synthetic oligonucleotide
atctccagcaggtggccatgataaccggacgggtaggggacggcaaccgg

SEQ ID NO: 218675 - DNA, 50 bp, Artificial
  Synthetic oligonucleotide
atcgtcgctccatgcagacctcggggtattgatgggcaggcatagcacgg

SEQ ID NO: 218676 - DNA, 50 bp, Artificial
  Synthetic oligonucleotide
atcggctgctagcgactcgtctgcagcgcggtccttccccctggggcggg

SEQ ID NO: 218677 - DNA, 50 bp, Artificial
  Synthetic oligonucleotide
atcggcagcggagggatatccggagctgtcagcggaacctggaatccaca

SEQ ID NO: 218678 - DNA, 50 bp, Artificial
  Synthetic oligonucleotide
atcgctttaggggctccggcaacgggctatctgccggcggtaggagattc

SEQ ID NO: 218679 - DNA, 50 bp, Artificial
  Synthetic oligonucleotide
atcgctcccctgccatgtgactctcccttccgaggctttcataagcccgg

SEQ ID NO: 218680 - DNA, 50 bp, Artificial
  Synthetic oligonucleotide
atcgcagtacctgcgccatttgggttgcaccgtttcggatgaaccagcga

SEQ ID NO: 218681 - DNA, 50 bp, Artificial
  Synthetic oligonucleotide
atcgaaccactgtagtttcccctccttggcatcccccgcggctaaccgca

SEQ ID NO: 218682 - DNA, 50 bp, Artificial
  Synthetic oligonucleotide
atccttctggcctgttcctccgacatggcactgcgataagggcgatccga

SEQ ID NO: 218683 - DNA, 50 bp, Artificial
  Synthetic oligonucleotide
atcctgccgaggttcccattcccggcagagccttgaagaaagagacgccc

SEQ ID NO: 218684 - DNA, 55 bp, Artificial
  Synthetic oligonucleotide
gacattggtgccaaatcggaaggagttatccccttaagggagctgtcctgctgtg

SEQ ID NO: 218685 - DNA, 50 bp, Artificial
  Synthetic oligonucleotide
atcctctgccaacatatcacgagcccggtgaaagtccctggtccacgccc

SEQ ID NO: 218686 - DNA, 50 bp, Artificial
  Synthetic oligonucleotide
atccggcggggtgtatggaaaaggtcccggagaggtcgggagaactccaa

SEQ ID NO: 218687 - DNA, 50 bp, Artificial
  Synthetic oligonucleotide
atcccatctcgattctcataccctgccacagagtggtgggagccggcgga

SEQ ID NO: 218688 - DNA, 50 bp, Artificial
  Synthetic oligonucleotide
atcatgctttacaggctgccagaaccctgcgggcagcgggctccaacccg

SEQ ID NO: 218689 - DNA, 50 bp, Artificial
  Synthetic oligonucleotide
atcagaagggccctggcaacggctcccgcttgcgactggtcgggtaaccc

SEQ ID NO: 218690 - DNA, 50 bp, Artificial
  Synthetic oligonucleotide
aggccgttcgtagggccgcttcgagaactccgcctgtcgctccaaagatg

SEQ ID NO: 218691 - DNA, 50 bp, Artificial
  Synthetic oligonucleotide
aggccgtttgccgggcacaattcagcaatgtgccatctccaccccaaacc

SEQ ID NO: 218692 - DNA, 50 bp, Artificial
  Synthetic oligonucleotide
atatcgggtacaatggggccgcaaataccgtagggcccgcctgttgctta

SEQ ID NO: 218693 - DNA, 50 bp, Artificial
  Synthetic oligonucleotide
atatcctggggcccaaggtctgcatcggtcaacaccctctgtacgcaggc

SEQ ID NO: 218694 - DNA, 50 bp, Artificial
  Synthetic oligonucleotide
ccttttcttgtagggcgcccaccgggcaaaccgctacacagtttccgcaa

SEQ ID NO: 218695 - DNA, 55 bp, Artificial
  Synthetic oligonucleotide
gacataggatatctttcccaggacagtgcacccctcaagtccgcccaaaccgtcc

SEQ ID NO: 218696 - DNA, 50 bp, Artificial
  Synthetic oligonucleotide
cctttgaaggaacgggagcagtatcccgctggaccttgcacctgcctccc

SEQ ID NO: 218697 - DNA, 50 bp, Artificial
  Synthetic oligonucleotide
agaggaggcccagccatgggaacccgcacatactccgcaaacgcgttctg

SEQ ID NO: 218698 - DNA, 50 bp, Artificial
  Synthetic oligonucleotide
cctttccaggcgctgggttccgggcacagtctggaccggcgacatagatc

SEQ ID NO: 218699 - DNA, 50 bp, Artificial
  Synthetic oligonucleotide
agaggcgccgtcataacgccttttaactggccaacgggtaaggtgggccg

SEQ ID NO: 218700 - DNA, 50 bp, Artificial
  Synthetic oligonucleotide
cctgtttccttcggtgcagttggcacccctgtgttcggcgccatgagtac

SEQ ID NO: 218701 - DNA, 50 bp, Artificial
  Synthetic oligonucleotide
cctgccggtgtgattgaagagcggtttaatctcgaccccggactgggggc

SEQ ID NO: 218702 - DNA, 50 bp, Artificial
  Synthetic oligonucleotide
cctgagcgcccccaatgcaaatcacatcaaagccggcctcgatcgctacc

SEQ ID NO: 218703 - DNA, 50 bp, Artificial
  Synthetic oligonucleotide
agagtaccgcgaaggctcgtgtgcattaggggccggtctctggcagacta

SEQ ID NO: 218704 - DNA, 50 bp, Artificial
  Synthetic oligonucleotide
agagtcagaccggcactccaaaccagtccggagggttaacgggggaagca

SEQ ID NO: 218705 - DNA, 50 bp, Artificial
  Synthetic oligonucleotide
cctcgggcctcccaagtcccggccctgaagctatggagtacgcgttgtgg

SEQ ID NO: 218706 - DNA, 55 bp, Artificial
  Synthetic oligonucleotide
ctggctgccatgtccaccggccttccagcaacggattttacggtccgccacctga

SEQ ID NO: 218707 - DNA, 55 bp, Artificial
  Synthetic oligonucleotide
gacataggagttgtgtttgatgagagcaactttccggataatatgaatgccgcgg

SEQ ID NO: 218708 - DNA, 50 bp, Artificial
  Synthetic oligonucleotide
cctcggaaagttggccccggcccttgtcgcctggtctgagcaaaaccgca

SEQ ID NO: 218709 - DNA, 50 bp, Artificial
  Synthetic oligonucleotide
agatacaccccggggataggcgcggcaataacgtagggtccgccgtccgg

SEQ ID NO: 218710 - DNA, 50 bp, Artificial
  Synthetic oligonucleotide
cctcgaactacggtttcccaatggtggtggcgggttacctgctgctccgc

SEQ ID NO: 218711 - DNA, 50 bp, Artificial
  Synthetic oligonucleotide
agatcagtctatggtcggtggggaagcagtacctccgggggcatagccgg

SEQ ID NO: 218712 - DNA, 50 bp, Artificial
  Synthetic oligonucleotide
agatcgccaccgtaccgcgaaccacctataccgggctgacggttgctgtg

SEQ ID NO: 218713 - DNA, 50 bp, Artificial
  Synthetic oligonucleotide
cctccaccgcagtaacgccggaaggcacggacactaccactcttggtctg

SEQ ID NO: 218714 - DNA, 50 bp, Artificial
  Synthetic oligonucleotide
cctcatacccggcccatcggggatatttgttccgctaccggggaaaccgc

SEQ ID NO: 218715 - DNA, 50 bp, Artificial
  Synthetic oligonucleotide
cctagcccccgatagacggactcctcttgggttcgccctcgtcgccataa

SEQ ID NO: 218716 - DNA, 50 bp, Artificial
  Synthetic oligonucleotide
agcaaactccgtgaaagcgaccgacccaaaacacggggcagggcacaagg

SEQ ID NO: 218717 - DNA, 50 bp, Artificial
  Synthetic oligonucleotide
ccggtggttggcacgtaaagggcgtgttgatgaggcccgggcaattgtac

SEQ ID NO: 218718 - DNA, 55 bp, Artificial
  Synthetic oligonucleotide
gacacccggacaaacgatgtttggctgtacatgaggactggccggagggtttatt

SEQ ID NO: 218719 - DNA, 50 bp, Artificial
  Synthetic oligonucleotide
agcacaccgccaagggacttgcagaggttgccgtactctccttccgggtc

SEQ ID NO: 218720 - DNA, 50 bp, Artificial
  Synthetic oligonucleotide
agcacttgagccgtgatttggcccacgaccgtagtggctgaccgagtgtt

SEQ ID NO: 218721 - DNA, 50 bp, Artificial
  Synthetic oligonucleotide
ccggtactgcaggtacagacggtgcaaccggtcccacaggtccgactggt

SEQ ID NO: 218722 - DNA, 50 bp, Artificial
  Synthetic oligonucleotide
actgcaatgagccctcctgtgtggcagtatgccccaccggcgctgcattt

SEQ ID NO: 218723 - DNA, 50 bp, Artificial
  Synthetic oligonucleotide
actgcgccctctttaatctgccgccactggtcaaaccgctcacccaacga

SEQ ID NO: 218724 - DNA, 50 bp, Artificial
  Synthetic oligonucleotide
cggcgccaagagcagggggatcctccagggaacaggggagtgttctcggt

SEQ ID NO: 218725 - DNA, 50 bp, Artificial
  Synthetic oligonucleotide
actgggtgccagaggccccagttatttcgtgctggcccggacacccctgt

SEQ ID NO: 218726 - DNA, 50 bp, Artificial
  Synthetic oligonucleotide
actgtgaaacctgacgcaacgagcacgggagcagagaagcgcgggcctgc

SEQ ID NO: 218727 - DNA, 50 bp, Artificial
  Synthetic oligonucleotide
acttagaacgtgaggccgttgacccgtgggcaagcgagggccggaagtat

SEQ ID NO: 218728 - DNA, 50 bp, Artificial
  Synthetic oligonucleotide
cggaaacgtcaagcgtcattgcgagccatgcgccgctccgccgtaccact

SEQ ID NO: 218729 - DNA, 54 bp, Artificial
  Synthetic oligonucleotide
gaatctataccaggtcggttcaaacccggtatacagattaagcccgaacggtga

SEQ ID NO: 218730 - DNA, 50 bp, Artificial
  Synthetic oligonucleotide
acttgcacgtcacccgccttaaagacacgcttaacccggggtgggtcccc

SEQ ID NO: 218731 - DNA, 50 bp, Artificial
  Synthetic oligonucleotide
acttgtgccgcttgaaggcagcgcttatgtggccagggtctccctgcata

SEQ ID NO: 218732 - DNA, 50 bp, Artificial
  Synthetic oligonucleotide
agaaggtggtgtctccggtacccgggattcgggaggtacggcccaaggta

SEQ ID NO: 218733 - DNA, 50 bp, Artificial
  Synthetic oligonucleotide
cgccgtgacttttacgtccgggcacaccgcagtttgttacctacctgcgt

SEQ ID NO: 218734 - DNA, 50 bp, Artificial
  Synthetic oligonucleotide
cgccggggagctcgactgcacgcagattgcattaagcgtaaccgtccaga

SEQ ID NO: 218735 - DNA, 50 bp, Artificial
  Synthetic oligonucleotide
agacaaccgccctgaattgggagcagccgtgccactcagcaacccgggcg

SEQ ID NO: 218736 - DNA, 50 bp, Artificial
  Synthetic oligonucleotide
agaccacggccactcctccgcaaaatcgactagaccggcccgaacaggat

SEQ ID NO: 218737 - DNA, 50 bp, Artificial
  Synthetic oligonucleotide
cgccacccttacgggcaacggtcccgaggtattgaatatggtggagcggg

SEQ ID NO: 218738 - DNA, 50 bp, Artificial
  Synthetic oligonucleotide
cgccaaccattcagagtgtttcccccaatgacgccggcgcagctatcagc

SEQ ID NO: 218739 - DNA, 50 bp, Artificial
  Synthetic oligonucleotide
cgcactcaggagcgaatcccggacaagggaatccgaaccccgaaacgcgt

SEQ ID NO: 218740 - DNA, 52 bp, Artificial
  Synthetic oligonucleotide
gaacctgattcaaacggatttccctatctgcccggaaccttaccgggtattg

SEQ ID NO: 218741 - DNA, 50 bp, Artificial
  Synthetic oligonucleotide
agaccagccagtttgcaggcacccttagcagggccggtagggaacagttc

SEQ ID NO: 218742 - DNA, 50 bp, Artificial
  Synthetic oligonucleotide
agacggggatgtcacaactctaggccggggcggaagtgacaccactgccg

SEQ ID NO: 218743 - DNA, 50 bp, Artificial
  Synthetic oligonucleotide
cgaggtggaattcctgcataagggcagcgtttgtggagcggccggggcta

SEQ ID NO: 218744 - DNA, 50 bp, Artificial
  Synthetic oligonucleotide
agactcacgcaagcccacctggttgtctccgctttctcggcgcctgccgt

SEQ ID NO: 218745 - DNA, 50 bp, Artificial
  Synthetic oligonucleotide
cgacgcaccgtctgtaccagtggatgcgtgatggcaaggacgtaaccgcc

SEQ ID NO: 218746 - DNA, 50 bp, Artificial
  Synthetic oligonucleotide
agagaaaaccggagaccctgcatcttgtgctgacaggccgggatgcccct

SEQ ID NO: 218747 - DNA, 50 bp, Artificial
  Synthetic oligonucleotide
agagcaggtccgggcggcagtaacaaaaatcaccggacgggatccggggc

SEQ ID NO: 218748 - DNA, 50 bp, Artificial
  Synthetic oligonucleotide
cgaaagctggtgaagggggtcccacctggacgcaacttggacgacaggtg

SEQ ID NO: 218749 - DNA, 50 bp, Artificial
  Synthetic oligonucleotide
cccatgggcactttgccgaaagcagactgggcatccatcctgccttcacc

SEQ ID NO: 218750 - DNA, 50 bp, Artificial
  Synthetic oligonucleotide
cccatgatgcagcggctccgtgtgtcaacccatgcaacaagcttcggtcg

SEQ ID NO: 218751 - DNA, 55 bp, Artificial
  Synthetic oligonucleotide
cttttgacgcttttggtatagagtggccagttgatcttagcggcttatcacctct

SEQ ID NO: 218752 - DNA, 50 bp, Artificial
  Synthetic oligonucleotide
agccgaggggccagggttattctggcgggaagggcttatgatccggcggt

SEQ ID NO: 218753 - DNA, 50 bp, Artificial
  Synthetic oligonucleotide
agccgatccaccgggtgccaaaaccggttccccagttccgggctttatta

SEQ ID NO: 218754 - DNA, 50 bp, Artificial
  Synthetic oligonucleotide
cccaaagggtctttccttagggcgtacccatcagcccccgggagacttgc

SEQ ID NO: 218755 - DNA, 50 bp, Artificial
  Synthetic oligonucleotide
agccggggtaacagccctccaacccaccgtgccggttagccatacccggt

SEQ ID NO: 218756 - DNA, 50 bp, Artificial
  Synthetic oligonucleotide
ccattgcagtcctaagacttccccacgacgggcccccaggaccacggata

SEQ ID NO: 218757 - DNA, 50 bp, Artificial
  Synthetic oligonucleotide
agccggtatcggtgtcagggcaacctttcctatgggcatcggttggtggg

SEQ ID NO: 218758 - DNA, 50 bp, Artificial
  Synthetic oligonucleotide
agccggttgcgggcggggagagacagtagacgtggatcaggtgcggtcct

SEQ ID NO: 218759 - DNA, 50 bp, Artificial
  Synthetic oligonucleotide
ccataagctgcggaaacgtcaagcgtcattgcgagccatgcgccgctccg

SEQ ID NO: 218760 - DNA, 50 bp, Artificial
  Synthetic oligonucleotide
agccgtagagatcgccaccgtaccgcgaaccacctataccgggctgacgg

SEQ ID NO: 218761 - DNA, 50 bp, Artificial
  Synthetic oligonucleotide
agcctccgtagaactgcgttccgagcatcccctggggaaagccattgtcg

SEQ ID NO: 218762 - DNA, 55 bp, Artificial
  Synthetic oligonucleotide
cccatgtgctgaaactatcaccgatcagatataagcctaatccggcattcactcc

SEQ ID NO: 218763 - DNA, 50 bp, Artificial
  Synthetic oligonucleotide
agcctcgggtcatccagggaatcccagcgtgtagctaccgcacacctgct

SEQ ID NO: 218764 - DNA, 50 bp, Artificial
  Synthetic oligonucleotide
ccaggtctataccggtgaggccaccatacagggagcggcactgattgcgg

SEQ ID NO: 218765 - DNA, 50 bp, Artificial
  Synthetic oligonucleotide
ccaggggaaacccaataagctggccctagtccgcaggtccgcgcttggga

SEQ ID NO: 218766 - DNA, 50 bp, Artificial
  Synthetic oligonucleotide
ccagccttttgacaggaccgcttaaagcgccggagggcactgtccagtgt

SEQ ID NO: 218767 - DNA, 50 bp, Artificial
  Synthetic oligonucleotide
ccagaatcggggtgtggcgttgtggtgcccgtcccctaacaaggactctg

SEQ ID NO: 218768 - DNA, 50 bp, Artificial
  Synthetic oligonucleotide
ccaccccgtactcattgggctccggcgggttttccccatcgcataaatgc

SEQ ID NO: 218769 - DNA, 50 bp, Artificial
  Synthetic oligonucleotide
agcctctaagctgtcccctcttgtgatgcgcactggggaagaactgcggg

SEQ ID NO: 218770 - DNA, 50 bp, Artificial
  Synthetic oligonucleotide
ccaatcgggatagcggaaaagctcggggagatagcctaccttcgcccggg

SEQ ID NO: 218771 - DNA, 50 bp, Artificial
  Synthetic oligonucleotide
cattcggggacaacggcggccttgttccacacggctaagatcgtccgcgg

SEQ ID NO: 218772 - DNA, 50 bp, Artificial
  Synthetic oligonucleotide
agcctgcgcttcgccagtcactccaacgggataaacatagcgccccctga

SEQ ID NO: 218773 - DNA, 55 bp, Artificial
  Synthetic oligonucleotide
cccatccagctggctattaaagaaccaccgcccaggctgaaagtaatcttaagag

SEQ ID NO: 218774 - DNA, 50 bp, Artificial
  Synthetic oligonucleotide
agcgaaagggcactaacccgcatgcccagatccccttccaccgtgcgttt

SEQ ID NO: 218775 - DNA, 50 bp, Artificial
  Synthetic oligonucleotide
agcgagtgaaccagccccggagctatggagtacgcgttgtgcgtaaagct

SEQ ID NO: 218776 - DNA, 50 bp, Artificial
  Synthetic oligonucleotide
agcgattgaggccgctgacccgtatctgccgctcactgtcccagcctaag

SEQ ID NO: 218777 - DNA, 50 bp, Artificial
  Synthetic oligonucleotide
ccgggtcctggtcaaaaatcccggctttcgggcggtcgtgatcatccctg

SEQ ID NO: 218778 - DNA, 50 bp, Artificial
  Synthetic oligonucleotide
ccgggccgctatagggaggcgggtcgtctgtaagcaagttcagcccctga

SEQ ID NO: 218779 - DNA, 50 bp, Artificial
  Synthetic oligonucleotide
ccgggagaaccccgaaatcagggatgtcttgattaccggtggggacgccc

SEQ ID NO: 218780 - DNA, 50 bp, Artificial
  Synthetic oligonucleotide
agccactcggctgtagtgggactggccactgccctggaacattcgtatcc

SEQ ID NO: 218781 - DNA, 50 bp, Artificial
  Synthetic oligonucleotide
agccattggtgcggaaatcggaaggagccagggggaccggcataatcgaa

SEQ ID NO: 218782 - DNA, 50 bp, Artificial
  Synthetic oligonucleotide
ccgcttcttgggcttaaatgggcggggcgttgtgggagctgtggggtaag

SEQ ID NO: 218783 - DNA, 50 bp, Artificial
  Synthetic oligonucleotide
agcccacggcggcaacgtttcacggcaaaccggagactatcgcccgcaga

SEQ ID NO: 218784 - DNA, 55 bp, Artificial
  Synthetic oligonucleotide
cccaattcgaatacacttctctgtccaatagcgtgggtgtccacaactcctgttt

SEQ ID NO: 218785 - DNA, 50 bp, Artificial
  Synthetic oligonucleotide
agcccagcctggttcctgtcccgacaatgccgggacccatcccgatgata

SEQ ID NO: 218786 - DNA, 50 bp, Artificial
  Synthetic oligonucleotide
agcccccttccaagcggtagaggagagcccgttctgctttgacggctctt

SEQ ID NO: 218787 - DNA, 50 bp, Artificial
  Synthetic oligonucleotide
agccccggatcctgccgaggttcccattcccggcagagccttgaagaaag

SEQ ID NO: 218788 - DNA, 50 bp, Artificial
  Synthetic oligonucleotide
ccgccccaggaggttaccggaaggggcaccggtctggatgatgaaggact

SEQ ID NO: 218789 - DNA, 50 bp, Artificial
  Synthetic oligonucleotide
ccgatccgccgctccccagaaaatcgaggtacctcctgactgcaggctct

SEQ ID NO: 218790 - DNA, 50 bp, Artificial
  Synthetic oligonucleotide
ccctttcccacgcttccgtcatgcgaagggtgacagatctggtgggcagc

SEQ ID NO: 218791 - DNA, 50 bp, Artificial
  Synthetic oligonucleotide
agcccctcttcgaagggtatccccgactcttcggcataacccctagccgc

SEQ ID NO: 218792 - DNA, 50 bp, Artificial
  Synthetic oligonucleotide
cccgtccgacaaacgggtggcagtgtcacgggattcaactgctaggccat

SEQ ID NO: 218793 - DNA, 50 bp, Artificial
  Synthetic oligonucleotide
agcccctttcggacccaggaccagtgcagccgttcattaagacgggaact

SEQ ID NO: 218794 - DNA, 50 bp, Artificial
  Synthetic oligonucleotide
cccggtgctcggccaatccctccagatcaagagcaggtatgccctgagct

SEQ ID NO: 218795 - DNA, 55 bp, Artificial
  Synthetic oligonucleotide
ccatttcaatggtgccaccagattgcagatacttacctataagaaccgacccggg

SEQ ID NO: 218796 - DNA, 50 bp, Artificial
  Synthetic oligonucleotide
cccggatggctacgcccacaggcactttaacggtcatgcggtgaggaata

SEQ ID NO: 218797 - DNA, 50 bp, Artificial
  Synthetic oligonucleotide
agcccgcgcctgcgagaccagggagagtctcacggggtacctctttgcga

SEQ ID NO: 218798 - DNA, 50 bp, Artificial
  Synthetic oligonucleotide
cccgagagctttgttcaggctggtccgggcagcttctgtcgtccggcagt

SEQ ID NO: 218799 - DNA, 50 bp, Artificial
  Synthetic oligonucleotide
cccctgggtatctttagccagacaggagcccccgaagcctactcccggct

SEQ ID NO: 218800 - DNA, 50 bp, Artificial
  Synthetic oligonucleotide
agcccttagcgatcccacacgtttcgtcgtggtgcaaacagctccggccg

SEQ ID NO: 218801 - DNA, 50 bp, Artificial
  Synthetic oligonucleotide
agcccttggtttttcaaacacgctgctccctcgcctctcgaccggaggca

SEQ ID NO: 218802 - DNA, 50 bp, Artificial
  Synthetic oligonucleotide
ccccaggaggtggtacgttcggcagccgacggtctgtctttgtggtggaa

SEQ ID NO: 218803 - DNA, 50 bp, Artificial
  Synthetic oligonucleotide
agcccttgttgggcaaggtctagccacgccgggattctgtgcggggtgcg

SEQ ID NO: 218804 - DNA, 55 bp, Artificial
  Synthetic oligonucleotide
ccatatcctctgtaactagatgaggcgcgcgggcacctgggataagcacagcccc

SEQ ID NO: 218805 - DNA, 55 bp, Artificial
  Synthetic oligonucleotide
ctgcctggaggggtagattacggtgtcaagttacaggcagtcacggtcaatgcac

SEQ ID NO: 218806 - DNA, 55 bp, Artificial
  Synthetic oligonucleotide
ccataggatgtacatacagggccatgtcttggaagtactcacggggacttccttg

SEQ ID NO: 218807 - DNA, 55 bp, Artificial
  Synthetic oligonucleotide
ccataacgcatactgctgtgcccagaacaatggacactaaaagctggactccgct

SEQ ID NO: 218808 - DNA, 55 bp, Artificial
  Synthetic oligonucleotide
ccagtggagagtatcgccgaaggcgcagagccattaacgtatgctatcgcgccgt

SEQ ID NO: 218809 - DNA, 55 bp, Artificial
  Synthetic oligonucleotide
catggaggctcgtatgacatcgacggaggaccgaataacctcaatggatagagcc

SEQ ID NO: 218810 - DNA, 55 bp, Artificial
  Synthetic oligonucleotide
catgcactccccggagggcaatcgatcaaagttagttcgttgtcttgggaaatag

SEQ ID NO: 218811 - DNA, 55 bp, Artificial
  Synthetic oligonucleotide
catcggttgatgagcgtaaggctatccccgggttatctaaggaaagggcggatat

SEQ ID NO: 218812 - DNA, 55 bp, Artificial
  Synthetic oligonucleotide
cagggcgattgtggtaaccaaccatcatacacggccctttcacgatgacctctcc

SEQ ID NO: 218813 - DNA, 55 bp, Artificial
  Synthetic oligonucleotide
cacttaccggctccagtttaaccggcagtttcgcttttcagatgcccgggcgctc

SEQ ID NO: 218814 - DNA, 55 bp, Artificial
  Synthetic oligonucleotide
cactgcgtcctgggcttgggtcggggaacggatggtttgggagacggcacatttc

SEQ ID NO: 218815 - DNA, 55 bp, Artificial
  Synthetic oligonucleotide
cacggattacccttcttgcagacacgggcttcgcacgtattaaccttcttgcagg

SEQ ID NO: 218816 - DNA, 55 bp, Artificial
  Synthetic oligonucleotide
ctgaggagatccatgtacatccttaaaacccgtaagtttgactgttgggcgcggt

SEQ ID NO: 218817 - DNA, 54 bp, Artificial
  Synthetic oligonucleotide
cacgacctcttgtaccgttggttcggcagggagtccaaagtggcttaggtccac

SEQ ID NO: 218818 - DNA, 55 bp, Artificial
  Synthetic oligonucleotide
caccgctggaccccgcataatcaatgcctgtatggaactcgctgccgcggtatcc

SEQ ID NO: 218819 - DNA, 55 bp, Artificial
  Synthetic oligonucleotide
cacagtagggctgcctattatggggtttctgtacaggatgtggctaataccgccc

SEQ ID NO: 218820 - DNA, 55 bp, Artificial
  Synthetic oligonucleotide
caatgtacctgggactgcgtgtcgttttagctcaaagctttgcccgtattcaccg

SEQ ID NO: 218821 - DNA, 55 bp, Artificial
  Synthetic oligonucleotide
caaggtggttgtgttgagcattatgttcccgattcctcgtgggagactgcaacgg

SEQ ID NO: 218822 - DNA, 55 bp, Artificial
  Synthetic oligonucleotide
caacagtcttctccctgcactgtttacgaaacgctttggctttacgtacaacaag

SEQ ID NO: 218823 - DNA, 55 bp, Artificial
  Synthetic oligonucleotide
caaaatattcgggtgcacagacaatatgacccaaaggttcgtcccctatgggcgg

SEQ ID NO: 218824 - DNA, 55 bp, Artificial
  Synthetic oligonucleotide
attgggcgcagcatagaaggctcccgtccgggttacgacaccgctcacttttccg

SEQ ID NO: 218825 - DNA, 55 bp, Artificial
  Synthetic oligonucleotide
attgccgacttgcctaaacaactccggatcaccgctgacaaaatagcgtgcccgc

SEQ ID NO: 218826 - DNA, 55 bp, Artificial
  Synthetic oligonucleotide
atatctccggagggtttgctccatacttacttactgttacatccgtaaccgtagc

SEQ ID NO: 218827 - DNA, 53 bp, Artificial
  Synthetic oligonucleotide
ctctaaaagagttccccgccgctgcttaaagcgagcgtactaaccggagaagg

SEQ ID NO: 218828 - DNA, 55 bp, Artificial
  Synthetic oligonucleotide
atatcatgatcggagatccatcctatcagaggctgttgggattcggcagtgacgg

SEQ ID NO: 218829 - DNA, 53 bp, Artificial
  Synthetic oligonucleotide
ataccacttctccacgttcgcattccgaaacttgctaaagactaaccttttct

SEQ ID NO: 218830 - DNA, 55 bp, Artificial
  Synthetic oligonucleotide
agtcggggtagatcatgatggggtacaagcggttgaaggtcttatcttagcccgg

SEQ ID NO: 218831 - DNA, 55 bp, Artificial
  Synthetic oligonucleotide
agtccttatcaacgatgaggccatgcgggtcaatgtctcgggaccactgtaaaag

SEQ ID NO: 218832 - DNA, 55 bp, Artificial
  Synthetic oligonucleotide
agtccgatcttggcataactcctgccagcgacggtaacgtgatccgccttgctat

SEQ ID NO: 218833 - DNA, 55 bp, Artificial
  Synthetic oligonucleotide
agggcacgagagcctttaggcgacggcgtaagctgttgctcttatgcatgtcgga

SEQ ID NO: 218834 - DNA, 55 bp, Artificial
  Synthetic oligonucleotide
agggctcattgagattactgatgcgataatgcgtaggatggtatcgatggctctg

SEQ ID NO: 218835 - DNA, 55 bp, Artificial
  Synthetic oligonucleotide
cggagaatccgcataccccttctttcgatgttgatcataactctttgtacagtag

SEQ ID NO: 218836 - DNA, 55 bp, Artificial
  Synthetic oligonucleotide
acttcgcaaattcatcggggaacaatacttaaagcgactgtcccgattatataag

SEQ ID NO: 218837 - DNA, 55 bp, Artificial
  Synthetic oligonucleotide
acttcgtatactatcatatacgcttcatggataacgggtgaagttcccggctagc

SEQ ID NO: 218838 - DNA, 58 bp, Artificial
  Synthetic oligonucleotide
gccaggcagtaacccgctgcacctgtaaagccggtcttaagtccgtctacattggcga

SEQ ID NO: 218839 - DNA, 60 bp, Artificial
  Synthetic oligonucleotide
tccttgcatatctcctccaagcgttctaactgccgccgctgtgataacaccttcgggtgc

SEQ ID NO: 218840 - DNA, 57 bp, Artificial
  Synthetic oligonucleotide
aagcagcccctcttacgaagtctacttgtcctccgactccgctgaattgtctcggtc

SEQ ID NO: 218841 - DNA, 60 bp, Artificial
  Synthetic oligonucleotide
tcggattggcacctgggcaagaccctagagggccatgataggcatgatgaacaggttagg

SEQ ID NO: 218842 - DNA, 60 bp, Artificial
  Synthetic oligonucleotide
ttgagattccccttccggacaatccaatgcgatataccgctatgcctgacgcactcggcg

SEQ ID NO: 218843 - DNA, 57 bp, Artificial
  Synthetic oligonucleotide
tccggcgcaagacttggaaaactgcataccccacacggtacgatagacactcccgtg

SEQ ID NO: 218844 - DNA, 55 bp, Artificial
  Synthetic oligonucleotide
actggtaggctagcgattccagggtagcccttaccaggtgctccctcttagtccc

SEQ ID NO: 218845 - DNA, 58 bp, Artificial
  Synthetic oligonucleotide
tcgatagacattgacaccgacagaatccgctgcactcggatgttccccacatgcacgc

SEQ ID NO: 218846 - DNA, 58 bp, Artificial
  Synthetic oligonucleotide
ggtggcgagatgggcatagctcaagttgctcaggctagggctgctaggatagagccac

SEQ ID NO: 218847 - DNA, 57 bp, Artificial
  Synthetic oligonucleotide
tagctccagcctgtccagacccgcccagtgagtatgcaagtgcacccaaaataccga

SEQ ID NO: 218848 - DNA, 56 bp, Artificial
  Synthetic oligonucleotide
ggcttgtgagggaaactatggcgagagtgaacaagtccactacctgggggccctgg

SEQ ID NO: 218849 - DNA, 60 bp, Artificial
  Synthetic oligonucleotide
gacggatggggccagcactttagccttgataggtggctagagtccatggaggtagcagga

SEQ ID NO: 218850 - DNA, 57 bp, Artificial
  Synthetic oligonucleotide
ctccaatatacagtcttccgatttcatatacacaaccttattcttgattcgcacaac

SEQ ID NO: 218851 - DNA, 56 bp, Artificial
  Synthetic oligonucleotide
ggcgagtggcaagtctatagggatggtaccgacaatgggatgcttgcacgagggcc

SEQ ID NO: 218852 - DNA, 56 bp, Artificial
  Synthetic oligonucleotide
gggcaccaagggggaggatagcaatgcctagagcttatgagcacctgggtatgccg

SEQ ID NO: 218853 - DNA, 55 bp, Artificial
  Synthetic oligonucleotide
gctcttgactatgataccagccataggtctgggactagccggtaagaggattaag

SEQ ID NO: 218854 - DNA, 55 bp, Artificial
  Synthetic oligonucleotide
gctacctggtaccatgggccaaacagggagtcctcctactcaatacggccttgac

SEQ ID NO: 218855 - DNA, 54 bp, Artificial
  Synthetic oligonucleotide
ggaagaggctagagggcgagggaatcaagtgtagggtatttaacccgattggac

SEQ ID NO: 218856 - DNA, 55 bp, Artificial
  Synthetic oligonucleotide
gctacccctactacttgacttcggtctattggaatttgtaggaactctgctagcc

SEQ ID NO: 218857 - DNA, 55 bp, Artificial
  Synthetic oligonucleotide
ggagatcccgttatagcatctgtcagcggtgtgggaggaatagctatgttgggga

SEQ ID NO: 218858 - DNA, 55 bp, Artificial
  Synthetic oligonucleotide
gcggtgcatggctacacaataattggtctgcagctacaggtaacacatatgtatc

SEQ ID NO: 218859 - DNA, 55 bp, Artificial
  Synthetic oligonucleotide
gcccctattggccaactcattttgggccttgcctagtagtgtatagtccaattct

SEQ ID NO: 218860 - DNA, 57 bp, Artificial
  Synthetic oligonucleotide
gtagccactcctagcatgctggtagaaaaggcaccacaaactccccagggtacaagg

SEQ ID NO: 218861 - DNA, 55 bp, Artificial
  Synthetic oligonucleotide
tttcaacgatgattttagcaagacgaacacccggttcgatgtagaagtagttagc

SEQ ID NO: 218862 - DNA, 55 bp, Artificial
  Synthetic oligonucleotide
ggcccttgcctggtaggacgcttacttctatctctagtgtaacgccgcctactgc

SEQ ID NO: 218863 - DNA, 55 bp, Artificial
  Synthetic oligonucleotide
gggtattgtgacattcgaacagtccagtgggtagttttccatataggagtctatc

SEQ ID NO: 218864 - DNA, 55 bp, Artificial
  Synthetic oligonucleotide
gggtccacaatagggtctattatgtcgagccatatgtccatgccgattgtcgatg

SEQ ID NO: 218865 - DNA, 55 bp, Artificial
  Synthetic oligonucleotide
ggtcaacgtcctttagaccatggtacttttcaggcagtacctgtagtgacttaga

SEQ ID NO: 218866 - DNA, 55 bp, Artificial
  Synthetic oligonucleotide
ggttataataagctaggccgtccatactaatagtagaactcggtctcccgtattc

SEQ ID NO: 218867 - DNA, 53 bp, Artificial
  Synthetic oligonucleotide
gtacagtttactaggtcctttctaggcttcttaccacccctacctatggcaag

SEQ ID NO: 218868 - DNA, 55 bp, Artificial
  Synthetic oligonucleotide
tgggtcacctactcttagggtaccaccctggactaggatagtcgctactggaccc

SEQ ID NO: 218869 - DNA, 55 bp, Artificial
  Synthetic oligonucleotide
gtccggtctcatgtagagacgatactcattcaagaaccccttttcagtggattac

SEQ ID NO: 218870 - DNA, 55 bp, Artificial
  Synthetic oligonucleotide
gtgccaccaatgggtgtatctatactactggccctacagcatatactagcagcct

SEQ ID NO: 218871 - DNA, 60 bp, Artificial
  Synthetic oligonucleotide
gttccggactcaggttatccggctgcgattggctattcacaagcatccgcgattccgctt

SEQ ID NO: 218872 - DNA, 55 bp, Artificial
  Synthetic oligonucleotide
taatgtcgacttgccggaatttggaactcccgctatcataattcgaatcgctctg

SEQ ID NO: 218873 - DNA, 55 bp, Artificial
  Synthetic oligonucleotide
tcataacgataagagaaacctctttccggagaatccagctgataagaggacactc

SEQ ID NO: 218874 - DNA, 55 bp, Artificial
  Synthetic oligonucleotide
aaatatagtcacaggtaagggatctaggtcaggtgactacctggtccagcatgag

SEQ ID NO: 218875 - DNA, 55 bp, Artificial
  Synthetic oligonucleotide
aagaaggccaatcctatagttccaggtccaacatgggtacctatagtagacccca

SEQ ID NO: 218876 - DNA, 52 bp, Artificial
  Synthetic oligonucleotide
aagagacaacttccggaaagtatggactattcccttatcgagggacttcgtt

SEQ ID NO: 218877 - DNA, 55 bp, Artificial
  Synthetic oligonucleotide
acttcagtacactttccaggttggctggaatagactgaggtttaactgctgattc

SEQ ID NO: 218878 - DNA, 55 bp, Artificial
  Synthetic oligonucleotide
aggcagacaagctagacgatatcgctaaataaagacctttgatccctgcatggtc

SEQ ID NO: 218879 - DNA, 55 bp, Artificial
  Synthetic oligonucleotide
agtcatcagttctaggtcattgagaaaacaagtatgcaaacgggcacactctagt

SEQ ID NO: 218880 - DNA, 55 bp, Artificial
  Synthetic oligonucleotide
atatacgacgttcactatatccaacacaatcgtgtcaatgactgtaaccattccc

SEQ ID NO: 218881 - DNA, 55 bp, Artificial
  Synthetic oligonucleotide
caagctttcgggatctatatccctgatgtctaccccacctagcttgatctgtccg

SEQ ID NO: 218882 - DNA, 57 bp, Artificial
  Synthetic oligonucleotide
taccccacacggtacgatagacactcccgtgtttatgcctgtcggaacgcaagccac

SEQ ID NO: 218883 - DNA, 55 bp, Artificial
  Synthetic oligonucleotide
caaggcctatggagctgagttgatacttactcctggatctttaggtatgcagggg

SEQ ID NO: 218884 - DNA, 55 bp, Artificial
  Synthetic oligonucleotide
ccaagggctatacctgtacctaatgccacacaactgattgggtcttttgctagtc

SEQ ID NO: 218885 - DNA, 55 bp, Artificial
  Synthetic oligonucleotide
ccagtataggaacctactagctgacctggactatgtaaatggcaggacagagagc

SEQ ID NO: 218886 - DNA, 55 bp, Artificial
  Synthetic oligonucleotide
ccatgctttcgattcgtgaagaacaggcatcatccggatttgtggtaatgtgtac

SEQ ID NO: 218887 - DNA, 55 bp, Artificial
  Synthetic oligonucleotide
ccgattcacactgatgtataaggatacagatccacagattgcagagggaacggat

SEQ ID NO: 218888 - DNA, 55 bp, Artificial
  Synthetic oligonucleotide
cctatcaacctctggctaaatggcctaatcaaagacacaactatcgtacatggga

SEQ ID NO: 218889 - DNA, 55 bp, Artificial
  Synthetic oligonucleotide
cgccctgtggcgtagaaccatcgggcaatattgacccatcctgtggtgatgtccc

SEQ ID NO: 218890 - DNA, 55 bp, Artificial
  Synthetic oligonucleotide
gcagtaaatacggcaacttttgtcggttataagatagctggtatagccggggcca

SEQ ID NO: 218891 - DNA, 55 bp, Artificial
  Synthetic oligonucleotide
gcaggtgcatgtgtatcaaccatcccaccttatgtacggcaatatacggatcact

SEQ ID NO: 218892 - DNA, 55 bp, Artificial
  Synthetic oligonucleotide
gatagctatctgtcttagaggttcttctagggcacgtcttataatcttggctcct

SEQ ID NO: 218893 - DNA, 59 bp, Artificial
  Synthetic oligonucleotide
tcaggccaagattctactccagacgtagtccttggacacgccacaatggccgtttggga

SEQ ID NO: 218894 - DNA, 55 bp, Artificial
  Synthetic oligonucleotide
gatagctaccgtaacatgttctaccatacctgctacacgctctatcacatctatg

SEQ ID NO: 218895 - DNA, 55 bp, Artificial
  Synthetic oligonucleotide
gagtgccgtaacaatagattccacaccgccgcttgctcccaaaagatgacctacc

SEQ ID NO: 218896 - DNA, 55 bp, Artificial
  Synthetic oligonucleotide
gaatgtataggatggagtcatatcgtaccattccgtctactttcaagtgaagatg

SEQ ID NO: 218897 - DNA, 55 bp, Artificial
  Synthetic oligonucleotide
ctctaaggcttgtgagggaaactatggcgagagtgaacaagtccactacctgggg

SEQ ID NO: 218898 - DNA, 55 bp, Artificial
  Synthetic oligonucleotide
cgctcgactgtatagataaaacagtttcgcttatccatcttattgaatccctcgg

SEQ ID NO: 218899 - DNA, 55 bp, Artificial
  Synthetic oligonucleotide
cggatgtatttatgaggctggctgaaaagaacgagacaggctatgccttttaccc

SEQ ID NO: 218900 - DNA, 55 bp, Artificial
  Synthetic oligonucleotide
cggtgttatggtagacataaatggagtaggggtcttgatcaggggagagtctagt

SEQ ID NO: 218901 - DNA, 55 bp, Artificial
  Synthetic oligonucleotide
cgttcttgttagccagttattcaacgctccactactagcttgtggatcaattgca

SEQ ID NO: 218902 - DNA, 55 bp, Artificial
  Synthetic oligonucleotide
ctcgctgttcctctaaggcttgcaaaccgcgccttattgttttcgtcttttccca

SEQ ID NO: 218903 - DNA, 54 bp, Artificial
  Synthetic oligonucleotide
ataatgtgacagcaggcctatcaggtccagctatcaagcctatagcccttagga

SEQ ID NO: 218904 - DNA, 58 bp, Artificial
  Synthetic oligonucleotide
tcatcgagtaggccaggcagtaacccgctgcacctgtaaagccggtcttaagtccgtc

SEQ ID NO: 218905 - DNA, 54 bp, Artificial
  Synthetic oligonucleotide
gcgcccgatggataaaatgtttgtacggacaacgtgcatactgttccaatccgg

SEQ ID NO: 218906 - DNA, 54 bp, Artificial
  Synthetic oligonucleotide
ccgtgtccaacacacgaacaatcgcataatatgaaacgctttcatccctcgtcg

SEQ ID NO: 218907 - DNA, 54 bp, Artificial
  Synthetic oligonucleotide
gtgccgaggatggtatgctaaggggtatagtgaggtcttccgtctttaagggag

SEQ ID NO: 218908 - DNA, 53 bp, Artificial
  Synthetic oligonucleotide
aagttaggaggtgtgactttgtaggggttagattgatgagggacttaattcta

SEQ ID NO: 218909 - DNA, 53 bp, Artificial
  Synthetic oligonucleotide
aagtcttgtatagccggctgcctgtaggtttctcatttcgctatcatccttta

SEQ ID NO: 218910 - DNA, 53 bp, Artificial
  Synthetic oligonucleotide
tctggtcttgggcctaccaatggcccaggctataggcaggtgggggaatttta

SEQ ID NO: 218911 - DNA, 52 bp, Artificial
  Synthetic oligonucleotide
ctcatacaccatcttaaaggttctgtcattcggatcgtctccctctccgtca

SEQ ID NO: 218912 - DNA, 52 bp, Artificial
  Synthetic oligonucleotide
aggatcttcatggtccggttgggatgagtagaaggtgcaatttctagagttc

SEQ ID NO: 218913 - DNA, 52 bp, Artificial
  Synthetic oligonucleotide
acccaaatcacccgaaaagcacaggttcctatcagcgtgattatcatcggat

SEQ ID NO: 218914 - DNA, 52 bp, Artificial
  Synthetic oligonucleotide
aatacgcatacacatacgattgaacatgaccatagacatcgccatgtgggag

SEQ ID NO: 218915 - DNA, 56 bp, Artificial
  Synthetic oligonucleotide
acccctagtcccacttaggtggtcttggcactggcaccctcttgtgttcgctgacc

SEQ ID NO: 218916 - DNA, 52 bp, Artificial
  Synthetic oligonucleotide
tcttttgcccctagtattctctccatattatacaggagactttcagttcgac

SEQ ID NO: 218917 - DNA, 51 bp, Artificial
  Synthetic oligonucleotide
aagcacatcacattctttgaatctccggcagaatctacatactccactttt

SEQ ID NO: 218918 - DNA, 50 bp, Artificial
  Synthetic oligonucleotide
ctactatatcctcaacactatgacgtctacctatcttgtcaagtgtgact

SEQ ID NO: 218919 - DNA, 58 bp, Artificial
  Synthetic oligonucleotide
tccgctgctataccggacttccagcaaaaacctagaccaacctcgcacgctgccctaa

SEQ ID NO: 218920 - DNA, 60 bp, Artificial
  Synthetic oligonucleotide
aagatgaagcgcccgatccaagtcgcgagtgaacacggttgcgtgcaggccgtatatcgt

SEQ ID NO: 218921 - DNA, 59 bp, Artificial
  Synthetic oligonucleotide
ggagcggggcgacagcgatcgggtttcgttcttgtccttgctttctgatgtcgtgccta

SEQ ID NO: 218922 - DNA, 55 bp, Artificial
  Synthetic oligonucleotide
ccatgccagaaccttgctcattagcccttccgagcgacatatagatcaattgtcg

SEQ ID NO: 218923 - DNA, 55 bp, Artificial
  Synthetic oligonucleotide
ccatcggtgccagacggtaaccccggacacctgcggtcacgtatccgaaacgatc

SEQ ID NO: 218924 - DNA, 55 bp, Artificial
  Synthetic oligonucleotide
ccagtcctcgagcagacggaaatgcacccaatactgattgaccgctccgagttcc

SEQ ID NO: 218925 - DNA, 55 bp, Artificial
  Synthetic oligonucleotide
ccagccaatcgtccccgacatgatatggtgcgaatcatagttgaggattcgcgag

SEQ ID NO: 218926 - DNA, 55 bp, Artificial
  Synthetic oligonucleotide
ccacgacatacctgcggcaactatccgcgctgcattggctgagttcaccacctcg

SEQ ID NO: 218927 - DNA, 55 bp, Artificial
  Synthetic oligonucleotide
gtctcagggccacgaacgtgctccagcaccgaactgacttggtcccactgacgga

SEQ ID NO: 218928 - DNA, 55 bp, Artificial
  Synthetic oligonucleotide
gtcgttcgattacagacctgtctattcgcacgatgcaggattgtttcgcccctcg

SEQ ID NO: 218929 - DNA, 55 bp, Artificial
  Synthetic oligonucleotide
gtcgtaacggcacccgtctcggtgccctatgtccgttactctcaggaaaccgcgc

SEQ ID NO: 218930 - DNA, 55 bp, Artificial
  Synthetic oligonucleotide
gtcgcatgagtgcatataggcacggtgagtactcgaactatggcgaggcaagcac

SEQ ID NO: 218931 - DNA, 55 bp, Artificial
  Synthetic oligonucleotide
gtcatgtacgccgatcacgtagtcagaagtcggggactctcatgcgactatttac

SEQ ID NO: 218932 - DNA, 53 bp, Artificial
  Synthetic oligonucleotide
tcgaaccatccgaaaaccgactgaaacggaaggccttcgggtccacaataggc

SEQ ID NO: 218933 - DNA, 55 bp, Artificial
  Synthetic oligonucleotide
ggtttgctgattacgcggtcggttcgcgattgatccttcggaacatcaagcgtgt

SEQ ID NO: 218934 - DNA, 55 bp, Artificial
  Synthetic oligonucleotide
ggttcaatgatttaatcatagggtaaacgatctaaagtcggatggcatccttatg

SEQ ID NO: 218935 - DNA, 55 bp, Artificial
  Synthetic oligonucleotide
ggtggcgctgctattggagaatttaccctgttgcttgcgtcggctcatgcgggcg

SEQ ID NO: 218936 - DNA, 55 bp, Artificial
  Synthetic oligonucleotide
ggtagctcatatgcgcagcttcgtctaaaaggcaagtgatcctttatgtgagcgc

SEQ ID NO: 218937 - DNA, 52 bp, Artificial
  Synthetic oligonucleotide
ggtacgttaccacgaagggcgcgtgagaccgggagacaaggtggtatcccgt

SEQ ID NO: 218938 - DNA, 53 bp, Artificial
  Synthetic oligonucleotide
gggtctttcggagggattgtatccgacacgggtctttgcgtggacgagcccgg

SEQ ID NO: 218939 - DNA, 55 bp, Artificial
  Synthetic oligonucleotide
ggggtgtcgctcagcgaaaagtggaaggatggcatctcgaccctgcatgggatgc

SEQ ID NO: 218940 - DNA, 55 bp, Artificial
  Synthetic oligonucleotide
ggggtctctaataaacgagtcaccgaagcgccagcaagaaaactcgatccaaaga

SEQ ID NO: 218941 - DNA, 55 bp, Artificial
  Synthetic oligonucleotide
gggctggataaactcacgcgcctgtagcgcatgtggacgagaacgtaagctgcca

SEQ ID NO: 218942 - DNA, 55 bp, Artificial
  Synthetic oligonucleotide
gggctaactatcacttctcgccgcacacgcaaaacggatcgagccgaggttttcg

SEQ ID NO: 218943 - DNA, 58 bp, Artificial
  Synthetic oligonucleotide
attgacgagcgttacgcgcggctggttgtaccggaccgaaacaagtcatgagttggca

SEQ ID NO: 218944 - DNA, 55 bp, Artificial
  Synthetic oligonucleotide
gggccaacccgcgacgccagccttccaatccattcgcgttccggcaaattcgcta

SEQ ID NO: 218945 - DNA, 55 bp, Artificial
  Synthetic oligonucleotide
gggaacaaaatctcgatagatcgtcattccgcatttcgtcggcccatacttggca

SEQ ID NO: 218946 - DNA, 55 bp, Artificial
  Synthetic oligonucleotide
ggctgggctttcgtagtgccggccgattcgcaacataaggacgccgcactccgtt

SEQ ID NO: 218947 - DNA, 55 bp, Artificial
  Synthetic oligonucleotide
ggctaatgctcgccgtccgacaatggaggccgtcaaccaaggcgaacgcagctct

SEQ ID NO: 218948 - DNA, 55 bp, Artificial
  Synthetic oligonucleotide
ggctaacggcaaggggtaaaggatctattgaccgtaaagagccgttcacatcgtc

SEQ ID NO: 218949 - DNA, 55 bp, Artificial
  Synthetic oligonucleotide
ggcggtcccgtttcaacgtgctgactattgcgcccttcctctaccagccattccc

SEQ ID NO: 218950 - DNA, 55 bp, Artificial
  Synthetic oligonucleotide
ggcctgacttgccgtcgtgtcgcgttcagccaccactataggtgggttcggtatc

SEQ ID NO: 218951 - DNA, 55 bp, Artificial
  Synthetic oligonucleotide
ttttgcccggaacgccgattctggattgaaggcttggagcattggcgggatttca

SEQ ID NO: 218952 - DNA, 55 bp, Artificial
  Synthetic oligonucleotide
tttgcagttagtcaccagtatcaaaagtgcggagaggcagcagtgccgataggga

SEQ ID NO: 218953 - DNA, 55 bp, Artificial
  Synthetic oligonucleotide
ttcaggcaggcggaagagtttcaacttggcttatttaatggggatcgcgctcgcg

SEQ ID NO: 218954 - DNA, 60 bp, Artificial
  Synthetic oligonucleotide
attccatcatccgcatattgggcgaggcccatgaatcggaactcccatgtattgtgccag

SEQ ID NO: 218955 - DNA, 55 bp, Artificial
  Synthetic oligonucleotide
tggcttgtgtcgggcttcactggtccgcgcgagactgtgctggcgtcatagcgca

SEQ ID NO: 218956 - DNA, 55 bp, Artificial
  Synthetic oligonucleotide
tggcgagtagagcatctagggactgtttcttgccctctggtgaagtagccacctt

SEQ ID NO: 218957 - DNA, 55 bp, Artificial
  Synthetic oligonucleotide
tgcgcaggcacgaaaccccgggaaagacaccagatgaatgaaacgcggacaccgg

SEQ ID NO: 218958 - DNA, 55 bp, Artificial
  Synthetic oligonucleotide
tgcctcgcgacctaacacaaagatcataggcttcgagatttgacggtcgggaacg

SEQ ID NO: 218959 - DNA, 55 bp, Artificial
  Synthetic oligonucleotide
tgcattgtggttcccttcccgtgaaggagcgcgcatgcaatccgggatcgacctc

SEQ ID NO: 218960 - DNA, 55 bp, Artificial
  Synthetic oligonucleotide
tgatgcgactctccagtatgccggcgtctatcaccagaaaatccatgtgctgtcc

SEQ ID NO: 218961 - DNA, 55 bp, Artificial
  Synthetic oligonucleotide
tcgtggccgcgcaacagtttagcggcgtcgctttccaaaagggagctgcgacatt

SEQ ID NO: 218962 - DNA, 54 bp, Artificial
  Synthetic oligonucleotide
tcgggtgtcctcgattccacccgccgtaggataaccgtttccggccatgaccga

SEQ ID NO: 218963 - DNA, 55 bp, Artificial
  Synthetic oligonucleotide
tcgaacagtccggcacaaagctcgctacgctttggtgcttgctgcctgagcgggc

SEQ ID NO: 218964 - DNA, 55 bp, Artificial
  Synthetic oligonucleotide
tccggacgtaatggttattagctttccaagcagaatccagtgccaaggtctttga

SEQ ID NO: 218965 - DNA, 60 bp, Artificial
  Synthetic oligonucleotide
tctgggcgatctcagtgacgcagtaagagtggttacagccatccgccgagctccgtagcg

SEQ ID NO: 218966 - DNA, 55 bp, Artificial
  Synthetic oligonucleotide
tatagggagcatggaccggagcgccgttcggagtgacggccgcaaaagcccagcc

SEQ ID NO: 218967 - DNA, 55 bp, Artificial
  Synthetic oligonucleotide
tataatgaagagtcgttcatccgtgccaacctctcttgagggtctgacggcatgc

SEQ ID NO: 218968 - DNA, 55 bp, Artificial
  Synthetic oligonucleotide
tagtttctgggctccgccggctgtgagcgaagaacatgcttccgccccaacggag

SEQ ID NO: 218969 - DNA, 55 bp, Artificial
  Synthetic oligonucleotide
tagggtgtcgacgcactcccgataccgacctccaaggatcggccaggcgaggtaa

SEQ ID NO: 218970 - DNA, 55 bp, Artificial
  Synthetic oligonucleotide
tagcccatgtcggtggcccaatggtgccggcatataaactcttttcggaggccga

SEQ ID NO: 218971 - DNA, 55 bp, Artificial
  Synthetic oligonucleotide
tacgtcaaggactgacccgaaagactgatagcgttggagtcatcacatgcagatt

SEQ ID NO: 218972 - DNA, 55 bp, Artificial
  Synthetic oligonucleotide
tacggcgggatttgatgaccagggaattagcacaccgagatcagtggcttaaacc

SEQ ID NO: 218973 - DNA, 55 bp, Artificial
  Synthetic oligonucleotide
taatacgacgtggagctattcagaccctgaacggatgatgacctacagggcgggg

SEQ ID NO: 218974 - DNA, 55 bp, Artificial
  Synthetic oligonucleotide
gttgacatatattctgtcgccggaatgcgatcaatagcgcgcattgacccgggca

SEQ ID NO: 218975 - DNA, 55 bp, Artificial
  Synthetic oligonucleotide
gtggcgctgcacattcatccgccctacgcgaccacgctggcaacactcaaggatc

SEQ ID NO: 218976 - DNA, 59 bp, Artificial
  Synthetic oligonucleotide
atgcgggcccatatttcattgggaatttcgagaccattctcgagattgcgttggcgact

SEQ ID NO: 218977 - DNA, 55 bp, Artificial
  Synthetic oligonucleotide
gcctaaccagagagacacccatctccgatcctcggaaatgctctgccgtcagtag

SEQ ID NO: 218978 - DNA, 55 bp, Artificial
  Synthetic oligonucleotide
gccgtaagattcgtgagacggcaaacgattctggaggctggggctagcttctccg

SEQ ID NO: 218979 - DNA, 53 bp, Artificial
  Synthetic oligonucleotide
gccgaccggttatttcgttgttggatttcgacatactctcccgggctcttacg

SEQ ID NO: 218980 - DNA, 55 bp, Artificial
  Synthetic oligonucleotide
gccagggcctatccgctcaaacatcgccgcaaatggtcttgcctggttcgagcgc

SEQ ID NO: 218981 - DNA, 55 bp, Artificial
  Synthetic oligonucleotide
gcagacccaaattgaaggcctgacgttggtctccgcggatcggcaattttcagcc

SEQ ID NO: 218982 - DNA, 53 bp, Artificial
  Synthetic oligonucleotide
gcactgcctagcggttctaatttggttggagacctccgaattccccgggtggg

SEQ ID NO: 218983 - DNA, 55 bp, Artificial
  Synthetic oligonucleotide
gcacggtagagatacgtccatcgaccacgaaccccagacgtaggtttcaacgtgc

SEQ ID NO: 218984 - DNA, 55 bp, Artificial
  Synthetic oligonucleotide
gattctgattgtctcgacaccgcgtgatctgccggcttttcgtgatttactcggc

SEQ ID NO: 218985 - DNA, 55 bp, Artificial
  Synthetic oligonucleotide
gatgttttgacggttcttcgaacccttgccgtgctgcctcattggcttggacgcg

SEQ ID NO: 218986 - DNA, 55 bp, Artificial
  Synthetic oligonucleotide
gatggagtggatttgcaggcgatgttaactcttgatctttggcccgcttgcatcc

SEQ ID NO: 218987 - DNA, 60 bp, Artificial
  Synthetic oligonucleotide
ggcaagggcagggcccaagaatccgacttgccagtcgaccaagatgcgctgatagccgag

SEQ ID NO: 218988 - DNA, 55 bp, Artificial
  Synthetic oligonucleotide
gaggctctggttatccgatggcatgtagaaccggccccacaaggattttctgcca

SEQ ID NO: 218989 - DNA, 55 bp, Artificial
  Synthetic oligonucleotide
gaggctcgcggatccagctcccaaatcaccaaccgttgagcaactctgtaccagt

SEQ ID NO: 218990 - DNA, 55 bp, Artificial
  Synthetic oligonucleotide
gaggcggaagctagggagacaaattcatatccgacgcgggcaaacaagattcgag

SEQ ID NO: 218991 - DNA, 55 bp, Artificial
  Synthetic oligonucleotide
gagacgctacgaacgaaattttatccgccggaccttggcgctcgacgcctctccc

SEQ ID NO: 218992 - DNA, 55 bp, Artificial
  Synthetic oligonucleotide
gacagccagtcgagacccgatcgaccgaatcgtgaataggagcgctgttggactc

SEQ ID NO: 218993 - DNA, 55 bp, Artificial
  Synthetic oligonucleotide
gacaagccgtcgattttcaccgacctcgatatgcggttcgcgccctggatcacac

SEQ ID NO: 218994 - DNA, 55 bp, Artificial
  Synthetic oligonucleotide
gaaacaacccgcatgctgccgcataactcggtcgggatcagacctccggagtacc

SEQ ID NO: 218995 - DNA, 55 bp, Artificial
  Synthetic oligonucleotide
ctttcagaccctcgtcgtgcaatatggggtccgtgaaggcaaccgctatcggcga

SEQ ID NO: 218996 - DNA, 55 bp, Artificial
  Synthetic oligonucleotide
ctttaggtcaactctgttgacgcgagtgagtctgggtggttgagtcatcgcctat

SEQ ID NO: 218997 - DNA, 55 bp, Artificial
  Synthetic oligonucleotide
cttggcacggggatacggtgtaggtgcaacaggattgtgacagtaccgtgatacg

SEQ ID NO: 218998 - DNA, 56 bp, Artificial
  Synthetic oligonucleotide
gaagacgaaaccctctacggagcaatccgctacgaggagccagtacccatcgccgg

SEQ ID NO: 218999 - DNA, 55 bp, Artificial
  Synthetic oligonucleotide
cttgctcgcctcccatcgttcgcgcttcacatgccctcggccgcttgctatatcg

SEQ ID NO: 219000 - DNA, 55 bp, Artificial
  Synthetic oligonucleotide
ggcctacgcgtttgtccgtggctgcaaagttaggccgtaagcgcgcattttgttg

SEQ ID NO: 219001 - DNA, 55 bp, Artificial
  Synthetic oligonucleotide
ggccccacgttgcgagttggctggatttgcgcgataactcccatcggcgtatacg

SEQ ID NO: 219002 - DNA, 55 bp, Artificial
  Synthetic oligonucleotide
ggccagtttgaaaatcgcatcccatagagcatgcgatctcccatgtgagctttca

SEQ ID NO: 219003 - DNA, 55 bp, Artificial
  Synthetic oligonucleotide
ggcagcgtcgtatgcggtgtttcgatgccagtcagggacgatcccgttatggcga

SEQ ID NO: 219004 - DNA, 55 bp, Artificial
  Synthetic oligonucleotide
ggcagcgaaggggacttccgcggggataaagatccataagagcagcccgcctagg

SEQ ID NO: 219005 - DNA, 55 bp, Artificial
  Synthetic oligonucleotide
ggcaataagagcgtcatgctccaattctctatggtggatcagaagagtgaaacac

SEQ ID NO: 219006 - DNA, 55 bp, Artificial
  Synthetic oligonucleotide
ggcaagataatttggcattgccgtgcccgtgcgttctgggtgtattgccaagttc

SEQ ID NO: 219007 - DNA, 55 bp, Artificial
  Synthetic oligonucleotide
ggataggaatttcgaccctggcactcgtgctgatccggttgctaatgcgtgtagt

SEQ ID NO: 219008 - DNA, 54 bp, Artificial
  Synthetic oligonucleotide
ggatacccgcgattgggcgagacaggcgcaagacggtttctggtcgggtaaagg

SEQ ID NO: 219009 - DNA, 60 bp, Artificial
  Synthetic oligonucleotide
atctgactctgtcctgtaaagtgtcaataccgggggacctagtcatgagcgacaataagc

SEQ ID NO: 219010 - DNA, 55 bp, Artificial
  Synthetic oligonucleotide
ggagtatccattcttggccggtgtgtgccgactaccaactctcacgcgattatag

SEQ ID NO: 219011 - DNA, 55 bp, Artificial
  Synthetic oligonucleotide
ggagagaagaacatggacgcacagaccgatgatcccagtgccggcaaatgccccg

SEQ ID NO: 219012 - DNA, 55 bp, Artificial
  Synthetic oligonucleotide
ggaccagcctcgggatgtagcacctcgccgtgcaagggactgtatccacgggcgg

SEQ ID NO: 219013 - DNA, 55 bp, Artificial
  Synthetic oligonucleotide
ggacagaaacatgtccgaaccggccccagtagagcctgatcgcttccgtcatggg

SEQ ID NO: 219014 - DNA, 55 bp, Artificial
  Synthetic oligonucleotide
ggaatcgcatggtctgccacccggcttttacatgctgacctattcactgttcatg

SEQ ID NO: 219015 - DNA, 55 bp, Artificial
  Synthetic oligonucleotide
gcttcgggttctctatgtttcattcgcatcattgagaccgcttgccgacactcag

SEQ ID NO: 219016 - DNA, 55 bp, Artificial
  Synthetic oligonucleotide
gctcgggtgtcgttcactaatcattgataccgcggttccggctacaggaaccagc

SEQ ID NO: 219017 - DNA, 55 bp, Artificial
  Synthetic oligonucleotide
gcgtcgagttcgcctgattcaagattcacgttccaactggcccatttgcgcgaat

SEQ ID NO: 219018 - DNA, 55 bp, Artificial
  Synthetic oligonucleotide
gcggttcccggtgcctgtgaactaatctgactttgatactagtcgttccagcggg

SEQ ID NO: 219019 - DNA, 55 bp, Artificial
  Synthetic oligonucleotide
gcggtaaaagggcgtgatttcagagatatcccgggcctgctagcgctggagatcg

SEQ ID NO: 219020 - DNA, 57 bp, Artificial
  Synthetic oligonucleotide
ctgttagcgtggggtctcatggctccccggcactgcacggcccttctacggagaccc

SEQ ID NO: 219021 - DNA, 55 bp, Artificial
  Synthetic oligonucleotide
gcgggacaaaatcccgagccattcggagcgctttgcaatggcaaccgactcggct

SEQ ID NO: 219022 - DNA, 55 bp, Artificial
  Synthetic oligonucleotide
gcgcactatggcttggtcattaagcgaggaattgaaatcccataggtcgggacga

SEQ ID NO: 219023 - DNA, 55 bp, Artificial
  Synthetic oligonucleotide
gcgcaaggcaggtaggcctcagtatgctttcctcgctcacacaggttccgatccc

SEQ ID NO: 219024 - DNA, 55 bp, Artificial
  Synthetic oligonucleotide
gcgagactgtcgtcagacgcttggtatatctgtcgaacaattccaccttttctgg

SEQ ID NO: 219025 - DNA, 55 bp, Artificial
  Synthetic oligonucleotide
aatcatggagagtggagtttcagcgttaatacgtctgattattcctcgctcgcgc

SEQ ID NO: 219026 - DNA, 55 bp, Artificial
  Synthetic oligonucleotide
aaatgcttcgctatactctcccatggcgccctccgtgcgtgaggatcggctcggc

SEQ ID NO: 219027 - DNA, 55 bp, Artificial
  Synthetic oligonucleotide
aagaatctggcctaaaccgcaccgatgcagtagtcttgcggacatggattcgtct

SEQ ID NO: 219028 - DNA, 55 bp, Artificial
  Synthetic oligonucleotide
aaatcgtttcggcgggaatcggtgcgatcaagtcttagagagtcaggagaatcgt

SEQ ID NO: 219029 - DNA, 55 bp, Artificial
  Synthetic oligonucleotide
aacagaacgctccgtggagcgagcgtatggggaaacgggattccaggcttcacgc

SEQ ID NO: 219030 - DNA, 55 bp, Artificial
  Synthetic oligonucleotide
acagaattggggcggcatggacgctgcagtatgaggtcaccttttacgcaatctg

SEQ ID NO: 219031 - DNA, 59 bp, Artificial
  Synthetic oligonucleotide
gctgcgactggtttgcggaagtaccgaaaggtcggattgttgcaatgcgcttatcgaat

SEQ ID NO: 219032 - DNA, 56 bp, Artificial
  Synthetic oligonucleotide
ttaatcgggtgccgttgcagctaaagggacgcccccggcttggccaaatcgcctca

SEQ ID NO: 219033 - DNA, 55 bp, Artificial
  Synthetic oligonucleotide
acccgtcgtcacgagaaggcgcagtgaggcaggacgtagtccatcggtcacgatc

SEQ ID NO: 219034 - DNA, 55 bp, Artificial
  Synthetic oligonucleotide
acagctcttgccgatcgttgacaggtgacacagcgaggtcttcgatttcagctgt

SEQ ID NO: 219035 - DNA, 55 bp, Artificial
  Synthetic oligonucleotide
aacgaggatctgtcgtccatcgggtatgcttagccgagactacgcctcgaatcca

SEQ ID NO: 219036 - DNA, 55 bp, Artificial
  Synthetic oligonucleotide
aaaccttgtcgcgcttctgcgaaaccggcgcatcacgaaattatttcactatgcc

SEQ ID NO: 219037 - DNA, 55 bp, Artificial
  Synthetic oligonucleotide
acgaatacacgaagaccctgctcgcatcgtctccgggtctgaaccaagtctccgc

SEQ ID NO: 219038 - DNA, 55 bp, Artificial
  Synthetic oligonucleotide
aattctggcttggcagatgattctggcctcgccagtcattcgaggcgtttggggc

SEQ ID NO: 219039 - DNA, 55 bp, Artificial
  Synthetic oligonucleotide
aaacctcgtcagtttgagcgggctatttgaccgcgccttatttcactgcgccttg

SEQ ID NO: 219040 - DNA, 55 bp, Artificial
  Synthetic oligonucleotide
aaccgtcggacaaacctgggcactcgatgtttgacttgaggcagctgacactcga

SEQ ID NO: 219041 - DNA, 54 bp, Artificial
  Synthetic oligonucleotide
ccccagcgaaggccctcaaaccttatgtgaccttacgttatcacaccggtgcac

SEQ ID NO: 219042 - DNA, 54 bp, Artificial
  Synthetic oligonucleotide
atgtaacacaggcgcgatgcctgattatacgccaacaggaatgcgtcatggcgc

SEQ ID NO: 219043 - DNA, 59 bp, Artificial
  Synthetic oligonucleotide
ctcggtgacgccacaccctcggaaccagcgatcgtttagcctcatgaaccagcgacact

SEQ ID NO: 219044 - DNA, 54 bp, Artificial
  Synthetic oligonucleotide
tccggtacactgcaacggatcggagagtgccatggatgttcaacgcaaagacgt

SEQ ID NO: 219045 - DNA, 54 bp, Artificial
  Synthetic oligonucleotide
cgtgtgtttaagagatcgcagaacgggtccgaaaagctcccttcgattgaaggt

SEQ ID NO: 219046 - DNA, 54 bp, Artificial
  Synthetic oligonucleotide
cctgagagggtggccgacttacaaatgatcgaaggattggacatgagacaggca

SEQ ID NO: 219047 - DNA, 54 bp, Artificial
  Synthetic oligonucleotide
tcgcgcggtagccaccaagctagcatcaactccggccgttgatctcattcgtca

SEQ ID NO: 219048 - DNA, 54 bp, Artificial
  Synthetic oligonucleotide
taagatttggtttccgcaataccggccattaaccactaggtcccaacgcctcaa

SEQ ID NO: 219049 - DNA, 54 bp, Artificial
  Synthetic oligonucleotide
ggtggggcgatcacaaagggccgtccaactcctgcggtgccaatgtcagctatg

SEQ ID NO: 219050 - DNA, 54 bp, Artificial
  Synthetic oligonucleotide
tcgcttggcgctagatgccatacgtgcagttcagccaaagcacgaggtctgacg

SEQ ID NO: 219051 - DNA, 54 bp, Artificial
  Synthetic oligonucleotide
tcggataatcgaaataaaactcgacagtcctggtcatgacgcatcctccggtca

SEQ ID NO: 219052 - DNA, 54 bp, Artificial
  Synthetic oligonucleotide
gtagctagaaagaggaacacatggctgaccttcgcaactatcaagcccgagtaa

SEQ ID NO: 219053 - DNA, 54 bp, Artificial
  Synthetic oligonucleotide
ggcgcggtttgtggcccgaatttgcgtatggaaatgacgctttgagcggccctg

SEQ ID NO: 219054 - DNA, 54 bp, Artificial
  Synthetic oligonucleotide
acggaattgtcgccacggtatggatacgtccgttctcggaaaggagattttgcg

SEQ ID NO: 219055 - DNA, 54 bp, Artificial
  Synthetic oligonucleotide
gcttaacgtgtgccaggtcgttccggaattcgttcagccttagaatgtcacgac

SEQ ID NO: 219056 - DNA, 54 bp, Artificial
  Synthetic oligonucleotide
ttaccagggtcgtccattctcgcttgcctgacggcccgaatatccatcgatttg

SEQ ID NO: 219057 - DNA, 53 bp, Artificial
  Synthetic oligonucleotide
cactgattgcgagcttaaatgttgttcgcaagtcagccagcggtcttaagctt

SEQ ID NO: 219058 - DNA, 53 bp, Artificial
  Synthetic oligonucleotide
gtagtgacttttccattcgatcaaggccattggacactcctgtcgcgtcagtg

SEQ ID NO: 219059 - DNA, 53 bp, Artificial
  Synthetic oligonucleotide
caattgtgcgaggacgaaaagcggttacttatagatcaccggctctaccgggg

SEQ ID NO: 219060 - DNA, 53 bp, Artificial
  Synthetic oligonucleotide
ctggacaagatggtagtgtttgatccgtcggcaacgacggtggaacacgttta

SEQ ID NO: 219061 - DNA, 53 bp, Artificial
  Synthetic oligonucleotide
gccgctcacccatcgtgtttgagcgcgggcatggcgtttggctggagacaccg

SEQ ID NO: 219062 - DNA, 53 bp, Artificial
  Synthetic oligonucleotide
tacaggtctgcgtcgaaatggttactatactgcgaaataacgctacctatagg

SEQ ID NO: 219063 - DNA, 53 bp, Artificial
  Synthetic oligonucleotide
attacggacgaggacggcaattattggttccgcaccattcagcccggagccta

SEQ ID NO: 219064 - DNA, 53 bp, Artificial
  Synthetic oligonucleotide
tacgcgattgcgcgtatacagcgccattatacgcgaaggcggataggcactat

SEQ ID NO: 219065 - DNA, 56 bp, Artificial
  Synthetic oligonucleotide
ctcggttccctatctcgatcttttctactcgaaattcccatcaagccgctacacgc

SEQ ID NO: 219066 - DNA, 53 bp, Artificial
  Synthetic oligonucleotide
tgtaaagtcgccggcaacatagttagagggtttgcgcccgtcaagccacgggc

SEQ ID NO: 219067 - DNA, 53 bp, Artificial
  Synthetic oligonucleotide
cctacgagccaggagaacaggcatgtccaagacagatgttcagccgtcctcgg

SEQ ID NO: 219068 - DNA, 53 bp, Artificial
  Synthetic oligonucleotide
aggtggcactgcggtacatctctccgaaggcagccgtgtggccgctcagtgga

SEQ ID NO: 219069 - DNA, 53 bp, Artificial
  Synthetic oligonucleotide
ctaagtcgcccggtgaacgttacggaagctccgttcggataggcgtggcccaa

SEQ ID NO: 219070 - DNA, 52 bp, Artificial
  Synthetic oligonucleotide
cttccgttcgcgtgaaatcctatgggcctgggtaaacgaaccggcgttgtct

SEQ ID NO: 219071 - DNA, 52 bp, Artificial
  Synthetic oligonucleotide
cactgatcgcagtggtatcgtgaccgacccggaacctgagagctgcaattcg

SEQ ID NO: 219072 - DNA, 52 bp, Artificial
  Synthetic oligonucleotide
agtcgttccgtcccggctatggctgccttatgccccaatcaggctaatatgg

SEQ ID NO: 219073 - DNA, 52 bp, Artificial
  Synthetic oligonucleotide
agtgatcttcttgcgattggacttctcgctgcttgtcgcggcaagtcggaac

SEQ ID NO: 219074 - DNA, 52 bp, Artificial
  Synthetic oligonucleotide
cgataccatgcagaacttattcgcgacatgcttcttcatcggcgcattatag

SEQ ID NO: 219075 - DNA, 52 bp, Artificial
  Synthetic oligonucleotide
tcggatctcgccaatgtaaggctgtgccacgacgcgtctccgtcaattctgc

SEQ ID NO: 219076 - DNA, 56 bp, Artificial
  Synthetic oligonucleotide
gacgcagtaagagtggttacagccatccgccgagctccgtagcgcgaaggatatgg

SEQ ID NO: 219077 - DNA, 52 bp, Artificial
  Synthetic oligonucleotide
gtgtacagcgatcttgaatgacggccaaccagatgaggagttctggccttat

SEQ ID NO: 219078 - DNA, 52 bp, Artificial
  Synthetic oligonucleotide
cggggcatgagttccggtagttgagaggacgataaacatgacgaagatcgtc

SEQ ID NO: 219079 - DNA, 52 bp, Artificial
  Synthetic oligonucleotide
cgggtcgtgaggcacgaaatagcgaccaaataacgcacagacgacccagtac

SEQ ID NO: 219080 - DNA, 52 bp, Artificial
  Synthetic oligonucleotide
ttcacatggtcttccgctccaatatcgcgtttcaccgggtgttcttcgattt

SEQ ID NO: 219081 - DNA, 52 bp, Artificial
  Synthetic oligonucleotide
ttatcccgcacatttcgctgcctgttggtcagtcttcggcatctgttgacat

SEQ ID NO: 219082 - DNA, 52 bp, Artificial
  Synthetic oligonucleotide
cgtccgaaggttttgatgcggaaggagagggcacgttccagtcttatgtgtc

SEQ ID NO: 219083 - DNA, 52 bp, Artificial
  Synthetic oligonucleotide
gcaatattgtctccacctttgtcgcgcccggaggtagttcctctctggatca

SEQ ID NO: 219084 - DNA, 52 bp, Artificial
  Synthetic oligonucleotide
gccgccctaagtcgtgcaccaagtttcgctcgagtgccgcatgcggccttgt

SEQ ID NO: 219085 - DNA, 52 bp, Artificial
  Synthetic oligonucleotide
cgcggtgtttccgagggaacgcgtctgaaggtcacaacggaagaaagtccaa

SEQ ID NO: 219086 - DNA, 52 bp, Artificial
  Synthetic oligonucleotide
aagcccgccacggcattcctattcaagctgatctcacagctgcaattcagcg

SEQ ID NO: 219087 - DNA, 56 bp, Artificial
  Synthetic oligonucleotide
cgaatgacacagttgagcgtttttaatgtccgagaccattataatggacgcagagc

SEQ ID NO: 219088 - DNA, 52 bp, Artificial
  Synthetic oligonucleotide
acccgattccgaactccaccaaactcgctcagcttcaattgcaaccgctacc

SEQ ID NO: 219089 - DNA, 52 bp, Artificial
  Synthetic oligonucleotide
atgatctaagtcaggtctggagacgagcggatgtctccaagcagcctcacgt

SEQ ID NO: 219090 - DNA, 52 bp, Artificial
  Synthetic oligonucleotide
catgaaggcgcaagtctggtctgcggtggcgatctgacaggttacgaagggt

SEQ ID NO: 219091 - DNA, 51 bp, Artificial
  Synthetic oligonucleotide
gcagaatgcagacgaacgctccaactgcttgtgtcgttatgctaatgttgt

SEQ ID NO: 219092 - DNA, 51 bp, Artificial
  Synthetic oligonucleotide
ccattgcgccgatatcggttgaagggtccagaggatctccgactttgtact

SEQ ID NO: 219093 - DNA, 51 bp, Artificial
  Synthetic oligonucleotide
gcaggctgcgttcttaccggtcttttcgcggcggctaaatgaggtgcgcag

SEQ ID NO: 219094 - DNA, 51 bp, Artificial
  Synthetic oligonucleotide
caggatacgccgtctcgggccagactacgtagcgtggccgatcgcttttac

SEQ ID NO: 219095 - DNA, 51 bp, Artificial
  Synthetic oligonucleotide
gccgacgcttgatcacattgaccggatgtcttgatcgggggccgcaagcca

SEQ ID NO: 219096 - DNA, 51 bp, Artificial
  Synthetic oligonucleotide
ccaccataccgatgggcgaaacctactatctgcgtccccgcagaagcctga

SEQ ID NO: 219097 - DNA, 51 bp, Artificial
  Synthetic oligonucleotide
agagactcttctcaaatgcagttacttgagaatctgacgtccaagattctc

SEQ ID NO: 219098 - DNA, 56 bp, Artificial
  Synthetic oligonucleotide
tttctcggtccagattgacgttcacgaaatggcttgcccctttcatgcgagcacgc

SEQ ID NO: 219099 - DNA, 51 bp, Artificial
  Synthetic oligonucleotide
ctaatagaggcttcgtccggaaatcacgtgtgggctgagcgttatgatcga

SEQ ID NO: 219100 - DNA, 51 bp, Artificial
  Synthetic oligonucleotide
tgaaataaggtccgattcggcagcatggccggattggtgttccgcgtatga

SEQ ID NO: 219101 - DNA, 51 bp, Artificial
  Synthetic oligonucleotide
tagaagactggcaaaggtcaggcttctgtcgggaggggtcgactcagccag

SEQ ID NO: 219102 - DNA, 51 bp, Artificial
  Synthetic oligonucleotide
gaggaatgttagcgcgagttctaaaatctggtgtggggtggccttggattt

SEQ ID NO: 219103 - DNA, 51 bp, Artificial
  Synthetic oligonucleotide
ggatatcggatccctgttggaggcgatctgcagcgatttttcggacatcgg

SEQ ID NO: 219104 - DNA, 51 bp, Artificial
  Synthetic oligonucleotide
caataaatgccggttcgctgtacggtgcacaccaaaagttgagagtgtagt

SEQ ID NO: 219105 - DNA, 51 bp, Artificial
  Synthetic oligonucleotide
tcttagagggactgcaactatctccgcaagatcgaccaagggagggcgcca

SEQ ID NO: 219106 - DNA, 51 bp, Artificial
  Synthetic oligonucleotide
gctccaaaatgccgttgagggcggatcagtcgatggaaggcgctacgacgc

SEQ ID NO: 219107 - DNA, 51 bp, Artificial
  Synthetic oligonucleotide
gtgagagccgtccggaaaggcatgcgctcaggtggtacgaggttgcgacgt

SEQ ID NO: 219108 - DNA, 51 bp, Artificial
  Synthetic oligonucleotide
cacctgatcaacctctccggtgcgcggcgcaagaactacgggccgcccatt

SEQ ID NO: 219109 - DNA, 56 bp, Artificial
  Synthetic oligonucleotide
gttacgcgcggctggttgtaccggaccgaaacaagtcatgagttggcatatggccg

SEQ ID NO: 219110 - DNA, 51 bp, Artificial
  Synthetic oligonucleotide
gagtcttgattgtaggtcccagtcatctgactgtcagctccgttcgcgctg

SEQ ID NO: 219111 - DNA, 51 bp, Artificial
  Synthetic oligonucleotide
aatgggtggtccaatgtcggatagcttcgccatagctgccaaacatccaat

SEQ ID NO: 219112 - DNA, 51 bp, Artificial
  Synthetic oligonucleotide
gtccgtttggccatctattcctcctgcaactccgtaccgctggcccaagcc

SEQ ID NO: 219113 - DNA, 50 bp, Artificial
  Synthetic oligonucleotide
aagtgcaatcggcgaacgtctggtcttgcgcgttgtcgcgccatcaggtc

SEQ ID NO: 219114 - DNA, 50 bp, Artificial
  Synthetic oligonucleotide
gcgggtgctcatccctgcgttccaagccgtcggtctagacggcattcgtc

SEQ ID NO: 219115 - DNA, 50 bp, Artificial
  Synthetic oligonucleotide
aatccaggcgacagggcgcgctaacaggcgatgggagtcagacatgaacg

SEQ ID NO: 219116 - DNA, 50 bp, Artificial
  Synthetic oligonucleotide
aagtcccgggcgcttcggttgggcggggcctgatagggtcctccacgtat

SEQ ID NO: 219117 - DNA, 50 bp, Artificial
  Synthetic oligonucleotide
aagggttcttacttacgtaggcggacacaatctccgcagtaagctcggct

SEQ ID NO: 219118 - DNA, 50 bp, Artificial
  Synthetic oligonucleotide
gcgcgactgtttttcgcgctccattttgtccagtcggcggatccggagcg

SEQ ID NO: 219119 - DNA, 50 bp, Artificial
  Synthetic oligonucleotide
aagtgctcttatgcgcctcttcgtcagacccgtcctggcggggtgtgcca

SEQ ID NO: 219120 - DNA, 56 bp, Artificial
  Synthetic oligonucleotide
tggagcgcctgacgaagtaagcccgccgctgaggacacaattacagcggcgggcct

SEQ ID NO: 219121 - DNA, 50 bp, Artificial
  Synthetic oligonucleotide
aagtgcttaaccagccggaggggcacggacgaaatacgagctgtgccgga

SEQ ID NO: 219122 - DNA, 50 bp, Artificial
  Synthetic oligonucleotide
gcgagttcagcaggaatagtgtgtccaacaataggtcaggaggcttccat

SEQ ID NO: 219123 - DNA, 50 bp, Artificial
  Synthetic oligonucleotide
aagtgtccagtactgcgcttgcaggctcggacggatgcgtggggatgatc

SEQ ID NO: 219124 - DNA, 50 bp, Artificial
  Synthetic oligonucleotide
gcgacaaatgcttcgctatactctcccatggcgccctccgtgcgtgagga

SEQ ID NO: 219125 - DNA, 50 bp, Artificial
  Synthetic oligonucleotide
gcctctgccgagtgctaaccgctctccggcaacggagaaccgctcaacct

SEQ ID NO: 219126 - DNA, 50 bp, Artificial
  Synthetic oligonucleotide
gccggatcccgtagcgtccccacggagagagggggaacctaaatctgccg

SEQ ID NO: 219127 - DNA, 50 bp, Artificial
  Synthetic oligonucleotide
aataccgggcaccgaccggggactttgctgtgcccttggaataaacgcgg

SEQ ID NO: 219128 - DNA, 50 bp, Artificial
  Synthetic oligonucleotide
aataggccgcgcttttggcgtcaaaccagtcctccgggccaagcagccac

SEQ ID NO: 219129 - DNA, 50 bp, Artificial
  Synthetic oligonucleotide
ctgcgcatagttcccgacccaggcgtcccacggaaccttcgtttctccga

SEQ ID NO: 219130 - DNA, 50 bp, Artificial
  Synthetic oligonucleotide
ctgcggggttgtccggtgtttcgtattgccggggccagaaacaggagtgg

SEQ ID NO: 219131 - DNA, 56 bp, Artificial
  Synthetic oligonucleotide
gccaattatccggcgatagatccccggttggagggcccccgcagagttatccatat

SEQ ID NO: 219132 - DNA, 50 bp, Artificial
  Synthetic oligonucleotide
acagcatcgggaatagagccgatttgatcaacctccgtgttgtaaagcct

SEQ ID NO: 219133 - DNA, 50 bp, Artificial
  Synthetic oligonucleotide
acagcactgacaagcgcgtccgagcgtgtagcggagtatgacccgactgg

SEQ ID NO: 219134 - DNA, 50 bp, Artificial
  Synthetic oligonucleotide
cttcatggaaccggttcaccaatgggggcatcgtgggctgcgcgacaagc

SEQ ID NO: 219135 - DNA, 50 bp, Artificial
  Synthetic oligonucleotide
acactgtccacaccgatggcggcagggacgggtgcacaaatgctcgttga

SEQ ID NO: 219136 - DNA, 50 bp, Artificial
  Synthetic oligonucleotide
acacgctccctactgttactgcgggctgttgcgcccttcccctgtgcacc

SEQ ID NO: 219137 - DNA, 50 bp, Artificial
  Synthetic oligonucleotide
acacgaccgggaattcatcagggaaggggacgttccgcaggcgagtaccg

SEQ ID NO: 219138 - DNA, 50 bp, Artificial
  Synthetic oligonucleotide
acacgacattgtgtgcaagggtccccctgtcccagacgacaccgttggcg

SEQ ID NO: 219139 - DNA, 50 bp, Artificial
  Synthetic oligonucleotide
acaccgcgcaacgggcgttcaacaatcttctgcgtgctgcaagctggcaa

SEQ ID NO: 219140 - DNA, 50 bp, Artificial
  Synthetic oligonucleotide
acacaagcccatgccgcaatccaggcgacagggcgcgctaacaggcgatg

SEQ ID NO: 219141 - DNA, 50 bp, Artificial
  Synthetic oligonucleotide
acaatcttgagacgaccgcgaatgagacgtgcggccgggtgcttcttggc

SEQ ID NO: 219142 - DNA, 59 bp, Artificial
  Synthetic oligonucleotide
actgcgggtatcctgagcggctgggctttcgtagtgccggccgattcgcaacataagga

SEQ ID NO: 219143 - DNA, 55 bp, Artificial
  Synthetic oligonucleotide
cgcgtgaaataggtccctactttcaagagcagttacggacgctcgaggaactacc

SEQ ID NO: 219144 - DNA, 50 bp, Artificial
  Synthetic oligonucleotide
acaagttcgcgggctcggcgatttgatgggcaatcaatggggccccgaag

SEQ ID NO: 219145 - DNA, 50 bp, Artificial
  Synthetic oligonucleotide
gacccgggtatgaacgctacgacgagtgtcccgaaggctggagtgtcggc

SEQ ID NO: 219146 - DNA, 50 bp, Artificial
  Synthetic oligonucleotide
aatttggcaggcgccctaaactgggaatgcacttgtgcagccgcgaggca

SEQ ID NO: 219147 - DNA, 50 bp, Artificial
  Synthetic oligonucleotide
aatttgccgtcccaggcggtagcgagaaggctgggtgcgacactgctgcc

SEQ ID NO: 219148 - DNA, 50 bp, Artificial
  Synthetic oligonucleotide
aattggaacacgcgcccggaaggctttgcaaacgccggtccagcaacccg

SEQ ID NO: 219149 - DNA, 50 bp, Artificial
  Synthetic oligonucleotide
aatgttgtcgtcccggtggcatccttctattgcgcgaccctaccgccgct

SEQ ID NO: 219150 - DNA, 50 bp, Artificial
  Synthetic oligonucleotide
gaggtggggctcaacgagcatgtccagatgtcccccgacgattggcacca

SEQ ID NO: 219151 - DNA, 50 bp, Artificial
  Synthetic oligonucleotide
aatgtctgacgggcggcttgggcaagtcgttgaatgaaaccttggccggg

SEQ ID NO: 219152 - DNA, 50 bp, Artificial
  Synthetic oligonucleotide
gatgagacagccggtcgcttcgttccgcccactatggaaggtgaccacga

SEQ ID NO: 219153 - DNA, 50 bp, Artificial
  Synthetic oligonucleotide
aatgccggggtctcagtgtggggcgacctagggaacgcatcgatctggga

SEQ ID NO: 219154 - DNA, 55 bp, Artificial
  Synthetic oligonucleotide
cgctctggcgagtcatatggtggtggtttcgagaaccgtagcgcagcggacatat

SEQ ID NO: 219155 - DNA, 50 bp, Artificial
  Synthetic oligonucleotide
gatgtgggcgacagcacccgagacgcgagtaacacctgggacgccagtgg

SEQ ID NO: 219156 - DNA, 50 bp, Artificial
  Synthetic oligonucleotide
aatgccgctaccgggcttgggaggagccgcgcccctttccccatggaact

SEQ ID NO: 219157 - DNA, 50 bp, Artificial
  Synthetic oligonucleotide
aatgcatccgcccgattggaccgaaccgcgagaatcgacgtcggctggtc

SEQ ID NO: 219158 - DNA, 50 bp, Artificial
  Synthetic oligonucleotide
gcacgaccgtgaaagggcgtccgcctggttccttggctgaagtccccacg

SEQ ID NO: 219159 - DNA, 50 bp, Artificial
  Synthetic oligonucleotide
aatgcaccatcggggacgaccaagcgcattgcaacgaccgagcccacacg

SEQ ID NO: 219160 - DNA, 50 bp, Artificial
  Synthetic oligonucleotide
aatcgttcgcacagacgaagtgccgctcaagtctggctaccgccctcggt

SEQ ID NO: 219161 - DNA, 50 bp, Artificial
  Synthetic oligonucleotide
aatcgttcaagggcgaaggtccggttgtacgcgaagtcccgccatggctc

SEQ ID NO: 219162 - DNA, 50 bp, Artificial
  Synthetic oligonucleotide
aatcgggacgcagggcgcagacggtcggagctttggtagacctccacctt

SEQ ID NO: 219163 - DNA, 50 bp, Artificial
  Synthetic oligonucleotide
aatcgatctcgcggattgcagccgcttgcgggttttccgacggctcccat

SEQ ID NO: 219164 - DNA, 50 bp, Artificial
  Synthetic oligonucleotide
aacagaccagagcgagccgcctcttcacaccaaagccccgttctctgcaa

SEQ ID NO: 219165 - DNA, 55 bp, Artificial
  Synthetic oligonucleotide
cgcggtctacccagtcaaaagtctcattgacaggcagggaatcgagaatgttgcc

SEQ ID NO: 219166 - DNA, 50 bp, Artificial
  Synthetic oligonucleotide
aacagacgaacggttcatgactatagatattaacggcacgctaacgagat

SEQ ID NO: 219167 - DNA, 50 bp, Artificial
  Synthetic oligonucleotide
aacagcgtgtaggggacctgtgggtaggcgcggctgcgattgaggagctc

SEQ ID NO: 219168 - DNA, 50 bp, Artificial
  Synthetic oligonucleotide
aacagttgatgccgctccccggagcattaccgcacacggattgcccattt

SEQ ID NO: 219169 - DNA, 50 bp, Artificial
  Synthetic oligonucleotide
aacatccctcccggctaaaccttgcaaactatggagcccgcttgcgtcgc

SEQ ID NO: 219170 - DNA, 50 bp, Artificial
  Synthetic oligonucleotide
aacatgagcgatggatctcgcacctgaaccacggacgccgcagcgctggg

SEQ ID NO: 219171 - DNA, 50 bp, Artificial
  Synthetic oligonucleotide
aacatgggggctctggtctcctggcttcggtccacctgtttcttacccgg

SEQ ID NO: 219172 - DNA, 50 bp, Artificial
  Synthetic oligonucleotide
aaccagccgaaagcgaccgtagccttcgaccctattttgcgcggctgcga

SEQ ID NO: 219173 - DNA, 50 bp, Artificial
  Synthetic oligonucleotide
aaccagcgaaacttcgcagattccgcaaccaagcggctgaagtggcacgg

SEQ ID NO: 219174 - DNA, 50 bp, Artificial
  Synthetic oligonucleotide
aaccagctctccccttagggctggatagcgcctgccttctcgactagccg

SEQ ID NO: 219175 - DNA, 50 bp, Artificial
  Synthetic oligonucleotide
aacccctgccttcctatcgaccgcagccatacgaaggctgttcaggaccc

SEQ ID NO: 219176 - DNA, 55 bp, Artificial
  Synthetic oligonucleotide
cgcgcataggcgaagcaccgatatcccgcaccgcaattgtgtagccctgctcgga

SEQ ID NO: 219177 - DNA, 50 bp, Artificial
  Synthetic oligonucleotide
aacccgccttttggcaccccgtggtgcagtggttcggtcggcaaatgccg

SEQ ID NO: 219178 - DNA, 50 bp, Artificial
  Synthetic oligonucleotide
aacccgcgtgagaaacactcaaccttcgccgcatgggtttgcgcgtcagt

SEQ ID NO: 219179 - DNA, 50 bp, Artificial
  Synthetic oligonucleotide
aaccgcccagtgagccagcaatgatctgccagaggtcctccaagcttcgc

SEQ ID NO: 219180 - DNA, 49 bp, Artificial
  Synthetic oligonucleotide
aaccggatgtaacggttcgtgaggggccgaaaggcggattcccgggctt

SEQ ID NO: 219181 - DNA, 50 bp, Artificial
  Synthetic oligonucleotide
aaccggcttgggacagtcacgccgtgccttcccccacggctgttgcacaa

SEQ ID NO: 219182 - DNA, 50 bp, Artificial
  Synthetic oligonucleotide
aacgagctatccggtggttactgtcgtgccgcagggtgcccgcatcgtga

SEQ ID NO: 219183 - DNA, 50 bp, Artificial
  Synthetic oligonucleotide
aaaacaccaaccggctcagacctcgcgggccgacaaggctgcgatgtcca

SEQ ID NO: 219184 - DNA, 50 bp, Artificial
  Synthetic oligonucleotide
aaaagcgccaggaacgtgggacctgaccgttagccgcgccgacccacaca

SEQ ID NO: 219185 - DNA, 50 bp, Artificial
  Synthetic oligonucleotide
aaacccccgcaccggacaattccagtccgcggagttaggcacgtgatcta

SEQ ID NO: 219186 - DNA, 50 bp, Artificial
  Synthetic oligonucleotide
tgtcgcatgcttgacccggccgcagatttgtggcgatgaaatctccatga

SEQ ID NO: 219187 - DNA, 55 bp, Artificial
  Synthetic oligonucleotide
cgcgcaattcgccaatggacttcagtcgctccgtctcgcaaaagcgtgccatgcc

SEQ ID NO: 219188 - DNA, 50 bp, Artificial
  Synthetic oligonucleotide
aaacggtgggcgggaaagtctcgacgggaaacccatggcgcttgtccctg

SEQ ID NO: 219189 - DNA, 50 bp, Artificial
  Synthetic oligonucleotide
aaagagccttggaaagaccgctgtctcagcaaggacgggcgaggggtctt

SEQ ID NO: 219190 - DNA, 50 bp, Artificial
  Synthetic oligonucleotide
aaagcatcgtcccgtcccagccaccgtacgtttgcagcggctccggagac

SEQ ID NO: 219191 - DNA, 48 bp, Artificial
  Synthetic oligonucleotide
aaagggccggagaccaacgttccaagcccggggaaaagtttctcgcgg

SEQ ID NO: 219192 - DNA, 50 bp, Artificial
  Synthetic oligonucleotide
tgcggaatttgtacctaaggttggtttcagccctctgttaggcggtcttt

SEQ ID NO: 219193 - DNA, 50 bp, Artificial
  Synthetic oligonucleotide
aaaggtcaggtttggccgggaacatccgaagccgcacgtctcacaggctc

SEQ ID NO: 219194 - DNA, 50 bp, Artificial
  Synthetic oligonucleotide
aaatatgctccggcaacccccgcgaccctcgacagagttgcgcggaacaa

SEQ ID NO: 219195 - DNA, 50 bp, Artificial
  Synthetic oligonucleotide
aaatgagcccggcgctcacggaagactcgctccccggccgattggtgcta

SEQ ID NO: 219196 - DNA, 50 bp, Artificial
  Synthetic oligonucleotide
aaatgcaatggtcctgcctatgttgcagctcggaacgcccaccgttcgga

SEQ ID NO: 219197 - DNA, 50 bp, Artificial
  Synthetic oligonucleotide
aacaaccgcccctaagaatggtcacgtccccctgagcctagccgccgtat

SEQ ID NO: 219198 - DNA, 55 bp, Artificial
  Synthetic oligonucleotide
cgcgagacagtgctaggcgaaagcgcgaggtcgcgtgaaatatccgacaggctcg

SEQ ID NO: 219199 - DNA, 50 bp, Artificial
  Synthetic oligonucleotide
aacactatatcgctgctgcccggtgggacacttggcgtcgcgccacatag

SEQ ID NO: 219200 - DNA, 50 bp, Artificial
  Synthetic oligonucleotide
tcacattgaccggatgtcttgatcgggggccgcaagccaacagaacggtt

SEQ ID NO: 219201 - DNA, 50 bp, Artificial
  Synthetic oligonucleotide
aagcccggccgccgttctaatgcagagcgttgcgaggagcacatatgacg

SEQ ID NO: 219202 - DNA, 50 bp, Artificial
  Synthetic oligonucleotide
ggcaccgtgatccggacgatggaggtcgagaagcaacctacgccgatcgt

SEQ ID NO: 219203 - DNA, 50 bp, Artificial
  Synthetic oligonucleotide
aagccggaatacactcccagcgaggggctgtaacctgcgttccacgcctc

SEQ ID NO: 219204 - DNA, 50 bp, Artificial
  Synthetic oligonucleotide
aagcgcgtccgagcgtgtagcggagtatgacccgactggcgtcgttcgcg

SEQ ID NO: 219205 - DNA, 50 bp, Artificial
  Synthetic oligonucleotide
aagcgctctccgcaattccgtaaccgttgacgcgttgggatccctcgact

SEQ ID NO: 219206 - DNA, 50 bp, Artificial
  Synthetic oligonucleotide
aagctcctgtagggtggccccggcaacttacggcgagagcagggcgctaa

SEQ ID NO: 219207 - DNA, 50 bp, Artificial
  Synthetic oligonucleotide
aagctgccagccgcgattcacatcgaaagatggtccgccaacgccgcggg

SEQ ID NO: 219208 - DNA, 50 bp, Artificial
  Synthetic oligonucleotide
aaggaaacccggtccgttgttggccgtgtaggcttgtggcacccctccta

SEQ ID NO: 219209 - DNA, 55 bp, Artificial
  Synthetic oligonucleotide
cgcgacaggagtgcgatctatgcagagtttcaccgtcgagctgatacgcgacggc

SEQ ID NO: 219210 - DNA, 50 bp, Artificial
  Synthetic oligonucleotide
aaggcactaaacctccgtccgggttggggcaacgcagagaaccatggtta

SEQ ID NO: 219211 - DNA, 50 bp, Artificial
  Synthetic oligonucleotide
aaggcgcgccgctaagctgcgtggagtttttgtcgggggcgtatcatgct

SEQ ID NO: 219212 - DNA, 50 bp, Artificial
  Synthetic oligonucleotide
ggactggctgaagaggcagcttgaaccgggcctaagggctgacgaaagcg

SEQ ID NO: 219213 - DNA, 50 bp, Artificial
  Synthetic oligonucleotide
aagggagcaggcttcgatttcctgcgtatgccggtcgacccgtcgccttt

SEQ ID NO: 219214 - DNA, 50 bp, Artificial
  Synthetic oligonucleotide
aagggattcggcagcgagaatcgttgggcaccccatccgtggcccggtgc

SEQ ID NO: 219215 - DNA, 50 bp, Artificial
  Synthetic oligonucleotide
aagggcaaagtccgcgaaacagcgtgtaggggacctgtgggtaggcgcgg

SEQ ID NO: 219216 - DNA, 50 bp, Artificial
  Synthetic oligonucleotide
aagggcaccgttcctgagtaggacggcagactgttcgtcgcggtagaccc

SEQ ID NO: 219217 - DNA, 50 bp, Artificial
  Synthetic oligonucleotide
aagggcagcacagcaatcgaatgattgtcgggcggtgcaagcggctgcga

SEQ ID NO: 219218 - DNA, 50 bp, Artificial
  Synthetic oligonucleotide
aaggggcagctaggcgggctctcaaggaacgccctacggcagagaacgtc

SEQ ID NO: 219219 - DNA, 50 bp, Artificial
  Synthetic oligonucleotide
aagggtcgtgcgataaggcaaggcccgccgctctgctgacaaagccaaac

SEQ ID NO: 219220 - DNA, 55 bp, Artificial
  Synthetic oligonucleotide
cgaggtgcagggcatcggatgcacaaaggccagtctgcaggcgcggcagcgaaaa

SEQ ID NO: 219221 - DNA, 50 bp, Artificial
  Synthetic oligonucleotide
ggtccgcgatcggaaccccgcctgtacggtcgtccctggcggttagccat

SEQ ID NO: 219222 - DNA, 50 bp, Artificial
  Synthetic oligonucleotide
aacgaggtcctacccgccaacgaggtattgccacgcgcatgggagcttgc

SEQ ID NO: 219223 - DNA, 50 bp, Artificial
  Synthetic oligonucleotide
aacgccgaacggccataaatcgcgttgacggaaacacaatgacgggggct

SEQ ID NO: 219224 - DNA, 50 bp, Artificial
  Synthetic oligonucleotide
aactcgccggggccgctaatagggggacgacggacttcgtgagacattgc

SEQ ID NO: 219225 - DNA, 50 bp, Artificial
  Synthetic oligonucleotide
aactgaatgcggcatcggcccgtcccctgacaaacagtcgcgtagcaagt

SEQ ID NO: 219226 - DNA, 50 bp, Artificial
  Synthetic oligonucleotide
ggggatgcgaagtgctcttatgcgcctcttcgtcagacccgtcctggcgg

SEQ ID NO: 219227 - DNA, 50 bp, Artificial
  Synthetic oligonucleotide
aactggccggcgcctgcaaccttctctgcggctcagtcgtcacagacgct

SEQ ID NO: 219228 - DNA, 50 bp, Artificial
  Synthetic oligonucleotide
aagaacggctcgcgccaagggattacccgcaagcagcattgtgcgcaggc

SEQ ID NO: 219229 - DNA, 50 bp, Artificial
  Synthetic oligonucleotide
aagaagttgcgttacgccgaacctttggcgggggacgatagggcagggct

SEQ ID NO: 219230 - DNA, 50 bp, Artificial
  Synthetic oligonucleotide
ggctggcatccgtgtcgcctcagcccagtccaacagacaggatagccgcc

SEQ ID NO: 219231 - DNA, 55 bp, Artificial
  Synthetic oligonucleotide
cgagatgaccattcgcagaacggctgacaagatacagctggcaacacttaccagg

SEQ ID NO: 219232 - DNA, 50 bp, Artificial
  Synthetic oligonucleotide
ggctacaacttccaccgaaagggagatctagcccgcatgcacgcgacgct

SEQ ID NO: 219233 - DNA, 50 bp, Artificial
  Synthetic oligonucleotide
aagagcggcgattttgcgacggctgtgcgactgggctccgctggttttta

SEQ ID NO: 219234 - DNA, 50 bp, Artificial
  Synthetic oligonucleotide
aagaggcaaagcgatgactcagcgccccggctaccacaccgtcacccctt

SEQ ID NO: 219235 - DNA, 50 bp, Artificial
  Synthetic oligonucleotide
aagcacgacgctcagcgcaaggcagtcagtccagctgtcgccccgtccaa

SEQ ID NO: 219236 - DNA, 50 bp, Artificial
  Synthetic oligonucleotide
aagcactagcagagacggctagccactatggatttcgaggcgtccgcgcc

SEQ ID NO: 219237 - DNA, 50 bp, Artificial
  Synthetic oligonucleotide
aagcagagtttgcctccggtagcatcctcgcacaggcatccgcgcaggct

SEQ ID NO: 219238 - DNA, 50 bp, Artificial
  Synthetic oligonucleotide
ggccgacgaggaatcgcacagggcgttcggactgtcggagcgtgagatta

SEQ ID NO: 219239 - DNA, 50 bp, Artificial
  Synthetic oligonucleotide
aagccatcgcaacccctgccttcctatcgaccgcagccatacgaaggctg

SEQ ID NO: 219240 - DNA, 50 bp, Artificial
  Synthetic oligonucleotide
aagcccgctgcacttgcgtcaatcgcgtgatgtcctccggtcccttggtg

SEQ ID NO: 219241 - DNA, 50 bp, Artificial
  Synthetic oligonucleotide
agagggctatctgtctttgtgagcgaaggcggctgtccccacaagccacg

SEQ ID NO: 219242 - DNA, 54 bp, Artificial
  Synthetic oligonucleotide
cgacacccttttcgcacttggctgtggtcggttgttcgaggggtcaccgggaga

SEQ ID NO: 219243 - DNA, 50 bp, Artificial
  Synthetic oligonucleotide
cagcgcttccacccaggatagggaacgcaagcccgcagaacaatgggcat

SEQ ID NO: 219244 - DNA, 50 bp, Artificial
  Synthetic oligonucleotide
cagccggcttggtgtgaataggcactcaaccactcggcgggaagcaacgc

SEQ ID NO: 219245 - DNA, 50 bp, Artificial
  Synthetic oligonucleotide
agagtccaagtgcccaccacaggttgggtccgaccagacccagccatgcg

SEQ ID NO: 219246 - DNA, 50 bp, Artificial
  Synthetic oligonucleotide
cagcacgaggcttgcaatcaatcgcggaaaggccggaacgcggtgcgaaa

SEQ ID NO: 219247 - DNA, 50 bp, Artificial
  Synthetic oligonucleotide
cagaacacggtcgtgatcgatcgtctggatggcacctcctgcaaggccga

SEQ ID NO: 219248 - DNA, 50 bp, Artificial
  Synthetic oligonucleotide
cactgctggctgggatcccctccggttacccgtctggccttctcccgcac

SEQ ID NO: 219249 - DNA, 50 bp, Artificial
  Synthetic oligonucleotide
agagtgtggcccgcgagaggggtcgaaaattcgtcgcaaagtccctcctc

SEQ ID NO: 219250 - DNA, 50 bp, Artificial
  Synthetic oligonucleotide
cacggggcaaatgttcccacccctgtgtctcacaggcgtgccgattttcg

SEQ ID NO: 219251 - DNA, 50 bp, Artificial
  Synthetic oligonucleotide
agatatctgcgcgggcaggcgttaccagggccgcagtgtccttgtatgca

SEQ ID NO: 219252 - DNA, 50 bp, Artificial
  Synthetic oligonucleotide
agatctagaacggatatccggtaaacgataatgaagtccggtccgcaatg

SEQ ID NO: 219253 - DNA, 60 bp, Artificial
  Synthetic oligonucleotide
tacgacaggcagcctacgagatgcactgtcggccgccgtagctactactcatgtcgacgc

SEQ ID NO: 219254 - DNA, 55 bp, Artificial
  Synthetic oligonucleotide
ccttcactcgtcagaacggccgacagcacattctccgccaggttggcgcatttcc

SEQ ID NO: 219255 - DNA, 50 bp, Artificial
  Synthetic oligonucleotide
caccacctccatcggacaggcgtagaatgtctcgggctcggaaagcgccg

SEQ ID NO: 219256 - DNA, 50 bp, Artificial
  Synthetic oligonucleotide
agatgctgcagggataagaccggggcagatggtctccgacgccacggcac

SEQ ID NO: 219257 - DNA, 50 bp, Artificial
  Synthetic oligonucleotide
caataggcgtcggcttcttgtgccctaccgagcctcagacccttgcggtg

SEQ ID NO: 219258 - DNA, 50 bp, Artificial
  Synthetic oligonucleotide
caaggcgtcggacaggtgcctgcattggtcgggagcgtcataagggccaa

SEQ ID NO: 219259 - DNA, 50 bp, Artificial
  Synthetic oligonucleotide
agatggtctccgacgccacggcactttgtccggggctagagctgcattca

SEQ ID NO: 219260 - DNA, 50 bp, Artificial
  Synthetic oligonucleotide
caacgagcccgcttgaggtccggccgcgcaatgtcgctacacggttgacg

SEQ ID NO: 219261 - DNA, 50 bp, Artificial
  Synthetic oligonucleotide
caaattctgggtctggcggagcgcaccgttaagtggcacgcgacacgtgc

SEQ ID NO: 219262 - DNA, 50 bp, Artificial
  Synthetic oligonucleotide
agatgtgaaatgccgctaccgggcttgggaggagccgcgcccctttcccc

SEQ ID NO: 219263 - DNA, 50 bp, Artificial
  Synthetic oligonucleotide
agcaaaaccggcttggaccgagagagttcccgcctgtggtttgctgtcgg

SEQ ID NO: 219264 - DNA, 50 bp, Artificial
  Synthetic oligonucleotide
agcaagaaccccacgctttgcagccatctgatggggcttcagtccgccaa

SEQ ID NO: 219265 - DNA, 55 bp, Artificial
  Synthetic oligonucleotide
ctgtggtcaattgtccgcagcagtgggtagttgacatacgcgctgccgaacctag

SEQ ID NO: 219266 - DNA, 50 bp, Artificial
  Synthetic oligonucleotide
agcacccctggcgatcaggtttccgctgccacgagtcgatgctttggaaa

SEQ ID NO: 219267 - DNA, 50 bp, Artificial
  Synthetic oligonucleotide
actgcacatggcgctgctaacgactttgggttcggtggagacgcaaccga

SEQ ID NO: 219268 - DNA, 50 bp, Artificial
  Synthetic oligonucleotide
ccattgccttgagcgaacggctgtgctggccggagcataggtcctaaccc

SEQ ID NO: 219269 - DNA, 50 bp, Artificial
  Synthetic oligonucleotide
actgccgacttggaaccacaccgggcaatcagcggggtcttcgttgtcgt

SEQ ID NO: 219270 - DNA, 50 bp, Artificial
  Synthetic oligonucleotide
actgccggaatgcattgtggttcccttcccgtgaaggagcgcgcatgcaa

SEQ ID NO: 219271 - DNA, 50 bp, Artificial
  Synthetic oligonucleotide
actgcgggctgttgcgcccttcccctgtgcaccaagcccctacactttcc

SEQ ID NO: 219272 - DNA, 50 bp, Artificial
  Synthetic oligonucleotide
ccaggcttcacgctgaattctggtcgccccacttccagaaggctcgtcgg

SEQ ID NO: 219273 - DNA, 50 bp, Artificial
  Synthetic oligonucleotide
actggttaggatcgcgcgggcgcttgggcttaggtccggttggcatactg

SEQ ID NO: 219274 - DNA, 50 bp, Artificial
  Synthetic oligonucleotide
agaatcgcacgcgccgctcaaccctgccttgatctgggtcaattgcgcta

SEQ ID NO: 219275 - DNA, 50 bp, Artificial
  Synthetic oligonucleotide
agacccgcgaggttggaccaccaaccgcccatgccttgacgccggtggca

SEQ ID NO: 219276 - DNA, 55 bp, Artificial
  Synthetic oligonucleotide
ctgctaaccggcgcttcgtcaaacgcctttatagccgcttcggctgttgtcaccc

SEQ ID NO: 219277 - DNA, 50 bp, Artificial
  Synthetic oligonucleotide
ccaaagagtcgagggggcgacaatggttgaagtgttccgcggaaggggcg

SEQ ID NO: 219278 - DNA, 50 bp, Artificial
  Synthetic oligonucleotide
cattgtcgtaccctcgcgtcgcaaagtcagcgtgtgcagaggaggcgcgt

SEQ ID NO: 219279 - DNA, 50 bp, Artificial
  Synthetic oligonucleotide
agaccggttcccgtttgatccggagcaggcatgctcgctctgcgcccatt

SEQ ID NO: 219280 - DNA, 50 bp, Artificial
  Synthetic oligonucleotide
agacgcaagggcttcgggccgtcgtaggagtggagttcacttccggctac

SEQ ID NO: 219281 - DNA, 50 bp, Artificial
  Synthetic oligonucleotide
catggcgggagagcggtcgagggatgctcttcgctagacggagtgtcctg

SEQ ID NO: 219282 - DNA, 50 bp, Artificial
  Synthetic oligonucleotide
catggcgccctccgtgcgtgaggatcggctcggcccatccgagcaaccct

SEQ ID NO: 219283 - DNA, 50 bp, Artificial
  Synthetic oligonucleotide
catgaagtgctcgcagtgggtgattcgctacggaccgacgttgcgggtgg

SEQ ID NO: 219284 - DNA, 50 bp, Artificial
  Synthetic oligonucleotide
agacgcgaaaagctctcggctgctcccagtgccccacgcatgcccgagcg

SEQ ID NO: 219285 - DNA, 50 bp, Artificial
  Synthetic oligonucleotide
catccccggcagtacagcagtcgtggcttcgccccgagcactgaaacctg

SEQ ID NO: 219286 - DNA, 50 bp, Artificial
  Synthetic oligonucleotide
catagtgtcgcacgccgtcctcaaaaggccgcatccggcttgccaacgtt

SEQ ID NO: 219287 - DNA, 55 bp, Artificial
  Synthetic oligonucleotide
ctcctggtcaaacatgcttagctctgaagaggcgtcctatcccctcgtcggtcgc

SEQ ID NO: 219288 - DNA, 50 bp, Artificial
  Synthetic oligonucleotide
agagctgttgcagcccggcaaatcacagttcagcgcgcctgatcattggg

SEQ ID NO: 219289 - DNA, 50 bp, Artificial
  Synthetic oligonucleotide
caggggtgctccgtacggtcggggctgagacgggggcggcaagcccacag

SEQ ID NO: 219290 - DNA, 50 bp, Artificial
  Synthetic oligonucleotide
agaggcccggcccggtttcacacagcaactccggtcgatccttggctttg

SEQ ID NO: 219291 - DNA, 50 bp, Artificial
  Synthetic oligonucleotide
aggtctgctcagatcgtccgaggatgccatggcgttccgaaggccccaag

SEQ ID NO: 219292 - DNA, 50 bp, Artificial
  Synthetic oligonucleotide
aggtcacgtctttcagcagcctcgaccgcaggaaagggagaagcgcagca

SEQ ID NO: 219293 - DNA, 50 bp, Artificial
  Synthetic oligonucleotide
agggggcgcctgctatcttgacaagtacgcggtcacagtgtggacctcct

SEQ ID NO: 219294 - DNA, 50 bp, Artificial
  Synthetic oligonucleotide
agggcggttgttggcacccggacgttgcgtgctgaagctctccaaaagga

SEQ ID NO: 219295 - DNA, 50 bp, Artificial
  Synthetic oligonucleotide
agggataagaccggggcagatggtctccgacgccacggcactttgtccgg

SEQ ID NO: 219296 - DNA, 50 bp, Artificial
  Synthetic oligonucleotide
agggataaccgggctgctaggtgccgtgctttacaggacggtggtcgttc

SEQ ID NO: 219297 - DNA, 50 bp, Artificial
  Synthetic oligonucleotide
agggagtagacgcgagagacccggtcggtccagttatggggcggcattga

SEQ ID NO: 219298 - DNA, 55 bp, Artificial
  Synthetic oligonucleotide
ctcccgcgctatagtccgttggggccttctttccacgctacgcacggcgagtaac

SEQ ID NO: 219299 - DNA, 50 bp, Artificial
  Synthetic oligonucleotide
agccctggtgaacaattgatcaaggctcatccaacggcgacgaaccttgc

SEQ ID NO: 219300 - DNA, 50 bp, Artificial
  Synthetic oligonucleotide
agccgaaacagtgccgcaagtcggggacatgccactttccccgccccggt

SEQ ID NO: 219301 - DNA, 50 bp, Artificial
  Synthetic oligonucleotide
aggcgggaacaacatccgccttatcgtcgcgttctggcagtgcggcccaa

SEQ ID NO: 219302 - DNA, 50 bp, Artificial
  Synthetic oligonucleotide
aggcctgcgcggcatatcttcgtaacgcgatcacccagatacaccgctgg

SEQ ID NO: 219303 - DNA, 50 bp, Artificial
  Synthetic oligonucleotide
aggcccccgggtggttcaatctatgcgggttcattccagggccacagatg

SEQ ID NO: 219304 - DNA, 50 bp, Artificial
  Synthetic oligonucleotide
aggagtgctgtggtagccagccggtgcgacgtgtggcggagccgctttcc

SEQ ID NO: 219305 - DNA, 50 bp, Artificial
  Synthetic oligonucleotide
agcgtcataagggccaagccgcacaacggagcacctgccggttatgtagc

SEQ ID NO: 219306 - DNA, 50 bp, Artificial
  Synthetic oligonucleotide
agcgcggtaaacagccacgccgcactcacataggccggtcgcctgcctgt

SEQ ID NO: 219307 - DNA, 50 bp, Artificial
  Synthetic oligonucleotide
agcgccgttcccgggccctaaagcatgcgctccagtgtgctgaagacggt

SEQ ID NO: 219308 - DNA, 50 bp, Artificial
  Synthetic oligonucleotide
agcgactattgctctcccaacacctgacgcgaatccgttgctacgggcgc

SEQ ID NO: 219309 - DNA, 55 bp, Artificial
  Synthetic oligonucleotide
ctatctcccgacgagcagggtccgatattccttgtgtggccctacgaccggctcc

SEQ ID NO: 219310 - DNA, 50 bp, Artificial
  Synthetic oligonucleotide
agcctgtgaggcgcgtagggcacaaggcaacaaccgagggatggcaagat

SEQ ID NO: 219311 - DNA, 50 bp, Artificial
  Synthetic oligonucleotide
agcctgcttgtccacggaaagcgagagtatgccgctgcttatctcccgcg

SEQ ID NO: 219312 - DNA, 50 bp, Artificial
  Synthetic oligonucleotide
agccgtggacgtgactgcattgcgtcttccgggttcagagcttcgcgaag

SEQ ID NO: 219313 - DNA, 50 bp, Artificial
  Synthetic oligonucleotide
agccgccgcaactctagccgcgcgctgacgaggaaatctgtacctaactt

SEQ ID NO: 219314 - DNA, 50 bp, Artificial
  Synthetic oligonucleotide
atggttccttcgggtgttccgacctgcaccttgcgaatgtgtgggtgcgt

SEQ ID NO: 219315 - DNA, 50 bp, Artificial
  Synthetic oligonucleotide
atggttcaccagcgcggatcattttggacacatgcgaagccccctaccgc

SEQ ID NO: 219316 - DNA, 50 bp, Artificial
  Synthetic oligonucleotide
atggtcggcctttatgcacgacgctgatgaaatgtcccggccgaaccgcg

SEQ ID NO: 219317 - DNA, 50 bp, Artificial
  Synthetic oligonucleotide
agcaccggctcgggacatgtgatcgaaaggatcggcactccgcttgcatc

SEQ ID NO: 219318 - DNA, 50 bp, Artificial
  Synthetic oligonucleotide
atgcggccatacggcatgtactggcacgccggaaccaacataatgtcgcc

SEQ ID NO: 219319 - DNA, 50 bp, Artificial
  Synthetic oligonucleotide
agcagagatatttcggaggttgcagccggatcccgtagcgtccccacgga

SEQ ID NO: 219320 - DNA, 55 bp, Artificial
  Synthetic oligonucleotide
cgtctgcgttgcacgcaaatggttgcctagagtcccgatcggtgtcattacgtga

SEQ ID NO: 219321 - DNA, 50 bp, Artificial
  Synthetic oligonucleotide
atgcagctcgtgcccgttttgccgcggggaggaaataggacgcgccttta

SEQ ID NO: 219322 - DNA, 50 bp, Artificial
  Synthetic oligonucleotide
agcagcccgcgccctcttgttgacgtgccctgccgaaacgacctaaatcc

SEQ ID NO: 219323 - DNA, 50 bp, Artificial
  Synthetic oligonucleotide
atgacgctccacgccgcatgaggaactgccgtcatcagaccaggtcgttg

SEQ ID NO: 219324 - DNA, 50 bp, Artificial
  Synthetic oligonucleotide
agcatccggcatcctacgaactgagtgttgcaccgctgagggacgacgcc

SEQ ID NO: 219325 - DNA, 50 bp, Artificial
  Synthetic oligonucleotide
atcgcgtgctaagcggagagaacggacacagcgttgccgctccaaaccac

SEQ ID NO: 219326 - DNA, 50 bp, Artificial
  Synthetic oligonucleotide
atcgatcgccccgagcgatacaacgatcccgagggccactaaagcaacgc

SEQ ID NO: 219327 - DNA, 50 bp, Artificial
  Synthetic oligonucleotide
atcctcggctcgtcaaaccgtaggcatacgcgatccaggtccccacgtcg

SEQ ID NO: 219328 - DNA, 50 bp, Artificial
  Synthetic oligonucleotide
atcagatcggccaaacggagccctatccgacttttgccgctccggtgtct

SEQ ID NO: 219329 - DNA, 50 bp, Artificial
  Synthetic oligonucleotide
agccattccttgcagagccgcattccctccagcgctacaccttgagccag

SEQ ID NO: 219330 - DNA, 50 bp, Artificial
  Synthetic oligonucleotide
agttcgttcgccacgggaaagcaagtcgttggcatgaaaccagtccagca

SEQ ID NO: 219331 - DNA, 55 bp, Artificial
  Synthetic oligonucleotide
cgtcagcaatacccgattggacatagaacctattggctgccgtgcatgcttcccc

SEQ ID NO: 219332 - DNA, 50 bp, Artificial
  Synthetic oligonucleotide
agttcgcagcagacaagacggcgcgaattggtccggttggcttcgacgcc

SEQ ID NO: 219333 - DNA, 50 bp, Artificial
  Synthetic oligonucleotide
agccccgcccacgatgggcagctagaaacaatcctgagggagacatccat

SEQ ID NO: 219334 - DNA, 50 bp, Artificial
  Synthetic oligonucleotide
agtccgttggggccttctttccacgctacgcacggcgagtaacttctcgc

SEQ ID NO: 219335 - DNA, 50 bp, Artificial
  Synthetic oligonucleotide
aggttcctgactcgtggcgtcctgcgtgcccgataccgcgattctctcgc

SEQ ID NO: 219336 - DNA, 50 bp, Artificial
  Synthetic oligonucleotide
aggttccgtgagcggagatggaagcagtggtcccccgcctcgtgttgcag

SEQ ID NO: 219337 - DNA, 50 bp, Artificial
  Synthetic oligonucleotide
accacgtcggcatggataggggcgaggggcaggatcgtccagccatggcc

SEQ ID NO: 219338 - DNA, 50 bp, Artificial
  Synthetic oligonucleotide
cggctgagggaggccatttccgttgttcgccggtgcttccctagttcctc

SEQ ID NO: 219339 - DNA, 50 bp, Artificial
  Synthetic oligonucleotide
accagacggtttgggaaagggagacgtatggcccagcagacggtgggact

SEQ ID NO: 219340 - DNA, 50 bp, Artificial
  Synthetic oligonucleotide
accatcgcagcctggcgtcaacagacacgcaatcgctgggacctcaagcg

SEQ ID NO: 219341 - DNA, 50 bp, Artificial
  Synthetic oligonucleotide
cggatgttcgttgccgcgccctccaaggatctcggtcgtgttaccggcca

SEQ ID NO: 219342 - DNA, 55 bp, Artificial
  Synthetic oligonucleotide
cgtacgccaagtgcgttttcctacgaccctccgcctggaggcgtcatggttcgta

SEQ ID NO: 219343 - DNA, 50 bp, Artificial
  Synthetic oligonucleotide
cggatgcagcaagcggtccagaaaaacatcgggggccacgggttcaatcg

SEQ ID NO: 219344 - DNA, 50 bp, Artificial
  Synthetic oligonucleotide
acccccttatccggctggcagagcgagcctctgtcgggagcgcggcctgg

SEQ ID NO: 219345 - DNA, 50 bp, Artificial
  Synthetic oligonucleotide
cggacctactctcggcagatttcaggatcgtgtgccccgaccttccgggc

SEQ ID NO: 219346 - DNA, 50 bp, Artificial
  Synthetic oligonucleotide
acccgcggtcatgttcgagcccaggcccgattgagtccctttgattgcct

SEQ ID NO: 219347 - DNA, 50 bp, Artificial
  Synthetic oligonucleotide
acccttcatggggtgaagcttgcggcctctcgcggctctctcgtcgccac

SEQ ID NO: 219348 - DNA, 50 bp, Artificial
  Synthetic oligonucleotide
cgcttccaacgcgtcatcaggggacccttgcttccgtacaaggggtcctt

SEQ ID NO: 219349 - DNA, 50 bp, Artificial
  Synthetic oligonucleotide
accgacgaaagccatgcgctcctccttgcgttctaacccccgcggctaaa

SEQ ID NO: 219350 - DNA, 50 bp, Artificial
  Synthetic oligonucleotide
accgatcccgcagtgacttcgccactgccagtcgcgccgctgtagttgat

SEQ ID NO: 219351 - DNA, 50 bp, Artificial
  Synthetic oligonucleotide
cgcgtcgaacgccattttcaccgggacgttgccagaatgaatccgggctt

SEQ ID NO: 219352 - DNA, 50 bp, Artificial
  Synthetic oligonucleotide
accgcggactggattgggcctgcacggagacagtacctatcagaacggcc

SEQ ID NO: 219353 - DNA, 55 bp, Artificial
  Synthetic oligonucleotide
cggtctcaagggcatatggtgggcgtagcgcgggaacgcattcgcctagtagcac

SEQ ID NO: 219354 - DNA, 50 bp, Artificial
  Synthetic oligonucleotide
accgcgtcctggtttgtcgaaactacgtctcgaggaccgatgcctccgcg

SEQ ID NO: 219355 - DNA, 50 bp, Artificial
  Synthetic oligonucleotide
accgggttggcagatcccgttccgctactgcagtcggtcatggcacatcc

SEQ ID NO: 219356 - DNA, 50 bp, Artificial
  Synthetic oligonucleotide
accgtgccggttcgccgacaagttccgaaaaggcagctactatgcgctcc

SEQ ID NO: 219357 - DNA, 50 bp, Artificial
  Synthetic oligonucleotide
cgcgagtccccgggagttcggcgtagcccgttgctataatgacgggtacg

SEQ ID NO: 219358 - DNA, 50 bp, Artificial
  Synthetic oligonucleotide
ctgccatggaggcgatcgaaccgcccgtgaggtccctgttgaggaaacgc

SEQ ID NO: 219359 - DNA, 50 bp, Artificial
  Synthetic oligonucleotide
acagccaccgtttggatggagtgggcaatgagacaaccgtgcgcggctcc

SEQ ID NO: 219360 - DNA, 50 bp, Artificial
  Synthetic oligonucleotide
acagcccgggtgccattactccgacagcagcaacggatttacgcaccgct

SEQ ID NO: 219361 - DNA, 50 bp, Artificial
  Synthetic oligonucleotide
acagcggtatgcaggggcacaacgactgccgacttggaaccacaccgggc

SEQ ID NO: 219362 - DNA, 50 bp, Artificial
  Synthetic oligonucleotide
acaggcccgtgacatgatcgcgaaacggccttacccaagcgacgtctcga

SEQ ID NO: 219363 - DNA, 50 bp, Artificial
  Synthetic oligonucleotide
ctatactctcccatggcgccctccgtgcgtgaggatcggctcggcccatc

SEQ ID NO: 219364 - DNA, 56 bp, Artificial
  Synthetic oligonucleotide
gccgccatccaacggggacggtgaatctcaccggtctgaagatccgattcggtaag

SEQ ID NO: 219365 - DNA, 55 bp, Artificial
  Synthetic oligonucleotide
cggtcctccacgagatagccgaagctcgaataggaagagccgagcgcgtggtttc

SEQ ID NO: 219366 - DNA, 50 bp, Artificial
  Synthetic oligonucleotide
ctacggcgtggctcgcgtctcgcacattggtcaaggaggtcgagtgtcgg

SEQ ID NO: 219367 - DNA, 50 bp, Artificial
  Synthetic oligonucleotide
ctaaggcgccgattgtcggcaccctccccaactgagatcgaccgaagcgg

SEQ ID NO: 219368 - DNA, 50 bp, Artificial
  Synthetic oligonucleotide
cgttgccgcgccctccaaggatctcggtcgtgttaccggccatttcaacg

SEQ ID NO: 219369 - DNA, 50 bp, Artificial
  Synthetic oligonucleotide
cgttcggcggcccacccatcgcacagaggagaacaaccttcatgtcgact

SEQ ID NO: 219370 - DNA, 50 bp, Artificial
  Synthetic oligonucleotide
cgtggttaccgtcacgccgtttgacgacaggaagcggattgcgtcgcgag

SEQ ID NO: 219371 - DNA, 50 bp, Artificial
  Synthetic oligonucleotide
cgtgggtggctgacggcccagcacaaagcgcggtagtgatcctttgcccg

SEQ ID NO: 219372 - DNA, 50 bp, Artificial
  Synthetic oligonucleotide
acagttgctgcgaaggttggaggggcacacgcatagctgcgcattccccg

SEQ ID NO: 219373 - DNA, 50 bp, Artificial
  Synthetic oligonucleotide
acatcaatcggcccgacaaccttgtccctgatgcgcgccacaagactggc

SEQ ID NO: 219374 - DNA, 50 bp, Artificial
  Synthetic oligonucleotide
cgtcaaaccgtaggcatacgcgatccaggtccccacgtcgtgccccgcta

SEQ ID NO: 219375 - DNA, 50 bp, Artificial
  Synthetic oligonucleotide
cgtagcgtccccacggagagagggggaacctaaatctgccggccatgttt

SEQ ID NO: 219376 - DNA, 55 bp, Artificial
  Synthetic oligonucleotide
cgggctcgtttcagggcggggataagccgctttgctctgtaggcggagcgttgtt

SEQ ID NO: 219377 - DNA, 50 bp, Artificial
  Synthetic oligonucleotide
acattgcctcaagcgtgcggcgatgtcctgtcaggcctcgaaaacggagg

SEQ ID NO: 219378 - DNA, 50 bp, Artificial
  Synthetic oligonucleotide
accaaaccgacatgcactgttcaccgtccacgcctctggcggcaagacag

SEQ ID NO: 219379 - DNA, 50 bp, Artificial
  Synthetic oligonucleotide
accaacaagttcgtccgcctctctgacgcgcactgggagtgacgagcgcg

SEQ ID NO: 219380 - DNA, 50 bp, Artificial
  Synthetic oligonucleotide
acggcggctctcagcgaccgttcgaagacgttgtttgtcgcggcgaccat

SEQ ID NO: 219381 - DNA, 50 bp, Artificial
  Synthetic oligonucleotide
ccgagacgagtttcttgcttggcacggcatgtgcgcgatcccgcaaacgc

SEQ ID NO: 219382 - DNA, 50 bp, Artificial
  Synthetic oligonucleotide
acggcgtccgacgagtttttcccgctggctaccaccctgtatttgccggc

SEQ ID NO: 219383 - DNA, 50 bp, Artificial
  Synthetic oligonucleotide
ccgacgggctcggtctatgacacccagacgctgacagggattgcccagct

SEQ ID NO: 219384 - DNA, 50 bp, Artificial
  Synthetic oligonucleotide
ccgacatcaccggaagccaagcatccgagcgcaccgcaatcattcgttcg

SEQ ID NO: 219385 - DNA, 50 bp, Artificial
  Synthetic oligonucleotide
ccgacaggaagaaaaggcgcccctccaatggcaaagccggaacgcttgtc

SEQ ID NO: 219386 - DNA, 50 bp, Artificial
  Synthetic oligonucleotide
ccgaatcggacgtatgcctccgcccaattggccaagtgcgcttctcccca

SEQ ID NO: 219387 - DNA, 55 bp, Artificial
  Synthetic oligonucleotide
cggcgggaaaattctccctcaccgcgaaatctctcaggttcagcgacagagtggg

SEQ ID NO: 219388 - DNA, 50 bp, Artificial
  Synthetic oligonucleotide
acgggccacgacatagtccctcactgctcggcttcgttcgatcgcggctc

SEQ ID NO: 219389 - DNA, 50 bp, Artificial
  Synthetic oligonucleotide
acggggcgtccatcgaatgcgccgcacttccgagatcacattattgcgga

SEQ ID NO: 219390 - DNA, 50 bp, Artificial
  Synthetic oligonucleotide
cccttagggctggatagcgcctgccttctcgactagccgctgtagcagct

SEQ ID NO: 219391 - DNA, 50 bp, Artificial
  Synthetic oligonucleotide
cccggcggcagcactgcgtgaaggttgtcgaacgcacttgcgaggtccga

SEQ ID NO: 219392 - DNA, 50 bp, Artificial
  Synthetic oligonucleotide
acggtcgcatccttgaggcggccctttgaggggagtgccagtgtaaccgt

SEQ ID NO: 219393 - DNA, 50 bp, Artificial
  Synthetic oligonucleotide
cccgctgtagccgtccgcacttgaaagccttacagtagcgtcgcccgctg

SEQ ID NO: 219394 - DNA, 50 bp, Artificial
  Synthetic oligonucleotide
acgtgatccgtgacccagcccataagcgtctgcgtgtcgcgtgcttgacc

SEQ ID NO: 219395 - DNA, 50 bp, Artificial
  Synthetic oligonucleotide
actccagcagaagcccctcatgcgagtcggcgaatgcctgcagtttagcg

SEQ ID NO: 219396 - DNA, 50 bp, Artificial
  Synthetic oligonucleotide
cccctatgagcagcacgaggcttgcaatcaatcgcggaaaggccggaacg

SEQ ID NO: 219397 - DNA, 50 bp, Artificial
  Synthetic oligonucleotide
actcgcagctttagagggggaacctcaggccttctcgcaagccgcacgaa

SEQ ID NO: 219398 - DNA, 55 bp, Artificial
  Synthetic oligonucleotide
cggcacatatggcgagcctgagcgatttgaatccgtggcaaaccccaaggcggaa

SEQ ID NO: 219399 - DNA, 50 bp, Artificial
  Synthetic oligonucleotide
actcggtcggcctgcattcgaggctggtcaaattgcggtccgggatgaac

SEQ ID NO: 219400 - DNA, 50 bp, Artificial
  Synthetic oligonucleotide
ccccaagcaaacttgaaggttcacggctggggtaaaaaggcgtgcgcccg

SEQ ID NO: 219401 - DNA, 50 bp, Artificial
  Synthetic oligonucleotide
cccatccaagccttatcgatcgccccgagcgatacaacgatcccgagggc

SEQ ID NO: 219402 - DNA, 50 bp, Artificial
  Synthetic oligonucleotide
cccagacgctgacagggattgcccagctcgcaatagcacgggatctctgg

SEQ ID NO: 219403 - DNA, 50 bp, Artificial
  Synthetic oligonucleotide
actctagccgcgcgctgacgaggaaatctgtacctaacttggcggcccgc

SEQ ID NO: 219404 - DNA, 50 bp, Artificial
  Synthetic oligonucleotide
acctatcagacgagccagggggccgctttgtgaccggcgtcccgagagcc

SEQ ID NO: 219405 - DNA, 50 bp, Artificial
  Synthetic oligonucleotide
acctattggcgtgggtggctgacggcccagcacaaagcgcggtagtgatc

SEQ ID NO: 219406 - DNA, 50 bp, Artificial
  Synthetic oligonucleotide
cgcccagacagaccgaccgggcaagggtgggtgcgaggaacgcggaaggg

SEQ ID NO: 219407 - DNA, 50 bp, Artificial
  Synthetic oligonucleotide
cgcaatctgtttgaggagcgatgcaacggctttgggcatcccgcggacaa

SEQ ID NO: 219408 - DNA, 50 bp, Artificial
  Synthetic oligonucleotide
acgaaccaccatgccctagacgcggctcgaaggtgcttcactggggtgcg

SEQ ID NO: 219409 - DNA, 55 bp, Artificial
  Synthetic oligonucleotide
cggaggacgctacgtggattcgtggcgaagggcctgtccatacccgcaagggtat

SEQ ID NO: 219410 - DNA, 50 bp, Artificial
  Synthetic oligonucleotide
acgacacaggacccgcgcagtggcgtagaacgtcaaccagccggtcttct

SEQ ID NO: 219411 - DNA, 50 bp, Artificial
  Synthetic oligonucleotide
acgaccgaattgcgcccatgagactcggcgaaacagaacaccccagcgtg

SEQ ID NO: 219412 - DNA, 50 bp, Artificial
  Synthetic oligonucleotide
cgaagctggaccgcgtttaacgtgttgactgggcagccagcagacccgtg

SEQ ID NO: 219413 - DNA, 50 bp, Artificial
  Synthetic oligonucleotide
cgaacccgtgaaataggcgcgggaagtcctggtcgctaagcgaagcctcg

SEQ ID NO: 219414 - DNA, 50 bp, Artificial
  Synthetic oligonucleotide
cgaaactgccgtcgcatggctaggtcgtcggttggctggcgtgaggtgtt

SEQ ID NO: 219415 - DNA, 50 bp, Artificial
  Synthetic oligonucleotide
acgatcggcacgctcatgtgacgtctccggccctcgcctcgtgggtgtag

SEQ ID NO: 219416 - DNA, 50 bp, Artificial
  Synthetic oligonucleotide
acgatgcttgccgcagactggcactcacccaaaccggacaccgtcatgca

SEQ ID NO: 219417 - DNA, 50 bp, Artificial
  Synthetic oligonucleotide
acgcatgatgagctggcacagtgggccctcgaagcacaagccgacgagtg

SEQ ID NO: 219418 - DNA, 50 bp, Artificial
  Synthetic oligonucleotide
acgccccacgctacccctcacatataggacgccccaaacgtgactgcacc

SEQ ID NO: 219419 - DNA, 50 bp, Artificial
  Synthetic oligonucleotide
ccgttctcgcatagtgtcgcacgccgtcctcaaaaggccgcatccggctt

SEQ ID NO: 219420 - DNA, 55 bp, Artificial
  Synthetic oligonucleotide
cggacgcgaacccgatcgaacactaggaaacaacagcgatccaccaccagagatt

SEQ ID NO: 219421 - DNA, 50 bp, Artificial
  Synthetic oligonucleotide
ccgtgacgggagacgaaaggcatggcatcccgcataacggttgctgccgg

SEQ ID NO: 219422 - DNA, 50 bp, Artificial
  Synthetic oligonucleotide
acgcctggtggtccccggaatctctgcgaaattgagcgctctagcggcga

SEQ ID NO: 219423 - DNA, 50 bp, Artificial
  Synthetic oligonucleotide
ccgggagttcggcgtagcccgttgctataatgacgggtacgttcggccac

SEQ ID NO: 219424 - DNA, 50 bp, Artificial
  Synthetic oligonucleotide
acgcgcagtcatggtcttgttatcggccagtcgccccatctcgtccccta

SEQ ID NO: 219425 - DNA, 50 bp, Artificial
  Synthetic oligonucleotide
acgcttgagtggaccggtcggcaagttccaccctcctggcggattgatcc

SEQ ID NO: 219426 - DNA, 50 bp, Artificial
  Synthetic oligonucleotide
acggatgtcgagagcacgatagccgcgccccgatagaagacgggggttgc

SEQ ID NO: 219427 - DNA, 55 bp, Artificial
  Synthetic oligonucleotide
cggaccaaatgtccgctccgctacggttctcgaaaccaccaccatatgactcgcc

SEQ ID NO: 219428 - DNA, 55 bp, Artificial
  Synthetic oligonucleotide
cggaatacgggcgtcaatcggtctgccttgcaggtacgcttcagaacagcgtgac

SEQ ID NO: 219429 - DNA, 55 bp, Artificial
  Synthetic oligonucleotide
cggaaacggcgtcttatgcggatttcacaatagggaatagtttgccggcatatgc

SEQ ID NO: 219430 - DNA, 55 bp, Artificial
  Synthetic oligonucleotide
cgcttggtgggtactcccgctcttgcttgccagttcccttaagccaatcgtgcga

SEQ ID NO: 219431 - DNA, 60 bp, Artificial
  Synthetic oligonucleotide
gatcgttgccacccaatgggttgtgcggacatcttcgccgcgtgtgattgtccgcgtgta

SEQ ID NO: 219432 - DNA, 55 bp, Artificial
  Synthetic oligonucleotide
cgctctttgtcagcgaaacctgctggtcaatcgaaagttattcgcgggccgaaac

SEQ ID NO: 219433 - DNA, 55 bp, Artificial
  Synthetic oligonucleotide
ccaccgctggcgcagtaatgctgcaagttcatgcacatgtggtgctctattctgc

SEQ ID NO: 219434 - DNA, 54 bp, Artificial
  Synthetic oligonucleotide
cattctgggagagttacacccgaccttggttcgtattggtgcctgctaccgggg

SEQ ID NO: 219435 - DNA, 55 bp, Artificial
  Synthetic oligonucleotide
catggttgcgtcttttgccggggcggggcgtgtgttgcttcacatgcccgaggat

SEQ ID NO: 219436 - DNA, 55 bp, Artificial
  Synthetic oligonucleotide
catctggccgcgagaaataatgttcgtcatggctatctgcgctgccaaaagccaa

SEQ ID NO: 219437 - DNA, 55 bp, Artificial
  Synthetic oligonucleotide
catagcatcaggagagcgagcagtgtccgtcccatcgcgtcactcatctggcgag

SEQ ID NO: 219438 - DNA, 55 bp, Artificial
  Synthetic oligonucleotide
cagtcgtgggctcctccagctttcatttgagagcgccaatgcatacggatgcggc

SEQ ID NO: 219439 - DNA, 55 bp, Artificial
  Synthetic oligonucleotide
cagcggtgccgaagatataagcggtcgcaccaaccgcgtcctggtttgtcgaaac

SEQ ID NO: 219440 - DNA, 55 bp, Artificial
  Synthetic oligonucleotide
cagccagctgacaagatacatcctgcgtttgcgcattaagaggcctcctgggttc

SEQ ID NO: 219441 - DNA, 55 bp, Artificial
  Synthetic oligonucleotide
cactcgtcgtcaggagcggaggatcaattctaaacgaatgaaccgtggacatggc

SEQ ID NO: 219442 - DNA, 60 bp, Artificial
  Synthetic oligonucleotide
aatatgatcggcttgcgtggaatcgaggacaatgccggcatacgttggaccacagaacct

SEQ ID NO: 219443 - DNA, 55 bp, Artificial
  Synthetic oligonucleotide
cacggcgagatagtgttgaattgtgtcgactagacggtccgaatcggcgccccag

SEQ ID NO: 219444 - DNA, 55 bp, Artificial
  Synthetic oligonucleotide
cacgacggtagcttgcgaagggtcttccgcatttgcacatgttaaccggccatca

SEQ ID NO: 219445 - DNA, 54 bp, Artificial
  Synthetic oligonucleotide
caatcaatcgcggaaaggccggaacgcggtgcgaaagcgggaatagggccaccg

SEQ ID NO: 219446 - DNA, 55 bp, Artificial
  Synthetic oligonucleotide
caagccgacttccggcgaaggagcggcgatccgaggggctcgattcaatcccaaa

SEQ ID NO: 219447 - DNA, 55 bp, Artificial
  Synthetic oligonucleotide
caaaatagtttgcgcctctcagtacatcgcatcttatctgagtttctggggcggt

SEQ ID NO: 219448 - DNA, 55 bp, Artificial
  Synthetic oligonucleotide
atgcccacccttatcgcagaaagcatagtttgccgattttcaggcacttgtcacg

SEQ ID NO: 219449 - DNA, 52 bp, Artificial
  Synthetic oligonucleotide
atgacggttttgtgacggtttgacgacagtcggcccgaaagcggggataaac

SEQ ID NO: 219450 - DNA, 55 bp, Artificial
  Synthetic oligonucleotide
atagcagcatcagtggttttcgcgttgctggcaggactcgcccacgctcaaacct

SEQ ID NO: 219451 - DNA, 55 bp, Artificial
  Synthetic oligonucleotide
agtggcagccgctcagatggtcgtacgggcagaccaaaagtgaccctgatgctct

SEQ ID NO: 219452 - DNA, 54 bp, Artificial
  Synthetic oligonucleotide
agggaggccatttccgttgttcgccggtgcttccctagttcctctgtcgctggg

SEQ ID NO: 219453 - DNA, 58 bp, Artificial
  Synthetic oligonucleotide
actcgcaacagatctgctacccgaccgtggggcgctcccgataaatcggtgaccgcaa

SEQ ID NO: 219454 - DNA, 55 bp, Artificial
  Synthetic oligonucleotide
aggctaacaacacgaactctgactcaactctcggcacagcgaagcggcgtcggca

SEQ ID NO: 219455 - DNA, 55 bp, Artificial
  Synthetic oligonucleotide
aggaggttgcacgagcagcggttaccagcaatgattgtgcttggggattgggtgg

SEQ ID NO: 219456 - DNA, 55 bp, Artificial
  Synthetic oligonucleotide
cctcgattgtctgcctacttgcgctatcaccgagggccggctttcagggaccctc

SEQ ID NO: 219457 - DNA, 53 bp, Artificial
  Synthetic oligonucleotide
cctccctaaactggatgttaggaggcaacggtaaccgcaaaattatcgcgcgg

SEQ ID NO: 219458 - DNA, 55 bp, Artificial
  Synthetic oligonucleotide
cctcaccacaacacgagagaggatcccgactatgaatggggcattgagggcgcac

SEQ ID NO: 219459 - DNA, 55 bp, Artificial
  Synthetic oligonucleotide
ccgtccgctctgtcatcgtcgcagacgtcggtaacgtcagtgaagcgctctctgg

SEQ ID NO: 219460 - DNA, 55 bp, Artificial
  Synthetic oligonucleotide
ccgctgtttctctcattgggccggcaccggttcgatttcatgctcgaaaacctcc

SEQ ID NO: 219461 - DNA, 55 bp, Artificial
  Synthetic oligonucleotide
ccgcctgtacggtcgtccctggcggttagccattcagcttgaaacgagagccagg

SEQ ID NO: 219462 - DNA, 55 bp, Artificial
  Synthetic oligonucleotide
ccgcccattagcgaaccatagccgggtcaatttgtaaagctgatggacgaatgtt

SEQ ID NO: 219463 - DNA, 55 bp, Artificial
  Synthetic oligonucleotide
ccgccatttacgctcgacgaaggtgtgagctacgtacttggtggagatagcctgg

SEQ ID NO: 219464 - DNA, 56 bp, Artificial
  Synthetic oligonucleotide
caaattcccgcggatgtcgacaacgtccacgccacgcgctcggggcacttattccc

SEQ ID NO: 219465 - DNA, 53 bp, Artificial
  Synthetic oligonucleotide
ccgactgaaacggaaggccttcgggtccacaataggcgtatgtcccgttacga

SEQ ID NO: 219466 - DNA, 55 bp, Artificial
  Synthetic oligonucleotide
ccgaacgcactttgtcgcggagtgaacaatcgttgggtcgcagaatggcagcgga

SEQ ID NO: 219467 - DNA, 54 bp, Artificial
  Synthetic oligonucleotide
ccgaacaatccacaggctacgataaccacgtggagaagccttcccggtacccag

SEQ ID NO: 219468 - DNA, 55 bp, Artificial
  Synthetic oligonucleotide
cccggacgctcttatcagaccgccggagcttattgccgcgaatactctcagaccg

SEQ ID NO: 219469 - DNA, 55 bp, Artificial
  Synthetic oligonucleotide
cccgcgagagatccatgtcatatcctgaggggacggccagccgcaaaactccgac

SEQ ID NO: 219470 - DNA, 55 bp, Artificial
  Synthetic oligonucleotide
cccctcgtacatattggtcctctctcgaaaagtgagagtgcttacaatgccgcga

SEQ ID NO: 219471 - DNA, 55 bp, Artificial
  Synthetic oligonucleotide
ccccgcgataagcctgtacttaccttgtgcggaagcaccactgatccgggatggc

SEQ ID NO: 219472 - DNA, 55 bp, Artificial
  Synthetic oligonucleotide
ccccatccgagacgatattggccttggaaaggttcacataaggcgcgtaaagagc

SEQ ID NO: 219473 - DNA, 51 bp, Artificial
  Synthetic oligonucleotide
cccaattggaagtcttccgaccttccgcatcgggttcttcctcgtaacggt

SEQ ID NO: 219474 - DNA, 55 bp, Artificial
  Synthetic oligonucleotide
ccattttcaccgggacgttgccagaatgaatccgggcttacacgtgcgcgatggc

SEQ ID NO: 219475 - DNA, 53 bp, Artificial
  Synthetic oligonucleotide
cccccagtaaccgaagaagtcttggcggacgaagttactgagggcctacagtc

SEQ ID NO: 219476 - DNA, 60 bp, Artificial
  Synthetic oligonucleotide
gtcggaaagcgaaaagcttcccaataagattttgcgatattcacgtgctcgtgagcgcgc

SEQ ID NO: 219477 - DNA, 54 bp, Artificial
  Synthetic oligonucleotide
ttagcagggcgtgtgttcagagctgtacctgcgccttcaaacttagaaatccct

SEQ ID NO: 219478 - DNA, 48 bp, Artificial
  Synthetic oligonucleotide
aaaagaaccctttaggtacaaaatcaactctccggaaaacctcgaacg

SEQ ID NO: 219479 - DNA, 53 bp, Artificial
  Synthetic oligonucleotide
cgatcatagagcactaggcctggtgaacctaagtcaggcaagttttgagtcgc

SEQ ID NO: 219480 - DNA, 53 bp, Artificial
  Synthetic oligonucleotide
aaaatggtgacgatctccttgagagatatgatcacctggttaaatcagttcag

SEQ ID NO: 219481 - DNA, 52 bp, Artificial
  Synthetic oligonucleotide
gcatgcttcagatgacaggccaagttgccaacgtcttagaaactcctgaagg

SEQ ID NO: 219482 - DNA, 52 bp, Artificial
  Synthetic oligonucleotide
gcgtaatccgctttcgattcctgttcgcacgaagggtcggtatgacctgcgc

SEQ ID NO: 219483 - DNA, 52 bp, Artificial
  Synthetic oligonucleotide
cgactaatgcagtggctaatttattcgtgccatcgttgaaataatcgggttt

SEQ ID NO: 219484 - DNA, 52 bp, Artificial
  Synthetic oligonucleotide
gattggcggctaaggcttcaatccgttgccaggtgcgacgatttaagtctgg

SEQ ID NO: 219485 - DNA, 52 bp, Artificial
  Synthetic oligonucleotide
ttgtgctgactctggatgcaccgttttatcgatcaaagcacgcactaaatcc

SEQ ID NO: 219486 - DNA, 52 bp, Artificial
  Synthetic oligonucleotide
caaagtctttgatacacaattggccgcaacagtcctaggctacggcgatcaa

SEQ ID NO: 219487 - DNA, 60 bp, Artificial
  Synthetic oligonucleotide
catgctgcatctttctgtaaaaagcaccttttctgccctctctgtgcgattaggagagct

SEQ ID NO: 219488 - DNA, 52 bp, Artificial
  Synthetic oligonucleotide
ttccaacgcaaacctaaaccggtgacaaaggcgtgagccatcattggccagt

SEQ ID NO: 219489 - DNA, 52 bp, Artificial
  Synthetic oligonucleotide
agactttagacatgctgaagtgggtctaggaaccgatgaacatttgcgaact

SEQ ID NO: 219490 - DNA, 52 bp, Artificial
  Synthetic oligonucleotide
gtcaagaatgcgatcatcagcttgtacgtccagtaacttcatggctcgctgg

SEQ ID NO: 219491 - DNA, 51 bp, Artificial
  Synthetic oligonucleotide
agccagaaccaagtgacatagggaagtgcggtcccgaccaatgccagcgac

SEQ ID NO: 219492 - DNA, 51 bp, Artificial
  Synthetic oligonucleotide
ctatcaggcaacggtttacctaaacgtggggattcaagttgtgccgtgggg

SEQ ID NO: 219493 - DNA, 51 bp, Artificial
  Synthetic oligonucleotide
accattgacgtgcccagtacaagctacgcgcgcatacccgggttgccaagg

SEQ ID NO: 219494 - DNA, 51 bp, Artificial
  Synthetic oligonucleotide
acaccgtcgccaggcgccaccacttgtttagggaatgcgtatcgcgatgca

SEQ ID NO: 219495 - DNA, 51 bp, Artificial
  Synthetic oligonucleotide
accgttgttcgtggcacccagctctgtgtcgactcacacggaatcgtcggg

SEQ ID NO: 219496 - DNA, 51 bp, Artificial
  Synthetic oligonucleotide
acaaccctttactcggatgacggtgacagaatcgattttgcactttaaccc

SEQ ID NO: 219497 - DNA, 51 bp, Artificial
  Synthetic oligonucleotide
aatttgagcgccctcataccgcaccacaatcgatccccagtccggttggcc

SEQ ID NO: 219498 - DNA, 57 bp, Artificial
  Synthetic oligonucleotide
aagttcaagcagcggtaaccctcgatgctcgccgcttacttttcagtactggattat

SEQ ID NO: 219499 - DNA, 51 bp, Artificial
  Synthetic oligonucleotide
agccaaaccggccaggtcccgccagataatgcgtaccatcatccattgccg

SEQ ID NO: 219500 - DNA, 51 bp, Artificial
  Synthetic oligonucleotide
tcggccacttaaagtgatcgaagatgagagcgttattcgattgctagcacc

SEQ ID NO: 219501 - DNA, 51 bp, Artificial
  Synthetic oligonucleotide
acgtggtcccgatgtgacataaggcatgactgccggtggttcgcctcccgc

SEQ ID NO: 219502 - DNA, 51 bp, Artificial
  Synthetic oligonucleotide
aatgcgtgcccatttccctaacaaccctagggcaccccaccgtgctggcct

SEQ ID NO: 219503 - DNA, 51 bp, Artificial
  Synthetic oligonucleotide
cgagggttgtgctgacgtatctgtgctgggtgcctctacgacctccgtcgg

SEQ ID NO: 219504 - DNA, 51 bp, Artificial
  Synthetic oligonucleotide
ccgtttggcgcaaagctcggggactcatcagcccgcgtttcagttaacacc

SEQ ID NO: 219505 - DNA, 51 bp, Artificial
  Synthetic oligonucleotide
ccgtggctgtgcgttgggggctggtgaaattaacacctgcgggcaaaggct

SEQ ID NO: 219506 - DNA, 51 bp, Artificial
  Synthetic oligonucleotide
ataagccgacagatcgcctaacctgtcgggcggaggagcaagaggttcgga

SEQ ID NO: 219507 - DNA, 51 bp, Artificial
  Synthetic oligonucleotide
aacgccgccagtattgcacaaggtttgctttcgccgcctgcggcacagtta

SEQ ID NO: 219508 - DNA, 51 bp, Artificial
  Synthetic oligonucleotide
cacagtctcaaccgagtggctgcactaacgacaccgcatcagggcaaggct

SEQ ID NO: 219509 - DNA, 57 bp, Artificial
  Synthetic oligonucleotide
tagagggcttgccctatatccagcttttttacaaatacctacaaggcatcggttata

SEQ ID NO: 219510 - DNA, 51 bp, Artificial
  Synthetic oligonucleotide
aacagcgatgccgcgccagaccccaaacgcaggctggtaaaactaacgggg

SEQ ID NO: 219511 - DNA, 51 bp, Artificial
  Synthetic oligonucleotide
ccgaatcccagctaatcccggcttcagacagttcccactcagcacgggtgc

SEQ ID NO: 219512 - DNA, 51 bp, Artificial
  Synthetic oligonucleotide
cccttatgtgcggcagcgtcgatccccattgcaagcccactcgtcaccact

SEQ ID NO: 219513 - DNA, 50 bp, Artificial
  Synthetic oligonucleotide
ttgccgagtggtcgcccccaagtgactggcaaaccatcgactgcaaccag

SEQ ID NO: 219514 - DNA, 50 bp, Artificial
  Synthetic oligonucleotide
gcagcacgaatgggcggtagcgaccctgcatcaaaccctcgtttgcgggc

SEQ ID NO: 219515 - DNA, 50 bp, Artificial
  Synthetic oligonucleotide
gcaaccgtgggaaacgccctacggtaaacctgcccgtatggcctctgcac

SEQ ID NO: 219516 - DNA, 50 bp, Artificial
  Synthetic oligonucleotide
tttaaccgcggcatggtcactatcgacaaacctgtctctaatgatcgggt

SEQ ID NO: 219517 - DNA, 50 bp, Artificial
  Synthetic oligonucleotide
tttcggtgcttccattgtctgcgcccccgcctagttacctcccgctttga

SEQ ID NO: 219518 - DNA, 50 bp, Artificial
  Synthetic oligonucleotide
gggcgtcagctcagacagttttgaccaggcgatttcaatcagcggcgggg

SEQ ID NO: 219519 - DNA, 50 bp, Artificial
  Synthetic oligonucleotide
gggtgtcagggtaatggcgcgtaagtttaatcttccggtctataccacac

SEQ ID NO: 219520 - DNA, 55 bp, Artificial
  Synthetic oligonucleotide
ggactggatgagtatgccactccccgaggcagttgatttctccacctgtctcgat

SEQ ID NO: 219521 - DNA, 50 bp, Artificial
  Synthetic oligonucleotide
ggttttactcatcgaccagagaaatggggtttaacggtccgattgcctac

SEQ ID NO: 219522 - DNA, 50 bp, Artificial
  Synthetic oligonucleotide
gtcggcttgttagtcgtgtcaggcgttgctgcctcttcgctcgttgccgc

SEQ ID NO: 219523 - DNA, 50 bp, Artificial
  Synthetic oligonucleotide
ggcggctcgtccaccacaattccaaccacaccgactccctatccggtccc

SEQ ID NO: 219524 - DNA, 50 bp, Artificial
  Synthetic oligonucleotide
ggcacctgaagggcagttagccattgagccgggcttagcggaaaggttgc

SEQ ID NO: 219525 - DNA, 50 bp, Artificial
  Synthetic oligonucleotide
ggcaccgcatgaggtggctacggccctttataccgcattcaccacacccc

SEQ ID NO: 219526 - DNA, 50 bp, Artificial
  Synthetic oligonucleotide
taagccgtgacggccgctctaaggggtatattaacggtcgtgcggtcccg

SEQ ID NO: 219527 - DNA, 50 bp, Artificial
  Synthetic oligonucleotide
gctgactctagaaactggccagcatctcgcatcgctgaaaaggtttgctg

SEQ ID NO: 219528 - DNA, 50 bp, Artificial
  Synthetic oligonucleotide
taatgttgaaagcgcaccgtgctattgaatctttaacgctggaccgagaa

SEQ ID NO: 219529 - DNA, 50 bp, Artificial
  Synthetic oligonucleotide
tagcccgtactgaggctttggaacgatcgccctgtttacggtgcgacggc

SEQ ID NO: 219530 - DNA, 50 bp, Artificial
  Synthetic oligonucleotide
tcatggtgagcttacccgagtcggccacccctgaccaacgtgatgcatct

SEQ ID NO: 219531 - DNA, 55 bp, Artificial
  Synthetic oligonucleotide
cccaaacaccaccttgacgggtcgccacgcgaatactgggcgcactgcgctgaaa

SEQ ID NO: 219532 - DNA, 50 bp, Artificial
  Synthetic oligonucleotide
tcggcataagccgtcgctcgatccaacgcgatgctgtccagtgttgcgat

SEQ ID NO: 219533 - DNA, 50 bp, Artificial
  Synthetic oligonucleotide
gcgtcacgctgtcgactaaatggtgcggccacacttagcggcgtcaggtt

SEQ ID NO: 219534 - DNA, 50 bp, Artificial
  Synthetic oligonucleotide
gcctttgagacgctggcaaaagaaccggcgtaccaaaatcactcaggcct

SEQ ID NO: 219535 - DNA, 50 bp, Artificial
  Synthetic oligonucleotide
tctctcatgcgacagggagttacgcaggcgcggttgaaagcaccgtctta

SEQ ID NO: 219536 - DNA, 50 bp, Artificial
  Synthetic oligonucleotide
gccgtcgctcgatccaacgcgatgctgtccagtgttgcgattcgcgcttg

SEQ ID NO: 219537 - DNA, 50 bp, Artificial
  Synthetic oligonucleotide
tcttcgtgtcctgtctccagtcgctggacgcagctgcctggtcattgccg

SEQ ID NO: 219538 - DNA, 50 bp, Artificial
  Synthetic oligonucleotide
gcccccaccggtaataaagccgaatcgacgccggaactcactaagcggga

SEQ ID NO: 219539 - DNA, 50 bp, Artificial
  Synthetic oligonucleotide
tggcgctacccgtgtggtcgcctacacaacacatccggttttatcgggcc

SEQ ID NO: 219540 - DNA, 50 bp, Artificial
  Synthetic oligonucleotide
aggatggtgccgtggttcatgcgacccatgtgtctgagcgtacgcgtggc

SEQ ID NO: 219541 - DNA, 50 bp, Artificial
  Synthetic oligonucleotide
aggcccaggcgtttagtccaaaccagccgctgccaagtaccggactcatc

SEQ ID NO: 219542 - DNA, 55 bp, Artificial
  Synthetic oligonucleotide
gttacgcgccacagccatagctgccgttgcgtttagcgcattatgtaaaccaggc

SEQ ID NO: 219543 - DNA, 50 bp, Artificial
  Synthetic oligonucleotide
aggcgtgttttcgcctctagccatccaaagagccccggcgcattacccat

SEQ ID NO: 219544 - DNA, 50 bp, Artificial
  Synthetic oligonucleotide
aggtaggtagttgccaggcatcgcctgtcctctaaagagcgcggctcccc

SEQ ID NO: 219545 - DNA, 50 bp, Artificial
  Synthetic oligonucleotide
agtccggttgcgaccgctattgtctggggcattggcgtatctaccctgct

SEQ ID NO: 219546 - DNA, 50 bp, Artificial
  Synthetic oligonucleotide
agtgcgcccaaaaagccgactgggtattgccagcgtatggttcgcgtcag

SEQ ID NO: 219547 - DNA, 50 bp, Artificial
  Synthetic oligonucleotide
agtggggtgtcgatttgccgggcacgtgaaggaagattgccttctcggga

SEQ ID NO: 219548 - DNA, 50 bp, Artificial
  Synthetic oligonucleotide
agtggttggcaaattgggctcgcttccctgtaccggcggctagtgcctaa

SEQ ID NO: 219549 - DNA, 50 bp, Artificial
  Synthetic oligonucleotide
agttgccaggcatcgcctgtcctctaaagagcgcggctccccaaagagac

SEQ ID NO: 219550 - DNA, 50 bp, Artificial
  Synthetic oligonucleotide
ataaaacgcccaaacaccaccttgacgggtcgccacgcgaatactgggcg

SEQ ID NO: 219551 - DNA, 50 bp, Artificial
  Synthetic oligonucleotide
atagctgcggtttttccggccataacgctgcaaccgtatcagggccgccc

SEQ ID NO: 219552 - DNA, 50 bp, Artificial
  Synthetic oligonucleotide
atcgcgtggtggctggctcgcacccgttgtcgtgccaaagtagctattga

SEQ ID NO: 219553 - DNA, 53 bp, Artificial
  Synthetic oligonucleotide
atggtaaaaccgttctttgtgctcgtaggcagcccggagttgaggaaaggccc

SEQ ID NO: 219554 - DNA, 50 bp, Artificial
  Synthetic oligonucleotide
atgccgtgcgataccaccggcctgactccattgaccggcaaactggggac

SEQ ID NO: 219555 - DNA, 50 bp, Artificial
  Synthetic oligonucleotide
atgcgccctaacccgctgggctaattcatgacggtatcgatgccaccccc

SEQ ID NO: 219556 - DNA, 50 bp, Artificial
  Synthetic oligonucleotide
atggaacctgggcaatggaagacgatgccctccccagtccaacggcgatt

SEQ ID NO: 219557 - DNA, 50 bp, Artificial
  Synthetic oligonucleotide
atggcaccttgcgtgtgcgcggcacaggtacggctggacaaagctcctac

SEQ ID NO: 219558 - DNA, 50 bp, Artificial
  Synthetic oligonucleotide
atggctccgcccactaaggcgtgtccggtggtacaagcacccgctaggcg

SEQ ID NO: 219559 - DNA, 50 bp, Artificial
  Synthetic oligonucleotide
attccacggataggaagcaacgccagcttgcctgtgctgcgccgcttgat

SEQ ID NO: 219560 - DNA, 50 bp, Artificial
  Synthetic oligonucleotide
caaaatcgacccggcatcgggttgggtttgagccacagcgggtgagctgg

SEQ ID NO: 219561 - DNA, 50 bp, Artificial
  Synthetic oligonucleotide
aacacagggtggctcgaactgagctttggtgcgattggcatagcgcacga

SEQ ID NO: 219562 - DNA, 50 bp, Artificial
  Synthetic oligonucleotide
aacagcctgccttaatcaaggctacccaccaagtgcagtggcccgcccgc

SEQ ID NO: 219563 - DNA, 50 bp, Artificial
  Synthetic oligonucleotide
aacatcgccggggtagaggctaggccaaaatcggtaacctgcacacccga

SEQ ID NO: 219564 - DNA, 55 bp, Artificial
  Synthetic oligonucleotide
gttataaagggcaagacgaacactacgcagatgggcaatctcagcaaaaccatag

SEQ ID NO: 219565 - DNA, 50 bp, Artificial
  Synthetic oligonucleotide
aacctgcaggaagcgcgtgcacttagccgagaagcgggttatgaccgtta

SEQ ID NO: 219566 - DNA, 50 bp, Artificial
  Synthetic oligonucleotide
aactggattgcatcgaacgcaaacaggtgcgttgaccggagatgaaatgg

SEQ ID NO: 219567 - DNA, 50 bp, Artificial
  Synthetic oligonucleotide
aaggcgtgtccggtggtacaagcacccgctaggcgagcaccaaaacctaa

SEQ ID NO: 219568 - DNA, 50 bp, Artificial
  Synthetic oligonucleotide
aagtcggcactaagcggggatcggccccattcacggcggtaatcgtgagg

SEQ ID NO: 219569 - DNA, 50 bp, Artificial
  Synthetic oligonucleotide
acccccgtagtccgtacgcagccggggccgcactaatgctggctaatcac

SEQ ID NO: 219570 - DNA, 50 bp, Artificial
  Synthetic oligonucleotide
acccgggtgcggtgcgacttgccaatgactcggatcgataaccgtgacgg

SEQ ID NO: 219571 - DNA, 50 bp, Artificial
  Synthetic oligonucleotide
accgcctctactcgcaccaacaactgaaacccaaacggcggcaggttcgc

SEQ ID NO: 219572 - DNA, 50 bp, Artificial
  Synthetic oligonucleotide
accgtgcaccagggtgatgctagccaagattggcctgacggggaaagcta

SEQ ID NO: 219573 - DNA, 50 bp, Artificial
  Synthetic oligonucleotide
acgaccaccaataccctgacgcatcaccggattggcccgaattcccggta

SEQ ID NO: 219574 - DNA, 50 bp, Artificial
  Synthetic oligonucleotide
actcggatggtcacccgtgatggtgggcgtgagacgatcacttcgcgtcg

SEQ ID NO: 219575 - DNA, 55 bp, Artificial
  Synthetic oligonucleotide
ggtacgacgggtatcgccatattcgtctttcaccgcgattagttcttcacgtacc

SEQ ID NO: 219576 - DNA, 50 bp, Artificial
  Synthetic oligonucleotide
agatcacccgtgacgggctgcgtaaacttgctcgcttgctgttggccgaa

SEQ ID NO: 219577 - DNA, 50 bp, Artificial
  Synthetic oligonucleotide
agccagcgcaatatggcccatggcggattcttggtcagcgtccagtagct

SEQ ID NO: 219578 - DNA, 50 bp, Artificial
  Synthetic oligonucleotide
agccgcccgaccgcaaacagccgttgcggataatctaacgcatccacaag

SEQ ID NO: 219579 - DNA, 50 bp, Artificial
  Synthetic oligonucleotide
agcgctgatgcctaacatgtagctcaagcggacggctcaaaaccgccgct

SEQ ID NO: 219580 - DNA, 50 bp, Artificial
  Synthetic oligonucleotide
agcggattccaccgacatggctggcaaagtggggtttcgtcccacaacac

SEQ ID NO: 219581 - DNA, 50 bp, Artificial
  Synthetic oligonucleotide
aggaccgtcaacattgagcggcactaggctgagccgaaaccgtgcttgcg

SEQ ID NO: 219582 - DNA, 50 bp, Artificial
  Synthetic oligonucleotide
ccgcctgccaccgcagacaaatctcgctccatagtgtgtgctaccgccgc

SEQ ID NO: 219583 - DNA, 50 bp, Artificial
  Synthetic oligonucleotide
ccgcgcatgtggactttaccactgtcgctgaatcggcttatgccgcgcac

SEQ ID NO: 219584 - DNA, 50 bp, Artificial
  Synthetic oligonucleotide
ccggccaccttagtcgcacgcctatcgggtcagacgctcacgtttcccac

SEQ ID NO: 219585 - DNA, 50 bp, Artificial
  Synthetic oligonucleotide
ccggcttcaggggcatacgatagctgcggtttttccggccataacgctgc

SEQ ID NO: 219586 - DNA, 57 bp, Artificial
  Synthetic oligonucleotide
cgggtgatagctttattgtagacgttcgccccattggtcaaatccaagagccgatta

SEQ ID NO: 219587 - DNA, 51 bp, Artificial
  Synthetic oligonucleotide
gttcggccaaaatccacaccgccaaaccgatggtaaataacggccctaaac

SEQ ID NO: 219588 - DNA, 50 bp, Artificial
  Synthetic oligonucleotide
ccggtagcacaggtgtttaccggccaattgggtgcgggttggttgagcga

SEQ ID NO: 219589 - DNA, 50 bp, Artificial
  Synthetic oligonucleotide
ccggtgctaccagtggttggcaaattgggctcgcttccctgtaccggcgg

SEQ ID NO: 219590 - DNA, 50 bp, Artificial
  Synthetic oligonucleotide
ccgtggtcggtgttctagcggtcaaccgtctggccaaacgttcacgctct

SEQ ID NO: 219591 - DNA, 50 bp, Artificial
  Synthetic oligonucleotide
cctgatcgcgtgttggctcactcagcacccaaacacggcccggcataatg

SEQ ID NO: 219592 - DNA, 50 bp, Artificial
  Synthetic oligonucleotide
cgattagctgctatcgccaacccttgcggactgcaaccgccatgaccaga

SEQ ID NO: 219593 - DNA, 50 bp, Artificial
  Synthetic oligonucleotide
cgccacgctttagttgagcgttgcttgctcataccagagcggcagctgcc

SEQ ID NO: 219594 - DNA, 50 bp, Artificial
  Synthetic oligonucleotide
cgcgcccatcgaattctgaagccggtctgcaatgtacggttcgcgtgacg

SEQ ID NO: 219595 - DNA, 50 bp, Artificial
  Synthetic oligonucleotide
cgggttggtaatccaggctagcgcggtcgctagagggatgttggcgcgag

SEQ ID NO: 219596 - DNA, 50 bp, Artificial
  Synthetic oligonucleotide
cgtatcgacagattgctcgtcgcgttggtgccagactggccatgcagggc

SEQ ID NO: 219597 - DNA, 50 bp, Artificial
  Synthetic oligonucleotide
cgtcgcgttggtgccagactggccatgcagggcaaagattactcagcagc

SEQ ID NO: 219598 - DNA, 55 bp, Artificial
  Synthetic oligonucleotide
gttctcgaacaggacgttatgacagcaatggtaatatgcgtcatgtttatccgcc

SEQ ID NO: 219599 - DNA, 50 bp, Artificial
  Synthetic oligonucleotide
ctcccggctcgatgtttcagcgccctctgcaacgcctagaagtcgatggc

SEQ ID NO: 219600 - DNA, 50 bp, Artificial
  Synthetic oligonucleotide
gaagcagaaaccgtcccagaacctgagccccgtccctctgcgcgcgatat

SEQ ID NO: 219601 - DNA, 50 bp, Artificial
  Synthetic oligonucleotide
gaccacgaaacacgcctttgttagtgcctgcctacacgcatcgtggccga

SEQ ID NO: 219602 - DNA, 50 bp, Artificial
  Synthetic oligonucleotide
gacgggctgcgtaaacttgctcgcttgctgttggccgaagctgtgccacc

SEQ ID NO: 219603 - DNA, 50 bp, Artificial
  Synthetic oligonucleotide
gagccaacacccgaaccgcccactccagaaccggttgtcgctgagacgcc

SEQ ID NO: 219604 - DNA, 50 bp, Artificial
  Synthetic oligonucleotide
cacagcgactgctccctacggtagatggcactgctcgagtcccggcggtg

SEQ ID NO: 219605 - DNA, 50 bp, Artificial
  Synthetic oligonucleotide
cacgagttggcgggcagtacgaatcggcacgtgacctaggcggcctaacc

SEQ ID NO: 219606 - DNA, 50 bp, Artificial
  Synthetic oligonucleotide
cagactgggaccgttgttcgtggcacccagctctgtgtcgactcacacgg

SEQ ID NO: 219607 - DNA, 50 bp, Artificial
  Synthetic oligonucleotide
cagagtggagaacgctcattattagccgctgagggcggggcaaggcgcat

SEQ ID NO: 219608 - DNA, 50 bp, Artificial
  Synthetic oligonucleotide
cagcggtatcctgtgcggccaaccaaggaaaactcgcctggccacgggtt

SEQ ID NO: 219609 - DNA, 55 bp, Artificial
  Synthetic oligonucleotide
cccataattcaatgcgtgtaacgctgacgcccaatttacaaagggttgaatgtcc

SEQ ID NO: 219610 - DNA, 50 bp, Artificial
  Synthetic oligonucleotide
caggcatggctacgagaatgcttacccgctgaagcttggcaggcgccaca

SEQ ID NO: 219611 - DNA, 50 bp, Artificial
  Synthetic oligonucleotide
cagggatggcactcaaccccgagacgaagtatcccttgctggccctcacc

SEQ ID NO: 219612 - DNA, 50 bp, Artificial
  Synthetic oligonucleotide
cagggccggcaaagtcgagtaatccggtgtaagtgtaggcgatgatatac

SEQ ID NO: 219613 - DNA, 50 bp, Artificial
  Synthetic oligonucleotide
ccaacctaccgcaacaagccacccttgtcacgccctcgcagagctttggg

SEQ ID NO: 219614 - DNA, 50 bp, Artificial
  Synthetic oligonucleotide
ccaagctaaccacggcggagagtgcaagaatgccccacaaacgccccaat

SEQ ID NO: 219615 - DNA, 50 bp, Artificial
  Synthetic oligonucleotide
ccaaggaaaactcgcctggccacgggttcgcagccagctaattagcggcc

SEQ ID NO: 219616 - DNA, 50 bp, Artificial
  Synthetic oligonucleotide
ccagccctcggattctgtcatcccgatctgagccatcgcggagtttgcct

SEQ ID NO: 219617 - DNA, 50 bp, Artificial
  Synthetic oligonucleotide
cccagccgggagagcaagccgttttcgtcaaccgatttgggaagcgacta

SEQ ID NO: 219618 - DNA, 50 bp, Artificial
  Synthetic oligonucleotide
ccccaatggttgtcagccaccatggtgctagaggtggtatcgcgaccgcc

SEQ ID NO: 219619 - DNA, 50 bp, Artificial
  Synthetic oligonucleotide
ccccatcgcctgtgacgtgcttttctatcgtgcaccacgcccggtacgta

SEQ ID NO: 219620 - DNA, 55 bp, Artificial
  Synthetic oligonucleotide
gttgcgaccatggttgaaaccttctccgtggaacgtcgtaagattatgcgggccc

SEQ ID NO: 219621 - DNA, 50 bp, Artificial
  Synthetic oligonucleotide
cccgtcacctacgctgcccccagagaaggttatcgtgcctggcatggggt

SEQ ID NO: 219622 - DNA, 50 bp, Artificial
  Synthetic oligonucleotide
cccgtcacgaccgatggcctggttttaatccgtgagtggagtgccggcgt

SEQ ID NO: 219623 - DNA, 50 bp, Artificial
  Synthetic oligonucleotide
ccgaccgcgctacctacaacagaaccagcggtgatgtgaccgctagtggc

SEQ ID NO: 219624 - DNA, 55 bp, Artificial
  Synthetic oligonucleotide
atgcgacgggttaatacgtacttatcgtctccacgacgtgcttcgatgataatgt

SEQ ID NO: 219625 - DNA, 55 bp, Artificial
  Synthetic oligonucleotide
gttgcgggtgagctaaaccatacacgctgacataatcaataaccggccaagcggc

SEQ ID NO: 219626 - DNA, 54 bp, Artificial
  Synthetic oligonucleotide
gtttaaccctaataaccgccatggtttacgtgccagcgactttagaaatcgcgc

SEQ ID NO: 219627 - DNA, 55 bp, Artificial
  Synthetic oligonucleotide
atatgttcgaaatttcacagatattcaggcaaaggaaccgattgtcagtctgcag

SEQ ID NO: 219628 - DNA, 55 bp, Artificial
  Synthetic oligonucleotide
ccgggttctcgcgcgcctagcaccacctctcgacgctctacttcaaataactctg

SEQ ID NO: 219629 - DNA, 55 bp, Artificial
  Synthetic oligonucleotide
atacgcagtcggtcgctaaaacgcacccacgcaacacgattaaaaccatggcaaa

SEQ ID NO: 219630 - DNA, 56 bp, Artificial
  Synthetic oligonucleotide
tgatcacctggttaaatcagttcaggtactaaaccgtaaacgcacccgcgctagaa

SEQ ID NO: 219631 - DNA, 55 bp, Artificial
  Synthetic oligonucleotide
gctcgcattgggaagcgtcttttcccatggcatggttcacactaaggagtgagac

SEQ ID NO: 219632 - DNA, 55 bp, Artificial
  Synthetic oligonucleotide
gctacttcttgtactgtagccgtcatctcattcattgctgaggcaaccagagtgg

SEQ ID NO: 219633 - DNA, 55 bp, Artificial
  Synthetic oligonucleotide
ggctcaacaatcacgttttctacagacgactccggtctggcatatgcctgtggcc

SEQ ID NO: 219634 - DNA, 55 bp, Artificial
  Synthetic oligonucleotide
catcaccacttggcagatcgatatggcgttcttcacctagtgtagtgggatcgga

SEQ ID NO: 219635 - DNA, 54 bp, Artificial
  Synthetic oligonucleotide
cccgtcggatcaattaagaacggaaaccggctacccaatgcccattatcgacta

SEQ ID NO: 219636 - DNA, 55 bp, Artificial
  Synthetic oligonucleotide
gtcaataaactctagctcaccacctagtggaatgccgtgggctagtcgggtcact

SEQ ID NO: 219637 - DNA, 55 bp, Artificial
  Synthetic oligonucleotide
gtatgcaggataagcgaatgtctggcaatctgaatgacaggtggtttggtgaccg

SEQ ID NO: 219638 - DNA, 55 bp, Artificial
  Synthetic oligonucleotide
cagctgtttgccaataccgaaacctcattggaacgtatttcggttattcaagccg

SEQ ID NO: 219639 - DNA, 55 bp, Artificial
  Synthetic oligonucleotide
cagcgttacgctctcagaacattcaggtagccagtggtacccttaacagcgcgcc

SEQ ID NO: 219640 - DNA, 55 bp, Artificial
  Synthetic oligonucleotide
ccgacaaacctgtgacgtacattgcgatagaacataaccgtaaaggctttgtcac

SEQ ID NO: 219641 - DNA, 60 bp, Artificial
  Synthetic oligonucleotide
tggttgaagctttaaacgaagctgtattccatgtgcccgagccaatgcttgagaaaatca

SEQ ID NO: 219642 - DNA, 55 bp, Artificial
  Synthetic oligonucleotide
gtgaacgcgttaacgaacactttctcaaagcctgtgactttatgcttgcctgtag

SEQ ID NO: 219643 - DNA, 55 bp, Artificial
  Synthetic oligonucleotide
gtaggaagctacgaattcaccaataagggtaaaggctggcatcctcatgtgcata

SEQ ID NO: 219644 - DNA, 55 bp, Artificial
  Synthetic oligonucleotide
gtaaggataacgcgctaatttggataagtcctgagtggcaagcggagacagctcc

SEQ ID NO: 219645 - DNA, 55 bp, Artificial
  Synthetic oligonucleotide
gtgcaatcctcctggcggtgattggagcggtgtatcaatcctatgtccagactca

SEQ ID NO: 219646 - DNA, 55 bp, Artificial
  Synthetic oligonucleotide
caccatattgatccactacgagacactttaccagctagctaagcgcctccctgcc

SEQ ID NO: 219647 - DNA, 55 bp, Artificial
  Synthetic oligonucleotide
ccgactaagtcaaatctgtgtatggaaaatccgcacgagttccgctagagtgtgc

SEQ ID NO: 219648 - DNA, 55 bp, Artificial
  Synthetic oligonucleotide
caccacgacgaatctcaagcatcgcctcatctacagggatcatttacagcactcc

SEQ ID NO: 219649 - DNA, 55 bp, Artificial
  Synthetic oligonucleotide
ggcatcgattgcccgcctggactttatatcttccagtaagtccgcgacccgggcc

SEQ ID NO: 219650 - DNA, 55 bp, Artificial
  Synthetic oligonucleotide
gtggccaattaaatgagcaatagggtgaccctcgactcgacgagaggtgaggtcg

SEQ ID NO: 219651 - DNA, 55 bp, Artificial
  Synthetic oligonucleotide
caatcagtcgctaagactgcgccgtagttacattaatcagccccgctctctgaac

SEQ ID NO: 219652 - DNA, 58 bp, Artificial
  Synthetic oligonucleotide
tttcgcaaacatcagggcaaacacatctctgtaccggtcggcgtttttgctcgttctg

SEQ ID NO: 219653 - DNA, 55 bp, Artificial
  Synthetic oligonucleotide
caaccaaaccattcaggcggacttctcgcaccctattaatttgcaaatggagccc

SEQ ID NO: 219654 - DNA, 55 bp, Artificial
  Synthetic oligonucleotide
ggctacagctcgaagaattctcacgcatgggtgacgtaatagtggacccgtcgag

SEQ ID NO: 219655 - DNA, 53 bp, Artificial
  Synthetic oligonucleotide
ccggaggacatttattactggaagggccgccaggtctggctaaaaccaccgcg

SEQ ID NO: 219656 - DNA, 55 bp, Artificial
  Synthetic oligonucleotide
ctaacgcaccgtcttggtgctacaaaacaaccaaacgcaccattcagaagcggct

SEQ ID NO: 219657 - DNA, 55 bp, Artificial
  Synthetic oligonucleotide
ttagcccagcacaaatcacgaaccttggtagccgaatgttgtttgaacagtcgtc

SEQ ID NO: 219658 - DNA, 55 bp, Artificial
  Synthetic oligonucleotide
ttcacccttagaactgaaaaccccgaagaatttcgcaaacatcagggcaaacaca

SEQ ID NO: 219659 - DNA, 55 bp, Artificial
  Synthetic oligonucleotide
ttcaggtactaaaccgtaaacgcacccgcgctagaactggttcacgcgacaagac

SEQ ID NO: 219660 - DNA, 55 bp, Artificial
  Synthetic oligonucleotide
gccaacagcgattagccagaatgctaggctgtgatgcacacgatgcttccatagc

SEQ ID NO: 219661 - DNA, 55 bp, Artificial
  Synthetic oligonucleotide
ctgatgctacgggtgtgggatgggtttacctatatgcgctcatagacagaaccgg

SEQ ID NO: 219662 - DNA, 55 bp, Artificial
  Synthetic oligonucleotide
ctggcatgcacccgtgtcaggtaaagcgtatctgctagcggtaatagttgctgat

SEQ ID NO: 219663 - DNA, 55 bp, Artificial
  Synthetic oligonucleotide
actatcgaacactaccaaaaaactttcgataaatttgagtacaaaggcgatgtca

SEQ ID NO: 219664 - DNA, 55 bp, Artificial
  Synthetic oligonucleotide
ctggtcaaacggcgttaacctggaaactggtcgtcatgaccgtgtagcgaaatac

SEQ ID NO: 219665 - DNA, 55 bp, Artificial
  Synthetic oligonucleotide
aattgaaccagtgggttgaagacagtaacaccaccgcacagtaaaggcccaacag

SEQ ID NO: 219666 - DNA, 55 bp, Artificial
  Synthetic oligonucleotide
aatcgaaaccgttacatgatcttaatccaattcgtttggcttatatcgcagagcg

SEQ ID NO: 219667 - DNA, 55 bp, Artificial
  Synthetic oligonucleotide
gaagcggctgagcacctacagcatgcgctgaggatcattacttcctaattcgctg

SEQ ID NO: 219668 - DNA, 55 bp, Artificial
  Synthetic oligonucleotide
gacctattcacgagcaatgaccatgcgggcttggaattaacgttttatcgcactg

SEQ ID NO: 219669 - DNA, 55 bp, Artificial
  Synthetic oligonucleotide
gagcgtcataaagccatgccgacaggcgaattattagaacgtggttcggcacgag

SEQ ID NO: 219670 - DNA, 55 bp, Artificial
  Synthetic oligonucleotide
gagtgttaataatagcggccacaaccataatgcgatcattagattcatgcgcagc

SEQ ID NO: 219671 - DNA, 55 bp, Artificial
  Synthetic oligonucleotide
gagttgaccgtcgcttttgtagagtgcgatttctcgcgtattcagttgctcccct

SEQ ID NO: 219672 - DNA, 55 bp, Artificial
  Synthetic oligonucleotide
tttaccggctgaattagaaagcctgtcgatataaaggcggaattatgactgagag

SEQ ID NO: 219673 - DNA, 55 bp, Artificial
  Synthetic oligonucleotide
gatcaaactgttgtctgtcctcggcgatactggtgagatccgttttaccctgttg

SEQ ID NO: 219674 - DNA, 54 bp, Artificial
  Synthetic oligonucleotide
gtgagaaacgcatggaattattcacccttagaactgaaaaccccgaagaatttc

SEQ ID NO: 219675 - DNA, 55 bp, Artificial
  Synthetic oligonucleotide
aaagcaccttttctgccctctctgtgcgattaggagagcttcaaagcagttaagc

SEQ ID NO: 219676 - DNA, 55 bp, Artificial
  Synthetic oligonucleotide
aaactttcgataaatttgagtacaaaggcgatgtcaccagatggcctcattatct

SEQ ID NO: 219677 - DNA, 55 bp, Artificial
  Synthetic oligonucleotide
gatgccttatcagcacgtcaaactcgaagaagtatctggcttgacgcaagatgcg

SEQ ID NO: 219678 - DNA, 55 bp, Artificial
  Synthetic oligonucleotide
gatgtagtaaagcacgggaatacccaaactatgtgctttctttgcgagcttcagg

SEQ ID NO: 219679 - DNA, 55 bp, Artificial
  Synthetic oligonucleotide
gctaacacacacgatacacttttatgtttctctagcgccggtaaggtctactgga

SEQ ID NO: 219680 - DNA, 55 bp, Artificial
  Synthetic oligonucleotide
tattactgccatcgccgtcccagatagcattagtcgaagtccagtttatcggtgc

SEQ ID NO: 219681 - DNA, 55 bp, Artificial
  Synthetic oligonucleotide
tcacatcatgccactgtaattgcgagggaagactgctgatgtaatacacatctgc

SEQ ID NO: 219682 - DNA, 55 bp, Artificial
  Synthetic oligonucleotide
tcacgttcgcgtaaattttgctgagactcggtcatggctaaacggtcacgattga

SEQ ID NO: 219683 - DNA, 55 bp, Artificial
  Synthetic oligonucleotide
cgagtattggagcaggctatattagaccaccagccgccattggttggcgggcgtc

SEQ ID NO: 219684 - DNA, 55 bp, Artificial
  Synthetic oligonucleotide
tcgcggtggttaaaatgcttaattcgccattacccaaggctgataagccggggcc

SEQ ID NO: 219685 - DNA, 60 bp, Artificial
  Synthetic oligonucleotide
gtaatgattactttaactgtcaaaaatggtgacgatctccttgagagatatgatcacctg

SEQ ID NO: 219686 - DNA, 55 bp, Artificial
  Synthetic oligonucleotide
cgagtggccgacctgctttctaaaagaagaacgcgtaatattgctcgcccaagac

SEQ ID NO: 219687 - DNA, 55 bp, Artificial
  Synthetic oligonucleotide
cgcccgtaaccgaaacatggatgaacaaaaggtacgtgatacacaggcaggttgc

SEQ ID NO: 219688 - DNA, 55 bp, Artificial
  Synthetic oligonucleotide
tcgtgagtgttgcaaggtcgtcgagtgtcgagacttctgaagtcataattcgggg

SEQ ID NO: 219689 - DNA, 55 bp, Artificial
  Synthetic oligonucleotide
cggtaatcgagtccgacccttccatctcatcagaccacacgcgtattgctctgtc

SEQ ID NO: 219690 - DNA, 55 bp, Artificial
  Synthetic oligonucleotide
agcctagctcaaccaatccttgcgttaatacttcaatggccgcttcatgtggctg

SEQ ID NO: 219691 - DNA, 55 bp, Artificial
  Synthetic oligonucleotide
cgtccttaccaagcaccaccatttcatctgcggattcgctatgggaaacacgcct

SEQ ID NO: 219692 - DNA, 55 bp, Artificial
  Synthetic oligonucleotide
cgtcgcgatcatttcagagctacttagcaagtaccacgttaaccacgtgtatcgc

SEQ ID NO: 219693 - DNA, 55 bp, Artificial
  Synthetic oligonucleotide
gcccaagcggaattgacattggcctccggtgaccaacaactcgcgatcgcacgaa

SEQ ID NO: 219694 - DNA, 55 bp, Artificial
  Synthetic oligonucleotide
cgttgggtctatattccgtttgtgcatttgccatgggccataatacgtctcgtct

SEQ ID NO: 219695 - DNA, 55 bp, Artificial
  Synthetic oligonucleotide
ttacctagcggtaaagctaggcaattcagttttcccatgcaagccaagtctctta

SEQ ID NO: 219696 - DNA, 60 bp, Artificial
  Synthetic oligonucleotide
ctagaactggttcacgcgacaagaccgagttcagcaaaatcgaggcatctgtaggaagct

SEQ ID NO: 219697 - DNA, 55 bp, Artificial
  Synthetic oligonucleotide
actactcgccttctcagcccgatatctgcttattcgttttagtcgttggccttcg

SEQ ID NO: 219698 - DNA, 55 bp, Artificial
  Synthetic oligonucleotide
cgtttgtgaggtcggttatgtcctatcaccccagtcgtttagtcattagctctgg

SEQ ID NO: 219699 - DNA, 55 bp, Artificial
  Synthetic oligonucleotide
acgtagctggaatggatagctggataatgcttcgccctgactatctgtcaccgtg

SEQ ID NO: 219700 - DNA, 55 bp, Artificial
  Synthetic oligonucleotide
cgttttcaaccaactgttgacgcatatagttttcaaccacgcgataaagcgttga

SEQ ID NO: 219701 - DNA, 55 bp, Artificial
  Synthetic oligonucleotide
accttattggggctggcttagcggttaatgccatccgtagcgactaccttcaaaa

SEQ ID NO: 219702 - DNA, 54 bp, Artificial
  Synthetic oligonucleotide
gaacaaacaggcgggtatgtttctgactcactggatatggcgaattttggagct

SEQ ID NO: 219703 - DNA, 54 bp, Artificial
  Synthetic oligonucleotide
gatactgcgatcactgcgattgttataaccgacgcgcagattgaccatgctacc

SEQ ID NO: 219704 - DNA, 54 bp, Artificial
  Synthetic oligonucleotide
ttgcgccacatacatcatttgcccggtgtcgcccatcaaacggaatggttgaga

SEQ ID NO: 219705 - DNA, 53 bp, Artificial
  Synthetic oligonucleotide
gttaccattcttcgcggtcgtttacagggtttggccgaaggtgtcttcacacc

SEQ ID NO: 219706 - DNA, 54 bp, Artificial
  Synthetic oligonucleotide
caccacttccatttgcatacataacacctaaactgttctgtgaaactgcatcac

SEQ ID NO: 219707 - DNA, 58 bp, Artificial
  Synthetic oligonucleotide
tcaggccacgacaaaccaccgcgatcgttagtcaacgcccgtggtgagttgagtccaa

SEQ ID NO: 219708 - DNA, 60 bp, Artificial
  Synthetic oligonucleotide
aggatgtcgtgcgctcatgcaaattttgagctatagatcagtaggagtcagctcctcgcg

SEQ ID NO: 219709 - DNA, 55 bp, Artificial
  Synthetic oligonucleotide
cccgggcaaagatacggtcactgatcataacctgacggtctgggcagagccgacc

SEQ ID NO: 219710 - DNA, 55 bp, Artificial
  Synthetic oligonucleotide
cccgcggtcgtactgcaggggcagttgcggttcgttgatgtttccgtgcagagtg

SEQ ID NO: 219711 - DNA, 55 bp, Artificial
  Synthetic oligonucleotide
cccctggagaatacttaccgtcatgtttgttcagtcgtcccgctcaatcccgaag

SEQ ID NO: 219712 - DNA, 55 bp, Artificial
  Synthetic oligonucleotide
ccccgcctcaacaatgtcccacctcatgaaccgaaccatcccacttgcggtctgt

SEQ ID NO: 219713 - DNA, 55 bp, Artificial
  Synthetic oligonucleotide
ccccaaaccgcagcaccctagtcgagtttgctggttctgccagatatcccgatcc

SEQ ID NO: 219714 - DNA, 55 bp, Artificial
  Synthetic oligonucleotide
cccatcgggtaggcgttccaagccggggtaaccagtgtctagcttgcggccatga

SEQ ID NO: 219715 - DNA, 55 bp, Artificial
  Synthetic oligonucleotide
cccagcgacattcttgtcactggggatcattgtctgactcatttcagatcacggc

SEQ ID NO: 219716 - DNA, 55 bp, Artificial
  Synthetic oligonucleotide
gtgtgccttcgattgccaacttgtatctgcgttggtgggaaccggttgaaccagg

SEQ ID NO: 219717 - DNA, 55 bp, Artificial
  Synthetic oligonucleotide
gtgtccgccgtcttggtccccgaactgttgtaaagagcggccgtgtaggcgccaa

SEQ ID NO: 219718 - DNA, 55 bp, Artificial
  Synthetic oligonucleotide
gtgccagaatgcgatcagcctggtagatcgtccgacgtgcttcttcgaacgcggt

SEQ ID NO: 219719 - DNA, 58 bp, Artificial
  Synthetic oligonucleotide
tggtggggccgtatgtgaccgcgtggttgttcctgcgtgaatgtccgcgtttggacaa

SEQ ID NO: 219720 - DNA, 55 bp, Artificial
  Synthetic oligonucleotide
gtctcgaagcgaaatgaggatcgttgactctcgggaaacgtaagcgacccggcaa

SEQ ID NO: 219721 - DNA, 55 bp, Artificial
  Synthetic oligonucleotide
gtctcccgactggtcatcaacggagcggatcaagtcagggataattggagagcgg

SEQ ID NO: 219722 - DNA, 55 bp, Artificial
  Synthetic oligonucleotide
gtcgtgcggacccttggtgttgcatggagcggttgggttgggcaagacgcatctg

SEQ ID NO: 219723 - DNA, 55 bp, Artificial
  Synthetic oligonucleotide
gtcgcagccggatgaaccccaaatcacccagcgacaaatcgcggcattcgagtgt

SEQ ID NO: 219724 - DNA, 55 bp, Artificial
  Synthetic oligonucleotide
gtagtaacccaatcaactacgacggtatcgacctgcgttggtctgtatctgtccg

SEQ ID NO: 219725 - DNA, 55 bp, Artificial
  Synthetic oligonucleotide
gtagactgccaggagcataccgacatatctatcgagttttcgttgcccgacaagc

SEQ ID NO: 219726 - DNA, 55 bp, Artificial
  Synthetic oligonucleotide
ggtgctggatcaatcggctagcgacgacgggcgaattgacgaacgtgagtttcac

SEQ ID NO: 219727 - DNA, 55 bp, Artificial
  Synthetic oligonucleotide
ggtcgcagtcattccgccccagttattccaagcggaacctgtacagcctgcgtag

SEQ ID NO: 219728 - DNA, 55 bp, Artificial
  Synthetic oligonucleotide
ggtccaagccaagattcgcaacgcccagattgacttggtcaactacatggccgtt

SEQ ID NO: 219729 - DNA, 55 bp, Artificial
  Synthetic oligonucleotide
gggtgagaacgctccgggtcgtagcaaacgccgcacataatgacggaccggacac

SEQ ID NO: 219730 - DNA, 60 bp, Artificial
  Synthetic oligonucleotide
tggttgcgatctcgtgtggaagcatcatgaggtcatgacgcctcgcgtggtctgcctcag

SEQ ID NO: 219731 - DNA, 54 bp, Artificial
  Synthetic oligonucleotide
gggtccgatgggctccggtcgaacttgaatcgtgtcggttttactcgcccgcgc

SEQ ID NO: 219732 - DNA, 55 bp, Artificial
  Synthetic oligonucleotide
gggtacggcctcacttaatagtggcccatcaaatgaaaccgacggagatcgcgac

SEQ ID NO: 219733 - DNA, 55 bp, Artificial
  Synthetic oligonucleotide
ggggtcgattttacgaccatatgattgcgccgtgtgcgagttttcgtccaccaac

SEQ ID NO: 219734 - DNA, 55 bp, Artificial
  Synthetic oligonucleotide
ggggtatagctgcccatgtaaggtgtgtaattcccatagtaggggacataattcg

SEQ ID NO: 219735 - DNA, 55 bp, Artificial
  Synthetic oligonucleotide
ggggcgggcgatttgaggtgacacacagttacctcccgttcccacacccatccag

SEQ ID NO: 219736 - DNA, 55 bp, Artificial
  Synthetic oligonucleotide
gggaggtcggaagatctgtagccatacggacagttcaattcgtaagcggaccggc

SEQ ID NO: 219737 - DNA, 55 bp, Artificial
  Synthetic oligonucleotide
tttcgtgaacagacgaactggaccggtcgtcactcgcagagtcggttattcttct

SEQ ID NO: 219738 - DNA, 55 bp, Artificial
  Synthetic oligonucleotide
ttggctaggcgaggctgggcagcgacgatccgaggcaaaaccgaggtgacacaga

SEQ ID NO: 219739 - DNA, 55 bp, Artificial
  Synthetic oligonucleotide
ttgcggagaggaatcggcaggcgtggtactcaagcggggctaacttcagagggcg

SEQ ID NO: 219740 - DNA, 55 bp, Artificial
  Synthetic oligonucleotide
ttgccagccaaagtatacggatttggaatcggacacgagcggttgtacatcgtaa

SEQ ID NO: 219741 - DNA, 60 bp, Artificial
  Synthetic oligonucleotide
aatacacgcgacaagcggcatctggtcacgactgtcagtgagcaacgtgttaagcggaac

SEQ ID NO: 219742 - DNA, 52 bp, Artificial
  Synthetic oligonucleotide
ttcgatacggggatccaaccccggacggtaggtcgtcaacagcggcggtggg

SEQ ID NO: 219743 - DNA, 55 bp, Artificial
  Synthetic oligonucleotide
tgtaagtgctggtgctccaccgaacgtaggacgactgctcgaacgtatcacttgc

SEQ ID NO: 219744 - DNA, 55 bp, Artificial
  Synthetic oligonucleotide
tggagttgctatcaaggacgcgagctgtcgtggtggggccgtatgtgaccgcgtg

SEQ ID NO: 219745 - DNA, 55 bp, Artificial
  Synthetic oligonucleotide
tgcggtcggtcccatcacgctcaaagggctgaggactggcgaggttcgcgttttg

SEQ ID NO: 219746 - DNA, 55 bp, Artificial
  Synthetic oligonucleotide
tgccatggattgtgggatcgagatgaactttatgacctcgaatcagacccgggcg

SEQ ID NO: 219747 - DNA, 55 bp, Artificial
  Synthetic oligonucleotide
tctcccgcacgcattaccagcaaacggcagggccatctctctgagccccgtactc

SEQ ID NO: 219748 - DNA, 55 bp, Artificial
  Synthetic oligonucleotide
tcggctgccctttgtcgcggatccacatgcacgaaacgaactccacaccgggata

SEQ ID NO: 219749 - DNA, 55 bp, Artificial
  Synthetic oligonucleotide
tcgcagcaatcttgtggcggccgtaaacgaggtgaatcttgcctatttcacagat

SEQ ID NO: 219750 - DNA, 55 bp, Artificial
  Synthetic oligonucleotide
tcagcgtgacggaccgctcgcaaattgatccgggggatgtgatccgataaggagt

SEQ ID NO: 219751 - DNA, 55 bp, Artificial
  Synthetic oligonucleotide
tcagcacggaacgtgccttaccgtccggggccgtagctcttctggagagcgaagt

SEQ ID NO: 219752 - DNA, 59 bp, Artificial
  Synthetic oligonucleotide
acacagcgaactcaggggagcagttgggagaatcgacgtcgtttggcgcaagcgtagac

SEQ ID NO: 219753 - DNA, 55 bp, Artificial
  Synthetic oligonucleotide
tcacatcacgaacgttgtgcgggcaaatatcatcccaatacagttgccgaaggag

SEQ ID NO: 219754 - DNA, 55 bp, Artificial
  Synthetic oligonucleotide
tagttggctccggcatagctgggacatttataaaacgccagaacttccgctgcag

SEQ ID NO: 219755 - DNA, 55 bp, Artificial
  Synthetic oligonucleotide
gtttcgactctgaacgggcagaagcgatcattcagaaccagtaccccaaaagtcc

SEQ ID NO: 219756 - DNA, 55 bp, Artificial
  Synthetic oligonucleotide
gttggccctgacaacgtcggtctggctgatccgatcattcattacgtcaccagcc

SEQ ID NO: 219757 - DNA, 55 bp, Artificial
  Synthetic oligonucleotide
gttcatgacaacggcttcaatgccacaccgtcaattgtgaccgcggccgtattgt

SEQ ID NO: 219758 - DNA, 55 bp, Artificial
  Synthetic oligonucleotide
gtgttcgaacaacctcgcaatgttgggcttggcgatgcacaactatcacgctgct

SEQ ID NO: 219759 - DNA, 55 bp, Artificial
  Synthetic oligonucleotide
gcggacagtactgcgaacagtcgtacttttgcgcggagctatcatgtgggtggtg

SEQ ID NO: 219760 - DNA, 55 bp, Artificial
  Synthetic oligonucleotide
gctggtaacaggttcgctgatcagcagttgggccaaagcgccacagaactcgtgt

SEQ ID NO: 219761 - DNA, 55 bp, Artificial
  Synthetic oligonucleotide
gccgttaaggggccgactccaccgctaggaacaacagtctcactgcccgcgacta

SEQ ID NO: 219762 - DNA, 55 bp, Artificial
  Synthetic oligonucleotide
gcgcgtaacccagaccaatggttttattcgtcaaccaaggggaagatagcgacga

SEQ ID NO: 219763 - DNA, 50 bp, Artificial
  Synthetic oligonucleotide
ccgcgcgtttgaccacgatcttcgggggaggaatgggggtcggtttcccc

SEQ ID NO: 219764 - DNA, 55 bp, Artificial
  Synthetic oligonucleotide
gctgtgtgcaacatgcgttacgggctctgctttgggaagggccgcggtgactgct

SEQ ID NO: 219765 - DNA, 55 bp, Artificial
  Synthetic oligonucleotide
gcgcaaaagcgccgatcgtggggtgggataagaagttcggactcgtcaaagtcag

SEQ ID NO: 219766 - DNA, 55 bp, Artificial
  Synthetic oligonucleotide
gcttttcaccggactcgctgagggagaaggtgacatcgtcgtcgctagcgtaatc

SEQ ID NO: 219767 - DNA, 55 bp, Artificial
  Synthetic oligonucleotide
ggacaaaaccatgtgagccgtttgggcgttagctccggttgtatgcgggagcaac

SEQ ID NO: 219768 - DNA, 55 bp, Artificial
  Synthetic oligonucleotide
ggacaacccactcgttacgagccgatttgtcggtgatgtgtttggagcgatactg

SEQ ID NO: 219769 - DNA, 55 bp, Artificial
  Synthetic oligonucleotide
ggacccacagttgaactgtaaactgaatgcgcgataatctacaggcagacgatgg

SEQ ID NO: 219770 - DNA, 55 bp, Artificial
  Synthetic oligonucleotide
ggagaagacaattgccgagtttgaaggatgtgaagatgccctcgttttcccgaca

SEQ ID NO: 219771 - DNA, 55 bp, Artificial
  Synthetic oligonucleotide
ggatacggcagcgctctccagaagggatttgaagaagcccgcggcaaattcatca

SEQ ID NO: 219772 - DNA, 55 bp, Artificial
  Synthetic oligonucleotide
gggactgccccaacttggctgtgccgcgtaagaatcgataggtgccgactgcgtg

SEQ ID NO: 219773 - DNA, 55 bp, Artificial
  Synthetic oligonucleotide
gccgctcaatttgacgttttccagcaacttttcgtgtgttgggaggattgcggag

SEQ ID NO: 219774 - DNA, 53 bp, Artificial
  Synthetic oligonucleotide
ttaggcccgggtagaacaccggattcgtagtccggtgatctaccaacccaata

SEQ ID NO: 219775 - DNA, 55 bp, Artificial
  Synthetic oligonucleotide
gccgaactctctgcagttaaatccgttttactctcaggtgtcgatctagcaaacg

SEQ ID NO: 219776 - DNA, 55 bp, Artificial
  Synthetic oligonucleotide
ggccagcttggttcgcaaacgaagccgtgaattccaaacgcagtacgacgaaacg

SEQ ID NO: 219777 - DNA, 55 bp, Artificial
  Synthetic oligonucleotide
ggcgaccgtatcgggagtgatcgccagcgtatttgcggtttcacgcatgcttgcc

SEQ ID NO: 219778 - DNA, 55 bp, Artificial
  Synthetic oligonucleotide
gccgacgagcataggtgagaaacacctggtaaagttgggcgttcatgacgatacc

SEQ ID NO: 219779 - DNA, 55 bp, Artificial
  Synthetic oligonucleotide
ggctgcaacggagcccggtccaattgtgcgaagggtgacaaaaccaccgcgtgtg

SEQ ID NO: 219780 - DNA, 52 bp, Artificial
  Synthetic oligonucleotide
gggaccggattggatttccggcccaacccgtcacgaacaaccgcccggctca

SEQ ID NO: 219781 - DNA, 55 bp, Artificial
  Synthetic oligonucleotide
gggacaagcgaaagtcactgccctgacgggagtccactccagctattctgtcccc

SEQ ID NO: 219782 - DNA, 55 bp, Artificial
  Synthetic oligonucleotide
gggaaacggttccgtaggtatgcttgaccgatgcgggtagcttggtattcgcagg

SEQ ID NO: 219783 - DNA, 54 bp, Artificial
  Synthetic oligonucleotide
ctgtcgtggtggggccgtatgtgaccgcgtggttgttcctgcgtgaatgtccgc

SEQ ID NO: 219784 - DNA, 54 bp, Artificial
  Synthetic oligonucleotide
cccttcgcttcggccacacgactcaatcagacgaggaacaaaccctcttgcggt

SEQ ID NO: 219785 - DNA, 59 bp, Artificial
  Synthetic oligonucleotide
gcaggtgaccaacacggaagtcactggcaatcccgagaatcccgcagtgcccctcgatc

SEQ ID NO: 219786 - DNA, 54 bp, Artificial
  Synthetic oligonucleotide
gcctgaatggagttgctatcaaggacgcgagctgtcgtggtggggccgtatgtg

SEQ ID NO: 219787 - DNA, 54 bp, Artificial
  Synthetic oligonucleotide
cacctggcagttgaacagtcagtctggcgaattattaaaacagacctactatca

SEQ ID NO: 219788 - DNA, 54 bp, Artificial
  Synthetic oligonucleotide
tccacagcgatcattggtccctgcagcccatcgccgatattcaaccgccgcgga

SEQ ID NO: 219789 - DNA, 54 bp, Artificial
  Synthetic oligonucleotide
tcgcgatacttcgtggatggtggttttgtgcagatcgctcagaacgtcgtcacg

SEQ ID NO: 219790 - DNA, 54 bp, Artificial
  Synthetic oligonucleotide
cacgtacgcttggtggatcggagtatgagaccaacggcgcgaaagaaatctttt

SEQ ID NO: 219791 - DNA, 54 bp, Artificial
  Synthetic oligonucleotide
aacgtatggaactcgcacagcgaagacccccggatcagtggtcatcccttgccg

SEQ ID NO: 219792 - DNA, 54 bp, Artificial
  Synthetic oligonucleotide
ccaatggagtcgcgagcgagtttacttccgtcgacagattggatgactccgaac

SEQ ID NO: 219793 - DNA, 54 bp, Artificial
  Synthetic oligonucleotide
cagtgaatcgactgcggaaacagacttgaaccgagttctacaagaatcgtaaga

SEQ ID NO: 219794 - DNA, 54 bp, Artificial
  Synthetic oligonucleotide
acactccgctccttctcgtctcaacaccgcggagcaacacgctcatggaagagc

SEQ ID NO: 219795 - DNA, 54 bp, Artificial
  Synthetic oligonucleotide
gtaagggatatcctcagcagagcatttacgacaatttcgggcagtgcgtgtcgc

SEQ ID NO: 219796 - DNA, 58 bp, Artificial
  Synthetic oligonucleotide
agacatcacagagacgctcacgttccccgtgactgagttcgatgaacgaaacacaatt

SEQ ID NO: 219797 - DNA, 54 bp, Artificial
  Synthetic oligonucleotide
gtcgatgtggcgaggggcgacgcggcaacaaacgagtcggcaggagagttctgc

SEQ ID NO: 219798 - DNA, 54 bp, Artificial
  Synthetic oligonucleotide
aaaggagtctacgttcccagaggttgcggctgacaagtagttccgtacgcagtt

SEQ ID NO: 219799 - DNA, 53 bp, Artificial
  Synthetic oligonucleotide
ttcgatttgaactgcgggtactgtctgaggaagtttccgaaactgaaaccggg

SEQ ID NO: 219800 - DNA, 54 bp, Artificial
  Synthetic oligonucleotide
acgcgtgatcgctgtggcggtaaagcaggtctcgagccaacccaacaagcagta

SEQ ID NO: 219801 - DNA, 54 bp, Artificial
  Synthetic oligonucleotide
acggccgctgcttgattacgcgaccgtttgaatacgtgacaccttttgtcgtga

SEQ ID NO: 219802 - DNA, 54 bp, Artificial
  Synthetic oligonucleotide
gtggggttaaccacggtctttcgcatttcacacgctgagttctgattgtctacg

SEQ ID NO: 219803 - DNA, 54 bp, Artificial
  Synthetic oligonucleotide
gctcagccgctacgaccggtaatctcggctcttcgttcttgggccgagcgctct

SEQ ID NO: 219804 - DNA, 53 bp, Artificial
  Synthetic oligonucleotide
tggccctggagacgctacagtaatacgggacaccgtttagaagtcgatctcgg

SEQ ID NO: 219805 - DNA, 53 bp, Artificial
  Synthetic oligonucleotide
caaactcgggagcttcaaaccgttcgctccccgccacatggacgcttcccagc

SEQ ID NO: 219806 - DNA, 53 bp, Artificial
  Synthetic oligonucleotide
tgctccgacagtcgcatccacctcaagcacaaaatcaccatattcgccggctg

SEQ ID NO: 219807 - DNA, 56 bp, Artificial
  Synthetic oligonucleotide
acaaggcaggacgatcaatctggtacaaccccgcttgaacgaaacaccttggtcga

SEQ ID NO: 219808 - DNA, 53 bp, Artificial
  Synthetic oligonucleotide
ttgaaccgagagtcattgaacgacgcctcggcagttgacgcggcagtccgtca

SEQ ID NO: 219809 - DNA, 53 bp, Artificial
  Synthetic oligonucleotide
attagctctggtagtttcaactcggtgtcaggaatctctacctcggtagagtt

SEQ ID NO: 219810 - DNA, 53 bp, Artificial
  Synthetic oligonucleotide
gatggtggaagctggcaggatccggttagggcggtcagtcgcatcccgtaatt

SEQ ID NO: 219811 - DNA, 53 bp, Artificial
  Synthetic oligonucleotide
ctcgctgattcgtgcttttacgctgttgttcgttagcgacctggaatttacgc

SEQ ID NO: 219812 - DNA, 53 bp, Artificial
  Synthetic oligonucleotide
ggggatggttcgtttggcttccaccatccgatcgccgattttacgacgcagac

SEQ ID NO: 219813 - DNA, 53 bp, Artificial
  Synthetic oligonucleotide
ccgagaattcacctcatgccaacgcctaacttccggtttcgccctatggcgcc

SEQ ID NO: 219814 - DNA, 53 bp, Artificial
  Synthetic oligonucleotide
gcgttggatgggagggcgaatgcccttatcaaccgagttggctgactcctttc

SEQ ID NO: 219815 - DNA, 53 bp, Artificial
  Synthetic oligonucleotide
gcttgacgccgaaagccacattctgacgcagctgattaactttggcgaacaca

SEQ ID NO: 219816 - DNA, 52 bp, Artificial
  Synthetic oligonucleotide
aaaagcgctctcgtcctgaaagaggccatcagttcgattgaaaagtgatgcg

SEQ ID NO: 219817 - DNA, 52 bp, Artificial
  Synthetic oligonucleotide
ttccttatcttggttttgcgaccagcgatacgcatcccgatggggacacggt

SEQ ID NO: 219818 - DNA, 60 bp, Artificial
  Synthetic oligonucleotide
cggcgtctggtatgccggcgtcactgatgcgatccacattccgctcgagagtgaacccgg

SEQ ID NO: 219819 - DNA, 57 bp, Artificial
  Synthetic oligonucleotide
ccatgtttggacgaatctggccctcattgaccaaagcggattccgtggtgtaggatg

SEQ ID NO: 219820 - DNA, 52 bp, Artificial
  Synthetic oligonucleotide
ttatgatcctgagaccaagggagggaacacacccgacggaaggaagatcaaa

SEQ ID NO: 219821 - DNA, 52 bp, Artificial
  Synthetic oligonucleotide
ccggaccaagcccgttgataccctggctcgcaacagtctgcgaattatctcg

SEQ ID NO: 219822 - DNA, 52 bp, Artificial
  Synthetic oligonucleotide
ctggaaacgcatacgcttttgcggaattcgctctcgcgaatgcctggccgtt

SEQ ID NO: 219823 - DNA, 52 bp, Artificial
  Synthetic oligonucleotide
atcatgaggtcatgacgcctcgcgtggtctgcctcagatgtaaatcacaaaa

SEQ ID NO: 219824 - DNA, 52 bp, Artificial
  Synthetic oligonucleotide
tggaatggaatcgcagccctgcacgggatcgatagagcgctccgtggatcaa

SEQ ID NO: 219825 - DNA, 52 bp, Artificial
  Synthetic oligonucleotide
atctgagtaccgtcgagatataactgcaagacatcctgttttcgaacagcta

SEQ ID NO: 219826 - DNA, 52 bp, Artificial
  Synthetic oligonucleotide
ctcataacaatcgactttcggctctcgacaccgcccaattttcgcgcgggcg

SEQ ID NO: 219827 - DNA, 52 bp, Artificial
  Synthetic oligonucleotide
ccctaagcgtcggcgaacccgctaagttacatatcgcagagaacacatggat

SEQ ID NO: 219828 - DNA, 52 bp, Artificial
  Synthetic oligonucleotide
tcgggagaggtcccccccttcccctgacgccgaaaggtctgatcgggaccga

SEQ ID NO: 219829 - DNA, 52 bp, Artificial
  Synthetic oligonucleotide
gccttctccaagcgagctatcacaaagtttcgccgctcaatgatcagtcgct

SEQ ID NO: 219830 - DNA, 56 bp, Artificial
  Synthetic oligonucleotide
tcaccgccacccattcccgactcgacactgaagctggtcgtgactcgcaacgaagc

SEQ ID NO: 219831 - DNA, 52 bp, Artificial
  Synthetic oligonucleotide
gggctctatcgagccgctggtcccaacggtgaagtgagcactttgctgattc

SEQ ID NO: 219832 - DNA, 52 bp, Artificial
  Synthetic oligonucleotide
aatacgaggcgatgctcaaccactgggaacgcatcatgcgaaccgtgggagt

SEQ ID NO: 219833 - DNA, 52 bp, Artificial
  Synthetic oligonucleotide
aatgatcgacaatcccatgccactcgagttcttccaatctgagttcggggca

SEQ ID NO: 219834 - DNA, 52 bp, Artificial
  Synthetic oligonucleotide
gagacctgcgcccgatgagactgcgaagctttgttgcccggcgacaatcccc

SEQ ID NO: 219835 - DNA, 52 bp, Artificial
  Synthetic oligonucleotide
cacgaccattgtcataatagttgtggtagcggtctttgtgccaataaagcat

SEQ ID NO: 219836 - DNA, 52 bp, Artificial
  Synthetic oligonucleotide
cccgccacatggccaaccgcgacccctcgcccgatcgaccgagtgatccgac

SEQ ID NO: 219837 - DNA, 52 bp, Artificial
  Synthetic oligonucleotide
cgatcggctgttggcctccgcgagcgtttgcacagtcccggtgtcggtcaga

SEQ ID NO: 219838 - DNA, 52 bp, Artificial
  Synthetic oligonucleotide
cctcggaatttccagatgccggaccggacaacgtgttaatgactcgcaacgc

SEQ ID NO: 219839 - DNA, 52 bp, Artificial
  Synthetic oligonucleotide
tagaatagagtcacgatgtcatgtcgcaacgcgagcgatggagctcaggagc

SEQ ID NO: 219840 - DNA, 52 bp, Artificial
  Synthetic oligonucleotide
tactttgccctcaaattcctgaggcttgtcgatcgattcttcgggcctcaat

SEQ ID NO: 219841 - DNA, 55 bp, Artificial
  Synthetic oligonucleotide
ccgtggcaagacacgtaaggccagcgacgcgaatgaaggtcatagtgaagcgtac

SEQ ID NO: 219842 - DNA, 52 bp, Artificial
  Synthetic oligonucleotide
caagagtcggccgattccgccgaaaacacatcaggatcaagcagtgcagggg

SEQ ID NO: 219843 - DNA, 51 bp, Artificial
  Synthetic oligonucleotide
cgatttcggtaaaatgggtctattcggaacctcaccgcaagcgggattgga

SEQ ID NO: 219844 - DNA, 51 bp, Artificial
  Synthetic oligonucleotide
acgatctccaaagaggtcgagttttcattcaacgctctggctggtcagttg

SEQ ID NO: 219845 - DNA, 51 bp, Artificial
  Synthetic oligonucleotide
ccggactaggtgcgacaggctcaaatgacttggagtttcgccacggtcccg

SEQ ID NO: 219846 - DNA, 51 bp, Artificial
  Synthetic oligonucleotide
tcccgttccactatcgcgggcccgcgccactccaaacgactagagggggag

SEQ ID NO: 219847 - DNA, 51 bp, Artificial
  Synthetic oligonucleotide
ccgccgtcgcacttcacactatcgcaacgtcacaacgcgccgaaacttcat

SEQ ID NO: 219848 - DNA, 51 bp, Artificial
  Synthetic oligonucleotide
tggaaggctggtaccatttggcaattcgtttcgacagcccgcctcgctttt

SEQ ID NO: 219849 - DNA, 51 bp, Artificial
  Synthetic oligonucleotide
tggaaacagtcgcatcccgattctcaagtcgtaactacaacgggcgcagac

SEQ ID NO: 219850 - DNA, 51 bp, Artificial
  Synthetic oligonucleotide
tgactcatctgggcacgatcgctgaatcggtttcgcaacctgtgactcaag

SEQ ID NO: 219851 - DNA, 51 bp, Artificial
  Synthetic oligonucleotide
ccagtacaaacgcggtcggttgattctggaccaccaacagttcgacgtttg

SEQ ID NO: 219852 - DNA, 55 bp, Artificial
  Synthetic oligonucleotide
cggcggctagctggctcgtcccgcaacttcatcaaatctcgctcagaattatcag

SEQ ID NO: 219853 - DNA, 50 bp, Artificial
  Synthetic oligonucleotide
aatttgccgggtgcccactgcttggcgtcacctcgattcaccttaccggc

SEQ ID NO: 219854 - DNA, 50 bp, Artificial
  Synthetic oligonucleotide
aattgaccagcgaccggggtgggtctgagcagtttcgtcaccacaggaga

SEQ ID NO: 219855 - DNA, 50 bp, Artificial
  Synthetic oligonucleotide
gcccgacgcaccacgcgggttggtgttgtctgcaatccactgcttggatg

SEQ ID NO: 219856 - DNA, 50 bp, Artificial
  Synthetic oligonucleotide
aatgttcttgtggccccgggtgggagctcacggatttcccagctcacggt

SEQ ID NO: 219857 - DNA, 50 bp, Artificial
  Synthetic oligonucleotide
aatgtcgactggtcagcgggggtgaattcgcggataatggtaccggcggc

SEQ ID NO: 219858 - DNA, 50 bp, Artificial
  Synthetic oligonucleotide
aatggtgtgtcttgcatgtcgtgtcactacgccggcatgattcccaaacg

SEQ ID NO: 219859 - DNA, 50 bp, Artificial
  Synthetic oligonucleotide
aatctgccggttttgaaactcgtggcccagggatcgggcacaacgcgtta

SEQ ID NO: 219860 - DNA, 50 bp, Artificial
  Synthetic oligonucleotide
aatcgggagactccgctgcttccaggggcgacttctgaaactcgtgcagc

SEQ ID NO: 219861 - DNA, 50 bp, Artificial
  Synthetic oligonucleotide
aatcgcccgccagcgaagtatcttctggaaagcgtgcgactccctccgca

SEQ ID NO: 219862 - DNA, 50 bp, Artificial
  Synthetic oligonucleotide
aatcgcatggaatgcccgctgaggaatccccagcgcgacaaagtgactgg

SEQ ID NO: 219863 - DNA, 55 bp, Artificial
  Synthetic oligonucleotide
cggcctcagctgtcggtcgcgacgtgcttcagtgtttccgcgaaaagtcagcgct

SEQ ID NO: 219864 - DNA, 50 bp, Artificial
  Synthetic oligonucleotide
aatccggagcatcgtgtggaactcacgcggcccaccaaattgtggcgtcg

SEQ ID NO: 219865 - DNA, 50 bp, Artificial
  Synthetic oligonucleotide
aatcccgcacagcttccgcttcgagtcgccggggattcatccgatgcagc

SEQ ID NO: 219866 - DNA, 50 bp, Artificial
  Synthetic oligonucleotide
aatcaccccgccagtcagccttgctttcgccagtttacgcattgtccgct

SEQ ID NO: 219867 - DNA, 50 bp, Artificial
  Synthetic oligonucleotide
tcggatcaggtaccaaccctttagaatgaggtccgaatcgaagtaggcca

SEQ ID NO: 219868 - DNA, 50 bp, Artificial
  Synthetic oligonucleotide
gagcagcccgccaaaaattgtctcttgacgaagcgcacggaccccgggtc

SEQ ID NO: 219869 - DNA, 50 bp, Artificial
  Synthetic oligonucleotide
aagtgtggcgacccgcaggcatacatcacgaaccggtgtcgattcaggca

SEQ ID NO: 219870 - DNA, 50 bp, Artificial
  Synthetic oligonucleotide
gcacagcgaagacccccggatcagtggtcatcccttgccgcttggcgatg

SEQ ID NO: 219871 - DNA, 50 bp, Artificial
  Synthetic oligonucleotide
atactagccaggttatgacaatcacgcgggttcatccgcgtgtggtcaaa

SEQ ID NO: 219872 - DNA, 50 bp, Artificial
  Synthetic oligonucleotide
accagcgcgaacctgtcaggtatccctggcgtatcgattcccgcgggcat

SEQ ID NO: 219873 - DNA, 50 bp, Artificial
  Synthetic oligonucleotide
taatgagttttcacggagcctgagaatcagcgttgtcgagtagcatttca

SEQ ID NO: 219874 - DNA, 55 bp, Artificial
  Synthetic oligonucleotide
cctatcccgatactctgagagcaagtgcgaattatgccttctcgacgactgtacg

SEQ ID NO: 219875 - DNA, 50 bp, Artificial
  Synthetic oligonucleotide
accagatcgggagccgaactgttgggaccgacgcgtgtcatgacgacact

SEQ ID NO: 219876 - DNA, 50 bp, Artificial
  Synthetic oligonucleotide
acatcaaagctccaggtcgcggcattggcaccagttccgggctggtacaa

SEQ ID NO: 219877 - DNA, 50 bp, Artificial
  Synthetic oligonucleotide
acataatcgggccccagtaactgcgacagccgattcaccagcgccggatg

SEQ ID NO: 219878 - DNA, 50 bp, Artificial
  Synthetic oligonucleotide
acaggttaaccgggcctttcgcctggcactgggacgatctgcttcggagc

SEQ ID NO: 219879 - DNA, 50 bp, Artificial
  Synthetic oligonucleotide
acaggtccgcccctcgctcgcctggaaaggtcgattcctggatgcacagg

SEQ ID NO: 219880 - DNA, 50 bp, Artificial
  Synthetic oligonucleotide
acagggagcatcgttgactccggtttcagcctgcgccaccggtctctcca

SEQ ID NO: 219881 - DNA, 50 bp, Artificial
  Synthetic oligonucleotide
acagcgcatgggcgcccccggatcctgcatccccgttcagaactggagtc

SEQ ID NO: 219882 - DNA, 50 bp, Artificial
  Synthetic oligonucleotide
gaacgtgcgcataggtgcgatcctctaagaattcgttgtgcccggtgtac

SEQ ID NO: 219883 - DNA, 50 bp, Artificial
  Synthetic oligonucleotide
acagaaccagtacccccgtcgcgagtggatccagggttcccgcatgaccc

SEQ ID NO: 219884 - DNA, 50 bp, Artificial
  Synthetic oligonucleotide
cacccagtagagtctggactcacgagtatgagacgggggcgatttacaac

SEQ ID NO: 219885 - DNA, 55 bp, Artificial
  Synthetic oligonucleotide
cctggagggaattcactccgaaacgcggcagctgtacccggaactgatggtcatg

SEQ ID NO: 219886 - DNA, 50 bp, Artificial
  Synthetic oligonucleotide
acacgcccgagaggcagaccccggctgaataaagaatcctggcatcgcga

SEQ ID NO: 219887 - DNA, 50 bp, Artificial
  Synthetic oligonucleotide
acacatacgacctggcacggaagtacgcccgtcatccggaaccggagctc

SEQ ID NO: 219888 - DNA, 50 bp, Artificial
  Synthetic oligonucleotide
acaatacacgcggctcgaggcacgattgattcgtcagagcgcccgggttg

SEQ ID NO: 219889 - DNA, 50 bp, Artificial
  Synthetic oligonucleotide
aacagcctcccgccgactcgctggtactccccagtttcgaagcggtctcg

SEQ ID NO: 219890 - DNA, 50 bp, Artificial
  Synthetic oligonucleotide
aacagactggggcggggttagcctgaccaccgtggaaacgcttcgatgcg

SEQ ID NO: 219891 - DNA, 50 bp, Artificial
  Synthetic oligonucleotide
aacacttggtcccggcccgtcgctatccgcctgcttggccgatcgtcata

SEQ ID NO: 219892 - DNA, 50 bp, Artificial
  Synthetic oligonucleotide
aacactcgttgcatgagggatgcaggtggcgtatgtgaacgcccgcggat

SEQ ID NO: 219893 - DNA, 50 bp, Artificial
  Synthetic oligonucleotide
aacacggtgatatcgcggtcggaagagctgaaagaccccttcggcggggt

SEQ ID NO: 219894 - DNA, 50 bp, Artificial
  Synthetic oligonucleotide
aacacggtaatgggccgtgcgaaactgagccctacccttcacggctcgca

SEQ ID NO: 219895 - DNA, 50 bp, Artificial
  Synthetic oligonucleotide
aacacgggctcaagcatgccccagactgccggccaatcggcaggagcgaa

SEQ ID NO: 219896 - DNA, 55 bp, Artificial
  Synthetic oligonucleotide
ccgtgtcagcagcgtatgcaggcgtgattcgtagtcatagaaatcgagggcgcgc

SEQ ID NO: 219897 - DNA, 50 bp, Artificial
  Synthetic oligonucleotide
aacacggattgcagcccgctttggattgacgccgcgagcggatcttctcg

SEQ ID NO: 219898 - DNA, 50 bp, Artificial
  Synthetic oligonucleotide
aacacgcgcgtactagcggaggcagtacaagtcgtggggacgttgccggt

SEQ ID NO: 219899 - DNA, 50 bp, Artificial
  Synthetic oligonucleotide
aacacgccgcaacgaatcaacgcgcctgctgtcaacaggcatcctccaat

SEQ ID NO: 219900 - DNA, 50 bp, Artificial
  Synthetic oligonucleotide
aacacgcccgaagtgtacccccgcacgtctcccgtgctcaagacccttgt

SEQ ID NO: 219901 - DNA, 50 bp, Artificial
  Synthetic oligonucleotide
aacacaaacgggccggcgccttcttccacagtcggagtccactcgatcaa

SEQ ID NO: 219902 - DNA, 50 bp, Artificial
  Synthetic oligonucleotide
aacaattagccgatgggcgttagccccggttggcgtctgactaaccgccg

SEQ ID NO: 219903 - DNA, 50 bp, Artificial
  Synthetic oligonucleotide
aacaagggaaagccaaccgaacgcgcatcagtggggactccgtctccgaa

SEQ ID NO: 219904 - DNA, 50 bp, Artificial
  Synthetic oligonucleotide
aacaaggacacgtcgcgggaatgcccgacgcttgcgagtcgctacggatg

SEQ ID NO: 219905 - DNA, 50 bp, Artificial
  Synthetic oligonucleotide
aacaagccgtcgttagcgagtccgcaaccctcgcctagtctcagtcgcgc

SEQ ID NO: 219906 - DNA, 50 bp, Artificial
  Synthetic oligonucleotide
aaaggtagccccgcccaatgccccctctcacggaactcggccgtaagccg

SEQ ID NO: 219907 - DNA, 55 bp, Artificial
  Synthetic oligonucleotide
cgctctgactcgggacgctgcatcatgtaaccgagcgccgccaaacctcgaggaa

SEQ ID NO: 219908 - DNA, 50 bp, Artificial
  Synthetic oligonucleotide
aaaggtcgacgcgggagttgcaccgacccgaggcgccattttagtgacga

SEQ ID NO: 219909 - DNA, 50 bp, Artificial
  Synthetic oligonucleotide
aaaggtgccgaggcccgggtcatacgggagttcgtagaaccacacgcgct

SEQ ID NO: 219910 - DNA, 50 bp, Artificial
  Synthetic oligonucleotide
aaagtgagcggcgaaaaccgggtcggacaacaccgtggcctcgcggtctg

SEQ ID NO: 219911 - DNA, 50 bp, Artificial
  Synthetic oligonucleotide
aaagtggacgggcaggagaaaccggttggaacagtgcggtctgtggctgc

SEQ ID NO: 219912 - DNA, 50 bp, Artificial
  Synthetic oligonucleotide
aaatagaaggggcaagacgccgcagacgaccaacctgcgggtttccgcac

SEQ ID NO: 219913 - DNA, 50 bp, Artificial
  Synthetic oligonucleotide
aaatagccagcgagaaatgagggacgaccctgcgaccatcggacgctccg

SEQ ID NO: 219914 - DNA, 50 bp, Artificial
  Synthetic oligonucleotide
aaatccgggccggcagtcattccgggtaatccgtcagacagcctgttgct

SEQ ID NO: 219915 - DNA, 50 bp, Artificial
  Synthetic oligonucleotide
aaatcgaccttcccgcctgtgtcgggcccatctccccggatcgtcccgaa

SEQ ID NO: 219916 - DNA, 50 bp, Artificial
  Synthetic oligonucleotide
aaatcggaataggtgtcccccttcggcagctccactgtcgcgagcagcaa

SEQ ID NO: 219917 - DNA, 50 bp, Artificial
  Synthetic oligonucleotide
aaatcggcgcggaggattgcgaatcgattggcggcaggggcgtctcttca

SEQ ID NO: 219918 - DNA, 55 bp, Artificial
  Synthetic oligonucleotide
cgcgtgctgcgatttgttcgctgaagatgaaatttggccggattgcgtcgtcggc

SEQ ID NO: 219919 - DNA, 50 bp, Artificial
  Synthetic oligonucleotide
aaatcgggcttgagttgctggaccagttgaagcaccccctcccggtcccg

SEQ ID NO: 219920 - DNA, 50 bp, Artificial
  Synthetic oligonucleotide
aaattcccatcacacgcatgccgacactcgttgctgcgagcacttcggga

SEQ ID NO: 219921 - DNA, 50 bp, Artificial
  Synthetic oligonucleotide
aaattcggccctggctcggcaatatcgtctccgcgaaacctccccaacca

SEQ ID NO: 219922 - DNA, 50 bp, Artificial
  Synthetic oligonucleotide
aaattgccaccctgtgccgttgctcgcatgttccgcgcactaaggtgcgg

SEQ ID NO: 219923 - DNA, 50 bp, Artificial
  Synthetic oligonucleotide
aacaacgtctccgatcgggccttggggaaaggccgtcaaagtggtcaccc

SEQ ID NO: 219924 - DNA, 50 bp, Artificial
  Synthetic oligonucleotide
aacaagcccctggtcactcggtttgtcgcaaggggcgggaccggtttggc

SEQ ID NO: 219925 - DNA, 50 bp, Artificial
  Synthetic oligonucleotide
aaccattgatgcccgcgattcgtgccggaccatctgcgtcccaggattcc

SEQ ID NO: 219926 - DNA, 50 bp, Artificial
  Synthetic oligonucleotide
aacccacacccgcagatgacaccgcttctgtcgcatctcgctcttggcgg

SEQ ID NO: 219927 - DNA, 50 bp, Artificial
  Synthetic oligonucleotide
aacccaggtcacgtccccacgtgtgcagcacgctggtgaatcccgtttcg

SEQ ID NO: 219928 - DNA, 50 bp, Artificial
  Synthetic oligonucleotide
aaccccaccgccgaagttgcggggcgtctgagagtgcagcgcacctttgg

SEQ ID NO: 219929 - DNA, 59 bp, Artificial
  Synthetic oligonucleotide
tccgagtaccaagccccagcagtcggggtcgcgaacaaagcctggcaacgagtcatcaa

SEQ ID NO: 219930 - DNA, 55 bp, Artificial
  Synthetic oligonucleotide
cgcgtgacccgtttgtcgaaatcacaacgactgatgcagttttcctcaagtcgca

SEQ ID NO: 219931 - DNA, 50 bp, Artificial
  Synthetic oligonucleotide
aaccccacgagcgtcacccaacttccaccgcaaaccattcaggtgggaca

SEQ ID NO: 219932 - DNA, 50 bp, Artificial
  Synthetic oligonucleotide
aaccccagccacgaatgatcaggttcaccggattggcgcccgatgcttcg

SEQ ID NO: 219933 - DNA, 50 bp, Artificial
  Synthetic oligonucleotide
aaccccattgacccccacgcggttcgcttcccgtccgcattagccaggca

SEQ ID NO: 219934 - DNA, 50 bp, Artificial
  Synthetic oligonucleotide
aacccccgcattccgttgcccttccgatccaggcgtgtcgcccttgggaa

SEQ ID NO: 219935 - DNA, 50 bp, Artificial
  Synthetic oligonucleotide
aaccccctgcggtggagaacgctcccagtcgcagcgaagcagctgacgaa

SEQ ID NO: 219936 - DNA, 50 bp, Artificial
  Synthetic oligonucleotide
aaccccgaccgtcagggaggtgggccacgtttgaggatccacgtaactca

SEQ ID NO: 219937 - DNA, 50 bp, Artificial
  Synthetic oligonucleotide
aaccccgttacaggtgcgggcatgtgttggacctgagcaggttgatccga

SEQ ID NO: 219938 - DNA, 50 bp, Artificial
  Synthetic oligonucleotide
aacccgaacgtccctgacccggtcactgagttggccgtgctcctgcgaga

SEQ ID NO: 219939 - DNA, 50 bp, Artificial
  Synthetic oligonucleotide
aacccgagcgacggtcagtccgcatccgtccaagatgcttcgtcccggct

SEQ ID NO: 219940 - DNA, 50 bp, Artificial
  Synthetic oligonucleotide
aacccgcccgctatggactcggtcacctatgcgtgcgcgtgtgaaaagtt

SEQ ID NO: 219941 - DNA, 55 bp, Artificial
  Synthetic oligonucleotide
cgcctttgttccccgagtggtccctacgcgtcgacctacatgcttcgcagctatc

SEQ ID NO: 219942 - DNA, 50 bp, Artificial
  Synthetic oligonucleotide
aacccgcggagatggagcggggaacaacgtggagcctttccggttgaatc

SEQ ID NO: 219943 - DNA, 50 bp, Artificial
  Synthetic oligonucleotide
aacccggaacgcacggctctgaacttgcgtggggtcatgtgacggattgc

SEQ ID NO: 219944 - DNA, 50 bp, Artificial
  Synthetic oligonucleotide
aacccgggtgcccatggaagtcttgccgccttgagagactcggccggttg

SEQ ID NO: 219945 - DNA, 50 bp, Artificial
  Synthetic oligonucleotide
aacagcgacggagaccccacagaccgcgatctggcgttgcgttcggtatg

SEQ ID NO: 219946 - DNA, 50 bp, Artificial
  Synthetic oligonucleotide
aacaggcggccggagtcttgcagcgagattccagcggggagtcgtttttc

SEQ ID NO: 219947 - DNA, 50 bp, Artificial
  Synthetic oligonucleotide
aacaggctttcaggcgtcaccggctcacactgtcccacatcggcgtagcc

SEQ ID NO: 219948 - DNA, 50 bp, Artificial
  Synthetic oligonucleotide
aacatcccgcggaagtaaaccgtctcgcgactttcacgtccctcctgccg

SEQ ID NO: 219949 - DNA, 50 bp, Artificial
  Synthetic oligonucleotide
aacatgggccattaacagccgtctaggtcctcgcttagtcccgggcagcg

SEQ ID NO: 219950 - DNA, 50 bp, Artificial
  Synthetic oligonucleotide
aacattgcccacggggccgaaccggcatcgctcgccacttgcgagtagag

SEQ ID NO: 219951 - DNA, 50 bp, Artificial
  Synthetic oligonucleotide
aaccaaaacgacgcaacgacggatcggcccacatggtgagggccactcgc

SEQ ID NO: 219952 - DNA, 55 bp, Artificial
  Synthetic oligonucleotide
cgccgattggattgaaacccgatacaccccatcaacttcgcagtgaccaccacct

SEQ ID NO: 219953 - DNA, 50 bp, Artificial
  Synthetic oligonucleotide
aaccaagaagaggattcaccgcagagggctcgagagggcgcagagccgtt

SEQ ID NO: 219954 - DNA, 50 bp, Artificial
  Synthetic oligonucleotide
aaccaatgtcacgcgatcacctgcactgaaggcatcgctggcgtgcggaa

SEQ ID NO: 219955 - DNA, 50 bp, Artificial
  Synthetic oligonucleotide
aaccaccaggaggctttcagtcgccgattccactccgttacgccgatccg

SEQ ID NO: 219956 - DNA, 50 bp, Artificial
  Synthetic oligonucleotide
aaccactagatcgggacgccattccagcgcgtgaaggcttccatggcata

SEQ ID NO: 219957 - DNA, 50 bp, Artificial
  Synthetic oligonucleotide
aaccagcaatcagggcgaatccacacaacagagccgggagggcggctgac

SEQ ID NO: 219958 - DNA, 50 bp, Artificial
  Synthetic oligonucleotide
aaccagcgaccggacgacagtcagttctgctgcaaccggaatgggatcct

SEQ ID NO: 219959 - DNA, 50 bp, Artificial
  Synthetic oligonucleotide
aaccagcgcctctctgatttcggactcgagccaagatcccggcaggtggg

SEQ ID NO: 219960 - DNA, 50 bp, Artificial
  Synthetic oligonucleotide
aaccagcgcggggcggaggggtcaacttagtcaacaacagcgcgactccg

SEQ ID NO: 219961 - DNA, 50 bp, Artificial
  Synthetic oligonucleotide
aaccaggcaggcgtgatgacgaccggagagacgaacccgctgggtgattc

SEQ ID NO: 219962 - DNA, 50 bp, Artificial
  Synthetic oligonucleotide
aaccatcgtggttgacctcattcaacgtggcgtggtcatcccgccgctta

SEQ ID NO: 219963 - DNA, 55 bp, Artificial
  Synthetic oligonucleotide
cgcattccgcataagtgtcgcgtttctagcggcgtaaactgcccgtttgcaggtc

SEQ ID NO: 219964 - DNA, 50 bp, Artificial
  Synthetic oligonucleotide
aaacgccgtcagaaaacctacggacctgcggccggaatgcgtagtcggta

SEQ ID NO: 219965 - DNA, 50 bp, Artificial
  Synthetic oligonucleotide
aaacgccgcctgttgtggtttgattccccgaatgcaggacgccagacgag

SEQ ID NO: 219966 - DNA, 50 bp, Artificial
  Synthetic oligonucleotide
aaacgcccgcatcgcgcgtgtgcaacaatcaacattcagaagcccgaggc

SEQ ID NO: 219967 - DNA, 50 bp, Artificial
  Synthetic oligonucleotide
aaacgcagcggacaccccagcgcattccatcgtgggcattgttttgcaca

SEQ ID NO: 219968 - DNA, 50 bp, Artificial
  Synthetic oligonucleotide
aaacgaggggcgagtcgtacacccacggaaccatttgagcgaggggaccg

SEQ ID NO: 219969 - DNA, 50 bp, Artificial
  Synthetic oligonucleotide
aaacgagggcatccgagtcccacgtttcaacgcgccaggatccagaacga

SEQ ID NO: 219970 - DNA, 50 bp, Artificial
  Synthetic oligonucleotide
aaacgacccgtggtcgactcgcaggctgccctgccgctcatcaacatccg

SEQ ID NO: 219971 - DNA, 50 bp, Artificial
  Synthetic oligonucleotide
aaacgaacggtgccgtcccccatgagaaagtgggctcctcccgtgtgaag

SEQ ID NO: 219972 - DNA, 50 bp, Artificial
  Synthetic oligonucleotide
aaacctgctctctctcgcaggcacgttatgcgccgtggcaaccacgcaat

SEQ ID NO: 219973 - DNA, 50 bp, Artificial
  Synthetic oligonucleotide
aaaccgcaaaagcgtccgacgaaccacacgcggaaacgaatccccagcca

SEQ ID NO: 219974 - DNA, 55 bp, Artificial
  Synthetic oligonucleotide
ccgtgttgttgactccgatccccactctcgcattcccgggctgattgtgcgcctt

SEQ ID NO: 219975 - DNA, 50 bp, Artificial
  Synthetic oligonucleotide
aaaccgaacccgggcgcaaacagggcgacatcccgttactgccgagcgct

SEQ ID NO: 219976 - DNA, 50 bp, Artificial
  Synthetic oligonucleotide
aaacccgggtgatcgcgcactgattactcttgaagactccggccagccga

SEQ ID NO: 219977 - DNA, 50 bp, Artificial
  Synthetic oligonucleotide
aaacccggagtccgccaacaagcgacgatgaatcaatccgccgtaccgga

SEQ ID NO: 219978 - DNA, 50 bp, Artificial
  Synthetic oligonucleotide
aaacccgcgagccgcaggaaaatggaggcgagcgtcgcgtgacaatggcc

SEQ ID NO: 219979 - DNA, 50 bp, Artificial
  Synthetic oligonucleotide
aaaccccgcgcaaaactggcagcccccgcactggcatagtgcaggacatc

SEQ ID NO: 219980 - DNA, 50 bp, Artificial
  Synthetic oligonucleotide
aaacccccgtgtagcccgcttactgacgtgcgcggttagttctcgcgttt

SEQ ID NO: 219981 - DNA, 50 bp, Artificial
  Synthetic oligonucleotide
aaaacaagcgaggccgcaggtggaagacccctgggactcgggacctccgc

SEQ ID NO: 219982 - DNA, 50 bp, Artificial
  Synthetic oligonucleotide
aaaaccccagctgatctgacgccaacgcgacacttcccgacggaagcgtc

SEQ ID NO: 219983 - DNA, 50 bp, Artificial
  Synthetic oligonucleotide
aaaaccgcgttgcgtaggatcggggaattgcggtgcgaatgtcgcagccg

SEQ ID NO: 219984 - DNA, 50 bp, Artificial
  Synthetic oligonucleotide
aaaacgcagcgtagcggtgcaaagcaaagcagtacacaggcccgtcgcgc

SEQ ID NO: 219985 - DNA, 55 bp, Artificial
  Synthetic oligonucleotide
cgcaggatcgctgacaacagttcccgctgaggtgaagtcgaacgacgtatattga

SEQ ID NO: 219986 - DNA, 50 bp, Artificial
  Synthetic oligonucleotide
aaaacggctgcccgatcggaacgaccaatcaggttgcctgcccgggagtg

SEQ ID NO: 219987 - DNA, 50 bp, Artificial
  Synthetic oligonucleotide
aaaactcggggcatcttctccgccccgcgctacatccaaaaaccagcgtt

SEQ ID NO: 219988 - DNA, 50 bp, Artificial
  Synthetic oligonucleotide
aaaactggccgttttcacgtggcagtgaacgcgcctcaaaagcgaggccc

SEQ ID NO: 219989 - DNA, 50 bp, Artificial
  Synthetic oligonucleotide
aaaaggagcaccggcagactgctgactcgcaggcttaaggcgaacgcacc

SEQ ID NO: 219990 - DNA, 50 bp, Artificial
  Synthetic oligonucleotide
aaaaggcggttcacccggggagcggttcggacttagaataggcccatcgc

SEQ ID NO: 219991 - DNA, 50 bp, Artificial
  Synthetic oligonucleotide
aaaagttcgcgtggcatgagaggctccgggcggaatcgttgaacccctcc

SEQ ID NO: 219992 - DNA, 50 bp, Artificial
  Synthetic oligonucleotide
aaaatgccggtcctgcagagactcgcccccacgcagtccgagcccccgtt

SEQ ID NO: 219993 - DNA, 50 bp, Artificial
  Synthetic oligonucleotide
aaacaaccttcgccgcacttgtggtaccccgaacgcggatgcctcaagct

SEQ ID NO: 219994 - DNA, 50 bp, Artificial
  Synthetic oligonucleotide
aaacacggtgccatccccgtcacactgcggacagtattcagggagcccca

SEQ ID NO: 219995 - DNA, 50 bp, Artificial
  Synthetic oligonucleotide
aaacagcgagttacatccgccgggatgatgactgccgacgcgccacgcat

SEQ ID NO: 219996 - DNA, 53 bp, Artificial
  Synthetic oligonucleotide
cctacgcgatccataaaagcctgatcccgtgaaaagtacctggtcgaaccccg

SEQ ID NO: 219997 - DNA, 50 bp, Artificial
  Synthetic oligonucleotide
aaaccaactggccgtgagccgcgatgtgtcgcagttctccgctgtccagg

SEQ ID NO: 219998 - DNA, 50 bp, Artificial
  Synthetic oligonucleotide
aaaccaggtccgcaggtaaccagcctatcccccacgcacggactggtcgc

SEQ ID NO: 219999 - DNA, 50 bp, Artificial
  Synthetic oligonucleotide
aaaccccactgtttctggagcgggggaccaacgaacgagaccccgtgttg

SEQ ID NO: 220000 - DNA, 50 bp, Artificial
  Synthetic oligonucleotide
aaagcctgcgggagtctcggcaccgtcgagatgcctcacaatggcagaac

SEQ ID NO: 220001 - DNA, 50 bp, Artificial
  Synthetic oligonucleotide
aaagcgaaaccactgacagttccacgtccagacctgcagccgcagtgcct

SEQ ID NO: 220002 - DNA, 50 bp, Artificial
  Synthetic oligonucleotide
aaagcgccggtcggtcacgctggtacatccacggcacggtgcaagcacaa

SEQ ID NO: 220003 - DNA, 50 bp, Artificial
  Synthetic oligonucleotide
aaagcgcctgtttgcaggttcgagcgctcttcgctcagcttgggtagggt

SEQ ID NO: 220004 - DNA, 50 bp, Artificial
  Synthetic oligonucleotide
aaagcgggcccgtcgcggtggctttcagcacgcaattccgcctggaattt

SEQ ID NO: 220005 - DNA, 50 bp, Artificial
  Synthetic oligonucleotide
aaagcgtcccggcaaaagcgtccaggtactgtctccccaggtacaacgcg

SEQ ID NO: 220006 - DNA, 50 bp, Artificial
  Synthetic oligonucleotide
aaagcgtggcaaaacgtttccgcgtccgtgagacgaagcatccactcggc

SEQ ID NO: 220007 - DNA, 55 bp, Artificial
  Synthetic oligonucleotide
cgcaagggatgtgtccacagtgcgatggtctgggagtgatgtactccttcgatcc

SEQ ID NO: 220008 - DNA, 50 bp, Artificial
  Synthetic oligonucleotide
aaagctcgggcacggaaagcctcgtggtcaagtcctcgggtgctaccgct

SEQ ID NO: 220009 - DNA, 50 bp, Artificial
  Synthetic oligonucleotide
aaagctgccacggagacgaggtcacgtaatgaaacgcggcgccctggtcc

SEQ ID NO: 220010 - DNA, 50 bp, Artificial
  Synthetic oligonucleotide
aaaggacctgccgaccccgcaccttgttcgggaccgttgtccgagcaaat

SEQ ID NO: 220011 - DNA, 50 bp, Artificial
  Synthetic oligonucleotide
aaaggagtgcccacgatgccgcgtctaaccgcgagcttgtcgctcgatct

SEQ ID NO: 220012 - DNA, 50 bp, Artificial
  Synthetic oligonucleotide
aaaggatctagctccaccgctgcgagtgccgtgcgattaacgcggctgta

SEQ ID NO: 220013 - DNA, 50 bp, Artificial
  Synthetic oligonucleotide
aaaggcacgggttactccctcggaactagcggccactgatcgcggaccgc

SEQ ID NO: 220014 - DNA, 50 bp, Artificial
  Synthetic oligonucleotide
aaaggcggcatccgtgggagccagtaccgtaaaaggcccgtcaccctgta

SEQ ID NO: 220015 - DNA, 50 bp, Artificial
  Synthetic oligonucleotide
aaagggaatacgggtcctgcgtcgaccgccaggattgaaggcgggatgta

SEQ ID NO: 220016 - DNA, 50 bp, Artificial
  Synthetic oligonucleotide
aaagggcgatgcaattcagccgcaccgggagtggttttccttggtagcga

SEQ ID NO: 220017 - DNA, 50 bp, Artificial
  Synthetic oligonucleotide
aaaggggacaacacatacgacctggcacggaagtacgcccgtcatccgga

SEQ ID NO: 220018 - DNA, 55 bp, Artificial
  Synthetic oligonucleotide
cgaatctcgggatgtaccgagttcagttaacgggaaacgattatctgcccgatcg

SEQ ID NO: 220019 - DNA, 50 bp, Artificial
  Synthetic oligonucleotide
aaacgcgagaactaaccgcgcacgtcagtaagcgggctacacgggggttt

SEQ ID NO: 220020 - DNA, 50 bp, Artificial
  Synthetic oligonucleotide
aaacgcgccaatggaaccgctagacgctatagagcggcgattcgagggcc

SEQ ID NO: 220021 - DNA, 50 bp, Artificial
  Synthetic oligonucleotide
aaacgctctcggcggtgtcagtgaccccggaagggtcgtgctgggtatag

SEQ ID NO: 220022 - DNA, 50 bp, Artificial
  Synthetic oligonucleotide
aaacggcactttgagaagtgcgattccgaacacggggcgcgggattcctg

SEQ ID NO: 220023 - DNA, 50 bp, Artificial
  Synthetic oligonucleotide
aaacggggtgtggcttgtggatcacgtcccgcctcagtaccttcggctgt

SEQ ID NO: 220024 - DNA, 50 bp, Artificial
  Synthetic oligonucleotide
aaacgtccaacgcaccgcttgtgcatgtgccccactcgacagatcgccca

SEQ ID NO: 220025 - DNA, 50 bp, Artificial
  Synthetic oligonucleotide
aaacgtccccatcccacgaacgcccgatgcgtcgcggtcacttcgtttaa

SEQ ID NO: 220026 - DNA, 50 bp, Artificial
  Synthetic oligonucleotide
aaacgtcgcccagtgatctccttggctcacggcctgttgcgatagtcgcc

SEQ ID NO: 220027 - DNA, 50 bp, Artificial
  Synthetic oligonucleotide
aaacgtgggcggctggaagcttagcaagaatcgttcggctgcaactcgcg

SEQ ID NO: 220028 - DNA, 50 bp, Artificial
  Synthetic oligonucleotide
aaactgagcggtgttgtccacgattctgggcgtcggtccctatcggtgga

SEQ ID NO: 220029 - DNA, 55 bp, Artificial
  Synthetic oligonucleotide
gcccaccaaaccgctcgaaccggacactgcgatcgtcttgggactcattgggtag

SEQ ID NO: 220030 - DNA, 50 bp, Artificial
  Synthetic oligonucleotide
aaactggcagcccccgcactggcatagtgcaggacatcgagtgttcgcgt

SEQ ID NO: 220031 - DNA, 50 bp, Artificial
  Synthetic oligonucleotide
aaagagcgaccgaccgctcggctcacaccgtgaaagtcagcaggcgggaa

SEQ ID NO: 220032 - DNA, 50 bp, Artificial
  Synthetic oligonucleotide
aaagagtacgccgcactcattccggccggtcccaaaatccgcaatggtga

SEQ ID NO: 220033 - DNA, 50 bp, Artificial
  Synthetic oligonucleotide
aaagattccggggtcgacgtctcccagggttcgctcggttgtgacgggct

SEQ ID NO: 220034 - DNA, 50 bp, Artificial
  Synthetic oligonucleotide
aaagattggccatcgtgcggtggtttggggtcccgtagttggggaactgc

SEQ ID NO: 220035 - DNA, 50 bp, Artificial
  Synthetic oligonucleotide
aaagcacggctcgaacagtcacacgccatcgaagagcggcaacgactgcg

SEQ ID NO: 220036 - DNA, 50 bp, Artificial
  Synthetic oligonucleotide
aaagccgcctgtgaccgcgagggacaaaagttccgtgccgactgtaggat

SEQ ID NO: 220037 - DNA, 50 bp, Artificial
  Synthetic oligonucleotide
aagaacggctgacaagtgagcgtccccgccctttcacgcctttggatccg

SEQ ID NO: 220038 - DNA, 50 bp, Artificial
  Synthetic oligonucleotide
aagaaaagtggtcgctgggaaacggtcacgtgggacggtcggactccagg

SEQ ID NO: 220039 - DNA, 50 bp, Artificial
  Synthetic oligonucleotide
aactttgtcgcttcctggcagcaacgtattctgcaagcgggtccggctgg

SEQ ID NO: 220040 - DNA, 60 bp, Artificial
  Synthetic oligonucleotide
cgcttgtctctgactgacatacgcctccattgcgcaacagcgacggtttgggtgcagaca

SEQ ID NO: 220041 - DNA, 55 bp, Artificial
  Synthetic oligonucleotide
gcaacacgaggattaacacattatgccgggagtcgccacgagtcttgaagctggg

SEQ ID NO: 220042 - DNA, 50 bp, Artificial
  Synthetic oligonucleotide
aacttgcgtggggtcatgtgacggattgcgccaactctgctatggtgcgc

SEQ ID NO: 220043 - DNA, 50 bp, Artificial
  Synthetic oligonucleotide
aacttgaaccggcttcccgagccgacccgctgcggattgcctgagttgtg

SEQ ID NO: 220044 - DNA, 50 bp, Artificial
  Synthetic oligonucleotide
aacttcgcggccgttgtctcccaccggttcgattcccaggacattccaga

SEQ ID NO: 220045 - DNA, 50 bp, Artificial
  Synthetic oligonucleotide
aacttccccgtgcgattgcaaaagttctgcttgccttcccccggcgcggg

SEQ ID NO: 220046 - DNA, 50 bp, Artificial
  Synthetic oligonucleotide
aactgtccccgtgagcaaatcgcgccaacctcgttgttgggcggttccga

SEQ ID NO: 220047 - DNA, 50 bp, Artificial
  Synthetic oligonucleotide
aactgggctaagtagcgcgtgatggctgggtcggctgcataagggagacc

SEQ ID NO: 220048 - DNA, 50 bp, Artificial
  Synthetic oligonucleotide
aactgccagcgtgtgcatcaaagcagcccccgcgagtaccaacgcaacgc

SEQ ID NO: 220049 - DNA, 50 bp, Artificial
  Synthetic oligonucleotide
aactctgtattgctaaccggcttgggagcggtggcgttcacaggtccccg

SEQ ID NO: 220050 - DNA, 50 bp, Artificial
  Synthetic oligonucleotide
aactcgtcgggctaatcccccgaagccgtgggtgcgaaccccaccctccg

SEQ ID NO: 220051 - DNA, 50 bp, Artificial
  Synthetic oligonucleotide
aactcgccccgacggatggtgcgccctggcgaaatcttggtgctgctccg

SEQ ID NO: 220052 - DNA, 55 bp, Artificial
  Synthetic oligonucleotide
gatcattgaaatttgctccttacgattgccattgtcgcaatctctactactggcc

SEQ ID NO: 220053 - DNA, 50 bp, Artificial
  Synthetic oligonucleotide
aactcgcaggggtgtgcgttgtccccactggaatctaactcgcgcgtgga

SEQ ID NO: 220054 - DNA, 50 bp, Artificial
  Synthetic oligonucleotide
aactcgaaagtcgcacggatcaaaccgcggacgcaccctgaaacgtccgg

SEQ ID NO: 220055 - DNA, 50 bp, Artificial
  Synthetic oligonucleotide
aactccggtggaagtggcgtgtctgacgggagtggtcgcgagctatcgga

SEQ ID NO: 220056 - DNA, 50 bp, Artificial
  Synthetic oligonucleotide
aacgtagccgcatgttggtcgtcggttacgagtcggggcgttttcgcgtc

SEQ ID NO: 220057 - DNA, 50 bp, Artificial
  Synthetic oligonucleotide
aacgtcagcagaggtcacgcgagcattcgccaaaggaaccgtggctgcga

SEQ ID NO: 220058 - DNA, 50 bp, Artificial
  Synthetic oligonucleotide
aacgtcagccagagggggtcaagccgcgatcgtcgcaactcctctcgaat

SEQ ID NO: 220059 - DNA, 50 bp, Artificial
  Synthetic oligonucleotide
aacgtccgcttgggaggtagtctcgccctggagtgctagcagggtcgaaa

SEQ ID NO: 220060 - DNA, 50 bp, Artificial
  Synthetic oligonucleotide
aacgtcgaggcggcaatgcaaggaccgcgtggattcgtcatggcttgagg

SEQ ID NO: 220061 - DNA, 50 bp, Artificial
  Synthetic oligonucleotide
aacgtgccaccgcagcgcagcattcactatgccccacgacgagccacttg

SEQ ID NO: 220062 - DNA, 50 bp, Artificial
  Synthetic oligonucleotide
aacgtggccgggtatcgatcggggcagaactgaacgcggggcatcccgca

SEQ ID NO: 220063 - DNA, 55 bp, Artificial
  Synthetic oligonucleotide
gagtattcccgaaagacgtacatgctctcaacgtcgggaacttcatagcgattga

SEQ ID NO: 220064 - DNA, 50 bp, Artificial
  Synthetic oligonucleotide
aacgtgggcccgcaagtctgcccgaagcgataatcctgatcgccgactgg

SEQ ID NO: 220065 - DNA, 49 bp, Artificial
  Synthetic oligonucleotide
aacgtgggtaggaaccgccaacaacgggggaaggtaggcgacggaagag

SEQ ID NO: 220066 - DNA, 50 bp, Artificial
  Synthetic oligonucleotide
aacgtggtggtcacccgtttgaacaatctcccggctctggtgccgatgga

SEQ ID NO: 220067 - DNA, 50 bp, Artificial
  Synthetic oligonucleotide
aacgttcgaccatggccagtcggattgccaggaagagctgttcccgcgta

SEQ ID NO: 220068 - DNA, 50 bp, Artificial
  Synthetic oligonucleotide
aacgttgcccgtccacctagtccgccttgagtcagaatcgccccattcgg

SEQ ID NO: 220069 - DNA, 50 bp, Artificial
  Synthetic oligonucleotide
aactaaccgcgcacgtcagtaagcgggctacacgggggtttcatgggcca

SEQ ID NO: 220070 - DNA, 50 bp, Artificial
  Synthetic oligonucleotide
aactaggggcctacaatctgcagcccgggaatcgcagccctcaactcgtc

SEQ ID NO: 220071 - DNA, 50 bp, Artificial
  Synthetic oligonucleotide
aactcagaggcccgtgcgggatcgtatttcgggtttttgacgggcagggc

SEQ ID NO: 220072 - DNA, 50 bp, Artificial
  Synthetic oligonucleotide
aactcccttgtgctttccagctcaggcgagtccccgggtacgcacgctcc

SEQ ID NO: 220073 - DNA, 50 bp, Artificial
  Synthetic oligonucleotide
aactccgggcggtgactccgccgttcgtctcgaaacgaggtcaaggatga

SEQ ID NO: 220074 - DNA, 55 bp, Artificial
  Synthetic oligonucleotide
gagggacgagcaggatgatagacgttgatattcgcggcgagccaccaatcgcctc

SEQ ID NO: 220075 - DNA, 50 bp, Artificial
  Synthetic oligonucleotide
aagcgagatcgactcaaacggcagctgaccatgccagagcggaccgcgat

SEQ ID NO: 220076 - DNA, 50 bp, Artificial
  Synthetic oligonucleotide
aagcgattctttggcgcccagcgaatgaccatacgcgccgatccgttgtg

SEQ ID NO: 220077 - DNA, 50 bp, Artificial
  Synthetic oligonucleotide
aagcgctcccgtattccaaggccatcgtttccgaggcgagtttggtggcc

SEQ ID NO: 220078 - DNA, 50 bp, Artificial
  Synthetic oligonucleotide
aagcgtcggtaattggggagccagagtcggctggacgagtcgtttgacga

SEQ ID NO: 220079 - DNA, 50 bp, Artificial
  Synthetic oligonucleotide
aagcgtgcgacgcatttgaccatgcgagccaactgtcgcctgctgaacgc

SEQ ID NO: 220080 - DNA, 50 bp, Artificial
  Synthetic oligonucleotide
aagcttgttgcgcagaccgcaggcgtaatcgttgggatcatgcgcgggag

SEQ ID NO: 220081 - DNA, 50 bp, Artificial
  Synthetic oligonucleotide
aaggccgctccttgcgcactgggccacgaactggcttcacgatcctctgg

SEQ ID NO: 220082 - DNA, 50 bp, Artificial
  Synthetic oligonucleotide
aagggaaagacccacgaaatcccttaggcccccgctggcttgatctgggc

SEQ ID NO: 220083 - DNA, 50 bp, Artificial
  Synthetic oligonucleotide
aagggaggttcgggttttccggcacgggtgtttgcgatcctgccgtgagc

SEQ ID NO: 220084 - DNA, 50 bp, Artificial
  Synthetic oligonucleotide
aaggggccaatcggctggttcctcggaatcctctggtcgaagtctgggct

SEQ ID NO: 220085 - DNA, 55 bp, Artificial
  Synthetic oligonucleotide
gacttcactctcccgatgcgaggttcattcatgcgataccggctcctccccgcag

SEQ ID NO: 220086 - DNA, 50 bp, Artificial
  Synthetic oligonucleotide
aaggggccggctacgggtgagagatcggccgtccataaaccatcgcgcgt

SEQ ID NO: 220087 - DNA, 50 bp, Artificial
  Synthetic oligonucleotide
aaggtccttgcgcgacctacgtgcctgccggttcctgcctgggctattaa

SEQ ID NO: 220088 - DNA, 50 bp, Artificial
  Synthetic oligonucleotide
aaggtgctattgcccaactggccagccccaatctgtcagcccggtcgcag

SEQ ID NO: 220089 - DNA, 50 bp, Artificial
  Synthetic oligonucleotide
aagtcgcacattcctgcagacggttcgcaggcagacaccttccggcaagc

SEQ ID NO: 220090 - DNA, 50 bp, Artificial
  Synthetic oligonucleotide
aagtcggtagcactcgacccgacgaatgcgctggcagtcacggggtatgc

SEQ ID NO: 220091 - DNA, 50 bp, Artificial
  Synthetic oligonucleotide
aagtctttggagcgggggcgcagtgtgagttcatcagccgaccagcccag

SEQ ID NO: 220092 - DNA, 50 bp, Artificial
  Synthetic oligonucleotide
aagtgggcctccccacgcggcataggtttttccagtccctgtggtggcat

SEQ ID NO: 220093 - DNA, 50 bp, Artificial
  Synthetic oligonucleotide
aagaccacgctttgttgcagggggaatccgctcgctcccagtaggactgc

SEQ ID NO: 220094 - DNA, 50 bp, Artificial
  Synthetic oligonucleotide
aagaccagaggccggttacattccagcgtcgtgtccctgcgagaggcacc

SEQ ID NO: 220095 - DNA, 50 bp, Artificial
  Synthetic oligonucleotide
aagaccctcatcgtccggttcgtctggcagcgattgaggccgctggtgtc

SEQ ID NO: 220096 - DNA, 55 bp, Artificial
  Synthetic oligonucleotide
gaataacgcaccaaggatccaactatgagtgctagtatcgctcaaaccgccgtgg

SEQ ID NO: 220097 - DNA, 50 bp, Artificial
  Synthetic oligonucleotide
aagagcccgcgcccgatattagcccgagcaatcagccgcacacgttaact

SEQ ID NO: 220098 - DNA, 50 bp, Artificial
  Synthetic oligonucleotide
aagaggcgcgaacttccactccgcaatttcccgcggatcaggcgacggag

SEQ ID NO: 220099 - DNA, 50 bp, Artificial
  Synthetic oligonucleotide
aagaggtagggcagcccagagtcgggcggtttctgcatgtagagggtggg

SEQ ID NO: 220100 - DNA, 50 bp, Artificial
  Synthetic oligonucleotide
aagatcgcccgcacccctttgttgatcgtatcctcgcccaaggtgggacc

SEQ ID NO: 220101 - DNA, 50 bp, Artificial
  Synthetic oligonucleotide
aagatggcttccaacgcgtcaaactctcaggcacaaaacgacgcggcggc

SEQ ID NO: 220102 - DNA, 50 bp, Artificial
  Synthetic oligonucleotide
aagatgtcaggccgcccgagatcgttcagggcacgacgaatggccggaac

SEQ ID NO: 220103 - DNA, 50 bp, Artificial
  Synthetic oligonucleotide
aagattggcgggcgttggcccaactcgctcctcaaggcgagcggttgctt

SEQ ID NO: 220104 - DNA, 50 bp, Artificial
  Synthetic oligonucleotide
aagcagcattgaaacgttgattccgacctgagatcggccggcccccaacg

SEQ ID NO: 220105 - DNA, 50 bp, Artificial
  Synthetic oligonucleotide
aagcagttcattgccccggtccgcgagagtgtggacggcaccccactctt

SEQ ID NO: 220106 - DNA, 50 bp, Artificial
  Synthetic oligonucleotide
aagcatacacggctttgtcgtctgccactcccgtacctggggcgttggcc

SEQ ID NO: 220107 - DNA, 55 bp, Artificial
  Synthetic oligonucleotide
gaacccgccgtgactgccgcatctagcctcatagaacgcgttaccgaccaagaac

SEQ ID NO: 220108 - DNA, 50 bp, Artificial
  Synthetic oligonucleotide
aagccactccggaggcgcatcccctcgcccctgttcggtcaaatgaatgg

SEQ ID NO: 220109 - DNA, 50 bp, Artificial
  Synthetic oligonucleotide
aagcccgaaccaggcacgcgcacgaaaggtgtacaacgacttgtcgtgta

SEQ ID NO: 220110 - DNA, 50 bp, Artificial
  Synthetic oligonucleotide
aagccggcgacgaacagagccgcgtacctgtgcattgaggctcttgtctg

SEQ ID NO: 220111 - DNA, 50 bp, Artificial
  Synthetic oligonucleotide
aagcctgggatcgggacgctgtggcattagcagacttcgccagcgagtga

SEQ ID NO: 220112 - DNA, 50 bp, Artificial
  Synthetic oligonucleotide
aacgacaatgatcggttaggtgcttcgaggccacgtcgggttgggcggac

SEQ ID NO: 220113 - DNA, 50 bp, Artificial
  Synthetic oligonucleotide
aacgacaacgggaccggcgggcagacgacgagctacagttacacgttccg

SEQ ID NO: 220114 - DNA, 50 bp, Artificial
  Synthetic oligonucleotide
aacgaagataggtgggtaaccggggcgagcgttgggagagaaactggccc

SEQ ID NO: 220115 - DNA, 50 bp, Artificial
  Synthetic oligonucleotide
aacctgcgggatggcaaacgtgccctttgtgatcagcccccacggtatgc

SEQ ID NO: 220116 - DNA, 50 bp, Artificial
  Synthetic oligonucleotide
aacctcgcaggtagcccggcatttcgaacgaacggaccgacaaagcgact

SEQ ID NO: 220117 - DNA, 50 bp, Artificial
  Synthetic oligonucleotide
aacctatgctgcgatcggtcggagtggctcggctgaaatgtgttcgcgca

SEQ ID NO: 220118 - DNA, 55 bp, Artificial
  Synthetic oligonucleotide
gaaaatggcaagtctggcggtgaaaagataacggggaagcatatatagcccaaca

SEQ ID NO: 220119 - DNA, 50 bp, Artificial
  Synthetic oligonucleotide
aacctaccgtgtgacagcccaggccgaaccggagtttcgcgacgatccga

SEQ ID NO: 220120 - DNA, 50 bp, Artificial
  Synthetic oligonucleotide
aaccgtgttgagccaaccacgcagcgcgatttaaggcgaccgctttcgat

SEQ ID NO: 220121 - DNA, 50 bp, Artificial
  Synthetic oligonucleotide
aaccgtgctctggttggatcgggctttcgaggtcaacctagtcggcctga

SEQ ID NO: 220122 - DNA, 50 bp, Artificial
  Synthetic oligonucleotide
aaccgtgcgtaagcctgttgcgcctcttcagagccccatttcccgaagta

SEQ ID NO: 220123 - DNA, 50 bp, Artificial
  Synthetic oligonucleotide
aaccggtttgctgtcgcgaaatgcggctcgaacctgggagtcgtagcgaa

SEQ ID NO: 220124 - DNA, 50 bp, Artificial
  Synthetic oligonucleotide
aaccggtttccctaatgctgcatcggtaggggccagggctacggcgagta

SEQ ID NO: 220125 - DNA, 50 bp, Artificial
  Synthetic oligonucleotide
aaccggttcgagaacccttgactggccgtcttccctcctggtgggacgaa

SEQ ID NO: 220126 - DNA, 50 bp, Artificial
  Synthetic oligonucleotide
aaccggtgtgacttggatcccccgcgttggacatctcgcgtgtcactcct

SEQ ID NO: 220127 - DNA, 50 bp, Artificial
  Synthetic oligonucleotide
aaccggctcgcgtcagcaatcgcgtcatgcatatagtcattgggcgccga

SEQ ID NO: 220128 - DNA, 50 bp, Artificial
  Synthetic oligonucleotide
aaccggccccttctaaaccacgtcgactgtttgcttcggcgtaggtgcgc

SEQ ID NO: 220129 - DNA, 55 bp, Artificial
  Synthetic oligonucleotide
ctgtatgattcgcaggggtggattgatcggaatgtgcggctggttcgttaggcat

SEQ ID NO: 220130 - DNA, 50 bp, Artificial
  Synthetic oligonucleotide
aaccctagagcgcgtttcccggctcggtgcaaaaggttaccgctgcggca

SEQ ID NO: 220131 - DNA, 50 bp, Artificial
  Synthetic oligonucleotide
aaccctggggactgggctggcgcttaaatcatcccgggcagtccggaagc

SEQ ID NO: 220132 - DNA, 50 bp, Artificial
  Synthetic oligonucleotide
aacccttcgatgggttcgccacccactttttgcgatgggctgtcggcggt

SEQ ID NO: 220133 - DNA, 50 bp, Artificial
  Synthetic oligonucleotide
aacccttgggagcgagctggacccactcggggtgtaacgggggttacagt

SEQ ID NO: 220134 - DNA, 50 bp, Artificial
  Synthetic oligonucleotide
aaccctttcccgggtgcctgggggtcttcgatctgcgggcggaggctttg

SEQ ID NO: 220135 - DNA, 50 bp, Artificial
  Synthetic oligonucleotide
aaccctttgcggcggtgccctgtaccacgcgcacacgcctctcatcagat

SEQ ID NO: 220136 - DNA, 50 bp, Artificial
  Synthetic oligonucleotide
aaccgacagccttactaaccccgaccgtcagggaggtgggccacgtttgg

SEQ ID NO: 220137 - DNA, 50 bp, Artificial
  Synthetic oligonucleotide
aaccgaccaacccaacggcgatcgcaaaagcccactgaacgaagctgcct

SEQ ID NO: 220138 - DNA, 50 bp, Artificial
  Synthetic oligonucleotide
aaccgaccggggaggatgggacgagtttacggggcaatcttgcggcctgt

SEQ ID NO: 220139 - DNA, 50 bp, Artificial
  Synthetic oligonucleotide
aaccgactgcccgatgcgtatcccctgctggaagactcgcacattctggg

SEQ ID NO: 220140 - DNA, 55 bp, Artificial
  Synthetic oligonucleotide
ctggatgacgcttcttggggagagctctcgatgaacgacgaaacacgaagtcagt

SEQ ID NO: 220141 - DNA, 50 bp, Artificial
  Synthetic oligonucleotide
aaccgagttgaaccgcccgatgggatggacgggagcatggtcaaacgcga

SEQ ID NO: 220142 - DNA, 50 bp, Artificial
  Synthetic oligonucleotide
aaccgcaaccaccttcacgatgcgcgaattgcccgaccacacaaagcacg

SEQ ID NO: 220143 - DNA, 50 bp, Artificial
  Synthetic oligonucleotide
aaccgccgctaacgcggtacggctcattaaatcaacagcccgctatgcag

SEQ ID NO: 220144 - DNA, 50 bp, Artificial
  Synthetic oligonucleotide
aaccgcgattcgtccccctcatcttaaaacgctggagcgtcccactgcga

SEQ ID NO: 220145 - DNA, 50 bp, Artificial
  Synthetic oligonucleotide
aaccggaggcccgatccgatgaaaacgcagaccacagttcgtcgctcgaa

SEQ ID NO: 220146 - DNA, 50 bp, Artificial
  Synthetic oligonucleotide
aaccggcaagacgccccctccaatcgcccaaagtccattgcggacctggg

SEQ ID NO: 220147 - DNA, 50 bp, Artificial
  Synthetic oligonucleotide
aacgcgtgggttggggtccttcttaccgtgctcgaggcaaaccgccacga

SEQ ID NO: 220148 - DNA, 50 bp, Artificial
  Synthetic oligonucleotide
aacgcgttcccgccgctttacaggctccgtgctgcgaactgaaaacgggg

SEQ ID NO: 220149 - DNA, 50 bp, Artificial
  Synthetic oligonucleotide
aacgctccaggaatggcaccgaccgctgtgcagatcggcgagactctctt

SEQ ID NO: 220150 - DNA, 50 bp, Artificial
  Synthetic oligonucleotide
aacgctcgtcaagcgagacgcccaactgctccgagatcggtgattcgggc

SEQ ID NO: 220151 - DNA, 60 bp, Artificial
  Synthetic oligonucleotide
tagagccacccatctttgtaatcgaagagtatgaccctcccgcaaagcgtcaggcgtctg

SEQ ID NO: 220152 - DNA, 55 bp, Artificial
  Synthetic oligonucleotide
ctgaatctgtcgtttgaaccatcacagggcgtccgttcacctaggcgaaaattac

SEQ ID NO: 220153 - DNA, 50 bp, Artificial
  Synthetic oligonucleotide
aacggagcatcatctgccgctagcaaatcttagcgacgcggcctcgcaca

SEQ ID NO: 220154 - DNA, 50 bp, Artificial
  Synthetic oligonucleotide
aacggagccaagggagtaagtggtcaaggcgaaccctccgaatgcgcacg

SEQ ID NO: 220155 - DNA, 50 bp, Artificial
  Synthetic oligonucleotide
aacggcgacttccactttcgcaactcgcgggcttggggacaggcggcttg

SEQ ID NO: 220156 - DNA, 50 bp, Artificial
  Synthetic oligonucleotide
aacggcggtggaactctggccggtcccaggttaccacgggtatcattgcc

SEQ ID NO: 220157 - DNA, 50 bp, Artificial
  Synthetic oligonucleotide
aacggcgtccgggtttccttggcgaaaggggcggatttggaactgctaac

SEQ ID NO: 220158 - DNA, 50 bp, Artificial
  Synthetic oligonucleotide
aacggctgtgaaagagtcgcaaaccggcagatcccctgggcactgcgacg

SEQ ID NO: 220159 - DNA, 50 bp, Artificial
  Synthetic oligonucleotide
aacggcttgcgcacaaacgaatgggtgtgaatccgaagggggcctgtgat

SEQ ID NO: 220160 - DNA, 50 bp, Artificial
  Synthetic oligonucleotide
aacgggggtcggccggtcagcaacgtgtacagggtcgctcccagcgaata

SEQ ID NO: 220161 - DNA, 50 bp, Artificial
  Synthetic oligonucleotide
aacgggtcaacactcctcccggtggcatcgaggggagcaaaggctgcatg

SEQ ID NO: 220162 - DNA, 50 bp, Artificial
  Synthetic oligonucleotide
aacgggtggagcgggtgaacgaactgtacccgttgtgatcgggccgactt

SEQ ID NO: 220163 - DNA, 55 bp, Artificial
  Synthetic oligonucleotide
ctcgctgtgagcagggccggattgtccaagatttgattgacgcgaaggtcacccc

SEQ ID NO: 220164 - DNA, 50 bp, Artificial
  Synthetic oligonucleotide
aacgggtttcccagtgcaaagacccgcatcccggctcgaagttttcgcga

SEQ ID NO: 220165 - DNA, 50 bp, Artificial
  Synthetic oligonucleotide
aacggttccatgcccgccgagaactgggagccggtccaagcgtcccgtgg

SEQ ID NO: 220166 - DNA, 50 bp, Artificial
  Synthetic oligonucleotide
aacgtacggctggtgagggaatccgaggtagccgccatcctgatgccacg

SEQ ID NO: 220167 - DNA, 50 bp, Artificial
  Synthetic oligonucleotide
aacgacagacggtgtcgaccggaccatagggtgagcttcgaccggtgacg

SEQ ID NO: 220168 - DNA, 50 bp, Artificial
  Synthetic oligonucleotide
aacgaccaatcaggttgcctgcccgggagtggctgttgtctccacggtgt

SEQ ID NO: 220169 - DNA, 50 bp, Artificial
  Synthetic oligonucleotide
aacgacccggggaacggtggtgaacccggtagtgatacggcgcgagtagt

SEQ ID NO: 220170 - DNA, 50 bp, Artificial
  Synthetic oligonucleotide
aacgactcgaagccaattgggcgcgagcgctggaagttcctccccggaac

SEQ ID NO: 220171 - DNA, 50 bp, Artificial
  Synthetic oligonucleotide
aacgactcgcggaaagacgcatcgagtgcccgcggatgaccccaacctga

SEQ ID NO: 220172 - DNA, 50 bp, Artificial
  Synthetic oligonucleotide
aacgagcggcgtgtttccttcaccaagcgaaatgggatccatcgtgggga

SEQ ID NO: 220173 - DNA, 50 bp, Artificial
  Synthetic oligonucleotide
aacgatttgcccgtaaggtcgcaagtcgcggcgaaggctggagttgagga

SEQ ID NO: 220174 - DNA, 55 bp, Artificial
  Synthetic oligonucleotide
ctagcagcaacgcaatgcatgcgaaacggatgatcggaatgaccggtttgatgcg

SEQ ID NO: 220175 - DNA, 50 bp, Artificial
  Synthetic oligonucleotide
aacgcacggtgtttgacttccgcttccacacagccgcctccgagtgtgcc

SEQ ID NO: 220176 - DNA, 50 bp, Artificial
  Synthetic oligonucleotide
aacgcagctgccacggcgaccggcaaagggagtccagaccatctgaatcg

SEQ ID NO: 220177 - DNA, 50 bp, Artificial
  Synthetic oligonucleotide
aacgcattcgccacccgtgcaccaacgcaacggacgccgagacgccttaa

SEQ ID NO: 220178 - DNA, 50 bp, Artificial
  Synthetic oligonucleotide
aacgcccaaacggctcacatggttgtgcccgatcattccagccgacctgc

SEQ ID NO: 220179 - DNA, 50 bp, Artificial
  Synthetic oligonucleotide
aacgcccgacgtcattcgattcgcccgccaattcctcgctcgtgctgacg

SEQ ID NO: 220180 - DNA, 50 bp, Artificial
  Synthetic oligonucleotide
aacgcccgcagaaacaatccgttccgtcgagtgtctccgacactgcgcgt

SEQ ID NO: 220181 - DNA, 50 bp, Artificial
  Synthetic oligonucleotide
aacgcccgctcgcactaatccacttccgatcgctaggggctatgcggatg

SEQ ID NO: 220182 - DNA, 50 bp, Artificial
  Synthetic oligonucleotide
aacgccctcgtgcagttgctttcgcatctgctccgcggactgttcctgcc

SEQ ID NO: 220183 - DNA, 50 bp, Artificial
  Synthetic oligonucleotide
aacgccgacgcagacctccctcgaaccgcaacagtgctcaggcacgattg

SEQ ID NO: 220184 - DNA, 50 bp, Artificial
  Synthetic oligonucleotide
aacgcctgggtgccatggtagaattgcccgcagccgacttctccattcgc

SEQ ID NO: 220185 - DNA, 55 bp, Artificial
  Synthetic oligonucleotide
ctactgcgcgagactgtgtatccgctgggtgatgaagcctcactcaccaccaggc

SEQ ID NO: 220186 - DNA, 55 bp, Artificial
  Synthetic oligonucleotide
ctacatacatttaccgaactcgcagaacgtggacgggcgattgtgctgacggctg

SEQ ID NO: 220187 - DNA, 55 bp, Artificial
  Synthetic oligonucleotide
cgttgagaaagttcaagttatgcgagacttcgacaaaccgcacccctgactgcag

SEQ ID NO: 220188 - DNA, 55 bp, Artificial
  Synthetic oligonucleotide
cgtgttatgggctatgcaatggggtgctgctaagcctgccttatcggccgaaacc

SEQ ID NO: 220189 - DNA, 55 bp, Artificial
  Synthetic oligonucleotide
cgtcgtcatgttgaatttccatcagccgttgaatgatgcggcctgcgctcgattc

SEQ ID NO: 220190 - DNA, 55 bp, Artificial
  Synthetic oligonucleotide
cgtcctgaaaaccaactgtcgaacgagtagtgatcggacgtaagggtgatgccgg

SEQ ID NO: 220191 - DNA, 55 bp, Artificial
  Synthetic oligonucleotide
cggttaccaccgaatgcttacccacggtagctttaaaacaattgcaccgctgcga

SEQ ID NO: 220192 - DNA, 60 bp, Artificial
  Synthetic oligonucleotide
catgatcgttcgcgcctgaatggagttgctatcaaggacgcgagctgtcgtggtggggcc

SEQ ID NO: 220193 - DNA, 54 bp, Artificial
  Synthetic oligonucleotide
cggtactgtctgggcacaccgggctaccgctgcaaccgaccgacgggtaacaac

SEQ ID NO: 220194 - DNA, 55 bp, Artificial
  Synthetic oligonucleotide
cgggattcacgattccacgacaggaatcgccgttactgacgacgtggcatgaggt

SEQ ID NO: 220195 - DNA, 55 bp, Artificial
  Synthetic oligonucleotide
cggcttatcggcattgaacgaaagctggaacttcgtcggcccgatactacctgcc

SEQ ID NO: 220196 - DNA, 55 bp, Artificial
  Synthetic oligonucleotide
ccatactttcgcagcaaagcactatcgttgatccatcataagagcgaccaactcc

SEQ ID NO: 220197 - DNA, 55 bp, Artificial
  Synthetic oligonucleotide
ccagcagtcggggtcgcgaacaaagcctggcaacgagtcatcaaggggtgccaag

SEQ ID NO: 220198 - DNA, 55 bp, Artificial
  Synthetic oligonucleotide
ccaccgcgatcgttagtcaacgcccgtggtgagttgagtccaatcgaataagcgg

SEQ ID NO: 220199 - DNA, 55 bp, Artificial
  Synthetic oligonucleotide
catttcgtggcgtactacgagatcagaattttggagatctcttagtgggagggcg

SEQ ID NO: 220200 - DNA, 55 bp, Artificial
  Synthetic oligonucleotide
caggaaaacttgccggtcttctcatgagcaactcgtggactgttggccgcagtcc

SEQ ID NO: 220201 - DNA, 55 bp, Artificial
  Synthetic oligonucleotide
cagattgatctccatagaaacgcgaaacttctatactatcatacgcagagccccg

SEQ ID NO: 220202 - DNA, 55 bp, Artificial
  Synthetic oligonucleotide
cacgcgaccaccatgctttgccacgaactcttcggctcgttcggtgttgcggttg

SEQ ID NO: 220203 - DNA, 58 bp, Artificial
  Synthetic oligonucleotide
tgcggccgcaagttctttctcgggattcacacgaaggtgacctattcaactgaacgct

SEQ ID NO: 220204 - DNA, 55 bp, Artificial
  Synthetic oligonucleotide
cacgcattacgaaatcctattgtactgcaaatcgcgacaacaaatggtcccgggg

SEQ ID NO: 220205 - DNA, 55 bp, Artificial
  Synthetic oligonucleotide
cacctcgattgcaaccaacgtcaccaactgaaacgtcaacagtggcgggatgcac

SEQ ID NO: 220206 - DNA, 55 bp, Artificial
  Synthetic oligonucleotide
cacaaccgcctacttgctcgcgtcggcaggcaagtcagtagccgttcttgagagc

SEQ ID NO: 220207 - DNA, 55 bp, Artificial
  Synthetic oligonucleotide
caaggtctggtgaggacgccccccaaccggttatgatcacggctcgggagagtcc

SEQ ID NO: 220208 - DNA, 55 bp, Artificial
  Synthetic oligonucleotide
attaagaccctgtgtcgctcagatgcggcgatgccacttcccgctccgcgaagcg

SEQ ID NO: 220209 - DNA, 55 bp, Artificial
  Synthetic oligonucleotide
atcggctctcctcgacctgagccgttcctatcacccgcccggcgatccctatcct

SEQ ID NO: 220210 - DNA, 55 bp, Artificial
  Synthetic oligonucleotide
atcgattcgtgcaggcaactccccgtgcatgacgaacgctttatgtgacacgatc

SEQ ID NO: 220211 - DNA, 55 bp, Artificial
  Synthetic oligonucleotide
atcgaagagtatgaccctcccgcaaagcgtcaggcgtctgctgatgaatgctgga

SEQ ID NO: 220212 - DNA, 55 bp, Artificial
  Synthetic oligonucleotide
agatttaacacggtcacaggttgaaaatgctccggagtacgacccacgacttcca

SEQ ID NO: 220213 - DNA, 55 bp, Artificial
  Synthetic oligonucleotide
agaatcgccggtacgttcatgtgtaaaatcatctgtctagtccagcactcattcg

SEQ ID NO: 220214 - DNA, 57 bp, Artificial
  Synthetic oligonucleotide
atttatctcggaagtatttcaacgtatggaactcgcacagcgaagacccccggatca

SEQ ID NO: 220215 - DNA, 55 bp, Artificial
  Synthetic oligonucleotide
acgttgtcacgagcatcgttcgcttgggctcgtttgagggcgattcgctcttgtt

SEQ ID NO: 220216 - DNA, 55 bp, Artificial
  Synthetic oligonucleotide
acgttaccgcgttgcgttgcgaggctacgaaatcgtgtcggggatgattggcccg

SEQ ID NO: 220217 - DNA, 54 bp, Artificial
  Synthetic oligonucleotide
accttagtgaggaacgctgtgaacaacgccaaaccgacttccgaccgtcaatcc

SEQ ID NO: 220218 - DNA, 55 bp, Artificial
  Synthetic oligonucleotide
accagcgaaagcgtgtgggacgaatcgtgcgagttctctctgttcagcgtggtcg

SEQ ID NO: 220219 - DNA, 55 bp, Artificial
  Synthetic oligonucleotide
aagcggatccatcttgcgatgacacgtccagcagtagtcttctcgcgtgactcgc

SEQ ID NO: 220220 - DNA, 55 bp, Artificial
  Synthetic oligonucleotide
ccggtttccagtgaacctgaatcggtagctgcgattgaactggtcctccgcgatt

SEQ ID NO: 220221 - DNA, 55 bp, Artificial
  Synthetic oligonucleotide
ccggttggcggtgatatccagtgtgctcatgaagtcggcacctataatgaagtga

SEQ ID NO: 220222 - DNA, 55 bp, Artificial
  Synthetic oligonucleotide
ccgggttcggcgtgtcccacagttattctgtgcggaagggcctaccagcctcgta

SEQ ID NO: 220223 - DNA, 55 bp, Artificial
  Synthetic oligonucleotide
ccggctatctacgacgcaatcttttcatttaccgaacaggcggcagtcaactgca

SEQ ID NO: 220224 - DNA, 55 bp, Artificial
  Synthetic oligonucleotide
ccggaaaccctcgattgatggcacaactgacgaggagtgagcctgtttcaggttc

SEQ ID NO: 220225 - DNA, 60 bp, Artificial
  Synthetic oligonucleotide
gtgcttatcacacctcagacaaccctgcttgattgttcttccctgtttgaacaaggcagg

SEQ ID NO: 220226 - DNA, 55 bp, Artificial
  Synthetic oligonucleotide
ccgcccatcccagcgaagcggtcgacactcacaaacaagcgaagctgacgcgact

SEQ ID NO: 220227 - DNA, 55 bp, Artificial
  Synthetic oligonucleotide
aacgattctgtggcgaacgagggaaatgaaacggccaatttatcgctgactcccc

SEQ ID NO: 220228 - DNA, 55 bp, Artificial
  Synthetic oligonucleotide
ccgcacggtcaaagggtgctgtttacgagagtagtccagaaggtcaactccctgt

SEQ ID NO: 220229 - DNA, 55 bp, Artificial
  Synthetic oligonucleotide
ccgatcaaatgacgtggattaccctgtcgcaggtactcacttcgattggtatgag

SEQ ID NO: 220230 - DNA, 55 bp, Artificial
  Synthetic oligonucleotide
ccgacttgaacttgcggacctcaaatcgcaacggattgagaaacttcggctggtt

SEQ ID NO: 220231 - DNA, 55 bp, Artificial
  Synthetic oligonucleotide
aacgccaagtcagcgggacggttcgacggcttgccaagagtatagacggccggtc

SEQ ID NO: 220232 - DNA, 55 bp, Artificial
  Synthetic oligonucleotide
cccttgctgtccgaaacagacagtagttcgtgccatacagcatcaggcacacccc

SEQ ID NO: 220233 - DNA, 55 bp, Artificial
  Synthetic oligonucleotide
ccctgggcgatcccgtttccccaggggagtccgccgtatgagcgacaactagaga

SEQ ID NO: 220234 - DNA, 55 bp, Artificial
  Synthetic oligonucleotide
cccgtggtcgtagtaatcgtagaaccaagtgtcactcgaatcagtatcggcgtag

SEQ ID NO: 220235 - DNA, 55 bp, Artificial
  Synthetic oligonucleotide
cccgtcaatcgaatcgaattaacgacccgcgtccgctctctgttacgtgtcagac

SEQ ID NO: 220236 - DNA, 60 bp, Artificial
  Synthetic oligonucleotide
actctgattcccttcccaagcaaataacttagtagcatatgaatcatagtcagcattaca

SEQ ID NO: 220237 - DNA, 54 bp, Artificial
  Synthetic oligonucleotide
ctgggcaggtcgcgaagaaaaacttccggaatggtttgcgacaaaagatgaacc

SEQ ID NO: 220238 - DNA, 55 bp, Artificial
  Synthetic oligonucleotide
gccctccgttaaatgacacactttcaattgcagacattacgttcgcagataagtc

SEQ ID NO: 220239 - DNA, 55 bp, Artificial
  Synthetic oligonucleotide
gccctgtgcataccgcgtagatagtcccaatacttctcttaaaaccatttataag

SEQ ID NO: 220240 - DNA, 55 bp, Artificial
  Synthetic oligonucleotide
gccgagtggccatccttatcgatccacattccgattgtttcacactccataggag

SEQ ID NO: 220241 - DNA, 55 bp, Artificial
  Synthetic oligonucleotide
gcctacctcttttacctcaatagataggctctgacacagtaagcttcctttgcgt

SEQ ID NO: 220242 - DNA, 55 bp, Artificial
  Synthetic oligonucleotide
gctagccatggaaatagcggtaattggggcaatgccttgtttaatagctgttcga

SEQ ID NO: 220243 - DNA, 55 bp, Artificial
  Synthetic oligonucleotide
gctcttgcttcgtatgtcacggattctagtggcgctttaagtaagtcatcgatcg

SEQ ID NO: 220244 - DNA, 55 bp, Artificial
  Synthetic oligonucleotide
gcttaggcttaatccttccggtgcatacatccaatacgttatgacgactgccgtc

SEQ ID NO: 220245 - DNA, 55 bp, Artificial
  Synthetic oligonucleotide
ggcgagtttcataagaaaaccggattaaatgtcatcacgactgcgagtccagaag

SEQ ID NO: 220246 - DNA, 55 bp, Artificial
  Synthetic oligonucleotide
gggacagatttgaagcgggataacttacggatggaccagcatgtattggtagggc

SEQ ID NO: 220247 - DNA, 56 bp, Artificial
  Synthetic oligonucleotide
cttaagtaatgccatacataggttattctctagaaataaaactagtcaaacaccaa

SEQ ID NO: 220248 - DNA, 55 bp, Artificial
  Synthetic oligonucleotide
gggatacgatcgttggtaccacctgagtcaacggtaagagattcccaggttagcg

SEQ ID NO: 220249 - DNA, 55 bp, Artificial
  Synthetic oligonucleotide
ggggtgatttacgggttatccagttcgatttatactgcagatgtaaaccgtgcgt

SEQ ID NO: 220250 - DNA, 55 bp, Artificial
  Synthetic oligonucleotide
cgaattcgaaactctctcttaactaaagcagaacggtcagtggccacttcctcac

SEQ ID NO: 220251 - DNA, 55 bp, Artificial
  Synthetic oligonucleotide
cacgtaacggccacggtgcaggcaatattatcgcaacattaaaaggcgatgagtc

SEQ ID NO: 220252 - DNA, 55 bp, Artificial
  Synthetic oligonucleotide
cgaaagctcacctggtgcaaagcctttcacccaacgtgtcggaatccctgccgaa

SEQ ID NO: 220253 - DNA, 55 bp, Artificial
  Synthetic oligonucleotide
aagcatgaacgcatatgatgaatacatgaagggcattgtggtgccaatgcgccaa

SEQ ID NO: 220254 - DNA, 54 bp, Artificial
  Synthetic oligonucleotide
cctgcgttacggtaaacgagtcgactacaatgaagaaccgattattcgcggtac

SEQ ID NO: 220255 - DNA, 55 bp, Artificial
  Synthetic oligonucleotide
ccgcttcataatgcccgcggcccacttttgcggttctgtatgaattagttgatcg

SEQ ID NO: 220256 - DNA, 55 bp, Artificial
  Synthetic oligonucleotide
agctgctcggctcggttacgtgcataagcatgtcggaatccatgcgtcccacgat

SEQ ID NO: 220257 - DNA, 56 bp, Artificial
  Synthetic oligonucleotide
cttaatgagaaagatccgggagtgcccatctatacaccctaaaaaatcaggtatat

SEQ ID NO: 220258 - DNA, 55 bp, Artificial
  Synthetic oligonucleotide
ccgctaatccgctcatagcctcgatatgccatactaattgaacgccacggccgct

SEQ ID NO: 220259 - DNA, 55 bp, Artificial
  Synthetic oligonucleotide
cagcagcggcagcaacagaagaaaacgaaaagcagatctagtggcatggagttgt

SEQ ID NO: 220260 - DNA, 55 bp, Artificial
  Synthetic oligonucleotide
cagctagactcttatgtaacaagaccaggcggagcttacgagttgtcaccattag

SEQ ID NO: 220261 - DNA, 55 bp, Artificial
  Synthetic oligonucleotide
ccgagtggatatccgaaacgcttacgcgatcaatcatttattcgagctttatgac

SEQ ID NO: 220262 - DNA, 55 bp, Artificial
  Synthetic oligonucleotide
acaggttatcggaaagctacacgcgagcaaatcacagatccgtcttatatccgat

SEQ ID NO: 220263 - DNA, 55 bp, Artificial
  Synthetic oligonucleotide
ccgaagagtgggtaacaccagaggatttagaacagcttgcaattactatggcgac

SEQ ID NO: 220264 - DNA, 55 bp, Artificial
  Synthetic oligonucleotide
ccctacacctatgatcacaccacctaccacggtcactaacagagtgtccccttga

SEQ ID NO: 220265 - DNA, 55 bp, Artificial
  Synthetic oligonucleotide
catgaattgctttatcgttctgcctttcgaaatcctggctacaaagctgccgacc

SEQ ID NO: 220266 - DNA, 55 bp, Artificial
  Synthetic oligonucleotide
agacatcgcagccatccagtactagcgcctgttttcggttgttttccgtcatcgg

SEQ ID NO: 220267 - DNA, 60 bp, Artificial
  Synthetic oligonucleotide
ccgtatagcaatcaatatcgacgtataagttgtgcaacgtacgcagcgttctgatattac

SEQ ID NO: 220268 - DNA, 55 bp, Artificial
  Synthetic oligonucleotide
cgcttcacaatgaatctgttgagtatcagaggaaattctttgaggaaacatacga

SEQ ID NO: 220269 - DNA, 55 bp, Artificial
  Synthetic oligonucleotide
cgctgcgagaaatcaatttaaagaggactgctcaattcacttgttctgaatggag

SEQ ID NO: 220270 - DNA, 55 bp, Artificial
  Synthetic oligonucleotide
cgcgtcggggacctgttaaacatcaaagtgagtgagatccagggcaaacaagtcg

SEQ ID NO: 220271 - DNA, 55 bp, Artificial
  Synthetic oligonucleotide
aactcttccaactgcctgcttgtcgaaacgcaagactgtcgtgtcagctacacgc

SEQ ID NO: 220272 - DNA, 55 bp, Artificial
  Synthetic oligonucleotide
cgcataaaagcttgatctattccgaaagatagtaagtagagaacgttttccacag

SEQ ID NO: 220273 - DNA, 55 bp, Artificial
  Synthetic oligonucleotide
cgcactttatgcgacaagttacgggccacgtgaactaagcacgtctggtactgtg

SEQ ID NO: 220274 - DNA, 53 bp, Artificial
  Synthetic oligonucleotide
aacttccggaatggtttgcgacaaaagatgaaccgtatgaaccggttgaacca

SEQ ID NO: 220275 - DNA, 55 bp, Artificial
  Synthetic oligonucleotide
cgatatggcgacagtgagcttccacttagggacagagcttgtcaccatcgattta

SEQ ID NO: 220276 - DNA, 58 bp, Artificial
  Synthetic oligonucleotide
cttacgaccgctttagcctctgaaactggcgatacattcattaaggtgtacgatgccg

SEQ ID NO: 220277 - DNA, 55 bp, Artificial
  Synthetic oligonucleotide
caaggtctatatgtaccgacttacgtgataaagggcgatcaagagcgcggcattg

SEQ ID NO: 220278 - DNA, 55 bp, Artificial
  Synthetic oligonucleotide
cacggcctataacggatcgcccggtttgatcgattactccgcaacgaaaggcgcc

SEQ ID NO: 220279 - DNA, 55 bp, Artificial
  Synthetic oligonucleotide
cgacagaatcagagacgatgaataatgtaaaattcggcataccgtcactcctcat

SEQ ID NO: 220280 - DNA, 52 bp, Artificial
  Synthetic oligonucleotide
cgacttagtcgccttaattaattccgtttcatttaacggctccacaaataaa

SEQ ID NO: 220281 - DNA, 54 bp, Artificial
  Synthetic oligonucleotide
ttcggtgttgactcccagtgaagtaagcgcgaaattaaaaatccaaccctccac

SEQ ID NO: 220282 - DNA, 54 bp, Artificial
  Synthetic oligonucleotide
gtatattgtgggcagcttccagctgtaaataatgcggagcattgaacaagcagt

SEQ ID NO: 220283 - DNA, 54 bp, Artificial
  Synthetic oligonucleotide
tcacgggcttgtaactccgactgtaacgacgttataagttccgcaacgtgtgtt

SEQ ID NO: 220284 - DNA, 53 bp, Artificial
  Synthetic oligonucleotide
attgcccatatgtccgaggcgaaaagctttaccggccaagtgagctaacgaac

SEQ ID NO: 220285 - DNA, 53 bp, Artificial
  Synthetic oligonucleotide
tacgcaaacgtgaaatgcaacacgccctattagtgggaatcgaactcgacgaa

SEQ ID NO: 220286 - DNA, 53 bp, Artificial
  Synthetic oligonucleotide
cggagttaactggatgcttgaccatcgctcgaaaggtatagagcttttaatga

SEQ ID NO: 220287 - DNA, 55 bp, Artificial
  Synthetic oligonucleotide
ggaattgttgctggaaaaacctttacataggatagatgacggcggtttttctaca

SEQ ID NO: 220288 - DNA, 53 bp, Artificial
  Synthetic oligonucleotide
actgaaagcaacaatcgccagcccaggaggaataccaatcgccttttgagatc

SEQ ID NO: 220289 - DNA, 53 bp, Artificial
  Synthetic oligonucleotide
taatgattctgcactgcagatgcttaacctgacgacggatttggtgattaacc

SEQ ID NO: 220290 - DNA, 53 bp, Artificial
  Synthetic oligonucleotide
atgccacttcgccagagcgtcttatgcccgtcgaatctacacggcagcctccg

SEQ ID NO: 220291 - DNA, 53 bp, Artificial
  Synthetic oligonucleotide
tcggtcatgttcaagcgcatctgcatgtggcatcgcagaatgttcgttccacg

SEQ ID NO: 220292 - DNA, 53 bp, Artificial
  Synthetic oligonucleotide
aagttactatgctgactaccaaatttgcttctgccacctatctatcacctgcc

SEQ ID NO: 220293 - DNA, 52 bp, Artificial
  Synthetic oligonucleotide
ggggttcaaaggcatgagttattccattattcgagttcaaaagatgaatggc

SEQ ID NO: 220294 - DNA, 52 bp, Artificial
  Synthetic oligonucleotide
atgtaagtacttttgttaccggcgcaaacagtgcatctattcgttcgacagc

SEQ ID NO: 220295 - DNA, 52 bp, Artificial
  Synthetic oligonucleotide
gcttcctacatcgtggacggtacctttgacgtcacatgctaaaatgcgctcg

SEQ ID NO: 220296 - DNA, 52 bp, Artificial
  Synthetic oligonucleotide
agtttagctacggtcgtacaagactcagagctgcatgaagaaggtgcggact

SEQ ID NO: 220297 - DNA, 52 bp, Artificial
  Synthetic oligonucleotide
aaacaatcaacttaaacgaagagtcgattcatgcgccgctaaggggacaagt

SEQ ID NO: 220298 - DNA, 56 bp, Artificial
  Synthetic oligonucleotide
gctgggaggaaatcgagtggttctattggagaagtagatactttaataataacttc

SEQ ID NO: 220299 - DNA, 52 bp, Artificial
  Synthetic oligonucleotide
ccacgatataaaattacacgtcatgatcaggaagggaatcctacgctcagct

SEQ ID NO: 220300 - DNA, 52 bp, Artificial
  Synthetic oligonucleotide
cttttccgcaccgctttagccgtactcggcatggcctctgtagaaagtcagg

SEQ ID NO: 220301 - DNA, 52 bp, Artificial
  Synthetic oligonucleotide
ttatacttagtgggcgatttgcgctctgctcaagttgtttcgatcatcggta

SEQ ID NO: 220302 - DNA, 52 bp, Artificial
  Synthetic oligonucleotide
cgagtcacctgaccactcgaaagaaaacgtcgttacggaaatagtgcgttca

SEQ ID NO: 220303 - DNA, 52 bp, Artificial
  Synthetic oligonucleotide
cgtcggacgctgggtataatttatcctcgtcttggcaaagtttataaaagcg

SEQ ID NO: 220304 - DNA, 51 bp, Artificial
  Synthetic oligonucleotide
gcttaggcggcggtgtcggggtaaacttgaccgatctgcgtccgttgggtg

SEQ ID NO: 220305 - DNA, 51 bp, Artificial
  Synthetic oligonucleotide
attgaccgcttgtaacccgcgaccgaaagcgatggcgtggtctgggtctgt

SEQ ID NO: 220306 - DNA, 51 bp, Artificial
  Synthetic oligonucleotide
aaagcgcagcaacacgtgtccgaatgtccgtgtttggatggctgccccgcg

SEQ ID NO: 220307 - DNA, 51 bp, Artificial
  Synthetic oligonucleotide
atgtccgtgtttggatggctgccccgcgtgtatcggtgcacaagatgccgc

SEQ ID NO: 220308 - DNA, 51 bp, Artificial
  Synthetic oligonucleotide
ggagttagtatctactcctgatttcggtacaaccgaacttgctcccatcgg

SEQ ID NO: 220309 - DNA, 59 bp, Artificial
  Synthetic oligonucleotide
ccgcaacgtgtgttggcacggtcggcacttgtgactgtgtgacgggtagtacatcggct

SEQ ID NO: 220310 - DNA, 51 bp, Artificial
  Synthetic oligonucleotide
aaatcgtttatgtggctcgggtgctcaagcggtcgttacagccgcgcagca

SEQ ID NO: 220311 - DNA, 51 bp, Artificial
  Synthetic oligonucleotide
aacacgtgtccgaatgtccgtgtttggatggctgccccgcgtgtatcggtg

SEQ ID NO: 220312 - DNA, 51 bp, Artificial
  Synthetic oligonucleotide
atcggccgtcacgcttatcccacaggagtcgccgccttctgttccatgtgc

SEQ ID NO: 220313 - DNA, 51 bp, Artificial
  Synthetic oligonucleotide
ttgagagtctatttatatgttaccgccattcagaacaagtgaatcgagcag

SEQ ID NO: 220314 - DNA, 51 bp, Artificial
  Synthetic oligonucleotide
atatagccttcaattgcttccctaatcgctttagggaccataaaccgtttg

SEQ ID NO: 220315 - DNA, 51 bp, Artificial
  Synthetic oligonucleotide
aagaagtagttatgttgccagcggaacgctacgagaaaatgaaagagttat

SEQ ID NO: 220316 - DNA, 51 bp, Artificial
  Synthetic oligonucleotide
atactccgaaaacagtccgcccactaaggggccaatcgccggtgcaaaggc

SEQ ID NO: 220317 - DNA, 51 bp, Artificial
  Synthetic oligonucleotide
tgtgtgcgttcaaaacggctgccgaatgggtccataccgttttcacgaata

SEQ ID NO: 220318 - DNA, 51 bp, Artificial
  Synthetic oligonucleotide
aagcgaaattagagctcgctttccacgggcggtgccaatcctcctcgtcgc

SEQ ID NO: 220319 - DNA, 51 bp, Artificial
  Synthetic oligonucleotide
aatcctgtcgctctgccgacagtgcccccgtgccaatcccaaatggtgttg

SEQ ID NO: 220320 - DNA, 59 bp, Artificial
  Synthetic oligonucleotide
gccgctatatgtgacgatgttaggtttcggaattgatacgccgtaatgatcgttttcta

SEQ ID NO: 220321 - DNA, 51 bp, Artificial
  Synthetic oligonucleotide
agcgcagtgctgtcggggacttcgaagagtttgcacgggtcctttcccact

SEQ ID NO: 220322 - DNA, 51 bp, Artificial
  Synthetic oligonucleotide
tcggatccacatacgtcagggtgcctgtcccctcagtccggtctttcaaaa

SEQ ID NO: 220323 - DNA, 51 bp, Artificial
  Synthetic oligonucleotide
actgtgtgacgggtagtacatcggcttgaccatcgttatgtacgtcgctat

SEQ ID NO: 220324 - DNA, 51 bp, Artificial
  Synthetic oligonucleotide
taatgcgtgcggtattccgagcataactaggctcatttgttcaagtgcaga

SEQ ID NO: 220325 - DNA, 51 bp, Artificial
  Synthetic oligonucleotide
agccttggtcgctccactccgctagttgctgagccgtaatcgggcccacat

SEQ ID NO: 220326 - DNA, 51 bp, Artificial
  Synthetic oligonucleotide
agcgaaaagcgacaaacccaaacggcgttgccttatgcacgtttcccggga

SEQ ID NO: 220327 - DNA, 51 bp, Artificial
  Synthetic oligonucleotide
cactgtttcagacttacttggcttaccgaaggatcaatcattgcatgaatt

SEQ ID NO: 220328 - DNA, 51 bp, Artificial
  Synthetic oligonucleotide
gccgccctttaactgtgtcgcaccagatgccacttgacgtgatccggacgc

SEQ ID NO: 220329 - DNA, 51 bp, Artificial
  Synthetic oligonucleotide
gccattttcggccagtataccgcgtatattcagcggtcgattcacttagga

SEQ ID NO: 220330 - DNA, 51 bp, Artificial
  Synthetic oligonucleotide
ccgaatgtccgcaaaaagctgactgtagacgttgctgcaccgcgcttgcga

SEQ ID NO: 220331 - DNA, 60 bp, Artificial
  Synthetic oligonucleotide
gaagaagtgtacctatgcagaagtcttacttggaactatggttttagcaggatgtaatga

SEQ ID NO: 220332 - DNA, 51 bp, Artificial
  Synthetic oligonucleotide
cgagcactcggccaattgcgagttgtttggcgtcgctgtcgactagctcga

SEQ ID NO: 220333 - DNA, 51 bp, Artificial
  Synthetic oligonucleotide
ctaaaaacgtcgccgtgcgacaacggctgactgacccacgtcctgtaggcc

SEQ ID NO: 220334 - DNA, 51 bp, Artificial
  Synthetic oligonucleotide
attttccgcgcacgctaatcccctaggagtcgcccccttcgcttcgcgtca

SEQ ID NO: 220335 - DNA, 51 bp, Artificial
  Synthetic oligonucleotide
ccaaagcgacggctgggtcgcgtacgaaaacaacacacccgtttacggcga

SEQ ID NO: 220336 - DNA, 51 bp, Artificial
  Synthetic oligonucleotide
ccaattatccaggtgtcgacggcacaggcaatagcgaatctgaacgcacag

SEQ ID NO: 220337 - DNA, 51 bp, Artificial
  Synthetic oligonucleotide
gatgagcccgggagtctcgacatcttcccaagggcgattatgcagcgcgac

SEQ ID NO: 220338 - DNA, 51 bp, Artificial
  Synthetic oligonucleotide
gatacagtccgcgtgtgtaatagtcgacaaacgatgcgctacaatcagagt

SEQ ID NO: 220339 - DNA, 51 bp, Artificial
  Synthetic oligonucleotide
cggggcagaggcggccatcgtacgtcctcagatcatttcgggtacacatgc

SEQ ID NO: 220340 - DNA, 51 bp, Artificial
  Synthetic oligonucleotide
attggtgtcgcggtgcacttgccgggtgatgacacaagcagctggctatca

SEQ ID NO: 220341 - DNA, 51 bp, Artificial
  Synthetic oligonucleotide
gctcattttcaagcgggtgctccgtttccaatttcagcactcgagttgggg

SEQ ID NO: 220342 - DNA, 57 bp, Artificial
  Synthetic oligonucleotide
cgttgtcgtatcaagtgtttaaggcgatttctagactcctgttttcacgtgtgacta

SEQ ID NO: 220343 - DNA, 57 bp, Artificial
  Synthetic oligonucleotide
cacctgataaactaaaagggctggcccaagtagaagagaaattcgtggcagcaagct

SEQ ID NO: 220344 - DNA, 51 bp, Artificial
  Synthetic oligonucleotide
attgatgcgtgccccctccgcgttggaagaccgtttaagccgttcactcgg

SEQ ID NO: 220345 - DNA, 50 bp, Artificial
  Synthetic oligonucleotide
accaatccgctcctccaagaacagcagcgaacgcggaattcccgccacgc

SEQ ID NO: 220346 - DNA, 50 bp, Artificial
  Synthetic oligonucleotide
gacgggctaacaggagccgaggcccacacacgtgccacagtggatacggc

SEQ ID NO: 220347 - DNA, 50 bp, Artificial
  Synthetic oligonucleotide
ccctgtcttctcctggtcagatgcatcccgcggcaataggactccgcacg

SEQ ID NO: 220348 - DNA, 50 bp, Artificial
  Synthetic oligonucleotide
acccgaaagcgcggtgctacagagagggaagacgcggccttacagcagga

SEQ ID NO: 220349 - DNA, 50 bp, Artificial
  Synthetic oligonucleotide
acctactaattcaacgcgtctgccaatcacactaggaacgcctgtctccg

SEQ ID NO: 220350 - DNA, 50 bp, Artificial
  Synthetic oligonucleotide
acaacgacgcaactcatacccgcgcgttttgcagcagtcgcaccgtgagc

SEQ ID NO: 220351 - DNA, 50 bp, Artificial
  Synthetic oligonucleotide
ccgcatgaaagtagcagatggacggctcgcgtgtcagccatgttcggccg

SEQ ID NO: 220352 - DNA, 50 bp, Artificial
  Synthetic oligonucleotide
ccgccgctgatcagaggggcagagttaagaacttcaaggacggggcgcca

SEQ ID NO: 220353 - DNA, 50 bp, Artificial
  Synthetic oligonucleotide
gaaaagattcagataaggtcactagtgttaaatttagccaatggaatccg

SEQ ID NO: 220354 - DNA, 55 bp, Artificial
  Synthetic oligonucleotide
gaagaatttaaacccgaagagtgggtaacaccagaggatttagaacagcttgcaa

SEQ ID NO: 220355 - DNA, 50 bp, Artificial
  Synthetic oligonucleotide
tgctgcaccgcgcttgcgaatcgaaaatggatggattgcggctgaaggga

SEQ ID NO: 220356 - DNA, 50 bp, Artificial
  Synthetic oligonucleotide
cggaaagcccccttcatcatcaggattacttaacctcctaaaacattacc

SEQ ID NO: 220357 - DNA, 50 bp, Artificial
  Synthetic oligonucleotide
cgctttccgcgggcccggtctgaacttgtagtctcagacgtctggctgtt

SEQ ID NO: 220358 - DNA, 50 bp, Artificial
  Synthetic oligonucleotide
ttgttcggcacaacgacgcaactcatacccgcgcgttttgcagcagtcgc

SEQ ID NO: 220359 - DNA, 50 bp, Artificial
  Synthetic oligonucleotide
ttgcgctgatccgtacaacccgaaaacggttcgttcggcacaagggtcgc

SEQ ID NO: 220360 - DNA, 50 bp, Artificial
  Synthetic oligonucleotide
cggtcggcatttgtccgtctgcctcctcggctcacttgtgtgcgaatgct

SEQ ID NO: 220361 - DNA, 50 bp, Artificial
  Synthetic oligonucleotide
aacgacagaggaccgcgccaaagtgcttcggcaccgagccaaaagctttc

SEQ ID NO: 220362 - DNA, 50 bp, Artificial
  Synthetic oligonucleotide
cgctccactccgctagttgctgagccgtaatcgggcccacatatccggta

SEQ ID NO: 220363 - DNA, 50 bp, Artificial
  Synthetic oligonucleotide
cgcggaaccgtagccccgaaggactcgagtcgccgtgtttcctgtgtaca

SEQ ID NO: 220364 - DNA, 50 bp, Artificial
  Synthetic oligonucleotide
cgtgcccccgactctcgtgaacgatcaccgcgacaatggagcgggacaag

SEQ ID NO: 220365 - DNA, 59 bp, Artificial
  Synthetic oligonucleotide
gaagccggtggaaagattacgttcgctgatctacgaccagtgaaagagcgctgggcagg

SEQ ID NO: 220366 - DNA, 50 bp, Artificial
  Synthetic oligonucleotide
aagacggctggtctgaggcgacaggcataagacgaagatgcggagtggcg

SEQ ID NO: 220367 - DNA, 50 bp, Artificial
  Synthetic oligonucleotide
aagcacgatgcctgtgactccaaggtcacgagtgcccgtggaaagcgtcc

SEQ ID NO: 220368 - DNA, 50 bp, Artificial
  Synthetic oligonucleotide
ctgcggggtcgaccgttgccgtgagccaactagcgcgctctttgctagtt

SEQ ID NO: 220369 - DNA, 50 bp, Artificial
  Synthetic oligonucleotide
ttacctctcgtattgccgcctactgtagtggggtttggtctgctcatttt

SEQ ID NO: 220370 - DNA, 50 bp, Artificial
  Synthetic oligonucleotide
cgaaccccgttacgggaacggcactaccagctccggcaaattggccaagt

SEQ ID NO: 220371 - DNA, 50 bp, Artificial
  Synthetic oligonucleotide
cctggttccgcggacacttcatgggtttgcacggacactcccgcgaattc

SEQ ID NO: 220372 - DNA, 50 bp, Artificial
  Synthetic oligonucleotide
cttactgccggataatggaccttcagcaagaaaagaggatccgcaaaagc

SEQ ID NO: 220373 - DNA, 50 bp, Artificial
  Synthetic oligonucleotide
aagtgccgggatcacagctccgactaaaccgaagacgcttcctgcaccga

SEQ ID NO: 220374 - DNA, 50 bp, Artificial
  Synthetic oligonucleotide
gcttctcctttggaaggatagcgttcggtgcgtctcacggccgctctccc

SEQ ID NO: 220375 - DNA, 50 bp, Artificial
  Synthetic oligonucleotide
ggaagcttccggtctacgcggaatcccccgaagtgtccgggtaaactacc

SEQ ID NO: 220376 - DNA, 58 bp, Artificial
  Synthetic oligonucleotide
gaccgctgtacattcgataattcaactcgttacgtgagacattatagccgttcttttc

SEQ ID NO: 220377 - DNA, 50 bp, Artificial
  Synthetic oligonucleotide
gcggccccaacgccgggcaaatagtaaattcccaacaccggtggcactaa

SEQ ID NO: 220378 - DNA, 50 bp, Artificial
  Synthetic oligonucleotide
ggacacttcatgggtttgcacggacactcccgcgaattccgcggacacca

SEQ ID NO: 220379 - DNA, 50 bp, Artificial
  Synthetic oligonucleotide
atgtcccgccgacacttcccatctgcaatgtcccaagcgtctttccggca

SEQ ID NO: 220380 - DNA, 50 bp, Artificial
  Synthetic oligonucleotide
gcgccggagtgtagacggccagcggtttcaatgtcgaacccggttgtcgg

SEQ ID NO: 220381 - DNA, 50 bp, Artificial
  Synthetic oligonucleotide
gcctgactgcgctcttctgccggtacactgtcgaatgcggctccgcttgg

SEQ ID NO: 220382 - DNA, 50 bp, Artificial
  Synthetic oligonucleotide
atgggaggactcggcggctcagcgcctcctgtattgattgatggggtgac

SEQ ID NO: 220383 - DNA, 50 bp, Artificial
  Synthetic oligonucleotide
ggcgcgtcagcgggctaggtgaagcgaaaagaccggtgcacttccgggct

SEQ ID NO: 220384 - DNA, 50 bp, Artificial
  Synthetic oligonucleotide
gccgtcttatttccgatgttttgcggtccgccgctgatcagaggggcaga

SEQ ID NO: 220385 - DNA, 50 bp, Artificial
  Synthetic oligonucleotide
atcggagggacccgaaagcgcggtgctacagagagggaagacgcggcctt

SEQ ID NO: 220386 - DNA, 50 bp, Artificial
  Synthetic oligonucleotide
gccggcacaaacaaatgcgatgaactcgttggcaccacataaatttgctg

SEQ ID NO: 220387 - DNA, 60 bp, Artificial
  Synthetic oligonucleotide
gcacttgcataccgtgacaacgcccaacgcatatcttcgatttcctgagccgatcttaac

SEQ ID NO: 220388 - DNA, 50 bp, Artificial
  Synthetic oligonucleotide
atcctcgcttatattgtttggcgcaacctgcggacttcctggggccgtgc

SEQ ID NO: 220389 - DNA, 50 bp, Artificial
  Synthetic oligonucleotide
caagagctttactgcgtatgctccttcggcccgcagacgagcccgggtag

SEQ ID NO: 220390 - DNA, 50 bp, Artificial
  Synthetic oligonucleotide
atagcgcgttcctttgcatgcttcgcaagtaacggtcacgggatccgcga

SEQ ID NO: 220391 - DNA, 50 bp, Artificial
  Synthetic oligonucleotide
gtaaaaaccttttacttaacgaggagctgagcagtttgttcaagtcgtat

SEQ ID NO: 220392 - DNA, 50 bp, Artificial
  Synthetic oligonucleotide
gtaatcacatagcacgttgtgctgcgttgcggggcacgctttcctggggg

SEQ ID NO: 220393 - DNA, 50 bp, Artificial
  Synthetic oligonucleotide
gtcccgggaaaatacgcgcgctccgcgaaacttatgcgtggtcctgacga

SEQ ID NO: 220394 - DNA, 50 bp, Artificial
  Synthetic oligonucleotide
gcccggtgacatttccgggaacctctccgataagtggcattcctggcggg

SEQ ID NO: 220395 - DNA, 50 bp, Artificial
  Synthetic oligonucleotide
agggggcggccatgaaaccgcatacggacactacctaggcgttcgggaat

SEQ ID NO: 220396 - DNA, 50 bp, Artificial
  Synthetic oligonucleotide
agcgtgtatatgcgcaaactttcggggcagaggcggccatcgtacgtcct

SEQ ID NO: 220397 - DNA, 50 bp, Artificial
  Synthetic oligonucleotide
gccagctagcgaagttcatgctagcagtctcatggcaacggccgaccccg

SEQ ID NO: 220398 - DNA, 60 bp, Artificial
  Synthetic oligonucleotide
cattgcagcattaggctgtttgatttatctagttaccgaccaattctagccatcgggaat

SEQ ID NO: 220399 - DNA, 50 bp, Artificial
  Synthetic oligonucleotide
gcaggcggtcatatcgcacgcacggactcgcccatttgcacacatatggg

SEQ ID NO: 220400 - DNA, 50 bp, Artificial
  Synthetic oligonucleotide
gcagcattcatgaacccccacggcgggcgatacagagttggctgttcacc

SEQ ID NO: 220401 - DNA, 50 bp, Artificial
  Synthetic oligonucleotide
gcacctatgttgaatccaccagagttgctttatgaatggcaacaaaagct

SEQ ID NO: 220402 - DNA, 50 bp, Artificial
  Synthetic oligonucleotide
catgctagcagtctcatggcaacggccgaccccgcagttgcggcttcgct

SEQ ID NO: 220403 - DNA, 50 bp, Artificial
  Synthetic oligonucleotide
tatcacaggcgggaaagatggcgctttagcgggagactccacaggcacta

SEQ ID NO: 220404 - DNA, 50 bp, Artificial
  Synthetic oligonucleotide
ccccgaaggactcgagtcgccgtgtttcctgtgtacacctcttgccccca

SEQ ID NO: 220405 - DNA, 50 bp, Artificial
  Synthetic oligonucleotide
cccgtctggagcgcaaatccccggacctacgcccatgttcctttcttgcg

SEQ ID NO: 220406 - DNA, 50 bp, Artificial
  Synthetic oligonucleotide
tccgctagttgctgagccgtaatcgggcccacatatccggtaacgtgcga

SEQ ID NO: 220407 - DNA, 57 bp, Artificial
  Synthetic oligonucleotide
gattggggtcgttgcctttgtgattcaacgttcaagccgttccaggaaagcagtcga

SEQ ID NO: 220408 - DNA, 57 bp, Artificial
  Synthetic oligonucleotide
ccacccgaatggtaggacgggccatgttgaaaagcgaggactacgatacactcgtca

SEQ ID NO: 220409 - DNA, 60 bp, Artificial
  Synthetic oligonucleotide
ttcagcgaatgtccacaatgatgaaacaacccctcacatgcattttgattttgttccggt

SEQ ID NO: 220410 - DNA, 57 bp, Artificial
  Synthetic oligonucleotide
aacttcttctgtctctggagattcaaacattacatctttgatgtaaaggaaccctag

SEQ ID NO: 220411 - DNA, 56 bp, Artificial
  Synthetic oligonucleotide
ctacaaaagtggtaattaatgatagtgcgaactttgtttggaaattcgatgaaaca

SEQ ID NO: 220412 - DNA, 53 bp, Artificial
  Synthetic oligonucleotide
tgtgaaggcccacggctttgatttggaacggggactttcaagaaagggccgaa

SEQ ID NO: 220413 - DNA, 60 bp, Artificial
  Synthetic oligonucleotide
tgtcatttatgccacggtccataacgatgaaaaaacgccccatatgcacgtaggcatcgt

SEQ ID NO: 220414 - DNA, 60 bp, Artificial
  Synthetic oligonucleotide
cgctcgctcggtctaatgcaggtctgaaagctgaaaacaagacacttgaagaagataaga

SEQ ID NO: 220415 - DNA, 57 bp, Artificial
  Synthetic oligonucleotide
cgtattcgggactttcatgaaatgctcggattagaaggcgaacctaaatacactgaa

SEQ ID NO: 220416 - DNA, 60 bp, Artificial
  Synthetic oligonucleotide
ttcgccagtaaggactcattcttttccgatagctgctggatcatagtcgtttgctccgct

SEQ ID NO: 220417 - DNA, 59 bp, Artificial
  Synthetic oligonucleotide
tgaaaaagtggtgcagtgaacgggactacatcctgtttctcctgggcatcaattccgga

SEQ ID NO: 220418 - DNA, 55 bp, Artificial
  Synthetic oligonucleotide
aacccaatgcgttactactgtcagaacgtgctttagacgattcgaaacggacgat

SEQ ID NO: 220419 - DNA, 58 bp, Artificial
  Synthetic oligonucleotide
cggtcagtggccacttcctcacacaatccacaatccgccattttcaataggtttccta

SEQ ID NO: 220420 - DNA, 55 bp, Artificial
  Synthetic oligonucleotide
aattccggattacgcgtcggggacctgttaaacatcaaagtgagtgagatccagg

SEQ ID NO: 220421 - DNA, 58 bp, Artificial
  Synthetic oligonucleotide
acaaagttctctctttcttgaataattcctgttatgcctgcatttctcgctgtaaaaa

SEQ ID NO: 220422 - DNA, 60 bp, Artificial
  Synthetic oligonucleotide
tatcaagcaattgttcacccttgcattagcacataagaagaggtgaaggtcaatgtccga

SEQ ID NO: 220423 - DNA, 57 bp, Artificial
  Synthetic oligonucleotide
tctctaaagttcttcatcctaagggggttcaaaggcatgagttattccattattcga

SEQ ID NO: 220424 - DNA, 48 bp, Artificial
  Synthetic oligonucleotide
aaatatggttttagatttttagaaaagccctgtgttttttaagggctt

SEQ ID NO: 220425 - DNA, 51 bp, Artificial
  Synthetic oligonucleotide
acactttcggtgttaactattacactttcggtgttaactattacactttcg

SEQ ID NO: 220426 - DNA, 60 bp, Artificial
  Synthetic oligonucleotide
tttgcggtcgcatactggattgattagattgtatttcgatgctgtttatcaagaacggaa

SEQ ID NO: 220427 - DNA, 60 bp, Artificial
  Synthetic oligonucleotide
tcggttagtgttagttgcgagtcagagtcgcgattgaccgtacaagtgtgctaccaacac

SEQ ID NO: 220428 - DNA, 56 bp, Artificial
  Synthetic oligonucleotide
tcggtaattcctatgtattttaaggtaatggatggagccgaatgattaaataacat

SEQ ID NO: 220429 - DNA, 60 bp, Artificial
  Synthetic oligonucleotide
tcgcgtgttctcctttttcacgtgccaatttctttgaatgaccgatacgatctatcgcat

SEQ ID NO: 220430 - DNA, 60 bp, Artificial
  Synthetic oligonucleotide
tcctctaacttcgccagtaaggactcattcttttccgatagctgctggatcatagtcgtt

SEQ ID NO: 220431 - DNA, 54 bp, Artificial
  Synthetic oligonucleotide
actattaccttttcgattctaattgaaagtccaccaccattttttcacgcgcgc

SEQ ID NO: 220432 - DNA, 56 bp, Artificial
  Synthetic oligonucleotide
caggacaacctgcctcttgatcgggaggatgcctgggacccatttaaaccggcctg

SEQ ID NO: 220433 - DNA, 57 bp, Artificial
  Synthetic oligonucleotide
cgagctgtttttaggggcctccacatggaggcgtttcgcgtgttttggtgatatcag

SEQ ID NO: 220434 - DNA, 58 bp, Artificial
  Synthetic oligonucleotide
ggaggtagattgaatgattactagagaagatgaggcgaattttcctgattttaaaaca

SEQ ID NO: 220435 - DNA, 58 bp, Artificial
  Synthetic oligonucleotide
gccattgaataggaacgtcgctttaaaccgctgtgagcgcttatttcgacgtgatttc

SEQ ID NO: 220436 - DNA, 57 bp, Artificial
  Synthetic oligonucleotide
gatggacaagacaaaatccggaaaaattacgctggtattgaatatcgcaacgaggaa

SEQ ID NO: 220437 - DNA, 58 bp, Artificial
  Synthetic oligonucleotide
ttatcgaatacaacaaattgcgggctgagtacaagattgtttatgctgacagggaacg

SEQ ID NO: 220438 - DNA, 57 bp, Artificial
  Synthetic oligonucleotide
cagatgcaattgctagcattttcaatttactgtactcaacagaacggtgtaacagag

SEQ ID NO: 220439 - DNA, 56 bp, Artificial
  Synthetic oligonucleotide
tacttgtactacactgttatgctatacagataagcaattgtataataccgtgcctc

SEQ ID NO: 220440 - DNA, 54 bp, Artificial
  Synthetic oligonucleotide
ccatacataggttattctctagaaataaaactagtcaaacaccaaaaggaggtc

SEQ ID NO: 220441 - DNA, 59 bp, Artificial
  Synthetic oligonucleotide
gttcacgaataatgcaatgatacgaggaagtgcgattaacgcgcgaagggtagttaggc

SEQ ID NO: 220442 - DNA, 56 bp, Artificial
  Synthetic oligonucleotide
aatgatacgaggaagtgcgattaacgcgcgaagggtagttaggcctttgctaatgc

SEQ ID NO: 220443 - DNA, 56 bp, Artificial
  Synthetic oligonucleotide
ctcgtcaattacgcgacaaatggggctgtggccgaagttgaagtgatggatttgca

SEQ ID NO: 220444 - DNA, 55 bp, Artificial
  Synthetic oligonucleotide
cgttaaccgcaaatatgcaatttcgggtgctcaaccagtagaagcatttgtggaa

SEQ ID NO: 220445 - DNA, 55 bp, Artificial
  Synthetic oligonucleotide
ctagcggcacagacaaagtcgtaatgaggatgttctgacctccaactttgtactc

SEQ ID NO: 220446 - DNA, 55 bp, Artificial
  Synthetic oligonucleotide
ctaggaatccacgttactagggcgcagcctaaaattaggaataccatcgctaccg

SEQ ID NO: 220447 - DNA, 55 bp, Artificial
  Synthetic oligonucleotide
gataaacacgcctgcatcatccgaatagcttaatagtcgcaagtcagggtgtgcc

SEQ ID NO: 220448 - DNA, 55 bp, Artificial
  Synthetic oligonucleotide
cgggactacatcctgtttctcctgggcatcaattccggattacgcgtcggggacc

SEQ ID NO: 220449 - DNA, 55 bp, Artificial
  Synthetic oligonucleotide
ctcgtctcaccgcatccgaatgtccttgacttagccccttgccccagaacgtata

SEQ ID NO: 220450 - DNA, 54 bp, Artificial
  Synthetic oligonucleotide
aggggtctgagtggctgtttccgagccgcaaggggcaaaacccgatcacaaggg

SEQ ID NO: 220451 - DNA, 55 bp, Artificial
  Synthetic oligonucleotide
ctctcgcctgatgtgttattctcttctcaaatggaggtgtacgagatggcgcacg

SEQ ID NO: 220452 - DNA, 55 bp, Artificial
  Synthetic oligonucleotide
ctggagatcctcgaagaaaataaagaagaaaagacgattccacaaaatcgacttg

SEQ ID NO: 220453 - DNA, 55 bp, Artificial
  Synthetic oligonucleotide
gaacaactttgatattgatcggtacataacgcttgatgccgaagacaaagacgac

SEQ ID NO: 220454 - DNA, 55 bp, Artificial
  Synthetic oligonucleotide
cgtattcccaaagagttgtattttgaatataagcaagctttgttggagcaaggga

SEQ ID NO: 220455 - DNA, 55 bp, Artificial
  Synthetic oligonucleotide
gtcgggtgtgtatgagaagtgattaaatactccagaattgcatgtcgctgcggag

SEQ ID NO: 220456 - DNA, 60 bp, Artificial
  Synthetic oligonucleotide
gttacccaatcaaatagcctagtagatgcacgatatcatgaacctttaagcgccagacag

SEQ ID NO: 220457 - DNA, 55 bp, Artificial
  Synthetic oligonucleotide
gttgaaacgcgtgatgtttcaggtttaacagttcgtaaagacagcaccttgccga

SEQ ID NO: 220458 - DNA, 55 bp, Artificial
  Synthetic oligonucleotide
taacccgattaaaataggcggaacctgaagcagtctcgcgatattggaagccccg

SEQ ID NO: 220459 - DNA, 55 bp, Artificial
  Synthetic oligonucleotide
tacagtcgcaattactaccctgccaatagtcttcggtttaattgtcgcctcctcg

SEQ ID NO: 220460 - DNA, 55 bp, Artificial
  Synthetic oligonucleotide
tattcacgtggggacatttcatccgagtatttatggtagtttggaatgcgtcctc

SEQ ID NO: 220461 - DNA, 55 bp, Artificial
  Synthetic oligonucleotide
tcaacaaggctattcacaggtgctttggttagacggtgtggagcgtaagtacgta

SEQ ID NO: 220462 - DNA, 55 bp, Artificial
  Synthetic oligonucleotide
tccgagccgcaaggggcaaaacccgatcacaagggtccaagcataccggcagctc

SEQ ID NO: 220463 - DNA, 55 bp, Artificial
  Synthetic oligonucleotide
tgcagaagtcttacttggaactatggttttagcaggatgtaatgaccatacgtcc

SEQ ID NO: 220464 - DNA, 55 bp, Artificial
  Synthetic oligonucleotide
tggggtagggtcggatgccattaatgaaactgtgccatggtacaacatcgtcgga

SEQ ID NO: 220465 - DNA, 55 bp, Artificial
  Synthetic oligonucleotide
ttcaattagatgttcgtgtgcctgctttactttgcgcagagcaaatgtccataag

SEQ ID NO: 220466 - DNA, 51 bp, Artificial
  Synthetic oligonucleotide
ggtgttaactattacactttcggtgttaactattacactttcggtgttaac

SEQ ID NO: 220467 - DNA, 55 bp, Artificial
  Synthetic oligonucleotide
ttcagtcagcgagatggggcaagctttaatagataacgggtattcgcatgcggtc

SEQ ID NO: 220468 - DNA, 55 bp, Artificial
  Synthetic oligonucleotide
ttgatgtaaccgagttttcgttgttccgaattgcaccgaaagaaatgccacggta

SEQ ID NO: 220469 - DNA, 55 bp, Artificial
  Synthetic oligonucleotide
tttaagtgcgatggcagaagagacgagtgcttcttctatacaagtttcgaaatca

SEQ ID NO: 220470 - DNA, 55 bp, Artificial
  Synthetic oligonucleotide
tttgaacacttcggaaaagtgttaataagttgctttcgcctactggcaagagctg

SEQ ID NO: 220471 - DNA, 55 bp, Artificial
  Synthetic oligonucleotide
gattggctccgctgtttctagattcgatttaaccatcatgacaatcaacgtaccg

SEQ ID NO: 220472 - DNA, 55 bp, Artificial
  Synthetic oligonucleotide
gcaacggtagacccgtcctggaggcaaatttcaatgctatgtagtcggctatcca

SEQ ID NO: 220473 - DNA, 55 bp, Artificial
  Synthetic oligonucleotide
gccagtgctgtaattggaatgttgcctttagttattggctcgcttgtgtctccgc

SEQ ID NO: 220474 - DNA, 55 bp, Artificial
  Synthetic oligonucleotide
gccctataaactgcgtctaccctcattattggagggcgaaatgtgaatacgtctt

SEQ ID NO: 220475 - DNA, 55 bp, Artificial
  Synthetic oligonucleotide
cactccaggctcgagcattcgctgccgatcacccaatcgaacgggaggaggcttg

SEQ ID NO: 220476 - DNA, 55 bp, Artificial
  Synthetic oligonucleotide
gagagccggtctcttcgcaccgcccaatctttgcacggcacgtggggtgtcaaga

SEQ ID NO: 220477 - DNA, 55 bp, Artificial
  Synthetic oligonucleotide
aggcgtgaatcacgttgggttttgcgaagataatccccaggggtcgggcgccatg

SEQ ID NO: 220478 - DNA, 55 bp, Artificial
  Synthetic oligonucleotide
gcaatcacgacagagcacctgcccattgttaggggaaccgtttccgttcttaatc

SEQ ID NO: 220479 - DNA, 55 bp, Artificial
  Synthetic oligonucleotide
gcgacgatcgcgcttaaggaagcgagcgcgcctccgttcgataattccaccgtcg

SEQ ID NO: 220480 - DNA, 55 bp, Artificial
  Synthetic oligonucleotide
aggcactagacgggacaacctgaacgggcttacagtaatgcgtagctgcggcgct

SEQ ID NO: 220481 - DNA, 55 bp, Artificial
  Synthetic oligonucleotide
gcggtcatcgatctaccttgtgacgcgcaatcccggtatgcctgtccggttgcgg

SEQ ID NO: 220482 - DNA, 55 bp, Artificial
  Synthetic oligonucleotide
ggcgtacttcggtgatgtcccctggctctcatcgttcttgcgtgaactgcacgac

SEQ ID NO: 220483 - DNA, 55 bp, Artificial
  Synthetic oligonucleotide
gtcggagcgcgtcgggcaaatacctcctcctcgaagtgccgaattggagcgacgc

SEQ ID NO: 220484 - DNA, 54 bp, Artificial
  Synthetic oligonucleotide
actgggacatgggttccgggccagtgaaagcggagcgtttagcgcggggtgcgt

SEQ ID NO: 220485 - DNA, 55 bp, Artificial
  Synthetic oligonucleotide
tgcagggctccactggcggggctcgttcatggggaatgacgaactcacgcctcgc

SEQ ID NO: 220486 - DNA, 55 bp, Artificial
  Synthetic oligonucleotide
ccacaactgcagcactactacttggcgataggtgggcctcgtgacgccccactcc

SEQ ID NO: 220487 - DNA, 54 bp, Artificial
  Synthetic oligonucleotide
ggtgttctggtaaaatgaaccgtccttcgagacatggagagggccgaaatccca

SEQ ID NO: 220488 - DNA, 53 bp, Artificial
  Synthetic oligonucleotide
tcgtccggatacccgtccaggtgatccttagaagggtcgttggggaggaagac

SEQ ID NO: 220489 - DNA, 54 bp, Artificial
  Synthetic oligonucleotide
tgcgaacgttgccggggttgttttgagtcacgtctttgactgatgcgttgtgct

SEQ ID NO: 220490 - DNA, 52 bp, Artificial
  Synthetic oligonucleotide
gtagatgtcggtgcctggtatgtactttgctctgcgttccagcgctctcgaa

SEQ ID NO: 220491 - DNA, 52 bp, Artificial
  Synthetic oligonucleotide
tgaatcctatcacggtcttcctcgaatgagagggaggcgtcgggcctagtat

SEQ ID NO: 220492 - DNA, 52 bp, Artificial
  Synthetic oligonucleotide
ttttcgtactagaacgcttcctcgaggtgtacatcatttctattcggctatc

SEQ ID NO: 220493 - DNA, 51 bp, Artificial
  Synthetic oligonucleotide
ctttgaacgcggacccatgctgttcgtggagggtccactccgcatgttcca

SEQ ID NO: 220494 - DNA, 51 bp, Artificial
  Synthetic oligonucleotide
aatgcagggacctggttgaaagatcggggtgctcttcggagaacctgtagt

SEQ ID NO: 220495 - DNA, 51 bp, Artificial
  Synthetic oligonucleotide
aagctcgatagccctgacgaattacttccaccacgtctgctcgaacaagca

SEQ ID NO: 220496 - DNA, 50 bp, Artificial
  Synthetic oligonucleotide
atggatgacccgggttgatacaatcgcatcgcctcacctatcggcccata

SEQ ID NO: 220497 - DNA, 55 bp, Artificial
  Synthetic oligonucleotide
cccgtgttctggttcgacccattttgttccgaatcgctcataggacggcggcact

SEQ ID NO: 220498 - DNA, 50 bp, Artificial
  Synthetic oligonucleotide
tcatgacataaccccgcgattgttgtaaagttttgcccgtatcagagcgc

SEQ ID NO: 220499 - DNA, 50 bp, Artificial
  Synthetic oligonucleotide
accgtagatccagcgtcgaggacgcttccattgtcaccccgcgtgagaga

SEQ ID NO: 220500 - DNA, 50 bp, Artificial
  Synthetic oligonucleotide
accgctcgccaaaatgacggtgtcgtccagaagcgaaaggccgggtctga

SEQ ID NO: 220501 - DNA, 50 bp, Artificial
  Synthetic oligonucleotide
accgaggagggacgtccgaccccgacgcagatgggctctgcgagttggcg

SEQ ID NO: 220502 - DNA, 50 bp, Artificial
  Synthetic oligonucleotide
accctacgagaccagcgatcacccactgtcgcattgacgagcccccgtgt

SEQ ID NO: 220503 - DNA, 50 bp, Artificial
  Synthetic oligonucleotide
acccgccatttacgcgccgttcaagctggacccgtgctcatttgtcagga

SEQ ID NO: 220504 - DNA, 50 bp, Artificial
  Synthetic oligonucleotide
acaccggaggtgggacacctctcgtccggcgtggccttaccgcaagattg

SEQ ID NO: 220505 - DNA, 50 bp, Artificial
  Synthetic oligonucleotide
aattgcgacgaaggcggtgtctccagcgggcaacgtaagctcacccagga

SEQ ID NO: 220506 - DNA, 50 bp, Artificial
  Synthetic oligonucleotide
aatgggctcctccgtggaagctgtgagtgcatggtccgaacaagggcata

SEQ ID NO: 220507 - DNA, 50 bp, Artificial
  Synthetic oligonucleotide
aatgcgtgtgcgctctcccgggcttctcctcgagccagccacccaacgat

SEQ ID NO: 220508 - DNA, 55 bp, Artificial
  Synthetic oligonucleotide
cgccgcatagcgcagttacgcattatctatcgctccgatgtgctagtatcgatgc

SEQ ID NO: 220509 - DNA, 50 bp, Artificial
  Synthetic oligonucleotide
aaggcatggcccgaagtgagacatgccgggcggtgttctcagcgcaagct

SEQ ID NO: 220510 - DNA, 50 bp, Artificial
  Synthetic oligonucleotide
aagctcccgattcgtccgggtgctacccacgctgccggtctgaaccgtta

SEQ ID NO: 220511 - DNA, 50 bp, Artificial
  Synthetic oligonucleotide
aagcactcttcggtggagagcccgtcgaggtgaaagctggtgagctgcca

SEQ ID NO: 220512 - DNA, 50 bp, Artificial
  Synthetic oligonucleotide
aagcacacattcgagttctagtcatgaaagaagacaccctcattggcgcg

SEQ ID NO: 220513 - DNA, 50 bp, Artificial
  Synthetic oligonucleotide
aagactgcgcgcttcgtgctcacaccggtgctcatgggctccgtccatgc

SEQ ID NO: 220514 - DNA, 50 bp, Artificial
  Synthetic oligonucleotide
aacatggtgtgccttcagcgggtagggcgcacacgagatgccgcctgact

SEQ ID NO: 220515 - DNA, 50 bp, Artificial
  Synthetic oligonucleotide
aacagtgacagcccaaggccactttttccccggagggtttcgcgtcggct

SEQ ID NO: 220516 - DNA, 50 bp, Artificial
  Synthetic oligonucleotide
aacagtccgtcctgccagtatggtttgcgtccacctcgctccgccagtgt

SEQ ID NO: 220517 - DNA, 50 bp, Artificial
  Synthetic oligonucleotide
aacacgtgctcgatgtgtggacgcatcgctatcgcagcaagacggcgcca

SEQ ID NO: 220518 - DNA, 50 bp, Artificial
  Synthetic oligonucleotide
aaagtgcatcgggccaggtagccttttcgcgtcgaccgggggagaacgca

SEQ ID NO: 220519 - DNA, 55 bp, Artificial
  Synthetic oligonucleotide
cgcgagagctcgcccatcctttcgtgacgttcgttattcatagacggtaggatcg

SEQ ID NO: 220520 - DNA, 50 bp, Artificial
  Synthetic oligonucleotide
aaaattgtggcccacctcagcccgaggctgggataacctcgccctggaag

SEQ ID NO: 220521 - DNA, 50 bp, Artificial
  Synthetic oligonucleotide
accccgatcggcctgtaagcgatgccagagcccacgatggcggtctccgc

SEQ ID NO: 220522 - DNA, 50 bp, Artificial
  Synthetic oligonucleotide
acccccggaaggcactcaaaggattatgcacgacgcacgcgggtcgacgc

SEQ ID NO: 220523 - DNA, 50 bp, Artificial
  Synthetic oligonucleotide
acccattccccgatagaacgacgacgcaagctcgcaccctagcgcctctt

SEQ ID NO: 220524 - DNA, 50 bp, Artificial
  Synthetic oligonucleotide
accagtccccgagcggtcccccgctggcgcatgctccgatctgcccgttc

SEQ ID NO: 220525 - DNA, 50 bp, Artificial
  Synthetic oligonucleotide
accaggccactccccgcttctcgcatcgaggatggctctaccggggacgt

SEQ ID NO: 220526 - DNA, 50 bp, Artificial
  Synthetic oligonucleotide
accacgaatcgccgaggggcgccaagcgcatgaggagccgtgctgaagtc

SEQ ID NO: 220527 - DNA, 50 bp, Artificial
  Synthetic oligonucleotide
accaacccccgaggctttgatgtccgtttccaagcaggccgacatagccc

SEQ ID NO: 220528 - DNA, 50 bp, Artificial
  Synthetic oligonucleotide
acatgtcacgcccgggagggtaacccgccagtctcgaagggtacgactga

SEQ ID NO: 220529 - DNA, 50 bp, Artificial
  Synthetic oligonucleotide
acatgggctctgcgtgcgcatagtagtcgcgatcgtgggggatcaggcac

SEQ ID NO: 220530 - DNA, 55 bp, Artificial
  Synthetic oligonucleotide
cggatgttcgctggtcggacagggcttgttaggaatcgcacgccttccattgacg

SEQ ID NO: 220531 - DNA, 50 bp, Artificial
  Synthetic oligonucleotide
acaggtcccgcccaggtggcaccatgagttcctgccgttggcattcgtga

SEQ ID NO: 220532 - DNA, 50 bp, Artificial
  Synthetic oligonucleotide
acaggcagcccgattgcatcggataagcccattggtgtgttcggggcctc

SEQ ID NO: 220533 - DNA, 50 bp, Artificial
  Synthetic oligonucleotide
acaggaggactcgaccgatgccctacgtggccgctgatccctacgcctgg

SEQ ID NO: 220534 - DNA, 50 bp, Artificial
  Synthetic oligonucleotide
acaggacggatacacagtcaaggtggcccgtttggacggcgttcacgcgg

SEQ ID NO: 220535 - DNA, 50 bp, Artificial
  Synthetic oligonucleotide
acagcgcaagagaactacatgggggcgggaagttgggatcggctcgggtc

SEQ ID NO: 220536 - DNA, 50 bp, Artificial
  Synthetic oligonucleotide
acagcgaagctcttcttggcagtcgaggcttcccttgcacgacccgccca

SEQ ID NO: 220537 - DNA, 50 bp, Artificial
  Synthetic oligonucleotide
acagagccgggctcgagaggaccgtaccctccctcgctcaccagaggacc

SEQ ID NO: 220538 - DNA, 50 bp, Artificial
  Synthetic oligonucleotide
acacgggctcaacagtccgtcctgccagtatggtttgcgtccacctcgct

SEQ ID NO: 220539 - DNA, 55 bp, Artificial
  Synthetic oligonucleotide
cgtgcgcctactcatacttctacctcgttgatttggaatgacattgcatgtgcac

SEQ ID NO: 220540 - DNA, 55 bp, Artificial
  Synthetic oligonucleotide
atccctgaatgcgggctcgctcaccatccaaccggccctggaacgtccgtcatac

SEQ ID NO: 220541 - DNA, 54 bp, Artificial
  Synthetic oligonucleotide
gaaatcgacgggctcgggtcgattttcgtgacccgatcggggtcgagctcccga

SEQ ID NO: 220542 - DNA, 60 bp, Artificial
  Synthetic oligonucleotide
gcacatctacggaatccgtcagcccattccacgtcacctcagcggagatctcgataccct

SEQ ID NO: 220543 - DNA, 56 bp, Artificial
  Synthetic oligonucleotide
tactgccccggtcattcgtaaggccggtagcgtgatgagatttttatccggtagcc

SEQ ID NO: 220544 - DNA, 55 bp, Artificial
  Synthetic oligonucleotide
cgcaggagtaacgcagaacaatgaactaagctcgcaatactcggttcgcggagga

SEQ ID NO: 220545 - DNA, 55 bp, Artificial
  Synthetic oligonucleotide
cgcagaaagacagcaggacaaggcataaccaccacgtaagaaaatcgtttgtccg

SEQ ID NO: 220546 - DNA, 55 bp, Artificial
  Synthetic oligonucleotide
cgcacctacgatacatccgtgctggtatcctcccgacgggtgagatcgggctact

SEQ ID NO: 220547 - DNA, 55 bp, Artificial
  Synthetic oligonucleotide
cggcacagatgaacagaccacgatccgtcacatgcagtcgtgaatcggcggagga

SEQ ID NO: 220548 - DNA, 55 bp, Artificial
  Synthetic oligonucleotide
cgataggtttcggcagcctgtggctcggtaagaaagtttactgccctatgacagt

SEQ ID NO: 220549 - DNA, 55 bp, Artificial
  Synthetic oligonucleotide
cgagttcacccactgaatctcgtttacaaaccacacattacccagcgctcgatcg

SEQ ID NO: 220550 - DNA, 55 bp, Artificial
  Synthetic oligonucleotide
cgagtgggacacggaggcgctacagtcactccgccgtaagaatggtaccgcacag

SEQ ID NO: 220551 - DNA, 55 bp, Artificial
  Synthetic oligonucleotide
cgaggtcaggtctccataacgcctatgccctacgtaggtgaccgttctcccatcg

SEQ ID NO: 220552 - DNA, 55 bp, Artificial
  Synthetic oligonucleotide
cgagcctaagccctgcgcctcgatagccataccgagcatatagccctcgtgaggc

SEQ ID NO: 220553 - DNA, 55 bp, Artificial
  Synthetic oligonucleotide
cgagaaaatcaccacaaccgaaatatatacccacatcgatcgccagttcctacgg

SEQ ID NO: 220554 - DNA, 58 bp, Artificial
  Synthetic oligonucleotide
attcgccggagggttgcttcatcggtatctctttcacccggatgcctaccacgctgta

SEQ ID NO: 220555 - DNA, 55 bp, Artificial
  Synthetic oligonucleotide
ccgcaggctcctgtgacggatgaggacttgtgtacgcaatgcgaatattgcatcg

SEQ ID NO: 220556 - DNA, 55 bp, Artificial
  Synthetic oligonucleotide
cgtggttgggattcttgcaaggggtaatactgacagctatagcggtgctggtgac

SEQ ID NO: 220557 - DNA, 55 bp, Artificial
  Synthetic oligonucleotide
ccgcacccgctatcaacgtactagagactcccgaggaatttcgcgtagagatcgc

SEQ ID NO: 220558 - DNA, 55 bp, Artificial
  Synthetic oligonucleotide
cgtgtgccgagaagtagcgggttctctgggtgcccaccttgctgtgcgtagacga

SEQ ID NO: 220559 - DNA, 55 bp, Artificial
  Synthetic oligonucleotide
ccctgcggttatacagaaagagtcggagcttccggtctacgggatacgaagtcac

SEQ ID NO: 220560 - DNA, 55 bp, Artificial
  Synthetic oligonucleotide
cgttccacgacagcgaatgctttcgcaaaccgccaaatgcccatagcctcggtca

SEQ ID NO: 220561 - DNA, 55 bp, Artificial
  Synthetic oligonucleotide
cccgttccatctctatattttcgtccaaaacgccacacattagtgtatgggcctt

SEQ ID NO: 220562 - DNA, 55 bp, Artificial
  Synthetic oligonucleotide
cgttccgtagtcttactagtcgaacacgatcacaacggttcgatgggattcgtgg

SEQ ID NO: 220563 - DNA, 55 bp, Artificial
  Synthetic oligonucleotide
cgttgatcttagcttgctccttacggaaggtctcctcggagaagttgatgggtac

SEQ ID NO: 220564 - DNA, 55 bp, Artificial
  Synthetic oligonucleotide
cgttggaggcgttattggatgcggagaaggtggatagatgcattcatttggccgc

SEQ ID NO: 220565 - DNA, 55 bp, Artificial
  Synthetic oligonucleotide
caggcaagacgcatatgtccatagggctggggattaaagcttgcctggagggcta

SEQ ID NO: 220566 - DNA, 55 bp, Artificial
  Synthetic oligonucleotide
cgtttcgcataatgacagtccgccctgacactccctcttgagagaaagcttgacc

SEQ ID NO: 220567 - DNA, 55 bp, Artificial
  Synthetic oligonucleotide
cccgatacgacgaacggctgagaatacagccacttctgccggaaacaaagacccg

SEQ ID NO: 220568 - DNA, 55 bp, Artificial
  Synthetic oligonucleotide
ctaatataggagatgtttctactggtagtactacgagagttatcgaaggacgtca

SEQ ID NO: 220569 - DNA, 55 bp, Artificial
  Synthetic oligonucleotide
cccgacaatactgtataaggtaggtactacgcaggatattcccagtccgataagc

SEQ ID NO: 220570 - DNA, 54 bp, Artificial
  Synthetic oligonucleotide
ctaatgggttctgtccgtacaacgctttcttatagccagttcttttcaattcgg

SEQ ID NO: 220571 - DNA, 55 bp, Artificial
  Synthetic oligonucleotide
ctaggcttgtccgacaaatttgaagtgtacgagccgcaactcatccgtgacgacc

SEQ ID NO: 220572 - DNA, 55 bp, Artificial
  Synthetic oligonucleotide
cccatcatagatctgtcgctcttccccgaccatcgtatcgaaagggctttgctgc

SEQ ID NO: 220573 - DNA, 55 bp, Artificial
  Synthetic oligonucleotide
cccacctccggggcagataaccactgccatacctgtgttattcgtgccatcaggc

SEQ ID NO: 220574 - DNA, 55 bp, Artificial
  Synthetic oligonucleotide
cctacaggcaggtctttcagcatgtagtgtcctgtcgcatcggttgttacgccga

SEQ ID NO: 220575 - DNA, 55 bp, Artificial
  Synthetic oligonucleotide
ccgttgttgtactttatgcgacagccatattaatggtcaagctcgccgcaaaggt

SEQ ID NO: 220576 - DNA, 55 bp, Artificial
  Synthetic oligonucleotide
ctcgctcatacgggtcttgagcctctatggcagcaacacactcggtgtagttgtc

SEQ ID NO: 220577 - DNA, 54 bp, Artificial
  Synthetic oligonucleotide
ccgttcccgtaataatatccggtaaatggataagttgcggattgcccgatctgg

SEQ ID NO: 220578 - DNA, 55 bp, Artificial
  Synthetic oligonucleotide
cgtataggccgctccgtcattgattcgtatcgtatatgttccgtgtctcaacggt

SEQ ID NO: 220579 - DNA, 55 bp, Artificial
  Synthetic oligonucleotide
ccgtgcagagtggacgccgggtgctccgtcaagagcttctacttccaagcctgtg

SEQ ID NO: 220580 - DNA, 55 bp, Artificial
  Synthetic oligonucleotide
ccgtgaggcgaagtgtatctgcgtcgcttacccaggtatggagcgcttcttcccg

SEQ ID NO: 220581 - DNA, 51 bp, Artificial
  Synthetic oligonucleotide
ccgtagttttaccggattcctcgttaaaagttatcagcccattgaaacgtc

SEQ ID NO: 220582 - DNA, 55 bp, Artificial
  Synthetic oligonucleotide
cgtcggttgtcctgtgaagttataggcaatgtattccttttcaattcctcccgtc

SEQ ID NO: 220583 - DNA, 55 bp, Artificial
  Synthetic oligonucleotide
ccggtgataccatagagtctaaagttggtttagggttgatggcacagctgtctgg

SEQ ID NO: 220584 - DNA, 55 bp, Artificial
  Synthetic oligonucleotide
cgtctgcacgtgcgtcgggaggtaccgaagcaacaatattagtacctaaactgcc

SEQ ID NO: 220585 - DNA, 55 bp, Artificial
  Synthetic oligonucleotide
ccggcctgttagagattgaggactgtcagccaatcggactttcgcatcggtcatt

SEQ ID NO: 220586 - DNA, 55 bp, Artificial
  Synthetic oligonucleotide
cgtgacacgcaaagcgatgaatatcaatatggggcctgagacggtcgaagatttg

SEQ ID NO: 220587 - DNA, 55 bp, Artificial
  Synthetic oligonucleotide
cagctccgcccaatgatagcttcccttcacatacatgtgaggaacgccacgcctc

SEQ ID NO: 220588 - DNA, 55 bp, Artificial
  Synthetic oligonucleotide
ccggcacgaccgctattccggaagtctatcgtacttatgatccgaatgcttacag

SEQ ID NO: 220589 - DNA, 55 bp, Artificial
  Synthetic oligonucleotide
cgtgataaacggttgccgtgtgcgagtctttgcctatcaatccgcgtggcccggc

SEQ ID NO: 220590 - DNA, 55 bp, Artificial
  Synthetic oligonucleotide
cgtgccggtacggggatatagagggccttgggatgtcttgccacaggacgcttgc

SEQ ID NO: 220591 - DNA, 55 bp, Artificial
  Synthetic oligonucleotide
ccgctaataagacagatgtacgttgggcggctctccaaaacgataaaggcgtggg

SEQ ID NO: 220592 - DNA, 55 bp, Artificial
  Synthetic oligonucleotide
cgtgctcccgaatgtagcgaaacgaagtgttgtctaccttggcatagcgtgtaaa

SEQ ID NO: 220593 - DNA, 55 bp, Artificial
  Synthetic oligonucleotide
gtagtcaaattccgcggctcgggccatggcacaaagatgcttgtgagtgaactca

SEQ ID NO: 220594 - DNA, 55 bp, Artificial
  Synthetic oligonucleotide
gtatcggcatccggtcagacgcgtagcaggacaaaagtacacgtagtgcaagcca

SEQ ID NO: 220595 - DNA, 54 bp, Artificial
  Synthetic oligonucleotide
gtattcggcaggcgtttcgtaggaggggcccgtaagacctacatacacaccctc

SEQ ID NO: 220596 - DNA, 55 bp, Artificial
  Synthetic oligonucleotide
gtcaactcaagctacttatgtcccgatgtttagccagattgtcacaatcggtggg

SEQ ID NO: 220597 - DNA, 55 bp, Artificial
  Synthetic oligonucleotide
gtccggatgataggtggccaatagaccgtcctgccggatataatggattgatgcg

SEQ ID NO: 220598 - DNA, 55 bp, Artificial
  Synthetic oligonucleotide
ctcggattctattgaggtgggtcgtttagtgaaagaagtgagtgaagcccggagt

SEQ ID NO: 220599 - DNA, 55 bp, Artificial
  Synthetic oligonucleotide
acccgacttaatccgtgactatcccgtccgcacggtgcagatacgccccgtgcag

SEQ ID NO: 220600 - DNA, 55 bp, Artificial
  Synthetic oligonucleotide
gtcgtacattcgcacatccattattaatggtaaacgccgaacaatctatcgcgta

SEQ ID NO: 220601 - DNA, 55 bp, Artificial
  Synthetic oligonucleotide
gtcgttaaaactacgatgctgtaacttttgatacaacggacgctcagaccgagcg

SEQ ID NO: 220602 - DNA, 55 bp, Artificial
  Synthetic oligonucleotide
gtctggccgtggcgtacgtagttcagtagtcctgccgccgggtatacgttgagcg

SEQ ID NO: 220603 - DNA, 55 bp, Artificial
  Synthetic oligonucleotide
gtcttaagccgtcagattttgagaagcggaacatccataggtgccttggttcgag

SEQ ID NO: 220604 - DNA, 55 bp, Artificial
  Synthetic oligonucleotide
gtgcccaacgcctctaccgctaaatcgcccgcttgtacgacaaaacgattgagac

SEQ ID NO: 220605 - DNA, 55 bp, Artificial
  Synthetic oligonucleotide
gtgcctgtcgttacggcaatagggtctatcgtgatgtcctacggtatgctcggat

SEQ ID NO: 220606 - DNA, 55 bp, Artificial
  Synthetic oligonucleotide
gtgcgggatagcactcatacgactacgcaaacctctagagtactacgcagagcac

SEQ ID NO: 220607 - DNA, 55 bp, Artificial
  Synthetic oligonucleotide
gtggatgcagcgtgcgccctacttcgcagacatcttcgtgtcgcctcgtacacgc

SEQ ID NO: 220608 - DNA, 55 bp, Artificial
  Synthetic oligonucleotide
gtgtggaggcgatgtgctttctcacgctaggctcggtcaagatctttattccggg

SEQ ID NO: 220609 - DNA, 55 bp, Artificial
  Synthetic oligonucleotide
cagactgctgagaggattataaatatcggagtgatcggagtcactaaagaccctg

SEQ ID NO: 220610 - DNA, 54 bp, Artificial
  Synthetic oligonucleotide
gttgcacggttgttatttcccggccgtcgctagtctttaacagagcgggcaggg

SEQ ID NO: 220611 - DNA, 55 bp, Artificial
  Synthetic oligonucleotide
tacgccttatccactacacgggcacgctctgtttgttgtccgatagccaattcta

SEQ ID NO: 220612 - DNA, 55 bp, Artificial
  Synthetic oligonucleotide
ggctcgaataatgatgagaggatccttgcgagagaacagacgtcccacgacaagg

SEQ ID NO: 220613 - DNA, 55 bp, Artificial
  Synthetic oligonucleotide
ggcttgattaattcgggaggcgaatcgcacggagcctctgacctgaaagatgctg

SEQ ID NO: 220614 - DNA, 55 bp, Artificial
  Synthetic oligonucleotide
gggatcgtagttcgcttcgctcatgttattaactcacttcgttcgtgatattaac

SEQ ID NO: 220615 - DNA, 53 bp, Artificial
  Synthetic oligonucleotide
gggcaaaggtgacgcgactacgaaattcttccgtacccgggttgtagactgtg

SEQ ID NO: 220616 - DNA, 55 bp, Artificial
  Synthetic oligonucleotide
ggggcactattggaaacagtcacggcgcaagtagccgtcttctcaccatccttag

SEQ ID NO: 220617 - DNA, 55 bp, Artificial
  Synthetic oligonucleotide
ggggcgactgagatatgatgtgcttaatgtaccctttccggataatcgatttagt

SEQ ID NO: 220618 - DNA, 55 bp, Artificial
  Synthetic oligonucleotide
gggtataggccatacgcttacagcccgtcaacgttttagagccgacagcaggcga

SEQ ID NO: 220619 - DNA, 55 bp, Artificial
  Synthetic oligonucleotide
ggtaatggactcgggagcttcaccgtgaaccatgtaagcgaatcgttatcatcca

SEQ ID NO: 220620 - DNA, 55 bp, Artificial
  Synthetic oligonucleotide
ctcggggttggggtcttcgtcacttagacccgttagctctgagaggtcgttgtca

SEQ ID NO: 220621 - DNA, 55 bp, Artificial
  Synthetic oligonucleotide
ggtagggaaggatcagttcgcaaaactcgtcgaagctcagatgccggttccacgg

SEQ ID NO: 220622 - DNA, 55 bp, Artificial
  Synthetic oligonucleotide
acgatcttgggaacgcgtgtcgagtcgtagctggaaaggacgatgctcgcctcgt

SEQ ID NO: 220623 - DNA, 55 bp, Artificial
  Synthetic oligonucleotide
ggtctgcctctcttcggtcactactacttcgggtgggcagaaagtggagtcttcg

SEQ ID NO: 220624 - DNA, 55 bp, Artificial
  Synthetic oligonucleotide
ggtgccatccggtatcattacaataatgttgcgcacgggttttaccgtggtaggg

SEQ ID NO: 220625 - DNA, 55 bp, Artificial
  Synthetic oligonucleotide
acgagccggtatctcgcccgcttccgtattggatgttctcggtagctattgcggt

SEQ ID NO: 220626 - DNA, 55 bp, Artificial
  Synthetic oligonucleotide
ggtgcggtccccttttctactcttatgtggcaatcgctactcaagattgctcagt

SEQ ID NO: 220627 - DNA, 55 bp, Artificial
  Synthetic oligonucleotide
ggtggagagcataaggggtagattgtgttttatctctgcacgtctgctccctgcg

SEQ ID NO: 220628 - DNA, 55 bp, Artificial
  Synthetic oligonucleotide
ggttctccatacagcgacgtttcaatgggctgataacttttaacgaggaatccgg

SEQ ID NO: 220629 - DNA, 55 bp, Artificial
  Synthetic oligonucleotide
gtactcgagtggggcatcacaggaatctggatcggctatccgatagggcttaccc

SEQ ID NO: 220630 - DNA, 55 bp, Artificial
  Synthetic oligonucleotide
tcttcagtccctcgatttcgtccgctagatcttcgatagcttggggtagctcgcc

SEQ ID NO: 220631 - DNA, 55 bp, Artificial
  Synthetic oligonucleotide
cacttttcggtagtaattacgcgcctgatcatatttcccgctcaagaatgagcac

SEQ ID NO: 220632 - DNA, 55 bp, Artificial
  Synthetic oligonucleotide
tctttcgagaagtcatatgaatatttcactctataacgctccggaccagaaggga

SEQ ID NO: 220633 - DNA, 55 bp, Artificial
  Synthetic oligonucleotide
aacttctctcgctatacagagcaaacactggaaatagtgcagagcaccgtgggag

SEQ ID NO: 220634 - DNA, 55 bp, Artificial
  Synthetic oligonucleotide
tcttttaccggagccatccgataaggatgtattgctgcgtaaggtatctccggct

SEQ ID NO: 220635 - DNA, 55 bp, Artificial
  Synthetic oligonucleotide
tgcctcggaagcccttcatgggtccttatatggttgtacttacgatataggagcg

SEQ ID NO: 220636 - DNA, 55 bp, Artificial
  Synthetic oligonucleotide
tggaagaactatagggacaaaggaatcggacgatcatagcaatgggaggaaaccg

SEQ ID NO: 220637 - DNA, 55 bp, Artificial
  Synthetic oligonucleotide
tgggcctatttcgatttggcccgcttgtatcagcagacttatgctatcgcaaagg

SEQ ID NO: 220638 - DNA, 55 bp, Artificial
  Synthetic oligonucleotide
tgtacctgctgacagcgactagcatcaaaggatctatgaacgcgaatcaaggacc

SEQ ID NO: 220639 - DNA, 55 bp, Artificial
  Synthetic oligonucleotide
ttaatgcgtagctccatgccaaagtaaggcgtggcagtgcgtctgagcgtagccg

SEQ ID NO: 220640 - DNA, 54 bp, Artificial
  Synthetic oligonucleotide
ttcggctgggatcgtttgggtagtacggatctcttacccgaaggacacgtcttg

SEQ ID NO: 220641 - DNA, 55 bp, Artificial
  Synthetic oligonucleotide
ttctctactatctgagagctggtagcaacgtcaagctagagcactacgatgaggc

SEQ ID NO: 220642 - DNA, 55 bp, Artificial
  Synthetic oligonucleotide
cactcgtggcaaatcagtgagccgatacaagttggagaatatcatgcagacggtt

SEQ ID NO: 220643 - DNA, 55 bp, Artificial
  Synthetic oligonucleotide
ttggcctttgcgatctattcgcaccgtaaatacgaggagtgtgtctatccctgcc

SEQ ID NO: 220644 - DNA, 54 bp, Artificial
  Synthetic oligonucleotide
aaagatcgtaccgctgattaccaaattagggactccacgtatccccgaagatcc

SEQ ID NO: 220645 - DNA, 55 bp, Artificial
  Synthetic oligonucleotide
tttatctacaaatgcgccgactattgggtcccagactacatcgacaatccggacg

SEQ ID NO: 220646 - DNA, 55 bp, Artificial
  Synthetic oligonucleotide
tttcccgcagtttctattgtgtatcgcgctgtactgtaattttgcatcggtctgt

SEQ ID NO: 220647 - DNA, 55 bp, Artificial
  Synthetic oligonucleotide
ttttccttgcggggatcccaataaatcggtttatgctcgaactgccgaggcttgc

SEQ ID NO: 220648 - DNA, 55 bp, Artificial
  Synthetic oligonucleotide
aaaaccgtatcagtatgcgcacatttcgttctatcgatgaattggttcgtacgct

SEQ ID NO: 220649 - DNA, 53 bp, Artificial
  Synthetic oligonucleotide
tactaacaccgaaggtagcccttgtcctacaggtacactttgtccgtcctttc

SEQ ID NO: 220650 - DNA, 55 bp, Artificial
  Synthetic oligonucleotide
tactaatgagtcaactgcgccttggagtaaagtatgagtaatctgaggattccaa

SEQ ID NO: 220651 - DNA, 53 bp, Artificial
  Synthetic oligonucleotide
acaaaccccgggtgaggggctgctaaaacttactacggctcgctactatatcc

SEQ ID NO: 220652 - DNA, 55 bp, Artificial
  Synthetic oligonucleotide
tactcacgatgtccgtgcgacaggcggaaggtacgccccttgagctggcagacga

SEQ ID NO: 220653 - DNA, 60 bp, Artificial
  Synthetic oligonucleotide
gcctgtctcgcccaaagctctcatcttaggcgacatgcgcgaattaggtcctacaagcga

SEQ ID NO: 220654 - DNA, 55 bp, Artificial
  Synthetic oligonucleotide
cacgcgtaggcacgaccgttaccctcgactacaaggtgaaacatcacgaaatcgt

SEQ ID NO: 220655 - DNA, 55 bp, Artificial
  Synthetic oligonucleotide
tagaaatccgattactccgatagctctgatcactccgatagcactagtgccacta

SEQ ID NO: 220656 - DNA, 55 bp, Artificial
  Synthetic oligonucleotide
tagagcctacgctgctaccttcgatggttcttccattacagctacggccttccca

SEQ ID NO: 220657 - DNA, 55 bp, Artificial
  Synthetic oligonucleotide
tagccgtcaactctcgcttggtctccacctctgtaccgaaagacaacgaaccgga

SEQ ID NO: 220658 - DNA, 55 bp, Artificial
  Synthetic oligonucleotide
aagtatatctggcgcctgagattcaaattccgtatgaacgtcggcaagcgaacgg

SEQ ID NO: 220659 - DNA, 55 bp, Artificial
  Synthetic oligonucleotide
tagtccactggtactcagccgccctctctccgatccgtgctaggcgtacaccgtt

SEQ ID NO: 220660 - DNA, 55 bp, Artificial
  Synthetic oligonucleotide
tccacactcgctctataccgtatatcatggagttgttttgatctaccactccgtc

SEQ ID NO: 220661 - DNA, 55 bp, Artificial
  Synthetic oligonucleotide
tccgagggctacacgccacaatcatgcgcccagcattggtgacactcctgtcgct

SEQ ID NO: 220662 - DNA, 55 bp, Artificial
  Synthetic oligonucleotide
tccgatattagctgacattttcagccggctaaggtatatggagcgtcggggaagc

SEQ ID NO: 220663 - DNA, 55 bp, Artificial
  Synthetic oligonucleotide
tccgtacggatacgaagatgcagatacgtagatacaaggacgcagatacgtaagt

SEQ ID NO: 220664 - DNA, 55 bp, Artificial
  Synthetic oligonucleotide
aagcggaagacctgagttgccgcgcatagagaaattatcgacatgtactccctgt

SEQ ID NO: 220665 - DNA, 55 bp, Artificial
  Synthetic oligonucleotide
cacctctcctgcacaggatcagactcacgttttattatcgttctacgggcgtgtg

SEQ ID NO: 220666 - DNA, 55 bp, Artificial
  Synthetic oligonucleotide
tcctgctaccgaagttgctcctgccgaaggaagtgctttggatcaatacctgagc

SEQ ID NO: 220667 - DNA, 55 bp, Artificial
  Synthetic oligonucleotide
tcggcatcccatacttcggaggagccgtctggctaggcgtgatcgtgacgatagc

SEQ ID NO: 220668 - DNA, 55 bp, Artificial
  Synthetic oligonucleotide
tctctttagcgatatgcttaacgggctcaaccgtaagaccgctacgatcctcacg

SEQ ID NO: 220669 - DNA, 55 bp, Artificial
  Synthetic oligonucleotide
gccttggggctaggaggatcccttatttattggggtatatgtgtcattatagggg

SEQ ID NO: 220670 - DNA, 55 bp, Artificial
  Synthetic oligonucleotide
gccttgaccaaccccgctatgccagggcttgtaaagatcggtatgacctcaaagc

SEQ ID NO: 220671 - DNA, 55 bp, Artificial
  Synthetic oligonucleotide
gcctctatctataatgtggtggagaccctaatcgtcgcaatcattctcgtgatct

SEQ ID NO: 220672 - DNA, 55 bp, Artificial
  Synthetic oligonucleotide
gccggatttcatggtagggagaagagatcaactcggctaagaccggaggtgttgc

SEQ ID NO: 220673 - DNA, 55 bp, Artificial
  Synthetic oligonucleotide
gccggagatttgtttgatatcccaaacctatcggctgaaaggagtgcaagtgatg

SEQ ID NO: 220674 - DNA, 55 bp, Artificial
  Synthetic oligonucleotide
gccgccaaatttcacgaagactccactttctgcccacccgaagtagtagtgaccg

SEQ ID NO: 220675 - DNA, 55 bp, Artificial
  Synthetic oligonucleotide
gcccggtatacccacgtgcaaggaataagacgggctcagatcctatagcataatt

SEQ ID NO: 220676 - DNA, 55 bp, Artificial
  Synthetic oligonucleotide
ctcgtatccgtacggctacattcttgtatctacgtatctgcatccgtgtatccgt

SEQ ID NO: 220677 - DNA, 55 bp, Artificial
  Synthetic oligonucleotide
gcccagatagcagcatagtaggattcgcctccggggccatgcataaggcctcctt

SEQ ID NO: 220678 - DNA, 55 bp, Artificial
  Synthetic oligonucleotide
gccacgtaccaggttgtgtatctcgagcgctgactggtgccagtcgatgcgcgta

SEQ ID NO: 220679 - DNA, 55 bp, Artificial
  Synthetic oligonucleotide
aggcaatagatccgccaacggatacttggcactgacatcgcgataattacgacga

SEQ ID NO: 220680 - DNA, 55 bp, Artificial
  Synthetic oligonucleotide
gccaagtcggatggagtcacccagatggactggtagatatgcccgacttcgtgca

SEQ ID NO: 220681 - DNA, 55 bp, Artificial
  Synthetic oligonucleotide
gcatgccaaatcgcatttcgatgaatgtaaccgtagccaaacaaactcagggtgc

SEQ ID NO: 220682 - DNA, 55 bp, Artificial
  Synthetic oligonucleotide
aggcatcgcagcgcgtgagacgatgtagtcgcaacggaggtcgcagctctcgaca

SEQ ID NO: 220683 - DNA, 55 bp, Artificial
  Synthetic oligonucleotide
gcaggtgcgatacggatgttttcgcaggtaacccacattaggcagaagactattc

SEQ ID NO: 220684 - DNA, 55 bp, Artificial
  Synthetic oligonucleotide
gcagcttcagccgttaccacggtacccgcacagcctaagctcggtgctgtagagg

SEQ ID NO: 220685 - DNA, 55 bp, Artificial
  Synthetic oligonucleotide
gcagacattaaattaagcgaatgccctaaaacaatgagtaaccccaatgaggcag

SEQ ID NO: 220686 - DNA, 55 bp, Artificial
  Synthetic oligonucleotide
gagcagtgttttcttgtagccgcagcgttgtaaataacgagcacttacgggcccc

SEQ ID NO: 220687 - DNA, 55 bp, Artificial
  Synthetic oligonucleotide
ctatacaagcagccgctcggagcgcatacactccagctagaggcaggcgtacggc

SEQ ID NO: 220688 - DNA, 55 bp, Artificial
  Synthetic oligonucleotide
agtgggcggaaacatcttggtcagatttaggatggtatgcgagaagatagacttc

SEQ ID NO: 220689 - DNA, 55 bp, Artificial
  Synthetic oligonucleotide
agtggccccgctagacgggtcgccagacctttcgtccgtagtatagctggctacg

SEQ ID NO: 220690 - DNA, 55 bp, Artificial
  Synthetic oligonucleotide
gagcggaaccttttccataactgacaagcgtacgtcacttcatgacactgagcac

SEQ ID NO: 220691 - DNA, 53 bp, Artificial
  Synthetic oligonucleotide
gaggatgaccgcccgcctgatacgtaacccaaaagggtaaatcaaaggtacga

SEQ ID NO: 220692 - DNA, 55 bp, Artificial
  Synthetic oligonucleotide
agtcctttgaatgcagtttataatgaggcttgtcataaacggatgagccacctga

SEQ ID NO: 220693 - DNA, 55 bp, Artificial
  Synthetic oligonucleotide
gaggattcgcccacgggagaaaccagcgattcatctatcgcaacttcattggaaa

SEQ ID NO: 220694 - DNA, 55 bp, Artificial
  Synthetic oligonucleotide
gaggcaaccgatcaagcgggcgttgtggctcaggctacacatgagcgttttatcg

SEQ ID NO: 220695 - DNA, 55 bp, Artificial
  Synthetic oligonucleotide
gaggcggaatatcctgccgatacggagaaacgacttttgcgtattcgtgccgagg

SEQ ID NO: 220696 - DNA, 49 bp, Artificial
  Synthetic oligonucleotide
aggttcccaaaggaacgtcgttcacggaaataaccgttttggaacgatc

SEQ ID NO: 220697 - DNA, 55 bp, Artificial
  Synthetic oligonucleotide
aggtgcaggcacctaccgtgcggcagcaaatggcgatgtaacctgcttgcaaccg

SEQ ID NO: 220698 - DNA, 55 bp, Artificial
  Synthetic oligonucleotide
ctcacggtttgtaacagaaatcggagaagtactggtcttatcaacaatgttcgtc

SEQ ID NO: 220699 - DNA, 55 bp, Artificial
  Synthetic oligonucleotide
gagtggggaaaagcttcgcataggttgaagggaggctttaactacgaactatcca

SEQ ID NO: 220700 - DNA, 55 bp, Artificial
  Synthetic oligonucleotide
gatacgatgatgttttgtaccgaacaccgtgcatctgtgaaaaccgcttgttagc

SEQ ID NO: 220701 - DNA, 55 bp, Artificial
  Synthetic oligonucleotide
gatcgcaatgtctagctcgccctcacgtgccgtagcactaaaggtgagagcgtcc

SEQ ID NO: 220702 - DNA, 55 bp, Artificial
  Synthetic oligonucleotide
gatgagtattctacctatgtgcgtggtctgaaagataaggtgtccattgccccat

SEQ ID NO: 220703 - DNA, 55 bp, Artificial
  Synthetic oligonucleotide
gatggctcagacattccctcgtagcgctaagcgcatccaccttttatagagacct

SEQ ID NO: 220704 - DNA, 55 bp, Artificial
  Synthetic oligonucleotide
gcaaataggtagagcgatggccgaaggtaagtggctggtagcgaccgctctcaag

SEQ ID NO: 220705 - DNA, 55 bp, Artificial
  Synthetic oligonucleotide
ggctatccgatcggcaggcctctacgggctctaggcgatggattctgcgcattgc

SEQ ID NO: 220706 - DNA, 55 bp, Artificial
  Synthetic oligonucleotide
ggctaagggaccaagtggctatgtacattcccggattccagccatggacagatag

SEQ ID NO: 220707 - DNA, 55 bp, Artificial
  Synthetic oligonucleotide
ggcggtgccagtaaggttgtgatgcgcggttctcgtggaatcgagcagtctagca

SEQ ID NO: 220708 - DNA, 55 bp, Artificial
  Synthetic oligonucleotide
ggcggatttatgttcgaagtggattttgttcgttgggatgccagtatttcaggtc

SEQ ID NO: 220709 - DNA, 55 bp, Artificial
  Synthetic oligonucleotide
ctcattgagcatggcctagcaaacaacacagactatcgttccgcacaactccgtg

SEQ ID NO: 220710 - DNA, 55 bp, Artificial
  Synthetic oligonucleotide
ggcgaggctaaagaggagctggcttttacatttacgccctctgagcgacttctcc

SEQ ID NO: 220711 - DNA, 55 bp, Artificial
  Synthetic oligonucleotide
acttctgtcacgaataagtctgagatccttgctaagaacgtggcttaccagttcg

SEQ ID NO: 220712 - DNA, 55 bp, Artificial
  Synthetic oligonucleotide
ggccttatggcgatccgaatatagactgcgcaccatagtgtagaggacatagaag

SEQ ID NO: 220713 - DNA, 55 bp, Artificial
  Synthetic oligonucleotide
ggcatgagatgcacgaagatcccaacgtccccaactacggtcatccaggatttgg

SEQ ID NO: 220714 - DNA, 55 bp, Artificial
  Synthetic oligonucleotide
ggcaggcttcgaattctttaaggagatagccgtctcggagcgtactgactacacc

SEQ ID NO: 220715 - DNA, 55 bp, Artificial
  Synthetic oligonucleotide
ggcacaaacggaacccacggagttctgaatccacgtacagcatccggctctgact

SEQ ID NO: 220716 - DNA, 55 bp, Artificial
  Synthetic oligonucleotide
ggaggagattcctctcgtaaacgaagtgaccgtcggcccgcgacataccgagaac

SEQ ID NO: 220717 - DNA, 55 bp, Artificial
  Synthetic oligonucleotide
gctttggagatttgtactatcaccggcaagccttattctgacttacggacaggcg

SEQ ID NO: 220718 - DNA, 55 bp, Artificial
  Synthetic oligonucleotide
gcttgctgctgtagggttaatgctgagcgcacgaagggaagtgctgcaatggggc

SEQ ID NO: 220719 - DNA, 55 bp, Artificial
  Synthetic oligonucleotide
gctgcctagcacggaggttgaagagagagcaggtcgtaaacttacgtcgctatcc

SEQ ID NO: 220720 - DNA, 54 bp, Artificial
  Synthetic oligonucleotide
ccaccgctcaaaacccgcttaagcccagagctacggaactctcctttacgcggc

SEQ ID NO: 220721 - DNA, 55 bp, Artificial
  Synthetic oligonucleotide
gctgaaaagtgttgctccggggaagacattcgtcgacttcgagatgcccggtccg

SEQ ID NO: 220722 - DNA, 55 bp, Artificial
  Synthetic oligonucleotide
agcaaggagcctgtcgagaacgctacaaagactcaagagatgcttcgtaagctag

SEQ ID NO: 220723 - DNA, 55 bp, Artificial
  Synthetic oligonucleotide
gcgaaactggttctagtgctctgcctatgcatagatggtttacggatgttttgta

SEQ ID NO: 220724 - DNA, 55 bp, Artificial
  Synthetic oligonucleotide
gcgaccgttcagatacaccgattgatcgcgaatttccggctgacggaatccatac

SEQ ID NO: 220725 - DNA, 55 bp, Artificial
  Synthetic oligonucleotide
gcgacctctttgtgagctctagcgtaagccgagaggtagcgcacacgacgtatgc

SEQ ID NO: 220726 - DNA, 55 bp, Artificial
  Synthetic oligonucleotide
gcgagagtgcctacgaggtgatttctgcagtgcgaaaggcttacaaggggcatct

SEQ ID NO: 220727 - DNA, 55 bp, Artificial
  Synthetic oligonucleotide
gcgagcctgtaaatgtaaaccgtcctttgagaacaaggtatgccactaccgctcc

SEQ ID NO: 220728 - DNA, 55 bp, Artificial
  Synthetic oligonucleotide
gcgaggatagcgtagttgaatcattgcgccctgagcggggtctcgtgtgaagctg

SEQ ID NO: 220729 - DNA, 55 bp, Artificial
  Synthetic oligonucleotide
gcgccagccattctcctgtcgacaacgttccagcagtatcgtcatcccggcggca

SEQ ID NO: 220730 - DNA, 55 bp, Artificial
  Synthetic oligonucleotide
gcgctatgtctctttcctacgctccgcaaaggtagtgaaataagcgattggagcc

SEQ ID NO: 220731 - DNA, 55 bp, Artificial
  Synthetic oligonucleotide
ccacatctgcgacttggcccctatccagcaagctacacattcttcatagacagag

SEQ ID NO: 220732 - DNA, 55 bp, Artificial
  Synthetic oligonucleotide
gcggagcacggtagcctctcgagaaaccaaggcgcgtttgcagataatctgtaag

SEQ ID NO: 220733 - DNA, 55 bp, Artificial
  Synthetic oligonucleotide
gcgtatggcaaatgcaggtatacctctagggaatcagtctgtgctactgcgtggt

SEQ ID NO: 220734 - DNA, 55 bp, Artificial
  Synthetic oligonucleotide
gctattatgcctggcaattagaagtaggacgtaatcccacgggagatgtattacg

SEQ ID NO: 220735 - DNA, 55 bp, Artificial
  Synthetic oligonucleotide
gctcagagcaatgctattcagtttagagctgatgagaccctccccttagagcagc

SEQ ID NO: 220736 - DNA, 55 bp, Artificial
  Synthetic oligonucleotide
gctccccatattcgggaatcggagttttgcacccgggatatggtggagctcgtag

SEQ ID NO: 220737 - DNA, 55 bp, Artificial
  Synthetic oligonucleotide
gctcgtcctaacctctggcgatgtcaagacgattgtcacactatctggtcagacc

SEQ ID NO: 220738 - DNA, 55 bp, Artificial
  Synthetic oligonucleotide
agcactctctagtagcttgaccctaggctccgccccaaaggctgtgcggaggcga

SEQ ID NO: 220739 - DNA, 55 bp, Artificial
  Synthetic oligonucleotide
gctctgtcgacaggcgtcgtcagctctttcggtacctccggtagttccagtgccg

SEQ ID NO: 220740 - DNA, 54 bp, Artificial
  Synthetic oligonucleotide
tagcgcttcgatcctcagcgacccacaaccgatttgccggctgaaagtgacaaa

SEQ ID NO: 220741 - DNA, 54 bp, Artificial
  Synthetic oligonucleotide
tcttttgtctcgagaaactctttcaagagcggtccgatattactatcgtcctcg

SEQ ID NO: 220742 - DNA, 55 bp, Artificial
  Synthetic oligonucleotide
ctccgatagataccgctttacgggtataggtgcatatgttggtgaccgggcttct

SEQ ID NO: 220743 - DNA, 54 bp, Artificial
  Synthetic oligonucleotide
ggaacggatcgtccgggtttcctcctaagttccggatggtgtctgcgatagaga

SEQ ID NO: 220744 - DNA, 54 bp, Artificial
  Synthetic oligonucleotide
gaaggtcggaaccaacatcagtttgtctcatagcgtgcgcgaagggtctgccag

SEQ ID NO: 220745 - DNA, 54 bp, Artificial
  Synthetic oligonucleotide
tcggcagcacacttatacaaagcaccaacgactgcctgacgccattcggctgct

SEQ ID NO: 220746 - DNA, 54 bp, Artificial
  Synthetic oligonucleotide
gagacgtgcagtctaatctgcgcctctccgacaaacccatagcctccgacctga

SEQ ID NO: 220747 - DNA, 54 bp, Artificial
  Synthetic oligonucleotide
gcaactgtgctattgtctgcaaccggttcatggctcccacgcccttcggctgcc

SEQ ID NO: 220748 - DNA, 54 bp, Artificial
  Synthetic oligonucleotide
ttttcgatcgaagggagagtagtgcaaacaagtgtgtataagtacccgcctcgc

SEQ ID NO: 220749 - DNA, 54 bp, Artificial
  Synthetic oligonucleotide
aaaagctatctggccgtattggaatggacgaaatccatgagattacctacctta

SEQ ID NO: 220750 - DNA, 54 bp, Artificial
  Synthetic oligonucleotide
cacaattcggcgccaacctactctcccaccataaggcagtaccatcggcactca

SEQ ID NO: 220751 - DNA, 54 bp, Artificial
  Synthetic oligonucleotide
atcgtttcgttttcaatagcggtacgacattcaaagctgcaatgatcctgcttc

SEQ ID NO: 220752 - DNA, 54 bp, Artificial
  Synthetic oligonucleotide
aatttgccgtttacacggctcacctagattaccggaactgcgcctactatgacg

SEQ ID NO: 220753 - DNA, 55 bp, Artificial
  Synthetic oligonucleotide
ccaatgccgaatcatggcgggcgcaatatgtggatcgcactgtccgtatggtctg

SEQ ID NO: 220754 - DNA, 54 bp, Artificial
  Synthetic oligonucleotide
aggtatatcagttacgagatcgttgggaactggataccttggctattcagccgg

SEQ ID NO: 220755 - DNA, 53 bp, Artificial
  Synthetic oligonucleotide
cccctcctagataacggagagaacttccccgacatactgcactcttttgtatt

SEQ ID NO: 220756 - DNA, 53 bp, Artificial
  Synthetic oligonucleotide
tgtacatcgttctaaattatatgtacgttcagccaatcgtctcgcattttccc

SEQ ID NO: 220757 - DNA, 53 bp, Artificial
  Synthetic oligonucleotide
cagacccaatgtaacggtaacgagcagttctagaaatctcgcacttgacgcat

SEQ ID NO: 220758 - DNA, 53 bp, Artificial
  Synthetic oligonucleotide
attcgtcttgctcttatatgtcgctctgatgttcaggtgcggcgttctagctt

SEQ ID NO: 220759 - DNA, 53 bp, Artificial
  Synthetic oligonucleotide
aagatagctgcagagtagcccatttcgtgagctttcactgtggggatcatacc

SEQ ID NO: 220760 - DNA, 53 bp, Artificial
  Synthetic oligonucleotide
tccgttctgtcttcccaaacgaggcacgcctactacatagcggagcctctgga

SEQ ID NO: 220761 - DNA, 53 bp, Artificial
  Synthetic oligonucleotide
gatggctctcgcctgatagcttacactccttggcgcgaagattgcggcagcta

SEQ ID NO: 220762 - DNA, 53 bp, Artificial
  Synthetic oligonucleotide
aggctcatgaaaagaccctaactaccattgccggcttagggttacatctcaat

SEQ ID NO: 220763 - DNA, 53 bp, Artificial
  Synthetic oligonucleotide
tcataaggcaggggactaaaagcgtagttcgaggtcatcaatagctctagccc

SEQ ID NO: 220764 - DNA, 60 bp, Artificial
  Synthetic oligonucleotide
ccgtctgctgacacgggcgcatgaggctggtgtatcaccgagtgaatatatgagggggtg

SEQ ID NO: 220765 - DNA, 55 bp, Artificial
  Synthetic oligonucleotide
catttgccaatacattgccgcttacaggttcatcctcccaattagccacactgtc

SEQ ID NO: 220766 - DNA, 53 bp, Artificial
  Synthetic oligonucleotide
tataccgttgtattggtaatttgctcgagatatgcgccggataattggaagtg

SEQ ID NO: 220767 - DNA, 53 bp, Artificial
  Synthetic oligonucleotide
tagtaaacataagtggccagccgggtaaagaccccaatatcgtacttcgtggt

SEQ ID NO: 220768 - DNA, 53 bp, Artificial
  Synthetic oligonucleotide
tagctgcgccgggaaattttgtaagggcgggagaaactacaacattcagctta

SEQ ID NO: 220769 - DNA, 53 bp, Artificial
  Synthetic oligonucleotide
aagttcaagagaatgcgtcgctttccggagtgctcacagttaagcacctcatt

SEQ ID NO: 220770 - DNA, 53 bp, Artificial
  Synthetic oligonucleotide
tactgtctgtcacggataagaatccacaacgagttgaaactttcctgcttcgg

SEQ ID NO: 220771 - DNA, 53 bp, Artificial
  Synthetic oligonucleotide
agagcggaacagggctttatggtttaccgactgctcccggcggaaccgcttac

SEQ ID NO: 220772 - DNA, 53 bp, Artificial
  Synthetic oligonucleotide
ggaagatgcctcccgaaagtacttcttctatgcacagcgatttcttgcagggc

SEQ ID NO: 220773 - DNA, 53 bp, Artificial
  Synthetic oligonucleotide
gttccttagacaagtcagcaaccttgtagccacaaagaattgccgttactttt

SEQ ID NO: 220774 - DNA, 53 bp, Artificial
  Synthetic oligonucleotide
ggatcgcctgcttgagaaggtagacgactccatcgacatttccctggtgtgcc

SEQ ID NO: 220775 - DNA, 53 bp, Artificial
  Synthetic oligonucleotide
agaagcactcgccccgttccgtgacaaggtgagaatcggtacaaagttcggtt

SEQ ID NO: 220776 - DNA, 55 bp, Artificial
  Synthetic oligonucleotide
cattgacatagcctaccttcttcggtacatattcgtttaccatcagtcgccctac

SEQ ID NO: 220777 - DNA, 53 bp, Artificial
  Synthetic oligonucleotide
gtatctcccaccttatgctcgttactgctccaagtctctgtgggcatcaagag

SEQ ID NO: 220778 - DNA, 53 bp, Artificial
  Synthetic oligonucleotide
acgagtgctgactgcatgtcgtggttcttaccatcgcgagcatcagagatgta

SEQ ID NO: 220779 - DNA, 53 bp, Artificial
  Synthetic oligonucleotide
ggtgcggccaccttagctacaggtgcggctctacgttcgggatgcggactggt

SEQ ID NO: 220780 - DNA, 53 bp, Artificial
  Synthetic oligonucleotide
cctccatatgcacccgctccgcctgattggataatccatccggctacggtcgg

SEQ ID NO: 220781 - DNA, 53 bp, Artificial
  Synthetic oligonucleotide
ccttagctacaggtgcggctctacgttcgggatgcggactggtgaccacacac

SEQ ID NO: 220782 - DNA, 53 bp, Artificial
  Synthetic oligonucleotide
cggatggggcaaccctgtcaatcccgtaggacttattgcatcggccttccgcc

SEQ ID NO: 220783 - DNA, 53 bp, Artificial
  Synthetic oligonucleotide
cgtaggtgttgggttgaatttcgggctcacgcatgcacgatgttatcatggtc

SEQ ID NO: 220784 - DNA, 53 bp, Artificial
  Synthetic oligonucleotide
ttgctgctaaaggacagaaagcgagcgttgtcttaccggatggttccaaggtt

SEQ ID NO: 220785 - DNA, 53 bp, Artificial
  Synthetic oligonucleotide
ttggttcatgcgtccatgccctacggcaattcggcaatcggggatgcgctgct

SEQ ID NO: 220786 - DNA, 52 bp, Artificial
  Synthetic oligonucleotide
tccgaaccataccccgtaggtgaaccatagccggcaggagaatctccgcctt

SEQ ID NO: 220787 - DNA, 55 bp, Artificial
  Synthetic oligonucleotide
cattcgagccgaataccctgcatactttatgagcaagcagcgagtggacacccct

SEQ ID NO: 220788 - DNA, 52 bp, Artificial
  Synthetic oligonucleotide
tcggcccgttgcccgttaaccgttatacgcatacaaatgggtgcctctccgt

SEQ ID NO: 220789 - DNA, 52 bp, Artificial
  Synthetic oligonucleotide
gtggctgacggattggttggtgtgcaagacggagttcgcccttttggctcgg

SEQ ID NO: 220790 - DNA, 52 bp, Artificial
  Synthetic oligonucleotide
caagagagagagaacaccctcccggacatcccgcttgattgcatcggaatat

SEQ ID NO: 220791 - DNA, 52 bp, Artificial
  Synthetic oligonucleotide
tagaggttgtgtgccgacctatgcacgcaccggaaggagagtctgcgccgta

SEQ ID NO: 220792 - DNA, 52 bp, Artificial
  Synthetic oligonucleotide
aactggatgctggattcgactcttcctaactggcataacgtgaatatagccc

SEQ ID NO: 220793 - DNA, 52 bp, Artificial
  Synthetic oligonucleotide
aagacccatgggagcatttgtccctgtagccggcttacatccgttgcccaga

SEQ ID NO: 220794 - DNA, 52 bp, Artificial
  Synthetic oligonucleotide
atgcaacctttgcacgcctccgaaaggtatgaatggtgtcgatattcttcgc

SEQ ID NO: 220795 - DNA, 52 bp, Artificial
  Synthetic oligonucleotide
cttcccgggttgcctgttgtttggctccgcctatccagtcacagtatccccg

SEQ ID NO: 220796 - DNA, 52 bp, Artificial
  Synthetic oligonucleotide
acggttactacgcaggctatctgctaccacttcaagagctttggatttctca

SEQ ID NO: 220797 - DNA, 52 bp, Artificial
  Synthetic oligonucleotide
acggtggcacactttcgccaatgctatgcggactgctcgatacgctacgggg

SEQ ID NO: 220798 - DNA, 54 bp, Artificial
  Synthetic oligonucleotide
ctcgcacggagcaacggcttcgatcttttcgttaggcgacaaccccggttcgcg

SEQ ID NO: 220799 - DNA, 52 bp, Artificial
  Synthetic oligonucleotide
tcgtgggtgtcgctcaaaccaacactaccgcaagatgctacccgattgggga

SEQ ID NO: 220800 - DNA, 52 bp, Artificial
  Synthetic oligonucleotide
agtaacgctgactccgcagacggaacgtcgggttctcacgatagcgaataaa

SEQ ID NO: 220801 - DNA, 51 bp, Artificial
  Synthetic oligonucleotide
agttacgttccaagaataccttattaggtttcggagccttaccagtcgtaa

SEQ ID NO: 220802 - DNA, 52 bp, Artificial
  Synthetic oligonucleotide
tcgcactatcggagtacgctggatttctcgaacgaggctcttcaggcttccg

SEQ ID NO: 220803 - DNA, 52 bp, Artificial
  Synthetic oligonucleotide
tagccgtcagataagcgagctggctccacgggttcgcagacaaggtagcacc

SEQ ID NO: 220804 - DNA, 52 bp, Artificial
  Synthetic oligonucleotide
cctcacgccattcaggataaccggtagccgctttgcccgtcacccacgcttt

SEQ ID NO: 220805 - DNA, 52 bp, Artificial
  Synthetic oligonucleotide
ctaccggctgaacccaccctaatttcccgttcgtttcaactgcacgggtcag

SEQ ID NO: 220806 - DNA, 52 bp, Artificial
  Synthetic oligonucleotide
cgacaacctccacccccggaatataagtcatgcggttcacagctccggggcc

SEQ ID NO: 220807 - DNA, 52 bp, Artificial
  Synthetic oligonucleotide
actcagcaacaggttatacagaatgtcgttctcgtcacgtatcagttccgga

SEQ ID NO: 220808 - DNA, 52 bp, Artificial
  Synthetic oligonucleotide
ggctacacgggacaaatgtctgacgctgctacgatacagtggcgtatgctca

SEQ ID NO: 220809 - DNA, 54 bp, Artificial
  Synthetic oligonucleotide
catccgtaagctccggccatttcccttacgggaacttcgagcggagtctcgaaa

SEQ ID NO: 220810 - DNA, 52 bp, Artificial
  Synthetic oligonucleotide
ccaatggcccccgttcgattaccgcactgcctccgtaccaacggctggccgc

SEQ ID NO: 220811 - DNA, 52 bp, Artificial
  Synthetic oligonucleotide
ctcgaattcccacggatctgtatttccggtaaccgattgggattagaaccga

SEQ ID NO: 220812 - DNA, 52 bp, Artificial
  Synthetic oligonucleotide
cctcccggcatatgggcggcagagacagagtattcgcccaacgcaagatgta

SEQ ID NO: 220813 - DNA, 52 bp, Artificial
  Synthetic oligonucleotide
cctctctgcgccgaaccatacgactctagagaggctgcaatgcgttaataac

SEQ ID NO: 220814 - DNA, 52 bp, Artificial
  Synthetic oligonucleotide
agagcctgacaaatttctctgtcaggccttccttgtacccttaaacgttata

SEQ ID NO: 220815 - DNA, 51 bp, Artificial
  Synthetic oligonucleotide
gaggcctttgcagccgcggcgttgggagtgacggttacgatttccgttgtc

SEQ ID NO: 220816 - DNA, 51 bp, Artificial
  Synthetic oligonucleotide
ttggctcttgtggctgacggattggttggtgtgcaagacggagttcgccct

SEQ ID NO: 220817 - DNA, 51 bp, Artificial
  Synthetic oligonucleotide
acagttcgggcgaatcgctccacaagcgcggttaccgggtagctcagaccg

SEQ ID NO: 220818 - DNA, 51 bp, Artificial
  Synthetic oligonucleotide
agtgcatgtggtgcatcgtcttgccggagctaccaacggacgcgaagctgc

SEQ ID NO: 220819 - DNA, 51 bp, Artificial
  Synthetic oligonucleotide
agtgcgggagtcgatctgcgaagtgacacggaaagccatacgggcagggaa

SEQ ID NO: 220820 - DNA, 55 bp, Artificial
  Synthetic oligonucleotide
catagcgtgacgcctcagttgatcgaccctgtgctgctagtgatggctgcagatc

SEQ ID NO: 220821 - DNA, 51 bp, Artificial
  Synthetic oligonucleotide
gctttccgttacgaatacgttacctgttttacgctgtggcaagccattcaa

SEQ ID NO: 220822 - DNA, 51 bp, Artificial
  Synthetic oligonucleotide
cgtaaatatggcatcgtgtaccaatggaccggttgttactctccacgattt

SEQ ID NO: 220823 - DNA, 51 bp, Artificial
  Synthetic oligonucleotide
aggtcgctcactggccgatccgtgggttattgctcacgccatgtcggagtc

SEQ ID NO: 220824 - DNA, 51 bp, Artificial
  Synthetic oligonucleotide
gatcataaacaaacgcagcgcataattgctattcagcccgttacggttcgc

SEQ ID NO: 220825 - DNA, 51 bp, Artificial
  Synthetic oligonucleotide
aggtaactggggtttcggtgaatccaacctgaactaccgtgcccgtgaata

SEQ ID NO: 220826 - DNA, 51 bp, Artificial
  Synthetic oligonucleotide
ccgtgtgcgcgactgtgtgaagtcaggaagccgaaaggtaaccagcgacgg

SEQ ID NO: 220827 - DNA, 51 bp, Artificial
  Synthetic oligonucleotide
taaagggggaagctgcggacattaggattagcggcgatgcgatgcgtgtgg

SEQ ID NO: 220828 - DNA, 51 bp, Artificial
  Synthetic oligonucleotide
cgggtttagtggatcggctcagttattcactgatggcaaaagaaccggatt

SEQ ID NO: 220829 - DNA, 51 bp, Artificial
  Synthetic oligonucleotide
gttaaccgggtcgatcttgtagattgctgggttcccgtcggtcgtcgttac

SEQ ID NO: 220830 - DNA, 51 bp, Artificial
  Synthetic oligonucleotide
gcatattcccggcaaccgtcgcataaacgtttaccgtctccgttagcaggc

SEQ ID NO: 220831 - DNA, 55 bp, Artificial
  Synthetic oligonucleotide
cagtcgccgatagcccgtgcagaaccggccgcatagagagtatcgaaatcttgcg

SEQ ID NO: 220832 - DNA, 51 bp, Artificial
  Synthetic oligonucleotide
cctaccagtgcaggggcttcccaaccgcctatggctgtgattacacgggct

SEQ ID NO: 220833 - DNA, 51 bp, Artificial
  Synthetic oligonucleotide
tcagtaggcatacccgtctatttattatcaaaccgccctgatgtaagggca

SEQ ID NO: 220834 - DNA, 51 bp, Artificial
  Synthetic oligonucleotide
aggaattgcatgtctatttcgcttatggggttattgatgaggtgcattgtg

SEQ ID NO: 220835 - DNA, 51 bp, Artificial
  Synthetic oligonucleotide
tcacaagccaccgcttaccgtgatttggccgctatccggaggctcgtagga

SEQ ID NO: 220836 - DNA, 51 bp, Artificial
  Synthetic oligonucleotide
aggacagcggagaacgggattacaaatcccgaaggacgggagggacgagcg

SEQ ID NO: 220837 - DNA, 51 bp, Artificial
  Synthetic oligonucleotide
gcccgagggtctcggaggtgccgtatacgttatctgacggggccggactca

SEQ ID NO: 220838 - DNA, 49 bp, Artificial
  Synthetic oligonucleotide
aaccggtgtcccggttgtacaaggcccctcgtccgatagttggggttcg

SEQ ID NO: 220839 - DNA, 51 bp, Artificial
  Synthetic oligonucleotide
ttcgctcatctgccctgttgctctcaggtggttgagtagccgtgggttgcg

SEQ ID NO: 220840 - DNA, 51 bp, Artificial
  Synthetic oligonucleotide
cccgtcatagcgacgagatcggttacatgatcggttccgtgcatttcgaac

SEQ ID NO: 220841 - DNA, 51 bp, Artificial
  Synthetic oligonucleotide
cgttgcgtccactgcttccggcatcactaaatcgagctgagactaacttta

SEQ ID NO: 220842 - DNA, 55 bp, Artificial
  Synthetic oligonucleotide
cagtcctacggctaaaggatatcgcagatgtagagctcggaactttgacttatgg

SEQ ID NO: 220843 - DNA, 51 bp, Artificial
  Synthetic oligonucleotide
cggtgatttgcgtgccgcgtgtcatcgggtggttgtcaccgggaaatccct

SEQ ID NO: 220844 - DNA, 51 bp, Artificial
  Synthetic oligonucleotide
tgtattaaacccgtgatccgaggtttacaatcccagctacaagaagcacga

SEQ ID NO: 220845 - DNA, 51 bp, Artificial
  Synthetic oligonucleotide
ttgcaatcgcatggttgctcccctctttagcggacggacacggactgagag

SEQ ID NO: 220846 - DNA, 51 bp, Artificial
  Synthetic oligonucleotide
ccagtcaccgaaaagagcaggccgggacatttcccttgcagcatcggccct

SEQ ID NO: 220847 - DNA, 51 bp, Artificial
  Synthetic oligonucleotide
agcccgtatcacaagccaccgcttaccgtgatttggccgctatccggaggc

SEQ ID NO: 220848 - DNA, 51 bp, Artificial
  Synthetic oligonucleotide
agatggcagccgtgtatcctgccggtcccgagccaataatcaaacaacgca

SEQ ID NO: 220849 - DNA, 51 bp, Artificial
  Synthetic oligonucleotide
ccgcgtgtcatcgggtggttgtcaccgggaaatccctccgtcacttcggcg

SEQ ID NO: 220850 - DNA, 51 bp, Artificial
  Synthetic oligonucleotide
caccggatggaccacccaatccgcctctggagagtccgctacggcttgtgt

SEQ ID NO: 220851 - DNA, 51 bp, Artificial
  Synthetic oligonucleotide
aaccaattgcccaacgttgctacccacacgcaggtccacgcatcaagccct

SEQ ID NO: 220852 - DNA, 51 bp, Artificial
  Synthetic oligonucleotide
ataacacagccggagtctctgcgcccagttgcgtggaagcgaccgtaggta

SEQ ID NO: 220853 - DNA, 55 bp, Artificial
  Synthetic oligonucleotide
ctcgcacttgctgattggtctaagcacaccccgtcctctagtgacaaactccgcc

SEQ ID NO: 220854 - DNA, 51 bp, Artificial
  Synthetic oligonucleotide
tcgaaaggaatggctggtgcggccaccttagctacaggtgcggctctacgt

SEQ ID NO: 220855 - DNA, 51 bp, Artificial
  Synthetic oligonucleotide
tcgctgctaccgccccgcacataaaatccgatattgccctctcccgcagtt

SEQ ID NO: 220856 - DNA, 51 bp, Artificial
  Synthetic oligonucleotide
atacggttctatgtacgggaatacggaattaatggccgaaacagtagctca

SEQ ID NO: 220857 - DNA, 51 bp, Artificial
  Synthetic oligonucleotide
gaccgcaccgggccgtgggttcttatggacggctacaataaagccagaccg

SEQ ID NO: 220858 - DNA, 51 bp, Artificial
  Synthetic oligonucleotide
gaaccggctccataacacagccggagtctctgcgcccagttgcgtggaagc

SEQ ID NO: 220859 - DNA, 51 bp, Artificial
  Synthetic oligonucleotide
acgtggacaaagccacgtttgatacattgccccttgctgcccccaaccccg

SEQ ID NO: 220860 - DNA, 51 bp, Artificial
  Synthetic oligonucleotide
atcgtaggggttcagccggccttggagcagacgggcgattttgctgtcata

SEQ ID NO: 220861 - DNA, 51 bp, Artificial
  Synthetic oligonucleotide
ccggtcattttcaccggagcccagctaccgataggcatgatgcgctcggat

SEQ ID NO: 220862 - DNA, 51 bp, Artificial
  Synthetic oligonucleotide
atctcgaacatggtaccgaccctcaaggtatcggcgcatgctacggtttct

SEQ ID NO: 220863 - DNA, 51 bp, Artificial
  Synthetic oligonucleotide
attccgagactgcagggaggcatcaggctgttcggagacgctcttgcgcct

SEQ ID NO: 220864 - DNA, 55 bp, Artificial
  Synthetic oligonucleotide
caggtagctgccgtaaggacggattacgcgttgcacatagctgagagccaactcc

SEQ ID NO: 220865 - DNA, 51 bp, Artificial
  Synthetic oligonucleotide
tgatgcacatcggcctgacaaccctttaccgtaagatcgaggagtacggaa

SEQ ID NO: 220866 - DNA, 50 bp, Artificial
  Synthetic oligonucleotide
tacatgcggggctttggttctccggtactgatggttgacggacagcgcga

SEQ ID NO: 220867 - DNA, 50 bp, Artificial
  Synthetic oligonucleotide
taacgctcagcgccgatataagccgaagcataccggccctctgcgacctg

SEQ ID NO: 220868 - DNA, 50 bp, Artificial
  Synthetic oligonucleotide
tacccacacgcaggtccacgcatcaagccctccaaaaaccatagccgaga

SEQ ID NO: 220869 - DNA, 50 bp, Artificial
  Synthetic oligonucleotide
taccgtaatcacagtaccggcaggccactgacgggaagatgacccggtgc

SEQ ID NO: 220870 - DNA, 50 bp, Artificial
  Synthetic oligonucleotide
acacgagcgaacgatggcaaaaacttgccgcacaggtggccgagttgggt

SEQ ID NO: 220871 - DNA, 50 bp, Artificial
  Synthetic oligonucleotide
taacccgagatggaagatcgggcacgtgacggacggtgtcgatacggggg

SEQ ID NO: 220872 - DNA, 50 bp, Artificial
  Synthetic oligonucleotide
gtacacgctgatccacttctgggcggcatacgatggagagagcagggccg

SEQ ID NO: 220873 - DNA, 50 bp, Artificial
  Synthetic oligonucleotide
acctacttcccacgctacccgagggagatcacaccgccaccctccgtgta

SEQ ID NO: 220874 - DNA, 50 bp, Artificial
  Synthetic oligonucleotide
accggcggaactcctcactacgttcgtcagacaccaccggtcgggcgttc

SEQ ID NO: 220875 - DNA, 60 bp, Artificial
  Synthetic oligonucleotide
ttgctccgaggcgctctgatacggtggtgcatggatatcggggatcggatggtgtagcct

SEQ ID NO: 220876 - DNA, 55 bp, Artificial
  Synthetic oligonucleotide
caggctcgaccacactcagaaaagataagtaatggactacaaactcacttctcga

SEQ ID NO: 220877 - DNA, 50 bp, Artificial
  Synthetic oligonucleotide
accgcccgctggtatcagtggtacatgaaccctgacatgcccaagctggc

SEQ ID NO: 220878 - DNA, 50 bp, Artificial
  Synthetic oligonucleotide
aaaagaatcccggcacgaggcgttctaccgcccgtctcaaaccgacaggc

SEQ ID NO: 220879 - DNA, 50 bp, Artificial
  Synthetic oligonucleotide
aaaatgtcgcgcggggtatccgaagggatagccacccggtcgtatggccg

SEQ ID NO: 220880 - DNA, 50 bp, Artificial
  Synthetic oligonucleotide
accgaacggctgcctcagaagtaagcggagcctcgggggcttctccggct

SEQ ID NO: 220881 - DNA, 50 bp, Artificial
  Synthetic oligonucleotide
acccggtcgtcatagattcgttcccctcccgccaggtcctttgtgcaccc

SEQ ID NO: 220882 - DNA, 50 bp, Artificial
  Synthetic oligonucleotide
gtcactttcagccggcaaaacggttgtgggtcgccgaggaacgaagcgct

SEQ ID NO: 220883 - DNA, 50 bp, Artificial
  Synthetic oligonucleotide
acccggaaaggtacggcagagcatcgactggttgctgtcgcgcgagggag

SEQ ID NO: 220884 - DNA, 50 bp, Artificial
  Synthetic oligonucleotide
acccgaagatttcgtcgtgcacggtccgaaccaaatgacagccctgccga

SEQ ID NO: 220885 - DNA, 50 bp, Artificial
  Synthetic oligonucleotide
acccccaacgaagacggtactctagccctccgaggggatagtgacgccct

SEQ ID NO: 220886 - DNA, 50 bp, Artificial
  Synthetic oligonucleotide
accatcgcggagtcctctgggttgggacgtatcggcggggtttgtggtat

SEQ ID NO: 220887 - DNA, 55 bp, Artificial
  Synthetic oligonucleotide
cttttcttacatcgatcatattgctccgcattgtacgagtaacgagcatttcaag

SEQ ID NO: 220888 - DNA, 50 bp, Artificial
  Synthetic oligonucleotide
accaggccgacgggttagtcattgccacccccactggctctacggcttat

SEQ ID NO: 220889 - DNA, 50 bp, Artificial
  Synthetic oligonucleotide
acatcggaagccggggctacgacttacaatacgacaggcacagggggcga

SEQ ID NO: 220890 - DNA, 50 bp, Artificial
  Synthetic oligonucleotide
acaggggttttcgccgtggcgcgagtagctacgacctgtacggtctggag

SEQ ID NO: 220891 - DNA, 50 bp, Artificial
  Synthetic oligonucleotide
acagcctttacccgagcgtaaatccccgagcctacagtacccgtgaaata

SEQ ID NO: 220892 - DNA, 50 bp, Artificial
  Synthetic oligonucleotide
aaacgaacaggacgactggaccgctggttcaggcagagccgagggctacg

SEQ ID NO: 220893 - DNA, 50 bp, Artificial
  Synthetic oligonucleotide
gtggtgagcaatccgctttgggtggccgtacaggccttgcccgtgatgac

SEQ ID NO: 220894 - DNA, 50 bp, Artificial
  Synthetic oligonucleotide
acacggtgagcgcgaggggtgagaccccacttttgggcagcaaagggaac

SEQ ID NO: 220895 - DNA, 50 bp, Artificial
  Synthetic oligonucleotide
aaacgggcaactatgcaggttactcgtttgccgtccccatcaatagtgct

SEQ ID NO: 220896 - DNA, 50 bp, Artificial
  Synthetic oligonucleotide
gttgaccgctcggttacaggcaaggttgcacgccaacagacacaggggga

SEQ ID NO: 220897 - DNA, 50 bp, Artificial
  Synthetic oligonucleotide
acacgccattacttccggcaagcggaccagtcagctcgttctgagcggca

SEQ ID NO: 220898 - DNA, 55 bp, Artificial
  Synthetic oligonucleotide
atcgtatcaatggttccggtagctttaaggctgctgatatgacgatggaatcaac

SEQ ID NO: 220899 - DNA, 50 bp, Artificial
  Synthetic oligonucleotide
aagcgtctccgagaggcgtgccgtaagagggcggtcgctatactgcatct

SEQ ID NO: 220900 - DNA, 50 bp, Artificial
  Synthetic oligonucleotide
tcctcggctatcatgagggagggaacacggtctctaacatgagttcgaca

SEQ ID NO: 220901 - DNA, 50 bp, Artificial
  Synthetic oligonucleotide
aagccgctccgggacatgatggttctcccgctatacctagcccgggagat

SEQ ID NO: 220902 - DNA, 50 bp, Artificial
  Synthetic oligonucleotide
tcgcttggcatgggtagagggaggatcgctccgcaatgctattccgcgcg

SEQ ID NO: 220903 - DNA, 50 bp, Artificial
  Synthetic oligonucleotide
tcggcacagaatagacctgatatcctaaataagtaccggaaagtaaagct

SEQ ID NO: 220904 - DNA, 50 bp, Artificial
  Synthetic oligonucleotide
aagcccccagtgaggtccctttgataatgaccgtggccccttgcagggga

SEQ ID NO: 220905 - DNA, 50 bp, Artificial
  Synthetic oligonucleotide
aagatgccgcgcctcgtaacgacggaaggcgttgaagtcactccgagcac

SEQ ID NO: 220906 - DNA, 50 bp, Artificial
  Synthetic oligonucleotide
tcggcgtcaggctccacctacgggcacacagggtttaccggcacatgcgt

SEQ ID NO: 220907 - DNA, 50 bp, Artificial
  Synthetic oligonucleotide
tcgtagggtgttgggagttattcgcccaacggtggaggctgtaggcgcaa

SEQ ID NO: 220908 - DNA, 50 bp, Artificial
  Synthetic oligonucleotide
aacatggctcggctgcccaagcaaaactcgtgcgttgcatccatggggag

SEQ ID NO: 220909 - DNA, 55 bp, Artificial
  Synthetic oligonucleotide
gaaaacagtaatgcgaatataacccgtagcctggataatattaccgggatcagcg

SEQ ID NO: 220910 - DNA, 50 bp, Artificial
  Synthetic oligonucleotide
aagacgtcgcaataccgcatccgcatcgtgcgtatctctgtgccggcaga

SEQ ID NO: 220911 - DNA, 50 bp, Artificial
  Synthetic oligonucleotide
aactctcgcaggtgggggttcgcagggctagagaaggggaagttgcggag

SEQ ID NO: 220912 - DNA, 50 bp, Artificial
  Synthetic oligonucleotide
aactacacgcccttcgcacacgattcgccggaggggatgagcctttgccc

SEQ ID NO: 220913 - DNA, 50 bp, Artificial
  Synthetic oligonucleotide
aacggtgcaaagtgccggttgggagcagggatatggaaactgcgtgcagg

SEQ ID NO: 220914 - DNA, 50 bp, Artificial
  Synthetic oligonucleotide
tggcatagccacagcgttgcaaccccgtagcccagccccgatagtcttct

SEQ ID NO: 220915 - DNA, 50 bp, Artificial
  Synthetic oligonucleotide
aacgacacagtttgcctgcggctgaacagagggcgaacgtccgccttaca

SEQ ID NO: 220916 - DNA, 50 bp, Artificial
  Synthetic oligonucleotide
aacctgtggcgaggcgatgtacgtggagcggctgagatcgggcggacgag

SEQ ID NO: 220917 - DNA, 50 bp, Artificial
  Synthetic oligonucleotide
aaccaattgtggggatatgtcggggtcgactacgtccggcaagtccgccc

SEQ ID NO: 220918 - DNA, 50 bp, Artificial
  Synthetic oligonucleotide
tgtccaccggggagactttcctcgtggaggtggcgatacatccgggcaac

SEQ ID NO: 220919 - DNA, 50 bp, Artificial
  Synthetic oligonucleotide
aaccgtcggttgtaccgtccgcaagggtattgagcgttgtttgccgccct

SEQ ID NO: 220920 - DNA, 55 bp, Artificial
  Synthetic oligonucleotide
gaaagggatatcccctagatttcaagtggagagtcattgacgacctcctagccac

SEQ ID NO: 220921 - DNA, 50 bp, Artificial
  Synthetic oligonucleotide
ttcacatagtggtcgcgtctgtccacggggcggtaaacgatctccccgta

SEQ ID NO: 220922 - DNA, 50 bp, Artificial
  Synthetic oligonucleotide
ttcctctggactcgattgtattgagtgacccgtgtattttagccgatccg

SEQ ID NO: 220923 - DNA, 50 bp, Artificial
  Synthetic oligonucleotide
tacggtggtagccggagtagtggccgcttcaaaggctcctatcttggggc

SEQ ID NO: 220924 - DNA, 50 bp, Artificial
  Synthetic oligonucleotide
tacgtttcgggtcgattgagcactccgaatccgccaccaccgagcactcc

SEQ ID NO: 220925 - DNA, 50 bp, Artificial
  Synthetic oligonucleotide
acacctcgaatttgagggaggggctcgcagagagaggcgtaccccaagga

SEQ ID NO: 220926 - DNA, 50 bp, Artificial
  Synthetic oligonucleotide
acaagaggtggcagtctgcgctgcaacgacggcaaatgttcgcccaacgg

SEQ ID NO: 220927 - DNA, 50 bp, Artificial
  Synthetic oligonucleotide
aattgctcgtggagctcgtccgagagagagggcgcttcgttgggttgcac

SEQ ID NO: 220928 - DNA, 50 bp, Artificial
  Synthetic oligonucleotide
tacttcctcgtgtaccgctgctggaactcagatgatgggtgaaaaccgaa

SEQ ID NO: 220929 - DNA, 50 bp, Artificial
  Synthetic oligonucleotide
aatattgcagtccggccgccaaacgccgataaacgatccggggcaaccat

SEQ ID NO: 220930 - DNA, 50 bp, Artificial
  Synthetic oligonucleotide
aataccgtgcacgcaagcaggctgagactcgggcattggatgcggtctta

SEQ ID NO: 220931 - DNA, 53 bp, Artificial
  Synthetic oligonucleotide
atcgagggagtgtccaaggaaacgggcgagtcggttaagatccctttcgccga

SEQ ID NO: 220932 - DNA, 50 bp, Artificial
  Synthetic oligonucleotide
tagatgtcgcgtgcggaatgtcccgttgccaggataacaggaccgcagta

SEQ ID NO: 220933 - DNA, 50 bp, Artificial
  Synthetic oligonucleotide
aagtaccgtcacacctgctttgcgggcgtacgaaagctctgcccgacctc

SEQ ID NO: 220934 - DNA, 50 bp, Artificial
  Synthetic oligonucleotide
aaggtgccacttccaaccctgctgctgtcagagcactctgtcccggtccc

SEQ ID NO: 220935 - DNA, 50 bp, Artificial
  Synthetic oligonucleotide
tagttgcctcccaacgggtaggatagtgcgtggacggctcctactcctgc

SEQ ID NO: 220936 - DNA, 50 bp, Artificial
  Synthetic oligonucleotide
tataccgaatgtgggccaccggactcttcaaggcatgagccggtcgctcc

SEQ ID NO: 220937 - DNA, 50 bp, Artificial
  Synthetic oligonucleotide
tatcgggaagcaactctcgcaggtgggggttcgcagggctagagaagggg

SEQ ID NO: 220938 - DNA, 50 bp, Artificial
  Synthetic oligonucleotide
tcaggtcggtaacgggaattgagctgccccgctctcaacgtccccgtgat

SEQ ID NO: 220939 - DNA, 50 bp, Artificial
  Synthetic oligonucleotide
tcatccccgtcacgggtaagcgaagcgaacagtgctccgtaaggcagact

SEQ ID NO: 220940 - DNA, 50 bp, Artificial
  Synthetic oligonucleotide
tccacccgtcggtaaggaggagtgcgaaatgccgaacggaactgaacgct

SEQ ID NO: 220941 - DNA, 50 bp, Artificial
  Synthetic oligonucleotide
tccacttcgcacattcctaccagtgcaggggcttcccaaccgcctatggc

SEQ ID NO: 220942 - DNA, 55 bp, Artificial
  Synthetic oligonucleotide
atccggctccgtgtctcgtgcgtcgtttcctaagatgtccgtgttgacaggtact

SEQ ID NO: 220943 - DNA, 50 bp, Artificial
  Synthetic oligonucleotide
tcccaggtcagaggagcccatcgatatggagacttgaacgggccggcacc

SEQ ID NO: 220944 - DNA, 50 bp, Artificial
  Synthetic oligonucleotide
tcccgcgctttggcactctccccgcgatagaattcgttcccgtcatgtcg

SEQ ID NO: 220945 - DNA, 50 bp, Artificial
  Synthetic oligonucleotide
aaggggttggagttgcgggggagtgtggcagtgtcacaggccggatatta

SEQ ID NO: 220946 - DNA, 50 bp, Artificial
  Synthetic oligonucleotide
aagggacgcaccatcaccccgtcacgcaatcccgaccgtatcagacgttg

SEQ ID NO: 220947 - DNA, 50 bp, Artificial
  Synthetic oligonucleotide
atggcccggcccgagggtctcggaggtgccgtatacgttatctgacgggg

SEQ ID NO: 220948 - DNA, 50 bp, Artificial
  Synthetic oligonucleotide
atgaccgtggccccttgcaggggattaccttgttcgtccactacccggcc

SEQ ID NO: 220949 - DNA, 50 bp, Artificial
  Synthetic oligonucleotide
atcgtcgggattcataatgctgggcaccccatcccggatcatcgtccccg

SEQ ID NO: 220950 - DNA, 50 bp, Artificial
  Synthetic oligonucleotide
atcgggtactggagcggtttcggggagtcattactcaggtccctccggcg

SEQ ID NO: 220951 - DNA, 50 bp, Artificial
  Synthetic oligonucleotide
atccggcctgactgttcccgcccgatagcgcttcataagctccccgtact

SEQ ID NO: 220952 - DNA, 50 bp, Artificial
  Synthetic oligonucleotide
atccgaagggatagccacccggtcgtatggccgctgtttgatgcagggcc

SEQ ID NO: 220953 - DNA, 55 bp, Artificial
  Synthetic oligonucleotide
gaacaatagccgtatcgtaggagttaagtaccggagaactgattcgttcttcgct

SEQ ID NO: 220954 - DNA, 50 bp, Artificial
  Synthetic oligonucleotide
atcccgtatattcaccggctgcccccgaattgggttgcagggttaccccc

SEQ ID NO: 220955 - DNA, 50 bp, Artificial
  Synthetic oligonucleotide
atcccctgcggccggtcaactacacctccatctctacacgtccccgcccc

SEQ ID NO: 220956 - DNA, 50 bp, Artificial
  Synthetic oligonucleotide
atcatccgactctgccgatagcccgtgtacccctgcaaattgccggccta

SEQ ID NO: 220957 - DNA, 50 bp, Artificial
  Synthetic oligonucleotide
gaatggcatggatgcaacgggagtcagcgtactggggtccgacgggtctt

SEQ ID NO: 220958 - DNA, 50 bp, Artificial
  Synthetic oligonucleotide
atcacaggactaaccgccaaccacatccgggtgttgctctcacgcggacg

SEQ ID NO: 220959 - DNA, 50 bp, Artificial
  Synthetic oligonucleotide
atacgggatgggtaccggtcgatgtgtcgtttggacgtggcggacctgta

SEQ ID NO: 220960 - DNA, 50 bp, Artificial
  Synthetic oligonucleotide
gagacggcttcgtggctgaagtccgtaaacgacatggccaccacgcggct

SEQ ID NO: 220961 - DNA, 50 bp, Artificial
  Synthetic oligonucleotide
ataatgctgggcaccccatcccggatcatcgtccccgtagcggggtccaa

SEQ ID NO: 220962 - DNA, 50 bp, Artificial
  Synthetic oligonucleotide
agtacgtcagctaaccatagaagatttatcgcaaaacgctgtgcttgact

SEQ ID NO: 220963 - DNA, 50 bp, Artificial
  Synthetic oligonucleotide
agtaagcccaccggatggaccacccaatccgcctctggagagtccgctac

SEQ ID NO: 220964 - DNA, 55 bp, Artificial
  Synthetic oligonucleotide
gaaccacctgatcatagaagccaattatgacgaggagatgttgcaattcggcacg

SEQ ID NO: 220965 - DNA, 50 bp, Artificial
  Synthetic oligonucleotide
gagggtcacgtaatcgtaggggttcagccggccttggagcagacgggcga

SEQ ID NO: 220966 - DNA, 50 bp, Artificial
  Synthetic oligonucleotide
agggaaagggtggtatcgcgagtaaccgggagagcccctaggtcgggagg

SEQ ID NO: 220967 - DNA, 50 bp, Artificial
  Synthetic oligonucleotide
aggcttgggcggggagtgtagaggggaggtcacctccagagactaggctt

SEQ ID NO: 220968 - DNA, 50 bp, Artificial
  Synthetic oligonucleotide
aggcttgcgcgagtagtcgctcgtcgagtagggagcggtcgtggcactcg

SEQ ID NO: 220969 - DNA, 50 bp, Artificial
  Synthetic oligonucleotide
gcaacgggagtcagcgtactggggtccgacgggtcttggataaagcccag

SEQ ID NO: 220970 - DNA, 50 bp, Artificial
  Synthetic oligonucleotide
aggctcctcgtggtaatcaatgcgatagggcggggtggcatcgaagtcga

SEQ ID NO: 220971 - DNA, 50 bp, Artificial
  Synthetic oligonucleotide
gcactacggtgtatctgaatgctgcgcctgaggcactcgctgcacggtta

SEQ ID NO: 220972 - DNA, 50 bp, Artificial
  Synthetic oligonucleotide
aggcgttacagggggcagatggatagatcgcatacctccgcgctgccatc

SEQ ID NO: 220973 - DNA, 50 bp, Artificial
  Synthetic oligonucleotide
aggccgtctcaccgaggggaatggtcgttatcgcccgccacacagacaga

SEQ ID NO: 220974 - DNA, 50 bp, Artificial
  Synthetic oligonucleotide
aggcatgaagcacaccataccggtcgcttgacgatgagaacccgccccaa

SEQ ID NO: 220975 - DNA, 55 bp, Artificial
  Synthetic oligonucleotide
gaacgatgcgaccacactcgaagagatggagtgccgcatgattcgccgcacgatg

SEQ ID NO: 220976 - DNA, 50 bp, Artificial
  Synthetic oligonucleotide
aggcaggtcgttccttacggacagaacggacacgacgctttgggggcgat

SEQ ID NO: 220977 - DNA, 50 bp, Artificial
  Synthetic oligonucleotide
cggcaatgtagcatggggcgcagtcaccaaagcgacagaactcggagcta

SEQ ID NO: 220978 - DNA, 50 bp, Artificial
  Synthetic oligonucleotide
cgcacacggtccatatatccctgcgctttgggaccaccaagttccgcgcc

SEQ ID NO: 220979 - DNA, 50 bp, Artificial
  Synthetic oligonucleotide
cggcacgtgatagttgcctcccaacgggtaggatagtgcgtggacggctc

SEQ ID NO: 220980 - DNA, 50 bp, Artificial
  Synthetic oligonucleotide
cgacgcatcaggcgttactcccgaatggaggcaagcccgtggcgccagtg

SEQ ID NO: 220981 - DNA, 50 bp, Artificial
  Synthetic oligonucleotide
cgaaggacgtacaggcttgcctgcccggtcgagccattgcaattgtgtga

SEQ ID NO: 220982 - DNA, 50 bp, Artificial
  Synthetic oligonucleotide
cgtccgggctgggtatctttagggccggcaggcagattaccgggagttgt

SEQ ID NO: 220983 - DNA, 50 bp, Artificial
  Synthetic oligonucleotide
ccgtaaacgacatggccaccacgcggctccacttcgtccctccgacgacg

SEQ ID NO: 220984 - DNA, 50 bp, Artificial
  Synthetic oligonucleotide
ccggcccgcctgggtatctcatggcaggatttcgtagacatgggacgtga

SEQ ID NO: 220985 - DNA, 50 bp, Artificial
  Synthetic oligonucleotide
ccggagctaccaacggacgcgaagctgccatgggaaccatgcgtggagat

SEQ ID NO: 220986 - DNA, 58 bp, Artificial
  Synthetic oligonucleotide
cacgggttgtctcctcgagcgtcaccgcttgataaagggcatagagcctagccccctc

SEQ ID NO: 220987 - DNA, 55 bp, Artificial
  Synthetic oligonucleotide
gaagctcgaccgcgtaaatgcgcagaattcgtttcagaatgccgaaattcgtctc

SEQ ID NO: 220988 - DNA, 50 bp, Artificial
  Synthetic oligonucleotide
ccggagactttagcatagagggagctattgttgggtacgagctaacccct

SEQ ID NO: 220989 - DNA, 50 bp, Artificial
  Synthetic oligonucleotide
cgtggctgaagtccgtaaacgacatggccaccacgcggctccacttcgtc

SEQ ID NO: 220990 - DNA, 50 bp, Artificial
  Synthetic oligonucleotide
ccgcacggtctttcccgtcgtagacgtagtatacgggatccacgcccggc

SEQ ID NO: 220991 - DNA, 50 bp, Artificial
  Synthetic oligonucleotide
ccgcaacccgtgtaccgtcacgcataagcatcacaacagccccggccaaa

SEQ ID NO: 220992 - DNA, 50 bp, Artificial
  Synthetic oligonucleotide
ccctgcacactccgccgtacgagcaatagccccgaagttccgcacatcgg

SEQ ID NO: 220993 - DNA, 50 bp, Artificial
  Synthetic oligonucleotide
cccggcgtatgcttccaatccggccctcttccgaatccggtcgaggtcgt

SEQ ID NO: 220994 - DNA, 50 bp, Artificial
  Synthetic oligonucleotide
cccgcgacagagcggcctgcttacccggcgtaaattccaggctaccatgc

SEQ ID NO: 220995 - DNA, 50 bp, Artificial
  Synthetic oligonucleotide
cccgcccggagtatataccggctccatcggattggcttccaccgcaccga

SEQ ID NO: 220996 - DNA, 50 bp, Artificial
  Synthetic oligonucleotide
cccgacatggagttctggggacgtcacaggcatgttatgtcacccgccgc

SEQ ID NO: 220997 - DNA, 50 bp, Artificial
  Synthetic oligonucleotide
ccccggaagcacaaagctacgccctaggttccacacccggaggtcggccc

SEQ ID NO: 220998 - DNA, 55 bp, Artificial
  Synthetic oligonucleotide
gaccacgttgactcccgatggcacagcctccaacatcggcaagggatatgcacgg

SEQ ID NO: 220999 - DNA, 50 bp, Artificial
  Synthetic oligonucleotide
cccaaaagcagtcagcgtgaggttgcctagggcgtgggggctactcctcc

SEQ ID NO: 221000 - DNA, 50 bp, Artificial
  Synthetic oligonucleotide
ccatttccactccgggttcattgccggcacggctcacaggcaatgtctcc

SEQ ID NO: 221001 - DNA, 50 bp, Artificial
  Synthetic oligonucleotide
catcgtcttgccggagctaccaacggacgcgaagctgccatgggaaccat

SEQ ID NO: 221002 - DNA, 50 bp, Artificial
  Synthetic oligonucleotide
cagtaaatcgatgagccggcctggcgtagctactaccacgtgggtggggc

SEQ ID NO: 221003 - DNA, 50 bp, Artificial
  Synthetic oligonucleotide
caggatttacccggattccggcggttgctgggagacggggcggattacgg

SEQ ID NO: 221004 - DNA, 50 bp, Artificial
  Synthetic oligonucleotide
caacaggtagccgaccgttgtctgatggcaggctccgaccgacaggccca

SEQ ID NO: 221005 - DNA, 50 bp, Artificial
  Synthetic oligonucleotide
caaaggcaacatcgtgcgtgtgatctccggaggtaccgctcccggcacat

SEQ ID NO: 221006 - DNA, 50 bp, Artificial
  Synthetic oligonucleotide
attgtccgtccgccaaccggctgtctgaacagccactttccccagacgta

SEQ ID NO: 221007 - DNA, 50 bp, Artificial
  Synthetic oligonucleotide
atggtacctgcgttcatagttaccgccccattggtcgggagctgcgggca

SEQ ID NO: 221008 - DNA, 50 bp, Artificial
  Synthetic oligonucleotide
agcaatatggcgtcgtgggtgcctcggtcgaataaggccggctacctaga

SEQ ID NO: 221009 - DNA, 55 bp, Artificial
  Synthetic oligonucleotide
atcaactccccaagctatatgacaccgagaagcaacttattggcgatcgtacagc

SEQ ID NO: 221010 - DNA, 50 bp, Artificial
  Synthetic oligonucleotide
agataggcgccacattacgaccgggacaccaatggccgatgctcgggcac

SEQ ID NO: 221011 - DNA, 50 bp, Artificial
  Synthetic oligonucleotide
agagccgttacctctgcccgaggatagcgttgtgccagcatcaaggcgat

SEQ ID NO: 221012 - DNA, 50 bp, Artificial
  Synthetic oligonucleotide
agagcacttctacgcgatcgtaacccgtgggcgagggagcatctaggggc

SEQ ID NO: 221013 - DNA, 50 bp, Artificial
  Synthetic oligonucleotide
ggagctaggggtcttgatcggtgacagcgggcatacggtaggccggaacg

SEQ ID NO: 221014 - DNA, 50 bp, Artificial
  Synthetic oligonucleotide
agacttccccacggtagaatctcccaaccccgaggagcctgcagcgctta

SEQ ID NO: 221015 - DNA, 50 bp, Artificial
  Synthetic oligonucleotide
ggcaatgcctgttgcatccgaagctcttgtttgtgcctgcggagccgcat

SEQ ID NO: 221016 - DNA, 50 bp, Artificial
  Synthetic oligonucleotide
agacggaccgggaataccgtgcacgcaagcaggctgagactcgggcattg

SEQ ID NO: 221017 - DNA, 50 bp, Artificial
  Synthetic oligonucleotide
agacgcgcccctttgcggtcgaatcccacgtagagcgacccgggattact

SEQ ID NO: 221018 - DNA, 50 bp, Artificial
  Synthetic oligonucleotide
ggccgaaatggagcgagaggtcgtgtacgggagccttgatccgagagccg

SEQ ID NO: 221019 - DNA, 50 bp, Artificial
  Synthetic oligonucleotide
actttgccggaggccggttgcacagtattgtatgctcgggcaaggcgcgt

SEQ ID NO: 221020 - DNA, 54 bp, Artificial
  Synthetic oligonucleotide
gacctatagaaagcgccttttgccggataacagcccattcttccgacttgggtt

SEQ ID NO: 221021 - DNA, 50 bp, Artificial
  Synthetic oligonucleotide
ggcgaattttcctgccgaggatttgaccgcaccgggccgtgggttcttat

SEQ ID NO: 221022 - DNA, 50 bp, Artificial
  Synthetic oligonucleotide
acttccgctatcgggaagcaactctcgcaggtgggggttcgcagggctag

SEQ ID NO: 221023 - DNA, 50 bp, Artificial
  Synthetic oligonucleotide
actgcccgcgccatggaaatgggagcggtagaaggagctatcagtggcct

SEQ ID NO: 221024 - DNA, 50 bp, Artificial
  Synthetic oligonucleotide
actgacgcgggttaccgggacgaaacagcaccgacgcttgcggctcgacg

SEQ ID NO: 221025 - DNA, 50 bp, Artificial
  Synthetic oligonucleotide
actatcgggcacgaagctcggagtctggattgcgcacggcgaagggcggt

SEQ ID NO: 221026 - DNA, 50 bp, Artificial
  Synthetic oligonucleotide
acggtgagtatcccgcgcgacacgacagtgggctatttgccgcagcagat

SEQ ID NO: 221027 - DNA, 50 bp, Artificial
  Synthetic oligonucleotide
acggtgaacctagccggtgggcagcctgtctccatggcaaacatgcgggc

SEQ ID NO: 221028 - DNA, 50 bp, Artificial
  Synthetic oligonucleotide
ggggccttatgatgtgacgcccccgcgtttgctcaaggctacgccggcaa

SEQ ID NO: 221029 - DNA, 50 bp, Artificial
  Synthetic oligonucleotide
acgggttctttatcttcgacccggcaacgcatgccatacgcccttggccg

SEQ ID NO: 221030 - DNA, 50 bp, Artificial
  Synthetic oligonucleotide
acggggatgtaggatgactgtgtggatgcacgcccgaacgagagcagcct

SEQ ID NO: 221031 - DNA, 55 bp, Artificial
  Synthetic oligonucleotide
gacgacaaaaggttagcgacgttgattggtgtcgtactgacagagaagtgcgaca

SEQ ID NO: 221032 - DNA, 50 bp, Artificial
  Synthetic oligonucleotide
acgccctaggttccacacccggaggtcggccctgtatgtgcccactggga

SEQ ID NO: 221033 - DNA, 50 bp, Artificial
  Synthetic oligonucleotide
ggtgccagacgcacctacgccgatgctatggcccgtttgtcgggtgctaa

SEQ ID NO: 221034 - DNA, 50 bp, Artificial
  Synthetic oligonucleotide
acgagccttaccatgcggaagggacactgaccgacggggaatatgcgcga

SEQ ID NO: 221035 - DNA, 50 bp, Artificial
  Synthetic oligonucleotide
acgagcccgagccacgaatacgaaacgacgaggtagaacccggctgtccg

SEQ ID NO: 221036 - DNA, 50 bp, Artificial
  Synthetic oligonucleotide
acgaccaactctccgcgtgttccgatccggaagggcggtccccaaaggga

SEQ ID NO: 221037 - DNA, 50 bp, Artificial
  Synthetic oligonucleotide
acctcgatggaggaactgcgaacgatcgccgactggaccattcgtccgcg

SEQ ID NO: 221038 - DNA, 50 bp, Artificial
  Synthetic oligonucleotide
aggcagcgggtgcattaacactccgcacggggatacgaaaccgccgtata

SEQ ID NO: 221039 - DNA, 50 bp, Artificial
  Synthetic oligonucleotide
aggagcctacgtgggggcgtaatcggggaagcgagatggagtagcgagta

SEQ ID NO: 221040 - DNA, 50 bp, Artificial
  Synthetic oligonucleotide
aggagagtgcccccacacaagtgcgggaggctgccatgtacgagatggcg

SEQ ID NO: 221041 - DNA, 50 bp, Artificial
  Synthetic oligonucleotide
aggactccctcttgggtttgcccggtaatacttgcgagtcccccttcggc

SEQ ID NO: 221042 - DNA, 55 bp, Artificial
  Synthetic oligonucleotide
atacgcaggatgctgagttcctgtcttatatgtacaacatgaccggactatcctc

SEQ ID NO: 221043 - DNA, 50 bp, Artificial
  Synthetic oligonucleotide
agctcctgcgaagccctctctcggagggatgtcgtgccttgtgcgaagat

SEQ ID NO: 221044 - DNA, 50 bp, Artificial
  Synthetic oligonucleotide
gccggagtacactcgggggatgcgaccatacagttccctgctcaacgctt

SEQ ID NO: 221045 - DNA, 50 bp, Artificial
  Synthetic oligonucleotide
agctatggggaagacggccgaccgttcgctaatggcttcgggacattggg

SEQ ID NO: 221046 - DNA, 50 bp, Artificial
  Synthetic oligonucleotide
gccgtgtgcgagtctttgcctatcaatccgcgtggcccggcaaattgcat

SEQ ID NO: 221047 - DNA, 50 bp, Artificial
  Synthetic oligonucleotide
agctaggcgctcttgatccacttccccctggttccacatcccgtgtcgta

SEQ ID NO: 221048 - DNA, 50 bp, Artificial
  Synthetic oligonucleotide
agcgtcacttgggcatgttgcgcggtatgggtgtagaggtgcccgaccta

SEQ ID NO: 221049 - DNA, 50 bp, Artificial
  Synthetic oligonucleotide
agcgcaactacacgagcgaacgatggcaaaaacttgccgcacaggtggcc

SEQ ID NO: 221050 - DNA, 50 bp, Artificial
  Synthetic oligonucleotide
agcgatagggtggcggaggggtgaagccacgtttgtaccaattccccgtc

SEQ ID NO: 221051 - DNA, 50 bp, Artificial
  Synthetic oligonucleotide
agcgagcgcccagagctttgagtagcccgatcatccgtgtgcggtcaagt

SEQ ID NO: 221052 - DNA, 50 bp, Artificial
  Synthetic oligonucleotide
gcgacaacaggtggcgacagggaccagttcctgcctacaaacctgcgctt

SEQ ID NO: 221053 - DNA, 55 bp, Artificial
  Synthetic oligonucleotide
gagatctagctgttgtagtttaggacacttacttaggtctataaaggcgggatag

SEQ ID NO: 221054 - DNA, 50 bp, Artificial
  Synthetic oligonucleotide
agcgacctgcggagggtaccccagaccaagatgcaacatagcgtcctgct

SEQ ID NO: 221055 - DNA, 50 bp, Artificial
  Synthetic oligonucleotide
agcgaccgggcggtttgctccctccatctgatagcctccgccatctctcg

SEQ ID NO: 221056 - DNA, 50 bp, Artificial
  Synthetic oligonucleotide
agccgtagaggagagtgcccccacacaagtgcgggaggctgccatgtacg

SEQ ID NO: 221057 - DNA, 50 bp, Artificial
  Synthetic oligonucleotide
agccgctagcctgccccgcagggatattcaccaccacctgaccgttagtc

SEQ ID NO: 221058 - DNA, 50 bp, Artificial
  Synthetic oligonucleotide
agcccgtcacagcctttgcccgagcgtaaatccccgagcctacagtgccc

SEQ ID NO: 221059 - DNA, 50 bp, Artificial
  Synthetic oligonucleotide
agccccgattggtggcatagccacagcgttgcaaccccgtagcccagccc

SEQ ID NO: 221060 - DNA, 50 bp, Artificial
  Synthetic oligonucleotide
agcccccgaaggagaggcggtagtatccgaagctagcgaatcggcttgct

SEQ ID NO: 221061 - DNA, 50 bp, Artificial
  Synthetic oligonucleotide
agcccaatggcgaggattaaaggggcttccggggctactggtagagccaa

SEQ ID NO: 221062 - DNA, 50 bp, Artificial
  Synthetic oligonucleotide
gcgtggaaccgagtcgccccaaagtgggtctacaccggtacccatctcta

SEQ ID NO: 221063 - DNA, 50 bp, Artificial
  Synthetic oligonucleotide
gcgtggaccaagaatcacgacccttcccgcctggtaaatccggccagtgg

SEQ ID NO: 221064 - DNA, 55 bp, Artificial
  Synthetic oligonucleotide
gagatgctagcctatcgctattggacatcaagcctcctccattatctctcacgtc

SEQ ID NO: 221065 - DNA, 50 bp, Artificial
  Synthetic oligonucleotide
gctacagtatctacgtaggggacaaagatgtggcaacgagcacgctctac

SEQ ID NO: 221066 - DNA, 50 bp, Artificial
  Synthetic oligonucleotide
agccaggagctgcgttatgtgctgccggcaatgcttcggatggtggatca

SEQ ID NO: 221067 - DNA, 50 bp, Artificial
  Synthetic oligonucleotide
agcatttgaccgagagcccaagtcgctccacagctcccttgcggatgcct

SEQ ID NO: 221068 - DNA, 50 bp, Artificial
  Synthetic oligonucleotide
agcaggacgactttgttaaacagcacgagccttgatttgacggttcttgc

SEQ ID NO: 221069 - DNA, 50 bp, Artificial
  Synthetic oligonucleotide
agcagcaccccgtcacgtatcacggcgcatgatgtatcgtcgcacgaaga

SEQ ID NO: 221070 - DNA, 55 bp, Artificial
  Synthetic oligonucleotide
ctcgtgtcaatcacattcggaatcacctctacaggcaacctattggtcaacgcac

SEQ ID NO: 221071 - DNA, 55 bp, Artificial
  Synthetic oligonucleotide
ctctagactgttctgtacatagctagctaggatctcctccttagcgggacgagag

SEQ ID NO: 221072 - DNA, 54 bp, Artificial
  Synthetic oligonucleotide
gccccgaaacaggcgcgatccgtttcacaataccagccgtacaaaccccgacac

SEQ ID NO: 221073 - DNA, 55 bp, Artificial
  Synthetic oligonucleotide
ctctccagtagctatgccgagaatatcaaccttcgctgcctcaacgactttaggg

SEQ ID NO: 221074 - DNA, 55 bp, Artificial
  Synthetic oligonucleotide
ctgccagtcaaacgaagcattatatccatcttcgggatctacgaaagtacctgtt

SEQ ID NO: 221075 - DNA, 55 bp, Artificial
  Synthetic oligonucleotide
ctgccggactattgaattatgctcctcgcaactgccccatctatctgatcgatcc

SEQ ID NO: 221076 - DNA, 55 bp, Artificial
  Synthetic oligonucleotide
ctgcgaagtctcgtaggctgatttggcttttacatagttcgcttcggctatttca

SEQ ID NO: 221077 - DNA, 55 bp, Artificial
  Synthetic oligonucleotide
ctgcgagcgcatatagagctcctggtcagactgcttagaggcgttgagactgcct

SEQ ID NO: 221078 - DNA, 55 bp, Artificial
  Synthetic oligonucleotide
attcacaatgtccgatagccggttattccgtggatgtcgattctccgaacacggg

SEQ ID NO: 221079 - DNA, 55 bp, Artificial
  Synthetic oligonucleotide
attaacacgccctttcagggctcttacagccgccagcattcaaccgtcagctccg

SEQ ID NO: 221080 - DNA, 55 bp, Artificial
  Synthetic oligonucleotide
ctgcggttttcttgcattcggtgctaatggcacgtgctttgggagcagacttcca

SEQ ID NO: 221081 - DNA, 55 bp, Artificial
  Synthetic oligonucleotide
ctggctgttttgctcgccagcggtcatcggagtttctgtaccatcgaccttaaag

SEQ ID NO: 221082 - DNA, 55 bp, Artificial
  Synthetic oligonucleotide
ctgtaagggaacgtttctcacatcttcccagaatgtagaatcgcgttttgtggcc

SEQ ID NO: 221083 - DNA, 53 bp, Artificial
  Synthetic oligonucleotide
ggacacccgaacacctgcccaaaagaaggctttggaacggttgcttgcggact

SEQ ID NO: 221084 - DNA, 55 bp, Artificial
  Synthetic oligonucleotide
atgagtaatgtaggtcccggattcggcagtgtcggtccgatgttttcctatgcgc

SEQ ID NO: 221085 - DNA, 55 bp, Artificial
  Synthetic oligonucleotide
cttgtgccaatgcgccccagtatggcaataacgcctatatcgctccattagcgga

SEQ ID NO: 221086 - DNA, 55 bp, Artificial
  Synthetic oligonucleotide
atcttagcgcagctggggagctatccctgccgtgacattctttggactggtggcg

SEQ ID NO: 221087 - DNA, 54 bp, Artificial
  Synthetic oligonucleotide
ctttcgctttcagccctttacttgcgttgaagtttgagaactccaacaacggtg

SEQ ID NO: 221088 - DNA, 55 bp, Artificial
  Synthetic oligonucleotide
ctttgctcggagtatagagggtatggctcctgttgtcactttcgaaaggcaagag

SEQ ID NO: 221089 - DNA, 53 bp, Artificial
  Synthetic oligonucleotide
cggcgaaccgaccccttactacagcgactggcctaaccacagttccctgttcg

SEQ ID NO: 221090 - DNA, 55 bp, Artificial
  Synthetic oligonucleotide
cgacagagatgattacgccgcttagagcgggagatatgtgctacatctcggggac

SEQ ID NO: 221091 - DNA, 55 bp, Artificial
  Synthetic oligonucleotide
cgggagccttggcggaaaggtaagtggttaccaacatattgtcggctatgccatg

SEQ ID NO: 221092 - DNA, 55 bp, Artificial
  Synthetic oligonucleotide
cgggctatttgccgtacttccgcacaaagatattccaggtcagatattccaatca

SEQ ID NO: 221093 - DNA, 55 bp, Artificial
  Synthetic oligonucleotide
cgaacgccttatatggaccggcttgcagcatcgggagtgaccggacgcctgcgta

SEQ ID NO: 221094 - DNA, 56 bp, Artificial
  Synthetic oligonucleotide
cgagcttaggatcggtcttaacccgagatggaagatcgggcacgtgacggacggtg

SEQ ID NO: 221095 - DNA, 55 bp, Artificial
  Synthetic oligonucleotide
cgaacgcctaactgacttttattcaatcgctcccaaaggacattttcagccgctg

SEQ ID NO: 221096 - DNA, 55 bp, Artificial
  Synthetic oligonucleotide
cgaaaactcccatgtccatgcacctttacgatgacacattcttctccagtcggta

SEQ ID NO: 221097 - DNA, 55 bp, Artificial
  Synthetic oligonucleotide
cctttcttacgacatctatgagcgaactcctctagggcgtgccgagtggctcaag

SEQ ID NO: 221098 - DNA, 55 bp, Artificial
  Synthetic oligonucleotide
cggtagaagctacgaacgagctgacgaattaccggttcaaaggcacgaccgccag

SEQ ID NO: 221099 - DNA, 55 bp, Artificial
  Synthetic oligonucleotide
cctgttggggtaagccaacgcatattgtataggcagatgcatatcgggtagtccc

SEQ ID NO: 221100 - DNA, 55 bp, Artificial
  Synthetic oligonucleotide
cctggggctcctgctacgacgcattgatactctgggtaataagtccgtagggtgg

SEQ ID NO: 221101 - DNA, 55 bp, Artificial
  Synthetic oligonucleotide
cctgatctatgacgaaaagtaattgtcctttccgtacgacctgtccttctgtcac

SEQ ID NO: 221102 - DNA, 55 bp, Artificial
  Synthetic oligonucleotide
cggttgcccaacgggagaaagcaaaataacgggaggatacaatctgccggcgcaa

SEQ ID NO: 221103 - DNA, 54 bp, Artificial
  Synthetic oligonucleotide
cgtaaaactctcccgtcgagaggtcgagtagtgctaggccgtagcggttctccc

SEQ ID NO: 221104 - DNA, 55 bp, Artificial
  Synthetic oligonucleotide
cgtacataggccttcgaagcattgaacaatacccgttggcgaaactccggagacc

SEQ ID NO: 221105 - DNA, 53 bp, Artificial
  Synthetic oligonucleotide
tttcggttatgttcccggaaaacctccagtagcatcttcggagagtccccctc

SEQ ID NO: 221106 - DNA, 55 bp, Artificial
  Synthetic oligonucleotide
cgtagcggcgatcgcttccgtagctgtctgacctgccacaagaaaggccccaaac

SEQ ID NO: 221107 - DNA, 55 bp, Artificial
  Synthetic oligonucleotide
cgtagggtactcgataggcatattgtagcctgcgaagtcgtgcatcttagcaccc

SEQ ID NO: 221108 - DNA, 55 bp, Artificial
  Synthetic oligonucleotide
cggatggttcaaagtggtatttgttgctttgaatgcagaaggacaacctaccggt

SEQ ID NO: 221109 - DNA, 55 bp, Artificial
  Synthetic oligonucleotide
cggagtacgttatcagatgtaccatgccatcgtattactggttataggcctaacc

SEQ ID NO: 221110 - DNA, 55 bp, Artificial
  Synthetic oligonucleotide
cggagaagctggtcttagagctgcgctcctcccgtaccctctagcgtgtagccgt

SEQ ID NO: 221111 - DNA, 55 bp, Artificial
  Synthetic oligonucleotide
cggaagagaaagactgcggtgcctgtgcagaacattgcccgacccaggccgtaca

SEQ ID NO: 221112 - DNA, 55 bp, Artificial
  Synthetic oligonucleotide
cgcttccttatccggacctaacatgaatgggatgaagcctaagatggtcgaaacg

SEQ ID NO: 221113 - DNA, 54 bp, Artificial
  Synthetic oligonucleotide
cgctcgccctttcctaagggatggtcgtagtgaaatgcctaaattgaattaacc

SEQ ID NO: 221114 - DNA, 55 bp, Artificial
  Synthetic oligonucleotide
cgctataatgcgaagcctgagtatgatcagtacatcttcatctcacgtcgtggtc

SEQ ID NO: 221115 - DNA, 55 bp, Artificial
  Synthetic oligonucleotide
cgcgatcgagaatggtatgaagccgtcggcaacctgtagctatgcggtcacttgg

SEQ ID NO: 221116 - DNA, 60 bp, Artificial
  Synthetic oligonucleotide
tgaccctcgtgctacaatggcctcctctatgacccccgctggggatccattcgtggacga

SEQ ID NO: 221117 - DNA, 59 bp, Artificial
  Synthetic oligonucleotide
tggccaatacgcagtcaacgccgactaatggacagccagacggatcggtcaccgtaccg

SEQ ID NO: 221118 - DNA, 54 bp, Artificial
  Synthetic oligonucleotide
catagaccccacgagaacgcacctcaaccgtgaattggtagagttccccgacgg

SEQ ID NO: 221119 - DNA, 50 bp, Artificial
  Synthetic oligonucleotide
agctaaagcctttaactggttgcgcccggaacgtcgctttacgcgtgccg

SEQ ID NO: 221120 - DNA, 50 bp, Artificial
  Synthetic oligonucleotide
gcaaaggcaggacgcgtgaggaggtccatccagctacgacgcaaaccgaa

SEQ ID NO: 221121 - DNA, 50 bp, Artificial
  Synthetic oligonucleotide
agctgggcgttggttgccagagcctccttggttcgtccccatactttgcc

SEQ ID NO: 221122 - DNA, 50 bp, Artificial
  Synthetic oligonucleotide
gcaaagtgtggcactatggtgaatacgacccggctgactggccccgcggg

SEQ ID NO: 221123 - DNA, 50 bp, Artificial
  Synthetic oligonucleotide
aggacagggtcctgagaacgtagaggcaacgctgcgacaggcgtacgact

SEQ ID NO: 221124 - DNA, 50 bp, Artificial
  Synthetic oligonucleotide
gggtggaactaacagctggggtgagtggcctttggagcgctatcgcctgc

SEQ ID NO: 221125 - DNA, 50 bp, Artificial
  Synthetic oligonucleotide
aggataccggaacacggacgcatgacggagcacatacagattgcaaacta

SEQ ID NO: 221126 - DNA, 50 bp, Artificial
  Synthetic oligonucleotide
aggcacacgcaccttcgtcgtatggcgtgttaagaccgccggtaacgggc

SEQ ID NO: 221127 - DNA, 50 bp, Artificial
  Synthetic oligonucleotide
aggccgacaggaaagccgggataagcacctggggtgaatactcctcgcct

SEQ ID NO: 221128 - DNA, 50 bp, Artificial
  Synthetic oligonucleotide
aggcgaaaggacgctacttcgatacccgacgagcgggctactcgtggctc

SEQ ID NO: 221129 - DNA, 55 bp, Artificial
  Synthetic oligonucleotide
gccgcctccaccattgacgcttactgatcggctctcatcccgagggaacaatcgt

SEQ ID NO: 221130 - DNA, 50 bp, Artificial
  Synthetic oligonucleotide
aggcgaactgcttgcgctgatactgcgctgtccgcgaatcgtgatcgagc

SEQ ID NO: 221131 - DNA, 50 bp, Artificial
  Synthetic oligonucleotide
aggcgtaggcgtggaaagttcggtccgcaacgggcgtgaatatgtagccg

SEQ ID NO: 221132 - DNA, 50 bp, Artificial
  Synthetic oligonucleotide
aggctgagcgatcctgccataaccagcggctctggagtaatggcactgcc

SEQ ID NO: 221133 - DNA, 50 bp, Artificial
  Synthetic oligonucleotide
agggagcgtgtgccggtgaaactccgtgtggtaaaagctgagaggcccgt

SEQ ID NO: 221134 - DNA, 50 bp, Artificial
  Synthetic oligonucleotide
gggcgcgcaattgttatctgtcccggtggcgcttacgccagattggccat

SEQ ID NO: 221135 - DNA, 50 bp, Artificial
  Synthetic oligonucleotide
agggcaggttggatcgtgcggtgtttcccagtcgagcagagaatcgggct

SEQ ID NO: 221136 - DNA, 50 bp, Artificial
  Synthetic oligonucleotide
gggcgaaaaggggtaagttggcagagatttaaccaagggcaacgacacga

SEQ ID NO: 221137 - DNA, 55 bp, Artificial
  Synthetic oligonucleotide
gccgagatgcggtataaatagcttgccccgtaacaggatctattaatgagagaac

SEQ ID NO: 221138 - DNA, 55 bp, Artificial
  Synthetic oligonucleotide
gccctaacaagacgcccctgctcgtaggttaacgagatgctaagcccgtcgtatt

SEQ ID NO: 221139 - DNA, 55 bp, Artificial
  Synthetic oligonucleotide
catatgccttcttattggatgcgaacgtgatgtacgttgccttagcaccacttgg

SEQ ID NO: 221140 - DNA, 55 bp, Artificial
  Synthetic oligonucleotide
gcccgttgcagctttggccgacttcaagtcgctattcttcattttccttacggca

SEQ ID NO: 221141 - DNA, 55 bp, Artificial
  Synthetic oligonucleotide
catcatgccgtctaaggcattcagggccatacgtatcagcagtcccacaggcagg

SEQ ID NO: 221142 - DNA, 55 bp, Artificial
  Synthetic oligonucleotide
catcccctcattataggatacttttcccattgccttacgagtcgttggattcgcg

SEQ ID NO: 221143 - DNA, 55 bp, Artificial
  Synthetic oligonucleotide
gcccgtgcggaacacggctttctcccagtcgtaggacttgccgtcaagatagttc

SEQ ID NO: 221144 - DNA, 55 bp, Artificial
  Synthetic oligonucleotide
catccggcagcgcaatggccttcatgccaaacgccacgataagggtatctgcatc

SEQ ID NO: 221145 - DNA, 60 bp, Artificial
  Synthetic oligonucleotide
cacctcgttggagcaaatcttctcgcatgctgttccccaattgttcgcgtcggtgctgag

SEQ ID NO: 221146 - DNA, 55 bp, Artificial
  Synthetic oligonucleotide
catcgtagtgagcgcgatgtagaagtagggtgagtcggtaatcaaacggtagtcg

SEQ ID NO: 221147 - DNA, 55 bp, Artificial
  Synthetic oligonucleotide
catcttatacgtgacgctctgccaattaaagtctgcctactcatgcgagaagggg

SEQ ID NO: 221148 - DNA, 55 bp, Artificial
  Synthetic oligonucleotide
catgacccaaccagtcttcccgtttgctttcgtagcgtgaagcttgtccctgagc

SEQ ID NO: 221149 - DNA, 55 bp, Artificial
  Synthetic oligonucleotide
gccccacgctcattatagaatgtaatgatgtctttctcggtagacacccagtcat

SEQ ID NO: 221150 - DNA, 55 bp, Artificial
  Synthetic oligonucleotide
catgctcgaaggttgaggggcaaagtttgttccctcgtaatattccgctacgaca

SEQ ID NO: 221151 - DNA, 55 bp, Artificial
  Synthetic oligonucleotide
catggctacgctgtagcattcggcctgatagcagaactctatttgagtgctgtca

SEQ ID NO: 221152 - DNA, 55 bp, Artificial
  Synthetic oligonucleotide
cagaaatcaccggctgttcctactgagcaacaccaatatcatgcattgggagaag

SEQ ID NO: 221153 - DNA, 55 bp, Artificial
  Synthetic oligonucleotide
gcgacttacatgcctcacgccttatgcagtcgttgatgcagtatgatccagaggc

SEQ ID NO: 221154 - DNA, 55 bp, Artificial
  Synthetic oligonucleotide
cagaacgcctccggcatacagagttcacagagcgttactgctaatgttggcacga

SEQ ID NO: 221155 - DNA, 55 bp, Artificial
  Synthetic oligonucleotide
cagacgtagacgagccaaacacgcctaaattaatggttagtacgttgtcgaacgc

SEQ ID NO: 221156 - DNA, 60 bp, Artificial
  Synthetic oligonucleotide
ccagaagtcctaactccgttccgtgaggactgtctttcattgcctggccatggcgatatc

SEQ ID NO: 221157 - DNA, 55 bp, Artificial
  Synthetic oligonucleotide
cagagacgattatcctacattggaacattggtggagaggcagacagctacggtcc

SEQ ID NO: 221158 - DNA, 55 bp, Artificial
  Synthetic oligonucleotide
cagagccgtttacgagaacgatttccgtgctattcttgcctcgcgtagagacgtt

SEQ ID NO: 221159 - DNA, 55 bp, Artificial
  Synthetic oligonucleotide
gcctggtttgaagtctattgtgtgtgttgccatgagctatgcacctgtcaaacgc

SEQ ID NO: 221160 - DNA, 55 bp, Artificial
  Synthetic oligonucleotide
gcctgcgcactaccgatctgcgcgtaagcgcttgtggcgaagaggttcaaactgc

SEQ ID NO: 221161 - DNA, 55 bp, Artificial
  Synthetic oligonucleotide
cagcgcatagaggtggactctatccactgcaactttaatacttacccttatgcgg

SEQ ID NO: 221162 - DNA, 55 bp, Artificial
  Synthetic oligonucleotide
cagctcgaaataaccaggcacgtaaaggtcctcgttcgaagcgtagccacgctcc

SEQ ID NO: 221163 - DNA, 55 bp, Artificial
  Synthetic oligonucleotide
gcctcgtgttaccttgtgtccgctgctatggttcatagcaaatgccacttcgcca

SEQ ID NO: 221164 - DNA, 55 bp, Artificial
  Synthetic oligonucleotide
caggatgtctctcaaaagccaacaacgtatgcacgatgatgggacagtcgtccac

SEQ ID NO: 221165 - DNA, 55 bp, Artificial
  Synthetic oligonucleotide
gcctcctgaacccgaagaggcaaacaggaatgcacgatatcgtaatccgaatgtc

SEQ ID NO: 221166 - DNA, 55 bp, Artificial
  Synthetic oligonucleotide
caggtgctacctctgacgcatactgtgctgcaccttctatatagtgtcgcatgac

SEQ ID NO: 221167 - DNA, 60 bp, Artificial
  Synthetic oligonucleotide
agaccactacatcacagaacgcaggagtaagtacactgcgatgatgaacaagtgctatta

SEQ ID NO: 221168 - DNA, 55 bp, Artificial
  Synthetic oligonucleotide
cagtcccacgttgggcgtatggtagatggcataacgaatgatttctctacgctcg

SEQ ID NO: 221169 - DNA, 55 bp, Artificial
  Synthetic oligonucleotide
gccggtgagattacgagccatggtgtggagctgatgttaaatggaacgcccgtgc

SEQ ID NO: 221170 - DNA, 55 bp, Artificial
  Synthetic oligonucleotide
cagtcgctctgctaccaagccttctaactgacctaccgagcgccctatcgtactg

SEQ ID NO: 221171 - DNA, 55 bp, Artificial
  Synthetic oligonucleotide
cagttggcgcacggactgaaggacggtgattacgcgagtatctgcaaggctgcgg

SEQ ID NO: 221172 - DNA, 55 bp, Artificial
  Synthetic oligonucleotide
ccatcttccattagcgtgatacgttcactacgctcagcttgtgttccacgtaaac

SEQ ID NO: 221173 - DNA, 55 bp, Artificial
  Synthetic oligonucleotide
gcatcgcaatcccaaacgaagtaggttgatgttgcaggctgtcaatcatacattc

SEQ ID NO: 221174 - DNA, 55 bp, Artificial
  Synthetic oligonucleotide
ccattctgattccagtgtacaatcaggtatgcgtggaattggtaaaccgattgca

SEQ ID NO: 221175 - DNA, 55 bp, Artificial
  Synthetic oligonucleotide
ccattgcttggaagcgagatcggaagattggagtttacgcccgattatgtactcg

SEQ ID NO: 221176 - DNA, 55 bp, Artificial
  Synthetic oligonucleotide
gcatccttctcttccgagaattcgctgctgcagaacacgtgccagcccgaagtgg

SEQ ID NO: 221177 - DNA, 55 bp, Artificial
  Synthetic oligonucleotide
cccacactgcccaaaacgttcttgaacctgattttggaaagcttagtgctcggca

SEQ ID NO: 221178 - DNA, 59 bp, Artificial
  Synthetic oligonucleotide
cttccccgtcaggtgttggtgaagcttcaggatatctactgtcgcctgcagaagaaacc

SEQ ID NO: 221179 - DNA, 55 bp, Artificial
  Synthetic oligonucleotide
gcatcagcctacaccactgtatggaatgggaaacctactgcgacgatggcaccct

SEQ ID NO: 221180 - DNA, 55 bp, Artificial
  Synthetic oligonucleotide
cccacggacgtggcagcattgcccattttcgatgctacacgccattggttggata

SEQ ID NO: 221181 - DNA, 55 bp, Artificial
  Synthetic oligonucleotide
cccatgacgacagggtgagaaagcgatagcagtcgtcccctgatgttgagtgtgt

SEQ ID NO: 221182 - DNA, 55 bp, Artificial
  Synthetic oligonucleotide
gcatattacgatcacacagtcggcactcatacaggttacaacctacctcggttac

SEQ ID NO: 221183 - DNA, 55 bp, Artificial
  Synthetic oligonucleotide
gcatacggcgcactggtgcatggttatgctccactaagtaggcgtgagtacggaa

SEQ ID NO: 221184 - DNA, 55 bp, Artificial
  Synthetic oligonucleotide
ccccgatggtcatataaccgagatgaactactgtcgtgagaacagttcgggctac

SEQ ID NO: 221185 - DNA, 55 bp, Artificial
  Synthetic oligonucleotide
gcataacgctcggtcatgctcacgttggaatgccccagcatcttactaacggtct

SEQ ID NO: 221186 - DNA, 55 bp, Artificial
  Synthetic oligonucleotide
gcagccaactcaagaagcagggataatacacatcgtttcattgataagacggtgc

SEQ ID NO: 221187 - DNA, 55 bp, Artificial
  Synthetic oligonucleotide
gcagagctttcgtacccacggaatccattaccctcattaactgattatccgtagt

SEQ ID NO: 221188 - DNA, 55 bp, Artificial
  Synthetic oligonucleotide
cccctcgccgagagatgcagacgttctcgaagcgtagcgagaggttgtctgcatc

SEQ ID NO: 221189 - DNA, 60 bp, Artificial
  Synthetic oligonucleotide
agcgtaaccttgaggttgtgccaacaggcagtcctatcgttatgccagctggtgaccaga

SEQ ID NO: 221190 - DNA, 55 bp, Artificial
  Synthetic oligonucleotide
gcactgaactacacgaaaggtgtaccatcactgtgcagacgtgacaacaagggca

SEQ ID NO: 221191 - DNA, 55 bp, Artificial
  Synthetic oligonucleotide
cattccgagtatcctgacggtcttcagctgtcttccttcaagcgggcagtccgcc

SEQ ID NO: 221192 - DNA, 55 bp, Artificial
  Synthetic oligonucleotide
gcccagttaactaaaacacagatggcgaacctgagaagtgtgtcgccgaagccgt

SEQ ID NO: 221193 - DNA, 55 bp, Artificial
  Synthetic oligonucleotide
ccaaagcgaatcaagtcgatacggcgacgtccctctgcgaagaactcacgtcccc

SEQ ID NO: 221194 - DNA, 55 bp, Artificial
  Synthetic oligonucleotide
ccaactaagggcacagccccatacacagcgcatcggcatttgatgtcccctgcag

SEQ ID NO: 221195 - DNA, 55 bp, Artificial
  Synthetic oligonucleotide
gccatactcgaaatagtaaagaaactctataagccgcgtacgtgtcggttcccca

SEQ ID NO: 221196 - DNA, 55 bp, Artificial
  Synthetic oligonucleotide
ccaaggcacctttgttatcagatatcctagagggaacagtgaacaccttgactgg

SEQ ID NO: 221197 - DNA, 55 bp, Artificial
  Synthetic oligonucleotide
gccactgtttgtgcagctaaagaggcagttccgggaacagacttcatgcctttgc

SEQ ID NO: 221198 - DNA, 55 bp, Artificial
  Synthetic oligonucleotide
gccaccattcgttgcgtgccatttggtgtagaacaaacaccgggcgtggacatgg

SEQ ID NO: 221199 - DNA, 55 bp, Artificial
  Synthetic oligonucleotide
ccacacgtatcgtccacatagggtgtttctgtgctgcgcaagtaagcactacggc

SEQ ID NO: 221200 - DNA, 60 bp, Artificial
  Synthetic oligonucleotide
ttcggcatcgacaaagagcatgcctacaccgtcaagagggcgctgcgtgccatcatgggt

SEQ ID NO: 221201 - DNA, 55 bp, Artificial
  Synthetic oligonucleotide
ccacagccaagcgtgtaaaggcctatctcacggaggtcgctttactgatgcgtac

SEQ ID NO: 221202 - DNA, 54 bp, Artificial
  Synthetic oligonucleotide
ccacagggttggattcagactccacgccccaacaccacaccgaataccaacccc

SEQ ID NO: 221203 - DNA, 55 bp, Artificial
  Synthetic oligonucleotide
gccaattcttttcctcacggctcatacactcaccacgattgagttccacacgtag

SEQ ID NO: 221204 - DNA, 53 bp, Artificial
  Synthetic oligonucleotide
ccaccggaccaaggaacatctcgtaaaggcgcaacgtatcggccccgtagttc

SEQ ID NO: 221205 - DNA, 55 bp, Artificial
  Synthetic oligonucleotide
gccaatcgtcgggctcttggtgagccagttgtcaaccaccaatcggttgttcggc

SEQ ID NO: 221206 - DNA, 55 bp, Artificial
  Synthetic oligonucleotide
gccaagcttatacggctactgcaacaacgttgcctattatttaccttatcgatcg

SEQ ID NO: 221207 - DNA, 55 bp, Artificial
  Synthetic oligonucleotide
ccagtgctctcaatcagcgtaggtattatgccaatcgtcatagcaccactctcct

SEQ ID NO: 221208 - DNA, 55 bp, Artificial
  Synthetic oligonucleotide
ccatcgacttaatagctaccaatggcacacggactattcatgagaccctctcagg

SEQ ID NO: 221209 - DNA, 55 bp, Artificial
  Synthetic oligonucleotide
gaagattagtattcgctcttcaatcataccagagttacagggcgacgcgccactt

SEQ ID NO: 221210 - DNA, 54 bp, Artificial
  Synthetic oligonucleotide
cgttcgcccggtagttatcaaatcacggatattgtcctcggaaaggaacgtgcc

SEQ ID NO: 221211 - DNA, 58 bp, Artificial
  Synthetic oligonucleotide
ctacgtatggcgtggaatggaccagaactccggcttttcggtgcagcctagtcttggc

SEQ ID NO: 221212 - DNA, 55 bp, Artificial
  Synthetic oligonucleotide
gaagacacttgcagcaaccggcgacttcaagggtgaactgggtgacctgagtgtc

SEQ ID NO: 221213 - DNA, 54 bp, Artificial
  Synthetic oligonucleotide
cgttcttacctgttcccctcttgcaatggcttttaggtcacgttcccaaatagc

SEQ ID NO: 221214 - DNA, 55 bp, Artificial
  Synthetic oligonucleotide
cgttgcctcatgagggtgtataggccatgtagagcgatgggcggatagatggata

SEQ ID NO: 221215 - DNA, 55 bp, Artificial
  Synthetic oligonucleotide
cgttgcgcggtaagagaatgcgaaagtatcatcggtttggtggccaacgacgact

SEQ ID NO: 221216 - DNA, 55 bp, Artificial
  Synthetic oligonucleotide
gaagaacggggcatgtggcgctatgatgtaggtggatacgcgtgggataacactg

SEQ ID NO: 221217 - DNA, 55 bp, Artificial
  Synthetic oligonucleotide
ctaagtcacgtgcgaggacggactgccctgacatctcggtttcgtccgatgtgga

SEQ ID NO: 221218 - DNA, 55 bp, Artificial
  Synthetic oligonucleotide
ctaatggcgacagccaaagtttccattaggctaaacgtcctcgattgattggagg

SEQ ID NO: 221219 - DNA, 55 bp, Artificial
  Synthetic oligonucleotide
ctacaatggagggtactgctatgcctatgcgttcaactgatgactggttgagccg

SEQ ID NO: 221220 - DNA, 55 bp, Artificial
  Synthetic oligonucleotide
ctacacggagggtggcgatgtacgctacttcttcaagtctatcgtgatagccacg

SEQ ID NO: 221221 - DNA, 55 bp, Artificial
  Synthetic oligonucleotide
ctacgactataggttcaagataggagaccaacgctataaattctccgccgaagcc

SEQ ID NO: 221222 - DNA, 58 bp, Artificial
  Synthetic oligonucleotide
ttgaactcgcccaccactcctgcaggactttcgtcccgcatggagcgggagcgccccc

SEQ ID NO: 221223 - DNA, 55 bp, Artificial
  Synthetic oligonucleotide
gaaccgattcgcagcttacgacggcatcgttataaagatggctaacctcgccagc

SEQ ID NO: 221224 - DNA, 55 bp, Artificial
  Synthetic oligonucleotide
ctacgctgtccgaaaggatgccgtgtgcatatctgatggttccgtctgccttgcg

SEQ ID NO: 221225 - DNA, 55 bp, Artificial
  Synthetic oligonucleotide
ctacgtcatcttagccagtgcattgggttcgacagtcaacagcatgtatcgcttg

SEQ ID NO: 221226 - DNA, 55 bp, Artificial
  Synthetic oligonucleotide
ctactcgaattcctgtgccctgaacccaaaggtgcgttcggggaccagcacacgc

SEQ ID NO: 221227 - DNA, 55 bp, Artificial
  Synthetic oligonucleotide
ctaggtgctactgctttaggagctatctataccttcggtccaacctttcgcgctg

SEQ ID NO: 221228 - DNA, 55 bp, Artificial
  Synthetic oligonucleotide
cggtggggtatgaacacaccgtgcgattggcgtgggctatcgaatgtacaatgta

SEQ ID NO: 221229 - DNA, 55 bp, Artificial
  Synthetic oligonucleotide
cggtgtagcagttaatccatacacgtaacgagccgtcacgcctttcaacacacgc

SEQ ID NO: 221230 - DNA, 55 bp, Artificial
  Synthetic oligonucleotide
cggtttcggtgagatatatccgcaacgcaaggctcacggacagctacatctttga

SEQ ID NO: 221231 - DNA, 55 bp, Artificial
  Synthetic oligonucleotide
gaagcttcaggatatctactgtcgcctgcagaagaaaccgaatgccaggtggggt

SEQ ID NO: 221232 - DNA, 55 bp, Artificial
  Synthetic oligonucleotide
cgtatcgacgatgtgatgaaaagtccgagtatcaatgataagagagctcctcgtc

SEQ ID NO: 221233 - DNA, 56 bp, Artificial
  Synthetic oligonucleotide
aaagaccaggtatcacccaacctcttcggtgagcatgatcggtttaccctcagtcc

SEQ ID NO: 221234 - DNA, 55 bp, Artificial
  Synthetic oligonucleotide
cgtatgatagctggaaccgtgtgcagacgatgacttatcctgacggtgaagtggt

SEQ ID NO: 221235 - DNA, 55 bp, Artificial
  Synthetic oligonucleotide
cgtattcttggcctgtgacacgataatgccgcataccttgctttctgagaacgcc

SEQ ID NO: 221236 - DNA, 54 bp, Artificial
  Synthetic oligonucleotide
gaagattccatacgtaaagaaattcctcgacctctgcgaaaccaaactcggttc

SEQ ID NO: 221237 - DNA, 55 bp, Artificial
  Synthetic oligonucleotide
cgtcatcgagagtgataacacacgtgtttggcgatattccaagcgtgcagtgagg

SEQ ID NO: 221238 - DNA, 55 bp, Artificial
  Synthetic oligonucleotide
cgtccatagacttcatctcaggatcctcacagtttccatgacgaataccctcctc

SEQ ID NO: 221239 - DNA, 55 bp, Artificial
  Synthetic oligonucleotide
cgtccgtcgtatatgcagttaagagccagccgagcttataacaatcgctatgcct

SEQ ID NO: 221240 - DNA, 55 bp, Artificial
  Synthetic oligonucleotide
cgtcttcgcataacagttatctgggtggtaatgcttttgaggcactcgtaggcgc

SEQ ID NO: 221241 - DNA, 55 bp, Artificial
  Synthetic oligonucleotide
cgtgcatagccgatcccgttctcaagtttcagcacgatcttccggatgctcagcg

SEQ ID NO: 221242 - DNA, 55 bp, Artificial
  Synthetic oligonucleotide
cgtggaggaatccctatgatagaggctccggaatgggagacactgcacgatgctg

SEQ ID NO: 221243 - DNA, 55 bp, Artificial
  Synthetic oligonucleotide
cgtgtggcatagtgcttatccttggacgttttgtgcccatcgtaggtcaggtggc

SEQ ID NO: 221244 - DNA, 58 bp, Artificial
  Synthetic oligonucleotide
tgaaggctctatcgagcagccctcttaccgcctacggctccaaggtactatccgtttc

SEQ ID NO: 221245 - DNA, 58 bp, Artificial
  Synthetic oligonucleotide
cagatttaagcgcgcgcgcgtgaggccaacaagctggttaccaacaacttacagcgtt

SEQ ID NO: 221246 - DNA, 55 bp, Artificial
  Synthetic oligonucleotide
cgtgtttgtagttctgtctcgataggaatgctggccacattacggtgcatgagcg

SEQ ID NO: 221247 - DNA, 54 bp, Artificial
  Synthetic oligonucleotide
cgttacgcaggtaagcgtcaggcacgttatactaaggcgggtctcgttaaggga

SEQ ID NO: 221248 - DNA, 55 bp, Artificial
  Synthetic oligonucleotide
ctgacaccaagctaatagcgttatgctcagtcgcatctgcaacaaatggcaaggc

SEQ ID NO: 221249 - DNA, 54 bp, Artificial
  Synthetic oligonucleotide
cttcgtgccgaacggtatcaaacttcggggacatatcggctcggaacttcaacg

SEQ ID NO: 221250 - DNA, 55 bp, Artificial
  Synthetic oligonucleotide
ctgacgagcaataaacagggacgtcagagcgttattgttgacaggataggttacg

SEQ ID NO: 221251 - DNA, 55 bp, Artificial
  Synthetic oligonucleotide
ctgcacacggaaatacggacacaggattgatgcatgtagtaggaaaatcggtgat

SEQ ID NO: 221252 - DNA, 55 bp, Artificial
  Synthetic oligonucleotide
ctgccaacactatctacgatatgccttcggagttgacagtcaaggactactcccc

SEQ ID NO: 221253 - DNA, 55 bp, Artificial
  Synthetic oligonucleotide
cttcctaaaagcttcacgcacttgacgcttcactcggtttcgccttacagcacgc

SEQ ID NO: 221254 - DNA, 55 bp, Artificial
  Synthetic oligonucleotide
ctgctcgcgataatcaacttgcaaaggcatgaagtctgttcccggaactgcctct

SEQ ID NO: 221255 - DNA, 55 bp, Artificial
  Synthetic oligonucleotide
ctggaccttttacgtcttggtcttacaatcagtgcggtggcaaggcatctgaggg

SEQ ID NO: 221256 - DNA, 60 bp, Artificial
  Synthetic oligonucleotide
ggggcggttggtgctgttcataacgatggcatagccatgactgccttttgtggaacgtgc

SEQ ID NO: 221257 - DNA, 55 bp, Artificial
  Synthetic oligonucleotide
ctggcaagtgtcgtaacttctacgggacttagcttcagcatttcagccttcgctg

SEQ ID NO: 221258 - DNA, 55 bp, Artificial
  Synthetic oligonucleotide
ctggcgtcgcaatagtgaccttatcggttacgtgaaccatccacagttgggttct

SEQ ID NO: 221259 - DNA, 55 bp, Artificial
  Synthetic oligonucleotide
ctgggacgacagccgttaccttgaggccgaaccggcacgctacattaccgtagcc

SEQ ID NO: 221260 - DNA, 55 bp, Artificial
  Synthetic oligonucleotide
ctgggcgtgagttgcagccggtcgtacattgggttggctgcgtccatgcggctca

SEQ ID NO: 221261 - DNA, 55 bp, Artificial
  Synthetic oligonucleotide
cttatcatgaagacggatatactttcgagagcggtccgaatacgggtgtagtgtc

SEQ ID NO: 221262 - DNA, 51 bp, Artificial
  Synthetic oligonucleotide
ctggtttgtggcaaccctccgtaatttgaacctgaaaacaagttttcccga

SEQ ID NO: 221263 - DNA, 55 bp, Artificial
  Synthetic oligonucleotide
cttacctttgcgcacgacaatagtggcaacagactgtatatgagtttgtttgccg

SEQ ID NO: 221264 - DNA, 55 bp, Artificial
  Synthetic oligonucleotide
ctataagaggggtgcttgagaggttgcctttggcgattagtagtgtgcgtaccac

SEQ ID NO: 221265 - DNA, 55 bp, Artificial
  Synthetic oligonucleotide
ctataaggttatcggccaatcagaaaactacacgctcttggaagtgcaactcatg

SEQ ID NO: 221266 - DNA, 55 bp, Artificial
  Synthetic oligonucleotide
ctatcgacttgcccataagcttgttggctgccgttagctccaagtggttcagctc

SEQ ID NO: 221267 - DNA, 54 bp, Artificial
  Synthetic oligonucleotide
gttacgggaaaactgcggtcggaggaatacaggcgttcgttcgccgctgagaag

SEQ ID NO: 221268 - DNA, 55 bp, Artificial
  Synthetic oligonucleotide
ctattgtcggattccgtcctatcgtcttggatagagagctcctttcggacatctg

SEQ ID NO: 221269 - DNA, 55 bp, Artificial
  Synthetic oligonucleotide
ctcaacagataccgatgaacatagcttacttaaccgatggcgtctcacgtactat

SEQ ID NO: 221270 - DNA, 55 bp, Artificial
  Synthetic oligonucleotide
ctcactggacttcgctaatttgaacgccgaacgaggcataaatccgaaggtactg

SEQ ID NO: 221271 - DNA, 52 bp, Artificial
  Synthetic oligonucleotide
cttttctttcgtaggcttttgacccgatttgaagccaaatccccacacgtta

SEQ ID NO: 221272 - DNA, 55 bp, Artificial
  Synthetic oligonucleotide
ctttgcgtgtgcctttgcttacaacgcctttgggcttacccctccgtctgaccga

SEQ ID NO: 221273 - DNA, 55 bp, Artificial
  Synthetic oligonucleotide
ctcccgaagacagatgggataacgtataccccactattatgccacaatgggacag

SEQ ID NO: 221274 - DNA, 55 bp, Artificial
  Synthetic oligonucleotide
ctccgtgccattaccgagcttcgtatagaccgtgtgaccctccttgtcgtaacct

SEQ ID NO: 221275 - DNA, 55 bp, Artificial
  Synthetic oligonucleotide
ctccttaggtgaactaaatgccgttctgcgtaaatacaaccttgcagtagaggag

SEQ ID NO: 221276 - DNA, 55 bp, Artificial
  Synthetic oligonucleotide
ctttgatagccgtaatggtaatatgtatcatctatccgacctctttgtgcccggc

SEQ ID NO: 221277 - DNA, 55 bp, Artificial
  Synthetic oligonucleotide
ctcgcatgagtaggcagactttaactggcagagcgtcacgtataagatgccgtct

SEQ ID NO: 221278 - DNA, 58 bp, Artificial
  Synthetic oligonucleotide
ccggttcccgctgctggatggagttcgaggaagccaatgccgttgaactcaacgacaa

SEQ ID NO: 221279 - DNA, 55 bp, Artificial
  Synthetic oligonucleotide
ctcgtaagcgaaagtctcgtcatacaagagggcgaacggctcgtaggacttgtgc

SEQ ID NO: 221280 - DNA, 55 bp, Artificial
  Synthetic oligonucleotide
ctcgtttgcccttacgtcactgctgagcataaaaggggcgggagaatcgtggagg

SEQ ID NO: 221281 - DNA, 55 bp, Artificial
  Synthetic oligonucleotide
cttgattctctcgccgtggctcagtcatctcacgctgggcgattatcatacggcc

SEQ ID NO: 221282 - DNA, 55 bp, Artificial
  Synthetic oligonucleotide
ctgaaggaattacatgactggttggctggtaccccttatgagcatattatcgtac

SEQ ID NO: 221283 - DNA, 55 bp, Artificial
  Synthetic oligonucleotide
cgaggcttggctgtcgacgattacaaacatatgagttcacaatagtgaaactctt

SEQ ID NO: 221284 - DNA, 55 bp, Artificial
  Synthetic oligonucleotide
gagcatgcctacaccgtcaagagggcgctgcgtgccatcatgggtgagccgtttg

SEQ ID NO: 221285 - DNA, 55 bp, Artificial
  Synthetic oligonucleotide
cgataaggagggtcatacggtctatacgaagctcggtaatggcacggagaccacc

SEQ ID NO: 221286 - DNA, 55 bp, Artificial
  Synthetic oligonucleotide
cgatataaatctgggcctcagtatagcgcttttgcaggaacaatatccatgcata

SEQ ID NO: 221287 - DNA, 55 bp, Artificial
  Synthetic oligonucleotide
cgatggagggtatttctcatatcgagaggagggaaagttatagccgaaaaggctc

SEQ ID NO: 221288 - DNA, 55 bp, Artificial
  Synthetic oligonucleotide
cgatggtactaggttatagaatgatactgcgagaagcggataatcagacttgtca

SEQ ID NO: 221289 - DNA, 60 bp, Artificial
  Synthetic oligonucleotide
agtgctattatagactgatggagaagtttgaagcccgctatcaggcaattaaagaccagg

SEQ ID NO: 221290 - DNA, 55 bp, Artificial
  Synthetic oligonucleotide
cgatggttactcttgttcgaagtagaattggtcgaagatgtcgcctgccgaaact

SEQ ID NO: 221291 - DNA, 55 bp, Artificial
  Synthetic oligonucleotide
cgattaactgcaagctattggatcgtcacggaaacagccagggaataggcggaat

SEQ ID NO: 221292 - DNA, 55 bp, Artificial
  Synthetic oligonucleotide
cgattacctgctccttagttgttacgttgaacataacgcaagtctctgaatgaag

SEQ ID NO: 221293 - DNA, 55 bp, Artificial
  Synthetic oligonucleotide
cgcacgaagcgagattggcgattgcgccttgacctatctctatcttgcgcagtac

SEQ ID NO: 221294 - DNA, 55 bp, Artificial
  Synthetic oligonucleotide
gagattatccctggactgactctgggtgcacgtatcgctaccgacctgacatcgg

SEQ ID NO: 221295 - DNA, 55 bp, Artificial
  Synthetic oligonucleotide
gagagcggtacacaccacgcctcccatgattaaagcggctaccatgccctccgga

SEQ ID NO: 221296 - DNA, 55 bp, Artificial
  Synthetic oligonucleotide
gactggcggttttggcagcacaccgacacgggacgactgcctggcatcaagggta

SEQ ID NO: 221297 - DNA, 55 bp, Artificial
  Synthetic oligonucleotide
cgcccattcgagtgaccaatatcaagcccggacttgtagagacaaacttcagcaa

SEQ ID NO: 221298 - DNA, 55 bp, Artificial
  Synthetic oligonucleotide
cgcccattgatgcttatctgcagggaacgacttttcttactggttattgggtgca

SEQ ID NO: 221299 - DNA, 55 bp, Artificial
  Synthetic oligonucleotide
cgccccaacatctggaatctgaatccctatgtagaccggacgaatcctactgtca

SEQ ID NO: 221300 - DNA, 60 bp, Artificial
  Synthetic oligonucleotide
tccagctatccgagctgattgtcaatcactatctggagctgaatgtctatgaccgataca

SEQ ID NO: 221301 - DNA, 55 bp, Artificial
  Synthetic oligonucleotide
cctgtgatgacatacacgccttgtgataactttatagcatagatgcgaagccacg

SEQ ID NO: 221302 - DNA, 55 bp, Artificial
  Synthetic oligonucleotide
ccttaaatgccctcgtcgtatggctccacgcttgaaagttctgaagggcgtgtgc

SEQ ID NO: 221303 - DNA, 55 bp, Artificial
  Synthetic oligonucleotide
ccttacttacgcctatataggtaagtccagcaccagcagagacacggacggagac

SEQ ID NO: 221304 - DNA, 55 bp, Artificial
  Synthetic oligonucleotide
gaggttctgtagtctacggcgtgcaggatcgtaagcatagaacgtctccgctccg

SEQ ID NO: 221305 - DNA, 55 bp, Artificial
  Synthetic oligonucleotide
cgaaatggcatccgtgcctatggcttgcttggtggcgttcgacaagtatcgccac

SEQ ID NO: 221306 - DNA, 55 bp, Artificial
  Synthetic oligonucleotide
cgaacatggtgtagacggtgttgctacgcatggtgagacgctgatagttggagcg

SEQ ID NO: 221307 - DNA, 55 bp, Artificial
  Synthetic oligonucleotide
cgaaccgcgctacggctatcaacaatctctgtttcccatcgtgcagggctgtacc

SEQ ID NO: 221308 - DNA, 55 bp, Artificial
  Synthetic oligonucleotide
gaggtaaggagattccggagaccagagctgaggattcgccaccttcagagtagtc

SEQ ID NO: 221309 - DNA, 55 bp, Artificial
  Synthetic oligonucleotide
cgaagtagttaaccattgttgggagcttacgcataagacggtcgtagtaagttgc

SEQ ID NO: 221310 - DNA, 55 bp, Artificial
  Synthetic oligonucleotide
gaggagcaaggcgttgcgtcctacgaaggctaccaatatccctaaccgtataagc

SEQ ID NO: 221311 - DNA, 60 bp, Artificial
  Synthetic oligonucleotide
catcatgggtgagccgtttgttatcagtggttcaatgaaaggcaatgcagctgtggaact

SEQ ID NO: 221312 - DNA, 55 bp, Artificial
  Synthetic oligonucleotide
cgacaacacgccatactttccgaaagtgcccagcacctgtcctttatacttagac

SEQ ID NO: 221313 - DNA, 55 bp, Artificial
  Synthetic oligonucleotide
gagcgtgttgccgggttctatatacgacttcatgaaccatatcttcgtcgaaagg

SEQ ID NO: 221314 - DNA, 55 bp, Artificial
  Synthetic oligonucleotide
cgacatacacacgtgttactaacgattatactcttaaccgctatgacatattgag

SEQ ID NO: 221315 - DNA, 55 bp, Artificial
  Synthetic oligonucleotide
cgacatgcctcaccgactaatgttccaagctgcctacaacactaagcgttatggc

SEQ ID NO: 221316 - DNA, 55 bp, Artificial
  Synthetic oligonucleotide
cgacgcgaacaattggggaacagcatgcgagaagatttgctccaacgaggtgcag

SEQ ID NO: 221317 - DNA, 55 bp, Artificial
  Synthetic oligonucleotide
cgagattggcgattgcgccttgacctatctctatcttgcgcagtacttccgaagc

SEQ ID NO: 221318 - DNA, 55 bp, Artificial
  Synthetic oligonucleotide
cgagctgcctatatttatagatgataagcgtggaatcctgatgcgtcttgatagg

SEQ ID NO: 221319 - DNA, 55 bp, Artificial
  Synthetic oligonucleotide
cgaggagattactgcatccgtgccagagaagtctctcgtttacggaaaacgctca

SEQ ID NO: 221320 - DNA, 55 bp, Artificial
  Synthetic oligonucleotide
cgctgccgaactgccttatctcgaaggtgttgaaaccctcgtagtgaatgcctta

SEQ ID NO: 221321 - DNA, 55 bp, Artificial
  Synthetic oligonucleotide
gacattccatgggacgcaatatggtctttctacaatcctgcggttaacaccaggc

SEQ ID NO: 221322 - DNA, 59 bp, Artificial
  Synthetic oligonucleotide
gttatgcccccacgagatgatcgggtcgtaggtgctgaggtcgtccatccagaggaagc

SEQ ID NO: 221323 - DNA, 50 bp, Artificial
  Synthetic oligonucleotide
cggaaagtggtataccttacaaaagtggtaatgacgggtttaacgtcgaa

SEQ ID NO: 221324 - DNA, 55 bp, Artificial
  Synthetic oligonucleotide
gacatgattagggctactcttatccgctaacacagcaaggacaacgggtgctcca

SEQ ID NO: 221325 - DNA, 55 bp, Artificial
  Synthetic oligonucleotide
cggagcgatgtctcgtccaactatctaatagtcggataaagccagtaacctactg

SEQ ID NO: 221326 - DNA, 55 bp, Artificial
  Synthetic oligonucleotide
cggataccacctggtaataacacttgtcactctgaggcaccgagatagtagcctc

SEQ ID NO: 221327 - DNA, 55 bp, Artificial
  Synthetic oligonucleotide
cggcaagcctcagttagtaacacgctgttttgctccttatcttccgtccacttcg

SEQ ID NO: 221328 - DNA, 55 bp, Artificial
  Synthetic oligonucleotide
cggcatcgcgtcccttttgtgccggtgccacttcgtaaggtttctgtcctggcat

SEQ ID NO: 221329 - DNA, 55 bp, Artificial
  Synthetic oligonucleotide
cggcattgtgcgcaagtcatcgacatacacgtagcacgtgcggacaaactcgtat

SEQ ID NO: 221330 - DNA, 55 bp, Artificial
  Synthetic oligonucleotide
gacatcatcacacgtaattttctcagactgttgcgatcgggtgctttgcaagagg

SEQ ID NO: 221331 - DNA, 55 bp, Artificial
  Synthetic oligonucleotide
gacacggataatgtcccttgcgaggatgctggacggtgatacttcgggcagagaa

SEQ ID NO: 221332 - DNA, 55 bp, Artificial
  Synthetic oligonucleotide
gacaaggcacgactctcccttactgtatcactcgacacagcataagagaaagccc

SEQ ID NO: 221333 - DNA, 56 bp, Artificial
  Synthetic oligonucleotide
aactgcggtcggaggaatacaggcgttcgttcgccgctgagaaggttcgtttgcag

SEQ ID NO: 221334 - DNA, 55 bp, Artificial
  Synthetic oligonucleotide
cgggctttgttcgatttggtaagccctataaggtcatcgtgcaagccgacccaaa

SEQ ID NO: 221335 - DNA, 55 bp, Artificial
  Synthetic oligonucleotide
cggggcgatatcatgcgcggacgttaccgtaacagcttcagtaaacccgaagcat

SEQ ID NO: 221336 - DNA, 55 bp, Artificial
  Synthetic oligonucleotide
cgggtatgcgaaactactctggaatgaaggtgatgcagatcatttcgaagatgcg

SEQ ID NO: 221337 - DNA, 55 bp, Artificial
  Synthetic oligonucleotide
gaatacttgttctaacgcctttcgatgttcgttagtgcttaactcttggtaggag

SEQ ID NO: 221338 - DNA, 55 bp, Artificial
  Synthetic oligonucleotide
cggtcatcgtcttgtaaccgatgtagctcacttcgagcgttactccaggcttgca

SEQ ID NO: 221339 - DNA, 55 bp, Artificial
  Synthetic oligonucleotide
cggtgggcctctacctacaaccaaggcaccatgttgggcgcagccgtcatgcttt

SEQ ID NO: 221340 - DNA, 55 bp, Artificial
  Synthetic oligonucleotide
gactctacgaatactactcgtgagatgtactgggatgaagacaaccgcctgatgg

SEQ ID NO: 221341 - DNA, 54 bp, Artificial
  Synthetic oligonucleotide
cgcccgacttaaagcgcaagcctaaggtcaggcggttgctcgttctttacgtcc

SEQ ID NO: 221342 - DNA, 55 bp, Artificial
  Synthetic oligonucleotide
cgcccgtcttatactcagcactaccctcctggtactcacgcttcgaggtggtgat

SEQ ID NO: 221343 - DNA, 55 bp, Artificial
  Synthetic oligonucleotide
cgccctatccgacctttgcatggtagacgaaagcatgcaaaccgtccctaaccgg

SEQ ID NO: 221344 - DNA, 59 bp, Artificial
  Synthetic oligonucleotide
ccacactttcgtggcacacatactgcccgatgtggcaggcagcgtggtggctccgatag

SEQ ID NO: 221345 - DNA, 54 bp, Artificial
  Synthetic oligonucleotide
gactccctttatcgcttaatcaggaataaacaagtccgttattataacctcgga

SEQ ID NO: 221346 - DNA, 54 bp, Artificial
  Synthetic oligonucleotide
cgccgttttatttgattcgtacggaaagaggtataggtcctccccgtcatgtga

SEQ ID NO: 221347 - DNA, 55 bp, Artificial
  Synthetic oligonucleotide
cgccttgtgataactttatagcatagatgcgaagccacgaagaatgacgaatcgt

SEQ ID NO: 221348 - DNA, 55 bp, Artificial
  Synthetic oligonucleotide
cgcgataatcaacttgcaaaggcatgaagtctgtgcccggaactgcctctttggc

SEQ ID NO: 221349 - DNA, 55 bp, Artificial
  Synthetic oligonucleotide
cgcgcgcgtgaggccaacaagctggttaccaacaacttacagcgttttcaagggc

SEQ ID NO: 221350 - DNA, 55 bp, Artificial
  Synthetic oligonucleotide
gactacaacttgctgtagcacaccataatggcgagcgtagcggatattcgtactt

SEQ ID NO: 221351 - DNA, 55 bp, Artificial
  Synthetic oligonucleotide
cgcgtattttcacatccacagccaacggtttctccatgctccgacaggggagtgc

SEQ ID NO: 221352 - DNA, 54 bp, Artificial
  Synthetic oligonucleotide
cgcgtttacgggcttttcggctcgcgtttacgcctttctgaccgcatgattccc

SEQ ID NO: 221353 - DNA, 55 bp, Artificial
  Synthetic oligonucleotide
gaccctccttgtcgtaacctatcctgtcaacaataacgctctgacgtccctgttt

SEQ ID NO: 221354 - DNA, 55 bp, Artificial
  Synthetic oligonucleotide
gaccaagataccgttgtgaatgcgttgaacagactcgacagagagcgctacgaag

SEQ ID NO: 221355 - DNA, 58 bp, Artificial
  Synthetic oligonucleotide
aacgacaatggaactccgaaacagggctatcttttcccagatgaagcggctatcaaca

SEQ ID NO: 221356 - DNA, 58 bp, Artificial
  Synthetic oligonucleotide
agggttatttcacccggcattggattggctccaccacccacgagtgcaacctcagaga

SEQ ID NO: 221357 - DNA, 55 bp, Artificial
  Synthetic oligonucleotide
cgctgacggtgtaaacttctgtcaaggaacatctaatgcaacggtttataactgt

SEQ ID NO: 221358 - DNA, 55 bp, Artificial
  Synthetic oligonucleotide
cgctgataggttgcaacattactcagcctgcgggagcagcattcgacccagcgaa

SEQ ID NO: 221359 - DNA, 55 bp, Artificial
  Synthetic oligonucleotide
cgctgcacctccatccgcacagtggctcgcaagtcaggtgtcgcagtaggaaacc

SEQ ID NO: 221360 - DNA, 55 bp, Artificial
  Synthetic oligonucleotide
tactcctatccatgacaacttccgtactcaggattcacagttagaccccgagtgc

SEQ ID NO: 221361 - DNA, 55 bp, Artificial
  Synthetic oligonucleotide
tacgtggcaagccgataagcacatttcgcttaatgccgaccttacttggactttc

SEQ ID NO: 221362 - DNA, 55 bp, Artificial
  Synthetic oligonucleotide
tacgtgcattcgcaaatctttctcaccagctataacgccatttatggctcattag

SEQ ID NO: 221363 - DNA, 55 bp, Artificial
  Synthetic oligonucleotide
tacgctaaagtactaaagaccacgatagaacggcacgctgagaatcttcagcggg

SEQ ID NO: 221364 - DNA, 55 bp, Artificial
  Synthetic oligonucleotide
taccttcaggaagttggctcccggataatcagaagcatagccctttggcacattc

SEQ ID NO: 221365 - DNA, 55 bp, Artificial
  Synthetic oligonucleotide
taattgctggacccgcatgtatctgggtgttcacttcccaggcgacatcatggta

SEQ ID NO: 221366 - DNA, 53 bp, Artificial
  Synthetic oligonucleotide
taacgacctaagggtaaggcgttttctattcctcggcagccttaagatactgt

SEQ ID NO: 221367 - DNA, 56 bp, Artificial
  Synthetic oligonucleotide
cgtccgctcttgacggcgacgtaaagtcccttgaacggataggcaacgtggttgca

SEQ ID NO: 221368 - DNA, 55 bp, Artificial
  Synthetic oligonucleotide
gtttgactctacacgcctgcctttctacgattgtcatccacgctactccgctctg

SEQ ID NO: 221369 - DNA, 55 bp, Artificial
  Synthetic oligonucleotide
acgctgcctgccacatcgggcagtatgtgtgccacgaaagtgtgggtctggctcg

SEQ ID NO: 221370 - DNA, 55 bp, Artificial
  Synthetic oligonucleotide
gtttctggcatagaatccgtccttcatgtagtcgtgttcaacggtggaatgggca

SEQ ID NO: 221371 - DNA, 55 bp, Artificial
  Synthetic oligonucleotide
gtttcgatagcaatgcgtagaacagcttcagggattaccgacttggcgaaaggat

SEQ ID NO: 221372 - DNA, 55 bp, Artificial
  Synthetic oligonucleotide
acggtagcgcagtacgtgtaaagtacaccgtacctgtaacattccgcctgcagta

SEQ ID NO: 221373 - DNA, 55 bp, Artificial
  Synthetic oligonucleotide
gtttcgaggtgacactgtatggaagtctggctgctacgggcaggggacacatgac

SEQ ID NO: 221374 - DNA, 55 bp, Artificial
  Synthetic oligonucleotide
gttggcttctaaccgtcagttgcggtcgggtagtgaactcttccgtgggcataca

SEQ ID NO: 221375 - DNA, 55 bp, Artificial
  Synthetic oligonucleotide
gttgcctttcaagccgcgcgacttagatgcattaggaagcatctcgcaagacaat

SEQ ID NO: 221376 - DNA, 55 bp, Artificial
  Synthetic oligonucleotide
acgttcgaggagattactgcatccgtgccagagaagtctctcgtttacggtaaac

SEQ ID NO: 221377 - DNA, 55 bp, Artificial
  Synthetic oligonucleotide
tcctgcaaagtcgaacacttcgagcgtaaactcgcattccgtacccggacggtcg

SEQ ID NO: 221378 - DNA, 56 bp, Artificial
  Synthetic oligonucleotide
tacgttgaagttccgagccgatatgtccccgaagtttgatgccgttcggcacgaag

SEQ ID NO: 221379 - DNA, 55 bp, Artificial
  Synthetic oligonucleotide
acaccccgcatgaacttcgtcttccggtcaaagtagaagtcacggtacgactggc

SEQ ID NO: 221380 - DNA, 53 bp, Artificial
  Synthetic oligonucleotide
tccactatttcgaggctataacttccgactacaactttaaggggagaccgtaa

SEQ ID NO: 221381 - DNA, 52 bp, Artificial
  Synthetic oligonucleotide
acacgggacttggaaccctgcgaaagcccctccgatttgccatttgggcccc

SEQ ID NO: 221382 - DNA, 55 bp, Artificial
  Synthetic oligonucleotide
tcatttcttagcaagcccttgccgtcagactggaaataacgtatcgcatagcgag

SEQ ID NO: 221383 - DNA, 55 bp, Artificial
  Synthetic oligonucleotide
tcatctgatctacggttataggaatcgtatccgcattaccagccatcacgttaga

SEQ ID NO: 221384 - DNA, 55 bp, Artificial
  Synthetic oligonucleotide
tcaagcggagataatctactgtcaatggaaacacctctgtcactgacattagggt

SEQ ID NO: 221385 - DNA, 55 bp, Artificial
  Synthetic oligonucleotide
acatgtcgtcgacccgaaatacgactgcgacagccaaactatgggcatccgacga

SEQ ID NO: 221386 - DNA, 55 bp, Artificial
  Synthetic oligonucleotide
tcaagagtaggtcggttggccggtagataggtggcattgccgaaaagccggtacg

SEQ ID NO: 221387 - DNA, 55 bp, Artificial
  Synthetic oligonucleotide
accagcgaaagaatatctggtcgggccggaatatgctcgacacgctatagacggg

SEQ ID NO: 221388 - DNA, 55 bp, Artificial
  Synthetic oligonucleotide
tcaacgtcaagacttatcaaacctttggctgcaagtactaatacgacttgtgtga

SEQ ID NO: 221389 - DNA, 59 bp, Artificial
  Synthetic oligonucleotide
cggtacggtgaccgatccgtctggctgtccattagtcggcgttgactgcgtattggcca

SEQ ID NO: 221390 - DNA, 55 bp, Artificial
  Synthetic oligonucleotide
tcaaaatgggcgcaatcatgagtaaagccgagacgtattgcgaactcacattgcc

SEQ ID NO: 221391 - DNA, 55 bp, Artificial
  Synthetic oligonucleotide
tatcgcggccgtgcgctctaccggcagaagcgttactatgaggccatagccagtc

SEQ ID NO: 221392 - DNA, 55 bp, Artificial
  Synthetic oligonucleotide
tatacgcgttccatgagccggtgggatgacttctacgatccttgggtgtatgccc

SEQ ID NO: 221393 - DNA, 55 bp, Artificial
  Synthetic oligonucleotide
tagctagcccctgcctttaaagtggccatcggcgagtacttatgtgtgaaggccg

SEQ ID NO: 221394 - DNA, 55 bp, Artificial
  Synthetic oligonucleotide
acctatcgctggcagtcgtcggtcaatagtcgccacgagttctcgcccctcacgc

SEQ ID NO: 221395 - DNA, 55 bp, Artificial
  Synthetic oligonucleotide
gtctgcacagtgatggtacacctttcgtgtagttcagtgcagaactcatctcggc

SEQ ID NO: 221396 - DNA, 55 bp, Artificial
  Synthetic oligonucleotide
gtcgtttcggctcatgatgaatggtgtggcgtcgcactctatgcgtgagaagggg

SEQ ID NO: 221397 - DNA, 55 bp, Artificial
  Synthetic oligonucleotide
agagtatctttcctgcaaactgcgtgtaagggataatcttcctgtctcggtagtc

SEQ ID NO: 221398 - DNA, 55 bp, Artificial
  Synthetic oligonucleotide
agattccgtaacgagaaccagttcgccagttatctcggcctgataccgacctgtc

SEQ ID NO: 221399 - DNA, 55 bp, Artificial
  Synthetic oligonucleotide
gtcggcttgcacgatgaccttatagggcttaccaaatcgaacgaagcccgtttcg

SEQ ID NO: 221400 - DNA, 59 bp, Artificial
  Synthetic oligonucleotide
tccgcgccccacagtgtcggcaccgggtaatagcgtgtcaggtctctgcttgaactgcc

SEQ ID NO: 221401 - DNA, 55 bp, Artificial
  Synthetic oligonucleotide
gtcgatgtttgcctctaagctatagcccgttgtcgtctccttatatccctgcagg

SEQ ID NO: 221402 - DNA, 55 bp, Artificial
  Synthetic oligonucleotide
gtcgaaagacacgaagccagagctgctcgtacgcaagtatttgtgggcgcagggg

SEQ ID NO: 221403 - DNA, 53 bp, Artificial
  Synthetic oligonucleotide
gtcctttgaaacttgtgtattggttacccaaggagacgttactgcgtagaccg

SEQ ID NO: 221404 - DNA, 55 bp, Artificial
  Synthetic oligonucleotide
gtcctgaatgtcgtaggaaacgcggcggatagcatagggttcaccggggtgaaga

SEQ ID NO: 221405 - DNA, 55 bp, Artificial
  Synthetic oligonucleotide
gtcctaatttgcgtaacatgagcgatgcgctacgagtggtataggacaccatgtg

SEQ ID NO: 221406 - DNA, 55 bp, Artificial
  Synthetic oligonucleotide
gtccaagtacagtgtctcgtgaaataagacgtaatagtggagccagaggacgcta

SEQ ID NO: 221407 - DNA, 55 bp, Artificial
  Synthetic oligonucleotide
gtcatcgtccgcacacggttccagctgtcataggtagcaccatagacataagtcc

SEQ ID NO: 221408 - DNA, 55 bp, Artificial
  Synthetic oligonucleotide
agccaccatgcaaccctatcttcgtaaggagtatgacatgtgtcatgtcactctt

SEQ ID NO: 221409 - DNA, 55 bp, Artificial
  Synthetic oligonucleotide
gtcatacaccactcttcttcattcaagcctccggctgtgtacatttcgcatgtcg

SEQ ID NO: 221410 - DNA, 55 bp, Artificial
  Synthetic oligonucleotide
gtatagcgcagataagctttcgtcagattgtattccaaacggcccagaaccttgt

SEQ ID NO: 221411 - DNA, 59 bp, Artificial
  Synthetic oligonucleotide
tcagttccaggcgtgcattgtcgcctacgaaagcctcgatgacctgtgtggcgaggaag

SEQ ID NO: 221412 - DNA, 55 bp, Artificial
  Synthetic oligonucleotide
gtagccctgtcgaaatcttgaacgtcatgccacggctaccagcccattgcgactc

SEQ ID NO: 221413 - DNA, 55 bp, Artificial
  Synthetic oligonucleotide
gtacaagcatcttcgctggtattaagttcttcgatcatacaacgggtggagctgc

SEQ ID NO: 221414 - DNA, 55 bp, Artificial
  Synthetic oligonucleotide
gttgagatgcgtattgaactccaatcgcgtaccgaagttccaacggcctgtctta

SEQ ID NO: 221415 - DNA, 55 bp, Artificial
  Synthetic oligonucleotide
gttgactgagcgagagggagtcttttcccgtcggaacattcacgtgcaatgcgca

SEQ ID NO: 221416 - DNA, 55 bp, Artificial
  Synthetic oligonucleotide
gttcgtcaatcgtgtagtatttcccctgcagatccaccatcgggcgtgtttcgcc

SEQ ID NO: 221417 - DNA, 55 bp, Artificial
  Synthetic oligonucleotide
actcggtaatcatgatgtgccacagggttggattcagactccacgccccaacacc

SEQ ID NO: 221418 - DNA, 55 bp, Artificial
  Synthetic oligonucleotide
actctttgagcttattactaggtgagcctgtacatagcattgcacgtggtagcct

SEQ ID NO: 221419 - DNA, 55 bp, Artificial
  Synthetic oligonucleotide
gttactggctttatccgactattagatagttggacgagacatcgctccgaggatg

SEQ ID NO: 221420 - DNA, 55 bp, Artificial
  Synthetic oligonucleotide
actgccgtaatgtcgtccttagctgcgatagattttataacgtgagggattagtt

SEQ ID NO: 221421 - DNA, 54 bp, Artificial
  Synthetic oligonucleotide
gttacgataaggagggtcatacggtctatacgaaactcggtaacggcacggaga

SEQ ID NO: 221422 - DNA, 58 bp, Artificial
  Synthetic oligonucleotide
ccgtgtgggcacaacgctctacaaacttgcagacatgcctcttgtcggaggcggtttt

SEQ ID NO: 221423 - DNA, 55 bp, Artificial
  Synthetic oligonucleotide
gtgtacacagactgtcagccatatcctcgatactgccgtcaaacgtatattccca

SEQ ID NO: 221424 - DNA, 55 bp, Artificial
  Synthetic oligonucleotide
agaagggtgcgctttccgagccatctttcagacaaaccctgaagcgttcgcttgc

SEQ ID NO: 221425 - DNA, 55 bp, Artificial
  Synthetic oligonucleotide
gtgggcgacctaatgcaatggacgagcgagcaaaacatccacatacagaccgtgc

SEQ ID NO: 221426 - DNA, 52 bp, Artificial
  Synthetic oligonucleotide
gtggcttctccccaaacggaatgggtaggacggtttccccatagataggaaa

SEQ ID NO: 221427 - DNA, 55 bp, Artificial
  Synthetic oligonucleotide
gtgatgctccccacatgtggtatcgtccgaataggtgggaaacatcgtccgccac

SEQ ID NO: 221428 - DNA, 55 bp, Artificial
  Synthetic oligonucleotide
agacctcaaaggggaatatctttggatgcttgatgaaggccattgtttcagagac

SEQ ID NO: 221429 - DNA, 55 bp, Artificial
  Synthetic oligonucleotide
gtgagacgccatcggttaagtaagctatattcatcggtatctgttgagtcagtcc

SEQ ID NO: 221430 - DNA, 55 bp, Artificial
  Synthetic oligonucleotide
gtgaagcggtgaactctaatacctacttccgtactgccgttcccctacaaggcta

SEQ ID NO: 221431 - DNA, 55 bp, Artificial
  Synthetic oligonucleotide
tggctgaagttcaaccgccacaagacaggtgtgccttgtcgtgtcaaactgctgc

SEQ ID NO: 221432 - DNA, 55 bp, Artificial
  Synthetic oligonucleotide
tggctacccaagagatagttaacttccaatggtacagcatagccacgtacgtctg

SEQ ID NO: 221433 - DNA, 50 bp, Artificial
  Synthetic oligonucleotide
tagtttttcgggagaaaaacgcacacgtgcacccttgttaaaaaaattaa

SEQ ID NO: 221434 - DNA, 55 bp, Artificial
  Synthetic oligonucleotide
tggctaacactaacgcattgtccgtgttaagtgagccgacagtcaagtccttaaa

SEQ ID NO: 221435 - DNA, 55 bp, Artificial
  Synthetic oligonucleotide
tggcatcgaccagatagtctgcctcggtcttggcttagtgggtgcaacactcgtc

SEQ ID NO: 221436 - DNA, 55 bp, Artificial
  Synthetic oligonucleotide
tggatgcggagaatgaacaccgcattacggaaaacataggccgtatatgccgggg

SEQ ID NO: 221437 - DNA, 55 bp, Artificial
  Synthetic oligonucleotide
tgcgtaattgggtgaaccgaaactatatccggaagattccgcctaagggtgcaac

SEQ ID NO: 221438 - DNA, 55 bp, Artificial
  Synthetic oligonucleotide
aactcgggaggtcaagagcccctaccctcgtctggagcctgcctcgtgtgacatg

SEQ ID NO: 221439 - DNA, 55 bp, Artificial
  Synthetic oligonucleotide
tgcggtatctctcccggcttcaacggtacgggagccacctcacggttagcatttg

SEQ ID NO: 221440 - DNA, 55 bp, Artificial
  Synthetic oligonucleotide
tgcgcaggttatcgcagtggcaatggccacgttgagactttcagctgaagggcgg

SEQ ID NO: 221441 - DNA, 55 bp, Artificial
  Synthetic oligonucleotide
aactggacaaactccttatccatcgcaacgagtattcctattcgcttcatgccac

SEQ ID NO: 221442 - DNA, 52 bp, Artificial
  Synthetic oligonucleotide
aactgttcgtcgtcccgaaccgaaattggaacttcacacgaaatggattact

SEQ ID NO: 221443 - DNA, 53 bp, Artificial
  Synthetic oligonucleotide
aacttttctccgtctacaactgttactgccataggactttgccgaatacggtt

SEQ ID NO: 221444 - DNA, 57 bp, Artificial
  Synthetic oligonucleotide
tagctgcctgccgtcagtctgcccatcttgaaacggacgtcgtatttgcagatgcag

SEQ ID NO: 221445 - DNA, 55 bp, Artificial
  Synthetic oligonucleotide
tgcgcacttctgcgtcttgcttaaaagcttccacgagcgcaccgtattggtcgtc

SEQ ID NO: 221446 - DNA, 55 bp, Artificial
  Synthetic oligonucleotide
tgcctatcttgccaagtaaagtgggtacttcctcgaaaacgtcttcactgatgta

SEQ ID NO: 221447 - DNA, 55 bp, Artificial
  Synthetic oligonucleotide
tgccgtggacaatatcctcggtattacgaatgctgccaacccaacgtcgctgacg

SEQ ID NO: 221448 - DNA, 55 bp, Artificial
  Synthetic oligonucleotide
tgagcacaccctttcgcgatgctccaccgatgcctccaaagaaagtgagaggcac

SEQ ID NO: 221449 - DNA, 55 bp, Artificial
  Synthetic oligonucleotide
tgacgagtcgctcctacagggaggctcttacaagcttatcgttgcaccatacaac

SEQ ID NO: 221450 - DNA, 53 bp, Artificial
  Synthetic oligonucleotide
tttaatacttacccttatgcggtaacaacctatgcaagggagtttatcgtccg

SEQ ID NO: 221451 - DNA, 55 bp, Artificial
  Synthetic oligonucleotide
ttgtgtgtaaatagttgctgttactccattctctcgtttgtcaagcaatgtaagc

SEQ ID NO: 221452 - DNA, 55 bp, Artificial
  Synthetic oligonucleotide
ttggcggttctgcttattaaaatcgttcttacctggatagagtaccttagcattg

SEQ ID NO: 221453 - DNA, 55 bp, Artificial
  Synthetic oligonucleotide
ttgcttggtcggaaactgatggtgaatcatcctgatgcaggtgagacggatatga

SEQ ID NO: 221454 - DNA, 55 bp, Artificial
  Synthetic oligonucleotide
aaagacacgtatccttctcgcagatggtaaccatgctaaggctcacactgatgta

SEQ ID NO: 221455 - DNA, 57 bp, Artificial
  Synthetic oligonucleotide
tccgccaacgttgtgcgtactcaaggaaaccagtatgcgctgcaagtcagacgttga

SEQ ID NO: 221456 - DNA, 55 bp, Artificial
  Synthetic oligonucleotide
aaagagttcaacaggcggttgttctcctcatagcggtgcatcgaactttcaatct

SEQ ID NO: 221457 - DNA, 55 bp, Artificial
  Synthetic oligonucleotide
ttatgtgccaaagctaagcaaatgggtagcagtgcagactactgcgcaatagacc

SEQ ID NO: 221458 - DNA, 55 bp, Artificial
  Synthetic oligonucleotide
ttatctgtcaatacgctacaaagcctacatgggaggctacgcaccctcacttgcc

SEQ ID NO: 221459 - DNA, 55 bp, Artificial
  Synthetic oligonucleotide
ttataatgtatcgactgacgtcagaatgcctttccgcaagcaagcttttaacgac

SEQ ID NO: 221460 - DNA, 55 bp, Artificial
  Synthetic oligonucleotide
aacaatacgtctccgcatgttgggcgcacgtctaccacgatatccgtgaaacctg

SEQ ID NO: 221461 - DNA, 55 bp, Artificial
  Synthetic oligonucleotide
tgtttgtggcatagagcagggtgtctcctgttgtacgagtttctgcagcttctcg

SEQ ID NO: 221462 - DNA, 55 bp, Artificial
  Synthetic oligonucleotide
tgtgggtgacaaaggacgtacgcgcctattgctaacttatgtctttggtgtcaca

SEQ ID NO: 221463 - DNA, 55 bp, Artificial
  Synthetic oligonucleotide
tgtgccttgtcgtgtcaaactgctgcccgaagccatacggctgatggagaagctc

SEQ ID NO: 221464 - DNA, 55 bp, Artificial
  Synthetic oligonucleotide
tggtatccagcagagattgacgtttccatacgcccaggttggttctatcataagg

SEQ ID NO: 221465 - DNA, 52 bp, Artificial
  Synthetic oligonucleotide
aaccttcgcggctcggcgtggtggagttttcggctacggtttcctgtaagac

SEQ ID NO: 221466 - DNA, 57 bp, Artificial
  Synthetic oligonucleotide
cataaggacgaaggacaccctcgctctaaatacatcgagggagataccaatttcgaa

SEQ ID NO: 221467 - DNA, 57 bp, Artificial
  Synthetic oligonucleotide
ggagctccgcacctctttacccaaggccggcatacgcatcctttacgagctatgccg

SEQ ID NO: 221468 - DNA, 55 bp, Artificial
  Synthetic oligonucleotide
tggctttatctttggactcgagtgaagatggtcatgtgctcccctcttattgcgc

SEQ ID NO: 221469 - DNA, 55 bp, Artificial
  Synthetic oligonucleotide
tggctgcatacttcatgggtaaggttcactttgatgctgttagctcttatggtgg

SEQ ID NO: 221470 - DNA, 55 bp, Artificial
  Synthetic oligonucleotide
aagtgcgtgctgaacactttcgagcaaggacacatgcgagccttcgggcaacagc

SEQ ID NO: 221471 - DNA, 55 bp, Artificial
  Synthetic oligonucleotide
tcgtggagacatccgtattatcttcggttctacctctatgttgggtactggtgtg

SEQ ID NO: 221472 - DNA, 55 bp, Artificial
  Synthetic oligonucleotide
aatacaaccttgcagtagaggaggtaaagaccgagtataggggcaagcgatatga

SEQ ID NO: 221473 - DNA, 55 bp, Artificial
  Synthetic oligonucleotide
aatactaccgcatgaaatatgacagcctgcacaaggtgaaacggctgggtgtcgt

SEQ ID NO: 221474 - DNA, 55 bp, Artificial
  Synthetic oligonucleotide
aatactctcattcggaaaagaccgcaagccaagcatagacgtatctaagagtctc

SEQ ID NO: 221475 - DNA, 55 bp, Artificial
  Synthetic oligonucleotide
aatatacacaagtggcgcccgcaagatgacctgcggattcattttgcagagacgc

SEQ ID NO: 221476 - DNA, 55 bp, Artificial
  Synthetic oligonucleotide
tcgtccggtctacatagggattcagattccagatgttggggcgtgatatgcgcat

SEQ ID NO: 221477 - DNA, 55 bp, Artificial
  Synthetic oligonucleotide
aatcagatagctgcgcatgttggtaaaattgatgtcgccaccatacagatagtgg

SEQ ID NO: 221478 - DNA, 55 bp, Artificial
  Synthetic oligonucleotide
ctgtataccgttagatttgttctaaaagggttaggagtcatcgactatggaatat

SEQ ID NO: 221479 - DNA, 55 bp, Artificial
  Synthetic oligonucleotide
tcgtaccgagagtttaagcaatcgaccgatgaacagcgcctaacggacgaagagt

SEQ ID NO: 221480 - DNA, 55 bp, Artificial
  Synthetic oligonucleotide
tcggatacgtatctggtaagaataccctcctgtgccgggcagaatcccaccttcg

SEQ ID NO: 221481 - DNA, 55 bp, Artificial
  Synthetic oligonucleotide
aatgccctgtggaaatccggatgttggtccccgagacagtagatcttttgtgggg

SEQ ID NO: 221482 - DNA, 55 bp, Artificial
  Synthetic oligonucleotide
tcggactcggatatatgtttccttcgaaatcgtgattaactcgtgccgtatccac

SEQ ID NO: 221483 - DNA, 55 bp, Artificial
  Synthetic oligonucleotide
aatggcgtgaggggaaagtggcaataagccatagttcagcccactcatacccata

SEQ ID NO: 221484 - DNA, 55 bp, Artificial
  Synthetic oligonucleotide
tcgagagttccttcgatacctggatagcctaaaacatcgttgtctgagtgttgag

SEQ ID NO: 221485 - DNA, 55 bp, Artificial
  Synthetic oligonucleotide
tcgaagcacacagggaactgctgaagtgtgacgtgatactcgtgtccgacacggg

SEQ ID NO: 221486 - DNA, 55 bp, Artificial
  Synthetic oligonucleotide
acaaagggcgtaaccacgctgtagggtactgtcttacgatgtcagcggaatcagt

SEQ ID NO: 221487 - DNA, 55 bp, Artificial
  Synthetic oligonucleotide
acaaatttgggaaagacaagcacgatgggatttgataccgatttgaaagtagacg

SEQ ID NO: 221488 - DNA, 54 bp, Artificial
  Synthetic oligonucleotide
aagcggttacgatgagtcctacaggtacattaaggttcttacgaagtgctttcc

SEQ ID NO: 221489 - DNA, 57 bp, Artificial
  Synthetic oligonucleotide
aaatgccgatgcgctgtgtatggggctgtgcccttagttggaagtcaagtggcacgg

SEQ ID NO: 221490 - DNA, 55 bp, Artificial
  Synthetic oligonucleotide
tgaacgaagccggcggcacaagtcaggcactccgccattacatcttcaacgatac

SEQ ID NO: 221491 - DNA, 55 bp, Artificial
  Synthetic oligonucleotide
tgaaccatgaaagtacaggtaatccttcgggataacttgagtgcaggtaatcata

SEQ ID NO: 221492 - DNA, 55 bp, Artificial
  Synthetic oligonucleotide
tctgtcgggcatgattcgtctcgtagttgcccgtgtaaacgaaactcacgctatg

SEQ ID NO: 221493 - DNA, 55 bp, Artificial
  Synthetic oligonucleotide
aaggcatcaaagctacaccactcagagtacgccccaaataaggtatggccgtcca

SEQ ID NO: 221494 - DNA, 55 bp, Artificial
  Synthetic oligonucleotide
tctgcaacgttttcatgtaaagtcgcttgctcgctatgagtctgtctccaatcag

SEQ ID NO: 221495 - DNA, 54 bp, Artificial
  Synthetic oligonucleotide
tctgaataggcgaaggaacctcaaccgttccgtttcaggttacgggtatcacga

SEQ ID NO: 221496 - DNA, 55 bp, Artificial
  Synthetic oligonucleotide
tctcgagagtaataatagacgattgtacgggtgagatgaatcagcccctacgcct

SEQ ID NO: 221497 - DNA, 55 bp, Artificial
  Synthetic oligonucleotide
tctcaccgccacaactactcattagtgcagccaatcctacgaagaaagtacttgc

SEQ ID NO: 221498 - DNA, 55 bp, Artificial
  Synthetic oligonucleotide
aaggtatattatgtaaacatcccagcaagcgcgataaggcatagatccaaggcct

SEQ ID NO: 221499 - DNA, 55 bp, Artificial
  Synthetic oligonucleotide
aaggtatgtacacattataatgtcacgatgtcggcagtcaactctcgttctcgta

SEQ ID NO: 221500 - DNA, 57 bp, Artificial
  Synthetic oligonucleotide
cctccggtattctgcaggggacatcaaatgccgatgcgctgtgtatggggctgtgcc

SEQ ID NO: 221501 - DNA, 55 bp, Artificial
  Synthetic oligonucleotide
aaggtgaatgtcgagcaacaccctgtccttttggttggggcttgctctattctga

SEQ ID NO: 221502 - DNA, 55 bp, Artificial
  Synthetic oligonucleotide
tctatgacgacctccgttgatggtgtgtcgtagggcacctgcttataggccgtcc

SEQ ID NO: 221503 - DNA, 55 bp, Artificial
  Synthetic oligonucleotide
aagtacacatcgctcataggctgatcaagtgaggatactatctgcctacgctccg

SEQ ID NO: 221504 - DNA, 55 bp, Artificial
  Synthetic oligonucleotide
tctataagaaaggtgttgagctgtcctttgagcagtggggcgtaaagggtgctgc

SEQ ID NO: 221505 - DNA, 55 bp, Artificial
  Synthetic oligonucleotide
tctacaaccaaaggctgttgtgcacgagactcagctggcgctagcatcatggcta

SEQ ID NO: 221506 - DNA, 55 bp, Artificial
  Synthetic oligonucleotide
aagtcgttaccgcataagggtaagtattaaagttgcagtggatagagtccacctc

SEQ ID NO: 221507 - DNA, 55 bp, Artificial
  Synthetic oligonucleotide
gctatcagagttagatccttgtatcacctttagtgcgtagccatcaagctgataa

SEQ ID NO: 221508 - DNA, 54 bp, Artificial
  Synthetic oligonucleotide
gctacgtctttctcattacttactacggtgggcaacggggtaaatcgcatttcg

SEQ ID NO: 221509 - DNA, 55 bp, Artificial
  Synthetic oligonucleotide
atgggagcaacctgtggaatctatgcacaacagcaaactgtcgttgataatcgtg

SEQ ID NO: 221510 - DNA, 55 bp, Artificial
  Synthetic oligonucleotide
gctacgtatgacagctggaaccgtgtgcagacgatgacttatcctgacggtgagg

SEQ ID NO: 221511 - DNA, 56 bp, Artificial
  Synthetic oligonucleotide
tcatgatgtgccacagggttggattcagactccacgccccaacaccacaccgaata

SEQ ID NO: 221512 - DNA, 55 bp, Artificial
  Synthetic oligonucleotide
gctacggcttctcacaatacgatctatcagttcgtcgggcaaaggctcacctgtc

SEQ ID NO: 221513 - DNA, 55 bp, Artificial
  Synthetic oligonucleotide
gcgtttcctctctgagtggtgagcggtacagcgcataggaaggtgtcctacgtac

SEQ ID NO: 221514 - DNA, 55 bp, Artificial
  Synthetic oligonucleotide
gcgtgtggaagaataccgccctgcactctcattttgacacgttctacagcaaccg

SEQ ID NO: 221515 - DNA, 55 bp, Artificial
  Synthetic oligonucleotide
gcgtgtcaaacgatattccaatgtcttcgtattacctggtacagccgttacagtg

SEQ ID NO: 221516 - DNA, 55 bp, Artificial
  Synthetic oligonucleotide
gcgtggtgcgaccagtccgaagtggcgtagcctctcctcggtcttatcccacagt

SEQ ID NO: 221517 - DNA, 54 bp, Artificial
  Synthetic oligonucleotide
attcccgctttacggggtcagaacccgatggtttcacgacgatgtaacctgtca

SEQ ID NO: 221518 - DNA, 55 bp, Artificial
  Synthetic oligonucleotide
gcgtggatagtgcatttccgcgacatcaactcgttttatcccacgctgttgtgcc

SEQ ID NO: 221519 - DNA, 55 bp, Artificial
  Synthetic oligonucleotide
attgccgatcgttattaatatcccaacggaagcctacacgtggactccataaagg

SEQ ID NO: 221520 - DNA, 55 bp, Artificial
  Synthetic oligonucleotide
gcgtactccattttgtacccaacggcatcaaactcagaggacatatagggtctga

SEQ ID NO: 221521 - DNA, 55 bp, Artificial
  Synthetic oligonucleotide
gcgtaacgggtggatagccaagccgacattgccattatcatccgtgcggaatgca

SEQ ID NO: 221522 - DNA, 56 bp, Artificial
  Synthetic oligonucleotide
tccgtttcggtgctcagtcgccgcaccgagcctttgctatgtcggcttgcgcacag

SEQ ID NO: 221523 - DNA, 55 bp, Artificial
  Synthetic oligonucleotide
gcggtcgcccgtagacaccaagctcttacggcgattagcaatgtcgtccacatac

SEQ ID NO: 221524 - DNA, 55 bp, Artificial
  Synthetic oligonucleotide
gcgggagatagatagcatcatagaatgtgcgggagaactcaaatgctccaatctg

SEQ ID NO: 221525 - DNA, 55 bp, Artificial
  Synthetic oligonucleotide
caaagcgacatccctgccaaaatatgccgcaagaggcaacccctaagggttggtc

SEQ ID NO: 221526 - DNA, 55 bp, Artificial
  Synthetic oligonucleotide
ggaactctctatccaagacgataggacggaatccgacaatagggtagaagtgacg

SEQ ID NO: 221527 - DNA, 55 bp, Artificial
  Synthetic oligonucleotide
ggaacagaagtacgtggtgggcgtgtaccagcatcttatcttgcatgggagcgcg

SEQ ID NO: 221528 - DNA, 55 bp, Artificial
  Synthetic oligonucleotide
ggaaattgcgctttggcacaaagtcgatgggcatatagaagcagaacacatccag

SEQ ID NO: 221529 - DNA, 55 bp, Artificial
  Synthetic oligonucleotide
gctttatagcaagtaggaatctgctcggttatccatcgcgctatattctcggctg

SEQ ID NO: 221530 - DNA, 55 bp, Artificial
  Synthetic oligonucleotide
atcgatgcattgcagaagatagttaagtcagcctctaccagcagcgagcctgtac

SEQ ID NO: 221531 - DNA, 55 bp, Artificial
  Synthetic oligonucleotide
gcttgtcctggaagcgaacagcagcgttctaattctgctatgtcgatgtcttttg

SEQ ID NO: 221532 - DNA, 55 bp, Artificial
  Synthetic oligonucleotide
gcttctacgctctgcatgtctaaccaccacctcagtatggtcgtgaaacgggaaa

SEQ ID NO: 221533 - DNA, 56 bp, Artificial
  Synthetic oligonucleotide
caggttctatgagtgggcctgtcgatggagaaaacagggcttctatgatatcgact

SEQ ID NO: 221534 - DNA, 55 bp, Artificial
  Synthetic oligonucleotide
atcgtttgggatataaccataaccagcctgtgggtcatcagggttagttgggtcg

SEQ ID NO: 221535 - DNA, 55 bp, Artificial
  Synthetic oligonucleotide
gctgtctgatagtcgatgggaatattcttttcgaacaccctacatccgcagttgc

SEQ ID NO: 221536 - DNA, 55 bp, Artificial
  Synthetic oligonucleotide
gctgcgtgaggaagtgataagcggacacaaatgctgggtggtgcagtccgtgcct

SEQ ID NO: 221537 - DNA, 55 bp, Artificial
  Synthetic oligonucleotide
gctgcgacagtctattgctatctcgtaatcgctgctcattccccacgaccgttcc

SEQ ID NO: 221538 - DNA, 55 bp, Artificial
  Synthetic oligonucleotide
gctgcatatttgatggacaatacagagttggacacttgtattggggaatacgctc

SEQ ID NO: 221539 - DNA, 55 bp, Artificial
  Synthetic oligonucleotide
gctcggtcatgctcacgttggaatgccccagcatcttactcacggtctcaatggg

SEQ ID NO: 221540 - DNA, 55 bp, Artificial
  Synthetic oligonucleotide
gctcctttagcgtataagcaatgggtctgttcgccatagtcattagtgttgcccc

SEQ ID NO: 221541 - DNA, 55 bp, Artificial
  Synthetic oligonucleotide
atgctggggcattccaacgtgagcatgaccgagcgttatgcaaaggtaacaccgc

SEQ ID NO: 221542 - DNA, 55 bp, Artificial
  Synthetic oligonucleotide
atggattaggcacttccacctacggcatggcatgcatctatcagacaatgggacg

SEQ ID NO: 221543 - DNA, 55 bp, Artificial
  Synthetic oligonucleotide
gctatctacatggcgcccatgcacgatgtcgcacctagggctgttacaatcgcag

SEQ ID NO: 221544 - DNA, 55 bp, Artificial
  Synthetic oligonucleotide
gagtaacattagctgcattgtgcaacttcattgctgtaggaccatctactgttgc

SEQ ID NO: 221545 - DNA, 55 bp, Artificial
  Synthetic oligonucleotide
caccatacaaaatacatggctcaccgtcagcagatagttggtctttggatatgcc

SEQ ID NO: 221546 - DNA, 55 bp, Artificial
  Synthetic oligonucleotide
cacccattctgaaatcaccacctcgaagcgtgagtaccaggagggtagtgccgag

SEQ ID NO: 221547 - DNA, 55 bp, Artificial
  Synthetic oligonucleotide
gcgatgaatgccgcaggcgtggttttgtatctcttaggtacgatgacgataatcg

SEQ ID NO: 221548 - DNA, 55 bp, Artificial
  Synthetic oligonucleotide
gcgataggctcccgaacctaagactacgatggaacgcttatcattagagaaggtg

SEQ ID NO: 221549 - DNA, 55 bp, Artificial
  Synthetic oligonucleotide
cacctcggttgggtttcctatgcccgtagttgcgttgtctttggtttcgagatga

SEQ ID NO: 221550 - DNA, 55 bp, Artificial
  Synthetic oligonucleotide
gcgagttcgggataaggccgtccggatagtaagctccgacttttcggtgttgaga

SEQ ID NO: 221551 - DNA, 55 bp, Artificial
  Synthetic oligonucleotide
cacgactgggcggtgatagagtcgccatagcacactacagcgtggttatcgggcg

SEQ ID NO: 221552 - DNA, 55 bp, Artificial
  Synthetic oligonucleotide
cacgaggtggtcggctgttgtatctgggtcaagcatgaagtaaccagtacgctgg

SEQ ID NO: 221553 - DNA, 55 bp, Artificial
  Synthetic oligonucleotide
cacgcacggtctcattgacgaatacggggagcgttcgggttggattgagattgcc

SEQ ID NO: 221554 - DNA, 55 bp, Artificial
  Synthetic oligonucleotide
cacgccagtacccaacatagaggtagaaccgaagataatgcgaatatcaccacgg

SEQ ID NO: 221555 - DNA, 55 bp, Artificial
  Synthetic oligonucleotide
gcacaacgatagactcaccatggagcgtgtagtagtcaagtccaaacctaactcc

SEQ ID NO: 221556 - DNA, 55 bp, Artificial
  Synthetic oligonucleotide
gcgagccatgtggaaggttagcggagtttccatgccgatgtttcgttgtatgtag

SEQ ID NO: 221557 - DNA, 55 bp, Artificial
  Synthetic oligonucleotide
cacggcttattgggacaagtcaacacgtaccttacgagtgattgacggtatccgg

SEQ ID NO: 221558 - DNA, 55 bp, Artificial
  Synthetic oligonucleotide
cacgtcgccaacgataccactacccgaattaacctccatgtagttcataagacct

SEQ ID NO: 221559 - DNA, 55 bp, Artificial
  Synthetic oligonucleotide
cacgtcgtatgattgatcctaaggctaccgaggattctcgtgaggtagctcagac

SEQ ID NO: 221560 - DNA, 55 bp, Artificial
  Synthetic oligonucleotide
gcgagaggagttcctcgcaaatagtctccacgtatgaattaatgccctgtgcgaa

SEQ ID NO: 221561 - DNA, 55 bp, Artificial
  Synthetic oligonucleotide
cactccaagaagatagttcttgcttgttatgaaactaaatctttgacaacaggcg

SEQ ID NO: 221562 - DNA, 55 bp, Artificial
  Synthetic oligonucleotide
gcgactttgacatagaaacggcctacgcggcttttcataagagtgccacaatacc

SEQ ID NO: 221563 - DNA, 55 bp, Artificial
  Synthetic oligonucleotide
gcggcatcggttactaaggagagataggcccaacctgaagaggttgccacgtagg

SEQ ID NO: 221564 - DNA, 55 bp, Artificial
  Synthetic oligonucleotide
gcggaggcttatttggtacttggggaaagctctttatggatgcaatagcccttgt

SEQ ID NO: 221565 - DNA, 55 bp, Artificial
  Synthetic oligonucleotide
gcggaatattacgagggaacaaactttgcccctcaaccttcgagcatgaaccaac

SEQ ID NO: 221566 - DNA, 55 bp, Artificial
  Synthetic oligonucleotide
cccgttgaaagacggcctaatacccgatgttgtccacatatggcatctgacgtgg

SEQ ID NO: 221567 - DNA, 55 bp, Artificial
  Synthetic oligonucleotide
caactataattatgtgagcgataatgtacaaaccgaacagccgacgcgcggtacg

SEQ ID NO: 221568 - DNA, 55 bp, Artificial
  Synthetic oligonucleotide
caacttttagatatgagaccagtgagcagatggcacgtttgttcgacttggagga

SEQ ID NO: 221569 - DNA, 55 bp, Artificial
  Synthetic oligonucleotide
gcgcttcatacgagagcagtccacgtatgtaaggttagggcacttgctgacatct

SEQ ID NO: 221570 - DNA, 55 bp, Artificial
  Synthetic oligonucleotide
caagattagtgccaagggcaaggtaaatagtgtgcatcgtcctctaatcgttcag

SEQ ID NO: 221571 - DNA, 55 bp, Artificial
  Synthetic oligonucleotide
caagcatcgggagaagttaggaacattcgttgacgaggcacttgcctttacagac

SEQ ID NO: 221572 - DNA, 55 bp, Artificial
  Synthetic oligonucleotide
caagccgcccatatccaatgcgccgggactaatcagatactgctcatcgccctcc

SEQ ID NO: 221573 - DNA, 55 bp, Artificial
  Synthetic oligonucleotide
caagctcttgaggaaagaacacatgagtttgtctgtaatatggcagagggttagc

SEQ ID NO: 221574 - DNA, 55 bp, Artificial
  Synthetic oligonucleotide
caagcttattatgacagctcgaaacagcgctccacacgagcaacaccgcacatgc

SEQ ID NO: 221575 - DNA, 55 bp, Artificial
  Synthetic oligonucleotide
caagtgtaacaccgggtgctgctttgagtgccttgcgtatttcggcaacctccaa

SEQ ID NO: 221576 - DNA, 55 bp, Artificial
  Synthetic oligonucleotide
gcgcgcattgcttcataatcgattacccctgtacgttcgtactcatcgcagaacg

SEQ ID NO: 221577 - DNA, 60 bp, Artificial
  Synthetic oligonucleotide
ccaagcgggcttaccataagggtctgtacccatcgtgcgctctgtggcaatcgtgcggtg

SEQ ID NO: 221578 - DNA, 55 bp, Artificial
  Synthetic oligonucleotide
cccgtttgattaccttgtgccagacgtacattggttaatcgcagtccatcacccg

SEQ ID NO: 221579 - DNA, 55 bp, Artificial
  Synthetic oligonucleotide
gcgcgaaggtattacgaatatccgactaggcatgttcctcgaaattgcaaccacc

SEQ ID NO: 221580 - DNA, 55 bp, Artificial
  Synthetic oligonucleotide
cacactttcggccgattataagcctgaagaggtgtggattggccacagttatttc

SEQ ID NO: 221581 - DNA, 55 bp, Artificial
  Synthetic oligonucleotide
cacagcctcaacagtacgatccttcgtaccttcatgagtttctgtaccgacagcg

SEQ ID NO: 221582 - DNA, 55 bp, Artificial
  Synthetic oligonucleotide
cacaggcaacgactcttactatccaattgccggtgacggctctctggcccgtccg

SEQ ID NO: 221583 - DNA, 55 bp, Artificial
  Synthetic oligonucleotide
gcgattgttataagctcggctggctcttaactgcatatacgacggacgtgcaatg

SEQ ID NO: 221584 - DNA, 55 bp, Artificial
  Synthetic oligonucleotide
ggctgtatgtgctacgcttatatcccacgcgccaggtctgtgtgtcagacttggc

SEQ ID NO: 221585 - DNA, 55 bp, Artificial
  Synthetic oligonucleotide
agggtgcgtatggtgacccagagaatacaaaacgagggtataactctatcattga

SEQ ID NO: 221586 - DNA, 55 bp, Artificial
  Synthetic oligonucleotide
ggctgttagcgacaacttaccaatacgagtcttgatgagtccgcactccttcaac

SEQ ID NO: 221587 - DNA, 55 bp, Artificial
  Synthetic oligonucleotide
gggaagacattctttacgcggagggtatgcagaactacgtaagactgcatttcga

SEQ ID NO: 221588 - DNA, 55 bp, Artificial
  Synthetic oligonucleotide
gggacgggaatataccgacatacgcaccttcctcatcgttacgcaggagtgtgcg

SEQ ID NO: 221589 - DNA, 55 bp, Artificial
  Synthetic oligonucleotide
cctacacgttccaagaatgagctgtagagacttatgacggaacctacacgcaggg

SEQ ID NO: 221590 - DNA, 55 bp, Artificial
  Synthetic oligonucleotide
gggcatatagagtcttactgccacattgttaccattcatcttccccggtacaaag

SEQ ID NO: 221591 - DNA, 55 bp, Artificial
  Synthetic oligonucleotide
gggccatttatgtatgtcgcgatacaacccaacggtgtttaggttgcgcccaggc

SEQ ID NO: 221592 - DNA, 55 bp, Artificial
  Synthetic oligonucleotide
gggcgagtaggtacaggcggttcttctgcgtatgggatggtataagtatcacctc

SEQ ID NO: 221593 - DNA, 55 bp, Artificial
  Synthetic oligonucleotide
gggcggcaaagttgcgacagcaatcgtggttcatagccagcatgatgagcgaggc

SEQ ID NO: 221594 - DNA, 55 bp, Artificial
  Synthetic oligonucleotide
ggggataacgttcgttgacagcacaatgatccccgtatgccacaacgtaagaagg

SEQ ID NO: 221595 - DNA, 55 bp, Artificial
  Synthetic oligonucleotide
aggctatgccctttctgcgttgtatcagctatgaggtaagagggctgcactatca

SEQ ID NO: 221596 - DNA, 55 bp, Artificial
  Synthetic oligonucleotide
ggggcctctatgcttatcctcggtgcaatcctcatgattgcgtgccatttggtat

SEQ ID NO: 221597 - DNA, 55 bp, Artificial
  Synthetic oligonucleotide
aggcgggcgagaaaaggcatctcaatatagctcatatctctgcgataacggtctg

SEQ ID NO: 221598 - DNA, 55 bp, Artificial
  Synthetic oligonucleotide
ggggcgtaactatccccatgccgagtgcgtactactcaactgcacactcgagaac

SEQ ID NO: 221599 - DNA, 55 bp, Artificial
  Synthetic oligonucleotide
gggtacataccgtattgcgtgccatatacatctgtttgcggagctcacgctgggt

SEQ ID NO: 221600 - DNA, 55 bp, Artificial
  Synthetic oligonucleotide
ccctatactcggtctttacctcctctactgcaaggttgtatttacgcagaacggc

SEQ ID NO: 221601 - DNA, 55 bp, Artificial
  Synthetic oligonucleotide
gggtcaggccatgtaggcatgatgtacgatgactcaatggtttcgtcttgccatg

SEQ ID NO: 221602 - DNA, 55 bp, Artificial
  Synthetic oligonucleotide
gtaaacgcacttggcgagattctgtatggccaggatcctacttcgcctacattta

SEQ ID NO: 221603 - DNA, 55 bp, Artificial
  Synthetic oligonucleotide
ggttctttcgggacagcaaagagaacaagtatgacctctttgaagggctgatccg

SEQ ID NO: 221604 - DNA, 55 bp, Artificial
  Synthetic oligonucleotide
ggtgtaaaccgtgggtttggctttccctataagtttacacgcatcatctattcca

SEQ ID NO: 221605 - DNA, 55 bp, Artificial
  Synthetic oligonucleotide
ggtgggtgtagctcctggtgtacctacaatgaagggtgcgtatggtgacccagag

SEQ ID NO: 221606 - DNA, 55 bp, Artificial
  Synthetic oligonucleotide
ggtgcttcagagcgtacagaggcagctcgtctcagcgcagagcgtaacaacatcg

SEQ ID NO: 221607 - DNA, 55 bp, Artificial
  Synthetic oligonucleotide
ggtgcggagagcaacgatagccaaactgtttgtatatgatacggaaagcaacaac

SEQ ID NO: 221608 - DNA, 55 bp, Artificial
  Synthetic oligonucleotide
ggtgccgagaaagcgagtaacggagcgaagttagtgagtgcaggagccgacaaac

SEQ ID NO: 221609 - DNA, 55 bp, Artificial
  Synthetic oligonucleotide
ggtcggtccacacgatgttgaaaggatcgaaatttgtgcgtagggtgatgcctcc

SEQ ID NO: 221610 - DNA, 55 bp, Artificial
  Synthetic oligonucleotide
ggtagaggtatattcggtaacgagttccatgtcagatgcattcttggggtccatc

SEQ ID NO: 221611 - DNA, 55 bp, Artificial
  Synthetic oligonucleotide
ccctcttaccgcctacggctccaaggtactatccgtttcggtgctcagtcgccgc

SEQ ID NO: 221612 - DNA, 55 bp, Artificial
  Synthetic oligonucleotide
ggtagactacacggctcgccagctggtagacttgagtgaggacgtaacttcttac

SEQ ID NO: 221613 - DNA, 55 bp, Artificial
  Synthetic oligonucleotide
agctaactcgtcttcactaccacatgactgaaatgacaacattgcaagtgatgtc

SEQ ID NO: 221614 - DNA, 55 bp, Artificial
  Synthetic oligonucleotide
ggtacgggtaatcgatgagacgtcatgccccaggcgcttacctaattgctgtgcg

SEQ ID NO: 221615 - DNA, 55 bp, Artificial
  Synthetic oligonucleotide
ggtacaaagttgatgggcatgtagaaacagaacacctccagtcctttgttagtcc

SEQ ID NO: 221616 - DNA, 55 bp, Artificial
  Synthetic oligonucleotide
ggtaagcacgaggaatagatgctctcgtttgtccgacagacaatctgtatcgtgg

SEQ ID NO: 221617 - DNA, 55 bp, Artificial
  Synthetic oligonucleotide
ggtaacaagaacctgtaggagtgatgtatacaacccgacctaccttaacagagcg

SEQ ID NO: 221618 - DNA, 55 bp, Artificial
  Synthetic oligonucleotide
gggtgatatgtcactcaaggttcctgagtctgtcatgggcgttaaggagtgggag

SEQ ID NO: 221619 - DNA, 55 bp, Artificial
  Synthetic oligonucleotide
ggccgctatatcacctattctacccagaagattattcccgctttccatagcgacc

SEQ ID NO: 221620 - DNA, 55 bp, Artificial
  Synthetic oligonucleotide
ggccacctgaccgtagctaagtaccctcccacgagggatagatgccacaatgcta

SEQ ID NO: 221621 - DNA, 55 bp, Artificial
  Synthetic oligonucleotide
ggcatagttacctaaggtctgctgataccagtaacacatatagcgtgaatggtgg

SEQ ID NO: 221622 - DNA, 55 bp, Artificial
  Synthetic oligonucleotide
gcaatgaagggccacgaaacctagggcaacacttgcgcccaaatagcctgctgcc

SEQ ID NO: 221623 - DNA, 55 bp, Artificial
  Synthetic oligonucleotide
agtctactatcaacggtagtactgctccactgtgggttatcgatggagtaatcgt

SEQ ID NO: 221624 - DNA, 55 bp, Artificial
  Synthetic oligonucleotide
ggcagagcggcttagtgtagcgcaacagaacgaaagtttgaaatcgcaacggcag

SEQ ID NO: 221625 - DNA, 55 bp, Artificial
  Synthetic oligonucleotide
ggcacgccataaatacagccgtatggtctttctgggacagaaactgaaccttgac

SEQ ID NO: 221626 - DNA, 55 bp, Artificial
  Synthetic oligonucleotide
ggcaacgttgtgcgtggtcaaacatacgggttgagaacgatagcactattaccgg

SEQ ID NO: 221627 - DNA, 55 bp, Artificial
  Synthetic oligonucleotide
ggatgatgtcccttgcgaggatgctggacggtgatacttcgggcagagaatcgtc

SEQ ID NO: 221628 - DNA, 55 bp, Artificial
  Synthetic oligonucleotide
ataaggatggcagtgctacttatttccgtgagttcttaagacagtacatgatggc

SEQ ID NO: 221629 - DNA, 55 bp, Artificial
  Synthetic oligonucleotide
ggagtagagcgtgtcttgtcgggcattcaggatgctcacacgggcataccctcca

SEQ ID NO: 221630 - DNA, 55 bp, Artificial
  Synthetic oligonucleotide
ggagctatcctcagtaacctatgtgagccctgatgggttggttacacatacagac

SEQ ID NO: 221631 - DNA, 55 bp, Artificial
  Synthetic oligonucleotide
ggagcggggagtagtacgggttgaccccaaatcaccactgtaggatgcactgagg

SEQ ID NO: 221632 - DNA, 55 bp, Artificial
  Synthetic oligonucleotide
ggagaagtttgaagcccgctatcaggcaattaaagaccaggtatcacccaacctc

SEQ ID NO: 221633 - DNA, 55 bp, Artificial
  Synthetic oligonucleotide
gcaatcccgttcaggtatatatcatgcaaccacgttgcctatccgttcaagggac

SEQ ID NO: 221634 - DNA, 55 bp, Artificial
  Synthetic oligonucleotide
ggagaacgatcgacgggcgcacaagatgaccttggtagtaaggatgggtgaatcc

SEQ ID NO: 221635 - DNA, 55 bp, Artificial
  Synthetic oligonucleotide
ggactgcaccacccagcatttgtgtccgcttatcacttcctcacgcagcagcgtg

SEQ ID NO: 221636 - DNA, 55 bp, Artificial
  Synthetic oligonucleotide
ggacgtcagagcgttattgttgacaggataggttacgataaggagggtcatacgg

SEQ ID NO: 221637 - DNA, 55 bp, Artificial
  Synthetic oligonucleotide
ggacgaaatacagaaatgtcctcgggtgaccatgatagtaggagacaaacggaag

SEQ ID NO: 221638 - DNA, 55 bp, Artificial
  Synthetic oligonucleotide
atcatcgcaccgtagagtaacatcttcttctgcgagacagtgagtgcgtcataac

SEQ ID NO: 221639 - DNA, 55 bp, Artificial
  Synthetic oligonucleotide
ggctattttatagtttacgccacccttagcgctatccatattggtatgcatcgcc

SEQ ID NO: 221640 - DNA, 55 bp, Artificial
  Synthetic oligonucleotide
ggcgtgcaatttctctcgcatcattgcttttcacttgccgtagttcgttgagtaa

SEQ ID NO: 221641 - DNA, 55 bp, Artificial
  Synthetic oligonucleotide
ggcgtacgctgcacctccatccgcacagtggctcgcaaatcaggtgtcgctgtag

SEQ ID NO: 221642 - DNA, 55 bp, Artificial
  Synthetic oligonucleotide
ggcggttgtcttcatcccagtacatctcacgagtagtattcgtagagtcgttcgt

SEQ ID NO: 221643 - DNA, 55 bp, Artificial
  Synthetic oligonucleotide
ggcggccaatcccaaacaatatgccgagctcgaaactcgactacaaggcgtaggt

SEQ ID NO: 221644 - DNA, 53 bp, Artificial
  Synthetic oligonucleotide
ccgaccttgtcctacggggaagggtgtaccagtatgctccacggtactcccaa

SEQ ID NO: 221645 - DNA, 55 bp, Artificial
  Synthetic oligonucleotide
aggtttggccagtgatgtcaaccagttctactatgaccgagatggatacctgtgg

SEQ ID NO: 221646 - DNA, 55 bp, Artificial
  Synthetic oligonucleotide
ggcgataatggaaaccgatgtgcatgaagagggtaatgccccagctaacatgacg

SEQ ID NO: 221647 - DNA, 55 bp, Artificial
  Synthetic oligonucleotide
ggctcagcacttctatgaggagggtatccgtcatggtaactgtgaggatcctgag

SEQ ID NO: 221648 - DNA, 55 bp, Artificial
  Synthetic oligonucleotide
ggcgaatcacagcagtcaatgtcataggctatcgcactggcatagcccggccgtg

SEQ ID NO: 221649 - DNA, 51 bp, Artificial
  Synthetic oligonucleotide
ggcgaagggacctcaaccgttccgtttcaggttacgggtatcacgagagtt

SEQ ID NO: 221650 - DNA, 54 bp, Artificial
  Synthetic oligonucleotide
gcatcaaggcgtctactgccttaataccacgaaggtgtcctaaattgtgaacgg

SEQ ID NO: 221651 - DNA, 54 bp, Artificial
  Synthetic oligonucleotide
gttgcgctatcaccgagccagaaggtgctgtctacgaccctaaacttggcggta

SEQ ID NO: 221652 - DNA, 54 bp, Artificial
  Synthetic oligonucleotide
tttacgatcctccttcgtcgggttattttgctacgaaagctcattcccaaacac

SEQ ID NO: 221653 - DNA, 54 bp, Artificial
  Synthetic oligonucleotide
tttacgcagaacggcatttagttcacctaaggagcagaaggtataatgcttcat

SEQ ID NO: 221654 - DNA, 54 bp, Artificial
  Synthetic oligonucleotide
gccttacgagaacaagccctcgagaccgccacagcacaggagcgcataaggcta

SEQ ID NO: 221655 - DNA, 55 bp, Artificial
  Synthetic oligonucleotide
gagtgaaacctccatagatagtatctaacactacagagtcgccatgcaacgtaga

SEQ ID NO: 221656 - DNA, 54 bp, Artificial
  Synthetic oligonucleotide
tcgaaacggcggttacgacttgcggcgtaactatcttcgagataaggtaaactg

SEQ ID NO: 221657 - DNA, 54 bp, Artificial
  Synthetic oligonucleotide
tttgacgtcttgctccccacgtaacaaaaccgttactacacatctttagctccg

SEQ ID NO: 221658 - DNA, 54 bp, Artificial
  Synthetic oligonucleotide
ttttactcgggtttgttagcaagagagcatgcaatgtcgatgcagctatcggca

SEQ ID NO: 221659 - DNA, 54 bp, Artificial
  Synthetic oligonucleotide
tcagcaccgtcgcctgtcgagatggccatgggtaggaagccgagcgaagccacg

SEQ ID NO: 221660 - DNA, 54 bp, Artificial
  Synthetic oligonucleotide
ggtagcacggttactggcgttcatcttcagtatctctgacacgaagaagataca

SEQ ID NO: 221661 - DNA, 54 bp, Artificial
  Synthetic oligonucleotide
tgttctcatccgtagcgaagtacagacggcggacaccgttgggcaactcgtgga

SEQ ID NO: 221662 - DNA, 54 bp, Artificial
  Synthetic oligonucleotide
tgtccgcatttgcgaacgtacgggatgaaagtatagggaacggtattcctctat

SEQ ID NO: 221663 - DNA, 54 bp, Artificial
  Synthetic oligonucleotide
tgattcgctcgtagacaatgccattccgcagatactaagcgagcttgaccctca

SEQ ID NO: 221664 - DNA, 54 bp, Artificial
  Synthetic oligonucleotide
gatcgctgttcgtggcacctgataagcccatgcgcatgcgtctaaaagacaagc

SEQ ID NO: 221665 - DNA, 54 bp, Artificial
  Synthetic oligonucleotide
gtttggcacgactctaagggcagatgactaatgctttgacccgaaaggcctgcc

SEQ ID NO: 221666 - DNA, 53 bp, Artificial
  Synthetic oligonucleotide
cctcataggtccggaacacaaaaccactaccgaactggtcataaaagtctccg

SEQ ID NO: 221667 - DNA, 54 bp, Artificial
  Synthetic oligonucleotide
gcgctcagtattcagacgaatatcttcggtggcgccatcaaaattacgtgtcgt

SEQ ID NO: 221668 - DNA, 54 bp, Artificial
  Synthetic oligonucleotide
taaggtgatgcgctggacaggccccagaatgatgatatatgcaccgaaagctgc

SEQ ID NO: 221669 - DNA, 54 bp, Artificial
  Synthetic oligonucleotide
tgctatttagcgatgcacacgtaggcacattcaatcatggttgggaacggtttt

SEQ ID NO: 221670 - DNA, 54 bp, Artificial
  Synthetic oligonucleotide
tacatgctcaagcagtggcgcacctcccacccttaccaacgcttttggcattgt

SEQ ID NO: 221671 - DNA, 54 bp, Artificial
  Synthetic oligonucleotide
agcacccctacacgactcggtggcgtgttcggttagtgcgcgttcgtaggccga

SEQ ID NO: 221672 - DNA, 54 bp, Artificial
  Synthetic oligonucleotide
aacgccgtgcaaagaacgtggcaaacggcaagaatccactgcaacttcacccct

SEQ ID NO: 221673 - DNA, 54 bp, Artificial
  Synthetic oligonucleotide
aacgagagcgtccttaatagctactactgttgcgtcgagagctttcttagcgtc

SEQ ID NO: 221674 - DNA, 54 bp, Artificial
  Synthetic oligonucleotide
cgtagaagtggaggatacaccaagcgttcgtggtatgattcgcaaggtgcatca

SEQ ID NO: 221675 - DNA, 54 bp, Artificial
  Synthetic oligonucleotide
aacgacacgaaagcacccctacacgactcggtggcgtgttcggttagtgcgcgt

SEQ ID NO: 221676 - DNA, 54 bp, Artificial
  Synthetic oligonucleotide
ccgggctacagtgtggagagctatatccacggacagcagtatgtgttcggctta

SEQ ID NO: 221677 - DNA, 54 bp, Artificial
  Synthetic oligonucleotide
cccggtggtaagtatgccgggcatgccgttttggtgaaccttaagctgaaagac

SEQ ID NO: 221678 - DNA, 54 bp, Artificial
  Synthetic oligonucleotide
aaccgggcgtgcgaaccgaagataattgcaccaattgcggattctcgcaggtgc

SEQ ID NO: 221679 - DNA, 54 bp, Artificial
  Synthetic oligonucleotide
agggtggcaggaccgctaatgccccagtgagtgatgagaagtgcaccgctacta

SEQ ID NO: 221680 - DNA, 54 bp, Artificial
  Synthetic oligonucleotide
cccctcagtcacgaactgaccgagagctatagtagactagctacactgctagct

SEQ ID NO: 221681 - DNA, 54 bp, Artificial
  Synthetic oligonucleotide
agtccttatcctaatctcgcattggtggctaaatgggaatcgtggatggacgga

SEQ ID NO: 221682 - DNA, 54 bp, Artificial
  Synthetic oligonucleotide
agtgctattggctcaggtcggaagtttcgtgcctgcacatagcgcaagcattgg

SEQ ID NO: 221683 - DNA, 54 bp, Artificial
  Synthetic oligonucleotide
cccacgctgagccgtctgattgacgttgcgaccataagagccgataccgccacc

SEQ ID NO: 221684 - DNA, 54 bp, Artificial
  Synthetic oligonucleotide
acgcccgacactacaatgcccacagcataggcatctgttacgaaggcggattaa

SEQ ID NO: 221685 - DNA, 54 bp, Artificial
  Synthetic oligonucleotide
aaggggaacgggcgacaccattataggggttgcgaatgcgtggaggcagttgtc

SEQ ID NO: 221686 - DNA, 54 bp, Artificial
  Synthetic oligonucleotide
ataggctttggctcccggacgcgtagcaacgacccacgaaaaccagcgatctgt

SEQ ID NO: 221687 - DNA, 54 bp, Artificial
  Synthetic oligonucleotide
aaacgctatcatgatgttacactccagcatcttgaggttattaaggctcgtccg

SEQ ID NO: 221688 - DNA, 60 bp, Artificial
  Synthetic oligonucleotide
cacaagacaggtgtgccttgccgtgtcaaactgctgcccgaagccatacggctgatggag

SEQ ID NO: 221689 - DNA, 55 bp, Artificial
  Synthetic oligonucleotide
gcacgtcgccgtaggtatctgccaagactgccgtgagatagacacgatggatacg

SEQ ID NO: 221690 - DNA, 53 bp, Artificial
  Synthetic oligonucleotide
acgtcagcccagcacttgtataatgctccctgtgggtctactacatatgcact

SEQ ID NO: 221691 - DNA, 53 bp, Artificial
  Synthetic oligonucleotide
acgggtagggaaaggtttgtcgtccggtgcacttacattaacggctatcagca

SEQ ID NO: 221692 - DNA, 53 bp, Artificial
  Synthetic oligonucleotide
gttagtggttggttggtcttcgatgtaatagctatgcagcgaatcgttacgat

SEQ ID NO: 221693 - DNA, 53 bp, Artificial
  Synthetic oligonucleotide
tacgaccctaccagcacgggtcccaatattctgccatggtccgaatggctgta

SEQ ID NO: 221694 - DNA, 53 bp, Artificial
  Synthetic oligonucleotide
tactgcagaacaccatagctgcagagttcaccatgattcattcgtgggagaag

SEQ ID NO: 221695 - DNA, 53 bp, Artificial
  Synthetic oligonucleotide
tagataacggtccgctcaccaactgtcaggacgaagccattgcttacatggtt

SEQ ID NO: 221696 - DNA, 53 bp, Artificial
  Synthetic oligonucleotide
gtggtgccaagaatattaccgttcgtgtggccagtgctacacagggtggctac

SEQ ID NO: 221697 - DNA, 53 bp, Artificial
  Synthetic oligonucleotide
tatatcgagccatggtaggtatcatgtcgggtgtgaagcgtatcatgtcttct

SEQ ID NO: 221698 - DNA, 53 bp, Artificial
  Synthetic oligonucleotide
agctctggaatggcaccactacttacgacaaggccaaatacatgggcctacac

SEQ ID NO: 221699 - DNA, 53 bp, Artificial
  Synthetic oligonucleotide
aggaacgagtaagacgcacgcaaggttatcgccttctagtgcccaccgctgga

SEQ ID NO: 221700 - DNA, 55 bp, Artificial
  Synthetic oligonucleotide
cctcgggcttgtaaggattggtggaatagccaccctcgggcacattgtagttcac

SEQ ID NO: 221701 - DNA, 53 bp, Artificial
  Synthetic oligonucleotide
gggcgcaagtcgctcgcacgcttcacacagcctcgccgttatctatcggcggc

SEQ ID NO: 221702 - DNA, 53 bp, Artificial
  Synthetic oligonucleotide
gcacgcaaggttatcgccttctagtgcccaccgctggactaagtgcaccccgt

SEQ ID NO: 221703 - DNA, 53 bp, Artificial
  Synthetic oligonucleotide
atagacgtcctctatcgcatatttaccttcaccgttcgtgtaagccacgtagt

SEQ ID NO: 221704 - DNA, 53 bp, Artificial
  Synthetic oligonucleotide
cccatcaaaatgattagtgaccctcgtgctacaatggcctcctctatgacccc

SEQ ID NO: 221705 - DNA, 53 bp, Artificial
  Synthetic oligonucleotide
ggagccaccacgctgcctgccacatcgggcagtatgtgtgccacgaaagtgtg

SEQ ID NO: 221706 - DNA, 53 bp, Artificial
  Synthetic oligonucleotide
ataggcacctgtcttcatctctccgggacgcaaacgcccgtcaggacggtcta

SEQ ID NO: 221707 - DNA, 52 bp, Artificial
  Synthetic oligonucleotide
atgtaaaacgaaagttccccgtccaaccgatggtgcccattagcaccttacc

SEQ ID NO: 221708 - DNA, 53 bp, Artificial
  Synthetic oligonucleotide
catatcgtatctagcccatgtggcagttccatcacaaagtcggcgcaactctt

SEQ ID NO: 221709 - DNA, 53 bp, Artificial
  Synthetic oligonucleotide
cagaagaaccccacgttgtctccatcccttgaaagcagataataggtatcgct

SEQ ID NO: 221710 - DNA, 53 bp, Artificial
  Synthetic oligonucleotide
aaaacttattacgatgcgcggctgaacgtgcagtgggacttctccgtcgcaaa

SEQ ID NO: 221711 - DNA, 55 bp, Artificial
  Synthetic oligonucleotide
cctcgtgcgtgagttacgatgcggaggagtttacgggcaaaacgctgccaagagt

SEQ ID NO: 221712 - DNA, 53 bp, Artificial
  Synthetic oligonucleotide
ctccacctgttgagcctctgaaatgagccacaagtcgtttgcgccttgccccc

SEQ ID NO: 221713 - DNA, 53 bp, Artificial
  Synthetic oligonucleotide
gaatccaatgtagagctgtacaccaaaagccatacggttgtctctgccgtaca

SEQ ID NO: 221714 - DNA, 53 bp, Artificial
  Synthetic oligonucleotide
ttgccgacataaccgacctgaagcaggcttatccacgtggcgacaaactgctg

SEQ ID NO: 221715 - DNA, 53 bp, Artificial
  Synthetic oligonucleotide
ttgcacaccgagtgccccatatacgacaagatggggagcattgcagccgttgc

SEQ ID NO: 221716 - DNA, 53 bp, Artificial
  Synthetic oligonucleotide
aatgtagctttgtgctccacatgcggtcaccattgtagcaccatcgtgtctcg

SEQ ID NO: 221717 - DNA, 53 bp, Artificial
  Synthetic oligonucleotide
cgcttacggtaatggtgagagtcgctgagcatcctgtccagtttgacaaggtt

SEQ ID NO: 221718 - DNA, 53 bp, Artificial
  Synthetic oligonucleotide
tgatgcctatcggagccaccacgctgcctgccacatcgggcagtatgtgtgcc

SEQ ID NO: 221719 - DNA, 53 bp, Artificial
  Synthetic oligonucleotide
cgttcgcttacctcgcccttaatctgaatacaaaattcacgaccaagtttgtt

SEQ ID NO: 221720 - DNA, 53 bp, Artificial
  Synthetic oligonucleotide
ttcgtagagctgaagcaaccttgctacacagtcgcgggcattcttcacgcgaa

SEQ ID NO: 221721 - DNA, 53 bp, Artificial
  Synthetic oligonucleotide
gacacccattaagttctcgaaacccgtgtaagccaatgggtctgcaaatatcc

SEQ ID NO: 221722 - DNA, 55 bp, Artificial
  Synthetic oligonucleotide
cctctaagctataggctgttgtcgtctccttatatccctgtaggttaccatagtc

SEQ ID NO: 221723 - DNA, 53 bp, Artificial
  Synthetic oligonucleotide
aagtactgctgaaactcatggatgaagttctctgtcagttgtgagaaggctaa

SEQ ID NO: 221724 - DNA, 53 bp, Artificial
  Synthetic oligonucleotide
aaggtaagtgccggaggtaagtaagaactgcggaagacacccttcacgccacc

SEQ ID NO: 221725 - DNA, 52 bp, Artificial
  Synthetic oligonucleotide
agtaacggcttcgagagcgataactgcgctgatggtgctaccgtggcccctc

SEQ ID NO: 221726 - DNA, 52 bp, Artificial
  Synthetic oligonucleotide
ctacgacttgctctacgcacaggacgtgttacacatttatgcccgtcaagac

SEQ ID NO: 221727 - DNA, 52 bp, Artificial
  Synthetic oligonucleotide
gggagaacgataagtgtgcctatcgaatgtatggtcccgctctgcaacggag

SEQ ID NO: 221728 - DNA, 52 bp, Artificial
  Synthetic oligonucleotide
gggcacaacaatactgcgttcaggcatagtgttatccctcgtgatttgaaga

SEQ ID NO: 221729 - DNA, 52 bp, Artificial
  Synthetic oligonucleotide
aaccgtccgcaccattggtgttcaccgcccgcacaagatgtgctaaccctcc

SEQ ID NO: 221730 - DNA, 52 bp, Artificial
  Synthetic oligonucleotide
gaatctccttactgtggtaacgcataccgatacacatcaagatgaaggctgc

SEQ ID NO: 221731 - DNA, 52 bp, Artificial
  Synthetic oligonucleotide
gtaatcgcgaggccgttgcgccgttttcgcatgggcaggtatcgtagaaagg

SEQ ID NO: 221732 - DNA, 52 bp, Artificial
  Synthetic oligonucleotide
gcacttttgtaatttggaactgctcatattggcttcacgcgccaattcggga

SEQ ID NO: 221733 - DNA, 55 bp, Artificial
  Synthetic oligonucleotide
cccgctacgttattaattcgcaagggcgtacagagtcgtggaacaacagcatacc

SEQ ID NO: 221734 - DNA, 52 bp, Artificial
  Synthetic oligonucleotide
tgtctttgcaaaaggtacggaaggcggtgcttctgtatggtaccagacttga

SEQ ID NO: 221735 - DNA, 52 bp, Artificial
  Synthetic oligonucleotide
ccccatagacgagggatataagcgaatgagaaaccgcaaagggcaaatgtcc

SEQ ID NO: 221736 - DNA, 52 bp, Artificial
  Synthetic oligonucleotide
ctcgtacccggctgtgtaccgaaatactgtgggaaagcgtcatagagctgtg

SEQ ID NO: 221737 - DNA, 52 bp, Artificial
  Synthetic oligonucleotide
atagcatacgccttcctctgtaagtcgctggaactgtgcataatcaacgtat

SEQ ID NO: 221738 - DNA, 52 bp, Artificial
  Synthetic oligonucleotide
gctttcgggcttcacagccctaacacttacgccctcgctttgtgcgctaata

SEQ ID NO: 221739 - DNA, 52 bp, Artificial
  Synthetic oligonucleotide
atctttcagccgaattacccgaaaacgcctactttcgcacatcggcagatta

SEQ ID NO: 221740 - DNA, 52 bp, Artificial
  Synthetic oligonucleotide
atgcctttccgatgtatcaagttcggtaaggcgtacatcacagagtttaggg

SEQ ID NO: 221741 - DNA, 52 bp, Artificial
  Synthetic oligonucleotide
atggtgtaccaatgccagacgccagggatatttaagctaaacaagacttcta

SEQ ID NO: 221742 - DNA, 52 bp, Artificial
  Synthetic oligonucleotide
gcggccgtaaaccaaaaaagtcaacggcatatggcgtaccccaacgagaagg

SEQ ID NO: 221743 - DNA, 52 bp, Artificial
  Synthetic oligonucleotide
caacgcagccgcggggtagtaggaccgcgacattgtatgcatgcagtgagca

SEQ ID NO: 221744 - DNA, 55 bp, Artificial
  Synthetic oligonucleotide
cctctgccagtcgttcccagaggtcgactacattccccacgtaagccatggagac

SEQ ID NO: 221745 - DNA, 52 bp, Artificial
  Synthetic oligonucleotide
cacgttaccatcgttatgccaagacagtcgtagccgattcagagtatggctc

SEQ ID NO: 221746 - DNA, 52 bp, Artificial
  Synthetic oligonucleotide
cgaaggattagtttgcgaaccggtggaattggccattgcattcaaagcgccc

SEQ ID NO: 221747 - DNA, 52 bp, Artificial
  Synthetic oligonucleotide
cgcatcctacaaatcgctaaagaacgcaccgcaaacgctgctggttggacct

SEQ ID NO: 221748 - DNA, 52 bp, Artificial
  Synthetic oligonucleotide
cgcagacaggtccgtggcaatggctcatcgtgcaggggcatattcctgctat

SEQ ID NO: 221749 - DNA, 52 bp, Artificial
  Synthetic oligonucleotide
cctattcgcataagatcatgatggtccacggtgacggcatagatgctggagg

SEQ ID NO: 221750 - DNA, 52 bp, Artificial
  Synthetic oligonucleotide
tcaaacgaatagcggaagtagtcatatgctttacggcttatttgtgcgcttg

SEQ ID NO: 221751 - DNA, 52 bp, Artificial
  Synthetic oligonucleotide
tcgtcgatcaaccgcacctcttggccctggtttcgtgatagtcagcgcaaga

SEQ ID NO: 221752 - DNA, 52 bp, Artificial
  Synthetic oligonucleotide
acagcataaagattataaacccctacttcacgctcggtccgaagataagaag

SEQ ID NO: 221753 - DNA, 52 bp, Artificial
  Synthetic oligonucleotide
tagtgcaagtgcgccagtggttgtgcctgggaatgcgttggcaatgattcca

SEQ ID NO: 221754 - DNA, 52 bp, Artificial
  Synthetic oligonucleotide
gtgggcacaccgggagctacgcctaattgtttgtagtatgcttctttctgcg

SEQ ID NO: 221755 - DNA, 55 bp, Artificial
  Synthetic oligonucleotide
gcacgtgactcaaatagagttcgcaaatcattccttgtgcgacacaagaaccgtg

SEQ ID NO: 221756 - DNA, 52 bp, Artificial
  Synthetic oligonucleotide
ccgcttccccaattttcgtgatgacctcatacgcgcccgagaagcccacctt

SEQ ID NO: 221757 - DNA, 52 bp, Artificial
  Synthetic oligonucleotide
ccgcagataccttggcactatctaccactatctccgcatggaaaattttctg

SEQ ID NO: 221758 - DNA, 52 bp, Artificial
  Synthetic oligonucleotide
tccctcctcctgagaatccaacacgataggtctgtactggtgcgtcactgcg

SEQ ID NO: 221759 - DNA, 52 bp, Artificial
  Synthetic oligonucleotide
cgagtctgcgtcgggcctcgggagtaagcgaagtcttaggaggtgcgagcaa

SEQ ID NO: 221760 - DNA, 51 bp, Artificial
  Synthetic oligonucleotide
gcttgtggattgaggtcgcgtgcatggcacagaaggtcgaaagcagccgta

SEQ ID NO: 221761 - DNA, 51 bp, Artificial
  Synthetic oligonucleotide
atcgcattgagcgacaagtcgataccccagccggaggtagcgcccacattg

SEQ ID NO: 221762 - DNA, 51 bp, Artificial
  Synthetic oligonucleotide
tatacgatagaagcaacagtgccatcagccaattcctcctcgagtttagca

SEQ ID NO: 221763 - DNA, 51 bp, Artificial
  Synthetic oligonucleotide
atccgtgggttcttatggtttgatttcaagtcgattttgataacacctgtg

SEQ ID NO: 221764 - DNA, 51 bp, Artificial
  Synthetic oligonucleotide
atgggaaactcgcccacaacgtcggggcttgtaccgcttgcgcaagttctc

SEQ ID NO: 221765 - DNA, 51 bp, Artificial
  Synthetic oligonucleotide
acccggcgtttgtcggcaccttgcttcacccagatatgaccagccaggtct

SEQ ID NO: 221766 - DNA, 55 bp, Artificial
  Synthetic oligonucleotide
cccgattacttgacaaccaaggactcatgtcccacatagcgactctgaggttgat

SEQ ID NO: 221767 - DNA, 51 bp, Artificial
  Synthetic oligonucleotide
caaacgcgccacgatactatctgccacttcggcacgcggggtacgtggtcc

SEQ ID NO: 221768 - DNA, 51 bp, Artificial
  Synthetic oligonucleotide
caaagcagtggcgtgaagagtatgggggcgagccagacacgacgggcatag

SEQ ID NO: 221769 - DNA, 51 bp, Artificial
  Synthetic oligonucleotide
acccgcttcgagagtctgtcggggacgaatgtctggtgggacttcgtggag

SEQ ID NO: 221770 - DNA, 51 bp, Artificial
  Synthetic oligonucleotide
gcggagtcccccactgttagagctgagggagactctcgcacgattgagggc

SEQ ID NO: 221771 - DNA, 51 bp, Artificial
  Synthetic oligonucleotide
caagctgacaaaagtggacgtgtcgcaatgcccgaatctgtcggtattgaa

SEQ ID NO: 221772 - DNA, 51 bp, Artificial
  Synthetic oligonucleotide
acaccataggaccgcccccggacctcctaaggctattgcggtcgctactcc

SEQ ID NO: 221773 - DNA, 51 bp, Artificial
  Synthetic oligonucleotide
aaaacgcaccaaccgacgctcttgcgtacggccatgtgctatcgccaatga

SEQ ID NO: 221774 - DNA, 51 bp, Artificial
  Synthetic oligonucleotide
aactacatcgacgacaggtgtttatacaatgacaggtccgctggaaacaac

SEQ ID NO: 221775 - DNA, 51 bp, Artificial
  Synthetic oligonucleotide
gtcgtgcggagccttagcacgtgtggtgcgggtggtaagcacctatggtgc

SEQ ID NO: 221776 - DNA, 51 bp, Artificial
  Synthetic oligonucleotide
agagcccgtgttaacgtaagcttccgcctcggcttgtgaggctacgcgcgt

SEQ ID NO: 221777 - DNA, 55 bp, Artificial
  Synthetic oligonucleotide
cccgaactcacccctacttctatacgaatttggcataagatacgatgccctttga

SEQ ID NO: 221778 - DNA, 51 bp, Artificial
  Synthetic oligonucleotide
tgcgtaggttaggcgacaggggcagcaacctttcaagctttgtggagaaca

SEQ ID NO: 221779 - DNA, 51 bp, Artificial
  Synthetic oligonucleotide
actgcttgaccgcagagagcgactgactgcccaacaggaaggcagaccgaa

SEQ ID NO: 221780 - DNA, 51 bp, Artificial
  Synthetic oligonucleotide
gttcttcaccgaacgccaggacttcctggcacaagcaacaggtcttgaacg

SEQ ID NO: 221781 - DNA, 51 bp, Artificial
  Synthetic oligonucleotide
agggtgtaaaatcgcagaataacgaacttcactccgattggttttcaatga

SEQ ID NO: 221782 - DNA, 51 bp, Artificial
  Synthetic oligonucleotide
gttctttaattggatgcaatggctgttttgtgtgggcggcagcacgttgct

SEQ ID NO: 221783 - DNA, 51 bp, Artificial
  Synthetic oligonucleotide
aagcgtgtggctcgccatcttttccgcgtggtgagtggactggaatcggct

SEQ ID NO: 221784 - DNA, 51 bp, Artificial
  Synthetic oligonucleotide
tgaaaccgaacagtgcgttagaaacgttgaatgtagcgtcaattgtaggag

SEQ ID NO: 221785 - DNA, 51 bp, Artificial
  Synthetic oligonucleotide
ttaaactgggccaagcacagtcgtatgaagcgtcctaacggcgaagagcct

SEQ ID NO: 221786 - DNA, 51 bp, Artificial
  Synthetic oligonucleotide
ggatggctcacggtatggtctgggcacgttgcgcattaggcaggtgctgaa

SEQ ID NO: 221787 - DNA, 51 bp, Artificial
  Synthetic oligonucleotide
ataccccagccggaggtagcgcccacattggcgtaagtagaggtgtagcct

SEQ ID NO: 221788 - DNA, 55 bp, Artificial
  Synthetic oligonucleotide
cccctgtttggcgcaaagtagaagttccatcgcagtttacttttggagctttcca

SEQ ID NO: 221789 - DNA, 51 bp, Artificial
  Synthetic oligonucleotide
ttacgtttaggctccggcgcattccttacgatgtccatacactggtcgtat

SEQ ID NO: 221790 - DNA, 51 bp, Artificial
  Synthetic oligonucleotide
ttcaagtcaggacagattacggttttgtcaggactcaagagtttgcatgtc

SEQ ID NO: 221791 - DNA, 51 bp, Artificial
  Synthetic oligonucleotide
tacccgttgtacgcaactgatggtctcccttaagaatatttatcacatgcg

SEQ ID NO: 221792 - DNA, 51 bp, Artificial
  Synthetic oligonucleotide
ttccgaaaatcacacttcaaggccttatcgcacacaagaggcaacccaaaa

SEQ ID NO: 221793 - DNA, 51 bp, Artificial
  Synthetic oligonucleotide
ttgatgggggtgttcggaggtacggacaatgccaagaagggtgtggccacg

SEQ ID NO: 221794 - DNA, 51 bp, Artificial
  Synthetic oligonucleotide
ggaaatataaggcaggggtggccgaccaaacaggcatccaaaccgataact

SEQ ID NO: 221795 - DNA, 51 bp, Artificial
  Synthetic oligonucleotide
catttgttacgcataaaatatagcgcccctcctgaaatgctttccaggcgg

SEQ ID NO: 221796 - DNA, 51 bp, Artificial
  Synthetic oligonucleotide
gccccattatcgcgcgacagcgtagagcctgtcgacacacgtccaccgagg

SEQ ID NO: 221797 - DNA, 51 bp, Artificial
  Synthetic oligonucleotide
ccgacggaccgaggcgaggcaccttcttcagttgggcacgagaggtaaagg

SEQ ID NO: 221798 - DNA, 51 bp, Artificial
  Synthetic oligonucleotide
cgacagtccaggcacgcgaccctccaacatgcgcgagacatcaccaatacc

SEQ ID NO: 221799 - DNA, 60 bp, Artificial
  Synthetic oligonucleotide
cgagccagacccacactttcgtggcacacatactgcccgatgtggcaggcagcgtggtgg

SEQ ID NO: 221800 - DNA, 55 bp, Artificial
  Synthetic oligonucleotide
cctgtccgtatcgccttctgtcattcgataatccgattctccgaaatattcggtt

SEQ ID NO: 221801 - DNA, 51 bp, Artificial
  Synthetic oligonucleotide
gactgttcatacgtaacacttcgagtgctgcgcaacgggttatcttgtctt

SEQ ID NO: 221802 - DNA, 51 bp, Artificial
  Synthetic oligonucleotide
cgtcaagaccataaggcagtacgacacgccccgttggtatggcacggctca

SEQ ID NO: 221803 - DNA, 48 bp, Artificial
  Synthetic oligonucleotide
ccgacaacaacgccgttaaacacccgtctttaacccttaatccgtaag

SEQ ID NO: 221804 - DNA, 51 bp, Artificial
  Synthetic oligonucleotide
ctttgtgccctcggcacctccgtgacattgcgttacctccgtccccctccg

SEQ ID NO: 221805 - DNA, 51 bp, Artificial
  Synthetic oligonucleotide
ctcccaagccggcattcacggaccattgataacgcgggtggatagtccccc

SEQ ID NO: 221806 - DNA, 51 bp, Artificial
  Synthetic oligonucleotide
cgtaagcgggtgtcgagagcctaaaccaacagggtatgcagttcgggtaag

SEQ ID NO: 221807 - DNA, 51 bp, Artificial
  Synthetic oligonucleotide
ccgacgccaaatggggaacaggcactttcgaagttacactcaacgatggcg

SEQ ID NO: 221808 - DNA, 51 bp, Artificial
  Synthetic oligonucleotide
cccttgttgcttccgcacgacgaggtcgcatcatagctatcgcccgcacac

SEQ ID NO: 221809 - DNA, 51 bp, Artificial
  Synthetic oligonucleotide
gaccgtttgcaccccgtttacaccggagcatcgtatcgtccgcgccgatat

SEQ ID NO: 221810 - DNA, 51 bp, Artificial
  Synthetic oligonucleotide
ccgtcgctgtaaggtcgaagcgtctgggcatagcaaggtgtaaacggcgga

SEQ ID NO: 221811 - DNA, 55 bp, Artificial
  Synthetic oligonucleotide
gataatgcaacgtgtatcgaggcacttatgggtactgatgtcaccgacctcatac

SEQ ID NO: 221812 - DNA, 51 bp, Artificial
  Synthetic oligonucleotide
cttcacgatgtgaataccctcacgtctgagcacgcctgcaatttggctggg

SEQ ID NO: 221813 - DNA, 51 bp, Artificial
  Synthetic oligonucleotide
cgccgaaactgttaactttgtgttaaaacccgcaaataaagcgtcgattcc

SEQ ID NO: 221814 - DNA, 51 bp, Artificial
  Synthetic oligonucleotide
ccgttgttggcacgtgtcgtaccacggcactctccgtcgatgaaggcggct

SEQ ID NO: 221815 - DNA, 51 bp, Artificial
  Synthetic oligonucleotide
ccgtaagccaacaccataggaccgcccccggacctcctaaggctattgcgg

SEQ ID NO: 221816 - DNA, 51 bp, Artificial
  Synthetic oligonucleotide
ctgcggacgctcgtcattctgcggtcgcttggcattctgcgattgcccaat

SEQ ID NO: 221817 - DNA, 51 bp, Artificial
  Synthetic oligonucleotide
ccactctgttggatattcagctgatggttatgcgagattgtcgtacgggtt

SEQ ID NO: 221818 - DNA, 51 bp, Artificial
  Synthetic oligonucleotide
gatagacccgccctcattggttttcgggaacgtgaattggtgttcgctgta

SEQ ID NO: 221819 - DNA, 51 bp, Artificial
  Synthetic oligonucleotide
cgcaatagaagcacatgaatacgctgttcgccacaaagttgagtacgatac

SEQ ID NO: 221820 - DNA, 51 bp, Artificial
  Synthetic oligonucleotide
gccaaccggaggtggacacgaattcgtttgcgacggatatgagtcgggcga

SEQ ID NO: 221821 - DNA, 50 bp, Artificial
  Synthetic oligonucleotide
acaggaactcatcgtgtacaccaaacgtgcaggctggggtggcgtcggcc

SEQ ID NO: 221822 - DNA, 55 bp, Artificial
  Synthetic oligonucleotide
gagtgtcagtgagagcacgatgagatactcagcaccgtcggttgtttcagtggta

SEQ ID NO: 221823 - DNA, 50 bp, Artificial
  Synthetic oligonucleotide
accaggcacgtaaaggtcctcgttcgaagcgtagccacgctcctgctcct

SEQ ID NO: 221824 - DNA, 50 bp, Artificial
  Synthetic oligonucleotide
tcacgcacaaccttctcggcaatctgcacgcttagctccgccacttgggt

SEQ ID NO: 221825 - DNA, 50 bp, Artificial
  Synthetic oligonucleotide
accaaaggcagcgtgacttccatgacaccgtggcagtgcgggcacttgca

SEQ ID NO: 221826 - DNA, 50 bp, Artificial
  Synthetic oligonucleotide
acagcgacaaggttgccgttcgtgcttacgactggctgggacgacacgta

SEQ ID NO: 221827 - DNA, 50 bp, Artificial
  Synthetic oligonucleotide
tcaatgctgagccagtttatagagggacggggttaacacagtcatatact

SEQ ID NO: 221828 - DNA, 50 bp, Artificial
  Synthetic oligonucleotide
gacttgccggctaaggcgtccagccccgattcaaccgcttgactggcggt

SEQ ID NO: 221829 - DNA, 50 bp, Artificial
  Synthetic oligonucleotide
gacttgcgagccactgtgcggatggaggtgcagcgtacaccatgtgcgat

SEQ ID NO: 221830 - DNA, 50 bp, Artificial
  Synthetic oligonucleotide
acatgcgtgccgagaacggaacccgctactgggctattcctggtcgcgag

SEQ ID NO: 221831 - DNA, 50 bp, Artificial
  Synthetic oligonucleotide
acagcagcgtaccatccagtcggtagcagtccaacagcgtggagccggta

SEQ ID NO: 221832 - DNA, 50 bp, Artificial
  Synthetic oligonucleotide
tcgctagctgccagagcgacgatgaggctgttagcatcacccgtccgaat

SEQ ID NO: 221833 - DNA, 55 bp, Artificial
  Synthetic oligonucleotide
ccgtcctacttaccttggcatcgcatgtctaacatagaccattggatgggaccgc

SEQ ID NO: 221834 - DNA, 50 bp, Artificial
  Synthetic oligonucleotide
tcgcccggattccatcttgcgtctacctggcttacgggtattggcgccac

SEQ ID NO: 221835 - DNA, 50 bp, Artificial
  Synthetic oligonucleotide
tcgacaagttaggagcttaggtgcgacgaatagggaaggaataaggcttt

SEQ ID NO: 221836 - DNA, 50 bp, Artificial
  Synthetic oligonucleotide
aattccttgccgggcaaagcgataggccggggagccgaaacctacacgtt

SEQ ID NO: 221837 - DNA, 50 bp, Artificial
  Synthetic oligonucleotide
acaacctgttcggttgcgtaaaccacgatgcctgccaccgtccgtccgtc

SEQ ID NO: 221838 - DNA, 50 bp, Artificial
  Synthetic oligonucleotide
acaagggcgcatgatcgcccgacgacaaggtagcctgcatctcaacccga

SEQ ID NO: 221839 - DNA, 50 bp, Artificial
  Synthetic oligonucleotide
cgcccgaatcatcggggctaccacggcacgcgacggttatatggaaggta

SEQ ID NO: 221840 - DNA, 50 bp, Artificial
  Synthetic oligonucleotide
acaccaaacgtgcaggctggggtggcgtcggccagatacaggtcgaaatc

SEQ ID NO: 221841 - DNA, 50 bp, Artificial
  Synthetic oligonucleotide
tccgtcgctctttgtgccgtcggcacctccgtgacattgcgttacctccg

SEQ ID NO: 221842 - DNA, 50 bp, Artificial
  Synthetic oligonucleotide
tccgctgatccgtcccatgaagtcgacgaaagcttttccgtacacctctg

SEQ ID NO: 221843 - DNA, 50 bp, Artificial
  Synthetic oligonucleotide
gactgcagccatcgcgttagcttgtggtgctgccagactaccgcttgcga

SEQ ID NO: 221844 - DNA, 55 bp, Artificial
  Synthetic oligonucleotide
gagtgggtatctagagtagagcaaacgaatgtcgatgtcgttgcgtccgaggcgg

SEQ ID NO: 221845 - DNA, 50 bp, Artificial
  Synthetic oligonucleotide
acaccccctgggttacctgggccttgggatggaatgcatggggagccagc

SEQ ID NO: 221846 - DNA, 50 bp, Artificial
  Synthetic oligonucleotide
tccgcacgacgaggtcgcatcatagctatcgcccgcacacgatggacgtc

SEQ ID NO: 221847 - DNA, 50 bp, Artificial
  Synthetic oligonucleotide
cgccagagcagcacttcgggcatcctctacaatgccaccgtcattcgccg

SEQ ID NO: 221848 - DNA, 50 bp, Artificial
  Synthetic oligonucleotide
acacccccttgccgaggcttggttgggaaatcccgacggaattcagggcg

SEQ ID NO: 221849 - DNA, 50 bp, Artificial
  Synthetic oligonucleotide
acacgccatggcccgaagtgggtagctatatggtagccggaagccgcgtg

SEQ ID NO: 221850 - DNA, 50 bp, Artificial
  Synthetic oligonucleotide
acacggcgcgacatccgtccggtgagggcgttatgccggcgaatggtgtt

SEQ ID NO: 221851 - DNA, 50 bp, Artificial
  Synthetic oligonucleotide
acacgtggtgttgctgtccacgccaggctgtctcgcccgaaatggtccaa

SEQ ID NO: 221852 - DNA, 50 bp, Artificial
  Synthetic oligonucleotide
tcattccctgatcgctgggggcgtttactgcttgaccgcagagagcgact

SEQ ID NO: 221853 - DNA, 50 bp, Artificial
  Synthetic oligonucleotide
cgacacgatgggccacgtcactttgtctgcagagacctcgcgttcggcca

SEQ ID NO: 221854 - DNA, 50 bp, Artificial
  Synthetic oligonucleotide
acgacggttccgaggtttcccacgaagtggggtggctctctatcgggcat

SEQ ID NO: 221855 - DNA, 54 bp, Artificial
  Synthetic oligonucleotide
gatagaaacgaagtagagcttcacgaggaagtctaacgaaaccacgtcggggtc

SEQ ID NO: 221856 - DNA, 50 bp, Artificial
  Synthetic oligonucleotide
cgaatggagggttccccatgtcatgcgccaagcatgcggcactcacgatg

SEQ ID NO: 221857 - DNA, 50 bp, Artificial
  Synthetic oligonucleotide
acgcacttgggaatgctaaacagggccctccggtctcccttggacagcta

SEQ ID NO: 221858 - DNA, 50 bp, Artificial
  Synthetic oligonucleotide
tacagctgctgccatgtgatgagtagggcctgcctcgctccaacggttca

SEQ ID NO: 221859 - DNA, 50 bp, Artificial
  Synthetic oligonucleotide
tacaccagctgcagatggaacgaatgcgggtccgtttaaccgctggccta

SEQ ID NO: 221860 - DNA, 50 bp, Artificial
  Synthetic oligonucleotide
acgccccaactactccggataatacgccaggcggttctaccccaggcggt

SEQ ID NO: 221861 - DNA, 50 bp, Artificial
  Synthetic oligonucleotide
gaggggcaagctcaacgcattgcaatcgcccgaagcctactccgcgatcg

SEQ ID NO: 221862 - DNA, 50 bp, Artificial
  Synthetic oligonucleotide
acgccgacacattcgaagtggtgacaacgaactgcctcacggggcgtgcg

SEQ ID NO: 221863 - DNA, 50 bp, Artificial
  Synthetic oligonucleotide
acgcgtatattttacgccccggctctcgtaatgccccatgacgcgggcgg

SEQ ID NO: 221864 - DNA, 50 bp, Artificial
  Synthetic oligonucleotide
acgcgtgcaccacagctgcctgctagcgcccaagtggcaagcagtcatat

SEQ ID NO: 221865 - DNA, 50 bp, Artificial
  Synthetic oligonucleotide
acggcaacgcccgaaagatagcaccatgcaaccaccgggccacacaaccg

SEQ ID NO: 221866 - DNA, 55 bp, Artificial
  Synthetic oligonucleotide
ccgtctaccgaggagcttattggcaacggctattccatattaccttcgccagctc

SEQ ID NO: 221867 - DNA, 50 bp, Artificial
  Synthetic oligonucleotide
ccttagagcgtagcggttccgagcaccgagtagggcggtttcctccctct

SEQ ID NO: 221868 - DNA, 50 bp, Artificial
  Synthetic oligonucleotide
acggtggatgcaccccacgacggtgaaccacactggttcgacgcggcaca

SEQ ID NO: 221869 - DNA, 50 bp, Artificial
  Synthetic oligonucleotide
acgtaacccgttgtcagcatacaggctcacggggttggcgcctgacgtgt

SEQ ID NO: 221870 - DNA, 50 bp, Artificial
  Synthetic oligonucleotide
acgtgccgacgttgggtttctacggcacctttgcaccggccgtgcagatt

SEQ ID NO: 221871 - DNA, 50 bp, Artificial
  Synthetic oligonucleotide
acgtggtgggtggcgttttcacccccgatgccggctcacgcttagagttg

SEQ ID NO: 221872 - DNA, 50 bp, Artificial
  Synthetic oligonucleotide
actcagcaccatcgacggtggcgtgctctgcaacaagaaccgggacgcca

SEQ ID NO: 221873 - DNA, 50 bp, Artificial
  Synthetic oligonucleotide
gagaaggccctccgtggacagcagttgtccgctctcgagattcgccagta

SEQ ID NO: 221874 - DNA, 50 bp, Artificial
  Synthetic oligonucleotide
gagaccgagaatatcctcacacgcaataacattacgcgctacacccttag

SEQ ID NO: 221875 - DNA, 50 bp, Artificial
  Synthetic oligonucleotide
tatagataccatttcgggagggcggattttcatgggcgggaaagaacttc

SEQ ID NO: 221876 - DNA, 50 bp, Artificial
  Synthetic oligonucleotide
accctcagtcgtgccgtggtacctgcccgtgaagtgtgcacgcgtctcca

SEQ ID NO: 221877 - DNA, 55 bp, Artificial
  Synthetic oligonucleotide
ccgtgccatatcgggtaatgtcaatcagcgcatagaggtggactctatccactgc

SEQ ID NO: 221878 - DNA, 50 bp, Artificial
  Synthetic oligonucleotide
tataatgtccatgcaacgggcttcgtccccgtaaaaggaagtgtgccgcc

SEQ ID NO: 221879 - DNA, 50 bp, Artificial
  Synthetic oligonucleotide
accgattgggggttaacggaagcgagcgtcccaagcacggaagcgctgca

SEQ ID NO: 221880 - DNA, 50 bp, Artificial
  Synthetic oligonucleotide
gagcgaactgcctactgagcctgacgcaaagggtagatggcgcgtgagcg

SEQ ID NO: 221881 - DNA, 50 bp, Artificial
  Synthetic oligonucleotide
accgccgcgtgctccacaacagtgcccatgagattgcgaagtgccttgtc

SEQ ID NO: 221882 - DNA, 50 bp, Artificial
  Synthetic oligonucleotide
accggagcacggccgcacttctgggtgcaacccaaagccttatcttcgag

SEQ ID NO: 221883 - DNA, 50 bp, Artificial
  Synthetic oligonucleotide
tagcacagattcccggtgcgtggacggatgccgcacacaagaacggatgt

SEQ ID NO: 221884 - DNA, 50 bp, Artificial
  Synthetic oligonucleotide
tagcaatcctcctctgcatctgccctcatgtcattgtcatcggcaacgtt

SEQ ID NO: 221885 - DNA, 50 bp, Artificial
  Synthetic oligonucleotide
gagcgatgcaccgtaaggaacgttaagcgtagagaggacgatagaggtgt

SEQ ID NO: 221886 - DNA, 50 bp, Artificial
  Synthetic oligonucleotide
acctgacgaccgattgggggttaacggaagcgagcgtcccaagcacggaa

SEQ ID NO: 221887 - DNA, 50 bp, Artificial
  Synthetic oligonucleotide
acctgactccggccactctgtttgacgggctgtaccgtccggattgcgac

SEQ ID NO: 221888 - DNA, 55 bp, Artificial
  Synthetic oligonucleotide
ccgggcaatctgcgcactggtcattggtgaaatatctcccatattattactacca

SEQ ID NO: 221889 - DNA, 50 bp, Artificial
  Synthetic oligonucleotide
acctgcccgaatgcctttccgcaaaaagggatggcgaggcgcaaggccgc

SEQ ID NO: 221890 - DNA, 50 bp, Artificial
  Synthetic oligonucleotide
acgaaacgtttgagcggatgacggtcgccctgtgtgccgatcattcggcc

SEQ ID NO: 221891 - DNA, 50 bp, Artificial
  Synthetic oligonucleotide
acgacatcgcctgtccaaaacacgcgaacggaagggtcaagtgtgcggcc

SEQ ID NO: 221892 - DNA, 50 bp, Artificial
  Synthetic oligonucleotide
tacgccacgaccttcctcccggcatccatggaggactacggccgcttctg

SEQ ID NO: 221893 - DNA, 50 bp, Artificial
  Synthetic oligonucleotide
aaatcgtgggggagcagttcagcatctgtcccggacgggagaagaacggg

SEQ ID NO: 221894 - DNA, 50 bp, Artificial
  Synthetic oligonucleotide
aacacgttacagcgccatcccgttcggggaacgcctggccggaacacggg

SEQ ID NO: 221895 - DNA, 50 bp, Artificial
  Synthetic oligonucleotide
aaccatcacctgctaaccgcaccgcaatggggtgtgcaccttgccgccaa

SEQ ID NO: 221896 - DNA, 50 bp, Artificial
  Synthetic oligonucleotide
tgttcgcggttcgaatagagacgcatcggcaaatattccacgctgaaagg

SEQ ID NO: 221897 - DNA, 50 bp, Artificial
  Synthetic oligonucleotide
aaccgaggttgtttggcagtagcgcctcgggattttctgcgctgcagggt

SEQ ID NO: 221898 - DNA, 50 bp, Artificial
  Synthetic oligonucleotide
aaccgcttccacgtgcgacccttctacagcattgaatgccggtcccgact

SEQ ID NO: 221899 - DNA, 55 bp, Artificial
  Synthetic oligonucleotide
ccgtgggtttggctttccctataagtttacacgcatcatctattccaataggaat

SEQ ID NO: 221900 - DNA, 50 bp, Artificial
  Synthetic oligonucleotide
gaaagcccctccgatttgccatttgggcccctcgggcttgcgaaagagcc

SEQ ID NO: 221901 - DNA, 50 bp, Artificial
  Synthetic oligonucleotide
cgttgttcgactcaccgcaccacatcgcaacgagggctctttccaccgct

SEQ ID NO: 221902 - DNA, 50 bp, Artificial
  Synthetic oligonucleotide
tgtactgccgtgccccacgggtcatacagccgtgccccacgagtcctact

SEQ ID NO: 221903 - DNA, 50 bp, Artificial
  Synthetic oligonucleotide
cgttcctgcaagtcttggcgcggttctcccacccaaccgggcacttctat

SEQ ID NO: 221904 - DNA, 50 bp, Artificial
  Synthetic oligonucleotide
tgggtcgcgcattccgtgggtggttgcgaatgaaattccaccctgggtcg

SEQ ID NO: 221905 - DNA, 50 bp, Artificial
  Synthetic oligonucleotide
tgggggcgtttactgcttgaccgcagagagcgactgactgcccaacagga

SEQ ID NO: 221906 - DNA, 50 bp, Artificial
  Synthetic oligonucleotide
tggggcacggcagtaggacccgtggggcacggcagtacatttcgttgata

SEQ ID NO: 221907 - DNA, 50 bp, Artificial
  Synthetic oligonucleotide
aacgaggcactgttgcagaagggtgagaccatcgaggattgcgagggcga

SEQ ID NO: 221908 - DNA, 50 bp, Artificial
  Synthetic oligonucleotide
cgggtgagtgtacgcacttgggaatgctaaacagggccctccggtctccc

SEQ ID NO: 221909 - DNA, 50 bp, Artificial
  Synthetic oligonucleotide
aacgctttcggcggacttgtaccctcgtgcgaacggcagaatgtgctcgg

SEQ ID NO: 221910 - DNA, 60 bp, Artificial
  Synthetic oligonucleotide
agatgttggggcgtgatatgcgcatggcataagagaacgtgagcatccgtgtctccccta

SEQ ID NO: 221911 - DNA, 55 bp, Artificial
  Synthetic oligonucleotide
gataggtctatggacccagtcaaaccttcacccagtcgacagcattccagcactc

SEQ ID NO: 221912 - DNA, 50 bp, Artificial
  Synthetic oligonucleotide
aacgggcagaccagcggtgagaccgaacttcttaacacctgcgggcagta

SEQ ID NO: 221913 - DNA, 50 bp, Artificial
  Synthetic oligonucleotide
aacgggcgcggagcaagaacgctctacaacctgcttacagaagcgccgga

SEQ ID NO: 221914 - DNA, 50 bp, Artificial
  Synthetic oligonucleotide
aacgttggctctgagcaagggcgtgccaatcgagtcagtttcccgcatgc

SEQ ID NO: 221915 - DNA, 50 bp, Artificial
  Synthetic oligonucleotide
ctggttgcgcccggaacgtcgctttacgcgtgccgttgcaggtataggag

SEQ ID NO: 221916 - DNA, 50 bp, Artificial
  Synthetic oligonucleotide
tttcaccaagaacggactggccacgaatacggggcgcgggggtaccatca

SEQ ID NO: 221917 - DNA, 50 bp, Artificial
  Synthetic oligonucleotide
aaacagagcgttacttggactgctaagcttcgtctgtgcatgttgtgcct

SEQ ID NO: 221918 - DNA, 50 bp, Artificial
  Synthetic oligonucleotide
aaacagcacccgccaaccgagcccgaacgagggtatggccgacattgcac

SEQ ID NO: 221919 - DNA, 50 bp, Artificial
  Synthetic oligonucleotide
aaacagtttctgccggtgggcggtaagcccgtgctgatgcgtaccgtcga

SEQ ID NO: 221920 - DNA, 50 bp, Artificial
  Synthetic oligonucleotide
aaaccaatcgggtaacggtggctgcccagtccgccccaacgatggaaaat

SEQ ID NO: 221921 - DNA, 50 bp, Artificial
  Synthetic oligonucleotide
aaagaattcggtacagcttgcggcaatgcacggcagtggggcgcccatgt

SEQ ID NO: 221922 - DNA, 55 bp, Artificial
  Synthetic oligonucleotide
gatcacaagtctcttcacccatgcacgtgttatcgacctcgtacagggaactggt

SEQ ID NO: 221923 - DNA, 50 bp, Artificial
  Synthetic oligonucleotide
ttgcgcaaaatggtgttcggtagccatgccgttaggcgataccagcggcg

SEQ ID NO: 221924 - DNA, 50 bp, Artificial
  Synthetic oligonucleotide
ctgccgcgagcctgggtagccactacaaggagcacggaaagaaggtcagg

SEQ ID NO: 221925 - DNA, 50 bp, Artificial
  Synthetic oligonucleotide
cttcgacacctcttgggtgtatgcaggaagcaacaagttggcccccggcc

SEQ ID NO: 221926 - DNA, 50 bp, Artificial
  Synthetic oligonucleotide
ctgcagcgagtatcgggtgtaaccatggagcgtgatgcatcgggcgaggc

SEQ ID NO: 221927 - DNA, 50 bp, Artificial
  Synthetic oligonucleotide
aaagagcggaccgcccgttgtttcggctccgttgtgcctcaattccagcg

SEQ ID NO: 221928 - DNA, 50 bp, Artificial
  Synthetic oligonucleotide
ctgaccgccagacgcacagccacgtcgttacgtgacagaccgttgtcctg

SEQ ID NO: 221929 - DNA, 50 bp, Artificial
  Synthetic oligonucleotide
aaagcccacgtgcattgctgtgcctccacgttggcatggcctcccgtctg

SEQ ID NO: 221930 - DNA, 50 bp, Artificial
  Synthetic oligonucleotide
ttcggatctacgaaaatattcgtggacaagtcactgtggaataacactac

SEQ ID NO: 221931 - DNA, 50 bp, Artificial
  Synthetic oligonucleotide
ctctttgtgccgtcggcacctctgtgacattgtgtttacctccgtcctcc

SEQ ID NO: 221932 - DNA, 50 bp, Artificial
  Synthetic oligonucleotide
ctcgcacaatcccaccatatcgggcaacgaccacccgttggcagactcgc

SEQ ID NO: 221933 - DNA, 55 bp, Artificial
  Synthetic oligonucleotide
ccggagagcaaagtttccacttgggcataagcttcgttgccttccaatccaccta

SEQ ID NO: 221934 - DNA, 50 bp, Artificial
  Synthetic oligonucleotide
aaagcgctgcatacgagccagtaccttaccgctggccatacgcacaccgg

SEQ ID NO: 221935 - DNA, 50 bp, Artificial
  Synthetic oligonucleotide
aaagtgtgtggatcgcgataggccgtgggattgcggaggatggcaccgtc

SEQ ID NO: 221936 - DNA, 50 bp, Artificial
  Synthetic oligonucleotide
ttatatcaccgactgttctcaccgtttgggcgtgaacgaggcaattatcg

SEQ ID NO: 221937 - DNA, 50 bp, Artificial
  Synthetic oligonucleotide
aagcgtagctgtgccttgaggtaaagggctctcgggtcggcgggggatac

SEQ ID NO: 221938 - DNA, 50 bp, Artificial
  Synthetic oligonucleotide
cgggacttagtcagccaacagggggacatgccacggttgcaggcttcgat

SEQ ID NO: 221939 - DNA, 50 bp, Artificial
  Synthetic oligonucleotide
cggagccaacctgggcggtatgggaacccctatcggaaccccgcctaacg

SEQ ID NO: 221940 - DNA, 50 bp, Artificial
  Synthetic oligonucleotide
aaggaatagcctcccctgcgggcaatggaaagcgcacggctggcattgat

SEQ ID NO: 221941 - DNA, 50 bp, Artificial
  Synthetic oligonucleotide
aaggccgggcaaggatgtggtattcggaccagcctatctcgtggtgtgcg

SEQ ID NO: 221942 - DNA, 50 bp, Artificial
  Synthetic oligonucleotide
aaggctcgcgttcgtggctcgttttaggccctttgcgcttgcaacctgcc

SEQ ID NO: 221943 - DNA, 50 bp, Artificial
  Synthetic oligonucleotide
cgctatcgctgcgcctatcgctggagatttatggacgctggcggtcccga

SEQ ID NO: 221944 - DNA, 55 bp, Artificial
  Synthetic oligonucleotide
ccggacaagagatgcctacgaccgacatcgcactcttcagccggcttatcttcct

SEQ ID NO: 221945 - DNA, 50 bp, Artificial
  Synthetic oligonucleotide
cgctactcccacggccggcaaaggttcaccgatggcctcgcttgtcgggt

SEQ ID NO: 221946 - DNA, 50 bp, Artificial
  Synthetic oligonucleotide
aaggttccccgccatgttctccgcagatgccgcatgttaatccgggacgt

SEQ ID NO: 221947 - DNA, 50 bp, Artificial
  Synthetic oligonucleotide
aagtatgccggcctgcgggaagcatcacggacgctagcctgaatgacggg

SEQ ID NO: 221948 - DNA, 50 bp, Artificial
  Synthetic oligonucleotide
aagtggtggcgacactcacccaccccatcgttaaccggctctccgcatcg

SEQ ID NO: 221949 - DNA, 50 bp, Artificial
  Synthetic oligonucleotide
tcgtctccggggccaacgccacatgctatcagagccaaatgaactgcagc

SEQ ID NO: 221950 - DNA, 50 bp, Artificial
  Synthetic oligonucleotide
cgcgtactcaagggaaccagtatgcgctgcaagtcagacgttgggcgcct

SEQ ID NO: 221951 - DNA, 50 bp, Artificial
  Synthetic oligonucleotide
aatatggggtatcggccgcaggcaggcactctatcgcccacaggcgtact

SEQ ID NO: 221952 - DNA, 50 bp, Artificial
  Synthetic oligonucleotide
aatgagcaaggcagcatgcccgatgaagaaagcgatgcgggcaacgagga

SEQ ID NO: 221953 - DNA, 50 bp, Artificial
  Synthetic oligonucleotide
tcggtgcgcggttggagtgttagagaactcggaccgggtagctttcgtgg

SEQ ID NO: 221954 - DNA, 50 bp, Artificial
  Synthetic oligonucleotide
tcggccagcacgtgtggggtcgaagttttccaattcgtgctcaacaccct

SEQ ID NO: 221955 - DNA, 54 bp, Artificial
  Synthetic oligonucleotide
ccgctgcaactttaatacttacccttatgcggtaacgacttatgcacgggagtt

SEQ ID NO: 221956 - DNA, 50 bp, Artificial
  Synthetic oligonucleotide
aatgccagcgcacaagtcagggctacggaagctgtgcggtcgtccatcca

SEQ ID NO: 221957 - DNA, 50 bp, Artificial
  Synthetic oligonucleotide
aatgcgcaccttgggtcgctgaccacgcaagctggccataatctcctcga

SEQ ID NO: 221958 - DNA, 50 bp, Artificial
  Synthetic oligonucleotide
tggagcttacattccgtggaacgctgtttctcgtacgaatttatcgtggc

SEQ ID NO: 221959 - DNA, 50 bp, Artificial
  Synthetic oligonucleotide
tgctcccgacgcgatacatgtatacgataagctccatatcgtacagctcg

SEQ ID NO: 221960 - DNA, 50 bp, Artificial
  Synthetic oligonucleotide
gaattcgagggcatcgtgccatctacgggcagacacctcacgctcacggc

SEQ ID NO: 221961 - DNA, 50 bp, Artificial
  Synthetic oligonucleotide
cgggcaccttaatctccgacacggatcccggcgtaacaaccttcacgggc

SEQ ID NO: 221962 - DNA, 50 bp, Artificial
  Synthetic oligonucleotide
aactacgtggttcggtggggtcgcttagcgcagagtcgggaacaacgcca

SEQ ID NO: 221963 - DNA, 50 bp, Artificial
  Synthetic oligonucleotide
aactgaaccctgagggctggttggcgcgatagggtcgacacgctgagtgt

SEQ ID NO: 221964 - DNA, 50 bp, Artificial
  Synthetic oligonucleotide
tgcgctgtccgcgaatcgtgatcgagcccacagtacccggtcgttgtgag

SEQ ID NO: 221965 - DNA, 50 bp, Artificial
  Synthetic oligonucleotide
aactgacaagacgacggctctcgggtagggctggcacggaacgcagggat

SEQ ID NO: 221966 - DNA, 55 bp, Artificial
  Synthetic oligonucleotide
ccgcgtgacgggaaatggtacatgtatgccccgatccacatgcggggtatcggtg

SEQ ID NO: 221967 - DNA, 50 bp, Artificial
  Synthetic oligonucleotide
aagacttcgcttggcgcagtcgcgagaacggtggctgggctatccagacc

SEQ ID NO: 221968 - DNA, 50 bp, Artificial
  Synthetic oligonucleotide
tgcctccagtagtccttgtgcacttcaacctgaaagcgcggaggcgcaga

SEQ ID NO: 221969 - DNA, 50 bp, Artificial
  Synthetic oligonucleotide
aagataatcccaccatcgcagtgccacgcacgcccaacaaggccgtgatg

SEQ ID NO: 221970 - DNA, 50 bp, Artificial
  Synthetic oligonucleotide
aagcactgtgtcacgggatgtgttgccacggcagcagcccaaatcatggg

SEQ ID NO: 221971 - DNA, 50 bp, Artificial
  Synthetic oligonucleotide
tgccggtgttcgtccactcgttgcagccgacaatgacccttctgggcgta

SEQ ID NO: 221972 - DNA, 50 bp, Artificial
  Synthetic oligonucleotide
tgccctttaagcctccgtagcagcgacgccacacgctcacgacgccaacc

SEQ ID NO: 221973 - DNA, 50 bp, Artificial
  Synthetic oligonucleotide
aagccaaccctccgtgcgaaggggcatccgtgctcgccccgtccttgata

SEQ ID NO: 221974 - DNA, 50 bp, Artificial
  Synthetic oligonucleotide
cgggcaccgacttccctgtttaccggttcattcctggcgtttcgcgaggc

SEQ ID NO: 221975 - DNA, 50 bp, Artificial
  Synthetic oligonucleotide
aagccaccactgacgggaagaggtggatggttgtgggccatacggcaggg

SEQ ID NO: 221976 - DNA, 50 bp, Artificial
  Synthetic oligonucleotide
aagcccgctacggctactaacctccagccgaccgttctcttccgtcaggg

SEQ ID NO: 221977 - DNA, 55 bp, Artificial
  Synthetic oligonucleotide
ccgttccttatacgtacgcctttccgaatcgtcaggatccacatcattcaaaccg

SEQ ID NO: 221978 - DNA, 50 bp, Artificial
  Synthetic oligonucleotide
aagcgctgcctacgcatcgtggagcgacgtagctggcggtaacatctcgc

SEQ ID NO: 221979 - DNA, 50 bp, Artificial
  Synthetic oligonucleotide
aagcggacgacacagactaacacccgtatcgtaagcctggcgggctgcgg

SEQ ID NO: 221980 - DNA, 50 bp, Artificial
  Synthetic oligonucleotide
ccattgttaccccactgataccgtgtgtcatagcatctttcccgataggc

SEQ ID NO: 221981 - DNA, 50 bp, Artificial
  Synthetic oligonucleotide
ccatgcttcccgccaatatgacccgcttgtggaggcggcccaacttcagg

SEQ ID NO: 221982 - DNA, 50 bp, Artificial
  Synthetic oligonucleotide
gcatgaacggctactacacgccctacgacgctacgctcaatccgacgggc

SEQ ID NO: 221983 - DNA, 50 bp, Artificial
  Synthetic oligonucleotide
atattcagacccaagcacagcggcgggcaacgtggcatacgtaggtcggc

SEQ ID NO: 221984 - DNA, 50 bp, Artificial
  Synthetic oligonucleotide
atcagccgtgcgtcctgcatgaatatgtcctgcgcgtttggagccgtcca

SEQ ID NO: 221985 - DNA, 50 bp, Artificial
  Synthetic oligonucleotide
ggacaagcctccacacagagcgagcatcccttgcaacgcccggtgtcgac

SEQ ID NO: 221986 - DNA, 50 bp, Artificial
  Synthetic oligonucleotide
atccactgcggcatacagtgcgcctccaactaccgacacctcagcatcgg

SEQ ID NO: 221987 - DNA, 50 bp, Artificial
  Synthetic oligonucleotide
ggaacgctgcgaattacggtcgtcccacgctccatatgaacagaaaccta

SEQ ID NO: 221988 - DNA, 55 bp, Artificial
  Synthetic oligonucleotide
ccgcattgtctatgcctcgctggtgatcgtttccgctaactcgggcggtgctttt

SEQ ID NO: 221989 - DNA, 50 bp, Artificial
  Synthetic oligonucleotide
atccgccgccgcttttcctccggaaggtggctatatggtttgcgcgacaa

SEQ ID NO: 221990 - DNA, 50 bp, Artificial
  Synthetic oligonucleotide
atccgggcacaagtctggaaacagccctcaacggaacgggcgtctacacg

SEQ ID NO: 221991 - DNA, 50 bp, Artificial
  Synthetic oligonucleotide
ccacggctatcctccgcgagtgtggagccggtgcagcacggatgcaggaa

SEQ ID NO: 221992 - DNA, 50 bp, Artificial
  Synthetic oligonucleotide
ccaccatcggaggcggactggtgctgaaatggcgaggtcatggagccgat

SEQ ID NO: 221993 - DNA, 50 bp, Artificial
  Synthetic oligonucleotide
gccacacgattacgccatcggcaactcccgacttggcaaaggcgtcacga

SEQ ID NO: 221994 - DNA, 50 bp, Artificial
  Synthetic oligonucleotide
ccaatgcagatccgctggagacctactatggcggcgtgagtggcgaaccc

SEQ ID NO: 221995 - DNA, 50 bp, Artificial
  Synthetic oligonucleotide
atcggccgcaggcaggcactctatcgcccacaggcgtactgtctgttccc

SEQ ID NO: 221996 - DNA, 50 bp, Artificial
  Synthetic oligonucleotide
gcttacgggcctatcctctttgttattgacagacagcgacatggcgcgaa

SEQ ID NO: 221997 - DNA, 50 bp, Artificial
  Synthetic oligonucleotide
ccaatcggtgtctatctccacaccggccgtgatgtctacggcttcgcccc

SEQ ID NO: 221998 - DNA, 50 bp, Artificial
  Synthetic oligonucleotide
atgaattaccttacggtggctctccggcgtgttccggtcgcccgggtatg

SEQ ID NO: 221999 - DNA, 55 bp, Artificial
  Synthetic oligonucleotide
gatgccccaccccatccgttccatgtgacaggcggtatggtaggctactttctta

SEQ ID NO: 222000 - DNA, 50 bp, Artificial
  Synthetic oligonucleotide
atgatagtcggtccaaggcaggttaggcacgctttgcgtctgtgccgcca

SEQ ID NO: 222001 - DNA, 50 bp, Artificial
  Synthetic oligonucleotide
cccctgcgaacgctacttctgacgcgctgactgacagaatcgggagcaga

SEQ ID NO: 222002 - DNA, 50 bp, Artificial
  Synthetic oligonucleotide
agtaacgtgcctcctcgcaggcctctctgtatcccattgcgttggccgac

SEQ ID NO: 222003 - DNA, 50 bp, Artificial
  Synthetic oligonucleotide
agtccgagcaacccggcagcgttatcgacgcacaagccagcaacaacgca

SEQ ID NO: 222004 - DNA, 50 bp, Artificial
  Synthetic oligonucleotide
ccccgtggtatgtccccgcaactcgcagtctagggactcccatccgccca

SEQ ID NO: 222005 - DNA, 50 bp, Artificial
  Synthetic oligonucleotide
ggcccaaggacggctatcccaatgcgcacaaagcagtattcgggtggtgg

SEQ ID NO: 222006 - DNA, 50 bp, Artificial
  Synthetic oligonucleotide
agtcgcactgcaacactctgtacacgaccagccgacagggcgggcttaac

SEQ ID NO: 222007 - DNA, 50 bp, Artificial
  Synthetic oligonucleotide
ggcatctccgccaaaccgcttgtcggcagcatagtcttgtcgcccgaagt

SEQ ID NO: 222008 - DNA, 50 bp, Artificial
  Synthetic oligonucleotide
agtcgcccgtacgtaccagccgtagcacatggggcttgacaccctcgaaa

SEQ ID NO: 222009 - DNA, 50 bp, Artificial
  Synthetic oligonucleotide
ggcagttacggaggtgcatctggctatggttcgggcggcagctatgggcg

SEQ ID NO: 222010 - DNA, 54 bp, Artificial
  Synthetic oligonucleotide
ccgcagaaagccgtggtaacagcggtaagaagtcccgttacgataagcagacgg

SEQ ID NO: 222011 - DNA, 50 bp, Artificial
  Synthetic oligonucleotide
agtcttgcggctgatgttcgctctgtccaagccggcattcacgcgtaggg

SEQ ID NO: 222012 - DNA, 50 bp, Artificial
  Synthetic oligonucleotide
gcagcgcaggacactcgtctacgtgtgggtacatgcccactggggtacag

SEQ ID NO: 222013 - DNA, 50 bp, Artificial
  Synthetic oligonucleotide
ggcaagcagatgtacctcacccagtgtaccaccgatcccacttcgccccg

SEQ ID NO: 222014 - DNA, 50 bp, Artificial
  Synthetic oligonucleotide
agtgtaacaaggcctctgcattgatttcgcgctgttcactgagtaccgac

SEQ ID NO: 222015 - DNA, 50 bp, Artificial
  Synthetic oligonucleotide
ggcaacgaccacccgttggcagactcgccacaggaaagaatggtttgccc

SEQ ID NO: 222016 - DNA, 50 bp, Artificial
  Synthetic oligonucleotide
gcagcggtggctcttacaggagaagcgtacgcaggcttgggacacaccat

SEQ ID NO: 222017 - DNA, 50 bp, Artificial
  Synthetic oligonucleotide
agttagccgcacgcccatagacggcagaaaccccgaatgggaagtccgca

SEQ ID NO: 222018 - DNA, 50 bp, Artificial
  Synthetic oligonucleotide
atacacttccgtaccggcgcattaggacaaggcagccgaaccgcactgcc

SEQ ID NO: 222019 - DNA, 50 bp, Artificial
  Synthetic oligonucleotide
atacagtccctccaaaggcgcaaacctgacggggcacatccaatgggcct

SEQ ID NO: 222020 - DNA, 50 bp, Artificial
  Synthetic oligonucleotide
ccccggttagtgattaggcaggtgtgcgtccccggtaaggcgccagtagg

SEQ ID NO: 222021 - DNA, 60 bp, Artificial
  Synthetic oligonucleotide
gagcgttggaggccaagttttcacgcacaaccttctcggcaatctgcacgcttagctccg

SEQ ID NO: 222022 - DNA, 55 bp, Artificial
  Synthetic oligonucleotide
gatgcccttacacgtacagacgtgaacaaaatctacgatacgcgcgacttctcta

SEQ ID NO: 222023 - DNA, 50 bp, Artificial
  Synthetic oligonucleotide
ccccaacagtttgtacgctcggcgcgccccaataggcttgatggaagtga

SEQ ID NO: 222024 - DNA, 50 bp, Artificial
  Synthetic oligonucleotide
caaccacctctttggcttgcatcccggccacacgattacgccatcggcaa

SEQ ID NO: 222025 - DNA, 50 bp, Artificial
  Synthetic oligonucleotide
cagtccgctatcctcggaccgatacgcacgctcgtcgccatttcgcccgt

SEQ ID NO: 222026 - DNA, 50 bp, Artificial
  Synthetic oligonucleotide
caagacaattgcgaccgcttgtcgtggacaatcaatactaccgaacctga

SEQ ID NO: 222027 - DNA, 50 bp, Artificial
  Synthetic oligonucleotide
gcgctgatactgcgctgtccgcgaatcgtgatcgagcccacagtacccgg

SEQ ID NO: 222028 - DNA, 50 bp, Artificial
  Synthetic oligonucleotide
caggccataacagcgacatctgggccatgaccaaccccgtgggtacgggt

SEQ ID NO: 222029 - DNA, 50 bp, Artificial
  Synthetic oligonucleotide
cacaacagactcccagtggagcggtccccatgctacgtcttgccccaacg

SEQ ID NO: 222030 - DNA, 50 bp, Artificial
  Synthetic oligonucleotide
cacaccgaacgcatggttccttccaggcgcttccagtcgggcaggtttgc

SEQ ID NO: 222031 - DNA, 50 bp, Artificial
  Synthetic oligonucleotide
cacagtttcgcgggctgcctcatgtaggtcggtggcctgctgagagagat

SEQ ID NO: 222032 - DNA, 50 bp, Artificial
  Synthetic oligonucleotide
caccctctcgccgggctctacccttagttacgcccccgacaacagccggg

SEQ ID NO: 222033 - DNA, 55 bp, Artificial
  Synthetic oligonucleotide
ccgcaaacgcgattggaaatggtacgcgccgattgaaagttggatgtatgggcgt

SEQ ID NO: 222034 - DNA, 50 bp, Artificial
  Synthetic oligonucleotide
caccctgaacgctttcgcccgggttgcaccacatgttggctgccagatca

SEQ ID NO: 222035 - DNA, 50 bp, Artificial
  Synthetic oligonucleotide
cacgaaggagtggcgtttggtgtaccactccctgatgcggagcggcaata

SEQ ID NO: 222036 - DNA, 50 bp, Artificial
  Synthetic oligonucleotide
cacggacaggctttctgaacgccaggcaaatcgcgatgccccaggatggt

SEQ ID NO: 222037 - DNA, 50 bp, Artificial
  Synthetic oligonucleotide
cagctgcgagggctgcatgtctgccgagggagcgggcatggaaacgggct

SEQ ID NO: 222038 - DNA, 50 bp, Artificial
  Synthetic oligonucleotide
cactcgttgcagccgacaatgacccttctgggcgtagtatcagccgcgga

SEQ ID NO: 222039 - DNA, 50 bp, Artificial
  Synthetic oligonucleotide
cagaaccgtgcttctgccttggccgcacgtgaaacggtcatcatgagcga

SEQ ID NO: 222040 - DNA, 50 bp, Artificial
  Synthetic oligonucleotide
gccttgcaccaaaccacgggcatccttcctgtaaaacccaaggggccgga

SEQ ID NO: 222041 - DNA, 50 bp, Artificial
  Synthetic oligonucleotide
gcctgcccctacgtttcggagaaacgttctcccacatctgcggccgaacg

SEQ ID NO: 222042 - DNA, 50 bp, Artificial
  Synthetic oligonucleotide
cagagctgtcatgcctccccaagtcatggtttcggcaccctcgtagcgga

SEQ ID NO: 222043 - DNA, 50 bp, Artificial
  Synthetic oligonucleotide
cagcaaggagactcgctgcacatcggcgtgagacacgacatgaagcgcga

SEQ ID NO: 222044 - DNA, 55 bp, Artificial
  Synthetic oligonucleotide
ccgatttcggtcgaacaactttgggtcagatggcaaccataagtccttatcatga

SEQ ID NO: 222045 - DNA, 50 bp, Artificial
  Synthetic oligonucleotide
gctgaggcattccagtcgcctgtcaccgagcaggctatcctcatcgtgcc

SEQ ID NO: 222046 - DNA, 50 bp, Artificial
  Synthetic oligonucleotide
ccaaggcaatggaacggttggtcccttgccgggtgagggctattcccgta

SEQ ID NO: 222047 - DNA, 50 bp, Artificial
  Synthetic oligonucleotide
atgctcgcttcgcacttcggatagaatgccgatgcagccacgctcccaga

SEQ ID NO: 222048 - DNA, 50 bp, Artificial
  Synthetic oligonucleotide
atggcaatacgcgacgcaaagcactctgcaagcccctgcggtctactgta

SEQ ID NO: 222049 - DNA, 50 bp, Artificial
  Synthetic oligonucleotide
atggcggctgtgggcgtaggtggctatgctagcggtccgactctcaatgt

SEQ ID NO: 222050 - DNA, 50 bp, Artificial
  Synthetic oligonucleotide
atgggtcgaagtcggtatgaacatagaagtcgcccctttcgcgtaagtcc

SEQ ID NO: 222051 - DNA, 50 bp, Artificial
  Synthetic oligonucleotide
catgcctagtccccagagtgctggcatgcttcctccgccggcaaaaaggt

SEQ ID NO: 222052 - DNA, 50 bp, Artificial
  Synthetic oligonucleotide
gcgttaccttaatgtcccgatgctccatatcctcccgatacacatcacga

SEQ ID NO: 222053 - DNA, 50 bp, Artificial
  Synthetic oligonucleotide
atgtccgagcatagcgccactgcccacgaatccatcgttaccaccgccca

SEQ ID NO: 222054 - DNA, 50 bp, Artificial
  Synthetic oligonucleotide
atgttagcgcccgtgtcgtgtactgtttcgcgcttacccgtggcgggtag

SEQ ID NO: 222055 - DNA, 55 bp, Artificial
  Synthetic oligonucleotide
ccgatgcatttgaagtcgtaacccgttgtgattaaggcggctaacgacggaaaga

SEQ ID NO: 222056 - DNA, 50 bp, Artificial
  Synthetic oligonucleotide
attacggagacatccggacaagtatgccggcctgcgggaagcatcacgga

SEQ ID NO: 222057 - DNA, 50 bp, Artificial
  Synthetic oligonucleotide
attgcaacagccggctcaggagtggaagatactcgactcgcagacgggcg

SEQ ID NO: 222058 - DNA, 50 bp, Artificial
  Synthetic oligonucleotide
attgtgggctgaccgccagacgcacagccacgtcgttacgtgacagaccg

SEQ ID NO: 222059 - DNA, 50 bp, Artificial
  Synthetic oligonucleotide
atttaagcccgtacatcgccgtatattgtacggaatgttaggcatcggca

SEQ ID NO: 222060 - DNA, 50 bp, Artificial
  Synthetic oligonucleotide
catccgcccaacttcttcacggtcatgtaaccgccctctcgccccgcaaa

SEQ ID NO: 222061 - DNA, 50 bp, Artificial
  Synthetic oligonucleotide
catcaccgccatgtcaaccacctctttggcttgcatcccggccacacgat

SEQ ID NO: 222062 - DNA, 50 bp, Artificial
  Synthetic oligonucleotide
catatcctcgcacgacatgccgacactgcgccaatggtgggacgaggact

SEQ ID NO: 222063 - DNA, 50 bp, Artificial
  Synthetic oligonucleotide
caaatgcggacgtgcgggatttggcactcagagcggcacgctttcccgat

SEQ ID NO: 222064 - DNA, 50 bp, Artificial
  Synthetic oligonucleotide
catagccgcaagccttcagtccgtaggcccagccgcgatagtcggtgagt

SEQ ID NO: 222065 - DNA, 50 bp, Artificial
  Synthetic oligonucleotide
agcacacccgactgggtatccccctgttcttagccgaagaggcaccccac

SEQ ID NO: 222066 - DNA, 55 bp, Artificial
  Synthetic oligonucleotide
ccgttcttcacggccaccttggcataagggttggcagcactcacgttgagatctg

SEQ ID NO: 222067 - DNA, 50 bp, Artificial
  Synthetic oligonucleotide
agcaccagcgctcggcacggtaaggcaatccgttgggatccacacactga

SEQ ID NO: 222068 - DNA, 50 bp, Artificial
  Synthetic oligonucleotide
agcaccattggtgttagccctccgcaccatccgtgctgagccttcgcacc

SEQ ID NO: 222069 - DNA, 50 bp, Artificial
  Synthetic oligonucleotide
agcaccggtggaggcatcgattacgccgctcatcttcaccactctgccag

SEQ ID NO: 222070 - DNA, 50 bp, Artificial
  Synthetic oligonucleotide
agcataggaatcccggcacgctatgcgcccgtcacgcgtttacagtgggt

SEQ ID NO: 222071 - DNA, 50 bp, Artificial
  Synthetic oligonucleotide
agcatcccgacacagcccttacctcattgggccgtgctatgaccgatggc

SEQ ID NO: 222072 - DNA, 50 bp, Artificial
  Synthetic oligonucleotide
agccacgttctcttcgcgcgctataataggcaacatgcgggccggtttgc

SEQ ID NO: 222073 - DNA, 50 bp, Artificial
  Synthetic oligonucleotide
gtcagccattttcatcgaccaggtgtacaagtcgttgacatcagcaaagg

SEQ ID NO: 222074 - DNA, 50 bp, Artificial
  Synthetic oligonucleotide
agccatacacgggccatcaaaccctcggcagcccattttgaggcacgccc

SEQ ID NO: 222075 - DNA, 50 bp, Artificial
  Synthetic oligonucleotide
agcccgaagacgacggtccggagatacttgctctgccctgactcgggaag

SEQ ID NO: 222076 - DNA, 50 bp, Artificial
  Synthetic oligonucleotide
agcccgtcatctgggttacgagcccaagcgcccctatatcgagatgccta

SEQ ID NO: 222077 - DNA, 52 bp, Artificial
  Synthetic oligonucleotide
gatgcgtgtaaacttatagggaaagccaaacccacggtttacaccttagtac

SEQ ID NO: 222078 - DNA, 50 bp, Artificial
  Synthetic oligonucleotide
agccggacggcaaccacgttgggtcacatcggacttcctcacgttcgtag

SEQ ID NO: 222079 - DNA, 50 bp, Artificial
  Synthetic oligonucleotide
agccgtgcggtaagtcttttccggatagaatgcccgtctgtggcccgcag

SEQ ID NO: 222080 - DNA, 50 bp, Artificial
  Synthetic oligonucleotide
agccttcgcgctgtgccccgttgttttgcgtgatggtgaggactgcctct

SEQ ID NO: 222081 - DNA, 50 bp, Artificial
  Synthetic oligonucleotide
agcgccctacagcaatgcacgcaacgaatataacggaggcgcggcacatg

SEQ ID NO: 222082 - DNA, 50 bp, Artificial
  Synthetic oligonucleotide
agcgccgcatgccccgcggtaatccttgccattcacatgggcagtcacat

SEQ ID NO: 222083 - DNA, 50 bp, Artificial
  Synthetic oligonucleotide
agcgctgactgtcgttgttcgactcaccgcaccacatcgcaacgagggct

SEQ ID NO: 222084 - DNA, 50 bp, Artificial
  Synthetic oligonucleotide
agcgtcagccaacgcagtcctatgcggttgccattgctctgtgcgtgtgc

SEQ ID NO: 222085 - DNA, 50 bp, Artificial
  Synthetic oligonucleotide
agcgtcccaagcacggaagcgctgcaaactgtctgcgccaaagcgagcca

SEQ ID NO: 222086 - DNA, 50 bp, Artificial
  Synthetic oligonucleotide
actccggcgagttgcagttatggcacacgccatccgtatggcaaggcgta

SEQ ID NO: 222087 - DNA, 50 bp, Artificial
  Synthetic oligonucleotide
ccgtccgtccggtcctgtaccaactgcgggcggtacacgtgtttccaagg

SEQ ID NO: 222088 - DNA, 55 bp, Artificial
  Synthetic oligonucleotide
ccgataatactgtctggagctatagctttcggatcgttcacacgtctacttacgg

SEQ ID NO: 222089 - DNA, 50 bp, Artificial
  Synthetic oligonucleotide
actcggctttcgctgcaggccgtagcgccctacgatgggataggctatga

SEQ ID NO: 222090 - DNA, 50 bp, Artificial
  Synthetic oligonucleotide
gttcgcgagtacgagcgcccttactaccgacgccaccacgagcctgttca

SEQ ID NO: 222091 - DNA, 50 bp, Artificial
  Synthetic oligonucleotide
actctgggcatagcccgtagctgtggcaagggagatggtctccacaccga

SEQ ID NO: 222092 - DNA, 50 bp, Artificial
  Synthetic oligonucleotide
actgcccgacaaggcgagataaccgcactcgttggtccctcaggtggtgg

SEQ ID NO: 222093 - DNA, 50 bp, Artificial
  Synthetic oligonucleotide
actgccgagtcgcccatagctactgatgcgccgtgttgtgtcttgccgta

SEQ ID NO: 222094 - DNA, 50 bp, Artificial
  Synthetic oligonucleotide
actgtggccctcgcagcatttcctgcgcagcgtagacgtggcataccatt

SEQ ID NO: 222095 - DNA, 50 bp, Artificial
  Synthetic oligonucleotide
ccggccaagcatagtccggcggtccatacctgcccgaatgcctttccgca

SEQ ID NO: 222096 - DNA, 50 bp, Artificial
  Synthetic oligonucleotide
agaatcaatgaccggagcctgagaggtcggagagtcccctccccggcctt

SEQ ID NO: 222097 - DNA, 50 bp, Artificial
  Synthetic oligonucleotide
agacaacttgggctatcaccaagggatggacagtgcggacatgcgcgggc

SEQ ID NO: 222098 - DNA, 50 bp, Artificial
  Synthetic oligonucleotide
gtgcctggggtgaggctgagcgatcctgccataaccagcggctctggagt

SEQ ID NO: 222099 - DNA, 55 bp, Artificial
  Synthetic oligonucleotide
gatgtgcgcacttaccgtgattctgaattcgctacgctcccgatgggttattacc

SEQ ID NO: 222100 - DNA, 50 bp, Artificial
  Synthetic oligonucleotide
gtgcagtagccgcctgcccccaaccgctcacctccgtagcggctccctat

SEQ ID NO: 222101 - DNA, 50 bp, Artificial
  Synthetic oligonucleotide
agacagcatttggccggctggaaaggcgtgagtgccataagtgagccggg

SEQ ID NO: 222102 - DNA, 50 bp, Artificial
  Synthetic oligonucleotide
agacttgctgacgcacacttcgggactaccgccttacgcccccgtaaaga

SEQ ID NO: 222103 - DNA, 50 bp, Artificial
  Synthetic oligonucleotide
agagacggcgttggagcaccagaaccacgctgtgcaagtccacattggct

SEQ ID NO: 222104 - DNA, 50 bp, Artificial
  Synthetic oligonucleotide
ccgcacaccacttgcagcccgattccgcaccgccttgcggacatttacga

SEQ ID NO: 222105 - DNA, 50 bp, Artificial
  Synthetic oligonucleotide
agagcgacaagcccaactgtcggagcatgagtgatgcgctgcgtgtggtg

SEQ ID NO: 222106 - DNA, 50 bp, Artificial
  Synthetic oligonucleotide
ccgatccaaagcacggattgccgcacgtcctgattcttccgtgggcgttc

SEQ ID NO: 222107 - DNA, 50 bp, Artificial
  Synthetic oligonucleotide
agcaaggaaggcattctgcacgtaacgctcgccttctgcaaccctggcga

SEQ ID NO: 222108 - DNA, 50 bp, Artificial
  Synthetic oligonucleotide
agggcgaagcgcacaatgcacccacgcagagtgccgttttcatgtgcacc

SEQ ID NO: 222109 - DNA, 50 bp, Artificial
  Synthetic oligonucleotide
aggggcacggcgctccttgcacccccgccagccgagaggagtgggaacag

SEQ ID NO: 222110 - DNA, 55 bp, Artificial
  Synthetic oligonucleotide
gattgacctatcgtatatggagcaagggacgattcaatgcttatacgaccggtgg

SEQ ID NO: 222111 - DNA, 50 bp, Artificial
  Synthetic oligonucleotide
gggatgataatgtcctcctttggcttgtcccggcttacccatggtaagat

SEQ ID NO: 222112 - DNA, 50 bp, Artificial
  Synthetic oligonucleotide
cccgtgccgtcgaatgccgccaactcggaatatgctactgtgagcggctt

SEQ ID NO: 222113 - DNA, 50 bp, Artificial
  Synthetic oligonucleotide
aggggcacggcggatggttactttcgtgccttcgagcaacttctccgacc

SEQ ID NO: 222114 - DNA, 50 bp, Artificial
  Synthetic oligonucleotide
agggggtagcctcctccctcgcaccattacccagggtaggcagcgttgca

SEQ ID NO: 222115 - DNA, 50 bp, Artificial
  Synthetic oligonucleotide
aggggtggcaggcaaccacgagagcgattgcgacgcactcacattcactt

SEQ ID NO: 222116 - DNA, 50 bp, Artificial
  Synthetic oligonucleotide
cccggaacgtcgctttacgcgtgccgttgcaggtataggaggcagcaaca

SEQ ID NO: 222117 - DNA, 50 bp, Artificial
  Synthetic oligonucleotide
ggctggcagcctgaatccatttgccaaccgtccatggctggtcaccacga

SEQ ID NO: 222118 - DNA, 50 bp, Artificial
  Synthetic oligonucleotide
ggctgcatcgtgaattacggccgtttgtttggcaatctgccgtgcggggc

SEQ ID NO: 222119 - DNA, 50 bp, Artificial
  Synthetic oligonucleotide
cccgccctaagcgcggctactacacggcaacctacaaactcatcacccgc

SEQ ID NO: 222120 - DNA, 50 bp, Artificial
  Synthetic oligonucleotide
ggctccacaacccaagcctattgccgcagtaacccacactccggctgccg

SEQ ID NO: 222121 - DNA, 55 bp, Artificial
  Synthetic oligonucleotide
cataatgtgcagaccgtagcctcgaaccttaccactaccacacgacaactgaata

SEQ ID NO: 222122 - DNA, 50 bp, Artificial
  Synthetic oligonucleotide
agggtgttcttccactgcggaagcgtgcgaaatgtgtcgacaaagcgccc

SEQ ID NO: 222123 - DNA, 50 bp, Artificial
  Synthetic oligonucleotide
aggtgctcgggcatagcgacgggcgggagcgagaatttaaggtgcacacg

SEQ ID NO: 222124 - DNA, 50 bp, Artificial
  Synthetic oligonucleotide
aggtggcggcttatgccgactgggcttactttccgtgggtaaggtaccga

SEQ ID NO: 222125 - DNA, 50 bp, Artificial
  Synthetic oligonucleotide
aggttatccgcctgttccgtgccatggctaagcagcactacacgcctgct

SEQ ID NO: 222126 - DNA, 50 bp, Artificial
  Synthetic oligonucleotide
aggttcatgcgaccaccgtcacgcacaccctgtgccaaacccacgagttt

SEQ ID NO: 222127 - DNA, 50 bp, Artificial
  Synthetic oligonucleotide
ggcggtggctgacgctatcatcgcagagactcctgcgctccttgcagcga

SEQ ID NO: 222128 - DNA, 50 bp, Artificial
  Synthetic oligonucleotide
aggttgcggggtgtgcggtttacgcgtttcttccgaccgtcgttgtgggc

SEQ ID NO: 222129 - DNA, 50 bp, Artificial
  Synthetic oligonucleotide
agcgtgcttcgtagccttggggcaggttggcagcccaatattgtgcaccg

SEQ ID NO: 222130 - DNA, 50 bp, Artificial
  Synthetic oligonucleotide
agcgtggtatggacaaggagggctttagcggctgcgacggacgaaccacc

SEQ ID NO: 222131 - DNA, 50 bp, Artificial
  Synthetic oligonucleotide
agcgtttacggtaattgcttgcagcactcacgccccacgagccacgtgtg

SEQ ID NO: 222132 - DNA, 60 bp, Artificial
  Synthetic oligonucleotide
tactcctgcaccaatgcaggccccgcctgacactggattagaggaggttacataagggta

SEQ ID NO: 222133 - DNA, 60 bp, Artificial
  Synthetic oligonucleotide
ctgcagcgcctggtgaggatccattcgtcgatctaggcagcagtgttaaagtcggccaaa

SEQ ID NO: 222134 - DNA, 55 bp, Artificial
  Synthetic oligonucleotide
tcccttttaggaatgtatgagagtaatggaattataactacgcaatgtgaggcag

SEQ ID NO: 222135 - DNA, 55 bp, Artificial
  Synthetic oligonucleotide
tcgaagcattacgtcacgcatgtatctcgcatgatgcgtctttagatcttcactg

SEQ ID NO: 222136 - DNA, 55 bp, Artificial
  Synthetic oligonucleotide
tcgacacgagtttccctcattgaatgagtaagcaacccagtctgctcgaagggcc

SEQ ID NO: 222137 - DNA, 55 bp, Artificial
  Synthetic oligonucleotide
tcgagaggctattaggacagcaacggctaaattgagggcaggatgggcaacggga

SEQ ID NO: 222138 - DNA, 55 bp, Artificial
  Synthetic oligonucleotide
tcgcttttatcgtcaggaaacaatggctatgtccaaatgggtcgaattaccggct

SEQ ID NO: 222139 - DNA, 55 bp, Artificial
  Synthetic oligonucleotide
tgcaaatagtcaaaagtgaccccatcaggattgacatatccgcagcgggcgcctc

SEQ ID NO: 222140 - DNA, 55 bp, Artificial
  Synthetic oligonucleotide
tgctcgcaaaccgatggatactcctctgcaattctttgcagggaacagtgaaagt

SEQ ID NO: 222141 - DNA, 55 bp, Artificial
  Synthetic oligonucleotide
tggcgtagcgatgcctaaaggaatacgtcgtgagctgttcacctgagttcaacgc

SEQ ID NO: 222142 - DNA, 55 bp, Artificial
  Synthetic oligonucleotide
tggtgcataccagcctgtaacttggtatccccatgaaccatcgaaaggatgttca

SEQ ID NO: 222143 - DNA, 55 bp, Artificial
  Synthetic oligonucleotide
tgtactgcgctgtaatgctccaactacacctgcaattatttcgccaaaggacgat

SEQ ID NO: 222144 - DNA, 60 bp, Artificial
  Synthetic oligonucleotide
aagctatagcggcttctgaggggtcaggtttggcactccatggggctgatgtataagcgc

SEQ ID NO: 222145 - DNA, 55 bp, Artificial
  Synthetic oligonucleotide
tgttctaatggctcctaataagttatgtgtcccatcatcaagtaaggcagggcct

SEQ ID NO: 222146 - DNA, 55 bp, Artificial
  Synthetic oligonucleotide
ttaccatttcggcgagtttgttctctagtacgcatggagctccgaagctagtgcc

SEQ ID NO: 222147 - DNA, 55 bp, Artificial
  Synthetic oligonucleotide
ttgaactgcaaacagctgtcggtaaacagtcgaacgagtgaactagagattgggc

SEQ ID NO: 222148 - DNA, 55 bp, Artificial
  Synthetic oligonucleotide
ttgtctctcttagatagccttttgtgtttaagccgcaagcatggaggacttaacc

SEQ ID NO: 222149 - DNA, 55 bp, Artificial
  Synthetic oligonucleotide
ggccagtagctggagtatatagtgcgatagttcttgcaactggaccgacagtagt

SEQ ID NO: 222150 - DNA, 55 bp, Artificial
  Synthetic oligonucleotide
ggcctatgattagtgcatctgaacgaacaattggggttgcgcaagcaagaggtgc

SEQ ID NO: 222151 - DNA, 55 bp, Artificial
  Synthetic oligonucleotide
ggcgagagtcccgtagctcatcttgaagggaaagatcttgcatcaagagatcaag

SEQ ID NO: 222152 - DNA, 55 bp, Artificial
  Synthetic oligonucleotide
ggcgctaatggctcccatatcaacgcagccaatgctcactaagcccatggataca

SEQ ID NO: 222153 - DNA, 55 bp, Artificial
  Synthetic oligonucleotide
ggcgggcttataaggagaagtgaccgatcacgggcttataaggagaggagtaatg

SEQ ID NO: 222154 - DNA, 55 bp, Artificial
  Synthetic oligonucleotide
ggcgtagggtaatccatttagttgatctcccatcaatactacatctgcattcgcc

SEQ ID NO: 222155 - DNA, 55 bp, Artificial
  Synthetic oligonucleotide
ccagcgcggttggtaacccttgaattaccagcccaccacccgtaggtgacatctg

SEQ ID NO: 222156 - DNA, 55 bp, Artificial
  Synthetic oligonucleotide
ggcgtccatggactcctctcttctttcggccccaatagccagcatcggggtaccg

SEQ ID NO: 222157 - DNA, 55 bp, Artificial
  Synthetic oligonucleotide
ggcgtgcctcaacctcctcacgttgttgactctggtgatagaggcgaagctccct

SEQ ID NO: 222158 - DNA, 55 bp, Artificial
  Synthetic oligonucleotide
ggctcaatggaagttgtgctaacttcttcgacatacccgtcattcctataaacta

SEQ ID NO: 222159 - DNA, 55 bp, Artificial
  Synthetic oligonucleotide
ggctccactcgcgtcaccattactcgcctgttgggagacctgcgcaattcaggtc

SEQ ID NO: 222160 - DNA, 55 bp, Artificial
  Synthetic oligonucleotide
ggctctgccagctgttggcttatttccgccttaaagctttggatagtgttaagca

SEQ ID NO: 222161 - DNA, 54 bp, Artificial
  Synthetic oligonucleotide
gggaaagagtagttaatgtcgtcaagctttagtacgtcagcgttacctgaaccc

SEQ ID NO: 222162 - DNA, 54 bp, Artificial
  Synthetic oligonucleotide
gggccaaacgtccttgtcggaaaacattatgacaaatcagccttactacgaaac

SEQ ID NO: 222163 - DNA, 55 bp, Artificial
  Synthetic oligonucleotide
ggggaggatgtttaagacccgcagaggtacaaagatcaatccgacttgacgtcat

SEQ ID NO: 222164 - DNA, 55 bp, Artificial
  Synthetic oligonucleotide
ggggccaggacaagactggagcgcatgggacctcactatgaagacatcaatgcgg

SEQ ID NO: 222165 - DNA, 55 bp, Artificial
  Synthetic oligonucleotide
ggggcttcacttggtagtttctcggatgttaaaagtgccaagcctagcctactta

SEQ ID NO: 222166 - DNA, 59 bp, Artificial
  Synthetic oligonucleotide
aacccctctggaagtacatgcagctccaggaccaattcccaccataaggcctgctacac

SEQ ID NO: 222167 - DNA, 55 bp, Artificial
  Synthetic oligonucleotide
ggggtggtcgttactcgccaaccaaggggctatcgctttgagcacagcctctagg

SEQ ID NO: 222168 - DNA, 55 bp, Artificial
  Synthetic oligonucleotide
gggtcgtaacctaccgcgatccttgcaacctccacttatagccattggttcggag

SEQ ID NO: 222169 - DNA, 55 bp, Artificial
  Synthetic oligonucleotide
ggtacgctgtaaccaaatctacatgctaggtcaatagccctttcatctgctgata

SEQ ID NO: 222170 - DNA, 55 bp, Artificial
  Synthetic oligonucleotide
ggtactccaagcgttccataccgtcttccaggaagtcaattcgaaagatgggttg

SEQ ID NO: 222171 - DNA, 55 bp, Artificial
  Synthetic oligonucleotide
ggtcagctctaaacgaaaccctcccaatcaaccgaagatcagtcaggacgagaca

SEQ ID NO: 222172 - DNA, 55 bp, Artificial
  Synthetic oligonucleotide
ggtcgaaaatctatggccacgggttgggtcatatttctccactgctctggtaagt

SEQ ID NO: 222173 - DNA, 55 bp, Artificial
  Synthetic oligonucleotide
ggttcattaggaacaagagtcttaactagttgttgaaccattggtatacgtgtgc

SEQ ID NO: 222174 - DNA, 55 bp, Artificial
  Synthetic oligonucleotide
ggttctgggctcaattcatagcactctttactgggatcaaaacacttcgatgcct

SEQ ID NO: 222175 - DNA, 54 bp, Artificial
  Synthetic oligonucleotide
ggttgaagcgcgaccgctttgtatttattggttggtccggactactcctacttc

SEQ ID NO: 222176 - DNA, 55 bp, Artificial
  Synthetic oligonucleotide
ggttgttactaactaggcaaccattaaggctagcagttgccatagctggaatcag

SEQ ID NO: 222177 - DNA, 59 bp, Artificial
  Synthetic oligonucleotide
cctcagggtgagcatggccacaaatcgcaggcccccaactgcctacatagtcgatgtat

SEQ ID NO: 222178 - DNA, 55 bp, Artificial
  Synthetic oligonucleotide
ggtttgtagtcgtcttggcattaggtttaacaggcctaggtgcagcattaaccgg

SEQ ID NO: 222179 - DNA, 55 bp, Artificial
  Synthetic oligonucleotide
gtacaatcaccagaagtcccaataggagttgcctggaggagtaagacttatagta

SEQ ID NO: 222180 - DNA, 55 bp, Artificial
  Synthetic oligonucleotide
gtatagcactcgttgagatcgtaagtaaaccagatattaggacaggtagagaggc

SEQ ID NO: 222181 - DNA, 55 bp, Artificial
  Synthetic oligonucleotide
gtccaataggttgtgctactacaggactcaagtcagatgcacggaaaactgcata

SEQ ID NO: 222182 - DNA, 55 bp, Artificial
  Synthetic oligonucleotide
gtccgatcagaccactaaggctgccaagcagtaccagggaacccacaatgccgcc

SEQ ID NO: 222183 - DNA, 55 bp, Artificial
  Synthetic oligonucleotide
gtcgctagatctaccccaagtcggtcgtattgatactttggcccaagaattggcc

SEQ ID NO: 222184 - DNA, 55 bp, Artificial
  Synthetic oligonucleotide
ccacatataagtaaggtatgttcaaaggtaccaggagcttcaagagacaatcttc

SEQ ID NO: 222185 - DNA, 55 bp, Artificial
  Synthetic oligonucleotide
agaaattactcgagccatacggcatccttgaaatagcgaggactggtaaggtagc

SEQ ID NO: 222186 - DNA, 55 bp, Artificial
  Synthetic oligonucleotide
ccacttctggaactgccgtaagtaacttattgccagcagcagttgaggcagaccg

SEQ ID NO: 222187 - DNA, 55 bp, Artificial
  Synthetic oligonucleotide
ccatatatataacgattccatcactggatttcgctaaagaccgccaatttacagc

SEQ ID NO: 222188 - DNA, 59 bp, Artificial
  Synthetic oligonucleotide
ggatatccagcaagtgcatttgctccaactagccctgccacgattgccgtagcactgct

SEQ ID NO: 222189 - DNA, 55 bp, Artificial
  Synthetic oligonucleotide
ccattctctctcgtcaagagcgcgccagcacccttctggtaatgcgtctagggca

SEQ ID NO: 222190 - DNA, 55 bp, Artificial
  Synthetic oligonucleotide
ccattgagggaggagttgacactcacaaatagttcaggtgcacttgtccctagag

SEQ ID NO: 222191 - DNA, 55 bp, Artificial
  Synthetic oligonucleotide
ccatttctttcatgccagaggtgtatcaaatgagccatagcccttcgacctctag

SEQ ID NO: 222192 - DNA, 55 bp, Artificial
  Synthetic oligonucleotide
cccagaggtatactgcttgccatactccaagatctagctttgattcgttaatgct

SEQ ID NO: 222193 - DNA, 55 bp, Artificial
  Synthetic oligonucleotide
cccctcgtgagttgttaagcctcacggcagcggctcttagcaacaatcaattccc

SEQ ID NO: 222194 - DNA, 55 bp, Artificial
  Synthetic oligonucleotide
cccgcctaaaacacttagtgctcagggatatgaaatacaatttgcagttaatcat

SEQ ID NO: 222195 - DNA, 55 bp, Artificial
  Synthetic oligonucleotide
cccgtgagacctgtgcagcgggcccctcagagttttgacctttgtaaagcactcc

SEQ ID NO: 222196 - DNA, 55 bp, Artificial
  Synthetic oligonucleotide
ccgaaagcgcagtatccatagtccacttgcctccctaatccaaccgtcacgcttc

SEQ ID NO: 222197 - DNA, 55 bp, Artificial
  Synthetic oligonucleotide
ccgacgttaaagttcagtaaatttcctcctctaggatctgcaactatcaacaaac

SEQ ID NO: 222198 - DNA, 55 bp, Artificial
  Synthetic oligonucleotide
ccgagagcattaatgtctctatgaagactgctaactatcccaagagttactgttt

SEQ ID NO: 222199 - DNA, 59 bp, Artificial
  Synthetic oligonucleotide
gaagcgcccaagtccccgtcctttggcttgagtcgaactgcggtctacataggcagatc

SEQ ID NO: 222200 - DNA, 55 bp, Artificial
  Synthetic oligonucleotide
ccgatggatttagtgtaaaggagtattaacttttgagcgaaggagactccacttc

SEQ ID NO: 222201 - DNA, 55 bp, Artificial
  Synthetic oligonucleotide
cctaaatgcaaacctatggaaatccagatgtcacctacggatggtgggctggtaa

SEQ ID NO: 222202 - DNA, 53 bp, Artificial
  Synthetic oligonucleotide
cctaactcggttcctagcgaacgtttatggctaaggtcagaattaatgggaac

SEQ ID NO: 222203 - DNA, 55 bp, Artificial
  Synthetic oligonucleotide
cctatttgcagtacagttcctacattgctaacacttacagattggtcataatcag

SEQ ID NO: 222204 - DNA, 55 bp, Artificial
  Synthetic oligonucleotide
cctcaaggagatcatttagttaagggctgtacttactggaggaaagatagtcgaa

SEQ ID NO: 222205 - DNA, 55 bp, Artificial
  Synthetic oligonucleotide
cctctaagcaacaaagagatcttacattagctgttaagagagccagaattgtagc

SEQ ID NO: 222206 - DNA, 55 bp, Artificial
  Synthetic oligonucleotide
cctgagattacctagcttctactctttaaggtcgtgccaggtatcggatgccgtt

SEQ ID NO: 222207 - DNA, 55 bp, Artificial
  Synthetic oligonucleotide
cctgaggcaacaatatctagctcccactcatctacaggaacgtcacaagctccaa

SEQ ID NO: 222208 - DNA, 55 bp, Artificial
  Synthetic oligonucleotide
cctgattagttgtgagagttaatgtcttagatgcagtagcagttgttggcacccc

SEQ ID NO: 222209 - DNA, 55 bp, Artificial
  Synthetic oligonucleotide
cctgccatacaggcactaccgctacttgttgccacgccaagtcgtgaaagttctc

SEQ ID NO: 222210 - DNA, 59 bp, Artificial
  Synthetic oligonucleotide
tccgcaagcaagggttgtatctgtaggaactgtgggcaatcctgttagggcggcactta

SEQ ID NO: 222211 - DNA, 55 bp, Artificial
  Synthetic oligonucleotide
actaagggagatagcagttgatagttatagtaccgagtggtatttgccaatcccc

SEQ ID NO: 222212 - DNA, 55 bp, Artificial
  Synthetic oligonucleotide
agttgcatttaaatgagcaatcgcattagcagttgctataaatgtgagtggcggc

SEQ ID NO: 222213 - DNA, 55 bp, Artificial
  Synthetic oligonucleotide
atacctggcaatgtaataatcgtctgactcttccaatgagtggtactggaagtgc

SEQ ID NO: 222214 - DNA, 55 bp, Artificial
  Synthetic oligonucleotide
agtcgtaccaggcgcaatcatgatcaatttgttaggcttgcgaggcaaagcaaat

SEQ ID NO: 222215 - DNA, 55 bp, Artificial
  Synthetic oligonucleotide
atatcccatccgttccaactacttgtgatgcctagtcttgccatgaaaggcatga

SEQ ID NO: 222216 - DNA, 55 bp, Artificial
  Synthetic oligonucleotide
atattcataacgatgtaatgcgtgcattaggaaggcctgcagatatgttcagtga

SEQ ID NO: 222217 - DNA, 55 bp, Artificial
  Synthetic oligonucleotide
atattttgaacagatccaacaatgattccccgataagtaactggagacatcttgg

SEQ ID NO: 222218 - DNA, 55 bp, Artificial
  Synthetic oligonucleotide
atctcgtgagcgagtgcgatcagcactccgcaacagtggctttcgcgggccactc

SEQ ID NO: 222219 - DNA, 55 bp, Artificial
  Synthetic oligonucleotide
agctttcgatagctcatcggccaatgctggagctcgcctcaaaagagcaccaacc

SEQ ID NO: 222220 - DNA, 55 bp, Artificial
  Synthetic oligonucleotide
caactgtaatacccctcgaatctgcttctagagaggcattcacataattgatcct

SEQ ID NO: 222221 - DNA, 59 bp, Artificial
  Synthetic oligonucleotide
tccactcgcagacggacctgttattcaagtagcggcctctcgcgccttaaagtcaggta

SEQ ID NO: 222222 - DNA, 55 bp, Artificial
  Synthetic oligonucleotide
caagtggaactcttgttgtagtaggaatcattgcaattatcgttcagggaggact

SEQ ID NO: 222223 - DNA, 55 bp, Artificial
  Synthetic oligonucleotide
caatcgaatacgaggcccatgatcactgctacttcggaaataacttcttactcga

SEQ ID NO: 222224 - DNA, 55 bp, Artificial
  Synthetic oligonucleotide
caatgccaagctaacaagagagcttccgattgacaaatagcaaattattggtgcc

SEQ ID NO: 222225 - DNA, 54 bp, Artificial
  Synthetic oligonucleotide
agcggtccggtacgtgcgattcgtttggggaaaccaacgcctggatcaactcga

SEQ ID NO: 222226 - DNA, 55 bp, Artificial
  Synthetic oligonucleotide
cactgctaatttcaaggcctcttggcagcggtctctttcacgagtcaaagatccg

SEQ ID NO: 222227 - DNA, 55 bp, Artificial
  Synthetic oligonucleotide
cagcaagctctttcccgtcattaacgatcagtcctactcggggcaccgatcatac

SEQ ID NO: 222228 - DNA, 55 bp, Artificial
  Synthetic oligonucleotide
cagccaatgatccccacactccattcgttgactaactgtaccctccagccaggct

SEQ ID NO: 222229 - DNA, 55 bp, Artificial
  Synthetic oligonucleotide
agccataacgaagtcttagaacatccctctctctgggacttagtgtagcgagaac

SEQ ID NO: 222230 - DNA, 55 bp, Artificial
  Synthetic oligonucleotide
cagctatagaacggcgaaagcaaccctggcaagtgcaaacagttgccggatctga

SEQ ID NO: 222231 - DNA, 55 bp, Artificial
  Synthetic oligonucleotide
agatcccatggcaagatactgttaacgtgagtattcacggcagagattcgaatag

SEQ ID NO: 222232 - DNA, 58 bp, Artificial
  Synthetic oligonucleotide
ttagcagatttcgcggcagatggtggagtatctggctgcgcactcccaaaacccactc

SEQ ID NO: 222233 - DNA, 55 bp, Artificial
  Synthetic oligonucleotide
caggtagatcatagaaaatcgtcctaactgcccaagcatgtcttaggtcataagg

SEQ ID NO: 222234 - DNA, 54 bp, Artificial
  Synthetic oligonucleotide
cagttaagctgtcacctttaccaactgaggtcaagtaacctccgtcgacgttac

SEQ ID NO: 222235 - DNA, 55 bp, Artificial
  Synthetic oligonucleotide
cataaaagggcggtaccactcctagagacagcactgtggccaccactaggcctcc

SEQ ID NO: 222236 - DNA, 55 bp, Artificial
  Synthetic oligonucleotide
catccaatcttagaggtccaattggtgtcttaataccgacccctcctccgagaga

SEQ ID NO: 222237 - DNA, 55 bp, Artificial
  Synthetic oligonucleotide
catcgcagtatctacttagcactcttgctgtatctctgattggctctcccctccc

SEQ ID NO: 222238 - DNA, 55 bp, Artificial
  Synthetic oligonucleotide
ccaagaagcaccagactttagtgctacagcagtatatgatcaagagtttaaggag

SEQ ID NO: 222239 - DNA, 55 bp, Artificial
  Synthetic oligonucleotide
ccaataattggctgagggattaacccagcgagcaccgtaggtaaagctccctcca

SEQ ID NO: 222240 - DNA, 55 bp, Artificial
  Synthetic oligonucleotide
acaagatctactagtggtcaagccttaattgttgctgacgcagatgatactacct

SEQ ID NO: 222241 - DNA, 54 bp, Artificial
  Synthetic oligonucleotide
ctagtagaaccttgaccaaaactccaccagcctaaaccactccaataaactcta

SEQ ID NO: 222242 - DNA, 55 bp, Artificial
  Synthetic oligonucleotide
ctccgcaccgagcactgccattactctacgcctttcaagtgacattgactctggc

SEQ ID NO: 222243 - DNA, 53 bp, Artificial
  Synthetic oligonucleotide
agggggtgcgctgaactcccctacgattccgtaacaagtttgaacggctactg

SEQ ID NO: 222244 - DNA, 53 bp, Artificial
  Synthetic oligonucleotide
cgtagcccgataaatttaactatcatgcaagtaaacgaaaatcctaacaaagt

SEQ ID NO: 222245 - DNA, 55 bp, Artificial
  Synthetic oligonucleotide
ctagggctacaagtgatttacatgaacggatgctcactagagttggcgctgatag

SEQ ID NO: 222246 - DNA, 55 bp, Artificial
  Synthetic oligonucleotide
cgctgattatatgagaggttcaatgagactttcggcactaagcgaactaggagtg

SEQ ID NO: 222247 - DNA, 55 bp, Artificial
  Synthetic oligonucleotide
cgcttccctacgatcttaagtcgatgtcaggattatggcgttaaccctttaaatg

SEQ ID NO: 222248 - DNA, 55 bp, Artificial
  Synthetic oligonucleotide
aatttgcgaactccattgaaaatataccccgaccttgagtcattgatcggagttg

SEQ ID NO: 222249 - DNA, 55 bp, Artificial
  Synthetic oligonucleotide
cgctttaaggcttgaatttcggaacattgactttcagtaaggtcactgtcgatat

SEQ ID NO: 222250 - DNA, 55 bp, Artificial
  Synthetic oligonucleotide
aagctggcgacatggcgtcatgcttgatgggaaaacaaccttgcccgctgaacta

SEQ ID NO: 222251 - DNA, 55 bp, Artificial
  Synthetic oligonucleotide
aacgctcatagtgtcgtgcttgatctgtgggcagacctttggaatcgagcggcaa

SEQ ID NO: 222252 - DNA, 55 bp, Artificial
  Synthetic oligonucleotide
ctaatagaatttggattgcagttgatggtatgggtggggattatgctcctgggcc

SEQ ID NO: 222253 - DNA, 55 bp, Artificial
  Synthetic oligonucleotide
cggtcaaactctctgcgatattatgagcagatcttcttttgtcaataatcgctaa

SEQ ID NO: 222254 - DNA, 55 bp, Artificial
  Synthetic oligonucleotide
cggtgcaacagttcagaacactctttatgaagactcaagtgtttactctgaaggt

SEQ ID NO: 222255 - DNA, 57 bp, Artificial
  Synthetic oligonucleotide
gcgttagattccaggggaaggccatgtgggtagaggggcagggaggtattcagcgat

SEQ ID NO: 222256 - DNA, 55 bp, Artificial
  Synthetic oligonucleotide
ctcgtaatacgccaataccagttagacaatctgatgtctttagtacttccgaagc

SEQ ID NO: 222257 - DNA, 55 bp, Artificial
  Synthetic oligonucleotide
ctcccatattcggaagtgcatcttttacagttgctacaattacatccccaacatg

SEQ ID NO: 222258 - DNA, 55 bp, Artificial
  Synthetic oligonucleotide
cgtcggcctattcaaaactctagccgtgcacttgtattagcgcgacgtgaggctc

SEQ ID NO: 222259 - DNA, 55 bp, Artificial
  Synthetic oligonucleotide
ctcgcgagccatttgaattaaagaatcgagggttaaagagtgtttagtttagaga

SEQ ID NO: 222260 - DNA, 55 bp, Artificial
  Synthetic oligonucleotide
cgttcaagagatgtagccggcgaattccatgtaaccggactctcaagggctaacg

SEQ ID NO: 222261 - DNA, 55 bp, Artificial
  Synthetic oligonucleotide
ctccaacccacagatcaagatgggacggcttaatactcacaatggcaatgggtag

SEQ ID NO: 222262 - DNA, 55 bp, Artificial
  Synthetic oligonucleotide
ctcgagcatgatgccagcccatattccctatacctatgactccaacctttacggg

SEQ ID NO: 222263 - DNA, 55 bp, Artificial
  Synthetic oligonucleotide
ctccaagttgtatcgctccatgagagggcctgattgcgcgtcagcttgagtaacc

SEQ ID NO: 222264 - DNA, 55 bp, Artificial
  Synthetic oligonucleotide
cctttgccgatccgtcaaccattaacggcccagcattggacgtacgttaaatcgc

SEQ ID NO: 222265 - DNA, 54 bp, Artificial
  Synthetic oligonucleotide
acagaacaacccgacttttatgcagaaccttggaaattaagacggagtcttgat

SEQ ID NO: 222266 - DNA, 55 bp, Artificial
  Synthetic oligonucleotide
cagaagaaccaatcgttaaatttcttgtggacatcttatggaacttaaagtgtac

SEQ ID NO: 222267 - DNA, 55 bp, Artificial
  Synthetic oligonucleotide
cgaaagagtcggcgattctccagtagtaccacatagcacaatgccatcagaaccg

SEQ ID NO: 222268 - DNA, 55 bp, Artificial
  Synthetic oligonucleotide
cgaactaatccgcacattagaagagcgttgagttaacctcatagcacccaagggg

SEQ ID NO: 222269 - DNA, 55 bp, Artificial
  Synthetic oligonucleotide
ctatgagaagactaagtgttaatgctgtgactaatagtccccaagcggttgaggt

SEQ ID NO: 222270 - DNA, 55 bp, Artificial
  Synthetic oligonucleotide
cgacatgcgttaagcccattctgtaaacagcttcacctagacgatcaggttctga

SEQ ID NO: 222271 - DNA, 55 bp, Artificial
  Synthetic oligonucleotide
ctcgtgcgcacttcctaaatggtctgtcaggtgttaatcctaattcgtacatcgc

SEQ ID NO: 222272 - DNA, 55 bp, Artificial
  Synthetic oligonucleotide
cgaggaacttcctcataatttgcgaactccattgaaaatatgccccgaccttgag

SEQ ID NO: 222273 - DNA, 55 bp, Artificial
  Synthetic oligonucleotide
cgattcatcatgtcactggtacgtagcttctcccgataatacttttggggagggg

SEQ ID NO: 222274 - DNA, 55 bp, Artificial
  Synthetic oligonucleotide
aatcgtgagaatgagaagagtgatcgtgagaatgagaagagtgatcgtgagaatg

SEQ ID NO: 222275 - DNA, 55 bp, Artificial
  Synthetic oligonucleotide
ctcgtgcagcggttgatcttcatctctgtagcttgcatgagcgaccaattgtcga

SEQ ID NO: 222276 - DNA, 55 bp, Artificial
  Synthetic oligonucleotide
cgcacccgctcaccagcgcagctccattttcgatctcgttcaggtcttccgagcg

SEQ ID NO: 222277 - DNA, 53 bp, Artificial
  Synthetic oligonucleotide
ggttcgtcgtccctgagttgcccgcataccaagcgtaggtaacgtttgggttc

SEQ ID NO: 222278 - DNA, 55 bp, Artificial
  Synthetic oligonucleotide
cgcccagtatgaagcgctcacaaaggcaacatcaatgagtcgattgacaggtctc

SEQ ID NO: 222279 - DNA, 55 bp, Artificial
  Synthetic oligonucleotide
ctagttctaccttgcgtgaactggctgggccctcggctgttgaacgaggttacgt

SEQ ID NO: 222280 - DNA, 55 bp, Artificial
  Synthetic oligonucleotide
ctccaccagcctaaaccactccaataaactctattatgtctcgattggtgtcgcg

SEQ ID NO: 222281 - DNA, 54 bp, Artificial
  Synthetic oligonucleotide
ctacgaggagttgtatcgggtattgcacattatggaaattgtgtaggggtgcct

SEQ ID NO: 222282 - DNA, 54 bp, Artificial
  Synthetic oligonucleotide
aaggtccaaatgcaagccagcataatggttctcctaaaccttgatagcctaatc

SEQ ID NO: 222283 - DNA, 54 bp, Artificial
  Synthetic oligonucleotide
caggaccttcccacccctatgactaactgtcccgggtagtgatcctgatagcct

SEQ ID NO: 222284 - DNA, 54 bp, Artificial
  Synthetic oligonucleotide
ggctccattacccagccacgccttgaacgcccctgaggattgcgcttgaccaca

SEQ ID NO: 222285 - DNA, 54 bp, Artificial
  Synthetic oligonucleotide
ccactcgtgggcaaagcttctcccgctgcaagctctgacttggcgtatgccata

SEQ ID NO: 222286 - DNA, 54 bp, Artificial
  Synthetic oligonucleotide
atgagcttaagagttggacaagaagcaccagatttcactgctacagcagtatac

SEQ ID NO: 222287 - DNA, 54 bp, Artificial
  Synthetic oligonucleotide
gaggtgctgaaggttaaataactaactactaaagcccggcatcttctagttgtc

SEQ ID NO: 222288 - DNA, 57 bp, Artificial
  Synthetic oligonucleotide
ggccctgtaggagaaggcgcctaagagccttgcagtagaggggatagccagcctcta

SEQ ID NO: 222289 - DNA, 54 bp, Artificial
  Synthetic oligonucleotide
tccctctttccgtccagtaatcaagaccagtgggatccgcagcgcgtccgaagt

SEQ ID NO: 222290 - DNA, 54 bp, Artificial
  Synthetic oligonucleotide
ccccttaaggcaaaagcagcacctgttagggtttctaatctatgaagtgttgac

SEQ ID NO: 222291 - DNA, 54 bp, Artificial
  Synthetic oligonucleotide
tcttgttcaacgtcgcaaggctttaggtcttaccgattcagggtttatgacccc

SEQ ID NO: 222292 - DNA, 54 bp, Artificial
  Synthetic oligonucleotide
tcttcccataccttgagcgatacctctaccaattaatcctatagatcttcccac

SEQ ID NO: 222293 - DNA, 54 bp, Artificial
  Synthetic oligonucleotide
ggagcgactaaccagcctgtactgccggattggattaattcacctgggccgcct

SEQ ID NO: 222294 - DNA, 54 bp, Artificial
  Synthetic oligonucleotide
tagtggtctgttcaacgggctccattacccagccacgccttgaacgcccctgag

SEQ ID NO: 222295 - DNA, 54 bp, Artificial
  Synthetic oligonucleotide
tcgtttaggggaaattaaggattttactgggatttctagtccatatgaagctcc

SEQ ID NO: 222296 - DNA, 53 bp, Artificial
  Synthetic oligonucleotide
atttcggtccccatcatccttcgatgcatggtgtgctgcgcttagtagtcaca

SEQ ID NO: 222297 - DNA, 53 bp, Artificial
  Synthetic oligonucleotide
aggcatacctccattaccactaaatgcagaacagactaactgtattactaacc

SEQ ID NO: 222298 - DNA, 53 bp, Artificial
  Synthetic oligonucleotide
tacaactgggggcctcggtccctaccatttacgcttctctgaatgggcgtgta

SEQ ID NO: 222299 - DNA, 57 bp, Artificial
  Synthetic oligonucleotide
tcaaccagggtctggcacaggaccctacaacccgtcgtatttggtacggcatcgcaa

SEQ ID NO: 222300 - DNA, 53 bp, Artificial
  Synthetic oligonucleotide
aggttctcattacaaaccgtacttatcaaagctagcggctagtagattgccct

SEQ ID NO: 222301 - DNA, 53 bp, Artificial
  Synthetic oligonucleotide
agcccgtccctgatgcaagtaagggattggattctcgaggaagccagtgccga

SEQ ID NO: 222302 - DNA, 53 bp, Artificial
  Synthetic oligonucleotide
tcaatcgcgctcacgacctcagcaggcccatcaatcggtaacccttccaccga

SEQ ID NO: 222303 - DNA, 53 bp, Artificial
  Synthetic oligonucleotide
cagctagagactagaacagaaccaatggtggtcaattttggccctcaccatcc

SEQ ID NO: 222304 - DNA, 53 bp, Artificial
  Synthetic oligonucleotide
tcactagaacaagtatctggtcagaacaagttatggattcatatcgcatcccc

SEQ ID NO: 222305 - DNA, 53 bp, Artificial
  Synthetic oligonucleotide
agagccagatatgcatggtcaagatttaagcggtaacgaatacgttaagtttg

SEQ ID NO: 222306 - DNA, 53 bp, Artificial
  Synthetic oligonucleotide
tccaaggcacaccttgggccgagaatgcacgtctctcaacaggggtaccaaca

SEQ ID NO: 222307 - DNA, 53 bp, Artificial
  Synthetic oligonucleotide
gagcttccctacctaattgttgtctccctgcactaagtcttattcggctttta

SEQ ID NO: 222308 - DNA, 53 bp, Artificial
  Synthetic oligonucleotide
gagcttcgccgcagtttggaagacgacagctacctgtatgaggggccggcact

SEQ ID NO: 222309 - DNA, 53 bp, Artificial
  Synthetic oligonucleotide
gatctgggtctggagaaacaacttgcaccgctgcatagggtcctaaataaggg

SEQ ID NO: 222310 - DNA, 56 bp, Artificial
  Synthetic oligonucleotide
tcttgcgacgcctaagtcacaagagttccaaccccgaacagagctggctcctccta

SEQ ID NO: 222311 - DNA, 53 bp, Artificial
  Synthetic oligonucleotide
acttggtcccagctttaagatctagttggctagtaatgcatgttagtgtcgta

SEQ ID NO: 222312 - DNA, 53 bp, Artificial
  Synthetic oligonucleotide
gcggttgaccgaaccgcactacatagtctccctgcgaggtggtagtcttgcgc

SEQ ID NO: 222313 - DNA, 53 bp, Artificial
  Synthetic oligonucleotide
gccgtattcgttattgcgaccgctaatgcaattgataagctcccagcagagtt

SEQ ID NO: 222314 - DNA, 53 bp, Artificial
  Synthetic oligonucleotide
cctttcgtcatagaagcaataagcactgccgaaagaccaactactgcaactgt

SEQ ID NO: 222315 - DNA, 52 bp, Artificial
  Synthetic oligonucleotide
ttttggactcgtaatcgatgatggggccattgcaatcagatgatcagcgcca

SEQ ID NO: 222316 - DNA, 52 bp, Artificial
  Synthetic oligonucleotide
aggtggtactagcagtacaagtaattgcgtcccatgttgtttgtcgtgtaat

SEQ ID NO: 222317 - DNA, 52 bp, Artificial
  Synthetic oligonucleotide
aattccgggtgtgtcgcgctcaggtagcactctgacggcctcgctatttgat

SEQ ID NO: 222318 - DNA, 52 bp, Artificial
  Synthetic oligonucleotide
tgcgtttctgatgtatcactaggttcttgagagaaccctttgaatactccac

SEQ ID NO: 222319 - DNA, 52 bp, Artificial
  Synthetic oligonucleotide
tctctatttgggagctccaacccgtaaatcttacctcctatgtagtatctac

SEQ ID NO: 222320 - DNA, 52 bp, Artificial
  Synthetic oligonucleotide
tcggataacattgccacttgcacctcggctgagcccgtgtcagtgccatgat

SEQ ID NO: 222321 - DNA, 56 bp, Artificial
  Synthetic oligonucleotide
catcagatggttccctagcagcattgttaggggcctcgccaggagcgagtactgcc

SEQ ID NO: 222322 - DNA, 52 bp, Artificial
  Synthetic oligonucleotide
tccggttcgcattgctggcagccaagtagcgtgtagcagactcatacccgca

SEQ ID NO: 222323 - DNA, 52 bp, Artificial
  Synthetic oligonucleotide
gcattcgtcattacgtcgctgaggcgagatacattccctctgaatcgatgat

SEQ ID NO: 222324 - DNA, 52 bp, Artificial
  Synthetic oligonucleotide
cttcacaagatgggtgaccgggctagtgatcgtttggaaggttggttggagg

SEQ ID NO: 222325 - DNA, 52 bp, Artificial
  Synthetic oligonucleotide
gccattagtggctgaataaacttgatatccagctagttgaagccttgtaact

SEQ ID NO: 222326 - DNA, 52 bp, Artificial
  Synthetic oligonucleotide
ccttcgacccatggatgggacgtcattggaacttaattgagtcattcgatac

SEQ ID NO: 222327 - DNA, 52 bp, Artificial
  Synthetic oligonucleotide
cagccacgccttgaacgcccctgaggattgcgcttgaccacagggtcagcat

SEQ ID NO: 222328 - DNA, 52 bp, Artificial
  Synthetic oligonucleotide
atctcacggccatgtcttaagcgaggcccgtgcaatcgggagtctctatcct

SEQ ID NO: 222329 - DNA, 52 bp, Artificial
  Synthetic oligonucleotide
ctatatctgtcactgtcgtaataaatggggacgacattagagcaggatctaa

SEQ ID NO: 222330 - DNA, 51 bp, Artificial
  Synthetic oligonucleotide
cagagctgcatctcaagaggcttgtggttggtggatttgagcgggtctatg

SEQ ID NO: 222331 - DNA, 51 bp, Artificial
  Synthetic oligonucleotide
aatcccacctgccttatgaagatccaccgtcacatatttaccactcggttt

SEQ ID NO: 222332 - DNA, 55 bp, Artificial
  Synthetic oligonucleotide
gaacggttgggcacttgcttgatatttgacatcaaactttagaggatctctcagt

SEQ ID NO: 222333 - DNA, 51 bp, Artificial
  Synthetic oligonucleotide
caggggccctcccgggaacaactgcttcgctaggggtactcatggggcatg

SEQ ID NO: 222334 - DNA, 51 bp, Artificial
  Synthetic oligonucleotide
agaggtcgcaaactgttctttaccactagaacgcgacacaggtcgtaaaag

SEQ ID NO: 222335 - DNA, 51 bp, Artificial
  Synthetic oligonucleotide
cgtcaccaaaccacccgcgttcctgcctcccgcatgtcacgcagtattgcc

SEQ ID NO: 222336 - DNA, 51 bp, Artificial
  Synthetic oligonucleotide
ccacttagtgaagctctctctttgatccataacgttataaggtgaactaag

SEQ ID NO: 222337 - DNA, 51 bp, Artificial
  Synthetic oligonucleotide
gagtacagagatacctactggactcctgaatatgtacccctagacaccgat

SEQ ID NO: 222338 - DNA, 51 bp, Artificial
  Synthetic oligonucleotide
cgcgtcaacaaagcacggttattgccgattggaggttgtctgcctgatttt

SEQ ID NO: 222339 - DNA, 51 bp, Artificial
  Synthetic oligonucleotide
acccttcgaggctggtctcggctggttggtacacctggaaatgcctgctcc

SEQ ID NO: 222340 - DNA, 51 bp, Artificial
  Synthetic oligonucleotide
acatgaatcaacgaaggcacgaaactcatctggtgatccaaatctacttgt

SEQ ID NO: 222341 - DNA, 51 bp, Artificial
  Synthetic oligonucleotide
atccctcaaaccagccatcacctccgcaaaacgttctctgcgctgcgcctt

SEQ ID NO: 222342 - DNA, 51 bp, Artificial
  Synthetic oligonucleotide
atcggccctagctgttgcatctgcgaaggggcaaccgtggacaactcgatc

SEQ ID NO: 222343 - DNA, 55 bp, Artificial
  Synthetic oligonucleotide
gcgcgaccgctttgtatttattggttggtccggactacttctacttccttgtgca

SEQ ID NO: 222344 - DNA, 51 bp, Artificial
  Synthetic oligonucleotide
aactgctgacgaaaggcatcaaactcccctgctgggaagggcaccttccgc

SEQ ID NO: 222345 - DNA, 51 bp, Artificial
  Synthetic oligonucleotide
aggtcgagtggacttttcttagagacgaagagcgggttattaaagacgcgg

SEQ ID NO: 222346 - DNA, 51 bp, Artificial
  Synthetic oligonucleotide
tacgacatcagggtctgccgttggaaacttattgcctgcggccgttgaggc

SEQ ID NO: 222347 - DNA, 51 bp, Artificial
  Synthetic oligonucleotide
aagaagagaactctccctagtgcaaaagacaatgctgctagcggtacgaca

SEQ ID NO: 222348 - DNA, 51 bp, Artificial
  Synthetic oligonucleotide
gaacccctacaaagatctgtgcattcttagaattcgacatcctatagctaa

SEQ ID NO: 222349 - DNA, 51 bp, Artificial
  Synthetic oligonucleotide
caaacaacaactgcgctactggcaagccaaccgcccgattgccgtaggcca

SEQ ID NO: 222350 - DNA, 51 bp, Artificial
  Synthetic oligonucleotide
aagttcgcttagatcatcagcctgtttagaaagttgatcacgagcagcaga

SEQ ID NO: 222351 - DNA, 51 bp, Artificial
  Synthetic oligonucleotide
cactacatacaataggaacattgggtggagttatacctgatttcccttggc

SEQ ID NO: 222352 - DNA, 51 bp, Artificial
  Synthetic oligonucleotide
agcgccctcacgcgagtgcagtaacagttgggtgagtcttgccaagcttcc

SEQ ID NO: 222353 - DNA, 50 bp, Artificial
  Synthetic oligonucleotide
cttctgtcgggccttcgtcgacaggagagctgtcgtcacctgtgggtgca

SEQ ID NO: 222354 - DNA, 59 bp, Artificial
  Synthetic oligonucleotide
tcatgtttcgatgtgacaaaacggccatcccccgttccctggtatgactcgaactgcgc

SEQ ID NO: 222355 - DNA, 55 bp, Artificial
  Synthetic oligonucleotide
gcggccttgcttaccgatgagcgagtggacgagttaatcgtcgcccaaggtcact

SEQ ID NO: 222356 - DNA, 50 bp, Artificial
  Synthetic oligonucleotide
tgtgattcctggtggtgagaaactcgcttggctaatccaactagctacca

SEQ ID NO: 222357 - DNA, 50 bp, Artificial
  Synthetic oligonucleotide
gatgactgggggcgcactgctcaggtctgcggaggcgaactgtgagactt

SEQ ID NO: 222358 - DNA, 50 bp, Artificial
  Synthetic oligonucleotide
cgccctcctcatttgtgtggaatgagccctccgctggtgttgcggtgtca

SEQ ID NO: 222359 - DNA, 50 bp, Artificial
  Synthetic oligonucleotide
ttgtaatggctgatgactgggggcgcactgctcaggtctgcggaggcgaa

SEQ ID NO: 222360 - DNA, 50 bp, Artificial
  Synthetic oligonucleotide
tctggcgtcatgggtccctctgactttgagttcccgtgcagggttgctct

SEQ ID NO: 222361 - DNA, 50 bp, Artificial
  Synthetic oligonucleotide
cgcaaagatgaatcaaagctcgtgcattactagcaacagatcctgtgcgt

SEQ ID NO: 222362 - DNA, 50 bp, Artificial
  Synthetic oligonucleotide
ctgacgggtgcgcgacggtcaaaacgaggacgtggtggcattcagtgaga

SEQ ID NO: 222363 - DNA, 50 bp, Artificial
  Synthetic oligonucleotide
gttacctattaagtatgttgcatatagcccatgttttaggagagaggctg

SEQ ID NO: 222364 - DNA, 50 bp, Artificial
  Synthetic oligonucleotide
agtcgaaaacgactgctaactcgattgtcctgacgacgccactccctaca

SEQ ID NO: 222365 - DNA, 50 bp, Artificial
  Synthetic oligonucleotide
taatgagcctgaggcgtctcaggtagctcctcctgggcgttcagatctta

SEQ ID NO: 222366 - DNA, 55 bp, Artificial
  Synthetic oligonucleotide
cttttccacaattgatcttggtcttctaatccaactgatactctaataaggtgcg

SEQ ID NO: 222367 - DNA, 50 bp, Artificial
  Synthetic oligonucleotide
gtcttggtcaggggaaccagacactcttgcggcatgagggtggcatcggg

SEQ ID NO: 222368 - DNA, 50 bp, Artificial
  Synthetic oligonucleotide
aggattggcaacagacgaatgggaacagctggcggcagtgctgcactcgc

SEQ ID NO: 222369 - DNA, 50 bp, Artificial
  Synthetic oligonucleotide
tagcataaagtgaacttgcgtcataaggaactgaagagggtaactcgccc

SEQ ID NO: 222370 - DNA, 50 bp, Artificial
  Synthetic oligonucleotide
taggaggctctcctgccgactaaacaccccgagcacatgcgagacggttc

SEQ ID NO: 222371 - DNA, 50 bp, Artificial
  Synthetic oligonucleotide
atctcgggacctccgccatgaattactatgggacacactcccacgcttga

SEQ ID NO: 222372 - DNA, 50 bp, Artificial
  Synthetic oligonucleotide
tataaacgctgtcgcgatggtaaagaataatctcatccaaggtggggttc

SEQ ID NO: 222373 - DNA, 50 bp, Artificial
  Synthetic oligonucleotide
cagccaagtagcgtgtagcagactcatacccgcaacgcggttagcatgaa

SEQ ID NO: 222374 - DNA, 50 bp, Artificial
  Synthetic oligonucleotide
gggactggaaccgacgaattaatgattatccctgtcgggaacaactcagg

SEQ ID NO: 222375 - DNA, 50 bp, Artificial
  Synthetic oligonucleotide
cagtcgcgtgagacttttcgccgccgggcattgatggtgagtgcaatccg

SEQ ID NO: 222376 - DNA, 50 bp, Artificial
  Synthetic oligonucleotide
ggctatctgtgttttgacaggttggacactgcatatggtgaaataaactg

SEQ ID NO: 222377 - DNA, 55 bp, Artificial
  Synthetic oligonucleotide
cttagatgtctagagttataactattgatccggggatatcgaaatgtggagtgat

SEQ ID NO: 222378 - DNA, 50 bp, Artificial
  Synthetic oligonucleotide
ccccatcccgaaggggtctaacggcacgaatattccctggtgttcgccct

SEQ ID NO: 222379 - DNA, 50 bp, Artificial
  Synthetic oligonucleotide
ccgcctgtttatatgcgacctccactacttcactaagagtaggatgagta

SEQ ID NO: 222380 - DNA, 50 bp, Artificial
  Synthetic oligonucleotide
gcctgcagtggtctgggagctcagcacccggcgtgttctttgtctcgatt

SEQ ID NO: 222381 - DNA, 50 bp, Artificial
  Synthetic oligonucleotide
acgcagcacggggtgtccacgaaactccaacacccgagcgagggaatcgc

SEQ ID NO: 222382 - DNA, 50 bp, Artificial
  Synthetic oligonucleotide
tcgcagcgggagtgttcagcggctgcttccctttcttcgggttacagaca

SEQ ID NO: 222383 - DNA, 50 bp, Artificial
  Synthetic oligonucleotide
gccgcgcttcgaacctatgcccaactcttgatgaagcgcctagagcccga

SEQ ID NO: 222384 - DNA, 55 bp, Artificial
  Synthetic oligonucleotide
cttacccgaagaagaaacaacctatccatggagtggacatttaggtatcaagagc

SEQ ID NO: 222385 - DNA, 55 bp, Artificial
  Synthetic oligonucleotide
gctaacttttgatcaggatttgccgaaaatagaaagtctatcgtctcattgcctt

SEQ ID NO: 222386 - DNA, 55 bp, Artificial
  Synthetic oligonucleotide
gctgatcgggactttgttcaaacacaatatccgatggtagtttcggctcttcatt

SEQ ID NO: 222387 - DNA, 55 bp, Artificial
  Synthetic oligonucleotide
gctgtgcgtgataagcgagctaagaccatcgaaagattgcgtttggtgattctcg

SEQ ID NO: 222388 - DNA, 55 bp, Artificial
  Synthetic oligonucleotide
ggaagactctgtctttcgtaggggatggcccacggtcccagagacctggcgagac

SEQ ID NO: 222389 - DNA, 54 bp, Artificial
  Synthetic oligonucleotide
ggaattaaagcaggctgaagtcccataacctaaaagctcataaaccggaactgg

SEQ ID NO: 222390 - DNA, 55 bp, Artificial
  Synthetic oligonucleotide
ggaccaactacgacagccataattccaaatagagccataaacgcgatacctacga

SEQ ID NO: 222391 - DNA, 60 bp, Artificial
  Synthetic oligonucleotide
gaagtcgtcaagagctcctaaggatggcatggccccctttcagcggagggccaagatctg

SEQ ID NO: 222392 - DNA, 55 bp, Artificial
  Synthetic oligonucleotide
ggacctgcggaactactccaaatcaacggtaacgatctactccaagcactgatct

SEQ ID NO: 222393 - DNA, 55 bp, Artificial
  Synthetic oligonucleotide
ggactcattcggggatgaatcagggacgtccccaaatcttagcgcaattctcgag

SEQ ID NO: 222394 - DNA, 55 bp, Artificial
  Synthetic oligonucleotide
ctgttagcaacccatgaagctctcataaccccgaagtctgaagattgataagggg

SEQ ID NO: 222395 - DNA, 55 bp, Artificial
  Synthetic oligonucleotide
ggagttaggaggtggctctttacgtattcatgaagctaacttgcaaagagaggtt

SEQ ID NO: 222396 - DNA, 55 bp, Artificial
  Synthetic oligonucleotide
ctggtgctccaaacagacctggcatgcccaataggcctggattaagaaacaaacc

SEQ ID NO: 222397 - DNA, 55 bp, Artificial
  Synthetic oligonucleotide
ctgccatagcaggtgaattagatgcttaccatatgctagctccgatgccaatttc

SEQ ID NO: 222398 - DNA, 55 bp, Artificial
  Synthetic oligonucleotide
ggatccattggtgataattcatccgggagctcctatggttataggatgtctaaag

SEQ ID NO: 222399 - DNA, 55 bp, Artificial
  Synthetic oligonucleotide
ggatctcctcattggggtgagtctaagtattggagctacaaagatcttagtgttc

SEQ ID NO: 222400 - DNA, 55 bp, Artificial
  Synthetic oligonucleotide
ggatgacggactatataagtcgatatcataggctaggtaaggcaggcttaggtct

SEQ ID NO: 222401 - DNA, 55 bp, Artificial
  Synthetic oligonucleotide
ggattgaacccaaaagcgtatccatccaatacgccgcattccaaatgagagcgac

SEQ ID NO: 222402 - DNA, 59 bp, Artificial
  Synthetic oligonucleotide
taagggtaggacctactcctgcaccaatgcaggccccgcctgacactggattagaggag

SEQ ID NO: 222403 - DNA, 55 bp, Artificial
  Synthetic oligonucleotide
ggcaagacctatggggcaatccatccaatcggcaaaatcgttctggtttgtatgc

SEQ ID NO: 222404 - DNA, 55 bp, Artificial
  Synthetic oligonucleotide
ctgattcccttaaacgcacttctccaccaaactcgctgtattggctcgcctcggc

SEQ ID NO: 222405 - DNA, 53 bp, Artificial
  Synthetic oligonucleotide
ggcaagacgtacaattgccttcttgacctgagaacgtttaccggaaaatttcc

SEQ ID NO: 222406 - DNA, 55 bp, Artificial
  Synthetic oligonucleotide
ctgagactgcttcggaaattaggcgacttcgcattaatggcttagatcttgagcc

SEQ ID NO: 222407 - DNA, 55 bp, Artificial
  Synthetic oligonucleotide
gaccttgcatacaccatcgctttgttgcaatcttgagcgcaagtcagacatctct

SEQ ID NO: 222408 - DNA, 55 bp, Artificial
  Synthetic oligonucleotide
gacgccatttcacgatgagtctggctctctgtcgttcttgctccaatagcagtcc

SEQ ID NO: 222409 - DNA, 55 bp, Artificial
  Synthetic oligonucleotide
gagactgtcgtgatgtagacgtaaaccaatcctgtaattggaaacgaaagcccac

SEQ ID NO: 222410 - DNA, 55 bp, Artificial
  Synthetic oligonucleotide
gaccctcaaagaaggagcgacgccattgatccctgtcagctccatagctgaacag

SEQ ID NO: 222411 - DNA, 55 bp, Artificial
  Synthetic oligonucleotide
gagccctgcctactgatccgtcaaatgttatacagcctggcgaaacctgccatgt

SEQ ID NO: 222412 - DNA, 55 bp, Artificial
  Synthetic oligonucleotide
gacaacatgggcctaagaccctaaaactaaattgacctccaatacttgagtgaat

SEQ ID NO: 222413 - DNA, 55 bp, Artificial
  Synthetic oligonucleotide
gtcctaactccttagaagcgcccaagtccccgtcctttggcttgagtcgaactgc

SEQ ID NO: 222414 - DNA, 55 bp, Artificial
  Synthetic oligonucleotide
gaatagactgttaactcaggccgttagtacaggcaagcgcgtaagaagcgagaca

SEQ ID NO: 222415 - DNA, 55 bp, Artificial
  Synthetic oligonucleotide
gagctaaatcgcactatcactgaggcatctcgtgtcgccgttagggcgatggtgc

SEQ ID NO: 222416 - DNA, 55 bp, Artificial
  Synthetic oligonucleotide
gaaggtcctttaccaaccccaaggccttcgaacaagagtacatctcaatcagaga

SEQ ID NO: 222417 - DNA, 55 bp, Artificial
  Synthetic oligonucleotide
gagctgggatagttggagctgacggtcctactcaccaaggtcagtacgatatcag

SEQ ID NO: 222418 - DNA, 55 bp, Artificial
  Synthetic oligonucleotide
gagggttgctcactatggaaacccaagcgcaagttcttaacaacaaaggccctgg

SEQ ID NO: 222419 - DNA, 55 bp, Artificial
  Synthetic oligonucleotide
gagtcgggatcttggtgatcaggtttctcaccaggaaggactgcgcctacttgac

SEQ ID NO: 222420 - DNA, 55 bp, Artificial
  Synthetic oligonucleotide
gatcacaatccacgttgagagccaatccatgttgagtaatccagcgacgacaccc

SEQ ID NO: 222421 - DNA, 55 bp, Artificial
  Synthetic oligonucleotide
gatcttgtctagcaggaccaccaactagtgcaaatcctgttaatgatacgacccc

SEQ ID NO: 222422 - DNA, 55 bp, Artificial
  Synthetic oligonucleotide
gcagctcagtttatacgcagtggctcgatgaagagagtcctagtaataggtgcag

SEQ ID NO: 222423 - DNA, 55 bp, Artificial
  Synthetic oligonucleotide
gcaggtgatctaccgacgtaaccatggcggctacggggttatacaggctcgagat

SEQ ID NO: 222424 - DNA, 54 bp, Artificial
  Synthetic oligonucleotide
gcgggcgctaaagtccttggaggaatttgcgtagggactaatacaaggatcggg

SEQ ID NO: 222425 - DNA, 55 bp, Artificial
  Synthetic oligonucleotide
gcagtatgcatgagatgcacagctagtagtcgaccggggtcgttgataactactg

SEQ ID NO: 222426 - DNA, 55 bp, Artificial
  Synthetic oligonucleotide
gcagttgagcctcttacctgcgatatcgttaaatctatagcactcccttccgatg

SEQ ID NO: 222427 - DNA, 55 bp, Artificial
  Synthetic oligonucleotide
gcatcgatacttacagtgaatgctgtttggtttgaatcggtatttctgtcaacca

SEQ ID NO: 222428 - DNA, 55 bp, Artificial
  Synthetic oligonucleotide
gaaggagtagttatgcatacgactgttaacaaggctcctgtaggtagaaatgtcg

SEQ ID NO: 222429 - DNA, 55 bp, Artificial
  Synthetic oligonucleotide
gccagaggtgtatcaaatgagccatagcccttcgacctctagataatttatcgcg

SEQ ID NO: 222430 - DNA, 55 bp, Artificial
  Synthetic oligonucleotide
gcccagaactttgccgattctgtcttgccagctatctcacactgcccttccgcag

SEQ ID NO: 222431 - DNA, 55 bp, Artificial
  Synthetic oligonucleotide
gcccagcttacttctgttggtatttcaactagccattcagtacatcttggatcaa

SEQ ID NO: 222432 - DNA, 55 bp, Artificial
  Synthetic oligonucleotide
gccctacgtgagctcaagggtgtcgtggatttcaaccaatccttggcgttacaga

SEQ ID NO: 222433 - DNA, 55 bp, Artificial
  Synthetic oligonucleotide
gccgtagatgtgatcgcaagggatgtcaaagtagccctggatttgggcggaatgc

SEQ ID NO: 222434 - DNA, 55 bp, Artificial
  Synthetic oligonucleotide
gcctccaaggccggctctaaagatgggaagcattttcccaagtgctccaccgtct

SEQ ID NO: 222435 - DNA, 59 bp, Artificial
  Synthetic oligonucleotide
ggctctagttaatttcatgctagatgttcattcaaataacgggtacttagaattaatgc

SEQ ID NO: 222436 - DNA, 55 bp, Artificial
  Synthetic oligonucleotide
gcgaaagcaagcctttgttgctctccgagagataatagtctttgccaatcttgtt

SEQ ID NO: 222437 - DNA, 55 bp, Artificial
  Synthetic oligonucleotide
gcgatacgagcaagttggtgatctgtgagttccctggcggaaacctcgccgagct

SEQ ID NO: 222438 - DNA, 55 bp, Artificial
  Synthetic oligonucleotide
gtgaggggactcctgatgtaatatttatcggtactggtagtgaactaaacctctg

SEQ ID NO: 222439 - DNA, 55 bp, Artificial
  Synthetic oligonucleotide
gtgcagcaaattgaattgcgcacgtatgttttcctcgattcacttcagcctcagc

SEQ ID NO: 222440 - DNA, 55 bp, Artificial
  Synthetic oligonucleotide
gtgcctagtagaccattgcattcaggcaaggatcggacccaattatgagtttgac

SEQ ID NO: 222441 - DNA, 55 bp, Artificial
  Synthetic oligonucleotide
gtgggacattccttgttttcgccgattatatgagaggttcaatgaggctttcggc

SEQ ID NO: 222442 - DNA, 55 bp, Artificial
  Synthetic oligonucleotide
gtgtagccgcatgctgggcactgtttatcgaggtatcgaccgctcactggcttgg

SEQ ID NO: 222443 - DNA, 55 bp, Artificial
  Synthetic oligonucleotide
gtttcgtcgctgcagttggcgcctacgttactacaggccaaatcattccaggctg

SEQ ID NO: 222444 - DNA, 55 bp, Artificial
  Synthetic oligonucleotide
taacgatccattaagtaaatgctcaccagggcgtacgtttataggtttagattcc

SEQ ID NO: 222445 - DNA, 55 bp, Artificial
  Synthetic oligonucleotide
taacggctcctgagccatagtcagccaatacgtaatcggcaatccaaacgggtag

SEQ ID NO: 222446 - DNA, 58 bp, Artificial
  Synthetic oligonucleotide
ccctggtgttcgccctaacattaacttcgcatcattgcccactgcgagtgggatcccc

SEQ ID NO: 222447 - DNA, 55 bp, Artificial
  Synthetic oligonucleotide
taagaatggattaagaggaataagagcagatgttgggtaacatccaggggaggcg

SEQ ID NO: 222448 - DNA, 55 bp, Artificial
  Synthetic oligonucleotide
taagtggaggtttactaaaattgcctactatcccataacaagtttggactgctag

SEQ ID NO: 222449 - DNA, 55 bp, Artificial
  Synthetic oligonucleotide
tacacgctcacggatgtagctaaaggcctcgatgtaggcagaagtagggataccg

SEQ ID NO: 222450 - DNA, 55 bp, Artificial
  Synthetic oligonucleotide
taccggcagagataattcccatcccgactactgataaattgactattcccattgc

SEQ ID NO: 222451 - DNA, 55 bp, Artificial
  Synthetic oligonucleotide
tagttgctacgatgagggtaaacgtgttgcggaatcattgtgttatgactatatg

SEQ ID NO: 222452 - DNA, 55 bp, Artificial
  Synthetic oligonucleotide
tattagacctccaactgtgcctgtgaacaaatcaagaataaggttaacaatcagg

SEQ ID NO: 222453 - DNA, 54 bp, Artificial
  Synthetic oligonucleotide
tatttctcgtgcagacctacgggaacccaaacgttacctatgactggtacgcgg

SEQ ID NO: 222454 - DNA, 55 bp, Artificial
  Synthetic oligonucleotide
tcacctagaggtgcacgaccatctccttcacaactaatcgaaaggaataatgagc

SEQ ID NO: 222455 - DNA, 55 bp, Artificial
  Synthetic oligonucleotide
tcacgaggaccttaaggtttcaaacggtattgatattggactgggaggttggatc

SEQ ID NO: 222456 - DNA, 55 bp, Artificial
  Synthetic oligonucleotide
tcattactcctctccctgttatagatttactaggagctgcagttgttaatgggcg

SEQ ID NO: 222457 - DNA, 56 bp, Artificial
  Synthetic oligonucleotide
aacgttcatcggggcccggcaccttcctgcggcgatcggtgaatcaccacaggaag

SEQ ID NO: 222458 - DNA, 55 bp, Artificial
  Synthetic oligonucleotide
gcaggaccacatcggagagggttcagagacgatgaccgtgaagttgctgtacgcg

SEQ ID NO: 222459 - DNA, 50 bp, Artificial
  Synthetic oligonucleotide
acgactactcgggagtgctccaagcgcggaccagactcgagcagacgcgt

SEQ ID NO: 222460 - DNA, 50 bp, Artificial
  Synthetic oligonucleotide
acaaccgtccgtcgcggaccccacccgcctctcaatgatcgccgcggtcc

SEQ ID NO: 222461 - DNA, 50 bp, Artificial
  Synthetic oligonucleotide
aatatgcaggagtcctgacaaacccagcccgggtgcggtcaagcccggag

SEQ ID NO: 222462 - DNA, 50 bp, Artificial
  Synthetic oligonucleotide
aaggtctaggattacgctagccgccttctcacggtcaccccacgggaccc

SEQ ID NO: 222463 - DNA, 50 bp, Artificial
  Synthetic oligonucleotide
aaggctcggtgcgacctacggggcagggagcacagcatccaaccaccgcg

SEQ ID NO: 222464 - DNA, 50 bp, Artificial
  Synthetic oligonucleotide
aacgcggacggggtaatcccggaaggaccggatacctggcggagatcctc

SEQ ID NO: 222465 - DNA, 50 bp, Artificial
  Synthetic oligonucleotide
aacgcagctgtcgtctcagagcccggcccgtgaagccccgtactgtgcct

SEQ ID NO: 222466 - DNA, 50 bp, Artificial
  Synthetic oligonucleotide
cctcccctcccggcgtgcgtgattagcactcgaacctaccgagtgccatt

SEQ ID NO: 222467 - DNA, 50 bp, Artificial
  Synthetic oligonucleotide
ccggggcagccacgcgtctccgaataccacatctgccgtctcggcgaaga

SEQ ID NO: 222468 - DNA, 50 bp, Artificial
  Synthetic oligonucleotide
ccgagacaacgcctcgcaactcccggtccctggggtcatcgaccccttct

SEQ ID NO: 222469 - DNA, 55 bp, Artificial
  Synthetic oligonucleotide
cactaaccgcaacctcagtgtcaggagacacacgatggcaaccttcgccgactgc

SEQ ID NO: 222470 - DNA, 50 bp, Artificial
  Synthetic oligonucleotide
ccgacggctatctagatcgtcgcgctcgtaggagtacgtggcgcccactc

SEQ ID NO: 222471 - DNA, 50 bp, Artificial
  Synthetic oligonucleotide
cccgagccacggtccctcttgctcgggtgagcctactaggactatggtcg

SEQ ID NO: 222472 - DNA, 50 bp, Artificial
  Synthetic oligonucleotide
gacctcaccgatgctcaccatgcgaccagcatcgagcctcccgtcgcggg

SEQ ID NO: 222473 - DNA, 50 bp, Artificial
  Synthetic oligonucleotide
gactcacgcagggactcctcacggaccgactgtgctggcgcgaacagcga

SEQ ID NO: 222474 - DNA, 50 bp, Artificial
  Synthetic oligonucleotide
gaggcacctcgcgaaacctggtgtccgcattctgggaccagcatgtggga

SEQ ID NO: 222475 - DNA, 50 bp, Artificial
  Synthetic oligonucleotide
catggagcgtcccgcgcacaacgctgactcttcgggcaccgcttcttgcc

SEQ ID NO: 222476 - DNA, 50 bp, Artificial
  Synthetic oligonucleotide
cagggactcctcacggaccgactgtgctggcgcgaacagcgagcctaccg

SEQ ID NO: 222477 - DNA, 50 bp, Artificial
  Synthetic oligonucleotide
cagccgacctgccgtgcgcacaacagaatgtgtcaccgccgacacgcgag

SEQ ID NO: 222478 - DNA, 50 bp, Artificial
  Synthetic oligonucleotide
gcagggaggtgcagggatgacgctccacggggaatccgaggatctgctca

SEQ ID NO: 222479 - DNA, 50 bp, Artificial
  Synthetic oligonucleotide
cacgtccgcctacccgttcacttacccgcgaggagagttcgtcccagcgg

SEQ ID NO: 222480 - DNA, 55 bp, Artificial
  Synthetic oligonucleotide
gcgaccacttctgacgaacgtcaagcaaaagttgtccgcgagtgtcgcaggttcg

SEQ ID NO: 222481 - DNA, 50 bp, Artificial
  Synthetic oligonucleotide
cacgccgggagcgcatgccgtgagagacgcccgacacatgggacgggcag

SEQ ID NO: 222482 - DNA, 50 bp, Artificial
  Synthetic oligonucleotide
ggaacgccgtagatgctggcgtccttggactgcgagatgccggccacaag

SEQ ID NO: 222483 - DNA, 50 bp, Artificial
  Synthetic oligonucleotide
ggaccctagacacggatctacgggtccgtcaacccccaacttctggccga

SEQ ID NO: 222484 - DNA, 50 bp, Artificial
  Synthetic oligonucleotide
caccgccggtactcgtgagagcccttcgcactcggcgtcaggttcgcagt

SEQ ID NO: 222485 - DNA, 50 bp, Artificial
  Synthetic oligonucleotide
caacacctgcgtgggtctgacaagccgggtgggggtgggacctgtcaggc

SEQ ID NO: 222486 - DNA, 50 bp, Artificial
  Synthetic oligonucleotide
caaagggagcagggcccacgaagggagcgggctacgtcggggtcccgcgg

SEQ ID NO: 222487 - DNA, 50 bp, Artificial
  Synthetic oligonucleotide
attgcgtgtaaggctcggtgcgacctacggggcagggagcacagcatcca

SEQ ID NO: 222488 - DNA, 50 bp, Artificial
  Synthetic oligonucleotide
atgcctgcctcggcacgaagggcccgcacgtcaccttctcccggcacaag

SEQ ID NO: 222489 - DNA, 55 bp, Artificial
  Synthetic oligonucleotide
gcggtctcatacggatggcaggtcaacgtcacggggtttgccggcggctatacga

SEQ ID NO: 222490 - DNA, 55 bp, Artificial
  Synthetic oligonucleotide
ggcagactacctagatcgtaggcagcggcacagggtcatgaccgggaatcatgtg

SEQ ID NO: 222491 - DNA, 55 bp, Artificial
  Synthetic oligonucleotide
caacggaacaactaatcggatgaggaggtcacgatgagtcacacaaccgagcgtg

SEQ ID NO: 222492 - DNA, 55 bp, Artificial
  Synthetic oligonucleotide
ggggagcgatgttggacgtacgtccggtcttcttgggatgtgcgctgctggtcac

SEQ ID NO: 222493 - DNA, 55 bp, Artificial
  Synthetic oligonucleotide
ggtccgcctctcaatgcggttcgactatgacgcggctttctgactggtcgggagc

SEQ ID NO: 222494 - DNA, 55 bp, Artificial
  Synthetic oligonucleotide
attctgccgtcacctgtgcacaaagcgcacccaccgtccgccctgtgtcacactg

SEQ ID NO: 222495 - DNA, 55 bp, Artificial
  Synthetic oligonucleotide
gtcatcagagcgctcatctgttagcctcggtggtcggacccttcgaccgacagga

SEQ ID NO: 222496 - DNA, 60 bp, Artificial
  Synthetic oligonucleotide
ggttgtgtgacaggagcgaatctgtgggcaaagcaataaccgggcgatggatgcacacct

SEQ ID NO: 222497 - DNA, 55 bp, Artificial
  Synthetic oligonucleotide
cggaggcagggaagcatggacaggtcgacatccccgagtgtggctagccaagaca

SEQ ID NO: 222498 - DNA, 55 bp, Artificial
  Synthetic oligonucleotide
cggacgcacatgacgacatgacagactcacctcttgaggcatcggttcggagtgg

SEQ ID NO: 222499 - DNA, 55 bp, Artificial
  Synthetic oligonucleotide
cgcggttctgcccagagtgcatcgccacagcaatacgcctgatcaccaggtcgac

SEQ ID NO: 222500 - DNA, 55 bp, Artificial
  Synthetic oligonucleotide
ctcaagttggccctgcgttgtcgccaccatctcaagctggcccgcaaagcttcgc

SEQ ID NO: 222501 - DNA, 55 bp, Artificial
  Synthetic oligonucleotide
cgcatgctgatcctcaacgcaaagagacatctgactcacgcatcgtgtgctgagg

SEQ ID NO: 222502 - DNA, 55 bp, Artificial
  Synthetic oligonucleotide
ccttcttcgcgagccggagaatcgccgtacccgcgtgctccgcaggcccggcggg

SEQ ID NO: 222503 - DNA, 55 bp, Artificial
  Synthetic oligonucleotide
ctccccgcagctatgttacttccgtattcacgagcgccatgtcttagacccggca

SEQ ID NO: 222504 - DNA, 55 bp, Artificial
  Synthetic oligonucleotide
ctggtggggtgtgaccggcactgtgagcgacccagaaaagtacccaggttcgctc

SEQ ID NO: 222505 - DNA, 55 bp, Artificial
  Synthetic oligonucleotide
ctgtgagaacaccgctgcacgggcgacacatcgcgggcctaccgtggctgcatga

SEQ ID NO: 222506 - DNA, 55 bp, Artificial
  Synthetic oligonucleotide
ccggccagtgagtgacgcacgccatacgagatcgtgcgtaaatccggggcctaga

SEQ ID NO: 222507 - DNA, 56 bp, Artificial
  Synthetic oligonucleotide
cttcgttcgggctcgatcctggcgtgaacaacctggatcaaaccggacgcgagggc

SEQ ID NO: 222508 - DNA, 55 bp, Artificial
  Synthetic oligonucleotide
ccgcgcacaacgctgactcttcgggcaccgcttcttgcccgacgacaccgaacac

SEQ ID NO: 222509 - DNA, 55 bp, Artificial
  Synthetic oligonucleotide
ccgaggatcgcgtcgagtcggtcagagatggcctgggtcggtccgaggaccttct

SEQ ID NO: 222510 - DNA, 55 bp, Artificial
  Synthetic oligonucleotide
ctgttcgaggatgtctcgactttgtcggaccggggtggtaccaatggtacagacg

SEQ ID NO: 222511 - DNA, 55 bp, Artificial
  Synthetic oligonucleotide
gacaactgacactagccctaagactcttgtaccgacaactattcccgaggacgtg

SEQ ID NO: 222512 - DNA, 55 bp, Artificial
  Synthetic oligonucleotide
gacattcaggcactaatccaactgttgtcccgctttgagccatctgcaccacttc

SEQ ID NO: 222513 - DNA, 55 bp, Artificial
  Synthetic oligonucleotide
ccccacgggacagccggaggtatagactgatctatagggaggtggttcgcatgac

SEQ ID NO: 222514 - DNA, 55 bp, Artificial
  Synthetic oligonucleotide
ccagtcgttgttacgtctaccagcgtctacggtcttgcgtcggcaacgaatccgt

SEQ ID NO: 222515 - DNA, 55 bp, Artificial
  Synthetic oligonucleotide
tgttaagaacgttgtgtcgcgttaagttttacgcatggatcgtgctcggaacccg

SEQ ID NO: 222516 - DNA, 55 bp, Artificial
  Synthetic oligonucleotide
tgtcgagcggactccggcgggtggttgggccgccgtcgtggttggtcgtctccga

SEQ ID NO: 222517 - DNA, 55 bp, Artificial
  Synthetic oligonucleotide
tgtcctgagtcgaccgcaggtcacgtggtgtgcgcaaccggaacacgggcgaagt

SEQ ID NO: 222518 - DNA, 60 bp, Artificial
  Synthetic oligonucleotide
cacatcgcaggatcaggcctggtcagagtctcgtgccaagctgccatgccgcctgtcgtg

SEQ ID NO: 222519 - DNA, 55 bp, Artificial
  Synthetic oligonucleotide
acattcgattcacaaccgtccgtcgcggaccccacccgcctctcaatgatcgccg

SEQ ID NO: 222520 - DNA, 55 bp, Artificial
  Synthetic oligonucleotide
acctccttggggctgcgacggggctgcgacctgcgacgacagaggagacgctaga

SEQ ID NO: 222521 - DNA, 55 bp, Artificial
  Synthetic oligonucleotide
acctgccgtgcgcacaacagaatgtgtcaccgccgacacgcgagtcgtgaacgca

SEQ ID NO: 222522 - DNA, 55 bp, Artificial
  Synthetic oligonucleotide
acgaccttagcaacgatccgggccgtgctccaaacccgttgccggcacgcgtctg

SEQ ID NO: 222523 - DNA, 55 bp, Artificial
  Synthetic oligonucleotide
tgtcaggcggtggcgggtccatagccctgcgtgcctctgacaggtccgagaggtt

SEQ ID NO: 222524 - DNA, 55 bp, Artificial
  Synthetic oligonucleotide
ttatgtgggatggccaacgcagcgcccttcttcccgagcccgtctagcacagtta

SEQ ID NO: 222525 - DNA, 55 bp, Artificial
  Synthetic oligonucleotide
acgttcacgttcccacgacgttggtcgacctcctcgaggcgaagcgccagacctc

SEQ ID NO: 222526 - DNA, 55 bp, Artificial
  Synthetic oligonucleotide
acttggccttgacctgcagctgggctgcgacgtacgcgcaccggtaggacgtgtt

SEQ ID NO: 222527 - DNA, 53 bp, Artificial
  Synthetic oligonucleotide
aagcggacttcctttggcgtgggttccgtgccctgccgggttgttgctacacc

SEQ ID NO: 222528 - DNA, 55 bp, Artificial
  Synthetic oligonucleotide
tctgacaggtcgtcgccccatctggggtgtcagagcgtggcgggtctctgctcct

SEQ ID NO: 222529 - DNA, 60 bp, Artificial
  Synthetic oligonucleotide
gggagcggtgacatgcgacgtctgcgtgagcgactggccagggaccccgagcggggctct

SEQ ID NO: 222530 - DNA, 55 bp, Artificial
  Synthetic oligonucleotide
tctctcgcaggtcacggacggaatcccacccaatgcttatgaaaccaccctcaac

SEQ ID NO: 222531 - DNA, 55 bp, Artificial
  Synthetic oligonucleotide
gtcgcccctcaccggtcatcccacaatggtaggccgcatccgaacacctgttcga

SEQ ID NO: 222532 - DNA, 54 bp, Artificial
  Synthetic oligonucleotide
atcaccgaaaagcgggcctatcctggtacgaggaagaacttcaccagacgaggg

SEQ ID NO: 222533 - DNA, 55 bp, Artificial
  Synthetic oligonucleotide
gtcggacaaccgtttcttgggcggcatatggcggccaccgagacaacgtcctcac

SEQ ID NO: 222534 - DNA, 55 bp, Artificial
  Synthetic oligonucleotide
tttcgtccgcagaaccggtgacgggtcagtgagtgcccgcaggcgcacatctttg

SEQ ID NO: 222535 - DNA, 55 bp, Artificial
  Synthetic oligonucleotide
tacactgaatcggacattcgggctaaaccagtgtgtatggcacaacaccatcgtc

SEQ ID NO: 222536 - DNA, 55 bp, Artificial
  Synthetic oligonucleotide
tcaccgtcgagcccagtcccgagcaacagcccgtcaccgacgcacagcaccacac

SEQ ID NO: 222537 - DNA, 55 bp, Artificial
  Synthetic oligonucleotide
agctgcgtccagcacgagacgtgcaggggtcggtcgcgccaggtggtgttggtcg

SEQ ID NO: 222538 - DNA, 55 bp, Artificial
  Synthetic oligonucleotide
tcatctatgacgctagccgcgcccacccacgcccgatggccccgagagcctgcct

SEQ ID NO: 222539 - DNA, 52 bp, Artificial
  Synthetic oligonucleotide
ttcccggacattggggttgtccgcgttggggtttccccacacatcttgaccg

SEQ ID NO: 222540 - DNA, 59 bp, Artificial
  Synthetic oligonucleotide
tctgtgggcaaagcaataaccgggcgatggatgcacacctacgagataggtatgcgcta

SEQ ID NO: 222541 - DNA, 55 bp, Artificial
  Synthetic oligonucleotide
tcatgctcgagacctcaccgatgctcaccatgcgaccagcatcgagcctcccgtc

SEQ ID NO: 222542 - DNA, 55 bp, Artificial
  Synthetic oligonucleotide
tcgacccacaaacacgcgactcatgcgcccggcgacggctaccgtgaagcgtcgg

SEQ ID NO: 222543 - DNA, 55 bp, Artificial
  Synthetic oligonucleotide
agcaccgagaggctcggcgtgtgggcgctacggcgcctgccggcatcgtggtggg

SEQ ID NO: 222544 - DNA, 54 bp, Artificial
  Synthetic oligonucleotide
tgactctgcgtcacgtttgtgaccgagcgtcacggaccctgcacaccacaccgt

SEQ ID NO: 222545 - DNA, 54 bp, Artificial
  Synthetic oligonucleotide
ccgactaggccccgatcggtaactgctgctcctggcgagccagaaggtaaccag

SEQ ID NO: 222546 - DNA, 54 bp, Artificial
  Synthetic oligonucleotide
cacagctcccgcgccccaccgggtcacaacctggacccgggtcaacgcctggac

SEQ ID NO: 222547 - DNA, 54 bp, Artificial
  Synthetic oligonucleotide
tagaactgagcatcagccacttcctcttggtcgtttgactccctgaacacacgt

SEQ ID NO: 222548 - DNA, 54 bp, Artificial
  Synthetic oligonucleotide
aagccgtaagaccacctgctaggttctcctgagaatctgagatcggagatgaat

SEQ ID NO: 222549 - DNA, 54 bp, Artificial
  Synthetic oligonucleotide
agagccgctgcttgaggtgtgctggtccgaatgcccagtgcgcaatgcctgcct

SEQ ID NO: 222550 - DNA, 53 bp, Artificial
  Synthetic oligonucleotide
ctacctctcggtcaggctgagccacccaccgttcctgcggaagtcccgtttga

SEQ ID NO: 222551 - DNA, 56 bp, Artificial
  Synthetic oligonucleotide
gcacctcgcaacgggcacctcttggtcggagacacggaccaccgcacggatgcatg

SEQ ID NO: 222552 - DNA, 53 bp, Artificial
  Synthetic oligonucleotide
ctcagcctcggatcgttctcccgtctgagcgcgaccgttccactcgccgcgca

SEQ ID NO: 222553 - DNA, 53 bp, Artificial
  Synthetic oligonucleotide
tgccggatcgtgatgaagcgctttcccgggcctctggacatctggtccgagac

SEQ ID NO: 222554 - DNA, 53 bp, Artificial
  Synthetic oligonucleotide
gatctatcaggtcgcctgggaactagcccgcgcataggctcgttcggcactcc

SEQ ID NO: 222555 - DNA, 53 bp, Artificial
  Synthetic oligonucleotide
tctgcgtcacgacgcgagccagcgtcgcagaggttcgctcgaggtcatggttt

SEQ ID NO: 222556 - DNA, 53 bp, Artificial
  Synthetic oligonucleotide
ggaggtgcacgcgtttgcgatctaggttgcacgtccacaactcgacgagttca

SEQ ID NO: 222557 - DNA, 53 bp, Artificial
  Synthetic oligonucleotide
gtgcagacgtccgtcggaaacacgctcccgcagggatgcagcaacgcggactt

SEQ ID NO: 222558 - DNA, 53 bp, Artificial
  Synthetic oligonucleotide
gtccggtagttgttcttcgggctcatctcgaacttgccattgacggtgttgga

SEQ ID NO: 222559 - DNA, 52 bp, Artificial
  Synthetic oligonucleotide
cgatccccaggttcctcgcggtaccgtacccggcatgacccgtccgacgacc

SEQ ID NO: 222560 - DNA, 53 bp, Artificial
  Synthetic oligonucleotide
cacgacggagactccacaccacgacggccctcgagaacggttgtccacaggag

SEQ ID NO: 222561 - DNA, 53 bp, Artificial
  Synthetic oligonucleotide
ccccgcccctgtcgtgcggtcgtccgtggaagcgcggtcggtgacagggttcg

SEQ ID NO: 222562 - DNA, 55 bp, Artificial
  Synthetic oligonucleotide
gattgcggctctatgggatgccactaagcaaggagtgacgacgtggtccttcaac

SEQ ID NO: 222563 - DNA, 52 bp, Artificial
  Synthetic oligonucleotide
cgcccctcgcctgaatagggctcttagccttacgtggccatgctgacagggc

SEQ ID NO: 222564 - DNA, 52 bp, Artificial
  Synthetic oligonucleotide
tgttcgcaaaggctgaacccacccttcacgaaacggcaccaaaacccggtgt

SEQ ID NO: 222565 - DNA, 52 bp, Artificial
  Synthetic oligonucleotide
tctccctacggtgacgtccgacttgtcccgatcgaaggagatcccatgacta

SEQ ID NO: 222566 - DNA, 52 bp, Artificial
  Synthetic oligonucleotide
cacccgtgtctcccgtcacgtcacggggttgtgacgcgccgtcaccgatagg

SEQ ID NO: 222567 - DNA, 51 bp, Artificial
  Synthetic oligonucleotide
agaaaccgcatacgtggaattacacgcgtgtctttcggacgcgtcaagccg

SEQ ID NO: 222568 - DNA, 51 bp, Artificial
  Synthetic oligonucleotide
ggcaccgaacgagggaggcatcatgcgacgcacgtcccgtctgacacccac

SEQ ID NO: 222569 - DNA, 51 bp, Artificial
  Synthetic oligonucleotide
gtgaccggaccacgcagtttcgcgagcgtcgctgagggcccacggttggca

SEQ ID NO: 222570 - DNA, 51 bp, Artificial
  Synthetic oligonucleotide
cttcctgtggcgagcacaccgacttgcccgaggagatccgtgatgagccga

SEQ ID NO: 222571 - DNA, 51 bp, Artificial
  Synthetic oligonucleotide
ggggtatggaccagcctgagcctgacaactccgcggagaaggggtccgggt

SEQ ID NO: 222572 - DNA, 51 bp, Artificial
  Synthetic oligonucleotide
gggtctggtcctccggggtgcaggagaggggacccgcatgaccgagaaccc

SEQ ID NO: 222573 - DNA, 55 bp, Artificial
  Synthetic oligonucleotide
cagctgacgtcagcccggcaacaaccgtgagatagacggcgttacgctctgcggt

SEQ ID NO: 222574 - DNA, 50 bp, Artificial
  Synthetic oligonucleotide
agggccactgtaggtcagagcggcccgcgactcaaacatctgttcgagga

SEQ ID NO: 222575 - DNA, 50 bp, Artificial
  Synthetic oligonucleotide
agtaccgggagggacatcccccggcgaattcctgccacgagccgcgacct

SEQ ID NO: 222576 - DNA, 50 bp, Artificial
  Synthetic oligonucleotide
agtgctccaagcgcggaccagactcgagcagacgcgttcggacaacggcg

SEQ ID NO: 222577 - DNA, 50 bp, Artificial
  Synthetic oligonucleotide
atcctgagtgtgtcactgttccaccgcgagatccgggggtctcgatgcct

SEQ ID NO: 222578 - DNA, 50 bp, Artificial
  Synthetic oligonucleotide
agccaggccggagtaccccaagacttccggacgcacgtactctccgaggt

SEQ ID NO: 222579 - DNA, 50 bp, Artificial
  Synthetic oligonucleotide
agcaccgagccttgcgtccttctgacaaccccgggcatcaacggagttgt

SEQ ID NO: 222580 - DNA, 50 bp, Artificial
  Synthetic oligonucleotide
agcaccctctacggtccgcctctcaatgcggttcgactatgacgcggctt

SEQ ID NO: 222581 - DNA, 50 bp, Artificial
  Synthetic oligonucleotide
actcggcaagggttgacccggaccgccatgtgagcgctaacatcacgaca

SEQ ID NO: 222582 - DNA, 50 bp, Artificial
  Synthetic oligonucleotide
actcgagcagacgcgttcggacaacggcgatcctgtgaatcctgggctcg

SEQ ID NO: 222583 - DNA, 50 bp, Artificial
  Synthetic oligonucleotide
acggagggctcaacacctgcgtgggtctgacaagccgggtgggggtagga

SEQ ID NO: 222584 - DNA, 57 bp, Artificial
  Synthetic oligonucleotide
gccaccccgaagcgacaccatcccaaacagccgtcaaggaatccttacgagagtgcc

SEQ ID NO: 222585 - DNA, 60 bp, Artificial
  Synthetic oligonucleotide
acacagtccaactgcgcatcgctgcacctcgaaagcctgcggtccagcctgatcctgcga

SEQ ID NO: 222586 - DNA, 55 bp, Artificial
  Synthetic oligonucleotide
gtggatctcgtctcggtcatattcggacctccgctgattgttgagtatcccctct

SEQ ID NO: 222587 - DNA, 55 bp, Artificial
  Synthetic oligonucleotide
gtggcctcggtcggggcaacatcagaaccatgattttcggacgaatcttggtcga

SEQ ID NO: 222588 - DNA, 55 bp, Artificial
  Synthetic oligonucleotide
gttcatcgacacaacgttgcagccatcaacgtcacgttcatagaaccgccacgcc

SEQ ID NO: 222589 - DNA, 55 bp, Artificial
  Synthetic oligonucleotide
gtttcgatgcgtctattcaccagaaccatccagttagtcgttcttcctcgggagg

SEQ ID NO: 222590 - DNA, 55 bp, Artificial
  Synthetic oligonucleotide
taaatagcaaatcggaaaggcgattaaggtaggtgattgcgagctcattaacccc

SEQ ID NO: 222591 - DNA, 54 bp, Artificial
  Synthetic oligonucleotide
tacccgaaggggttcctgccgaggggattccgcagatctgaaacctggacgccg

SEQ ID NO: 222592 - DNA, 55 bp, Artificial
  Synthetic oligonucleotide
taccggcacgtgactcggcagagggcgctggagctgccttacatcgaagcgaacc

SEQ ID NO: 222593 - DNA, 55 bp, Artificial
  Synthetic oligonucleotide
tacctggctcgatacctgggccccaaaggtgtgcgctgcaacctagtgtccgctg

SEQ ID NO: 222594 - DNA, 55 bp, Artificial
  Synthetic oligonucleotide
tagaaaccaggaacttgcgcggtccctctgagccgaggcgcatggactgtacggc

SEQ ID NO: 222595 - DNA, 55 bp, Artificial
  Synthetic oligonucleotide
tatcccggtccacgatgtcttggtcgtcttagcgacgactttgccatccactcgc

SEQ ID NO: 222596 - DNA, 60 bp, Artificial
  Synthetic oligonucleotide
gtgagtggccaagcgcacgtcaaagagtgctgcttcgtagccgcgcagaaatggcagtgc

SEQ ID NO: 222597 - DNA, 55 bp, Artificial
  Synthetic oligonucleotide
tcctagccgcactccacactcacgaggcggccacaacggagatccgagcaactga

SEQ ID NO: 222598 - DNA, 55 bp, Artificial
  Synthetic oligonucleotide
tcctatggcggcgacagaatttactatcgacccggcttgcagtggatccgctctg

SEQ ID NO: 222599 - DNA, 55 bp, Artificial
  Synthetic oligonucleotide
tcctccttgatgagtccctcaacattgtcgcctctcactacgcctctaatgagag

SEQ ID NO: 222600 - DNA, 55 bp, Artificial
  Synthetic oligonucleotide
tgaatataaccgatacgttgagacttacggaagcgtaccgaccgaagcagacatc

SEQ ID NO: 222601 - DNA, 55 bp, Artificial
  Synthetic oligonucleotide
tgagagggcgcgctgtgactcacaccgaaatgtgcgaagtcgggatgagaggggc

SEQ ID NO: 222602 - DNA, 55 bp, Artificial
  Synthetic oligonucleotide
tgcagccagttcgaatggaccactttcaccggacggtgcaagacttgccccatgc

SEQ ID NO: 222603 - DNA, 54 bp, Artificial
  Synthetic oligonucleotide
tgcggtccggttgataacggggctagtgtcccaatcgttttgaatcgattcggg

SEQ ID NO: 222604 - DNA, 55 bp, Artificial
  Synthetic oligonucleotide
tgggtcgtgccgtggatagggtcggccgttgtggatcgacttcaggtgcgatggt

SEQ ID NO: 222605 - DNA, 55 bp, Artificial
  Synthetic oligonucleotide
tgtgatacccggctgctcgcgtgtaataggcgctgaacctttccccgtcggtacg

SEQ ID NO: 222606 - DNA, 55 bp, Artificial
  Synthetic oligonucleotide
tgtttgcatccctactcggcgccgctgcgtcaggactattctctgttcaccgcgg

SEQ ID NO: 222607 - DNA, 55 bp, Artificial
  Synthetic oligonucleotide
cggcacagtagtcgtgcccggcgggggtaacgctacacaacgcttaaaaagcatc

SEQ ID NO: 222608 - DNA, 55 bp, Artificial
  Synthetic oligonucleotide
ttctcgcaggccacccgacggtgtgttgggacgaggcgaactgctgcccggattt

SEQ ID NO: 222609 - DNA, 55 bp, Artificial
  Synthetic oligonucleotide
ttgtcccatacgcgtcatactggttagtcgctggagatccagacgtttgggactt

SEQ ID NO: 222610 - DNA, 55 bp, Artificial
  Synthetic oligonucleotide
tttcgcccggaggacggtaacagcgttaacggggtccacgagtcgcgcatctcga

SEQ ID NO: 222611 - DNA, 55 bp, Artificial
  Synthetic oligonucleotide
tttgagagcgtgattaccgatcgactacgagaggaagtgttgcgaaatgactgac

SEQ ID NO: 222612 - DNA, 55 bp, Artificial
  Synthetic oligonucleotide
gacggcttcttttcggctccatgacgcggtttcagccctcgtcggcagtggccta

SEQ ID NO: 222613 - DNA, 55 bp, Artificial
  Synthetic oligonucleotide
gagattcgaccaatctagtcgatcgatcgggccggaatagtgctctgacttggga

SEQ ID NO: 222614 - DNA, 55 bp, Artificial
  Synthetic oligonucleotide
gagcggattcactagggaacgctctgcgaccagctcacactgaaggtgcatcagg

SEQ ID NO: 222615 - DNA, 55 bp, Artificial
  Synthetic oligonucleotide
gagtggcgcccaaatcactaccggggaccacactattgtcagtcaggccgacggg

SEQ ID NO: 222616 - DNA, 55 bp, Artificial
  Synthetic oligonucleotide
gatcggcacgtacgtcaccggatccgatacctccgccaacatcctgttctctggc

SEQ ID NO: 222617 - DNA, 55 bp, Artificial
  Synthetic oligonucleotide
gatgatgcctgattgtcgtcataccaccagaaataggggtcatcagccttggggc

SEQ ID NO: 222618 - DNA, 53 bp, Artificial
  Synthetic oligonucleotide
acaaggtcggcgccggaccccgtatccagaagaggtacagaggcccgaagact

SEQ ID NO: 222619 - DNA, 54 bp, Artificial
  Synthetic oligonucleotide
gcaaagggcgaaccggtgacgttacagcttggtgtcgaaatctcctcccgaaac

SEQ ID NO: 222620 - DNA, 55 bp, Artificial
  Synthetic oligonucleotide
gcatcgctgcacctcgaaagcctgcggtccagcctgatcctgcgagaatcgctga

SEQ ID NO: 222621 - DNA, 55 bp, Artificial
  Synthetic oligonucleotide
gccaacatagccgcgcctcgaaccattgggatcttaattctcgtcatgatctccc

SEQ ID NO: 222622 - DNA, 55 bp, Artificial
  Synthetic oligonucleotide
gcccagatggcatgccccaaggagtctagcggctccgggtgtgatcctcttatcc

SEQ ID NO: 222623 - DNA, 55 bp, Artificial
  Synthetic oligonucleotide
gcccgacactcgaaggctgtattccccggaatcgcggcttgatgacacgactgcg

SEQ ID NO: 222624 - DNA, 55 bp, Artificial
  Synthetic oligonucleotide
gcccggcgcctgtgatgggacataagtcggtaggctgatggtgtgcgagcttctg

SEQ ID NO: 222625 - DNA, 55 bp, Artificial
  Synthetic oligonucleotide
gccgaatggattgggtacgaccagcaagcgtgggacctcatggctgtacgttcac

SEQ ID NO: 222626 - DNA, 53 bp, Artificial
  Synthetic oligonucleotide
gccggggaaccgaacgggctcggttgatgtgttcaacgatacggaccagggag

SEQ ID NO: 222627 - DNA, 55 bp, Artificial
  Synthetic oligonucleotide
gcgcacgtcaaagagtgctgcttcgtagccgcgcagaaatggcagtgctcggtcg

SEQ ID NO: 222628 - DNA, 55 bp, Artificial
  Synthetic oligonucleotide
gctcgcggaggttcaacgagttagctcacacgaatcaacgggtctaagggcagtc

SEQ ID NO: 222629 - DNA, 59 bp, Artificial
  Synthetic oligonucleotide
catcctacgggcaccggatcacaaagaacccgctcagcaccgcccatgcgaccctctgg

SEQ ID NO: 222630 - DNA, 55 bp, Artificial
  Synthetic oligonucleotide
gctgttctgaactcaatcgtctacgcgattatcgtcatcccgttaatgacaatgc

SEQ ID NO: 222631 - DNA, 55 bp, Artificial
  Synthetic oligonucleotide
gcttttgtaagtgtccctaactactggatgggtcaactgtacggactagggacgc

SEQ ID NO: 222632 - DNA, 55 bp, Artificial
  Synthetic oligonucleotide
ggacgcgaaagactccaccgcgcagctgaatcctcgtcaccagctctcgatacgc

SEQ ID NO: 222633 - DNA, 55 bp, Artificial
  Synthetic oligonucleotide
ggcgcgccacgaccggagtaatttgacggccacatctcctctgaccacggattcg

SEQ ID NO: 222634 - DNA, 55 bp, Artificial
  Synthetic oligonucleotide
ggctttcagcccacaattgcgagccctggggtgacctccgggtgtcataccgaca

SEQ ID NO: 222635 - DNA, 55 bp, Artificial
  Synthetic oligonucleotide
gggatcgccacctaagcgtgcatcaacgtgacgtccttcgaggcgtggataaacc

SEQ ID NO: 222636 - DNA, 54 bp, Artificial
  Synthetic oligonucleotide
ggggttctctcagttttgggagttctcagttctggcgagtcgggtagccgaacc

SEQ ID NO: 222637 - DNA, 55 bp, Artificial
  Synthetic oligonucleotide
gggtggacagtacggtatcctcaaccgtggattctacaacggaagccacaacgaa

SEQ ID NO: 222638 - DNA, 55 bp, Artificial
  Synthetic oligonucleotide
gggttcacatctgctccttgacgcattcggtgtcggatcccggctggtaggtcca

SEQ ID NO: 222639 - DNA, 55 bp, Artificial
  Synthetic oligonucleotide
ggtagtatccacctgccgacccggttagccgcaagtcgatgtagattgctggctg

SEQ ID NO: 222640 - DNA, 60 bp, Artificial
  Synthetic oligonucleotide
ctgagggatcatcaagtcaaacggctgctcacgatgactcgacatcacccggcacgagta

SEQ ID NO: 222641 - DNA, 55 bp, Artificial
  Synthetic oligonucleotide
ggtgtcgggttcatcgaagcagatggcgtgattccgctcactcggttccggtcct

SEQ ID NO: 222642 - DNA, 55 bp, Artificial
  Synthetic oligonucleotide
caccaactgcctatgcagattctcctggaaacaccagaattacagccagcgagca

SEQ ID NO: 222643 - DNA, 55 bp, Artificial
  Synthetic oligonucleotide
caacgatgataagagagagggccagtagacccacggcgacataggtgatcttacg

SEQ ID NO: 222644 - DNA, 55 bp, Artificial
  Synthetic oligonucleotide
aacctcgaactgccccgtcatggacttgtgacgtggacctcgggcaacctgtccg

SEQ ID NO: 222645 - DNA, 55 bp, Artificial
  Synthetic oligonucleotide
caacaggatcacagaatctctcgtggacgggcccttgtggccgcaacaagaccca

SEQ ID NO: 222646 - DNA, 55 bp, Artificial
  Synthetic oligonucleotide
atcgtgggccaccgaccacacgcctgaacgagtctatcgcctgcaaaccccggat

SEQ ID NO: 222647 - DNA, 55 bp, Artificial
  Synthetic oligonucleotide
aagagctgcgtacgaagagcagtgccgggtggcaccgagtgaggtcgaatcaggc

SEQ ID NO: 222648 - DNA, 55 bp, Artificial
  Synthetic oligonucleotide
atcgccgccctactcatcgtgttacgcctggtgtttagccgcaccacgtgggtgg

SEQ ID NO: 222649 - DNA, 55 bp, Artificial
  Synthetic oligonucleotide
atcaccgtgacatgcgggtcacatcgctggtggctcgaggatactcgctcgacgg

SEQ ID NO: 222650 - DNA, 55 bp, Artificial
  Synthetic oligonucleotide
agttcgaagcccaacacgcggcagccctgacacgggccgcctgaaccaatccaac

SEQ ID NO: 222651 - DNA, 60 bp, Artificial
  Synthetic oligonucleotide
acttcctcagccgcgatcacgtcgtcagattcctcaaccatgaggccgagacggtccctc

SEQ ID NO: 222652 - DNA, 54 bp, Artificial
  Synthetic oligonucleotide
agttccacccgagttcggggcgatgtccccacgtcgtgtccgtgctcacccgta

SEQ ID NO: 222653 - DNA, 55 bp, Artificial
  Synthetic oligonucleotide
agtgcaaaggtctgacgtggacttgagccgccccgactcaaccatggatggcccc

SEQ ID NO: 222654 - DNA, 55 bp, Artificial
  Synthetic oligonucleotide
aaggttcagtcgctttgaatggaagcttgaccagagcggtctgttcgaagacgct

SEQ ID NO: 222655 - DNA, 55 bp, Artificial
  Synthetic oligonucleotide
aatttgtagcctagagacgcccgaaactgtcgtgtaggcctcgaccccacgtcac

SEQ ID NO: 222656 - DNA, 55 bp, Artificial
  Synthetic oligonucleotide
acaaattccataacgctgggcaatggacacgatacaagaacaacggcgtagacgc

SEQ ID NO: 222657 - DNA, 55 bp, Artificial
  Synthetic oligonucleotide
agtctagcgatgggcccgaccagacagtctgtgtgttcacgcaaaccagacagtc

SEQ ID NO: 222658 - DNA, 55 bp, Artificial
  Synthetic oligonucleotide
aggtccaagcactggttccgtcccacacgccagccttcggcactgcggtccaagt

SEQ ID NO: 222659 - DNA, 55 bp, Artificial
  Synthetic oligonucleotide
acaagggttatgaggctgcccaagcagctatcgctaccctcaccgcgttgtccac

SEQ ID NO: 222660 - DNA, 55 bp, Artificial
  Synthetic oligonucleotide
acagaaagcgacttgactaccatctagctattggtatgggccttgcaggggcatg

SEQ ID NO: 222661 - DNA, 55 bp, Artificial
  Synthetic oligonucleotide
agccgtgctaaccgtatagcttgctccgtcgcctctgagggcaaccacctgcgca

SEQ ID NO: 222662 - DNA, 55 bp, Artificial
  Synthetic oligonucleotide
ccaataacgtggcgcctgccatgacgtcccacggtgacgcccccctgacggggga

SEQ ID NO: 222663 - DNA, 55 bp, Artificial
  Synthetic oligonucleotide
acgggtccgacggatcagtaaccattgtcaccaagcgggtgtcctgatgaggctc

SEQ ID NO: 222664 - DNA, 55 bp, Artificial
  Synthetic oligonucleotide
agcacgcccgagagatgatggctggatcgccgtacacgatggggatgaaggatcg

SEQ ID NO: 222665 - DNA, 55 bp, Artificial
  Synthetic oligonucleotide
actgtgcgccctgcaacatcggtgacactcagagcgggagtatggccactcgacg

SEQ ID NO: 222666 - DNA, 53 bp, Artificial
  Synthetic oligonucleotide
agaatcaagaccggtattagggtggtaggtcctcctctacctgacgaacggta

SEQ ID NO: 222667 - DNA, 51 bp, Artificial
  Synthetic oligonucleotide
ccgcgaaaccggtgtatcgaagttccgtcgggaacgactcggccaaataac

SEQ ID NO: 222668 - DNA, 55 bp, Artificial
  Synthetic oligonucleotide
ccgcacagcgatcctcctacagtcatcccgaccagcaagagacctgtaaggccct

SEQ ID NO: 222669 - DNA, 55 bp, Artificial
  Synthetic oligonucleotide
ccgacctggtcgccactggcatccatgacaggaaggccacgaatccgagagatga

SEQ ID NO: 222670 - DNA, 55 bp, Artificial
  Synthetic oligonucleotide
ccgaacgcccaaggcgagtacgggcaacgacagagttaccgagtctcgtcacctc

SEQ ID NO: 222671 - DNA, 55 bp, Artificial
  Synthetic oligonucleotide
cccgcgtgccggcttctaccgtaactatcgatcctggtcatgacttcgcctcatc

SEQ ID NO: 222672 - DNA, 55 bp, Artificial
  Synthetic oligonucleotide
cccctcatcgtggcgcacgctttcctcgacatcgtctctttcctgggatacgcct

SEQ ID NO: 222673 - DNA, 59 bp, Artificial
  Synthetic oligonucleotide
gcggcaaagatttccgcgcaccgtcgtgatgagctggcccgtgttgtccaggttgcggt

SEQ ID NO: 222674 - DNA, 55 bp, Artificial
  Synthetic oligonucleotide
aaaccgagacacaccactagtgacaccccactaaggtggacctgcgactggcgtg

SEQ ID NO: 222675 - DNA, 55 bp, Artificial
  Synthetic oligonucleotide
ccccaaagcacaggtccgcatgacatctggatctatgacctctcggatcctcccc

SEQ ID NO: 222676 - DNA, 55 bp, Artificial
  Synthetic oligonucleotide
cccaagcccttgggatcgtgccttgggatcgtgctgacctagacagagtagtcgg

SEQ ID NO: 222677 - DNA, 55 bp, Artificial
  Synthetic oligonucleotide
ccatcacacgttcttggagcccatatgaccgacgcccttacccctcccgccactg

SEQ ID NO: 222678 - DNA, 55 bp, Artificial
  Synthetic oligonucleotide
ccagtgaccagtaatgattcggaggctgggcgccgtttgaaccgtcgggtcacga

SEQ ID NO: 222679 - DNA, 55 bp, Artificial
  Synthetic oligonucleotide
caccgatgaaatggatcggcgtatctatcttcttaactgtgagcatcgcgacaag

SEQ ID NO: 222680 - DNA, 55 bp, Artificial
  Synthetic oligonucleotide
cacgctgtaagagccagtactttattagcgcgttctggtgtcacatacgccactt

SEQ ID NO: 222681 - DNA, 55 bp, Artificial
  Synthetic oligonucleotide
cagaacgacctagccagatgattttcagcaagtctaccatgacagcaaaggccgc

SEQ ID NO: 222682 - DNA, 55 bp, Artificial
  Synthetic oligonucleotide
catggacgccgattcggctaaactcaacgacgatatgcaccttggaagagacgat

SEQ ID NO: 222683 - DNA, 55 bp, Artificial
  Synthetic oligonucleotide
cattggttcccacaacctgagctgcatcgttttgaccctgcgtaatagagccggt

SEQ ID NO: 222684 - DNA, 60 bp, Artificial
  Synthetic oligonucleotide
gcgtaattcttataattgtcccatacgcgtcatactggttagtcgctggagatccagacg

SEQ ID NO: 222685 - DNA, 55 bp, Artificial
  Synthetic oligonucleotide
ccaggtgcgagcaacctggaaggttacctcgtcaacccatccctcaataagtgcc

SEQ ID NO: 222686 - DNA, 55 bp, Artificial
  Synthetic oligonucleotide
ccacgccccgctgtgacgtccgatgggtgaaatagaccacacctgggtgagtgtc

SEQ ID NO: 222687 - DNA, 54 bp, Artificial
  Synthetic oligonucleotide
ccgcgggaacgtcttctgctccggtatgccatcggattaggtgcgcaggtgtcc

SEQ ID NO: 222688 - DNA, 54 bp, Artificial
  Synthetic oligonucleotide
tgattcgggtagacaacggtttcaccaacgttgaaagtcatttgtgcggcccct

SEQ ID NO: 222689 - DNA, 54 bp, Artificial
  Synthetic oligonucleotide
tgtcgaggactcagttgacagtctgaattcggtagtgggttgatttgacacctt

SEQ ID NO: 222690 - DNA, 54 bp, Artificial
  Synthetic oligonucleotide
accaaccggccgtggaaacgtctgtgaggagccttgtaggagttcccaggacaa

SEQ ID NO: 222691 - DNA, 54 bp, Artificial
  Synthetic oligonucleotide
gtaacctcgaccacacgcacgaagccctcgaccccgtgacggagctggtcagac

SEQ ID NO: 222692 - DNA, 54 bp, Artificial
  Synthetic oligonucleotide
gtctgtcttctgacgttgcctcctatgtgatggcccaagctggtgccacagagt

SEQ ID NO: 222693 - DNA, 54 bp, Artificial
  Synthetic oligonucleotide
gtgcacgctgctatcggccatactgagtgtgacaccaccacggctagtgccgca

SEQ ID NO: 222694 - DNA, 54 bp, Artificial
  Synthetic oligonucleotide
gttgggagacggagccgcatgagctggggagaaggctgctattgcggtaacaac

SEQ ID NO: 222695 - DNA, 60 bp, Artificial
  Synthetic oligonucleotide
cacggtgctacccgtcatgacgcgtcatgggtgatacccctatcagcgttgatttcatgc

SEQ ID NO: 222696 - DNA, 60 bp, Artificial
  Synthetic oligonucleotide
ctcggcggcatatctggagaaaggtgcagcagagatccaacgacagctacgtggcaagaa

SEQ ID NO: 222697 - DNA, 54 bp, Artificial
  Synthetic oligonucleotide
ccccggttctgacatcgctcccccagtcatcgtgccgtgctagtgctaccggtt

SEQ ID NO: 222698 - DNA, 54 bp, Artificial
  Synthetic oligonucleotide
tggctcttgcctgatgccgtcaacccatctggggaaagaagatcgctgacgtca

SEQ ID NO: 222699 - DNA, 54 bp, Artificial
  Synthetic oligonucleotide
ttctcctccgttgagcctaggcatcccgatgcagggacgggaggtactggcagt

SEQ ID NO: 222700 - DNA, 53 bp, Artificial
  Synthetic oligonucleotide
tccgctcactcctagcacccacttaccgccaagaatggacgaccacaggtccc

SEQ ID NO: 222701 - DNA, 53 bp, Artificial
  Synthetic oligonucleotide
ctgctagttgatgctgattcgacaccagacacgctagcaggggttctctcagt

SEQ ID NO: 222702 - DNA, 53 bp, Artificial
  Synthetic oligonucleotide
tccattatgagatacctctagttccttggagtacgagtacctaggagccagtc

SEQ ID NO: 222703 - DNA, 53 bp, Artificial
  Synthetic oligonucleotide
gcgcatgtgccctggagcttctgatcgcgtgaaagattccacctcgcgcctct

SEQ ID NO: 222704 - DNA, 53 bp, Artificial
  Synthetic oligonucleotide
gcgtttaacatcgtgtaaggaagcccttggtagaccacatccaaggagcgacg

SEQ ID NO: 222705 - DNA, 53 bp, Artificial
  Synthetic oligonucleotide
accacgcgagcaacttttccggtatcagattccccctgtagaaagccgaatga

SEQ ID NO: 222706 - DNA, 53 bp, Artificial
  Synthetic oligonucleotide
cagtcgtgcatgcggccccaccgtcaaactcattcaggtatcagtgagaaccc

SEQ ID NO: 222707 - DNA, 53 bp, Artificial
  Synthetic oligonucleotide
ctcactggcccgcttccggcaatcgtcggaacaccacacccggggccgacccc

SEQ ID NO: 222708 - DNA, 53 bp, Artificial
  Synthetic oligonucleotide
agggactctggtcgatcacagcctccgtcgacgatgacacatctgactaggta

SEQ ID NO: 222709 - DNA, 53 bp, Artificial
  Synthetic oligonucleotide
gaatagctaccggcgtcaaagctcgcgagtgctctactcagctagaagcgggg

SEQ ID NO: 222710 - DNA, 53 bp, Artificial
  Synthetic oligonucleotide
atggtacggctcgcggaacgttctcttgtacggtgccctcttaggatggtccg

SEQ ID NO: 222711 - DNA, 53 bp, Artificial
  Synthetic oligonucleotide
ccccgggacaggtagggcccacgggacaagcggacaccatgacaagcggacac

SEQ ID NO: 222712 - DNA, 52 bp, Artificial
  Synthetic oligonucleotide
ttggtgtgaccttatacgagatactccctggccacatgccgtttcaggctaa

SEQ ID NO: 222713 - DNA, 52 bp, Artificial
  Synthetic oligonucleotide
tctggcgagtcgggtagccgaaccggattgcaccgacttggtcaatgactcg

SEQ ID NO: 222714 - DNA, 52 bp, Artificial
  Synthetic oligonucleotide
gcccttccgggagtccgtcgtgagattgcgaatgtctgaaccacatagtccc

SEQ ID NO: 222715 - DNA, 52 bp, Artificial
  Synthetic oligonucleotide
gccatggaatctggagccccacaagaaggctgcagacgtcagtccagtcaag

SEQ ID NO: 222716 - DNA, 52 bp, Artificial
  Synthetic oligonucleotide
tctgcggacgatcttttaggcacctcccgcgctcagacccttgtcacagccc

SEQ ID NO: 222717 - DNA, 52 bp, Artificial
  Synthetic oligonucleotide
ttttgcgcctcgacgtagtgaggctgagcactgatggcaggcgaacgaacga

SEQ ID NO: 222718 - DNA, 56 bp, Artificial
  Synthetic oligonucleotide
accgatggatcacccaccgtttctacggctggatcgactcccacaccgtcaacgag

SEQ ID NO: 222719 - DNA, 52 bp, Artificial
  Synthetic oligonucleotide
cgagaagtggtgaaccacaatggatgcctggattgacgagagtatcaggacg

SEQ ID NO: 222720 - DNA, 52 bp, Artificial
  Synthetic oligonucleotide
gaagacggctcggcagggccccgaaggtgcgctaacgtgaccgtcgtgcccc

SEQ ID NO: 222721 - DNA, 52 bp, Artificial
  Synthetic oligonucleotide
gaattcgccacaggccccctcggcttgaacgaacttaagcacttatctcgat

SEQ ID NO: 222722 - DNA, 52 bp, Artificial
  Synthetic oligonucleotide
atcgggtattgtcctcaatcactacagaactactaggaaatagggactacgg

SEQ ID NO: 222723 - DNA, 52 bp, Artificial
  Synthetic oligonucleotide
ctaacaaagcggcagttactcgctccggtacgcggtgatttctccaacgttt

SEQ ID NO: 222724 - DNA, 51 bp, Artificial
  Synthetic oligonucleotide
tctaagtaacgccaggctcgcattccttgacgttacgtgtccatgtccaat

SEQ ID NO: 222725 - DNA, 51 bp, Artificial
  Synthetic oligonucleotide
tcggggctctagcgtttctggctatgagcatcactggatatgccagagtct

SEQ ID NO: 222726 - DNA, 51 bp, Artificial
  Synthetic oligonucleotide
gtagtgtgttcgttgtcggcctaatgggtgggttgatgcccgagtggcctg

SEQ ID NO: 222727 - DNA, 51 bp, Artificial
  Synthetic oligonucleotide
gtccgtcgatggcctagcgaacgaggccacgttgggcgggttcaagaaggc

SEQ ID NO: 222728 - DNA, 51 bp, Artificial
  Synthetic oligonucleotide
gcgttcatagcctcaagaacctcgcgagtctggaaggcggttgactcgagc

SEQ ID NO: 222729 - DNA, 58 bp, Artificial
  Synthetic oligonucleotide
ctaggaatagtttcaatagtactgatggctagcagtagaggttggggacgacgtctcg

SEQ ID NO: 222730 - DNA, 51 bp, Artificial
  Synthetic oligonucleotide
accgtggtgcgaaccatacgtcactggatggccggatcctacgcatgtgcg

SEQ ID NO: 222731 - DNA, 51 bp, Artificial
  Synthetic oligonucleotide
acgaccaccagtaccgcgtacgtcagtgagaccccgacctcacggccatcg

SEQ ID NO: 222732 - DNA, 51 bp, Artificial
  Synthetic oligonucleotide
acgaccgcagaacgcaacccgcttcaacgacgtatgacgccacaaccaata

SEQ ID NO: 222733 - DNA, 51 bp, Artificial
  Synthetic oligonucleotide
cgaaggatgttgacataggggtcttcgcgggtgagctcacgccaactggtg

SEQ ID NO: 222734 - DNA, 51 bp, Artificial
  Synthetic oligonucleotide
acgagtagccgcgcacaaggccagacgcgatccgcgaacctcgccggtact

SEQ ID NO: 222735 - DNA, 51 bp, Artificial
  Synthetic oligonucleotide
gttcggatgtggaacacgctacccaagtagcggagcttttgcgtaccccgg

SEQ ID NO: 222736 - DNA, 51 bp, Artificial
  Synthetic oligonucleotide
aaataccggtcagtcaccattgcgccacgtctattccaacgacgccgcccc

SEQ ID NO: 222737 - DNA, 51 bp, Artificial
  Synthetic oligonucleotide
acggggcagatccgtaagtcccggctgggagtcctgctagtgccagatgct

SEQ ID NO: 222738 - DNA, 50 bp, Artificial
  Synthetic oligonucleotide
tctccccacgtgaacgtcgaaccctgccatagcgtcgacaccccgtcgta

SEQ ID NO: 222739 - DNA, 50 bp, Artificial
  Synthetic oligonucleotide
aatcccgggaccacccccggaacgcgacacttccgcaccccagcccaagg

SEQ ID NO: 222740 - DNA, 60 bp, Artificial
  Synthetic oligonucleotide
ggaagacatggccgatttaacagctattctatattagcaaaggcttcactggtcgcaatc

SEQ ID NO: 222741 - DNA, 50 bp, Artificial
  Synthetic oligonucleotide
aagcaggggtctgacagtgctgtctcgctcgcccgttcggatcggcacgg

SEQ ID NO: 222742 - DNA, 50 bp, Artificial
  Synthetic oligonucleotide
aagcccgcagcaccagttggaaaagcagccccgacggatagccgaagatg

SEQ ID NO: 222743 - DNA, 50 bp, Artificial
  Synthetic oligonucleotide
aagccgagagaggggagagcacgcaaagctccagaacaagccactgcgat

SEQ ID NO: 222744 - DNA, 50 bp, Artificial
  Synthetic oligonucleotide
aagcgcgtatgggaaagactgcgctcccccactgggcaacttttgttccg

SEQ ID NO: 222745 - DNA, 50 bp, Artificial
  Synthetic oligonucleotide
aaggtcggatgacgactcctgcgctatgcagggggtggcacgctgttctg

SEQ ID NO: 222746 - DNA, 50 bp, Artificial
  Synthetic oligonucleotide
tagcgtcggagcccttgacagcccggtcccctcccacgtctattcagcgg

SEQ ID NO: 222747 - DNA, 50 bp, Artificial
  Synthetic oligonucleotide
tccggggctatcctgactctaccgatcgtgcaggcaagcgctcacatcct

SEQ ID NO: 222748 - DNA, 50 bp, Artificial
  Synthetic oligonucleotide
agttgaggtatgccgatgccatcaggttcgccgatccccggattcacgcc

SEQ ID NO: 222749 - DNA, 50 bp, Artificial
  Synthetic oligonucleotide
agttactggccggtccgtcaaaacggggtgggactgcgagcatctggggg

SEQ ID NO: 222750 - DNA, 50 bp, Artificial
  Synthetic oligonucleotide
agtgcttgtcaccggctccgctcgtgacgcaaacgtcggcacatacgatg

SEQ ID NO: 222751 - DNA, 60 bp, Artificial
  Synthetic oligonucleotide
atggcagtgctcggtcgattcggatcggcctgcccaggtacattccgggccgcttgatga

SEQ ID NO: 222752 - DNA, 50 bp, Artificial
  Synthetic oligonucleotide
aaggacgcggatcgctgtaggcgatgctcgtattcgtggcggccagtgac

SEQ ID NO: 222753 - DNA, 50 bp, Artificial
  Synthetic oligonucleotide
tcaggagtgcagcggggccttcctaccgtggtgcgaaccatacgtcactg

SEQ ID NO: 222754 - DNA, 50 bp, Artificial
  Synthetic oligonucleotide
aaggcagcatgacgagatgccgaggcgacggacagacttccgcggattgg

SEQ ID NO: 222755 - DNA, 50 bp, Artificial
  Synthetic oligonucleotide
aaggtaggcctcgctgagccgaaggtcccgccgacaaagcgttgccagca

SEQ ID NO: 222756 - DNA, 50 bp, Artificial
  Synthetic oligonucleotide
aaacgagcatatgacgacccccgtcgcgagcgaccgtgaagcgtagcgcc

SEQ ID NO: 222757 - DNA, 50 bp, Artificial
  Synthetic oligonucleotide
aaagcggaggctttggtccgccgagcgcgaaccctcgttgaactcgcgag

SEQ ID NO: 222758 - DNA, 50 bp, Artificial
  Synthetic oligonucleotide
cgagcctgatgacatctcaggggttcgcaaagccctgctctgctaccgcg

SEQ ID NO: 222759 - DNA, 50 bp, Artificial
  Synthetic oligonucleotide
aaatcgtcgccggtgggttaacgctcgctgtgcattcgacaggaccgacg

SEQ ID NO: 222760 - DNA, 50 bp, Artificial
  Synthetic oligonucleotide
ccccgaggcaaccagtgctcgctcgagggtgtccatgctcgtgctaccac

SEQ ID NO: 222761 - DNA, 50 bp, Artificial
  Synthetic oligonucleotide
aacaacgcgtgaacacattgcggggtgctttcagggagcgccataaggga

SEQ ID NO: 222762 - DNA, 57 bp, Artificial
  Synthetic oligonucleotide
acccgtcaacagttcttggagggtctctcatgaccacacgtgaacgtctcccccgca

SEQ ID NO: 222763 - DNA, 50 bp, Artificial
  Synthetic oligonucleotide
aaccattgccgccacctcggatgagggtgtcccgaatcaccacgtcgtta

SEQ ID NO: 222764 - DNA, 50 bp, Artificial
  Synthetic oligonucleotide
aacccctgcatggcgatctcataccaccgagagctccaactcccccttgg

SEQ ID NO: 222765 - DNA, 50 bp, Artificial
  Synthetic oligonucleotide
aaccctgggcccaaccagcatccataccatttgccgtttgcccgtgtctc

SEQ ID NO: 222766 - DNA, 50 bp, Artificial
  Synthetic oligonucleotide
aaccgggggttcggcgcaattcaagtatccccgcataccgaggtctacgg

SEQ ID NO: 222767 - DNA, 50 bp, Artificial
  Synthetic oligonucleotide
aaccggtctgggtggcgcgtcgcatgtacatggaactccagagccatgtc

SEQ ID NO: 222768 - DNA, 50 bp, Artificial
  Synthetic oligonucleotide
tgtcgggaattttgcgcacccccttccctccggagcggtctttcagtgac

SEQ ID NO: 222769 - DNA, 50 bp, Artificial
  Synthetic oligonucleotide
cgtgcacccgagctgagcgcttgaactcacgcgtccatatgccgctgata

SEQ ID NO: 222770 - DNA, 50 bp, Artificial
  Synthetic oligonucleotide
atcgtcacattgtggagccaggaactgtgcacgccccgggaatgggagtg

SEQ ID NO: 222771 - DNA, 50 bp, Artificial
  Synthetic oligonucleotide
aacgggcagcacatcgcctaccccgcgcacagcagttggccgggaccttt

SEQ ID NO: 222772 - DNA, 50 bp, Artificial
  Synthetic oligonucleotide
tgctgttccgcacatcaaccctggttgtggcaccttcatttatgaaggcg

SEQ ID NO: 222773 - DNA, 60 bp, Artificial
  Synthetic oligonucleotide
ggatccgagggcgtctacgcctggctgaagaagcgaagaatccattatgagatacctcta

SEQ ID NO: 222774 - DNA, 50 bp, Artificial
  Synthetic oligonucleotide
aactgctcgcccgtgtcaaccgcaccatagacctcgtcgtagcgacgctc

SEQ ID NO: 222775 - DNA, 50 bp, Artificial
  Synthetic oligonucleotide
aacttgcgcggtccctctgagccgaggcgcatggactgtacggccacacc

SEQ ID NO: 222776 - DNA, 50 bp, Artificial
  Synthetic oligonucleotide
aagactgcgctcccccactgggcaacttttgttccgtggtccccctggca

SEQ ID NO: 222777 - DNA, 50 bp, Artificial
  Synthetic oligonucleotide
atcgcggctctttcgtgcgccccaccgggccactagcgtttgctcgttgc

SEQ ID NO: 222778 - DNA, 50 bp, Artificial
  Synthetic oligonucleotide
aagagtctcgccagctgcctcaacaggctcatcgggtgtcacgtcctcgc

SEQ ID NO: 222779 - DNA, 50 bp, Artificial
  Synthetic oligonucleotide
tgaccccgacgcggacatggaatgcacacggaacctcgagttgtacgggg

SEQ ID NO: 222780 - DNA, 50 bp, Artificial
  Synthetic oligonucleotide
aagatctaggctttcagcccacaattgcgagccctggggtgacctccggg

SEQ ID NO: 222781 - DNA, 50 bp, Artificial
  Synthetic oligonucleotide
atcaagtggcaagactggtaacaggagacgccactgatccggtggcccgc

SEQ ID NO: 222782 - DNA, 50 bp, Artificial
  Synthetic oligonucleotide
ctgactggcactacggcgagacaagccgccactaccagtccgacggaact

SEQ ID NO: 222783 - DNA, 50 bp, Artificial
  Synthetic oligonucleotide
acccccatacccggctcacgcgccgtacccaacccaggggtatcgaccgt

SEQ ID NO: 222784 - DNA, 60 bp, Artificial
  Synthetic oligonucleotide
ggattgcgtatgtcgcatcctgagctctcatctgagcaggtcaaacagaattcatgggcc

SEQ ID NO: 222785 - DNA, 50 bp, Artificial
  Synthetic oligonucleotide
accccgctctgaccgctgttcccggtgagtcctggtccgacttcgcacca

SEQ ID NO: 222786 - DNA, 50 bp, Artificial
  Synthetic oligonucleotide
acccctgatcccgacctcgcccagtggacagcggactggaacgattctca

SEQ ID NO: 222787 - DNA, 50 bp, Artificial
  Synthetic oligonucleotide
ggcaggaggacagatgtcagagcggattgccaacgcagccctgcgtcaga

SEQ ID NO: 222788 - DNA, 50 bp, Artificial
  Synthetic oligonucleotide
acccgctgtgcacatccattctgccttgtcggctgattgcagccccaacc

SEQ ID NO: 222789 - DNA, 50 bp, Artificial
  Synthetic oligonucleotide
acccggagtgggagtggcgtaccgccgtgactgatggaccggaggtgctc

SEQ ID NO: 222790 - DNA, 50 bp, Artificial
  Synthetic oligonucleotide
acccggctcacgcgccgtacccaacccaggggtatcgaccgttgggaccg

SEQ ID NO: 222791 - DNA, 50 bp, Artificial
  Synthetic oligonucleotide
accgaacacccacctgtctctcggtacctgacaccgggaggcccgactaa

SEQ ID NO: 222792 - DNA, 50 bp, Artificial
  Synthetic oligonucleotide
accgagcgatgaagtcgttgcgggttccccagagcacctttgcccgaaac

SEQ ID NO: 222793 - DNA, 50 bp, Artificial
  Synthetic oligonucleotide
accgatagtccggaggcagccggtgtggtcgcgtcgtagggtcgtactga

SEQ ID NO: 222794 - DNA, 50 bp, Artificial
  Synthetic oligonucleotide
accgcggcctgactcgcaggtcagccgttgggctcagccgtcgtgctccg

SEQ ID NO: 222795 - DNA, 53 bp, Artificial
  Synthetic oligonucleotide
ggcgacacgcggtggcgaaaccccctggcagaattcggaacgggacggaatcg

SEQ ID NO: 222796 - DNA, 50 bp, Artificial
  Synthetic oligonucleotide
accgcttgtgcccaccggtgttcttgtgcgtcgcaggtgtagtgcccgat

SEQ ID NO: 222797 - DNA, 50 bp, Artificial
  Synthetic oligonucleotide
agcggcaccccgaacacagattgcgctggtatcgaagcctgcccaccatt

SEQ ID NO: 222798 - DNA, 50 bp, Artificial
  Synthetic oligonucleotide
acctcaaaggcgacccaccgttcaagccgcagcggggcaatttcgggcag

SEQ ID NO: 222799 - DNA, 50 bp, Artificial
  Synthetic oligonucleotide
acctcgcatcgaggggactggctgacggcacctacgtacgcctggggtcg

SEQ ID NO: 222800 - DNA, 50 bp, Artificial
  Synthetic oligonucleotide
agcgcccgagcgagtgtgtccaacccctgcatggcgatctcataccaccg

SEQ ID NO: 222801 - DNA, 50 bp, Artificial
  Synthetic oligonucleotide
acctgcctcgcgtggtaggccaacgatgcaccgatgtcccgcagatgcca

SEQ ID NO: 222802 - DNA, 50 bp, Artificial
  Synthetic oligonucleotide
agccctgacacgggccgcctgaaccaatccaaccgtccgaaacttgcggg

SEQ ID NO: 222803 - DNA, 50 bp, Artificial
  Synthetic oligonucleotide
acgattgcccttcgtgtccctggtcgcgaaccattgcgccgaccacttgt

SEQ ID NO: 222804 - DNA, 50 bp, Artificial
  Synthetic oligonucleotide
acgcgcacggtgttctgaccgcctacccaacctcaatctgcaagaggcgt

SEQ ID NO: 222805 - DNA, 50 bp, Artificial
  Synthetic oligonucleotide
gccactccgctgttgttccgcccaccctatggcgctcacaacgacactgt

SEQ ID NO: 222806 - DNA, 60 bp, Artificial
  Synthetic oligonucleotide
ggtcgcaatcagcgtaattcttataattgtcccatacgcgtcatactggttagtcgctgg

SEQ ID NO: 222807 - DNA, 59 bp, Artificial
  Synthetic oligonucleotide
ctacaacggaagccacaacgaaatcataggaggatatcccatgaacggacgagtgattg

SEQ ID NO: 222808 - DNA, 50 bp, Artificial
  Synthetic oligonucleotide
gattgcgataagacgttcgatgtgtctgcctccgaaaagcaacacggcgt

SEQ ID NO: 222809 - DNA, 50 bp, Artificial
  Synthetic oligonucleotide
agactgctgcagcgcccgagcgagtgtgtccaacccctgcatggcgatct

SEQ ID NO: 222810 - DNA, 50 bp, Artificial
  Synthetic oligonucleotide
acttcccgcgacaaatgtgcaccggcaggggattcgctgggtttcctctg

SEQ ID NO: 222811 - DNA, 50 bp, Artificial
  Synthetic oligonucleotide
gcaacccatgtacgcgatttccgtctcggggtggccaggccggtagaact

SEQ ID NO: 222812 - DNA, 50 bp, Artificial
  Synthetic oligonucleotide
aatcgcggcttgatgacacgactgcgacattcggtccttccgcgctcacg

SEQ ID NO: 222813 - DNA, 50 bp, Artificial
  Synthetic oligonucleotide
aatgcgtagccgaacgagcgagcgacgaccaacactgtcagaggcggtgg

SEQ ID NO: 222814 - DNA, 50 bp, Artificial
  Synthetic oligonucleotide
agtgagtcatggccacacacttcccgcgacaaatgtgcaccggcagggga

SEQ ID NO: 222815 - DNA, 50 bp, Artificial
  Synthetic oligonucleotide
agggtcggggtattccccaccttagggccgttcgtgttgcctcaggtgat

SEQ ID NO: 222816 - DNA, 50 bp, Artificial
  Synthetic oligonucleotide
acaacggggtccgtaacccggccagtcgcatggtgaggacacgcgcccat

SEQ ID NO: 222817 - DNA, 50 bp, Artificial
  Synthetic oligonucleotide
agggcgtgattcgagccactggcgaagtactggggtagcgcaagggtagc

SEQ ID NO: 222818 - DNA, 60 bp, Artificial
  Synthetic oligonucleotide
ggctcggagactgacctgagactctggcgtacctatgtttctgcaagtcatggccgtaag

SEQ ID NO: 222819 - DNA, 50 bp, Artificial
  Synthetic oligonucleotide
acacaatcgggacccggccttaacgtgcgtcggtctagggtcgtcgcacc

SEQ ID NO: 222820 - DNA, 50 bp, Artificial
  Synthetic oligonucleotide
gagactggactgacgcctaccgtgcccaagttcccgtcacagtcgggtca

SEQ ID NO: 222821 - DNA, 50 bp, Artificial
  Synthetic oligonucleotide
acacagattgcgctggtatcgaagcctgcccaccattcgggcgcgggtga

SEQ ID NO: 222822 - DNA, 50 bp, Artificial
  Synthetic oligonucleotide
aggctcggagcagtcgagacgctttggcggctcatcgcgaatgagagtgt

SEQ ID NO: 222823 - DNA, 50 bp, Artificial
  Synthetic oligonucleotide
acaccacttcaagcgcgtatgggaaagactgcgctcccccactgggcaac

SEQ ID NO: 222824 - DNA, 50 bp, Artificial
  Synthetic oligonucleotide
acacccccagggagcgctcacgaaaatgactctcgggatccccgtgcact

SEQ ID NO: 222825 - DNA, 50 bp, Artificial
  Synthetic oligonucleotide
acacggtcatgagcggagtcccccgggatcatcgatatctggccagcacc

SEQ ID NO: 222826 - DNA, 50 bp, Artificial
  Synthetic oligonucleotide
aggacttcctccatatcgggggccgccaggaatccaccggtcagagccac

SEQ ID NO: 222827 - DNA, 50 bp, Artificial
  Synthetic oligonucleotide
acaggacgcatcttgtccaggctcggagcagtcgagacgctttggcggct

SEQ ID NO: 222828 - DNA, 50 bp, Artificial
  Synthetic oligonucleotide
agctggctggcactagggggactccgtatgagcagcatgtctgcgagcag

SEQ ID NO: 222829 - DNA, 55 bp, Artificial
  Synthetic oligonucleotide
acccattcgactccatgacccaccctcccattctgtaccctgtacctgttcctag

SEQ ID NO: 222830 - DNA, 50 bp, Artificial
  Synthetic oligonucleotide
acaggggcgggccggtgggaggagttgacagggcaactcgagcggctcag

SEQ ID NO: 222831 - DNA, 50 bp, Artificial
  Synthetic oligonucleotide
acatcgctctccacggtccaggccagaccatcagagctcgttgcgtagga

SEQ ID NO: 222832 - DNA, 50 bp, Artificial
  Synthetic oligonucleotide
acatggtcgacggatcatactggggtcgctccagcgatgggaaacggcga

SEQ ID NO: 222833 - DNA, 50 bp, Artificial
  Synthetic oligonucleotide
acattgcggggtgctttcagggagcgccataagggagcgcgataaggcag

SEQ ID NO: 222834 - DNA, 50 bp, Artificial
  Synthetic oligonucleotide
agcgtgagctgtcggcccctcccgtctcgtgcttgccgagtgcggagcgc

SEQ ID NO: 222835 - DNA, 50 bp, Artificial
  Synthetic oligonucleotide
gatcagcgccactgaccccgacgcggacatggaatgcacacggaacctcg

SEQ ID NO: 222836 - DNA, 50 bp, Artificial
  Synthetic oligonucleotide
gggtgaggatatcgccgtagctagccgagcccatgtcagccggggcaact

SEQ ID NO: 222837 - DNA, 50 bp, Artificial
  Synthetic oligonucleotide
accagcttggcccgcccttcgggactcaacgcagcagcgatccgtacgct

SEQ ID NO: 222838 - DNA, 50 bp, Artificial
  Synthetic oligonucleotide
acccaatcggcggcgctcacacagtccgtaccgcggcctgactcgcaggt

SEQ ID NO: 222839 - DNA, 50 bp, Artificial
  Synthetic oligonucleotide
acccaattgtggcccattgcggattccgccctgtgacagcgttcctgtcc

SEQ ID NO: 222840 - DNA, 60 bp, Artificial
  Synthetic oligonucleotide
gcggattcgtgagctccgctcggagggtcagagcatgcgtgcgattgctgccgaggtcgg

SEQ ID NO: 222841 - DNA, 60 bp, Artificial
  Synthetic oligonucleotide
gcctgcgagaggacacagcagccggctgtgctggtagggcatcccagcacgacacccctc

SEQ ID NO: 222842 - DNA, 60 bp, Artificial
  Synthetic oligonucleotide
cggtagcggtcaggatcgctctggcgtgacgagtgtgtctggcagtgcgaacagttgctc

SEQ ID NO: 222843 - DNA, 60 bp, Artificial
  Synthetic oligonucleotide
ttcaagccgattgaatcctatggcggcgacagaatttactatcgacccggcttgcagtgg

SEQ ID NO: 222844 - DNA, 60 bp, Artificial
  Synthetic oligonucleotide
ttaaacatagtaacactatccaaggcgcagccacatgatcggttgtgctctgagcatgag

SEQ ID NO: 222845 - DNA, 54 bp, Artificial
  Synthetic oligonucleotide
cccttcagggttttcgtatacacaaatcaagttttttcgtatacgctaatgcca

SEQ ID NO: 222846 - DNA, 54 bp, Artificial
  Synthetic oligonucleotide
tgttcctaggtacgttcctaatgtacctcaccggatgcagaacccgcaaccccc

SEQ ID NO: 222847 - DNA, 60 bp, Artificial
  Synthetic oligonucleotide
cactgcgagcccagctcactacgcgggtgacgttcgcccaagactcagacggattgcgta

SEQ ID NO: 222848 - DNA, 56 bp, Artificial
  Synthetic oligonucleotide
gatacctctagttccttggagtacgagtacctaggagccagtcggggtctgtcaat

SEQ ID NO: 222849 - DNA, 60 bp, Artificial
  Synthetic oligonucleotide
tggtcgcgtactctgggacaaggaagaccccctgctagttgatgctgattcgacaccaga

SEQ ID NO: 222850 - DNA, 59 bp, Artificial
  Synthetic oligonucleotide
cgacaccagacacgctagcaggggttctctcagttttgggagttctcagttctggcgag

SEQ ID NO: 222851 - DNA, 60 bp, Artificial
  Synthetic oligonucleotide
aacggcaggctgaggcacacgcggtggtctcagcgcagctcacacgggttggccagcttg

SEQ ID NO: 222852 - DNA, 60 bp, Artificial
  Synthetic oligonucleotide
tgcttgagatccttgatgggtggacagtacggtatcctcaaccgtggattctacaacgga

SEQ ID NO: 222853 - DNA, 60 bp, Artificial
  Synthetic oligonucleotide
tgctccgatctaaaccgaaggcccttcatgtgagagcatagtcgtgacgtcggcacagta

SEQ ID NO: 222854 - DNA, 60 bp, Artificial
  Synthetic oligonucleotide
gatcctgcgagaatcgctgatttttttgcgcctcgacgtagtgaggctgagcactgatgg

SEQ ID NO: 222855 - DNA, 54 bp, Artificial
  Synthetic oligonucleotide
ttggcactattagtaccacggcggagttcaacgtccggacgttaactcttggcg

SEQ ID NO: 222856 - DNA, 60 bp, Artificial
  Synthetic oligonucleotide
tgccgactcggcggcatatctggagaaaggtgcagcagagatccaacgacagctacgtgg

SEQ ID NO: 222857 - DNA, 57 bp, Artificial
  Synthetic oligonucleotide
aaaggaccaagccgagttagccgtgctaaccgtatagcttgctccgtcgcctctgag

SEQ ID NO: 222858 - DNA, 60 bp, Artificial
  Synthetic oligonucleotide
acgtctcggcgactccggagaacaccaagtcagggtctcatgagtgtgcgatagcttgag

SEQ ID NO: 222859 - DNA, 54 bp, Artificial
  Synthetic oligonucleotide
cctacacaaactgaatataaccgatacgttgagacttacggaagcgtaccgacc

SEQ ID NO: 222860 - DNA, 57 bp, Artificial
  Synthetic oligonucleotide
taccgctcgcgagcaacctcccggtccagaacccagcgactccaggccacaccgccg

SEQ ID NO: 222861 - DNA, 55 bp, Artificial
  Synthetic oligonucleotide
ccaccagaggctctgtgagacgtcggcgcccccgtccacctaccctaaagaccaa

SEQ ID NO: 222862 - DNA, 60 bp, Artificial
  Synthetic oligonucleotide
agaagtctggggcgtaccggcacgtgactcggcagagggcgctggagctgccttacatcg

SEQ ID NO: 222863 - DNA, 60 bp, Artificial
  Synthetic oligonucleotide
gcactgatggcaggcgaacgaacgactgttctgaccggcgtctactggtggctccgtatc

SEQ ID NO: 222864 - DNA, 56 bp, Artificial
  Synthetic oligonucleotide
ccaggttctcaatgtttttcctgtccggaacttggatcactaggagtggtgtagta

SEQ ID NO: 222865 - DNA, 60 bp, Artificial
  Synthetic oligonucleotide
tcacccatgggtcgcatgggtggcacgttcacgtgcacgtgctcgtcatctctaagcagg

SEQ ID NO: 222866 - DNA, 60 bp, Artificial
  Synthetic oligonucleotide
tcagggtctcatgagtgtgcgatagcttgagctgtctaccaatctggatatagctatatc

SEQ ID NO: 222867 - DNA, 60 bp, Artificial
  Synthetic oligonucleotide
tccaggtcctctccatgatcaccgatgaaatggatcggcgtatctatcttcttaactgtg

SEQ ID NO: 222868 - DNA, 57 bp, Artificial
  Synthetic oligonucleotide
gatttcatgcggtttgatgccccgggtgacaccccctgatgccccgtcacccaataa

SEQ ID NO: 222869 - DNA, 56 bp, Artificial
  Synthetic oligonucleotide
gtagaccgtctggcccgacgttaagcatggctgaagcggcccgtgcctgtggggtt

SEQ ID NO: 222870 - DNA, 54 bp, Artificial
  Synthetic oligonucleotide
gacggtagacccgtccggttgggtggtgccactgcgtgcactcaaggtcgtttt

SEQ ID NO: 222871 - DNA, 59 bp, Artificial
  Synthetic oligonucleotide
gatgccccgggtgacaccccctgatgccccgtcacccaataacgtggcgcctgccatga

SEQ ID NO: 222872 - DNA, 53 bp, Artificial
  Synthetic oligonucleotide
cccagaccccggaactatctgatttggtttagcggcgtacttccgtcataccg

SEQ ID NO: 222873 - DNA, 58 bp, Artificial
  Synthetic oligonucleotide
atagcttgagctgtctaccaatctggatatagctatatcggtcgtttgtgtctgattc

SEQ ID NO: 222874 - DNA, 55 bp, Artificial
  Synthetic oligonucleotide
ccaatggggggcatcagcaacggacgttgaacccggtgggcaagtgttactcagg

SEQ ID NO: 222875 - DNA, 57 bp, Artificial
  Synthetic oligonucleotide
gagttcgctttgctcacatggctcaaccgggtaactaactgatatggggtcttcgtc

SEQ ID NO: 222876 - DNA, 56 bp, Artificial
  Synthetic oligonucleotide
gaccacgctgaacgtgactcgcatgcttcactgcatgtatggattcgttcgagacg

SEQ ID NO: 222877 - DNA, 54 bp, Artificial
  Synthetic oligonucleotide
cagaacgtgtaggggcctccatccgaaccgcccagcggtggacctccatccccc

SEQ ID NO: 222878 - DNA, 55 bp, Artificial
  Synthetic oligonucleotide
ccgtgacaggcgacaaggcatgagaaacggggattcacccgaagtgtggtgaatc

SEQ ID NO: 222879 - DNA, 55 bp, Artificial
  Synthetic oligonucleotide
cctaggtggatactatttattcttcacctatcagggactctggtcgatcacagcc

SEQ ID NO: 222880 - DNA, 60 bp, Artificial
  Synthetic oligonucleotide
gtagagctatcttatgtgcctaggtggatactatttattcttcacctatcagggactctg

SEQ ID NO: 222881 - DNA, 55 bp, Artificial
  Synthetic oligonucleotide
gacatcggttcatctctcgacacaataggtccgaccaattcgtcaggtcaaggcc

SEQ ID NO: 222882 - DNA, 55 bp, Artificial
  Synthetic oligonucleotide
gacacgatgccgagtgaggatgagggaaacgaatactggcaccccactagcgcgg

SEQ ID NO: 222883 - DNA, 55 bp, Artificial
  Synthetic oligonucleotide
ctttgaccagtctcatggaagtctcgactccacttatatcgcggcagttgccggc

SEQ ID NO: 222884 - DNA, 55 bp, Artificial
  Synthetic oligonucleotide
cctgagctctcatctgagcaggtcaaacagaattcatgggcctcaggtgtcgggt

SEQ ID NO: 222885 - DNA, 55 bp, Artificial
  Synthetic oligonucleotide
cgaaaacatagggcatgctgggattaacctgagcaataacgagggctcctcggcg

SEQ ID NO: 222886 - DNA, 55 bp, Artificial
  Synthetic oligonucleotide
cgacgcggcaaggaccagacctagttgatcggcgactcgctgttgtcctccgaac

SEQ ID NO: 222887 - DNA, 55 bp, Artificial
  Synthetic oligonucleotide
cgcactgatcttgaggggacggtgctattggcccgcaatggtgggtccgtattgg

SEQ ID NO: 222888 - DNA, 55 bp, Artificial
  Synthetic oligonucleotide
cttagacgttgaaccgacactacggaaattcgataccacacgctgagatcactcg

SEQ ID NO: 222889 - DNA, 55 bp, Artificial
  Synthetic oligonucleotide
cgcagcgatattccaacatcgttgggctgtgtacgtgcgttgttgtctgctcggg

SEQ ID NO: 222890 - DNA, 55 bp, Artificial
  Synthetic oligonucleotide
cgccacaaccaagggaggagcactacgcatgaactcccgcaccctgctggctatc

SEQ ID NO: 222891 - DNA, 57 bp, Artificial
  Synthetic oligonucleotide
gtcggtacgtcgcgaagatgaactcgtccgtcgatggcctagcgaacgaggccacgt

SEQ ID NO: 222892 - DNA, 54 bp, Artificial
  Synthetic oligonucleotide
cgccctccgacccttgtccacacttaaccggtcaagtagcgtcccggaatgtgc

SEQ ID NO: 222893 - DNA, 55 bp, Artificial
  Synthetic oligonucleotide
ctgtcagtgggcccgactaaccttccgcgggtgccgttagaatcgtcgcaggaga

SEQ ID NO: 222894 - DNA, 55 bp, Artificial
  Synthetic oligonucleotide
cgcgacgggtggttcatagacgggcagtccaggagtcacctacgcatatccctgg

SEQ ID NO: 222895 - DNA, 55 bp, Artificial
  Synthetic oligonucleotide
cgcggtacccatacccgagatggtcacactggatgggtgacttcgcaccagtgag

SEQ ID NO: 222896 - DNA, 55 bp, Artificial
  Synthetic oligonucleotide
cgctgttagtcccttcgatgggaaagcggatgccccgcaatgggtggctggcagt

SEQ ID NO: 222897 - DNA, 55 bp, Artificial
  Synthetic oligonucleotide
ctggcgtgacgagtgtgtctggcagtgcgaacagttgctcgaccagtggcagcag

SEQ ID NO: 222898 - DNA, 55 bp, Artificial
  Synthetic oligonucleotide
cggcacagatccgctatcgggttgttgattttgtgaggggcatcgagtcgcgctg

SEQ ID NO: 222899 - DNA, 50 bp, Artificial
  Synthetic oligonucleotide
cgggtacgaacggtcaagttcttacgagtactggtggaagtaccgtttct

SEQ ID NO: 222900 - DNA, 50 bp, Artificial
  Synthetic oligonucleotide
cgggtacggactccccgaagggaaattcaccgcgtgaacgcggaaatcgg

SEQ ID NO: 222901 - DNA, 55 bp, Artificial
  Synthetic oligonucleotide
cgggtgttactccgctcagaatccgttgggcgcaagatgggagttcgtcctcccc

SEQ ID NO: 222902 - DNA, 56 bp, Artificial
  Synthetic oligonucleotide
cagcattttccgagacgttcggcgcacgcacacacccccacaagaaccgacccgcc

SEQ ID NO: 222903 - DNA, 55 bp, Artificial
  Synthetic oligonucleotide
ctgaccacgggtcaccttgatatgagcaccgaactcgacgtgggactccagatgc

SEQ ID NO: 222904 - DNA, 55 bp, Artificial
  Synthetic oligonucleotide
ctgaattcctggctcgatcgtgatcttgggctgtccgggcgcctcgtcacttgcg

SEQ ID NO: 222905 - DNA, 55 bp, Artificial
  Synthetic oligonucleotide
ctctcgccggcccaatgtgcggtttggtatgccgcagctgcaccgttcgtcattc

SEQ ID NO: 222906 - DNA, 55 bp, Artificial
  Synthetic oligonucleotide
ctctcccatccatcccacatcctcgtctccggaaagactcgttccggcaagtcat

SEQ ID NO: 222907 - DNA, 55 bp, Artificial
  Synthetic oligonucleotide
cgtggtaggaatctcccacggatggctctaccccgtactactcatcaccgcctat

SEQ ID NO: 222908 - DNA, 55 bp, Artificial
  Synthetic oligonucleotide
ctctccaggttcggagtgagtcttggagcggcaacacattgtgacacgacccgac

SEQ ID NO: 222909 - DNA, 55 bp, Artificial
  Synthetic oligonucleotide
ctaagtggtcaaaggtcggataagtccttgaccgacgaatattgcgtatgcgact

SEQ ID NO: 222910 - DNA, 55 bp, Artificial
  Synthetic oligonucleotide
ggtttcatcgacctgtctgggacgtatggctaaggctgccggacgcaagcaccac

SEQ ID NO: 222911 - DNA, 55 bp, Artificial
  Synthetic oligonucleotide
gtccccaggatcaaggctcgacagtgagtcggcaacctggctaggaagttcaact

SEQ ID NO: 222912 - DNA, 55 bp, Artificial
  Synthetic oligonucleotide
gtcgtcagattcctcaaccatgaggccgagacggtccctcaaccccgcagaccag

SEQ ID NO: 222913 - DNA, 60 bp, Artificial
  Synthetic oligonucleotide
cacgcagctgatcccgaattggtgcgtcatgtggcatgggttggcaataacatgaaccaa

SEQ ID NO: 222914 - DNA, 60 bp, Artificial
  Synthetic oligonucleotide
gtatgctaaagcattacgcagcttacgccagtatgcaggtctatagtcaaatgctgcatc

SEQ ID NO: 222915 - DNA, 55 bp, Artificial
  Synthetic oligonucleotide
cgccagggcaaagagggctacttagcgagtatcgatctactaggcgattggaagg

SEQ ID NO: 222916 - DNA, 55 bp, Artificial
  Synthetic oligonucleotide
cttaacccaagcagctaaagagctgcatttatcgcagtcagcgctctccactcaa

SEQ ID NO: 222917 - DNA, 55 bp, Artificial
  Synthetic oligonucleotide
cgccatgaggtcatacaaacgctccaagacggagggttgaaatcgcacgagagac

SEQ ID NO: 222918 - DNA, 55 bp, Artificial
  Synthetic oligonucleotide
ctgtctgcatcatgatctcagcttcatgaggttgcataatgtgagtggtgttcgc

SEQ ID NO: 222919 - DNA, 55 bp, Artificial
  Synthetic oligonucleotide
ctggtgggctagccgatttacagggtactcttgccgaatacatgcttgctgacgc

SEQ ID NO: 222920 - DNA, 55 bp, Artificial
  Synthetic oligonucleotide
ctggtaagtcgccatcagtaaaggcttcgcactctagcggtacaggaacgcccaa

SEQ ID NO: 222921 - DNA, 55 bp, Artificial
  Synthetic oligonucleotide
ctgccacttgtcgtcagctgcactaaacgagcctttaaactgtcccgaaatatca

SEQ ID NO: 222922 - DNA, 55 bp, Artificial
  Synthetic oligonucleotide
cgcctatttatggggaataaccacaccacataggctctgccttgcctaaatacca

SEQ ID NO: 222923 - DNA, 55 bp, Artificial
  Synthetic oligonucleotide
ctcttataaaggcaacattcttttaacggtgcttagcttcgcagataaaagtcag

SEQ ID NO: 222924 - DNA, 55 bp, Artificial
  Synthetic oligonucleotide
ctcttagcaaaggcgcagagctagttcgtaacgagttattagcagcgaatgtcgc

SEQ ID NO: 222925 - DNA, 60 bp, Artificial
  Synthetic oligonucleotide
gtctgcttaggctattttagccgtccttggcaaacatgattaatcctatgattatcagcg

SEQ ID NO: 222926 - DNA, 55 bp, Artificial
  Synthetic oligonucleotide
ctcacgcagtcacaagagagtaattgggtatggcgtccgcttaataatccatccc

SEQ ID NO: 222927 - DNA, 55 bp, Artificial
  Synthetic oligonucleotide
ctcacgaatcagaagccgatactataggtctggatttaatggcacaggcgggttt

SEQ ID NO: 222928 - DNA, 55 bp, Artificial
  Synthetic oligonucleotide
tagctactggcgaagatatacgtgcccactcagcgcaatttcataccaatgtaca

SEQ ID NO: 222929 - DNA, 55 bp, Artificial
  Synthetic oligonucleotide
tagccgagctggctagctgcactgtagccatagagtacgccaacatatcttgtgc

SEQ ID NO: 222930 - DNA, 55 bp, Artificial
  Synthetic oligonucleotide
tagcaggaacatatatagataacggagactagcagaccaaaaccagtgaccgcca

SEQ ID NO: 222931 - DNA, 55 bp, Artificial
  Synthetic oligonucleotide
tacttgtacgttacttcattgatcgaatatggcggttaactccgtatgagcaggt

SEQ ID NO: 222932 - DNA, 55 bp, Artificial
  Synthetic oligonucleotide
tactctatctgatattcagtatgcctatgttatcggtcggaacccaggtgttgag

SEQ ID NO: 222933 - DNA, 55 bp, Artificial
  Synthetic oligonucleotide
taccgttcctaatggcgcgatagagaatacgttgaatgcaaaagagcctcttagg

SEQ ID NO: 222934 - DNA, 55 bp, Artificial
  Synthetic oligonucleotide
taagccagcatatgccgtcattacaattcacttcgtttctttacattctggcatg

SEQ ID NO: 222935 - DNA, 55 bp, Artificial
  Synthetic oligonucleotide
taaacgattatagcgtgcactatgaaacagcgcataaatgtcgtcaatgctaggc

SEQ ID NO: 222936 - DNA, 59 bp, Artificial
  Synthetic oligonucleotide
acggctatttttccgcttgctgttcgcttatcaccgtacacgctgactgatttagttga

SEQ ID NO: 222937 - DNA, 55 bp, Artificial
  Synthetic oligonucleotide
gtttgaatctcgtaataaacgcgcagggaaatcttgactggtgaccgcagggcgc

SEQ ID NO: 222938 - DNA, 55 bp, Artificial
  Synthetic oligonucleotide
gttgcatccatactgacattaaacgttgcgacccgtaatgactctgcgtgaacat

SEQ ID NO: 222939 - DNA, 55 bp, Artificial
  Synthetic oligonucleotide
gttcaatccaacactcctggtatattaaggttgcatgacttggtagccattgcag

SEQ ID NO: 222940 - DNA, 54 bp, Artificial
  Synthetic oligonucleotide
gttaattggcggcgtttctattaccacgcgctcataataccctcttagtttacg

SEQ ID NO: 222941 - DNA, 55 bp, Artificial
  Synthetic oligonucleotide
gtgtttaagagattgatgcgatgctgccattaacgtgcgaagtgcatccatatcg

SEQ ID NO: 222942 - DNA, 55 bp, Artificial
  Synthetic oligonucleotide
gtcagcccatctagtcggcagttatggcagtcgcaatttggccaagccgtgacag

SEQ ID NO: 222943 - DNA, 55 bp, Artificial
  Synthetic oligonucleotide
gtcagagacccctgcccgtttggctacattcgcaacgtctaaatccccattgccg

SEQ ID NO: 222944 - DNA, 55 bp, Artificial
  Synthetic oligonucleotide
gtatatacggtgcacaatttagctttgcagggaattcgtccttttaaaggggatg

SEQ ID NO: 222945 - DNA, 55 bp, Artificial
  Synthetic oligonucleotide
ggttctgcacagtgctggttgtctgtcgaatccaacattaattttccacgaccac

SEQ ID NO: 222946 - DNA, 55 bp, Artificial
  Synthetic oligonucleotide
ggttaaagcctgaataacgcacatcgcgcccagaaactaatgccgatacgccacc

SEQ ID NO: 222947 - DNA, 60 bp, Artificial
  Synthetic oligonucleotide
gttttcagtggttgcagtgtctgttgcacgagggtcattgtgcttcccagttatgtctca

SEQ ID NO: 222948 - DNA, 55 bp, Artificial
  Synthetic oligonucleotide
ggtgtactaacatcacttatcaaacagctaaccgagtcagcgctttaggctaagc

SEQ ID NO: 222949 - DNA, 55 bp, Artificial
  Synthetic oligonucleotide
ttgtggggcggtattgaacgtggcaaccgatcctttgatagagcaatcattagag

SEQ ID NO: 222950 - DNA, 55 bp, Artificial
  Synthetic oligonucleotide
ttcctcaagaatatagagtgggactaatagacatggatggtcagtcaaccctctc

SEQ ID NO: 222951 - DNA, 55 bp, Artificial
  Synthetic oligonucleotide
ttcactccccatccatgaagtagaacgaaattaggaccactgcctaccgtacgtg

SEQ ID NO: 222952 - DNA, 55 bp, Artificial
  Synthetic oligonucleotide
ttagccctcaggtaaatgtgcgttataccgcgcaaaaccgttatcacgtcagtgc

SEQ ID NO: 222953 - DNA, 55 bp, Artificial
  Synthetic oligonucleotide
ttacgaatgagtggtacatgcccaattatttgctcggcgacttttgctgctagcg

SEQ ID NO: 222954 - DNA, 54 bp, Artificial
  Synthetic oligonucleotide
tgtattcgtgataatactaccggccttgtttgggaagtgaaaagcccttattcc

SEQ ID NO: 222955 - DNA, 55 bp, Artificial
  Synthetic oligonucleotide
tgctattgcgcttcaatgttacaagtatgcccagattaaaggctaccctgtaaaa

SEQ ID NO: 222956 - DNA, 55 bp, Artificial
  Synthetic oligonucleotide
tgcgtaactaacacttaagcgtgttgtacgcggcataatgtaacggccattgggg

SEQ ID NO: 222957 - DNA, 55 bp, Artificial
  Synthetic oligonucleotide
tgccgctattaatacctcggtagatacgtgggatcaaagtgcaggcgcgacgtta

SEQ ID NO: 222958 - DNA, 58 bp, Artificial
  Synthetic oligonucleotide
ccatcgtcaaagagcctttgtctgttcggtagtcgcttcactttaaaaactcgcatga

SEQ ID NO: 222959 - DNA, 55 bp, Artificial
  Synthetic oligonucleotide
tgcccttgctgacttacgtcattgtaagcgtgcaggggttattggtcatacagct

SEQ ID NO: 222960 - DNA, 55 bp, Artificial
  Synthetic oligonucleotide
tgcacttgcacgcattgatgtacgtgttgcgcctggattgatgcagttaacacgg

SEQ ID NO: 222961 - DNA, 55 bp, Artificial
  Synthetic oligonucleotide
tgatcctcagtattgggattttaagcatggcaatgaccccttggttagtgacccg

SEQ ID NO: 222962 - DNA, 55 bp, Artificial
  Synthetic oligonucleotide
tgagtaactaccaacttaaagagctcggaaacgatataaaagacgagcttcaggc

SEQ ID NO: 222963 - DNA, 55 bp, Artificial
  Synthetic oligonucleotide
tgagcattcagtgactggcgaataccatttaacctgtgagttgcatcatagactc

SEQ ID NO: 222964 - DNA, 55 bp, Artificial
  Synthetic oligonucleotide
tcgagcacttgagcgagagactcacagtattcatgatgtgcagaacctgccatgt

SEQ ID NO: 222965 - DNA, 53 bp, Artificial
  Synthetic oligonucleotide
tcaagtaacggtaagtttgaacgcgaaacggcacagttacgtcactgggtaac

SEQ ID NO: 222966 - DNA, 55 bp, Artificial
  Synthetic oligonucleotide
tcaaagttcgctcgtacactcacaaacaaaggggttctacacccactccagtcgc

SEQ ID NO: 222967 - DNA, 55 bp, Artificial
  Synthetic oligonucleotide
tattgtgccataggctcggctaagtctaacattggtcacttggaggcagctgcgg

SEQ ID NO: 222968 - DNA, 55 bp, Artificial
  Synthetic oligonucleotide
tatgtgatgtggttattccccataaataggcgataacgtagcatcaatgccaaac

SEQ ID NO: 222969 - DNA, 60 bp, Artificial
  Synthetic oligonucleotide
tacgcctcactgatgccgaattttcggagataaaaatccgagcaggtgagcttggcacat

SEQ ID NO: 222970 - DNA, 55 bp, Artificial
  Synthetic oligonucleotide
gctccgataggctattaagctgggtattatcaatatcgcgccagtgccataacag

SEQ ID NO: 222971 - DNA, 55 bp, Artificial
  Synthetic oligonucleotide
gctcagatcatttactacgagccaaaagggtcatccagagggaacttactcgggc

SEQ ID NO: 222972 - DNA, 55 bp, Artificial
  Synthetic oligonucleotide
gctaggctttcgttatcgatcgcactttccaccccgtgaatttggcccctaagtg

SEQ ID NO: 222973 - DNA, 55 bp, Artificial
  Synthetic oligonucleotide
gctaacgctaatagtattacaacgctgagtgagtctataagcacccttaatagcc

SEQ ID NO: 222974 - DNA, 55 bp, Artificial
  Synthetic oligonucleotide
gcgttgcgctgttcccaaccgacagttgtgcatcggataactgcccgtccgggct

SEQ ID NO: 222975 - DNA, 55 bp, Artificial
  Synthetic oligonucleotide
gcgtcagcgccatcctttatcaaaccagctaaccactgtaaccccggatccaagt

SEQ ID NO: 222976 - DNA, 55 bp, Artificial
  Synthetic oligonucleotide
gcgcgagtttagcgctagtcgaataaggatttaacgaaggtgaaggaggttgcat

SEQ ID NO: 222977 - DNA, 55 bp, Artificial
  Synthetic oligonucleotide
gcgcccagtgtttagagtttgtgcctacaatatgggccacttattacacgcgttt

SEQ ID NO: 222978 - DNA, 55 bp, Artificial
  Synthetic oligonucleotide
gcgcagcgctgaacctaaagtctataaccatcgtattacgattttggccacagcg

SEQ ID NO: 222979 - DNA, 55 bp, Artificial
  Synthetic oligonucleotide
gcgcactaagctgcaagatgatggaacacgcacttactctcaagcagaaaagcga

SEQ ID NO: 222980 - DNA, 57 bp, Artificial
  Synthetic oligonucleotide
cgtcgttcaaccgatggttatcgactcgggccattgtattcagagaaccaagccgta

SEQ ID NO: 222981 - DNA, 55 bp, Artificial
  Synthetic oligonucleotide
gcgcaactgattgcacatcatgcaaccgcacaatttattcaactttcagcggtaa

SEQ ID NO: 222982 - DNA, 55 bp, Artificial
  Synthetic oligonucleotide
gcgatacattacaagttgccaaaccctaccccgagcctttgttattagctgcgac

SEQ ID NO: 222983 - DNA, 55 bp, Artificial
  Synthetic oligonucleotide
gcgacgagtggccaattacctgtgagtcgtttacacaatgggtaatagaggacac

SEQ ID NO: 222984 - DNA, 55 bp, Artificial
  Synthetic oligonucleotide
gcctttattaaatgcacagcctgtatctgttgctggaacgcaatcggcgccaact

SEQ ID NO: 222985 - DNA, 55 bp, Artificial
  Synthetic oligonucleotide
gcctgactgggcaagtgtaattatacgatacacaggcgagcaaatatgtcgcgag

SEQ ID NO: 222986 - DNA, 55 bp, Artificial
  Synthetic oligonucleotide
gcctcgtggttaagcgaaataagcgttcagtattttgccgagtatgcagagcgat

SEQ ID NO: 222987 - DNA, 55 bp, Artificial
  Synthetic oligonucleotide
gcctaaatcagccgctagctgtgattgcaattcttgttgtactaagcggtcaact

SEQ ID NO: 222988 - DNA, 55 bp, Artificial
  Synthetic oligonucleotide
gccatattaagaggacatacaacggcatgaatattggcgtccttcattacacggt

SEQ ID NO: 222989 - DNA, 55 bp, Artificial
  Synthetic oligonucleotide
gccacgatggctctgtatctatactgcgatgacgagtaagacgcgtttctttgcg

SEQ ID NO: 222990 - DNA, 55 bp, Artificial
  Synthetic oligonucleotide
ggtgcagcgaaacagtgttgaaattgacgtgcagtattcgttagttcaatacgat

SEQ ID NO: 222991 - DNA, 60 bp, Artificial
  Synthetic oligonucleotide
tatcataccatcgaggatgcgggctactcgtgtgaaggattatcagagcgtggccccgta

SEQ ID NO: 222992 - DNA, 55 bp, Artificial
  Synthetic oligonucleotide
ggtgagcgaacttaatttacccatacacatattattagggcgacgaagcgtgttc

SEQ ID NO: 222993 - DNA, 55 bp, Artificial
  Synthetic oligonucleotide
ggtatatctcagccgatgcgagtgatctacaagccatgagagaagtgctacgtac

SEQ ID NO: 222994 - DNA, 53 bp, Artificial
  Synthetic oligonucleotide
gggttaagttttcgggcgatgataccttctgaaccctcacggaataaggtatc

SEQ ID NO: 222995 - DNA, 55 bp, Artificial
  Synthetic oligonucleotide
gggtcgttatctacatcggatacattaactttgccgcgcttaatttcaccaccgc

SEQ ID NO: 222996 - DNA, 55 bp, Artificial
  Synthetic oligonucleotide
gggtcatcgtcaaacggtaataatctgatgatggacgttgctctagccgctaagc

SEQ ID NO: 222997 - DNA, 55 bp, Artificial
  Synthetic oligonucleotide
gggcgtcgattttatcgttaccgtatgcgctactcagcagccaagtacccagcgc

SEQ ID NO: 222998 - DNA, 55 bp, Artificial
  Synthetic oligonucleotide
ggcttggctagacgtcgtaaaggtcgcgcaatagacggaattttgttgttagaca

SEQ ID NO: 222999 - DNA, 55 bp, Artificial
  Synthetic oligonucleotide
ggcttggcggcccaacgcctagacggtcgtgctagccgcgtatcaattcgtggtt

SEQ ID NO: 223000 - DNA, 55 bp, Artificial
  Synthetic oligonucleotide
ggctgaagttagcatggctggcccaatagagaagaaacagcctagctcgacggct

SEQ ID NO: 223001 - DNA, 55 bp, Artificial
  Synthetic oligonucleotide
ggcgttggaacttaagccattactatccggataaagacccgagcgagtattgtga

SEQ ID NO: 223002 - DNA, 53 bp, Artificial
  Synthetic oligonucleotide
gccttatttaactaaaggtcgctcaattactgggattttttgctacgcaaaac

SEQ ID NO: 223003 - DNA, 55 bp, Artificial
  Synthetic oligonucleotide
ggccttagagagcttagtatttaccaagcccgttcgcagcaacttaataagtgcg

SEQ ID NO: 223004 - DNA, 55 bp, Artificial
  Synthetic oligonucleotide
ggccgctggttactaccttcgcatacctcgctatcaggggataaagcccattatg

SEQ ID NO: 223005 - DNA, 55 bp, Artificial
  Synthetic oligonucleotide
ggcatagataacgtgcgttactcgttatttactacattagacgttgcgccagagt

SEQ ID NO: 223006 - DNA, 55 bp, Artificial
  Synthetic oligonucleotide
ggcagagcctatgtagtgtggttattccccataaataggcgataacgtagcacaa

SEQ ID NO: 223007 - DNA, 55 bp, Artificial
  Synthetic oligonucleotide
ggacaaatattgccagtcagaccattgttcggtcgacaatgatgatcgtaatgtg

SEQ ID NO: 223008 - DNA, 55 bp, Artificial
  Synthetic oligonucleotide
ggaataaccacaccacataggctctgccttgcctaaataccaaacagactgctgc

SEQ ID NO: 223009 - DNA, 55 bp, Artificial
  Synthetic oligonucleotide
gctttagccgatgaactaaccccagttgctaaacttgcaggcgcagtaaacaccc

SEQ ID NO: 223010 - DNA, 55 bp, Artificial
  Synthetic oligonucleotide
gcttgctgttcgcttatcaccgtacacgctgactgatttagttgattgatgaccc

SEQ ID NO: 223011 - DNA, 53 bp, Artificial
  Synthetic oligonucleotide
gctcgtttaaagacaacgtaataacggacgttaaatttgtggcgctgataacc

SEQ ID NO: 223012 - DNA, 55 bp, Artificial
  Synthetic oligonucleotide
actttgggcgcaacttcagaatgttgagtattaccagagcacagcacaccgcccc

SEQ ID NO: 223013 - DNA, 60 bp, Artificial
  Synthetic oligonucleotide
aggtgcttatgactttggtgaaaatccaagctgatcttgatactgagctacaaaggatta

SEQ ID NO: 223014 - DNA, 55 bp, Artificial
  Synthetic oligonucleotide
agcgcgtggcacatcaggggaggataacttagcgctgcgccatggagcgaatcag

SEQ ID NO: 223015 - DNA, 55 bp, Artificial
  Synthetic oligonucleotide
ccatactggccaatttctatttgacttagtgcggcttctagtttggtcatgcgac

SEQ ID NO: 223016 - DNA, 55 bp, Artificial
  Synthetic oligonucleotide
ccataatgtaagccacttcaacacgacttaaaccactcgcttttaaatcagagcc

SEQ ID NO: 223017 - DNA, 55 bp, Artificial
  Synthetic oligonucleotide
agcgcttggcacgcaatcatacccgtgtgaccgagcaggggcgatgccctgattt

SEQ ID NO: 223018 - DNA, 55 bp, Artificial
  Synthetic oligonucleotide
ccacgcaggtactgagcacgatacagagcgtaatttatattaccctgttgtgaat

SEQ ID NO: 223019 - DNA, 55 bp, Artificial
  Synthetic oligonucleotide
ccaccttatagctaccgacggatggtcttctttgaaggttgcaatgccgctgcga

SEQ ID NO: 223020 - DNA, 55 bp, Artificial
  Synthetic oligonucleotide
agcgtaagccgcaacaacgtcgcaatagaaacaatcctcgccgcagtaagcaagg

SEQ ID NO: 223021 - DNA, 55 bp, Artificial
  Synthetic oligonucleotide
actaccaagcccttcaggttctcttagaaagcgcctaagcttaaatagacctgct

SEQ ID NO: 223022 - DNA, 55 bp, Artificial
  Synthetic oligonucleotide
acgggtttggtactgtgcgcgcgaggtaaactcacgcctacagtcgatcaccgca

SEQ ID NO: 223023 - DNA, 55 bp, Artificial
  Synthetic oligonucleotide
ccaagagcgtgacttaccgcgcattaaagctgggcttgagcgtatgacgcgtcgc

SEQ ID NO: 223024 - DNA, 59 bp, Artificial
  Synthetic oligonucleotide
agcccatggagatcccgagaatgctcactgtttctcgaacggtcagtttctttagccca

SEQ ID NO: 223025 - DNA, 60 bp, Artificial
  Synthetic oligonucleotide
gcgagtatcagagtacattagtaccagcagacgagttaacgagcgatatgagcgcattag

SEQ ID NO: 223026 - DNA, 55 bp, Artificial
  Synthetic oligonucleotide
ccaacgtatccctaagtcttcttgcacactatcacggactgttaccatacgagat

SEQ ID NO: 223027 - DNA, 54 bp, Artificial
  Synthetic oligonucleotide
ccaaccacaaagctcaacggtttgttctagatgggttttatttagttgtccgca

SEQ ID NO: 223028 - DNA, 55 bp, Artificial
  Synthetic oligonucleotide
caggaagttactgggcaggggcgcgattcgatgtgttagagctcggcttgccgtt

SEQ ID NO: 223029 - DNA, 55 bp, Artificial
  Synthetic oligonucleotide
aggcacgagcaacggccagctgctttgccttgttaggtgtactttaacgcaaaac

SEQ ID NO: 223030 - DNA, 55 bp, Artificial
  Synthetic oligonucleotide
aatgccgtggtaaagttcattttagtagaactatgatgcactacatgagcggccc

SEQ ID NO: 223031 - DNA, 55 bp, Artificial
  Synthetic oligonucleotide
aaggtctcaggttttagcactagctcgttgctcgatactcgaaacccgtagctcg

SEQ ID NO: 223032 - DNA, 55 bp, Artificial
  Synthetic oligonucleotide
cactggacttacacagtacgtgcttatttgactataccaatattactcgactagt

SEQ ID NO: 223033 - DNA, 55 bp, Artificial
  Synthetic oligonucleotide
cactgatagggtctttcgccaacgggctgtttgggtctagcgttaccgtcggtgc

SEQ ID NO: 223034 - DNA, 55 bp, Artificial
  Synthetic oligonucleotide
accggctcacaatagtattggccctgaccatagcgacggtaggatgcgggcgaaa

SEQ ID NO: 223035 - DNA, 55 bp, Artificial
  Synthetic oligonucleotide
caacattaactatgtatgacgaccaaagtgagcgcaccaatagtgtggcatcggc

SEQ ID NO: 223036 - DNA, 60 bp, Artificial
  Synthetic oligonucleotide
atctcgtagcgagtcaacgggcgattggtgagagagcccatagatgcgccgtcggataaa

SEQ ID NO: 223037 - DNA, 55 bp, Artificial
  Synthetic oligonucleotide
cacggctgtcttcaacaaatagttgcgaactatgcgacacatcatcgttgtacca

SEQ ID NO: 223038 - DNA, 55 bp, Artificial
  Synthetic oligonucleotide
caccttaacgccgtttggctttcaaggcgaagagcgcgacttttggcaagcccaa

SEQ ID NO: 223039 - DNA, 55 bp, Artificial
  Synthetic oligonucleotide
aatatcgttagggctaatggcgcaataagcttacttttaccgtggaaggtatcgc

SEQ ID NO: 223040 - DNA, 55 bp, Artificial
  Synthetic oligonucleotide
cacaatgctctggattctgctcaaggtctggctcatttaaataatacgcagagac

SEQ ID NO: 223041 - DNA, 55 bp, Artificial
  Synthetic oligonucleotide
cacaagatgccgatagatacggctttattgaacgcattgtacctaaagagcaatt

SEQ ID NO: 223042 - DNA, 55 bp, Artificial
  Synthetic oligonucleotide
caagtgattgcctacttagcaagctcatacaatacaccgcaagcagggcctacgc

SEQ ID NO: 223043 - DNA, 55 bp, Artificial
  Synthetic oligonucleotide
aatcagagcctaattgatgcctaaagctatatagcgtcatctgggcttttctacg

SEQ ID NO: 223044 - DNA, 55 bp, Artificial
  Synthetic oligonucleotide
aatcgcttcacaatcaacccgtagtactgcccgctaaaggcagcccagtaagccg

SEQ ID NO: 223045 - DNA, 55 bp, Artificial
  Synthetic oligonucleotide
ccttcaccttggtagacatcgatgaagtcccagacggtgaaaagctatgtacacc

SEQ ID NO: 223046 - DNA, 55 bp, Artificial
  Synthetic oligonucleotide
agccgagttaatgttgagcgcgctatacgaccaagatgatccaaacacattgcca

SEQ ID NO: 223047 - DNA, 57 bp, Artificial
  Synthetic oligonucleotide
gatcattgtttttatgatgttcgggcgcattaattttagtcgatttttcgtgattaa

SEQ ID NO: 223048 - DNA, 55 bp, Artificial
  Synthetic oligonucleotide
acccagtggttatagctgcacgcactgtacttgctttgcaaacaatcacaagccg

SEQ ID NO: 223049 - DNA, 55 bp, Artificial
  Synthetic oligonucleotide
cctgaggggtgggaaacccacgagatccctaccatctccaaccctgaagatgccg

SEQ ID NO: 223050 - DNA, 55 bp, Artificial
  Synthetic oligonucleotide
cctcaaatggtgtcagaaaatagctgcgcggaaggtaacacagtcaacaggattg

SEQ ID NO: 223051 - DNA, 55 bp, Artificial
  Synthetic oligonucleotide
cctataccccatgcgacacattcacaaccgtcgaacgctttatttgttaacggcc

SEQ ID NO: 223052 - DNA, 55 bp, Artificial
  Synthetic oligonucleotide
agcaagtccactacttggtatttgcttagcataggaggaatacctcggtcgctaa

SEQ ID NO: 223053 - DNA, 55 bp, Artificial
  Synthetic oligonucleotide
acccaaacggtttataacgtacatcgcaacaacgccatcgcgtatgatcgtaacc

SEQ ID NO: 223054 - DNA, 55 bp, Artificial
  Synthetic oligonucleotide
ccggcgatcgtatgtcggcagaccgtgcttatcaaatgggcatggtgaatcgcgt

SEQ ID NO: 223055 - DNA, 55 bp, Artificial
  Synthetic oligonucleotide
atacgacgcttcagtgcctaagcatcgctatttagcacggtacttaacccatgtg

SEQ ID NO: 223056 - DNA, 55 bp, Artificial
  Synthetic oligonucleotide
agactaaatttaaatcgctaggtgatcattggccaacaacggactagtgcataaa

SEQ ID NO: 223057 - DNA, 55 bp, Artificial
  Synthetic oligonucleotide
atcaaccacccgcccaaaactcctttattaaggtacgcattgtacatattcatac

SEQ ID NO: 223058 - DNA, 59 bp, Artificial
  Synthetic oligonucleotide
aggcatattcaaatacgcctcactgatgccgaattttcggagataaaaatccgagcagg

SEQ ID NO: 223059 - DNA, 55 bp, Artificial
  Synthetic oligonucleotide
agaaggctcgatggagcagttaaagagttcacagaacgcaatacagcactcacag

SEQ ID NO: 223060 - DNA, 55 bp, Artificial
  Synthetic oligonucleotide
ccgccctaagtggcaactttgagctgagttaccacggcagtgttcagcgcttgtt

SEQ ID NO: 223061 - DNA, 55 bp, Artificial
  Synthetic oligonucleotide
acaatgtgttgcagcgcaatcttagtgcaaaccaggcatgcttagtctttcagcc

SEQ ID NO: 223062 - DNA, 55 bp, Artificial
  Synthetic oligonucleotide
ccgattctaaaggcgtaacacacacatttagcgacgcagatttaaacagcgttgt

SEQ ID NO: 223063 - DNA, 55 bp, Artificial
  Synthetic oligonucleotide
atacagagacatagacgagcaggataacgtcagcacacacgtttgcgtgtttcac

SEQ ID NO: 223064 - DNA, 55 bp, Artificial
  Synthetic oligonucleotide
ccgatgcgcagttgaatacctatgcccggaccaccagcgtagcaggtaacctcgg

SEQ ID NO: 223065 - DNA, 55 bp, Artificial
  Synthetic oligonucleotide
agaaatgccgtttattatcgcgtgtgcaaatgctaatttacccttcgttgtcgcc

SEQ ID NO: 223066 - DNA, 55 bp, Artificial
  Synthetic oligonucleotide
acaagtaactgagcaagacaaccttagtaatcgcgagcaattactcaacttttac

SEQ ID NO: 223067 - DNA, 55 bp, Artificial
  Synthetic oligonucleotide
agttagggcgataatgatgtgcaaaacagacacaataggacgcgtaagctgcgac

SEQ ID NO: 223068 - DNA, 55 bp, Artificial
  Synthetic oligonucleotide
cccttcggctacccagcgcggtgtatcaccataggttaaatcgtatatatcccat

SEQ ID NO: 223069 - DNA, 60 bp, Artificial
  Synthetic oligonucleotide
gagacttcactgagcaagcatacgaaagagcagcaagcttggtggaatcatcgcaagcaa

SEQ ID NO: 223070 - DNA, 55 bp, Artificial
  Synthetic oligonucleotide
cccgcgcaatgagcaacagactcgattacccatgacgggtagtgatttactcggc

SEQ ID NO: 223071 - DNA, 50 bp, Artificial
  Synthetic oligonucleotide
acccggaatgcgggtgttagtaccctttggtaatcaacgtaaagtagccg

SEQ ID NO: 223072 - DNA, 55 bp, Artificial
  Synthetic oligonucleotide
cccatagtcgatacctacgagcatcaagggcacccttattatgcatcagcccgtc

SEQ ID NO: 223073 - DNA, 55 bp, Artificial
  Synthetic oligonucleotide
agtatcgataaattgcgcgtattcagtgaacgacaagtgctcgttttcaactagc

SEQ ID NO: 223074 - DNA, 54 bp, Artificial
  Synthetic oligonucleotide
taggcttttgcaacgccctgtgcgtaactggggccattttcggtttggctaagc

SEQ ID NO: 223075 - DNA, 54 bp, Artificial
  Synthetic oligonucleotide
gcataatgtaacggccattgggggcgtcggcattgcgtgggtcgccttcagtga

SEQ ID NO: 223076 - DNA, 54 bp, Artificial
  Synthetic oligonucleotide
agtatcgggtatcgctacgctcgcccgacctacgcgggagacttgtgtacatta

SEQ ID NO: 223077 - DNA, 53 bp, Artificial
  Synthetic oligonucleotide
tacaaacttcgcgccgcgattaaaccgcccctagtttgaacaaattataatcc

SEQ ID NO: 223078 - DNA, 54 bp, Artificial
  Synthetic oligonucleotide
gcaacgctgcttggtgcagaagagtacggcatggctaccacagcattggtggtt

SEQ ID NO: 223079 - DNA, 54 bp, Artificial
  Synthetic oligonucleotide
gagacagaaggacgtcatcgactaccaagagcagagcatcgagagattgaagcg

SEQ ID NO: 223080 - DNA, 60 bp, Artificial
  Synthetic oligonucleotide
atgctgcatctttcaatgcgtctgtgattttcttcggtgtaatgtcatcactagctaatc

SEQ ID NO: 223081 - DNA, 54 bp, Artificial
  Synthetic oligonucleotide
ctgccagtagttttgcactagcgctcgatgctgtgcattaccaatatccatgtg

SEQ ID NO: 223082 - DNA, 54 bp, Artificial
  Synthetic oligonucleotide
agccacacactgaccgcgccttgatagccactaatggtccatgcagcgctaact

SEQ ID NO: 223083 - DNA, 54 bp, Artificial
  Synthetic oligonucleotide
tgcgcagcaacagctaggtgcgcggttatcgcaggtcactcaacataaagggga

SEQ ID NO: 223084 - DNA, 54 bp, Artificial
  Synthetic oligonucleotide
tgggcaggggcgcgattcgatgtgttagagctcggcttgccgttatggcaattt

SEQ ID NO: 223085 - DNA, 54 bp, Artificial
  Synthetic oligonucleotide
tgtgttgagcgatagactttgaggttgagatttaagcgctcagttaatgagtca

SEQ ID NO: 223086 - DNA, 54 bp, Artificial
  Synthetic oligonucleotide
cgtaattgaacgtagcgtcttcattcacgatacgactactatgcacaccgccga

SEQ ID NO: 223087 - DNA, 54 bp, Artificial
  Synthetic oligonucleotide
tgttaaagtcatcaggaatggtgaatgactgttgctctaagctttctcccgtca

SEQ ID NO: 223088 - DNA, 54 bp, Artificial
  Synthetic oligonucleotide
gtaatagactcagagcgggttggcgtatggggacactctggcggcggtagctct

SEQ ID NO: 223089 - DNA, 54 bp, Artificial
  Synthetic oligonucleotide
ttaacttacagctaaactacgactctgttgatggccagcatagtagctcgttgg

SEQ ID NO: 223090 - DNA, 52 bp, Artificial
  Synthetic oligonucleotide
ttcaaacgcttttaggtttgttagtccctgataaatatataacgggtaagtc

SEQ ID NO: 223091 - DNA, 60 bp, Artificial
  Synthetic oligonucleotide
atggcttaaaggtactgcttttagctaatgtacatcacattagacacagtgctaattgtc

SEQ ID NO: 223092 - DNA, 54 bp, Artificial
  Synthetic oligonucleotide
agcgcccgatcggcggtgtctaactgtgcatgcgtaacttgtttggtcacgtct

SEQ ID NO: 223093 - DNA, 53 bp, Artificial
  Synthetic oligonucleotide
acccgcacatccgtgcgccttacaccgatacttccaccaaatgtccagcccga

SEQ ID NO: 223094 - DNA, 53 bp, Artificial
  Synthetic oligonucleotide
ggcgggccttaagtgccgacagtgcagctacgattgcaggggctacgcttggt

SEQ ID NO: 223095 - DNA, 53 bp, Artificial
  Synthetic oligonucleotide
agcgccacatatttaaccaagtgatcgggtctgctggctcgggtaagcttggg

SEQ ID NO: 223096 - DNA, 53 bp, Artificial
  Synthetic oligonucleotide
gctgcaacagagttagcttcagaggctgagcggtcttcgtcagttaaccactt

SEQ ID NO: 223097 - DNA, 53 bp, Artificial
  Synthetic oligonucleotide
accgctgcccaactcaggatacgccaaaataattgcactggcatggccgggta

SEQ ID NO: 223098 - DNA, 53 bp, Artificial
  Synthetic oligonucleotide
taagcagtatcaaaaggtttcggcccgcgacagcttaaaaccacctgcacaag

SEQ ID NO: 223099 - DNA, 53 bp, Artificial
  Synthetic oligonucleotide
gcgtgaatctgaatacgaatttacctacataggttattggggccctatgcctt

SEQ ID NO: 223100 - DNA, 53 bp, Artificial
  Synthetic oligonucleotide
taagaggtaaccacgcaacggtagtcgctgacgcgtgcgctacaaggccatta

SEQ ID NO: 223101 - DNA, 53 bp, Artificial
  Synthetic oligonucleotide
cggcacggtaggcgggtattctccgcaagatggtttagtggccacgccgttta

SEQ ID NO: 223102 - DNA, 60 bp, Artificial
  Synthetic oligonucleotide
gctagatgtttgtgcttcttctctagcgtataagaatatgcctgttgctgcgactcctgc

SEQ ID NO: 223103 - DNA, 53 bp, Artificial
  Synthetic oligonucleotide
tgcggtgcgaataacccccggtgcaattgccccaacacgaataccaaatcggc

SEQ ID NO: 223104 - DNA, 53 bp, Artificial
  Synthetic oligonucleotide
cgctaccgatttagccagtagagtgaagtgggttaggcgtatgtgcggtaaag

SEQ ID NO: 223105 - DNA, 53 bp, Artificial
  Synthetic oligonucleotide
cgcctgcacggttatcttactacttaaatctcaatggtcctgcggttgcggta

SEQ ID NO: 223106 - DNA, 53 bp, Artificial
  Synthetic oligonucleotide
aaccggctaagcaataagtagctatcgctccattgttcgcccaaaactgtatc

SEQ ID NO: 223107 - DNA, 53 bp, Artificial
  Synthetic oligonucleotide
attaacaattcgtggtttaacaagtgcaggctcagtaactaaattaggcgtga

SEQ ID NO: 223108 - DNA, 53 bp, Artificial
  Synthetic oligonucleotide
tcgattgccagctattagcctcgagccaagaagtaagtgcaattgctcacccc

SEQ ID NO: 223109 - DNA, 53 bp, Artificial
  Synthetic oligonucleotide
cctgcgaatgacgctcagtgatgacactgtggtgcatttgcgcccgtcgggta

SEQ ID NO: 223110 - DNA, 53 bp, Artificial
  Synthetic oligonucleotide
gataggcgtcattggcaattctgcggtaatgtatatttccacaggcgatgctg

SEQ ID NO: 223111 - DNA, 53 bp, Artificial
  Synthetic oligonucleotide
aatttgtaaatggacaccctgagttttcgttactgcggccattattaagcaac

SEQ ID NO: 223112 - DNA, 53 bp, Artificial
  Synthetic oligonucleotide
aaaattggcggcatagtgaaagggttggtgatccatactgtggcgaccgaaag

SEQ ID NO: 223113 - DNA, 60 bp, Artificial
  Synthetic oligonucleotide
gactcgtttttgcttgcgcttaacttgtcgtttaagcatttctggtgcatctacagcagt

SEQ ID NO: 223114 - DNA, 53 bp, Artificial
  Synthetic oligonucleotide
tcagccgataacgcgctatgcattcccaattaacgctccccgctgggtttccc

SEQ ID NO: 223115 - DNA, 52 bp, Artificial
  Synthetic oligonucleotide
gtagatgatggctcaactcgtcaaaatcgcgaccctattgcttaccctgtac

SEQ ID NO: 223116 - DNA, 52 bp, Artificial
  Synthetic oligonucleotide
ccgagggatggcggttgactcaacggtgtcgggtgggtgtattgtttccggc

SEQ ID NO: 223117 - DNA, 52 bp, Artificial
  Synthetic oligonucleotide
tgtgacaactgtatctgccaatcctatgtccgctttactgtaaatgctggca

SEQ ID NO: 223118 - DNA, 52 bp, Artificial
  Synthetic oligonucleotide
cccaaatgaccccatacgcaagcgattaatggcgcagcgtgacagcttacca

SEQ ID NO: 223119 - DNA, 52 bp, Artificial
  Synthetic oligonucleotide
cggcttgacgcattaggatcgccagtaagttggtacactaagtattcaccgg

SEQ ID NO: 223120 - DNA, 52 bp, Artificial
  Synthetic oligonucleotide
cggcggggttcaattaccagcactttacccgattgcgcggcccaaaggggta

SEQ ID NO: 223121 - DNA, 52 bp, Artificial
  Synthetic oligonucleotide
cctgctttagccttgcccacgaggcattattacgccaatggccacgtgctaa

SEQ ID NO: 223122 - DNA, 52 bp, Artificial
  Synthetic oligonucleotide
tagccaaccaaaggccgtcaccgttaaagctgtaaacgggtaataagtcgcg

SEQ ID NO: 223123 - DNA, 52 bp, Artificial
  Synthetic oligonucleotide
ttacaacgccttaccctgcccgtgctgctatcggtgtgagtgcgctacctcg

SEQ ID NO: 223124 - DNA, 57 bp, Artificial
  Synthetic oligonucleotide
caaacaggcttgatagctatgaaaacatgggttttttagacaagctgaaagccttat

SEQ ID NO: 223125 - DNA, 52 bp, Artificial
  Synthetic oligonucleotide
agaccgtcgcaaaattgcctctgcgaactaagctgttactcggctataggca

SEQ ID NO: 223126 - DNA, 52 bp, Artificial
  Synthetic oligonucleotide
gccgctcgaagtaacgttaacgtccaggcagataatagcccgcctaacgtta

SEQ ID NO: 223127 - DNA, 52 bp, Artificial
  Synthetic oligonucleotide
ggccatcgctggtatcgcatggggtttatacagcgtgagtgggcgtggagtg

SEQ ID NO: 223128 - DNA, 52 bp, Artificial
  Synthetic oligonucleotide
gcaaatgacccataacaattaaaggcgtattttcagcgttaagtgttagcgc

SEQ ID NO: 223129 - DNA, 52 bp, Artificial
  Synthetic oligonucleotide
agaggcgctattacgccaccgtgagggtttccctgaggccaaccgcattgct

SEQ ID NO: 223130 - DNA, 52 bp, Artificial
  Synthetic oligonucleotide
taagctcactgtgccgttagtggctgtagcaatacgcaagtgttacggccta

SEQ ID NO: 223131 - DNA, 52 bp, Artificial
  Synthetic oligonucleotide
agatcaagatggctaacctcgctaatgttattcagaacacataaggggcttg

SEQ ID NO: 223132 - DNA, 52 bp, Artificial
  Synthetic oligonucleotide
ttgagccatctccggttaaatatcccacggccccaccgtaactcccacggcg

SEQ ID NO: 223133 - DNA, 51 bp, Artificial
  Synthetic oligonucleotide
aaccaagcaaggcgttggcactttggcccttacgcaagcgcacaggcttat

SEQ ID NO: 223134 - DNA, 51 bp, Artificial
  Synthetic oligonucleotide
aaacgcaagacaaggaactcaaagcgttaccgagcatgttcgaggcattag

SEQ ID NO: 223135 - DNA, 56 bp, Artificial
  Synthetic oligonucleotide
ggggttctacacccactccagtcgcaagctccttgcggggtttcgctcgtcatact

SEQ ID NO: 223136 - DNA, 60 bp, Artificial
  Synthetic oligonucleotide
caaaggattatgagcgatgatcgttaaattctttcgtcatggcacaggtggtggcagtgc

SEQ ID NO: 223137 - DNA, 51 bp, Artificial
  Synthetic oligonucleotide
acccgaccctacccattgtggctacgtgcctcgcaacacactaacccgctc

SEQ ID NO: 223138 - DNA, 51 bp, Artificial
  Synthetic oligonucleotide
acagccctgaggcagtcgcggagcattgtgttgcccttatgctcaccctca

SEQ ID NO: 223139 - DNA, 51 bp, Artificial
  Synthetic oligonucleotide
acccgcttacagccctgaggcagtcgcggagcattgtgttgcccttatgct

SEQ ID NO: 223140 - DNA, 51 bp, Artificial
  Synthetic oligonucleotide
aatgtgagctagacggccatacttggattgacggccccgccgtacaacgcg

SEQ ID NO: 223141 - DNA, 51 bp, Artificial
  Synthetic oligonucleotide
tacgctaccacaaataatgggccaccggttagtagtaccgcactaacaaat

SEQ ID NO: 223142 - DNA, 51 bp, Artificial
  Synthetic oligonucleotide
accctcgccactgggcgcggtgaagacctagcgttagcatcgccaatacgc

SEQ ID NO: 223143 - DNA, 51 bp, Artificial
  Synthetic oligonucleotide
aatgctgagtttgcagctatggccgcagatggccgcttgcaagagtgggcg

SEQ ID NO: 223144 - DNA, 51 bp, Artificial
  Synthetic oligonucleotide
tcgccgcctagttgcgggatcactaagcttgccaccaaatacgcaagcgta

SEQ ID NO: 223145 - DNA, 51 bp, Artificial
  Synthetic oligonucleotide
taaagaaacgcgttaaccaacccgggctttgtgcctcttgagtttgaccct

SEQ ID NO: 223146 - DNA, 51 bp, Artificial
  Synthetic oligonucleotide
aaggttaaaggtgcgggttacgggctgcgaggcgcggggtaaattccttgc

SEQ ID NO: 223147 - DNA, 60 bp, Artificial
  Synthetic oligonucleotide
gacagcagcgcttatagagacaacgctacaggacgacttagggaagctacacgcgtcctt

SEQ ID NO: 223148 - DNA, 51 bp, Artificial
  Synthetic oligonucleotide
aagcttggtaaaatcggcccgggtacttggtgccagcccacgcgaagcatt

SEQ ID NO: 223149 - DNA, 51 bp, Artificial
  Synthetic oligonucleotide
acgcagtgcgtctatgcgggcgtcaagcggtgggtgcgacgaaaacaactc

SEQ ID NO: 223150 - DNA, 51 bp, Artificial
  Synthetic oligonucleotide
aagcaagtgacgttgcatggctgccactaaggggctgattagcaggcccgc

SEQ ID NO: 223151 - DNA, 51 bp, Artificial
  Synthetic oligonucleotide
aagacggaggaccggacatcaagccttacgactctcggctcgcgctaagcg

SEQ ID NO: 223152 - DNA, 51 bp, Artificial
  Synthetic oligonucleotide
aactcggctacgtcatacagtggacccgctgcggtaagactgctgcgcgct

SEQ ID NO: 223153 - DNA, 51 bp, Artificial
  Synthetic oligonucleotide
tgctgataggcatcagggttggtgtcagcaagaaacgcatcgatttcctct

SEQ ID NO: 223154 - DNA, 51 bp, Artificial
  Synthetic oligonucleotide
gcgggttacgggctgcgaggcgcggggtaaattccttgctacgattaggca

SEQ ID NO: 223155 - DNA, 51 bp, Artificial
  Synthetic oligonucleotide
agctgcgagccactggcgaacgcgaagtgtctagccatttggtgggtgagt

SEQ ID NO: 223156 - DNA, 51 bp, Artificial
  Synthetic oligonucleotide
gaccaactccctggggccgctcctaaatcaacaactgtcatcgctgggcgc

SEQ ID NO: 223157 - DNA, 51 bp, Artificial
  Synthetic oligonucleotide
cagcgctcaatgctgagtttgcagctatggccgcagatggccgcttgcaag

SEQ ID NO: 223158 - DNA, 60 bp, Artificial
  Synthetic oligonucleotide
gaagcaaatgcggtgtatgagtatacgaccgctgaagacttttgccattacctcgcttca

SEQ ID NO: 223159 - DNA, 51 bp, Artificial
  Synthetic oligonucleotide
ctgcaaaagatatactgcatggagccattgggcgcgggcctatcgcgggta

SEQ ID NO: 223160 - DNA, 51 bp, Artificial
  Synthetic oligonucleotide
catggagccattgggcgcgggcctatcgcgggtatcacatcaggtgcggca

SEQ ID NO: 223161 - DNA, 51 bp, Artificial
  Synthetic oligonucleotide
ccaagcttacaacgcagggcgcgaggggcaaatacacgcgcttaaagccac

SEQ ID NO: 223162 - DNA, 51 bp, Artificial
  Synthetic oligonucleotide
ccaagggctgattctacgcgcttaatagccgcactggcggttgctgtgcgc

SEQ ID NO: 223163 - DNA, 51 bp, Artificial
  Synthetic oligonucleotide
gacggaaaatatgcgatgcttaccgcctattgcgccagggacggtatgtat

SEQ ID NO: 223164 - DNA, 51 bp, Artificial
  Synthetic oligonucleotide
ccactggcacgcgctgaggcactgctgctagtaggtgcaggactcgcatta

SEQ ID NO: 223165 - DNA, 51 bp, Artificial
  Synthetic oligonucleotide
ctacattttgatgttcggtcataaaatacttcctcgtcaatctgaggccat

SEQ ID NO: 223166 - DNA, 51 bp, Artificial
  Synthetic oligonucleotide
atgcagtctagcgtttggcctttgtcggttacttggcgcggctgtgttgcg

SEQ ID NO: 223167 - DNA, 51 bp, Artificial
  Synthetic oligonucleotide
agcgccaccgtactagccaatggcacgtggtcaatccctgtaccgctagca

SEQ ID NO: 223168 - DNA, 51 bp, Artificial
  Synthetic oligonucleotide
cccgcacgaacttcaagtgcgtcggttgcataccattggaagcccacgcga

SEQ ID NO: 223169 - DNA, 60 bp, Artificial
  Synthetic oligonucleotide
agccttattgcaccgatgatctaggtggtcttgtcattcgtccacgaaagacagccgtca

SEQ ID NO: 223170 - DNA, 51 bp, Artificial
  Synthetic oligonucleotide
atagggcgcaagaggttgctaaaacgggcgtgggcagtgtagccgtggtgc

SEQ ID NO: 223171 - DNA, 51 bp, Artificial
  Synthetic oligonucleotide
ccttcactaacatttactaatacgactcctacgaatatcgtaagtgcgtaa

SEQ ID NO: 223172 - DNA, 51 bp, Artificial
  Synthetic oligonucleotide
cctgcggttaggagcacagggcgcattcgcaccgtacccgctgcaacaagc

SEQ ID NO: 223173 - DNA, 51 bp, Artificial
  Synthetic oligonucleotide
atagctgacgatagttaccaatgcaggtgtccatggggtcgcgaagtaggc

SEQ ID NO: 223174 - DNA, 51 bp, Artificial
  Synthetic oligonucleotide
ccggttggccaatggtccgcgaagccctgcgtaacatgggcaaagccaagc

SEQ ID NO: 223175 - DNA, 51 bp, Artificial
  Synthetic oligonucleotide
gcatgggtgccgtgccccatcccaaatacgcgtaagtgagtgagctgctta

SEQ ID NO: 223176 - DNA, 51 bp, Artificial
  Synthetic oligonucleotide
agtgacggcacgttactggcaggcgacccgcgtgaactaaccgcgccacgc

SEQ ID NO: 223177 - DNA, 51 bp, Artificial
  Synthetic oligonucleotide
agcgaacccgaaaataacgcaggggcaaacgccatgactaagcctgcgcta

SEQ ID NO: 223178 - DNA, 51 bp, Artificial
  Synthetic oligonucleotide
agtcactcgggcaagcttcgagcgtttttgcactggggcgtgtaaagccta

SEQ ID NO: 223179 - DNA, 50 bp, Artificial
  Synthetic oligonucleotide
atgcgctgcaaagagttacgcattgaaggccaagttccctcccccacgcc

SEQ ID NO: 223180 - DNA, 59 bp, Artificial
  Synthetic oligonucleotide
cacgaccattggcgtaccgaggtatggacgaaagaagcttatgagctaaattatctagc

SEQ ID NO: 223181 - DNA, 50 bp, Artificial
  Synthetic oligonucleotide
atcgcggtgagtgggacaagagcgcaaatggctcgtttgaagcccgtggc

SEQ ID NO: 223182 - DNA, 50 bp, Artificial
  Synthetic oligonucleotide
atattcaccgagcggtggagtgggcggggcaacatgacttgcccgtagtg

SEQ ID NO: 223183 - DNA, 50 bp, Artificial
  Synthetic oligonucleotide
atgcgggcagttctacgggcggcttgtggcaaatgcgcaatgagaaggtc

SEQ ID NO: 223184 - DNA, 50 bp, Artificial
  Synthetic oligonucleotide
acaggcaaatgggtatcggcctggggtccttagcagagggtacggcggta

SEQ ID NO: 223185 - DNA, 50 bp, Artificial
  Synthetic oligonucleotide
atctacgcagcccggattctccctcgcaaaaagtgggcggagcagctctt

SEQ ID NO: 223186 - DNA, 50 bp, Artificial
  Synthetic oligonucleotide
accaagccctgcgtcacttaaacgcgtgtatgcgcccagagccaccacaa

SEQ ID NO: 223187 - DNA, 50 bp, Artificial
  Synthetic oligonucleotide
atctctggcgctttcacaaaagcaaccgcccgggatgggttacaggggca

SEQ ID NO: 223188 - DNA, 50 bp, Artificial
  Synthetic oligonucleotide
attgtcatgcgatgcctgtggtagaagtaccgcctgagtgctttaaaccg

SEQ ID NO: 223189 - DNA, 50 bp, Artificial
  Synthetic oligonucleotide
caagcggggcgggaaaacttaacgcgcctagcagttcgcggcaggttaaa

SEQ ID NO: 223190 - DNA, 50 bp, Artificial
  Synthetic oligonucleotide
aatcgagcgcgggttctggcaaaacgaatagcagcgcaccagtcagttca

SEQ ID NO: 223191 - DNA, 54 bp, Artificial
  Synthetic oligonucleotide
ccgtgaaaccaagccaaatttccctatctctgaaagtgatttaacacgaatttc

SEQ ID NO: 223192 - DNA, 50 bp, Artificial
  Synthetic oligonucleotide
atataggttcgccaccggacaagcgttcacgggctgtgggcgaagagagg

SEQ ID NO: 223193 - DNA, 50 bp, Artificial
  Synthetic oligonucleotide
aaaatcggcccgggtacttggtgccagcccacgcgaagcatttatgcgta

SEQ ID NO: 223194 - DNA, 50 bp, Artificial
  Synthetic oligonucleotide
ttggtaaagactatctccctgtgaatattggcatcgcactaaggcatcta

SEQ ID NO: 223195 - DNA, 50 bp, Artificial
  Synthetic oligonucleotide
ttgcgtgctcgcgtgccttcgtcttgccatgcacctaaacgctcacctgt

SEQ ID NO: 223196 - DNA, 50 bp, Artificial
  Synthetic oligonucleotide
aaagcgtcacttcaaagaatctttaggcgggtagtcacatggccagttac

SEQ ID NO: 223197 - DNA, 50 bp, Artificial
  Synthetic oligonucleotide
ccgggcggtactttgcaagtgcgctggagtggtgaaggtcatccggtacg

SEQ ID NO: 223198 - DNA, 50 bp, Artificial
  Synthetic oligonucleotide
ccgccttcccccgtgttcatccaacaaccggctaattttgcccccttcga

SEQ ID NO: 223199 - DNA, 50 bp, Artificial
  Synthetic oligonucleotide
aaccccagtaacggtggcatttacccggttgcgtcgccgcgtaggcattt

SEQ ID NO: 223200 - DNA, 50 bp, Artificial
  Synthetic oligonucleotide
ttacgggcaagccctctaagtgtgccaagcacgtactgcccagcaagcgc

SEQ ID NO: 223201 - DNA, 50 bp, Artificial
  Synthetic oligonucleotide
cgcctaaagctccttactttgcgcccggaaacccaagttggcgccacgat

SEQ ID NO: 223202 - DNA, 60 bp, Artificial
  Synthetic oligonucleotide
tgcctagacatagcgatgaggtgacgtatgagtaatgcgacgagtttggtttacaaggag

SEQ ID NO: 223203 - DNA, 50 bp, Artificial
  Synthetic oligonucleotide
ccgcctggctctgaacgcccataaagagcggagcctgggccctttagtac

SEQ ID NO: 223204 - DNA, 50 bp, Artificial
  Synthetic oligonucleotide
cggcctattcctgagcattctgggcacgcaccttgtggcgtattcggcga

SEQ ID NO: 223205 - DNA, 50 bp, Artificial
  Synthetic oligonucleotide
cccatgcgatccactgggcaagcacggagcaaagtgcgataccggctata

SEQ ID NO: 223206 - DNA, 50 bp, Artificial
  Synthetic oligonucleotide
cccacgccggtgcgcgctaatgcttctgcagtccagctgcctacgccacc

SEQ ID NO: 223207 - DNA, 50 bp, Artificial
  Synthetic oligonucleotide
cgttgttggcatagcaacgggggcaggtggctcttggccctcaacgtata

SEQ ID NO: 223208 - DNA, 50 bp, Artificial
  Synthetic oligonucleotide
aacggtcagtggggtgcagtttgctcaacctagggactcagaaggggccg

SEQ ID NO: 223209 - DNA, 50 bp, Artificial
  Synthetic oligonucleotide
aacgtggcaacccgccttaagcgatgctcccagtgcagcacactttagcg

SEQ ID NO: 223210 - DNA, 50 bp, Artificial
  Synthetic oligonucleotide
ctacttatttagatctcgatacttataaagtaggacgcattcgcacccct

SEQ ID NO: 223211 - DNA, 50 bp, Artificial
  Synthetic oligonucleotide
tgccgttatcgcatgttgcaacccttaccgcagggcaaagcccgtcaacg

SEQ ID NO: 223212 - DNA, 50 bp, Artificial
  Synthetic oligonucleotide
aagcagagggggaaaccgcgcgcagttcattgacatggtgcaacgctgtg

SEQ ID NO: 223213 - DNA, 60 bp, Artificial
  Synthetic oligonucleotide
tgcatgttacttgaagagcctcccttaactcagcgagcgaataaggtagcgcgtggagta

SEQ ID NO: 223214 - DNA, 50 bp, Artificial
  Synthetic oligonucleotide
ctgggcgacgttctttacgaggaccggtacgcttatcaccgcgtgcgctg

SEQ ID NO: 223215 - DNA, 50 bp, Artificial
  Synthetic oligonucleotide
ctgttttagagcacctctcgcttttcctcaacgccctgtttagcaacaag

SEQ ID NO: 223216 - DNA, 50 bp, Artificial
  Synthetic oligonucleotide
cacgtgccaactcaagtgctttaggccctggggttgcatcgcctgaccat

SEQ ID NO: 223217 - DNA, 50 bp, Artificial
  Synthetic oligonucleotide
caccgctacaggcaaacgcgcaagctgtgatacatcgcttgaccagcgct

SEQ ID NO: 223218 - DNA, 50 bp, Artificial
  Synthetic oligonucleotide
tgagcgtgtcactacgccctcaagctgaaactcatcgcaggaggttagtt

SEQ ID NO: 223219 - DNA, 50 bp, Artificial
  Synthetic oligonucleotide
gtccaatggtgaatgtggtacgactgagcccacagatccaactgagccta

SEQ ID NO: 223220 - DNA, 50 bp, Artificial
  Synthetic oligonucleotide
agctaagtaagctaaggcgccacgccacaccaaattcgcagccgcgtccc

SEQ ID NO: 223221 - DNA, 50 bp, Artificial
  Synthetic oligonucleotide
actaccgccttcgcgttgctccccatgcgcatcaacttggcaccgcagaa

SEQ ID NO: 223222 - DNA, 50 bp, Artificial
  Synthetic oligonucleotide
actcgccgcggtgtgcttgttacccgcctgtggtatatacggggcctcga

SEQ ID NO: 223223 - DNA, 50 bp, Artificial
  Synthetic oligonucleotide
agcgcctaatacgttaattggcacaggggcattgactcacattattgctc

SEQ ID NO: 223224 - DNA, 54 bp, Artificial
  Synthetic oligonucleotide
ccgttgaccgaaagccatcaaaattagtaagctactaactacagtaaacataaa

SEQ ID NO: 223225 - DNA, 50 bp, Artificial
  Synthetic oligonucleotide
gctgccgttggcttgccatgctgccaatcgccgccctctactgcgctacc

SEQ ID NO: 223226 - DNA, 50 bp, Artificial
  Synthetic oligonucleotide
gtaattttgcccacgccggtgcgcgctaatgcttctgcagtccagctgcc

SEQ ID NO: 223227 - DNA, 50 bp, Artificial
  Synthetic oligonucleotide
gctgcttcaagtgcgctcacgccagtcgggtagctaaagtcgccttgtgc

SEQ ID NO: 223228 - DNA, 50 bp, Artificial
  Synthetic oligonucleotide
ggttgctaaaacgggcgtgggcagtgtagccgtggtgcgtgctattaccg

SEQ ID NO: 223229 - DNA, 50 bp, Artificial
  Synthetic oligonucleotide
agcgcccggcacttgtgagccatttggctgcacgccttgaccagtaatat

SEQ ID NO: 223230 - DNA, 50 bp, Artificial
  Synthetic oligonucleotide
agcgatagctcaagggtcagcaagtgcgccaatggcacagcctacccctg

SEQ ID NO: 223231 - DNA, 50 bp, Artificial
  Synthetic oligonucleotide
agacggtgaggtgagtgtagtgacgggctcacccggtggcaccacgatta

SEQ ID NO: 223232 - DNA, 50 bp, Artificial
  Synthetic oligonucleotide
agccttcgccaaaggttacccatgggcgggtgctgtaaatcgcttcaccg

SEQ ID NO: 223233 - DNA, 50 bp, Artificial
  Synthetic oligonucleotide
ggtcggcgcgctacttcgtagcgacaacgcagtagaatgtcgtggtgccc

SEQ ID NO: 223234 - DNA, 50 bp, Artificial
  Synthetic oligonucleotide
agccggcgtcgggtactgggccgcatagattggctgcactgagatcgctt

SEQ ID NO: 223235 - DNA, 60 bp, Artificial
  Synthetic oligonucleotide
tgcgtgttatagagctgtggtgtcgctatgacgcttatactcgtggtagatcaccttact

SEQ ID NO: 223236 - DNA, 50 bp, Artificial
  Synthetic oligonucleotide
ggcgcatcacccacacggccataacgttttgcggtcataccgcctgttga

SEQ ID NO: 223237 - DNA, 50 bp, Artificial
  Synthetic oligonucleotide
ggcggcctacatgacggtaatgaccgtgctggaagctacggtgcatgggc

SEQ ID NO: 223238 - DNA, 50 bp, Artificial
  Synthetic oligonucleotide
gggtcggctgctgcccattctcgggcggcctctaaagagtcaaactgagc

SEQ ID NO: 223239 - DNA, 50 bp, Artificial
  Synthetic oligonucleotide
agcagcacggagctcgggtaaccccagcgctgacgtatagggtagagggg

SEQ ID NO: 223240 - DNA, 50 bp, Artificial
  Synthetic oligonucleotide
ggctcagcagtcgcttcgcctattaccgcgtactgtgctcgttcgcgctt

SEQ ID NO: 223241 - DNA, 50 bp, Artificial
  Synthetic oligonucleotide
ggggtgctgtcgttacccaagcccagtgcatcaacggtgacaactggcgt

SEQ ID NO: 223242 - DNA, 50 bp, Artificial
  Synthetic oligonucleotide
agccacgtcggcaagtgcaatgcgttgcccagcaggggttacaataggca

SEQ ID NO: 223243 - DNA, 50 bp, Artificial
  Synthetic oligonucleotide
gggcgcgaggggcaaatacacgcgcttaaagccacacgcccttatgcact

SEQ ID NO: 223244 - DNA, 50 bp, Artificial
  Synthetic oligonucleotide
agccctcaggtagcgcacagtgggtgccgctgttagagaaacgcccaaaa

SEQ ID NO: 223245 - DNA, 50 bp, Artificial
  Synthetic oligonucleotide
agcccgataaccgagtcaaccgcggtaccaaactggcctgagccccaaaa

SEQ ID NO: 223246 - DNA, 60 bp, Artificial
  Synthetic oligonucleotide
cactcgcttttaaatcagagcctaattgatgcctaaagctatatagcgtcatctgggctt

SEQ ID NO: 223247 - DNA, 60 bp, Artificial
  Synthetic oligonucleotide
aatattgcgcggtgacgtagagcagcaaaagctactcattgactcattagagtttaaacg

SEQ ID NO: 223248 - DNA, 50 bp, Artificial
  Synthetic oligonucleotide
tatggttgaaccagcaggctccccgctaaccgtgcctgaaatggtcggtg

SEQ ID NO: 223249 - DNA, 50 bp, Artificial
  Synthetic oligonucleotide
tatattggggagccgttagagtacgcgtcctcgcgcgcacaaggctgaga

SEQ ID NO: 223250 - DNA, 50 bp, Artificial
  Synthetic oligonucleotide
acccgagcacattgctatgctggcatttacccgcatgcttgctgggccta

SEQ ID NO: 223251 - DNA, 50 bp, Artificial
  Synthetic oligonucleotide
atagcgcagccgtggtggtcaatgcaactgtcgctgagccctgggccacg

SEQ ID NO: 223252 - DNA, 50 bp, Artificial
  Synthetic oligonucleotide
gccgcggcactattcgtttagcggatgccaaccctgtaagtgcgccactc

SEQ ID NO: 223253 - DNA, 50 bp, Artificial
  Synthetic oligonucleotide
acccgcgcctatcatcaccccatggcgcactttaggatgcctgtcgccaa

SEQ ID NO: 223254 - DNA, 50 bp, Artificial
  Synthetic oligonucleotide
tacgttcgccagacgcggtaggcttgtgctctatgggcaagcagcacgct

SEQ ID NO: 223255 - DNA, 50 bp, Artificial
  Synthetic oligonucleotide
agtagctcggcttggtccgaaggctggggaacgtctgcggcgaataacgg

SEQ ID NO: 223256 - DNA, 50 bp, Artificial
  Synthetic oligonucleotide
aggtcaagcgtttgactggcaattgttcgcgcaggctgcccttagtgccc

SEQ ID NO: 223257 - DNA, 50 bp, Artificial
  Synthetic oligonucleotide
accgatgtgagtgcatgagggtactgcgcccccggatgggtcgccccaaa

SEQ ID NO: 223258 - DNA, 56 bp, Artificial
  Synthetic oligonucleotide
tggggcagttaggttttgactcggtgagttttgccgagttgtcacagaaactaagc

SEQ ID NO: 223259 - DNA, 50 bp, Artificial
  Synthetic oligonucleotide
taccgccaattctgtcgccacgctgacacgctgaccacgcaactaaggcg

SEQ ID NO: 223260 - DNA, 50 bp, Artificial
  Synthetic oligonucleotide
tacatctgctacgcgggtaaccgctgcgcgtgttgtttcgtcttgggcaa

SEQ ID NO: 223261 - DNA, 50 bp, Artificial
  Synthetic oligonucleotide
aggggcgggttgtagcagcagttagcccgcgtttgtatagcccagcacaa

SEQ ID NO: 223262 - DNA, 50 bp, Artificial
  Synthetic oligonucleotide
agggcgcagccaacttgtgacgacacgcataaggtcgcgcggtcttcatc

SEQ ID NO: 223263 - DNA, 50 bp, Artificial
  Synthetic oligonucleotide
agggcatcatgactggtcacccagtcgcctgctaacacggcggcacttaa

SEQ ID NO: 223264 - DNA, 50 bp, Artificial
  Synthetic oligonucleotide
aggcgtgcgtgtgccagaggctgaccccttggttagaacggttggtttgg

SEQ ID NO: 223265 - DNA, 50 bp, Artificial
  Synthetic oligonucleotide
agctgaaatgaggtgcccaccgataacagcccacggctgcgaaagcgccc

SEQ ID NO: 223266 - DNA, 50 bp, Artificial
  Synthetic oligonucleotide
accgtcaacacatcgccgccgatactccaaggtgcgtcgccgcctttaag

SEQ ID NO: 223267 - DNA, 50 bp, Artificial
  Synthetic oligonucleotide
acctccgcaaccccctgtagcaactgactggcgaccggatctgacaggct

SEQ ID NO: 223268 - DNA, 50 bp, Artificial
  Synthetic oligonucleotide
gcgtgtgccccagtcgtttaaagtcccgcgcacaaacacagcggtgctgc

SEQ ID NO: 223269 - DNA, 53 bp, Artificial
  Synthetic oligonucleotide
aacgaatggagtgaacggggacatcgttgtgaccgcggtacaaacaggaacgg

SEQ ID NO: 223270 - DNA, 50 bp, Artificial
  Synthetic oligonucleotide
agctccaagtagcaatgcttgcgcgccataaggcagggtcccttgcgtta

SEQ ID NO: 223271 - DNA, 50 bp, Artificial
  Synthetic oligonucleotide
acggcgcgggtcatgtggcccatgcgttaattccgttactagcgcagctg

SEQ ID NO: 223272 - DNA, 50 bp, Artificial
  Synthetic oligonucleotide
agctcaggcatttacacccttgggcgtggcttaagcgcaattggtggcgc

SEQ ID NO: 223273 - DNA, 50 bp, Artificial
  Synthetic oligonucleotide
gtggctcggtgccgttatcgcatgttgcaacccttaccgcagggcaaagc

SEQ ID NO: 223274 - DNA, 50 bp, Artificial
  Synthetic oligonucleotide
acgtgggcttgcactgctcccaaccaactcgctaagccacccacaggatg

SEQ ID NO: 223275 - DNA, 50 bp, Artificial
  Synthetic oligonucleotide
gtcgcatgggaccaaaaaccctagccgctatcctacagcgcccagccctt

SEQ ID NO: 223276 - DNA, 57 bp, Artificial
  Synthetic oligonucleotide
tctttcgtttagctttgcccttgctgacttacgtcattgtaagcgtgcaggggttat

SEQ ID NO: 223277 - DNA, 60 bp, Artificial
  Synthetic oligonucleotide
tcgcatgagaatgctcattttcaaagttcgctcgtacactcacaaacaaaggggttctac

SEQ ID NO: 223278 - DNA, 60 bp, Artificial
  Synthetic oligonucleotide
cgcaagcctgtagctacgtcatcacgtacgaaacaaccttggatagctttaggcctatca

SEQ ID NO: 223279 - DNA, 59 bp, Artificial
  Synthetic oligonucleotide
tcgaggatgcgggctactcgtgtgaaggattatcagagcgtggccccgtaggcgtattt

SEQ ID NO: 223280 - DNA, 54 bp, Artificial
  Synthetic oligonucleotide
cgcggtcttattcgggacccagtatgggcagataacgtgaagtaggtacaactt

SEQ ID NO: 223281 - DNA, 58 bp, Artificial
  Synthetic oligonucleotide
aattttgttggaaacgtgatgcctaccactacaatgagtttgtctatcgtcaggcact

SEQ ID NO: 223282 - DNA, 60 bp, Artificial
  Synthetic oligonucleotide
tttgtacgaggcgttatgttgagtgtttgcggcctgtaaaatagcgcagcacaggccgac

SEQ ID NO: 223283 - DNA, 60 bp, Artificial
  Synthetic oligonucleotide
caggcacttaaaggaagcaaaggtggcaaagcatctaaacgcaagcctgtagctacgtca

SEQ ID NO: 223284 - DNA, 57 bp, Artificial
  Synthetic oligonucleotide
tccccaaccgcacaaggcggtttggcatggaatctatctacttttgattcgtggaaa

SEQ ID NO: 223285 - DNA, 60 bp, Artificial
  Synthetic oligonucleotide
tcagagtacattagtaccagcagacgagttaacgagcgatatgagcgcattagagacgat

SEQ ID NO: 223286 - DNA, 58 bp, Artificial
  Synthetic oligonucleotide
tttagttgattgatgacccataatgtaagccacttcaacacgacttaaaccactcgct

SEQ ID NO: 223287 - DNA, 48 bp, Artificial
  Synthetic oligonucleotide
tcaagtgcgctaaaaccctaaatacgtaaaacccgtaaattttaccgt

SEQ ID NO: 223288 - DNA, 57 bp, Artificial
  Synthetic oligonucleotide
agctacgtcatcacgtacgaaacaaccttggatagctttaggcctatcacaaagtac

SEQ ID NO: 223289 - DNA, 58 bp, Artificial
  Synthetic oligonucleotide
cttagacttcatacaacaccgagcatgggtagtggtgattggctgcgcgattgtcgct

SEQ ID NO: 223290 - DNA, 56 bp, Artificial
  Synthetic oligonucleotide
attatcagcgctatacctgttagtctcattaaccctggcaactgactgttgagtag

SEQ ID NO: 223291 - DNA, 56 bp, Artificial
  Synthetic oligonucleotide
caacgtgcgttcgctcgtaaaaaaggtggccctaatccaactatggcacctcgcca

SEQ ID NO: 223292 - DNA, 56 bp, Artificial
  Synthetic oligonucleotide
tgagaatcgctctcaggagcttttagagcaacttaaagcgcatgaacacaccatag

SEQ ID NO: 223293 - DNA, 55 bp, Artificial
  Synthetic oligonucleotide
gacgccttgcaattagctgttcatcgggttgttcagtaaatctcagggctatatc

SEQ ID NO: 223294 - DNA, 60 bp, Artificial
  Synthetic oligonucleotide
agacgcatcacgaagcaatcaacacagtgttgtctactcacctatccagcgtccaagtcc

SEQ ID NO: 223295 - DNA, 55 bp, Artificial
  Synthetic oligonucleotide
gcagcgagtgtctcaacagtgctgtttatgatgccacttagcctcgcaatggcca

SEQ ID NO: 223296 - DNA, 55 bp, Artificial
  Synthetic oligonucleotide
gcagcttacgccagtatgcaggtctatagtcaaatgctgcatctttcaatgcgtc

SEQ ID NO: 223297 - DNA, 55 bp, Artificial
  Synthetic oligonucleotide
gacgataaatacacccctctggtgcggtaactagggtaaccacctcattatgcgc

SEQ ID NO: 223298 - DNA, 55 bp, Artificial
  Synthetic oligonucleotide
gcagggtctacttcatggccaggaggggtaatgacaaccacctcgcaacctaacg

SEQ ID NO: 223299 - DNA, 55 bp, Artificial
  Synthetic oligonucleotide
gaccctaaatggatcaccgacttagaagtggcataccgtccagacgaatattgga

SEQ ID NO: 223300 - DNA, 55 bp, Artificial
  Synthetic oligonucleotide
gcatggcacaggaactttgctcggtgacccggtagagtttaagggcctgaatgag

SEQ ID NO: 223301 - DNA, 55 bp, Artificial
  Synthetic oligonucleotide
gccacacaacatagcacctacaatagagctacccgcacggcttgtaccaggaata

SEQ ID NO: 223302 - DNA, 55 bp, Artificial
  Synthetic oligonucleotide
cgcagcaagtggtttaagtaacctcatgttgtacatgcccctacgttatgtttag

SEQ ID NO: 223303 - DNA, 55 bp, Artificial
  Synthetic oligonucleotide
gcagacgagttaacgagcgatatgagcgcattagagacgatgctagaaggctcga

SEQ ID NO: 223304 - DNA, 55 bp, Artificial
  Synthetic oligonucleotide
cgcaagtcaacgtggatcaggtgttaaagcgattgcgcgatgctattagccagcg

SEQ ID NO: 223305 - DNA, 59 bp, Artificial
  Synthetic oligonucleotide
agacaagagcagacgtcggctataccaacttcatcactaaaaacccgatgcacgaccat

SEQ ID NO: 223306 - DNA, 55 bp, Artificial
  Synthetic oligonucleotide
gcaattcgctaaagcgcattctatcaagcgggtaaaactcattctctaagtcgtg

SEQ ID NO: 223307 - DNA, 55 bp, Artificial
  Synthetic oligonucleotide
ccttgccagctcggagggcgacttaacccatacgctgcatgtagagtcgcatgca

SEQ ID NO: 223308 - DNA, 55 bp, Artificial
  Synthetic oligonucleotide
gaggcgaagcggtcgcacatcgacatggctttaataaggcggtggttgcaatcgc

SEQ ID NO: 223309 - DNA, 55 bp, Artificial
  Synthetic oligonucleotide
gagtcactcccgcgagggttcatatacaatacaacgttccccttagccgcatata

SEQ ID NO: 223310 - DNA, 55 bp, Artificial
  Synthetic oligonucleotide
cgatcgcttagtgggtgtggtgagtataaatggctcggcaaacagtcatgcgtca

SEQ ID NO: 223311 - DNA, 55 bp, Artificial
  Synthetic oligonucleotide
gcaagtcccacttgctgatacccaaaggcggactaagttcaactacaacgccact

SEQ ID NO: 223312 - DNA, 55 bp, Artificial
  Synthetic oligonucleotide
cgagcccacgggcgttggtgcttcgtgatgatcagcaagtgcgtattgcaggcca

SEQ ID NO: 223313 - DNA, 55 bp, Artificial
  Synthetic oligonucleotide
gcaacgctagcagtgaagacctactaagttattacattgaccacaccactattga

SEQ ID NO: 223314 - DNA, 55 bp, Artificial
  Synthetic oligonucleotide
cgaaagggcactaactccaacgaacgtgcatgttgtgaataaagctcgtccgtaa

SEQ ID NO: 223315 - DNA, 55 bp, Artificial
  Synthetic oligonucleotide
cgggacccagtatgggcagataacgtgaagtaggtacaactttgcacgccttaaa

SEQ ID NO: 223316 - DNA, 60 bp, Artificial
  Synthetic oligonucleotide
ggttcagcacagggccattggtaaagaccaagtaatccttgatcacatggcgcttgaaga

SEQ ID NO: 223317 - DNA, 55 bp, Artificial
  Synthetic oligonucleotide
cggggcaatttaactacgatattacctcgcagttagagctaaccggcgcactccg

SEQ ID NO: 223318 - DNA, 55 bp, Artificial
  Synthetic oligonucleotide
cggcccatgtgtcaatgtaaccgccgtgaaattcagagaagccagcgtaatagcg

SEQ ID NO: 223319 - DNA, 55 bp, Artificial
  Synthetic oligonucleotide
cgggtgaggatatttcagccgatactagccaccttaaatcggtccccgaggccag

SEQ ID NO: 223320 - DNA, 55 bp, Artificial
  Synthetic oligonucleotide
cggtgaatttgacgtaacttttgactctacattttcgtatggcgcaagcatgcga

SEQ ID NO: 223321 - DNA, 55 bp, Artificial
  Synthetic oligonucleotide
cgtattgaccactgatggcttgtctattcgtgatgacgatgagtcaatcgccatg

SEQ ID NO: 223322 - DNA, 53 bp, Artificial
  Synthetic oligonucleotide
cgtatttgataccgcccaaacaggctttagttattggtacgaaaccacgcggc

SEQ ID NO: 223323 - DNA, 55 bp, Artificial
  Synthetic oligonucleotide
cgctcctaatggttctttaaagttaccgacatagcgacacaccatgacatcacac

SEQ ID NO: 223324 - DNA, 54 bp, Artificial
  Synthetic oligonucleotide
cgtgagggtaacgcgcttactttagcggtcaatgctcgccgtccggttggtaaa

SEQ ID NO: 223325 - DNA, 55 bp, Artificial
  Synthetic oligonucleotide
cgtggttgttaagcttattgcttgcgccactaagtcgcgtttcgcaggcgttatc

SEQ ID NO: 223326 - DNA, 55 bp, Artificial
  Synthetic oligonucleotide
cgttggtttgaacatcttgatgcgttaccgtgacattagggtgctttggcaccgc

SEQ ID NO: 223327 - DNA, 58 bp, Artificial
  Synthetic oligonucleotide
ctctctggctgagtaatggctcccactattaaccagaaaggtacgcttcctagggtca

SEQ ID NO: 223328 - DNA, 55 bp, Artificial
  Synthetic oligonucleotide
cgtttaccttaattcccaccacgttaagctctaagtgctcaagccctactgctat

SEQ ID NO: 223329 - DNA, 55 bp, Artificial
  Synthetic oligonucleotide
ctaccaggcgattcttaatgttcaaacgtttacttgggctcaattgggcttagta

SEQ ID NO: 223330 - DNA, 55 bp, Artificial
  Synthetic oligonucleotide
ctacgttatcgcctatttatggggaataaccacaccacataggctctgccttgcc

SEQ ID NO: 223331 - DNA, 55 bp, Artificial
  Synthetic oligonucleotide
ctactcccttcagccatgatagccagtgttgaggtatataaatcgcccgaagcgc

SEQ ID NO: 223332 - DNA, 54 bp, Artificial
  Synthetic oligonucleotide
ctcacccctcaacatttgcggagtttacgcgacttaacgtaatgtctaaggacg

SEQ ID NO: 223333 - DNA, 55 bp, Artificial
  Synthetic oligonucleotide
gaaccgagtaagcgatagtctttactggcgcctgaacgcataaaagtatacaagt

SEQ ID NO: 223334 - DNA, 55 bp, Artificial
  Synthetic oligonucleotide
cgcataatggtccttaacaatcctgaggtgcgactaagtcgttgattgtaactag

SEQ ID NO: 223335 - DNA, 55 bp, Artificial
  Synthetic oligonucleotide
cttcacagtagcgtagatagttggcaaccaacggggcgatatgagttagtaccgc

SEQ ID NO: 223336 - DNA, 55 bp, Artificial
  Synthetic oligonucleotide
cttatcagtatcttgacggccactgtcccctgaataagcagcgtatttgataccc

SEQ ID NO: 223337 - DNA, 55 bp, Artificial
  Synthetic oligonucleotide
cgccacgcgacttagccattgcaacgctgcttggtgcagaagagtacggcatggc

SEQ ID NO: 223338 - DNA, 56 bp, Artificial
  Synthetic oligonucleotide
cggtcggtcagttgggtcgttaatgaagcgatcagagaccccggcgcgatccccca

SEQ ID NO: 223339 - DNA, 60 bp, Artificial
  Synthetic oligonucleotide
gttagtaggactgatatcccctattggtcttggtcagaaatgcagtggttggctctcctc

SEQ ID NO: 223340 - DNA, 60 bp, Artificial
  Synthetic oligonucleotide
agtctggcacctcaacgattgtcatggatccgtggtcaaatggttcagccatatttgcgg

SEQ ID NO: 223341 - DNA, 55 bp, Artificial
  Synthetic oligonucleotide
cccgtttgatggctatattggacagtcgcttctggcgtttcacgaaacccttgcg

SEQ ID NO: 223342 - DNA, 55 bp, Artificial
  Synthetic oligonucleotide
ccctcaatgcttctaaggcaattgaagttaagtaaccgatctactgtagagcttg

SEQ ID NO: 223343 - DNA, 52 bp, Artificial
  Synthetic oligonucleotide
ccctcacaacgtgactttccctcggctacccttcgtcaaggcttaggtccgg

SEQ ID NO: 223344 - DNA, 55 bp, Artificial
  Synthetic oligonucleotide
ccctcttgagacgctcgctttgccatcgaatatccatgcttcacctgccaagagg

SEQ ID NO: 223345 - DNA, 55 bp, Artificial
  Synthetic oligonucleotide
ccctgagcactcttcacctgtcgggataagctcagattgtgtcgcgtatgctagc

SEQ ID NO: 223346 - DNA, 55 bp, Artificial
  Synthetic oligonucleotide
ccctgtagacggggcttcgggaatgtcccaatcctcaatagtagccggcgaaagc

SEQ ID NO: 223347 - DNA, 55 bp, Artificial
  Synthetic oligonucleotide
ccctgtcagatctcgttgagtatttcaaagagggcgattctgaaagcttgggttg

SEQ ID NO: 223348 - DNA, 55 bp, Artificial
  Synthetic oligonucleotide
cccttcagacactccatacagcttacagcgaaacgcacctcatgctctcatccgc

SEQ ID NO: 223349 - DNA, 53 bp, Artificial
  Synthetic oligonucleotide
ccgaaaacggcttgattgagcggccaaatatgtacggaaaaccgtatcgggta

SEQ ID NO: 223350 - DNA, 55 bp, Artificial
  Synthetic oligonucleotide
ccgaaaccggaagatatagccggacgtaaccaggagagtcgattcgagcgcgtgt

SEQ ID NO: 223351 - DNA, 56 bp, Artificial
  Synthetic oligonucleotide
agtcgttcagcgaacgcgggaaccctacactgaaaaccatgttggtagtgatgcgg

SEQ ID NO: 223352 - DNA, 52 bp, Artificial
  Synthetic oligonucleotide
ccgaacaaggtccagagatggcggggcctagagggcaaaagaaaccgtttcc

SEQ ID NO: 223353 - DNA, 55 bp, Artificial
  Synthetic oligonucleotide
cgagcctatctgtggataacttcatgcggaccagaaatgccgagtgttacggcga

SEQ ID NO: 223354 - DNA, 55 bp, Artificial
  Synthetic oligonucleotide
cgagcgttcaacttgcctcctgttcgcgacggtaagcgtaggtgtcagcgaagcg

SEQ ID NO: 223355 - DNA, 55 bp, Artificial
  Synthetic oligonucleotide
cgagcttgcgcggatctacgtgcggaggtatcggtcctttcaacataagcgcggc

SEQ ID NO: 223356 - DNA, 54 bp, Artificial
  Synthetic oligonucleotide
cgaggaatacgtacctttgttccactcctaatggtcttgacccggattcatccc

SEQ ID NO: 223357 - DNA, 55 bp, Artificial
  Synthetic oligonucleotide
cgaggcgctatgggtgcattgttgcagcctgtttgtcgaagggacgaatcatgag

SEQ ID NO: 223358 - DNA, 55 bp, Artificial
  Synthetic oligonucleotide
cgaggctacccttttactcaatcgcaacagaagttatcagccgagggccgattac

SEQ ID NO: 223359 - DNA, 55 bp, Artificial
  Synthetic oligonucleotide
cgagggcattccctatatcggtccggtgcccggttgcgaaggcctatggctgaac

SEQ ID NO: 223360 - DNA, 55 bp, Artificial
  Synthetic oligonucleotide
cgaggtcgcggatcgtgcaaccacccaaggtaccgaatccgggttggatcgctcc

SEQ ID NO: 223361 - DNA, 55 bp, Artificial
  Synthetic oligonucleotide
cgagtccacggtggagtccaggtactggaagttttgccgcgctgacacgacgtcg

SEQ ID NO: 223362 - DNA, 59 bp, Artificial
  Synthetic oligonucleotide
atgagttcagcctggtgcgaattaagtaggccgatctggagtaggtaaagacactgagg

SEQ ID NO: 223363 - DNA, 55 bp, Artificial
  Synthetic oligonucleotide
ggtaatcccgcaagttaggaggggagtcaaattcgaaccgctagcgctacaagcc

SEQ ID NO: 223364 - DNA, 55 bp, Artificial
  Synthetic oligonucleotide
cgatagggacagtcataggggcctcgttaccttgtctgtacagactacgccgtag

SEQ ID NO: 223365 - DNA, 55 bp, Artificial
  Synthetic oligonucleotide
cgatcgacgttattggtggggctctgatcgaatgctagaccggtacggagggtcc

SEQ ID NO: 223366 - DNA, 55 bp, Artificial
  Synthetic oligonucleotide
cgattccagcgctatgggatgttggcgtgatagcggattacgtatcagctcttcg

SEQ ID NO: 223367 - DNA, 55 bp, Artificial
  Synthetic oligonucleotide
cgattcgccgtctggacacccgcatgcaccccggtgtgatgtccatgttggttcg

SEQ ID NO: 223368 - DNA, 55 bp, Artificial
  Synthetic oligonucleotide
cgattgcttacgcgctgagcgcactcatgttgaccgcagtgatgcctgcagccca

SEQ ID NO: 223369 - DNA, 55 bp, Artificial
  Synthetic oligonucleotide
cgattttatgtccgcagcgcaggaccgataggggataccggcatgccaagtcatc

SEQ ID NO: 223370 - DNA, 55 bp, Artificial
  Synthetic oligonucleotide
cgcaacgcgggtaaggtccgacagcagagattccatcgtgtacagcggctgcggt

SEQ ID NO: 223371 - DNA, 55 bp, Artificial
  Synthetic oligonucleotide
ggtaagaggtacagggcgggcggaagctttcgagtggcctgcgccaagccccgag

SEQ ID NO: 223372 - DNA, 55 bp, Artificial
  Synthetic oligonucleotide
cgcaagtaacctataaagcgtcaatctgtctgccagctgacaccgataccgtgag

SEQ ID NO: 223373 - DNA, 56 bp, Artificial
  Synthetic oligonucleotide
gagacaggcctaactttgcctctttatctttctcgtaccacttggtctcctacaac

SEQ ID NO: 223374 - DNA, 55 bp, Artificial
  Synthetic oligonucleotide
ggtaacggcaaaatgtacggtgagcctcgaaatatgatgctgactactcggtggg

SEQ ID NO: 223375 - DNA, 55 bp, Artificial
  Synthetic oligonucleotide
cgcacccgaaggtgtctccacacgtgactggaaagacgatcgatcccaatgctcg

SEQ ID NO: 223376 - DNA, 55 bp, Artificial
  Synthetic oligonucleotide
cgcagacggtcggacttatgcggactatttgttcgctgatctgaaagtgcgtgag

SEQ ID NO: 223377 - DNA, 55 bp, Artificial
  Synthetic oligonucleotide
cgcagctacgtagtagcctgactctcgagcattgccaataatcgcttcttggcgc

SEQ ID NO: 223378 - DNA, 55 bp, Artificial
  Synthetic oligonucleotide
cgcaggcggattattcagtctctgaatgaccggtcaccttcaatccgccgagggc

SEQ ID NO: 223379 - DNA, 52 bp, Artificial
  Synthetic oligonucleotide
gggtttcaataacagtgcgtaacccgaccttggatgcttcgttttagttcgg

SEQ ID NO: 223380 - DNA, 55 bp, Artificial
  Synthetic oligonucleotide
cgcatgtcaacctctaggagcaagaccaatgcacgtcaacaaagcaaccctccaa

SEQ ID NO: 223381 - DNA, 55 bp, Artificial
  Synthetic oligonucleotide
cgccaactggattctgccgatggtacccgcaaattcctgattcgtgtggcgggtg

SEQ ID NO: 223382 - DNA, 55 bp, Artificial
  Synthetic oligonucleotide
gggtgcgcattcagtcgcaggtgggcaaaggaacctcgatatccctgtatctgcc

SEQ ID NO: 223383 - DNA, 55 bp, Artificial
  Synthetic oligonucleotide
cctcaaaatcggctgagtcttactaccaaaagattgcctcggcagaagctaagcg

SEQ ID NO: 223384 - DNA, 59 bp, Artificial
  Synthetic oligonucleotide
aggtgtacaccgggggagccaatgccaacactcaagccgcgcgtagcggtcactctcga

SEQ ID NO: 223385 - DNA, 55 bp, Artificial
  Synthetic oligonucleotide
cctcatcgtgccactgacccactagggtggtgccacatcaaaggtcatgccacgc

SEQ ID NO: 223386 - DNA, 55 bp, Artificial
  Synthetic oligonucleotide
cctccatagggataggtgcggctaacgatgaacctggcgaggatcgctcccagga

SEQ ID NO: 223387 - DNA, 53 bp, Artificial
  Synthetic oligonucleotide
cctcccgtccttgtgaattgcgttggtcagggccggttgtcaaccgttggtcc

SEQ ID NO: 223388 - DNA, 55 bp, Artificial
  Synthetic oligonucleotide
cctccggactgtcaggtctgaagagagacgagataccgacacgcatgaatcctgc

SEQ ID NO: 223389 - DNA, 55 bp, Artificial
  Synthetic oligonucleotide
cctccttcgctaaccaccgcagagcatgttcctgcgtccattgatgatcgcgcat

SEQ ID NO: 223390 - DNA, 55 bp, Artificial
  Synthetic oligonucleotide
cctcgtacgtagtgatgctgactgttcatgcgcgcttggccaacacctgacattc

SEQ ID NO: 223391 - DNA, 55 bp, Artificial
  Synthetic oligonucleotide
ggtgaatcaggcgcaaagcctgggttatgctgttcgctacagaaggagacaactc

SEQ ID NO: 223392 - DNA, 55 bp, Artificial
  Synthetic oligonucleotide
ggtcgttggtatcatcgggaacgggtgagattacagccagaggcggtagccacag

SEQ ID NO: 223393 - DNA, 55 bp, Artificial
  Synthetic oligonucleotide
cctggtcggttgcgctcgattgcaggtcgaagtggctggatgcaggttcgtttgc

SEQ ID NO: 223394 - DNA, 55 bp, Artificial
  Synthetic oligonucleotide
cctggtgagaggtttgataaccatgaaaccgaggtagtgcgactggagttgctct

SEQ ID NO: 223395 - DNA, 60 bp, Artificial
  Synthetic oligonucleotide
aggtgcttttgatcttatgcaaacccctgctgatggcgcgagttgtcgtgacgttagaat

SEQ ID NO: 223396 - DNA, 55 bp, Artificial
  Synthetic oligonucleotide
ggtcgcgcatcagagcatgcctgctacctataacctcaccgaagctatcgcctcg

SEQ ID NO: 223397 - DNA, 55 bp, Artificial
  Synthetic oligonucleotide
cctgtgcctggagtgccatgagggctctggataacgtcatttagcctgtggatta

SEQ ID NO: 223398 - DNA, 55 bp, Artificial
  Synthetic oligonucleotide
ggtccatcggcccgaacaaggccggtaacctggtggccatcaaacccatcaccga

SEQ ID NO: 223399 - DNA, 53 bp, Artificial
  Synthetic oligonucleotide
ccttgaagcggggccggggaattttccgattcggacatggggtgcgttctctc

SEQ ID NO: 223400 - DNA, 55 bp, Artificial
  Synthetic oligonucleotide
ccttgcttgcccggcaagtggcattcgctcagaaggctggcgactgatggcgcta

SEQ ID NO: 223401 - DNA, 54 bp, Artificial
  Synthetic oligonucleotide
ccttggcgtgaacgggttactataccgtggcttgccgactgaacgagagtttcc

SEQ ID NO: 223402 - DNA, 55 bp, Artificial
  Synthetic oligonucleotide
ccttgtgtgtctactaccttcgtctaatcacagttgttttggtccctgcagggta

SEQ ID NO: 223403 - DNA, 55 bp, Artificial
  Synthetic oligonucleotide
ggtccagcatgactatccgtctgcaggccctttagcaactctgccggcataatcg

SEQ ID NO: 223404 - DNA, 55 bp, Artificial
  Synthetic oligonucleotide
cgaaacccggtactggataaccgggaccgacactggctcggcatagaggagcgca

SEQ ID NO: 223405 - DNA, 55 bp, Artificial
  Synthetic oligonucleotide
cgaaattcgtcagaagccgctcgttgtgcccgcatgcatctcaaggctgccgcgc

SEQ ID NO: 223406 - DNA, 60 bp, Artificial
  Synthetic oligonucleotide
atgattgattggataactgcggtagttccttgctttcatgaaaagccattagattcaggc

SEQ ID NO: 223407 - DNA, 55 bp, Artificial
  Synthetic oligonucleotide
cgaactggcttcagggttggcgtccaatggctacggtgaacattcgccaggtggg

SEQ ID NO: 223408 - DNA, 55 bp, Artificial
  Synthetic oligonucleotide
cgacgcatagggactcctgtcagtcggccactattgtccgtgtcgggcgtaggat

SEQ ID NO: 223409 - DNA, 55 bp, Artificial
  Synthetic oligonucleotide
cgacggcgtacagcagctagagttcatttaagcgcagggcggtttgccaacggtc

SEQ ID NO: 223410 - DNA, 55 bp, Artificial
  Synthetic oligonucleotide
cgactcacataactcgtgcagttcagcactgcgaaaattgaccgggaaccctagg

SEQ ID NO: 223411 - DNA, 55 bp, Artificial
  Synthetic oligonucleotide
caggctacatccgcagtcgaatggcctattatccatcccgagccaatcatcgtcg

SEQ ID NO: 223412 - DNA, 55 bp, Artificial
  Synthetic oligonucleotide
caggggcggggctcctcggacgttagcagctatggcgattcaggcaaatatgcgc

SEQ ID NO: 223413 - DNA, 55 bp, Artificial
  Synthetic oligonucleotide
gtgaccaggtagcctttgtgatactgcgcggctatgtaatgtaaccctgcgtttc

SEQ ID NO: 223414 - DNA, 55 bp, Artificial
  Synthetic oligonucleotide
cagtgtgaccagcaacttctacgttggtagctgggtactgagccatgaagtcggc

SEQ ID NO: 223415 - DNA, 55 bp, Artificial
  Synthetic oligonucleotide
catatcgcccggcagctgttgttacttgatacaccggtagttaatgtcgaacgct

SEQ ID NO: 223416 - DNA, 55 bp, Artificial
  Synthetic oligonucleotide
catcagcatagacggctagccagacggtggatgaccagcaagccacggcctctcg

SEQ ID NO: 223417 - DNA, 60 bp, Artificial
  Synthetic oligonucleotide
ggcaatcatccggggcgatcgcatcctgtgccacctctgctggggcggtcagacgggggt

SEQ ID NO: 223418 - DNA, 55 bp, Artificial
  Synthetic oligonucleotide
catccagttaagctcgccgcaaaagcgactgggacagcagggaagattaagattg

SEQ ID NO: 223419 - DNA, 55 bp, Artificial
  Synthetic oligonucleotide
catccgggctaggggcaagaaaacaagtgacctcactgccaccgcgcactcctgc

SEQ ID NO: 223420 - DNA, 55 bp, Artificial
  Synthetic oligonucleotide
gtctttagtgggatcactcgacgacgcaggtcaggcccgtgactcttcttcactg

SEQ ID NO: 223421 - DNA, 55 bp, Artificial
  Synthetic oligonucleotide
catctccctttctgagctgacagaccaaggcttccttgtacctacgcagtgctac

SEQ ID NO: 223422 - DNA, 55 bp, Artificial
  Synthetic oligonucleotide
catgcttaacgggtcaagccacaggcctcgtattctctaagcgacgtcgttttcg

SEQ ID NO: 223423 - DNA, 55 bp, Artificial
  Synthetic oligonucleotide
cattatccgcgcttatttatgtggatgggttttggttactatctcgatgcagccc

SEQ ID NO: 223424 - DNA, 53 bp, Artificial
  Synthetic oligonucleotide
catttggcgaacggggcagggtcaacccctgccggaacgtaccaggcgcgttc

SEQ ID NO: 223425 - DNA, 55 bp, Artificial
  Synthetic oligonucleotide
ccaagctgcacctaatcgcttgcagcgttacttcaatcggagcagttctgtagcg

SEQ ID NO: 223426 - DNA, 55 bp, Artificial
  Synthetic oligonucleotide
ccaaggtggtggcccataagtgcgcgcaacacaatgacgagttaggtcgcattgc

SEQ ID NO: 223427 - DNA, 55 bp, Artificial
  Synthetic oligonucleotide
ccaataccaagggtagtctcaatgagcggtacgcaaacttccaatcatctggagc

SEQ ID NO: 223428 - DNA, 58 bp, Artificial
  Synthetic oligonucleotide
gagagtcgctaatttttcgcatgttggcctctttgggccgcgtcgaactgaccaagct

SEQ ID NO: 223429 - DNA, 55 bp, Artificial
  Synthetic oligonucleotide
gtcgtgtggtctattgtcgcgtggcgagttgtctcaccggtagagcacttgcaga

SEQ ID NO: 223430 - DNA, 55 bp, Artificial
  Synthetic oligonucleotide
ccaatgtccgccaagaacacatgtgctggtcgcaacctcaccaactggagctgtc

SEQ ID NO: 223431 - DNA, 53 bp, Artificial
  Synthetic oligonucleotide
gtcgtcgacccgcccctgcaggaaattcgatggaatcccttttcgtccctacc

SEQ ID NO: 223432 - DNA, 55 bp, Artificial
  Synthetic oligonucleotide
gtcgtacagccgtgctgcggaggagatggcgttgacgcaacccgccgttagtcta

SEQ ID NO: 223433 - DNA, 55 bp, Artificial
  Synthetic oligonucleotide
gtcggtagggagatccccgcgaggatcgttgaccacaagtttcccatgcaccggc

SEQ ID NO: 223434 - DNA, 55 bp, Artificial
  Synthetic oligonucleotide
ccacgacatggtagataccgaaatcttcaactcccaatacatttaatacaactcg

SEQ ID NO: 223435 - DNA, 55 bp, Artificial
  Synthetic oligonucleotide
gtggtccgcaacaaatctccattctgggcgcaaccggttccatagggctgagcac

SEQ ID NO: 223436 - DNA, 55 bp, Artificial
  Synthetic oligonucleotide
gtggcgtttcaggctaagctggccggttactgccacttgtaaagaagcgatccgc

SEQ ID NO: 223437 - DNA, 55 bp, Artificial
  Synthetic oligonucleotide
gtggcgtcgctaaggtagtattgcaaggtgtacaagacatgctgttgcgtgtggc

SEQ ID NO: 223438 - DNA, 55 bp, Artificial
  Synthetic oligonucleotide
cacctctcgcaagcgtacggaccgcccttcatcgatagagaaggaggttcggttg

SEQ ID NO: 223439 - DNA, 56 bp, Artificial
  Synthetic oligonucleotide
taacgtccgcgtcatacgtcctacgaaggcatatcccctctcaacaccccgtcaac

SEQ ID NO: 223440 - DNA, 55 bp, Artificial
  Synthetic oligonucleotide
cacctgtcgggataagctcagattgtgtcgcgtatgctagcatagccctcccgct

SEQ ID NO: 223441 - DNA, 55 bp, Artificial
  Synthetic oligonucleotide
cacctgttcaacacacataacgtgagctgattatggcgttcactgcggctttgtg

SEQ ID NO: 223442 - DNA, 55 bp, Artificial
  Synthetic oligonucleotide
cacgcaggagcgtaagtaacgataacctcaactatcgtggacggctcttcacccc

SEQ ID NO: 223443 - DNA, 55 bp, Artificial
  Synthetic oligonucleotide
cacgccagggcagctttgaagtccatggagccatggagaccgttatccggccgag

SEQ ID NO: 223444 - DNA, 55 bp, Artificial
  Synthetic oligonucleotide
cacgcctaataaacgacggcggatgcgttaatgaaagacattctggtaaccaggc

SEQ ID NO: 223445 - DNA, 55 bp, Artificial
  Synthetic oligonucleotide
cacgcgcgtacagacccaacgtatttgacgagagtggatatgagcaagcgagcct

SEQ ID NO: 223446 - DNA, 55 bp, Artificial
  Synthetic oligonucleotide
cacgggatcgggaagcgatctaacctccatcacagacctgggtagactcagccgg

SEQ ID NO: 223447 - DNA, 55 bp, Artificial
  Synthetic oligonucleotide
gtgctcggtgtctgcggccgcgaagtacgagattccggccaacattcttctcgcc

SEQ ID NO: 223448 - DNA, 55 bp, Artificial
  Synthetic oligonucleotide
gtgcagacgcaaatccagatatcaacctgcggacagaggttagaacagcgctgcg

SEQ ID NO: 223449 - DNA, 55 bp, Artificial
  Synthetic oligonucleotide
cactaaaagcgcgcagcgaattgaattcagcacatagaagcggggtgacgtgtcc

SEQ ID NO: 223450 - DNA, 60 bp, Artificial
  Synthetic oligonucleotide
gcagacggggttatccagagcgtacaagagctggagccacacacaaccgccaagcattca

SEQ ID NO: 223451 - DNA, 60 bp, Artificial
  Synthetic oligonucleotide
gaatcgacttctgttattcgttctgtaatttcctgccggagcgatatcagacgtgtacgc

SEQ ID NO: 223452 - DNA, 55 bp, Artificial
  Synthetic oligonucleotide
cacttactgacttgtagagcatctcggttaagccgatagtcttcttgtctccgcc

SEQ ID NO: 223453 - DNA, 54 bp, Artificial
  Synthetic oligonucleotide
cagaaaacgcccaggacaaacttgagggtaccgcttgaaacgtcctgactggcc

SEQ ID NO: 223454 - DNA, 55 bp, Artificial
  Synthetic oligonucleotide
cagacgtgcgttgggaacggcccaggtctgtggtttatcgtcatcgtctagagca

SEQ ID NO: 223455 - DNA, 55 bp, Artificial
  Synthetic oligonucleotide
cagaggggcaagacctcgaagcaagtacctatgagtacttggtaacggattggac

SEQ ID NO: 223456 - DNA, 55 bp, Artificial
  Synthetic oligonucleotide
cagatgagcgttacaggctcccacttgtgcaagcatcgtgcgctgtgtcgcagtc

SEQ ID NO: 223457 - DNA, 55 bp, Artificial
  Synthetic oligonucleotide
gtgatgtcagctggatatgttttcgactcaaggcaccttttcgcctctcggcgcc

SEQ ID NO: 223458 - DNA, 55 bp, Artificial
  Synthetic oligonucleotide
cagcgttagcgacagccttatcgatgcctggtacctcagaagcattcaagtcacc

SEQ ID NO: 223459 - DNA, 55 bp, Artificial
  Synthetic oligonucleotide
caggagatttcttgtagactctggtagcacggccacaattttccgacgcgcacta

SEQ ID NO: 223460 - DNA, 55 bp, Artificial
  Synthetic oligonucleotide
caggatgtatgacttacccgactggagcgcatgttcaatcttttctacgccagga

SEQ ID NO: 223461 - DNA, 55 bp, Artificial
  Synthetic oligonucleotide
gtgagctttgccccgcttctctcaaccgttcaccagcagactagccgctggagcc

SEQ ID NO: 223462 - DNA, 57 bp, Artificial
  Synthetic oligonucleotide
tacgtggctccggcacgactaatcgtaagtttgggctcaccctaagctgtcttagac

SEQ ID NO: 223463 - DNA, 55 bp, Artificial
  Synthetic oligonucleotide
gtcatgcagtcattctcgaatcgttgcagcgcgacggaggggattggcacgcagc

SEQ ID NO: 223464 - DNA, 55 bp, Artificial
  Synthetic oligonucleotide
ccactaataacaacaacggggacggtatccatgcgtgagcccatgacgtggcgca

SEQ ID NO: 223465 - DNA, 55 bp, Artificial
  Synthetic oligonucleotide
ccatcgtctttgcgtgtgcgtcgtacggacattcaagtcccctatagataagtcc

SEQ ID NO: 223466 - DNA, 55 bp, Artificial
  Synthetic oligonucleotide
gtcatggacgagcgcaccataagccgatgctgcagaccacgcttcggattgagca

SEQ ID NO: 223467 - DNA, 55 bp, Artificial
  Synthetic oligonucleotide
gtcgcactacagtatgtaggtgtcatcccttacgacgagtcggtacgcaaggccg

SEQ ID NO: 223468 - DNA, 55 bp, Artificial
  Synthetic oligonucleotide
ccatctgggctgcacgggcgactcacggggccgccctccattcctatgtgtggaa

SEQ ID NO: 223469 - DNA, 55 bp, Artificial
  Synthetic oligonucleotide
ccatgagctgagtcgcacataatccgagccagcagctacggataatcgcaactaa

SEQ ID NO: 223470 - DNA, 55 bp, Artificial
  Synthetic oligonucleotide
ccatgcagatttcggtaaatgagttcctgacaccccgccacattgatgtgcaggt

SEQ ID NO: 223471 - DNA, 55 bp, Artificial
  Synthetic oligonucleotide
ccatgggaacccatcccctgctggaataataagcgcgatagccgatttcgcactc

SEQ ID NO: 223472 - DNA, 55 bp, Artificial
  Synthetic oligonucleotide
ccactgcttccaaattttcccgttgcaatatcagagtacgcagtaatctaaatcg

SEQ ID NO: 223473 - DNA, 55 bp, Artificial
  Synthetic oligonucleotide
agggaataatacttccctcaatgcttctaaggcaattgaagttaagtaaccgatc

SEQ ID NO: 223474 - DNA, 55 bp, Artificial
  Synthetic oligonucleotide
ccattcacgagcccgagaagtgtctgggcggtcgtgttaccgagacctgcaagag

SEQ ID NO: 223475 - DNA, 55 bp, Artificial
  Synthetic oligonucleotide
ccatacgctatacgcagaagacactaaagacatgaacttccctgtggccattcgc

SEQ ID NO: 223476 - DNA, 55 bp, Artificial
  Synthetic oligonucleotide
ccagcgcggagtgaggcgattggaaacccttcgactggatgaagagcgcagacta

SEQ ID NO: 223477 - DNA, 55 bp, Artificial
  Synthetic oligonucleotide
gtcctttctgggatctacggaaactaatttatgtctctgattgcggactacgggc

SEQ ID NO: 223478 - DNA, 55 bp, Artificial
  Synthetic oligonucleotide
ccagtcgcactacctcggtttcatggttatcaaacctctcaccaggacattcgtg

SEQ ID NO: 223479 - DNA, 55 bp, Artificial
  Synthetic oligonucleotide
ccagtaccttgatagagttttgctatcgactacttagcctcctatctatcgatgc

SEQ ID NO: 223480 - DNA, 55 bp, Artificial
  Synthetic oligonucleotide
gtcctgctgcacacctctgaggctccgatatcctccgaacctcgtctttgcccgg

SEQ ID NO: 223481 - DNA, 55 bp, Artificial
  Synthetic oligonucleotide
gtcatatcagtcgattccgcccgtaagggtcgtctgctcagcatagtcgaggtgt

SEQ ID NO: 223482 - DNA, 54 bp, Artificial
  Synthetic oligonucleotide
attaggctgacatgcgtacttccaaaggccccgctacgctggcatctcgtttcg

SEQ ID NO: 223483 - DNA, 54 bp, Artificial
  Synthetic oligonucleotide
ttatcagcaagcgcactgtgggtaatctgcgtgacccgtccaaaggtccacgtg

SEQ ID NO: 223484 - DNA, 59 bp, Artificial
  Synthetic oligonucleotide
gacaggtcaggcaacgatcctgcaatccaagggaaacgaagtagcaacgcagaaagtta

SEQ ID NO: 223485 - DNA, 54 bp, Artificial
  Synthetic oligonucleotide
gcggcaaccatggattctcaggcagtgatccaacacccgtttaacgtctgcgcg

SEQ ID NO: 223486 - DNA, 54 bp, Artificial
  Synthetic oligonucleotide
gttcacccgatcagcctcctttgtccggacctgtaagcaaatgttcccgaggca

SEQ ID NO: 223487 - DNA, 54 bp, Artificial
  Synthetic oligonucleotide
ggctatcaatcgtggttcattggttgaagccgaaaaacggtacaccactcaacg

SEQ ID NO: 223488 - DNA, 54 bp, Artificial
  Synthetic oligonucleotide
caggcgcgaccagtgagttgttagaaccaatgaacacgtctgtgcctaacgtcg

SEQ ID NO: 223489 - DNA, 54 bp, Artificial
  Synthetic oligonucleotide
agacaccgcttcaacgggtcaggcagccacgcagcccactagtatatagagggg

SEQ ID NO: 223490 - DNA, 54 bp, Artificial
  Synthetic oligonucleotide
cagtattgcgaattcactctctgggatcggggaccagtcccagttacctacccc

SEQ ID NO: 223491 - DNA, 54 bp, Artificial
  Synthetic oligonucleotide
atgcgttgtaacgcgggctactagataatcgcgcgctacggggatcagcgttcg

SEQ ID NO: 223492 - DNA, 54 bp, Artificial
  Synthetic oligonucleotide
tactgtccacatctgatcccaactggtcatgtagctagggctcagtagagccct

SEQ ID NO: 223493 - DNA, 53 bp, Artificial
  Synthetic oligonucleotide
gaagagcggtaaggctcttcccctatcggtgacgttacgtccggaccgaagtc

SEQ ID NO: 223494 - DNA, 54 bp, Artificial
  Synthetic oligonucleotide
tgtagactatatcccgtggattgagagtccctcaaggcgcaatttgcgcgcatg

SEQ ID NO: 223495 - DNA, 60 bp, Artificial
  Synthetic oligonucleotide
ggcagagtctcacattaggatacctacacgtgcctgtgaggccctatgtgcagccattac

SEQ ID NO: 223496 - DNA, 54 bp, Artificial
  Synthetic oligonucleotide
gggttcgtgagtcgtcaaaagcagtccaagttttccgcgaagctgaggctggac

SEQ ID NO: 223497 - DNA, 54 bp, Artificial
  Synthetic oligonucleotide
cgtttgagcgcttgctcggatcaaggtagtccaccaggtctttacgcagatttt

SEQ ID NO: 223498 - DNA, 54 bp, Artificial
  Synthetic oligonucleotide
gctgccgggttcgttagcgacttgccgtcgaaacttcgaatccaggggctcttt

SEQ ID NO: 223499 - DNA, 54 bp, Artificial
  Synthetic oligonucleotide
ccatttaacgcgtctccacaatctacagctacctaattgacagcataggacctg

SEQ ID NO: 223500 - DNA, 54 bp, Artificial
  Synthetic oligonucleotide
gctgcaaactgaacgtcctccgtatccccactttggttcgcctactcagtactt

SEQ ID NO: 223501 - DNA, 54 bp, Artificial
  Synthetic oligonucleotide
gggttgaagagacaccgggctagggagtgtagagccagacgcttttggcaacaa

SEQ ID NO: 223502 - DNA, 54 bp, Artificial
  Synthetic oligonucleotide
tttctcggggcggttcccaatgctcaaacacgagatcaattgcggcactttgct

SEQ ID NO: 223503 - DNA, 54 bp, Artificial
  Synthetic oligonucleotide
cgcagcgagtttacgtagcatggagcagcctcctaggcaggttgggcgatgaat

SEQ ID NO: 223504 - DNA, 54 bp, Artificial
  Synthetic oligonucleotide
cgcaatccaggcaccgatataccctaacagaaccgctccaagcaagagggaaag

SEQ ID NO: 223505 - DNA, 54 bp, Artificial
  Synthetic oligonucleotide
aaccgcaatagcaatgtttaccacctgccagtgggctgtccgagctatgaaaaa

SEQ ID NO: 223506 - DNA, 60 bp, Artificial
  Synthetic oligonucleotide
atcccaacgtgagttgctgctaagtgagttggccagcctaaaaggtgccggcatgcgatt

SEQ ID NO: 223507 - DNA, 54 bp, Artificial
  Synthetic oligonucleotide
agctgctatatagcttctagctgctaactcggatgctaatcgaacatccgagaa

SEQ ID NO: 223508 - DNA, 54 bp, Artificial
  Synthetic oligonucleotide
gctatgctagcatacgcgacacaatctgagcttatcccgacaggtgaagagtac

SEQ ID NO: 223509 - DNA, 54 bp, Artificial
  Synthetic oligonucleotide
ctgctcacatgccggtagccattggtcgtggccgcctgataagctcgcgacttt

SEQ ID NO: 223510 - DNA, 54 bp, Artificial
  Synthetic oligonucleotide
cgcggacgtatgagccaagagatcaacgacgtgggcttgagtcggcgccacatc

SEQ ID NO: 223511 - DNA, 54 bp, Artificial
  Synthetic oligonucleotide
aggaaagtacgcagaaccggagcgaaccttgccctggttatccacaactcggcg

SEQ ID NO: 223512 - DNA, 54 bp, Artificial
  Synthetic oligonucleotide
aacgccacttcacgtcttgcccattcgcctccggctcaaggggacggcagatgt

SEQ ID NO: 223513 - DNA, 54 bp, Artificial
  Synthetic oligonucleotide
cagaacacgacacaaagcgcggcgatacctcttaaggtatccagagtataaagt

SEQ ID NO: 223514 - DNA, 53 bp, Artificial
  Synthetic oligonucleotide
ctgcgcgcttgtggttaaatacggcgtcttttgccccgaggcttttcaacggg

SEQ ID NO: 223515 - DNA, 54 bp, Artificial
  Synthetic oligonucleotide
aagagaccatcacatgaaatttgccgtatcccgcgaagccctgttaaaacccct

SEQ ID NO: 223516 - DNA, 54 bp, Artificial
  Synthetic oligonucleotide
gaaaacggtacctgtcgatgaccgactcacccttctgcaccgccactttgagac

SEQ ID NO: 223517 - DNA, 60 bp, Artificial
  Synthetic oligonucleotide
atccagtattcgggttccgggaacggatgcagcaactcgccgcagtggtggcatcgctct

SEQ ID NO: 223518 - DNA, 54 bp, Artificial
  Synthetic oligonucleotide
tcgatatggggcgttgtgagacatggcgtcacgagctttgagtaataagccaac

SEQ ID NO: 223519 - DNA, 54 bp, Artificial
  Synthetic oligonucleotide
taagcggtggggcctatcccgtcaaaactccagagatgacgccaggggcggtag

SEQ ID NO: 223520 - DNA, 54 bp, Artificial
  Synthetic oligonucleotide
atcccaggtgccaccggtaaaaaccgcaccagtgaaatttctgagatctcgcga

SEQ ID NO: 223521 - DNA, 54 bp, Artificial
  Synthetic oligonucleotide
acgcgtccctcaacggtgtgctcaaatgagacataggcggcgagcgatcagtcg

SEQ ID NO: 223522 - DNA, 54 bp, Artificial
  Synthetic oligonucleotide
cattcgacggagctcaacggttagagtgcgcccttcgtcccatcagcacagaac

SEQ ID NO: 223523 - DNA, 54 bp, Artificial
  Synthetic oligonucleotide
gacccacaaaacccgcaaaccgctaacgctgagagtcgcccgtgatcacgacat

SEQ ID NO: 223524 - DNA, 54 bp, Artificial
  Synthetic oligonucleotide
accgaccactgtgagcgttctcaaggtcagccgtaagactgtgcccatgcaacc

SEQ ID NO: 223525 - DNA, 54 bp, Artificial
  Synthetic oligonucleotide
ccggtgggtatacgcagcaataggattgcgcgacatagactcggcagcgacgca

SEQ ID NO: 223526 - DNA, 52 bp, Artificial
  Synthetic oligonucleotide
tacccgagcgagtccgggaccgcccagttaatcacgacccgttttattttga

SEQ ID NO: 223527 - DNA, 54 bp, Artificial
  Synthetic oligonucleotide
tctgatccgtactctagccgtcccttttgactctggcaagtcccttttttgtct

SEQ ID NO: 223528 - DNA, 56 bp, Artificial
  Synthetic oligonucleotide
gtcaacggtattctaagtatgggtacttttggtgagtgcgccacgttgacctggga

SEQ ID NO: 223529 - DNA, 54 bp, Artificial
  Synthetic oligonucleotide
agtgcttaccagggccgctattggttggagggtgatcacatcgagtatgtcgat

SEQ ID NO: 223530 - DNA, 54 bp, Artificial
  Synthetic oligonucleotide
actatcttgggtcatgaagttagcggggtgattgaacaggtcggatctgacgtt

SEQ ID NO: 223531 - DNA, 54 bp, Artificial
  Synthetic oligonucleotide
taccagagtatcaacgtgatttcacttgggataaaatccggcaatcaagattta

SEQ ID NO: 223532 - DNA, 53 bp, Artificial
  Synthetic oligonucleotide
ggcttgataggccagacccgtttagcgtgtcgttcccttttggggtacgggca

SEQ ID NO: 223533 - DNA, 54 bp, Artificial
  Synthetic oligonucleotide
acgatgctcgatctaggcgatgggtggatgagggcaacgcgtgttatcaaaggg

SEQ ID NO: 223534 - DNA, 54 bp, Artificial
  Synthetic oligonucleotide
tcgcttcttggtcgtcatagttcctcgcgtgtcgatggtcatcgacttcgccaa

SEQ ID NO: 223535 - DNA, 54 bp, Artificial
  Synthetic oligonucleotide
gtcggcagatccaggtcgaggcggatgctcacagctcgacctcgaatttggtca

SEQ ID NO: 223536 - DNA, 54 bp, Artificial
  Synthetic oligonucleotide
ctcccgccattaaagtgcgcaccgttctcgagggggacagccgaaacgactgtc

SEQ ID NO: 223537 - DNA, 54 bp, Artificial
  Synthetic oligonucleotide
acggcctgggctgatgtttgatatggcttgttatttttcatcagacttgttgta

SEQ ID NO: 223538 - DNA, 54 bp, Artificial
  Synthetic oligonucleotide
acaagaacaatcaaggggaacccgcaatgatgcgacatccacgagtctggatgg

SEQ ID NO: 223539 - DNA, 60 bp, Artificial
  Synthetic oligonucleotide
cgttctgatatgcctccatggttgcatagccacgcacaaacccaagcaggggctgctagc

SEQ ID NO: 223540 - DNA, 54 bp, Artificial
  Synthetic oligonucleotide
atgcatcaacgcgtagaaaaggtagtcaggtagaacgatgtctgttcggttcac

SEQ ID NO: 223541 - DNA, 51 bp, Artificial
  Synthetic oligonucleotide
acttgggtaacgaacactttgcctataacccttacttacaaagagtttaca

SEQ ID NO: 223542 - DNA, 54 bp, Artificial
  Synthetic oligonucleotide
tgggctcaccctaagctgtcttagacggcttagggtgagctttgccccgcttct

SEQ ID NO: 223543 - DNA, 54 bp, Artificial
  Synthetic oligonucleotide
ggcaccttccaactgtgaatagcgtgcggtcctaatccctagctcaggagtagg

SEQ ID NO: 223544 - DNA, 54 bp, Artificial
  Synthetic oligonucleotide
gtgaaggtatacgcccatggtgccatccgggtgcaaaagcctgacaaagttacc

SEQ ID NO: 223545 - DNA, 54 bp, Artificial
  Synthetic oligonucleotide
atcgcgataaatgggttcctgccttgcctgttgcacaacaaatagccgaccgat

SEQ ID NO: 223546 - DNA, 54 bp, Artificial
  Synthetic oligonucleotide
ccacgttcgggttgggtcgattctttggcaacgccaatcagccgctctagctgg

SEQ ID NO: 223547 - DNA, 54 bp, Artificial
  Synthetic oligonucleotide
gaatttggttgctgaccgactcagcaatcgcagacccggggaagaactctgcat

SEQ ID NO: 223548 - DNA, 54 bp, Artificial
  Synthetic oligonucleotide
accatcactaacttcgcaagccgacttgtcagtccctgtcgcatgatgcaccct

SEQ ID NO: 223549 - DNA, 54 bp, Artificial
  Synthetic oligonucleotide
tcgtttcgcagcactcgcctgcaacctgtcatccattacgaacaaccggcttgt

SEQ ID NO: 223550 - DNA, 52 bp, Artificial
  Synthetic oligonucleotide
atcgaaatatcgcccagagtcgccattttccgggggtttcgtgcgtaaaccg

SEQ ID NO: 223551 - DNA, 54 bp, Artificial
  Synthetic oligonucleotide
gtctataggctccgatgtctggcagaattatacgcaccttggccccggtttctc

SEQ ID NO: 223552 - DNA, 54 bp, Artificial
  Synthetic oligonucleotide
tcgagtgatgacagagtaatcatgacccgctttcgcgtctgcggataccggtag

SEQ ID NO: 223553 - DNA, 54 bp, Artificial
  Synthetic oligonucleotide
tacgatttttgccgaattctgcaggcctccctcaaacgttgtaccggagtgcac

SEQ ID NO: 223554 - DNA, 54 bp, Artificial
  Synthetic oligonucleotide
tggcgactatgccacggcgtatctttggtacctgtcggaaacaggtatagatac

SEQ ID NO: 223555 - DNA, 54 bp, Artificial
  Synthetic oligonucleotide
tggctcggacatggggctcggctacttgatgaaacggaggtcggccactataaa

SEQ ID NO: 223556 - DNA, 53 bp, Artificial
  Synthetic oligonucleotide
ttgtctcatcagcaacgaccacaacccgcgaagggtataaacggctactggcc

SEQ ID NO: 223557 - DNA, 53 bp, Artificial
  Synthetic oligonucleotide
taccccgtcacgttgtcataagcagcctaactgtctatactcggcacccgacc

SEQ ID NO: 223558 - DNA, 53 bp, Artificial
  Synthetic oligonucleotide
ttttcgccgggcgaactattgctgctcaatccggatgaccaagccgacctgac

SEQ ID NO: 223559 - DNA, 53 bp, Artificial
  Synthetic oligonucleotide
tcaatgcaccgagaacaactatcgcgccactttggcctcgttgctctgttcgg

SEQ ID NO: 223560 - DNA, 53 bp, Artificial
  Synthetic oligonucleotide
ttggttcgccacgcaaggcatagacgatgaaccgctgttgaggaatttcgtgg

SEQ ID NO: 223561 - DNA, 54 bp, Artificial
  Synthetic oligonucleotide
gggaaaggttgttgattgagcctcacccgtagggggctacaaatcgtttttgca

SEQ ID NO: 223562 - DNA, 60 bp, Artificial
  Synthetic oligonucleotide
gacacgcgaggccttggggtgcaacgccatgccctgcgactgcccgctccgctgagtgtc

SEQ ID NO: 223563 - DNA, 53 bp, Artificial
  Synthetic oligonucleotide
tatgtgtaacgacctgcaatcgaaatggcctcgacctgcaatcatcgcgtttt

SEQ ID NO: 223564 - DNA, 53 bp, Artificial
  Synthetic oligonucleotide
gggaggctgagtgatggaagcgatgttcacgctgtgcggccaagtggccaacg

SEQ ID NO: 223565 - DNA, 53 bp, Artificial
  Synthetic oligonucleotide
ggggtttgcgtggcatggcgcgtagcgggatcacaggctgtattcggtaacgg

SEQ ID NO: 223566 - DNA, 53 bp, Artificial
  Synthetic oligonucleotide
taacccaaccaaggctatcggtcacgtgcgtaacatgttgttgcaaagcggcg

SEQ ID NO: 223567 - DNA, 53 bp, Artificial
  Synthetic oligonucleotide
taacagtgacccctaagcttggccgactgaaggttggtgtaacgcttagcgtt

SEQ ID NO: 223568 - DNA, 53 bp, Artificial
  Synthetic oligonucleotide
ggggatgaatccgggttaagaccattaggagtaaatcaaggtacgcggtccac

SEQ ID NO: 223569 - DNA, 53 bp, Artificial
  Synthetic oligonucleotide
tccgggtaatttgacaagagtcatatgctccccacggaaattcgctatcgtac

SEQ ID NO: 223570 - DNA, 53 bp, Artificial
  Synthetic oligonucleotide
gtagacagtccctttggccccttcggatagcttcactgaatacttgccagtag

SEQ ID NO: 223571 - DNA, 53 bp, Artificial
  Synthetic oligonucleotide
tccgcactagtgttgctgcggcatctaattgtggcgatattttgacagagagt

SEQ ID NO: 223572 - DNA, 53 bp, Artificial
  Synthetic oligonucleotide
tcccggactcgctcgggtaaactggccgccgctttttacaagatcagacgcag

SEQ ID NO: 223573 - DNA, 60 bp, Artificial
  Synthetic oligonucleotide
cgttgccagctagggcgcaagcgggctgtataagatcactgcccatcacattgatcggct

SEQ ID NO: 223574 - DNA, 53 bp, Artificial
  Synthetic oligonucleotide
ggcttgggaatcaatctttaaggccgactcgaacctaggtgaactgccctcgc

SEQ ID NO: 223575 - DNA, 49 bp, Artificial
  Synthetic oligonucleotide
ggttatttccaatagttttcccgggcgccggaacttaacccatgaaacg

SEQ ID NO: 223576 - DNA, 53 bp, Artificial
  Synthetic oligonucleotide
taagtcaacatcgcccatcccactggcgaaccccaatttaatgtccttcaaag

SEQ ID NO: 223577 - DNA, 53 bp, Artificial
  Synthetic oligonucleotide
tgatcgtactcgtcgtatacgtacataaaagtcctgtctcaggcatgcagcta

SEQ ID NO: 223578 - DNA, 53 bp, Artificial
  Synthetic oligonucleotide
gtatcaaaactccaaccggtgggggaggtgagcaatgactgataaacgaatcg

SEQ ID NO: 223579 - DNA, 53 bp, Artificial
  Synthetic oligonucleotide
tcgcgctcggtatggttcaaaagggtggttctttccaagatggctctataggc

SEQ ID NO: 223580 - DNA, 53 bp, Artificial
  Synthetic oligonucleotide
ggcgaacacgctaggcgttccgattggcactgtgcgctcgcgactgtcccggg

SEQ ID NO: 223581 - DNA, 53 bp, Artificial
  Synthetic oligonucleotide
ggggctcgccgcaagtcagcctcattgcgcaggatcgcttgcaggcgggtaac

SEQ ID NO: 223582 - DNA, 53 bp, Artificial
  Synthetic oligonucleotide
tcgctcgggtaaactggccgccgctttttacaagatcagacgcaggggtcaga

SEQ ID NO: 223583 - DNA, 53 bp, Artificial
  Synthetic oligonucleotide
tccaggttagccagccacgacacctggttgatttgtccagcgtgcccctgcgt

SEQ ID NO: 223584 - DNA, 60 bp, Artificial
  Synthetic oligonucleotide
ggcacgtcgcgctaaggcgcgctgcatgtaatcaatggccttttcgagcgcattaatggc

SEQ ID NO: 223585 - DNA, 53 bp, Artificial
  Synthetic oligonucleotide
ggcacgtcgacgctgccaggcgccagatcgtgctctttctcgaactccgttac

SEQ ID NO: 223586 - DNA, 53 bp, Artificial
  Synthetic oligonucleotide
ttggcagagaccgtcacttcgcgatacggccccttgcgttcgtggacgcaatg

SEQ ID NO: 223587 - DNA, 53 bp, Artificial
  Synthetic oligonucleotide
taccgcccagccgaactggccccacgacatacgaccggacttcgcctggaatc

SEQ ID NO: 223588 - DNA, 53 bp, Artificial
  Synthetic oligonucleotide
aggcttcgaacgtatcgccatggacgccttttggtaagtccataggtctcgta

SEQ ID NO: 223589 - DNA, 53 bp, Artificial
  Synthetic oligonucleotide
aagggtgaccaattctcagtctagagcaattatgtcccgtaatatcatccgat

SEQ ID NO: 223590 - DNA, 53 bp, Artificial
  Synthetic oligonucleotide
gatgtgtgccaggccttcgatgttcttgcgttgtgcggcaaatgaggctgtcg

SEQ ID NO: 223591 - DNA, 53 bp, Artificial
  Synthetic oligonucleotide
ccggcccagcgttgtacctcattcaacggggtatgctcgaagtcacgcaaggc

SEQ ID NO: 223592 - DNA, 53 bp, Artificial
  Synthetic oligonucleotide
aatcctgtgcgtaaattgccccaaacgtttgttcagccgagccgtaatggggt

SEQ ID NO: 223593 - DNA, 53 bp, Artificial
  Synthetic oligonucleotide
caagtggttcactccctcaaggttggagccacaaaacgcctacagcgtaaccg

SEQ ID NO: 223594 - DNA, 53 bp, Artificial
  Synthetic oligonucleotide
aatgtgtctagagaatccggggcgattcagccaactgcgcactgccgagcgta

SEQ ID NO: 223595 - DNA, 60 bp, Artificial
  Synthetic oligonucleotide
atcgctacaactggattcggccacaccagttcaatgatggactggcgcccgctcagtacg

SEQ ID NO: 223596 - DNA, 53 bp, Artificial
  Synthetic oligonucleotide
atgcccctaacaccacgacaggctgacccttatggcaacgaaaaccatcccct

SEQ ID NO: 223597 - DNA, 53 bp, Artificial
  Synthetic oligonucleotide
agcccttggtagtccactacgcccagttagctaagagatacctcttgatacct

SEQ ID NO: 223598 - DNA, 53 bp, Artificial
  Synthetic oligonucleotide
cgggtaatgtctatctcacctgtaaccgaatggatacgtcgtaacgatttcga

SEQ ID NO: 223599 - DNA, 53 bp, Artificial
  Synthetic oligonucleotide
atgggaagccatttgccggggatagagaccaccccattgtcctatgcagatct

SEQ ID NO: 223600 - DNA, 53 bp, Artificial
  Synthetic oligonucleotide
attactgcccaccggcaaaacggtcgcgggggcactttcctcccgcagctggg

SEQ ID NO: 223601 - DNA, 53 bp, Artificial
  Synthetic oligonucleotide
atgggcgtaatgttgtaacgcacggcctcaagccgggagattcggaaacatga

SEQ ID NO: 223602 - DNA, 53 bp, Artificial
  Synthetic oligonucleotide
gaacttaaatacgcgcaactatcaagttggattggctcgaagttcttgtctgt

SEQ ID NO: 223603 - DNA, 53 bp, Artificial
  Synthetic oligonucleotide
gaacagccccgggccttaatgctgccgcaagaggtcaacgaactgccatatga

SEQ ID NO: 223604 - DNA, 53 bp, Artificial
  Synthetic oligonucleotide
ccagattgaccagccaacaagctactgtcgggcgtggtcgggacacttgagct

SEQ ID NO: 223605 - DNA, 53 bp, Artificial
  Synthetic oligonucleotide
ccagcactgagctatccgctttatgcctctattcgctgtagcgactcataaaa

SEQ ID NO: 223606 - DNA, 60 bp, Artificial
  Synthetic oligonucleotide
cgtgctgtccagccctacgagcctcctctgaacactcccgcacggtcttggactccaaga

SEQ ID NO: 223607 - DNA, 53 bp, Artificial
  Synthetic oligonucleotide
accgtcacattgtccaggcccaacagggttttgacatggaacaggaagcgggt

SEQ ID NO: 223608 - DNA, 53 bp, Artificial
  Synthetic oligonucleotide
acctccgtagtcgtaaggtcgttgcaggtgctcgggtgcggtacaactcgccg

SEQ ID NO: 223609 - DNA, 53 bp, Artificial
  Synthetic oligonucleotide
agaaaactaggattgcgtagggtatctccccatgcgagcaagcagtctgtttc

SEQ ID NO: 223610 - DNA, 53 bp, Artificial
  Synthetic oligonucleotide
attaccgagccaggcacttaccgctatctgtaccgccatgccgagcgttacta

SEQ ID NO: 223611 - DNA, 53 bp, Artificial
  Synthetic oligonucleotide
cccctgctaggaacctgaacgggtacacccatggcggggcaatcatccggggc

SEQ ID NO: 223612 - DNA, 53 bp, Artificial
  Synthetic oligonucleotide
ctgacgctagggccggtaggccgcccatgcttagaagcttccacgtgtagtta

SEQ ID NO: 223613 - DNA, 53 bp, Artificial
  Synthetic oligonucleotide
ctacctcaagtccctgactaaagccggtgtggtcgctgactgtaaagccagcg

SEQ ID NO: 223614 - DNA, 53 bp, Artificial
  Synthetic oligonucleotide
ctcgggtaacgacttggaagccactgtcacaggattcgggatgcttgaattag

SEQ ID NO: 223615 - DNA, 53 bp, Artificial
  Synthetic oligonucleotide
agggtgtacccaagcctgcattccgtgggcgtttccgctaactgtcaaagcgc

SEQ ID NO: 223616 - DNA, 53 bp, Artificial
  Synthetic oligonucleotide
agtttaggttgtgtcctgaccccctcctaaaagccttcaacgtatcaggatca

SEQ ID NO: 223617 - DNA, 60 bp, Artificial
  Synthetic oligonucleotide
ataccgctgttgaattcgtttaatggtagcaggccattctgccaaattggcatcggcaac

SEQ ID NO: 223618 - DNA, 53 bp, Artificial
  Synthetic oligonucleotide
aacccccatagccttcgcgatgtactccgcatcccccgtctcaaatgcgtcag

SEQ ID NO: 223619 - DNA, 53 bp, Artificial
  Synthetic oligonucleotide
cgagtcgagggtaatgacttgtatgtcctggtgggcgattcctccgctagtgt

SEQ ID NO: 223620 - DNA, 53 bp, Artificial
  Synthetic oligonucleotide
cgatactcccattgacttgtgcgtctgcccaccattgatgtagtcgcactttt

SEQ ID NO: 223621 - DNA, 53 bp, Artificial
  Synthetic oligonucleotide
cacgtaaatggccctgtttcgatcaaggacgatcctcatgccccgttaccatt

SEQ ID NO: 223622 - DNA, 53 bp, Artificial
  Synthetic oligonucleotide
cctcggtgtgtcgagaggcggccattcagtgcagtgacgggaagctaacagcg

SEQ ID NO: 223623 - DNA, 53 bp, Artificial
  Synthetic oligonucleotide
aaaatgcgatgattgcaggtcgacgccatttcgattgcaggccgatacacata

SEQ ID NO: 223624 - DNA, 53 bp, Artificial
  Synthetic oligonucleotide
ataagacggcgaatcttactggacagtggttgccttgacaagtcaaggacagc

SEQ ID NO: 223625 - DNA, 53 bp, Artificial
  Synthetic oligonucleotide
cacgttgcacgctcccccacttgtcattcgccgacttagcgctgctctggtct

SEQ ID NO: 223626 - DNA, 53 bp, Artificial
  Synthetic oligonucleotide
atcactaggggcgccaagaaccgcatgtgcgccattcggataaaggtatccga

SEQ ID NO: 223627 - DNA, 53 bp, Artificial
  Synthetic oligonucleotide
gcggagagacaaacaatggccagcagttggcgtgtgcaacaagccgctcagga

SEQ ID NO: 223628 - DNA, 59 bp, Artificial
  Synthetic oligonucleotide
gaatggacatggtaaagattcatcagtatgaagtttattggatttctctcgaccctacc

SEQ ID NO: 223629 - DNA, 53 bp, Artificial
  Synthetic oligonucleotide
cgcatctgattgccctgggcgacacccctcaagaacgccaggcacaaatcgcg

SEQ ID NO: 223630 - DNA, 53 bp, Artificial
  Synthetic oligonucleotide
agtcctatttcgaaagttcgcgtgctttctgatcgtagttttctttgacacgg

SEQ ID NO: 223631 - DNA, 52 bp, Artificial
  Synthetic oligonucleotide
tcccccactagaaccacctctcgcaagcgtacggaccgcccttcatcgatag

SEQ ID NO: 223632 - DNA, 52 bp, Artificial
  Synthetic oligonucleotide
atggtacgtggcgatcagtcgtgcgaggcatgaggccagggtctacgcagac

SEQ ID NO: 223633 - DNA, 52 bp, Artificial
  Synthetic oligonucleotide
tcccctggcgagtgctttacacagtgctaccgctggcgacactctgcgggtt

SEQ ID NO: 223634 - DNA, 52 bp, Artificial
  Synthetic oligonucleotide
agacctgtctcacgcgcaagctcgctcatccctttggcccttgcgacaaccc

SEQ ID NO: 223635 - DNA, 52 bp, Artificial
  Synthetic oligonucleotide
atcatgggccctacgtccgtctgctcatcagcagggttgcctacgatcaact

SEQ ID NO: 223636 - DNA, 52 bp, Artificial
  Synthetic oligonucleotide
cccgcgcccaaacactcggcattaaagcagctcggcagagcagtcaagcgta

SEQ ID NO: 223637 - DNA, 52 bp, Artificial
  Synthetic oligonucleotide
agaaagatgtcggatgcgtgcaccaccgataattgaggctgtgcaacacgct

SEQ ID NO: 223638 - DNA, 52 bp, Artificial
  Synthetic oligonucleotide
cgtgtggggccatttaacatagggtcagttattcgaagtgcctggaggcccc

SEQ ID NO: 223639 - DNA, 60 bp, Artificial
  Synthetic oligonucleotide
taattcagacaggggcagcattgtgctgtgatgccctcccaagcgaagcgatatacgtgg

SEQ ID NO: 223640 - DNA, 52 bp, Artificial
  Synthetic oligonucleotide
tacataaaatgttaatcgattagttctttcttaaacgtaatcaaagacgact

SEQ ID NO: 223641 - DNA, 52 bp, Artificial
  Synthetic oligonucleotide
taattttggcgcgggttggactgacaacctgcacatcaatgtggcggggtgt

SEQ ID NO: 223642 - DNA, 52 bp, Artificial
  Synthetic oligonucleotide
actgggtaacttcagcgcgtgtactggttcgatccgcagctttctcagagag

SEQ ID NO: 223643 - DNA, 52 bp, Artificial
  Synthetic oligonucleotide
gtagctttgcaactgcctaggcggcacgagcaatacctcaggcattgagagc

SEQ ID NO: 223644 - DNA, 52 bp, Artificial
  Synthetic oligonucleotide
cccctcagccctcatcgttacatacaaagtccgcttttgattctggccgaaa

SEQ ID NO: 223645 - DNA, 52 bp, Artificial
  Synthetic oligonucleotide
actgatagttccacggccattgcgtcctcgattacgaactcgtctaacgcaa

SEQ ID NO: 223646 - DNA, 52 bp, Artificial
  Synthetic oligonucleotide
ctcacgcgcaagctcgctcatccctttggcccttgcgacaacccccatagcc

SEQ ID NO: 223647 - DNA, 52 bp, Artificial
  Synthetic oligonucleotide
tacgttttactcgaaattcagtttcaaaggcgattacatcctcaatccattt

SEQ ID NO: 223648 - DNA, 52 bp, Artificial
  Synthetic oligonucleotide
ggttgactccaacggcgagttggcccaatacgcctcacaaacggcagccaaa

SEQ ID NO: 223649 - DNA, 52 bp, Artificial
  Synthetic oligonucleotide
ggttgatccgagtacttctgctcgcgtcctgttggggcagtgggacgtcccc

SEQ ID NO: 223650 - DNA, 55 bp, Artificial
  Synthetic oligonucleotide
ataacggaatcacaacggcaaaatttagggcaagacaggtgaagttagctaacgc

SEQ ID NO: 223651 - DNA, 52 bp, Artificial
  Synthetic oligonucleotide
aggcaaggtaactactgcgccaccgcgcttcgacgacaacatgctcctcgat

SEQ ID NO: 223652 - DNA, 52 bp, Artificial
  Synthetic oligonucleotide
ggggtttttgtaatcaatatcttagcgatcgtaaagaagcgagggggggcag

SEQ ID NO: 223653 - DNA, 52 bp, Artificial
  Synthetic oligonucleotide
cgcctaggcggatctcggcatgcactagcaggccagaagaggcaagtgtggt

SEQ ID NO: 223654 - DNA, 52 bp, Artificial
  Synthetic oligonucleotide
cgcacagaatcaacgactcacagcaatcgcctggtcactcatgatacgcgga

SEQ ID NO: 223655 - DNA, 52 bp, Artificial
  Synthetic oligonucleotide
atcggtttggtattatcgcaggcatagagcgggcctcaggtcgagctctcaa

SEQ ID NO: 223656 - DNA, 52 bp, Artificial
  Synthetic oligonucleotide
ggttatacgttcttggccatgacacatgtgaacacttagacaccgtaggctg

SEQ ID NO: 223657 - DNA, 52 bp, Artificial
  Synthetic oligonucleotide
agcccgaactgcccataaggcgctcgcagggttagtgtcgcccccgtacgat

SEQ ID NO: 223658 - DNA, 52 bp, Artificial
  Synthetic oligonucleotide
tcacaagcgtggagtcataccagaaacggtcgaaaatcgacccgatttggta

SEQ ID NO: 223659 - DNA, 52 bp, Artificial
  Synthetic oligonucleotide
cggggccgtttaggattcgacgccggtcgcgaaactttaggtgcatgccgag

SEQ ID NO: 223660 - DNA, 52 bp, Artificial
  Synthetic oligonucleotide
aggttctgataattcacgcctgggtcgctccgctcaatacacccgcatccat

SEQ ID NO: 223661 - DNA, 60 bp, Artificial
  Synthetic oligonucleotide
tacaagtttaactgtggttcgatgcatagtctagcttacggtattcgagctaatcggtga

SEQ ID NO: 223662 - DNA, 52 bp, Artificial
  Synthetic oligonucleotide
gtaccagtttaccggcgaggctccgaaaggtcgggagagagggtagcgtttc

SEQ ID NO: 223663 - DNA, 52 bp, Artificial
  Synthetic oligonucleotide
ccttccatctgttcgcttggaggtatcgagccatcttgtttcgcattccatg

SEQ ID NO: 223664 - DNA, 52 bp, Artificial
  Synthetic oligonucleotide
agtcctgacaccacgcgtattgggcatgcgttgcacaacgtactgaccataa

SEQ ID NO: 223665 - DNA, 52 bp, Artificial
  Synthetic oligonucleotide
ttccaagactgcctgtttggtcggttccagcactgcatcgatccgccgtagc

SEQ ID NO: 223666 - DNA, 52 bp, Artificial
  Synthetic oligonucleotide
gcagcaacaacaggtcggccgcgggtttgggcaagcgaacagttttgaccat

SEQ ID NO: 223667 - DNA, 52 bp, Artificial
  Synthetic oligonucleotide
gcagaatcaagcctataaatcagccatgcgcacgtaccaggacgacttctat

SEQ ID NO: 223668 - DNA, 52 bp, Artificial
  Synthetic oligonucleotide
ttcagggacagttgtccgcaacgcgttgggaggggtttcccgctcggggcgt

SEQ ID NO: 223669 - DNA, 52 bp, Artificial
  Synthetic oligonucleotide
gcaactggattcgcagcgcaagtgatcatcgcgcgtggagcaacccgcgcac

SEQ ID NO: 223670 - DNA, 52 bp, Artificial
  Synthetic oligonucleotide
gattcatcgccaaagtgcctgtcgcacgtattcccacactggattccatcgt

SEQ ID NO: 223671 - DNA, 52 bp, Artificial
  Synthetic oligonucleotide
ttatgtgagacgccggctagcttgccaatagtacgatgggacaggtcggcat

SEQ ID NO: 223672 - DNA, 57 bp, Artificial
  Synthetic oligonucleotide
caaactcaaagagcccgtatacgggcccgtagatgccctggaggggcattgccagga

SEQ ID NO: 223673 - DNA, 60 bp, Artificial
  Synthetic oligonucleotide
cgtgaggtgtcggatgatcggaagaccgttcaaaagccagtgctgcatgtccagattaat

SEQ ID NO: 223674 - DNA, 52 bp, Artificial
  Synthetic oligonucleotide
aagtcggccaatttagcacattggcgccttgcccaaaatccctgtcgttgtt

SEQ ID NO: 223675 - DNA, 52 bp, Artificial
  Synthetic oligonucleotide
ttaatccatgccaaaatgaccgtgcagacgtatagcactgacagggtaaaag

SEQ ID NO: 223676 - DNA, 52 bp, Artificial
  Synthetic oligonucleotide
tgtcgcctcgctctgctcgttgacgggtcataaaacgccggccggaagaagc

SEQ ID NO: 223677 - DNA, 52 bp, Artificial
  Synthetic oligonucleotide
ggcaagtttgtgaccggtgaccagggcttgggccattgcatcgttcgccaaa

SEQ ID NO: 223678 - DNA, 52 bp, Artificial
  Synthetic oligonucleotide
tgtcccagtcgtggcttgagatattcacccttcgagcatttgtgatcagtgt

SEQ ID NO: 223679 - DNA, 52 bp, Artificial
  Synthetic oligonucleotide
caagatgcaaaccggacgacagcattgctggctgcgcgagtgatcgctcagc

SEQ ID NO: 223680 - DNA, 52 bp, Artificial
  Synthetic oligonucleotide
aattttatgcggcgtgaggctatatcgcaaagcgtaaaagtgcgctactcgg

SEQ ID NO: 223681 - DNA, 52 bp, Artificial
  Synthetic oligonucleotide
ttttctgctgaagagcatcgcgcacgactccttgatggcacctgtccatcgc

SEQ ID NO: 223682 - DNA, 51 bp, Artificial
  Synthetic oligonucleotide
aaaaggtccgcgcagtcaaccttatttattcgggttaggacggataaactg

SEQ ID NO: 223683 - DNA, 52 bp, Artificial
  Synthetic oligonucleotide
ttttacctatactccaccgtacaatagccaccacgattcctgaccggatctc

SEQ ID NO: 223684 - DNA, 60 bp, Artificial
  Synthetic oligonucleotide
gacgtatgccttgcaggcacgaccaatgcctgacaacagcctgacaaccacctgacatgc

SEQ ID NO: 223685 - DNA, 52 bp, Artificial
  Synthetic oligonucleotide
gctaagcggaggggccataaccttcgaaggcgtaaaagatctccaacaggaa

SEQ ID NO: 223686 - DNA, 52 bp, Artificial
  Synthetic oligonucleotide
tttgttggtggcacgcagagagccactcgaacctgagggggctagtcgttgc

SEQ ID NO: 223687 - DNA, 52 bp, Artificial
  Synthetic oligonucleotide
gcttgctcaggcccgctcctggatgggtcgccgggtcaacgtcttcaagcct

SEQ ID NO: 223688 - DNA, 52 bp, Artificial
  Synthetic oligonucleotide
aaaggttacctctagcgcaggctgtagtccgatgactcaaggatcgagaatc

SEQ ID NO: 223689 - DNA, 52 bp, Artificial
  Synthetic oligonucleotide
aacccttgcgatggtccggtgcaaaacggcccctatcaaaagcgctccgatt

SEQ ID NO: 223690 - DNA, 52 bp, Artificial
  Synthetic oligonucleotide
cacctatagttctaactagggctggggattcggggtctgctcttcgagcata

SEQ ID NO: 223691 - DNA, 52 bp, Artificial
  Synthetic oligonucleotide
aacctcccccggtacaaaccgctgtgtctcaagggagcacgcttctttggcg

SEQ ID NO: 223692 - DNA, 52 bp, Artificial
  Synthetic oligonucleotide
cacatgctgacgtggggcgcagtgtagcaagccagggtttgcgattctcgcg

SEQ ID NO: 223693 - DNA, 52 bp, Artificial
  Synthetic oligonucleotide
aacgcccggctttcccccgcccttggaggatcgaaccatgtgcaaagtcttc

SEQ ID NO: 223694 - DNA, 52 bp, Artificial
  Synthetic oligonucleotide
ggaatggtagctgactcgctatgcgaccagcgatagcctaacaagacatgca

SEQ ID NO: 223695 - DNA, 58 bp, Artificial
  Synthetic oligonucleotide
atcgggcgtagcattaaattggagaaaacctgccaaggccaagacaacaagactgaca

SEQ ID NO: 223696 - DNA, 52 bp, Artificial
  Synthetic oligonucleotide
gtggtcgcatctgtccgaccacgtaccactggctgcggagatcaatctgtga

SEQ ID NO: 223697 - DNA, 52 bp, Artificial
  Synthetic oligonucleotide
ctgaaccggcgttctccaaggcgcggttagccatccgttcccacaactggcg

SEQ ID NO: 223698 - DNA, 52 bp, Artificial
  Synthetic oligonucleotide
tcgttcgcaatcgaccaggacccgcccctgatgagtattctcagcgttttcc

SEQ ID NO: 223699 - DNA, 52 bp, Artificial
  Synthetic oligonucleotide
ccagctttacggaataccgctggtattcccagctaactacaacagccgacgg

SEQ ID NO: 223700 - DNA, 52 bp, Artificial
  Synthetic oligonucleotide
tcttacgtgctgtggtgaaacgacgcggcagggcccctgacaccggaacctc

SEQ ID NO: 223701 - DNA, 52 bp, Artificial
  Synthetic oligonucleotide
acggagtatcgcctcgactctgcatggttcggccaaggcgcccagatcaagc

SEQ ID NO: 223702 - DNA, 52 bp, Artificial
  Synthetic oligonucleotide
acgacacgaactcgggagaatggccatcaattttcagagtcatccaaccaag

SEQ ID NO: 223703 - DNA, 52 bp, Artificial
  Synthetic oligonucleotide
ccagcagcgtgaggggcatagctcccaacccgagtaggcctttcgacagagc

SEQ ID NO: 223704 - DNA, 52 bp, Artificial
  Synthetic oligonucleotide
tgatttcccttggcatacgaatggtactcaggtcgatcagaaacagcgtcgc

SEQ ID NO: 223705 - DNA, 52 bp, Artificial
  Synthetic oligonucleotide
ggcgatcagtcgtgcgaggcatgaggccagggtctacgcagactccatcaaa

SEQ ID NO: 223706 - DNA, 52 bp, Artificial
  Synthetic oligonucleotide
agttgttggtaagtgtactggtcaggtacccaccacccagggaacggcgacc

SEQ ID NO: 223707 - DNA, 52 bp, Artificial
  Synthetic oligonucleotide
tgcactacgggcgcgtccaagatgactggtcggtagggagatccccgcgagg

SEQ ID NO: 223708 - DNA, 52 bp, Artificial
  Synthetic oligonucleotide
gaaacaacgagttacaagcacggggccgtttaggattcgacgccggtcgcga

SEQ ID NO: 223709 - DNA, 52 bp, Artificial
  Synthetic oligonucleotide
gaaacggacaaagcttgctcgactaaaaccaagtgtcgccacgaacgcctta

SEQ ID NO: 223710 - DNA, 52 bp, Artificial
  Synthetic oligonucleotide
gaacgcgtactagtagatcggcgcctgaacgcattatcggcgagcaaggacc

SEQ ID NO: 223711 - DNA, 52 bp, Artificial
  Synthetic oligonucleotide
tgctaaaacatactcatatacttgatcccgaacgtctgtgtcttcaaagccc

SEQ ID NO: 223712 - DNA, 52 bp, Artificial
  Synthetic oligonucleotide
tgctctcgagaaagacctgtctcacgcgcaagctcgctcatccctttggccc

SEQ ID NO: 223713 - DNA, 52 bp, Artificial
  Synthetic oligonucleotide
ctccgttggtttgggaccgtagctacacacagactgacatacccgattgcga

SEQ ID NO: 223714 - DNA, 52 bp, Artificial
  Synthetic oligonucleotide
ctcgctcatccctttggcccttgcgacaacccccatagccttcgcgatgtac

SEQ ID NO: 223715 - DNA, 51 bp, Artificial
  Synthetic oligonucleotide
atgtgcagcagtcgtctgtgaatggggccgagagtgctttaccttatgccc

SEQ ID NO: 223716 - DNA, 51 bp, Artificial
  Synthetic oligonucleotide
gtgacttgcgtcatgcatctttctcctcaggccgcaaccgcttattcgaac

SEQ ID NO: 223717 - DNA, 59 bp, Artificial
  Synthetic oligonucleotide
agttgacctcccctgatttgcggcgtgcactacaggtagatattgaagcggtcggagtc

SEQ ID NO: 223718 - DNA, 51 bp, Artificial
  Synthetic oligonucleotide
atgttgagggctaataggcggactatacacatgattggagccagaagtacc

SEQ ID NO: 223719 - DNA, 51 bp, Artificial
  Synthetic oligonucleotide
atcgactcgctctgtagcgcgtctttgcggggtttcagcctacagcgttga

SEQ ID NO: 223720 - DNA, 51 bp, Artificial
  Synthetic oligonucleotide
attccaggcactgccaggcgtgcgcccttagccctgatcgcgtccacaagt

SEQ ID NO: 223721 - DNA, 51 bp, Artificial
  Synthetic oligonucleotide
gttttagtcgtccacttctcacagactggccaattagaccgcttggcgcaa

SEQ ID NO: 223722 - DNA, 51 bp, Artificial
  Synthetic oligonucleotide
taaccccctgtctgcgaacggcaagttgggcgcgggtgcacgcttgcgacg

SEQ ID NO: 223723 - DNA, 51 bp, Artificial
  Synthetic oligonucleotide
atggatggggaactactcaatgatcaccgaattaaggaacgcctgcaggtg

SEQ ID NO: 223724 - DNA, 51 bp, Artificial
  Synthetic oligonucleotide
gttacgacgataaagacgttcatcgcaaccaatgggcccttaaggtagagg

SEQ ID NO: 223725 - DNA, 51 bp, Artificial
  Synthetic oligonucleotide
tcgctatcgctagccaggactccctatgcctgcccccttacaggctatgga

SEQ ID NO: 223726 - DNA, 51 bp, Artificial
  Synthetic oligonucleotide
tcggcccggtggtagagcgctgacaggcgacgatggataccattcttgagt

SEQ ID NO: 223727 - DNA, 51 bp, Artificial
  Synthetic oligonucleotide
tcgggttggccagatcgtttcgcagtacccgtctgaatccggtcattcaat

SEQ ID NO: 223728 - DNA, 60 bp, Artificial
  Synthetic oligonucleotide
gtttgcagtcaatgctggttcgcagtgccggatagacgcaatcaatcccggtcgaaaaac

SEQ ID NO: 223729 - DNA, 51 bp, Artificial
  Synthetic oligonucleotide
acgcaaggaggtttgaagtggcggctacgctacagcacccaactgccgtta

SEQ ID NO: 223730 - DNA, 51 bp, Artificial
  Synthetic oligonucleotide
tctgtggatccgcccaccagccatcaaggcatgacggcttagtcgggtgat

SEQ ID NO: 223731 - DNA, 51 bp, Artificial
  Synthetic oligonucleotide
tgaaactccctttcttggtagcttgaaaagcttgatagctagaaaacgact

SEQ ID NO: 223732 - DNA, 51 bp, Artificial
  Synthetic oligonucleotide
tgcaggcattctcagtaggtactgtcagtggcacaccctctacaagggtta

SEQ ID NO: 223733 - DNA, 51 bp, Artificial
  Synthetic oligonucleotide
tgcgcaccgttctcgagggggacagccgaaacgactgtcagccggtagtcg

SEQ ID NO: 223734 - DNA, 51 bp, Artificial
  Synthetic oligonucleotide
acccaagtgttagaaataccggatggcgttctgctataagtggcagcaacg

SEQ ID NO: 223735 - DNA, 51 bp, Artificial
  Synthetic oligonucleotide
tggaactggtgacgctcaatgttgaggatgcccgcgctttcgagtcgatcc

SEQ ID NO: 223736 - DNA, 51 bp, Artificial
  Synthetic oligonucleotide
acatctgtgaccctgtaaaacgcgattgggtgctgcgcaatacttctgtcg

SEQ ID NO: 223737 - DNA, 51 bp, Artificial
  Synthetic oligonucleotide
acaagtcagaaacgtggtggccctacaggcgtttctcaactcctgaccagg

SEQ ID NO: 223738 - DNA, 51 bp, Artificial
  Synthetic oligonucleotide
aattgcgcagcgaatgcacgcagttggtcgggagtcatttgatcgagatta

SEQ ID NO: 223739 - DNA, 60 bp, Artificial
  Synthetic oligonucleotide
gggcgaggttgagtgggaatctcttaccgctatttctgttgttggtagccatgattcatc

SEQ ID NO: 223740 - DNA, 51 bp, Artificial
  Synthetic oligonucleotide
tgtttacacactcccgtgccaaagggacgccctttgaaaccccgcctctac

SEQ ID NO: 223741 - DNA, 51 bp, Artificial
  Synthetic oligonucleotide
aagttggccggttattgcgtatccgctctcgtgcgaaacgaggagcaagag

SEQ ID NO: 223742 - DNA, 51 bp, Artificial
  Synthetic oligonucleotide
aactgtactcactgcgctgtgactttcaccacaacgcaacagtctatgact

SEQ ID NO: 223743 - DNA, 51 bp, Artificial
  Synthetic oligonucleotide
ttgactgggtgcaagatcctctttagacttttgtacccttaaatttggtga

SEQ ID NO: 223744 - DNA, 51 bp, Artificial
  Synthetic oligonucleotide
ttgcccaatacatccgctaatctgccagatcaatggaataccggattaacg

SEQ ID NO: 223745 - DNA, 51 bp, Artificial
  Synthetic oligonucleotide
ttgttgcagtcggatgacgctggatgcacaaacgagtagcgccgtagtcgg

SEQ ID NO: 223746 - DNA, 51 bp, Artificial
  Synthetic oligonucleotide
aaagcccacctagatcggcgggctattccatattgacatcacgtcaatgcg

SEQ ID NO: 223747 - DNA, 51 bp, Artificial
  Synthetic oligonucleotide
aaacactggtcggcaatcaaggaggcgacttgccgcctcaaccctgggatc

SEQ ID NO: 223748 - DNA, 51 bp, Artificial
  Synthetic oligonucleotide
aaaattctgctacgaattgatcctcagcaagcgtagtttgcgcaccactgc

SEQ ID NO: 223749 - DNA, 51 bp, Artificial
  Synthetic oligonucleotide
aaaactgatactcccctgatgagtaatacagcagaccgttatgcatacaac

SEQ ID NO: 223750 - DNA, 54 bp, Artificial
  Synthetic oligonucleotide
tagtaatacgtcggggcagtggttcctttgtttctcatactcccggtggaacag

SEQ ID NO: 223751 - DNA, 51 bp, Artificial
  Synthetic oligonucleotide
agtgcgttgcctgaacatctaacccagctgcgtggcttacggcacttgcat

SEQ ID NO: 223752 - DNA, 51 bp, Artificial
  Synthetic oligonucleotide
agtgacactgattgcgacagacgccaagcactaccgcttgctgccttttcg

SEQ ID NO: 223753 - DNA, 51 bp, Artificial
  Synthetic oligonucleotide
tacgcctgccggctcgtttccactactggcaaaaataacaggtccaagcgg

SEQ ID NO: 223754 - DNA, 51 bp, Artificial
  Synthetic oligonucleotide
tacgcttccgacgacttgctgtccggcctggaaggcaacgatcaactgtat

SEQ ID NO: 223755 - DNA, 51 bp, Artificial
  Synthetic oligonucleotide
aggcgcccagatcaagcaacgcgccttggatacagccctgcaactggttgc

SEQ ID NO: 223756 - DNA, 51 bp, Artificial
  Synthetic oligonucleotide
tagaggctgaattcgaaggcgcgcataatagtcgccactccccctcccgac

SEQ ID NO: 223757 - DNA, 51 bp, Artificial
  Synthetic oligonucleotide
tagccttccacctgactccattgtttgctcaatcgcttgtcagaaatcggc

SEQ ID NO: 223758 - DNA, 51 bp, Artificial
  Synthetic oligonucleotide
tagctgataagcctcttgggccggctcatcgagcccctggtaagccaacag

SEQ ID NO: 223759 - DNA, 51 bp, Artificial
  Synthetic oligonucleotide
tagggagtttagccttgacgagcacttttgatcccagaaaacgtaagcccc

SEQ ID NO: 223760 - DNA, 51 bp, Artificial
  Synthetic oligonucleotide
agcggcacaagggttatccacacagttcaggatgaccgtccgtcggtcggc

SEQ ID NO: 223761 - DNA, 60 bp, Artificial
  Synthetic oligonucleotide
gagtcggcagtagcgacatggtgacgatcctgtcttgtggattgtgcaatccagtttaat

SEQ ID NO: 223762 - DNA, 51 bp, Artificial
  Synthetic oligonucleotide
agcggaggctagggggataagcaagcagaccgcacacgcagcggttaagcg

SEQ ID NO: 223763 - DNA, 51 bp, Artificial
  Synthetic oligonucleotide
agcctgtccaaaaggcgtgcttgcgctgtgagtgtcctggccacaacctga

SEQ ID NO: 223764 - DNA, 51 bp, Artificial
  Synthetic oligonucleotide
tcacctcgcttggcagcacgatgctttgtcacagaggattggggttgtggc

SEQ ID NO: 223765 - DNA, 51 bp, Artificial
  Synthetic oligonucleotide
tcattactgccagtctgatgttttcacgcacgctccctgtcgatacgaagt

SEQ ID NO: 223766 - DNA, 51 bp, Artificial
  Synthetic oligonucleotide
agcagctacggtcgcagcctgttcttctcgcagttaagaccagggaacgag

SEQ ID NO: 223767 - DNA, 51 bp, Artificial
  Synthetic oligonucleotide
agcagcaacgttcaacgaagggccgagaaaccactcaatgtggtgagtcgg

SEQ ID NO: 223768 - DNA, 51 bp, Artificial
  Synthetic oligonucleotide
agcaaggagacccatccctatgcgcgtaccttcgaggagggtgtgttgcat

SEQ ID NO: 223769 - DNA, 50 bp, Artificial
  Synthetic oligonucleotide
actgtgccttttttccggttaactgtgccttttttccggttaactgtgcc

SEQ ID NO: 223770 - DNA, 51 bp, Artificial
  Synthetic oligonucleotide
tcgactgaactgcgtcgtaatggtatgacaacagctctacccagcctttgt

SEQ ID NO: 223771 - DNA, 51 bp, Artificial
  Synthetic oligonucleotide
tcgatgccaggcctacggaggttagtgcgttgttcagcaatacgctggact

SEQ ID NO: 223772 - DNA, 56 bp, Artificial
  Synthetic oligonucleotide
tataaaacggatttggactgatgaccaacccattgctatccctacggacaacagtt

SEQ ID NO: 223773 - DNA, 51 bp, Artificial
  Synthetic oligonucleotide
actgattgctgtgctcatgctaggggttccacggttaatggagttttatgg

SEQ ID NO: 223774 - DNA, 51 bp, Artificial
  Synthetic oligonucleotide
tcgccgttgaagctcaccggacgccactatcgtgcgacgctccgcatcgca

SEQ ID NO: 223775 - DNA, 51 bp, Artificial
  Synthetic oligonucleotide
cgacccgaacctgtgttcgaaccctgtaccaacttgcgcatggcagcgcga

SEQ ID NO: 223776 - DNA, 51 bp, Artificial
  Synthetic oligonucleotide
gcagctaacccccaatctgtgctgcgctagtgggctcctaaagggtcagcg

SEQ ID NO: 223777 - DNA, 51 bp, Artificial
  Synthetic oligonucleotide
ggcagtcgcatgcgcgataacctggcacgcgacgggataagtacggcctgg

SEQ ID NO: 223778 - DNA, 51 bp, Artificial
  Synthetic oligonucleotide
ggcataacccctgtacggaaatcgggcctcacgaggacggggtatgaccaa

SEQ ID NO: 223779 - DNA, 51 bp, Artificial
  Synthetic oligonucleotide
cgttaccgaatacagcctgtgatcccgctacgcgccatgccacgcaaaccc

SEQ ID NO: 223780 - DNA, 51 bp, Artificial
  Synthetic oligonucleotide
ctacacgatgacccaggaagtgggggtgtccaatgggaaataaagcggctt

SEQ ID NO: 223781 - DNA, 51 bp, Artificial
  Synthetic oligonucleotide
ccttagggtgcgccgcattcgggtgttgctctacgcgacagaaagggcagt

SEQ ID NO: 223782 - DNA, 51 bp, Artificial
  Synthetic oligonucleotide
gcaggaagagaaggtccgccccagtgcggactcccgatcttaaggctctcc

SEQ ID NO: 223783 - DNA, 58 bp, Artificial
  Synthetic oligonucleotide
caaataacctaaatcaactcactagacatgccaactctaccggtattattccggcaga

SEQ ID NO: 223784 - DNA, 58 bp, Artificial
  Synthetic oligonucleotide
gtttctcttgacccgtcctgtgctccgcaggcagggcatgattaaccgtaacgcgtaa

SEQ ID NO: 223785 - DNA, 51 bp, Artificial
  Synthetic oligonucleotide
cctggagcaaggacagtaaaattgccaggcgcacctacaatgctcgatcag

SEQ ID NO: 223786 - DNA, 51 bp, Artificial
  Synthetic oligonucleotide
gcatgccaatgtgcgcgtttatcgaccgagctaagtgcccggggctgtttg

SEQ ID NO: 223787 - DNA, 51 bp, Artificial
  Synthetic oligonucleotide
ccgttcggaggggatatgcggttttgtagccttcagggccaggttaaccct

SEQ ID NO: 223788 - DNA, 51 bp, Artificial
  Synthetic oligonucleotide
ggtgctctctccgcgctgagtaatggtggtctgtccgaactctgggctcgt

SEQ ID NO: 223789 - DNA, 51 bp, Artificial
  Synthetic oligonucleotide
ggtggcattcgctccgaattacctgacattgatggtggggcgtgccgtgct

SEQ ID NO: 223790 - DNA, 51 bp, Artificial
  Synthetic oligonucleotide
ggtgggaggggctttagccgcgagatttccaatatcgagggtatcgcggct

SEQ ID NO: 223791 - DNA, 51 bp, Artificial
  Synthetic oligonucleotide
ggcttttaacgtaggttggtacataacaaccatcgtgccttttgtgacgga

SEQ ID NO: 223792 - DNA, 51 bp, Artificial
  Synthetic oligonucleotide
ccggtatgagataacggtcacaaggagcgacggggtagcaccaattggcac

SEQ ID NO: 223793 - DNA, 51 bp, Artificial
  Synthetic oligonucleotide
gaaatgctgcgcaaaggcagtggaggtccgtccgaacgccgcattcagttc

SEQ ID NO: 223794 - DNA, 51 bp, Artificial
  Synthetic oligonucleotide
ctccgtgataccgacgcacatgtttcgctgggatcattttaactatggcag

SEQ ID NO: 223795 - DNA, 60 bp, Artificial
  Synthetic oligonucleotide
gatatatacaccattaacgtacttcacgctttgcgggacaggacaactcatcgcatgcgc

SEQ ID NO: 223796 - DNA, 51 bp, Artificial
  Synthetic oligonucleotide
ggcaatcaaggaggcgacttgccgcctcaaccctgggatccggatcacgtt

SEQ ID NO: 223797 - DNA, 51 bp, Artificial
  Synthetic oligonucleotide
cgctcaggatgattgttctttccgaagatgctgatgatgaagttaaacgtg

SEQ ID NO: 223798 - DNA, 51 bp, Artificial
  Synthetic oligonucleotide
gaggacccggagtgttctcgcccgtcactcccgatacgaccacagagccgg

SEQ ID NO: 223799 - DNA, 51 bp, Artificial
  Synthetic oligonucleotide
ggggctggtaagtgaaactagtgaagccgcaagcttcgccgtgttgcaagg

SEQ ID NO: 223800 - DNA, 51 bp, Artificial
  Synthetic oligonucleotide
gaggagcaagaggcgcttctttgcaaagagttcaaggacgcactcgagatt

SEQ ID NO: 223801 - DNA, 51 bp, Artificial
  Synthetic oligonucleotide
cgcctggagatcgtgccgtttgaccccttcctttacaccgtcaatgatccg

SEQ ID NO: 223802 - DNA, 51 bp, Artificial
  Synthetic oligonucleotide
gatggcagtactccgggacctgaggcgcagtacctagcgtttctcgcccag

SEQ ID NO: 223803 - DNA, 51 bp, Artificial
  Synthetic oligonucleotide
cgccccctgtcctctgacgcaaagggtttgggtcagcctctggctgcatca

SEQ ID NO: 223804 - DNA, 51 bp, Artificial
  Synthetic oligonucleotide
gatggggtgcgtttctatacccgtcgcaaggcgattacccagcgttggccg

SEQ ID NO: 223805 - DNA, 51 bp, Artificial
  Synthetic oligonucleotide
gcaaaggcagtggaggtccgtccgaacgccgcattcagttcaccagacgcg

SEQ ID NO: 223806 - DNA, 57 bp, Artificial
  Synthetic oligonucleotide
gatcacagcgcgccaacgctcccccggttttccacgaaacaggggatagtatgacca

SEQ ID NO: 223807 - DNA, 51 bp, Artificial
  Synthetic oligonucleotide
gacctgttctagcgtcttttgtagttcgtcgccagtgacggaccagaggga

SEQ ID NO: 223808 - DNA, 51 bp, Artificial
  Synthetic oligonucleotide
gggtgtctttggcaacgctcaggattcattcattaccgcgcagtgtgtttt

SEQ ID NO: 223809 - DNA, 51 bp, Artificial
  Synthetic oligonucleotide
gacactttcttgtacggctccgaacttgtccacagggcagcgcccaggtaa

SEQ ID NO: 223810 - DNA, 51 bp, Artificial
  Synthetic oligonucleotide
cgccacctgtggctccgtttgggcctgccctgtgtgtgccagcgtgattca

SEQ ID NO: 223811 - DNA, 51 bp, Artificial
  Synthetic oligonucleotide
gggttctcatgaagcgtgggaggccagtttcgcacaagcgaagcgagatgt

SEQ ID NO: 223812 - DNA, 51 bp, Artificial
  Synthetic oligonucleotide
gcaccggctgcccggtaaggccaagcactatctggcacgactgcgacaata

SEQ ID NO: 223813 - DNA, 51 bp, Artificial
  Synthetic oligonucleotide
ctctgacttcgccttgtgcggtaggaagcgggagccttacgcgtccattaa

SEQ ID NO: 223814 - DNA, 51 bp, Artificial
  Synthetic oligonucleotide
gtcggatgacgctggatgcacaaacgagtagcgccgtagtcggacaagcct

SEQ ID NO: 223815 - DNA, 51 bp, Artificial
  Synthetic oligonucleotide
ctggcttataggtccgcaatactgcggtggcccgatacctcagcgacgcgc

SEQ ID NO: 223816 - DNA, 51 bp, Artificial
  Synthetic oligonucleotide
ccacagatgagactgacggccagtcaagattcgtaactgtcgcgacccaag

SEQ ID NO: 223817 - DNA, 60 bp, Artificial
  Synthetic oligonucleotide
tatcgaatacttgaaggagcttctgaccaacactccgtccaccgcaaacatcgagtccta

SEQ ID NO: 223818 - DNA, 51 bp, Artificial
  Synthetic oligonucleotide
ccaattacctggcggatacgctccgcataaggacggctagcagccatgcgc

SEQ ID NO: 223819 - DNA, 51 bp, Artificial
  Synthetic oligonucleotide
cattactcccggagggcgatgggtagccccgacagtactacagtcggaggc

SEQ ID NO: 223820 - DNA, 51 bp, Artificial
  Synthetic oligonucleotide
catgacgcaagaacaaggactcaccgaagacacgcttgtcctggactttct

SEQ ID NO: 223821 - DNA, 51 bp, Artificial
  Synthetic oligonucleotide
gctcgaggcattcgagtccaggcccctcgatccgaggaaagcgaaagcacc

SEQ ID NO: 223822 - DNA, 51 bp, Artificial
  Synthetic oligonucleotide
catcggacgcctctgtaccgctctccccgaaataacaagtggcagtgtaca

SEQ ID NO: 223823 - DNA, 51 bp, Artificial
  Synthetic oligonucleotide
ctggcgttcggctcggtttgaggtagtgacctcacgggcacagctcgatga

SEQ ID NO: 223824 - DNA, 51 bp, Artificial
  Synthetic oligonucleotide
gctgcggcaaggttacgcggctcgtggttgggaactgcttcgtgtgggaag

SEQ ID NO: 223825 - DNA, 51 bp, Artificial
  Synthetic oligonucleotide
cagtgactcagagtgtctttgattgactcaaaatgtctctaattgcagcat

SEQ ID NO: 223826 - DNA, 51 bp, Artificial
  Synthetic oligonucleotide
gctggatgcacaaacgagtagcgccgtagtcggacaagcctcgcagtacaa

SEQ ID NO: 223827 - DNA, 51 bp, Artificial
  Synthetic oligonucleotide
gaaagcccgtgattcaagtagctgtacggccccaggaacgtcattggcgta

SEQ ID NO: 223828 - DNA, 58 bp, Artificial
  Synthetic oligonucleotide
gtaacgcctctacagcggccttgatcgcgtcagttcctgtcagtacctggacgttaat

SEQ ID NO: 223829 - DNA, 51 bp, Artificial
  Synthetic oligonucleotide
gtaagcgttgtaggtaacggtcggagtaaacttggcgcccaatgtgaaagg

SEQ ID NO: 223830 - DNA, 50 bp, Artificial
  Synthetic oligonucleotide
accctcccgataaaccgggccatttgcttgctcgtttcgccttcacgcct

SEQ ID NO: 223831 - DNA, 50 bp, Artificial
  Synthetic oligonucleotide
acagtcaaacaccgtgggttgtgggccggacagcattaaaggttcgaaat

SEQ ID NO: 223832 - DNA, 50 bp, Artificial
  Synthetic oligonucleotide
tggctcatatcgcttcctcgtactgacgttagatggagcgctggttgacg

SEQ ID NO: 223833 - DNA, 50 bp, Artificial
  Synthetic oligonucleotide
accgcaatgacaccacccgaaccctctgtgggtagccggttgcacacttg

SEQ ID NO: 223834 - DNA, 50 bp, Artificial
  Synthetic oligonucleotide
acaggcttcaatgccggctggtccaacggtgagatggcgcaatcgggata

SEQ ID NO: 223835 - DNA, 50 bp, Artificial
  Synthetic oligonucleotide
accttatcggcggccaccagtccaaccggcaccttcgcaactaatggcgt

SEQ ID NO: 223836 - DNA, 50 bp, Artificial
  Synthetic oligonucleotide
acactgagcaggttgtgcatatccagccaggagcgcgggcctttttgcgg

SEQ ID NO: 223837 - DNA, 50 bp, Artificial
  Synthetic oligonucleotide
acactcgcgctgcgccataggctccccaccggtgacgcaaacatgacgtg

SEQ ID NO: 223838 - DNA, 50 bp, Artificial
  Synthetic oligonucleotide
accttgccactgcatccggagcccatgtcctgtcgcaactttcacggcga

SEQ ID NO: 223839 - DNA, 60 bp, Artificial
  Synthetic oligonucleotide
gatgagggtttgccgatcttcgtcagtgatgaacaggaggcgttgccgctacctggattt

SEQ ID NO: 223840 - DNA, 50 bp, Artificial
  Synthetic oligonucleotide
ctgctctggttgtgccggtgtataccagacgaagtctgcctgctcggcgg

SEQ ID NO: 223841 - DNA, 50 bp, Artificial
  Synthetic oligonucleotide
accttggcgttcggggatacccacgtctgccgggatgggaaacagtgaga

SEQ ID NO: 223842 - DNA, 50 bp, Artificial
  Synthetic oligonucleotide
gacgcttgaggccagaattgactttcagcttggtactaacgatgcgcacc

SEQ ID NO: 223843 - DNA, 50 bp, Artificial
  Synthetic oligonucleotide
accctccgtcgcggagcttccggcagagaaccgctgacagcacactcaca

SEQ ID NO: 223844 - DNA, 50 bp, Artificial
  Synthetic oligonucleotide
acaccgttcctctgccgccctctgggtgaatctgcaacgatcgcaggaga

SEQ ID NO: 223845 - DNA, 50 bp, Artificial
  Synthetic oligonucleotide
acacccggatgcgctaacctgcataccggcagtgttatgtccgcgccctt

SEQ ID NO: 223846 - DNA, 50 bp, Artificial
  Synthetic oligonucleotide
acacaccgcttcctcgcctgttttgccttgcaggcctctagctcgccaga

SEQ ID NO: 223847 - DNA, 50 bp, Artificial
  Synthetic oligonucleotide
acacaagcacgggttgcccctatggcggctcccaattgcccggctatggg

SEQ ID NO: 223848 - DNA, 50 bp, Artificial
  Synthetic oligonucleotide
accgagcgcggggaggcttcatagcgtgcaccccaatagggatacccctg

SEQ ID NO: 223849 - DNA, 50 bp, Artificial
  Synthetic oligonucleotide
gactgcccatcaaaccaccgttttatgaacacgatgaaacaccaacaaat

SEQ ID NO: 223850 - DNA, 60 bp, Artificial
  Synthetic oligonucleotide
tatgggcctattatgtctttgttggtggcacgcagagagccactcgaacctgagggggct

SEQ ID NO: 223851 - DNA, 50 bp, Artificial
  Synthetic oligonucleotide
acaagcagcggtaggtcaggcttggatgcggtcgttgtggcgcactcata

SEQ ID NO: 223852 - DNA, 50 bp, Artificial
  Synthetic oligonucleotide
gagagcacgatgaccctagccgcccagatgtctcctgtccccgagccgga

SEQ ID NO: 223853 - DNA, 50 bp, Artificial
  Synthetic oligonucleotide
gagcagcccctgtgcttcacgcgtctgaaccccgagcgtgttgccagcca

SEQ ID NO: 223854 - DNA, 50 bp, Artificial
  Synthetic oligonucleotide
aattgccccagaaagatcgggaacagccgcttacagcgcgtgagattgat

SEQ ID NO: 223855 - DNA, 50 bp, Artificial
  Synthetic oligonucleotide
aattgagggcaccaacaaccgtgggcgctctatcgcgcttactgccccta

SEQ ID NO: 223856 - DNA, 50 bp, Artificial
  Synthetic oligonucleotide
aattcccgtttgcgctcggaggcgctgggctctacaaactaacgtgctgc

SEQ ID NO: 223857 - DNA, 50 bp, Artificial
  Synthetic oligonucleotide
accgatccggtgaaaaagggcgcgcagtatagcggtttaacccggtgccg

SEQ ID NO: 223858 - DNA, 50 bp, Artificial
  Synthetic oligonucleotide
gaattcgaaggcgcgcataatagtcgccgcgttgtgccccgaccagcggt

SEQ ID NO: 223859 - DNA, 50 bp, Artificial
  Synthetic oligonucleotide
acccagcgcgtatcatcaccctccgtcgcggagcttccggcagagaaccg

SEQ ID NO: 223860 - DNA, 50 bp, Artificial
  Synthetic oligonucleotide
accgggttgaacccctggccagcatagtggcggagtgcggctatagtgtg

SEQ ID NO: 223861 - DNA, 60 bp, Artificial
  Synthetic oligonucleotide
gaacatcggtgtaagctaactagctgctatatagcttctagctgctaactcggatgctaa

SEQ ID NO: 223862 - DNA, 50 bp, Artificial
  Synthetic oligonucleotide
tgctcccccataaacactggtcggcaatcaaggaggcgacttgccgcctc

SEQ ID NO: 223863 - DNA, 50 bp, Artificial
  Synthetic oligonucleotide
ggcattctactcgctatgcaggctggcataaatcgactcggcaagctttt

SEQ ID NO: 223864 - DNA, 50 bp, Artificial
  Synthetic oligonucleotide
accgggcttgcactacgggcgcgtccaagatgactggtcggtagggagat

SEQ ID NO: 223865 - DNA, 50 bp, Artificial
  Synthetic oligonucleotide
gacactggacccacatctcaaggggccggccgaactgaacgctccacggg

SEQ ID NO: 223866 - DNA, 50 bp, Artificial
  Synthetic oligonucleotide
ggcgatttagccgcttcgacgtcaaacagccctcacgcgaccgaacaccc

SEQ ID NO: 223867 - DNA, 50 bp, Artificial
  Synthetic oligonucleotide
accggtgagggctccgatagtgacatgcccgggtgggggcacgtggtaga

SEQ ID NO: 223868 - DNA, 50 bp, Artificial
  Synthetic oligonucleotide
ctgttctttcttggccgatgtctggaagtgtttctcgtatttgggcaagc

SEQ ID NO: 223869 - DNA, 50 bp, Artificial
  Synthetic oligonucleotide
accagtgtgacttcccgtccaaaaccgggtgagcgtaccggtaccgcagg

SEQ ID NO: 223870 - DNA, 50 bp, Artificial
  Synthetic oligonucleotide
cttgagcgtagccagggacccgcgtcgcttgggcctgttgtcgaactcgg

SEQ ID NO: 223871 - DNA, 50 bp, Artificial
  Synthetic oligonucleotide
accccacgaagggcctggactgctacgccaagggcgaccgtaactcgcgc

SEQ ID NO: 223872 - DNA, 60 bp, Artificial
  Synthetic oligonucleotide
tcaacaacccctacgtgtaacaacctgcaatcgaaatggcctcgacctgcaatcattgcg

SEQ ID NO: 223873 - DNA, 50 bp, Artificial
  Synthetic oligonucleotide
accaccgccgcaaccggacaatgctgtcaagccgagtaccagggcgaata

SEQ ID NO: 223874 - DNA, 50 bp, Artificial
  Synthetic oligonucleotide
accgtgtgcctatggcagtggccggggcctacaagttccgaagcatttgc

SEQ ID NO: 223875 - DNA, 50 bp, Artificial
  Synthetic oligonucleotide
acctacgggcacaaggggtgcctgcgaaagggccgggtcaggtaaaagct

SEQ ID NO: 223876 - DNA, 50 bp, Artificial
  Synthetic oligonucleotide
cttgcgactttggacactatgccaacctaaaggctgcaacttgatataca

SEQ ID NO: 223877 - DNA, 50 bp, Artificial
  Synthetic oligonucleotide
accacagcgtagcgcagccagacaccgggacattgcctcggccaggggcg

SEQ ID NO: 223878 - DNA, 50 bp, Artificial
  Synthetic oligonucleotide
acctcccggcgaacactggggctgacgagagtttcagcaggttgcatgga

SEQ ID NO: 223879 - DNA, 50 bp, Artificial
  Synthetic oligonucleotide
accgcgctaccaagccctctgagccccgtcacccccttatcggagtgcca

SEQ ID NO: 223880 - DNA, 50 bp, Artificial
  Synthetic oligonucleotide
acctccctgggtagcggaaagtggcaaggctcgatggtcgtccccgttta

SEQ ID NO: 223881 - DNA, 50 bp, Artificial
  Synthetic oligonucleotide
acccctgcttgccacccttgaccagcacggcaagagtcgcacgcaagccc

SEQ ID NO: 223882 - DNA, 50 bp, Artificial
  Synthetic oligonucleotide
accttagggggcgagtgggtggcccggttgtctggggtcgacatgggcgt

SEQ ID NO: 223883 - DNA, 57 bp, Artificial
  Synthetic oligonucleotide
gttgttttacgttcgcttgagcttaatcatcgcggtctttcctccggctcggcatgg

SEQ ID NO: 223884 - DNA, 50 bp, Artificial
  Synthetic oligonucleotide
gacatgggttcatctctgcaggttgaagggagcgcctggttacgcggggc

SEQ ID NO: 223885 - DNA, 50 bp, Artificial
  Synthetic oligonucleotide
acccgacctggggttcctgggccgtcacctgtaatgatgagtggagcggt

SEQ ID NO: 223886 - DNA, 50 bp, Artificial
  Synthetic oligonucleotide
accgcccggttcttttcattgaagcaagcgacgcgccaagcccggaagtt

SEQ ID NO: 223887 - DNA, 50 bp, Artificial
  Synthetic oligonucleotide
tggcgctgcaagtcctggtcttcggtactgacacgcaggtacacccgcgc

SEQ ID NO: 223888 - DNA, 50 bp, Artificial
  Synthetic oligonucleotide
aaagtactctttgcgcgggatggccatgtaccagcactgaaacgctaatt

SEQ ID NO: 223889 - DNA, 50 bp, Artificial
  Synthetic oligonucleotide
aacacggggcgcaggtgaggttccggctaaccggtcgacggtctgttaca

SEQ ID NO: 223890 - DNA, 50 bp, Artificial
  Synthetic oligonucleotide
aacccatcgcaatctcctgatgggttacacctacgcggcccgacccatcc

SEQ ID NO: 223891 - DNA, 50 bp, Artificial
  Synthetic oligonucleotide
gcccttgcgacaacccccatagccttcgcgatgtactccgcatcccccgt

SEQ ID NO: 223892 - DNA, 50 bp, Artificial
  Synthetic oligonucleotide
aaccccgaaggctcaaccggtggtgtgaggccagcgagataggcgggtga

SEQ ID NO: 223893 - DNA, 50 bp, Artificial
  Synthetic oligonucleotide
aaccctggggcggacagtatccgagcgtttatttggaccgggcgttagcc

SEQ ID NO: 223894 - DNA, 58 bp, Artificial
  Synthetic oligonucleotide
tcgatttttcgcaaacctactgtcctccgcaaatatggctgaaccatttgaccacgga

SEQ ID NO: 223895 - DNA, 59 bp, Artificial
  Synthetic oligonucleotide
ggcccacaagttctggagttcaccaaatggctgtagcgcgatctaacgtcctccgtcag

SEQ ID NO: 223896 - DNA, 50 bp, Artificial
  Synthetic oligonucleotide
gccctcaaaaggggtcgggcggcttgaccggtcctcctcatccggaagga

SEQ ID NO: 223897 - DNA, 50 bp, Artificial
  Synthetic oligonucleotide
aaccgcgggtcgattcatggccaccgggtgacgtcctgtcgcaagcgttt

SEQ ID NO: 223898 - DNA, 50 bp, Artificial
  Synthetic oligonucleotide
aaccggatttggcacccgctcaaccttgcacccacaccatcgcccttcgg

SEQ ID NO: 223899 - DNA, 50 bp, Artificial
  Synthetic oligonucleotide
aaccgtgcgaaatcgcgcctcacaccggcgtgcaacactcgcaacctcta

SEQ ID NO: 223900 - DNA, 50 bp, Artificial
  Synthetic oligonucleotide
aacctcagggagtcgggtcaccgtaaaccggtgagtgctgtgaagggcgc

SEQ ID NO: 223901 - DNA, 50 bp, Artificial
  Synthetic oligonucleotide
ggaacgcttatcgaatctccaccaacctacacgatggccacaggtaagga

SEQ ID NO: 223902 - DNA, 50 bp, Artificial
  Synthetic oligonucleotide
aacctcccattccccctcaggagtccgtccatgagtgcccccgtagaagc

SEQ ID NO: 223903 - DNA, 50 bp, Artificial
  Synthetic oligonucleotide
aacctccgagcgctggtgcttgatctgtaacagccacaggccaaaccgga

SEQ ID NO: 223904 - DNA, 50 bp, Artificial
  Synthetic oligonucleotide
aacgagggggcgacttgactggctagcgcgcttctttccgggggctggta

SEQ ID NO: 223905 - DNA, 50 bp, Artificial
  Synthetic oligonucleotide
gctctcatagtgaccacgtgcgtacagctggcagccgtttacccgtcaat

SEQ ID NO: 223906 - DNA, 60 bp, Artificial
  Synthetic oligonucleotide
gggagactgggccgatgtgtacagcacgggacgggatatcgtcagtttgcgtgagcgcta

SEQ ID NO: 223907 - DNA, 50 bp, Artificial
  Synthetic oligonucleotide
gctggtcctgttcaatcgggctaacgcccctttttcgctccaggaacggc

SEQ ID NO: 223908 - DNA, 50 bp, Artificial
  Synthetic oligonucleotide
aaaattacgcgtgagacagccgagaaggctttgacgcaggtcacaacccg

SEQ ID NO: 223909 - DNA, 50 bp, Artificial
  Synthetic oligonucleotide
gctcggttcagagctgttcatgatctctatgcgcttgaactagtagctac

SEQ ID NO: 223910 - DNA, 50 bp, Artificial
  Synthetic oligonucleotide
ttttcagtcaggttttgcaccatgaacgtcaaaatactcggtcggttgtg

SEQ ID NO: 223911 - DNA, 50 bp, Artificial
  Synthetic oligonucleotide
aaaatttacaacgcgaaagcgaccacaacacccaacgccacgcccatttg

SEQ ID NO: 223912 - DNA, 50 bp, Artificial
  Synthetic oligonucleotide
gcgggggccagataaatatggacagcttcgcagccagctgacgagtcgcc

SEQ ID NO: 223913 - DNA, 50 bp, Artificial
  Synthetic oligonucleotide
aaacgacgaacgtcggagcacctgcgccctacacacaatcaaccgcgctt

SEQ ID NO: 223914 - DNA, 50 bp, Artificial
  Synthetic oligonucleotide
aaacgggcgtgtagaatccagggatctcgacgaacgaaggagcggggcca

SEQ ID NO: 223915 - DNA, 50 bp, Artificial
  Synthetic oligonucleotide
aaacggttgcgcaggctggcgtagagtgtacttgcggctacagcacccag

SEQ ID NO: 223916 - DNA, 50 bp, Artificial
  Synthetic oligonucleotide
aaactcgcaccagctccccgggttacgccctcggctaacccaggctacaa

SEQ ID NO: 223917 - DNA, 54 bp, Artificial
  Synthetic oligonucleotide
ggatcgtagcgcgccaacgctccccgggtttcatcgtcgaattaacggggatag

SEQ ID NO: 223918 - DNA, 50 bp, Artificial
  Synthetic oligonucleotide
tttcacgcatggccagcaggtctagcgtttccatgggtgcccctagtcga

SEQ ID NO: 223919 - DNA, 50 bp, Artificial
  Synthetic oligonucleotide
aaagcgggcgtggcaatgtcttccgtgtggtaaaaagtgcagcgggccag

SEQ ID NO: 223920 - DNA, 50 bp, Artificial
  Synthetic oligonucleotide
aaaggcgcgatcaagatggtcggggccgcaagcagtgcccagcgtagcta

SEQ ID NO: 223921 - DNA, 50 bp, Artificial
  Synthetic oligonucleotide
aaaggcgggtggacgagcgatccggggcaagaagtgaagcctaaggtagg

SEQ ID NO: 223922 - DNA, 50 bp, Artificial
  Synthetic oligonucleotide
gcgaccttggtcgcaaccctgcacacggggcgtgccattgctgcgaaact

SEQ ID NO: 223923 - DNA, 50 bp, Artificial
  Synthetic oligonucleotide
gccgcacccgattgggataggcacccgtggcctggaattactaccgcggg

SEQ ID NO: 223924 - DNA, 50 bp, Artificial
  Synthetic oligonucleotide
aagtctcgttcatacgtcccggcacagtagcttagctgggcggagcacgc

SEQ ID NO: 223925 - DNA, 50 bp, Artificial
  Synthetic oligonucleotide
aagtggcgcaaatgcccatggttgctggggctcgcgagaggctgggtagt

SEQ ID NO: 223926 - DNA, 50 bp, Artificial
  Synthetic oligonucleotide
aatagtcgctacggagcgcttgtgccggctaaatgccgatataagtggtt

SEQ ID NO: 223927 - DNA, 50 bp, Artificial
  Synthetic oligonucleotide
aatcagactcccctatatggggttggggcgaccggattcaagcctgcgcc

SEQ ID NO: 223928 - DNA, 59 bp, Artificial
  Synthetic oligonucleotide
cgtacgattatcccgatgctatgtgcaaaggccggtgtcccgctagacgacagtcgcgg

SEQ ID NO: 223929 - DNA, 50 bp, Artificial
  Synthetic oligonucleotide
aatccagacgtaccccactacccctagtgggaaagcagtcgcgggcacct

SEQ ID NO: 223930 - DNA, 50 bp, Artificial
  Synthetic oligonucleotide
ttaagcaactgaaagctaatctgaatgcgcccaggcttccaggacagtcg

SEQ ID NO: 223931 - DNA, 50 bp, Artificial
  Synthetic oligonucleotide
aatcgcgcctcacaccggcgtgcaacactcgcaacctctagtcagatggg

SEQ ID NO: 223932 - DNA, 50 bp, Artificial
  Synthetic oligonucleotide
aatcggacttggatcactggcgagcgggctctacagtacgttcgtggcgc

SEQ ID NO: 223933 - DNA, 50 bp, Artificial
  Synthetic oligonucleotide
aatgaagggtgacctgccagcgagagtgagcccgcaatgcatccccgagt

SEQ ID NO: 223934 - DNA, 50 bp, Artificial
  Synthetic oligonucleotide
aatgcccatggttgctggggctcgcgagaggctgggtagttatgtcgcag

SEQ ID NO: 223935 - DNA, 50 bp, Artificial
  Synthetic oligonucleotide
aatgcgatccccctggcccagtcgatgagtcgtcgggagtcgtttgccgt

SEQ ID NO: 223936 - DNA, 50 bp, Artificial
  Synthetic oligonucleotide
aatgcggggtaggcgcgaatactgacccctgcgcgaggtaactggatcga

SEQ ID NO: 223937 - DNA, 50 bp, Artificial
  Synthetic oligonucleotide
gagcgacatgtgctgcagttctgccacggttatgacgggccgttcctgga

SEQ ID NO: 223938 - DNA, 50 bp, Artificial
  Synthetic oligonucleotide
aattagcgggatgggaagctctggcgcgttggccccttgctaacggcttt

SEQ ID NO: 223939 - DNA, 51 bp, Artificial
  Synthetic oligonucleotide
gaaatcaaatacgtcaacaaggccacccccaagtttcgaaaaacctattcc

SEQ ID NO: 223940 - DNA, 50 bp, Artificial
  Synthetic oligonucleotide
aattcagcgttagggtcacgcgctttatcatgtgccacagggatcttgat

SEQ ID NO: 223941 - DNA, 50 bp, Artificial
  Synthetic oligonucleotide
tgtctgcgctagcaaagaagtacgatatcccgtttatctgtgacgaggtg

SEQ ID NO: 223942 - DNA, 50 bp, Artificial
  Synthetic oligonucleotide
gccacatcaaccgcaaagcctggatgaagccgtattggcggtgaaaaagc

SEQ ID NO: 223943 - DNA, 50 bp, Artificial
  Synthetic oligonucleotide
aacgcacccggcaacaaccccgactactggtgtttgtttccagcaccggg

SEQ ID NO: 223944 - DNA, 50 bp, Artificial
  Synthetic oligonucleotide
aacgcagcatatgcacgccaaacccacggcagacccaagggttattcgct

SEQ ID NO: 223945 - DNA, 50 bp, Artificial
  Synthetic oligonucleotide
aacggattcctggaaacctgctttcgttggtcacgggcggccggtttcgt

SEQ ID NO: 223946 - DNA, 50 bp, Artificial
  Synthetic oligonucleotide
aacgtcgcgccataacacccggatgcgctaacctgcataccggcagtgtt

SEQ ID NO: 223947 - DNA, 50 bp, Artificial
  Synthetic oligonucleotide
aactatatgccacgggcaccattgaggaagcggcgtgttgggctcacgcc

SEQ ID NO: 223948 - DNA, 50 bp, Artificial
  Synthetic oligonucleotide
aactggcattgaattgccgcgccctatccagcaccgacacttccacgggg

SEQ ID NO: 223949 - DNA, 50 bp, Artificial
  Synthetic oligonucleotide
ggacacagcggggcttccgtcatgaactgcggcgagtatagccagacccc

SEQ ID NO: 223950 - DNA, 60 bp, Artificial
  Synthetic oligonucleotide
atggtgtgtcgaaccggcggtgtgccacgaggtcaagcacgcattcgtcgatctcgtgcc

SEQ ID NO: 223951 - DNA, 50 bp, Artificial
  Synthetic oligonucleotide
aagcaggagcccccagactaccgggattggcacactggcgcccacacaat

SEQ ID NO: 223952 - DNA, 50 bp, Artificial
  Synthetic oligonucleotide
ttccagatagcctttggaggacaattggaagttgcggtactcggtaaacg

SEQ ID NO: 223953 - DNA, 50 bp, Artificial
  Synthetic oligonucleotide
aagccctgctgtagatccaccctgccacctcgaatgctgttcaggcggcg

SEQ ID NO: 223954 - DNA, 50 bp, Artificial
  Synthetic oligonucleotide
aagcgtgatccaccctgcgtctgacgggctttcgtagctcaggtcgcgaa

SEQ ID NO: 223955 - DNA, 50 bp, Artificial
  Synthetic oligonucleotide
aagctccaaggggcacccgccgaagagacaggggctcgttggtcggactg

SEQ ID NO: 223956 - DNA, 50 bp, Artificial
  Synthetic oligonucleotide
aagggtaattcgagccccgctctcgcgctagtgggaggccgtgagagtta

SEQ ID NO: 223957 - DNA, 50 bp, Artificial
  Synthetic oligonucleotide
aagggtataatccggcgcccttgaccatacgcaggcagaggcatcgcctg

SEQ ID NO: 223958 - DNA, 50 bp, Artificial
  Synthetic oligonucleotide
aaggtctctcgaagctccaaggggcacccgccgaagagacaggggctcgt

SEQ ID NO: 223959 - DNA, 50 bp, Artificial
  Synthetic oligonucleotide
aagtcgggccgcgattctacaggactcgcccccggtgggagccagcctgc

SEQ ID NO: 223960 - DNA, 50 bp, Artificial
  Synthetic oligonucleotide
cgcaaggggtattcctggcccgctttcatagacggtcgccactccctggt

SEQ ID NO: 223961 - DNA, 58 bp, Artificial
  Synthetic oligonucleotide
gaaaggagtccattttgccttctaagcgcccgcgagcaactttccttctgacctctga

SEQ ID NO: 223962 - DNA, 50 bp, Artificial
  Synthetic oligonucleotide
agggcaaagttgttggggagtgcactggtcaggtaagcaccacccaggga

SEQ ID NO: 223963 - DNA, 50 bp, Artificial
  Synthetic oligonucleotide
aggggtcggcacagtatgcttggcgttccccgcgccgataattacgtccg

SEQ ID NO: 223964 - DNA, 50 bp, Artificial
  Synthetic oligonucleotide
cgaagcgggctgatcctagccctcggtgccggtttgaggtccctaccaaa

SEQ ID NO: 223965 - DNA, 50 bp, Artificial
  Synthetic oligonucleotide
aggtcgagacgtgtccagtgtgcaatggtgctggggacaagcggatcggt

SEQ ID NO: 223966 - DNA, 50 bp, Artificial
  Synthetic oligonucleotide
cgaaaagtgccccaagtcgtgcatcgatattgtgtaacgcctgtcgcgtg

SEQ ID NO: 223967 - DNA, 50 bp, Artificial
  Synthetic oligonucleotide
cgaaaagaccgcggctccgtgttccctcttcggccctcgttggccccgcg

SEQ ID NO: 223968 - DNA, 50 bp, Artificial
  Synthetic oligonucleotide
cctggttgtgcgtcgcagtgtggagattgcggcataatgcgcggctttga

SEQ ID NO: 223969 - DNA, 50 bp, Artificial
  Synthetic oligonucleotide
agtgcccccaataccagaacctcacacgagcctatcgcgtgacttcgcgg

SEQ ID NO: 223970 - DNA, 50 bp, Artificial
  Synthetic oligonucleotide
agtggacgggccaaacctgacagtgctgttgcgtaccgacgtggctcaca

SEQ ID NO: 223971 - DNA, 50 bp, Artificial
  Synthetic oligonucleotide
cctggacaccgcgcctcgtctagaatccgggttgtcttcccaccccaagg

SEQ ID NO: 223972 - DNA, 60 bp, Artificial
  Synthetic oligonucleotide
tactaccagagtagcgaatgagctgggcggtcaattgcgattcgtgcaaagggatgcgct

SEQ ID NO: 223973 - DNA, 50 bp, Artificial
  Synthetic oligonucleotide
cctgacgacagtccagccgaactcatgcctgccggccggggtccatcgtg

SEQ ID NO: 223974 - DNA, 50 bp, Artificial
  Synthetic oligonucleotide
agtttcccagtcgcgcgttgcctaacaccaactcgcacaaagcccggaag

SEQ ID NO: 223975 - DNA, 50 bp, Artificial
  Synthetic oligonucleotide
ataacaaccgtgggaatgcctatgcctgccagcgaaccccgcctctcccg

SEQ ID NO: 223976 - DNA, 50 bp, Artificial
  Synthetic oligonucleotide
atcccgacttcctcgtgtgtcatcggggctaggaccggaaccttccggcc

SEQ ID NO: 223977 - DNA, 50 bp, Artificial
  Synthetic oligonucleotide
atccgcggggatagatggcggtgatgccgtgagcgtgatgttgatcggca

SEQ ID NO: 223978 - DNA, 50 bp, Artificial
  Synthetic oligonucleotide
agcgcgtgcgaggtagaatcccccgagactgaagcaccccgaatcaagcc

SEQ ID NO: 223979 - DNA, 50 bp, Artificial
  Synthetic oligonucleotide
cgcgcttgtcattattcaggtttcgtctgaaggccccgtcgcaagggggc

SEQ ID NO: 223980 - DNA, 50 bp, Artificial
  Synthetic oligonucleotide
agcggacggctgcaaagcccaggaagtaggcacacctccgctaccgaatt

SEQ ID NO: 223981 - DNA, 50 bp, Artificial
  Synthetic oligonucleotide
tagtggccgacctccgtttcatcaagtagccgagccccatgtccgagcca

SEQ ID NO: 223982 - DNA, 50 bp, Artificial
  Synthetic oligonucleotide
cgcgcaatagctggagagggctggtctcattcatgccgtgtacgggctcc

SEQ ID NO: 223983 - DNA, 60 bp, Artificial
  Synthetic oligonucleotide
atgcctcacctctgccgatgtcggctcgcgccctgataacgctctctggtgtgacagacc

SEQ ID NO: 223984 - DNA, 50 bp, Artificial
  Synthetic oligonucleotide
agcggccccgtcatttgtggctggcgtcctttgcttcgatcagactgtgg

SEQ ID NO: 223985 - DNA, 50 bp, Artificial
  Synthetic oligonucleotide
agcgtcggtttaggcgaggccagcaacctgggtgagttactgcgcacagg

SEQ ID NO: 223986 - DNA, 50 bp, Artificial
  Synthetic oligonucleotide
ggggcttccgtcatgaactgcggcgagtatagccagaccccgcgcgcgtc

SEQ ID NO: 223987 - DNA, 50 bp, Artificial
  Synthetic oligonucleotide
agcttgtccgggccgagttggataccttccgggaaagccggggtgattca

SEQ ID NO: 223988 - DNA, 50 bp, Artificial
  Synthetic oligonucleotide
aggagcgccctggagggtggtatccgtctgatccaactgcgggctcccaa

SEQ ID NO: 223989 - DNA, 50 bp, Artificial
  Synthetic oligonucleotide
aggattaggctgcaagcgttattgtcccggtcttgtccgccggccactct

SEQ ID NO: 223990 - DNA, 50 bp, Artificial
  Synthetic oligonucleotide
cgccgcgttgtgccccgaccagcggttttcgatcagaggctttgcattcc

SEQ ID NO: 223991 - DNA, 50 bp, Artificial
  Synthetic oligonucleotide
aggcaccgcccgaacgcaactcgaacactctcaccacaatcggcgacggt

SEQ ID NO: 223992 - DNA, 50 bp, Artificial
  Synthetic oligonucleotide
cgcccagttggctcgatgagttgtgccgcagtggcaagtgggtatggacg

SEQ ID NO: 223993 - DNA, 50 bp, Artificial
  Synthetic oligonucleotide
aggcagcgggatactgacggcccctagcctgaacgggtatcactgaaccc

SEQ ID NO: 223994 - DNA, 59 bp, Artificial
  Synthetic oligonucleotide
gagcgagaatataacacagtccgaaacctacaccttagtcagctttcagatccccagta

SEQ ID NO: 223995 - DNA, 50 bp, Artificial
  Synthetic oligonucleotide
aggcccaagcaactcaagcggtacgtcttttgtaaccttcacagtgttac

SEQ ID NO: 223996 - DNA, 50 bp, Artificial
  Synthetic oligonucleotide
aggcgggcttgcaaagcacggcaccaggacactagggggtgggaccaaag

SEQ ID NO: 223997 - DNA, 50 bp, Artificial
  Synthetic oligonucleotide
cgcagggtcatatcagccacgggcgtgacggctaaacaggccatccgcct

SEQ ID NO: 223998 - DNA, 50 bp, Artificial
  Synthetic oligonucleotide
cccagatgtcccttcgtgcaggccaccccgatctttgctccgatgagagg

SEQ ID NO: 223999 - DNA, 50 bp, Artificial
  Synthetic oligonucleotide
ccaggctccgcctacgcgatgagcccacatgaggctaaaggggtcgacag

SEQ ID NO: 224000 - DNA, 50 bp, Artificial
  Synthetic oligonucleotide
atgtttcccatagcgcagtcgggggagcatggagaagcgcgtacgcccgt

SEQ ID NO: 224001 - DNA, 50 bp, Artificial
  Synthetic oligonucleotide
ccagaggctcggcgtaccccgacaggcatcacagcggttatgctcaaccc

SEQ ID NO: 224002 - DNA, 50 bp, Artificial
  Synthetic oligonucleotide
attaggggaggagttagctcatgatcgtaaaacacacactggctatgacc

SEQ ID NO: 224003 - DNA, 50 bp, Artificial
  Synthetic oligonucleotide
ccacgttcgcctttcaaagcaacaaatggctaggggatgtaaacccggcc

SEQ ID NO: 224004 - DNA, 50 bp, Artificial
  Synthetic oligonucleotide
attcctcgcaattggcaccgctgcataagaccggggccggggtcggaagt

SEQ ID NO: 224005 - DNA, 60 bp, Artificial
  Synthetic oligonucleotide
tcgcagacaatgccaaccgcacatccaatgcatcacacgaagcgatggacctggcagacg

SEQ ID NO: 224006 - DNA, 59 bp, Artificial
  Synthetic oligonucleotide
tactatgcctccgagtgcactctctgcgggtgggtcggtagttcggaagcacttaccga

SEQ ID NO: 224007 - DNA, 50 bp, Artificial
  Synthetic oligonucleotide
caacatgtacggtcgtgagaacggctcgcgtagccagcacgccactgcca

SEQ ID NO: 224008 - DNA, 50 bp, Artificial
  Synthetic oligonucleotide
ccacgaactcccaccttcccagatgtcccttcgtgcaggccaccccgatc

SEQ ID NO: 224009 - DNA, 50 bp, Artificial
  Synthetic oligonucleotide
ccacagactgacgcagagcgggtgctcgtgcttgtccggatggacgcttc

SEQ ID NO: 224010 - DNA, 50 bp, Artificial
  Synthetic oligonucleotide
gtgggccaaagcgggccgatattctcagctaatgtggtcccgaaacgggc

SEQ ID NO: 224011 - DNA, 50 bp, Artificial
  Synthetic oligonucleotide
cacctcccgtcacactcgcgcgttgcagctcagccatcgaacacctctga

SEQ ID NO: 224012 - DNA, 50 bp, Artificial
  Synthetic oligonucleotide
gtggaggtccgtccgaacgccgcattcagttcaccagacgcgacgaacgc

SEQ ID NO: 224013 - DNA, 50 bp, Artificial
  Synthetic oligonucleotide
catcgatgaccggtgagggctccgatagtgacatgcccgggtgggggcac

SEQ ID NO: 224014 - DNA, 50 bp, Artificial
  Synthetic oligonucleotide
catccgggttgtgcccgggaactatctgcgcggtccgtagtggctttacc

SEQ ID NO: 224015 - DNA, 50 bp, Artificial
  Synthetic oligonucleotide
catccgcccagaggtctaggccgagagtaccaagggctgccggaccctca

SEQ ID NO: 224016 - DNA, 50 bp, Artificial
  Synthetic oligonucleotide
caggcctggactgaattgaccgcgcatcggcgggtccgataattcgccga

SEQ ID NO: 224017 - DNA, 58 bp, Artificial
  Synthetic oligonucleotide
cccacaagggtcgttcttgagtcgtcagtttcccactcatactaggtcatcaggtgta

SEQ ID NO: 224018 - DNA, 50 bp, Artificial
  Synthetic oligonucleotide
cagggttcctcgtggtctctgcggaccttgggtcggggcggattcctcta

SEQ ID NO: 224019 - DNA, 50 bp, Artificial
  Synthetic oligonucleotide
ccggtataggcacggatcgcacaataggcaaacccgcgctcccggggcgt

SEQ ID NO: 224020 - DNA, 50 bp, Artificial
  Synthetic oligonucleotide
atgacgcaccgcaccgtttggtagttgcgttgatggcaagctgccacctc

SEQ ID NO: 224021 - DNA, 50 bp, Artificial
  Synthetic oligonucleotide
ccgcgggagccattggacagggcttctcggagaatgatgtgacgtctgcg

SEQ ID NO: 224022 - DNA, 50 bp, Artificial
  Synthetic oligonucleotide
ccgatcggtatcggcttgcttgacccatcgcaacagagcgcgcatctgga

SEQ ID NO: 224023 - DNA, 50 bp, Artificial
  Synthetic oligonucleotide
ccgacctttctccagaaatggctgtgcgcctttcttacgtttttgaccgc

SEQ ID NO: 224024 - DNA, 50 bp, Artificial
  Synthetic oligonucleotide
atgccggctggtccaacggtgagatggcgcaatcgggatacactgaggaa

SEQ ID NO: 224025 - DNA, 50 bp, Artificial
  Synthetic oligonucleotide
atgcgcagtcctgacgacagtccagccgaactcatgcctgccggccgggg

SEQ ID NO: 224026 - DNA, 50 bp, Artificial
  Synthetic oligonucleotide
atgcgcctgtcgttatacgccccaggcacggggaacgaaatgatcgcaca

SEQ ID NO: 224027 - DNA, 50 bp, Artificial
  Synthetic oligonucleotide
atggatgacggagtggacgggccaaacctgacagtgctgttgcgtaccga

SEQ ID NO: 224028 - DNA, 60 bp, Artificial
  Synthetic oligonucleotide
aggcgagagacaatgacgttaaccattgatcatgcgaagaagttagttattgaattctgt

SEQ ID NO: 224029 - DNA, 50 bp, Artificial
  Synthetic oligonucleotide
ccgacctggccaatagccgggttggtccgcattcattccccaagatcggg

SEQ ID NO: 224030 - DNA, 50 bp, Artificial
  Synthetic oligonucleotide
atggctcagcgggtgatgccgcgggttgcgctctggatggaatcacggaa

SEQ ID NO: 224031 - DNA, 50 bp, Artificial
  Synthetic oligonucleotide
ccgacctcagttgtagtcgactcccgcaatgcccacgttcgctccacgag

SEQ ID NO: 224032 - DNA, 50 bp, Artificial
  Synthetic oligonucleotide
ccctaccctcgccccgcgacacaacatgtcgcttgcggtctatcctgtga

SEQ ID NO: 224033 - DNA, 50 bp, Artificial
  Synthetic oligonucleotide
atgggacccgcagcctgcacccgacgttgacccgtcagtgtgaagttttt

SEQ ID NO: 224034 - DNA, 50 bp, Artificial
  Synthetic oligonucleotide
atgggccaactatgagagcccctacagctgctcgggttggacaccggacc

SEQ ID NO: 224035 - DNA, 50 bp, Artificial
  Synthetic oligonucleotide
cccgtctaatcgcgtcgctcgggcctatgcgcttaaaagccaagccacta

SEQ ID NO: 224036 - DNA, 50 bp, Artificial
  Synthetic oligonucleotide
cccgaaaacgagcgcccacgtgtacggaatgtttgtggacgaagcgccaa

SEQ ID NO: 224037 - DNA, 50 bp, Artificial
  Synthetic oligonucleotide
atggtgaatgacaatctgttttataggcatggttgcgcgtcctgtacttg

SEQ ID NO: 224038 - DNA, 50 bp, Artificial
  Synthetic oligonucleotide
acgggaatctggccggttcgaagagggtcgcacgggcattcggagatagg

SEQ ID NO: 224039 - DNA, 54 bp, Artificial
  Synthetic oligonucleotide
atgcgctatctgaaacgccttgggtacagggacagacccccacccgaattcccg

SEQ ID NO: 224040 - DNA, 50 bp, Artificial
  Synthetic oligonucleotide
tcggatgagttgcgcaagctaggtaagtaatgttgcgatgaccgggcaag

SEQ ID NO: 224041 - DNA, 50 bp, Artificial
  Synthetic oligonucleotide
acgggtcggtgacagcccccggggaacgaacgccaggcttaagctgatac

SEQ ID NO: 224042 - DNA, 50 bp, Artificial
  Synthetic oligonucleotide
acggtcgcaggccagacctcatatctcgccccatggttcgcacaggcgaa

SEQ ID NO: 224043 - DNA, 50 bp, Artificial
  Synthetic oligonucleotide
acgtcgacccgcgacgtcgttagacaggcgttggctcaaacgtttgcggc

SEQ ID NO: 224044 - DNA, 50 bp, Artificial
  Synthetic oligonucleotide
acgtctgcgtacagtcggaagcgcgagagggcctcgcaccttcacccctt

SEQ ID NO: 224045 - DNA, 50 bp, Artificial
  Synthetic oligonucleotide
acgttgcgctccccaagcttctgcctccccgcgttcagtgataatgcaga

SEQ ID NO: 224046 - DNA, 50 bp, Artificial
  Synthetic oligonucleotide
actcccacacggaagcgttggccgagcttaatgctgcgggcgtgaacatc

SEQ ID NO: 224047 - DNA, 50 bp, Artificial
  Synthetic oligonucleotide
ctccacatccaccggacgttagatgtttatgaatgcacgaactgtgggcg

SEQ ID NO: 224048 - DNA, 50 bp, Artificial
  Synthetic oligonucleotide
actgaagcaccggattcacgtttatctgcgttcaatagcagtgcctggaa

SEQ ID NO: 224049 - DNA, 50 bp, Artificial
  Synthetic oligonucleotide
ctattcagcattgcattcaatgcggaaactatacacgcgccattgtggat

SEQ ID NO: 224050 - DNA, 60 bp, Artificial
  Synthetic oligonucleotide
tacttgaaggagcttctgaccaacactccgtccaccgcaaacatcgagtcctacgcgagc

SEQ ID NO: 224051 - DNA, 50 bp, Artificial
  Synthetic oligonucleotide
ctaggatgccgctcatgcgccgatttaaacagctacttgcggggcgccag

SEQ ID NO: 224052 - DNA, 50 bp, Artificial
  Synthetic oligonucleotide
actgccgcgggagaagtcacggccttgccaccagtgcttgggcagtacct

SEQ ID NO: 224053 - DNA, 50 bp, Artificial
  Synthetic oligonucleotide
actggccagacggagtgggttggcttgtaccccagcagccgcgaagagtg

SEQ ID NO: 224054 - DNA, 50 bp, Artificial
  Synthetic oligonucleotide
actggcgagcgggctctacagtacgttcgtggcgcagcggagctattccg

SEQ ID NO: 224055 - DNA, 50 bp, Artificial
  Synthetic oligonucleotide
gggactcgccagcgtttttcatctgcccgtgccaagccgtgacgaaggta

SEQ ID NO: 224056 - DNA, 50 bp, Artificial
  Synthetic oligonucleotide
tcttgcttgggatcgaccagagctgagccgctacgttcgctttcacccgg

SEQ ID NO: 224057 - DNA, 50 bp, Artificial
  Synthetic oligonucleotide
accttttcgtacagcgctctgcgcgaggggttccgtcctctgcggcgagt

SEQ ID NO: 224058 - DNA, 50 bp, Artificial
  Synthetic oligonucleotide
ggcggcacaagccgtcccgaaaaggtctatcggccctcataaatgcggcg

SEQ ID NO: 224059 - DNA, 50 bp, Artificial
  Synthetic oligonucleotide
ggcgttccccgcgccgataattacgtccgagggttaacccaacaggggta

SEQ ID NO: 224060 - DNA, 50 bp, Artificial
  Synthetic oligonucleotide
ctgctagtcggctaagctttcccagatccgtgagggaagttagatctctc

SEQ ID NO: 224061 - DNA, 60 bp, Artificial
  Synthetic oligonucleotide
ggcaaagcgtatccaggcgcacacaggtgaggtcgtggacatctgcgaccctgtaaaacg

SEQ ID NO: 224062 - DNA, 50 bp, Artificial
  Synthetic oligonucleotide
acgatgtgcgtgaaaataaacgctccggcaaagcactcaggacggtcagc

SEQ ID NO: 224063 - DNA, 50 bp, Artificial
  Synthetic oligonucleotide
ctgacggtcagccaagcgagagagcacgatgaccctagccgcccagatgt

SEQ ID NO: 224064 - DNA, 50 bp, Artificial
  Synthetic oligonucleotide
acgcacatggaaagcaggagcccccagactaccgggattggcacactggc

SEQ ID NO: 224065 - DNA, 50 bp, Artificial
  Synthetic oligonucleotide
acgccatcacaagtccccaacagggtccactcttgccactggccggaata

SEQ ID NO: 224066 - DNA, 50 bp, Artificial
  Synthetic oligonucleotide
acgcctaggcttctctgtgtcaatccgccgcaggggagcttgccgtgccc

SEQ ID NO: 224067 - DNA, 50 bp, Artificial
  Synthetic oligonucleotide
acgcctcccgcagactcctcgcgatcagcgtctgtccacaaatgctcggt

SEQ ID NO: 224068 - DNA, 50 bp, Artificial
  Synthetic oligonucleotide
acgcgtagtctcgctgccgggagggtaaaggccacatggcggctattgaa

SEQ ID NO: 224069 - DNA, 50 bp, Artificial
  Synthetic oligonucleotide
acgctcaggttacgaccattggcacgaagctcaaagccggtcccggcaat

SEQ ID NO: 224070 - DNA, 50 bp, Artificial
  Synthetic oligonucleotide
acgctgaaaccccggcgacgaaactcattcggccccttatccctgcggca

SEQ ID NO: 224071 - DNA, 50 bp, Artificial
  Synthetic oligonucleotide
acggaggcttgccgacgacagacaagctgtcgcccttacgcttgaggccg

SEQ ID NO: 224072 - DNA, 60 bp, Artificial
  Synthetic oligonucleotide
ggatcttccacacataggaatggagggcggccccgtgagtcgcccgtgcagcccagatgg

SEQ ID NO: 224073 - DNA, 50 bp, Artificial
  Synthetic oligonucleotide
ggctggtctatttaggtatacccatagagccatagctgataagccatggc

SEQ ID NO: 224074 - DNA, 50 bp, Artificial
  Synthetic oligonucleotide
acggatgccaacccaggagccggacgatattcgtgcaacccaggagcgca

SEQ ID NO: 224075 - DNA, 50 bp, Artificial
  Synthetic oligonucleotide
acggcctgcgagttggattgcgtccggctgcagatgagtgtgcggttcat

SEQ ID NO: 224076 - DNA, 50 bp, Artificial
  Synthetic oligonucleotide
ctcgactctgcatggttcggccaaggcgcccagatcaagcaacgcgcctt

SEQ ID NO: 224077 - DNA, 50 bp, Artificial
  Synthetic oligonucleotide
agcagcacatcgacatccggtacccccgcaacccaatccgggtgctcggg

SEQ ID NO: 224078 - DNA, 50 bp, Artificial
  Synthetic oligonucleotide
cggtgctagggtccggccccagtttcccggtatcatgctcagcctttacc

SEQ ID NO: 224079 - DNA, 50 bp, Artificial
  Synthetic oligonucleotide
cggtctgcgagcttgcgcggatctacgtgcggaggtatcggtcctttcaa

SEQ ID NO: 224080 - DNA, 50 bp, Artificial
  Synthetic oligonucleotide
agcaggcggctcccttgagggaattttgggttgccattcgtcggcaactt

SEQ ID NO: 224081 - DNA, 50 bp, Artificial
  Synthetic oligonucleotide
agcaggttcctcgttgtgggggctgacgaatgcgtcggatgtaacgggct

SEQ ID NO: 224082 - DNA, 50 bp, Artificial
  Synthetic oligonucleotide
agccatcgtgagcgtgaagcggtcctcaggggcaagcgagttgaactcgg

SEQ ID NO: 224083 - DNA, 60 bp, Artificial
  Synthetic oligonucleotide
atgcgggcgctgggagttgatttgaccgccagaccgcatacgcaataagaacacgcccat

SEQ ID NO: 224084 - DNA, 50 bp, Artificial
  Synthetic oligonucleotide
agcccaccgcaacggagccaaacgcgatgccgcataagtctctcggtcgc

SEQ ID NO: 224085 - DNA, 50 bp, Artificial
  Synthetic oligonucleotide
cggggctaccgatgcaaaggatttctcggaacttgtgccaccgcggctta

SEQ ID NO: 224086 - DNA, 50 bp, Artificial
  Synthetic oligonucleotide
cggatcgtctctgtggatccgcccaccagccatcaaggcatgacggctta

SEQ ID NO: 224087 - DNA, 50 bp, Artificial
  Synthetic oligonucleotide
cggaggcgctgggctctacaaactaacgtgctgcccagtaacagtccggc

SEQ ID NO: 224088 - DNA, 50 bp, Artificial
  Synthetic oligonucleotide
ggggcaaggggatcggacacagcggggcttccgtcatgaactgcggcgag

SEQ ID NO: 224089 - DNA, 50 bp, Artificial
  Synthetic oligonucleotide
agccgcctaccagccttctcacaagcgtaggaggcggaccgtgcaagggt

SEQ ID NO: 224090 - DNA, 50 bp, Artificial
  Synthetic oligonucleotide
tattgatcgctcccctggcactacatcatcgggactacttcagttcaggc

SEQ ID NO: 224091 - DNA, 50 bp, Artificial
  Synthetic oligonucleotide
agccggcagtcgatgctctggactgagtcggagcgctagtctagctcagc

SEQ ID NO: 224092 - DNA, 50 bp, Artificial
  Synthetic oligonucleotide
agcgatccttcgcataaggaaagcaggatgtacgccaaccggccaccggc

SEQ ID NO: 224093 - DNA, 50 bp, Artificial
  Synthetic oligonucleotide
agcgatgctgatcacgaggaaccagacctagaaccacggcagagcgccct

SEQ ID NO: 224094 - DNA, 60 bp, Artificial
  Synthetic oligonucleotide
tagcggggctgtccctgacgcatcgaggttgagtaacgatgcctcgaactctgatgagct

SEQ ID NO: 224095 - DNA, 50 bp, Artificial
  Synthetic oligonucleotide
ggggcatgctaggttgcacggtgccgctatcccatttcccctaagccata

SEQ ID NO: 224096 - DNA, 50 bp, Artificial
  Synthetic oligonucleotide
tcctttatcgaaggcaccagtttgttggcgaaactgaccggccctggccc

SEQ ID NO: 224097 - DNA, 50 bp, Artificial
  Synthetic oligonucleotide
cgtctgaaccccgagcgtgttgccagccacctgagcacgttattggctga

SEQ ID NO: 224098 - DNA, 50 bp, Artificial
  Synthetic oligonucleotide
agaaatttggcgctctacgccagaacgccggcagaccctggggacgaacg

SEQ ID NO: 224099 - DNA, 50 bp, Artificial
  Synthetic oligonucleotide
agacatccacctcgctcccgaagcgtacgcacaaccctggcgcacaggcg

SEQ ID NO: 224100 - DNA, 50 bp, Artificial
  Synthetic oligonucleotide
gggcatgggactctctcgctaaacgcccgccgttgtacggcaggtagacg

SEQ ID NO: 224101 - DNA, 50 bp, Artificial
  Synthetic oligonucleotide
agaccagcagacgcaacgggaagtacatctctggcccacgcagacccgac

SEQ ID NO: 224102 - DNA, 50 bp, Artificial
  Synthetic oligonucleotide
agaccgcctagggttttccggaggtcgttcggtttgagtcacctcggcct

SEQ ID NO: 224103 - DNA, 50 bp, Artificial
  Synthetic oligonucleotide
gggcatgtacagggttcctcgtggtctctgcggaccttgggtcggggcgg

SEQ ID NO: 224104 - DNA, 50 bp, Artificial
  Synthetic oligonucleotide
agacgcctcgtgagcgcgcgaccctggcttcaggaccctaatcggccgca

SEQ ID NO: 224105 - DNA, 60 bp, Artificial
  Synthetic oligonucleotide
gaggggagctactatgcctccgagtgcactctctgcgggtgggtcggtagttcggaagca

SEQ ID NO: 224106 - DNA, 50 bp, Artificial
  Synthetic oligonucleotide
agagattggccgcacgacagccgacgctaatggcgcctggtcgatagtgc

SEQ ID NO: 224107 - DNA, 50 bp, Artificial
  Synthetic oligonucleotide
agagggctcgttttcatccgctgtccgtgacaagagcccgctccggagct

SEQ ID NO: 224108 - DNA, 50 bp, Artificial
  Synthetic oligonucleotide
agagtcgccagacagttgccggggcctccgctctccttgaagtcttcccc

SEQ ID NO: 224109 - DNA, 50 bp, Artificial
  Synthetic oligonucleotide
cgtcgaccgacagaaccatgacgtcgcgccgaccgagagaaacgcaatgc

SEQ ID NO: 224110 - DNA, 50 bp, Artificial
  Synthetic oligonucleotide
agcacactggccctgttgcacgacccctatcggttcatcgccaggcggtg

SEQ ID NO: 224111 - DNA, 50 bp, Artificial
  Synthetic oligonucleotide
agcaccgctcgccactcatcggcacaccgcaaaataactggcactacgcc

SEQ ID NO: 224112 - DNA, 50 bp, Artificial
  Synthetic oligonucleotide
agcacgctcggtagcgggtgcgttgtggggtgctttcaccaatgccggac

SEQ ID NO: 224113 - DNA, 50 bp, Artificial
  Synthetic oligonucleotide
cgtagttcatcctcgaaccttatcggcggccaccagtccaaccggcacct

SEQ ID NO: 224114 - DNA, 60 bp, Artificial
  Synthetic oligonucleotide
ccgtgcataacacatttcgctctccattgaggttgcgccgtcacttttcttgcttagtgg

SEQ ID NO: 224115 - DNA, 52 bp, Artificial
  Synthetic oligonucleotide
aggaggcggacccccatgtagtaacacgggggtaacacgggggtcaggtgca

SEQ ID NO: 224116 - DNA, 53 bp, Artificial
  Synthetic oligonucleotide
cccacaaaaggttacgtaggtgctcccaagattcggcgtcgctttgttctacg

SEQ ID NO: 224117 - DNA, 57 bp, Artificial
  Synthetic oligonucleotide
agcttttaatcccacgctcattgtggcttatcggctacgcccgatctaagcttttac

SEQ ID NO: 224118 - DNA, 56 bp, Artificial
  Synthetic oligonucleotide
ctaaagcacgggtaactcttgacccattactaacttcgatcgcgatcggacgccaa

SEQ ID NO: 224119 - DNA, 59 bp, Artificial
  Synthetic oligonucleotide
agcttctgaccaacactccgtccaccgcaaacatcgagtcctacgcgagccttatcagg

SEQ ID NO: 224120 - DNA, 58 bp, Artificial
  Synthetic oligonucleotide
agcttccgccctttgggccggattcaacgtccatgcgtctgccaatgtgttccgagag

SEQ ID NO: 224121 - DNA, 59 bp, Artificial
  Synthetic oligonucleotide
taaacggaggtttgtcgatgacacattcgaatcaggatttgacgccagaggatgagggt

SEQ ID NO: 224122 - DNA, 55 bp, Artificial
  Synthetic oligonucleotide
ccgaagaagtagttctgatatcccagtggcggcccggaaaggatcgcttgtaaaa

SEQ ID NO: 224123 - DNA, 60 bp, Artificial
  Synthetic oligonucleotide
taaaaggccagtttcagctaaatgagatagtgactatgaacgacatccccgctcccgagc

SEQ ID NO: 224124 - DNA, 60 bp, Artificial
  Synthetic oligonucleotide
agctcgaatccgtgtatggcgagaaactggctgaaacgatgctggccaaccaccggacaa

SEQ ID NO: 224125 - DNA, 58 bp, Artificial
  Synthetic oligonucleotide
actgagggtcatatcgatccgtccggaattggtaggcaagttcctataatcttcactg

SEQ ID NO: 224126 - DNA, 50 bp, Artificial
  Synthetic oligonucleotide
cgcgtaactggcgagccgggcgtttaacgcccggctttcccccgcccttg

SEQ ID NO: 224127 - DNA, 59 bp, Artificial
  Synthetic oligonucleotide
cgatagtctcgcaggttagcataacctgtttgcgccccccgtctgccaggtccatcgct

SEQ ID NO: 224128 - DNA, 60 bp, Artificial
  Synthetic oligonucleotide
ctgcaggcaccaaggacactcgcggaagagccgcgagaaaggacgctgtgtgcctgcttt

SEQ ID NO: 224129 - DNA, 60 bp, Artificial
  Synthetic oligonucleotide
aagcctcgcatcggtagacgtacagcactatcggagcggtcttatccatggtcacgttct

SEQ ID NO: 224130 - DNA, 60 bp, Artificial
  Synthetic oligonucleotide
ttccaatcattaactcaccgattagctcgaataccgtaagctagactatgcatcgaacca

SEQ ID NO: 224131 - DNA, 59 bp, Artificial
  Synthetic oligonucleotide
aagccatattatggaactcctcatacaaccgaacaatcgcataattcccttcagtgccg

SEQ ID NO: 224132 - DNA, 60 bp, Artificial
  Synthetic oligonucleotide
ttcccattacatctaccattaagacttatccctggcgcatatcctgtgttatttctaata

SEQ ID NO: 224133 - DNA, 55 bp, Artificial
  Synthetic oligonucleotide
gcttgcgggtttctaggtttttcgcgaaggagcaaaaatccacgtcctgagtata

SEQ ID NO: 224134 - DNA, 55 bp, Artificial
  Synthetic oligonucleotide
aagatcgaggaaccgaccatgacttacgaacgcacgttggaagcctaccgatcgt

SEQ ID NO: 224135 - DNA, 57 bp, Artificial
  Synthetic oligonucleotide
aagagcttctggaaggtttagccttgggctagcacctcaagaagggctaagccgcta

SEQ ID NO: 224136 - DNA, 60 bp, Artificial
  Synthetic oligonucleotide
gcagctactggggtattcggtcaaagctgctgacggtatgaggtgtttgctcttgagtgc

SEQ ID NO: 224137 - DNA, 56 bp, Artificial
  Synthetic oligonucleotide
gcgtacagtctaaagacacattacagccaaacccttataagctaagggtttcaggc

SEQ ID NO: 224138 - DNA, 59 bp, Artificial
  Synthetic oligonucleotide
ctgcactccgtggacgtccgcctgaacgcctcctccggtgactacctggctaagcagga

SEQ ID NO: 224139 - DNA, 60 bp, Artificial
  Synthetic oligonucleotide
ttcgaaatgaacctgtgcaagtacgcgatcaaccgtgagctgcaagcgctttacggggac

SEQ ID NO: 224140 - DNA, 60 bp, Artificial
  Synthetic oligonucleotide
cgatgtgtacagcacgggacgggatatcgtcagtttgcgtgagcgctacggcttaacctc

SEQ ID NO: 224141 - DNA, 60 bp, Artificial
  Synthetic oligonucleotide
cagcgtggcaagttggcccttgaacaagggcggatcatgcttgcggccgcaaaagagcgg

SEQ ID NO: 224142 - DNA, 60 bp, Artificial
  Synthetic oligonucleotide
aactacagcgcagtcacgtgcgatctgctcagtgaccgctagcccgtcgctgctgtagaa

SEQ ID NO: 224143 - DNA, 59 bp, Artificial
  Synthetic oligonucleotide
aacggggtgtggatgtgtccaagtcacgcggatacagttgacaagcttcagtaccaata

SEQ ID NO: 224144 - DNA, 60 bp, Artificial
  Synthetic oligonucleotide
ttctatatgtcgaatcaccgcgcaatctttcgcgcaatcagcacccttgctggtcgtggc

SEQ ID NO: 224145 - DNA, 60 bp, Artificial
  Synthetic oligonucleotide
aacggacctgtagccccctcagactatgcgattaccggtgctgattcactgggctctggc

SEQ ID NO: 224146 - DNA, 60 bp, Artificial
  Synthetic oligonucleotide
aacgctaactgatacgcactggtgcatttggtgcgcgtttaatcggctccgctagacagg

SEQ ID NO: 224147 - DNA, 56 bp, Artificial
  Synthetic oligonucleotide
tcctgtgcgacacaaagttttacctgtaattgtccacctattccgagtttggaatg

SEQ ID NO: 224148 - DNA, 60 bp, Artificial
  Synthetic oligonucleotide
actgaacgatctgtaaagctgctctcgagaaagacctgtctcacgcgcaagctcgctcat

SEQ ID NO: 224149 - DNA, 53 bp, Artificial
  Synthetic oligonucleotide
aacgcggtccaacccgttcagtgtattggcgcagttaaagcgtgacccaaacg

SEQ ID NO: 224150 - DNA, 60 bp, Artificial
  Synthetic oligonucleotide
gcgtctgagcgtttgtcactgtccgcaaaaaagttagtagtctgcgctggattacaatct

SEQ ID NO: 224151 - DNA, 60 bp, Artificial
  Synthetic oligonucleotide
ttgactgcgagtgagcgcacgccgtttctgtctcattcgagtacacccttgcgggacgcg

SEQ ID NO: 224152 - DNA, 57 bp, Artificial
  Synthetic oligonucleotide
ctcaattgccgccggacggccattaaacgaccttgaacgcacccatagaacctcatc

SEQ ID NO: 224153 - DNA, 59 bp, Artificial
  Synthetic oligonucleotide
cgagcggctgggccactgtcgtccagaacgccgcaacctggctgttctggaccttgacc

SEQ ID NO: 224154 - DNA, 60 bp, Artificial
  Synthetic oligonucleotide
ccagatggacaatcgacacctgttcaacacacataacgtgagctgattatggcgttcact

SEQ ID NO: 224155 - DNA, 55 bp, Artificial
  Synthetic oligonucleotide
ctcacatgttttgtaattggcaacatgggcgtttttcgtcacgttctcaaaaact

SEQ ID NO: 224156 - DNA, 56 bp, Artificial
  Synthetic oligonucleotide
ttaaattcgtctatagtaaaccttttagttcccattactcgatactgacatgccaa

SEQ ID NO: 224157 - DNA, 58 bp, Artificial
  Synthetic oligonucleotide
cacgggctcaacaggcaacacacctggcagcgcgtaaggcgtatggtttgaaagcgtt

SEQ ID NO: 224158 - DNA, 60 bp, Artificial
  Synthetic oligonucleotide
cgctcaccggagggtctctcgcggccatgccgtgtcatacgcggccccgtcgtagctaca

SEQ ID NO: 224159 - DNA, 58 bp, Artificial
  Synthetic oligonucleotide
actccttaaactgcagactggccgctccgtagagcgcggccggtggaattctgttggc

SEQ ID NO: 224160 - DNA, 60 bp, Artificial
  Synthetic oligonucleotide
cactgctgacaagaggcatgccctcgtgcaacctggactgtgtccgattgaagtacacct

SEQ ID NO: 224161 - DNA, 57 bp, Artificial
  Synthetic oligonucleotide
ctcccgagcagaaaatgggtcgcccacgtagttatgatcgtctggtactccacggag

SEQ ID NO: 224162 - DNA, 57 bp, Artificial
  Synthetic oligonucleotide
ttaccagaagggggaagggtgggttgagctttactggtggcctgagctgctaccaca

SEQ ID NO: 224163 - DNA, 59 bp, Artificial
  Synthetic oligonucleotide
ccacatagtggccaaccgagtaggtatggatggggaactactcaatgatcaccgaatta

SEQ ID NO: 224164 - DNA, 58 bp, Artificial
  Synthetic oligonucleotide
aagttgtgcctgtcctgccataaccccttcccgcacggaatccgcgcgtgactcttgc

SEQ ID NO: 224165 - DNA, 60 bp, Artificial
  Synthetic oligonucleotide
ctgcctggcacggacgcagtggagggccagccattggctgaccggtatgagataacggtc

SEQ ID NO: 224166 - DNA, 58 bp, Artificial
  Synthetic oligonucleotide
ttactcgcatactcgcgtgcgtcaagttcacgctttgggtttcgtgtatggtacccac

SEQ ID NO: 224167 - DNA, 60 bp, Artificial
  Synthetic oligonucleotide
ctgcatccagccacttcgacctgcaatcgagcgcaaccgaccaggattaaatgcgactga

SEQ ID NO: 224168 - DNA, 59 bp, Artificial
  Synthetic oligonucleotide
ttagcgggccgggtgtgagactcgtaaaggctattttgcgcatgtatttacgtgctgtc

SEQ ID NO: 224169 - DNA, 56 bp, Artificial
  Synthetic oligonucleotide
ggtagcctacagactgggggcgtttgtgcaacaacgccggtcgtcgccctcccaca

SEQ ID NO: 224170 - DNA, 55 bp, Artificial
  Synthetic oligonucleotide
ggtgcccaccagttgacaaggtgtacaccgcaggaacacactcccccaaaaggtg

SEQ ID NO: 224171 - DNA, 60 bp, Artificial
  Synthetic oligonucleotide
cgcgtatggtagcgcagagagcggggtcgtgactgccagacccctggtgtctgggctccg

SEQ ID NO: 224172 - DNA, 60 bp, Artificial
  Synthetic oligonucleotide
aaggtcaggggagcgctgagtcgttgcgaggcccatgctgcgtaatcgcagaccgccaat

SEQ ID NO: 224173 - DNA, 60 bp, Artificial
  Synthetic oligonucleotide
ttcaatgctggtaagcgcggctctccctggacggagctgtgtaaggctcagggagccgtc

SEQ ID NO: 224174 - DNA, 60 bp, Artificial
  Synthetic oligonucleotide
ttcaccctatctcctacttgcatcatcatcccctggcgtcagtgaccggcccggaatttc

SEQ ID NO: 224175 - DNA, 60 bp, Artificial
  Synthetic oligonucleotide
aagctcaccttacgcgctctttgaagcgcctcactgatcgccgtaggtttttcaatgctg

SEQ ID NO: 224176 - DNA, 60 bp, Artificial
  Synthetic oligonucleotide
gcttgcgtggcgttttgggctcctgagaaggctcaggaggcatgtcacgtaattgccctt

SEQ ID NO: 224177 - DNA, 60 bp, Artificial
  Synthetic oligonucleotide
gctgttgctatcaacgatgagtatgacgctgaaacaaagcgaatatctcaagaggttgcg

SEQ ID NO: 224178 - DNA, 60 bp, Artificial
  Synthetic oligonucleotide
cgcaggttcattcgcaaataatcccggtttgctggctcggatagatgcaatcaatcccgg

SEQ ID NO: 224179 - DNA, 57 bp, Artificial
  Synthetic oligonucleotide
cgcagtttttgcccgagaagcgttatctcagtgccgaggtgaagtttggcgtgaacg

SEQ ID NO: 224180 - DNA, 56 bp, Artificial
  Synthetic oligonucleotide
aaagggcactagacgcttggccgtacggcacaggtcggacagtgattcgtttcacc

SEQ ID NO: 224181 - DNA, 60 bp, Artificial
  Synthetic oligonucleotide
gggactgctgggatgtgattatagtcgtagcgccatatctcttttccgctcaattcgctc

SEQ ID NO: 224182 - DNA, 53 bp, Artificial
  Synthetic oligonucleotide
tttacgtctaaggagggccaaacatggcttggcaaaagtacgtttcaaaccac

SEQ ID NO: 224183 - DNA, 60 bp, Artificial
  Synthetic oligonucleotide
aaagccgcacgacttcgcagaacctatggtacgtggcgatcagtcgtgcgaggcatgagg

SEQ ID NO: 224184 - DNA, 60 bp, Artificial
  Synthetic oligonucleotide
gtctgagctagctgagctcggacagtaaaaatattttacgcacattacatgcgtacagtc

SEQ ID NO: 224185 - DNA, 60 bp, Artificial
  Synthetic oligonucleotide
aaagatatctgagcttatcgaatcgcgagagattgcctggcgtcaaatccatctggccct

SEQ ID NO: 224186 - DNA, 58 bp, Artificial
  Synthetic oligonucleotide
tttcgttttgctcggtatgccttatttgtagatttgcaactctgtccagggtgatagg

SEQ ID NO: 224187 - DNA, 60 bp, Artificial
  Synthetic oligonucleotide
gctggtatgtcttgttggaggggtcaagctcaagcagtgatgtgtaaagcgacattgctt

SEQ ID NO: 224188 - DNA, 60 bp, Artificial
  Synthetic oligonucleotide
catcggcaacattacccgcggattcgcgtgacgcctcatgaactgcacagccaccaaaca

SEQ ID NO: 224189 - DNA, 60 bp, Artificial
  Synthetic oligonucleotide
cgcattagagtcgatactcttcgccataatcactctccgaccaattctggcgcgtatggt

SEQ ID NO: 224190 - DNA, 60 bp, Artificial
  Synthetic oligonucleotide
gctgagtgtcggctggtgcctcgttgcgcttcttctgcctgtgcggctatatttggttca

SEQ ID NO: 224191 - DNA, 60 bp, Artificial
  Synthetic oligonucleotide
gctgggcagacaagcaatcgggcgaaacctacacgcgtgatttcctcacctcgctgcaag

SEQ ID NO: 224192 - DNA, 55 bp, Artificial
  Synthetic oligonucleotide
gttctgtaggctgaattttctcaacgagttcacgcgtttcgaaaacctagtgccc

SEQ ID NO: 224193 - DNA, 57 bp, Artificial
  Synthetic oligonucleotide
ttttcgaccgggattgattgcatctatccgagccaacaaaccgggattatttgcgaa

SEQ ID NO: 224194 - DNA, 59 bp, Artificial
  Synthetic oligonucleotide
gctgcttgtgctactcgatacggttttccgtacatatttggccgctcaatcaagccgtt

SEQ ID NO: 224195 - DNA, 60 bp, Artificial
  Synthetic oligonucleotide
gtctccactctgtcagaggccgtgtcttgcgcacggatgagcggattattggcggcggat

SEQ ID NO: 224196 - DNA, 58 bp, Artificial
  Synthetic oligonucleotide
gggtgccaataaaactcttgccgagcttaacagggagtttggagaactcgatgattga

SEQ ID NO: 224197 - DNA, 55 bp, Artificial
  Synthetic oligonucleotide
catgcggcctgcatcctgtctacgtaattcccctacgtaaaaccgacccgtagcg

SEQ ID NO: 224198 - DNA, 60 bp, Artificial
  Synthetic oligonucleotide
aaaagcatcacacattcgcgactcgatagaataagctttcaagagctgaggtgtagtaaa

SEQ ID NO: 224199 - DNA, 53 bp, Artificial
  Synthetic oligonucleotide
aaaacttataaaaactagtttttagcttatgaaaactagtcgctagcttatga

SEQ ID NO: 224200 - DNA, 56 bp, Artificial
  Synthetic oligonucleotide
cattaaaggctcagcaatagacgcaaaatgggggcgtatagaccaaggtttaacta

SEQ ID NO: 224201 - DNA, 57 bp, Artificial
  Synthetic oligonucleotide
ttgatacacttaaagaacgtggggttagtctcaaggcgacggagcaaccaatcgata

SEQ ID NO: 224202 - DNA, 55 bp, Artificial
  Synthetic oligonucleotide
ctgacggattgggcccctgctaggaacctgaacgggtacacccatggcggggcaa

SEQ ID NO: 224203 - DNA, 60 bp, Artificial
  Synthetic oligonucleotide
tccatcacaccacggtgatagtcgccacttccgcggtagtgagaccaggtccaacgggca

SEQ ID NO: 224204 - DNA, 57 bp, Artificial
  Synthetic oligonucleotide
gcgtggccgctgacggattgggcccctgctaggaacctgaacgggtacacccatggc

SEQ ID NO: 224205 - DNA, 60 bp, Artificial
  Synthetic oligonucleotide
ttgcaccgctgcatgactgacgcctgtagagaattcaagatgctggccgggcgtacgcag

SEQ ID NO: 224206 - DNA, 59 bp, Artificial
  Synthetic oligonucleotide
ggggtggaaactgcatgagttgatggcctatgcaggtcaccgggatccgaagaccacct

SEQ ID NO: 224207 - DNA, 60 bp, Artificial
  Synthetic oligonucleotide
caggcttgccctgggctctatcgcgaagtagatccgcgaaaccggtatcgaggtcgatca

SEQ ID NO: 224208 - DNA, 57 bp, Artificial
  Synthetic oligonucleotide
gcttcgatagcaaaggtgatgactttatcgggcgttgggaaggtcaaaatacccaga

SEQ ID NO: 224209 - DNA, 60 bp, Artificial
  Synthetic oligonucleotide
gtgacccccctgttgtggaaagtatcggcgcagcagtcatgccaggccggtcgtattcaa

SEQ ID NO: 224210 - DNA, 60 bp, Artificial
  Synthetic oligonucleotide
caggtcgaatcagatgaatgcaggttcattcgcaaataatcccggtttgttggctcggat

SEQ ID NO: 224211 - DNA, 55 bp, Artificial
  Synthetic oligonucleotide
cagtatttttggggttgggttgcagccatcggtggttttatgttggctcaggtcc

SEQ ID NO: 224212 - DNA, 60 bp, Artificial
  Synthetic oligonucleotide
ctcgcatacctcacattgtataagggagtctccgcaaataccacgtcgctatctgtaacc

SEQ ID NO: 224213 - DNA, 59 bp, Artificial
  Synthetic oligonucleotide
catactttaatgaggcctctgttatttgtgatatttatggccctcagcctgcttttaac

SEQ ID NO: 224214 - DNA, 55 bp, Artificial
  Synthetic oligonucleotide
ccgcaggccgctcgcaccaggggcgagtccctgcccccggaggggtgcccttgat

SEQ ID NO: 224215 - DNA, 60 bp, Artificial
  Synthetic oligonucleotide
gctcactgcccgacctgtacctaaagcctcatcctaatgcctcgcagcggccttcaaatg

SEQ ID NO: 224216 - DNA, 55 bp, Artificial
  Synthetic oligonucleotide
ctcttggtataactgcgaaatcctctcccccccctgaccgcgaacagggtgctcg

SEQ ID NO: 224217 - DNA, 60 bp, Artificial
  Synthetic oligonucleotide
gctccacctgcacaatgaccctacaacaacgagaaccgtagatgtaacgacctgcaatcg

SEQ ID NO: 224218 - DNA, 60 bp, Artificial
  Synthetic oligonucleotide
ccaagggctgatccgttcgctggaactgacccatggccagaatggctggcacccccacac

SEQ ID NO: 224219 - DNA, 57 bp, Artificial
  Synthetic oligonucleotide
ttggtatgattctataatatagtaacgcgttacctaattcaagcatttagtttggta

SEQ ID NO: 224220 - DNA, 60 bp, Artificial
  Synthetic oligonucleotide
cgccctagcgctgaccaaactgaagattgctcgcagttttgtgacgagcgtgcatgacaa

SEQ ID NO: 224221 - DNA, 58 bp, Artificial
  Synthetic oligonucleotide
ctcgcgaaagaaaaagagacgttgctgcagaaattcaccaggaatttgacgataggta

SEQ ID NO: 224222 - DNA, 59 bp, Artificial
  Synthetic oligonucleotide
aacagactggatctttaccacattcgggccggagtcagctcaaccggtgatgcgggatc

SEQ ID NO: 224223 - DNA, 59 bp, Artificial
  Synthetic oligonucleotide
ggctggaaatcggtcacgttgatagcgaaatgagcggtcacgcgttagcgaaatgtccg

SEQ ID NO: 224224 - DNA, 56 bp, Artificial
  Synthetic oligonucleotide
gtgaaaagtgatctgactcaacccgcgatcttaccctcctctactcgggttggccg

SEQ ID NO: 224225 - DNA, 57 bp, Artificial
  Synthetic oligonucleotide
tccatggcggtacgtgcaacccgagcctcttcaggcgccgggaaaaagagggcctga

SEQ ID NO: 224226 - DNA, 54 bp, Artificial
  Synthetic oligonucleotide
aacaaagaggacttgctgtaagcgccccaaggggcaagtcggacgccaagggga

SEQ ID NO: 224227 - DNA, 60 bp, Artificial
  Synthetic oligonucleotide
ctggtggcctgagctgctaccacagctcaccggcttacgaaaaaaattcactagctacca

SEQ ID NO: 224228 - DNA, 60 bp, Artificial
  Synthetic oligonucleotide
ctggtgatataagaggcaggcctgcgctgctaagtattcagcccaaagtcagacctgcta

SEQ ID NO: 224229 - DNA, 53 bp, Artificial
  Synthetic oligonucleotide
ggtcagacggtaaccgcaccaaagaaaaagcccccatggcttggcggcgtacg

SEQ ID NO: 224230 - DNA, 60 bp, Artificial
  Synthetic oligonucleotide
caccgatggacatgccgtcagatggaaatcaaacgtcagaccaggccggtctcaatgcag

SEQ ID NO: 224231 - DNA, 60 bp, Artificial
  Synthetic oligonucleotide
caccggaggaaataatttcggcgaatgcgcggctaggcacgattgcagaaggcacaccga

SEQ ID NO: 224232 - DNA, 56 bp, Artificial
  Synthetic oligonucleotide
ggcgctaccccggtagccaggcgtgagcctggtaccgggcttgcactacgggcgcg

SEQ ID NO: 224233 - DNA, 60 bp, Artificial
  Synthetic oligonucleotide
cgctgagtctcgctcgcaatcggtagagctggatcaaagcaaggtagggcgtctgtcgag

SEQ ID NO: 224234 - DNA, 55 bp, Artificial
  Synthetic oligonucleotide
accacccgcactgccatttttacgttgtgcccaggccgggcgaaaagattgaggc

SEQ ID NO: 224235 - DNA, 60 bp, Artificial
  Synthetic oligonucleotide
tggcaccgcacagctaagtgcaagtggacgccagtgtcggcgaccattggtgtccacgcc

SEQ ID NO: 224236 - DNA, 56 bp, Artificial
  Synthetic oligonucleotide
atgttgtgttaagtgttggcagatatctggaccccgccctagcggtccggaacttg

SEQ ID NO: 224237 - DNA, 60 bp, Artificial
  Synthetic oligonucleotide
tggccttctgagcgcagctacccctttcccctgctcgctcaggacacacgtatcgtgtgt

SEQ ID NO: 224238 - DNA, 60 bp, Artificial
  Synthetic oligonucleotide
ggtcaagttgagcgccgggttatgcggctgccgtgggacgttgcacgctgcaccggagga

SEQ ID NO: 224239 - DNA, 60 bp, Artificial
  Synthetic oligonucleotide
gccgtgccaagggaaaacatcccttcgcattgctcaccctgttccaggatggtgatcgta

SEQ ID NO: 224240 - DNA, 56 bp, Artificial
  Synthetic oligonucleotide
ccagcgagcaagccgggaagattcccagcttcaatttcaacccgacgccgaacaaa

SEQ ID NO: 224241 - DNA, 60 bp, Artificial
  Synthetic oligonucleotide
tggcgctggcatgccaggtatttccgcagtccgatctgagcatcgaatgccttcgcccta

SEQ ID NO: 224242 - DNA, 58 bp, Artificial
  Synthetic oligonucleotide
gcctaaagagacatacttgacgatggccctttacggatacgctcgtgtttccacaagc

SEQ ID NO: 224243 - DNA, 59 bp, Artificial
  Synthetic oligonucleotide
gcctaccacgctacaacccttccacggctacaacggctcgcacggatgatgcccgcagg

SEQ ID NO: 224244 - DNA, 60 bp, Artificial
  Synthetic oligonucleotide
gcctatctgcttgcataggcaatgttgcctatttacccaattcagttcaatcgggtattt

SEQ ID NO: 224245 - DNA, 60 bp, Artificial
  Synthetic oligonucleotide
tggctcggatagacgcaatcaatcccggtcgaaaaacgcgatgattgcaggtcgaggcca

SEQ ID NO: 224246 - DNA, 57 bp, Artificial
  Synthetic oligonucleotide
ctgggctccgtgccccgtctcgacgtgcgtctcgatttaacatagggtctgttattc

SEQ ID NO: 224247 - DNA, 57 bp, Artificial
  Synthetic oligonucleotide
gttctggactgttgttgcgaaagtgctcaacccaaacggaggtgtctaccaggacgc

SEQ ID NO: 224248 - DNA, 60 bp, Artificial
  Synthetic oligonucleotide
acacgcacatcctcactgaagtggctcaaccgaccactgtgagcgttctcaaggtcagcc

SEQ ID NO: 224249 - DNA, 56 bp, Artificial
  Synthetic oligonucleotide
cacgacacggcttgatcagttgtgggtcgtaaaagctaagtgaccaagttaatagg

SEQ ID NO: 224250 - DNA, 57 bp, Artificial
  Synthetic oligonucleotide
tgatctggtcaattgcggcccgcccaagccgttataaaaagcatggcgagaaaagtt

SEQ ID NO: 224251 - DNA, 60 bp, Artificial
  Synthetic oligonucleotide
tgatgaatcgacggccatcgaagccgtactcccactggatcactacgtcgatcaggtgac

SEQ ID NO: 224252 - DNA, 55 bp, Artificial
  Synthetic oligonucleotide
accggggggtcaaggatgctcgcaagaaacgcgaaatttgactggtaccagtcca

SEQ ID NO: 224253 - DNA, 60 bp, Artificial
  Synthetic oligonucleotide
ctgtgtgtccggtgggctttgttccatgtcgatgcaggactcgccgcgaagctccctgat

SEQ ID NO: 224254 - DNA, 60 bp, Artificial
  Synthetic oligonucleotide
accggcattgggcacgagatcgacgaatgcgtgcttgacctcgtggcacaccgccggttc

SEQ ID NO: 224255 - DNA, 53 bp, Artificial
  Synthetic oligonucleotide
gtccggacacggggttgagctaggcttttcaggatcgtttacccacgaccgta

SEQ ID NO: 224256 - DNA, 57 bp, Artificial
  Synthetic oligonucleotide
ggtcgccggggttcaaagttcatgaggcgacagactccaagtcacgacgccaaacac

SEQ ID NO: 224257 - DNA, 59 bp, Artificial
  Synthetic oligonucleotide
tgccccaggcctcaactgcatctttggcggaaacggttgcctctgcgataaggctacgg

SEQ ID NO: 224258 - DNA, 54 bp, Artificial
  Synthetic oligonucleotide
actttcgaggggatcgatatgaacattatctggtgggtccttcgtcctttttac

SEQ ID NO: 224259 - DNA, 57 bp, Artificial
  Synthetic oligonucleotide
ggagtccggaaggacgctccacgaccggtatgtcatttcgctaagctgggtttgcag

SEQ ID NO: 224260 - DNA, 59 bp, Artificial
  Synthetic oligonucleotide
ccttcagccgccgagctttatcagcttagcctgcttgacgtactaccgtagaacttcta

SEQ ID NO: 224261 - DNA, 56 bp, Artificial
  Synthetic oligonucleotide
gccctcaagctgttccgcgaagcaggacgaacctggaaagcgaaaacttttgagga

SEQ ID NO: 224262 - DNA, 60 bp, Artificial
  Synthetic oligonucleotide
cacaagcgcttgcagcgcagcctcgtcgatactcttcgccataatcactctccgaccaat

SEQ ID NO: 224263 - DNA, 60 bp, Artificial
  Synthetic oligonucleotide
cacacaggtgaggtcgtggacatctgcgaccctgtaaaacgcgattgggtgctgcgcaat

SEQ ID NO: 224264 - DNA, 53 bp, Artificial
  Synthetic oligonucleotide
cacaccggtcgtggagaccccccggcaacgcaaactgggacgtgaaatgttgg

SEQ ID NO: 224265 - DNA, 60 bp, Artificial
  Synthetic oligonucleotide
tgcctgtcctgccataaccccttcccgcacggaatccgcgcgtgactcttgccattgaag

SEQ ID NO: 224266 - DNA, 60 bp, Artificial
  Synthetic oligonucleotide
tgcgaccctgtaaaacgtgattgggtgctgcgcaatacctctgtcggagaggtatggggc

SEQ ID NO: 224267 - DNA, 56 bp, Artificial
  Synthetic oligonucleotide
accctattgagacattaaaaacgcctcaggcacgcgtcccgcaagggtgtactcga

SEQ ID NO: 224268 - DNA, 60 bp, Artificial
  Synthetic oligonucleotide
acccgccagccgacagggttgcagccctgccgactggctaaccacagcgatctgtacgga

SEQ ID NO: 224269 - DNA, 60 bp, Artificial
  Synthetic oligonucleotide
acccgcaaaattggcaccgcacagctaagtgcaagtggacgccagtgtcggcgaccattg

SEQ ID NO: 224270 - DNA, 57 bp, Artificial
  Synthetic oligonucleotide
gttcagtttcttgagccttctattccggtcatgaaacaacttgagcaggttgtttta

SEQ ID NO: 224271 - DNA, 54 bp, Artificial
  Synthetic oligonucleotide
acccgacgccgaacaaagaggacttgctgtaagcgccccaaggggcaagtcgga

SEQ ID NO: 224272 - DNA, 60 bp, Artificial
  Synthetic oligonucleotide
tgcgagcgaagctgcaggccaaccgggcggagcgttatgacctccttgcatctgcacggg

SEQ ID NO: 224273 - DNA, 60 bp, Artificial
  Synthetic oligonucleotide
gggctttgaaaagggcatagcggctacggatgcactgccgtggtggcagcgtgtgcgatt

SEQ ID NO: 224274 - DNA, 60 bp, Artificial
  Synthetic oligonucleotide
aattttcgactcggtgctgccacggatctcgcacatattggccagtacgcggaaattcag

SEQ ID NO: 224275 - DNA, 60 bp, Artificial
  Synthetic oligonucleotide
gcgaagtttttcgaggaggtcgctcagtcggccggagaagagtctgatgcgcaaccagag

SEQ ID NO: 224276 - DNA, 60 bp, Artificial
  Synthetic oligonucleotide
tggtttatctcctgcttataaggctgtctatgagctttggaagtgtggccacgatattag

SEQ ID NO: 224277 - DNA, 56 bp, Artificial
  Synthetic oligonucleotide
cgctctgggcgactacggtttttgtcaggagactggcgaggccataggcctaaaac

SEQ ID NO: 224278 - DNA, 60 bp, Artificial
  Synthetic oligonucleotide
gcgaccattggtgtccacgcctcgcgtgatcatggcagtgccttctacagcggcgtgatg

SEQ ID NO: 224279 - DNA, 60 bp, Artificial
  Synthetic oligonucleotide
tgtcaaacgagcgaggacggaacggtatgatcactgcatcgcataaaaccaatgccgcac

SEQ ID NO: 224280 - DNA, 60 bp, Artificial
  Synthetic oligonucleotide
cgctcgtcacaaaactgcgagcaatcttcagtttggtcagcgctagggcgtgcaactgac

SEQ ID NO: 224281 - DNA, 60 bp, Artificial
  Synthetic oligonucleotide
agatctctagtcgctttgccgcatctgagactgaatgcgagctacgctccacctggctca

SEQ ID NO: 224282 - DNA, 60 bp, Artificial
  Synthetic oligonucleotide
cacgacactagatgttgtgtgccggcagctgcgatcggacacaagatgtagggtaatgtg

SEQ ID NO: 224283 - DNA, 60 bp, Artificial
  Synthetic oligonucleotide
ctcaaggattgaggcttggctgtaccgctgaccagtgaggccctatgtatcagtacccgt

SEQ ID NO: 224284 - DNA, 58 bp, Artificial
  Synthetic oligonucleotide
tgtccacgcatccggccacctcaaccgaattgtctaccagacgccgaaaggtcgccga

SEQ ID NO: 224285 - DNA, 59 bp, Artificial
  Synthetic oligonucleotide
tgtcttagacggcttagggtgagctttgccccgcttctctcaaccgttcaccagcagac

SEQ ID NO: 224286 - DNA, 60 bp, Artificial
  Synthetic oligonucleotide
gcgagcgctaattttggtgatccgattggcgagtcattgataaatgacccagggcttgcc

SEQ ID NO: 224287 - DNA, 55 bp, Artificial
  Synthetic oligonucleotide
tggtaaaagccagtaaccctcgatccaaaaccaggcgtgctccctcacgcccgaa

SEQ ID NO: 224288 - DNA, 60 bp, Artificial
  Synthetic oligonucleotide
tgggtggctattcagcacctgctgcggggactattgaatggaggtttgtcgatgacacat

SEQ ID NO: 224289 - DNA, 58 bp, Artificial
  Synthetic oligonucleotide
ggtatcgacaggatctttgtaggccacacgaaagtcactgccgtccttgatttaggga

SEQ ID NO: 224290 - DNA, 60 bp, Artificial
  Synthetic oligonucleotide
gcctctgtggaagcattcgctatgtattccccaacgtgtcgcgtaagccagtaagcgcac

SEQ ID NO: 224291 - DNA, 60 bp, Artificial
  Synthetic oligonucleotide
ggtatgaaacggcatcaaatcttagccagacgctgatcagtgcacgtgagttggcttttc

SEQ ID NO: 224292 - DNA, 60 bp, Artificial
  Synthetic oligonucleotide
ccatggcggggcaatcatccggggcgatcgcatcctgtgccacctctgctggggcggtca

SEQ ID NO: 224293 - DNA, 58 bp, Artificial
  Synthetic oligonucleotide
tgtgttaggcccgacctggaagtgtccaattgctgtcttaccagtgtcttacggcggc

SEQ ID NO: 224294 - DNA, 57 bp, Artificial
  Synthetic oligonucleotide
gcgattggatcaggggtgaggggcgaacgctctacgtggggtctacggactcgccag

SEQ ID NO: 224295 - DNA, 60 bp, Artificial
  Synthetic oligonucleotide
cgctccgcgcaactgggtgcgtctggaggtccgtgtacggcctaagcgcgaatggcgctc

SEQ ID NO: 224296 - DNA, 60 bp, Artificial
  Synthetic oligonucleotide
gcctcaggcacgcgtcccgcaagggtgtactcgaatgagacagaaacggcgtgcgctcac

SEQ ID NO: 224297 - DNA, 57 bp, Artificial
  Synthetic oligonucleotide
tggggagacgccaggtatggcttgcaatgggaggggaacccatccaaacttattctg

SEQ ID NO: 224298 - DNA, 60 bp, Artificial
  Synthetic oligonucleotide
acaccacctcgcttgcttatgggagtctgacggttcacctcacatagagagaaaatcgca

SEQ ID NO: 224299 - DNA, 55 bp, Artificial
  Synthetic oligonucleotide
aacccggtggcgcaatgaggttaaaaaggtattggagaccgtagtccatgagtga

SEQ ID NO: 224300 - DNA, 59 bp, Artificial
  Synthetic oligonucleotide
tgcggcaactacctgcacttccgggagtacttcaccgtgggcaaggtacggctgcacaa

SEQ ID NO: 224301 - DNA, 59 bp, Artificial
  Synthetic oligonucleotide
cggctaccagggactttcaccccacgcctgtagagattcgaaacctgatctcatcggca

SEQ ID NO: 224302 - DNA, 59 bp, Artificial
  Synthetic oligonucleotide
tgagtccatatttcgcgatggtttacggtcgcagattggacctcgttccgcgctactcg

SEQ ID NO: 224303 - DNA, 57 bp, Artificial
  Synthetic oligonucleotide
ctacggccatcgtcttgttcaattcaatagggacgacgataggtagttccctgagcg

SEQ ID NO: 224304 - DNA, 56 bp, Artificial
  Synthetic oligonucleotide
agtggagaaaccagtgcggggccgaatgtaccacctgagtttcggagcgtctagcc

SEQ ID NO: 224305 - DNA, 59 bp, Artificial
  Synthetic oligonucleotide
ggtgataggttagcacgctacggccaggctcatgcaaggtcgttgatgatgctcgagca

SEQ ID NO: 224306 - DNA, 59 bp, Artificial
  Synthetic oligonucleotide
ccatgaggatttgctgcccatggtcgatgaaaataggtctgtcatgcagggaatagagg

SEQ ID NO: 224307 - DNA, 59 bp, Artificial
  Synthetic oligonucleotide
gcaaaacgaaatccctctgaagccgctcattgtgcccgcatgcatctcaaggctgccgc

SEQ ID NO: 224308 - DNA, 57 bp, Artificial
  Synthetic oligonucleotide
atcagggctcgtttcatggcgtgggaaaactcgtcaaagcttgcggtaggtccaagc

SEQ ID NO: 224309 - DNA, 59 bp, Artificial
  Synthetic oligonucleotide
cggtcgctggaacttacccatggccagaatggctggcacccccatacccatgaactgtg

SEQ ID NO: 224310 - DNA, 58 bp, Artificial
  Synthetic oligonucleotide
ttgttgcgaaagtgctcaacccaaacggaggtgtctaccagaacgcctttcacagtgc

SEQ ID NO: 224311 - DNA, 59 bp, Artificial
  Synthetic oligonucleotide
gtagcaccctccctcactcgcacggtcgctctcctggaggcggccgctgctgctcccga

SEQ ID NO: 224312 - DNA, 59 bp, Artificial
  Synthetic oligonucleotide
taatcactctccgaccaattctgccgcgtatggtagcgcagggcagggggtcgtggttg

SEQ ID NO: 224313 - DNA, 57 bp, Artificial
  Synthetic oligonucleotide
acctggatttgttacccgggagacgcaccgatcgagtaaggctgtgatacggcagaa

SEQ ID NO: 224314 - DNA, 60 bp, Artificial
  Synthetic oligonucleotide
agagcagatgcccctgcgtaaaatccaattccgccgctggcatattttccgctccgaatc

SEQ ID NO: 224315 - DNA, 59 bp, Artificial
  Synthetic oligonucleotide
tcgctcagtgctcgaaatgccgacacgctatcgaacagaatggactccccgccgagagc

SEQ ID NO: 224316 - DNA, 57 bp, Artificial
  Synthetic oligonucleotide
gatccttggtgttaactgccgcgtaaaagaccggactgcctgcccctgagcggaaca

SEQ ID NO: 224317 - DNA, 59 bp, Artificial
  Synthetic oligonucleotide
atgctcctatgttgtgttaagcgttggcagacatctgaaccccgccctagcggtccaga

SEQ ID NO: 224318 - DNA, 59 bp, Artificial
  Synthetic oligonucleotide
acggctgattgagtttggtcgtttcgctgcaaagaatcgcaggcggcgagggctaggta

SEQ ID NO: 224319 - DNA, 59 bp, Artificial
  Synthetic oligonucleotide
cgaccgcgtgaagttcgttgagtctgtggatgcccgcagtgccggtcataccgtcccag

SEQ ID NO: 224320 - DNA, 59 bp, Artificial
  Synthetic oligonucleotide
ttcaggacacggcgttattcaaggctgcaaccgaattggagctacacgagacactgatg

SEQ ID NO: 224321 - DNA, 59 bp, Artificial
  Synthetic oligonucleotide
tcactgagccaggtggagcgtagctcgcattcagtctcagatgcggcaaagcgactaga

SEQ ID NO: 224322 - DNA, 59 bp, Artificial
  Synthetic oligonucleotide
gtgagcgcacgccgtttctgtctcattcgagtacacccttgcgggacgcgtgcctgagg

SEQ ID NO: 224323 - DNA, 59 bp, Artificial
  Synthetic oligonucleotide
ttgcgactccgaccgcttcaatatctacctgtagtgcacgccgcaaatcaggggaggtc

SEQ ID NO: 224324 - DNA, 59 bp, Artificial
  Synthetic oligonucleotide
tctatgaggagtacacccgattccgcgtgatagccaaggacgccattatttcagctacc

SEQ ID NO: 224325 - DNA, 58 bp, Artificial
  Synthetic oligonucleotide
attcaatataatgtgaccgactcgaaataacaactgttatttcgtgacaagtcacgaa

SEQ ID NO: 224326 - DNA, 58 bp, Artificial
  Synthetic oligonucleotide
actattgctgctcaatccggatgaccaagccgacctgacctattcagaagattgcgag

SEQ ID NO: 224327 - DNA, 55 bp, Artificial
  Synthetic oligonucleotide
ggttaccagcctccaagaccatttggcggttgaaacccgagtctccttagcgcag

SEQ ID NO: 224328 - DNA, 58 bp, Artificial
  Synthetic oligonucleotide
gcgcaccacatctccactagaggagagcgcttttagagagtgcgcaggcacctcgttt

SEQ ID NO: 224329 - DNA, 58 bp, Artificial
  Synthetic oligonucleotide
ccgaatctcagggtttccgttgcagacatgctcgcagcgcaaagggcggaacaggagg

SEQ ID NO: 224330 - DNA, 58 bp, Artificial
  Synthetic oligonucleotide
gctcaatggtcgaccaggagaaagtttaccgtcttcggcgatggggacatccacgata

SEQ ID NO: 224331 - DNA, 58 bp, Artificial
  Synthetic oligonucleotide
gcaggtcgaggccatttcgattgcaggtcgttacacgtagaggtcgagatgtatcaat

SEQ ID NO: 224332 - DNA, 58 bp, Artificial
  Synthetic oligonucleotide
caccagcttgttgcatccagctctcccaggtcgggaagcctgagtggttatccatcga

SEQ ID NO: 224333 - DNA, 58 bp, Artificial
  Synthetic oligonucleotide
cgcgatcatcaatggacgcaggaacatgctcttcggtggttagcgaaggaggttgcct

SEQ ID NO: 224334 - DNA, 58 bp, Artificial
  Synthetic oligonucleotide
gagggtctctcgcggccatgccgtgtcatacgcggccccgtcgtagctacacgcacgt

SEQ ID NO: 224335 - DNA, 58 bp, Artificial
  Synthetic oligonucleotide
ctttcggttgaactggctgagcgcctggacaacacgctgagcgttatcgacatgagca

SEQ ID NO: 224336 - DNA, 55 bp, Artificial
  Synthetic oligonucleotide
gcaagttctgttttcggtagtactggcaatggaagttgcttttataaacacggcg

SEQ ID NO: 224337 - DNA, 58 bp, Artificial
  Synthetic oligonucleotide
ggcttagctcggtctccgccacacctggcgccaaatgacagccgatacacatggagtt

SEQ ID NO: 224338 - DNA, 56 bp, Artificial
  Synthetic oligonucleotide
ggcacgggcgaagcgaacccttgaactcacaccgaaaaacaccctatggcagcacc

SEQ ID NO: 224339 - DNA, 57 bp, Artificial
  Synthetic oligonucleotide
ctgacggctacgctgtcgcttttctcaggcagggggtgtttaacctgtccagctcgt

SEQ ID NO: 224340 - DNA, 58 bp, Artificial
  Synthetic oligonucleotide
tcgacggtatcgttacaatgatcactatgcatcccggtgagtatctggagatggcgta

SEQ ID NO: 224341 - DNA, 58 bp, Artificial
  Synthetic oligonucleotide
ttagacggccaagtttgagactcgtagaagccattttgcgcaagtattctcgcgctgt

SEQ ID NO: 224342 - DNA, 58 bp, Artificial
  Synthetic oligonucleotide
ttattcggaggattgtgagaaattcatcgtcaaattaccctcagtggtcctcgatcgg

SEQ ID NO: 224343 - DNA, 58 bp, Artificial
  Synthetic oligonucleotide
gctatcgtagcatcaccacttacgttttaggcagaaataaaatggcgctgtcagatga

SEQ ID NO: 224344 - DNA, 58 bp, Artificial
  Synthetic oligonucleotide
ggaaaatagagcgcaaggagcgcttattggagccgctgtagcgggttcgcttggggca

SEQ ID NO: 224345 - DNA, 58 bp, Artificial
  Synthetic oligonucleotide
tcattggagacgcagggttacatcgcgacggagtatcacaaaagttatcgggtcacga

SEQ ID NO: 224346 - DNA, 55 bp, Artificial
  Synthetic oligonucleotide
ggccagtcaggacgtttcaagcggtaccctcaagtttgtcctgggcgttttctgc

SEQ ID NO: 224347 - DNA, 60 bp, Artificial
  Synthetic oligonucleotide
gcaatagctactagtgctccatatttcactgctctatttgcggcggtgttaggtcgactc

SEQ ID NO: 224348 - DNA, 58 bp, Artificial
  Synthetic oligonucleotide
actggcaccctcaggcgttgcaacctgcagcacggcagtcatcagtcgaatactccat

SEQ ID NO: 224349 - DNA, 58 bp, Artificial
  Synthetic oligonucleotide
tcggcttacaacacttcgtcacctgtcaggtcgtccatggcacaagataatttcgtca

SEQ ID NO: 224350 - DNA, 52 bp, Artificial
  Synthetic oligonucleotide
aacccttttttggggttgactacggggtttactgatgtaagcatgatcccac

SEQ ID NO: 224351 - DNA, 58 bp, Artificial
  Synthetic oligonucleotide
tttacattgcgctacgcgaggataagcccgcctccgcaatcagcctggaaagtgacac

SEQ ID NO: 224352 - DNA, 58 bp, Artificial
  Synthetic oligonucleotide
cacattcgcgactcgatagaataagctttcaagagctgaggtgtagtaaaatctaact

SEQ ID NO: 224353 - DNA, 56 bp, Artificial
  Synthetic oligonucleotide
attatggatgggggcgaagggcgggatacattgcttggtggcgcgggttacgatac

SEQ ID NO: 224354 - DNA, 56 bp, Artificial
  Synthetic oligonucleotide
caacaaagggctcgaattcaactttcaaccgggaactccaagtgcagtcattcgcc

SEQ ID NO: 224355 - DNA, 57 bp, Artificial
  Synthetic oligonucleotide
gaaaaccatgttggtagtgatgcgggcgctgggagttgatttgaccgccagaccgca

SEQ ID NO: 224356 - DNA, 57 bp, Artificial
  Synthetic oligonucleotide
gtcatatagtaggctgatgtcaaggtgcccgctttaccagtgtccgcaacccttgct

SEQ ID NO: 224357 - DNA, 52 bp, Artificial
  Synthetic oligonucleotide
ccacaggtacacaggggaaaggccgcctacggtagtggaaagcctccggccg

SEQ ID NO: 224358 - DNA, 59 bp, Artificial
  Synthetic oligonucleotide
tccggagggggcttgttgatcgaggggctatctcgtcactggcccgataggacacgcga

SEQ ID NO: 224359 - DNA, 57 bp, Artificial
  Synthetic oligonucleotide
cacgccgttctgattcgcatcctcgccattaccgatctcgatgtgcagtgtctgtaa

SEQ ID NO: 224360 - DNA, 54 bp, Artificial
  Synthetic oligonucleotide
ccaggagcgattcgtaaccgagtccggggccgtggtagtcctcgacaggcgccg

SEQ ID NO: 224361 - DNA, 54 bp, Artificial
  Synthetic oligonucleotide
ctggttgacacgttgacagacgtttttgtcagggctcatggggaggttaagggg

SEQ ID NO: 224362 - DNA, 57 bp, Artificial
  Synthetic oligonucleotide
caagtggggacgtgggacgctgcgtacaggatcagtaccagtcactccagattgggg

SEQ ID NO: 224363 - DNA, 57 bp, Artificial
  Synthetic oligonucleotide
tgcgctagataggctcctcgcgtccaggacccggaaagcctaagtaacgcctcactt

SEQ ID NO: 224364 - DNA, 57 bp, Artificial
  Synthetic oligonucleotide
cggatgctaatcgaacatccgagaattcgcaagcgtcatcgcccgcgcttcttgccc

SEQ ID NO: 224365 - DNA, 56 bp, Artificial
  Synthetic oligonucleotide
cgaacgcgggaaccctacactgaaaaccatgttggtagtgatgcgggcgctgggag

SEQ ID NO: 224366 - DNA, 57 bp, Artificial
  Synthetic oligonucleotide
aattccgcaggtagtgactgcgaagtatctaggcatcggaatgcttgacttggacct

SEQ ID NO: 224367 - DNA, 57 bp, Artificial
  Synthetic oligonucleotide
acgggtcacacaatgggggctaatcgacatggacaaacggtatagcatcgacacaaa

SEQ ID NO: 224368 - DNA, 54 bp, Artificial
  Synthetic oligonucleotide
tgttggcagatatctggaccccgccctagcggtcccggacttggaccccgaact

SEQ ID NO: 224369 - DNA, 60 bp, Artificial
  Synthetic oligonucleotide
attctcgctgtcctggatcagttgaagtgcctgagtcagcgaccgatcctgagtcgtggg

SEQ ID NO: 224370 - DNA, 60 bp, Artificial
  Synthetic oligonucleotide
ggttggcatcgtttctcttgacccgtcctgtgctccgcaggcagggcatgattaaccgta

SEQ ID NO: 224371 - DNA, 56 bp, Artificial
  Synthetic oligonucleotide
gcaacggcagggcaggcgttaaaagccgaacacggcgcttgtaactgtctcaaaac

SEQ ID NO: 224372 - DNA, 52 bp, Artificial
  Synthetic oligonucleotide
agatatctggaccccgccctagcggtctagaacttgaaccccgaacttcccc

SEQ ID NO: 224373 - DNA, 57 bp, Artificial
  Synthetic oligonucleotide
ccggaatatccggctaccggtccccaagaaatccacagggagatcgcagcaacaagc

SEQ ID NO: 224374 - DNA, 57 bp, Artificial
  Synthetic oligonucleotide
tccaatccgcaagccctgcgccccctcagcacggtcaggcgtagctacctcgacaac

SEQ ID NO: 224375 - DNA, 57 bp, Artificial
  Synthetic oligonucleotide
tcaggctttaatgactaaaggcaccctaaaccctgcaacttgatatacaagtgtgat

SEQ ID NO: 224376 - DNA, 56 bp, Artificial
  Synthetic oligonucleotide
agcttaacaagcaatggggtaaacccgttgtgacggtctctagtgagtcgaggcta

SEQ ID NO: 224377 - DNA, 56 bp, Artificial
  Synthetic oligonucleotide
ttgcggcccgcccaagccgttataaaaagcatggcgagaaaagtttgatcgcacgg

SEQ ID NO: 224378 - DNA, 55 bp, Artificial
  Synthetic oligonucleotide
ccctcccgactagcggttttcgatcagaggctttgcattccgggcaatgaggggt

SEQ ID NO: 224379 - DNA, 57 bp, Artificial
  Synthetic oligonucleotide
ttgggccggattcaacgtccatgcgtctgccaatgtgttccgagaggctgcctcgct

SEQ ID NO: 224380 - DNA, 57 bp, Artificial
  Synthetic oligonucleotide
taccacatgggaggttttcgtacgccacagcgcattaccaaatttcgccaatctgcg

SEQ ID NO: 224381 - DNA, 60 bp, Artificial
  Synthetic oligonucleotide
tccgtagtaggcgctgacgcggcttcctctgccatcacaacagcctccagctgatcgatc

SEQ ID NO: 224382 - DNA, 57 bp, Artificial
  Synthetic oligonucleotide
atatgccaggtcttctgtacgacttaatagaacgtgcggtaccaggcacgcctaacc

SEQ ID NO: 224383 - DNA, 57 bp, Artificial
  Synthetic oligonucleotide
gctggaaaggaccagcgcggagtgaggcgattggaaacccttcgactggatgaagag

SEQ ID NO: 224384 - DNA, 56 bp, Artificial
  Synthetic oligonucleotide
aaaagcgggtcggacagggagcagggctcaatctttgcccctggtttcgctgtaga

SEQ ID NO: 224385 - DNA, 57 bp, Artificial
  Synthetic oligonucleotide
ccccggccgcctctgtggaagcattcgctatgtattccccaacgtgtcgcgtaagcc

SEQ ID NO: 224386 - DNA, 55 bp, Artificial
  Synthetic oligonucleotide
aagcgaaccttgacgctacgcagggtcgagcctcggtcgaggggtggggtgctct

SEQ ID NO: 224387 - DNA, 56 bp, Artificial
  Synthetic oligonucleotide
agatccgcgctggagttaattcgacatctaacccccggccgcctctgtggaagcat

SEQ ID NO: 224388 - DNA, 56 bp, Artificial
  Synthetic oligonucleotide
ttacctgggccgatgcccaagggctgcaagcggcgatggtcaccctgacattcccc

SEQ ID NO: 224389 - DNA, 56 bp, Artificial
  Synthetic oligonucleotide
tccgtccggtcgccgattaaccagaacccttcgtagaggttgactgctatgcctga

SEQ ID NO: 224390 - DNA, 56 bp, Artificial
  Synthetic oligonucleotide
cactgtgagcgttctcagggccagccgtaaggctgtgtccgtaccacctaggcaag

SEQ ID NO: 224391 - DNA, 56 bp, Artificial
  Synthetic oligonucleotide
ctcatgcgattcctggactcgctgggtgcaaaggacgctgccgctccgttgcaagt

SEQ ID NO: 224392 - DNA, 59 bp, Artificial
  Synthetic oligonucleotide
ctttggctttaactagatgatcctagctatttgtgaaaggctcctgagacaggaactta

SEQ ID NO: 224393 - DNA, 56 bp, Artificial
  Synthetic oligonucleotide
cacggaccttccgaatatcgcgttccgatgtgattcgggctggaatcatggcactc

SEQ ID NO: 224394 - DNA, 56 bp, Artificial
  Synthetic oligonucleotide
ccccaaccgggcagatcaggaagtgtgccagtaaaccgcgtccagcttaacagacg

SEQ ID NO: 224395 - DNA, 56 bp, Artificial
  Synthetic oligonucleotide
tgttaccacaatctagcgagggccaaagatggcaggcaagcaaaagacattcgacc

SEQ ID NO: 224396 - DNA, 50 bp, Artificial
  Synthetic oligonucleotide
accgaccgaaacaaggaaagattccgggccaaaggtggaaggattccggc

SEQ ID NO: 224397 - DNA, 56 bp, Artificial
  Synthetic oligonucleotide
cgaatagagtgcgtaccgacatactggttaacatagtcggagactgcatagggctc

SEQ ID NO: 224398 - DNA, 56 bp, Artificial
  Synthetic oligonucleotide
cttagcaaggctttcgacagactcaccggtactcgcatgcgggccacctttgagtc

SEQ ID NO: 224399 - DNA, 52 bp, Artificial
  Synthetic oligonucleotide
cgaaggaaccggatgcaaacggggaatagccgagtgtacggagttggccggg

SEQ ID NO: 224400 - DNA, 56 bp, Artificial
  Synthetic oligonucleotide
gtgttactgcccggtgatgcacacgttcacgtgggacagtcgcaaccaggaggaga

SEQ ID NO: 224401 - DNA, 56 bp, Artificial
  Synthetic oligonucleotide
ctattcatagccatgcagttatcccccttcaggagtggctattcgataaaggagct

SEQ ID NO: 224402 - DNA, 56 bp, Artificial
  Synthetic oligonucleotide
tgccggggcatggctgtaaccatccccagcttggaacacatcaaacctgtcagggc

SEQ ID NO: 224403 - DNA, 58 bp, Artificial
  Synthetic oligonucleotide
agaccactgtttgatggacgctaaatcatcggtttttcagtcgcatttaatcctggtc

SEQ ID NO: 224404 - DNA, 56 bp, Artificial
  Synthetic oligonucleotide
caatcgtgcggaagtagcgggggccgccccgatactgcccaaggatgcgattttct

SEQ ID NO: 224405 - DNA, 56 bp, Artificial
  Synthetic oligonucleotide
gtgtgggcagtcagactgcgtatgagcgggccaagaaggcgtcggacgtgtgggca

SEQ ID NO: 224406 - DNA, 56 bp, Artificial
  Synthetic oligonucleotide
tacccattctacgcggccacgttgggcacacagatcgagagcttggacaatgcgaa

SEQ ID NO: 224407 - DNA, 56 bp, Artificial
  Synthetic oligonucleotide
cgtcgccgcaggagaactcaaagggtgtggtcggcgcgtgcgcttccaggccccct

SEQ ID NO: 224408 - DNA, 56 bp, Artificial
  Synthetic oligonucleotide
atgccgtgtgtcagcgccctctgaatcatggttagacgcaggataggggtgacgtc

SEQ ID NO: 224409 - DNA, 56 bp, Artificial
  Synthetic oligonucleotide
ctaatggcctacctggcgacgtgtcaccagtcggccagggagtaagcgagttgagg

SEQ ID NO: 224410 - DNA, 51 bp, Artificial
  Synthetic oligonucleotide
taaggtcttaccggctacacctacaagcgaaggaaccgggcccctagaaaa

SEQ ID NO: 224411 - DNA, 56 bp, Artificial
  Synthetic oligonucleotide
taacgccaatagctcacgcccttgagccaccggcatttggatgtcgcaatacacgg

SEQ ID NO: 224412 - DNA, 56 bp, Artificial
  Synthetic oligonucleotide
gcgtggaacccgtaggcaaatatcagcggtcggttgccctggagaagcccatggcg

SEQ ID NO: 224413 - DNA, 56 bp, Artificial
  Synthetic oligonucleotide
ttgctgccggcttcgtcgctacccttcgagctggaacctccacccgatttaccgga

SEQ ID NO: 224414 - DNA, 58 bp, Artificial
  Synthetic oligonucleotide
ctttcgttcgctaaggggatgcgcaaaccggaggcggcaaccatggattctcaggcag

SEQ ID NO: 224415 - DNA, 56 bp, Artificial
  Synthetic oligonucleotide
gatgctttttcgcgatagaccgcagccacgtagtagcccgatgctcgcgcattgcc

SEQ ID NO: 224416 - DNA, 56 bp, Artificial
  Synthetic oligonucleotide
gtacacacggtaatcgcaatgggcccgattaatgagagtcagcgagccggtctagt

SEQ ID NO: 224417 - DNA, 55 bp, Artificial
  Synthetic oligonucleotide
cgccgcgagatcccaattcgtcccatgttcttgttatcgtgaggatgaacggaga

SEQ ID NO: 224418 - DNA, 55 bp, Artificial
  Synthetic oligonucleotide
cgctccgcgtccgcgtggcaactcagatgatttcgtcaggccagaacgcgcgtat

SEQ ID NO: 224419 - DNA, 55 bp, Artificial
  Synthetic oligonucleotide
gggtgatggaccccgcgatgggcgagagtatgccagagcccagggtaaatacctg

SEQ ID NO: 224420 - DNA, 55 bp, Artificial
  Synthetic oligonucleotide
ggctgttcaagatgattgggtggctgatgatctatgcccgcattgcgacctttgg

SEQ ID NO: 224421 - DNA, 55 bp, Artificial
  Synthetic oligonucleotide
cgctctgtagcgcgtctttgcggggtttcagcctacagcgttgatcaataccgca

SEQ ID NO: 224422 - DNA, 55 bp, Artificial
  Synthetic oligonucleotide
cgccgccaataatccgctcatccgtgcgcaagacacggcctctgacagagtggag

SEQ ID NO: 224423 - DNA, 55 bp, Artificial
  Synthetic oligonucleotide
ctcaacgagttcacgcgtttcgaaaacctagtgcccggaactcatgacttcaccg

SEQ ID NO: 224424 - DNA, 55 bp, Artificial
  Synthetic oligonucleotide
ctcgataagacctcatgcttaccctgcaaaacatgatctggctgcctacgccgcc

SEQ ID NO: 224425 - DNA, 59 bp, Artificial
  Synthetic oligonucleotide
agacaatttcagcgtgcgcgggatactgacaaggtatatactgcgttagtacctttaca

SEQ ID NO: 224426 - DNA, 55 bp, Artificial
  Synthetic oligonucleotide
cgccacttggagtttgtgtcttgccacaagattcatgaaaacgcgatcaagggta

SEQ ID NO: 224427 - DNA, 55 bp, Artificial
  Synthetic oligonucleotide
cgctgacccaagcttctactccgtaaagcgttagcaggtctgactttgggctgaa

SEQ ID NO: 224428 - DNA, 55 bp, Artificial
  Synthetic oligonucleotide
cgccgaacatcgataatttacgcaaccctgacatcatctggcgtaagtagcagat

SEQ ID NO: 224429 - DNA, 55 bp, Artificial
  Synthetic oligonucleotide
cggatcagtgtttaggatgagcgggttgaacccgtagcgtgatgactcactaaac

SEQ ID NO: 224430 - DNA, 55 bp, Artificial
  Synthetic oligonucleotide
ctcgcgagaccttgaacaggctctaaggccgcgtgcccggaccattgagtctagc

SEQ ID NO: 224431 - DNA, 55 bp, Artificial
  Synthetic oligonucleotide
cggactattctgaagtcgtccgcacatgcatagggagacggctcatgaaaacgcg

SEQ ID NO: 224432 - DNA, 55 bp, Artificial
  Synthetic oligonucleotide
cgctgatctggatgcctacgctatcgcaatggttggcgaagcgacgaagaatcgc

SEQ ID NO: 224433 - DNA, 55 bp, Artificial
  Synthetic oligonucleotide
cgcttgcaccattcgattatggatcaggcccgactcatcaagcccttggtaaatc

SEQ ID NO: 224434 - DNA, 55 bp, Artificial
  Synthetic oligonucleotide
cgcccggctaaccgctgatccttttccaacgcgccccacaaggttcgctacgtga

SEQ ID NO: 224435 - DNA, 55 bp, Artificial
  Synthetic oligonucleotide
cgccctcatcgcggcactgccagtgagctgaggatgcggatcgatcaccggttta

SEQ ID NO: 224436 - DNA, 54 bp, Artificial
  Synthetic oligonucleotide
ctagggttacaatgggtcttaccccactgcacactttgtcttatatttaagaaa

SEQ ID NO: 224437 - DNA, 55 bp, Artificial
  Synthetic oligonucleotide
cgctggacggaataactacactgacatgaggtccgacatgaggttcgcgcgttcg

SEQ ID NO: 224438 - DNA, 55 bp, Artificial
  Synthetic oligonucleotide
ctccggctgctattcccaccgagcgcaatacgcccgttaaaaggaggcgcaattc

SEQ ID NO: 224439 - DNA, 55 bp, Artificial
  Synthetic oligonucleotide
ggggctgtcgtcctttacaccaaagacctttgatagatactgtccgcgatccctg

SEQ ID NO: 224440 - DNA, 55 bp, Artificial
  Synthetic oligonucleotide
ctcgctcccgaagcgtacgcacaaccctggcgcacaggcgcaagagattcctaca

SEQ ID NO: 224441 - DNA, 55 bp, Artificial
  Synthetic oligonucleotide
ggggcgtcagtgagtgcgtgtaggtcacaggtcgtgtgatcgaagagtctatttg

SEQ ID NO: 224442 - DNA, 55 bp, Artificial
  Synthetic oligonucleotide
cgcgtaaatgacaatctcctacgaagctgtgcgcgatttcctttaccgcgaagca

SEQ ID NO: 224443 - DNA, 55 bp, Artificial
  Synthetic oligonucleotide
cgcctgtgaaggatgtgaatgccgccgattgtaaggactaattcggtttgcggtg

SEQ ID NO: 224444 - DNA, 55 bp, Artificial
  Synthetic oligonucleotide
gggtagtgaagcgctcagcaccaatataaatgacacgaacctccgctttagaacc

SEQ ID NO: 224445 - DNA, 55 bp, Artificial
  Synthetic oligonucleotide
cgcgtccattacgatatccatcgtccgcacgcgggtgacgaatgcccacttcgca

SEQ ID NO: 224446 - DNA, 55 bp, Artificial
  Synthetic oligonucleotide
ggcttaatcgccttgagtaatgaaattagaactgccgtaactcgaacgttacggc

SEQ ID NO: 224447 - DNA, 60 bp, Artificial
  Synthetic oligonucleotide
tctccgtcacaccagcttgttgcatccagctctcccaggtcgggaagcctgagtggttat

SEQ ID NO: 224448 - DNA, 55 bp, Artificial
  Synthetic oligonucleotide
gggtgagtacactaagagggtgaaggagaactatcaccaccgtgatcccgcctac

SEQ ID NO: 224449 - DNA, 55 bp, Artificial
  Synthetic oligonucleotide
ctcggcatgcacctaaaggttcgcaaccggcgtcgaatcctaaacggccccgtgc

SEQ ID NO: 224450 - DNA, 55 bp, Artificial
  Synthetic oligonucleotide
ctccgaggtttcaatagacgcggtaccaaccagcacaggggcattgtttgccgag

SEQ ID NO: 224451 - DNA, 55 bp, Artificial
  Synthetic oligonucleotide
cgcgttgaatgcagtcgtttcttacagcgcctgaacgaggaatttcctacatgcc

SEQ ID NO: 224452 - DNA, 55 bp, Artificial
  Synthetic oligonucleotide
ggggccgccctgaaaattagacggcggatcttactgaatagtgcgtactttgaca

SEQ ID NO: 224453 - DNA, 54 bp, Artificial
  Synthetic oligonucleotide
ctccccggacccatgaacggtacgtctcgataccgcgaggcaacgaatcggcgt

SEQ ID NO: 224454 - DNA, 55 bp, Artificial
  Synthetic oligonucleotide
ctccagtgcgatggtgctagatgacgttaagacgcaaggcgtctgcgcaagttcc

SEQ ID NO: 224455 - DNA, 55 bp, Artificial
  Synthetic oligonucleotide
ctccagggacattacgtttcaaacggaagacactaaattagctcggtatacagaa

SEQ ID NO: 224456 - DNA, 55 bp, Artificial
  Synthetic oligonucleotide
cgctcagcggaagttgtgtagatgacttaaagactcaacgtccgattcgacgcct

SEQ ID NO: 224457 - DNA, 55 bp, Artificial
  Synthetic oligonucleotide
ggggtgaacccgattcaccgtcatgtgtaagtgaacattgtccgtgtcatgatgg

SEQ ID NO: 224458 - DNA, 50 bp, Artificial
  Synthetic oligonucleotide
cggctttggccgattccgtacttccttggggcatcggcccttaggttttt

SEQ ID NO: 224459 - DNA, 53 bp, Artificial
  Synthetic oligonucleotide
cgccgttccctgggtggtgggtacctgaccagtacacttaccaacaactttgc

SEQ ID NO: 224460 - DNA, 55 bp, Artificial
  Synthetic oligonucleotide
ggggcacgcccataaaatgcttcctagaggccatcacggttatttcggaagagcg

SEQ ID NO: 224461 - DNA, 54 bp, Artificial
  Synthetic oligonucleotide
cgccccgttgaaagcctcggggcaaaagacgccgtatttaaccacaagcgcgca

SEQ ID NO: 224462 - DNA, 55 bp, Artificial
  Synthetic oligonucleotide
ctcacaagaaccactcgcagcgtttcaccaaccgctgctggcgagcgattactag

SEQ ID NO: 224463 - DNA, 55 bp, Artificial
  Synthetic oligonucleotide
cgccgggttatgcggctgccgtgggacgttgcacgctgcaccggaggaaataatt

SEQ ID NO: 224464 - DNA, 55 bp, Artificial
  Synthetic oligonucleotide
ctcctcgataattgctactcgatacaagcactggcctcgactgattgcgcagtcc

SEQ ID NO: 224465 - DNA, 55 bp, Artificial
  Synthetic oligonucleotide
cgtaatcacaggcataataaccattcgtagggctcggggtatctgcggtgaaaat

SEQ ID NO: 224466 - DNA, 55 bp, Artificial
  Synthetic oligonucleotide
cgtacagcttgggtgcactgtttacggcatttatatagaggtcgctatcagcctt

SEQ ID NO: 224467 - DNA, 55 bp, Artificial
  Synthetic oligonucleotide
cgtacctgacgtgatgtggttcactaggcattcccatgcgtttcgctccgttagc

SEQ ID NO: 224468 - DNA, 55 bp, Artificial
  Synthetic oligonucleotide
cgtagcacgactcgatgcaacgcgggtcatattcacaaacctttctaccgttgcg

SEQ ID NO: 224469 - DNA, 57 bp, Artificial
  Synthetic oligonucleotide
gccaccaaaaacgaaagcctcactgaaaaagtgaagcgctatttcaaggcaggcaag

SEQ ID NO: 224470 - DNA, 55 bp, Artificial
  Synthetic oligonucleotide
cgtaggaacaacaatcctgagtgcgcatcatgcgaatttcgtaacgcatgcctcc

SEQ ID NO: 224471 - DNA, 55 bp, Artificial
  Synthetic oligonucleotide
cgtaggtgctcccaagattcggcgtcgctttgttctacgggtcggatcaggagtg

SEQ ID NO: 224472 - DNA, 55 bp, Artificial
  Synthetic oligonucleotide
cgtagtccagatacgtaaaacagtccagacctctaaagtcgatgactagctgctc

SEQ ID NO: 224473 - DNA, 55 bp, Artificial
  Synthetic oligonucleotide
cgtcagacatgacgcacctccggggaagtgctggggtgaagcgatgtgggtggag

SEQ ID NO: 224474 - DNA, 55 bp, Artificial
  Synthetic oligonucleotide
cgtcagtgatgaacaggaggcgttgccgctacctggatttgttacccgggagacg

SEQ ID NO: 224475 - DNA, 55 bp, Artificial
  Synthetic oligonucleotide
cgtccggttaactcccacacggaagcgttggccgagcttaatgctgcgggcgtga

SEQ ID NO: 224476 - DNA, 55 bp, Artificial
  Synthetic oligonucleotide
cgtccgtatcttgaccgcaggccgcagacggggtcaacaacgcatatgacccgtc

SEQ ID NO: 224477 - DNA, 55 bp, Artificial
  Synthetic oligonucleotide
cgtccgtcgggtccgactcgtgggcataaataatgtctaggaggttcacgtccca

SEQ ID NO: 224478 - DNA, 55 bp, Artificial
  Synthetic oligonucleotide
gggccggccatacattgcttcaggccagccctagacacttcataccaataccgtc

SEQ ID NO: 224479 - DNA, 55 bp, Artificial
  Synthetic oligonucleotide
cgtcgactttaacctcggtgtattgcggtgacaggcccatgcgcaattgctctcg

SEQ ID NO: 224480 - DNA, 60 bp, Artificial
  Synthetic oligonucleotide
attgattgcgtctatccggcactgcgaaccagcattgactgcaaacgaacctgcatccag

SEQ ID NO: 224481 - DNA, 57 bp, Artificial
  Synthetic oligonucleotide
ccaggccgttgagtcactggacgccttccagtttcatcgtggcgaacaaggggaggc

SEQ ID NO: 224482 - DNA, 55 bp, Artificial
  Synthetic oligonucleotide
gggccaaacatggcttggcaaaagtacgtttcaaaccacgtccctgattggctcc

SEQ ID NO: 224483 - DNA, 55 bp, Artificial
  Synthetic oligonucleotide
cgtttcgtgattgtcacgctcaagcccgtagtcccgttcgagcgtcgcgcagagg

SEQ ID NO: 224484 - DNA, 55 bp, Artificial
  Synthetic oligonucleotide
cgttgtttcggtcattgctggtcgttcctgtgtctgccgatcatcacccatagcg

SEQ ID NO: 224485 - DNA, 55 bp, Artificial
  Synthetic oligonucleotide
cgttgtcttgctacacaaggaaaaggtgtcaattggcgatacccaagaacacggc

SEQ ID NO: 224486 - DNA, 55 bp, Artificial
  Synthetic oligonucleotide
cgtcgggtcgaaggagcgaacagcagctccctcgacaggcaagcaaggcagatag

SEQ ID NO: 224487 - DNA, 55 bp, Artificial
  Synthetic oligonucleotide
cgtcgtcagctaagcactatctccccgcttttattctcgatactcgaaagacatg

SEQ ID NO: 224488 - DNA, 55 bp, Artificial
  Synthetic oligonucleotide
gggcagtcacttacggcattagacggggtaggggagcgcatgaatcattgcgccc

SEQ ID NO: 224489 - DNA, 55 bp, Artificial
  Synthetic oligonucleotide
cgtctgtcgcgaaacatagcgccagcaagctgtgatgtcaaattggagcgccccg

SEQ ID NO: 224490 - DNA, 55 bp, Artificial
  Synthetic oligonucleotide
cgtgaactacgccctgccactgggtggagatcagtctctggcattcgatgcgaac

SEQ ID NO: 224491 - DNA, 55 bp, Artificial
  Synthetic oligonucleotide
cgtgaactcgattttgcgatagacccgtgcgatcaaacttttctcgccatgcttt

SEQ ID NO: 224492 - DNA, 59 bp, Artificial
  Synthetic oligonucleotide
tctggcgtccgttggaaccacgtggcgaagccatgtgtgttacaacggccatcctgtta

SEQ ID NO: 224493 - DNA, 55 bp, Artificial
  Synthetic oligonucleotide
cgtgcgcgggatactgacaaggtatatactgcgttagtacctttacaaaggagcg

SEQ ID NO: 224494 - DNA, 55 bp, Artificial
  Synthetic oligonucleotide
cgtggtcatggaccagtagttcgatggcattcattgtcgttcctcatcgtttcgt

SEQ ID NO: 224495 - DNA, 55 bp, Artificial
  Synthetic oligonucleotide
cgttgtcggcctgtttaggagccgcttcatagcgatctaggaactggcttaaagg

SEQ ID NO: 224496 - DNA, 55 bp, Artificial
  Synthetic oligonucleotide
cgttgcgtgaaattctcggtgagcacgtgagccagaagggctccttggtggacag

SEQ ID NO: 224497 - DNA, 55 bp, Artificial
  Synthetic oligonucleotide
gggatttgccggtgaccccgtattggtagccacgtgaatatgctctttccaacgg

SEQ ID NO: 224498 - DNA, 55 bp, Artificial
  Synthetic oligonucleotide
cgtgtttcacgatttgcaaactgttgtaacgcccaagcagagccatttccgatga

SEQ ID NO: 224499 - DNA, 55 bp, Artificial
  Synthetic oligonucleotide
gggagtttagatttcctgaatgagcgttctgaggctgctttaacgacgtattgcc

SEQ ID NO: 224500 - DNA, 52 bp, Artificial
  Synthetic oligonucleotide
cgttcactctgtgcccgtaccccaaaagggaacgacacgctaaacgggtctg

SEQ ID NO: 224501 - DNA, 55 bp, Artificial
  Synthetic oligonucleotide
cggcacatcggctaagaagggatttcgtagtgcgtcggcttcggattgcctcagc

SEQ ID NO: 224502 - DNA, 55 bp, Artificial
  Synthetic oligonucleotide
cggcactgcgaaccagcattgactgcaaacgaacctgcatccagccacttcgacc

SEQ ID NO: 224503 - DNA, 60 bp, Artificial
  Synthetic oligonucleotide
caagatcgtgggcatgtctgtgagcctgtatgagtcctgccgcttgtccttccctaccgc

SEQ ID NO: 224504 - DNA, 52 bp, Artificial
  Synthetic oligonucleotide
ggcttgttcgtacaacaccctaggacctccactaacgaaaccgtcttccctc

SEQ ID NO: 224505 - DNA, 55 bp, Artificial
  Synthetic oligonucleotide
cggcgtattcacctcagtcacattgcagagatacttgagcggtgaatgattgacc

SEQ ID NO: 224506 - DNA, 55 bp, Artificial
  Synthetic oligonucleotide
cggctacccacaggacgtgaccgctaccaatctttctcggtagagtgcgcagatc

SEQ ID NO: 224507 - DNA, 55 bp, Artificial
  Synthetic oligonucleotide
cggctaggtccctgcttaagttatttgccaaaccacgtcgccccatcgcaagggc

SEQ ID NO: 224508 - DNA, 55 bp, Artificial
  Synthetic oligonucleotide
cggctatacaagaaaagctttgcagtgatgacccgttgttatgtagacgatggtc

SEQ ID NO: 224509 - DNA, 55 bp, Artificial
  Synthetic oligonucleotide
cggctcactaagttcgatacgcccgttttcaactccgaagacaaggagcccatat

SEQ ID NO: 224510 - DNA, 55 bp, Artificial
  Synthetic oligonucleotide
cggcttgcccgaaagcaatccgcgcttaagcatttccacctggtgatcgtatggc

SEQ ID NO: 224511 - DNA, 55 bp, Artificial
  Synthetic oligonucleotide
ctatggcgttatccgccctacggaccggcgctccgctagcccaacctggtgtagg

SEQ ID NO: 224512 - DNA, 55 bp, Artificial
  Synthetic oligonucleotide
ctaggtggacacctgaggacgatcaatttcttctagataactaccggaagcggcc

SEQ ID NO: 224513 - DNA, 55 bp, Artificial
  Synthetic oligonucleotide
cgggacagcctcagaaaggggtgtgcttagaggccgtgcattctagcctaattct

SEQ ID NO: 224514 - DNA, 59 bp, Artificial
  Synthetic oligonucleotide
acgatattaggtctatgtactctcgtcctagcttctatcgctaccgtaaggctcttatg

SEQ ID NO: 224515 - DNA, 55 bp, Artificial
  Synthetic oligonucleotide
ctaggggctttccctagtgggaggcctctgtcggtttgaggaggtctgaaatgga

SEQ ID NO: 224516 - DNA, 55 bp, Artificial
  Synthetic oligonucleotide
cgggctggccgggacaaggcgtgagtgatcgatatccgatcaaaagatagggcca

SEQ ID NO: 224517 - DNA, 55 bp, Artificial
  Synthetic oligonucleotide
gggctgccgaggtcttctcagagatattcgccaggttagagacggtaaagtccag

SEQ ID NO: 224518 - DNA, 55 bp, Artificial
  Synthetic oligonucleotide
gggcgtggttcatggcggtttactcgatgcgtatgggtgactgtaggaacgaagg

SEQ ID NO: 224519 - DNA, 54 bp, Artificial
  Synthetic oligonucleotide
ctacctcgcccaaaacaacacgatggtcccggccggcgcatgggttcggaagga

SEQ ID NO: 224520 - DNA, 55 bp, Artificial
  Synthetic oligonucleotide
cggttggaatggagaaatgtcggctggttatccgaaagtagtattcatcacgccg

SEQ ID NO: 224521 - DNA, 55 bp, Artificial
  Synthetic oligonucleotide
cggttacatcgcaaatcttcactcaggccatcagtaacggtgtctgcgcaaggat

SEQ ID NO: 224522 - DNA, 55 bp, Artificial
  Synthetic oligonucleotide
gggcgcaatgattcatgcgctcccctaccccgtctaatgccgtaagtgactgccc

SEQ ID NO: 224523 - DNA, 55 bp, Artificial
  Synthetic oligonucleotide
cggtgactaggtcacctcgcatcatggcgtccaaccctcaacatcgtctaaggct

SEQ ID NO: 224524 - DNA, 55 bp, Artificial
  Synthetic oligonucleotide
ctactcgcgtattccctatcgtggtcaggactattactactcgggtggttactgg

SEQ ID NO: 224525 - DNA, 60 bp, Artificial
  Synthetic oligonucleotide
cctgaaccacgtcaaggatgggcagaggcagcgaagcagatgaatgctgcaggtgatgat

SEQ ID NO: 224526 - DNA, 55 bp, Artificial
  Synthetic oligonucleotide
gggcgcgacgatagttaggcatccttgcctctccgacgtttgaatgagcccgaag

SEQ ID NO: 224527 - DNA, 55 bp, Artificial
  Synthetic oligonucleotide
cggtcgtcgggcacacgtagcccggctgcttaggttcctgtcttggcattgctca

SEQ ID NO: 224528 - DNA, 55 bp, Artificial
  Synthetic oligonucleotide
cggtcaaagctgctgacggtatgaggtgtttgctcttgagtgcacgcagagacgt

SEQ ID NO: 224529 - DNA, 55 bp, Artificial
  Synthetic oligonucleotide
cggtatgaccggcactgcgggcatccacagactcaacgaacttcacgcggtcgga

SEQ ID NO: 224530 - DNA, 52 bp, Artificial
  Synthetic oligonucleotide
gggactatcgacgaaactccaccgttttctgcgttttccccacgtcttagtc

SEQ ID NO: 224531 - DNA, 55 bp, Artificial
  Synthetic oligonucleotide
gggcgcttgcctttacccattgggcaactgccccgatgtggctgacgttgctggt

SEQ ID NO: 224532 - DNA, 55 bp, Artificial
  Synthetic oligonucleotide
cggtagtcaccggctacgtcaactgccgattgagcaaacttggaagggcgcctgg

SEQ ID NO: 224533 - DNA, 55 bp, Artificial
  Synthetic oligonucleotide
cggtaacactataaggctattacttatagcgatcgaaaagcagctcgggagtcca

SEQ ID NO: 224534 - DNA, 55 bp, Artificial
  Synthetic oligonucleotide
cgggtctgcttgcataaaacgcgacaggcgcgaatcaaatatccgcccgttcata

SEQ ID NO: 224535 - DNA, 55 bp, Artificial
  Synthetic oligonucleotide
cgggtcgatctgtcttgcgccgcattagataacgaaattgtgtcaggtatgtgac

SEQ ID NO: 224536 - DNA, 59 bp, Artificial
  Synthetic oligonucleotide
tcttgagtgcacgcagagacgttggggaaaccctccttgcagagtccggagagtaagcg

SEQ ID NO: 224537 - DNA, 55 bp, Artificial
  Synthetic oligonucleotide
gcatggaaagggttgttatccacaggccagttacccacagactttcgaccccact

SEQ ID NO: 224538 - DNA, 55 bp, Artificial
  Synthetic oligonucleotide
gccaacatctatgtatcatcgagcgcagaaaatcccgcttaacacgaggtattgc

SEQ ID NO: 224539 - DNA, 54 bp, Artificial
  Synthetic oligonucleotide
gccaatttgatagactcgtttacctccgcccaatagggatttgggtgtaaatgg

SEQ ID NO: 224540 - DNA, 55 bp, Artificial
  Synthetic oligonucleotide
ggaactgtccgtggttgcaccttgggagcgaatacaattcgagactatcgacagc

SEQ ID NO: 224541 - DNA, 55 bp, Artificial
  Synthetic oligonucleotide
gccacctcaaccgaattgtctaccagacgccgaaaggtcgccgacagacgctcgc

SEQ ID NO: 224542 - DNA, 55 bp, Artificial
  Synthetic oligonucleotide
gccactctgccgcacttcgctcagttgtttgacaagcgcctttcgtcctagggtg

SEQ ID NO: 224543 - DNA, 55 bp, Artificial
  Synthetic oligonucleotide
gccactgcaccggtcagccctccttgtgcttcctgtgcaggaatttaccgtacca

SEQ ID NO: 224544 - DNA, 55 bp, Artificial
  Synthetic oligonucleotide
gccagggcaatggacgagtcgccgaaaggttttctccgtccgtgcctcacctcga

SEQ ID NO: 224545 - DNA, 55 bp, Artificial
  Synthetic oligonucleotide
gccattcacagcagcgatcacgggcttgtagatgtccgtccaacggctgggtccg

SEQ ID NO: 224546 - DNA, 55 bp, Artificial
  Synthetic oligonucleotide
gccatttcagctgtccccgaagaaatactgacgtctttgcgccatcagtaacggt

SEQ ID NO: 224547 - DNA, 60 bp, Artificial
  Synthetic oligonucleotide
gccaggctcagaacgtacctgacgtgatgtggttcactaggcattcccatgcgtttcgct

SEQ ID NO: 224548 - DNA, 55 bp, Artificial
  Synthetic oligonucleotide
gcccaacgccctgcctaagcagacctgagtagctcggcgcaatttctcggaaggg

SEQ ID NO: 224549 - DNA, 55 bp, Artificial
  Synthetic oligonucleotide
ggaactcctcatacaaccgaacaatcgcataattcccttcagtgccggtgccaac

SEQ ID NO: 224550 - DNA, 55 bp, Artificial
  Synthetic oligonucleotide
ggaaccgggtggcaactcgcaaaccgtagggtggatcacgcttcaccgatccacc

SEQ ID NO: 224551 - DNA, 55 bp, Artificial
  Synthetic oligonucleotide
gccccttcaatgagatggcctccgctcgagagcatcctgcggaaccgtgataccg

SEQ ID NO: 224552 - DNA, 55 bp, Artificial
  Synthetic oligonucleotide
gcccggattcagggtgccgtcaaggcgctaaggattcggcaattcgttgcctaaa

SEQ ID NO: 224553 - DNA, 55 bp, Artificial
  Synthetic oligonucleotide
gcccggtgccttctcttgcgtgcttctgcgaagatactttcgagaagacctatga

SEQ ID NO: 224554 - DNA, 55 bp, Artificial
  Synthetic oligonucleotide
gcccgttacgccttgctggctcactacttcgaattctgaaagcagcccctgctgg

SEQ ID NO: 224555 - DNA, 55 bp, Artificial
  Synthetic oligonucleotide
ggaaccacgtggcgaagccatgtgtgttacaacggccatcctgttaagctcatct

SEQ ID NO: 224556 - DNA, 55 bp, Artificial
  Synthetic oligonucleotide
gccctgaaattttggtccctagacagcagttgagcatacgacgcagagcgtcgcg

SEQ ID NO: 224557 - DNA, 55 bp, Artificial
  Synthetic oligonucleotide
gccctgtaaattagacggcggatcttactgaatagtgcgtactttgacaagtcaa

SEQ ID NO: 224558 - DNA, 54 bp, Artificial
  Synthetic oligonucleotide
cctgagtctcaaagaaaattcggttttagacggccaagtttgagactcgtagaa

SEQ ID NO: 224559 - DNA, 55 bp, Artificial
  Synthetic oligonucleotide
gcccttacccacgttcaccagtcggggcattggaagcagttagccacagggacac

SEQ ID NO: 224560 - DNA, 55 bp, Artificial
  Synthetic oligonucleotide
gcccttcaatgctcctatgttgtgttaagtgttggcagatatctggaccccgccc

SEQ ID NO: 224561 - DNA, 55 bp, Artificial
  Synthetic oligonucleotide
ggaaagtttatggtatggtattcaaccggcaccgtagcggtgaccgcaaatagcc

SEQ ID NO: 224562 - DNA, 55 bp, Artificial
  Synthetic oligonucleotide
gccgaagtacgacgtctggtcgaactcgatctatgaagtgagctaatctgattcg

SEQ ID NO: 224563 - DNA, 54 bp, Artificial
  Synthetic oligonucleotide
gccgactacttggtaggtaagttataagctcccgatttgtttgtcaaatagctt

SEQ ID NO: 224564 - DNA, 55 bp, Artificial
  Synthetic oligonucleotide
gattgcctgtctaagcgatatcaggcgcgtcctcagtacgtcttggccgcctggt

SEQ ID NO: 224565 - DNA, 55 bp, Artificial
  Synthetic oligonucleotide
gcaaaacggcccctatcaaaagcgctccgattcagagagcaggtccatagcgccg

SEQ ID NO: 224566 - DNA, 55 bp, Artificial
  Synthetic oligonucleotide
gcaacgccatgccctgcgactgcccgctccgctgagtgtcggctggtgcctcgtt

SEQ ID NO: 224567 - DNA, 55 bp, Artificial
  Synthetic oligonucleotide
ggagcttgtgcgctatgcactgacggacccgcgaaacgattgtgagtgggttcgg

SEQ ID NO: 224568 - DNA, 55 bp, Artificial
  Synthetic oligonucleotide
gcaagtacggcagccgtcctatctgagctgcacggatcacgaagaagcccgctat

SEQ ID NO: 224569 - DNA, 60 bp, Artificial
  Synthetic oligonucleotide
tgaccatgaagtgaccatgcacgttgtccgtatcccgatgcacggctgcaaggtactggt

SEQ ID NO: 224570 - DNA, 55 bp, Artificial
  Synthetic oligonucleotide
gcaatgagcgctgctgctttctagcggtttccagctctcggtgaatgtctgtcag

SEQ ID NO: 224571 - DNA, 55 bp, Artificial
  Synthetic oligonucleotide
gcacaagcgttccgtgactacatgaggggtaaaacgagtgtgcggcctagctatg

SEQ ID NO: 224572 - DNA, 55 bp, Artificial
  Synthetic oligonucleotide
gcacactaaatttcgaattcagactgcaaagcggcccgcacacagtacaaaacac

SEQ ID NO: 224573 - DNA, 55 bp, Artificial
  Synthetic oligonucleotide
gcacctgtcgatgacgacagacgccgggcggtcttgcatgaatcaggcttgggtc

SEQ ID NO: 224574 - DNA, 55 bp, Artificial
  Synthetic oligonucleotide
ggagcgtagggaacgataatctcaactatcgtgcgaccccacgccggcaagccat

SEQ ID NO: 224575 - DNA, 55 bp, Artificial
  Synthetic oligonucleotide
gcactcctacaacaagcgtctacccttcacctgcaacctgcctatctgtctgaca

SEQ ID NO: 224576 - DNA, 55 bp, Artificial
  Synthetic oligonucleotide
gcactgtgcgccagatcacaagttatgacgtggtgacgataaattattgtactac

SEQ ID NO: 224577 - DNA, 55 bp, Artificial
  Synthetic oligonucleotide
gcacttatgtcagtgctccatgttacgatttgtgccctcaaacttgctgcgtcac

SEQ ID NO: 224578 - DNA, 55 bp, Artificial
  Synthetic oligonucleotide
ggagaccacgggatgctcggtaacggacatgacatctctcctcaaggcagtgggg

SEQ ID NO: 224579 - DNA, 55 bp, Artificial
  Synthetic oligonucleotide
ggagaactgagtccggtactggaatcgccgatcggttttcacgtgctgtactgcg

SEQ ID NO: 224580 - DNA, 60 bp, Artificial
  Synthetic oligonucleotide
tgagaacgcccagcccaaccgttgcagtgattgccggtactggaattccaagcaaatggc

SEQ ID NO: 224581 - DNA, 55 bp, Artificial
  Synthetic oligonucleotide
gcagccctgccgactggctaaccacagcgatctgtacggagatcacaccatggct

SEQ ID NO: 224582 - DNA, 55 bp, Artificial
  Synthetic oligonucleotide
gcagcgtaaggcccatctaacaatctggtcgacccgatactcgcctgattgaagc

SEQ ID NO: 224583 - DNA, 55 bp, Artificial
  Synthetic oligonucleotide
ggacgcaactagacttaacgagccgcagatcagcgcttcgaacaagatccggcgc

SEQ ID NO: 224584 - DNA, 55 bp, Artificial
  Synthetic oligonucleotide
gcagctttgcgctatttactcccaacgccgttcagagcgccctagcacggagctt

SEQ ID NO: 224585 - DNA, 55 bp, Artificial
  Synthetic oligonucleotide
ggacaagagcattcgcatcgagcactggccgatattgcaggagcacgggttcacg

SEQ ID NO: 224586 - DNA, 55 bp, Artificial
  Synthetic oligonucleotide
gcaggaatgatgccgagattgggacggaagttgatgtcacggtgcgatggggctc

SEQ ID NO: 224587 - DNA, 55 bp, Artificial
  Synthetic oligonucleotide
gcaggatggacgtgtacgctgtgacagggagcttgatggtccttaggtctaggtt

SEQ ID NO: 224588 - DNA, 55 bp, Artificial
  Synthetic oligonucleotide
gcatcacgttgacctcaggtgcgagctttaaggtgcgggctttaagctgcaagcc

SEQ ID NO: 224589 - DNA, 55 bp, Artificial
  Synthetic oligonucleotide
ggaagggaaccgttcctctcacagacccatcagcggaaccagcaaggctctatct

SEQ ID NO: 224590 - DNA, 55 bp, Artificial
  Synthetic oligonucleotide
gcatctcagcgttcctgtaggcagagtgaccataagcgctgacgtttgtgcaggc

SEQ ID NO: 224591 - DNA, 55 bp, Artificial
  Synthetic oligonucleotide
acttctaagggccgagcccgcgcggtaggctggtgattgaggggtatgttcttac

SEQ ID NO: 224592 - DNA, 60 bp, Artificial
  Synthetic oligonucleotide
cctgcaatcgaaatggcaccgacctgcaatcatcgcgtttttcgaccgggattgattgcg

SEQ ID NO: 224593 - DNA, 55 bp, Artificial
  Synthetic oligonucleotide
gcatgccgcgcattccatccctatgtgaagcagatactcgccgagaacccggaag

SEQ ID NO: 224594 - DNA, 55 bp, Artificial
  Synthetic oligonucleotide
gcgggtcattctcgaataggcccggcaatccgaaataatcgcatagggagtttcg

SEQ ID NO: 224595 - DNA, 55 bp, Artificial
  Synthetic oligonucleotide
gcggtctactggttacgtcgccaccccagagcctatgcgctacttccagccaacg

SEQ ID NO: 224596 - DNA, 55 bp, Artificial
  Synthetic oligonucleotide
gcgtacatgtgtatctccgttaaacctgctcacccgacgctttatagaagtagga

SEQ ID NO: 224597 - DNA, 55 bp, Artificial
  Synthetic oligonucleotide
gcgtagggcgactaaagcctcacactcgcaaacgtcgattcattacgcgcctgac

SEQ ID NO: 224598 - DNA, 55 bp, Artificial
  Synthetic oligonucleotide
gcgtatgttcacctgaattccatcactgcagcgggccgcgtaaataattgtccgc

SEQ ID NO: 224599 - DNA, 55 bp, Artificial
  Synthetic oligonucleotide
gcgtccacttctgctagtaagctggtcaaggagtcgcttgattcatccaggacag

SEQ ID NO: 224600 - DNA, 55 bp, Artificial
  Synthetic oligonucleotide
gcgtcgctcaaacgaaatcatcaggcactggatcaagctgtaaatgccatgcgca

SEQ ID NO: 224601 - DNA, 55 bp, Artificial
  Synthetic oligonucleotide
gcgtgcatctgtgggctagccgcctatcgaaaaggacgttggtatgccttcctca

SEQ ID NO: 224602 - DNA, 55 bp, Artificial
  Synthetic oligonucleotide
gcgtggacgaggtaacgcggtccaacccgttcagtgtattggcgcagttaaagcg

SEQ ID NO: 224603 - DNA, 58 bp, Artificial
  Synthetic oligonucleotide
acctgggacccgccgatcattcagtgcggtgttgacattcctgcacgggtgcaaaacg

SEQ ID NO: 224604 - DNA, 55 bp, Artificial
  Synthetic oligonucleotide
gcgttgctcaacgaagtacgcaacctcttgagatattcgctttgtttcagcgtca

SEQ ID NO: 224605 - DNA, 55 bp, Artificial
  Synthetic oligonucleotide
gcgttgtagcagggccgccatagggtaatagctccggagttgtctgggtcgtcca

SEQ ID NO: 224606 - DNA, 55 bp, Artificial
  Synthetic oligonucleotide
gcgttttgtagccccaatccgacagtgagtcctttgtgatcaatcctcgcccgcg

SEQ ID NO: 224607 - DNA, 55 bp, Artificial
  Synthetic oligonucleotide
gctacgaaggtttgcctgcgctcagaaacccgccatggaggacgctgctttcgac

SEQ ID NO: 224608 - DNA, 55 bp, Artificial
  Synthetic oligonucleotide
gctattaccgtggctgggacaaagatcgtgaactgagtgcggtacttgccacctc

SEQ ID NO: 224609 - DNA, 55 bp, Artificial
  Synthetic oligonucleotide
gctatttctttgcgtatcgttgacacgacaccttcaacaagggattgaggtcgtg

SEQ ID NO: 224610 - DNA, 55 bp, Artificial
  Synthetic oligonucleotide
gctccaagttgtcgcacatcgcttttcgctcgttttcccattgaatcatctgtgc

SEQ ID NO: 224611 - DNA, 55 bp, Artificial
  Synthetic oligonucleotide
gctccatatttcactgctctatttgcggcggtgttaggtcgactcgccattaacg

SEQ ID NO: 224612 - DNA, 55 bp, Artificial
  Synthetic oligonucleotide
gctcgatattattgcttataggtaggctgctatgcctgataggactttgactctc

SEQ ID NO: 224613 - DNA, 55 bp, Artificial
  Synthetic oligonucleotide
gctcgctcaagttaggattccttcaggcacgatcggcccaatatggggactgacg

SEQ ID NO: 224614 - DNA, 60 bp, Artificial
  Synthetic oligonucleotide
tgagcctcaggggtcttatgtacgttgcttcttcgcatgtcgatttctcttcttaaccag

SEQ ID NO: 224615 - DNA, 55 bp, Artificial
  Synthetic oligonucleotide
gctcgtagtcgatctgagacttcacgtctctcagcacccacgttttgttgcccgt

SEQ ID NO: 224616 - DNA, 55 bp, Artificial
  Synthetic oligonucleotide
gctctaccacgaatcactgaattgcggcgaagtatgcgattcccgagtatttaag

SEQ ID NO: 224617 - DNA, 55 bp, Artificial
  Synthetic oligonucleotide
gctctatcttcgctcccgaggcattcttgcttgggatcgaccagagctgagccgc

SEQ ID NO: 224618 - DNA, 55 bp, Artificial
  Synthetic oligonucleotide
gctgacggacactttgtggagcacgtgtccagcactgcggttgtttcttgtgggg

SEQ ID NO: 224619 - DNA, 55 bp, Artificial
  Synthetic oligonucleotide
gctgagccgaatctcagggtttccgttgcagacatgctcgcagcgcaaagggcgg

SEQ ID NO: 224620 - DNA, 55 bp, Artificial
  Synthetic oligonucleotide
gctgcaacaccctgcagacatgggcctatacaggctactgggaatatagcaacgg

SEQ ID NO: 224621 - DNA, 55 bp, Artificial
  Synthetic oligonucleotide
gctggcggaattcgatactgactcagctcaaaggcaaggagggtctgccaccggc

SEQ ID NO: 224622 - DNA, 55 bp, Artificial
  Synthetic oligonucleotide
gctggccaccccacacaatttcgttgcgctcaaggctttccctgacccgcggttc

SEQ ID NO: 224623 - DNA, 55 bp, Artificial
  Synthetic oligonucleotide
gccgattcaagcgtgagctgtcggcctggaggcaaggacggcgggttatagcgat

SEQ ID NO: 224624 - DNA, 55 bp, Artificial
  Synthetic oligonucleotide
gccgccttgtcttgaggatcatcggaaatggctctgcttgggcgttacaacagtt

SEQ ID NO: 224625 - DNA, 58 bp, Artificial
  Synthetic oligonucleotide
ggcgcgtccaagatgactggtcggtagggagatccccgcgaggatcgttgaccacaag

SEQ ID NO: 224626 - DNA, 55 bp, Artificial
  Synthetic oligonucleotide
gccggaagtatcctgatgacctcccgcaagcgcgtgtccaccacgtagcacctct

SEQ ID NO: 224627 - DNA, 53 bp, Artificial
  Synthetic oligonucleotide
gccgtaagggcggaacccatagtggccgtgacctaaataacggatatgtaccc

SEQ ID NO: 224628 - DNA, 55 bp, Artificial
  Synthetic oligonucleotide
gccgtgaccgacgatttcggtaagtcgtgaccgcctgtttcggagcaggctggaa

SEQ ID NO: 224629 - DNA, 55 bp, Artificial
  Synthetic oligonucleotide
gccgttgatgtctcagttaagtacgcctaaataggctaccatcatgacgactctc

SEQ ID NO: 224630 - DNA, 55 bp, Artificial
  Synthetic oligonucleotide
gcctcagacacgcgtccctcaacggtgtgctcaaatgagacataggcggcgagcg

SEQ ID NO: 224631 - DNA, 55 bp, Artificial
  Synthetic oligonucleotide
gcctccatggttgcatagccacgcacaaacccaagcaggggctgctagctctgcc

SEQ ID NO: 224632 - DNA, 55 bp, Artificial
  Synthetic oligonucleotide
gccttatttgtagatttgcaactctgtccagggtgatagggtttgtcgtgcgatc

SEQ ID NO: 224633 - DNA, 55 bp, Artificial
  Synthetic oligonucleotide
gccttcactgctccgggcaagcctgatcccaatgatgcgatcctgtcttgcggct

SEQ ID NO: 224634 - DNA, 55 bp, Artificial
  Synthetic oligonucleotide
gcgaatgcgcggctaggcacgattgcagaaggcacaccgaatttgaggacgccgg

SEQ ID NO: 224635 - DNA, 55 bp, Artificial
  Synthetic oligonucleotide
gctttgccgcatctgagactgaatgcgagctacgctccacctggctcagtgagcc

SEQ ID NO: 224636 - DNA, 60 bp, Artificial
  Synthetic oligonucleotide
tgagctttggaagtgtggccacgatattaggtctatgtactctcgtcctagcttctatcg

SEQ ID NO: 224637 - DNA, 55 bp, Artificial
  Synthetic oligonucleotide
gcgaggctggaaatggtcgatgtgaggtgatggcaaatgggacgcttctgccgtg

SEQ ID NO: 224638 - DNA, 55 bp, Artificial
  Synthetic oligonucleotide
gcgagtgtgtggcattctaacgacagcccggtagtcgatatttcttcaaagcgac

SEQ ID NO: 224639 - DNA, 55 bp, Artificial
  Synthetic oligonucleotide
gcgcgacgctctttgggtattgcgagaaaatcggcgttctcgagttgcaccgggt

SEQ ID NO: 224640 - DNA, 55 bp, Artificial
  Synthetic oligonucleotide
gctttcatgattctggcagtctgttaaccgtaggaatattttatcacgtcttagt

SEQ ID NO: 224641 - DNA, 55 bp, Artificial
  Synthetic oligonucleotide
gcgcgcataatagtcgccgcgtgatgccccgaccagcggttttcgatcagaggct

SEQ ID NO: 224642 - DNA, 55 bp, Artificial
  Synthetic oligonucleotide
gcgctcttgaggctctgtctctcgccggtatgtcagtagatgtggaaaagctcgc

SEQ ID NO: 224643 - DNA, 55 bp, Artificial
  Synthetic oligonucleotide
gcgctgcaccaaaacgcgtcatcgaatcttccaccttcaccagcgcacgggaagg

SEQ ID NO: 224644 - DNA, 55 bp, Artificial
  Synthetic oligonucleotide
gcgctggttcggtgttgcctctcacctgcccgcagacttttgaggcagagacacg

SEQ ID NO: 224645 - DNA, 55 bp, Artificial
  Synthetic oligonucleotide
gcttggtgggagggtgatcagtcgcggcgtgggataggtgcatcgtcacgtgtga

SEQ ID NO: 224646 - DNA, 55 bp, Artificial
  Synthetic oligonucleotide
gcggagtcaaacaaaccctatcgagggctctacccatatccgcctcccctcggct

SEQ ID NO: 224647 - DNA, 60 bp, Artificial
  Synthetic oligonucleotide
ctgttctttccaccgatgccattgaacacatcccccaagcgaggcaaaagcatcagcata

SEQ ID NO: 224648 - DNA, 55 bp, Artificial
  Synthetic oligonucleotide
gcggccttgatcgcgtcagttcctgtcagtacctggacgttaattcgagatggcg

SEQ ID NO: 224649 - DNA, 53 bp, Artificial
  Synthetic oligonucleotide
gcggcggataacaccctggaaacgccgacacctccccagttccgtagggcgaa

SEQ ID NO: 224650 - DNA, 55 bp, Artificial
  Synthetic oligonucleotide
ctggctttgctcccgcaccttagttcccaagatgctgctcccatagggttactcg

SEQ ID NO: 224651 - DNA, 55 bp, Artificial
  Synthetic oligonucleotide
ctgggccgttttgaagacgctgaatctttagttaatgccgctcaaggcttacctg

SEQ ID NO: 224652 - DNA, 55 bp, Artificial
  Synthetic oligonucleotide
ctggggcatacaggaactcgcccaccttacctttcagcgttagccgcccaagagt

SEQ ID NO: 224653 - DNA, 55 bp, Artificial
  Synthetic oligonucleotide
ctgggtgaaggctgtctcagtcgctatgaccccgcagccctgacctcccgaaaac

SEQ ID NO: 224654 - DNA, 55 bp, Artificial
  Synthetic oligonucleotide
ctgtattagctgagtgcgatgcaattgacggatgccttgtctggaaattcagcgg

SEQ ID NO: 224655 - DNA, 55 bp, Artificial
  Synthetic oligonucleotide
ctgtccaacgaaaagtaccgtggtatccgtctgcaactggccaacggtcagttga

SEQ ID NO: 224656 - DNA, 55 bp, Artificial
  Synthetic oligonucleotide
cttactggtgtccgcacacccagtcgtactagaatcgcgcactctctaccgagcc

SEQ ID NO: 224657 - DNA, 55 bp, Artificial
  Synthetic oligonucleotide
cttagatctgcagctattgaacgcggtttaaacccgccctattccagcggcgcct

SEQ ID NO: 224658 - DNA, 60 bp, Artificial
  Synthetic oligonucleotide
tgatacgcgggttacctgttcaacacacataacgtgagctgattatggcgttcactgcgg

SEQ ID NO: 224659 - DNA, 55 bp, Artificial
  Synthetic oligonucleotide
cttccattgaggtcgctgggtaggctcaggtcactatgacagtagagacagcgta

SEQ ID NO: 224660 - DNA, 55 bp, Artificial
  Synthetic oligonucleotide
cttccgcttgtggcgggattaggtagtggtttaactggtgcccatgatcctctcg

SEQ ID NO: 224661 - DNA, 55 bp, Artificial
  Synthetic oligonucleotide
cttcgatcaccttagttatcacaacctttcggagtgaacatcggatcctgggtag

SEQ ID NO: 224662 - DNA, 55 bp, Artificial
  Synthetic oligonucleotide
cttcgtttccggcaagcttgttgttcggagtactgggagcaatggtagtcaagag

SEQ ID NO: 224663 - DNA, 55 bp, Artificial
  Synthetic oligonucleotide
ggcctagccgacgcacccgtttctgatacggaagcgggtcgaatacaagagtacc

SEQ ID NO: 224664 - DNA, 55 bp, Artificial
  Synthetic oligonucleotide
cttgcggttcaactgggagacgttgtttacccgctcggctgatggtgactgccct

SEQ ID NO: 224665 - DNA, 55 bp, Artificial
  Synthetic oligonucleotide
cttgtcccgatatacctacgaagcacagcacgctctcttagggaaggtctgaagt

SEQ ID NO: 224666 - DNA, 55 bp, Artificial
  Synthetic oligonucleotide
cttgtttacgtctcgcctcggtgatgcttttagcagctcggaacgcgtgaactcc

SEQ ID NO: 224667 - DNA, 55 bp, Artificial
  Synthetic oligonucleotide
ctttgctacagatccagtacgcagcggcaaacagtattggcatcgaagcgagcac

SEQ ID NO: 224668 - DNA, 55 bp, Artificial
  Synthetic oligonucleotide
ctttggcactcgcgacttacaggaatgcgtcatctaattactttgagtaggaagc

SEQ ID NO: 224669 - DNA, 56 bp, Artificial
  Synthetic oligonucleotide
cggcgtgggagctagagaaacggcttttcacaagcgtggagtcataccagaaacgg

SEQ ID NO: 224670 - DNA, 55 bp, Artificial
  Synthetic oligonucleotide
ggccgtcatatatagagcaccgaacatggtcaaacgagtcagaacgccatcaatg

SEQ ID NO: 224671 - DNA, 55 bp, Artificial
  Synthetic oligonucleotide
ggccgcggactctgactacaaccgtgcgcaaggcgcattagggaggatgtatgta

SEQ ID NO: 224672 - DNA, 53 bp, Artificial
  Synthetic oligonucleotide
gaaactactggtagctgaagacgaacccaaaaccggtacgtacctccagcaag

SEQ ID NO: 224673 - DNA, 55 bp, Artificial
  Synthetic oligonucleotide
ggccccttcgcggataaatcccacccagacaagccttgcgcgatccttgtgggag

SEQ ID NO: 224674 - DNA, 55 bp, Artificial
  Synthetic oligonucleotide
ggcccattcgcgagtaaacccgctcccacaagggcaacgagatccctgtaggagc

SEQ ID NO: 224675 - DNA, 55 bp, Artificial
  Synthetic oligonucleotide
gaacatctgttcgccggacactgtgactttcaccgcaacgcaacagtctatgact

SEQ ID NO: 224676 - DNA, 52 bp, Artificial
  Synthetic oligonucleotide
gaacgcggtttaaacccgccctattccagcggcgcctttcggcaggtgttcg

SEQ ID NO: 224677 - DNA, 55 bp, Artificial
  Synthetic oligonucleotide
ggccatggtccgggatactttcgtagatggccctggtcacactgagctgcccctc

SEQ ID NO: 224678 - DNA, 55 bp, Artificial
  Synthetic oligonucleotide
ctcggcctactctccgtgcgtactcaagcaacctgtagtggtcaacttatcccgg

SEQ ID NO: 224679 - DNA, 55 bp, Artificial
  Synthetic oligonucleotide
ctcggctggcgaagccttagccgctggacataacacgcgatcaactcactctgcg

SEQ ID NO: 224680 - DNA, 58 bp, Artificial
  Synthetic oligonucleotide
ccatcaacagtaattccgacgctccagtgtcctgaaaacgaaatttctactcctcatc

SEQ ID NO: 224681 - DNA, 55 bp, Artificial
  Synthetic oligonucleotide
ggctgcattcatttcagcgtgcgttagcgagttcctgacggacaatggctgcgcc

SEQ ID NO: 224682 - DNA, 55 bp, Artificial
  Synthetic oligonucleotide
ctctatacgagttgtctttacagaccgatcaaccatcatctgcggtatgccccga

SEQ ID NO: 224683 - DNA, 55 bp, Artificial
  Synthetic oligonucleotide
ctctcccgtaacaagcacgatgagggtgtaaggcgattgttcgtcatccagaaac

SEQ ID NO: 224684 - DNA, 55 bp, Artificial
  Synthetic oligonucleotide
ggctgacaacagccattacattgttggagtgtattacttgtccagacttgccgag

SEQ ID NO: 224685 - DNA, 55 bp, Artificial
  Synthetic oligonucleotide
ctctgattgtggccagctcaagatgacatggtaaacaggatccttaacacgtgaa

SEQ ID NO: 224686 - DNA, 55 bp, Artificial
  Synthetic oligonucleotide
ctctgccttgctgggcctcaataccttgtttgtcgcactgatggaccacccgggc

SEQ ID NO: 224687 - DNA, 55 bp, Artificial
  Synthetic oligonucleotide
ggctctggcaggtagttcggacagttctgagacaacctctctgcgccccagtgcc

SEQ ID NO: 224688 - DNA, 55 bp, Artificial
  Synthetic oligonucleotide
ctgaccagtcccgtgacccgcacagacatgggcagtgcagcgatcagatctgaat

SEQ ID NO: 224689 - DNA, 55 bp, Artificial
  Synthetic oligonucleotide
ggctcggcatcgcatgaatctgtagtcgatagatagcagccgtaatttgtagtcg

SEQ ID NO: 224690 - DNA, 55 bp, Artificial
  Synthetic oligonucleotide
ggctcagtacaggacacgttatgaaccccgtgacaggggtaggaatctcgttcat

SEQ ID NO: 224691 - DNA, 58 bp, Artificial
  Synthetic oligonucleotide
acgtcgtgggcatcaggcgagtcgttataggtgtgtgaagacgcggcagtttacccca

SEQ ID NO: 224692 - DNA, 55 bp, Artificial
  Synthetic oligonucleotide
ctgacttatgcaatgggctgaagacgggttatccacagagcttaggcatcgaccg

SEQ ID NO: 224693 - DNA, 55 bp, Artificial
  Synthetic oligonucleotide
ctgatcgatcccaaccacccggattggtcttagggagcgctggaaatacagagtg

SEQ ID NO: 224694 - DNA, 53 bp, Artificial
  Synthetic oligonucleotide
ctgcaatccaagggaaacgaagtagcaacgcagaaagttaggggaacgttagg

SEQ ID NO: 224695 - DNA, 55 bp, Artificial
  Synthetic oligonucleotide
ctgcacacgaccgcgcatgatgaactcagctaaggcgcgcatgcattcaatccct

SEQ ID NO: 224696 - DNA, 55 bp, Artificial
  Synthetic oligonucleotide
ctgcggcctgtagcttgaagcctggcacctcgggcgttagcccagtaccgagata

SEQ ID NO: 224697 - DNA, 55 bp, Artificial
  Synthetic oligonucleotide
ctgcgtagcgagcatgcaaggagccagttcatgcgaccaagagcccatagtctga

SEQ ID NO: 224698 - DNA, 55 bp, Artificial
  Synthetic oligonucleotide
ctgcgtcgatacctttgtcgccaaggcccgaaacttgcgaagcggtcgcaaaccg

SEQ ID NO: 224699 - DNA, 52 bp, Artificial
  Synthetic oligonucleotide
ggcgtttgtgcaacaacgccggtcgtcgccctcccacaaaaggttacgtagg

SEQ ID NO: 224700 - DNA, 55 bp, Artificial
  Synthetic oligonucleotide
ggcggagtctcaacagaccctagactcgttcggtatcccatcggagtcacttcct

SEQ ID NO: 224701 - DNA, 55 bp, Artificial
  Synthetic oligonucleotide
ctggagtgccatgagggctatggataaccggctttagcctgtggattaaatgcct

SEQ ID NO: 224702 - DNA, 54 bp, Artificial
  Synthetic oligonucleotide
acttacttaactcagcccctacatacgtaggtaaatcgcccaagtacaccacaa

SEQ ID NO: 224703 - DNA, 60 bp, Artificial
  Synthetic oligonucleotide
caaattgggtatacccatttgggcctagtctagccggcatggcgcattacagcaatacgc

SEQ ID NO: 224704 - DNA, 55 bp, Artificial
  Synthetic oligonucleotide
ctggcagcctcattcgagatgctggcaccgccaaatgcggacggtgtttgttatc

SEQ ID NO: 224705 - DNA, 55 bp, Artificial
  Synthetic oligonucleotide
ctggccgacctgtagtagctgactgagttgggcaccatcagttgtccttaaccgg

SEQ ID NO: 224706 - DNA, 55 bp, Artificial
  Synthetic oligonucleotide
ctggcggattagtgggtatccatgcgtatgactcacaacgacctagttgtcagac

SEQ ID NO: 224707 - DNA, 55 bp, Artificial
  Synthetic oligonucleotide
ggcgctcgagtcacgactaggttgaaggtaacttcctgggcactcgccaaggcgg

SEQ ID NO: 224708 - DNA, 55 bp, Artificial
  Synthetic oligonucleotide
ggcgctatcagccttgtacaagcgaagtaccgcgctctgagcattcccctgagcg

SEQ ID NO: 224709 - DNA, 55 bp, Artificial
  Synthetic oligonucleotide
gagaaggtttccaacaggatttacatcgttgcgagggtgttatttgcagtgccgg

SEQ ID NO: 224710 - DNA, 55 bp, Artificial
  Synthetic oligonucleotide
gagaatcacaccgacggctgaatttatgctcgaacctattctcgaccccaacaaa

SEQ ID NO: 224711 - DNA, 55 bp, Artificial
  Synthetic oligonucleotide
gagaccatcgatcaatcggtcggacaaagcaatttgacggccctgcgcccaagtt

SEQ ID NO: 224712 - DNA, 55 bp, Artificial
  Synthetic oligonucleotide
ggcaatcagagggttacgcccgtggaacgtgtccttgacactgctgtcgacgaac

SEQ ID NO: 224713 - DNA, 55 bp, Artificial
  Synthetic oligonucleotide
gagcattggcacgatagtcgagatttctccggtctaataacggagtgctgaaatt

SEQ ID NO: 224714 - DNA, 59 bp, Artificial
  Synthetic oligonucleotide
acggtgccccagtgcgccgctttcacgaccgtcaagaaggcttatgtcgagcgaacatc

SEQ ID NO: 224715 - DNA, 55 bp, Artificial
  Synthetic oligonucleotide
ggcaacttccttgattgcgtcaccgaatacggaatacccgaatcgaacgaccgca

SEQ ID NO: 224716 - DNA, 55 bp, Artificial
  Synthetic oligonucleotide
gagcgcctcgacgattaacccagtgctgcacagattgcacgcctgatagacagat

SEQ ID NO: 224717 - DNA, 55 bp, Artificial
  Synthetic oligonucleotide
ggcaacgtaaggacttcagagtagtgcagtcagatgtcacgtccgtgtgcatctg

SEQ ID NO: 224718 - DNA, 55 bp, Artificial
  Synthetic oligonucleotide
gagcttaatcatcgcggtctttcctccggctcggcatgggatgacttgcttcctc

SEQ ID NO: 224719 - DNA, 55 bp, Artificial
  Synthetic oligonucleotide
gagggcctgacgcttagctattaccgtggttgggacaaggaccgggagctcagtg

SEQ ID NO: 224720 - DNA, 55 bp, Artificial
  Synthetic oligonucleotide
gagggtgcatccacaaaggacgctgtgtgcatcatagcaaactcaaagagcccgt

SEQ ID NO: 224721 - DNA, 55 bp, Artificial
  Synthetic oligonucleotide
gaggtcaccagtatcccagggctaaaagagctctcagaactggagatttagtggg

SEQ ID NO: 224722 - DNA, 55 bp, Artificial
  Synthetic oligonucleotide
ggatctgaattcctgaggttacgaagtcattacaactgacgcacaagatcgggta

SEQ ID NO: 224723 - DNA, 55 bp, Artificial
  Synthetic oligonucleotide
gaggtggcaaaatcctgggacatgagcgagctccggcgacgagcgactatgctgc

SEQ ID NO: 224724 - DNA, 55 bp, Artificial
  Synthetic oligonucleotide
gagtaactccgttagttgacgctcttttgagtccattccccacccctcgatcagt

SEQ ID NO: 224725 - DNA, 57 bp, Artificial
  Synthetic oligonucleotide
acgggtcggatcaggagtgtcatttgcgccacctaacgcaaagctaacttgcccgac

SEQ ID NO: 224726 - DNA, 55 bp, Artificial
  Synthetic oligonucleotide
gagtatgacgctgaaacaaagcgaatatctcaagaggttgcgtacttcgtggagc

SEQ ID NO: 224727 - DNA, 55 bp, Artificial
  Synthetic oligonucleotide
gataccgtagtcatccagcaatttcagataacgtgtgcgattgtccacgtgtccc

SEQ ID NO: 224728 - DNA, 55 bp, Artificial
  Synthetic oligonucleotide
gatgagcgcaccttaacgtcacgttcgtgaattccaagtgcagcgacgaacggta

SEQ ID NO: 224729 - DNA, 55 bp, Artificial
  Synthetic oligonucleotide
gatgcatcgcctcctaccgctcgcgccggacccagtcgtgacgcacggcgatttt

SEQ ID NO: 224730 - DNA, 55 bp, Artificial
  Synthetic oligonucleotide
gatgcgcaaaccggaggcggcaaccatggattctcaggcagtgatccaacacccg

SEQ ID NO: 224731 - DNA, 55 bp, Artificial
  Synthetic oligonucleotide
gatgctcaagcttcttggcattagcgtcagcgagcagggctagttcgttgttata

SEQ ID NO: 224732 - DNA, 55 bp, Artificial
  Synthetic oligonucleotide
ggatccgcaactcaaggactacgtcgaaacttcggtctacagccttgccgagacc

SEQ ID NO: 224733 - DNA, 55 bp, Artificial
  Synthetic oligonucleotide
ggatcaacacagtgggctcaggtagcgtttgtggtattgcgtttaacttcgcccc

SEQ ID NO: 224734 - DNA, 55 bp, Artificial
  Synthetic oligonucleotide
ggatagtgcttcaaatagccatcacttgtggttagtctccggagcgttcacgccc

SEQ ID NO: 224735 - DNA, 55 bp, Artificial
  Synthetic oligonucleotide
ggagtgtcatttgcgccacctaacgcaaagctaacttgcccgactgggcgtggag

SEQ ID NO: 224736 - DNA, 58 bp, Artificial
  Synthetic oligonucleotide
gttaggacctttgctctaccgtcgcgctggaaaggaccagcgcggagtgaggcgattg

SEQ ID NO: 224737 - DNA, 55 bp, Artificial
  Synthetic oligonucleotide
gattcgcgtgacgcctcatgaactgcacagccaccaaacagtacgcgcacggccg

SEQ ID NO: 224738 - DNA, 55 bp, Artificial
  Synthetic oligonucleotide
gaacgggatcatcgctaagacagacctgcgcaacaacttgcgtcgaggcgcggtg

SEQ ID NO: 224739 - DNA, 55 bp, Artificial
  Synthetic oligonucleotide
gaagaaatatcgactaccgggctgtcgttaaaatgccactcactcgctcgtggta

SEQ ID NO: 224740 - DNA, 55 bp, Artificial
  Synthetic oligonucleotide
gaaggatcgaccagggcgtgtagacgtggttgatattccagccaagtccggcctg

SEQ ID NO: 224741 - DNA, 55 bp, Artificial
  Synthetic oligonucleotide
gaagggaagcacaagtcggccaatgctagcgcaatttaccccttctgcgctcgct

SEQ ID NO: 224742 - DNA, 55 bp, Artificial
  Synthetic oligonucleotide
gaatctcgcctgtgctgtggcaccactcagcacctatcgattcgcacgatcaggc

SEQ ID NO: 224743 - DNA, 55 bp, Artificial
  Synthetic oligonucleotide
gaatgccacggctcaacccatgaatggaaaaggccctgcattctagcagagcccc

SEQ ID NO: 224744 - DNA, 55 bp, Artificial
  Synthetic oligonucleotide
ggccagaggcttttatgcatcgcatacctcacatggcagtcagccttccggtctg

SEQ ID NO: 224745 - DNA, 55 bp, Artificial
  Synthetic oligonucleotide
gaattgaactcgctcggacgttgccccgtccctatcagcaggacgcctgatttaa

SEQ ID NO: 224746 - DNA, 55 bp, Artificial
  Synthetic oligonucleotide
gacaaaagcgcggcaagaacaactgcttgcgtcgcaaacttcgatcccgcatgaa

SEQ ID NO: 224747 - DNA, 60 bp, Artificial
  Synthetic oligonucleotide
acgggggctttttgagggtgcatccacaaaggacgctgtgtgcatcatagcaaactcaaa

SEQ ID NO: 224748 - DNA, 55 bp, Artificial
  Synthetic oligonucleotide
gacacattcgaatcaggatttgacgccagaggatgagggtttgccgatcttcgtc

SEQ ID NO: 224749 - DNA, 55 bp, Artificial
  Synthetic oligonucleotide
gacacggatacgacttcgagctaccacccggctgttcttggaggcgagcgtgacc

SEQ ID NO: 224750 - DNA, 55 bp, Artificial
  Synthetic oligonucleotide
ggcatgcactggtgccgtgtttagagaagcgctacaggcttaatacagaagagcg

SEQ ID NO: 224751 - DNA, 55 bp, Artificial
  Synthetic oligonucleotide
gacataagctccttggacaggcactatcggccttaataggccctagtttgcgcgg

SEQ ID NO: 224752 - DNA, 55 bp, Artificial
  Synthetic oligonucleotide
ggcagagctggatacccgtacaccgttcccaaacatgattcgaatcctggctgag

SEQ ID NO: 224753 - DNA, 55 bp, Artificial
  Synthetic oligonucleotide
gaccgccagatggcgtctatacgggctttatccgctcactatggcgttgatctac

SEQ ID NO: 224754 - DNA, 55 bp, Artificial
  Synthetic oligonucleotide
gaccgttagcgacgctcatcatcgttcctcttgttctctgcttgctgcgacgggg

SEQ ID NO: 224755 - DNA, 55 bp, Artificial
  Synthetic oligonucleotide
gacctacacgtttcatcgcaactacacctttgctaaaagtgggccgccaccggga

SEQ ID NO: 224756 - DNA, 55 bp, Artificial
  Synthetic oligonucleotide
gacctttattccgcatatcattccgccaggtaatgattcgagccgcagagaccgc

SEQ ID NO: 224757 - DNA, 55 bp, Artificial
  Synthetic oligonucleotide
gacgagagaacgatatgctcgattccaaactgttacgtactcaacttcaggacgt

SEQ ID NO: 224758 - DNA, 55 bp, Artificial
  Synthetic oligonucleotide
gggcttatcttaattcccatcaagcaaaggcgaaaggaaatcctagaacggttga

SEQ ID NO: 224759 - DNA, 55 bp, Artificial
  Synthetic oligonucleotide
gacgcatggttaacctccttcagagtgatccggcgggtggccggagaattcttga

SEQ ID NO: 224760 - DNA, 55 bp, Artificial
  Synthetic oligonucleotide
gacggtcaactaaaagggatacgaaatgacctataccgtgaaacagtatggatgg

SEQ ID NO: 224761 - DNA, 55 bp, Artificial
  Synthetic oligonucleotide
gacgtatggacacgtcaccccgctttcatgtgctgaattcaattcgctgcgcgct

SEQ ID NO: 224762 - DNA, 55 bp, Artificial
  Synthetic oligonucleotide
gacgtgcgtggctggagatagccttcgtctgatccttatcaccccacggacttga

SEQ ID NO: 224763 - DNA, 54 bp, Artificial
  Synthetic oligonucleotide
gacgttgacgttagacattctggcggtcccctttcgggtcatagaacacggggc

SEQ ID NO: 224764 - DNA, 55 bp, Artificial
  Synthetic oligonucleotide
gactcaatgcatcgtcctatcaccgcaggccataccacctcacgtctcatcctag

SEQ ID NO: 224765 - DNA, 55 bp, Artificial
  Synthetic oligonucleotide
gactcgttggtgaagctacaccgtctagatttcccaggtttgtgtaccagttgac

SEQ ID NO: 224766 - DNA, 55 bp, Artificial
  Synthetic oligonucleotide
agcggttattcattgggtaacctggcgtccaatacggtttggatgaactctccgc

SEQ ID NO: 224767 - DNA, 55 bp, Artificial
  Synthetic oligonucleotide
agctgacatggtcaatccttcaagtatgtgttggggcgaacaccagtcgtgcgca

SEQ ID NO: 224768 - DNA, 55 bp, Artificial
  Synthetic oligonucleotide
agctgacttccagctcggtctaccttaaggacaactggcacctgaatgatcgttg

SEQ ID NO: 224769 - DNA, 57 bp, Artificial
  Synthetic oligonucleotide
caaccgcaaagcctggatgaagccgtattggcggtgaaaaagctggtcgcagaaggg

SEQ ID NO: 224770 - DNA, 55 bp, Artificial
  Synthetic oligonucleotide
taggaacctgaacgggtacacccatggcggggcaatcatccggggcgatcgcatc

SEQ ID NO: 224771 - DNA, 55 bp, Artificial
  Synthetic oligonucleotide
tagcgggtttgcgcagcggtagccgagcactgagcccgctagtgcggtcgtaact

SEQ ID NO: 224772 - DNA, 55 bp, Artificial
  Synthetic oligonucleotide
aggagtgcccaggccaatgggaggcaacacctggccacgcagagacgccacagtg

SEQ ID NO: 224773 - DNA, 55 bp, Artificial
  Synthetic oligonucleotide
aggcaacctcgccccaattggtcgtacacttgccgccagccctggatagagccgg

SEQ ID NO: 224774 - DNA, 55 bp, Artificial
  Synthetic oligonucleotide
tagccaggcgtgagcctggtaccgggcttgcactacgggcgcgtccaagatgact

SEQ ID NO: 224775 - DNA, 55 bp, Artificial
  Synthetic oligonucleotide
tagatagctgaggattacgctatgtctcgcgtcatacgctttcatcgcaccggtg

SEQ ID NO: 224776 - DNA, 55 bp, Artificial
  Synthetic oligonucleotide
tactgtcacaagttggcttccacggcgactcagttaccgtcattgcagttatcgg

SEQ ID NO: 224777 - DNA, 55 bp, Artificial
  Synthetic oligonucleotide
aggcgcgcacgcggggcctcatcgaccaattcaagcgtgacgtgcgcagcatcga

SEQ ID NO: 224778 - DNA, 55 bp, Artificial
  Synthetic oligonucleotide
aggcgttgccgctacctggatttgttacccgggagacgcaccgatcgagtaaggc

SEQ ID NO: 224779 - DNA, 55 bp, Artificial
  Synthetic oligonucleotide
aggctgtctatgagctttggaagtgtggccacgatattaggtctatgtactctcg

SEQ ID NO: 224780 - DNA, 58 bp, Artificial
  Synthetic oligonucleotide
ggaacttgactacgcaagggatgcccatagaatcagggcatagaggacgttaggggga

SEQ ID NO: 224781 - DNA, 55 bp, Artificial
  Synthetic oligonucleotide
tacgcaccccggattgcatcggactacgggctgtaggagcggattcatccgcgat

SEQ ID NO: 224782 - DNA, 55 bp, Artificial
  Synthetic oligonucleotide
tacctgtaattgtccacctattccgagtttggaatggtagctgactcgctatgcg

SEQ ID NO: 224783 - DNA, 54 bp, Artificial
  Synthetic oligonucleotide
agggttgtccactaacgcgggactggcggctctttacgaccgggagcttgggca

SEQ ID NO: 224784 - DNA, 55 bp, Artificial
  Synthetic oligonucleotide
tacctgattcaatgcagctccacgaggcaagggactagaccatgcatttcaccat

SEQ ID NO: 224785 - DNA, 55 bp, Artificial
  Synthetic oligonucleotide
tacctgatacaccactaggtagttgggatgcaaaacgcattcacgcgttccggtt

SEQ ID NO: 224786 - DNA, 55 bp, Artificial
  Synthetic oligonucleotide
tacccctttcccctgctcgctcaggacacacgtatcgtgtgtggcgtgcccagtc

SEQ ID NO: 224787 - DNA, 55 bp, Artificial
  Synthetic oligonucleotide
agtgcctatgagagcaggtctgtttcgtcctgaagagttcaaggataactgcggc

SEQ ID NO: 224788 - DNA, 55 bp, Artificial
  Synthetic oligonucleotide
agtgccttgtttgaaaagctgtccgagcgtctgcaccccaaagtcaagaaagggg

SEQ ID NO: 224789 - DNA, 55 bp, Artificial
  Synthetic oligonucleotide
agtggccgcaacctcgggacgaacgggatacagtggagccgcactcatctgtgtt

SEQ ID NO: 224790 - DNA, 55 bp, Artificial
  Synthetic oligonucleotide
tacacccgcttgcagtcagatatccgagtgctacactgcgcgagtttcgtgaatc

SEQ ID NO: 224791 - DNA, 59 bp, Artificial
  Synthetic oligonucleotide
caacgaaaaatcggggggccgacagaccgatttggacagctgggctgatcagcaacgca

SEQ ID NO: 224792 - DNA, 55 bp, Artificial
  Synthetic oligonucleotide
ataaacacggtaaccagggccaacgtgtatccgtagctcactcacgccctgccct

SEQ ID NO: 224793 - DNA, 55 bp, Artificial
  Synthetic oligonucleotide
ataagcgtcgcatgccaaggcaggctcgatccctttggtataccggtgtgtgatg

SEQ ID NO: 224794 - DNA, 55 bp, Artificial
  Synthetic oligonucleotide
tcctgagaacgcttcacgtcgcaggaatgagtgtttagcggggtgcatatgctag

SEQ ID NO: 224795 - DNA, 54 bp, Artificial
  Synthetic oligonucleotide
tcctaaacgtttgggtcacgctttaactgcgccaatacactgaacgggttggac

SEQ ID NO: 224796 - DNA, 55 bp, Artificial
  Synthetic oligonucleotide
tccgttgaggagccccgatcccaccagcaacgcgagtggtgtcagccagagtaca

SEQ ID NO: 224797 - DNA, 55 bp, Artificial
  Synthetic oligonucleotide
agacgtagccgccaacgtagctgccatgactatgttcctggcaaagctggttatg

SEQ ID NO: 224798 - DNA, 55 bp, Artificial
  Synthetic oligonucleotide
agactgcttcatctcgcgtctgtgtgggcgcattctacggactctcgtcggctgt

SEQ ID NO: 224799 - DNA, 55 bp, Artificial
  Synthetic oligonucleotide
tcccggcaatggcaaggactgccagcgccgcgatgaggaagcgggtgccccgctt

SEQ ID NO: 224800 - DNA, 55 bp, Artificial
  Synthetic oligonucleotide
agatgactacgaaagtcatctcaatagcatgtatgggacattgcgtgcgcccaac

SEQ ID NO: 224801 - DNA, 55 bp, Artificial
  Synthetic oligonucleotide
agatgcacagcgggcataggtgcccgaaaggccgcatattctaaggaatatcccg

SEQ ID NO: 224802 - DNA, 53 bp, Artificial
  Synthetic oligonucleotide
tcggggactagggttcgtcactccagggaccgccaatttcgtcacttcgggga

SEQ ID NO: 224803 - DNA, 55 bp, Artificial
  Synthetic oligonucleotide
agattcccggtattgatacgtcagcctatgacgtgatccttttcgacaatgcccc

SEQ ID NO: 224804 - DNA, 55 bp, Artificial
  Synthetic oligonucleotide
agatttgcagcctgtaggtgaaccctcggtattccatgcggatcggcaatcgacc

SEQ ID NO: 224805 - DNA, 55 bp, Artificial
  Synthetic oligonucleotide
tccccacagtttacgtagccgtgatgctctcaacttgaatgccgctctaagcaca

SEQ ID NO: 224806 - DNA, 55 bp, Artificial
  Synthetic oligonucleotide
agcacagtcatttcctcgtcgtggaattgtggttcatgtgttcccctagctcatg

SEQ ID NO: 224807 - DNA, 55 bp, Artificial
  Synthetic oligonucleotide
tccaccaggcaagccaagaaaacattcactccttgcctgaccgttctgcggcagg

SEQ ID NO: 224808 - DNA, 55 bp, Artificial
  Synthetic oligonucleotide
tcatgctgcgctgcagtatcaggtggcacgtgttgggccgattgccatctttgtg

SEQ ID NO: 224809 - DNA, 55 bp, Artificial
  Synthetic oligonucleotide
agcatcgcggacgataagtccattagacgagtacaccgtgtcaccgagtttctga

SEQ ID NO: 224810 - DNA, 55 bp, Artificial
  Synthetic oligonucleotide
tcaccgactcattaacgtcagcggcagacggtacaaaccctgtgttacattgccc

SEQ ID NO: 224811 - DNA, 55 bp, Artificial
  Synthetic oligonucleotide
tcaaggctcggaacaacggatgcagcgagaataatttagccgaggacatacaggc

SEQ ID NO: 224812 - DNA, 55 bp, Artificial
  Synthetic oligonucleotide
tatggcgccatatttagggcaacctcaagtcttaacctctcgtgccgaaaacacg

SEQ ID NO: 224813 - DNA, 60 bp, Artificial
  Synthetic oligonucleotide
cggtatacggcacgcaagctattgctgcgaatcgagatctgcggtttacttaaagacaga

SEQ ID NO: 224814 - DNA, 56 bp, Artificial
  Synthetic oligonucleotide
tcgggtgcttcgatagcaagggatgatttatcgggcgttgggaaggtcaaaatacc

SEQ ID NO: 224815 - DNA, 55 bp, Artificial
  Synthetic oligonucleotide
tatgacgcagacgcatgtgcggccctcctccaaccccgagcataaccgcaggtta

SEQ ID NO: 224816 - DNA, 55 bp, Artificial
  Synthetic oligonucleotide
tatgaatgctggggtattgagttttcggctcaaggtcgccactcaatgttgcgcg

SEQ ID NO: 224817 - DNA, 55 bp, Artificial
  Synthetic oligonucleotide
tatcattcccgaccattgttgaaaacagttcgcaactagcgatatagcggccaag

SEQ ID NO: 224818 - DNA, 55 bp, Artificial
  Synthetic oligonucleotide
tatagtgcgcaccacaacgacggacaaccccgaagttgtagtagagatgaacggc

SEQ ID NO: 224819 - DNA, 55 bp, Artificial
  Synthetic oligonucleotide
tatacgggcccgtagatgccctggaggggcattgccaggaatcacctcaggacgg

SEQ ID NO: 224820 - DNA, 55 bp, Artificial
  Synthetic oligonucleotide
tagtgagtagaaggctggtatgacacggccatgcggctagccaaacgctccaggc

SEQ ID NO: 224821 - DNA, 55 bp, Artificial
  Synthetic oligonucleotide
agcggggcctcaataattggcggatgctcaggagcctaaagctaccaagctatcc

SEQ ID NO: 224822 - DNA, 55 bp, Artificial
  Synthetic oligonucleotide
gttgcgaatcggccaacttctggatcgtaacaacgaaatgtattgtagtgcagac

SEQ ID NO: 224823 - DNA, 55 bp, Artificial
  Synthetic oligonucleotide
gttcgatcctctgtaccgcgccggaaatctcaaaagtttcggcgtttgcagtgaa

SEQ ID NO: 224824 - DNA, 55 bp, Artificial
  Synthetic oligonucleotide
gttatttgtgatatttatggccctcagcctgcttttaacgttgattgcccgggtc

SEQ ID NO: 224825 - DNA, 60 bp, Artificial
  Synthetic oligonucleotide
ccagtggcaggaatggtcggcgtgcatgcctcgcgtgagcatggcagtgccttctacagc

SEQ ID NO: 224826 - DNA, 55 bp, Artificial
  Synthetic oligonucleotide
gttatccgggctgccttcgtagatacgcgcttcatagaggttggagccggctcgg

SEQ ID NO: 224827 - DNA, 55 bp, Artificial
  Synthetic oligonucleotide
attcctgtttcagatcaacgtcactcgccggtgccagctacgttgcacacactgc

SEQ ID NO: 224828 - DNA, 55 bp, Artificial
  Synthetic oligonucleotide
attcgcggcaagatatatcgtcgccatcaagtacccatagacgcgaccagtcacg

SEQ ID NO: 224829 - DNA, 55 bp, Artificial
  Synthetic oligonucleotide
attcgtcctggtgacgttattgctgtccagtgggccgagccaggcagtaccgggg

SEQ ID NO: 224830 - DNA, 54 bp, Artificial
  Synthetic oligonucleotide
caaacaaacgttcgaattatcgttgacactccggaacgatgtccctaccctcgc

SEQ ID NO: 224831 - DNA, 55 bp, Artificial
  Synthetic oligonucleotide
caaatagaacgccctcggctgttctgcgttttacatctgcgcgcttcatccgctc

SEQ ID NO: 224832 - DNA, 55 bp, Artificial
  Synthetic oligonucleotide
caacggcaaaatttagggcaagacaggtgaagttagctaacgccacttcacgtct

SEQ ID NO: 224833 - DNA, 54 bp, Artificial
  Synthetic oligonucleotide
caacggttgacaaccggccctgaccaacgcaattcacaaggacgggaggccgtc

SEQ ID NO: 224834 - DNA, 55 bp, Artificial
  Synthetic oligonucleotide
caacgtccaggccgcaatggacgtaaatgacaaagagctacttcacatccgctcc

SEQ ID NO: 224835 - DNA, 55 bp, Artificial
  Synthetic oligonucleotide
caactattcggtagtgatttccgactgcgcgctacaacgggaattgtttcagcgg

SEQ ID NO: 224836 - DNA, 56 bp, Artificial
  Synthetic oligonucleotide
gcattaatggcccagtccggacacggggttgagctaggcttttcaggatcgtttac

SEQ ID NO: 224837 - DNA, 55 bp, Artificial
  Synthetic oligonucleotide
caactggggtagaaacgacagtgactggccatcaggggactaatggcatagcgat

SEQ ID NO: 224838 - DNA, 55 bp, Artificial
  Synthetic oligonucleotide
caacttggcttcacatcatcgtccaattcgatatcagacaacttggtacggccga

SEQ ID NO: 224839 - DNA, 55 bp, Artificial
  Synthetic oligonucleotide
caagatcgcgactggctagcccaggcctgaggacttctcatggatcgttacgtcg

SEQ ID NO: 224840 - DNA, 55 bp, Artificial
  Synthetic oligonucleotide
caagcttgattgcctggactacctgatctctaagaccggatgcagtcttaatccc

SEQ ID NO: 224841 - DNA, 55 bp, Artificial
  Synthetic oligonucleotide
caaggaaccgtgaaaattgctattagactggcaatggttacagatagcgacgtgg

SEQ ID NO: 224842 - DNA, 55 bp, Artificial
  Synthetic oligonucleotide
caaggggcgactacccattcttaccggcccgactgccaactgattccggagcaaa

SEQ ID NO: 224843 - DNA, 55 bp, Artificial
  Synthetic oligonucleotide
caatgccaacactcaagccgcgcgtagcggtcactctcgaaccacagacgcacgc

SEQ ID NO: 224844 - DNA, 55 bp, Artificial
  Synthetic oligonucleotide
caatggccgtcacaaagcaatacgccctagtaggggcagcaatggtctgctgggc

SEQ ID NO: 224845 - DNA, 55 bp, Artificial
  Synthetic oligonucleotide
gtgtgattcaattccgtacggctgttagggcagatgtgtgatccggcaagcactt

SEQ ID NO: 224846 - DNA, 55 bp, Artificial
  Synthetic oligonucleotide
cacacagttacatgtgggtgaagacgtcgccaataagagtaacctagcgactgaa

SEQ ID NO: 224847 - DNA, 60 bp, Artificial
  Synthetic oligonucleotide
tctactgatcaacgacgccttttactgactctcggtacgtcgatagcacctcaggtgtct

SEQ ID NO: 224848 - DNA, 55 bp, Artificial
  Synthetic oligonucleotide
cacagatgagtgcggctccactgtatcccgttcgtcccgaggttgcggccactac

SEQ ID NO: 224849 - DNA, 55 bp, Artificial
  Synthetic oligonucleotide
ataatctcaactacgacgctccgcgttggtacgccgttctgaacgctacaacccc

SEQ ID NO: 224850 - DNA, 55 bp, Artificial
  Synthetic oligonucleotide
atagagcaccgaacatggtcaaacgagtcagaacgccatcaatgtagcgcgccga

SEQ ID NO: 224851 - DNA, 55 bp, Artificial
  Synthetic oligonucleotide
atagtcgtagcgccatatctcttttccgctcaattcgctctttgagctggggtaa

SEQ ID NO: 224852 - DNA, 55 bp, Artificial
  Synthetic oligonucleotide
atagtcttactagtcgtacggactctactgaaaagctgcgaatcagtgcgctgtc

SEQ ID NO: 224853 - DNA, 55 bp, Artificial
  Synthetic oligonucleotide
atcagccgccgacttggctccacgcgcctcgatcagctcttgcactcgcgcgaaa

SEQ ID NO: 224854 - DNA, 55 bp, Artificial
  Synthetic oligonucleotide
taaggctcttacgctcctggaatagcgtataactgctaagttcctgaacgtcggg

SEQ ID NO: 224855 - DNA, 55 bp, Artificial
  Synthetic oligonucleotide
atccaaacatcgcggcccctgccgtttcgatccaagtcagctacccaggtgcttc

SEQ ID NO: 224856 - DNA, 55 bp, Artificial
  Synthetic oligonucleotide
atccactgccttgatcacagggcgggttccccgacgctggacaggctttgtgcct

SEQ ID NO: 224857 - DNA, 55 bp, Artificial
  Synthetic oligonucleotide
taagccacttcattaggtgtaacgacctgcaatcgaaatggcctcgacctgcaat

SEQ ID NO: 224858 - DNA, 58 bp, Artificial
  Synthetic oligonucleotide
acgctatgcctaccgcaaacgctaacacaggaaatggattttcaaaggctatatccta

SEQ ID NO: 224859 - DNA, 55 bp, Artificial
  Synthetic oligonucleotide
atccgtagaaccggaacagtcctgcacgttacgccaaagctctgtccgtgcagcc

SEQ ID NO: 224860 - DNA, 55 bp, Artificial
  Synthetic oligonucleotide
atccgtatagggcaggagacgctcccggtcgtccaggctaccggtacagggtctg

SEQ ID NO: 224861 - DNA, 55 bp, Artificial
  Synthetic oligonucleotide
taactgcgaataagggtctaagttgtgagagtcgaaaagtcgtttgacgaatttg

SEQ ID NO: 224862 - DNA, 55 bp, Artificial
  Synthetic oligonucleotide
atcgatccgggcatctgaaccggcgttctccaaggcgcggttagccatccgttcc

SEQ ID NO: 224863 - DNA, 55 bp, Artificial
  Synthetic oligonucleotide
atcgatgcaaaacccctgagcactccgattcaggttagcagccagtctgcccatg

SEQ ID NO: 224864 - DNA, 55 bp, Artificial
  Synthetic oligonucleotide
atcgatgggtctttggttcaggcttcgcaaacgacttggtaaggtgttcgccagc

SEQ ID NO: 224865 - DNA, 55 bp, Artificial
  Synthetic oligonucleotide
atcggagagcacggggctatactcgccacctttcagaccgcttctctacaaggac

SEQ ID NO: 224866 - DNA, 55 bp, Artificial
  Synthetic oligonucleotide
taactcttaagtggataaccttctgtggataacctgcgctagcccatgaattacg

SEQ ID NO: 224867 - DNA, 55 bp, Artificial
  Synthetic oligonucleotide
atgaggaactgcgtagtgacagcgtgtggatacagccgttgaaagctcgactgtc

SEQ ID NO: 224868 - DNA, 55 bp, Artificial
  Synthetic oligonucleotide
taaccattgccagtctaatagcaattttcacggttccttgttttggcgctttgtg

SEQ ID NO: 224869 - DNA, 55 bp, Artificial
  Synthetic oligonucleotide
gcattgtgtcctgctggaggggggtactaggggtttagctgacctgtaaacgtcc

SEQ ID NO: 224870 - DNA, 55 bp, Artificial
  Synthetic oligonucleotide
atgcggtccggcgacaaaccaacaccgggcaccatgttgctgggaccaaacgctg

SEQ ID NO: 224871 - DNA, 55 bp, Artificial
  Synthetic oligonucleotide
taaaacctttgcctgtgtagtgcttgcgggtttgacaggctgtacgctcgtcccg

SEQ ID NO: 224872 - DNA, 54 bp, Artificial
  Synthetic oligonucleotide
gtttcgttccagcaggcaacgtacgaacgttcgcccaggactttcggacggcag

SEQ ID NO: 224873 - DNA, 55 bp, Artificial
  Synthetic oligonucleotide
gttggctggcggggcacatttctgtgccctccgttgtaagcttcgttcgcacgcc

SEQ ID NO: 224874 - DNA, 55 bp, Artificial
  Synthetic oligonucleotide
atggtcggcgtgcatgcctcgcgtgagcatggcagtgccttctacagcggtgtga

SEQ ID NO: 224875 - DNA, 55 bp, Artificial
  Synthetic oligonucleotide
gttgctgcagaaattcaccaggaatttgacgataggtacgcgtgccagggatcgc

SEQ ID NO: 224876 - DNA, 55 bp, Artificial
  Synthetic oligonucleotide
atgtagagtgccgtgtgcaatccgttttagcgccaagtatccagacacttggacc

SEQ ID NO: 224877 - DNA, 55 bp, Artificial
  Synthetic oligonucleotide
ttctaggagaagcggataatgccgtcattacgcattacgacggctaacgccggga

SEQ ID NO: 224878 - DNA, 52 bp, Artificial
  Synthetic oligonucleotide
aacgtttgggtcacgctttaactgcgccaaaacactgaacgggttggaccgc

SEQ ID NO: 224879 - DNA, 55 bp, Artificial
  Synthetic oligonucleotide
ttcgttacgacttggctgtggagcctgacgggctgactacgttcaacgctaatca

SEQ ID NO: 224880 - DNA, 60 bp, Artificial
  Synthetic oligonucleotide
acgcgtcccgcaagggtgtactcgaatgagacagaaacggcgtgcgctcactcgcagtca

SEQ ID NO: 224881 - DNA, 55 bp, Artificial
  Synthetic oligonucleotide
ttcgccgtagggaatgtgcccgcagtccgctagatacagcagcgactcactgggc

SEQ ID NO: 224882 - DNA, 55 bp, Artificial
  Synthetic oligonucleotide
aacttttatcagtatgcacccagccccgttatgtgggtcgatccgtggggactag

SEQ ID NO: 224883 - DNA, 55 bp, Artificial
  Synthetic oligonucleotide
aagcagaacctcggcggtccccagggtgtagctgtcggactgataacgaggcagc

SEQ ID NO: 224884 - DNA, 55 bp, Artificial
  Synthetic oligonucleotide
aagcggaggttcgtgtcatttatattggtgctgagcgcttcactaccctttctga

SEQ ID NO: 224885 - DNA, 55 bp, Artificial
  Synthetic oligonucleotide
ttcaggggtgacggggtattcattgacggccatccgaaaactgagaaggaatgcc

SEQ ID NO: 224886 - DNA, 55 bp, Artificial
  Synthetic oligonucleotide
aagcgtgcgtacgggcatgtacagggttcctcgtggtctctgcggaccttgggtc

SEQ ID NO: 224887 - DNA, 55 bp, Artificial
  Synthetic oligonucleotide
aagtacacctcaacccggcgttaggcggctcactggcaccacgtcagactagggc

SEQ ID NO: 224888 - DNA, 55 bp, Artificial
  Synthetic oligonucleotide
ttagcgggaggcgaattctacagcgttacacgctgctgtcaacacctcttttctc

SEQ ID NO: 224889 - DNA, 55 bp, Artificial
  Synthetic oligonucleotide
ttacgtcggacttccttacgaagctatcgaatagcctgctatcgtatcgagcatt

SEQ ID NO: 224890 - DNA, 55 bp, Artificial
  Synthetic oligonucleotide
aatcagcgcctccctagatttattgcctggcgacatcaatacctgggcaaacgat

SEQ ID NO: 224891 - DNA, 59 bp, Artificial
  Synthetic oligonucleotide
acgcgctaaaactcttactaactaccggcatacgaaatgtcatgttagcattaggcaca

SEQ ID NO: 224892 - DNA, 53 bp, Artificial
  Synthetic oligonucleotide
ttaataggttttgttgacgacccgaccttgaatacaggcccgtcatacccacc

SEQ ID NO: 224893 - DNA, 55 bp, Artificial
  Synthetic oligonucleotide
aatcgcgccactcacaacgtcctgatggcgtacttacccaaagaacagctaggag

SEQ ID NO: 224894 - DNA, 55 bp, Artificial
  Synthetic oligonucleotide
tgttgcctgtttccgactcgccccacaaggaccaactgcaccttgtagtggtcaa

SEQ ID NO: 224895 - DNA, 55 bp, Artificial
  Synthetic oligonucleotide
tgttgcagaggagcgcggttttcatgtgatacaacgttgtgtgcttccacgcatc

SEQ ID NO: 224896 - DNA, 55 bp, Artificial
  Synthetic oligonucleotide
tgttcgagtagcagcatgcggggaatcctacgcaaggtgcctggcgggtaaggcc

SEQ ID NO: 224897 - DNA, 55 bp, Artificial
  Synthetic oligonucleotide
tgtgtttcctcccactcgtttccgcgtctagccgacccctcaacatagcggcctc

SEQ ID NO: 224898 - DNA, 55 bp, Artificial
  Synthetic oligonucleotide
aatgtccggtcacgatctaccgaaacagccggtcacggtgggccgaaatacgcac

SEQ ID NO: 224899 - DNA, 55 bp, Artificial
  Synthetic oligonucleotide
aatgttccccggcctggtcgcaagggacggcatagtggtgcgagactcgatggca

SEQ ID NO: 224900 - DNA, 55 bp, Artificial
  Synthetic oligonucleotide
tgtggggcgcgttggaaaagggtcagcggttagccgggcgcgcattttagcctgt

SEQ ID NO: 224901 - DNA, 55 bp, Artificial
  Synthetic oligonucleotide
aattcgtacagcccacaacattgtctcgacctgttgcgaatcatgctgacagtcc

SEQ ID NO: 224902 - DNA, 58 bp, Artificial
  Synthetic oligonucleotide
cctcccaagcgaagcgatatacgtggctccggcacgactaatcgtaagtttgggctca

SEQ ID NO: 224903 - DNA, 55 bp, Artificial
  Synthetic oligonucleotide
tgtaggttgccggaatcgaacgcggcgacagtcgcgtgccccagcgcttcggcca

SEQ ID NO: 224904 - DNA, 55 bp, Artificial
  Synthetic oligonucleotide
acaacccatgaggttattcaccccgtgatgcactgcagaggtttgcgatgtcccg

SEQ ID NO: 224905 - DNA, 55 bp, Artificial
  Synthetic oligonucleotide
ttttcggtcaacaagtcttcggcttcatcgctctggactctgcgagctggcttga

SEQ ID NO: 224906 - DNA, 55 bp, Artificial
  Synthetic oligonucleotide
aaaatcggaagagcagatatacgaattacgaaaaagtattcgctatgacatccgc

SEQ ID NO: 224907 - DNA, 55 bp, Artificial
  Synthetic oligonucleotide
tttgtcaggagactggcgaggccataggcctaaaacgcctgctactggtccccga

SEQ ID NO: 224908 - DNA, 55 bp, Artificial
  Synthetic oligonucleotide
tttgggtaagcctattgacttcttgcaagaaaagccgatcggagtattgtctgta

SEQ ID NO: 224909 - DNA, 55 bp, Artificial
  Synthetic oligonucleotide
tttgctaaagcgcggccagctattacacgaatgacccggaacctttaggctagcg

SEQ ID NO: 224910 - DNA, 55 bp, Artificial
  Synthetic oligonucleotide
tttgaatgtcttctcgcagacgctcgaacattactgatcctttcgcttgtagggt

SEQ ID NO: 224911 - DNA, 55 bp, Artificial
  Synthetic oligonucleotide
tttcggcacagttcccaggcgactcgcttagtcggacgttgcggggtagtcgagg

SEQ ID NO: 224912 - DNA, 55 bp, Artificial
  Synthetic oligonucleotide
ttgtaggaaatatcatcggtagtcagtttgaggccacgaatgacgaagatctttg

SEQ ID NO: 224913 - DNA, 58 bp, Artificial
  Synthetic oligonucleotide
gccaacgctcccccggttttccacgaaacaggggatagtatgaccatcatgcacgtga

SEQ ID NO: 224914 - DNA, 53 bp, Artificial
  Synthetic oligonucleotide
aaatggagcagtaccaggttacaacttccgaacctatttcgtcgctaccccgc

SEQ ID NO: 224915 - DNA, 55 bp, Artificial
  Synthetic oligonucleotide
aacacctccaagactcctttggctgtagtcgctcgcggactgccagttgcatctg

SEQ ID NO: 224916 - DNA, 55 bp, Artificial
  Synthetic oligonucleotide
aacaggtccctcaacaccacccctctatccctgataaactgcggctctctgcctc

SEQ ID NO: 224917 - DNA, 55 bp, Artificial
  Synthetic oligonucleotide
aaccaggcaactactatattgtccctccacgttggatacagcattctatccagac

SEQ ID NO: 224918 - DNA, 55 bp, Artificial
  Synthetic oligonucleotide
aaccctgcactcaccggagcacgcccatccatgaaacaccgtcccacgcaatccc

SEQ ID NO: 224919 - DNA, 55 bp, Artificial
  Synthetic oligonucleotide
aacccttccacggctacaacggctcgcacggatgatgcccgcagggcatgttagg

SEQ ID NO: 224920 - DNA, 55 bp, Artificial
  Synthetic oligonucleotide
ttgcgtatgaaacgaacccgggcgacgcttcgatccgagaatgcgcggtagccgt

SEQ ID NO: 224921 - DNA, 55 bp, Artificial
  Synthetic oligonucleotide
aaccgggcggagcgttatgacctccttgcatctgcacgggccctgttcctccatg

SEQ ID NO: 224922 - DNA, 55 bp, Artificial
  Synthetic oligonucleotide
ttgcgactggaacgaagttgtcctgagggacggggaagcgtttacgtatcagcca

SEQ ID NO: 224923 - DNA, 55 bp, Artificial
  Synthetic oligonucleotide
aaccgtgagacggccactggcctgaaattcgactacctgtcgggcttcactcagg

SEQ ID NO: 224924 - DNA, 59 bp, Artificial
  Synthetic oligonucleotide
actgtgatgcgtatccgtgacgaactgattaaggcttatccagttgagccggttgggaa

SEQ ID NO: 224925 - DNA, 55 bp, Artificial
  Synthetic oligonucleotide
gccaaggagcctggcctgcgctcgggttgaacttgggtctacttttttcgtcact

SEQ ID NO: 224926 - DNA, 55 bp, Artificial
  Synthetic oligonucleotide
aacctaaagagctctcaaacttatgactgacacctttgtaagaccacgacgcacc

SEQ ID NO: 224927 - DNA, 55 bp, Artificial
  Synthetic oligonucleotide
ttgccggcgtaaccgtggcgcaagatgcaaaccggacgacagcattgctggctgc

SEQ ID NO: 224928 - DNA, 55 bp, Artificial
  Synthetic oligonucleotide
aacctcattcatcggctgtcgtgtctatcagctcgccaaagctggtaggcccgga

SEQ ID NO: 224929 - DNA, 55 bp, Artificial
  Synthetic oligonucleotide
ttgattttggccggtccgtgatcaacctacatgtggataagtgggcggctcgccg

SEQ ID NO: 224930 - DNA, 55 bp, Artificial
  Synthetic oligonucleotide
ttgatcgaggggctatctcgtcactggcccgataggacacgcgaggccttggggt

SEQ ID NO: 224931 - DNA, 55 bp, Artificial
  Synthetic oligonucleotide
ttctggtcgcctcaggcataatcgcgctttcgtcgcggtgctcccaatgggtggg

SEQ ID NO: 224932 - DNA, 55 bp, Artificial
  Synthetic oligonucleotide
ttctgggacgatgctttctctcagtcatgaacaaatattaagccagaactatgct

SEQ ID NO: 224933 - DNA, 55 bp, Artificial
  Synthetic oligonucleotide
acctatgccgacaccaaccggaagcgctgtccactgcagcacgcgggcttgtatc

SEQ ID NO: 224934 - DNA, 55 bp, Artificial
  Synthetic oligonucleotide
tgagctaacagcgccgttggatgtatcggtcatggacgcgcctccctggcaggtg

SEQ ID NO: 224935 - DNA, 55 bp, Artificial
  Synthetic oligonucleotide
acctggtacctgtgacgaggaagtgtggcgcatgatgcaagcgagcaagcgtagg

SEQ ID NO: 224936 - DNA, 60 bp, Artificial
  Synthetic oligonucleotide
cccggagaaggctgcaaccacacaagtcaaaccgactgcatgccagtaggtaattgccat

SEQ ID NO: 224937 - DNA, 55 bp, Artificial
  Synthetic oligonucleotide
tgaacatggttgcttccctctgtgatgcttggctgcccgatcaggcggacaatgc

SEQ ID NO: 224938 - DNA, 55 bp, Artificial
  Synthetic oligonucleotide
tcttggacaattgcgcccagaatcggtagggagagcgttactcacatcaggcagg

SEQ ID NO: 224939 - DNA, 55 bp, Artificial
  Synthetic oligonucleotide
tcttgcttgaaccgtcggcaaagcaaacatccatcgaacagccttgcgtgtgggg

SEQ ID NO: 224940 - DNA, 55 bp, Artificial
  Synthetic oligonucleotide
acgaccagcgggactgatgacgagacaggcagcaggcgaaagacgagtacccgca

SEQ ID NO: 224941 - DNA, 54 bp, Artificial
  Synthetic oligonucleotide
acgatcctgcaatccaagggaaacgaagtagcaacgcagaaagttaggggaacg

SEQ ID NO: 224942 - DNA, 55 bp, Artificial
  Synthetic oligonucleotide
acgcaacccgaacgaccgacgttcagccagcagaactgccagacaaggcccacca

SEQ ID NO: 224943 - DNA, 55 bp, Artificial
  Synthetic oligonucleotide
tctgcatctgccagcaaggctcatcctcgatctacaagcccggaatcatcactgc

SEQ ID NO: 224944 - DNA, 55 bp, Artificial
  Synthetic oligonucleotide
tctccagttctgagagctcttttagccctgggatactggtgacctcgttggtcat

SEQ ID NO: 224945 - DNA, 55 bp, Artificial
  Synthetic oligonucleotide
acgcgatctactgcagggtcgctcggaataatccggccattgatgtacaagctca

SEQ ID NO: 224946 - DNA, 55 bp, Artificial
  Synthetic oligonucleotide
acgcttgaggaccgcacatgatgttgaaaggttacggagctgtcatcctcgaagg

SEQ ID NO: 224947 - DNA, 59 bp, Artificial
  Synthetic oligonucleotide
gggcaacgtgaacccaatatcacaggtctgggtgctctgtttgtagacagcaccgggat

SEQ ID NO: 224948 - DNA, 55 bp, Artificial
  Synthetic oligonucleotide
tcgggctgtacgcaggcggtgcgatgttcctacagcttactcaggggcacttcgc

SEQ ID NO: 224949 - DNA, 55 bp, Artificial
  Synthetic oligonucleotide
tcggcagagtcccgtcagtaagcgatttgagaccgggaatgtattgggaaatggt

SEQ ID NO: 224950 - DNA, 55 bp, Artificial
  Synthetic oligonucleotide
acgggcaatgagcctcgatcgttgatacgtcgctaaaagccagagcacggccctg

SEQ ID NO: 224951 - DNA, 55 bp, Artificial
  Synthetic oligonucleotide
tcgctccgtacgcttagcttttcacaggcgggtgacgagaccttccaggtagcaa

SEQ ID NO: 224952 - DNA, 55 bp, Artificial
  Synthetic oligonucleotide
tcgccataatcactctccgaccaattctggcgcgtatggtagcgcagagagcggg

SEQ ID NO: 224953 - DNA, 55 bp, Artificial
  Synthetic oligonucleotide
actgagtgtacgttccatgatgacatccttccgcttgtggcgggattaggtagtg

SEQ ID NO: 224954 - DNA, 55 bp, Artificial
  Synthetic oligonucleotide
tcgattctgtaacggcgccgtttcttgcctagaatgatcgcttgtcgaccacacg

SEQ ID NO: 224955 - DNA, 55 bp, Artificial
  Synthetic oligonucleotide
tcgaataggcttgaattatatctcgcatgttctcctcaacggtacctgtgtcagc

SEQ ID NO: 224956 - DNA, 55 bp, Artificial
  Synthetic oligonucleotide
actgggtgcgtctggaggtccgtgtacggcctaagcgcgaatggcgctccacggt

SEQ ID NO: 224957 - DNA, 55 bp, Artificial
  Synthetic oligonucleotide
tcctttcgcagtattcgactgaatccggtgatcacctacgagcaaccggcttgca

SEQ ID NO: 224958 - DNA, 60 bp, Artificial
  Synthetic oligonucleotide
gacgtggcatgcagtctccttactcataagtttgtggacacggtaaaatgatcctccaca

SEQ ID NO: 224959 - DNA, 55 bp, Artificial
  Synthetic oligonucleotide
acttgctaaaggggctgtgaacaagcgatgtacgccctcctccgacatttgctgg

SEQ ID NO: 224960 - DNA, 55 bp, Artificial
  Synthetic oligonucleotide
acttgtgcaacgacctcagacccggttatccacagagcttatccaccgaccgccc

SEQ ID NO: 224961 - DNA, 53 bp, Artificial
  Synthetic oligonucleotide
tggtcaaagaaccaaggtcgccgttgcgaaccaccttcgggaagtctccccac

SEQ ID NO: 224962 - DNA, 55 bp, Artificial
  Synthetic oligonucleotide
acacaagctctacacaaaacggcacttcgagtgctacgagccaactgacaggcga

SEQ ID NO: 224963 - DNA, 55 bp, Artificial
  Synthetic oligonucleotide
acacataagctgtaagctacgtggcaaaccgtattaaggagtggactgtgaaagc

SEQ ID NO: 224964 - DNA, 55 bp, Artificial
  Synthetic oligonucleotide
acacgaaccagctcaataggcgtgtcttgaaccgggccaaactcacccgccaggg

SEQ ID NO: 224965 - DNA, 55 bp, Artificial
  Synthetic oligonucleotide
tggctgcgcgagtgatcgctcagcaacaccgcaggggcctcgctcgacgcactat

SEQ ID NO: 224966 - DNA, 55 bp, Artificial
  Synthetic oligonucleotide
acagagacatatctggcgttgatagcggttgctttattgacgtctctcgagtcaa

SEQ ID NO: 224967 - DNA, 55 bp, Artificial
  Synthetic oligonucleotide
acagccgacggatgaatactgggctttattactcgggagccatggcacagactgg

SEQ ID NO: 224968 - DNA, 55 bp, Artificial
  Synthetic oligonucleotide
acagttgacgtaagtccgaccctgcccacgacaatccgtcggttcaggtgtgctc

SEQ ID NO: 224969 - DNA, 60 bp, Artificial
  Synthetic oligonucleotide
agtggaagttgatccgccaggctgggctgcgggcgaaggtcctggacctggctgagagca

SEQ ID NO: 224970 - DNA, 55 bp, Artificial
  Synthetic oligonucleotide
acattacctactacgagccgggcacaacgagtaccgttcagtgatgacgacccat

SEQ ID NO: 224971 - DNA, 55 bp, Artificial
  Synthetic oligonucleotide
tggattgtgcatggactgcagtgccgaggactaccgattggtcatcctttggatg

SEQ ID NO: 224972 - DNA, 55 bp, Artificial
  Synthetic oligonucleotide
accacggatttagctaattaggtagagctcgggtatcatacacgcacgtgatttt

SEQ ID NO: 224973 - DNA, 55 bp, Artificial
  Synthetic oligonucleotide
accaggcgtataccggcattacaaagggcctgagtaccgtgtcttcagtgttgcg

SEQ ID NO: 224974 - DNA, 55 bp, Artificial
  Synthetic oligonucleotide
tgcttgtagacattgacgttagacattctggcggtcccctttcgggtcatagaac

SEQ ID NO: 224975 - DNA, 55 bp, Artificial
  Synthetic oligonucleotide
tgctgtcaggccagtccgggactttggtcacgacggatttgaatgagttgaccgg

SEQ ID NO: 224976 - DNA, 55 bp, Artificial
  Synthetic oligonucleotide
tgctagggatgaacgggtacggctaacacaagtgaatctcatataaacgtcgtca

SEQ ID NO: 224977 - DNA, 55 bp, Artificial
  Synthetic oligonucleotide
acccattcgtaacaggtgaaagatcctggaatctcggtatgcgagtgaagggagc

SEQ ID NO: 224978 - DNA, 55 bp, Artificial
  Synthetic oligonucleotide
tgcgccatattcgaatgactggcatcttgcgagtcgctcgggcaaccagcagtga

SEQ ID NO: 224979 - DNA, 55 bp, Artificial
  Synthetic oligonucleotide
accgatcttgaaatcggtattcaagaaatcgtcgacgaacacccgcgatttgggc

SEQ ID NO: 224980 - DNA, 56 bp, Artificial
  Synthetic oligonucleotide
gtcatacgggcctatcggccagtcaggacgtttcaagcggtaccctcaagtttgtc

SEQ ID NO: 224981 - DNA, 55 bp, Artificial
  Synthetic oligonucleotide
tgccgatgtcggctcgcgccctgataacgctctctggtgtgacagaccaggtgag

SEQ ID NO: 224982 - DNA, 55 bp, Artificial
  Synthetic oligonucleotide
tgcagagccatcacactcaacaaggaggacgaattccccagcacacgcctgcgtc

SEQ ID NO: 224983 - DNA, 55 bp, Artificial
  Synthetic oligonucleotide
accgctagggcggggttcagatatctgccaacacttaacacaacataggagcatc

SEQ ID NO: 224984 - DNA, 55 bp, Artificial
  Synthetic oligonucleotide
tgatgcctagtacttctgctagttgagcgacggcaatgctcgtccgattatgagc

SEQ ID NO: 224985 - DNA, 55 bp, Artificial
  Synthetic oligonucleotide
tgatagccaagcgcttatatgaaaacagccgacgagaacgctatggttcccgtcc

SEQ ID NO: 224986 - DNA, 55 bp, Artificial
  Synthetic oligonucleotide
acctagcctattctcggcgtgtattaacattcatcaccgatatatgatcggcgcc

SEQ ID NO: 224987 - DNA, 55 bp, Artificial
  Synthetic oligonucleotide
ccgaaggcttaggtgccatcctgttgcgctcattaatcctaagtccgccgcgaca

SEQ ID NO: 224988 - DNA, 55 bp, Artificial
  Synthetic oligonucleotide
gtaatgcaaggcactcccactggagcatgaggaacgagattctcgtaactaacgt

SEQ ID NO: 224989 - DNA, 55 bp, Artificial
  Synthetic oligonucleotide
gtaagcctgatattcgtagcgggtcttctgtgccaatgtgtcactgcctgaaccg

SEQ ID NO: 224990 - DNA, 55 bp, Artificial
  Synthetic oligonucleotide
ccgacggaatcttcgggaaggacagtggacatcgaccctgctcacgcttgacgga

SEQ ID NO: 224991 - DNA, 59 bp, Artificial
  Synthetic oligonucleotide
atcgttgctacgcccagcttggtcgttacctggatggtctgtgggtcgaggcgtgttgc

SEQ ID NO: 224992 - DNA, 55 bp, Artificial
  Synthetic oligonucleotide
ccgagcttaacagggagtttggagaactcgatgattgattggataactgcggtag

SEQ ID NO: 224993 - DNA, 55 bp, Artificial
  Synthetic oligonucleotide
ccgagttctggcagcgagacgccccaaggcttgcctcgaacaaatcggcattcgc

SEQ ID NO: 224994 - DNA, 55 bp, Artificial
  Synthetic oligonucleotide
ccgatcggaaccatacctactacacgtataaatgcgactgagtacgcagaggctt

SEQ ID NO: 224995 - DNA, 54 bp, Artificial
  Synthetic oligonucleotide
ggttgtaggtggacaaagttatctgcccattcggccaaagttagagggttaggc

SEQ ID NO: 224996 - DNA, 55 bp, Artificial
  Synthetic oligonucleotide
ccgcacaagcgaagggcagcattacctgtaacgacctgcaatcgaaatggcctcg

SEQ ID NO: 224997 - DNA, 55 bp, Artificial
  Synthetic oligonucleotide
ccgcacggccgttccccgactgaatgatatcgaccctcgatcataagacactgcg

SEQ ID NO: 224998 - DNA, 55 bp, Artificial
  Synthetic oligonucleotide
ggttgggttgcagccatcggtggttttatgttggctcaggtcctgatatcggtcg

SEQ ID NO: 224999 - DNA, 55 bp, Artificial
  Synthetic oligonucleotide
ccggattgtgacgatgaaaagccaactcacgtgcactgatcagcgtctggctaag

SEQ ID NO: 225000 - DNA, 55 bp, Artificial
  Synthetic oligonucleotide
ccggcaaatacacgaaccctagactatgagcgggcaacagtgggtcatgccagcc

SEQ ID NO: 225001 - DNA, 55 bp, Artificial
  Synthetic oligonucleotide
ccggcgattctagtgaaatcgaacgggcaggtcaatttccaaccagcgaccacgt

SEQ ID NO: 225002 - DNA, 56 bp, Artificial
  Synthetic oligonucleotide
taactactaacgctatattgagtaaggaaacagagttaatggcttacgtccgagaa

SEQ ID NO: 225003 - DNA, 55 bp, Artificial
  Synthetic oligonucleotide
ccgggcagcgacttctattaccggctaatccccgtgcaaggagtgatcgttcaca

SEQ ID NO: 225004 - DNA, 55 bp, Artificial
  Synthetic oligonucleotide
ccggggcgaatgtcgcgatatccggcaggagagcaaaattcggctaacgttccga

SEQ ID NO: 225005 - DNA, 55 bp, Artificial
  Synthetic oligonucleotide
ccggtagccattggtcgtggccgcctgataagctcgcgactttattcgaatgccc

SEQ ID NO: 225006 - DNA, 55 bp, Artificial
  Synthetic oligonucleotide
ggttgaatctcaactatcgtgcgatgcccttttagctatcgtgcgacgctctgcg

SEQ ID NO: 225007 - DNA, 55 bp, Artificial
  Synthetic oligonucleotide
ccggtcaagagcaggattcatgcgtgtcggtatctcgtctctcttcagacctgac

SEQ ID NO: 225008 - DNA, 53 bp, Artificial
  Synthetic oligonucleotide
ccggtcccgaaaccgaacgacaaggtttccgcgaagacgcttgcggacatcac

SEQ ID NO: 225009 - DNA, 55 bp, Artificial
  Synthetic oligonucleotide
ccgtaaaacgcagagctccattgaatgaacgttacccgccgcttgtgtctggtac

SEQ ID NO: 225010 - DNA, 55 bp, Artificial
  Synthetic oligonucleotide
ccgtaacctgcggcccggtctgagcgttagctgcctccaactcacgcaagctgtt

SEQ ID NO: 225011 - DNA, 55 bp, Artificial
  Synthetic oligonucleotide
ccgtcttattttcagggcggcccctgaggctataacgaatgaagacatttactgc

SEQ ID NO: 225012 - DNA, 54 bp, Artificial
  Synthetic oligonucleotide
ccgtttccagtagactacgctcccgtcttgtactgctcccgccgattccctccg

SEQ ID NO: 225013 - DNA, 59 bp, Artificial
  Synthetic oligonucleotide
gactgaattgtgcgaagcctgtcctcccctagctagacggtttgcctgtttgtgcccta

SEQ ID NO: 225014 - DNA, 51 bp, Artificial
  Synthetic oligonucleotide
ccgtttcgtagaaagtttcaacctccgagcgggatccttcgtacttcttta

SEQ ID NO: 225015 - DNA, 55 bp, Artificial
  Synthetic oligonucleotide
cctaaatgctggctaaggtcgcggggtgatgaattctcaggggatcagggctttt

SEQ ID NO: 225016 - DNA, 54 bp, Artificial
  Synthetic oligonucleotide
cctagccctcggtgccggtttgaggtccctaccaaatgtgacgggccggtcaga

SEQ ID NO: 225017 - DNA, 55 bp, Artificial
  Synthetic oligonucleotide
cccaaaaggcgaaagcctgatcctacgcaaaggtgcccctcctgtccgctttcga

SEQ ID NO: 225018 - DNA, 55 bp, Artificial
  Synthetic oligonucleotide
cccacactgcgcagtttcatggcataactcgttgatttgtcgtaagtcgctgccc

SEQ ID NO: 225019 - DNA, 53 bp, Artificial
  Synthetic oligonucleotide
cccaccgggcgcaatacgcccgttaaaaggaggcgcaattctatagacgcccc

SEQ ID NO: 225020 - DNA, 55 bp, Artificial
  Synthetic oligonucleotide
cccacgcgcgcatgacccctctcctcaacggaggcatttgctatgtcagacgaga

SEQ ID NO: 225021 - DNA, 55 bp, Artificial
  Synthetic oligonucleotide
cccatccgacagctaatcgttgccacgaatgctaacgccggattgcataactttc

SEQ ID NO: 225022 - DNA, 55 bp, Artificial
  Synthetic oligonucleotide
cccatcgatctggagcttccagggtcgcaaagtcccttcggtggtctgaccaacg

SEQ ID NO: 225023 - DNA, 55 bp, Artificial
  Synthetic oligonucleotide
ccccaatctgtgctgcgctagtgggctcctaaagggtcagcgtctgtagagtcga

SEQ ID NO: 225024 - DNA, 60 bp, Artificial
  Synthetic oligonucleotide
gactgacaagcaaccaaaaaagattgaaccgcgtcgcaacaacagctaatgcagcgccta

SEQ ID NO: 225025 - DNA, 52 bp, Artificial
  Synthetic oligonucleotide
ccccaggcattagcccggctacggttatggttctataagtgtttaaaaggtc

SEQ ID NO: 225026 - DNA, 55 bp, Artificial
  Synthetic oligonucleotide
ccccatgattcttgagcaaatcaaagcggtcggcaatgacactcgcatgttgatc

SEQ ID NO: 225027 - DNA, 55 bp, Artificial
  Synthetic oligonucleotide
gtagcgtatagtcggaaatcactacccgactgttgaataggggctgaaccgcccc

SEQ ID NO: 225028 - DNA, 55 bp, Artificial
  Synthetic oligonucleotide
cccgaaaatagcaaaaccccaagtgaggcgcaaccatccaagcctaacctgagtg

SEQ ID NO: 225029 - DNA, 55 bp, Artificial
  Synthetic oligonucleotide
cccgagggtcaagacggtagcgagcgtacgcttacggtacatatctgctgagggc

SEQ ID NO: 225030 - DNA, 55 bp, Artificial
  Synthetic oligonucleotide
cccgatgctatgtgcaaaggccggtgtcccgctagacgacagtcggggtcgtatt

SEQ ID NO: 225031 - DNA, 55 bp, Artificial
  Synthetic oligonucleotide
cccggcaattcgggcgacgctgaatctcatccggcttccggtagtcgtttacgcc

SEQ ID NO: 225032 - DNA, 51 bp, Artificial
  Synthetic oligonucleotide
cccgtaccccaaaagggaacgacacgctaaacgggtctggcctatcaagcc

SEQ ID NO: 225033 - DNA, 55 bp, Artificial
  Synthetic oligonucleotide
gtacagagaatgacaacacggttgagaaacggtgtcctgcctgtgctgcgccatc

SEQ ID NO: 225034 - DNA, 55 bp, Artificial
  Synthetic oligonucleotide
cccgtgaaccagattgaccagccaacaagctactgtcgggcgtggtcgggacact

SEQ ID NO: 225035 - DNA, 51 bp, Artificial
  Synthetic oligonucleotide
acggaccgaccctaagtcattcgacccgaaacgctccgacgttctccctcg

SEQ ID NO: 225036 - DNA, 52 bp, Artificial
  Synthetic oligonucleotide
gtttcaagggacgtttcgtccggcgtggacgtctcaaagcgtccccgcaaac

SEQ ID NO: 225037 - DNA, 55 bp, Artificial
  Synthetic oligonucleotide
cgtgtgctccttgagatatcgcgtgatcaattccggaccttccgctagccgtgaa

SEQ ID NO: 225038 - DNA, 55 bp, Artificial
  Synthetic oligonucleotide
cgcgccagtaccgccaatcgccttccctatgcagatggaccgatgcgcaacgaag

SEQ ID NO: 225039 - DNA, 55 bp, Artificial
  Synthetic oligonucleotide
cggtacgggcgaatctcagatgtccttttcggacagccgagggaaatcgatcacc

SEQ ID NO: 225040 - DNA, 55 bp, Artificial
  Synthetic oligonucleotide
cgtgccgctgaatggtcgttcatggtcgccgctccaaccgcaccctttagcaaca

SEQ ID NO: 225041 - DNA, 55 bp, Artificial
  Synthetic oligonucleotide
cgcgaagctgtctgcggtgcgtgtcggctatcttcttcttagcgatcgcgaatag

SEQ ID NO: 225042 - DNA, 55 bp, Artificial
  Synthetic oligonucleotide
cgtggcggctaccccacgtgtgccctgcacacattactgagcgcaacaaccccta

SEQ ID NO: 225043 - DNA, 55 bp, Artificial
  Synthetic oligonucleotide
cgcgcacttgtatcaaaaccgcaagtttcgaccgatcaaaacatcgcccacgcct

SEQ ID NO: 225044 - DNA, 55 bp, Artificial
  Synthetic oligonucleotide
cggcacatcgattctcgtagcgaggctaacgacgatcacgtccctgcggccatgc

SEQ ID NO: 225045 - DNA, 53 bp, Artificial
  Synthetic oligonucleotide
ccccgtatcgttacttaggtaccaggcaacaacaggtagctcggttcggccga

SEQ ID NO: 225046 - DNA, 54 bp, Artificial
  Synthetic oligonucleotide
ccccggctccgtgacgacccgcaatttgaaggtccgatttccattgaaattgcg

SEQ ID NO: 225047 - DNA, 55 bp, Artificial
  Synthetic oligonucleotide
gtttgtacaggcacgacacgccagttcacccgtttggacgtatcgccgtaccctg

SEQ ID NO: 225048 - DNA, 55 bp, Artificial
  Synthetic oligonucleotide
cccataacaaccccaaaatgagatcccgtctaaccgggcaacagtgccgtgcgcg

SEQ ID NO: 225049 - DNA, 52 bp, Artificial
  Synthetic oligonucleotide
ccacggtccgcacgagaaccgaaaggtccgttcccgaacatggttgacaccg

SEQ ID NO: 225050 - DNA, 55 bp, Artificial
  Synthetic oligonucleotide
ccacgacgattacggtgccaggagatttcgaaaacggccgaccattgccgtgtcc

SEQ ID NO: 225051 - DNA, 55 bp, Artificial
  Synthetic oligonucleotide
catcttgggaccgtccacgagcgaaagcctggcacgaaacaaacgagatgtgggc

SEQ ID NO: 225052 - DNA, 55 bp, Artificial
  Synthetic oligonucleotide
cagttgaccatcggccaactttccgagtcctggaacaacctcacgcagctgctct

SEQ ID NO: 225053 - DNA, 55 bp, Artificial
  Synthetic oligonucleotide
caggtacacgcaaagccggggtcccgtagcagcaggtctactagctcctccgaag

SEQ ID NO: 225054 - DNA, 55 bp, Artificial
  Synthetic oligonucleotide
cagatcacgtgccggtacggattacttgcagtgcttttgatcgaatatgcgcacg

SEQ ID NO: 225055 - DNA, 55 bp, Artificial
  Synthetic oligonucleotide
cagacttcggccgaatccgacaccagatgatcacctgtgcgttgcacgctcagcg

SEQ ID NO: 225056 - DNA, 55 bp, Artificial
  Synthetic oligonucleotide
cacgtcagtcgcgtgacggaccggccccgagtgatgacgtcgcgactcgaatctc

SEQ ID NO: 225057 - DNA, 55 bp, Artificial
  Synthetic oligonucleotide
caccctccccgggcgcacttaacccacacatacgtcaggagagcccgatttgtcg

SEQ ID NO: 225058 - DNA, 60 bp, Artificial
  Synthetic oligonucleotide
taaccccaggtgaactgcatgcgactgatctcctagagccaacgatacgaccgcaacaag

SEQ ID NO: 225059 - DNA, 55 bp, Artificial
  Synthetic oligonucleotide
attgccacggcgtcccggagaggccacagtagctagcagaaagaccgatcgttct

SEQ ID NO: 225060 - DNA, 55 bp, Artificial
  Synthetic oligonucleotide
atgcctgggcttcaagtggccaatgctcaaccgtgagcggaggaccctgcgcatc

SEQ ID NO: 225061 - DNA, 55 bp, Artificial
  Synthetic oligonucleotide
atcgtatggccgtgcctcttccctcattcggacgcagccgaaacaacaaggccgc

SEQ ID NO: 225062 - DNA, 55 bp, Artificial
  Synthetic oligonucleotide
atcgggcacgcacccgagtggcccaccgcccgcttcgcacgggatcgcgtcgttc

SEQ ID NO: 225063 - DNA, 55 bp, Artificial
  Synthetic oligonucleotide
atcgcgctcgcgtcgttggttcactttggcctgtactgcggggtgctccgggata

SEQ ID NO: 225064 - DNA, 55 bp, Artificial
  Synthetic oligonucleotide
atccgttccagacgcacgtatggataagaggacctcgtgacagacaccttggacc

SEQ ID NO: 225065 - DNA, 55 bp, Artificial
  Synthetic oligonucleotide
atcagcgggtcgaccaggtgtttgtgccccagctaccctagtcggcgaagtaggc

SEQ ID NO: 225066 - DNA, 55 bp, Artificial
  Synthetic oligonucleotide
cgcaaggcacacacctatgttgatcacgaacggacactcttgggtgagccttctc

SEQ ID NO: 225067 - DNA, 55 bp, Artificial
  Synthetic oligonucleotide
cgattgttacatctccccgaattcgcccttaatgcggcatatggtgattcgctag

SEQ ID NO: 225068 - DNA, 55 bp, Artificial
  Synthetic oligonucleotide
cgagacccacacgatggggttacgaacgattctgagatgtggtccaggtcactga

SEQ ID NO: 225069 - DNA, 54 bp, Artificial
  Synthetic oligonucleotide
taaccgatctgagttgggccctccgttactccgtcttcaccgaccgtggaccac

SEQ ID NO: 225070 - DNA, 53 bp, Artificial
  Synthetic oligonucleotide
cgacgccagacacgcacccgtggtcaacccgacgtaaccggtccccaccacaa

SEQ ID NO: 225071 - DNA, 54 bp, Artificial
  Synthetic oligonucleotide
cgaccccagcatacttcgttaactgtatttcgttaacggttgactgaggcaggg

SEQ ID NO: 225072 - DNA, 53 bp, Artificial
  Synthetic oligonucleotide
cctttctactaacccggtttgcctcgtagcaccctccgttcgacgcagcacgg

SEQ ID NO: 225073 - DNA, 55 bp, Artificial
  Synthetic oligonucleotide
cctcgaagaccggcgaatacatgccgtcggagattgactcttacggacgggaaag

SEQ ID NO: 225074 - DNA, 55 bp, Artificial
  Synthetic oligonucleotide
cctccctcgcggggttccgatcgattcagcatactgcccactggagctaatgcgt

SEQ ID NO: 225075 - DNA, 55 bp, Artificial
  Synthetic oligonucleotide
ccgtcgcatgcccgatcacctacgttgccacccgcacgcgaaacgttgaagtggt

SEQ ID NO: 225076 - DNA, 55 bp, Artificial
  Synthetic oligonucleotide
ccgggtgatgtcgggtgagctccggaacaagtacggatcagtttcatccgctatg

SEQ ID NO: 225077 - DNA, 55 bp, Artificial
  Synthetic oligonucleotide
ccgggtcggttggaatccacaactcagctgttccgcacgtcacaccctgctgacg

SEQ ID NO: 225078 - DNA, 55 bp, Artificial
  Synthetic oligonucleotide
ccggatgatgtagtgacgccctgatcaatacggactaatgtcagcacttgtcagc

SEQ ID NO: 225079 - DNA, 54 bp, Artificial
  Synthetic oligonucleotide
ccgcgtcccggccatcgggaaatcacaacggccgactgtaaccattaggacacc

SEQ ID NO: 225080 - DNA, 56 bp, Artificial
  Synthetic oligonucleotide
gacggcagtcagacgggcgaaaccccgtaggaccagccagaatgcgaacaggcccc

SEQ ID NO: 225081 - DNA, 55 bp, Artificial
  Synthetic oligonucleotide
ccgacgcaaccccttctctatgcttggacggagtatgggtacgtcgtctgttgaa

SEQ ID NO: 225082 - DNA, 55 bp, Artificial
  Synthetic oligonucleotide
cccttgaacagccaaaacgagagtggtttatgacacacaaggcgcatcaggggcg

SEQ ID NO: 225083 - DNA, 55 bp, Artificial
  Synthetic oligonucleotide
ccctggaatgtagcgatagtgggacatagatcacgacacgatcgggtgcgacagg

SEQ ID NO: 225084 - DNA, 55 bp, Artificial
  Synthetic oligonucleotide
ccctgaccagcggtttcgatgtaatctgcgtgaccctccgggtacggatcagtag

SEQ ID NO: 225085 - DNA, 55 bp, Artificial
  Synthetic oligonucleotide
ccctcgtgaaacgcggccggatcaccctctgatccccggctctgccacgtgtctg

SEQ ID NO: 225086 - DNA, 55 bp, Artificial
  Synthetic oligonucleotide
cccctgtcccgagtggcgtagcgacggttgctccccggtcacgtgatgtgacaca

SEQ ID NO: 225087 - DNA, 55 bp, Artificial
  Synthetic oligonucleotide
cccctcactcatttcttccgcgctaatgaccgggcccacaccaaacggcccgaga

SEQ ID NO: 225088 - DNA, 55 bp, Artificial
  Synthetic oligonucleotide
tcctcgaccactgacgcgaagacctcacgtcaactgcgaagaagggccgacctcc

SEQ ID NO: 225089 - DNA, 55 bp, Artificial
  Synthetic oligonucleotide
tcccggacagattgctcatgtcaggatcagataccgcgatacgtgtcgattcttt

SEQ ID NO: 225090 - DNA, 55 bp, Artificial
  Synthetic oligonucleotide
tcagtttgtcaagttcgctaggcttcacccagcgaaccgccttcgtttcagtgcc

SEQ ID NO: 225091 - DNA, 60 bp, Artificial
  Synthetic oligonucleotide
aagcaatgacatggcgcgggtccgtgtatgttccgattaggcggctgatttcgacctcca

SEQ ID NO: 225092 - DNA, 55 bp, Artificial
  Synthetic oligonucleotide
tcagacggacactagtttccccggtgtacgaatccagaatgtcgaactcaggcca

SEQ ID NO: 225093 - DNA, 55 bp, Artificial
  Synthetic oligonucleotide
tcacaaccctcgtgaccaccctcgctcagctcgccagtcgactcacggcagccaa

SEQ ID NO: 225094 - DNA, 55 bp, Artificial
  Synthetic oligonucleotide
tcaaagcccattcatgaacttaattgccataggtggtcccgtagcggaacctcag

SEQ ID NO: 225095 - DNA, 55 bp, Artificial
  Synthetic oligonucleotide
tagtcggaatctgcgcacttgccgacaagcgtccacgtggaatggtcgtcagttc

SEQ ID NO: 225096 - DNA, 54 bp, Artificial
  Synthetic oligonucleotide
tagtaagtaacggtgagccgttccgatcaggcaccggcgccctcctaccgggga

SEQ ID NO: 225097 - DNA, 55 bp, Artificial
  Synthetic oligonucleotide
tagcggaatgcgacacctcgcgagcccgacgcgtccctaggttctgctgcgcaca

SEQ ID NO: 225098 - DNA, 55 bp, Artificial
  Synthetic oligonucleotide
tactctcctgaatgtatagacgaagtcttctgaggcgtcttcacatctcgtatga

SEQ ID NO: 225099 - DNA, 53 bp, Artificial
  Synthetic oligonucleotide
gttgtggtggggaccggttacgtcgggttgaccacgggtgcgtgtctggcgtc

SEQ ID NO: 225100 - DNA, 55 bp, Artificial
  Synthetic oligonucleotide
gttgcgtagtagacaatcactgtaagtccaagttattgccgtgttacggacctgc

SEQ ID NO: 225101 - DNA, 55 bp, Artificial
  Synthetic oligonucleotide
gtgtggcgcaatgcggatatccctgtagcgcacaacttcttgaattccctgtcgg

SEQ ID NO: 225102 - DNA, 56 bp, Artificial
  Synthetic oligonucleotide
ccccagctggcccccaacccaagagcaggaagacgccctgctttggccaggtccgc

SEQ ID NO: 225103 - DNA, 55 bp, Artificial
  Synthetic oligonucleotide
gtgcctcatcggaccacccctcgaatctccctcgaacacccgttgtgccgttctc

SEQ ID NO: 225104 - DNA, 55 bp, Artificial
  Synthetic oligonucleotide
gtgacgcgggtgaaaagcacgtggtcatgggacaccgtgcacgtccgaatggcca

SEQ ID NO: 225105 - DNA, 54 bp, Artificial
  Synthetic oligonucleotide
gtgaaccctacaaacatcggcgcctacggaccggtaacgagggctcggtcacac

SEQ ID NO: 225106 - DNA, 55 bp, Artificial
  Synthetic oligonucleotide
gtcgatcgcgaggggccatgactacgtaccgctacccacgggtaagatgcttagg

SEQ ID NO: 225107 - DNA, 55 bp, Artificial
  Synthetic oligonucleotide
gtccgacaagaggtcctcggtgccgtgagatgcctggtgctcgtcatagatgccg

SEQ ID NO: 225108 - DNA, 55 bp, Artificial
  Synthetic oligonucleotide
gtccaacactcgtcaaccacgtggcctcatctgcgaactagcccacgactcggac

SEQ ID NO: 225109 - DNA, 55 bp, Artificial
  Synthetic oligonucleotide
gtcaactggtaggacacgagcagcagcggacgttccggggagggctgtagctgct

SEQ ID NO: 225110 - DNA, 55 bp, Artificial
  Synthetic oligonucleotide
gtcaaacctgtatacttgcaacggctactcgcccgctatcgccgacacagcatgg

SEQ ID NO: 225111 - DNA, 55 bp, Artificial
  Synthetic oligonucleotide
tttcccgatccgcgccgcaagcggagtctctcgcatacggtttcccgcaggactt

SEQ ID NO: 225112 - DNA, 55 bp, Artificial
  Synthetic oligonucleotide
ttgtgtacgcagtatcggcttcccgaaacgacccgccaggccgatcgactctccc

SEQ ID NO: 225113 - DNA, 59 bp, Artificial
  Synthetic oligonucleotide
tatccgggtgcgtaagtaacagcgagagtgggaaatgactcatccagcgttgggccgac

SEQ ID NO: 225114 - DNA, 55 bp, Artificial
  Synthetic oligonucleotide
ttgacctgcggattcaccaaagccgatcacgcttgtccccaacttgtccacagct

SEQ ID NO: 225115 - DNA, 53 bp, Artificial
  Synthetic oligonucleotide
ttcgacccgaaacgctccgacgttctccctcggcttcccggagagggcaacta

SEQ ID NO: 225116 - DNA, 54 bp, Artificial
  Synthetic oligonucleotide
ttccgccgagggtctgttcccgaggtcgtcacccacggtcgcaccggatacgtg

SEQ ID NO: 225117 - DNA, 55 bp, Artificial
  Synthetic oligonucleotide
ttcaattgggaaaccggacccctgatttccagcgagctggtcatgcacaagtccg

SEQ ID NO: 225118 - DNA, 55 bp, Artificial
  Synthetic oligonucleotide
ttaccgcggtaggacggagcggtcgtctcctccgtgaccaacgtatagcgcaccc

SEQ ID NO: 225119 - DNA, 55 bp, Artificial
  Synthetic oligonucleotide
tgtggcaaaccgctgctgtcgtacaacattgcaccgcggcacctgctggctaccc

SEQ ID NO: 225120 - DNA, 55 bp, Artificial
  Synthetic oligonucleotide
tgtgactgcgggttgcgggcgagagaggctggctatggactgggttatcaccacg

SEQ ID NO: 225121 - DNA, 55 bp, Artificial
  Synthetic oligonucleotide
tgtgacggcggtctcgacaagtggggtggcactccgtatgctcccacgaatcggg

SEQ ID NO: 225122 - DNA, 55 bp, Artificial
  Synthetic oligonucleotide
tgtcccataaagcatctggcctctaatggccccaaccagtcgactgactggccca

SEQ ID NO: 225123 - DNA, 55 bp, Artificial
  Synthetic oligonucleotide
tggtggtgtggtgagtcagcaggagccgtttcgagtccgtatcaaggtccgccat

SEQ ID NO: 225124 - DNA, 60 bp, Artificial
  Synthetic oligonucleotide
tatgcattgcccaatgatgatcttcggctgctgacgtcgtcgatacgacgacattactca

SEQ ID NO: 225125 - DNA, 55 bp, Artificial
  Synthetic oligonucleotide
tggggaccatgtgtgtgtacacgatcgcgtgcagtacgcgaaaacgcggtcccgc

SEQ ID NO: 225126 - DNA, 55 bp, Artificial
  Synthetic oligonucleotide
tggaatcggtgacgccttcgacagcgtggcgacgttccttcggagcctgcactag

SEQ ID NO: 225127 - DNA, 55 bp, Artificial
  Synthetic oligonucleotide
tgatgcgtgcgagtcgatacttgcggggtgtgagtgcctccggctcaagttctat

SEQ ID NO: 225128 - DNA, 55 bp, Artificial
  Synthetic oligonucleotide
tctgcagccacacgtgctcgaggctcatgagaactcctgctcggttccccggtcc

SEQ ID NO: 225129 - DNA, 55 bp, Artificial
  Synthetic oligonucleotide
tctcagagttgtccgaacagctcaattctgcgatcaataagtctaagcagggttg

SEQ ID NO: 225130 - DNA, 55 bp, Artificial
  Synthetic oligonucleotide
tcgttatccgtgagcggcacgaagattcttcccgagagcgaagtacggcccaggc

SEQ ID NO: 225131 - DNA, 55 bp, Artificial
  Synthetic oligonucleotide
tcggtccaccggacgagccgtgactgatcgtcgtaggagaaccgcaaagaccgtc

SEQ ID NO: 225132 - DNA, 55 bp, Artificial
  Synthetic oligonucleotide
tcggctccctgtttcggactgccccggcctttccggggtcgcgaatcactgatag

SEQ ID NO: 225133 - DNA, 55 bp, Artificial
  Synthetic oligonucleotide
tcgctccccagggaggctggttgatttgattcgaaggcgagtctcgttgacttcc

SEQ ID NO: 225134 - DNA, 55 bp, Artificial
  Synthetic oligonucleotide
tcgcagaggtcaacggcgtaaagggacgttgtgaccgagtcgttcgcactactcc

SEQ ID NO: 225135 - DNA, 56 bp, Artificial
  Synthetic oligonucleotide
agcggacacaccgctccggctcggacccaggaggtaccagatggcaaagaacaacg

SEQ ID NO: 225136 - DNA, 55 bp, Artificial
  Synthetic oligonucleotide
gccgaaggccccttggaaactctacgagattgcgcccgtaggatccgcatccctg

SEQ ID NO: 225137 - DNA, 55 bp, Artificial
  Synthetic oligonucleotide
gccctgtatacatagccacgagaatgatcctccatcagtatacgacgaagtccgc

SEQ ID NO: 225138 - DNA, 55 bp, Artificial
  Synthetic oligonucleotide
gccctagctcagacacaagagctgtgacctcttaggtcgtgcggcggttggagcg

SEQ ID NO: 225139 - DNA, 55 bp, Artificial
  Synthetic oligonucleotide
gccattggccgccttttcgcgaatgagcggtattaagtcgtattgctcaacaagg

SEQ ID NO: 225140 - DNA, 55 bp, Artificial
  Synthetic oligonucleotide
gcacgctgtgaagtcctgatcgccgttaggtcaagaactcaccggacgtgtaacc

SEQ ID NO: 225141 - DNA, 55 bp, Artificial
  Synthetic oligonucleotide
gatgggaatcacgtctcagcttgtggattagcggtgctaacctcctcggcggggc

SEQ ID NO: 225142 - DNA, 55 bp, Artificial
  Synthetic oligonucleotide
gatcttcggctgctgacgtcgtcgatacgacgacattactcaattctgttgtccc

SEQ ID NO: 225143 - DNA, 55 bp, Artificial
  Synthetic oligonucleotide
gactcggctcactcggttcaagctaggatctccaagccgtcaagccaaaggaccg

SEQ ID NO: 225144 - DNA, 55 bp, Artificial
  Synthetic oligonucleotide
gacgtggtgcatcggacaaacaagggtcgtggatcccacagcgagaaggcgcctg

SEQ ID NO: 225145 - DNA, 55 bp, Artificial
  Synthetic oligonucleotide
gacgcccttgccacgcactgggtagccggtttggatctgtccatccggggttaca

SEQ ID NO: 225146 - DNA, 60 bp, Artificial
  Synthetic oligonucleotide
agcccccaagatcatgaagagccggggctagagttcgaggctcaggagaataagatcgtc

SEQ ID NO: 225147 - DNA, 58 bp, Artificial
  Synthetic oligonucleotide
tcaacgcggggcatcggcgctagccttcctggctaatttccgggttcgcattcttcca

SEQ ID NO: 225148 - DNA, 55 bp, Artificial
  Synthetic oligonucleotide
gaatcactgctcaacatcttcggattcggttcagaaccaagcattttccgtaatc

SEQ ID NO: 225149 - DNA, 55 bp, Artificial
  Synthetic oligonucleotide
cttgtcggaatgtccagcggcagtcataaccaaccagccaacccgagtcccgttc

SEQ ID NO: 225150 - DNA, 53 bp, Artificial
  Synthetic oligonucleotide
cttgacgctaacggcccgagcgggctaccgtcggtcccgaccttaatcgtcac

SEQ ID NO: 225151 - DNA, 55 bp, Artificial
  Synthetic oligonucleotide
cttcgcaagccgccgatcctgatccgatgaggggcgtagggcacctaccaccgat

SEQ ID NO: 225152 - DNA, 55 bp, Artificial
  Synthetic oligonucleotide
ctgtgacagatggttcgcagagcgcgataattcagagagcgcgacgaacggtgag

SEQ ID NO: 225153 - DNA, 55 bp, Artificial
  Synthetic oligonucleotide
ctgacacgtggcgccgggcctgcgagcacgtcgggctgtcccacgcggtgcaggt

SEQ ID NO: 225154 - DNA, 55 bp, Artificial
  Synthetic oligonucleotide
ctctactttggccctcggtaacaatgcgtggctagccgaaactggagcgtacggt

SEQ ID NO: 225155 - DNA, 55 bp, Artificial
  Synthetic oligonucleotide
ctcgtcgccggacatgtgaactggcatgggactaacggtccgttcgccgcgttgt

SEQ ID NO: 225156 - DNA, 55 bp, Artificial
  Synthetic oligonucleotide
ctcggaaaccggcaatagtgttcaagctgtgacatccgagggagggcactcgccc

SEQ ID NO: 225157 - DNA, 55 bp, Artificial
  Synthetic oligonucleotide
ctccaagcggggtgaggcgcgatgaggtttcgcagggcccgtaaccaggtgcgat

SEQ ID NO: 225158 - DNA, 60 bp, Artificial
  Synthetic oligonucleotide
cccataactcactctccctgtcggcgatatcccgatgatatgcccattcactgggtgcgt

SEQ ID NO: 225159 - DNA, 55 bp, Artificial
  Synthetic oligonucleotide
ctcaggcgttctctgacgaggacagccttttcgtggcgtatgggtgatacgcgag

SEQ ID NO: 225160 - DNA, 55 bp, Artificial
  Synthetic oligonucleotide
ctcacagctcgttgacctccagctaagtccaagttgcaggctcggtttcgggtgg

SEQ ID NO: 225161 - DNA, 55 bp, Artificial
  Synthetic oligonucleotide
gtaccgctgtctcggcggcgcaaccgcaaacacccaagtagatgactcctcacgc

SEQ ID NO: 225162 - DNA, 55 bp, Artificial
  Synthetic oligonucleotide
ggttggactccattcggacgggcgcgctaggccattcgtgttacttggtgtgacc

SEQ ID NO: 225163 - DNA, 55 bp, Artificial
  Synthetic oligonucleotide
ggtgcggtagcgagttcggacttcagcgcgggtgaatcacacaggcggaacgtga

SEQ ID NO: 225164 - DNA, 55 bp, Artificial
  Synthetic oligonucleotide
ggtcccggcccgattgacttctgactcaccgatgaatcgtcccaacgctcgtgtg

SEQ ID NO: 225165 - DNA, 55 bp, Artificial
  Synthetic oligonucleotide
ggtaacaggtacaatgtgccgcttgttgtcatatgaccttcactgcaacttcgcg

SEQ ID NO: 225166 - DNA, 55 bp, Artificial
  Synthetic oligonucleotide
gggttccacacactactacgatcacgtgatcccgccgtgactagacgttcccgcg

SEQ ID NO: 225167 - DNA, 55 bp, Artificial
  Synthetic oligonucleotide
ggggtgctccccgtgatgtcgacagggacgaagtccggcgaccaaagttgtggag

SEQ ID NO: 225168 - DNA, 53 bp, Artificial
  Synthetic oligonucleotide
gggacgctgaactctcgcacgtcgaaacctccgaaaacacgcctttggtcggg

SEQ ID NO: 225169 - DNA, 56 bp, Artificial
  Synthetic oligonucleotide
gcgttgacacgtacgcacgtacacgggtacgcgcgtacccgtgtacgcgcgtgacg

SEQ ID NO: 225170 - DNA, 55 bp, Artificial
  Synthetic oligonucleotide
ggcagtcctactgactcagacggcgactgcgttcgtctggttcactcgacccagg

SEQ ID NO: 225171 - DNA, 55 bp, Artificial
  Synthetic oligonucleotide
ggcacgcgccgcagattacgctgagtatcgatatggtttcacaacgtcacaacca

SEQ ID NO: 225172 - DNA, 55 bp, Artificial
  Synthetic oligonucleotide
ggatctgtgggtttcctgtgatcaactgcccggagcctgtgggtcggctgtgcac

SEQ ID NO: 225173 - DNA, 55 bp, Artificial
  Synthetic oligonucleotide
ggagggagcccgctgaactcccgagctccatcgaactatacattcgacgacgtaa

SEQ ID NO: 225174 - DNA, 55 bp, Artificial
  Synthetic oligonucleotide
ggagagtcggggagctcgggcaattttctgagttgacaacttcgggtgtagtgcc

SEQ ID NO: 225175 - DNA, 55 bp, Artificial
  Synthetic oligonucleotide
ggagagcacgatcaggtgtccggatgcggtacgctttacccagtgcgaggaccga

SEQ ID NO: 225176 - DNA, 55 bp, Artificial
  Synthetic oligonucleotide
ggacgcggtagtgtcccgatcgtccagttcgagggtcaccacactccgatctgtc

SEQ ID NO: 225177 - DNA, 55 bp, Artificial
  Synthetic oligonucleotide
gcttgacctgccgttgacctgtgacgctcaccactgttagcgtgcgtcgtctgaa

SEQ ID NO: 225178 - DNA, 55 bp, Artificial
  Synthetic oligonucleotide
gctcttgatcgttctcttccaccagacaagtcctgtgcaactcggcgagacggga

SEQ ID NO: 225179 - DNA, 55 bp, Artificial
  Synthetic oligonucleotide
gcgttgaatcaagagcatgttcaatgcgcattcgcatcgatgggtggatattcag

SEQ ID NO: 225180 - DNA, 58 bp, Artificial
  Synthetic oligonucleotide
acaggttgacgcttaagcgtcaagattgctgattcggtggaccctggagaatccgtcc

SEQ ID NO: 225181 - DNA, 52 bp, Artificial
  Synthetic oligonucleotide
gcgctttctacctacgctttcgggtgtaccgagacgacggtaaggacgtaac

SEQ ID NO: 225182 - DNA, 55 bp, Artificial
  Synthetic oligonucleotide
gcgatcgggctcactgcaacagagggttcgtccgaatggttcagaccaatcacgc

SEQ ID NO: 225183 - DNA, 55 bp, Artificial
  Synthetic oligonucleotide
gcgaagctcggtgtcattttccgaaagtccgctagctttctttattgctcgcgtg

SEQ ID NO: 225184 - DNA, 55 bp, Artificial
  Synthetic oligonucleotide
gccggggctagagttcgaggctcaggagaataagatcgtcgtggcctagattcca

SEQ ID NO: 225185 - DNA, 53 bp, Artificial
  Synthetic oligonucleotide
aaaacggccgaccattgccgtgtccacagtttggccggccggtctcccgtctc

SEQ ID NO: 225186 - DNA, 55 bp, Artificial
  Synthetic oligonucleotide
aacaggttgtcgcagagctctccgagggaacgctgtccccacaacaacgtgcatg

SEQ ID NO: 225187 - DNA, 55 bp, Artificial
  Synthetic oligonucleotide
aacgcagcggtcaatgaagtagggctgtctgagtccgaggaagagccgctgactg

SEQ ID NO: 225188 - DNA, 55 bp, Artificial
  Synthetic oligonucleotide
aagtcatcgagtgaccacccctcggaacagcgaacaaaatgcataaatccaccgc

SEQ ID NO: 225189 - DNA, 55 bp, Artificial
  Synthetic oligonucleotide
acatccccacccagcacatcccacgcatacgggagaccacgctccgctgtcagtg

SEQ ID NO: 225190 - DNA, 55 bp, Artificial
  Synthetic oligonucleotide
accatggccgtacatcgtgcccgttgctctcgacgctgcggccctactctctatg

SEQ ID NO: 225191 - DNA, 60 bp, Artificial
  Synthetic oligonucleotide
gctccgacctgcggctatccagtgaagtagttagccgaactcttatgacagcgcgaccat

SEQ ID NO: 225192 - DNA, 55 bp, Artificial
  Synthetic oligonucleotide
accgatctgccttgggtgaggtcgccgaaagctttgacgctggcctccaacgttt

SEQ ID NO: 225193 - DNA, 55 bp, Artificial
  Synthetic oligonucleotide
acgacgaatcgcggtcgtgggaccaggcgatcggggtggagcggtgatgtctaca

SEQ ID NO: 225194 - DNA, 55 bp, Artificial
  Synthetic oligonucleotide
acgatcgggcacccgggccatagacatcggcctaaatgcccaacggcgccaaatc

SEQ ID NO: 225195 - DNA, 55 bp, Artificial
  Synthetic oligonucleotide
acgggtctaatccgactgattctcgcgtcatcccgtgttggtggtcgcgtcccgc

SEQ ID NO: 225196 - DNA, 55 bp, Artificial
  Synthetic oligonucleotide
actcaccggcttgacggcagcctctccccacgagacagaaaggcacgcattggtg

SEQ ID NO: 225197 - DNA, 55 bp, Artificial
  Synthetic oligonucleotide
actgatcgcggttgtagaccctctgcgcctggttcgcacccgaatggccgccctc

SEQ ID NO: 225198 - DNA, 55 bp, Artificial
  Synthetic oligonucleotide
agcctcccaattcaggccagagatccacctcccggaccttgagcaggctggccaa

SEQ ID NO: 225199 - DNA, 52 bp, Artificial
  Synthetic oligonucleotide
agggtcatcacttgggatcgggcgagggttccggtagaccttcccgggtcga

SEQ ID NO: 225200 - DNA, 55 bp, Artificial
  Synthetic oligonucleotide
aggtgcgggtcaactacctgagaagagtccggaatatgacgatctgatccttcat

SEQ ID NO: 225201 - DNA, 52 bp, Artificial
  Synthetic oligonucleotide
agttgggccctccgttactccgtcttcaccgaccgtggaccacgaactcgac

SEQ ID NO: 225202 - DNA, 57 bp, Artificial
  Synthetic oligonucleotide
cgaggctccctcaagactagcgaatattccgaatattcgctagtcttcgggtcctgt

SEQ ID NO: 225203 - DNA, 55 bp, Artificial
  Synthetic oligonucleotide
agttccgcgcaccactgcaaatttctgcattcgtcccggggcaccgccatgcctg

SEQ ID NO: 225204 - DNA, 55 bp, Artificial
  Synthetic oligonucleotide
agtagctccatgtccacggataaggatgcccgacgtcgggaactgaaggtaggcg

SEQ ID NO: 225205 - DNA, 54 bp, Artificial
  Synthetic oligonucleotide
agtacggttacgacgaagatctgaacgacaacggggttgcggactgctcggacc

SEQ ID NO: 225206 - DNA, 54 bp, Artificial
  Synthetic oligonucleotide
atagcttgtagctgtgcaagaaagcatggacgccgactgaagtgcatcgcaacg

SEQ ID NO: 225207 - DNA, 54 bp, Artificial
  Synthetic oligonucleotide
tccgacactttcggccggcggttcgtctgacacgtagacaccgaccgcggcccg

SEQ ID NO: 225208 - DNA, 54 bp, Artificial
  Synthetic oligonucleotide
gtcccgaacagcgaagttcggtccggctaactctacgcctcgtcgtgcctgtcg

SEQ ID NO: 225209 - DNA, 54 bp, Artificial
  Synthetic oligonucleotide
gcttgatctttattcacgccgttgatccagtgttgtcgcgggaggatggcgaca

SEQ ID NO: 225210 - DNA, 54 bp, Artificial
  Synthetic oligonucleotide
gcacggctcgaaatttagaaaccagcgtttgccctggtcaggcccaaagttcga

SEQ ID NO: 225211 - DNA, 54 bp, Artificial
  Synthetic oligonucleotide
gagctggactgtggttagatccaggaatcgacgcggtggacggttgcaccgcat

SEQ ID NO: 225212 - DNA, 54 bp, Artificial
  Synthetic oligonucleotide
cggttgcctcccgtgccagtgtgcagcgccagcctaacctaccggcgagtaggt

SEQ ID NO: 225213 - DNA, 59 bp, Artificial
  Synthetic oligonucleotide
cgcatttcctcgcacatacggaacaaagcggctgcctcgccattggtaaactcgtaatc

SEQ ID NO: 225214 - DNA, 54 bp, Artificial
  Synthetic oligonucleotide
cgcacgacgtacccaccctctttctcccgcgacctaccggagactctccgcgat

SEQ ID NO: 225215 - DNA, 54 bp, Artificial
  Synthetic oligonucleotide
cgaatcccaatttgcaggttgcgtgaacgtgagacagctcacagttcgacacct

SEQ ID NO: 225216 - DNA, 54 bp, Artificial
  Synthetic oligonucleotide
cagtgggaccaggctccgcacacctgcgtgcagggcgcgacccgctccggtaag

SEQ ID NO: 225217 - DNA, 54 bp, Artificial
  Synthetic oligonucleotide
cagtccggggaacactcaccgggtccatgatgtcaaggggcgaccaccctcccc

SEQ ID NO: 225218 - DNA, 54 bp, Artificial
  Synthetic oligonucleotide
caactgccgttctgacgcccctagaccacgcaccgtgtgaaggcgccccttcgg

SEQ ID NO: 225219 - DNA, 53 bp, Artificial
  Synthetic oligonucleotide
tgctctgggatggttgtcaccgctagccccggtcattcacgtcggcgctgatt

SEQ ID NO: 225220 - DNA, 53 bp, Artificial
  Synthetic oligonucleotide
tcacactccgcgagaagggacccgctatgggagagaagactgcactcacggtg

SEQ ID NO: 225221 - DNA, 53 bp, Artificial
  Synthetic oligonucleotide
ggggtcacgacaaatgacgcgcaatccttgcgaaatacgcggacctggcctga

SEQ ID NO: 225222 - DNA, 53 bp, Artificial
  Synthetic oligonucleotide
acccctggccatgaccctcctttcacgaggttgactgtgcgacgcttcggatg

SEQ ID NO: 225223 - DNA, 53 bp, Artificial
  Synthetic oligonucleotide
cccctgatacgttatggcgaaccgtcttcgtccagtcactgtccgcacatagt

SEQ ID NO: 225224 - DNA, 53 bp, Artificial
  Synthetic oligonucleotide
cgacgtcgggaactgaaggtaggcgggctcgggctcgcaaccgggggattgtc

SEQ ID NO: 225225 - DNA, 53 bp, Artificial
  Synthetic oligonucleotide
gaaattcggcgtgcgaccgtctgctccccacggcgggtcatcctgcaggagac

SEQ ID NO: 225226 - DNA, 53 bp, Artificial
  Synthetic oligonucleotide
gtcccgagacggccgggtctacgtatcgcgctcggccgggtttacgtggaagc

SEQ ID NO: 225227 - DNA, 53 bp, Artificial
  Synthetic oligonucleotide
atgtacccgatagagcggccgagagccatcagatgagatccgcccgagtgttt

SEQ ID NO: 225228 - DNA, 53 bp, Artificial
  Synthetic oligonucleotide
gtggtcgtcccccgtcagcgtacaaacatgcccacacgtttcggtcaatccgt

SEQ ID NO: 225229 - DNA, 53 bp, Artificial
  Synthetic oligonucleotide
cctgaggtagaggtttagagttatgtcaacttccaacgttgctgacggaccgt

SEQ ID NO: 225230 - DNA, 53 bp, Artificial
  Synthetic oligonucleotide
ggatggaacttccgtccacaacacatggaacttgcgaaatgtagggttctagc

SEQ ID NO: 225231 - DNA, 53 bp, Artificial
  Synthetic oligonucleotide
gtgagaggggatgaatcaggtggcgcagacaatcaccgcgcaatacgtacgac

SEQ ID NO: 225232 - DNA, 53 bp, Artificial
  Synthetic oligonucleotide
agggtcacagtagatcgataacttcgtgacctcaaccagtagtgaaccgatca

SEQ ID NO: 225233 - DNA, 53 bp, Artificial
  Synthetic oligonucleotide
gagggatcccatggccgtggcactccgaccgcaggatggatgtatgcggatca

SEQ ID NO: 225234 - DNA, 53 bp, Artificial
  Synthetic oligonucleotide
atgtccctcggtcatggttccccttctggtagtgcgggtacttttctggcccc

SEQ ID NO: 225235 - DNA, 55 bp, Artificial
  Synthetic oligonucleotide
cgacgccggttgtcaagatgtccctcggtcatggttccccttctggtagtgcggg

SEQ ID NO: 225236 - DNA, 53 bp, Artificial
  Synthetic oligonucleotide
ggcggctaccggtcacactatcgattttggaagggtctgtgacccgaagtaat

SEQ ID NO: 225237 - DNA, 52 bp, Artificial
  Synthetic oligonucleotide
gtagataggcaggccccgggcccacgaaccttatcctgaaacgacctgtgaa

SEQ ID NO: 225238 - DNA, 52 bp, Artificial
  Synthetic oligonucleotide
gccgcaccttgtcctcagcgctctggcggacaactccgcagtacacacaact

SEQ ID NO: 225239 - DNA, 52 bp, Artificial
  Synthetic oligonucleotide
actatcgagcgatagtagttgcgggtagcctcacctaacgtcggccgaaatg

SEQ ID NO: 225240 - DNA, 52 bp, Artificial
  Synthetic oligonucleotide
cgacgctgcggccctactctctatggcgctgacattccacgcggtgacacac

SEQ ID NO: 225241 - DNA, 52 bp, Artificial
  Synthetic oligonucleotide
tcaggggccggtctgtcagcggtcgcggcgcaagaacacgggaattggcacc

SEQ ID NO: 225242 - DNA, 52 bp, Artificial
  Synthetic oligonucleotide
gccctgataccaacggagcacggtttcccgcgatggattaagtccagacctc

SEQ ID NO: 225243 - DNA, 52 bp, Artificial
  Synthetic oligonucleotide
ccgacgttctccctcggcttcccggagagggcaactatcgggcgcagcccta

SEQ ID NO: 225244 - DNA, 52 bp, Artificial
  Synthetic oligonucleotide
aaaatctggctacacgcagacgcatgttggggtttcctgtgcgcgttcagcg

SEQ ID NO: 225245 - DNA, 52 bp, Artificial
  Synthetic oligonucleotide
ctccctcggcttcccggagagggcaactatcgggcgcagccctactgatggg

SEQ ID NO: 225246 - DNA, 60 bp, Artificial
  Synthetic oligonucleotide
gcgctagggcttaatggaccatggccgtacatcgtgcccgttgctctcgacgctgcggcc

SEQ ID NO: 225247 - DNA, 52 bp, Artificial
  Synthetic oligonucleotide
atccgccttgtgtgaaggaccccagcacgttctgttacacggtgtatgacgt

SEQ ID NO: 225248 - DNA, 52 bp, Artificial
  Synthetic oligonucleotide
atccgtgggggtcacgacaaatgacgcgcaatccttgcgaaatacgcggacc

SEQ ID NO: 225249 - DNA, 52 bp, Artificial
  Synthetic oligonucleotide
catgccgaccaaccgtcgaggagaaggcgagacgcggtggattacgcggtga

SEQ ID NO: 225250 - DNA, 52 bp, Artificial
  Synthetic oligonucleotide
ccattacggtggtcgtcccccgtcagcgtacaaacatgcccacacgtttcgg

SEQ ID NO: 225251 - DNA, 52 bp, Artificial
  Synthetic oligonucleotide
gcgtggcagtgcaactgaggttcgttcgcccggctcgtgctgtgatcgaact

SEQ ID NO: 225252 - DNA, 52 bp, Artificial
  Synthetic oligonucleotide
gacgcgccggcggttagaccattcggcgcaatccggcaagaatacgtttcat

SEQ ID NO: 225253 - DNA, 51 bp, Artificial
  Synthetic oligonucleotide
cgagatacgtcaagactcggctcgaaccgatttcgttcgtctgtgacgcgt

SEQ ID NO: 225254 - DNA, 51 bp, Artificial
  Synthetic oligonucleotide
acgtgtcgaatcacacgtgcgttcgggcggacatttgtgttcgacttatgc

SEQ ID NO: 225255 - DNA, 51 bp, Artificial
  Synthetic oligonucleotide
tatgtagtcgagaccaggtacgagtgagcgaagagttatctaacggtcaat

SEQ ID NO: 225256 - DNA, 51 bp, Artificial
  Synthetic oligonucleotide
agtgcccgatttcccggaagtcgttcccctggcgttaagcgcccctctgca

SEQ ID NO: 225257 - DNA, 52 bp, Artificial
  Synthetic oligonucleotide
gtgacgccggtccgcacagagaaacgaccccgccgggaggacggggccgttc

SEQ ID NO: 225258 - DNA, 60 bp, Artificial
  Synthetic oligonucleotide
acattactcaattctgttgtcccataaagcatctggcctctaatggccccaaccagtcga

SEQ ID NO: 225259 - DNA, 51 bp, Artificial
  Synthetic oligonucleotide
cgcgcaatccttgcgaaatacgcggacctggcctgacaatgtgcctacggt

SEQ ID NO: 225260 - DNA, 51 bp, Artificial
  Synthetic oligonucleotide
tcaggctagccaggtgcagagatccccgatcgtgttaacccgaggagcgaa

SEQ ID NO: 225261 - DNA, 51 bp, Artificial
  Synthetic oligonucleotide
gggctggagacccttacgtgtggtcgttcacgacccgggtccggatgaggg

SEQ ID NO: 225262 - DNA, 51 bp, Artificial
  Synthetic oligonucleotide
ccccagatcccctcttatccccatgccggtgcgaaccggctccgtcccact

SEQ ID NO: 225263 - DNA, 51 bp, Artificial
  Synthetic oligonucleotide
agcgcgtcgattcggaagttgacgccggatgaggattaccgtcgcgaacct

SEQ ID NO: 225264 - DNA, 51 bp, Artificial
  Synthetic oligonucleotide
tggatgttagttccgttcatgccacccaggcgagggacccctttcgtcggc

SEQ ID NO: 225265 - DNA, 51 bp, Artificial
  Synthetic oligonucleotide
ccccgtgttctgaaatgctgccgtgaaccgtcccttactagcgtcgtattt

SEQ ID NO: 225266 - DNA, 51 bp, Artificial
  Synthetic oligonucleotide
ttccggccgtgttgggagaggtcaatccgtcctgtcttcggcccgaaccgg

SEQ ID NO: 225267 - DNA, 51 bp, Artificial
  Synthetic oligonucleotide
gccgtgtaaccgcgtcggacgtcgggatgcacctgtttgacgagttagtga

SEQ ID NO: 225268 - DNA, 51 bp, Artificial
  Synthetic oligonucleotide
ggcgatgactgcaatgtgcacagagcgagcatgtgctgtggacaacgggca

SEQ ID NO: 225269 - DNA, 50 bp, Artificial
  Synthetic oligonucleotide
ggccccggttccccccgccggggcctgttcttcgtcctccgctttgacac

SEQ ID NO: 225270 - DNA, 51 bp, Artificial
  Synthetic oligonucleotide
ggcgaacggcaccacctgaaggtggacgttcggcaactggctgatcttgat

SEQ ID NO: 225271 - DNA, 51 bp, Artificial
  Synthetic oligonucleotide
agaggtccggctcggaatcatcggattcggggcgcagggatcgatgtacgc

SEQ ID NO: 225272 - DNA, 51 bp, Artificial
  Synthetic oligonucleotide
ggccggtgaatcaggtcatctggggtgtcttgaggccagatggcgatttca

SEQ ID NO: 225273 - DNA, 51 bp, Artificial
  Synthetic oligonucleotide
caatggtacggccccaaccctcttgaacggcccagccgaccaggtgaacgg

SEQ ID NO: 225274 - DNA, 51 bp, Artificial
  Synthetic oligonucleotide
cactccgtgaacacaatttgtggggcttggacgacgatgcgcctactagat

SEQ ID NO: 225275 - DNA, 51 bp, Artificial
  Synthetic oligonucleotide
accaggctcgatcccgctccgcgctgctgaaccgtcaggaatcagggtgtg

SEQ ID NO: 225276 - DNA, 51 bp, Artificial
  Synthetic oligonucleotide
aaacatgcccacacgtttcggtcaatccgtaccagttaacgaactccgcgg

SEQ ID NO: 225277 - DNA, 50 bp, Artificial
  Synthetic oligonucleotide
acacaatccggcaaaagggaccacgcccccgcgacgtttcacgaattcga

SEQ ID NO: 225278 - DNA, 50 bp, Artificial
  Synthetic oligonucleotide
acaacggttgaccggatccgtgcctttttggaccaccatcgacccccgac

SEQ ID NO: 225279 - DNA, 50 bp, Artificial
  Synthetic oligonucleotide
aagtccggtcgcttggacggctgaagtgctcgtgagtggttgtgccagta

SEQ ID NO: 225280 - DNA, 60 bp, Artificial
  Synthetic oligonucleotide
ggcgcagcgttctgccttttatctactggaggcgagcgtaggtgagagggctccacagga

SEQ ID NO: 225281 - DNA, 50 bp, Artificial
  Synthetic oligonucleotide
aagtccggagtgtcacgttttccgaatcgcgacctgggggtgcctcggtt

SEQ ID NO: 225282 - DNA, 50 bp, Artificial
  Synthetic oligonucleotide
aagggccacttctcagcttacgatcggcccgtgaccacgcctgtttcact

SEQ ID NO: 225283 - DNA, 50 bp, Artificial
  Synthetic oligonucleotide
atatgaagcggccgttgcaaggctgcggagtgccacgcgacaagacgagc

SEQ ID NO: 225284 - DNA, 50 bp, Artificial
  Synthetic oligonucleotide
aaggtccccaaggcgtgacggaggttgagggaccggccgtgtgagccggt

SEQ ID NO: 225285 - DNA, 50 bp, Artificial
  Synthetic oligonucleotide
acaactggatcgacccgacgaggccacaacaagtatgcgcgggaccgggt

SEQ ID NO: 225286 - DNA, 50 bp, Artificial
  Synthetic oligonucleotide
acaagggtagacgcgccggtcagcgctcagtcttcggcctttcgaggcga

SEQ ID NO: 225287 - DNA, 50 bp, Artificial
  Synthetic oligonucleotide
aaggtgttcgcggggttcatctgcagcatcaagtccggtcgcttggacgg

SEQ ID NO: 225288 - DNA, 50 bp, Artificial
  Synthetic oligonucleotide
aaggtgcgccagtcagcactgtccgcacaaggccggacacccagcgaagt

SEQ ID NO: 225289 - DNA, 50 bp, Artificial
  Synthetic oligonucleotide
aaggtcgactcacgtgcctggagggacgacacgcgtaattggagggacga

SEQ ID NO: 225290 - DNA, 50 bp, Artificial
  Synthetic oligonucleotide
aatcccagccgtcgcatgcccgatcacctacgttgccacccgcacgcgaa

SEQ ID NO: 225291 - DNA, 55 bp, Artificial
  Synthetic oligonucleotide
ggggtctgcccttcggtcgtcccatacggcacgttctatcgtttcgagtacgcga

SEQ ID NO: 225292 - DNA, 50 bp, Artificial
  Synthetic oligonucleotide
aatccgctcgctcacccatccgactcgtccgattccgctgcttggctgac

SEQ ID NO: 225293 - DNA, 50 bp, Artificial
  Synthetic oligonucleotide
aatcaggcggtgccgggagcaaatcggacaggttgtgcgttgagcaggta

SEQ ID NO: 225294 - DNA, 50 bp, Artificial
  Synthetic oligonucleotide
aatacgcgaggagtcgtggcctgcccaatgttagagctaccgcctggctc

SEQ ID NO: 225295 - DNA, 50 bp, Artificial
  Synthetic oligonucleotide
aatccggcgtccatgccaaactgcgatcatgcctcgtttcggtcttcgcg

SEQ ID NO: 225296 - DNA, 50 bp, Artificial
  Synthetic oligonucleotide
ggtctgaacgcggttcagcaccgctgcgtggcagtgcaactgaggttcgt

SEQ ID NO: 225297 - DNA, 50 bp, Artificial
  Synthetic oligonucleotide
aataccaagggggtccaacggtcctcagattcccgaaagccaccgtcgga

SEQ ID NO: 225298 - DNA, 50 bp, Artificial
  Synthetic oligonucleotide
aatcctggcctcagcgaagcgaccccgtcccgtcgcaaggtcctgttagc

SEQ ID NO: 225299 - DNA, 50 bp, Artificial
  Synthetic oligonucleotide
aagtgttgtcctgggcatgacccggttggaggcagcatgtcgtccgctcg

SEQ ID NO: 225300 - DNA, 50 bp, Artificial
  Synthetic oligonucleotide
aatcgcgatccgacatgagatgggccccgacatgagacgggcactgtcct

SEQ ID NO: 225301 - DNA, 50 bp, Artificial
  Synthetic oligonucleotide
aatcgtgagaatctttggccgccgcacggaggtagtgccaagccccaaca

SEQ ID NO: 225302 - DNA, 57 bp, Artificial
  Synthetic oligonucleotide
agaacctccgggatgctcacacgcagaagggtacccgaacctgtacatgttggtgtc

SEQ ID NO: 225303 - DNA, 50 bp, Artificial
  Synthetic oligonucleotide
aagtggtgctagtccgaccacggtctaggcggtgtggagaaccggagtcc

SEQ ID NO: 225304 - DNA, 50 bp, Artificial
  Synthetic oligonucleotide
aattgccaccacgagtaatacggacatccacgcccgatggcaacgccggt

SEQ ID NO: 225305 - DNA, 50 bp, Artificial
  Synthetic oligonucleotide
acaaagcttgcacactctcgatcaacgggccggggctacccgagcgaacg

SEQ ID NO: 225306 - DNA, 50 bp, Artificial
  Synthetic oligonucleotide
acaacccgggcttggttgtcctggcgtgaccgtccccgcactagcgcctc

SEQ ID NO: 225307 - DNA, 50 bp, Artificial
  Synthetic oligonucleotide
acaaccgccgtctcagtcacgggcagcatccgtctcgcgccggccttcct

SEQ ID NO: 225308 - DNA, 50 bp, Artificial
  Synthetic oligonucleotide
aagtgctgacgacaaggctctctccagtcccgactgcgtcatccgacgcc

SEQ ID NO: 225309 - DNA, 50 bp, Artificial
  Synthetic oligonucleotide
aagtgcccccacggaagcgttgagccgggtgcgaagcaggaccgctgcgt

SEQ ID NO: 225310 - DNA, 50 bp, Artificial
  Synthetic oligonucleotide
acaaccggggacccgcatagcgagaaacggaaaacgcgtccgcctaacgt

SEQ ID NO: 225311 - DNA, 50 bp, Artificial
  Synthetic oligonucleotide
atcttgaatggcccttagcgaaatcaccggaccggtttatagtttcgaga

SEQ ID NO: 225312 - DNA, 50 bp, Artificial
  Synthetic oligonucleotide
aacgatcgaccggccccacctcacggaagatcgcactccgtggcttgaca

SEQ ID NO: 225313 - DNA, 60 bp, Artificial
  Synthetic oligonucleotide
ggtagggtgaggagcgcgttgaatcaagagcatgttcaatgcgcattcgcatcgatgggt

SEQ ID NO: 225314 - DNA, 50 bp, Artificial
  Synthetic oligonucleotide
aacgaggaccgccaaaatcctgtcaccgccgcacgagttcggaaacccgt

SEQ ID NO: 225315 - DNA, 50 bp, Artificial
  Synthetic oligonucleotide
aacgaaagtgcccacgtcgacagccagcgtcggcccaccaaggtccttag

SEQ ID NO: 225316 - DNA, 50 bp, Artificial
  Synthetic oligonucleotide
aaccttcgtgcttcgcgtctgtatccgactcccgtagccaagcgccgtcc

SEQ ID NO: 225317 - DNA, 50 bp, Artificial
  Synthetic oligonucleotide
aacctcgcgagccctaccgatccatgccggttgctccgatttgcgggcgc

SEQ ID NO: 225318 - DNA, 50 bp, Artificial
  Synthetic oligonucleotide
aacctcgaggtagtccctgatcagccccagtactcggtggggaatgcgga

SEQ ID NO: 225319 - DNA, 50 bp, Artificial
  Synthetic oligonucleotide
aaccgcatatctccaaccgtgcgtgaccccgtgctcagcttctcgcgtgt

SEQ ID NO: 225320 - DNA, 50 bp, Artificial
  Synthetic oligonucleotide
aaccgacgttgcctgccgttccccgttcggaaccgacttcgcttcgtaag

SEQ ID NO: 225321 - DNA, 50 bp, Artificial
  Synthetic oligonucleotide
aaccctcgctcctccttgcggccactacggcgttccaggtaccgcgacag

SEQ ID NO: 225322 - DNA, 50 bp, Artificial
  Synthetic oligonucleotide
aaccctacgcacgttgtggttcgtgcaaaaggtgacggtgttagcgcgga

SEQ ID NO: 225323 - DNA, 50 bp, Artificial
  Synthetic oligonucleotide
aacccgccgtgagctgggaggatatcggccatccacatatccaccggtcc

SEQ ID NO: 225324 - DNA, 60 bp, Artificial
  Synthetic oligonucleotide
agagatcttgcggcggtatccaccgaacgatccagttcataaaacgtggctccatgccgc

SEQ ID NO: 225325 - DNA, 50 bp, Artificial
  Synthetic oligonucleotide
aacccaccaccactccgaggtagagcgacggcccccggatttcgtgtcat

SEQ ID NO: 225326 - DNA, 50 bp, Artificial
  Synthetic oligonucleotide
aaccatttctgccgtgtcgtggaaggactgcgaccgaacgtcagcggccc

SEQ ID NO: 225327 - DNA, 50 bp, Artificial
  Synthetic oligonucleotide
aaccagccacgatggggcacacacccggcccgagtgaacgcggtagtcgt

SEQ ID NO: 225328 - DNA, 50 bp, Artificial
  Synthetic oligonucleotide
aacagtcgggtcagccgtgtcgcgggtgctgtgcttaaggggacggggct

SEQ ID NO: 225329 - DNA, 50 bp, Artificial
  Synthetic oligonucleotide
aacagtccgttcgctccaccccaagaacccgagtgcagcggtgagtggat

SEQ ID NO: 225330 - DNA, 50 bp, Artificial
  Synthetic oligonucleotide
atagaacgggtgagtgctcgcgcgacggagacccagtagcctggttgcga

SEQ ID NO: 225331 - DNA, 50 bp, Artificial
  Synthetic oligonucleotide
aacaggctctgcggcgcctccaatcactcacgggtgatcacgtgcggaac

SEQ ID NO: 225332 - DNA, 50 bp, Artificial
  Synthetic oligonucleotide
aacaggccgtcgcaggaccagctgcgtcgtcaatccgctctgctccgctt

SEQ ID NO: 225333 - DNA, 50 bp, Artificial
  Synthetic oligonucleotide
aacagctgacacgcctcgaccgtgcctaccccgcaggccagcagacgcca

SEQ ID NO: 225334 - DNA, 50 bp, Artificial
  Synthetic oligonucleotide
aacagaccgcactccaactgccgcccggattagcccgcgggaggtaattg

SEQ ID NO: 225335 - DNA, 56 bp, Artificial
  Synthetic oligonucleotide
ggtcggtgtctacctctaccccgaagcgcccgagatcctgacgagtcgccacgacc

SEQ ID NO: 225336 - DNA, 50 bp, Artificial
  Synthetic oligonucleotide
aacacggtgtccattcaaccgggattcgctgtggacggttatggccggga

SEQ ID NO: 225337 - DNA, 50 bp, Artificial
  Synthetic oligonucleotide
aacacaccgcccaagtgcctgtggggctcgtttagcccggatccaccggt

SEQ ID NO: 225338 - DNA, 50 bp, Artificial
  Synthetic oligonucleotide
aacaacaaccctggacgaccacggacagctgtggaacctccgaggccggt

SEQ ID NO: 225339 - DNA, 50 bp, Artificial
  Synthetic oligonucleotide
aaagggtctgctcgcagcatattcgctacccaggaccggggcatacgggc

SEQ ID NO: 225340 - DNA, 50 bp, Artificial
  Synthetic oligonucleotide
aaactgccgagtaagtgcaaggggtccccggtccaaatccagctggcaca

SEQ ID NO: 225341 - DNA, 50 bp, Artificial
  Synthetic oligonucleotide
aaacctgaaactggcgccgtctagcctgggaatacgacctgggtcccagg

SEQ ID NO: 225342 - DNA, 50 bp, Artificial
  Synthetic oligonucleotide
aaaccccgggtgcgttgtggagagcctatcgcgacccgctaagctgtggc

SEQ ID NO: 225343 - DNA, 50 bp, Artificial
  Synthetic oligonucleotide
agtacctctcaagagtcgcaccggcactggagggcggtcaagctgaacgc

SEQ ID NO: 225344 - DNA, 50 bp, Artificial
  Synthetic oligonucleotide
aaggctcaacaggtgccctggcacgcctcggagacgagacccagtgcttg

SEQ ID NO: 225345 - DNA, 50 bp, Artificial
  Synthetic oligonucleotide
aaggattccacgcggtaatcaatgacgctgcgcgttcgcactcccatgcc

SEQ ID NO: 225346 - DNA, 58 bp, Artificial
  Synthetic oligonucleotide
acggccgatcatcgtcagacgtccacgtttcccctggtctccgtgcatccgaacgcga

SEQ ID NO: 225347 - DNA, 50 bp, Artificial
  Synthetic oligonucleotide
aaggacgactccatggtcgcttcccgagcgtcgaaggggactggctcgcg

SEQ ID NO: 225348 - DNA, 50 bp, Artificial
  Synthetic oligonucleotide
aagcgtaggccgccggaggagagccgtgccaccgggacgtcggttggtga

SEQ ID NO: 225349 - DNA, 50 bp, Artificial
  Synthetic oligonucleotide
aagcgtacttccggcgcactccgctctcgccaggcgcgtccctcgagtgt

SEQ ID NO: 225350 - DNA, 50 bp, Artificial
  Synthetic oligonucleotide
aagcgcgcacgcatacgacacatccgaccgtgcggcaagtgaggccttct

SEQ ID NO: 225351 - DNA, 50 bp, Artificial
  Synthetic oligonucleotide
aagccgcgaacctggaccatcgacactcggggcgggaacccactgtcgtg

SEQ ID NO: 225352 - DNA, 50 bp, Artificial
  Synthetic oligonucleotide
aagcccgtggaggcacccgtctgcccgtctctaccagtcacagggtcgat

SEQ ID NO: 225353 - DNA, 50 bp, Artificial
  Synthetic oligonucleotide
aagcccgcttgaaacacccggttcctaccttcggagcaacccgacgagag

SEQ ID NO: 225354 - DNA, 50 bp, Artificial
  Synthetic oligonucleotide
aagcccacacaggacaggttcggatcgtacccaggcccgacacggtgtga

SEQ ID NO: 225355 - DNA, 50 bp, Artificial
  Synthetic oligonucleotide
aagccagaaccgaacagggtccgaacggagtcatccggtgcctgcgaacg

SEQ ID NO: 225356 - DNA, 50 bp, Artificial
  Synthetic oligonucleotide
aagcagacgtcggcagcagaggagggagcccgctgaactcccgagctcca

SEQ ID NO: 225357 - DNA, 54 bp, Artificial
  Synthetic oligonucleotide
gtaccccgtcgtaaacgaccgcctcaatattgaaccctcgaatgccctccgcca

SEQ ID NO: 225358 - DNA, 50 bp, Artificial
  Synthetic oligonucleotide
aagatggcaccatggaagtgcccccacggaagcgttgagccgggtgcgaa

SEQ ID NO: 225359 - DNA, 50 bp, Artificial
  Synthetic oligonucleotide
aagatgatgtggtgcagtccgaggtagacggtgaaccgctgctgccccgt

SEQ ID NO: 225360 - DNA, 50 bp, Artificial
  Synthetic oligonucleotide
aagagcagacgtaagccgacgcgatcgtacctattcggcgccacagcggg

SEQ ID NO: 225361 - DNA, 50 bp, Artificial
  Synthetic oligonucleotide
aagagaccaagcgagcggtgcagggaattctcccggagggcaccccgaaa

SEQ ID NO: 225362 - DNA, 50 bp, Artificial
  Synthetic oligonucleotide
aagacgtagcactgagcgtgcagccagagggtgcgactcccgactgagca

SEQ ID NO: 225363 - DNA, 50 bp, Artificial
  Synthetic oligonucleotide
aactttccgggcacgcgaacgctgtggctctatcggttttcctgccgact

SEQ ID NO: 225364 - DNA, 50 bp, Artificial
  Synthetic oligonucleotide
aactggacgtttgactccggtgattgagcctgccatgggtgggtcctccg

SEQ ID NO: 225365 - DNA, 50 bp, Artificial
  Synthetic oligonucleotide
aactgcgggggctgtttcccagacttttaccacggtccctggaacgggat

SEQ ID NO: 225366 - DNA, 50 bp, Artificial
  Synthetic oligonucleotide
aactcgcgtgatcgaaggcgcaactcgcgtgattggaggggcatcaagcg

SEQ ID NO: 225367 - DNA, 50 bp, Artificial
  Synthetic oligonucleotide
aactagccggcctcggacaccagattcgccgcatcaactgtgtgggagat

SEQ ID NO: 225368 - DNA, 60 bp, Artificial
  Synthetic oligonucleotide
gagtccgaggaagagccgctgactgctgaggccctcaaagaggcgatctcgcatttctca

SEQ ID NO: 225369 - DNA, 57 bp, Artificial
  Synthetic oligonucleotide
gtacgtgaacttcgaccacagggacaaacggatctaccggccctacagcaatgttca

SEQ ID NO: 225370 - DNA, 50 bp, Artificial
  Synthetic oligonucleotide
aactaccagtacggacccgggaactttccgcagggataccccgccatggg

SEQ ID NO: 225371 - DNA, 50 bp, Artificial
  Synthetic oligonucleotide
aacgtttagcccacgttgcccagtgtcgagccccacccacgagcgggctc

SEQ ID NO: 225372 - DNA, 50 bp, Artificial
  Synthetic oligonucleotide
aacgtccgcacctccggaaccgactcggccaccctcacacctcccgattc

SEQ ID NO: 225373 - DNA, 50 bp, Artificial
  Synthetic oligonucleotide
atgccgcacggcatagtgtcaacggcagctcggggacaacgatcggccgc

SEQ ID NO: 225374 - DNA, 50 bp, Artificial
  Synthetic oligonucleotide
aacgtcaacgaaggcacaccagatctggagggcgaacccgtaagcgcgag

SEQ ID NO: 225375 - DNA, 50 bp, Artificial
  Synthetic oligonucleotide
aacgtacggggcaagatacaggcggcgaggaaggtacgggtgacgaccta

SEQ ID NO: 225376 - DNA, 50 bp, Artificial
  Synthetic oligonucleotide
aacgggcctgtaccggactgcgtcccgatgtcgcgatcctgtcctatacc

SEQ ID NO: 225377 - DNA, 50 bp, Artificial
  Synthetic oligonucleotide
aacggactcaggtggagtcgcggacgagaagctcgcagtccagggtgact

SEQ ID NO: 225378 - DNA, 50 bp, Artificial
  Synthetic oligonucleotide
aacgctgggtagcccaggcgtacgaacggagcttcgaatgcaatgcgtta

SEQ ID NO: 225379 - DNA, 50 bp, Artificial
  Synthetic oligonucleotide
aacgccgtcacacctcggcacggttcgtatgcagggaaagatcaacccgc

SEQ ID NO: 225380 - DNA, 58 bp, Artificial
  Synthetic oligonucleotide
gtatggtggctccaagcgtagatacagcgcaccaacggccggcgaaacccttcacgag

SEQ ID NO: 225381 - DNA, 50 bp, Artificial
  Synthetic oligonucleotide
agccgacggcgacgctcttcatccgatgtgacaggcgtggaccgacaacg

SEQ ID NO: 225382 - DNA, 50 bp, Artificial
  Synthetic oligonucleotide
agccacaagcccccgacgttcgaccaacacgacgacttgaccgggcgatg

SEQ ID NO: 225383 - DNA, 50 bp, Artificial
  Synthetic oligonucleotide
agcagtttgagaatggtgtcgcgtttcatgcgccgcctcccgttggtgtc

SEQ ID NO: 225384 - DNA, 50 bp, Artificial
  Synthetic oligonucleotide
agcacgtcgctgtagcatgcgacccggcatcgcgtaacccggtagccacc

SEQ ID NO: 225385 - DNA, 50 bp, Artificial
  Synthetic oligonucleotide
agcacggaaccaccggggaagcctaggtgaaggctcgtttccgaggggtt

SEQ ID NO: 225386 - DNA, 50 bp, Artificial
  Synthetic oligonucleotide
agcaaatgatcgcatcccagcgactgtatgtggcacggctccgaggcgga

SEQ ID NO: 225387 - DNA, 50 bp, Artificial
  Synthetic oligonucleotide
agatacaggcggcgaggaaggtacgggtgacgacctagggaacggcgatg

SEQ ID NO: 225388 - DNA, 50 bp, Artificial
  Synthetic oligonucleotide
agagtaccgtcattccgaccgcgtggcattaccggcacatgaccccgctt

SEQ ID NO: 225389 - DNA, 50 bp, Artificial
  Synthetic oligonucleotide
ccgttgctctcgacgctgcggccctactctctatggcgctgacattccac

SEQ ID NO: 225390 - DNA, 50 bp, Artificial
  Synthetic oligonucleotide
agaacgttctgtctctctacgacggaagcgtgtcaggctcccgccgcgaa

SEQ ID NO: 225391 - DNA, 60 bp, Artificial
  Synthetic oligonucleotide
agatcgtttgatgcataggtgtgagtcaattgatcttggtcgggggtgtgactggctgtg

SEQ ID NO: 225392 - DNA, 50 bp, Artificial
  Synthetic oligonucleotide
actgctcatggtcaccccacgttaggtgtgatccaacggcaacgcgaggc

SEQ ID NO: 225393 - DNA, 50 bp, Artificial
  Synthetic oligonucleotide
actgcgctatctgcgtccgccggctctgtgcgatcctgaaacggacggaa

SEQ ID NO: 225394 - DNA, 50 bp, Artificial
  Synthetic oligonucleotide
attaggcgaatgaccgatcggagtgtggtgggcggatgacgcagacgccc

SEQ ID NO: 225395 - DNA, 50 bp, Artificial
  Synthetic oligonucleotide
actgcgaccacagaggcgacgtggaacgcgggtattcccggcggtgcgat

SEQ ID NO: 225396 - DNA, 50 bp, Artificial
  Synthetic oligonucleotide
atcggctgcgtgggctcagtagccacacaacgcgcgaagggatgttcctg

SEQ ID NO: 225397 - DNA, 50 bp, Artificial
  Synthetic oligonucleotide
actcgccaggagtgccgagtatcgggcggaactgttgtccgttcccctgg

SEQ ID NO: 225398 - DNA, 50 bp, Artificial
  Synthetic oligonucleotide
agtgacacgtcctgcagtccacggctttgcacgtgagtgcgccgggtggg

SEQ ID NO: 225399 - DNA, 50 bp, Artificial
  Synthetic oligonucleotide
acgttcggtgatcgtcactctccgtcggttgacccgctccgcatcatccg

SEQ ID NO: 225400 - DNA, 50 bp, Artificial
  Synthetic oligonucleotide
acgtgggcaaagggtctgctcgcagcatattcgctacccaggaccggggc

SEQ ID NO: 225401 - DNA, 50 bp, Artificial
  Synthetic oligonucleotide
aggttggtccgataggcggacgcgaacactctctgtcgcaccgttagccg

SEQ ID NO: 225402 - DNA, 56 bp, Artificial
  Synthetic oligonucleotide
gtcaacgacccgagggcaccaagaatcccgacgggcagggaagcttctactacagc

SEQ ID NO: 225403 - DNA, 50 bp, Artificial
  Synthetic oligonucleotide
acgtggcatggcgaccagggctccctcggactaggcggtatccagctgat

SEQ ID NO: 225404 - DNA, 50 bp, Artificial
  Synthetic oligonucleotide
acgtgaagtgcggcggtaggtaggctgagccttcgtgcccatggttcgtg

SEQ ID NO: 225405 - DNA, 50 bp, Artificial
  Synthetic oligonucleotide
agtgatgtggcgccgccagaatgggatcgactacgactccaagcccgcgc

SEQ ID NO: 225406 - DNA, 50 bp, Artificial
  Synthetic oligonucleotide
acgggtagatacacctccgcaggacggggcgaagccgtaccgagggagcc

SEQ ID NO: 225407 - DNA, 50 bp, Artificial
  Synthetic oligonucleotide
acgggagctcctccccacccgcgtgtcagcgaatcgttaccgcgtggcgg

SEQ ID NO: 225408 - DNA, 50 bp, Artificial
  Synthetic oligonucleotide
acggatgagtgtcgcggagtcaaccggacagagcgcggatagactgtgcg

SEQ ID NO: 225409 - DNA, 50 bp, Artificial
  Synthetic oligonucleotide
acggatgaccgacagtagccgacacgtcgcctgcgtgggtggaatcgtct

SEQ ID NO: 225410 - DNA, 50 bp, Artificial
  Synthetic oligonucleotide
acggacgccggtaccatgggaaaacgagcccgtctcaaagaagcgcgtta

SEQ ID NO: 225411 - DNA, 50 bp, Artificial
  Synthetic oligonucleotide
acgctgagtgcaccttcgcccgggtccggcgtctctcggttaccggaacc

SEQ ID NO: 225412 - DNA, 50 bp, Artificial
  Synthetic oligonucleotide
cacggagggttcgcacctccgcctgtagttcaacgaccgtccggcgcagg

SEQ ID NO: 225413 - DNA, 56 bp, Artificial
  Synthetic oligonucleotide
gcccagcacgggccacagtggacggtccgcaacggggtgggccgtggcacgccagg

SEQ ID NO: 225414 - DNA, 50 bp, Artificial
  Synthetic oligonucleotide
aggtccccctccgctaccccgtggggagccgaaatctggactagggttac

SEQ ID NO: 225415 - DNA, 50 bp, Artificial
  Synthetic oligonucleotide
aggtagggctctggggcactagtgcgactcggacacgactacgtggcaca

SEQ ID NO: 225416 - DNA, 50 bp, Artificial
  Synthetic oligonucleotide
cactctccgtcggttgacccgctccgcatcatccggtctgcttcgcgtca

SEQ ID NO: 225417 - DNA, 50 bp, Artificial
  Synthetic oligonucleotide
caggccgtcgcgatgcgtacaagcggggagtgtgatagccacacctctgt

SEQ ID NO: 225418 - DNA, 50 bp, Artificial
  Synthetic oligonucleotide
agggcggtcaagctgaacgctccgagctagcctaccggtgaacactccca

SEQ ID NO: 225419 - DNA, 50 bp, Artificial
  Synthetic oligonucleotide
cagtccagtcggacaccgatccctaggctcgtggtcaccgcgcgaaggat

SEQ ID NO: 225420 - DNA, 50 bp, Artificial
  Synthetic oligonucleotide
aggttgagcttacccgccgtccgatttgatcgatttcgggtcccggtccc

SEQ ID NO: 225421 - DNA, 50 bp, Artificial
  Synthetic oligonucleotide
cagttccggatcgcaggatgctggcggagaatgggctacgggacgggccc

SEQ ID NO: 225422 - DNA, 50 bp, Artificial
  Synthetic oligonucleotide
agggaacgggcaaactcgcgggcttacacccctgtatgcgggtctcagtg

SEQ ID NO: 225423 - DNA, 50 bp, Artificial
  Synthetic oligonucleotide
aggcttacattccgcggtcccggcagtagaccatcgtcacgcggtgaggg

SEQ ID NO: 225424 - DNA, 60 bp, Artificial
  Synthetic oligonucleotide
tgcggtgcgaggcgagttcaacatgtcgatcagtggaccggacggcgaatcatttctcgc

SEQ ID NO: 225425 - DNA, 50 bp, Artificial
  Synthetic oligonucleotide
aggctgttggcacatcgggcggggcacaccagtgaaaaggagggcggaat

SEQ ID NO: 225426 - DNA, 50 bp, Artificial
  Synthetic oligonucleotide
aggctgacctgactcgtcaagaccggaccactccgtccgggttggtctga

SEQ ID NO: 225427 - DNA, 50 bp, Artificial
  Synthetic oligonucleotide
aggacaccgtcgcacctcccgttccgacccgtgacactcgccacagagcg

SEQ ID NO: 225428 - DNA, 50 bp, Artificial
  Synthetic oligonucleotide
ccatggtcgcttcccgagcgtcgaaggggactggctcgcgtcgtcaacta

SEQ ID NO: 225429 - DNA, 50 bp, Artificial
  Synthetic oligonucleotide
cccacccgaggagtggacccgtgcccagtctgacccttgtacgtccatct

SEQ ID NO: 225430 - DNA, 50 bp, Artificial
  Synthetic oligonucleotide
agcttgccgcggaggcaccgcccgtgtagtggacgaatcggagagccgta

SEQ ID NO: 225431 - DNA, 50 bp, Artificial
  Synthetic oligonucleotide
agcgtaccgtcgttacggatgaccgacagtagccgacacgtcgcctgcgt

SEQ ID NO: 225432 - DNA, 50 bp, Artificial
  Synthetic oligonucleotide
ccccaggtctcctaatccctggggtaaggcattcgcgctggtcagggctg

SEQ ID NO: 225433 - DNA, 50 bp, Artificial
  Synthetic oligonucleotide
agcgcctatggggccgcctcacccacaacacggatcccttacgaaacacg

SEQ ID NO: 225434 - DNA, 50 bp, Artificial
  Synthetic oligonucleotide
ccccgacgcccctcgcatggttccgtgacccactcgtgatcccacggtgc

SEQ ID NO: 225435 - DNA, 59 bp, Artificial
  Synthetic oligonucleotide
ctgccgcttgaacaggaggtagtagctccatgtccacggataaggatgcccgacgtcgg

SEQ ID NO: 225436 - DNA, 50 bp, Artificial
  Synthetic oligonucleotide
ccccgcaccacgggtgagcgtaccttccgatggacgttcggcatagtcga

SEQ ID NO: 225437 - DNA, 50 bp, Artificial
  Synthetic oligonucleotide
agcgccatcgtaggcctgctgagcccgtgtcctggtcaacagagggccga

SEQ ID NO: 225438 - DNA, 50 bp, Artificial
  Synthetic oligonucleotide
agcgatccggcagaacggaccgcggcacgaacaggaccatatccgaccca

SEQ ID NO: 225439 - DNA, 50 bp, Artificial
  Synthetic oligonucleotide
cccctcgcatggttccgtgacccactcgtgatcccacggtgcccgtttcg

SEQ ID NO: 225440 - DNA, 50 bp, Artificial
  Synthetic oligonucleotide
agcctgaggccatgtcgaaggccccgatctcatgagcgacagttcgtccg

SEQ ID NO: 225441 - DNA, 50 bp, Artificial
  Synthetic oligonucleotide
cccgacgcccgagtggagcactagggttcgccctgtgagcgcgcacctcc

SEQ ID NO: 225442 - DNA, 50 bp, Artificial
  Synthetic oligonucleotide
cccgtcccgacgggagctcctccccacccgcgtgtcagcgaatcgttacc

SEQ ID NO: 225443 - DNA, 50 bp, Artificial
  Synthetic oligonucleotide
agtctcgggaaggtaacgtcaggaggtcggcgagaccttgacactggccc

SEQ ID NO: 225444 - DNA, 50 bp, Artificial
  Synthetic oligonucleotide
acccaccggaccgtggagcggcgtaggcactcaccgtgacctgtccctgt

SEQ ID NO: 225445 - DNA, 50 bp, Artificial
  Synthetic oligonucleotide
acccaccgagcgagggggtggctattcgcccgcggcacgccgataggaga

SEQ ID NO: 225446 - DNA, 60 bp, Artificial
  Synthetic oligonucleotide
tggcgggttctgacctgcattcgacacttagccgccatcgaggtagggcccaccgcagca

SEQ ID NO: 225447 - DNA, 50 bp, Artificial
  Synthetic oligonucleotide
acccacccccatgtggacaactccggcccccgacccccgatctgcgggtt

SEQ ID NO: 225448 - DNA, 50 bp, Artificial
  Synthetic oligonucleotide
atcccgcaccgtgtcattcgaattccgcccggtgtttaggcgcttcgttg

SEQ ID NO: 225449 - DNA, 50 bp, Artificial
  Synthetic oligonucleotide
accagtcggatggggccgcttcgcagaacagaagtctcaggactccggga

SEQ ID NO: 225450 - DNA, 50 bp, Artificial
  Synthetic oligonucleotide
atgctcgcgatttcctccacgtcttcgagcgttccccgactgtgacggcg

SEQ ID NO: 225451 - DNA, 50 bp, Artificial
  Synthetic oligonucleotide
accagcagtcggtccggattgaaggggcaccctctcggtgtcggcatcgc

SEQ ID NO: 225452 - DNA, 50 bp, Artificial
  Synthetic oligonucleotide
accacgtcctgacgacttccccgagtcttgttgcacgtgcctgctcccga

SEQ ID NO: 225453 - DNA, 50 bp, Artificial
  Synthetic oligonucleotide
accacgcccccgcgacgtttcacgaattcgacattaggcatcggccgata

SEQ ID NO: 225454 - DNA, 50 bp, Artificial
  Synthetic oligonucleotide
accacccataaccgcgtcactgcatacgaccgaaacgccacattccgcgc

SEQ ID NO: 225455 - DNA, 50 bp, Artificial
  Synthetic oligonucleotide
accaagggctaccggcctccggagacttatcgtcccggcaacgacacgac

SEQ ID NO: 225456 - DNA, 50 bp, Artificial
  Synthetic oligonucleotide
acattcggataggagcccggagttcggccttccaccgacccgcgaggcgt

SEQ ID NO: 225457 - DNA, 60 bp, Artificial
  Synthetic oligonucleotide
tgccggacgtggcaagcctcccaattcaggccagagatccacctcccggaccttgagcag

SEQ ID NO: 225458 - DNA, 50 bp, Artificial
  Synthetic oligonucleotide
acatgcccagtcttggagactagtacctccgcgcacgacggcccgaatcc

SEQ ID NO: 225459 - DNA, 50 bp, Artificial
  Synthetic oligonucleotide
acatcgtgcccaggctactcagacggggttcccgccatgacgagaggcaa

SEQ ID NO: 225460 - DNA, 50 bp, Artificial
  Synthetic oligonucleotide
acatcggaggttgatacctccccgcaggtgcagagggtagcgaacggccg

SEQ ID NO: 225461 - DNA, 50 bp, Artificial
  Synthetic oligonucleotide
atgcgtcgtccttgacctgtgacgcggcccgccctactctgccttaaacg

SEQ ID NO: 225462 - DNA, 50 bp, Artificial
  Synthetic oligonucleotide
acagtcctcgggagcatcacggcaaccttcgcactggctggaagacgagc

SEQ ID NO: 225463 - DNA, 50 bp, Artificial
  Synthetic oligonucleotide
acagtacctgcaacctcgcaccgcgcagcagaaggaatggtcaccggcaa

SEQ ID NO: 225464 - DNA, 50 bp, Artificial
  Synthetic oligonucleotide
acagggatcagcatcccaagtgcgccggttcctcgcattgcggctacccg

SEQ ID NO: 225465 - DNA, 50 bp, Artificial
  Synthetic oligonucleotide
atcacggagtgggctttttggttttccggtctcccccacgaagcacggct

SEQ ID NO: 225466 - DNA, 50 bp, Artificial
  Synthetic oligonucleotide
atgcgcggcatatggcacgcgagttgcaccctagccaaagtagcgacacg

SEQ ID NO: 225467 - DNA, 50 bp, Artificial
  Synthetic oligonucleotide
acagcccccggaggctccgttgaaccccctcagcaatccgaccagtctgc

SEQ ID NO: 225468 - DNA, 60 bp, Artificial
  Synthetic oligonucleotide
tgggccgactcaagagactgaacgcagcggtcaatgaagtagggctgtctgagtccgagg

SEQ ID NO: 225469 - DNA, 50 bp, Artificial
  Synthetic oligonucleotide
acactccttggggaatgcgtccgtcagcgagcatgttgggagcggtagga

SEQ ID NO: 225470 - DNA, 50 bp, Artificial
  Synthetic oligonucleotide
acactcatgacagacagcttgccgcggaggcaccgcccgtgtagtggacg

SEQ ID NO: 225471 - DNA, 50 bp, Artificial
  Synthetic oligonucleotide
acacgactcgtaagacgcccccacggtcttgaaatcatcgcccgcggacg

SEQ ID NO: 225472 - DNA, 50 bp, Artificial
  Synthetic oligonucleotide
acaccttcgggctaacctgctcggacgcatggtcacccggctatcctcag

SEQ ID NO: 225473 - DNA, 50 bp, Artificial
  Synthetic oligonucleotide
acaccccgtacaccgtctccccgtggaagaagatcgtggctggttcgcaa

SEQ ID NO: 225474 - DNA, 50 bp, Artificial
  Synthetic oligonucleotide
acacaggtctccgcacgagccgggaaccgcagatcacagtcgccgatcac

SEQ ID NO: 225475 - DNA, 50 bp, Artificial
  Synthetic oligonucleotide
acgcgtcttacctgcgggttccccctgtcgggtgacgattccccggcaat

SEQ ID NO: 225476 - DNA, 50 bp, Artificial
  Synthetic oligonucleotide
acgcggcccgccctactctgccttaaacgtttagcccacgttgcccagtg

SEQ ID NO: 225477 - DNA, 50 bp, Artificial
  Synthetic oligonucleotide
acgcccttgcacggccgcccctcggtcctttcaggacgcaccaccccgga

SEQ ID NO: 225478 - DNA, 50 bp, Artificial
  Synthetic oligonucleotide
acgcccgcgtggtaccggggaattcggcttccgcgctgaactccagctgc

SEQ ID NO: 225479 - DNA, 57 bp, Artificial
  Synthetic oligonucleotide
gagccggtccgccctgaacactgagtggtgtcgtcgataggacgacggggccggata

SEQ ID NO: 225480 - DNA, 55 bp, Artificial
  Synthetic oligonucleotide
tgacttcaggtgcacccccccattacggtggtcgtcccccgtcagcgtacaaaca

SEQ ID NO: 225481 - DNA, 50 bp, Artificial
  Synthetic oligonucleotide
acgcaacagtcatgcctcggagatagcggtggccaggggcgagtaccaag

SEQ ID NO: 225482 - DNA, 50 bp, Artificial
  Synthetic oligonucleotide
acgagtgatgccccttcgctcacgccaaccgaccctccaggtacgcgaac

SEQ ID NO: 225483 - DNA, 50 bp, Artificial
  Synthetic oligonucleotide
acgagcggagggtcatcacttgggatcgggcgagggttccggtagacctt

SEQ ID NO: 225484 - DNA, 50 bp, Artificial
  Synthetic oligonucleotide
acgaccgggatcgataacgattcacccctcaccgcacgcgggccgtagcc

SEQ ID NO: 225485 - DNA, 50 bp, Artificial
  Synthetic oligonucleotide
acgaacggcctagcacgttccgactcgccccttcgaggcacaccgaccga

SEQ ID NO: 225486 - DNA, 50 bp, Artificial
  Synthetic oligonucleotide
acgaacgagacctcggccatgtcgcgttgttcctctcctggggcgagctc

SEQ ID NO: 225487 - DNA, 50 bp, Artificial
  Synthetic oligonucleotide
accttcgccgatcctgttcggttcccttcagcgggagtgcgtcgcacgta

SEQ ID NO: 225488 - DNA, 50 bp, Artificial
  Synthetic oligonucleotide
acctgtgggttccccttccaccgggagccggcacatacgttatccatggc

SEQ ID NO: 225489 - DNA, 50 bp, Artificial
  Synthetic oligonucleotide
acctgcggacgtcagtgtgccaacgaaggtacctgaggtgcagccccacc

SEQ ID NO: 225490 - DNA, 50 bp, Artificial
  Synthetic oligonucleotide
acctagccggacgacacacgtacccaacgggacgacacgcgtactcggtt

SEQ ID NO: 225491 - DNA, 59 bp, Artificial
  Synthetic oligonucleotide
tgacgcatctggcacccgcctacggggctcactctcgcccgaaaccgcgatcgtccgga

SEQ ID NO: 225492 - DNA, 50 bp, Artificial
  Synthetic oligonucleotide
accgtgtccgcaggttgcgtcatcgtgtccgcagcccgggtagacgtatt

SEQ ID NO: 225493 - DNA, 50 bp, Artificial
  Synthetic oligonucleotide
accgtgcgtgaccccgtgctcagcttctcgcgtgtccgctggattctgcg

SEQ ID NO: 225494 - DNA, 50 bp, Artificial
  Synthetic oligonucleotide
accggtcgtcaaccaaacgaggaccgccaaaatcctgtcaccgccgcacg

SEQ ID NO: 225495 - DNA, 50 bp, Artificial
  Synthetic oligonucleotide
accgctacccctcgaagcgacgcctaaacggatccatcgaatcccccagg

SEQ ID NO: 225496 - DNA, 50 bp, Artificial
  Synthetic oligonucleotide
accgcacctggcacgacaatcgaacgtccgctactgccgatgggagtgag

SEQ ID NO: 225497 - DNA, 50 bp, Artificial
  Synthetic oligonucleotide
accgatagccgcggagagaagcggttctgggacggttcgtcttggaccga

SEQ ID NO: 225498 - DNA, 50 bp, Artificial
  Synthetic oligonucleotide
accgagaagccgggaacgcccccgacgcccctcgcatggttccgtgaccc

SEQ ID NO: 225499 - DNA, 50 bp, Artificial
  Synthetic oligonucleotide
accgaccctccgggtacgcgagccgactctccggggcacacgaaaactcg

SEQ ID NO: 225500 - DNA, 50 bp, Artificial
  Synthetic oligonucleotide
accctggtcttccggcgcgactaagaggtagacgagcggtccatgtccga

SEQ ID NO: 225501 - DNA, 50 bp, Artificial
  Synthetic oligonucleotide
accctatgccaactcccatgatcgggctcgttcgggggcaccggaaacgt

SEQ ID NO: 225502 - DNA, 58 bp, Artificial
  Synthetic oligonucleotide
cactcgtgctgtccggaacccgataagcgatccctgacgaccaactccgatcggagta

SEQ ID NO: 225503 - DNA, 50 bp, Artificial
  Synthetic oligonucleotide
acccgtatcttgtggattccccgccacgcgccttcgctcaccgcgggtgg

SEQ ID NO: 225504 - DNA, 50 bp, Artificial
  Synthetic oligonucleotide
acccggtgcgtgcggcttttggtggccacgagaccctttccgagagggct

SEQ ID NO: 225505 - DNA, 50 bp, Artificial
  Synthetic oligonucleotide
acccggtccgaagtgcgggcttctcgctgagtcaccgtgacctagcgtgc

SEQ ID NO: 225506 - DNA, 50 bp, Artificial
  Synthetic oligonucleotide
acccgcacccacaggccctgtacggccaacaagggggattcaacccgcag

SEQ ID NO: 225507 - DNA, 50 bp, Artificial
  Synthetic oligonucleotide
accccaaccgtagccggtgaccgctccgactccacagatttcgattccgc

SEQ ID NO: 225508 - DNA, 53 bp, Artificial
  Synthetic oligonucleotide
cttattcctctccgtcgctcttaaccttgaacgagccgagttttagcccaagg

SEQ ID NO: 225509 - DNA, 54 bp, Artificial
  Synthetic oligonucleotide
atgttttccatgatcttttagggtctccgggccttgcccgtgtgctccccctcc

SEQ ID NO: 225510 - DNA, 55 bp, Artificial
  Synthetic oligonucleotide
tctacggcccacgtgaggacgccactaaggtcggacggatctccgttaaagaggc

SEQ ID NO: 225511 - DNA, 60 bp, Artificial
  Synthetic oligonucleotide
atctactggaggcgagcgtaggtgagagggctccacaggaaccggatgacggctctaggc

SEQ ID NO: 225512 - DNA, 56 bp, Artificial
  Synthetic oligonucleotide
cttcgctggcttcagcctaccagttttgacgcttaagtgtcaacttgtttcccctg

SEQ ID NO: 225513 - DNA, 58 bp, Artificial
  Synthetic oligonucleotide
tcgggtgtgcatctcgggtcctttcctcgcttccggtgtgactccagtctagcagttt

SEQ ID NO: 225514 - DNA, 60 bp, Artificial
  Synthetic oligonucleotide
tgtgtggtcgtccagggttccacacactactacgatcacgtgatcccgccgtgactagac

SEQ ID NO: 225515 - DNA, 55 bp, Artificial
  Synthetic oligonucleotide
aaggccccttgccgttcgagctggcaaggggccttcggtcgagtctctgtggttg

SEQ ID NO: 225516 - DNA, 60 bp, Artificial
  Synthetic oligonucleotide
ttgtgtcgttctgtgtccaacactcgtcaaccacgtggcctcatctgcgaactagcccac

SEQ ID NO: 225517 - DNA, 60 bp, Artificial
  Synthetic oligonucleotide
ttactcgtctccctggcagggtgatgcagtgccgtacgtgtgctactgtaacacatgtag

SEQ ID NO: 225518 - DNA, 58 bp, Artificial
  Synthetic oligonucleotide
atcgatgggtggatattcagtttgtcaagttcgctaggcttcacccagcgaaccgcct

SEQ ID NO: 225519 - DNA, 55 bp, Artificial
  Synthetic oligonucleotide
ctagttggaatgcggagcctccccgtatcgttacttaggtaccaggcaacaacag

SEQ ID NO: 225520 - DNA, 60 bp, Artificial
  Synthetic oligonucleotide
catgtgcacactgcgatccgtgggggtcacgacaaatgacgcgcaatccttgcgaaatac

SEQ ID NO: 225521 - DNA, 60 bp, Artificial
  Synthetic oligonucleotide
ttgctacgcctgccaacggcaggagctgcagctactactacgtggcaccctatccgggtg

SEQ ID NO: 225522 - DNA, 59 bp, Artificial
  Synthetic oligonucleotide
ccatcctcctgcattcagacggacactagtttccccggtgtacgaatccagaatgtcga

SEQ ID NO: 225523 - DNA, 58 bp, Artificial
  Synthetic oligonucleotide
tcatgacggtcaaccgtcggcgtcgtcctatcgacgacagcaccggatgccggacggg

SEQ ID NO: 225524 - DNA, 59 bp, Artificial
  Synthetic oligonucleotide
aaacactcgcagaggtgatggacagggcgcccctcaggttcccgtgcacaaagaggcgc

SEQ ID NO: 225525 - DNA, 60 bp, Artificial
  Synthetic oligonucleotide
tccggagcatctggacccactgctcaccggccaggctcgttatccattcccgctggtctc

SEQ ID NO: 225526 - DNA, 56 bp, Artificial
  Synthetic oligonucleotide
aaggaataaacgatccgaatgtcaaacctgtatacttgcaacggctactcgcccgc

SEQ ID NO: 225527 - DNA, 54 bp, Artificial
  Synthetic oligonucleotide
agtgggtttagcggacaaccacaccgctagtattgagaacgaccgaatacgagg

SEQ ID NO: 225528 - DNA, 60 bp, Artificial
  Synthetic oligonucleotide
tcccatcacaaccgcctgcgaaacgtgaggatagtcggcgagaacagcttccacctcgga

SEQ ID NO: 225529 - DNA, 53 bp, Artificial
  Synthetic oligonucleotide
aagttgccacgttcgggcgaatgccacgcgagagggtggcgggccgggggtaa

SEQ ID NO: 225530 - DNA, 58 bp, Artificial
  Synthetic oligonucleotide
cgagcgtaggtgagagggctccacaggaaccggatgacggctctaggccctggatcgg

SEQ ID NO: 225531 - DNA, 57 bp, Artificial
  Synthetic oligonucleotide
cgcgctctgtcggggatattcttatttcctccccggactctttatctgcgattacca

SEQ ID NO: 225532 - DNA, 58 bp, Artificial
  Synthetic oligonucleotide
gacagaaaccgtgcgatcgaaagtcgacatgtatgtcgggttcgagagatatggaggg

SEQ ID NO: 225533 - DNA, 58 bp, Artificial
  Synthetic oligonucleotide
gtgccccaccgtgagtctcatgatcactccgccgctgtcgtcgtatcgtcgacactac

SEQ ID NO: 225534 - DNA, 57 bp, Artificial
  Synthetic oligonucleotide
tccagacctatcgccagaacggcccaattgacgcctggcgggtgcgggtcaccggag

SEQ ID NO: 225535 - DNA, 56 bp, Artificial
  Synthetic oligonucleotide
gttcgtctcaataatcaactcgtctcgggggctaggacattgcctaccgggaaaga

SEQ ID NO: 225536 - DNA, 57 bp, Artificial
  Synthetic oligonucleotide
ggcttcccggagagggcaactatcgggcgcagccctactgatgggggagtctagata

SEQ ID NO: 225537 - DNA, 60 bp, Artificial
  Synthetic oligonucleotide
agcgagtcgacggtcaatcccgcggccagcatcgctgtgcggagacggtcattagccatg

SEQ ID NO: 225538 - DNA, 57 bp, Artificial
  Synthetic oligonucleotide
ccttaaatgaagactctcgctcgtccggtcaaatccgcggcagtatcactcttggcg

SEQ ID NO: 225539 - DNA, 56 bp, Artificial
  Synthetic oligonucleotide
ctatgtcgtggattggttcccttgcggccaaggtcgctgcgaggctggatgaccgg

SEQ ID NO: 225540 - DNA, 56 bp, Artificial
  Synthetic oligonucleotide
gcgggtacttttctggccccaaacatggtgagctagctaagaagatgcggcagccc

SEQ ID NO: 225541 - DNA, 56 bp, Artificial
  Synthetic oligonucleotide
ccccaggtgttggcgcacccaggggctcgcccgtcggccggaagtcatcaccatct

SEQ ID NO: 225542 - DNA, 55 bp, Artificial
  Synthetic oligonucleotide
gggagtgtcgggagctgggcgtaccatcgtgggttgacccgtgaccacccacgga

SEQ ID NO: 225543 - DNA, 56 bp, Artificial
  Synthetic oligonucleotide
agtaggtcgtcatcaaacctgtagatcgagttataaaggacagttgagtgagttcg

SEQ ID NO: 225544 - DNA, 56 bp, Artificial
  Synthetic oligonucleotide
actgctcgaaatcgaacggtagcgcgtcgcccactcgagttgcccactcgagcatt

SEQ ID NO: 225545 - DNA, 56 bp, Artificial
  Synthetic oligonucleotide
aatgcaccctcgggagtcggggggaactggacaggcatgatcccgttgttgcctcc

SEQ ID NO: 225546 - DNA, 55 bp, Artificial
  Synthetic oligonucleotide
cggacggggaacaggagcaccgcccgtctcgaccgctgcccttcctcgatacaag

SEQ ID NO: 225547 - DNA, 51 bp, Artificial
  Synthetic oligonucleotide
cggagaccacctccggtccggggccgttctcacgaaggggggcccgcgatg

SEQ ID NO: 225548 - DNA, 56 bp, Artificial
  Synthetic oligonucleotide
gttggtctacaccggggttgtggtgcaacacaacttcgtgccggacggcgacaaga

SEQ ID NO: 225549 - DNA, 55 bp, Artificial
  Synthetic oligonucleotide
cgcggggacatcaagtggggacgtcagtggggacgtcaagtggaaacgccatcca

SEQ ID NO: 225550 - DNA, 55 bp, Artificial
  Synthetic oligonucleotide
cgcgtcactcgccttgtggtccgcatagccggaggcgtcgacatacttctcgtag

SEQ ID NO: 225551 - DNA, 55 bp, Artificial
  Synthetic oligonucleotide
cggtgccgggagcaaatcggacaggttgtgcgttgagcaggtatggctgtcgcgt

SEQ ID NO: 225552 - DNA, 55 bp, Artificial
  Synthetic oligonucleotide
cggcgtatcacccgtttagggtattgccgttgtcattctggagactcccaacctg

SEQ ID NO: 225553 - DNA, 55 bp, Artificial
  Synthetic oligonucleotide
cgtgcccgttgacaagtaggtcgtcatcaaacctgtagatcgagttataaaggac

SEQ ID NO: 225554 - DNA, 55 bp, Artificial
  Synthetic oligonucleotide
cggccatcaagccgacatatgtcccatagcgggatataactcgcatacttcaagg

SEQ ID NO: 225555 - DNA, 55 bp, Artificial
  Synthetic oligonucleotide
cgggaaccaacattgcccgcatttgacgacctagttcctgtcccgcgctgttccg

SEQ ID NO: 225556 - DNA, 55 bp, Artificial
  Synthetic oligonucleotide
cggggatatgtgaccgatctcgcgtgcggattgccatgaaaatttcggaaacata

SEQ ID NO: 225557 - DNA, 55 bp, Artificial
  Synthetic oligonucleotide
cgccaccgaaccatcctggtccactacaagaactactcggattccaatgaggtga

SEQ ID NO: 225558 - DNA, 55 bp, Artificial
  Synthetic oligonucleotide
cgttttacctgttcagggctcgtgtgcgtttggggtcgccagggcagcccaaagc

SEQ ID NO: 225559 - DNA, 55 bp, Artificial
  Synthetic oligonucleotide
cactttgggcggtagcatctaaattgcgccccaataaaagtgtgagtgtattgca

SEQ ID NO: 225560 - DNA, 54 bp, Artificial
  Synthetic oligonucleotide
cgccacaaaagccgttttaaccgcttaccgtcaacgttgtattagagtggcaca

SEQ ID NO: 225561 - DNA, 55 bp, Artificial
  Synthetic oligonucleotide
cggggccctcttggcggcagcatgatttaccggtttacgaaatgcacaaagcaca

SEQ ID NO: 225562 - DNA, 55 bp, Artificial
  Synthetic oligonucleotide
ctcagtgtctagttgaacgctctaagcatattaaacgcgtaacagaagcgctaaa

SEQ ID NO: 225563 - DNA, 55 bp, Artificial
  Synthetic oligonucleotide
gagtctggaaccctgtaaaataacgaacgttaggctccgttgtaaagagcatcgc

SEQ ID NO: 225564 - DNA, 55 bp, Artificial
  Synthetic oligonucleotide
gccatgtatcacgatttgattcgggtacgactcctgtcccggagccttccacaac

SEQ ID NO: 225565 - DNA, 55 bp, Artificial
  Synthetic oligonucleotide
ggcctgagactaataatatgacgctttcctttcccggcgacgttgcctttgaggc

SEQ ID NO: 225566 - DNA, 55 bp, Artificial
  Synthetic oligonucleotide
ggctgacgttgcgtcacgaaaagttttaacttatgcatgatactgcgtgtatggt

SEQ ID NO: 225567 - DNA, 55 bp, Artificial
  Synthetic oligonucleotide
ggctttcgatagtgtgcgaacacgtaggatataacgctgacgctccgtaacagag

SEQ ID NO: 225568 - DNA, 54 bp, Artificial
  Synthetic oligonucleotide
gggataaatcagtcccgcaagatcctttagtttaccgattatacgaagtggtcg

SEQ ID NO: 225569 - DNA, 55 bp, Artificial
  Synthetic oligonucleotide
gggcttgctgtcacctctaaaattgcgcaagcaatgggaggcgttataagcgtaa

SEQ ID NO: 225570 - DNA, 55 bp, Artificial
  Synthetic oligonucleotide
cagacactgcgcgagcagtacaaacctttagtgcctcatatcgaagagttagagc

SEQ ID NO: 225571 - DNA, 53 bp, Artificial
  Synthetic oligonucleotide
gtacttaacactaggtaatagtacagtcaaaggttatcccagggtcgtttgtg

SEQ ID NO: 225572 - DNA, 55 bp, Artificial
  Synthetic oligonucleotide
gtgctgacttacccggctacttaggtaattgtcattcgtctggcactatcatctt

SEQ ID NO: 225573 - DNA, 55 bp, Artificial
  Synthetic oligonucleotide
gttgtagtgggctgtcaaaatgatcaagatagcaacacgataccgacacaagccc

SEQ ID NO: 225574 - DNA, 55 bp, Artificial
  Synthetic oligonucleotide
tgcaagggatatccgggcttgaaacgctgaaaagattacgtagtcagggccattt

SEQ ID NO: 225575 - DNA, 55 bp, Artificial
  Synthetic oligonucleotide
tgtgtgatagtagggcgagtttgccgacaggcaagtatacgagcgggtgagctct

SEQ ID NO: 225576 - DNA, 55 bp, Artificial
  Synthetic oligonucleotide
ttttaagcgccccgatttatagctggcaatccctaaataacaacgctggatactg

SEQ ID NO: 225577 - DNA, 55 bp, Artificial
  Synthetic oligonucleotide
caccaccgtcgtgcctgcccctgtagtcgcaccattaccaatgctcagaggtgca

SEQ ID NO: 225578 - DNA, 55 bp, Artificial
  Synthetic oligonucleotide
atcggcaaagggttattctcttcgcaggatcagggcatagaatttaaccgtctgg

SEQ ID NO: 225579 - DNA, 55 bp, Artificial
  Synthetic oligonucleotide
agtgtgcgttaaagcgccccaagtctgccaagcgatacaagcacataaagcgcag

SEQ ID NO: 225580 - DNA, 54 bp, Artificial
  Synthetic oligonucleotide
ggcccattaacatgataaatagcgtattaggggcatcaaccggctgagacgtta

SEQ ID NO: 225581 - DNA, 55 bp, Artificial
  Synthetic oligonucleotide
ccgagcgtaaaggcctatccatcttataactagactttgttccgtttgagcgcct

SEQ ID NO: 225582 - DNA, 53 bp, Artificial
  Synthetic oligonucleotide
aaatctcaggcactccacacccagatagcggaaacgtcggctgtcgaaccagc

SEQ ID NO: 225583 - DNA, 53 bp, Artificial
  Synthetic oligonucleotide
aacgattgcccagcaaccggctttaattggtgaaattggcgtgagtactgccg

SEQ ID NO: 225584 - DNA, 53 bp, Artificial
  Synthetic oligonucleotide
aagcccgaaggaatatgacgagattacgctaagtatgcaagcgctatctggta

SEQ ID NO: 225585 - DNA, 52 bp, Artificial
  Synthetic oligonucleotide
tgataatatccacggtttagagctagaccaacgctgtgtagagctagctgcg

SEQ ID NO: 225586 - DNA, 52 bp, Artificial
  Synthetic oligonucleotide
gcaagttagtgtaagttccgagacgactatttgggcctatagcgttggaccc

SEQ ID NO: 225587 - DNA, 52 bp, Artificial
  Synthetic oligonucleotide
gtcttggtgtattgttgcctttaggtaccaatatgagcgggttactcgtctt

SEQ ID NO: 225588 - DNA, 52 bp, Artificial
  Synthetic oligonucleotide
aacctattgcgcgacatgttattacgcacttatcaccctatcaaatctcccc

SEQ ID NO: 225589 - DNA, 51 bp, Artificial
  Synthetic oligonucleotide
agcgcttaatcttgcgtgctcgggggcgtttatatgcgggggaatgtgcct

SEQ ID NO: 225590 - DNA, 51 bp, Artificial
  Synthetic oligonucleotide
acgggcgcggcccctactacaccgggtatgagcgctaagttctcaagcccg

SEQ ID NO: 225591 - DNA, 51 bp, Artificial
  Synthetic oligonucleotide
aaggtcgccagacgtcacacggattacgtgccctggcaagtaccaccctga

SEQ ID NO: 225592 - DNA, 55 bp, Artificial
  Synthetic oligonucleotide
ccttatacagcgcccgttgaatgtgagtttcgtcccgactggcatatctcgcccc

SEQ ID NO: 225593 - DNA, 51 bp, Artificial
  Synthetic oligonucleotide
gggatctcgggtgcatggggcatcggttggctggtacacgctaataaggcg

SEQ ID NO: 225594 - DNA, 51 bp, Artificial
  Synthetic oligonucleotide
ggtgtcgagcttgcgccccgaagggcaaggtaactcgcacccatctgcgtt

SEQ ID NO: 225595 - DNA, 51 bp, Artificial
  Synthetic oligonucleotide
aacactgacgtatgcggggcgagatgcatcagcttccactgcggtggggta

SEQ ID NO: 225596 - DNA, 51 bp, Artificial
  Synthetic oligonucleotide
taagacattgggcgacactgatagaggataatctgacctggttgccactca

SEQ ID NO: 225597 - DNA, 51 bp, Artificial
  Synthetic oligonucleotide
aaaacatatccgtcacgcgtcacttcccggtgtcgaggccgattgggttaa

SEQ ID NO: 225598 - DNA, 51 bp, Artificial
  Synthetic oligonucleotide
cacgcgcatactccgatgcgccccttctgtcacgctatcaacattgcgccc

SEQ ID NO: 225599 - DNA, 51 bp, Artificial
  Synthetic oligonucleotide
attcgcttgctcgcgtaaccacgagttagccccgtcggctcccacaagcag

SEQ ID NO: 225600 - DNA, 51 bp, Artificial
  Synthetic oligonucleotide
agttaaagctgattacttgagtattgagagtgccaccttcgcggacgttct

SEQ ID NO: 225601 - DNA, 51 bp, Artificial
  Synthetic oligonucleotide
cgtgcgccacttgcaatagtcccgggccaactaaggcggctccacttgatg

SEQ ID NO: 225602 - DNA, 51 bp, Artificial
  Synthetic oligonucleotide
attctgatctggcaatgggggctggcgggacaaccaccgcagagcgtattt

SEQ ID NO: 225603 - DNA, 55 bp, Artificial
  Synthetic oligonucleotide
cgaagggcctgctctggtttagttaagcgtcctaatattgattgtactacgagcc

SEQ ID NO: 225604 - DNA, 51 bp, Artificial
  Synthetic oligonucleotide
cacgccaaagcgtggaggtggttacgggtggcgcagatcgctacggcagta

SEQ ID NO: 225605 - DNA, 50 bp, Artificial
  Synthetic oligonucleotide
gtgttgcagccactatagcggcgcccctagcttgacccagcttcagcgca

SEQ ID NO: 225606 - DNA, 50 bp, Artificial
  Synthetic oligonucleotide
tacagtgcaatggcgttaccttttagcccgtaaggctgtcccccgccgtt

SEQ ID NO: 225607 - DNA, 50 bp, Artificial
  Synthetic oligonucleotide
taccaatcggcagtccccactgcaccctttcgttaccccactcccgggcg

SEQ ID NO: 225608 - DNA, 50 bp, Artificial
  Synthetic oligonucleotide
taggcgctggcacggtagtaacactgcccgctttaagcgcgtccatcact

SEQ ID NO: 225609 - DNA, 50 bp, Artificial
  Synthetic oligonucleotide
tatcgcggctgcacagggtaaaggtgtgcgccagatgattgagatcgcct

SEQ ID NO: 225610 - DNA, 50 bp, Artificial
  Synthetic oligonucleotide
tccacagtgacaggggcaccgccctccgcaaaggaaaatgcatcagccag

SEQ ID NO: 225611 - DNA, 50 bp, Artificial
  Synthetic oligonucleotide
tccgatgcgccccttctgtcacgctatcaacattgcgcccaggcatggta

SEQ ID NO: 225612 - DNA, 50 bp, Artificial
  Synthetic oligonucleotide
tccggtcgcaaacctgtctacccgcaacgcgccattttgcgtaaccagca

SEQ ID NO: 225613 - DNA, 50 bp, Artificial
  Synthetic oligonucleotide
tcggtgcgcaatcgcttacatcgtttagccctgggcggcactgcagtggg

SEQ ID NO: 225614 - DNA, 55 bp, Artificial
  Synthetic oligonucleotide
cgagggtagcgcgtctttaaagggtgttaactctgcaatggcgagcctaaacttg

SEQ ID NO: 225615 - DNA, 50 bp, Artificial
  Synthetic oligonucleotide
cccttacccgtattcacttgcacggcaggtactcccgtcgcacgtacgcg

SEQ ID NO: 225616 - DNA, 50 bp, Artificial
  Synthetic oligonucleotide
tgatggaacccacttgcggcttgttgcgctccgaggcctagagaggtcgc

SEQ ID NO: 225617 - DNA, 50 bp, Artificial
  Synthetic oligonucleotide
tgccgcgctactcggtgactttcatcaaatgcgcatggcaacgggcaacc

SEQ ID NO: 225618 - DNA, 50 bp, Artificial
  Synthetic oligonucleotide
tgcctggtcgcccaactaagcttgacggcgtatgcacagacggggtcgcc

SEQ ID NO: 225619 - DNA, 50 bp, Artificial
  Synthetic oligonucleotide
tgcgacctcggatcacgctgccattcccgcgatgttagtgacgggtgctg

SEQ ID NO: 225620 - DNA, 50 bp, Artificial
  Synthetic oligonucleotide
aaaccgttggaccaagcgcaccctttacgctagggcctgaagccgtgacc

SEQ ID NO: 225621 - DNA, 50 bp, Artificial
  Synthetic oligonucleotide
ttcgggcagtgattgagtgccaaaccgtaacgagtgcggcggagcgtctt

SEQ ID NO: 225622 - DNA, 50 bp, Artificial
  Synthetic oligonucleotide
ttggggccgggtctaagtttaggggcgaaacgtatgtgaatggcgcggta

SEQ ID NO: 225623 - DNA, 50 bp, Artificial
  Synthetic oligonucleotide
cgttgcccgggctctactccggaaaaccatgctttaatccgcccaacccg

SEQ ID NO: 225624 - DNA, 50 bp, Artificial
  Synthetic oligonucleotide
ctttggccgggacgatagagcttgctcgccaagcgggatacagtgtggct

SEQ ID NO: 225625 - DNA, 55 bp, Artificial
  Synthetic oligonucleotide
cgatatcaataccgggatgaatagcgggcacactggcgagttccgctggactgat

SEQ ID NO: 225626 - DNA, 50 bp, Artificial
  Synthetic oligonucleotide
agcgcgagagagcgaccataataataccatcagtctcacggattcagtcg

SEQ ID NO: 225627 - DNA, 50 bp, Artificial
  Synthetic oligonucleotide
cgtgtcgctagtctggcaaggggcctggagactttggccaatctgcggtt

SEQ ID NO: 225628 - DNA, 50 bp, Artificial
  Synthetic oligonucleotide
gcccgcagcgcttagcctgtttatgccgtaatgacttctgcgtcctgccc

SEQ ID NO: 225629 - DNA, 50 bp, Artificial
  Synthetic oligonucleotide
gcgagcgggcaagccgtggcagcgaacattacggccaaagacgtaacggt

SEQ ID NO: 225630 - DNA, 50 bp, Artificial
  Synthetic oligonucleotide
gcgctgcactagcgtttaatcaaccggcgcgggacaacttccacactggg

SEQ ID NO: 225631 - DNA, 50 bp, Artificial
  Synthetic oligonucleotide
gcttggtactgctccctcggcacccctggtttatccggtctgctaagggc

SEQ ID NO: 225632 - DNA, 50 bp, Artificial
  Synthetic oligonucleotide
ggacatcaatcccacgctcgttggcaaaagcatcccggccatgcagtgcc

SEQ ID NO: 225633 - DNA, 50 bp, Artificial
  Synthetic oligonucleotide
cgtattacgccaatgtgcgccattcccctcgcgcctccactgccaagtac

SEQ ID NO: 225634 - DNA, 50 bp, Artificial
  Synthetic oligonucleotide
ggccgcgcaccgattaccacggctgcagtgcatagaattcaccctaccga

SEQ ID NO: 225635 - DNA, 50 bp, Artificial
  Synthetic oligonucleotide
ggccgtacacactttttcgcacctgtccgcctctattgtgctgtcgcgcc

SEQ ID NO: 225636 - DNA, 55 bp, Artificial
  Synthetic oligonucleotide
cgatatgacacttgtgggttcccgacattacaattgacattaaattctcgacgca

SEQ ID NO: 225637 - DNA, 50 bp, Artificial
  Synthetic oligonucleotide
aagttgcagggctggactgctccttttccgcccagctaacagctagcccg

SEQ ID NO: 225638 - DNA, 50 bp, Artificial
  Synthetic oligonucleotide
cggggttgcgagacaggcagatgttgtgctcgccatcgtacgagggacca

SEQ ID NO: 225639 - DNA, 50 bp, Artificial
  Synthetic oligonucleotide
aagggcgatcgtgccgttaccagtgagccgtcgtggtagtgtaccttgcc

SEQ ID NO: 225640 - DNA, 50 bp, Artificial
  Synthetic oligonucleotide
agggactcctggcggcccaaacggcactcctatcggcccaaacggcactc

SEQ ID NO: 225641 - DNA, 50 bp, Artificial
  Synthetic oligonucleotide
cgcctaaatgacaaccggccaagcgtgtcgctagtctggcaaggggcctg

SEQ ID NO: 225642 - DNA, 50 bp, Artificial
  Synthetic oligonucleotide
agggcagggttgcgcactttatgcggacggggaaatctctcaccccacct

SEQ ID NO: 225643 - DNA, 50 bp, Artificial
  Synthetic oligonucleotide
cgatgtcggggtattttctgctcgtaggccgcgcaccgattaccacggct

SEQ ID NO: 225644 - DNA, 50 bp, Artificial
  Synthetic oligonucleotide
attacatgcgaccggctcacctgttgtggtgccgttagagccgtccccaa

SEQ ID NO: 225645 - DNA, 50 bp, Artificial
  Synthetic oligonucleotide
aacccggcgactacttaatttcgcccggcactccgccctctccagcagta

SEQ ID NO: 225646 - DNA, 55 bp, Artificial
  Synthetic oligonucleotide
cgatgcgtcataatgtgcattgtcctggttgatcactaaggtggtgcattcagcc

SEQ ID NO: 225647 - DNA, 55 bp, Artificial
  Synthetic oligonucleotide
cggacaagagcgttgttttgcggcggttactcacagctgagcaactctgcggctt

SEQ ID NO: 225648 - DNA, 55 bp, Artificial
  Synthetic oligonucleotide
ggggcactgactcggattgccagctataactcactgatgaatcgtcagttggact

SEQ ID NO: 225649 - DNA, 55 bp, Artificial
  Synthetic oligonucleotide
ggtctatccgaatggccctaagctaaggggtataacgactggaacagtcagcata

SEQ ID NO: 225650 - DNA, 54 bp, Artificial
  Synthetic oligonucleotide
gtacgcgtttcacggggctccgctttaccggatcgactagtttcaagacctctc

SEQ ID NO: 225651 - DNA, 55 bp, Artificial
  Synthetic oligonucleotide
gtcccgagaactttggaaacacccaacgattcacacaagttctctacttgtacag

SEQ ID NO: 225652 - DNA, 55 bp, Artificial
  Synthetic oligonucleotide
gtgtggtgaattgctagcctctgcacggagtgaggattcaatcagtttagaagcg

SEQ ID NO: 225653 - DNA, 55 bp, Artificial
  Synthetic oligonucleotide
cgatttgctctaggcatcgattggcttaggctgtcgtgtacctccacctgttgcc

SEQ ID NO: 225654 - DNA, 55 bp, Artificial
  Synthetic oligonucleotide
cgacaaaagtggctgtggtcgtagaaacccgtaccattagcaatcgctgctatgg

SEQ ID NO: 225655 - DNA, 55 bp, Artificial
  Synthetic oligonucleotide
tagacgctcaatctctgcgcccttgctactcattaagattacgggaacgtttgcg

SEQ ID NO: 225656 - DNA, 55 bp, Artificial
  Synthetic oligonucleotide
tcctacttatgattggggacgtttgcacaccgacatgaaatgggatgtaggaatc

SEQ ID NO: 225657 - DNA, 55 bp, Artificial
  Synthetic oligonucleotide
atggcgcgcatcggcggatccactggcttgagtgttacccacgaccgcactcact

SEQ ID NO: 225658 - DNA, 55 bp, Artificial
  Synthetic oligonucleotide
cggacctgcgctaccatggaaaagctaaggtcttgcacgataatcgttgtggagg

SEQ ID NO: 225659 - DNA, 55 bp, Artificial
  Synthetic oligonucleotide
ttcctacagccagacctaggttcatcgcttgtcttccctcctatgattttcgcac

SEQ ID NO: 225660 - DNA, 55 bp, Artificial
  Synthetic oligonucleotide
ttcgactgatttgcaccttggccacttcgaagtccagatcgattacgagtccagc

SEQ ID NO: 225661 - DNA, 55 bp, Artificial
  Synthetic oligonucleotide
ttggctatggggcgcgaccgctgcattgtcaacacagacaagagttaggacccac

SEQ ID NO: 225662 - DNA, 54 bp, Artificial
  Synthetic oligonucleotide
ccaggccttgagcttcgcaagtcctttatagttaatgtgaaagggcgggtcttg

SEQ ID NO: 225663 - DNA, 54 bp, Artificial
  Synthetic oligonucleotide
gttacttccaatctgcaactcaccgatagcgagcgatcgaactgcctgctaaca

SEQ ID NO: 225664 - DNA, 54 bp, Artificial
  Synthetic oligonucleotide
tgggctaccccgtattgaaattcccggagcctatatcagcggggagacgatttt

SEQ ID NO: 225665 - DNA, 53 bp, Artificial
  Synthetic oligonucleotide
gttcgcggcggaccccagattaagtatcacggatactgtcaccgtgtattcca

SEQ ID NO: 225666 - DNA, 53 bp, Artificial
  Synthetic oligonucleotide
atacactccctgctccggattcgcactcacgaaggcgagcccctctgccagta

SEQ ID NO: 225667 - DNA, 51 bp, Artificial
  Synthetic oligonucleotide
ccagtgccgattgaagttcaggctggctcctatcgcaacattccagggatt

SEQ ID NO: 225668 - DNA, 51 bp, Artificial
  Synthetic oligonucleotide
ctcgagttccagttcggggctctgggtaaatcgcaggtcaatgatgaggga

SEQ ID NO: 225669 - DNA, 55 bp, Artificial
  Synthetic oligonucleotide
ctacaccttatcgagcgccgtgaatagctatcacgagggttttctggcactggag

SEQ ID NO: 225670 - DNA, 51 bp, Artificial
  Synthetic oligonucleotide
tttgagtttctgagtaatacggaggcttgcggggtcaatcagaacgaggta

SEQ ID NO: 225671 - DNA, 50 bp, Artificial
  Synthetic oligonucleotide
acccttcgaacgaacggccgagtgcgtcagtccatgtgcgtgagtcgact

SEQ ID NO: 225672 - DNA, 50 bp, Artificial
  Synthetic oligonucleotide
accctgtgggccgatgactttcgccgcatcggggtctactggagagatcc

SEQ ID NO: 225673 - DNA, 50 bp, Artificial
  Synthetic oligonucleotide
accctgtcggcgaattgtgtgatggggcgtccggatcgtaggcatccgtt

SEQ ID NO: 225674 - DNA, 50 bp, Artificial
  Synthetic oligonucleotide
accccagcgacacgagcgaaattgcccatttccggagtacggaaacccgc

SEQ ID NO: 225675 - DNA, 50 bp, Artificial
  Synthetic oligonucleotide
aagcgtcgtccccaaagccgaatcatcaacccgcaacctggccacctata

SEQ ID NO: 225676 - DNA, 50 bp, Artificial
  Synthetic oligonucleotide
aagcgccgcccaagtgaagccggtgcgcacttctcaattagcagtcgggt

SEQ ID NO: 225677 - DNA, 50 bp, Artificial
  Synthetic oligonucleotide
aagcgcactggcccggggtccttagccttgcgacggatctcatcgcttga

SEQ ID NO: 225678 - DNA, 50 bp, Artificial
  Synthetic oligonucleotide
aagccgccaaagatgtgcgcaggtcgacgtaagtagcgcgtgagcaccac

SEQ ID NO: 225679 - DNA, 50 bp, Artificial
  Synthetic oligonucleotide
aacttgctgaccccaacaagaacacagcccgggtcgattggctgcgcgtc

SEQ ID NO: 225680 - DNA, 55 bp, Artificial
  Synthetic oligonucleotide
ctattttatgcagcgtgctcactatcgatccgtgcgcgattgtactcaagatatg

SEQ ID NO: 225681 - DNA, 50 bp, Artificial
  Synthetic oligonucleotide
aacttcagatctcagcgcagtgaacccaccggaggcgcacttgcaggcaa

SEQ ID NO: 225682 - DNA, 50 bp, Artificial
  Synthetic oligonucleotide
aactcggaccgtcctgcttgattcgtcgactgagcgcggcatccccaggc

SEQ ID NO: 225683 - DNA, 50 bp, Artificial
  Synthetic oligonucleotide
aacggtgtttcccttgaaccattgtggtggctgtaggggagccaggcgta

SEQ ID NO: 225684 - DNA, 50 bp, Artificial
  Synthetic oligonucleotide
aacgacagtgcgtaggtggtgctccgtaggagtgcccgcagcgtagcgaa

SEQ ID NO: 225685 - DNA, 50 bp, Artificial
  Synthetic oligonucleotide
aaccctgcgcacgaaaggcaaccttgtcccagcgagcagacaactgctcc

SEQ ID NO: 225686 - DNA, 50 bp, Artificial
  Synthetic oligonucleotide
aacaggggtgccgtatgtttctgattgggcggaaggcactgccttgccta

SEQ ID NO: 225687 - DNA, 50 bp, Artificial
  Synthetic oligonucleotide
aacacgtcgcatcgcacgtcactcgaaccacgcatcccgcattttggctc

SEQ ID NO: 225688 - DNA, 50 bp, Artificial
  Synthetic oligonucleotide
aaatggcaaccgcgcacttcggaacgcacaagcagatcacggagggcgaa

SEQ ID NO: 225689 - DNA, 50 bp, Artificial
  Synthetic oligonucleotide
aaatccgtacggtctccgggaccgcatacttcgcccgaaacgctgcgagc

SEQ ID NO: 225690 - DNA, 50 bp, Artificial
  Synthetic oligonucleotide
aaaggtcccgaacgcggcaactgcgggcaaggctaaaacgagcagcgtgc

SEQ ID NO: 225691 - DNA, 55 bp, Artificial
  Synthetic oligonucleotide
acatcgcactctagcgcttcgcgaatctgtacgtcggtgaactgttgcatcccgg

SEQ ID NO: 225692 - DNA, 50 bp, Artificial
  Synthetic oligonucleotide
aaactcagtcaacgactcagcacgacgcgcgcctagttggcatcgccctt

SEQ ID NO: 225693 - DNA, 50 bp, Artificial
  Synthetic oligonucleotide
aaacgctgccggaaaatcaggcactgccgacatgtcgccccacagacgct

SEQ ID NO: 225694 - DNA, 50 bp, Artificial
  Synthetic oligonucleotide
accccactgataagcgactctacccgccaagaaaggaccgcgcgcactgg

SEQ ID NO: 225695 - DNA, 50 bp, Artificial
  Synthetic oligonucleotide
acccagtgccctaactcacgctccccgcgctgataaaagcgccgaagtgt

SEQ ID NO: 225696 - DNA, 50 bp, Artificial
  Synthetic oligonucleotide
acccaacgagtgcattgctcaagaaccggcagcaacccgtgacgcctcac

SEQ ID NO: 225697 - DNA, 50 bp, Artificial
  Synthetic oligonucleotide
accagccagaagcgctccctcgtgagcagcggtgtcagtaccacgcgcca

SEQ ID NO: 225698 - DNA, 50 bp, Artificial
  Synthetic oligonucleotide
accagacggtccggagcataagcgattgccgaaccacccattgggtccgc

SEQ ID NO: 225699 - DNA, 50 bp, Artificial
  Synthetic oligonucleotide
acattgggatggggccgagtaccacagctccgggtctcgcgcgtgtgtat

SEQ ID NO: 225700 - DNA, 50 bp, Artificial
  Synthetic oligonucleotide
acatcaggcgccattcgacctcatcgcagagccggccgtcccacttgtac

SEQ ID NO: 225701 - DNA, 50 bp, Artificial
  Synthetic oligonucleotide
acagcccccattctcgcacgcaacgcttgcccatcgaacccgtcgcgcag

SEQ ID NO: 225702 - DNA, 55 bp, Artificial
  Synthetic oligonucleotide
gcgataagttcgcggcaaattcattaccaaagatccgtgccacttcaggttcact

SEQ ID NO: 225703 - DNA, 50 bp, Artificial
  Synthetic oligonucleotide
acagatggatccgagctaccgcctgattcgccgtgcaacgagccagctga

SEQ ID NO: 225704 - DNA, 50 bp, Artificial
  Synthetic oligonucleotide
acagaacaaagctctcgaatgacctagccgcaccctacacggcgcccgct

SEQ ID NO: 225705 - DNA, 50 bp, Artificial
  Synthetic oligonucleotide
acacggtcacgtcgccctgaaacgcttggcgattgatgaacgctgcctgg

SEQ ID NO: 225706 - DNA, 50 bp, Artificial
  Synthetic oligonucleotide
acaacccagcccgaacagccaggttgtgatcctccgccgtgacgaagcag

SEQ ID NO: 225707 - DNA, 50 bp, Artificial
  Synthetic oligonucleotide
aatttctgcccggcctccaagcgataaggccctttgcgatccgggtcctc

SEQ ID NO: 225708 - DNA, 50 bp, Artificial
  Synthetic oligonucleotide
aatcgtatggcgcgcatcggcggatccactggcttgagtgttacccacga

SEQ ID NO: 225709 - DNA, 50 bp, Artificial
  Synthetic oligonucleotide
aatccactccatttccgggcgataggtcgcggcctcatcactcaccagga

SEQ ID NO: 225710 - DNA, 50 bp, Artificial
  Synthetic oligonucleotide
aatacgcgaggcagcgttagcatctctggcgcaatcggcagctccgcata

SEQ ID NO: 225711 - DNA, 50 bp, Artificial
  Synthetic oligonucleotide
aagtgcgcacaaggtccaaagcgtgatgatccccggccgtgtgccacaag

SEQ ID NO: 225712 - DNA, 55 bp, Artificial
  Synthetic oligonucleotide
gcgccgtttctgggactatggttcacgcaagaatggcgattggggagcgcaccac

SEQ ID NO: 225713 - DNA, 55 bp, Artificial
  Synthetic oligonucleotide
gctgttggatggggtgcggcgtatactcggaaggggcgttcgcacttgtgccttg

SEQ ID NO: 225714 - DNA, 55 bp, Artificial
  Synthetic oligonucleotide
ggacatcctgagtatgcgaagtggatcaagcaacccgttcgcgagggctggagtt

SEQ ID NO: 225715 - DNA, 56 bp, Artificial
  Synthetic oligonucleotide
agcgtcatccggcttctgttcacccccgcatggaaaagcccacctccgaaccttca

SEQ ID NO: 225716 - DNA, 60 bp, Artificial
  Synthetic oligonucleotide
agcaagcaatcccttcacgtgatcgaacgtatgcccatggtcgattccgacgacggcaaa

SEQ ID NO: 225717 - DNA, 56 bp, Artificial
  Synthetic oligonucleotide
gaacgcagcgtttaacgtccgacgcctagcccctctagtgatcgcgaaatttcctg

SEQ ID NO: 225718 - DNA, 55 bp, Artificial
  Synthetic oligonucleotide
ggcctaaaccacgatcatgtcaacctgttggacgtcaggccttggcaaccgcgtc

SEQ ID NO: 225719 - DNA, 55 bp, Artificial
  Synthetic oligonucleotide
tgagcgctttctactgcataaatcgggaaacgggaatcatgaagcttgaagggca

SEQ ID NO: 225720 - DNA, 55 bp, Artificial
  Synthetic oligonucleotide
ggccggcgcgtcgttctttccgacatcaataccgggacattgaaaggcgggcatc

SEQ ID NO: 225721 - DNA, 55 bp, Artificial
  Synthetic oligonucleotide
ggccggcatcaaggcttcaacggctccaacaaggatggaatagttctatcgccct

SEQ ID NO: 225722 - DNA, 53 bp, Artificial
  Synthetic oligonucleotide
ggccgatcgaaagagggcctaagccactgatcggggttcttgaatttaccttt

SEQ ID NO: 225723 - DNA, 55 bp, Artificial
  Synthetic oligonucleotide
ggccgaatgtaccgccgctgcctgagttccgatatttctcgcatcttgcgcggcg

SEQ ID NO: 225724 - DNA, 55 bp, Artificial
  Synthetic oligonucleotide
ggccgaaagtctcgaacgcagccccagaccgtttctcaagacacttcacgaaacc

SEQ ID NO: 225725 - DNA, 55 bp, Artificial
  Synthetic oligonucleotide
ggcccacagcttgaagcgagccgaccaatcgttctgcattgtctgcgggaacgat

SEQ ID NO: 225726 - DNA, 55 bp, Artificial
  Synthetic oligonucleotide
ggccagggttagatgaccttgatttgctcgccgacagcagttcaccgctcagtac

SEQ ID NO: 225727 - DNA, 55 bp, Artificial
  Synthetic oligonucleotide
ggccacacggtgagcctgctgttgggtgcacagctccacggagaagacttctcag

SEQ ID NO: 225728 - DNA, 60 bp, Artificial
  Synthetic oligonucleotide
cgacatgctcatgcggactgacatcgcccagttgtgggagttgagagacgatcgctatgc

SEQ ID NO: 225729 - DNA, 55 bp, Artificial
  Synthetic oligonucleotide
gctggagcaattcgcactcggtattgcgtaaactgccattgagccagcttaggag

SEQ ID NO: 225730 - DNA, 55 bp, Artificial
  Synthetic oligonucleotide
gctgatgtaacgcatgtgaattcctcccaacggctcgcacttggccagccgtgga

SEQ ID NO: 225731 - DNA, 55 bp, Artificial
  Synthetic oligonucleotide
gctgacaggcgccggtgcccgcttctcaatcctcgagaaaatatttcgctcacgg

SEQ ID NO: 225732 - DNA, 55 bp, Artificial
  Synthetic oligonucleotide
tgccactcaagcgcagcatcccagacgtccattcgatatcgctgaggctgagtcc

SEQ ID NO: 225733 - DNA, 55 bp, Artificial
  Synthetic oligonucleotide
gctcttggaggcacattctacgaaccaacggttctgactggtgcaacccaggcca

SEQ ID NO: 225734 - DNA, 55 bp, Artificial
  Synthetic oligonucleotide
gctctcggcaacgtgcatgccggcttgttctccaatgacgaccagctatccgccc

SEQ ID NO: 225735 - DNA, 55 bp, Artificial
  Synthetic oligonucleotide
gctctcctgggaccaatcattgcttcagctggactactggctggtcatgaaggga

SEQ ID NO: 225736 - DNA, 55 bp, Artificial
  Synthetic oligonucleotide
gctctcatcgggtgcgagggtattacagtcatccgtcgggagggcgacctctgtc

SEQ ID NO: 225737 - DNA, 55 bp, Artificial
  Synthetic oligonucleotide
gctctcaaacccggcgctcgatgtatctgtgggcttatcgttcagccgaacgcac

SEQ ID NO: 225738 - DNA, 55 bp, Artificial
  Synthetic oligonucleotide
gctctaccgatgtctctgtggccgaccagaagtttctaaatgtcgcgaagtcaaa

SEQ ID NO: 225739 - DNA, 60 bp, Artificial
  Synthetic oligonucleotide
cgacgtcagcactcgccgaaaacacgcgtgcgacgtcacggctgtcctaattggcggata

SEQ ID NO: 225740 - DNA, 55 bp, Artificial
  Synthetic oligonucleotide
gctcgcggagttggtacaagttcgcgaccattcatggtaaatagctcgtcgcgga

SEQ ID NO: 225741 - DNA, 55 bp, Artificial
  Synthetic oligonucleotide
gctcgcgcaagcttcgcaccctattgtcattacggggccaaaaggtctcggactc

SEQ ID NO: 225742 - DNA, 55 bp, Artificial
  Synthetic oligonucleotide
gctcgcagcgtgggttaactttgcgaggacaggcaatccttcgctccccgatctt

SEQ ID NO: 225743 - DNA, 55 bp, Artificial
  Synthetic oligonucleotide
gctcgacccgttcccttttgggtatacatcttagcccctgtatacgcaatctcgg

SEQ ID NO: 225744 - DNA, 55 bp, Artificial
  Synthetic oligonucleotide
gctcccgctctcgtatgtttaaatcgtggacccacgggagtgtgtttaggttagc

SEQ ID NO: 225745 - DNA, 55 bp, Artificial
  Synthetic oligonucleotide
gctcaatcgatgacgcaagaattgccatcttctgactttgatgtcaagttgggtt

SEQ ID NO: 225746 - DNA, 55 bp, Artificial
  Synthetic oligonucleotide
gctcaagattaacgctcctacctcgcagtcgatccactaacgtctgctcgaaagg

SEQ ID NO: 225747 - DNA, 55 bp, Artificial
  Synthetic oligonucleotide
gctattcgccacctagtcagacttatgctccgtcgtcgcttgggagccccttcag

SEQ ID NO: 225748 - DNA, 55 bp, Artificial
  Synthetic oligonucleotide
gctacgagctgcttttggtctggcctgtactgcaatccatgatgtacgaacctga

SEQ ID NO: 225749 - DNA, 51 bp, Artificial
  Synthetic oligonucleotide
gcgttttcgccagaggctgcccggttagggctaacgggtacggtttactcg

SEQ ID NO: 225750 - DNA, 57 bp, Artificial
  Synthetic oligonucleotide
cgagaaggtcttcggagttctgtctccgggatgctaccacgtcaccccgatctacaa

SEQ ID NO: 225751 - DNA, 55 bp, Artificial
  Synthetic oligonucleotide
gcgtgtgattgcgcttacacccacgcgcaaacgtgatgtcgcttttcgcgcctgc

SEQ ID NO: 225752 - DNA, 55 bp, Artificial
  Synthetic oligonucleotide
gcgtgccggaagttttcttttaggctggtgacggcatggtagattgcgattcaga

SEQ ID NO: 225753 - DNA, 55 bp, Artificial
  Synthetic oligonucleotide
gcgtgatcgtaccggtttgcaagcttagcgtggaacgagatgttagctgcgacgc

SEQ ID NO: 225754 - DNA, 54 bp, Artificial
  Synthetic oligonucleotide
gcgtccgttggaccaaacggtacggaactttcatgagttgcgggttcacttcgc

SEQ ID NO: 225755 - DNA, 55 bp, Artificial
  Synthetic oligonucleotide
gcgtcaagatatgcgggatgcaacggcgagtgtctggggatgcgctcccctgtca

SEQ ID NO: 225756 - DNA, 55 bp, Artificial
  Synthetic oligonucleotide
ggagcgagatcggatatatcgccgacagaacttcgtcctgcttgctcgaactgtc

SEQ ID NO: 225757 - DNA, 55 bp, Artificial
  Synthetic oligonucleotide
ggagcgaaggtattgcttacatgggagagtgcacgatcgttcctcgccagctccg

SEQ ID NO: 225758 - DNA, 55 bp, Artificial
  Synthetic oligonucleotide
ggagccgtttgctataccgccatcctattttcgccagtgcatagcaatagcgtcg

SEQ ID NO: 225759 - DNA, 55 bp, Artificial
  Synthetic oligonucleotide
tgatcgggtcttagcttatgtcggtgaccccgagacaggccaggcactcgccgga

SEQ ID NO: 225760 - DNA, 55 bp, Artificial
  Synthetic oligonucleotide
ggactatatcctcgacatgtaagatacaaacctgatctcgcaagttgcacacaat

SEQ ID NO: 225761 - DNA, 55 bp, Artificial
  Synthetic oligonucleotide
cgaaagtgacgtaagcgttcgcctgagtagccccgggttatagacgtgcccagga

SEQ ID NO: 225762 - DNA, 55 bp, Artificial
  Synthetic oligonucleotide
ggacgtcggcgcgattggagcgctgtttcagcgtcctgtggaactgatattcgcg

SEQ ID NO: 225763 - DNA, 55 bp, Artificial
  Synthetic oligonucleotide
ggacggaaccccgcctcagttgattggcggttccgcatcgatgtcactgggcggc

SEQ ID NO: 225764 - DNA, 55 bp, Artificial
  Synthetic oligonucleotide
ggacgctgaatttccgtggcatactagtatatcagttttgttgccgtgccaagac

SEQ ID NO: 225765 - DNA, 55 bp, Artificial
  Synthetic oligonucleotide
ggacgcgttcggaacagctaacctttggccggatccattccaatcgcccgatcaa

SEQ ID NO: 225766 - DNA, 54 bp, Artificial
  Synthetic oligonucleotide
ggacgaacaagccgggaacatttcgtaattccggtgggccacgtctctgcccca

SEQ ID NO: 225767 - DNA, 55 bp, Artificial
  Synthetic oligonucleotide
ggacacatcctacaaacgcgtggactgcattccccgagcggaagcggcaaatcgc

SEQ ID NO: 225768 - DNA, 55 bp, Artificial
  Synthetic oligonucleotide
ggaatgcgctgggtgttgtcacattaaccggcccgctattgcctacgtttcgggt

SEQ ID NO: 225769 - DNA, 55 bp, Artificial
  Synthetic oligonucleotide
ggaagcgcccttttgtgcacgagctgggttcagatttcttacgcccgagatgggc

SEQ ID NO: 225770 - DNA, 55 bp, Artificial
  Synthetic oligonucleotide
ggaagaaccgctcatctttcaaactcctggcattgataggacagagcgcgacgcc

SEQ ID NO: 225771 - DNA, 55 bp, Artificial
  Synthetic oligonucleotide
ggaactgtcgaagtcgatctggctagtgacgccgctatcgcctggcagcgagaag

SEQ ID NO: 225772 - DNA, 55 bp, Artificial
  Synthetic oligonucleotide
cgcagggccgattcatctcggattctaacccccggcaagggttcacagggttcaa

SEQ ID NO: 225773 - DNA, 55 bp, Artificial
  Synthetic oligonucleotide
ggaaccttgtcgtcaccgaaacgaggttgtcatcaagccactgggccattgcttt

SEQ ID NO: 225774 - DNA, 55 bp, Artificial
  Synthetic oligonucleotide
ggaaagggctaccgcatcgagattggatcgttcagcaaactacgggaggactgca

SEQ ID NO: 225775 - DNA, 55 bp, Artificial
  Synthetic oligonucleotide
gctttcatcgcatcgagccacggtccaaacgacttcttgtcaggtgtcgtgccgc

SEQ ID NO: 225776 - DNA, 55 bp, Artificial
  Synthetic oligonucleotide
gcttgcggggtctggagcaattcaggtcctagtgaatagactttgacggtcacgt

SEQ ID NO: 225777 - DNA, 55 bp, Artificial
  Synthetic oligonucleotide
gcttcgttatacttgtcttcccattgaccggacttgcggttgtagacgcggttgg

SEQ ID NO: 225778 - DNA, 55 bp, Artificial
  Synthetic oligonucleotide
tgcaaacgtgtaaggcttggcatcacccatcgttccgacgctgatgacaccaggc

SEQ ID NO: 225779 - DNA, 55 bp, Artificial
  Synthetic oligonucleotide
tgcagatacgttggttgaggcgtatcgtcgagcattgtcatgtgatccgatttcc

SEQ ID NO: 225780 - DNA, 55 bp, Artificial
  Synthetic oligonucleotide
gcttaccatcgggattcagcattatctctactacgttgctatcgtccaaagcaac

SEQ ID NO: 225781 - DNA, 55 bp, Artificial
  Synthetic oligonucleotide
gctgtcaattcccacaaatgccctgcgtgtccggacttccacgcgcgaggcggaa

SEQ ID NO: 225782 - DNA, 55 bp, Artificial
  Synthetic oligonucleotide
gctgggaacgggaacgcgcatacggcccaggttacttcggcggtggaggctatta

SEQ ID NO: 225783 - DNA, 60 bp, Artificial
  Synthetic oligonucleotide
cctggctagatatgtcgagacacatactgacataaagggaacccgctactggcgggattc

SEQ ID NO: 225784 - DNA, 55 bp, Artificial
  Synthetic oligonucleotide
gctggctgggctacccttctgatggttgcgacaaatctcgacttagctggcccga

SEQ ID NO: 225785 - DNA, 55 bp, Artificial
  Synthetic oligonucleotide
gctggatccgaccgtttccgccaagtcgctcatcaaaccgctacccgcaggcact

SEQ ID NO: 225786 - DNA, 55 bp, Artificial
  Synthetic oligonucleotide
cccacactgtctgcagcgtagagcccaacgactccgagtacactgaaagcgcggt

SEQ ID NO: 225787 - DNA, 51 bp, Artificial
  Synthetic oligonucleotide
cccacgaaaacgtggcgtatcccgctctaggggttgaacgtaacggccgaa

SEQ ID NO: 225788 - DNA, 55 bp, Artificial
  Synthetic oligonucleotide
agcgacggtgagctaaaaacgtgttgggctaagccgcgggcgcgattgaggttct

SEQ ID NO: 225789 - DNA, 55 bp, Artificial
  Synthetic oligonucleotide
cccattcgtgtatctggcaatcgcaatcgcgcttgcacccgaagagcctgactgg

SEQ ID NO: 225790 - DNA, 55 bp, Artificial
  Synthetic oligonucleotide
agccttgtggccgagagcgcaagccaaccaactctttccgacacccgaggggccg

SEQ ID NO: 225791 - DNA, 55 bp, Artificial
  Synthetic oligonucleotide
ccccgcaggagggatcaaaacgataggaggatacatgatgctctcagatattcga

SEQ ID NO: 225792 - DNA, 54 bp, Artificial
  Synthetic oligonucleotide
ccccgcatggaaaagcccacctccgaaccttcataaaccacaactaattcaggc

SEQ ID NO: 225793 - DNA, 55 bp, Artificial
  Synthetic oligonucleotide
ccccgctcatttcagcctagtgaatcgcgaaccaccacgtcgcaatgcccaggaa

SEQ ID NO: 225794 - DNA, 59 bp, Artificial
  Synthetic oligonucleotide
cgcgaagctacaccgcagctgaagctttcagggcgacacctttcgtcacgaacgcccaa

SEQ ID NO: 225795 - DNA, 55 bp, Artificial
  Synthetic oligonucleotide
agcatggattgacccagcgtgaactggcttcgagatcgaatgtgtcctacggatc

SEQ ID NO: 225796 - DNA, 54 bp, Artificial
  Synthetic oligonucleotide
ccccgcttcggtgtcttgttccgcaactgtagccccaagtccctgtaaatgcgg

SEQ ID NO: 225797 - DNA, 55 bp, Artificial
  Synthetic oligonucleotide
ccccggcgttctcaacaacaccaaactcgcgacgccatctgtagaccaatgaccg

SEQ ID NO: 225798 - DNA, 53 bp, Artificial
  Synthetic oligonucleotide
ccccggtaaacgccgaatgcgccaccccattcccggcattcttccccataggc

SEQ ID NO: 225799 - DNA, 55 bp, Artificial
  Synthetic oligonucleotide
agcagacggcactctcgaaaggacgctggtccgcgcattgctcgctgggtacgaa

SEQ ID NO: 225800 - DNA, 55 bp, Artificial
  Synthetic oligonucleotide
agcaatctcgttcgcctgcctaagatcactctcgacaaagatctcagcgtcacac

SEQ ID NO: 225801 - DNA, 55 bp, Artificial
  Synthetic oligonucleotide
agcaatagtgacggtccatcgtcaaccggaacactcttgatgaagtccctgcttc

SEQ ID NO: 225802 - DNA, 55 bp, Artificial
  Synthetic oligonucleotide
ccccggtcgacctgccattccttgagagagttgaacgccacttagttggcctccc

SEQ ID NO: 225803 - DNA, 55 bp, Artificial
  Synthetic oligonucleotide
ccccggtttcatagcccgcaggcgatgcaagattggcagtgcgacggatataggc

SEQ ID NO: 225804 - DNA, 55 bp, Artificial
  Synthetic oligonucleotide
ccccgtgcctatggtcagcacagcccatctcgacacgtcgctcataaaagggatc

SEQ ID NO: 225805 - DNA, 57 bp, Artificial
  Synthetic oligonucleotide
cctcccaaggttctgtcattgcctacgcaattccaaggacaaactgcttcacgcttt

SEQ ID NO: 225806 - DNA, 55 bp, Artificial
  Synthetic oligonucleotide
cccctacatgcggttagtagatcaaatttgccttaaaagtgcatgtgcgagattt

SEQ ID NO: 225807 - DNA, 54 bp, Artificial
  Synthetic oligonucleotide
cccctagtaaaatgaagctccccacctgttcttttcgccttcggttcagcaggc

SEQ ID NO: 225808 - DNA, 55 bp, Artificial
  Synthetic oligonucleotide
agagctccgggtcagtcgtgtggattaagatcgagtgacgcaagagcatctccct

SEQ ID NO: 225809 - DNA, 55 bp, Artificial
  Synthetic oligonucleotide
agactttacacatgacgaggactcagagatcagtttgaccctcgcttacgttgca

SEQ ID NO: 225810 - DNA, 55 bp, Artificial
  Synthetic oligonucleotide
cccgacccgatcatcaaatgggatagccaattacctccgcccgacgctggaaccc

SEQ ID NO: 225811 - DNA, 55 bp, Artificial
  Synthetic oligonucleotide
agaactgctgtgcgaacttccggagcgtatccagatacacaagatagtggtccca

SEQ ID NO: 225812 - DNA, 55 bp, Artificial
  Synthetic oligonucleotide
agtgaattcgtcatgtttcggagggtgctgcgtcgttctgtgggacgtcatcgca

SEQ ID NO: 225813 - DNA, 55 bp, Artificial
  Synthetic oligonucleotide
agtcataaataaggtttctccaactgtctccaccgctcgagccctgaaccgctcg

SEQ ID NO: 225814 - DNA, 53 bp, Artificial
  Synthetic oligonucleotide
agtcaagggtcccgtaagggaaagcgtcatttcgacgggcggatttcaattgc

SEQ ID NO: 225815 - DNA, 55 bp, Artificial
  Synthetic oligonucleotide
aggtgctgttccggctagtgtcaagcaatgtcttcgggaaagtgtgaagttttcc

SEQ ID NO: 225816 - DNA, 56 bp, Artificial
  Synthetic oligonucleotide
cgcgatcgggccatgactttactcgttacacaaaagccgtgccgagcctaaaccac

SEQ ID NO: 225817 - DNA, 55 bp, Artificial
  Synthetic oligonucleotide
aggtcggcctcttaagcaactttgcgctgtacagcggtgcattgtggcaacccgc

SEQ ID NO: 225818 - DNA, 55 bp, Artificial
  Synthetic oligonucleotide
agggtcaccgccggtaagacgagatgcgaccatgttgttccgcccgaactcggca

SEQ ID NO: 225819 - DNA, 55 bp, Artificial
  Synthetic oligonucleotide
ccagattgagaaagtacctgacctgattgatgtccatggattggtctcgcttggc

SEQ ID NO: 225820 - DNA, 55 bp, Artificial
  Synthetic oligonucleotide
ccagcggatgtgttccatccatgtgcggctgtggcgtcacgttgtaacgaccacc

SEQ ID NO: 225821 - DNA, 55 bp, Artificial
  Synthetic oligonucleotide
ccagcggttctctcgtataccaaccctggcgagactccgagcccgcgtaagcatc

SEQ ID NO: 225822 - DNA, 55 bp, Artificial
  Synthetic oligonucleotide
ccagctaatatgatcatgctctactctgcccacgcgtgaatattttatgttcgag

SEQ ID NO: 225823 - DNA, 55 bp, Artificial
  Synthetic oligonucleotide
ccagctgccgcggcccgaacaatttcgggacatggcctctttcgttgcgacgaga

SEQ ID NO: 225824 - DNA, 55 bp, Artificial
  Synthetic oligonucleotide
agggctatcaggcagccgtgcggagtatccggctgagaataggcttcggctgtcg

SEQ ID NO: 225825 - DNA, 55 bp, Artificial
  Synthetic oligonucleotide
agggatcgtaccagcgaagggttttctcgcctgccaaactgtcgagattgatcgc

SEQ ID NO: 225826 - DNA, 55 bp, Artificial
  Synthetic oligonucleotide
ccatcaaagcgtgccaaccagaccataatgcggcttacagcttcgtaatacctct

SEQ ID NO: 225827 - DNA, 55 bp, Artificial
  Synthetic oligonucleotide
ggggtcatgttcaagccgtttgacgcgccgtaaaggctaagttgggatacgagcc

SEQ ID NO: 225828 - DNA, 59 bp, Artificial
  Synthetic oligonucleotide
cgctaactaaatagtcggaatgacatgggagatcatccatactcgttacgtacggtata

SEQ ID NO: 225829 - DNA, 55 bp, Artificial
  Synthetic oligonucleotide
agggaccgggaatgctcgcctctcgcagggctgtgagacaggtgcgaatttcatc

SEQ ID NO: 225830 - DNA, 55 bp, Artificial
  Synthetic oligonucleotide
aggcaaacggcaaggctaggggcgactgaaacgattaaattttgatgacgcaagt

SEQ ID NO: 225831 - DNA, 55 bp, Artificial
  Synthetic oligonucleotide
ccatccagattgacgctgttcccaagttgattgtcgcgccgcaggtatgagtgaa

SEQ ID NO: 225832 - DNA, 55 bp, Artificial
  Synthetic oligonucleotide
aggagtaggcgggttcgtgatcactctcaattgcgatctaggttccgcacaccta

SEQ ID NO: 225833 - DNA, 55 bp, Artificial
  Synthetic oligonucleotide
agctttcgacgtttgaggagtccctcgataaacggagattgagcttgctggctgt

SEQ ID NO: 225834 - DNA, 55 bp, Artificial
  Synthetic oligonucleotide
agcttatgcggagtatctgaagtgcgaaacgctaccaaacttatagtatttggcg

SEQ ID NO: 225835 - DNA, 55 bp, Artificial
  Synthetic oligonucleotide
agctcagaacgacaacggccataaggatttgggtagacccgatgtcataggttct

SEQ ID NO: 225836 - DNA, 55 bp, Artificial
  Synthetic oligonucleotide
ccatggggtcactattcgccactcctatgtcctgatctaaccaccatcgcataac

SEQ ID NO: 225837 - DNA, 55 bp, Artificial
  Synthetic oligonucleotide
agcgtcgtattacgtcccatggaaatgagatcatttgcagaattacggcatacac

SEQ ID NO: 225838 - DNA, 55 bp, Artificial
  Synthetic oligonucleotide
cccaaaggcggactgtctggtgcgagacagttatcccgcgcgccgccagtaagtc

SEQ ID NO: 225839 - DNA, 60 bp, Artificial
  Synthetic oligonucleotide
ccgttacaccattcacattccacattggcaagcgttgacgaactagcgcaacgaggtctg

SEQ ID NO: 225840 - DNA, 55 bp, Artificial
  Synthetic oligonucleotide
acggcacaagatgcaatcacaacgctcctgattttgcgtcgatgctttgatcaag

SEQ ID NO: 225841 - DNA, 55 bp, Artificial
  Synthetic oligonucleotide
cccttgcatgccgctctacgctctaggaccgcttagaccacagaccccgaccgaa

SEQ ID NO: 225842 - DNA, 55 bp, Artificial
  Synthetic oligonucleotide
cccttggcgtctggtcgattattggaacttgctgaaggaggcggatctcgatgac

SEQ ID NO: 225843 - DNA, 55 bp, Artificial
  Synthetic oligonucleotide
acgctcgaagtgataaggcatagcgatctcaaagactgtaattccgcgtttcgaa

SEQ ID NO: 225844 - DNA, 55 bp, Artificial
  Synthetic oligonucleotide
acgctccatcaaaacttcgtctgaccccatcagcccatacgtcgtgctacgaaaa

SEQ ID NO: 225845 - DNA, 55 bp, Artificial
  Synthetic oligonucleotide
acgcctttcgtgcccgacgcatgggtagacgagacctacagggatgacgcggaca

SEQ ID NO: 225846 - DNA, 55 bp, Artificial
  Synthetic oligonucleotide
ccgaacccgggcactacaggattcgaacacatgagaactggtttctagattggag

SEQ ID NO: 225847 - DNA, 55 bp, Artificial
  Synthetic oligonucleotide
ccgaacgtacaggatcggtccttcagatccacgaaatcatgcgcacgagccccta

SEQ ID NO: 225848 - DNA, 55 bp, Artificial
  Synthetic oligonucleotide
acgcaatgcggtcggtcgacacgccgctactggcattctgggcattactggcgga

SEQ ID NO: 225849 - DNA, 55 bp, Artificial
  Synthetic oligonucleotide
ccgaactgggctgcaacatgccccatcgacatataggtctcgaacgagatgttcc

SEQ ID NO: 225850 - DNA, 56 bp, Artificial
  Synthetic oligonucleotide
cgcttagaccaacggcggtagaggcaacgtcggtcgaagagcgcgaaagaggagac

SEQ ID NO: 225851 - DNA, 55 bp, Artificial
  Synthetic oligonucleotide
ccgaagatgacgaacgcaagcctataccggcagcgaaacagttccatgaaggtcg

SEQ ID NO: 225852 - DNA, 54 bp, Artificial
  Synthetic oligonucleotide
ccgaagcgcgataccggcttgtttcgttatcaatctggtggccggaaaaccaaa

SEQ ID NO: 225853 - DNA, 55 bp, Artificial
  Synthetic oligonucleotide
acgacactccagattgagctgaggtcgcgcgataataactgtgcggatgtcaagc

SEQ ID NO: 225854 - DNA, 55 bp, Artificial
  Synthetic oligonucleotide
ccgaatgtcgatattgtccgaaatgccggcaagggtttctattcctttctgatgc

SEQ ID NO: 225855 - DNA, 55 bp, Artificial
  Synthetic oligonucleotide
ccgacagaaagctcatccaggaaacgacaactagggaatgaaacatggcgccgat

SEQ ID NO: 225856 - DNA, 55 bp, Artificial
  Synthetic oligonucleotide
ccgacatcactgttagcaggggatcgcacggatccaccccatacaggcccaagct

SEQ ID NO: 225857 - DNA, 55 bp, Artificial
  Synthetic oligonucleotide
acctgagacgggggaacctgcgcggaactcggatgcatgcgccatcggcatggac

SEQ ID NO: 225858 - DNA, 55 bp, Artificial
  Synthetic oligonucleotide
ccgactgcctcatctcgttttcccagcacagtctccacggcacccgaggacccat

SEQ ID NO: 225859 - DNA, 55 bp, Artificial
  Synthetic oligonucleotide
ccgagccacagacgtacgaggaggaattcgtgatctaatcacccgcatggggcgg

SEQ ID NO: 225860 - DNA, 55 bp, Artificial
  Synthetic oligonucleotide
ccgagcgatagcctttcgacgtatgcggttcatccacccaggtgccacgcgcgta

SEQ ID NO: 225861 - DNA, 56 bp, Artificial
  Synthetic oligonucleotide
ccgtcttagtaacaacaatgacctacccaagtgttatgccatacctcggccaaata

SEQ ID NO: 225862 - DNA, 55 bp, Artificial
  Synthetic oligonucleotide
ccgagctgtttacaagacgtgaagactggcagccccgaacttgcatcaagtgggg

SEQ ID NO: 225863 - DNA, 55 bp, Artificial
  Synthetic oligonucleotide
ccgaggaccatggaagtgttaaagtcggtgctgatatccctgaacgcgtgatggg

SEQ ID NO: 225864 - DNA, 55 bp, Artificial
  Synthetic oligonucleotide
ccgaggctcgcggcactctccatacccggcatggtaagatcgaacagagccaatg

SEQ ID NO: 225865 - DNA, 55 bp, Artificial
  Synthetic oligonucleotide
ccgagtttccgaactgtctaggcagacgtccgagtcatcatcgtaaacgggagaa

SEQ ID NO: 225866 - DNA, 55 bp, Artificial
  Synthetic oligonucleotide
ccgatagcttcttttcagcgccgaaacacgaaatcaccaatccctgcgatgcgtc

SEQ ID NO: 225867 - DNA, 55 bp, Artificial
  Synthetic oligonucleotide
cccgatccaaccggtcctaagcagatgccgattctctgtcgcaggttgttctccc

SEQ ID NO: 225868 - DNA, 55 bp, Artificial
  Synthetic oligonucleotide
acttccgaggttatcgcatcatcgtcccacgcgacggggtgttctctccgcgacc

SEQ ID NO: 225869 - DNA, 55 bp, Artificial
  Synthetic oligonucleotide
cccgatttgacaaatcctgcggacttgaaccttcggcgaatcctgcgtagaccgg

SEQ ID NO: 225870 - DNA, 55 bp, Artificial
  Synthetic oligonucleotide
cccgcagctctcccattggtgtctacttctaacggcagttgtttacatgcatgcc

SEQ ID NO: 225871 - DNA, 55 bp, Artificial
  Synthetic oligonucleotide
acttcaacgttgctcgaccggcgatcaagcttgtggacaagagataagcgcctag

SEQ ID NO: 225872 - DNA, 60 bp, Artificial
  Synthetic oligonucleotide
cgcttcttgcgaagctgacccatgtatcgcgtattcaggatgtcgcagaatgattgatca

SEQ ID NO: 225873 - DNA, 55 bp, Artificial
  Synthetic oligonucleotide
actgtgccatggcatgcaccgacttctctatcctgagaccgtctttaaatgtcac

SEQ ID NO: 225874 - DNA, 55 bp, Artificial
  Synthetic oligonucleotide
actattggtggaacaagtaacaggaagagtgcgttggagagagactatacagtgg

SEQ ID NO: 225875 - DNA, 55 bp, Artificial
  Synthetic oligonucleotide
cccgctgcgtgctggtcaaactgccggatggagagtttgccgtcatccagacgaa

SEQ ID NO: 225876 - DNA, 55 bp, Artificial
  Synthetic oligonucleotide
acgttgccagcgacacatgccgacatcatccgctcgttgctgaccgtcggctatc

SEQ ID NO: 225877 - DNA, 55 bp, Artificial
  Synthetic oligonucleotide
cccgggctggcgacgaaatgttgcggagcatcttggtggttggcgcgacatctct

SEQ ID NO: 225878 - DNA, 55 bp, Artificial
  Synthetic oligonucleotide
cccggtcaaacgggccgcgtcaacgcgcatggaaattagcgcttacgatgaaagt

SEQ ID NO: 225879 - DNA, 55 bp, Artificial
  Synthetic oligonucleotide
acgtgattggtttcccgtaacgccttaatctcttcaggatcgagtacgctgggcg

SEQ ID NO: 225880 - DNA, 54 bp, Artificial
  Synthetic oligonucleotide
acgtgaaggcccaagcgcccgaataggccgcggaccgcaaatttcgggatggaa

SEQ ID NO: 225881 - DNA, 55 bp, Artificial
  Synthetic oligonucleotide
acgtgaaatccacccctagattccgaagttcgagacctgttcttatactgcctga

SEQ ID NO: 225882 - DNA, 55 bp, Artificial
  Synthetic oligonucleotide
acgtccttcctcaagcaggtcgaagacgggcagaggttcgtcctgacgtcccatc

SEQ ID NO: 225883 - DNA, 54 bp, Artificial
  Synthetic oligonucleotide
ccgtcacttttaccaggaatacttcagcgtaccgacgaccttacgccgatcgcc

SEQ ID NO: 225884 - DNA, 55 bp, Artificial
  Synthetic oligonucleotide
cccgtaggtgccctgaacgccgatagagctatgacgactacccggaatcgacccc

SEQ ID NO: 225885 - DNA, 55 bp, Artificial
  Synthetic oligonucleotide
cccgtgttacggagattgttgtgtctaatatccttaaacgcattatgcgtgaaaa

SEQ ID NO: 225886 - DNA, 55 bp, Artificial
  Synthetic oligonucleotide
cccgtgttttgcagtctgacgaccaaccgcgcaatcgctagcacccaaatcaccc

SEQ ID NO: 225887 - DNA, 55 bp, Artificial
  Synthetic oligonucleotide
cccgttcgggttaagcgccaggaattttggactgcgctgttctccgcttgccaga

SEQ ID NO: 225888 - DNA, 55 bp, Artificial
  Synthetic oligonucleotide
acgtccacaaaactcgttatctgcttcgagctttacaattggcagcggtatcacc

SEQ ID NO: 225889 - DNA, 55 bp, Artificial
  Synthetic oligonucleotide
ccctacgcttgcgtggaaaagacaagcctacctatacaccaagtgtcgatgatgg

SEQ ID NO: 225890 - DNA, 55 bp, Artificial
  Synthetic oligonucleotide
ccctcttcgttgaggttccccgcaatgtaatcgttgccatttgtggtggagcgcg

SEQ ID NO: 225891 - DNA, 55 bp, Artificial
  Synthetic oligonucleotide
acggcccagggacaacggatcttccatggcaggcgagagcactcctcactcacag

SEQ ID NO: 225892 - DNA, 55 bp, Artificial
  Synthetic oligonucleotide
ccctgccttaagaggcctgagtgatcgcgcaatcattgtttgccggaacgtcacc

SEQ ID NO: 225893 - DNA, 55 bp, Artificial
  Synthetic oligonucleotide
acggcatagatcggagctaggtttgtctcttttcctgggactgctcccacttgcc

SEQ ID NO: 225894 - DNA, 58 bp, Artificial
  Synthetic oligonucleotide
cggacagttacgccgcatccgttccccatgtccgcatcacaggtaaccgcacttgcgg

SEQ ID NO: 225895 - DNA, 55 bp, Artificial
  Synthetic oligonucleotide
cccttgaagcgtacgaacttgataggcggataatcgatcttggggcgccaggcag

SEQ ID NO: 225896 - DNA, 55 bp, Artificial
  Synthetic oligonucleotide
cacaccagagtcacgtcgagtgagactgccatcaaccagcatcgatccctgaacg

SEQ ID NO: 225897 - DNA, 55 bp, Artificial
  Synthetic oligonucleotide
caattcgtagcacttggccggacagacacttgtgagggcatacagatttacgctt

SEQ ID NO: 225898 - DNA, 55 bp, Artificial
  Synthetic oligonucleotide
cagccctatcgtctctacatcgaacgcatcgatccatcgaagaacatggctcgct

SEQ ID NO: 225899 - DNA, 55 bp, Artificial
  Synthetic oligonucleotide
caatgcttccccggatggtgaaaccaccctggcatcgtcgtgcgcctccgatgcc

SEQ ID NO: 225900 - DNA, 55 bp, Artificial
  Synthetic oligonucleotide
caatgcgacaactatcatgttgctccacgaattttgcgatcgacgcgatgacaat

SEQ ID NO: 225901 - DNA, 55 bp, Artificial
  Synthetic oligonucleotide
caatcatctcgtcgcattgtcagtgaaccctattaatcggacgtcgttgcctggg

SEQ ID NO: 225902 - DNA, 55 bp, Artificial
  Synthetic oligonucleotide
cagcgtgtgacgtgagtggaccaaatcgtagccggctttcgcgatacgctttatc

SEQ ID NO: 225903 - DNA, 55 bp, Artificial
  Synthetic oligonucleotide
cagcgtgtgctcgctttgcgtgtcgttgccgaaaatcagatcgcgcgcccagtgc

SEQ ID NO: 225904 - DNA, 55 bp, Artificial
  Synthetic oligonucleotide
caaggtcttcaactattaaccatccaacagcgatctttccacgatctgtctcaag

SEQ ID NO: 225905 - DNA, 60 bp, Artificial
  Synthetic oligonucleotide
cggagccaaaggatcgtcgcctatgaggctcattccagcgtaggtgcgataaagggacga

SEQ ID NO: 225906 - DNA, 55 bp, Artificial
  Synthetic oligonucleotide
caaggcgctttggtatctaaagaccgagggacacatgacgcgttttgccgtcggt

SEQ ID NO: 225907 - DNA, 55 bp, Artificial
  Synthetic oligonucleotide
caaggcacggctggaatcatactcgaattatgccggctcaaaccctgaggtgcag

SEQ ID NO: 225908 - DNA, 55 bp, Artificial
  Synthetic oligonucleotide
caaggacaagcaatggcccatgaaacatggcggtgttccaatggcgttctcgcca

SEQ ID NO: 225909 - DNA, 55 bp, Artificial
  Synthetic oligonucleotide
caggagattggagccgatagccaaggcgcttaggccaaccaggacagtcttccgg

SEQ ID NO: 225910 - DNA, 55 bp, Artificial
  Synthetic oligonucleotide
caagctggccttatggtgcgcattgacgaaagtcgttgggtcaagacaggtgtgg

SEQ ID NO: 225911 - DNA, 55 bp, Artificial
  Synthetic oligonucleotide
caggatgttctgaatactcgaccagagagacctggcgctaccgcctggaaagtcc

SEQ ID NO: 225912 - DNA, 55 bp, Artificial
  Synthetic oligonucleotide
caagctcggtactcggcatagatgtcttgctgttcacgcaacactccactggggc

SEQ ID NO: 225913 - DNA, 55 bp, Artificial
  Synthetic oligonucleotide
caagcgcagaacgctgtcgttaagggacagtggcaagattaccgggttgcctcgc

SEQ ID NO: 225914 - DNA, 55 bp, Artificial
  Synthetic oligonucleotide
caagagttaccggccccataattataccctcctgcgctcgaattaagcacacgcg

SEQ ID NO: 225915 - DNA, 55 bp, Artificial
  Synthetic oligonucleotide
caacctgggaacgcgtcgccaacgaaatgacggcccctctcaccgctcacatacg

SEQ ID NO: 225916 - DNA, 60 bp, Artificial
  Synthetic oligonucleotide
cgggcgcgaagaccgtaataatgcttgcccatctctccgacagaccggcgcagaggtgat

SEQ ID NO: 225917 - DNA, 55 bp, Artificial
  Synthetic oligonucleotide
caaccggatggatctctcccatggcattgtcggactacggacggaacaccactgt

SEQ ID NO: 225918 - DNA, 55 bp, Artificial
  Synthetic oligonucleotide
cagggcagaattacatcgccgagtcgaatgacggatgttccctgcggatcatgct

SEQ ID NO: 225919 - DNA, 55 bp, Artificial
  Synthetic oligonucleotide
caaccacagcaggacggtatctggcccaggcgtttgctccgtgggcgtttcctgt

SEQ ID NO: 225920 - DNA, 55 bp, Artificial
  Synthetic oligonucleotide
caacatggtccgtggaaccggttgtagcgacaagcccggattgcagcgtcccagg

SEQ ID NO: 225921 - DNA, 55 bp, Artificial
  Synthetic oligonucleotide
cagggtcgtatgaaccatccgcgtagatgacgagtggagcagtcatggagctcgc

SEQ ID NO: 225922 - DNA, 55 bp, Artificial
  Synthetic oligonucleotide
cagggtttgagccggcataattcgagtatggctccagccgtgccttgttctcggg

SEQ ID NO: 225923 - DNA, 55 bp, Artificial
  Synthetic oligonucleotide
caaaaacgtaaggacccacgtcagcaggcagtgaattgagcgacaatcccaactc

SEQ ID NO: 225924 - DNA, 55 bp, Artificial
  Synthetic oligonucleotide
cactacaatacgctcattactcgtgaggggctcggttatcggattaacggccgca

SEQ ID NO: 225925 - DNA, 55 bp, Artificial
  Synthetic oligonucleotide
cacggggctccgctcacgagccttcgttgtattagccatatcgatgcggccttag

SEQ ID NO: 225926 - DNA, 55 bp, Artificial
  Synthetic oligonucleotide
cactagcctactggggtgacagtcatggatatgcagacctcgtttctggaccggc

SEQ ID NO: 225927 - DNA, 58 bp, Artificial
  Synthetic oligonucleotide
ccgatagtcggatgatgtttcggtctcgcagacatttttacctcccgacattgtccaa

SEQ ID NO: 225928 - DNA, 55 bp, Artificial
  Synthetic oligonucleotide
cactccgctgcatataccgctaggacgagcccagcttgtacgcacgaacgtggtc

SEQ ID NO: 225929 - DNA, 55 bp, Artificial
  Synthetic oligonucleotide
cactcgaaatgtatcgtcctgcattccgttccggctttatcctgcctgccgtagc

SEQ ID NO: 225930 - DNA, 55 bp, Artificial
  Synthetic oligonucleotide
cactgtacgcgaaaacctgttggtcttcgggcgctacttccggatgagcacgcgc

SEQ ID NO: 225931 - DNA, 55 bp, Artificial
  Synthetic oligonucleotide
cacggccgctgcaagaggaaagcacgaattccgcgaaatttatcgtcgcaccacc

SEQ ID NO: 225932 - DNA, 55 bp, Artificial
  Synthetic oligonucleotide
cacggagccctcgaatgaatgtccaatcgcgatctgtcaccctcatcggcgcacc

SEQ ID NO: 225933 - DNA, 55 bp, Artificial
  Synthetic oligonucleotide
cacttccgattcatcagacacttaagtccctttctccaggcgcggatcccattgg

SEQ ID NO: 225934 - DNA, 55 bp, Artificial
  Synthetic oligonucleotide
cacgatggcccaaagtcgttgtacaaggagtaaaacccatgccacgagcgttaaa

SEQ ID NO: 225935 - DNA, 55 bp, Artificial
  Synthetic oligonucleotide
caccttcccgaagggttctgcttgatatcaaatcgtggtctgtattggtactggt

SEQ ID NO: 225936 - DNA, 55 bp, Artificial
  Synthetic oligonucleotide
cacttgcagaaccgatacaacgccactttagggagcaggtgttcccctgtccatg

SEQ ID NO: 225937 - DNA, 55 bp, Artificial
  Synthetic oligonucleotide
cacctcttcgaattctggagagcaaagagcgccgtgtccgaaaacccctgatccg

SEQ ID NO: 225938 - DNA, 57 bp, Artificial
  Synthetic oligonucleotide
agatgcgtccgatgaagaccgaaacgggattacccagtaagcgccctatcgctccgc

SEQ ID NO: 225939 - DNA, 57 bp, Artificial
  Synthetic oligonucleotide
cgtacgacagcaatccggggtatgagggaggtatcccctactccgatatgatgaccc

SEQ ID NO: 225940 - DNA, 55 bp, Artificial
  Synthetic oligonucleotide
cactttcgcaacagttctccgaatgacgacagtctgttcaacctacgtagtcccc

SEQ ID NO: 225941 - DNA, 55 bp, Artificial
  Synthetic oligonucleotide
cacctatcgattacgggattgcagtgggattaacgcggatcggcagttggttgag

SEQ ID NO: 225942 - DNA, 55 bp, Artificial
  Synthetic oligonucleotide
caccgtgtggagtaaacactcgtgctgcttccttcattgacgcttttccttacgt

SEQ ID NO: 225943 - DNA, 55 bp, Artificial
  Synthetic oligonucleotide
cacccgttgagacccacaaagcgcgtcctggtgcgcccttataggtcgactgcgt

SEQ ID NO: 225944 - DNA, 55 bp, Artificial
  Synthetic oligonucleotide
cagacatgtagacgctggctgtatcgacagccggtatgggaaaccagaatcgcac

SEQ ID NO: 225945 - DNA, 55 bp, Artificial
  Synthetic oligonucleotide
cagacccgacttcaaccctcgtctgctaagcctcgatcatgaaggcgcgtcagac

SEQ ID NO: 225946 - DNA, 55 bp, Artificial
  Synthetic oligonucleotide
caccatccaagacaagacttcgtgccatttcgagactcccttgacctagcgttaa

SEQ ID NO: 225947 - DNA, 55 bp, Artificial
  Synthetic oligonucleotide
caccagactgtgcggatttgaccgtgggtaccatcccgtcttcgtcgtatccgac

SEQ ID NO: 225948 - DNA, 55 bp, Artificial
  Synthetic oligonucleotide
cagatgagttttgcggacgtcatccgcatttccgggttcgtgacgaagcgtgaag

SEQ ID NO: 225949 - DNA, 55 bp, Artificial
  Synthetic oligonucleotide
caccagacgagatcgtttatctggccgagtcgagcggtgcgacgttgatgatatg

SEQ ID NO: 225950 - DNA, 60 bp, Artificial
  Synthetic oligonucleotide
gatgaatctcgcaaacgccacatccgttcgtcgctgagacaaccacggcgattaactcgc

SEQ ID NO: 225951 - DNA, 55 bp, Artificial
  Synthetic oligonucleotide
cagcagtccgcttgacgtgttgaaccacagctgaccggcaaccttcgttagaggt

SEQ ID NO: 225952 - DNA, 55 bp, Artificial
  Synthetic oligonucleotide
cacattacagtgcggccacaccggtcgccaagcttaaacctgctcgcgctcacgc

SEQ ID NO: 225953 - DNA, 55 bp, Artificial
  Synthetic oligonucleotide
cagccatcggagcgcgttagactcaattcaatctccggcccaaggacgtccggcg

SEQ ID NO: 225954 - DNA, 55 bp, Artificial
  Synthetic oligonucleotide
cacatattagcgcgctacgctgttctttgtcagaatgcaggtcttgttcctatcg

SEQ ID NO: 225955 - DNA, 55 bp, Artificial
  Synthetic oligonucleotide
catgtttggttctcacctatcatccagtagtggcagaagggcggatactgcgagg

SEQ ID NO: 225956 - DNA, 55 bp, Artificial
  Synthetic oligonucleotide
atcggcgaatgacgggccggagtgtcggaagagttttagtgcgaccatgcttgcc

SEQ ID NO: 225957 - DNA, 55 bp, Artificial
  Synthetic oligonucleotide
atcgcattgatcctgtgcggccgatcagagtggcagcacctggcgaaggagcgga

SEQ ID NO: 225958 - DNA, 55 bp, Artificial
  Synthetic oligonucleotide
atcgacgtgaggcacgcctcccatccagaggccgtgcgtgatttcgacacggaga

SEQ ID NO: 225959 - DNA, 55 bp, Artificial
  Synthetic oligonucleotide
atcgacattcggctttgcttgtgagccaactcgaaacgccttgggctgccctgcc

SEQ ID NO: 225960 - DNA, 55 bp, Artificial
  Synthetic oligonucleotide
cattgatcgtcgtccgcttagggccgactgctgccttggtcattttgcgccaaca

SEQ ID NO: 225961 - DNA, 60 bp, Artificial
  Synthetic oligonucleotide
gatgacttcacataaagtagtcgcgtgagcgtgatttaccaacgcaccgtgtggccgcga

SEQ ID NO: 225962 - DNA, 55 bp, Artificial
  Synthetic oligonucleotide
atcgacagtatttgaacgacagggtctgatctagtcatcgctccctgtccgaagg

SEQ ID NO: 225963 - DNA, 55 bp, Artificial
  Synthetic oligonucleotide
atcgaagttttgaaaggcaggcgtcaattggacgacgcaccagtgatcagtgcga

SEQ ID NO: 225964 - DNA, 55 bp, Artificial
  Synthetic oligonucleotide
ccaaccttggtcgtgtcggcccaagatgatctgttcaacacgctccccgcagccc

SEQ ID NO: 225965 - DNA, 55 bp, Artificial
  Synthetic oligonucleotide
atcgaacaaaatgtcgtagcctgacgggagacgcaggggtgtccctcccgcacgc

SEQ ID NO: 225966 - DNA, 55 bp, Artificial
  Synthetic oligonucleotide
atcgaaaggacgggtcggcgttctggaacagtctcagtctccggcctgcctgggt

SEQ ID NO: 225967 - DNA, 55 bp, Artificial
  Synthetic oligonucleotide
atccggtgccttgatggctatctcgaatagaaagcgtcgcgcagcccttgtaccg

SEQ ID NO: 225968 - DNA, 55 bp, Artificial
  Synthetic oligonucleotide
ccaatcgtaaagtgattcggttgactcgcactggttgcggcaggagcgcgtacga

SEQ ID NO: 225969 - DNA, 55 bp, Artificial
  Synthetic oligonucleotide
atccgagctttcggggaacgcgcgcgagcctggatgcttgcccgatggttcgcaa

SEQ ID NO: 225970 - DNA, 55 bp, Artificial
  Synthetic oligonucleotide
ccaatcgtcgcgttctcggcattgctcctgaccgcatgccaacaaggtcccatcg

SEQ ID NO: 225971 - DNA, 55 bp, Artificial
  Synthetic oligonucleotide
ataggatatgcctgcgcctacgaggaaactcgccagcatgccaagcacaacgagc

SEQ ID NO: 225972 - DNA, 58 bp, Artificial
  Synthetic oligonucleotide
gattctctaacgtacgtttattgttcgtttcaagcaatgcgaaagtacgcacacaagc

SEQ ID NO: 225973 - DNA, 55 bp, Artificial
  Synthetic oligonucleotide
ccacatgccaaagctcactcaaatacagaaggtgcggagaaattcgcgcttactc

SEQ ID NO: 225974 - DNA, 55 bp, Artificial
  Synthetic oligonucleotide
ccaccaggttcgcagccatcaagcgacgacatgaggagcatattatgcacgggac

SEQ ID NO: 225975 - DNA, 55 bp, Artificial
  Synthetic oligonucleotide
atacgccgaaggaggtagcataggtgtgagcgactacgttcgtacacgacgtgac

SEQ ID NO: 225976 - DNA, 55 bp, Artificial
  Synthetic oligonucleotide
ataccaagcctcacaaagcttgactcacgggattcccaaacggcgacgaatctga

SEQ ID NO: 225977 - DNA, 55 bp, Artificial
  Synthetic oligonucleotide
ccacgagtaatcggtcggcaaacgagcgtgatcataattcgctttctcggtagga

SEQ ID NO: 225978 - DNA, 55 bp, Artificial
  Synthetic oligonucleotide
ataaccccacgagaccagccgtttcggccaaagctccctgacgctcgcacgcaag

SEQ ID NO: 225979 - DNA, 55 bp, Artificial
  Synthetic oligonucleotide
agttgcccgaaccacccgcaatagcgggcgatagcacctggccagaggcatcaac

SEQ ID NO: 225980 - DNA, 55 bp, Artificial
  Synthetic oligonucleotide
agtgatattctcgaagtgcgagattggaggttgcggcctcaaagccccgcgcccc

SEQ ID NO: 225981 - DNA, 55 bp, Artificial
  Synthetic oligonucleotide
attttgacgggccggtcccactggatgagcacgacacagccggtctcgctccaga

SEQ ID NO: 225982 - DNA, 55 bp, Artificial
  Synthetic oligonucleotide
atttgtgtcatggtcactgtaagtagtgagggagccgacctgatgagtgatatag

SEQ ID NO: 225983 - DNA, 60 bp, Artificial
  Synthetic oligonucleotide
gatttctacaggctgcattatttgcgccgtcccagcatatgtgtccccccgagacaaaac

SEQ ID NO: 225984 - DNA, 55 bp, Artificial
  Synthetic oligonucleotide
catacgaagcgtcggacattcctgaccggctcggcagctgtcgctgcgacatcga

SEQ ID NO: 225985 - DNA, 55 bp, Artificial
  Synthetic oligonucleotide
atttgccggccagtcgacaccacgtcgactagcaaaggcgttcgtaccggccagg

SEQ ID NO: 225986 - DNA, 55 bp, Artificial
  Synthetic oligonucleotide
catcagaaccatgagcgtcatccgatggttacaggtgcattacgttccagcctcg

SEQ ID NO: 225987 - DNA, 55 bp, Artificial
  Synthetic oligonucleotide
catcccgctctagacccgcatgacgagaagtgcggtcctcaacgcgtcggtattc

SEQ ID NO: 225988 - DNA, 55 bp, Artificial
  Synthetic oligonucleotide
catccgcctagcaatcgtatccttggccggatgcgggtcgcgatcagcgtcccac

SEQ ID NO: 225989 - DNA, 55 bp, Artificial
  Synthetic oligonucleotide
catcgatattaacggcttgtttaccacgtttcgtgaaaggtgcgggttgagcagt

SEQ ID NO: 225990 - DNA, 55 bp, Artificial
  Synthetic oligonucleotide
attatgccgaccttgcaagccgatcgcggtatgcaaagacccgaccgctgcggcc

SEQ ID NO: 225991 - DNA, 55 bp, Artificial
  Synthetic oligonucleotide
attagtggggtatcccacggactttggcgatccgctgacatgaccttttacgtgc

SEQ ID NO: 225992 - DNA, 55 bp, Artificial
  Synthetic oligonucleotide
atgttgatcggacggctttcgtcccgcgcaggctaccggctgaagccgcttacgt

SEQ ID NO: 225993 - DNA, 55 bp, Artificial
  Synthetic oligonucleotide
atggtatgagactgggcgcagccgagcggtccgcgtacgagacatgggatagagc

SEQ ID NO: 225994 - DNA, 59 bp, Artificial
  Synthetic oligonucleotide
gcaaactcccgatacggaccatagaccagcttccggtatagggcgctgcgattcaaata

SEQ ID NO: 225995 - DNA, 55 bp, Artificial
  Synthetic oligonucleotide
atggtaaacgtgtgactgataacatagccccgcgggatgtgctgtatccaggaag

SEQ ID NO: 225996 - DNA, 54 bp, Artificial
  Synthetic oligonucleotide
catctttaggaacgctcgttctttagcccggctctttagtttaggctctgactt

SEQ ID NO: 225997 - DNA, 55 bp, Artificial
  Synthetic oligonucleotide
atggatccatctcaccttcgctattccggtaaattggcgtgtgcagtggccgctt

SEQ ID NO: 225998 - DNA, 55 bp, Artificial
  Synthetic oligonucleotide
catgatcaggcatcttcctttacgggcggctttgcgtcgccgtaataggccgaga

SEQ ID NO: 225999 - DNA, 55 bp, Artificial
  Synthetic oligonucleotide
atgcttgcccatctctccgacagaccggcgcagaggtgataggcttcagcggagg

SEQ ID NO: 226000 - DNA, 55 bp, Artificial
  Synthetic oligonucleotide
atgcgaggtgcgcgatcaagggtgatttcatccaagtcacggagtgcatgacgcg

SEQ ID NO: 226001 - DNA, 55 bp, Artificial
  Synthetic oligonucleotide
atgcatcccgctctagcatatccagagcgattcactgtttcctgcagtgagtcgc

SEQ ID NO: 226002 - DNA, 55 bp, Artificial
  Synthetic oligonucleotide
catgatccgaccaagataaagtacaaccacccggttgcacaggtgcttcacgacc

SEQ ID NO: 226003 - DNA, 55 bp, Artificial
  Synthetic oligonucleotide
catgccctcggtcgtcgagtctcatcccgtgtaccacagccctacgagaagtgat

SEQ ID NO: 226004 - DNA, 55 bp, Artificial
  Synthetic oligonucleotide
atgacggattcgcgagaagcgccggcatgatggggtgacagagcgacgagtcttg

SEQ ID NO: 226005 - DNA, 56 bp, Artificial
  Synthetic oligonucleotide
caaaatttggcgcgacccgatttaaggcttcacattgtccttgcgaaacgagacac

SEQ ID NO: 226006 - DNA, 55 bp, Artificial
  Synthetic oligonucleotide
atgacaatcgaagctggcctttgctacctcaaagctctgattatcgcgcgccatt

SEQ ID NO: 226007 - DNA, 55 bp, Artificial
  Synthetic oligonucleotide
catgggctctgatgcggcggggtgtactgatttcggggcgatccgtcaagggcaa

SEQ ID NO: 226008 - DNA, 55 bp, Artificial
  Synthetic oligonucleotide
atcttatgcgtctttgggataatgtacgcgaattagctcttaattcggttgcgcc

SEQ ID NO: 226009 - DNA, 55 bp, Artificial
  Synthetic oligonucleotide
atctatgctgcggcagggtccgtccgctgcaggaatacggtcgcttgaagccggt

SEQ ID NO: 226010 - DNA, 55 bp, Artificial
  Synthetic oligonucleotide
aaggcattcccacttggtatggtgttaagagcttgcccgcagataagcgactacg

SEQ ID NO: 226011 - DNA, 55 bp, Artificial
  Synthetic oligonucleotide
ccgtccgcgcacgtgtagatagggtttgagttcgcgattgtcgccatgagtgacg

SEQ ID NO: 226012 - DNA, 55 bp, Artificial
  Synthetic oligonucleotide
ccgtcgcttacagtatgaatgtggcggcggctagagttaaatgcccgccttcccc

SEQ ID NO: 226013 - DNA, 55 bp, Artificial
  Synthetic oligonucleotide
ccgtcttccaagcggctagctcctgccccgatctaaggaagaggcgttgcggcat

SEQ ID NO: 226014 - DNA, 55 bp, Artificial
  Synthetic oligonucleotide
aaggagagcagccgaggctcgatgtgccgatgttgctcgcaggtctggcaagtgc

SEQ ID NO: 226015 - DNA, 55 bp, Artificial
  Synthetic oligonucleotide
aagctcggcccgatagttttggccccgtcccctgagatgccctgcgatgaaagcc

SEQ ID NO: 226016 - DNA, 60 bp, Artificial
  Synthetic oligonucleotide
gcaagcatatgtcgtctcctcagtggtaatagcgggggccgcggatgttggagtgattga

SEQ ID NO: 226017 - DNA, 55 bp, Artificial
  Synthetic oligonucleotide
aagctcatcccgtggcggttatggaggcgctttcggtcaaggctcccgtagtgac

SEQ ID NO: 226018 - DNA, 55 bp, Artificial
  Synthetic oligonucleotide
ccgtgcggaatacggtcctggactccggaaatgacgaacaagttgtgatggacag

SEQ ID NO: 226019 - DNA, 55 bp, Artificial
  Synthetic oligonucleotide
ccgtggaaccttgcacatgaagatactcgtccccatcaaaggggttatagattac

SEQ ID NO: 226020 - DNA, 55 bp, Artificial
  Synthetic oligonucleotide
ccgtggtgagatgcggtgggaagtcgcggattgggcgtttcaggattgaggacag

SEQ ID NO: 226021 - DNA, 55 bp, Artificial
  Synthetic oligonucleotide
ccgtgtcgcattacgcgtgcgaccgaatgtcatgcgaaccaaagaccggcgttca

SEQ ID NO: 226022 - DNA, 55 bp, Artificial
  Synthetic oligonucleotide
ccgttccagacaagtcgaggcgtgaaagcctcttccatagattggtcgaatttag

SEQ ID NO: 226023 - DNA, 54 bp, Artificial
  Synthetic oligonucleotide
ccgttcgagcttagcgtgtcgccaggaacaaatcttgttccgaccccaaatacc

SEQ ID NO: 226024 - DNA, 55 bp, Artificial
  Synthetic oligonucleotide
ccgttcggatcagcatacccggctgctccctgccactagcctcaaggccgcatat

SEQ ID NO: 226025 - DNA, 52 bp, Artificial
  Synthetic oligonucleotide
aagcggatttcggacgtgaaccctggtgagcgttccctcgttctaggaccgg

SEQ ID NO: 226026 - DNA, 53 bp, Artificial
  Synthetic oligonucleotide
ccgtttacaactccaaagggttctggcatggctggaacggagaaaatgggtgg

SEQ ID NO: 226027 - DNA, 60 bp, Artificial
  Synthetic oligonucleotide
gcaatttccgaagatcagtgtgcgttggaaggtcagctagcttccaggcactttgtataa

SEQ ID NO: 226028 - DNA, 55 bp, Artificial
  Synthetic oligonucleotide
cctaagggagagaccgcgaagcagcggtcaatcaccttcgaaccgataggggagc

SEQ ID NO: 226029 - DNA, 55 bp, Artificial
  Synthetic oligonucleotide
aagcggactcttgcaaacccatcatggcaaaagccctgcttcccgatacagagcc

SEQ ID NO: 226030 - DNA, 55 bp, Artificial
  Synthetic oligonucleotide
cctaatggggaattgttttctgccggacttgtagatcgagcaaatcgataccacc

SEQ ID NO: 226031 - DNA, 55 bp, Artificial
  Synthetic oligonucleotide
cctacttttgtgataacacggactgacatagaactactcaatacactatcctagc

SEQ ID NO: 226032 - DNA, 53 bp, Artificial
  Synthetic oligonucleotide
cctatccacggtaaataggtgtgtttacgaaaattaccgtgtgtacgagagga

SEQ ID NO: 226033 - DNA, 54 bp, Artificial
  Synthetic oligonucleotide
aagccaggaacacccacgggacctgcctcctccgtggacgaagcaacttcgttc

SEQ ID NO: 226034 - DNA, 55 bp, Artificial
  Synthetic oligonucleotide
aagcatcggggcgtgtcgtaacacaagcgatggcggcactcgcgttgaagaaggc

SEQ ID NO: 226035 - DNA, 55 bp, Artificial
  Synthetic oligonucleotide
ccggcctaatatacaggtgcagatgccgaatcgatcaggagagtcccttgacgat

SEQ ID NO: 226036 - DNA, 55 bp, Artificial
  Synthetic oligonucleotide
ccggcctcatgctgcaatcccgctgggagacccgaactatcgctgatcgtccgta

SEQ ID NO: 226037 - DNA, 55 bp, Artificial
  Synthetic oligonucleotide
ccggctcccaaacgtcttatcggctatgcacgcgtctcaaccgacgatcaggtcc

SEQ ID NO: 226038 - DNA, 60 bp, Artificial
  Synthetic oligonucleotide
attgcattcggggctcaatcgtccctttatcgcacctacgctggaatgagcctcataggc

SEQ ID NO: 226039 - DNA, 55 bp, Artificial
  Synthetic oligonucleotide
aatggcgaagcctgcgctgatccccaccgccccgatcgttgcccagagccatgag

SEQ ID NO: 226040 - DNA, 55 bp, Artificial
  Synthetic oligonucleotide
aatgccgtacccctcaagatctggacgcacgccccacaatccaagctcgcatacg

SEQ ID NO: 226041 - DNA, 55 bp, Artificial
  Synthetic oligonucleotide
aatgacgcctgacccacacgtgacgaaagactgtgccatgacccgcaagagagaa

SEQ ID NO: 226042 - DNA, 55 bp, Artificial
  Synthetic oligonucleotide
ccggcttggtcctcttccgactcgggcactgtaggacgatcacgcatacagactc

SEQ ID NO: 226043 - DNA, 55 bp, Artificial
  Synthetic oligonucleotide
aatcgttgtcaggaacggtgcgcaatctcattttcgggtctccttatgcttcaga

SEQ ID NO: 226044 - DNA, 55 bp, Artificial
  Synthetic oligonucleotide
aatcgagggcgcatggtgtcatccgttcgtcgttggtcgggagcggacaaccgct

SEQ ID NO: 226045 - DNA, 55 bp, Artificial
  Synthetic oligonucleotide
aatcctgagctggttgcgcaatatggttccaatggcgctcagaacctggtcgccg

SEQ ID NO: 226046 - DNA, 54 bp, Artificial
  Synthetic oligonucleotide
aagtgttaccgccgtagcgatcgaactcggggcccgacacgggaatactgccgc

SEQ ID NO: 226047 - DNA, 55 bp, Artificial
  Synthetic oligonucleotide
ccgggcttcaggtcgaccctatacgatcctccgctccacgcaattttacgagttc

SEQ ID NO: 226048 - DNA, 55 bp, Artificial
  Synthetic oligonucleotide
aagtattaaccaacgtaggcttcagttaagcctcgcgaattatggtgggcgttca

SEQ ID NO: 226049 - DNA, 53 bp, Artificial
  Synthetic oligonucleotide
gggtggtaggggatcgttaaccataccgaaatcccgtcctggtactgtctgag

SEQ ID NO: 226050 - DNA, 60 bp, Artificial
  Synthetic oligonucleotide
attgaccaattaagcgcttgaacgtaggaccagcattcccgacagtatgcgcgtgaatcc

SEQ ID NO: 226051 - DNA, 55 bp, Artificial
  Synthetic oligonucleotide
aagtactacgggaacttcgcgaacgatctgacgtgccgataattattgccagcgg

SEQ ID NO: 226052 - DNA, 55 bp, Artificial
  Synthetic oligonucleotide
aagtaaggctgagagccacccatatcaatcctggagaggccttgattcgtttcgc

SEQ ID NO: 226053 - DNA, 55 bp, Artificial
  Synthetic oligonucleotide
ccggtcaattggtgtcgcgggatcgctcttactgactgtacaaaataaacgagcg

SEQ ID NO: 226054 - DNA, 54 bp, Artificial
  Synthetic oligonucleotide
aagtaaactgagaccccgcgaccacaaacgctgtcgacatcaaaagggttcgtc

SEQ ID NO: 226055 - DNA, 55 bp, Artificial
  Synthetic oligonucleotide
ccggtcgcgcaacgcccattgcattcgtctgttcgactatgaagccggctatccg

SEQ ID NO: 226056 - DNA, 55 bp, Artificial
  Synthetic oligonucleotide
ccggtctgcgctctcaccccgcgatgaccgcaattcgaaaggagatccatcatgc

SEQ ID NO: 226057 - DNA, 55 bp, Artificial
  Synthetic oligonucleotide
aagggcctgagaagcgtgatgtcagtgatgttcggggcgagatagatcgttatag

SEQ ID NO: 226058 - DNA, 54 bp, Artificial
  Synthetic oligonucleotide
ccggttcaggaccggtggcaggaacggaacatcctcccacacaacgtctatttc

SEQ ID NO: 226059 - DNA, 55 bp, Artificial
  Synthetic oligonucleotide
ccgtaacagtgattatcgtttgcgggttagcgaccatagaatcgccgagctagtc

SEQ ID NO: 226060 - DNA, 55 bp, Artificial
  Synthetic oligonucleotide
ccgtcacaccggcaaatggaggaaccagccatgaataagctgtcagtgctcgcag

SEQ ID NO: 226061 - DNA, 56 bp, Artificial
  Synthetic oligonucleotide
attctcggaattggggggcggcatcatttcggaatgcgggggcggattgcctcgga

SEQ ID NO: 226062 - DNA, 55 bp, Artificial
  Synthetic oligonucleotide
aaatgaagctccccacctgttcttttcgccttcggttcagcaggcttcatctcgt

SEQ ID NO: 226063 - DNA, 55 bp, Artificial
  Synthetic oligonucleotide
cgaaagcgcttcagttgcgcagttactatatgccgcgattcgtgagcgaattaca

SEQ ID NO: 226064 - DNA, 55 bp, Artificial
  Synthetic oligonucleotide
aaatccgaacgccgcatggtccttctcaaaggcgatgttccgatctcgacctatc

SEQ ID NO: 226065 - DNA, 55 bp, Artificial
  Synthetic oligonucleotide
aaatagcagatgaacgcgtggagcagagaagtattgggcctgccgagatgatcca

SEQ ID NO: 226066 - DNA, 55 bp, Artificial
  Synthetic oligonucleotide
aaaggtcgagctctcgcaattgacggtgtggatcaaacggcagggcacggaacgt

SEQ ID NO: 226067 - DNA, 55 bp, Artificial
  Synthetic oligonucleotide
aaagcctgtgcgttccgttccaatgtccgaaagtcattccctgaggttgcccgtg

SEQ ID NO: 226068 - DNA, 53 bp, Artificial
  Synthetic oligonucleotide
cgaaatcgttcgagtttaagccgccgaccgacgcaaggaaggtggacgtggtc

SEQ ID NO: 226069 - DNA, 55 bp, Artificial
  Synthetic oligonucleotide
cgaacctctgctcaaggtccaaaacctctcccggcacttcggtagctcctctgca

SEQ ID NO: 226070 - DNA, 55 bp, Artificial
  Synthetic oligonucleotide
cgaacgctatccgtgtcctgtcaatcgacgcggttgaggccgcaaagtccgggca

SEQ ID NO: 226071 - DNA, 55 bp, Artificial
  Synthetic oligonucleotide
aaactcggacttctggcgcctatttggtagtgcaagagtagaggatcgtggggcc

SEQ ID NO: 226072 - DNA, 59 bp, Artificial
  Synthetic oligonucleotide
atgtgtgcgggacccggggaaagattttggcgcccttatgccatgcatggaaatggcag

SEQ ID NO: 226073 - DNA, 53 bp, Artificial
  Synthetic oligonucleotide
cgaacgttgcttatcgttaagccgtttaaatcgtcggggttatcttatggctg

SEQ ID NO: 226074 - DNA, 55 bp, Artificial
  Synthetic oligonucleotide
cgaagatatgagaggcgctatttcgccttaccacctccgccgataacccggcaca

SEQ ID NO: 226075 - DNA, 55 bp, Artificial
  Synthetic oligonucleotide
aaacctccacgctggtaagccggggcggaccctgtcttgaccctctcgccagaga

SEQ ID NO: 226076 - DNA, 55 bp, Artificial
  Synthetic oligonucleotide
aaacagtctcggcataacgagcactccccgaatcttttgcaggtgcttacacgga

SEQ ID NO: 226077 - DNA, 55 bp, Artificial
  Synthetic oligonucleotide
cgaaggaaagatccttcgtatattgcgcaaggatcgagagggtggggttggtcgc

SEQ ID NO: 226078 - DNA, 55 bp, Artificial
  Synthetic oligonucleotide
cgaataagttgtcatcaaaccgtgactttcgtcgggcatatgtttgcttaggtga

SEQ ID NO: 226079 - DNA, 55 bp, Artificial
  Synthetic oligonucleotide
cgaatcgaggcatatagtaactgcgcaactgaagcgctttcgttcaaaattgcgc

SEQ ID NO: 226080 - DNA, 55 bp, Artificial
  Synthetic oligonucleotide
cgaatctgtcccacgctcccgcaatgcgactaatgttgcgtaacaaccgccgcgc

SEQ ID NO: 226081 - DNA, 55 bp, Artificial
  Synthetic oligonucleotide
cgaatgaactcaacgctaatgccgtcgctgggagcaaatgcctggggccgaaacg

SEQ ID NO: 226082 - DNA, 55 bp, Artificial
  Synthetic oligonucleotide
cgacagtagacctcacgctcaatcgaaacctggcagtcgaagcaccggatggcgg

SEQ ID NO: 226083 - DNA, 60 bp, Artificial
  Synthetic oligonucleotide
gcattcgcgccgtccagaaacgacgtgatctgaaactgctcgttcgcttcttgccttgcc

SEQ ID NO: 226084 - DNA, 55 bp, Artificial
  Synthetic oligonucleotide
aaaacacgcgatatggaatttcccggttcgccaccttccacatttggcgcacaag

SEQ ID NO: 226085 - DNA, 55 bp, Artificial
  Synthetic oligonucleotide
cgacatccgcggtatgtctccgtccttcaatgtgccgcattacgacaagacatcc

SEQ ID NO: 226086 - DNA, 55 bp, Artificial
  Synthetic oligonucleotide
cctatgagatcaggggcccggattggcagctgatcgtttccgacaatggtgtagg

SEQ ID NO: 226087 - DNA, 55 bp, Artificial
  Synthetic oligonucleotide
cctccacgcgtcgcgacaatgagcatgagcgcggcgttggaagagacaagaacgg

SEQ ID NO: 226088 - DNA, 55 bp, Artificial
  Synthetic oligonucleotide
cctccatgtgtgatcaagattgaagcgtccgttaatacctgccgttgcgatgccc

SEQ ID NO: 226089 - DNA, 55 bp, Artificial
  Synthetic oligonucleotide
cctcccctcaaactgagaaaagtgcgatattattcggatctcatattgaagcgaa

SEQ ID NO: 226090 - DNA, 55 bp, Artificial
  Synthetic oligonucleotide
cctccgtacctaatcgccgagattctaagagcctacggcgcgcatggattaggcc

SEQ ID NO: 226091 - DNA, 55 bp, Artificial
  Synthetic oligonucleotide
aagagtaattcaagcgcgtcacagggacttccctgaggtgtgccggcactctgcc

SEQ ID NO: 226092 - DNA, 55 bp, Artificial
  Synthetic oligonucleotide
aactcgggcttcgcagttcttgcggcaacttgctcgagataatcggggcctcttc

SEQ ID NO: 226093 - DNA, 55 bp, Artificial
  Synthetic oligonucleotide
cctctcgtgtctattggaacacggcaaacggtgtgcgtagcacttccagatctgg

SEQ ID NO: 226094 - DNA, 57 bp, Artificial
  Synthetic oligonucleotide
gccaacctacggtgtgttcacataagccgtcaactaggtagttaagattgaaacata

SEQ ID NO: 226095 - DNA, 55 bp, Artificial
  Synthetic oligonucleotide
cctctgcggttgggcagttacatgcccgcatcgggcagctaaaggtaacgccttc

SEQ ID NO: 226096 - DNA, 55 bp, Artificial
  Synthetic oligonucleotide
cctgaaatcagtacaccccgccgcatcagagcccatgtgaggctggctggttcgg

SEQ ID NO: 226097 - DNA, 55 bp, Artificial
  Synthetic oligonucleotide
aacgcctaagacctctccacgagcgacatccaacgaaatagggccaaagcgaccc

SEQ ID NO: 226098 - DNA, 55 bp, Artificial
  Synthetic oligonucleotide
cctgccgtcagcaggtctatatccaaacggtcgtagggtcgcctgaggccaatca

SEQ ID NO: 226099 - DNA, 55 bp, Artificial
  Synthetic oligonucleotide
aacgcacgagtggaactggcgtcttcctcgagaggcagagaacgctcatacgggg

SEQ ID NO: 226100 - DNA, 55 bp, Artificial
  Synthetic oligonucleotide
aacgaaagagaagcgcggtgtcaaacgatccgacccaccagttcctggtcaataa

SEQ ID NO: 226101 - DNA, 55 bp, Artificial
  Synthetic oligonucleotide
cctgcttcactgcatgcttcagcttggccactagagcggtatgtatttaagcccg

SEQ ID NO: 226102 - DNA, 55 bp, Artificial
  Synthetic oligonucleotide
cctgtcctcgacggacagaacatctgtcatccgctcccctttagcgaccaggagc

SEQ ID NO: 226103 - DNA, 55 bp, Artificial
  Synthetic oligonucleotide
aaccggccttagctccttcctcggggctgcctccgaaaacatggagcgcgtatac

SEQ ID NO: 226104 - DNA, 55 bp, Artificial
  Synthetic oligonucleotide
aaccctccctctgcttaggcatgcatgtaaacaactgcccttagaagtagacatc

SEQ ID NO: 226105 - DNA, 54 bp, Artificial
  Synthetic oligonucleotide
atgacggctaaccgcctgaccggaaggtcccggcagtcgtgctgccgggacctt

SEQ ID NO: 226106 - DNA, 55 bp, Artificial
  Synthetic oligonucleotide
ccttcctgtcgtgtgattggacgacacggctgcgaccgtttgagttttcaagcgg

SEQ ID NO: 226107 - DNA, 55 bp, Artificial
  Synthetic oligonucleotide
ccttccttaacccggaagtaacgcttgatgcgctatattctccggctagaggtcg

SEQ ID NO: 226108 - DNA, 55 bp, Artificial
  Synthetic oligonucleotide
cctttcaacggatcatacccggtggagtggagacagccgtctatggagcatccgc

SEQ ID NO: 226109 - DNA, 55 bp, Artificial
  Synthetic oligonucleotide
ccttttcgttatactgattaacgcctagatggacgcctcttacgtcagacctcgt

SEQ ID NO: 226110 - DNA, 55 bp, Artificial
  Synthetic oligonucleotide
cgaaacttgaagggtgaccgcggcaagaggattagcttcggaatagcggatgacg

SEQ ID NO: 226111 - DNA, 55 bp, Artificial
  Synthetic oligonucleotide
acaacagagtacgatccttgagcatcacggaactaaacaacaccatttcgacaga

SEQ ID NO: 226112 - DNA, 55 bp, Artificial
  Synthetic oligonucleotide
ccggacgcatctcccgtcagggagtgcagaaggcccgaaatcattgacgaggccg

SEQ ID NO: 226113 - DNA, 55 bp, Artificial
  Synthetic oligonucleotide
acaataaggcaccgcctcggcaaagataagatgagaatctacttaggatgagctg

SEQ ID NO: 226114 - DNA, 55 bp, Artificial
  Synthetic oligonucleotide
acaatctataccagagaggtccaactcccttcttatgtctgtggactcaacatgc

SEQ ID NO: 226115 - DNA, 55 bp, Artificial
  Synthetic oligonucleotide
ccggaacgataccacaagagtggcagaagctacttgccacagataacggagccga

SEQ ID NO: 226116 - DNA, 60 bp, Artificial
  Synthetic oligonucleotide
atgaagacggtgcctattcgttcgctggactacacaaatctgtgctttccatcacaagtg

SEQ ID NO: 226117 - DNA, 55 bp, Artificial
  Synthetic oligonucleotide
acacgaaagtctaccggaagggtcaacgttcaaatatctacgatcttgtgatgcg

SEQ ID NO: 226118 - DNA, 55 bp, Artificial
  Synthetic oligonucleotide
ccgctgaagtatcggatcctccacgaccaagggttgtgatatagcctgcagggct

SEQ ID NO: 226119 - DNA, 55 bp, Artificial
  Synthetic oligonucleotide
acacgtctttctgcgacccatcccgtatgtttgccatacagaccagaggtcgtcg

SEQ ID NO: 226120 - DNA, 55 bp, Artificial
  Synthetic oligonucleotide
ccgctctacgaagtggttatcatacccttatggttctcagcacgacttgtcgtgg

SEQ ID NO: 226121 - DNA, 55 bp, Artificial
  Synthetic oligonucleotide
acaggagaggccagcggaagattggtatcgacaagaagacccagatttcgggacc

SEQ ID NO: 226122 - DNA, 55 bp, Artificial
  Synthetic oligonucleotide
ccgcggccggtcactcatcttgggcgcggataagaaatgtaatcgatgctggagg

SEQ ID NO: 226123 - DNA, 55 bp, Artificial
  Synthetic oligonucleotide
ccgcgatgtccttgttttcagtggaaagcggtgacggcatctcggccatgtgaag

SEQ ID NO: 226124 - DNA, 55 bp, Artificial
  Synthetic oligonucleotide
ccgcgacaagcggtgcggtttaggcggataatgctggattaaaccgctcacctaa

SEQ ID NO: 226125 - DNA, 55 bp, Artificial
  Synthetic oligonucleotide
ccgcgaatgtcggctcggaaatggggcaggatcgtctccataggatcagtcaatc

SEQ ID NO: 226126 - DNA, 55 bp, Artificial
  Synthetic oligonucleotide
ccgcgaaatatccgaaagtgacgatcagggaagttgccattaccggccaaggaga

SEQ ID NO: 226127 - DNA, 57 bp, Artificial
  Synthetic oligonucleotide
atctgccccccagaccgcaggaaatatcaactccccctgggcggatactgtcgcaac

SEQ ID NO: 226128 - DNA, 50 bp, Artificial
  Synthetic oligonucleotide
ccgccttgacccgacccctcccaactggcccgattccctccaaaagcgtt

SEQ ID NO: 226129 - DNA, 55 bp, Artificial
  Synthetic oligonucleotide
ccgccttagctctccatcatccagtgttttcaacaggcagcggaaaatagcgtgg

SEQ ID NO: 226130 - DNA, 55 bp, Artificial
  Synthetic oligonucleotide
ccgccggcaatgtggactaccgaacgaaggccaacggtcgcgtctacgtgtctgt

SEQ ID NO: 226131 - DNA, 55 bp, Artificial
  Synthetic oligonucleotide
ccgccgatctcctctcgtcactgcgttgaaccggacactgttatcggtgatacta

SEQ ID NO: 226132 - DNA, 55 bp, Artificial
  Synthetic oligonucleotide
ccgccatgacggatctctggcgctctctgatcaattagaccacgactgcttggcc

SEQ ID NO: 226133 - DNA, 55 bp, Artificial
  Synthetic oligonucleotide
ccgcaaccgagccactactgacgaccgcgtttgggctatcaacggaaaatgaacg

SEQ ID NO: 226134 - DNA, 55 bp, Artificial
  Synthetic oligonucleotide
ccgattcttcggagttgcgttcttccgatgtggcgtttcatgaaagcgtgtccct

SEQ ID NO: 226135 - DNA, 55 bp, Artificial
  Synthetic oligonucleotide
accaagctgatgcttggcgtccggccggagcattttacgcctgcaggcgatacac

SEQ ID NO: 226136 - DNA, 55 bp, Artificial
  Synthetic oligonucleotide
accctcacgcgccttccttttcagcgctcgccgccatatgcctgagttcgtccca

SEQ ID NO: 226137 - DNA, 55 bp, Artificial
  Synthetic oligonucleotide
ccgatgggtttcccgtcgaaagctaatctatatctgccgtttggcgatcgtccag

SEQ ID NO: 226138 - DNA, 60 bp, Artificial
  Synthetic oligonucleotide
atctcgcggacacgccgcatctttagtctctccgctggcatcgcgttccttcctctcgag

SEQ ID NO: 226139 - DNA, 55 bp, Artificial
  Synthetic oligonucleotide
aatgtcgctctgcatgcctgatggccccagagtggccgtgtagggcacaccatgg

SEQ ID NO: 226140 - DNA, 55 bp, Artificial
  Synthetic oligonucleotide
ccggcaatacacagttcgccgatgtccccatcctcgatctctgtcggcccttcgc

SEQ ID NO: 226141 - DNA, 55 bp, Artificial
  Synthetic oligonucleotide
ccggcccaatcgaccgtgttcggaaagcgtgttttcgaatcgcagcatctgacca

SEQ ID NO: 226142 - DNA, 55 bp, Artificial
  Synthetic oligonucleotide
aatgttgactatcggccgatttggataagtcaacagttggtgattcttcgcgtcc

SEQ ID NO: 226143 - DNA, 55 bp, Artificial
  Synthetic oligonucleotide
ccggatggaacaaactgatttgaaaggcgccttgcatcacgtgctggatcttttg

SEQ ID NO: 226144 - DNA, 55 bp, Artificial
  Synthetic oligonucleotide
aatggcggcctacccaggaacgctccaggatcacaacccgtttgccagcccgtgc

SEQ ID NO: 226145 - DNA, 54 bp, Artificial
  Synthetic oligonucleotide
acggcacaacacgggcgactgtatctctaagactttcccctcctggcggagcta

SEQ ID NO: 226146 - DNA, 54 bp, Artificial
  Synthetic oligonucleotide
atgcagtcgacaaatccaatgcgcatctgccagagaaccagggctggtagtgcc

SEQ ID NO: 226147 - DNA, 54 bp, Artificial
  Synthetic oligonucleotide
tgcggcactttcgctgatgctactgacaccggtgataggcgcgttgagaaaaga

SEQ ID NO: 226148 - DNA, 54 bp, Artificial
  Synthetic oligonucleotide
gtgatccgttcaacggtgcactttatgtctttcgggccaagagagcagaccgag

SEQ ID NO: 226149 - DNA, 60 bp, Artificial
  Synthetic oligonucleotide
atcgctggcttcccccacgatatggacgctctctcgcctggagctacgctgaacctttgt

SEQ ID NO: 226150 - DNA, 54 bp, Artificial
  Synthetic oligonucleotide
gcccatgaactgccggcaaggctacatctggcggatcactatccctatcgcgtt

SEQ ID NO: 226151 - DNA, 54 bp, Artificial
  Synthetic oligonucleotide
gccatgcggtgtatccatcggtcaccaatatgccgctatagttaccgagaaagg

SEQ ID NO: 226152 - DNA, 54 bp, Artificial
  Synthetic oligonucleotide
agcaagttgccgcaagaactgcgaagcccgagttttgtggaaccgaaagcgctt

SEQ ID NO: 226153 - DNA, 54 bp, Artificial
  Synthetic oligonucleotide
tgctcgagataatcggggcctcttcgtacactggcaggcgttcggaacgaacct

SEQ ID NO: 226154 - DNA, 54 bp, Artificial
  Synthetic oligonucleotide
acattcccgtctcgcgaacatttacgatcgtcaggtctgaggtagtgccatgcc

SEQ ID NO: 226155 - DNA, 54 bp, Artificial
  Synthetic oligonucleotide
cgtcctgacgtcgggcaggctgtgtcgtgatagtctcaatcacgtgacgcatga

SEQ ID NO: 226156 - DNA, 54 bp, Artificial
  Synthetic oligonucleotide
cgtccgcgaggggttgaggacggggcatagccatgaggtgtagccgcgtgtcgt

SEQ ID NO: 226157 - DNA, 54 bp, Artificial
  Synthetic oligonucleotide
gcaatgcgcgacgcaatcaacgctgccagcgacggccctcatgcttcacaccat

SEQ ID NO: 226158 - DNA, 54 bp, Artificial
  Synthetic oligonucleotide
cgcactatcaacgaatcgccgcacacgccaagctttcgctcagcgttaacttcg

SEQ ID NO: 226159 - DNA, 54 bp, Artificial
  Synthetic oligonucleotide
cgtctctcaactcccacaactgggcgatgtcagtccgcatgagcatgtcgcagt

SEQ ID NO: 226160 - DNA, 59 bp, Artificial
  Synthetic oligonucleotide
agagataaagcgttgcgatgccctccatggtggctaatctgaccgtaccgcgtacctcg

SEQ ID NO: 226161 - DNA, 55 bp, Artificial
  Synthetic oligonucleotide
catcaacctcccgaccgctgtaagggcggtccgtgagcgcgtgtaagtccccctc

SEQ ID NO: 226162 - DNA, 54 bp, Artificial
  Synthetic oligonucleotide
acataggatgaacgcgtcggaacatccatttgcgagagtgccgcacgtatcaat

SEQ ID NO: 226163 - DNA, 54 bp, Artificial
  Synthetic oligonucleotide
tgatatgtaagtgcgcgccttgcaagctcataccggtaagtctcatacgacgtc

SEQ ID NO: 226164 - DNA, 54 bp, Artificial
  Synthetic oligonucleotide
cattagtttcgcgcaaccttgctgatgtacccgcaggtctgatgatctcagagg

SEQ ID NO: 226165 - DNA, 54 bp, Artificial
  Synthetic oligonucleotide
cttcggccatgatattgtagaggcttggatcgtgagcctcgaaatcgtctgatg

SEQ ID NO: 226166 - DNA, 54 bp, Artificial
  Synthetic oligonucleotide
cttcgttttgagatgagcacccgatctgccatcctgtcacagagtgcagaccgg

SEQ ID NO: 226167 - DNA, 54 bp, Artificial
  Synthetic oligonucleotide
agaccggatggcttgaaaacggccacacggaatcgataggactaggcgcgaggg

SEQ ID NO: 226168 - DNA, 54 bp, Artificial
  Synthetic oligonucleotide
tgcaaggcctttatccagagataggattgatcgggaccagcccaaaacaaggca

SEQ ID NO: 226169 - DNA, 54 bp, Artificial
  Synthetic oligonucleotide
gcctcttccagatgggctgccccgcccaagactgttgccaattcgtccattgcc

SEQ ID NO: 226170 - DNA, 54 bp, Artificial
  Synthetic oligonucleotide
tgcatcgaccgtcccattgttgagtgcggaaacggcagaattgttgtccgggaa

SEQ ID NO: 226171 - DNA, 54 bp, Artificial
  Synthetic oligonucleotide
tgccatatattcttgtgcctacacgcatctattcctaagctcatctggagggcg

SEQ ID NO: 226172 - DNA, 58 bp, Artificial
  Synthetic oligonucleotide
cagtcgcccttatcagttacatcggtcccattcactgttcgcgccagaagggaatgtt

SEQ ID NO: 226173 - DNA, 54 bp, Artificial
  Synthetic oligonucleotide
tgccggagcgatagcgaggcgatgagggggcttcacggcataccgctcaatatt

SEQ ID NO: 226174 - DNA, 54 bp, Artificial
  Synthetic oligonucleotide
aactcgtgttggcgcgatttatagcaacgaccagatatctcaggcgttaaggcg

SEQ ID NO: 226175 - DNA, 54 bp, Artificial
  Synthetic oligonucleotide
atcttgctcccggaagcgttgctccgcgtactcaagaacctctccgtggagtga

SEQ ID NO: 226176 - DNA, 54 bp, Artificial
  Synthetic oligonucleotide
gagaattcagacccattcgtcgtgtacggccgcgaacaaaggaccgaacgcgtc

SEQ ID NO: 226177 - DNA, 54 bp, Artificial
  Synthetic oligonucleotide
taagccttttcgacgaacgttcattggatctatgctggaaggttctgtactgga

SEQ ID NO: 226178 - DNA, 54 bp, Artificial
  Synthetic oligonucleotide
ttttcattcaggcatcgaaggtgaagcatgaacaggtttgcaagcgaaacagtc

SEQ ID NO: 226179 - DNA, 54 bp, Artificial
  Synthetic oligonucleotide
taagcgctgttctgcggccacggctgacagaagttgacgcctattttgtgagct

SEQ ID NO: 226180 - DNA, 54 bp, Artificial
  Synthetic oligonucleotide
taatcggcaacgagacgactggtcgtaaaggcaggggtcccatcgagcaccaac

SEQ ID NO: 226181 - DNA, 54 bp, Artificial
  Synthetic oligonucleotide
gacggtcatttcgcagcttctgagcggacggacgacgctgaaacttggagcgct

SEQ ID NO: 226182 - DNA, 54 bp, Artificial
  Synthetic oligonucleotide
tttggtcgtatcgaagtaatatttatgcgggctgtagacgccgagctcttgtac

SEQ ID NO: 226183 - DNA, 59 bp, Artificial
  Synthetic oligonucleotide
gaagcggcctatggaacgatcggaaatcttcaggtcgttcacaacgccagcgcccttga

SEQ ID NO: 226184 - DNA, 54 bp, Artificial
  Synthetic oligonucleotide
aaaagcggtcacggtatccgagagggcgtcaattctgacgcgttactcgatgga

SEQ ID NO: 226185 - DNA, 54 bp, Artificial
  Synthetic oligonucleotide
gttttgttacggagtgcctcccgtcatccgttcgctgacgatcggcaccttacg

SEQ ID NO: 226186 - DNA, 54 bp, Artificial
  Synthetic oligonucleotide
tacaaaactatcgcttgactttgacgcacaaaacgcccacatccccgtcaagct

SEQ ID NO: 226187 - DNA, 54 bp, Artificial
  Synthetic oligonucleotide
accgtatgggtgaattgcgtaccctggcccaaattctgacccttgctgaaggtg

SEQ ID NO: 226188 - DNA, 54 bp, Artificial
  Synthetic oligonucleotide
ctcacgatggccgtttccagaatgcctggaataagcgtgccttctggcactaaa

SEQ ID NO: 226189 - DNA, 54 bp, Artificial
  Synthetic oligonucleotide
ttgcgcctacttcaacgaaacagccgatgcgaagcttctgatggcgtcggtccc

SEQ ID NO: 226190 - DNA, 54 bp, Artificial
  Synthetic oligonucleotide
aaagagccgtgcagaatcggtaaggcgaagtgcgaggggacatttgcttgaggc

SEQ ID NO: 226191 - DNA, 54 bp, Artificial
  Synthetic oligonucleotide
tgtacttttccggtcttggaatagcgggattatgaggaagttggacgccccgtg

SEQ ID NO: 226192 - DNA, 54 bp, Artificial
  Synthetic oligonucleotide
tgtctcgatattgtagctcgaaccctgccatatacccgggttaaggtccgcccc

SEQ ID NO: 226193 - DNA, 52 bp, Artificial
  Synthetic oligonucleotide
caaagcaaccggctttgtaggtctaatcggcgtctacgaaagggtttagttc

SEQ ID NO: 226194 - DNA, 60 bp, Artificial
  Synthetic oligonucleotide
gaagcttgtccagacggtgaagtttcgggctgtagagcgtgctgacaagcagaacgcaat

SEQ ID NO: 226195 - DNA, 54 bp, Artificial
  Synthetic oligonucleotide
cgtcagcccttcgacggaaagaacggtgctggcagtctcgatcgattgtgcttg

SEQ ID NO: 226196 - DNA, 54 bp, Artificial
  Synthetic oligonucleotide
gtgtcaagaagcccttttgcgttccaaggcagtggctgtcgctgctagtcgccg

SEQ ID NO: 226197 - DNA, 54 bp, Artificial
  Synthetic oligonucleotide
ttagtttgcgatgtaaaggctgaggatctatctaagacgatgtgttcacatccc

SEQ ID NO: 226198 - DNA, 54 bp, Artificial
  Synthetic oligonucleotide
caacctatgtgcagtgcacgaaattcgaaggcgcggggtatgaggggtgacgct

SEQ ID NO: 226199 - DNA, 54 bp, Artificial
  Synthetic oligonucleotide
gatcggttcaagagcgcggttgaggaaataatggggatcgcgtctgatcgtagt

SEQ ID NO: 226200 - DNA, 54 bp, Artificial
  Synthetic oligonucleotide
ggggtcgaggcaatgcgtagttttgggtcgcatatcttgtttgccgcggcactt

SEQ ID NO: 226201 - DNA, 54 bp, Artificial
  Synthetic oligonucleotide
ttcatggacaagagcctatctaaatctccttccgtcaccgtggctgacgtcgca

SEQ ID NO: 226202 - DNA, 54 bp, Artificial
  Synthetic oligonucleotide
tatacgaaaggagcggatagaatccgtttagggatcaagaactcacgtcgaatt

SEQ ID NO: 226203 - DNA, 54 bp, Artificial
  Synthetic oligonucleotide
ctcaatcgggcatgaccgttcactggtaccgccaatccaggctatatgcggcaa

SEQ ID NO: 226204 - DNA, 54 bp, Artificial
  Synthetic oligonucleotide
agatggttacggcgcccaccatgagggacaggacgaccatggctttgtcatagg

SEQ ID NO: 226205 - DNA, 60 bp, Artificial
  Synthetic oligonucleotide
gaattccgaccgagttgtggggcgacattcaggccatgatctcgggcctgaagagcatgg

SEQ ID NO: 226206 - DNA, 54 bp, Artificial
  Synthetic oligonucleotide
aaagggccgtctgtgataccgatcccttgaagctgcattacatctggggtctat

SEQ ID NO: 226207 - DNA, 54 bp, Artificial
  Synthetic oligonucleotide
cgatccccgggcgtgcaagcctactcacgtcctagcccgaattaactaagaaaa

SEQ ID NO: 226208 - DNA, 54 bp, Artificial
  Synthetic oligonucleotide
gttccatacagatattgcatcacccgcgactagtgacctgagtgtatcgcctat

SEQ ID NO: 226209 - DNA, 54 bp, Artificial
  Synthetic oligonucleotide
tagcctatgcttaggagacggttcggcatcataccgtcgcgtaattcctaaatt

SEQ ID NO: 226210 - DNA, 54 bp, Artificial
  Synthetic oligonucleotide
ctactcgcgcatagcgagcgaccactcgccttagtgcgaaaggagtaattgaat

SEQ ID NO: 226211 - DNA, 54 bp, Artificial
  Synthetic oligonucleotide
gtcccagggtaccgttcgcctggtagccaaccagcagcactgtcgcctcgtctc

SEQ ID NO: 226212 - DNA, 54 bp, Artificial
  Synthetic oligonucleotide
ccccgcaagaccatccgctcgcagctcaaggagccgctccgtaaccaggggatt

SEQ ID NO: 226213 - DNA, 54 bp, Artificial
  Synthetic oligonucleotide
tcgtattgaaccatgctctctcccgatggtgatcgcgagggaaggcctcgatca

SEQ ID NO: 226214 - DNA, 54 bp, Artificial
  Synthetic oligonucleotide
agcgggttcgggattctttgcgtcaaggatatccgtaaacaatgccttgtcgct

SEQ ID NO: 226215 - DNA, 54 bp, Artificial
  Synthetic oligonucleotide
tcttcttcgaaccggtagggtatgctgctcaagtagtgcttgtcgaacggacct

SEQ ID NO: 226216 - DNA, 60 bp, Artificial
  Synthetic oligonucleotide
gacatgtctggctgcgtagaacgattgtcgcggccgtttcggatattggcctgtgatcta

SEQ ID NO: 226217 - DNA, 54 bp, Artificial
  Synthetic oligonucleotide
ctatgggattagtccagccctttatgattaacgcgaaaaaacttttactcgtca

SEQ ID NO: 226218 - DNA, 54 bp, Artificial
  Synthetic oligonucleotide
agctatacgcaacctcatcggcttgggggccgctattgataacgtgcggcttaa

SEQ ID NO: 226219 - DNA, 54 bp, Artificial
  Synthetic oligonucleotide
ctacccggcattcaaatgggacggtttcaaacatgtggtgcctgacgatcttgc

SEQ ID NO: 226220 - DNA, 54 bp, Artificial
  Synthetic oligonucleotide
agctgccgctcattagcgaaggcaaagggataacgttccagcaggccgaatttt

SEQ ID NO: 226221 - DNA, 54 bp, Artificial
  Synthetic oligonucleotide
ccgtacgatctatgacggtccggctcagcatccaaagggcgacgttctcacctg

SEQ ID NO: 226222 - DNA, 54 bp, Artificial
  Synthetic oligonucleotide
ggttagcccgatcgtcattcaagccttcacgatttcggtcgtggtcagctgacc

SEQ ID NO: 226223 - DNA, 54 bp, Artificial
  Synthetic oligonucleotide
gctttccattggcatgtcaacgaacagtatgttccccgattctcaacttaaata

SEQ ID NO: 226224 - DNA, 54 bp, Artificial
  Synthetic oligonucleotide
tcgcaccttggaagcggcctcgaaaaacggatggcgaaagcagtccgctaaccg

SEQ ID NO: 226225 - DNA, 54 bp, Artificial
  Synthetic oligonucleotide
tcgttttcccagcacagtctccacggcacccgaggacccattttaagaactccg

SEQ ID NO: 226226 - DNA, 54 bp, Artificial
  Synthetic oligonucleotide
acgtttctcccctgcgaacatcgagagtgatccgggcgttcgccggaagcaggc

SEQ ID NO: 226227 - DNA, 60 bp, Artificial
  Synthetic oligonucleotide
cagccgctacgctccgcaggaaagacacgtatcgtaccaactcacgcaaattcctggctg

SEQ ID NO: 226228 - DNA, 54 bp, Artificial
  Synthetic oligonucleotide
ggaactcgccccaagctttcaatcacactcgatggtatcccatcgcacctcgtt

SEQ ID NO: 226229 - DNA, 54 bp, Artificial
  Synthetic oligonucleotide
tctgacgaaagctcggcccactaagagcagttccagagttcagacgcgaacgca

SEQ ID NO: 226230 - DNA, 54 bp, Artificial
  Synthetic oligonucleotide
tcacgtcccgccttttgcgggcaagctctttcactagccatctcgtcccaactt

SEQ ID NO: 226231 - DNA, 54 bp, Artificial
  Synthetic oligonucleotide
tcgcgaaaagctccaaggtggcaacagagacagtcgagcgaatggcaacgctct

SEQ ID NO: 226232 - DNA, 54 bp, Artificial
  Synthetic oligonucleotide
agggactgagcattctcttttcgggagcgggtgccaagagctcgccccgttata

SEQ ID NO: 226233 - DNA, 54 bp, Artificial
  Synthetic oligonucleotide
aagccatccgagcacagacggcgtttcccggttccatattgcgatggttcgacg

SEQ ID NO: 226234 - DNA, 54 bp, Artificial
  Synthetic oligonucleotide
gtcgcaaatagaagatgaacagccacgctggatcaacaattcctctgacggaac

SEQ ID NO: 226235 - DNA, 54 bp, Artificial
  Synthetic oligonucleotide
cgggaagtctcgggtcagagtagtattgtgatccgtctttgcctcgatccgaag

SEQ ID NO: 226236 - DNA, 54 bp, Artificial
  Synthetic oligonucleotide
atcagggtgccgaatatggcaaggggccaccggtcgtgttgttctttcacgcag

SEQ ID NO: 226237 - DNA, 54 bp, Artificial
  Synthetic oligonucleotide
agccccgggagggcaggtccagatggaggggatagtcttgcggttccttctatt

SEQ ID NO: 226238 - DNA, 60 bp, Artificial
  Synthetic oligonucleotide
gacccgtcgaccattggcgcttactcgatactgcatcacacaactccttgtctgtcgtca

SEQ ID NO: 226239 - DNA, 54 bp, Artificial
  Synthetic oligonucleotide
cttacgcttttcggcatcaggctctgacgccgctcccgggaaatgacgcttact

SEQ ID NO: 226240 - DNA, 54 bp, Artificial
  Synthetic oligonucleotide
gtcgtatgtcgtcgtttccttcgacccatcgtcgttcgattggacctgcgtcgt

SEQ ID NO: 226241 - DNA, 54 bp, Artificial
  Synthetic oligonucleotide
agccaacggtctgtccattctggtgcgttcaattcgagagacgcccctcggctc

SEQ ID NO: 226242 - DNA, 54 bp, Artificial
  Synthetic oligonucleotide
gcgccaccggcggtcaagtttgagtccagcgcgttgccaaaattcttagcgcat

SEQ ID NO: 226243 - DNA, 54 bp, Artificial
  Synthetic oligonucleotide
acggtatccgcacacgtccgctctcctatcacgagcataatgcgcaggaagcgg

SEQ ID NO: 226244 - DNA, 52 bp, Artificial
  Synthetic oligonucleotide
cgggaacatttcgtaattccggtggaccacgtctctgccccataaggaactt

SEQ ID NO: 226245 - DNA, 54 bp, Artificial
  Synthetic oligonucleotide
atagaatgtcgacaacgccccttctcgctgtgagaccaaccagacactgttgca

SEQ ID NO: 226246 - DNA, 54 bp, Artificial
  Synthetic oligonucleotide
ggctcttcaatactcgacgggagtagaccgctcgctgttgcatgcccctcaaca

SEQ ID NO: 226247 - DNA, 54 bp, Artificial
  Synthetic oligonucleotide
cgtctgaccagtgcaaacctcagagaatttgaacctcccgaatgcgggctttcc

SEQ ID NO: 226248 - DNA, 53 bp, Artificial
  Synthetic oligonucleotide
ttgaggtatccgacccgccaaactgcggcatccattgtttcgtgatgctcgcg

SEQ ID NO: 226249 - DNA, 57 bp, Artificial
  Synthetic oligonucleotide
cagcagtcgcccctaccagagcggggggctccgctgctgacgtcctaaagtccggat

SEQ ID NO: 226250 - DNA, 53 bp, Artificial
  Synthetic oligonucleotide
actactagctacaactatacggtaagccgcgatccggtactttctccgcccag

SEQ ID NO: 226251 - DNA, 53 bp, Artificial
  Synthetic oligonucleotide
ggtatgacgaccagcggaagtctctttctgagctggttaagaagaccaacttt

SEQ ID NO: 226252 - DNA, 53 bp, Artificial
  Synthetic oligonucleotide
acgttcccggtatatgacattaccgcctgttggaattcattcgatgtgtagct

SEQ ID NO: 226253 - DNA, 53 bp, Artificial
  Synthetic oligonucleotide
tcaggctccaacctgcgagcaaaatgtacggtggcatcgcgagggaataatga

SEQ ID NO: 226254 - DNA, 53 bp, Artificial
  Synthetic oligonucleotide
aaatgtgcctattctggggtgggcagccgcatcagatggacgaatcctcggat

SEQ ID NO: 226255 - DNA, 53 bp, Artificial
  Synthetic oligonucleotide
taacctggaaaggcttcatatccgtcctcgggaaacacatgaagaacgacgat

SEQ ID NO: 226256 - DNA, 53 bp, Artificial
  Synthetic oligonucleotide
taggttgaaacggttacgtcggccttaccggaagctttcagttcagtcgcgaa

SEQ ID NO: 226257 - DNA, 53 bp, Artificial
  Synthetic oligonucleotide
gatatgagatgttcgtgcgcaccacagattagaggcgcgaacaggctggtaat

SEQ ID NO: 226258 - DNA, 53 bp, Artificial
  Synthetic oligonucleotide
gtgtttgggtagatatcgctcttctgcggccgtcagctcgtcatatccgagaa

SEQ ID NO: 226259 - DNA, 53 bp, Artificial
  Synthetic oligonucleotide
ggagcctgccttaaagcgcgaaaagtgtgtgcagttttccgcccgcctcacgc

SEQ ID NO: 226260 - DNA, 59 bp, Artificial
  Synthetic oligonucleotide
gactagcgcatcgtgctttgcgcgtctcaaaagacgcgcggcgccgtaagggaaccaaa

SEQ ID NO: 226261 - DNA, 53 bp, Artificial
  Synthetic oligonucleotide
tagtaagataccgccggggagaatgacgtggctgaagtgaatggcgaatcttt

SEQ ID NO: 226262 - DNA, 53 bp, Artificial
  Synthetic oligonucleotide
ggctcctccgcatgcgccgacagcgtagcgaatatccataattcgcgaccatg

SEQ ID NO: 226263 - DNA, 53 bp, Artificial
  Synthetic oligonucleotide
ggcctgcctccaattttgtatcaagggaataagtgcccatactgatcctttag

SEQ ID NO: 226264 - DNA, 53 bp, Artificial
  Synthetic oligonucleotide
taacagtccggcgaatggcctctggtctggcgcgagcccccgaccgctgcgat

SEQ ID NO: 226265 - DNA, 53 bp, Artificial
  Synthetic oligonucleotide
aaaattcgccctctacatcgattattgcgccgaggtactggatctcatcagtc

SEQ ID NO: 226266 - DNA, 53 bp, Artificial
  Synthetic oligonucleotide
accgcactgctcggaactgcgaccgtggtgtcttcaagcactcaggggcccta

SEQ ID NO: 226267 - DNA, 53 bp, Artificial
  Synthetic oligonucleotide
accgaggtggaaaacctcaattcgatcgcaaaggctcatcaccagacccatat

SEQ ID NO: 226268 - DNA, 53 bp, Artificial
  Synthetic oligonucleotide
tttatgaacgacgtgtcgagatgggccgtgctgaccataggcacggggttggg

SEQ ID NO: 226269 - DNA, 53 bp, Artificial
  Synthetic oligonucleotide
caccctacgccgaatgggaggtagcgcactaacgaacgatcacctcggtactc

SEQ ID NO: 226270 - DNA, 53 bp, Artificial
  Synthetic oligonucleotide
cacgggcgggataggcgagttgcgccagacgaccgcccttaatggtcgacaat

SEQ ID NO: 226271 - DNA, 58 bp, Artificial
  Synthetic oligonucleotide
ggtatcggggataagctgcatggggccacgagctcctttgggagagttgcgaaccacg

SEQ ID NO: 226272 - DNA, 54 bp, Artificial
  Synthetic oligonucleotide
gagaaaagggcgctccccgcacgggtcgagcgcccttttcgcttcggccgctaa

SEQ ID NO: 226273 - DNA, 53 bp, Artificial
  Synthetic oligonucleotide
ttttgtgttcatgctggtctcctatgcccgcaaggcagttggagagacttatc

SEQ ID NO: 226274 - DNA, 53 bp, Artificial
  Synthetic oligonucleotide
gttgaacccaggcacgaaacacacggccctcactttccatccggcccgcacca

SEQ ID NO: 226275 - DNA, 53 bp, Artificial
  Synthetic oligonucleotide
gaggggagggaacgatgcgcagacgtaagagcgggcacaaacgacctttcctg

SEQ ID NO: 226276 - DNA, 53 bp, Artificial
  Synthetic oligonucleotide
gttcgttctttcaaaggggcatacggcctgcgctttgtatgtgacgctcgcaa

SEQ ID NO: 226277 - DNA, 53 bp, Artificial
  Synthetic oligonucleotide
accctacgttcgtctgaaggggccgtgtcaaccggacgtgatagggatggtag

SEQ ID NO: 226278 - DNA, 53 bp, Artificial
  Synthetic oligonucleotide
tcgttcaatcaccggccatcctggggtgaattgaacaaaactcgtatcgacgc

SEQ ID NO: 226279 - DNA, 53 bp, Artificial
  Synthetic oligonucleotide
ggcatcggagctggcaaacggcatgttccggcgcccgggcgaagttgggtttc

SEQ ID NO: 226280 - DNA, 53 bp, Artificial
  Synthetic oligonucleotide
cacatggtatgattaccggttcatggtctagccatcgataagtagctcttatc

SEQ ID NO: 226281 - DNA, 53 bp, Artificial
  Synthetic oligonucleotide
cacgttgcatgctcgcgggtagttttctcaagagtaccgccgtcaggctcgct

SEQ ID NO: 226282 - DNA, 53 bp, Artificial
  Synthetic oligonucleotide
acgctagaccgccagccgatcgctgatttcaacctgcttgtcgaacgggaaag

SEQ ID NO: 226283 - DNA, 52 bp, Artificial
  Synthetic oligonucleotide
cacgtaggggcccgtgcctatcggttttgcgttataggggttcgcccgaata

SEQ ID NO: 226284 - DNA, 53 bp, Artificial
  Synthetic oligonucleotide
tggaccgaaggctaaacctatgcggatgcctcgcatgcagtttccccggatct

SEQ ID NO: 226285 - DNA, 53 bp, Artificial
  Synthetic oligonucleotide
gccaaattcgacctctcttttgccctccgagaacagttcgacgcggataaggc

SEQ ID NO: 226286 - DNA, 51 bp, Artificial
  Synthetic oligonucleotide
agtcgctaatggccgttccgactttcaccccgcccgttggcccgtcgccgg

SEQ ID NO: 226287 - DNA, 53 bp, Artificial
  Synthetic oligonucleotide
tgctgagggaagtgtgtcgcaaggcatgtaagcgagcgaattttccagggccg

SEQ ID NO: 226288 - DNA, 53 bp, Artificial
  Synthetic oligonucleotide
tatgcggggtcccgacgatcctgtgaaccagacattgcttgaacacacgctga

SEQ ID NO: 226289 - DNA, 53 bp, Artificial
  Synthetic oligonucleotide
gccacggtaggatcaatctgttacttcaacgcttcggcgcgtactcctggtca

SEQ ID NO: 226290 - DNA, 53 bp, Artificial
  Synthetic oligonucleotide
agtgtgccggatacaggtcccgtacggcatccggggacgcgctttcggacgtc

SEQ ID NO: 226291 - DNA, 53 bp, Artificial
  Synthetic oligonucleotide
gctaccattcgaatggcttctattcggccactgcgaactacttcgtgacagac

SEQ ID NO: 226292 - DNA, 53 bp, Artificial
  Synthetic oligonucleotide
tgcggctaataacccattcaggcggttcgagcgatcgatcaataacgatatca

SEQ ID NO: 226293 - DNA, 53 bp, Artificial
  Synthetic oligonucleotide
gcgttaacgttccattaatacccggcggccctgcgagggtccagcgacggctc

SEQ ID NO: 226294 - DNA, 60 bp, Artificial
  Synthetic oligonucleotide
gagagatatctcattatatcggcaaaggcggaattacacctgcgggccctcatctgtaat

SEQ ID NO: 226295 - DNA, 53 bp, Artificial
  Synthetic oligonucleotide
aatctgagccaaacggcatctccccgattgagtcccgagatcgcttcatgacc

SEQ ID NO: 226296 - DNA, 53 bp, Artificial
  Synthetic oligonucleotide
acggagaatgtggccgggattttcgtaccggcaagaggaggagacgcgactcc

SEQ ID NO: 226297 - DNA, 53 bp, Artificial
  Synthetic oligonucleotide
ataagagccgtaccgctcgttccattcatttctcgcagcgatgtagggattgt

SEQ ID NO: 226298 - DNA, 53 bp, Artificial
  Synthetic oligonucleotide
aagagcggatttcccttagaaaggagcgctgccatgaggcctgaccaagtgta

SEQ ID NO: 226299 - DNA, 53 bp, Artificial
  Synthetic oligonucleotide
tgacttagcgaaatgcttgtccgcgacttgccgaaataactgtcccgattcac

SEQ ID NO: 226300 - DNA, 53 bp, Artificial
  Synthetic oligonucleotide
tatcgtcagaggcttgaagattaccgccgcgggcttgcatcctatcaatcgcg

SEQ ID NO: 226301 - DNA, 53 bp, Artificial
  Synthetic oligonucleotide
tgatgtgcaagagagttaggagatagcaaggagctctgcggtggaagaagcta

SEQ ID NO: 226302 - DNA, 53 bp, Artificial
  Synthetic oligonucleotide
atatcaacattgcataaagtagccctctgtcgcggtggaggtttcgccacgtc

SEQ ID NO: 226303 - DNA, 53 bp, Artificial
  Synthetic oligonucleotide
tgatgaccgggaatacatcgctcgtgcctacaggcaagcgcaacaactggtcg

SEQ ID NO: 226304 - DNA, 53 bp, Artificial
  Synthetic oligonucleotide
ggtctgcctttgcggcacctggaattccacggttcggacagctggccgagtga

SEQ ID NO: 226305 - DNA, 55 bp, Artificial
  Synthetic oligonucleotide
gagcaagcactacccaatgggctgcgcaaggttaaggtttccgggggtgaaccga

SEQ ID NO: 226306 - DNA, 53 bp, Artificial
  Synthetic oligonucleotide
ttccgatccaggtccgcaagtcaccagcatcgcccgatcgctatcaggtaatc

SEQ ID NO: 226307 - DNA, 53 bp, Artificial
  Synthetic oligonucleotide
ttcacgattgcacgccgtcgttaccgcagggatcctctaggcgcgtcaattca

SEQ ID NO: 226308 - DNA, 53 bp, Artificial
  Synthetic oligonucleotide
ttcaagcacgcatcgaaggcctaatcactgtcgcagcaacatatggaggcgaa

SEQ ID NO: 226309 - DNA, 53 bp, Artificial
  Synthetic oligonucleotide
ttatcggtggcaccgtctctacgccaattttgacggcaatccaggtcagcccc

SEQ ID NO: 226310 - DNA, 53 bp, Artificial
  Synthetic oligonucleotide
ggtccctatcagcccgttaatccagacgcctttggtcatctgggaaccgtgcg

SEQ ID NO: 226311 - DNA, 53 bp, Artificial
  Synthetic oligonucleotide
ttatcctcgttcgccggttagagcctggcgatctcatcacaaatgcgccgtga

SEQ ID NO: 226312 - DNA, 53 bp, Artificial
  Synthetic oligonucleotide
tctctaagccttcgacagagcttgaaagaacggcgcttcgcaagaggcgccgt

SEQ ID NO: 226313 - DNA, 53 bp, Artificial
  Synthetic oligonucleotide
ggggctatgttgcggccgtccatatgtggccctgctgacctataccctttgtc

SEQ ID NO: 226314 - DNA, 53 bp, Artificial
  Synthetic oligonucleotide
ttagacacgagagaccccgtttctgatagccaacacagtcgtgcgaacgccta

SEQ ID NO: 226315 - DNA, 53 bp, Artificial
  Synthetic oligonucleotide
tctgcgggagtttcagctcgctgaagccgcacggtatgtaggcgttactagtg

SEQ ID NO: 226316 - DNA, 59 bp, Artificial
  Synthetic oligonucleotide
gagcgagccgcccactttgtcaatcggcggtgacgaataaccgcggtcgataccagcca

SEQ ID NO: 226317 - DNA, 53 bp, Artificial
  Synthetic oligonucleotide
caaagctcacggcatggtctttggatcgcagtcgccgtttatgtgtccttcgc

SEQ ID NO: 226318 - DNA, 53 bp, Artificial
  Synthetic oligonucleotide
tctggacgattgcgacggtctgggtatgactggcaccgatggtttccgtcgag

SEQ ID NO: 226319 - DNA, 53 bp, Artificial
  Synthetic oligonucleotide
aaccgcctttcgtaggtgctctccggtcgcatacatgttgaccgagtctgtct

SEQ ID NO: 226320 - DNA, 53 bp, Artificial
  Synthetic oligonucleotide
tatagaagcctcatactttacggacgcgcgctctgcagttaaagtcgctagat

SEQ ID NO: 226321 - DNA, 53 bp, Artificial
  Synthetic oligonucleotide
tgtacacccaatcattgggcccaaacatacccgggacttcttcgattatgcgg

SEQ ID NO: 226322 - DNA, 53 bp, Artificial
  Synthetic oligonucleotide
tggtttcccaccctttggcggcagtcgagacctggttttccaactccgtcagc

SEQ ID NO: 226323 - DNA, 53 bp, Artificial
  Synthetic oligonucleotide
tggggtccgtgagacggtgctgcaagcgacatttgcgcgccattctcgtctgt

SEQ ID NO: 226324 - DNA, 53 bp, Artificial
  Synthetic oligonucleotide
acgcccaggcgcggagctacgtcaaccacgcggaaagaaagaatgggcgtgcg

SEQ ID NO: 226325 - DNA, 53 bp, Artificial
  Synthetic oligonucleotide
attggatggaccgttttaaactatacgactttcggccgttatgtgtacgcagt

SEQ ID NO: 226326 - DNA, 53 bp, Artificial
  Synthetic oligonucleotide
tcaataagcacgagacgtggcacattaacaaacgaccttcgcggccagtgact

SEQ ID NO: 226327 - DNA, 59 bp, Artificial
  Synthetic oligonucleotide
gagcgcttgtgaaaagtcagtgtccgggagatggttggtccatgttactccggtagctg

SEQ ID NO: 226328 - DNA, 53 bp, Artificial
  Synthetic oligonucleotide
gcagtgcggtatgcaagcgatctgacggaccgggaatggggattgatctcgcc

SEQ ID NO: 226329 - DNA, 53 bp, Artificial
  Synthetic oligonucleotide
aacgaccgaaatgcacagaacgagtaccgtagacatgatcagaagtgtggagc

SEQ ID NO: 226330 - DNA, 53 bp, Artificial
  Synthetic oligonucleotide
aacgaggaggtaattgtctttgcgggcgtggatcgaggttttgcccttggaaa

SEQ ID NO: 226331 - DNA, 53 bp, Artificial
  Synthetic oligonucleotide
cagctctcggttgccgcactgctcctttaatcgtctcggacgggcaagccaat

SEQ ID NO: 226332 - DNA, 53 bp, Artificial
  Synthetic oligonucleotide
ccctgcctcctcacacaggagccgaaagtcctcgggctttacgctcgcgcccc

SEQ ID NO: 226333 - DNA, 53 bp, Artificial
  Synthetic oligonucleotide
cttgatgcttctatgactgagtaaaggtaggcgggccacaacctcgccctcat

SEQ ID NO: 226334 - DNA, 53 bp, Artificial
  Synthetic oligonucleotide
cgttgcgagacgtgatccgtccgacatattttgatggcctgcatcttgtaccc

SEQ ID NO: 226335 - DNA, 53 bp, Artificial
  Synthetic oligonucleotide
cggcaatcaggctcaacgtctcaccgagccatatatcgacgaagggagaaaga

SEQ ID NO: 226336 - DNA, 53 bp, Artificial
  Synthetic oligonucleotide
ctatcccggtgtcgaaatctccattcgcgatccagacgagaataatgtcggga

SEQ ID NO: 226337 - DNA, 53 bp, Artificial
  Synthetic oligonucleotide
ctggatacgccgggtcggctagatcctcgccccaggttcgcgcaggggttacg

SEQ ID NO: 226338 - DNA, 53 bp, Artificial
  Synthetic oligonucleotide
gaggtttcggtacactcctgtacgcccttccccaagttgtacatgccccggtg

SEQ ID NO: 226339 - DNA, 53 bp, Artificial
  Synthetic oligonucleotide
cccctcgggataggcgacagcaatctttcggagctacctcggaagctgcgtaa

SEQ ID NO: 226340 - DNA, 53 bp, Artificial
  Synthetic oligonucleotide
cccctcgccataatagttcgataaggtggtgcccacaacggcaggtttcgggg

SEQ ID NO: 226341 - DNA, 53 bp, Artificial
  Synthetic oligonucleotide
gacctccggatcgtatgcccggtgtcgatacgtgacagttgatgtcgaacgtt

SEQ ID NO: 226342 - DNA, 53 bp, Artificial
  Synthetic oligonucleotide
cttcgaatgggcgctacgggccgacatgggtctgcctaagtctcaagcacaac

SEQ ID NO: 226343 - DNA, 53 bp, Artificial
  Synthetic oligonucleotide
cttagcgatccacgtgatggcgctgccagatgtaaaacccacgtgcggggcga

SEQ ID NO: 226344 - DNA, 53 bp, Artificial
  Synthetic oligonucleotide
ctctgcctccacccaaaggcgatgctgcgcctaagctttcagccggtctttac

SEQ ID NO: 226345 - DNA, 53 bp, Artificial
  Synthetic oligonucleotide
cttttgagccattcaaggacgaactgacgcttcccaggcgcaacatcctgcca

SEQ ID NO: 226346 - DNA, 53 bp, Artificial
  Synthetic oligonucleotide
ccgcacgtcatgcctgatattcgctgagggcctgatattctcggagcgctggg

SEQ ID NO: 226347 - DNA, 53 bp, Artificial
  Synthetic oligonucleotide
cgatcgacgaatgcctccacacatcactcgtggccgtggcttaagatcacggc

SEQ ID NO: 226348 - DNA, 53 bp, Artificial
  Synthetic oligonucleotide
cgcatgcccagtctaggtcgagggaggccaagggagtatctgcgaaattcatg

SEQ ID NO: 226349 - DNA, 54 bp, Artificial
  Synthetic oligonucleotide
gagtcgctaagataaacctctccaacccaaccgaaacatggttgcttccgtgtt

SEQ ID NO: 226350 - DNA, 53 bp, Artificial
  Synthetic oligonucleotide
ctggggcggctgggacatgcatctcggagagatgcgtgggattatcgatcgtt

SEQ ID NO: 226351 - DNA, 53 bp, Artificial
  Synthetic oligonucleotide
ctgtatgagccaccgggcaacgtcagactcgcaaaaggagtcggcggccgata

SEQ ID NO: 226352 - DNA, 53 bp, Artificial
  Synthetic oligonucleotide
cctaatgcactctgcctccacccaaaggcgatgctgcgcctaagctttcagcc

SEQ ID NO: 226353 - DNA, 53 bp, Artificial
  Synthetic oligonucleotide
gacggaaccgcaaaacgatccgatcccgcaccattttcgcatcgcaagtcaaa

SEQ ID NO: 226354 - DNA, 53 bp, Artificial
  Synthetic oligonucleotide
gacgctgtagtcgatccccacacaacgttgggcggtcctcggacttcggaatt

SEQ ID NO: 226355 - DNA, 53 bp, Artificial
  Synthetic oligonucleotide
cattacatggacatcgggatgaggatcatcattgaggactacgttggacagtc

SEQ ID NO: 226356 - DNA, 53 bp, Artificial
  Synthetic oligonucleotide
cgggcatttcgtggagcaacgggcgagacgccactgcaggcaatttcaaaccg

SEQ ID NO: 226357 - DNA, 52 bp, Artificial
  Synthetic oligonucleotide
ttatgccatgcatggaaatggcaggataggccccgttcccgcccctttcgaa

SEQ ID NO: 226358 - DNA, 52 bp, Artificial
  Synthetic oligonucleotide
ccgaaagaggtctccattccgccactcgccgatacgcgctcgtccgccatac

SEQ ID NO: 226359 - DNA, 52 bp, Artificial
  Synthetic oligonucleotide
gcgagggacgccggtccctttgcgccgggggatcacaaacgagaaactgacg

SEQ ID NO: 226360 - DNA, 53 bp, Artificial
  Synthetic oligonucleotide
gagtttgtgtgactacatgctggggccgtttgtttggtccccgacttgggggg

SEQ ID NO: 226361 - DNA, 52 bp, Artificial
  Synthetic oligonucleotide
gggtggaaaaccttcgaacaactgtgctggaacgcaggcgcgtgctaccttc

SEQ ID NO: 226362 - DNA, 52 bp, Artificial
  Synthetic oligonucleotide
attccctcgaccatcagcgacatttagatcgcgacaagtagcgtcacctcgc

SEQ ID NO: 226363 - DNA, 52 bp, Artificial
  Synthetic oligonucleotide
gtagcgaccgtggcacaataggaggagcacgaaatgcggcgagtggcaattt

SEQ ID NO: 226364 - DNA, 52 bp, Artificial
  Synthetic oligonucleotide
gcagcctcgtctggggctgtgccttccgctgttgcctcgaaccatgccttta

SEQ ID NO: 226365 - DNA, 52 bp, Artificial
  Synthetic oligonucleotide
ttcgatatggattccgggccccttcgggtaagtggacgtgttgcaggtcaca

SEQ ID NO: 226366 - DNA, 52 bp, Artificial
  Synthetic oligonucleotide
cggataggcgcggcataagcgcctacaatagacaccgacgtcgcaaggtttt

SEQ ID NO: 226367 - DNA, 52 bp, Artificial
  Synthetic oligonucleotide
cttgttgaacaagcctgattgggctgaattctgtggcggcactatgactgct

SEQ ID NO: 226368 - DNA, 52 bp, Artificial
  Synthetic oligonucleotide
attggatcctttcggcgtgaccagttcgttccaaagatcaaaatccgcctcc

SEQ ID NO: 226369 - DNA, 52 bp, Artificial
  Synthetic oligonucleotide
gcagaacgaaccagattctcgctaatcgcgtgcttgttcgcaggaccaaagg

SEQ ID NO: 226370 - DNA, 52 bp, Artificial
  Synthetic oligonucleotide
aacaaatcgcatacgatgctcctaaacatgcaagccgtgatgataattgcga

SEQ ID NO: 226371 - DNA, 60 bp, Artificial
  Synthetic oligonucleotide
gatatgagctcccaacttcgtcttcgcgcgaacgatcatcattgaaccctaagagcactg

SEQ ID NO: 226372 - DNA, 52 bp, Artificial
  Synthetic oligonucleotide
aggtgacgtgcgatcgcatagattagcaagccgtgccagacatatagaccga

SEQ ID NO: 226373 - DNA, 52 bp, Artificial
  Synthetic oligonucleotide
ctcttggacactctgcctcagactacctgtagtttcgtgcccttctttcgag

SEQ ID NO: 226374 - DNA, 52 bp, Artificial
  Synthetic oligonucleotide
ctcttcgctactactctccatgtgcgaccaaggatttcgttagaaagcgagg

SEQ ID NO: 226375 - DNA, 52 bp, Artificial
  Synthetic oligonucleotide
tgcaacgataccgcactatctcgttgctccatgggtcattaaaggcacggag

SEQ ID NO: 226376 - DNA, 52 bp, Artificial
  Synthetic oligonucleotide
cgaaacgtccgagcccagttctgctgatcctatggatggcctagccggccgg

SEQ ID NO: 226377 - DNA, 52 bp, Artificial
  Synthetic oligonucleotide
cctgtttaggcacgtcataatccgtcgcgctagacaccaacccggaggtcaa

SEQ ID NO: 226378 - DNA, 52 bp, Artificial
  Synthetic oligonucleotide
gctcacctattacgccgctgcagagttcaagggagcgttcgatccggcatga

SEQ ID NO: 226379 - DNA, 52 bp, Artificial
  Synthetic oligonucleotide
gctcctccgtggcgttcggcatgtctcgttgcaaaatgtactaactagttcg

SEQ ID NO: 226380 - DNA, 52 bp, Artificial
  Synthetic oligonucleotide
agctaggcgcggacaggctggatcgaggagagagtgtgcacgataggtctgg

SEQ ID NO: 226381 - DNA, 52 bp, Artificial
  Synthetic oligonucleotide
cgccttacctcgccgggaccgatcctctattggtcaaaacgtgtcgggcgtt

SEQ ID NO: 226382 - DNA, 57 bp, Artificial
  Synthetic oligonucleotide
ggtcggaaggaaggcagtgtacgagaaaggcaagacttatcgacaggttctgccgcc

SEQ ID NO: 226383 - DNA, 60 bp, Artificial
  Synthetic oligonucleotide
gatccacgccatcgtggacgcaccaacaaataatcgtgacactcgggccaatcagagatc

SEQ ID NO: 226384 - DNA, 52 bp, Artificial
  Synthetic oligonucleotide
gaaatcgtagcatcttgttgcagttgccagcttaaggtgtggacgcatcttt

SEQ ID NO: 226385 - DNA, 52 bp, Artificial
  Synthetic oligonucleotide
ttaagatacttattggcccgctcacgccatacgccgctctgctgggatggat

SEQ ID NO: 226386 - DNA, 52 bp, Artificial
  Synthetic oligonucleotide
cgggtccggtcaagataatgttcaacgcgattgattggggcgacacacaagg

SEQ ID NO: 226387 - DNA, 52 bp, Artificial
  Synthetic oligonucleotide
ctgatgcgcatgctcaaacaagcgcttcgatagatttcccgccactagaaat

SEQ ID NO: 226388 - DNA, 52 bp, Artificial
  Synthetic oligonucleotide
acagatccggcatgtcccacgcttcatcccggttttcggcttcactatggtg

SEQ ID NO: 226389 - DNA, 52 bp, Artificial
  Synthetic oligonucleotide
atggatgtccccggtttcatagcccgcaggcgatgcaagattggcagtgcga

SEQ ID NO: 226390 - DNA, 52 bp, Artificial
  Synthetic oligonucleotide
ctgcgaccaaaggtggcggccttgcttcgagtcgatgagctgcgcagtgacg

SEQ ID NO: 226391 - DNA, 52 bp, Artificial
  Synthetic oligonucleotide
ccttactgtctcgcttggaacgctttaccccgttgataatgcgagatgtccg

SEQ ID NO: 226392 - DNA, 52 bp, Artificial
  Synthetic oligonucleotide
cgtcgttgacgggacgatcgcaccagatcgcgtgatgcacgcccgatatcct

SEQ ID NO: 226393 - DNA, 52 bp, Artificial
  Synthetic oligonucleotide
tctggtcatgtagccagattcctcattttgatcgatgtccggttaacgttac

SEQ ID NO: 226394 - DNA, 56 bp, Artificial
  Synthetic oligonucleotide
aaggcagggttatcagtggtcaggtagtggtcgattggcccagtccggtcaacgcg

SEQ ID NO: 226395 - DNA, 52 bp, Artificial
  Synthetic oligonucleotide
tcttagcgctgcgttaacccttcggcgactcaccccgtgtgctcggaggcgt

SEQ ID NO: 226396 - DNA, 52 bp, Artificial
  Synthetic oligonucleotide
tgtgaatcattcggggttcacaaattaccttctctgggctgagagctactat

SEQ ID NO: 226397 - DNA, 52 bp, Artificial
  Synthetic oligonucleotide
tatgcacaagcatcctctacaggacatcccgctcgtggaagatatcgttgtg

SEQ ID NO: 226398 - DNA, 52 bp, Artificial
  Synthetic oligonucleotide
tattgcggagcggattagggactgatctgagagatacttgtatcagggggca

SEQ ID NO: 226399 - DNA, 52 bp, Artificial
  Synthetic oligonucleotide
cattacgcgtcataaatatagatcctggacccactcgcacttccatgcgagc

SEQ ID NO: 226400 - DNA, 52 bp, Artificial
  Synthetic oligonucleotide
aggaaatgtaatgaccgccatcctgcgaaagaaagttcacggcgcgtctaca

SEQ ID NO: 226401 - DNA, 52 bp, Artificial
  Synthetic oligonucleotide
catggagtgggccttcgcaaaaggcatgctcttcgactgtggatgggagctc

SEQ ID NO: 226402 - DNA, 52 bp, Artificial
  Synthetic oligonucleotide
gaaccggttctattaaccgatagtgccagattccattagccggtgcaacagg

SEQ ID NO: 226403 - DNA, 52 bp, Artificial
  Synthetic oligonucleotide
gcgagaattgttgtccactaggaaattgtttcctcaacccgcgtataattag

SEQ ID NO: 226404 - DNA, 52 bp, Artificial
  Synthetic oligonucleotide
taggcaagttatagcggttcctcgtgccgttttgcatgctggccgaccccct

SEQ ID NO: 226405 - DNA, 60 bp, Artificial
  Synthetic oligonucleotide
aaatgacgcgagcctgagctctatgcgagtatcacctcggtgtgcctgattactctccga

SEQ ID NO: 226406 - DNA, 52 bp, Artificial
  Synthetic oligonucleotide
tgatcttccccagcacaaaccggttctcgccgggacggcacataacgtaacg

SEQ ID NO: 226407 - DNA, 52 bp, Artificial
  Synthetic oligonucleotide
gcgaccgcagctgtcgcagtgcttgcttccggctccgcatacgcgcagtcgg

SEQ ID NO: 226408 - DNA, 52 bp, Artificial
  Synthetic oligonucleotide
cggctaagcatctcgtacggatcactatccaaaggcagcaactcaaagctga

SEQ ID NO: 226409 - DNA, 52 bp, Artificial
  Synthetic oligonucleotide
cccgaatgtcacgatatcagatgacgtccaggccattacgtcagccgttcag

SEQ ID NO: 226410 - DNA, 52 bp, Artificial
  Synthetic oligonucleotide
ctgcgatatgagtgctggcggacgtggcagcctctgatatcttcggatcaac

SEQ ID NO: 226411 - DNA, 52 bp, Artificial
  Synthetic oligonucleotide
aaccgcggcgtatgccaacccgcgcagtcaatccgaaccgggccaccatgac

SEQ ID NO: 226412 - DNA, 52 bp, Artificial
  Synthetic oligonucleotide
gcatgtcgataagcggatacttcgataggaaactgctcaggtcggacggtaa

SEQ ID NO: 226413 - DNA, 52 bp, Artificial
  Synthetic oligonucleotide
atgtcaggggatcgatcttgcgaaggtaagccaagcgctgcggcattagcgg

SEQ ID NO: 226414 - DNA, 52 bp, Artificial
  Synthetic oligonucleotide
tctgagatcaatacaaggggacaaacgtgacactggatctctcgcaatacgc

SEQ ID NO: 226415 - DNA, 52 bp, Artificial
  Synthetic oligonucleotide
tgatcagtgccggaatctgtcgccgcttattcgcaggggtagggtctgccgg

SEQ ID NO: 226416 - DNA, 60 bp, Artificial
  Synthetic oligonucleotide
tcgttgaggcaattagtgttcgtggtcaggattctccaatcctggtgcgtccacatcccg

SEQ ID NO: 226417 - DNA, 52 bp, Artificial
  Synthetic oligonucleotide
cagatggctgcaagcgtctacaaagacccggtgcccctcataaaggacattc

SEQ ID NO: 226418 - DNA, 52 bp, Artificial
  Synthetic oligonucleotide
cgggcaatttccagacgtgaaatctggaagggagcaaatgtcccggcaaaac

SEQ ID NO: 226419 - DNA, 52 bp, Artificial
  Synthetic oligonucleotide
ggggccacgagctcctttgggagagttgcgaaccacgtcaaacctgctttcg

SEQ ID NO: 226420 - DNA, 52 bp, Artificial
  Synthetic oligonucleotide
gaccgaagcggctaagtagttccctttagtgatctaaccgaatatccccggg

SEQ ID NO: 226421 - DNA, 52 bp, Artificial
  Synthetic oligonucleotide
gtatacgggtagacaaagcagacgcaatatcgacctggcatgatcgctaagg

SEQ ID NO: 226422 - DNA, 52 bp, Artificial
  Synthetic oligonucleotide
gttttatattctacgtacccttcgacgggtactacgccacagctggtacata

SEQ ID NO: 226423 - DNA, 52 bp, Artificial
  Synthetic oligonucleotide
tttaacgttgaccgtagtaggcttacgctctatgttagggcgtagtcgtatt

SEQ ID NO: 226424 - DNA, 52 bp, Artificial
  Synthetic oligonucleotide
ctcccatgaatccgactttcccgcctaacctgccaatcgctgtcgcgatgtt

SEQ ID NO: 226425 - DNA, 52 bp, Artificial
  Synthetic oligonucleotide
ggggcgagttcctctaaatgaatgacgccgtgaaccacgctgtggactgtct

SEQ ID NO: 226426 - DNA, 52 bp, Artificial
  Synthetic oligonucleotide
cctacgggattgcgtgatcaaacgatcttggcgctcctgcgaattatcccgg

SEQ ID NO: 226427 - DNA, 60 bp, Artificial
  Synthetic oligonucleotide
aaggcctgaataggcatcggttggaaacgtagagaggcatatcaggccagccatcgtcag

SEQ ID NO: 226428 - DNA, 52 bp, Artificial
  Synthetic oligonucleotide
ggctgggcatcagtcatttcgggtctccatcatgacgggcgcacggctgtga

SEQ ID NO: 226429 - DNA, 52 bp, Artificial
  Synthetic oligonucleotide
tcgacacatgtcgccgaaggggagatgatccgtatcttgcagcgcaagggtt

SEQ ID NO: 226430 - DNA, 52 bp, Artificial
  Synthetic oligonucleotide
ttgggcgctgaaagcaccgaacggacggggcctgcctcgactagcctcgcat

SEQ ID NO: 226431 - DNA, 52 bp, Artificial
  Synthetic oligonucleotide
gcttcgcgtaggttgaaacaacaaacatgcgatgaaaatgggggcggttcct

SEQ ID NO: 226432 - DNA, 52 bp, Artificial
  Synthetic oligonucleotide
ttttgtcaagcgcgcccgtagctgtggttcaggctccgaaaggttcgtccgc

SEQ ID NO: 226433 - DNA, 52 bp, Artificial
  Synthetic oligonucleotide
ttttggtggcgtacggaaagcggggaagctgctcagaatgagcgatcgtacc

SEQ ID NO: 226434 - DNA, 52 bp, Artificial
  Synthetic oligonucleotide
ccccggtcagtcgcccactcccaccgcattgacatggcaatttctgcagtcg

SEQ ID NO: 226435 - DNA, 52 bp, Artificial
  Synthetic oligonucleotide
tccctcccctcctcccgcgatatgtcccaggacagtccggggggcagtccct

SEQ ID NO: 226436 - DNA, 52 bp, Artificial
  Synthetic oligonucleotide
aatttcgcagctaggcgcggacaggctggatcgaggagagagtgtgcacgat

SEQ ID NO: 226437 - DNA, 52 bp, Artificial
  Synthetic oligonucleotide
tccgattccgcctaaatgcatcccgctctagggtggggagccgaagtccaat

SEQ ID NO: 226438 - DNA, 59 bp, Artificial
  Synthetic oligonucleotide
ttccgtcggttgttctcagtagcaacccctaatctgccagcctgtcctagtgcaggtcc

SEQ ID NO: 226439 - DNA, 52 bp, Artificial
  Synthetic oligonucleotide
cagaaggcgatacagcccgtagccacacggacctgcttcgtagcaaaacacc

SEQ ID NO: 226440 - DNA, 52 bp, Artificial
  Synthetic oligonucleotide
ttttaccggaacgtactggggtgtacggatggatactcctaccctgctctgg

SEQ ID NO: 226441 - DNA, 52 bp, Artificial
  Synthetic oligonucleotide
ttttaatacacgcacgccagatgcttgattgaggccgatctttggcagaagg

SEQ ID NO: 226442 - DNA, 52 bp, Artificial
  Synthetic oligonucleotide
gcggtcttcaccgttctggtagatatttgccttcgccgcgtcatactgtttt

SEQ ID NO: 226443 - DNA, 52 bp, Artificial
  Synthetic oligonucleotide
gacgattgtgtgaaaccgcgccaacacctgtgacaaaacctcgtcgcctctg

SEQ ID NO: 226444 - DNA, 52 bp, Artificial
  Synthetic oligonucleotide
gggctcgttgcctatgtactcgcggcgggttcgcgagaccactttattgacc

SEQ ID NO: 226445 - DNA, 52 bp, Artificial
  Synthetic oligonucleotide
ctcccgcagcaaggtcagtgcctgtggcgtatcgatgtcgggaccgtctgtc

SEQ ID NO: 226446 - DNA, 52 bp, Artificial
  Synthetic oligonucleotide
tgcgcttgacacaaagccgaagcgcaccttataagccgctcatcccacgagc

SEQ ID NO: 226447 - DNA, 52 bp, Artificial
  Synthetic oligonucleotide
aaaatggtgcccgcgttcattttacaggaactaggtgtgacccgcacgctcg

SEQ ID NO: 226448 - DNA, 52 bp, Artificial
  Synthetic oligonucleotide
acgcatgcctgtcgttgacttctaactgcccaaagcgttgctccaattagac

SEQ ID NO: 226449 - DNA, 58 bp, Artificial
  Synthetic oligonucleotide
aaaattcgaagacgatgttcgcacatatgccggtcccgatgtttgacgaagcaatccg

SEQ ID NO: 226450 - DNA, 52 bp, Artificial
  Synthetic oligonucleotide
cggatgagtgtgttggacactttcgtgtaacgcgccgtggtcgacagattgt

SEQ ID NO: 226451 - DNA, 52 bp, Artificial
  Synthetic oligonucleotide
agcgccgattgttggttatcgctgtcagcccctggataggaatagaaatgaa

SEQ ID NO: 226452 - DNA, 52 bp, Artificial
  Synthetic oligonucleotide
agattctcgttggtaaatagggccggagtaacaagtgaagtcagaacgtcca

SEQ ID NO: 226453 - DNA, 52 bp, Artificial
  Synthetic oligonucleotide
cgccggtccctttgcgccgggggatcacaaacgagaaactgacgaaatgtgg

SEQ ID NO: 226454 - DNA, 52 bp, Artificial
  Synthetic oligonucleotide
gctgtacgtgctgttgcgagtgggtgagatcgcagtgaccgcttgcgcccgg

SEQ ID NO: 226455 - DNA, 52 bp, Artificial
  Synthetic oligonucleotide
aatccaacttccgacatcgcaatagtccctgttgcacgcagctacttatggt

SEQ ID NO: 226456 - DNA, 52 bp, Artificial
  Synthetic oligonucleotide
tccagggtccggaagccttcggaagccttaacaggggtaaatcatccgcctt

SEQ ID NO: 226457 - DNA, 52 bp, Artificial
  Synthetic oligonucleotide
gcgccgtgaacgggcaacagcatgagggccgcaagtacgaagctccccttag

SEQ ID NO: 226458 - DNA, 52 bp, Artificial
  Synthetic oligonucleotide
cttcacgaggcgatccgacagaattgcgagttcatccgtcgtgtgtgccgca

SEQ ID NO: 226459 - DNA, 52 bp, Artificial
  Synthetic oligonucleotide
tcgcgcagaaagtctcgggaggccgacgtatcgtccagggcccgtagaggcg

SEQ ID NO: 226460 - DNA, 58 bp, Artificial
  Synthetic oligonucleotide
tcgtctgaagttacgcctgctgggagatcccactggatttcccacctgggccatcccg

SEQ ID NO: 226461 - DNA, 52 bp, Artificial
  Synthetic oligonucleotide
aatacgaatggttgcttggttgcacgggcttcatcgactgagtcttcggatg

SEQ ID NO: 226462 - DNA, 52 bp, Artificial
  Synthetic oligonucleotide
tgccaacgaggcaagcgcactaccgatgtcactggatttcgaagcgcctaac

SEQ ID NO: 226463 - DNA, 52 bp, Artificial
  Synthetic oligonucleotide
ggcctgtgcactcttcgatcacaagccccacgcaactgtaaaagttctgtag

SEQ ID NO: 226464 - DNA, 52 bp, Artificial
  Synthetic oligonucleotide
gtccccgccatttggtgataggagcttgcggaattcatgaggcggaacgaac

SEQ ID NO: 226465 - DNA, 52 bp, Artificial
  Synthetic oligonucleotide
gcctatacatgaaggtccgcgggataacaagtgccgcgcggaagactaatcg

SEQ ID NO: 226466 - DNA, 52 bp, Artificial
  Synthetic oligonucleotide
ccccgttcacgcaagtcgacgcgaccataagtcgtatgagttaataagcgac

SEQ ID NO: 226467 - DNA, 52 bp, Artificial
  Synthetic oligonucleotide
cgaagatcgggcccaatcgacgactcttcacgtggagtcgccggaatctgct

SEQ ID NO: 226468 - DNA, 52 bp, Artificial
  Synthetic oligonucleotide
gacaggcgtcttttacgcttcaaattgcgtatttcctgggctagcatcgcgt

SEQ ID NO: 226469 - DNA, 52 bp, Artificial
  Synthetic oligonucleotide
aagacgctctgatcgttcgaatctggaatatcccatccgctttcaggtcatt

SEQ ID NO: 226470 - DNA, 52 bp, Artificial
  Synthetic oligonucleotide
ctgccagctggaagttgaggaatagcgtcttaaattcatcatgatataagca

SEQ ID NO: 226471 - DNA, 57 bp, Artificial
  Synthetic oligonucleotide
aagggacgtctcgtgcgatagacaaagctcgataccccatattcctccgtctccgga

SEQ ID NO: 226472 - DNA, 52 bp, Artificial
  Synthetic oligonucleotide
tcgagcgccaaacccactggctggaagcccatatagacccagtccaagcacg

SEQ ID NO: 226473 - DNA, 52 bp, Artificial
  Synthetic oligonucleotide
tcgagctatccgtagttgggttctgatattcgcacgaactacgtaggcgagc

SEQ ID NO: 226474 - DNA, 52 bp, Artificial
  Synthetic oligonucleotide
gcctcgaatgtctaagaagccttggtaccatcgcgcgccgacagtctcggca

SEQ ID NO: 226475 - DNA, 52 bp, Artificial
  Synthetic oligonucleotide
gatcttccgggcgctcgaagtactgtgctgctacgtccgcgggccaccatgc

SEQ ID NO: 226476 - DNA, 52 bp, Artificial
  Synthetic oligonucleotide
agcgatccagctgttttcggctacgcccgaccacgataatttgtggtggtgg

SEQ ID NO: 226477 - DNA, 52 bp, Artificial
  Synthetic oligonucleotide
accgcaagagcattagccaaacctgcatgggaatccgaacgtttcattgaat

SEQ ID NO: 226478 - DNA, 52 bp, Artificial
  Synthetic oligonucleotide
gccgacgctaagcgcgggcgtatccaaattcgacctgtcgatgttcctctcg

SEQ ID NO: 226479 - DNA, 52 bp, Artificial
  Synthetic oligonucleotide
tcccaccgctgcgaccaaaggtggcggccttgcttcgagtcgatgagctgcg

SEQ ID NO: 226480 - DNA, 52 bp, Artificial
  Synthetic oligonucleotide
gatgggagctgtttgtcgatttgagtgcttatgcaccgtctttccagagtgc

SEQ ID NO: 226481 - DNA, 51 bp, Artificial
  Synthetic oligonucleotide
cggctgcatgatgcatcgtccgttatccctcgccgagacaatcggccttcc

SEQ ID NO: 226482 - DNA, 56 bp, Artificial
  Synthetic oligonucleotide
tgtaggcgaaaacattttgcggtgtcaatagacgccaactgcgaaaattacggccc

SEQ ID NO: 226483 - DNA, 51 bp, Artificial
  Synthetic oligonucleotide
aagcccgcgaactattttccggggccgttggcgtctgtgacctggaaagac

SEQ ID NO: 226484 - DNA, 51 bp, Artificial
  Synthetic oligonucleotide
gcggggtgacaaaggttaactgcctgttgtgccgcggttaaaccgaggtgt

SEQ ID NO: 226485 - DNA, 51 bp, Artificial
  Synthetic oligonucleotide
aacggccgcagcctgtgctccgacctgttgaggcgaattcggacccgtagc

SEQ ID NO: 226486 - DNA, 51 bp, Artificial
  Synthetic oligonucleotide
ataccccgatacgccaccaacatcttcgggcggtcgcgccctttcgccggc

SEQ ID NO: 226487 - DNA, 51 bp, Artificial
  Synthetic oligonucleotide
ataatgtcctaccaataggaaatcaggagaccgccaatggtcgcagcaacg

SEQ ID NO: 226488 - DNA, 51 bp, Artificial
  Synthetic oligonucleotide
gcgtctacccgagttttgagaaatactcccgccgggacagagaggactgtc

SEQ ID NO: 226489 - DNA, 51 bp, Artificial
  Synthetic oligonucleotide
gtagggcttgcgtaccccaagtaaggtggtgtctcgtacaggaacgtaaaa

SEQ ID NO: 226490 - DNA, 51 bp, Artificial
  Synthetic oligonucleotide
gcgttccgagcgggccccggtttacgccatagggatagattttgccgactg

SEQ ID NO: 226491 - DNA, 51 bp, Artificial
  Synthetic oligonucleotide
tatcggcatggaggtatcggtcaatagctgacccgccttccagatacgaag

SEQ ID NO: 226492 - DNA, 51 bp, Artificial
  Synthetic oligonucleotide
tgcatttcttgcaattgcgccctccgcatatgctgaagttgcaccgccgcc

SEQ ID NO: 226493 - DNA, 60 bp, Artificial
  Synthetic oligonucleotide
agaatgtgtgcctcttcacaatgatccgggtcgagcgttacggatccgtggtaatcgaga

SEQ ID NO: 226494 - DNA, 60 bp, Artificial
  Synthetic oligonucleotide
aagggcgggctacgcctaatgcactctgcctccacccaaaggcgatgctgcgcctaagct

SEQ ID NO: 226495 - DNA, 51 bp, Artificial
  Synthetic oligonucleotide
cctcgtctgccttaaagcccgttccgaccgatcccacgtaaaccaactcgc

SEQ ID NO: 226496 - DNA, 51 bp, Artificial
  Synthetic oligonucleotide
ccactctagcccaggtcgttcgcatggtacgggctgtggccatcgaggtcc

SEQ ID NO: 226497 - DNA, 51 bp, Artificial
  Synthetic oligonucleotide
cccggagtaattgtacaatctgaggagtattcgccaacaggtcgcgagaag

SEQ ID NO: 226498 - DNA, 51 bp, Artificial
  Synthetic oligonucleotide
ccactgcccctcaggcggaagctcttggtagcggccaaatacaaggacgct

SEQ ID NO: 226499 - DNA, 51 bp, Artificial
  Synthetic oligonucleotide
ctgcgatattctcgaccgatgaaactcagtcagaccatacggttctgtaca

SEQ ID NO: 226500 - DNA, 51 bp, Artificial
  Synthetic oligonucleotide
ctacgagaaaggctcatgcgcgggaagctggagcctggaaccttatcctgt

SEQ ID NO: 226501 - DNA, 51 bp, Artificial
  Synthetic oligonucleotide
aggttcatgcagagcgacggattcacgggcgagctttctgaaccgggatcg

SEQ ID NO: 226502 - DNA, 51 bp, Artificial
  Synthetic oligonucleotide
cggattccaagacatacgatctatcggatctggtaatattggcgctaccaa

SEQ ID NO: 226503 - DNA, 51 bp, Artificial
  Synthetic oligonucleotide
cggatggtcatgtcgatatacctctctggttggataggagaaagcgtagca

SEQ ID NO: 226504 - DNA, 51 bp, Artificial
  Synthetic oligonucleotide
ccggacttcacccgcagacacgcatcgtggctgatacagtcgatcgggcag

SEQ ID NO: 226505 - DNA, 60 bp, Artificial
  Synthetic oligonucleotide
tcgtcattgactgagccacgcgcggaatatcggagaagctctctcggtacagaagtctcg

SEQ ID NO: 226506 - DNA, 51 bp, Artificial
  Synthetic oligonucleotide
tcgcacctacgctggaatgagcctcataggcgacgatcctttggctccgta

SEQ ID NO: 226507 - DNA, 51 bp, Artificial
  Synthetic oligonucleotide
tcgccagcaggattgtccgcagtgtcaccatttcgcttctcctagctccgg

SEQ ID NO: 226508 - DNA, 51 bp, Artificial
  Synthetic oligonucleotide
ggcgcccaaggtccgagccccggccataaaccaatgggaagagtattgtcc

SEQ ID NO: 226509 - DNA, 51 bp, Artificial
  Synthetic oligonucleotide
gggtaaggacgcagagttcatagctgatacggttgacgcgaccatttccat

SEQ ID NO: 226510 - DNA, 51 bp, Artificial
  Synthetic oligonucleotide
acaagcgcacgacaatcctaattcgttttggcaaaccttacttgttcttac

SEQ ID NO: 226511 - DNA, 51 bp, Artificial
  Synthetic oligonucleotide
agagtgacgagcgcggtgagaagtccctctggtccacatgcgtacacatga

SEQ ID NO: 226512 - DNA, 51 bp, Artificial
  Synthetic oligonucleotide
tcgcgcttttgaaggctaagattttcagtcacctgtggtagctgggatcta

SEQ ID NO: 226513 - DNA, 51 bp, Artificial
  Synthetic oligonucleotide
aagttcattcggcggggaatgtagcggctttgtgcgggggtgaacagctta

SEQ ID NO: 226514 - DNA, 51 bp, Artificial
  Synthetic oligonucleotide
tccaccgcgccgtgtccactgatgtagacgacagctaccttcgggtcgatc

SEQ ID NO: 226515 - DNA, 51 bp, Artificial
  Synthetic oligonucleotide
ctctcgtggctccgaggtcggttgtcgtgttgatgtccgattgaggttcct

SEQ ID NO: 226516 - DNA, 60 bp, Artificial
  Synthetic oligonucleotide
aaggtatcccgacatggaaaaaccacgtagcaaggcagcgctctggctgcttgtcattcc

SEQ ID NO: 226517 - DNA, 51 bp, Artificial
  Synthetic oligonucleotide
tcattgccgtcgtaaaagctggcgctacctacctcccgcttgacccgacta

SEQ ID NO: 226518 - DNA, 51 bp, Artificial
  Synthetic oligonucleotide
tcggcaattgttgggtctcacgcgtaaacgctcgcctgatcatgcggtcgc

SEQ ID NO: 226519 - DNA, 51 bp, Artificial
  Synthetic oligonucleotide
tcggcccgacgtagccaaggcgtctatccaactgcacaggaggccacttta

SEQ ID NO: 226520 - DNA, 51 bp, Artificial
  Synthetic oligonucleotide
gggcgagacgcttttgccggagagtgcccgagaggatcagtcttcgtcaac

SEQ ID NO: 226521 - DNA, 51 bp, Artificial
  Synthetic oligonucleotide
agcagtagccggtgtgtcaaccgacagagaatactgatggctcggagggcg

SEQ ID NO: 226522 - DNA, 51 bp, Artificial
  Synthetic oligonucleotide
acaaaaggctccagtgggctcatatggtgcgaccgtcgccgcttccaaacg

SEQ ID NO: 226523 - DNA, 51 bp, Artificial
  Synthetic oligonucleotide
gggctccgctgctgacgtcctaaagtccggattcgcgccgtttcgccaaca

SEQ ID NO: 226524 - DNA, 51 bp, Artificial
  Synthetic oligonucleotide
tccgctacacttttcaagctgaagcgagagctacaactcacgagctcatgg

SEQ ID NO: 226525 - DNA, 51 bp, Artificial
  Synthetic oligonucleotide
acaaagacagccgtggcttggccctccatatcgacgagcagactcgccggt

SEQ ID NO: 226526 - DNA, 51 bp, Artificial
  Synthetic oligonucleotide
aatgggtatcccgatttcctgctccatgcgatcgattatgggagcggccct

SEQ ID NO: 226527 - DNA, 57 bp, Artificial
  Synthetic oligonucleotide
aaggtcagagatgtctgggggcccctagacacatatgacgccccaaaaattcgattc

SEQ ID NO: 226528 - DNA, 51 bp, Artificial
  Synthetic oligonucleotide
cggcagctctcgtttgatccccacatgcgctcaatcgcggggttacgcgaa

SEQ ID NO: 226529 - DNA, 51 bp, Artificial
  Synthetic oligonucleotide
tcgaataacgagattctcggtgcgtgaagatgaatggtcgtatctcggtcg

SEQ ID NO: 226530 - DNA, 51 bp, Artificial
  Synthetic oligonucleotide
agcctcgccgagacggacacctagccaagtgacgcgtgaaagcaatcgtgg

SEQ ID NO: 226531 - DNA, 51 bp, Artificial
  Synthetic oligonucleotide
ggggcgggcgtgtactgttccctcggaatcggaagtcaggttcgacccatt

SEQ ID NO: 226532 - DNA, 51 bp, Artificial
  Synthetic oligonucleotide
cccattgaatgcagaatccagtcgccgcgtgcctcatccaaggcttgcttt

SEQ ID NO: 226533 - DNA, 51 bp, Artificial
  Synthetic oligonucleotide
ctcggcgccatccccaactgaattacgacgccctgcgcataaagatggccg

SEQ ID NO: 226534 - DNA, 51 bp, Artificial
  Synthetic oligonucleotide
agcgaagaagggagcagaactccatccgattggctccccggacgcgacgcg

SEQ ID NO: 226535 - DNA, 51 bp, Artificial
  Synthetic oligonucleotide
tctgagcggtttggaccagcgcacgagatccccctcgaaatgcggacacgt

SEQ ID NO: 226536 - DNA, 51 bp, Artificial
  Synthetic oligonucleotide
ggagcgaacgcgctgtgacggtgctttccggtccatacgttgcgaccatga

SEQ ID NO: 226537 - DNA, 51 bp, Artificial
  Synthetic oligonucleotide
ctatgtacgccatttccctgcgcaaccaagtgtctcatgctgccgtcgcaa

SEQ ID NO: 226538 - DNA, 60 bp, Artificial
  Synthetic oligonucleotide
aagccaatgagccccattgccatcgaggctgacagcccgcctcaaagcagaacgttcatg

SEQ ID NO: 226539 - DNA, 51 bp, Artificial
  Synthetic oligonucleotide
tattggccgtgagtgaaatccccttcagaacttcgagcgtcccaaagtttt

SEQ ID NO: 226540 - DNA, 51 bp, Artificial
  Synthetic oligonucleotide
ctatcgttggacctgccatggttttaccgcgctgtaatttctaagcctgat

SEQ ID NO: 226541 - DNA, 51 bp, Artificial
  Synthetic oligonucleotide
acaggcacctcaaccccgcgtattaggatcggttcgccagcctttagcgga

SEQ ID NO: 226542 - DNA, 51 bp, Artificial
  Synthetic oligonucleotide
tattccctatgaccctctctgggcgtggcggccagtggttcgttgaatctt

SEQ ID NO: 226543 - DNA, 51 bp, Artificial
  Synthetic oligonucleotide
ccgttgcctgcgaaatcgcggttagcgcttcattcaattgccggaccgacg

SEQ ID NO: 226544 - DNA, 51 bp, Artificial
  Synthetic oligonucleotide
tgaacgtgtcagccatctccccgaacacctgtcagttatgtgtccgggcta

SEQ ID NO: 226545 - DNA, 51 bp, Artificial
  Synthetic oligonucleotide
ctgcagagcgctcacggcgctatcgcagctaatcgtcgacttcccatgcgt

SEQ ID NO: 226546 - DNA, 51 bp, Artificial
  Synthetic oligonucleotide
tatgggccaactccacgcgttgggacatgatcgcacacggcagcaaagagg

SEQ ID NO: 226547 - DNA, 51 bp, Artificial
  Synthetic oligonucleotide
gcttgttccgggagttggggcaagaaatcggtggaattaatcggtccaggc

SEQ ID NO: 226548 - DNA, 51 bp, Artificial
  Synthetic oligonucleotide
cccgcgtgtgtactgtatttggacgagccagcatggttgcaaggatggcga

SEQ ID NO: 226549 - DNA, 58 bp, Artificial
  Synthetic oligonucleotide
tttgacgcgaatcagcaaatgaggccaaaatggaaaacggctcggagttggaagctcc

SEQ ID NO: 226550 - DNA, 51 bp, Artificial
  Synthetic oligonucleotide
tatggaatccagcttgctccgtcggctgaccctgcttggatcgatccggtg

SEQ ID NO: 226551 - DNA, 51 bp, Artificial
  Synthetic oligonucleotide
tatgcggtgtccaacagcaaactcgccgagggacaacgtccactcgtcctc

SEQ ID NO: 226552 - DNA, 51 bp, Artificial
  Synthetic oligonucleotide
gggttacctaccggtttggtggctggaaacttcgcgccaagtctcgcgagc

SEQ ID NO: 226553 - DNA, 51 bp, Artificial
  Synthetic oligonucleotide
tcggtttagcggctcgtgcggactttgacatcgatgcatccttgccgtgta

SEQ ID NO: 226554 - DNA, 51 bp, Artificial
  Synthetic oligonucleotide
tcatgaattcgttcccttcgttgttacggcatgcgtttgatgggttgaatc

SEQ ID NO: 226555 - DNA, 51 bp, Artificial
  Synthetic oligonucleotide
ggcagcaattcacgccggctcaaaggcggtcatggtcggaccgacggttgt

SEQ ID NO: 226556 - DNA, 51 bp, Artificial
  Synthetic oligonucleotide
ccggtgagccatggcgcaagcgtaatgacatgcagctgattagcctcccgc

SEQ ID NO: 226557 - DNA, 51 bp, Artificial
  Synthetic oligonucleotide
ccatgccaatgacgtatcgttcgtcaggccgcatgcacgctcctccacaga

SEQ ID NO: 226558 - DNA, 51 bp, Artificial
  Synthetic oligonucleotide
ggtattcctgtagtgccagtgggtcgggacgcctcagaggacgatccagcg

SEQ ID NO: 226559 - DNA, 51 bp, Artificial
  Synthetic oligonucleotide
aaggctcaacccaggtaggcctgcgttgctgcttgggtccacatttcgcac

SEQ ID NO: 226560 - DNA, 57 bp, Artificial
  Synthetic oligonucleotide
tggtttctagccccggccgtgactgcatagacctcacgtttcaccccgctagccgcg

SEQ ID NO: 226561 - DNA, 51 bp, Artificial
  Synthetic oligonucleotide
tcgtgcaggaggggtaatgagggcggtgtgttgcaatgacttcaggagcgg

SEQ ID NO: 226562 - DNA, 51 bp, Artificial
  Synthetic oligonucleotide
ggcaacgacatgcgagatcccctgcggccatggggccacggaggatcgcta

SEQ ID NO: 226563 - DNA, 51 bp, Artificial
  Synthetic oligonucleotide
tcagagcgacgatcttaccttctccgcgatctcgggagaaagccactttgt

SEQ ID NO: 226564 - DNA, 51 bp, Artificial
  Synthetic oligonucleotide
ccgctgcctgagttccgatatttctcgcatcttgcgcggcgtctagtcccc

SEQ ID NO: 226565 - DNA, 51 bp, Artificial
  Synthetic oligonucleotide
ggtcgcgaagccgcgacctcctcaatccgcctgacctggagattacctctt

SEQ ID NO: 226566 - DNA, 51 bp, Artificial
  Synthetic oligonucleotide
ggataggggttggatcagctattgtgaggagagtgaatatctctattgcgc

SEQ ID NO: 226567 - DNA, 51 bp, Artificial
  Synthetic oligonucleotide
aagctggtagtgcatgtgtaggagatgtgcatcctggagcgtccggggcgt

SEQ ID NO: 226568 - DNA, 51 bp, Artificial
  Synthetic oligonucleotide
ctcaaagccgcgcctgttaaaatccgtccattcggcagcgggaatggtctt

SEQ ID NO: 226569 - DNA, 51 bp, Artificial
  Synthetic oligonucleotide
accgacgagcagccgacactgcgggaaaaggcgtatgagagcttcacacgc

SEQ ID NO: 226570 - DNA, 51 bp, Artificial
  Synthetic oligonucleotide
cgaaacaaccgcgaccctgccattctattcgtcaaacttgcttctacgcaa

SEQ ID NO: 226571 - DNA, 60 bp, Artificial
  Synthetic oligonucleotide
aaatccacaccgcatgtccgtataacctgtcgctatccagacacgcacatcctggccaga

SEQ ID NO: 226572 - DNA, 51 bp, Artificial
  Synthetic oligonucleotide
attggccgtatcctgggctccgcgatgtggtttccctatgacgcgcaattt

SEQ ID NO: 226573 - DNA, 51 bp, Artificial
  Synthetic oligonucleotide
cgaaacgccctgtaagatcttttgcaccgagggacgctcgctgatccgctg

SEQ ID NO: 226574 - DNA, 51 bp, Artificial
  Synthetic oligonucleotide
aacaaaaccaccgccataggactccatccacggctggccaagtgcgagccg

SEQ ID NO: 226575 - DNA, 51 bp, Artificial
  Synthetic oligonucleotide
aaattgcggcacaatttatctcctttaaggggcgcacaagattttgtacgc

SEQ ID NO: 226576 - DNA, 51 bp, Artificial
  Synthetic oligonucleotide
cgtcctactcagacgtcgcaggcccgtggttctcgctcgattacacctatg

SEQ ID NO: 226577 - DNA, 51 bp, Artificial
  Synthetic oligonucleotide
acgcgtgcatagaaatcgtgaaccgacaggctcctggactgccggagaaat

SEQ ID NO: 226578 - DNA, 51 bp, Artificial
  Synthetic oligonucleotide
gcaatggccaattggcagcgcaaaatctctctccggcaatacggtaacgtt

SEQ ID NO: 226579 - DNA, 51 bp, Artificial
  Synthetic oligonucleotide
ttccgtttcgcatcgcggctaccataactcgaccctcagctttaccgattg

SEQ ID NO: 226580 - DNA, 51 bp, Artificial
  Synthetic oligonucleotide
cgggtttaatgcgtggatgtggagccgatcgcaaagccgttagaagggccc

SEQ ID NO: 226581 - DNA, 51 bp, Artificial
  Synthetic oligonucleotide
gaagcgccttcgttggcttccagcgatatgctcacttctccctggtcgggt

SEQ ID NO: 226582 - DNA, 60 bp, Artificial
  Synthetic oligonucleotide
tggcgtgttcatatcaaacaataaggcaccgcctcggcaaagataagatgagaatctact

SEQ ID NO: 226583 - DNA, 51 bp, Artificial
  Synthetic oligonucleotide
gcaagtgcccggcccatttttccgacgccgaccaatccaattctcggacgt

SEQ ID NO: 226584 - DNA, 51 bp, Artificial
  Synthetic oligonucleotide
acgcgtgaccgaccccacccggcccaatgaggtggtcgtcagtgagccttt

SEQ ID NO: 226585 - DNA, 51 bp, Artificial
  Synthetic oligonucleotide
caaaccgcggatcaagcgtcggcaacgtgggaagagagccaacggccacgt

SEQ ID NO: 226586 - DNA, 51 bp, Artificial
  Synthetic oligonucleotide
acgccgctgttcgtacttgctagctacaactggcgccgaagtgctacgccg

SEQ ID NO: 226587 - DNA, 51 bp, Artificial
  Synthetic oligonucleotide
gcaaaggtttggcacgacggctcatttggtcgcccgtatctcagccgcgac

SEQ ID NO: 226588 - DNA, 51 bp, Artificial
  Synthetic oligonucleotide
tgtggctaaaacgtaatccggaagctgcgaaggggttcgtggtactaacga

SEQ ID NO: 226589 - DNA, 51 bp, Artificial
  Synthetic oligonucleotide
cccttcgcacataaccgtttgcgaacccgcgtgttgggtcgccggtattgt

SEQ ID NO: 226590 - DNA, 51 bp, Artificial
  Synthetic oligonucleotide
ctttgtgcgtctgaaaagacgcacggcgctgtaggtcccgagcgatttcaa

SEQ ID NO: 226591 - DNA, 51 bp, Artificial
  Synthetic oligonucleotide
aacccgtgccgtgcgaaatctcggggtctctcagcaagtggacctctccga

SEQ ID NO: 226592 - DNA, 51 bp, Artificial
  Synthetic oligonucleotide
gtctgctgattaactatgaagcctctggaagcccgctattcgttcagcagc

SEQ ID NO: 226593 - DNA, 60 bp, Artificial
  Synthetic oligonucleotide
tcggacaggttatctacctgacccaccattggcatctctgcgagatcgcgcgagacgttg

SEQ ID NO: 226594 - DNA, 51 bp, Artificial
  Synthetic oligonucleotide
gtctggtgcggggtatccatcggcagctctcgtttgatccccacatgcgct

SEQ ID NO: 226595 - DNA, 51 bp, Artificial
  Synthetic oligonucleotide
aacccacaaatccggccgcctacacagccgtcggagcgcaaactggtgccc

SEQ ID NO: 226596 - DNA, 51 bp, Artificial
  Synthetic oligonucleotide
cgcaagtgtttggaggcctatagcttgcaaagcgtgagggagcagcgggca

SEQ ID NO: 226597 - DNA, 51 bp, Artificial
  Synthetic oligonucleotide
atgtttgcgctcgggatagggattatgattcctcggccctgcacccctcga

SEQ ID NO: 226598 - DNA, 51 bp, Artificial
  Synthetic oligonucleotide
ttagcgaagcctcattgttgtcggtgcttcctcaggctgccggggacgggt

SEQ ID NO: 226599 - DNA, 51 bp, Artificial
  Synthetic oligonucleotide
cgtcgccgctcacaaccagagtgtccgtatcgagtgtcgaggtaacatcat

SEQ ID NO: 226600 - DNA, 51 bp, Artificial
  Synthetic oligonucleotide
gcaggtttaagtccggtaacggctcagtctccacgtatgacaagaatgcat

SEQ ID NO: 226601 - DNA, 51 bp, Artificial
  Synthetic oligonucleotide
ttatcgccccggcatcagagtggcgcccaaggtccgagccccggccataaa

SEQ ID NO: 226602 - DNA, 51 bp, Artificial
  Synthetic oligonucleotide
cctttgcaccactctagcccaggtcgttcgcatggtacgggctgtggccat

SEQ ID NO: 226603 - DNA, 51 bp, Artificial
  Synthetic oligonucleotide
attcggcgagtcgcttatctcattgggcaatacgctccgaaggccgtcggc

SEQ ID NO: 226604 - DNA, 57 bp, Artificial
  Synthetic oligonucleotide
agaaggtcaccgcaaacgatgggacaatcagaattcttgtcccagtcgagtccctcc

SEQ ID NO: 226605 - DNA, 60 bp, Artificial
  Synthetic oligonucleotide
tgcctggatttgcgatttctcatccacgcatagcacgactgcccgatcaggtggcgacat

SEQ ID NO: 226606 - DNA, 51 bp, Artificial
  Synthetic oligonucleotide
aacaagtgccaacaggccgcattagcgggtccttgaggcgatcggagacga

SEQ ID NO: 226607 - DNA, 51 bp, Artificial
  Synthetic oligonucleotide
cagcgctgacagaggacgaaagggtctcggagctttccggtttgcagggga

SEQ ID NO: 226608 - DNA, 51 bp, Artificial
  Synthetic oligonucleotide
gacattcccgtcttttcgctgctttccgacttcgcctcaggggtgcgcaat

SEQ ID NO: 226609 - DNA, 51 bp, Artificial
  Synthetic oligonucleotide
ttgtgaggagaatccaaccggtgcggagcgcaaaagttccgtcggcgtcag

SEQ ID NO: 226610 - DNA, 51 bp, Artificial
  Synthetic oligonucleotide
caatgaccacgcatcgccacaggccggtacgccgccttgggttcatgtgct

SEQ ID NO: 226611 - DNA, 51 bp, Artificial
  Synthetic oligonucleotide
gataattcgattgggtacatagcgatagttcttgagatcccgatcgctaag

SEQ ID NO: 226612 - DNA, 51 bp, Artificial
  Synthetic oligonucleotide
gaccagtctatacgacgaggtggaactctcgcgtcatgctgaattgttcga

SEQ ID NO: 226613 - DNA, 51 bp, Artificial
  Synthetic oligonucleotide
tttcgcggataccccggctatagtggcggcgcaaacggtttccattgctcc

SEQ ID NO: 226614 - DNA, 51 bp, Artificial
  Synthetic oligonucleotide
cgactttcggcgctgacctggaattatgcccggcgtggcacaacgctcgac

SEQ ID NO: 226615 - DNA, 51 bp, Artificial
  Synthetic oligonucleotide
cagaggcgcgtcctgattgcatggaaccgagcgattacgccttcgggacaa

SEQ ID NO: 226616 - DNA, 60 bp, Artificial
  Synthetic oligonucleotide
tgaaagccgagaaccagattgtcaacatttatagctgacacagggcaaaacatcaacctc

SEQ ID NO: 226617 - DNA, 51 bp, Artificial
  Synthetic oligonucleotide
cgacaatgccggtagtgagcagcaatgcgcttgcggtatgcgggtgctctc

SEQ ID NO: 226618 - DNA, 51 bp, Artificial
  Synthetic oligonucleotide
tttggcccggcctgcctgcatcgtcttgtaagcggtgcgcgactggcaacg

SEQ ID NO: 226619 - DNA, 51 bp, Artificial
  Synthetic oligonucleotide
gacgccccgcccgcaaaagcggagagttcgcgagagacgatgacggaaggc

SEQ ID NO: 226620 - DNA, 51 bp, Artificial
  Synthetic oligonucleotide
gacgcggttaacctcccgatcggctggaaagccaccgtggttagtcacttc

SEQ ID NO: 226621 - DNA, 51 bp, Artificial
  Synthetic oligonucleotide
gacgtatcagtcgagcggccggaatgaatatgtcctgagcctagacggata

SEQ ID NO: 226622 - DNA, 51 bp, Artificial
  Synthetic oligonucleotide
ttttgcggatgtcggagagagtaacgtgagccatcaatcggtttccggttc

SEQ ID NO: 226623 - DNA, 51 bp, Artificial
  Synthetic oligonucleotide
ttttgcgggaggcctttcgttctggcgtcgtctcctgagttagggcccgat

SEQ ID NO: 226624 - DNA, 51 bp, Artificial
  Synthetic oligonucleotide
gactatgaccatgagaagccgatggcagaactgacgtctgtcgcgcgtgtt

SEQ ID NO: 226625 - DNA, 51 bp, Artificial
  Synthetic oligonucleotide
caacaagcgtgtcgcaagtgcccggcccatttttccgacgccgaccaatcc

SEQ ID NO: 226626 - DNA, 51 bp, Artificial
  Synthetic oligonucleotide
caacacgcttgctttcccccgactcgttgagcttcggggtcaaccccagta

SEQ ID NO: 226627 - DNA, 57 bp, Artificial
  Synthetic oligonucleotide
tcttcgatgaggccgttcccaaatcccggcacagtcgacactaacttggtctaccaa

SEQ ID NO: 226628 - DNA, 51 bp, Artificial
  Synthetic oligonucleotide
cgtcatgcgaagattgccgcaacgtgcctctctatcgtgcccggattcctc

SEQ ID NO: 226629 - DNA, 51 bp, Artificial
  Synthetic oligonucleotide
gattttgccggtccaaggcggaagggacatataaggcgttccgagcgggcc

SEQ ID NO: 226630 - DNA, 51 bp, Artificial
  Synthetic oligonucleotide
caaccggagctgcgcactcacgcgacgctaatatgccgtgatgagagctcg

SEQ ID NO: 226631 - DNA, 51 bp, Artificial
  Synthetic oligonucleotide
gattcagctaagggcgggtcacggccgctttagaagtagtccagctcgtca

SEQ ID NO: 226632 - DNA, 51 bp, Artificial
  Synthetic oligonucleotide
taacgcaaataacgcatttgttgagatggattcatgcattgaccgatggaa

SEQ ID NO: 226633 - DNA, 51 bp, Artificial
  Synthetic oligonucleotide
ttgacgaagcggaccggaacggaaatcgatgtcagcgttcgtggggacgca

SEQ ID NO: 226634 - DNA, 51 bp, Artificial
  Synthetic oligonucleotide
ttgcacagttttaccgctccgatctcacggacgcttactgggctccgacag

SEQ ID NO: 226635 - DNA, 51 bp, Artificial
  Synthetic oligonucleotide
cgagtatcattctcggaatgatgcggatctccaatatgagcaatggcgaaa

SEQ ID NO: 226636 - DNA, 51 bp, Artificial
  Synthetic oligonucleotide
ttgcgacgtaaagaggaactctctcttgattcagggggttaaccaccatga

SEQ ID NO: 226637 - DNA, 51 bp, Artificial
  Synthetic oligonucleotide
cggtctcgttgagagcggtcgagcggacggcataggtgaccaaagcggagc

SEQ ID NO: 226638 - DNA, 55 bp, Artificial
  Synthetic oligonucleotide
ttacctggtgttctcaccgtggagagtaacggggacgtttgcaggctttgttctc

SEQ ID NO: 226639 - DNA, 51 bp, Artificial
  Synthetic oligonucleotide
aaactcgccgagggacaacgtccactcgtcctctatgccgcggaatgcaac

SEQ ID NO: 226640 - DNA, 51 bp, Artificial
  Synthetic oligonucleotide
caggccgcatgcacgctcctccacagacggaggtactctccgccgatctcc

SEQ ID NO: 226641 - DNA, 51 bp, Artificial
  Synthetic oligonucleotide
cgtatagatcgcccagctgataggagacggccattcgctggtattctcata

SEQ ID NO: 226642 - DNA, 51 bp, Artificial
  Synthetic oligonucleotide
caggatgcgcacggagacagggttggcaggctcggcgaacgacatctgcag

SEQ ID NO: 226643 - DNA, 51 bp, Artificial
  Synthetic oligonucleotide
caagcttgccgcggaattgggtacgaccgggaccgccttagctgcggtgtg

SEQ ID NO: 226644 - DNA, 51 bp, Artificial
  Synthetic oligonucleotide
aaacgcggatcgtcattttccgcaccgaggatcattctggccgcaggactt

SEQ ID NO: 226645 - DNA, 51 bp, Artificial
  Synthetic oligonucleotide
tgcttcgcattgccattccgtcgaaagcgcctgaagcgtcctggtgagaaa

SEQ ID NO: 226646 - DNA, 51 bp, Artificial
  Synthetic oligonucleotide
gcgctaaggcaaaggggacacacgtgaccgatatacccctcagggcctgct

SEQ ID NO: 226647 - DNA, 51 bp, Artificial
  Synthetic oligonucleotide
gccggtatgggcgtaggacctttggcgctttggtgtcggaccaatgtccca

SEQ ID NO: 226648 - DNA, 51 bp, Artificial
  Synthetic oligonucleotide
atccaggcaatgacatcaggtcacagcggcagcctttcgacggtgcatgcg

SEQ ID NO: 226649 - DNA, 55 bp, Artificial
  Synthetic oligonucleotide
ttaagcgcaggataggtgtccggtttctcgaaagtatggaatttccgacctttga

SEQ ID NO: 226650 - DNA, 51 bp, Artificial
  Synthetic oligonucleotide
accaagtctcccttgagcaatatttatccgaagggcatatcgtcgtttcgt

SEQ ID NO: 226651 - DNA, 51 bp, Artificial
  Synthetic oligonucleotide
atcccctactccgatatgatgaccctcaccccataccgaccgccaaggccc

SEQ ID NO: 226652 - DNA, 51 bp, Artificial
  Synthetic oligonucleotide
gtcaggggcgggaactctcagcctcctaacttgcgaagctacacttgtttc

SEQ ID NO: 226653 - DNA, 51 bp, Artificial
  Synthetic oligonucleotide
atcgtctaggatgtcatgaacggtttcgtagagtgcatcatcgatatcgtt

SEQ ID NO: 226654 - DNA, 51 bp, Artificial
  Synthetic oligonucleotide
cttgggccataaccgaaagccgaaccctgaactacggccactcgttccgcc

SEQ ID NO: 226655 - DNA, 51 bp, Artificial
  Synthetic oligonucleotide
tggtcctttcgcggcagttcattatcaaaggtcaaaatagggatgctgcat

SEQ ID NO: 226656 - DNA, 51 bp, Artificial
  Synthetic oligonucleotide
atcgctcccgggcattgcccaactttccccgagcgatcaacctgccccgcc

SEQ ID NO: 226657 - DNA, 51 bp, Artificial
  Synthetic oligonucleotide
gtccaaggcggaagggacatataaggcgttccgagcgggccccggtttacg

SEQ ID NO: 226658 - DNA, 51 bp, Artificial
  Synthetic oligonucleotide
gtcctcaagccgttgaataatcacatcgtgtcattgcgccctcaaccagag

SEQ ID NO: 226659 - DNA, 51 bp, Artificial
  Synthetic oligonucleotide
gcgattatctccgaaaaggacctctgcgccgagtttggtgtgtcgcgtacc

SEQ ID NO: 226660 - DNA, 60 bp, Artificial
  Synthetic oligonucleotide
aacacgaaggatctcacatgactatgcggaaccgcggcggaataatattgccctatgcta

SEQ ID NO: 226661 - DNA, 51 bp, Artificial
  Synthetic oligonucleotide
taggcatgaaatgctcctcctattgaacgctaaggttcgaaacccgttagg

SEQ ID NO: 226662 - DNA, 51 bp, Artificial
  Synthetic oligonucleotide
gtccctggtctccgacacacatcaccggcgcctttcgggggctcaaaagtt

SEQ ID NO: 226663 - DNA, 51 bp, Artificial
  Synthetic oligonucleotide
ccgcaaatccgaagacgacgatcaactcttgttcgacttaaatcaaggagg

SEQ ID NO: 226664 - DNA, 51 bp, Artificial
  Synthetic oligonucleotide
ccaacagcaaactcgccgagggacaacgtccactcgtcctctatgccgcgg

SEQ ID NO: 226665 - DNA, 51 bp, Artificial
  Synthetic oligonucleotide
gcgagtacgtgcctgttgagtaacccgcaggtttgcctaattggagccgat

SEQ ID NO: 226666 - DNA, 51 bp, Artificial
  Synthetic oligonucleotide
atcctacgtcctgaagaggggcgtggcccctctgtctgcggttgtggtcgg

SEQ ID NO: 226667 - DNA, 51 bp, Artificial
  Synthetic oligonucleotide
tggatacgattcctcgtatcttcctgtcaaagataaaatccgtgtcagctt

SEQ ID NO: 226668 - DNA, 51 bp, Artificial
  Synthetic oligonucleotide
gcgagcaagagatgccgtcccctgacggagcgaatttctccgccccagacg

SEQ ID NO: 226669 - DNA, 51 bp, Artificial
  Synthetic oligonucleotide
cttgacaaaccccggctatgttacgttattacgtttatgaagcgaaatgta

SEQ ID NO: 226670 - DNA, 51 bp, Artificial
  Synthetic oligonucleotide
atcgaccagagctcgaccaacgccaatcaatccgcacttgcggccatcacg

SEQ ID NO: 226671 - DNA, 60 bp, Artificial
  Synthetic oligonucleotide
aacgctggacgcgaatcatgttttgttcgcaagcaatagtaacaagagcacccaatcgtc

SEQ ID NO: 226672 - DNA, 51 bp, Artificial
  Synthetic oligonucleotide
tggcttcgctgggtgtcgcctacgacgactaatgccccgctccctgggagc

SEQ ID NO: 226673 - DNA, 51 bp, Artificial
  Synthetic oligonucleotide
acgtcagaggctcgatggacatgtcagttcccgcatcaggatgcgcacgga

SEQ ID NO: 226674 - DNA, 51 bp, Artificial
  Synthetic oligonucleotide
atcgatggtcggcatatggagctccgcgcttttgtgttatataggcaggcg

SEQ ID NO: 226675 - DNA, 51 bp, Artificial
  Synthetic oligonucleotide
gcgcgaccgcgtcgcaagtaaccgtccagggtgagatacgagaacagggtg

SEQ ID NO: 226676 - DNA, 51 bp, Artificial
  Synthetic oligonucleotide
gcccggtcgacccaatcgacacgcagggtcgtctgatcgtagtttccaaca

SEQ ID NO: 226677 - DNA, 51 bp, Artificial
  Synthetic oligonucleotide
ccaatctcgaaagtgcgatactcaacctcaccaagaccaatatccgctctg

SEQ ID NO: 226678 - DNA, 51 bp, Artificial
  Synthetic oligonucleotide
atgaaactgcttcgcctgtcatggctggccgtgccggtacttaacacggcc

SEQ ID NO: 226679 - DNA, 51 bp, Artificial
  Synthetic oligonucleotide
ctttcaggcgatcgttacgttgtcatgcggcgttgtccatagagtggcgct

SEQ ID NO: 226680 - DNA, 51 bp, Artificial
  Synthetic oligonucleotide
atcacaagtgcgggggagctaggagtggcaataacaaatgtcgtccgatcc

SEQ ID NO: 226681 - DNA, 51 bp, Artificial
  Synthetic oligonucleotide
catggggcgtgaccgttaagcggtcggaggatggcaaacgaatctggctct

SEQ ID NO: 226682 - DNA, 60 bp, Artificial
  Synthetic oligonucleotide
tctcttgggcgtggcctgatttggctccgacgttgaaatccaagcctggatcaatcaacg

SEQ ID NO: 226683 - DNA, 51 bp, Artificial
  Synthetic oligonucleotide
atgccgctacgagactgatctggcgcaaaggtccaagcaacggctcgcgtc

SEQ ID NO: 226684 - DNA, 51 bp, Artificial
  Synthetic oligonucleotide
ctttcccccgactcaaccggagctgcgcactcacgcgacgctaatatgccg

SEQ ID NO: 226685 - DNA, 51 bp, Artificial
  Synthetic oligonucleotide
atcacatatgcccgcagccattcttagccgccatttgcgtctcgcctgaga

SEQ ID NO: 226686 - DNA, 51 bp, Artificial
  Synthetic oligonucleotide
atcaggataggcaggctgatattggtcagcacggcttgggtagcgccgcca

SEQ ID NO: 226687 - DNA, 51 bp, Artificial
  Synthetic oligonucleotide
atgcggttatagccgctccccgtagtgtgatgatggcgttcaaccgagccc

SEQ ID NO: 226688 - DNA, 51 bp, Artificial
  Synthetic oligonucleotide
ccacaggccggtacgccgccttgggttcatgtgctctcggcaaatgtcgga

SEQ ID NO: 226689 - DNA, 51 bp, Artificial
  Synthetic oligonucleotide
cccggtttcgtcgccgcgtttcactgaagattttgctcgtcccatggggct

SEQ ID NO: 226690 - DNA, 51 bp, Artificial
  Synthetic oligonucleotide
tagaaggtcattctttcccccgactcaaccggagctgcgcactcacgcgac

SEQ ID NO: 226691 - DNA, 51 bp, Artificial
  Synthetic oligonucleotide
gcggggaaatgccgctacgagactgatctggcgcaaaggtccaagcaacgg

SEQ ID NO: 226692 - DNA, 51 bp, Artificial
  Synthetic oligonucleotide
tagtgccagtgggtcgggacgcctcagaggacgatccagcgaaaaacgctt

SEQ ID NO: 226693 - DNA, 60 bp, Artificial
  Synthetic oligonucleotide
aagatgggacccgaagcgcggcctattgatcgaatcgtaggcttcgctaagtcagcatcc

SEQ ID NO: 226694 - DNA, 51 bp, Artificial
  Synthetic oligonucleotide
gccgcaatcagcgtataatcacgattcatgacgatgggacacacgacaccc

SEQ ID NO: 226695 - DNA, 50 bp, Artificial
  Synthetic oligonucleotide
accgtcccggcacgggaccgaagcgggcaaagggcaagtagttcgatcat

SEQ ID NO: 226696 - DNA, 50 bp, Artificial
  Synthetic oligonucleotide
acatttccgcaggcatttggcccggagcttttggcgagaccgaaaagccc

SEQ ID NO: 226697 - DNA, 50 bp, Artificial
  Synthetic oligonucleotide
ccgatcaagaaccctgtcccccagtcgctactgtcgccaacgggtgccgg

SEQ ID NO: 226698 - DNA, 50 bp, Artificial
  Synthetic oligonucleotide
cggtgctggagcgaacctggggtgcttagccctctcttcggcgaaatgag

SEQ ID NO: 226699 - DNA, 50 bp, Artificial
  Synthetic oligonucleotide
accgtcctgctggcaaccagggagcacgcggcatggacaacgggaagggc

SEQ ID NO: 226700 - DNA, 50 bp, Artificial
  Synthetic oligonucleotide
accgggcacggatgctcgttgaaagtcgcagggaggtgcttggcatctcc

SEQ ID NO: 226701 - DNA, 50 bp, Artificial
  Synthetic oligonucleotide
ccgcaatgcctccataggcccgctctgtcgccgaagcacgacgatttcct

SEQ ID NO: 226702 - DNA, 50 bp, Artificial
  Synthetic oligonucleotide
tcccatgggtgtaatattagtcgcaaataaatagcaatccctgcgagggg

SEQ ID NO: 226703 - DNA, 50 bp, Artificial
  Synthetic oligonucleotide
accgcgcttgtgattgcggtcgcgagaggcagacgcgtttcggcattctc

SEQ ID NO: 226704 - DNA, 60 bp, Artificial
  Synthetic oligonucleotide
tgagaatttaaggcgtgcggctaaacttgttcacaatctatggtcatgtcaaccccaatc

SEQ ID NO: 226705 - DNA, 50 bp, Artificial
  Synthetic oligonucleotide
tcccacttgtagcacggacgggattggttattctgacctcgcccccgcgc

SEQ ID NO: 226706 - DNA, 50 bp, Artificial
  Synthetic oligonucleotide
accaaaggcggaagcgatggtaccccaggcaggcacaagcgcgtctagcc

SEQ ID NO: 226707 - DNA, 50 bp, Artificial
  Synthetic oligonucleotide
accggaaggctgcctgacgacacgacaagatgaagacgtgggttccggcg

SEQ ID NO: 226708 - DNA, 50 bp, Artificial
  Synthetic oligonucleotide
tatcgaggtaatccgcagtcgtgtgaacctggtcccatcgtccgcccagg

SEQ ID NO: 226709 - DNA, 50 bp, Artificial
  Synthetic oligonucleotide
accggagctagggaccgcaggacggcgctcctatacgcttcgacagatta

SEQ ID NO: 226710 - DNA, 50 bp, Artificial
  Synthetic oligonucleotide
tatcgacgcgccagagatcgcggggaaatgccgctacgagactgatctgg

SEQ ID NO: 226711 - DNA, 50 bp, Artificial
  Synthetic oligonucleotide
accgccggtcgccgttgcactcagagcctcacgcatccgatcgatcgccc

SEQ ID NO: 226712 - DNA, 50 bp, Artificial
  Synthetic oligonucleotide
accggctcgtaccgagctgttgcggttgtgccagtatgataggccccgag

SEQ ID NO: 226713 - DNA, 50 bp, Artificial
  Synthetic oligonucleotide
cggtgcccagtccgcacagtccgcccaatccggtgataacgacgcgcctg

SEQ ID NO: 226714 - DNA, 50 bp, Artificial
  Synthetic oligonucleotide
accaaagcctggcgtatcttgccgtcctgcatgggatccctccagttcgc

SEQ ID NO: 226715 - DNA, 58 bp, Artificial
  Synthetic oligonucleotide
actctctcgcggcggtttgggtaagatgaagtaagccggctttagatgcgccataggc

SEQ ID NO: 226716 - DNA, 58 bp, Artificial
  Synthetic oligonucleotide
tgtgtaccttgaccgtgcggcatagccgcggacaggggctggccgatctccggaaggt

SEQ ID NO: 226717 - DNA, 50 bp, Artificial
  Synthetic oligonucleotide
acatcggatggtgacctttcggacgttcaagacattctgccaggatagca

SEQ ID NO: 226718 - DNA, 50 bp, Artificial
  Synthetic oligonucleotide
cggtcttcagacccgggcaaacccgaccatcgggcacatgaggaagcttg

SEQ ID NO: 226719 - DNA, 50 bp, Artificial
  Synthetic oligonucleotide
tcccgaatcgtctgctgtagccgctggagggcttgcgttaggcgagccca

SEQ ID NO: 226720 - DNA, 50 bp, Artificial
  Synthetic oligonucleotide
acaacagacgacttatacccaacgaacaacgacgtcactatatgtgaaaa

SEQ ID NO: 226721 - DNA, 50 bp, Artificial
  Synthetic oligonucleotide
accatatggaccttccacgggccggcatcctgcatacaggcgttccgcat

SEQ ID NO: 226722 - DNA, 50 bp, Artificial
  Synthetic oligonucleotide
accgaactccgccttccgacctatttcgtcagtcatggcggcggtccctg

SEQ ID NO: 226723 - DNA, 50 bp, Artificial
  Synthetic oligonucleotide
acaccggagacagtcgccagcgaccggcccctacataaaggaaaccgtga

SEQ ID NO: 226724 - DNA, 50 bp, Artificial
  Synthetic oligonucleotide
ccgcttgcacctctgccgcctttacggcgcggatcctaagtggccacgcc

SEQ ID NO: 226725 - DNA, 50 bp, Artificial
  Synthetic oligonucleotide
accgaaatggcgccccttccgtcaaagattgggctcgctcccagccggaa

SEQ ID NO: 226726 - DNA, 50 bp, Artificial
  Synthetic oligonucleotide
accccctgccacgcaagggagcgagtcgctatatggagcgcatcaaacgg

SEQ ID NO: 226727 - DNA, 60 bp, Artificial
  Synthetic oligonucleotide
ttgctttggtcggcagaacagcggatgaagcccaaacttgaggctcggcttgaaagccga

SEQ ID NO: 226728 - DNA, 50 bp, Artificial
  Synthetic oligonucleotide
acaggggcgcatgaaggattgcacggtcattcctcacgtgcagcgagcgg

SEQ ID NO: 226729 - DNA, 50 bp, Artificial
  Synthetic oligonucleotide
acagaccgatgacaattggaacgcgcagcccccggttcgaacacggatcg

SEQ ID NO: 226730 - DNA, 50 bp, Artificial
  Synthetic oligonucleotide
taccgcatcgtgacgaaatggtatggtaacccgcggtcggaggccttcga

SEQ ID NO: 226731 - DNA, 50 bp, Artificial
  Synthetic oligonucleotide
acagaccggttagaatccatcacccgcctgaaactccctgcacggcccca

SEQ ID NO: 226732 - DNA, 50 bp, Artificial
  Synthetic oligonucleotide
tacgatgcagcttatgactcgacaaagttctacgaggcctggaggacgat

SEQ ID NO: 226733 - DNA, 50 bp, Artificial
  Synthetic oligonucleotide
cgggtcgaaagggtcacgactggatctatgtcgggtccgtcggcacgggg

SEQ ID NO: 226734 - DNA, 50 bp, Artificial
  Synthetic oligonucleotide
acccggtgaggccatgaagggtcggaagggagcaacagccgatttccgcg

SEQ ID NO: 226735 - DNA, 50 bp, Artificial
  Synthetic oligonucleotide
ccgctcccctttagcgaccaggagctcttgctttcttgggggccgaaata

SEQ ID NO: 226736 - DNA, 50 bp, Artificial
  Synthetic oligonucleotide
cggctccgccagtaatgcccagaatgccagtagcggcgtgtcgaccgacc

SEQ ID NO: 226737 - DNA, 50 bp, Artificial
  Synthetic oligonucleotide
tcaacagggttgagccttaacggtcccagatgcgatgcctcagcgcgacc

SEQ ID NO: 226738 - DNA, 57 bp, Artificial
  Synthetic oligonucleotide
tggacatgggcatcccttctggggtcagcaacatagttagtacccccaccgtccgga

SEQ ID NO: 226739 - DNA, 50 bp, Artificial
  Synthetic oligonucleotide
tacgccggcggtccataccctgagccacgggagctgagacgacaaaaggc

SEQ ID NO: 226740 - DNA, 50 bp, Artificial
  Synthetic oligonucleotide
acccgttattcgcttacgggctccctttcaggcaaccgcttgggccccgg

SEQ ID NO: 226741 - DNA, 50 bp, Artificial
  Synthetic oligonucleotide
acaagacagtccgctcggacgggtcgaacttttccccgacatcggcgcta

SEQ ID NO: 226742 - DNA, 50 bp, Artificial
  Synthetic oligonucleotide
accgcaaatcaagctttgtcgtcgcttgacgtgggccagacgctaccggc

SEQ ID NO: 226743 - DNA, 50 bp, Artificial
  Synthetic oligonucleotide
cggtacaggcaccgccctggacgagaagaggtcccagccttcgatccacg

SEQ ID NO: 226744 - DNA, 50 bp, Artificial
  Synthetic oligonucleotide
tccatcgcgacagaccgatgacaattggaacgcgcagcccccggttcgaa

SEQ ID NO: 226745 - DNA, 50 bp, Artificial
  Synthetic oligonucleotide
tccatacagcccctatccgccaccactcgattacgatccagcgcctccct

SEQ ID NO: 226746 - DNA, 50 bp, Artificial
  Synthetic oligonucleotide
accgatgccattacgcgctgtcgcgggggtaaacggttcgggctcgccta

SEQ ID NO: 226747 - DNA, 50 bp, Artificial
  Synthetic oligonucleotide
cgggagggacggaatcttacgctacgacccacctcaaaaggcgcgacgca

SEQ ID NO: 226748 - DNA, 50 bp, Artificial
  Synthetic oligonucleotide
accaagcgagggcttgtgatgtactggagggcacgcacgtacgggtgagc

SEQ ID NO: 226749 - DNA, 56 bp, Artificial
  Synthetic oligonucleotide
aagcttacgaccaggaaggtcataacgatcgcgcccgtaacgaccctgcccatgga

SEQ ID NO: 226750 - DNA, 50 bp, Artificial
  Synthetic oligonucleotide
ccgatcagtgaactccggagccgcgtaaggccggcgttgacactcgcacg

SEQ ID NO: 226751 - DNA, 50 bp, Artificial
  Synthetic oligonucleotide
accgatcgcatcctagtcatgggctgctcaggcggtggaaagacgaccct

SEQ ID NO: 226752 - DNA, 50 bp, Artificial
  Synthetic oligonucleotide
accgatatccatgcgcatgatctagccgtgaaccttctggatgttgccaa

SEQ ID NO: 226753 - DNA, 50 bp, Artificial
  Synthetic oligonucleotide
cggggcgatgaatctgaccggctccctcgtgctgcgggcgacaagaattg

SEQ ID NO: 226754 - DNA, 50 bp, Artificial
  Synthetic oligonucleotide
cgggacggtaaggggccttcactttcagctcgagcctttcgcgcaaggaa

SEQ ID NO: 226755 - DNA, 50 bp, Artificial
  Synthetic oligonucleotide
cgggacggacggacagcctcgtttgcggaggttattttgattgcgagcgc

SEQ ID NO: 226756 - DNA, 50 bp, Artificial
  Synthetic oligonucleotide
accaaggtacccgccgaatccgcacatgcctattcgctctcacgcccgca

SEQ ID NO: 226757 - DNA, 50 bp, Artificial
  Synthetic oligonucleotide
ccggaatttccagaggcgttccgaccgaattcgctacgtggcggcgacct

SEQ ID NO: 226758 - DNA, 50 bp, Artificial
  Synthetic oligonucleotide
cggcgagttttcgtctatatacccggcgcttggatcggacgctcggtcga

SEQ ID NO: 226759 - DNA, 50 bp, Artificial
  Synthetic oligonucleotide
cgggtggcgtcttatgtcgggacggacggacagcctcgtttgcggaggtt

SEQ ID NO: 226760 - DNA, 60 bp, Artificial
  Synthetic oligonucleotide
ttccatcgagattgtatcttctttcagcgaacagcgcgcctccccaccgcaagtagctgt

SEQ ID NO: 226761 - DNA, 50 bp, Artificial
  Synthetic oligonucleotide
cggggttctggcaagccaatccgctggcgagtatcggtgcctctgctcac

SEQ ID NO: 226762 - DNA, 50 bp, Artificial
  Synthetic oligonucleotide
cgggtgattccgaaatagggcttgccgattggctaacgggtaccgcccca

SEQ ID NO: 226763 - DNA, 50 bp, Artificial
  Synthetic oligonucleotide
accagccgttaccacggacccgccattgttgggtgtcccgatcgtgattg

SEQ ID NO: 226764 - DNA, 50 bp, Artificial
  Synthetic oligonucleotide
accatactgacccgcggaattttcgtcccggtgactgcagcgtggtccct

SEQ ID NO: 226765 - DNA, 50 bp, Artificial
  Synthetic oligonucleotide
tcatatggtgcgaccgtcgccgcttccaaacgccatccgtgggctgatac

SEQ ID NO: 226766 - DNA, 50 bp, Artificial
  Synthetic oligonucleotide
cgcatagcgcttggcacgagccgtagaaagcgaacaaccgccctcatccg

SEQ ID NO: 226767 - DNA, 50 bp, Artificial
  Synthetic oligonucleotide
aacctgggccgtatgcgcgttcccgttcccagctgtcatcgtgcccgcga

SEQ ID NO: 226768 - DNA, 50 bp, Artificial
  Synthetic oligonucleotide
aacctggcaaggatctttgcgactggcaccacaccacgactgtcgggcgt

SEQ ID NO: 226769 - DNA, 50 bp, Artificial
  Synthetic oligonucleotide
cctgtcggtcgtgggtagcggagggttggattacaagaggcacccatcgg

SEQ ID NO: 226770 - DNA, 50 bp, Artificial
  Synthetic oligonucleotide
aacctgaggctgacaagcacgcgccacgactaccctacgggctagctcga

SEQ ID NO: 226771 - DNA, 60 bp, Artificial
  Synthetic oligonucleotide
aaatgtaatccaattccttcgcaggtcttggcagagtcccgcagctgatatactagtatg

SEQ ID NO: 226772 - DNA, 50 bp, Artificial
  Synthetic oligonucleotide
aacctcgtaacaggaccagagagccgcccgtgcttagtggcgaatgcggc

SEQ ID NO: 226773 - DNA, 50 bp, Artificial
  Synthetic oligonucleotide
tggttccagctacggcctgaccagttactgtctgtgtagtcacggagctt

SEQ ID NO: 226774 - DNA, 50 bp, Artificial
  Synthetic oligonucleotide
cgcagcgatgccacctatgactgggatggcaggaagcgcgggcaaacacc

SEQ ID NO: 226775 - DNA, 50 bp, Artificial
  Synthetic oligonucleotide
aaccgtttcgaacccctttcgctgctttcggctctggcggtcacaacgga

SEQ ID NO: 226776 - DNA, 50 bp, Artificial
  Synthetic oligonucleotide
cgcacgaaagcaaggctccacccgaacgcctagtggagggtgatccgtcc

SEQ ID NO: 226777 - DNA, 50 bp, Artificial
  Synthetic oligonucleotide
aaccgggcaggataggtgtcggaggcaatcggatgacagaggcaccgggc

SEQ ID NO: 226778 - DNA, 50 bp, Artificial
  Synthetic oligonucleotide
tgtcatcactgccagttcatgctccgcccctttggactggtcgtattgat

SEQ ID NO: 226779 - DNA, 50 bp, Artificial
  Synthetic oligonucleotide
aaccggaccccggctgtgagagtacccacccagacagggaacgcggcaag

SEQ ID NO: 226780 - DNA, 50 bp, Artificial
  Synthetic oligonucleotide
cgcaccacgacataagctgatcatagcagctttcgagttcttcgaaactg

SEQ ID NO: 226781 - DNA, 50 bp, Artificial
  Synthetic oligonucleotide
cgcaataggagcgcggcccgacgaagcaggatttgtaagtcaggccggga

SEQ ID NO: 226782 - DNA, 60 bp, Artificial
  Synthetic oligonucleotide
aagcacgtctcggttatgctcacggcgagcgatagcagtccagctcatcgaaaccccatt

SEQ ID NO: 226783 - DNA, 50 bp, Artificial
  Synthetic oligonucleotide
aaccgcagcgaggttgttcgtcatgccactcgcgacgccattacttccct

SEQ ID NO: 226784 - DNA, 50 bp, Artificial
  Synthetic oligonucleotide
aaccgattggctgagcccgcccttccccgcgatatagtcttgctcgtgga

SEQ ID NO: 226785 - DNA, 50 bp, Artificial
  Synthetic oligonucleotide
aaccccgtagagaacccgtacgcgtcgtaccatgatccagcgcttcgcta

SEQ ID NO: 226786 - DNA, 50 bp, Artificial
  Synthetic oligonucleotide
aaccccgcattggcagtgacagacagcgcccacctcgatctttccgacga

SEQ ID NO: 226787 - DNA, 50 bp, Artificial
  Synthetic oligonucleotide
ttaactcagcccacaccgtcgagctcaggataatgcctgaaaatccctcc

SEQ ID NO: 226788 - DNA, 50 bp, Artificial
  Synthetic oligonucleotide
cctctcgtcgaccatcgtgcaaaggttgttcgccccttcgccacgtcaga

SEQ ID NO: 226789 - DNA, 50 bp, Artificial
  Synthetic oligonucleotide
tgcgcaaatcagtttaaccaccgagtcaacagttctttcccacctcgtat

SEQ ID NO: 226790 - DNA, 50 bp, Artificial
  Synthetic oligonucleotide
aactcgatctatcagcttcgtccgcaggccgtgctgtttccgagggggcg

SEQ ID NO: 226791 - DNA, 50 bp, Artificial
  Synthetic oligonucleotide
aacgtccgagcgccacaagctcccgcacggtcattccatcggtcgccggc

SEQ ID NO: 226792 - DNA, 50 bp, Artificial
  Synthetic oligonucleotide
cgcccttgtacaaaacagcactgcaacgagcccccattccggggccaccg

SEQ ID NO: 226793 - DNA, 59 bp, Artificial
  Synthetic oligonucleotide
aatccatgccagtatgacgtgtcagccatctccccgaacacccgtcagttatgtccccg

SEQ ID NO: 226794 - DNA, 50 bp, Artificial
  Synthetic oligonucleotide
cgcccctcccaaatgacgcggcttaacctgggagcaattggagcgcgctc

SEQ ID NO: 226795 - DNA, 50 bp, Artificial
  Synthetic oligonucleotide
cctcttccggctatgcctacgtcaccaaggtggtaaagcgcggccagagc

SEQ ID NO: 226796 - DNA, 50 bp, Artificial
  Synthetic oligonucleotide
aacggaagcgcgggttcgctttgagcgcgaggtaataggcgacagggtag

SEQ ID NO: 226797 - DNA, 50 bp, Artificial
  Synthetic oligonucleotide
cctgacagcttggagcattggcgtcccaacatacgctggagggactgcga

SEQ ID NO: 226798 - DNA, 50 bp, Artificial
  Synthetic oligonucleotide
cctgagatctcccgtacaatcggcgtggttcgacgttgcggcggcacctc

SEQ ID NO: 226799 - DNA, 50 bp, Artificial
  Synthetic oligonucleotide
aacgctttgggctcgaagtggcgttcccgctcgtagcaagcctctacggc

SEQ ID NO: 226800 - DNA, 50 bp, Artificial
  Synthetic oligonucleotide
aacgccttttgctgcagaccgaggacgccactgtttggtcggttcctccg

SEQ ID NO: 226801 - DNA, 50 bp, Artificial
  Synthetic oligonucleotide
aacgcctggcatagcagacgggccggtaagggacgtcagaggtcccatgg

SEQ ID NO: 226802 - DNA, 50 bp, Artificial
  Synthetic oligonucleotide
cgccacttagttggcctccctcacgagcgaaccctcaacatgcgtccgac

SEQ ID NO: 226803 - DNA, 50 bp, Artificial
  Synthetic oligonucleotide
cgccacaagctcccgcacggtcattccatcggtcgccggcgtaaattgcg

SEQ ID NO: 226804 - DNA, 60 bp, Artificial
  Synthetic oligonucleotide
tttgtcgccacgagcatcgtgtgtaagtctggcatattcaacgttagttgtcttacaatt

SEQ ID NO: 226805 - DNA, 50 bp, Artificial
  Synthetic oligonucleotide
aacgccgcgtcatcgtggagccgaaatcgcgtacggtcgtccaggttgtc

SEQ ID NO: 226806 - DNA, 50 bp, Artificial
  Synthetic oligonucleotide
aacgccgaataatcccccgggagatagcacggggactgaagctctggtgc

SEQ ID NO: 226807 - DNA, 50 bp, Artificial
  Synthetic oligonucleotide
aacgagtctctctccgacgaggagtcgcgggagatccatcgcaagcgcgt

SEQ ID NO: 226808 - DNA, 50 bp, Artificial
  Synthetic oligonucleotide
aacgagatgcgcccgacgatcgcgttttgtttccgactgtcgcgttcggc

SEQ ID NO: 226809 - DNA, 50 bp, Artificial
  Synthetic oligonucleotide
cctgcggtgcgtacctgcgaagcaaccgcgttgaggcttgagcacctatc

SEQ ID NO: 226810 - DNA, 50 bp, Artificial
  Synthetic oligonucleotide
aacgaactggctggacctgagcccaggagacgtggtccctaaccgggcat

SEQ ID NO: 226811 - DNA, 50 bp, Artificial
  Synthetic oligonucleotide
aaagctccccggttcgccacacggaagctaactcgccaatcgtttccgct

SEQ ID NO: 226812 - DNA, 50 bp, Artificial
  Synthetic oligonucleotide
cgaaatagaagctgatcccggaccgcctgtaataggggctccagcccgga

SEQ ID NO: 226813 - DNA, 50 bp, Artificial
  Synthetic oligonucleotide
cgaaccctggcgcgcgatagtctctcgtgctttgcggcaaccggtcgata

SEQ ID NO: 226814 - DNA, 50 bp, Artificial
  Synthetic oligonucleotide
aaagccccgtgtgctgaaccgggggaggccctctacttgcctctcgtgtc

SEQ ID NO: 226815 - DNA, 59 bp, Artificial
  Synthetic oligonucleotide
tcgcgacgtagccgcctcgatcctacgtcctgaagaggggcgtggcccctctgtctgcg

SEQ ID NO: 226816 - DNA, 50 bp, Artificial
  Synthetic oligonucleotide
cgaggcggcttgggacgatccgactgacgttcggctggccattcggcgac

SEQ ID NO: 226817 - DNA, 50 bp, Artificial
  Synthetic oligonucleotide
aaacggtcgagtctttgcctcgcagagaggcccgccgaataaggcatggc

SEQ ID NO: 226818 - DNA, 50 bp, Artificial
  Synthetic oligonucleotide
aaacggcatgaaatggtggcccccgcccaggaatttcggctctcaactcc

SEQ ID NO: 226819 - DNA, 50 bp, Artificial
  Synthetic oligonucleotide
aaacgcggacgtcattgcagcggggcgttcagaagatgccctagccaaga

SEQ ID NO: 226820 - DNA, 50 bp, Artificial
  Synthetic oligonucleotide
ttgggcaactcttctgcaccccgggttagccctcgatcggttaccccgtt

SEQ ID NO: 226821 - DNA, 50 bp, Artificial
  Synthetic oligonucleotide
aaaccgatgggggcggatacgagcaatcgctcggagaagtgcgggatcaa

SEQ ID NO: 226822 - DNA, 50 bp, Artificial
  Synthetic oligonucleotide
cgagccacggtagactgtggcggcaaagcagttgtgcgatcgtccccgag

SEQ ID NO: 226823 - DNA, 50 bp, Artificial
  Synthetic oligonucleotide
tttcggagagagccatgtcgggtgaagaccgattcgtgctgtgcatgctt

SEQ ID NO: 226824 - DNA, 50 bp, Artificial
  Synthetic oligonucleotide
cgagagcgggtatgacacgaggaatggcctgcggaaggatcacgtgcgta

SEQ ID NO: 226825 - DNA, 50 bp, Artificial
  Synthetic oligonucleotide
aaaagcggcggtcaggggtaagctgatcgctcggatctcgcaccggcatc

SEQ ID NO: 226826 - DNA, 58 bp, Artificial
  Synthetic oligonucleotide
agcggcacttaacttatccatatggcggcgtaaccgttcgaaaacactgtcgcagagc

SEQ ID NO: 226827 - DNA, 60 bp, Artificial
  Synthetic oligonucleotide
gtacgccgcgagatttctggaatggtcatgagccctcctgatcgatcaaaatccaagcgc

SEQ ID NO: 226828 - DNA, 57 bp, Artificial
  Synthetic oligonucleotide
aacctgcgtcgcggaatatcctctcgagcggcgtcgttccgatcccgacctggcaac

SEQ ID NO: 226829 - DNA, 50 bp, Artificial
  Synthetic oligonucleotide
cgacacgcgaggaccaggcgaacggtccctatgggtttcactcgggagga

SEQ ID NO: 226830 - DNA, 50 bp, Artificial
  Synthetic oligonucleotide
cgaccggcatgggattggccgtgccctttggttccgatgccagcagatgg

SEQ ID NO: 226831 - DNA, 50 bp, Artificial
  Synthetic oligonucleotide
cgaccgagtcgcttgtgtgaaggcaaagggcattgtccgcggcgcattgg

SEQ ID NO: 226832 - DNA, 50 bp, Artificial
  Synthetic oligonucleotide
ttttgccatgtaactgttgcctgggacgacgcaggagcgtgttgtaggct

SEQ ID NO: 226833 - DNA, 50 bp, Artificial
  Synthetic oligonucleotide
cgacccgtcggtgttagcagcagtcaatccggtccacgcagtccggtata

SEQ ID NO: 226834 - DNA, 50 bp, Artificial
  Synthetic oligonucleotide
aacatttgcgtgaacccaaacagcgggcttgcgcgtttaggccaaggtga

SEQ ID NO: 226835 - DNA, 50 bp, Artificial
  Synthetic oligonucleotide
aacatcgaacaccggagacagtcgccagcgaccggcccctacataaagga

SEQ ID NO: 226836 - DNA, 50 bp, Artificial
  Synthetic oligonucleotide
aacacgtctatgcgttgctgtcccctggtgccaaggcgaccccatatccg

SEQ ID NO: 226837 - DNA, 50 bp, Artificial
  Synthetic oligonucleotide
aacacgtaaagcgcgcactccatgccacaatacgctgggccgatccgacc

SEQ ID NO: 226838 - DNA, 50 bp, Artificial
  Synthetic oligonucleotide
cgcaagctaaacgcggacgtcattgcagcggggcgttcagaagatgccct

SEQ ID NO: 226839 - DNA, 56 bp, Artificial
  Synthetic oligonucleotide
aataaatccccgacttcaggatcggcagaggaccgctttgccaagttgtatcggtg

SEQ ID NO: 226840 - DNA, 50 bp, Artificial
  Synthetic oligonucleotide
cctttaagcaagcttgccgcggaattgggtacgaccgggaccgccttagc

SEQ ID NO: 226841 - DNA, 50 bp, Artificial
  Synthetic oligonucleotide
aacaccgttacgggcaccgatgccattacgcgctgtcgcgggggtaaacg

SEQ ID NO: 226842 - DNA, 50 bp, Artificial
  Synthetic oligonucleotide
ccttttcagcgggtctcgggatacgtcctcccacaggtgacactgcgtgg

SEQ ID NO: 226843 - DNA, 50 bp, Artificial
  Synthetic oligonucleotide
ttccagccggacggtcgccctctgcgcggctacaatcagggtgagacacg

SEQ ID NO: 226844 - DNA, 50 bp, Artificial
  Synthetic oligonucleotide
cgatgacacggtctcccgacgcgaaggcgatccgggtgttgccatgggca

SEQ ID NO: 226845 - DNA, 50 bp, Artificial
  Synthetic oligonucleotide
aaatgccaagaacgggcgggttttcgcgtcacagcagcctgcggtacttt

SEQ ID NO: 226846 - DNA, 50 bp, Artificial
  Synthetic oligonucleotide
cgatcttcatcctagggcacgccgtccctagcgggccaagacgaaaggct

SEQ ID NO: 226847 - DNA, 50 bp, Artificial
  Synthetic oligonucleotide
ttccttttagcaatgagagacgtcgtctgacagggaaacctcgcgacgtg

SEQ ID NO: 226848 - DNA, 50 bp, Artificial
  Synthetic oligonucleotide
ttcgaaacctggatttgccggaggtcgcacgtcacgaagaaagtccgtga

SEQ ID NO: 226849 - DNA, 50 bp, Artificial
  Synthetic oligonucleotide
aaatcttgaagctcagtgtgggcggttggcgtggctgcgaaaagcccgtg

SEQ ID NO: 226850 - DNA, 59 bp, Artificial
  Synthetic oligonucleotide
tttggacgagaatgtcacgcctgctgtcgttagcgctattgggaaggcgctaaacgccg

SEQ ID NO: 226851 - DNA, 50 bp, Artificial
  Synthetic oligonucleotide
ttcgctcagaccgcgcctatcgctcgctcggtcttcgcctgcacgactac

SEQ ID NO: 226852 - DNA, 50 bp, Artificial
  Synthetic oligonucleotide
cgaaaggtggatcgtgccccattcgtagtcggaaaggagcccgtgcgcct

SEQ ID NO: 226853 - DNA, 50 bp, Artificial
  Synthetic oligonucleotide
cgatccggcatcccatagctttcgagggctcacaccgcgcaataatgcga

SEQ ID NO: 226854 - DNA, 50 bp, Artificial
  Synthetic oligonucleotide
cgatccgactgacgttcggctggccattcggcgacctcaggcatctcaag

SEQ ID NO: 226855 - DNA, 50 bp, Artificial
  Synthetic oligonucleotide
aaaggagttccgtcatgcgcacgacccaccacgcctccggttttggcctc

SEQ ID NO: 226856 - DNA, 50 bp, Artificial
  Synthetic oligonucleotide
ttctgccctcattgggaggatcggcatgccctcaggcacgcacccataca

SEQ ID NO: 226857 - DNA, 50 bp, Artificial
  Synthetic oligonucleotide
tcgccgagattacccacaaatttgtcgcgttgttccgacgggcgttagat

SEQ ID NO: 226858 - DNA, 50 bp, Artificial
  Synthetic oligonucleotide
cggatccttggtgcatttgcccgattgggcggttctgcctgtctcggatt

SEQ ID NO: 226859 - DNA, 50 bp, Artificial
  Synthetic oligonucleotide
aatcacgccgaatgacggacgacggttctcgtacagaccaatcgagatcg

SEQ ID NO: 226860 - DNA, 50 bp, Artificial
  Synthetic oligonucleotide
aatatcgaaggaattgtcgtctggtcaggttgaacatggcagtacccctt

SEQ ID NO: 226861 - DNA, 54 bp, Artificial
  Synthetic oligonucleotide
aaccttttgggatatagaaatcgcgggggaaaggtgcaaagcgcgtcatgcccg

SEQ ID NO: 226862 - DNA, 50 bp, Artificial
  Synthetic oligonucleotide
aatacaatgcgcagtcctggtggggacggctaggctacaggctttacaga

SEQ ID NO: 226863 - DNA, 50 bp, Artificial
  Synthetic oligonucleotide
aagtgccaggcctttaagcaagcttgccgcggaattgggtacgaccggga

SEQ ID NO: 226864 - DNA, 50 bp, Artificial
  Synthetic oligonucleotide
cggagcggctcatccctcgcggcgttctggtctccgcgtccttggtaatc

SEQ ID NO: 226865 - DNA, 50 bp, Artificial
  Synthetic oligonucleotide
ccggggtagtcattgccccgctgaacctccgactcatacctgaggccacg

SEQ ID NO: 226866 - DNA, 50 bp, Artificial
  Synthetic oligonucleotide
tcggcggatgggtacaaggggcgatgtcacgttgtttcatggacgcctga

SEQ ID NO: 226867 - DNA, 50 bp, Artificial
  Synthetic oligonucleotide
ccgggtggttgcgaaaacggtggcggaattggcaggctcgtcggctatat

SEQ ID NO: 226868 - DNA, 50 bp, Artificial
  Synthetic oligonucleotide
cggagagtgtcagcggggcggctgtcaagctcaaccttacacaaccgtcg

SEQ ID NO: 226869 - DNA, 50 bp, Artificial
  Synthetic oligonucleotide
aaggggcgccacctccgctcatgtgtcctgtttatcatgcatcaccgggg

SEQ ID NO: 226870 - DNA, 48 bp, Artificial
  Synthetic oligonucleotide
aagggcttccccaggacgggtaggttttcggggtgagggacggtttga

SEQ ID NO: 226871 - DNA, 50 bp, Artificial
  Synthetic oligonucleotide
cggactacgtgccggttactccgcagaatggtcgccgcttcgggatgttt

SEQ ID NO: 226872 - DNA, 59 bp, Artificial
  Synthetic oligonucleotide
tcgcggaatatcctctcgagcggcgtcgttccgatcccgacctggcaacgcagtcccac

SEQ ID NO: 226873 - DNA, 50 bp, Artificial
  Synthetic oligonucleotide
aagggcggtttcgacggaggtcattagcggtcgctcgcagcttatgcgca

SEQ ID NO: 226874 - DNA, 50 bp, Artificial
  Synthetic oligonucleotide
cggacctccctggacgggctttacggcatacgctccgaaaaacagccccg

SEQ ID NO: 226875 - DNA, 50 bp, Artificial
  Synthetic oligonucleotide
tcgtggctaggctcgccgtccaagtcaacgtcgcagaaagggagcgtatc

SEQ ID NO: 226876 - DNA, 50 bp, Artificial
  Synthetic oligonucleotide
aaggcgcgacaattcaaatcgctctcggcaactcgcgtggacgaaggcta

SEQ ID NO: 226877 - DNA, 50 bp, Artificial
  Synthetic oligonucleotide
ccgtaagcccaccggtaccctcgtacttgatgggctcaatccagggcgca

SEQ ID NO: 226878 - DNA, 50 bp, Artificial
  Synthetic oligonucleotide
aaggccagagacacgttcctgcgctctcgtccgctctgcattggttgcct

SEQ ID NO: 226879 - DNA, 50 bp, Artificial
  Synthetic oligonucleotide
tcccgcatcaggatgcgcacggagacagggttggcaggctcggcgaacga

SEQ ID NO: 226880 - DNA, 50 bp, Artificial
  Synthetic oligonucleotide
tcccgccataacgtgacgagatttcgcagtgctccctcggacgggaccat

SEQ ID NO: 226881 - DNA, 50 bp, Artificial
  Synthetic oligonucleotide
aattggtcgcggctcccctccgatcaaccgaacgagaggcattcgctgct

SEQ ID NO: 226882 - DNA, 50 bp, Artificial
  Synthetic oligonucleotide
aattgatgccctcccaagcgttgcgtaaccggcaagggtcgttcatcgcg

SEQ ID NO: 226883 - DNA, 60 bp, Artificial
  Synthetic oligonucleotide
tcgctataaggtttgctcccgcatgatcattgtcggttgaacgaggtccataggagacgt

SEQ ID NO: 226884 - DNA, 50 bp, Artificial
  Synthetic oligonucleotide
cggcctcctaagccgcttccgaccgtatgctgcggatatcccagggtcga

SEQ ID NO: 226885 - DNA, 50 bp, Artificial
  Synthetic oligonucleotide
aatgtgcgagcgcgaagctttcgtggttcgttttcggacacgcggcttgc

SEQ ID NO: 226886 - DNA, 50 bp, Artificial
  Synthetic oligonucleotide
cggccggccaacatgcgctataggccagctacgctccacagcgcccgcga

SEQ ID NO: 226887 - DNA, 50 bp, Artificial
  Synthetic oligonucleotide
ccggccattagtgccccgactctcctgcgtgtcccccgggactgcacttc

SEQ ID NO: 226888 - DNA, 50 bp, Artificial
  Synthetic oligonucleotide
cggcagggcagcaatgaacaagtggcctcgggccgaagttcgaaaagctc

SEQ ID NO: 226889 - DNA, 50 bp, Artificial
  Synthetic oligonucleotide
aatggacttagcggccaccggccctatttcaggctccgtgcgtcgtagca

SEQ ID NO: 226890 - DNA, 50 bp, Artificial
  Synthetic oligonucleotide
cggcaacgggactggacagtgacagcggcgtttggacctgggtgcccggt

SEQ ID NO: 226891 - DNA, 50 bp, Artificial
  Synthetic oligonucleotide
aatgacgagcaacgtcggtacggcaaaggcaagccgccggagcgtaaagg

SEQ ID NO: 226892 - DNA, 50 bp, Artificial
  Synthetic oligonucleotide
aatgaatcgcgctctgtgaggcccgatacatctaaaagagcgcgtagaac

SEQ ID NO: 226893 - DNA, 50 bp, Artificial
  Synthetic oligonucleotide
cggcaaccctacgctgctgtgtctgttggcccaagcgaggcaggacagat

SEQ ID NO: 226894 - DNA, 54 bp, Artificial
  Synthetic oligonucleotide
aaaaacgaacaaaaggctgacggcgtggcgtataagccttagccgtcagccttg

SEQ ID NO: 226895 - DNA, 50 bp, Artificial
  Synthetic oligonucleotide
tcgagccccgcccgccagacagcgaagttcctccgaccacgactgctgcg

SEQ ID NO: 226896 - DNA, 50 bp, Artificial
  Synthetic oligonucleotide
ccgggagggacgtgcggtttccccaaccatactggatgagacattccggc

SEQ ID NO: 226897 - DNA, 50 bp, Artificial
  Synthetic oligonucleotide
aatccgtgccggccataccgccgatttgcagggtagagccattcgggaag

SEQ ID NO: 226898 - DNA, 50 bp, Artificial
  Synthetic oligonucleotide
tcgattctgctcctggctagactgtctagctatatgcgcggaatgctggt

SEQ ID NO: 226899 - DNA, 50 bp, Artificial
  Synthetic oligonucleotide
tcgcagatgcctcgtgcagtgccgtcagttcaccatgaccaatcgcgtgt

SEQ ID NO: 226900 - DNA, 50 bp, Artificial
  Synthetic oligonucleotide
aatccgaccttaaacttgcgaagcgaggcgccagttccacgcacccgagg

SEQ ID NO: 226901 - DNA, 50 bp, Artificial
  Synthetic oligonucleotide
tcgcccgagacacatcgggaaaatgcctggattccggcagataccgagga

SEQ ID NO: 226902 - DNA, 50 bp, Artificial
  Synthetic oligonucleotide
aagcgctcttccttagcagctcccgcaatcgcgatgaccgtagcaccgcg

SEQ ID NO: 226903 - DNA, 50 bp, Artificial
  Synthetic oligonucleotide
aagcgccagatcgggaccatccacgtaaatacggtcgccgtcggcatgca

SEQ ID NO: 226904 - DNA, 50 bp, Artificial
  Synthetic oligonucleotide
aagcgaatgcgccaagatgcttcccggtaacagccgtcgctggaatggtg

SEQ ID NO: 226905 - DNA, 59 bp, Artificial
  Synthetic oligonucleotide
atcggttgccaggtgatagagatctacgggggcgatccacacgagctaagtgcgttggt

SEQ ID NO: 226906 - DNA, 50 bp, Artificial
  Synthetic oligonucleotide
aagcctaacgggttgataccatggacacgagaagatattctattgttccg

SEQ ID NO: 226907 - DNA, 50 bp, Artificial
  Synthetic oligonucleotide
aagccggtaagagcagcggcgaacgaggaaaccgtcatgcgaccgatcgg

SEQ ID NO: 226908 - DNA, 50 bp, Artificial
  Synthetic oligonucleotide
aagccgctcgagactgagaatcatgtcgcctgaacagaccgcggttggga

SEQ ID NO: 226909 - DNA, 50 bp, Artificial
  Synthetic oligonucleotide
aagccgacccgctggaaactgttccgcagctgatgaggattggtgacgct

SEQ ID NO: 226910 - DNA, 50 bp, Artificial
  Synthetic oligonucleotide
cctatcggccggccattagtgccccgactctcctgcgtgtcccccgggac

SEQ ID NO: 226911 - DNA, 50 bp, Artificial
  Synthetic oligonucleotide
aagccagagggcgcaagtaacgcgttgccggtagtcctggtcatccaacg

SEQ ID NO: 226912 - DNA, 50 bp, Artificial
  Synthetic oligonucleotide
cgcgattaccgagcgcaagggggcaaagaccgcacttatcaccacctccg

SEQ ID NO: 226913 - DNA, 50 bp, Artificial
  Synthetic oligonucleotide
aagcagatccgaaacagcgatgtccgacaccacgggaacggcgtgcgcca

SEQ ID NO: 226914 - DNA, 50 bp, Artificial
  Synthetic oligonucleotide
cgcgacgatattgtgccaatggcgaagcctgcgctgatccccaccgcccc

SEQ ID NO: 226915 - DNA, 50 bp, Artificial
  Synthetic oligonucleotide
aagcacccgcgatccgcccaaccctcgggagaactgcttgttccgcgctg

SEQ ID NO: 226916 - DNA, 58 bp, Artificial
  Synthetic oligonucleotide
ccgatataacgccgcacgttgtccttctgtcggtaatgctggcgattgtcggacggtc

SEQ ID NO: 226917 - DNA, 50 bp, Artificial
  Synthetic oligonucleotide
cctccggtctcgcggaattgggcgggtgctttcaagggcgatgggagccg

SEQ ID NO: 226918 - DNA, 50 bp, Artificial
  Synthetic oligonucleotide
cctcgccaaccaatgccccggtttatgacccggataacccgccaagcttt

SEQ ID NO: 226919 - DNA, 50 bp, Artificial
  Synthetic oligonucleotide
aagataggcgaccgttcgcccctcatcgcccgacacgagaagcgcgaccc

SEQ ID NO: 226920 - DNA, 50 bp, Artificial
  Synthetic oligonucleotide
aagagcgtgctcctctacgggcagtatcaggagcttccggagacggcgca

SEQ ID NO: 226921 - DNA, 50 bp, Artificial
  Synthetic oligonucleotide
cgcctccgcggcacagctcatgtgcccgcccatgatctaattatcccggg

SEQ ID NO: 226922 - DNA, 50 bp, Artificial
  Synthetic oligonucleotide
cgccggacgaggctatgggtgccatctggccctacatcgcagcattgctg

SEQ ID NO: 226923 - DNA, 50 bp, Artificial
  Synthetic oligonucleotide
cctctcccggaaaccaaggcatcgcaggaacgttagattccgatgtcagt

SEQ ID NO: 226924 - DNA, 50 bp, Artificial
  Synthetic oligonucleotide
cggaacgattcactcaggccgcaggttaggtggccttcggaggtatcccc

SEQ ID NO: 226925 - DNA, 50 bp, Artificial
  Synthetic oligonucleotide
tctaccaagcgagctgaaggcctgtcgacctcccagatgcggcaggacct

SEQ ID NO: 226926 - DNA, 50 bp, Artificial
  Synthetic oligonucleotide
ccgtccgcgacattagggtgcacgtcggaatcgatcgcccagcttgtgat

SEQ ID NO: 226927 - DNA, 54 bp, Artificial
  Synthetic oligonucleotide
ccgcttcgaaacccgcgaaaacgtgacaagtcccgctctatgggctgaacgtaa

SEQ ID NO: 226928 - DNA, 50 bp, Artificial
  Synthetic oligonucleotide
aaggcataccagagcagcgcgcctgaccgttcgaccaccggcaggatttc

SEQ ID NO: 226929 - DNA, 50 bp, Artificial
  Synthetic oligonucleotide
aaggaggcccgcttgagtctttccgccgagcaacttgcttgccatcccaa

SEQ ID NO: 226930 - DNA, 50 bp, Artificial
  Synthetic oligonucleotide
ccgtgaacgtccttgcaacacggcgtccacgaggctccgtgaacaacggc

SEQ ID NO: 226931 - DNA, 50 bp, Artificial
  Synthetic oligonucleotide
cgctgtccggtaaggctcctgtggagcgcccagaacctgaggacatcagg

SEQ ID NO: 226932 - DNA, 50 bp, Artificial
  Synthetic oligonucleotide
aagctgccacaacgttctgacgacgcctcggagcatgcatcatcgcgctc

SEQ ID NO: 226933 - DNA, 50 bp, Artificial
  Synthetic oligonucleotide
aagctgatcccggaccgcctgtaataggggctccagcccggatagaagcc

SEQ ID NO: 226934 - DNA, 50 bp, Artificial
  Synthetic oligonucleotide
ccgtgagcggccataacggttgacccaaacagtccccgcctgaagcgagc

SEQ ID NO: 226935 - DNA, 50 bp, Artificial
  Synthetic oligonucleotide
tctgcggagcgccttcttgacccatgtcatggtgttgggatcgaggccat

SEQ ID NO: 226936 - DNA, 50 bp, Artificial
  Synthetic oligonucleotide
cgctgcgatacggtgggccgggtatccctatttcgcctattacgcgacga

SEQ ID NO: 226937 - DNA, 50 bp, Artificial
  Synthetic oligonucleotide
aagctgaacagcagcctcgacgaaaagggcgcgagcttccgccagagcct

SEQ ID NO: 226938 - DNA, 56 bp, Artificial
  Synthetic oligonucleotide
gcgaccttaatccacgtgacgaataaatcccgccgtggttgcatcttttgaacgac

SEQ ID NO: 226939 - DNA, 55 bp, Artificial
  Synthetic oligonucleotide
tacgccgacagaaattttccaacgcgccccttctttggggacacgcaccttcaca

SEQ ID NO: 226940 - DNA, 50 bp, Artificial
  Synthetic oligonucleotide
cgctgagagcctagtcctcccctgcggaacctgaagcctggccgtttccg

SEQ ID NO: 226941 - DNA, 50 bp, Artificial
  Synthetic oligonucleotide
tcttccgaatagcatcggtaacatgagcaaagtctgccgccttacaacgg

SEQ ID NO: 226942 - DNA, 50 bp, Artificial
  Synthetic oligonucleotide
cgctcgcctgatcatgcggtcgcggaacagtggatcgggatttcgacaga

SEQ ID NO: 226943 - DNA, 50 bp, Artificial
  Synthetic oligonucleotide
ccgttcggttcgcatggtccatcacctctcccgtgttggcccccatgctt

SEQ ID NO: 226944 - DNA, 50 bp, Artificial
  Synthetic oligonucleotide
tcttggacacagagcgagtttgcccaactgctcgcgagagcgcccgtgct

SEQ ID NO: 226945 - DNA, 50 bp, Artificial
  Synthetic oligonucleotide
tcttgtcatgtggatcgagtgatggacctttggtgaccgcccaggatttg

SEQ ID NO: 226946 - DNA, 50 bp, Artificial
  Synthetic oligonucleotide
tgaaaccgccgtatccctctgaatccgtgccggccataccgccgatttgc

SEQ ID NO: 226947 - DNA, 50 bp, Artificial
  Synthetic oligonucleotide
aagcgtagtcgagggctccggtccttatccgacccgaaacggtggatgga

SEQ ID NO: 226948 - DNA, 50 bp, Artificial
  Synthetic oligonucleotide
tgaacgtaagacgttcacaagcatgatcggtgcaccgtagtcggcaggtt

SEQ ID NO: 226949 - DNA, 50 bp, Artificial
  Synthetic oligonucleotide
gcgcgcgccaaattgaaaactccgcctctgcctgaactgggtcctctcag

SEQ ID NO: 226950 - DNA, 56 bp, Artificial
  Synthetic oligonucleotide
acgcctgctgggagatcccactggatttcccacctgggccatcccgtacccttcac

SEQ ID NO: 226951 - DNA, 50 bp, Artificial
  Synthetic oligonucleotide
atccaatccgcgtacgggccaaagtcgtgaacggtttgttggcttccggc

SEQ ID NO: 226952 - DNA, 50 bp, Artificial
  Synthetic oligonucleotide
atccaaaaatcggcattcggcgttccggcaagtccgccatggtctgccta

SEQ ID NO: 226953 - DNA, 50 bp, Artificial
  Synthetic oligonucleotide
atcatcgctcccgcggagttcccaggagagtaccctatccgtcaagccgc

SEQ ID NO: 226954 - DNA, 50 bp, Artificial
  Synthetic oligonucleotide
cttaccatgcgccatttctcgggccacggcctctttccaatgtcagcgcc

SEQ ID NO: 226955 - DNA, 50 bp, Artificial
  Synthetic oligonucleotide
atcaaacggcccgccccgtcgactgcggcaaatccccatccctgagcgat

SEQ ID NO: 226956 - DNA, 50 bp, Artificial
  Synthetic oligonucleotide
ccacactagcaagtcgttggcctaccacagtaccgattgtcgcggccccg

SEQ ID NO: 226957 - DNA, 50 bp, Artificial
  Synthetic oligonucleotide
atagccccagcctccggcatcctgccgtaagtacgcatgtcccgggccat

SEQ ID NO: 226958 - DNA, 50 bp, Artificial
  Synthetic oligonucleotide
ctgggctgagggacgcaactgcggcgaccgacgtgcttaaatttggcaca

SEQ ID NO: 226959 - DNA, 50 bp, Artificial
  Synthetic oligonucleotide
ccacccttgaaggacagccaatcggcccctggaaagcgctcagcaagtgt

SEQ ID NO: 226960 - DNA, 50 bp, Artificial
  Synthetic oligonucleotide
ccaccgtgaggagcagcacccgctgtatcgtgacgggaacttttctcgcg

SEQ ID NO: 226961 - DNA, 59 bp, Artificial
  Synthetic oligonucleotide
cttgcatccaaagatcatggatcaatcgagagcgctcaggcagccatgtgcgtgggcta

SEQ ID NO: 226962 - DNA, 50 bp, Artificial
  Synthetic oligonucleotide
atacgacgtcgagcaagtgcgtttcgtcggcagcgaaggacggcagtgta

SEQ ID NO: 226963 - DNA, 50 bp, Artificial
  Synthetic oligonucleotide
gcgtacatttgccagggcggcagtcgtcggaatcccgttcgtggcgagcc

SEQ ID NO: 226964 - DNA, 50 bp, Artificial
  Synthetic oligonucleotide
gcgtatggccgtgcataccgatgcgaccagcaccgagagcggtctctttc

SEQ ID NO: 226965 - DNA, 50 bp, Artificial
  Synthetic oligonucleotide
gcgtcagaaaggtgatggtcccgagcgctgaggcttcgcgttgaaggcgc

SEQ ID NO: 226966 - DNA, 50 bp, Artificial
  Synthetic oligonucleotide
gcgtcagcgtaccgggaggactggccgatactgccgatattgccccgatc

SEQ ID NO: 226967 - DNA, 50 bp, Artificial
  Synthetic oligonucleotide
ccacctttccgagatgcccctcctcttccgcgattagacgttcgaaaact

SEQ ID NO: 226968 - DNA, 50 bp, Artificial
  Synthetic oligonucleotide
ccacgatgctgcagcaagcttcccctggaatgagcgcaactggcgtcttg

SEQ ID NO: 226969 - DNA, 50 bp, Artificial
  Synthetic oligonucleotide
ataaagaggaaccacatctccggtcacaggcgttgctcccggtgtgggcg

SEQ ID NO: 226970 - DNA, 50 bp, Artificial
  Synthetic oligonucleotide
agttggaaatcctttgccgcccgcacgagccctgatggcaagatcggcat

SEQ ID NO: 226971 - DNA, 50 bp, Artificial
  Synthetic oligonucleotide
agttgctcctcggctaatccgtgaaacgagatgcgcccgacgatcgcgtt

SEQ ID NO: 226972 - DNA, 59 bp, Artificial
  Synthetic oligonucleotide
gtagctatcaaagaggacatctgagggaatctatagagataaggttctaactttacatg

SEQ ID NO: 226973 - DNA, 50 bp, Artificial
  Synthetic oligonucleotide
ctggactggatgtgacgatcctgccctacacggacgcagctgcaggcact

SEQ ID NO: 226974 - DNA, 50 bp, Artificial
  Synthetic oligonucleotide
atctctgcacgcgcccctcccaaatgacgcggcttaacctgggagcaatt

SEQ ID NO: 226975 - DNA, 50 bp, Artificial
  Synthetic oligonucleotide
atctctccgaactcgctcgaaacagaaccgcgggcggccctgcaattggt

SEQ ID NO: 226976 - DNA, 50 bp, Artificial
  Synthetic oligonucleotide
atctcgatgcaggaagtgttaccgccgtagcgatcgaactcggggcccga

SEQ ID NO: 226977 - DNA, 50 bp, Artificial
  Synthetic oligonucleotide
atctccagatcgcctcgagctcagagagccttggccgtgcgtgaagcatg

SEQ ID NO: 226978 - DNA, 50 bp, Artificial
  Synthetic oligonucleotide
gccgtgtcccaatcactcggcacagcgtcgcaaatacttgagattcgctt

SEQ ID NO: 226979 - DNA, 50 bp, Artificial
  Synthetic oligonucleotide
atctaatcgcgtacggcgaatgcacagcgtcggagttggttgggcgcgcc

SEQ ID NO: 226980 - DNA, 50 bp, Artificial
  Synthetic oligonucleotide
atcgttcagacaattgccgcccaatccaacacgcctgcccagtccgaagg

SEQ ID NO: 226981 - DNA, 50 bp, Artificial
  Synthetic oligonucleotide
atcggtggtccaaggccagagacacgttcctgcgctctcgtccgctctgc

SEQ ID NO: 226982 - DNA, 50 bp, Artificial
  Synthetic oligonucleotide
atcggtaagcggggcaaatccggtggcaatgccagcacaatgcgcaggga

SEQ ID NO: 226983 - DNA, 59 bp, Artificial
  Synthetic oligonucleotide
gggcagatgcggcaacatgcaggatgacggtgaagaatgacgatcgatacgcgtgcttt

SEQ ID NO: 226984 - DNA, 50 bp, Artificial
  Synthetic oligonucleotide
atcgcccaagacgaaggggaaggttattcgcgaggtgatgtggtcccgcg

SEQ ID NO: 226985 - DNA, 50 bp, Artificial
  Synthetic oligonucleotide
atcgccatccttctgttcccatcgtcagggatgggccggacgtcgcacga

SEQ ID NO: 226986 - DNA, 50 bp, Artificial
  Synthetic oligonucleotide
cttgattgcccagctaaagggcacgtattccgtgaagtccaacttgatag

SEQ ID NO: 226987 - DNA, 50 bp, Artificial
  Synthetic oligonucleotide
atcgatattgcaggaacgtccgctgggccggctcttgattccccgtcgga

SEQ ID NO: 226988 - DNA, 50 bp, Artificial
  Synthetic oligonucleotide
atcgaggtgtttgagccgaggccattggagggcggatgcctgtggatggc

SEQ ID NO: 226989 - DNA, 50 bp, Artificial
  Synthetic oligonucleotide
ccaactcgtctgttgcgcacggctgattgaggtcatcgccaccgcttgcg

SEQ ID NO: 226990 - DNA, 50 bp, Artificial
  Synthetic oligonucleotide
atcctgtcatgccaggcccccgaacggtcattccgagcctcgtccattat

SEQ ID NO: 226991 - DNA, 50 bp, Artificial
  Synthetic oligonucleotide
atcctcacccttgatgaaacgcacgttgtcgcgctttccccgggggccgt

SEQ ID NO: 226992 - DNA, 50 bp, Artificial
  Synthetic oligonucleotide
atccgtagcagcgttgctaggtcgggttctcttcggcccgccacgtagtg

SEQ ID NO: 226993 - DNA, 50 bp, Artificial
  Synthetic oligonucleotide
atccggtgtgtcgcgctcgcccagtgaatggggtgatctcgttcgcaacg

SEQ ID NO: 226994 - DNA, 59 bp, Artificial
  Synthetic oligonucleotide
aaccgttactggcaatctgttgtctgcacccatcatcgaaactctcactctttacagca

SEQ ID NO: 226995 - DNA, 50 bp, Artificial
  Synthetic oligonucleotide
atccgattgcttggcgaccgagtgttacgacgctatgcgtggagcctcgc

SEQ ID NO: 226996 - DNA, 50 bp, Artificial
  Synthetic oligonucleotide
atccgagacgcgacgatattgtgccaatggcgaagcctgcgctgatcccc

SEQ ID NO: 226997 - DNA, 50 bp, Artificial
  Synthetic oligonucleotide
aggggcgaaagatgcgctacggcgactgtctccgaccccttccccggatg

SEQ ID NO: 226998 - DNA, 50 bp, Artificial
  Synthetic oligonucleotide
aggggcccttttcgtcgccggtaggttagagccaccgatcgctcgtcttc

SEQ ID NO: 226999 - DNA, 50 bp, Artificial
  Synthetic oligonucleotide
aggggcatgtcgtcgaacaagggtcggcttccgtggtgctgaaaagccct

SEQ ID NO: 227000 - DNA, 50 bp, Artificial
  Synthetic oligonucleotide
agggctcggctttggagaaatccgcagtcggccgggtaatgtcctgcacc

SEQ ID NO: 227001 - DNA, 50 bp, Artificial
  Synthetic oligonucleotide
agggctcaataggccatgtccggcgcgtagaaacagcgtggcgtgttctc

SEQ ID NO: 227002 - DNA, 50 bp, Artificial
  Synthetic oligonucleotide
ggaatccacgctacgccagatgtcgcttgacggtgagagcgctatccccg

SEQ ID NO: 227003 - DNA, 50 bp, Artificial
  Synthetic oligonucleotide
ctgcacgacccgactccctacgatcggcggagccaaattgttccctcccg

SEQ ID NO: 227004 - DNA, 50 bp, Artificial
  Synthetic oligonucleotide
agggcggatggccattgcagaaatccaccgactacaacaagcgcagtcgc

SEQ ID NO: 227005 - DNA, 59 bp, Artificial
  Synthetic oligonucleotide
tgccgtgaaccgcttgcttgccttatagagacggctctcggccgttacgaagatggagc

SEQ ID NO: 227006 - DNA, 50 bp, Artificial
  Synthetic oligonucleotide
agggcgctcttcgccttggtcagtaccggcgaatcgtaggacaggtggat

SEQ ID NO: 227007 - DNA, 50 bp, Artificial
  Synthetic oligonucleotide
agggcgcatgcattcccccgaaacactcgcaacatccggcacttgctgta

SEQ ID NO: 227008 - DNA, 50 bp, Artificial
  Synthetic oligonucleotide
agggcgatctcgattgcgtgtgtcaaatcctgcccagcgggcaaacgaag

SEQ ID NO: 227009 - DNA, 50 bp, Artificial
  Synthetic oligonucleotide
agggcctcgcgcccttgtacaaaacagcactgcaacgagcccccattccg

SEQ ID NO: 227010 - DNA, 50 bp, Artificial
  Synthetic oligonucleotide
agggccgcctatacggacccatgcggcggaagtttgcgaatggccgaatg

SEQ ID NO: 227011 - DNA, 50 bp, Artificial
  Synthetic oligonucleotide
ggactatgcgttaacggatattacgtttcttccggtcatccccaacccgc

SEQ ID NO: 227012 - DNA, 50 bp, Artificial
  Synthetic oligonucleotide
ggactgcatccgcaacgccccaaagacagtcaagacgccactaagggccg

SEQ ID NO: 227013 - DNA, 50 bp, Artificial
  Synthetic oligonucleotide
ccagggccacatcgtctcacccgttgaaacgagcgtcaccgaggcgaatc

SEQ ID NO: 227014 - DNA, 50 bp, Artificial
  Synthetic oligonucleotide
agggagtgcccgatgaccaaagagcaagccgacgcggcacagaacgttgc

SEQ ID NO: 227015 - DNA, 50 bp, Artificial
  Synthetic oligonucleotide
ccataatattcaggggttctaggcggagaagccacgttgaagtgcgaatt

SEQ ID NO: 227016 - DNA, 59 bp, Artificial
  Synthetic oligonucleotide
actgaggagctggtctacgcggcaccctgcaattgtccgacttgtggtggcacatcttt

SEQ ID NO: 227017 - DNA, 50 bp, Artificial
  Synthetic oligonucleotide
ctgatgcgggaactgacatgtccatcgagcctctgacgtcaccaaggatt

SEQ ID NO: 227018 - DNA, 50 bp, Artificial
  Synthetic oligonucleotide
aggctgcacaatcaatcggctatcatgcggtgggcctgctacggcagcgc

SEQ ID NO: 227019 - DNA, 50 bp, Artificial
  Synthetic oligonucleotide
aggctatgggtgccatctggccctacatcgcagcattgctgatcggccta

SEQ ID NO: 227020 - DNA, 50 bp, Artificial
  Synthetic oligonucleotide
ggaggcctatagcttgcaaagcgtgagggagcagcgggcacggatcttct

SEQ ID NO: 227021 - DNA, 50 bp, Artificial
  Synthetic oligonucleotide
aggctagttgggattgcggtgggccgcacattgaagtgtagggtggctgc

SEQ ID NO: 227022 - DNA, 50 bp, Artificial
  Synthetic oligonucleotide
ccacgggaagagcggaagacctacgagttattggacccgcggttgcccac

SEQ ID NO: 227023 - DNA, 50 bp, Artificial
  Synthetic oligonucleotide
agttcccgggctttcccgaatcgtctgctgtagccgctggagggcttgcg

SEQ ID NO: 227024 - DNA, 50 bp, Artificial
  Synthetic oligonucleotide
ccactcacgtcccttgggtgcgagagcatatcgtgcctcacagcggatgg

SEQ ID NO: 227025 - DNA, 50 bp, Artificial
  Synthetic oligonucleotide
agtgctgggacgggttggaacgcaggttcgacgggacacctggcatcaag

SEQ ID NO: 227026 - DNA, 50 bp, Artificial
  Synthetic oligonucleotide
agtgctatgcctcagcctgcaccagacggcctatctctaccgtgtggccc

SEQ ID NO: 227027 - DNA, 59 bp, Artificial
  Synthetic oligonucleotide
gttctgatcgtccctggaacttacgcgcccgagagtccagtgatgctcgaggggagtcg

SEQ ID NO: 227028 - DNA, 50 bp, Artificial
  Synthetic oligonucleotide
agtgctacacagccattcgctgggattgcgcgccccacctatggacgctt

SEQ ID NO: 227029 - DNA, 50 bp, Artificial
  Synthetic oligonucleotide
agtgccacttggcagacctcgccggttgggtgaagctagaatcgccaggc

SEQ ID NO: 227030 - DNA, 50 bp, Artificial
  Synthetic oligonucleotide
agtgagctgctgtaccatggacgcagaaagcgtgcttgccctcagcacga

SEQ ID NO: 227031 - DNA, 50 bp, Artificial
  Synthetic oligonucleotide
ctgcgtgtcccccgggactgcacttccactgccggcaatacaccgaaagg

SEQ ID NO: 227032 - DNA, 50 bp, Artificial
  Synthetic oligonucleotide
agtcgtttacgacctctctcgtccagagcggcatagagcggggcgactgg

SEQ ID NO: 227033 - DNA, 50 bp, Artificial
  Synthetic oligonucleotide
agtcgacgtgtctgaaagtcaggtaccgcctcgattcgcctcgcctgccc

SEQ ID NO: 227034 - DNA, 50 bp, Artificial
  Synthetic oligonucleotide
agtataacttaccggcgcagccctcccccgactaccgggagcaagccaag

SEQ ID NO: 227035 - DNA, 50 bp, Artificial
  Synthetic oligonucleotide
agtagccgttcgcccgctaggttcggacagtcttgtgcagccaggtcgca

SEQ ID NO: 227036 - DNA, 50 bp, Artificial
  Synthetic oligonucleotide
agtagactacccccgcggagccggatgtggcgtctgaagcttcgactgag

SEQ ID NO: 227037 - DNA, 50 bp, Artificial
  Synthetic oligonucleotide
aggttggcaggacgtagggtgtaggtcgatcttgcatggcgctggtccgt

SEQ ID NO: 227038 - DNA, 57 bp, Artificial
  Synthetic oligonucleotide
tctcaccgtggagagtaacggggacgtttgcaggctttgttctcgcgcacacagttt

SEQ ID NO: 227039 - DNA, 50 bp, Artificial
  Synthetic oligonucleotide
gctgccaccatcacattgcgccacgctagcttgcgagccgaccgggaata

SEQ ID NO: 227040 - DNA, 50 bp, Artificial
  Synthetic oligonucleotide
aggtggcctagcgcccacggggcatcctgtgctaaagcgcctgttatgtc

SEQ ID NO: 227041 - DNA, 50 bp, Artificial
  Synthetic oligonucleotide
ccacttggacttcgaacgaatgcgatatgcatcccgcggcgcttgccagc

SEQ ID NO: 227042 - DNA, 50 bp, Artificial
  Synthetic oligonucleotide
gctgtgacccactatggcgcgagatcgactatgccccaaggagctcccga

SEQ ID NO: 227043 - DNA, 50 bp, Artificial
  Synthetic oligonucleotide
agggtgcacgtcggaatcgatcgcccagcttgtgatcagcgttccgctct

SEQ ID NO: 227044 - DNA, 50 bp, Artificial
  Synthetic oligonucleotide
agggtcgtcggtcgttctcagccgtacgatcgatgcgcacttcggaggcg

SEQ ID NO: 227045 - DNA, 50 bp, Artificial
  Synthetic oligonucleotide
agggtcggagcgaagctccggggtagggtgatgtctcctcgcattcaggg

SEQ ID NO: 227046 - DNA, 50 bp, Artificial
  Synthetic oligonucleotide
ccagaggattgatccaagccgggagggccgatcgtttcgctcgaccgatc

SEQ ID NO: 227047 - DNA, 50 bp, Artificial
  Synthetic oligonucleotide
aggggttcgcccgaatatccgtctcttcgtagaggtgtttcgggatgatg

SEQ ID NO: 227048 - DNA, 50 bp, Artificial
  Synthetic oligonucleotide
agggggagttccagcaaggggagggggactggttttctcccggtatcggc

SEQ ID NO: 227049 - DNA, 60 bp, Artificial
  Synthetic oligonucleotide
atcctgcgattccaggctccttcacgctggtcgctcgcggctaacagcagacacccatca

SEQ ID NO: 227050 - DNA, 58 bp, Artificial
  Synthetic oligonucleotide
gccctccgatggcctgtcctcagtccagccggtccctaaagtgcgtggacaagctttc

SEQ ID NO: 227051 - DNA, 50 bp, Artificial
  Synthetic oligonucleotide
gatccagcgcctccctatcaagagcccctgcatgatcgcatgcaaccgcc

SEQ ID NO: 227052 - DNA, 50 bp, Artificial
  Synthetic oligonucleotide
gacaggttcacccgaaaatccggcacgcacagctcttgagacgcgtccca

SEQ ID NO: 227053 - DNA, 50 bp, Artificial
  Synthetic oligonucleotide
caaggcaagcggtacaggcaccgccctggacgagaagaggtcccagcctt

SEQ ID NO: 227054 - DNA, 50 bp, Artificial
  Synthetic oligonucleotide
caggagaaatagacgaggtttaccgtgctcattcgttgaccacatgtttc

SEQ ID NO: 227055 - DNA, 50 bp, Artificial
  Synthetic oligonucleotide
gatcggctccgtcccagctctgttcgggaagaagaccctctgtcccagcc

SEQ ID NO: 227056 - DNA, 50 bp, Artificial
  Synthetic oligonucleotide
caggcattgggacggccctccttttggaccatcaattcgcgctggttgct

SEQ ID NO: 227057 - DNA, 50 bp, Artificial
  Synthetic oligonucleotide
caagcgtacattgcccgccgagccttgatctcgacccttaattgcgccgg

SEQ ID NO: 227058 - DNA, 50 bp, Artificial
  Synthetic oligonucleotide
caggcggggtgaacgggtgcggcgaaccgatcaaatcgaggggtataaga

SEQ ID NO: 227059 - DNA, 50 bp, Artificial
  Synthetic oligonucleotide
caagccgctcaggccctatcgcccaagacgaaggggaaggttattcgcga

SEQ ID NO: 227060 - DNA, 50 bp, Artificial
  Synthetic oligonucleotide
caggcggtaaatggcaggggattcggtgatgaactgtcggtgccgcgcaa

SEQ ID NO: 227061 - DNA, 59 bp, Artificial
  Synthetic oligonucleotide
cgaacgcctgccagtgtacgaagaggccccgattatctcgagcaagttgccgcaagaac

SEQ ID NO: 227062 - DNA, 50 bp, Artificial
  Synthetic oligonucleotide
caacgggtgtgtcggcggaaaaatgtgcccctacccgcttcaagagcggg

SEQ ID NO: 227063 - DNA, 50 bp, Artificial
  Synthetic oligonucleotide
gatgccggctcgcggatttgtcacgtctgcctccgtctaaacctccccct

SEQ ID NO: 227064 - DNA, 50 bp, Artificial
  Synthetic oligonucleotide
caacgggcggatagcggacacggcgcccagaaccgagggatcctcgagtt

SEQ ID NO: 227065 - DNA, 50 bp, Artificial
  Synthetic oligonucleotide
caggcttcccaggctcgaggttcgcgcatgcgatatcccaacggaaacca

SEQ ID NO: 227066 - DNA, 50 bp, Artificial
  Synthetic oligonucleotide
gaatcccggtacgaccgtggagatcatttcgctgccctggggcgaagcct

SEQ ID NO: 227067 - DNA, 50 bp, Artificial
  Synthetic oligonucleotide
gatgtcgcacaccgaaagtccgcatagcccgcgacacgggtttctcccgg

SEQ ID NO: 227068 - DNA, 50 bp, Artificial
  Synthetic oligonucleotide
cagggcaaccagctccccattgttgagaacctgcgtccactcggttgcga

SEQ ID NO: 227069 - DNA, 50 bp, Artificial
  Synthetic oligonucleotide
caggggccggtcagagccatggagcatcacatgaattgctcattcgcggg

SEQ ID NO: 227070 - DNA, 50 bp, Artificial
  Synthetic oligonucleotide
caggggcggtagcagtcgggcacgcacgttcatttttgtcgggtcgagac

SEQ ID NO: 227071 - DNA, 50 bp, Artificial
  Synthetic oligonucleotide
caaatcccggcgtatggccgtgcataccgatgcgaccagcaccgagagcg

SEQ ID NO: 227072 - DNA, 59 bp, Artificial
  Synthetic oligonucleotide
cagtgtacgaagaggccccgattatctcgagcaagttgccgcaagaactgcgaagcccg

SEQ ID NO: 227073 - DNA, 50 bp, Artificial
  Synthetic oligonucleotide
gaagggcctttccattgagtcctaaccacgtagatcatctcgtattgccg

SEQ ID NO: 227074 - DNA, 50 bp, Artificial
  Synthetic oligonucleotide
gcaacccggtgctcccccggatgcaacatgcgcacagatacaatcctcaa

SEQ ID NO: 227075 - DNA, 50 bp, Artificial
  Synthetic oligonucleotide
cactaccgcttctcgtgatgctctcgggttcatgatgttagtgaggtggc

SEQ ID NO: 227076 - DNA, 50 bp, Artificial
  Synthetic oligonucleotide
gacgttcggctggccattcggcgacctcaggcatctcaaggcggtccttg

SEQ ID NO: 227077 - DNA, 50 bp, Artificial
  Synthetic oligonucleotide
gacgtgacggtccttgggggtcgaggcaatgcgtagttttgggtcgcata

SEQ ID NO: 227078 - DNA, 50 bp, Artificial
  Synthetic oligonucleotide
cacgggacctgcctcctccgtggacgaagcaacttcgttcgggtcgccta

SEQ ID NO: 227079 - DNA, 50 bp, Artificial
  Synthetic oligonucleotide
cacggcggctgcgtgattagtggcatggagcgcgccctcgcatattcagt

SEQ ID NO: 227080 - DNA, 50 bp, Artificial
  Synthetic oligonucleotide
gacgggcgcctcctgaattgacttggtgtcgtgcatggtgacccaagcga

SEQ ID NO: 227081 - DNA, 50 bp, Artificial
  Synthetic oligonucleotide
cacggacccgccattgttgggtgtcccgatcgtgattggcagcatggatg

SEQ ID NO: 227082 - DNA, 50 bp, Artificial
  Synthetic oligonucleotide
caccgtggatcctgagggcgtggacaaggatcaggcccccgcttcgctcc

SEQ ID NO: 227083 - DNA, 59 bp, Artificial
  Synthetic oligonucleotide
ggccagagaaggttgcacgccaatggaggttgtggagatcctctatccagacctggcgc

SEQ ID NO: 227084 - DNA, 50 bp, Artificial
  Synthetic oligonucleotide
caccgatcgagcgctaaaaagccagagggcgcaagtaacgcgttgccggt

SEQ ID NO: 227085 - DNA, 50 bp, Artificial
  Synthetic oligonucleotide
cagacagcgcgaaagggcaagcacgagagggaggtccactcggaggcaca

SEQ ID NO: 227086 - DNA, 50 bp, Artificial
  Synthetic oligonucleotide
cacccgaacatggcctccaaacgtggattatccaggccccctgggtaccc

SEQ ID NO: 227087 - DNA, 50 bp, Artificial
  Synthetic oligonucleotide
cagagattgccggcactgacgaagtcgggagcaaacgcggtatcgaccgc

SEQ ID NO: 227088 - DNA, 50 bp, Artificial
  Synthetic oligonucleotide
gaggacagcctccgtggagcttccggagacagcctggtgcgaacgagttc

SEQ ID NO: 227089 - DNA, 50 bp, Artificial
  Synthetic oligonucleotide
caccaggccgtttgccatgaagatgacttcggaccccacatctgccgcaa

SEQ ID NO: 227090 - DNA, 50 bp, Artificial
  Synthetic oligonucleotide
cacattgcgccacgctagcttgcgagccgaccgggaatagtcgatctcga

SEQ ID NO: 227091 - DNA, 50 bp, Artificial
  Synthetic oligonucleotide
cacattgccacccaatgcctgcctgcggaatagtcggaaggcttcccgtg

SEQ ID NO: 227092 - DNA, 50 bp, Artificial
  Synthetic oligonucleotide
gaccgcatcgcacctgttccgtagggcgatttcgagcatgtggagggagc

SEQ ID NO: 227093 - DNA, 50 bp, Artificial
  Synthetic oligonucleotide
cagcccgacaagccaatccttctttcgcaaagcagtgtcgccgtattagc

SEQ ID NO: 227094 - DNA, 59 bp, Artificial
  Synthetic oligonucleotide
acatttcagcgaatgccgtgaaccgcttgcttgccttatagagacggctctcggccgtt

SEQ ID NO: 227095 - DNA, 50 bp, Artificial
  Synthetic oligonucleotide
cagcccgacgagattggactgcgttgcggcggaccgattgcggtaggtat

SEQ ID NO: 227096 - DNA, 50 bp, Artificial
  Synthetic oligonucleotide
caattgtcgaacctcggttgaagcccattgtctacgtcgcgcgtatatct

SEQ ID NO: 227097 - DNA, 50 bp, Artificial
  Synthetic oligonucleotide
gacattctctggcgctcggacccgatgctcgttcggcccgcccgaaatac

SEQ ID NO: 227098 - DNA, 50 bp, Artificial
  Synthetic oligonucleotide
gatactctcccgaggcgaatggtgtagatactgacaaagcctgcggtacc

SEQ ID NO: 227099 - DNA, 50 bp, Artificial
  Synthetic oligonucleotide
caatcaggtgtgctatgggtttgcttccagccggacggtcgccctctgcg

SEQ ID NO: 227100 - DNA, 50 bp, Artificial
  Synthetic oligonucleotide
attacgggggcgtcatctccgcgctaatgttcgaccgagcgagagcccat

SEQ ID NO: 227101 - DNA, 50 bp, Artificial
  Synthetic oligonucleotide
gcatctgtacccgtcttcttaaatgatacggaggaaagcctatctcaaaa

SEQ ID NO: 227102 - DNA, 50 bp, Artificial
  Synthetic oligonucleotide
atgtggcgccggatccttgcacgtgaactggggcacgagatctacgcgga

SEQ ID NO: 227103 - DNA, 50 bp, Artificial
  Synthetic oligonucleotide
atgtgcaccggcggagtgaccgctgacggagaactgcttccgtgtggcgc

SEQ ID NO: 227104 - DNA, 50 bp, Artificial
  Synthetic oligonucleotide
atgtccgcttggtacttgcgtttgcgaaagtctccgggttaggtttgcgg

SEQ ID NO: 227105 - DNA, 53 bp, Artificial
  Synthetic oligonucleotide
acccaatgggctgcgcaaggttaaggtttccgggggtgaaccgatggttcaca

SEQ ID NO: 227106 - DNA, 50 bp, Artificial
  Synthetic oligonucleotide
gcattgccatcggagcgagttggaacccggacctagccagggaaatcggc

SEQ ID NO: 227107 - DNA, 50 bp, Artificial
  Synthetic oligonucleotide
catctcagcaagctcccgaacggcctcgctggaacggtaggtgcttcggc

SEQ ID NO: 227108 - DNA, 50 bp, Artificial
  Synthetic oligonucleotide
gaaatacgcgccgccagtccatcccggtaggtgccaagcgccgtctgatc

SEQ ID NO: 227109 - DNA, 50 bp, Artificial
  Synthetic oligonucleotide
atgggtttgcttccagccggacggtcgccctctgcgcggctacaatcagg

SEQ ID NO: 227110 - DNA, 50 bp, Artificial
  Synthetic oligonucleotide
atggggtaacggcgaaggtcgtggcacgctgggtcgagtggttcatgtgc

SEQ ID NO: 227111 - DNA, 50 bp, Artificial
  Synthetic oligonucleotide
atggcgtcccggatcttacgtcgaatgccataaaggttctgaacaaggaa

SEQ ID NO: 227112 - DNA, 50 bp, Artificial
  Synthetic oligonucleotide
gaaacgattgatagagcgcactgggctgagggacgcaactgcggcgaccg

SEQ ID NO: 227113 - DNA, 50 bp, Artificial
  Synthetic oligonucleotide
gaaaactggctctcaccaccttttcaccgcacatgaagcaacgccggttt

SEQ ID NO: 227114 - DNA, 50 bp, Artificial
  Synthetic oligonucleotide
gccagtcttatagggcacgggcagcattattgcaggggctcccgggtcaa

SEQ ID NO: 227115 - DNA, 50 bp, Artificial
  Synthetic oligonucleotide
atgctcgccgctttcgcctccacagaagcctcgctctacgaggttctccg

SEQ ID NO: 227116 - DNA, 59 bp, Artificial
  Synthetic oligonucleotide
tgcgatttctcatccacgcatagcacgactgcccgatcaggtggcgacatgtaaaggcc

SEQ ID NO: 227117 - DNA, 50 bp, Artificial
  Synthetic oligonucleotide
ctttcctgcgcaagatcatagcggcagggcaccgcgtctaagcctcacgg

SEQ ID NO: 227118 - DNA, 50 bp, Artificial
  Synthetic oligonucleotide
gcccccattccggggccaccgccattaattgaggtccactttatcctgcg

SEQ ID NO: 227119 - DNA, 50 bp, Artificial
  Synthetic oligonucleotide
gcccgagggtgcagagcgaagcagcaggagaccggaggctcatgtcgcaa

SEQ ID NO: 227120 - DNA, 50 bp, Artificial
  Synthetic oligonucleotide
ctttaggaaggcctgtaatacgtccaaccgcccgcagaggggcctcgggc

SEQ ID NO: 227121 - DNA, 50 bp, Artificial
  Synthetic oligonucleotide
atgagctagattgggagcttgccctggctccgcttcgaaaggacgccgcc

SEQ ID NO: 227122 - DNA, 50 bp, Artificial
  Synthetic oligonucleotide
catgggcggaacgcaataggaaacgccatgccatgagggggtctgcgatg

SEQ ID NO: 227123 - DNA, 50 bp, Artificial
  Synthetic oligonucleotide
atctggcatcgcgctaggcattctgacacgccctacctggttgcccttgg

SEQ ID NO: 227124 - DNA, 50 bp, Artificial
  Synthetic oligonucleotide
cagtcacgacctgtccggctgttccctcgctgatcccaagatcacgggcc

SEQ ID NO: 227125 - DNA, 50 bp, Artificial
  Synthetic oligonucleotide
catactcgacgcactgaagaagcacgacgagtggcgaggcgagggctcgc

SEQ ID NO: 227126 - DNA, 50 bp, Artificial
  Synthetic oligonucleotide
gcaatgcggacacgtctcagcgcacctagcgttccgatgctcgtccacct

SEQ ID NO: 227127 - DNA, 57 bp, Artificial
  Synthetic oligonucleotide
cccgattatctcgagcaagttgccgcaagaactgcgaagcccgagttttgtggaacc

SEQ ID NO: 227128 - DNA, 50 bp, Artificial
  Synthetic oligonucleotide
gcaatggctcgccgcagaaggttgccgtctgtacgctgtctggcaatctg

SEQ ID NO: 227129 - DNA, 50 bp, Artificial
  Synthetic oligonucleotide
gcaattcggtcagttcccagaaggcaagcttacggccgggtctgcacgca

SEQ ID NO: 227130 - DNA, 50 bp, Artificial
  Synthetic oligonucleotide
atttcccacctgggccatcccgtacccttcactgggaagggtttgcgctg

SEQ ID NO: 227131 - DNA, 50 bp, Artificial
  Synthetic oligonucleotide
atttcagctcccaactccattcgtttccggtgggaggcttagccttcaat

SEQ ID NO: 227132 - DNA, 50 bp, Artificial
  Synthetic oligonucleotide
atttattttgggcgcgggtgtgccgaagggccggaccccgattaagggat

SEQ ID NO: 227133 - DNA, 50 bp, Artificial
  Synthetic oligonucleotide
gcaccgccctggacgagaagaggtcccagccttcgatccacgcaagtgtc

SEQ ID NO: 227134 - DNA, 50 bp, Artificial
  Synthetic oligonucleotide
attgtgccaatggcgaagcctgcgctgatccccaccgccccgatcgttgc

SEQ ID NO: 227135 - DNA, 50 bp, Artificial
  Synthetic oligonucleotide
attgggcttctcggttgagggcggattgttccgggcgtcagaagttggcg

SEQ ID NO: 227136 - DNA, 50 bp, Artificial
  Synthetic oligonucleotide
gcacgagctccccctcgcaatgcggacacgtctcagcgcacctagcgttc

SEQ ID NO: 227137 - DNA, 50 bp, Artificial
  Synthetic oligonucleotide
catcgcaactcccgagagggactgcggggcttccttgctggatggtctca

SEQ ID NO: 227138 - DNA, 59 bp, Artificial
  Synthetic oligonucleotide
tagagtgtttatgaagcgcgggttcacaatagcccgcaagaattgtcgaaagctctggt

SEQ ID NO: 227139 - DNA, 50 bp, Artificial
  Synthetic oligonucleotide
attgacgttacttcagccgtagggcgagggacgcgcttcgacatttatct

SEQ ID NO: 227140 - DNA, 50 bp, Artificial
  Synthetic oligonucleotide
attctgccccggatagaggctcacccctgccggatcacgattggcgtcaa

SEQ ID NO: 227141 - DNA, 50 bp, Artificial
  Synthetic oligonucleotide
attcggtttcacgaggggctcagcggagggcgactctggcgaaacgggac

SEQ ID NO: 227142 - DNA, 50 bp, Artificial
  Synthetic oligonucleotide
gcagcggctttcccggtaggcattgccatcggagcgagttggaacccgga

SEQ ID NO: 227143 - DNA, 50 bp, Artificial
  Synthetic oligonucleotide
attccagacctcgtgcgacgcatgcggatacagtggccggagctcgacat

SEQ ID NO: 227144 - DNA, 50 bp, Artificial
  Synthetic oligonucleotide
gcaggctgaaacagggtaggggtgccgcaacggcattccgatcaggacat

SEQ ID NO: 227145 - DNA, 50 bp, Artificial
  Synthetic oligonucleotide
gaaccgatcaaatcgaacctcgctcaacggctggttggaggggcccagcc

SEQ ID NO: 227146 - DNA, 50 bp, Artificial
  Synthetic oligonucleotide
gcatagcgcgatccgagacgcgacgatattgtgccaatggcgaagcctgc

SEQ ID NO: 227147 - DNA, 50 bp, Artificial
  Synthetic oligonucleotide
gcatcaccggatggtggctgacagagacgtgccggccgcagagggctcct

SEQ ID NO: 227148 - DNA, 50 bp, Artificial
  Synthetic oligonucleotide
ggttgttcgctccactcaaccgtatgaattcagagccggaaaagacctgt

SEQ ID NO: 227149 - DNA, 59 bp, Artificial
  Synthetic oligonucleotide
cgatggtagcctatcgcttcgaggacagtcgagccaccgagtgtgtcgcacgacacctg

SEQ ID NO: 227150 - DNA, 50 bp, Artificial
  Synthetic oligonucleotide
cccgcatcggcggacgttggaaaattgccgccacgcatccggctcagccg

SEQ ID NO: 227151 - DNA, 50 bp, Artificial
  Synthetic oligonucleotide
ggtttggttaagcgtttgtaaattggtaacgaatcggggcatactataac

SEQ ID NO: 227152 - DNA, 50 bp, Artificial
  Synthetic oligonucleotide
actgtcgcagagcgccgcaattccgtccttcaagagccgatttccgggcg

SEQ ID NO: 227153 - DNA, 50 bp, Artificial
  Synthetic oligonucleotide
actgaacatccgcgagcttgacctccggtgcggcatattgcggaccgagc

SEQ ID NO: 227154 - DNA, 50 bp, Artificial
  Synthetic oligonucleotide
actccttcggacgcggcgcagtcatgaggctatgacgacgcaggggctgt

SEQ ID NO: 227155 - DNA, 50 bp, Artificial
  Synthetic oligonucleotide
actaggcgcacgggcatcgggactttgcggttgttcgactctcgctggta

SEQ ID NO: 227156 - DNA, 50 bp, Artificial
  Synthetic oligonucleotide
cccgggcaaacccgaccatcgggcacatgaggaagcttgtcgccgacggg

SEQ ID NO: 227157 - DNA, 50 bp, Artificial
  Synthetic oligonucleotide
acgttgccgattctgaagggccgccaagcggtgtcctcgcaacacaaagc

SEQ ID NO: 227158 - DNA, 50 bp, Artificial
  Synthetic oligonucleotide
cgttgctctacaacactatgtgcgatgtcaggcagcataagcagcggctc

SEQ ID NO: 227159 - DNA, 50 bp, Artificial
  Synthetic oligonucleotide
acgtgggggacttggcctgtcagtagcgggcatcaggactatgcggccca

SEQ ID NO: 227160 - DNA, 60 bp, Artificial
  Synthetic oligonucleotide
gcgccatccagaaacgaggtgatctgaaactgctcgttggcttcttgccgtgccatggtg

SEQ ID NO: 227161 - DNA, 59 bp, Artificial
  Synthetic oligonucleotide
attggtctggtgcgtccgaactgcacacgagggcaattgttccgcacaattggcgtggg

SEQ ID NO: 227162 - DNA, 50 bp, Artificial
  Synthetic oligonucleotide
gtatcagtctccccgtcagtccatgagatatggctatcgtggtcgagcga

SEQ ID NO: 227163 - DNA, 50 bp, Artificial
  Synthetic oligonucleotide
gtatctgagaaaagagcggaccgcgcacagcttttgttcgaccgtctttg

SEQ ID NO: 227164 - DNA, 50 bp, Artificial
  Synthetic oligonucleotide
cgttcgagactttcggcccaccgttcaagccgttcgcaccgcgtgatttc

SEQ ID NO: 227165 - DNA, 50 bp, Artificial
  Synthetic oligonucleotide
cgttccgacttgggcaacgggcgaagatgatagccgcgatcgaagcgaga

SEQ ID NO: 227166 - DNA, 50 bp, Artificial
  Synthetic oligonucleotide
acgtcgctgtgcttcacgattgccctgccggagctcgtgagccgtgctta

SEQ ID NO: 227167 - DNA, 50 bp, Artificial
  Synthetic oligonucleotide
cgttcatcgtcgtgtgttctgggcggcccgaagcattctttctcgcccgc

SEQ ID NO: 227168 - DNA, 50 bp, Artificial
  Synthetic oligonucleotide
acgtcctccacgggcgtgtgccgtgtgggactggtattccagagaccgaa

SEQ ID NO: 227169 - DNA, 50 bp, Artificial
  Synthetic oligonucleotide
cgtggccccgagcgttctttacaacgacgcgccgtatcttgtcggtgtcg

SEQ ID NO: 227170 - DNA, 50 bp, Artificial
  Synthetic oligonucleotide
acgtcaggcacgcctgccttgactggaagcgtgaactggtaaccgccatt

SEQ ID NO: 227171 - DNA, 50 bp, Artificial
  Synthetic oligonucleotide
ccctcgggccaaagcttccaacgcttggcacacaccgacgcgaaagcgag

SEQ ID NO: 227172 - DNA, 59 bp, Artificial
  Synthetic oligonucleotide
ggatcgcagcgcccgatagtctggaccttgtcagaaggcgatctgcactttcattgact

SEQ ID NO: 227173 - DNA, 50 bp, Artificial
  Synthetic oligonucleotide
acgtcagaaaaggtgcccacgggttctcggtgacccttcgtcccggggac

SEQ ID NO: 227174 - DNA, 50 bp, Artificial
  Synthetic oligonucleotide
acggttgggcatcgcgccatgctccacggatgtcgtatcggcgagaactg

SEQ ID NO: 227175 - DNA, 50 bp, Artificial
  Synthetic oligonucleotide
ggtaaggcttggtttgtgtatttccgcttgttcggtccgctagagccata

SEQ ID NO: 227176 - DNA, 50 bp, Artificial
  Synthetic oligonucleotide
agagcggcatagagcggggcgactggatcctcgcgaaacagggggccata

SEQ ID NO: 227177 - DNA, 50 bp, Artificial
  Synthetic oligonucleotide
agagcggactcgccgagttgccaggcgctgatctgtcccttgaatgtcgc

SEQ ID NO: 227178 - DNA, 50 bp, Artificial
  Synthetic oligonucleotide
cccctctgcgtagagcaacatcgcccgttcgcacaagacatcggctgtcc

SEQ ID NO: 227179 - DNA, 50 bp, Artificial
  Synthetic oligonucleotide
agactgcagggtcaagcccgacacggagcgagcgaaaaacctgagtggcc

SEQ ID NO: 227180 - DNA, 50 bp, Artificial
  Synthetic oligonucleotide
agacgtagcaacgctaccctctcccgcaactgacgaccgcttgggctttg

SEQ ID NO: 227181 - DNA, 50 bp, Artificial
  Synthetic oligonucleotide
ggtcccactggatgagcacgacacagccggtctcgctccagaccgaatgt

SEQ ID NO: 227182 - DNA, 50 bp, Artificial
  Synthetic oligonucleotide
ctcaatcgcgcccgcggcttagcccaacacgtttttagctcaccgtcgct

SEQ ID NO: 227183 - DNA, 59 bp, Artificial
  Synthetic oligonucleotide
agattctttattggctgcacgagtcaccacgcgatatcgtcctactaagtcccgctgac

SEQ ID NO: 227184 - DNA, 50 bp, Artificial
  Synthetic oligonucleotide
ggtccgtctcgaaaatggcgtgcttgcgttaaacgctgtggcgatcaaag

SEQ ID NO: 227185 - DNA, 50 bp, Artificial
  Synthetic oligonucleotide
agacggctttcaacgtgtcgccgcaacgacggatgtggaagctaccggcc

SEQ ID NO: 227186 - DNA, 50 bp, Artificial
  Synthetic oligonucleotide
agacgcccctcggcccagtaagcgatgcggccggacggaaagagtaccgt

SEQ ID NO: 227187 - DNA, 50 bp, Artificial
  Synthetic oligonucleotide
agacgaaacgacccctccttcggcgtgtgacaagtcccgacaggcattcc

SEQ ID NO: 227188 - DNA, 50 bp, Artificial
  Synthetic oligonucleotide
agaccgggcgacgttctcgtgttcaactcacgacggcaccgggcctaagc

SEQ ID NO: 227189 - DNA, 50 bp, Artificial
  Synthetic oligonucleotide
agaattgcggcacccctgtcgttcgggcctacccactttgcgtctgtcct

SEQ ID NO: 227190 - DNA, 50 bp, Artificial
  Synthetic oligonucleotide
agaatccatcacccgcctgaaactccctgcacggccccattccttggtcg

SEQ ID NO: 227191 - DNA, 50 bp, Artificial
  Synthetic oligonucleotide
agaacgcaagggagtgcccgatgaccaaagagcaagccgacgcggcacag

SEQ ID NO: 227192 - DNA, 50 bp, Artificial
  Synthetic oligonucleotide
agaaaggtcccttaagcgcgcgtgggcaggtatatcgaacctcagccgcg

SEQ ID NO: 227193 - DNA, 50 bp, Artificial
  Synthetic oligonucleotide
ggtgtcatttcagcgttaaagacgcgctcatttgctctcagaaaccggtg

SEQ ID NO: 227194 - DNA, 55 bp, Artificial
  Synthetic oligonucleotide
tagcggtatatgcccgcccacggttaaggaaagccatccggcttgtccgaaatta

SEQ ID NO: 227195 - DNA, 50 bp, Artificial
  Synthetic oligonucleotide
agaaacgcttgcgtaacggtcgccggctatgctcccggaccagtgatcca

SEQ ID NO: 227196 - DNA, 50 bp, Artificial
  Synthetic oligonucleotide
cccgacgtctgcgagcggcgatggggaaagtatcggtccgtcagcggtcc

SEQ ID NO: 227197 - DNA, 50 bp, Artificial
  Synthetic oligonucleotide
acttgccgctccggttggcgctcgcttcgcaaaacgtgcacgcagggttc

SEQ ID NO: 227198 - DNA, 50 bp, Artificial
  Synthetic oligonucleotide
acttctgcagccgagcgagcaaaaggacggttcacttgagcacgagccga

SEQ ID NO: 227199 - DNA, 50 bp, Artificial
  Synthetic oligonucleotide
acttccgggcaacgcgcagaaatcctgacgtcgcaacgagactggctccg

SEQ ID NO: 227200 - DNA, 50 bp, Artificial
  Synthetic oligonucleotide
acttccccaccagggcaaccagctccccattgttgagaacctgcgtccac

SEQ ID NO: 227201 - DNA, 50 bp, Artificial
  Synthetic oligonucleotide
acgcgtgaccgtaagattggtgccgagaagacggttggcggaggttccga

SEQ ID NO: 227202 - DNA, 50 bp, Artificial
  Synthetic oligonucleotide
gtggacagtaagcgggcgtcacggctgaatcctcggagcttccgctcacg

SEQ ID NO: 227203 - DNA, 50 bp, Artificial
  Synthetic oligonucleotide
acgcgctgtcgcgggggtaaacggttcgggctcgcctagatagctcgtcc

SEQ ID NO: 227204 - DNA, 50 bp, Artificial
  Synthetic oligonucleotide
cgtccccggtcgcaatgcgcaacatcggtcgcgcaaatccgtgaagagac

SEQ ID NO: 227205 - DNA, 59 bp, Artificial
  Synthetic oligonucleotide
aaggtgcaacattgcacctcgccaaagcgccagcttttggcgaatgatcccgccgtttc

SEQ ID NO: 227206 - DNA, 50 bp, Artificial
  Synthetic oligonucleotide
gtggatgcgtcaacggttagaggctgttggattacgtcctattagcgctc

SEQ ID NO: 227207 - DNA, 50 bp, Artificial
  Synthetic oligonucleotide
acgccacacggccttgggaggaaaacgcgggttccgaattgcgcttaaca

SEQ ID NO: 227208 - DNA, 50 bp, Artificial
  Synthetic oligonucleotide
gtggctcaggccaaacgggaccacgagccgatagtgacgtcggcggttgt

SEQ ID NO: 227209 - DNA, 50 bp, Artificial
  Synthetic oligonucleotide
gtgggcagccgagatgtttgggtcaggcaacgggggcgggcgatacaact

SEQ ID NO: 227210 - DNA, 50 bp, Artificial
  Synthetic oligonucleotide
acgcagcgatccgcgtccggccaaatcctggatcccacgaagggtgaaca

SEQ ID NO: 227211 - DNA, 50 bp, Artificial
  Synthetic oligonucleotide
cgtcacgccgcgatccccatcttgaatctgctgccgcggaaagcgtcgta

SEQ ID NO: 227212 - DNA, 50 bp, Artificial
  Synthetic oligonucleotide
gtgtcagggctggcgtattgccctcgttttcaccgcctcccgtcacttct

SEQ ID NO: 227213 - DNA, 50 bp, Artificial
  Synthetic oligonucleotide
acgatgatgcgtcggttctgcgtctggctgaccagtggaagcgtggcgtg

SEQ ID NO: 227214 - DNA, 50 bp, Artificial
  Synthetic oligonucleotide
acgatccatcgtggcgctgcccacaatcgatggtactggtccagcccgac

SEQ ID NO: 227215 - DNA, 50 bp, Artificial
  Synthetic oligonucleotide
cgtaggcaggccgttcgtctacgccgtggcggtaggttcaaaagcgggtg

SEQ ID NO: 227216 - DNA, 55 bp, Artificial
  Synthetic oligonucleotide
gggaattttaccgatgacagacgttatggaggccgggatttcatccggcaccgaa

SEQ ID NO: 227217 - DNA, 50 bp, Artificial
  Synthetic oligonucleotide
acgacgaaggcggcctcttgaaccctgtgttcgccaactacgtctgggca

SEQ ID NO: 227218 - DNA, 50 bp, Artificial
  Synthetic oligonucleotide
ccgaagggcatccgttgcgccgtcacgtgctctacgagaaggtcagctag

SEQ ID NO: 227219 - DNA, 50 bp, Artificial
  Synthetic oligonucleotide
acgaagcccgggttgactacaccgcgatcggacacgtcgtgaacctggca

SEQ ID NO: 227220 - DNA, 50 bp, Artificial
  Synthetic oligonucleotide
cggttcgaacctggtaccggcataaccgcgtcacgccgacggaacgagca

SEQ ID NO: 227221 - DNA, 50 bp, Artificial
  Synthetic oligonucleotide
acgaagatgcttgagcggttcgacgtaccgtgagtctggcggcggtcccg

SEQ ID NO: 227222 - DNA, 50 bp, Artificial
  Synthetic oligonucleotide
cggttccacgggacgtgttgggatacaacacgtgggaatctccaaggaaa

SEQ ID NO: 227223 - DNA, 50 bp, Artificial
  Synthetic oligonucleotide
cggttacacggaccgtaggagacggctttcaacgtgtcgccgcaacgacg

SEQ ID NO: 227224 - DNA, 50 bp, Artificial
  Synthetic oligonucleotide
accgtttccacaagcgcggacgccgaaatatggggtaggcgatcgctgcg

SEQ ID NO: 227225 - DNA, 50 bp, Artificial
  Synthetic oligonucleotide
accgtggtcctgagcgccaagtttataggtcggcggtagcgtccacaccc

SEQ ID NO: 227226 - DNA, 50 bp, Artificial
  Synthetic oligonucleotide
ccgacgagtctcgaaccgccggacctctctcccagccggatcgtatgacc

SEQ ID NO: 227227 - DNA, 52 bp, Artificial
  Synthetic oligonucleotide
atttaggttttccgggcgtgtttaaactaccccgcatacacgaggcaggtca

SEQ ID NO: 227228 - DNA, 50 bp, Artificial
  Synthetic oligonucleotide
acggtcgtcatggtccgaaggacgcctccgtcgcttgaatttcgggcggt

SEQ ID NO: 227229 - DNA, 50 bp, Artificial
  Synthetic oligonucleotide
gtccgtcggcacggggttcaatcgaaccgaggcggaatatttgcgcaaga

SEQ ID NO: 227230 - DNA, 50 bp, Artificial
  Synthetic oligonucleotide
acggtcccgcgctattgcacttaagggagggtcggtgtgctttgccctga

SEQ ID NO: 227231 - DNA, 50 bp, Artificial
  Synthetic oligonucleotide
ccctcttcccgttttctgaagccggctccatatcggcggcccgaaagcac

SEQ ID NO: 227232 - DNA, 50 bp, Artificial
  Synthetic oligonucleotide
gtcgacgaatagcccgaaacaagctcggccaatatcgcacgtgcagcggc

SEQ ID NO: 227233 - DNA, 50 bp, Artificial
  Synthetic oligonucleotide
acgggtaccgccccacacccgctagccaatcgttgatctcccattgcccg

SEQ ID NO: 227234 - DNA, 50 bp, Artificial
  Synthetic oligonucleotide
cgtgcaattgttcgccagtcgaggcggagcttaaacggcgcgcgagtgtc

SEQ ID NO: 227235 - DNA, 50 bp, Artificial
  Synthetic oligonucleotide
acggggatggattccatcgtgtgttcgcccgtcgcgttcgaatgtgccgt

SEQ ID NO: 227236 - DNA, 50 bp, Artificial
  Synthetic oligonucleotide
acgggcgggttttcgcgtcacagcagcctgcggtacttttcccggtcacg

SEQ ID NO: 227237 - DNA, 50 bp, Artificial
  Synthetic oligonucleotide
acgggaggccagctcaaatcgggtgccacgctatgcttatgctgccgctt

SEQ ID NO: 227238 - DNA, 58 bp, Artificial
  Synthetic oligonucleotide
aaggagtgtgatgtccgttccgacggaaatagtgcccccgtcgtgtgtgcaccattca

SEQ ID NO: 227239 - DNA, 50 bp, Artificial
  Synthetic oligonucleotide
gtcggcccaagatgatctgttcaacacgctccccgcagcccaatttgccg

SEQ ID NO: 227240 - DNA, 50 bp, Artificial
  Synthetic oligonucleotide
acggctgcttcgccattcgcagatgcctcgtgcagtgccgtcagttcacc

SEQ ID NO: 227241 - DNA, 50 bp, Artificial
  Synthetic oligonucleotide
gtcgggagctccttggggcatagtcgatctcgcgccatagtgggccacag

SEQ ID NO: 227242 - DNA, 50 bp, Artificial
  Synthetic oligonucleotide
cgtgaggggctgccggcttctgcacgtgaactggaaatctatcccggcct

SEQ ID NO: 227243 - DNA, 50 bp, Artificial
  Synthetic oligonucleotide
gtcgtcgaatagttgccgacattcgtatggtaagaggccgtataggtttg

SEQ ID NO: 227244 - DNA, 50 bp, Artificial
  Synthetic oligonucleotide
ccctttcgcgagcggcgctattcatgccccagccaggttagtgcctcgcc

SEQ ID NO: 227245 - DNA, 50 bp, Artificial
  Synthetic oligonucleotide
acggcaactgggttcgcgccatcatgtcgactggcagtccaacgacgaaa

SEQ ID NO: 227246 - DNA, 50 bp, Artificial
  Synthetic oligonucleotide
cgtcgccgcttccaaacgccatccgtgggctgatactgattccgcgagag

SEQ ID NO: 227247 - DNA, 50 bp, Artificial
  Synthetic oligonucleotide
acggacgggattggttattctgacctcgcccccgcgctaccttagcccgg

SEQ ID NO: 227248 - DNA, 50 bp, Artificial
  Synthetic oligonucleotide
acgcttcgtgagactcatgacggccaatttccgggcacgcacgctcgtta

SEQ ID NO: 227249 - DNA, 55 bp, Artificial
  Synthetic oligonucleotide
aaccgctgcccggaacgaaagttcccgctttaggcaatggctcctgaggcgattg

SEQ ID NO: 227250 - DNA, 50 bp, Artificial
  Synthetic oligonucleotide
acgctccatcccgctatgagccggcgagagcagacattggtcgtatgggg

SEQ ID NO: 227251 - DNA, 50 bp, Artificial
  Synthetic oligonucleotide
gtgcgaaatctcggggtctctcagcaagtggacctctccgaagtgcggga

SEQ ID NO: 227252 - DNA, 50 bp, Artificial
  Synthetic oligonucleotide
ccgaaatagggcttgccgattggctaacgggtaccgccccacacccgcta

SEQ ID NO: 227253 - DNA, 50 bp, Artificial
  Synthetic oligonucleotide
ctctgccgcctttacggcgcggatcctaagtggccacgcctctacgtcgt

SEQ ID NO: 227254 - DNA, 50 bp, Artificial
  Synthetic oligonucleotide
agctacaccgggccctccctgacagcttggagcattggcgtcccaacata

SEQ ID NO: 227255 - DNA, 50 bp, Artificial
  Synthetic oligonucleotide
agctaaagcgattggctcctgggacgggcttcgggtccagaccgcagtgt

SEQ ID NO: 227256 - DNA, 50 bp, Artificial
  Synthetic oligonucleotide
agcgtctggggattgtcgaggaggtgacaggtcgcaagcgtggccgtgtc

SEQ ID NO: 227257 - DNA, 50 bp, Artificial
  Synthetic oligonucleotide
agcgtcccattaacgtatagagggcggttgcccccaacgcgacgaccaga

SEQ ID NO: 227258 - DNA, 50 bp, Artificial
  Synthetic oligonucleotide
agcgtagcatgacagcgcttgtgcaaatgcagcccggcgattgggccttg

SEQ ID NO: 227259 - DNA, 50 bp, Artificial
  Synthetic oligonucleotide
ctctcgccgcgattaaggctggtcagccagtagcagcagggacgcacatg

SEQ ID NO: 227260 - DNA, 55 bp, Artificial
  Synthetic oligonucleotide
cgggatgctaccacgtcaccccgatctacaacgtgaacgggctccttcggtacgc

SEQ ID NO: 227261 - DNA, 50 bp, Artificial
  Synthetic oligonucleotide
agcggttcgacgtaccgtgagtctggcggcggtcccgataagcgtgcact

SEQ ID NO: 227262 - DNA, 50 bp, Artificial
  Synthetic oligonucleotide
cccacactaccgacgcctacatggagcacgcagcgacgggtgagaacgtc

SEQ ID NO: 227263 - DNA, 50 bp, Artificial
  Synthetic oligonucleotide
agcgggttccgtttgctttgccctgcgcaatacccaccaaccatcgcgcc

SEQ ID NO: 227264 - DNA, 50 bp, Artificial
  Synthetic oligonucleotide
agcgggcttccggatttctcgagtgctggggtattcggtttcacgagggg

SEQ ID NO: 227265 - DNA, 50 bp, Artificial
  Synthetic oligonucleotide
agcggcgacgtgtaggagcaaccaagctgcactattccggctgacaaggg

SEQ ID NO: 227266 - DNA, 50 bp, Artificial
  Synthetic oligonucleotide
agcggagcgatgataggttcatgcagagcgacggattcacgggcgagctt

SEQ ID NO: 227267 - DNA, 50 bp, Artificial
  Synthetic oligonucleotide
agcggacgaaatctcgggggctgcgtggctgctgttgtcgatcggaacgc

SEQ ID NO: 227268 - DNA, 50 bp, Artificial
  Synthetic oligonucleotide
ctcggttttggggcgcaacaccgagcgagcctcctcgcgtcaaattcacc

SEQ ID NO: 227269 - DNA, 50 bp, Artificial
  Synthetic oligonucleotide
agcgctctattttacctggggcgcgctgcttggaggaacgacaccggttc

SEQ ID NO: 227270 - DNA, 50 bp, Artificial
  Synthetic oligonucleotide
agcgcgtatcgagggtcaagcctgtctcgccttgcgattggcgtaacgcc

SEQ ID NO: 227271 - DNA, 58 bp, Artificial
  Synthetic oligonucleotide
atcccggctggataaggacggccacgagttaggtcgggatgtctccgcacatcgaagc

SEQ ID NO: 227272 - DNA, 55 bp, Artificial
  Synthetic oligonucleotide
catatttcaggatgtgtacgaatgggcgggtcatacccgaaacgaaagcccggtg

SEQ ID NO: 227273 - DNA, 50 bp, Artificial
  Synthetic oligonucleotide
agcgcgctttcggctactccgaacgggtaggcagacggttccgcccacat

SEQ ID NO: 227274 - DNA, 50 bp, Artificial
  Synthetic oligonucleotide
agcgccggcatgatggggtgacagagcgacgagtcttgcgggtgcgcctc

SEQ ID NO: 227275 - DNA, 50 bp, Artificial
  Synthetic oligonucleotide
agcgccggagtcttcggatgcctcgaagaggtctcgcgggatcttctcga

SEQ ID NO: 227276 - DNA, 50 bp, Artificial
  Synthetic oligonucleotide
agcgccgcaattccgtccttcaagagccgatttccgggcgtcatctcaca

SEQ ID NO: 227277 - DNA, 50 bp, Artificial
  Synthetic oligonucleotide
agcgcccttcttccgacgacgtgaatgtgccccgttgcttacgcaagcgt

SEQ ID NO: 227278 - DNA, 50 bp, Artificial
  Synthetic oligonucleotide
agcgccaaacaggcgacacctagcacggttttgcccctcgtcaggactgc

SEQ ID NO: 227279 - DNA, 50 bp, Artificial
  Synthetic oligonucleotide
agcgcagacgtggcatctggtcttgggccggaagttcctgggaagcattc

SEQ ID NO: 227280 - DNA, 50 bp, Artificial
  Synthetic oligonucleotide
aggctacgcagaccgtccgcgacattagggtgcacgtcggaatcgatcgc

SEQ ID NO: 227281 - DNA, 50 bp, Artificial
  Synthetic oligonucleotide
aggcgtgcgcgaatgttgccaccgacaaaatgacagcggctccaagcacg

SEQ ID NO: 227282 - DNA, 50 bp, Artificial
  Synthetic oligonucleotide
aggcctgccagacgcgtgcagatcggctgcccgtataaacagctgttagc

SEQ ID NO: 227283 - DNA, 58 bp, Artificial
  Synthetic oligonucleotide
atcatggtattgaccccacgcaacgctctcaacgcatcaacgaccggagcgaaccgcc

SEQ ID NO: 227284 - DNA, 50 bp, Artificial
  Synthetic oligonucleotide
aggccgatgcttaatccgggtccgccgatatgcttgccgtatcccatgga

SEQ ID NO: 227285 - DNA, 50 bp, Artificial
  Synthetic oligonucleotide
aggccaccccagcccacggcttgttgcttagttgttcacgttctgggcca

SEQ ID NO: 227286 - DNA, 50 bp, Artificial
  Synthetic oligonucleotide
aggcagcctcgtcactcggcttgcgaccacttcagacccttcgaaccgtg

SEQ ID NO: 227287 - DNA, 50 bp, Artificial
  Synthetic oligonucleotide
aggcacgcccactgcggacgcatgctagacatatttggaaccggccctaa

SEQ ID NO: 227288 - DNA, 50 bp, Artificial
  Synthetic oligonucleotide
ccatcaatgcgcccgttcaggtgtcgatcatcccctggccgaaccatgtg

SEQ ID NO: 227289 - DNA, 50 bp, Artificial
  Synthetic oligonucleotide
ggatggtggctgacagagacgtgccggccgcagagggctccttccgagga

SEQ ID NO: 227290 - DNA, 50 bp, Artificial
  Synthetic oligonucleotide
aggatgggccgatcccattccgcttcttgaagaccggcaatcacacccga

SEQ ID NO: 227291 - DNA, 50 bp, Artificial
  Synthetic oligonucleotide
ccatctacccaacaagcaggtgacgcgcgacccttcaggcccgataccat

SEQ ID NO: 227292 - DNA, 50 bp, Artificial
  Synthetic oligonucleotide
aggacagccaatcggcccctggaaagcgctcagcaagtgtgcggtaacga

SEQ ID NO: 227293 - DNA, 50 bp, Artificial
  Synthetic oligonucleotide
aggacaaaccgcccgatgcttccccacgtcggcgcaaacgcccctcgctc

SEQ ID NO: 227294 - DNA, 58 bp, Artificial
  Synthetic oligonucleotide
catcagcggaatgcggctagatcccgctgccatcgcttgggctcgaatgggagacgta

SEQ ID NO: 227295 - DNA, 50 bp, Artificial
  Synthetic oligonucleotide
aggaaagcttgcggaatcatgaggacctgtgacgaggagccgccatccga

SEQ ID NO: 227296 - DNA, 50 bp, Artificial
  Synthetic oligonucleotide
agcttgacggcagacgtagcaacgctaccctctcccgcaactgacgaccg

SEQ ID NO: 227297 - DNA, 50 bp, Artificial
  Synthetic oligonucleotide
agcttcgcggcatctcgcctgacgcacctttgggagggggagacatgaca

SEQ ID NO: 227298 - DNA, 50 bp, Artificial
  Synthetic oligonucleotide
ggcatcctctgcgtgtctaaaggatgcgcggcgctaagccggcttgatgg

SEQ ID NO: 227299 - DNA, 50 bp, Artificial
  Synthetic oligonucleotide
agcttacgcgagagcggaatcctggagttcgaaccgacacgcaggctcta

SEQ ID NO: 227300 - DNA, 50 bp, Artificial
  Synthetic oligonucleotide
ggcattcggtcggtgaatgtcgggctttggctcgcggtaagacggctgtc

SEQ ID NO: 227301 - DNA, 50 bp, Artificial
  Synthetic oligonucleotide
ctctggtcgggggatcggtccgcggttgtcctgactgatggcgaacgagg

SEQ ID NO: 227302 - DNA, 50 bp, Artificial
  Synthetic oligonucleotide
ccatggagcgaggagcagggaaattcgggtaacaactgggcctggctcgg

SEQ ID NO: 227303 - DNA, 50 bp, Artificial
  Synthetic oligonucleotide
agctctgccgcctttggccctcattaggcgtcgagaatctactgcctgcc

SEQ ID NO: 227304 - DNA, 50 bp, Artificial
  Synthetic oligonucleotide
agctcattggtgacgcccgaacgccggacaccgagcatcaatgccagaaa

SEQ ID NO: 227305 - DNA, 53 bp, Artificial
  Synthetic oligonucleotide
gaaagagccaaccccttcgcaggttcggtaaagtaattcgttgcaaagataat

SEQ ID NO: 227306 - DNA, 50 bp, Artificial
  Synthetic oligonucleotide
agcccaccataatcagcctccacccgcgctgaaatacgacaggcgtcgta

SEQ ID NO: 227307 - DNA, 50 bp, Artificial
  Synthetic oligonucleotide
agccattcgctgggattgcgcgccccacctatggacgcttgtagccacgg

SEQ ID NO: 227308 - DNA, 50 bp, Artificial
  Synthetic oligonucleotide
gggatgctagccatcgtccttcgatttgtcccttatatcgggcctgtaat

SEQ ID NO: 227309 - DNA, 50 bp, Artificial
  Synthetic oligonucleotide
agccagggcccctcgcgtcggaaagtttcggtgctgtgttcggatgtgtc

SEQ ID NO: 227310 - DNA, 50 bp, Artificial
  Synthetic oligonucleotide
agccacaactcatagcaggcgagccaatcggcgctccaggggacaatcgt

SEQ ID NO: 227311 - DNA, 50 bp, Artificial
  Synthetic oligonucleotide
ctcgagtgctggggtattcggtttcacgaggggctcagcggagggcgact

SEQ ID NO: 227312 - DNA, 50 bp, Artificial
  Synthetic oligonucleotide
agcatgcgcgggctgtctatcatcggcgcgtctttagccttcgtgccggt

SEQ ID NO: 227313 - DNA, 50 bp, Artificial
  Synthetic oligonucleotide
agcatcgtcttggcttgaccgagcgctgcctccgagcccgcatggtcgcc

SEQ ID NO: 227314 - DNA, 50 bp, Artificial
  Synthetic oligonucleotide
agcatcggagctgcggcggtatcccgtcccggtccttgaaataacaagcc

SEQ ID NO: 227315 - DNA, 50 bp, Artificial
  Synthetic oligonucleotide
agcagaggattgacgtcaccgtccatatgactgaacgacgctgaacacac

SEQ ID NO: 227316 - DNA, 58 bp, Artificial
  Synthetic oligonucleotide
aaacctgcacctcgatcgattacagttggtgatatgctgcccatgcgctatcgcattc

SEQ ID NO: 227317 - DNA, 50 bp, Artificial
  Synthetic oligonucleotide
agcacaccagctctcagaccggaacgccacccgcatgtccttggatcgga

SEQ ID NO: 227318 - DNA, 50 bp, Artificial
  Synthetic oligonucleotide
agcaatccccaaagttcaatccgccacgcgtgccaaacccctgaccgtaa

SEQ ID NO: 227319 - DNA, 50 bp, Artificial
  Synthetic oligonucleotide
ctccaccgccgaagtaacctgggccgtatgcgcgttcccgttcccagctg

SEQ ID NO: 227320 - DNA, 50 bp, Artificial
  Synthetic oligonucleotide
ctcatgccttcctgggtacgtgccctcgcttgcatcccggcattgccaat

SEQ ID NO: 227321 - DNA, 50 bp, Artificial
  Synthetic oligonucleotide
agcaagtccggtctccaaatcacctcaacccagcacggcagctggtccta

SEQ ID NO: 227322 - DNA, 50 bp, Artificial
  Synthetic oligonucleotide
agcaactgtgcgcgtcaagggcagggacgctggcgacacgcttgtgaaag

SEQ ID NO: 227323 - DNA, 50 bp, Artificial
  Synthetic oligonucleotide
agcaacccgcggatcatgcccaatcctggccacctcgtcttcagttacgc

SEQ ID NO: 227324 - DNA, 50 bp, Artificial
  Synthetic oligonucleotide
agattaaccggtccgtgggccgccagtagttggagggcagtagggccatc

SEQ ID NO: 227325 - DNA, 50 bp, Artificial
  Synthetic oligonucleotide
ctcactcagtcgggcttgggcataaggtgttcgtctatagcccccggggc

SEQ ID NO: 227326 - DNA, 50 bp, Artificial
  Synthetic oligonucleotide
agatcgtacgcgccaagccctccgctaggacttcgaactcccggcgttca

SEQ ID NO: 227327 - DNA, 58 bp, Artificial
  Synthetic oligonucleotide
agagttgttggtaaccgctctacaactgagaagacatctattgatgccttgacgccta

SEQ ID NO: 227328 - DNA, 50 bp, Artificial
  Synthetic oligonucleotide
agatatgatggccctccgcgtcatcctagaaagcgcccgcctcaggggca

SEQ ID NO: 227329 - DNA, 50 bp, Artificial
  Synthetic oligonucleotide
agaggcggttctgatctgcgaggcgggagttagactgctttcgagggcga

SEQ ID NO: 227330 - DNA, 50 bp, Artificial
  Synthetic oligonucleotide
agcgcacggaagagaagaacggttataccgcagttcagctgggggccggc

SEQ ID NO: 227331 - DNA, 50 bp, Artificial
  Synthetic oligonucleotide
agcgcaatcagaagacgcaatttcctccgcccgaccctggcttttcgagc

SEQ ID NO: 227332 - DNA, 50 bp, Artificial
  Synthetic oligonucleotide
agcgatggtaccccaggcaggcacaagcgcgtctagccactgctcctcat

SEQ ID NO: 227333 - DNA, 50 bp, Artificial
  Synthetic oligonucleotide
agcgagccctctatccagcgtacgccggtactctatcaggccggcacatc

SEQ ID NO: 227334 - DNA, 50 bp, Artificial
  Synthetic oligonucleotide
cccacggcaagatttcggtttccctgtcctcgtcattcagccggacgcga

SEQ ID NO: 227335 - DNA, 50 bp, Artificial
  Synthetic oligonucleotide
agcgaatgtgaaatggggcaagtgcgatggaacgggtcacactgcgtgcg

SEQ ID NO: 227336 - DNA, 50 bp, Artificial
  Synthetic oligonucleotide
cccatgtcagcgtgccaccatgaacgggggcatcctgtacagccgcatga

SEQ ID NO: 227337 - DNA, 50 bp, Artificial
  Synthetic oligonucleotide
agccttgggccggctgaagccccgcctgttcgatgcattcacggcactag

SEQ ID NO: 227338 - DNA, 58 bp, Artificial
  Synthetic oligonucleotide
caacggcggtccagaattcgtatgtgaggaagcgtagagatgaagacgcccgacccga

SEQ ID NO: 227339 - DNA, 50 bp, Artificial
  Synthetic oligonucleotide
agccttcggcccaagggtgagccacagctagggaaatacgggcttttccc

SEQ ID NO: 227340 - DNA, 50 bp, Artificial
  Synthetic oligonucleotide
agcctccaatcgagacggcgggagaatagcccattcttggggccgcgcta

SEQ ID NO: 227341 - DNA, 50 bp, Artificial
  Synthetic oligonucleotide
agccgttagtgcagtgaagctccctccttcccgcgattctgaaccgaccg

SEQ ID NO: 227342 - DNA, 50 bp, Artificial
  Synthetic oligonucleotide
agccgtcgtcatggttctgagacaattcgcaatgccgcaagcacgcctgg

SEQ ID NO: 227343 - DNA, 50 bp, Artificial
  Synthetic oligonucleotide
agccggtgtggttccagacaggctctcgcggatagtcacagagcggcatt

SEQ ID NO: 227344 - DNA, 50 bp, Artificial
  Synthetic oligonucleotide
agccgcaactctgaaaggacccttgcatgccgctctacgctctaggaccg

SEQ ID NO: 227345 - DNA, 50 bp, Artificial
  Synthetic oligonucleotide
agccgatttccgggcgtcatctcacaggggtgcgaacgcagtggcatcat

SEQ ID NO: 227346 - DNA, 50 bp, Artificial
  Synthetic oligonucleotide
agccgacttcgccggggaatttgccttttggtgcatctgacccatggcgg

SEQ ID NO: 227347 - DNA, 50 bp, Artificial
  Synthetic oligonucleotide
agccgaccgcttttgcggcgtaggaaagagcccgtccgtgattgcccgta

SEQ ID NO: 227348 - DNA, 50 bp, Artificial
  Synthetic oligonucleotide
ctcgcgctggttccgtgctgtggattcacctccgggcggtaatagcccgg

SEQ ID NO: 227349 - DNA, 58 bp, Artificial
  Synthetic oligonucleotide
gatcctctcatggcgtcaggcacgcggttctgagcggtgtgttttcgcgacatgaccg

SEQ ID NO: 227350 - DNA, 50 bp, Artificial
  Synthetic oligonucleotide
agcccgcccttccccgcgatatagtcttgctcgtggacgactcgccggag

SEQ ID NO: 227351 - DNA, 50 bp, Artificial
  Synthetic oligonucleotide
agcccctcacttcggatccggtggagtccttagatgagcgaccaacgcct

SEQ ID NO: 227352 - DNA, 50 bp, Artificial
  Synthetic oligonucleotide
agccccgtggtattctgccccggatagaggctcacccctgccggatcacg

SEQ ID NO: 227353 - DNA, 50 bp, Artificial
  Synthetic oligonucleotide
ctcgcgccaatgagcgttcgtccgccgcagtccttcagaccatccgagca

SEQ ID NO: 227354 - DNA, 50 bp, Artificial
  Synthetic oligonucleotide
agccccgcctgttcgatgcattcacggcactaggtacggcggaggagcac

SEQ ID NO: 227355 - DNA, 58 bp, Artificial
  Synthetic oligonucleotide
gatcgctcccgaatccagaggcatggtctatatcgccgactccctgtggttcccgaaa

SEQ ID NO: 227356 - DNA, 58 bp, Artificial
  Synthetic oligonucleotide
agtgcgacggagcgcatgggatgctgcgggcagcattccagaacagttccgcatatca

SEQ ID NO: 227357 - DNA, 59 bp, Artificial
  Synthetic oligonucleotide
atccccgcgatatcagcaattcgaaaggagaacctaccatgcaacaactcgcaaagttc

SEQ ID NO: 227358 - DNA, 58 bp, Artificial
  Synthetic oligonucleotide
taacctggcaacacgttgccagtgggtctgatggaacgcatcaacgcgtctcgggact

SEQ ID NO: 227359 - DNA, 58 bp, Artificial
  Synthetic oligonucleotide
atggctatcgcggtatccttcaggtggacgggcatggtgcctacaacaagcttgcccg

SEQ ID NO: 227360 - DNA, 50 bp, Artificial
  Synthetic oligonucleotide
aggagctacgttgaccccccctgcgagggaggtagggggggaagaggcgt

SEQ ID NO: 227361 - DNA, 58 bp, Artificial
  Synthetic oligonucleotide
ggcctgtcctccgcaaattcttaagcgacttggcgcattcagtgcgggcgtacatcac

SEQ ID NO: 227362 - DNA, 58 bp, Artificial
  Synthetic oligonucleotide
gcatgtacgggcgcgaagaccgtaataatgcttgcccatctctccgacagaccggcgc

SEQ ID NO: 227363 - DNA, 58 bp, Artificial
  Synthetic oligonucleotide
tccgcccctatcgatccctaacatttcagcgaatgccgtgaaccgcttgcttgcctta

SEQ ID NO: 227364 - DNA, 57 bp, Artificial
  Synthetic oligonucleotide
gcgagtatcgatgcatgcgagctcccgcaatgggctctccaccccaagtgggtagac

SEQ ID NO: 227365 - DNA, 57 bp, Artificial
  Synthetic oligonucleotide
catgagagccttggacattgcagatgcgtttccccgtaacgtctccaagatagggat

SEQ ID NO: 227366 - DNA, 57 bp, Artificial
  Synthetic oligonucleotide
tgcgaactcgcggatctgaggaccgtatctcaatacgacttggcgagtgcgaccaga

SEQ ID NO: 227367 - DNA, 57 bp, Artificial
  Synthetic oligonucleotide
gcgatttacgagatcacgcccacgggaagtcccgcgatgatgaatgacgaactgcgt

SEQ ID NO: 227368 - DNA, 57 bp, Artificial
  Synthetic oligonucleotide
gcgctttgttttacgcatgtcgttaccgggaaaccgacatgctctaaggatcgactc

SEQ ID NO: 227369 - DNA, 57 bp, Artificial
  Synthetic oligonucleotide
agattttggctcgcgtttgacatcatcctgactaccataggtcaggacgagtatcca

SEQ ID NO: 227370 - DNA, 57 bp, Artificial
  Synthetic oligonucleotide
agatgtgccaccacaagtcggacaattgcagggtgccgcgtagaccagctcctcagt

SEQ ID NO: 227371 - DNA, 57 bp, Artificial
  Synthetic oligonucleotide
gcaccgctcaagatgtaatcgagggtcatcgtcggttctccgtcaaagcctgtcgca

SEQ ID NO: 227372 - DNA, 57 bp, Artificial
  Synthetic oligonucleotide
tgagaggagcagcgcggctccaaatgcgaaatgcttaaatgtagtctgcacggttca

SEQ ID NO: 227373 - DNA, 57 bp, Artificial
  Synthetic oligonucleotide
cgaattgccccagagtttcgtaaccttggctcgatcgggattggagcgctcgcaccc

SEQ ID NO: 227374 - DNA, 52 bp, Artificial
  Synthetic oligonucleotide
aagcgttacaggcttcgttaaaaggccgtgcaattaaggaagaccggccaat

SEQ ID NO: 227375 - DNA, 53 bp, Artificial
  Synthetic oligonucleotide
aacctcattgtcgctccacggttcccgtacgatgccggacgaaaaatccccgc

SEQ ID NO: 227376 - DNA, 57 bp, Artificial
  Synthetic oligonucleotide
caattgcgaggtgcgatgaaggctaatcgcaaggtagaaatactgtaccacgccgcg

SEQ ID NO: 227377 - DNA, 57 bp, Artificial
  Synthetic oligonucleotide
tgtcatgcggaggtgagagtaaaaggtggtccggcgcataacggcccaaagagccaa

SEQ ID NO: 227378 - DNA, 57 bp, Artificial
  Synthetic oligonucleotide
ggtttgtttatatcgacaagcgctcttcgtgaaagatgagcgtctggatgcagtaag

SEQ ID NO: 227379 - DNA, 60 bp, Artificial
  Synthetic oligonucleotide
atcacagaactcgctggccaacaaataatcacgtcgcctcgtattcgtcgctcaagacaa

SEQ ID NO: 227380 - DNA, 54 bp, Artificial
  Synthetic oligonucleotide
cggggaaaccatgaccggaaaaacagtgacgcgagcagacctggcggaatccgt

SEQ ID NO: 227381 - DNA, 57 bp, Artificial
  Synthetic oligonucleotide
attcgggtgtaccgtcacaacattcccagttagtgcagctatctctccgtcaagatc

SEQ ID NO: 227382 - DNA, 57 bp, Artificial
  Synthetic oligonucleotide
ccaattctcggaaggtgatcgaataacgcagtcgatcgacaggcgggatggaatgct

SEQ ID NO: 227383 - DNA, 57 bp, Artificial
  Synthetic oligonucleotide
tcccacattgtcgcgtctcgtcgcaatcttcagctggagctacgtcgcgttgtacgc

SEQ ID NO: 227384 - DNA, 57 bp, Artificial
  Synthetic oligonucleotide
tctcacgttggtcaaagctattgtgggtcttcacggggcgactattgagctgcttga

SEQ ID NO: 227385 - DNA, 57 bp, Artificial
  Synthetic oligonucleotide
tccacgcatagcacgactgcccgatcaggtggcgacatgtaaaggccgactatgtct

SEQ ID NO: 227386 - DNA, 57 bp, Artificial
  Synthetic oligonucleotide
cagctaacaaccaaacgggagtcacgacgtgagcataacaatcaagacaggccttat

SEQ ID NO: 227387 - DNA, 57 bp, Artificial
  Synthetic oligonucleotide
agcgctgtgagatagtgcccgacggcgctcttggcatcgcgtcgtatgtcacgtccg

SEQ ID NO: 227388 - DNA, 57 bp, Artificial
  Synthetic oligonucleotide
acgtgtccgtcattcggtcggaggagaagcttgcggagtacatctccaagggcgtgg

SEQ ID NO: 227389 - DNA, 53 bp, Artificial
  Synthetic oligonucleotide
ccgataggatgttcggagggacccgcttacagcgtgggcggttccctccattt

SEQ ID NO: 227390 - DNA, 59 bp, Artificial
  Synthetic oligonucleotide
atattcggcgacatcctttactgtgggcatctttgacatgttcaaacgttccgcggcta

SEQ ID NO: 227391 - DNA, 56 bp, Artificial
  Synthetic oligonucleotide
gacgttcagccagagccagccataacgcgggtccccgcattgtagggccgcccctt

SEQ ID NO: 227392 - DNA, 56 bp, Artificial
  Synthetic oligonucleotide
aacagggctggagtaagtcaccgggcgaacgccggctgtagagtcggcaacttcgc

SEQ ID NO: 227393 - DNA, 56 bp, Artificial
  Synthetic oligonucleotide
atcacggctggatggcataagagacgatcgtcctcgataatcctgcgcagctctga

SEQ ID NO: 227394 - DNA, 56 bp, Artificial
  Synthetic oligonucleotide
ttgcgaacggggaaccagacctcgtgcaagctgccgaagatatccgaactccggca

SEQ ID NO: 227395 - DNA, 56 bp, Artificial
  Synthetic oligonucleotide
ccgcctgcgtcagctaacttatagactgacgccagatagcaaattagctgaccgtt

SEQ ID NO: 227396 - DNA, 56 bp, Artificial
  Synthetic oligonucleotide
ggttatcgcgttcctgcggtggatctcgagcctcaagcgagcttatctgccctact

SEQ ID NO: 227397 - DNA, 56 bp, Artificial
  Synthetic oligonucleotide
cggagattaggcatggcgcaggctcagacagtacattcatacacagttgtttccgg

SEQ ID NO: 227398 - DNA, 56 bp, Artificial
  Synthetic oligonucleotide
gcgtgctgcgatgacgtcaggagcggacctgctgcgagttgagggtctgcggatca

SEQ ID NO: 227399 - DNA, 56 bp, Artificial
  Synthetic oligonucleotide
aacgacatcacgaagcttgtcaaattcgtagacgagcactgttgctctttcacgca

SEQ ID NO: 227400 - DNA, 56 bp, Artificial
  Synthetic oligonucleotide
tattcgtcaatgagcactcgcctagcacgaaagtcagatctggacttcgcgaatgc

SEQ ID NO: 227401 - DNA, 57 bp, Artificial
  Synthetic oligonucleotide
atacgggcgcaattgccacgctaacaaataagcgttcacgtagaattaaagcctgcg

SEQ ID NO: 227402 - DNA, 56 bp, Artificial
  Synthetic oligonucleotide
atgtcgcgttgaacgaaagccttgtagcctccaagggatggccggcttattgagaa

SEQ ID NO: 227403 - DNA, 56 bp, Artificial
  Synthetic oligonucleotide
ccacccctcattcatcagggcagtgcgatgggccggcaactaagtaactcggatca

SEQ ID NO: 227404 - DNA, 56 bp, Artificial
  Synthetic oligonucleotide
tcataatcgtataacccatatatgataggttttcgcggaaaagcgacatatatgac

SEQ ID NO: 227405 - DNA, 56 bp, Artificial
  Synthetic oligonucleotide
accagttgcgatgtgcatgcgccgtgcggtctttgctccagcgaaagtgtcatcgg

SEQ ID NO: 227406 - DNA, 56 bp, Artificial
  Synthetic oligonucleotide
aggccagatttatggtgagacacgtatgatgccggtaattatacagcccactatag

SEQ ID NO: 227407 - DNA, 56 bp, Artificial
  Synthetic oligonucleotide
tacgcgcaaagcaataagcactccatgtcaccgcgatagccaaggacaaaagcgga

SEQ ID NO: 227408 - DNA, 53 bp, Artificial
  Synthetic oligonucleotide
atgaagcgggtcgtcttgtggtccctgtccggcccgttgggggcttccagaac

SEQ ID NO: 227409 - DNA, 56 bp, Artificial
  Synthetic oligonucleotide
ctgagccggcttatcgtttcgccatcgcaagaccccgatcttccgacgatcggaaa

SEQ ID NO: 227410 - DNA, 56 bp, Artificial
  Synthetic oligonucleotide
cgcgcgtacattgaacatggggactgcagtatccgtgcgttgagggtcggggataa

SEQ ID NO: 227411 - DNA, 56 bp, Artificial
  Synthetic oligonucleotide
ggcggcgcctccccatcgcgcctttgtcacagcctatctaccggtcgcacccgttt

SEQ ID NO: 227412 - DNA, 58 bp, Artificial
  Synthetic oligonucleotide
ggctagtaagatgcgcaggcctcccttttcgggaagcccattacataacaggacgtgc

SEQ ID NO: 227413 - DNA, 59 bp, Artificial
  Synthetic oligonucleotide
atacaggcgcttgagatagacgtagttcatctcccggtctccacttgtcctccggtgag

SEQ ID NO: 227414 - DNA, 56 bp, Artificial
  Synthetic oligonucleotide
ggagcccaaggatcactatctgaactgggcccgcaatgagggcgccgaaatcatgc

SEQ ID NO: 227415 - DNA, 56 bp, Artificial
  Synthetic oligonucleotide
acgagccccaatctgcaccaaacgagggagtacaagccgagatgatgaagccgaaa

SEQ ID NO: 227416 - DNA, 56 bp, Artificial
  Synthetic oligonucleotide
cttcgccgtagtggtgaagcctcgtgtgatggcgtcggcataaccaccgtaccctt

SEQ ID NO: 227417 - DNA, 55 bp, Artificial
  Synthetic oligonucleotide
ttccgcgaggacccaaactcgataaaggttccgtatgctggtggaaagatggacc

SEQ ID NO: 227418 - DNA, 56 bp, Artificial
  Synthetic oligonucleotide
tcgcgaagggaggcggtatcgaataggttcagtggcaggcgatatggctttaccac

SEQ ID NO: 227419 - DNA, 56 bp, Artificial
  Synthetic oligonucleotide
cggaagctgatgtaacgcatgtgaattcctcccaacggcttggcacttggccggcc

SEQ ID NO: 227420 - DNA, 55 bp, Artificial
  Synthetic oligonucleotide
ttagacttacccatggcgaggttatcacgtatgctaagcgcacaatcgacttggt

SEQ ID NO: 227421 - DNA, 55 bp, Artificial
  Synthetic oligonucleotide
ctgtggagtgtctggcgggttctcgtcagtggatgggctttcatccggtaggctg

SEQ ID NO: 227422 - DNA, 55 bp, Artificial
  Synthetic oligonucleotide
ttacgctttcaagcgcggacggagaaaagtcgatctatgactcaactgctcgtgc

SEQ ID NO: 227423 - DNA, 55 bp, Artificial
  Synthetic oligonucleotide
ctgtccgaccctgcagatctgcattttgttaaagctagcactagggtttagaatc

SEQ ID NO: 227424 - DNA, 59 bp, Artificial
  Synthetic oligonucleotide
gctagcacatcccttcgagcatagtatttcggattgtagggaacccgtggtgtctggaa

SEQ ID NO: 227425 - DNA, 54 bp, Artificial
  Synthetic oligonucleotide
ctgtccacaataaaacgggcgttgttgaatttgctagccggctactttcacggg

SEQ ID NO: 227426 - DNA, 55 bp, Artificial
  Synthetic oligonucleotide
ctgccgcgcaaatcataacagttcattcttctaggccgcacactcataaaccggg

SEQ ID NO: 227427 - DNA, 55 bp, Artificial
  Synthetic oligonucleotide
gaaggcaatctcgtgctcatatgcttcgctgctcgctatgaacgtcatacatcga

SEQ ID NO: 227428 - DNA, 55 bp, Artificial
  Synthetic oligonucleotide
ctgtacgcaatcgaacctttccgtacaggggcaaggtcattggctcgcaaatgta

SEQ ID NO: 227429 - DNA, 55 bp, Artificial
  Synthetic oligonucleotide
ttcatgtgtccgagcaaccgaaatagtttagtgctccaacggagatctgacatgc

SEQ ID NO: 227430 - DNA, 55 bp, Artificial
  Synthetic oligonucleotide
ctggcagcggagttgctcagacccgggacaagtatcgacgcagttgcccaactgc

SEQ ID NO: 227431 - DNA, 55 bp, Artificial
  Synthetic oligonucleotide
ctggtccgagcatttcctctcgcggggatatttcaaccgcctcgtctttcccagg

SEQ ID NO: 227432 - DNA, 54 bp, Artificial
  Synthetic oligonucleotide
gaaggggtcggttggggaatagcggtaggaaacgcttttgagctccatgcgtcc

SEQ ID NO: 227433 - DNA, 55 bp, Artificial
  Synthetic oligonucleotide
ctgcgacacgacctctgtcgtcaaccgaaggatcgagcacccatggcctacgagc

SEQ ID NO: 227434 - DNA, 55 bp, Artificial
  Synthetic oligonucleotide
ctttaatggtgattgtaagacgaaatagcttaggaccgtcatgaatacctaacag

SEQ ID NO: 227435 - DNA, 56 bp, Artificial
  Synthetic oligonucleotide
agttctgtctccgggatgctaccacgtcaccccgatctacaacgtgaacgggctcc

SEQ ID NO: 227436 - DNA, 55 bp, Artificial
  Synthetic oligonucleotide
gaagtgttccttgaattcatgggtttgggctgtgtgcggcgggaccacgttgaag

SEQ ID NO: 227437 - DNA, 55 bp, Artificial
  Synthetic oligonucleotide
ttcaacaaacccggtcttgtccacagcgagtttgctctaccggacgatgcaccgg

SEQ ID NO: 227438 - DNA, 55 bp, Artificial
  Synthetic oligonucleotide
ctgggccgccgttcatttcgattggcccgggtacacatccgaagacctgtacagg

SEQ ID NO: 227439 - DNA, 55 bp, Artificial
  Synthetic oligonucleotide
ttcacatctatcggccgcggttctcagcactaattatggcgtcagcaaacgatcg

SEQ ID NO: 227440 - DNA, 55 bp, Artificial
  Synthetic oligonucleotide
gaataactggttcggctggataccgtaacgccgagcaacgatgctcacggttgcg

SEQ ID NO: 227441 - DNA, 55 bp, Artificial
  Synthetic oligonucleotide
ctgggcatacggctagtccagcattccgatggttcagtcgtgtgggcgaacacct

SEQ ID NO: 227442 - DNA, 55 bp, Artificial
  Synthetic oligonucleotide
ctgcattggtcggtgcacgcatgtttcgcagtttcttaacagggctcataaaggc

SEQ ID NO: 227443 - DNA, 55 bp, Artificial
  Synthetic oligonucleotide
ctggccatatcgaccgagtcgcttgtgtgaaggcaaagggcattgtccgcggcgc

SEQ ID NO: 227444 - DNA, 55 bp, Artificial
  Synthetic oligonucleotide
ctttcaccgtccaagacaagacttcgtgccatttcgagactcccttgacatagcg

SEQ ID NO: 227445 - DNA, 54 bp, Artificial
  Synthetic oligonucleotide
gaacctggacacaaaatatagttttacgaccgatggggcacaacgtcgtttgta

SEQ ID NO: 227446 - DNA, 57 bp, Artificial
  Synthetic oligonucleotide
gctctggtgacggtcaaatgaattcgtcggtgttctgggaacaagcgtttgaaaatg

SEQ ID NO: 227447 - DNA, 55 bp, Artificial
  Synthetic oligonucleotide
gaaccttgcacacgcttcgacacccacattctcaatacggccgcgcaaggaatat

SEQ ID NO: 227448 - DNA, 55 bp, Artificial
  Synthetic oligonucleotide
cttgctccgaggccgagttacccttcgtttaatgccgcatgcgtcgggtagcccc

SEQ ID NO: 227449 - DNA, 55 bp, Artificial
  Synthetic oligonucleotide
ctgctaacaggcattgacagactgcgatgttccgatagtctttaattatgatctg

SEQ ID NO: 227450 - DNA, 55 bp, Artificial
  Synthetic oligonucleotide
ttcgagggacttgcaagccgctatcgctcggttatctacttcacattcgactacc

SEQ ID NO: 227451 - DNA, 55 bp, Artificial
  Synthetic oligonucleotide
cttcgcgacgcttgtatcagtgccgctagcaaccagcaaagattgcgaggaccac

SEQ ID NO: 227452 - DNA, 55 bp, Artificial
  Synthetic oligonucleotide
gaacgctctgtggacgctggacggttggtcggaaccggaacatatgaagttcaga

SEQ ID NO: 227453 - DNA, 55 bp, Artificial
  Synthetic oligonucleotide
gaaccaacgaataaattgatgtaatccacctaggcgggcaatacgatcagccccg

SEQ ID NO: 227454 - DNA, 55 bp, Artificial
  Synthetic oligonucleotide
gaacatgagcacgcgcctttcgatctgctttcgttttaaagatagcgaacggcgg

SEQ ID NO: 227455 - DNA, 55 bp, Artificial
  Synthetic oligonucleotide
cttcgcatctggattttatccttggcaacccgcttcccatgaacatttcgcagcg

SEQ ID NO: 227456 - DNA, 55 bp, Artificial
  Synthetic oligonucleotide
gaacggctctgaatacgcgctgttagtagagcgggaagcattggcggaccactat

SEQ ID NO: 227457 - DNA, 60 bp, Artificial
  Synthetic oligonucleotide
gctgacactagggaccgtcgtgaggcatcggttcgttgtcaaagtcgtggagcgtcagtc

SEQ ID NO: 227458 - DNA, 55 bp, Artificial
  Synthetic oligonucleotide
cttcgagcatagtatttcggattgtagggaacccgtggtgtctggaaatccgacc

SEQ ID NO: 227459 - DNA, 55 bp, Artificial
  Synthetic oligonucleotide
ttaggcccgggatcaagttcagttcgaggaagtaaatacgttgctgctcgtcaac

SEQ ID NO: 227460 - DNA, 55 bp, Artificial
  Synthetic oligonucleotide
ctgcttacccgacaggagcgtatgccgcacaatagccatttaccaatcgttgcct

SEQ ID NO: 227461 - DNA, 55 bp, Artificial
  Synthetic oligonucleotide
gaagactgtgacagcatgatcttcgcggtcagatccacctgccggaaaatcgatt

SEQ ID NO: 227462 - DNA, 55 bp, Artificial
  Synthetic oligonucleotide
gaagagaatcagtcagtttgcgcggtgacgaaagtttaggcggatgcaagcgtgg

SEQ ID NO: 227463 - DNA, 55 bp, Artificial
  Synthetic oligonucleotide
cttgctggcgagcccgtgaaggttatcgaggaaccgtcgagcctcggtgtatggc

SEQ ID NO: 227464 - DNA, 55 bp, Artificial
  Synthetic oligonucleotide
gaacagcggaatgagagccacgatcggtggcgccatgtagctcgacaaagtgaga

SEQ ID NO: 227465 - DNA, 55 bp, Artificial
  Synthetic oligonucleotide
ttatgggctaaggctgaagcccagaggatcagtagtgcgctcgtcactggcacaa

SEQ ID NO: 227466 - DNA, 55 bp, Artificial
  Synthetic oligonucleotide
cttggtttcgccgcaggagatatgagctcccaacttcgtcttcgcgcgaacgatc

SEQ ID NO: 227467 - DNA, 55 bp, Artificial
  Synthetic oligonucleotide
gaagagttcctgatctgcgtcatgtattgagtccatcatgcccattccctatcgc

SEQ ID NO: 227468 - DNA, 60 bp, Artificial
  Synthetic oligonucleotide
gcttcccttgccggcgcatgccgacagagcaaagacagcttaatcctcttgaacgaaaga

SEQ ID NO: 227469 - DNA, 55 bp, Artificial
  Synthetic oligonucleotide
cttggttttctcgaaagtcgtaacgggcctgtcttcataattgtcgctgaagtag

SEQ ID NO: 227470 - DNA, 54 bp, Artificial
  Synthetic oligonucleotide
ttccggtcagcctctaaggtagcgtgttcgttcctaacagtcggactcgaaaag

SEQ ID NO: 227471 - DNA, 55 bp, Artificial
  Synthetic oligonucleotide
cttccgacagtccagtacggccgagtttcgataagtagaccttgacctcctgctg

SEQ ID NO: 227472 - DNA, 55 bp, Artificial
  Synthetic oligonucleotide
ctgcgtagaacgattgtcgcggccgtttcggatattggcctgtgatctagtcgcc

SEQ ID NO: 227473 - DNA, 55 bp, Artificial
  Synthetic oligonucleotide
cttatctcgcaggcagacaagatgcggtttaccctgaggagtatcggtcgcagac

SEQ ID NO: 227474 - DNA, 55 bp, Artificial
  Synthetic oligonucleotide
ctgcctctccatcattctgtgagggcccatgcaaacgaaacgaaccgtctttccc

SEQ ID NO: 227475 - DNA, 55 bp, Artificial
  Synthetic oligonucleotide
ttagcgcctaccgataacaaatcggacgtcggaatcgattggtagagtacaatcc

SEQ ID NO: 227476 - DNA, 55 bp, Artificial
  Synthetic oligonucleotide
gatccgtcacgacaaagatcggcagcacttgcgtagtctcctgcttgagggtgct

SEQ ID NO: 227477 - DNA, 55 bp, Artificial
  Synthetic oligonucleotide
gatccgacagtaaactacggcattgacacctattctgacgacgtcctgaatctaa

SEQ ID NO: 227478 - DNA, 55 bp, Artificial
  Synthetic oligonucleotide
gatcacgcctccgcagttcgatctccagtcgatccgacagtgaaaacgaatagtg

SEQ ID NO: 227479 - DNA, 60 bp, Artificial
  Synthetic oligonucleotide
gcttcgatgaactacagaaccttatcagcacttaatctgttttctattcgtggatagaaa

SEQ ID NO: 227480 - DNA, 55 bp, Artificial
  Synthetic oligonucleotide
gatagcctttcgacgtatgcggttcatccacccaggtgccacgcgcgtaagaacc

SEQ ID NO: 227481 - DNA, 55 bp, Artificial
  Synthetic oligonucleotide
gatacgcgcttcggtttcggtttcaagaaagaccccatcgcgctcgagcctttta

SEQ ID NO: 227482 - DNA, 55 bp, Artificial
  Synthetic oligonucleotide
gataacgcgagcgagttctaatatacgtcaattgtcctcaacaggggagccgtcg

SEQ ID NO: 227483 - DNA, 55 bp, Artificial
  Synthetic oligonucleotide
tgtcactgcttttgacgcgcccatgaattttgccgcgtcgacacgtatcgatacg

SEQ ID NO: 227484 - DNA, 55 bp, Artificial
  Synthetic oligonucleotide
gagtttcgctctcgacactgaggttgcatcggcatcaatggcatgacgggaaccc

SEQ ID NO: 227485 - DNA, 55 bp, Artificial
  Synthetic oligonucleotide
gagtgcctatactttaggcatgattgctttgtgccgaggttttgtgcgactgctg

SEQ ID NO: 227486 - DNA, 55 bp, Artificial
  Synthetic oligonucleotide
gagtatgacgctggcgtggccgtgcgtatccttctcagaaatactgtcggaaacg

SEQ ID NO: 227487 - DNA, 55 bp, Artificial
  Synthetic oligonucleotide
gaggttccaaatcccttccagcggtagcgagcgacctgtctgttcccgatcttcc

SEQ ID NO: 227488 - DNA, 55 bp, Artificial
  Synthetic oligonucleotide
gaggtctgtcgtccaggcgtcgcctaactcgggtatgcaggcttcattcctaagc

SEQ ID NO: 227489 - DNA, 55 bp, Artificial
  Synthetic oligonucleotide
gaggtctagccatctcaaatcctccttgcggtcagacatggtgtgtaggctgccg

SEQ ID NO: 227490 - DNA, 60 bp, Artificial
  Synthetic oligonucleotide
gcttcggtgagttctagtgcgacattcctgatcatgcgcttgttgtttccgatatccacg

SEQ ID NO: 227491 - DNA, 55 bp, Artificial
  Synthetic oligonucleotide
gaggtcatctgcatagcccgacaatgaagaatatttccgggcatcataggccgtg

SEQ ID NO: 227492 - DNA, 55 bp, Artificial
  Synthetic oligonucleotide
gagggacacccctgcgtctcccgtcaggctacgacattttgttcgatcggctgcc

SEQ ID NO: 227493 - DNA, 55 bp, Artificial
  Synthetic oligonucleotide
gaggacgaacgaatcgcaacggaacgctacctatcccctctgcaacctactgcac

SEQ ID NO: 227494 - DNA, 55 bp, Artificial
  Synthetic oligonucleotide
gaggacaagcgccggcccagcatacccatagctcagaagcagcaatataggggct

SEQ ID NO: 227495 - DNA, 55 bp, Artificial
  Synthetic oligonucleotide
gagctgtggtgccggacgttcgatgaatcattcgtcacgctctccaagccgcgtg

SEQ ID NO: 227496 - DNA, 55 bp, Artificial
  Synthetic oligonucleotide
gagctacgggttgtttcgtaactgcgcgcaacatctgacctgagccgagtttcac

SEQ ID NO: 227497 - DNA, 55 bp, Artificial
  Synthetic oligonucleotide
gagcgtcagaaggcaatctcgtgctcatatgcttcgctgctcgctatgaacgtca

SEQ ID NO: 227498 - DNA, 55 bp, Artificial
  Synthetic oligonucleotide
tgtccagagcgcctgaggctcggcccaactcccgacctccccggaaccagcacga

SEQ ID NO: 227499 - DNA, 55 bp, Artificial
  Synthetic oligonucleotide
gagcgaggcccatacggcgaggaccataaacggcacgagaacgtgtgtcagcgct

SEQ ID NO: 227500 - DNA, 55 bp, Artificial
  Synthetic oligonucleotide
gcaatcttatgcggtttgcgggtagggctatcgacgttggagatagaatggcgcg

SEQ ID NO: 227501 - DNA, 57 bp, Artificial
  Synthetic oligonucleotide
ggagagtaacggggacgtttgcaggctttgttctcgcgcacacagttttagccatcc

SEQ ID NO: 227502 - DNA, 55 bp, Artificial
  Synthetic oligonucleotide
gcaagtcgtcaagggaagagacatacagtcccgggctacggccgcatggctcgtg

SEQ ID NO: 227503 - DNA, 55 bp, Artificial
  Synthetic oligonucleotide
gcaaggacgtgcagcttgccaatatactcgttagcgctacaacaatggcgacgcg

SEQ ID NO: 227504 - DNA, 55 bp, Artificial
  Synthetic oligonucleotide
tggctttacccacgcgaaggagatgcaaggtccggttcgtcttatcctccagtcg

SEQ ID NO: 227505 - DNA, 55 bp, Artificial
  Synthetic oligonucleotide
tgggcgtggcactgcctatcgcacggaactgccctatcaccggctaaatgtgccg

SEQ ID NO: 227506 - DNA, 55 bp, Artificial
  Synthetic oligonucleotide
gcaacgaagggcagggaccagcggccttccgaatcagatgaccatgtagcggtgc

SEQ ID NO: 227507 - DNA, 55 bp, Artificial
  Synthetic oligonucleotide
gcaaccgagtggacaacatagtcacatctcaatttgttcgtagtgactctcgcga

SEQ ID NO: 227508 - DNA, 55 bp, Artificial
  Synthetic oligonucleotide
gcaaatttacgggtttgggtcgataatggcgacgcctcgtccaacgctggcgagc

SEQ ID NO: 227509 - DNA, 55 bp, Artificial
  Synthetic oligonucleotide
gcaaagtggtatgagacacgatgcgtttccttcgaactattgcgggtagaggaga

SEQ ID NO: 227510 - DNA, 55 bp, Artificial
  Synthetic oligonucleotide
gcaaagacacggcaggcctcgctttctccagcggtgctgggtcatgatcgtatgc

SEQ ID NO: 227511 - DNA, 55 bp, Artificial
  Synthetic oligonucleotide
gcaaacccggtctgcgatcagacccggacacggaataagctcggaagggttaagc

SEQ ID NO: 227512 - DNA, 60 bp, Artificial
  Synthetic oligonucleotide
agggatcggccgtccagtgaagggaactcgcataagtatggccttcatgtgccgatagcg

SEQ ID NO: 227513 - DNA, 55 bp, Artificial
  Synthetic oligonucleotide
tggtgcaagagagaagctcgcaccgtcaggcgggagatgtttgcagggcacgacc

SEQ ID NO: 227514 - DNA, 55 bp, Artificial
  Synthetic oligonucleotide
tggtggatcatcccggccgttccgaaggagcggtatccaagggcgcaattatacg

SEQ ID NO: 227515 - DNA, 55 bp, Artificial
  Synthetic oligonucleotide
gatgtctcgtgcatggccttcggtcgcttggcacggaccccgtcatcctggatca

SEQ ID NO: 227516 - DNA, 55 bp, Artificial
  Synthetic oligonucleotide
gatgtcatcaccttggcgggaaagaaatcggcctcatcgttgaagttcgcgacat

SEQ ID NO: 227517 - DNA, 55 bp, Artificial
  Synthetic oligonucleotide
gatgtacgtttgatgtacgcctcctagaccacggtgtgattacgcctccattgcg

SEQ ID NO: 227518 - DNA, 55 bp, Artificial
  Synthetic oligonucleotide
gatgggttaagcaggaccggcaaaaccacggatgatttcgttgccccgcagaagc

SEQ ID NO: 227519 - DNA, 55 bp, Artificial
  Synthetic oligonucleotide
gatgattcagcgggaaagcaacttcgatcccggagccatatcccctgcaggcgcc

SEQ ID NO: 227520 - DNA, 55 bp, Artificial
  Synthetic oligonucleotide
gatgacatgggaatcggcgagagaagccacagatacttttaagccagttataccg

SEQ ID NO: 227521 - DNA, 55 bp, Artificial
  Synthetic oligonucleotide
gatcttagcgactctaatgtgtttctgcgaatcacaaggataaccttaagtccag

SEQ ID NO: 227522 - DNA, 55 bp, Artificial
  Synthetic oligonucleotide
gatcggtgtacccagcgttaacgtgcttgagcctgttatcgggacgtttcaggcc

SEQ ID NO: 227523 - DNA, 60 bp, Artificial
  Synthetic oligonucleotide
ggctccaaggtcagttcgggaattgtctgacggcggtggtgcggcatgaggatgaggggc

SEQ ID NO: 227524 - DNA, 60 bp, Artificial
  Synthetic oligonucleotide
aggagctatcagcgatgccgccctattgataccagtagtcggatatggcgcaagagcggc

SEQ ID NO: 227525 - DNA, 55 bp, Artificial
  Synthetic oligonucleotide
gatcggggtttggagggacttcgaccactcacggcgtctacaatagaggacggtg

SEQ ID NO: 227526 - DNA, 55 bp, Artificial
  Synthetic oligonucleotide
gatcgaaacaattttgtcatcacagctctatcacatgcgcgtgagcctgtaacgc

SEQ ID NO: 227527 - DNA, 55 bp, Artificial
  Synthetic oligonucleotide
gacgactatagcttgctgctccgttctcaccgcgagttcgttcgaggaagtacgg

SEQ ID NO: 227528 - DNA, 55 bp, Artificial
  Synthetic oligonucleotide
gacctatatgtcgatggggcatgttgcagcccagttcggacgagaaatgaagccc

SEQ ID NO: 227529 - DNA, 55 bp, Artificial
  Synthetic oligonucleotide
gaccggcatagaaaggtgctctcgtcgcgaggctgttttcctccgccgcatattc

SEQ ID NO: 227530 - DNA, 54 bp, Artificial
  Synthetic oligonucleotide
gaccgcgatgtatggaaccttccctactcggaaaacgatactttatgcctcccc

SEQ ID NO: 227531 - DNA, 55 bp, Artificial
  Synthetic oligonucleotide
gaccgcccgcaagttcgttgaccgcaaattcaatctggcgatccaattcgtgctt

SEQ ID NO: 227532 - DNA, 55 bp, Artificial
  Synthetic oligonucleotide
ttaacgcgtatcggaaggaccactgcgatgaagacatcgatagcgactgtctccc

SEQ ID NO: 227533 - DNA, 55 bp, Artificial
  Synthetic oligonucleotide
gaccgcactcgaatatctgtggcacaccggtaagcttgccatatccggccgcgtg

SEQ ID NO: 227534 - DNA, 55 bp, Artificial
  Synthetic oligonucleotide
gacccgccacagaacgttcatctggctgcgattagaaccctcaaaggctcaccgc

SEQ ID NO: 227535 - DNA, 59 bp, Artificial
  Synthetic oligonucleotide
acccgctcgcgaagcaaccaccaaatccacattatctgtcccgatacccgctctgccca

SEQ ID NO: 227536 - DNA, 55 bp, Artificial
  Synthetic oligonucleotide
gaccagcgactggtcccatcgctcatgaccgtaattggccatggttcttgcccgg

SEQ ID NO: 227537 - DNA, 55 bp, Artificial
  Synthetic oligonucleotide
gaccaagtacggtaaagcagcgcatccgcgttcctccctctaccgaatgacactc

SEQ ID NO: 227538 - DNA, 55 bp, Artificial
  Synthetic oligonucleotide
ttacgcgtaaatagaacgcgcaagtcaacggccagatacggcgaggttgcatgca

SEQ ID NO: 227539 - DNA, 55 bp, Artificial
  Synthetic oligonucleotide
gacatgtacgtcgtgaccaaaggcgggttcgaaaacctgtcgcgccatactccgc

SEQ ID NO: 227540 - DNA, 55 bp, Artificial
  Synthetic oligonucleotide
gacatccgcaaatgtcccgaatgtctggcttgtacgcggctgagtgtccaactcc

SEQ ID NO: 227541 - DNA, 55 bp, Artificial
  Synthetic oligonucleotide
gacaggaacatggcgattgctgcgcctagatagaggggagacgaaacgaactgcc

SEQ ID NO: 227542 - DNA, 55 bp, Artificial
  Synthetic oligonucleotide
gacagcgtatcagagagcacgtcgcaaactccttttcgtttcgggaaactatcac

SEQ ID NO: 227543 - DNA, 55 bp, Artificial
  Synthetic oligonucleotide
gacacgctctctgccgacgatcgaaagcgtatgcgagaacatccggaagacgcgg

SEQ ID NO: 227544 - DNA, 52 bp, Artificial
  Synthetic oligonucleotide
gacaccgacaaaataccggaaactgtccaccaaccgcagaaccgttccgtta

SEQ ID NO: 227545 - DNA, 55 bp, Artificial
  Synthetic oligonucleotide
gacacagctctatcggggaaagccgagtgactttggcgaggaccgtcatctgacc

SEQ ID NO: 227546 - DNA, 60 bp, Artificial
  Synthetic oligonucleotide
acccgcagacacgcatcgtggctgatacagtcgatcgggcagaaaacgcagtcgacggag

SEQ ID NO: 227547 - DNA, 55 bp, Artificial
  Synthetic oligonucleotide
gacaacaggacctccccgcgcgtccaagattgtactatacagcaggcggttgtgt

SEQ ID NO: 227548 - DNA, 55 bp, Artificial
  Synthetic oligonucleotide
gaatctctgatcgcaggaatcccgtccaacgacacttatgaatcggtcggcatgg

SEQ ID NO: 227549 - DNA, 55 bp, Artificial
  Synthetic oligonucleotide
gaatcgaaattgatgactgagacgttgccatcgggcgttttgcggtgcacttcgc

SEQ ID NO: 227550 - DNA, 55 bp, Artificial
  Synthetic oligonucleotide
gaatccaaccggtgcggagcgcaaaagttccgtcggcgtcagtgccccggatttc

SEQ ID NO: 227551 - DNA, 55 bp, Artificial
  Synthetic oligonucleotide
gagcgagagtgccaatgttccacctatataataggtcattgagacagtgatcagg

SEQ ID NO: 227552 - DNA, 55 bp, Artificial
  Synthetic oligonucleotide
gagcgacgatctgcagagcgctcacggcgctatcgcagctaatcgtcgacttccc

SEQ ID NO: 227553 - DNA, 55 bp, Artificial
  Synthetic oligonucleotide
gagccattgtcccgtccctttacctgacgttagcggcgctccatttgcgggctcg

SEQ ID NO: 227554 - DNA, 55 bp, Artificial
  Synthetic oligonucleotide
gagcagggacaagttatgattcgcttgtcatgacggattcgcgagaagcgccggc

SEQ ID NO: 227555 - DNA, 55 bp, Artificial
  Synthetic oligonucleotide
gagattaagcggcccctccgtcacatgggatatcctaaatgccgaacacagcatg

SEQ ID NO: 227556 - DNA, 55 bp, Artificial
  Synthetic oligonucleotide
gagagtcaccgtaagcagcgctccgatgtccggtcgcgatttcagatagtcatgg

SEQ ID NO: 227557 - DNA, 60 bp, Artificial
  Synthetic oligonucleotide
tagctccctcgttatccatgggcacgcctggaacaaaaaatcgctcgctgcctcaactaa

SEQ ID NO: 227558 - DNA, 55 bp, Artificial
  Synthetic oligonucleotide
tgtttccgcaggtgcatctcgtctcgcggccactacgagggcttgcaactctgca

SEQ ID NO: 227559 - DNA, 55 bp, Artificial
  Synthetic oligonucleotide
gagagacgcacttatgactgacgagcacaggaatgaacgtgtccggacgagatgc

SEQ ID NO: 227560 - DNA, 55 bp, Artificial
  Synthetic oligonucleotide
gagacgagatccttcttgcggaatataatcttttcgcctcggatcactcccgtgc

SEQ ID NO: 227561 - DNA, 55 bp, Artificial
  Synthetic oligonucleotide
gagaccgtgccggagttttggcggtagcccaccccaccaacacgcaattgtgagc

SEQ ID NO: 227562 - DNA, 55 bp, Artificial
  Synthetic oligonucleotide
tgtttgtaggcgggtccagccgtatgcggctgtcagagggcgtccgaaggcattc

SEQ ID NO: 227563 - DNA, 55 bp, Artificial
  Synthetic oligonucleotide
gagacaatgccggaaggcgcgctagcagaagcgtctgacatgctggttgaagggc

SEQ ID NO: 227564 - DNA, 55 bp, Artificial
  Synthetic oligonucleotide
ttaacgagcggcccgtagctcgatgcagtctcgacggaccctgacgcgaaacacg

SEQ ID NO: 227565 - DNA, 55 bp, Artificial
  Synthetic oligonucleotide
gactgctcgaagaagcacccgctgatctgggtaccgtgtgaatcatgtagcgggc

SEQ ID NO: 227566 - DNA, 55 bp, Artificial
  Synthetic oligonucleotide
gacgtccgagtaagtttgaaagcacttccgatttgaaggagaggcagcgagcggt

SEQ ID NO: 227567 - DNA, 55 bp, Artificial
  Synthetic oligonucleotide
gacgtccgacatcacggttcctttgacgagagctcgccgcatccgaattagcgca

SEQ ID NO: 227568 - DNA, 60 bp, Artificial
  Synthetic oligonucleotide
tatctgctcaaacatggtcctgttcagcctccgtccataggcgggcacgactgtggacag

SEQ ID NO: 227569 - DNA, 55 bp, Artificial
  Synthetic oligonucleotide
gacgtcaaaactatctggggaaccggccttgagagctacccagtcgaggcaagac

SEQ ID NO: 227570 - DNA, 55 bp, Artificial
  Synthetic oligonucleotide
gacggatggcaagtctctgccgcattaggaaacctttcttcgacagcgtcccgac

SEQ ID NO: 227571 - DNA, 55 bp, Artificial
  Synthetic oligonucleotide
gacgctagagcctctcgcgatcttcagattcgctcctagcgctttagccctttgc

SEQ ID NO: 227572 - DNA, 55 bp, Artificial
  Synthetic oligonucleotide
gacgcgatggtcaccaggagctgcgcatcgaaaggacgccggttcggatcccatt

SEQ ID NO: 227573 - DNA, 55 bp, Artificial
  Synthetic oligonucleotide
gacgcctcccgcattgttgacgccagtcccagccgagtcgcaaccggtagtcagg

SEQ ID NO: 227574 - DNA, 55 bp, Artificial
  Synthetic oligonucleotide
gacgcaatcaaggtcatcgagtccgcaaagtaattctcccggcgactgccgcgca

SEQ ID NO: 227575 - DNA, 55 bp, Artificial
  Synthetic oligonucleotide
gacgatcgcgaataggacgtagatcgctagcttcaataaacagaacgtgcgtccc

SEQ ID NO: 227576 - DNA, 55 bp, Artificial
  Synthetic oligonucleotide
gacgatacttgcgccagttattgaaagagcgagagaagttcatgttaagcccctt

SEQ ID NO: 227577 - DNA, 55 bp, Artificial
  Synthetic oligonucleotide
cggacccgctatcgccagtaaggacaacgaaagatgcttgggcgcctaatctcga

SEQ ID NO: 227578 - DNA, 55 bp, Artificial
  Synthetic oligonucleotide
cggaccaagtcaatggacgatgcggtgacgtgagttggtggacggagccgagtac

SEQ ID NO: 227579 - DNA, 60 bp, Artificial
  Synthetic oligonucleotide
acatagcccgtcccgcggcggctcttcgatgtgcacgagcagagactagcgcgagtgtat

SEQ ID NO: 227580 - DNA, 55 bp, Artificial
  Synthetic oligonucleotide
ttgctgcccaatcttagtctcggtggacgtgcttggtggtccagacagacggagg

SEQ ID NO: 227581 - DNA, 55 bp, Artificial
  Synthetic oligonucleotide
cggaatttgaaatgaaccaccgtgtgccagaatgagcagatagtgaacgccttcg

SEQ ID NO: 227582 - DNA, 55 bp, Artificial
  Synthetic oligonucleotide
cggaacatcgcgtgtcccaagcggaaattctgcgatccgcccatacttctcgctc

SEQ ID NO: 227583 - DNA, 55 bp, Artificial
  Synthetic oligonucleotide
cgcttgtggatcgacaaacgtacgaatgtttgtgcagccgaggggctcgaaaacc

SEQ ID NO: 227584 - DNA, 55 bp, Artificial
  Synthetic oligonucleotide
ttgcttttggacttcgccggctcgtgtctcattttccgctatgcgtgagttcaag

SEQ ID NO: 227585 - DNA, 55 bp, Artificial
  Synthetic oligonucleotide
ttggaggcacattttacgaaccaacggttctaactggtgcaacccaggccatgaa

SEQ ID NO: 227586 - DNA, 55 bp, Artificial
  Synthetic oligonucleotide
cgctgtggatcaatgaagcgcccggcattccaaccagcctcggttttacctcagc

SEQ ID NO: 227587 - DNA, 55 bp, Artificial
  Synthetic oligonucleotide
cgctccaaaactgcttccggggaacgtatgaaccccgccatcttgactgccgcac

SEQ ID NO: 227588 - DNA, 55 bp, Artificial
  Synthetic oligonucleotide
cgctcaagtgacgcgatatctcgaaacaaggatcgcaatatgaatcgcaacccgc

SEQ ID NO: 227589 - DNA, 55 bp, Artificial
  Synthetic oligonucleotide
cgctatttgttgacgtttagaacgaaatatgtcgaccgctattctccctccgact

SEQ ID NO: 227590 - DNA, 58 bp, Artificial
  Synthetic oligonucleotide
acataataggcaaggcgtactgcggcgtaatctgcgttgaaggctctaacgatttccg

SEQ ID NO: 227591 - DNA, 55 bp, Artificial
  Synthetic oligonucleotide
cgctagcgccatgattagtcgcgtcgtagtgcataggaatgacgtttgggttgaa

SEQ ID NO: 227592 - DNA, 55 bp, Artificial
  Synthetic oligonucleotide
ttggatccctagaaaggaagcaatagtagtgtgccgcctagtctgctctagcagg

SEQ ID NO: 227593 - DNA, 55 bp, Artificial
  Synthetic oligonucleotide
cgctagagaactgccataaggtgtagctcttccacggtcccgtcgggaagtccgt

SEQ ID NO: 227594 - DNA, 55 bp, Artificial
  Synthetic oligonucleotide
cgctacgccagatgtcgcttgacggtgagagcgctatccccgaccgacaggacaa

SEQ ID NO: 227595 - DNA, 55 bp, Artificial
  Synthetic oligonucleotide
ttgtatcgactggaatgtgccgtacgtggagacagcggcgggctatgccgctcta

SEQ ID NO: 227596 - DNA, 55 bp, Artificial
  Synthetic oligonucleotide
cgctaaagtgctcggctctaacgaccgcaagaacatcttcttcacgcgaatggat

SEQ ID NO: 227597 - DNA, 55 bp, Artificial
  Synthetic oligonucleotide
cgcgtagactaccatcccgcgaatacacgcttttgatttgagaagggttagtccg

SEQ ID NO: 227598 - DNA, 55 bp, Artificial
  Synthetic oligonucleotide
cgcgtacatcagcacactttggaaccatgccattccgtagcttcgcgtaggttga

SEQ ID NO: 227599 - DNA, 55 bp, Artificial
  Synthetic oligonucleotide
cgcggcaccctgaatgatgtccaacacagctacgtctggaaggtacgcgccatgc

SEQ ID NO: 227600 - DNA, 55 bp, Artificial
  Synthetic oligonucleotide
cgcggagaacagacttcaaagcgacgcgcggttagacgcactgttgcgtgccctt

SEQ ID NO: 227601 - DNA, 60 bp, Artificial
  Synthetic oligonucleotide
tattcacatcgccgcatcgggcgatatgtcgaatttcgcagctaggcgcggacaggctgg

SEQ ID NO: 227602 - DNA, 55 bp, Artificial
  Synthetic oligonucleotide
cgcgctcaaaacacctgtttcgcaagccccggtatccaggttgatcctgtgctgg

SEQ ID NO: 227603 - DNA, 55 bp, Artificial
  Synthetic oligonucleotide
cgcgcggtgcatttgggaatctgccttccgaggagcttgtagtggagaatgaggc

SEQ ID NO: 227604 - DNA, 55 bp, Artificial
  Synthetic oligonucleotide
cgcgcactgcgcgatagaaccaagaacctacagtttcgcctccgagacgttggcc

SEQ ID NO: 227605 - DNA, 55 bp, Artificial
  Synthetic oligonucleotide
cgcgcacgttgtagcccggctcatgagagccttcgtggcgtcttcgcgcatgcat

SEQ ID NO: 227606 - DNA, 55 bp, Artificial
  Synthetic oligonucleotide
cggcttcgacccgatgagccattcgggccgcatgctggataatacgctggaatct

SEQ ID NO: 227607 - DNA, 55 bp, Artificial
  Synthetic oligonucleotide
cggctctggcgaatgtcgactgccacgagttccagcattcgatctttgaacccaa

SEQ ID NO: 227608 - DNA, 55 bp, Artificial
  Synthetic oligonucleotide
cggctcgcacttggccagccgtggatggagtcctatggcgttggttttgtcctca

SEQ ID NO: 227609 - DNA, 55 bp, Artificial
  Synthetic oligonucleotide
cggctcatctagctcccggtaacggcaagtcgcgaagctgccacattgatcgctc

SEQ ID NO: 227610 - DNA, 55 bp, Artificial
  Synthetic oligonucleotide
cggcgtagttgcacgttgggcgacgtggctagagatcattcccagtcgtgcgaat

SEQ ID NO: 227611 - DNA, 55 bp, Artificial
  Synthetic oligonucleotide
cggcgctcctaagcggagcaatccgacacttttgatgcaccccgtcacccgacct

SEQ ID NO: 227612 - DNA, 60 bp, Artificial
  Synthetic oligonucleotide
tcaatgactcgatcagggtaatatggtccccggtgagccatggcgcaagcgtaatgacat

SEQ ID NO: 227613 - DNA, 55 bp, Artificial
  Synthetic oligonucleotide
cggcgcaaatcccctatgcctcagatatcggctggcgacaatgtcctgcacaggc

SEQ ID NO: 227614 - DNA, 55 bp, Artificial
  Synthetic oligonucleotide
cggcgatgaccattcgccgaacattccaagtgtctacgggcacaaccgacgcacc

SEQ ID NO: 227615 - DNA, 55 bp, Artificial
  Synthetic oligonucleotide
cggcgactttctcggcttgtcgccaaatggagttgcccgttatgcacgagaagtg

SEQ ID NO: 227616 - DNA, 55 bp, Artificial
  Synthetic oligonucleotide
cggcctgcctttctttgctagagttccccatataatttggcggcgttctcgaaag

SEQ ID NO: 227617 - DNA, 55 bp, Artificial
  Synthetic oligonucleotide
cggcctctcccgcataagcagaccccatcagggcttcatagctattgagcgatgc

SEQ ID NO: 227618 - DNA, 55 bp, Artificial
  Synthetic oligonucleotide
cggccggtccgaaatctctctctgggactgattgctgacgagcgagagacgacga

SEQ ID NO: 227619 - DNA, 55 bp, Artificial
  Synthetic oligonucleotide
cggccgctgtggcagatgctaggactaacggcatttctatcggcagttcggctca

SEQ ID NO: 227620 - DNA, 55 bp, Artificial
  Synthetic oligonucleotide
cggccgctatctcttgaggaaatcgcaacggcttgtggcgtaagccgacgcactc

SEQ ID NO: 227621 - DNA, 54 bp, Artificial
  Synthetic oligonucleotide
cggccgaacgttacgatcaagaccggcccctacccgcattacgacatagaggcc

SEQ ID NO: 227622 - DNA, 55 bp, Artificial
  Synthetic oligonucleotide
cggcccctcgggtgtcggaaagagttggttggcttgcgctctcggccacaaggct

SEQ ID NO: 227623 - DNA, 57 bp, Artificial
  Synthetic oligonucleotide
acactggtaacgcctgggacgtttcggctggctgtcgtttcgttggaagcgctcata

SEQ ID NO: 227624 - DNA, 55 bp, Artificial
  Synthetic oligonucleotide
cggcattgtccttgatgccagctcacgagcagaacgtggtatccttgagcgtccg

SEQ ID NO: 227625 - DNA, 55 bp, Artificial
  Synthetic oligonucleotide
cggcagtcagccagaaacggacgtcggtccgaatgagactctttatggcgccatc

SEQ ID NO: 227626 - DNA, 55 bp, Artificial
  Synthetic oligonucleotide
cggcaaccagccgttatatcgcaatggaccattcacagacctcctaaacgacggg

SEQ ID NO: 227627 - DNA, 55 bp, Artificial
  Synthetic oligonucleotide
cggcaaattatccgaggctgaggacgcacttgcgagcaacgaattcgttatgggc

SEQ ID NO: 227628 - DNA, 55 bp, Artificial
  Synthetic oligonucleotide
cggaggagtccgctcgaagaaaggcgcagcatttccgaggaatagttggtcgggc

SEQ ID NO: 227629 - DNA, 55 bp, Artificial
  Synthetic oligonucleotide
ttgcgggagagagcatcaaattttccgatagcgctgttgcatcctgctattgcac

SEQ ID NO: 227630 - DNA, 54 bp, Artificial
  Synthetic oligonucleotide
cggagataccctataacgaacggccccacaaatgctcctaggttcccgagtgag

SEQ ID NO: 227631 - DNA, 53 bp, Artificial
  Synthetic oligonucleotide
cggagaggcctcttgcgctaaagaaccggaaactttcctcggctcgaaccgcg

SEQ ID NO: 227632 - DNA, 55 bp, Artificial
  Synthetic oligonucleotide
cggacgaatgcggttttcgcgcaagctcgttatgattggaggcgggatcctgctt

SEQ ID NO: 227633 - DNA, 55 bp, Artificial
  Synthetic oligonucleotide
cgcaacggtggtctatcgcccctatgaccgcgaccgaaagatgccgctgcttctc

SEQ ID NO: 227634 - DNA, 60 bp, Artificial
  Synthetic oligonucleotide
ggctctcgccaactcgagggagggcggatcaaagcagagtcgctctgattaaagctcaac

SEQ ID NO: 227635 - DNA, 56 bp, Artificial
  Synthetic oligonucleotide
tcacgaacgcggttagactatccgcaaaggagcgcctgtctcctaaaaagggaaca

SEQ ID NO: 227636 - DNA, 55 bp, Artificial
  Synthetic oligonucleotide
cgattccggaagatggagcgtagtaatcttcccaaaggtagtgcgacccggtcgc

SEQ ID NO: 227637 - DNA, 55 bp, Artificial
  Synthetic oligonucleotide
cgattccgcctaaatgcatcccgctctagagctttgcttggttcagtctaaccgg

SEQ ID NO: 227638 - DNA, 55 bp, Artificial
  Synthetic oligonucleotide
cgattccaccccgaggcgagttacgccagagtgggacagattcgacgcccggata

SEQ ID NO: 227639 - DNA, 55 bp, Artificial
  Synthetic oligonucleotide
cgattatctcggcctgtcctacgaagtgtcgattgtcgtgggcgttcttgcgaca

SEQ ID NO: 227640 - DNA, 55 bp, Artificial
  Synthetic oligonucleotide
cgatgtagagcagagcccagttgcatttgacgtgctttctgaccgccttcagcaa

SEQ ID NO: 227641 - DNA, 55 bp, Artificial
  Synthetic oligonucleotide
cgatctgaaatgtcctcgaaagtagcgatccctatcccgacatcccaaagtaagg

SEQ ID NO: 227642 - DNA, 55 bp, Artificial
  Synthetic oligonucleotide
cgatctaatgtaagcgctaatttccatgcgcgttgacgcggcccgtttgaccggg

SEQ ID NO: 227643 - DNA, 55 bp, Artificial
  Synthetic oligonucleotide
cgatcaaaattggcggctagtttcagagcggccgtactgtgatccgggaacgcca

SEQ ID NO: 227644 - DNA, 55 bp, Artificial
  Synthetic oligonucleotide
cgataggaggcgaaggtagacgaagaaatgttcatgcccactgctctatcgtaca

SEQ ID NO: 227645 - DNA, 55 bp, Artificial
  Synthetic oligonucleotide
cgatacactaaaacgcaacacaatccacgcaaataaggggaacgtacgagagtac

SEQ ID NO: 227646 - DNA, 55 bp, Artificial
  Synthetic oligonucleotide
tcattaataacgctgtcccgaccccgagcggaggcgtcaactcggggtcagacct

SEQ ID NO: 227647 - DNA, 55 bp, Artificial
  Synthetic oligonucleotide
cgagtgtttagcccggggacataactgacgggtgttcggggagatggctgacacg

SEQ ID NO: 227648 - DNA, 52 bp, Artificial
  Synthetic oligonucleotide
cgaggtagactttgcctaagtaaataccggtctcaccccagtttcacccgta

SEQ ID NO: 227649 - DNA, 55 bp, Artificial
  Synthetic oligonucleotide
cgaggaggttggatgacagccaacggtctgtccattctggtgcgttcaattcgag

SEQ ID NO: 227650 - DNA, 55 bp, Artificial
  Synthetic oligonucleotide
cgagcgtctcagccgggatggagtcgatgtttcctgcattgaagtcgattccgac

SEQ ID NO: 227651 - DNA, 55 bp, Artificial
  Synthetic oligonucleotide
cgagcctgccaaccctgtctccgtgcgcatcctgatgcgggaactgacatgtcca

SEQ ID NO: 227652 - DNA, 55 bp, Artificial
  Synthetic oligonucleotide
cgagcctcccgataatcgtgaacatcagatgacggcatctcttccgaccgaaggg

SEQ ID NO: 227653 - DNA, 55 bp, Artificial
  Synthetic oligonucleotide
cgagccgaacagtatcgagccgaacagtatcgagccgaacagtatcgagccgaac

SEQ ID NO: 227654 - DNA, 55 bp, Artificial
  Synthetic oligonucleotide
cgagccccatattgcccggttgcgttagcagatgcgcacatagatcgcgcctccc

SEQ ID NO: 227655 - DNA, 55 bp, Artificial
  Synthetic oligonucleotide
cgagcaatcctcaatgcgatatcaggataggcaggctgatattggtcagcacggc

SEQ ID NO: 227656 - DNA, 55 bp, Artificial
  Synthetic oligonucleotide
cgagaggcatggaagacgtggctatttatccttggatgaccctcaggggtaggac

SEQ ID NO: 227657 - DNA, 60 bp, Artificial
  Synthetic oligonucleotide
tcccacggggaagcgatcctcagaaagctcatggcgcgttctagtgagcctgaactagat

SEQ ID NO: 227658 - DNA, 55 bp, Artificial
  Synthetic oligonucleotide
cgacgtttatggacgatcacttgcgctggcatggcgagcggctatagcgctttat

SEQ ID NO: 227659 - DNA, 55 bp, Artificial
  Synthetic oligonucleotide
ttttatatactgctgccgcggattgctgcggaaaggtatcggcgatgaaaggcag

SEQ ID NO: 227660 - DNA, 55 bp, Artificial
  Synthetic oligonucleotide
cgacgggatgctaatcggaatcgggctgagtgatgccggctgacagtacgaaccg

SEQ ID NO: 227661 - DNA, 55 bp, Artificial
  Synthetic oligonucleotide
cgacctcgaccgtggaacgcgagaatggcgagtgcctatctgaaggccagtctgc

SEQ ID NO: 227662 - DNA, 55 bp, Artificial
  Synthetic oligonucleotide
cgaccccgttttcgcggaacctgatcgtgatgtcaaaagactgtttccgagccga

SEQ ID NO: 227663 - DNA, 55 bp, Artificial
  Synthetic oligonucleotide
cgcgattaacagcgagagacaaggagcgtcacgtgagttctcacaggatcgattt

SEQ ID NO: 227664 - DNA, 55 bp, Artificial
  Synthetic oligonucleotide
tttaaagacggtctcaggatagagaagtcggtgcatgccatggcacagtccttcc

SEQ ID NO: 227665 - DNA, 55 bp, Artificial
  Synthetic oligonucleotide
cgcgatcatagtctctccagggaacgggcaagcgttatcgtgcgtgtgatgcagg

SEQ ID NO: 227666 - DNA, 55 bp, Artificial
  Synthetic oligonucleotide
tttcgtcctcacacgacgggtttggtatccatcacgagttgagcggagccgagtg

SEQ ID NO: 227667 - DNA, 55 bp, Artificial
  Synthetic oligonucleotide
cgcgacgcacttaaccctcccgcggtgaatgcctagcatcctatcatatcctctg

SEQ ID NO: 227668 - DNA, 60 bp, Artificial
  Synthetic oligonucleotide
tccgaacaacacaaggagtgcaagaattcgagccctgccacgcaagagaaggtcgcgaaa

SEQ ID NO: 227669 - DNA, 55 bp, Artificial
  Synthetic oligonucleotide
cgcgaccttctccacctcacgcgtcatgtcaacgatcaaccgcgcaaatgcctcg

SEQ ID NO: 227670 - DNA, 55 bp, Artificial
  Synthetic oligonucleotide
cgcgaccctttcggacgcacaaatgacgctctcactctttggatctatgcatcgg

SEQ ID NO: 227671 - DNA, 54 bp, Artificial
  Synthetic oligonucleotide
cgcgaaattgccgcgtgaatgtcggttttcgtcgccggaaggggtaggatgacg

SEQ ID NO: 227672 - DNA, 55 bp, Artificial
  Synthetic oligonucleotide
cgccgcctcagtaggcaatagtgtcaacaaatcgaggcggcgcaagtgattctca

SEQ ID NO: 227673 - DNA, 55 bp, Artificial
  Synthetic oligonucleotide
cgccgacaccaggccgagaaatgtttccagtccgtggcataggcgcgccgagtgt

SEQ ID NO: 227674 - DNA, 55 bp, Artificial
  Synthetic oligonucleotide
cgcccgtaccagcttttctcgagaatccaaatccctcagcgtgcgcatagacacg

SEQ ID NO: 227675 - DNA, 54 bp, Artificial
  Synthetic oligonucleotide
cgcccatataaactccgtagtacgactacggggcaacatagtgcgtaaacctac

SEQ ID NO: 227676 - DNA, 55 bp, Artificial
  Synthetic oligonucleotide
cgcccacaatccacctcttacggtggttcggtcgttcgaagcgatgtaacagtct

SEQ ID NO: 227677 - DNA, 55 bp, Artificial
  Synthetic oligonucleotide
cgcccaatcgtgcctttgctcgccacggacgagcgttctgaagtgggatattgcc

SEQ ID NO: 227678 - DNA, 55 bp, Artificial
  Synthetic oligonucleotide
cgccataggactccatccacggctggccaagtgcgagccgttgggaggaattcac

SEQ ID NO: 227679 - DNA, 60 bp, Artificial
  Synthetic oligonucleotide
aattgccggtctgatcagtgcctattgcctctggacgttccatagaaccgatgacatcgg

SEQ ID NO: 227680 - DNA, 55 bp, Artificial
  Synthetic oligonucleotide
cgccacgttgcaagcggtgagaacccacctttgaacatacgtccggaacgccgat

SEQ ID NO: 227681 - DNA, 55 bp, Artificial
  Synthetic oligonucleotide
cgcatcgggcgatatgtcgaatttcgcagctaggcgcggacaggctggatcgagg

SEQ ID NO: 227682 - DNA, 55 bp, Artificial
  Synthetic oligonucleotide
cgcatccgagggtcgttgctattggtgagacgggtctagatcgttatcataacgc

SEQ ID NO: 227683 - DNA, 55 bp, Artificial
  Synthetic oligonucleotide
cgcagtacagctccatctagcgacgtgacgtgaaggacgggatagcgcgactctg

SEQ ID NO: 227684 - DNA, 55 bp, Artificial
  Synthetic oligonucleotide
tttgacacgcgttccccatccgcaaagccaacctcgtccggctaaaggttgactg

SEQ ID NO: 227685 - DNA, 55 bp, Artificial
  Synthetic oligonucleotide
cgcaggcactttagccatcgttcacgtgggctagagcggtatgtatttaagcccg

SEQ ID NO: 227686 - DNA, 55 bp, Artificial
  Synthetic oligonucleotide
cgcacctctttgtctaagtaacatctgttcgtcccaggtgagacgggctcttctg

SEQ ID NO: 227687 - DNA, 55 bp, Artificial
  Synthetic oligonucleotide
cgcaatagctccgtatgattgctgcattgcaagaaagaccgattctctatcatgg

SEQ ID NO: 227688 - DNA, 55 bp, Artificial
  Synthetic oligonucleotide
cgcaagtgcgccatacgcccaatactcgttcgaataaagccatgttcccaaagcc

SEQ ID NO: 227689 - DNA, 55 bp, Artificial
  Synthetic oligonucleotide
cgcaagattgccgcacatcagcgctaggggccagagtgacggatacagaaggttg

SEQ ID NO: 227690 - DNA, 58 bp, Artificial
  Synthetic oligonucleotide
aattcgaaatggccgggctctgcgagacattttttgtcacccagtcattattcgatta

SEQ ID NO: 227691 - DNA, 55 bp, Artificial
  Synthetic oligonucleotide
cgcaagaaatcgtgggaagagcatccctatgtaaggacgagaggccttctatggc

SEQ ID NO: 227692 - DNA, 55 bp, Artificial
  Synthetic oligonucleotide
ctcgacggatgcccaagacgcaaagccctctgacaaccgggcaggtaaaacgcgg

SEQ ID NO: 227693 - DNA, 55 bp, Artificial
  Synthetic oligonucleotide
ttcgtatccaggtcctgataggtcaatcgcccatcactttcgaagcccgcgtgcc

SEQ ID NO: 227694 - DNA, 55 bp, Artificial
  Synthetic oligonucleotide
ctcgaagacatgcccctcccaaagcatctgacggccgagaagacagggcgcattc

SEQ ID NO: 227695 - DNA, 55 bp, Artificial
  Synthetic oligonucleotide
ctccttttgagagcgcagcttgcgactctttcaggcgagttcgagcgtattggcc

SEQ ID NO: 227696 - DNA, 55 bp, Artificial
  Synthetic oligonucleotide
ctccgcgtatgagcagccggtgagagaagcaagccgcagcggtatcgttcccact

SEQ ID NO: 227697 - DNA, 55 bp, Artificial
  Synthetic oligonucleotide
ctccagaaacccgcggctgagtggctccttcaacgttgcggttctgtcagttcca

SEQ ID NO: 227698 - DNA, 55 bp, Artificial
  Synthetic oligonucleotide
ctcattcctcgcggcgtcctggtctccgcgtccttggtaatctgcatgatcgatg

SEQ ID NO: 227699 - DNA, 55 bp, Artificial
  Synthetic oligonucleotide
ctcatcgcgattgtccggaaggagcagcgtctcaaacttcctagcccgccaggcg

SEQ ID NO: 227700 - DNA, 55 bp, Artificial
  Synthetic oligonucleotide
ctcatagtgcctagctttcaaccccgaagggctagatatacgtctcctgcgatcc

SEQ ID NO: 227701 - DNA, 60 bp, Artificial
  Synthetic oligonucleotide
tccggcatgtgaatcagtaaactttgttcgcaggtggctcgttgcagcattttgcgcgac

SEQ ID NO: 227702 - DNA, 55 bp, Artificial
  Synthetic oligonucleotide
ctcagcggagctgaggatcgagcaagcccggagagctttaagcgcccattcaagc

SEQ ID NO: 227703 - DNA, 55 bp, Artificial
  Synthetic oligonucleotide
ctcagaggcacgcaaggacgttctgaaccatcgaggctccgcgtcgagctttccg

SEQ ID NO: 227704 - DNA, 55 bp, Artificial
  Synthetic oligonucleotide
ctcacaattaaatgccaaacgacacctccggtcgacgaaaagctggtcgctggcg

SEQ ID NO: 227705 - DNA, 55 bp, Artificial
  Synthetic oligonucleotide
ctcaacacgtgtgagatcgtggaggagacctacttcgtttctcaccatctgaagt

SEQ ID NO: 227706 - DNA, 55 bp, Artificial
  Synthetic oligonucleotide
ctattatcttgacgcgctcactaggacgcatcgcactcctccttcggtgcgcccc

SEQ ID NO: 227707 - DNA, 55 bp, Artificial
  Synthetic oligonucleotide
ctatctcgcgcgtgctcatccggaagtagcgcccgaagaccaacaggttttcgcg

SEQ ID NO: 227708 - DNA, 55 bp, Artificial
  Synthetic oligonucleotide
ctatcgtcctgattggagagcggcccggtcttagcgttcccgatagtcttggcgc

SEQ ID NO: 227709 - DNA, 55 bp, Artificial
  Synthetic oligonucleotide
ctagagttgaggtcaaggggcaatggcacaagagtcaaccttttggcagagtgtc

SEQ ID NO: 227710 - DNA, 55 bp, Artificial
  Synthetic oligonucleotide
ctagacgtgattctcatgactagtaggcccgcatataattccaaagcgacaccac

SEQ ID NO: 227711 - DNA, 53 bp, Artificial
  Synthetic oligonucleotide
ctacgggcgggcgagaaacgtcccggttccggagaatttcgaatctgcgatcc

SEQ ID NO: 227712 - DNA, 60 bp, Artificial
  Synthetic oligonucleotide
tccgtctggccaggatgtgcgtgtctggatagcgacaggttatacggacatgcggtgtgg

SEQ ID NO: 227713 - DNA, 55 bp, Artificial
  Synthetic oligonucleotide
ctacgggcataatgcgcctccagagccctgttcggaaggtagtgccgctcggttt

SEQ ID NO: 227714 - DNA, 55 bp, Artificial
  Synthetic oligonucleotide
ctacgctgccttgctgagggaggtgaattcagagcgatagttggcgggacggagc

SEQ ID NO: 227715 - DNA, 55 bp, Artificial
  Synthetic oligonucleotide
ctaattggtttagtcagtttacaattactgtggtcgatagctggaggcggtaagt

SEQ ID NO: 227716 - DNA, 55 bp, Artificial
  Synthetic oligonucleotide
cgttttctacctgcatcgaggcagtggttcatggccgtgcgaagacaagcgccgt

SEQ ID NO: 227717 - DNA, 55 bp, Artificial
  Synthetic oligonucleotide
cgtttccgcggcaccctgaatgatgtccaacacagctacgtctggaaggtacgcg

SEQ ID NO: 227718 - DNA, 55 bp, Artificial
  Synthetic oligonucleotide
ctgcaggaaactacgcccaacggccagttttctggaaccgggcatgtactctgaa

SEQ ID NO: 227719 - DNA, 55 bp, Artificial
  Synthetic oligonucleotide
ctgcagcctgtcgctacagacgtcacgactgcgatcaactcacgctcggatgcgc

SEQ ID NO: 227720 - DNA, 55 bp, Artificial
  Synthetic oligonucleotide
ctgcactttgccatatcccttcccatcgcaaccgtaattgccatggggtcgtggc

SEQ ID NO: 227721 - DNA, 55 bp, Artificial
  Synthetic oligonucleotide
ttcggaataacattcgaaatttcgcccgttgagcccggaacgatggatattcacc

SEQ ID NO: 227722 - DNA, 55 bp, Artificial
  Synthetic oligonucleotide
ctgcaaaatagcgcttgctaagtgacgattgctgacttacgtcacttcgtaaagc

SEQ ID NO: 227723 - DNA, 60 bp, Artificial
  Synthetic oligonucleotide
aatgggaactcttcgcctgcttgcgtgttgatcagcggatcaacaaacgtggcatacctg

SEQ ID NO: 227724 - DNA, 55 bp, Artificial
  Synthetic oligonucleotide
ctgattttgccggaaactaaggcagttcgaaggaagcagcaatgggttcggccca

SEQ ID NO: 227725 - DNA, 55 bp, Artificial
  Synthetic oligonucleotide
ctgattttcaggcgtcctgggatgatcttaagccggatacctatatggccgacgg

SEQ ID NO: 227726 - DNA, 55 bp, Artificial
  Synthetic oligonucleotide
ctgaggcatgtggcctttgggattgagtgtagaatttctatagtcgtatgtcgga

SEQ ID NO: 227727 - DNA, 54 bp, Artificial
  Synthetic oligonucleotide
ctgaggagtattcgccaacgcttggggaggcttgtaccttccgtcgaaaggacc

SEQ ID NO: 227728 - DNA, 55 bp, Artificial
  Synthetic oligonucleotide
ctgaaagcgctacgcggaaccgcaatagttgcggccgcaatgatgacacttctcg

SEQ ID NO: 227729 - DNA, 55 bp, Artificial
  Synthetic oligonucleotide
ctctggtaggcgacgtcttggttatcaatttgtccggccgaacgcggtagtgctg

SEQ ID NO: 227730 - DNA, 55 bp, Artificial
  Synthetic oligonucleotide
ctctgagatgtgctcgcataagagcaattaagcgccgatacttgcggtttggcaa

SEQ ID NO: 227731 - DNA, 55 bp, Artificial
  Synthetic oligonucleotide
ctctcgtcaagcgttcggatggtccaggggctctcatacaccgaatgaagtgttg

SEQ ID NO: 227732 - DNA, 55 bp, Artificial
  Synthetic oligonucleotide
ctctcgacgatgtcaacgatattttcgccagccttaaggcgggaacgatcgaagg

SEQ ID NO: 227733 - DNA, 55 bp, Artificial
  Synthetic oligonucleotide
ctcgttgtcgcgtgggagcgttgcagtatggagcatcatgtccgccatattcccg

SEQ ID NO: 227734 - DNA, 60 bp, Artificial
  Synthetic oligonucleotide
tcctttcgagatgcgtatcaaatcgggtgtgcgcaaagatggcgttatcacggcgtgcga

SEQ ID NO: 227735 - DNA, 55 bp, Artificial
  Synthetic oligonucleotide
ctcgtaagggagctgtggttggtcgtgcactcggagatcaaggaccttccgtcca

SEQ ID NO: 227736 - DNA, 55 bp, Artificial
  Synthetic oligonucleotide
ctcgggtgccgtggagactgtgctgggaaaacgagatgaggcagtcggtctgctg

SEQ ID NO: 227737 - DNA, 55 bp, Artificial
  Synthetic oligonucleotide
ctcggcttgtgcccggctcactctcatatcgacctccggttagatttcgtttgac

SEQ ID NO: 227738 - DNA, 55 bp, Artificial
  Synthetic oligonucleotide
ctcggaactgcagtcttttgaactgccggacctttgtccgtgttcgttggcgccg

SEQ ID NO: 227739 - DNA, 55 bp, Artificial
  Synthetic oligonucleotide
ctcgctgacatcaaatctttaatacgactaaggtatacaactagccatcctcgag

SEQ ID NO: 227740 - DNA, 55 bp, Artificial
  Synthetic oligonucleotide
ttcggtgatcgaatgagcgttgacgacaggcctttagcatcgttccgggtctcga

SEQ ID NO: 227741 - DNA, 55 bp, Artificial
  Synthetic oligonucleotide
ctcgccgctttgaggccgaacgacgatggcagacgcagacttaagcgcaggtcaa

SEQ ID NO: 227742 - DNA, 55 bp, Artificial
  Synthetic oligonucleotide
ctcgcagctaagagaatcgcatttccagaaatcgtagtcaagggtcccgtaaggg

SEQ ID NO: 227743 - DNA, 55 bp, Artificial
  Synthetic oligonucleotide
ctcgcagccacacggcccgcattgtttcttggggtgccactgacattggcagggt

SEQ ID NO: 227744 - DNA, 55 bp, Artificial
  Synthetic oligonucleotide
ctcgcaaccattccggcgcctgcttcctcggacaaggctcatgtcgttttcgccc

SEQ ID NO: 227745 - DNA, 53 bp, Artificial
  Synthetic oligonucleotide
gggaataaccgtaagcgggagtgggacagtatatgggacagttttggttatcc

SEQ ID NO: 227746 - DNA, 60 bp, Artificial
  Synthetic oligonucleotide
tcgaaatccatgtgcacgctcccctgtgtgatcggagcaatacattgtgggggttgcagc

SEQ ID NO: 227747 - DNA, 55 bp, Artificial
  Synthetic oligonucleotide
ttcgtacagggtatttcaatagatagtcgttcaattgctccgaaagaagcgtttt

SEQ ID NO: 227748 - DNA, 55 bp, Artificial
  Synthetic oligonucleotide
ctcgagatggactgtcgccgacgtagtgaaatgctgggtgtccaaaccaaacatg

SEQ ID NO: 227749 - DNA, 55 bp, Artificial
  Synthetic oligonucleotide
cggttgctactcagtgaagctgctcgttcgttcggaaccacgttgtgtcgtcggc

SEQ ID NO: 227750 - DNA, 55 bp, Artificial
  Synthetic oligonucleotide
cggttgccagacctttcccggccggccttccaaggtcatgtggatgccatgcaag

SEQ ID NO: 227751 - DNA, 55 bp, Artificial
  Synthetic oligonucleotide
cggttcctcggattggaaacagacgttgtggaacaatatcgctcgggctctgtca

SEQ ID NO: 227752 - DNA, 55 bp, Artificial
  Synthetic oligonucleotide
cggtgtcttgacattcatcgcgtattttcagcctcgatcgcatttcaatcgacgc

SEQ ID NO: 227753 - DNA, 55 bp, Artificial
  Synthetic oligonucleotide
cggtgggccgggtatccctatttcgcctattacgcgacgaaagcagctgtcaacc

SEQ ID NO: 227754 - DNA, 55 bp, Artificial
  Synthetic oligonucleotide
cggtgctacaacgccaattcccatttacggcaatcgacttggcaaggtttcagtg

SEQ ID NO: 227755 - DNA, 55 bp, Artificial
  Synthetic oligonucleotide
cggtgccgctgcttgagaatcacttgcgccgcctcgatttgttgacactattgcc

SEQ ID NO: 227756 - DNA, 55 bp, Artificial
  Synthetic oligonucleotide
cggtgcaaataacaggcgagatgaacgaaagcagactgcaacattcacgggaggg

SEQ ID NO: 227757 - DNA, 57 bp, Artificial
  Synthetic oligonucleotide
gtacttgttattggttatcctccgattccattcacaactgtgccaacccaagttgta

SEQ ID NO: 227758 - DNA, 55 bp, Artificial
  Synthetic oligonucleotide
cggtctcgacaaattcaggacggcgcttctaaacggcgtcgtctcgcatgggcag

SEQ ID NO: 227759 - DNA, 55 bp, Artificial
  Synthetic oligonucleotide
cggtcccgtactccaggtacatctagtcattcggacaattcgctctctagtgcgc

SEQ ID NO: 227760 - DNA, 55 bp, Artificial
  Synthetic oligonucleotide
cggtcattgcaatgggctgtactaaggtaggattactattccacaatgtgagcgg

SEQ ID NO: 227761 - DNA, 55 bp, Artificial
  Synthetic oligonucleotide
cggtcagatcccggatcctcagccgtatgtgaggatagtcgcggccaaaggtgcg

SEQ ID NO: 227762 - DNA, 55 bp, Artificial
  Synthetic oligonucleotide
cggtaccacgagccacaatcctcctggactgacggtgatcgcatctttactcggg

SEQ ID NO: 227763 - DNA, 55 bp, Artificial
  Synthetic oligonucleotide
cggtaagtcaagcccggctttacaatttcagacaccaacacctcttcgacagagg

SEQ ID NO: 227764 - DNA, 55 bp, Artificial
  Synthetic oligonucleotide
cgggtcgcagacatcatgaggcggcgtcttggactgatcctgagcatcttgcccg

SEQ ID NO: 227765 - DNA, 55 bp, Artificial
  Synthetic oligonucleotide
cggggcattgatctcatcacggggatcggaactgcttttggccatcaatgtacct

SEQ ID NO: 227766 - DNA, 55 bp, Artificial
  Synthetic oligonucleotide
cgggcttgttgtatttccatccaatgcgcagctatccgtccgcgctcatgggatc

SEQ ID NO: 227767 - DNA, 55 bp, Artificial
  Synthetic oligonucleotide
ttgcggcctgagctcttcacagggcgggactgcaacgtcgagatcgaaacggcgt

SEQ ID NO: 227768 - DNA, 58 bp, Artificial
  Synthetic oligonucleotide
acgtgaggttctcacccacgcggggaacagatggtcgctcggggtcatacatactctc

SEQ ID NO: 227769 - DNA, 55 bp, Artificial
  Synthetic oligonucleotide
cgggcgagaaatcgcagcttgggaggttcgtgacgatgcgtggttacagtctaat

SEQ ID NO: 227770 - DNA, 55 bp, Artificial
  Synthetic oligonucleotide
cgggccttcagttacttcggtggcgtgacgaagaccactactatctgcgacaacc

SEQ ID NO: 227771 - DNA, 55 bp, Artificial
  Synthetic oligonucleotide
cgggcctgtccactgcatcgtgtagtcgtcgttcaaggtgggatatccatttctg

SEQ ID NO: 227772 - DNA, 55 bp, Artificial
  Synthetic oligonucleotide
cgggccgcgtcaacgcgcatggaaattagcgcttacattcattatcagtcctccc

SEQ ID NO: 227773 - DNA, 55 bp, Artificial
  Synthetic oligonucleotide
cgggcacatcgatcagatcagggtgaagacgcgtgattttcgataaattccctgg

SEQ ID NO: 227774 - DNA, 55 bp, Artificial
  Synthetic oligonucleotide
cgggaggaccctgtgaccttgtgaacgatggaaatgttaccggccatcagattgg

SEQ ID NO: 227775 - DNA, 55 bp, Artificial
  Synthetic oligonucleotide
cgggacactcatcctttatacgacactgctcacgacccttatggtcccattggcg

SEQ ID NO: 227776 - DNA, 55 bp, Artificial
  Synthetic oligonucleotide
cgggaatgtttcgccggacgaggctatgggtgccatctggccctacatcgcagca

SEQ ID NO: 227777 - DNA, 55 bp, Artificial
  Synthetic oligonucleotide
cggcttgtgaacacacgcaactttccctgtagtcctactgtcatattatcccctg

SEQ ID NO: 227778 - DNA, 55 bp, Artificial
  Synthetic oligonucleotide
cgttgatgggacgataaacagattaggaaccgctgtttcgagagtcacttcggga

SEQ ID NO: 227779 - DNA, 58 bp, Artificial
  Synthetic oligonucleotide
gtccggacggcttgttcacgtgcatgaggcggtgtctaaagggacgcatattttccgc

SEQ ID NO: 227780 - DNA, 55 bp, Artificial
  Synthetic oligonucleotide
cgttcgttcaagagctgcgcgctaaatgtgagcgcttaggtgacactccgaatgg

SEQ ID NO: 227781 - DNA, 55 bp, Artificial
  Synthetic oligonucleotide
cgttcgacgaggcgaaaatagacgcgcggcgaaaacatgaggaaatccgcgagcc

SEQ ID NO: 227782 - DNA, 55 bp, Artificial
  Synthetic oligonucleotide
cgttatcacgggtaccggcatggtatcacctttgggctgtggcacggaggtgtcc

SEQ ID NO: 227783 - DNA, 55 bp, Artificial
  Synthetic oligonucleotide
cgttacgggcgatctaggaatatccctccgctccagtctgcctgtgtccggactt

SEQ ID NO: 227784 - DNA, 55 bp, Artificial
  Synthetic oligonucleotide
cgtgttttacgcacatcgctgcatagcgatcgtctctcaactcccacaactgggc

SEQ ID NO: 227785 - DNA, 55 bp, Artificial
  Synthetic oligonucleotide
cgtgtcccgcttgctgtgtggcccttatatagactttgttaaccctcctgatcca

SEQ ID NO: 227786 - DNA, 55 bp, Artificial
  Synthetic oligonucleotide
ttcgtgcatcgaaaactccctcccaagagcccgatcatgccttgcatgcgacgcc

SEQ ID NO: 227787 - DNA, 55 bp, Artificial
  Synthetic oligonucleotide
cgtgcgtagatcgccacgtaatagagcgccagtgacgtcgcggggagcactgcat

SEQ ID NO: 227788 - DNA, 55 bp, Artificial
  Synthetic oligonucleotide
ttcttctcttacgcacaacaataccagaagattcatccaatgcaccctcagtatc

SEQ ID NO: 227789 - DNA, 55 bp, Artificial
  Synthetic oligonucleotide
cgtgcgacctgagcatcgaaattctcaaactcgatatgagctggacgtccacgca

SEQ ID NO: 227790 - DNA, 60 bp, Artificial
  Synthetic oligonucleotide
gtggaccccttgcaggttcatgatcactcggctatgttgggacttgaaatcgattggccc

SEQ ID NO: 227791 - DNA, 55 bp, Artificial
  Synthetic oligonucleotide
cgtgcatatttccagacgccccaatcagtgcaccggctgaatgaagtcgctctac

SEQ ID NO: 227792 - DNA, 55 bp, Artificial
  Synthetic oligonucleotide
cgtgatgattgccacgtcgctgaaatccatgtccgaaatccgggacgggagcatc

SEQ ID NO: 227793 - DNA, 55 bp, Artificial
  Synthetic oligonucleotide
cgtgaccgtcaaagtctattcactaggacccaaatctctccaggtcccgcaagct

SEQ ID NO: 227794 - DNA, 55 bp, Artificial
  Synthetic oligonucleotide
cgtctatggtactaaagacttcatggaaacgtatgccgatgctcttgcgggacgt

SEQ ID NO: 227795 - DNA, 55 bp, Artificial
  Synthetic oligonucleotide
cgtcgtgtgttctgggcggcccgaagcattctttctcgcccgctctatgcaatgc

SEQ ID NO: 227796 - DNA, 55 bp, Artificial
  Synthetic oligonucleotide
cgtcgtcactatagaggtttcacataccgaatttcgcaatcatcggagcgggcgc

SEQ ID NO: 227797 - DNA, 55 bp, Artificial
  Synthetic oligonucleotide
cgtcggcaattatgtcatccggcgagagacctacgatccccgatatctgtcggat

SEQ ID NO: 227798 - DNA, 55 bp, Artificial
  Synthetic oligonucleotide
cgtcgatcggaagctcttggcaatttgacgcaacaacggggaggattgttgatga

SEQ ID NO: 227799 - DNA, 55 bp, Artificial
  Synthetic oligonucleotide
cgtcctgtccgtgtcgcctttgaggcaacgggaaactatcatcgcgcattggcat

SEQ ID NO: 227800 - DNA, 55 bp, Artificial
  Synthetic oligonucleotide
ttgacatgaatggcgaaacggcatgggcactttatgaaagccgtctgagacgggt

SEQ ID NO: 227801 - DNA, 60 bp, Artificial
  Synthetic oligonucleotide
acgcatcggtcgacaagtggaagatttttcgcgcgctctgcgaagcaaaggacatggtcg

SEQ ID NO: 227802 - DNA, 55 bp, Artificial
  Synthetic oligonucleotide
cgtatttggcgtctcttgacatcgcaaagtctttccgccaacattcgtaaacgtt

SEQ ID NO: 227803 - DNA, 55 bp, Artificial
  Synthetic oligonucleotide
cgtatctcgattggcgagccatggagccgcggataccatactgcgtgcaggatcc

SEQ ID NO: 227804 - DNA, 55 bp, Artificial
  Synthetic oligonucleotide
cgtataccttggcgggcccgagttaccttagcacgccgcaaactctgagctaccg

SEQ ID NO: 227805 - DNA, 55 bp, Artificial
  Synthetic oligonucleotide
cgtacgctatttgtccgcctcctgcgactacggagtataggaaccaatcgcccat

SEQ ID NO: 227806 - DNA, 55 bp, Artificial
  Synthetic oligonucleotide
cgtaagaccgtgatccctgtggtttccatcggtcgtgagccacaccacatctcgc

SEQ ID NO: 227807 - DNA, 53 bp, Artificial
  Synthetic oligonucleotide
ggttcctcggaactaaaagccacagggccgtctagcacggtgttctaactccc

SEQ ID NO: 227808 - DNA, 55 bp, Artificial
  Synthetic oligonucleotide
ggttataaggcgcccggcatttggctaaggccacaacaatttattgcaactctcc

SEQ ID NO: 227809 - DNA, 55 bp, Artificial
  Synthetic oligonucleotide
ggttagggaagaccgaagagaggtggccatgacagggcgcgagcggaaatgggga

SEQ ID NO: 227810 - DNA, 55 bp, Artificial
  Synthetic oligonucleotide
ggttaggctgacctaaataatcagaccgcggaaaagagccggctttgggagctcg

SEQ ID NO: 227811 - DNA, 55 bp, Artificial
  Synthetic oligonucleotide
ggtggttactttacgaccgtataatctacgccataccacttcacggaaagcttgc

SEQ ID NO: 227812 - DNA, 57 bp, Artificial
  Synthetic oligonucleotide
acgcacctagtcgttcggatgttcagtgaggattcccttgctccaacgcacaccccc

SEQ ID NO: 227813 - DNA, 55 bp, Artificial
  Synthetic oligonucleotide
ggtggggaacgcccagcaaatcaactgtggagatgtcgtcatggagttcaataga

SEQ ID NO: 227814 - DNA, 55 bp, Artificial
  Synthetic oligonucleotide
ggtgcttctaggcctcaaacgacatcccaataccgcctatccggcgctcgttccc

SEQ ID NO: 227815 - DNA, 55 bp, Artificial
  Synthetic oligonucleotide
ggtgcgctatgggatcatttgcggcgattacagaaaattatcggatttaccgtga

SEQ ID NO: 227816 - DNA, 52 bp, Artificial
  Synthetic oligonucleotide
ggtctcggataccgaaaaccgaggtatgtcgagaaatcgggagcccaaaagt

SEQ ID NO: 227817 - DNA, 55 bp, Artificial
  Synthetic oligonucleotide
ggtctcacgcgtaaacgctcgcctgatcatgcggtcgcggaacagtggatcggga

SEQ ID NO: 227818 - DNA, 55 bp, Artificial
  Synthetic oligonucleotide
ggtcgtcccataaggggcgttgacggtggacagaacctttactgcaacgatcgac

SEQ ID NO: 227819 - DNA, 55 bp, Artificial
  Synthetic oligonucleotide
ggtcggcgtgccttgcgccgaagctaaggccgacctcggaggatccggcttgtac

SEQ ID NO: 227820 - DNA, 55 bp, Artificial
  Synthetic oligonucleotide
ggtccttcgtctaacgccgctatccctgcacaaccgtcggaactgccctaagtct

SEQ ID NO: 227821 - DNA, 55 bp, Artificial
  Synthetic oligonucleotide
ggtccatgagatatggcaaaccatctgtcgacgaaaccatcgatagtctcacgaa

SEQ ID NO: 227822 - DNA, 55 bp, Artificial
  Synthetic oligonucleotide
ggtcatccattgcaagtccaatgagacctaccatgccttttacatatcgcgcgtc

SEQ ID NO: 227823 - DNA, 56 bp, Artificial
  Synthetic oligonucleotide
gttccgtctcgaacccggacaggatttcgagatcggtgacgtagcgtgtcgcttcc

SEQ ID NO: 227824 - DNA, 55 bp, Artificial
  Synthetic oligonucleotide
tgaacaaaatgcgagaacgtgcagcaggcagttggtgccacttcaccgttcggtc

SEQ ID NO: 227825 - DNA, 55 bp, Artificial
  Synthetic oligonucleotide
tgaaggcacgttacgaaccaggattgcggggtatttgggtcaaccggcaaggaga

SEQ ID NO: 227826 - DNA, 55 bp, Artificial
  Synthetic oligonucleotide
ggtaggctgcgctaaggaatgacagttcaaattgggaaatgcccgggtcgcctca

SEQ ID NO: 227827 - DNA, 55 bp, Artificial
  Synthetic oligonucleotide
ggtaatagccccgctggaaggcaccataagcttcgtcgatcttgcctgtgaaggg

SEQ ID NO: 227828 - DNA, 55 bp, Artificial
  Synthetic oligonucleotide
gggtgtagcggttctggcagctcgcccgttgggttgatgcgtgccgcttggaatt

SEQ ID NO: 227829 - DNA, 55 bp, Artificial
  Synthetic oligonucleotide
tgaatcggcggtcggactccgctgggtttattggatcccaagcgataacggagag

SEQ ID NO: 227830 - DNA, 55 bp, Artificial
  Synthetic oligonucleotide
gggtcacccatcaaggaactgcacgacatgcaacaagtcacatcgacatatcggg

SEQ ID NO: 227831 - DNA, 55 bp, Artificial
  Synthetic oligonucleotide
gggtcaaatgcgactcctcgagatggtgagcacgccccgcggcggaactttgaca

SEQ ID NO: 227832 - DNA, 55 bp, Artificial
  Synthetic oligonucleotide
gtccacttgccgactgggcattgaagccgtcgtaaaatggagtcgctgggtggcc

SEQ ID NO: 227833 - DNA, 55 bp, Artificial
  Synthetic oligonucleotide
gtcaggagccgaatgtgggcgatagtgatccaggcctcggctgatgcgacggact

SEQ ID NO: 227834 - DNA, 49 bp, Artificial
  Synthetic oligonucleotide
accgttcgggttccgacccccatttcggtcctttcgagccgaaggcgga

SEQ ID NO: 227835 - DNA, 55 bp, Artificial
  Synthetic oligonucleotide
gtcagcttctttccgcagttgattatcggcccaattacctatctgcacgaattcc

SEQ ID NO: 227836 - DNA, 55 bp, Artificial
  Synthetic oligonucleotide
gtcagcctgtttgtttcggccgatgtttccttgctaggcgcccgcaaggtttgcg

SEQ ID NO: 227837 - DNA, 55 bp, Artificial
  Synthetic oligonucleotide
gtcacgactggatctatgtcgggtccgtcggcacggggttcaatcgaaccgaggc

SEQ ID NO: 227838 - DNA, 55 bp, Artificial
  Synthetic oligonucleotide
gtcaccgtcgctggacagacaggtgcaactcgacaaaacataccgagcttacgag

SEQ ID NO: 227839 - DNA, 55 bp, Artificial
  Synthetic oligonucleotide
gtcaccattagcacggatagaattccgcacatgacggaaacaattcacgaccgca

SEQ ID NO: 227840 - DNA, 55 bp, Artificial
  Synthetic oligonucleotide
gtattgataggtgagactctaaatcttgacgggctcgcgaagagctatggcaacg

SEQ ID NO: 227841 - DNA, 55 bp, Artificial
  Synthetic oligonucleotide
tctgacccgcaagagtagaattacccttatcccgtgtggattctagtcgcatcct

SEQ ID NO: 227842 - DNA, 55 bp, Artificial
  Synthetic oligonucleotide
gtattctatccgcttgggcacttgcgatcgcaacctgatgatgagcgatgcgacc

SEQ ID NO: 227843 - DNA, 55 bp, Artificial
  Synthetic oligonucleotide
gtagtgcatgtgtaggagatgtgcatcctggagcgtccggggcgtcgaaagcgcg

SEQ ID NO: 227844 - DNA, 55 bp, Artificial
  Synthetic oligonucleotide
gtagtcgcgatgtaggactgcgttggtcaggagttcatgcagcgcgtcttgaggg

SEQ ID NO: 227845 - DNA, 58 bp, Artificial
  Synthetic oligonucleotide
gttcttacgcgcgtggcacctgggtggatgaaccgcatacgtcgaaaggctaccgctc

SEQ ID NO: 227846 - DNA, 55 bp, Artificial
  Synthetic oligonucleotide
gtaggcgttcgcagacaatcagtcaattatcttcagtgaaccaaaatgctcgctg

SEQ ID NO: 227847 - DNA, 55 bp, Artificial
  Synthetic oligonucleotide
tctgaccgtcctcgaccctaagcctttggcggagaacatgcaatcgcggggaagg

SEQ ID NO: 227848 - DNA, 49 bp, Artificial
  Synthetic oligonucleotide
gtacgtcctagaccggtcggccgaaccgcttccttacggttttccggga

SEQ ID NO: 227849 - DNA, 55 bp, Artificial
  Synthetic oligonucleotide
tctgctcaagggcggaaccgccgaggtttccgacgtggaaggtgcgatccgaatg

SEQ ID NO: 227850 - DNA, 55 bp, Artificial
  Synthetic oligonucleotide
gtacctctcgacgcagcgcgatcgtgacatagctgtccgttcgatacggttgaca

SEQ ID NO: 227851 - DNA, 55 bp, Artificial
  Synthetic oligonucleotide
gtaaggctgggcgcctccaaccagccgttgagcgaggttcgatttgatcggttcc

SEQ ID NO: 227852 - DNA, 55 bp, Artificial
  Synthetic oligonucleotide
tctggcgtcgcttatgtagcgctcacatccgatatccttgggcagacgattgatg

SEQ ID NO: 227853 - DNA, 55 bp, Artificial
  Synthetic oligonucleotide
gtaagcggacgtctgtctttgatgcctttgctactcggtagcttgtctgtaccgg

SEQ ID NO: 227854 - DNA, 55 bp, Artificial
  Synthetic oligonucleotide
gtaacgcgttcagcaatgcaccggacacgtattgccgattccgatagagcctccc

SEQ ID NO: 227855 - DNA, 55 bp, Artificial
  Synthetic oligonucleotide
gtaaactacgcgctgaaaggccttacccgcagggtggagtcgctcaacctagcgg

SEQ ID NO: 227856 - DNA, 55 bp, Artificial
  Synthetic oligonucleotide
gggacggtattggaagttcgtccaatattgtgtgttccggtgccaacgcaataaa

SEQ ID NO: 227857 - DNA, 60 bp, Artificial
  Synthetic oligonucleotide
gttgcggcaccggagaaaatacctcgcacaattgaatattggtcgatagcgctatctagg

SEQ ID NO: 227858 - DNA, 55 bp, Artificial
  Synthetic oligonucleotide
ggttttattatgggcgtcaaggaatccaaacaacgggctactacgttgcatgcgc

SEQ ID NO: 227859 - DNA, 55 bp, Artificial
  Synthetic oligonucleotide
ggtttgcggcccgactaaagccgcgcgtttctgcgtgaatgaagcgtgcttcatg

SEQ ID NO: 227860 - DNA, 55 bp, Artificial
  Synthetic oligonucleotide
ggttgtcgcaaaccgatacgaggaatgaaatccgcagtggcgacaatgagggcgc

SEQ ID NO: 227861 - DNA, 55 bp, Artificial
  Synthetic oligonucleotide
gggatacgcaagtcctacgttctatcgcggactagccatcatcgttgcgacgtca

SEQ ID NO: 227862 - DNA, 55 bp, Artificial
  Synthetic oligonucleotide
gggatacgaagtgactaactcgatgcgccatggtctcatcggtctcgggcagttc

SEQ ID NO: 227863 - DNA, 55 bp, Artificial
  Synthetic oligonucleotide
gggagcgacttctagcggatgtccatcgagagcgaaaggcagcgcgtcctacagg

SEQ ID NO: 227864 - DNA, 55 bp, Artificial
  Synthetic oligonucleotide
tgacacgaggcgcaattgtcggcgaaaatctgtttaccgggttctacgagtgccg

SEQ ID NO: 227865 - DNA, 55 bp, Artificial
  Synthetic oligonucleotide
tgaccccagctgtgtcgatccactgggaatgcggtgacttcggtcaactgcacaa

SEQ ID NO: 227866 - DNA, 55 bp, Artificial
  Synthetic oligonucleotide
gggacttttcgtcctctatggccgacaataggcgggcgcccttccgtacagctta

SEQ ID NO: 227867 - DNA, 55 bp, Artificial
  Synthetic oligonucleotide
gggaagcgcctggtatcatgattgtactgcgttgaaattaggtaacgtgctatgg

SEQ ID NO: 227868 - DNA, 60 bp, Artificial
  Synthetic oligonucleotide
accggagcggcgcttgtgtcaagaagcccttttgcgttccaaggcagtggctgtcgctgc

SEQ ID NO: 227869 - DNA, 55 bp, Artificial
  Synthetic oligonucleotide
gggaacctaggagcatttgtggggccgttcgttatagggtatctccgtagtcagc

SEQ ID NO: 227870 - DNA, 55 bp, Artificial
  Synthetic oligonucleotide
ggcttgcgcctcagttgaaggatttcgatagtaagctcgtcgagttgacgaaccg

SEQ ID NO: 227871 - DNA, 53 bp, Artificial
  Synthetic oligonucleotide
ggcttgcgaccacttcagacccttcgaaccgtggttttgccccaagcggtccg

SEQ ID NO: 227872 - DNA, 55 bp, Artificial
  Synthetic oligonucleotide
ggcttccttgtcgtacatcggggcgaggcattggacccgtcgaccattggcgctt

SEQ ID NO: 227873 - DNA, 55 bp, Artificial
  Synthetic oligonucleotide
ggcttacaatcgaacattgttgagtcctacagaaactgaacaacttgtcaagcgg

SEQ ID NO: 227874 - DNA, 55 bp, Artificial
  Synthetic oligonucleotide
ggctgttaccccggtcattcagaacaagcccgtttcgtacgccgatcgcctcatt

SEQ ID NO: 227875 - DNA, 55 bp, Artificial
  Synthetic oligonucleotide
ggctggcacttccatatccacaccgcattgctcttgcgagggactggagccgagg

SEQ ID NO: 227876 - DNA, 55 bp, Artificial
  Synthetic oligonucleotide
ggctggaaggtgttatcgaaagccctgtacgaacgataacgcgtgtagcaccagc

SEQ ID NO: 227877 - DNA, 55 bp, Artificial
  Synthetic oligonucleotide
ggctgatgcggatacccgcctcacgtggcggcagatatttccgaatgatcacggc

SEQ ID NO: 227878 - DNA, 55 bp, Artificial
  Synthetic oligonucleotide
ggctgaacagtcaagcttaacaataagatagcggatgtctcaagctgatacggtt

SEQ ID NO: 227879 - DNA, 59 bp, Artificial
  Synthetic oligonucleotide
accggaaacatatcttcgccgtagtggtgaagcctcgtgtgatggcgtcggcataacca

SEQ ID NO: 227880 - DNA, 55 bp, Artificial
  Synthetic oligonucleotide
tgagccacttcactatcggagcacggatcaccaatgcgcctagcggttctctcgg

SEQ ID NO: 227881 - DNA, 55 bp, Artificial
  Synthetic oligonucleotide
tgagccatcgacggctctataacaagcggtctgctgtctacgatgaagctaccgg

SEQ ID NO: 227882 - DNA, 55 bp, Artificial
  Synthetic oligonucleotide
ggctcaatgtcccgtctcgctggagggaatactcaggcaagcgtgcctttcgccg

SEQ ID NO: 227883 - DNA, 55 bp, Artificial
  Synthetic oligonucleotide
ggcgtgcggctaaacttgttcacaatctatggtcatgtcaaccccaatcgcttgt

SEQ ID NO: 227884 - DNA, 54 bp, Artificial
  Synthetic oligonucleotide
ggcgtgaagtggttcatcggatttcccctcgttcatccgcttgggaaaccaccc

SEQ ID NO: 227885 - DNA, 55 bp, Artificial
  Synthetic oligonucleotide
ggcggtcaagccaggaataagtgaacgacattaccgtccgaactgtaataccgcc

SEQ ID NO: 227886 - DNA, 55 bp, Artificial
  Synthetic oligonucleotide
ggcgggacggactggggaattaccgactattggctgcaagctgaaacgccgacgg

SEQ ID NO: 227887 - DNA, 55 bp, Artificial
  Synthetic oligonucleotide
ggcggatatattccgtcgctatggcgagtcctatcgtgcccagcacacgtcgctg

SEQ ID NO: 227888 - DNA, 55 bp, Artificial
  Synthetic oligonucleotide
gggtatttgaactaccatgcggtgccagacaatctaataccaacgagcgctaatc

SEQ ID NO: 227889 - DNA, 55 bp, Artificial
  Synthetic oligonucleotide
tgaatgaggctataggtcaaccacggacacaattatgcagtctgccggtccgccc

SEQ ID NO: 227890 - DNA, 57 bp, Artificial
  Synthetic oligonucleotide
accgcgacaatcgacatccctcagcggttcaaaaactccaaggcagtgggaccaatc

SEQ ID NO: 227891 - DNA, 55 bp, Artificial
  Synthetic oligonucleotide
ggggttcaaggcttgcctcctgaaagattggcggcgggtacaataatgagcgagc

SEQ ID NO: 227892 - DNA, 55 bp, Artificial
  Synthetic oligonucleotide
ggggtgaggtattgataggtgagactctaaatcttgacgggctcgcgaagagcta

SEQ ID NO: 227893 - DNA, 55 bp, Artificial
  Synthetic oligonucleotide
ggggtctctcgggtcgtaaagatcgatcgtcaagactagcttttgcctggttctc

SEQ ID NO: 227894 - DNA, 55 bp, Artificial
  Synthetic oligonucleotide
tgacaaagggcataattccgggcgcaaattctcgggaggaatgatcgttgacgtt

SEQ ID NO: 227895 - DNA, 55 bp, Artificial
  Synthetic oligonucleotide
ggggctgcattgtcggcacatccttttccgtgctcttcagcaaccctgaaattat

SEQ ID NO: 227896 - DNA, 55 bp, Artificial
  Synthetic oligonucleotide
tgacaccaaacaccgtatcggattcaagatagggatcgtcgccgacaaacgtgtg

SEQ ID NO: 227897 - DNA, 55 bp, Artificial
  Synthetic oligonucleotide
ggggctgactatttggcagcacggaacctaccacaagacacccttgtggcctgcc

SEQ ID NO: 227898 - DNA, 55 bp, Artificial
  Synthetic oligonucleotide
ggggccgcgacaatcggtactgtggtaggccaacgacttgctagtgtggttcctc

SEQ ID NO: 227899 - DNA, 55 bp, Artificial
  Synthetic oligonucleotide
ggggcccacggcaagtccgggccgttgtacattcatcgatattgtctcctcggta

SEQ ID NO: 227900 - DNA, 55 bp, Artificial
  Synthetic oligonucleotide
ggggagattttattgaaaacgtaatctcgatacaagcgacgatgagagcaggtgc

SEQ ID NO: 227901 - DNA, 59 bp, Artificial
  Synthetic oligonucleotide
taaatgcggtcccaggcctcgttcatgaccgaacgatcctcacccttgatgaaacgcac

SEQ ID NO: 227902 - DNA, 55 bp, Artificial
  Synthetic oligonucleotide
gggctggtgggatagtctgtcctgcgcgttccggagtactctcgaagtgtcgtcc

SEQ ID NO: 227903 - DNA, 55 bp, Artificial
  Synthetic oligonucleotide
gggcgtcatagacaaacccagctcacttcacgggctccgcgacatcactgatacc

SEQ ID NO: 227904 - DNA, 55 bp, Artificial
  Synthetic oligonucleotide
gggcggacgatgggaccaggttcacacgactgcggattacctcgatagcgggaca

SEQ ID NO: 227905 - DNA, 55 bp, Artificial
  Synthetic oligonucleotide
gggcgcgggtatccctacaggaacatgtccgaagaccgccaatgatccattgggc

SEQ ID NO: 227906 - DNA, 55 bp, Artificial
  Synthetic oligonucleotide
gggcctatcggctctctcgcgcttacgtctggcactgccttcccgcattcatgga

SEQ ID NO: 227907 - DNA, 55 bp, Artificial
  Synthetic oligonucleotide
gggccaacgtacggacctgcgtttccagcgcaattgtgcccttgtgaaaggcgag

SEQ ID NO: 227908 - DNA, 55 bp, Artificial
  Synthetic oligonucleotide
gggcatccatacgggcttcagaagcctaattgagggcctcccacgctttccgacc

SEQ ID NO: 227909 - DNA, 55 bp, Artificial
  Synthetic oligonucleotide
gggcactgatgtcccggtttcgtcgccgcgtttcactgaagattttgctcgtccc

SEQ ID NO: 227910 - DNA, 55 bp, Artificial
  Synthetic oligonucleotide
gggcactgacgccgacggaacttttgcgctccgcaccggttggattctcctcaca

SEQ ID NO: 227911 - DNA, 55 bp, Artificial
  Synthetic oligonucleotide
gggcacgcgccactgaatgggtgaaccggaacccggacctctggatcaaggaata

SEQ ID NO: 227912 - DNA, 58 bp, Artificial
  Synthetic oligonucleotide
taagcgccgaaaccgatataacgccgcacgttgtccttctgtcggtaatgctggcgat

SEQ ID NO: 227913 - DNA, 55 bp, Artificial
  Synthetic oligonucleotide
gggcaatcgggccgaatgcgtcatcgcgtatggttaattgccctcggcaggacca

SEQ ID NO: 227914 - DNA, 55 bp, Artificial
  Synthetic oligonucleotide
gggatcgagaggcctgcctttggagcggtcaagataatccggacttgcgacgatg

SEQ ID NO: 227915 - DNA, 55 bp, Artificial
  Synthetic oligonucleotide
gggatccgtaagaccgcgtgctacccgttccgcgatatccggaatgacctcaaca

SEQ ID NO: 227916 - DNA, 55 bp, Artificial
  Synthetic oligonucleotide
gggatcaaacccatatgcgctaacattggcattggactagcggtcacccgcccct

SEQ ID NO: 227917 - DNA, 54 bp, Artificial
  Synthetic oligonucleotide
gggatcaaaagcccctctaaccgttattatccgcgattctccggtgccgaccaa

SEQ ID NO: 227918 - DNA, 55 bp, Artificial
  Synthetic oligonucleotide
tcacagtcggcagcatacagccgtttgctacattcatcgtgcgtcggatgccaac

SEQ ID NO: 227919 - DNA, 52 bp, Artificial
  Synthetic oligonucleotide
tattttcgggtcgacgaggttcggagtcgtgggtttgtttgacatgcccggt

SEQ ID NO: 227920 - DNA, 55 bp, Artificial
  Synthetic oligonucleotide
tattgaggcagatcgattcaaaggctctctgttgatttggagggtcggatggatc

SEQ ID NO: 227921 - DNA, 55 bp, Artificial
  Synthetic oligonucleotide
tattcaggcaggtggtttgtgcttcagatcctttcaggcgaagaatctatcggcc

SEQ ID NO: 227922 - DNA, 55 bp, Artificial
  Synthetic oligonucleotide
tcggagtaacgctcatggaacgtacaccgctgtttgtaggcctgacccgggaggt

SEQ ID NO: 227923 - DNA, 60 bp, Artificial
  Synthetic oligonucleotide
taattgccagagagttcggcatcccgtgtgtggttggggcctttagcgcaactcatgttc

SEQ ID NO: 227924 - DNA, 55 bp, Artificial
  Synthetic oligonucleotide
tcggccgctgaagatatgagctcccaacttcgtcttcgcgcgaacgatcatcatt

SEQ ID NO: 227925 - DNA, 55 bp, Artificial
  Synthetic oligonucleotide
tcgggccgagaccctctctgtcagcgagttctacaagggtcggtcgccgtacttt

SEQ ID NO: 227926 - DNA, 55 bp, Artificial
  Synthetic oligonucleotide
tcggtcaaaacaaaagttccagccgaaacctatagtcttgccttgactgcgcacg

SEQ ID NO: 227927 - DNA, 55 bp, Artificial
  Synthetic oligonucleotide
tatcgcagccgccggcttcccgttcccattattcttggcttggtgcgccgcgatc

SEQ ID NO: 227928 - DNA, 55 bp, Artificial
  Synthetic oligonucleotide
tatcctctgtctcggatagcttgcccaacttgaggagcgaatgccatgcgggact

SEQ ID NO: 227929 - DNA, 55 bp, Artificial
  Synthetic oligonucleotide
tagttccgtggatgtgagcgtgtggtgagggtcgcgcgtcattcaccgagcccca

SEQ ID NO: 227930 - DNA, 55 bp, Artificial
  Synthetic oligonucleotide
tagtctcctgtttcccgctccgttgagcataggcccacataagcattggattatg

SEQ ID NO: 227931 - DNA, 55 bp, Artificial
  Synthetic oligonucleotide
tagcgtcctctcgacgattcgaccgctcgggtaagtatagcagaggggtgatcga

SEQ ID NO: 227932 - DNA, 55 bp, Artificial
  Synthetic oligonucleotide
tagcgaagcttcaaccccttgcctaagaccgattatctctggagcaataagcaac

SEQ ID NO: 227933 - DNA, 55 bp, Artificial
  Synthetic oligonucleotide
tagatatgatcgcgtggattggacggctcgtgaatgagcgacggcataccgtgat

SEQ ID NO: 227934 - DNA, 59 bp, Artificial
  Synthetic oligonucleotide
tacaatccacgcacggcaaaggggtttctccagcagcatacgaactcgcgaaaggaaca

SEQ ID NO: 227935 - DNA, 55 bp, Artificial
  Synthetic oligonucleotide
tagaagttctgcggatttgaaaagttcaactgcgaattcgaatggctccggacat

SEQ ID NO: 227936 - DNA, 55 bp, Artificial
  Synthetic oligonucleotide
tacttaaggtccaattcactcgaccctcgggagactgacatgagagcgaccctgt

SEQ ID NO: 227937 - DNA, 55 bp, Artificial
  Synthetic oligonucleotide
tactcgatttatcgcgaattttgcgagggatcggatagacctgcaaatgcgaccg

SEQ ID NO: 227938 - DNA, 55 bp, Artificial
  Synthetic oligonucleotide
tactaccctcgaaatgcttccgaaaggatgcacggcgctcttatcacagcgcgtg

SEQ ID NO: 227939 - DNA, 55 bp, Artificial
  Synthetic oligonucleotide
tcgtagcaatgaggcgtgctggtttcagtagagatacgattcatcttattcgagc

SEQ ID NO: 227940 - DNA, 55 bp, Artificial
  Synthetic oligonucleotide
tcgtatggcggacggaaggcgataaacggcaacaacggtacaaagccgaaagcaa

SEQ ID NO: 227941 - DNA, 55 bp, Artificial
  Synthetic oligonucleotide
tacattgcgcttagcgtctccctcgatgttttaatccggaaccacggcccatgtc

SEQ ID NO: 227942 - DNA, 55 bp, Artificial
  Synthetic oligonucleotide
tacagaggcgaacgtgtgaaccgcgctgtgccttccgttatcccatcgaataatc

SEQ ID NO: 227943 - DNA, 55 bp, Artificial
  Synthetic oligonucleotide
tcgtcgtaatatcaagtgacttacccggtacgcgtatacgccactctaccggcat

SEQ ID NO: 227944 - DNA, 55 bp, Artificial
  Synthetic oligonucleotide
taatccgcacccaggccgttactcatgttcggattgaaagggtagtagatcgttg

SEQ ID NO: 227945 - DNA, 60 bp, Artificial
  Synthetic oligonucleotide
taccatcgccgccacgcgctgcctgtcgtcgtcagatagggttggcgtctgactattcag

SEQ ID NO: 227946 - DNA, 55 bp, Artificial
  Synthetic oligonucleotide
tcgagtccgactctcagtccctaaggcgacgtccacgcataagtctgtgaacggc

SEQ ID NO: 227947 - DNA, 55 bp, Artificial
  Synthetic oligonucleotide
tcgaggaagcattgcccgtggttcttcggggtttgtcgacggtgcggctgggaga

SEQ ID NO: 227948 - DNA, 55 bp, Artificial
  Synthetic oligonucleotide
tcgagccgcctattcgcgcctcacccgtctaattacgctcggcaaatcgcggggt

SEQ ID NO: 227949 - DNA, 55 bp, Artificial
  Synthetic oligonucleotide
tcgacgctgcacggggtcacgagcattgtgcagtgtttgtttccgttttgtgcga

SEQ ID NO: 227950 - DNA, 55 bp, Artificial
  Synthetic oligonucleotide
tcgacaagtcgaccgctcgtgttcgtaccggagcgatttcggccatgggttcgtc

SEQ ID NO: 227951 - DNA, 55 bp, Artificial
  Synthetic oligonucleotide
tcgaacttctcgagggacgtcatagactagaggggttcacttgcggcaacccgcc

SEQ ID NO: 227952 - DNA, 55 bp, Artificial
  Synthetic oligonucleotide
tcgatcatacctctccagccatgattcgcatagcgcgagcctgtccaatcctcac

SEQ ID NO: 227953 - DNA, 55 bp, Artificial
  Synthetic oligonucleotide
tcgaaacgctttcgaccgcaaagcgaatgtgaaatggggcaagtgcgatggaacg

SEQ ID NO: 227954 - DNA, 55 bp, Artificial
  Synthetic oligonucleotide
tcgcagctgacggggcatgctttcacgaatacgttaaatgttgctgaaacggagc

SEQ ID NO: 227955 - DNA, 53 bp, Artificial
  Synthetic oligonucleotide
tccttccacggtcggccaggttaaaattgagctcatagtttcggggatttaac

SEQ ID NO: 227956 - DNA, 55 bp, Artificial
  Synthetic oligonucleotide
tacgcagtaaaccgctcctcggaacgagacgcggctccagcgtgttaaaggaacc

SEQ ID NO: 227957 - DNA, 55 bp, Artificial
  Synthetic oligonucleotide
tcctcgaatgagacgcgcgctgttttctcaacatattcgacacgcacgagcgaag

SEQ ID NO: 227958 - DNA, 55 bp, Artificial
  Synthetic oligonucleotide
tcctaaaccctttgttccacttttctaagatggtgctcccgtgtggcgcgcccga

SEQ ID NO: 227959 - DNA, 55 bp, Artificial
  Synthetic oligonucleotide
tccggctgtgatcgagattatgtgcaatcggcccggagaaatctggatcgagagc

SEQ ID NO: 227960 - DNA, 55 bp, Artificial
  Synthetic oligonucleotide
tccggcccggagactatgagcgggctgaggtcgcgttgccggatatcctggagag

SEQ ID NO: 227961 - DNA, 55 bp, Artificial
  Synthetic oligonucleotide
tcgcgaagggtcatagcgccgttccctcatcgcttctcgcaagtccggggatcgt

SEQ ID NO: 227962 - DNA, 55 bp, Artificial
  Synthetic oligonucleotide
tccgctgtcgaaaggtattgatccatcttgcgcatattgcacctattgtctccgt

SEQ ID NO: 227963 - DNA, 55 bp, Artificial
  Synthetic oligonucleotide
tccgcgaacacttccggccagttgcgccaatatgtctggaggaccgtgcaccgga

SEQ ID NO: 227964 - DNA, 55 bp, Artificial
  Synthetic oligonucleotide
tcgcgatcgcgtcaagccttgtctgcaaccgtgcgaggaacgcactctggatcgg

SEQ ID NO: 227965 - DNA, 55 bp, Artificial
  Synthetic oligonucleotide
tcgcgccaagtacaagagacctggcgcgattctgatgaaattaagcctgggcgga

SEQ ID NO: 227966 - DNA, 55 bp, Artificial
  Synthetic oligonucleotide
tcccgtggcgcctcccatggaaagtgaagatgcctcacaatcggccgagccggat

SEQ ID NO: 227967 - DNA, 53 bp, Artificial
  Synthetic oligonucleotide
agccgaacaggcaaagggtcttggcgggcgtctacgctcgtttttcgatggtt

SEQ ID NO: 227968 - DNA, 60 bp, Artificial
  Synthetic oligonucleotide
acccgttgtccaggcaattgttattctagcgggtgcagccatgatcctgagtaatttcgc

SEQ ID NO: 227969 - DNA, 55 bp, Artificial
  Synthetic oligonucleotide
tccccaacgctgcggttatatagggccatatttcccggacaataaggtgttacac

SEQ ID NO: 227970 - DNA, 55 bp, Artificial
  Synthetic oligonucleotide
tcgcgcttattgctcatagacgatttcagcgaataggtggttgagccaattagct

SEQ ID NO: 227971 - DNA, 55 bp, Artificial
  Synthetic oligonucleotide
tcatgcatcggcattatagcaacgtggtctgggtcggtaatgggtgcgtacactg

SEQ ID NO: 227972 - DNA, 55 bp, Artificial
  Synthetic oligonucleotide
tcatgacgacacgtcgagcgtcgataccaaggaactgctcgtcacggcaaacggc

SEQ ID NO: 227973 - DNA, 55 bp, Artificial
  Synthetic oligonucleotide
tcagtaacgaatgttgagacaacctttcgaattatggttaatgatcggttgagag

SEQ ID NO: 227974 - DNA, 55 bp, Artificial
  Synthetic oligonucleotide
tcacagtgattgccgcacgccttcgcagacgttgagtccgttggaagacgcgggg

SEQ ID NO: 227975 - DNA, 55 bp, Artificial
  Synthetic oligonucleotide
gtgcttttaactaggttctcagacgatgagtttcaggagtacacggctacgacgg

SEQ ID NO: 227976 - DNA, 55 bp, Artificial
  Synthetic oligonucleotide
gtgctttcggatgccgttcggacctggtatcggtataatcacgccgcgccaacgg

SEQ ID NO: 227977 - DNA, 55 bp, Artificial
  Synthetic oligonucleotide
gtgcttacgccgttttccgtcgcggatgtatcgctcattctgtcgagattttccc

SEQ ID NO: 227978 - DNA, 55 bp, Artificial
  Synthetic oligonucleotide
gtgctgtcttccaatggtccgtccgagagaccttctaaggcgaagtccgaatggg

SEQ ID NO: 227979 - DNA, 60 bp, Artificial
  Synthetic oligonucleotide
cgtcagtcttattcatgttggcggcatgtttcaatagatcgagcttgacatacgaactag

SEQ ID NO: 227980 - DNA, 55 bp, Artificial
  Synthetic oligonucleotide
gtgcgacacactcggtggctcgactgtcctcgaagcgataggctaccatcggtgg

SEQ ID NO: 227981 - DNA, 55 bp, Artificial
  Synthetic oligonucleotide
gtgccgctggggatcaagactaaccggattgatgatctctggcccgacggatttg

SEQ ID NO: 227982 - DNA, 55 bp, Artificial
  Synthetic oligonucleotide
gtgccatcacgcgtcccaagaaacgatgtcagccggcaaacaaccttgcaaaacc

SEQ ID NO: 227983 - DNA, 55 bp, Artificial
  Synthetic oligonucleotide
gtgcaattgcctcttgactccagtagaatgttggcgaagtaataagtcaagacat

SEQ ID NO: 227984 - DNA, 55 bp, Artificial
  Synthetic oligonucleotide
gtgcaacgtaggccctatttggctgcagcagctcgtggggcgggcgtccggagct

SEQ ID NO: 227985 - DNA, 55 bp, Artificial
  Synthetic oligonucleotide
gtgatataaatcctcggatcatagatcctacgtcacgaccacttcgattgaacgg

SEQ ID NO: 227986 - DNA, 55 bp, Artificial
  Synthetic oligonucleotide
gtgaaccctagaggcacatccgcaagactcgtataccagtttatcttatccccat

SEQ ID NO: 227987 - DNA, 54 bp, Artificial
  Synthetic oligonucleotide
gtgaaagtaccggattcgggccgacgactcgctccgtaatgaagatccggtttc

SEQ ID NO: 227988 - DNA, 55 bp, Artificial
  Synthetic oligonucleotide
gtcttgatgaaggagaactatttaacatgtatcgagaagtcccttccatcaccgc

SEQ ID NO: 227989 - DNA, 55 bp, Artificial
  Synthetic oligonucleotide
gtctgcggccgttccaactcacgaaaccggtttgtcacgacatatcctaaaacgc

SEQ ID NO: 227990 - DNA, 56 bp, Artificial
  Synthetic oligonucleotide
ccctcgtaactcgaggagaatcggcaacggagttagcccgaattcgcagcaagtag

SEQ ID NO: 227991 - DNA, 55 bp, Artificial
  Synthetic oligonucleotide
gtctacacataattccgtgcgcttccttggggacgacagtggattccatatcccg

SEQ ID NO: 227992 - DNA, 55 bp, Artificial
  Synthetic oligonucleotide
gtcggctatccaaagaccatcagggtcgatcaagggacggagttcgtatcccgcg

SEQ ID NO: 227993 - DNA, 55 bp, Artificial
  Synthetic oligonucleotide
gtcggcctttacatgtcgccacctgatcgggcagtcgtgctatgcgtggatgaga

SEQ ID NO: 227994 - DNA, 55 bp, Artificial
  Synthetic oligonucleotide
gtcgctctgtcaccccatcatgccggcgcttctcgcgaatccgtcatgacaagcg

SEQ ID NO: 227995 - DNA, 55 bp, Artificial
  Synthetic oligonucleotide
gtcgcgaacgaacccctccacgctgagcatataagcacaagcaaagacaggtcgg

SEQ ID NO: 227996 - DNA, 55 bp, Artificial
  Synthetic oligonucleotide
gtcgcgaaagggcaaataggcttcgttggtcgtgacttcgcccacgggcgtctcc

SEQ ID NO: 227997 - DNA, 55 bp, Artificial
  Synthetic oligonucleotide
gtcgagcgatggtagccgtacgcagggctttagaggacacgaagggcgagtactc

SEQ ID NO: 227998 - DNA, 55 bp, Artificial
  Synthetic oligonucleotide
gtccttcttctcataatgtatcgaacctgcccggagtggcaagagccccattatc

SEQ ID NO: 227999 - DNA, 55 bp, Artificial
  Synthetic oligonucleotide
gtccgtttccttctatgattgcgaaaggccggcagccctcgtcagatatccgtgc

SEQ ID NO: 228000 - DNA, 55 bp, Artificial
  Synthetic oligonucleotide
gtccgcgtcctatgttcgtcttgccgttccccgctcgaacagatgcgctgtgcct

SEQ ID NO: 228001 - DNA, 56 bp, Artificial
  Synthetic oligonucleotide
ccctccgattcctccattatttcaatcgtcaaaggccctctcacggcttccttctg

SEQ ID NO: 228002 - DNA, 54 bp, Artificial
  Synthetic oligonucleotide
gtcccggattggaatttggcgagccggcaaatcccgtctaggctttacgggaga

SEQ ID NO: 228003 - DNA, 55 bp, Artificial
  Synthetic oligonucleotide
taatccaggcggcatgcgtctcgtggcaatgtcgctgtagcactttggcccgccg

SEQ ID NO: 228004 - DNA, 55 bp, Artificial
  Synthetic oligonucleotide
taaccggttgaaatccctctgcgtaacttcgcaaaccggccgtagcatcctgccg

SEQ ID NO: 228005 - DNA, 55 bp, Artificial
  Synthetic oligonucleotide
gttttgcgtgatcgctctataggacaagtcgatcgtaaagggcaatgtagcgcgg

SEQ ID NO: 228006 - DNA, 53 bp, Artificial
  Synthetic oligonucleotide
gttttcgcggtggaactcacctatgtggggttcggcaattccggattccgtcg

SEQ ID NO: 228007 - DNA, 51 bp, Artificial
  Synthetic oligonucleotide
tcgttaaacttcggtttccctcttgtgtattcggaaatcggtgtttattta

SEQ ID NO: 228008 - DNA, 55 bp, Artificial
  Synthetic oligonucleotide
gtttgcagattcacgctcatgtgctagggtctgtcatgccgtttcgacccacccc

SEQ ID NO: 228009 - DNA, 55 bp, Artificial
  Synthetic oligonucleotide
gtttcgcttcgatatctcgcgtctcatccgactgacggacgcgtccgcacatcca

SEQ ID NO: 228010 - DNA, 55 bp, Artificial
  Synthetic oligonucleotide
gtttcctcaaatcgatgttctctacgactatcgcggatttctcgagggaggagct

SEQ ID NO: 228011 - DNA, 51 bp, Artificial
  Synthetic oligonucleotide
gtttaactcgaaaacaaccccgagcaccccttggcggacgttcttagacca

SEQ ID NO: 228012 - DNA, 56 bp, Artificial
  Synthetic oligonucleotide
ccccggatgggacaacggaggttcacaaaagcgaggcgggtgaatgagtcaggcga

SEQ ID NO: 228013 - DNA, 54 bp, Artificial
  Synthetic oligonucleotide
gttggttttaggagggattctccaaggaagtgtccggtgattaatatcgtacca

SEQ ID NO: 228014 - DNA, 55 bp, Artificial
  Synthetic oligonucleotide
gttggagcggtaatcggaaagaacgcatgcaaatggcttctccttgacaagcgag

SEQ ID NO: 228015 - DNA, 55 bp, Artificial
  Synthetic oligonucleotide
gttgcggcggttccgttttcgatgggaagcgacaaagacaatggcgccctacgag

SEQ ID NO: 228016 - DNA, 55 bp, Artificial
  Synthetic oligonucleotide
tctagacggttcgtttggattgtagtcggggactgatgccatggcgaggatttcc

SEQ ID NO: 228017 - DNA, 55 bp, Artificial
  Synthetic oligonucleotide
gttcgcagggtctgcgcttgactgtaaggataacggtgcgagcgttcataatgcc

SEQ ID NO: 228018 - DNA, 55 bp, Artificial
  Synthetic oligonucleotide
gttcatttgaggtaaactatcggctcccggactaccatttgcatcgggtggaccg

SEQ ID NO: 228019 - DNA, 55 bp, Artificial
  Synthetic oligonucleotide
gttcactcctcatgggatctaaagccgaaggggtgtctctcacccgccccgatct

SEQ ID NO: 228020 - DNA, 55 bp, Artificial
  Synthetic oligonucleotide
gttaagtcccgtctgactatagaaccgcaactttccaatcatggccagttggatt

SEQ ID NO: 228021 - DNA, 55 bp, Artificial
  Synthetic oligonucleotide
gtgtttacgtcttatgccgagatgacgtacaatattcgaagtaagtctgcgtacc

SEQ ID NO: 228022 - DNA, 55 bp, Artificial
  Synthetic oligonucleotide
gtgttagcactcccttgcggtgagtgctagcgacgagcatttagggatggctccg

SEQ ID NO: 228023 - DNA, 60 bp, Artificial
  Synthetic oligonucleotide
ctcgattcaattttccagatcggtcgagttcatgagataagctctcaaagaaggcttgtg

SEQ ID NO: 228024 - DNA, 55 bp, Artificial
  Synthetic oligonucleotide
gtgtcatggtgtatggatcgatccgggttcgaaaatcgggcggcacatttgagcg

SEQ ID NO: 228025 - DNA, 55 bp, Artificial
  Synthetic oligonucleotide
gtgtaacagtcgcgtgataaagcgataattgacgactgatgcactggcgcccgat

SEQ ID NO: 228026 - DNA, 55 bp, Artificial
  Synthetic oligonucleotide
tctccctacctcatgcagaccgcgatatgaagcttccgcgagcggagacgcggca

SEQ ID NO: 228027 - DNA, 54 bp, Artificial
  Synthetic oligonucleotide
gtggggattacctattcccagggcttccggacgggtggcgcgagttacgatgcg

SEQ ID NO: 228028 - DNA, 55 bp, Artificial
  Synthetic oligonucleotide
gtggcagccatgatcgattggggcgataaatcggcgcattatacaacctggaacg

SEQ ID NO: 228029 - DNA, 55 bp, Artificial
  Synthetic oligonucleotide
gtggatatgggcatctctccgccgtcatccctgtagcctcaggcttcacccgagg

SEQ ID NO: 228030 - DNA, 55 bp, Artificial
  Synthetic oligonucleotide
gtggacggtatttctcggggtcgtgcattggggcctgcagcttcgccggatgagt

SEQ ID NO: 228031 - DNA, 55 bp, Artificial
  Synthetic oligonucleotide
gtggaccacgttggtttggcagctacctaagtaacggagaacaacctcacagcct

SEQ ID NO: 228032 - DNA, 55 bp, Artificial
  Synthetic oligonucleotide
gcgcgaaacctgccggcacggtaccttttcttatcaggtagattgggttggccac

SEQ ID NO: 228033 - DNA, 55 bp, Artificial
  Synthetic oligonucleotide
gcgccctatgacgatggcgggacactccgcggtcttcgaaacacgcacggtccga

SEQ ID NO: 228034 - DNA, 57 bp, Artificial
  Synthetic oligonucleotide
ccccaaccgtatgggtcagcctcgtccaatggtctggagcaacgacaacagaaggtc

SEQ ID NO: 228035 - DNA, 55 bp, Artificial
  Synthetic oligonucleotide
gcgcatttggtgagatcgttgcgtggaatgagcaatatcgcgacgtcagaataga

SEQ ID NO: 228036 - DNA, 55 bp, Artificial
  Synthetic oligonucleotide
gcgcatctgttcgagcggggaacggcaagacgaacataggacgcggacgacatgc

SEQ ID NO: 228037 - DNA, 55 bp, Artificial
  Synthetic oligonucleotide
gcgcatcgagaaaaccggcgttcctaaatgaatgtgcaaggcatgccgagaatcc

SEQ ID NO: 228038 - DNA, 55 bp, Artificial
  Synthetic oligonucleotide
tgctttcgatgaggagccttgggccgagccttttcccctgaaaagaccgatccac

SEQ ID NO: 228039 - DNA, 55 bp, Artificial
  Synthetic oligonucleotide
gcgatttgcgccggggcctagtgcagaaaggacacagttgataaccgctttatgg

SEQ ID NO: 228040 - DNA, 55 bp, Artificial
  Synthetic oligonucleotide
gcgatggaggagacaggccaaaacgcgggaacgcgctgagaggactaacaaacgc

SEQ ID NO: 228041 - DNA, 55 bp, Artificial
  Synthetic oligonucleotide
gcgatgccactccgacaggtcttgggcggggatgcccatgagactgaaggtgagt

SEQ ID NO: 228042 - DNA, 55 bp, Artificial
  Synthetic oligonucleotide
gcgacgtgctgattttagctgaagacgttaaatgtggtctccgcgagagtcgagc

SEQ ID NO: 228043 - DNA, 55 bp, Artificial
  Synthetic oligonucleotide
tggaaccaacctccctgcggaacgttgccgtagcacccgtgcagagcgatgcaga

SEQ ID NO: 228044 - DNA, 55 bp, Artificial
  Synthetic oligonucleotide
gcgacattcctgatcatgcgcttgttgtttccgatatccacgcgtcccatgacgt

SEQ ID NO: 228045 - DNA, 59 bp, Artificial
  Synthetic oligonucleotide
cccaccataccgaacggatattccagcagaggagctcaagaacgtactcaacagtatct

SEQ ID NO: 228046 - DNA, 55 bp, Artificial
  Synthetic oligonucleotide
gcgaatgatatccgatctttgcccatttgattctgatacggggcgatcgtgacca

SEQ ID NO: 228047 - DNA, 55 bp, Artificial
  Synthetic oligonucleotide
gcgaagtcatagcatctagtgaccgcagcaaacttcaggtgagggcgtttagctc

SEQ ID NO: 228048 - DNA, 55 bp, Artificial
  Synthetic oligonucleotide
gcgaacctcctatggctatgacgtctcggcggcccatagtatgctccacggggca

SEQ ID NO: 228049 - DNA, 55 bp, Artificial
  Synthetic oligonucleotide
gccttgtctttccacgagatcggcttccgctggtcacagctcgttgttacgggcc

SEQ ID NO: 228050 - DNA, 55 bp, Artificial
  Synthetic oligonucleotide
gccttccggtagacattattcgcgtcttggtggtgacgggtaacatgaagtgccc

SEQ ID NO: 228051 - DNA, 55 bp, Artificial
  Synthetic oligonucleotide
gcctgtgcggccgcttagcattcatgagcgccccgaaaccacatcggactttcgg

SEQ ID NO: 228052 - DNA, 55 bp, Artificial
  Synthetic oligonucleotide
gcctggtgacgtcattatcacagggacaccatcaaacgtcggaattgtgacgcag

SEQ ID NO: 228053 - DNA, 55 bp, Artificial
  Synthetic oligonucleotide
gcctgcgacgaagggataaccttccttgtgcacggggacgattacgttgcgtacg

SEQ ID NO: 228054 - DNA, 55 bp, Artificial
  Synthetic oligonucleotide
gcctcttaactaagtcactgattccggatgggtagcacgccacggcactctgcta

SEQ ID NO: 228055 - DNA, 55 bp, Artificial
  Synthetic oligonucleotide
gcctcggtcaacggttcgccaggttgcgggtgtccacagcaactgttggaaagaa

SEQ ID NO: 228056 - DNA, 60 bp, Artificial
  Synthetic oligonucleotide
ctgcacttcacatcctcatcaagttagctcagccgaggggccggcatcgtttggttccac

SEQ ID NO: 228057 - DNA, 55 bp, Artificial
  Synthetic oligonucleotide
gcctcggcagcgaaaatggaacagtcaccatcgaatggaaacacgacgatggacg

SEQ ID NO: 228058 - DNA, 55 bp, Artificial
  Synthetic oligonucleotide
gcctccgttaatgaaggttcgccttacaatatggatattccgttgaccgttgcca

SEQ ID NO: 228059 - DNA, 55 bp, Artificial
  Synthetic oligonucleotide
gcctaaggcgcccggtctgccgttcatcacatcaggcgacgcatcgagccaaaca

SEQ ID NO: 228060 - DNA, 55 bp, Artificial
  Synthetic oligonucleotide
gcgtacattcgcgatgcaagatcgataccctcgcgcaaagacgcgtgaaacgggt

SEQ ID NO: 228061 - DNA, 55 bp, Artificial
  Synthetic oligonucleotide
gcggtggaggccgttccatcattgtcccttgcgagaacctccaggagcgcgaaac

SEQ ID NO: 228062 - DNA, 55 bp, Artificial
  Synthetic oligonucleotide
gcgggtgaaatagacatgggcgatggttagtagcaccaccagtgcgattttcgca

SEQ ID NO: 228063 - DNA, 55 bp, Artificial
  Synthetic oligonucleotide
gcgggtatcaatagggtttgttacgctccacccgaaggcaaattcggatgatcac

SEQ ID NO: 228064 - DNA, 53 bp, Artificial
  Synthetic oligonucleotide
gcggcctccctcttccggtaccgcgtgcgataaaccacttacggtaaggtgcc

SEQ ID NO: 228065 - DNA, 55 bp, Artificial
  Synthetic oligonucleotide
gcggatttgcgggttaaccccgtgcggatcgtttagactggagcgatatgagacc

SEQ ID NO: 228066 - DNA, 55 bp, Artificial
  Synthetic oligonucleotide
gcggagcgctttgcctctaaccacgcgccacgaacactaggcgtcataagacgcg

SEQ ID NO: 228067 - DNA, 60 bp, Artificial
  Synthetic oligonucleotide
ctgctcgttccgatccttgtcgtcgctcttagtgtccggctaacatcaccaggaccgatc

SEQ ID NO: 228068 - DNA, 55 bp, Artificial
  Synthetic oligonucleotide
gcggagcgctgagtttcatcgatgttcgtccgaccgagatgcatcagatcaggcc

SEQ ID NO: 228069 - DNA, 55 bp, Artificial
  Synthetic oligonucleotide
gcggactgacatcgcccagttgtgggagttgagagacgatcgctatgcagcgatg

SEQ ID NO: 228070 - DNA, 55 bp, Artificial
  Synthetic oligonucleotide
tgcgcaacatcgtcgggagctccttggggcatagtcgatctcgcgccatagtggg

SEQ ID NO: 228071 - DNA, 55 bp, Artificial
  Synthetic oligonucleotide
gcggacacaggacatcctgaccaatacggataagcctatcaaggaaattgccgcc

SEQ ID NO: 228072 - DNA, 55 bp, Artificial
  Synthetic oligonucleotide
gcggaacctgtcgcgttggtcatcgctcagaggtatgtcttcatgaggtggatcg

SEQ ID NO: 228073 - DNA, 55 bp, Artificial
  Synthetic oligonucleotide
tgcgcgtgcaaccgaaaggccgagcaaccgcgtaagcacccggcctgctttcgca

SEQ ID NO: 228074 - DNA, 55 bp, Artificial
  Synthetic oligonucleotide
tgcggccgatcagagtggcagcacctggcgaaggagcggagcctcctgcaccagt

SEQ ID NO: 228075 - DNA, 55 bp, Artificial
  Synthetic oligonucleotide
gcgctttcgcaaaaccggcttgttctctctcgcctcgcatttggcgacgtcgatg

SEQ ID NO: 228076 - DNA, 55 bp, Artificial
  Synthetic oligonucleotide
gcgctgtcacccctatagctcgaatggacaacaatagctggatgtatgacgatgg

SEQ ID NO: 228077 - DNA, 55 bp, Artificial
  Synthetic oligonucleotide
gcgctgccctacggatagtctctgttattacatttccgttttgccgatgggccac

SEQ ID NO: 228078 - DNA, 59 bp, Artificial
  Synthetic oligonucleotide
agcccggggacataactgacgggtgttcggggagatggctgacacgtcatactggcatg

SEQ ID NO: 228079 - DNA, 60 bp, Artificial
  Synthetic oligonucleotide
ctgtttgcgggaggactacagctgcgccgattgaaatccgatcgaggctgaaagcacgcg

SEQ ID NO: 228080 - DNA, 55 bp, Artificial
  Synthetic oligonucleotide
gcgctatggaccggccaacgtaagggagaccttctgcggctctcctggtgcgatt

SEQ ID NO: 228081 - DNA, 55 bp, Artificial
  Synthetic oligonucleotide
gcgcggttttcgggaaatcggatgcgtaagctgaaatcaagagcaacggaattgc

SEQ ID NO: 228082 - DNA, 55 bp, Artificial
  Synthetic oligonucleotide
gcgcggttcaataaacagccgtcaggcaaaccaagcggaaagtgagggccgtgcg

SEQ ID NO: 228083 - DNA, 54 bp, Artificial
  Synthetic oligonucleotide
gcgcggtcaagttcgtgttaagttaggtaaaacttggccggtcgagcgtgtctg

SEQ ID NO: 228084 - DNA, 55 bp, Artificial
  Synthetic oligonucleotide
tgcgttgggccgcgaacctcgttcgctgcgtgattatattcgggagttggcacga

SEQ ID NO: 228085 - DNA, 55 bp, Artificial
  Synthetic oligonucleotide
gcgcgggattaacagcggaacactttgtagctgatcctttcagccgggtagccgg

SEQ ID NO: 228086 - DNA, 55 bp, Artificial
  Synthetic oligonucleotide
tgcttctcagttgtgagatagtggcagctccgaccgtacctgcgagagatttggg

SEQ ID NO: 228087 - DNA, 55 bp, Artificial
  Synthetic oligonucleotide
gcgcgatacgttcgcttgattttggtgccccaacctcgcggtcaaaagcacatgc

SEQ ID NO: 228088 - DNA, 55 bp, Artificial
  Synthetic oligonucleotide
gcgcgagcatgatctgttttctcaatctcgaacggatgtttgcccacagcaattg

SEQ ID NO: 228089 - DNA, 55 bp, Artificial
  Synthetic oligonucleotide
gccaatacgccgattgtcgagggactggtctctgaatatcacggcatgtacgagg

SEQ ID NO: 228090 - DNA, 60 bp, Artificial
  Synthetic oligonucleotide
ccaactcgagggagggcggatcaaagcagagtcgctctgattaaagctcaacgcactgcg

SEQ ID NO: 228091 - DNA, 55 bp, Artificial
  Synthetic oligonucleotide
tggccgtatggaaccccggtgtgagtgaaatggtccgcggcacgcgtatcggatg

SEQ ID NO: 228092 - DNA, 55 bp, Artificial
  Synthetic oligonucleotide
gcatttccaagattcgagaggccgtcgccagcgagttccgggagagggtcgacca

SEQ ID NO: 228093 - DNA, 55 bp, Artificial
  Synthetic oligonucleotide
gcattgcggataattttgtccgcccaggacatatcttccctcttatatcccgcga

SEQ ID NO: 228094 - DNA, 55 bp, Artificial
  Synthetic oligonucleotide
tggccgtggctatgggataaaggagagggacggtcaagcttttcgcgcatttccg

SEQ ID NO: 228095 - DNA, 54 bp, Artificial
  Synthetic oligonucleotide
gcatctttcgggtcgcccattatcgatcggaacacttaaccttcgtccccgttc

SEQ ID NO: 228096 - DNA, 55 bp, Artificial
  Synthetic oligonucleotide
gcatctgtcgattgggagttaaggtaccgcgttcgcacttcgggcaatcatggcg

SEQ ID NO: 228097 - DNA, 55 bp, Artificial
  Synthetic oligonucleotide
gcatctagccaatatgtgcttaatgtccccttcggagagatagtgttgaaaacac

SEQ ID NO: 228098 - DNA, 55 bp, Artificial
  Synthetic oligonucleotide
gcatcgtatagcgccccaaagcgcggtaagttgatagggatcggttcaagcggac

SEQ ID NO: 228099 - DNA, 55 bp, Artificial
  Synthetic oligonucleotide
gcatccgcctcgaatgggatagtcggggcgccaattcggcgagtcgcttatctca

SEQ ID NO: 228100 - DNA, 55 bp, Artificial
  Synthetic oligonucleotide
gcataccctccggccctaacgcctcgatcacatcgcgtccgacgatatgtcgtgt

SEQ ID NO: 228101 - DNA, 60 bp, Artificial
  Synthetic oligonucleotide
cttcctgagcatcgtcgtatcggcactcataggcttgagccgacgcggagtggatagcca

SEQ ID NO: 228102 - DNA, 55 bp, Artificial
  Synthetic oligonucleotide
gcagcttgccaatatactcgttagcgctacaacaatggcgacgcgtgtactaccg

SEQ ID NO: 228103 - DNA, 55 bp, Artificial
  Synthetic oligonucleotide
gcagcctcctggcccgagaaatacttgctaccctaagaggactctcacgacagcg

SEQ ID NO: 228104 - DNA, 55 bp, Artificial
  Synthetic oligonucleotide
gcagccgtgattgccccgcatgacccgacccagcaatatagagacgcgttgctcg

SEQ ID NO: 228105 - DNA, 55 bp, Artificial
  Synthetic oligonucleotide
gcagcatgactatgcttccttcgcaatccgccgaagtctccgcccctgacgcgtc

SEQ ID NO: 228106 - DNA, 55 bp, Artificial
  Synthetic oligonucleotide
gcagagctgataggtcacgacccgatacgacgacgttcgcggctcaaatcgaaga

SEQ ID NO: 228107 - DNA, 55 bp, Artificial
  Synthetic oligonucleotide
tggcgttcgatggaatagacccgccttgctatacggctcatgagggctgaggtgt

SEQ ID NO: 228108 - DNA, 55 bp, Artificial
  Synthetic oligonucleotide
gcagaagctcactgcacagaattccgtacctcgcgcgataccgtgatcccgttcc

SEQ ID NO: 228109 - DNA, 55 bp, Artificial
  Synthetic oligonucleotide
tggcttgctcgtaagcccggcgacctagacgctgacgataaccggcggtttaagc

SEQ ID NO: 228110 - DNA, 55 bp, Artificial
  Synthetic oligonucleotide
gcagaacgcatagtccatcgtttactaccaactcttcgcaatttgcatgtagccc

SEQ ID NO: 228111 - DNA, 55 bp, Artificial
  Synthetic oligonucleotide
gcacggaccactcgatctcgacagttcctgtatcccctgatagagccccgtactt

SEQ ID NO: 228112 - DNA, 60 bp, Artificial
  Synthetic oligonucleotide
ccaacgccgtggccacagccggtactcgactatgtcagagatctgccactgacagagcgg

SEQ ID NO: 228113 - DNA, 55 bp, Artificial
  Synthetic oligonucleotide
gcaccttcgcgtcaagcctaagcgaaacgttcgagcggcgtgttctgtctggtaa

SEQ ID NO: 228114 - DNA, 55 bp, Artificial
  Synthetic oligonucleotide
gcaccgcttcgctgtggcgagcgataggtgcgtccggcattctaaagtcttgcag

SEQ ID NO: 228115 - DNA, 55 bp, Artificial
  Synthetic oligonucleotide
gcaccagacctgaaacgataacgacaggggaaccgccatgaacaatccacgtcat

SEQ ID NO: 228116 - DNA, 55 bp, Artificial
  Synthetic oligonucleotide
gcacagcgccactatagtgcgggctaaacgtctatctgaattgtatgtacagtct

SEQ ID NO: 228117 - DNA, 55 bp, Artificial
  Synthetic oligonucleotide
gcaattctgcgacagtccggttatatagcggcatatttcccggacattgtggtga

SEQ ID NO: 228118 - DNA, 55 bp, Artificial
  Synthetic oligonucleotide
gccgccttggtgcagtcttatatcgacgcgggttggccgattcgtttcatgcacg

SEQ ID NO: 228119 - DNA, 54 bp, Artificial
  Synthetic oligonucleotide
gccgccccgtcgcaactaacgaaataagaattggctggggaacccggattctca

SEQ ID NO: 228120 - DNA, 55 bp, Artificial
  Synthetic oligonucleotide
tggacctaccttcagcgctgacgatcgagcaatatgtctccacgggacacgtcgc

SEQ ID NO: 228121 - DNA, 55 bp, Artificial
  Synthetic oligonucleotide
gccgcatcttggaaagtgattcgaccctgaccgctcgcatggagaccggcaatgc

SEQ ID NO: 228122 - DNA, 55 bp, Artificial
  Synthetic oligonucleotide
gccgattgcgaaatctacgcaaccttcaccgctactctagtctcgaggcgcggcc

SEQ ID NO: 228123 - DNA, 60 bp, Artificial
  Synthetic oligonucleotide
cattgcgtcaggcgcttcttatcgcattgatcctgtgcggccgatcagagtggcagcacc

SEQ ID NO: 228124 - DNA, 55 bp, Artificial
  Synthetic oligonucleotide
tggatccgcaaatctaaggagaggatagcgatgttctactgcgggacgcgtcggg

SEQ ID NO: 228125 - DNA, 55 bp, Artificial
  Synthetic oligonucleotide
gccgagatactgtgacatgcgggcggcaatcgtcgggcgatcgaaggggcattca

SEQ ID NO: 228126 - DNA, 55 bp, Artificial
  Synthetic oligonucleotide
gccgacagcccttctatgcggctggtgtagtaaggtcagttgatgcacggagccg

SEQ ID NO: 228127 - DNA, 55 bp, Artificial
  Synthetic oligonucleotide
gccgaacattcgcgcatatcagtatcctgcgacgtaaggtccgaccgccttacga

SEQ ID NO: 228128 - DNA, 55 bp, Artificial
  Synthetic oligonucleotide
gcccttatcgaatgcgaagatttgcgcaccggaataacggcggaactgcgcagcg

SEQ ID NO: 228129 - DNA, 55 bp, Artificial
  Synthetic oligonucleotide
gccctcgtcgcgatagaatcgcaggctaaatacggatcgttcagcctatcaaaag

SEQ ID NO: 228130 - DNA, 55 bp, Artificial
  Synthetic oligonucleotide
gccctccggataacggctgatgtattcgtcccaaaggatctgcagcgtcatatgc

SEQ ID NO: 228131 - DNA, 55 bp, Artificial
  Synthetic oligonucleotide
tggatcctccgtcaggagccgcgggcggtaaaacgacctgaatgcgctcaccagt

SEQ ID NO: 228132 - DNA, 55 bp, Artificial
  Synthetic oligonucleotide
gcccgtgctcgcaagaaggtgagtgcaattgtccggtctccggtttatgggtgcg

SEQ ID NO: 228133 - DNA, 55 bp, Artificial
  Synthetic oligonucleotide
tggattgcgcccagtcagatcgcagatcacgacacgggatcggtctatcagtgac

SEQ ID NO: 228134 - DNA, 58 bp, Artificial
  Synthetic oligonucleotide
cttcgcttcgcgctgtagtcaggttctggatgtttgccaactaatcccgccgccccat

SEQ ID NO: 228135 - DNA, 55 bp, Artificial
  Synthetic oligonucleotide
gcccgtcggacactctgccaaaaggttgactcttgtgccattgccccttgacctc

SEQ ID NO: 228136 - DNA, 52 bp, Artificial
  Synthetic oligonucleotide
gcccgctaaacccggacgccacgtaaaggccgggcaattgaggaactggacc

SEQ ID NO: 228137 - DNA, 55 bp, Artificial
  Synthetic oligonucleotide
gcccgcagagtcgagagtgagcgcgcgccaaattgaaaactccgcctctgcctga

SEQ ID NO: 228138 - DNA, 55 bp, Artificial
  Synthetic oligonucleotide
gcccgaaacaagctcggccaatatcgcacgtgcagcggccatatcgttccgatcc

SEQ ID NO: 228139 - DNA, 54 bp, Artificial
  Synthetic oligonucleotide
gccccgcaaccttctatttggcggataccgacgaaacctttcacatccgtgacg

SEQ ID NO: 228140 - DNA, 55 bp, Artificial
  Synthetic oligonucleotide
gccccgagagatgcgtttcctcgtgtccgacggattctcaccgtaggtcattctg

SEQ ID NO: 228141 - DNA, 55 bp, Artificial
  Synthetic oligonucleotide
gcccatatgatagctgtcaccagagacgttctgctggacgttgaaattgtgccgg

SEQ ID NO: 228142 - DNA, 55 bp, Artificial
  Synthetic oligonucleotide
gccatgcgaacgatcgtgactggagtgatacgcatcttctgaaacgagatcctca

SEQ ID NO: 228143 - DNA, 55 bp, Artificial
  Synthetic oligonucleotide
gccacgacgaagcgagtactggtaggcaagaccggccctttcgttagtgtgtgcg

SEQ ID NO: 228144 - DNA, 55 bp, Artificial
  Synthetic oligonucleotide
gccacgaaatcggcgcctgagttctgggtccttaaaatccgctcgcgcctgagct

SEQ ID NO: 228145 - DNA, 51 bp, Artificial
  Synthetic oligonucleotide
ctttaaccgacgcttgaggaggacgggcgtggagccccgtggaccgaaaaa

SEQ ID NO: 228146 - DNA, 55 bp, Artificial
  Synthetic oligonucleotide
gccacccgaaacattcggttcgtggaatttatagcgcaatacgcgagaaacaagg

SEQ ID NO: 228147 - DNA, 55 bp, Artificial
  Synthetic oligonucleotide
ggccacacgaagtcgtctgagattccagccgatggtttgtcgaacgtccatccca

SEQ ID NO: 228148 - DNA, 55 bp, Artificial
  Synthetic oligonucleotide
ggcattgtctggtcttgctagcgaatgcgtcgctaacacgggcgcctgtactgtg

SEQ ID NO: 228149 - DNA, 55 bp, Artificial
  Synthetic oligonucleotide
ggcatgcgtatagatgcgtatcgaataacagctgacggcacccttgcgtttgcag

SEQ ID NO: 228150 - DNA, 55 bp, Artificial
  Synthetic oligonucleotide
ggcatcggttggaaacgtagagaggcatatcaggccagccatcgtcaggattgct

SEQ ID NO: 228151 - DNA, 55 bp, Artificial
  Synthetic oligonucleotide
ggcagagcctattcgtcggcatctgtccggatgtccgttgcatcccgcttctcac

SEQ ID NO: 228152 - DNA, 55 bp, Artificial
  Synthetic oligonucleotide
ggcagaatctccgagcttgaagtttacaaggaagatggaagcccaatccggacag

SEQ ID NO: 228153 - DNA, 54 bp, Artificial
  Synthetic oligonucleotide
ggcacgtctataacccggggctactcaggcgaacgcttacgtcactttcgacgg

SEQ ID NO: 228154 - DNA, 55 bp, Artificial
  Synthetic oligonucleotide
ggcacgtagacacgcaaatagtgatggccgagataaccctggtctcgaagcggtc

SEQ ID NO: 228155 - DNA, 55 bp, Artificial
  Synthetic oligonucleotide
ggcacagtgcgcaacgacgctgatttctatatgctgttgccgcatgttgctgcga

SEQ ID NO: 228156 - DNA, 60 bp, Artificial
  Synthetic oligonucleotide
ctttaggacaacatacgaagcgtcggacattcctgaccggctcggcagctgtcgctgcga

SEQ ID NO: 228157 - DNA, 55 bp, Artificial
  Synthetic oligonucleotide
ggcaacggaaagatgagatcgattaatagccacctctaggtttctaagcgcagac

SEQ ID NO: 228158 - DNA, 55 bp, Artificial
  Synthetic oligonucleotide
ggatttggacgatccgctgcaagtcgttctagataccgtcgatcttccctggcac

SEQ ID NO: 228159 - DNA, 55 bp, Artificial
  Synthetic oligonucleotide
tgatacctttccgaaccgcagcttcgatcgtttgatcgataagccgcttggcggg

SEQ ID NO: 228160 - DNA, 55 bp, Artificial
  Synthetic oligonucleotide
ggattgctctggcatgtatcatgttgctgtcgcagccggctctggcgcagtctcc

SEQ ID NO: 228161 - DNA, 55 bp, Artificial
  Synthetic oligonucleotide
ggattatgccttgggcggacacactgcatcgctcggcctttgctggcttcccgca

SEQ ID NO: 228162 - DNA, 55 bp, Artificial
  Synthetic oligonucleotide
ggatgcgattgtacagcttatcatactggcgctccgggaagttcgctcatactcc

SEQ ID NO: 228163 - DNA, 55 bp, Artificial
  Synthetic oligonucleotide
ggatgcaacgtgtatcgcagcaggaggccttccctcatcatgcccgccttctcca

SEQ ID NO: 228164 - DNA, 55 bp, Artificial
  Synthetic oligonucleotide
ggatccttcagcgggcgaaggtagcgtccgtaatagagttcgaggaatttcgagc

SEQ ID NO: 228165 - DNA, 55 bp, Artificial
  Synthetic oligonucleotide
ggatcattcaatacgctgtagctatccgtctcgcggacgaatgtcgcaccgaggg

SEQ ID NO: 228166 - DNA, 55 bp, Artificial
  Synthetic oligonucleotide
ggatattccagcagaggagctcaagaacgtactcaacagtatcttgccaggcgcc

SEQ ID NO: 228167 - DNA, 60 bp, Artificial
  Synthetic oligonucleotide
gaaacgaagtaggtctcctccacgatctcacacgtgttgagtgccaaccagcacacggcg

SEQ ID NO: 228168 - DNA, 55 bp, Artificial
  Synthetic oligonucleotide
ggatagcgctgcggcgtttggagcatcgaccgcgtctggttgtcgtacagggtga

SEQ ID NO: 228169 - DNA, 55 bp, Artificial
  Synthetic oligonucleotide
ggagtgcaccttctggattcagatcacaaagcgctgcggaaccctttggtcccgc

SEQ ID NO: 228170 - DNA, 55 bp, Artificial
  Synthetic oligonucleotide
ggagtatcgacatagacgaaatgcacttcatgtccgaggctacgcacggcgcgtg

SEQ ID NO: 228171 - DNA, 55 bp, Artificial
  Synthetic oligonucleotide
ggaggcgtcggcgcatagctccccgtcgggatggtattatccctatcagtgctgt

SEQ ID NO: 228172 - DNA, 54 bp, Artificial
  Synthetic oligonucleotide
ggaggagggtcgtgctttcgaagacacgaaggtttccgtccgaaatcaatcgac

SEQ ID NO: 228173 - DNA, 55 bp, Artificial
  Synthetic oligonucleotide
ggagcgtatgtctcgggcctcgggcaaatcggatatgagggaacggatctgcggt

SEQ ID NO: 228174 - DNA, 55 bp, Artificial
  Synthetic oligonucleotide
ggcggagaacgtcctccgtcgacgagatttccaactgcaccgagaacctatcccc

SEQ ID NO: 228175 - DNA, 55 bp, Artificial
  Synthetic oligonucleotide
ggcggaatacaacaccacgcattaccggctttcgcccttctacgatcttgtcaag

SEQ ID NO: 228176 - DNA, 55 bp, Artificial
  Synthetic oligonucleotide
ggcgcttgttcccttctgtcgacggaatcgaagggtcggtcacacaacgcatcgc

SEQ ID NO: 228177 - DNA, 55 bp, Artificial
  Synthetic oligonucleotide
ggcgcttacccatccagtgacgcagccagctttcaactgctcggctgacgtaagg

SEQ ID NO: 228178 - DNA, 60 bp, Artificial
  Synthetic oligonucleotide
gaaagtcatgtgaacgtcggttccggtgaagacattaccatcctcgaattggcgcatctc

SEQ ID NO: 228179 - DNA, 55 bp, Artificial
  Synthetic oligonucleotide
ggcgctctgcctgatacttagtctttcattctcgggaagcgaaaagcttgctccc

SEQ ID NO: 228180 - DNA, 55 bp, Artificial
  Synthetic oligonucleotide
ggcgcctgtctcggtacggccactctgagcattggaatatgtctgacgggaggag

SEQ ID NO: 228181 - DNA, 55 bp, Artificial
  Synthetic oligonucleotide
ggcgcattgcctgcctcaaccgagtgaacacggagaacgatgatgcggctcttac

SEQ ID NO: 228182 - DNA, 53 bp, Artificial
  Synthetic oligonucleotide
ggcgcaccgagaaagcgaaagttactccgtttgggtaggggtactataggcgc

SEQ ID NO: 228183 - DNA, 55 bp, Artificial
  Synthetic oligonucleotide
ggcgatacgatccaaattggcggctagtttcagagcggccgtactgtgatccggg

SEQ ID NO: 228184 - DNA, 55 bp, Artificial
  Synthetic oligonucleotide
ggcgagactacggcgaattgtagattcttggacgtcatgaagcgcggcgaagaag

SEQ ID NO: 228185 - DNA, 55 bp, Artificial
  Synthetic oligonucleotide
ggcgacgacatgggaagcccggagggttatgcttttcacacggagaaggcggtga

SEQ ID NO: 228186 - DNA, 55 bp, Artificial
  Synthetic oligonucleotide
ggcgaacagtagaataataagcgcttgccgtggtaaacacgtcggcttggatcgt

SEQ ID NO: 228187 - DNA, 55 bp, Artificial
  Synthetic oligonucleotide
ggcctttcacagctgggatcatatccgcttcaatgcgaaccccgagaatgaggtt

SEQ ID NO: 228188 - DNA, 55 bp, Artificial
  Synthetic oligonucleotide
ggccttcggagcgtattgcccaatgagataagcgactcgccgaattggcgccccg

SEQ ID NO: 228189 - DNA, 60 bp, Artificial
  Synthetic oligonucleotide
tatgccctagaacagtagcattgacaacgttaccatcaagcatgacaacgttaccagttg

SEQ ID NO: 228190 - DNA, 59 bp, Artificial
  Synthetic oligonucleotide
cgggcgttggcgtctactgacgtacaagcagcgacaatggacttgttccgtgcctctac

SEQ ID NO: 228191 - DNA, 54 bp, Artificial
  Synthetic oligonucleotide
ccgggggtccagcgatctcctcaactccgaccgtcaacaggaagcacgggaaaa

SEQ ID NO: 228192 - DNA, 55 bp, Artificial
  Synthetic oligonucleotide
tgtcattcgagattgcccggaaccccgtggtcgccggagaacgctcggacatccc

SEQ ID NO: 228193 - DNA, 55 bp, Artificial
  Synthetic oligonucleotide
tgtcgatagcatggtcatgcgtgataccccttgaccagtttgttgcggtaaaagc

SEQ ID NO: 228194 - DNA, 55 bp, Artificial
  Synthetic oligonucleotide
tgtcttcggaactctggtatcgtaggggcgactccatgagcagaaggacgggtga

SEQ ID NO: 228195 - DNA, 55 bp, Artificial
  Synthetic oligonucleotide
ttaacgcttcggtgctaacgaccacgccatatgggtctggagcctaagacgctcc

SEQ ID NO: 228196 - DNA, 53 bp, Artificial
  Synthetic oligonucleotide
ttacatgggcttcaaacccggtgacgaaaccgaaacacggtccatcccgcgtc

SEQ ID NO: 228197 - DNA, 55 bp, Artificial
  Synthetic oligonucleotide
ttaccacccctatgacatgagggcctatccctatcggtcacgtgtttatgtcaac

SEQ ID NO: 228198 - DNA, 55 bp, Artificial
  Synthetic oligonucleotide
tgatctgtttctaggggtctcggtcatccgattagctcctccatacacgtcggcc

SEQ ID NO: 228199 - DNA, 55 bp, Artificial
  Synthetic oligonucleotide
tgatgggaccgacggatgctattcgcgggccgacttcgcactatcgacaggtcgg

SEQ ID NO: 228200 - DNA, 55 bp, Artificial
  Synthetic oligonucleotide
tgatgtcggggcctgctggggaagttgccggaatcccgggaagcccgcgctcact

SEQ ID NO: 228201 - DNA, 55 bp, Artificial
  Synthetic oligonucleotide
tgattctaatctgtcatttagcaagcggttagctattctattcggaaagagggtc

SEQ ID NO: 228202 - DNA, 58 bp, Artificial
  Synthetic oligonucleotide
gtggttatggcccgtgcgatctcagcaagacccggtgataattaccggtcgcctcaaa

SEQ ID NO: 228203 - DNA, 55 bp, Artificial
  Synthetic oligonucleotide
tgcaacaggttcaacgaaccccagaaaacagtgtcgtccaagagaagtatgttct

SEQ ID NO: 228204 - DNA, 55 bp, Artificial
  Synthetic oligonucleotide
tgcaagcccgtaccctctgggcgacccacacaacgtgctcctcgcaaccttcaac

SEQ ID NO: 228205 - DNA, 55 bp, Artificial
  Synthetic oligonucleotide
tgcaccaaccagcagtatagaccaaaacaattccatgttgcccgctccactcacg

SEQ ID NO: 228206 - DNA, 55 bp, Artificial
  Synthetic oligonucleotide
tgcatggcctcactgcgccgcgctgtcgtgtttcgtgttgtcatcgcacccactc

SEQ ID NO: 228207 - DNA, 55 bp, Artificial
  Synthetic oligonucleotide
tgcccttcaaagggagaactgcgatcggctgtgcgcgttcagaaactcccgcgtc

SEQ ID NO: 228208 - DNA, 55 bp, Artificial
  Synthetic oligonucleotide
tgccgctctcgaaccccgcgcagatatgtcccagcgtgcagatatgtccaagcgt

SEQ ID NO: 228209 - DNA, 55 bp, Artificial
  Synthetic oligonucleotide
tgccgtccctacagtcaccgtgctgcctttctcaagacaggtcggcatctgggca

SEQ ID NO: 228210 - DNA, 55 bp, Artificial
  Synthetic oligonucleotide
tgccttcacagattgggaccaccatgtattccacactcgtctcttacctctttcg

SEQ ID NO: 228211 - DNA, 55 bp, Artificial
  Synthetic oligonucleotide
tgccttgcttgcgccatagtatcgtgtgacaacaattcaggttttggtaacccgt

SEQ ID NO: 228212 - DNA, 55 bp, Artificial
  Synthetic oligonucleotide
tgcgaacgtatcccatggatgcttctccctcaccggaaaccgttgcagatatggc

SEQ ID NO: 228213 - DNA, 60 bp, Artificial
  Synthetic oligonucleotide
gtgtactgttgcgatggactgggctctgtctgtcgcgtaatacagtcgccgatgggtatc

SEQ ID NO: 228214 - DNA, 55 bp, Artificial
  Synthetic oligonucleotide
tgcgccggttcagggcaacagtcccgaggatatggtcggttagtccctgtttccg

SEQ ID NO: 228215 - DNA, 55 bp, Artificial
  Synthetic oligonucleotide
tgcggaaacagcgccgcaagaaaggccagcgagcacaggaaatcagccatccccg

SEQ ID NO: 228216 - DNA, 55 bp, Artificial
  Synthetic oligonucleotide
tgcggtctctgcagcggaggcaaaccacgagttgctgaacggtgtcagctctggc

SEQ ID NO: 228217 - DNA, 55 bp, Artificial
  Synthetic oligonucleotide
tggactacgatcagtaaaccgttttgcgagggaggattaccccatggctgaagac

SEQ ID NO: 228218 - DNA, 55 bp, Artificial
  Synthetic oligonucleotide
tggatccgactcggcctgatggcgcgttcctagcctgaggcaccggccggtgtac

SEQ ID NO: 228219 - DNA, 55 bp, Artificial
  Synthetic oligonucleotide
ttgacgccctgcccagcgcttaggcttcgggcgatcgaaggagtgttcggaatgg

SEQ ID NO: 228220 - DNA, 55 bp, Artificial
  Synthetic oligonucleotide
ttgagaaaccctaaacaccgatgctcggctctgtgaaccggctaaatcgacgggg

SEQ ID NO: 228221 - DNA, 55 bp, Artificial
  Synthetic oligonucleotide
ttgcagaaaggatggtccggtgaaatacgaagcgagcctgcgggagaatgctcgt

SEQ ID NO: 228222 - DNA, 55 bp, Artificial
  Synthetic oligonucleotide
ttgccggcggaacacgttttcgtcgactttgcgcttactgccctgaaacgaccag

SEQ ID NO: 228223 - DNA, 55 bp, Artificial
  Synthetic oligonucleotide
ttgcgccgaaccgtgtcgggacgcagaccgtagtgtttagcaacttcctcaaccg

SEQ ID NO: 228224 - DNA, 57 bp, Artificial
  Synthetic oligonucleotide
aatccgtgcaggttggataaccaccggttatggatgcagcccgggccgccctatgct

SEQ ID NO: 228225 - DNA, 55 bp, Artificial
  Synthetic oligonucleotide
ttgcggtaaattgcgacttctcaaagtgataggcgcgccgggtctaggatctaac

SEQ ID NO: 228226 - DNA, 55 bp, Artificial
  Synthetic oligonucleotide
ttgcgtggtgtcttcggtttggcttgatgggccgtaataaggaggcgcactttgc

SEQ ID NO: 228227 - DNA, 55 bp, Artificial
  Synthetic oligonucleotide
ttggcgattgtcacatgaaccggtgcaattactcctgcgttagctgcataaccgc

SEQ ID NO: 228228 - DNA, 55 bp, Artificial
  Synthetic oligonucleotide
ttggcgctatcgtggcctactgtgatgggcatatcggtctctcctgcaggggcat

SEQ ID NO: 228229 - DNA, 55 bp, Artificial
  Synthetic oligonucleotide
ttgtcctgaaagcctgcccggacctggagccctatgcgcctgagatccgcaactg

SEQ ID NO: 228230 - DNA, 55 bp, Artificial
  Synthetic oligonucleotide
tttagccgatagtttgatagcttatccattattggtcctcactcgtgtcagtctc

SEQ ID NO: 228231 - DNA, 53 bp, Artificial
  Synthetic oligonucleotide
tttcgaattcgggtcagggacggttttatccgcatcgggtctactggcctttc

SEQ ID NO: 228232 - DNA, 55 bp, Artificial
  Synthetic oligonucleotide
tttgcgtaatcgcacactaacgacgctgttgatgctcgtcgaagcgcgtttgtca

SEQ ID NO: 228233 - DNA, 55 bp, Artificial
  Synthetic oligonucleotide
tttggcaaaggaactcacccgctcgcttgggcctaaaatagtgcgccctattgcc

SEQ ID NO: 228234 - DNA, 51 bp, Artificial
  Synthetic oligonucleotide
tttggtccactcttcatagggtggggcggacccgcctttggacgcggggtt

SEQ ID NO: 228235 - DNA, 60 bp, Artificial
  Synthetic oligonucleotide
gggtatcgcaacactgacacgaggtgatcgaaatgaaacgcaacactttactcgctgcaa

SEQ ID NO: 228236 - DNA, 55 bp, Artificial
  Synthetic oligonucleotide
tttgtgcagcgtgccagtgcaattctgcaagcagatattcttgccctcccgtatc

SEQ ID NO: 228237 - DNA, 55 bp, Artificial
  Synthetic oligonucleotide
tttgtggttgtcgggcggaggtctctgcgtgcggctgggcttgcgcggagcttcg

SEQ ID NO: 228238 - DNA, 51 bp, Artificial
  Synthetic oligonucleotide
ttttcgtttcgcccctattcccgccggactgcctgcgacggtcccctttac

SEQ ID NO: 228239 - DNA, 55 bp, Artificial
  Synthetic oligonucleotide
ttacgcctctgcgcatgcccacccgataggtttcaggccgccagaagtcccgacc

SEQ ID NO: 228240 - DNA, 55 bp, Artificial
  Synthetic oligonucleotide
ttagggagtgtatcgttaacctaagtgtaatcccctcgtgacacttaatgatcac

SEQ ID NO: 228241 - DNA, 55 bp, Artificial
  Synthetic oligonucleotide
ttaggggcggcagccgccttatcaacgttcacagccaccgcacgttcgggaactg

SEQ ID NO: 228242 - DNA, 55 bp, Artificial
  Synthetic oligonucleotide
ttatggcgcgagcatgcactggtattggagcgaagtttaactcttcgccactcgt

SEQ ID NO: 228243 - DNA, 55 bp, Artificial
  Synthetic oligonucleotide
ttatggctccgtgcggtcaagcaacatatcccctctcgatcttccagtgatcccg

SEQ ID NO: 228244 - DNA, 55 bp, Artificial
  Synthetic oligonucleotide
ttcaagtgacgggcgggcaagcgacgggtggacaagtgacggatgggcaagtgac

SEQ ID NO: 228245 - DNA, 55 bp, Artificial
  Synthetic oligonucleotide
ttcagcaaggctgacgtcgcggacaggtcccaagcccatctcccggcgctttcca

SEQ ID NO: 228246 - DNA, 60 bp, Artificial
  Synthetic oligonucleotide
cgcaccagattctgtaattgccgcccaaagtacttcgcgcgccttgggtgatagaatggc

SEQ ID NO: 228247 - DNA, 55 bp, Artificial
  Synthetic oligonucleotide
ttccatcttgacgcatatctatcggtaccatcaactttgatgggagcctaggatc

SEQ ID NO: 228248 - DNA, 55 bp, Artificial
  Synthetic oligonucleotide
ttccctccaggcacgctgctaggcccgttcatccgaacatgtgagcagcgagttg

SEQ ID NO: 228249 - DNA, 55 bp, Artificial
  Synthetic oligonucleotide
ttccgtcgtatcaggccatatgccagcgcaaatatgcctcacccggcgatctgtc

SEQ ID NO: 228250 - DNA, 55 bp, Artificial
  Synthetic oligonucleotide
ttccttgatgtctggttgggatgaggcaatgtcactaaacaaggtatctccggtt

SEQ ID NO: 228251 - DNA, 55 bp, Artificial
  Synthetic oligonucleotide
ttcgcgcgccatttcgcgtataagaaacacgcatccccagcggagccgccctatg

SEQ ID NO: 228252 - DNA, 55 bp, Artificial
  Synthetic oligonucleotide
ttcggcaccttggatcaaattaattcgcgtggcttatgctgtgacatgtggcgtg

SEQ ID NO: 228253 - DNA, 51 bp, Artificial
  Synthetic oligonucleotide
ttcggccgaaagtcctacagggccaacctccggccccgttccggagccgaa

SEQ ID NO: 228254 - DNA, 55 bp, Artificial
  Synthetic oligonucleotide
ttcggctaggcatttgcgcagcccatccgctgcgttaccttctacccatcctgcg

SEQ ID NO: 228255 - DNA, 55 bp, Artificial
  Synthetic oligonucleotide
ttcggggttgtcccacatgcaccgcgcaaagctatcctggctcaatgcctcgcgg

SEQ ID NO: 228256 - DNA, 55 bp, Artificial
  Synthetic oligonucleotide
ttcgtgaacgccgctgagatgagaaaacccgcgtcgcgaaaccgtcgcgaagggt

SEQ ID NO: 228257 - DNA, 54 bp, Artificial
  Synthetic oligonucleotide
agtttcgccgcccgtttggaacatcttgcccgtccatcgcagaaaggacggccg

SEQ ID NO: 228258 - DNA, 55 bp, Artificial
  Synthetic oligonucleotide
ttctgctgtgaggcggttccgaacggctatggtctgaagcgggcgaatcgagccg

SEQ ID NO: 228259 - DNA, 55 bp, Artificial
  Synthetic oligonucleotide
ttctggaagtccgcagctgaagaacaaaatttcacatctgagtttacaccgctca

SEQ ID NO: 228260 - DNA, 55 bp, Artificial
  Synthetic oligonucleotide
tccaagtttcagcgcccgtttagggcaaacatgcgcttacaccgcaataaacgcg

SEQ ID NO: 228261 - DNA, 55 bp, Artificial
  Synthetic oligonucleotide
tccatacacatcaagcccttaacgacttgctaacattcgtgatgggaacaccgtg

SEQ ID NO: 228262 - DNA, 55 bp, Artificial
  Synthetic oligonucleotide
tccccgcgaccctgcctccgggcccgcgcaaaagcctctttcactctgcgcaaat

SEQ ID NO: 228263 - DNA, 55 bp, Artificial
  Synthetic oligonucleotide
tccccgggcacacctatcctgcagccacggtcatcgggataccgagtgctgtgaa

SEQ ID NO: 228264 - DNA, 49 bp, Artificial
  Synthetic oligonucleotide
tccgaaagggtcaaactttggttccgaaagggtcaaactttggttccga

SEQ ID NO: 228265 - DNA, 55 bp, Artificial
  Synthetic oligonucleotide
tccgacggtatactgaatgaattgacgccgcagctgcaaaatgctagctggtctc

SEQ ID NO: 228266 - DNA, 55 bp, Artificial
  Synthetic oligonucleotide
tccgttcgatgttgcgcgcaatgtatgtcttaatcttaatgatctgccacggagc

SEQ ID NO: 228267 - DNA, 55 bp, Artificial
  Synthetic oligonucleotide
tcctatcccatgacatcgcattttgtcgtgtccttccccatcgacactgatccag

SEQ ID NO: 228268 - DNA, 59 bp, Artificial
  Synthetic oligonucleotide
agttgtcgaaatatctcgtggtggatgcaccttggtgctttacgccgccccagatgtgg

SEQ ID NO: 228269 - DNA, 55 bp, Artificial
  Synthetic oligonucleotide
tcctcgcagccgtcaccatttcgcctcggtcctagatggtcagttgcggccacga

SEQ ID NO: 228270 - DNA, 55 bp, Artificial
  Synthetic oligonucleotide
tcctcgccttatccttttcggagagaaccacgttcagacggtgtgcttttgcgcg

SEQ ID NO: 228271 - DNA, 55 bp, Artificial
  Synthetic oligonucleotide
tccttagcgctagacgccgctaactcgggacggagtcaaccgacggagccgatct

SEQ ID NO: 228272 - DNA, 55 bp, Artificial
  Synthetic oligonucleotide
tcctttcagccaatgcgaccactggaagcccctgacgcgacggacgtggctcgtg

SEQ ID NO: 228273 - DNA, 55 bp, Artificial
  Synthetic oligonucleotide
tcgacgcctgaggggcaggtcagggtccgtggccttccgggcgcggacgagcctg

SEQ ID NO: 228274 - DNA, 55 bp, Artificial
  Synthetic oligonucleotide
tcgactgtgaggaggggcgtttcgcctcctactcggcgggtggccgagggatgga

SEQ ID NO: 228275 - DNA, 55 bp, Artificial
  Synthetic oligonucleotide
tcgatctgccagatggacaatccaccccgtgcgggattagttagagttgtcgggg

SEQ ID NO: 228276 - DNA, 55 bp, Artificial
  Synthetic oligonucleotide
tcgcagagtaaaatgggacctctgtcgcggggtaagaaggggccatttcgggtga

SEQ ID NO: 228277 - DNA, 55 bp, Artificial
  Synthetic oligonucleotide
tatacgcggcttctggagcagcccgagttcagtgctgcgtcgtgccggacccttc

SEQ ID NO: 228278 - DNA, 55 bp, Artificial
  Synthetic oligonucleotide
tatatttcgttctcaggacaggacatagcgctggaaacaatctcagcagatctgg

SEQ ID NO: 228279 - DNA, 56 bp, Artificial
  Synthetic oligonucleotide
gggggttcagagtcagaagatcgggggttcagagtcatttcatcggggtttcagag

SEQ ID NO: 228280 - DNA, 55 bp, Artificial
  Synthetic oligonucleotide
tatcgcctgcctcgctgcgtcgatccggacagggcacgggtctatcgcatcgaca

SEQ ID NO: 228281 - DNA, 55 bp, Artificial
  Synthetic oligonucleotide
tatctggttctcgcgccttctggctagccttgcctgcaatgcaaccggccccgcg

SEQ ID NO: 228282 - DNA, 55 bp, Artificial
  Synthetic oligonucleotide
tatgaccatgcataacgtatgaaacaggcgggaagtccgatgcgcaggaatcacg

SEQ ID NO: 228283 - DNA, 55 bp, Artificial
  Synthetic oligonucleotide
tatgacgtgggttaccaaccaaagaggccccagataaagagcaagcccgagcaag

SEQ ID NO: 228284 - DNA, 55 bp, Artificial
  Synthetic oligonucleotide
tatggccatctccccgcgcgcccagttgtagcgggccgtcacaagtgccaccaag

SEQ ID NO: 228285 - DNA, 55 bp, Artificial
  Synthetic oligonucleotide
tatgtgggcggtttggtctattcgatggatcaacgctgcatatcgtcgctcctag

SEQ ID NO: 228286 - DNA, 55 bp, Artificial
  Synthetic oligonucleotide
tattcaccgtgggaatgcgcggcctgaggtgccaaccatcgcgacaagtaaacgc

SEQ ID NO: 228287 - DNA, 55 bp, Artificial
  Synthetic oligonucleotide
tcaaaatctggttcaacctagcctccatccaaaccttctgttcggttgcgccgag

SEQ ID NO: 228288 - DNA, 55 bp, Artificial
  Synthetic oligonucleotide
tcaacctgcggacgacggtgattggacggcgctcgaagtttgacctgacaacact

SEQ ID NO: 228289 - DNA, 55 bp, Artificial
  Synthetic oligonucleotide
tcaccagctttggactaatctgccggtgccccttggggatagccagccaaaggac

SEQ ID NO: 228290 - DNA, 60 bp, Artificial
  Synthetic oligonucleotide
agttatgtctgacacaggcccgcaccttcgtaaactgttaggaggtgtcatgaaggcata

SEQ ID NO: 228291 - DNA, 55 bp, Artificial
  Synthetic oligonucleotide
tcacgcacgtggttatcgccgcctgaaccgtactcacgagcaccgtaaggccctg

SEQ ID NO: 228292 - DNA, 55 bp, Artificial
  Synthetic oligonucleotide
tcactgaacgagggatagttcacgatgccgctgaccaagcgatattgcgtccgcg

SEQ ID NO: 228293 - DNA, 55 bp, Artificial
  Synthetic oligonucleotide
tcaggcttccactgtagctttacattgccgccagtcaccgggagcgtcatctctg

SEQ ID NO: 228294 - DNA, 55 bp, Artificial
  Synthetic oligonucleotide
tcagttctgccagcaacatacccgcgcgtgccgtgccaacgggcccttcaggatg

SEQ ID NO: 228295 - DNA, 55 bp, Artificial
  Synthetic oligonucleotide
tcatacgttaaacaggacgcctgatcacacaggtaaaagatacgtctatgtaaag

SEQ ID NO: 228296 - DNA, 55 bp, Artificial
  Synthetic oligonucleotide
tcatttcatgccccgttcttgagagggttcagatgaaaccggacatacttggcac

SEQ ID NO: 228297 - DNA, 55 bp, Artificial
  Synthetic oligonucleotide
tccaacgcatcaaactgcccgagctttgccccgaacccgtggcctcataacacag

SEQ ID NO: 228298 - DNA, 54 bp, Artificial
  Synthetic oligonucleotide
tcttcccgacgggcgtcatatctgtaacgcgaaaactaagaaaacgacgtccac

SEQ ID NO: 228299 - DNA, 55 bp, Artificial
  Synthetic oligonucleotide
tcttcgtttgctttaaccactttggtaccggtgccgccaaacatcgaatgcgccg

SEQ ID NO: 228300 - DNA, 55 bp, Artificial
  Synthetic oligonucleotide
tcttgaattcgcaggcaatcaggggtagttgaccccacactctgaaacatggcgc

SEQ ID NO: 228301 - DNA, 60 bp, Artificial
  Synthetic oligonucleotide
ccctttctcggagcgatgcagcaatggttgacccgcgatcaaatgcagtacaataaactt

SEQ ID NO: 228302 - DNA, 51 bp, Artificial
  Synthetic oligonucleotide
ggggagaaatggggccgcaaaagggagaaatggggccgcaaaagggagaaa

SEQ ID NO: 228303 - DNA, 55 bp, Artificial
  Synthetic oligonucleotide
tcttgatccgggcggttggagccacgcttgcagcgatgtagagtcggaccgggaa

SEQ ID NO: 228304 - DNA, 55 bp, Artificial
  Synthetic oligonucleotide
tcttgggtcctctccccatggaaccgtgagcgtgcggaagggtcggatgcctgaa

SEQ ID NO: 228305 - DNA, 55 bp, Artificial
  Synthetic oligonucleotide
tcttgtgcgcaccttgcctaaccgttacctatccgatcaggttccgacacacgac

SEQ ID NO: 228306 - DNA, 55 bp, Artificial
  Synthetic oligonucleotide
tgaacaggggccttccgcttctgaaagtgaaggcgctcacaaagccctcgagcaa

SEQ ID NO: 228307 - DNA, 55 bp, Artificial
  Synthetic oligonucleotide
tgaacgcaccatctggcttcgcttgaagcttatcgctgatgtcggtcttttgggg

SEQ ID NO: 228308 - DNA, 55 bp, Artificial
  Synthetic oligonucleotide
tgaagccatgtagcgacggtccacagttccaatatgtgacagcacctccatctcg

SEQ ID NO: 228309 - DNA, 55 bp, Artificial
  Synthetic oligonucleotide
tgaccggatgtgcctcattcctgatgcttggtcacatcggggtgttggcgattga

SEQ ID NO: 228310 - DNA, 55 bp, Artificial
  Synthetic oligonucleotide
tgacctgatgcgcaactagcccgggctctttcgaccggctcagaacccgaccgct

SEQ ID NO: 228311 - DNA, 55 bp, Artificial
  Synthetic oligonucleotide
tgacgccgtagacatgcgtgtgaggcccgctttggccagattcgcccggtagtga

SEQ ID NO: 228312 - DNA, 55 bp, Artificial
  Synthetic oligonucleotide
tgagatggacgaccaaatcatgctcgcgacctcgaaagggcagtcgatccgggtg

SEQ ID NO: 228313 - DNA, 53 bp, Artificial
  Synthetic oligonucleotide
gtcggaccttgtgacggccggcccatatgatcgggggaaggggagtaagcctt

SEQ ID NO: 228314 - DNA, 54 bp, Artificial
  Synthetic oligonucleotide
tgagcaccgggtccaaggtctccgggacagagatcgacaaacggcccggaaacc

SEQ ID NO: 228315 - DNA, 55 bp, Artificial
  Synthetic oligonucleotide
tgagcgcgtcccgactgagggcggcggctatacgatgaaccatacggcaagcgta

SEQ ID NO: 228316 - DNA, 55 bp, Artificial
  Synthetic oligonucleotide
tgagtctattcgctcggttgtggtttactgatcggacggagggcttaaggcgccc

SEQ ID NO: 228317 - DNA, 55 bp, Artificial
  Synthetic oligonucleotide
tgagtgcgggtttgacgaagtgctctaaaatcgttgcgtcagagatgacaagggt

SEQ ID NO: 228318 - DNA, 55 bp, Artificial
  Synthetic oligonucleotide
tgataaacccattttggttcgatatcagggacagttttacacaccgattgtcagc

SEQ ID NO: 228319 - DNA, 55 bp, Artificial
  Synthetic oligonucleotide
tgatcgggtctttgaaagcaccgaatatcatgcgttgcgctccattcgtgagcgc

SEQ ID NO: 228320 - DNA, 55 bp, Artificial
  Synthetic oligonucleotide
tcgcagttcatgtctggcatcgtgttccgatccgacgtgctcaaggcttggggcg

SEQ ID NO: 228321 - DNA, 55 bp, Artificial
  Synthetic oligonucleotide
tcgcggttccctgaacaagcgctcacgatgggcacaggtggccaacgcatctgag

SEQ ID NO: 228322 - DNA, 55 bp, Artificial
  Synthetic oligonucleotide
tcgctgccaacgctccgctttgcgacacgcgctcacctgtcgatttcgcaatgtg

SEQ ID NO: 228323 - DNA, 55 bp, Artificial
  Synthetic oligonucleotide
tcggaagcggatcatgcgaagacgatatatctctcgttccgcgacaaacagaggt

SEQ ID NO: 228324 - DNA, 60 bp, Artificial
  Synthetic oligonucleotide
aagctccatgccgttcagatggatcggccggtacagggtcgcatagcgtcccgtgctgtc

SEQ ID NO: 228325 - DNA, 55 bp, Artificial
  Synthetic oligonucleotide
tcggagtggctcctgttggcggggtttgacatctcgcttgagacagagctgacgc

SEQ ID NO: 228326 - DNA, 54 bp, Artificial
  Synthetic oligonucleotide
tcggcatatgtaggtttgggccacgaaattcgccgggacactcaaccgtttacc

SEQ ID NO: 228327 - DNA, 55 bp, Artificial
  Synthetic oligonucleotide
tcgtagacggggtgccgcagcgtaacttgatcccagatcaaatcctcttggatcg

SEQ ID NO: 228328 - DNA, 55 bp, Artificial
  Synthetic oligonucleotide
tcgtcgtccaatcttgcgcgtgtcctgagtgccgtgaatacggtagtactgccag

SEQ ID NO: 228329 - DNA, 55 bp, Artificial
  Synthetic oligonucleotide
tcgtgaaagcgcttcgggagcagcttccccggcgggagtcacgtcggacgggcag

SEQ ID NO: 228330 - DNA, 55 bp, Artificial
  Synthetic oligonucleotide
tcgtgcccaaccattgtcgtccggggcttgtatgccgccccacttggcgtcacct

SEQ ID NO: 228331 - DNA, 55 bp, Artificial
  Synthetic oligonucleotide
tcgtgccccggagccccacttcatgcgccttggaaggagtttggtcgatgatagc

SEQ ID NO: 228332 - DNA, 55 bp, Artificial
  Synthetic oligonucleotide
tcgtgtatagtaacgatcggtagctggcactgcctatccagtgataatcgtgacg

SEQ ID NO: 228333 - DNA, 55 bp, Artificial
  Synthetic oligonucleotide
tcgttgaatccgaagataccctagtctttatgagccgcatccttgacggggctcc

SEQ ID NO: 228334 - DNA, 55 bp, Artificial
  Synthetic oligonucleotide
tctccctgactgaaggctggctaggcccatgcttcggtgctgccgaacagcgttg

SEQ ID NO: 228335 - DNA, 60 bp, Artificial
  Synthetic oligonucleotide
gtcgctggcgtcctcgttgtggcccgcgaagatcgagacgttgttgctgtggccgttcac

SEQ ID NO: 228336 - DNA, 55 bp, Artificial
  Synthetic oligonucleotide
tctctatagcgaattgaggccccgccatgacaagtaaggccgtgaccagtaacac

SEQ ID NO: 228337 - DNA, 55 bp, Artificial
  Synthetic oligonucleotide
tctgaagcggcttgacggctcgcccggtgtctatcggatgctggatggggaaagc

SEQ ID NO: 228338 - DNA, 55 bp, Artificial
  Synthetic oligonucleotide
tctggaatggcggtcagaactgttcggccaatatgcgccagctaatcgcgacccc

SEQ ID NO: 228339 - DNA, 55 bp, Artificial
  Synthetic oligonucleotide
tctggcaacggctggggaggcgacatgttcatagggctcgatctgggcacatcgg

SEQ ID NO: 228340 - DNA, 55 bp, Artificial
  Synthetic oligonucleotide
tctgtgagaagagccggaccccttcttcctcgagtttgtaggacccgaccgagtg

SEQ ID NO: 228341 - DNA, 55 bp, Artificial
  Synthetic oligonucleotide
gccgtacctgagaaccacagatcaggcgttcagaaatgtccttacggcggcttcg

SEQ ID NO: 228342 - DNA, 55 bp, Artificial
  Synthetic oligonucleotide
gccgtccaaacagtgaagctgacactctataatcggccgaagcctaagagcgcga

SEQ ID NO: 228343 - DNA, 55 bp, Artificial
  Synthetic oligonucleotide
gccgtctttgggcgttccctcaacaagaatgaccgcgccgtctatttcgaggctc

SEQ ID NO: 228344 - DNA, 55 bp, Artificial
  Synthetic oligonucleotide
gccgtgaaagggatccccgaacatattcagcaggggaacggtttcctgtgacagg

SEQ ID NO: 228345 - DNA, 55 bp, Artificial
  Synthetic oligonucleotide
gccgtggctcgcagtaacggccgcatctccctgggtctgatcaatcaccagaacg

SEQ ID NO: 228346 - DNA, 56 bp, Artificial
  Synthetic oligonucleotide
aaagatccccaagactaaatcctctgacgaggatgggccgccccaggacgatcttg

SEQ ID NO: 228347 - DNA, 55 bp, Artificial
  Synthetic oligonucleotide
gcctagtctggcctccccgatcctagtgaaatggcccgatcccgtatgagtagcc

SEQ ID NO: 228348 - DNA, 55 bp, Artificial
  Synthetic oligonucleotide
gcctcaagaactcggaatcagcgcatttctccgcgttatgccgggttttcccggg

SEQ ID NO: 228349 - DNA, 55 bp, Artificial
  Synthetic oligonucleotide
gcctctcacctcattagagcagacattatctgactgagagctgtcctccaaagac

SEQ ID NO: 228350 - DNA, 55 bp, Artificial
  Synthetic oligonucleotide
gcctctgtggcggaactgtagatcaggatgcctcctggaagcctcgcgagtgcga

SEQ ID NO: 228351 - DNA, 54 bp, Artificial
  Synthetic oligonucleotide
gcctgagacgggttggggattctctgtaaattgtccgaaggacgacgccttttc

SEQ ID NO: 228352 - DNA, 55 bp, Artificial
  Synthetic oligonucleotide
gccttcatgtgaccaccgaacagatcaagtataacgatatgtccgtcaaaccctc

SEQ ID NO: 228353 - DNA, 54 bp, Artificial
  Synthetic oligonucleotide
gcgaaccccgccttacgcggctaagcgcaagggcttaagtttcgataactcgaa

SEQ ID NO: 228354 - DNA, 55 bp, Artificial
  Synthetic oligonucleotide
gcgaccaactgcgtgacttcgtcgtctggtatcctctcggcgctatcgaggatgg

SEQ ID NO: 228355 - DNA, 55 bp, Artificial
  Synthetic oligonucleotide
gcgaccgatctgtcaaaagatacaggaccatcaagttgtctgacactcaacacca

SEQ ID NO: 228356 - DNA, 55 bp, Artificial
  Synthetic oligonucleotide
gcgacgaaacgcatcaggtgaacggcaactctggtcaacggggaaaacctgtgct

SEQ ID NO: 228357 - DNA, 50 bp, Artificial
  Synthetic oligonucleotide
atctgggttccgaaactaacgaattctggttccgaaactaacgaacgaat

SEQ ID NO: 228358 - DNA, 55 bp, Artificial
  Synthetic oligonucleotide
gcgacgcatcttccagccctctgtcggaggtcttccatgcctgctgtctggtcgt

SEQ ID NO: 228359 - DNA, 55 bp, Artificial
  Synthetic oligonucleotide
gcgagaattggcctagtcactccaggaggccgatatgagacacacccgccttgcg

SEQ ID NO: 228360 - DNA, 55 bp, Artificial
  Synthetic oligonucleotide
gcgagccacagtcgcggttggtgttccgaacgctgtacaacctctctaccaaggt

SEQ ID NO: 228361 - DNA, 55 bp, Artificial
  Synthetic oligonucleotide
gcccaagcattcgatcgatgcacgcaccctctgcctgatgatcggctacaactcg

SEQ ID NO: 228362 - DNA, 55 bp, Artificial
  Synthetic oligonucleotide
gcccagaacgcacgcgcgctcgtatttaccggtcgtcttcgcgtgcgatctttgc

SEQ ID NO: 228363 - DNA, 55 bp, Artificial
  Synthetic oligonucleotide
gccccgagagtaataacaaaggtgagcgcaatataaggcttaatcagtttcagta

SEQ ID NO: 228364 - DNA, 55 bp, Artificial
  Synthetic oligonucleotide
gccccgtacaggagcaacaatctcaacacgctgcaagacatcttgtgccgcccgt

SEQ ID NO: 228365 - DNA, 55 bp, Artificial
  Synthetic oligonucleotide
gcccgcagagggcttgggagtgagtaccgaggtgtttgttgtcggaacagacggc

SEQ ID NO: 228366 - DNA, 55 bp, Artificial
  Synthetic oligonucleotide
gcccgcctaggctaggcagttggcagggaacgatgacgttccacgaacttccctt

SEQ ID NO: 228367 - DNA, 55 bp, Artificial
  Synthetic oligonucleotide
gcccggcaatgactgccgtacccgtacatttgtttagaaccggtacgcgacacgc

SEQ ID NO: 228368 - DNA, 58 bp, Artificial
  Synthetic oligonucleotide
cctatttcacacccgatcccgtcgtctccacattagttcgctgggctatccatagccc

SEQ ID NO: 228369 - DNA, 55 bp, Artificial
  Synthetic oligonucleotide
gccctctgtcggaggtcttccatgcctgctgtctggtcgttcctggacaggttcg

SEQ ID NO: 228370 - DNA, 55 bp, Artificial
  Synthetic oligonucleotide
gccctgaaatgcatggcccggagtgttagccgttgcccggatatcaggaaagtgc

SEQ ID NO: 228371 - DNA, 55 bp, Artificial
  Synthetic oligonucleotide
gcccttgcacagaccctgtgcgggcatcggagttttctgcgtgcgcgaaagggat

SEQ ID NO: 228372 - DNA, 55 bp, Artificial
  Synthetic oligonucleotide
gccgaacgccttaccgatcgaccatgcgatgacggccccgaacccgatcttgaga

SEQ ID NO: 228373 - DNA, 55 bp, Artificial
  Synthetic oligonucleotide
gccgaactcccaggtggtgaagacatagagatcctgcgccacgcgcgagaacagc

SEQ ID NO: 228374 - DNA, 55 bp, Artificial
  Synthetic oligonucleotide
gccgaatgcgagcgctagcaggggcgccgcgaatcccctagaaatgcccgggaaa

SEQ ID NO: 228375 - DNA, 55 bp, Artificial
  Synthetic oligonucleotide
gccgacgcatttagtgtctccccgtcgcgaatcggtccccaatgtagaccaatcg

SEQ ID NO: 228376 - DNA, 55 bp, Artificial
  Synthetic oligonucleotide
gccgagaccccgaaggaaagaacgagcaaggagggcgggatcaggctaaatatcg

SEQ ID NO: 228377 - DNA, 55 bp, Artificial
  Synthetic oligonucleotide
gccgagtcgcttccgagtggctcaacaaacgtcgaagacatggcgaaaccactga

SEQ ID NO: 228378 - DNA, 55 bp, Artificial
  Synthetic oligonucleotide
gccgccaaaacaatctgcgatgcgaatagtctttgcgaacacccagtgtcggcac

SEQ ID NO: 228379 - DNA, 59 bp, Artificial
  Synthetic oligonucleotide
atcggtaccaaggcctgtttcagatcagcgtaacgccgggagtggggcagccagatatc

SEQ ID NO: 228380 - DNA, 55 bp, Artificial
  Synthetic oligonucleotide
gccgccagatgcataagtgtaggtgccttgaccgtgggatgcgccattcttgaat

SEQ ID NO: 228381 - DNA, 55 bp, Artificial
  Synthetic oligonucleotide
gccggattcagcttcgatgagacgcggaaccgcgccgttcccaaggggaaatagg

SEQ ID NO: 228382 - DNA, 55 bp, Artificial
  Synthetic oligonucleotide
gcgcgcgtttgtgcgtgaggaagccgcggcacatgctaacttcggttccgcaggt

SEQ ID NO: 228383 - DNA, 55 bp, Artificial
  Synthetic oligonucleotide
gcgctaacgaaattcagggcttctgtcctacctgaacttactggagaagtcgcgt

SEQ ID NO: 228384 - DNA, 55 bp, Artificial
  Synthetic oligonucleotide
gcgctaccacagacgttttaacgagagatgttcaaggaaccgtcgccgcaccagc

SEQ ID NO: 228385 - DNA, 55 bp, Artificial
  Synthetic oligonucleotide
gcgctggtttcgaatttaatgagaacacctacgttgtggaatctgacggccttaa

SEQ ID NO: 228386 - DNA, 55 bp, Artificial
  Synthetic oligonucleotide
gcgctgtgccctagacctaagatccgcgttcccatttccaaccattcgctgaggc

SEQ ID NO: 228387 - DNA, 55 bp, Artificial
  Synthetic oligonucleotide
gcgcttgacctatgtcgccggaacctgcgtctacgaggccgcctgatgccaatga

SEQ ID NO: 228388 - DNA, 55 bp, Artificial
  Synthetic oligonucleotide
gcgcttgtgaccttgcgatttacctcttcaggccagggagagtagatatttcccg

SEQ ID NO: 228389 - DNA, 55 bp, Artificial
  Synthetic oligonucleotide
gcggaacgttcccgactcggtgagcgggtttgaaccaccagtactcttcatgtgc

SEQ ID NO: 228390 - DNA, 60 bp, Artificial
  Synthetic oligonucleotide
gtccgagtgcttggggcactaatcgcacggtcctacagcgatggtccgatagcgccctca

SEQ ID NO: 228391 - DNA, 55 bp, Artificial
  Synthetic oligonucleotide
gcggatcgtccttcgcaggacctgcgtccttgaaagccgcgctcagatcgacgaa

SEQ ID NO: 228392 - DNA, 55 bp, Artificial
  Synthetic oligonucleotide
gcggcaaaccaatctggcaaatcatgggctggacttcgcggacctggatgagtgg

SEQ ID NO: 228393 - DNA, 55 bp, Artificial
  Synthetic oligonucleotide
gcggcacgtttgggaatgggaagcacatcggcaggcaagacgtcatagctgttga

SEQ ID NO: 228394 - DNA, 55 bp, Artificial
  Synthetic oligonucleotide
gcggcagataaataggagaccaccaatgctcaccccgttccaccttgcctacaac

SEQ ID NO: 228395 - DNA, 55 bp, Artificial
  Synthetic oligonucleotide
gcggccgaacctgtgggcacggacaagtccttcgtaatccagctcgcggctataa

SEQ ID NO: 228396 - DNA, 55 bp, Artificial
  Synthetic oligonucleotide
gcggccgttccgtgataggctcgtcgcgttggtctgatgccgtggttccatgttt

SEQ ID NO: 228397 - DNA, 55 bp, Artificial
  Synthetic oligonucleotide
gcggcggacctgtgcatcggcgcagggaaactgcgcagcagtggaggtggcccga

SEQ ID NO: 228398 - DNA, 55 bp, Artificial
  Synthetic oligonucleotide
gcggcggatccatagattttgttcacgggcgacctccctctggtttcgttgcgcc

SEQ ID NO: 228399 - DNA, 55 bp, Artificial
  Synthetic oligonucleotide
gcggcttgcatatccagccagatcgtctgacttcagcccaagctgtgcagccagg

SEQ ID NO: 228400 - DNA, 55 bp, Artificial
  Synthetic oligonucleotide
gcgggaccactgcgctaagggattgaatgtccctatatcatatactcacgaccgt

SEQ ID NO: 228401 - DNA, 58 bp, Artificial
  Synthetic oligonucleotide
gtctcggggccaaatggtgacacggcgcccctcattcagtggcacccaggatgtcccc

SEQ ID NO: 228402 - DNA, 55 bp, Artificial
  Synthetic oligonucleotide
gcgagctttcgagacaaatcgagccggattgaaaggatcgagccggattgaaagg

SEQ ID NO: 228403 - DNA, 55 bp, Artificial
  Synthetic oligonucleotide
gcgaggggattgacccaagcgccattgatgtagaactgacgtttctcgatcatgg

SEQ ID NO: 228404 - DNA, 55 bp, Artificial
  Synthetic oligonucleotide
gcgatcagcccaagcgcgtttgcctcatcggtgccgggaacaaatgatagggcgc

SEQ ID NO: 228405 - DNA, 55 bp, Artificial
  Synthetic oligonucleotide
gcgatcgcgtttcaagccacctatccgaattgttcggacggtttcagctaaaccc

SEQ ID NO: 228406 - DNA, 55 bp, Artificial
  Synthetic oligonucleotide
gcgattggcgcaccttatcctcggaacacgaacagccgaactgcaccgcttgcgt

SEQ ID NO: 228407 - DNA, 55 bp, Artificial
  Synthetic oligonucleotide
gcgcaacctgagagtttctaacgctaccgaacgcctgtcttgcagtgcagggagg

SEQ ID NO: 228408 - DNA, 55 bp, Artificial
  Synthetic oligonucleotide
gcgcaagggcttaagtttcggttacccgagctgcttacgcagccagagcgaccgg

SEQ ID NO: 228409 - DNA, 55 bp, Artificial
  Synthetic oligonucleotide
gcgcagtctcgtgtcagagtgatatgccaacttgcgcgtgtttgatcgagttgac

SEQ ID NO: 228410 - DNA, 55 bp, Artificial
  Synthetic oligonucleotide
gcgcatagcgtcggaagcgatgatacccgtgaacaacatgtgccagtggatcagc

SEQ ID NO: 228411 - DNA, 55 bp, Artificial
  Synthetic oligonucleotide
gcgcatccgaatcgttgccatagcctgtcattaccaattcgcgggtggcagcacg

SEQ ID NO: 228412 - DNA, 60 bp, Artificial
  Synthetic oligonucleotide
tcacggcttgattccagcgtgctagttggcgtttatgagtagccggaggctttgtcgcac

SEQ ID NO: 228413 - DNA, 60 bp, Artificial
  Synthetic oligonucleotide
cctggcggatatctacgagacatcaagagcttccgtcggtcttcccgtggcagctgactc

SEQ ID NO: 228414 - DNA, 55 bp, Artificial
  Synthetic oligonucleotide
gcgcatgtttgccctaaacgggcgctgaaacttggagaaaactcgtgtcccacgc

SEQ ID NO: 228415 - DNA, 55 bp, Artificial
  Synthetic oligonucleotide
gcgcattctgaaccgtccggtttagtttgccagaccctagccgcgccgatctcgg

SEQ ID NO: 228416 - DNA, 55 bp, Artificial
  Synthetic oligonucleotide
gcgccataaggcgatgtaaggggcgtgccatacactgtcaatgtagcagccttgc

SEQ ID NO: 228417 - DNA, 55 bp, Artificial
  Synthetic oligonucleotide
gcgcccagcggtgtcaaaactcatggtgccacaccagggcatatctgccagcgca

SEQ ID NO: 228418 - DNA, 55 bp, Artificial
  Synthetic oligonucleotide
gcgcccgttacctcaaccgatacggatggtatttccccatccctcgtcgctagcg

SEQ ID NO: 228419 - DNA, 54 bp, Artificial
  Synthetic oligonucleotide
gcgccgcacaaactggaaaaccgtggaataagggacacttccgcgggatgggcg

SEQ ID NO: 228420 - DNA, 55 bp, Artificial
  Synthetic oligonucleotide
gcgcgaggtgtcttgtttgagatacgcactgatgccgtctcgcgtgtttagctgc

SEQ ID NO: 228421 - DNA, 55 bp, Artificial
  Synthetic oligonucleotide
gcgcgatgtatcgaagctgtgacttgcaaattgtaatacacgccgtgtaggcacg

SEQ ID NO: 228422 - DNA, 55 bp, Artificial
  Synthetic oligonucleotide
gcgcgcaacactcaaattgcgtatgaatggatcatctcatgacaaccctcgtttt

SEQ ID NO: 228423 - DNA, 55 bp, Artificial
  Synthetic oligonucleotide
gaggaagggcagacctgagacgaaacctaccatagacacgaaccacggttgggaa

SEQ ID NO: 228424 - DNA, 60 bp, Artificial
  Synthetic oligonucleotide
cctacaaactgtatgggtaattcatgccatacggatctggataatcgtatcgcactgttt

SEQ ID NO: 228425 - DNA, 55 bp, Artificial
  Synthetic oligonucleotide
gaggcatcataccctgaccgcaactcggagtagagttcggttctagacgtgggtg

SEQ ID NO: 228426 - DNA, 55 bp, Artificial
  Synthetic oligonucleotide
gagggagactgcccatgctcgatctgacttatgagacccccgcacccaaggtgat

SEQ ID NO: 228427 - DNA, 54 bp, Artificial
  Synthetic oligonucleotide
gaggtgttgaattcgtgtcactttacgttgccccgatggataaggtaaatccgg

SEQ ID NO: 228428 - DNA, 55 bp, Artificial
  Synthetic oligonucleotide
gagtaaggttcagaaccgtggatcgtgcgtggccgcaaagctgccatccaactgc

SEQ ID NO: 228429 - DNA, 55 bp, Artificial
  Synthetic oligonucleotide
gatacggatcgcattcaaaccagccttgccagttttcaagcaggcgaggtgccga

SEQ ID NO: 228430 - DNA, 55 bp, Artificial
  Synthetic oligonucleotide
gatataacggaaacagccaggcaaacggatgccactgctccccgacagacacccc

SEQ ID NO: 228431 - DNA, 55 bp, Artificial
  Synthetic oligonucleotide
gatcaatgaaagcaggacgcgctatgaaattcaccggaacgcaagactacgtggc

SEQ ID NO: 228432 - DNA, 55 bp, Artificial
  Synthetic oligonucleotide
gatcatgcacggtttctggcatgatggccgcagaagcgtgcaaggattgagccat

SEQ ID NO: 228433 - DNA, 55 bp, Artificial
  Synthetic oligonucleotide
gatcccaagggccgaggcctctgcgcgaaagtcaggcaatagatagttgcgctgg

SEQ ID NO: 228434 - DNA, 55 bp, Artificial
  Synthetic oligonucleotide
gatccctcgcgacacaaggcacgtggccaaacacgaccgtttctgccacaagcgg

SEQ ID NO: 228435 - DNA, 59 bp, Artificial
  Synthetic oligonucleotide
atcgcccgtaagcactgcggcaactccccgaagtggcagatcggacttgcaaacctcca

SEQ ID NO: 228436 - DNA, 55 bp, Artificial
  Synthetic oligonucleotide
gatctccgttaacgacgcgggacagatagtcgcaaaccggtcatgtggctagggc

SEQ ID NO: 228437 - DNA, 55 bp, Artificial
  Synthetic oligonucleotide
gatcttgcgtcgtcagctgtacaacttgcgattagagtttctggccgatcaaggg

SEQ ID NO: 228438 - DNA, 55 bp, Artificial
  Synthetic oligonucleotide
gattaaccgcccgacaactcttcacggataagaccgacatgacagccggactggc

SEQ ID NO: 228439 - DNA, 55 bp, Artificial
  Synthetic oligonucleotide
gcaaatgcgatggcaagggcgggagtaaatcgtttcatggatcaaagcctttcgg

SEQ ID NO: 228440 - DNA, 55 bp, Artificial
  Synthetic oligonucleotide
gcaaccccatgtggtctctcagccgtgcagctgatcaacgcaggtcgctcgggtt

SEQ ID NO: 228441 - DNA, 55 bp, Artificial
  Synthetic oligonucleotide
gcaaccgtgatatcttggcggccagtcgcgcgcttgtgtccttcgtgtcaccggg

SEQ ID NO: 228442 - DNA, 55 bp, Artificial
  Synthetic oligonucleotide
gcaagcgacggggccgcttttgttcaatgccgttattcaagacgcgcttgccgtg

SEQ ID NO: 228443 - DNA, 55 bp, Artificial
  Synthetic oligonucleotide
gacgaatgcatctcactagcaaggctgattgccagtggagtttcctgctcagagc

SEQ ID NO: 228444 - DNA, 55 bp, Artificial
  Synthetic oligonucleotide
gacgcattgtcccggaacctgacggagcccaacgtgtccacgcccaaacgcaagt

SEQ ID NO: 228445 - DNA, 55 bp, Artificial
  Synthetic oligonucleotide
gacgccgctctctgaaaagagacacgttgtgatggtcccaaacgcaactcacggt

SEQ ID NO: 228446 - DNA, 58 bp, Artificial
  Synthetic oligonucleotide
gtcagctggaaggaaacagggtcgtgttgcaacgcctcaagggggtattccatcgcta

SEQ ID NO: 228447 - DNA, 55 bp, Artificial
  Synthetic oligonucleotide
gacgcctgatggacactcttatgcggccagcgctcttgatcgattgatcggcgtt

SEQ ID NO: 228448 - DNA, 55 bp, Artificial
  Synthetic oligonucleotide
gacgcttaatcgcttttgcgacgggccacgaaatctatttcgctgcgagtaattc

SEQ ID NO: 228449 - DNA, 55 bp, Artificial
  Synthetic oligonucleotide
gacggatcagtcgaccctgacaacgatttcgacatgttgtgggagatcgcaagcg

SEQ ID NO: 228450 - DNA, 55 bp, Artificial
  Synthetic oligonucleotide
gacgggcttcatattgttgggcgtgaactatctgaagagtctgtgcaaaacacgc

SEQ ID NO: 228451 - DNA, 55 bp, Artificial
  Synthetic oligonucleotide
gacgtccgtgggaccgaatagattggtgttcacgaaagggtaataagccgcgcca

SEQ ID NO: 228452 - DNA, 55 bp, Artificial
  Synthetic oligonucleotide
gactacgcaaaggtgtctcactcgcgcaagcccacaaaaccgcaggtgttcaaac

SEQ ID NO: 228453 - DNA, 55 bp, Artificial
  Synthetic oligonucleotide
gactagtgggcttgagcctagatctaaatccgctccgtgcagccgacttcccgga

SEQ ID NO: 228454 - DNA, 55 bp, Artificial
  Synthetic oligonucleotide
gactcctcggtaaattctgcgacccttggcaatcggtttcatcaataccgccctc

SEQ ID NO: 228455 - DNA, 55 bp, Artificial
  Synthetic oligonucleotide
gactgaaatgacaattggaggacatcttatgggcagagtggcacttgtgacgggg

SEQ ID NO: 228456 - DNA, 55 bp, Artificial
  Synthetic oligonucleotide
gactggcgcacaaccatgtcgatttccgacagtaatgattggccgaattcggatg

SEQ ID NO: 228457 - DNA, 60 bp, Artificial
  Synthetic oligonucleotide
aagcgcgtcccacaacggcacagggacatgggcgctcaatgacgtatccggcctgcctcg

SEQ ID NO: 228458 - DNA, 55 bp, Artificial
  Synthetic oligonucleotide
gagaaaactcgtgtcccacgcagaagaccacgaaggaacccggagagatttcctc

SEQ ID NO: 228459 - DNA, 55 bp, Artificial
  Synthetic oligonucleotide
gagaagatgctcaacggtatctttgaagcgctgcggacgtgggacggtctctctg

SEQ ID NO: 228460 - DNA, 55 bp, Artificial
  Synthetic oligonucleotide
gagagctgcgatacgaccgtctgtcttcgcttattgagcgctttaaggtggaggc

SEQ ID NO: 228461 - DNA, 55 bp, Artificial
  Synthetic oligonucleotide
gagcacaacattgtgatgcgcccgccgtcctagcgctggttccgcctctctcgct

SEQ ID NO: 228462 - DNA, 55 bp, Artificial
  Synthetic oligonucleotide
gagccgaagggcatgattcaccgcacgaaaatagagcggtactatgtctgatctc

SEQ ID NO: 228463 - DNA, 55 bp, Artificial
  Synthetic oligonucleotide
gaggaacctttcacatgaactccaccagaatcatggtcacccataaggggcctac

SEQ ID NO: 228464 - DNA, 55 bp, Artificial
  Synthetic oligonucleotide
gcataaactgaaaccactgaccccgcttgggtctcatacgccgcgtgttgaccgg

SEQ ID NO: 228465 - DNA, 55 bp, Artificial
  Synthetic oligonucleotide
gcataagcgtgcatcatgcgtaggaatgcgacgccccttgatgcagaggcgacgt

SEQ ID NO: 228466 - DNA, 55 bp, Artificial
  Synthetic oligonucleotide
gcatatcacaagggcagctttccgccaaagacagatcaacacggacattgcacgc

SEQ ID NO: 228467 - DNA, 55 bp, Artificial
  Synthetic oligonucleotide
gcatcccgttcaaacacaaccctccgcatggtgtgccgcatgaggcgttaagatc

SEQ ID NO: 228468 - DNA, 60 bp, Artificial
  Synthetic oligonucleotide
ccttggcagtacaaccatggtcgcaggctgcgtgagtggcgggggcgagacacccactga

SEQ ID NO: 228469 - DNA, 55 bp, Artificial
  Synthetic oligonucleotide
gcatctagccgtcgtcagttgcggactctttgtcgataggctatatcccgactcc

SEQ ID NO: 228470 - DNA, 55 bp, Artificial
  Synthetic oligonucleotide
gcatgggatgtcaatatggggagttgtcagggcaaatggacagcgctaaccaaat

SEQ ID NO: 228471 - DNA, 55 bp, Artificial
  Synthetic oligonucleotide
gcatgggttcgcgaagggaatcctgaggcgtcagacttgtgcaacaacgccccgt

SEQ ID NO: 228472 - DNA, 55 bp, Artificial
  Synthetic oligonucleotide
gcatgttcgcgagacaggtaacgggaggatcggtttcgcgcgcaagacaagaccc

SEQ ID NO: 228473 - DNA, 55 bp, Artificial
  Synthetic oligonucleotide
gcatttgacagacccgagttttctgaattccgggctgcggcacgtctttgggccg

SEQ ID NO: 228474 - DNA, 55 bp, Artificial
  Synthetic oligonucleotide
gccaaagcgcgccttagctgctgtgcatccacggcagtgacgccgtcgaacagaa

SEQ ID NO: 228475 - DNA, 55 bp, Artificial
  Synthetic oligonucleotide
gccaacggcctcttcataacgtcccagccgatagagcacccaaccaaggctatcg

SEQ ID NO: 228476 - DNA, 55 bp, Artificial
  Synthetic oligonucleotide
gccaacgtggcgaagacattctgacgctctttacccggctctgcgagcagtttgc

SEQ ID NO: 228477 - DNA, 55 bp, Artificial
  Synthetic oligonucleotide
gccaccaacccaatagatgatcatcagcagacctgcgcctgatagccacgtcgtg

SEQ ID NO: 228478 - DNA, 55 bp, Artificial
  Synthetic oligonucleotide
gccacgcggggaattgcttatatagagggcactgctcgataggtttcttgcctgt

SEQ ID NO: 228479 - DNA, 56 bp, Artificial
  Synthetic oligonucleotide
gtcaagtatcttgtccggtggaacttctgtcatggacgcgggtaatcctccccact

SEQ ID NO: 228480 - DNA, 55 bp, Artificial
  Synthetic oligonucleotide
gccacgcgtgaccagaataccgagtgccaaaccggccgctgcaatcattaaggcg

SEQ ID NO: 228481 - DNA, 55 bp, Artificial
  Synthetic oligonucleotide
gccagcagggaaccccttatacagtgagtcaaacaagtcacggatgcgggacctt

SEQ ID NO: 228482 - DNA, 55 bp, Artificial
  Synthetic oligonucleotide
gccagcggatatagagcgtgtggtcaatggcgcggttgagatgtttctcgcgcgt

SEQ ID NO: 228483 - DNA, 55 bp, Artificial
  Synthetic oligonucleotide
gccatattgagatcgcaggatccaactctgcgttttggacgataggaagcatgtc

SEQ ID NO: 228484 - DNA, 55 bp, Artificial
  Synthetic oligonucleotide
gccatccagcagggagcgcccgacaagtggcacatcttcctccctctctgatcgt

SEQ ID NO: 228485 - DNA, 55 bp, Artificial
  Synthetic oligonucleotide
gcaagctgcttatgccttgacccttgttcgtaatagcgattcctcttcgcacggc

SEQ ID NO: 228486 - DNA, 55 bp, Artificial
  Synthetic oligonucleotide
gcaaggcacatcggcggattccggaccagtttcggaagaagctatacattccgcg

SEQ ID NO: 228487 - DNA, 55 bp, Artificial
  Synthetic oligonucleotide
gcaagggcgcaagtaccgacacagcagtaatgagcgtccgaatctcccctcggcg

SEQ ID NO: 228488 - DNA, 55 bp, Artificial
  Synthetic oligonucleotide
gcacacgcgagctggtggtccgaccaaactacctcgtggtctacgctgaaacccc

SEQ ID NO: 228489 - DNA, 55 bp, Artificial
  Synthetic oligonucleotide
gcaccacgatcgaggttcgggctatgtatcgatcgatgtcaaacatagcgacgga

SEQ ID NO: 228490 - DNA, 60 bp, Artificial
  Synthetic oligonucleotide
gtatgttgctgcacaggttcgaccgcccctggcaggctgtcccgcatccctgagattggt

SEQ ID NO: 228491 - DNA, 55 bp, Artificial
  Synthetic oligonucleotide
gcaccgagtggaccagtcaccaaagttcgacctaagcagatcaatcccgtcctgg

SEQ ID NO: 228492 - DNA, 55 bp, Artificial
  Synthetic oligonucleotide
gcactacgaaaccacgccctatcgggaacgcggcagtaaatcgagctccgcctag

SEQ ID NO: 228493 - DNA, 55 bp, Artificial
  Synthetic oligonucleotide
gcactgaccaattttggtgtcggcacgtttgatcttgccaaaaccacatatccgt

SEQ ID NO: 228494 - DNA, 55 bp, Artificial
  Synthetic oligonucleotide
gcactggcgactttcggttgacccaccccgatatgaaagtcccaagcgagacatc

SEQ ID NO: 228495 - DNA, 55 bp, Artificial
  Synthetic oligonucleotide
gcacttcgtgatgcatcggacaagtatagatcacactctcttgcgtcgggtcagg

SEQ ID NO: 228496 - DNA, 55 bp, Artificial
  Synthetic oligonucleotide
gcagaaacccgtctgccccacagttagggcgcaacactgggttccacaagtggga

SEQ ID NO: 228497 - DNA, 55 bp, Artificial
  Synthetic oligonucleotide
gcagaactcctagtcagcagatgcctcacgctaggaacatcaggctaacacggcg

SEQ ID NO: 228498 - DNA, 55 bp, Artificial
  Synthetic oligonucleotide
gcagcccaacagggcctgcccgcgacaattattcttgatccagatcaaactccgc

SEQ ID NO: 228499 - DNA, 54 bp, Artificial
  Synthetic oligonucleotide
gcaggagcaccccagagtacgaaacccgaaatcacgagacccacgaaacccgcg

SEQ ID NO: 228500 - DNA, 54 bp, Artificial
  Synthetic oligonucleotide
gcaggcattcgactggttttaacggttggtccggggcgtagaattcggtatgcc

SEQ ID NO: 228501 - DNA, 60 bp, Artificial
  Synthetic oligonucleotide
atcccgacatcgcgaaggcgaagatcgatcccttcctccactatctcgaacacggctgga

SEQ ID NO: 228502 - DNA, 55 bp, Artificial
  Synthetic oligonucleotide
gcaggccagagcacacgctcgaaccctcggctgggattactacaccctacggtct

SEQ ID NO: 228503 - DNA, 55 bp, Artificial
  Synthetic oligonucleotide
gcagggtgggacaactgcggactacatgaacaacgactttcaccagccagctacg

SEQ ID NO: 228504 - DNA, 55 bp, Artificial
  Synthetic oligonucleotide
gcagttctaccacgttcggcagaacgcgcctatagcccggccatcacagttagcc

SEQ ID NO: 228505 - DNA, 55 bp, Artificial
  Synthetic oligonucleotide
gcagttgaccgaaactcgcctaggccatgagatcccaaagatgcgggctaaagcg

SEQ ID NO: 228506 - DNA, 55 bp, Artificial
  Synthetic oligonucleotide
ggccgtgccctttcgctggacacggaaccatcctcccgcgggattaagagatcgt

SEQ ID NO: 228507 - DNA, 55 bp, Artificial
  Synthetic oligonucleotide
ggccgtgcggctctactttgcctgcgtcgcacaagcacctactattccgtacccc

SEQ ID NO: 228508 - DNA, 55 bp, Artificial
  Synthetic oligonucleotide
ggcctcagacacggatccggcgacgctcagtgatcgtttggcaggggttgagatc

SEQ ID NO: 228509 - DNA, 55 bp, Artificial
  Synthetic oligonucleotide
ggcctcagtaacgggtatgccaagagcagcgtacctgtttaggacggcaacacgg

SEQ ID NO: 228510 - DNA, 55 bp, Artificial
  Synthetic oligonucleotide
ggcctctgtcttggggatgccaagcgctgtgaagccgtttaggatcgcagcacgg

SEQ ID NO: 228511 - DNA, 55 bp, Artificial
  Synthetic oligonucleotide
ggcgaattcgttttggtcctgcggaacggtccattccactgtctcccggcgttga

SEQ ID NO: 228512 - DNA, 60 bp, Artificial
  Synthetic oligonucleotide
cgaagcctcacgtctctctgctgatcccgctttgccccaaccgcattcagcgtgagaaac

SEQ ID NO: 228513 - DNA, 55 bp, Artificial
  Synthetic oligonucleotide
ggcgaccaattggaaactggcggtcgagaactactgcgagagctaccacttgccg

SEQ ID NO: 228514 - DNA, 55 bp, Artificial
  Synthetic oligonucleotide
ggcgacggcaacagggtaaaatcgtcacgttgtggctcgaggacgtcgcgtttgc

SEQ ID NO: 228515 - DNA, 55 bp, Artificial
  Synthetic oligonucleotide
ggcgagacactgcaagtcagcggtgtaacgatcgggacaatcgatgcgacagcag

SEQ ID NO: 228516 - DNA, 55 bp, Artificial
  Synthetic oligonucleotide
ggcgcatgtccagtcgagtgcacccgggttgcgttgctccaccgattagctggaa

SEQ ID NO: 228517 - DNA, 55 bp, Artificial
  Synthetic oligonucleotide
ggcgccactcgatagactgcacaagcaggcaacgtcggatgcattgcacacggct

SEQ ID NO: 228518 - DNA, 55 bp, Artificial
  Synthetic oligonucleotide
ggcgcccattgagcgcccttatgtcagatgttcacagccctgtagtaacgcttag

SEQ ID NO: 228519 - DNA, 55 bp, Artificial
  Synthetic oligonucleotide
ggcggggctatctgaagacttaacgcatcttcaggcgggtccgtggaggttcccc

SEQ ID NO: 228520 - DNA, 55 bp, Artificial
  Synthetic oligonucleotide
ggcgggtgtggcagaaagtgcgatcagggtcaaaagtgcgcgcatgtcgggacca

SEQ ID NO: 228521 - DNA, 54 bp, Artificial
  Synthetic oligonucleotide
ggcggtaggcgcggagggattaaacccaactcggcagaattgccgattagtcct

SEQ ID NO: 228522 - DNA, 55 bp, Artificial
  Synthetic oligonucleotide
ggcgtaaagcctcgcgtcctgcgcggatataacggcggtgatatcacttatcctg

SEQ ID NO: 228523 - DNA, 60 bp, Artificial
  Synthetic oligonucleotide
ggacggcaaccccaacaatcgccgcccgacctctggagcttgagtatgacagtcgtatca

SEQ ID NO: 228524 - DNA, 57 bp, Artificial
  Synthetic oligonucleotide
gtgaggggatttcagggtgcgctgcatcaacggggaacccggcgaactcatggttaa

SEQ ID NO: 228525 - DNA, 53 bp, Artificial
  Synthetic oligonucleotide
ggcaaagggcctaaaccgtaatatacaggtgggcgcggaaattcgggcctgtg

SEQ ID NO: 228526 - DNA, 55 bp, Artificial
  Synthetic oligonucleotide
ggcaacgcctctaccatttcggcgctcttgaacggccttgtaggttttgagcgag

SEQ ID NO: 228527 - DNA, 55 bp, Artificial
  Synthetic oligonucleotide
ggcaaggccgtgccctttcgctggacacggaaccatcctcccgctggattaagag

SEQ ID NO: 228528 - DNA, 55 bp, Artificial
  Synthetic oligonucleotide
ggcacatatgtccggcattccgcacgatcattacgagccgaaaaccggtggcgag

SEQ ID NO: 228529 - DNA, 55 bp, Artificial
  Synthetic oligonucleotide
ggcaccccgagggatagacgacgcgagacacattccgatgccagaaagacccatc

SEQ ID NO: 228530 - DNA, 55 bp, Artificial
  Synthetic oligonucleotide
ggcactcctttccacggagggagacatagggatcagtggagacgctgtgaaggag

SEQ ID NO: 228531 - DNA, 55 bp, Artificial
  Synthetic oligonucleotide
ggcactgactctatctgtcatcccgaatgtaaagctaccatcgactgcgtatgtc

SEQ ID NO: 228532 - DNA, 55 bp, Artificial
  Synthetic oligonucleotide
ggcagactgtccgttggggatggccccatctgtatattgtgccgtgttgatgtcg

SEQ ID NO: 228533 - DNA, 55 bp, Artificial
  Synthetic oligonucleotide
ggcaggcctgtgctcttggtccagacaagttaaggtgtgcctctgcaacgcgttc

SEQ ID NO: 228534 - DNA, 55 bp, Artificial
  Synthetic oligonucleotide
ggcagggttttctcgtgccctatgaccctgaaccggcgcgtgcgtttggacgatg

SEQ ID NO: 228535 - DNA, 57 bp, Artificial
  Synthetic oligonucleotide
cgaatcgaagcggaatgcaactcgtggttgtatcgccggactgatttcgggccggcg

SEQ ID NO: 228536 - DNA, 55 bp, Artificial
  Synthetic oligonucleotide
ggcatatggagcttggatcagaatgcgcaagttaatcggatgttttgtcgtttgt

SEQ ID NO: 228537 - DNA, 55 bp, Artificial
  Synthetic oligonucleotide
ggcatcaatcgcaatcgactagaagcggtcgtttcctttggtgagacacagccgc

SEQ ID NO: 228538 - DNA, 55 bp, Artificial
  Synthetic oligonucleotide
ggccaccgcattaagatgcggcagccctatcgtgttctgtgtcgtctgaaaaggg

SEQ ID NO: 228539 - DNA, 55 bp, Artificial
  Synthetic oligonucleotide
ggcccagatcgtaggggcaaaggtgatcttccagaggctcgaccgttcttcggag

SEQ ID NO: 228540 - DNA, 55 bp, Artificial
  Synthetic oligonucleotide
ggcccgaatgctgccccttgtgaccttcaaaacgacgggaggcataaaatgagcg

SEQ ID NO: 228541 - DNA, 55 bp, Artificial
  Synthetic oligonucleotide
ggccgatgattttatgtcgctcatctaacatgagcccctagcattgggaatgtga

SEQ ID NO: 228542 - DNA, 53 bp, Artificial
  Synthetic oligonucleotide
ggccgcaaaagggagaaatggggccgcaaaagggagaaatggggccgatagcg

SEQ ID NO: 228543 - DNA, 55 bp, Artificial
  Synthetic oligonucleotide
ggccgccggagacacgcctatctcgccgggatgtgaacgggagtgaggccttatg

SEQ ID NO: 228544 - DNA, 55 bp, Artificial
  Synthetic oligonucleotide
ggccgtccaagggcaatcgtccaaggaccaagtcgcggctgccatcgcaggtttt

SEQ ID NO: 228545 - DNA, 55 bp, Artificial
  Synthetic oligonucleotide
gggccgcacctactcggagatcgtgcgttactagctgtagtgccgaacggcgatc

SEQ ID NO: 228546 - DNA, 58 bp, Artificial
  Synthetic oligonucleotide
ccgtgtcggatcttgctttgttacccgtgtgaaaggtaatcgctgagcctcattacac

SEQ ID NO: 228547 - DNA, 55 bp, Artificial
  Synthetic oligonucleotide
gggcctcggttcagtgaaacgcgggcgttgcggcaccgcagtatgtcgtatgcta

SEQ ID NO: 228548 - DNA, 55 bp, Artificial
  Synthetic oligonucleotide
gggcgcacccgcaacagcgcagaacgcctacactgggtctacgcacaggaattga

SEQ ID NO: 228549 - DNA, 55 bp, Artificial
  Synthetic oligonucleotide
gggcgccacttctcctgcacatgccgctagtttaagcgcgaataatgacgctgac

SEQ ID NO: 228550 - DNA, 54 bp, Artificial
  Synthetic oligonucleotide
gggcgtaagtggccggagatcccgtcagaagttctaaacgtttggaccactctc

SEQ ID NO: 228551 - DNA, 55 bp, Artificial
  Synthetic oligonucleotide
gggcgtggggcgcgagaactccaaggcggcgattgatcactatagccagttgaaa

SEQ ID NO: 228552 - DNA, 55 bp, Artificial
  Synthetic oligonucleotide
gggctgacggaaggttccaccgccctgcgttggtccatgtgtaagcgaagtcagt

SEQ ID NO: 228553 - DNA, 55 bp, Artificial
  Synthetic oligonucleotide
ggggaaatccatgcgaaagcggaaatacgcgcgaatgcagcagcgttaggcgtga

SEQ ID NO: 228554 - DNA, 55 bp, Artificial
  Synthetic oligonucleotide
ggggaaattacgacaacaaacgtaagctccccaattcgctttgcgataggcacaa

SEQ ID NO: 228555 - DNA, 55 bp, Artificial
  Synthetic oligonucleotide
ggggattggtgggagcgctatgtagttctgccaatgctacagtctgttgcgaccg

SEQ ID NO: 228556 - DNA, 55 bp, Artificial
  Synthetic oligonucleotide
ggggccagacttcccgaatgaggagcgtacccttgcttcgatctctctcgacgtg

SEQ ID NO: 228557 - DNA, 55 bp, Artificial
  Synthetic oligonucleotide
ggttcgcacgagagcaggattaaacgatgtgcgttccggtaccgacaaagggacg

SEQ ID NO: 228558 - DNA, 55 bp, Artificial
  Synthetic oligonucleotide
ggggcgctgtgagtagaaacggccagcacccctaatggtgtcggccatcctgtga

SEQ ID NO: 228559 - DNA, 55 bp, Artificial
  Synthetic oligonucleotide
ggggctcctgaacgtacggttcgtgcattccagtctgagtatcgcacataacgtg

SEQ ID NO: 228560 - DNA, 55 bp, Artificial
  Synthetic oligonucleotide
ggggtacggcaatattcagactgccgtcgcagcaacgcgtcttggggccatcgac

SEQ ID NO: 228561 - DNA, 55 bp, Artificial
  Synthetic oligonucleotide
ggggtcaagatttcgtgggtcgaatgcgggcgctcgacgttatagtaagccagcc

SEQ ID NO: 228562 - DNA, 55 bp, Artificial
  Synthetic oligonucleotide
gggtagcaatgcgaacctttatctgatggacttacgcactcgtcggacaactcgt

SEQ ID NO: 228563 - DNA, 55 bp, Artificial
  Synthetic oligonucleotide
ggcgtcccaagccgaacgatgcctgacaactccgtctcatcaaacacagcgagcg

SEQ ID NO: 228564 - DNA, 55 bp, Artificial
  Synthetic oligonucleotide
ggctagaccgcaccacaaaggccgtagacatgactgctttcggcataggcgcgtc

SEQ ID NO: 228565 - DNA, 55 bp, Artificial
  Synthetic oligonucleotide
ggctcaaagagaacaacgcacagttcccaaacagttcgttaactgaggtcgggaa

SEQ ID NO: 228566 - DNA, 55 bp, Artificial
  Synthetic oligonucleotide
ggctgaccgatgtgagtttcgtgcgctatcagacacgcggcggattaagtgagga

SEQ ID NO: 228567 - DNA, 55 bp, Artificial
  Synthetic oligonucleotide
ggctgatctagcgggatgggatcacgattgcaagtcccctagaacgcaatctccc

SEQ ID NO: 228568 - DNA, 59 bp, Artificial
  Synthetic oligonucleotide
taacctatatctgcgcatggaggacatgggacggaccgaacaggtggttaacaccctgc

SEQ ID NO: 228569 - DNA, 55 bp, Artificial
  Synthetic oligonucleotide
ggcttcggcaattcgcctcacgggatatttgcggcaagatgaatgagaagccccg

SEQ ID NO: 228570 - DNA, 55 bp, Artificial
  Synthetic oligonucleotide
ggcttgatacaaataagacgctaaaccgcaggttagagaaacatactgtcgaccc

SEQ ID NO: 228571 - DNA, 55 bp, Artificial
  Synthetic oligonucleotide
ggcttgtcttgatgcaatccggatctttctccatccatgcggctcttcccgcacc

SEQ ID NO: 228572 - DNA, 55 bp, Artificial
  Synthetic oligonucleotide
ggctttcgatattgtccatattgactaaaatacgcgccatgatttagttggggcg

SEQ ID NO: 228573 - DNA, 55 bp, Artificial
  Synthetic oligonucleotide
ggctttgtatgccgatcttgctaagtgttccatgattgatgcgaacatcaatggc

SEQ ID NO: 228574 - DNA, 55 bp, Artificial
  Synthetic oligonucleotide
gggaaaagcgtatagataaggcactgctcgataggtttcttgcctgtatgaaacc

SEQ ID NO: 228575 - DNA, 55 bp, Artificial
  Synthetic oligonucleotide
gggaacatcgtgaacgttgatgcgggcaacaaggaagccttcacgcgctgacaga

SEQ ID NO: 228576 - DNA, 55 bp, Artificial
  Synthetic oligonucleotide
gggaaggattgattgccaatattctaagaccccgcgcatgatattcgggctctca

SEQ ID NO: 228577 - DNA, 55 bp, Artificial
  Synthetic oligonucleotide
gggacacagcctcgtacctgcgaacacccttgataacgaagccgtagtcagcccc

SEQ ID NO: 228578 - DNA, 55 bp, Artificial
  Synthetic oligonucleotide
gggaggctatctagaaacctcaccgcactgggtcaacccataatcggacggatgg

SEQ ID NO: 228579 - DNA, 58 bp, Artificial
  Synthetic oligonucleotide
atgtgttgccctaaagcgcgctagcataagaaaactgtaaaggatgcccccatttatg

SEQ ID NO: 228580 - DNA, 55 bp, Artificial
  Synthetic oligonucleotide
gggaggtctcaaccaatccaaacgcagatcctgagttcgacgcttacgtagactc

SEQ ID NO: 228581 - DNA, 55 bp, Artificial
  Synthetic oligonucleotide
gggatttgctgcaacgctgaccgccgacaaatgtgaagccatgaacgggcgccac

SEQ ID NO: 228582 - DNA, 55 bp, Artificial
  Synthetic oligonucleotide
gggcagtcgtgcaaccgcgttgtcggtcgttgccccaacccttgcgcgttcggcg

SEQ ID NO: 228583 - DNA, 55 bp, Artificial
  Synthetic oligonucleotide
gggccacgaaaagcaaaacccctgaactctacagcccgcgagggatcggcctgca

SEQ ID NO: 228584 - DNA, 55 bp, Artificial
  Synthetic oligonucleotide
gctcagttcccggggtacgtaaatttcaagttggcatccggactgggcgcataga

SEQ ID NO: 228585 - DNA, 55 bp, Artificial
  Synthetic oligonucleotide
gctcatagagtggcatgcgaactcctgtttgtgtctaggcgcatttcatagacgg

SEQ ID NO: 228586 - DNA, 55 bp, Artificial
  Synthetic oligonucleotide
gctcatccggataatgattcgttacccactctaccgtcaaacaggtactaagcgg

SEQ ID NO: 228587 - DNA, 55 bp, Artificial
  Synthetic oligonucleotide
gctcctgtgatctggtgcaccctgccaatgcacgcgattgccatcggatcgaaag

SEQ ID NO: 228588 - DNA, 55 bp, Artificial
  Synthetic oligonucleotide
gctccttccgcccgaacactccatgtttgggtaccatctagatggcgcatcgccg

SEQ ID NO: 228589 - DNA, 55 bp, Artificial
  Synthetic oligonucleotide
gctcgacagttgccgaagacgcattagcgccaacgctcggctatgttccgacaga

SEQ ID NO: 228590 - DNA, 53 bp, Artificial
  Synthetic oligonucleotide
ggctgtcttttgctaaatctgaaaccgctagggggaacccgccaaagaatacc

SEQ ID NO: 228591 - DNA, 55 bp, Artificial
  Synthetic oligonucleotide
gctctaggattggtcagatccgcatctctgcgcccaagacaggtcactccatcaa

SEQ ID NO: 228592 - DNA, 55 bp, Artificial
  Synthetic oligonucleotide
gctctcgcgaggacaaccaataagcgtccaatgtgtctttcgaaatgtcgatccc

SEQ ID NO: 228593 - DNA, 55 bp, Artificial
  Synthetic oligonucleotide
gctctctccgcactgtgtctcacaggtcatacgacgtgcgcttgttggccgggga

SEQ ID NO: 228594 - DNA, 55 bp, Artificial
  Synthetic oligonucleotide
gctctgcggacaaagcagtcattcgccggtttcagggtgcgagtgacgctgttgc

SEQ ID NO: 228595 - DNA, 55 bp, Artificial
  Synthetic oligonucleotide
gctctggcctgccatcacagcgtcatgtgcacttttccactgcacaccggttagc

SEQ ID NO: 228596 - DNA, 55 bp, Artificial
  Synthetic oligonucleotide
gctctggtatcgtgccttcgccgtggactttacgcatgaactggcccgacacgcc

SEQ ID NO: 228597 - DNA, 55 bp, Artificial
  Synthetic oligonucleotide
gctcttcgatcaacatgaggtggtgtactcggaagggcttcaaaccgagagcttt

SEQ ID NO: 228598 - DNA, 55 bp, Artificial
  Synthetic oligonucleotide
gctcttgatctgaaggggcatcccgcctatacgacgcgcaagtctggaatcgcgc

SEQ ID NO: 228599 - DNA, 55 bp, Artificial
  Synthetic oligonucleotide
gctgagcgctgcctcatttccgccttatttgtgcccgtcagcgggatattgctca

SEQ ID NO: 228600 - DNA, 55 bp, Artificial
  Synthetic oligonucleotide
gctgcaagccataatagttcggttccatcttagcgtccccgggctatccagagtt

SEQ ID NO: 228601 - DNA, 55 bp, Artificial
  Synthetic oligonucleotide
taagaccccgggaggaacttgaccacgggaggatagctcgggtgggtatgtgtga

SEQ ID NO: 228602 - DNA, 55 bp, Artificial
  Synthetic oligonucleotide
gctgcacccacacaagacaccatatgtcactttcggaaacatcgtggagcgctcc

SEQ ID NO: 228603 - DNA, 55 bp, Artificial
  Synthetic oligonucleotide
gctgcggttcgtgtgattgtcggctatctatgtaggcccgcgagattatcccgcg

SEQ ID NO: 228604 - DNA, 55 bp, Artificial
  Synthetic oligonucleotide
gcgggcgtggctcggctaaaagcggcgaaaatcacagcacagaggccatgaccga

SEQ ID NO: 228605 - DNA, 55 bp, Artificial
  Synthetic oligonucleotide
gcgggttagtgtacttgacttggacaactactgtcgtttcaggcaggcatacatc

SEQ ID NO: 228606 - DNA, 55 bp, Artificial
  Synthetic oligonucleotide
gcgggttgacttgtcaccgagtcgcccgtaaagacgcggcttcaacgagagatcg

SEQ ID NO: 228607 - DNA, 55 bp, Artificial
  Synthetic oligonucleotide
gcggtataaattccaggcccggttgtcaagccttgcgatcctatcgcgggcgata

SEQ ID NO: 228608 - DNA, 55 bp, Artificial
  Synthetic oligonucleotide
gcggtcagctatggctcgggcgattacatggacagctatttctcggtggatgccc

SEQ ID NO: 228609 - DNA, 55 bp, Artificial
  Synthetic oligonucleotide
gcggtccagcgttaacaacacaacgttgtacatttgatatgttacgtcatcgcgc

SEQ ID NO: 228610 - DNA, 55 bp, Artificial
  Synthetic oligonucleotide
gcggtcgagcgcgatgtagctgcccgcgaattgcgacgaatgcagccagctcagt

SEQ ID NO: 228611 - DNA, 55 bp, Artificial
  Synthetic oligonucleotide
gcggttggtcattcatttagctgaagcctaaccagaagactcacagaagatcagc

SEQ ID NO: 228612 - DNA, 57 bp, Artificial
  Synthetic oligonucleotide
atgtttcgcgcgcgaaacattaggtaagtagtgttgacctattgtttcgcgcgcgaa

SEQ ID NO: 228613 - DNA, 55 bp, Artificial
  Synthetic oligonucleotide
gcggtttggatcggatgctcggctatgggttaaagtcaccgcaaggctttgaatt

SEQ ID NO: 228614 - DNA, 55 bp, Artificial
  Synthetic oligonucleotide
gcgtcgatggagcatccgctgttttcgttggcaaccaagccggacatgcggcacc

SEQ ID NO: 228615 - DNA, 55 bp, Artificial
  Synthetic oligonucleotide
gcgtgggacgttgtgatccgctttctaaatctgagaccactgactggtggtcaca

SEQ ID NO: 228616 - DNA, 55 bp, Artificial
  Synthetic oligonucleotide
gcgtgtaaaaggcacttacgatttctgaaccaattccggctagcgtgatcaggtg

SEQ ID NO: 228617 - DNA, 55 bp, Artificial
  Synthetic oligonucleotide
gcgtgtctacgtctgatggcgcttggtcgtcaggccgtctgcttcgctccgtgat

SEQ ID NO: 228618 - DNA, 55 bp, Artificial
  Synthetic oligonucleotide
gcgtgttctgtcacaacagccgcgcgttctatgaccctgaacagcatacgcccca

SEQ ID NO: 228619 - DNA, 55 bp, Artificial
  Synthetic oligonucleotide
gcgttctcgatcaaacaattagtgacagaacatatgatcaagtcaatgggtctat

SEQ ID NO: 228620 - DNA, 55 bp, Artificial
  Synthetic oligonucleotide
gcgttgcctattcgacacgtgatctctggcgtcgctatgtcgtcctgcctgccgc

SEQ ID NO: 228621 - DNA, 55 bp, Artificial
  Synthetic oligonucleotide
gcgtttcggacgccacagacccttccatgcgctccgcgtatgtcttcttctgtgc

SEQ ID NO: 228622 - DNA, 55 bp, Artificial
  Synthetic oligonucleotide
gctaggggctgccattgcctatatgattgacccaattgcggaccggctcgaggct

SEQ ID NO: 228623 - DNA, 59 bp, Artificial
  Synthetic oligonucleotide
ggctgctgcgtttaaggtgcttctctgttcgcttggccaattcagggccaaacttttga

SEQ ID NO: 228624 - DNA, 55 bp, Artificial
  Synthetic oligonucleotide
gctcaaaatcggagaggctacgaactcgccctcatccgaggcgatgtcatcaagg

SEQ ID NO: 228625 - DNA, 55 bp, Artificial
  Synthetic oligonucleotide
ggagaagcgtcaacagacaagcggccagcgatctcatgccagggcgtctcatttc

SEQ ID NO: 228626 - DNA, 55 bp, Artificial
  Synthetic oligonucleotide
ggagccaccatcgcagacggcaaaatgctcgcccttgctgctcttggtctgctgt

SEQ ID NO: 228627 - DNA, 55 bp, Artificial
  Synthetic oligonucleotide
ggagcctccaaccagaaagcgttcgaagaggccgacgatatctccacgcacgggg

SEQ ID NO: 228628 - DNA, 55 bp, Artificial
  Synthetic oligonucleotide
ggagcctctgacgattacttgctcgattggaaagtacaaaggctcaacgcgcttg

SEQ ID NO: 228629 - DNA, 55 bp, Artificial
  Synthetic oligonucleotide
ggagcgatgcccatcttgcctgcccatggttcgggttctgactagtcatatgcat

SEQ ID NO: 228630 - DNA, 55 bp, Artificial
  Synthetic oligonucleotide
ggagctagcgatcgcgggtcttttgccagatacgcgcggtgacaaccagtgccca

SEQ ID NO: 228631 - DNA, 55 bp, Artificial
  Synthetic oligonucleotide
ggaggatgacgacattgacttggactgtagtagaggtgcgcagcgtcgtttgccc

SEQ ID NO: 228632 - DNA, 55 bp, Artificial
  Synthetic oligonucleotide
ggaggtggccgtatagcaagggacgccctagttgtccagcaacgttgattgcctg

SEQ ID NO: 228633 - DNA, 55 bp, Artificial
  Synthetic oligonucleotide
ggagtcgagtggcactacaagcccaaatcggctgttcgtcctgttgacgaccgac

SEQ ID NO: 228634 - DNA, 54 bp, Artificial
  Synthetic oligonucleotide
ggacggaccggccccagaggaagcgccgccctgcaagtagacccgagagccccg

SEQ ID NO: 228635 - DNA, 58 bp, Artificial
  Synthetic oligonucleotide
taagttcaggcgaaaatcgcctttcattttcaatggcttgcgcgcctatcggggagaa

SEQ ID NO: 228636 - DNA, 55 bp, Artificial
  Synthetic oligonucleotide
ggagttcacatctttcgggatagagaaggcccacgtcttaggaggccaatgtgac

SEQ ID NO: 228637 - DNA, 55 bp, Artificial
  Synthetic oligonucleotide
ggatacgagccgtgaagggtgaggcaagtccgctcaggtcccggagaaccgatcc

SEQ ID NO: 228638 - DNA, 55 bp, Artificial
  Synthetic oligonucleotide
ggatagctgaagcgcttgccttccaaatcgatctctccgaggaaagacccaaacc

SEQ ID NO: 228639 - DNA, 55 bp, Artificial
  Synthetic oligonucleotide
ggatcgccgttaatagaaacggacagaactgtagttacaattcagttggaggtga

SEQ ID NO: 228640 - DNA, 55 bp, Artificial
  Synthetic oligonucleotide
ggatcgcctcctgtctgccgggcgcgccttacggtcacctgacaggtggcgcgaa

SEQ ID NO: 228641 - DNA, 55 bp, Artificial
  Synthetic oligonucleotide
ggatcggccatcgccattcgtgcaggtgacagagcggatagggctgtgaatgcgg

SEQ ID NO: 228642 - DNA, 55 bp, Artificial
  Synthetic oligonucleotide
ggatgaagccgtgaaaacggtctaactgcgtgcagcctgacgcaatagccagcac

SEQ ID NO: 228643 - DNA, 55 bp, Artificial
  Synthetic oligonucleotide
ggatgccgacacttactggggtgtcagtcagcagccccgtggactgagagatttg

SEQ ID NO: 228644 - DNA, 55 bp, Artificial
  Synthetic oligonucleotide
ggatgctccttgtcgcgaggctacgacgtttgggtgccgagatgtgatgttagcg

SEQ ID NO: 228645 - DNA, 55 bp, Artificial
  Synthetic oligonucleotide
ggatttccgtgtttccgcgattcaacctcgtcttttatcgtaatgacggcgtgac

SEQ ID NO: 228646 - DNA, 57 bp, Artificial
  Synthetic oligonucleotide
attaatcgggtgagtacacaccggatcttttcgaaagcctgccatagctcgttgccg

SEQ ID NO: 228647 - DNA, 55 bp, Artificial
  Synthetic oligonucleotide
gctgggccaaagataataacctaaggctcggcacgctaaacggaagacagaaagc

SEQ ID NO: 228648 - DNA, 55 bp, Artificial
  Synthetic oligonucleotide
gctggttcttggaatagagatgttcctgatggttgtagggattgaccgagggcgc

SEQ ID NO: 228649 - DNA, 55 bp, Artificial
  Synthetic oligonucleotide
gcttctgccttgcccgaccatccatgacggatgtggcttaacaatcggttagggg

SEQ ID NO: 228650 - DNA, 55 bp, Artificial
  Synthetic oligonucleotide
gcttgatcacagatgctcagacgcacttgttcgtaggtcggtatctcccctgtcg

SEQ ID NO: 228651 - DNA, 55 bp, Artificial
  Synthetic oligonucleotide
gcttgcttcatgaccccaaaacgagcgagaggatgtgcgtacttgaggagcgaag

SEQ ID NO: 228652 - DNA, 55 bp, Artificial
  Synthetic oligonucleotide
gcttgtcagacagtgtgtacttgtcggcaatacgcgctaggtgaccttctgtata

SEQ ID NO: 228653 - DNA, 55 bp, Artificial
  Synthetic oligonucleotide
gcttttgcaatggtgagtgtgcgaaagttttcggatgacacatctaatgccctgc

SEQ ID NO: 228654 - DNA, 55 bp, Artificial
  Synthetic oligonucleotide
ggaaaagatacgcggtccgagcaagcgatttcatctgtgactcggaagacgcata

SEQ ID NO: 228655 - DNA, 55 bp, Artificial
  Synthetic oligonucleotide
ggaactgcgactgcgccgaggcaggcttagaacgataaggctcagacccgccaac

SEQ ID NO: 228656 - DNA, 55 bp, Artificial
  Synthetic oligonucleotide
ggaccacatacaccggagagcggcgtgtgactgcgattgtgcgggatctcacctc

SEQ ID NO: 228657 - DNA, 60 bp, Artificial
  Synthetic oligonucleotide
ggctgctcggcgcactatgctccagcacttacgcatgatgtatgggctcgtacggctgac

SEQ ID NO: 228658 - DNA, 55 bp, Artificial
  Synthetic oligonucleotide
ggaccgcctctgtatcagggcctgcgagaatttcgcccatgctggctatcccgat

SEQ ID NO: 228659 - DNA, 55 bp, Artificial
  Synthetic oligonucleotide
ggaccggccgacttagtattgtgtgcagacgttacgagaggtgtggcaacgggtc

SEQ ID NO: 228660 - DNA, 55 bp, Artificial
  Synthetic oligonucleotide
ggaccgtgaccccagtttcacgcatttccaagtgggagagacgcaaatggaagac

SEQ ID NO: 228661 - DNA, 55 bp, Artificial
  Synthetic oligonucleotide
ggaccgtgtgaaaggtccacttcgcaaggctcgagcactaatcaaggccgagcaa

SEQ ID NO: 228662 - DNA, 55 bp, Artificial
  Synthetic oligonucleotide
ggacgaatagaagagcctgacctcaaattccgtgtccacatacgtgctgaccgcc

SEQ ID NO: 228663 - DNA, 55 bp, Artificial
  Synthetic oligonucleotide
ggacgcgcgcatctgctacttttgctgagcacgcataacaatcaagaacgtctgt

SEQ ID NO: 228664 - DNA, 55 bp, Artificial
  Synthetic oligonucleotide
ggacggtgtcgcccgatttgacttcggtcataagtgcctcgtttggtcgggagtg

SEQ ID NO: 228665 - DNA, 55 bp, Artificial
  Synthetic oligonucleotide
ggacttcaggaagcctccggaggaactaagccggagcctgcgcattgcatatagg

SEQ ID NO: 228666 - DNA, 55 bp, Artificial
  Synthetic oligonucleotide
ggacttgctcgagactatcgctcaagagtacgtgagcatcatccacgaagtgagc

SEQ ID NO: 228667 - DNA, 55 bp, Artificial
  Synthetic oligonucleotide
attcgcgcggggttgacgcatggttttatcattctatgtgagaataccgcatgac

SEQ ID NO: 228668 - DNA, 60 bp, Artificial
  Synthetic oligonucleotide
tacccgcgtcttgcaacgtgcggggctgctacagcttgggccttgcgcgcatgacaaacg

SEQ ID NO: 228669 - DNA, 55 bp, Artificial
  Synthetic oligonucleotide
attctccagctgacatagcacggattcggggaactggcacgcctctcccggcgcg

SEQ ID NO: 228670 - DNA, 55 bp, Artificial
  Synthetic oligonucleotide
attgagtggccgcccttagccgctcaatcccctgacacgacggagcaacacgtgg

SEQ ID NO: 228671 - DNA, 55 bp, Artificial
  Synthetic oligonucleotide
acggcataggcccgcctgtttccaagcggacctctgtcagtggttcggccccgat

SEQ ID NO: 228672 - DNA, 55 bp, Artificial
  Synthetic oligonucleotide
acgggcaagcgaccgccagattttcgacaaggtgacttgctcggttcataacggc

SEQ ID NO: 228673 - DNA, 55 bp, Artificial
  Synthetic oligonucleotide
aagagatctttccgcagaacatcaccgcacatctggtggcgcagctctcgggctg

SEQ ID NO: 228674 - DNA, 55 bp, Artificial
  Synthetic oligonucleotide
aagactcgaaagcggaaggcccgctaatagacagacctagcggctcaggccgcta

SEQ ID NO: 228675 - DNA, 55 bp, Artificial
  Synthetic oligonucleotide
aagaatgcgcggccttaagtgctggcataagcgactgggtcgctgagatccttag

SEQ ID NO: 228676 - DNA, 55 bp, Artificial
  Synthetic oligonucleotide
acgggtcgtggccgttacattcccctgcgatcagggattagctttgcagcgggcg

SEQ ID NO: 228677 - DNA, 55 bp, Artificial
  Synthetic oligonucleotide
attgctttgcgatagcacaaccagtagcatctcgcatgatttggggtgcccgcag

SEQ ID NO: 228678 - DNA, 55 bp, Artificial
  Synthetic oligonucleotide
acggtagacctgaccctcctggtaggtggccaagcgcactcggctgtcgttggga

SEQ ID NO: 228679 - DNA, 60 bp, Artificial
  Synthetic oligonucleotide
attacatctggcggacacgacgcgacggtaaagtgcgcttgtctcatgctgaacgcgaag

SEQ ID NO: 228680 - DNA, 55 bp, Artificial
  Synthetic oligonucleotide
atttcacgtaggggaacgccaatgccagttcacccattgaatattgccagtgagt

SEQ ID NO: 228681 - DNA, 55 bp, Artificial
  Synthetic oligonucleotide
atttccctcgctggacgctctacatgaggcgtgcggtgccattcctcagacgcgg

SEQ ID NO: 228682 - DNA, 55 bp, Artificial
  Synthetic oligonucleotide
acggtttatgccgccaagcctgaatatgcgttttacagccgctatatcgatacgc

SEQ ID NO: 228683 - DNA, 55 bp, Artificial
  Synthetic oligonucleotide
aggtcgttacgcctctgcgcatgcccacccgataggtttcaggccgccagaagtc

SEQ ID NO: 228684 - DNA, 55 bp, Artificial
  Synthetic oligonucleotide
acgtaactcagcgcgccaccagcttgtgggctggcggaaggtggcgaaacggtat

SEQ ID NO: 228685 - DNA, 53 bp, Artificial
  Synthetic oligonucleotide
atttcgcggtcgatttgctgccgccgggactgtttttccccgacccggtgcga

SEQ ID NO: 228686 - DNA, 55 bp, Artificial
  Synthetic oligonucleotide
atgctggtggcgtgggttacggtaaggcaccatgccctcccgattaatccgccgc

SEQ ID NO: 228687 - DNA, 52 bp, Artificial
  Synthetic oligonucleotide
acgcccgggaagcgggaagggtggcagcgggagacgacggtaagcggcttgg

SEQ ID NO: 228688 - DNA, 55 bp, Artificial
  Synthetic oligonucleotide
acgccggacaaaatccgctttgtggacaatctggttcatgtgggtgaaacaacgc

SEQ ID NO: 228689 - DNA, 53 bp, Artificial
  Synthetic oligonucleotide
aaggctctacgccgcaaacgtgggctccacgccaacccttggacgtcctaccc

SEQ ID NO: 228690 - DNA, 60 bp, Artificial
  Synthetic oligonucleotide
ggctgagcagatgtgaactgtccgggaacacatgccagaacttcattttaggcgatcctt

SEQ ID NO: 228691 - DNA, 55 bp, Artificial
  Synthetic oligonucleotide
aaggccttcccaaccaaccgtgctgtacaagatacccgttgaaagagcagagatc

SEQ ID NO: 228692 - DNA, 55 bp, Artificial
  Synthetic oligonucleotide
atggctgtcgtcttgctgcactgcggcacctttcctttgaccgcaccatacgccc

SEQ ID NO: 228693 - DNA, 54 bp, Artificial
  Synthetic oligonucleotide
acgcgcgaagttgcgccaaaaggtacattgccgatcccgtgaggttttgggtgg

SEQ ID NO: 228694 - DNA, 55 bp, Artificial
  Synthetic oligonucleotide
acgctattcgtccacagggtcacctgtaacggaaatgacctagtgcctccacggg

SEQ ID NO: 228695 - DNA, 55 bp, Artificial
  Synthetic oligonucleotide
aagcggtccagataagcttgcacccggtaagctgtgtcgagatagtctcgagcac

SEQ ID NO: 228696 - DNA, 54 bp, Artificial
  Synthetic oligonucleotide
acggaagtcggaagcatcgggagggttgtgacggcggaacgaggggctcttgga

SEQ ID NO: 228697 - DNA, 55 bp, Artificial
  Synthetic oligonucleotide
attaacattccatatagacagcatgactgacctgcggaggattcatggatctgcc

SEQ ID NO: 228698 - DNA, 55 bp, Artificial
  Synthetic oligonucleotide
attacactgccggttccagcctgtcaggggccgttaacgcgctcaaatcccgcgg

SEQ ID NO: 228699 - DNA, 55 bp, Artificial
  Synthetic oligonucleotide
attagattgcgggtaaatgcgatcggacgccgcttgagagggacggcccctcccg

SEQ ID NO: 228700 - DNA, 54 bp, Artificial
  Synthetic oligonucleotide
aagccgcgtaaaacacaggttttcaattcggaatttcaactgtcggcccgatgc

SEQ ID NO: 228701 - DNA, 57 bp, Artificial
  Synthetic oligonucleotide
aggttacgcttccagccggattcagcttcgatgagacgcggaaccgcgccgttccca

SEQ ID NO: 228702 - DNA, 55 bp, Artificial
  Synthetic oligonucleotide
attcacctatggcacgtcttatcacgcattgaaggaccgagcgtcactggcacca

SEQ ID NO: 228703 - DNA, 55 bp, Artificial
  Synthetic oligonucleotide
aagccacgccggtctacaagatccggcagaggggtggaaagcccttggccgatgc

SEQ ID NO: 228704 - DNA, 55 bp, Artificial
  Synthetic oligonucleotide
aagcaccttgaatctggacaatttcgcggaagttctctggcgtcagtctgtgacg

SEQ ID NO: 228705 - DNA, 55 bp, Artificial
  Synthetic oligonucleotide
aagcaattccgagggagttggctctgtccgggccctggtccggttatctgacgcc

SEQ ID NO: 228706 - DNA, 55 bp, Artificial
  Synthetic oligonucleotide
agggatatgcaacgggccaaacggcgcctcgcagcggtcatgtgtgcggatgtcg

SEQ ID NO: 228707 - DNA, 55 bp, Artificial
  Synthetic oligonucleotide
caaccagccggactttactccgaacaagaggctccagtggcgtcctttcaggttg

SEQ ID NO: 228708 - DNA, 55 bp, Artificial
  Synthetic oligonucleotide
aacgcaagtagaaataatccgagcgaacttgccacctaggatgatccctccccac

SEQ ID NO: 228709 - DNA, 55 bp, Artificial
  Synthetic oligonucleotide
agggaatcatctagcgttttgggtgattcgaccacccgttaagcaccactatttc

SEQ ID NO: 228710 - DNA, 52 bp, Artificial
  Synthetic oligonucleotide
agaaccgcccgcactccgagccgctttaccgcaccccgtaacgagaaccgga

SEQ ID NO: 228711 - DNA, 55 bp, Artificial
  Synthetic oligonucleotide
caacgcacgcgcctctgtcgaaagggttcacagccctagggttacgtagcgacgg

SEQ ID NO: 228712 - DNA, 60 bp, Artificial
  Synthetic oligonucleotide
tacgccgaacgatccgcgccttttggcgcatctagtcctgagccatatgccccgtatcca

SEQ ID NO: 228713 - DNA, 55 bp, Artificial
  Synthetic oligonucleotide
caacgcaggttgggtatgaaagcctctctcagtttagcagggacttcaaagtgca

SEQ ID NO: 228714 - DNA, 55 bp, Artificial
  Synthetic oligonucleotide
caacgtgttgagaccacgcatgtctccacggcctgtttcaggtatgaaccctttg

SEQ ID NO: 228715 - DNA, 55 bp, Artificial
  Synthetic oligonucleotide
agaacgccaggttgtgttcgtatacccggcaacatacttcatttgcccgtgcaag

SEQ ID NO: 228716 - DNA, 55 bp, Artificial
  Synthetic oligonucleotide
aggctgcgattggcctcttgcgcctcccggaggcttccactaatagacccgctac

SEQ ID NO: 228717 - DNA, 55 bp, Artificial
  Synthetic oligonucleotide
caactcccggtttgggcgtgacgtgcgtttaggcctaagcctatccgatgtccaa

SEQ ID NO: 228718 - DNA, 55 bp, Artificial
  Synthetic oligonucleotide
caagacctgacctgatgggttgattaggcggtagcttgcggcaagtttgtaggtg

SEQ ID NO: 228719 - DNA, 55 bp, Artificial
  Synthetic oligonucleotide
agaacgccttgtggtgggattttgcctggagcggcgatgcctcacgtttcttacg

SEQ ID NO: 228720 - DNA, 55 bp, Artificial
  Synthetic oligonucleotide
agaattttcgactggaacccgaccatgagaatggtgggacattatcttctgcccc

SEQ ID NO: 228721 - DNA, 55 bp, Artificial
  Synthetic oligonucleotide
agacaccgcatgaccgttccagtcactgtcggattcaccgacgatcatgaacccc

SEQ ID NO: 228722 - DNA, 55 bp, Artificial
  Synthetic oligonucleotide
agacgatcatcgtcgaagttgaagaccacgtagccctgatcaggctgaaccgtcc

SEQ ID NO: 228723 - DNA, 60 bp, Artificial
  Synthetic oligonucleotide
tacgcgaaaccggccatctatcggcaatcgtcaatcagtacatggcgcaagtcgaaatcc

SEQ ID NO: 228724 - DNA, 55 bp, Artificial
  Synthetic oligonucleotide
aggcgctttcagatttagggccgggtttgagcgacgttgccttgcgttgttgctg

SEQ ID NO: 228725 - DNA, 55 bp, Artificial
  Synthetic oligonucleotide
aggtcggaccgagtgtcattctccattgcgccgcatgcttggcgttccgaaagcc

SEQ ID NO: 228726 - DNA, 55 bp, Artificial
  Synthetic oligonucleotide
atttgacggtccgaaaagccggagttaaggcgatcaatgtagggacaggcaatgg

SEQ ID NO: 228727 - DNA, 55 bp, Artificial
  Synthetic oligonucleotide
aacgttttaagagacgttttcacgagtgcttcggactctgcatccaatgcgctcg

SEQ ID NO: 228728 - DNA, 55 bp, Artificial
  Synthetic oligonucleotide
acgtcgcgcgacatatcgcaagcactgggtgcgggcgggagcaccggttgatact

SEQ ID NO: 228729 - DNA, 55 bp, Artificial
  Synthetic oligonucleotide
aggggtttacggtaaatctgtctcagaattacgaactcgtgcgagttatcgcgtc

SEQ ID NO: 228730 - DNA, 55 bp, Artificial
  Synthetic oligonucleotide
caaaatgcgtgccccgcagttttatgacgccgcccgtttgtgcgttggccttcgc

SEQ ID NO: 228731 - DNA, 55 bp, Artificial
  Synthetic oligonucleotide
caaagaacgacgggtgatcatgagtggtgaattcccttggttggactttgcgtct

SEQ ID NO: 228732 - DNA, 55 bp, Artificial
  Synthetic oligonucleotide
agggctccgccccacagagttcgggcgttagaatgtcatggcgcgcaaggggatt

SEQ ID NO: 228733 - DNA, 55 bp, Artificial
  Synthetic oligonucleotide
actcagtgcccgacgtcgccctagggaccctgttccctctatcaccaagtgtcag

SEQ ID NO: 228734 - DNA, 55 bp, Artificial
  Synthetic oligonucleotide
attcaacattgggatgaggggtttacggtaaatctgtctcagaattacgaactcg

SEQ ID NO: 228735 - DNA, 55 bp, Artificial
  Synthetic oligonucleotide
actgaaacagaaaccgccaacgttagcacgatgccaacaggggtaccaatcgcag

SEQ ID NO: 228736 - DNA, 55 bp, Artificial
  Synthetic oligonucleotide
aacggaacctttgcgctcttcgcccacaatcgcaggcaaaagaaccgctccggag

SEQ ID NO: 228737 - DNA, 55 bp, Artificial
  Synthetic oligonucleotide
caacacatgccatgcttgtgtcctgtcatgcaaggagggcaaatatgctaagacg

SEQ ID NO: 228738 - DNA, 55 bp, Artificial
  Synthetic oligonucleotide
actgacccatccgctcctgcctgtcgcaacaccgactgcgcgaaccacggccttt

SEQ ID NO: 228739 - DNA, 55 bp, Artificial
  Synthetic oligonucleotide
caacacccgatacgaccggcccatgggtcacagctatttcctcgccgaccccgaa

SEQ ID NO: 228740 - DNA, 55 bp, Artificial
  Synthetic oligonucleotide
actggccgcaggaatagcagcgttgcgcctcgtagcgggcttctctcgtggtcag

SEQ ID NO: 228741 - DNA, 55 bp, Artificial
  Synthetic oligonucleotide
agggcccatcgcgtctgacggggctttaaacggcaacagggatgcgcgacgcatc

SEQ ID NO: 228742 - DNA, 55 bp, Artificial
  Synthetic oligonucleotide
caacacgcctcgtcacacgcggcagaaccttctattttcgctcggcggttcccaa

SEQ ID NO: 228743 - DNA, 55 bp, Artificial
  Synthetic oligonucleotide
caacatgaaatggcaacgcgttagcgttatcgaatcgcctcactggacacttggc

SEQ ID NO: 228744 - DNA, 55 bp, Artificial
  Synthetic oligonucleotide
acccgatctggctcatggccggacgccaagatcaggcgcacccggtctggctgat

SEQ ID NO: 228745 - DNA, 60 bp, Artificial
  Synthetic oligonucleotide
tcacttctacgtttccagaagcacgcacgcactcgaccttagcttgcacaatctgcttag

SEQ ID NO: 228746 - DNA, 60 bp, Artificial
  Synthetic oligonucleotide
cgcggaagtctgattgcacgggatgtgcgctgaaggccaaatgctgccccaactcggagg

SEQ ID NO: 228747 - DNA, 55 bp, Artificial
  Synthetic oligonucleotide
ataatgaaacgaggttggcatggcatttcagacgcgcagtcgtgatcccctgttg

SEQ ID NO: 228748 - DNA, 55 bp, Artificial
  Synthetic oligonucleotide
atccgacagccaagttccgcaacaagacaaccgttttcgggcaggcagcatcaga

SEQ ID NO: 228749 - DNA, 55 bp, Artificial
  Synthetic oligonucleotide
ataaccggatctttccgatggtcgctccctgcgtgccgcacgaatacctggaacc

SEQ ID NO: 228750 - DNA, 55 bp, Artificial
  Synthetic oligonucleotide
atcctctggatggcgctctcgagcctgaagagcccgcaggaggtgaccgcctatc

SEQ ID NO: 228751 - DNA, 55 bp, Artificial
  Synthetic oligonucleotide
acacgtttgccgagtccaccagaggccagcgccgcatgtatcacagtttggcgcc

SEQ ID NO: 228752 - DNA, 55 bp, Artificial
  Synthetic oligonucleotide
atcctgagccctgtcttgatcaaataacgaacattaatcttccgatttattcagg

SEQ ID NO: 228753 - DNA, 55 bp, Artificial
  Synthetic oligonucleotide
atcctgcagcgttcggcgcaggctattgcggggctcgatggcgccgacttctgta

SEQ ID NO: 228754 - DNA, 55 bp, Artificial
  Synthetic oligonucleotide
acacatgtggggccggtaacggttgaaaatgacgtgctctcaattggcggtattg

SEQ ID NO: 228755 - DNA, 55 bp, Artificial
  Synthetic oligonucleotide
acaatgaggaccggctcttccctgcgaaagagccggtccgccgtcatgaaacgaa

SEQ ID NO: 228756 - DNA, 55 bp, Artificial
  Synthetic oligonucleotide
ataaccattccgcagcaaggaccctgacaagacggggcgcgcgtttctgagcccc

SEQ ID NO: 228757 - DNA, 54 bp, Artificial
  Synthetic oligonucleotide
tacgttcgaaaaggttgtcgcgttcgcaccggttaatgtagccccaagcgcgaa

SEQ ID NO: 228758 - DNA, 55 bp, Artificial
  Synthetic oligonucleotide
acccgtcattgtcgcgttccggtcagcacctcttcgtgccggggtggtgtggcaa

SEQ ID NO: 228759 - DNA, 55 bp, Artificial
  Synthetic oligonucleotide
agttcctagctgtggttgcggatatacccgcgcgctatctcgactcgattacccg

SEQ ID NO: 228760 - DNA, 55 bp, Artificial
  Synthetic oligonucleotide
atcggcgccctttaccccgcaatagggcaccttatatcccgtattctggcaccac

SEQ ID NO: 228761 - DNA, 55 bp, Artificial
  Synthetic oligonucleotide
agttagggccagaatgatacgcatctttgccgccccgcattgcaatacggcgatg

SEQ ID NO: 228762 - DNA, 55 bp, Artificial
  Synthetic oligonucleotide
atcggtggcattcagccgccgtgtctgactaatatgctagtatgcttcacctgtc

SEQ ID NO: 228763 - DNA, 55 bp, Artificial
  Synthetic oligonucleotide
agttacgggaaggcaatcgcctctcgatcacggaccccgtcaccggatggtcagc

SEQ ID NO: 228764 - DNA, 55 bp, Artificial
  Synthetic oligonucleotide
accacttgccccgcttgcccggctggcttagaacgccaattaaacgcgataatag

SEQ ID NO: 228765 - DNA, 55 bp, Artificial
  Synthetic oligonucleotide
atagcggaattgcaccacgtaaaaggtcggactgcggacctcctggacgttgaaa

SEQ ID NO: 228766 - DNA, 55 bp, Artificial
  Synthetic oligonucleotide
accacgccgatggcttgggcataggagttcacacggtttccagatgccacgtttc

SEQ ID NO: 228767 - DNA, 55 bp, Artificial
  Synthetic oligonucleotide
atagggcgttgacctcttccacactcgtctcacgctccacctcgaacacacaatc

SEQ ID NO: 228768 - DNA, 60 bp, Artificial
  Synthetic oligonucleotide
ccgccgcaggagcatagccatcgccatgccgctcaggggtcgcttgggacgctggccagg

SEQ ID NO: 228769 - DNA, 55 bp, Artificial
  Synthetic oligonucleotide
atataatacgtattacacgtataaatgcaaggagatttgcagtcagcttcgcagg

SEQ ID NO: 228770 - DNA, 54 bp, Artificial
  Synthetic oligonucleotide
atatacaggtgggcgtcaggtaaccggaccagggcccggacagagccaactccc

SEQ ID NO: 228771 - DNA, 55 bp, Artificial
  Synthetic oligonucleotide
accacaggcaattccaagcgattccagttggttacgcaatctcatggatgcgttc

SEQ ID NO: 228772 - DNA, 55 bp, Artificial
  Synthetic oligonucleotide
atagccgttgatcgagtcccgataggccccgatcagggttttacgttctgcgacc

SEQ ID NO: 228773 - DNA, 55 bp, Artificial
  Synthetic oligonucleotide
accatggcaattcccagccggccaagcggtcgcacgctcaccaggagacaggttt

SEQ ID NO: 228774 - DNA, 55 bp, Artificial
  Synthetic oligonucleotide
atatcatccgatggggcaccgaaaggcgtgtccactgcacgccacgtcgcgtcct

SEQ ID NO: 228775 - DNA, 55 bp, Artificial
  Synthetic oligonucleotide
acatcgccgcgatatccggtccctcgcgggtgactgcccgtatcgcaggggttct

SEQ ID NO: 228776 - DNA, 55 bp, Artificial
  Synthetic oligonucleotide
atatgccaataatcactacgatcgcaccatactcttacggtaaagtcgactgagc

SEQ ID NO: 228777 - DNA, 55 bp, Artificial
  Synthetic oligonucleotide
acatcgcatggtcagcttgaggcgtcagaacctcggtaacacggcaccgcagccg

SEQ ID NO: 228778 - DNA, 55 bp, Artificial
  Synthetic oligonucleotide
atcaccgggccttttacgcagacctgaaagatcccgtcgatctgctacgcggacc

SEQ ID NO: 228779 - DNA, 56 bp, Artificial
  Synthetic oligonucleotide
tagagctccgatttggtccactcttcatagggtggggcggacccgcctttggacgc

SEQ ID NO: 228780 - DNA, 55 bp, Artificial
  Synthetic oligonucleotide
atcactccccttatctacgctagagcactctacttcgcaaggttgattcttgcga

SEQ ID NO: 228781 - DNA, 55 bp, Artificial
  Synthetic oligonucleotide
atcagtgagcgatctgattaccgctcagttttagtagtcaaagccgcttattacg

SEQ ID NO: 228782 - DNA, 55 bp, Artificial
  Synthetic oligonucleotide
acagggacgagctggcgggaagattcatgagaccgatctcacagcgaggtaaaaa

SEQ ID NO: 228783 - DNA, 52 bp, Artificial
  Synthetic oligonucleotide
atacggagacgccccggacccgcagagacgttacgaaacccgcgccggagtg

SEQ ID NO: 228784 - DNA, 55 bp, Artificial
  Synthetic oligonucleotide
atgacgtgcggccgcgatgtgccggtgcctgttgatgacgctatgcaagccgcga

SEQ ID NO: 228785 - DNA, 51 bp, Artificial
  Synthetic oligonucleotide
accgggcgcaacccctttaccgagaccggaccgatctacctttgcgatccg

SEQ ID NO: 228786 - DNA, 55 bp, Artificial
  Synthetic oligonucleotide
aatcgttccatttcagctcggtcaggccagtcgccgtggcggtcaacagcccctc

SEQ ID NO: 228787 - DNA, 55 bp, Artificial
  Synthetic oligonucleotide
atgagcggctattagcgtcctgtcagaacaaagtcacgcgacaattgcgtttcac

SEQ ID NO: 228788 - DNA, 53 bp, Artificial
  Synthetic oligonucleotide
acctgataccgttgaccccaagtgtataggtgttcccaacgccgccactttcc

SEQ ID NO: 228789 - DNA, 55 bp, Artificial
  Synthetic oligonucleotide
atgagggttgtcatgtaaaccggtatcatcaacaggccaattacaaacggtgtcc

SEQ ID NO: 228790 - DNA, 60 bp, Artificial
  Synthetic oligonucleotide
cgcggtgccgaaaattcgccgcgcgctagcagaagaaatggagggggcgacatgaggctc

SEQ ID NO: 228791 - DNA, 55 bp, Artificial
  Synthetic oligonucleotide
atgatggacgtgaccctcattcatggtgcgattttcacgttgcagtccgtgatag

SEQ ID NO: 228792 - DNA, 55 bp, Artificial
  Synthetic oligonucleotide
aatagcgggcttctgacagcggcacacggtgctctcgacccgcctttcatgcgac

SEQ ID NO: 228793 - DNA, 55 bp, Artificial
  Synthetic oligonucleotide
atgcccgcaaggtatcgtggacgcgcccagacggcatttgccgcggcccgcactc

SEQ ID NO: 228794 - DNA, 55 bp, Artificial
  Synthetic oligonucleotide
acgaagcttgtcgaatggagccacgaggggcgcggcaacttctggtcggaccatc

SEQ ID NO: 228795 - DNA, 55 bp, Artificial
  Synthetic oligonucleotide
aagttccattcggatgcaatcttcttcggctcgaggggcggtctgcgaaagaacc

SEQ ID NO: 228796 - DNA, 55 bp, Artificial
  Synthetic oligonucleotide
agtctccttggcgataggtctttaacgctatccgaatattctgtagtcggtcgag

SEQ ID NO: 228797 - DNA, 53 bp, Artificial
  Synthetic oligonucleotide
agtctacgagccgacgggtcggcggaacgacggctggaattcgaaactggccc

SEQ ID NO: 228798 - DNA, 55 bp, Artificial
  Synthetic oligonucleotide
acgacggccatatagcgctgccctccccggtctgtcagtgcaacgatgttacggc

SEQ ID NO: 228799 - DNA, 55 bp, Artificial
  Synthetic oligonucleotide
atgcggaggaccacggggtggttctggtcaattggcggacgagctttcaaatagg

SEQ ID NO: 228800 - DNA, 55 bp, Artificial
  Synthetic oligonucleotide
atgctggctgtgacgagcaatgcctttctgggcgattcgaataaagatttccttg

SEQ ID NO: 228801 - DNA, 60 bp, Artificial
  Synthetic oligonucleotide
aattttcaggtagcgtagaagaacagcatggtgtcctgagcatggaaggctcgtttgatt

SEQ ID NO: 228802 - DNA, 55 bp, Artificial
  Synthetic oligonucleotide
acgcatctatgggctgatcaggactggcgcgaagtgcagatggggttgccacctg

SEQ ID NO: 228803 - DNA, 55 bp, Artificial
  Synthetic oligonucleotide
atcggttggtgcgttcattggcgactcggcttctggcgggttaagacttggcgaa

SEQ ID NO: 228804 - DNA, 55 bp, Artificial
  Synthetic oligonucleotide
acaaaatacggctcgctctcgacgcctgaggggcaggtcagggtccgtggccttc

SEQ ID NO: 228805 - DNA, 54 bp, Artificial
  Synthetic oligonucleotide
acaaaactggacacaaagtgccacgtgttctccttcaggggcaccttaagcccg

SEQ ID NO: 228806 - DNA, 55 bp, Artificial
  Synthetic oligonucleotide
atcgtgtaagagccctcgtacctcgtgagatagatatctccctcgggaaagatcc

SEQ ID NO: 228807 - DNA, 55 bp, Artificial
  Synthetic oligonucleotide
atctacccaaagtcgcagatggttcccacggccccaaagcggtcacgggatgaaa

SEQ ID NO: 228808 - DNA, 55 bp, Artificial
  Synthetic oligonucleotide
atctcgctaccctccgggtcttggctgatcgctgctcgtcccaaaggtggttggc

SEQ ID NO: 228809 - DNA, 54 bp, Artificial
  Synthetic oligonucleotide
aattgtcaaacctcagtcgaacaggaagcgttcgtgtttggggatcgagttcgg

SEQ ID NO: 228810 - DNA, 55 bp, Artificial
  Synthetic oligonucleotide
aatgttcagcgtcgagtaccaccagccagtgttgtggcgggatgtaccgctcgcc

SEQ ID NO: 228811 - DNA, 55 bp, Artificial
  Synthetic oligonucleotide
aatgtaattggccgtgatagcaacttcacctgtcgcctctgcaagaggcttaccc

SEQ ID NO: 228812 - DNA, 56 bp, Artificial
  Synthetic oligonucleotide
ccggatattacggttaggcatcggatgtctccggaacagtggattgcgggtaggcg

SEQ ID NO: 228813 - DNA, 55 bp, Artificial
  Synthetic oligonucleotide
atctgtctaagcatcggatcaccctcttgaactggtcacgaaaggggttgcagcc

SEQ ID NO: 228814 - DNA, 55 bp, Artificial
  Synthetic oligonucleotide
accgcggtacgccagaaggcagctaaatagtgggagtcggaccacaggacttcga

SEQ ID NO: 228815 - DNA, 55 bp, Artificial
  Synthetic oligonucleotide
accggaccatccttttcgacgcgaacgctcattgcagaacctctccgtagttacc

SEQ ID NO: 228816 - DNA, 53 bp, Artificial
  Synthetic oligonucleotide
atcttccggggctcgcaccttggtcctcgcttctgggtccggccccggtttca

SEQ ID NO: 228817 - DNA, 55 bp, Artificial
  Synthetic oligonucleotide
aatgcctgtggcctccgtaaaggagcgggagccgggttgccggcaccggcgcaca

SEQ ID NO: 228818 - DNA, 55 bp, Artificial
  Synthetic oligonucleotide
aatgatctcggcctgagtcataccggagctgcggtaagttgggaggcaagccgca

SEQ ID NO: 228819 - DNA, 55 bp, Artificial
  Synthetic oligonucleotide
atctttcgggatagggaaggcccacgtcttaggaggccaatgtgacatttacgcg

SEQ ID NO: 228820 - DNA, 55 bp, Artificial
  Synthetic oligonucleotide
atgaatgggtcttccataatggagggctacacgccggaaattgatgccacgattg

SEQ ID NO: 228821 - DNA, 55 bp, Artificial
  Synthetic oligonucleotide
accggatttctgtgcggtggttcattgcgtcctcggcaagctctcatctcgccat

SEQ ID NO: 228822 - DNA, 55 bp, Artificial
  Synthetic oligonucleotide
cagaagtgtgacggaacgcccggctcagaaagaccgggatcgcgacatagtgcgg

SEQ ID NO: 228823 - DNA, 53 bp, Artificial
  Synthetic oligonucleotide
cgcagttcgtcaccaacatcaagtccggggggaaaatcgaaacccggatattc

SEQ ID NO: 228824 - DNA, 55 bp, Artificial
  Synthetic oligonucleotide
caccgttcaactcggcttgccacaacagatatcgggcatattgcgcccaaccgcc

SEQ ID NO: 228825 - DNA, 55 bp, Artificial
  Synthetic oligonucleotide
cagaccgattggcgaaaactggaacggccacagagccgcgacattgctctcggtg

SEQ ID NO: 228826 - DNA, 55 bp, Artificial
  Synthetic oligonucleotide
aggccaagagggcggttgtcagaagatccagtgccgaccggaggtgacgagatcc

SEQ ID NO: 228827 - DNA, 55 bp, Artificial
  Synthetic oligonucleotide
cagacttcggacaacaaatgtttcgcatctgcgtatcggaggcgcatcggtttcc

SEQ ID NO: 228828 - DNA, 55 bp, Artificial
  Synthetic oligonucleotide
cagagaaagagggctcaatcggtagggccataataatgggtctgtctcgtggaga

SEQ ID NO: 228829 - DNA, 55 bp, Artificial
  Synthetic oligonucleotide
caccgacagcttaccccatttcaaagaccatccgagaggacgcccgcaatgtgcg

SEQ ID NO: 228830 - DNA, 55 bp, Artificial
  Synthetic oligonucleotide
caccgaaatggcgggctcaatgcacgatttctattccgacacacaatcccggcca

SEQ ID NO: 228831 - DNA, 55 bp, Artificial
  Synthetic oligonucleotide
cagaggcctcgacagccttgataagcatctgacccatacgaccagaggcccctgt

SEQ ID NO: 228832 - DNA, 50 bp, Artificial
  Synthetic oligonucleotide
aacactccacacccttttcggtgttgtacccggtttcgcattcggggacc

SEQ ID NO: 228833 - DNA, 55 bp, Artificial
  Synthetic oligonucleotide
cagaggggaccgtatcgtaatgccgtcctgcttaatactggaattctcgagaccc

SEQ ID NO: 228834 - DNA, 60 bp, Artificial
  Synthetic oligonucleotide
atggcgcacaacgccacatggacgaacgtagagctggcatcacgcgttttgatttcacag

SEQ ID NO: 228835 - DNA, 55 bp, Artificial
  Synthetic oligonucleotide
agatcacaacattcacaaaatgcgccaatgccgcggagcggcttagtccgtgggc

SEQ ID NO: 228836 - DNA, 55 bp, Artificial
  Synthetic oligonucleotide
agcgatcggaacgggaagtaacgacaccccgcaacccacagagaaaggagcacga

SEQ ID NO: 228837 - DNA, 55 bp, Artificial
  Synthetic oligonucleotide
caccccccttccggttcctgtcttgcaaaccgttccgccgtcacctctgatagca

SEQ ID NO: 228838 - DNA, 55 bp, Artificial
  Synthetic oligonucleotide
agctgagccgctatcttggtcggaaccccgagggcaggggaagcattgaagcgca

SEQ ID NO: 228839 - DNA, 55 bp, Artificial
  Synthetic oligonucleotide
agcgatgagcttcgaggcctcgcctcgggcgacttcgcgatccctttcgccaact

SEQ ID NO: 228840 - DNA, 55 bp, Artificial
  Synthetic oligonucleotide
cagccgggcgccttacgcgctttagcgtcaaacggggttgcaatcgcattcccga

SEQ ID NO: 228841 - DNA, 55 bp, Artificial
  Synthetic oligonucleotide
agctctctcggtgatcgcgacgtagcaggcatcctcgcgaggcgggcgctgcttg

SEQ ID NO: 228842 - DNA, 55 bp, Artificial
  Synthetic oligonucleotide
cagcgcaggtagtctctatcgtcacgagacgtgggagatcatcgaaattcacccc

SEQ ID NO: 228843 - DNA, 55 bp, Artificial
  Synthetic oligonucleotide
agcatcccacccatgcgagagtttccgcacctgttgggacgcaaagccgtgtcac

SEQ ID NO: 228844 - DNA, 55 bp, Artificial
  Synthetic oligonucleotide
aaagcaaggtacggcgcgcccagacgtgctgacagggccctgagcggctcttgtg

SEQ ID NO: 228845 - DNA, 60 bp, Artificial
  Synthetic oligonucleotide
gggcggtgcatcgacctctgccatgtagatatcaatgggaggcacgcggtccgcgcgtgt

SEQ ID NO: 228846 - DNA, 55 bp, Artificial
  Synthetic oligonucleotide
aggaagcgccgccctgcaagtagacccgagagccccgtcattccgcctgccccag

SEQ ID NO: 228847 - DNA, 55 bp, Artificial
  Synthetic oligonucleotide
agccagcggggttacgagacccagacctgtgacaacgacacgccgcatgatgctg

SEQ ID NO: 228848 - DNA, 55 bp, Artificial
  Synthetic oligonucleotide
aggaggcgcaacattatgacgcttgatcaccagactcaaggttacgaagtcggct

SEQ ID NO: 228849 - DNA, 55 bp, Artificial
  Synthetic oligonucleotide
cactactcgattgcggctgtcagctaatccgcaaaaccgtaattgccccggaggc

SEQ ID NO: 228850 - DNA, 55 bp, Artificial
  Synthetic oligonucleotide
cactactgccgtcactcggaccggaaggctagcgggcaggctgttctgagggaaa

SEQ ID NO: 228851 - DNA, 55 bp, Artificial
  Synthetic oligonucleotide
cacgcctataggtatgtgcaatctcccagccgaggcgtgagtcttgagcgtcccg

SEQ ID NO: 228852 - DNA, 55 bp, Artificial
  Synthetic oligonucleotide
agctttatgcggtgcgcatcacaagcttcacccgagtttcacagatcggtgattg

SEQ ID NO: 228853 - DNA, 55 bp, Artificial
  Synthetic oligonucleotide
cactgcgtatggtacgacgtctaccagtcgattgagcctgttcgcatgccaaagg

SEQ ID NO: 228854 - DNA, 55 bp, Artificial
  Synthetic oligonucleotide
aaagttgatcgactgttcggtcacgcccatctgcaccaaaagcgcgttggccgat

SEQ ID NO: 228855 - DNA, 55 bp, Artificial
  Synthetic oligonucleotide
aaatccacgggctttcgtccgccgggcgacagatgctggcctatcacgaccactc

SEQ ID NO: 228856 - DNA, 60 bp, Artificial
  Synthetic oligonucleotide
tcagacgaggcgcacttcacatgggacgcagacgctcttgtgttcgtataagacgcagtc

SEQ ID NO: 228857 - DNA, 53 bp, Artificial
  Synthetic oligonucleotide
aagagggcggcaagccccggtctgccccctcgtcgcccgcaaagcgggcaggg

SEQ ID NO: 228858 - DNA, 55 bp, Artificial
  Synthetic oligonucleotide
cacttgccccttaagaatgtctgctcccaattttggtaaatcagacagagtcgca

SEQ ID NO: 228859 - DNA, 55 bp, Artificial
  Synthetic oligonucleotide
agccgctagtttcggtaaagatggcaggaaaggcgactcccaaaatgaacggaca

SEQ ID NO: 228860 - DNA, 55 bp, Artificial
  Synthetic oligonucleotide
agccgctttctgtctccctgatggacaattcaatcgtcctgtcgatcgaggagcc

SEQ ID NO: 228861 - DNA, 55 bp, Artificial
  Synthetic oligonucleotide
cagaacattccccacgcggcgtccctcttatggggcccgcccatgaactcagatc

SEQ ID NO: 228862 - DNA, 55 bp, Artificial
  Synthetic oligonucleotide
aaatctcaaagacaggtatagacgggcccgccaaagggcaacctcgttccgctgc

SEQ ID NO: 228863 - DNA, 55 bp, Artificial
  Synthetic oligonucleotide
agcgatcgaacagctctatgcggttcccaggctcgctgcgttggtcgaggcgtgg

SEQ ID NO: 228864 - DNA, 55 bp, Artificial
  Synthetic oligonucleotide
cagaagagcgctttggtatcaaaccggactggctcgttgcggatactgcctatgg

SEQ ID NO: 228865 - DNA, 55 bp, Artificial
  Synthetic oligonucleotide
cacgatagagattgccgatactggcgcagccaaaggagacgtcactgacccagac

SEQ ID NO: 228866 - DNA, 55 bp, Artificial
  Synthetic oligonucleotide
agattgtcagtcgcgagctttacgaccgcgatggatgttcatgcgcgtggagggg

SEQ ID NO: 228867 - DNA, 55 bp, Artificial
  Synthetic oligonucleotide
cacgagccaagagaattcgcagtgccgaagatccggcgtgcactgacagaagacg

SEQ ID NO: 228868 - DNA, 60 bp, Artificial
  Synthetic oligonucleotide
gttccgcattgagtgatatcaggctttccgtgagacgctccatgggaaatatctcgcttg

SEQ ID NO: 228869 - DNA, 55 bp, Artificial
  Synthetic oligonucleotide
agcgcggggtcttgcccgacgccgggacattcatccaagctgcgattgcgatctt

SEQ ID NO: 228870 - DNA, 55 bp, Artificial
  Synthetic oligonucleotide
cagcttggttggttcccctccatctatgacaccactcatgtggtgaacagttggg

SEQ ID NO: 228871 - DNA, 55 bp, Artificial
  Synthetic oligonucleotide
agagccaagggaccgttgccctgagccaaatgttcgcccaccaacgccgtgcaca

SEQ ID NO: 228872 - DNA, 55 bp, Artificial
  Synthetic oligonucleotide
agcgctgattggaaccgcacagataaggcatgttgattagatcaaccgtagaggc

SEQ ID NO: 228873 - DNA, 55 bp, Artificial
  Synthetic oligonucleotide
caggaggccttgaagacaacgcccgaggatgtgatccagaaaacccactggccca

SEQ ID NO: 228874 - DNA, 55 bp, Artificial
  Synthetic oligonucleotide
caggccagattctgacaggccaaatcctgacagtccggaccggtcttttccaaga

SEQ ID NO: 228875 - DNA, 55 bp, Artificial
  Synthetic oligonucleotide
caatgtgaaccgataacggtggtatctcaccgggacaaagctacatctttacacg

SEQ ID NO: 228876 - DNA, 55 bp, Artificial
  Synthetic oligonucleotide
caatgtccttcagctatgcggtaatgtgtgggcgagtatagctgcctatgacccg

SEQ ID NO: 228877 - DNA, 55 bp, Artificial
  Synthetic oligonucleotide
caggctcttgcgctgaatgtcgcttgcaccggactgaacggcggtcgcaccttct

SEQ ID NO: 228878 - DNA, 55 bp, Artificial
  Synthetic oligonucleotide
caggctgccgccacaattccagacgtgtcggcaccatttgccaagaaaagggcgt

SEQ ID NO: 228879 - DNA, 59 bp, Artificial
  Synthetic oligonucleotide
gttccgggagtggacggaaatgtatcgcagcgtctttgtgaagcacatgggcaaagaag

SEQ ID NO: 228880 - DNA, 55 bp, Artificial
  Synthetic oligonucleotide
caggctttccgtgagacgctccatgggaaatatctcgcttgctctgagtgtggga

SEQ ID NO: 228881 - DNA, 55 bp, Artificial
  Synthetic oligonucleotide
cagggaatgtgggatacgccatccatcgaaggtttgatgaccctggcgatgaaca

SEQ ID NO: 228882 - DNA, 55 bp, Artificial
  Synthetic oligonucleotide
aggcgcatttgtcatccactgccggaccaattcgcaggagagataagtctctgcc

SEQ ID NO: 228883 - DNA, 55 bp, Artificial
  Synthetic oligonucleotide
agcgtgaacgggcgtgcccaagtggcgtttcgattgccaagcgactggttgcgac

SEQ ID NO: 228884 - DNA, 55 bp, Artificial
  Synthetic oligonucleotide
caataccatgatcgagaaacgtcagttctacatcaatggcgcgtgggtcaacccc

SEQ ID NO: 228885 - DNA, 55 bp, Artificial
  Synthetic oligonucleotide
caagtgtattgatgcgacgtttgagagagaacgcaatgctggaagcggaaattac

SEQ ID NO: 228886 - DNA, 55 bp, Artificial
  Synthetic oligonucleotide
cagggacacacgaagccctcaggccaccgtcgttccgccagataaagcgcacact

SEQ ID NO: 228887 - DNA, 55 bp, Artificial
  Synthetic oligonucleotide
aaaacgctttcaggtctggaaagggccgacctgagacccagccgcaccatccaaa

SEQ ID NO: 228888 - DNA, 55 bp, Artificial
  Synthetic oligonucleotide
agctagaactcggggcaggtgcagtttacaccggtcctatccgttcttgcgcgat

SEQ ID NO: 228889 - DNA, 55 bp, Artificial
  Synthetic oligonucleotide
agcgtgccatggacggaaaagtgctcgcccgacaggagcggtgcgatctcgtgat

SEQ ID NO: 228890 - DNA, 60 bp, Artificial
  Synthetic oligonucleotide
gggagacgtactggtatcaatcgaacacgctgttggctcgcattacgacgacgtgatcgc

SEQ ID NO: 228891 - DNA, 55 bp, Artificial
  Synthetic oligonucleotide
agcgtgtcgccaaaggacatcacgcgcacgtcaggggcaacgctgcgcagggatt

SEQ ID NO: 228892 - DNA, 55 bp, Artificial
  Synthetic oligonucleotide
cacaaggttataaacctgatccagctcaccacgtcgtggatgcccggaaacgtgc

SEQ ID NO: 228893 - DNA, 55 bp, Artificial
  Synthetic oligonucleotide
aggcgacacgcgactgcgaaaacgccgtgttaacgggcacctcggtatcagaggg

SEQ ID NO: 228894 - DNA, 52 bp, Artificial
  Synthetic oligonucleotide
aaaatcggagggaggtcccgtgtcaccggcgctcgaaccttccttttcacgc

SEQ ID NO: 228895 - DNA, 55 bp, Artificial
  Synthetic oligonucleotide
cacaccggatcttttcgaaagcctgccatagctcgttgccggatcacacagagcg

SEQ ID NO: 228896 - DNA, 55 bp, Artificial
  Synthetic oligonucleotide
agaggaaagaaccgcttcccttgaaggccttacactattgcttcatgtgggctct

SEQ ID NO: 228897 - DNA, 55 bp, Artificial
  Synthetic oligonucleotide
cagcggttgacgccacttgctattgaacttggatgcactaccaccacacgcgctg

SEQ ID NO: 228898 - DNA, 55 bp, Artificial
  Synthetic oligonucleotide
aaccaagtatgacaatcccagcgcaggatcctctgacacgccaagcccgacgata

SEQ ID NO: 228899 - DNA, 55 bp, Artificial
  Synthetic oligonucleotide
aaaaggggcgtaggtgcgcctcttctgtttaaggtgcctgcccatgtccttcacg

SEQ ID NO: 228900 - DNA, 54 bp, Artificial
  Synthetic oligonucleotide
aaacaaccgcggcaagcagacgtggctccttatcgaaggcgcgcaatagagcaa

SEQ ID NO: 228901 - DNA, 60 bp, Artificial
  Synthetic oligonucleotide
gggacattagatatctctcctgaccagggcagacctctcaaaggtcacagcgtcggggaa

SEQ ID NO: 228902 - DNA, 54 bp, Artificial
  Synthetic oligonucleotide
cctgcatccgagaaaaggggatcggggcgttccaaaatgcacggaggtttggaa

SEQ ID NO: 228903 - DNA, 54 bp, Artificial
  Synthetic oligonucleotide
ccacgtccgccgtgtgcatcaagaaaattcccgctgcacacttgctcgatgtgc

SEQ ID NO: 228904 - DNA, 54 bp, Artificial
  Synthetic oligonucleotide
ttagaaagggtaaggcgcgaacaaagagggatttgatgtcgggtgaatttgacg

SEQ ID NO: 228905 - DNA, 52 bp, Artificial
  Synthetic oligonucleotide
ggcccaaccggtaagcgtaataaactcaaacgtggcgtccacccgattctcg

SEQ ID NO: 228906 - DNA, 54 bp, Artificial
  Synthetic oligonucleotide
catcgtgtgatagcccgcatccgagaggagccccgcgaccgttaactcaccctc

SEQ ID NO: 228907 - DNA, 54 bp, Artificial
  Synthetic oligonucleotide
ttggcaaagaggcacggccgccgtgagaagcgatagatcctgatctcgatcact

SEQ ID NO: 228908 - DNA, 54 bp, Artificial
  Synthetic oligonucleotide
ggtcatatacagcctccgtgaatgcctcagcgtttgccaacgccttgtctacct

SEQ ID NO: 228909 - DNA, 54 bp, Artificial
  Synthetic oligonucleotide
ccttcagtatcgcgaagtagaccttacgcttggctgcgttctcggacatctgag

SEQ ID NO: 228910 - DNA, 54 bp, Artificial
  Synthetic oligonucleotide
ttaccagttgcagaaatagcgacgttcagggaggaacacatgaagattttgaca

SEQ ID NO: 228911 - DNA, 54 bp, Artificial
  Synthetic oligonucleotide
ctactagggtctgttctgtcccatctagcctaatgactaacagggacggattcg

SEQ ID NO: 228912 - DNA, 60 bp, Artificial
  Synthetic oligonucleotide
aatggcggaggagccgctacagacaggattttcttgcgttgtatcttgtatatgaggccg

SEQ ID NO: 228913 - DNA, 54 bp, Artificial
  Synthetic oligonucleotide
atgccttatggcgtctgaagcgccgagatcatgttgaaactggtgttaacgatt

SEQ ID NO: 228914 - DNA, 53 bp, Artificial
  Synthetic oligonucleotide
aaacttgtttgcgcgtgacaggtattccagaaccgccctttgcgccgggttta

SEQ ID NO: 228915 - DNA, 54 bp, Artificial
  Synthetic oligonucleotide
agccaaaccgctggagccatcagccaacgtcataaacgtccaagaaatttgagc

SEQ ID NO: 228916 - DNA, 54 bp, Artificial
  Synthetic oligonucleotide
ttttgcgatccttgacgcgggctgatttgggggccatccggaggatatgcttcc

SEQ ID NO: 228917 - DNA, 53 bp, Artificial
  Synthetic oligonucleotide
acgcaagcgacacagtccttcacctttgaagggcttaaggaacggcccgtccc

SEQ ID NO: 228918 - DNA, 54 bp, Artificial
  Synthetic oligonucleotide
ctgcacttcaaagccaatttagggcaatctcacgcccagcgacaaccgcgtggt

SEQ ID NO: 228919 - DNA, 54 bp, Artificial
  Synthetic oligonucleotide
gtagaagagcgaccccacactttgcaatcgcttctcacgtttaggtcgaaattt

SEQ ID NO: 228920 - DNA, 54 bp, Artificial
  Synthetic oligonucleotide
ggagcgtctgaatgcgcgggaggctctgcacaattgcatatcatccgcgacacg

SEQ ID NO: 228921 - DNA, 54 bp, Artificial
  Synthetic oligonucleotide
ttcgctgagtgcgtcagcatgagacgcgagtggagcaagcagagtggcgaccag

SEQ ID NO: 228922 - DNA, 54 bp, Artificial
  Synthetic oligonucleotide
agctgccgctgcctctcatgccacacgggaatttcgcggtaacggccgcctttc

SEQ ID NO: 228923 - DNA, 57 bp, Artificial
  Synthetic oligonucleotide
agtccgacaagggtgactccccaatcttcacaactccgtcgtcagatcagatacttt

SEQ ID NO: 228924 - DNA, 54 bp, Artificial
  Synthetic oligonucleotide
gcgccggccaaatcagaccagggtccgaacatacaggctggccgccctgctatg

SEQ ID NO: 228925 - DNA, 54 bp, Artificial
  Synthetic oligonucleotide
ggcgcgaatccgtgcgggcgtaactatctgttgtgacgcgaatttctgggtaat

SEQ ID NO: 228926 - DNA, 54 bp, Artificial
  Synthetic oligonucleotide
cctcagcctttctttgggccccgcatcttatgccggaaagccccgagataaaag

SEQ ID NO: 228927 - DNA, 54 bp, Artificial
  Synthetic oligonucleotide
ttcgtgatgcaggaggacacatggcggctcgactattgcgaggtggttctgtct

SEQ ID NO: 228928 - DNA, 54 bp, Artificial
  Synthetic oligonucleotide
ttcgcgaaaggtatcaccgcaggatacatcccgctgggtgcgacggtgatcaat

SEQ ID NO: 228929 - DNA, 54 bp, Artificial
  Synthetic oligonucleotide
cgcactgggcgcaataaacagggcaatgccgcaacttatggtcgcctttgttgg

SEQ ID NO: 228930 - DNA, 54 bp, Artificial
  Synthetic oligonucleotide
ggcttccgatcggttcggagagttcaaggtcccgaccgggcatggcaattacgg

SEQ ID NO: 228931 - DNA, 54 bp, Artificial
  Synthetic oligonucleotide
ttcgcagaaactgcggtttcgacttgcccgattcttggggagacgctacagcta

SEQ ID NO: 228932 - DNA, 54 bp, Artificial
  Synthetic oligonucleotide
gctgcactcggcttttccgcatcggatgtgtcgaatgggcgtctaaattgaggc

SEQ ID NO: 228933 - DNA, 54 bp, Artificial
  Synthetic oligonucleotide
tttcgacagatggctggatcgagagaacccgcaagtgccgttcgagcgctatgc

SEQ ID NO: 228934 - DNA, 56 bp, Artificial
  Synthetic oligonucleotide
aagacggctgagggtcggaccgcctttcgaagacctgcgtagatacgaatcgtcgc

SEQ ID NO: 228935 - DNA, 54 bp, Artificial
  Synthetic oligonucleotide
cgacaatcgcgactcatacacgggagcgaggagagcccgcaaatggaacctcgc

SEQ ID NO: 228936 - DNA, 54 bp, Artificial
  Synthetic oligonucleotide
acaacaaacagttttccccggtctaagccaccggggagtgatgtgcagaggttc

SEQ ID NO: 228937 - DNA, 54 bp, Artificial
  Synthetic oligonucleotide
ttccgacaaacttagagagaatggatgtcattccgatatcacgggaacgtattt

SEQ ID NO: 228938 - DNA, 54 bp, Artificial
  Synthetic oligonucleotide
atagaaaagggcaacaccccggtctcacgggaagcccctgttctggcaacattc

SEQ ID NO: 228939 - DNA, 54 bp, Artificial
  Synthetic oligonucleotide
acccattttctcggcgcggttatgatgaacaatctgaaagtaggcggtgagctc

SEQ ID NO: 228940 - DNA, 54 bp, Artificial
  Synthetic oligonucleotide
cctacatgaaatagccctggagggggcccatgtccgcaatcgacatctccgccc

SEQ ID NO: 228941 - DNA, 51 bp, Artificial
  Synthetic oligonucleotide
aaaacgtgggacggtcggttgttaacttctcgcaccatatttcggaggaac

SEQ ID NO: 228942 - DNA, 54 bp, Artificial
  Synthetic oligonucleotide
gccgctgcaaaccatatgatgggcgatgtccattatctgaacaccggtgactgg

SEQ ID NO: 228943 - DNA, 54 bp, Artificial
  Synthetic oligonucleotide
aatctttgccgtacgctaagtatcatgcttgatctctattcagaaccagcactc

SEQ ID NO: 228944 - DNA, 54 bp, Artificial
  Synthetic oligonucleotide
ttggttggaggctaggatgacccgtcatatcgcagaacgctacatcagattcgc

SEQ ID NO: 228945 - DNA, 55 bp, Artificial
  Synthetic oligonucleotide
atggggccgatagcggctgttgacagggggatattttgccccctacatttctccc

SEQ ID NO: 228946 - DNA, 54 bp, Artificial
  Synthetic oligonucleotide
agcccagttcattcgcccatggcttttcaatctggctccggcccgacgttcgga

SEQ ID NO: 228947 - DNA, 54 bp, Artificial
  Synthetic oligonucleotide
agggcccgaccacctctatggacgaatagccaagggtcgagaacgagatgcccg

SEQ ID NO: 228948 - DNA, 54 bp, Artificial
  Synthetic oligonucleotide
caaatgagacggctctgaccgaacggacttttggcgaggttacggatttcgtat

SEQ ID NO: 228949 - DNA, 54 bp, Artificial
  Synthetic oligonucleotide
tcaaaccggctagataacacagtggcaaacctcactaatgttgcgataaatctc

SEQ ID NO: 228950 - DNA, 54 bp, Artificial
  Synthetic oligonucleotide
cttggaagcctgacacatgccgtcccttccggcctccggccgcctcatagccct

SEQ ID NO: 228951 - DNA, 54 bp, Artificial
  Synthetic oligonucleotide
ccctagactgatgtccacgaagcgcagttagcgacatttgaaaagtgctggcga

SEQ ID NO: 228952 - DNA, 54 bp, Artificial
  Synthetic oligonucleotide
tataccgaagccagtcaactgacagccccacatatcccttacaaagacatgtcg

SEQ ID NO: 228953 - DNA, 54 bp, Artificial
  Synthetic oligonucleotide
cttgatcgcatttgacccggcatttacatacatgtcgaaaacggtcgcatgcaa

SEQ ID NO: 228954 - DNA, 54 bp, Artificial
  Synthetic oligonucleotide
caaaatcgaatcagccccctagattgattcgaaaacgtatcacatttgcgccga

SEQ ID NO: 228955 - DNA, 54 bp, Artificial
  Synthetic oligonucleotide
gactacggggctcagttgcacaagtcctgtgagggacacatctcgcgtagaagc

SEQ ID NO: 228956 - DNA, 60 bp, Artificial
  Synthetic oligonucleotide
gttgccacaagccctgtcaggtgtgcaaggtttttgataccgatcttcaggtgggccatg

SEQ ID NO: 228957 - DNA, 54 bp, Artificial
  Synthetic oligonucleotide
acgtgatagaggcgggccatgggtcgtcaggtctcctgttgcgtgtggtcgggg

SEQ ID NO: 228958 - DNA, 54 bp, Artificial
  Synthetic oligonucleotide
aggcccgttccagttcgaacatctcgtagccgaactgcccacgtccggcctgac

SEQ ID NO: 228959 - DNA, 54 bp, Artificial
  Synthetic oligonucleotide
tacgattcccataggcccgtttgcgtcccaaaacacaattgcgcaattccgaac

SEQ ID NO: 228960 - DNA, 54 bp, Artificial
  Synthetic oligonucleotide
taccctgtttctgaagcgtcgtctgcgcgtccggaacaagcttcgcaaggtgaa

SEQ ID NO: 228961 - DNA, 54 bp, Artificial
  Synthetic oligonucleotide
aacaatctgcgcgcatcaaaggaaacgagcgtttcgagggattcatgcagtccc

SEQ ID NO: 228962 - DNA, 54 bp, Artificial
  Synthetic oligonucleotide
aacaaagggcggaaactctgataacggccgagggcgcgttgggtagcacatcac

SEQ ID NO: 228963 - DNA, 54 bp, Artificial
  Synthetic oligonucleotide
tacaagataacgaggggtcatggtcgtaggtccgtcagtgaatgtccgacctcc

SEQ ID NO: 228964 - DNA, 51 bp, Artificial
  Synthetic oligonucleotide
taagaggaaccggggcgaaaacccctgtaaaagagccgcctcaacgggcag

SEQ ID NO: 228965 - DNA, 54 bp, Artificial
  Synthetic oligonucleotide
aactggggcagatctatcgcatccatctgagctttctggatacggtgcaaaaac

SEQ ID NO: 228966 - DNA, 54 bp, Artificial
  Synthetic oligonucleotide
gagtatcgggaagcctttgtgcaatatctgcgcaagggaacaccgatccggttt

SEQ ID NO: 228967 - DNA, 54 bp, Artificial
  Synthetic oligonucleotide
cgggggttcggagtcattctatcggggtttcagagtcggtgagccgcaaaattg

SEQ ID NO: 228968 - DNA, 60 bp, Artificial
  Synthetic oligonucleotide
gttgccggatcacacagagcgattctgaccaaaacacttagctcgatgttcaaaccacga

SEQ ID NO: 228969 - DNA, 54 bp, Artificial
  Synthetic oligonucleotide
tgattgcgggtattgtccgaccgttcttcgacatccgtactgatcgccacgcgc

SEQ ID NO: 228970 - DNA, 54 bp, Artificial
  Synthetic oligonucleotide
tcggctatacctactcggacgtcgaggacgatttcggaagctacgtctacgaat

SEQ ID NO: 228971 - DNA, 54 bp, Artificial
  Synthetic oligonucleotide
caaggagtccgcatcagcggagcgcggaggaaccaaggcaatacggcatcagat

SEQ ID NO: 228972 - DNA, 54 bp, Artificial
  Synthetic oligonucleotide
aaccctgtgtggcactcgaagctgacacaaacctgacacgccggagaaaactgg

SEQ ID NO: 228973 - DNA, 54 bp, Artificial
  Synthetic oligonucleotide
gaaaattccggtctggtcagggagttgcaagcccgccttgaagcggcacatgaa

SEQ ID NO: 228974 - DNA, 54 bp, Artificial
  Synthetic oligonucleotide
tcgttgtcagagcgtaactgggtagtacagtctctaacaagtgggaaacggtgt

SEQ ID NO: 228975 - DNA, 54 bp, Artificial
  Synthetic oligonucleotide
caatccgtacggacacatgtgatcggtcatcaccatccgatagagggtcgcagt

SEQ ID NO: 228976 - DNA, 54 bp, Artificial
  Synthetic oligonucleotide
tctatccgacggtaccgactgggcagcggactcataaaactcgatccacagcct

SEQ ID NO: 228977 - DNA, 54 bp, Artificial
  Synthetic oligonucleotide
tctcaaacagggcgcttgcggtttctagcgcacggcggcccaaagcggagtagg

SEQ ID NO: 228978 - DNA, 54 bp, Artificial
  Synthetic oligonucleotide
tccaattgtgccggttgctcgggtgtcagggtcaggacatcgctgaagactctt

SEQ ID NO: 228979 - DNA, 58 bp, Artificial
  Synthetic oligonucleotide
atggtgccccttttgcaacttctgacgtttcgacaagagcgtgttgagatgcccccgc

SEQ ID NO: 228980 - DNA, 54 bp, Artificial
  Synthetic oligonucleotide
agacgtgttctacgccctagggtacgcacatgcgcaggaccgtctgtggcaaat

SEQ ID NO: 228981 - DNA, 54 bp, Artificial
  Synthetic oligonucleotide
tcagggaaccctcgatacaccttgggatagatatccggccttagagagaggcga

SEQ ID NO: 228982 - DNA, 54 bp, Artificial
  Synthetic oligonucleotide
cccgatgagatcttgtacgaatattacaaggcgatttgcgagcgcgtggacatt

SEQ ID NO: 228983 - DNA, 54 bp, Artificial
  Synthetic oligonucleotide
tcaggcgtgatgtgaaagccctgatactcaaccaacatatcgacagaggcctcc

SEQ ID NO: 228984 - DNA, 54 bp, Artificial
  Synthetic oligonucleotide
caattcttggcctcccgcaccacatcattgaggttgagttttaccggttcaagt

SEQ ID NO: 228985 - DNA, 54 bp, Artificial
  Synthetic oligonucleotide
cccgctactgccgcaccggattggaccggatctgagtccggaaatttagcattt

SEQ ID NO: 228986 - DNA, 54 bp, Artificial
  Synthetic oligonucleotide
aacccagatcaggtaaactctggacagtgcccggacgtcctcattggtggttag

SEQ ID NO: 228987 - DNA, 54 bp, Artificial
  Synthetic oligonucleotide
cttgttttgcaaaccgccttgggccagcgagacaagataatgatcttcggcgaa

SEQ ID NO: 228988 - DNA, 54 bp, Artificial
  Synthetic oligonucleotide
cccggaatactgattaaaatcgtcagattaccccggagcgtcacgcccatgagc

SEQ ID NO: 228989 - DNA, 54 bp, Artificial
  Synthetic oligonucleotide
tctgggtgtcgtgtgatggcgatgaggtgcggttggtcaccgcggatccctatg

SEQ ID NO: 228990 - DNA, 58 bp, Artificial
  Synthetic oligonucleotide
atgtaaagaacctcagatcggttcctgatcggccaaatttatggttcctgatcggcca

SEQ ID NO: 228991 - DNA, 54 bp, Artificial
  Synthetic oligonucleotide
gaatgcaggaagtcgaagtcaagctctcggattgggtgttcaatgcgatccggt

SEQ ID NO: 228992 - DNA, 54 bp, Artificial
  Synthetic oligonucleotide
gtgaagtcggccaaacagggtaatttacctgtcccgactgtggattaggaactg

SEQ ID NO: 228993 - DNA, 54 bp, Artificial
  Synthetic oligonucleotide
tgctggaatacgtccaacgcgtctaaccgatatacctgagtatttaagtcgctt

SEQ ID NO: 228994 - DNA, 54 bp, Artificial
  Synthetic oligonucleotide
atgttgcgaggtcgacgcgactcccgataacttagccccagcgagtcagacgcc

SEQ ID NO: 228995 - DNA, 54 bp, Artificial
  Synthetic oligonucleotide
attacggtggccttatcgctcccgcggataggcctcccgacacgaaggtcggga

SEQ ID NO: 228996 - DNA, 54 bp, Artificial
  Synthetic oligonucleotide
ccgccggttcggagcgcgacgtgaccatgccgaatgtcgcgcgaggcgccagaa

SEQ ID NO: 228997 - DNA, 54 bp, Artificial
  Synthetic oligonucleotide
tgcgcacacgaaccggatttctgcggcccagacaatgtgccgatctgcaatccc

SEQ ID NO: 228998 - DNA, 54 bp, Artificial
  Synthetic oligonucleotide
gtcatcaagctgggcttggcagtcgatgagccgcataaggacataccttcgaaa

SEQ ID NO: 228999 - DNA, 54 bp, Artificial
  Synthetic oligonucleotide
acggatcgactaggaaccattccgacctctcgcgtcaaggacgggccccatgat

SEQ ID NO: 229000 - DNA, 54 bp, Artificial
  Synthetic oligonucleotide
cgcgctgggtatatcttgtcagaacatctgggcatccgcgatgcacgagtgtta

SEQ ID NO: 229001 - DNA, 59 bp, Artificial
  Synthetic oligonucleotide
gttgtggcgggatgtaccgctcgccgtaggctatggccacgccggagtaggtctgctta

SEQ ID NO: 229002 - DNA, 54 bp, Artificial
  Synthetic oligonucleotide
ccataatacgtgcggctatgcactgatttcgttgtgaagcagaccaatattagc

SEQ ID NO: 229003 - DNA, 54 bp, Artificial
  Synthetic oligonucleotide
agcatagcgggacgggaaaccacgaatcacaacgggagttaccagtatgaaatc

SEQ ID NO: 229004 - DNA, 54 bp, Artificial
  Synthetic oligonucleotide
cgcggccacgaaaatgttctctatacggccatcgaaattcctgatcacgcactt

SEQ ID NO: 229005 - DNA, 54 bp, Artificial
  Synthetic oligonucleotide
cggtcaagcacaagaccccgcgcaacgacgcatatggcgaggtgcgttggcatg

SEQ ID NO: 229006 - DNA, 54 bp, Artificial
  Synthetic oligonucleotide
aagggcggaactgaacctgcgatctgacccggctaggaaccagaaatgcaacca

SEQ ID NO: 229007 - DNA, 54 bp, Artificial
  Synthetic oligonucleotide
aaagcgtcagctcggatcatgcgccttatcgcgcggatgaaacggggaaattca

SEQ ID NO: 229008 - DNA, 54 bp, Artificial
  Synthetic oligonucleotide
ccgatttgaaaggcgcgcctaggccggagggttttcagtccgttgaccacgtgc

SEQ ID NO: 229009 - DNA, 54 bp, Artificial
  Synthetic oligonucleotide
aagattgcgtctgaggggcagttatgaaggataacgatcatgcccgacgtaaac

SEQ ID NO: 229010 - DNA, 54 bp, Artificial
  Synthetic oligonucleotide
attctgtcccccttccagggccaaactattatcgggttagatgacggcttctga

SEQ ID NO: 229011 - DNA, 54 bp, Artificial
  Synthetic oligonucleotide
gtcaccgacaggcacacagggcaggagctgaaccaccggacggttctcatggtc

SEQ ID NO: 229012 - DNA, 57 bp, Artificial
  Synthetic oligonucleotide
gggaaaatcctcgccatcgacgtgaatgactggaccggcatcggcccctactcggtc

SEQ ID NO: 229013 - DNA, 54 bp, Artificial
  Synthetic oligonucleotide
agcaaggcgatgtgaagtcgtttctccgctcttcatgggaatgctcgcttgaga

SEQ ID NO: 229014 - DNA, 54 bp, Artificial
  Synthetic oligonucleotide
attctgccggcttctgcgcaaagacgtaaggactggaccggtagtgcaccctac

SEQ ID NO: 229015 - DNA, 53 bp, Artificial
  Synthetic oligonucleotide
aggcgcgcctgccaaaggaaggccggacgctcctgcccgccaacccagacatg

SEQ ID NO: 229016 - DNA, 53 bp, Artificial
  Synthetic oligonucleotide
ctgcttggctgaacgaacggctcctcatttgccaagcccgccagggatcgaat

SEQ ID NO: 229017 - DNA, 53 bp, Artificial
  Synthetic oligonucleotide
gcgcgcgcaagaatattcagacgatggacttcggtgaaaactaccagatggcg

SEQ ID NO: 229018 - DNA, 53 bp, Artificial
  Synthetic oligonucleotide
agtatgttcgagatttcgctggacaacggatcagcgaatccgcgtagctctgt

SEQ ID NO: 229019 - DNA, 53 bp, Artificial
  Synthetic oligonucleotide
gaaaactccgcctgacaccgctcgccttgatatccgaaaatcgtcgcaacccc

SEQ ID NO: 229020 - DNA, 53 bp, Artificial
  Synthetic oligonucleotide
ctttcgtccggatcctgtccccaatctcgaatcactcgtaggagggagaggcg

SEQ ID NO: 229021 - DNA, 53 bp, Artificial
  Synthetic oligonucleotide
gcgcggcccctatgggcgctgacgtttgcttacacgcatccatgcttggaact

SEQ ID NO: 229022 - DNA, 53 bp, Artificial
  Synthetic oligonucleotide
gcacctctctgatgtagtcagatccttttatccctcttgagctcgacgctcgg

SEQ ID NO: 229023 - DNA, 59 bp, Artificial
  Synthetic oligonucleotide
atgtcactcgtccagtcatctgcggtccctgcctttcggcgaagtgcccgagtcgcccc

SEQ ID NO: 229024 - DNA, 53 bp, Artificial
  Synthetic oligonucleotide
acgacatattttggcgcgaccatgcgatgatatgaccgaacgccccacgatag

SEQ ID NO: 229025 - DNA, 53 bp, Artificial
  Synthetic oligonucleotide
agcagttgatgcgttccaagcttccgaagcgggacaagccttgctcgatagca

SEQ ID NO: 229026 - DNA, 53 bp, Artificial
  Synthetic oligonucleotide
cggatttggctacacacgcgacagagatcgactcgatagtctccacggctgcc

SEQ ID NO: 229027 - DNA, 53 bp, Artificial
  Synthetic oligonucleotide
cgatcaacgtcgatactcaggaccacgtctgccttatcaagctgaaccggcct

SEQ ID NO: 229028 - DNA, 53 bp, Artificial
  Synthetic oligonucleotide
cgtgccgtagctgttcaggacatgcccgaggcaatctgggaaaagcgccgttt

SEQ ID NO: 229029 - DNA, 53 bp, Artificial
  Synthetic oligonucleotide
gcatcggatgtctccggaacagtggattgcgggtaggcggcacggcgccagat

SEQ ID NO: 229030 - DNA, 53 bp, Artificial
  Synthetic oligonucleotide
gcatgacagttctgcgagtctttagaggtataggtgcgtgaaacggttttgtt

SEQ ID NO: 229031 - DNA, 53 bp, Artificial
  Synthetic oligonucleotide
atagcccgctaggtcgggcgctcgcagcccttggtcgtgttgtgcagaaacgc

SEQ ID NO: 229032 - DNA, 53 bp, Artificial
  Synthetic oligonucleotide
cggggttacgcttccgaaagtgtttcgtgacatacggttcctgatgacgcgat

SEQ ID NO: 229033 - DNA, 53 bp, Artificial
  Synthetic oligonucleotide
gatacatgccccgaccctttgcgattcgccctcgaaaggcgcctaacacgcgg

SEQ ID NO: 229034 - DNA, 60 bp, Artificial
  Synthetic oligonucleotide
agtcagctgccacgggaagaccgacggaagctcttgatgtctcgtagatatccgccagga

SEQ ID NO: 229035 - DNA, 53 bp, Artificial
  Synthetic oligonucleotide
ctcaagcctaaacgcgggttggtgttacagccacgtactgacccaatcccggc

SEQ ID NO: 229036 - DNA, 52 bp, Artificial
  Synthetic oligonucleotide
cggggaaacactcagggggggtcgtcaggaccgttgggcgtggagtggccac

SEQ ID NO: 229037 - DNA, 53 bp, Artificial
  Synthetic oligonucleotide
ctggcctaacgaatgtcatgaaatcggcgcgggagagtagagccatgccacgc

SEQ ID NO: 229038 - DNA, 53 bp, Artificial
  Synthetic oligonucleotide
agatggcggaggggatgacgcaacgggaacctcgggacagacggatgccgctt

SEQ ID NO: 229039 - DNA, 53 bp, Artificial
  Synthetic oligonucleotide
ctctttgccgaacactcacagtcggatgcgtatttacgggcggcgtgacgtag

SEQ ID NO: 229040 - DNA, 53 bp, Artificial
  Synthetic oligonucleotide
cgcaccgcagcatctatctatggggtagtcataacgtagcggtagacgccgct

SEQ ID NO: 229041 - DNA, 53 bp, Artificial
  Synthetic oligonucleotide
gatggctcctgcaatcaacatcgtaattggcgttcggcctgcattgggtagaa

SEQ ID NO: 229042 - DNA, 53 bp, Artificial
  Synthetic oligonucleotide
cttgatagggctgcggaagacatcgcaaatcattcgctaacactgtgtgtagc

SEQ ID NO: 229043 - DNA, 53 bp, Artificial
  Synthetic oligonucleotide
ctaggagtcgggccgaatttgacccgaagatgaatagtgtggaccttgcgact

SEQ ID NO: 229044 - DNA, 53 bp, Artificial
  Synthetic oligonucleotide
cgcaatgacccacgaaggttgtgttcgtgttcactccctacacaacatgcgac

SEQ ID NO: 229045 - DNA, 56 bp, Artificial
  Synthetic oligonucleotide
agtcactcaaacgggggatcagagtcaccctatcggggtttcagagtcggcactcc

SEQ ID NO: 229046 - DNA, 53 bp, Artificial
  Synthetic oligonucleotide
cgcaatagattcaaaacgcagccctggcgacaatccaattgatcatacaaaac

SEQ ID NO: 229047 - DNA, 53 bp, Artificial
  Synthetic oligonucleotide
cgcaagtggatcagtgccaacactgctcgttctggcaacacttgtaggcgtcc

SEQ ID NO: 229048 - DNA, 53 bp, Artificial
  Synthetic oligonucleotide
gacgagtcaattaaacacgattaggccagtctggcaacaggtctttggagggg

SEQ ID NO: 229049 - DNA, 53 bp, Artificial
  Synthetic oligonucleotide
cttgcgaccactgacgggtcgtggccgttacattcccctgcgatcagggatta

SEQ ID NO: 229050 - DNA, 53 bp, Artificial
  Synthetic oligonucleotide
cgcaagaataccttcgtcagacctgacagagccgtcgttccggaatgccgagg

SEQ ID NO: 229051 - DNA, 53 bp, Artificial
  Synthetic oligonucleotide
ctggaggccatatgtccatgccgctcgctgccagtgcaaacccgctggctcca

SEQ ID NO: 229052 - DNA, 53 bp, Artificial
  Synthetic oligonucleotide
gacagcgactggctaaactgacataacgacccggccacaatcgacccagccac

SEQ ID NO: 229053 - DNA, 53 bp, Artificial
  Synthetic oligonucleotide
gccaaagacccgaggcgccaattcctatttcgacttgcgcaagcgccggtaga

SEQ ID NO: 229054 - DNA, 53 bp, Artificial
  Synthetic oligonucleotide
acccgctatccgttctttcagcattctcggtaacctcttgagaaaccttccga

SEQ ID NO: 229055 - DNA, 53 bp, Artificial
  Synthetic oligonucleotide
ataccatgccccgtcaaagcaggtccctcagcatggggtttgaccccttctca

SEQ ID NO: 229056 - DNA, 55 bp, Artificial
  Synthetic oligonucleotide
ggcttacaaagcgctatagcgggtaaagcaggcgaaataacaagaaattcggacc

SEQ ID NO: 229057 - DNA, 51 bp, Artificial
  Synthetic oligonucleotide
gtggtttaccccgcccgactgggtatttcccgttacttggagcgtgcttta

SEQ ID NO: 229058 - DNA, 53 bp, Artificial
  Synthetic oligonucleotide
gtggcagacgatcatcggtctctcccggcggggttgctttccgcctgttctat

SEQ ID NO: 229059 - DNA, 53 bp, Artificial
  Synthetic oligonucleotide
gtgccccgcacagcagcgatagcatggggcgtgcgaatttgggttggcgcact

SEQ ID NO: 229060 - DNA, 53 bp, Artificial
  Synthetic oligonucleotide
tgccctccgagagcacctttcgcgctaattcgcggcgctggattgctactgga

SEQ ID NO: 229061 - DNA, 53 bp, Artificial
  Synthetic oligonucleotide
tgcgcaagttccagatcccatgtcatcaactcgttgcccgtattggttggccc

SEQ ID NO: 229062 - DNA, 52 bp, Artificial
  Synthetic oligonucleotide
aaccattcgaacccccgcaaggtaaggaccgacccgtactggtgccaagaca

SEQ ID NO: 229063 - DNA, 53 bp, Artificial
  Synthetic oligonucleotide
ccagcactacctaaccgcaatcaaggcgctcttggtttccggtgcgaaaatta

SEQ ID NO: 229064 - DNA, 53 bp, Artificial
  Synthetic oligonucleotide
tggacgtgtccccatcccgttaaggcgtgccgcggggatccggcgccacaaaa

SEQ ID NO: 229065 - DNA, 53 bp, Artificial
  Synthetic oligonucleotide
tggcagggatttcgtgaaccactattaccaaggaaacggtagaggcgtcaccg

SEQ ID NO: 229066 - DNA, 53 bp, Artificial
  Synthetic oligonucleotide
atgggacgcggatcgcaacctggtctggacggccagctatatcccgacgatcc

SEQ ID NO: 229067 - DNA, 58 bp, Artificial
  Synthetic oligonucleotide
aaagagggtcgccacatggcaattggacgtctggacgatgggaccatcgccgtagtct

SEQ ID NO: 229068 - DNA, 53 bp, Artificial
  Synthetic oligonucleotide
ccagacgggttgcgacacgggcagcattattgccggggtcgtcgaccggcgca

SEQ ID NO: 229069 - DNA, 53 bp, Artificial
  Synthetic oligonucleotide
gtccttgttgctcgcattgcgaacatcgggttggactctggcttgcgcgtgcc

SEQ ID NO: 229070 - DNA, 53 bp, Artificial
  Synthetic oligonucleotide
tggcgtcagttacggccagatcagacgggagagtttgaatgatgcccgtctcg

SEQ ID NO: 229071 - DNA, 53 bp, Artificial
  Synthetic oligonucleotide
ccggcaacggccggtcactgctgagctatgatcccggcgaaccgccgtaaaag

SEQ ID NO: 229072 - DNA, 53 bp, Artificial
  Synthetic oligonucleotide
tgtcgccgtttcatccgtgcattccggcaagggtccacccgtcaggctggcca

SEQ ID NO: 229073 - DNA, 53 bp, Artificial
  Synthetic oligonucleotide
aaggggcgcagcccttcttgttctaatagttctataagttcaggcgaaaatcg

SEQ ID NO: 229074 - DNA, 53 bp, Artificial
  Synthetic oligonucleotide
gtaagcaaattcgtgttcagctagcagccttgcgacctcatcaggcgaacgac

SEQ ID NO: 229075 - DNA, 53 bp, Artificial
  Synthetic oligonucleotide
tgtctaaggattgcacgccggacaattcgcagggcctgtatggatgagaccgt

SEQ ID NO: 229076 - DNA, 53 bp, Artificial
  Synthetic oligonucleotide
caaccagattggcgggtttcccgaccttactgctgtcttcgtggtcatcacag

SEQ ID NO: 229077 - DNA, 53 bp, Artificial
  Synthetic oligonucleotide
ggttcagcggctggtgcacggtcgaacaggattgcgatccgacgctcgatgtc

SEQ ID NO: 229078 - DNA, 56 bp, Artificial
  Synthetic oligonucleotide
cggggttgaaattatacctgaacaggtataggttgagcatgggtcaagacgaacga

SEQ ID NO: 229079 - DNA, 57 bp, Artificial
  Synthetic oligonucleotide
gaacttcttgcataagaccgggggtgaattcaggcattatactgtccttgtggaaac

SEQ ID NO: 229080 - DNA, 53 bp, Artificial
  Synthetic oligonucleotide
ggtgttatagtgctcttgtagttaagtggaaaggtgtgcggcctcttgcgcac

SEQ ID NO: 229081 - DNA, 53 bp, Artificial
  Synthetic oligonucleotide
cacatcagcgtaaagaagcgccgccggtcccgtgccaccgtataggccttgtc

SEQ ID NO: 229082 - DNA, 53 bp, Artificial
  Synthetic oligonucleotide
tcttgcgggcgcgatggaccgttcacgtaactacatcgtcaatcaggcgattg

SEQ ID NO: 229083 - DNA, 53 bp, Artificial
  Synthetic oligonucleotide
tgaaaggtagagtagctttcaatcagatgccttcgcagaagacagcatctgtt

SEQ ID NO: 229084 - DNA, 53 bp, Artificial
  Synthetic oligonucleotide
cccacacggtatccaacttgggaggacgccgtacgcttctacacagagcgcta

SEQ ID NO: 229085 - DNA, 53 bp, Artificial
  Synthetic oligonucleotide
tagagaacgaaactgcgtttgtcatcagagacttcgcgcaaagctcccaggac

SEQ ID NO: 229086 - DNA, 53 bp, Artificial
  Synthetic oligonucleotide
cccgttcgatgaaacggcaatttctatcgcaatttcggcaaacgcgacaaaaa

SEQ ID NO: 229087 - DNA, 53 bp, Artificial
  Synthetic oligonucleotide
tcaagggttctccgggtgggtcgaaatgcggatcggaatgtgggccggataga

SEQ ID NO: 229088 - DNA, 53 bp, Artificial
  Synthetic oligonucleotide
cccggggcgcttgaaggtcaagctagcgccaacatgagaatgtgccaagcccc

SEQ ID NO: 229089 - DNA, 53 bp, Artificial
  Synthetic oligonucleotide
tctgcgcgattatctgctgatccccgcgccgaaggggccgctcctgtcggtcg

SEQ ID NO: 229090 - DNA, 60 bp, Artificial
  Synthetic oligonucleotide
gcaagtacagaggcataaaccaacttcgtcatgacatttctgtccttcgtcgttgtgcag

SEQ ID NO: 229091 - DNA, 53 bp, Artificial
  Synthetic oligonucleotide
tgacgggtttgtgagggatcggacgctcggcccgtgctagcctttggcgacag

SEQ ID NO: 229092 - DNA, 53 bp, Artificial
  Synthetic oligonucleotide
tacccacacttccgaatgtaacatatatagcgtggtgatatttcgcgcatcat

SEQ ID NO: 229093 - DNA, 53 bp, Artificial
  Synthetic oligonucleotide
taccaaccgccctcattacttaataaatcgttaaatataccgatgactcgtgt

SEQ ID NO: 229094 - DNA, 53 bp, Artificial
  Synthetic oligonucleotide
tgactccaatgcaaatgtcgttaccggcctgacttcactgacgcccgcgtcga

SEQ ID NO: 229095 - DNA, 53 bp, Artificial
  Synthetic oligonucleotide
taacgcgtcacaacggttcctgttgcgcgattttgggttgcgtgaatgaatgc

SEQ ID NO: 229096 - DNA, 53 bp, Artificial
  Synthetic oligonucleotide
tgaggacgtcttggcctggtttgaggctagtaccagcgcatggtgagacgtct

SEQ ID NO: 229097 - DNA, 53 bp, Artificial
  Synthetic oligonucleotide
tcacaagatggactaaactggggtagacgacactacggtagctttcttgagcg

SEQ ID NO: 229098 - DNA, 53 bp, Artificial
  Synthetic oligonucleotide
gtttcgcgtgcgaaacaatgggtcaggggttattccgcatgattatcagaagg

SEQ ID NO: 229099 - DNA, 53 bp, Artificial
  Synthetic oligonucleotide
aactttccttactcaagatttcctttgcgacgagagagacaagcgcgcgtttt

SEQ ID NO: 229100 - DNA, 53 bp, Artificial
  Synthetic oligonucleotide
caccgctcaagatccgcagattttcggctgcggtagcccattccaacgatcta

SEQ ID NO: 229101 - DNA, 59 bp, Artificial
  Synthetic oligonucleotide
aaagaagtgaaccgccgttcacggatcaagacactatctcaacctctgtgctattacga

SEQ ID NO: 229102 - DNA, 53 bp, Artificial
  Synthetic oligonucleotide
tgcactaaggccaccgcaagtgtgcgttaccattaggatccgtgccgccggta

SEQ ID NO: 229103 - DNA, 53 bp, Artificial
  Synthetic oligonucleotide
gttacgcgtgggcttgacgcatctatgggctgatcaggactggcgcgaagtgc

SEQ ID NO: 229104 - DNA, 53 bp, Artificial
  Synthetic oligonucleotide
tcacatggttttcgcctcgaatctgacgctcagctctcgccgcaacggggttt

SEQ ID NO: 229105 - DNA, 53 bp, Artificial
  Synthetic oligonucleotide
cagaggcggatggcattccggcccatggcgggctcacatttcattctgaccat

SEQ ID NO: 229106 - DNA, 53 bp, Artificial
  Synthetic oligonucleotide
ttctaaaaaattgcagggctattctacatacatgctatgtgtgcgaagtgggc

SEQ ID NO: 229107 - DNA, 53 bp, Artificial
  Synthetic oligonucleotide
ttctcagttttgcccggccttcgtgtagcgtgccggtgaatagacgctcaggt

SEQ ID NO: 229108 - DNA, 53 bp, Artificial
  Synthetic oligonucleotide
ttgccccttggtgcgaatacgaaaacgccgaagagccggtcttgcggctgggg

SEQ ID NO: 229109 - DNA, 53 bp, Artificial
  Synthetic oligonucleotide
ggagatatgcggttgcgggcagataccgcttcatgccgccggatgataacgct

SEQ ID NO: 229110 - DNA, 51 bp, Artificial
  Synthetic oligonucleotide
aaaattatcctcgcccctaaaaggcacttcttgggtggttggtgtacccgc

SEQ ID NO: 229111 - DNA, 53 bp, Artificial
  Synthetic oligonucleotide
gctttgaaccttgccccgatccccgaactttatgtgtcatacgagtcagcgca

SEQ ID NO: 229112 - DNA, 58 bp, Artificial
  Synthetic oligonucleotide
ccaagcggccccctttgcggcaaagcatttgtgcgttatacgtgatttgttcactata

SEQ ID NO: 229113 - DNA, 53 bp, Artificial
  Synthetic oligonucleotide
gcttgcctagtgtgcgggcaaacaatcggagagccatggatgtttgaatttgc

SEQ ID NO: 229114 - DNA, 53 bp, Artificial
  Synthetic oligonucleotide
aaccgtattatcgtatacaatcttgcgaaacaagagagtttgggagggaccga

SEQ ID NO: 229115 - DNA, 53 bp, Artificial
  Synthetic oligonucleotide
acaggaaggggctgcccttctgtgccgccatcagaccggcatggatcgcggga

SEQ ID NO: 229116 - DNA, 53 bp, Artificial
  Synthetic oligonucleotide
tcgtatgttggatgtcttgccaactagccaggaacccatgcgcggatttatcg

SEQ ID NO: 229117 - DNA, 53 bp, Artificial
  Synthetic oligonucleotide
cgaacgacattcggcagaatgtctagtgagtacacattcattacccttcaggt

SEQ ID NO: 229118 - DNA, 53 bp, Artificial
  Synthetic oligonucleotide
ccccgcaaaatcagggacttgcgataagtgtggcagcacggatatgacacgtc

SEQ ID NO: 229119 - DNA, 53 bp, Artificial
  Synthetic oligonucleotide
catagcgtccttggtcgggtctggtgatcggcacatcacggcggcaccggagg

SEQ ID NO: 229120 - DNA, 53 bp, Artificial
  Synthetic oligonucleotide
tcggccgcagacttgaccgactcctccttgtaacccggccccgcgggattggt

SEQ ID NO: 229121 - DNA, 53 bp, Artificial
  Synthetic oligonucleotide
ttttagccgatcgtttgcagcatgaggtgataactgcgatagatccgatctaa

SEQ ID NO: 229122 - DNA, 53 bp, Artificial
  Synthetic oligonucleotide
atcaaacgtgttgccgaaccgtatctgccccgtggtcaggtcacgctggtcac

SEQ ID NO: 229123 - DNA, 60 bp, Artificial
  Synthetic oligonucleotide
ttaatctgcgcgcctgatatgtcgaggtggtggggtccaattctcgtgctgacatctcct

SEQ ID NO: 229124 - DNA, 53 bp, Artificial
  Synthetic oligonucleotide
atattgatcgaactccatatcgtccgtctggggcagatcccagcacttctgga

SEQ ID NO: 229125 - DNA, 53 bp, Artificial
  Synthetic oligonucleotide
gcgttgtccaagtcaagtacactaacctagttcgaaccacaggttcggacata

SEQ ID NO: 229126 - DNA, 53 bp, Artificial
  Synthetic oligonucleotide
acatgcgcttgacccgccccatacatctccttagaaaccgcccatcggattag

SEQ ID NO: 229127 - DNA, 53 bp, Artificial
  Synthetic oligonucleotide
tgtctgggcggcgggaatatcctacgataagagagcgcttatgtctgatgatt

SEQ ID NO: 229128 - DNA, 53 bp, Artificial
  Synthetic oligonucleotide
tgtcttcggccgaaagtaatagaactttgcctttcggagcgcattcgtccgaa

SEQ ID NO: 229129 - DNA, 53 bp, Artificial
  Synthetic oligonucleotide
ttaagctgcctaactatgtagtcgaccacccgaaggagtcgacacggtcacga

SEQ ID NO: 229130 - DNA, 53 bp, Artificial
  Synthetic oligonucleotide
atgcctcgtcgttgacctatgtctgcgatctatcccgcgcgtaacccgtccgg

SEQ ID NO: 229131 - DNA, 53 bp, Artificial
  Synthetic oligonucleotide
tcagccatttccgaaaggtcaagttgccacgtgttcccgtggatgagcaaatt

SEQ ID NO: 229132 - DNA, 53 bp, Artificial
  Synthetic oligonucleotide
aatcaatggccggtaggtgccggcccattccgtgtcgtcgaatacgtcccgga

SEQ ID NO: 229133 - DNA, 53 bp, Artificial
  Synthetic oligonucleotide
aatcaatgtcgtcgactggtcttcgtgagtgtagtgtagggcaaaccaaacaa

SEQ ID NO: 229134 - DNA, 57 bp, Artificial
  Synthetic oligonucleotide
gaaggagacacccgaacctaacgcacgcgagtattttaggcgacaggagtgatggcg

SEQ ID NO: 229135 - DNA, 53 bp, Artificial
  Synthetic oligonucleotide
cccgatgacgctatggccctttcctggcttgaaacgagctaacccgcgctaag

SEQ ID NO: 229136 - DNA, 53 bp, Artificial
  Synthetic oligonucleotide
ggggtcagaacagcccgaggtggggcatggcatgccgggaccgtccgaaacat

SEQ ID NO: 229137 - DNA, 53 bp, Artificial
  Synthetic oligonucleotide
cagaaacgagggtcatgttctcatttacactggatgtacccactgcagcttcc

SEQ ID NO: 229138 - DNA, 53 bp, Artificial
  Synthetic oligonucleotide
ggggccgcaacagtccgagacgctgacgcgcacttcaaggtccggatcttcaa

SEQ ID NO: 229139 - DNA, 53 bp, Artificial
  Synthetic oligonucleotide
ggggcagatccattgagcgacgccatgggaaaagcgcggatcgcaactgggat

SEQ ID NO: 229140 - DNA, 53 bp, Artificial
  Synthetic oligonucleotide
ttcctccgaggccttccgaaccttcatctcccgcgtcgagaaacagccgaatg

SEQ ID NO: 229141 - DNA, 53 bp, Artificial
  Synthetic oligonucleotide
acaaccccgttagaccaacagcgatcaaacctaaaacgggtgagcggtccagc

SEQ ID NO: 229142 - DNA, 53 bp, Artificial
  Synthetic oligonucleotide
cctcttgggtcgctgacttcttgcaaggtgttccacttggaacgggtgataag

SEQ ID NO: 229143 - DNA, 53 bp, Artificial
  Synthetic oligonucleotide
tctcagagggatgggcgccaaacctgtccatactgcgcatgcaacatccgatg

SEQ ID NO: 229144 - DNA, 53 bp, Artificial
  Synthetic oligonucleotide
cctcgcggcgagggagtaaacgggcgccacaagagaggggacgctgaatgact

SEQ ID NO: 229145 - DNA, 57 bp, Artificial
  Synthetic oligonucleotide
gcaagccaagccctcggctcggcagggttttctcgtgccctatgaccctgaaccggc

SEQ ID NO: 229146 - DNA, 53 bp, Artificial
  Synthetic oligonucleotide
aaacgcttgtgaccaacgctgtgcgacaccccagctttactagaccggccgcg

SEQ ID NO: 229147 - DNA, 53 bp, Artificial
  Synthetic oligonucleotide
ttcccctatatgccgattgccaaccccggctggatgttccccgaatactcgtt

SEQ ID NO: 229148 - DNA, 53 bp, Artificial
  Synthetic oligonucleotide
aatggcatcactgctgcttcatcggctctgggcaggatcgtccggcagtattg

SEQ ID NO: 229149 - DNA, 53 bp, Artificial
  Synthetic oligonucleotide
ttcatccgaaagtgttaacaaggggcctataacccctgcccgaagcacgaaaa

SEQ ID NO: 229150 - DNA, 52 bp, Artificial
  Synthetic oligonucleotide
tctgtcaaaggggttgcatcggatgacacccgaaggattgaacatcccggtg

SEQ ID NO: 229151 - DNA, 52 bp, Artificial
  Synthetic oligonucleotide
tctagtaaggaagattctgcttcgtgcgaccctactgatctgttgccaaata

SEQ ID NO: 229152 - DNA, 52 bp, Artificial
  Synthetic oligonucleotide
cttggcatccggcccggatcgctgtataggcccgggcttacatgcgtgtggg

SEQ ID NO: 229153 - DNA, 52 bp, Artificial
  Synthetic oligonucleotide
tcgcctgtacggtattgcatcatgactgttgcggccaaacggaaactcttga

SEQ ID NO: 229154 - DNA, 52 bp, Artificial
  Synthetic oligonucleotide
aacccatgacttcagttgccggtcttagggtcaggattcataaccaataaat

SEQ ID NO: 229155 - DNA, 52 bp, Artificial
  Synthetic oligonucleotide
tcgattggtccttctgtctccgaagccggatctaggatcgaggcgcccgttt

SEQ ID NO: 229156 - DNA, 53 bp, Artificial
  Synthetic oligonucleotide
cattgttcgggttgcgccactttcatctgaaacggcgggccaaacccgaaaaa

SEQ ID NO: 229157 - DNA, 52 bp, Artificial
  Synthetic oligonucleotide
aaaacaacggtgtcgaaagctttgatcagagggcccgtgtggtcgatccgca

SEQ ID NO: 229158 - DNA, 52 bp, Artificial
  Synthetic oligonucleotide
ttttagtgaccccttgcgacgtcccactcagcggtgtgccaaaggatacagc

SEQ ID NO: 229159 - DNA, 52 bp, Artificial
  Synthetic oligonucleotide
tttgattgtagtccagccctagggccgcctcattgccagacaggggataaat

SEQ ID NO: 229160 - DNA, 52 bp, Artificial
  Synthetic oligonucleotide
tttaacgctaccgtctaggttaggaacgagaggcagcgaccccatgccataa

SEQ ID NO: 229161 - DNA, 52 bp, Artificial
  Synthetic oligonucleotide
ttgttctgtcccggcagcgttattgcttcagccgaacatggcgtacgagcct

SEQ ID NO: 229162 - DNA, 52 bp, Artificial
  Synthetic oligonucleotide
aaaagcttgctcggtcgactttgtttgttaagctgcctaactatgtagtcga

SEQ ID NO: 229163 - DNA, 52 bp, Artificial
  Synthetic oligonucleotide
ttgctcccaagaaattgcgatatccggggacaatctaaacgcgactgtcacc

SEQ ID NO: 229164 - DNA, 52 bp, Artificial
  Synthetic oligonucleotide
ttgctatatgcatttgcgatcaagcgaatagccccacgtacgtcaccaggag

SEQ ID NO: 229165 - DNA, 52 bp, Artificial
  Synthetic oligonucleotide
ctatgacgcgagcctctttgatgccgtgccccgcctgtttcagcggtatcgc

SEQ ID NO: 229166 - DNA, 52 bp, Artificial
  Synthetic oligonucleotide
ctcacacaaggcaggttatcgatggcgaaggttggctttctcgggttggggc

SEQ ID NO: 229167 - DNA, 59 bp, Artificial
  Synthetic oligonucleotide
gcaacggtgactgcttgttgctcgtgatgcgttcaccacaagcctgggggtttggaaac

SEQ ID NO: 229168 - DNA, 52 bp, Artificial
  Synthetic oligonucleotide
ttcaccccagatgggcgttgagggcgcaaatgtcatctttgacacttgggtc

SEQ ID NO: 229169 - DNA, 52 bp, Artificial
  Synthetic oligonucleotide
aaactctgatgagtcacacttgcacgcctcttggtcggaggttgggatgcac

SEQ ID NO: 229170 - DNA, 52 bp, Artificial
  Synthetic oligonucleotide
agcattggctcttgtggatcgaggtagcatgccttgcccgcctctcagccta

SEQ ID NO: 229171 - DNA, 52 bp, Artificial
  Synthetic oligonucleotide
agcatgggcaaccggcctggtagagttccgtgacaacagtatctacgcgccc

SEQ ID NO: 229172 - DNA, 52 bp, Artificial
  Synthetic oligonucleotide
tgcgcttgttcagagtgttctaccgattgcaggtgcgtcgcgtagaaatgcc

SEQ ID NO: 229173 - DNA, 52 bp, Artificial
  Synthetic oligonucleotide
tgcactatgcgcgaatgtcggccatcaatgagactacgcctacacacgcgca

SEQ ID NO: 229174 - DNA, 52 bp, Artificial
  Synthetic oligonucleotide
tgacctcggtgcgtcacatcgtcgagagtggtgcgtggcagacaagcgtttt

SEQ ID NO: 229175 - DNA, 52 bp, Artificial
  Synthetic oligonucleotide
tgaccatacatcaggcttttagcacaacgggaccaattgattcttcactggt

SEQ ID NO: 229176 - DNA, 52 bp, Artificial
  Synthetic oligonucleotide
cttcacatgcagtctatacagaagagtgtgatcgttaaattgatctcacgca

SEQ ID NO: 229177 - DNA, 52 bp, Artificial
  Synthetic oligonucleotide
tgaagccacccgaagacacccgaaggacgataccgcccgtgagactgcaacg

SEQ ID NO: 229178 - DNA, 59 bp, Artificial
  Synthetic oligonucleotide
cagaattacgagtatacctcaaatgtggtccgagtgcttggggcactaatcgcacggtc

SEQ ID NO: 229179 - DNA, 52 bp, Artificial
  Synthetic oligonucleotide
cttgacgataatcgggacgaacggcttccgattgcacggtaatctaggcgaa

SEQ ID NO: 229180 - DNA, 52 bp, Artificial
  Synthetic oligonucleotide
tgaacgtccggcgcggttgtcttatctcaatcgcaacacgagataagagaca

SEQ ID NO: 229181 - DNA, 52 bp, Artificial
  Synthetic oligonucleotide
aacattccgtaaactcgcaccgaaatcgtggcaaattcgttctatcaccgtc

SEQ ID NO: 229182 - DNA, 52 bp, Artificial
  Synthetic oligonucleotide
aatgtcggcctctgtggcggaactgtagatcaggatgcctcctggaagcctc

SEQ ID NO: 229183 - DNA, 52 bp, Artificial
  Synthetic oligonucleotide
gggcccgaaattttcggcgctctccctggcaggctcctcccgcgaatgggac

SEQ ID NO: 229184 - DNA, 52 bp, Artificial
  Synthetic oligonucleotide
ggggtaaccccggcaagcactatataagagccgcgttggtggctccaaaaga

SEQ ID NO: 229185 - DNA, 52 bp, Artificial
  Synthetic oligonucleotide
gggtcgcgtcggatcccgatcctgtggataggcccgcgaccggtgtgtgcgg

SEQ ID NO: 229186 - DNA, 52 bp, Artificial
  Synthetic oligonucleotide
acgaagaactgagaagttttgtagttcatagtagtgggattgtgcaactcgg

SEQ ID NO: 229187 - DNA, 52 bp, Artificial
  Synthetic oligonucleotide
ggtccgtctatgcgggagtaggaggtacctagcttggcgtgtccgctctttc

SEQ ID NO: 229188 - DNA, 52 bp, Artificial
  Synthetic oligonucleotide
ggtctagccctggttcaggacagcgatttggtccccggccaaggattgccac

SEQ ID NO: 229189 - DNA, 60 bp, Artificial
  Synthetic oligonucleotide
tcatgcagtcaagaagttcgagtcaagagatgcacgcgaaagacacacaacccggaactg

SEQ ID NO: 229190 - DNA, 60 bp, Artificial
  Synthetic oligonucleotide
cagacacatggcagagcgtctcggccaatagatctttcgttcatccctccgatgagcgcg

SEQ ID NO: 229191 - DNA, 52 bp, Artificial
  Synthetic oligonucleotide
ggtgccgtaccaaagccgactttcgagccttggtttatcgctagggtgcagc

SEQ ID NO: 229192 - DNA, 52 bp, Artificial
  Synthetic oligonucleotide
acgatggtgaactgactgcgtcttggaccttcaatattgctggttacaaaga

SEQ ID NO: 229193 - DNA, 52 bp, Artificial
  Synthetic oligonucleotide
ggttgtgtggctggttttacgaatatacgcgcaataatgcaacatccattga

SEQ ID NO: 229194 - DNA, 52 bp, Artificial
  Synthetic oligonucleotide
gtatctcgtgggctccgccaacaggtgggaccgtgccccgcaatccggggcg

SEQ ID NO: 229195 - DNA, 52 bp, Artificial
  Synthetic oligonucleotide
aaggccatcgcagagatggcgttctatcgcttcctattctacgcgagagccc

SEQ ID NO: 229196 - DNA, 52 bp, Artificial
  Synthetic oligonucleotide
gcacctcctgacaggcctgtgacggcgctcccggtgcggctacaggcctttt

SEQ ID NO: 229197 - DNA, 52 bp, Artificial
  Synthetic oligonucleotide
aaggagtgcggttgaagcggtgatttgtaacccaccgagtccgatcaagtgg

SEQ ID NO: 229198 - DNA, 52 bp, Artificial
  Synthetic oligonucleotide
gcaactcagcgacctcggtctggttcagccagagcgactacgggggatggct

SEQ ID NO: 229199 - DNA, 52 bp, Artificial
  Synthetic oligonucleotide
gctatgcctgcattcagcgctatgtgaaaacgctggacagctcgccgggtgt

SEQ ID NO: 229200 - DNA, 52 bp, Artificial
  Synthetic oligonucleotide
gcgcttatgcgacattctatttacagacgcctttcatgaagcaaaatgcccc

SEQ ID NO: 229201 - DNA, 60 bp, Artificial
  Synthetic oligonucleotide
gcaaccggcaatgtgactgcctcacaatatatcgaaggcttgctgatggtgagtggcttc

SEQ ID NO: 229202 - DNA, 52 bp, Artificial
  Synthetic oligonucleotide
acatcgaatggagaacaaccatgtgcgactatatcggtctggacgtatccct

SEQ ID NO: 229203 - DNA, 52 bp, Artificial
  Synthetic oligonucleotide
gctggcatcgtgatgtgctacccaacgtgccctcggccgttgttagaatttc

SEQ ID NO: 229204 - DNA, 52 bp, Artificial
  Synthetic oligonucleotide
gctgtagtagtccgagatagtgtggagcttttcgctatcggaaatgccgtgc

SEQ ID NO: 229205 - DNA, 52 bp, Artificial
  Synthetic oligonucleotide
ggaaatgtaccgggcggcttaactaccggagacctatatgaaaatcacgatt

SEQ ID NO: 229206 - DNA, 52 bp, Artificial
  Synthetic oligonucleotide
ggacacattcctcccgaatagagccggccgcctttacgacaggtaaactctc

SEQ ID NO: 229207 - DNA, 52 bp, Artificial
  Synthetic oligonucleotide
ggatggcccccaaatcagcccgcgtcaaggatcgcaaaacttttcggcgagg

SEQ ID NO: 229208 - DNA, 52 bp, Artificial
  Synthetic oligonucleotide
ggcaggtccagagatcttccgtggagacctgttctatcttgtcgccgcgtag

SEQ ID NO: 229209 - DNA, 52 bp, Artificial
  Synthetic oligonucleotide
gcctcgtagagctgtgtcggcgtaaacgtgtccaaatatctaggcttgaacc

SEQ ID NO: 229210 - DNA, 52 bp, Artificial
  Synthetic oligonucleotide
ggccagtctcgatcatataccagcagccaattctgcttccgctactttgtgt

SEQ ID NO: 229211 - DNA, 52 bp, Artificial
  Synthetic oligonucleotide
accgagaactgcatctaggttacgatcaacgttttcatcgctgacgcccttc

SEQ ID NO: 229212 - DNA, 52 bp, Artificial
  Synthetic oligonucleotide
ttatgtccttggcaggaaagggggggtaggggtggccttaggccacccagcg

SEQ ID NO: 229213 - DNA, 52 bp, Artificial
  Synthetic oligonucleotide
ggccgcgagaaccgagagcgcatggcgctcgcactcatgaagggcgagatag

SEQ ID NO: 229214 - DNA, 52 bp, Artificial
  Synthetic oligonucleotide
gacgtcacgttatccgctgtgcggcacccctgtcccgcgcgaattcccccca

SEQ ID NO: 229215 - DNA, 52 bp, Artificial
  Synthetic oligonucleotide
actactggcttagcccggagaaatagcagtcagcgcctcctttcggcagctc

SEQ ID NO: 229216 - DNA, 52 bp, Artificial
  Synthetic oligonucleotide
tagatcgctaagcgctttcgagcgtttagccgtccaatcggacgtttgcccc

SEQ ID NO: 229217 - DNA, 52 bp, Artificial
  Synthetic oligonucleotide
tatatagttgtaggcgaccatgttcacgcaaccgctattttccgcagctgcg

SEQ ID NO: 229218 - DNA, 52 bp, Artificial
  Synthetic oligonucleotide
gaccgactactggcctccttcggtggacagggacgactgacgccctccagaa

SEQ ID NO: 229219 - DNA, 52 bp, Artificial
  Synthetic oligonucleotide
tcaattcaaatagggcgcgggcgcacttgtatcataagcgcaacatgcccaa

SEQ ID NO: 229220 - DNA, 52 bp, Artificial
  Synthetic oligonucleotide
tcaattgggttcattacgccgccctacgggttgaacctatatgttgcctcag

SEQ ID NO: 229221 - DNA, 52 bp, Artificial
  Synthetic oligonucleotide
gaatcccgcgtgatcatgaatgctcgccgtttgcggattcgagagggatagg

SEQ ID NO: 229222 - DNA, 52 bp, Artificial
  Synthetic oligonucleotide
tcacgccatccttccagcatctcgaccgcgttccagtcccggttcttcgccc

SEQ ID NO: 229223 - DNA, 60 bp, Artificial
  Synthetic oligonucleotide
ttcaaaggagcggcataattccgcgacaggttcacactgaccctagtgtccccgattgca

SEQ ID NO: 229224 - DNA, 52 bp, Artificial
  Synthetic oligonucleotide
tcattttcacggaagttccgccgtgacgcatcttgcgagtgcgcgatcaagc

SEQ ID NO: 229225 - DNA, 52 bp, Artificial
  Synthetic oligonucleotide
aacctcatcccgtcctggctcgcccgtgagacggaagctcgtgatgctccgc

SEQ ID NO: 229226 - DNA, 52 bp, Artificial
  Synthetic oligonucleotide
tcgaatttttcaagaaggctactcatggccatataggaatccccggactatc

SEQ ID NO: 229227 - DNA, 52 bp, Artificial
  Synthetic oligonucleotide
gaacccaaccaactcgcgggtcaccggacgccaagctatggaccgaaccggt

SEQ ID NO: 229228 - DNA, 52 bp, Artificial
  Synthetic oligonucleotide
gaacaccgaaggccgtacacagctctcgatgcgggctggatttgcaccgggg

SEQ ID NO: 229229 - DNA, 52 bp, Artificial
  Synthetic oligonucleotide
agacctcgatgcagggcttcggggcagggcttcgggacagtagcaggcggtc

SEQ ID NO: 229230 - DNA, 50 bp, Artificial
  Synthetic oligonucleotide
aacccttagaccctgacctcgggttttgcgcgacttccctttatgggtcc

SEQ ID NO: 229231 - DNA, 52 bp, Artificial
  Synthetic oligonucleotide
acgctactcccgatgggcgtaagaccctgcggaaattcgcacagcgcattac

SEQ ID NO: 229232 - DNA, 52 bp, Artificial
  Synthetic oligonucleotide
aaggaccgccgttacatgcgcgtgaagcccgctcaggctagaatcatccggt

SEQ ID NO: 229233 - DNA, 52 bp, Artificial
  Synthetic oligonucleotide
gattattcaggataacggcgatggatgggtaaagatgcgtcccgtagacggc

SEQ ID NO: 229234 - DNA, 60 bp, Artificial
  Synthetic oligonucleotide
ttcaaccgatcacagttcccatccatcatcttgttcgcgcgcgatctcagggccgacctc

SEQ ID NO: 229235 - DNA, 52 bp, Artificial
  Synthetic oligonucleotide
gtgcaatcaccgttctcttcaacctaccccatctggcgggcaagtgaacacg

SEQ ID NO: 229236 - DNA, 51 bp, Artificial
  Synthetic oligonucleotide
acggcacaggtccctacccttgggtaaccgatggtacccggagggcaaatg

SEQ ID NO: 229237 - DNA, 52 bp, Artificial
  Synthetic oligonucleotide
gttccagagatgctcttgccagacgacaagttctgacccgttcacgattgct

SEQ ID NO: 229238 - DNA, 52 bp, Artificial
  Synthetic oligonucleotide
gttgcgcgcctgcacaccgatcttcgatgtgggcagcagttcaatgccctgg

SEQ ID NO: 229239 - DNA, 52 bp, Artificial
  Synthetic oligonucleotide
gaggccgatggcctgcagataggccgagttcttgatcgtgcccacgaccgtg

SEQ ID NO: 229240 - DNA, 52 bp, Artificial
  Synthetic oligonucleotide
taacatgtgaacacgtgcgcttgagacatgcccggttggacctcgttctgag

SEQ ID NO: 229241 - DNA, 52 bp, Artificial
  Synthetic oligonucleotide
aactctgcgcatgcacgggctcccttcgcaacgctcaatcgggcaggttcta

SEQ ID NO: 229242 - DNA, 52 bp, Artificial
  Synthetic oligonucleotide
taccgacaaagggacggcaaccccaacaatcgccgcccgacctctggagctt

SEQ ID NO: 229243 - DNA, 52 bp, Artificial
  Synthetic oligonucleotide
gagacgacgcttgccgacattcaggcactgaccaaccgtttgggagatcact

SEQ ID NO: 229244 - DNA, 52 bp, Artificial
  Synthetic oligonucleotide
gagacattaattgataagtgcccacgcattgagactgagcgacttgtgttgc

SEQ ID NO: 229245 - DNA, 60 bp, Artificial
  Synthetic oligonucleotide
cagactcatgcgttggatggtcgtatgcgtgagagacgtcgtgttgctcggtctcggaat

SEQ ID NO: 229246 - DNA, 52 bp, Artificial
  Synthetic oligonucleotide
acgtcctgatcccgttctttctgagcgaggatcagtcgttcacaattaccga

SEQ ID NO: 229247 - DNA, 52 bp, Artificial
  Synthetic oligonucleotide
tacggggcgttgttgcacaagtctgacgcctcaggattcccttcgcgaaccc

SEQ ID NO: 229248 - DNA, 52 bp, Artificial
  Synthetic oligonucleotide
gactgagaattcctcacgcgctgaggcctttgcctcatgcatactccccctg

SEQ ID NO: 229249 - DNA, 52 bp, Artificial
  Synthetic oligonucleotide
cctcaagacgcaagcgaccaatgccctctcgggcgtcggcctcacgctctct

SEQ ID NO: 229250 - DNA, 52 bp, Artificial
  Synthetic oligonucleotide
cactctctccctcaggatgagagacgtctgcgcccctcggaaggggagcctt

SEQ ID NO: 229251 - DNA, 52 bp, Artificial
  Synthetic oligonucleotide
atttaaagcgccgctacaaatgggaggggagtactacactaccagtcctttt

SEQ ID NO: 229252 - DNA, 52 bp, Artificial
  Synthetic oligonucleotide
agttcaaccgtttcatgcaggtcatccggcaagttggccggggtgtggacac

SEQ ID NO: 229253 - DNA, 52 bp, Artificial
  Synthetic oligonucleotide
atcgcccaccagtattctgaaggcgctaggcagggtttaacaaccccttagc

SEQ ID NO: 229254 - DNA, 52 bp, Artificial
  Synthetic oligonucleotide
ccataaagcaggcgtcttgaccccagtcccgcgttcccacgactcgagagga

SEQ ID NO: 229255 - DNA, 52 bp, Artificial
  Synthetic oligonucleotide
cgcctaaggtcttccatttcgagttttctgcgaagatctcgggccattaggg

SEQ ID NO: 229256 - DNA, 60 bp, Artificial
  Synthetic oligonucleotide
gaagtatgtcagccacgtctacgacacacccggcgcaaagacggtcacatgctcagctta

SEQ ID NO: 229257 - DNA, 52 bp, Artificial
  Synthetic oligonucleotide
cgcataaacgcggcctttgtggcttttatacatctatgccccggcgggttta

SEQ ID NO: 229258 - DNA, 52 bp, Artificial
  Synthetic oligonucleotide
cgggataaaacgtcgactcgacactgacatcgcttagcccagccagatcata

SEQ ID NO: 229259 - DNA, 52 bp, Artificial
  Synthetic oligonucleotide
agtcgctctaggccattccgtacgtgttcagggggcggtgcggtaagccaga

SEQ ID NO: 229260 - DNA, 52 bp, Artificial
  Synthetic oligonucleotide
caaggatgataccgcctcgatggagcaccccttgttctccctcgcgaccaaa

SEQ ID NO: 229261 - DNA, 52 bp, Artificial
  Synthetic oligonucleotide
cggtcgagtgccgcgcaatattcagcgagacgccatgcagcaccgggtgact

SEQ ID NO: 229262 - DNA, 52 bp, Artificial
  Synthetic oligonucleotide
catgcggcgcttgtggacggagtgtcgcagccctaccttctcaccatgactc

SEQ ID NO: 229263 - DNA, 52 bp, Artificial
  Synthetic oligonucleotide
cgggaagtgccagcctgtaggacgccatctcagacctctcccgccgcgatca

SEQ ID NO: 229264 - DNA, 52 bp, Artificial
  Synthetic oligonucleotide
cccaactcagtacagacaccccgacacctgaagtgaaaacagtgtatagttg

SEQ ID NO: 229265 - DNA, 52 bp, Artificial
  Synthetic oligonucleotide
atgtattgcacgccgggatgctgcagttccatccgcatgtagacggtaaagc

SEQ ID NO: 229266 - DNA, 52 bp, Artificial
  Synthetic oligonucleotide
ccgcgtacggtatacccttacaatttcgcttgtccctcaattgtcgaacgca

SEQ ID NO: 229267 - DNA, 60 bp, Artificial
  Synthetic oligonucleotide
ttcatagtatcgggattggttcaatgcctccttctcgcgaggtccaatggcacaggcagc

SEQ ID NO: 229268 - DNA, 52 bp, Artificial
  Synthetic oligonucleotide
atgagtaggctagcataaccgaccggttaccgacaattgggttgatttagac

SEQ ID NO: 229269 - DNA, 52 bp, Artificial
  Synthetic oligonucleotide
atggctcagaccgtccacgcaaggacacatgatcatcgcggtgggtgccaca

SEQ ID NO: 229270 - DNA, 52 bp, Artificial
  Synthetic oligonucleotide
cgctacaaggagtggggcgctaaatacccgaacgcgatccggtctatgatcc

SEQ ID NO: 229271 - DNA, 52 bp, Artificial
  Synthetic oligonucleotide
agctagaagaagcactcctagccgcggacgagagtgggaagtatgactatgc

SEQ ID NO: 229272 - DNA, 51 bp, Artificial
  Synthetic oligonucleotide
cccggcacccctcaaaccaacaaacctttccctctcttattctgacgcccc

SEQ ID NO: 229273 - DNA, 52 bp, Artificial
  Synthetic oligonucleotide
atccaggttgaacgactgcgcccaaacgtccgaggcagggatgcccgcggct

SEQ ID NO: 229274 - DNA, 52 bp, Artificial
  Synthetic oligonucleotide
atcaaaccactgatttcacgtcggagttttccacaggaacactctctcgaca

SEQ ID NO: 229275 - DNA, 52 bp, Artificial
  Synthetic oligonucleotide
cggttcccgaaaaaacccgatctgcgatcaattcgtttcggtgtcagatgca

SEQ ID NO: 229276 - DNA, 52 bp, Artificial
  Synthetic oligonucleotide
cacaaagccggagcccgcgcctttggtcggccgcatctggccttgacctggc

SEQ ID NO: 229277 - DNA, 51 bp, Artificial
  Synthetic oligonucleotide
atcggcccaagccaccgaacgcgggaaacattcagcttccgcgcataaagt

SEQ ID NO: 229278 - DNA, 57 bp, Artificial
  Synthetic oligonucleotide
gcaaagaagtggttgatgcttccctgttgagaagttcggccaaaagttagccgagcg

SEQ ID NO: 229279 - DNA, 51 bp, Artificial
  Synthetic oligonucleotide
ggccccttgcccccccttggcttgcacgagaagaactgcctgtatcgtttc

SEQ ID NO: 229280 - DNA, 51 bp, Artificial
  Synthetic oligonucleotide
atcgccgcccgacctctggagcttgagtatgacagtcgtatcagtgccccc

SEQ ID NO: 229281 - DNA, 51 bp, Artificial
  Synthetic oligonucleotide
acaccagcccatacgcgcacatcgacaccagaccacccgcgattcccaacg

SEQ ID NO: 229282 - DNA, 51 bp, Artificial
  Synthetic oligonucleotide
atcctgaacatccttgagaaaccgctgccgatcacctctcccggcgccaat

SEQ ID NO: 229283 - DNA, 51 bp, Artificial
  Synthetic oligonucleotide
atccgcttgcgccatctggtccccaactgcaaccttacggtgcatgccaga

SEQ ID NO: 229284 - DNA, 51 bp, Artificial
  Synthetic oligonucleotide
ggaattgccgacccaaagcaggtgccccatgatcgaattcagtccctggcc

SEQ ID NO: 229285 - DNA, 51 bp, Artificial
  Synthetic oligonucleotide
ggaagtttgcgaacgccatgtgactacaacggcggccccttgcagagcgat

SEQ ID NO: 229286 - DNA, 51 bp, Artificial
  Synthetic oligonucleotide
gcttcggtgccttggtccgaggtgagttggattgcgatagttacgatcccc

SEQ ID NO: 229287 - DNA, 51 bp, Artificial
  Synthetic oligonucleotide
gcttagcctcacagtcccacgctcgcagcttgcgaaactgcagatccacct

SEQ ID NO: 229288 - DNA, 51 bp, Artificial
  Synthetic oligonucleotide
gcttacagacgatgctcgattgcacagcgccatgctaagatttcgcgggaa

SEQ ID NO: 229289 - DNA, 57 bp, Artificial
  Synthetic oligonucleotide
cagagaacgagtattgtttcggacctcaactttgaacttatggaggcgcggactgac

SEQ ID NO: 229290 - DNA, 51 bp, Artificial
  Synthetic oligonucleotide
atccacacgtgaccgcgctttgcggttgtctgacgcgttgttcggtttggg

SEQ ID NO: 229291 - DNA, 51 bp, Artificial
  Synthetic oligonucleotide
ggttgctgcggggtcgctgtctgcctaacgcgtgacatggcgcggggttca

SEQ ID NO: 229292 - DNA, 51 bp, Artificial
  Synthetic oligonucleotide
ggttacgtgcagccccggaaagccggacaggtaactttccttcaaagcccg

SEQ ID NO: 229293 - DNA, 51 bp, Artificial
  Synthetic oligonucleotide
ggttacgcccggatttggattggcgcaatggccaaagtgttactgttacaa

SEQ ID NO: 229294 - DNA, 51 bp, Artificial
  Synthetic oligonucleotide
ggtgggcgttaagcgctaatcgaaccgtgtagggatgaccgctttatccga

SEQ ID NO: 229295 - DNA, 51 bp, Artificial
  Synthetic oligonucleotide
ggtgcggcgggcatctgcctgcgatggagcggtgttacccgtcatacgact

SEQ ID NO: 229296 - DNA, 51 bp, Artificial
  Synthetic oligonucleotide
aatccgcgttcacgcgcaggatcactacgtggaaatcgtgacaaccgccgg

SEQ ID NO: 229297 - DNA, 51 bp, Artificial
  Synthetic oligonucleotide
ggggtggaaccccaccgtgcatctgtggtcgcaatcgcggagcagcctgaa

SEQ ID NO: 229298 - DNA, 51 bp, Artificial
  Synthetic oligonucleotide
ggggtacagcgttgctgggaggcgacctgaggtcacgaacgtctgctcttg

SEQ ID NO: 229299 - DNA, 51 bp, Artificial
  Synthetic oligonucleotide
ggggctttgtcaccgtttcgccccaagaacgtgtcttcgtgtcacctgaac

SEQ ID NO: 229300 - DNA, 60 bp, Artificial
  Synthetic oligonucleotide
attggggggcgctcatcagcagatcagggacgtcattcataaccggtcttctgcgagcga

SEQ ID NO: 229301 - DNA, 60 bp, Artificial
  Synthetic oligonucleotide
tcattcgtgccgtccggcacccgaacaggcggaagcctgtggatcatcgtcttgttctaa

SEQ ID NO: 229302 - DNA, 57 bp, Artificial
  Synthetic oligonucleotide
gaagtgcctcgggatgtaggtcacctagaaaacccaaggatccgcctgtctgaggac

SEQ ID NO: 229303 - DNA, 51 bp, Artificial
  Synthetic oligonucleotide
atgagatcatcccgcgcgtaaatacggtaggggtggcacgggtggctgaca

SEQ ID NO: 229304 - DNA, 51 bp, Artificial
  Synthetic oligonucleotide
ggggcatcagatcatctgcgctgtcccgtcagcaccgcttttgtccgtata

SEQ ID NO: 229305 - DNA, 51 bp, Artificial
  Synthetic oligonucleotide
cctaagtttccggcacccacccacccttgctggtctgccctgccgataagc

SEQ ID NO: 229306 - DNA, 51 bp, Artificial
  Synthetic oligonucleotide
cctacgaccgctaagataggagagccgatatgtcccgtacaaaaggtggtg

SEQ ID NO: 229307 - DNA, 51 bp, Artificial
  Synthetic oligonucleotide
atcttcatcgcggggcgccaagccaagaacgggcacatgccgaacatggta

SEQ ID NO: 229308 - DNA, 51 bp, Artificial
  Synthetic oligonucleotide
cctatctcgaacgaggcttggaaagatgaacgtaatccggagttcgtcgca

SEQ ID NO: 229309 - DNA, 51 bp, Artificial
  Synthetic oligonucleotide
ggctgcgtgagtggcgggggcgagacacccactgaagagcctgccgttgaa

SEQ ID NO: 229310 - DNA, 51 bp, Artificial
  Synthetic oligonucleotide
aattggcgtgccgcttgttaagcttcactggcccaatgctttatcgtagtt

SEQ ID NO: 229311 - DNA, 51 bp, Artificial
  Synthetic oligonucleotide
cctcttgggtatggttggacgcccgtagcagatcacttgccatctgaccta

SEQ ID NO: 229312 - DNA, 51 bp, Artificial
  Synthetic oligonucleotide
gcacttaactggccgatgtccgcttcgcgttccctagagtttgctgatcga

SEQ ID NO: 229313 - DNA, 60 bp, Artificial
  Synthetic oligonucleotide
gcattctcgatgttggaacgcatgagaatgcagttcgcgcacttcatctctacaccgcac

SEQ ID NO: 229314 - DNA, 51 bp, Artificial
  Synthetic oligonucleotide
acgcctcggccccctaatacgtgacaggtccaacctacgccgcttaccgcg

SEQ ID NO: 229315 - DNA, 51 bp, Artificial
  Synthetic oligonucleotide
gcaccttgcgtaacccggatctccgggcccggcgcgataccatcgaacccc

SEQ ID NO: 229316 - DNA, 51 bp, Artificial
  Synthetic oligonucleotide
acgcctttcacgactgcgtcaagtcattctagcgagaggtgaccgcactaa

SEQ ID NO: 229317 - DNA, 51 bp, Artificial
  Synthetic oligonucleotide
acgcgaagatgcgtttgatttcagggctttcgtcgaaggctgcgagtgcgt

SEQ ID NO: 229318 - DNA, 51 bp, Artificial
  Synthetic oligonucleotide
gcaatgaaacgcgaaagccccttctgagcatttctaaggtctaaattgttt

SEQ ID NO: 229319 - DNA, 51 bp, Artificial
  Synthetic oligonucleotide
gattgaacctgagttatctactacgaaccgcaccaccgatccgtgctcgat

SEQ ID NO: 229320 - DNA, 51 bp, Artificial
  Synthetic oligonucleotide
cgcgatctgcagggttcgccattgttcgggacgggttccctccgtactctg

SEQ ID NO: 229321 - DNA, 51 bp, Artificial
  Synthetic oligonucleotide
gatccgcgttgattacgcgccgtggtattgcgcacttggccctataccgca

SEQ ID NO: 229322 - DNA, 51 bp, Artificial
  Synthetic oligonucleotide
gatccctactggcggttgaccaaccctgcgatggcccggttctaccggctt

SEQ ID NO: 229323 - DNA, 51 bp, Artificial
  Synthetic oligonucleotide
aggtgccggtccgagacatcaaagggggtcagcgcctcccacaaagcgtcc

SEQ ID NO: 229324 - DNA, 57 bp, Artificial
  Synthetic oligonucleotide
acgacaaagtgcccagaacggtggtcccgttaagcaatgtcactgtgttggagccgc

SEQ ID NO: 229325 - DNA, 51 bp, Artificial
  Synthetic oligonucleotide
acggcgtggacccacgccattcacgaaaggaatgcctgatggcagaacgtg

SEQ ID NO: 229326 - DNA, 51 bp, Artificial
  Synthetic oligonucleotide
gagttgcggcagtgaccggcagctttaataacgctcaggcacgtggccctg

SEQ ID NO: 229327 - DNA, 51 bp, Artificial
  Synthetic oligonucleotide
gagtcatgagctttctcgctgaaattttcgcaagcttatcgtcagcggtct

SEQ ID NO: 229328 - DNA, 51 bp, Artificial
  Synthetic oligonucleotide
gagcgttaaggcggatgcttctgttcggtagctccgctgcggcggaactgc

SEQ ID NO: 229329 - DNA, 51 bp, Artificial
  Synthetic oligonucleotide
gagcggccgtagggatcggggatccccgtgttccccgtccagcggtcaaag

SEQ ID NO: 229330 - DNA, 51 bp, Artificial
  Synthetic oligonucleotide
cgctcggattacgttcgagcacattgtcagagaccccctcggacggcggga

SEQ ID NO: 229331 - DNA, 51 bp, Artificial
  Synthetic oligonucleotide
gacttcacaagctgggcatacatggcaaacttctccctgggtcaaacgcgt

SEQ ID NO: 229332 - DNA, 51 bp, Artificial
  Synthetic oligonucleotide
gactgtcatgaacagcccaacctatgacccttctgttccgatggacgcggc

SEQ ID NO: 229333 - DNA, 51 bp, Artificial
  Synthetic oligonucleotide
gactgacgttaggctgcggttggcttgcttcttgtcgctacgcgccgtgtt

SEQ ID NO: 229334 - DNA, 51 bp, Artificial
  Synthetic oligonucleotide
cgcttgccgtatggttcatcgtatagccgccgccctcagtcgggacgcgct

SEQ ID NO: 229335 - DNA, 57 bp, Artificial
  Synthetic oligonucleotide
agagatcgaagcaagggtacgctcctcattcgggaagtctggccccgataaggtggc

SEQ ID NO: 229336 - DNA, 51 bp, Artificial
  Synthetic oligonucleotide
gcgttggatggaatgcgccagccgttgaccgatcgttctggcacgaaccta

SEQ ID NO: 229337 - DNA, 51 bp, Artificial
  Synthetic oligonucleotide
cgactcggatttatagagcaaatgatcaacagggatgagcaagtgatcact

SEQ ID NO: 229338 - DNA, 51 bp, Artificial
  Synthetic oligonucleotide
accacgcgacatcccaaaggtcgcaaatgcgaagtgccgaaaattcagcag

SEQ ID NO: 229339 - DNA, 51 bp, Artificial
  Synthetic oligonucleotide
ataggaaaatggtatctcctgagagttacataaccggcaggtaatggatca

SEQ ID NO: 229340 - DNA, 51 bp, Artificial
  Synthetic oligonucleotide
gcgggactaacgagttgcgtgaacagcaaagctaggcgcaccttggggcgt

SEQ ID NO: 229341 - DNA, 51 bp, Artificial
  Synthetic oligonucleotide
gcggcgatactggcatttgcgggcagtttgccatgcggggcgcgtaggttt

SEQ ID NO: 229342 - DNA, 51 bp, Artificial
  Synthetic oligonucleotide
acccctggctccattatatcacgacggggtggcgggaaatgcggcccccgc

SEQ ID NO: 229343 - DNA, 51 bp, Artificial
  Synthetic oligonucleotide
gcgcgaataggagccccgcccgagacgcattacacgctgccctcggatttt

SEQ ID NO: 229344 - DNA, 51 bp, Artificial
  Synthetic oligonucleotide
ataccgcaggacttgccagccagacagccgagcgaccagatctgcggatca

SEQ ID NO: 229345 - DNA, 51 bp, Artificial
  Synthetic oligonucleotide
gcgagctttacgaccgcgatggatgttcatgcgcgtggagggggatgccgc

SEQ ID NO: 229346 - DNA, 59 bp, Artificial
  Synthetic oligonucleotide
agagaggcggggactgtcggcagaggcgctcattcttcaggaattttgcgcgttaaaca

SEQ ID NO: 229347 - DNA, 51 bp, Artificial
  Synthetic oligonucleotide
gcgaccagcatgtcatgcaactcagacaaagggagaagtgcgttggccgcg

SEQ ID NO: 229348 - DNA, 51 bp, Artificial
  Synthetic oligonucleotide
gccgtttgaccgctgttggattaaaccggcgccctaacaacaggggacgtt

SEQ ID NO: 229349 - DNA, 51 bp, Artificial
  Synthetic oligonucleotide
agtgccttcccaatgcgtgaagcccctcggcctgagacaacgaatggggtg

SEQ ID NO: 229350 - DNA, 51 bp, Artificial
  Synthetic oligonucleotide
cgcatatcatggtgggcgcatgtccagtcgagtgcacccgggttgcgttgc

SEQ ID NO: 229351 - DNA, 51 bp, Artificial
  Synthetic oligonucleotide
gccagctccccaatacggaaccctgaggttggcctgagagaaagtcggcgg

SEQ ID NO: 229352 - DNA, 51 bp, Artificial
  Synthetic oligonucleotide
cgccagtgaaacggcaaccgtgttcctgtcgcctcaggtccggtgggatta

SEQ ID NO: 229353 - DNA, 51 bp, Artificial
  Synthetic oligonucleotide
agtcgagtgcacccgggttgcgttgctccaccgattagctggaaaaaccga

SEQ ID NO: 229354 - DNA, 51 bp, Artificial
  Synthetic oligonucleotide
agtcccctaccgggaacggttcgggtatcttgcgcggcggacacattgatc

SEQ ID NO: 229355 - DNA, 51 bp, Artificial
  Synthetic oligonucleotide
gcaggcaaatgccctgacattacaccgccggcctgcgattttgggccaata

SEQ ID NO: 229356 - DNA, 51 bp, Artificial
  Synthetic oligonucleotide
gcagcgtctaatcaattgaaggctcagatcgaaccctgaactcagaacgga

SEQ ID NO: 229357 - DNA, 60 bp, Artificial
  Synthetic oligonucleotide
ccactctcaggcatgacagacctcgatgcagggcttcggggcagggcttcgggacagtag

SEQ ID NO: 229358 - DNA, 51 bp, Artificial
  Synthetic oligonucleotide
acgcccggaaagaagaaggtagacccgacactgaacacataaccggtgcca

SEQ ID NO: 229359 - DNA, 51 bp, Artificial
  Synthetic oligonucleotide
cacgtattccaatgggacgttacggtttcgcctcggaggtgtcttctctca

SEQ ID NO: 229360 - DNA, 51 bp, Artificial
  Synthetic oligonucleotide
tgtttcacctgtcggttgctgcggggtcgctgtctgcctaacgcgtgacat

SEQ ID NO: 229361 - DNA, 51 bp, Artificial
  Synthetic oligonucleotide
tgttccaatcacatctagagagccgcgttgacatgcccagcttgaacgaca

SEQ ID NO: 229362 - DNA, 51 bp, Artificial
  Synthetic oligonucleotide
tgtgccattttccgggcggttcagataatcatagtaaacgttgaagcggaa

SEQ ID NO: 229363 - DNA, 51 bp, Artificial
  Synthetic oligonucleotide
tgtcatggccgtctcccgcgcttctgtcccacccttatgccaagcgcgcgc

SEQ ID NO: 229364 - DNA, 51 bp, Artificial
  Synthetic oligonucleotide
tgtaggggcggtttggaccttcaaataaggccccgcgcgtctaaatgcaat

SEQ ID NO: 229365 - DNA, 51 bp, Artificial
  Synthetic oligonucleotide
tgtaagtcaggctccgcaaggtgacttgatctctgagccatctttactggt

SEQ ID NO: 229366 - DNA, 51 bp, Artificial
  Synthetic oligonucleotide
tggtccgagaactacgccggaaccctctacaagttcaccgatacccgcgag

SEQ ID NO: 229367 - DNA, 51 bp, Artificial
  Synthetic oligonucleotide
cacgggatgtgcgctgaaggccaaatgctgccccaactcggaggtccgtgc

SEQ ID NO: 229368 - DNA, 53 bp, Artificial
  Synthetic oligonucleotide
aaaggccttcttactagggcagggggctcgcctttatccttccgcaaggatcc

SEQ ID NO: 229369 - DNA, 51 bp, Artificial
  Synthetic oligonucleotide
aaaggcgaaccttatgctttggtccctcattaaaatagtggcgtttgtttt

SEQ ID NO: 229370 - DNA, 51 bp, Artificial
  Synthetic oligonucleotide
tggcccacaatcccttctaggtcaacattccacatgatcagttgcaaggca

SEQ ID NO: 229371 - DNA, 51 bp, Artificial
  Synthetic oligonucleotide
tggcataccggggtatcgcttcgccggccgcagacatgaaatcgcatcccc

SEQ ID NO: 229372 - DNA, 51 bp, Artificial
  Synthetic oligonucleotide
tggcagtcgggcgcaggatagggccgacgccaaggaaggttaagggttttt

SEQ ID NO: 229373 - DNA, 51 bp, Artificial
  Synthetic oligonucleotide
cacggcccacggcctcggaaacacgttcgggcgacagggctccggccagtt

SEQ ID NO: 229374 - DNA, 51 bp, Artificial
  Synthetic oligonucleotide
aaaggtaaccctctgtcgcagaggcaaggcctggttacatcgcgatacaaa

SEQ ID NO: 229375 - DNA, 51 bp, Artificial
  Synthetic oligonucleotide
tggacccgaacagacctgacgcaccccctttctgatggtgcgctgtgccta

SEQ ID NO: 229376 - DNA, 51 bp, Artificial
  Synthetic oligonucleotide
ccagccatccaaccgcgcgatctttgaagcgttccgcgctgtcttcaatgt

SEQ ID NO: 229377 - DNA, 51 bp, Artificial
  Synthetic oligonucleotide
tgctctgacggacaacttctggcgaccagtcttgcgttttgggcggctcca

SEQ ID NO: 229378 - DNA, 51 bp, Artificial
  Synthetic oligonucleotide
aaagtagcgccagaagtattctttgacaccatcacagtcgatgtcggcccc

SEQ ID NO: 229379 - DNA, 60 bp, Artificial
  Synthetic oligonucleotide
gcatagcctatccggaatatttccctccaggcacgctgctaggcccgttcatccgaacat

SEQ ID NO: 229380 - DNA, 51 bp, Artificial
  Synthetic oligonucleotide
tgcgggctgcagcatcacctgtccgtcgtgaagagccccgaggggtagtgg

SEQ ID NO: 229381 - DNA, 51 bp, Artificial
  Synthetic oligonucleotide
tgccgagtggagggcatctggagctttgctggacgccgcaaaacgcccgat

SEQ ID NO: 229382 - DNA, 51 bp, Artificial
  Synthetic oligonucleotide
tgccctgacattacaccgccggcctgcgattttgggccaataacccgtctg

SEQ ID NO: 229383 - DNA, 51 bp, Artificial
  Synthetic oligonucleotide
tgccagaccatgttttcttggggctgacagcgggccagaattttggtcccc

SEQ ID NO: 229384 - DNA, 51 bp, Artificial
  Synthetic oligonucleotide
caccgtggcccgtgagtggctggtggccctccctgacgctctggatgctac

SEQ ID NO: 229385 - DNA, 51 bp, Artificial
  Synthetic oligonucleotide
caccgagacatcccctgagcagctcaaagagatctacagcgtttcccgact

SEQ ID NO: 229386 - DNA, 51 bp, Artificial
  Synthetic oligonucleotide
cagggggcagttgcggataggggcggaacgctgcgctaacgaaattcaggg

SEQ ID NO: 229387 - DNA, 51 bp, Artificial
  Synthetic oligonucleotide
ttttcagggatgatattccgttaagacccaacagcaaagcgtgttttcggt

SEQ ID NO: 229388 - DNA, 51 bp, Artificial
  Synthetic oligonucleotide
cagggcgctcccaccctgcagcggcaatcaggaagtggcagttggtgcgtc

SEQ ID NO: 229389 - DNA, 51 bp, Artificial
  Synthetic oligonucleotide
cagttgttgatgcgccaccagtgacgcttacatcaccttgggtcaaagtag

SEQ ID NO: 229390 - DNA, 56 bp, Artificial
  Synthetic oligonucleotide
tgggcggggcataggcgacacgcgactgcgaaaacgccgtgttaacgggcacctcg

SEQ ID NO: 229391 - DNA, 51 bp, Artificial
  Synthetic oligonucleotide
catacaaaggatttcggccatgaatttggcgaagccacgcattttgcgtgc

SEQ ID NO: 229392 - DNA, 51 bp, Artificial
  Synthetic oligonucleotide
catcagttccttatccaaagaaatggtcacaaagtctctcaaaactatctc

SEQ ID NO: 229393 - DNA, 51 bp, Artificial
  Synthetic oligonucleotide
ttgtgccaaacagttcagcctgaccggcctatcggggatgcagtgggcaaa

SEQ ID NO: 229394 - DNA, 51 bp, Artificial
  Synthetic oligonucleotide
cagcgcgcaacgtaagcatccagcataggccgcggtcatgtagcgagttgg

SEQ ID NO: 229395 - DNA, 51 bp, Artificial
  Synthetic oligonucleotide
cagcgaggtatggttatgaatgcggcaacgcgtccgggggttcaagggccg

SEQ ID NO: 229396 - DNA, 51 bp, Artificial
  Synthetic oligonucleotide
ttgctaaaatggtcgccagagaggtgccaacggcaacatgcatcaaaacgc

SEQ ID NO: 229397 - DNA, 51 bp, Artificial
  Synthetic oligonucleotide
ttgccggactgggacctctcgcccttgaatctgatgctttactatccgcca

SEQ ID NO: 229398 - DNA, 51 bp, Artificial
  Synthetic oligonucleotide
ttgacatcaccataaatcgtcgccccaacggtcaggatgagcatggcaaca

SEQ ID NO: 229399 - DNA, 51 bp, Artificial
  Synthetic oligonucleotide
aaacccttcggttgtgatcggatccgccatttcttcaagagcacgatcagg

SEQ ID NO: 229400 - DNA, 51 bp, Artificial
  Synthetic oligonucleotide
cagagcgcatacgcgaaaaccaaaggatgcactgatggctaccgcccggac

SEQ ID NO: 229401 - DNA, 57 bp, Artificial
  Synthetic oligonucleotide
tgggggtaggggggtcttgcctgtggggggcatgctgtcctcggttatgtgcgcgag

SEQ ID NO: 229402 - DNA, 51 bp, Artificial
  Synthetic oligonucleotide
cattctgctccatggcgggacgatctcccatgggcatttagatgacgttac

SEQ ID NO: 229403 - DNA, 51 bp, Artificial
  Synthetic oligonucleotide
ccaaactgtgatacatgcggcgctggcctctggtggactcggcaaacgtgt

SEQ ID NO: 229404 - DNA, 51 bp, Artificial
  Synthetic oligonucleotide
ccaacccaatcgacgcccagcctgtcgcgtaccctgcgccgcgtgagtttc

SEQ ID NO: 229405 - DNA, 51 bp, Artificial
  Synthetic oligonucleotide
ttcaacccggcccacttcgcaaccgagggccgtatcggcaatacggtcacg

SEQ ID NO: 229406 - DNA, 51 bp, Artificial
  Synthetic oligonucleotide
ccaatacttgtctgacggccctatgaagtcgtggcatagaggggactttca

SEQ ID NO: 229407 - DNA, 51 bp, Artificial
  Synthetic oligonucleotide
ttagacagatacccgccacgcacacgcaacggcagggtttaagcgtcgcaa

SEQ ID NO: 229408 - DNA, 51 bp, Artificial
  Synthetic oligonucleotide
tagacctcgagccaacccaacctgctaagcgcccaagccgaatttgggtcg

SEQ ID NO: 229409 - DNA, 51 bp, Artificial
  Synthetic oligonucleotide
cccttgcccacacaaacgcgcagcgtttgtataagtgggcacttcgtgttt

SEQ ID NO: 229410 - DNA, 51 bp, Artificial
  Synthetic oligonucleotide
tacaatcctgtttttcatctgcgggtgctcctgtcggcctcagaactgcat

SEQ ID NO: 229411 - DNA, 51 bp, Artificial
  Synthetic oligonucleotide
taaggcgggcgggcgtatggccgaacccattcggcacgaaatccgcctctc

SEQ ID NO: 229412 - DNA, 60 bp, Artificial
  Synthetic oligonucleotide
tcattgccagcgcaacgacagagagtgcgaaactacctgaaaacgcgatctggcccacaa

SEQ ID NO: 229413 - DNA, 60 bp, Artificial
  Synthetic oligonucleotide
tggtagctgcagtttttgcattggggttcttctggggggttccgacgcactgcgtgcagc

SEQ ID NO: 229414 - DNA, 51 bp, Artificial
  Synthetic oligonucleotide
attgtcgctgtcgcgtgccaaccgttctgttcggttgtgggctcatgtggt

SEQ ID NO: 229415 - DNA, 51 bp, Artificial
  Synthetic oligonucleotide
taacctacgagcaaatacacgactatgcgggtatccccgaaggaaggataa

SEQ ID NO: 229416 - DNA, 51 bp, Artificial
  Synthetic oligonucleotide
attgctgtgaatccaaaacggttttctgcagcccgtgcagatatcggcgta

SEQ ID NO: 229417 - DNA, 51 bp, Artificial
  Synthetic oligonucleotide
ccgatcattcatcccgagatagagacgcacacgctcctcgaagaacccttc

SEQ ID NO: 229418 - DNA, 51 bp, Artificial
  Synthetic oligonucleotide
gttggaggctcaggcctggatgaccggaacagggccggaattgttcgcgga

SEQ ID NO: 229419 - DNA, 51 bp, Artificial
  Synthetic oligonucleotide
gttatctatcacagaagcccgcgagacgtccgtaaacatttaccaacttgt

SEQ ID NO: 229420 - DNA, 51 bp, Artificial
  Synthetic oligonucleotide
attcgacagcgcaggtactcccgtcacgttcacgcagggtgggacaactgc

SEQ ID NO: 229421 - DNA, 51 bp, Artificial
  Synthetic oligonucleotide
atgtgccctcaaccgttggtccgggcagttcgatgaaaagatcgaaacaac

SEQ ID NO: 229422 - DNA, 51 bp, Artificial
  Synthetic oligonucleotide
gtgatttcgctaagcttcgcacggcttcttctaagtcaggcggccccatgt

SEQ ID NO: 229423 - DNA, 51 bp, Artificial
  Synthetic oligonucleotide
gtctccgctacaatatctttgagggctgccgagccgacaagatccatcacg

SEQ ID NO: 229424 - DNA, 58 bp, Artificial
  Synthetic oligonucleotide
tggtcgaccaaacgaggtggtagtagacgcaatgcctccccatggaatacgaacatag

SEQ ID NO: 229425 - DNA, 51 bp, Artificial
  Synthetic oligonucleotide
gtccggaacgaattccggacctactttgcggacgtcgaaggcttcctgaac

SEQ ID NO: 229426 - DNA, 51 bp, Artificial
  Synthetic oligonucleotide
gtcaggacgctttgttgcaaaccctgtcctgtgctttggatcagacatgtc

SEQ ID NO: 229427 - DNA, 51 bp, Artificial
  Synthetic oligonucleotide
atggagatacggaatcctctcagggacagtatgtgactccctgtctcattt

SEQ ID NO: 229428 - DNA, 51 bp, Artificial
  Synthetic oligonucleotide
gtatggattgggtgttcatagacacgcccggcaagatggacagtgcctcga

SEQ ID NO: 229429 - DNA, 51 bp, Artificial
  Synthetic oligonucleotide
ccgggcaccaagcaagacattccctcgctcgttgaaagtgcgcgacgcgaa

SEQ ID NO: 229430 - DNA, 51 bp, Artificial
  Synthetic oligonucleotide
gtacgggcaccgggcgcgggacacaggaatatcttcagcgggtttacggcc

SEQ ID NO: 229431 - DNA, 51 bp, Artificial
  Synthetic oligonucleotide
gtaatcataacgcaccatcgcatctgcccaggcaaagcccagttttgcgca

SEQ ID NO: 229432 - DNA, 51 bp, Artificial
  Synthetic oligonucleotide
tgatcggacctgcgggacaatcgaccggcaggttaaaacctgcgggacaat

SEQ ID NO: 229433 - DNA, 51 bp, Artificial
  Synthetic oligonucleotide
tgagacgttgccccgggatgcatgacgacgatttgcgatttcgttgcctgt

SEQ ID NO: 229434 - DNA, 51 bp, Artificial
  Synthetic oligonucleotide
cccaagagggttcggttgtcaaaggtaaggtcattgctattgaagctggcc

SEQ ID NO: 229435 - DNA, 60 bp, Artificial
  Synthetic oligonucleotide
gcatagcagcgaaagccccttgccccatgatgatcggatatgcccgtgtctcgaccgagg

SEQ ID NO: 229436 - DNA, 51 bp, Artificial
  Synthetic oligonucleotide
cccacggctcccctttcggttcagatcgtcttctctcacgcgctagtcatg

SEQ ID NO: 229437 - DNA, 51 bp, Artificial
  Synthetic oligonucleotide
cacagctcgcgccgcaatagatgctggttgggccgtggcacatccgtgggc

SEQ ID NO: 229438 - DNA, 51 bp, Artificial
  Synthetic oligonucleotide
cacacattcgctgaatgcgttggaagtgatcaggcgacctcactgggtttg

SEQ ID NO: 229439 - DNA, 51 bp, Artificial
  Synthetic oligonucleotide
ccccaggaaagtggtcctcccttaggtagactttcggacccgatggaggac

SEQ ID NO: 229440 - DNA, 51 bp, Artificial
  Synthetic oligonucleotide
ccccatcgctttcggagacacgcccgcagttgccagaagtttatgtccgaa

SEQ ID NO: 229441 - DNA, 51 bp, Artificial
  Synthetic oligonucleotide
tcgtctcgcaaagcttgggtcaattcagcgattggcgttcctgacgtctcg

SEQ ID NO: 229442 - DNA, 51 bp, Artificial
  Synthetic oligonucleotide
aacccgcgaatccaatctcgctgcggcgttacaactcttgggcgacgccac

SEQ ID NO: 229443 - DNA, 51 bp, Artificial
  Synthetic oligonucleotide
caagcgccagaaggcatgcccgatttgagagaccatttcgggattcacgaa

SEQ ID NO: 229444 - DNA, 51 bp, Artificial
  Synthetic oligonucleotide
tcctctttcggtggtgtaccaccgcgattcattcgccatttcacgctggcg

SEQ ID NO: 229445 - DNA, 51 bp, Artificial
  Synthetic oligonucleotide
tccggggatccgggccctctaattcaactcagcccgatgggctcagcgggc

SEQ ID NO: 229446 - DNA, 49 bp, Artificial
  Synthetic oligonucleotide
gcataaaccggtattttggttccgaaagggtcaaactttggttccgaaa

SEQ ID NO: 229447 - DNA, 51 bp, Artificial
  Synthetic oligonucleotide
tccgcaggtagcgtgtgttgggatcggagttcgcgcggtgtgcaactacga

SEQ ID NO: 229448 - DNA, 51 bp, Artificial
  Synthetic oligonucleotide
tccgacagacaatccgcaccgctaactttcgcgcgccaaacatgctgcagt

SEQ ID NO: 229449 - DNA, 51 bp, Artificial
  Synthetic oligonucleotide
cccgaactcagcgcgccattccaggccgagatgctctctgtctggttgacg

SEQ ID NO: 229450 - DNA, 51 bp, Artificial
  Synthetic oligonucleotide
aacgagttgcgtgaacagcaaagctaggcgcaccttggggcgtgaacatgc

SEQ ID NO: 229451 - DNA, 51 bp, Artificial
  Synthetic oligonucleotide
caacgagcgcttggccccatccatggtttcagcgtggctacgggtcagttg

SEQ ID NO: 229452 - DNA, 51 bp, Artificial
  Synthetic oligonucleotide
tattccaaaacgactgccggcgagagggcaaacgggatttcaccccgcagc

SEQ ID NO: 229453 - DNA, 51 bp, Artificial
  Synthetic oligonucleotide
tattaccgggtggcaaaggacagggaagggatccgatgacacgagttttat

SEQ ID NO: 229454 - DNA, 51 bp, Artificial
  Synthetic oligonucleotide
tagtgtggagccgacaaccgatttcggcctttcggtcgatcttctggggtt

SEQ ID NO: 229455 - DNA, 51 bp, Artificial
  Synthetic oligonucleotide
ctcccgccgagccagtctggttgtttacacgccattcgagcatcgcagaga

SEQ ID NO: 229456 - DNA, 51 bp, Artificial
  Synthetic oligonucleotide
aggctcggagccttcaccttgccacgcatctcacgcagcacttgagcgcgg

SEQ ID NO: 229457 - DNA, 59 bp, Artificial
  Synthetic oligonucleotide
gcagtcaagattcgtgttatcagttaccgaaagcaggatttcagttaccaagattcgtg

SEQ ID NO: 229458 - DNA, 51 bp, Artificial
  Synthetic oligonucleotide
cggttgaccaaccctgcgatggcccggttctaccggcttgatccctctgag

SEQ ID NO: 229459 - DNA, 51 bp, Artificial
  Synthetic oligonucleotide
ctcaatgagtctgcagccttgggtccagctacggagacggtattatctgcc

SEQ ID NO: 229460 - DNA, 51 bp, Artificial
  Synthetic oligonucleotide
agcgatctgttgtgcacggcacaggtccctacccttgggtaaccgatggta

SEQ ID NO: 229461 - DNA, 51 bp, Artificial
  Synthetic oligonucleotide
agaactgacggtgcctgatggcccggttggttactacgccacagttcccct

SEQ ID NO: 229462 - DNA, 51 bp, Artificial
  Synthetic oligonucleotide
cgtacctctcggttagagaagtattcacgtaattcttcacattgcgcggcg

SEQ ID NO: 229463 - DNA, 51 bp, Artificial
  Synthetic oligonucleotide
agcgcattcaaccgcactgcacccaccttgtgatctacgtggctggccccc

SEQ ID NO: 229464 - DNA, 51 bp, Artificial
  Synthetic oligonucleotide
cggagcactgaatgccaatcagggggcagttgcggataggggcggaacgct

SEQ ID NO: 229465 - DNA, 51 bp, Artificial
  Synthetic oligonucleotide
ctaaccgctgcaagcccgtaccctctgggcgacccacacaacgtgctcctc

SEQ ID NO: 229466 - DNA, 51 bp, Artificial
  Synthetic oligonucleotide
cgttgagaatggccgagattgcacgcgggccaatcatcgacgccagttggt

SEQ ID NO: 229467 - DNA, 51 bp, Artificial
  Synthetic oligonucleotide
gacagacactaacatatgtgggcagtgagctttaaacgcttggattatgct

SEQ ID NO: 229468 - DNA, 59 bp, Artificial
  Synthetic oligonucleotide
gaaagagggcgctttgatacgcaagacagattggtgagccgtggagccgcggttacctg

SEQ ID NO: 229469 - DNA, 51 bp, Artificial
  Synthetic oligonucleotide
cggaccggattggtgaggcctatttcaggacgccgcgcaataccgtcacgg

SEQ ID NO: 229470 - DNA, 51 bp, Artificial
  Synthetic oligonucleotide
agcggatcgctgccttgggctatgaggcggtctattggtaccggctgggca

SEQ ID NO: 229471 - DNA, 51 bp, Artificial
  Synthetic oligonucleotide
cgtgttagctcagacggatgactgcgccgcgcctgataggagccgagatct

SEQ ID NO: 229472 - DNA, 51 bp, Artificial
  Synthetic oligonucleotide
agcggcgtcggggatacgagccgtgaagggtgaggcaagtccgctcaggtc

SEQ ID NO: 229473 - DNA, 51 bp, Artificial
  Synthetic oligonucleotide
agggcggcgttcgcttggcattcagcaaggacgaagttgagtcccacgcga

SEQ ID NO: 229474 - DNA, 51 bp, Artificial
  Synthetic oligonucleotide
gacccgggtgcgatacggcacgtcttattggatcggctagaggactacccc

SEQ ID NO: 229475 - DNA, 51 bp, Artificial
  Synthetic oligonucleotide
agatagcttgctgatactgcagacgattcgcatcagagttcatcacgaccg

SEQ ID NO: 229476 - DNA, 51 bp, Artificial
  Synthetic oligonucleotide
ctgtgtggtcccgggcagcacatgaacagcccccatggccgtcccaatcag

SEQ ID NO: 229477 - DNA, 51 bp, Artificial
  Synthetic oligonucleotide
agcaaagcagcgtccaacgacagatttgtaggcttccgtgtatgagagttc

SEQ ID NO: 229478 - DNA, 51 bp, Artificial
  Synthetic oligonucleotide
cttgacgataccattacgcttgcgcaactgacggcggatccctacccgctc

SEQ ID NO: 229479 - DNA, 54 bp, Artificial
  Synthetic oligonucleotide
gaaatcggtgtgtactccatgaaaacgttcacgaaggcaaaatttctagggccc

SEQ ID NO: 229480 - DNA, 51 bp, Artificial
  Synthetic oligonucleotide
cggtatggcagcgctgtatcggtcgtgaatgcgtatggagtcgcgagcgtg

SEQ ID NO: 229481 - DNA, 51 bp, Artificial
  Synthetic oligonucleotide
cggtccctctgatgagggtcgcggttccctgaacaagcgctcacgatgggc

SEQ ID NO: 229482 - DNA, 51 bp, Artificial
  Synthetic oligonucleotide
agagcacgagaacaggcgcgcgtctctttggcgccgccacagtcaacacac

SEQ ID NO: 229483 - DNA, 51 bp, Artificial
  Synthetic oligonucleotide
ctttcgcatattccctaactgctcaacggagcatccttcatgtttcgcttt

SEQ ID NO: 229484 - DNA, 51 bp, Artificial
  Synthetic oligonucleotide
ctgcaacgaaatcgacattcgtaatgttcttgacatggactgtaatgaata

SEQ ID NO: 229485 - DNA, 51 bp, Artificial
  Synthetic oligonucleotide
agccccgcatattctgcgcgacctatccgataattcagacgtgccgcgtgg

SEQ ID NO: 229486 - DNA, 51 bp, Artificial
  Synthetic oligonucleotide
gaaactctcaaggcgaagggttcgactactggtcggacagaatggacgtga

SEQ ID NO: 229487 - DNA, 51 bp, Artificial
  Synthetic oligonucleotide
agaccttccgaaccacttctattaatgccgccaagtagtaatccttaggcg

SEQ ID NO: 229488 - DNA, 51 bp, Artificial
  Synthetic oligonucleotide
cggcccatccagttgagctggcgcacgtactcagcaaacccttccgggtct

SEQ ID NO: 229489 - DNA, 51 bp, Artificial
  Synthetic oligonucleotide
gaaatgttctgtcggctccggagcccatgcggttaactgaacagcgtatga

SEQ ID NO: 229490 - DNA, 52 bp, Artificial
  Synthetic oligonucleotide
agacccaccgccccggcgggattggggcgggccgtctggaccctgatccacc

SEQ ID NO: 229491 - DNA, 51 bp, Artificial
  Synthetic oligonucleotide
agcccggcctgttcagcgttagctgtgaatctttgtttagcctgcgttgcc

SEQ ID NO: 229492 - DNA, 51 bp, Artificial
  Synthetic oligonucleotide
gaacagacggcaaggcacggtcgcaatccagattcgacgacggacacaacg

SEQ ID NO: 229493 - DNA, 51 bp, Artificial
  Synthetic oligonucleotide
actcggaccaacgccttcggatcaacggatatctcggggaggagatcttca

SEQ ID NO: 229494 - DNA, 51 bp, Artificial
  Synthetic oligonucleotide
agcgtttggcacgcagcaacggggtcaccgggcgcttgctgtcatgggaca

SEQ ID NO: 229495 - DNA, 50 bp, Artificial
  Synthetic oligonucleotide
aacggactttgccagcctccgcgagcgaagttctgaacgagatgcgcgaa

SEQ ID NO: 229496 - DNA, 50 bp, Artificial
  Synthetic oligonucleotide
aacggaggcgttggttggctaaccttcagggccgtctttaccagtgcggc

SEQ ID NO: 229497 - DNA, 50 bp, Artificial
  Synthetic oligonucleotide
aaaaccgaaactgccctggttcaaggcctcgcctctggcgcacgggatca

SEQ ID NO: 229498 - DNA, 50 bp, Artificial
  Synthetic oligonucleotide
aacggatgaccagttctcagcgcgcggaaacgatgtgtggctgacccgcg

SEQ ID NO: 229499 - DNA, 50 bp, Artificial
  Synthetic oligonucleotide
caaagggggaggcgttctgtcgacttggaacagctgaggagaacgggggc

SEQ ID NO: 229500 - DNA, 50 bp, Artificial
  Synthetic oligonucleotide
aacggcaatttgaccatctgggagttggtggtgtggcccgttggagcacc

SEQ ID NO: 229501 - DNA, 56 bp, Artificial
  Synthetic oligonucleotide
gaacggatgctctccgccgttcatgcccgggtgcggaaacgacttgtcgtccggaa

SEQ ID NO: 229502 - DNA, 50 bp, Artificial
  Synthetic oligonucleotide
caaaggaattgcgggattgccactccgcctccgtctcgcgggtgtggtta

SEQ ID NO: 229503 - DNA, 50 bp, Artificial
  Synthetic oligonucleotide
tagggatgttctggcagtatcggcgcattccgaccattggtggctgcgta

SEQ ID NO: 229504 - DNA, 50 bp, Artificial
  Synthetic oligonucleotide
aaaacccgcgtggctctcgctcaggctgtcttcggacgccgcatgataga

SEQ ID NO: 229505 - DNA, 50 bp, Artificial
  Synthetic oligonucleotide
cagggccggaattcaggtcacggcgggttagtcggaatcgccacccccgt

SEQ ID NO: 229506 - DNA, 50 bp, Artificial
  Synthetic oligonucleotide
aacggctcgcgagatccacggagatggtccggttagggttggtgcccacc

SEQ ID NO: 229507 - DNA, 50 bp, Artificial
  Synthetic oligonucleotide
aacggcacggtaacccgcctgcccgatgcttggcctgccaatgcgagacc

SEQ ID NO: 229508 - DNA, 50 bp, Artificial
  Synthetic oligonucleotide
aacggccgcacccctgaacaggaaccgcgtgtctttcatggacgatcaga

SEQ ID NO: 229509 - DNA, 50 bp, Artificial
  Synthetic oligonucleotide
aacggcgggggacactggcgcgttttccttacgtcgcgagattaccgtgt

SEQ ID NO: 229510 - DNA, 50 bp, Artificial
  Synthetic oligonucleotide
aacggcgtcaacccgctttgcttcaatcagaccgcgcttctgggctgcga

SEQ ID NO: 229511 - DNA, 50 bp, Artificial
  Synthetic oligonucleotide
aggaacggggcaatcaccgatggctgagaacacggcacgcactttgctga

SEQ ID NO: 229512 - DNA, 60 bp, Artificial
  Synthetic oligonucleotide
aaagccatagagcggtttgcgtgggtttgccacacgcaaggagtgccagagcgcgagacg

SEQ ID NO: 229513 - DNA, 50 bp, Artificial
  Synthetic oligonucleotide
aaaacctcatgaccacccagagttggaccccttgcggcctgtgggccgtt

SEQ ID NO: 229514 - DNA, 50 bp, Artificial
  Synthetic oligonucleotide
aacgctcgcaaggcttgaaccccgcactttgagccgactgacagctccgc

SEQ ID NO: 229515 - DNA, 50 bp, Artificial
  Synthetic oligonucleotide
cggtcgatggatgcttgaggcaacccgcgatcactttgcgccggattggg

SEQ ID NO: 229516 - DNA, 50 bp, Artificial
  Synthetic oligonucleotide
aacgctcggggcctctcgcggggtcgttctgacgagttttgccatacgcg

SEQ ID NO: 229517 - DNA, 50 bp, Artificial
  Synthetic oligonucleotide
aacgctgccgcttgcttgctgggccgcgcattggtccgagatgtgccaac

SEQ ID NO: 229518 - DNA, 50 bp, Artificial
  Synthetic oligonucleotide
aacgctggatcaaaggtcctcgggacccccggtgtgtaaacgggcgcttt

SEQ ID NO: 229519 - DNA, 50 bp, Artificial
  Synthetic oligonucleotide
tatgcccgagatgcggacacagcccgtttggctacgcttgcgccatgggc

SEQ ID NO: 229520 - DNA, 50 bp, Artificial
  Synthetic oligonucleotide
aacgctgggaggcttcgatgaacgatacactgcgcggctgcctgtggatg

SEQ ID NO: 229521 - DNA, 50 bp, Artificial
  Synthetic oligonucleotide
aacgctgttcatgttgctatggcgcccccgtcccgcctgacactttgcgc

SEQ ID NO: 229522 - DNA, 50 bp, Artificial
  Synthetic oligonucleotide
tatgaaagcgcggcgaccgtttcacaacgctatcgtgggggcaatcgtgc

SEQ ID NO: 229523 - DNA, 56 bp, Artificial
  Synthetic oligonucleotide
cgggtcggaacagcataggcgaaggaggcaatcggggacgtatctccattcgaaaa

SEQ ID NO: 229524 - DNA, 60 bp, Artificial
  Synthetic oligonucleotide
cactctgatccagcgccgtgcggggatctgtcccgcacggccccctcaacgcctgtgttg

SEQ ID NO: 229525 - DNA, 50 bp, Artificial
  Synthetic oligonucleotide
tatcttccccgccacttgtgtcttgcggctgcctccctcttgaaagcagc

SEQ ID NO: 229526 - DNA, 50 bp, Artificial
  Synthetic oligonucleotide
cccgttccgttccatcgctgcccgtgacagtttctttcgattcgcgcgct

SEQ ID NO: 229527 - DNA, 50 bp, Artificial
  Synthetic oligonucleotide
aacggacccgttttcaagggcccttcaatgagttgcctcggcgttgccta

SEQ ID NO: 229528 - DNA, 50 bp, Artificial
  Synthetic oligonucleotide
aacggacgcgtggtcccgtaggtgatattgccctgtcccagcctgcgtcc

SEQ ID NO: 229529 - DNA, 50 bp, Artificial
  Synthetic oligonucleotide
atttgatcctcgctgtgggtccgagcgttgcggatgtagggaaccagccg

SEQ ID NO: 229530 - DNA, 50 bp, Artificial
  Synthetic oligonucleotide
aacgtttcgcgccttcgtcacagaaacggggctgatcacctgtccacgca

SEQ ID NO: 229531 - DNA, 50 bp, Artificial
  Synthetic oligonucleotide
ccctgttcagcgcgaatggtactgacctgccgaccctccaatccccagtt

SEQ ID NO: 229532 - DNA, 50 bp, Artificial
  Synthetic oligonucleotide
tacgcttgcgccatgggctgcttggctgaacgaacggctcctcatttgcc

SEQ ID NO: 229533 - DNA, 50 bp, Artificial
  Synthetic oligonucleotide
aactccccctgcacaggtcaggtgccaagagccattcgcccggtcgctag

SEQ ID NO: 229534 - DNA, 50 bp, Artificial
  Synthetic oligonucleotide
aactccgaatgccagccggtggaaggtttcaggtcttcccccgcataggg

SEQ ID NO: 229535 - DNA, 56 bp, Artificial
  Synthetic oligonucleotide
agacatcaaaaggttcggtggcatggggtcgcggacgtttcttgaatcgtcccgca

SEQ ID NO: 229536 - DNA, 50 bp, Artificial
  Synthetic oligonucleotide
aactccgctgcgtttgcctcaaacgggggcaattcctccgcttggtcccc

SEQ ID NO: 229537 - DNA, 50 bp, Artificial
  Synthetic oligonucleotide
atttgactgaccaagtcgggggcgttgccaaatccgacgcgcaaccgtct

SEQ ID NO: 229538 - DNA, 50 bp, Artificial
  Synthetic oligonucleotide
tacgaacacttcccacaggaaggacggctgatggacccccggcatgatca

SEQ ID NO: 229539 - DNA, 50 bp, Artificial
  Synthetic oligonucleotide
taccgttatttcatcgcagcaaagacacagccatccgtgatcagctctgg

SEQ ID NO: 229540 - DNA, 50 bp, Artificial
  Synthetic oligonucleotide
aactcgagcgcgcgaagggttactctggaactgcgctcatggtccacgga

SEQ ID NO: 229541 - DNA, 50 bp, Artificial
  Synthetic oligonucleotide
cccttctgccccagactggcccgaccgttttggggagggacgaaatgacg

SEQ ID NO: 229542 - DNA, 50 bp, Artificial
  Synthetic oligonucleotide
ctgcccgtgccgcgggaaaacaatccactgctcggtagccttgcagattc

SEQ ID NO: 229543 - DNA, 50 bp, Artificial
  Synthetic oligonucleotide
aactcgcccaggcccctaaggtggaggcgctagctatgtttgccggccac

SEQ ID NO: 229544 - DNA, 50 bp, Artificial
  Synthetic oligonucleotide
cccttgtacgctctgctggcgttttgcggatgttagccgctgttgccacc

SEQ ID NO: 229545 - DNA, 50 bp, Artificial
  Synthetic oligonucleotide
tacccgagattcgttatggttccgtaaacggcggtcggttctaggactgg

SEQ ID NO: 229546 - DNA, 60 bp, Artificial
  Synthetic oligonucleotide
tgtctgtcgcgggcgacaaacaatgccatcacaagaataagcgggagccagataggcgcc

SEQ ID NO: 229547 - DNA, 50 bp, Artificial
  Synthetic oligonucleotide
cccttgtcacgcggggtcagaggcacgtcatccatgtaaagcgcggctag

SEQ ID NO: 229548 - DNA, 50 bp, Artificial
  Synthetic oligonucleotide
aacgggaacacgtcccccgccttaacggcaacgtctgcccggaatcggcc

SEQ ID NO: 229549 - DNA, 50 bp, Artificial
  Synthetic oligonucleotide
aacgggagacggctggctcgacgcttacgtgaccgacgccttgagtcgtg

SEQ ID NO: 229550 - DNA, 50 bp, Artificial
  Synthetic oligonucleotide
aacgggctggcccacggatttctgatcgtgagagtcgctaccgtggaggc

SEQ ID NO: 229551 - DNA, 50 bp, Artificial
  Synthetic oligonucleotide
aacggggttcagggcggcccgtcacacccagcccatcgatgcgaaacgtg

SEQ ID NO: 229552 - DNA, 50 bp, Artificial
  Synthetic oligonucleotide
tagcgcccgtagacatgacttgcagccaattgttcgaattgctctgcttc

SEQ ID NO: 229553 - DNA, 50 bp, Artificial
  Synthetic oligonucleotide
aacgggttcggagggttctgggccacacaaatccttccgtttggcgaccc

SEQ ID NO: 229554 - DNA, 50 bp, Artificial
  Synthetic oligonucleotide
aacggtagggccgcgcctgacccttgggcgaaggttgtcttgcgacctgt

SEQ ID NO: 229555 - DNA, 50 bp, Artificial
  Synthetic oligonucleotide
aacggtccacatcggtgactggtagggcaaagcctgcgcgttggagaagg

SEQ ID NO: 229556 - DNA, 50 bp, Artificial
  Synthetic oligonucleotide
aacggtgggtttgctgaagcgtccaaggtccgggggaatccaaaatgccc

SEQ ID NO: 229557 - DNA, 57 bp, Artificial
  Synthetic oligonucleotide
gcaccgggccgagcctgcggacttcccgccctgcacggccccgggcttcacgcagac

SEQ ID NO: 229558 - DNA, 50 bp, Artificial
  Synthetic oligonucleotide
aacgtaagccgtgatcgcctgcacatccgcaccggtcagcccctcttgcg

SEQ ID NO: 229559 - DNA, 50 bp, Artificial
  Synthetic oligonucleotide
caaagcccgaggtgttctgcacaacccgcggcaggcgtttgtcatcggtc

SEQ ID NO: 229560 - DNA, 50 bp, Artificial
  Synthetic oligonucleotide
aacgtacgcactgcttcgttgtgggcgctatcgagttgagtgaggcggct

SEQ ID NO: 229561 - DNA, 50 bp, Artificial
  Synthetic oligonucleotide
attttaacgttcaaccctcgaaatagagccgcctcatctcaagtccggtc

SEQ ID NO: 229562 - DNA, 50 bp, Artificial
  Synthetic oligonucleotide
ccctgcggtttccgcaaagccgtctaaagtgcgcgctcaagtcggagcca

SEQ ID NO: 229563 - DNA, 50 bp, Artificial
  Synthetic oligonucleotide
agcatcctcccggtcagtgtatcaaggcgcgacagtgggccctttcggtg

SEQ ID NO: 229564 - DNA, 50 bp, Artificial
  Synthetic oligonucleotide
aacgtccggcgcagaacgacattgatcgatttatggcccgccaccgctct

SEQ ID NO: 229565 - DNA, 50 bp, Artificial
  Synthetic oligonucleotide
aacgtgcctgcgttgactgtcgtggtacccccaagttcgcggctgccatt

SEQ ID NO: 229566 - DNA, 50 bp, Artificial
  Synthetic oligonucleotide
tacggtaaggcaccatgccctcccgattaatccgccgccccttggggaga

SEQ ID NO: 229567 - DNA, 50 bp, Artificial
  Synthetic oligonucleotide
tccgctgggtaaggaaatgtcgcaaaaccgcccttccgagacttgatctt

SEQ ID NO: 229568 - DNA, 57 bp, Artificial
  Synthetic oligonucleotide
ttggagccagaagcgtagtcaatcctaggatcgacggatgggggtaggttttgactc

SEQ ID NO: 229569 - DNA, 50 bp, Artificial
  Synthetic oligonucleotide
cggtcgtgccctcacggcccatccagttgagctggcgcacgtactcagca

SEQ ID NO: 229570 - DNA, 50 bp, Artificial
  Synthetic oligonucleotide
tccgagatcgggctgggggaaagcgtgcgccttctgtatcatgcgttggc

SEQ ID NO: 229571 - DNA, 50 bp, Artificial
  Synthetic oligonucleotide
aacctgacgggccgttttaaccggcgtagcccggaactgcaatctccaga

SEQ ID NO: 229572 - DNA, 50 bp, Artificial
  Synthetic oligonucleotide
aacctgccgcctcggcgcgatttagcgcacaatgtgaccacagcccgtcc

SEQ ID NO: 229573 - DNA, 50 bp, Artificial
  Synthetic oligonucleotide
aacctgggctctcccggggaacaaccggtcactgctcggtcgccccgcac

SEQ ID NO: 229574 - DNA, 50 bp, Artificial
  Synthetic oligonucleotide
tcccgattaatccgccgccccttggggagacgacgaatggcgtgtcgcaa

SEQ ID NO: 229575 - DNA, 50 bp, Artificial
  Synthetic oligonucleotide
tccccgtggtgatccgcgagctttacggccatctcgacaatccgctctgc

SEQ ID NO: 229576 - DNA, 50 bp, Artificial
  Synthetic oligonucleotide
aacctgtcgggcttgggggtgaccattcggtaggtgttgcaggctcgacg

SEQ ID NO: 229577 - DNA, 50 bp, Artificial
  Synthetic oligonucleotide
aaccttggaggtcagggtgatattcggggtggcgaaccgcaccttggtct

SEQ ID NO: 229578 - DNA, 50 bp, Artificial
  Synthetic oligonucleotide
tcccaaagacctcgatgttgacaccctgcagctacatgcgccgggtgacg

SEQ ID NO: 229579 - DNA, 60 bp, Artificial
  Synthetic oligonucleotide
gagcagtagagttgggctgatggcacgtctcagccagaagcattcgggcgcctatttcac

SEQ ID NO: 229580 - DNA, 50 bp, Artificial
  Synthetic oligonucleotide
aacgaaagcgcctgaaagcataagccagcgcgaggttactcgggttgggc

SEQ ID NO: 229581 - DNA, 50 bp, Artificial
  Synthetic oligonucleotide
aacgaagcccggggcgtggcagagtcattgtcgcggacaggcacgtccgt

SEQ ID NO: 229582 - DNA, 50 bp, Artificial
  Synthetic oligonucleotide
aacgaccaatcgtgtggcgaccgtctgggcagaggagttggcccaatcag

SEQ ID NO: 229583 - DNA, 50 bp, Artificial
  Synthetic oligonucleotide
ccccttctgttgaacggccgcacccctgaacaggaaccgcgtgtctttca

SEQ ID NO: 229584 - DNA, 50 bp, Artificial
  Synthetic oligonucleotide
aaccgggtccaacgccttgcagtctcctagggaccaaccaatcggcacgg

SEQ ID NO: 229585 - DNA, 50 bp, Artificial
  Synthetic oligonucleotide
aaccgggtctttcatccacgcccgatccacagcgttttccataacgcgcc

SEQ ID NO: 229586 - DNA, 50 bp, Artificial
  Synthetic oligonucleotide
agcttgcccgcaaaccccggaggcacactcatggcgcatatcgactatta

SEQ ID NO: 229587 - DNA, 50 bp, Artificial
  Synthetic oligonucleotide
aaccggtgcctgcccttgcagcctctggcgcgcgacactaagacttgagt

SEQ ID NO: 229588 - DNA, 50 bp, Artificial
  Synthetic oligonucleotide
agccccggtaacccactgaaatcaaacggacctgctgggatggtgcgtcg

SEQ ID NO: 229589 - DNA, 50 bp, Artificial
  Synthetic oligonucleotide
aaccgtcatctcatcgcatgacatcccacgacaaaggcactggggcgggc

SEQ ID NO: 229590 - DNA, 60 bp, Artificial
  Synthetic oligonucleotide
gacagcgtcaccccgagaagttgactggcgcatcatgtgttacgcgtgggcttgacgcat

SEQ ID NO: 229591 - DNA, 50 bp, Artificial
  Synthetic oligonucleotide
aaaactccttggcccgcgattgcagcgtccatgcataaagagccgtcgga

SEQ ID NO: 229592 - DNA, 50 bp, Artificial
  Synthetic oligonucleotide
aaccgtggttcctgatgccccggctgctgaggacacgcttgcctaacccc

SEQ ID NO: 229593 - DNA, 50 bp, Artificial
  Synthetic oligonucleotide
aaccgttggagtgaatgtatgcggtcgcttgtccccagactgccccgagg

SEQ ID NO: 229594 - DNA, 50 bp, Artificial
  Synthetic oligonucleotide
aacctaccccacaaccgcaaggcgtggccgactaggtctgccttccacgt

SEQ ID NO: 229595 - DNA, 50 bp, Artificial
  Synthetic oligonucleotide
tccgttaactcatcggaagtgtgccaaaaacgccgatgaattgccattcc

SEQ ID NO: 229596 - DNA, 50 bp, Artificial
  Synthetic oligonucleotide
aacctacgagctggcccacaatcgacctggtgcccagttgtgccaacgcg

SEQ ID NO: 229597 - DNA, 50 bp, Artificial
  Synthetic oligonucleotide
agcgtgcgtctgattcgggcgctcttaggtgttttcggcccacaggagga

SEQ ID NO: 229598 - DNA, 50 bp, Artificial
  Synthetic oligonucleotide
aacctacgtccaagcctgcgactacacccacggaggctacaagcgccaga

SEQ ID NO: 229599 - DNA, 50 bp, Artificial
  Synthetic oligonucleotide
aacgcatctctgtggaatcggccattcgggcggtcacgtctgaggccgcg

SEQ ID NO: 229600 - DNA, 50 bp, Artificial
  Synthetic oligonucleotide
tcactgcctgcgcgcttcaaatgcaatggctcgggaacgtggtgttagct

SEQ ID NO: 229601 - DNA, 60 bp, Artificial
  Synthetic oligonucleotide
aaaatctgcgcttttcgaatccagcgcaacacctgaacccagatcgcctgtggccagagg

SEQ ID NO: 229602 - DNA, 50 bp, Artificial
  Synthetic oligonucleotide
aacgcatggtttgcgcctagcgaatggcggctgtgtcgaaatggggccat

SEQ ID NO: 229603 - DNA, 50 bp, Artificial
  Synthetic oligonucleotide
aaaacgtgacctgaggcccggcccacatgttcaaaagacgcaagccgctg

SEQ ID NO: 229604 - DNA, 50 bp, Artificial
  Synthetic oligonucleotide
aacgcccatcaatctccacagcttgtacggcccccacggcccgtggtctg

SEQ ID NO: 229605 - DNA, 50 bp, Artificial
  Synthetic oligonucleotide
caaccgatcttctaccgcgcgcgtctccgcacgccaatggctttcgtccg

SEQ ID NO: 229606 - DNA, 50 bp, Artificial
  Synthetic oligonucleotide
aacgccgcaaccaatgacgcgcggagtcttcccatgctcgacctgaccta

SEQ ID NO: 229607 - DNA, 50 bp, Artificial
  Synthetic oligonucleotide
aacgcctgttggagcccggtattcaccaaagacctcccgcaaggtgcggc

SEQ ID NO: 229608 - DNA, 50 bp, Artificial
  Synthetic oligonucleotide
caacaccgtggttctgaaggagcggaacatcaaggggacgattgcctatc

SEQ ID NO: 229609 - DNA, 50 bp, Artificial
  Synthetic oligonucleotide
cccggcgccttatcaacggcgtaccgcagaagatagcccagcatcctcgg

SEQ ID NO: 229610 - DNA, 50 bp, Artificial
  Synthetic oligonucleotide
cccggctggtacaaattgtgagcgtgcagccctatcctgggcaatgcgac

SEQ ID NO: 229611 - DNA, 50 bp, Artificial
  Synthetic oligonucleotide
aacgcctttccgaacggtccccagtcttcgtcttgcacgggatctccgct

SEQ ID NO: 229612 - DNA, 60 bp, Artificial
  Synthetic oligonucleotide
ttgtcacgcactaaccaatccgtctttgctccacatgtgcaaactcgttattgaatagcg

SEQ ID NO: 229613 - DNA, 50 bp, Artificial
  Synthetic oligonucleotide
aacgcgaagaccagaaccaaaaggcaaagtggacccgcgatccacccccg

SEQ ID NO: 229614 - DNA, 50 bp, Artificial
  Synthetic oligonucleotide
caaaggtgaccctatgaccgcgaccgcccttcacacccagacgatggtcc

SEQ ID NO: 229615 - DNA, 50 bp, Artificial
  Synthetic oligonucleotide
aacgcgaaggacggcgcctaaatccctgatcgttcatggccttcccccga

SEQ ID NO: 229616 - DNA, 50 bp, Artificial
  Synthetic oligonucleotide
aacgcgacaagacatcggtcctgcgcattggagccattgatagcgccgcg

SEQ ID NO: 229617 - DNA, 50 bp, Artificial
  Synthetic oligonucleotide
aacgcgccatgcggcgaattccgaacgtgctgctcaagcctaccccctct

SEQ ID NO: 229618 - DNA, 50 bp, Artificial
  Synthetic oligonucleotide
aacgacttggggtgagcctctgggtttccgccgcagaatatccgctcgca

SEQ ID NO: 229619 - DNA, 50 bp, Artificial
  Synthetic oligonucleotide
tccaagcggagctgtcaaatcgctcctaaccattggtgcccccaccctgt

SEQ ID NO: 229620 - DNA, 50 bp, Artificial
  Synthetic oligonucleotide
aacgagcccgcaccggtatctcgtcatgcggcgtctggagagggccaaga

SEQ ID NO: 229621 - DNA, 50 bp, Artificial
  Synthetic oligonucleotide
aacgaggatctagccgctacgccgtctaatgagcgcgagtggggctggtt

SEQ ID NO: 229622 - DNA, 50 bp, Artificial
  Synthetic oligonucleotide
agcccacgaaatgcgcttgatctagcattggctgggaccgcgcgtgttgt

SEQ ID NO: 229623 - DNA, 60 bp, Artificial
  Synthetic oligonucleotide
gagataactcggggcgcaaatgctgagctatttcctccagggtaccatcggtcgatcctc

SEQ ID NO: 229624 - DNA, 50 bp, Artificial
  Synthetic oligonucleotide
aacgagggaagccgaaaatgagccgacacctgccccttatcgggagtggg

SEQ ID NO: 229625 - DNA, 50 bp, Artificial
  Synthetic oligonucleotide
aacgaggggcgtgccttgtgcaagcactgtaatccgctctgcgagggaga

SEQ ID NO: 229626 - DNA, 50 bp, Artificial
  Synthetic oligonucleotide
aacgagggtttgaaccgggcagatgccgacagcaggccctcaatttccga

SEQ ID NO: 229627 - DNA, 50 bp, Artificial
  Synthetic oligonucleotide
aacgagtggtagcgcctgcgctgtgaagaactggcaaaccggccccattc

SEQ ID NO: 229628 - DNA, 50 bp, Artificial
  Synthetic oligonucleotide
agccattggcaccaatggggagcagttgggtagagtgttgtccagcccca

SEQ ID NO: 229629 - DNA, 50 bp, Artificial
  Synthetic oligonucleotide
aacgatcgaaacttgccaccggctgaccagaccgccaggcacggtagaac

SEQ ID NO: 229630 - DNA, 50 bp, Artificial
  Synthetic oligonucleotide
caacgtggcttgcccgaaaaccgccctcgcttcactctgcaagggtcgag

SEQ ID NO: 229631 - DNA, 50 bp, Artificial
  Synthetic oligonucleotide
aacgatgcccaaagccacttcatcatgcccgccggattccagtcttcccg

SEQ ID NO: 229632 - DNA, 50 bp, Artificial
  Synthetic oligonucleotide
agctttcaacacgacgggcagcaccgacaaagcgcaaagccccagaatgg

SEQ ID NO: 229633 - DNA, 50 bp, Artificial
  Synthetic oligonucleotide
cccgcccgccttaaatccactgctcacgatcccgtacgcctgccactccg

SEQ ID NO: 229634 - DNA, 59 bp, Artificial
  Synthetic oligonucleotide
cgctgtatacattgaacaggggccttccgcttctgaaagtgaaggcgctcacaaagccc

SEQ ID NO: 229635 - DNA, 60 bp, Artificial
  Synthetic oligonucleotide
aaaagtcagcgaccataccaatgcgcacgcgaccaggactttccggagtggtatgcgcat

SEQ ID NO: 229636 - DNA, 50 bp, Artificial
  Synthetic oligonucleotide
aacgcaggtgggtgccaggaaaggtcacggcggttgaattgctggtcagt

SEQ ID NO: 229637 - DNA, 50 bp, Artificial
  Synthetic oligonucleotide
aagcgcacctgtcgcgagactcagcgcaccggcaagtgacgcagcaaacc

SEQ ID NO: 229638 - DNA, 50 bp, Artificial
  Synthetic oligonucleotide
gtgagcgtgcagccctatcctgggcaatgcgacgttgtcagggcgcttcg

SEQ ID NO: 229639 - DNA, 50 bp, Artificial
  Synthetic oligonucleotide
aagcgcatggcgacaggcctataccgaagccaccatcccatcaaggagcg

SEQ ID NO: 229640 - DNA, 50 bp, Artificial
  Synthetic oligonucleotide
aagcgccgcgggaaatcgatcgagcacgcccgattacgtcaacagatggc

SEQ ID NO: 229641 - DNA, 50 bp, Artificial
  Synthetic oligonucleotide
atgtcctcctcgtcggtttggcggctacaaagcgcccggttgcgggttat

SEQ ID NO: 229642 - DNA, 50 bp, Artificial
  Synthetic oligonucleotide
aagcgccggttccagaggacgggtaaatcacgacgcgggactcggtcttg

SEQ ID NO: 229643 - DNA, 50 bp, Artificial
  Synthetic oligonucleotide
aagcgcctctttgccccgagtcaagtccgcgtccccatcgcacgaccggg

SEQ ID NO: 229644 - DNA, 50 bp, Artificial
  Synthetic oligonucleotide
aagcgctattctcaggcgtgctgaagtgcttagctcgacgcagcccgctc

SEQ ID NO: 229645 - DNA, 50 bp, Artificial
  Synthetic oligonucleotide
aagcgcttttactgagccacggtagcccataccccgcgctgtagacgggc

SEQ ID NO: 229646 - DNA, 60 bp, Artificial
  Synthetic oligonucleotide
catagccaatagatgacggttgccgctagggcgatggctgagagaaagaccttgggacag

SEQ ID NO: 229647 - DNA, 50 bp, Artificial
  Synthetic oligonucleotide
aagcggccaaaacgcgcaagagtgttgcgcccatatgctgaaacaacggg

SEQ ID NO: 229648 - DNA, 50 bp, Artificial
  Synthetic oligonucleotide
aagcggcccgcccccgctgtagccgtaggagacttcctcgaattcgatca

SEQ ID NO: 229649 - DNA, 50 bp, Artificial
  Synthetic oligonucleotide
aagcggctgccgagctagtcctccaacagggccccaagccgttcaaaggc

SEQ ID NO: 229650 - DNA, 50 bp, Artificial
  Synthetic oligonucleotide
agattggccgtaccgctgcatggatgatcaccaagacggtccaccagcct

SEQ ID NO: 229651 - DNA, 50 bp, Artificial
  Synthetic oligonucleotide
ctgtcgcatggcgggcgtctgggcaattacatctcgaccaatggcgaggc

SEQ ID NO: 229652 - DNA, 50 bp, Artificial
  Synthetic oligonucleotide
aagcgtcatggtgtcctcccgtaccagagcgggggaattgcctcacgaag

SEQ ID NO: 229653 - DNA, 50 bp, Artificial
  Synthetic oligonucleotide
aagcgtccctccctcgatggaatgacgtccgcgtctggcaatacgggcta

SEQ ID NO: 229654 - DNA, 50 bp, Artificial
  Synthetic oligonucleotide
aagcccgcttaacccgtcaagcggtctgcgaatccgtttttggcccgctc

SEQ ID NO: 229655 - DNA, 50 bp, Artificial
  Synthetic oligonucleotide
aagcccggtccctgtgaccgctaggggctgaacgcggaaagaagcgtccc

SEQ ID NO: 229656 - DNA, 50 bp, Artificial
  Synthetic oligonucleotide
aagcccgtcgtttagagggggtcgctatccatgtcaacgcgcctgacgca

SEQ ID NO: 229657 - DNA, 58 bp, Artificial
  Synthetic oligonucleotide
actgggggcggcattcctttagatatcaaggccgtagatatctcgtgcggccgcctcg

SEQ ID NO: 229658 - DNA, 50 bp, Artificial
  Synthetic oligonucleotide
aagcccttagcaatcggatcaacccgcacggcgcttaccccgccttttcg

SEQ ID NO: 229659 - DNA, 50 bp, Artificial
  Synthetic oligonucleotide
aagccgacggaacatccagaagtcgacccaccggacgccttggcattgca

SEQ ID NO: 229660 - DNA, 50 bp, Artificial
  Synthetic oligonucleotide
attcaacggtcaacggctgcgatgtggctacggcggggacggatctcaca

SEQ ID NO: 229661 - DNA, 50 bp, Artificial
  Synthetic oligonucleotide
aagccgctgtcatgtaacaagcgggctgccaaagctccgactttccccaa

SEQ ID NO: 229662 - DNA, 50 bp, Artificial
  Synthetic oligonucleotide
aagcctcggcaggcccgaaccaccgcagtcgttaccgaactgttgccaaa

SEQ ID NO: 229663 - DNA, 50 bp, Artificial
  Synthetic oligonucleotide
aagcctctaccgccgtaaaggaccgactgaaccccggccgtctggacata

SEQ ID NO: 229664 - DNA, 50 bp, Artificial
  Synthetic oligonucleotide
aagcctgacgggactgcttcttgacgaaggccgctcggctccctacgttc

SEQ ID NO: 229665 - DNA, 50 bp, Artificial
  Synthetic oligonucleotide
gtgcatctgatggccgtcaacgcacagcggatcttctggcacggaaacgg

SEQ ID NO: 229666 - DNA, 50 bp, Artificial
  Synthetic oligonucleotide
aagcctgccgggatcggggcagaaaatcggtagcgccgtcgaagagggtt

SEQ ID NO: 229667 - DNA, 50 bp, Artificial
  Synthetic oligonucleotide
aagccttcggtgtcgcgccccactcaatgatgcccggagccatcacttcg

SEQ ID NO: 229668 - DNA, 60 bp, Artificial
  Synthetic oligonucleotide
ttgtgggcgggacgacagctgcgaccagcatgtcatgcaactcagacaaagggagaagtg

SEQ ID NO: 229669 - DNA, 50 bp, Artificial
  Synthetic oligonucleotide
atgtgatgccagtccgcctcgcttcgggttgtgatccactcggttgtcgg

SEQ ID NO: 229670 - DNA, 50 bp, Artificial
  Synthetic oligonucleotide
aggcaggcctgcggacggttttataggttggtccaaagcgccggattcgt

SEQ ID NO: 229671 - DNA, 50 bp, Artificial
  Synthetic oligonucleotide
aagcgacaccccgtgggctcgcgccaactccaacacaattccgctcctcc

SEQ ID NO: 229672 - DNA, 50 bp, Artificial
  Synthetic oligonucleotide
aagcgagccccctcgtcggcagtcaacccctgcggttaggattggcacgc

SEQ ID NO: 229673 - DNA, 50 bp, Artificial
  Synthetic oligonucleotide
cagggggatacgtgcctacatccccggacgaaaacaacggaagacgccgg

SEQ ID NO: 229674 - DNA, 50 bp, Artificial
  Synthetic oligonucleotide
gtccgggccttttggcctctttcggggtgactcgcgtcttcgtggttttg

SEQ ID NO: 229675 - DNA, 50 bp, Artificial
  Synthetic oligonucleotide
aggcccgatccggccttcggagatctggccctgaaacttggcacgccacg

SEQ ID NO: 229676 - DNA, 50 bp, Artificial
  Synthetic oligonucleotide
aaggccatggtatccaccgcgaagggcgttgcggctatcctatcgggctc

SEQ ID NO: 229677 - DNA, 50 bp, Artificial
  Synthetic oligonucleotide
aaggccgcgccaatacgagagaacccttctttggtcaccgcaagcccctg

SEQ ID NO: 229678 - DNA, 50 bp, Artificial
  Synthetic oligonucleotide
ccggagcccgcccccgtgtcgaaacgtaacgcatcgcgtccccctagaat

SEQ ID NO: 229679 - DNA, 60 bp, Artificial
  Synthetic oligonucleotide
acgtccttgtgatcgttcgtgatccgaagcatggcagcatcgttacgcctgtcgcccggg

SEQ ID NO: 229680 - DNA, 50 bp, Artificial
  Synthetic oligonucleotide
aaggcgaagacgcgccttgcgggtgtattgagctctggatggctcaggtg

SEQ ID NO: 229681 - DNA, 50 bp, Artificial
  Synthetic oligonucleotide
atggcgcgaggggtgacctgataggaacgcaggtcccgctacctatagct

SEQ ID NO: 229682 - DNA, 50 bp, Artificial
  Synthetic oligonucleotide
aaggcgatgtcttcctctgcctcggcggatatgccttcagcggacaacgc

SEQ ID NO: 229683 - DNA, 50 bp, Artificial
  Synthetic oligonucleotide
aaaacaattctcggtcgcatcccaagcggcgcgacttgttgccagcggag

SEQ ID NO: 229684 - DNA, 50 bp, Artificial
  Synthetic oligonucleotide
atggcgactgcttaggctaccgacgcgcgacgtaccacgaaaaaggggcg

SEQ ID NO: 229685 - DNA, 50 bp, Artificial
  Synthetic oligonucleotide
aaggcgtgcatgccgcaacaaggcgtcacccgacggtgtcagctctaccc

SEQ ID NO: 229686 - DNA, 50 bp, Artificial
  Synthetic oligonucleotide
ccggagctgaggggcgcaacgagagcggcgtattcaccccctactggacc

SEQ ID NO: 229687 - DNA, 50 bp, Artificial
  Synthetic oligonucleotide
agatcccctgccgacaaaccagtctaacgccgagaccctagcatggccgc

SEQ ID NO: 229688 - DNA, 50 bp, Artificial
  Synthetic oligonucleotide
aaggcttcccctcgcaagaggcaaggtatagacaccgcgaccaaacgccc

SEQ ID NO: 229689 - DNA, 50 bp, Artificial
  Synthetic oligonucleotide
aagggaggtggcccatggacgagattgcattgacccgtattgccgaggcg

SEQ ID NO: 229690 - DNA, 60 bp, Artificial
  Synthetic oligonucleotide
gacatcactgcaaggttggtcgatgaaggcaccataaccttgactgtagtgccacaggca

SEQ ID NO: 229691 - DNA, 50 bp, Artificial
  Synthetic oligonucleotide
atggccttcgagtagcaacattgagaaccaagagcaaccgcacgccgccg

SEQ ID NO: 229692 - DNA, 50 bp, Artificial
  Synthetic oligonucleotide
aagcgtgccaacacgacacttttggccccgaaagtccaaccggttcgcgt

SEQ ID NO: 229693 - DNA, 50 bp, Artificial
  Synthetic oligonucleotide
aagctacacgccgtgtgtgacaatcttgggcgacctgtgcgcctacacct

SEQ ID NO: 229694 - DNA, 50 bp, Artificial
  Synthetic oligonucleotide
aagctccggttcagcaaaacgatgccgcctggcaagtgcaggctggttgc

SEQ ID NO: 229695 - DNA, 50 bp, Artificial
  Synthetic oligonucleotide
aagctcgactggagcacggttcaccatctggtgcccgcccaatcacgcca

SEQ ID NO: 229696 - DNA, 50 bp, Artificial
  Synthetic oligonucleotide
aagctcgccctgacgatgtggagccaggactttgcagcgcaacaccccga

SEQ ID NO: 229697 - DNA, 50 bp, Artificial
  Synthetic oligonucleotide
aagctctccgcgggccgatgcgagttttgtcaggacgtgtcccgttgtgt

SEQ ID NO: 229698 - DNA, 50 bp, Artificial
  Synthetic oligonucleotide
aaggaaagcgggttctcggttgcgcacggcatgtcttcgcaggcttcggt

SEQ ID NO: 229699 - DNA, 50 bp, Artificial
  Synthetic oligonucleotide
aaggaacggcccgttctgtgaccgggttgccacctgctgccctcatcctg

SEQ ID NO: 229700 - DNA, 50 bp, Artificial
  Synthetic oligonucleotide
aggccaatccgcggcccaagcgccgatgacacggggctgatcaatcctcg

SEQ ID NO: 229701 - DNA, 56 bp, Artificial
  Synthetic oligonucleotide
tttcggacagcggccgaatacaccgactatatctacagtttcctcgaaacctacgc

SEQ ID NO: 229702 - DNA, 50 bp, Artificial
  Synthetic oligonucleotide
aaggagcttgacgtgctagacgcatgggaaaggctgtcgtcccggtcccg

SEQ ID NO: 229703 - DNA, 50 bp, Artificial
  Synthetic oligonucleotide
atgggagattgcgtccggatgccgcgaacatgtgcgtactggttgcctgt

SEQ ID NO: 229704 - DNA, 50 bp, Artificial
  Synthetic oligonucleotide
aaggatctgcgtgcggctcttaccagcccgcgcaccctgttaatgggctg

SEQ ID NO: 229705 - DNA, 50 bp, Artificial
  Synthetic oligonucleotide
aaggatgcaccgcagtgtccagccgtccccgatcaaagtcataccccaga

SEQ ID NO: 229706 - DNA, 50 bp, Artificial
  Synthetic oligonucleotide
aaggcacttggggccgcgctttgcttaacgggcacattggtgtccgcgca

SEQ ID NO: 229707 - DNA, 50 bp, Artificial
  Synthetic oligonucleotide
ccgcttcgggccgatcctggcacccagctcttgctgacctcacaacgtgc

SEQ ID NO: 229708 - DNA, 50 bp, Artificial
  Synthetic oligonucleotide
aggcccgacaatacgcacacctaaaccgcctgtcgacctgccctcgaagg

SEQ ID NO: 229709 - DNA, 50 bp, Artificial
  Synthetic oligonucleotide
gtccttcaagtcccctaccgggaacggttcgggtatcttgcgcggcggac

SEQ ID NO: 229710 - DNA, 50 bp, Artificial
  Synthetic oligonucleotide
aaggcatccgcgagggtacgaaaggcctctgcctccatggtgctacgccg

SEQ ID NO: 229711 - DNA, 50 bp, Artificial
  Synthetic oligonucleotide
agcagccggaagtatggaacgccggtcacgcctgatgcgacgtaaaggtt

SEQ ID NO: 229712 - DNA, 60 bp, Artificial
  Synthetic oligonucleotide
tttgaagcgccattagatgttggtggtacctctggcgacaatatctacgaagtcgaggta

SEQ ID NO: 229713 - DNA, 50 bp, Artificial
  Synthetic oligonucleotide
aacttgcggcgcacccgaatggtcgcatttggcacgttctcatacccgac

SEQ ID NO: 229714 - DNA, 50 bp, Artificial
  Synthetic oligonucleotide
aacttgtgtcggtgtgccctctgcgaaccttggggcggtgttcgcaatgg

SEQ ID NO: 229715 - DNA, 50 bp, Artificial
  Synthetic oligonucleotide
attgcgcaagcttagcccctagtctggcgaaaagcagtcgggcgattgcc

SEQ ID NO: 229716 - DNA, 50 bp, Artificial
  Synthetic oligonucleotide
aggatggctcacgtctcttcgtggcgctcggacctgcgaacagggtcgct

SEQ ID NO: 229717 - DNA, 50 bp, Artificial
  Synthetic oligonucleotide
aactttgcaaggcgaccacagcaagcgacggggccgcttttgttcaatgc

SEQ ID NO: 229718 - DNA, 50 bp, Artificial
  Synthetic oligonucleotide
aagaaccgcccccgatagacagggcccgctcgatatgaattcggcaccta

SEQ ID NO: 229719 - DNA, 50 bp, Artificial
  Synthetic oligonucleotide
aagaagcgttcccgcttcacttcgcggtacttcgggacatggcggcaggg

SEQ ID NO: 229720 - DNA, 50 bp, Artificial
  Synthetic oligonucleotide
agcagcaagatagccgacaagagctgtacctgcggctgtgtcgccccgca

SEQ ID NO: 229721 - DNA, 50 bp, Artificial
  Synthetic oligonucleotide
ccgatcctcacgtgccaccccactgcggttttccagcatgtttagcacgg

SEQ ID NO: 229722 - DNA, 50 bp, Artificial
  Synthetic oligonucleotide
attgccatattcccagcgcttggggccagtctcgcccatcgcatgccagc

SEQ ID NO: 229723 - DNA, 57 bp, Artificial
  Synthetic oligonucleotide
acgtcggtcttgagaactacaccaagcttctgggatcgcgcgacttttcccgcgcga

SEQ ID NO: 229724 - DNA, 50 bp, Artificial
  Synthetic oligonucleotide
aagaccccacaggcgcaccgtctgcaaacacgacggatgacccacagtcg

SEQ ID NO: 229725 - DNA, 50 bp, Artificial
  Synthetic oligonucleotide
aagaccccattgtgggcaccggcccaaagaacgacgctctggacccgagg

SEQ ID NO: 229726 - DNA, 50 bp, Artificial
  Synthetic oligonucleotide
agcacgcggggtataaggcggactgtggcatcaatcaaggcctgcgctgc

SEQ ID NO: 229727 - DNA, 50 bp, Artificial
  Synthetic oligonucleotide
aagacgtggtaatcatcaggcccaaggtatcgagatcgagtgctgatccc

SEQ ID NO: 229728 - DNA, 50 bp, Artificial
  Synthetic oligonucleotide
aggcaaacgggaccatcctgacaacggactctggagagtggccatctggc

SEQ ID NO: 229729 - DNA, 50 bp, Artificial
  Synthetic oligonucleotide
aactcggcgaagtccctgtcctggagacggatgggcagatgctcacccaa

SEQ ID NO: 229730 - DNA, 50 bp, Artificial
  Synthetic oligonucleotide
atttcgatagctccttgctgtgggggtgcacggcaggcggcacttgcgaa

SEQ ID NO: 229731 - DNA, 50 bp, Artificial
  Synthetic oligonucleotide
cgtcgccactatgaggcgggcttcaaaggaacgtggcctgcgaatccgcg

SEQ ID NO: 229732 - DNA, 50 bp, Artificial
  Synthetic oligonucleotide
agctaacgatgcaggcgcggaaacacaaaggccccgcagaggggcagggg

SEQ ID NO: 229733 - DNA, 50 bp, Artificial
  Synthetic oligonucleotide
aactgatcccgcacaattgcccgcgacacggaaatcccgatcgccgctcc

SEQ ID NO: 229734 - DNA, 58 bp, Artificial
  Synthetic oligonucleotide
gactggaggaggccaaatcttattcggaagcggagagccggttgaagtctggtggcac

SEQ ID NO: 229735 - DNA, 50 bp, Artificial
  Synthetic oligonucleotide
aggaagacctcacggaacgcccgatccgcacgctgcgataccctggatca

SEQ ID NO: 229736 - DNA, 50 bp, Artificial
  Synthetic oligonucleotide
aactggcaccgcaccattgctattgcctcgggtgtaaggctccccgcgaa

SEQ ID NO: 229737 - DNA, 50 bp, Artificial
  Synthetic oligonucleotide
taagcgcggcaccctatctagagcgatggcgggttctgcccctctcgtgc

SEQ ID NO: 229738 - DNA, 50 bp, Artificial
  Synthetic oligonucleotide
aactgggccgaagcgcattaactacgcgagccgaggggctggctaagacc

SEQ ID NO: 229739 - DNA, 50 bp, Artificial
  Synthetic oligonucleotide
agcaggttttcagatgtggcatcacgcgggttccgaaatggcgggcctcg

SEQ ID NO: 229740 - DNA, 50 bp, Artificial
  Synthetic oligonucleotide
attgttgcccaagccgatcaagctaggcggctcccttcgctggtgttggg

SEQ ID NO: 229741 - DNA, 50 bp, Artificial
  Synthetic oligonucleotide
aactggtaacccagcgaccgggatgcttagctctatgcgcccccaaggga

SEQ ID NO: 229742 - DNA, 50 bp, Artificial
  Synthetic oligonucleotide
aactgttggacagtgcggggagtgactaggctggggcgcttatgggtccg

SEQ ID NO: 229743 - DNA, 50 bp, Artificial
  Synthetic oligonucleotide
agcagcttctcacgcggtgcctcaatcgccgcctgaggggacgcatagcc

SEQ ID NO: 229744 - DNA, 50 bp, Artificial
  Synthetic oligonucleotide
aacttgcaagttggtcgaggtctctgcgcgggcttgggacagccggtctt

SEQ ID NO: 229745 - DNA, 60 bp, Artificial
  Synthetic oligonucleotide
agggtgtcacggctgcgatcacgactgtaaaatgacgtcagatcacaaggcgatggcccc

SEQ ID NO: 229746 - DNA, 59 bp, Artificial
  Synthetic oligonucleotide
gaccagcgacccaatgtcgtagcgcagaacggcgccaagccgagtatatccccaaggga

SEQ ID NO: 229747 - DNA, 50 bp, Artificial
  Synthetic oligonucleotide
aggacagtcccgccacccactcaactggcgctccttcaggagaattcagc

SEQ ID NO: 229748 - DNA, 50 bp, Artificial
  Synthetic oligonucleotide
aaaaccccatcggcttccagtccaacccgccctccaacagcatcggtcga

SEQ ID NO: 229749 - DNA, 50 bp, Artificial
  Synthetic oligonucleotide
agcaccagaacgatcccgaatggcgcaggccagttgccaagctcgtagac

SEQ ID NO: 229750 - DNA, 50 bp, Artificial
  Synthetic oligonucleotide
aagcaggggagccggtctggcggcatgttggtcaggttcgcatgcgtatg

SEQ ID NO: 229751 - DNA, 50 bp, Artificial
  Synthetic oligonucleotide
gttacgatcaggggcgcatgagtggcaataacgacggtggcgcctcggta

SEQ ID NO: 229752 - DNA, 50 bp, Artificial
  Synthetic oligonucleotide
aagcaggttgtgccagtagtttaagcccagagcggacggcccaaccggtg

SEQ ID NO: 229753 - DNA, 50 bp, Artificial
  Synthetic oligonucleotide
gtgtcgggcgaggcttgcctgtatggtgcgagtttcgcatggccatggag

SEQ ID NO: 229754 - DNA, 50 bp, Artificial
  Synthetic oligonucleotide
ccgcatctccgaacccacctcggaaatcacgtcgaccggcagttcgaact

SEQ ID NO: 229755 - DNA, 50 bp, Artificial
  Synthetic oligonucleotide
aggcactcggtggcttcgagttgatctctggtgaagctaggcttgcgccc

SEQ ID NO: 229756 - DNA, 50 bp, Artificial
  Synthetic oligonucleotide
attccttgcctcggcgaaagcctagggggcacaaacgcccgccgcgtaat

SEQ ID NO: 229757 - DNA, 52 bp, Artificial
  Synthetic oligonucleotide
acgttaccgtcgctacgtaaccatgggggataacccttgggacagaggcgcg

SEQ ID NO: 229758 - DNA, 50 bp, Artificial
  Synthetic oligonucleotide
aagccactcaactggggtagcctggccgaaaattgcatcggcgctgaggt

SEQ ID NO: 229759 - DNA, 50 bp, Artificial
  Synthetic oligonucleotide
aagccattggaacgaggcgcgggggcactatgacagtgtcaacgtcagga

SEQ ID NO: 229760 - DNA, 50 bp, Artificial
  Synthetic oligonucleotide
aagcccaagccggatcagcgtaagccgaccgtctgacctcccgagcgcgg

SEQ ID NO: 229761 - DNA, 50 bp, Artificial
  Synthetic oligonucleotide
aagcccatgggttgggtgtttgcgaccagcaggtaagacggcccctcttg

SEQ ID NO: 229762 - DNA, 50 bp, Artificial
  Synthetic oligonucleotide
gtggccccgaatgttgcggcctcgcgcagtaatgtctgacatagcaaggc

SEQ ID NO: 229763 - DNA, 50 bp, Artificial
  Synthetic oligonucleotide
attccttccgaagtgaggtcgtcccccgcacagtcggcaaagctagtgcc

SEQ ID NO: 229764 - DNA, 50 bp, Artificial
  Synthetic oligonucleotide
aagccccgatcgcctgaacactaccgtcctccccactataggggtcggca

SEQ ID NO: 229765 - DNA, 50 bp, Artificial
  Synthetic oligonucleotide
aagcccgaatggcgacgggcgatcactatccgccgctagaaaccagctgc

SEQ ID NO: 229766 - DNA, 50 bp, Artificial
  Synthetic oligonucleotide
aagcccgatccacgggctgctgtcactgaccccgatcatcccatagcgca

SEQ ID NO: 229767 - DNA, 50 bp, Artificial
  Synthetic oligonucleotide
aagactcttcggacccgcccaaagtgcgcttaaggaggcgacacaggagc

SEQ ID NO: 229768 - DNA, 57 bp, Artificial
  Synthetic oligonucleotide
acgttacttcggtaacttggcacatggacagaaagacctcgaacgatgttcgaggca

SEQ ID NO: 229769 - DNA, 50 bp, Artificial
  Synthetic oligonucleotide
aagactgagcaaggcaaccgcctgaatgccgcatagggtggggtagcggc

SEQ ID NO: 229770 - DNA, 50 bp, Artificial
  Synthetic oligonucleotide
attgatcggcgaaatcgtcggagagacggaacgttgggcaggcgcgccct

SEQ ID NO: 229771 - DNA, 50 bp, Artificial
  Synthetic oligonucleotide
aagagctgcgactgggggacaagccgggccgtgcatccggtaattcgctc

SEQ ID NO: 229772 - DNA, 50 bp, Artificial
  Synthetic oligonucleotide
aagaggcgggagcactgcctttttctggtccccaccaccgcaggaaacca

SEQ ID NO: 229773 - DNA, 50 bp, Artificial
  Synthetic oligonucleotide
aagatcagggtcggccaagccaaccaacgtgcaatagggatgcgcgcgga

SEQ ID NO: 229774 - DNA, 50 bp, Artificial
  Synthetic oligonucleotide
aagatccgtcgattggtcgctggctaggtcaatccggatgccaacgcgcc

SEQ ID NO: 229775 - DNA, 50 bp, Artificial
  Synthetic oligonucleotide
ccgcaagcccgtacagctcatcaccgatcatttgcaccccctcgcctgat

SEQ ID NO: 229776 - DNA, 50 bp, Artificial
  Synthetic oligonucleotide
aaaacatgacctcccgggcgcgatttgcaacgtccctctccgtgggggtt

SEQ ID NO: 229777 - DNA, 50 bp, Artificial
  Synthetic oligonucleotide
ccgcaatagatgctggttgggccgtggcacatccgtgggccgatcaacgc

SEQ ID NO: 229778 - DNA, 50 bp, Artificial
  Synthetic oligonucleotide
aagattgaagcaggagggccgtcacctaacacggagggccgcacaccgca

SEQ ID NO: 229779 - DNA, 57 bp, Artificial
  Synthetic oligonucleotide
ttttccgcatcggatgtgtcgaatgggggtctaaattgaggcaaattcgtgccgaat

SEQ ID NO: 229780 - DNA, 50 bp, Artificial
  Synthetic oligonucleotide
attctgtttgcgcagcactgcccccgcattcgagcacaggaaatgcagcg

SEQ ID NO: 229781 - DNA, 50 bp, Artificial
  Synthetic oligonucleotide
ccgcagagtcgcgcaagataccggagaatcgcccattcgaccttccctcg

SEQ ID NO: 229782 - DNA, 50 bp, Artificial
  Synthetic oligonucleotide
agcacgaattttcgtagtttcaaggcaacaaaggcgcgtcgtttgccccg

SEQ ID NO: 229783 - DNA, 50 bp, Artificial
  Synthetic oligonucleotide
aagcaccactcggatcgctcgagatgctgacggcttctgaacgagaggca

SEQ ID NO: 229784 - DNA, 50 bp, Artificial
  Synthetic oligonucleotide
aagcacccctgatcgcaccgacggatcaaacacccagcgtttcgaggtga

SEQ ID NO: 229785 - DNA, 50 bp, Artificial
  Synthetic oligonucleotide
ccgcagattcacgttcagttcacgcggcccatcctagcttcggtgcagca

SEQ ID NO: 229786 - DNA, 50 bp, Artificial
  Synthetic oligonucleotide
aagcagatcaccgccccttgtttcgtcgcgggaacgcgtatcctgacccc

SEQ ID NO: 229787 - DNA, 50 bp, Artificial
  Synthetic oligonucleotide
agcgcgacacgtgaaggccacgaactccgggacagactaacttttcccga

SEQ ID NO: 229788 - DNA, 50 bp, Artificial
  Synthetic oligonucleotide
aaagccattgaccgacgtcgagacagccatcaattggtctgcgccgccga

SEQ ID NO: 229789 - DNA, 50 bp, Artificial
  Synthetic oligonucleotide
aaagcccggtccggctagagctgacacatttcgaggtccagcctacccgc

SEQ ID NO: 229790 - DNA, 59 bp, Artificial
  Synthetic oligonucleotide
ttttggagaaccgtcatgagtaagaagcgagccaccacggctgttatcacccacaagct

SEQ ID NO: 229791 - DNA, 50 bp, Artificial
  Synthetic oligonucleotide
agcgccgtgtgaggaggtttggggaggctggcggagctatccaagctccg

SEQ ID NO: 229792 - DNA, 50 bp, Artificial
  Synthetic oligonucleotide
aaagcgacacatccgactggaggccatatgtccatgccgctcgctgccag

SEQ ID NO: 229793 - DNA, 50 bp, Artificial
  Synthetic oligonucleotide
aaagcgcctgacccggactagatcggagcactggacgcgacgaagcgacc

SEQ ID NO: 229794 - DNA, 50 bp, Artificial
  Synthetic oligonucleotide
ctaccgaacacctaatccgcgagcatctgccttacgtccggcgttttgcc

SEQ ID NO: 229795 - DNA, 50 bp, Artificial
  Synthetic oligonucleotide
aaagcgcgcaccggccatcgttgacctgttaaccgacccgagcagtgagc

SEQ ID NO: 229796 - DNA, 50 bp, Artificial
  Synthetic oligonucleotide
aaagcggagggcatgcatttggccaactggtattcggccgacctgcactt

SEQ ID NO: 229797 - DNA, 50 bp, Artificial
  Synthetic oligonucleotide
aaagcgggacggcgtctgccagccatacgtgccaaagccgacgttggcga

SEQ ID NO: 229798 - DNA, 50 bp, Artificial
  Synthetic oligonucleotide
agcgccaatcccgccgccccattgcaatcccggtcaaactggctcctact

SEQ ID NO: 229799 - DNA, 50 bp, Artificial
  Synthetic oligonucleotide
cacggggatgctgccgtttgcatttgacccgggctttggttttcaacgct

SEQ ID NO: 229800 - DNA, 50 bp, Artificial
  Synthetic oligonucleotide
aaaggaggccgtttgcgtggccttacatccggggaccgtggatacgggtt

SEQ ID NO: 229801 - DNA, 59 bp, Artificial
  Synthetic oligonucleotide
tttttccgcgcattaggctgccaaatagtgaccaactgcctcaggattacccgtcctga

SEQ ID NO: 229802 - DNA, 50 bp, Artificial
  Synthetic oligonucleotide
aaaggcaccagaggggcgcgcggcattgtccaacaacgcttttgaccatc

SEQ ID NO: 229803 - DNA, 50 bp, Artificial
  Synthetic oligonucleotide
agcgcattcaccaatcggactggccgacagcagggatgcgggctgtgcaa

SEQ ID NO: 229804 - DNA, 50 bp, Artificial
  Synthetic oligonucleotide
aaaggccgccgctgaagggctgtagtccccaagcccgaaaccactcataa

SEQ ID NO: 229805 - DNA, 50 bp, Artificial
  Synthetic oligonucleotide
aaaatgccacttgagcccccgcacctgcctctgctaggcggcaagagttg

SEQ ID NO: 229806 - DNA, 50 bp, Artificial
  Synthetic oligonucleotide
agcgcgggtaaggctcggtagcggacgcctgtcggcaggatttggtctcg

SEQ ID NO: 229807 - DNA, 50 bp, Artificial
  Synthetic oligonucleotide
ccacgcggtgcggtcctcccttccctgttgtcatgagcggcgattgagag

SEQ ID NO: 229808 - DNA, 50 bp, Artificial
  Synthetic oligonucleotide
cgtttcgcgccaccagagaggccccttatatcatgaacacccgtcgccct

SEQ ID NO: 229809 - DNA, 50 bp, Artificial
  Synthetic oligonucleotide
aaagaattcgggcatggctcacctgcctcggaacgggactcgaccctgct

SEQ ID NO: 229810 - DNA, 50 bp, Artificial
  Synthetic oligonucleotide
tgtgttgagatagctcttcttaaaccgagcctctgcattccagagggttg

SEQ ID NO: 229811 - DNA, 50 bp, Artificial
  Synthetic oligonucleotide
agctcctcgtcggtttggcgcccactgaacgcccggttgcgggttatgtg

SEQ ID NO: 229812 - DNA, 54 bp, Artificial
  Synthetic oligonucleotide
gatgggggtgcaaattacaccgccgtttcgggcacctattcgttttcgggcaca

SEQ ID NO: 229813 - DNA, 50 bp, Artificial
  Synthetic oligonucleotide
aaagagccggacgactctggaccgggcgcttatacgggagcatgccccaa

SEQ ID NO: 229814 - DNA, 50 bp, Artificial
  Synthetic oligonucleotide
ccacgctttgaaacggggtggacagtttggtgcctccggtggtcccctca

SEQ ID NO: 229815 - DNA, 50 bp, Artificial
  Synthetic oligonucleotide
ccacggtctccgggatagtgctgcgggtgagcttgcagaagcgggctgca

SEQ ID NO: 229816 - DNA, 50 bp, Artificial
  Synthetic oligonucleotide
aaagcaccatccttgccagaccggcgcacacatcgtgcatcttggcaact

SEQ ID NO: 229817 - DNA, 50 bp, Artificial
  Synthetic oligonucleotide
cacgtatccaaggctttcgcacgcagggacgggcctgtggtggcacttga

SEQ ID NO: 229818 - DNA, 50 bp, Artificial
  Synthetic oligonucleotide
agcgtcagccgtgccgctcctccgaggtaggatcaccctgaacgttgctc

SEQ ID NO: 229819 - DNA, 50 bp, Artificial
  Synthetic oligonucleotide
aaagcagacgtggccgcacctagaacgacgtccccattgacttgcacggc

SEQ ID NO: 229820 - DNA, 50 bp, Artificial
  Synthetic oligonucleotide
aaagccaccgcggacaactttttcgcttgaaacgcatccccgcctcgcct

SEQ ID NO: 229821 - DNA, 50 bp, Artificial
  Synthetic oligonucleotide
agcgcgcattccgcgggtcctttcaattgggtcccacgggacttagaccg

SEQ ID NO: 229822 - DNA, 50 bp, Artificial
  Synthetic oligonucleotide
aaaggtcctcgggacccccggtgtgtaaacgggcgctttttcgtgcaagc

SEQ ID NO: 229823 - DNA, 58 bp, Artificial
  Synthetic oligonucleotide
aaacgcgccctcttacacggcggtgttcggggatgcgctcacatcactggccgaagaa

SEQ ID NO: 229824 - DNA, 50 bp, Artificial
  Synthetic oligonucleotide
tggaaatattgcgatagatccccgcgtttttcggaatgtccggatcatgc

SEQ ID NO: 229825 - DNA, 50 bp, Artificial
  Synthetic oligonucleotide
catcgcccgcaaagctttcccgatcaagccgctttccaaaccggcgcaag

SEQ ID NO: 229826 - DNA, 50 bp, Artificial
  Synthetic oligonucleotide
aaaggtcgagcctctgcttgtccacgacaaagcggcccgggtctgatccg

SEQ ID NO: 229827 - DNA, 50 bp, Artificial
  Synthetic oligonucleotide
aaaggtctgcaccatcctgaccggcggaaactgggggctggcggatctag

SEQ ID NO: 229828 - DNA, 50 bp, Artificial
  Synthetic oligonucleotide
cagctatcccctcggccgcgtcatatgggtcgggcttgcgtgtcatgccc

SEQ ID NO: 229829 - DNA, 50 bp, Artificial
  Synthetic oligonucleotide
cgtgaagcccctcggcctgagacaacgaatggggtgccgcatgtgcagat

SEQ ID NO: 229830 - DNA, 50 bp, Artificial
  Synthetic oligonucleotide
aaaggtcttgcgcgtggaggattggctgggcacgagtggaagtgtgagct

SEQ ID NO: 229831 - DNA, 50 bp, Artificial
  Synthetic oligonucleotide
ctatgcatggccctcggacggttctggctatgtctggtggaccaaggggg

SEQ ID NO: 229832 - DNA, 50 bp, Artificial
  Synthetic oligonucleotide
aaagtcacgtatcgcacgtcgtcaggccacgccgacagagggggagtgaa

SEQ ID NO: 229833 - DNA, 50 bp, Artificial
  Synthetic oligonucleotide
aaagtgcgcctgatcccagggccacaaggcgttgtccggcaagagtgaag

SEQ ID NO: 229834 - DNA, 59 bp, Artificial
  Synthetic oligonucleotide
catgggtcttgatgattcgatgggtcttttcacgaatatagcgtgtttcaccatttcgg

SEQ ID NO: 229835 - DNA, 50 bp, Artificial
  Synthetic oligonucleotide
ccagcggtggacgctacattcaggataaccccacgaccgcgcgctttcat

SEQ ID NO: 229836 - DNA, 50 bp, Artificial
  Synthetic oligonucleotide
tgcgctatgggggcgcgtcattccgacatgagaagaggggtccccgatgg

SEQ ID NO: 229837 - DNA, 50 bp, Artificial
  Synthetic oligonucleotide
aaagtgcggcgattgggcgcgcatggtcaaagagtgagcggattgcagac

SEQ ID NO: 229838 - DNA, 50 bp, Artificial
  Synthetic oligonucleotide
tgcgcgggcgggcataatgtggacggttggcgttgcaaatcggtgaactt

SEQ ID NO: 229839 - DNA, 50 bp, Artificial
  Synthetic oligonucleotide
cacgcacaatcatatgaacccgcagaccgtaatccagcgttcgtccatat

SEQ ID NO: 229840 - DNA, 50 bp, Artificial
  Synthetic oligonucleotide
aaatacaaggatggccgcgtcaacccgatgcccggttccaaccttgcgct

SEQ ID NO: 229841 - DNA, 50 bp, Artificial
  Synthetic oligonucleotide
aaaggccgggtcctgttgcgtattgtagacgcctccgtgcaaagcgccct

SEQ ID NO: 229842 - DNA, 50 bp, Artificial
  Synthetic oligonucleotide
aaaggcctgcccgaattttggggtcagcatcgtaacgcggtatgcgtccg

SEQ ID NO: 229843 - DNA, 50 bp, Artificial
  Synthetic oligonucleotide
catcgtcgttctagagagcgggcaggccgcaacggcccccaggaaatgtc

SEQ ID NO: 229844 - DNA, 50 bp, Artificial
  Synthetic oligonucleotide
cgtaggggacacctctgccgcgttgcaaaaacccgcccgccgtggcaatt

SEQ ID NO: 229845 - DNA, 59 bp, Artificial
  Synthetic oligonucleotide
gatctccatgggtactcggtaaggctcgacaagcgacaggcgaactaggcgaagggtga

SEQ ID NO: 229846 - DNA, 50 bp, Artificial
  Synthetic oligonucleotide
aaaggcgcacgcatcataaatccaggtcgcggccccctgattgacgacac

SEQ ID NO: 229847 - DNA, 50 bp, Artificial
  Synthetic oligonucleotide
ctagcgcgtcggtagccagccgtgttgggtttggccaaaagtcatgcgag

SEQ ID NO: 229848 - DNA, 50 bp, Artificial
  Synthetic oligonucleotide
aaaatccgtgtgaaggtcggccaaagggtctcgcgcggggatcaggttgg

SEQ ID NO: 229849 - DNA, 50 bp, Artificial
  Synthetic oligonucleotide
aaaggcgcatctgagcgtcggtttcggatgtaccggagggcaacaccgat

SEQ ID NO: 229850 - DNA, 50 bp, Artificial
  Synthetic oligonucleotide
agcgcatcaagagttcccgtggatggtcaacgccgtcccacggcttaagc

SEQ ID NO: 229851 - DNA, 50 bp, Artificial
  Synthetic oligonucleotide
aaaggcgcgaccattcagttccacggcgacaagtttccgaaccctgccgg

SEQ ID NO: 229852 - DNA, 50 bp, Artificial
  Synthetic oligonucleotide
aaaggcggaacgcgtgcaacgatggaacggggcactgcatttcgcgaaaa

SEQ ID NO: 229853 - DNA, 50 bp, Artificial
  Synthetic oligonucleotide
aaagggagcacgctgatgtttcccaccccgctcgccaagacgtcgcgcca

SEQ ID NO: 229854 - DNA, 50 bp, Artificial
  Synthetic oligonucleotide
aaaggggacagggaatgcgcacgtcgcttgccttttcggttgcacctccc

SEQ ID NO: 229855 - DNA, 50 bp, Artificial
  Synthetic oligonucleotide
tggatcaggtgattgaccgctcaaagcgccttctctctgaactgactgcg

SEQ ID NO: 229856 - DNA, 60 bp, Artificial
  Synthetic oligonucleotide
cgcttattgtggagcgtcttaggctccagacccatatggcgtggtcgttagcatcgaagc

SEQ ID NO: 229857 - DNA, 59 bp, Artificial
  Synthetic oligonucleotide
cagcataaagcgagctctttgcttcgccgtgaatcggcccaagccaccgaacgcgggaa

SEQ ID NO: 229858 - DNA, 50 bp, Artificial
  Synthetic oligonucleotide
aaagggggttgagctcgatacggcaccactcattcacgtgcgcagcccgc

SEQ ID NO: 229859 - DNA, 50 bp, Artificial
  Synthetic oligonucleotide
agcgcagaatggcgcagggcgcagcaacaatacggatggttgcgacggtg

SEQ ID NO: 229860 - DNA, 50 bp, Artificial
  Synthetic oligonucleotide
cacgcctttatgaggcatccccgaatggcacggtcgcaggcaaatcgacc

SEQ ID NO: 229861 - DNA, 50 bp, Artificial
  Synthetic oligonucleotide
aaaccgacggcagaagccagtcggcttatcagaacacgcctgcagaccga

SEQ ID NO: 229862 - DNA, 50 bp, Artificial
  Synthetic oligonucleotide
ttctgcgctcttcgtcagccttctccacagccgaagtcagcgcttgcgcc

SEQ ID NO: 229863 - DNA, 50 bp, Artificial
  Synthetic oligonucleotide
ttctgaataagtccgggattacagggcgcgcggtctgggtttcgatcatt

SEQ ID NO: 229864 - DNA, 50 bp, Artificial
  Synthetic oligonucleotide
cagcatcggggcctcgcagcaaggtatttcgggggccatgcgggtcagac

SEQ ID NO: 229865 - DNA, 50 bp, Artificial
  Synthetic oligonucleotide
catgggcctctcctccgcaagctcgcgcaccccatgatactgggttgcac

SEQ ID NO: 229866 - DNA, 50 bp, Artificial
  Synthetic oligonucleotide
catgggtcaggtccgttcgggtcaaatcagtctggggcgcatcttgcgca

SEQ ID NO: 229867 - DNA, 50 bp, Artificial
  Synthetic oligonucleotide
aaaccgcccgacttgcccgttggtcttgtcttggcgcggtctctgatcgg

SEQ ID NO: 229868 - DNA, 55 bp, Artificial
  Synthetic oligonucleotide
ttcgggatggggggaagtgccgacgggaacgagaatagctattccgcgcttgtcg

SEQ ID NO: 229869 - DNA, 50 bp, Artificial
  Synthetic oligonucleotide
ttcggtttgggtgggcgtttagggcaaaccacaacgaccgcgctgccaga

SEQ ID NO: 229870 - DNA, 50 bp, Artificial
  Synthetic oligonucleotide
aaaccggagagcatgaggggcccaacggtcgctacgggaatggagctcca

SEQ ID NO: 229871 - DNA, 50 bp, Artificial
  Synthetic oligonucleotide
aaacctccttttgccgcgttgcggcctgtcagttccccgcgccctcctct

SEQ ID NO: 229872 - DNA, 50 bp, Artificial
  Synthetic oligonucleotide
aaaccttttcgcaaccagtctgtgccaatctgcccccaaggcggcatcga

SEQ ID NO: 229873 - DNA, 50 bp, Artificial
  Synthetic oligonucleotide
aaacgaccgctgaaaggcctctcacgaacctcttgtcccccggccccaaa

SEQ ID NO: 229874 - DNA, 48 bp, Artificial
  Synthetic oligonucleotide
aaacgaccggcaaaaaccccttccaggacgttcgggttcgcaaagcgg

SEQ ID NO: 229875 - DNA, 50 bp, Artificial
  Synthetic oligonucleotide
agcggttgccttatctatggggcgccagcgaactcgcgtcacaggacaag

SEQ ID NO: 229876 - DNA, 50 bp, Artificial
  Synthetic oligonucleotide
ttcgcgtgtaagaccgacaacgggtgagcttgcatgcagcctagcgcctt

SEQ ID NO: 229877 - DNA, 50 bp, Artificial
  Synthetic oligonucleotide
agcgtagctttatgccgcactcgttggcgctacccaagcgtatggccaga

SEQ ID NO: 229878 - DNA, 50 bp, Artificial
  Synthetic oligonucleotide
cgtgccggtactgagctcggccaacgaatggagcgccgcataaccgccaa

SEQ ID NO: 229879 - DNA, 57 bp, Artificial
  Synthetic oligonucleotide
gatctaccgactctgaaaccccgatagggtgactctgatcccccgtttgagtgactc

SEQ ID NO: 229880 - DNA, 50 bp, Artificial
  Synthetic oligonucleotide
aaaatttcacgaccgttgccgcaggggcaccgattgtccgcctccatgac

SEQ ID NO: 229881 - DNA, 50 bp, Artificial
  Synthetic oligonucleotide
aaacaaagagggccggatgaaaccgaccctgcctgatatctcgcgcccga

SEQ ID NO: 229882 - DNA, 50 bp, Artificial
  Synthetic oligonucleotide
catggaatgcgggcgtgactgctgggacgaatgctttaagataccgagtg

SEQ ID NO: 229883 - DNA, 50 bp, Artificial
  Synthetic oligonucleotide
agcgggtggtccgacatggcttaaccaagacgcagcttccggccccggtc

SEQ ID NO: 229884 - DNA, 50 bp, Artificial
  Synthetic oligonucleotide
ttgcctcgccggacaccggaacaaatatcacggtcgatcacggggtcagc

SEQ ID NO: 229885 - DNA, 50 bp, Artificial
  Synthetic oligonucleotide
agctccgggggagagaaacaccgctattggcgcactcggcgtgccttcaa

SEQ ID NO: 229886 - DNA, 50 bp, Artificial
  Synthetic oligonucleotide
aaacaccccggaaccaccgccgggtagaaggcgcaagttcacgacatcaa

SEQ ID NO: 229887 - DNA, 50 bp, Artificial
  Synthetic oligonucleotide
agcgggtgagggctgcttgcacttgggggcaaaaggcgggtaaagctagt

SEQ ID NO: 229888 - DNA, 50 bp, Artificial
  Synthetic oligonucleotide
catggctctggctcctgcgttgtgatgatgcgccttgccctagccgcccc

SEQ ID NO: 229889 - DNA, 50 bp, Artificial
  Synthetic oligonucleotide
aaacacgcgcgccctcgtccgttagttgaaatgggggtcgtgtccacact

SEQ ID NO: 229890 - DNA, 59 bp, Artificial
  Synthetic oligonucleotide
gatcgatgggatcaccacgggccggaccgatggggcgctggtccgattgaccactctta

SEQ ID NO: 229891 - DNA, 50 bp, Artificial
  Synthetic oligonucleotide
aaacaggcggcgtggcgaactgatccgacccgctctggcattggtggctc

SEQ ID NO: 229892 - DNA, 50 bp, Artificial
  Synthetic oligonucleotide
aaacaggctttcgcggacccattttacaggcccctgcgcggttggcgggg

SEQ ID NO: 229893 - DNA, 50 bp, Artificial
  Synthetic oligonucleotide
aaacatggcagacgcgagtgcgatcaacactgcgccaacccctgtcgcca

SEQ ID NO: 229894 - DNA, 50 bp, Artificial
  Synthetic oligonucleotide
agcgggcaggccgcaacggcccccaggaaatgtcaggagtgatcctatga

SEQ ID NO: 229895 - DNA, 50 bp, Artificial
  Synthetic oligonucleotide
aaaccacgaaaccgcctgtctcgacgccgtgggtggatttggtgacggcc

SEQ ID NO: 229896 - DNA, 50 bp, Artificial
  Synthetic oligonucleotide
aaaccctgcccaacaggtcattcgtcaccccgacatagagcgtaccgccc

SEQ ID NO: 229897 - DNA, 50 bp, Artificial
  Synthetic oligonucleotide
agcggtgtgaccgttaaccattcctaaaccggcgccatggcagcaaggtc

SEQ ID NO: 229898 - DNA, 50 bp, Artificial
  Synthetic oligonucleotide
aaacgggcgtatggaagtgcactcgggagggacggcttttcctctggagc

SEQ ID NO: 229899 - DNA, 50 bp, Artificial
  Synthetic oligonucleotide
cagcggccgcgagcgacctgaagcgacggtgcctctgatcctgttcgaga

SEQ ID NO: 229900 - DNA, 50 bp, Artificial
  Synthetic oligonucleotide
ttggccatcgccctgaattttataatcaccctaccacaacaacttacccc

SEQ ID NO: 229901 - DNA, 60 bp, Artificial
  Synthetic oligonucleotide
gaatatgcgcactgatatatcacgagatgcatcaagagggatcgctctccgtggcaagct

SEQ ID NO: 229902 - DNA, 50 bp, Artificial
  Synthetic oligonucleotide
aaacggggccacgcatgggccggaaggttcgaaaaccggtcgggatataa

SEQ ID NO: 229903 - DNA, 50 bp, Artificial
  Synthetic oligonucleotide
aaacggggttgtttgaacgcactctggcggaggtcggtttgcaggcggtc

SEQ ID NO: 229904 - DNA, 50 bp, Artificial
  Synthetic oligonucleotide
aaacgggtgtgtctgccccaccggccgctgtagccaaggcccccgacgat

SEQ ID NO: 229905 - DNA, 50 bp, Artificial
  Synthetic oligonucleotide
aaacgtcagggcactgcctcgggccattccgaacctgcatgcctgttcgt

SEQ ID NO: 229906 - DNA, 50 bp, Artificial
  Synthetic oligonucleotide
ttatacttagtgttgcgatagtatattttcgtatgtatgctgaggtctgt

SEQ ID NO: 229907 - DNA, 50 bp, Artificial
  Synthetic oligonucleotide
aaacgtgcatcgcacgggccttgcaaaacaagtcaggggcagcctaccag

SEQ ID NO: 229908 - DNA, 50 bp, Artificial
  Synthetic oligonucleotide
cgttgacagagccgcccaccggcaatgacctgtgagcgatcttcctcggt

SEQ ID NO: 229909 - DNA, 50 bp, Artificial
  Synthetic oligonucleotide
aaaatgctcccccggggcctcatcaaccggcggaatacacatcagaccga

SEQ ID NO: 229910 - DNA, 50 bp, Artificial
  Synthetic oligonucleotide
agcggaccgaaggtaggaaacgggcaaaccagattccgacctcgccacca

SEQ ID NO: 229911 - DNA, 50 bp, Artificial
  Synthetic oligonucleotide
cgtcactggcgcccggcactcatttcaaccgcccgacctgttcagatcat

SEQ ID NO: 229912 - DNA, 57 bp, Artificial
  Synthetic oligonucleotide
gaatgaatgcgaaagagggcagggcgcggtaaaagtctatttccacgaatatctacg

SEQ ID NO: 229913 - DNA, 50 bp, Artificial
  Synthetic oligonucleotide
aaactgcgacaaaggaccggcgcagtgcctgacgggaatcgcacagagat

SEQ ID NO: 229914 - DNA, 50 bp, Artificial
  Synthetic oligonucleotide
cacgtcgcgcgcatgccacggagcaacgctaaccatgtgaggctctgagt

SEQ ID NO: 229915 - DNA, 50 bp, Artificial
  Synthetic oligonucleotide
aaactgcgccgcagggaggccctcaacttgcgtcctcctcggttagccgt

SEQ ID NO: 229916 - DNA, 50 bp, Artificial
  Synthetic oligonucleotide
aaactggtagcgtggacaggcacgaaaccgctctcgcagcaatggcacct

SEQ ID NO: 229917 - DNA, 50 bp, Artificial
  Synthetic oligonucleotide
aaactgtcgtaggacaaggcgtgcatgccgcaacaaggcgtcacccgacg

SEQ ID NO: 229918 - DNA, 50 bp, Artificial
  Synthetic oligonucleotide
aaacgagcttggcggctctttgtcaatcccgttaccggaccgcctcggga

SEQ ID NO: 229919 - DNA, 50 bp, Artificial
  Synthetic oligonucleotide
cattcacaagaaaacgttgtctgtacacttcactagcggcccattccgga

SEQ ID NO: 229920 - DNA, 50 bp, Artificial
  Synthetic oligonucleotide
agcggcggaggcctagatgtcgtttcagcccgttctgcccctgtccggct

SEQ ID NO: 229921 - DNA, 50 bp, Artificial
  Synthetic oligonucleotide
ttcgatagtggcgagcttgcgtgacgcatctgtgaaccggggtgaagcga

SEQ ID NO: 229922 - DNA, 50 bp, Artificial
  Synthetic oligonucleotide
aaacgcgggggaggaatcagatggcagagcgaccgacagaggcacgccat

SEQ ID NO: 229923 - DNA, 60 bp, Artificial
  Synthetic oligonucleotide
agaaagccgaaggcacctgcacccgctcctcccatctgcctgtcatcctcactgtgtcgg

SEQ ID NO: 229924 - DNA, 50 bp, Artificial
  Synthetic oligonucleotide
cattgggcccggtcgggcaagagtaaagggcaagcgggggcgcctcaagc

SEQ ID NO: 229925 - DNA, 50 bp, Artificial
  Synthetic oligonucleotide
aaacgcttgcctgtgcggtcaatgctcacaagacgggccgggaacacccc

SEQ ID NO: 229926 - DNA, 50 bp, Artificial
  Synthetic oligonucleotide
agctccgtgctctccagtgcccgcaatttgcgcgacagatccgcagcaga

SEQ ID NO: 229927 - DNA, 50 bp, Artificial
  Synthetic oligonucleotide
cgtgtgctaccccacggtgcggcggtctcatctgacaacctagccccggc

SEQ ID NO: 229928 - DNA, 50 bp, Artificial
  Synthetic oligonucleotide
aaacggacagggacagcgtttgccggagtgacgggtgtgagaccgtgagc

SEQ ID NO: 229929 - DNA, 50 bp, Artificial
  Synthetic oligonucleotide
ttcattgaggtcgtgctctgtcgcaacgtcgtaatcgaacccgttgtgat

SEQ ID NO: 229930 - DNA, 50 bp, Artificial
  Synthetic oligonucleotide
agcggatctgtcacggttcgcaccgacgaggctttgagcatcccgtacga

SEQ ID NO: 229931 - DNA, 50 bp, Artificial
  Synthetic oligonucleotide
aaacggcacatcggtctctgccagaatgcggaaaccctccgggtcaaggg

SEQ ID NO: 229932 - DNA, 50 bp, Artificial
  Synthetic oligonucleotide
aaacggctatagcaccgcggtcataacccctgcctccggtcggctcgtat

SEQ ID NO: 229933 - DNA, 50 bp, Artificial
  Synthetic oligonucleotide
aaaatggagggcgtaagttatggcgcccaagcgtcccaaaggtgcgggcg

SEQ ID NO: 229934 - DNA, 54 bp, Artificial
  Synthetic oligonucleotide
aaacccgcccaagacggtgagattcaaccgacttccgactatccgaaagcgatg

SEQ ID NO: 229935 - DNA, 50 bp, Artificial
  Synthetic oligonucleotide
cacttatgatttggagcagtccagcggttcagcagtccagcgtaaccctg

SEQ ID NO: 229936 - DNA, 50 bp, Artificial
  Synthetic oligonucleotide
aaacgggcccttgatagcggtgcggctcaacatactgacccgcaaaaccc

SEQ ID NO: 229937 - DNA, 50 bp, Artificial
  Synthetic oligonucleotide
cccatgtgcgcaccgatgcgacggaatatgcccagttcggtaccacgctg

SEQ ID NO: 229938 - DNA, 50 bp, Artificial
  Synthetic oligonucleotide
agccgcgtgtaagatggcacccccatctgtcttccatcaggctgcaaccc

SEQ ID NO: 229939 - DNA, 50 bp, Artificial
  Synthetic oligonucleotide
ccccaacggcttggtgttcaaaccggtgagccgtattcgataactgacga

SEQ ID NO: 229940 - DNA, 50 bp, Artificial
  Synthetic oligonucleotide
aaccccaagatccgaggttcaagacccacccctcaagccccgtggtccgt

SEQ ID NO: 229941 - DNA, 50 bp, Artificial
  Synthetic oligonucleotide
agccgcgccttgtaggacgtgaccggcgcaccaatcaacctcgcgattcc

SEQ ID NO: 229942 - DNA, 50 bp, Artificial
  Synthetic oligonucleotide
aaccccagccccaatccacacctgaggatcccgaccacggggcatcgaaa

SEQ ID NO: 229943 - DNA, 50 bp, Artificial
  Synthetic oligonucleotide
agccgattgacggagccgtgatgagcttggatacccctgccgcaaccaaa

SEQ ID NO: 229944 - DNA, 50 bp, Artificial
  Synthetic oligonucleotide
caataggtgcaaggaacataggctctgcagttcggctgtgcacaccgttc

SEQ ID NO: 229945 - DNA, 60 bp, Artificial
  Synthetic oligonucleotide
ttgaaccccgcgcgcgcttggcataagggtgggacagaagcgcgggagacggccatgaca

SEQ ID NO: 229946 - DNA, 50 bp, Artificial
  Synthetic oligonucleotide
aaccccctgtgccagtcgcccaaacacgcgcccaacaccggttaccgtgc

SEQ ID NO: 229947 - DNA, 50 bp, Artificial
  Synthetic oligonucleotide
ccccgacgatgcacacccgcgaagagacgaaaggtcacgacgagcatggc

SEQ ID NO: 229948 - DNA, 50 bp, Artificial
  Synthetic oligonucleotide
aaccccggcaagagcctgttgaacttctctgccccaatccgatgcggcat

SEQ ID NO: 229949 - DNA, 50 bp, Artificial
  Synthetic oligonucleotide
aaccccgtagatcacatccccaggcaccatattgcgcagctcggcagagg

SEQ ID NO: 229950 - DNA, 50 bp, Artificial
  Synthetic oligonucleotide
aaccccgtcatcgctgacccttatggccccgctgcggcagagacttggat

SEQ ID NO: 229951 - DNA, 50 bp, Artificial
  Synthetic oligonucleotide
aacccctcgcggtcctgtgtcgtttccggggtcatggtgacatggggcag

SEQ ID NO: 229952 - DNA, 50 bp, Artificial
  Synthetic oligonucleotide
aacccgagcctagagggaggggcagcccatgtccgggatcacattacggg

SEQ ID NO: 229953 - DNA, 50 bp, Artificial
  Synthetic oligonucleotide
aacccgatggtggccgacaaattggtcaattgcgcttccagcgaggggac

SEQ ID NO: 229954 - DNA, 50 bp, Artificial
  Synthetic oligonucleotide
aacatcgagtcaacgagttgcgaggcggcgttccagttgcccccaacgat

SEQ ID NO: 229955 - DNA, 50 bp, Artificial
  Synthetic oligonucleotide
agcctccacgcggcctccacgaaagttgcaggtttgcccaaggtttcaac

SEQ ID NO: 229956 - DNA, 60 bp, Artificial
  Synthetic oligonucleotide
gatatgcagagcgtctgacgcctgtggccccgaatgttgcggcctcgcgcagtaatgtct

SEQ ID NO: 229957 - DNA, 50 bp, Artificial
  Synthetic oligonucleotide
aacatgccgaagtttgcatcgcacaagaccagcgtctcagcaccagcgcg

SEQ ID NO: 229958 - DNA, 50 bp, Artificial
  Synthetic oligonucleotide
aacatgtcgctggcccttctgtcgtccccatgccccctgtcacttggggc

SEQ ID NO: 229959 - DNA, 50 bp, Artificial
  Synthetic oligonucleotide
tcttctcttggctgacaggccaaacacctgtggtgtttcgcgcgccctac

SEQ ID NO: 229960 - DNA, 50 bp, Artificial
  Synthetic oligonucleotide
aaccaagacgcagcttccggccccggtctggatctgcaacgaaaggtaga

SEQ ID NO: 229961 - DNA, 50 bp, Artificial
  Synthetic oligonucleotide
aaaagaaccgatggcctggggccacatgcgttccggatgcacaaacaggg

SEQ ID NO: 229962 - DNA, 50 bp, Artificial
  Synthetic oligonucleotide
aaccaccccacccgcaacaaggattggtccgcgtcctatggcacgacctg

SEQ ID NO: 229963 - DNA, 50 bp, Artificial
  Synthetic oligonucleotide
agctggatcgtgatcaagccttacggcgcggggcattacattcaggggct

SEQ ID NO: 229964 - DNA, 50 bp, Artificial
  Synthetic oligonucleotide
cccagctcttgctgacctcacaacgtgctcctgccagagacggctggtag

SEQ ID NO: 229965 - DNA, 50 bp, Artificial
  Synthetic oligonucleotide
aaccaccggctcgtgctacgctcgatgcaaatcaacaaggcgactccgcg

SEQ ID NO: 229966 - DNA, 50 bp, Artificial
  Synthetic oligonucleotide
aaccacgtgctaggcgactgcgaactttcctgaccgttgggaccgtaccg

SEQ ID NO: 229967 - DNA, 60 bp, Artificial
  Synthetic oligonucleotide
tagcgaggctgcttatcgtgacgggtctacgcattggagagctgacttcgctccgtgtgt

SEQ ID NO: 229968 - DNA, 60 bp, Artificial
  Synthetic oligonucleotide
ttgcactgggtaagaacagggtggagtggacaccccttgctgacatcacccgagctgatg

SEQ ID NO: 229969 - DNA, 50 bp, Artificial
  Synthetic oligonucleotide
aaccagcgatttgggttcgggaaccggaagggacggagaagccgatggtg

SEQ ID NO: 229970 - DNA, 50 bp, Artificial
  Synthetic oligonucleotide
tctgcgcaggatatcacgccgataagaacccatccctgacggtgttggaa

SEQ ID NO: 229971 - DNA, 50 bp, Artificial
  Synthetic oligonucleotide
tctgcagcgaactggatggctcgcgcaacaatcattggctccgtaagcct

SEQ ID NO: 229972 - DNA, 50 bp, Artificial
  Synthetic oligonucleotide
aaccagtctgtgccaatctgcccccaaggcggcatcgattcggtcaggca

SEQ ID NO: 229973 - DNA, 50 bp, Artificial
  Synthetic oligonucleotide
aaccctgcgccgaatatgtgatgccagtccgcctcgcttcgggttgtgat

SEQ ID NO: 229974 - DNA, 50 bp, Artificial
  Synthetic oligonucleotide
tcgcggcaagtagcggctgagcattggcgacaactgtagcgagtccggga

SEQ ID NO: 229975 - DNA, 50 bp, Artificial
  Synthetic oligonucleotide
aaccctgtgatcgccgtcagaagggccgcaacccacaggagcacttgccc

SEQ ID NO: 229976 - DNA, 50 bp, Artificial
  Synthetic oligonucleotide
ccccgtcgttcttgccacggcagtcgcactgggacatgacccggacgcac

SEQ ID NO: 229977 - DNA, 50 bp, Artificial
  Synthetic oligonucleotide
agcccgcatctttgcgcgtgcagcctgtccgatgtacgtggtacacgaaa

SEQ ID NO: 229978 - DNA, 50 bp, Artificial
  Synthetic oligonucleotide
aaccgaaattcgcccggtatcgatgaccgactgagcgtgccccttggagc

SEQ ID NO: 229979 - DNA, 60 bp, Artificial
  Synthetic oligonucleotide
gatacgatcatactgggctctgatgactatcgattaatttctctcggaaatagtgtattg

SEQ ID NO: 229980 - DNA, 50 bp, Artificial
  Synthetic oligonucleotide
aaccgaccgaggcagcatgtggatcatgtgaacggccgaccggcccagac

SEQ ID NO: 229981 - DNA, 50 bp, Artificial
  Synthetic oligonucleotide
aaccgatcgtaaacgcaggcggcgaacagtcttctggccacgcggaacat

SEQ ID NO: 229982 - DNA, 50 bp, Artificial
  Synthetic oligonucleotide
aaccgcccattgtcccactggctgtcattccatggcacgccagcctcata

SEQ ID NO: 229983 - DNA, 50 bp, Artificial
  Synthetic oligonucleotide
caagccgggcttgcgatgcggggcgttctgccgcagtgtgaagacttgat

SEQ ID NO: 229984 - DNA, 50 bp, Artificial
  Synthetic oligonucleotide
aaccgcgtatgctgtccacgctacggcatagagaccgagtgctgccgcca

SEQ ID NO: 229985 - DNA, 50 bp, Artificial
  Synthetic oligonucleotide
aaccggaccgcctacatagcgcccatagggtgaggtctcagcggtggaaa

SEQ ID NO: 229986 - DNA, 50 bp, Artificial
  Synthetic oligonucleotide
agccccttgcaatactgctcgttttggccagcttcgtcgcatcccgttgg

SEQ ID NO: 229987 - DNA, 50 bp, Artificial
  Synthetic oligonucleotide
aaccggcgtagccaccactgtaacgcgaaaggcaggcatcgtaagcggcc

SEQ ID NO: 229988 - DNA, 50 bp, Artificial
  Synthetic oligonucleotide
aaccgggcgctgtcgtagtaggcacgggtgtgaaccgtgtcctgcatctt

SEQ ID NO: 229989 - DNA, 50 bp, Artificial
  Synthetic oligonucleotide
tttcgatttccttcccacgcgggcagagctcgacctcatgggctgggacg

SEQ ID NO: 229990 - DNA, 56 bp, Artificial
  Synthetic oligonucleotide
actttcatcccgcgcgcacaataaaaagcttgctcggtcgactttgtttgttaagc

SEQ ID NO: 229991 - DNA, 50 bp, Artificial
  Synthetic oligonucleotide
agccgaccgatcaaactgacgctgcaatgacgcagatcggggaagacgct

SEQ ID NO: 229992 - DNA, 50 bp, Artificial
  Synthetic oligonucleotide
aacccgcacggcgcttaccccgccttttcgaaacctgacataggccgcat

SEQ ID NO: 229993 - DNA, 50 bp, Artificial
  Synthetic oligonucleotide
tcgtcggcacgcgtccactctggcgtggatctggttcgatagctgtgcgt

SEQ ID NO: 229994 - DNA, 50 bp, Artificial
  Synthetic oligonucleotide
caagggagaatcccgggtgcgccgagtcagtcgaattccagaccaggcgg

SEQ ID NO: 229995 - DNA, 50 bp, Artificial
  Synthetic oligonucleotide
aacccgcgaatatcgttgtgccttttgcccggacgccgagtgcgatagcc

SEQ ID NO: 229996 - DNA, 50 bp, Artificial
  Synthetic oligonucleotide
tcggtgtcagcttgacaaggagcgccgacatgaacctccccacgccgatc

SEQ ID NO: 229997 - DNA, 50 bp, Artificial
  Synthetic oligonucleotide
agccgacaagagctgtacctgcggctgtgtcgccccgcatatgaagagtg

SEQ ID NO: 229998 - DNA, 50 bp, Artificial
  Synthetic oligonucleotide
agcccggtctttaggggcatcgcccgcacaagtcaattcatccgcgcggg

SEQ ID NO: 229999 - DNA, 50 bp, Artificial
  Synthetic oligonucleotide
aacccgcgatgtgatagggttgcttgtggccgtcaaacgggctgatgggt

SEQ ID NO: 230000 - DNA, 50 bp, Artificial
  Synthetic oligonucleotide
catcaagcttctctcgcgcggccattcccgaacgatatgaggcgtttcaa

SEQ ID NO: 230001 - DNA, 55 bp, Artificial
  Synthetic oligonucleotide
gagggcagtgaatgaaattttcctcgtgcccgtcccagttccacccggtggagcc

SEQ ID NO: 230002 - DNA, 50 bp, Artificial
  Synthetic oligonucleotide
aacccgggtcctggcgactatccgacgaggggaggtcgtttatcaagccg

SEQ ID NO: 230003 - DNA, 50 bp, Artificial
  Synthetic oligonucleotide
aacccgggtgagggcatttatccggccactcccgactatgtgcatgcact

SEQ ID NO: 230004 - DNA, 50 bp, Artificial
  Synthetic oligonucleotide
aacccgtgttacccggattccctcttatctgtctccccgtcggaccggcc

SEQ ID NO: 230005 - DNA, 50 bp, Artificial
  Synthetic oligonucleotide
aaccctacacgccagcgaacggaaacccctgctttggtcgtttggggtta

SEQ ID NO: 230006 - DNA, 50 bp, Artificial
  Synthetic oligonucleotide
tcgctgccccagctcgggctcctgaacacttgctctcacctcagtcaggg

SEQ ID NO: 230007 - DNA, 50 bp, Artificial
  Synthetic oligonucleotide
aaccctcaatgggtcatcccaacgctgcatcgcgtcgatccaggatcggc

SEQ ID NO: 230008 - DNA, 50 bp, Artificial
  Synthetic oligonucleotide
aaccctgccgttaccacaccgacataggtcgccggacttccgacgggcag

SEQ ID NO: 230009 - DNA, 50 bp, Artificial
  Synthetic oligonucleotide
aaatgcgccgcatagacctttggagcttcaacacacggcaagtggcccgc

SEQ ID NO: 230010 - DNA, 50 bp, Artificial
  Synthetic oligonucleotide
tgcagcgtcatggccgtttatgacctaagtttccggcacccacccaccct

SEQ ID NO: 230011 - DNA, 50 bp, Artificial
  Synthetic oligonucleotide
aaatgctgacgcctcgggacctgtcggacatggcactcaaccggtgctac

SEQ ID NO: 230012 - DNA, 60 bp, Artificial
  Synthetic oligonucleotide
ttgcctagtctgcgaagactaatgttcagcgtcgagtaccaccagccagtgttgtggcgg

SEQ ID NO: 230013 - DNA, 50 bp, Artificial
  Synthetic oligonucleotide
ccatcgcgtgcggtcggggtaatcgagaaccgtaaggtctctcccatggc

SEQ ID NO: 230014 - DNA, 50 bp, Artificial
  Synthetic oligonucleotide
aaatggaccatgcccgctgtctggaagtacagcgcccgtaccttggcccg

SEQ ID NO: 230015 - DNA, 50 bp, Artificial
  Synthetic oligonucleotide
aaatggggccaatccccgggccagaacggtactcggccagtactgagcgc

SEQ ID NO: 230016 - DNA, 50 bp, Artificial
  Synthetic oligonucleotide
aaatggtctaccggatgagcgtgagcggcctggggaacgaggctgttgtg

SEQ ID NO: 230017 - DNA, 50 bp, Artificial
  Synthetic oligonucleotide
aaatgtcgaccgctacccacgagccgagccgaccgctagcgcagactcta

SEQ ID NO: 230018 - DNA, 50 bp, Artificial
  Synthetic oligonucleotide
ccatgccctcccgattaatccgccgccccttggggagacgacgaatggcg

SEQ ID NO: 230019 - DNA, 50 bp, Artificial
  Synthetic oligonucleotide
aaatgtcgcaggggcttagtgcacgttgaccggtgccaggtcgttctgcc

SEQ ID NO: 230020 - DNA, 50 bp, Artificial
  Synthetic oligonucleotide
caggaaaagtctggtgccgggtttcgctcaccgacaggcccgaggtctcg

SEQ ID NO: 230021 - DNA, 50 bp, Artificial
  Synthetic oligonucleotide
aaattaccgccagacgtggcaccgcgcaccgatagggtcgcgattgtcag

SEQ ID NO: 230022 - DNA, 50 bp, Artificial
  Synthetic oligonucleotide
aaattcgcgcagtcggcaccaaacccctctggcccccggcccgatccttg

SEQ ID NO: 230023 - DNA, 58 bp, Artificial
  Synthetic oligonucleotide
acttgcgcctggttgcatacccgagccctgataaggccgctacgggcaacatttccgc

SEQ ID NO: 230024 - DNA, 50 bp, Artificial
  Synthetic oligonucleotide
aaattcttagtctccgtttctcgggccgactgaggcccagtggcgggggc

SEQ ID NO: 230025 - DNA, 50 bp, Artificial
  Synthetic oligonucleotide
agcgatcccttgccggtcagagtgacgcgggaccgatggtttgtggtgca

SEQ ID NO: 230026 - DNA, 50 bp, Artificial
  Synthetic oligonucleotide
caccgaaggatccaatgccctcccttgatgaaccatgcggcccgggcatt

SEQ ID NO: 230027 - DNA, 50 bp, Artificial
  Synthetic oligonucleotide
aacaacctttcacgcgatccctgtcgggcatcacgatcccagagggcgtg

SEQ ID NO: 230028 - DNA, 50 bp, Artificial
  Synthetic oligonucleotide
ccagtagggtgcgaattcggaagttcttatgcacgatggggcgaacatcg

SEQ ID NO: 230029 - DNA, 50 bp, Artificial
  Synthetic oligonucleotide
ccagtctcctctgagtagggatagtccaccaatcgccctagaatctcagc

SEQ ID NO: 230030 - DNA, 50 bp, Artificial
  Synthetic oligonucleotide
agctgcagggaacttcccccactgccggatagtgcacaagccgtcgcctt

SEQ ID NO: 230031 - DNA, 50 bp, Artificial
  Synthetic oligonucleotide
aaatcccccggcctgacaaccctgacgcttttggacgctgcagggcagtt

SEQ ID NO: 230032 - DNA, 50 bp, Artificial
  Synthetic oligonucleotide
aaatccgcatgcgcagaccgatacaagagcggttgcacgggggacgggcg

SEQ ID NO: 230033 - DNA, 50 bp, Artificial
  Synthetic oligonucleotide
aaatccgcgcgtcgtccaggggcaattgaccccagttctcgttccaaccc

SEQ ID NO: 230034 - DNA, 56 bp, Artificial
  Synthetic oligonucleotide
acttactggacgccggcccgaaatcagtccggcgatacaaccacgagttgcattcc

SEQ ID NO: 230035 - DNA, 50 bp, Artificial
  Synthetic oligonucleotide
aaatccgtgtcttgcccccttgcaaatgccgccacgacggtttaaccccc

SEQ ID NO: 230036 - DNA, 50 bp, Artificial
  Synthetic oligonucleotide
aaatcggaacatctgccgtgcaaagccgtgcgacgggtggcgtggcgtta

SEQ ID NO: 230037 - DNA, 50 bp, Artificial
  Synthetic oligonucleotide
aaatcgtcgcacggagcgtttcttcatcagcccgtaagcgctgcaagcgg

SEQ ID NO: 230038 - DNA, 50 bp, Artificial
  Synthetic oligonucleotide
agctggatcccgatgagaccttgccgtccctctatgaccgggaatcggct

SEQ ID NO: 230039 - DNA, 50 bp, Artificial
  Synthetic oligonucleotide
cacgcaacggaaatgggcgaaccttggcaaagggcgttcaggcaagctca

SEQ ID NO: 230040 - DNA, 50 bp, Artificial
  Synthetic oligonucleotide
aaatctcgctggcgtggaacggtcaactcacgtgctcgttgggccgctcc

SEQ ID NO: 230041 - DNA, 50 bp, Artificial
  Synthetic oligonucleotide
aaaagctgccacggaatctgccaccttcagccggcaactcgtccaaagct

SEQ ID NO: 230042 - DNA, 50 bp, Artificial
  Synthetic oligonucleotide
cacgatagcaccgcttcggaccgcaacaaacggcgtggattgacgcagtt

SEQ ID NO: 230043 - DNA, 50 bp, Artificial
  Synthetic oligonucleotide
aaatgagcgtcccacttcagcgtttgcggcggcaagacggacaggaggcc

SEQ ID NO: 230044 - DNA, 50 bp, Artificial
  Synthetic oligonucleotide
ccatccgcaccaaagcgatcagatacagcacccacggagccaggaccgcc

SEQ ID NO: 230045 - DNA, 58 bp, Artificial
  Synthetic oligonucleotide
gagcttgtttccccgatgtgattgcctccgtaaggtgttggagtgtaagggcttgcac

SEQ ID NO: 230046 - DNA, 50 bp, Artificial
  Synthetic oligonucleotide
cggtttagtttgccagaccctagccgcgccgatctcggttgaaaagccgc

SEQ ID NO: 230047 - DNA, 50 bp, Artificial
  Synthetic oligonucleotide
agcctcgttccgcagcccattgccggaaagtcgaacgcagaccatgtggt

SEQ ID NO: 230048 - DNA, 50 bp, Artificial
  Synthetic oligonucleotide
tgacggtcggattgatgaactcgtaatgcgacagcattcccgagatccgg

SEQ ID NO: 230049 - DNA, 50 bp, Artificial
  Synthetic oligonucleotide
caccctatctagagcgatggcgggttctgcccctctcgtgcgtggtcctt

SEQ ID NO: 230050 - DNA, 50 bp, Artificial
  Synthetic oligonucleotide
aacagccaccgcctaaacgaaacagggcgggataagcggacgggcacgtg

SEQ ID NO: 230051 - DNA, 50 bp, Artificial
  Synthetic oligonucleotide
aacagcgagacaccgccaagcgctgtgaccgtgccctccccttgaccgta

SEQ ID NO: 230052 - DNA, 50 bp, Artificial
  Synthetic oligonucleotide
aacagcggacattggtgcgcctttcgtgcgggaatgtttggggtaccctc

SEQ ID NO: 230053 - DNA, 50 bp, Artificial
  Synthetic oligonucleotide
aacagctgtgatgatcctgtcactcggcatcgaaacccccgcctctgccc

SEQ ID NO: 230054 - DNA, 50 bp, Artificial
  Synthetic oligonucleotide
aaaagcaaggcgcccctgccagaggttttgtagggaggctggcaagccat

SEQ ID NO: 230055 - DNA, 50 bp, Artificial
  Synthetic oligonucleotide
aacaggacaggactggcgatgaataggagaggctctgtgccgcagcaggc

SEQ ID NO: 230056 - DNA, 60 bp, Artificial
  Synthetic oligonucleotide
gagccacccacgagcgggtgaagcgggtctatgcccatatcagcgacccggaagcctctg

SEQ ID NO: 230057 - DNA, 50 bp, Artificial
  Synthetic oligonucleotide
cacccccgcccgacttgccctatcactgcggcaaagcgatgggacaagcg

SEQ ID NO: 230058 - DNA, 50 bp, Artificial
  Synthetic oligonucleotide
aacaggcacgctggtgatgtccaatcgcgcttatgcagccctttggctgg

SEQ ID NO: 230059 - DNA, 50 bp, Artificial
  Synthetic oligonucleotide
aacaggggcgttcggaccatgacccttcggccaccccgcttcgagaatgc

SEQ ID NO: 230060 - DNA, 50 bp, Artificial
  Synthetic oligonucleotide
cacccaagcgtctagggggcagcgcaaaaaccaagcgtcagcggtacaca

SEQ ID NO: 230061 - DNA, 50 bp, Artificial
  Synthetic oligonucleotide
caccagtgacagagtggcggccaattgcggggttttgccccgtcacaccc

SEQ ID NO: 230062 - DNA, 50 bp, Artificial
  Synthetic oligonucleotide
aacagtcaaaccggaccaccagattggggcacgccactcgaacaggaggc

SEQ ID NO: 230063 - DNA, 50 bp, Artificial
  Synthetic oligonucleotide
aacatccataggacgcccttgcccgatgcggcactccctgcgctggtgtg

SEQ ID NO: 230064 - DNA, 50 bp, Artificial
  Synthetic oligonucleotide
caccaccctgatatgagcgtttcgggcggcgacatacagcccaccgaaga

SEQ ID NO: 230065 - DNA, 50 bp, Artificial
  Synthetic oligonucleotide
aacatccgagaccgtgaggaccgtacctgccccaacgattgcattggccc

SEQ ID NO: 230066 - DNA, 50 bp, Artificial
  Synthetic oligonucleotide
aacaaggcacggccaatgggtacagtgcccggctgaagggaagagcaaat

SEQ ID NO: 230067 - DNA, 60 bp, Artificial
  Synthetic oligonucleotide
agcgagccaccacggctgttatcacccacaagctttatgcacagtggcccgggcagcctg

SEQ ID NO: 230068 - DNA, 50 bp, Artificial
  Synthetic oligonucleotide
agcctttcccggtcgcagtcggacccgacactatgccacgcatggcccga

SEQ ID NO: 230069 - DNA, 50 bp, Artificial
  Synthetic oligonucleotide
aacaagttgctctgagccgacaagcccgaaacggggcgccttgtgaagca

SEQ ID NO: 230070 - DNA, 50 bp, Artificial
  Synthetic oligonucleotide
ccattggcccgtcgcctatccttgcagacccgctcttcgacaccgcattg

SEQ ID NO: 230071 - DNA, 50 bp, Artificial
  Synthetic oligonucleotide
aacacatccgtcaccgagccagtccggagcagcaagggcttaccaaggcg

SEQ ID NO: 230072 - DNA, 50 bp, Artificial
  Synthetic oligonucleotide
aacaccagcgaaggcctgcaaacggtcactgcctttggactgttggcgga

SEQ ID NO: 230073 - DNA, 50 bp, Artificial
  Synthetic oligonucleotide
aacacccgccaaccgtaagaagggtgtcgcacctgccaaggcatcgttca

SEQ ID NO: 230074 - DNA, 50 bp, Artificial
  Synthetic oligonucleotide
aacaccctacgaccggaggcttcacggtaaggatgcgccgtgcaagtgcc

SEQ ID NO: 230075 - DNA, 50 bp, Artificial
  Synthetic oligonucleotide
aacacgcggcgggctgaatgggcagtttaccggcaatctcaatggggcca

SEQ ID NO: 230076 - DNA, 50 bp, Artificial
  Synthetic oligonucleotide
aacacgggagttcgcagcgttggaggccctgtccggtactggcatggtcc

SEQ ID NO: 230077 - DNA, 50 bp, Artificial
  Synthetic oligonucleotide
cacccttgacaacgcacgaaacgcctttcggttgccttgaggcacggcaa

SEQ ID NO: 230078 - DNA, 56 bp, Artificial
  Synthetic oligonucleotide
cggacccattcctgacttgaaagaccacgggtccgcctttgccgatcttcggatgc

SEQ ID NO: 230079 - DNA, 60 bp, Artificial
  Synthetic oligonucleotide
gcgccctcgctctacgccggtcgatccttcttcaccaatcatcatcccagaatgggccga

SEQ ID NO: 230080 - DNA, 50 bp, Artificial
  Synthetic oligonucleotide
aacacgggcttcggttagccagcgttcgaccacttgacggccttccgcac

SEQ ID NO: 230081 - DNA, 50 bp, Artificial
  Synthetic oligonucleotide
cccaaatctcgcattggcggatttcgttgctcccgaaggcgtggctgact

SEQ ID NO: 230082 - DNA, 50 bp, Artificial
  Synthetic oligonucleotide
aacactctgcccggcgcgcaatatccgtcaggaccgaatggccgtttgca

SEQ ID NO: 230083 - DNA, 50 bp, Artificial
  Synthetic oligonucleotide
agcctgcgcgcatgagcagttctccgcgattcatccacctccgcgttcat

SEQ ID NO: 230084 - DNA, 50 bp, Artificial
  Synthetic oligonucleotide
agcgtcagtccgacccagcggaggaggctcggcccatgcaccagctattt

SEQ ID NO: 230085 - DNA, 50 bp, Artificial
  Synthetic oligonucleotide
aacagactttgtgcccacgccccgaaatccctgtaaggcgtgccacggat

SEQ ID NO: 230086 - DNA, 50 bp, Artificial
  Synthetic oligonucleotide
agcctgccgtcccgccttacataggccgttccatgccccaaatccgcaaa

SEQ ID NO: 230087 - DNA, 50 bp, Artificial
  Synthetic oligonucleotide
accctcgcgcgaaccaagccatccattgtctagcggcgcgccttcatcat

SEQ ID NO: 230088 - DNA, 50 bp, Artificial
  Synthetic oligonucleotide
accctcggcccgaacatagccatcggccttgtccgagaaggattggcaca

SEQ ID NO: 230089 - DNA, 50 bp, Artificial
  Synthetic oligonucleotide
accctgagatggcccccgacatcttttatcacgactgtgccccgggcgac

SEQ ID NO: 230090 - DNA, 59 bp, Artificial
  Synthetic oligonucleotide
agccgcaagtcagccagcaacgcaggcgtgacattggcccccttcagggtaatccgccc

SEQ ID NO: 230091 - DNA, 50 bp, Artificial
  Synthetic oligonucleotide
gaacttcaacctgccgtaacttcacgacagtctcttccggcttgggtctc

SEQ ID NO: 230092 - DNA, 50 bp, Artificial
  Synthetic oligonucleotide
accctgtgtcgcgagggccccttccgcaaggtcacaaccgaagttttcgc

SEQ ID NO: 230093 - DNA, 50 bp, Artificial
  Synthetic oligonucleotide
acccttcaagccgtggtttgaggccgccaacagtccagtgcgtgccgagg

SEQ ID NO: 230094 - DNA, 50 bp, Artificial
  Synthetic oligonucleotide
accgaactgatgaccgtcccgcctgcttaggcgcggcgtagataaggaga

SEQ ID NO: 230095 - DNA, 50 bp, Artificial
  Synthetic oligonucleotide
accgaaggtgtctggtgggcgggtgtgtcgacaactgcaaagtgccatgc

SEQ ID NO: 230096 - DNA, 50 bp, Artificial
  Synthetic oligonucleotide
aggctcttcgtcccccgcgggacttcggcttggctcaggcattaggcgca

SEQ ID NO: 230097 - DNA, 50 bp, Artificial
  Synthetic oligonucleotide
accgacgtgcctcagagcatccaccgtgacaatcccgtggtcgggcaatt

SEQ ID NO: 230098 - DNA, 50 bp, Artificial
  Synthetic oligonucleotide
agaaggggcagcatggcgacacgcgacgagatagatacatggatcgcgcg

SEQ ID NO: 230099 - DNA, 50 bp, Artificial
  Synthetic oligonucleotide
accgatactgcgaacacgcttggcacctgtcacccggtgacgaaacgcct

SEQ ID NO: 230100 - DNA, 50 bp, Artificial
  Synthetic oligonucleotide
agaagggacccccggacccgatgtcagtgtcgcccccgagatggcacctt

SEQ ID NO: 230101 - DNA, 60 bp, Artificial
  Synthetic oligonucleotide
tgacgcgcactgaattttcatgggtccgaggagatcgcgccatgcagaatttcacgagac

SEQ ID NO: 230102 - DNA, 50 bp, Artificial
  Synthetic oligonucleotide
accgatcagcgaaagtgtccgacaggcgagcaaagcacggagcgcatctg

SEQ ID NO: 230103 - DNA, 50 bp, Artificial
  Synthetic oligonucleotide
accgattggtccggcgtcctgtgcgatcccccaaaggggccagcaaccga

SEQ ID NO: 230104 - DNA, 50 bp, Artificial
  Synthetic oligonucleotide
acccgccgccaaaggggcgttctgtcccaagcctaccacgagttggagga

SEQ ID NO: 230105 - DNA, 50 bp, Artificial
  Synthetic oligonucleotide
acccgcgtcacgggaggacggaatgaaggcgcaacccccactgaggctga

SEQ ID NO: 230106 - DNA, 50 bp, Artificial
  Synthetic oligonucleotide
ataaggccccgccggtccataaagcagccgatgatacgggttcccatgcg

SEQ ID NO: 230107 - DNA, 50 bp, Artificial
  Synthetic oligonucleotide
acccgctgggggcgatttcaggacgctgacgagtcggcctactacgagta

SEQ ID NO: 230108 - DNA, 50 bp, Artificial
  Synthetic oligonucleotide
acccgctggttcggtgacactccgtcgcctgagcgaaccgcctgtgatcg

SEQ ID NO: 230109 - DNA, 50 bp, Artificial
  Synthetic oligonucleotide
acccggacaactggtgtctcactacgcacccgacgggcacgttcgcctga

SEQ ID NO: 230110 - DNA, 50 bp, Artificial
  Synthetic oligonucleotide
gcgattcgcaagcaagcagtgacttcgctgacatcattcggcgcgacttt

SEQ ID NO: 230111 - DNA, 50 bp, Artificial
  Synthetic oligonucleotide
acccggagatgtactcaagcctccttgcgacaggggcgttcgatccgcag

SEQ ID NO: 230112 - DNA, 58 bp, Artificial
  Synthetic oligonucleotide
tgagaacgacgtgggcggcacataccgagctgtttatacggtcaagtttgaggaagcg

SEQ ID NO: 230113 - DNA, 50 bp, Artificial
  Synthetic oligonucleotide
cgcaaagccgtctaaagtgcgcgctcaagtcggagccatctcatgccgga

SEQ ID NO: 230114 - DNA, 50 bp, Artificial
  Synthetic oligonucleotide
acccggcgatctggaactctgacgcccagccctgacttagcacagccctg

SEQ ID NO: 230115 - DNA, 50 bp, Artificial
  Synthetic oligonucleotide
acccggcttggactttcctgcgaacacaagcccatgcgcgcggataactc

SEQ ID NO: 230116 - DNA, 50 bp, Artificial
  Synthetic oligonucleotide
acccggtccaccacagtaccgtcctttcgcgtcacgtcgcccggtatcac

SEQ ID NO: 230117 - DNA, 50 bp, Artificial
  Synthetic oligonucleotide
gaacggttcgggtatcttgcgcggcggacacattgatcccgtcggcttct

SEQ ID NO: 230118 - DNA, 50 bp, Artificial
  Synthetic oligonucleotide
agacaaaggcgcggaccgatttgtgacgctggctgagacgcgcgtataga

SEQ ID NO: 230119 - DNA, 50 bp, Artificial
  Synthetic oligonucleotide
acccgtccgcgcaaaactgtcagccagaaagctctgctcaagccgccaga

SEQ ID NO: 230120 - DNA, 50 bp, Artificial
  Synthetic oligonucleotide
acccgtctggccccgtggcgcatcacgtctgtgacccttgaagcggcgtt

SEQ ID NO: 230121 - DNA, 50 bp, Artificial
  Synthetic oligonucleotide
accctaaaaacccgaggctgcgcaatgagcaggcccgtttgaaggtggcc

SEQ ID NO: 230122 - DNA, 50 bp, Artificial
  Synthetic oligonucleotide
accctagtgcggttctggggcctgcgccaagtgacatcctgtcccgtggt

SEQ ID NO: 230123 - DNA, 60 bp, Artificial
  Synthetic oligonucleotide
gcgcacgatggacacgcagaaggagatctgcaaagcgtccgaagcaggcttcggctattc

SEQ ID NO: 230124 - DNA, 50 bp, Artificial
  Synthetic oligonucleotide
agaaggacccgtcatcatggctgcgcaagttccaggtctcggcgcaaacc

SEQ ID NO: 230125 - DNA, 50 bp, Artificial
  Synthetic oligonucleotide
agaagacggttcggcacagcgattggacacaggtccccggtcaattgcgg

SEQ ID NO: 230126 - DNA, 50 bp, Artificial
  Synthetic oligonucleotide
gcccggcgcatcggatcgtagtagctctgaacaccggtactgcccgctgt

SEQ ID NO: 230127 - DNA, 50 bp, Artificial
  Synthetic oligonucleotide
aggctgacgtcctaccccggttgcgatgggggctggaggaacgctgcaaa

SEQ ID NO: 230128 - DNA, 50 bp, Artificial
  Synthetic oligonucleotide
accggatcatgcatacctggatggccacgccctttgtctgggggcagagc

SEQ ID NO: 230129 - DNA, 50 bp, Artificial
  Synthetic oligonucleotide
gcccgcagatagctctcaccgcgcgaagcaaagacgtctgacggcaagtt

SEQ ID NO: 230130 - DNA, 50 bp, Artificial
  Synthetic oligonucleotide
aggctggttgccggcagggtatcaggggtgacgtcacgattgtgtcccgt

SEQ ID NO: 230131 - DNA, 50 bp, Artificial
  Synthetic oligonucleotide
accggcgcagtgcctgacgggaatcgcacagagattgggtaactcggggg

SEQ ID NO: 230132 - DNA, 50 bp, Artificial
  Synthetic oligonucleotide
gccccttaccggagacgcagacacgctgacacggggcgctagacggggac

SEQ ID NO: 230133 - DNA, 50 bp, Artificial
  Synthetic oligonucleotide
accgggcacaggcaacgacctcgggcggtaatcaaaaccaccggttccgt

SEQ ID NO: 230134 - DNA, 60 bp, Artificial
  Synthetic oligonucleotide
ctctgacgcgcttcagcaaggctgacgtcgcggacaggtcccaagcccatctcccggcgc

SEQ ID NO: 230135 - DNA, 50 bp, Artificial
  Synthetic oligonucleotide
agtgcctcatcctggccgcgcgtaacccatgcaagggggccaattgtcgc

SEQ ID NO: 230136 - DNA, 50 bp, Artificial
  Synthetic oligonucleotide
accgggcttgcaatggaaacattggggtggcgcgcttagggtgatgacgg

SEQ ID NO: 230137 - DNA, 50 bp, Artificial
  Synthetic oligonucleotide
agtgccgaagactgtaggcgctgtgctgaggcgtctctttcagcccgtga

SEQ ID NO: 230138 - DNA, 50 bp, Artificial
  Synthetic oligonucleotide
accggtgaaagcgtgtgccccaaccggatccgcgcaccttatagctggac

SEQ ID NO: 230139 - DNA, 50 bp, Artificial
  Synthetic oligonucleotide
accgtcccaacgacggaccgtccccgggtagaaccggccaacatcgcact

SEQ ID NO: 230140 - DNA, 50 bp, Artificial
  Synthetic oligonucleotide
accgtggctaccgcacaactggtaacccagcgaccgggatgcttagctct

SEQ ID NO: 230141 - DNA, 50 bp, Artificial
  Synthetic oligonucleotide
aggcttcgcgccgaaagggcccgcccatgcatgacaaaccgcttttctac

SEQ ID NO: 230142 - DNA, 50 bp, Artificial
  Synthetic oligonucleotide
agtgccccgcacccccgacaggaacaagagcgatgacctaccatccgaaa

SEQ ID NO: 230143 - DNA, 50 bp, Artificial
  Synthetic oligonucleotide
accgatttattgcgggccggtcctatgccgcagcctcaagcgaaccgaac

SEQ ID NO: 230144 - DNA, 50 bp, Artificial
  Synthetic oligonucleotide
accgcaaccgaggttcaaaatgacccgacagtggagcgttgcgagcgtcg

SEQ ID NO: 230145 - DNA, 60 bp, Artificial
  Synthetic oligonucleotide
ctctggctcagagcgtccaacgccagatgaataaggccgtgctttggagcattagctggc

SEQ ID NO: 230146 - DNA, 50 bp, Artificial
  Synthetic oligonucleotide
gccgtcaacgcacagcggatcttctggcacggaaacggatgcagcatgat

SEQ ID NO: 230147 - DNA, 50 bp, Artificial
  Synthetic oligonucleotide
accgcacctcgtcacctttcacggcgacaagctgacaattcggcgcgatg

SEQ ID NO: 230148 - DNA, 50 bp, Artificial
  Synthetic oligonucleotide
accgcacgttccgtgtcagcccgttcacgcccaagatgttccgggagttg

SEQ ID NO: 230149 - DNA, 50 bp, Artificial
  Synthetic oligonucleotide
accgcattcgagggccccaaggatggcctttccggcgaccgtaccactga

SEQ ID NO: 230150 - DNA, 50 bp, Artificial
  Synthetic oligonucleotide
agtgtccgaggccctgtccaaaggttgggagctttatggcagcccgacct

SEQ ID NO: 230151 - DNA, 50 bp, Artificial
  Synthetic oligonucleotide
accgccccttgtttcgtcgcgggaacgcgtatcctgacccccgaaggagt

SEQ ID NO: 230152 - DNA, 50 bp, Artificial
  Synthetic oligonucleotide
agaaggcacccgtctgtgcgcctctggctatgcgcctgtgtggcaccgaa

SEQ ID NO: 230153 - DNA, 50 bp, Artificial
  Synthetic oligonucleotide
accgccctagtgggatgaccttaccacattcacccgcggttgcgctcaca

SEQ ID NO: 230154 - DNA, 50 bp, Artificial
  Synthetic oligonucleotide
accgccgcgggatgttgcccagaacgtcctggaactgcccataggccacc

SEQ ID NO: 230155 - DNA, 50 bp, Artificial
  Synthetic oligonucleotide
accgcgcgacggttgtcttgggtctggctgggcccgagttctgcaatcac

SEQ ID NO: 230156 - DNA, 60 bp, Artificial
  Synthetic oligonucleotide
tgaggccttcatcccccttagcacggcccgaggtgctttcaaattgagaatatgcgcact

SEQ ID NO: 230157 - DNA, 50 bp, Artificial
  Synthetic oligonucleotide
accgcggccccaaggcaacagttgcgtgtcgtgcactgacccgacccgtc

SEQ ID NO: 230158 - DNA, 50 bp, Artificial
  Synthetic oligonucleotide
agtgcgaagtcggtggccttgtgaagtgcttttcggaaggtttgcccgga

SEQ ID NO: 230159 - DNA, 50 bp, Artificial
  Synthetic oligonucleotide
accgcggtgggataggtgctgatccaagtgacggcccccgacagggcttg

SEQ ID NO: 230160 - DNA, 50 bp, Artificial
  Synthetic oligonucleotide
accgcgtgaacatccgagaccgtgaggaccgtacctgccccaacgattgc

SEQ ID NO: 230161 - DNA, 50 bp, Artificial
  Synthetic oligonucleotide
accggaacaatcgccgttgcagggccgctcgcattgctaagttgggggca

SEQ ID NO: 230162 - DNA, 50 bp, Artificial
  Synthetic oligonucleotide
gcggtgaggggactgaaccctggagaaggtgcgatctctccagctcgctt

SEQ ID NO: 230163 - DNA, 50 bp, Artificial
  Synthetic oligonucleotide
cgagaggcgtcgccggttcatgtcatcgcggaagtgaggggctgatagcc

SEQ ID NO: 230164 - DNA, 50 bp, Artificial
  Synthetic oligonucleotide
accacatgcgcccaaagcgcagggaccatccacacatgcgggtcgaactt

SEQ ID NO: 230165 - DNA, 50 bp, Artificial
  Synthetic oligonucleotide
accacccccaaaaacgatgcgcgggccccatcgctacccctgatccgatg

SEQ ID NO: 230166 - DNA, 50 bp, Artificial
  Synthetic oligonucleotide
ataggccgcaagtgcgagggtggcgaggaatagtggaaacggcacgctag

SEQ ID NO: 230167 - DNA, 60 bp, Artificial
  Synthetic oligonucleotide
gcgagaagacacaggtctggtgctcaaagctgaagatccggcgctttacgagagactcgt

SEQ ID NO: 230168 - DNA, 50 bp, Artificial
  Synthetic oligonucleotide
aggctccgcgagaaatcagtcacgaggccggatcatgacgcgcaagaccc

SEQ ID NO: 230169 - DNA, 50 bp, Artificial
  Synthetic oligonucleotide
accacgcgcatgaggggagtgccgatgcaccggatcgtgacgattctgac

SEQ ID NO: 230170 - DNA, 50 bp, Artificial
  Synthetic oligonucleotide
agaccctagccgcgccgatctcggttgaaaagccgctaagtggccccttg

SEQ ID NO: 230171 - DNA, 50 bp, Artificial
  Synthetic oligonucleotide
accactcccacatcgagccggcatagttccgtgccttcagacccgcgtca

SEQ ID NO: 230172 - DNA, 50 bp, Artificial
  Synthetic oligonucleotide
accacttgagccgccctcaggttggaaaggtctcggacgccttaggagcc

SEQ ID NO: 230173 - DNA, 50 bp, Artificial
  Synthetic oligonucleotide
atagccttggtgagggtcgcaggcttcgggtatggcggccgagttgttta

SEQ ID NO: 230174 - DNA, 50 bp, Artificial
  Synthetic oligonucleotide
accagactagggactggcctttggaaaacacggctcggaagcaacgcggc

SEQ ID NO: 230175 - DNA, 50 bp, Artificial
  Synthetic oligonucleotide
accagtttccgcgggcgaaggaactccgctcgcagttcaagtgggtggtg

SEQ ID NO: 230176 - DNA, 50 bp, Artificial
  Synthetic oligonucleotide
accatacgagcgccgcttctaggcaggtccgtggcaatgcgcaaggcgta

SEQ ID NO: 230177 - DNA, 50 bp, Artificial
  Synthetic oligonucleotide
accatcccgcgcgacagaccgttcggagggagtgtccgacgtgcgcccag

SEQ ID NO: 230178 - DNA, 60 bp, Artificial
  Synthetic oligonucleotide
gcgacgcgcagatatcggatacagaacacctcttcgctcagaacttatatcacggccgct

SEQ ID NO: 230179 - DNA, 50 bp, Artificial
  Synthetic oligonucleotide
atatccggtccctcgcgggtgactgcccgtatcgcaggggttctggccag

SEQ ID NO: 230180 - DNA, 50 bp, Artificial
  Synthetic oligonucleotide
acatcggccgctgtgccaccgcactatggggcgtagtttcaatccgcagg

SEQ ID NO: 230181 - DNA, 50 bp, Artificial
  Synthetic oligonucleotide
acatcgggccagccacgcgcatgttcagaccgcgcatatcctgaggagag

SEQ ID NO: 230182 - DNA, 50 bp, Artificial
  Synthetic oligonucleotide
acatcgttttcggaatcgtcggaggcaccgactttcggttgcggggtgcc

SEQ ID NO: 230183 - DNA, 50 bp, Artificial
  Synthetic oligonucleotide
atatatcaacgtcgacccccgcaagacagcgcacccgatgctgcaaccgc

SEQ ID NO: 230184 - DNA, 50 bp, Artificial
  Synthetic oligonucleotide
acatgagcaaacccacaccccaacctgcaggaccaggaactggcttgcct

SEQ ID NO: 230185 - DNA, 50 bp, Artificial
  Synthetic oligonucleotide
acatgcagcgcagaaacccgtctgccccacagttagggcgcaacactggg

SEQ ID NO: 230186 - DNA, 50 bp, Artificial
  Synthetic oligonucleotide
cgacgtgtgatcggctgggcgacacaatcgcggcaaccaacagacctcgt

SEQ ID NO: 230187 - DNA, 50 bp, Artificial
  Synthetic oligonucleotide
agaccgcaaacaagagcgagaaacgctcgcgccacgggatcggctcacgg

SEQ ID NO: 230188 - DNA, 50 bp, Artificial
  Synthetic oligonucleotide
acatgcttcccctcggtgcggaattcagtcgtcaacccaacctgcgccag

SEQ ID NO: 230189 - DNA, 57 bp, Artificial
  Synthetic oligonucleotide
attcgtttgacgtgtcggcgaagatcgtcgggagagcgaaatagccttccgacagag

SEQ ID NO: 230190 - DNA, 56 bp, Artificial
  Synthetic oligonucleotide
agccccgatttcgaacagacggagagccgtatcgcgatctggggccacccggccca

SEQ ID NO: 230191 - DNA, 50 bp, Artificial
  Synthetic oligonucleotide
gcgttacgccccgaagaggcgggattagcgagctgcatacgaaccacacg

SEQ ID NO: 230192 - DNA, 50 bp, Artificial
  Synthetic oligonucleotide
acatggacgggtacgggttccagccccgtggcaaatcggaaaccaccaat

SEQ ID NO: 230193 - DNA, 50 bp, Artificial
  Synthetic oligonucleotide
acatgggggtaagctctccgcgggccgatgcgagttttgtcaggacgtgt

SEQ ID NO: 230194 - DNA, 50 bp, Artificial
  Synthetic oligonucleotide
acatgtcacgttccgggtgggttgcctcgtagggcgacaccacgtttcct

SEQ ID NO: 230195 - DNA, 50 bp, Artificial
  Synthetic oligonucleotide
acattccgcacggctcgggctatgcgcgtttcatgaccacgctcatggac

SEQ ID NO: 230196 - DNA, 50 bp, Artificial
  Synthetic oligonucleotide
acattggaccagggggcgctcctgacggtggacgctgtgatctacccttg

SEQ ID NO: 230197 - DNA, 50 bp, Artificial
  Synthetic oligonucleotide
accaaaaatgcgtccacttccaacgcgccaaacaccgtccccaggacgta

SEQ ID NO: 230198 - DNA, 50 bp, Artificial
  Synthetic oligonucleotide
accaactaacgttcggcaccccaccacggatgctttaccaccgggcccgt

SEQ ID NO: 230199 - DNA, 50 bp, Artificial
  Synthetic oligonucleotide
accaagccggacatgcggcacctagaatatcgtaacggcgacaacgttct

SEQ ID NO: 230200 - DNA, 50 bp, Artificial
  Synthetic oligonucleotide
accccggagtgcttccacacggatgaggggcagctagggcgctgagacgg

SEQ ID NO: 230201 - DNA, 55 bp, Artificial
  Synthetic oligonucleotide
aacacccccgccggtgggtgtggacgatagcttcatcacggacgaggatgtaaaa

SEQ ID NO: 230202 - DNA, 50 bp, Artificial
  Synthetic oligonucleotide
cgatcctggcacccagctcttgctgacctcacaacgtgctcctgccagag

SEQ ID NO: 230203 - DNA, 50 bp, Artificial
  Synthetic oligonucleotide
gcgcgcttgacttcgtttcccactgttatcagcgccccagatggatgccc

SEQ ID NO: 230204 - DNA, 50 bp, Artificial
  Synthetic oligonucleotide
accccggccccgcgtttatacgccgcaagtcggcacctttggtccgactc

SEQ ID NO: 230205 - DNA, 50 bp, Artificial
  Synthetic oligonucleotide
accccgttcgggacatcgaccaagcgcgttctcgtccaaccgacaccccc

SEQ ID NO: 230206 - DNA, 50 bp, Artificial
  Synthetic oligonucleotide
acccctgcgaatgctttggcgtcccgtgaatctttgcggtcggtggtgct

SEQ ID NO: 230207 - DNA, 50 bp, Artificial
  Synthetic oligonucleotide
agacccctcagaaccaatcggaacaggtgtcccatgcgcgctgaaacgca

SEQ ID NO: 230208 - DNA, 50 bp, Artificial
  Synthetic oligonucleotide
agaccaagcaccaaccgttcccgcgagtccggggtcttcaagggatacca

SEQ ID NO: 230209 - DNA, 50 bp, Artificial
  Synthetic oligonucleotide
atacgctgagagcggggacggattctgctcgtggcgcgttcactagtccg

SEQ ID NO: 230210 - DNA, 50 bp, Artificial
  Synthetic oligonucleotide
acccctgtctgaccgcgctcttccggccttccggttactccgatcctgca

SEQ ID NO: 230211 - DNA, 50 bp, Artificial
  Synthetic oligonucleotide
acccgaactcgaaatatgtgtgggcggaccagaccaagcaccccgagcct

SEQ ID NO: 230212 - DNA, 60 bp, Artificial
  Synthetic oligonucleotide
gcgacgcagttgctcatctcgaaagagcatcctcccggtcagtgtatcaaggcgcgacag

SEQ ID NO: 230213 - DNA, 50 bp, Artificial
  Synthetic oligonucleotide
acccgagggattgacggcctgacaccctgcgatatggaatgcgacgcacc

SEQ ID NO: 230214 - DNA, 50 bp, Artificial
  Synthetic oligonucleotide
acccgcactcccgctcagtcacgctaaaatggcacgaacctccattgccg

SEQ ID NO: 230215 - DNA, 50 bp, Artificial
  Synthetic oligonucleotide
acccgcatcggtttgtagccgaccacgtgatcagtgccgcccacgaccat

SEQ ID NO: 230216 - DNA, 50 bp, Artificial
  Synthetic oligonucleotide
acccgcccaaagtgcgcttaaggaggcgacacaggagctcggcagacaca

SEQ ID NO: 230217 - DNA, 50 bp, Artificial
  Synthetic oligonucleotide
acccgccgcagcccatatcccttgggcacgatccgtgaaaaggctttccg

SEQ ID NO: 230218 - DNA, 50 bp, Artificial
  Synthetic oligonucleotide
cggccaaaccggtcactttttgcgccgagaggcggtctttccaatacccc

SEQ ID NO: 230219 - DNA, 50 bp, Artificial
  Synthetic oligonucleotide
accatcgccatcgcaagggatttctggaccgtatggccgtagccacccga

SEQ ID NO: 230220 - DNA, 50 bp, Artificial
  Synthetic oligonucleotide
atagccgctgcaggcccaaaggtcaagcactgaggcaaacgcccttaggc

SEQ ID NO: 230221 - DNA, 50 bp, Artificial
  Synthetic oligonucleotide
cgagtgcctcggatattccgatgcccttggcgtacaagccaaccctgcgc

SEQ ID NO: 230222 - DNA, 50 bp, Artificial
  Synthetic oligonucleotide
accatttcaccggcacttggcccgactattgatgccccaactggccgtcc

SEQ ID NO: 230223 - DNA, 60 bp, Artificial
  Synthetic oligonucleotide
ctgatctgtgaacgactcacctttgcaacagcgtccgtgtctatggctaccaacggtagt

SEQ ID NO: 230224 - DNA, 50 bp, Artificial
  Synthetic oligonucleotide
acccaacgtcttcgcgcgtcctctccagcatatcgcccgtgtgcgagacg

SEQ ID NO: 230225 - DNA, 50 bp, Artificial
  Synthetic oligonucleotide
acccaagcccgaggtgacaacgcccgaaacacaggccagcaaaacaccgg

SEQ ID NO: 230226 - DNA, 50 bp, Artificial
  Synthetic oligonucleotide
acccacttgcggcaccatgtgattgggccgttttgcccgcaaatgcagcg

SEQ ID NO: 230227 - DNA, 50 bp, Artificial
  Synthetic oligonucleotide
acccaggagcaagccgcgagggcaacaactgacgggaaccatcagtcgaa

SEQ ID NO: 230228 - DNA, 50 bp, Artificial
  Synthetic oligonucleotide
acccattgcgctacagacccgcgccgtctcttgtccgataccagaggcgg

SEQ ID NO: 230229 - DNA, 50 bp, Artificial
  Synthetic oligonucleotide
gcgctttgcggttgtctgacgcgttgttcggtttgggtgggcgtttaggg

SEQ ID NO: 230230 - DNA, 50 bp, Artificial
  Synthetic oligonucleotide
agacccggtcgctgcaaaatctgtcgcgcacgctttttgacgacacaccg

SEQ ID NO: 230231 - DNA, 50 bp, Artificial
  Synthetic oligonucleotide
accccaaacacccctccgcttgcgttgcgctgtatgccccacctgacagt

SEQ ID NO: 230232 - DNA, 50 bp, Artificial
  Synthetic oligonucleotide
atagaccgcaacccgaccgaatgacagcgcggagccctgcatgacttacc

SEQ ID NO: 230233 - DNA, 50 bp, Artificial
  Synthetic oligonucleotide
accccagaggcgagatttcgggcaccgcttggcgacttagctggcttcgc

SEQ ID NO: 230234 - DNA, 60 bp, Artificial
  Synthetic oligonucleotide
gcgaaacgaatatgcagccctgcaaacctcttgggctgactggtgccgcgaaactttgga

SEQ ID NO: 230235 - DNA, 50 bp, Artificial
  Synthetic oligonucleotide
atacgggaccgaccaagcggctcctgcctttacgaaccggtctgccgttt

SEQ ID NO: 230236 - DNA, 50 bp, Artificial
  Synthetic oligonucleotide
accccctatggatcacctagcgcacaccgcgccttggcagcgtgtatcca

SEQ ID NO: 230237 - DNA, 50 bp, Artificial
  Synthetic oligonucleotide
accccggaacgatcacttggcgccccggaccgcttggtgtgccaccagat

SEQ ID NO: 230238 - DNA, 50 bp, Artificial
  Synthetic oligonucleotide
accccggaagtgccatttcgtcaggacgtagccattcaaagcccccgcaa

SEQ ID NO: 230239 - DNA, 50 bp, Artificial
  Synthetic oligonucleotide
gatcagccgatcactgtcgaaatgggctcgcgcatttgctatgtagccaa

SEQ ID NO: 230240 - DNA, 50 bp, Artificial
  Synthetic oligonucleotide
acggccccctagggactgttcaggtgtatcgtaaggagcgcaggcaggtg

SEQ ID NO: 230241 - DNA, 50 bp, Artificial
  Synthetic oligonucleotide
acggcctgacaccctgcgatatggaatgcgacgcaccctgaaacccctgt

SEQ ID NO: 230242 - DNA, 50 bp, Artificial
  Synthetic oligonucleotide
acggcgcgcctatgcgagaggggagcattgggaagagagggtgcgtttgg

SEQ ID NO: 230243 - DNA, 50 bp, Artificial
  Synthetic oligonucleotide
acggcgctcgcgtctactcgcctgatgagtgcagacagcccccaggccga

SEQ ID NO: 230244 - DNA, 50 bp, Artificial
  Synthetic oligonucleotide
actctggccggttcacaaggtcatacggaccagccgcaaggttccgtcgc

SEQ ID NO: 230245 - DNA, 59 bp, Artificial
  Synthetic oligonucleotide
ctgcagtagtgattaagaaccgctcaattgccgaaacgcggaaccaccagtctatcgct

SEQ ID NO: 230246 - DNA, 50 bp, Artificial
  Synthetic oligonucleotide
acggctcagacgggagacatccggatcgaattctccgcgggtaggtggga

SEQ ID NO: 230247 - DNA, 50 bp, Artificial
  Synthetic oligonucleotide
acgggatggacacaaattcgggggaacgcgccgggtttcgtcccaaacgc

SEQ ID NO: 230248 - DNA, 50 bp, Artificial
  Synthetic oligonucleotide
aggtgccgcgttttacccaagtcgctaacgctgtgcccccgctactagca

SEQ ID NO: 230249 - DNA, 50 bp, Artificial
  Synthetic oligonucleotide
aggtgcatccgcgacgcaatgacaggttcctctgcgcacatgacccgttg

SEQ ID NO: 230250 - DNA, 50 bp, Artificial
  Synthetic oligonucleotide
actctggagagtggccatctggcccgccgaagggataacgatctcaggcg

SEQ ID NO: 230251 - DNA, 50 bp, Artificial
  Synthetic oligonucleotide
aggtgcaggggtttcccaagcgccgccctgaggaacgtaaaagggtgaaa

SEQ ID NO: 230252 - DNA, 50 bp, Artificial
  Synthetic oligonucleotide
acgggcgtggaagaatgcgaaatgcccgatctcaggcaccgcgatatccg

SEQ ID NO: 230253 - DNA, 50 bp, Artificial
  Synthetic oligonucleotide
acgggggcgcagcgcattcaccaatcggactggccgacagcagggatgcg

SEQ ID NO: 230254 - DNA, 50 bp, Artificial
  Synthetic oligonucleotide
gagggtcgcggttccctgaacaagcgctcacgatgggcacaggtggccaa

SEQ ID NO: 230255 - DNA, 50 bp, Artificial
  Synthetic oligonucleotide
acgggggctgtcgttcacatcccggacacgtcggcatgaggtccgtgtga

SEQ ID NO: 230256 - DNA, 60 bp, Artificial
  Synthetic oligonucleotide
agcatatcatagcctagcctatcatgcgatatcattacgcgataactggacatcaggccg

SEQ ID NO: 230257 - DNA, 49 bp, Artificial
  Synthetic oligonucleotide
acgggggttatccccgaggaaggacttcccgaaggtttcacgccggtca

SEQ ID NO: 230258 - DNA, 50 bp, Artificial
  Synthetic oligonucleotide
aggtgacaagcccacgaaatgcgcttgatctagcattggctgggaccgcg

SEQ ID NO: 230259 - DNA, 50 bp, Artificial
  Synthetic oligonucleotide
actgcggtccattcgccccaaaggaaggtcagctgcgtttccgccaactg

SEQ ID NO: 230260 - DNA, 50 bp, Artificial
  Synthetic oligonucleotide
acgcttgggactcattgtcgccattgaggtcttgcggacgcacaggcgtc

SEQ ID NO: 230261 - DNA, 50 bp, Artificial
  Synthetic oligonucleotide
cgcgccaagacagcgtcgggttacacccataccgttgcgcgttgtcgatt

SEQ ID NO: 230262 - DNA, 50 bp, Artificial
  Synthetic oligonucleotide
actgaccgctttgccgcgtcaagcctcggcaggcccgaaccaccgcagtc

SEQ ID NO: 230263 - DNA, 50 bp, Artificial
  Synthetic oligonucleotide
acggaatagtaggtgcttgtgcgacgcaggcaaagtagagccgcactgcc

SEQ ID NO: 230264 - DNA, 50 bp, Artificial
  Synthetic oligonucleotide
acggactgacaggcgggcgttaggtcgcgctgtcccctttgggggccaag

SEQ ID NO: 230265 - DNA, 50 bp, Artificial
  Synthetic oligonucleotide
acggagcccctcgggtgttcaccgtgatgcacatggagtgttggccgtgc

SEQ ID NO: 230266 - DNA, 50 bp, Artificial
  Synthetic oligonucleotide
acggagtcgatgcaggacgcgctcagtgtagcagtgcgcccccgttgacg

SEQ ID NO: 230267 - DNA, 59 bp, Artificial
  Synthetic oligonucleotide
gcctagaagtgcaaaccactaccaccgttatggattgcggtgcgtcctcccggatgcaa

SEQ ID NO: 230268 - DNA, 50 bp, Artificial
  Synthetic oligonucleotide
gatctccaacagtgatctgagcgagaccgtaaacctctcagcttcggcct

SEQ ID NO: 230269 - DNA, 50 bp, Artificial
  Synthetic oligonucleotide
aggtgctgatccaagtgacggcccccgacagggcttgacccagtatcgtc

SEQ ID NO: 230270 - DNA, 50 bp, Artificial
  Synthetic oligonucleotide
gatcgtgactcctgccgatgggcggattcgggaattggcgcgagagagag

SEQ ID NO: 230271 - DNA, 50 bp, Artificial
  Synthetic oligonucleotide
acggcacccaaagctataggtgccagattcggccaggtccacccgtctcg

SEQ ID NO: 230272 - DNA, 50 bp, Artificial
  Synthetic oligonucleotide
agggcggcagatccatccgcaccaaagcgatcagatacagcacccacgga

SEQ ID NO: 230273 - DNA, 50 bp, Artificial
  Synthetic oligonucleotide
acggcagacccaaagccgcctagcgcctttgtcgttgaatccattcgcct

SEQ ID NO: 230274 - DNA, 50 bp, Artificial
  Synthetic oligonucleotide
gaccataatcttctgaagccggcgtctcgcgaaactgtacggtgatccat

SEQ ID NO: 230275 - DNA, 50 bp, Artificial
  Synthetic oligonucleotide
acggcatttcctgtcgaatgcggttgacctgagggccgctctgcccttca

SEQ ID NO: 230276 - DNA, 50 bp, Artificial
  Synthetic oligonucleotide
actccggcaagtccgggttagacagagggcctcgcagaaccgaccaagga

SEQ ID NO: 230277 - DNA, 50 bp, Artificial
  Synthetic oligonucleotide
actccgctgtccggtcagggtcaaccgagcccgccatatttgcgtcatcc

SEQ ID NO: 230278 - DNA, 53 bp, Artificial
  Synthetic oligonucleotide
gccgggattttcactagtacctcttgaacgcaggaaaaggggagccgtggtac

SEQ ID NO: 230279 - DNA, 50 bp, Artificial
  Synthetic oligonucleotide
agggtcgcatccgcagcgatagatcatttcccccgattgaccccgccctt

SEQ ID NO: 230280 - DNA, 50 bp, Artificial
  Synthetic oligonucleotide
aggggcttagtgcacgttgaccggtgccaggtcgttctgccgcgccaaag

SEQ ID NO: 230281 - DNA, 50 bp, Artificial
  Synthetic oligonucleotide
actcccaatgaaccaaagccctaatcccacgccccaaggcgcacgcggct

SEQ ID NO: 230282 - DNA, 50 bp, Artificial
  Synthetic oligonucleotide
acgtgcctcgccccaggaccccctgagattgacctggtcttgccgacact

SEQ ID NO: 230283 - DNA, 50 bp, Artificial
  Synthetic oligonucleotide
acgtgcggctagtacaccccggcagccgttaccacatggcaacgcgtagc

SEQ ID NO: 230284 - DNA, 50 bp, Artificial
  Synthetic oligonucleotide
acgtggggcctgccgttagcccaggcatcacatgaaactgtgcgttgcga

SEQ ID NO: 230285 - DNA, 50 bp, Artificial
  Synthetic oligonucleotide
cggaagtcagcaggaactgacggcgtgtcatcacgcagcgcttgccagtt

SEQ ID NO: 230286 - DNA, 50 bp, Artificial
  Synthetic oligonucleotide
acgttccgcaggtttcctcgcccgtcccgcgtggtatgggaccgcaaaac

SEQ ID NO: 230287 - DNA, 50 bp, Artificial
  Synthetic oligonucleotide
acgttcggcaccccaccacggatgctttaccaccgggcccgtcttttccc

SEQ ID NO: 230288 - DNA, 50 bp, Artificial
  Synthetic oligonucleotide
aggggcatcgcaaatgagcaaactggtcacgatctttggcggctcgggtt

SEQ ID NO: 230289 - DNA, 60 bp, Artificial
  Synthetic oligonucleotide
gcgggtgtaggcccaccaatctgatccgctacgatattcagcgcgtcccgctctgccccg

SEQ ID NO: 230290 - DNA, 50 bp, Artificial
  Synthetic oligonucleotide
acgttgaacatctcgtttcctgtcctgaccgggggaccctccgcccggcc

SEQ ID NO: 230291 - DNA, 50 bp, Artificial
  Synthetic oligonucleotide
agggcttgccggtctggtgcggaaggctcgggggaggcgcagctttgtcg

SEQ ID NO: 230292 - DNA, 50 bp, Artificial
  Synthetic oligonucleotide
actcaagcgcccgggaaagaaaagcggcttgttatggcccagcccatcgc

SEQ ID NO: 230293 - DNA, 50 bp, Artificial
  Synthetic oligonucleotide
agggctatcccgcactgtggcggcttgcccccgacatgaacagtcttgtc

SEQ ID NO: 230294 - DNA, 50 bp, Artificial
  Synthetic oligonucleotide
actcatgtgcggattgccgaaccttcggtgcggttccaattgcccgaggg

SEQ ID NO: 230295 - DNA, 50 bp, Artificial
  Synthetic oligonucleotide
actccagagggttgcgtgttccggcgcatgaccgttgcccatgtggatgt

SEQ ID NO: 230296 - DNA, 50 bp, Artificial
  Synthetic oligonucleotide
acggggtatgttccaactgtccctccaggcccgacggggccatgacatca

SEQ ID NO: 230297 - DNA, 50 bp, Artificial
  Synthetic oligonucleotide
gaggacatgccgtgtcagaccacctcgcactgtcagacctgcaagcagcg

SEQ ID NO: 230298 - DNA, 50 bp, Artificial
  Synthetic oligonucleotide
acggggtttttggtcagggcgagaaccgatgtccccgcaacggtgactct

SEQ ID NO: 230299 - DNA, 50 bp, Artificial
  Synthetic oligonucleotide
cgcgtcagatgttcgcctcctccctaacgcccggaccctaatccccggtt

SEQ ID NO: 230300 - DNA, 60 bp, Artificial
  Synthetic oligonucleotide
cggatcgggggtctgtattcatcttgcgtcctctggtgactgcatcgcggcagggccatc

SEQ ID NO: 230301 - DNA, 54 bp, Artificial
  Synthetic oligonucleotide
tctagcgccggttgacacccgccccggaaagccgcacgacaccccggattttca

SEQ ID NO: 230302 - DNA, 50 bp, Artificial
  Synthetic oligonucleotide
aggtctctcgaaacgactcctcaagcccccaatgggtggtaaccgggcgc

SEQ ID NO: 230303 - DNA, 50 bp, Artificial
  Synthetic oligonucleotide
gagctccgcagatcgagcaacacggatttgctacggggcgaagggggctg

SEQ ID NO: 230304 - DNA, 50 bp, Artificial
  Synthetic oligonucleotide
acggtcgctcataacagggcctccggtcagcctcaggtgtcgcgtgcgat

SEQ ID NO: 230305 - DNA, 50 bp, Artificial
  Synthetic oligonucleotide
agggctagatagccgctgcaggcccaaaggtcaagcactgaggcaaacgc

SEQ ID NO: 230306 - DNA, 50 bp, Artificial
  Synthetic oligonucleotide
actctctcggcactgcagcattcggggcccaaggatttcgcttgcgcagc

SEQ ID NO: 230307 - DNA, 50 bp, Artificial
  Synthetic oligonucleotide
acggttgtcttgggtctggctgggcccgagttctgcaatcacgcgcacgt

SEQ ID NO: 230308 - DNA, 50 bp, Artificial
  Synthetic oligonucleotide
gagccaacgtgatggcgcgaggggtgacctgataggaacgcaggtcccgc

SEQ ID NO: 230309 - DNA, 50 bp, Artificial
  Synthetic oligonucleotide
gagcaattccccagctttgcgagtaccagctgccttgttcgttgtatcgc

SEQ ID NO: 230310 - DNA, 50 bp, Artificial
  Synthetic oligonucleotide
acgtccaggcatgctgcgatggctcgcataccccataacggccggttcag

SEQ ID NO: 230311 - DNA, 50 bp, Artificial
  Synthetic oligonucleotide
acgtccatccgcttcgggatctccataccacacccccttcagacgccgag

SEQ ID NO: 230312 - DNA, 59 bp, Artificial
  Synthetic oligonucleotide
tctcactcggccctgagcgtcacaagtacccgtttccgggacacgtcgagagagatcga

SEQ ID NO: 230313 - DNA, 50 bp, Artificial
  Synthetic oligonucleotide
cgctgaaggccaaatgctgccccaactcggaggtccgtgcgatccatcgc

SEQ ID NO: 230314 - DNA, 50 bp, Artificial
  Synthetic oligonucleotide
aggtcgcgttcgctgagatcgtcttgggcggagaaaccgttgaagccccc

SEQ ID NO: 230315 - DNA, 50 bp, Artificial
  Synthetic oligonucleotide
aggtcagtggcttccatcatacgggtcgcctgagccatgcgggtttcgcc

SEQ ID NO: 230316 - DNA, 50 bp, Artificial
  Synthetic oligonucleotide
aggtcacgttggatgggcgcgacatttcggccatgtcaaatgccgagcga

SEQ ID NO: 230317 - DNA, 50 bp, Artificial
  Synthetic oligonucleotide
agtcggatcagcggagcatggagcaaacacagcctgacacggatggaccg

SEQ ID NO: 230318 - DNA, 50 bp, Artificial
  Synthetic oligonucleotide
cgccgacgcgtgaggcaacaggacgggagcacgatcggaccatgagcgac

SEQ ID NO: 230319 - DNA, 50 bp, Artificial
  Synthetic oligonucleotide
acgacggggtttagtggccctactcgccgttctagcccgccgaggcttca

SEQ ID NO: 230320 - DNA, 50 bp, Artificial
  Synthetic oligonucleotide
acgagccataggaggtcgatcggtagcgcgggtagctcggctgcctatcg

SEQ ID NO: 230321 - DNA, 50 bp, Artificial
  Synthetic oligonucleotide
acgaggcacggcatcaatgggcccccgtcatcgcaggcggagagataaat

SEQ ID NO: 230322 - DNA, 50 bp, Artificial
  Synthetic oligonucleotide
acgaggtcatccggtaatctttgcgtgggcctagcacatcccaacgcgcg

SEQ ID NO: 230323 - DNA, 55 bp, Artificial
  Synthetic oligonucleotide
tctccgagtgccccgggccttttcaagacgtcttcatattccaaaacgactgccg

SEQ ID NO: 230324 - DNA, 50 bp, Artificial
  Synthetic oligonucleotide
acgatccgggtgatgcctcgctgacgacaccatatgtgctgagtggcgca

SEQ ID NO: 230325 - DNA, 50 bp, Artificial
  Synthetic oligonucleotide
acgatgctgcagaacagccctccaagggccatcatcagccccgtctctcg

SEQ ID NO: 230326 - DNA, 50 bp, Artificial
  Synthetic oligonucleotide
agaacagaccggcaggacaggacgcagttacagtgcgacgcggaggcctg

SEQ ID NO: 230327 - DNA, 50 bp, Artificial
  Synthetic oligonucleotide
acgcaacggtaacattggctccccgcgacggcaactggcgtgaattgtcc

SEQ ID NO: 230328 - DNA, 50 bp, Artificial
  Synthetic oligonucleotide
agtccgatggaaaggaccccgacagcatagcctgccgaggccccgctgtc

SEQ ID NO: 230329 - DNA, 50 bp, Artificial
  Synthetic oligonucleotide
acgcaaggcgccggtaccagatgtttaaccgcttgccctagctatcggcg

SEQ ID NO: 230330 - DNA, 50 bp, Artificial
  Synthetic oligonucleotide
acgcagaccggtcgaaatccgcaggcgtctttccgattacggccccttta

SEQ ID NO: 230331 - DNA, 50 bp, Artificial
  Synthetic oligonucleotide
acgcagatggcacatgacttccactggctcctcgcgatgcacacgaccgc

SEQ ID NO: 230332 - DNA, 50 bp, Artificial
  Synthetic oligonucleotide
agaacaaattggcgggatcggtgcgataggcgggcatggtgaggggccca

SEQ ID NO: 230333 - DNA, 50 bp, Artificial
  Synthetic oligonucleotide
agggatgagtgcgagaaggaaacgctcccaacgacccttgcacgcctggt

SEQ ID NO: 230334 - DNA, 60 bp, Artificial
  Synthetic oligonucleotide
caaggactggacgcgaacaggcgaacagtccaccatcatggaaacctgaacagcaggaaa

SEQ ID NO: 230335 - DNA, 50 bp, Artificial
  Synthetic oligonucleotide
gcaggatcaccatggtataggctctgcggcacccctttcggggaaccgac

SEQ ID NO: 230336 - DNA, 50 bp, Artificial
  Synthetic oligonucleotide
acgccagcccgggactctctcggcactgcagcattcggggcccaaggatt

SEQ ID NO: 230337 - DNA, 50 bp, Artificial
  Synthetic oligonucleotide
gccagcgcaaatatgcctcacccggcgatctgtcggctgttgaacgtgga

SEQ ID NO: 230338 - DNA, 50 bp, Artificial
  Synthetic oligonucleotide
acctgtcaacgggccctcaggccgcagtcacgcaggttccctgagcacgc

SEQ ID NO: 230339 - DNA, 50 bp, Artificial
  Synthetic oligonucleotide
acctgtcagggcaagtccggccgcgacccacttctttatgccaacgcttt

SEQ ID NO: 230340 - DNA, 50 bp, Artificial
  Synthetic oligonucleotide
acctgttagcgccaaatggacgccgcgtttcgtgtctgtccgggccccaa

SEQ ID NO: 230341 - DNA, 50 bp, Artificial
  Synthetic oligonucleotide
acctgttgcgacggaggtcggggagcgagggtccgttcactcgagagccc

SEQ ID NO: 230342 - DNA, 50 bp, Artificial
  Synthetic oligonucleotide
gccaccagagaggccccttatatcatgaacacccgtcgccctgtcgcctc

SEQ ID NO: 230343 - DNA, 50 bp, Artificial
  Synthetic oligonucleotide
accttcctgaccggagtgccagtcacccggccacggtcactttgcgtggt

SEQ ID NO: 230344 - DNA, 50 bp, Artificial
  Synthetic oligonucleotide
accttcgatcggacggacagggcatccgagacatcgggttcttggcggaa

SEQ ID NO: 230345 - DNA, 57 bp, Artificial
  Synthetic oligonucleotide
ctaacgcattgaaacggaacggacactttggcccgtcgatacaccctcgcatccaca

SEQ ID NO: 230346 - DNA, 50 bp, Artificial
  Synthetic oligonucleotide
acctttgccgaggcaatctcgcggttcaagggcagtcccgtgtccagccg

SEQ ID NO: 230347 - DNA, 50 bp, Artificial
  Synthetic oligonucleotide
accttttgggcaaatggcctgtgtgttggcggcctgtggctatgcgatcg

SEQ ID NO: 230348 - DNA, 50 bp, Artificial
  Synthetic oligonucleotide
acgaaaggtccatctgtcgccccaatggcgccacgttccggagcaagaca

SEQ ID NO: 230349 - DNA, 50 bp, Artificial
  Synthetic oligonucleotide
cgcattgtttgacccacgcagggcagagcggcaggcaaaatgtgcctttc

SEQ ID NO: 230350 - DNA, 50 bp, Artificial
  Synthetic oligonucleotide
agtgccatgcgcgtcccgtttgcctgtgtgcccatcaaagagccccgcta

SEQ ID NO: 230351 - DNA, 50 bp, Artificial
  Synthetic oligonucleotide
agtgcattctgggagcggcccttttcacatcacggcgtagtttgcggcta

SEQ ID NO: 230352 - DNA, 50 bp, Artificial
  Synthetic oligonucleotide
acgaatgcccgcctcttcgcccggcgtttcggacaaaagctcgacgttat

SEQ ID NO: 230353 - DNA, 50 bp, Artificial
  Synthetic oligonucleotide
agggactgttcaggtgtatcgtaaggagcgcaggcaggtgctgcaacccc

SEQ ID NO: 230354 - DNA, 50 bp, Artificial
  Synthetic oligonucleotide
acgacctggcgcacccaccctgattaccgggcggacgcctgtttcgacaa

SEQ ID NO: 230355 - DNA, 50 bp, Artificial
  Synthetic oligonucleotide
agaacccgtagagcctttcggggttgtcccacatgcaccgcgcaaagcta

SEQ ID NO: 230356 - DNA, 60 bp, Artificial
  Synthetic oligonucleotide
tctggacctacattcgctctgaactggacatatccgagcgggatcgctgcggcaatatgt

SEQ ID NO: 230357 - DNA, 50 bp, Artificial
  Synthetic oligonucleotide
acgacgatcatggggcccgtccttgacgcgagaggtcggaatggttccta

SEQ ID NO: 230358 - DNA, 50 bp, Artificial
  Synthetic oligonucleotide
acgcgaggagcccggacccgtcaatgttttatggtctttccggccttcgc

SEQ ID NO: 230359 - DNA, 50 bp, Artificial
  Synthetic oligonucleotide
acgcgcagatagccgcacgaatcccccttgcaaataccttcggggttcgg

SEQ ID NO: 230360 - DNA, 50 bp, Artificial
  Synthetic oligonucleotide
acgcgccccctgcatgcctatatcaagggaacccaagacaggagccaccg

SEQ ID NO: 230361 - DNA, 50 bp, Artificial
  Synthetic oligonucleotide
gcaaggccggccaaagcaggatgtgcccacctttcgcggttcttcatgcg

SEQ ID NO: 230362 - DNA, 50 bp, Artificial
  Synthetic oligonucleotide
acgcgccgtggtctgaacctgcgtatggccgaggagccgtccgatcatcg

SEQ ID NO: 230363 - DNA, 50 bp, Artificial
  Synthetic oligonucleotide
agtatggcgttgaggaccgcacgggctactgaactggcccccaattcgac

SEQ ID NO: 230364 - DNA, 50 bp, Artificial
  Synthetic oligonucleotide
gcaagcgttgtcacttgagggcggtctgataccacgctggagggcgcgag

SEQ ID NO: 230365 - DNA, 50 bp, Artificial
  Synthetic oligonucleotide
acgcgcgacaccaaaggatgcgatgtcagaactcggccgcaagggtcacc

SEQ ID NO: 230366 - DNA, 50 bp, Artificial
  Synthetic oligonucleotide
acgcggctcccaactccaagcgcgccctccaaagaacgacaaccagtttg

SEQ ID NO: 230367 - DNA, 59 bp, Artificial
  Synthetic oligonucleotide
ctaactcttgcgttatctacgaacatgcgaggaaccccttatgcaacgaatgtagcagg

SEQ ID NO: 230368 - DNA, 50 bp, Artificial
  Synthetic oligonucleotide
gcaagaacctgtagtataacgatacaaaatgtcgtgatgaattcgagcgt

SEQ ID NO: 230369 - DNA, 50 bp, Artificial
  Synthetic oligonucleotide
cgcgaagggtcatattccaccagtagacgccgcgattctgcactgcggca

SEQ ID NO: 230370 - DNA, 50 bp, Artificial
  Synthetic oligonucleotide
agtaccgggtagcccgcagagtttcgtttctggcaatcgcggctgggcag

SEQ ID NO: 230371 - DNA, 50 bp, Artificial
  Synthetic oligonucleotide
acgcgggctcaccaaggcagttcagacccgggagcatggttcttggtcac

SEQ ID NO: 230372 - DNA, 50 bp, Artificial
  Synthetic oligonucleotide
acgcggtctcggactactactggcggctgcacgtctgccggaaccccgag

SEQ ID NO: 230373 - DNA, 50 bp, Artificial
  Synthetic oligonucleotide
aggtttctcttgggtcaggcggcctagcttcggcgcagcgaacatccgtt

SEQ ID NO: 230374 - DNA, 50 bp, Artificial
  Synthetic oligonucleotide
aggttgcaagcccgttttcacgtccagtcggcgcgtagacgccaaattgg

SEQ ID NO: 230375 - DNA, 50 bp, Artificial
  Synthetic oligonucleotide
acgctgcacgtgccatcggttcaaactgcccctccattcgcacggttgaa

SEQ ID NO: 230376 - DNA, 50 bp, Artificial
  Synthetic oligonucleotide
actggccctcgcagcccataccccatgctcagaggagcatacgatgcata

SEQ ID NO: 230377 - DNA, 50 bp, Artificial
  Synthetic oligonucleotide
gaatgcgtaagcttgccgaacagagtaatggcaggtccgctggcacgggc

SEQ ID NO: 230378 - DNA, 60 bp, Artificial
  Synthetic oligonucleotide
ctacaaaagcgaagtaatggctgccgtccatgagatgatggaaggtttccatgagtctgg

SEQ ID NO: 230379 - DNA, 50 bp, Artificial
  Synthetic oligonucleotide
acgcccgcttctggcatcacgaggcggcacgacgaccaaaggacaaaagc

SEQ ID NO: 230380 - DNA, 50 bp, Artificial
  Synthetic oligonucleotide
gcagataacggcgtctatcagcccacctctgagcggcccatggttgcacc

SEQ ID NO: 230381 - DNA, 50 bp, Artificial
  Synthetic oligonucleotide
agaaagcccggctagcacggcggcaggcgaaggtaaatcattcccctgtg

SEQ ID NO: 230382 - DNA, 50 bp, Artificial
  Synthetic oligonucleotide
agaaaagccgccgtagacaccccgatatccgtaaggtccgatgcgccacg

SEQ ID NO: 230383 - DNA, 50 bp, Artificial
  Synthetic oligonucleotide
cgccggatacaagcgccgacgcgtgaggcaacaggacgggagcacgatcg

SEQ ID NO: 230384 - DNA, 50 bp, Artificial
  Synthetic oligonucleotide
actttcgcatccgacatgggggcaccttatgcagcagccgagccaagcgc

SEQ ID NO: 230385 - DNA, 50 bp, Artificial
  Synthetic oligonucleotide
acttgggaggtctattcagccgtgccgtggggatgtgtgcgaggttgcga

SEQ ID NO: 230386 - DNA, 50 bp, Artificial
  Synthetic oligonucleotide
acgcctcgtttgtgcccgatgccatcacggataattgcccagtcgcggcc

SEQ ID NO: 230387 - DNA, 50 bp, Artificial
  Synthetic oligonucleotide
acttcggtccaatgggtcaacagtcgtgcgacggcaaagccccgggtttc

SEQ ID NO: 230388 - DNA, 50 bp, Artificial
  Synthetic oligonucleotide
acgcctctccctactgcgcgatctaatcaatgtccccgacacgggggcgc

SEQ ID NO: 230389 - DNA, 60 bp, Artificial
  Synthetic oligonucleotide
tctgttcactgccccatagcggcagatcgggcggttgcaaatagctttgggccagccctt

SEQ ID NO: 230390 - DNA, 50 bp, Artificial
  Synthetic oligonucleotide
agtccaaaagcccaaccggcatggtcttggagccgaccgaacgggtaagc

SEQ ID NO: 230391 - DNA, 50 bp, Artificial
  Synthetic oligonucleotide
gcacgcgccccttttcacccttcgccaagatcgctacctctggacgcatg

SEQ ID NO: 230392 - DNA, 50 bp, Artificial
  Synthetic oligonucleotide
agggcaagcctgtctctcggtcacgcggcgtatagggggagtcgcggggg

SEQ ID NO: 230393 - DNA, 50 bp, Artificial
  Synthetic oligonucleotide
acttcgggtcacgtcagaaggccggtcgtgcggttgcaggccgcgccatg

SEQ ID NO: 230394 - DNA, 50 bp, Artificial
  Synthetic oligonucleotide
agtcacgactggggtccgttgtgcctgcgtcttggtctggggacaactgt

SEQ ID NO: 230395 - DNA, 50 bp, Artificial
  Synthetic oligonucleotide
actgtccctttcgcttgcgccccaccaaaaatcgcgtcccccggatgaaa

SEQ ID NO: 230396 - DNA, 50 bp, Artificial
  Synthetic oligonucleotide
acgcgaatggtctgattacccccttacccgccgcgcctgacataagccgg

SEQ ID NO: 230397 - DNA, 50 bp, Artificial
  Synthetic oligonucleotide
acgcgactgcccaacctttttccttacgcgagcatgcccggggctggttg

SEQ ID NO: 230398 - DNA, 50 bp, Artificial
  Synthetic oligonucleotide
aatcggcacacgcggttcgcctttggccctagcccaagcgcatgaaaccc

SEQ ID NO: 230399 - DNA, 50 bp, Artificial
  Synthetic oligonucleotide
atgagccggcctgcgaggattgggacaggaagaagagacgtgcgagctcg

SEQ ID NO: 230400 - DNA, 60 bp, Artificial
  Synthetic oligonucleotide
ctacatgcgcaaggaaatgcctcctgcctaatcatcactacatgcgcctatccgaataca

SEQ ID NO: 230401 - DNA, 50 bp, Artificial
  Synthetic oligonucleotide
aatcggcagcgtgtgtcgcatgaaggccccgtgtttccctgacgccgatg

SEQ ID NO: 230402 - DNA, 50 bp, Artificial
  Synthetic oligonucleotide
aatcgggcgttccagatcaaacgggtgtgtctgccccaccggccgctgta

SEQ ID NO: 230403 - DNA, 50 bp, Artificial
  Synthetic oligonucleotide
atgagcaaactggtcacgatctttggcggctcgggttttgtcggccgcta

SEQ ID NO: 230404 - DNA, 50 bp, Artificial
  Synthetic oligonucleotide
aatcggggcgggtaagccggggccacgcgagaggcgtgtcagaggtggcc

SEQ ID NO: 230405 - DNA, 50 bp, Artificial
  Synthetic oligonucleotide
aatcggtcacaaactcttgcctgagcgcaaaagcacccttgaattagggg

SEQ ID NO: 230406 - DNA, 50 bp, Artificial
  Synthetic oligonucleotide
agaggcccgatggcgaatagtggatgcactgaggcctgatgtgatccccg

SEQ ID NO: 230407 - DNA, 50 bp, Artificial
  Synthetic oligonucleotide
agaggacggagcggtagggacgggtcatcggggcctcgcgtaataatctt

SEQ ID NO: 230408 - DNA, 50 bp, Artificial
  Synthetic oligonucleotide
aatctccgcaggtgtctgataggcaaaggcatccccgaaccccatccggg

SEQ ID NO: 230409 - DNA, 50 bp, Artificial
  Synthetic oligonucleotide
aatctccggctgccgcattgtctcggggccgcaaggtgtctggtatcaac

SEQ ID NO: 230410 - DNA, 50 bp, Artificial
  Synthetic oligonucleotide
aatctgcaagcccgggatccgagagccgagccaaagagacaacggcttga

SEQ ID NO: 230411 - DNA, 60 bp, Artificial
  Synthetic oligonucleotide
ggagacgaaagcccactcgccaggtcacggtgcattgcgatcagggttctaaattcacca

SEQ ID NO: 230412 - DNA, 58 bp, Artificial
  Synthetic oligonucleotide
cggatggattggcgccgaccgaactcactccgggaactctttctgttgcactaacgca

SEQ ID NO: 230413 - DNA, 60 bp, Artificial
  Synthetic oligonucleotide
ctaccgctatgctgtctatcgcatctgcacgggcgaaggagctcagtgcctcaagaagga

SEQ ID NO: 230414 - DNA, 50 bp, Artificial
  Synthetic oligonucleotide
aggccgcactaatgcttggggcgactgagatagcgatgacggacgccacg

SEQ ID NO: 230415 - DNA, 50 bp, Artificial
  Synthetic oligonucleotide
aggccgtggccggatcatacccccacagcctgcggaaataaggtaccccc

SEQ ID NO: 230416 - DNA, 50 bp, Artificial
  Synthetic oligonucleotide
aggccgttcctccacacgcatggttcggcgtctcagccgttttccactat

SEQ ID NO: 230417 - DNA, 50 bp, Artificial
  Synthetic oligonucleotide
aggcctgattgctggatagcttgggatgggtagctcactgcggccagcgg

SEQ ID NO: 230418 - DNA, 50 bp, Artificial
  Synthetic oligonucleotide
aatgaatgatcccgcctcggggcctgcaacaagatccagcaatgctgcgg

SEQ ID NO: 230419 - DNA, 50 bp, Artificial
  Synthetic oligonucleotide
aatcactccggccttccgtgtcagcagatccccaggacaggcgcgtaatc

SEQ ID NO: 230420 - DNA, 50 bp, Artificial
  Synthetic oligonucleotide
aatcatggccccgtttacgcgtcggtcgttcaggcaggctcttgcaaggc

SEQ ID NO: 230421 - DNA, 50 bp, Artificial
  Synthetic oligonucleotide
gggttggaataaagcccgccgttataggcaccatagctgccttctttcga

SEQ ID NO: 230422 - DNA, 50 bp, Artificial
  Synthetic oligonucleotide
aatccaacatatggcgcgacaccgaagccacccaatctgccttgcgcacc

SEQ ID NO: 230423 - DNA, 50 bp, Artificial
  Synthetic oligonucleotide
aatccatcgaggcgaaacgcgcatagaaggtagccaggccccagaacggg

SEQ ID NO: 230424 - DNA, 56 bp, Artificial
  Synthetic oligonucleotide
agcgcacgccatttcccgtcgctaagatcggctttaccaatcccgcgcggtaccac

SEQ ID NO: 230425 - DNA, 50 bp, Artificial
  Synthetic oligonucleotide
gggtgggcgtttagggcaaaccacaacgaccgcgctgccagactatgtgc

SEQ ID NO: 230426 - DNA, 50 bp, Artificial
  Synthetic oligonucleotide
aatccatcggacacccccggactgacaacatggaagacgtccccaccgga

SEQ ID NO: 230427 - DNA, 50 bp, Artificial
  Synthetic oligonucleotide
aatccccgcctgttcggaccggccagagattttcaacgtggcgctttggg

SEQ ID NO: 230428 - DNA, 50 bp, Artificial
  Synthetic oligonucleotide
aatcccgaatggggacagcgttagggacaatcgccgggacgatcgggtcg

SEQ ID NO: 230429 - DNA, 50 bp, Artificial
  Synthetic oligonucleotide
aatcccggttccggggcccaatttgtgattggcagccacgaggatcacgt

SEQ ID NO: 230430 - DNA, 50 bp, Artificial
  Synthetic oligonucleotide
agagggcgggccaagtcgtcatacacgcgacgtctcccctcgtcgggtct

SEQ ID NO: 230431 - DNA, 50 bp, Artificial
  Synthetic oligonucleotide
atgaggccgggctatcataaccatgtatctccgcaaacccgccataaacc

SEQ ID NO: 230432 - DNA, 50 bp, Artificial
  Synthetic oligonucleotide
aatccggattgcgtcaacgctgggaaaacgcctgtctgggacagaccgga

SEQ ID NO: 230433 - DNA, 50 bp, Artificial
  Synthetic oligonucleotide
aatcgaggtgcgtggttaacagctgcctaagccgcccgctgtttgccaag

SEQ ID NO: 230434 - DNA, 50 bp, Artificial
  Synthetic oligonucleotide
aatcgagtcgaccgtatcggaataccgtccccgatctcccatgcgccgga

SEQ ID NO: 230435 - DNA, 60 bp, Artificial
  Synthetic oligonucleotide
gcggaaacaatccgactgatgaagcagtcgagcgtttttatggccgtgccggccatctat

SEQ ID NO: 230436 - DNA, 50 bp, Artificial
  Synthetic oligonucleotide
aatcgcgaacatgacctccggcacaccatggcccttggcttcaggcgcga

SEQ ID NO: 230437 - DNA, 50 bp, Artificial
  Synthetic oligonucleotide
aatcgcgcaaactgaggccacaccgagccagtaaaggacctgcgtgttgc

SEQ ID NO: 230438 - DNA, 50 bp, Artificial
  Synthetic oligonucleotide
aatcgctgtcccatggtggtttcgcggtccaggaaagcccgtgcgatttc

SEQ ID NO: 230439 - DNA, 50 bp, Artificial
  Synthetic oligonucleotide
aggccgacgatgcactaacagtcaaaccggaccaccagattggggcacgc

SEQ ID NO: 230440 - DNA, 50 bp, Artificial
  Synthetic oligonucleotide
aatggcagcacgtagcccggtatgcgaacgtccttgccgataacgtccgg

SEQ ID NO: 230441 - DNA, 50 bp, Artificial
  Synthetic oligonucleotide
atctgtctgccctttatgcctcgccaaaggggctctgcggccccgttacc

SEQ ID NO: 230442 - DNA, 50 bp, Artificial
  Synthetic oligonucleotide
aatggcgagcctatgcgtctcgacaatggcaaccccgtgacctacccgat

SEQ ID NO: 230443 - DNA, 50 bp, Artificial
  Synthetic oligonucleotide
aatggcgcaaacgtgctgggggctacagttgccggtacagtgaccattgg

SEQ ID NO: 230444 - DNA, 50 bp, Artificial
  Synthetic oligonucleotide
aatggctcatgtcgcgtcctccgcgcgtttgctcgaaggctcaacagcgt

SEQ ID NO: 230445 - DNA, 50 bp, Artificial
  Synthetic oligonucleotide
aatgggatccacagccgaaccccagttttgccttgcgtcacccagatgcc

SEQ ID NO: 230446 - DNA, 59 bp, Artificial
  Synthetic oligonucleotide
agcgatgttggagaacccattttaagggccttgtgcggaattcgcgccgagacatgaga

SEQ ID NO: 230447 - DNA, 50 bp, Artificial
  Synthetic oligonucleotide
aatggtcgaccatcaaggggcggcattgggccgagtacgtcgttcagagg

SEQ ID NO: 230448 - DNA, 50 bp, Artificial
  Synthetic oligonucleotide
aatggtgtctcgccctatggctctgcgtgatggcttgacccgcttgcgcg

SEQ ID NO: 230449 - DNA, 50 bp, Artificial
  Synthetic oligonucleotide
cttgggcataaccatggaggctcaggcatatgcctgagcacgtgcttatg

SEQ ID NO: 230450 - DNA, 50 bp, Artificial
  Synthetic oligonucleotide
aatgtaagtgcggcaccgtcgcgcaagactgctttaacccgaggcacgta

SEQ ID NO: 230451 - DNA, 50 bp, Artificial
  Synthetic oligonucleotide
agagccttcacatccatcggtcgcctcccgctgccatgtctgatggggaa

SEQ ID NO: 230452 - DNA, 50 bp, Artificial
  Synthetic oligonucleotide
aatgtatgcggtcgcttgtccccagactgccccgagggtacgccgtcaga

SEQ ID NO: 230453 - DNA, 50 bp, Artificial
  Synthetic oligonucleotide
cttgtggtgggacggtctcttagctcgccgctactatctcgcagcgcgta

SEQ ID NO: 230454 - DNA, 50 bp, Artificial
  Synthetic oligonucleotide
aatgtcaagaacggtgcccgccctctcggcaagactgccctccatcttga

SEQ ID NO: 230455 - DNA, 50 bp, Artificial
  Synthetic oligonucleotide
aatgtcgccgcagtgtgctttcggccataccgtgggcgcgttcagacaaa

SEQ ID NO: 230456 - DNA, 50 bp, Artificial
  Synthetic oligonucleotide
aatgaccccgccccatcgacggggatcgagtaagtccgccccctagcgtg

SEQ ID NO: 230457 - DNA, 60 bp, Artificial
  Synthetic oligonucleotide
ctcaagaggcatggccttttgccctttcattgctagactgcgcccagctaagccgattga

SEQ ID NO: 230458 - DNA, 50 bp, Artificial
  Synthetic oligonucleotide
aatgaccgatgggatccgaggcagatggagtcggaaaacggcccgcagtt

SEQ ID NO: 230459 - DNA, 50 bp, Artificial
  Synthetic oligonucleotide
aatgaccgcccgagtgactagatcaacgcccatgacagaggcggaaccga

SEQ ID NO: 230460 - DNA, 50 bp, Artificial
  Synthetic oligonucleotide
aatgaccgtcaacgatttcgggctcgaccatgcgcattggcgcaactggg

SEQ ID NO: 230461 - DNA, 50 bp, Artificial
  Synthetic oligonucleotide
aatgacgggcctgttggtcggggtggcaacttaggcaggtacgatcaccc

SEQ ID NO: 230462 - DNA, 50 bp, Artificial
  Synthetic oligonucleotide
aatgaggcattcagcgccgacttctattcagcacctgtccttttatgggg

SEQ ID NO: 230463 - DNA, 50 bp, Artificial
  Synthetic oligonucleotide
aatgatccggtcgaaaggagcctgatccggcaggccaaaactcccgtcgc

SEQ ID NO: 230464 - DNA, 50 bp, Artificial
  Synthetic oligonucleotide
agagcgtcccagtcgtcgtttttccatcacgcgtcccccattgtcagata

SEQ ID NO: 230465 - DNA, 50 bp, Artificial
  Synthetic oligonucleotide
aatgcagcaggctatcgcaggcgcgggatcgcttctatgccagttccggc

SEQ ID NO: 230466 - DNA, 50 bp, Artificial
  Synthetic oligonucleotide
aatgccgcggaaacttgcttcacacggccccgagccgcagaatgaacacg

SEQ ID NO: 230467 - DNA, 50 bp, Artificial
  Synthetic oligonucleotide
cctactcgccgttctagcccgccgaggcttcatcagggaatggacgtgtg

SEQ ID NO: 230468 - DNA, 55 bp, Artificial
  Synthetic oligonucleotide
aacagtgcgatcaccgctcagttccttggccctgaacaatcggtccggaaaaccg

SEQ ID NO: 230469 - DNA, 50 bp, Artificial
  Synthetic oligonucleotide
aatgcgcagacaacagaaggccaccgtcaaccgaaggcccgatctcagca

SEQ ID NO: 230470 - DNA, 50 bp, Artificial
  Synthetic oligonucleotide
agagcgcaaaacccacggccagccattgatgaatatccggctgtcagccc

SEQ ID NO: 230471 - DNA, 50 bp, Artificial
  Synthetic oligonucleotide
aatgcgccgccagatcaagagtttcgccgggatcgaagctgcccgacact

SEQ ID NO: 230472 - DNA, 50 bp, Artificial
  Synthetic oligonucleotide
aatgcgcgctgccgtttgcgcgagattaacgagtcatcgggtacccagcc

SEQ ID NO: 230473 - DNA, 50 bp, Artificial
  Synthetic oligonucleotide
aatgcggcctttcaactgccgctggcccgtatggtgttcgaaggtcgagt

SEQ ID NO: 230474 - DNA, 50 bp, Artificial
  Synthetic oligonucleotide
aatgctggacacgtccgaaccttcctgaccggagtgccagtcacccggcc

SEQ ID NO: 230475 - DNA, 50 bp, Artificial
  Synthetic oligonucleotide
aatgctggtggattcagtgcgctgggtcgtgttggccccattcaacgacc

SEQ ID NO: 230476 - DNA, 50 bp, Artificial
  Synthetic oligonucleotide
aatggatataggtgcgcgcaatcccggttcaacccccggaccgtcggaaa

SEQ ID NO: 230477 - DNA, 50 bp, Artificial
  Synthetic oligonucleotide
aaggtcggccaaagggtctcgcgcggggatcaggttggtgatatgggaaa

SEQ ID NO: 230478 - DNA, 50 bp, Artificial
  Synthetic oligonucleotide
aaggtctagcctgttgggtcaggggttcactgtgagtccggcgcggaagg

SEQ ID NO: 230479 - DNA, 57 bp, Artificial
  Synthetic oligonucleotide
gcgcgggattttcgaccgtgatcgtttccccggaagccgctgcctgccaggcaccgc

SEQ ID NO: 230480 - DNA, 50 bp, Artificial
  Synthetic oligonucleotide
atgcgtgaccccgactctatcgccatgctaggcttttcaggcgctccctt

SEQ ID NO: 230481 - DNA, 50 bp, Artificial
  Synthetic oligonucleotide
aaggtctgtggaagaacgcgccgacacaagcgacggacctgacaagcgtc

SEQ ID NO: 230482 - DNA, 50 bp, Artificial
  Synthetic oligonucleotide
agaggggattgacgcgtggaaacggaagtcgagcacaccgggttggccat

SEQ ID NO: 230483 - DNA, 50 bp, Artificial
  Synthetic oligonucleotide
aaggtgcaggtgtctggcgggccccgttcaggttcatggaggccgttttg

SEQ ID NO: 230484 - DNA, 50 bp, Artificial
  Synthetic oligonucleotide
aaggtggcgggcgccaaaggtgagacggtcatgtctgcctagtccagcaa

SEQ ID NO: 230485 - DNA, 50 bp, Artificial
  Synthetic oligonucleotide
aaggtgggccgggagcacaacgagagtctgtgtccgaggccgcgttaacc

SEQ ID NO: 230486 - DNA, 50 bp, Artificial
  Synthetic oligonucleotide
aaggtgggtggcagctcataccgcagttaacgaagggaccgcaacgaccg

SEQ ID NO: 230487 - DNA, 50 bp, Artificial
  Synthetic oligonucleotide
ccgggttacgtttcactgttccagaccgcctttggcaagagcccgagcct

SEQ ID NO: 230488 - DNA, 50 bp, Artificial
  Synthetic oligonucleotide
aaggtgttcaggttgcgatcctcgtagtacccaccctggggacgcggcat

SEQ ID NO: 230489 - DNA, 50 bp, Artificial
  Synthetic oligonucleotide
cttatgaacgtgacaccggaactttcctcataaacgcgagcaagcagttg

SEQ ID NO: 230490 - DNA, 60 bp, Artificial
  Synthetic oligonucleotide
tgaatatctccgaatctggctcggatcagcactcgcaacatagcgaattataacaggttc

SEQ ID NO: 230491 - DNA, 50 bp, Artificial
  Synthetic oligonucleotide
cgggcggcgggatcaagtaatcgcaccggcaaggcaagcaaacgaggacg

SEQ ID NO: 230492 - DNA, 50 bp, Artificial
  Synthetic oligonucleotide
aagtcagaccgggtagccctaacagggcattcccccgccccatcgctaca

SEQ ID NO: 230493 - DNA, 50 bp, Artificial
  Synthetic oligonucleotide
aagtcagctgagggcctttgcccacaaattccacgaagaggcgaggcggc

SEQ ID NO: 230494 - DNA, 50 bp, Artificial
  Synthetic oligonucleotide
aagtcaggtgcgctgcatcaatggccgtgaacacagcttgcccctccaac

SEQ ID NO: 230495 - DNA, 50 bp, Artificial
  Synthetic oligonucleotide
aagtccagcctgcgacgccccatctgataccccacgaagcgccctgaccc

SEQ ID NO: 230496 - DNA, 50 bp, Artificial
  Synthetic oligonucleotide
aagggcagggggagtagtgccccaagttgcttctaccttgacgcgggttg

SEQ ID NO: 230497 - DNA, 50 bp, Artificial
  Synthetic oligonucleotide
aagggccgaatggttgcgtgccggacatcacattacagccatgggatcgg

SEQ ID NO: 230498 - DNA, 50 bp, Artificial
  Synthetic oligonucleotide
aagggccggtccagcttcaggaccagcaccctgtccgaagtcgcctctat

SEQ ID NO: 230499 - DNA, 50 bp, Artificial
  Synthetic oligonucleotide
atggacggcggaagggtcgccactgatcaggtgatgccacggatagaggg

SEQ ID NO: 230500 - DNA, 50 bp, Artificial
  Synthetic oligonucleotide
aagggctttgcggcgaatgaccagatcgcttggcaccgcaaggggatagg

SEQ ID NO: 230501 - DNA, 58 bp, Artificial
  Synthetic oligonucleotide
accgttttgccgtaacgcttgcaggcaaatgccctgacattacaccgccggcctgcga

SEQ ID NO: 230502 - DNA, 50 bp, Artificial
  Synthetic oligonucleotide
aggcccggtgaatcgtgcggcttgcattgaaaaaccggctggctttgcca

SEQ ID NO: 230503 - DNA, 50 bp, Artificial
  Synthetic oligonucleotide
atggacccccggcatgatcatatagggcgcaacttcgtggaacccctcgg

SEQ ID NO: 230504 - DNA, 50 bp, Artificial
  Synthetic oligonucleotide
aaggggaacgaagtgcctcatcctggccgcgcgtaacccatgcaaggggg

SEQ ID NO: 230505 - DNA, 50 bp, Artificial
  Synthetic oligonucleotide
agataccgggcgacctttgcaatccacgggcttccacctacctaagggga

SEQ ID NO: 230506 - DNA, 50 bp, Artificial
  Synthetic oligonucleotide
aaggggcctggtattctggcggacggggtagataagctgcgtcaaggcaa

SEQ ID NO: 230507 - DNA, 50 bp, Artificial
  Synthetic oligonucleotide
ccggggcggtctagcggcggcggggaaccaaacgggcacgaattgtgttc

SEQ ID NO: 230508 - DNA, 50 bp, Artificial
  Synthetic oligonucleotide
aagggggcgatctaccgcctaggccggaatgtgcaatagcttggcgtgga

SEQ ID NO: 230509 - DNA, 50 bp, Artificial
  Synthetic oligonucleotide
agaggttggcactctgagctttcgccacattgcgaccagcgcaactgccg

SEQ ID NO: 230510 - DNA, 50 bp, Artificial
  Synthetic oligonucleotide
aagggggctttgccccgttagggtgcgcccatccggcctattggaaccaa

SEQ ID NO: 230511 - DNA, 50 bp, Artificial
  Synthetic oligonucleotide
aagggggtgcaccgattgaaaatccggctcggcccgcccacattcgaacg

SEQ ID NO: 230512 - DNA, 56 bp, Artificial
  Synthetic oligonucleotide
acctacatttcgatcgaaagcctcggtggatcgaatttcggcgacactctagcggg

SEQ ID NO: 230513 - DNA, 50 bp, Artificial
  Synthetic oligonucleotide
atgctgccagatgagaggcccgatggcgaatagtggatgcactgaggcct

SEQ ID NO: 230514 - DNA, 50 bp, Artificial
  Synthetic oligonucleotide
aagggttttgcggggtgatccacggtgccagtaacgccaacaccacaacg

SEQ ID NO: 230515 - DNA, 50 bp, Artificial
  Synthetic oligonucleotide
aaggtcgcaatacccgcagtcatcaacctgtatcaggcccgacgcgctgc

SEQ ID NO: 230516 - DNA, 50 bp, Artificial
  Synthetic oligonucleotide
ggtcctcgcacactgctggctgcaacctgctcaaacctcatgagcgcagc

SEQ ID NO: 230517 - DNA, 50 bp, Artificial
  Synthetic oligonucleotide
cttctggctagccttgcctgcaatgcaaccggccccgcggactggagagg

SEQ ID NO: 230518 - DNA, 50 bp, Artificial
  Synthetic oligonucleotide
aagtgcgcttccgggaacctggcgttgcccgatccctgatcgtgacgggg

SEQ ID NO: 230519 - DNA, 50 bp, Artificial
  Synthetic oligonucleotide
aagtgctcggatcatgcctgcctcgcaggccccttttcagtcgcatgact

SEQ ID NO: 230520 - DNA, 50 bp, Artificial
  Synthetic oligonucleotide
atgcctggcggattcgatgtggaagccggacctgaagtacgaatgcgggc

SEQ ID NO: 230521 - DNA, 50 bp, Artificial
  Synthetic oligonucleotide
aagttccgggctaccgatcacgccgtgaaatccatggggactgggccttc

SEQ ID NO: 230522 - DNA, 50 bp, Artificial
  Synthetic oligonucleotide
atgcccgatctcaggcaccgcgatatccgagggtgcgatccgccccggaa

SEQ ID NO: 230523 - DNA, 59 bp, Artificial
  Synthetic oligonucleotide
ccgcactaggttgcgtacagggcgtgtgctcaaggcggctaatccgacaaggattagta

SEQ ID NO: 230524 - DNA, 60 bp, Artificial
  Synthetic oligonucleotide
cttgagcaacggcaatagcgggcttctgacagcggcacacggtgctctcgacccgccttt

SEQ ID NO: 230525 - DNA, 50 bp, Artificial
  Synthetic oligonucleotide
aagttctagagcaccccgcatcgcggattactcatggggcgccgaagacg

SEQ ID NO: 230526 - DNA, 50 bp, Artificial
  Synthetic oligonucleotide
aagtttcccgatttggcgcgaagcagcttaacagtcgctccggcttggcg

SEQ ID NO: 230527 - DNA, 50 bp, Artificial
  Synthetic oligonucleotide
aatacctctcaagcgggttacccgtccgcgcagcatgggaacgctctcaa

SEQ ID NO: 230528 - DNA, 50 bp, Artificial
  Synthetic oligonucleotide
aatagcccccaaacgcgcaatagcccaaggccacgacacgtggcgagtgc

SEQ ID NO: 230529 - DNA, 50 bp, Artificial
  Synthetic oligonucleotide
atgccacagcgtgccaccaggtaggctcccaaaaactccaacccgtttga

SEQ ID NO: 230530 - DNA, 50 bp, Artificial
  Synthetic oligonucleotide
aatagctcaccgaaagcgaccaccaggcaagcgcccaaagggcaaggaac

SEQ ID NO: 230531 - DNA, 50 bp, Artificial
  Synthetic oligonucleotide
aataggattggcggagttgcgcggtaagccactgtcgggggccgttctgg

SEQ ID NO: 230532 - DNA, 50 bp, Artificial
  Synthetic oligonucleotide
aatatcgttgtgccttttgcccggacgccgagtgcgatagcctgcgcgca

SEQ ID NO: 230533 - DNA, 50 bp, Artificial
  Synthetic oligonucleotide
aatcaatccgcagagccacggccgacccctaaacggaccgccgacagccc

SEQ ID NO: 230534 - DNA, 50 bp, Artificial
  Synthetic oligonucleotide
cttctgtcgccgcttggagtccatattccgcttgaagccgagcgcgggta

SEQ ID NO: 230535 - DNA, 60 bp, Artificial
  Synthetic oligonucleotide
tgcgcccatggtcctttgccccgccgccgctagcttggcagtcagcaacgacgagagacc

SEQ ID NO: 230536 - DNA, 50 bp, Artificial
  Synthetic oligonucleotide
atgaggcgggcttcaaaggaacgtggcctgcgaatccgcgggggttccgg

SEQ ID NO: 230537 - DNA, 50 bp, Artificial
  Synthetic oligonucleotide
aggcccttggctcggcacatccctattcgactgctgtaagcccttcggtc

SEQ ID NO: 230538 - DNA, 50 bp, Artificial
  Synthetic oligonucleotide
aagtcccctgtccgaaagaccagtcgtttcacgcatccccgcgtgtccgt

SEQ ID NO: 230539 - DNA, 50 bp, Artificial
  Synthetic oligonucleotide
ggtgctgccccatgtgcgcaccgatgcgacggaatatgcccagttcggta

SEQ ID NO: 230540 - DNA, 50 bp, Artificial
  Synthetic oligonucleotide
cttcgccgtgaatcggcccaagccaccgaacgcgggaaacattcagcttc

SEQ ID NO: 230541 - DNA, 50 bp, Artificial
  Synthetic oligonucleotide
atgcgcccaaatctggagtttgttcggcaactggctcctgtgggccggag

SEQ ID NO: 230542 - DNA, 50 bp, Artificial
  Synthetic oligonucleotide
aagtcgtcctcatggacccgatcagcgcttcacttgctgtcggacgccag

SEQ ID NO: 230543 - DNA, 50 bp, Artificial
  Synthetic oligonucleotide
ggtgacacggcgcccctcattcagtggcacccaggatgtcccccaatacc

SEQ ID NO: 230544 - DNA, 50 bp, Artificial
  Synthetic oligonucleotide
aagtctgcgccctgttgacgcgcgctttggctcggctaatgtctgccttt

SEQ ID NO: 230545 - DNA, 50 bp, Artificial
  Synthetic oligonucleotide
ccggtggcgagtccgccttgtggtggcggtaaccattgggaggtttcacc

SEQ ID NO: 230546 - DNA, 57 bp, Artificial
  Synthetic oligonucleotide
aaataggagatccggttttggaactccacgtgacgcctcagatctcggatggcccga

SEQ ID NO: 230547 - DNA, 50 bp, Artificial
  Synthetic oligonucleotide
atgcgcagcatgacactgaaaacgggattgaaacgggtcggcctaggggc

SEQ ID NO: 230548 - DNA, 50 bp, Artificial
  Synthetic oligonucleotide
aagtcttgcgctcccgggcagttccctgttcaatcgccgtccaagcttcc

SEQ ID NO: 230549 - DNA, 50 bp, Artificial
  Synthetic oligonucleotide
ggtcgctaagatttaccacgcggatcagctgtcggctaataggatcgcaa

SEQ ID NO: 230550 - DNA, 50 bp, Artificial
  Synthetic oligonucleotide
aagtcttgggcgcgagtggcaagtgcccggaccagcaacacaggatgggc

SEQ ID NO: 230551 - DNA, 50 bp, Artificial
  Synthetic oligonucleotide
aagtgagcatctgaccggattcactgcgacggcaggggacggtggcagca

SEQ ID NO: 230552 - DNA, 50 bp, Artificial
  Synthetic oligonucleotide
aagtgaggcgcaagcgtccctccgtgggagagacggaatccgagcgtcag

SEQ ID NO: 230553 - DNA, 50 bp, Artificial
  Synthetic oligonucleotide
aagtgccgaccaaacgtctcccagcggagcatcttcaggctcctgctgaa

SEQ ID NO: 230554 - DNA, 50 bp, Artificial
  Synthetic oligonucleotide
aagtgccgcacgcaaaggcccggccagcttgcctagtttcatgtcatgag

SEQ ID NO: 230555 - DNA, 50 bp, Artificial
  Synthetic oligonucleotide
aagtgccggtcacgtctgccctgatagagatttcgcttcgggcctgcgac

SEQ ID NO: 230556 - DNA, 50 bp, Artificial
  Synthetic oligonucleotide
acacggtccgtgcgccccgcaaaggcatggttcatcggcttgaacgaggt

SEQ ID NO: 230557 - DNA, 55 bp, Artificial
  Synthetic oligonucleotide
gccactgtatccgccggggagccaccagttccgtgccgaaacgcttttggaatag

SEQ ID NO: 230558 - DNA, 50 bp, Artificial
  Synthetic oligonucleotide
acacgtccgaaccttcctgaccggagtgccagtcacccggccacggtcac

SEQ ID NO: 230559 - DNA, 50 bp, Artificial
  Synthetic oligonucleotide
agacggtgtgtttcgcccatatccgccactctgccctcgggtcgccccgg

SEQ ID NO: 230560 - DNA, 50 bp, Artificial
  Synthetic oligonucleotide
acacgttttcgtttcgcccctattcccgccggactgcctgcgacggtccc

SEQ ID NO: 230561 - DNA, 50 bp, Artificial
  Synthetic oligonucleotide
acactatgcagacgaagttgccgtccgagcgccgcgcagttaacagcgtg

SEQ ID NO: 230562 - DNA, 50 bp, Artificial
  Synthetic oligonucleotide
acactccggttttcggcatcgcaaccatggcaggggcccagcagacccgc

SEQ ID NO: 230563 - DNA, 50 bp, Artificial
  Synthetic oligonucleotide
acactctgcccggaccccattgtggagatgtggcgaaggtaggcctgtgg

SEQ ID NO: 230564 - DNA, 50 bp, Artificial
  Synthetic oligonucleotide
acactggccgcgcgtctggtcagcggtggtccggggtcttacgtgaaccg

SEQ ID NO: 230565 - DNA, 50 bp, Artificial
  Synthetic oligonucleotide
acactgtcgtccgcaggggagctggaactggtcacaacggcgatgcctgt

SEQ ID NO: 230566 - DNA, 50 bp, Artificial
  Synthetic oligonucleotide
agacgcgcttcagaggatatcccggcggcggttggcttccaactcacaat

SEQ ID NO: 230567 - DNA, 50 bp, Artificial
  Synthetic oligonucleotide
aggcgggacaggcaaatggtggaatggttggctctggcggcgataagcct

SEQ ID NO: 230568 - DNA, 60 bp, Artificial
  Synthetic oligonucleotide
agagcggcggcatgtcacgggcatagcgtccttggtcgggtctggtgatcggcacatcac

SEQ ID NO: 230569 - DNA, 50 bp, Artificial
  Synthetic oligonucleotide
aggcgggcagtaggctccgataccccaaccgccgcggacagcatagcgtg

SEQ ID NO: 230570 - DNA, 50 bp, Artificial
  Synthetic oligonucleotide
acacttgcctcgggcggtaagctgcgcaatagaggggacggacaagcggg

SEQ ID NO: 230571 - DNA, 50 bp, Artificial
  Synthetic oligonucleotide
acactttccccggaggtgcggtttccaagcagacaggcgcgaggtgcaaa

SEQ ID NO: 230572 - DNA, 50 bp, Artificial
  Synthetic oligonucleotide
atccctatgtccccacagggcacattgcgcccttaggttcacggcggtct

SEQ ID NO: 230573 - DNA, 50 bp, Artificial
  Synthetic oligonucleotide
acagaaacggggctgatcacctgtccacgcacagggcagaaccgaacgct

SEQ ID NO: 230574 - DNA, 50 bp, Artificial
  Synthetic oligonucleotide
cggcttgacggcggacagtctcccgcgcttttcctgtgccttttatcagc

SEQ ID NO: 230575 - DNA, 50 bp, Artificial
  Synthetic oligonucleotide
acaccagggatggcccggctacccgatgtgccttggctgagcaccgagga

SEQ ID NO: 230576 - DNA, 50 bp, Artificial
  Synthetic oligonucleotide
ggagctgaaacgcaggcattcgtttcgactgcggtatccgaagagaggat

SEQ ID NO: 230577 - DNA, 50 bp, Artificial
  Synthetic oligonucleotide
acacccggcagcatccacaggtattgccttttgacctgcgacaagccccg

SEQ ID NO: 230578 - DNA, 50 bp, Artificial
  Synthetic oligonucleotide
atcgaccaagcgcgttctcgtccaaccgacaccccctcgaagcgccacat

SEQ ID NO: 230579 - DNA, 60 bp, Artificial
  Synthetic oligonucleotide
tgcgcgtccttctgggtgcttgtcaggacggctagaaagcctatgatctacggctagcca

SEQ ID NO: 230580 - DNA, 50 bp, Artificial
  Synthetic oligonucleotide
acaccgatagtcccacggtcacatcatgccggacctgaggggtttgcgcc

SEQ ID NO: 230581 - DNA, 50 bp, Artificial
  Synthetic oligonucleotide
acaccgcgccaaacttctgttgccccgaacagtccgcagcttgcgcgtcc

SEQ ID NO: 230582 - DNA, 50 bp, Artificial
  Synthetic oligonucleotide
acaccgctgatgtgcgaaattgccacccgttgggtacaggacggtaccgc

SEQ ID NO: 230583 - DNA, 50 bp, Artificial
  Synthetic oligonucleotide
acaccggggcacagcggcatcaggccctcaggctaattgcgcagaatctc

SEQ ID NO: 230584 - DNA, 50 bp, Artificial
  Synthetic oligonucleotide
acacctctgccgcgttgcaaaaacccgcccgccgtggcaattgaaaccaa

SEQ ID NO: 230585 - DNA, 50 bp, Artificial
  Synthetic oligonucleotide
ccttcagcctgaggaccatcccaatggcacgcgactaccccctcgagctg

SEQ ID NO: 230586 - DNA, 50 bp, Artificial
  Synthetic oligonucleotide
acacctggatcggcgctggatcacgaggcgcgcaaacgggggaattcaac

SEQ ID NO: 230587 - DNA, 50 bp, Artificial
  Synthetic oligonucleotide
acacgatctttccgatcggcaagctgccccatcccggagacctcagccaa

SEQ ID NO: 230588 - DNA, 50 bp, Artificial
  Synthetic oligonucleotide
acacgccgggcgcctgtattttgaggcatagcggacacttgcgcgcttga

SEQ ID NO: 230589 - DNA, 50 bp, Artificial
  Synthetic oligonucleotide
acacgcgccagcctggaactcacccgttcgctttcagggtcacgggccgg

SEQ ID NO: 230590 - DNA, 59 bp, Artificial
  Synthetic oligonucleotide
ccagcgtgatacgccaagacttctgttggccacagtgttttcgagcaatttcgtatacc

SEQ ID NO: 230591 - DNA, 50 bp, Artificial
  Synthetic oligonucleotide
acacgcgccataattgctctgcctcctcgcaggttatggacgccttccgc

SEQ ID NO: 230592 - DNA, 50 bp, Artificial
  Synthetic oligonucleotide
acacgctgcaaatgcaggtgaacgactgtcgcgagaaccgcatgggggcc

SEQ ID NO: 230593 - DNA, 50 bp, Artificial
  Synthetic oligonucleotide
acacggccttggctaaacgatccgccatccgcaaagggcatcaggccaga

SEQ ID NO: 230594 - DNA, 50 bp, Artificial
  Synthetic oligonucleotide
acacggctccgtctgcctaaaccggtgttaatccccggcgactgatcggg

SEQ ID NO: 230595 - DNA, 50 bp, Artificial
  Synthetic oligonucleotide
acagggcctccggtcagcctcaggtgtcgcgtgcgataacgaaacgcgcc

SEQ ID NO: 230596 - DNA, 50 bp, Artificial
  Synthetic oligonucleotide
acagggggtcgcagaacgcgtgattgcctgccagattccggagtctcgtg

SEQ ID NO: 230597 - DNA, 50 bp, Artificial
  Synthetic oligonucleotide
gctgacggggaaccgaagcgcgaaagcccagacatgtacgggtcgtgtcc

SEQ ID NO: 230598 - DNA, 50 bp, Artificial
  Synthetic oligonucleotide
acaggtcccccttgcgtgagcgttgtcacccaaccgtgaacccgtcgcga

SEQ ID NO: 230599 - DNA, 50 bp, Artificial
  Synthetic oligonucleotide
acaggtcgctcaccctgaggaaggctaagaggggctaggggtctttgcgc

SEQ ID NO: 230600 - DNA, 50 bp, Artificial
  Synthetic oligonucleotide
acaggtttctcagccattgcgacatccccctgtgtcggcgcaggctagct

SEQ ID NO: 230601 - DNA, 60 bp, Artificial
  Synthetic oligonucleotide
aaagtgacgaagaatggtgtgcaaagtgacgaagaatggtgtgcaaagtgacgaagaatg

SEQ ID NO: 230602 - DNA, 50 bp, Artificial
  Synthetic oligonucleotide
acagtcttgggcacggtgctaaggggcgcagcgcagagagtcaacggcgt

SEQ ID NO: 230603 - DNA, 50 bp, Artificial
  Synthetic oligonucleotide
acagtgggggttctgtattcgcgtgcaacccgaacgccgacacgcacatt

SEQ ID NO: 230604 - DNA, 50 bp, Artificial
  Synthetic oligonucleotide
atcacgcggcaccctgatccggcctctacgtgcctgaccatgcgcatgag

SEQ ID NO: 230605 - DNA, 50 bp, Artificial
  Synthetic oligonucleotide
acatagaccgtcggtgccgcttccagcgacgcaccaatcaccttggcagt

SEQ ID NO: 230606 - DNA, 50 bp, Artificial
  Synthetic oligonucleotide
acataggccctagcgctttgcgtcccaactggaggaggcatgtttgcggg

SEQ ID NO: 230607 - DNA, 50 bp, Artificial
  Synthetic oligonucleotide
acatatcccatgcggtctctgccattgcggctgtccccagcatgaggctt

SEQ ID NO: 230608 - DNA, 50 bp, Artificial
  Synthetic oligonucleotide
acatcaaggccaggggcgctttgggcccccaaggtcattgtgtcgtccac

SEQ ID NO: 230609 - DNA, 50 bp, Artificial
  Synthetic oligonucleotide
acatcacaagccttagggcagggggatcaccgcgaagttggtgcgctgtt

SEQ ID NO: 230610 - DNA, 50 bp, Artificial
  Synthetic oligonucleotide
acatcactacagaacattccccacgcggcgtccctcttatggggcccgcc

SEQ ID NO: 230611 - DNA, 50 bp, Artificial
  Synthetic oligonucleotide
acatcccattccgtcacgaggataaacccgccacggaccgcccttccggc

SEQ ID NO: 230612 - DNA, 57 bp, Artificial
  Synthetic oligonucleotide
tgcggaacctcaagcgccgcgccagactagggattttcaccgggttgttcaggagga

SEQ ID NO: 230613 - DNA, 50 bp, Artificial
  Synthetic oligonucleotide
atcaacaccttcggggagtgccgcacccgttagaattcggagggcatgcc

SEQ ID NO: 230614 - DNA, 50 bp, Artificial
  Synthetic oligonucleotide
cggccaattgcggggttttgccccgtcacaccctgatatccgggagatcg

SEQ ID NO: 230615 - DNA, 50 bp, Artificial
  Synthetic oligonucleotide
acagaaggatggcatccccctcgctctgcaaggggcggctctctgagagc

SEQ ID NO: 230616 - DNA, 50 bp, Artificial
  Synthetic oligonucleotide
atcccggtaagagggcatcgcccccgccagtatttgatcagacgctcacg

SEQ ID NO: 230617 - DNA, 50 bp, Artificial
  Synthetic oligonucleotide
acagagccgatgcgtggcacgggacgaatcaaccgctccccgccacaacc

SEQ ID NO: 230618 - DNA, 50 bp, Artificial
  Synthetic oligonucleotide
acagagttggtcgcggggcaggttcacaaaagtgcgcaccgtggcgtctg

SEQ ID NO: 230619 - DNA, 50 bp, Artificial
  Synthetic oligonucleotide
acagatcagacgttggttgcctcctcgatccctgagcaggacgcgccgga

SEQ ID NO: 230620 - DNA, 50 bp, Artificial
  Synthetic oligonucleotide
atcccgggaaacgccccgaacgtgtgcagtggacggatgatcgaatcgtg

SEQ ID NO: 230621 - DNA, 50 bp, Artificial
  Synthetic oligonucleotide
acagcggatatcgcaattgccgctcagggggcgacagcccataagctgcc

SEQ ID NO: 230622 - DNA, 50 bp, Artificial
  Synthetic oligonucleotide
acagctgccccatcaggatgtacgccgtcgcaccgccggatttaccttcg

SEQ ID NO: 230623 - DNA, 60 bp, Artificial
  Synthetic oligonucleotide
aaagtattcatgatgccttctctttcggaatcatcggctcacgcgtctgacgtccgcaca

SEQ ID NO: 230624 - DNA, 50 bp, Artificial
  Synthetic oligonucleotide
aggctccaaccgggccttgggaaaggtctctcgaaacgactcctcaagcc

SEQ ID NO: 230625 - DNA, 50 bp, Artificial
  Synthetic oligonucleotide
gcttagggctcaaatccgcctgacaggatcggataccaaaagacaaggtt

SEQ ID NO: 230626 - DNA, 50 bp, Artificial
  Synthetic oligonucleotide
atcccgcgaggcccaatgtccgacacacccgagccaggctatcaggttct

SEQ ID NO: 230627 - DNA, 50 bp, Artificial
  Synthetic oligonucleotide
acagctggctgtcatgcggctcggtcaatgagccatgggcctccatgggg

SEQ ID NO: 230628 - DNA, 50 bp, Artificial
  Synthetic oligonucleotide
acagctggttcctcgaagaggaagacctcacggaacgcccgatccgcacg

SEQ ID NO: 230629 - DNA, 50 bp, Artificial
  Synthetic oligonucleotide
agacctgcatggactgagcgccgaaaatggggacgcaagcgacctcaggc

SEQ ID NO: 230630 - DNA, 50 bp, Artificial
  Synthetic oligonucleotide
atccagctccgcgcaggtcgcaagcggggtgggattggtcaaccgagcag

SEQ ID NO: 230631 - DNA, 50 bp, Artificial
  Synthetic oligonucleotide
acaggctcgggacgacagcacccgctacacaaaacacgggtttgccctct

SEQ ID NO: 230632 - DNA, 50 bp, Artificial
  Synthetic oligonucleotide
gctgcccaggcagccaggaacccgttctctccccacagcgccggatctga

SEQ ID NO: 230633 - DNA, 50 bp, Artificial
  Synthetic oligonucleotide
atcagttgctgtctcgacgggacgaccgctgacgcagaagtgcgcagccg

SEQ ID NO: 230634 - DNA, 59 bp, Artificial
  Synthetic oligonucleotide
ggcaaaacctaggtctgctctgcggacaaagcagtcattcgccggtttcagggtgcgag

SEQ ID NO: 230635 - DNA, 60 bp, Artificial
  Synthetic oligonucleotide
cttgtgtctgcgcgaaagcagtccgtttgccaagagcagcagaagtctggttggaaacgt

SEQ ID NO: 230636 - DNA, 50 bp, Artificial
  Synthetic oligonucleotide
acagggaggttgctgtgtcatgccccgtcacagcatggggttgcttcacc

SEQ ID NO: 230637 - DNA, 50 bp, Artificial
  Synthetic oligonucleotide
cctccaccgtccgtctcggctcggccggataagatgcaaattgtcggcag

SEQ ID NO: 230638 - DNA, 50 bp, Artificial
  Synthetic oligonucleotide
aattgtggcgcgttttgtctgcacagatcggtggcatgcgggcaccttgg

SEQ ID NO: 230639 - DNA, 50 bp, Artificial
  Synthetic oligonucleotide
aatttcccgctgccacacgaacgccccacgggctgtaattttggcccgcg

SEQ ID NO: 230640 - DNA, 50 bp, Artificial
  Synthetic oligonucleotide
aatttccgcccatctgcgcaactttgcaaggcgaccacagcaagcgacgg

SEQ ID NO: 230641 - DNA, 50 bp, Artificial
  Synthetic oligonucleotide
ggcgacacgccagcggtggacgctacattcaggataaccccacgaccgcg

SEQ ID NO: 230642 - DNA, 50 bp, Artificial
  Synthetic oligonucleotide
aatttgggcgggccggggtcgttttgccggtccagaacaccttcgagccc

SEQ ID NO: 230643 - DNA, 50 bp, Artificial
  Synthetic oligonucleotide
cctccgaggtaggatcaccctgaacgttgctccctccttcggacgggact

SEQ ID NO: 230644 - DNA, 50 bp, Artificial
  Synthetic oligonucleotide
atcgtggcttgacctttgcccgcccagaggccagcttgcgccgacttttg

SEQ ID NO: 230645 - DNA, 50 bp, Artificial
  Synthetic oligonucleotide
atcgtgcttgtcccttggctggccccatgcgtatatcggcgcaggcgcaa

SEQ ID NO: 230646 - DNA, 59 bp, Artificial
  Synthetic oligonucleotide
tgctctggatcacctcgccaaacgggatccggttctcggatccggataatcgcggcctg

SEQ ID NO: 230647 - DNA, 50 bp, Artificial
  Synthetic oligonucleotide
acaaacgtgccagacagcccgcttgacgcaatgacggggcgggtcccctg

SEQ ID NO: 230648 - DNA, 50 bp, Artificial
  Synthetic oligonucleotide
acaaaggcccggtgacaggcaccagcgattgggtcgaacgccgcatcatc

SEQ ID NO: 230649 - DNA, 50 bp, Artificial
  Synthetic oligonucleotide
acaaagggggccaacagccgccttggccagtagatcggtattgcgtggat

SEQ ID NO: 230650 - DNA, 50 bp, Artificial
  Synthetic oligonucleotide
acaaattctgctcgtaacccaccacccgcaaagtggttcgcccggtgggc

SEQ ID NO: 230651 - DNA, 50 bp, Artificial
  Synthetic oligonucleotide
agagccaatcgctgctatcctgccacgccgcgacagttgcgtcgatcccc

SEQ ID NO: 230652 - DNA, 50 bp, Artificial
  Synthetic oligonucleotide
acaacagataaaaacccgcagcgcccatcagtgtcgccgcaccaatgcgc

SEQ ID NO: 230653 - DNA, 50 bp, Artificial
  Synthetic oligonucleotide
acaaccactttgcgcccaggtacaacaataggtgggccatccggccgcag

SEQ ID NO: 230654 - DNA, 50 bp, Artificial
  Synthetic oligonucleotide
cctgaaacgacggagggggtcgtgacctacaaggcgatcctttcggtgga

SEQ ID NO: 230655 - DNA, 50 bp, Artificial
  Synthetic oligonucleotide
cctcacgaagcgtagcgtcagccgtgccgctcctccgaggtaggatcacc

SEQ ID NO: 230656 - DNA, 50 bp, Artificial
  Synthetic oligonucleotide
aatgtcgggcctcggttggaacccagcttgggatgcctccgcccataggc

SEQ ID NO: 230657 - DNA, 60 bp, Artificial
  Synthetic oligonucleotide
tgctgacgcctcttgtctacgaactctattggggacgaacagttgaagcgagtcagacat

SEQ ID NO: 230658 - DNA, 50 bp, Artificial
  Synthetic oligonucleotide
agagccggggctttttccactcctcccccacgattcaaagcgcttgcagg

SEQ ID NO: 230659 - DNA, 50 bp, Artificial
  Synthetic oligonucleotide
aatgtggtcacttcgcgtgcgcctttcggctatcagacggggcctgcgtc

SEQ ID NO: 230660 - DNA, 50 bp, Artificial
  Synthetic oligonucleotide
cctcacgatgaggtcgattatgcaaaggaatgactaatttgcctcggtca

SEQ ID NO: 230661 - DNA, 50 bp, Artificial
  Synthetic oligonucleotide
aattacgttctccgcagccgcgccgatggcacctcagtcaagcctgaagg

SEQ ID NO: 230662 - DNA, 50 bp, Artificial
  Synthetic oligonucleotide
aattatcgtgacagcgggcagagttgaccggcgcccggcttggcttatgg

SEQ ID NO: 230663 - DNA, 50 bp, Artificial
  Synthetic oligonucleotide
aattcacgggtacgattgaggccctcggccctgacgtgaccgggctgcgt

SEQ ID NO: 230664 - DNA, 50 bp, Artificial
  Synthetic oligonucleotide
aattcatgccgcagcccaaaaacagcccgcgtgtctcagccgtttcccca

SEQ ID NO: 230665 - DNA, 50 bp, Artificial
  Synthetic oligonucleotide
aattccgtcggcgctgtctcccacggaaacaggacccaccccgtgccttt

SEQ ID NO: 230666 - DNA, 50 bp, Artificial
  Synthetic oligonucleotide
aattgcagccgaggacgtgaccgttacctaccgcaatgggcacacggcac

SEQ ID NO: 230667 - DNA, 50 bp, Artificial
  Synthetic oligonucleotide
aattgcggggcgttgtccgtttttcgtctccggacacagggccataaccg

SEQ ID NO: 230668 - DNA, 60 bp, Artificial
  Synthetic oligonucleotide
gccaacacacccatgaagtgcgtcgacgctgccataagacataggtaccgcaacatattt

SEQ ID NO: 230669 - DNA, 50 bp, Artificial
  Synthetic oligonucleotide
aattgctatcgcttcgtgcgtacggggtccacgggctggtggtcattgga

SEQ ID NO: 230670 - DNA, 50 bp, Artificial
  Synthetic oligonucleotide
aattgctggctcagacgggtgacgaccgacctgtgctcaccacaatggga

SEQ ID NO: 230671 - DNA, 50 bp, Artificial
  Synthetic oligonucleotide
aattggccagctggttaggcgatcgcagaatggatgatgtgcgcggagcg

SEQ ID NO: 230672 - DNA, 50 bp, Artificial
  Synthetic oligonucleotide
atctctcggcgaacccactcgggatgcttcgcaaggtatccgacggaccg

SEQ ID NO: 230673 - DNA, 50 bp, Artificial
  Synthetic oligonucleotide
aattggcctccgcacacggctgatcacgaaaacgctagccgcagaggtcc

SEQ ID NO: 230674 - DNA, 50 bp, Artificial
  Synthetic oligonucleotide
cgggacgtgaccagacatccaactttcgcgggacgcgccaggcaaggaaa

SEQ ID NO: 230675 - DNA, 50 bp, Artificial
  Synthetic oligonucleotide
acaagtggccgttggaaccggcagcattcaggtgaccgggtcttgtggcg

SEQ ID NO: 230676 - DNA, 50 bp, Artificial
  Synthetic oligonucleotide
acaatccaaaaagctgcggcgctcccgaggtgggcgctgttccctgtcgt

SEQ ID NO: 230677 - DNA, 50 bp, Artificial
  Synthetic oligonucleotide
atcgcgtcctggggtgggaatgttaccgacgccaatcgtgcggcctattg

SEQ ID NO: 230678 - DNA, 50 bp, Artificial
  Synthetic oligonucleotide
acaatcgcgggtgccgcaatcacgtgcagccaaaaaccattggccgaacg

SEQ ID NO: 230679 - DNA, 60 bp, Artificial
  Synthetic oligonucleotide
ctttacggacgtttcatgcactgccggcagtgcattgcgaatgcaatgtcacgagcgtgt

SEQ ID NO: 230680 - DNA, 50 bp, Artificial
  Synthetic oligonucleotide
ggatggtaggtcatcggtccctcgtgccttggccggtcgtcgcggctatg

SEQ ID NO: 230681 - DNA, 50 bp, Artificial
  Synthetic oligonucleotide
aggcgagggtccaacccgcgaatccaatctcgctgcggcgttacaactct

SEQ ID NO: 230682 - DNA, 50 bp, Artificial
  Synthetic oligonucleotide
cctgtggtagcgggcggaacgtcaaagctctgtgaaggggcagcaccagc

SEQ ID NO: 230683 - DNA, 50 bp, Artificial
  Synthetic oligonucleotide
acaattgaccggccaggatcgtcttgtgctggcatgcgtcggcaacgggt

SEQ ID NO: 230684 - DNA, 50 bp, Artificial
  Synthetic oligonucleotide
acacaatgccacccgagctgatgagaggaccgcaagctgcgccggatgac

SEQ ID NO: 230685 - DNA, 50 bp, Artificial
  Synthetic oligonucleotide
acacaccgggggcgactgtctatggaacggggccatttgccgacccgata

SEQ ID NO: 230686 - DNA, 50 bp, Artificial
  Synthetic oligonucleotide
acacacgcgccaatgcctgatgcacaccttgggccgtatcgtgcgttggg

SEQ ID NO: 230687 - DNA, 50 bp, Artificial
  Synthetic oligonucleotide
acacaggcatacgctagcagtggggcgcagccccttcaagccgcattcac

SEQ ID NO: 230688 - DNA, 50 bp, Artificial
  Synthetic oligonucleotide
acacatcaagtgccgccacgatttcaccctctgcaccgtataccggcgcg

SEQ ID NO: 230689 - DNA, 50 bp, Artificial
  Synthetic oligonucleotide
acacatcctggtttcccccggcctacccggagatacatgacagcgcaccg

SEQ ID NO: 230690 - DNA, 59 bp, Artificial
  Synthetic oligonucleotide
tggagcagttggttcacataaaattgtgggctgtgcaaagcattaaggactaaacctct

SEQ ID NO: 230691 - DNA, 50 bp, Artificial
  Synthetic oligonucleotide
agagactgggggcggttcagagaccgaaaccgggggtgcagcctgtctcg

SEQ ID NO: 230692 - DNA, 50 bp, Artificial
  Synthetic oligonucleotide
agactgcgcccagctaagccgattgaccgggtgtccgcaatgcatctcgg

SEQ ID NO: 230693 - DNA, 50 bp, Artificial
  Synthetic oligonucleotide
ggagtgagcggatgcgaatgagggacgaattcggtgcgcccgaacggaag

SEQ ID NO: 230694 - DNA, 50 bp, Artificial
  Synthetic oligonucleotide
acacattggacgtgctggtggcagccctttacggcacctctgatccggca

SEQ ID NO: 230695 - DNA, 50 bp, Artificial
  Synthetic oligonucleotide
acaccaacaaccaaggcccctgcccattcgcgttagttaccgttgccgct

SEQ ID NO: 230696 - DNA, 50 bp, Artificial
  Synthetic oligonucleotide
acaacccctcttgtgcctcggtcaacgggtggttgtctgcgctttgcgcc

SEQ ID NO: 230697 - DNA, 50 bp, Artificial
  Synthetic oligonucleotide
agagagccacccgctactagcccatctggggcccgaaccgctgtcggaca

SEQ ID NO: 230698 - DNA, 50 bp, Artificial
  Synthetic oligonucleotide
acaacgaccggactaccgccacgcacccagaaccgcaccaattgggccac

SEQ ID NO: 230699 - DNA, 50 bp, Artificial
  Synthetic oligonucleotide
ctttcggggccgcgtgtcgcttgggtgcggttaaatatgtgtcgcgcaaa

SEQ ID NO: 230700 - DNA, 50 bp, Artificial
  Synthetic oligonucleotide
ggccatatgccagcgcaaatatgcctcacccggcgatctgtcggctgttg

SEQ ID NO: 230701 - DNA, 60 bp, Artificial
  Synthetic oligonucleotide
cacgcgagcagtctctcatcgccgggcatactgcctcaattctggagctcatgccgtctt

SEQ ID NO: 230702 - DNA, 50 bp, Artificial
  Synthetic oligonucleotide
cctgccatctcggcttgggtgcgctggtgagagagcgtctgatccgcagt

SEQ ID NO: 230703 - DNA, 50 bp, Artificial
  Synthetic oligonucleotide
acaacgcgtgccccgcgtctatggttgcacctgggggaaaatgagggatc

SEQ ID NO: 230704 - DNA, 50 bp, Artificial
  Synthetic oligonucleotide
acaagaagtccagcgccgcaaactttgcctcacccagtaggaccggccca

SEQ ID NO: 230705 - DNA, 50 bp, Artificial
  Synthetic oligonucleotide
acaagagcgtcgcttcccgctcaagaacgcctgcgttacgcgcgcccccg

SEQ ID NO: 230706 - DNA, 50 bp, Artificial
  Synthetic oligonucleotide
atcggataggcttcggcctaaacgcacgtcacgcccaaaccgggagttga

SEQ ID NO: 230707 - DNA, 50 bp, Artificial
  Synthetic oligonucleotide
acaagagggcgcgaagaaccgcataacgtcactccccgtaacccgtgcgc

SEQ ID NO: 230708 - DNA, 50 bp, Artificial
  Synthetic oligonucleotide
acaagccatccgtcgggcgttccagtggcgtcggcgcatcacggaccatt

SEQ ID NO: 230709 - DNA, 50 bp, Artificial
  Synthetic oligonucleotide
acaagccctgagcaacgcacgctatgccagtcgaacgattgcggccgacc

SEQ ID NO: 230710 - DNA, 50 bp, Artificial
  Synthetic oligonucleotide
acaagcgttcgcagatcgcacccgctgcgtcacatcttccctgccgggcc

SEQ ID NO: 230711 - DNA, 50 bp, Artificial
  Synthetic oligonucleotide
acaaggcactgccctatctgcgctttgccaaggatccggcgtaaggccaa

SEQ ID NO: 230712 - DNA, 60 bp, Artificial
  Synthetic oligonucleotide
cacgctgatcgctcagcgtgctgcctcgttttcggaccctcagacggagtctctcgatga

SEQ ID NO: 230713 - DNA, 50 bp, Artificial
  Synthetic oligonucleotide
acaagggcagggtcggtcatgctgggccttcgcttgggtattctagggca

SEQ ID NO: 230714 - DNA, 50 bp, Artificial
  Synthetic oligonucleotide
acaagggtgcaagaggcggtgcttgcatttcttgacgggtccaggcgctg

SEQ ID NO: 230715 - DNA, 50 bp, Artificial
  Synthetic oligonucleotide
acaagggttgcgccgactcgggggctgtggccgtaattcctaaggcgttt

SEQ ID NO: 230716 - DNA, 57 bp, Artificial
  Synthetic oligonucleotide
ctgtgtcccaacgatggtggttaacgcttcggtgctaacgaccacgccatatgggtc

SEQ ID NO: 230717 - DNA, 60 bp, Artificial
  Synthetic oligonucleotide
gccctgtcgcacccccttgcaatcccgatggccttactctagatggatagcatgctaagt

SEQ ID NO: 230718 - DNA, 60 bp, Artificial
  Synthetic oligonucleotide
acaatgttcggtggatccaacgacgatgttttacatggcggcgagggcaatgatagaata

SEQ ID NO: 230719 - DNA, 53 bp, Artificial
  Synthetic oligonucleotide
ctgttccagaagcggaaaactatccacagggttccgaaactaacgaatctggg

SEQ ID NO: 230720 - DNA, 60 bp, Artificial
  Synthetic oligonucleotide
caccgatgtaaggataccgcagatcgcggattgatactgttccgtcagacagttctatct

SEQ ID NO: 230721 - DNA, 60 bp, Artificial
  Synthetic oligonucleotide
tgcactcgcccaagacagtgccttcccaatgcgtgaagcccctcggcctgagacaacgaa

SEQ ID NO: 230722 - DNA, 59 bp, Artificial
  Synthetic oligonucleotide
ctgtcagcgttcccacagagctaccgtccccatctttgacgactgacgttaggctgcgg

SEQ ID NO: 230723 - DNA, 58 bp, Artificial
  Synthetic oligonucleotide
ccatggttggtcgaacagaagagcgctttggtatcaaaccggactggctcgttgcgga

SEQ ID NO: 230724 - DNA, 60 bp, Artificial
  Synthetic oligonucleotide
tgcccctgcagctcgcaacggtgactgcttgttgctcgtgatgcgttcaccacaagcctg

SEQ ID NO: 230725 - DNA, 60 bp, Artificial
  Synthetic oligonucleotide
tgatgttctactaaccgttgattttgattggagcctacttactctggccgccatcagcct

SEQ ID NO: 230726 - DNA, 58 bp, Artificial
  Synthetic oligonucleotide
gccccggaacctcctctcttgaggtctcttgcggaatatccaatctgccttctgtccc

SEQ ID NO: 230727 - DNA, 60 bp, Artificial
  Synthetic oligonucleotide
ctggattcacgagatgaatccctcacggatttgtgcaacagagccccgcccaaggataaa

SEQ ID NO: 230728 - DNA, 54 bp, Artificial
  Synthetic oligonucleotide
accgccccccacaaggctggggcggatcgggggcgcacggcctgaagggtgcag

SEQ ID NO: 230729 - DNA, 57 bp, Artificial
  Synthetic oligonucleotide
acacaaacagcgccttcggaacttccaatgcgatacgcgggaacaagtcgtcgtagc

SEQ ID NO: 230730 - DNA, 57 bp, Artificial
  Synthetic oligonucleotide
ctggaacagggatcgggccgccccaagatcgtcctggggcggcccatcctcgccaga

SEQ ID NO: 230731 - DNA, 60 bp, Artificial
  Synthetic oligonucleotide
tgccgaaggatgacatggcgtcgatggagcatccgctgttttcgttggcaaccaagccgg

SEQ ID NO: 230732 - DNA, 60 bp, Artificial
  Synthetic oligonucleotide
agagtacgaagctcgatgaagtgttgacaactccacctaatgtctctcttggatgcgaga

SEQ ID NO: 230733 - DNA, 57 bp, Artificial
  Synthetic oligonucleotide
gggcctccggcagggcagttattgaagatcgttgccaggaaaaatcgccttggatcc

SEQ ID NO: 230734 - DNA, 59 bp, Artificial
  Synthetic oligonucleotide
cgtcggaacgctctttccgactttcttcgctgcctgcgatgcggatagtgacatgcccg

SEQ ID NO: 230735 - DNA, 53 bp, Artificial
  Synthetic oligonucleotide
gacctggcaccggtcgggccaatttggaggtagagccccccaccatcggggta

SEQ ID NO: 230736 - DNA, 55 bp, Artificial
  Synthetic oligonucleotide
gcggctttaggcgtgcaggtcaatggttcgggtcgtcctttgccggggtctcgga

SEQ ID NO: 230737 - DNA, 59 bp, Artificial
  Synthetic oligonucleotide
cggacctccgagttggggcagcatttggccttcagcgcacatcccgtgcaatcagactt

SEQ ID NO: 230738 - DNA, 56 bp, Artificial
  Synthetic oligonucleotide
ggacctttttcagtctggctctgagcacgttccattcgaaaacgttttacagggca

SEQ ID NO: 230739 - DNA, 56 bp, Artificial
  Synthetic oligonucleotide
gctcaacgggccgacggacaccgcatggtgccggcgagcccttttcaggacgaacc

SEQ ID NO: 230740 - DNA, 57 bp, Artificial
  Synthetic oligonucleotide
cggccggaatatgccaatcaaacctgtcggacgcggtggatagtcgttggcacaggg

SEQ ID NO: 230741 - DNA, 55 bp, Artificial
  Synthetic oligonucleotide
ctttccagatagacccggcagaactgcacagggtttacccaccgactgtttcagg

SEQ ID NO: 230742 - DNA, 55 bp, Artificial
  Synthetic oligonucleotide
gtcggatagtccgccatcattctccgtccgtccctgggtcaaccgcttcccctta

SEQ ID NO: 230743 - DNA, 55 bp, Artificial
  Synthetic oligonucleotide
gcatccccgtgtgtgaaagtacgaaagagcgtgggtaaaagtacgaaagagcgtg

SEQ ID NO: 230744 - DNA, 59 bp, Artificial
  Synthetic oligonucleotide
cttatcgtcacaactcatagccactccttgcaaacgagatcggcggtgtcgtgcaactg

SEQ ID NO: 230745 - DNA, 55 bp, Artificial
  Synthetic oligonucleotide
cgatttagagacgtagtgtgctgcgtcagtccgttttcttggtcccgacgtggtt

SEQ ID NO: 230746 - DNA, 59 bp, Artificial
  Synthetic oligonucleotide
gggtgcgagtgacgctgttgcttggctcgcgacacagcaaagatcagagcgccaattct

SEQ ID NO: 230747 - DNA, 59 bp, Artificial
  Synthetic oligonucleotide
gataggtcaaagttgcgccgtatgagcctgcttccagatcggcacccaaacctagattt

SEQ ID NO: 230748 - DNA, 55 bp, Artificial
  Synthetic oligonucleotide
ctcgatggcggacaattttccgtactccctgacttgaacggattgcccccctgcg

SEQ ID NO: 230749 - DNA, 59 bp, Artificial
  Synthetic oligonucleotide
acctcaaatgtggtccgagtgcttggggcactaatcgcacggtcctacagcgatggtcc

SEQ ID NO: 230750 - DNA, 51 bp, Artificial
  Synthetic oligonucleotide
ggtcaaactttggttccgaaagggtcaaactgcctttccatcgacaaccgt

SEQ ID NO: 230751 - DNA, 60 bp, Artificial
  Synthetic oligonucleotide
cggcgctgaaagattaatcattcatgcgaccgcaaagataacatgttaatcgggggtgtg

SEQ ID NO: 230752 - DNA, 57 bp, Artificial
  Synthetic oligonucleotide
gcgcgtctataagtggggaatccagccgcaaaagtggggaatccagccgcaaaagtg

SEQ ID NO: 230753 - DNA, 58 bp, Artificial
  Synthetic oligonucleotide
atatcataagccgcagccttgggtcacggcattccgcctttcatccgaatactacttt

SEQ ID NO: 230754 - DNA, 58 bp, Artificial
  Synthetic oligonucleotide
gcttgttgctcgtgatgcgttcaccacaagcctgggggtttggaaacccagacgcgga

SEQ ID NO: 230755 - DNA, 57 bp, Artificial
  Synthetic oligonucleotide
ctattccgcgcattcacgatcttccatcggcccgagtcaattcgttttcgctttact

SEQ ID NO: 230756 - DNA, 59 bp, Artificial
  Synthetic oligonucleotide
gatcttagcaccagtgaacgacgccaaagcccgtgagttatacaacggagccgccatga

SEQ ID NO: 230757 - DNA, 59 bp, Artificial
  Synthetic oligonucleotide
gctcgaacgcacagactgccccttcgggcggctctgatcatgcgaggcggtttccgacc

SEQ ID NO: 230758 - DNA, 59 bp, Artificial
  Synthetic oligonucleotide
cgtcaggtttcccgacaatgtggcagacgtcagcctgcagccacgccagttctccgctt

SEQ ID NO: 230759 - DNA, 57 bp, Artificial
  Synthetic oligonucleotide
tgtaaatgaaaccccgaaaggcaatcggggcaaatatgggtctgccaacgtgcagcc

SEQ ID NO: 230760 - DNA, 55 bp, Artificial
  Synthetic oligonucleotide
tcgattcacggtctattatttcgcctcggacaaggacgaagggggcaactcgggc

SEQ ID NO: 230761 - DNA, 59 bp, Artificial
  Synthetic oligonucleotide
gttacttggcagcctatattcgtcccacgttggcagagacatctctgtatccgcagaga

SEQ ID NO: 230762 - DNA, 60 bp, Artificial
  Synthetic oligonucleotide
tatagatccggttcggtcaggatctgcctgtccgcatctcgttctagatcaaggtatacc

SEQ ID NO: 230763 - DNA, 59 bp, Artificial
  Synthetic oligonucleotide
tataatcgtctgtgcgatgcggagtggaatacccccattggcgaggcgcgcgcttgtgg

SEQ ID NO: 230764 - DNA, 59 bp, Artificial
  Synthetic oligonucleotide
tgaggtgatgtgggacgcgattgattgtcacaaagcacgccagaagggatggatcgcag

SEQ ID NO: 230765 - DNA, 59 bp, Artificial
  Synthetic oligonucleotide
gttactctttcagctgtcccgggtggttgggcatgtcaggtcaaattcggtgctgcacc

SEQ ID NO: 230766 - DNA, 54 bp, Artificial
  Synthetic oligonucleotide
catcccgccccagccttatggggggatgaggatcgggccgggactgaaacccga

SEQ ID NO: 230767 - DNA, 58 bp, Artificial
  Synthetic oligonucleotide
tgttgagaagttcggccaaaagttagccgagcgtccgctttgtccgcagagctaccat

SEQ ID NO: 230768 - DNA, 58 bp, Artificial
  Synthetic oligonucleotide
caagcccgcggatttccttcggcgcagcgacgggatcgaagagatagagccgttttga

SEQ ID NO: 230769 - DNA, 54 bp, Artificial
  Synthetic oligonucleotide
ccccttcacgttccgcaggtggaggaagcacagcccgaacccccacgtcttgtg

SEQ ID NO: 230770 - DNA, 56 bp, Artificial
  Synthetic oligonucleotide
ccccaaggggagggagatctgaagacgctgggttgagagacggctacgacttgcgg

SEQ ID NO: 230771 - DNA, 58 bp, Artificial
  Synthetic oligonucleotide
ggtattcacccgatacgacccccgccatacgggcggcaaattcaggcacgacatgcca

SEQ ID NO: 230772 - DNA, 58 bp, Artificial
  Synthetic oligonucleotide
aaagccattcggcgagacgtccatacagccgtccattttgacgtccactcccgtgcaa

SEQ ID NO: 230773 - DNA, 57 bp, Artificial
  Synthetic oligonucleotide
aacggagcgcctgagggcattccttccgaagtgaggtcgtcccccgcacagtcggca

SEQ ID NO: 230774 - DNA, 58 bp, Artificial
  Synthetic oligonucleotide
gatggcacgtctcagccagaagcattcgggcgcctatttcacacccgatcccgtcgtc

SEQ ID NO: 230775 - DNA, 58 bp, Artificial
  Synthetic oligonucleotide
gatgcacggtgtaaagcgccagttccgagagctcataaagcaccaatttccgcggcgc

SEQ ID NO: 230776 - DNA, 58 bp, Artificial
  Synthetic oligonucleotide
agaacccattttaagggccttgtgcggaattcgcgccgagacatgagagccaggcacg

SEQ ID NO: 230777 - DNA, 58 bp, Artificial
  Synthetic oligonucleotide
gggggccgatgtaacgtgcaaggattggcttgacgtgcggaacgcaagacaggaagca

SEQ ID NO: 230778 - DNA, 58 bp, Artificial
  Synthetic oligonucleotide
tattgcgacgacgtcatgacatgctccctgggtccggtttcacgccttggggcgcccg

SEQ ID NO: 230779 - DNA, 58 bp, Artificial
  Synthetic oligonucleotide
gagcgggtcagaggcacctcagtccaatgtctggcgttgactaccagccatcaagatc

SEQ ID NO: 230780 - DNA, 58 bp, Artificial
  Synthetic oligonucleotide
gaaagcacgctagaggcaaaccgttggcagcgataagttccgccgggcgtggctcgga

SEQ ID NO: 230781 - DNA, 58 bp, Artificial
  Synthetic oligonucleotide
atgactgacatgtagcgtgtcgtcatagactaggctatagcctttgccagtggcgcgt

SEQ ID NO: 230782 - DNA, 58 bp, Artificial
  Synthetic oligonucleotide
cgggcgccccaaggcgtgaaaccggacccagggagcatgtcatgacgtcgtcgcaata

SEQ ID NO: 230783 - DNA, 53 bp, Artificial
  Synthetic oligonucleotide
gggccggaaatttccaagtgtggacggattagtttcggtcgacgactatgacc

SEQ ID NO: 230784 - DNA, 55 bp, Artificial
  Synthetic oligonucleotide
cggctgtctccggcaaggctcgggtgaaagggcggtcaggcaggtccgcccaccc

SEQ ID NO: 230785 - DNA, 58 bp, Artificial
  Synthetic oligonucleotide
tggcaggacgcaataatgttgtgccgccatcctcggagcgagggtgagcgtaggttct

SEQ ID NO: 230786 - DNA, 58 bp, Artificial
  Synthetic oligonucleotide
tagcaacctgaaaccgcgccagaccgtaaagccacagtgtccataggcgctctgacat

SEQ ID NO: 230787 - DNA, 58 bp, Artificial
  Synthetic oligonucleotide
tggaagcggctgggacagagcggattactctttgtcgacagcaggtgtctcagccgac

SEQ ID NO: 230788 - DNA, 54 bp, Artificial
  Synthetic oligonucleotide
taggcgacagtttccggcaaggggacggaaggcgtagcgacggttcgcccaagc

SEQ ID NO: 230789 - DNA, 58 bp, Artificial
  Synthetic oligonucleotide
acctcgcggcacgacagtgcgagaggctgctaggttacaatcgttcgacgacgattac

SEQ ID NO: 230790 - DNA, 58 bp, Artificial
  Synthetic oligonucleotide
tgatccgaagcatggcagcatcgttacgcctgtcgcccgggcttgtccagaaatcgtt

SEQ ID NO: 230791 - DNA, 57 bp, Artificial
  Synthetic oligonucleotide
cttaccgctatctagggccgaggggcggcaaagattacgccccagctatggcatagg

SEQ ID NO: 230792 - DNA, 58 bp, Artificial
  Synthetic oligonucleotide
gcccgaaggctcgacggtatagtcgacctgaggatccgcgaggatcgaggccagaagc

SEQ ID NO: 230793 - DNA, 57 bp, Artificial
  Synthetic oligonucleotide
tgatgaggggggcaggttcgactactgcctcttgaacctcgccggggtagatcatcc

SEQ ID NO: 230794 - DNA, 57 bp, Artificial
  Synthetic oligonucleotide
gatggcggcgtgagacggggcttcgcctctcgaagtccttgcaaatcttccacgagg

SEQ ID NO: 230795 - DNA, 56 bp, Artificial
  Synthetic oligonucleotide
ccgaccagagaccgaaatcaggattctgggcgcggatgtttggcaaaacctaggtc

SEQ ID NO: 230796 - DNA, 56 bp, Artificial
  Synthetic oligonucleotide
tatcagggacatgaaatcgggccgtttgcaatttaaggtatcgctaataaacgacc

SEQ ID NO: 230797 - DNA, 57 bp, Artificial
  Synthetic oligonucleotide
ggcgctaagcatgcaatcatgattgcatgcttagcgcaccagcggagggtttagcgc

SEQ ID NO: 230798 - DNA, 57 bp, Artificial
  Synthetic oligonucleotide
tccacacgcgcaaccacatgggaacaaacggacgcgcacactttggcgagacacaag

SEQ ID NO: 230799 - DNA, 57 bp, Artificial
  Synthetic oligonucleotide
gcacctgcgcctagcaaggcgtgggtgtcttcataatgagctgcgcacgtcggttgt

SEQ ID NO: 230800 - DNA, 57 bp, Artificial
  Synthetic oligonucleotide
taggggtgccgcacggaaagatggagcggtggaacgacgtgaaccgctttgcgctga

SEQ ID NO: 230801 - DNA, 57 bp, Artificial
  Synthetic oligonucleotide
aagcattcgggcgcctatttcacacccgatcccgtcgtctccacattagttcgctgg

SEQ ID NO: 230802 - DNA, 57 bp, Artificial
  Synthetic oligonucleotide
tcactgtcgcagccctgcggcaacgtttagggcgttcggggcgcagagagggccaac

SEQ ID NO: 230803 - DNA, 57 bp, Artificial
  Synthetic oligonucleotide
gttacgcggtctttacaacgcatctctgcctcaaagccggacactcccggtatagcg

SEQ ID NO: 230804 - DNA, 57 bp, Artificial
  Synthetic oligonucleotide
atgggcgatgcgggttcccatagaacgcaggttgatctgactggacagaaactccgg

SEQ ID NO: 230805 - DNA, 57 bp, Artificial
  Synthetic oligonucleotide
gggaactcggccactgaaggcacactgtcgggatccacaagcgtcggtgtacctttg

SEQ ID NO: 230806 - DNA, 57 bp, Artificial
  Synthetic oligonucleotide
tgagggctatgatatccgatttgagaacggagacaaactccggtatgccgtagtcgc

SEQ ID NO: 230807 - DNA, 56 bp, Artificial
  Synthetic oligonucleotide
ccgatcctcatcccgccccagccttatggggggatgaggatcgggccgggactgaa

SEQ ID NO: 230808 - DNA, 57 bp, Artificial
  Synthetic oligonucleotide
acgacacgatagtcgccccactgagagaaagtttctcaggtcaccgtgatggcgatc

SEQ ID NO: 230809 - DNA, 57 bp, Artificial
  Synthetic oligonucleotide
cgtgacggtcggaccgatccgtggtcgactctgtctcattgcattatgctggcgcgg

SEQ ID NO: 230810 - DNA, 57 bp, Artificial
  Synthetic oligonucleotide
ttgtcgtagcgagcttcagaggttgtcgacgtgttcggcccatacccgccggtcgag

SEQ ID NO: 230811 - DNA, 57 bp, Artificial
  Synthetic oligonucleotide
ttgcgtcacttgcggcgatgtcacagcatatctgtccgacacagcgccacaggccga

SEQ ID NO: 230812 - DNA, 57 bp, Artificial
  Synthetic oligonucleotide
actgtgcaccacgatactgaccggcatcgcaagaccgcgtaggctccatgtgatgcg

SEQ ID NO: 230813 - DNA, 57 bp, Artificial
  Synthetic oligonucleotide
gatcaagacgttcgccagtatggacactacggctcggagccttgtggaccattgtgt

SEQ ID NO: 230814 - DNA, 57 bp, Artificial
  Synthetic oligonucleotide
gatatgtcggtgccttgtccgtgcaaatagatacgggtcgatgcaagcgcacccgtt

SEQ ID NO: 230815 - DNA, 52 bp, Artificial
  Synthetic oligonucleotide
acgtggattggaacggggccaatcctccgtaatttcgtagtactgcggaacc

SEQ ID NO: 230816 - DNA, 57 bp, Artificial
  Synthetic oligonucleotide
caggaaccgcgggccaattgcttcaccttcctggcttcgacagcccctgtcgcgccg

SEQ ID NO: 230817 - DNA, 57 bp, Artificial
  Synthetic oligonucleotide
ccgtgtgtggacgcccctatgaatgcaagcgctttttggaccgtttgggcatgtgat

SEQ ID NO: 230818 - DNA, 57 bp, Artificial
  Synthetic oligonucleotide
ccgagttacatgcaaccagccggactttactccgaacaagaggctccagtggcgtcc

SEQ ID NO: 230819 - DNA, 57 bp, Artificial
  Synthetic oligonucleotide
tcgaataaacgcgatgcctgagtgtccgtcgccgcagattttcaggaaagatgccgc

SEQ ID NO: 230820 - DNA, 53 bp, Artificial
  Synthetic oligonucleotide
tgagttcccgggttccggatcgggatgggaggggcgagtctcgttctgagggt

SEQ ID NO: 230821 - DNA, 56 bp, Artificial
  Synthetic oligonucleotide
agttgctgttcgatcgtgttgggaacgttgttctgcgccagaagttcactgatcga

SEQ ID NO: 230822 - DNA, 56 bp, Artificial
  Synthetic oligonucleotide
aaacaccaagcttgctctccaccccctcgcaacgcccgcgtttgagacatatcgca

SEQ ID NO: 230823 - DNA, 56 bp, Artificial
  Synthetic oligonucleotide
atccatttgggcagcttcgggcaggcccatgttcagggtttgaccccaggctttcg

SEQ ID NO: 230824 - DNA, 56 bp, Artificial
  Synthetic oligonucleotide
gacccccgaagacgagcatgacaccccgcatcaagaggcaccgtcatcgcttgggg

SEQ ID NO: 230825 - DNA, 56 bp, Artificial
  Synthetic oligonucleotide
cccttgggtactcgcgcactgtacctgtcgtggcagtactaccgtattcacgggac

SEQ ID NO: 230826 - DNA, 56 bp, Artificial
  Synthetic oligonucleotide
cttagcttaacaatgacaagcgcaacgcagaagccgaataatagcaaaactgttgc

SEQ ID NO: 230827 - DNA, 56 bp, Artificial
  Synthetic oligonucleotide
tcgtggtgctgacgaagaagttgttgacgatcgggtaatagacgaaccagcccaca

SEQ ID NO: 230828 - DNA, 56 bp, Artificial
  Synthetic oligonucleotide
gtaccaagtatggagccatgttggcgggcctaggcatggccaatcgttcacgaatt

SEQ ID NO: 230829 - DNA, 60 bp, Artificial
  Synthetic oligonucleotide
ggaggatgccatttcacgcactccgagcaatgcgatcacactcagtagcctagagcgcaa

SEQ ID NO: 230830 - DNA, 56 bp, Artificial
  Synthetic oligonucleotide
tgacgagtattaatgcggctctatactaccttgagtagtgatagaacatgtgcgaa

SEQ ID NO: 230831 - DNA, 56 bp, Artificial
  Synthetic oligonucleotide
acctcgatacgaccggcatatccttgctcgtgactgtgagaagttacgtatgtttg

SEQ ID NO: 230832 - DNA, 56 bp, Artificial
  Synthetic oligonucleotide
tgcgatctttgaggttcctttcacgccatccgcaatgcctagctcccatggtaccc

SEQ ID NO: 230833 - DNA, 55 bp, Artificial
  Synthetic oligonucleotide
tgcgcggcaattggtctttcgccccggcaaaagctttgctttacaccggggtcga

SEQ ID NO: 230834 - DNA, 56 bp, Artificial
  Synthetic oligonucleotide
tggccttagtgtcgtgaagtagaagggctctcgtggggagagtccgaacatgccga

SEQ ID NO: 230835 - DNA, 56 bp, Artificial
  Synthetic oligonucleotide
cgggagcaggggtttctcaggctcttcacaaacgatttcgtgcagaagggtggctc

SEQ ID NO: 230836 - DNA, 56 bp, Artificial
  Synthetic oligonucleotide
tgcggggaagggttgcgtcggccatcggatcatcctcggagagtccgtccgcctta

SEQ ID NO: 230837 - DNA, 56 bp, Artificial
  Synthetic oligonucleotide
cgccagagagccgaacaatgggaatgcgcttgcctttcggtcaagcattcctgtcg

SEQ ID NO: 230838 - DNA, 56 bp, Artificial
  Synthetic oligonucleotide
ttgtcattttgcgggaggtgctatagcagtaaccccttgactgccccaagatgata

SEQ ID NO: 230839 - DNA, 56 bp, Artificial
  Synthetic oligonucleotide
ctttaacggctccgatagctttacctacacagtgtcggatgggtcgttcactgata

SEQ ID NO: 230840 - DNA, 58 bp, Artificial
  Synthetic oligonucleotide
ggagcaagacgggagcctccaaccagaaagcgttcgaagaggccgacgatatctccac

SEQ ID NO: 230841 - DNA, 56 bp, Artificial
  Synthetic oligonucleotide
ttctggccggcaacggatatgggcaccgtctagaaacacggtcagcggaggcgatt

SEQ ID NO: 230842 - DNA, 56 bp, Artificial
  Synthetic oligonucleotide
ctataccgccacttcagagcccgctggaactccgattcttcggtcgtcaaccatat

SEQ ID NO: 230843 - DNA, 56 bp, Artificial
  Synthetic oligonucleotide
tgatcttctggttgcgactaaccggcagacctcgggacgtggctacgagcttctga

SEQ ID NO: 230844 - DNA, 55 bp, Artificial
  Synthetic oligonucleotide
cagattggatcaaaggcgctgacaatctgggttggggacgggtccaatttccccg

SEQ ID NO: 230845 - DNA, 56 bp, Artificial
  Synthetic oligonucleotide
atagtaggtcatgatatgggggatcgggccataatcggcggaaatcacgatcttgt

SEQ ID NO: 230846 - DNA, 56 bp, Artificial
  Synthetic oligonucleotide
tccggtttcaatggtcgtgcatggcaggtctgggcgcacggtttcagcaacgcgtc

SEQ ID NO: 230847 - DNA, 56 bp, Artificial
  Synthetic oligonucleotide
acgggatgcaggacgttccgtttcagccacgtgatgcgctgcgttgccgacatgtc

SEQ ID NO: 230848 - DNA, 56 bp, Artificial
  Synthetic oligonucleotide
gaagtgatttgcgcgaaggctagctcatggtagagcgaaaggggcgtcatgtcaca

SEQ ID NO: 230849 - DNA, 56 bp, Artificial
  Synthetic oligonucleotide
ccattgcatcgtgctgtcctgaagacgtcgggcggttgtgcctgccatgggttgtt

SEQ ID NO: 230850 - DNA, 56 bp, Artificial
  Synthetic oligonucleotide
tgcaacatggacaacaccatgatcgccgacaaattccgggcatggtgcgccgggaa

SEQ ID NO: 230851 - DNA, 56 bp, Artificial
  Synthetic oligonucleotide
agcttaatccccagccaacttaggtaagcaaccccgactagcttcagtgcggtcac

SEQ ID NO: 230852 - DNA, 56 bp, Artificial
  Synthetic oligonucleotide
tgtcttgggaaaggatcggtcgactgcatgagagaccgatctcacatcgatgtaac

SEQ ID NO: 230853 - DNA, 56 bp, Artificial
  Synthetic oligonucleotide
ccggtgtagttcagatctccctctagggtcggcaatagctctcgctgcaaccgtcc

SEQ ID NO: 230854 - DNA, 56 bp, Artificial
  Synthetic oligonucleotide
ggaccggaggagcaaaaggggcggggcgcatcctctgccatcggagaatgggtttc

SEQ ID NO: 230855 - DNA, 55 bp, Artificial
  Synthetic oligonucleotide
cgtgatctcgcgattggtcaatgaatatccgggcttaacgtttgcaaatgaccgg

SEQ ID NO: 230856 - DNA, 55 bp, Artificial
  Synthetic oligonucleotide
cgttgacgaacccatagggcgttcgccggattgagaatccgtgccagacttgccc

SEQ ID NO: 230857 - DNA, 55 bp, Artificial
  Synthetic oligonucleotide
cgtgccttagatctggattatatgctcggccttttgccgatcctcttaaagtacc

SEQ ID NO: 230858 - DNA, 55 bp, Artificial
  Synthetic oligonucleotide
ccccttagcacggcccgaggtgctttcaaattgagaatatgcgcactgatatatc

SEQ ID NO: 230859 - DNA, 55 bp, Artificial
  Synthetic oligonucleotide
cgttagttctgtaattatacatcgcgagatgtccgattcggatcggcgcaacgag

SEQ ID NO: 230860 - DNA, 53 bp, Artificial
  Synthetic oligonucleotide
cgtgttactcgttttgattttctaagcccagggacccgtaccgcacatgtccg

SEQ ID NO: 230861 - DNA, 55 bp, Artificial
  Synthetic oligonucleotide
cgtgtccgggtctggcgaggtctgctgaggcccgcgaataaaacccaaggttgtg

SEQ ID NO: 230862 - DNA, 60 bp, Artificial
  Synthetic oligonucleotide
tcgaatctgaatgtccgtcctcgtggccggttgacgaacatatcatgaacatgcgatgcc

SEQ ID NO: 230863 - DNA, 55 bp, Artificial
  Synthetic oligonucleotide
cccaaggcgccacttgttccagccccgcgcacggacctatacatttccccgagtg

SEQ ID NO: 230864 - DNA, 55 bp, Artificial
  Synthetic oligonucleotide
ctgctcagtagagccaggcgatgctacaccctgaactgatgtcagcaaatgtcgc

SEQ ID NO: 230865 - DNA, 55 bp, Artificial
  Synthetic oligonucleotide
cgtggaggcgggctctgggccgtgtccgccgtgtgcatcaagaaaattcccgctg

SEQ ID NO: 230866 - DNA, 55 bp, Artificial
  Synthetic oligonucleotide
cccctggatcatgattgccttggtcattgcgcaccctttcgttgaggcttgatac

SEQ ID NO: 230867 - DNA, 54 bp, Artificial
  Synthetic oligonucleotide
cccaccgaccaaaacaaggcacggccaatgggtacagtgcccggctgaagggaa

SEQ ID NO: 230868 - DNA, 54 bp, Artificial
  Synthetic oligonucleotide
cccaatttaggggcggcagccgccttatcaacgttcacagccaccggacgttcg

SEQ ID NO: 230869 - DNA, 55 bp, Artificial
  Synthetic oligonucleotide
ctgaaggcgacctattaccgctcggcgctcgaccttttggaggcgtattactcgg

SEQ ID NO: 230870 - DNA, 55 bp, Artificial
  Synthetic oligonucleotide
ctgcggcaattgacggaggacgagcgtcgcagaacaggcgttccggaaggattcg

SEQ ID NO: 230871 - DNA, 55 bp, Artificial
  Synthetic oligonucleotide
cccctaatgggacattctgactccaccccaacaagattaccctacgtcaacctga

SEQ ID NO: 230872 - DNA, 54 bp, Artificial
  Synthetic oligonucleotide
cccaagaaagaggtaattgcacctcgggcctttgcctatcggatagaccgaccg

SEQ ID NO: 230873 - DNA, 58 bp, Artificial
  Synthetic oligonucleotide
cccggaaccatggttcggcaaccccagattggcacgcatatttgttctgacgctcaac

SEQ ID NO: 230874 - DNA, 55 bp, Artificial
  Synthetic oligonucleotide
cgtgaccaacaaaagtgcgccggtcccgtaaagacaccctgccatcgtgaaggcg

SEQ ID NO: 230875 - DNA, 55 bp, Artificial
  Synthetic oligonucleotide
ctgccacccgttcgattggtctacggaagctcgtttccatgttcgacatccgccc

SEQ ID NO: 230876 - DNA, 55 bp, Artificial
  Synthetic oligonucleotide
ctgactgcccagtcgaacatccaggccggaacctcaagaccgcgagcggaggcaa

SEQ ID NO: 230877 - DNA, 55 bp, Artificial
  Synthetic oligonucleotide
ctgagacctcttgcaccgccttagcttcacttacacgtcgagctaataggctgag

SEQ ID NO: 230878 - DNA, 55 bp, Artificial
  Synthetic oligonucleotide
ctgcatatcgcgcgctgacatagaatgtgccggactcgtctggaatgtaggtcac

SEQ ID NO: 230879 - DNA, 55 bp, Artificial
  Synthetic oligonucleotide
ctgcgctgatatcgccctttaggagccccatccaatgttccgaaactctcgctct

SEQ ID NO: 230880 - DNA, 55 bp, Artificial
  Synthetic oligonucleotide
cgtgaggcagcgagtttacaggtatcgacgcgtttcagcgcaatagtcgcgatac

SEQ ID NO: 230881 - DNA, 55 bp, Artificial
  Synthetic oligonucleotide
ctgatttatcctcatataaacgatgggttgaacgaagtaacttcaggcagcgcgt

SEQ ID NO: 230882 - DNA, 55 bp, Artificial
  Synthetic oligonucleotide
ctgcgctaagacttgcgcaaaggcggccaaaaccctaggacaacgccaacttata

SEQ ID NO: 230883 - DNA, 55 bp, Artificial
  Synthetic oligonucleotide
ctccgatttccatgatggttcgcgcggtggcgtagtccctcgggatgagaatcgc

SEQ ID NO: 230884 - DNA, 59 bp, Artificial
  Synthetic oligonucleotide
acaggtggcccgcgacccgatctggctcatggccggacgccaagatcaggcgcacccgg

SEQ ID NO: 230885 - DNA, 54 bp, Artificial
  Synthetic oligonucleotide
ctccccttcgccgtttcggaccgagaccgtttgggaatgcgccagggcaggata

SEQ ID NO: 230886 - DNA, 55 bp, Artificial
  Synthetic oligonucleotide
ccccgataacctgtttcagtagaacaccctgttgcgatgtttgccgcaacagaac

SEQ ID NO: 230887 - DNA, 55 bp, Artificial
  Synthetic oligonucleotide
cccagaagtttcaatggtcatgcgcgcctcctctactcgcgacaggggtcggttc

SEQ ID NO: 230888 - DNA, 55 bp, Artificial
  Synthetic oligonucleotide
ctccacgtttcaacggtcttgtttgtgagggtaatgctcgacatgacagccccga

SEQ ID NO: 230889 - DNA, 55 bp, Artificial
  Synthetic oligonucleotide
ctcagttacaatcgcaaactgtagagccgaccatagcaattcattgcctaaaatc

SEQ ID NO: 230890 - DNA, 55 bp, Artificial
  Synthetic oligonucleotide
ccccgaggtatttccatagccaaatacgctgccatagtaagtcgtgtgtccaatc

SEQ ID NO: 230891 - DNA, 55 bp, Artificial
  Synthetic oligonucleotide
ctcagaacgagcttgtgtttcaactgagttaggcccggattagggtcagtatgga

SEQ ID NO: 230892 - DNA, 55 bp, Artificial
  Synthetic oligonucleotide
cccagatcaactcggcattttgtccactagggatagaaactgaattggcgttgtc

SEQ ID NO: 230893 - DNA, 55 bp, Artificial
  Synthetic oligonucleotide
ctcactgcgctttggagacgctgcaagtattgggattgggtacgtttcaggggcc

SEQ ID NO: 230894 - DNA, 55 bp, Artificial
  Synthetic oligonucleotide
cccagcgtaaacaggatacggttgcgcaggtcagttgccttacccagcgcggacc

SEQ ID NO: 230895 - DNA, 60 bp, Artificial
  Synthetic oligonucleotide
tcgatcgtgtgaatggctctacgacaggtgcaaagatgccacgggcggaatggggttttg

SEQ ID NO: 230896 - DNA, 55 bp, Artificial
  Synthetic oligonucleotide
cccattgggacgaattcatcgccctgatgcttaaagaggggcgttacgggtcaac

SEQ ID NO: 230897 - DNA, 55 bp, Artificial
  Synthetic oligonucleotide
ctcacattatgtcgagcgcgctgtagcacgcccgccccacagtgtcaggtgccaa

SEQ ID NO: 230898 - DNA, 55 bp, Artificial
  Synthetic oligonucleotide
ccccgaggacgcaaaagtcatgacccaagcccgcgatatggtagcagaaatcgag

SEQ ID NO: 230899 - DNA, 55 bp, Artificial
  Synthetic oligonucleotide
ccccaaggagactacgtcatgaccatccatcgttcccgctcgcgcgcactattca

SEQ ID NO: 230900 - DNA, 54 bp, Artificial
  Synthetic oligonucleotide
ctacggcgtagcaactctgctcgtggaacccgggaaaacccggcataacgcgga

SEQ ID NO: 230901 - DNA, 55 bp, Artificial
  Synthetic oligonucleotide
ctactacgcagagatgctcactttcctcgctactggtagacctttgacaggggcg

SEQ ID NO: 230902 - DNA, 55 bp, Artificial
  Synthetic oligonucleotide
ctatccgcatctgggcccgtgcatccacggcatggctccgtcccctgctatcccc

SEQ ID NO: 230903 - DNA, 55 bp, Artificial
  Synthetic oligonucleotide
ctagtggggctttggttaagagctcctacctgccttacaccgcaaatgctcccta

SEQ ID NO: 230904 - DNA, 55 bp, Artificial
  Synthetic oligonucleotide
ccccatgacttctgacaatccagtcacgcaggcggccactcctcttgcccgttct

SEQ ID NO: 230905 - DNA, 55 bp, Artificial
  Synthetic oligonucleotide
ccccgacacagccctttcccagacgagacatagaccgcccatgcccgtattcctg

SEQ ID NO: 230906 - DNA, 60 bp, Artificial
  Synthetic oligonucleotide
ggactgaagaggcactgttatattgagtatgcgacggcatgtggtttaggtcatgtccca

SEQ ID NO: 230907 - DNA, 54 bp, Artificial
  Synthetic oligonucleotide
acagtatgtgaaaaacggacacctctttagtgtcgaggtcaacccgttgataag

SEQ ID NO: 230908 - DNA, 55 bp, Artificial
  Synthetic oligonucleotide
cccctaatacgtgacaggtccaacctacgccgcttaccgcgaatggtgtgattgt

SEQ ID NO: 230909 - DNA, 55 bp, Artificial
  Synthetic oligonucleotide
ctgaacgttctgacatctagcgggcttgcagccgagtttaggttatagatgcgcg

SEQ ID NO: 230910 - DNA, 55 bp, Artificial
  Synthetic oligonucleotide
ctgaaacgacgcatctaccgacgctgcacgatatcctagaacctttcggcatcgc

SEQ ID NO: 230911 - DNA, 55 bp, Artificial
  Synthetic oligonucleotide
cccacgaggctcgcaacgatggtcagggcaaacacgatgagcgagaaatactccc

SEQ ID NO: 230912 - DNA, 55 bp, Artificial
  Synthetic oligonucleotide
ctctgagaggtttacagccaaggctctattcgccgtgtgcaacttgcccgctgcg

SEQ ID NO: 230913 - DNA, 55 bp, Artificial
  Synthetic oligonucleotide
cccacggtaagaacgcatcttctacctgcgcccaaatgctgtgcgccgcgatggg

SEQ ID NO: 230914 - DNA, 55 bp, Artificial
  Synthetic oligonucleotide
ccccgtgtctcgttctcatccgatgcactagggatgccatgggaattgatgggcg

SEQ ID NO: 230915 - DNA, 52 bp, Artificial
  Synthetic oligonucleotide
ctctccggcagggaattccggtctcttaggttttcagcgaccgtccttcggg

SEQ ID NO: 230916 - DNA, 55 bp, Artificial
  Synthetic oligonucleotide
ctctacaagaatttcgccctcaccgaatacaactacaaggggcgggtgccctcga

SEQ ID NO: 230917 - DNA, 55 bp, Artificial
  Synthetic oligonucleotide
ctcgtgaccggtagcattccggtggccttaagcaattccgagggagctggctctg

SEQ ID NO: 230918 - DNA, 58 bp, Artificial
  Synthetic oligonucleotide
gctcgtggttgtatctcggttgtggagaactattgccccatccccgatgcgaatacgg

SEQ ID NO: 230919 - DNA, 55 bp, Artificial
  Synthetic oligonucleotide
cgttgactatttcatcgacggattgcgcgacatccttgcccatcactccaccgcc

SEQ ID NO: 230920 - DNA, 55 bp, Artificial
  Synthetic oligonucleotide
cccactcgccaggtcacggtgcattgcgatcagggttctaaattcaccagccgcg

SEQ ID NO: 230921 - DNA, 55 bp, Artificial
  Synthetic oligonucleotide
cccactgacagtttcaacgtcaacgtgggctgacagggccgttttgggtgcgact

SEQ ID NO: 230922 - DNA, 55 bp, Artificial
  Synthetic oligonucleotide
ctcgcacccgttacccgcactcccgctcagtcacgctaaaatggcacgaacctcc

SEQ ID NO: 230923 - DNA, 55 bp, Artificial
  Synthetic oligonucleotide
ctcgaggtacatcgccaacagcgtactgtggggaggcctcaatgagtgggtggac

SEQ ID NO: 230924 - DNA, 55 bp, Artificial
  Synthetic oligonucleotide
cgttgggtagagggcaattcgacctgccgtatcttgtgtgtaatctgggcgacac

SEQ ID NO: 230925 - DNA, 55 bp, Artificial
  Synthetic oligonucleotide
ctcctcaacgcgcaagtcacctttgctgtgaagtctgcaaattgtggtggtcacg

SEQ ID NO: 230926 - DNA, 55 bp, Artificial
  Synthetic oligonucleotide
ctccgtgaccagtccctggacgccattctcgcactattccggaaagccgcgcgtt

SEQ ID NO: 230927 - DNA, 55 bp, Artificial
  Synthetic oligonucleotide
ccccgcgatactccggggccgtgccttttcctgccttcgcaaacgcagcccttgc

SEQ ID NO: 230928 - DNA, 55 bp, Artificial
  Synthetic oligonucleotide
ccccgatctgttgggccttgtttgatgcaacgggcgtgttcaggtaccaaaggcg

SEQ ID NO: 230929 - DNA, 60 bp, Artificial
  Synthetic oligonucleotide
caacctggcgcgcgaaatgactctgatcaatccgaatgagtatcgggaagcctttgtgca

SEQ ID NO: 230930 - DNA, 55 bp, Artificial
  Synthetic oligonucleotide
gaatttgcgatgcggtcctatgcgcagggtgaaaccacctatggctcggtgcaat

SEQ ID NO: 230931 - DNA, 55 bp, Artificial
  Synthetic oligonucleotide
catctcagtcatgagataccgccactatctgcctcgttaccgtcccgttttcggg

SEQ ID NO: 230932 - DNA, 55 bp, Artificial
  Synthetic oligonucleotide
gaattgctagtgtaagcccaagttcagttgtttacagttgcgcaacatcgtcacc

SEQ ID NO: 230933 - DNA, 55 bp, Artificial
  Synthetic oligonucleotide
catgacaccgacctcttaagaaaacgatgcacgcgcggtagtctcacggttgcgc

SEQ ID NO: 230934 - DNA, 55 bp, Artificial
  Synthetic oligonucleotide
gaattctgcctatgatgggcgcagggcaaagccttacctctccgatacaacgggc

SEQ ID NO: 230935 - DNA, 55 bp, Artificial
  Synthetic oligonucleotide
catgaggcggggatataccccaaggcagcgcacaagacaagaccgaatttcccgc

SEQ ID NO: 230936 - DNA, 55 bp, Artificial
  Synthetic oligonucleotide
catgcacaccgctgatcgacagcacagagatcacacgcgccaaagttgcctcgct

SEQ ID NO: 230937 - DNA, 55 bp, Artificial
  Synthetic oligonucleotide
catgctcgaccatctcccgaccgatggcctcccgatccttcgaacctcgccttag

SEQ ID NO: 230938 - DNA, 55 bp, Artificial
  Synthetic oligonucleotide
catgggccgggttccgaattgataccggcaaaagatacagcgcgagggatgagtg

SEQ ID NO: 230939 - DNA, 55 bp, Artificial
  Synthetic oligonucleotide
catggggctaaccgagggacaatcagcccagtcgattaaaatcgacacagccttc

SEQ ID NO: 230940 - DNA, 60 bp, Artificial
  Synthetic oligonucleotide
tcgcgttcttgcgcgtatggcggtgaacactggtactgacatgatcatcggaggtatccc

SEQ ID NO: 230941 - DNA, 55 bp, Artificial
  Synthetic oligonucleotide
catgtaaaggtcgaccgggtctttcattcgctgcctttcctcgtgatgtccgcca

SEQ ID NO: 230942 - DNA, 55 bp, Artificial
  Synthetic oligonucleotide
catgtaatggggtggatatgttagccacggtcgccttttgtcgcggcaatagcca

SEQ ID NO: 230943 - DNA, 55 bp, Artificial
  Synthetic oligonucleotide
catgtgctgtgtgccacgcgaaaattcaagcgggcataggtattcggccccagtc

SEQ ID NO: 230944 - DNA, 55 bp, Artificial
  Synthetic oligonucleotide
catgttccgaaaagtcttagatcgtttccgctagttgtctgttcaaccgatccgg

SEQ ID NO: 230945 - DNA, 55 bp, Artificial
  Synthetic oligonucleotide
cattggaagatttcgcgatttaggaaagcccgcagactgctaaagtatggcgtga

SEQ ID NO: 230946 - DNA, 55 bp, Artificial
  Synthetic oligonucleotide
gaaggtggacgaaaaggcctgagaggcgacgaggagccgggtattcagccgcgcg

SEQ ID NO: 230947 - DNA, 55 bp, Artificial
  Synthetic oligonucleotide
cattgggcggatgtcgaacatggaaacgagcttccgtagaccaattgaacggttg

SEQ ID NO: 230948 - DNA, 55 bp, Artificial
  Synthetic oligonucleotide
ccaaacttttccttatggaatggtttcgttcagactgatgccgagggtttcatga

SEQ ID NO: 230949 - DNA, 55 bp, Artificial
  Synthetic oligonucleotide
gaaggggatcagacacccaaccccgatcagcagacaccccgacacgatattgatc

SEQ ID NO: 230950 - DNA, 55 bp, Artificial
  Synthetic oligonucleotide
gaaggcatgggctgtgcgatcctggatccctttgttttggactttgatcgtgggg

SEQ ID NO: 230951 - DNA, 56 bp, Artificial
  Synthetic oligonucleotide
aaccctcttcgacccggacagaagctgatgaaaggacaacccatgacctcaacgcc

SEQ ID NO: 230952 - DNA, 54 bp, Artificial
  Synthetic oligonucleotide
ccaacgcaccgccctctgttggggtaacggatgcacatttcaccaaagtttcgg

SEQ ID NO: 230953 - DNA, 53 bp, Artificial
  Synthetic oligonucleotide
gaagaaccggggagagaagatcggaaaacgcgttcgtttctccgcgcgtgagt

SEQ ID NO: 230954 - DNA, 55 bp, Artificial
  Synthetic oligonucleotide
gaacttcatgaaatcgagcgcgagcggcacattctcggaggccgaggagatcatg

SEQ ID NO: 230955 - DNA, 55 bp, Artificial
  Synthetic oligonucleotide
gaacgtgggagaaacctaaggccggggctcgcatgaaattctcgatagatatcgg

SEQ ID NO: 230956 - DNA, 55 bp, Artificial
  Synthetic oligonucleotide
caggtgtgactacgataggcgtgcatgatggtcccttcctagggctaattcaggt

SEQ ID NO: 230957 - DNA, 55 bp, Artificial
  Synthetic oligonucleotide
gacctatgacgccgatacccggtccacctacacaggcgaacggggcacggtctat

SEQ ID NO: 230958 - DNA, 54 bp, Artificial
  Synthetic oligonucleotide
gaccggatcgaaacccgccgaaagggttatcaaagcgcccatttggagaatgcc

SEQ ID NO: 230959 - DNA, 55 bp, Artificial
  Synthetic oligonucleotide
gaccgcttgtaactcggcccgcagtgattagaatagggcgctgagacgaattccg

SEQ ID NO: 230960 - DNA, 55 bp, Artificial
  Synthetic oligonucleotide
gaccgagattgcccggctcctgggtgtgcatcgcgctaccctctatcgggcttta

SEQ ID NO: 230961 - DNA, 55 bp, Artificial
  Synthetic oligonucleotide
gaccctatgaccgcgaccgcccttcacacccagacgatggtccatttctcgcgca

SEQ ID NO: 230962 - DNA, 60 bp, Artificial
  Synthetic oligonucleotide
gctccgacgaggtgatcggatggtatgtcgttctcgagtatccggacggcacagccaagg

SEQ ID NO: 230963 - DNA, 55 bp, Artificial
  Synthetic oligonucleotide
gacccctgagccggacggtagatcatggccctgtcgcatgatgctgtcgtacgtc

SEQ ID NO: 230964 - DNA, 55 bp, Artificial
  Synthetic oligonucleotide
gacccctatgagggatggaccacccaagggcatgcatggtgggaagtcggaacgc

SEQ ID NO: 230965 - DNA, 55 bp, Artificial
  Synthetic oligonucleotide
caggttcggacatgaggttcccttccgtggactgttatgattgaagtgtatcgcg

SEQ ID NO: 230966 - DNA, 55 bp, Artificial
  Synthetic oligonucleotide
caggttggccatatcggagaactcccagatcaactcggcattttgtccactaggg

SEQ ID NO: 230967 - DNA, 55 bp, Artificial
  Synthetic oligonucleotide
cagtatcggtgtctaggcggatgttgatcgtgttcaggacaccacccatggcggg

SEQ ID NO: 230968 - DNA, 55 bp, Artificial
  Synthetic oligonucleotide
gaccactggcgatgtgtcctgggtgaaaggggtcgccgcatgacttcaaagcgcg

SEQ ID NO: 230969 - DNA, 55 bp, Artificial
  Synthetic oligonucleotide
cataaacggaaggctcccaaatggccgtcaccctcacgcatctggatgacatcgc

SEQ ID NO: 230970 - DNA, 55 bp, Artificial
  Synthetic oligonucleotide
catacattggaactctctccttgcgggtagggcgaccttggacactgcgggctgg

SEQ ID NO: 230971 - DNA, 55 bp, Artificial
  Synthetic oligonucleotide
gacatttcgaaagacacattggacgcttattggttgtcctcgcgagagcacaggc

SEQ ID NO: 230972 - DNA, 55 bp, Artificial
  Synthetic oligonucleotide
cataccttgctatggggccatcccgacttcgaaacgtgctccgcaaggacggttc

SEQ ID NO: 230973 - DNA, 60 bp, Artificial
  Synthetic oligonucleotide
cgtcatgagatgtgcgagccacagtcgcggttggtgttccgaacgctgtacaacctctct

SEQ ID NO: 230974 - DNA, 55 bp, Artificial
  Synthetic oligonucleotide
catacgtggatataagactgggcaacggctacgatgttcataaatttggaccagg

SEQ ID NO: 230975 - DNA, 55 bp, Artificial
  Synthetic oligonucleotide
gacatatgcacgcaggttgtcgttgaatgtatgacaggtcaagcgtattgtatgc

SEQ ID NO: 230976 - DNA, 55 bp, Artificial
  Synthetic oligonucleotide
cataggtgtcttggtacggtgcgaattccacaccacgcaaacggcgcgcgacggc

SEQ ID NO: 230977 - DNA, 55 bp, Artificial
  Synthetic oligonucleotide
catccaaaatgagtggaaaaccttccgaagccaagtctcagacaatttccgcgtc

SEQ ID NO: 230978 - DNA, 55 bp, Artificial
  Synthetic oligonucleotide
catccccatcacccggaggcacttgcggtcattgaatttaagcatgcctatcctc

SEQ ID NO: 230979 - DNA, 55 bp, Artificial
  Synthetic oligonucleotide
gacagcgggctgtgcgaatgacatgtgaacgggcctagctaacggaatacgactc

SEQ ID NO: 230980 - DNA, 55 bp, Artificial
  Synthetic oligonucleotide
gacacccacccgcctgatgcgccatactctgccgattgccccacagttctacgtg

SEQ ID NO: 230981 - DNA, 55 bp, Artificial
  Synthetic oligonucleotide
gaatttgtctggttctaacgcccgggatcgtggattggtcgtctgcctggccttg

SEQ ID NO: 230982 - DNA, 55 bp, Artificial
  Synthetic oligonucleotide
catccgtttgaaacggcactgccaatagtgcttgggtcatttgtgccatgcacac

SEQ ID NO: 230983 - DNA, 55 bp, Artificial
  Synthetic oligonucleotide
catcgcgtgcggacctcaggctcctatttgcccctatgaacataagtttagcccc

SEQ ID NO: 230984 - DNA, 60 bp, Artificial
  Synthetic oligonucleotide
tcggaatgaacggctcatatttccatcttgacgcatatctatcggtaccatcaactttga

SEQ ID NO: 230985 - DNA, 55 bp, Artificial
  Synthetic oligonucleotide
cttggccattgatcgaagggttccgcaaaggtgcccaacaggtcattgatgcggc

SEQ ID NO: 230986 - DNA, 55 bp, Artificial
  Synthetic oligonucleotide
cttggcacatggacagaaagacctcgggcttgatgctcgaggcagatgtgcgaac

SEQ ID NO: 230987 - DNA, 55 bp, Artificial
  Synthetic oligonucleotide
ccaggttcaggtccattctgaaaatcgcctcgaatttgttctatcggcctagagc

SEQ ID NO: 230988 - DNA, 55 bp, Artificial
  Synthetic oligonucleotide
cttggaggaaataccacctgcttcgttcgtaccttgcggcctctcccgctcaact

SEQ ID NO: 230989 - DNA, 55 bp, Artificial
  Synthetic oligonucleotide
ccataatagctggggcctttcttatgtgccgactcctggcacaggatttctgcgc

SEQ ID NO: 230990 - DNA, 55 bp, Artificial
  Synthetic oligonucleotide
ccataatgcggcaggcgataagcggtgggccaaaaggttccatagggatgcgtac

SEQ ID NO: 230991 - DNA, 55 bp, Artificial
  Synthetic oligonucleotide
ccatcgcatgcaagcggcggggctcagggtccatcgcatgcaagcggcggtgcaa

SEQ ID NO: 230992 - DNA, 55 bp, Artificial
  Synthetic oligonucleotide
cttctgttggccacagtgttttcgagcaatttcgtatacccgccgttcaatgggc

SEQ ID NO: 230993 - DNA, 55 bp, Artificial
  Synthetic oligonucleotide
ccatctgagggtggacggagcataccggggacaaatatccccgtcaacgggcgtc

SEQ ID NO: 230994 - DNA, 55 bp, Artificial
  Synthetic oligonucleotide
cttaggtctccttgtcactgcccgagttatggggcctcatcgcgtaactctagcg

SEQ ID NO: 230995 - DNA, 58 bp, Artificial
  Synthetic oligonucleotide
cccgaaagctgagacatggctccttccgcccgaacactccatgtttgggtaccatcta

SEQ ID NO: 230996 - DNA, 55 bp, Artificial
  Synthetic oligonucleotide
ccatctgcacttcgcgccagtcctgatcagcccatagatgcgtcaagcccacgcg

SEQ ID NO: 230997 - DNA, 55 bp, Artificial
  Synthetic oligonucleotide
ccatgggcttgttggcacctattacaaacccgacagccgcccctggatcggcacc

SEQ ID NO: 230998 - DNA, 55 bp, Artificial
  Synthetic oligonucleotide
cttaacgcccggtcactctatgacctcttccgacagtcaaacctccggtctcagg

SEQ ID NO: 230999 - DNA, 55 bp, Artificial
  Synthetic oligonucleotide
ctgttttagtgaggtgggacagatccgaatttatgtcttacgcgccgtaagcggc

SEQ ID NO: 231000 - DNA, 55 bp, Artificial
  Synthetic oligonucleotide
ctgtttcagatcagcgtaacgccgggagtggggcagccagatatcgccggatcgg

SEQ ID NO: 231001 - DNA, 55 bp, Artificial
  Synthetic oligonucleotide
ccatgtcagcctctcgttacggaaacggatgtggcagcatgttcgatgcgccatc

SEQ ID NO: 231002 - DNA, 55 bp, Artificial
  Synthetic oligonucleotide
ccattcaagtagtgaagtcagctacggccatgtgcaggaacctgatcaggtgcgc

SEQ ID NO: 231003 - DNA, 55 bp, Artificial
  Synthetic oligonucleotide
ctgtccgggaacacatgccagaacttcattttaggcgatccttctgccgacgggt

SEQ ID NO: 231004 - DNA, 55 bp, Artificial
  Synthetic oligonucleotide
ctggtcgagaagcgtcgaattctgagtttcaatgacacggacaagactacgcagc

SEQ ID NO: 231005 - DNA, 55 bp, Artificial
  Synthetic oligonucleotide
ctggtcctcccggatgctacgctttcctcaacggaacatcccgaggttagcgggc

SEQ ID NO: 231006 - DNA, 60 bp, Artificial
  Synthetic oligonucleotide
tcgggatttgtggccgcttgggataggccgcagctcagctgtccaccactgttgctgcgg

SEQ ID NO: 231007 - DNA, 55 bp, Artificial
  Synthetic oligonucleotide
ctgggaatatcgcgaagccatgaggaatgcccgtgcccttggcaagtccgggtcc

SEQ ID NO: 231008 - DNA, 55 bp, Artificial
  Synthetic oligonucleotide
ctggcctttcttgctgaccccagacctacccgattggcggcagcagatggttcgg

SEQ ID NO: 231009 - DNA, 55 bp, Artificial
  Synthetic oligonucleotide
ctggcagaatcggggacggagacctagcttacccacaacatctggggcgcggaag

SEQ ID NO: 231010 - DNA, 55 bp, Artificial
  Synthetic oligonucleotide
ccattgctcgtcctcaactcttccgtccagtttcacaagcgtagcgacggcacca

SEQ ID NO: 231011 - DNA, 55 bp, Artificial
  Synthetic oligonucleotide
ccaagcgtgaaaggcaatctcgaaagctcctatatgtcgcgtgctcacgcaccaa

SEQ ID NO: 231012 - DNA, 55 bp, Artificial
  Synthetic oligonucleotide
gaacggatgtctttcgagaacaaagccatatggcatctccttcatgtcggttgcg

SEQ ID NO: 231013 - DNA, 55 bp, Artificial
  Synthetic oligonucleotide
ccaagcgttgacaggataggaaccagtgtcacctcgcccgattctcgtaaaccag

SEQ ID NO: 231014 - DNA, 55 bp, Artificial
  Synthetic oligonucleotide
ccaatgcatccgcagacctgcgtctccaaattagcgagaagcgtcgttcacgtgc

SEQ ID NO: 231015 - DNA, 55 bp, Artificial
  Synthetic oligonucleotide
gaacgctctgtgtcccaacgatggtggttaacgcttcggtgctaacgaccacgcc

SEQ ID NO: 231016 - DNA, 55 bp, Artificial
  Synthetic oligonucleotide
gaacgccgatacatttgaaagcgcaacacgctctgccgcgatgggtggcactaca

SEQ ID NO: 231017 - DNA, 60 bp, Artificial
  Synthetic oligonucleotide
tatttccgcgatgccctgaactggctcaagacccggcatggagccgaaaacatcctctca

SEQ ID NO: 231018 - DNA, 57 bp, Artificial
  Synthetic oligonucleotide
tcgggcaatgactttccccagcgaggtatggttatgaatgcggcaacgcgtccgggg

SEQ ID NO: 231019 - DNA, 55 bp, Artificial
  Synthetic oligonucleotide
gaaccgcatgtagttccacatcatattgaggaaccgctctaacggcggcttgtca

SEQ ID NO: 231020 - DNA, 55 bp, Artificial
  Synthetic oligonucleotide
gaacatgcgaggaaccccttatgcaacgaatgtagcagggttcgagcacacgcgc

SEQ ID NO: 231021 - DNA, 54 bp, Artificial
  Synthetic oligonucleotide
ccaattgaggtggactgaaggttccgttgtcaaaggaccagccgatacctacgg

SEQ ID NO: 231022 - DNA, 55 bp, Artificial
  Synthetic oligonucleotide
ccaccaatctgatccgctacgatattcagcgcgtcccgctctgccccgagacgaa

SEQ ID NO: 231023 - DNA, 55 bp, Artificial
  Synthetic oligonucleotide
ccaccagaatcgcggaaaattgcgtcatggcttacccttttcaacatgaacgggc

SEQ ID NO: 231024 - DNA, 55 bp, Artificial
  Synthetic oligonucleotide
cttttggccttaataggttgtgatggccacttctgatcataggcagttattcagc

SEQ ID NO: 231025 - DNA, 55 bp, Artificial
  Synthetic oligonucleotide
cttttggccgcgacggtccatttcgcacaaggcatcacggatcgggttttcggtc

SEQ ID NO: 231026 - DNA, 55 bp, Artificial
  Synthetic oligonucleotide
cttttcaagtcggacgtagccttgtgccgtccggctttgggaggacgcgccatgc

SEQ ID NO: 231027 - DNA, 55 bp, Artificial
  Synthetic oligonucleotide
ctttgggacgctcgggcgtcatgtcgccctccatacgtggttgagatcagagtag

SEQ ID NO: 231028 - DNA, 55 bp, Artificial
  Synthetic oligonucleotide
ccaccatgtgtccgcgacttgtctggcagacggcatcttcggctctccctgactg

SEQ ID NO: 231029 - DNA, 60 bp, Artificial
  Synthetic oligonucleotide
caactcgggaatgggggcgagggctgcatgaagcgtctcgcggagggattgggcgctgta

SEQ ID NO: 231030 - DNA, 55 bp, Artificial
  Synthetic oligonucleotide
ccacccagtggtcaccgatgtagtgaacccggtcattctgcaccgcgctcaggtt

SEQ ID NO: 231031 - DNA, 55 bp, Artificial
  Synthetic oligonucleotide
ctttgggaaccgaaatggacagtgcagccgcaactccgaccaaccttcgccggga

SEQ ID NO: 231032 - DNA, 55 bp, Artificial
  Synthetic oligonucleotide
ctttggctagagggcggacgtctggttgattttggaagctgcgatgacgtattgg

SEQ ID NO: 231033 - DNA, 55 bp, Artificial
  Synthetic oligonucleotide
ccacgttcggctccctgcgaccgtaaggtcaagcacaaagacgcacgtctcctgc

SEQ ID NO: 231034 - DNA, 55 bp, Artificial
  Synthetic oligonucleotide
ccagaacttgtgactacagaaattattgcgatctcgagggatctcggagtagagg

SEQ ID NO: 231035 - DNA, 55 bp, Artificial
  Synthetic oligonucleotide
ccagacctttgaactcgctattggaagggccgatgatactgtcccatgatccttc

SEQ ID NO: 231036 - DNA, 55 bp, Artificial
  Synthetic oligonucleotide
ctttcattttcaatggcttgcgcgcctatcggggagaaatggggccgcaaaaggg

SEQ ID NO: 231037 - DNA, 55 bp, Artificial
  Synthetic oligonucleotide
ccagaggctattgcgggctgaagctcatgtgaagacaaattcgttaagacttccg

SEQ ID NO: 231038 - DNA, 55 bp, Artificial
  Synthetic oligonucleotide
ccagattaggctggcagagaaggggtctgatgccggagagtgcagaatcctacgc

SEQ ID NO: 231039 - DNA, 55 bp, Artificial
  Synthetic oligonucleotide
ccagcccgaacctccgcgttgattaggttaagcggcgaattgtctatggtcagaa

SEQ ID NO: 231040 - DNA, 60 bp, Artificial
  Synthetic oligonucleotide
cgtgacagtagctagacgagccataggaggtcgatcggtagcgcgggtagctcggctgcc

SEQ ID NO: 231041 - DNA, 55 bp, Artificial
  Synthetic oligonucleotide
cgcaccttcgtaaactgttaggaggtgtcatgaaggcataccaagcgaagcgggc

SEQ ID NO: 231042 - DNA, 55 bp, Artificial
  Synthetic oligonucleotide
cgcaccgttccgcagtggcacgatccattataaacgctgtcatccatgagatatc

SEQ ID NO: 231043 - DNA, 55 bp, Artificial
  Synthetic oligonucleotide
ccggccatatatgaccgctcagttccatcagagacgttaccgtcgctacgtaacc

SEQ ID NO: 231044 - DNA, 55 bp, Artificial
  Synthetic oligonucleotide
cgcaccctgcggtatctgccttcacagattgggaccaccatgtattccacactcg

SEQ ID NO: 231045 - DNA, 55 bp, Artificial
  Synthetic oligonucleotide
ccgggactttcgagtgcctcggatattccgatgcccttggcgtacaagccaaccc

SEQ ID NO: 231046 - DNA, 55 bp, Artificial
  Synthetic oligonucleotide
cgcaccatcgggatctattccggcgcacttggatacggttttaacacggacttgc

SEQ ID NO: 231047 - DNA, 53 bp, Artificial
  Synthetic oligonucleotide
ccgggatttggcctgaatttgtgtccagcccgtacgcaatcggggctttaacc

SEQ ID NO: 231048 - DNA, 55 bp, Artificial
  Synthetic oligonucleotide
cgcacaattcagacgtgtttacggtgcctgttttcgagctttctcgcattcaggt

SEQ ID NO: 231049 - DNA, 55 bp, Artificial
  Synthetic oligonucleotide
ccggggctggtcgcaatgacaaagacaccaatcgatttcgatctgaatgtgggcg

SEQ ID NO: 231050 - DNA, 55 bp, Artificial
  Synthetic oligonucleotide
cgcaacagagagtccgacctgcacgatgaatgcggctgtagcggcactccatccc

SEQ ID NO: 231051 - DNA, 60 bp, Artificial
  Synthetic oligonucleotide
acatggcggttacagcctttgacgcgcgcctcgaaattttgacgcctgatagtatctgtc

SEQ ID NO: 231052 - DNA, 55 bp, Artificial
  Synthetic oligonucleotide
ccggggtggcccaatcaagataaatccattcggcaaccacgagaaccgacagcat

SEQ ID NO: 231053 - DNA, 55 bp, Artificial
  Synthetic oligonucleotide
cgattatggtctaccgttaccggcccatgcgcgtgtgtcctacaattacgactag

SEQ ID NO: 231054 - DNA, 53 bp, Artificial
  Synthetic oligonucleotide
cgattacttacttgccgtgaagccgtaagatggttttctaaaggtgtaacagg

SEQ ID NO: 231055 - DNA, 55 bp, Artificial
  Synthetic oligonucleotide
ccggggttcttccgcttcgtttgcgccaatggtctcatggctggcgaaaccttcg

SEQ ID NO: 231056 - DNA, 54 bp, Artificial
  Synthetic oligonucleotide
ccgggttccttcgtggtcttctgcgtgggacacgagttttctccaagtttcagc

SEQ ID NO: 231057 - DNA, 55 bp, Artificial
  Synthetic oligonucleotide
ccggtatgacgggtgagacagcaacggtgttcgcttgggatgccgagagcaagga

SEQ ID NO: 231058 - DNA, 55 bp, Artificial
  Synthetic oligonucleotide
cgatgaattcactgaagtcgtccaagcgtgggtcaatggaggttctgatctcgcc

SEQ ID NO: 231059 - DNA, 55 bp, Artificial
  Synthetic oligonucleotide
cgatcatcgcgtgagaagtttccgccagtatgcggacacaagacgggacggtcac

SEQ ID NO: 231060 - DNA, 55 bp, Artificial
  Synthetic oligonucleotide
cgatcataggtttcgatcccgttattccgcgctaccccaaggagccttggctagc

SEQ ID NO: 231061 - DNA, 55 bp, Artificial
  Synthetic oligonucleotide
ccgtatgatcgtgttcgctgaatctggcgtgaggagtgcaacgtcatcagagcct

SEQ ID NO: 231062 - DNA, 58 bp, Artificial
  Synthetic oligonucleotide
gcgtactcccttcgaccaatcgcacaagtcgctctaggccattccgtacgtgttcagg

SEQ ID NO: 231063 - DNA, 55 bp, Artificial
  Synthetic oligonucleotide
cgatatgccggggtagccctagagtgcctcgcactggtattgaggatagccctga

SEQ ID NO: 231064 - DNA, 55 bp, Artificial
  Synthetic oligonucleotide
cgaggtcatatggtgcgaaagccgacatcgatcccatgtccaccggagagccggg

SEQ ID NO: 231065 - DNA, 55 bp, Artificial
  Synthetic oligonucleotide
cgaggggctgacgatcgtcacgaacaacctccatgccgccgtaaccctttatgac

SEQ ID NO: 231066 - DNA, 55 bp, Artificial
  Synthetic oligonucleotide
cgagggcgtcgccagagatctcccggattcggtttaagaaccggttgagagacga

SEQ ID NO: 231067 - DNA, 55 bp, Artificial
  Synthetic oligonucleotide
cgaggatgaccccttgctgaacacccctgcgccttgcctcgacggcaatttcctc

SEQ ID NO: 231068 - DNA, 55 bp, Artificial
  Synthetic oligonucleotide
ccgtccaagtgaaggcgtatccaatgagccaagctttatagtgggttatccattt

SEQ ID NO: 231069 - DNA, 55 bp, Artificial
  Synthetic oligonucleotide
ccgtcccaaggatcgtctcggcttctgtgccgtaggacctgagcagacgtcgcgc

SEQ ID NO: 231070 - DNA, 55 bp, Artificial
  Synthetic oligonucleotide
ccgtcgcatcggcttgattttccggccgaaggcaccagtttcaaccacacagacg

SEQ ID NO: 231071 - DNA, 55 bp, Artificial
  Synthetic oligonucleotide
ccgcgccttgaaactcgcatcctcagcctcttacactttgccagccgttcctgag

SEQ ID NO: 231072 - DNA, 55 bp, Artificial
  Synthetic oligonucleotide
cgcctgccctcgtcatcggtcgtacagttgtccaaggtcaggtcagcgacagaat

SEQ ID NO: 231073 - DNA, 60 bp, Artificial
  Synthetic oligonucleotide
cgtgctcgacataatgaaacgacatagagaaaacacttagggtgtcattctgcccccagc

SEQ ID NO: 231074 - DNA, 55 bp, Artificial
  Synthetic oligonucleotide
ccgcgctcagatcgacgaaagttcttccagaaacgaaaccaaatgatcggatgtc

SEQ ID NO: 231075 - DNA, 55 bp, Artificial
  Synthetic oligonucleotide
cgccgtagcttcacctgggagcggagtagaaagcgccattcgggaacctgtttgc

SEQ ID NO: 231076 - DNA, 55 bp, Artificial
  Synthetic oligonucleotide
ccgcgctgcgaggtgatcttgttcaaggtgagggacgtcatgccatgagcctcca

SEQ ID NO: 231077 - DNA, 55 bp, Artificial
  Synthetic oligonucleotide
cgccgggcatactgcctcaattctggagctcatgccgtcttctcaggaggactgg

SEQ ID NO: 231078 - DNA, 55 bp, Artificial
  Synthetic oligonucleotide
cgccgcccataaatcttattagcgcgtcaattttgcgctcatagctggcgacagt

SEQ ID NO: 231079 - DNA, 55 bp, Artificial
  Synthetic oligonucleotide
ccgcggagagaaactatgatagcgggtcatcggaacacctgtccgtgaggggtga

SEQ ID NO: 231080 - DNA, 55 bp, Artificial
  Synthetic oligonucleotide
ccgctccgcaagatgcgggaggcaccgaagggtcgggacgaggcgtgcgacccta

SEQ ID NO: 231081 - DNA, 55 bp, Artificial
  Synthetic oligonucleotide
cgccgcaagtgagacggaattgatccgcgactgcgtgtaacctcgtatagctttg

SEQ ID NO: 231082 - DNA, 55 bp, Artificial
  Synthetic oligonucleotide
cgccgcaaccgcagggttcgaatgatgtcttgaaaccccgtgttgaccccatcgt

SEQ ID NO: 231083 - DNA, 55 bp, Artificial
  Synthetic oligonucleotide
ccgctgcgagttccgaccatacccgacgcggcataagtcgtcaccttcgaccgat

SEQ ID NO: 231084 - DNA, 58 bp, Artificial
  Synthetic oligonucleotide
cgtggaagcatatcctccggatggcccccaaatcagcccgcgtcaaggatcgcaaaac

SEQ ID NO: 231085 - DNA, 52 bp, Artificial
  Synthetic oligonucleotide
ccgcttgtgcgacgacaaaccggcctttgggccctgacgggtttcccttgcc

SEQ ID NO: 231086 - DNA, 55 bp, Artificial
  Synthetic oligonucleotide
cgccgagaaatcgtcgtccacaggggtcgaatccgcgcacatattgttcagcggc

SEQ ID NO: 231087 - DNA, 55 bp, Artificial
  Synthetic oligonucleotide
cgccctcagaataggaggcgaccacaaccggccccacctgcatccgcgctttaat

SEQ ID NO: 231088 - DNA, 55 bp, Artificial
  Synthetic oligonucleotide
cgccagaaggtttgctgagcagtccaaaccatcactgcggcgactatcgacagcg

SEQ ID NO: 231089 - DNA, 52 bp, Artificial
  Synthetic oligonucleotide
cgccaactaagcggtaacctgacagtttgatcgaaaccctggggtcgttacc

SEQ ID NO: 231090 - DNA, 55 bp, Artificial
  Synthetic oligonucleotide
cgccaaccatgttatccaggatcaacgcttgttccattacaggctgaacggattg

SEQ ID NO: 231091 - DNA, 55 bp, Artificial
  Synthetic oligonucleotide
ccggaagcccggatactggactggtgcaatgtctgacgacatgcccttccggaag

SEQ ID NO: 231092 - DNA, 52 bp, Artificial
  Synthetic oligonucleotide
cgccaaacgtcttaaccgataatctggtgatattcctccccgttttaactgg

SEQ ID NO: 231093 - DNA, 55 bp, Artificial
  Synthetic oligonucleotide
cgcattgacgattgatgatgcggagtttgacaaagcgcttgagcggatcacccgt

SEQ ID NO: 231094 - DNA, 55 bp, Artificial
  Synthetic oligonucleotide
cgcattcacgcaagttcgggcacaacaggtaaggcgaccgttgttgggtacagcc

SEQ ID NO: 231095 - DNA, 60 bp, Artificial
  Synthetic oligonucleotide
tccaaatccgtgctgcgatcctaaacggcttcacagcgcttggcatccccaagacagagg

SEQ ID NO: 231096 - DNA, 55 bp, Artificial
  Synthetic oligonucleotide
ccggagcccgtcctaccgtatttcgtctctagcggaagaacgtctgttcagtcac

SEQ ID NO: 231097 - DNA, 55 bp, Artificial
  Synthetic oligonucleotide
cgcatgggtcccgcctttcgtggctgccatttcagattggcgtgacgcagcatcg

SEQ ID NO: 231098 - DNA, 55 bp, Artificial
  Synthetic oligonucleotide
cgcatcgcacccctataaggggtcactccccatatccgttcctcatcgggaccgg

SEQ ID NO: 231099 - DNA, 55 bp, Artificial
  Synthetic oligonucleotide
cgcataggttcagagggatccgctcgtctgcaggtggtatctactaagggttgta

SEQ ID NO: 231100 - DNA, 55 bp, Artificial
  Synthetic oligonucleotide
ccggagcggtagaacaggggcaaagtaaggtggagcatatgctgagacagcgcgc

SEQ ID NO: 231101 - DNA, 55 bp, Artificial
  Synthetic oligonucleotide
cgcacgagctcttcaacccgaatatcttccgcgccacggccaacaactacacgca

SEQ ID NO: 231102 - DNA, 55 bp, Artificial
  Synthetic oligonucleotide
ccggcataacgcggagaaatgcgctgattccgagttcttgaggcagcagctatcg

SEQ ID NO: 231103 - DNA, 55 bp, Artificial
  Synthetic oligonucleotide
cctttcgttgctagactgcgcccagctaagccgattgaccgggtgtccgcaatgc

SEQ ID NO: 231104 - DNA, 55 bp, Artificial
  Synthetic oligonucleotide
cctttcgaccctggccacacgcgatccggtcgagattctgaagcttgagccactg

SEQ ID NO: 231105 - DNA, 55 bp, Artificial
  Synthetic oligonucleotide
ccgttcaatatgtcgtcccaaccgtcggtttgcgtgctcatctcaggcgatccac

SEQ ID NO: 231106 - DNA, 60 bp, Artificial
  Synthetic oligonucleotide
acactcggacaggagtcgaaagctgcggggtcactcgccgcattcgaggtaggcaagcgc

SEQ ID NO: 231107 - DNA, 55 bp, Artificial
  Synthetic oligonucleotide
ccttggcgtacaagccaaccctgcgcttagtaggtatacgctataggtgcgtccg

SEQ ID NO: 231108 - DNA, 55 bp, Artificial
  Synthetic oligonucleotide
ccgttcacgagaggccacgcggttcactcagtcacggaaggaagcgcctacctac

SEQ ID NO: 231109 - DNA, 55 bp, Artificial
  Synthetic oligonucleotide
ccttctggacccctaacgagagctttaggatcatagatgtggtttaacatcctcc

SEQ ID NO: 231110 - DNA, 55 bp, Artificial
  Synthetic oligonucleotide
ccttcgaaaaccacatgaaactgcgacgtgatccctccaaacgcccacccgtggc

SEQ ID NO: 231111 - DNA, 55 bp, Artificial
  Synthetic oligonucleotide
ccgttgattttgattggagcctacttactctggccgccatcagcctagatgacgg

SEQ ID NO: 231112 - DNA, 55 bp, Artificial
  Synthetic oligonucleotide
ccttcagaaaggtcgggatcataagcgtagccgcccgaggtgaagcctttgatcc

SEQ ID NO: 231113 - DNA, 53 bp, Artificial
  Synthetic oligonucleotide
ccttatagagcgaagcgtgagggttaattttcggtcgtgttcataaacgttaa

SEQ ID NO: 231114 - DNA, 55 bp, Artificial
  Synthetic oligonucleotide
ccgtttcatctctctctcctgttgtcgggcttcttgttggtcttgaggttgggcg

SEQ ID NO: 231115 - DNA, 55 bp, Artificial
  Synthetic oligonucleotide
cctagggtgattccgagcacaggatttacccgatgttgaaccccatgacccgccg

SEQ ID NO: 231116 - DNA, 55 bp, Artificial
  Synthetic oligonucleotide
cctggcagtgtggcttggatatgccgttgtcgcaaccgctgctcagtgggccttg

SEQ ID NO: 231117 - DNA, 60 bp, Artificial
  Synthetic oligonucleotide
ccctgcattgcgatcaccccttgaagctacagtggctgtagatcgtatctaccatgggga

SEQ ID NO: 231118 - DNA, 55 bp, Artificial
  Synthetic oligonucleotide
cctggcagacaggaacaatcttccttctaacgcgcgttgggccgatcttccatac

SEQ ID NO: 231119 - DNA, 55 bp, Artificial
  Synthetic oligonucleotide
cctggacagctgcctaatccactgggctcatgatactaattgacctctgcgactg

SEQ ID NO: 231120 - DNA, 55 bp, Artificial
  Synthetic oligonucleotide
cctatcaggcgaatactccgtcctacattgccgaaaggaacctttcagtcgaagt

SEQ ID NO: 231121 - DNA, 55 bp, Artificial
  Synthetic oligonucleotide
cctgcgctccgtgtctacggatacaccgcacaccagattgggacatccattggcg

SEQ ID NO: 231122 - DNA, 55 bp, Artificial
  Synthetic oligonucleotide
cctgccactctcacacaaccgaaatcaagctctcaaggggcaaacctctcggaaa

SEQ ID NO: 231123 - DNA, 55 bp, Artificial
  Synthetic oligonucleotide
cctgagaccgttgtgagcccagttgccccggaaaagctgaggtaaaatcgctggg

SEQ ID NO: 231124 - DNA, 55 bp, Artificial
  Synthetic oligonucleotide
cctattgcgggcacaatccgccctctgaccgtcccaacttgtcgcttgggctgca

SEQ ID NO: 231125 - DNA, 55 bp, Artificial
  Synthetic oligonucleotide
cctgaaaagttcgctctcctcggtatgtccatgggtggttacgttgccctggagg

SEQ ID NO: 231126 - DNA, 55 bp, Artificial
  Synthetic oligonucleotide
cctcaaggccgcaccgggaatgaagcgacgcaggcgatgctaatcaagggcgaca

SEQ ID NO: 231127 - DNA, 55 bp, Artificial
  Synthetic oligonucleotide
cctctggcgactcagtgattaattctgactgttatacttgggatttgactttgtg

SEQ ID NO: 231128 - DNA, 60 bp, Artificial
  Synthetic oligonucleotide
ccgacatagtagtgaaaacgactgtgagggaacgatgaaggttatagctgcttacagcca

SEQ ID NO: 231129 - DNA, 60 bp, Artificial
  Synthetic oligonucleotide
ggaagagatcagagcgagactaatccgtgcagagcaacgcggtttcaccgatatgacccc

SEQ ID NO: 231130 - DNA, 55 bp, Artificial
  Synthetic oligonucleotide
cctcgctgtcgggcctaggttcaggacccattgatttgcttgaggctgggcgggt

SEQ ID NO: 231131 - DNA, 55 bp, Artificial
  Synthetic oligonucleotide
cctcatccgtcctgaagagagaaggaccgctccgcctccatttccgttcggtcga

SEQ ID NO: 231132 - DNA, 55 bp, Artificial
  Synthetic oligonucleotide
cctcgatgaaccttcgtcatcgggtaactgtcggcacgcgtcccttcgggatcgc

SEQ ID NO: 231133 - DNA, 55 bp, Artificial
  Synthetic oligonucleotide
cctccggggtttgcgggcaagctagcccggtgctaagcggggtgcaatcgcacga

SEQ ID NO: 231134 - DNA, 55 bp, Artificial
  Synthetic oligonucleotide
cctcgagagtggagtaagagatgacagccgatcccaccaaggacattgcggattt

SEQ ID NO: 231135 - DNA, 55 bp, Artificial
  Synthetic oligonucleotide
cgagcttatgaatgaccggcacaccacattcattgctgtactccacaaactcacc

SEQ ID NO: 231136 - DNA, 55 bp, Artificial
  Synthetic oligonucleotide
cgagctggtgctgatattcggagcctaaacaaagagccccacattcatgcaaagg

SEQ ID NO: 231137 - DNA, 55 bp, Artificial
  Synthetic oligonucleotide
cgagcaccattccggccaggtgccggatctctgcgtgatccgtttcgttgaacgg

SEQ ID NO: 231138 - DNA, 53 bp, Artificial
  Synthetic oligonucleotide
ccgtctgcggcccgttgcacggttccctgttgaagtcccgtcctcctccgacg

SEQ ID NO: 231139 - DNA, 55 bp, Artificial
  Synthetic oligonucleotide
cgagagtttgagtgcgcaatcctctggtgtactagagcaagttctcgtcagtgat

SEQ ID NO: 231140 - DNA, 60 bp, Artificial
  Synthetic oligonucleotide
tccatacaaaagcaactggctgtctcacttgcgggtctccaaatttctgtcgcaagggtc

SEQ ID NO: 231141 - DNA, 54 bp, Artificial
  Synthetic oligonucleotide
cgagaggtcgagtggaaaaccctcaaatgggtcgattggtataacaaccgccga

SEQ ID NO: 231142 - DNA, 50 bp, Artificial
  Synthetic oligonucleotide
cgacgtcgaagacagtaagtagggttcggcgtttccgtaataccttaacg

SEQ ID NO: 231143 - DNA, 54 bp, Artificial
  Synthetic oligonucleotide
ccgtgcgacgtgtcttcaggaactggtttcgggaccggctactgttgaactacc

SEQ ID NO: 231144 - DNA, 55 bp, Artificial
  Synthetic oligonucleotide
ccgtggcttcacagacgtgattataggcgtccttggaaaacacgacattggcatc

SEQ ID NO: 231145 - DNA, 55 bp, Artificial
  Synthetic oligonucleotide
cgacgacttcgactttgaatcgaggaatgtggacagcacggtaaacaacatacta

SEQ ID NO: 231146 - DNA, 55 bp, Artificial
  Synthetic oligonucleotide
cgacctatgccccggccctgcggaaatcggtgctgaccatgggctattacgattt

SEQ ID NO: 231147 - DNA, 55 bp, Artificial
  Synthetic oligonucleotide
cgaccgtgatcggtggtagaaccatatcagagatcgccatacgaacgcgttcatg

SEQ ID NO: 231148 - DNA, 55 bp, Artificial
  Synthetic oligonucleotide
cgaccgagtctctttggtagcgctccgcaagatatggggtcacttagtcgccgga

SEQ ID NO: 231149 - DNA, 55 bp, Artificial
  Synthetic oligonucleotide
cgacccgcacgaatggctgccctcggcctacagccaatggtcgatcttccacaag

SEQ ID NO: 231150 - DNA, 55 bp, Artificial
  Synthetic oligonucleotide
cgaccactctggggcaatcgatatgctatcaatctccgaactacccgagatagac

SEQ ID NO: 231151 - DNA, 54 bp, Artificial
  Synthetic oligonucleotide
aggatggacaccggtctcggaacggaggccggtgttctgtatgggtaagcggta

SEQ ID NO: 231152 - DNA, 55 bp, Artificial
  Synthetic oligonucleotide
cgaccaatggtcgagcaaagcccaccgcatacgcgcatggcttgtatggcagacc

SEQ ID NO: 231153 - DNA, 55 bp, Artificial
  Synthetic oligonucleotide
cgacagtcataacaatcacgatgaacattaggacaactgactgcgccgcagagcc

SEQ ID NO: 231154 - DNA, 55 bp, Artificial
  Synthetic oligonucleotide
cgaattttcactggttggccgcaattacggtttcaggccctacttcacatcggca

SEQ ID NO: 231155 - DNA, 55 bp, Artificial
  Synthetic oligonucleotide
cgaatttagccgtacgttcaaggacgtgcatgacacatgtgttgttgagacgggg

SEQ ID NO: 231156 - DNA, 55 bp, Artificial
  Synthetic oligonucleotide
ccgtgggattatcgcgaggcgtcgaaagaggatcatgcaaaggcgacgcagagcc

SEQ ID NO: 231157 - DNA, 55 bp, Artificial
  Synthetic oligonucleotide
ccgtgtcaatgaattccggaatggcagaaacaggggtcgccagaatgggcagctt

SEQ ID NO: 231158 - DNA, 51 bp, Artificial
  Synthetic oligonucleotide
cgaattctggttccgaaactaacgaacgaattcagccccaaatccgggtcc

SEQ ID NO: 231159 - DNA, 55 bp, Artificial
  Synthetic oligonucleotide
ccgtgttgtcggctagaacatcgggtgactgatatctctgcgccaaagcacgccg

SEQ ID NO: 231160 - DNA, 55 bp, Artificial
  Synthetic oligonucleotide
cgaaccctgcggcactttggtcatcacagcgcagcccagagccgaatcgagcaag

SEQ ID NO: 231161 - DNA, 55 bp, Artificial
  Synthetic oligonucleotide
ccgttaccgtaccctagcctatgctatttgactgatttccgtacaggcgcaccac

SEQ ID NO: 231162 - DNA, 58 bp, Artificial
  Synthetic oligonucleotide
acagagagtgcgaaactacctgaaaacgcgatctggcccacaatcccttctaggtcaa

SEQ ID NO: 231163 - DNA, 55 bp, Artificial
  Synthetic oligonucleotide
cctttgtgcatcaatgagcccggtatagctctggtccagcacacatcgtaaacgc

SEQ ID NO: 231164 - DNA, 55 bp, Artificial
  Synthetic oligonucleotide
cctttgctttccctcgcacatcactgcctgttgcgggcgacgctaggaatcacgg

SEQ ID NO: 231165 - DNA, 55 bp, Artificial
  Synthetic oligonucleotide
cctttgcaacagcgtccgtgtctatggctaccaacggtagtttccgtgacatcgc

SEQ ID NO: 231166 - DNA, 53 bp, Artificial
  Synthetic oligonucleotide
cggtcgtgaccaaaagccggacgttggaaaacgtggcatggtcctacgaggac

SEQ ID NO: 231167 - DNA, 52 bp, Artificial
  Synthetic oligonucleotide
cccggttttcaaatgtccgaaaagttcgtgatactgaccgttagagcccaac

SEQ ID NO: 231168 - DNA, 54 bp, Artificial
  Synthetic oligonucleotide
cggtcggagcgttaacgaaacaatgttaccctgtcgccgagggtggtcgcagta

SEQ ID NO: 231169 - DNA, 55 bp, Artificial
  Synthetic oligonucleotide
cggtcgctgttgcggcgcagtagggcgatctacacaaactggcgagtgtcggttg

SEQ ID NO: 231170 - DNA, 55 bp, Artificial
  Synthetic oligonucleotide
cccgtcgtttcagcacgcacgaaaggatgcacgcctttggccatcaaaccatccg

SEQ ID NO: 231171 - DNA, 55 bp, Artificial
  Synthetic oligonucleotide
ccctcgatcccgaagtcgatctacccgaccacgctttgtgactacaccgccggga

SEQ ID NO: 231172 - DNA, 55 bp, Artificial
  Synthetic oligonucleotide
cggtaacggggtcgtcccagtcaagggctctcacgcataccgaatgtcccgccta

SEQ ID NO: 231173 - DNA, 60 bp, Artificial
  Synthetic oligonucleotide
tcccgtttcccacggatcttcgcagatcctgccaatgctgaccgcacgaccgaattcagt

SEQ ID NO: 231174 - DNA, 55 bp, Artificial
  Synthetic oligonucleotide
cgggttctcagcgcttagcgtaggattctgcactctccggcatcagaccccgaga

SEQ ID NO: 231175 - DNA, 55 bp, Artificial
  Synthetic oligonucleotide
ccctcggcactggaacgcttttccgctgacaagggaaccttcgatgtcctttatg

SEQ ID NO: 231176 - DNA, 55 bp, Artificial
  Synthetic oligonucleotide
ccctgcacaaatgctacgattgcgcctaatgtcacgtcatggattcgcaagacac

SEQ ID NO: 231177 - DNA, 55 bp, Artificial
  Synthetic oligonucleotide
cgggttccaaccaccgagccatgtctgcgaagtacatcggcaaccaatcttggtt

SEQ ID NO: 231178 - DNA, 55 bp, Artificial
  Synthetic oligonucleotide
cgggtctaggtgaccactgcggcaccccggatcctcgttgcctaagtctacggcc

SEQ ID NO: 231179 - DNA, 55 bp, Artificial
  Synthetic oligonucleotide
ccctgcggccggattcgcctgaggttcattcggcacaggaatcgttaaccgcagc

SEQ ID NO: 231180 - DNA, 55 bp, Artificial
  Synthetic oligonucleotide
ccctgctacgggctacctaaacttcataccaagcgtacttttgaaagtattgcac

SEQ ID NO: 231181 - DNA, 55 bp, Artificial
  Synthetic oligonucleotide
cccttagcgtttctccgtgagagcggctcttggactgtaagtgagagctcgctgg

SEQ ID NO: 231182 - DNA, 55 bp, Artificial
  Synthetic oligonucleotide
cccttcaggataggaggaggctgcgaccgctaacaggcgcagtccgacgtattgc

SEQ ID NO: 231183 - DNA, 55 bp, Artificial
  Synthetic oligonucleotide
cggggaacttgacctcaacgtaactcaagatccgaacctatatgttgaaaccagc

SEQ ID NO: 231184 - DNA, 57 bp, Artificial
  Synthetic oligonucleotide
ccctcctgaccgaccagagaccgaaatcaggattctgggcgcggatgtttggcaaaa

SEQ ID NO: 231185 - DNA, 55 bp, Artificial
  Synthetic oligonucleotide
cgggctgtgcgttacagttatgggaacgcttgtctcaggcgggtctttggctatg

SEQ ID NO: 231186 - DNA, 55 bp, Artificial
  Synthetic oligonucleotide
ccctttacgatccgttaatagcatctgccggatatgccgatatgatcacaagggt

SEQ ID NO: 231187 - DNA, 53 bp, Artificial
  Synthetic oligonucleotide
cccttttgggtgttgcgttaccttgccctcctacctaacagtcagaggtctag

SEQ ID NO: 231188 - DNA, 55 bp, Artificial
  Synthetic oligonucleotide
cgggcggtcttccatcggcgtttcaaagaagccacgacaatgtctccaatacagt

SEQ ID NO: 231189 - DNA, 55 bp, Artificial
  Synthetic oligonucleotide
cgggcgggaaggttcgatcatagcggtcccatacgtcttttcacgaggctagcac

SEQ ID NO: 231190 - DNA, 55 bp, Artificial
  Synthetic oligonucleotide
cgggcggaaggagcaaggccgatgggtcacacgatcatgtcaagagcacttggct

SEQ ID NO: 231191 - DNA, 53 bp, Artificial
  Synthetic oligonucleotide
ccgactagagggcgacggcaacagggtaaaatcgtcacgttttggctcgggga

SEQ ID NO: 231192 - DNA, 55 bp, Artificial
  Synthetic oligonucleotide
ccgactcttggggctattccggggctgggtatgggacgcttgacgccaatctagg

SEQ ID NO: 231193 - DNA, 55 bp, Artificial
  Synthetic oligonucleotide
cgggccggtttcagctgattgattctcgcgacgcaatgcacgcaattgtttgatc

SEQ ID NO: 231194 - DNA, 55 bp, Artificial
  Synthetic oligonucleotide
cgggcaacggatgcgtggggcgcggataaagataggtataagcgcggatccggtc

SEQ ID NO: 231195 - DNA, 60 bp, Artificial
  Synthetic oligonucleotide
caaagcccgccagcggtgggtttgttatcatgctgcccacgtggcttgccaccgcagctc

SEQ ID NO: 231196 - DNA, 55 bp, Artificial
  Synthetic oligonucleotide
cgggaggtctatggacgggtctgcgatttgacggccggaactgtagtcgcctgtc

SEQ ID NO: 231197 - DNA, 55 bp, Artificial
  Synthetic oligonucleotide
cgtctgcgcgtccggaacaagcttcgcaaggtgaacgcaggtcgtctgcgtctct

SEQ ID NO: 231198 - DNA, 55 bp, Artificial
  Synthetic oligonucleotide
cgtctagtcctcttgcccaaggattttggggaagcgcgcaaaggcgcgtcgcgct

SEQ ID NO: 231199 - DNA, 55 bp, Artificial
  Synthetic oligonucleotide
cgtcgtgcagacttaatttgagcgacgttagggcatggctaatgatggataggtg

SEQ ID NO: 231200 - DNA, 55 bp, Artificial
  Synthetic oligonucleotide
cgtcgcgggtacgatcaagcccgctcgaatccatatgcgtgatcagaagagctac

SEQ ID NO: 231201 - DNA, 55 bp, Artificial
  Synthetic oligonucleotide
cccgaagctccaaccgtaatgtgtcggtcaggccttctatggcatatttggtggc

SEQ ID NO: 231202 - DNA, 51 bp, Artificial
  Synthetic oligonucleotide
cgtccggtgagggacgaccccgttaggattgtgggttggcgttttagttca

SEQ ID NO: 231203 - DNA, 55 bp, Artificial
  Synthetic oligonucleotide
cgtcatgatgaagacttcggctatgtgattgaggacaaagagttccgcggtatcg

SEQ ID NO: 231204 - DNA, 55 bp, Artificial
  Synthetic oligonucleotide
cccgaccatttctgcgggtggtttcaggagcgcgggtgaaagtcatatcctcccc

SEQ ID NO: 231205 - DNA, 55 bp, Artificial
  Synthetic oligonucleotide
cccgagcggatcgcacggatcgacaggaatgcgatctatggcgtgcatgtctgcg

SEQ ID NO: 231206 - DNA, 60 bp, Artificial
  Synthetic oligonucleotide
tccggcagtggcttcgtcatgaaggaagagggaacctggcgcctcgactactgcgaggtg

SEQ ID NO: 231207 - DNA, 55 bp, Artificial
  Synthetic oligonucleotide
cgtcatgaacgctcatggcttgaggtaaacgaaccagccgccaacctgccttgcc

SEQ ID NO: 231208 - DNA, 55 bp, Artificial
  Synthetic oligonucleotide
cccgccacttgtgtcttgcggctgcctccctcttgaaagcagctctcattatgcg

SEQ ID NO: 231209 - DNA, 55 bp, Artificial
  Synthetic oligonucleotide
cccgcgcgcaggaagggcgtcggattgtcgagcttgcggtgggcgttcatcagat

SEQ ID NO: 231210 - DNA, 55 bp, Artificial
  Synthetic oligonucleotide
cgtcaggatttcgcgcctctgggccgcttcatcgcacataattcaggcaacctgc

SEQ ID NO: 231211 - DNA, 55 bp, Artificial
  Synthetic oligonucleotide
cgtcagaatcggtcatggacaaatgggtggcattggatcgtttctcgcgccggaa

SEQ ID NO: 231212 - DNA, 55 bp, Artificial
  Synthetic oligonucleotide
cgtcactgctcgcatcgtttggcaattgactgacggctatcagaccgcgttggtt

SEQ ID NO: 231213 - DNA, 55 bp, Artificial
  Synthetic oligonucleotide
cgtagcggtcgattctcaggcgacatttgacgcatagttccaggcctcgagtgct

SEQ ID NO: 231214 - DNA, 55 bp, Artificial
  Synthetic oligonucleotide
cgtactgacgacagttgtgctgttctggcccggacgccacttttacgccaagggc

SEQ ID NO: 231215 - DNA, 55 bp, Artificial
  Synthetic oligonucleotide
cgtaatcctcaattcaccaatccgggtaggaaaccctgatcgtcatgaaagcgtc

SEQ ID NO: 231216 - DNA, 55 bp, Artificial
  Synthetic oligonucleotide
cccgcttgcaccgaccgcaatatcttggctacgcttgtctcaggactgcgataac

SEQ ID NO: 231217 - DNA, 56 bp, Artificial
  Synthetic oligonucleotide
cggtagacattacgggcagtgtttatactccaacggcggtcccgcagaggatcgac

SEQ ID NO: 231218 - DNA, 54 bp, Artificial
  Synthetic oligonucleotide
cgtaagcagctcgggtaaccgaaacttaagcccttccgcctagcagcgtaaggc

SEQ ID NO: 231219 - DNA, 55 bp, Artificial
  Synthetic oligonucleotide
cccggaaacaccgctgtgggctcgggcggcattatacgtggccaggaaacagatc

SEQ ID NO: 231220 - DNA, 55 bp, Artificial
  Synthetic oligonucleotide
cgtaagagaatgacccgagcgcctgaatcttctcaagtttggcgtagtgtgtgac

SEQ ID NO: 231221 - DNA, 55 bp, Artificial
  Synthetic oligonucleotide
cggtttgttcacagggcggctccgcttttgacgcctgaaggcgggatcatgcggt

SEQ ID NO: 231222 - DNA, 53 bp, Artificial
  Synthetic oligonucleotide
cggtttgaaacgcgatgtgaaacagtaccaacccggttttggtattatagagc

SEQ ID NO: 231223 - DNA, 55 bp, Artificial
  Synthetic oligonucleotide
cggttccggcttagggcgcggcttcctgtcggactgttgctctcgctcccaaatt

SEQ ID NO: 231224 - DNA, 55 bp, Artificial
  Synthetic oligonucleotide
cccggaggcacttcgtcggtaagtcccggcacgggagatggactgccaaatctca

SEQ ID NO: 231225 - DNA, 55 bp, Artificial
  Synthetic oligonucleotide
cccggcacctgcgttagtctcgatgcgagtttatcacaggaggcaccctcgatgt

SEQ ID NO: 231226 - DNA, 55 bp, Artificial
  Synthetic oligonucleotide
cccgggaccaaggtgggactattgttcccatcagagagctttcattgctttgacg

SEQ ID NO: 231227 - DNA, 55 bp, Artificial
  Synthetic oligonucleotide
cggtggacgggttggcgaccgtccatgacagggatattttaatctactgcatcag

SEQ ID NO: 231228 - DNA, 60 bp, Artificial
  Synthetic oligonucleotide
ccctatttgcgcgtctctaaccagtcgatcagagcctctgtcaggtcctttgtcagagcc

SEQ ID NO: 231229 - DNA, 53 bp, Artificial
  Synthetic oligonucleotide
cgcttgcgtcgggtcgtggttcccagacgtcaagggtttcttaaccgatggcg

SEQ ID NO: 231230 - DNA, 55 bp, Artificial
  Synthetic oligonucleotide
cgcttcatggtccgattcttgtgctctgggcttcgttctgctgccgttatctgcg

SEQ ID NO: 231231 - DNA, 55 bp, Artificial
  Synthetic oligonucleotide
cgcttcagaggatatcccggcggcggttggcttccaactcacaatcccttcaggc

SEQ ID NO: 231232 - DNA, 55 bp, Artificial
  Synthetic oligonucleotide
ccgcaggtttgcgttgcggcttccgaagtccggggtctctgtcacattgcgacga

SEQ ID NO: 231233 - DNA, 55 bp, Artificial
  Synthetic oligonucleotide
ccgcattgggcacagggcgcatcgaagtcgtaactttcgtaatcgctttgctggc

SEQ ID NO: 231234 - DNA, 55 bp, Artificial
  Synthetic oligonucleotide
cgctgggcacttgcgctagaaagcgtgcgacccagtctgccttgagttggctgtg

SEQ ID NO: 231235 - DNA, 55 bp, Artificial
  Synthetic oligonucleotide
cgctgcgtctgggcgatactgatgcgctgtctcgacttcatgatccggcgaggct

SEQ ID NO: 231236 - DNA, 55 bp, Artificial
  Synthetic oligonucleotide
cgctcgggcacagatgaaaatggctgcaagcgggagattggtccgccatgcatcc

SEQ ID NO: 231237 - DNA, 55 bp, Artificial
  Synthetic oligonucleotide
cgctcagagactaaagcagcccaaacccggtcacaatcttgcttgttactctctg

SEQ ID NO: 231238 - DNA, 55 bp, Artificial
  Synthetic oligonucleotide
cgcgtgaactctgtaactgtcatgtgacttagggttaactaactcagcacaacgc

SEQ ID NO: 231239 - DNA, 60 bp, Artificial
  Synthetic oligonucleotide
atttactgactgtgcaaacagccgccatgattagaattcaggcagggacggttggcaagc

SEQ ID NO: 231240 - DNA, 60 bp, Artificial
  Synthetic oligonucleotide
tccgttgcgatcagcgcgccccatagacgaactccggaagtgcgaagacgatctgcggga

SEQ ID NO: 231241 - DNA, 55 bp, Artificial
  Synthetic oligonucleotide
ccgcccctgacaggcgttcgatccaacacgatgcaatttcgactaaaattctttc

SEQ ID NO: 231242 - DNA, 55 bp, Artificial
  Synthetic oligonucleotide
cgcgggcaatcaccgttgtgcgcctgatatatgcgccgggctacagcatccacag

SEQ ID NO: 231243 - DNA, 55 bp, Artificial
  Synthetic oligonucleotide
cgcggcttccttatggagcgcggtgtcgcgttgcccttaaatcggctctgcctca

SEQ ID NO: 231244 - DNA, 55 bp, Artificial
  Synthetic oligonucleotide
cgcggagcagaagcgtacacgttcaatcttacttcaatcggccggtgcaactcta

SEQ ID NO: 231245 - DNA, 55 bp, Artificial
  Synthetic oligonucleotide
ccgcctattcctgcgatgcgctacgaaatgcgtaggaagaattcgggcataactc

SEQ ID NO: 231246 - DNA, 55 bp, Artificial
  Synthetic oligonucleotide
cgcgcgtgggtccggcgatacaggaatggctcgcaaaggtttaagccggtaacac

SEQ ID NO: 231247 - DNA, 55 bp, Artificial
  Synthetic oligonucleotide
cgcgcccgcctccatgcaacataactatccttatccgttctgtcggtgtaagcgc

SEQ ID NO: 231248 - DNA, 55 bp, Artificial
  Synthetic oligonucleotide
ccgcctccatgagaatggcagtcacgggagctcgggcgatggaatgggacaggtt

SEQ ID NO: 231249 - DNA, 55 bp, Artificial
  Synthetic oligonucleotide
cgcgccaatccttcgctgcgcacgacttagccggcctttatgagccaatagaggc

SEQ ID NO: 231250 - DNA, 55 bp, Artificial
  Synthetic oligonucleotide
cgcgatttcgctatgcctaactatcccgcagttagcactcgactgaggtgagtgc

SEQ ID NO: 231251 - DNA, 60 bp, Artificial
  Synthetic oligonucleotide
tcctacgtcggctgcaatagcgccccacatcgatgccactccgaacgcagtagcgacgac

SEQ ID NO: 231252 - DNA, 55 bp, Artificial
  Synthetic oligonucleotide
cgcgagttttatccggaggaaaggcggcaaacgaccatgcgtgtaggtcggagcg

SEQ ID NO: 231253 - DNA, 55 bp, Artificial
  Synthetic oligonucleotide
cgcgacgatcgaaggtgaccctcggttcctatacgcatattcagacgtcgctgta

SEQ ID NO: 231254 - DNA, 55 bp, Artificial
  Synthetic oligonucleotide
cgcgaccaaagatcgtgtctgagccggccatcgcaataacttgggcaaagcgcgg

SEQ ID NO: 231255 - DNA, 55 bp, Artificial
  Synthetic oligonucleotide
cgcgaacgaagctgctaccccttccgcggaattcggaggctgacgtgttgccgaa

SEQ ID NO: 231256 - DNA, 55 bp, Artificial
  Synthetic oligonucleotide
ccgcctgtaatcaggatggatttattgtcgaacatgttggtcgtcctgtcaaaac

SEQ ID NO: 231257 - DNA, 55 bp, Artificial
  Synthetic oligonucleotide
cgccttatggagagcctgatttcgctgatgctgcgggagttgttcgaattcgggc

SEQ ID NO: 231258 - DNA, 54 bp, Artificial
  Synthetic oligonucleotide
ccgcgattgacgtaacctttcgttcacacctcgcctctaggacggtctccggac

SEQ ID NO: 231259 - DNA, 55 bp, Artificial
  Synthetic oligonucleotide
ccgcgcagtccaccgttgggatgcgtattctcacaaagatgcaatgaagccaaac

SEQ ID NO: 231260 - DNA, 54 bp, Artificial
  Synthetic oligonucleotide
ccgcgacgccacagggtcaaggaacccgagtttcaaaggaagcccatgcccgaa

SEQ ID NO: 231261 - DNA, 55 bp, Artificial
  Synthetic oligonucleotide
cgggagcttgcgctcagtaccgaggtcttcacgatagcttcgcggctgaactacc

SEQ ID NO: 231262 - DNA, 60 bp, Artificial
  Synthetic oligonucleotide
cccgtgcccaaagaatcggcgtgacaggacgcgacacagcggctatggatggcgcatgtc

SEQ ID NO: 231263 - DNA, 55 bp, Artificial
  Synthetic oligonucleotide
ccgaggtgagagccaaaatcttgcgcggatcataagctaattgagggcacgcagg

SEQ ID NO: 231264 - DNA, 55 bp, Artificial
  Synthetic oligonucleotide
cgggacttgcgtcgtatgtctgcctggggccatcagctacgcccaacgtatcggt

SEQ ID NO: 231265 - DNA, 55 bp, Artificial
  Synthetic oligonucleotide
ccgatctgtgccgaaaggaatgacgagtcggaatggacaaggccttcatcaaggg

SEQ ID NO: 231266 - DNA, 55 bp, Artificial
  Synthetic oligonucleotide
cggctctggttgccgcagctcttactatcggaaataatgagacgatgtgggacca

SEQ ID NO: 231267 - DNA, 55 bp, Artificial
  Synthetic oligonucleotide
ccgatcttgacggaacatggttaacaattgcaggatgtgcgacattacgtagcgg

SEQ ID NO: 231268 - DNA, 55 bp, Artificial
  Synthetic oligonucleotide
cggcccgacacttgacgtatcctataggggtttcagtcgataccggataggccga

SEQ ID NO: 231269 - DNA, 55 bp, Artificial
  Synthetic oligonucleotide
cggcccctatgcggttggaaatacgcggattggctccccgatctgcgaggatggt

SEQ ID NO: 231270 - DNA, 55 bp, Artificial
  Synthetic oligonucleotide
cggccaacaatcaccgatctgtgaaactcgggtgaagcttgtgatgcgcaccgca

SEQ ID NO: 231271 - DNA, 55 bp, Artificial
  Synthetic oligonucleotide
ccgcaattgcccacgatcgagaaggttcagcgtggtctcaacagcattacgaacg

SEQ ID NO: 231272 - DNA, 55 bp, Artificial
  Synthetic oligonucleotide
cggcagcggatctgttgtcatgagcgaggttgttctgaactgtggctatgtcccg

SEQ ID NO: 231273 - DNA, 58 bp, Artificial
  Synthetic oligonucleotide
cggtagtatatagcgtgggacacagcctcgtacctgcgaacacccttgataacgaagc

SEQ ID NO: 231274 - DNA, 55 bp, Artificial
  Synthetic oligonucleotide
ccgcacacgcctgcgcattggattcatcctgacgcggcaatttacgatctgcgct

SEQ ID NO: 231275 - DNA, 55 bp, Artificial
  Synthetic oligonucleotide
cggcagatgcgattacagacctcaaggttctgattaccgcagaagaggcgtatcc

SEQ ID NO: 231276 - DNA, 55 bp, Artificial
  Synthetic oligonucleotide
cggcacggacctccggtcagggctagggcagcggcaagcagtttaccatgtcccc

SEQ ID NO: 231277 - DNA, 55 bp, Artificial
  Synthetic oligonucleotide
ccgcacatggacctatgtcgcccagaggaatggctgggtgacggacgaaagccgt

SEQ ID NO: 231278 - DNA, 55 bp, Artificial
  Synthetic oligonucleotide
cggcacacctatctgggttaaaaccccacattcaacggtcgaggccaatcacgcg

SEQ ID NO: 231279 - DNA, 55 bp, Artificial
  Synthetic oligonucleotide
cggcaaatggagacccgcgaataaccattcgagcagagggcctaggctttgccta

SEQ ID NO: 231280 - DNA, 55 bp, Artificial
  Synthetic oligonucleotide
cggatggggatattgatgcgctgtccaaaaggttggcatatattcgcacttggac

SEQ ID NO: 231281 - DNA, 55 bp, Artificial
  Synthetic oligonucleotide
ccgcagagaattttggcccttcccattcgccgcttggcctgtataacacgggcca

SEQ ID NO: 231282 - DNA, 55 bp, Artificial
  Synthetic oligonucleotide
cggatatggttgttcacgattggagcgtgatcaatccgcagcgtgcggggtggat

SEQ ID NO: 231283 - DNA, 54 bp, Artificial
  Synthetic oligonucleotide
cggagaaccacttatgggtacaagcgttttcgattccgtccttctcaagaattc

SEQ ID NO: 231284 - DNA, 56 bp, Artificial
  Synthetic oligonucleotide
gctgtagacaaacacccattcaccgacgacgaatgggttgcgggctgggacaaaaa

SEQ ID NO: 231285 - DNA, 55 bp, Artificial
  Synthetic oligonucleotide
cggacgttatccgatggcgcagatcggagaaggcaaagtccgaccgcgccaggca

SEQ ID NO: 231286 - DNA, 55 bp, Artificial
  Synthetic oligonucleotide
cggaccccttataagaccccacaggcgcaccgtctgcaaacacgacggatgaccc

SEQ ID NO: 231287 - DNA, 55 bp, Artificial
  Synthetic oligonucleotide
ccgcagagagcctcagagaggccctacaggccgttgacctgtcttgggacgatac

SEQ ID NO: 231288 - DNA, 55 bp, Artificial
  Synthetic oligonucleotide
cggacatatgagggctccttcggcgtgtgtcgcggtgtcgccctacatttgtggg

SEQ ID NO: 231289 - DNA, 55 bp, Artificial
  Synthetic oligonucleotide
cggacacctctttagtgtcgaggtcaacccgttgataaggcgcgacttattccaa

SEQ ID NO: 231290 - DNA, 55 bp, Artificial
  Synthetic oligonucleotide
cgctttgacgactgacgcgtgctgagcggtatgatctttattcagcgcaacgggt

SEQ ID NO: 231291 - DNA, 55 bp, Artificial
  Synthetic oligonucleotide
cgctttcgctatgtaatccggggtcatgacatcgacgcagaaacatagtcccgtg

SEQ ID NO: 231292 - DNA, 55 bp, Artificial
  Synthetic oligonucleotide
gtgcgactcttgttagaaaacagtagtttatgctcacaccggggttggcccatcg

SEQ ID NO: 231293 - DNA, 55 bp, Artificial
  Synthetic oligonucleotide
gtgcgggcgcaacactttatagtccatggaaggtcactccaatttcgagagaggg

SEQ ID NO: 231294 - DNA, 55 bp, Artificial
  Synthetic oligonucleotide
gtgcgtcggatcttttgcgcacaatatgtaggcccgttttcgaccggatggaaaa

SEQ ID NO: 231295 - DNA, 59 bp, Artificial
  Synthetic oligonucleotide
acaggccgttgacctgtcttgggacgatacagaccttctacgggactacttgctgctca

SEQ ID NO: 231296 - DNA, 55 bp, Artificial
  Synthetic oligonucleotide
gtgcgtttcagctcaagatgtgtgccgagttcttgcagggcctctgtcatcgtac

SEQ ID NO: 231297 - DNA, 55 bp, Artificial
  Synthetic oligonucleotide
gtgctgcattgaggcctccgtttgcagtgaggtatgcacccgatccgcgcaacct

SEQ ID NO: 231298 - DNA, 55 bp, Artificial
  Synthetic oligonucleotide
gtgctgcggtcgagggtattctaggtatccgacgtcagggcaatcacgtgcggat

SEQ ID NO: 231299 - DNA, 55 bp, Artificial
  Synthetic oligonucleotide
gtgctggggatcacaacggtgatctattcggcgcccgtgcatctggcgatatcgc

SEQ ID NO: 231300 - DNA, 55 bp, Artificial
  Synthetic oligonucleotide
gtggattgacggaggtagccacaaacgtccggacatcattctcggacactgtcgt

SEQ ID NO: 231301 - DNA, 55 bp, Artificial
  Synthetic oligonucleotide
gtggcctcagcatgagctatgccggctcattaacgcacttgtcacgaaggaatcc

SEQ ID NO: 231302 - DNA, 55 bp, Artificial
  Synthetic oligonucleotide
gtggcttgcagtctttagtcagcacattcaactttgacttcgcattgcccggccg

SEQ ID NO: 231303 - DNA, 55 bp, Artificial
  Synthetic oligonucleotide
gtgggcaacctattacacgacggcgcaatccggggctgagagtttcagggtgacg

SEQ ID NO: 231304 - DNA, 55 bp, Artificial
  Synthetic oligonucleotide
gtgtagctttatgcagtgcgcatcacaagcttcacctgagtttcacagatcggtg

SEQ ID NO: 231305 - DNA, 55 bp, Artificial
  Synthetic oligonucleotide
gtgttcgggcgcagaaccggggcgtcaactaaaccaaaggtactctcatgacacg

SEQ ID NO: 231306 - DNA, 60 bp, Artificial
  Synthetic oligonucleotide
tcctgcagtgtccgggggaggcgcttgcatggtggacctttgcgacaggtgtggtgatcg

SEQ ID NO: 231307 - DNA, 55 bp, Artificial
  Synthetic oligonucleotide
gttagacttcgggtaacaggtgacggacaatgaacaggaatacactgatgaacgg

SEQ ID NO: 231308 - DNA, 55 bp, Artificial
  Synthetic oligonucleotide
gttatcatttacgggaatagcgggactactgatctgcgactcaggttcaagtcga

SEQ ID NO: 231309 - DNA, 55 bp, Artificial
  Synthetic oligonucleotide
gttatgcacgtcttccgcagttgtccggccgagaacacgcatgcccagagaggca

SEQ ID NO: 231310 - DNA, 55 bp, Artificial
  Synthetic oligonucleotide
gttatgcgaaacgcctcaaaaggtgccatatgcgcgctatcgcaagaacggtctc

SEQ ID NO: 231311 - DNA, 55 bp, Artificial
  Synthetic oligonucleotide
gttattgaggcaggtttcatacaggcaagaaacctatcgagcagtgatcccttta

SEQ ID NO: 231312 - DNA, 55 bp, Artificial
  Synthetic oligonucleotide
gtcgtcagcaggcgaaattcggttgggccgagtttaagctcgttttcaccgcgaa

SEQ ID NO: 231313 - DNA, 55 bp, Artificial
  Synthetic oligonucleotide
gtcgtcgaaagatcatttgcggtttctggcctcagcgttccttgataggcgtgag

SEQ ID NO: 231314 - DNA, 55 bp, Artificial
  Synthetic oligonucleotide
gtctacgtaacctgacaagcgagaaacaggtccatcgactgccaatgggagcgtt

SEQ ID NO: 231315 - DNA, 55 bp, Artificial
  Synthetic oligonucleotide
gtctccgttcgaggcttgttcaagaaaggagatgcggatccaaaggtcgtggttg

SEQ ID NO: 231316 - DNA, 55 bp, Artificial
  Synthetic oligonucleotide
gtctcttgcggggtggatcgattaaaatatgcgtcgggagagttcaggccggagc

SEQ ID NO: 231317 - DNA, 59 bp, Artificial
  Synthetic oligonucleotide
gctggaggctactgatccccgaattatcgtccaactcgcagtttatggtgtcgacgtat

SEQ ID NO: 231318 - DNA, 54 bp, Artificial
  Synthetic oligonucleotide
gtctgaaaaggaccgtactcggtgcgaaacctataacttctcgaacccattcta

SEQ ID NO: 231319 - DNA, 55 bp, Artificial
  Synthetic oligonucleotide
gtcttgtggcctttgggcatgacttgccggacgagatgcgctcggatcgggtaat

SEQ ID NO: 231320 - DNA, 55 bp, Artificial
  Synthetic oligonucleotide
gtgaacaggagaacgcctagtccgaatgtagtcacgtctgcgctcctatcagagt

SEQ ID NO: 231321 - DNA, 55 bp, Artificial
  Synthetic oligonucleotide
gtgaacatgcgtttgctccatatcatataggctaaaagggcaaggccgattggcc

SEQ ID NO: 231322 - DNA, 55 bp, Artificial
  Synthetic oligonucleotide
gtgacggggatgtgaaggcacgacctgaggccaacgcccagtccacaaagggagt

SEQ ID NO: 231323 - DNA, 55 bp, Artificial
  Synthetic oligonucleotide
gtgacgtatatgttttcagcttcggtcaccttgatcgctgaaagcagtccatccc

SEQ ID NO: 231324 - DNA, 55 bp, Artificial
  Synthetic oligonucleotide
gtgaggaacccgatcaagtggatcttggaacatccagacagcaccaaggtctccg

SEQ ID NO: 231325 - DNA, 55 bp, Artificial
  Synthetic oligonucleotide
gtgaggttccaattctctgcggcaggggtgggaccggcgcttacgccgatcgaac

SEQ ID NO: 231326 - DNA, 55 bp, Artificial
  Synthetic oligonucleotide
gtgcagctggggcaaagcccttcggcttctacaaccgttcgctctatttcaaaac

SEQ ID NO: 231327 - DNA, 55 bp, Artificial
  Synthetic oligonucleotide
gtgcagtcagatcaccgaagttaattcggatgtcacattgcgccgcgactgaggg

SEQ ID NO: 231328 - DNA, 60 bp, Artificial
  Synthetic oligonucleotide
agcttcagacctcaacgcgcagggggtcagaacagcccgaggtggggcatggcatgccgg

SEQ ID NO: 231329 - DNA, 55 bp, Artificial
  Synthetic oligonucleotide
gtgccacatgtcgccccaatggacctgtcgtaatccgtcctccgcaggatcggtc

SEQ ID NO: 231330 - DNA, 55 bp, Artificial
  Synthetic oligonucleotide
gtgcccgagcgaagtcgtcaagattatcgcactcacccatgaagaggacacaggg

SEQ ID NO: 231331 - DNA, 55 bp, Artificial
  Synthetic oligonucleotide
gtgccgaccgaaccgatcaacaaccttcgtctcaggatagccgtcatgctccgtc

SEQ ID NO: 231332 - DNA, 55 bp, Artificial
  Synthetic oligonucleotide
tacacttcaatcataactgtccacggaagggaacctcatgtccgaacctgccgac

SEQ ID NO: 231333 - DNA, 55 bp, Artificial
  Synthetic oligonucleotide
taccaatgcgctgaaccttgcggtccataatattgcggttgtgacccgcgctatt

SEQ ID NO: 231334 - DNA, 52 bp, Artificial
  Synthetic oligonucleotide
tacccgcgtgcgccttatccgggtcccgtaagtggaccggtcggatttcaac

SEQ ID NO: 231335 - DNA, 55 bp, Artificial
  Synthetic oligonucleotide
taccgctggatgaggatgcgactgcccctggacgtccggggagacagacaagtac

SEQ ID NO: 231336 - DNA, 55 bp, Artificial
  Synthetic oligonucleotide
tacggaacagttgcaaaatcaggcgtagatgaatcgcgtccttgtcttttaagcg

SEQ ID NO: 231337 - DNA, 55 bp, Artificial
  Synthetic oligonucleotide
tacggagaggcatttgcccggacctggttccagccgatttccgtcacgcgcaaat

SEQ ID NO: 231338 - DNA, 55 bp, Artificial
  Synthetic oligonucleotide
tacttaacctatgcgtaggagtcatagattaacgaatcatcggcgttgacttgca

SEQ ID NO: 231339 - DNA, 59 bp, Artificial
  Synthetic oligonucleotide
tcctttgctgtgcggccgaacctgtgggcacggacaagtccttcgtaatccagctcgcg

SEQ ID NO: 231340 - DNA, 55 bp, Artificial
  Synthetic oligonucleotide
tagatttgaaccgttcaatcagacatttaacgccgtccattttcattcttcggga

SEQ ID NO: 231341 - DNA, 55 bp, Artificial
  Synthetic oligonucleotide
tagcagaaagggtggtgccgacgcgccctgactggggaaagctggccccgtgttt

SEQ ID NO: 231342 - DNA, 55 bp, Artificial
  Synthetic oligonucleotide
tagcctgcgctaagtgtcgcaaaagttggtcgcataagttaggctttcgcgcacg

SEQ ID NO: 231343 - DNA, 55 bp, Artificial
  Synthetic oligonucleotide
tagctgtcgaccccgtcgatctcattctctggcgaccaaagcttgcgcccgatct

SEQ ID NO: 231344 - DNA, 55 bp, Artificial
  Synthetic oligonucleotide
taggcggacatgaccgatcaggacccaaaactgactcatctggatgcggcagggt

SEQ ID NO: 231345 - DNA, 55 bp, Artificial
  Synthetic oligonucleotide
tagggaagatcataatgcatcgggcgttccttggctgtctggcccgacagtggca

SEQ ID NO: 231346 - DNA, 55 bp, Artificial
  Synthetic oligonucleotide
taggtttcttgcctgtatgaaacctgcctcaataacttaacgtccgcttcgtgcg

SEQ ID NO: 231347 - DNA, 53 bp, Artificial
  Synthetic oligonucleotide
tagtaactgaacggttactatttgacgcaggaaaggggccctaatgttttcga

SEQ ID NO: 231348 - DNA, 55 bp, Artificial
  Synthetic oligonucleotide
tagtcccacttcgtcgggttcaacgggcgcacggaggagccgcggacctctggaa

SEQ ID NO: 231349 - DNA, 55 bp, Artificial
  Synthetic oligonucleotide
tagtgtggagacaggcaagcacacgatacggggaacgggccaaacatgcgaagcg

SEQ ID NO: 231350 - DNA, 56 bp, Artificial
  Synthetic oligonucleotide
tcaagttgttaggcttgtttgggtccccggatacaggtcggagggtgcctgtctgc

SEQ ID NO: 231351 - DNA, 60 bp, Artificial
  Synthetic oligonucleotide
atcactgcatcatccagatttgcgatacccagcgcggacacatcgattttgtcggtacca

SEQ ID NO: 231352 - DNA, 55 bp, Artificial
  Synthetic oligonucleotide
gttccctttcaatccagacgcacaatcgcttcagacgcggccactaccctcggcc

SEQ ID NO: 231353 - DNA, 55 bp, Artificial
  Synthetic oligonucleotide
gttccgcacgttgggcgatctgtcggaattacccgccctggttgcagcgttgcag

SEQ ID NO: 231354 - DNA, 55 bp, Artificial
  Synthetic oligonucleotide
gttcgatctgggtacaggttggcacggtcgaggatgggttgcaggccgtagacta

SEQ ID NO: 231355 - DNA, 55 bp, Artificial
  Synthetic oligonucleotide
gttcgcatcaatcatggaacacttagcaagatcggcatacaaagccggtcaaaac

SEQ ID NO: 231356 - DNA, 55 bp, Artificial
  Synthetic oligonucleotide
gttcgccgaggttaccgatactgcgaacacgcttggcacctgtcacccggtgacg

SEQ ID NO: 231357 - DNA, 55 bp, Artificial
  Synthetic oligonucleotide
gttctgagccgctcagtcgcgtttggttcagtcgcgtttggttcagtctcgctcg

SEQ ID NO: 231358 - DNA, 55 bp, Artificial
  Synthetic oligonucleotide
gttgcacatccgtacggtcgccgaagttgctccgcacatcccgacagatagcggc

SEQ ID NO: 231359 - DNA, 55 bp, Artificial
  Synthetic oligonucleotide
gttgctggcctaggtgcgcgccttttggcaggcagctactatgggcagacggtgc

SEQ ID NO: 231360 - DNA, 55 bp, Artificial
  Synthetic oligonucleotide
gttggttccttccgtagcttgatatcatatgagagtattcgttttgcgagcttgg

SEQ ID NO: 231361 - DNA, 55 bp, Artificial
  Synthetic oligonucleotide
gtttcctgtctgaggacccgaatgggtggaacttcgcgatggatatcaacgctac

SEQ ID NO: 231362 - DNA, 60 bp, Artificial
  Synthetic oligonucleotide
gtgccatcacgtgtctgggtcgacatgtcgcaagcctcattcctgtggatgaacacgaat

SEQ ID NO: 231363 - DNA, 55 bp, Artificial
  Synthetic oligonucleotide
gtttcgaatcgcggctcacgcccgtggtcgcacggcggagcaaggttgttttcgt

SEQ ID NO: 231364 - DNA, 54 bp, Artificial
  Synthetic oligonucleotide
gtttcggacctcaactttgaacttatggaggcgcggactgactttcttagggac

SEQ ID NO: 231365 - DNA, 53 bp, Artificial
  Synthetic oligonucleotide
taaacgatgtgcgttccggtaccgacaaagggacggcaaccccaacaatcgcc

SEQ ID NO: 231366 - DNA, 55 bp, Artificial
  Synthetic oligonucleotide
taacaccagccgaccccattccgcgcttgatcggcagacgccggacgacgcatat

SEQ ID NO: 231367 - DNA, 55 bp, Artificial
  Synthetic oligonucleotide
taacggttgacctgcgtcccgactccccaacccgcggagaggtcatacacagcct

SEQ ID NO: 231368 - DNA, 55 bp, Artificial
  Synthetic oligonucleotide
taagccaactcaagcgtgttgcgccggcctcttgcggcccaaactggaccttcgc

SEQ ID NO: 231369 - DNA, 55 bp, Artificial
  Synthetic oligonucleotide
taaggacggattaagccgaacccgatttatccaggtgcgctacggctgtcctcga

SEQ ID NO: 231370 - DNA, 55 bp, Artificial
  Synthetic oligonucleotide
ggtccgacgtccctctcgactgaggaaatcatcgcggcaatgtcctgttccttgc

SEQ ID NO: 231371 - DNA, 55 bp, Artificial
  Synthetic oligonucleotide
ggtccgcataccatcctaagttggttactacggaggcagcacaagcgttccaaat

SEQ ID NO: 231372 - DNA, 54 bp, Artificial
  Synthetic oligonucleotide
ggtccggaaactgtaccagtctatgggctaccgaaactggggaggatcggtgtg

SEQ ID NO: 231373 - DNA, 60 bp, Artificial
  Synthetic oligonucleotide
ggtcgcggaaatagatcacatgcgagccggtggggcatttgcgatagccaaggcgaacat

SEQ ID NO: 231374 - DNA, 55 bp, Artificial
  Synthetic oligonucleotide
ggtcctgtagcggcctcaatccagtgccggatatgggctgacacaccgggaatgg

SEQ ID NO: 231375 - DNA, 55 bp, Artificial
  Synthetic oligonucleotide
ggtcgaggaagatggggtatcatcacgctacggttcgcgcggtgctctccggtcg

SEQ ID NO: 231376 - DNA, 55 bp, Artificial
  Synthetic oligonucleotide
ggtcgatgatggactgcaaggcagattactcggactacctgagcggcgtttcaca

SEQ ID NO: 231377 - DNA, 55 bp, Artificial
  Synthetic oligonucleotide
ggtcgcgatgcgactaggctgatcgtgggcaggggttatatgtttcgtgatgcag

SEQ ID NO: 231378 - DNA, 55 bp, Artificial
  Synthetic oligonucleotide
ggtcgcggctattgagattgatccttttaccggcgactgtttgtgagccatacgc

SEQ ID NO: 231379 - DNA, 55 bp, Artificial
  Synthetic oligonucleotide
ggtcgtcagggccaaaggctacggcgcaaatgccagatgcagtcgcgtgcaatgg

SEQ ID NO: 231380 - DNA, 55 bp, Artificial
  Synthetic oligonucleotide
ggtctcgggccagaaactttgtaacctgggcttaggatcactatgtaggcaacgg

SEQ ID NO: 231381 - DNA, 55 bp, Artificial
  Synthetic oligonucleotide
ggtgcagtgttggtgacacttggtcctatgggaggataccaccgcgcagcgctat

SEQ ID NO: 231382 - DNA, 55 bp, Artificial
  Synthetic oligonucleotide
ggtggcgcgtcagcataccatcaatgcggtggggccgatgcttttggatcggttg

SEQ ID NO: 231383 - DNA, 55 bp, Artificial
  Synthetic oligonucleotide
ggtgtcagcaccgataccttacgcctctatgagcgtcgcggattgatccggtcgg

SEQ ID NO: 231384 - DNA, 60 bp, Artificial
  Synthetic oligonucleotide
ggtccggtagagaatcctgccgtggtcagaccggagatcaggttcagagcgctactgtag

SEQ ID NO: 231385 - DNA, 55 bp, Artificial
  Synthetic oligonucleotide
ggtgtcctgaaagtgtcttccgaaggatatacgaccgaagggtctgagcagtcgg

SEQ ID NO: 231386 - DNA, 55 bp, Artificial
  Synthetic oligonucleotide
ggtgtctggcgttctggcacatctgcgtcgccgcaccgtagacctcaagatggga

SEQ ID NO: 231387 - DNA, 55 bp, Artificial
  Synthetic oligonucleotide
ggttacacatcgattgaattcactacgtatgacacagattgggattcagaggcct

SEQ ID NO: 231388 - DNA, 55 bp, Artificial
  Synthetic oligonucleotide
ggttcacgctgaactggcgcaatgaaccctggcgcattgcctcgcatgtattcgt

SEQ ID NO: 231389 - DNA, 55 bp, Artificial
  Synthetic oligonucleotide
ggttccacacctatcgccggggtgacaaggaaatctcgcttggggtgcatggcct

SEQ ID NO: 231390 - DNA, 55 bp, Artificial
  Synthetic oligonucleotide
gggtatgaaacccatagatggaaaacgttgcaccgaaggcagtcacgataaagag

SEQ ID NO: 231391 - DNA, 50 bp, Artificial
  Synthetic oligonucleotide
gggtccaaacggttccgaaacaagcacaggttttccccgttgaccagagt

SEQ ID NO: 231392 - DNA, 55 bp, Artificial
  Synthetic oligonucleotide
gggtcgatgctacatcacccacagtggtgccgtaaacggcaaggccgtaaggttc

SEQ ID NO: 231393 - DNA, 54 bp, Artificial
  Synthetic oligonucleotide
gggtctaacgctttcgtcaaaggcctgtaccccagtccgaacctatgtcacgag

SEQ ID NO: 231394 - DNA, 54 bp, Artificial
  Synthetic oligonucleotide
gggtgaccctagcaagtaaagacactacggggccgatattagttccgagccgcc

SEQ ID NO: 231395 - DNA, 57 bp, Artificial
  Synthetic oligonucleotide
ggtcacagggggcgctgcttttacggtagatgaccgtttgtttgttgggatcgcaca

SEQ ID NO: 231396 - DNA, 55 bp, Artificial
  Synthetic oligonucleotide
gggtgccacggtttccccttatgcttggggacgttacgcgagagttgcatggccg

SEQ ID NO: 231397 - DNA, 54 bp, Artificial
  Synthetic oligonucleotide
gggttactctatcgtggtttatcacggtaaggacggctccggcgattactatcg

SEQ ID NO: 231398 - DNA, 55 bp, Artificial
  Synthetic oligonucleotide
gggttgccgcggccgctccagaacagcctgttcatctttcacaagaatgtgggcg

SEQ ID NO: 231399 - DNA, 51 bp, Artificial
  Synthetic oligonucleotide
gggtttattcctttccttcgaaaggtttgcttgcacccgttgcctttgcgg

SEQ ID NO: 231400 - DNA, 54 bp, Artificial
  Synthetic oligonucleotide
ggtaagaattgccgtctaccctcgtgcggcgaaaagtagccacccgaggagtgg

SEQ ID NO: 231401 - DNA, 55 bp, Artificial
  Synthetic oligonucleotide
ggtaccccaaaccgatgctgtgctgtgacgcaaagcgcgttgaatatcccacgcg

SEQ ID NO: 231402 - DNA, 55 bp, Artificial
  Synthetic oligonucleotide
ggtacgctcgctacgacctacacaacgaaagcgcctgaaagcataagccagcgcg

SEQ ID NO: 231403 - DNA, 55 bp, Artificial
  Synthetic oligonucleotide
ggtacgctcgtcccatgcggtgacaatcgggttccagatttccttgatacgcggg

SEQ ID NO: 231404 - DNA, 55 bp, Artificial
  Synthetic oligonucleotide
ggtagtgccttgaatctccgaactcaattcatgcgtcggcaggataaactcgggc

SEQ ID NO: 231405 - DNA, 55 bp, Artificial
  Synthetic oligonucleotide
ggtataggcatttgccgcgtcactggatgtatttgcgaactcggcactttctgaa

SEQ ID NO: 231406 - DNA, 55 bp, Artificial
  Synthetic oligonucleotide
cgatcataacgccggtagaagcgggaccgagaggcttgatcggcccgtaccgtgg

SEQ ID NO: 231407 - DNA, 55 bp, Artificial
  Synthetic oligonucleotide
ggtatcagcctctccaacgggctatcagtgcgaatgacctcgaaatacccgcccg

SEQ ID NO: 231408 - DNA, 55 bp, Artificial
  Synthetic oligonucleotide
ggtatcgcgtcggtattacgacagtgtggattttgggccgttcgagaccgtccca

SEQ ID NO: 231409 - DNA, 55 bp, Artificial
  Synthetic oligonucleotide
ggtcagggcatccaaccccgacaggatgacgcggacaaaatccgacgtcatagga

SEQ ID NO: 231410 - DNA, 55 bp, Artificial
  Synthetic oligonucleotide
gtcatttggcgctgacgatgtaatcgcatccctgcaattgcacgtagctgaaggc

SEQ ID NO: 231411 - DNA, 55 bp, Artificial
  Synthetic oligonucleotide
gtccatgaaagacacgcggttcctgttcaggggtgcggtcgttcaacagaagggg

SEQ ID NO: 231412 - DNA, 55 bp, Artificial
  Synthetic oligonucleotide
gtcccgaagcgtttccggactgcacccgatcttttgcgaaatcgatctgaaacac

SEQ ID NO: 231413 - DNA, 55 bp, Artificial
  Synthetic oligonucleotide
gtcccgagaaagttggatgtcaggtcacgtcccgttcatctatcggcgagcccac

SEQ ID NO: 231414 - DNA, 55 bp, Artificial
  Synthetic oligonucleotide
gtcccgctgaacttcatcattcggaaagacccgccccataggttcgtgaaggaga

SEQ ID NO: 231415 - DNA, 55 bp, Artificial
  Synthetic oligonucleotide
gtccgtgtcatttatgttcggcgcaaaggcgagccctgcatcgccatagggtcca

SEQ ID NO: 231416 - DNA, 55 bp, Artificial
  Synthetic oligonucleotide
gtcctaagagcgttgatatacagacgttgatccatcgaaatgaaccaaaccgccc

SEQ ID NO: 231417 - DNA, 59 bp, Artificial
  Synthetic oligonucleotide
atagaagcccgagggcagtccgcactattggtagactgcgaccctcaccagtccttcaa

SEQ ID NO: 231418 - DNA, 55 bp, Artificial
  Synthetic oligonucleotide
gtcgactcgctcttccccgtattgttctgcagcgcgtagtgatacgatccgacat

SEQ ID NO: 231419 - DNA, 55 bp, Artificial
  Synthetic oligonucleotide
gtcgactgtcaccccgtcatggaacgcccagataaaggcatgcacccacgggact

SEQ ID NO: 231420 - DNA, 55 bp, Artificial
  Synthetic oligonucleotide
gtcgagccagctggatttctctacaaccagaattccgctccgttccgaaatggca

SEQ ID NO: 231421 - DNA, 55 bp, Artificial
  Synthetic oligonucleotide
gtcgcgcaagataccggagaatcgcccattcgaccttccctcgccgggaacggaa

SEQ ID NO: 231422 - DNA, 55 bp, Artificial
  Synthetic oligonucleotide
gtcgcggcgtcagcccctaccctagcgttcaggtcagattggacgctaagaagac

SEQ ID NO: 231423 - DNA, 55 bp, Artificial
  Synthetic oligonucleotide
gtcgcgtcagatgagatcattctgtgcgaggtgctgattgatgcgatgaccttct

SEQ ID NO: 231424 - DNA, 55 bp, Artificial
  Synthetic oligonucleotide
gtcggaacactagcatcattcgatagcctgaaatcggttgactactcgtctgacc

SEQ ID NO: 231425 - DNA, 55 bp, Artificial
  Synthetic oligonucleotide
gtcggcaggacatcgtgcgtctctattttgagtatgtggatcatcgcgatgtgcg

SEQ ID NO: 231426 - DNA, 55 bp, Artificial
  Synthetic oligonucleotide
gtcggcccctttggaacggcggacaaaagctgcgcggtggttacatctgggccat

SEQ ID NO: 231427 - DNA, 55 bp, Artificial
  Synthetic oligonucleotide
gtcggctacgagcgtgcagagatcgaagaccttgtaccgttcgacgttattgccg

SEQ ID NO: 231428 - DNA, 60 bp, Artificial
  Synthetic oligonucleotide
cgatgccacgccatacccgtcagacggacgttctgcgtccgccacaagtgctgccgagtc

SEQ ID NO: 231429 - DNA, 55 bp, Artificial
  Synthetic oligonucleotide
gtcggggcatacgctgctaggagcgaccgttggtagctatgcgatctggtctgtg

SEQ ID NO: 231430 - DNA, 55 bp, Artificial
  Synthetic oligonucleotide
ggttcggattttgcgtctgagcccaatatgagtattgcgtgagcgaacgaaactg

SEQ ID NO: 231431 - DNA, 54 bp, Artificial
  Synthetic oligonucleotide
ggttgctatttccccgggaagtttgtgagcctgtcgtgttggcaaaacgcggtc

SEQ ID NO: 231432 - DNA, 55 bp, Artificial
  Synthetic oligonucleotide
ggttggaggtttgaacccctaaccagcaccagccgcgatgcattgccgcccggta

SEQ ID NO: 231433 - DNA, 55 bp, Artificial
  Synthetic oligonucleotide
ggtttgcgtcgtacaatcctgtcaggcgcgggaaatccccgtcacccatccttgc

SEQ ID NO: 231434 - DNA, 55 bp, Artificial
  Synthetic oligonucleotide
ggttttgcagagtgatgctcgccatctgtggacccatgccatcccgcccagaaag

SEQ ID NO: 231435 - DNA, 55 bp, Artificial
  Synthetic oligonucleotide
gtaaacatgaaagggtgaaaacatgagccgcaagccctcgcttctggccgcagcc

SEQ ID NO: 231436 - DNA, 55 bp, Artificial
  Synthetic oligonucleotide
gtaacgcggatcaggcccaaacttaggcccaatcaggccgggtatttatgcgccg

SEQ ID NO: 231437 - DNA, 55 bp, Artificial
  Synthetic oligonucleotide
gtaagccatgggtctacccaccttcagtcgttcagggatctgtcgggcaggagcc

SEQ ID NO: 231438 - DNA, 55 bp, Artificial
  Synthetic oligonucleotide
gtaagccccgccgctgatgcaagattgtcacaggcctgcccgcggaaatttcgcg

SEQ ID NO: 231439 - DNA, 60 bp, Artificial
  Synthetic oligonucleotide
gtggaattcgtatcccacatggcaggcctgtgctcttggtccagacaagttaaggtgtgc

SEQ ID NO: 231440 - DNA, 55 bp, Artificial
  Synthetic oligonucleotide
gtaaggggacaggtgcgctgtgcacggacgttgaacgcagcatatgagcggacga

SEQ ID NO: 231441 - DNA, 55 bp, Artificial
  Synthetic oligonucleotide
gtaattacgtcgaccggacgaacccggatggcccgttcatggcctgcgacgacag

SEQ ID NO: 231442 - DNA, 55 bp, Artificial
  Synthetic oligonucleotide
gtaccccgtgctgcgtccgattggacgctctatattgctagaagtcccagttacc

SEQ ID NO: 231443 - DNA, 55 bp, Artificial
  Synthetic oligonucleotide
gtataccgtagtagtgaatttgggtcgaagtgaggcgagctctggtgcctaacgc

SEQ ID NO: 231444 - DNA, 55 bp, Artificial
  Synthetic oligonucleotide
gtcaacacctcccgggtggccggatctcttttgctgcgtgacatcgccatgcacc

SEQ ID NO: 231445 - DNA, 55 bp, Artificial
  Synthetic oligonucleotide
gtcaatggtgtgcgggcaagatggctgtttgctatgcgtcttgcattcgctaaaa

SEQ ID NO: 231446 - DNA, 55 bp, Artificial
  Synthetic oligonucleotide
gtcacactgatcacgggtagttcgttacaagcattcaccctatacaccgcaggac

SEQ ID NO: 231447 - DNA, 55 bp, Artificial
  Synthetic oligonucleotide
gtcagaaggctttgtctgctggagagggtctggcagaaaagttcgaagcgagggg

SEQ ID NO: 231448 - DNA, 55 bp, Artificial
  Synthetic oligonucleotide
gtcagttcatgcgctatgcagcgaagggcaggtcttcccaaatctgcgatgatgt

SEQ ID NO: 231449 - DNA, 55 bp, Artificial
  Synthetic oligonucleotide
gtcatactcactctcagaacgcttggtgaacccactcaatccaccgtcctgacgc

SEQ ID NO: 231450 - DNA, 60 bp, Artificial
  Synthetic oligonucleotide
cgatggatcgcacggacctccgagttggggcagcatttggccttcagcgcacatcccgtg

SEQ ID NO: 231451 - DNA, 55 bp, Artificial
  Synthetic oligonucleotide
tggatgcgattcccgaccacgccccaagtgcctcccatcctcaatgattccgcgc

SEQ ID NO: 231452 - DNA, 55 bp, Artificial
  Synthetic oligonucleotide
tggcagtcgaatgcccaggctcgcctccaatgcttgagcgaaaggccctctctgg

SEQ ID NO: 231453 - DNA, 55 bp, Artificial
  Synthetic oligonucleotide
tggcatcacgtcactgaccccttgggagaaatagctcaactctatgcctgcggac

SEQ ID NO: 231454 - DNA, 55 bp, Artificial
  Synthetic oligonucleotide
tggccgtttatgacctaagtttccggcacccacccacccttgctggtctgccctg

SEQ ID NO: 231455 - DNA, 55 bp, Artificial
  Synthetic oligonucleotide
tggccttttgccctttcattgctagactgcgcccagctaagccgattgagcgggg

SEQ ID NO: 231456 - DNA, 55 bp, Artificial
  Synthetic oligonucleotide
tggtcgggaagaattgcccgtcgctcgaagcggtctgccctgcgccccaaaaccg

SEQ ID NO: 231457 - DNA, 55 bp, Artificial
  Synthetic oligonucleotide
tgtacggctttcaagtgtccgtaccgtatatagagtgtcgcgctgttatcacagg

SEQ ID NO: 231458 - DNA, 55 bp, Artificial
  Synthetic oligonucleotide
tgtagcgttcagggatgaccgacacgtagtgctgggtctcgcggaagggtggcac

SEQ ID NO: 231459 - DNA, 55 bp, Artificial
  Synthetic oligonucleotide
tgtatcccgtggtatactgaatgaattgactgccgcagtgcagaatgctagctgg

SEQ ID NO: 231460 - DNA, 55 bp, Artificial
  Synthetic oligonucleotide
tgtcacgggcatagcgtccttggtcgggtctggtgatcggcacatcacggcggca

SEQ ID NO: 231461 - DNA, 57 bp, Artificial
  Synthetic oligonucleotide
tcgggctgtaccgcagttggttattgggatggcccgagtggacggagttgcaaagcg

SEQ ID NO: 231462 - DNA, 60 bp, Artificial
  Synthetic oligonucleotide
gatctcgttcgtcagcttaccccggagcagaggctacagagcatacctgttaccgaggtg

SEQ ID NO: 231463 - DNA, 55 bp, Artificial
  Synthetic oligonucleotide
ccgcgccggatgcttcgaaacgctttgaggcgatcttcactactaacaaaccaag

SEQ ID NO: 231464 - DNA, 55 bp, Artificial
  Synthetic oligonucleotide
ccgatgcccgacgctgaccagagtcgtcttcgttgccgcgagcagtcgatacaga

SEQ ID NO: 231465 - DNA, 55 bp, Artificial
  Synthetic oligonucleotide
ccgatctattcaatctgctcggtcatgtctacaaggctgttgcctacctgatggt

SEQ ID NO: 231466 - DNA, 55 bp, Artificial
  Synthetic oligonucleotide
ttggtttacgccgcggaacgttcgccactagaatgagtccatctgtcgctgcccc

SEQ ID NO: 231467 - DNA, 55 bp, Artificial
  Synthetic oligonucleotide
ccctgaaaaggagttcgcatgcccgcaacagacgacaaccagaaattagtaactg

SEQ ID NO: 231468 - DNA, 55 bp, Artificial
  Synthetic oligonucleotide
cccgcttgccaacaacagtttaattccgacagtgcgagccacttggcttgctgcg

SEQ ID NO: 231469 - DNA, 55 bp, Artificial
  Synthetic oligonucleotide
cccgatgttcggccgataccggatctgtccgtcagcctgaacgcgattccacata

SEQ ID NO: 231470 - DNA, 55 bp, Artificial
  Synthetic oligonucleotide
ccccgctttcttcgcaacccgccgaatcacattgagggtgtctcgagtgtagcga

SEQ ID NO: 231471 - DNA, 55 bp, Artificial
  Synthetic oligonucleotide
ccccgccaagacggggaatcgaccatatgtatggctaaaagcgtagtgataagct

SEQ ID NO: 231472 - DNA, 55 bp, Artificial
  Synthetic oligonucleotide
ccccattctccgaattcacacactggcgaccttgattagagtcaaatggtcagga

SEQ ID NO: 231473 - DNA, 60 bp, Artificial
  Synthetic oligonucleotide
gagtagcagcaaccgacagcttagtgggctcatgcgacccatctgacgcgtagtccgaga

SEQ ID NO: 231474 - DNA, 55 bp, Artificial
  Synthetic oligonucleotide
ccccaaaagcggtagcaacggcgctaacatctgcgtgaaagattcgtgtcgtgga

SEQ ID NO: 231475 - DNA, 54 bp, Artificial
  Synthetic oligonucleotide
cccataccccgtgtcccagcttcagaccacggttttcgaatttcgtcagcggac

SEQ ID NO: 231476 - DNA, 54 bp, Artificial
  Synthetic oligonucleotide
cccagtaatagaccgtatccccggaaaactcctgcttactgttcggatagccga

SEQ ID NO: 231477 - DNA, 55 bp, Artificial
  Synthetic oligonucleotide
ccatctgacattgtgtgctcggctaaagacatgtctaaacatcgttgcactcacc

SEQ ID NO: 231478 - DNA, 55 bp, Artificial
  Synthetic oligonucleotide
gggtatccatccgtaagctctgtcgttggcggtctgcggatgctacttcagccga

SEQ ID NO: 231479 - DNA, 55 bp, Artificial
  Synthetic oligonucleotide
ggggttattgagttcctcccggcatgaggcgatcatgattaccggctagccacta

SEQ ID NO: 231480 - DNA, 55 bp, Artificial
  Synthetic oligonucleotide
aattgcgcggttcgttcgcctgtctcgtaccacccgaacagtgctggttcagaac

SEQ ID NO: 231481 - DNA, 55 bp, Artificial
  Synthetic oligonucleotide
ggggcttcggacagggaagttgcagcgatacggaactcgctgattggcacaaggc

SEQ ID NO: 231482 - DNA, 55 bp, Artificial
  Synthetic oligonucleotide
ggggcagaggacaatgcggtctgtcgcgttaatcacggcggtctccatctgggtc

SEQ ID NO: 231483 - DNA, 55 bp, Artificial
  Synthetic oligonucleotide
gggcgcatgcacggcgataagtttcgctgtgtcggggatcagtatcgtttcgccc

SEQ ID NO: 231484 - DNA, 60 bp, Artificial
  Synthetic oligonucleotide
gactggtgctgtatcgagaggacgccttacgagacagccaaaatcgtctgtcaagcccct

SEQ ID NO: 231485 - DNA, 55 bp, Artificial
  Synthetic oligonucleotide
acagaatgtcccgttacacagtggtcccgatggcacacagtcggtggcggtagcg

SEQ ID NO: 231486 - DNA, 55 bp, Artificial
  Synthetic oligonucleotide
tctcgaccctgggtcacgcgttcgtctgaattccgaccgggttcaagaccccatc

SEQ ID NO: 231487 - DNA, 54 bp, Artificial
  Synthetic oligonucleotide
tcccgcgctcgttacatcgtcaaagtagtcgtacgtaaaaccggagtacggcca

SEQ ID NO: 231488 - DNA, 55 bp, Artificial
  Synthetic oligonucleotide
gggagcggccggataggtttcacgcgctgactgcagaatttcgtaggctcgccag

SEQ ID NO: 231489 - DNA, 55 bp, Artificial
  Synthetic oligonucleotide
gggagaatatgaggggcgacgggtgactctccgtccgaatataggaaggcgttgc

SEQ ID NO: 231490 - DNA, 55 bp, Artificial
  Synthetic oligonucleotide
gggaactaccctaaccgtatgctgcgttgcgtgaacgcctatatctagtaatggg

SEQ ID NO: 231491 - DNA, 55 bp, Artificial
  Synthetic oligonucleotide
ggctttatcacctcgtacttatagttggcctcagctgctcgcttttccgggattg

SEQ ID NO: 231492 - DNA, 55 bp, Artificial
  Synthetic oligonucleotide
tcgtgaaggttccgttgggcggagtcgagctttgccacttgggttgaaccgcgtc

SEQ ID NO: 231493 - DNA, 55 bp, Artificial
  Synthetic oligonucleotide
aactgcatggaccgaacgaagtatacgggctctagcgagccggccggaggtgtgc

SEQ ID NO: 231494 - DNA, 55 bp, Artificial
  Synthetic oligonucleotide
tcgcgaagggtgacaacgtcattgcaatggctgctaggcagggcgacgcaggtag

SEQ ID NO: 231495 - DNA, 53 bp, Artificial
  Synthetic oligonucleotide
gaattagcaacggccggtcatccccccaacgacggtcttaacctgactcgcgg

SEQ ID NO: 231496 - DNA, 55 bp, Artificial
  Synthetic oligonucleotide
ggctgcacggtgcacggcggtttccatccgcctgcgagcagatttgaaatgacgg

SEQ ID NO: 231497 - DNA, 54 bp, Artificial
  Synthetic oligonucleotide
accacggacggcctccggtgcagtataaaatccccagtcggctgcccctgcctt

SEQ ID NO: 231498 - DNA, 54 bp, Artificial
  Synthetic oligonucleotide
ggcggtccctcttggtggaagggttagggcgcttactttgcatacttcgccacg

SEQ ID NO: 231499 - DNA, 55 bp, Artificial
  Synthetic oligonucleotide
ggcgctttatggcgataagacccaaggggttcgcgagcggttcactgcgctctgc

SEQ ID NO: 231500 - DNA, 55 bp, Artificial
  Synthetic oligonucleotide
ggcgcgatttacggaattggtggggccgaagttcgatctcatcgactgcttggaa

SEQ ID NO: 231501 - DNA, 55 bp, Artificial
  Synthetic oligonucleotide
tcaggtgatccatgacccacgtgcacagacttgttgccgaggacgcacgcgtgct

SEQ ID NO: 231502 - DNA, 55 bp, Artificial
  Synthetic oligonucleotide
tcaagtatcgacaacggtgcaggactgcgaccactcgagagcttgaatcaaacac

SEQ ID NO: 231503 - DNA, 55 bp, Artificial
  Synthetic oligonucleotide
tagcttcgctacctacgacacccgtaccggcccatatctcacgccaacccccgct

SEQ ID NO: 231504 - DNA, 55 bp, Artificial
  Synthetic oligonucleotide
tagcgatcccgaaagccgaagcacacttcgccaactgcatgcaggacggtccgta

SEQ ID NO: 231505 - DNA, 55 bp, Artificial
  Synthetic oligonucleotide
gttaagttatattcgggtagtgtgcaacatattgtaaatgcatcgctggtctccg

SEQ ID NO: 231506 - DNA, 58 bp, Artificial
  Synthetic oligonucleotide
cttgttccggtaagcgactgtcagacaggtgtcaggcaaccgtttctcctccgcttca

SEQ ID NO: 231507 - DNA, 55 bp, Artificial
  Synthetic oligonucleotide
gtgcgacgggtctggatggtattccggagatccattcggcgggcctaatccggac

SEQ ID NO: 231508 - DNA, 55 bp, Artificial
  Synthetic oligonucleotide
gtcggttttcagattggcgccagcctctgcggtgatggcgaggtgtggtctggga

SEQ ID NO: 231509 - DNA, 55 bp, Artificial
  Synthetic oligonucleotide
gtcgcttccgggaacaagagagagcgatgcaaaatagcagggcaatcgcaccttc

SEQ ID NO: 231510 - DNA, 55 bp, Artificial
  Synthetic oligonucleotide
gtcgcagtcgggcgcctgagaccaatccctgacgctccaaattagcagtcgtcca

SEQ ID NO: 231511 - DNA, 55 bp, Artificial
  Synthetic oligonucleotide
tctacaaatcgacacgagcttttacgacgccaatacaaaatcacggatacttgcg

SEQ ID NO: 231512 - DNA, 55 bp, Artificial
  Synthetic oligonucleotide
gtcacagcgagattctctgaactcactccccgagacacaccgatgttcgcgaggg

SEQ ID NO: 231513 - DNA, 55 bp, Artificial
  Synthetic oligonucleotide
aatacatggacgtaaggctcttcgaatgcacgggcgactccacctgcgatccgcc

SEQ ID NO: 231514 - DNA, 55 bp, Artificial
  Synthetic oligonucleotide
gtaggtcacggggtctgcggaactcattgcgcactcatcatcgacaggtattcaa

SEQ ID NO: 231515 - DNA, 55 bp, Artificial
  Synthetic oligonucleotide
tcccatgcccggggtttggtgccagatcgcgtgtccggcaaggaattcgccttgt

SEQ ID NO: 231516 - DNA, 55 bp, Artificial
  Synthetic oligonucleotide
gtaagcgtgtaggtgctgcttatcgccgctttgtcgaggggcggtatagagagca

SEQ ID NO: 231517 - DNA, 59 bp, Artificial
  Synthetic oligonucleotide
cttgcgtttaggacgatcgttattgcgctttacgacgaacgctgcgcagtttgtggaga

SEQ ID NO: 231518 - DNA, 55 bp, Artificial
  Synthetic oligonucleotide
ggtttgttcaggtggcgacagtctcgtatggattcgacgggacaccatactgacg

SEQ ID NO: 231519 - DNA, 55 bp, Artificial
  Synthetic oligonucleotide
ggtgttgcattgacgtgtcgccggtggtatatttgaatcattggtgcttcattcg

SEQ ID NO: 231520 - DNA, 55 bp, Artificial
  Synthetic oligonucleotide
ggtattggtcggcttgagccaagcgccgctcgatacttctacgcttctttcgggc

SEQ ID NO: 231521 - DNA, 54 bp, Artificial
  Synthetic oligonucleotide
ggtatgaagcggggtgcggtctacccactccctccaaagaggcgaggacgggat

SEQ ID NO: 231522 - DNA, 55 bp, Artificial
  Synthetic oligonucleotide
gggtgagagcttttgtgcagttgctagagcgccttgcaagcgaagtaacccggac

SEQ ID NO: 231523 - DNA, 55 bp, Artificial
  Synthetic oligonucleotide
gggtatcgaatcaattcggggctccactcgataaaaggccgttcatccgaggcgg

SEQ ID NO: 231524 - DNA, 55 bp, Artificial
  Synthetic oligonucleotide
gcgaggcgagttctgttcggagcaaatcaccgctctctcggattaccgggccatc

SEQ ID NO: 231525 - DNA, 55 bp, Artificial
  Synthetic oligonucleotide
gcgacatgaattgtcgtggcgcggtactagggtatgggctgcgaaagggcaagtg

SEQ ID NO: 231526 - DNA, 55 bp, Artificial
  Synthetic oligonucleotide
gccttggccaagagtgttgcagaatgcccaaagccgattagaatcggtccatggc

SEQ ID NO: 231527 - DNA, 55 bp, Artificial
  Synthetic oligonucleotide
gccttggaagagcgttgaagcggtcgagttggccaccctcgaatgggtctcatgg

SEQ ID NO: 231528 - DNA, 57 bp, Artificial
  Synthetic oligonucleotide
cctccaggttgctttactcgggaatcgggggtgtgtgcgattacttctgcggctgga

SEQ ID NO: 231529 - DNA, 55 bp, Artificial
  Synthetic oligonucleotide
gccttcacgaccactgccgccggattgacattgaaaatcgcaagatcagacatgc

SEQ ID NO: 231530 - DNA, 53 bp, Artificial
  Synthetic oligonucleotide
acgcccctcaaaacgcgggcactacgcgaaaagtctgccgggccgaccgacac

SEQ ID NO: 231531 - DNA, 55 bp, Artificial
  Synthetic oligonucleotide
gcctccaatgacgcggttatttacttccccaggttgtgggttgctagggatgccg

SEQ ID NO: 231532 - DNA, 55 bp, Artificial
  Synthetic oligonucleotide
gccgttcgccttcttaatgattctgaccggccgatgcgagtttcaatggggtcgt

SEQ ID NO: 231533 - DNA, 55 bp, Artificial
  Synthetic oligonucleotide
gccgccaccaaagcgagtagttcgggcgcggcacacatcgtttacgtggaccaca

SEQ ID NO: 231534 - DNA, 55 bp, Artificial
  Synthetic oligonucleotide
tcttgccgactcttacccagaaaacggcaaagctcacgattaagtaagagatagc

SEQ ID NO: 231535 - DNA, 55 bp, Artificial
  Synthetic oligonucleotide
gcccctcgaaagatatatatgtcgggaggtattaagcgaaatacgtgcctgtgtg

SEQ ID NO: 231536 - DNA, 55 bp, Artificial
  Synthetic oligonucleotide
gcattaacgccgatacgcgggcgttggactgcgcatagcctaccagtgtgatgcg

SEQ ID NO: 231537 - DNA, 55 bp, Artificial
  Synthetic oligonucleotide
tgaatcgcaggtgtgtgatcgcgcacgccggagctcaagtgggtcttctgacccg

SEQ ID NO: 231538 - DNA, 55 bp, Artificial
  Synthetic oligonucleotide
gcataccctttcctcgatcgcgtccgtaagttgtccgctgcaaccgagcgcaccg

SEQ ID NO: 231539 - DNA, 55 bp, Artificial
  Synthetic oligonucleotide
ccgtttaacggtatctgaatcaacttttgacgtgaacacggacacccagaagctg

SEQ ID NO: 231540 - DNA, 55 bp, Artificial
  Synthetic oligonucleotide
aaccactcggtccatctgctggggtccccggattcaggggagttctccggtcaga

SEQ ID NO: 231541 - DNA, 55 bp, Artificial
  Synthetic oligonucleotide
gcacatgggttgctctaggggtgttgcagggcctgcagtcaagggccccgagaca

SEQ ID NO: 231542 - DNA, 55 bp, Artificial
  Synthetic oligonucleotide
gcaagttccaccatcatgtctcctttgcattgttcggacgcgacaatcccgcgtc

SEQ ID NO: 231543 - DNA, 55 bp, Artificial
  Synthetic oligonucleotide
gcaaggcgcttgacgtttcccgcctgcgctacgaagccggccatgctggctacct

SEQ ID NO: 231544 - DNA, 55 bp, Artificial
  Synthetic oligonucleotide
gcaacgtcccctcagtccgtgagccaagacttctggtccttctgcctgtcgcgtc

SEQ ID NO: 231545 - DNA, 55 bp, Artificial
  Synthetic oligonucleotide
tgacgtcactgaggactgcagatgcaaagcaatgctctcttgaaaccgcgaatca

SEQ ID NO: 231546 - DNA, 55 bp, Artificial
  Synthetic oligonucleotide
ggcgcccaccttgcatcgcgcaaaacggggtacttagtatagaataacgcgtttg

SEQ ID NO: 231547 - DNA, 55 bp, Artificial
  Synthetic oligonucleotide
accccaaattcggttcgcaggacgtatccaagttcatcaatgtgatcatgcaggc

SEQ ID NO: 231548 - DNA, 55 bp, Artificial
  Synthetic oligonucleotide
tcgcgagtctgcaatgtcttattatgataccggagtactctgtcgaattacgcaa

SEQ ID NO: 231549 - DNA, 55 bp, Artificial
  Synthetic oligonucleotide
ggcctccggaacaggtgaaacgtacgtacctctgtccaccgaggggacagcaatc

SEQ ID NO: 231550 - DNA, 60 bp, Artificial
  Synthetic oligonucleotide
agctcatgactccttcccgttctggactcaggtagaagcgctaggaatctcagcaactta

SEQ ID NO: 231551 - DNA, 55 bp, Artificial
  Synthetic oligonucleotide
ggccgatgattgcatcaattatgtagccatttatccgacattgaagtacacacct

SEQ ID NO: 231552 - DNA, 54 bp, Artificial
  Synthetic oligonucleotide
ggccgaacgttttccgatcgtcacccctgcggagttctggaaaaggcatggcgg

SEQ ID NO: 231553 - DNA, 55 bp, Artificial
  Synthetic oligonucleotide
ggatcttttgcgctaagcatctttaacagcagcgttacgcgtttccttaatctgg

SEQ ID NO: 231554 - DNA, 55 bp, Artificial
  Synthetic oligonucleotide
ggatactcgcctcataacgaagttttgctagttcgtcattaacgaggttgcgatc

SEQ ID NO: 231555 - DNA, 55 bp, Artificial
  Synthetic oligonucleotide
ggacgcgtcgatccagacttccctgatcgagctttccttgatcaggcacagatcg

SEQ ID NO: 231556 - DNA, 55 bp, Artificial
  Synthetic oligonucleotide
ggaagccaaacttggcaatgcatacacaccactgcaagtccggctggggttgact

SEQ ID NO: 231557 - DNA, 55 bp, Artificial
  Synthetic oligonucleotide
ggaactggggagatcgcagcatcgccctcaatccggccttcctccccgcactgga

SEQ ID NO: 231558 - DNA, 55 bp, Artificial
  Synthetic oligonucleotide
gctttactttgtacgagtccgattcggaggaacttgaaacgcacacagacgacta

SEQ ID NO: 231559 - DNA, 55 bp, Artificial
  Synthetic oligonucleotide
gctggcgcaaaggtgcgagagatcgcagaggtcctatatccccaccttgcacgcg

SEQ ID NO: 231560 - DNA, 55 bp, Artificial
  Synthetic oligonucleotide
gctctcatgtcggggatatacagacttaacgtcgctacctcccctagtcgctgtg

SEQ ID NO: 231561 - DNA, 59 bp, Artificial
  Synthetic oligonucleotide
ccatagtcgcgcgagaaagaggcccctcgcatgaaagacatcagcggtacgcttaaccc

SEQ ID NO: 231562 - DNA, 55 bp, Artificial
  Synthetic oligonucleotide
gctactgtaaacaaacgactagtgagattccgcgctaagctggcactgcgcttgc

SEQ ID NO: 231563 - DNA, 55 bp, Artificial
  Synthetic oligonucleotide
gctacgcttacacgtattgatgtccccttgctggatgatctcctgaggtatggtg

SEQ ID NO: 231564 - DNA, 55 bp, Artificial
  Synthetic oligonucleotide
gcggcgtacttgatcgcgatggagacagacagcatctacgctggtcgttacagtc

SEQ ID NO: 231565 - DNA, 55 bp, Artificial
  Synthetic oligonucleotide
gcggcaccgctatgaagagccttaccaacgacagcgcaactttcaaagagaggaa

SEQ ID NO: 231566 - DNA, 55 bp, Artificial
  Synthetic oligonucleotide
gcgcgtgatcatgaaaggcaaggcgtccgaaaccaccgagctgagagtgtcgaag

SEQ ID NO: 231567 - DNA, 55 bp, Artificial
  Synthetic oligonucleotide
tcgtctttcaagtgccatagtctggggaccccgatgcgggctcgactcaggctcg

SEQ ID NO: 231568 - DNA, 55 bp, Artificial
  Synthetic oligonucleotide
gcgccgctccggttggtatatgagttcaattatagcaaccctccgctaacgacgc

SEQ ID NO: 231569 - DNA, 54 bp, Artificial
  Synthetic oligonucleotide
ttttcgacgttgttgcctgaatttacaccagcaaaccagagcagtgttctattg

SEQ ID NO: 231570 - DNA, 54 bp, Artificial
  Synthetic oligonucleotide
cacaatgtggcgcatcccttagcggaagcgaacagtactgggccaattcaagtc

SEQ ID NO: 231571 - DNA, 54 bp, Artificial
  Synthetic oligonucleotide
cagaccattcgtgcagaatggacctccggtcgcgcgtcgaagatgaacgaacgc

SEQ ID NO: 231572 - DNA, 58 bp, Artificial
  Synthetic oligonucleotide
tcgagggtcgtcgctggttagttcgacgaccctctgccaagagttgccggcgatagtg

SEQ ID NO: 231573 - DNA, 60 bp, Artificial
  Synthetic oligonucleotide
atccgcaatttagcacattaccccaatggagagaagtccagacaaggcgatagctattac

SEQ ID NO: 231574 - DNA, 54 bp, Artificial
  Synthetic oligonucleotide
cagcgaggatagtcacgttgcaaaattgcccggcatagtggatctcatcccgag

SEQ ID NO: 231575 - DNA, 54 bp, Artificial
  Synthetic oligonucleotide
gtccgtatgggcacccccagtatcttgtgctatccgggtggcgaggattgggtt

SEQ ID NO: 231576 - DNA, 54 bp, Artificial
  Synthetic oligonucleotide
ccagtcacaggtcgaggaaatcgtctcccggctaaccaatctcgggcgggacgc

SEQ ID NO: 231577 - DNA, 50 bp, Artificial
  Synthetic oligonucleotide
ccattgaacaggcccccccaggggggccataaaccagcccccccaaccga

SEQ ID NO: 231578 - DNA, 54 bp, Artificial
  Synthetic oligonucleotide
ttctcgacggcgctgcgatgctagacaacgatcgaccaattgttgctttgacgt

SEQ ID NO: 231579 - DNA, 54 bp, Artificial
  Synthetic oligonucleotide
cgaaggtatgcggacttgttcgggtctacgatgctgcgacgaggcggtttctcg

SEQ ID NO: 231580 - DNA, 54 bp, Artificial
  Synthetic oligonucleotide
ggctgtctgcgcagcgcgagtgtcatgctagcagtttcgtcatacgtacgaaat

SEQ ID NO: 231581 - DNA, 54 bp, Artificial
  Synthetic oligonucleotide
cgcttttgactaccatcggctcagggtcattcgctgcgcgggccttttgtccgc

SEQ ID NO: 231582 - DNA, 54 bp, Artificial
  Synthetic oligonucleotide
gactctcgttggattcaaacgacaatgggccgtacgggatggagtcccgtcggc

SEQ ID NO: 231583 - DNA, 54 bp, Artificial
  Synthetic oligonucleotide
actgaacacgtcaggtcgtatcgcgatgtgacttttgcgtatcgtcctgccaac

SEQ ID NO: 231584 - DNA, 60 bp, Artificial
  Synthetic oligonucleotide
atagacgtagcccacgttgacccatgtgcccagatattcacgcccggagctgtcaatgac

SEQ ID NO: 231585 - DNA, 54 bp, Artificial
  Synthetic oligonucleotide
agcggtttcctgtccgaaatcgcaatgcccctgtccttttttctcactgcggac

SEQ ID NO: 231586 - DNA, 54 bp, Artificial
  Synthetic oligonucleotide
aattcccaccatgcgactcaccgacactcaagccgctgcgattcggcaattgac

SEQ ID NO: 231587 - DNA, 54 bp, Artificial
  Synthetic oligonucleotide
aaaacgaggaaatcagcggttgaattgcagcgccctgccagagttgctttgtca

SEQ ID NO: 231588 - DNA, 53 bp, Artificial
  Synthetic oligonucleotide
aaggatggacgccgaacgttgccaaggtcgttctcgcggtaatcaagctcaca

SEQ ID NO: 231589 - DNA, 53 bp, Artificial
  Synthetic oligonucleotide
tttcgcggtaaagcgcatctatgttccacgtgcgtcctaccgcaggtttgtag

SEQ ID NO: 231590 - DNA, 53 bp, Artificial
  Synthetic oligonucleotide
cagtccgctagcgcgccctcggcagtagccgtctcagccttcgttatgcttgc

SEQ ID NO: 231591 - DNA, 53 bp, Artificial
  Synthetic oligonucleotide
ggggccatgcgaactctatgctcagtccgagacaaccgcccggttgcgcccat

SEQ ID NO: 231592 - DNA, 53 bp, Artificial
  Synthetic oligonucleotide
cctacacgcgacattgcgttcgcaccgagtacacactacattgccagtgacgc

SEQ ID NO: 231593 - DNA, 53 bp, Artificial
  Synthetic oligonucleotide
cctggcaccaccgctttgcctagctcgctggccagacagattttcctggccga

SEQ ID NO: 231594 - DNA, 53 bp, Artificial
  Synthetic oligonucleotide
cgcttactagtggtctttgataacatttaaggtttcgcttttcggggtgactg

SEQ ID NO: 231595 - DNA, 59 bp, Artificial
  Synthetic oligonucleotide
aacgcgctttgacagccaacttgggctagtgggtaaggctgcacagtcacgggatttga

SEQ ID NO: 231596 - DNA, 53 bp, Artificial
  Synthetic oligonucleotide
taggatgaaagtcgtaacaccccgtaacaagtggggcttttgcgcggactata

SEQ ID NO: 231597 - DNA, 53 bp, Artificial
  Synthetic oligonucleotide
agcactcatagcggcgaaatttagcttacgtgcgcggcacaatttacttgaca

SEQ ID NO: 231598 - DNA, 53 bp, Artificial
  Synthetic oligonucleotide
gcttctcggttcgcaacgcacggcagaacgaacgctacgacgcagaaattcaa

SEQ ID NO: 231599 - DNA, 53 bp, Artificial
  Synthetic oligonucleotide
agatagcgagcctgagtttgcgacttggctcacacttccacgcgacactgcaa

SEQ ID NO: 231600 - DNA, 53 bp, Artificial
  Synthetic oligonucleotide
ctgtcataactcaaggagccgccgatctcccttagatactggcgtgcctcata

SEQ ID NO: 231601 - DNA, 53 bp, Artificial
  Synthetic oligonucleotide
atgaagtgtcgctacgacttgacggaccaacaggtcatgcggctaataccgca

SEQ ID NO: 231602 - DNA, 53 bp, Artificial
  Synthetic oligonucleotide
agtccctaaaggtttccgatacgccggtgcctgaatgctcgagaccttacaac

SEQ ID NO: 231603 - DNA, 53 bp, Artificial
  Synthetic oligonucleotide
gagcatcgaccatgcttcgcgttcgctcaacaggcactggctcgaacgtcagg

SEQ ID NO: 231604 - DNA, 53 bp, Artificial
  Synthetic oligonucleotide
ttctttggggccagttcttctgtagcgatcaccgcgcacgtttgaacgagctt

SEQ ID NO: 231605 - DNA, 53 bp, Artificial
  Synthetic oligonucleotide
atcgtgccgaatgcctataaccgcatcccggggttttcgatccggagccactt

SEQ ID NO: 231606 - DNA, 60 bp, Artificial
  Synthetic oligonucleotide
tgcagcaatacaggccgggtccgtatgggcacccccagtatcttgtgctatccgggtggc

SEQ ID NO: 231607 - DNA, 52 bp, Artificial
  Synthetic oligonucleotide
aagcgacgtagcaggcagccacttggcgtttgcgtcattgaatagccaacgc

SEQ ID NO: 231608 - DNA, 52 bp, Artificial
  Synthetic oligonucleotide
caggcactggcgcttaaacgggcttcttggtcgccaattggacatgcgaaaa

SEQ ID NO: 231609 - DNA, 52 bp, Artificial
  Synthetic oligonucleotide
taatccagacccgatgccggcacgcagagaatcaaagcagcacgcagcgctg

SEQ ID NO: 231610 - DNA, 52 bp, Artificial
  Synthetic oligonucleotide
gtgatcggacgtctctcgctcgtgaggttgaagacggaatgatcgaaaacgt

SEQ ID NO: 231611 - DNA, 52 bp, Artificial
  Synthetic oligonucleotide
tatcttgctaagtacgtgcaagacagtaatgtcccctttcaccaaggaacga

SEQ ID NO: 231612 - DNA, 52 bp, Artificial
  Synthetic oligonucleotide
ccccgtatcaggcacactcgataaagagcgcgcacaacaacggtttcaatgg

SEQ ID NO: 231613 - DNA, 50 bp, Artificial
  Synthetic oligonucleotide
aatggtcgtggaaccgaacagtgccccgggccgtaccaggggtttcaggg

SEQ ID NO: 231614 - DNA, 52 bp, Artificial
  Synthetic oligonucleotide
atcaagacgaacttcatacggtaagcccatccgcgcgacccacccccgtttt

SEQ ID NO: 231615 - DNA, 52 bp, Artificial
  Synthetic oligonucleotide
cgagccgcttactctacgtagcaactacacgaaggccacgggctcccaaaag

SEQ ID NO: 231616 - DNA, 52 bp, Artificial
  Synthetic oligonucleotide
cgaggttgaaggcatgaacctattcgggctattcacgagcgagccggagaaa

SEQ ID NO: 231617 - DNA, 58 bp, Artificial
  Synthetic oligonucleotide
aaacaagcacaggcttgcctgttcacacgtgtgaacgttctcaaccgcctacacggcg

SEQ ID NO: 231618 - DNA, 52 bp, Artificial
  Synthetic oligonucleotide
cggtcgcacggacgcctacccggtccgatgggaaagcaagaccacgggccaa

SEQ ID NO: 231619 - DNA, 52 bp, Artificial
  Synthetic oligonucleotide
agaagcctcgtccgtggacgttatggctgcagaccggtcggcaagcgcgaaa

SEQ ID NO: 231620 - DNA, 52 bp, Artificial
  Synthetic oligonucleotide
gcaacgcccttttcatattctcggggcgtcagtgaacaggtcggttcctcga

SEQ ID NO: 231621 - DNA, 52 bp, Artificial
  Synthetic oligonucleotide
aaaacgattatgttgcggtgcgacaacagtccgacctgtctatgccgaaagg

SEQ ID NO: 231622 - DNA, 52 bp, Artificial
  Synthetic oligonucleotide
tggctggaaagcgcacggttgcgaactcgcaacgcaattgctgccagtcgaa

SEQ ID NO: 231623 - DNA, 52 bp, Artificial
  Synthetic oligonucleotide
agtctttagaatgcgaccgctacatcggctcccgacttgagtacatagcccc

SEQ ID NO: 231624 - DNA, 52 bp, Artificial
  Synthetic oligonucleotide
tgggtccggtgtggctactgcagcagggctatgctacgcggcaatcggtacg

SEQ ID NO: 231625 - DNA, 52 bp, Artificial
  Synthetic oligonucleotide
ttgttgtcatttaatcctgaagccatgtatctcacccactacagtcgagtat

SEQ ID NO: 231626 - DNA, 52 bp, Artificial
  Synthetic oligonucleotide
ttacgagcgaagctactcgagttttcaggattccgcccggtgccctttgcgg

SEQ ID NO: 231627 - DNA, 51 bp, Artificial
  Synthetic oligonucleotide
taacggtggaatgatctgatctgctacgttaatgcttcacacgagtgacgg

SEQ ID NO: 231628 - DNA, 55 bp, Artificial
  Synthetic oligonucleotide
aacctccttgcgtactaccctgttcgtctccgggtcgtgtccagtctcaatccgc

SEQ ID NO: 231629 - DNA, 51 bp, Artificial
  Synthetic oligonucleotide
gacccccctgaaacagagatcattgctcccgcgtttgtcgacgcccccaat

SEQ ID NO: 231630 - DNA, 51 bp, Artificial
  Synthetic oligonucleotide
gacaaaccgccaacggttaccgctaaccagcatcgacggtgagaaggtttg

SEQ ID NO: 231631 - DNA, 51 bp, Artificial
  Synthetic oligonucleotide
catttcgggcgtgaggagtcgggagtgatgcgtcgggtgccggtctaggct

SEQ ID NO: 231632 - DNA, 51 bp, Artificial
  Synthetic oligonucleotide
agagcagatagtgaccacaatgctcaactagatgacgcctactggcttcaa

SEQ ID NO: 231633 - DNA, 51 bp, Artificial
  Synthetic oligonucleotide
gtctctatccgccgttcgctttcgtagggcatcgagaatgggccaaatgtt

SEQ ID NO: 231634 - DNA, 51 bp, Artificial
  Synthetic oligonucleotide
gtagttctcgagttgtgtgggcagaaaggcgatgcgaagtcccggattgtt

SEQ ID NO: 231635 - DNA, 51 bp, Artificial
  Synthetic oligonucleotide
ctcgccggttgctaccgcctcacagtaccaaacgccatattgcataacatt

SEQ ID NO: 231636 - DNA, 51 bp, Artificial
  Synthetic oligonucleotide
aattaccgtggcctgtcgacgtcaattatcctggccggtggaagcgaggca

SEQ ID NO: 231637 - DNA, 51 bp, Artificial
  Synthetic oligonucleotide
atcaccccatatcttggggagatccaggcgcagatatacctcgttgagctc

SEQ ID NO: 231638 - DNA, 51 bp, Artificial
  Synthetic oligonucleotide
tgtcgaccaccgaatacacacgtgatgacgggacttctgctgcagccagta

SEQ ID NO: 231639 - DNA, 55 bp, Artificial
  Synthetic oligonucleotide
aaagagtacgtaggctccccgtgtaccaaggattccgtcccgatacgtgtgcatc

SEQ ID NO: 231640 - DNA, 51 bp, Artificial
  Synthetic oligonucleotide
acactatctggtcgatataattgcgggctgtattgtcgcgttggtctcgat

SEQ ID NO: 231641 - DNA, 51 bp, Artificial
  Synthetic oligonucleotide
ccggacctgcgttcccagcgtatccgggcacatgtaagaaaatccgacact

SEQ ID NO: 231642 - DNA, 51 bp, Artificial
  Synthetic oligonucleotide
aaatgcgctcttgtggtcgtacacctgttgcgctagcgccgcgcactggtc

SEQ ID NO: 231643 - DNA, 51 bp, Artificial
  Synthetic oligonucleotide
cgctcaaccagagcaccaaccgctagcccaagtgttgtcagcaccagggcg

SEQ ID NO: 231644 - DNA, 51 bp, Artificial
  Synthetic oligonucleotide
tgctatccagtaggcccaagacatcgggtctgagcttgcgccctcagtcga

SEQ ID NO: 231645 - DNA, 51 bp, Artificial
  Synthetic oligonucleotide
cgatgacacgtcacggccataccaggcctcgaattcacgttgcgtactcaa

SEQ ID NO: 231646 - DNA, 51 bp, Artificial
  Synthetic oligonucleotide
gatcgaacgcaccgtaaagctcacccgcccattcgcgaagctttccactcc

SEQ ID NO: 231647 - DNA, 51 bp, Artificial
  Synthetic oligonucleotide
acgtgctattgcggtaagtgcgtcgagctggcttctgatcggcgcaagttc

SEQ ID NO: 231648 - DNA, 51 bp, Artificial
  Synthetic oligonucleotide
tcgggctcaaacctgcgccgcacaaggggtttcgtcacaatgccttaacat

SEQ ID NO: 231649 - DNA, 51 bp, Artificial
  Synthetic oligonucleotide
tcaagcgcgcttaaataggcgagccgaaacgatcagctaatcgtctagttc

SEQ ID NO: 231650 - DNA, 59 bp, Artificial
  Synthetic oligonucleotide
gatccgaccgccgcgtatcaagcgcgcctggcacagattcgcagcaacctcaacactgg

SEQ ID NO: 231651 - DNA, 51 bp, Artificial
  Synthetic oligonucleotide
gattctccctttctacgccgtgcacgggatgttgacttgtactggcgagcg

SEQ ID NO: 231652 - DNA, 51 bp, Artificial
  Synthetic oligonucleotide
cacagtctgcacacgaaatttcccgaaacccggctatcatggttggcagtc

SEQ ID NO: 231653 - DNA, 50 bp, Artificial
  Synthetic oligonucleotide
aaactgacgcggaaagcatgacgaatctgcgcaaggctccgaaagcgggg

SEQ ID NO: 231654 - DNA, 50 bp, Artificial
  Synthetic oligonucleotide
acggcgcacgcaggtaatacgacgcctcatagtcggcctctccccaccaa

SEQ ID NO: 231655 - DNA, 50 bp, Artificial
  Synthetic oligonucleotide
acggcgctgggtgacattagtgcctcgatcgctaccgtatcgaagggcct

SEQ ID NO: 231656 - DNA, 50 bp, Artificial
  Synthetic oligonucleotide
accggggcgcgtaggtttcagcaagccctgtgaagcctcgcttctcaatc

SEQ ID NO: 231657 - DNA, 50 bp, Artificial
  Synthetic oligonucleotide
aaaggctatggctttcgtggaaggctcgctttctccgcgcgatgcgtcta

SEQ ID NO: 231658 - DNA, 50 bp, Artificial
  Synthetic oligonucleotide
accgcatatccaacgggcaggccgttccgacgcatgatccacgagctgta

SEQ ID NO: 231659 - DNA, 50 bp, Artificial
  Synthetic oligonucleotide
accctcgcctcggattcctcagtccggacagtcgaccgggcaacgtcatc

SEQ ID NO: 231660 - DNA, 50 bp, Artificial
  Synthetic oligonucleotide
gctgtctaaccagtagggcctatcccttgcgttgcgagcgtaattcagtg

SEQ ID NO: 231661 - DNA, 57 bp, Artificial
  Synthetic oligonucleotide
gatacaggtcggtctcaccgcaacgccctgcgttgccaacctcggggatttgggcga

SEQ ID NO: 231662 - DNA, 50 bp, Artificial
  Synthetic oligonucleotide
acccgttttcctgtgcagcaagggctccgagcgtgtgttcgggtcctgat

SEQ ID NO: 231663 - DNA, 50 bp, Artificial
  Synthetic oligonucleotide
ggacgttgccagaatgctcgagtgggcaagaacgggaggtgtcggcttct

SEQ ID NO: 231664 - DNA, 50 bp, Artificial
  Synthetic oligonucleotide
acccgttatcgcggaatcggcaaggacgcgcggcgtagaatgatgcgcct

SEQ ID NO: 231665 - DNA, 50 bp, Artificial
  Synthetic oligonucleotide
acggctgaacgccatgtcgggcagactgagggtgtgacggatgtggtcca

SEQ ID NO: 231666 - DNA, 50 bp, Artificial
  Synthetic oligonucleotide
acccgtgcggtgagtcccacttaagacgagcaggcggtagcccgtagcgc

SEQ ID NO: 231667 - DNA, 50 bp, Artificial
  Synthetic oligonucleotide
acccgccggaaccaagttgaggcgtccgactgtgacgcgctaatccgatt

SEQ ID NO: 231668 - DNA, 50 bp, Artificial
  Synthetic oligonucleotide
acccctggtcaacgattgggtacgccggcaactctgcctctgctcccgcg

SEQ ID NO: 231669 - DNA, 50 bp, Artificial
  Synthetic oligonucleotide
accccggatccgactccatgacaccacgcgccacacgcctcgggaagcca

SEQ ID NO: 231670 - DNA, 50 bp, Artificial
  Synthetic oligonucleotide
ggccttaggtgcggcaaatggagtgccgactcggttggcctgaaccattg

SEQ ID NO: 231671 - DNA, 50 bp, Artificial
  Synthetic oligonucleotide
acccaccggatggccgtcgaactaaccgccctttatggcatcgaccacgg

SEQ ID NO: 231672 - DNA, 55 bp, Artificial
  Synthetic oligonucleotide
ggggtatggtggcgcccccgcccaagactgactcacgaaaacgtatgcgaacgcg

SEQ ID NO: 231673 - DNA, 50 bp, Artificial
  Synthetic oligonucleotide
acccaatggcccttttcgcgtcgggcttcgattcgagccaagacatccgg

SEQ ID NO: 231674 - DNA, 50 bp, Artificial
  Synthetic oligonucleotide
acccaaaatgctcgtcggcacatccaacgtcgcactcgggccggtttcgc

SEQ ID NO: 231675 - DNA, 50 bp, Artificial
  Synthetic oligonucleotide
acggtttcgtcgcaccggtacgggggtgtaactctcccagcttccgtacc

SEQ ID NO: 231676 - DNA, 50 bp, Artificial
  Synthetic oligonucleotide
acgcctgaaccctcgatacgtgggggacagcgatacaccgtggcaagcat

SEQ ID NO: 231677 - DNA, 50 bp, Artificial
  Synthetic oligonucleotide
gcccgccaaaggtcgaccccctctgcaagaacgccatacgacccgacgat

SEQ ID NO: 231678 - DNA, 50 bp, Artificial
  Synthetic oligonucleotide
gccgctagagtctgcattacgcctgcgagatgctgcgatccggtacggaa

SEQ ID NO: 231679 - DNA, 50 bp, Artificial
  Synthetic oligonucleotide
acgccggctctgttcaagcgtccccctaaaagcgggatggcttcaactgc

SEQ ID NO: 231680 - DNA, 50 bp, Artificial
  Synthetic oligonucleotide
acgcgtatttgcagggctgctccgccgcacatctcgggtccgggttgcat

SEQ ID NO: 231681 - DNA, 50 bp, Artificial
  Synthetic oligonucleotide
gcccatgtcgttatacacaactcaggccgcctcatcgcgtagcgcctgta

SEQ ID NO: 231682 - DNA, 50 bp, Artificial
  Synthetic oligonucleotide
acgccctcgcagcgatccaatccgcgcacgactttcggcggaaacctcgg

SEQ ID NO: 231683 - DNA, 60 bp, Artificial
  Synthetic oligonucleotide
tccacgatacacctatacttctcaaaggtgcgctcaatgcctccgtgtgatttgtccaca

SEQ ID NO: 231684 - DNA, 58 bp, Artificial
  Synthetic oligonucleotide
gtgcggactctgcgtccaatggtcttataccaaagcttgtataggattcgagactcgc

SEQ ID NO: 231685 - DNA, 50 bp, Artificial
  Synthetic oligonucleotide
acgcgtcccgtaacacctgatcccaccatgactgcgccctcccctgactc

SEQ ID NO: 231686 - DNA, 50 bp, Artificial
  Synthetic oligonucleotide
aaagaatccccggtacccccgttagcccagaacgcccactgcgtccttgg

SEQ ID NO: 231687 - DNA, 50 bp, Artificial
  Synthetic oligonucleotide
acgcccccgcgattggctttccgaatacgccgttaaggttcgggccgacg

SEQ ID NO: 231688 - DNA, 50 bp, Artificial
  Synthetic oligonucleotide
acgccccaatgcggggctctctcttgggcggttggtcttggtcacgacac

SEQ ID NO: 231689 - DNA, 50 bp, Artificial
  Synthetic oligonucleotide
acgcattgggaaacgcgtagcacgcgctgggcagacttcgatactgctgc

SEQ ID NO: 231690 - DNA, 50 bp, Artificial
  Synthetic oligonucleotide
acgcagccacccgaaccagggcagcagacaaagtcagatcacgcgggagt

SEQ ID NO: 231691 - DNA, 50 bp, Artificial
  Synthetic oligonucleotide
acgaggagcggaatccaccccgcagggggcgggtttatagcgaatagcga

SEQ ID NO: 231692 - DNA, 50 bp, Artificial
  Synthetic oligonucleotide
acgagcttgccccaggctcgtatcctgattgctgcttggcgccgagacta

SEQ ID NO: 231693 - DNA, 50 bp, Artificial
  Synthetic oligonucleotide
acgagcacctgtgagaccgccggacaggtcagaacctgcgtcagaagccg

SEQ ID NO: 231694 - DNA, 50 bp, Artificial
  Synthetic oligonucleotide
acgcgtttttctgcgcgctcctgtccgtcctacggtcattccctgcgata

SEQ ID NO: 231695 - DNA, 55 bp, Artificial
  Synthetic oligonucleotide
ctgggagaaccaggcaaatcgaggttgagcgttgtctggcaaaccggaaagcggt

SEQ ID NO: 231696 - DNA, 50 bp, Artificial
  Synthetic oligonucleotide
aaaggcctatgaccgcaggccactcgcaccgattgcgccgaccgtaatcc

SEQ ID NO: 231697 - DNA, 50 bp, Artificial
  Synthetic oligonucleotide
acggatcggaacagcaacacgcgcgcattcgggtcgcctcagcacatggc

SEQ ID NO: 231698 - DNA, 50 bp, Artificial
  Synthetic oligonucleotide
acgagacatggggcccggccagcgggagaatgcgcgagtttatcatgagc

SEQ ID NO: 231699 - DNA, 50 bp, Artificial
  Synthetic oligonucleotide
gcgtatgccaggggcgagcgttacggactttcgaaaacgaagggccatgg

SEQ ID NO: 231700 - DNA, 50 bp, Artificial
  Synthetic oligonucleotide
acgaagtgccccgagggcccatcatggacctgattcaccgcatctcccga

SEQ ID NO: 231701 - DNA, 50 bp, Artificial
  Synthetic oligonucleotide
acctgaggcggcaccctacccttcgggccaaaggcttgaatgtggttggg

SEQ ID NO: 231702 - DNA, 50 bp, Artificial
  Synthetic oligonucleotide
accggtcgcccttcccatcggctcctcgaaccgactaccgcgagttccgg

SEQ ID NO: 231703 - DNA, 50 bp, Artificial
  Synthetic oligonucleotide
accgggtctccgagcaaagggggtagcgttgggtcgctctcgaccgaaag

SEQ ID NO: 231704 - DNA, 50 bp, Artificial
  Synthetic oligonucleotide
gctgggcacgtgcttgcttgagtgcttcatcctgggctgaaaggcgccct

SEQ ID NO: 231705 - DNA, 50 bp, Artificial
  Synthetic oligonucleotide
aactcgccagcgaggtcatccataacgtccgcccgtgcttccaactcgta

SEQ ID NO: 231706 - DNA, 56 bp, Artificial
  Synthetic oligonucleotide
ggaccaagatccacgccaatgcgagccggcacagtgcgctctcctatggccacgca

SEQ ID NO: 231707 - DNA, 50 bp, Artificial
  Synthetic oligonucleotide
taatggcgcagaacacctcacccgtgaacactctcgagcggaagatcaat

SEQ ID NO: 231708 - DNA, 50 bp, Artificial
  Synthetic oligonucleotide
aacgggggtttggtggagtaccgggggtttgggctgggcaagtctcattc

SEQ ID NO: 231709 - DNA, 50 bp, Artificial
  Synthetic oligonucleotide
taagtacggccgactgaattggtccgcccactttgggactccggcgtgat

SEQ ID NO: 231710 - DNA, 50 bp, Artificial
  Synthetic oligonucleotide
gtttcaggcgttcgaccaagtcaatggctgacacaccattacgtgcctca

SEQ ID NO: 231711 - DNA, 50 bp, Artificial
  Synthetic oligonucleotide
aagcggatatactgcccggctttgtcacgcgtctgcgtacctttgcggcg

SEQ ID NO: 231712 - DNA, 50 bp, Artificial
  Synthetic oligonucleotide
gtgggaggagtgcgacaagtgtcggcccctgtccttgtcaagccagggtt

SEQ ID NO: 231713 - DNA, 50 bp, Artificial
  Synthetic oligonucleotide
aagcggtatcgcttcaacgaggagaggcgggttggctcgctggcgcggtg

SEQ ID NO: 231714 - DNA, 50 bp, Artificial
  Synthetic oligonucleotide
aagctcaaacacgggaaagcaacgccactggatacggtgtcggcgcgcgt

SEQ ID NO: 231715 - DNA, 50 bp, Artificial
  Synthetic oligonucleotide
aacgacaaggcacgccctcagccatcgtcacgaacaacatgctcggcgca

SEQ ID NO: 231716 - DNA, 50 bp, Artificial
  Synthetic oligonucleotide
aagcttgcacggtttcgtcgcaccggtacgggggtgtaactctcccagct

SEQ ID NO: 231717 - DNA, 55 bp, Artificial
  Synthetic oligonucleotide
cgcccgaaactcccgtgagtgcggatagtgcgtttatatagagttccgcgatttc

SEQ ID NO: 231718 - DNA, 50 bp, Artificial
  Synthetic oligonucleotide
aaccttgcgcgctcccgggtgagccgccacttctcgattgtaggcagtca

SEQ ID NO: 231719 - DNA, 50 bp, Artificial
  Synthetic oligonucleotide
aaggctgactaccgcaagagcgcacgccgagaatagccaaggtagggtcc

SEQ ID NO: 231720 - DNA, 50 bp, Artificial
  Synthetic oligonucleotide
gtcgagagggccgccggagtgggactgcttcgagatcgttacgactgagg

SEQ ID NO: 231721 - DNA, 50 bp, Artificial
  Synthetic oligonucleotide
aagggggatcagtctccagagacgcgtgccctacccgtgcgaagtgatgc

SEQ ID NO: 231722 - DNA, 50 bp, Artificial
  Synthetic oligonucleotide
aactcggttgcttacaccggctccttctcgggtctgaccgctcgtgcgat

SEQ ID NO: 231723 - DNA, 50 bp, Artificial
  Synthetic oligonucleotide
aactctgtggaaaagggcgggccagctgaacgagccggcatagaggctgg

SEQ ID NO: 231724 - DNA, 50 bp, Artificial
  Synthetic oligonucleotide
aagatcggtgctgtggtctcgccactttttcggtccttcggcccagagcc

SEQ ID NO: 231725 - DNA, 50 bp, Artificial
  Synthetic oligonucleotide
tcgacgcaaccactcggtccatctgctggggtccccggattcaggggagt

SEQ ID NO: 231726 - DNA, 50 bp, Artificial
  Synthetic oligonucleotide
tcgacccgcgttgaggtggccttcctgacaaatcccgcaaactgctccga

SEQ ID NO: 231727 - DNA, 50 bp, Artificial
  Synthetic oligonucleotide
aagatgagggcgctggcctcccccgtcacggtctgaaaggactatgcgga

SEQ ID NO: 231728 - DNA, 55 bp, Artificial
  Synthetic oligonucleotide
ctcgccttggcacgcggaactgatgcgagaggcatttggatctgtccgtgggctt

SEQ ID NO: 231729 - DNA, 50 bp, Artificial
  Synthetic oligonucleotide
aagcaacgccactggatacggtgtcggcgcgcgtctaaaactacccagcg

SEQ ID NO: 231730 - DNA, 50 bp, Artificial
  Synthetic oligonucleotide
aagcaatggtcaagctcgcgcaagcccccttggccgtctcagtgtcggaa

SEQ ID NO: 231731 - DNA, 50 bp, Artificial
  Synthetic oligonucleotide
aagcacgactgtaagccagtaaatccagggcgtgtagcgccgcgtgcgta

SEQ ID NO: 231732 - DNA, 50 bp, Artificial
  Synthetic oligonucleotide
aagcaggcgctagaatgctgcctcacccctgcattctgtccgcacccaat

SEQ ID NO: 231733 - DNA, 50 bp, Artificial
  Synthetic oligonucleotide
tcgcgtgactacgcgacctactcctcaggcttttcgagaatcgggggcta

SEQ ID NO: 231734 - DNA, 50 bp, Artificial
  Synthetic oligonucleotide
aagcccgacttgcgtcgtacctgcatcgcgagagttgctttgcagccccc

SEQ ID NO: 231735 - DNA, 50 bp, Artificial
  Synthetic oligonucleotide
tcggctcagcctggcttacgaacgacttcgcctcattaccagaccgacgg

SEQ ID NO: 231736 - DNA, 50 bp, Artificial
  Synthetic oligonucleotide
tacttgcgtccggagtgctcgcgggacgacatgcctaaacgcgtcctcag

SEQ ID NO: 231737 - DNA, 50 bp, Artificial
  Synthetic oligonucleotide
tacgggcacccttataggctgctcgtaaggggtcacgccaccctgttgcg

SEQ ID NO: 231738 - DNA, 50 bp, Artificial
  Synthetic oligonucleotide
tacccgttcggcgctcgggggatagccgaagagactgcgatagcacttcg

SEQ ID NO: 231739 - DNA, 55 bp, Artificial
  Synthetic oligonucleotide
ctaacggccggatggaaggcaaaatgcgaacggttggctgcagtgtagctgtcgc

SEQ ID NO: 231740 - DNA, 50 bp, Artificial
  Synthetic oligonucleotide
tacccgacagctccaagaattgcctcctggtcgcttcgtgggatctgcca

SEQ ID NO: 231741 - DNA, 50 bp, Artificial
  Synthetic oligonucleotide
aacaggggcgcgtccccacgacacaggatgtcgtagccaatgcgggaatg

SEQ ID NO: 231742 - DNA, 50 bp, Artificial
  Synthetic oligonucleotide
acacggccccgttgtattaaccccgcggcttgccgctttcacattggaga

SEQ ID NO: 231743 - DNA, 50 bp, Artificial
  Synthetic oligonucleotide
acagagtgatgcacaggcgtcactgtaatcgcagcaggcgccgcaaagcg

SEQ ID NO: 231744 - DNA, 50 bp, Artificial
  Synthetic oligonucleotide
gggcctctagggccgagcaaatccgggcttcaacggactctcgcgtttca

SEQ ID NO: 231745 - DNA, 50 bp, Artificial
  Synthetic oligonucleotide
gggcattcgcctagcagagccaagccatggagcgcggttatgtcagtcga

SEQ ID NO: 231746 - DNA, 50 bp, Artificial
  Synthetic oligonucleotide
aacacactccgacacctcgcccaaatcgctccagggctagccaggctgat

SEQ ID NO: 231747 - DNA, 50 bp, Artificial
  Synthetic oligonucleotide
gggcactgtctgtgcggcctgagtgcgactctgtgcaagccaactctcgt

SEQ ID NO: 231748 - DNA, 50 bp, Artificial
  Synthetic oligonucleotide
gggcaatggcacccgtagggtctgccacaatacaaaccctgccaacgtcg

SEQ ID NO: 231749 - DNA, 50 bp, Artificial
  Synthetic oligonucleotide
acaggacgcacacctgacacctgggattcgaccagctgcagtcgcggcga

SEQ ID NO: 231750 - DNA, 54 bp, Artificial
  Synthetic oligonucleotide
cgcccgaagcgcaaagggaaatcctcaaatttcccaccaaggtcccgatgcaac

SEQ ID NO: 231751 - DNA, 50 bp, Artificial
  Synthetic oligonucleotide
acaggcagtcatcgcgcgctttccccagcgtaaccggtcactgagcggcg

SEQ ID NO: 231752 - DNA, 50 bp, Artificial
  Synthetic oligonucleotide
aaatggaacatgcgggctaagggcggagtacgcgggtgcttcacgggctt

SEQ ID NO: 231753 - DNA, 50 bp, Artificial
  Synthetic oligonucleotide
acatagcggcaggcaaaccggggaccatcacccgggtcgggctggggact

SEQ ID NO: 231754 - DNA, 50 bp, Artificial
  Synthetic oligonucleotide
acatcggcaggtcgcgacaaaggcgccccaagacagcaggaaagcgcgga

SEQ ID NO: 231755 - DNA, 50 bp, Artificial
  Synthetic oligonucleotide
acatcggcatgcacagaatcccctccacgttgaaagccctccgcgcgaag

SEQ ID NO: 231756 - DNA, 50 bp, Artificial
  Synthetic oligonucleotide
acatgattcgcccgccaaaggtcgaccccctctgcaagaacgccatacga

SEQ ID NO: 231757 - DNA, 50 bp, Artificial
  Synthetic oligonucleotide
accaccttcggtaagccagcgggggccagtgtcgttcgtcagaacttcgg

SEQ ID NO: 231758 - DNA, 50 bp, Artificial
  Synthetic oligonucleotide
accatcgccgctccacggcatgcgttgcgtttctatttcggcagggaccc

SEQ ID NO: 231759 - DNA, 50 bp, Artificial
  Synthetic oligonucleotide
aacctacacggccgttcgtgcttccgatggtactcagtggccgggctata

SEQ ID NO: 231760 - DNA, 50 bp, Artificial
  Synthetic oligonucleotide
aataggcgcgaagggaattacggcagggatcaggccggaggttcgacgta

SEQ ID NO: 231761 - DNA, 55 bp, Artificial
  Synthetic oligonucleotide
cgcgtagcagacccggttcgccacatgtgaaaggatgaggaacgaatagcctccg

SEQ ID NO: 231762 - DNA, 50 bp, Artificial
  Synthetic oligonucleotide
aatcaccctcgctcgccagttgctacgcgtcaagggggctcacacctacg

SEQ ID NO: 231763 - DNA, 50 bp, Artificial
  Synthetic oligonucleotide
aatccctaggcgagtccgcaagagcactagcaggcgacatttcccgcctg

SEQ ID NO: 231764 - DNA, 50 bp, Artificial
  Synthetic oligonucleotide
aatccgcggagcacatgcgacaaagcccgaagctcccttctcactccctt

SEQ ID NO: 231765 - DNA, 50 bp, Artificial
  Synthetic oligonucleotide
ggtgcttggccaacgcggatcgccagacctttgcccgatactccttgacc

SEQ ID NO: 231766 - DNA, 50 bp, Artificial
  Synthetic oligonucleotide
ggtgcgccgcagttccggacgtcggatgggaccgatgtctcatgaggtga

SEQ ID NO: 231767 - DNA, 50 bp, Artificial
  Synthetic oligonucleotide
ggtcggaaatggcgcagtgcagacgagttcccccttctgcccgcggacgg

SEQ ID NO: 231768 - DNA, 50 bp, Artificial
  Synthetic oligonucleotide
ggtccaccccctgtcacctaaggcctgcgacttgtccacggaatacgcga

SEQ ID NO: 231769 - DNA, 50 bp, Artificial
  Synthetic oligonucleotide
aatcgccggcagacggaatgaggtggcgtgactgcgtgcagcaaccgtgt

SEQ ID NO: 231770 - DNA, 50 bp, Artificial
  Synthetic oligonucleotide
aatctggcaatctgcaggttgggaggcactctagggaccgggggacgcga

SEQ ID NO: 231771 - DNA, 50 bp, Artificial
  Synthetic oligonucleotide
aacccgtttgggagatggcccctacagtcgagccctccgaggcatgcgga

SEQ ID NO: 231772 - DNA, 55 bp, Artificial
  Synthetic oligonucleotide
cgtggaggttcgagatgcggactcatgcggtttcttccaagaaagcgaccaatct

SEQ ID NO: 231773 - DNA, 50 bp, Artificial
  Synthetic oligonucleotide
aatggcacacgtcgtcccacgtgttgcaggggtcgttgaggaggtaagcg

SEQ ID NO: 231774 - DNA, 50 bp, Artificial
  Synthetic oligonucleotide
aacccgcaaggcagtattcctagcggaggtggaatacggtggagccgtgg

SEQ ID NO: 231775 - DNA, 50 bp, Artificial
  Synthetic oligonucleotide
aattgaacggcgtgtgccagaaggtgaacaagctttcgtgcgacccggga

SEQ ID NO: 231776 - DNA, 50 bp, Artificial
  Synthetic oligonucleotide
acaacaagccccggcctacgctgccccaccaacacggagtgacgtgtggt

SEQ ID NO: 231777 - DNA, 50 bp, Artificial
  Synthetic oligonucleotide
aacatactcaatacggccgagcgggaacagcctgccacccctcagggcag

SEQ ID NO: 231778 - DNA, 50 bp, Artificial
  Synthetic oligonucleotide
catgcgggctaagggcggagtacgcgggtgcttcacgggctttggctcca

SEQ ID NO: 231779 - DNA, 50 bp, Artificial
  Synthetic oligonucleotide
agggcttgtaccggacagcgcgcgacctcgtcactgcgatgatcgcctga

SEQ ID NO: 231780 - DNA, 50 bp, Artificial
  Synthetic oligonucleotide
agggggccgtagtgtctgcaccgataccgatctagtctgccgctacgcaa

SEQ ID NO: 231781 - DNA, 50 bp, Artificial
  Synthetic oligonucleotide
catcgcgtgaccgaccacgctatcgcgctccgatcctatcaccgagccaa

SEQ ID NO: 231782 - DNA, 50 bp, Artificial
  Synthetic oligonucleotide
catcaatttcggtgcgcgactccccgaataggcttatggtgacattgcgg

SEQ ID NO: 231783 - DNA, 55 bp, Artificial
  Synthetic oligonucleotide
cgtgagggtactcgttcaccttacatcctccggaggctcaatcagagagtcgtcg

SEQ ID NO: 231784 - DNA, 50 bp, Artificial
  Synthetic oligonucleotide
catagcgctgcgccccgattgaacggcctcgcctcgtttcgcggtttcct

SEQ ID NO: 231785 - DNA, 50 bp, Artificial
  Synthetic oligonucleotide
aggggtgacgacaatgcgtcgagcccaggcgagacaaaaccgcactcagg

SEQ ID NO: 231786 - DNA, 50 bp, Artificial
  Synthetic oligonucleotide
cagtccttgtgcgcctctccgtccggaagcactacggtggacacggcaat

SEQ ID NO: 231787 - DNA, 50 bp, Artificial
  Synthetic oligonucleotide
cagtatggggcgccactatctccaaccgacaggcgctgatagcagagccc

SEQ ID NO: 231788 - DNA, 50 bp, Artificial
  Synthetic oligonucleotide
caggtcagacatcggcaggtcgcgacaaaggcgccccaagacagcaggaa

SEQ ID NO: 231789 - DNA, 50 bp, Artificial
  Synthetic oligonucleotide
aggggtgaggcggaggaaaccgcgattatagccgctcggctaggccaggc

SEQ ID NO: 231790 - DNA, 50 bp, Artificial
  Synthetic oligonucleotide
agggtacggcattggcctggcagagttgctccacctgacccaggaattcg

SEQ ID NO: 231791 - DNA, 50 bp, Artificial
  Synthetic oligonucleotide
cagctgcccttggtcgtagcatcaaaggcacaacggagggcgtggattga

SEQ ID NO: 231792 - DNA, 50 bp, Artificial
  Synthetic oligonucleotide
agggtataaagcgccgcatatcgagagccgcccgtgcctgtcctcatgag

SEQ ID NO: 231793 - DNA, 50 bp, Artificial
  Synthetic oligonucleotide
cagcctcccagaccgacggtacgggtctatggagaccgagcgcataggta

SEQ ID NO: 231794 - DNA, 60 bp, Artificial
  Synthetic oligonucleotide
gtagaaacgtaggcgcagaataatcgtcgctcatgcgaataaggctatcaatagacaggc

SEQ ID NO: 231795 - DNA, 55 bp, Artificial
  Synthetic oligonucleotide
cgcgtagtaaccatatatcggaagcgcacaaccatttcgtaccttcagcttatgg

SEQ ID NO: 231796 - DNA, 50 bp, Artificial
  Synthetic oligonucleotide
agggtcggaatagtccgttcctttctcgggtgctctggcacgaaggctgc

SEQ ID NO: 231797 - DNA, 50 bp, Artificial
  Synthetic oligonucleotide
aggtcacagccgccttgaagatgcctcgcgggcgccccgtataatgccga

SEQ ID NO: 231798 - DNA, 50 bp, Artificial
  Synthetic oligonucleotide
aggtcctcgctgcgggaaagttcgcccagacggctgtcaacataggcgcc

SEQ ID NO: 231799 - DNA, 50 bp, Artificial
  Synthetic oligonucleotide
aggagggttggtccgggccactcaaaagagcggtcagcacaggattcaga

SEQ ID NO: 231800 - DNA, 50 bp, Artificial
  Synthetic oligonucleotide
aggcaacttcccggcgctaatggcgaccttctcggggtatgtggtcgtca

SEQ ID NO: 231801 - DNA, 50 bp, Artificial
  Synthetic oligonucleotide
cccaggggatacgctcttgctctaacctgagccggggaccccatcgtcca

SEQ ID NO: 231802 - DNA, 50 bp, Artificial
  Synthetic oligonucleotide
aggcagcccgcgagtcgaatctggcccggatattgcaaggaatctgctga

SEQ ID NO: 231803 - DNA, 50 bp, Artificial
  Synthetic oligonucleotide
ccattactgcgaccgccacaaccatcgtttgcactctggcgaatgcgcct

SEQ ID NO: 231804 - DNA, 50 bp, Artificial
  Synthetic oligonucleotide
aggccgagtgtggcgagaaggggcgagatccgggtaagagccattgaagt

SEQ ID NO: 231805 - DNA, 50 bp, Artificial
  Synthetic oligonucleotide
ccatcgtgctgcatgcccgtgctcgcagccccttcgccgggtgcgactcc

SEQ ID NO: 231806 - DNA, 55 bp, Artificial
  Synthetic oligonucleotide
cgtgaatctccttctcttggcggagatcgaaaattcacgctgaccgtcgtatagg

SEQ ID NO: 231807 - DNA, 50 bp, Artificial
  Synthetic oligonucleotide
aggcgccaaggagcacaatcagggactggcccgctcactattccgggtct

SEQ ID NO: 231808 - DNA, 50 bp, Artificial
  Synthetic oligonucleotide
aggcgcggagcaaggcagaggtcaaccgccaactccttgacacgatagtg

SEQ ID NO: 231809 - DNA, 50 bp, Artificial
  Synthetic oligonucleotide
aggcgctgcagatgtgggaactcgaaggtcgcaactccccggggcttaag

SEQ ID NO: 231810 - DNA, 50 bp, Artificial
  Synthetic oligonucleotide
ccagaagggacctgtgccgcgctccatgggttcgccgggattgaggaaca

SEQ ID NO: 231811 - DNA, 50 bp, Artificial
  Synthetic oligonucleotide
ccactcaaggaagtattggcccgtggcatgcgaaatccctggcttggccc

SEQ ID NO: 231812 - DNA, 50 bp, Artificial
  Synthetic oligonucleotide
ccacgtaggccccatcactcatccggtactgccgtgcgcccacgtcgagc

SEQ ID NO: 231813 - DNA, 50 bp, Artificial
  Synthetic oligonucleotide
aggcggctcggggcctggggacgatgacagtctgtaacagccgtcctcat

SEQ ID NO: 231814 - DNA, 50 bp, Artificial
  Synthetic oligonucleotide
aggcgtgcgctacctaaatgggtcatgtgccgaaatcgcccccgcctaat

SEQ ID NO: 231815 - DNA, 50 bp, Artificial
  Synthetic oligonucleotide
agggacgccactctccggtaaggcatgaccgagactcccgtccttactgc

SEQ ID NO: 231816 - DNA, 50 bp, Artificial
  Synthetic oligonucleotide
agggactcgcgggaggtcgatgccagcccgttacggtgtgcgccgcagca

SEQ ID NO: 231817 - DNA, 55 bp, Artificial
  Synthetic oligonucleotide
cgtcatgcaaaagcgcaaataaatggagttcgaagattggcatggtgcgctctca

SEQ ID NO: 231818 - DNA, 50 bp, Artificial
  Synthetic oligonucleotide
agggatgaacgatagtggttggacgactggtgggttacccgaggggcgcg

SEQ ID NO: 231819 - DNA, 50 bp, Artificial
  Synthetic oligonucleotide
agggccattccgtacggctcgagctttccccggcaggctgtagttgcaac

SEQ ID NO: 231820 - DNA, 50 bp, Artificial
  Synthetic oligonucleotide
attgtggatggagctttggccctccatgcggcatgacctgactgtggcgg

SEQ ID NO: 231821 - DNA, 50 bp, Artificial
  Synthetic oligonucleotide
attggcccgtggcatgcgaaatccctggcttggcccacatcgtccagact

SEQ ID NO: 231822 - DNA, 50 bp, Artificial
  Synthetic oligonucleotide
attgccctccgtgggaggagtgcgacaagtgtcggcccctgtccttgtca

SEQ ID NO: 231823 - DNA, 50 bp, Artificial
  Synthetic oligonucleotide
atgtggcgcttcgacctgtcagcaggcacagtctccccgatcatgaccct

SEQ ID NO: 231824 - DNA, 50 bp, Artificial
  Synthetic oligonucleotide
atggtgtacgcccccattgccgcccataagaaaaggggatggcgggttgg

SEQ ID NO: 231825 - DNA, 50 bp, Artificial
  Synthetic oligonucleotide
atggggcgtcgtgtgtgtgccgaaagcccgcttacgctgtcaccgtaccg

SEQ ID NO: 231826 - DNA, 50 bp, Artificial
  Synthetic oligonucleotide
atggggaagcaagatctgccggctgaggtatccgcctcggcctacaacta

SEQ ID NO: 231827 - DNA, 50 bp, Artificial
  Synthetic oligonucleotide
atgctcgagcatgggcactgtctgtgcggcctgagtgcgactctgtgcaa

SEQ ID NO: 231828 - DNA, 55 bp, Artificial
  Synthetic oligonucleotide
cgtagctcgcaaaatataatctaaacttgatctaatggatgggtagatcagggcg

SEQ ID NO: 231829 - DNA, 50 bp, Artificial
  Synthetic oligonucleotide
atgcctcgcgggcgccccgtataatgccgaccccacacaactttcgggaa

SEQ ID NO: 231830 - DNA, 50 bp, Artificial
  Synthetic oligonucleotide
atgcatgtcgcttcatcatgtcgtggctctggaagcgggaggcgacagct

SEQ ID NO: 231831 - DNA, 50 bp, Artificial
  Synthetic oligonucleotide
atgcacaacgtagttgcgcaccgagcttacccggcccggtcttcacgagc

SEQ ID NO: 231832 - DNA, 50 bp, Artificial
  Synthetic oligonucleotide
atgaggccgaaacgaccaatcccctccagtggagagcccgcaatcgtgaa

SEQ ID NO: 231833 - DNA, 50 bp, Artificial
  Synthetic oligonucleotide
atctgggtgcagcccgcctgagcgctccaacctgccttcgcaaacgttgc

SEQ ID NO: 231834 - DNA, 50 bp, Artificial
  Synthetic oligonucleotide
atctccacagcccggttcgtctgccatgttccgcttcgccaccaaggaat

SEQ ID NO: 231835 - DNA, 50 bp, Artificial
  Synthetic oligonucleotide
agtgccgatagaacgtcgggatttcgcccgaccaacccgctccttccgta

SEQ ID NO: 231836 - DNA, 50 bp, Artificial
  Synthetic oligonucleotide
agttggcctcagctgctcgcttttccgggattgtggctaagtccccaggg

SEQ ID NO: 231837 - DNA, 50 bp, Artificial
  Synthetic oligonucleotide
atagacccttgccacagagcgctgtcccggaaccactggaggctcagacc

SEQ ID NO: 231838 - DNA, 50 bp, Artificial
  Synthetic oligonucleotide
atcagcgtgcgaccaaaccgcgcactcaacctaactgccaacgggctcac

SEQ ID NO: 231839 - DNA, 55 bp, Artificial
  Synthetic oligonucleotide
cggaaacatgcgccagacccaggaatttccaccgctcaacatgtccacgcccagc

SEQ ID NO: 231840 - DNA, 50 bp, Artificial
  Synthetic oligonucleotide
atagcaattggcgcagtctcgtccgcgccacgggcgtgaatcccacattg

SEQ ID NO: 231841 - DNA, 50 bp, Artificial
  Synthetic oligonucleotide
cagaaggcgggaaaacgtgtcttcgtccttggccccattcccgagttgcc

SEQ ID NO: 231842 - DNA, 50 bp, Artificial
  Synthetic oligonucleotide
aggtgttctctccgggtgaccaataccccttcgggctgatgcggtgggtt

SEQ ID NO: 231843 - DNA, 50 bp, Artificial
  Synthetic oligonucleotide
cactccgcgccctgactcgttcgcactctccggaagctcccatggcccaa

SEQ ID NO: 231844 - DNA, 50 bp, Artificial
  Synthetic oligonucleotide
cacgatgcgctgtctccaagcgcccccggtcttctatcttgcgtacggtg

SEQ ID NO: 231845 - DNA, 50 bp, Artificial
  Synthetic oligonucleotide
caccgcccttgtcaatccggccatctatacctagcctcccgcccacgtgt

SEQ ID NO: 231846 - DNA, 50 bp, Artificial
  Synthetic oligonucleotide
cacccggtctggatctttggacgttgtgccccgacggtagaggatggcgg

SEQ ID NO: 231847 - DNA, 50 bp, Artificial
  Synthetic oligonucleotide
aggttcaacgcgcacctttttggatgcagcgatggagcctggagtggctg

SEQ ID NO: 231848 - DNA, 50 bp, Artificial
  Synthetic oligonucleotide
cacagccaagtttgaccgtatcctcgcccggagcgtcgagtgtcacctgg

SEQ ID NO: 231849 - DNA, 50 bp, Artificial
  Synthetic oligonucleotide
aggttctcgcgaacaaagtccgcgggcaacgtcgcattggcatggattcc

SEQ ID NO: 231850 - DNA, 55 bp, Artificial
  Synthetic oligonucleotide
cggtgcagctagtatagtcggcgagtacatcgttctgaatgtctgtatcgctatc

SEQ ID NO: 231851 - DNA, 50 bp, Artificial
  Synthetic oligonucleotide
caagttggggaggtatctcagcgcggatccgattggggtggcgggaggtc

SEQ ID NO: 231852 - DNA, 50 bp, Artificial
  Synthetic oligonucleotide
caagttcgtcactgctcgcccgtccgatctcccctgcagcaattccccca

SEQ ID NO: 231853 - DNA, 50 bp, Artificial
  Synthetic oligonucleotide
caagggcctccgcttacggcgcttcagcccaaccctcaagagccgaagag

SEQ ID NO: 231854 - DNA, 50 bp, Artificial
  Synthetic oligonucleotide
agtctaggatgtggaatgccaccggggcgcgtaggtttcagcaagccctg

SEQ ID NO: 231855 - DNA, 50 bp, Artificial
  Synthetic oligonucleotide
caaggcaagcagccggccctgcaatgactaccctgccctcttgaccgtgg

SEQ ID NO: 231856 - DNA, 50 bp, Artificial
  Synthetic oligonucleotide
caagccatcgcagccccgaaagacgcgaccctgtctcaaccgcagcaact

SEQ ID NO: 231857 - DNA, 50 bp, Artificial
  Synthetic oligonucleotide
caagcagctcacatgcactcgccgggagttcctaaaagcacggggcggcc

SEQ ID NO: 231858 - DNA, 50 bp, Artificial
  Synthetic oligonucleotide
caagaccgacgccaattccacggtagacaacctgcaagagatcatttcat

SEQ ID NO: 231859 - DNA, 50 bp, Artificial
  Synthetic oligonucleotide
caaccaccgaccgaaacctccgggcactacaaatcttgcgtcgcgcaggt

SEQ ID NO: 231860 - DNA, 50 bp, Artificial
  Synthetic oligonucleotide
caaacgagcgaggacaccacacaatgagcgcttccgaaagccgcgaggga

SEQ ID NO: 231861 - DNA, 55 bp, Artificial
  Synthetic oligonucleotide
cggaccacgaatggatgcagcatagcggcgactctgataccggagcggtcttgac

SEQ ID NO: 231862 - DNA, 50 bp, Artificial
  Synthetic oligonucleotide
agagctacggacgcaaaagtggggattcatacggcgcccccgaagtagga

SEQ ID NO: 231863 - DNA, 50 bp, Artificial
  Synthetic oligonucleotide
agaggccataattcacggcttgttcacgccttcccgggcacaatgcgggg

SEQ ID NO: 231864 - DNA, 50 bp, Artificial
  Synthetic oligonucleotide
agagtgccggcggatggcagtagtagaacagcatcgggtgccgcagatgg

SEQ ID NO: 231865 - DNA, 50 bp, Artificial
  Synthetic oligonucleotide
agatactcagtcacgcgagccagattcggcctccgggcctccagatagga

SEQ ID NO: 231866 - DNA, 50 bp, Artificial
  Synthetic oligonucleotide
cttgcaggaacccctccacaaatcaccatgggaggaatgattccactgac

SEQ ID NO: 231867 - DNA, 50 bp, Artificial
  Synthetic oligonucleotide
cttgatggcctgatcctagcagcgtgtcggactatcccctgtaaaatgac

SEQ ID NO: 231868 - DNA, 50 bp, Artificial
  Synthetic oligonucleotide
agatcgcgcggataccgagtcgaagggcgcacaagaccgcaatctcgccc

SEQ ID NO: 231869 - DNA, 50 bp, Artificial
  Synthetic oligonucleotide
ctgaacggggcgcttaataagagttgttgccgtgtcctggcccacgccgt

SEQ ID NO: 231870 - DNA, 50 bp, Artificial
  Synthetic oligonucleotide
agatctcgctacgcatatgacaataatctgcctaacacctcagccagact

SEQ ID NO: 231871 - DNA, 50 bp, Artificial
  Synthetic oligonucleotide
ctatcaacccgcgggctggtcccgggattcttctgtgtcctggggacgag

SEQ ID NO: 231872 - DNA, 54 bp, Artificial
  Synthetic oligonucleotide
cggctgcgtagcccgattttcgctgaacccctgtccggtcttcgtttcggtcca

SEQ ID NO: 231873 - DNA, 50 bp, Artificial
  Synthetic oligonucleotide
agatctgccggctgaggtatccgcctcggcctacaactatccggacgctc

SEQ ID NO: 231874 - DNA, 50 bp, Artificial
  Synthetic oligonucleotide
agattgggccacccaccggatggccgtcgaactaaccgccctttatggca

SEQ ID NO: 231875 - DNA, 50 bp, Artificial
  Synthetic oligonucleotide
agcaatgcggaccttgcccagaggcggcagtacgctcaatgtgcagcgaa

SEQ ID NO: 231876 - DNA, 50 bp, Artificial
  Synthetic oligonucleotide
agcaccatttcgtcggaggcagatacgcactccctgcagaaagcccgtgc

SEQ ID NO: 231877 - DNA, 50 bp, Artificial
  Synthetic oligonucleotide
agcacccatgcgctcaacgtacccagaagtgcgacgaccgccagtactcc

SEQ ID NO: 231878 - DNA, 50 bp, Artificial
  Synthetic oligonucleotide
agcagccatgcaaacgaagggcccggaggttacctctcccaataccccgg

SEQ ID NO: 231879 - DNA, 50 bp, Artificial
  Synthetic oligonucleotide
agcatcgatcgaggcgcagtcccacggtcgggtgtatgggcagggctggg

SEQ ID NO: 231880 - DNA, 50 bp, Artificial
  Synthetic oligonucleotide
agcatgccacgacttcccctgccgtcgcgatcctcagttcgccttgacgt

SEQ ID NO: 231881 - DNA, 50 bp, Artificial
  Synthetic oligonucleotide
acgtccgcagtcttctgcgaactttggcgccccaatagcacgaaagcccg

SEQ ID NO: 231882 - DNA, 50 bp, Artificial
  Synthetic oligonucleotide
acgtcgtcccacgtgttgcaggggtcgttgaggaggtaagcgccgatctg

SEQ ID NO: 231883 - DNA, 55 bp, Artificial
  Synthetic oligonucleotide
cggctaggccaatctgccgcaagtgtgtatatttccgtgtatatcgaacctcctg

SEQ ID NO: 231884 - DNA, 50 bp, Artificial
  Synthetic oligonucleotide
gatgggcgcccgcaagttctcgatggcaaaagggaggtctttgagcctga

SEQ ID NO: 231885 - DNA, 50 bp, Artificial
  Synthetic oligonucleotide
acgtgcccaagcggtatcgcttcaacgaggagaggcgggttggctcgctg

SEQ ID NO: 231886 - DNA, 50 bp, Artificial
  Synthetic oligonucleotide
acgttccttgcccatgaccgaacccatgtccgccccacccgcaacaagcc

SEQ ID NO: 231887 - DNA, 50 bp, Artificial
  Synthetic oligonucleotide
actccatgacaccacgcgccacacgcctcgggaagccattcggcagcggg

SEQ ID NO: 231888 - DNA, 50 bp, Artificial
  Synthetic oligonucleotide
agaacgtcgggatttcgcccgaccaacccgctccttccgtactgcttgtc

SEQ ID NO: 231889 - DNA, 50 bp, Artificial
  Synthetic oligonucleotide
gaggcggattcccggaaacgcaatatgcagacggaccggctacgacgctt

SEQ ID NO: 231890 - DNA, 50 bp, Artificial
  Synthetic oligonucleotide
agaagcgtgacaatgtcgccatccccagacgccctcgctaagtcaagcgc

SEQ ID NO: 231891 - DNA, 50 bp, Artificial
  Synthetic oligonucleotide
agacaacgttgtcgggccgagtggaaacgcctgaaccctcgatacgtggg

SEQ ID NO: 231892 - DNA, 50 bp, Artificial
  Synthetic oligonucleotide
agaccaatccccaacgggtcggcgcgatagatgtcgccagcgtgcatgtt

SEQ ID NO: 231893 - DNA, 50 bp, Artificial
  Synthetic oligonucleotide
gacgagcgttcttgtacgacaaggctcccgggctcactcggcaaagcagg

SEQ ID NO: 231894 - DNA, 55 bp, Artificial
  Synthetic oligonucleotide
cggagaggctttgacgactggacgttcagcctgtacgagcaccgaactttggttc

SEQ ID NO: 231895 - DNA, 50 bp, Artificial
  Synthetic oligonucleotide
agactccgcagagggaaaagcggaactttagcgccccgtgtcttgcaggg

SEQ ID NO: 231896 - DNA, 50 bp, Artificial
  Synthetic oligonucleotide
agactgcgggctcgcttggacgggggtacggcgcagttcgcacgaatgcg

SEQ ID NO: 231897 - DNA, 50 bp, Artificial
  Synthetic oligonucleotide
agagacggactccgggggcataaccaaccgtcaaagacagcggtccttga

SEQ ID NO: 231898 - DNA, 50 bp, Artificial
  Synthetic oligonucleotide
agagactcgggctcagttagcacaggcggcagtacgcgcggagcttagcg

SEQ ID NO: 231899 - DNA, 50 bp, Artificial
  Synthetic oligonucleotide
gaatcccaggccccgtctgcaccttcacattcgggtcgatgcgtcggtaa

SEQ ID NO: 231900 - DNA, 50 bp, Artificial
  Synthetic oligonucleotide
agagcgctgcccatgagggggaatgaggcggtgcggtagaaaacgcggat

SEQ ID NO: 231901 - DNA, 50 bp, Artificial
  Synthetic oligonucleotide
agcgcatcgaccctcccttggtggacctttacgtcccacatggcatgcga

SEQ ID NO: 231902 - DNA, 50 bp, Artificial
  Synthetic oligonucleotide
agcgccccgtacagcccttacgaaggagattcgctaatggagggcggctt

SEQ ID NO: 231903 - DNA, 50 bp, Artificial
  Synthetic oligonucleotide
agcgcgctgtcaaaggtgttctctccgggtgaccaataccccttcgggct

SEQ ID NO: 231904 - DNA, 50 bp, Artificial
  Synthetic oligonucleotide
ccgtctgcaccttcacattcgggtcgatgcgtcggtaagcgccgtagtcg

SEQ ID NO: 231905 - DNA, 57 bp, Artificial
  Synthetic oligonucleotide
gggcgaggatcggtgtcacgcagtcgggcggatcccggtacgaaagcgggcgcacca

SEQ ID NO: 231906 - DNA, 55 bp, Artificial
  Synthetic oligonucleotide
gatttaagggtgcgctgccggatcatgttcgtttcctcttttcgcccaacatttt

SEQ ID NO: 231907 - DNA, 50 bp, Artificial
  Synthetic oligonucleotide
ccggacaaactgctgcaggggaacccgcgattctatcgaaccgcagtgca

SEQ ID NO: 231908 - DNA, 50 bp, Artificial
  Synthetic oligonucleotide
ccgctatgaggccggcccgttttgccccctccccttcaagggggtgaagc

SEQ ID NO: 231909 - DNA, 50 bp, Artificial
  Synthetic oligonucleotide
agcgggggagtcggcaactcagcctaagcgacagtcggccttatcgacct

SEQ ID NO: 231910 - DNA, 50 bp, Artificial
  Synthetic oligonucleotide
ccgccttgaagatgcctcgcgggcgccccgtataatgccgaccccacaca

SEQ ID NO: 231911 - DNA, 50 bp, Artificial
  Synthetic oligonucleotide
agcgtgcgttgtagctacccacggcctcccatgtagcgccatgccgctga

SEQ ID NO: 231912 - DNA, 50 bp, Artificial
  Synthetic oligonucleotide
ccctgacactgcccgaagcgaggcgtaaaatccggccgttcccgtaaccc

SEQ ID NO: 231913 - DNA, 50 bp, Artificial
  Synthetic oligonucleotide
agctccatgcaacctcgctatggtgcccgacgggggcatgatcttcgatt

SEQ ID NO: 231914 - DNA, 50 bp, Artificial
  Synthetic oligonucleotide
agctctcggccaacgcaagaccttcggtatccggtccaacggaattcgct

SEQ ID NO: 231915 - DNA, 50 bp, Artificial
  Synthetic oligonucleotide
agctgcaggctaccgttgcggctccccgtgacaatacgcaggccgtccgg

SEQ ID NO: 231916 - DNA, 50 bp, Artificial
  Synthetic oligonucleotide
cccctcccggcctacaaggcagacagcggcgtacacgaggcctacataaa

SEQ ID NO: 231917 - DNA, 55 bp, Artificial
  Synthetic oligonucleotide
gatcaagcgctctgcggtcgcgtgattacgaccaaggttgaccaacaggtactct

SEQ ID NO: 231918 - DNA, 50 bp, Artificial
  Synthetic oligonucleotide
agcttgatcggttggcctccaaacccgacacccgagcgcagcaccccaac

SEQ ID NO: 231919 - DNA, 50 bp, Artificial
  Synthetic oligonucleotide
aggaaacttttgcgctcctgactgccgctccctctggccctccacgctgg

SEQ ID NO: 231920 - DNA, 50 bp, Artificial
  Synthetic oligonucleotide
aggacctgcccgcctttgcgttgccttgccatggtgctatacaacagtga

SEQ ID NO: 231921 - DNA, 50 bp, Artificial
  Synthetic oligonucleotide
aggacgatcgaaaggtcattatgcaaggcgcaaactacacaaggatccgc

SEQ ID NO: 231922 - DNA, 50 bp, Artificial
  Synthetic oligonucleotide
agccactgcagatcagtaccgcgcgcactatgacccgggccgcctggact

SEQ ID NO: 231923 - DNA, 50 bp, Artificial
  Synthetic oligonucleotide
cggacacgagcaattgagtcgtccgagcgaccgctccgtctatcgcggag

SEQ ID NO: 231924 - DNA, 50 bp, Artificial
  Synthetic oligonucleotide
agcccagatcaggcttcccgagtcacgagctggaggctgtctgcgcagcg

SEQ ID NO: 231925 - DNA, 50 bp, Artificial
  Synthetic oligonucleotide
agccccgtggtctgctgatatggcagtgacctagccgattgccccttgga

SEQ ID NO: 231926 - DNA, 50 bp, Artificial
  Synthetic oligonucleotide
cgcgtgaggatcgtccgtcggttcgaacacaaagcggtcggcagggtagg

SEQ ID NO: 231927 - DNA, 50 bp, Artificial
  Synthetic oligonucleotide
agccgcattagcctccccgaacgacgaggtccatcctccatcgcatcatg

SEQ ID NO: 231928 - DNA, 55 bp, Artificial
  Synthetic oligonucleotide
gagttctttcgcgtcgttcagtcaaatattgagcgcgtactctccgcaaatcgcc

SEQ ID NO: 231929 - DNA, 50 bp, Artificial
  Synthetic oligonucleotide
agccgccagggcccatacacgatagtctcgatgtaccagccgccactcat

SEQ ID NO: 231930 - DNA, 50 bp, Artificial
  Synthetic oligonucleotide
agccgctagattcggagcccccgcgttgtttcgggttttctccgtgaggc

SEQ ID NO: 231931 - DNA, 50 bp, Artificial
  Synthetic oligonucleotide
agccggagcagggttaccgggaagaccggagccccgttccaacaccgaag

SEQ ID NO: 231932 - DNA, 50 bp, Artificial
  Synthetic oligonucleotide
agccggattcctatgtgccgccacaccggcatctcagtccgaccaaggac

SEQ ID NO: 231933 - DNA, 50 bp, Artificial
  Synthetic oligonucleotide
agccggccctgcaatgactaccctgccctcttgaccgtggacttcggcgc

SEQ ID NO: 231934 - DNA, 50 bp, Artificial
  Synthetic oligonucleotide
agccggggacagacccgttttcctgtgcagcaagggctccgagcgtgtgt

SEQ ID NO: 231935 - DNA, 50 bp, Artificial
  Synthetic oligonucleotide
agccggtagccgaatagcttcgcgatcagggtccgttgcgcgtagtgttc

SEQ ID NO: 231936 - DNA, 50 bp, Artificial
  Synthetic oligonucleotide
agccgtacggtgaaaagccccagtctaagcggcggggcgacgactgcgtc

SEQ ID NO: 231937 - DNA, 50 bp, Artificial
  Synthetic oligonucleotide
agcctacgacgatgctgcattgcgagtcccaatcaccctcgctcgccagt

SEQ ID NO: 231938 - DNA, 50 bp, Artificial
  Synthetic oligonucleotide
agcgattgctaatcgagtcggagtggtggcacctgctacgcggtgaagcg

SEQ ID NO: 231939 - DNA, 55 bp, Artificial
  Synthetic oligonucleotide
tgccgaatggtggagtctagttagagttggcgggcacatggtcttagtggttccg

SEQ ID NO: 231940 - DNA, 50 bp, Artificial
  Synthetic oligonucleotide
cgaaccggacggcctatcggctgccaatcgccagcctacagtcgactgac

SEQ ID NO: 231941 - DNA, 50 bp, Artificial
  Synthetic oligonucleotide
ccttcgctggcatatcgttcacccgctgtggcctcacgcccccgacacag

SEQ ID NO: 231942 - DNA, 55 bp, Artificial
  Synthetic oligonucleotide
gagggatcgaaccctgccttcggcgtcacgtgcgtatgcggtaccggtgactgta

SEQ ID NO: 231943 - DNA, 55 bp, Artificial
  Synthetic oligonucleotide
gagagttcaggcgcagaccgcatatcggaacacgatttccggctgccttgcgcaa

SEQ ID NO: 231944 - DNA, 55 bp, Artificial
  Synthetic oligonucleotide
gagaagtatcaggcgacggtgatccatcggaactcgcgctattcggtcgttgatc

SEQ ID NO: 231945 - DNA, 55 bp, Artificial
  Synthetic oligonucleotide
tgccgcggtatcgttcgtgacttgggagatgccgggttgctgcgctacgtggttc

SEQ ID NO: 231946 - DNA, 55 bp, Artificial
  Synthetic oligonucleotide
agacggaatgaggtggcgtgactgcgtgcagcaaccgtgtcgaatcggggcggtt

SEQ ID NO: 231947 - DNA, 55 bp, Artificial
  Synthetic oligonucleotide
gacgaagctctgttgtgtcgcagacagcgtgcaatcaaccgcgcacgcagggctc

SEQ ID NO: 231948 - DNA, 58 bp, Artificial
  Synthetic oligonucleotide
acgcggacaggccattaatgtctagatactccctgtactccggcgctaccgctaggat

SEQ ID NO: 231949 - DNA, 53 bp, Artificial
  Synthetic oligonucleotide
gacgaagccaccccgggaagttttcgcgaagttatgtcaaggcgcggcctccg

SEQ ID NO: 231950 - DNA, 54 bp, Artificial
  Synthetic oligonucleotide
gacccgggaaagcttggttagctcggactgtcggcagagcccaaaccacgttcc

SEQ ID NO: 231951 - DNA, 55 bp, Artificial
  Synthetic oligonucleotide
tggggattcaggttgtcgctgctccgttcaaggaaccagagggaaccgatctgct

SEQ ID NO: 231952 - DNA, 55 bp, Artificial
  Synthetic oligonucleotide
gaatattctgaccgatggcatgcgggtcaagattccgtactttccggcaaacgac

SEQ ID NO: 231953 - DNA, 55 bp, Artificial
  Synthetic oligonucleotide
gaagcgagatgcaagccgggaggcaggcgcgagtgcgacgtaattcacacccatc

SEQ ID NO: 231954 - DNA, 55 bp, Artificial
  Synthetic oligonucleotide
gaaatccactgtgcggtgcagtttcgtccggcttttcttgtaccttgccgactga

SEQ ID NO: 231955 - DNA, 55 bp, Artificial
  Synthetic oligonucleotide
tgtctcgtatttcacggaaattgccccatgccggtgctataaagaaagcgtcccc

SEQ ID NO: 231956 - DNA, 55 bp, Artificial
  Synthetic oligonucleotide
agaggtcgagccactacgcgcgatggtatcagagggcagtccttcggatcccgag

SEQ ID NO: 231957 - DNA, 55 bp, Artificial
  Synthetic oligonucleotide
cttggcacgctccgattacgcgttatttggcgacccttgtcagctattactcggg

SEQ ID NO: 231958 - DNA, 55 bp, Artificial
  Synthetic oligonucleotide
ttcgccccttgcttgactatgcgctcgggagggcggggtcggcttaacggcgtag

SEQ ID NO: 231959 - DNA, 60 bp, Artificial
  Synthetic oligonucleotide
gcatacggtcagcataggacgatgtagataaattgccacgcgtcttcctggactggtgct

SEQ ID NO: 231960 - DNA, 55 bp, Artificial
  Synthetic oligonucleotide
ctgcgcgtgtcggttgacgcttgggttgacgcttttccgtgccactagagctgaa

SEQ ID NO: 231961 - DNA, 55 bp, Artificial
  Synthetic oligonucleotide
ccaggcaaatcgaggttgagcgttgtctggcaaaccggaaagcggtttgcgactg

SEQ ID NO: 231962 - DNA, 55 bp, Artificial
  Synthetic oligonucleotide
ccacctcactgtccacctcactgtccacctcactgtccacctcactgtccacctc

SEQ ID NO: 231963 - DNA, 55 bp, Artificial
  Synthetic oligonucleotide
ccaatttcagtgacttgaggtctcgttttggcatcagaagacgcggaaaacactc

SEQ ID NO: 231964 - DNA, 55 bp, Artificial
  Synthetic oligonucleotide
ccaagcgcatacctctagccaccaaccagtcgaaagtgcgcgaacccggatcgag

SEQ ID NO: 231965 - DNA, 55 bp, Artificial
  Synthetic oligonucleotide
ccaaatatcaacgctccaacgatctgcgccataccaattccgttgccacctcttg

SEQ ID NO: 231966 - DNA, 55 bp, Artificial
  Synthetic oligonucleotide
cattgggtcaaaatggggtgggactacctgcagaaccttcgcaatcagcaatccg

SEQ ID NO: 231967 - DNA, 55 bp, Artificial
  Synthetic oligonucleotide
catggatggggcacgatcagcccaaatcgctcggaggtcgggaattcggtgcaac

SEQ ID NO: 231968 - DNA, 55 bp, Artificial
  Synthetic oligonucleotide
catgcggaagattattactccgacgttgttcgggcctatcagcagaagtctttcg

SEQ ID NO: 231969 - DNA, 55 bp, Artificial
  Synthetic oligonucleotide
catctttggaatccatattgacgagtgtcgcggacatcttctcctttctggtgac

SEQ ID NO: 231970 - DNA, 60 bp, Artificial
  Synthetic oligonucleotide
gcagccaaggttccgactgcattctcctcaggctctatggcgcacagcacctcatcgtta

SEQ ID NO: 231971 - DNA, 55 bp, Artificial
  Synthetic oligonucleotide
cagtcgcctctgcttgtcggtaccgtgcagtcgatacttctcgattcgttcgtgg

SEQ ID NO: 231972 - DNA, 55 bp, Artificial
  Synthetic oligonucleotide
cagggcctagcgctcttgcggtcggttgtactgccgtgatgggaccaactagttc

SEQ ID NO: 231973 - DNA, 55 bp, Artificial
  Synthetic oligonucleotide
caggaactgcgcccgtcggtggagcactgcagaaaagggtacatgtgctattacc

SEQ ID NO: 231974 - DNA, 55 bp, Artificial
  Synthetic oligonucleotide
cagatggactcaggtttcacaacgaaagccgcctgatctgatgaatggaaatgcc

SEQ ID NO: 231975 - DNA, 55 bp, Artificial
  Synthetic oligonucleotide
cactctcggcaaaacgaacatccagacctctgaaatgggctttggttgtatgggg

SEQ ID NO: 231976 - DNA, 55 bp, Artificial
  Synthetic oligonucleotide
cacccggacgagaaagcatgaacgggtctcttcaataacacgctccaccatcgtc

SEQ ID NO: 231977 - DNA, 55 bp, Artificial
  Synthetic oligonucleotide
caattcactgccctcccggctcatcaccaaccaaccgaagaatttcctcgtaact

SEQ ID NO: 231978 - DNA, 55 bp, Artificial
  Synthetic oligonucleotide
caaggcgagccatacagtgatgctaggtgtgcgcgaatacgcagtccaatatatt

SEQ ID NO: 231979 - DNA, 55 bp, Artificial
  Synthetic oligonucleotide
atctgcatggggcggccgaagagaagagcgcgccgagtctagcacacggtactgt

SEQ ID NO: 231980 - DNA, 55 bp, Artificial
  Synthetic oligonucleotide
atcggcgtaccaagggagaggctgtcgataaccatatttctctcggcgccgctcc

SEQ ID NO: 231981 - DNA, 57 bp, Artificial
  Synthetic oligonucleotide
gcaaaccgtggaggccatattccaaggttcacctgaagttgcgagccttaaggaaca

SEQ ID NO: 231982 - DNA, 55 bp, Artificial
  Synthetic oligonucleotide
atccggtcacaggtcgaactcgtttgtgcgatcaggactgtgctgactacgcagc

SEQ ID NO: 231983 - DNA, 55 bp, Artificial
  Synthetic oligonucleotide
tttccttgccgttcaatcagcacaagacgctgctcccctgcccctaacgggatga

SEQ ID NO: 231984 - DNA, 55 bp, Artificial
  Synthetic oligonucleotide
cgccccaaatggagtgggcccctggatcggcatggcgtgaccgcatgctaaacaa

SEQ ID NO: 231985 - DNA, 55 bp, Artificial
  Synthetic oligonucleotide
cgcaagccccagtcgagtaggcgggagtattcgatatgttcgttgctggcgtgat

SEQ ID NO: 231986 - DNA, 55 bp, Artificial
  Synthetic oligonucleotide
cgcaaaatctagcaccaggagcaccggtcatttgcgtcctacccagtcttcctgc

SEQ ID NO: 231987 - DNA, 51 bp, Artificial
  Synthetic oligonucleotide
cgattcagtaggcggggcggtacccggtcgtacgccggagccggtttgaag

SEQ ID NO: 231988 - DNA, 55 bp, Artificial
  Synthetic oligonucleotide
cgaatgtcacagaacgtgaaaactttgagagcccatctccgctcggactatgcat

SEQ ID NO: 231989 - DNA, 50 bp, Artificial
  Synthetic oligonucleotide
cgaaccttggggtaaagaacgccgaggtttcggaaactttcgtgcgccag

SEQ ID NO: 231990 - DNA, 55 bp, Artificial
  Synthetic oligonucleotide
cctgcctcggagtagtcttcgtgggcataagtcgtaccgacagccgctagactca

SEQ ID NO: 231991 - DNA, 55 bp, Artificial
  Synthetic oligonucleotide
cctaggttgaacaatggcccactttcttcgagatcagcagattgcgaatgtttcc

SEQ ID NO: 231992 - DNA, 59 bp, Artificial
  Synthetic oligonucleotide
agaactcaggattacagttgaggggattcgctcgcagaacgggactattctgattgggc

SEQ ID NO: 231993 - DNA, 59 bp, Artificial
  Synthetic oligonucleotide
cccgggtctggcatcctgaacactggcatccaaacaagagaccgcgacagcaaagggac

SEQ ID NO: 231994 - DNA, 57 bp, Artificial
  Synthetic oligonucleotide
ccaattgttaccgtttcccatttattcccgctcatttctgcagatgctttttgcaaa

SEQ ID NO: 231995 - DNA, 57 bp, Artificial
  Synthetic oligonucleotide
agtcagaaacggccggccttcattcaatgatccctaaagagtcttccccaaatcagc

SEQ ID NO: 231996 - DNA, 60 bp, Artificial
  Synthetic oligonucleotide
agtcataccggctaacgcgaacgctgacaacgaatgtctgacaaaatgatgattacgtca

SEQ ID NO: 231997 - DNA, 60 bp, Artificial
  Synthetic oligonucleotide
gcgtttacgacagccctttgtgcacatgaatggatgttatcccgacgcctattggccgct

SEQ ID NO: 231998 - DNA, 59 bp, Artificial
  Synthetic oligonucleotide
ctctgatcgaaaaccctcggcgactcttaccatcgcaagatacccaagctccgtatcca

SEQ ID NO: 231999 - DNA, 60 bp, Artificial
  Synthetic oligonucleotide
gcctatcctcactcagatggaacggcaatacctcaatggaagccttcatgtgttgtcggt

SEQ ID NO: 232000 - DNA, 58 bp, Artificial
  Synthetic oligonucleotide
gccgtaagggcgatgcaaagctttcgggctcagtacgtcccttgatgtccgctttcgc

SEQ ID NO: 232001 - DNA, 60 bp, Artificial
  Synthetic oligonucleotide
ctgatggagggccattgctgacctttaaagccgcatgccccgccagtaagcgagaggagc

SEQ ID NO: 232002 - DNA, 55 bp, Artificial
  Synthetic oligonucleotide
gccgctggtgggtattttgcgggggctccatgacaaagtccctttggcccaagct

SEQ ID NO: 232003 - DNA, 57 bp, Artificial
  Synthetic oligonucleotide
cagtcggggccagggatccccggctccagctcttacacgggtcagttcgtcatgcgg

SEQ ID NO: 232004 - DNA, 60 bp, Artificial
  Synthetic oligonucleotide
gtcggcagaatacccatctctgttgtcattcccgcccccccatggagacacggagatgag

SEQ ID NO: 232005 - DNA, 60 bp, Artificial
  Synthetic oligonucleotide
atacgagctaaagaagatgccggttcctttcttcaggtcatgatcaccgagcgtgcagtc

SEQ ID NO: 232006 - DNA, 55 bp, Artificial
  Synthetic oligonucleotide
atagaaaacgtcaaacaatcgccttgtgccagatttatccgggaccgaccgcaaa

SEQ ID NO: 232007 - DNA, 58 bp, Artificial
  Synthetic oligonucleotide
ctggatattcaatcaagtgccttggatatcccgaagggatctaagttggttgttctag

SEQ ID NO: 232008 - DNA, 60 bp, Artificial
  Synthetic oligonucleotide
caggagcacactataaacggaggatgtcaccgaatatacatcgagattggtgccatcaac

SEQ ID NO: 232009 - DNA, 57 bp, Artificial
  Synthetic oligonucleotide
ctgtctcacgaagtcggggccagaggctgataattgcaggttgggggacggtaacca

SEQ ID NO: 232010 - DNA, 59 bp, Artificial
  Synthetic oligonucleotide
tgggagcgtgcatccggaaccttcggcaagtggacggttggcgatcgggtctgcttctc

SEQ ID NO: 232011 - DNA, 58 bp, Artificial
  Synthetic oligonucleotide
aatggaggctcctatgaatcatgcccgcccttcagagggaatccacaaccgcgtttaa

SEQ ID NO: 232012 - DNA, 60 bp, Artificial
  Synthetic oligonucleotide
aatggcggtcaattatggcaacgcgctgagtccgctgggaagctacctgcatacgccgga

SEQ ID NO: 232013 - DNA, 58 bp, Artificial
  Synthetic oligonucleotide
ttgaaacggagccattcgcgttcaagctgagacttcgccgggtaatgccacgaggccg

SEQ ID NO: 232014 - DNA, 58 bp, Artificial
  Synthetic oligonucleotide
aattcaacggtacgattagaaaagcggcttgtgtcatcgctggcaacgcaaccctgga

SEQ ID NO: 232015 - DNA, 60 bp, Artificial
  Synthetic oligonucleotide
gtagccacgccgtcgctcctcatccccaatgcacgtatggatcagcccaacatcgatttg

SEQ ID NO: 232016 - DNA, 55 bp, Artificial
  Synthetic oligonucleotide
aactgtgttggtcccggtcgtcgcgtttcacgtcttgactatgtttctgaaatat

SEQ ID NO: 232017 - DNA, 59 bp, Artificial
  Synthetic oligonucleotide
tgaggcgccaagtcgcaaccgtgaaattgcgggatatcattcgcgccgtttctctttcc

SEQ ID NO: 232018 - DNA, 60 bp, Artificial
  Synthetic oligonucleotide
cggaggtgagtcagccaatgtttatctgaggttgttcgaccatctgtgggcgcgttccag

SEQ ID NO: 232019 - DNA, 60 bp, Artificial
  Synthetic oligonucleotide
ttgcagaagcaaattggatcaatgatcgatgcgacgcgatacaggttttcactgatgcca

SEQ ID NO: 232020 - DNA, 59 bp, Artificial
  Synthetic oligonucleotide
cgacacctatgatgtttcgctggacgtgcgaagcatggtgaacgggttgcccgagaccc

SEQ ID NO: 232021 - DNA, 56 bp, Artificial
  Synthetic oligonucleotide
tgagaaccggaagactttgaccgatatcttcccgccgcccctgtactttcggcatg

SEQ ID NO: 232022 - DNA, 54 bp, Artificial
  Synthetic oligonucleotide
aaaggcggggtggacggaccatccgcttggggcgacactggtggcgtccttgcc

SEQ ID NO: 232023 - DNA, 60 bp, Artificial
  Synthetic oligonucleotide
ttgcgcatcactgataattcgcaggtgcggtacatccaccttggtccagtccgattccgg

SEQ ID NO: 232024 - DNA, 58 bp, Artificial
  Synthetic oligonucleotide
tgaagcgtctgcctttctgtagccgaatctcttattttgtccgttgaccccatgtccg

SEQ ID NO: 232025 - DNA, 56 bp, Artificial
  Synthetic oligonucleotide
cctattacctacaaaacgccgacgcgacactcagagtcacaaccacaacccaagac

SEQ ID NO: 232026 - DNA, 60 bp, Artificial
  Synthetic oligonucleotide
gtagagcatcgggccggcaagacgtctttaatctggctcaatcatcgaatggtccggtgt

SEQ ID NO: 232027 - DNA, 59 bp, Artificial
  Synthetic oligonucleotide
tgtcccatagcgagctgaccttggcacgactttgcgaggaaccctatatcacggccggt

SEQ ID NO: 232028 - DNA, 56 bp, Artificial
  Synthetic oligonucleotide
acacgccccataggaccatcgacggaatgttaaccaagcgaccggtctccgcgcta

SEQ ID NO: 232029 - DNA, 59 bp, Artificial
  Synthetic oligonucleotide
tcttgacccgctccaagcggcgtcttatcggaatgctggcccaattcgcttcgggcgtc

SEQ ID NO: 232030 - DNA, 60 bp, Artificial
  Synthetic oligonucleotide
tctgatatgcgattgccctgaggatagcggaaactccgacagtcccctatgctcgggcat

SEQ ID NO: 232031 - DNA, 60 bp, Artificial
  Synthetic oligonucleotide
aaggcagctggggcggcgaacatgcgttagacgtccagggcgcagccgatgcggatcggt

SEQ ID NO: 232032 - DNA, 60 bp, Artificial
  Synthetic oligonucleotide
tgctacgccatgcggcgtatgagcgtcaaggacacccaggagcgtgtcgttgattgtcgc

SEQ ID NO: 232033 - DNA, 58 bp, Artificial
  Synthetic oligonucleotide
ttccggggagatgatgtctcaccgtcattggcacggagggtaccgccgcgcttaagcg

SEQ ID NO: 232034 - DNA, 54 bp, Artificial
  Synthetic oligonucleotide
tggcacaaaccttcggcctcacccgtttacccgaaatatcggagatccggcgat

SEQ ID NO: 232035 - DNA, 56 bp, Artificial
  Synthetic oligonucleotide
aacccgcgcgaagggcaacggacgcccgatcggcacaatcgacgacgtcggctcca

SEQ ID NO: 232036 - DNA, 60 bp, Artificial
  Synthetic oligonucleotide
aagccctgtgtgccgatcagagcctccggatgatgtcggagcacctcccacatcccgtct

SEQ ID NO: 232037 - DNA, 51 bp, Artificial
  Synthetic oligonucleotide
agccggacgttcagtgaggctaccggatcggaagggggtaccccttagacc

SEQ ID NO: 232038 - DNA, 60 bp, Artificial
  Synthetic oligonucleotide
cgagaggagctacagtccgagccagctaatgcgtacgcgcgcctggtggtcgctcatatg

SEQ ID NO: 232039 - DNA, 52 bp, Artificial
  Synthetic oligonucleotide
cgcccgtatcttgtgggtgcgaaggggggagggtacaaaactttgcgcaccc

SEQ ID NO: 232040 - DNA, 59 bp, Artificial
  Synthetic oligonucleotide
cggacatgcgtcaagtcggggctgccacagccacgctcccccctggaaccccgctcgca

SEQ ID NO: 232041 - DNA, 57 bp, Artificial
  Synthetic oligonucleotide
aacccactgtaacgcgccacaaaattgcgcgccagtacgtacaatccgacataacga

SEQ ID NO: 232042 - DNA, 55 bp, Artificial
  Synthetic oligonucleotide
aataccgcggtgccaagtcgtggctcccggtcctcaataaaggagacgtgaagct

SEQ ID NO: 232043 - DNA, 59 bp, Artificial
  Synthetic oligonucleotide
tgccatactgtcctcggtcattggggtggtccttcgggcaagaggaagtgtcgcaactc

SEQ ID NO: 232044 - DNA, 60 bp, Artificial
  Synthetic oligonucleotide
tgcagtctatgtgcgtttacgacagccctttgtgcacatgaatggatgttatcccgacgc

SEQ ID NO: 232045 - DNA, 60 bp, Artificial
  Synthetic oligonucleotide
tgcaggcggcattcaggcatgattcggccttatgcagcgtcattttcctatccgaagagg

SEQ ID NO: 232046 - DNA, 58 bp, Artificial
  Synthetic oligonucleotide
aaccattcacaaaactcgccatcaacttcgatggaacggtttccgtctgctgtgtcga

SEQ ID NO: 232047 - DNA, 60 bp, Artificial
  Synthetic oligonucleotide
tgttgcgttttacgccctctggagatttcacgcagacataccggagattgtctttcataa

SEQ ID NO: 232048 - DNA, 57 bp, Artificial
  Synthetic oligonucleotide
cccgactgtatggttcgttgggccgacatgatagcgcaatcaaccgttcggggaatc

SEQ ID NO: 232049 - DNA, 60 bp, Artificial
  Synthetic oligonucleotide
tgcaatgcatgctttgcctgattggcgtgttgcggttacgtggtacaacacaaaagcatt

SEQ ID NO: 232050 - DNA, 60 bp, Artificial
  Synthetic oligonucleotide
tgcaagagccctcaccggacatggcgagagcgtgtgttcagagtggcgcagcgagtattc

SEQ ID NO: 232051 - DNA, 60 bp, Artificial
  Synthetic oligonucleotide
tgatggcgggggtcataggcccatcgcacagagttgtccgtacaatattgttggcatcgc

SEQ ID NO: 232052 - DNA, 60 bp, Artificial
  Synthetic oligonucleotide
aatgcttagcgaatataccgagcatattgcgatggctgcgtgactcttttggcccaccgg

SEQ ID NO: 232053 - DNA, 60 bp, Artificial
  Synthetic oligonucleotide
tcgaaagaggtagttgcgaatgagtctcattagcaattacggaattgcctaatcagggga

SEQ ID NO: 232054 - DNA, 53 bp, Artificial
  Synthetic oligonucleotide
tcggaccccgataccaccactcctacgggtgggcgaattcaccgaaacggctg

SEQ ID NO: 232055 - DNA, 60 bp, Artificial
  Synthetic oligonucleotide
ttaggcatataagcatcgtctgaattgaggatagccagatagcttccgctagatttggcc

SEQ ID NO: 232056 - DNA, 57 bp, Artificial
  Synthetic oligonucleotide
cgcccaggagacacgttggctggtggtgtccgagccgctcgacaagtaacggcacct

SEQ ID NO: 232057 - DNA, 60 bp, Artificial
  Synthetic oligonucleotide
tggaaggtctgcgctcatacgcactacgtatagcaaatctacacctgatccggctaccgt

SEQ ID NO: 232058 - DNA, 60 bp, Artificial
  Synthetic oligonucleotide
ttataagaaatcacggaacacgcataatggataatttgcggatcgaggcaacctcctgct

SEQ ID NO: 232059 - DNA, 60 bp, Artificial
  Synthetic oligonucleotide
cccgactatcacaggaaggccgccgtaacatgagcaagcgtgacatgagtgggcgtgaca

SEQ ID NO: 232060 - DNA, 60 bp, Artificial
  Synthetic oligonucleotide
ttgggactggtccgtgatccagtgtgcgagctggatcttttcgaacggctgatgctttga

SEQ ID NO: 232061 - DNA, 60 bp, Artificial
  Synthetic oligonucleotide
acataaacgtcggcctcctgatagtgagcttccaacatggccggctctagagagccaatc

SEQ ID NO: 232062 - DNA, 60 bp, Artificial
  Synthetic oligonucleotide
tcggtcattgtcgaattctcctgttccagaggccgatggtcagaacggggccttcatcac

SEQ ID NO: 232063 - DNA, 58 bp, Artificial
  Synthetic oligonucleotide
cctctcgctatgtttttgtaccgctatggtgccacagggtttgtgcaaccgtgtccta

SEQ ID NO: 232064 - DNA, 59 bp, Artificial
  Synthetic oligonucleotide
gtcagacatgtagggggattgccttttctcaggaagatcgtccaggcttgatcgacggc

SEQ ID NO: 232065 - DNA, 56 bp, Artificial
  Synthetic oligonucleotide
ctggtagaaccgaggagggaagtgctcccctcatcgggtggagcgggggaatagca

SEQ ID NO: 232066 - DNA, 54 bp, Artificial
  Synthetic oligonucleotide
acaaaccgcccgaacgaggtgagtgtgcgctcactttcctaatatgcccggttt

SEQ ID NO: 232067 - DNA, 58 bp, Artificial
  Synthetic oligonucleotide
tgtcctcggtcattggggtggtccttcgggcaagaggaagtgtcgcaactccactcta

SEQ ID NO: 232068 - DNA, 59 bp, Artificial
  Synthetic oligonucleotide
agtgtcaaggtgttgatcggaccgttggtatcacagccgaaaccaatatcatcaaagca

SEQ ID NO: 232069 - DNA, 54 bp, Artificial
  Synthetic oligonucleotide
aactgaaccggggcgggccaaagcgctcctgaacaaacactctcctgaacgatt

SEQ ID NO: 232070 - DNA, 60 bp, Artificial
  Synthetic oligonucleotide
gtaaatctagctggagccttgacagacattgagctaatggtctgcattgctggtgccagc

SEQ ID NO: 232071 - DNA, 50 bp, Artificial
  Synthetic oligonucleotide
aataggtcagggaaaccccggttccgggctgacttcccgcgccccacttg

SEQ ID NO: 232072 - DNA, 59 bp, Artificial
  Synthetic oligonucleotide
cgacataccattgatagtcaatcaaacttatgctactttcaggtgcattcaatgcgatg

SEQ ID NO: 232073 - DNA, 57 bp, Artificial
  Synthetic oligonucleotide
cgcaaaattggccatccagaaggatgagcctacctccttattaagtattcttgtcgt

SEQ ID NO: 232074 - DNA, 58 bp, Artificial
  Synthetic oligonucleotide
cattgttgcgccgtttgcgagggattacgggaaaattcatacatccttccatctcaaa

SEQ ID NO: 232075 - DNA, 50 bp, Artificial
  Synthetic oligonucleotide
aacccccggtttccttaggctacggtgcggccgaacctttgaaaggatca

SEQ ID NO: 232076 - DNA, 59 bp, Artificial
  Synthetic oligonucleotide
ctaattgtcgtatctgttaggagcacagcgttgctgttcacttcaatatgtgcttcgtg

SEQ ID NO: 232077 - DNA, 55 bp, Artificial
  Synthetic oligonucleotide
cgcataggtttcgcgggtgttaactctggttgatggagtggtgacgggcggtccg

SEQ ID NO: 232078 - DNA, 59 bp, Artificial
  Synthetic oligonucleotide
acagacgtctcaaacagacacccgcaaacgcgaacggtatcggttgcaggatgcagccg

SEQ ID NO: 232079 - DNA, 59 bp, Artificial
  Synthetic oligonucleotide
tgtggagtacgcgaccctgtttcatggcaaacgccagctcgtttggtcgcgaggactga

SEQ ID NO: 232080 - DNA, 58 bp, Artificial
  Synthetic oligonucleotide
ccgtcgtgatgttgatccacgttcctccttggaggggcgatgcataaatccgagtaca

SEQ ID NO: 232081 - DNA, 55 bp, Artificial
  Synthetic oligonucleotide
gtaaaccgctgttaacccgacttcggagccctgcctgccgctatccttgacttac

SEQ ID NO: 232082 - DNA, 58 bp, Artificial
  Synthetic oligonucleotide
aatgccgcctggaaacaacataagcgcacaactcaaacaacgattgtgaaactgccac

SEQ ID NO: 232083 - DNA, 58 bp, Artificial
  Synthetic oligonucleotide
ttggccgatatgtttgagagaatacggaatcgattgcctctccgacatatcgctcatg

SEQ ID NO: 232084 - DNA, 56 bp, Artificial
  Synthetic oligonucleotide
tgtccgccgccttaaggatggtctgacccatcaccggcctcccaaatggagaaggt

SEQ ID NO: 232085 - DNA, 58 bp, Artificial
  Synthetic oligonucleotide
tgaacctcatgaccagcttgggcatgccagtcacccgaaaggtcgcctgattacctct

SEQ ID NO: 232086 - DNA, 52 bp, Artificial
  Synthetic oligonucleotide
tcgtaacgttgggatgtcgtgcagtcgtttggaaccgccccccgatttttcc

SEQ ID NO: 232087 - DNA, 58 bp, Artificial
  Synthetic oligonucleotide
actgagcggaagcactcggaacttgggcgcagaggagtcccgccgtcatgacgataaa

SEQ ID NO: 232088 - DNA, 58 bp, Artificial
  Synthetic oligonucleotide
acgtcaagcattgccgctgtcgagtggcgcacaggcgggcacgtcttacgcgaacctg

SEQ ID NO: 232089 - DNA, 58 bp, Artificial
  Synthetic oligonucleotide
gcttccgatcattaacagcgttcctgcggagcgatttccgtcggggggcgggcacaga

SEQ ID NO: 232090 - DNA, 58 bp, Artificial
  Synthetic oligonucleotide
taagtgcatgcgatgcactgataacctaggtaatacgcactggaatgcattcttcata

SEQ ID NO: 232091 - DNA, 58 bp, Artificial
  Synthetic oligonucleotide
tctagcggttggcggggccatcatgagtgtaacgcgcaacaccgttcgtaacggattg

SEQ ID NO: 232092 - DNA, 60 bp, Artificial
  Synthetic oligonucleotide
ggttacgatgctggaagatcgatggggcgcacaactactctcttaaattattggactgcc

SEQ ID NO: 232093 - DNA, 53 bp, Artificial
  Synthetic oligonucleotide
tctgccaagtcatggtcggggaacctcaacgacgggaacaacgggaaggggcg

SEQ ID NO: 232094 - DNA, 55 bp, Artificial
  Synthetic oligonucleotide
aagtcggggccagaggctgataattgcaggttgggggacggtaaccaaagctgcg

SEQ ID NO: 232095 - DNA, 55 bp, Artificial
  Synthetic oligonucleotide
gcccataccgccgtcactatggtccccgtccgcacgtggcggccttccgtcgtcc

SEQ ID NO: 232096 - DNA, 54 bp, Artificial
  Synthetic oligonucleotide
acgttcgaatggggtggacggattgaacggaagggacggacctgttccatgatg

SEQ ID NO: 232097 - DNA, 57 bp, Artificial
  Synthetic oligonucleotide
accgagcatattgcgatggctgcgtgactcttttggcccaccggcctgagggaaatt

SEQ ID NO: 232098 - DNA, 55 bp, Artificial
  Synthetic oligonucleotide
acggaagctgcgtatcattccaacaccatataacggccgacgttaaacgggaagc

SEQ ID NO: 232099 - DNA, 54 bp, Artificial
  Synthetic oligonucleotide
aggccaaacccctggtactatgagatggcggagcccggatttaatcaccggttg

SEQ ID NO: 232100 - DNA, 49 bp, Artificial
  Synthetic oligonucleotide
gcctaatagcccctttggaattcgttcgggtttcaattggggggaccgt

SEQ ID NO: 232101 - DNA, 57 bp, Artificial
  Synthetic oligonucleotide
caatatggaatcccaagctacagcgttcgggatcgctgttgtctctaggacctccgg

SEQ ID NO: 232102 - DNA, 56 bp, Artificial
  Synthetic oligonucleotide
tcgacgggttatcggtgcccgaccttacccaatggtgccagcatgttcgggcgacg

SEQ ID NO: 232103 - DNA, 60 bp, Artificial
  Synthetic oligonucleotide
agacatagggcgcggtcccaatgttcatgcacacatgcgatgtcatacatcagaggtctt

SEQ ID NO: 232104 - DNA, 52 bp, Artificial
  Synthetic oligonucleotide
cgtggaagcaccccccggaatggagcccttcaacggcccctcttagaacgga

SEQ ID NO: 232105 - DNA, 57 bp, Artificial
  Synthetic oligonucleotide
agcttccaacatggccggctctagagagccaatcaagcggaccgccccaatcaaatc

SEQ ID NO: 232106 - DNA, 55 bp, Artificial
  Synthetic oligonucleotide
cgttgcactgggagacgtccgaatgtctgctgaacgtttgtcgggcgaccgtttt

SEQ ID NO: 232107 - DNA, 57 bp, Artificial
  Synthetic oligonucleotide
ctccagctatgtgcggctggaccgccggtccgagagtttccgtgactatcttagaac

SEQ ID NO: 232108 - DNA, 57 bp, Artificial
  Synthetic oligonucleotide
gtccatctcgtgtctgacacattcccggtttttgtctgactcatcgtcgcccccaat

SEQ ID NO: 232109 - DNA, 57 bp, Artificial
  Synthetic oligonucleotide
ttctggttaacaccgggggcgggagctgaatgggccaagcggggctagcgcggagca

SEQ ID NO: 232110 - DNA, 57 bp, Artificial
  Synthetic oligonucleotide
aaccactcccctggcccgcacagcttgacgcaagtgtgacggtaccctcctgatgga

SEQ ID NO: 232111 - DNA, 48 bp, Artificial
  Synthetic oligonucleotide
gggcccagggccttttttgcgggggtttccggcgtttgaacaagttgg

SEQ ID NO: 232112 - DNA, 52 bp, Artificial
  Synthetic oligonucleotide
tctggaccgttcgttccaacggattatagtggacgaatcgttcggtaaaacc

SEQ ID NO: 232113 - DNA, 56 bp, Artificial
  Synthetic oligonucleotide
ccctctttcgaacgggtgacaaattgcgctggacaagcgctcccgttcttcctata

SEQ ID NO: 232114 - DNA, 56 bp, Artificial
  Synthetic oligonucleotide
ccgcgtgcctttggaagacggactgcaacgcactgtcgcgtactaccgccggtatg

SEQ ID NO: 232115 - DNA, 59 bp, Artificial
  Synthetic oligonucleotide
ggtacggagggcggatggttcgtgcctccgatcgttgcaacaatcctatggtcttgaga

SEQ ID NO: 232116 - DNA, 56 bp, Artificial
  Synthetic oligonucleotide
tgcgctcctttgttggggcgcgaaacaaagtcaacgattatgccttcaggggccgg

SEQ ID NO: 232117 - DNA, 55 bp, Artificial
  Synthetic oligonucleotide
acccgggatattgtactgtgacggagttggaggtctgtagcggtcagatttccgt

SEQ ID NO: 232118 - DNA, 56 bp, Artificial
  Synthetic oligonucleotide
tgtcggcaaatttccctatggccttccggtcaagctcggaaaatattcttgaggag

SEQ ID NO: 232119 - DNA, 56 bp, Artificial
  Synthetic oligonucleotide
gtttgaaaggtccggcttgcgccggaaccacctaatgacaatagcaattcgccgca

SEQ ID NO: 232120 - DNA, 56 bp, Artificial
  Synthetic oligonucleotide
ggactgctgccgttaacccttaatcgcaagctcggaagggttggtcagctctatct

SEQ ID NO: 232121 - DNA, 56 bp, Artificial
  Synthetic oligonucleotide
gcaatcagcattgaaatcgcggctggtcggcaacattcgaaaaaatggcgttatcg

SEQ ID NO: 232122 - DNA, 56 bp, Artificial
  Synthetic oligonucleotide
tgtgtgagacgaacccgcaatcatcgggcttggcccggattatgtgagacgcggtt

SEQ ID NO: 232123 - DNA, 56 bp, Artificial
  Synthetic oligonucleotide
tcgcaggtgcggtacatccaccttggtccagtccgattccgggttatggatgaact

SEQ ID NO: 232124 - DNA, 56 bp, Artificial
  Synthetic oligonucleotide
ggagagaaacgtatacggaatgagttgctatcgctaatccaatgagcgtgattagc

SEQ ID NO: 232125 - DNA, 56 bp, Artificial
  Synthetic oligonucleotide
tagtatggctgtcatcattcgacgtcctgcggagaatcttagtggagagtgagttg

SEQ ID NO: 232126 - DNA, 57 bp, Artificial
  Synthetic oligonucleotide
ggggtagtcaccaagttcgatcacccgttcttgtgaccactgatgagagggggcact

SEQ ID NO: 232127 - DNA, 56 bp, Artificial
  Synthetic oligonucleotide
ccctacgccgagttgcggggaagcggatcgggagataccaatccttacgatgccac

SEQ ID NO: 232128 - DNA, 55 bp, Artificial
  Synthetic oligonucleotide
caggttggcagctataccacttctctttggggcttcctcggtctgtcctaagctt

SEQ ID NO: 232129 - DNA, 55 bp, Artificial
  Synthetic oligonucleotide
cgccgggattgtaccctcgcgagaacgtcgcgtagatattcgcctcgggagtcac

SEQ ID NO: 232130 - DNA, 55 bp, Artificial
  Synthetic oligonucleotide
cgccttatcagcggagggcggccctttcccttcgcactatgcaaacaccaccgag

SEQ ID NO: 232131 - DNA, 55 bp, Artificial
  Synthetic oligonucleotide
ctgcggccgatgaaaccaactctattccggcaagcaccaaggcgcgtcttcggca

SEQ ID NO: 232132 - DNA, 55 bp, Artificial
  Synthetic oligonucleotide
catcaagttgtcgacggggtgttcccaggctgtgatgattgcaggacgcgctgcg

SEQ ID NO: 232133 - DNA, 55 bp, Artificial
  Synthetic oligonucleotide
ctgcccgctcatgtgacgatcgccttcctgtggtattccggccggtcccaaagcc

SEQ ID NO: 232134 - DNA, 55 bp, Artificial
  Synthetic oligonucleotide
ctcttctgcgctatgagggtagaccgcaagggaatggactggcgatgccggtacc

SEQ ID NO: 232135 - DNA, 55 bp, Artificial
  Synthetic oligonucleotide
catcgggactggcctggaacctcaatacctcttgctggccctaggaagcttctgg

SEQ ID NO: 232136 - DNA, 55 bp, Artificial
  Synthetic oligonucleotide
catcgggtccctcccgactgccgaattatacaatttcgaggataatcctagggcg

SEQ ID NO: 232137 - DNA, 60 bp, Artificial
  Synthetic oligonucleotide
gggcagactttcaaacgatcgtcatatgcggctggttacacttgagtgagatcgattgca

SEQ ID NO: 232138 - DNA, 55 bp, Artificial
  Synthetic oligonucleotide
catcggttgttcaggcaatctggggaccatgcggcgttccggcggatgttgggtc

SEQ ID NO: 232139 - DNA, 55 bp, Artificial
  Synthetic oligonucleotide
catctcgacgcccgaccctgcccgctgcacgttcattccgaccagggaaagatag

SEQ ID NO: 232140 - DNA, 55 bp, Artificial
  Synthetic oligonucleotide
ctcgttatctcgggcttctgcaaggcaagccagggcgcggacactgagatcctgg

SEQ ID NO: 232141 - DNA, 55 bp, Artificial
  Synthetic oligonucleotide
ctcggtgctcagcttcgcagaacttcgctctgcaggaagtttgttaacgctacgt

SEQ ID NO: 232142 - DNA, 55 bp, Artificial
  Synthetic oligonucleotide
caacggttctcatcgtgcatggtggcccctggatgcgtgacgtgtatgggtacgg

SEQ ID NO: 232143 - DNA, 55 bp, Artificial
  Synthetic oligonucleotide
caagcggacgagggtcctattcagacgcttcatatcagtgatgccacatattctg

SEQ ID NO: 232144 - DNA, 55 bp, Artificial
  Synthetic oligonucleotide
cgcagaaagatcggaggtatagaagagacacacagactttgaaccccggagcccc

SEQ ID NO: 232145 - DNA, 55 bp, Artificial
  Synthetic oligonucleotide
cgcacgaatttaccatcgaaccaagcaccaggatctagcggttggcggggccatc

SEQ ID NO: 232146 - DNA, 55 bp, Artificial
  Synthetic oligonucleotide
cgcattcgaatgaggtccttaggagaccagtccgaacggctgctggtacgccttc

SEQ ID NO: 232147 - DNA, 55 bp, Artificial
  Synthetic oligonucleotide
caatcatccaaatcgcccatgcattcagcatggaatcaggcggacgccggctaac

SEQ ID NO: 232148 - DNA, 60 bp, Artificial
  Synthetic oligonucleotide
gggagacgtgccaacgagtgagcggatgttgcactggaccatcaagcccgcctctgcctc

SEQ ID NO: 232149 - DNA, 54 bp, Artificial
  Synthetic oligonucleotide
gaacccgagggccattctcggttttacacggctgtaggccaagggaggtccagc

SEQ ID NO: 232150 - DNA, 55 bp, Artificial
  Synthetic oligonucleotide
gaaatggtccatccggaacggggcggacacattgacgcgcatcagtccgatgcgg

SEQ ID NO: 232151 - DNA, 55 bp, Artificial
  Synthetic oligonucleotide
cacaaggtttggacagtcttgctaactttcgcgcttgatcgcgagtacatccagt

SEQ ID NO: 232152 - DNA, 55 bp, Artificial
  Synthetic oligonucleotide
cacacatctggcctggggattcgggctctatagcgcggcactggctatcagagcg

SEQ ID NO: 232153 - DNA, 55 bp, Artificial
  Synthetic oligonucleotide
cacatgcttttaccccgccattccgcaatgaatcaagggttcctgcaggaccgcc

SEQ ID NO: 232154 - DNA, 55 bp, Artificial
  Synthetic oligonucleotide
cgccatcaacttcgatggaacggtttccgtctgctgtgtcgactggagccacagc

SEQ ID NO: 232155 - DNA, 55 bp, Artificial
  Synthetic oligonucleotide
caccaatcattattgcgtcgatgcgcattgagaactcagggacgacactcgtcca

SEQ ID NO: 232156 - DNA, 55 bp, Artificial
  Synthetic oligonucleotide
gaaaatagctaggcgtcaagattgggatcaggaacgatatgccgtcgattgcccc

SEQ ID NO: 232157 - DNA, 55 bp, Artificial
  Synthetic oligonucleotide
ctttgtcagctcttaaagcaatgcctttactgtttctgtaacgctcgtactttcg

SEQ ID NO: 232158 - DNA, 53 bp, Artificial
  Synthetic oligonucleotide
cagggttaccccgcgaggggagcccataatcgttatcagtcccgtatccgtcc

SEQ ID NO: 232159 - DNA, 52 bp, Artificial
  Synthetic oligonucleotide
ctaggggaagagtatagggaggaatcctaacaatcggtaacgcaaactagtt

SEQ ID NO: 232160 - DNA, 54 bp, Artificial
  Synthetic oligonucleotide
cgaccggcccgccttaagccaactgttccgttgccttatccgaacgagccctca

SEQ ID NO: 232161 - DNA, 50 bp, Artificial
  Synthetic oligonucleotide
cttaaggttcgcaccctaaatgtaaaggaaaccctaccactatcgaaatt

SEQ ID NO: 232162 - DNA, 55 bp, Artificial
  Synthetic oligonucleotide
cttcgagccagtccccacaacggtgcctatgacgttcggctgtgacaaatggacg

SEQ ID NO: 232163 - DNA, 55 bp, Artificial
  Synthetic oligonucleotide
cttcttgaatgcactatgaacggaaaatccgtaatgcgcattagtttccgaaaga

SEQ ID NO: 232164 - DNA, 55 bp, Artificial
  Synthetic oligonucleotide
cagagtgcgccgttgacggctttctccttgacgctcgggaatgcttgcggtggga

SEQ ID NO: 232165 - DNA, 55 bp, Artificial
  Synthetic oligonucleotide
cagaggctccgcgattcactgcggaattatgacggtgcgatcgcgagtattcgat

SEQ ID NO: 232166 - DNA, 55 bp, Artificial
  Synthetic oligonucleotide
cgagattgacgtcgccttcggaacggtcggtccgcatcggagtttccttttgtca

SEQ ID NO: 232167 - DNA, 53 bp, Artificial
  Synthetic oligonucleotide
cacggaaaacggcaaccgtattgcaaagatgcgggacgggtttcggtacaatc

SEQ ID NO: 232168 - DNA, 55 bp, Artificial
  Synthetic oligonucleotide
cacgacttggatcgattgccctaatgtaagttgtaggctttcgctcccaagtttt

SEQ ID NO: 232169 - DNA, 55 bp, Artificial
  Synthetic oligonucleotide
cacgacataacaaatcggccaaaaggttagcgagtccatagcggcataagccgcc

SEQ ID NO: 232170 - DNA, 56 bp, Artificial
  Synthetic oligonucleotide
ctaggtgagtccgcgagtcgcatcgaatcttccttacagggtgggggaaacagcct

SEQ ID NO: 232171 - DNA, 55 bp, Artificial
  Synthetic oligonucleotide
cttggttcatccttatccgcaacagtcagtcgcgcgccaaacagtcaggcgaacg

SEQ ID NO: 232172 - DNA, 55 bp, Artificial
  Synthetic oligonucleotide
caccgttacgcaaggtgccgtgcccattgcatccttctcccactccgggattggg

SEQ ID NO: 232173 - DNA, 55 bp, Artificial
  Synthetic oligonucleotide
cgaggaggaccattgagtgaccaggcgatctgcggacatttcaccgatgaatcgg

SEQ ID NO: 232174 - DNA, 55 bp, Artificial
  Synthetic oligonucleotide
cttgtcgatcttaggcattgcgcatcccttgtgatggttggttcgataaggctcc

SEQ ID NO: 232175 - DNA, 55 bp, Artificial
  Synthetic oligonucleotide
ctttctgccatagtgccggcccgccgcagaggccgttcaaacgtgataggcgcgc

SEQ ID NO: 232176 - DNA, 55 bp, Artificial
  Synthetic oligonucleotide
cgcccctgccggatcttatccatgacgaaccggttgggaccagagaactcatggt

SEQ ID NO: 232177 - DNA, 55 bp, Artificial
  Synthetic oligonucleotide
ccgctgtacgttctgtcctaccggagaccttgatatgctccgtacggttggacga

SEQ ID NO: 232178 - DNA, 55 bp, Artificial
  Synthetic oligonucleotide
cggccgcatgttgccccggaattgtcatagccctttggaaatatcgccgtgcggg

SEQ ID NO: 232179 - DNA, 55 bp, Artificial
  Synthetic oligonucleotide
ccgatctttagactgttaagtcttagcgccgttcttgcgatgcgaaaataatgtg

SEQ ID NO: 232180 - DNA, 53 bp, Artificial
  Synthetic oligonucleotide
ccgatccaaattccttagtacgaaattatactccggaaattcgcgttgacgga

SEQ ID NO: 232181 - DNA, 58 bp, Artificial
  Synthetic oligonucleotide
ggctccgttcggctgtcagggtcgtgctcatggtttacacctgcccggagaggagacg

SEQ ID NO: 232182 - DNA, 55 bp, Artificial
  Synthetic oligonucleotide
cggcacatgaaatcagccgtgttgttctattcatgttctcgcgaacgacagtcag

SEQ ID NO: 232183 - DNA, 55 bp, Artificial
  Synthetic oligonucleotide
ccgataattgtccgaccactcaacaagtttcgttcaaggggtccctgaacatgcg

SEQ ID NO: 232184 - DNA, 55 bp, Artificial
  Synthetic oligonucleotide
cggtgcggtaagcggccctgtcgtgtcgattgttcttggttgagagggtgtcggc

SEQ ID NO: 232185 - DNA, 55 bp, Artificial
  Synthetic oligonucleotide
ccgacctaattcgtggcattgtcttgaggcacaaaggtggggcacaatggcctcg

SEQ ID NO: 232186 - DNA, 55 bp, Artificial
  Synthetic oligonucleotide
ccgaccgtgatgttgtaaccacgaacggcaaacacctgaccttgatgaatcctgc

SEQ ID NO: 232187 - DNA, 53 bp, Artificial
  Synthetic oligonucleotide
cggtggtttcccgacggaaacgcggtttcgtggaagcaaatcgcctgctcgcc

SEQ ID NO: 232188 - DNA, 55 bp, Artificial
  Synthetic oligonucleotide
cccgtttgccccatcgtcctcatgtgacgctaaatcccgaggtcgcgtttccgcc

SEQ ID NO: 232189 - DNA, 55 bp, Artificial
  Synthetic oligonucleotide
cggactggagcagcgtaagccaagccggaagggatgttgaccgaacgaactttcg

SEQ ID NO: 232190 - DNA, 55 bp, Artificial
  Synthetic oligonucleotide
cccgtgcactccgcgcattgactcttagggtcacccggcttatacacgtccgctc

SEQ ID NO: 232191 - DNA, 55 bp, Artificial
  Synthetic oligonucleotide
cgtatgtgcgcaaggaccaagcggaaacatccgtactgtttgaactcatcgccca

SEQ ID NO: 232192 - DNA, 55 bp, Artificial
  Synthetic oligonucleotide
ggcgcgaacctttggggacaagaatgttgcgaccgtgatagccgaaagtgtcccg

SEQ ID NO: 232193 - DNA, 55 bp, Artificial
  Synthetic oligonucleotide
cgtcatagtgaggcggctttgcaacagcgacgagttgtcgcatggactggaactc

SEQ ID NO: 232194 - DNA, 54 bp, Artificial
  Synthetic oligonucleotide
cccgtaccaagccctggagatgttgggtttgagggtcgatgtagtctgtcccgg

SEQ ID NO: 232195 - DNA, 54 bp, Artificial
  Synthetic oligonucleotide
cggacatggaacctcctcaaacacggatgcccggcgaccgtagggcaacagggt

SEQ ID NO: 232196 - DNA, 55 bp, Artificial
  Synthetic oligonucleotide
cgtccgacgcgtgaatcgcacgcaaaatcaaaagaccggaccccatcggatgctc

SEQ ID NO: 232197 - DNA, 55 bp, Artificial
  Synthetic oligonucleotide
cgtcgattatccagccgagcaagggatgcgctgctttgacgggtttcatccccag

SEQ ID NO: 232198 - DNA, 55 bp, Artificial
  Synthetic oligonucleotide
ccgtcctccatcatgggcgaaccaagcttattcgattgtccaggaaactttgaac

SEQ ID NO: 232199 - DNA, 55 bp, Artificial
  Synthetic oligonucleotide
ccgtcccgcccgtgtcatatccgcgcgagaagattctagtgactcgcatgcagct

SEQ ID NO: 232200 - DNA, 55 bp, Artificial
  Synthetic oligonucleotide
ccgtccacgccctaacggatttggcatgctttgcgacggcttttgaagcggccct

SEQ ID NO: 232201 - DNA, 54 bp, Artificial
  Synthetic oligonucleotide
cgggaccggctaacatactacggatgaatgaccgggtctggtccactggacggg

SEQ ID NO: 232202 - DNA, 55 bp, Artificial
  Synthetic oligonucleotide
cgggcggttccatggcaccgatgatttgacttcgcctcaaccacaagagacgtcc

SEQ ID NO: 232203 - DNA, 54 bp, Artificial
  Synthetic oligonucleotide
aggcacgtggcaagtgtaacccggcaatgggagcccccaccagtcggggagacc

SEQ ID NO: 232204 - DNA, 55 bp, Artificial
  Synthetic oligonucleotide
ccggttgtcgcttctcgttcctgcgtgttacatctcagtagagattacgttcggc

SEQ ID NO: 232205 - DNA, 51 bp, Artificial
  Synthetic oligonucleotide
ccgggtggggaagccggttgggtatctagaccgaggaataggattggtccc

SEQ ID NO: 232206 - DNA, 55 bp, Artificial
  Synthetic oligonucleotide
ccgtctgtcatggggttttcgtgtgaccccttcgtgacatccaccagatgttgag

SEQ ID NO: 232207 - DNA, 55 bp, Artificial
  Synthetic oligonucleotide
cggctcatacatcacgccttgggaaacgactcatgagacgaattttcaagctcgc

SEQ ID NO: 232208 - DNA, 55 bp, Artificial
  Synthetic oligonucleotide
ccgggaggccaaacagtgagtcgggcattgcgacctcatcttggatcaggacgtg

SEQ ID NO: 232209 - DNA, 55 bp, Artificial
  Synthetic oligonucleotide
ccggcttgagatattgaaagatcacattccatacgagttagtctgcagattcccc

SEQ ID NO: 232210 - DNA, 55 bp, Artificial
  Synthetic oligonucleotide
cggcgaagacggcaaatagaccacgaacaaagggccatacgccagagggatagcc

SEQ ID NO: 232211 - DNA, 55 bp, Artificial
  Synthetic oligonucleotide
ccgttggatgggtgatagcgctgttgatactaactgcggcgtgctcacgctagct

SEQ ID NO: 232212 - DNA, 55 bp, Artificial
  Synthetic oligonucleotide
cgggttggcgctcagaacgtcatggacaagcagttgaatgacgccatgggtcttg

SEQ ID NO: 232213 - DNA, 53 bp, Artificial
  Synthetic oligonucleotide
cggtaccttcacgcgatgttcgttgctaacctttgattaacgaagaccccacc

SEQ ID NO: 232214 - DNA, 60 bp, Artificial
  Synthetic oligonucleotide
gtcttgctgtatggtaccggatcacagtctgccggctcgtatggctccgcaaccggcgat

SEQ ID NO: 232215 - DNA, 60 bp, Artificial
  Synthetic oligonucleotide
tccatgatctggccccatttctgttgaattacttcgcagggggtgcagggtgccaatgtt

SEQ ID NO: 232216 - DNA, 55 bp, Artificial
  Synthetic oligonucleotide
ccggatgattacgggataaatcacgtattttgggaaagagcgttgcaggttctgc

SEQ ID NO: 232217 - DNA, 55 bp, Artificial
  Synthetic oligonucleotide
ccggaggggatcgcttcggaggggcatcaggatttagcatcgcgcgtgccggaca

SEQ ID NO: 232218 - DNA, 55 bp, Artificial
  Synthetic oligonucleotide
ccgcttccgctataagggacgcctcttaccgggacggataggtggagtcgcgcat

SEQ ID NO: 232219 - DNA, 55 bp, Artificial
  Synthetic oligonucleotide
cccaggatgatatcgttccctgtaccacgttgataccgttccggtgtgggcccgc

SEQ ID NO: 232220 - DNA, 55 bp, Artificial
  Synthetic oligonucleotide
cgcggcagggttcacaggtctttccagccagctcttggtgtgtcgccatatcgcg

SEQ ID NO: 232221 - DNA, 55 bp, Artificial
  Synthetic oligonucleotide
cgcggcaacaatattgtcagacctcttaacctcggtaatgcgcgcgctattgacc

SEQ ID NO: 232222 - DNA, 55 bp, Artificial
  Synthetic oligonucleotide
cgaaccccgacatccgggcctgaagacggttcctgcacgaggttttcatgacgcg

SEQ ID NO: 232223 - DNA, 55 bp, Artificial
  Synthetic oligonucleotide
cgaaggcgccggtcaacacggatcgaaagggatgggtcgatcatgctgagtctcg

SEQ ID NO: 232224 - DNA, 55 bp, Artificial
  Synthetic oligonucleotide
ccatgctccgtggagcgacgtgcatttaaggatgggagagctccgtgactggtaa

SEQ ID NO: 232225 - DNA, 55 bp, Artificial
  Synthetic oligonucleotide
ccatctgcgatccgaaggtgtcctcaatgatgcgtactgccgccttcgtctcatt

SEQ ID NO: 232226 - DNA, 60 bp, Artificial
  Synthetic oligonucleotide
tcatcggcagtgcctgtctgccaaacgttccgcgcatacggtccattcggctttcccaga

SEQ ID NO: 232227 - DNA, 54 bp, Artificial
  Synthetic oligonucleotide
ccatcgagacaatgtccactaacgttattggtactaacgtagttttggaggcgt

SEQ ID NO: 232228 - DNA, 55 bp, Artificial
  Synthetic oligonucleotide
ccatcatccattaggctgtccccatcaccttgaatcacgtggctttctcgccccg

SEQ ID NO: 232229 - DNA, 55 bp, Artificial
  Synthetic oligonucleotide
cgcgacggcagataattaaccgttgctgtaagacctaagcgatttctcagagttt

SEQ ID NO: 232230 - DNA, 55 bp, Artificial
  Synthetic oligonucleotide
cgaagttgtcatacgaatccgcagaatgaggccatcgcaccctagtgtgagtccc

SEQ ID NO: 232231 - DNA, 55 bp, Artificial
  Synthetic oligonucleotide
ccataaagcctttccccacatccaaagacacccatccaagggacgaggtgcctca

SEQ ID NO: 232232 - DNA, 55 bp, Artificial
  Synthetic oligonucleotide
ccagtatcgtccggactctcggaacatcctcacgtcggtacgcgctcaggcgatc

SEQ ID NO: 232233 - DNA, 50 bp, Artificial
  Synthetic oligonucleotide
ctccctcggcccgggtttacgccttcgaaccccacccgatcacctttgga

SEQ ID NO: 232234 - DNA, 55 bp, Artificial
  Synthetic oligonucleotide
ctccgctctgtaaaatccccttcgcaggaaggctgcctccgattgccgaccaacc

SEQ ID NO: 232235 - DNA, 55 bp, Artificial
  Synthetic oligonucleotide
ccacgcttgcagcggatagaagatttccggacgcccgttatcctctgcccgcctc

SEQ ID NO: 232236 - DNA, 55 bp, Artificial
  Synthetic oligonucleotide
cgaatgagcactcggcctaggccacgcgtccggggcaagaagggtgggcttatga

SEQ ID NO: 232237 - DNA, 60 bp, Artificial
  Synthetic oligonucleotide
tcagtctggaacattcatgggagtcgtctgcgaaaaagcccagggcgctcgtccggaagc

SEQ ID NO: 232238 - DNA, 55 bp, Artificial
  Synthetic oligonucleotide
ccaagcttatccgactgtccgggaaacggggaccagctcacctcagccgaggcaa

SEQ ID NO: 232239 - DNA, 55 bp, Artificial
  Synthetic oligonucleotide
cgcgacgacgatttgcttcacgatgacgatcttagggcgatgtgcggagcccctg

SEQ ID NO: 232240 - DNA, 55 bp, Artificial
  Synthetic oligonucleotide
ctcggggcattagccaccacgggcttaacgcaatggctctcctcaatgaccgagg

SEQ ID NO: 232241 - DNA, 55 bp, Artificial
  Synthetic oligonucleotide
cgtctgaattgaggatagccagatagcttccgctagatttggccaagccctcgtt

SEQ ID NO: 232242 - DNA, 55 bp, Artificial
  Synthetic oligonucleotide
cgtgccagctgggcggaaatgaagccgcatcaagcgaccgatctgagtggctcgt

SEQ ID NO: 232243 - DNA, 55 bp, Artificial
  Synthetic oligonucleotide
cccgatgacaccttccgggtcggctaccaaagcgccatgcaagagacatggccgt

SEQ ID NO: 232244 - DNA, 55 bp, Artificial
  Synthetic oligonucleotide
cctgattcgaccaggacgctttgatgtaaatcatatcggagtgtgcggagcggtg

SEQ ID NO: 232245 - DNA, 55 bp, Artificial
  Synthetic oligonucleotide
cctggtcgcgcgtcttggtcgcaccggctgagtagtaagcctgccttgacattgg

SEQ ID NO: 232246 - DNA, 55 bp, Artificial
  Synthetic oligonucleotide
cggacatgcctttgacgaaaggcggacgcacccttacattcgtcattgtgtcgtc

SEQ ID NO: 232247 - DNA, 55 bp, Artificial
  Synthetic oligonucleotide
cgtggcgggcatctctttggttatcaacggcggtggactgagacaataccacttc

SEQ ID NO: 232248 - DNA, 60 bp, Artificial
  Synthetic oligonucleotide
tatgcctctgtcccgcagaggattcgctcattcatcgagcgaacattgcagttcacatgc

SEQ ID NO: 232249 - DNA, 55 bp, Artificial
  Synthetic oligonucleotide
cccgaaacgtctgcgactgcctgaagcaacccatcgccgttacgcggtcgtccaa

SEQ ID NO: 232250 - DNA, 55 bp, Artificial
  Synthetic oligonucleotide
ctacagacgggaagtctagcacttccgtatcaatggagtattaacgcaaggcccc

SEQ ID NO: 232251 - DNA, 55 bp, Artificial
  Synthetic oligonucleotide
ccttcgatagccagactgtcagaagccgcggcgaaccgcattgtggatctcgccc

SEQ ID NO: 232252 - DNA, 55 bp, Artificial
  Synthetic oligonucleotide
ctacatgccgaacgtgtttggaacggtggatcgcaccatggcgggtccggacctg

SEQ ID NO: 232253 - DNA, 53 bp, Artificial
  Synthetic oligonucleotide
cggacaaattcgcggacatacccatgaccgttaaagaggtatttgtcccaccc

SEQ ID NO: 232254 - DNA, 55 bp, Artificial
  Synthetic oligonucleotide
ctatacgaatcccgctgtccggagaccgtccggaggtgcgacgccgttccaaaga

SEQ ID NO: 232255 - DNA, 55 bp, Artificial
  Synthetic oligonucleotide
ccccgaatgggcaggactcgtcttgcaacgcaaaactctatgtgctagttaaccg

SEQ ID NO: 232256 - DNA, 55 bp, Artificial
  Synthetic oligonucleotide
ctatctttccccctgtgagccaagtgagtgtttccaggtcggtttgatattcgct

SEQ ID NO: 232257 - DNA, 55 bp, Artificial
  Synthetic oligonucleotide
ccttgacagacattgagctaatggtctgcattgctggtgccagctcctttgtggg

SEQ ID NO: 232258 - DNA, 51 bp, Artificial
  Synthetic oligonucleotide
ccccaaagacgggacgccctcctattaaggggtagttcttcggacagcggc

SEQ ID NO: 232259 - DNA, 58 bp, Artificial
  Synthetic oligonucleotide
tatccggcctccgcaggatcggccgaaaagtgataattcacctcggccaaatcaggcc

SEQ ID NO: 232260 - DNA, 55 bp, Artificial
  Synthetic oligonucleotide
cctttaaagccgcatgccccgccagtaagcgagaggagctacagtccgagccagc

SEQ ID NO: 232261 - DNA, 55 bp, Artificial
  Synthetic oligonucleotide
cgcttcaactgataaaaggtgggtatcggccaaatggagccggctcatatacctc

SEQ ID NO: 232262 - DNA, 55 bp, Artificial
  Synthetic oligonucleotide
cccattcaacttttcgagccgcccaaggaaggtgaaagcgtctgatcccttgacc

SEQ ID NO: 232263 - DNA, 55 bp, Artificial
  Synthetic oligonucleotide
cccaggcaccgaatgcacgtttaatgaacgtcatcattcgcactccgcgacagag

SEQ ID NO: 232264 - DNA, 55 bp, Artificial
  Synthetic oligonucleotide
gttcatcggacgttgacggaaatagctgctgagataggtcagatgggacggcagg

SEQ ID NO: 232265 - DNA, 55 bp, Artificial
  Synthetic oligonucleotide
gttccttccaacgatcctcgaagctgggcggttcagcgcccctcgacaccagtga

SEQ ID NO: 232266 - DNA, 55 bp, Artificial
  Synthetic oligonucleotide
gttcgtgttcaatcatatggaagagtgtaccgcgctgtctacccgtggatgtccc

SEQ ID NO: 232267 - DNA, 53 bp, Artificial
  Synthetic oligonucleotide
actccaaagacggggagtgaccgccccttacgatggggagtaggacaatccgc

SEQ ID NO: 232268 - DNA, 54 bp, Artificial
  Synthetic oligonucleotide
acgtcgtgccgaagaccaagaggccgaccgagtgagccgggctttcctttccac

SEQ ID NO: 232269 - DNA, 55 bp, Artificial
  Synthetic oligonucleotide
acgtcgtccgcgggcacccaatcgctgaccatcgacactacggcaccgaacgctc

SEQ ID NO: 232270 - DNA, 57 bp, Artificial
  Synthetic oligonucleotide
acctcgaagcagcccgtaatacgcggaatgttaggcattatgcggccctcgcttggt

SEQ ID NO: 232271 - DNA, 55 bp, Artificial
  Synthetic oligonucleotide
acgtcggttggcctttgttcagagcgcgatgccgttagaaggccagatccgtgcg

SEQ ID NO: 232272 - DNA, 55 bp, Artificial
  Synthetic oligonucleotide
gttttcgagagtgcaaaggacgatcggacggtgaagacagtggctaaccactcag

SEQ ID NO: 232273 - DNA, 55 bp, Artificial
  Synthetic oligonucleotide
acggccacgagtctgaccggttgatggggtcacctttccgaacggagcaagaggc

SEQ ID NO: 232274 - DNA, 55 bp, Artificial
  Synthetic oligonucleotide
taacgccggcacgggagcgtgaccaactcggttggggaccggacctgatcggcca

SEQ ID NO: 232275 - DNA, 55 bp, Artificial
  Synthetic oligonucleotide
taaggtccaatcagatcgtggcaccccggaaccaaacggacagccgcggagagcg

SEQ ID NO: 232276 - DNA, 55 bp, Artificial
  Synthetic oligonucleotide
taatgctctagcgaaattcccagggcggacaatacgcccgtttcccaccatcccc

SEQ ID NO: 232277 - DNA, 55 bp, Artificial
  Synthetic oligonucleotide
tacggttcgacgtaacggttaagggcaccgagcagatttcgggtcatgtcggcag

SEQ ID NO: 232278 - DNA, 55 bp, Artificial
  Synthetic oligonucleotide
tagagctgacgctctcaaggtgatgacgcctatggctgacgattctggcgtccgg

SEQ ID NO: 232279 - DNA, 55 bp, Artificial
  Synthetic oligonucleotide
tagagtcgatccgtcacccctggactgagaggggttgtcccaaaggccacggacc

SEQ ID NO: 232280 - DNA, 52 bp, Artificial
  Synthetic oligonucleotide
tagtgtccaaacaacccttaatttcggattttgcggtgtcctatccggaaag

SEQ ID NO: 232281 - DNA, 55 bp, Artificial
  Synthetic oligonucleotide
ccggcgaacgcttgtaatttccgctgtacgttctgtcctaccggagaccttgata

SEQ ID NO: 232282 - DNA, 55 bp, Artificial
  Synthetic oligonucleotide
tcagaaccgttgacgatcctcagagcctttggtcgaggtttcgcccagtttcgat

SEQ ID NO: 232283 - DNA, 55 bp, Artificial
  Synthetic oligonucleotide
tccaatgacaagcgcgtgagcgcccggtattccaatgacaagcgcgtgagcgccc

SEQ ID NO: 232284 - DNA, 55 bp, Artificial
  Synthetic oligonucleotide
tcccaccgaatatggggataccagatccacgatcctgccaggaagacgcccggtc

SEQ ID NO: 232285 - DNA, 54 bp, Artificial
  Synthetic oligonucleotide
tccgaacaaacgcgcgtgcgaccgtccggaaaaccgaatggccggcttggagtc

SEQ ID NO: 232286 - DNA, 52 bp, Artificial
  Synthetic oligonucleotide
tccggagtgggggccaacgggcagacctgaacccgcccgttggataggaacg

SEQ ID NO: 232287 - DNA, 55 bp, Artificial
  Synthetic oligonucleotide
ggggtacgggctatgttcggcaactatatcccatcatggtcacagggatctccgg

SEQ ID NO: 232288 - DNA, 55 bp, Artificial
  Synthetic oligonucleotide
ggtagccgttccgtgtgaatctgtgcgcaacctttgatcaggacgaaggaagagt

SEQ ID NO: 232289 - DNA, 55 bp, Artificial
  Synthetic oligonucleotide
agcctttgcgatggatcctcccggagttgaaagcttgcatgcatgcgatctacac

SEQ ID NO: 232290 - DNA, 55 bp, Artificial
  Synthetic oligonucleotide
gtatggagagacgggatgagtcaggcggtgtgcgcgggtgccatgatgacctgca

SEQ ID NO: 232291 - DNA, 55 bp, Artificial
  Synthetic oligonucleotide
gtcatcgaagcacagttcaggtcgcttggcgatgatcccgtgacgcttgcgtcac

SEQ ID NO: 232292 - DNA, 57 bp, Artificial
  Synthetic oligonucleotide
tagccggaatatcaaaattacgcgacggcagataattaaccgttgctgtaagaccta

SEQ ID NO: 232293 - DNA, 55 bp, Artificial
  Synthetic oligonucleotide
gtcatgcgcctcctaccattggggatcgcactcgcatacttgtaagaccatgggg

SEQ ID NO: 232294 - DNA, 55 bp, Artificial
  Synthetic oligonucleotide
gtccggaagatggcccgatcgttgtgttcggcatgacggcgtgccttttccgaga

SEQ ID NO: 232295 - DNA, 55 bp, Artificial
  Synthetic oligonucleotide
gtcgcatgtcgaaccagcgacggttccctgtcgccagctcccattctccagacga

SEQ ID NO: 232296 - DNA, 55 bp, Artificial
  Synthetic oligonucleotide
agcaatcacccgaccgtacagccgccctaagcttagaataccaggatatgcggcg

SEQ ID NO: 232297 - DNA, 55 bp, Artificial
  Synthetic oligonucleotide
gtcggcgagtggcgacatatctgtgcgtagcggtcgccaactccgaacgagatga

SEQ ID NO: 232298 - DNA, 55 bp, Artificial
  Synthetic oligonucleotide
agcaaaaggtgaactccgtctggcctggacctgatgccgactatgccctaccggc

SEQ ID NO: 232299 - DNA, 55 bp, Artificial
  Synthetic oligonucleotide
agaggttaactcgacggtcggaaccgcactgataaggctctcgccgcactcgggg

SEQ ID NO: 232300 - DNA, 55 bp, Artificial
  Synthetic oligonucleotide
gtcggttgtcggacaggcctatcccgttggtagaaggcgcctcagcgatcgacca

SEQ ID NO: 232301 - DNA, 55 bp, Artificial
  Synthetic oligonucleotide
gtctaccaccaaggcgagcctttcgttcgtaggaagggactggcactgtcccctc

SEQ ID NO: 232302 - DNA, 55 bp, Artificial
  Synthetic oligonucleotide
gtctggtgcctattgaagctccagacagactccacgcttttggcttcccgtgcga

SEQ ID NO: 232303 - DNA, 60 bp, Artificial
  Synthetic oligonucleotide
accttccgcatgcggcatgtatgccagcacctgaacaggcgtttcactttaatggagggt

SEQ ID NO: 232304 - DNA, 55 bp, Artificial
  Synthetic oligonucleotide
gtgaaatgatccaccccgtattactacggacattcggtagggtgtcacgcgaccc

SEQ ID NO: 232305 - DNA, 55 bp, Artificial
  Synthetic oligonucleotide
gtgcactgaggcgggtggggcgtccttgacccacctcgcctaacccatttgggag

SEQ ID NO: 232306 - DNA, 55 bp, Artificial
  Synthetic oligonucleotide
gtggtggaccgcccttccaccttctgggattggtggcaagctaatgccgtcgaag

SEQ ID NO: 232307 - DNA, 55 bp, Artificial
  Synthetic oligonucleotide
acttgccagattgaggggacaatgccacatttgtcctcatgacaaattggacccc

SEQ ID NO: 232308 - DNA, 55 bp, Artificial
  Synthetic oligonucleotide
actgcaacgaaatgctggcctgatcacgcccgctcaagccgaagcccgtttgggc

SEQ ID NO: 232309 - DNA, 51 bp, Artificial
  Synthetic oligonucleotide
gtgtcgggttgacgtttcgttgctctacgaccggcggaaaccaccgttctt

SEQ ID NO: 232310 - DNA, 55 bp, Artificial
  Synthetic oligonucleotide
gtgttagtacccgattaaggctaacagacgagcctgcggaacaaggcgataccca

SEQ ID NO: 232311 - DNA, 53 bp, Artificial
  Synthetic oligonucleotide
tggcgggagcgcaacccttccaaagccgttccggactcgtaaccaacgaagcc

SEQ ID NO: 232312 - DNA, 55 bp, Artificial
  Synthetic oligonucleotide
tggctccagggtacgtctcacccgaatgaacatccggggctggagtcttcatcca

SEQ ID NO: 232313 - DNA, 55 bp, Artificial
  Synthetic oligonucleotide
tggtcgcggaccgcatcaggacagcgaatcgtccatctcgtgtctgacacattcc

SEQ ID NO: 232314 - DNA, 56 bp, Artificial
  Synthetic oligonucleotide
tacgggttgcgcgatagcttgcgtaaagatcgttttgatcccacgggtcgtttgcg

SEQ ID NO: 232315 - DNA, 55 bp, Artificial
  Synthetic oligonucleotide
tgtcctggtacatacttgattgataccaattcgcaactcggccaggagtctcgcc

SEQ ID NO: 232316 - DNA, 55 bp, Artificial
  Synthetic oligonucleotide
tgtctctccgttatgatcgcgcgggtcgtttttctcccgcacaggtccttcgaaa

SEQ ID NO: 232317 - DNA, 55 bp, Artificial
  Synthetic oligonucleotide
tgttcattgccccgagagaaccgaatgttatttggaacgcacggcgcccgaacgt

SEQ ID NO: 232318 - DNA, 55 bp, Artificial
  Synthetic oligonucleotide
tgtttgcctcgaccaccccgtgcagccatggactccgcaggcccggtcgccatat

SEQ ID NO: 232319 - DNA, 55 bp, Artificial
  Synthetic oligonucleotide
ttacaggactcgtgtaacgcataaatcggcccgtccgtcagacgtacaagacccc

SEQ ID NO: 232320 - DNA, 55 bp, Artificial
  Synthetic oligonucleotide
aacgaacccggtcgaatgcacaataccggaatggaggagcggacaaatccgctcc

SEQ ID NO: 232321 - DNA, 55 bp, Artificial
  Synthetic oligonucleotide
ttccaaaggcttccgactgtggagcgccatgctaccacgaattcggccgttgggg

SEQ ID NO: 232322 - DNA, 55 bp, Artificial
  Synthetic oligonucleotide
ttcggaatgcaagccgttcgcaaccgggctatatgtcacgttataacattactat

SEQ ID NO: 232323 - DNA, 55 bp, Artificial
  Synthetic oligonucleotide
ttcggacccgtcccaccttaagtccgatcgattgcgcggaacatccatccaacgg

SEQ ID NO: 232324 - DNA, 55 bp, Artificial
  Synthetic oligonucleotide
ttgacaagtattatcgtgcccctagagcacgcaccgttgtcggcatagggctggg

SEQ ID NO: 232325 - DNA, 60 bp, Artificial
  Synthetic oligonucleotide
gtctcaggcgacatgggctcagacgacatgggctcagacgacatgggctcagacgacatg

SEQ ID NO: 232326 - DNA, 60 bp, Artificial
  Synthetic oligonucleotide
tacgccggacatcgggcatgctattcctttctcgcgtctcgccgagccatcgaatggcct

SEQ ID NO: 232327 - DNA, 55 bp, Artificial
  Synthetic oligonucleotide
aaagggaaatgccgcacccgcgcaacggagtgtcgtgtcgcggcccgataatgtc

SEQ ID NO: 232328 - DNA, 55 bp, Artificial
  Synthetic oligonucleotide
aaagctaaccgccattatgcaccgcgcttcggcggggagactggcttgcggcagt

SEQ ID NO: 232329 - DNA, 55 bp, Artificial
  Synthetic oligonucleotide
ttgcgtccgccacacaaccgcaataggcgacgaatgcagattcgtctatgctggc

SEQ ID NO: 232330 - DNA, 52 bp, Artificial
  Synthetic oligonucleotide
aaacgccttcggacgtcgccaaccaagaggcctcctgttcggtccccatcgt

SEQ ID NO: 232331 - DNA, 55 bp, Artificial
  Synthetic oligonucleotide
ttgggtttccggaaggggatcggcacaatgaggatcgtctgtgcatcttttggac

SEQ ID NO: 232332 - DNA, 55 bp, Artificial
  Synthetic oligonucleotide
aaaatatgcgccaaaatctagtgcgtcagccaaacggcaaacgcaaccagttgac

SEQ ID NO: 232333 - DNA, 55 bp, Artificial
  Synthetic oligonucleotide
aaaacgggagtcgagcggagcggacccgcgcatcaggtgacggccatggagcgtt

SEQ ID NO: 232334 - DNA, 55 bp, Artificial
  Synthetic oligonucleotide
tttagcgaaacaccggtccacccaaacggagtgcgcggacatgagtgagtttcgg

SEQ ID NO: 232335 - DNA, 55 bp, Artificial
  Synthetic oligonucleotide
tttccatccgaagagtgccgccgggagtgaaatgagccgaccgatgagcaaagtc

SEQ ID NO: 232336 - DNA, 53 bp, Artificial
  Synthetic oligonucleotide
acccgccgaaacgagaccggacccatggaccatcaaccgcgtcgtcccaagct

SEQ ID NO: 232337 - DNA, 55 bp, Artificial
  Synthetic oligonucleotide
taacaatggcttggacaaaaccgcgatggcttctaccccggacgattcggtcgac

SEQ ID NO: 232338 - DNA, 54 bp, Artificial
  Synthetic oligonucleotide
tccggcggattcctcatgccttgagggaagcgggccgtttccgtgtggaaaacg

SEQ ID NO: 232339 - DNA, 55 bp, Artificial
  Synthetic oligonucleotide
tcctccagcgccggtaggccagtatcgtcttgagctggacagccacaggtgcgat

SEQ ID NO: 232340 - DNA, 55 bp, Artificial
  Synthetic oligonucleotide
tcctcccgattcccctgacccttggcgcgggatacacatcggatgcggtttgggt

SEQ ID NO: 232341 - DNA, 55 bp, Artificial
  Synthetic oligonucleotide
tcgatactgatacagtttctctgtccaaaagatgcacagacgatcctcattgtgc

SEQ ID NO: 232342 - DNA, 55 bp, Artificial
  Synthetic oligonucleotide
acatgcgttagacgtccagggcgcagccgatgcggatcggtatgtggccaagtgg

SEQ ID NO: 232343 - DNA, 55 bp, Artificial
  Synthetic oligonucleotide
tctactatcagaagagatttttcgcctacgtagcatacgcccgtcccaagcgcac

SEQ ID NO: 232344 - DNA, 55 bp, Artificial
  Synthetic oligonucleotide
tgaagcgcatcgggaaagagggctgctgcttcgtgtgcggggcaagctctccgaa

SEQ ID NO: 232345 - DNA, 55 bp, Artificial
  Synthetic oligonucleotide
tgaatgtatcgtccggtacagtgtactgtatgagacagtacgaataaaggggtca

SEQ ID NO: 232346 - DNA, 55 bp, Artificial
  Synthetic oligonucleotide
tgagcaacgtccatatattcagtaagggcgccggtaggcatgatgacctccgcag

SEQ ID NO: 232347 - DNA, 55 bp, Artificial
  Synthetic oligonucleotide
tgagtccgccccacacctctcccgcttcgactgtgaaccgcatcatgatcgcttc

SEQ ID NO: 232348 - DNA, 51 bp, Artificial
  Synthetic oligonucleotide
taaatcccggttttaccgcggccccctatcgttgccggaccatccctcctc

SEQ ID NO: 232349 - DNA, 55 bp, Artificial
  Synthetic oligonucleotide
tgcacagacgatcctcattgtgccgatccccttccggaaacccaacaccccgagg

SEQ ID NO: 232350 - DNA, 55 bp, Artificial
  Synthetic oligonucleotide
tgcatcgattgaagggacagcaataaagcgatgatgagtcgcaaaggtacgccac

SEQ ID NO: 232351 - DNA, 55 bp, Artificial
  Synthetic oligonucleotide
tgcccaacgacatagggattagacgttcgggcgatagaaactgtcacagtgccgc

SEQ ID NO: 232352 - DNA, 55 bp, Artificial
  Synthetic oligonucleotide
tgcctcatcgcgtccaagccccgtgacgcattgcgtccaaaccccgtgacgcttt

SEQ ID NO: 232353 - DNA, 55 bp, Artificial
  Synthetic oligonucleotide
tgcgcgcggacggttggcgccccatataatgtctgacgccaaggagtcattctcg

SEQ ID NO: 232354 - DNA, 55 bp, Artificial
  Synthetic oligonucleotide
tgcggcgacgattggctcccctatcaagagactaggaacggcgccagatcgggtc

SEQ ID NO: 232355 - DNA, 53 bp, Artificial
  Synthetic oligonucleotide
tgctaagaaaactccgcagccctctccccgctaccgaggggactgaaacccgg

SEQ ID NO: 232356 - DNA, 55 bp, Artificial
  Synthetic oligonucleotide
aaggcaagttcccgggaagtgggttgggctaggccacgatcgttgaagtgccaga

SEQ ID NO: 232357 - DNA, 55 bp, Artificial
  Synthetic oligonucleotide
tgctgagcgtgtgccggtccatgaaacgaggtccttcctggagatcagtggggcg

SEQ ID NO: 232358 - DNA, 55 bp, Artificial
  Synthetic oligonucleotide
tggaagaaaagccgccgtggactgttgtttgtgtgaataagcgttgacgcagcgg

SEQ ID NO: 232359 - DNA, 51 bp, Artificial
  Synthetic oligonucleotide
taaaccgcagagggaccccgcgggtccccacttttgggccagcggacaaaa

SEQ ID NO: 232360 - DNA, 55 bp, Artificial
  Synthetic oligonucleotide
tggattggaagtccgcttaatgtcttctcaacgggtttggcggtagacgaaagga

SEQ ID NO: 232361 - DNA, 55 bp, Artificial
  Synthetic oligonucleotide
tggcattaggcgacgcgaatgttggttcggcccctggggtcgacttcagtgcgct

SEQ ID NO: 232362 - DNA, 55 bp, Artificial
  Synthetic oligonucleotide
atgaacgtattccggaggctgtgcgagcgggcgtatggtccgaccgttgctctgg

SEQ ID NO: 232363 - DNA, 55 bp, Artificial
  Synthetic oligonucleotide
atcttcggctattcagggcgcacgcttgtgctaccggaaggggtgtggccgatgg

SEQ ID NO: 232364 - DNA, 55 bp, Artificial
  Synthetic oligonucleotide
atcgtcgtgccccgttgtgacgccgaacacaaaatcacgattccgtgcaaagtta

SEQ ID NO: 232365 - DNA, 55 bp, Artificial
  Synthetic oligonucleotide
gcaagcccttggtatccaacggatgatcggtcatgaacgaaatgctatcctacct

SEQ ID NO: 232366 - DNA, 55 bp, Artificial
  Synthetic oligonucleotide
gcacccgttgcacgaccgatgggtgaatcggctgaaacatcctaccgtgcgatcg

SEQ ID NO: 232367 - DNA, 55 bp, Artificial
  Synthetic oligonucleotide
atcggccaaggagaggtcctgagcgatgttcggacagctatcgctgcggcgtgag

SEQ ID NO: 232368 - DNA, 55 bp, Artificial
  Synthetic oligonucleotide
gcaccgctcgcggatggacacggaaactctctcgtttcagcccgtttcctcgagc

SEQ ID NO: 232369 - DNA, 55 bp, Artificial
  Synthetic oligonucleotide
gcagccattcccagaatgcagggccattcaccggcggtcgggcgcatataagatt

SEQ ID NO: 232370 - DNA, 56 bp, Artificial
  Synthetic oligonucleotide
gtttttggcgttccgtatataaaatatgcgccaaaatctagtgcgtcagccaaacg

SEQ ID NO: 232371 - DNA, 55 bp, Artificial
  Synthetic oligonucleotide
gcaggctcgtgatccctatatccgaatagctcgacccgcatatccgataagccgg

SEQ ID NO: 232372 - DNA, 55 bp, Artificial
  Synthetic oligonucleotide
gcatcgacgcaggcaatcggccttttccgaagtcaatccgccacatccggttgct

SEQ ID NO: 232373 - DNA, 54 bp, Artificial
  Synthetic oligonucleotide
atccccgccgttcagatcacccggacaggtgcggagaacacgtaaccaacgccg

SEQ ID NO: 232374 - DNA, 55 bp, Artificial
  Synthetic oligonucleotide
gcatcgtccacaagatgtgacatgtgttggtagcgtccctgttcacgcgtccctc

SEQ ID NO: 232375 - DNA, 55 bp, Artificial
  Synthetic oligonucleotide
gcatgccggcattctagaaaatcgcagtagaaccggtgtgatcgtaccccgcttt

SEQ ID NO: 232376 - DNA, 55 bp, Artificial
  Synthetic oligonucleotide
atatccccatactcgtcttttatggttggggaagcattccaggaggcgccttggg

SEQ ID NO: 232377 - DNA, 55 bp, Artificial
  Synthetic oligonucleotide
gccaaccggcaacgaagcagtatcttcccagacacggatgaagtgtgacacgccc

SEQ ID NO: 232378 - DNA, 55 bp, Artificial
  Synthetic oligonucleotide
gccaccctcaagaatctccggcgaccaagccacactggtcccgaagctgccattg

SEQ ID NO: 232379 - DNA, 55 bp, Artificial
  Synthetic oligonucleotide
gcccaagctgtcgaatgtcttctgcagaatatcggttagcgccttccgcgcttcc

SEQ ID NO: 232380 - DNA, 55 bp, Artificial
  Synthetic oligonucleotide
gcccgaccctggtgtggacgaaatcggttgcgtttcgatcgacggtgtgtggagg

SEQ ID NO: 232381 - DNA, 58 bp, Artificial
  Synthetic oligonucleotide
acggcgttgtcattttggacaaccagcgtgtgacggggttgatggagaagcctactca

SEQ ID NO: 232382 - DNA, 55 bp, Artificial
  Synthetic oligonucleotide
gccctatcaacagctgacaacgcaatattacgttcgcgggtttcaggcggattcc

SEQ ID NO: 232383 - DNA, 55 bp, Artificial
  Synthetic oligonucleotide
gccctgaagcgacccgtcttctgctgggtcaatccaagcatgccacgtttcagca

SEQ ID NO: 232384 - DNA, 55 bp, Artificial
  Synthetic oligonucleotide
gccgaattgtcgcgtcgggtttatcatgatagcgctaacataaccagttggcgcg

SEQ ID NO: 232385 - DNA, 55 bp, Artificial
  Synthetic oligonucleotide
gccgcacccattccggctgctccaagctacggcgcaatgcattttgcgaatcggc

SEQ ID NO: 232386 - DNA, 55 bp, Artificial
  Synthetic oligonucleotide
gaatcatccgcggctccgtgacggcacaacgcaacatcagcctgattgcgcccct

SEQ ID NO: 232387 - DNA, 55 bp, Artificial
  Synthetic oligonucleotide
caaccataggatgcgattccgaaaaggccttgccacgctcccataaccgcgtagc

SEQ ID NO: 232388 - DNA, 55 bp, Artificial
  Synthetic oligonucleotide
caacaccctaacatcggtcgagtgctatgcggaaccgcgtctctagtattaggta

SEQ ID NO: 232389 - DNA, 55 bp, Artificial
  Synthetic oligonucleotide
caaatcgcattgcgttggccctcggcctcaccagacaagactcaaaccgaggaag

SEQ ID NO: 232390 - DNA, 55 bp, Artificial
  Synthetic oligonucleotide
gacgagtattctacggtagcttggctttcgctgattcctgccgttgggccgactg

SEQ ID NO: 232391 - DNA, 54 bp, Artificial
  Synthetic oligonucleotide
gacgctaccacggccggggctttccgatccattttcgcgcgctattttcgggaa

SEQ ID NO: 232392 - DNA, 58 bp, Artificial
  Synthetic oligonucleotide
acggcttagcggcattatatcgtcccggaaacctggactgcagacccgatcctctcca

SEQ ID NO: 232393 - DNA, 55 bp, Artificial
  Synthetic oligonucleotide
atttcgcaacgcttcgcgaggaagggcgaaccgtcaccgaagggtggctggcgga

SEQ ID NO: 232394 - DNA, 55 bp, Artificial
  Synthetic oligonucleotide
gacggtagcgggcggactatgattactggccccgcagcggtctcaagactcccat

SEQ ID NO: 232395 - DNA, 55 bp, Artificial
  Synthetic oligonucleotide
attcgtcatttcaggtcacaagccatccccgcctatgcggaaggtaaagctctgc

SEQ ID NO: 232396 - DNA, 55 bp, Artificial
  Synthetic oligonucleotide
gactcatcagctcggtacctccttcggtctaccggcgtcaggcgcgacagttctc

SEQ ID NO: 232397 - DNA, 54 bp, Artificial
  Synthetic oligonucleotide
gactcggggtattaccctagaatcgacatcggcttgacttttgtaaattctccc

SEQ ID NO: 232398 - DNA, 55 bp, Artificial
  Synthetic oligonucleotide
gacttttcctccattcggctggacgaattggggtgatgcaacactctgtgtccgg

SEQ ID NO: 232399 - DNA, 55 bp, Artificial
  Synthetic oligonucleotide
attcccggcgcgtgacgcagcccctcgcttgctcctatgatcggatcaacggttc

SEQ ID NO: 232400 - DNA, 52 bp, Artificial
  Synthetic oligonucleotide
gagactaaagcgtataccgtcaccccgcggttcaaagacccgtcgccttggg

SEQ ID NO: 232401 - DNA, 55 bp, Artificial
  Synthetic oligonucleotide
atgtccggcatgcgacgcagggtcaacagagctttcccgatcggtgtctgtcgcc

SEQ ID NO: 232402 - DNA, 55 bp, Artificial
  Synthetic oligonucleotide
gagccgtgtatcaggcatgggaagaccctccggtctctaagtatgacttgcgcca

SEQ ID NO: 232403 - DNA, 59 bp, Artificial
  Synthetic oligonucleotide
acgggtctccgggctgagagattctagcttcccgaatattgtccgcatcatcttaccca

SEQ ID NO: 232404 - DNA, 55 bp, Artificial
  Synthetic oligonucleotide
atgggcatccattcccaccccgaccgcacggttctggccgggtccagctatggtg

SEQ ID NO: 232405 - DNA, 55 bp, Artificial
  Synthetic oligonucleotide
gatagtgagcttccaacatggccggctctagagagccaatcaagcggaccgcccc

SEQ ID NO: 232406 - DNA, 55 bp, Artificial
  Synthetic oligonucleotide
gatccatcgtcaaccgccttgggccctggtaataccacagctttcctccgtcgga

SEQ ID NO: 232407 - DNA, 55 bp, Artificial
  Synthetic oligonucleotide
gatccgatctggcgcactctgaatccggccaccttgcaatccgggaaagccagcc

SEQ ID NO: 232408 - DNA, 55 bp, Artificial
  Synthetic oligonucleotide
gatcggatatgtgaacgtgaggcgaggcagattgatccaattagtattgaccctc

SEQ ID NO: 232409 - DNA, 55 bp, Artificial
  Synthetic oligonucleotide
gcaaagctttcgggctcagtacgtcccttgatgtccgctttcgcgcttgaacccc

SEQ ID NO: 232410 - DNA, 55 bp, Artificial
  Synthetic oligonucleotide
gcaacggaggtcaatcggtcacgccgccatggctggcacgtccattttcacgtcc

SEQ ID NO: 232411 - DNA, 55 bp, Artificial
  Synthetic oligonucleotide
gctcatcgcgacatccgtagcggaaccacccgaagccgcaactggtgtcgagagt

SEQ ID NO: 232412 - DNA, 53 bp, Artificial
  Synthetic oligonucleotide
ggcgggtcaacgcgaattgcgggggtgccgaacactcttccctcctgggggga

SEQ ID NO: 232413 - DNA, 55 bp, Artificial
  Synthetic oligonucleotide
gctccagtccaggtagggcgggagcctgtcaaacactgattaagagaaccttacc

SEQ ID NO: 232414 - DNA, 55 bp, Artificial
  Synthetic oligonucleotide
acggtctgggctgtctacggcacaccaagcccgaacttccacggtcagttactcg

SEQ ID NO: 232415 - DNA, 55 bp, Artificial
  Synthetic oligonucleotide
gctcggaaacgggcttgggtgacttgacgctgatggatcttttcatgtttccggg

SEQ ID NO: 232416 - DNA, 55 bp, Artificial
  Synthetic oligonucleotide
gctgtcgccacccgcatattccctaaaatccgaaggatatagcaggcaccggccg

SEQ ID NO: 232417 - DNA, 55 bp, Artificial
  Synthetic oligonucleotide
aggtccctcttccgatctgtggcctttccggaaggcattcaagccgccggaagcc

SEQ ID NO: 232418 - DNA, 55 bp, Artificial
  Synthetic oligonucleotide
gctttaacgcaacattaaccagactggattgagtttaggagcatcagatgcggcc

SEQ ID NO: 232419 - DNA, 55 bp, Artificial
  Synthetic oligonucleotide
ggacctatgaccgcccatgcatggacgcgatgccagggaaaagggataaccgggg

SEQ ID NO: 232420 - DNA, 55 bp, Artificial
  Synthetic oligonucleotide
ggcggatttgaccagatcggctgagcttcactcttcgttccatcctgttcacgcg

SEQ ID NO: 232421 - DNA, 55 bp, Artificial
  Synthetic oligonucleotide
ggcggagcgccatccatggtcataaggaaaagctcgatgactgaaccaagcgccg

SEQ ID NO: 232422 - DNA, 55 bp, Artificial
  Synthetic oligonucleotide
ggatcgaaatcgcggagattcagaaccgcgtcgacagggtaaagaaaacgcgcgg

SEQ ID NO: 232423 - DNA, 55 bp, Artificial
  Synthetic oligonucleotide
ggatcggccgaaaagtgataattcacctcggccaaatcaggcccctccgccgcgc

SEQ ID NO: 232424 - DNA, 55 bp, Artificial
  Synthetic oligonucleotide
agggcgcacactcgttccaacgaaggataatcgagggaacgagacatggacggca

SEQ ID NO: 232425 - DNA, 55 bp, Artificial
  Synthetic oligonucleotide
cggtgaaaagcgtatcaagaagcttcggcacagtaaccctcaaggcgaagttttc

SEQ ID NO: 232426 - DNA, 55 bp, Artificial
  Synthetic oligonucleotide
ggcaccgatcgcatggccacgaaagctgcgaacagcgtggaagtttccgaaacgc

SEQ ID NO: 232427 - DNA, 55 bp, Artificial
  Synthetic oligonucleotide
aggcaacggtaacgtactggcttcctcatcgagggatagacgagcgtttcccatt

SEQ ID NO: 232428 - DNA, 55 bp, Artificial
  Synthetic oligonucleotide
aggcgcactgacctatggccgggcgcccatgctcaccctgtttcgacgatacttc

SEQ ID NO: 232429 - DNA, 55 bp, Artificial
  Synthetic oligonucleotide
ggcactatggcagaaaggccattgggccgcaacgttcgccccaccatccttaacc

SEQ ID NO: 232430 - DNA, 55 bp, Artificial
  Synthetic oligonucleotide
ggcatgattcggccttatgcagcgtcattttcctatccgaagaggtacacccgtg

SEQ ID NO: 232431 - DNA, 55 bp, Artificial
  Synthetic oligonucleotide
aggcggctattacgtatacaaagatgtggtccacggcatgcgcctgtgctaaacc

SEQ ID NO: 232432 - DNA, 53 bp, Artificial
  Synthetic oligonucleotide
ggccgacactatcggcgggcaagcgtccgtattcaacccgcttgttaaccttt

SEQ ID NO: 232433 - DNA, 55 bp, Artificial
  Synthetic oligonucleotide
gccgctaccggacatcgacaggttacagtcaagccttagcttttccggaacagac

SEQ ID NO: 232434 - DNA, 55 bp, Artificial
  Synthetic oligonucleotide
gccggcccatccctcagaaggggaagcgtgtcatccatggcgaaatcgtgatgcc

SEQ ID NO: 232435 - DNA, 55 bp, Artificial
  Synthetic oligonucleotide
gggcgctggttcacaatcagttcacttccagtaaaccgcgtctgcttcaacggag

SEQ ID NO: 232436 - DNA, 58 bp, Artificial
  Synthetic oligonucleotide
agagaaatgggatccatggtgtcacctcttcctgacgttctggttggttggagcgttc

SEQ ID NO: 232437 - DNA, 58 bp, Artificial
  Synthetic oligonucleotide
ccgattgaagtattggtgaaaagccatccaatgatcgttaccctacgatcattacgaa

SEQ ID NO: 232438 - DNA, 55 bp, Artificial
  Synthetic oligonucleotide
gcctgccttgcaaacgaccgcaggacgcatcatcatcaggctagggagacaggag

SEQ ID NO: 232439 - DNA, 55 bp, Artificial
  Synthetic oligonucleotide
gcctgctatggaacccgataaacaggaatttctagcgtgggcaacggtcttcgcg

SEQ ID NO: 232440 - DNA, 55 bp, Artificial
  Synthetic oligonucleotide
gcgaaaggtccgaagcgcgattagttcgcctaacgcacaaaagagcttgccaggc

SEQ ID NO: 232441 - DNA, 55 bp, Artificial
  Synthetic oligonucleotide
gcgaagccatacaatgatatgctaatgcggagtttcattgataacaattcgataa

SEQ ID NO: 232442 - DNA, 55 bp, Artificial
  Synthetic oligonucleotide
gcgatataccggaagattggcattttgacgcgcgtcgcaacgttgataattttct

SEQ ID NO: 232443 - DNA, 55 bp, Artificial
  Synthetic oligonucleotide
gggcctgcaagcctttgtgactccttacatgatcttggacataaccccgcggatc

SEQ ID NO: 232444 - DNA, 55 bp, Artificial
  Synthetic oligonucleotide
gggccgggtagcaacggaacagaaactccgattgaggcggaatggctgtacggaa

SEQ ID NO: 232445 - DNA, 54 bp, Artificial
  Synthetic oligonucleotide
gggagtgtccggaatttcgtgctcggcggggttatcctgaagcgaaaggagccc

SEQ ID NO: 232446 - DNA, 55 bp, Artificial
  Synthetic oligonucleotide
gcgctgcggagatgtcaatatgttgtaatcttgttgggcggaaaatgcgcaaatg

SEQ ID NO: 232447 - DNA, 55 bp, Artificial
  Synthetic oligonucleotide
ggctgggtcactcgcaagaaatgagtcgagttcgtaaagaaagcaatgagccagt

SEQ ID NO: 232448 - DNA, 53 bp, Artificial
  Synthetic oligonucleotide
cggtgaaagcgcccagccgtttcggtgaattcgcccacccgtaggagtggtgg

SEQ ID NO: 232449 - DNA, 55 bp, Artificial
  Synthetic oligonucleotide
ggctgccgaccttgggcgcttgttcggcaagtgatgctcttcgtacgccttccac

SEQ ID NO: 232450 - DNA, 55 bp, Artificial
  Synthetic oligonucleotide
ggctcgacacctcggggctcagcctgtccgaaccgctcttcaaggcgaccgttcc

SEQ ID NO: 232451 - DNA, 54 bp, Artificial
  Synthetic oligonucleotide
gaccgccgtcaaggatgggagggcgaccagccgctaggataaccacacaatcgt

SEQ ID NO: 232452 - DNA, 54 bp, Artificial
  Synthetic oligonucleotide
gtagactcccacccggagagtccagtcccggaccctgaccggaaggagcgcgcg

SEQ ID NO: 232453 - DNA, 54 bp, Artificial
  Synthetic oligonucleotide
tttcgcaggagaagaggccggtcggcttttgggtgaggccgactttcgaaattc

SEQ ID NO: 232454 - DNA, 53 bp, Artificial
  Synthetic oligonucleotide
ttcacccgcccggagtcaccaaagcttaacgggagtgaacgggcgcttgggcg

SEQ ID NO: 232455 - DNA, 54 bp, Artificial
  Synthetic oligonucleotide
gatactctgttagccgcgggacaatggtcccagccggttaaccaacggttaagc

SEQ ID NO: 232456 - DNA, 54 bp, Artificial
  Synthetic oligonucleotide
tggtgacgcccctgttgaactatggtgacgcgactcggacttatcccctgaacc

SEQ ID NO: 232457 - DNA, 53 bp, Artificial
  Synthetic oligonucleotide
ggagttgcgcgttccgggtttctccgcggatgactggcggggttaacggtagc

SEQ ID NO: 232458 - DNA, 54 bp, Artificial
  Synthetic oligonucleotide
ggacgctcccgatactttggccgctggtttcgttcggcggcctaggaacgcgca

SEQ ID NO: 232459 - DNA, 55 bp, Artificial
  Synthetic oligonucleotide
ccgatgccctatacaaccactccgcctttcgacaataccggacgaccaacctata

SEQ ID NO: 232460 - DNA, 54 bp, Artificial
  Synthetic oligonucleotide
tgccgtggatcccccaccttcttgagtggggcgctttcgcccgtacgccctatg

SEQ ID NO: 232461 - DNA, 54 bp, Artificial
  Synthetic oligonucleotide
gtttgtcaatggtcattgcgttcccttatgaaccacccacgaagctaacgcgcg

SEQ ID NO: 232462 - DNA, 54 bp, Artificial
  Synthetic oligonucleotide
cttgaccgaagaggctaggccgttatgctccctagcgcaaattctggcgtcaat

SEQ ID NO: 232463 - DNA, 54 bp, Artificial
  Synthetic oligonucleotide
gcggcataaaattgcgcgccagtacgtacaatccgatataatgacggtccgcat

SEQ ID NO: 232464 - DNA, 54 bp, Artificial
  Synthetic oligonucleotide
taacccggctcgcgggcgctattgcacccaggcccgggtgtgttgtcaacggtt

SEQ ID NO: 232465 - DNA, 54 bp, Artificial
  Synthetic oligonucleotide
ctctcctagtttattccgatcgctcaatatttatccgcgtgcacatcactccca

SEQ ID NO: 232466 - DNA, 53 bp, Artificial
  Synthetic oligonucleotide
tcgggaccacggaccgcctcgggtcttgcgccggacggtagcggggcatacct

SEQ ID NO: 232467 - DNA, 54 bp, Artificial
  Synthetic oligonucleotide
taagccctgggcacaagcccggatataaggacgaacgggaggagaattcgcgac

SEQ ID NO: 232468 - DNA, 54 bp, Artificial
  Synthetic oligonucleotide
tcctgaaagtgccactggggccgcagggatgccggattgcaacgtggcgtaggt

SEQ ID NO: 232469 - DNA, 51 bp, Artificial
  Synthetic oligonucleotide
ctggagtcgttttaaaacggtacaccgtgaaatgtttcttggttagactcc

SEQ ID NO: 232470 - DNA, 60 bp, Artificial
  Synthetic oligonucleotide
actcaggctcaagagacgccaaacacgaagcatatacgctggcatcttcgcacatatccg

SEQ ID NO: 232471 - DNA, 54 bp, Artificial
  Synthetic oligonucleotide
tatacgttattgcgtaatagcacagcgtaagcacagccctccgagcggtgtgat

SEQ ID NO: 232472 - DNA, 54 bp, Artificial
  Synthetic oligonucleotide
catctgtggagttcgaatcaccgatgagggtgttgaacgagccgacgcttaggg

SEQ ID NO: 232473 - DNA, 54 bp, Artificial
  Synthetic oligonucleotide
cacccatccgaagcgcagaacaaccctaatcttgcgttttatgcggtgaaacca

SEQ ID NO: 232474 - DNA, 54 bp, Artificial
  Synthetic oligonucleotide
atgccaacggccaatcgaacgcgcacgagaaacgactaagcccaagcccccctt

SEQ ID NO: 232475 - DNA, 54 bp, Artificial
  Synthetic oligonucleotide
agtccggtcactcatgacggaattggatgctcccggcagatcggacatttgccg

SEQ ID NO: 232476 - DNA, 54 bp, Artificial
  Synthetic oligonucleotide
aggatagcggaaactccgacagtcccctatgctcgggcatggccccagaagttt

SEQ ID NO: 232477 - DNA, 53 bp, Artificial
  Synthetic oligonucleotide
agcagtaaaaacgggttgggcgcccagaatttggacgtgggcgcccacgcgct

SEQ ID NO: 232478 - DNA, 54 bp, Artificial
  Synthetic oligonucleotide
agacacaccttattcaattgatctggcgttgtcttcgcatcacgattgctcaac

SEQ ID NO: 232479 - DNA, 45 bp, Artificial
  Synthetic oligonucleotide
accccgttttttccgtccctcccgaacgcccgcgattttttaccc

SEQ ID NO: 232480 - DNA, 54 bp, Artificial
  Synthetic oligonucleotide
cctgccgtgacgaataaggcgatggctgtgggtagatagagttcgatcccagcg

SEQ ID NO: 232481 - DNA, 57 bp, Artificial
  Synthetic oligonucleotide
actcatgagcggcccccggtgtgggagcgttgcttggggaacgctccggtgagtagc

SEQ ID NO: 232482 - DNA, 54 bp, Artificial
  Synthetic oligonucleotide
acataagatccgtttactgatcgaaccgggacgactgccaatccgcaacggtgg

SEQ ID NO: 232483 - DNA, 54 bp, Artificial
  Synthetic oligonucleotide
acaaacggctttccgctagcctgttccgctgtccgtcccgcaaagcatagagtt

SEQ ID NO: 232484 - DNA, 54 bp, Artificial
  Synthetic oligonucleotide
aacaatgcgtgccctgtccattccggcgattgtcctgcgaaggtgtgcgggata

SEQ ID NO: 232485 - DNA, 54 bp, Artificial
  Synthetic oligonucleotide
aaaaagagctgctaaccggggtcgcagaaaaagcccattccgtgctgggatggc

SEQ ID NO: 232486 - DNA, 53 bp, Artificial
  Synthetic oligonucleotide
gtctctttcttcgcgaaggggatttctgtccgctgaggactgtgccgtggtgt

SEQ ID NO: 232487 - DNA, 53 bp, Artificial
  Synthetic oligonucleotide
agaggcggatatggcattaggcgacgcgaatgttggttcggcccctggggtcg

SEQ ID NO: 232488 - DNA, 53 bp, Artificial
  Synthetic oligonucleotide
gtcatggatatggatctagcgcgccggacgtccagtgtcgatacgggatgccc

SEQ ID NO: 232489 - DNA, 53 bp, Artificial
  Synthetic oligonucleotide
gtagactttggggagagtggagctatcgggaagcatggaaggtccgtgtatcg

SEQ ID NO: 232490 - DNA, 53 bp, Artificial
  Synthetic oligonucleotide
ggtgtgtcgcaattgttcttctaggcaactgtgcagaccctcatcatcaggtc

SEQ ID NO: 232491 - DNA, 53 bp, Artificial
  Synthetic oligonucleotide
agcgcttatgtagcgggatggaccgcgccccgcaagcagagaattcactctcc

SEQ ID NO: 232492 - DNA, 60 bp, Artificial
  Synthetic oligonucleotide
gtttcaggactgccatgtcaatcaatcccgtccatagcggtccagactacgccatcttcc

SEQ ID NO: 232493 - DNA, 53 bp, Artificial
  Synthetic oligonucleotide
ggggccgactaacactagacctccctgcacgcttcgctcccggcattctatgg

SEQ ID NO: 232494 - DNA, 53 bp, Artificial
  Synthetic oligonucleotide
agcgggtctgccgatctaagtttcaaggaaaggacaggcatcatggttacgac

SEQ ID NO: 232495 - DNA, 53 bp, Artificial
  Synthetic oligonucleotide
aggagggacgattattccgttcagcgcaacagtcgattactgagaacgtcgct

SEQ ID NO: 232496 - DNA, 53 bp, Artificial
  Synthetic oligonucleotide
aactaggggcaaagatattcgcaggtctcttgattagagtttctcggaaataa

SEQ ID NO: 232497 - DNA, 52 bp, Artificial
  Synthetic oligonucleotide
cccgtcctgataagacaacggaacagttggcttaaggcgggccggtcggtta

SEQ ID NO: 232498 - DNA, 53 bp, Artificial
  Synthetic oligonucleotide
aggattggctgtagcattgagcatgtgacggacggctacacgggtattgatag

SEQ ID NO: 232499 - DNA, 53 bp, Artificial
  Synthetic oligonucleotide
ggatagtagtgcttctgtgacgccgtcagttcctggcagtaacggcgggccat

SEQ ID NO: 232500 - DNA, 53 bp, Artificial
  Synthetic oligonucleotide
atcctaggccaatccagcttgccaacggtcatggcctgcttaaggcatagcct

SEQ ID NO: 232501 - DNA, 53 bp, Artificial
  Synthetic oligonucleotide
gacgagaaaccatggccggaactccgttggataagccgtcggacggacactcg

SEQ ID NO: 232502 - DNA, 53 bp, Artificial
  Synthetic oligonucleotide
ccccggtgtgggagcgttgcttggggaacgctccggtgagtagccctcggcgg

SEQ ID NO: 232503 - DNA, 56 bp, Artificial
  Synthetic oligonucleotide
actccgaaattccaaggacggagtcaagggggacatcacttgtaaacagtgcagta

SEQ ID NO: 232504 - DNA, 53 bp, Artificial
  Synthetic oligonucleotide
ccccgatcacacccgcgtagcaaccttgtctggaagtggaatcagcttccgtg

SEQ ID NO: 232505 - DNA, 53 bp, Artificial
  Synthetic oligonucleotide
atttttgtcggagcagcacccaatgggcacatcctgcgaatcgtgcgatgcac

SEQ ID NO: 232506 - DNA, 53 bp, Artificial
  Synthetic oligonucleotide
gaaccgtacggcagtgtggctcacgggaacgatgctggggccgggctagtcgc

SEQ ID NO: 232507 - DNA, 53 bp, Artificial
  Synthetic oligonucleotide
ctcaggaaagggatgccgttccccctatgtgctcactgtcgcccgcaagtgca

SEQ ID NO: 232508 - DNA, 53 bp, Artificial
  Synthetic oligonucleotide
cttcatgaaagtgacgcaaacaacaggatcggcacaatgtcgctatctgatag

SEQ ID NO: 232509 - DNA, 53 bp, Artificial
  Synthetic oligonucleotide
ctgaacggataatgtttcggggctgtgacaaacctgaggcatgcatgaatttg

SEQ ID NO: 232510 - DNA, 52 bp, Artificial
  Synthetic oligonucleotide
ctccgcccaacgtcctatgaccccggggtgttaaggaaggctcaatcgtttg

SEQ ID NO: 232511 - DNA, 53 bp, Artificial
  Synthetic oligonucleotide
tgccgtcgaagcgagtggcaatatgcccagacgacaggggtatatggcggatc

SEQ ID NO: 232512 - DNA, 53 bp, Artificial
  Synthetic oligonucleotide
aatagggtcgggacccgatttacaatcccatacgtaggtctacgatcgaggcg

SEQ ID NO: 232513 - DNA, 53 bp, Artificial
  Synthetic oligonucleotide
tgacaaacaacgcagccgaacgtagcctgcgcgggatcgctttgggcagaaaa

SEQ ID NO: 232514 - DNA, 60 bp, Artificial
  Synthetic oligonucleotide
ccgacattactagccatggcgactatcccgatatcgtgatgaacaaccgcacagatttac

SEQ ID NO: 232515 - DNA, 53 bp, Artificial
  Synthetic oligonucleotide
tctctgagggtcagagagccctgtcacacaagctctaacatccactctccatt

SEQ ID NO: 232516 - DNA, 53 bp, Artificial
  Synthetic oligonucleotide
cgctgcaccgtgtggtcgccggaaccctcaatccggttcatgacaagtccaac

SEQ ID NO: 232517 - DNA, 53 bp, Artificial
  Synthetic oligonucleotide
tcggatgggttttcgacatggggacggatctcaacaccacgtccactatttat

SEQ ID NO: 232518 - DNA, 53 bp, Artificial
  Synthetic oligonucleotide
tccgggacgaatcgtcaaagagaaatcatgaagcgcctttaccgatccatagg

SEQ ID NO: 232519 - DNA, 53 bp, Artificial
  Synthetic oligonucleotide
tagacctttgcggttaacaagaggttgcgtcggggcaaaagatagggagtcca

SEQ ID NO: 232520 - DNA, 53 bp, Artificial
  Synthetic oligonucleotide
gtgatcgcatgacggagttccaacgaaagaatccatgagacacacggttcgaa

SEQ ID NO: 232521 - DNA, 53 bp, Artificial
  Synthetic oligonucleotide
gtgtcatgcttggtccacggcagtggaggattgccaagcctcgtggattccgt

SEQ ID NO: 232522 - DNA, 52 bp, Artificial
  Synthetic oligonucleotide
atcgtcggggcaccgctccgtaaagaggccggggcgtggagagtgttagtta

SEQ ID NO: 232523 - DNA, 52 bp, Artificial
  Synthetic oligonucleotide
ttggggcaagacacacgttgctgttgagtacagtggaagcgaagttattgac

SEQ ID NO: 232524 - DNA, 52 bp, Artificial
  Synthetic oligonucleotide
gatggcgcgtcatcccgtggctcccttcttgcgtgaatcggtgatcggtccg

SEQ ID NO: 232525 - DNA, 60 bp, Artificial
  Synthetic oligonucleotide
gtgtcgcgagcggtgatgagtacaggatagcgtcccacagccatatcatgatcgacgatt

SEQ ID NO: 232526 - DNA, 52 bp, Artificial
  Synthetic oligonucleotide
atgccgagtcggtccggatgggagcgtcaccaaagttcaaactccggaggct

SEQ ID NO: 232527 - DNA, 52 bp, Artificial
  Synthetic oligonucleotide
gacggtgtcgtgtcaccactgcgttcgcccatgcattccgttggaactcaca

SEQ ID NO: 232528 - DNA, 52 bp, Artificial
  Synthetic oligonucleotide
tcgtttcccgtttccatagactgatcccagttaatcccaggggagagttccg

SEQ ID NO: 232529 - DNA, 52 bp, Artificial
  Synthetic oligonucleotide
agcaccgttcgcatacccacgcttgcagcggatagaagatttccggacgccc

SEQ ID NO: 232530 - DNA, 52 bp, Artificial
  Synthetic oligonucleotide
acactcagtcggattctccgggaggaatcaaacacttgaggtggaagcccca

SEQ ID NO: 232531 - DNA, 52 bp, Artificial
  Synthetic oligonucleotide
gtggttgcaaagcgacatagcggggtctttcttcaggaagggctggcgggtt

SEQ ID NO: 232532 - DNA, 52 bp, Artificial
  Synthetic oligonucleotide
aaggtcattggatactccgtgcaaatcgtccatggtccctggctgtgaattt

SEQ ID NO: 232533 - DNA, 52 bp, Artificial
  Synthetic oligonucleotide
ttgttcgtgcgaacaatctcggcaaggatggtttgcatacagcggaattcag

SEQ ID NO: 232534 - DNA, 52 bp, Artificial
  Synthetic oligonucleotide
tgcaatatagttaactcagggttaacaccttgccaagcgagataatcggtta

SEQ ID NO: 232535 - DNA, 52 bp, Artificial
  Synthetic oligonucleotide
ctgttaacacaccgcgattcgtaccgcgttccagcaagtagccgtaacaggc

SEQ ID NO: 232536 - DNA, 60 bp, Artificial
  Synthetic oligonucleotide
atatcgtccggatggctggctcacggcagtctcgcttttgccttgagctttgcgggaccc

SEQ ID NO: 232537 - DNA, 52 bp, Artificial
  Synthetic oligonucleotide
tgcagatccaggattaggccttccagatgtctgcggttcgccaagcccgtca

SEQ ID NO: 232538 - DNA, 52 bp, Artificial
  Synthetic oligonucleotide
tgtgggaatcatcgatgactcggcccagacttaaggcgactcgggcattggt

SEQ ID NO: 232539 - DNA, 52 bp, Artificial
  Synthetic oligonucleotide
agccgttgcgactgaaacgaaaagatcggcgcctttctcaaaccgaagcggt

SEQ ID NO: 232540 - DNA, 52 bp, Artificial
  Synthetic oligonucleotide
ggtgtcggatcaccgacttggcgggcgtagatcacccgtcacggaaaaacaa

SEQ ID NO: 232541 - DNA, 52 bp, Artificial
  Synthetic oligonucleotide
taagcatctggtgtgttcgaggatgcactcggctgcgacatcgcaactgtgt

SEQ ID NO: 232542 - DNA, 52 bp, Artificial
  Synthetic oligonucleotide
taaggtgctacaccttcagctctagcgggtagagagagaccgacgtgacgcc

SEQ ID NO: 232543 - DNA, 52 bp, Artificial
  Synthetic oligonucleotide
agctgagacttcgccgggtaatgccacgaggccggttacgttgaggccaaag

SEQ ID NO: 232544 - DNA, 52 bp, Artificial
  Synthetic oligonucleotide
actcccgccgcttccgctataagggacgcctcttaccgggacggataggtgg

SEQ ID NO: 232545 - DNA, 52 bp, Artificial
  Synthetic oligonucleotide
ggctatcggacagctacccggggcgtgtgttcaatactccgatcagcgaggc

SEQ ID NO: 232546 - DNA, 52 bp, Artificial
  Synthetic oligonucleotide
ggcgtgaaatcattcaaccgttgcctaagcgataggccattcgttagtatga

SEQ ID NO: 232547 - DNA, 60 bp, Artificial
  Synthetic oligonucleotide
agatccgagagaactgccgccaatgcgctaagggctgcgactgtggtctgcggcggaccc

SEQ ID NO: 232548 - DNA, 54 bp, Artificial
  Synthetic oligonucleotide
atcaatgccccccttcgagccaatcaccgatccgagtagaccgatttccggggg

SEQ ID NO: 232549 - DNA, 52 bp, Artificial
  Synthetic oligonucleotide
tccaagcgtccccagcgtccagcggatacgtgttcccgccatgatggtcgtc

SEQ ID NO: 232550 - DNA, 52 bp, Artificial
  Synthetic oligonucleotide
tgtcttgcgcggcgagacaggcacgcaacgcgtgatcctcctttgccccagg

SEQ ID NO: 232551 - DNA, 52 bp, Artificial
  Synthetic oligonucleotide
ggatggcgtaacattgaccaagcgtcacgccagagtcgagttccgtctaatg

SEQ ID NO: 232552 - DNA, 52 bp, Artificial
  Synthetic oligonucleotide
ggaggatcgcggttgtggatgtttgtgtcaagtttggtgtggaaggatgtgt

SEQ ID NO: 232553 - DNA, 52 bp, Artificial
  Synthetic oligonucleotide
gcggatcggtatgtggccaagtggggcgcggctgaggaattggctctgtcgg

SEQ ID NO: 232554 - DNA, 52 bp, Artificial
  Synthetic oligonucleotide
accatttggtgcgatggagcaacgacttgcatgccaacgcacgcggcaaaaa

SEQ ID NO: 232555 - DNA, 52 bp, Artificial
  Synthetic oligonucleotide
tcgcaaccccatacccttgagccgggccccccttgaaccgagcctctcaagc

SEQ ID NO: 232556 - DNA, 52 bp, Artificial
  Synthetic oligonucleotide
ataaggtagttgatgaccgccgtttactacttattagtgatgtaggtgccct

SEQ ID NO: 232557 - DNA, 52 bp, Artificial
  Synthetic oligonucleotide
atagacgacgacgcacttccgccgtcttatgccattccgcctaatccatcga

SEQ ID NO: 232558 - DNA, 52 bp, Artificial
  Synthetic oligonucleotide
tgtgtgcttcatataggcgtgacaacaggctttggcccgtccttacaatcgc

SEQ ID NO: 232559 - DNA, 60 bp, Artificial
  Synthetic oligonucleotide
cagattgagcgacatcgtatgtctccttggcataagtgatgcactcatttcttcgaattc

SEQ ID NO: 232560 - DNA, 51 bp, Artificial
  Synthetic oligonucleotide
tgtagggatcccttacgtcttgggggaattcgattcggagaaaacgggagt

SEQ ID NO: 232561 - DNA, 52 bp, Artificial
  Synthetic oligonucleotide
cgtggaccccgcgggttttcctgtgcagcagcaagggtcggcgcggctttgt

SEQ ID NO: 232562 - DNA, 52 bp, Artificial
  Synthetic oligonucleotide
cgaagtcttgctgtttgatgcatcatcatgacggatgacccggtcctaggaa

SEQ ID NO: 232563 - DNA, 52 bp, Artificial
  Synthetic oligonucleotide
cgatcaggctttctggaacgcccggtcactgccgttcgagtattaagggcta

SEQ ID NO: 232564 - DNA, 52 bp, Artificial
  Synthetic oligonucleotide
cccctttctgaataggtcgcgacggttaaatagtcgttagccggccaatgga

SEQ ID NO: 232565 - DNA, 52 bp, Artificial
  Synthetic oligonucleotide
ctcccacattcatcgtgacgtgaggactcgtgcccaaatgaccgaactcttt

SEQ ID NO: 232566 - DNA, 52 bp, Artificial
  Synthetic oligonucleotide
ctatacatcagtctgtatccgacgcgcggttcatgaatcagcgatgcgctaa

SEQ ID NO: 232567 - DNA, 52 bp, Artificial
  Synthetic oligonucleotide
cccgaatagggacaggtctatggtccaagatgatgcgaccgaactattctgg

SEQ ID NO: 232568 - DNA, 52 bp, Artificial
  Synthetic oligonucleotide
cgccatccgttttgatcgaaacgaatggatgggcaatgtgtccatcttaagc

SEQ ID NO: 232569 - DNA, 52 bp, Artificial
  Synthetic oligonucleotide
cccaagatcagatggaggattcgatgaaacacacctattcgccgtccactcc

SEQ ID NO: 232570 - DNA, 55 bp, Artificial
  Synthetic oligonucleotide
cttgcggtcaggacacgaacgcccccgtcgggccttttgttcatgaatcggcgac

SEQ ID NO: 232571 - DNA, 52 bp, Artificial
  Synthetic oligonucleotide
ccgtcaggggatttgggacgggagccgggatcggagttcaataagcatcaga

SEQ ID NO: 232572 - DNA, 52 bp, Artificial
  Synthetic oligonucleotide
cgcatcggatacggatccacctaaatcggcatcctaatgcgcatttcgttgg

SEQ ID NO: 232573 - DNA, 51 bp, Artificial
  Synthetic oligonucleotide
ggcggcctaaagcgaacgaaagcttgcattagcggtgggtccgcggctttg

SEQ ID NO: 232574 - DNA, 51 bp, Artificial
  Synthetic oligonucleotide
gggaggttgacagtcgcgcggtcaaacgagcctatggacgcagcgtggtct

SEQ ID NO: 232575 - DNA, 51 bp, Artificial
  Synthetic oligonucleotide
agcggtccagactacgccatcttccggcaacacgtcccacaagccgcccca

SEQ ID NO: 232576 - DNA, 51 bp, Artificial
  Synthetic oligonucleotide
aggatgccggagggagagttcgggtgagattcgcactgcggaagccttggc

SEQ ID NO: 232577 - DNA, 51 bp, Artificial
  Synthetic oligonucleotide
ccgcccgacgcctaatcctgcgcctgacagtgaagcgtaacaggcaaaccg

SEQ ID NO: 232578 - DNA, 51 bp, Artificial
  Synthetic oligonucleotide
agcgattccgccgtggaacggtgtggatgcccccttgtcgggcattgcggt

SEQ ID NO: 232579 - DNA, 51 bp, Artificial
  Synthetic oligonucleotide
ggttaacgaaacaatttgcgcaggaacaaaacgaaccccactcgatttgaa

SEQ ID NO: 232580 - DNA, 51 bp, Artificial
  Synthetic oligonucleotide
agcgacccgccaacgttgcaaagccgctcgtgcgaggcaccacgaaagggg

SEQ ID NO: 232581 - DNA, 55 bp, Artificial
  Synthetic oligonucleotide
atcgacgttcataggggcgttcctccgatccgcatttttcagggtcacggttctg

SEQ ID NO: 232582 - DNA, 51 bp, Artificial
  Synthetic oligonucleotide
agccgcggatcttgacggaaaggagccatgcctaaccttgctgtggcagtt

SEQ ID NO: 232583 - DNA, 51 bp, Artificial
  Synthetic oligonucleotide
agccgcagagccggcccatccctcagaaggggaagcgtgtcatccatggcg

SEQ ID NO: 232584 - DNA, 51 bp, Artificial
  Synthetic oligonucleotide
gtccctttccgtttccaccccatggtgtttatgaccgcgggcggttgcatc

SEQ ID NO: 232585 - DNA, 51 bp, Artificial
  Synthetic oligonucleotide
cggggtgacgacagaatccccggttggcaccttccccaggggacttgtacg

SEQ ID NO: 232586 - DNA, 51 bp, Artificial
  Synthetic oligonucleotide
cggggctaccccacttgacggcggtcataggcagtcgtacaagcgagccca

SEQ ID NO: 232587 - DNA, 51 bp, Artificial
  Synthetic oligonucleotide
agtgcctaaaatcactggaccgtgttgaggcgcacgaaataggcccgcttc

SEQ ID NO: 232588 - DNA, 51 bp, Artificial
  Synthetic oligonucleotide
gcggatgctgatacggtgcagaggatgtgacaatgagctgacgtattgtcc

SEQ ID NO: 232589 - DNA, 51 bp, Artificial
  Synthetic oligonucleotide
gcggcggagcggaatggcttggggtcacaaaacggccgatgtcaaagacgt

SEQ ID NO: 232590 - DNA, 51 bp, Artificial
  Synthetic oligonucleotide
aggttgggggacggtaaccaaagctgcgtaaagttcacacagggggtgggc

SEQ ID NO: 232591 - DNA, 51 bp, Artificial
  Synthetic oligonucleotide
aggttctgggcggtagctgcgaggtgaaactcgtcgcaggtcccgttcggt

SEQ ID NO: 232592 - DNA, 60 bp, Artificial
  Synthetic oligonucleotide
cagagcgggtatgatggccggcaatgggagattgcgcaggaagccacggaaggacggatc

SEQ ID NO: 232593 - DNA, 51 bp, Artificial
  Synthetic oligonucleotide
gcttaaccctcggttaaccggcggggatcattgtcccgcggcaaatcgagt

SEQ ID NO: 232594 - DNA, 51 bp, Artificial
  Synthetic oligonucleotide
ggaaagcaggcggcctaaagcgaacgaaagcttgcattagcggtgggtccg

SEQ ID NO: 232595 - DNA, 51 bp, Artificial
  Synthetic oligonucleotide
ggaacggtctgcgtgggcacgaaggaaacccgcaaactgtttagcatacga

SEQ ID NO: 232596 - DNA, 51 bp, Artificial
  Synthetic oligonucleotide
aggtacacggtgctttgatggtcggatttcgacccgtccccgggaaaccca

SEQ ID NO: 232597 - DNA, 51 bp, Artificial
  Synthetic oligonucleotide
ggaccgatccccgacaatgatgacggtagtcaccgtggcggacgcattatc

SEQ ID NO: 232598 - DNA, 51 bp, Artificial
  Synthetic oligonucleotide
aggggcgcccaggcgaattttcctggcaccttatcttacgctttgacccgc

SEQ ID NO: 232599 - DNA, 51 bp, Artificial
  Synthetic oligonucleotide
cgtcgcattcgtcggccctcccgtcagccgaccctctatgaatcacgcatt

SEQ ID NO: 232600 - DNA, 51 bp, Artificial
  Synthetic oligonucleotide
ggatagaagatttccggacgcccgttatcctctgcccgcctcagcgcgttc

SEQ ID NO: 232601 - DNA, 51 bp, Artificial
  Synthetic oligonucleotide
cccgcggaggcgctacgggatgcacagatctcacgggccattaaggcactg

SEQ ID NO: 232602 - DNA, 51 bp, Artificial
  Synthetic oligonucleotide
agggcgcatcgcgtacggaacgtccaacgaatttgtccactccgttgggaa

SEQ ID NO: 232603 - DNA, 59 bp, Artificial
  Synthetic oligonucleotide
cagagaccgttcgtataggaaattatacgatggacttatgatcgtgaggccagggagcg

SEQ ID NO: 232604 - DNA, 51 bp, Artificial
  Synthetic oligonucleotide
aggcttcaggatcttacagccaacgacatggagctctatcggctgtgccgc

SEQ ID NO: 232605 - DNA, 51 bp, Artificial
  Synthetic oligonucleotide
aggcggacgttcgtggtccatgcgctctctccgggaatgcgttgcgtcgga

SEQ ID NO: 232606 - DNA, 51 bp, Artificial
  Synthetic oligonucleotide
ggccgttctgacgtcacgaaagccaaagccgaccattcggaaccgacagag

SEQ ID NO: 232607 - DNA, 51 bp, Artificial
  Synthetic oligonucleotide
cgcgttcaagctgagacttcgccgggtaatgccacgaggccggttacgttg

SEQ ID NO: 232608 - DNA, 51 bp, Artificial
  Synthetic oligonucleotide
tgatcatgggggtgattcggcagtgcagattgaagcgtatcgagggattca

SEQ ID NO: 232609 - DNA, 51 bp, Artificial
  Synthetic oligonucleotide
tgatctttcgccataaaggagtcgggcgcgtcataattcgttcgtgcacgt

SEQ ID NO: 232610 - DNA, 51 bp, Artificial
  Synthetic oligonucleotide
aatgcgtgattcatagagggtcggctgacgggagggccgacgaatgcgacg

SEQ ID NO: 232611 - DNA, 51 bp, Artificial
  Synthetic oligonucleotide
aatcccccgatattgggttcggggcgtgtgggagggcacaatggatcactc

SEQ ID NO: 232612 - DNA, 51 bp, Artificial
  Synthetic oligonucleotide
tgcgacctgaagccgcacccattccggctgctccaagctacggcgcaatgc

SEQ ID NO: 232613 - DNA, 51 bp, Artificial
  Synthetic oligonucleotide
tgtctgcgtccggtgtctctgagcccggcatctctgaacccagcttcgggg

SEQ ID NO: 232614 - DNA, 53 bp, Artificial
  Synthetic oligonucleotide
cacggcgatgaaagaatccccttaagttccgcctacccccttcgtcttagagc

SEQ ID NO: 232615 - DNA, 51 bp, Artificial
  Synthetic oligonucleotide
cgaccgtcctgtccttgggtcgccctgccatcgggccgtcccgtccccgta

SEQ ID NO: 232616 - DNA, 51 bp, Artificial
  Synthetic oligonucleotide
aaccgtcaccgaagggtggctggcggactggcggaggctcggcaaggactt

SEQ ID NO: 232617 - DNA, 51 bp, Artificial
  Synthetic oligonucleotide
ttcccgattgcttacgatccgttaatgtaaagaagctctaatatgagaaaa

SEQ ID NO: 232618 - DNA, 51 bp, Artificial
  Synthetic oligonucleotide
ttcgtcgggaaatcgaccaaccggggctctcccttgggaaccttctgacgc

SEQ ID NO: 232619 - DNA, 51 bp, Artificial
  Synthetic oligonucleotide
ttctagtgaaaacacacaagaatctatgcctgacaccgaaatttaacgtcc

SEQ ID NO: 232620 - DNA, 51 bp, Artificial
  Synthetic oligonucleotide
ttctgcccaaagcgatcccgcgcaggctacgttcggctgcgttgtttgtca

SEQ ID NO: 232621 - DNA, 51 bp, Artificial
  Synthetic oligonucleotide
aaagccggttccagacgcgggcagacgcgggcatcgttgccagacgcttct

SEQ ID NO: 232622 - DNA, 51 bp, Artificial
  Synthetic oligonucleotide
cgatgattgtcgtgatcgggtcggatggatcggcgctccacaagcggacgg

SEQ ID NO: 232623 - DNA, 51 bp, Artificial
  Synthetic oligonucleotide
tttcacggtatttccctcatggcgtttggcaatcccaccggcgattgctaa

SEQ ID NO: 232624 - DNA, 51 bp, Artificial
  Synthetic oligonucleotide
gtggatggtgaccgtcacttcctgggtgtcggtgcattcggcactggtgac

SEQ ID NO: 232625 - DNA, 57 bp, Artificial
  Synthetic oligonucleotide
atcttcaagggcgggacggcccaatgtcattccctcacagtgacctacgcgccaacc

SEQ ID NO: 232626 - DNA, 51 bp, Artificial
  Synthetic oligonucleotide
acttccgccgggcaaggattcatatagctgatactttgtcatctattgagt

SEQ ID NO: 232627 - DNA, 51 bp, Artificial
  Synthetic oligonucleotide
gttcaggcatgaacactcagcggttttctacccttgcgcagaccgcgatag

SEQ ID NO: 232628 - DNA, 51 bp, Artificial
  Synthetic oligonucleotide
actccgaactgttgcggagcgtgctgaccaaaccggacgtcaagcggactg

SEQ ID NO: 232629 - DNA, 51 bp, Artificial
  Synthetic oligonucleotide
gttcgatgagagatgcatgtccatggcgcgtctgcctcgtctatcgtgtcc

SEQ ID NO: 232630 - DNA, 51 bp, Artificial
  Synthetic oligonucleotide
gtttagtattgatgtgtaaatagatgtcccgatcacactaaaacccgcaac

SEQ ID NO: 232631 - DNA, 51 bp, Artificial
  Synthetic oligonucleotide
taactggactcgcccaagtccattacttcgaaacctctggacagccgattc

SEQ ID NO: 232632 - DNA, 51 bp, Artificial
  Synthetic oligonucleotide
tagagtgcgcccggcacccttgtttccctccggaggtctccgcgcatgtca

SEQ ID NO: 232633 - DNA, 49 bp, Artificial
  Synthetic oligonucleotide
accggcgccccaaagacgggacgccctcctattaaggggtagttcttcg

SEQ ID NO: 232634 - DNA, 51 bp, Artificial
  Synthetic oligonucleotide
cggagattttaaaagctcggcaggcgaagaatgatgtccttcgccgctgtg

SEQ ID NO: 232635 - DNA, 51 bp, Artificial
  Synthetic oligonucleotide
accgccaaaccacgttgtcattgggcgcctcatggggtgcgcttcttgtca

SEQ ID NO: 232636 - DNA, 58 bp, Artificial
  Synthetic oligonucleotide
atgaagagctggccaacccttccgagcttgcgatttagggttaacggcagctgtccca

SEQ ID NO: 232637 - DNA, 51 bp, Artificial
  Synthetic oligonucleotide
tccccggcatcccacgtgtcatgactcttacgcactccagttcaactacgc

SEQ ID NO: 232638 - DNA, 51 bp, Artificial
  Synthetic oligonucleotide
tccgagatcgtccatatcactcttggccgtccgcgagccaagctgattctg

SEQ ID NO: 232639 - DNA, 51 bp, Artificial
  Synthetic oligonucleotide
ccttacagggtgggggaaacagccttaccgggtgggggcgagtcgcacacc

SEQ ID NO: 232640 - DNA, 51 bp, Artificial
  Synthetic oligonucleotide
ccttcgttccggacatggaacctcctcaaacacggatgcccggcgaccgta

SEQ ID NO: 232641 - DNA, 51 bp, Artificial
  Synthetic oligonucleotide
tcggccgattcccggagtcaccgaggggccacagcccagattattcggcag

SEQ ID NO: 232642 - DNA, 51 bp, Artificial
  Synthetic oligonucleotide
cgaaaaggttgctgtcgcttcgggacagcgccgtcactcccacggactgca

SEQ ID NO: 232643 - DNA, 51 bp, Artificial
  Synthetic oligonucleotide
tcgttgctttgccgaatgttggtaccacggcacggttgttgcctatgaccc

SEQ ID NO: 232644 - DNA, 51 bp, Artificial
  Synthetic oligonucleotide
tctgcatgaaccaagtttcacgcacgccgctccaaggcctatgccgcgtct

SEQ ID NO: 232645 - DNA, 51 bp, Artificial
  Synthetic oligonucleotide
ctccgcatgggggcagacaaatcctgtcgagccgtcctaaagtccgccttc

SEQ ID NO: 232646 - DNA, 51 bp, Artificial
  Synthetic oligonucleotide
gatacgacagctgccgccatgcattacgcccgcaatggccggttggaaggg

SEQ ID NO: 232647 - DNA, 60 bp, Artificial
  Synthetic oligonucleotide
atgaggataaggcgagttttgctgagacgctgcgtagccacacgagggcgatgggcctgg

SEQ ID NO: 232648 - DNA, 51 bp, Artificial
  Synthetic oligonucleotide
gattgccatggcgggagcgcaacccttccaaagccgttccggactcgtaac

SEQ ID NO: 232649 - DNA, 51 bp, Artificial
  Synthetic oligonucleotide
gattggttaaaagccctgatgtcctaaatttcggacctgcgacgtcggccc

SEQ ID NO: 232650 - DNA, 51 bp, Artificial
  Synthetic oligonucleotide
ctgtgtgtaaagtacgacttgcccacagcctgaccgttcgaagcggtgccc

SEQ ID NO: 232651 - DNA, 51 bp, Artificial
  Synthetic oligonucleotide
atagcacagcgtaagcacagccctccgagcggtgtgattgcatatgggcga

SEQ ID NO: 232652 - DNA, 51 bp, Artificial
  Synthetic oligonucleotide
atagcgcaatcaaccgttcggggaatcccccttccaccggggcaacacgga

SEQ ID NO: 232653 - DNA, 51 bp, Artificial
  Synthetic oligonucleotide
atattaccgacccgccgcatatgtgcatgcgcgatgcgtcttcgtgaggat

SEQ ID NO: 232654 - DNA, 51 bp, Artificial
  Synthetic oligonucleotide
cacattccgcttggtggccggtatgggcagctccggccccgtgcatcgggg

SEQ ID NO: 232655 - DNA, 51 bp, Artificial
  Synthetic oligonucleotide
gaaccttctccgggaatgccagccttttggaacatgcccatagcgaggcct

SEQ ID NO: 232656 - DNA, 51 bp, Artificial
  Synthetic oligonucleotide
cagggtcatgtcggatgtgtcgtcacgcaacgcttacccagcaactcgggc

SEQ ID NO: 232657 - DNA, 51 bp, Artificial
  Synthetic oligonucleotide
ccccataatcgtcatattcggtctgtttcgcaacggtgctcacaggggccg

SEQ ID NO: 232658 - DNA, 56 bp, Artificial
  Synthetic oligonucleotide
agatttggccaagccctcgttaatcgtcgtatgcgctcctttgttggggcgcgaaa

SEQ ID NO: 232659 - DNA, 60 bp, Artificial
  Synthetic oligonucleotide
gattacgtcagacattgatgtctgcctaaatcgcaatagtgtctgacatggtttttggcg

SEQ ID NO: 232660 - DNA, 50 bp, Artificial
  Synthetic oligonucleotide
atcgtcacggattggtgaacgggtggaagggggcgtttattccggcgggg

SEQ ID NO: 232661 - DNA, 51 bp, Artificial
  Synthetic oligonucleotide
gcacacgccaaaccaaaacggacgtggacgcagaaggcttccagcacactt

SEQ ID NO: 232662 - DNA, 51 bp, Artificial
  Synthetic oligonucleotide
cccgatgctccattggcacgggctttccgggtgacgttaagtggggaggcc

SEQ ID NO: 232663 - DNA, 51 bp, Artificial
  Synthetic oligonucleotide
atgctggtccgcgttgggagagcgtggccttgcctgcctatgtattcaggt

SEQ ID NO: 232664 - DNA, 51 bp, Artificial
  Synthetic oligonucleotide
caaagccgctcgtgcgaggcaccacgaaaggggcggagactcccgactccg

SEQ ID NO: 232665 - DNA, 51 bp, Artificial
  Synthetic oligonucleotide
ccaggaggtcgcggggtggcccgatggaaaacaacgcacgaaactgacgac

SEQ ID NO: 232666 - DNA, 51 bp, Artificial
  Synthetic oligonucleotide
catgcgtaatcttggtgctttatagtcgcacgtcgttccgcggtttgaagc

SEQ ID NO: 232667 - DNA, 51 bp, Artificial
  Synthetic oligonucleotide
cattctgggaccaatgtcacacacccaatcgatagtggtatgccagttttg

SEQ ID NO: 232668 - DNA, 51 bp, Artificial
  Synthetic oligonucleotide
gacgacgcatccggtgtggacccaagcgccgtcgggaaggcggacggtatg

SEQ ID NO: 232669 - DNA, 51 bp, Artificial
  Synthetic oligonucleotide
ccccggttggcaccttccccaggggacttgtacgcagggggatggcgactc

SEQ ID NO: 232670 - DNA, 60 bp, Artificial
  Synthetic oligonucleotide
cacccgcattccatgattggtagtgcaccgccaccagggattacggcctctggagtaatc

SEQ ID NO: 232671 - DNA, 50 bp, Artificial
  Synthetic oligonucleotide
aattggcccgcagacagcacggattcagggaacgcacgtggacgaacgaa

SEQ ID NO: 232672 - DNA, 50 bp, Artificial
  Synthetic oligonucleotide
aatttaacgcggcgggaggaccttggcagggtagagcaaaggcgcacgcc

SEQ ID NO: 232673 - DNA, 50 bp, Artificial
  Synthetic oligonucleotide
gaaaggttgtcggtagtctcgatcgccgggctaagtatctgttattacgc

SEQ ID NO: 232674 - DNA, 50 bp, Artificial
  Synthetic oligonucleotide
aattccccgttaggattgtggtcgcgtcgttgcaatatgcatcgtaccct

SEQ ID NO: 232675 - DNA, 50 bp, Artificial
  Synthetic oligonucleotide
acatccccagattgaccggaacaaggtaaccgggcgccagggcaacacaa

SEQ ID NO: 232676 - DNA, 50 bp, Artificial
  Synthetic oligonucleotide
acatacgcccccgtcgccaatccccttgccgccagaccatcggatctggc

SEQ ID NO: 232677 - DNA, 50 bp, Artificial
  Synthetic oligonucleotide
cacacccccgcccgaatccttagcctgcgacagcgatcaagacacagtcg

SEQ ID NO: 232678 - DNA, 50 bp, Artificial
  Synthetic oligonucleotide
acagggcgaacgccggttccctatcgacaaaatgttgtggtcccaccgcc

SEQ ID NO: 232679 - DNA, 50 bp, Artificial
  Synthetic oligonucleotide
tcgtctcgcctctcccgttggttcgcatgaggagtctatgcggcccacat

SEQ ID NO: 232680 - DNA, 50 bp, Artificial
  Synthetic oligonucleotide
ctatgacgcaccgatcgaaccggcgaaggcccccgagacctccggcgatc

SEQ ID NO: 232681 - DNA, 58 bp, Artificial
  Synthetic oligonucleotide
atggataatcggcccgccgacaatatactttctcgcacacgaaatttatccacctcta

SEQ ID NO: 232682 - DNA, 50 bp, Artificial
  Synthetic oligonucleotide
cacctgcaagcgaatcggacatgggatgagcccgcctcacgcgcagcatg

SEQ ID NO: 232683 - DNA, 50 bp, Artificial
  Synthetic oligonucleotide
cgctgctactcacctttcggccggcaaacatatggtctggagcgcgcgat

SEQ ID NO: 232684 - DNA, 50 bp, Artificial
  Synthetic oligonucleotide
cgcgggtcccttccccgagaaacgatcctgaagcgccaaaatagggcgat

SEQ ID NO: 232685 - DNA, 50 bp, Artificial
  Synthetic oligonucleotide
tgacctagcggatggacggctccctgaacgcctctgacttaggtcgggta

SEQ ID NO: 232686 - DNA, 50 bp, Artificial
  Synthetic oligonucleotide
acaggctctgcgtctcccgatgtgcggtgaagatgtccctgcgccctgca

SEQ ID NO: 232687 - DNA, 50 bp, Artificial
  Synthetic oligonucleotide
acaggatcgaaaccagacgccggcccccgttcagacggcagatcgaccgg

SEQ ID NO: 232688 - DNA, 50 bp, Artificial
  Synthetic oligonucleotide
acagagaggatcgggaccaacggacacacccgcccgcgaatccttgcaag

SEQ ID NO: 232689 - DNA, 50 bp, Artificial
  Synthetic oligonucleotide
acaaggctggtgcgacgaccgctgaattccgtccgttcgatccgcgatcc

SEQ ID NO: 232690 - DNA, 50 bp, Artificial
  Synthetic oligonucleotide
acaatgggaaccgcgaaccggcttgtcatcccctggggccaacgaaagtg

SEQ ID NO: 232691 - DNA, 50 bp, Artificial
  Synthetic oligonucleotide
acagacgaagaaccaaagcgccccgaaaccgggagcacagacacgaccgg

SEQ ID NO: 232692 - DNA, 60 bp, Artificial
  Synthetic oligonucleotide
gaggtgaccgcacggcacgagaccgcaaccgatcaggtgacaccatcgaccatttggcga

SEQ ID NO: 232693 - DNA, 50 bp, Artificial
  Synthetic oligonucleotide
acactccacgacatgggtgggcccgatgcgcaatgcagtcaaactcgctg

SEQ ID NO: 232694 - DNA, 50 bp, Artificial
  Synthetic oligonucleotide
caccccactcaagcggtgtgacgtcccaggctccgttcgtgaatcgttgg

SEQ ID NO: 232695 - DNA, 50 bp, Artificial
  Synthetic oligonucleotide
acaccacacgagacaacgccccgcagcacaaaccggggctcccaagggat

SEQ ID NO: 232696 - DNA, 50 bp, Artificial
  Synthetic oligonucleotide
acaccggattcgctgtgtggatgagcgaaggacgcttgtaccggacgccg

SEQ ID NO: 232697 - DNA, 50 bp, Artificial
  Synthetic oligonucleotide
tcttgcttcacaacatatcagccggcattcaacgctgccggacgggcgtg

SEQ ID NO: 232698 - DNA, 50 bp, Artificial
  Synthetic oligonucleotide
accggaggcttcatggcccgtcccgttattgttcccaccggagtagagcg

SEQ ID NO: 232699 - DNA, 50 bp, Artificial
  Synthetic oligonucleotide
caagcggcccttatcaagccgcctttgtctgggctttcgaaagggtgggc

SEQ ID NO: 232700 - DNA, 50 bp, Artificial
  Synthetic oligonucleotide
accgggttggtccgacggcagaccgcacgacactcatcctgtcgagtgtg

SEQ ID NO: 232701 - DNA, 50 bp, Artificial
  Synthetic oligonucleotide
tcaccgaacgcattcgatcagtcccttcatccggctccaggtctggtccc

SEQ ID NO: 232702 - DNA, 50 bp, Artificial
  Synthetic oligonucleotide
tcacccttctgtcgggagtaacccattcggcagaggtggtgaaccgacgc

SEQ ID NO: 232703 - DNA, 57 bp, Artificial
  Synthetic oligonucleotide
atgggcgattaacgaacttgcactagctttttcgcccttgacacggagcgaacagcg

SEQ ID NO: 232704 - DNA, 50 bp, Artificial
  Synthetic oligonucleotide
tatggcaaagcgtgcgacttcctatgacatgaatttccaaggcgtattcc

SEQ ID NO: 232705 - DNA, 50 bp, Artificial
  Synthetic oligonucleotide
accgtagtatttggttcgcgctcggggactaaggtccggctaccccgccg

SEQ ID NO: 232706 - DNA, 50 bp, Artificial
  Synthetic oligonucleotide
tatcgctcgtgtccgggcgcataagtatagtagccacactataccgcata

SEQ ID NO: 232707 - DNA, 50 bp, Artificial
  Synthetic oligonucleotide
acctaaccggcgctgagcctggatcaacatagaaggaattccggcatagc

SEQ ID NO: 232708 - DNA, 50 bp, Artificial
  Synthetic oligonucleotide
acctatcggtctggccggctaacccagggattggatctctgggggagggc

SEQ ID NO: 232709 - DNA, 50 bp, Artificial
  Synthetic oligonucleotide
acctcggcccctcccttggacgtaaatcccatcaacgtctcgaaggcggg

SEQ ID NO: 232710 - DNA, 50 bp, Artificial
  Synthetic oligonucleotide
acctgaaaacgcgatttcgacggtccgcatccctgcgggcaagctctctc

SEQ ID NO: 232711 - DNA, 50 bp, Artificial
  Synthetic oligonucleotide
tagcggcgtgaaataggacacatggcgaagctcgggcattttctggcggg

SEQ ID NO: 232712 - DNA, 50 bp, Artificial
  Synthetic oligonucleotide
accttacgtcggcgcaaccccacccgtcttgcgggtacctagcccccatg

SEQ ID NO: 232713 - DNA, 50 bp, Artificial
  Synthetic oligonucleotide
acgaagtaggcaacatccctgtcggacggacgctggttgttccgagcaat

SEQ ID NO: 232714 - DNA, 60 bp, Artificial
  Synthetic oligonucleotide
gaaacagcccccgatctgtgtgaagcgcatcgggaaagagggctgctgcttcgtgtgcgg

SEQ ID NO: 232715 - DNA, 50 bp, Artificial
  Synthetic oligonucleotide
cggagggcggccctttcccttcgcactatgcaaacaccaccgagattgct

SEQ ID NO: 232716 - DNA, 50 bp, Artificial
  Synthetic oligonucleotide
acgacccaaagggcgatgctcgaaccaccaagcagcccgaatgttcccgc

SEQ ID NO: 232717 - DNA, 50 bp, Artificial
  Synthetic oligonucleotide
acgacgctcatcgcgacatccgtagcggaaccacccgaagccgcaactgg

SEQ ID NO: 232718 - DNA, 50 bp, Artificial
  Synthetic oligonucleotide
acattgaccgttgcacagccgggagaatgacgtcgccccaagcgcagttc

SEQ ID NO: 232719 - DNA, 50 bp, Artificial
  Synthetic oligonucleotide
accacaccaatcgggcatgagcgttggcgaagaaagctcctcggcccatc

SEQ ID NO: 232720 - DNA, 50 bp, Artificial
  Synthetic oligonucleotide
accatggctactacatacgcccccgtcgccaatccccttgccgccagacc

SEQ ID NO: 232721 - DNA, 50 bp, Artificial
  Synthetic oligonucleotide
acccaccgggagacggacacctccgatgccaggcacacaacaaaccatcg

SEQ ID NO: 232722 - DNA, 50 bp, Artificial
  Synthetic oligonucleotide
acccaggtcggatccgagttcaacgtccccaatctgtccgttcgccgctg

SEQ ID NO: 232723 - DNA, 50 bp, Artificial
  Synthetic oligonucleotide
acccccgcgttctccaggactgagcagcacaagaattcccccaaggacgc

SEQ ID NO: 232724 - DNA, 50 bp, Artificial
  Synthetic oligonucleotide
acccccggccaccttgagcgatgcccgtgccagcatgtcgagatgacggg

SEQ ID NO: 232725 - DNA, 58 bp, Artificial
  Synthetic oligonucleotide
gaaacgcccggctaccttgatcacaggcgtaagatcaacagcgagcagggcccgttcg

SEQ ID NO: 232726 - DNA, 50 bp, Artificial
  Synthetic oligonucleotide
cctcgtgtttcgagactggctcctctccacgccgtcagacctctgcggca

SEQ ID NO: 232727 - DNA, 50 bp, Artificial
  Synthetic oligonucleotide
cctcggggtgttgggtttccggaaggggatcggcacaaagaggatcgtct

SEQ ID NO: 232728 - DNA, 50 bp, Artificial
  Synthetic oligonucleotide
caagttgcccgatagtcgaataccggggaccggcggacgaggcctaagct

SEQ ID NO: 232729 - DNA, 50 bp, Artificial
  Synthetic oligonucleotide
tccgccattcgaatcatccgcggctccgtgacggcacaacgcaacatcag

SEQ ID NO: 232730 - DNA, 50 bp, Artificial
  Synthetic oligonucleotide
gaacggtcccctgcggacttgaccgaagaggctaggccgttatgctccct

SEQ ID NO: 232731 - DNA, 50 bp, Artificial
  Synthetic oligonucleotide
accctttcggtgtaaggggccggatcatcggagcactcccccgatcccac

SEQ ID NO: 232732 - DNA, 50 bp, Artificial
  Synthetic oligonucleotide
tcccggcaaaaaccaaagaagggacacccggaacagggccagcgaaggat

SEQ ID NO: 232733 - DNA, 50 bp, Artificial
  Synthetic oligonucleotide
caagtattcgctggaagcggtttgctggggccgaaggccgtacggattga

SEQ ID NO: 232734 - DNA, 50 bp, Artificial
  Synthetic oligonucleotide
accggaaatgggggcgcacgtgactgtaatcgtccttccaagcggcccgc

SEQ ID NO: 232735 - DNA, 50 bp, Artificial
  Synthetic oligonucleotide
ccccgaccttgtggttcttccggcccaaccggatagcgcaaagggcagag

SEQ ID NO: 232736 - DNA, 58 bp, Artificial
  Synthetic oligonucleotide
attccttctcacatcggggggttcgggacgatggacacgtccgatttcatgatcgctc

SEQ ID NO: 232737 - DNA, 50 bp, Artificial
  Synthetic oligonucleotide
tcatgaccatcatccccaggaccgccaaaccacgttgtcattgggcgcct

SEQ ID NO: 232738 - DNA, 50 bp, Artificial
  Synthetic oligonucleotide
ttcgcgaggaagggcgaaccgtcaccgaagggtggctggcggactggcgg

SEQ ID NO: 232739 - DNA, 50 bp, Artificial
  Synthetic oligonucleotide
aacccttcggatgaaacccatgggactgccgtgtcggcgatagacggacc

SEQ ID NO: 232740 - DNA, 50 bp, Artificial
  Synthetic oligonucleotide
ttccggccccgaaccccgacatccgggcctgaagacggttcctgcacgag

SEQ ID NO: 232741 - DNA, 50 bp, Artificial
  Synthetic oligonucleotide
ctgaactgggcgttccgagcggttgccacggccgatgatgcaaatacgtg

SEQ ID NO: 232742 - DNA, 50 bp, Artificial
  Synthetic oligonucleotide
catcgcggagctagtcctgccgacggaacggtgcatcgtggggacgacgc

SEQ ID NO: 232743 - DNA, 50 bp, Artificial
  Synthetic oligonucleotide
aacggagtgtcgtgtcgcggcccgataatgtcccggcggctgcgttattt

SEQ ID NO: 232744 - DNA, 50 bp, Artificial
  Synthetic oligonucleotide
aacgtcaatagactgggtccggggtggggacagggttacggttcgggtga

SEQ ID NO: 232745 - DNA, 50 bp, Artificial
  Synthetic oligonucleotide
ttacgttataacgtgacaccaaagtgaaactggcttccctatgcgctgaa

SEQ ID NO: 232746 - DNA, 50 bp, Artificial
  Synthetic oligonucleotide
aacgtccggtctgctaagaaaactccgcagccctctccccgctaccgagg

SEQ ID NO: 232747 - DNA, 60 bp, Artificial
  Synthetic oligonucleotide
gactcacacgcatggtacgctcctatttagatttcgaatgacatctataggagatatgga

SEQ ID NO: 232748 - DNA, 50 bp, Artificial
  Synthetic oligonucleotide
aactccggctggtgacggagaacgtgatctgccaagccgtgaacgcgcaa

SEQ ID NO: 232749 - DNA, 50 bp, Artificial
  Synthetic oligonucleotide
tgttgcactggaccatcaagcccgcctctgcctcaccgcaaggagagacg

SEQ ID NO: 232750 - DNA, 50 bp, Artificial
  Synthetic oligonucleotide
ctgccgccctcccgcttccctcgcttctcccccaaggggcctgacatgtc

SEQ ID NO: 232751 - DNA, 50 bp, Artificial
  Synthetic oligonucleotide
aagacggcccttgcgagggtgcgcccctatccatatattgcgctgcgact

SEQ ID NO: 232752 - DNA, 50 bp, Artificial
  Synthetic oligonucleotide
cgataccggttgaagggaccacgtcctttcaatgtggctcggcccacggg

SEQ ID NO: 232753 - DNA, 50 bp, Artificial
  Synthetic oligonucleotide
aagacggggacctcctacccatccagggacacgggagcacacgatacgca

SEQ ID NO: 232754 - DNA, 50 bp, Artificial
  Synthetic oligonucleotide
catagcacgaaagcatgagaacgccccgcggagggccgcttaacccggtc

SEQ ID NO: 232755 - DNA, 50 bp, Artificial
  Synthetic oligonucleotide
ttttgggaaaagcggattcatggttccgaaagcgttgacaaggcaacggc

SEQ ID NO: 232756 - DNA, 50 bp, Artificial
  Synthetic oligonucleotide
aaaaccaaagaagggacacccggaacagggccagcgaaggatgatcggtt

SEQ ID NO: 232757 - DNA, 50 bp, Artificial
  Synthetic oligonucleotide
ctcggtcgtttgggctattccagagcgaaccattcaagactgtttggcgg

SEQ ID NO: 232758 - DNA, 54 bp, Artificial
  Synthetic oligonucleotide
atttcgaaattcggataaccccgatgctccattggcacgggctttccgggtgac

SEQ ID NO: 232759 - DNA, 50 bp, Artificial
  Synthetic oligonucleotide
ttggtgaacgggtggaagggggcgtttattccggcgggggagcgaatttg

SEQ ID NO: 232760 - DNA, 50 bp, Artificial
  Synthetic oligonucleotide
aaaccgccgagaggcctagcctccccgcttttcttaagatcacgcggctc

SEQ ID NO: 232761 - DNA, 50 bp, Artificial
  Synthetic oligonucleotide
cgatccatggcggtcccagtctgaagcggcccgggggtcgtttgatggcg

SEQ ID NO: 232762 - DNA, 50 bp, Artificial
  Synthetic oligonucleotide
aaaccttctctgtggatgtcggggttcccgcgtgtcggacggacggaccg

SEQ ID NO: 232763 - DNA, 50 bp, Artificial
  Synthetic oligonucleotide
ttggcgcgtgacaaagggagaagcttctggttgctcagattttgataacg

SEQ ID NO: 232764 - DNA, 50 bp, Artificial
  Synthetic oligonucleotide
aaacgcgaggtgctttctctttcgctcggcgcacaactttacccgcgctg

SEQ ID NO: 232765 - DNA, 50 bp, Artificial
  Synthetic oligonucleotide
aaacgtcgcaaaggtgaaatgcccatggggtgcccccgaccacaggggta

SEQ ID NO: 232766 - DNA, 50 bp, Artificial
  Synthetic oligonucleotide
aaagcatgagaacgccccgcggagggccgcttaacccggtcttaaccgcc

SEQ ID NO: 232767 - DNA, 50 bp, Artificial
  Synthetic oligonucleotide
ttgcgtcgggtccgcatcttcggctattcagggcgcacgcttgtgctacc

SEQ ID NO: 232768 - DNA, 50 bp, Artificial
  Synthetic oligonucleotide
aaaggcccgagccgtttgacaattccagcctgcgcacgcgttcaagcgac

SEQ ID NO: 232769 - DNA, 54 bp, Artificial
  Synthetic oligonucleotide
cccggtccgattcttgtctcttggtcccgttccgttctactgcttgggtgaaca

SEQ ID NO: 232770 - DNA, 54 bp, Artificial
  Synthetic oligonucleotide
gaacggaggtcatggggcgtgtctcaacggttgcgcgtgaaacgaagggggtag

SEQ ID NO: 232771 - DNA, 50 bp, Artificial
  Synthetic oligonucleotide
aaagggaccgccaatgtcggcagcttcactccgtctggtagacaccccca

SEQ ID NO: 232772 - DNA, 50 bp, Artificial
  Synthetic oligonucleotide
aaatccgcgccttgagggatggacggtggtccaacgcccctttcggttgt

SEQ ID NO: 232773 - DNA, 50 bp, Artificial
  Synthetic oligonucleotide
ccacgtacgaagcccgtcccatcggtctgaagtggaggctctggctgctt

SEQ ID NO: 232774 - DNA, 50 bp, Artificial
  Synthetic oligonucleotide
aacagaagcgtcatggcagcaagccgttagcggaggaacacgtcaccgct

SEQ ID NO: 232775 - DNA, 50 bp, Artificial
  Synthetic oligonucleotide
ctcttcccggccgttgcggcccctgactttcgccgtcgagcctatccgga

SEQ ID NO: 232776 - DNA, 50 bp, Artificial
  Synthetic oligonucleotide
aaccaggtgcggacgcgccattgaccccgggtccaaacgagaaacctata

SEQ ID NO: 232777 - DNA, 50 bp, Artificial
  Synthetic oligonucleotide
tgctccgctgcgttatcagcggtgggaatttgcgggccgacagggtaaga

SEQ ID NO: 232778 - DNA, 50 bp, Artificial
  Synthetic oligonucleotide
aaggccacggaccccgtgagatcggtcagacccccgttctgcttcaaggc

SEQ ID NO: 232779 - DNA, 49 bp, Artificial
  Synthetic oligonucleotide
aagggggcccagttcctagggtcttggggttaaagcctttccgcaccgc

SEQ ID NO: 232780 - DNA, 50 bp, Artificial
  Synthetic oligonucleotide
aagtatttgtgcgccgcggggaaaggacaagcgggggtatgccccgtctt

SEQ ID NO: 232781 - DNA, 60 bp, Artificial
  Synthetic oligonucleotide
attttaggcggatgccgttcttttaggcgcccaatcaacgggcatagtctcatcatcgca

SEQ ID NO: 232782 - DNA, 50 bp, Artificial
  Synthetic oligonucleotide
ctccgaatgcgagaccgggaccgttacgcctcgtgggtggtactctacga

SEQ ID NO: 232783 - DNA, 50 bp, Artificial
  Synthetic oligonucleotide
aagtccctgctcgctctctccgccgaggattccacccgatgacccgtgcc

SEQ ID NO: 232784 - DNA, 50 bp, Artificial
  Synthetic oligonucleotide
aagtgtgcctgagacgaaagcgccccgtccatgccggaagtcgggcctcc

SEQ ID NO: 232785 - DNA, 50 bp, Artificial
  Synthetic oligonucleotide
cgaatgggatcatcgttcgcggtttgaggaatcgtgctccaagcgtagtg

SEQ ID NO: 232786 - DNA, 50 bp, Artificial
  Synthetic oligonucleotide
aatcagccgtttgcttgtttaaagtaaggcgttggcgtcttctttatcac

SEQ ID NO: 232787 - DNA, 50 bp, Artificial
  Synthetic oligonucleotide
cagccgtcgtcacggtgggctcaacactgttaaccccgtcttaacgccgc

SEQ ID NO: 232788 - DNA, 50 bp, Artificial
  Synthetic oligonucleotide
aatcgcgggggccgggataccgccatgtgtcgcaacaccctctctcgacg

SEQ ID NO: 232789 - DNA, 50 bp, Artificial
  Synthetic oligonucleotide
aatgacgtttggcgggttgtgcgccctgtgtccgttcgtccgatgatcgg

SEQ ID NO: 232790 - DNA, 50 bp, Artificial
  Synthetic oligonucleotide
cgaaagtggtgcaataggcacattccgcttggtggccggtatgggcagct

SEQ ID NO: 232791 - DNA, 50 bp, Artificial
  Synthetic oligonucleotide
aatgcaacgctgctcgatacgagacgggggcgattcatccacggctcact

SEQ ID NO: 232792 - DNA, 56 bp, Artificial
  Synthetic oligonucleotide
gaccgtgcgatttgcttctccgccggatggaggaaacgccgggcgggtgaggtgac

SEQ ID NO: 232793 - DNA, 50 bp, Artificial
  Synthetic oligonucleotide
cagcagaggaatccgggcttggaaggtcgatcccgtctcgtctgagcgca

SEQ ID NO: 232794 - DNA, 50 bp, Artificial
  Synthetic oligonucleotide
cagatcgtggcaccccggaaccaaacggacagccgcggagagcggccctc

SEQ ID NO: 232795 - DNA, 50 bp, Artificial
  Synthetic oligonucleotide
aagagcgccggacgcccaagccgtatcaaatcacggccagccttcaggta

SEQ ID NO: 232796 - DNA, 50 bp, Artificial
  Synthetic oligonucleotide
cgacagggaaccgccaaccgattccgcttgccaactgcgggcaggaattt

SEQ ID NO: 232797 - DNA, 50 bp, Artificial
  Synthetic oligonucleotide
aagagtcaacgccgggtttgtaccggttgaagtggccgcgcatcccgcta

SEQ ID NO: 232798 - DNA, 50 bp, Artificial
  Synthetic oligonucleotide
aagcaacctagcgtggcgaccaatcccctcgtcggggagcctgtcactga

SEQ ID NO: 232799 - DNA, 50 bp, Artificial
  Synthetic oligonucleotide
aagcaccgtcgtttgggccggtcctcgtgttctcgaaggcccgttgcccg

SEQ ID NO: 232800 - DNA, 50 bp, Artificial
  Synthetic oligonucleotide
cgccgtaacatgagcaagcgtgacatgagtgggcgtgacaggagcaagcc

SEQ ID NO: 232801 - DNA, 50 bp, Artificial
  Synthetic oligonucleotide
aagcacggggcctgctggaaagcacggccggaatgggttcccctgaatca

SEQ ID NO: 232802 - DNA, 50 bp, Artificial
  Synthetic oligonucleotide
aagcatgattccggcgagccatctcagacgcggcacgaacagtgccagag

SEQ ID NO: 232803 - DNA, 56 bp, Artificial
  Synthetic oligonucleotide
caaagatcaggattcgggcgggaatcgggtggattcactccgtagccggcaccgtc

SEQ ID NO: 232804 - DNA, 50 bp, Artificial
  Synthetic oligonucleotide
aagccaacagggtgctttcgcgctcccaacgacatccggtccagagcaac

SEQ ID NO: 232805 - DNA, 50 bp, Artificial
  Synthetic oligonucleotide
aagccccagtcgtaggggagcgcaaagcagccttggtaagcgcgcaactg

SEQ ID NO: 232806 - DNA, 50 bp, Artificial
  Synthetic oligonucleotide
aagccgcggcgagatgccccggttttggtcgcgaaggtccggtgtgtaga

SEQ ID NO: 232807 - DNA, 50 bp, Artificial
  Synthetic oligonucleotide
aagccgttagcggaggaacacgtcaccgcttatcccacacgggggcggaa

SEQ ID NO: 232808 - DNA, 50 bp, Artificial
  Synthetic oligonucleotide
aagcctgggactgtccagacaaccggccccaatgtcgagactctgcctcg

SEQ ID NO: 232809 - DNA, 50 bp, Artificial
  Synthetic oligonucleotide
aagcggcccgggggtcgtttgatggcggtcgattgaccttagtagcggtg

SEQ ID NO: 232810 - DNA, 50 bp, Artificial
  Synthetic oligonucleotide
aagcgggtggtggcctctcaaccggtgcgttctgacacatgttcgcgagg

SEQ ID NO: 232811 - DNA, 50 bp, Artificial
  Synthetic oligonucleotide
aaggaagtatgccgcacctctgctacaccgaagaaggacccgcctgtgcg

SEQ ID NO: 232812 - DNA, 50 bp, Artificial
  Synthetic oligonucleotide
tgctctactcgcaggccgtgacgaagcttgggttcgtgaagggggcagga

SEQ ID NO: 232813 - DNA, 50 bp, Artificial
  Synthetic oligonucleotide
agggaatcagcccctcgtgaacggcatagcggatcaagtcggcagtacga

SEQ ID NO: 232814 - DNA, 60 bp, Artificial
  Synthetic oligonucleotide
gaagggcacgtcacggcaacggaggtcaatcggtcacgccgccatggctggcacgtccat

SEQ ID NO: 232815 - DNA, 50 bp, Artificial
  Synthetic oligonucleotide
agggagggtgcctgccaagtcacttcgaaaggggtgggacagccatccgc

SEQ ID NO: 232816 - DNA, 50 bp, Artificial
  Synthetic oligonucleotide
ggcaaggcctgtgaccacgttcggccggtaacctttcgttagccatggcg

SEQ ID NO: 232817 - DNA, 50 bp, Artificial
  Synthetic oligonucleotide
agggcatcgagtgtggaagggaacatgcggggtgcggacatctgaacgca

SEQ ID NO: 232818 - DNA, 50 bp, Artificial
  Synthetic oligonucleotide
ggatgtgtgcggcatgaatcccaccattcacggctgaattacaccattcc

SEQ ID NO: 232819 - DNA, 50 bp, Artificial
  Synthetic oligonucleotide
cgtggccccgaaactcttcccggccgttgcggcccctgactttcgccgtc

SEQ ID NO: 232820 - DNA, 50 bp, Artificial
  Synthetic oligonucleotide
aggggactcccgagaccggaaatgggggcgcacgtgactgtaatcgtcct

SEQ ID NO: 232821 - DNA, 50 bp, Artificial
  Synthetic oligonucleotide
atcggttaatctccgcttaaggaccccggaaaggccacaggtcggcccat

SEQ ID NO: 232822 - DNA, 50 bp, Artificial
  Synthetic oligonucleotide
atccttcgctccgcgcaattccgtatcgccaaaggggcttctgcatggca

SEQ ID NO: 232823 - DNA, 50 bp, Artificial
  Synthetic oligonucleotide
aggggcctcgcaacgacatattgatccgtgccctctcacacccgcgctcc

SEQ ID NO: 232824 - DNA, 50 bp, Artificial
  Synthetic oligonucleotide
atccgaaaggttggggacgcatcctaaaccctccgcgccacacgctgggg

SEQ ID NO: 232825 - DNA, 60 bp, Artificial
  Synthetic oligonucleotide
gaagggccatagcctgtatgtggtcgcggaccgcatcaggacagcgaatcgtccatctcg

SEQ ID NO: 232826 - DNA, 50 bp, Artificial
  Synthetic oligonucleotide
aggggtgtgggacctgcgccttcactatgacggcattgtgtttcgccagg

SEQ ID NO: 232827 - DNA, 50 bp, Artificial
  Synthetic oligonucleotide
aggggttgtcccaaaggccacggaccccgtgagatcggtcagacccccgt

SEQ ID NO: 232828 - DNA, 50 bp, Artificial
  Synthetic oligonucleotide
ggacggctccctgaacgcctctgacttaggtcgggtagggtgcgacaata

SEQ ID NO: 232829 - DNA, 50 bp, Artificial
  Synthetic oligonucleotide
ggacggcagggctcgactgcgaaagccagtccgtggtcaatccaggaggt

SEQ ID NO: 232830 - DNA, 50 bp, Artificial
  Synthetic oligonucleotide
agggtcggggagctaaatggaaaggggccgatcacgccatggcttggtat

SEQ ID NO: 232831 - DNA, 50 bp, Artificial
  Synthetic oligonucleotide
agcttcagccccgacggtggacgcgtggtcacagtatctgatggtgggac

SEQ ID NO: 232832 - DNA, 50 bp, Artificial
  Synthetic oligonucleotide
ggctcgactgcgaaagccagtccgtggtcaatccaggaggtgcgatctgg

SEQ ID NO: 232833 - DNA, 50 bp, Artificial
  Synthetic oligonucleotide
aggacggaagggcggcatcctacaccaagacctccagaagggccaagacg

SEQ ID NO: 232834 - DNA, 50 bp, Artificial
  Synthetic oligonucleotide
ccgagcacacgacactgaactgggcgttccgagcggttgccacggccgat

SEQ ID NO: 232835 - DNA, 50 bp, Artificial
  Synthetic oligonucleotide
cggtttttgacacagcacacccccgcccgaatccttagcctgcgacagcg

SEQ ID NO: 232836 - DNA, 60 bp, Artificial
  Synthetic oligonucleotide
ggcgcagatgcggggcggaatcaaatcgatagaggtgcgattgttgtgaatttcccgtaa

SEQ ID NO: 232837 - DNA, 50 bp, Artificial
  Synthetic oligonucleotide
ggcggtccgacatatggtatctagcccttcggaacatggatcgccggggt

SEQ ID NO: 232838 - DNA, 50 bp, Artificial
  Synthetic oligonucleotide
cgtatagtcccccgtgctgacgtggccatactgccgccaatcgaccccgt

SEQ ID NO: 232839 - DNA, 50 bp, Artificial
  Synthetic oligonucleotide
aggatcggctcccaccgtcacgggaccccaggcatggcttcagagatccg

SEQ ID NO: 232840 - DNA, 50 bp, Artificial
  Synthetic oligonucleotide
cccgtccatagcggtccagactacgccatcttccggcaacacgtcccaca

SEQ ID NO: 232841 - DNA, 50 bp, Artificial
  Synthetic oligonucleotide
aggccagagccgaacacaaagtatttgtgcgccgcggggaaaggacaagc

SEQ ID NO: 232842 - DNA, 50 bp, Artificial
  Synthetic oligonucleotide
aggccccgatccaatagtatatacctcttcggggtgaggactgttcggtc

SEQ ID NO: 232843 - DNA, 50 bp, Artificial
  Synthetic oligonucleotide
atgcacgcagtttcagcccaccagacatcgtacccgtcccttcaggcgac

SEQ ID NO: 232844 - DNA, 50 bp, Artificial
  Synthetic oligonucleotide
ggccgacatgatagcgcaatcaaccgttcggggaatcccccttccaccgg

SEQ ID NO: 232845 - DNA, 50 bp, Artificial
  Synthetic oligonucleotide
aggcggttagtatcgcccgaacggacccgtgagagtccgatgcgtggggg

SEQ ID NO: 232846 - DNA, 50 bp, Artificial
  Synthetic oligonucleotide
aggctaaagcaaggccagagccgaacacaaagtatttgtgcgccgcgggg

SEQ ID NO: 232847 - DNA, 60 bp, Artificial
  Synthetic oligonucleotide
ggcgcactgcaccaatagcatgtgggcacattacgcatctaaggttgcaaacagaggtgg

SEQ ID NO: 232848 - DNA, 50 bp, Artificial
  Synthetic oligonucleotide
atgacagaccggacgagaggcgctttgacagcgggtcgggaatggtccaa

SEQ ID NO: 232849 - DNA, 50 bp, Artificial
  Synthetic oligonucleotide
aggcttcgacaaccctgcgccggtgggcaaactggggtcgcatcccccta

SEQ ID NO: 232850 - DNA, 50 bp, Artificial
  Synthetic oligonucleotide
gcgcggatcgcattcccgtatcgcggcaaccagggccatgtgggtatggt

SEQ ID NO: 232851 - DNA, 50 bp, Artificial
  Synthetic oligonucleotide
agtcccgcctcgggtcggagggaaagcacggttgttgcccaggcccggca

SEQ ID NO: 232852 - DNA, 50 bp, Artificial
  Synthetic oligonucleotide
gcgcagacaaacgcgctggaccggggacctgtccggttcgccacactgag

SEQ ID NO: 232853 - DNA, 50 bp, Artificial
  Synthetic oligonucleotide
cccgcggaaatgccatcatgtcgcagttttgccttcacttgggcacagcg

SEQ ID NO: 232854 - DNA, 50 bp, Artificial
  Synthetic oligonucleotide
gcgatagtggagcgttgcccctacttgcattgcaggtcccacgcgaaagg

SEQ ID NO: 232855 - DNA, 50 bp, Artificial
  Synthetic oligonucleotide
gcgagtcaccagcagtggacggcagggctcgactgcgaaagccagtccgt

SEQ ID NO: 232856 - DNA, 50 bp, Artificial
  Synthetic oligonucleotide
gcgacctctggccagcgcggatcgcattcccgtatcgcggcaaccagggc

SEQ ID NO: 232857 - DNA, 50 bp, Artificial
  Synthetic oligonucleotide
agtcgcagcgcatggttctgccttccttcccgtggctcctacggcgggtc

SEQ ID NO: 232858 - DNA, 60 bp, Artificial
  Synthetic oligonucleotide
ggccattgctgacctttaaagccgcatgccccgccagtaagcgagaggagctacagtccg

SEQ ID NO: 232859 - DNA, 50 bp, Artificial
  Synthetic oligonucleotide
agtcggacggcaaagagtgggtgcggtcaagcggccggaatgggtacccc

SEQ ID NO: 232860 - DNA, 50 bp, Artificial
  Synthetic oligonucleotide
agtgccggtattgggtggggcgttctttcggttctcgctgtggcggcatt

SEQ ID NO: 232861 - DNA, 50 bp, Artificial
  Synthetic oligonucleotide
gcctctcccacatctacggcgacgcatgcatccttgcggatcgcactggt

SEQ ID NO: 232862 - DNA, 50 bp, Artificial
  Synthetic oligonucleotide
agtggcgctcataacaggagtcacgggccaggatggagcgtatctggcgg

SEQ ID NO: 232863 - DNA, 50 bp, Artificial
  Synthetic oligonucleotide
agtggtttggccgctgttcggggtgacgacagaatccccggttggcacct

SEQ ID NO: 232864 - DNA, 50 bp, Artificial
  Synthetic oligonucleotide
cgtgatctgccaagccgtgaacgcgcaaggcatgtgggttcgacttccgg

SEQ ID NO: 232865 - DNA, 50 bp, Artificial
  Synthetic oligonucleotide
agtgtgtgccgcccccataggcgagcagggctgaaagatggtcattgcgg

SEQ ID NO: 232866 - DNA, 50 bp, Artificial
  Synthetic oligonucleotide
agttatgactcggaacatttccgggtgactgccggcccgagggcgccaaa

SEQ ID NO: 232867 - DNA, 50 bp, Artificial
  Synthetic oligonucleotide
agttccgcagtgtccagagcccctcctcatgggggatagcctgtcgacgc

SEQ ID NO: 232868 - DNA, 50 bp, Artificial
  Synthetic oligonucleotide
ataagctggcgtcgggtatccctggcgtacccctggaaggacgcgatctt

SEQ ID NO: 232869 - DNA, 60 bp, Artificial
  Synthetic oligonucleotide
ggccatggacagctcatgccaatggtcgctcggattctcggatttatttccgatatacct

SEQ ID NO: 232870 - DNA, 50 bp, Artificial
  Synthetic oligonucleotide
ataagggtactcgtgcataccaggtgctcgcgcgtcaaatcggggccgca

SEQ ID NO: 232871 - DNA, 50 bp, Artificial
  Synthetic oligonucleotide
agggtggctgcaggcccgaacattcctgtccccgaattgtcacatcggag

SEQ ID NO: 232872 - DNA, 50 bp, Artificial
  Synthetic oligonucleotide
atatgcgagcctgccccgcgaccatggggcgattgccaagggagaatcac

SEQ ID NO: 232873 - DNA, 49 bp, Artificial
  Synthetic oligonucleotide
ggacccacccacgggggcggttcgttggagggttcgttcctttggcgcc

SEQ ID NO: 232874 - DNA, 50 bp, Artificial
  Synthetic oligonucleotide
aggtaggctcccgcgactccccttacgcaatcacgagggaatcagcccct

SEQ ID NO: 232875 - DNA, 50 bp, Artificial
  Synthetic oligonucleotide
aggtccgcaagccgcattccgaaacagcaagggagcgttcccccaatggt

SEQ ID NO: 232876 - DNA, 50 bp, Artificial
  Synthetic oligonucleotide
atagactcttcggttatggcgtctggcccacttggtcatgtgggggccgc

SEQ ID NO: 232877 - DNA, 50 bp, Artificial
  Synthetic oligonucleotide
cgtgcgattccttctatgcggccagggcacgtccgaaatcctgtggtcga

SEQ ID NO: 232878 - DNA, 50 bp, Artificial
  Synthetic oligonucleotide
aggttggggtcgtgacgacgtgccgggtgctcctgcgatgaccgccaaga

SEQ ID NO: 232879 - DNA, 50 bp, Artificial
  Synthetic oligonucleotide
agtaagaccagaccccgtcaaacgcgccagaggggtgccatccccagcgc

SEQ ID NO: 232880 - DNA, 54 bp, Artificial
  Synthetic oligonucleotide
cccggtagcgctaccgcggtatcacctcacaatcggccggcttggaccggaacc

SEQ ID NO: 232881 - DNA, 58 bp, Artificial
  Synthetic oligonucleotide
ccattcaacgccggtgacgcacccgtacaatcggcgggtggatcctttcgccatgcta

SEQ ID NO: 232882 - DNA, 50 bp, Artificial
  Synthetic oligonucleotide
agtacggcgcttaactgggacgtgtatcacccttcgcttgcggcgggtaa

SEQ ID NO: 232883 - DNA, 50 bp, Artificial
  Synthetic oligonucleotide
gcgtttattccggcgggggagcgaatttgttggggagggggcattcgtaa

SEQ ID NO: 232884 - DNA, 50 bp, Artificial
  Synthetic oligonucleotide
agtcatcttcggttggagcgcctaggtgtgactgatccggcctccgccga

SEQ ID NO: 232885 - DNA, 50 bp, Artificial
  Synthetic oligonucleotide
gcgtccttaattgaggccaaaagcgggagaaacagcccttcgaggttgtc

SEQ ID NO: 232886 - DNA, 50 bp, Artificial
  Synthetic oligonucleotide
agtcatgggaaggaccctttcccgtcttgggggtagctcgacgcgcccct

SEQ ID NO: 232887 - DNA, 50 bp, Artificial
  Synthetic oligonucleotide
gcggcggtgtggaggttgcggtataagaggccgacctgaggcatcacggg

SEQ ID NO: 232888 - DNA, 50 bp, Artificial
  Synthetic oligonucleotide
atacggatgggcctctcccacatctacggcgacgcatgcatccttgcgga

SEQ ID NO: 232889 - DNA, 50 bp, Artificial
  Synthetic oligonucleotide
agtccaccaaagagggtcggggagctaaatggaaaggggccgatcacgcc

SEQ ID NO: 232890 - DNA, 50 bp, Artificial
  Synthetic oligonucleotide
atacccgaacactccacgacatgggtgggcccgatgcgcaatgcagtcaa

SEQ ID NO: 232891 - DNA, 50 bp, Artificial
  Synthetic oligonucleotide
agtccatcccgcctcccaccaaaatcgcacgggggaatggtcaggtacgg

SEQ ID NO: 232892 - DNA, 60 bp, Artificial
  Synthetic oligonucleotide
ccatggagttccgcgtcttcaggcgccccgttacacacatgcagtgaaaagatagcgcga

SEQ ID NO: 232893 - DNA, 50 bp, Artificial
  Synthetic oligonucleotide
gcgcgttgttgcacggatggatctggtggggtaagccatggcccgttgtt

SEQ ID NO: 232894 - DNA, 50 bp, Artificial
  Synthetic oligonucleotide
atttgtcgcgcatagcacgaaagcatgagaacgccccgcggagggccgct

SEQ ID NO: 232895 - DNA, 50 bp, Artificial
  Synthetic oligonucleotide
atttggttgtgtgcgtagggtccagtggataaccccgagtcgcgtgagta

SEQ ID NO: 232896 - DNA, 50 bp, Artificial
  Synthetic oligonucleotide
actcctgctgggttcggtcgacttgggttgcgtcgcaaaagggggttctg

SEQ ID NO: 232897 - DNA, 50 bp, Artificial
  Synthetic oligonucleotide
gacgctccactgacgtcgaaacaccctgcgggacgctccgtggcctcata

SEQ ID NO: 232898 - DNA, 50 bp, Artificial
  Synthetic oligonucleotide
gttagccggtccctttccgtttccaccccatggtgtttatgaccgcgggc

SEQ ID NO: 232899 - DNA, 50 bp, Artificial
  Synthetic oligonucleotide
actcgtgcataccaggtgctcgcgcgtcaaatcggggccgcatcgcttcc

SEQ ID NO: 232900 - DNA, 50 bp, Artificial
  Synthetic oligonucleotide
cggcgtagttcgtgtccagtttcgcgatgtcctcctgagtaaggccgggc

SEQ ID NO: 232901 - DNA, 50 bp, Artificial
  Synthetic oligonucleotide
actgatcccgagcgtccgttccggaagacccagcgcatgtcacagcggtc

SEQ ID NO: 232902 - DNA, 50 bp, Artificial
  Synthetic oligonucleotide
gacggagaacgtgatctgccaagccgtgaacgcgcaaggcatgtgggttc

SEQ ID NO: 232903 - DNA, 60 bp, Artificial
  Synthetic oligonucleotide
ggcaatatccgacgctgaaggaagcgcaatcataaccacggacatcaacactgtcgaagc

SEQ ID NO: 232904 - DNA, 50 bp, Artificial
  Synthetic oligonucleotide
cggcgttctttggtgaaacgatgaaaggacaagacagtatggatcaatcg

SEQ ID NO: 232905 - DNA, 50 bp, Artificial
  Synthetic oligonucleotide
ccgtgacgaagcttgggttcgtgaagggggcaggactcgttgagccggga

SEQ ID NO: 232906 - DNA, 50 bp, Artificial
  Synthetic oligonucleotide
agaaacggggacgcgacacataaaccgcaagcccccgcgctcgatgggat

SEQ ID NO: 232907 - DNA, 50 bp, Artificial
  Synthetic oligonucleotide
gtgctgaccgcgagtcaccagcagtggacggcagggctcgactgcgaaag

SEQ ID NO: 232908 - DNA, 50 bp, Artificial
  Synthetic oligonucleotide
ccccgtcgggatgcatcttcgtttccgctgtgctacaccaccgcccagca

SEQ ID NO: 232909 - DNA, 50 bp, Artificial
  Synthetic oligonucleotide
agaagctgcgaattgcttgaggggcggatagtataggtcggcaatgttgc

SEQ ID NO: 232910 - DNA, 50 bp, Artificial
  Synthetic oligonucleotide
attgagtgacgtgccatcgtcacggattggtgaacgggtggaagggggcg

SEQ ID NO: 232911 - DNA, 50 bp, Artificial
  Synthetic oligonucleotide
gtgaccacgttcggccggtaacctttcgttagccatggcgggggaagctt

SEQ ID NO: 232912 - DNA, 50 bp, Artificial
  Synthetic oligonucleotide
ccgtaaccgcgtgatgagcacaagccatgcgccgggctacggatccgaag

SEQ ID NO: 232913 - DNA, 50 bp, Artificial
  Synthetic oligonucleotide
agaccccgggtaatctcgctgtgaaggctgacttcaccggttcccccgca

SEQ ID NO: 232914 - DNA, 56 bp, Artificial
  Synthetic oligonucleotide
ggcaacctaaccgaactcgatgacaggcgtgtgacgcacggccggggtttcacgaa

SEQ ID NO: 232915 - DNA, 50 bp, Artificial
  Synthetic oligonucleotide
tacggcgtaggtcgcagtctaccaccaaggcgagcctttcgttcgtagga

SEQ ID NO: 232916 - DNA, 50 bp, Artificial
  Synthetic oligonucleotide
acgagtccttatgcgcgagtgcgggtggagatcagttctgggccgggaaa

SEQ ID NO: 232917 - DNA, 50 bp, Artificial
  Synthetic oligonucleotide
tacctcctttgtcacccgtaatgtcacaaagccgggcaataattcattaa

SEQ ID NO: 232918 - DNA, 50 bp, Artificial
  Synthetic oligonucleotide
acgatgcgcgaacatgagtgaccacggcgtccttttgattgcgcggggat

SEQ ID NO: 232919 - DNA, 50 bp, Artificial
  Synthetic oligonucleotide
cctcaacccaccgaaacacactgcaaggaacgacaagcatgaccaaggtt

SEQ ID NO: 232920 - DNA, 50 bp, Artificial
  Synthetic oligonucleotide
acgcctcgcttgctcctcaacggaataaattgggccacgccggacccttc

SEQ ID NO: 232921 - DNA, 50 bp, Artificial
  Synthetic oligonucleotide
acgcggatgaactcttgcctagcgcgttcatggtgcttcgggacgcgtta

SEQ ID NO: 232922 - DNA, 50 bp, Artificial
  Synthetic oligonucleotide
cggagtcgatcggggaatgcagaccacggcagcctctctctgcggacatg

SEQ ID NO: 232923 - DNA, 50 bp, Artificial
  Synthetic oligonucleotide
acgctatggtcatggcagaccggggctgtaatccggcgaggcaacaggga

SEQ ID NO: 232924 - DNA, 50 bp, Artificial
  Synthetic oligonucleotide
acgctcccccttcccctacaattgcccatgcccgcagggaacgcaaggcc

SEQ ID NO: 232925 - DNA, 53 bp, Artificial
  Synthetic oligonucleotide
aggggaataccccatgcggacggcttcgatcggtttgccttccctttagcgaa

SEQ ID NO: 232926 - DNA, 50 bp, Artificial
  Synthetic oligonucleotide
acggacggagccgggcagacgagacgtagccgtgagatgcgaccttgcta

SEQ ID NO: 232927 - DNA, 50 bp, Artificial
  Synthetic oligonucleotide
cctcaaacacggatgcccggcgaccgtagggcaacagggttaaaccagcg

SEQ ID NO: 232928 - DNA, 50 bp, Artificial
  Synthetic oligonucleotide
acggaggtgaccatccgatggatcgccatgaaccacgcagtccgctcccc

SEQ ID NO: 232929 - DNA, 50 bp, Artificial
  Synthetic oligonucleotide
cctatgcgtgccgcctatgctgaacggtcattcgacaatatgaacgaccg

SEQ ID NO: 232930 - DNA, 50 bp, Artificial
  Synthetic oligonucleotide
actcagttagagattccagtgtgatgtacgcctaaatctctatagcgctg

SEQ ID NO: 232931 - DNA, 50 bp, Artificial
  Synthetic oligonucleotide
actcccctcgcggtcagtgccgtgaagaaccgagccgaagacgcggggat

SEQ ID NO: 232932 - DNA, 50 bp, Artificial
  Synthetic oligonucleotide
gttgaagcggtccatatgcgtcaggaacagaccgtgcggcgccccttcgt

SEQ ID NO: 232933 - DNA, 50 bp, Artificial
  Synthetic oligonucleotide
agcgagcagtgccaaggcttcgacaaccctgcgccggtgggcaaactggg

SEQ ID NO: 232934 - DNA, 50 bp, Artificial
  Synthetic oligonucleotide
cggtagatctccgaatgcgagaccgggaccgttacgcctcgtgggtggta

SEQ ID NO: 232935 - DNA, 50 bp, Artificial
  Synthetic oligonucleotide
ccggatcgattcgcctccggaatggttttccgccgctcgcagaggccggt

SEQ ID NO: 232936 - DNA, 58 bp, Artificial
  Synthetic oligonucleotide
ggagcataatcgtctgtccccaccccactcaagcggtgtgacgtcccaggctccgttc

SEQ ID NO: 232937 - DNA, 50 bp, Artificial
  Synthetic oligonucleotide
ggtggaaacgcaaccgcatctggagccgaagcctcatgtcgatccggtcc

SEQ ID NO: 232938 - DNA, 50 bp, Artificial
  Synthetic oligonucleotide
ggtccgcatcttcggctattcagggcgcacgcttgtgctaccggaagggg

SEQ ID NO: 232939 - DNA, 50 bp, Artificial
  Synthetic oligonucleotide
ggtcatccgctgatgcctccgctcttggcaaaatgcgtgtggttccggac

SEQ ID NO: 232940 - DNA, 50 bp, Artificial
  Synthetic oligonucleotide
gggtaaacccatccggtggggcggagttgcccctatgcatagtcgccgaa

SEQ ID NO: 232941 - DNA, 50 bp, Artificial
  Synthetic oligonucleotide
agcgcaacaaggccctacgggaacacgcgataccggttgaagggaccacg

SEQ ID NO: 232942 - DNA, 50 bp, Artificial
  Synthetic oligonucleotide
ccgctgttcggggtgacgacagaatccccggttggcaccttccccagggg

SEQ ID NO: 232943 - DNA, 50 bp, Artificial
  Synthetic oligonucleotide
gggggagatcggtttgtatgactaacaataattggggcgcggcctttgtc

SEQ ID NO: 232944 - DNA, 50 bp, Artificial
  Synthetic oligonucleotide
cggtccatctcacgcggcctccatgtcccgtctcgggttgtggtcggact

SEQ ID NO: 232945 - DNA, 50 bp, Artificial
  Synthetic oligonucleotide
gggctgtgacagcgttgtggccccctgtccgcactgttgcacggaggcac

SEQ ID NO: 232946 - DNA, 50 bp, Artificial
  Synthetic oligonucleotide
atggcagcccctcttgtttgcgacgccctatgggcgatcatcgagcctct

SEQ ID NO: 232947 - DNA, 58 bp, Artificial
  Synthetic oligonucleotide
ggactgctatacgggttgcgcgatagcttgcgtaaagatcgttttgatcccacgggtc

SEQ ID NO: 232948 - DNA, 50 bp, Artificial
  Synthetic oligonucleotide
agcggcggacccccgcgttctccaggactgagcagcacaagaattccccc

SEQ ID NO: 232949 - DNA, 50 bp, Artificial
  Synthetic oligonucleotide
agcggctggacccacagccggctttatccctaaggaacctcgtattcccc

SEQ ID NO: 232950 - DNA, 50 bp, Artificial
  Synthetic oligonucleotide
agcgtaagggggcttggttacgaccgcactcgggcgcaacccatcgggag

SEQ ID NO: 232951 - DNA, 50 bp, Artificial
  Synthetic oligonucleotide
atgccgttctcaactccgccgggcaagtgtcggatcggtcgtttggagta

SEQ ID NO: 232952 - DNA, 50 bp, Artificial
  Synthetic oligonucleotide
cgtgttttccggtcaggatcgatgtccgcagaactgtctccgtccgccga

SEQ ID NO: 232953 - DNA, 50 bp, Artificial
  Synthetic oligonucleotide
agctcatctctcgctcctcccttcggattgcttggggaccgttcgcctga

SEQ ID NO: 232954 - DNA, 50 bp, Artificial
  Synthetic oligonucleotide
agaccctcggcgggaagttcatttcgtgcattgcgattggttcccccgca

SEQ ID NO: 232955 - DNA, 50 bp, Artificial
  Synthetic oligonucleotide
agacgcatccgttttcgagcatgcagtccgcagccctctccccgctaccg

SEQ ID NO: 232956 - DNA, 50 bp, Artificial
  Synthetic oligonucleotide
agacggggccaagaggttcttcagcagcctgttataccgccgcgcctaag

SEQ ID NO: 232957 - DNA, 50 bp, Artificial
  Synthetic oligonucleotide
attcgccatgcggagacgcttgtaccggacgtgtgcaagtgccccggcag

SEQ ID NO: 232958 - DNA, 58 bp, Artificial
  Synthetic oligonucleotide
ggaccgactgcttatggaaatcagaaccgttgacgatcctcagagcctttggtcgagg

SEQ ID NO: 232959 - DNA, 50 bp, Artificial
  Synthetic oligonucleotide
agcaaatggtgggtgcgcttcagtatcaagggccaagggcaaatccgaaa

SEQ ID NO: 232960 - DNA, 50 bp, Artificial
  Synthetic oligonucleotide
cgggtaatgccacgaggccggttacgttgaggccaaagagaccagcctct

SEQ ID NO: 232961 - DNA, 50 bp, Artificial
  Synthetic oligonucleotide
agcagatgacgttggcttgctccgctaccacgctgggccagttttggaac

SEQ ID NO: 232962 - DNA, 50 bp, Artificial
  Synthetic oligonucleotide
agcaggcgtggcgcaggcatatggagatgttcctcgaactcagcggacta

SEQ ID NO: 232963 - DNA, 50 bp, Artificial
  Synthetic oligonucleotide
gagaaggttgatctgcgggatcgatacccctttcccatgttgaccgcgaa

SEQ ID NO: 232964 - DNA, 50 bp, Artificial
  Synthetic oligonucleotide
gtcattggcacggagggtaccgccgcgcttaagcgttgacacatgggagc

SEQ ID NO: 232965 - DNA, 50 bp, Artificial
  Synthetic oligonucleotide
cgggtgtggtgatgtctccccgtcgctcatctttcacgcgtgccaggcat

SEQ ID NO: 232966 - DNA, 50 bp, Artificial
  Synthetic oligonucleotide
agcatgtcggagacgcatccgttttcgagcatgcagtccgcagccctctc

SEQ ID NO: 232967 - DNA, 50 bp, Artificial
  Synthetic oligonucleotide
agcccccggagataccctgaaaccttacgtcggcgcaaccccacccgtct

SEQ ID NO: 232968 - DNA, 50 bp, Artificial
  Synthetic oligonucleotide
agccgccggggcttgagctaacgggtttggatcgtcattgaccggagggc

SEQ ID NO: 232969 - DNA, 56 bp, Artificial
  Synthetic oligonucleotide
aggtgtcttgcattgcgggaaatccgcgcataaggtttttcccactccgtgcggcc

SEQ ID NO: 232970 - DNA, 50 bp, Artificial
  Synthetic oligonucleotide
atgggccgagacaggcccggttcgcactatatccgacaccatagcgcttg

SEQ ID NO: 232971 - DNA, 50 bp, Artificial
  Synthetic oligonucleotide
ccggccgggcgttcccatgtcagacaggtcattctgctacggactgcggg

SEQ ID NO: 232972 - DNA, 50 bp, Artificial
  Synthetic oligonucleotide
gagcggagcggacccgcgcatcaggtgacggccatggagcgttctgccgg

SEQ ID NO: 232973 - DNA, 50 bp, Artificial
  Synthetic oligonucleotide
ccccttcagtccttcgacagggaaccgccaaccgattccgcttgccaact

SEQ ID NO: 232974 - DNA, 50 bp, Artificial
  Synthetic oligonucleotide
agcgaccttcctcccgattcccctgacccttggcgcgggatacacatcgg

SEQ ID NO: 232975 - DNA, 60 bp, Artificial
  Synthetic oligonucleotide
gctgcaccgctacagatgatagtcgagttcgattatccgactcccaccatatcccgatca

SEQ ID NO: 232976 - DNA, 54 bp, Artificial
  Synthetic oligonucleotide
agtatgagatcttccgacgagtacccaatctatcggacgggtccagtttccctt

SEQ ID NO: 232977 - DNA, 60 bp, Artificial
  Synthetic oligonucleotide
agcggaggcaaacgagcaggcgcaacgggaggcagcgcagtccgcccgtcagtacgcggc

SEQ ID NO: 232978 - DNA, 56 bp, Artificial
  Synthetic oligonucleotide
atacgcgggatactgcctgctccactgggatattccgctccacaaggcgctcttta

SEQ ID NO: 232979 - DNA, 56 bp, Artificial
  Synthetic oligonucleotide
aaggccgaaagcatttcgtgacgccagcccggcggtagtcctgcaagctctcggct

SEQ ID NO: 232980 - DNA, 56 bp, Artificial
  Synthetic oligonucleotide
cgttctcatacacgaaaaaagccccagcgactgcgacaacagtcgctggggcggta

SEQ ID NO: 232981 - DNA, 56 bp, Artificial
  Synthetic oligonucleotide
gctgtgactcttcttgctccacgtctcgcttgaggtcggacgcgtcttgatgggta

SEQ ID NO: 232982 - DNA, 50 bp, Artificial
  Synthetic oligonucleotide
cgcacggaaaccctaaatttggcggctacgtttcctgaaaacgacgtccg

SEQ ID NO: 232983 - DNA, 53 bp, Artificial
  Synthetic oligonucleotide
ctcaccgagagacctatcgggaccggagggaaggattcgtaaagcgtcaccct

SEQ ID NO: 232984 - DNA, 55 bp, Artificial
  Synthetic oligonucleotide
cgcacaaccccataagtctgttcgtcaatcgaaaaattaccccctatcagacgcg

SEQ ID NO: 232985 - DNA, 55 bp, Artificial
  Synthetic oligonucleotide
gcatcaagggcatggatggaagtcattccggccgtatctacccggcaagcagcgg

SEQ ID NO: 232986 - DNA, 55 bp, Artificial
  Synthetic oligonucleotide
gccacgaggatgcaaagtgggtgcgcattgttgagttgagcgacgttccggccaa

SEQ ID NO: 232987 - DNA, 55 bp, Artificial
  Synthetic oligonucleotide
gcccatgtcaggacattacaacttcggtttgcccacgagagatcgttcaacttgc

SEQ ID NO: 232988 - DNA, 59 bp, Artificial
  Synthetic oligonucleotide
cgttcgactcgcttgccacaagcgtagacgataacggaactccggatgatatctccgac

SEQ ID NO: 232989 - DNA, 55 bp, Artificial
  Synthetic oligonucleotide
cgatgtccttcttgcttccagggacagcgtggccgattgcatcttccgggacgct

SEQ ID NO: 232990 - DNA, 55 bp, Artificial
  Synthetic oligonucleotide
cgatgcgatagtgatgtaaatggtcacttaccggaatgtcaagcggcggccggct

SEQ ID NO: 232991 - DNA, 55 bp, Artificial
  Synthetic oligonucleotide
cgatatcatatgcattacattatcggtccttataatgaacgtgcgctcacaccgg

SEQ ID NO: 232992 - DNA, 55 bp, Artificial
  Synthetic oligonucleotide
cgaaccaggcgggcatgctgacgggcaatttcctcgcgcgatccgagcaacacaa

SEQ ID NO: 232993 - DNA, 55 bp, Artificial
  Synthetic oligonucleotide
ctcatcaactcatgactcgtcacccatgactcaatggtaaccgttcgcgagcaca

SEQ ID NO: 232994 - DNA, 55 bp, Artificial
  Synthetic oligonucleotide
cgaggttcgaggtccaggaaagcgatcagtcaagtatagaagggaatacggacac

SEQ ID NO: 232995 - DNA, 55 bp, Artificial
  Synthetic oligonucleotide
cgagatagattcgaactcccatgtgcgcaagttttccgcaagaaacctggcaact

SEQ ID NO: 232996 - DNA, 55 bp, Artificial
  Synthetic oligonucleotide
gacgcaaacgggacccatgcaactgcaaacagggccggtccagatcatcctcgtt

SEQ ID NO: 232997 - DNA, 55 bp, Artificial
  Synthetic oligonucleotide
gccccaagtaattgagcaggcgaacgagggtcgcgtcgtctttatcgtcgagggg

SEQ ID NO: 232998 - DNA, 55 bp, Artificial
  Synthetic oligonucleotide
ctccgtgctgtgcattttacgatggactcagaggggacgcctgtagagaccggtg

SEQ ID NO: 232999 - DNA, 60 bp, Artificial
  Synthetic oligonucleotide
ggtggtaggactcgcgagtctcttcccagcgtgcctcagagctgcacgcgccacggtcgc

SEQ ID NO: 233000 - DNA, 54 bp, Artificial
  Synthetic oligonucleotide
cgaaccccacgaaagaaccgaactataactcgcatttctaagtgatttctcagg

SEQ ID NO: 233001 - DNA, 55 bp, Artificial
  Synthetic oligonucleotide
cgacccagtcgacgcaaacgtagtctgaccgccataggccgtaatcgctccctgg

SEQ ID NO: 233002 - DNA, 55 bp, Artificial
  Synthetic oligonucleotide
cgacaaaactgttcgtggagtggtacaacgaagccatcacttaacatcgacccgc

SEQ ID NO: 233003 - DNA, 55 bp, Artificial
  Synthetic oligonucleotide
cgaatgcaacatcgagatggggcttgaccggagacgttttgatgtgtaacgtgct

SEQ ID NO: 233004 - DNA, 55 bp, Artificial
  Synthetic oligonucleotide
ctccacacagcaacaggatccatcgcgtacgcatgacgacaaccgggtctggtca

SEQ ID NO: 233005 - DNA, 55 bp, Artificial
  Synthetic oligonucleotide
ctggagcttgaagtctgagcgcgtatgacgatcaccatgtttcgggcgaagctgc

SEQ ID NO: 233006 - DNA, 55 bp, Artificial
  Synthetic oligonucleotide
cgggcaaccgcccagatctgcgtgtcataaaacgcaaaccggtggtctcgcacgc

SEQ ID NO: 233007 - DNA, 55 bp, Artificial
  Synthetic oligonucleotide
cgggatcccgtttcatgcgtgcgcattcgatgcgtgctgttcgtagtttacgctg

SEQ ID NO: 233008 - DNA, 55 bp, Artificial
  Synthetic oligonucleotide
gatggcttcccgaatgatcgcggtcttcgattcatagaagctgagggtcgtttcc

SEQ ID NO: 233009 - DNA, 55 bp, Artificial
  Synthetic oligonucleotide
gatgcagtgcaatgtcataatactacccagaggtatcgagcaacccatacatccc

SEQ ID NO: 233010 - DNA, 57 bp, Artificial
  Synthetic oligonucleotide
agagaggcgaaagagaaggccctgcacgtcctctaggaccgaaagtgcgtacttcga

SEQ ID NO: 233011 - DNA, 55 bp, Artificial
  Synthetic oligonucleotide
cgtccagtctgcaccatcaaaggtaaccaccttgcctctgaacaagcccgcccag

SEQ ID NO: 233012 - DNA, 55 bp, Artificial
  Synthetic oligonucleotide
cggatggcaagaggattcacttcggaagaatcaacggcgcaaacgagcgaggagg

SEQ ID NO: 233013 - DNA, 55 bp, Artificial
  Synthetic oligonucleotide
ctgactacaaacgcgcggtgcttcaaacgacaggctataaaactcagcgaaacgc

SEQ ID NO: 233014 - DNA, 55 bp, Artificial
  Synthetic oligonucleotide
gatgaactttgctccgttgtgagacgttcataaccgcgtttctgctactgcaacc

SEQ ID NO: 233015 - DNA, 55 bp, Artificial
  Synthetic oligonucleotide
gcaagacaggttcttacccctaaagaacactccgtcagcactcccaagcacgcag

SEQ ID NO: 233016 - DNA, 55 bp, Artificial
  Synthetic oligonucleotide
ctcttcagagcgcgcatttccatcagtagcgtcggcccggggaaaagtctgatgc

SEQ ID NO: 233017 - DNA, 55 bp, Artificial
  Synthetic oligonucleotide
ctcttatcggggtgtggagtcaagggcgaagtggtacgcttgcagtaccttcatt

SEQ ID NO: 233018 - DNA, 55 bp, Artificial
  Synthetic oligonucleotide
gcagaccagttgggagcgggtttagcgttgaagatcaactactaacctggtaggg

SEQ ID NO: 233019 - DNA, 55 bp, Artificial
  Synthetic oligonucleotide
cttcggacggaagctacaaggcgtcctatagcttggaagcgacagacgagccctc

SEQ ID NO: 233020 - DNA, 55 bp, Artificial
  Synthetic oligonucleotide
gcaggtccacgaggaaagtcccggatagattctgtcgggtggggtgtgcagccga

SEQ ID NO: 233021 - DNA, 60 bp, Artificial
  Synthetic oligonucleotide
gatagcccttcatcctgacgggacgtgcctgaactgctcaattccagaccgcccatgtca

SEQ ID NO: 233022 - DNA, 55 bp, Artificial
  Synthetic oligonucleotide
cgtttacaaacaggagggaagacgctattacagataggcgggcagatactgcacg

SEQ ID NO: 233023 - DNA, 55 bp, Artificial
  Synthetic oligonucleotide
gaggtgggctatgtattcggcgaaggtagacagagacgggcacacggttcgggtg

SEQ ID NO: 233024 - DNA, 55 bp, Artificial
  Synthetic oligonucleotide
cgccgtctgaaacttgccgatgtggattccgttgtgtacattgcaaccgccgtcc

SEQ ID NO: 233025 - DNA, 55 bp, Artificial
  Synthetic oligonucleotide
gaattgcggccgataaccccttggttttcagacgcataccatccgcaaccacccc

SEQ ID NO: 233026 - DNA, 55 bp, Artificial
  Synthetic oligonucleotide
ctcaagtagaggatattcccacgaaggaatactgtgagcacagaaccgcacaaac

SEQ ID NO: 233027 - DNA, 55 bp, Artificial
  Synthetic oligonucleotide
gagagagccgctgtaagtcattagctcttagcttttaccaaatgtgactccttaa

SEQ ID NO: 233028 - DNA, 55 bp, Artificial
  Synthetic oligonucleotide
gcatacggtacggcccggatcatgtatataccggacgcatattcccagggctgat

SEQ ID NO: 233029 - DNA, 55 bp, Artificial
  Synthetic oligonucleotide
ataggtcccgaaaggcacgccatacgtggtccccagcgtctcgctgagtaggctc

SEQ ID NO: 233030 - DNA, 55 bp, Artificial
  Synthetic oligonucleotide
ggccacacgttgcgccgtcccttgcaataccggaaagtcgtacacctggagggca

SEQ ID NO: 233031 - DNA, 55 bp, Artificial
  Synthetic oligonucleotide
ggccttctgctagggcttttcgtcggctcgtacctatcggaccgcgtgtgccgaa

SEQ ID NO: 233032 - DNA, 58 bp, Artificial
  Synthetic oligonucleotide
gagggggtctccgagttcgagtcactaccggcagaatccagttcgtcattcctcacga

SEQ ID NO: 233033 - DNA, 55 bp, Artificial
  Synthetic oligonucleotide
gggagtctgcgtgttggttgtgagggagcttagcgcttctaagggagcttagcgc

SEQ ID NO: 233034 - DNA, 51 bp, Artificial
  Synthetic oligonucleotide
ggggccggggaggagtttcggttggaagcggcgctaaaccatttcccgcga

SEQ ID NO: 233035 - DNA, 55 bp, Artificial
  Synthetic oligonucleotide
aaacaccagggttcagcatcgtgaaaatgtccgggacgtcttgaagttcagcccg

SEQ ID NO: 233036 - DNA, 55 bp, Artificial
  Synthetic oligonucleotide
aggctagttcagccccgcctgactgctactggcttctatccactaccggcctcca

SEQ ID NO: 233037 - DNA, 55 bp, Artificial
  Synthetic oligonucleotide
tggggatcggagttgtgctcggcctgcgagagagctagcggttgctagagacgtg

SEQ ID NO: 233038 - DNA, 55 bp, Artificial
  Synthetic oligonucleotide
ggtaggagagctctcggcaggcgaaaagtactaacaagacgggaaggagcgtgtc

SEQ ID NO: 233039 - DNA, 55 bp, Artificial
  Synthetic oligonucleotide
tgcccgattgggtggaccgggtgtgcagccctggagggtgtaaaatcctcgaagg

SEQ ID NO: 233040 - DNA, 53 bp, Artificial
  Synthetic oligonucleotide
ggtttggacgagagacaaacgcggggcgacctttcggtcgaaccggctggtgc

SEQ ID NO: 233041 - DNA, 55 bp, Artificial
  Synthetic oligonucleotide
gtaacgtgaggtcacgaggtcactacgtcgtttcatcttggtcaagccgtgccgg

SEQ ID NO: 233042 - DNA, 55 bp, Artificial
  Synthetic oligonucleotide
gtcaaacaagcgtcggctgaagcaggcgcttcggcccggtacgtcgtaaagcgtc

SEQ ID NO: 233043 - DNA, 60 bp, Artificial
  Synthetic oligonucleotide
gtgaaacacccattgaccacttcggtgcatctgacgtatcatcttcgaaaggtcatgccg

SEQ ID NO: 233044 - DNA, 55 bp, Artificial
  Synthetic oligonucleotide
acttcgaactgatcaacatttccgatcgccacgtcaacctggagggacttttctg

SEQ ID NO: 233045 - DNA, 55 bp, Artificial
  Synthetic oligonucleotide
tcacgttgtaacgaaggcctgcaggcacgttatggctacagcaaccctgaaccag

SEQ ID NO: 233046 - DNA, 53 bp, Artificial
  Synthetic oligonucleotide
tccgtttgggcggaatcggtccggaagtagcctcccgtcagggcgatcgtaag

SEQ ID NO: 233047 - DNA, 55 bp, Artificial
  Synthetic oligonucleotide
tattgcaataccagagatccgacatgctgacgacggcagtaaaagtcccggccac

SEQ ID NO: 233048 - DNA, 55 bp, Artificial
  Synthetic oligonucleotide
tcgaaatgcgttccgataacacaacatatcagtttaatgtggacaatcggggcgc

SEQ ID NO: 233049 - DNA, 55 bp, Artificial
  Synthetic oligonucleotide
tatgaagcgcaaacgttgagtctcattgtccttcacctccgatcaaccctcaatg

SEQ ID NO: 233050 - DNA, 55 bp, Artificial
  Synthetic oligonucleotide
tagcaaccaagcaagaactgccctgacctatggaaacgactatgattgacgaatc

SEQ ID NO: 233051 - DNA, 55 bp, Artificial
  Synthetic oligonucleotide
tcgacggagaggaatcgttcaagcaacgcgcacacggcgtccggtgcttccacca

SEQ ID NO: 233052 - DNA, 55 bp, Artificial
  Synthetic oligonucleotide
tacctacccgccggagatatcgtccgccgtaagagaccacgtcgcgcacagagtc

SEQ ID NO: 233053 - DNA, 55 bp, Artificial
  Synthetic oligonucleotide
tcgggcaagaccaccgcctcggctgcactcgccttagagacggccttagaggcca

SEQ ID NO: 233054 - DNA, 55 bp, Artificial
  Synthetic oligonucleotide
gttcctccccttgatgggctacggcgtgactgctaattaaccctactgcttaccc

SEQ ID NO: 233055 - DNA, 55 bp, Artificial
  Synthetic oligonucleotide
aagggcgcttgagtcgcaggctcaagacacgtcggggacctcatctccacgcact

SEQ ID NO: 233056 - DNA, 55 bp, Artificial
  Synthetic oligonucleotide
taaggtggggcgcccgaatatgaccggatggacgcccgggcacgatgtgccactt

SEQ ID NO: 233057 - DNA, 54 bp, Artificial
  Synthetic oligonucleotide
gttcgcgatcggcgccctcaaaaccgcccatttcggcccttacaggccgatttc

SEQ ID NO: 233058 - DNA, 55 bp, Artificial
  Synthetic oligonucleotide
acggccgcatgagaaagcgaaaggtcgtgttgcaggtgcggaatgaggggaccca

SEQ ID NO: 233059 - DNA, 55 bp, Artificial
  Synthetic oligonucleotide
gtgtcagggacctgtgtgccagagacctgtgtgccagagacctgtgtgctaagga

SEQ ID NO: 233060 - DNA, 55 bp, Artificial
  Synthetic oligonucleotide
tgaaccacggggcagcacgcgcaacttttcccaccagctcgcgcgataggttcgc

SEQ ID NO: 233061 - DNA, 55 bp, Artificial
  Synthetic oligonucleotide
gtccgaaatcgctgaacgactagacgtggaccgctcggcaatctcgaaagccgag

SEQ ID NO: 233062 - DNA, 55 bp, Artificial
  Synthetic oligonucleotide
cccagaaagcgcgattgggtgtttgcggatcgcgtaggagtttcgccacacttcg

SEQ ID NO: 233063 - DNA, 55 bp, Artificial
  Synthetic oligonucleotide
cccagaataaatatggcgatccacctggtctttccacatctctccgaacaagctc

SEQ ID NO: 233064 - DNA, 55 bp, Artificial
  Synthetic oligonucleotide
gcgtggagctcggtcattggtcctcatggaggctctaattcttccctagcgcctg

SEQ ID NO: 233065 - DNA, 53 bp, Artificial
  Synthetic oligonucleotide
gacgcgaaaatgtccgctttcggagaggggccgcgtaccttacaggtggaagt

SEQ ID NO: 233066 - DNA, 55 bp, Artificial
  Synthetic oligonucleotide
cccctccggaggcaaagacgttccgaccaagttctgaccgatcaagctctcaatt

SEQ ID NO: 233067 - DNA, 55 bp, Artificial
  Synthetic oligonucleotide
cccctcgtgcgaaacctgcatgaagcatacggatctgtagtgccattatgttcga

SEQ ID NO: 233068 - DNA, 51 bp, Artificial
  Synthetic oligonucleotide
cccggtgtaaattttctccgagcgaagaggtaacaaatgacccgtctcggg

SEQ ID NO: 233069 - DNA, 55 bp, Artificial
  Synthetic oligonucleotide
ccgaacataaacgacggacataaacaatgggcatttctgctcaggacgtaaagcg

SEQ ID NO: 233070 - DNA, 55 bp, Artificial
  Synthetic oligonucleotide
gcgtgagatggcctgcttttgcctggagcgtgtgcatcttgacacgcacgcacgg

SEQ ID NO: 233071 - DNA, 54 bp, Artificial
  Synthetic oligonucleotide
ccgacgagtacccaatctatcggacgggtccagtttccctttgctcgcccacga

SEQ ID NO: 233072 - DNA, 55 bp, Artificial
  Synthetic oligonucleotide
ccgccggagatatcgtccgccgtaagagaccacgtcgcgcacagagtccacccga

SEQ ID NO: 233073 - DNA, 55 bp, Artificial
  Synthetic oligonucleotide
ccgctagggctatcatcgagtcggatcaatttgaggcactaagcttggactcgaa

SEQ ID NO: 233074 - DNA, 55 bp, Artificial
  Synthetic oligonucleotide
gcggctcaacacgtagtggagctctctgttttaatgatgtcgctcttggctcacc

SEQ ID NO: 233075 - DNA, 55 bp, Artificial
  Synthetic oligonucleotide
ccggccgcacggggagctcttccgaggcatcttctaccgtgttcatgaactcgac

SEQ ID NO: 233076 - DNA, 60 bp, Artificial
  Synthetic oligonucleotide
ctcatgctagccgagccaatgtgagaaccagtaggcattgcgtctgaagacgctctgtag

SEQ ID NO: 233077 - DNA, 55 bp, Artificial
  Synthetic oligonucleotide
ccgtttcgctcgatcttcccagtcgccccgtccgctcggtaacatctcttccctc

SEQ ID NO: 233078 - DNA, 55 bp, Artificial
  Synthetic oligonucleotide
gcgcacgtctgctgtcctgatcctttgccctgcaagataggaacaatccgcgtcg

SEQ ID NO: 233079 - DNA, 55 bp, Artificial
  Synthetic oligonucleotide
gcctcaaatctcgtcttctctactgtttcagaggcagcgctccgctctctcactg

SEQ ID NO: 233080 - DNA, 55 bp, Artificial
  Synthetic oligonucleotide
cctgggtaccgattctctcacatcctcgtaccgattctctcacatcctcgtaccg

SEQ ID NO: 233081 - DNA, 55 bp, Artificial
  Synthetic oligonucleotide
ggatcatagggtagcgggtcgatgttaagtgatggcttcgttgtaccactccacg

SEQ ID NO: 233082 - DNA, 53 bp, Artificial
  Synthetic oligonucleotide
aaaatcgcagtccttcgccccgaagcccttgcgtcgaacctacattccgaaag

SEQ ID NO: 233083 - DNA, 55 bp, Artificial
  Synthetic oligonucleotide
ggacaggtaaccgctctacactgcggttaatagacactctcgggagcgttcgttc

SEQ ID NO: 233084 - DNA, 55 bp, Artificial
  Synthetic oligonucleotide
caacgagactgtgcattggtggcgacctgagtgtacccgtggcagagacgcccca

SEQ ID NO: 233085 - DNA, 55 bp, Artificial
  Synthetic oligonucleotide
caagcagtcgtttcgtaccttccatgcgaatcgttcaaagatacaggaccgcaga

SEQ ID NO: 233086 - DNA, 55 bp, Artificial
  Synthetic oligonucleotide
cacaagctcgtggaaagaccggtactccgaccgtctcagcggggcgagagtggtt

SEQ ID NO: 233087 - DNA, 57 bp, Artificial
  Synthetic oligonucleotide
gggaactaatttaccgtggaggtctggactggacttatcgaacagcaatgactcgaa

SEQ ID NO: 233088 - DNA, 57 bp, Artificial
  Synthetic oligonucleotide
acgccttccgcttgagcaagacacacgcctcgccttgaaaagcaaaacgggactgcc

SEQ ID NO: 233089 - DNA, 51 bp, Artificial
  Synthetic oligonucleotide
ggaaccggtcccgaaatgccaaaccccttgcgtacggtggctttagcaccg

SEQ ID NO: 233090 - DNA, 55 bp, Artificial
  Synthetic oligonucleotide
caccgcgataggcccggcctacttttagctcaatccgacttcggctcagtctgac

SEQ ID NO: 233091 - DNA, 55 bp, Artificial
  Synthetic oligonucleotide
cactggaaggcagcagggctctcacatacgtgacgtaccgattctctcacgtctg

SEQ ID NO: 233092 - DNA, 55 bp, Artificial
  Synthetic oligonucleotide
gctgcccttttggttgcctattcgatagaggaggtaaaacttatcattcccggta

SEQ ID NO: 233093 - DNA, 55 bp, Artificial
  Synthetic oligonucleotide
catgcgataggcaacgacggttgccactccggaaagtgcgtagcctccctcccag

SEQ ID NO: 233094 - DNA, 55 bp, Artificial
  Synthetic oligonucleotide
ccaggtgcggccgtaatctttggtcttgtagagatagggccggaagtcgtcccac

SEQ ID NO: 233095 - DNA, 55 bp, Artificial
  Synthetic oligonucleotide
gctccgggcgcacgtcgaatggcaatggcacggtaaaggtccctgggattacacg

SEQ ID NO: 233096 - DNA, 54 bp, Artificial
  Synthetic oligonucleotide
cccaaccggagtaggtccgccaattgagtcgcacgccctagggccaagttctaa

SEQ ID NO: 233097 - DNA, 55 bp, Artificial
  Synthetic oligonucleotide
cccaatcgggacattattcccgttgcactctggtatgaactggtgcgtgaagcca

SEQ ID NO: 233098 - DNA, 54 bp, Artificial
  Synthetic oligonucleotide
ttttcgggattctcattggctctctcgtcgcgggacaagttgggactcaggtgg

SEQ ID NO: 233099 - DNA, 60 bp, Artificial
  Synthetic oligonucleotide
tacctattctctcacacctgggtaccgattctctcacatcctcgtaccgattctctcaca

SEQ ID NO: 233100 - DNA, 54 bp, Artificial
  Synthetic oligonucleotide
tcagttgctcctgcgcttcgtggttatgccgagccatctgtccacacgacgttt

SEQ ID NO: 233101 - DNA, 54 bp, Artificial
  Synthetic oligonucleotide
tcacccaagccacgatcccgcacagagaaccacgggggcagaccacctacaggc

SEQ ID NO: 233102 - DNA, 54 bp, Artificial
  Synthetic oligonucleotide
tattgactgaggtgatccagacatgacacaaagatcggcgaatgctcgccgaag

SEQ ID NO: 233103 - DNA, 54 bp, Artificial
  Synthetic oligonucleotide
tacgagcaggttgcagagtcggcagacgatgcctcagaagcgaccgagcggcaa

SEQ ID NO: 233104 - DNA, 54 bp, Artificial
  Synthetic oligonucleotide
tacatacgagggacgtgcgaatcgggtcatcgctccgtcgcatcccgtccatat

SEQ ID NO: 233105 - DNA, 51 bp, Artificial
  Synthetic oligonucleotide
taatccccttttcatcgggtcaagttttcggaccccattgttacggggcca

SEQ ID NO: 233106 - DNA, 52 bp, Artificial
  Synthetic oligonucleotide
ggtcgtgcttcaaacggcgggctataaacctcaccgaaacgcggtaaaggtg

SEQ ID NO: 233107 - DNA, 54 bp, Artificial
  Synthetic oligonucleotide
gggtttcccagacgcctcgcgtcttccagtcctccgctcctgtaatccgcatct

SEQ ID NO: 233108 - DNA, 54 bp, Artificial
  Synthetic oligonucleotide
gggtccggtagccatggccgggtgtgatcagcaatctccttctcggcgctagta

SEQ ID NO: 233109 - DNA, 54 bp, Artificial
  Synthetic oligonucleotide
ggacggtcatatgcaccgtgcatattgaccgggctcgggagtcgtaatcccctt

SEQ ID NO: 233110 - DNA, 60 bp, Artificial
  Synthetic oligonucleotide
ctcctaagccaacgcgaatacgctgacatcctctcggtgacgccagggtacgtcagcaag

SEQ ID NO: 233111 - DNA, 54 bp, Artificial
  Synthetic oligonucleotide
gctctcgctcgcccacgtgacgtctgcctggcgcactcccttccctgtggtaat

SEQ ID NO: 233112 - DNA, 54 bp, Artificial
  Synthetic oligonucleotide
cagataggcgggcagatactgcacgcaaagatgctgcacgcaaaggtgctgtac

SEQ ID NO: 233113 - DNA, 54 bp, Artificial
  Synthetic oligonucleotide
accgagtagagttgctggcggtagtatagtaccacctccgtagtgggccgatta

SEQ ID NO: 233114 - DNA, 54 bp, Artificial
  Synthetic oligonucleotide
cggagtagcgcgatgtggcgtgccccgtttcgaagcgacggagagctgaacgat

SEQ ID NO: 233115 - DNA, 53 bp, Artificial
  Synthetic oligonucleotide
attacaggaaaccgggagcttgcaagaagctactttcccaccgagaagggacc

SEQ ID NO: 233116 - DNA, 52 bp, Artificial
  Synthetic oligonucleotide
cgcggggatactttcacgtgtaccgtccccttcgggaagcctacgacgcact

SEQ ID NO: 233117 - DNA, 54 bp, Artificial
  Synthetic oligonucleotide
aaggacctatatttgtctcggtaagcacaggcgttctcgctagcgctgtcggtg

SEQ ID NO: 233118 - DNA, 54 bp, Artificial
  Synthetic oligonucleotide
agctgatgtaagcatctttcgagcaaacgagaacagagatgacttagcgagcac

SEQ ID NO: 233119 - DNA, 54 bp, Artificial
  Synthetic oligonucleotide
aatgggacgacgttactagagattgctgttcgatacaggtagtcactgtgtact

SEQ ID NO: 233120 - DNA, 53 bp, Artificial
  Synthetic oligonucleotide
acgctcgctgtgcggggtcaggctccggatggcgggtgtccaggtggagccta

SEQ ID NO: 233121 - DNA, 60 bp, Artificial
  Synthetic oligonucleotide
tacttcccatccgtcttcgccatcgggggacacatcatagactcgtcggtcgctcattgt

SEQ ID NO: 233122 - DNA, 52 bp, Artificial
  Synthetic oligonucleotide
gtttggaaccgcttccataccctacaaatccgggttctggccgaataggacc

SEQ ID NO: 233123 - DNA, 53 bp, Artificial
  Synthetic oligonucleotide
cgcaatgggccattccgaaaacgcctctccggcgttaagaagcgtgtcgagcg

SEQ ID NO: 233124 - DNA, 53 bp, Artificial
  Synthetic oligonucleotide
gcccgcgtgtctttgcaccctctcgccgggtcccatcctccgtagttccctcc

SEQ ID NO: 233125 - DNA, 53 bp, Artificial
  Synthetic oligonucleotide
cctgacgggacgtgcctgaactgctcaattccagaccgcccatgtcaggacat

SEQ ID NO: 233126 - DNA, 53 bp, Artificial
  Synthetic oligonucleotide
cctctcggtgacgccagggtacgtcagcaagcgcactacagacgacaaccgtc

SEQ ID NO: 233127 - DNA, 53 bp, Artificial
  Synthetic oligonucleotide
gggttgggaacgtctacccgacgaaggcccgtggctcgcaaatggcgaggagc

SEQ ID NO: 233128 - DNA, 53 bp, Artificial
  Synthetic oligonucleotide
caccgagaaggacactgaaagcgtctccccggtgccgcgtgcaggttcgggcc

SEQ ID NO: 233129 - DNA, 53 bp, Artificial
  Synthetic oligonucleotide
gctgggatgtctccagtgtcaccgatatgggctacatgttttggcgtgccgaa

SEQ ID NO: 233130 - DNA, 53 bp, Artificial
  Synthetic oligonucleotide
cttttaccggcggattctgctcgtgtcgttcccaacgacgatcccgaaagatg

SEQ ID NO: 233131 - DNA, 53 bp, Artificial
  Synthetic oligonucleotide
ttccagtaggctcaactgccgaaagtccgcttcagtcagtgcggacaaaggtc

SEQ ID NO: 233132 - DNA, 51 bp, Artificial
  Synthetic oligonucleotide
ccttagttcttagtacttaggccttagaccttaggccttagaccttaggcc

SEQ ID NO: 233133 - DNA, 53 bp, Artificial
  Synthetic oligonucleotide
cttccgggcttccgggaagcggctgttttcgatcctgggaatggggagcatct

SEQ ID NO: 233134 - DNA, 53 bp, Artificial
  Synthetic oligonucleotide
tgtaactgccaaatccttccggcttggagagacggtctttgagttggcccatc

SEQ ID NO: 233135 - DNA, 53 bp, Artificial
  Synthetic oligonucleotide
ctgcagcgttataaactggttgaaacgagctgacttgagcaagttccgttgtc

SEQ ID NO: 233136 - DNA, 53 bp, Artificial
  Synthetic oligonucleotide
tcgaggaacgactctaaaagactgtagaacgcttccatgtgtcggaggctctc

SEQ ID NO: 233137 - DNA, 53 bp, Artificial
  Synthetic oligonucleotide
tcaccgggggggttggggcgctacacggccgtcactgaagagacgcgccccta

SEQ ID NO: 233138 - DNA, 53 bp, Artificial
  Synthetic oligonucleotide
tattctcgtttggggatcggttctctcgtgccgcaaatcgggacgtgtagatt

SEQ ID NO: 233139 - DNA, 53 bp, Artificial
  Synthetic oligonucleotide
gataaaacgtctctccactccggggctctaccgccgcatacagccagtagaaa

SEQ ID NO: 233140 - DNA, 53 bp, Artificial
  Synthetic oligonucleotide
ctacgggcctctgatgcgccctgagaccagcagcccacagaaccacggatggg

SEQ ID NO: 233141 - DNA, 52 bp, Artificial
  Synthetic oligonucleotide
tacgggtaggatcacgcgatatcggagtgaggtgtgcgtgtcgtgagtgggc

SEQ ID NO: 233142 - DNA, 52 bp, Artificial
  Synthetic oligonucleotide
ggccggggaaaagtctgatgcaggatataacgccggtaaagtcgcagcggct

SEQ ID NO: 233143 - DNA, 59 bp, Artificial
  Synthetic oligonucleotide
cctcagggtgtgagagaataggtacagcggtagatcttggccaggttctatccctatta

SEQ ID NO: 233144 - DNA, 52 bp, Artificial
  Synthetic oligonucleotide
agttggaacgggcatggggatcggagttgtgctcggcctgcgagagagctag

SEQ ID NO: 233145 - DNA, 50 bp, Artificial
  Synthetic oligonucleotide
ggggttcttttacaccaacgaaaggggattggcactcgggcaccggacgt

SEQ ID NO: 233146 - DNA, 52 bp, Artificial
  Synthetic oligonucleotide
aagcgacagctcagacgacccggaggcacatcggtggaagactgagactgcc

SEQ ID NO: 233147 - DNA, 52 bp, Artificial
  Synthetic oligonucleotide
tctccttctcgggcccaaacgggtcctcacccgaccgcctgggtagctgcct

SEQ ID NO: 233148 - DNA, 52 bp, Artificial
  Synthetic oligonucleotide
tcgaaaatcctccagatcgcgccagagcggctgaatgcgtggatcgaccacc

SEQ ID NO: 233149 - DNA, 52 bp, Artificial
  Synthetic oligonucleotide
tcaccgaacttttgctcgacgagttgggttatgtagccggattcaagttcgt

SEQ ID NO: 233150 - DNA, 52 bp, Artificial
  Synthetic oligonucleotide
agcagcacgggtcgctgtttcgacattggcaataccgttcgtcgcgcactac

SEQ ID NO: 233151 - DNA, 52 bp, Artificial
  Synthetic oligonucleotide
agagctgcacgcgccacggtcgcgtcaaaccggataggaatgcccagtcgtc

SEQ ID NO: 233152 - DNA, 52 bp, Artificial
  Synthetic oligonucleotide
gtcgtgctcaggctcgccaatagcgtcgctgtgggaatgcgtatgcaggaaa

SEQ ID NO: 233153 - DNA, 52 bp, Artificial
  Synthetic oligonucleotide
gtcgttcatgaaaagatctgggattgcagaacgagaacgggaccgcacgaga

SEQ ID NO: 233154 - DNA, 59 bp, Artificial
  Synthetic oligonucleotide
gcgtgcaataccccaaaggccgcctcgtgctgaaagccacaacgcaagtccacgtgccc

SEQ ID NO: 233155 - DNA, 52 bp, Artificial
  Synthetic oligonucleotide
cgctgacatcctctcggtgacgccagggtacgtcagcaagcgcactacagac

SEQ ID NO: 233156 - DNA, 52 bp, Artificial
  Synthetic oligonucleotide
cgatgttttatagcccgatgttttatagcccgatgttttatagcccgatgtg

SEQ ID NO: 233157 - DNA, 52 bp, Artificial
  Synthetic oligonucleotide
gcggtctgtgcgccgctacagggatcgggagggccactgggggttggcagta

SEQ ID NO: 233158 - DNA, 52 bp, Artificial
  Synthetic oligonucleotide
cgtagtgcacctccatttcaatctgaaacggcaccgtctcccctggaatcct

SEQ ID NO: 233159 - DNA, 51 bp, Artificial
  Synthetic oligonucleotide
aggcttaaagctgcgatcaaagaaagcattatgaacggtctcaccatccgg

SEQ ID NO: 233160 - DNA, 51 bp, Artificial
  Synthetic oligonucleotide
aggcgggtgaaccggacgcgacacaactcaaacagaaggtagcggctcaac

SEQ ID NO: 233161 - DNA, 51 bp, Artificial
  Synthetic oligonucleotide
agctacgaggctacgttcacgttcgaggagtctgaaaccccaaaccaattg

SEQ ID NO: 233162 - DNA, 51 bp, Artificial
  Synthetic oligonucleotide
ctgcctctgcagtcacgttacttgcgcacgtcacttgcggtcgcttacgct

SEQ ID NO: 233163 - DNA, 51 bp, Artificial
  Synthetic oligonucleotide
ctcgctgtctgagctatttctccgaccacttccgtccagagctttgctatt

SEQ ID NO: 233164 - DNA, 51 bp, Artificial
  Synthetic oligonucleotide
agacagcgacaccgggggagcaaagcggacaatcccggaggaagccgttcg

SEQ ID NO: 233165 - DNA, 60 bp, Artificial
  Synthetic oligonucleotide
cgccgagaaatgggcgattggcagttccgaagcgaatacatgtgcgagttcaccgacacc

SEQ ID NO: 233166 - DNA, 51 bp, Artificial
  Synthetic oligonucleotide
gacgccctcctgacgctactcccccacgacgttcctcccgagccgtgcaag

SEQ ID NO: 233167 - DNA, 51 bp, Artificial
  Synthetic oligonucleotide
cgtaaattggagtagcgtcacggatatcactaaaggagcgctttcgtggta

SEQ ID NO: 233168 - DNA, 51 bp, Artificial
  Synthetic oligonucleotide
cggcctgtggaggtgatcttatggattactccacacgttattttctcaccg

SEQ ID NO: 233169 - DNA, 51 bp, Artificial
  Synthetic oligonucleotide
cgcaacgactcccaccttttcctcgaagggctcatcctccgggtggggatt

SEQ ID NO: 233170 - DNA, 51 bp, Artificial
  Synthetic oligonucleotide
tccgtcgtccggtagttgaccgccacaaagaagcggtgctgattccacaca

SEQ ID NO: 233171 - DNA, 51 bp, Artificial
  Synthetic oligonucleotide
ctcacagtaagctgggtagcactgcgttggacggtagtgcactgggcggca

SEQ ID NO: 233172 - DNA, 51 bp, Artificial
  Synthetic oligonucleotide
acggcccttccttcttcgatcgaaccagacgaatcaaccctttccgaaagg

SEQ ID NO: 233173 - DNA, 51 bp, Artificial
  Synthetic oligonucleotide
gttcggaggcgagcggctcatctccgttcccagcgaggttccactggcgca

SEQ ID NO: 233174 - DNA, 51 bp, Artificial
  Synthetic oligonucleotide
cgcgctgtgaccgcatgaatccatcggggcaacagccgcgcaagcctactg

SEQ ID NO: 233175 - DNA, 51 bp, Artificial
  Synthetic oligonucleotide
cggatctcttcgtcgctactgtggacctcctactacggttctgatcgggac

SEQ ID NO: 233176 - DNA, 58 bp, Artificial
  Synthetic oligonucleotide
ccagacaccgagttctccatttacgtgaggacagaacacaataccgcaattcgtctcg

SEQ ID NO: 233177 - DNA, 51 bp, Artificial
  Synthetic oligonucleotide
aaaagagctccggcagcgtggaggtttgccggcggccggaggcaattcgcg

SEQ ID NO: 233178 - DNA, 51 bp, Artificial
  Synthetic oligonucleotide
cagacgacccggaggcacatcggtggaagactgagactgcctggactccaa

SEQ ID NO: 233179 - DNA, 51 bp, Artificial
  Synthetic oligonucleotide
cactgcgttggacggtagtgcactgggcggcaggcactctctgacccactg

SEQ ID NO: 233180 - DNA, 51 bp, Artificial
  Synthetic oligonucleotide
gcttctgggcagctgtgagatccgggagtttccgggagccgactacgcctg

SEQ ID NO: 233181 - DNA, 51 bp, Artificial
  Synthetic oligonucleotide
cgtgcctcagagctgcacgcgccacggtcgcgtcaaaccggataggaatgc

SEQ ID NO: 233182 - DNA, 51 bp, Artificial
  Synthetic oligonucleotide
atcatcggatgggctaggcgggtgaaccggacgcgacacaactcaaacaga

SEQ ID NO: 233183 - DNA, 51 bp, Artificial
  Synthetic oligonucleotide
atcaatcttggggccggctcggattaccggcggtcctcctctacttcccgt

SEQ ID NO: 233184 - DNA, 51 bp, Artificial
  Synthetic oligonucleotide
acgacacgatgaaaactacgcagaagacaccacgttccgaatcccctcaac

SEQ ID NO: 233185 - DNA, 51 bp, Artificial
  Synthetic oligonucleotide
ccggacttccatggtagggctctggcctatcggctgtgctctgacctgaga

SEQ ID NO: 233186 - DNA, 50 bp, Artificial
  Synthetic oligonucleotide
acaaaggagcgccccagtggacacgacccgtctcgagggccccgtaagcg

SEQ ID NO: 233187 - DNA, 54 bp, Artificial
  Synthetic oligonucleotide
ccaagtttgccggcactcgtggcccgctcgacccgtggcccgtcgtagcccgag

SEQ ID NO: 233188 - DNA, 50 bp, Artificial
  Synthetic oligonucleotide
acacgaacgaggaccccacgaccgccaatgatccgaatccggacctggag

SEQ ID NO: 233189 - DNA, 50 bp, Artificial
  Synthetic oligonucleotide
aatttgtccgtcggcatggcaactccggcgtcggtgaacggaaaccgctt

SEQ ID NO: 233190 - DNA, 50 bp, Artificial
  Synthetic oligonucleotide
acactgaaagcgtctccccggtgccgcgtgcaggttcgggcccgtcgatt

SEQ ID NO: 233191 - DNA, 50 bp, Artificial
  Synthetic oligonucleotide
acacgttgcgcgaggcccaaatacgctcgggggaaatgtgccttcgcgtc

SEQ ID NO: 233192 - DNA, 50 bp, Artificial
  Synthetic oligonucleotide
ctacggctgcctgcctctgcagtcacgttacttgcgcacgtcacttgcgg

SEQ ID NO: 233193 - DNA, 50 bp, Artificial
  Synthetic oligonucleotide
ctacttttagtctcaggctgcttttaatccccggctgcggcctctaggaa

SEQ ID NO: 233194 - DNA, 50 bp, Artificial
  Synthetic oligonucleotide
gacggagccgggaaacgaaccctgtcgggcctacacggaagtacgcctgt

SEQ ID NO: 233195 - DNA, 50 bp, Artificial
  Synthetic oligonucleotide
tattgtcgctaaagacaacgcacaaatttgagcatggtttcgtggaccgt

SEQ ID NO: 233196 - DNA, 50 bp, Artificial
  Synthetic oligonucleotide
acacgcgtgcccacactcgacggggaactgttcacggaagtcgggtcggt

SEQ ID NO: 233197 - DNA, 50 bp, Artificial
  Synthetic oligonucleotide
acacacagttgagggcttgtcggcctcgtgtcctcaattccgcgcgcccc

SEQ ID NO: 233198 - DNA, 56 bp, Artificial
  Synthetic oligonucleotide
cgggggtatgtctctccggccagtacaggatggggctaaagactccccaagatagc

SEQ ID NO: 233199 - DNA, 60 bp, Artificial
  Synthetic oligonucleotide
catctggccagtatccctgcggtagcggcctgtcattcgaattcacggggtcgtgcttgg

SEQ ID NO: 233200 - DNA, 50 bp, Artificial
  Synthetic oligonucleotide
acacgcacccgttcccctgacacacagttgagggcttgtcggcctcgtgt

SEQ ID NO: 233201 - DNA, 50 bp, Artificial
  Synthetic oligonucleotide
gagggcgtccgctatgccgccttcaacaagcaggatcgattgtcgcccta

SEQ ID NO: 233202 - DNA, 50 bp, Artificial
  Synthetic oligonucleotide
aaacggcggctgggagcgatacggggcggtctcctctttcgtgcagtacg

SEQ ID NO: 233203 - DNA, 50 bp, Artificial
  Synthetic oligonucleotide
ctttacgggctatcggaccagttgaaccggacggactgcagagccgggca

SEQ ID NO: 233204 - DNA, 50 bp, Artificial
  Synthetic oligonucleotide
tgtgttcgcccgatcatacccgccggctcacgtcagggcacatgtggcgt

SEQ ID NO: 233205 - DNA, 50 bp, Artificial
  Synthetic oligonucleotide
tgtcgtccgggtcggaaggaaggctccctcgcgtacaggtgttaggtccc

SEQ ID NO: 233206 - DNA, 50 bp, Artificial
  Synthetic oligonucleotide
aaaggtcccgcggtagagctcagtggagcggagcgtctgggtttgaaacg

SEQ ID NO: 233207 - DNA, 50 bp, Artificial
  Synthetic oligonucleotide
aacacagaggcagtgccacgcctctccactcgtccctcccggttgcgatg

SEQ ID NO: 233208 - DNA, 50 bp, Artificial
  Synthetic oligonucleotide
ctgggtcgctatgagggcgtccgctatgccgccttcaacaagcaggatcg

SEQ ID NO: 233209 - DNA, 50 bp, Artificial
  Synthetic oligonucleotide
aacagacgcctgcgggggaagtgcctccctccgtcgatccgtcgccgtac

SEQ ID NO: 233210 - DNA, 60 bp, Artificial
  Synthetic oligonucleotide
cgccttcggcgctgaaccacggggcagcacgcgcaacttttcccaccagctcgcgcgata

SEQ ID NO: 233211 - DNA, 50 bp, Artificial
  Synthetic oligonucleotide
aacatattccgcagcacccgacggaaacggggcggttcactccgcaagac

SEQ ID NO: 233212 - DNA, 50 bp, Artificial
  Synthetic oligonucleotide
tggctgctgctccgattggttactgggcccgtgcctgtcgaatgctttcc

SEQ ID NO: 233213 - DNA, 50 bp, Artificial
  Synthetic oligonucleotide
tggcgtgggtgctccggtagtggatccgccgaggagaaatgtgcggggcg

SEQ ID NO: 233214 - DNA, 50 bp, Artificial
  Synthetic oligonucleotide
aacgtcgtggcctccaactatcgggggatccgggttaccggaagctcgat

SEQ ID NO: 233215 - DNA, 50 bp, Artificial
  Synthetic oligonucleotide
ctccagcttgagaacgtccaccttgtacgctggatcggaaaacgtcttag

SEQ ID NO: 233216 - DNA, 50 bp, Artificial
  Synthetic oligonucleotide
ctcacgtacctgttgcgtaatggcctcaatctgacgcggaaggtctgctt

SEQ ID NO: 233217 - DNA, 50 bp, Artificial
  Synthetic oligonucleotide
aagggcaagtaagtggggctcgccactcggtcggatgggcccccaagtca

SEQ ID NO: 233218 - DNA, 50 bp, Artificial
  Synthetic oligonucleotide
aaggttcgtccgcggaggcgtcccgatggcgtgggtgctccggtagtgga

SEQ ID NO: 233219 - DNA, 50 bp, Artificial
  Synthetic oligonucleotide
aagtaacgactccgacgcaaaattcccacgcgcctcgggccctccgtgca

SEQ ID NO: 233220 - DNA, 50 bp, Artificial
  Synthetic oligonucleotide
gacggacataaacaatgggcatttctgctcaggacgtaaagcgactccgg

SEQ ID NO: 233221 - DNA, 60 bp, Artificial
  Synthetic oligonucleotide
cgcgatccgagcaacacaatatgccacacaacaccatcctcaaaactcaaaaaccacgac

SEQ ID NO: 233222 - DNA, 50 bp, Artificial
  Synthetic oligonucleotide
aatcgttggtaagaaaacggccgcaacgcaactgccccctaaccagcccg

SEQ ID NO: 233223 - DNA, 50 bp, Artificial
  Synthetic oligonucleotide
aatgcggcgacaatacggatctgagcggtcgtcccccaaaaggacggggg

SEQ ID NO: 233224 - DNA, 50 bp, Artificial
  Synthetic oligonucleotide
actcgtccaatcgccggtccctcacccaaccgctgtggcgggccttccgc

SEQ ID NO: 233225 - DNA, 50 bp, Artificial
  Synthetic oligonucleotide
actcgtggggctccggttataccttcccgccgacaaccgtgcggattggc

SEQ ID NO: 233226 - DNA, 50 bp, Artificial
  Synthetic oligonucleotide
gtccaaaccccgctgcccgtccaatcctagctgctcatccgggccccacc

SEQ ID NO: 233227 - DNA, 50 bp, Artificial
  Synthetic oligonucleotide
agaacacacgaacggaggggcgttccccgcccgaagcgctagagatcttt

SEQ ID NO: 233228 - DNA, 50 bp, Artificial
  Synthetic oligonucleotide
agaattcccgcgggggacatgctccgatccagggggccgtttcacgactc

SEQ ID NO: 233229 - DNA, 50 bp, Artificial
  Synthetic oligonucleotide
cgacttgaaagcagacagcgacaccgggggagcaaagcggacaatcccgg

SEQ ID NO: 233230 - DNA, 50 bp, Artificial
  Synthetic oligonucleotide
gcccgatcatacccgccggattgcgtatgccacacggggtgcggtaccct

SEQ ID NO: 233231 - DNA, 50 bp, Artificial
  Synthetic oligonucleotide
ccggtctctgtgccggtgctggaacgtactcagacaggggctcctcagac

SEQ ID NO: 233232 - DNA, 57 bp, Artificial
  Synthetic oligonucleotide
gctgcgcccccctggcggttgccttacctcaggctacgagaaaacctcagcctacga

SEQ ID NO: 233233 - DNA, 50 bp, Artificial
  Synthetic oligonucleotide
gcggaggcgtcccgatggcgtgggtgctccggtagtggatccgccgagga

SEQ ID NO: 233234 - DNA, 50 bp, Artificial
  Synthetic oligonucleotide
gggccgtccttcaaggcgtttcacccggcacgaacgctatggctacacca

SEQ ID NO: 233235 - DNA, 50 bp, Artificial
  Synthetic oligonucleotide
ggctcggattaccggcggtcctcctctacttcccgtcccgtgttaccggc

SEQ ID NO: 233236 - DNA, 50 bp, Artificial
  Synthetic oligonucleotide
atacccgccggattgcgtatgccacacggggtgcggtacccttatgcacc

SEQ ID NO: 233237 - DNA, 50 bp, Artificial
  Synthetic oligonucleotide
atacgacagggccgtccttcaaggcgtttcacccggcacgaacgctatgg

SEQ ID NO: 233238 - DNA, 50 bp, Artificial
  Synthetic oligonucleotide
atcggaccagttgaaccggacggactgcagagccgggcaatgaacgtaga

SEQ ID NO: 233239 - DNA, 50 bp, Artificial
  Synthetic oligonucleotide
ccctgtgtccgcccgatcatacccgccggattgcgtatgccacacggggt

SEQ ID NO: 233240 - DNA, 50 bp, Artificial
  Synthetic oligonucleotide
caccgtccatttcgccacctgcctgccttcagggcaacttgtgcgcgtgc

SEQ ID NO: 233241 - DNA, 50 bp, Artificial
  Synthetic oligonucleotide
cccaaaattcgggcttgtcccgaatctccgattcgattgtagagagagcc

SEQ ID NO: 233242 - DNA, 50 bp, Artificial
  Synthetic oligonucleotide
acatgtccactggtgtttgccctcgtgccctcctttgcgacacgcctccg

SEQ ID NO: 233243 - DNA, 57 bp, Artificial
  Synthetic oligonucleotide
cacgtgccccgcgcgatcggctctaacgacaaaggttcagcaagtcgcaaaaagtag

SEQ ID NO: 233244 - DNA, 50 bp, Artificial
  Synthetic oligonucleotide
accagggcctcagcgaacgtcctcgtcctgacaccgccagtttgcccgac

SEQ ID NO: 233245 - DNA, 50 bp, Artificial
  Synthetic oligonucleotide
accagtcggcacgtgcaccttgggctcacggggcggtactaccatacacg

SEQ ID NO: 233246 - DNA, 50 bp, Artificial
  Synthetic oligonucleotide
accccggcagatcttagtcccccgccccacaggagtactcgcgttctaca

SEQ ID NO: 233247 - DNA, 50 bp, Artificial
  Synthetic oligonucleotide
accgaatgtcgtagaccgtcggctccccgtccggaaccgtccactgtagg

SEQ ID NO: 233248 - DNA, 50 bp, Artificial
  Synthetic oligonucleotide
accttgggctcacggggcggtactaccatacacgcatcgacggatacggg

SEQ ID NO: 233249 - DNA, 50 bp, Artificial
  Synthetic oligonucleotide
acgaagacgcggtctggtcaatccactccatggcgtcggtgcccctctct

SEQ ID NO: 233250 - DNA, 50 bp, Artificial
  Synthetic oligonucleotide
acgactcgattggcgccgtaccaccacacctcctgggcgacgaggtaatt

SEQ ID NO: 233251 - DNA, 50 bp, Artificial
  Synthetic oligonucleotide
tactcccccacgacgttcctcccgagccgtgcaagagtttccgaggatta

SEQ ID NO: 233252 - DNA, 50 bp, Artificial
  Synthetic oligonucleotide
acgcacgatgggggacgcactctccccggttttgcgaagtgcaacagggt

SEQ ID NO: 233253 - DNA, 50 bp, Artificial
  Synthetic oligonucleotide
acgcccatcctcaatctgtaatcgtcagtggaagaggggtcgcccggccg

SEQ ID NO: 233254 - DNA, 55 bp, Artificial
  Synthetic oligonucleotide
gcacaccccaactttacaggaattgcggccgataaccccttggttttcagacgca

SEQ ID NO: 233255 - DNA, 50 bp, Artificial
  Synthetic oligonucleotide
acgcgcgtcagttgcctcacgtaggggagcatggggttgattggcagcag

SEQ ID NO: 233256 - DNA, 50 bp, Artificial
  Synthetic oligonucleotide
taccagtccatcttcctggtgcggaccagtccctttagcccgcctaccca

SEQ ID NO: 233257 - DNA, 50 bp, Artificial
  Synthetic oligonucleotide
acgcgttagctgggggagaaaggagcctaaacgccgctcccactccactc

SEQ ID NO: 233258 - DNA, 50 bp, Artificial
  Synthetic oligonucleotide
acggaggcagagtcgtctgagcccgaggccagtcgccccgaagaggtccc

SEQ ID NO: 233259 - DNA, 50 bp, Artificial
  Synthetic oligonucleotide
acggtcgaaagcgacgtagaacacacgaacggaggggcgttccccgcccg

SEQ ID NO: 233260 - DNA, 50 bp, Artificial
  Synthetic oligonucleotide
actccggcgtcggtgaacggaaaccgcttacgaaagcacggtgccaaacc

SEQ ID NO: 233261 - DNA, 50 bp, Artificial
  Synthetic oligonucleotide
actccgtctgtggggccgggttcagtttggggcgggctgaaagggctttc

SEQ ID NO: 233262 - DNA, 50 bp, Artificial
  Synthetic oligonucleotide
actcggcgagggccgccaaagcgtgttgcggtgggcgttgagacaacagg

SEQ ID NO: 233263 - DNA, 50 bp, Artificial
  Synthetic oligonucleotide
gtcggcatggcaactccggcgtcggtgaacggaaaccgcttacgaaagca

SEQ ID NO: 233264 - DNA, 58 bp, Artificial
  Synthetic oligonucleotide
cggaggttacaccagtctgaggagaagcactgcatacgtgtggtttcttaccgtgtgg

SEQ ID NO: 233265 - DNA, 59 bp, Artificial
  Synthetic oligonucleotide
caatgctgccgtagctatttaactacggaaatctggcgggccgattcgtcggtcatgta

SEQ ID NO: 233266 - DNA, 59 bp, Artificial
  Synthetic oligonucleotide
caactgatggttgtcgcattttgacccgtcgtttatttttcagtccacatgccaggcga

SEQ ID NO: 233267 - DNA, 56 bp, Artificial
  Synthetic oligonucleotide
gcaactcgtgaacggccgattcggcccggcagaactcgaaggggcgtgggccaaca

SEQ ID NO: 233268 - DNA, 60 bp, Artificial
  Synthetic oligonucleotide
cggttctccccaagtgggagggactcactgcgcgatgggcactgacacaaatcatcaccg

SEQ ID NO: 233269 - DNA, 57 bp, Artificial
  Synthetic oligonucleotide
attgtagccttctgacgtattccaccggccacgtggtatcgaatattcccgacactc

SEQ ID NO: 233270 - DNA, 59 bp, Artificial
  Synthetic oligonucleotide
gattactccgtaggacggtgtggtactcatgggttttctggaacgcaagtgagcagaga

SEQ ID NO: 233271 - DNA, 55 bp, Artificial
  Synthetic oligonucleotide
atgtgcggactatggtttggaaccgcttccataccctacaaatccgggttctggc

SEQ ID NO: 233272 - DNA, 60 bp, Artificial
  Synthetic oligonucleotide
atggaagctgactgcgaaagcgcttaagagcgtgcatttttgcttcgcgaggcacccgct

SEQ ID NO: 233273 - DNA, 58 bp, Artificial
  Synthetic oligonucleotide
atgcacgttagtgcggacagtgaagaacgggaaggtatgtcagtccttcaagacggac

SEQ ID NO: 233274 - DNA, 58 bp, Artificial
  Synthetic oligonucleotide
atcctcaccaggcggtaagcgaccttgctgaggacgactcgttggtcggtcgtcttca

SEQ ID NO: 233275 - DNA, 58 bp, Artificial
  Synthetic oligonucleotide
ggcaaggatagtgttgccaataacggaagcaaattcgccacgaaattcacgccacaac

SEQ ID NO: 233276 - DNA, 55 bp, Artificial
  Synthetic oligonucleotide
ggccccgtagagggcgtgggcatccgagcaaagtccaacgggcgtgctaatttcg

SEQ ID NO: 233277 - DNA, 60 bp, Artificial
  Synthetic oligonucleotide
ctcggacgccttgatcgccgtctgaaacttgccgatgtggattccgttgtgtacattgca

SEQ ID NO: 233278 - DNA, 60 bp, Artificial
  Synthetic oligonucleotide
tggtatggagacttctccagtactctcgggagttgaggcatcagtgtcatccggctcagg

SEQ ID NO: 233279 - DNA, 60 bp, Artificial
  Synthetic oligonucleotide
agggagagcccagcgctctgattatcgactgccaatcggtccagacttctcggtcgggag

SEQ ID NO: 233280 - DNA, 54 bp, Artificial
  Synthetic oligonucleotide
gaacgcgaccgctatgaggatgcgaccgatgtccggcccgtaaaggcgggtttt

SEQ ID NO: 233281 - DNA, 60 bp, Artificial
  Synthetic oligonucleotide
acagctccacgccccgaaccaggcgggcatgctgacgggcaatttcctcgcgcgatccga

SEQ ID NO: 233282 - DNA, 58 bp, Artificial
  Synthetic oligonucleotide
cttatgggcctccggcctcggaagagtgtatgacttacttgaggttgccgtatccaga

SEQ ID NO: 233283 - DNA, 59 bp, Artificial
  Synthetic oligonucleotide
tcttcgggaacctgcttaatcacagacgaatctcggacctcgatgtacccctgtgtcca

SEQ ID NO: 233284 - DNA, 60 bp, Artificial
  Synthetic oligonucleotide
acactcagttctgcaacgaccgggggcttgcgaaggaggatcagaacagcctgacccgca

SEQ ID NO: 233285 - DNA, 60 bp, Artificial
  Synthetic oligonucleotide
aagcttttaccgctgctgtctatcatgatagatcacaatatttgtgctgatattgtcgct

SEQ ID NO: 233286 - DNA, 57 bp, Artificial
  Synthetic oligonucleotide
tctcaatccaattcagtccttagtgcttagaccttaggtcttagaccttaggcctta

SEQ ID NO: 233287 - DNA, 59 bp, Artificial
  Synthetic oligonucleotide
tcgtatgttggggcaaccgatcccaaccgagcgccgatcatgccacggacacgagccct

SEQ ID NO: 233288 - DNA, 59 bp, Artificial
  Synthetic oligonucleotide
ctgtcagacaagcccgcttcccgagaggacggatgaggtagggctctacaaataccaga

SEQ ID NO: 233289 - DNA, 57 bp, Artificial
  Synthetic oligonucleotide
gaagaggagaagctattcgccacctttgccaagatcctacggaagtatgtccccgac

SEQ ID NO: 233290 - DNA, 57 bp, Artificial
  Synthetic oligonucleotide
cgtaaacacaggaggtgggctatgtattcggcgaaggtagacagagacgggcacacg

SEQ ID NO: 233291 - DNA, 56 bp, Artificial
  Synthetic oligonucleotide
tcgcgcgataggttcgcgatcggcgccctcaaaaccgcccatttcggcccttacag

SEQ ID NO: 233292 - DNA, 58 bp, Artificial
  Synthetic oligonucleotide
gaatacccagagggccgtaagccaactctaagatacatactcgaatattcgtacgcac

SEQ ID NO: 233293 - DNA, 60 bp, Artificial
  Synthetic oligonucleotide
tccacacttgacatattcctccccacaagagggtgagaaaaggcgagttgcgatcggcaa

SEQ ID NO: 233294 - DNA, 60 bp, Artificial
  Synthetic oligonucleotide
acaactgcacactcgatgtccttcttgcttccagggacagcgtggccgattgcatcttcc

SEQ ID NO: 233295 - DNA, 60 bp, Artificial
  Synthetic oligonucleotide
tccctattatctccacactggaaggcagcagggctctcacatacgtgacgtaccgattct

SEQ ID NO: 233296 - DNA, 57 bp, Artificial
  Synthetic oligonucleotide
gaagcgtgtatccgtcgtagcgagaggcaaactccctaatcgcatttagagggtacg

SEQ ID NO: 233297 - DNA, 60 bp, Artificial
  Synthetic oligonucleotide
tagacacacatacggcaacgttgacagcggactctccattgatttcacgagacgcacgtg

SEQ ID NO: 233298 - DNA, 57 bp, Artificial
  Synthetic oligonucleotide
ctccttacgggcccggcaaatgagagagcaattcttgcagtcgtggtaccggtcact

SEQ ID NO: 233299 - DNA, 60 bp, Artificial
  Synthetic oligonucleotide
tagccatcacctgcagtagccatcacctgcggtagccatcacctgcggtagccatcacct

SEQ ID NO: 233300 - DNA, 59 bp, Artificial
  Synthetic oligonucleotide
tagcctagttatcagtcccctcctaacggtcctcgttctgcttgcacaaggccgtgcaa

SEQ ID NO: 233301 - DNA, 59 bp, Artificial
  Synthetic oligonucleotide
aggcgatccccactgtatacgactcggtgggacgaactgcctgttgctcagtccagtta

SEQ ID NO: 233302 - DNA, 57 bp, Artificial
  Synthetic oligonucleotide
accggttcgctccacaaagggtagcgagccagttctaaaatcatcgtcgcacagccg

SEQ ID NO: 233303 - DNA, 60 bp, Artificial
  Synthetic oligonucleotide
aaaagcaggcccgcctcttcgctgcaaagcaggtgattaacgacctgcacgtatcgacgc

SEQ ID NO: 233304 - DNA, 57 bp, Artificial
  Synthetic oligonucleotide
accggccgagcatacttcggtcaaacaagcgtcggctgaagcaggcgcttcggcccg

SEQ ID NO: 233305 - DNA, 53 bp, Artificial
  Synthetic oligonucleotide
gaacgcagcttggggccggggaggagtttcggttggaagcggcgctaaaccat

SEQ ID NO: 233306 - DNA, 60 bp, Artificial
  Synthetic oligonucleotide
tagttatcgtgtcagcttgcataacgcgtcgttgtttttgtgatgtctgtcggtggttag

SEQ ID NO: 233307 - DNA, 60 bp, Artificial
  Synthetic oligonucleotide
tagttgagcaggcttgctgatggcagccttcatatcagtggctatagtgactcccctctg

SEQ ID NO: 233308 - DNA, 56 bp, Artificial
  Synthetic oligonucleotide
cttcggtttgtactctcggtaggagagctctcggcaggcgaaaagtactaacaaga

SEQ ID NO: 233309 - DNA, 59 bp, Artificial
  Synthetic oligonucleotide
tataccccggagtataattcaaagcacagcggctgcacggacaagtcccgaggagtcag

SEQ ID NO: 233310 - DNA, 60 bp, Artificial
  Synthetic oligonucleotide
ttgatttttgtcgtatgcacctcccatgcgcctgacatctcctgccgcatgctctacaga

SEQ ID NO: 233311 - DNA, 60 bp, Artificial
  Synthetic oligonucleotide
tgtcggaagggatgaggcgccaggctttcggcaccgcacatgtagagcaccgaggccaga

SEQ ID NO: 233312 - DNA, 59 bp, Artificial
  Synthetic oligonucleotide
ggtacgccgccgtctcagtgacgtggacgcagaaagccaataatccatagaactgcccc

SEQ ID NO: 233313 - DNA, 57 bp, Artificial
  Synthetic oligonucleotide
aaagtaggccaaaagaagccgatcagcagttaagcacctgttttctattcgcttagc

SEQ ID NO: 233314 - DNA, 60 bp, Artificial
  Synthetic oligonucleotide
tgtacgtcgctcttcggaacgatcttcatggctcgaacagggctgattttctacttgcga

SEQ ID NO: 233315 - DNA, 58 bp, Artificial
  Synthetic oligonucleotide
atgggtcaggaaccgaggaaatccttctgagcggatctggaatcctcgaatcgacgct

SEQ ID NO: 233316 - DNA, 59 bp, Artificial
  Synthetic oligonucleotide
gcgcatatgagtcagaaggaggtcgcagggcacctgggcgtaactgcctctgctcttag

SEQ ID NO: 233317 - DNA, 57 bp, Artificial
  Synthetic oligonucleotide
aacgacagtgccctggatgttccggaatgaattggctctcacccggatgggaacgtc

SEQ ID NO: 233318 - DNA, 56 bp, Artificial
  Synthetic oligonucleotide
cggggcacattggggtggtctaatggttttcgatggcacaaactggacggtctaca

SEQ ID NO: 233319 - DNA, 58 bp, Artificial
  Synthetic oligonucleotide
cccaagtgggagggactcactgcgcgatgggcactgacacaaatcatcaccgcacttc

SEQ ID NO: 233320 - DNA, 58 bp, Artificial
  Synthetic oligonucleotide
gaacccggtcgagatcaccttcacgagcggaagcagtgtcagccgagagggccggaag

SEQ ID NO: 233321 - DNA, 57 bp, Artificial
  Synthetic oligonucleotide
gtccagttagccgaactattagtccgacttttcgggtgcatctcagctttcaatttg

SEQ ID NO: 233322 - DNA, 56 bp, Artificial
  Synthetic oligonucleotide
agactggttcccggcggaatccccagctgggctcttgcctccagtagggcttttgc

SEQ ID NO: 233323 - DNA, 56 bp, Artificial
  Synthetic oligonucleotide
cgtgcaccagcggccgagtaaggcgtgggacccgaactcggtttgctatcagaaag

SEQ ID NO: 233324 - DNA, 58 bp, Artificial
  Synthetic oligonucleotide
tcactgacatgagcgaaatgttcgagggggctgcatctttcaaccaagacataagtgg

SEQ ID NO: 233325 - DNA, 58 bp, Artificial
  Synthetic oligonucleotide
tcagaagtgcactcgagggttctgagtctgattacagctcgtcgacatttcagtccta

SEQ ID NO: 233326 - DNA, 56 bp, Artificial
  Synthetic oligonucleotide
aggctcgggccgataagtcctctcgattcggtaaattgaaggtaacgtgccataga

SEQ ID NO: 233327 - DNA, 57 bp, Artificial
  Synthetic oligonucleotide
ctgctactcctgagctgtaacccttcagggcggttctccccaagtgggagggactca

SEQ ID NO: 233328 - DNA, 57 bp, Artificial
  Synthetic oligonucleotide
cgactttcaggacgcggacctacaagagatcgacaccgcgattgggaagacacggcg

SEQ ID NO: 233329 - DNA, 57 bp, Artificial
  Synthetic oligonucleotide
cgggcatatctcgccagggtgccccctaacgctctggtctagcaagatgccgcccgt

SEQ ID NO: 233330 - DNA, 55 bp, Artificial
  Synthetic oligonucleotide
attcaatccccgaggtcttatagcaggagctattccgggtggcgtcgtaatcccc

SEQ ID NO: 233331 - DNA, 57 bp, Artificial
  Synthetic oligonucleotide
atatcatcgtgcaagaacgcagatagcggttgtttcaggtcaaatgttgcgcgtgtg

SEQ ID NO: 233332 - DNA, 56 bp, Artificial
  Synthetic oligonucleotide
atctgctatgttgaggtctccgacgggtgcacggatactaataagcacatcgtctc

SEQ ID NO: 233333 - DNA, 56 bp, Artificial
  Synthetic oligonucleotide
ggtacaggacgggtacgaatatctggtacaggatcttgtagtaagggatcttgtag

SEQ ID NO: 233334 - DNA, 60 bp, Artificial
  Synthetic oligonucleotide
gttgcaggtcttggtggtagttgcgggtaatcatagattggttcacaattatcacatatt

SEQ ID NO: 233335 - DNA, 60 bp, Artificial
  Synthetic oligonucleotide
gtgtaaaatcctgaacataatgcatagatgtgacagaacctctatatcacagaacttggc

SEQ ID NO: 233336 - DNA, 58 bp, Artificial
  Synthetic oligonucleotide
tacctctgtcatcccgtggcttgacaccgagtgctttaccggtccctgcaacaatgcc

SEQ ID NO: 233337 - DNA, 58 bp, Artificial
  Synthetic oligonucleotide
tactctcatgtgatacagaggcttggctctagtgcaggggttaagagagtggaatatg

SEQ ID NO: 233338 - DNA, 58 bp, Artificial
  Synthetic oligonucleotide
agcataccgccgcacatactaacaactgagctactccccgcaagtcctcactgctcga

SEQ ID NO: 233339 - DNA, 55 bp, Artificial
  Synthetic oligonucleotide
ctacgcgagaaggcattgttgcgtggaccggtaaaacccactgtgtcaccccgtg

SEQ ID NO: 233340 - DNA, 56 bp, Artificial
  Synthetic oligonucleotide
gaaggcattgttgcgtggaccggtaaaacccactgtgtcaccccgtggcttgacca

SEQ ID NO: 233341 - DNA, 57 bp, Artificial
  Synthetic oligonucleotide
aagcggtagccctctatttgacaagcctgccggcactgaaacacaaggcagccctgc

SEQ ID NO: 233342 - DNA, 57 bp, Artificial
  Synthetic oligonucleotide
ttccctgaagtattatccgatgttgaattagccatttcccgcactaaatctggatct

SEQ ID NO: 233343 - DNA, 57 bp, Artificial
  Synthetic oligonucleotide
gctatagaataagtagacttaactcgtcctgatattgcatatgctacatccaatctg

SEQ ID NO: 233344 - DNA, 57 bp, Artificial
  Synthetic oligonucleotide
ggtggcggagtaagggataatgttgctgcaagcggaggtgtgtcggcacctaaggta

SEQ ID NO: 233345 - DNA, 57 bp, Artificial
  Synthetic oligonucleotide
gctcctatccaaaacactatcctccaatttaatgcaaatgaggtaacaatatatgcc

SEQ ID NO: 233346 - DNA, 60 bp, Artificial
  Synthetic oligonucleotide
gcaagtaatcgtcaccatgagcaagtagacttggatagtcacaacacttccgagcgtcca

SEQ ID NO: 233347 - DNA, 57 bp, Artificial
  Synthetic oligonucleotide
gtactaaatccaagaaatcacgaactttaacaccagcaacctcagttataatatcgc

SEQ ID NO: 233348 - DNA, 56 bp, Artificial
  Synthetic oligonucleotide
gcaacctaagccatctataagttacacgaatactagtaaacgagaattacctatac

SEQ ID NO: 233349 - DNA, 57 bp, Artificial
  Synthetic oligonucleotide
gatatctacaccatgttctatcagatgctttactacatctaggtagttgtgtttagc

SEQ ID NO: 233350 - DNA, 57 bp, Artificial
  Synthetic oligonucleotide
gaacgtaaggtaaatattatcatgccaattaagagcattccaccagatgctagattc

SEQ ID NO: 233351 - DNA, 57 bp, Artificial
  Synthetic oligonucleotide
ggatcgcagttacttgcgtcatgtgtcttagtatgttagatatgaaactaagttatc

SEQ ID NO: 233352 - DNA, 50 bp, Artificial
  Synthetic oligonucleotide
ctttgctcgtttcccaaaaactctttttcgaaagataaattcttaagatt

SEQ ID NO: 233353 - DNA, 56 bp, Artificial
  Synthetic oligonucleotide
gcagaaacgataatatcggaaatcccgtacaggtttattatatccgaatcattacc

SEQ ID NO: 233354 - DNA, 56 bp, Artificial
  Synthetic oligonucleotide
gagattataaggatttacaagcatgactaatgaagagcataatcagaggcaacagc

SEQ ID NO: 233355 - DNA, 55 bp, Artificial
  Synthetic oligonucleotide
ctacttaaacttaagtcgtcattaagccgataattatatttagcactagcgggag

SEQ ID NO: 233356 - DNA, 56 bp, Artificial
  Synthetic oligonucleotide
tatgctatccggtaacgcacagcgtccaggggacgtggtaactaccatgtcagggc

SEQ ID NO: 233357 - DNA, 60 bp, Artificial
  Synthetic oligonucleotide
accgtggcttgtaccagccagctaaaccgtcattgcgagcagagccataggctgtgtgac

SEQ ID NO: 233358 - DNA, 56 bp, Artificial
  Synthetic oligonucleotide
ggataggagtgtagaaagatctttagtacggcaagttcaattaatcaggagtattg

SEQ ID NO: 233359 - DNA, 56 bp, Artificial
  Synthetic oligonucleotide
tgcaagcgggcattgttgcgtggataccacccagtcattgggagcagtcgtagact

SEQ ID NO: 233360 - DNA, 56 bp, Artificial
  Synthetic oligonucleotide
gctttatgacctatggtatttgatgccatatcactcattactatatcagccttacc

SEQ ID NO: 233361 - DNA, 56 bp, Artificial
  Synthetic oligonucleotide
gcaaatacagagcgtatttcatggtgctcgctttaaattaactaatatgcttgctg

SEQ ID NO: 233362 - DNA, 56 bp, Artificial
  Synthetic oligonucleotide
ctaatactcaaaatgacaggactagcttgaatactggaatcggattaatagcaagt

SEQ ID NO: 233363 - DNA, 56 bp, Artificial
  Synthetic oligonucleotide
gcttcgtttatttgtgtgatgttgtaactctgatttatttctaatacgtgataaat

SEQ ID NO: 233364 - DNA, 56 bp, Artificial
  Synthetic oligonucleotide
tgacatagtacgcagcatcgagtctttagacgatagcgagtttagtctactactag

SEQ ID NO: 233365 - DNA, 55 bp, Artificial
  Synthetic oligonucleotide
gccatccatgcactttgacgtactcagaacttggtcagactataggtgctggaag

SEQ ID NO: 233366 - DNA, 55 bp, Artificial
  Synthetic oligonucleotide
gcccatacagatatcactgccaggctagtagtacaagtaggcactcacagcaatg

SEQ ID NO: 233367 - DNA, 55 bp, Artificial
  Synthetic oligonucleotide
gaacttgaacaattggctgtgtcgtctttgtaagtcctaggatgctgaacattta

SEQ ID NO: 233368 - DNA, 60 bp, Artificial
  Synthetic oligonucleotide
tgacgatgagtggctaagagtagggcagcaactactgctactgcaaagatctacagataa

SEQ ID NO: 233369 - DNA, 55 bp, Artificial
  Synthetic oligonucleotide
gaagatgttaccgtgtatagggcagggtgtaattgcagtcgagatcagaaaagac

SEQ ID NO: 233370 - DNA, 55 bp, Artificial
  Synthetic oligonucleotide
gcggaaatgtctccacccgattatagaaattaactagcttccttcttttgactac

SEQ ID NO: 233371 - DNA, 55 bp, Artificial
  Synthetic oligonucleotide
gccgctagtgttacgtcccgtaatacgcactgactcaagtttacagcgaattaac

SEQ ID NO: 233372 - DNA, 55 bp, Artificial
  Synthetic oligonucleotide
gcctagtgctactcgggaggagttgatgcagttgtacagcacgctacaacttgcc

SEQ ID NO: 233373 - DNA, 55 bp, Artificial
  Synthetic oligonucleotide
gcgacaaatagagatcttaagtgagcagctagaagcagtatatggaatgaacggt

SEQ ID NO: 233374 - DNA, 55 bp, Artificial
  Synthetic oligonucleotide
gaagactctaagtcaacggggcatccctttgactggagaactaggatttgagaag

SEQ ID NO: 233375 - DNA, 55 bp, Artificial
  Synthetic oligonucleotide
gcgaacttcatcctaaattacgcgacaatccacacattaaggtgcttgagaatac

SEQ ID NO: 233376 - DNA, 55 bp, Artificial
  Synthetic oligonucleotide
gcctgctatctcctcatattcctcaagtagaattaaccctttgcacttagtcttt

SEQ ID NO: 233377 - DNA, 55 bp, Artificial
  Synthetic oligonucleotide
ctttaagcgagcgacaaatagcaacattaagtgagcaactagaagcagtatatgg

SEQ ID NO: 233378 - DNA, 55 bp, Artificial
  Synthetic oligonucleotide
gctccgtatgtgatattaacgtcttgcgttctgcgtctctttcaatatccgctaa

SEQ ID NO: 233379 - DNA, 60 bp, Artificial
  Synthetic oligonucleotide
ctcaatccaatgtgaggtattagcgttacttctcgcggcatctctactttgtagttaaga

SEQ ID NO: 233380 - DNA, 55 bp, Artificial
  Synthetic oligonucleotide
gctccctagctagaaccaaacttgcggtatatggttcaacttacctactgtgatc

SEQ ID NO: 233381 - DNA, 55 bp, Artificial
  Synthetic oligonucleotide
gctcaaaactaacatagacgtaagcacaaccagcaagctacttctataggttaag

SEQ ID NO: 233382 - DNA, 55 bp, Artificial
  Synthetic oligonucleotide
gctatttgcttctcatctacaaagcctggtatattattctgcatctcatgcttca

SEQ ID NO: 233383 - DNA, 55 bp, Artificial
  Synthetic oligonucleotide
ctttacagtttactagagatatagatacgccggtggataaaaggctaggtggagg

SEQ ID NO: 233384 - DNA, 55 bp, Artificial
  Synthetic oligonucleotide
gatcttatgtcgtaggttgtgttctgagatcctgcgatcaagtcgcggtatgacg

SEQ ID NO: 233385 - DNA, 55 bp, Artificial
  Synthetic oligonucleotide
gctataggcattgatccggatatagtttcaacaatgattctgtgtgactcgatgg

SEQ ID NO: 233386 - DNA, 54 bp, Artificial
  Synthetic oligonucleotide
gctatacctcaaaccggctttgacggagtaataggttggcttgtgaaaggtaag

SEQ ID NO: 233387 - DNA, 55 bp, Artificial
  Synthetic oligonucleotide
cttttggcactattagtcatctagccggcgaatcgatttgcatccttagtagtga

SEQ ID NO: 233388 - DNA, 55 bp, Artificial
  Synthetic oligonucleotide
gctaacgaaggttgtatctcattaccagagcaacgtattgaggtggcaagaccgg

SEQ ID NO: 233389 - DNA, 55 bp, Artificial
  Synthetic oligonucleotide
gcgtggggttctaggcaagcttggaataggtgaggtggtcttacagaatttcggt

SEQ ID NO: 233390 - DNA, 60 bp, Artificial
  Synthetic oligonucleotide
tagggtacgtagtgcgttgcgtcagcaaagaggatagcaagaaacagacattacctgtga

SEQ ID NO: 233391 - DNA, 54 bp, Artificial
  Synthetic oligonucleotide
gcgtgcttttgaagctcaagggttttcgtttgaattagttcagtgtaagtaaac

SEQ ID NO: 233392 - DNA, 55 bp, Artificial
  Synthetic oligonucleotide
gcgtcgatccgatactcgcatcctcacgtacgcttgtgtactctgcggtgctgcg

SEQ ID NO: 233393 - DNA, 55 bp, Artificial
  Synthetic oligonucleotide
gcgtatgccagggtaatttgatcaagatcactgtaatcataaactacatctcgat

SEQ ID NO: 233394 - DNA, 54 bp, Artificial
  Synthetic oligonucleotide
gcggtaagttaattcgctgtaaacttgagtcagtacgtattacgggacgtaaca

SEQ ID NO: 233395 - DNA, 55 bp, Artificial
  Synthetic oligonucleotide
gcggcaaatagagatattaagcgagcaattagaagcagtatatggtatcaatggg

SEQ ID NO: 233396 - DNA, 55 bp, Artificial
  Synthetic oligonucleotide
gaaaggtacagaaagatccaaagcctaaagtagtatctagcgatgacggagattt

SEQ ID NO: 233397 - DNA, 55 bp, Artificial
  Synthetic oligonucleotide
gcagagcaatattgaaaccacgggcaatataacaagattgcaccgcaatatagag

SEQ ID NO: 233398 - DNA, 55 bp, Artificial
  Synthetic oligonucleotide
gcactttatcaagcggcattgaaagacggttagcaatttccgttgccgtcggttc

SEQ ID NO: 233399 - DNA, 55 bp, Artificial
  Synthetic oligonucleotide
gattccgttattggacctacaccgctatgaagtatacgaagttttatctcatcac

SEQ ID NO: 233400 - DNA, 55 bp, Artificial
  Synthetic oligonucleotide
gcactctagttgtaacctcacgtaaatttgactgaattgccgcatcaatcggtgc

SEQ ID NO: 233401 - DNA, 57 bp, Artificial
  Synthetic oligonucleotide
tacgtcgatccggtactcgaatcctcacgtacgcttttgtacgctgcggttctgcgt

SEQ ID NO: 233402 - DNA, 55 bp, Artificial
  Synthetic oligonucleotide
gcacattgtcaactcaaatcgtcattgcgagcaggtattgtgttgcatagaccgg

SEQ ID NO: 233403 - DNA, 55 bp, Artificial
  Synthetic oligonucleotide
gagctgagatgctagcaagtaacatatagatactcgaattagtaaagctgacgtc

SEQ ID NO: 233404 - DNA, 55 bp, Artificial
  Synthetic oligonucleotide
gcaattaacagattcagaacttgatataaatccggtagggtttcaagtgaacgga

SEQ ID NO: 233405 - DNA, 55 bp, Artificial
  Synthetic oligonucleotide
gcaatctatgtatagtagttgcttctaatcctgtactctcgcttaggcgtttagc

SEQ ID NO: 233406 - DNA, 55 bp, Artificial
  Synthetic oligonucleotide
gagtagatattatggtaatacaggtcgttttatcggtggtattagcacggttatc

SEQ ID NO: 233407 - DNA, 55 bp, Artificial
  Synthetic oligonucleotide
gagtcgctgtcctctatatgtaattgagcaagtctatgagaattgacatgactgc

SEQ ID NO: 233408 - DNA, 55 bp, Artificial
  Synthetic oligonucleotide
gcaatcattttacccgcttgctacgcccagtgataatgtaggtatacatcagtac

SEQ ID NO: 233409 - DNA, 55 bp, Artificial
  Synthetic oligonucleotide
gcaagtgaaggcgtggtagtttagttatcaacgcttccatcacatacaataggcc

SEQ ID NO: 233410 - DNA, 55 bp, Artificial
  Synthetic oligonucleotide
gagtgctatctcagatcttaaatctgatactatgttgtgatgtagtgctggatct

SEQ ID NO: 233411 - DNA, 55 bp, Artificial
  Synthetic oligonucleotide
gcaaggattcatgttttgactcatagcctgcattattcaggatcggtatttgagg

SEQ ID NO: 233412 - DNA, 60 bp, Artificial
  Synthetic oligonucleotide
caattaatccttgtctgatatgatgccatgctgtatctgcttcgatcgtatctaatcccc

SEQ ID NO: 233413 - DNA, 55 bp, Artificial
  Synthetic oligonucleotide
gagtgtggtccttatgctaaagttggagtcgttggaggaatgattactggcgtag

SEQ ID NO: 233414 - DNA, 55 bp, Artificial
  Synthetic oligonucleotide
gataaggtcttgttacatggatcaggtttcttgctgttacgctgtgacttgatcg

SEQ ID NO: 233415 - DNA, 55 bp, Artificial
  Synthetic oligonucleotide
gcaacgatgagtgtagcattgtttgcttctcagttgaacagctataatcgtgctg

SEQ ID NO: 233416 - DNA, 55 bp, Artificial
  Synthetic oligonucleotide
gatagctaggaatcgcttggctttagcaaggtgagggcgtcacattcgttgtcgt

SEQ ID NO: 233417 - DNA, 55 bp, Artificial
  Synthetic oligonucleotide
gatataatatctatggcagtagtacatagctccgaattaactagtactacgagcg

SEQ ID NO: 233418 - DNA, 55 bp, Artificial
  Synthetic oligonucleotide
gatcgacgccctctttaataagagcatcatattgtaaatcgaacacttggcgatc

SEQ ID NO: 233419 - DNA, 55 bp, Artificial
  Synthetic oligonucleotide
gccagcacagtctacaaagcgcaatcggcttcgattaaggatgtctacgtgctac

SEQ ID NO: 233420 - DNA, 55 bp, Artificial
  Synthetic oligonucleotide
gccacggggtgacacagtggcttttaccggtccatccagcaatgttcgactatac

SEQ ID NO: 233421 - DNA, 55 bp, Artificial
  Synthetic oligonucleotide
gccacaatgactatctgatgtcgcttcaagtaatgtgtgcgttcaccctgctttg

SEQ ID NO: 233422 - DNA, 55 bp, Artificial
  Synthetic oligonucleotide
gccaagccacggtataaaacactgcacgcgttttccactccacgcaacaattgct

SEQ ID NO: 233423 - DNA, 60 bp, Artificial
  Synthetic oligonucleotide
acccacgatctgtaagaatacgcagcattggtatcccttgcgtctcataccatggtaaca

SEQ ID NO: 233424 - DNA, 55 bp, Artificial
  Synthetic oligonucleotide
gatcttaacaccctgctctcgcttctctttcaacgcacttaattgttcatgtgtt

SEQ ID NO: 233425 - DNA, 55 bp, Artificial
  Synthetic oligonucleotide
gcatttattgccaagttctgtgatatagaggttttgtcacgtctatgcattatgc

SEQ ID NO: 233426 - DNA, 55 bp, Artificial
  Synthetic oligonucleotide
gaagccggaatattgtagattatccaatgatcccatatgccgtgcggcggtgcta

SEQ ID NO: 233427 - DNA, 55 bp, Artificial
  Synthetic oligonucleotide
gaagctagatattacttgccggttggagcagttttaagcgtagaagacggagtac

SEQ ID NO: 233428 - DNA, 55 bp, Artificial
  Synthetic oligonucleotide
gaaggatcttgggctgttgtacatgcttgagtcataatagtataagcgtttgaag

SEQ ID NO: 233429 - DNA, 55 bp, Artificial
  Synthetic oligonucleotide
gatgtctccatatcaaatgtcgatgctactatgctagaacatgtcgttttgtgag

SEQ ID NO: 233430 - DNA, 55 bp, Artificial
  Synthetic oligonucleotide
gcatccagttattgggacgtatgattgattcttggtggtatcatagtactgatgt

SEQ ID NO: 233431 - DNA, 55 bp, Artificial
  Synthetic oligonucleotide
gaatacgcagcattggtatcccttgcgtctcataccatggtaacacccggtcatt

SEQ ID NO: 233432 - DNA, 55 bp, Artificial
  Synthetic oligonucleotide
gaatgtaggatggttaggggatgctcagaaaatgaccggtagaccagtcaccggt

SEQ ID NO: 233433 - DNA, 55 bp, Artificial
  Synthetic oligonucleotide
gacctctactaaagccaaggcgtgtacgtcttcatgcgaattgattgtactcgtt

SEQ ID NO: 233434 - DNA, 60 bp, Artificial
  Synthetic oligonucleotide
tgcacataataaccgttcattccatatactgcttctagctgctcacttaagatctctatt

SEQ ID NO: 233435 - DNA, 54 bp, Artificial
  Synthetic oligonucleotide
gacggtatattagttaaaccaagatagccttgaagtttagtagcaaccgaagga

SEQ ID NO: 233436 - DNA, 55 bp, Artificial
  Synthetic oligonucleotide
gcatacggtactatcggtggttacatcactagcaactataatttaatcgacgcta

SEQ ID NO: 233437 - DNA, 55 bp, Artificial
  Synthetic oligonucleotide
gatctgagtatatatgatgggataacactcgttcctaaaagcggtgtatatagca

SEQ ID NO: 233438 - DNA, 55 bp, Artificial
  Synthetic oligonucleotide
gcataaatacacctgttgatacttcgtctacagtagtgaccgcaacagagtcttc

SEQ ID NO: 233439 - DNA, 55 bp, Artificial
  Synthetic oligonucleotide
gcaggagtaacaattcctaatctcggtagcgtaagcttgagtaccggtgctggtc

SEQ ID NO: 233440 - DNA, 55 bp, Artificial
  Synthetic oligonucleotide
gcagcaccgcagcgtacataaacatacgtgaggatgcgagtactggatcgacgta

SEQ ID NO: 233441 - DNA, 55 bp, Artificial
  Synthetic oligonucleotide
gactaggtggtatccacgcaacaatgccttcctagctagaagcgggagtccagaa

SEQ ID NO: 233442 - DNA, 55 bp, Artificial
  Synthetic oligonucleotide
tcgtagctatctttctctagtaacgcatctcgtacgcagccgccaataagtcgtg

SEQ ID NO: 233443 - DNA, 54 bp, Artificial
  Synthetic oligonucleotide
tcgcttgtacggttctttgggaggaaagcgccaatagggtgcctacctacccgc

SEQ ID NO: 233444 - DNA, 55 bp, Artificial
  Synthetic oligonucleotide
tcgagatcgcagataatacactgctatcatactgccctgcatatttaagcttgcc

SEQ ID NO: 233445 - DNA, 60 bp, Artificial
  Synthetic oligonucleotide
tcggcaagaattgtcatatttcaggcggcacgggaataggtggggtgcttgagccgttgc

SEQ ID NO: 233446 - DNA, 60 bp, Artificial
  Synthetic oligonucleotide
agtcatgccgattctcatagacttgttcaagtacatacagaggacggagactctggaata

SEQ ID NO: 233447 - DNA, 55 bp, Artificial
  Synthetic oligonucleotide
tattcccgtgaaggcttacctgtgtgtaacggtatttctgtcatcctgcgacttg

SEQ ID NO: 233448 - DNA, 55 bp, Artificial
  Synthetic oligonucleotide
tagttttggcggtggttcttacgcagctcctagctggtcgcctagaggagactat

SEQ ID NO: 233449 - DNA, 55 bp, Artificial
  Synthetic oligonucleotide
tagttcacatatcttatgaccctaatgttgcgagttttgtagatcaagcgtgcaa

SEQ ID NO: 233450 - DNA, 55 bp, Artificial
  Synthetic oligonucleotide
tagcgctaagatcttgtataagttccagtgctgtctttaagtcaactttgcggtt

SEQ ID NO: 233451 - DNA, 55 bp, Artificial
  Synthetic oligonucleotide
tagcatgcctgctgtttagtagtacaattcctggagctactccagctaatactac

SEQ ID NO: 233452 - DNA, 55 bp, Artificial
  Synthetic oligonucleotide
tagagcctgactacttcctatctagcagccaaagcaatagctactataccaggaa

SEQ ID NO: 233453 - DNA, 55 bp, Artificial
  Synthetic oligonucleotide
tactaaggtgctagtagaaaatagccaatcggtgaatttacaagtcgtcggtcag

SEQ ID NO: 233454 - DNA, 55 bp, Artificial
  Synthetic oligonucleotide
tacggtttttttaggactgcgctgtaactatccatccttaaccattcctctatct

SEQ ID NO: 233455 - DNA, 55 bp, Artificial
  Synthetic oligonucleotide
taagtcctgaccagctacctaagcggttaattttatcgggatcagccatctcatg

SEQ ID NO: 233456 - DNA, 55 bp, Artificial
  Synthetic oligonucleotide
taagattccctgttgaatcgctgcgtgttattaagagccgtacttccgatggggt

SEQ ID NO: 233457 - DNA, 60 bp, Artificial
  Synthetic oligonucleotide
ctagaggacgctgccccgtatattccgtctggatcgctgacagtcggtgcggacactgat

SEQ ID NO: 233458 - DNA, 55 bp, Artificial
  Synthetic oligonucleotide
gtttaccactctaaatatggtatcattgaggtgttcaacatatgctgtgaggcct

SEQ ID NO: 233459 - DNA, 55 bp, Artificial
  Synthetic oligonucleotide
gttgcttctaatcctgtactctcgcttaggcgtttagctgctctaccagtgggtg

SEQ ID NO: 233460 - DNA, 55 bp, Artificial
  Synthetic oligonucleotide
gttgcaactgctgtagaatttgcaagcagaattgcagctccgaatttaaaaccgg

SEQ ID NO: 233461 - DNA, 55 bp, Artificial
  Synthetic oligonucleotide
gttgatggtgctaccacaccaaattctgacaatattgataccccttgcactgcta

SEQ ID NO: 233462 - DNA, 55 bp, Artificial
  Synthetic oligonucleotide
gttaggatacaatgacaatcaagccttggaatcctctaaagaattggaatgcacc

SEQ ID NO: 233463 - DNA, 55 bp, Artificial
  Synthetic oligonucleotide
gtgtcataccgtggcttaaccacaggatatccagtacctctaatgtcatcctagc

SEQ ID NO: 233464 - DNA, 55 bp, Artificial
  Synthetic oligonucleotide
gtggtgataaaggtgattagagacattagtattagggaccaggttcgccccttag

SEQ ID NO: 233465 - DNA, 55 bp, Artificial
  Synthetic oligonucleotide
gtggtgactatcaggtacatcattgatattcatgccaagctgagctgaatgtagg

SEQ ID NO: 233466 - DNA, 55 bp, Artificial
  Synthetic oligonucleotide
gtggcatgattggtggtaaaggcacgttagtgctaattcctgcagagcccttacc

SEQ ID NO: 233467 - DNA, 55 bp, Artificial
  Synthetic oligonucleotide
gtgcttatagcgatcctggtcttgtgaaccttatctcagattccggtatacatct

SEQ ID NO: 233468 - DNA, 59 bp, Artificial
  Synthetic oligonucleotide
agggctgccttgtgtttcagtgccggcaggcttgtcaaatagagggctaccgcttggta

SEQ ID NO: 233469 - DNA, 55 bp, Artificial
  Synthetic oligonucleotide
gtgctcacgtgttaggtatacactccgctcatcgctttgtagactcattgctctg

SEQ ID NO: 233470 - DNA, 55 bp, Artificial
  Synthetic oligonucleotide
gtgagcggacgattcagttaaatattaactatgagacgctacgcaaacatgcagg

SEQ ID NO: 233471 - DNA, 55 bp, Artificial
  Synthetic oligonucleotide
ttttgtagcaacgcacaagagttgctagcgttccgagaggcagcacaagctaaat

SEQ ID NO: 233472 - DNA, 55 bp, Artificial
  Synthetic oligonucleotide
tttattagctctgcttgcaagatgagtgcgataatcataactacttgattccgcc

SEQ ID NO: 233473 - DNA, 55 bp, Artificial
  Synthetic oligonucleotide
tttagtaaactacaacgtatagaattcccacaactagatccagatttagtgcggg

SEQ ID NO: 233474 - DNA, 55 bp, Artificial
  Synthetic oligonucleotide
ttggcggtacttgttgtttatactgaggtggttcaaccgatgaacttgttgtttg

SEQ ID NO: 233475 - DNA, 55 bp, Artificial
  Synthetic oligonucleotide
ttgcctagaaacggttaatgtcatcattgtaagcgactaaaggccttgttgtatg

SEQ ID NO: 233476 - DNA, 55 bp, Artificial
  Synthetic oligonucleotide
ttcgacatgcataggaccatcatgacgcacctcaacccttcctggaaacttctta

SEQ ID NO: 233477 - DNA, 55 bp, Artificial
  Synthetic oligonucleotide
ttagggtctgggctccctgtttctatactggcctcatacgctgcttgcatgttgg

SEQ ID NO: 233478 - DNA, 55 bp, Artificial
  Synthetic oligonucleotide
ttaggacggatattttagtgaccgaaatactgcatgacacattagaggatacaga

SEQ ID NO: 233479 - DNA, 55 bp, Artificial
  Synthetic oligonucleotide
tatagtttaagcttgtattttcggttacagttgtaaagaagaagtctagtataga

SEQ ID NO: 233480 - DNA, 55 bp, Artificial
  Synthetic oligonucleotide
ttagaccgcattggtggactctctaccggtaaactgaaaactatcgggatatcag

SEQ ID NO: 233481 - DNA, 55 bp, Artificial
  Synthetic oligonucleotide
ttacctatcagatggtagccttcgtttacagcacttgttgagttaggcgtatatg

SEQ ID NO: 233482 - DNA, 55 bp, Artificial
  Synthetic oligonucleotide
ttaaatgcagtgtcatcactaacacgtcattgtaagcatttgctcggagcgtggc

SEQ ID NO: 233483 - DNA, 55 bp, Artificial
  Synthetic oligonucleotide
tgttacaggcattggagattatgtatcgggataggattaggttacatcagtgcgc

SEQ ID NO: 233484 - DNA, 55 bp, Artificial
  Synthetic oligonucleotide
tgtggaagtagtacaacaagtccactcatacgcagccatttagtcgcgctacttg

SEQ ID NO: 233485 - DNA, 55 bp, Artificial
  Synthetic oligonucleotide
tgtcaagtcactaggtgacacagtgggtttaccgagccacacaacaattggggtc

SEQ ID NO: 233486 - DNA, 55 bp, Artificial
  Synthetic oligonucleotide
tgctcttttgggatagttagcaagcccgcaataagaccgcctacactagtaccgg

SEQ ID NO: 233487 - DNA, 55 bp, Artificial
  Synthetic oligonucleotide
tgctcggcgggatattagatatacgtaatatgacggtatcggaaattatgactca

SEQ ID NO: 233488 - DNA, 55 bp, Artificial
  Synthetic oligonucleotide
tgctccgcatccagtgcatgacgtatcatatgtaaatccctctttggccttacgg

SEQ ID NO: 233489 - DNA, 55 bp, Artificial
  Synthetic oligonucleotide
tgcctgctagctcatgacctataatggaagtacgcaatgtgatagcatgcggata

SEQ ID NO: 233490 - DNA, 60 bp, Artificial
  Synthetic oligonucleotide
tatctgcaatactatcctcaccactccaatcatcaacgcctccacaactagaaccgctat

SEQ ID NO: 233491 - DNA, 55 bp, Artificial
  Synthetic oligonucleotide
tgcatgacgatccgacaagtgcatgcgtgcagctagccggctgtgagccgaatgt

SEQ ID NO: 233492 - DNA, 55 bp, Artificial
  Synthetic oligonucleotide
tgatataagaggccaaacaagcccaatggtggttataagtaatccaagggtgatg

SEQ ID NO: 233493 - DNA, 55 bp, Artificial
  Synthetic oligonucleotide
tgagctgctaatgccatgcattcaacctgccagcttatggaaagaatcgtctcga

SEQ ID NO: 233494 - DNA, 55 bp, Artificial
  Synthetic oligonucleotide
tgagaatataagcagctattagatgacgagcatgtgatggtaggagctaagaaat

SEQ ID NO: 233495 - DNA, 55 bp, Artificial
  Synthetic oligonucleotide
tgaccacgggatcttgtatcacagcccatgtcctaagatcccaaatcacgggatg

SEQ ID NO: 233496 - DNA, 55 bp, Artificial
  Synthetic oligonucleotide
tctactcgtgatgcgaacggattacttacggatagccaaagcacggtaattcgga

SEQ ID NO: 233497 - DNA, 55 bp, Artificial
  Synthetic oligonucleotide
tctaacaagttccatgggctttagcgtacttgacggtgttatgatgggtacaagg

SEQ ID NO: 233498 - DNA, 55 bp, Artificial
  Synthetic oligonucleotide
tctaaaggacgtaatagatctatagctcttcctgctacaagctgggctgagagac

SEQ ID NO: 233499 - DNA, 55 bp, Artificial
  Synthetic oligonucleotide
gggatatccctttgtacttaggggttaggacttgagaagttggttgagctcagag

SEQ ID NO: 233500 - DNA, 55 bp, Artificial
  Synthetic oligonucleotide
ggcttggtaatccctagcattagtagatgttagcatcagagtaaatgggtctaac

SEQ ID NO: 233501 - DNA, 60 bp, Artificial
  Synthetic oligonucleotide
aggagtcaatactgattaaaaatgtgcataaggtagtgctacaaggtcatgatatatctg

SEQ ID NO: 233502 - DNA, 55 bp, Artificial
  Synthetic oligonucleotide
ggctcgtgatatcttaaatctatggcaaagcctacttgagaggtttaaaagtagt

SEQ ID NO: 233503 - DNA, 55 bp, Artificial
  Synthetic oligonucleotide
ggcctgatttagcatgcctgctgtttagtagtacaattcctggagctactccagc

SEQ ID NO: 233504 - DNA, 55 bp, Artificial
  Synthetic oligonucleotide
ggcatgcggggagttgaggtaatgattagtttatcgaaacttgttgtagcggtag

SEQ ID NO: 233505 - DNA, 55 bp, Artificial
  Synthetic oligonucleotide
ggcatctaagtaccgttgcagggtggaacgtacctgctccaacatgtgcatcgta

SEQ ID NO: 233506 - DNA, 55 bp, Artificial
  Synthetic oligonucleotide
ggcagtctaattagttgaccgtccgttgccggagttaagccgagatttgctatcg

SEQ ID NO: 233507 - DNA, 55 bp, Artificial
  Synthetic oligonucleotide
ggcagcgtaacaataatgcactaatctatcacattgacctgatgcgataatcgcc

SEQ ID NO: 233508 - DNA, 55 bp, Artificial
  Synthetic oligonucleotide
ggatacgcaagagtctcaacgttagatcaaaaccctaatcatcaaattgatgctc

SEQ ID NO: 233509 - DNA, 55 bp, Artificial
  Synthetic oligonucleotide
ggagtaatatcaggagaggatttgtggttagattgcgtcataagtcctgaccagc

SEQ ID NO: 233510 - DNA, 55 bp, Artificial
  Synthetic oligonucleotide
ggaggtttctttatatacgccactattccgctgtgtagtaagctgcataccattt

SEQ ID NO: 233511 - DNA, 55 bp, Artificial
  Synthetic oligonucleotide
ggagcagtaccgccaaatatagcagctgcaaggttatatgaaagtgcaacaccgg

SEQ ID NO: 233512 - DNA, 56 bp, Artificial
  Synthetic oligonucleotide
atctgctcccctgaagtaaccgaggccgtaccgtctctacctatcgatccgccgac

SEQ ID NO: 233513 - DNA, 55 bp, Artificial
  Synthetic oligonucleotide
ggagcaaatattactctgctgcctatctcaccatttaaggcttggtaactctttt

SEQ ID NO: 233514 - DNA, 55 bp, Artificial
  Synthetic oligonucleotide
ggagaaagacaacaggataactacagagacttatattgatgccagtaacagcaat

SEQ ID NO: 233515 - DNA, 55 bp, Artificial
  Synthetic oligonucleotide
ggacttgttaaccttgtttcagattccggtgcacatcttgatccgatggactgga

SEQ ID NO: 233516 - DNA, 55 bp, Artificial
  Synthetic oligonucleotide
ggacgtcttactccgtcaatctccctaatgctatggtatgtaaccggcaactctt

SEQ ID NO: 233517 - DNA, 54 bp, Artificial
  Synthetic oligonucleotide
ggacgatgtcctaaaagttagtggtagtcctaggttaatattaagctcacgaac

SEQ ID NO: 233518 - DNA, 55 bp, Artificial
  Synthetic oligonucleotide
ggaccgatatttcacggttcaagtggtgacgatatgtatggtagacaacctaata

SEQ ID NO: 233519 - DNA, 55 bp, Artificial
  Synthetic oligonucleotide
ggaatattatatagcggccttccatgtgcgagtacggcttatgttttatctcgtc

SEQ ID NO: 233520 - DNA, 55 bp, Artificial
  Synthetic oligonucleotide
ggaagtctataatggagtcatgcactaatcttgcagcttgaggtttgcttatttt

SEQ ID NO: 233521 - DNA, 55 bp, Artificial
  Synthetic oligonucleotide
ggaagctagaagtacaaatacgtaccagaaggatgcacaacattgcacagtctgg

SEQ ID NO: 233522 - DNA, 55 bp, Artificial
  Synthetic oligonucleotide
gcttgccagttgttgcaaatgcgattagctcttaccttacctatcccgtcgatag

SEQ ID NO: 233523 - DNA, 60 bp, Artificial
  Synthetic oligonucleotide
tatgtggacttatgtagtgctccgcatccagtgcatgacgtatcatatgtaaatccctct

SEQ ID NO: 233524 - DNA, 55 bp, Artificial
  Synthetic oligonucleotide
gcttcgatcctgagccattttagatgatcttcatatgcatctcgctcttcagagg

SEQ ID NO: 233525 - DNA, 55 bp, Artificial
  Synthetic oligonucleotide
gcttacggctgcgtagctcatgacgaccctggtaacctcttctcgcaatgacgga

SEQ ID NO: 233526 - DNA, 55 bp, Artificial
  Synthetic oligonucleotide
gctgcaagcagtaacgcctgatgtaattaataacaccacttcatctatactagac

SEQ ID NO: 233527 - DNA, 55 bp, Artificial
  Synthetic oligonucleotide
gctctagagaacccaatcgttgctaaagagttctttgagatgcatctgcctcttg

SEQ ID NO: 233528 - DNA, 55 bp, Artificial
  Synthetic oligonucleotide
gtcttctagcaaaattagtggcgtgagttactatggcgattttatgttaggctgt

SEQ ID NO: 233529 - DNA, 55 bp, Artificial
  Synthetic oligonucleotide
gtcttctacgcttaaaactgctccaaccggcaagtaatatctagcttctaaaccg

SEQ ID NO: 233530 - DNA, 55 bp, Artificial
  Synthetic oligonucleotide
gtcgttctacaagagctgcggtactcacgtattaagtatacgctgcgttccttgc

SEQ ID NO: 233531 - DNA, 55 bp, Artificial
  Synthetic oligonucleotide
gtcgagagggtgtacaacgagatttgctacctttgatagaaggtacaacggttaa

SEQ ID NO: 233532 - DNA, 54 bp, Artificial
  Synthetic oligonucleotide
gtcccgttgtaccgagatctgttaatgtaagctcggaatccggaagttttcgga

SEQ ID NO: 233533 - DNA, 55 bp, Artificial
  Synthetic oligonucleotide
gtcatactgcggtctcgccacggtatgacacactattcaaattttggaaatagta

SEQ ID NO: 233534 - DNA, 57 bp, Artificial
  Synthetic oligonucleotide
tatgtttatatgatttgtactacactaaaatttagttataagtctgatcaagaaacg

SEQ ID NO: 233535 - DNA, 55 bp, Artificial
  Synthetic oligonucleotide
gtatcatcccaacataacaatttgctggtgcattctcgggatttagctgcaagcc

SEQ ID NO: 233536 - DNA, 55 bp, Artificial
  Synthetic oligonucleotide
gtatatgcagaacattgtacgttacgagcttggaagcagaaatcatatgaacaag

SEQ ID NO: 233537 - DNA, 55 bp, Artificial
  Synthetic oligonucleotide
gtagcacctttcggtggtattagaccttatgtagggttaggttatcatggttcat

SEQ ID NO: 233538 - DNA, 55 bp, Artificial
  Synthetic oligonucleotide
gtactcctaatcagagagtaatgcttcgaccacttattgctgcatggattagcat

SEQ ID NO: 233539 - DNA, 55 bp, Artificial
  Synthetic oligonucleotide
gtacaagctttcggtgtaagcgtgggttctgttattgggcaggctatggctagag

SEQ ID NO: 233540 - DNA, 55 bp, Artificial
  Synthetic oligonucleotide
gtaactccttctatcccgccgtctcttataataatgtttgagcctgcaccaaaag

SEQ ID NO: 233541 - DNA, 55 bp, Artificial
  Synthetic oligonucleotide
ggtgttgttgcataattccaaagccgttattacgagcgaacgtagagagcgtggc

SEQ ID NO: 233542 - DNA, 55 bp, Artificial
  Synthetic oligonucleotide
ggtggagagtttaggcttacaggtaatgtaacacagaatgctgttagaagtatgt

SEQ ID NO: 233543 - DNA, 55 bp, Artificial
  Synthetic oligonucleotide
ggtgcaatgctacatagcttccagttatcgccgcagttctagtaccgccatctgc

SEQ ID NO: 233544 - DNA, 55 bp, Artificial
  Synthetic oligonucleotide
ggtgatttcaacgacctattacaaattcatggggctgaagctattagacagatta

SEQ ID NO: 233545 - DNA, 59 bp, Artificial
  Synthetic oligonucleotide
tacgctcctcgcaaggcattgttgcagggaccggtaaagcactcggtgtcaagccacgg

SEQ ID NO: 233546 - DNA, 55 bp, Artificial
  Synthetic oligonucleotide
ggtcttggtattgagattgacttttcgctaccggaagaaagagtaataagggcac

SEQ ID NO: 233547 - DNA, 55 bp, Artificial
  Synthetic oligonucleotide
ggtcacatggaaatttcggttactttcccgcctatacaaacggtgcaattatcgc

SEQ ID NO: 233548 - DNA, 55 bp, Artificial
  Synthetic oligonucleotide
ggtactcttgatagtaaagtgcgatcaagttcagcagaaggcaatacactaaatg

SEQ ID NO: 233549 - DNA, 55 bp, Artificial
  Synthetic oligonucleotide
ggtacggcaactctagcacagactctagttagaggcagaccgtaacctgtaggcc

SEQ ID NO: 233550 - DNA, 55 bp, Artificial
  Synthetic oligonucleotide
ggtacgagtcgtagaagagagcgtagtagcacaaaagagccagtacttcgttttg

SEQ ID NO: 233551 - DNA, 55 bp, Artificial
  Synthetic oligonucleotide
ggtacaggattaggcttgccactaacgaagaagctcatttacttaatggaaggag

SEQ ID NO: 233552 - DNA, 55 bp, Artificial
  Synthetic oligonucleotide
ggtacacatgcaggtattttggcgaaaagtggaggattagatacgatcgaagcag

SEQ ID NO: 233553 - DNA, 55 bp, Artificial
  Synthetic oligonucleotide
ggtaactgttaattttcagagtgcagagggtatagcagttggaagcgacgtaatg

SEQ ID NO: 233554 - DNA, 55 bp, Artificial
  Synthetic oligonucleotide
ggggcgaaaatggtatcccgtcctcgtcgctactatcctcagaatattcactacc

SEQ ID NO: 233555 - DNA, 55 bp, Artificial
  Synthetic oligonucleotide
ggggacttcagatggttaaacctattgcagttgaccgtggtactaatagctcggt

SEQ ID NO: 233556 - DNA, 53 bp, Artificial
  Synthetic oligonucleotide
caaaatagagggggtagggaaaactagtgcgactaatcacaaacaacgttcac

SEQ ID NO: 233557 - DNA, 58 bp, Artificial
  Synthetic oligonucleotide
tcaagccacggggtgacacacagtgggttttaccggtctatgcaacaatgcctacgcg

SEQ ID NO: 233558 - DNA, 55 bp, Artificial
  Synthetic oligonucleotide
gggcgttcggaagtgttgctactattcgagtctacctgctcatggttacgattgc

SEQ ID NO: 233559 - DNA, 55 bp, Artificial
  Synthetic oligonucleotide
ccagtttcgaacgaggtctattctagcaatcgatagacattatcataagttggag

SEQ ID NO: 233560 - DNA, 55 bp, Artificial
  Synthetic oligonucleotide
ccaccttcattagcggttacataacggtaagcttacagaattaccaactatgata

SEQ ID NO: 233561 - DNA, 54 bp, Artificial
  Synthetic oligonucleotide
ccaatagcggtaagttaattcgctgtaaacttgagtcagtacgtattacgggac

SEQ ID NO: 233562 - DNA, 55 bp, Artificial
  Synthetic oligonucleotide
ccaagtaacctagctttaagtgagcgacaaatagagatcttaagtgagcagctag

SEQ ID NO: 233563 - DNA, 55 bp, Artificial
  Synthetic oligonucleotide
ccaacagccgtgaactggttattatcaccgacaagtactaatttagccttagctc

SEQ ID NO: 233564 - DNA, 55 bp, Artificial
  Synthetic oligonucleotide
ccaacaacagctttataactgtattaattccaagtaacctagctttaagcgagcg

SEQ ID NO: 233565 - DNA, 55 bp, Artificial
  Synthetic oligonucleotide
cattgtagagtgaatccttgtcatatcgtaatcaacttggttgttgtacgactct

SEQ ID NO: 233566 - DNA, 55 bp, Artificial
  Synthetic oligonucleotide
cattgcgtataataacctacgatgtacaggtttgagtccgtcccgtacgtcagga

SEQ ID NO: 233567 - DNA, 55 bp, Artificial
  Synthetic oligonucleotide
cattccatatactgcttctagctgctcacttaagatctctatttgtcgctcgctt

SEQ ID NO: 233568 - DNA, 55 bp, Artificial
  Synthetic oligonucleotide
tcaaggggcgaagcccctttgactcaagaattaggctttgagaaggttattgatt

SEQ ID NO: 233569 - DNA, 55 bp, Artificial
  Synthetic oligonucleotide
cattacttggggcagttcttggtggacaaatcggtgcaagtatggatgagcagga

SEQ ID NO: 233570 - DNA, 55 bp, Artificial
  Synthetic oligonucleotide
catgtccttagcagtcttgctatcttcaaataactcccaaaagctccttggagca

SEQ ID NO: 233571 - DNA, 55 bp, Artificial
  Synthetic oligonucleotide
catgcatttagtgatgagcaaatcaaagcaatcctctcagtctgtagtggctctg

SEQ ID NO: 233572 - DNA, 55 bp, Artificial
  Synthetic oligonucleotide
catctattattgtcttctcgctcgtcccattacgacgcttgccatctagcttcgc

SEQ ID NO: 233573 - DNA, 55 bp, Artificial
  Synthetic oligonucleotide
catcaaaggccctaacatcatgcttggttacctagacttagaaggtcaccgtagt

SEQ ID NO: 233574 - DNA, 55 bp, Artificial
  Synthetic oligonucleotide
catagattggacgaaaaccggtatattataggcgctttggcctacttccggtatg

SEQ ID NO: 233575 - DNA, 55 bp, Artificial
  Synthetic oligonucleotide
cataaagtcggtggagttccaatgcttgaaacggtattacagaattcgctcgaag

SEQ ID NO: 233576 - DNA, 55 bp, Artificial
  Synthetic oligonucleotide
cagtgcaaggagggtcatatttagtgcattcccattcttgagaggatgccaggac

SEQ ID NO: 233577 - DNA, 55 bp, Artificial
  Synthetic oligonucleotide
cagtccgccaattattgcataatcacctaccccaatatgacctgctaggcttaca

SEQ ID NO: 233578 - DNA, 55 bp, Artificial
  Synthetic oligonucleotide
cagctgtccatcgaacatacttctaacggcattctgtgttacattacctgtaagc

SEQ ID NO: 233579 - DNA, 58 bp, Artificial
  Synthetic oligonucleotide
agccacccaatatcttgctggatattccggtgctataaaaaaacaacgtctagagcaa

SEQ ID NO: 233580 - DNA, 55 bp, Artificial
  Synthetic oligonucleotide
cagcattagtaaattgtaagggatgtgtcatacgtaatggacaaggacggtccgc

SEQ ID NO: 233581 - DNA, 55 bp, Artificial
  Synthetic oligonucleotide
cagcagctcttactaccacagcgtgtataaataaatgtccagatgttagtgtcag

SEQ ID NO: 233582 - DNA, 55 bp, Artificial
  Synthetic oligonucleotide
cagcacaccgaaagtcggctataatgtaggtgcaagtttacttaccgctcataag

SEQ ID NO: 233583 - DNA, 54 bp, Artificial
  Synthetic oligonucleotide
cactggcgcgactttcattaaccaacttgttaacatacgggttatttgctttac

SEQ ID NO: 233584 - DNA, 55 bp, Artificial
  Synthetic oligonucleotide
cactgatagcagctttattatacatctctaatgcagttcttccatctaacatcgc

SEQ ID NO: 233585 - DNA, 55 bp, Artificial
  Synthetic oligonucleotide
cactagaggtgctagaccaagccatagaagatagcggctatagtagtcctagcat

SEQ ID NO: 233586 - DNA, 55 bp, Artificial
  Synthetic oligonucleotide
ccgtgcttggttttgcattacggatgttgcctcggctttcttacgtaactcttcc

SEQ ID NO: 233587 - DNA, 55 bp, Artificial
  Synthetic oligonucleotide
ccgtctgtgactccactaggagacaatgccaacgaacattttgatcattaaacac

SEQ ID NO: 233588 - DNA, 50 bp, Artificial
  Synthetic oligonucleotide
ccgtcaaaaccctacgagcccttataggtcatagggttttaaggaagtaa

SEQ ID NO: 233589 - DNA, 55 bp, Artificial
  Synthetic oligonucleotide
ccgtatggcttgttatgtcattcccgcctacttaggaacgacatcgagtaggttt

SEQ ID NO: 233590 - DNA, 60 bp, Artificial
  Synthetic oligonucleotide
gattcttgtaagagcgcactttcgcgttttgtggtacaaaacgctgtgcgctcagtgagt

SEQ ID NO: 233591 - DNA, 55 bp, Artificial
  Synthetic oligonucleotide
ccgtatgcaagatcttttgtgtcagtgaaacctgctatagatataagaagaaggt

SEQ ID NO: 233592 - DNA, 55 bp, Artificial
  Synthetic oligonucleotide
ccgtatcacatgagagtagttattacgcacccaatcaaccataaaccttgttggc

SEQ ID NO: 233593 - DNA, 55 bp, Artificial
  Synthetic oligonucleotide
ccgtaacgcttggtggttatatcaaacgtgtacctctaagtagctatcgttcgca

SEQ ID NO: 233594 - DNA, 52 bp, Artificial
  Synthetic oligonucleotide
ccggtttgattatcgacataagtcgtaaattcttttacgaccgaaataggaa

SEQ ID NO: 233595 - DNA, 55 bp, Artificial
  Synthetic oligonucleotide
ccggctacatcccatcaaataccgatttagatttattcgctcaaagttgtagagc

SEQ ID NO: 233596 - DNA, 55 bp, Artificial
  Synthetic oligonucleotide
ccggcgtttctctaagagcagttctagctatcgttcctatgaacgcaattaatgc

SEQ ID NO: 233597 - DNA, 55 bp, Artificial
  Synthetic oligonucleotide
ccgcgcccggtatagtttctaaatgcgtttacaccaagtgataaatcgcgatcta

SEQ ID NO: 233598 - DNA, 55 bp, Artificial
  Synthetic oligonucleotide
ccgcgcaaggagacccgcttactatagccactaccagacctgagttattaccggc

SEQ ID NO: 233599 - DNA, 55 bp, Artificial
  Synthetic oligonucleotide
ccgcccgcgccggtatccaattgccgttacccaatccacaccatacggcgtgtct

SEQ ID NO: 233600 - DNA, 55 bp, Artificial
  Synthetic oligonucleotide
ccgccagctctacagttccagtatcgtttatcgcattactgctcagattaagaga

SEQ ID NO: 233601 - DNA, 60 bp, Artificial
  Synthetic oligonucleotide
agcagctcctgccacgtcttgctgaagagtattgcgttttagcggagcagttgccgcatg

SEQ ID NO: 233602 - DNA, 55 bp, Artificial
  Synthetic oligonucleotide
ccgataaatatggtcatgtagagtctgtgacgttcagtatcatcccacgacttga

SEQ ID NO: 233603 - DNA, 55 bp, Artificial
  Synthetic oligonucleotide
ccgagccgctgtagcatgcatatgcttatcatagactctattcataaactctgtg

SEQ ID NO: 233604 - DNA, 49 bp, Artificial
  Synthetic oligonucleotide
ccgacttaccgtaccgccgggagaatttacgttaactattaacgcttta

SEQ ID NO: 233605 - DNA, 55 bp, Artificial
  Synthetic oligonucleotide
cccttgccgcgtataatcttacgtgcctctgacttagatctagcaagatttgcgt

SEQ ID NO: 233606 - DNA, 55 bp, Artificial
  Synthetic oligonucleotide
cccgcctacatgggcatgacatcaattgcctttatactcaggtcaacggcaacac

SEQ ID NO: 233607 - DNA, 55 bp, Artificial
  Synthetic oligonucleotide
cccgcaacaacagacagtgcaatctagctcgcaggttaaaccagaagttcctccg

SEQ ID NO: 233608 - DNA, 55 bp, Artificial
  Synthetic oligonucleotide
ccccattgaggatatgccttgtgccatatggcatgctatcataacccatgtagct

SEQ ID NO: 233609 - DNA, 55 bp, Artificial
  Synthetic oligonucleotide
cccatcaacggagctatcaataacgtaaccgaaaagtgcgctgcggcaaacttgg

SEQ ID NO: 233610 - DNA, 55 bp, Artificial
  Synthetic oligonucleotide
cccacgctctccacacatagtattgtaaccatcgggtagattatcgataacatcg

SEQ ID NO: 233611 - DNA, 54 bp, Artificial
  Synthetic oligonucleotide
cccaagccggtacaggtgtcaataatatttatgtcgctggtaagtccggtaact

SEQ ID NO: 233612 - DNA, 56 bp, Artificial
  Synthetic oligonucleotide
tacggctagtgtttgggggggtgaaacgtcattgcgaggagaggcaaagcctcgac

SEQ ID NO: 233613 - DNA, 55 bp, Artificial
  Synthetic oligonucleotide
cccaaaagctccttggagcattatacagcttatcatttgcgtatactactatagg

SEQ ID NO: 233614 - DNA, 55 bp, Artificial
  Synthetic oligonucleotide
ccattatacctcatatactgaccgtccagtagagcatatctataccaccctccag

SEQ ID NO: 233615 - DNA, 55 bp, Artificial
  Synthetic oligonucleotide
ccatcagttccaaatgatctctgtatactgcatgagtaccagctattccgccata

SEQ ID NO: 233616 - DNA, 55 bp, Artificial
  Synthetic oligonucleotide
agtcggtcaagcaaaagtcagcattacacatagtgcttttacagatatagagggg

SEQ ID NO: 233617 - DNA, 55 bp, Artificial
  Synthetic oligonucleotide
aggcgaggagcggagcgtataatacttaatacgtgagcaccgtagctcttaagat

SEQ ID NO: 233618 - DNA, 55 bp, Artificial
  Synthetic oligonucleotide
aggcaagccaacgaacaacaaagacattgtcgcgtggaccgataaaacccacgtg

SEQ ID NO: 233619 - DNA, 55 bp, Artificial
  Synthetic oligonucleotide
agctgctgtgatacatgcgacacttccttatccactgtattagttggtgcatcag

SEQ ID NO: 233620 - DNA, 55 bp, Artificial
  Synthetic oligonucleotide
agctcttgtactcgtgccgctgctgcataaatcacttgacccgccttgatcttga

SEQ ID NO: 233621 - DNA, 55 bp, Artificial
  Synthetic oligonucleotide
agcggtttaccgaattcagcagagtttagaggtgctgttaatttaacgaacgatc

SEQ ID NO: 233622 - DNA, 55 bp, Artificial
  Synthetic oligonucleotide
agcgatgtgcctgctactagctttcttatatcgtctgctatctgcatagtctgag

SEQ ID NO: 233623 - DNA, 59 bp, Artificial
  Synthetic oligonucleotide
tcccgctttcaagtcgcgggatgacaatagaaaaccgatccacgcaataatgccacgcc

SEQ ID NO: 233624 - DNA, 55 bp, Artificial
  Synthetic oligonucleotide
agatgcgtataagtatgatcatccagtgataaatacgccattattcggtaagcgg

SEQ ID NO: 233625 - DNA, 55 bp, Artificial
  Synthetic oligonucleotide
agatcctatatttatcgtctttagaaagcgaaatacgcattaactcgccgtttcg

SEQ ID NO: 233626 - DNA, 55 bp, Artificial
  Synthetic oligonucleotide
actgctgacgcattatccgttaacttagtcgtagtagctttaataatcgctcccc

SEQ ID NO: 233627 - DNA, 55 bp, Artificial
  Synthetic oligonucleotide
acggtgaatctattagcgccgacgatatgcattatattacgttagctgtggaagg

SEQ ID NO: 233628 - DNA, 55 bp, Artificial
  Synthetic oligonucleotide
acgagctgatacacttaaggttttaagaccgtctgctatggtagtcggtgcgtca

SEQ ID NO: 233629 - DNA, 55 bp, Artificial
  Synthetic oligonucleotide
acctcgagcttccccaatctgcataccttggaccatacctttctgtacgccctca

SEQ ID NO: 233630 - DNA, 55 bp, Artificial
  Synthetic oligonucleotide
acctataggcaaagcacaagttatctccagtggatcggtatgcatagatacagcc

SEQ ID NO: 233631 - DNA, 55 bp, Artificial
  Synthetic oligonucleotide
accggtactcgcatcctcacgtacgcttatgtacgctgcagtgctgtgttccgtg

SEQ ID NO: 233632 - DNA, 55 bp, Artificial
  Synthetic oligonucleotide
accgctttgtgccactacctgtgccccgtcgcctatatttagatgtccagcgatt

SEQ ID NO: 233633 - DNA, 55 bp, Artificial
  Synthetic oligonucleotide
accgcaagctttagctgcacgtagcattctatgcaatagtaatataggcttaaga

SEQ ID NO: 233634 - DNA, 60 bp, Artificial
  Synthetic oligonucleotide
taaaggcttcgccctcgttggctcaatttccactctgtgtcatcccgtggcttgatcacg

SEQ ID NO: 233635 - DNA, 55 bp, Artificial
  Synthetic oligonucleotide
acccatgtctataaaaggctcagatgcttctttctcactattcgtaccactatgt

SEQ ID NO: 233636 - DNA, 55 bp, Artificial
  Synthetic oligonucleotide
acatgactcgcctttgctcacgtatcatatatacgctctgctccgaggactttat

SEQ ID NO: 233637 - DNA, 55 bp, Artificial
  Synthetic oligonucleotide
acacttccgagcgtccaaggcatgatgctcttattcgcaaagctctagagaaccc

SEQ ID NO: 233638 - DNA, 50 bp, Artificial
  Synthetic oligonucleotide
aagttacaccaaaactgaaagaacttaaaaccgcctacaaggcaagttag

SEQ ID NO: 233639 - DNA, 55 bp, Artificial
  Synthetic oligonucleotide
aaggtttgagcaagtaaatgcaacccagcgcggcagtctataacagctctgtgtc

SEQ ID NO: 233640 - DNA, 54 bp, Artificial
  Synthetic oligonucleotide
aaggggatcgcagttatttgcccataagttaagaatgtttgggcaaggtagtac

SEQ ID NO: 233641 - DNA, 55 bp, Artificial
  Synthetic oligonucleotide
aagccacggcataacaccgaacgggtttttcggtccacacaacaagacctgcgca

SEQ ID NO: 233642 - DNA, 55 bp, Artificial
  Synthetic oligonucleotide
aacgaactgctaccacaaattcgattacacaaagatcgagcaatcattgtagaca

SEQ ID NO: 233643 - DNA, 55 bp, Artificial
  Synthetic oligonucleotide
aaatccggagctgcgactaatgcaccttttacccgtactaatgtttcagcacgcc

SEQ ID NO: 233644 - DNA, 55 bp, Artificial
  Synthetic oligonucleotide
aaataagcgatgcgtcggtaaatattcgtcaatagtaccacgcggtaatgctata

SEQ ID NO: 233645 - DNA, 58 bp, Artificial
  Synthetic oligonucleotide
tagtctatacggcttaagtccagtaagccgtaatatgagcgtttcggtcataggttca

SEQ ID NO: 233646 - DNA, 55 bp, Artificial
  Synthetic oligonucleotide
cactaagccttgcagcttaagaccgcctttagcacacatccatcgcagtaactcg

SEQ ID NO: 233647 - DNA, 55 bp, Artificial
  Synthetic oligonucleotide
cacggccaattataacaggatgaccatatttctcatctcgcatcataagagcggc

SEQ ID NO: 233648 - DNA, 55 bp, Artificial
  Synthetic oligonucleotide
caccttatcttgacgcacctactaactacgacacattagaagctagcattggtta

SEQ ID NO: 233649 - DNA, 55 bp, Artificial
  Synthetic oligonucleotide
cacctcgcactgcagcgtacaaagaagtacgtgaggatgcaaggaccggattgac

SEQ ID NO: 233650 - DNA, 55 bp, Artificial
  Synthetic oligonucleotide
caccatgagccttcatattccgtagctttcataagccactcatgactacttaaac

SEQ ID NO: 233651 - DNA, 55 bp, Artificial
  Synthetic oligonucleotide
cacatagccccaacttctgtcctaaaatatcgatttacataagcccctaaacttc

SEQ ID NO: 233652 - DNA, 55 bp, Artificial
  Synthetic oligonucleotide
caagttctatgggctttagcgtactcgacggtgttatgatgggtacaaggacagg

SEQ ID NO: 233653 - DNA, 55 bp, Artificial
  Synthetic oligonucleotide
caagcgccggatttagggcagaatacaaggagtatagtagacgtaaaagttcgag

SEQ ID NO: 233654 - DNA, 55 bp, Artificial
  Synthetic oligonucleotide
caagcctataaggtttgatagcatcgagcggctttaaagctccatatagccctga

SEQ ID NO: 233655 - DNA, 55 bp, Artificial
  Synthetic oligonucleotide
caagcccgaaaacataccgcctcatagcttttaatcgttcgaaagatagctcaag

SEQ ID NO: 233656 - DNA, 60 bp, Artificial
  Synthetic oligonucleotide
tcgcttcatgcttgcctagtgctactcgggaggagttgatgcagttgtacagcacgctac

SEQ ID NO: 233657 - DNA, 55 bp, Artificial
  Synthetic oligonucleotide
caagcattggtgattgacggaacattaccggatatgatgttaatagttaagtctg

SEQ ID NO: 233658 - DNA, 55 bp, Artificial
  Synthetic oligonucleotide
caagcaggacatttacaatcatactcaagcggcgctttatcctcagcatatttgc

SEQ ID NO: 233659 - DNA, 55 bp, Artificial
  Synthetic oligonucleotide
caagaagtatgtttaggagttgtgcacttttaactacgcagagtaaatctcgggg

SEQ ID NO: 233660 - DNA, 55 bp, Artificial
  Synthetic oligonucleotide
caactgattgtctgataagcgctaatgctatagaataagatggtatccgaagtgc

SEQ ID NO: 233661 - DNA, 55 bp, Artificial
  Synthetic oligonucleotide
caaccttttatagatactttcctccaaagtctatagagcaacttagaacccgcca

SEQ ID NO: 233662 - DNA, 55 bp, Artificial
  Synthetic oligonucleotide
caaaatccgacgcgtcataaaggacctgctcattatatgaaggctactgagcttg

SEQ ID NO: 233663 - DNA, 55 bp, Artificial
  Synthetic oligonucleotide
attgcgagttttaagggatagtcaatgtggaatgttgctatcttaggatgccgta

SEQ ID NO: 233664 - DNA, 55 bp, Artificial
  Synthetic oligonucleotide
atgtcatccctacaaaagagccttgttgcatggctcggaaaacctactcgatgtt

SEQ ID NO: 233665 - DNA, 55 bp, Artificial
  Synthetic oligonucleotide
atgtatcgatttgctcgcataatagcggaataaggctatcatgtaccgatgttaa

SEQ ID NO: 233666 - DNA, 55 bp, Artificial
  Synthetic oligonucleotide
atgcctgctgtttagtagtacaattcctggagctactccagctagcactactccc

SEQ ID NO: 233667 - DNA, 59 bp, Artificial
  Synthetic oligonucleotide
gttcttttagcttccccgatttgcattcctcttgcttccccgatctgcatgccctcatt

SEQ ID NO: 233668 - DNA, 51 bp, Artificial
  Synthetic oligonucleotide
gcattgctactactaggtaaaaagtagtcgggggttaggtatttgggggta

SEQ ID NO: 233669 - DNA, 55 bp, Artificial
  Synthetic oligonucleotide
atgcacttgtagtagaccagttacacgcatttagagaacgtaataatcatttcgc

SEQ ID NO: 233670 - DNA, 55 bp, Artificial
  Synthetic oligonucleotide
atgatccgattttgaattagccatttcccgcactaaatctggatctagttgtggg

SEQ ID NO: 233671 - DNA, 55 bp, Artificial
  Synthetic oligonucleotide
atctatgtgagtagacctaaccaatttctcaattaggcccctcctcaaaaccgga

SEQ ID NO: 233672 - DNA, 55 bp, Artificial
  Synthetic oligonucleotide
atcctctacctcctgtacataatacccatttatgccatatactgcttctaattgc

SEQ ID NO: 233673 - DNA, 55 bp, Artificial
  Synthetic oligonucleotide
atagtcaagtcagtgggatttgcacaccagaagcgaggagttaaaactaactaat

SEQ ID NO: 233674 - DNA, 55 bp, Artificial
  Synthetic oligonucleotide
ataccgtgacttgaccagttctatgtcatcctagctaacttgaatcgcaggatcc

SEQ ID NO: 233675 - DNA, 55 bp, Artificial
  Synthetic oligonucleotide
agtttcaaatgcttcacctatttcagtatcaggatcttgccaaggttcagagtac

SEQ ID NO: 233676 - DNA, 55 bp, Artificial
  Synthetic oligonucleotide
ctcccgacattaacgtagtgcaaacaccgagacgactcccatcctcgacgatgac

SEQ ID NO: 233677 - DNA, 55 bp, Artificial
  Synthetic oligonucleotide
ctccgccattatgagagctagttgtaccggtaaagggataaagagaaccttgaca

SEQ ID NO: 233678 - DNA, 55 bp, Artificial
  Synthetic oligonucleotide
ctccgttacatgctcgattaactccatcaaagctacattttcgctaaagtccgat

SEQ ID NO: 233679 - DNA, 60 bp, Artificial
  Synthetic oligonucleotide
gggattgatctcactcatagtcatgcctcttgcataaagcgaaataacgctatcatcaaa

SEQ ID NO: 233680 - DNA, 55 bp, Artificial
  Synthetic oligonucleotide
cgtggtacgtgtgtattacaattgtatcacatggagattgtgtatgtcctctaaa

SEQ ID NO: 233681 - DNA, 55 bp, Artificial
  Synthetic oligonucleotide
cgtgggcttggaccactgggatctcgtatcgcagactcagtcataagataccgcg

SEQ ID NO: 233682 - DNA, 55 bp, Artificial
  Synthetic oligonucleotide
cgtcctgatgcagttgagatatgataggtattaaataccggtcctccatgagcat

SEQ ID NO: 233683 - DNA, 55 bp, Artificial
  Synthetic oligonucleotide
cggtctctgatctgtttactagatattttgctcatcttccgtgcttggttttgca

SEQ ID NO: 233684 - DNA, 55 bp, Artificial
  Synthetic oligonucleotide
ctcgttgtatcagttagaactaagcaagggtaatgattcgattacctatccatca

SEQ ID NO: 233685 - DNA, 55 bp, Artificial
  Synthetic oligonucleotide
ctctgatatagcactatacacatcttgtgctatcccttcatgatgactatccggt

SEQ ID NO: 233686 - DNA, 55 bp, Artificial
  Synthetic oligonucleotide
ctgacgcagcaactaactaccaagaccggatatatcattatcgggtggcggagta

SEQ ID NO: 233687 - DNA, 55 bp, Artificial
  Synthetic oligonucleotide
ctgcaacacttcggatcacctattaaatataggctgtgcgtactcgctcctcgtt

SEQ ID NO: 233688 - DNA, 55 bp, Artificial
  Synthetic oligonucleotide
cggtaaccggccaaacgaatctttgcaatcaacttgtggcgagcatagttgatgg

SEQ ID NO: 233689 - DNA, 53 bp, Artificial
  Synthetic oligonucleotide
cggggttttagtttcaataggtgggtactcaaccagcaaaagtagtgtatcca

SEQ ID NO: 233690 - DNA, 60 bp, Artificial
  Synthetic oligonucleotide
ccatactccaccctcttaatcccatatccttcactaagcctccgtatcacatgcgagtag

SEQ ID NO: 233691 - DNA, 55 bp, Artificial
  Synthetic oligonucleotide
ctggacagttagccaattcttgtagttgatcttccgggaaagccaaggagtaatc

SEQ ID NO: 233692 - DNA, 55 bp, Artificial
  Synthetic oligonucleotide
ctgtaccgctagtaatgcctacagatcaactgtctacacaacctataatgccgag

SEQ ID NO: 233693 - DNA, 55 bp, Artificial
  Synthetic oligonucleotide
cgggatctcaggacacgggcttgtgatacaagatcccgtggtcaagccacgggag

SEQ ID NO: 233694 - DNA, 55 bp, Artificial
  Synthetic oligonucleotide
cggctgaggagcaagctcggaagaaagcagagaatttagcaagagcagcaacaat

SEQ ID NO: 233695 - DNA, 55 bp, Artificial
  Synthetic oligonucleotide
cggcatgtagccctcatgatttatccaagcaggtaaggagtcacatgtaaaacca

SEQ ID NO: 233696 - DNA, 55 bp, Artificial
  Synthetic oligonucleotide
cggcagacgtaccgctttaataatctcgatgctaggtatgactattccaaccttt

SEQ ID NO: 233697 - DNA, 55 bp, Artificial
  Synthetic oligonucleotide
cgctgtaaacttgagtcagtgcgtattacgggacgtaacactagtggtgtaatcc

SEQ ID NO: 233698 - DNA, 55 bp, Artificial
  Synthetic oligonucleotide
cgctgctagcacattactcattgccagctcaatatcggagttaccggttaaagat

SEQ ID NO: 233699 - DNA, 55 bp, Artificial
  Synthetic oligonucleotide
cgctccggttaccactacaggattcgtaaatgtcactgctgacgcattatccgtt

SEQ ID NO: 233700 - DNA, 55 bp, Artificial
  Synthetic oligonucleotide
cttaaactctacggcacttctagtgcctatcatcaacctaccggctctcagccgg

SEQ ID NO: 233701 - DNA, 60 bp, Artificial
  Synthetic oligonucleotide
gcctcatatcatcagggcctagctcaatattagcctctttagctttttttcaatacctgg

SEQ ID NO: 233702 - DNA, 55 bp, Artificial
  Synthetic oligonucleotide
ctagtcagcgacaatactactaccgttgcaatagagctttcagctgagaaacggg

SEQ ID NO: 233703 - DNA, 55 bp, Artificial
  Synthetic oligonucleotide
ctagcaactgaagatattagaatgactgtacgctgcatcggtactattacaggcg

SEQ ID NO: 233704 - DNA, 55 bp, Artificial
  Synthetic oligonucleotide
ctactgcaagagcaatgaagaatttcggtctaaatgagcttagaatcgtagcacc

SEQ ID NO: 233705 - DNA, 55 bp, Artificial
  Synthetic oligonucleotide
ctacgcaattccctcgcaatgacggtttagcttacaagtcacagaatgacacacg

SEQ ID NO: 233706 - DNA, 52 bp, Artificial
  Synthetic oligonucleotide
ctataaggtctgtagagttttggcggacggactaaattagcgatttaaaggg

SEQ ID NO: 233707 - DNA, 55 bp, Artificial
  Synthetic oligonucleotide
ctatacatcatgatggagtgcaagcttttgtctatgctgccagccccgtataatg

SEQ ID NO: 233708 - DNA, 55 bp, Artificial
  Synthetic oligonucleotide
ctaccgatccggcaatagaattacatcattatgataaagttgctagtcagcttga

SEQ ID NO: 233709 - DNA, 55 bp, Artificial
  Synthetic oligonucleotide
ctaccgaggcgcatcttgtaactttatcgagccttggattaatcccaatcacgct

SEQ ID NO: 233710 - DNA, 55 bp, Artificial
  Synthetic oligonucleotide
ctatatcatttccgcataagcattgctgtgtagatcgcaaaacgcgttcgatgtc

SEQ ID NO: 233711 - DNA, 55 bp, Artificial
  Synthetic oligonucleotide
ctacactcgcacccgattaccggtacgcctatagatgccccacatccaagtactg

SEQ ID NO: 233712 - DNA, 60 bp, Artificial
  Synthetic oligonucleotide
ccattctgtcgtgatcgtcagaatgtgagctagagggactcattaactccattctgtcgt

SEQ ID NO: 233713 - DNA, 55 bp, Artificial
  Synthetic oligonucleotide
ctacactacagtttctctgcatgtgagcttaagtaatgtgcgataccctcatgcg

SEQ ID NO: 233714 - DNA, 55 bp, Artificial
  Synthetic oligonucleotide
ctacaccgctacttgaagctgcaggatagcaattaactacccatccgtttacaaa

SEQ ID NO: 233715 - DNA, 55 bp, Artificial
  Synthetic oligonucleotide
ctacaacgtatagaattcctacaactagatccagatttagtgcgagaaatggcta

SEQ ID NO: 233716 - DNA, 55 bp, Artificial
  Synthetic oligonucleotide
ctaaatacctaatctttatagattccggtcttgccacctcaatacgttgctccgg

SEQ ID NO: 233717 - DNA, 55 bp, Artificial
  Synthetic oligonucleotide
ctaaagtagcaggtgtgccatcgagattaaagcgttgctgcccttcaatgagtag

SEQ ID NO: 233718 - DNA, 55 bp, Artificial
  Synthetic oligonucleotide
cgttttatgagttgtagaggttactacgtgcgcatatggaataggactttgatgc

SEQ ID NO: 233719 - DNA, 55 bp, Artificial
  Synthetic oligonucleotide
ctattacgggttcaatcggtgtaatactacaaacagccgaggtaacagagcttgc

SEQ ID NO: 233720 - DNA, 55 bp, Artificial
  Synthetic oligonucleotide
cgtttaacttgtatgtctaaaagctgctgattggttgacaccctagcataaccaa

SEQ ID NO: 233721 - DNA, 55 bp, Artificial
  Synthetic oligonucleotide
ctcattaccagagcaacgtattgaggtggcaagaccggaatctataaagattagg

SEQ ID NO: 233722 - DNA, 55 bp, Artificial
  Synthetic oligonucleotide
ctcattgtgagcagtacctaatccgtcattgcgagtgaccgtagggagcgtggca

SEQ ID NO: 233723 - DNA, 60 bp, Artificial
  Synthetic oligonucleotide
ttcctgcgggggcattgctgagtggacacctaatcgtcattgcgagcagtcataggctgc

SEQ ID NO: 233724 - DNA, 55 bp, Artificial
  Synthetic oligonucleotide
ctccatagttcttttagcttccccaatctgcatacctcgagcttccccaatctgc

SEQ ID NO: 233725 - DNA, 55 bp, Artificial
  Synthetic oligonucleotide
cgttcgcatttagcacttggcaaagttaacgtaatagttgactcgcaaaccggtg

SEQ ID NO: 233726 - DNA, 55 bp, Artificial
  Synthetic oligonucleotide
ctccccatcctgacatatacccggtttctgctctcatccaactacctagtgaaat

SEQ ID NO: 233727 - DNA, 55 bp, Artificial
  Synthetic oligonucleotide
cgatcttatcggtctgtaacggctctgatgttagtgtacttgaaggcaatcctgg

SEQ ID NO: 233728 - DNA, 55 bp, Artificial
  Synthetic oligonucleotide
cgatcccgtcccgaactcgaatgtgaaacctcatagcgctaatggtactatgtca

SEQ ID NO: 233729 - DNA, 55 bp, Artificial
  Synthetic oligonucleotide
cgagctttataacacagcgatacttgccaaaattatccaaatagtgaagttgcct

SEQ ID NO: 233730 - DNA, 55 bp, Artificial
  Synthetic oligonucleotide
cttgcttaggatagttctcttacagctgctatcttagatcgtctgcttcaccact

SEQ ID NO: 233731 - DNA, 55 bp, Artificial
  Synthetic oligonucleotide
cgagcagcaaggagcagcagtaatagagaagtgggaggcagttaaagcagctaac

SEQ ID NO: 233732 - DNA, 55 bp, Artificial
  Synthetic oligonucleotide
cgacgttaaagtgattatttcgttcgttctgctctcacttgaacttataggcata

SEQ ID NO: 233733 - DNA, 55 bp, Artificial
  Synthetic oligonucleotide
ccttcggcatccctgtagtatacaccgcctctaatgtattatgctgcagcatgcc

SEQ ID NO: 233734 - DNA, 60 bp, Artificial
  Synthetic oligonucleotide
ttcttctctcaagtgtattgtgtagctgactcattagatcctcgccatcgctagatataa

SEQ ID NO: 233735 - DNA, 55 bp, Artificial
  Synthetic oligonucleotide
ccttatcatcaactaacttcacaagcggcagaatatttaacgcatcccaactacg

SEQ ID NO: 233736 - DNA, 55 bp, Artificial
  Synthetic oligonucleotide
ccttacctatcccgtcgatagtagataaaagactaggttcgcactcaataatctc

SEQ ID NO: 233737 - DNA, 55 bp, Artificial
  Synthetic oligonucleotide
cctgtcgaacctaatactcctgaggctaatattccagcactcccagaaactattt

SEQ ID NO: 233738 - DNA, 53 bp, Artificial
  Synthetic oligonucleotide
cctcgtaccccgtcggaagtacggctcttaataacacgcaacgattcaacagg

SEQ ID NO: 233739 - DNA, 55 bp, Artificial
  Synthetic oligonucleotide
cctcgcaatgacgacttaggtatccatgcaaacaatgccataagccgcttaaagc

SEQ ID NO: 233740 - DNA, 55 bp, Artificial
  Synthetic oligonucleotide
cctcctagacgcatcttgaaaagtaaactgccttcattttcgtaatactgtgtgc

SEQ ID NO: 233741 - DNA, 55 bp, Artificial
  Synthetic oligonucleotide
cctactataggctcagtaactgctctacaactttgagcgaataaatctaaatcgg

SEQ ID NO: 233742 - DNA, 55 bp, Artificial
  Synthetic oligonucleotide
cttgtatagtctgatgttgggctggcgagatttctagcaccccaccgtttggagc

SEQ ID NO: 233743 - DNA, 55 bp, Artificial
  Synthetic oligonucleotide
cctacaccgacatacggtcttatcccgccgtaaggagctatatggaattgtccgg

SEQ ID NO: 233744 - DNA, 55 bp, Artificial
  Synthetic oligonucleotide
cctaatcttgcgttatgaacgatttgctggttttacctgatgatcttctgctagt

SEQ ID NO: 233745 - DNA, 60 bp, Artificial
  Synthetic oligonucleotide
ttctttactgagtgtgcgttcatattgtgcaagagccccaaacacactaaacaagaattc

SEQ ID NO: 233746 - DNA, 55 bp, Artificial
  Synthetic oligonucleotide
cctaatctcggtagcgtaagcttgagtaccggtgccgggtcttgtaggagaagta

SEQ ID NO: 233747 - DNA, 55 bp, Artificial
  Synthetic oligonucleotide
cctaaggtaggatcaagttagggtacagtagtttagttatctctgaatcacgcgc

SEQ ID NO: 233748 - DNA, 55 bp, Artificial
  Synthetic oligonucleotide
cctaaagccggatataatatctatggcagtagtacatagctccgaattaactagt

SEQ ID NO: 233749 - DNA, 55 bp, Artificial
  Synthetic oligonucleotide
cctaaaagttagtggtagtcctaggttaatattaagctcacgcaccaagcagcca

SEQ ID NO: 233750 - DNA, 55 bp, Artificial
  Synthetic oligonucleotide
ccgttgctacacaaactctaagtgatatagtacgcaaatttccagattctgagct

SEQ ID NO: 233751 - DNA, 55 bp, Artificial
  Synthetic oligonucleotide
cttaacctcaatagagcaaagcctgatagttcaaagttaatacaagcgcgctttt

SEQ ID NO: 233752 - DNA, 55 bp, Artificial
  Synthetic oligonucleotide
cgctccgctcctcaccttgcgaactccttactctgtccccaagttgatcttcgtc

SEQ ID NO: 233753 - DNA, 55 bp, Artificial
  Synthetic oligonucleotide
cgctactgctaccgcaatatccacgttattgtaatatctaatcgcatctttcccc

SEQ ID NO: 233754 - DNA, 53 bp, Artificial
  Synthetic oligonucleotide
cgctaacctttgcggttcatgcggatcaagtaaatccggtctacccgttttaa

SEQ ID NO: 233755 - DNA, 55 bp, Artificial
  Synthetic oligonucleotide
cgcgatgagcatatagtgagcatatggagtagggaggtaaaattagtagattaca

SEQ ID NO: 233756 - DNA, 58 bp, Artificial
  Synthetic oligonucleotide
ttgaccacggggtcttgtatcacaaactgcgtcctaagattccgctacaagcgtgcgg

SEQ ID NO: 233757 - DNA, 55 bp, Artificial
  Synthetic oligonucleotide
cgccatctcacctctagcagatgacttgtcgctaatcgaaaattgcttcgtatgt

SEQ ID NO: 233758 - DNA, 55 bp, Artificial
  Synthetic oligonucleotide
cgccacgtgaatattctagagcataattaagggctttcggcttttagtgcttggt

SEQ ID NO: 233759 - DNA, 55 bp, Artificial
  Synthetic oligonucleotide
cttccatgactccaagccatcttctgaatccaagcaaggtatctttcatgttcac

SEQ ID NO: 233760 - DNA, 55 bp, Artificial
  Synthetic oligonucleotide
cgccaaaacctcatgattttgtacctcatcatctatcccttcaagttccatagct

SEQ ID NO: 233761 - DNA, 54 bp, Artificial
  Synthetic oligonucleotide
cgcagtaaagcccaggcttacccgcttccttagcaggtaataccccaggtacta

SEQ ID NO: 233762 - DNA, 55 bp, Artificial
  Synthetic oligonucleotide
cttgaccatatattttagcattacgaggaggaggaattactggcgtaataccacg

SEQ ID NO: 233763 - DNA, 55 bp, Artificial
  Synthetic oligonucleotide
cttgactaaacctgatgtttaagttgaggtcttatgcacactatatgctcatcac

SEQ ID NO: 233764 - DNA, 55 bp, Artificial
  Synthetic oligonucleotide
cgcaatgcacgttatgcatctaagatgtacggtgatactaaaagagttgctatgc

SEQ ID NO: 233765 - DNA, 55 bp, Artificial
  Synthetic oligonucleotide
cttgccgctgcagcatattatagacatacgtgaagattagggattaggatcgacg

SEQ ID NO: 233766 - DNA, 55 bp, Artificial
  Synthetic oligonucleotide
cttgatgctactgctttatcgcaaatggtagatagagggcaaattacgaatgcta

SEQ ID NO: 233767 - DNA, 60 bp, Artificial
  Synthetic oligonucleotide
aactggtcttgagccgatattgcatcagatatttctctaccaatagattcctgctcctga

SEQ ID NO: 233768 - DNA, 55 bp, Artificial
  Synthetic oligonucleotide
cgcaaagttgtataatgggcgtcggagctagtgcaaaacgtgctatagtcaagaa

SEQ ID NO: 233769 - DNA, 54 bp, Artificial
  Synthetic oligonucleotide
aaaagatggatagatatcgggatagtaaagctgcaaccttccgagccgataaaa

SEQ ID NO: 233770 - DNA, 54 bp, Artificial
  Synthetic oligonucleotide
gatcaatattatcttgcgtaacacctggtaattcaagttctagatgatattcag

SEQ ID NO: 233771 - DNA, 54 bp, Artificial
  Synthetic oligonucleotide
aattctaggcgagcttggaataggtgaggtggtcttacaaaatttcggtagtga

SEQ ID NO: 233772 - DNA, 54 bp, Artificial
  Synthetic oligonucleotide
ctataaaacgtcttacaaaagaacaaggtagtatagtgtgctgcggtagtggac

SEQ ID NO: 233773 - DNA, 54 bp, Artificial
  Synthetic oligonucleotide
aacacaagtgaagctgacctgcagaaaattataggtagcgatcttgtagtaggg

SEQ ID NO: 233774 - DNA, 54 bp, Artificial
  Synthetic oligonucleotide
tcatggatgacccggatgcaccggtagacatagcaccaccgcacggtatatgga

SEQ ID NO: 233775 - DNA, 54 bp, Artificial
  Synthetic oligonucleotide
atacaggcaagtgatattatagcggaatataccgagaaatgcgggcagtattac

SEQ ID NO: 233776 - DNA, 54 bp, Artificial
  Synthetic oligonucleotide
agtggctctgaaaatgcgaagactcaaagtctgagttagcgaccgtataccgaa

SEQ ID NO: 233777 - DNA, 54 bp, Artificial
  Synthetic oligonucleotide
tagtacttgttggagataacaaccagtttacagctgttggtatgactggagcgt

SEQ ID NO: 233778 - DNA, 59 bp, Artificial
  Synthetic oligonucleotide
acgtagcgtattactttagcggaatcacattgtgcttacttggacgatacgcagaggcg

SEQ ID NO: 233779 - DNA, 56 bp, Artificial
  Synthetic oligonucleotide
cccatccaagttggactcccgacattaacgtagtgcaaacaccgagacgactccca

SEQ ID NO: 233780 - DNA, 54 bp, Artificial
  Synthetic oligonucleotide
agtgcccttatgactctttctgccggtagcggaaaagtcaatctcaataccaag

SEQ ID NO: 233781 - DNA, 54 bp, Artificial
  Synthetic oligonucleotide
aaaatagacgactatatgctagcaaaggtgagttctgcgaaactcacagttagc

SEQ ID NO: 233782 - DNA, 54 bp, Artificial
  Synthetic oligonucleotide
tctcgccgagtttcctcacgtcaattacacatcgcatcgccctacctattaaac

SEQ ID NO: 233783 - DNA, 54 bp, Artificial
  Synthetic oligonucleotide
aatgacatgcaggaggtattattgcgtagatcaagaaatgcgtgcggtgtcatc

SEQ ID NO: 233784 - DNA, 54 bp, Artificial
  Synthetic oligonucleotide
tattctttcaccaattgatgagataccttgtatcatgcggcatactgtcataat

SEQ ID NO: 233785 - DNA, 54 bp, Artificial
  Synthetic oligonucleotide
tgtgcgacctattgccgctaggtcaggtgatgtaggctttgaaggtattaacac

SEQ ID NO: 233786 - DNA, 54 bp, Artificial
  Synthetic oligonucleotide
aaggctacggtaatactggtaggaatatgggttatacgtacagcagaatcggta

SEQ ID NO: 233787 - DNA, 54 bp, Artificial
  Synthetic oligonucleotide
tataggcttgctgtatataggctcttctgctcctccgcctagtgtccctgctaa

SEQ ID NO: 233788 - DNA, 54 bp, Artificial
  Synthetic oligonucleotide
ttgttgcatagaccggtaaaacccactgtgtgtcaccccgtggcttgaccacgg

SEQ ID NO: 233789 - DNA, 54 bp, Artificial
  Synthetic oligonucleotide
accgcttggagctacaacagctggaccatccggattaaatactccacctgtgat

SEQ ID NO: 233790 - DNA, 57 bp, Artificial
  Synthetic oligonucleotide
cgacacggaacgcagaaccgcagcgtacacgcaagtaacgtgaggattcgagtaccg

SEQ ID NO: 233791 - DNA, 54 bp, Artificial
  Synthetic oligonucleotide
tatatgttagacaccctactcgcttttatgccaagcactatagattattcacgg

SEQ ID NO: 233792 - DNA, 54 bp, Artificial
  Synthetic oligonucleotide
catgaacaaggacataatgtgataggtattaccttgcagctatatgatcacggt

SEQ ID NO: 233793 - DNA, 54 bp, Artificial
  Synthetic oligonucleotide
catcgagtaatgcctaccaatcaaccttctacgcagcctataacacagactagc

SEQ ID NO: 233794 - DNA, 54 bp, Artificial
  Synthetic oligonucleotide
gccgtagatgctaacgcagcatgggatttaagtaagcaagttggggatgcgata

SEQ ID NO: 233795 - DNA, 54 bp, Artificial
  Synthetic oligonucleotide
taaagaatggaaatgcacagaatatgaccctccttgcactgattctggtcaatt

SEQ ID NO: 233796 - DNA, 54 bp, Artificial
  Synthetic oligonucleotide
cacggaacgcagaaccgcagcgtacaccgcaagtaacgtgaggattcgagtacc

SEQ ID NO: 233797 - DNA, 54 bp, Artificial
  Synthetic oligonucleotide
ccgtggcttgaccacggggtgacacagtgggttttaccggtccacgcaacaata

SEQ ID NO: 233798 - DNA, 54 bp, Artificial
  Synthetic oligonucleotide
gcaatgatgattagacagtcacgcagacaatactgagaactcctactgattaat

SEQ ID NO: 233799 - DNA, 54 bp, Artificial
  Synthetic oligonucleotide
gctatatgaccgcggtactaaattcggcttaatgaccgatggaaatgtcgaggc

SEQ ID NO: 233800 - DNA, 53 bp, Artificial
  Synthetic oligonucleotide
ctattacctctaatacctacgcacgaacctactggatctatactactatccga

SEQ ID NO: 233801 - DNA, 60 bp, Artificial
  Synthetic oligonucleotide
ttggacaatggcacaatagtcttgcttaggatagttctcttacagctgctatcttagatc

SEQ ID NO: 233802 - DNA, 53 bp, Artificial
  Synthetic oligonucleotide
gcatgagcacaagcctttaatactgcccaggataacatcggaactgaagctgc

SEQ ID NO: 233803 - DNA, 53 bp, Artificial
  Synthetic oligonucleotide
tgaggatacgagtaccgattcgacgtctaaattacctctagcagcgaagtttg

SEQ ID NO: 233804 - DNA, 53 bp, Artificial
  Synthetic oligonucleotide
gtacgtcaaatttcgggattcgcctgtgctcacgtacttcttgtacgctgtgc

SEQ ID NO: 233805 - DNA, 53 bp, Artificial
  Synthetic oligonucleotide
tatgtaccaacgatacgccgagttaaaaggatggcgtttcgagatattagcaa

SEQ ID NO: 233806 - DNA, 52 bp, Artificial
  Synthetic oligonucleotide
agaaatcggaaattacatagtaccgggtagggcgttgttttctatagttcaa

SEQ ID NO: 233807 - DNA, 53 bp, Artificial
  Synthetic oligonucleotide
cacttagtagcttttattaaaggcgtttctctactaccctcagataggcgttt

SEQ ID NO: 233808 - DNA, 53 bp, Artificial
  Synthetic oligonucleotide
cgttgcattgcccgcatggataccgagtcgttattgcgagcagccttaggctg

SEQ ID NO: 233809 - DNA, 53 bp, Artificial
  Synthetic oligonucleotide
tgaccaatacattatttgtcctcgtctgccagctagtaacatacctggagagc

SEQ ID NO: 233810 - DNA, 53 bp, Artificial
  Synthetic oligonucleotide
agcgcgcaaatagaagcagtatatggcaataacgggtattatgtgactacggt

SEQ ID NO: 233811 - DNA, 53 bp, Artificial
  Synthetic oligonucleotide
acctggtatctatgcaacaatgcctcgcagggataacattgcgtaggctttcg

SEQ ID NO: 233812 - DNA, 54 bp, Artificial
  Synthetic oligonucleotide
aacaatattaaatagtcggtaaccggccaaacgaatctttgcaatcaacttgtg

SEQ ID NO: 233813 - DNA, 53 bp, Artificial
  Synthetic oligonucleotide
tctcttttcgccgagttggctgatgagcattctcaacacgattatttagtctt

SEQ ID NO: 233814 - DNA, 53 bp, Artificial
  Synthetic oligonucleotide
gtccctgtcggttcaatgctagttaagggagctaacgaaagtcatggggagta

SEQ ID NO: 233815 - DNA, 53 bp, Artificial
  Synthetic oligonucleotide
cactccgtctaagcttaagattggtgcgaaaactagtaatatggacgattcgc

SEQ ID NO: 233816 - DNA, 53 bp, Artificial
  Synthetic oligonucleotide
actgccgttatgattacgcataatttggaagcagcagtacattacggcaaaag

SEQ ID NO: 233817 - DNA, 53 bp, Artificial
  Synthetic oligonucleotide
cctaccttctgcatcattattcgctaatccacaaatagttctcgatcctgaaa

SEQ ID NO: 233818 - DNA, 53 bp, Artificial
  Synthetic oligonucleotide
ggattttggagaagggctgtagtaaatcttccgaatgagctagttggaaattt

SEQ ID NO: 233819 - DNA, 53 bp, Artificial
  Synthetic oligonucleotide
taagttttcctgtacgctcggtactatgatagaactacccagggcagcactcg

SEQ ID NO: 233820 - DNA, 53 bp, Artificial
  Synthetic oligonucleotide
gatggactggaatcctaaccgtcaacctcttcatcacactaacgaacttagcc

SEQ ID NO: 233821 - DNA, 53 bp, Artificial
  Synthetic oligonucleotide
atatcgtcctagtaactttgccgagcttcaggggcaagaggtattagtcaaag

SEQ ID NO: 233822 - DNA, 53 bp, Artificial
  Synthetic oligonucleotide
ttccttactaaaagtgccgagctatatactgtttgtatgttcaacaggactgc

SEQ ID NO: 233823 - DNA, 60 bp, Artificial
  Synthetic oligonucleotide
gctacgtgcattcccgctaaccattgaacgtggatccatagcgcaaatcgacatgcccgg

SEQ ID NO: 233824 - DNA, 53 bp, Artificial
  Synthetic oligonucleotide
aagcgctatagcagcaggtgttcgtaggattgaagcggtttgtggtgaattcg

SEQ ID NO: 233825 - DNA, 53 bp, Artificial
  Synthetic oligonucleotide
ataaccaatcctcatcttagtgattagcttatcttgctcgatagtcttagcac

SEQ ID NO: 233826 - DNA, 53 bp, Artificial
  Synthetic oligonucleotide
aatcctaagcgtcgtcaatctggtagctctgtacgttgtgctagtagaatctc

SEQ ID NO: 233827 - DNA, 53 bp, Artificial
  Synthetic oligonucleotide
tgtgccaggcgttataatccgggtaacatttctgttaactactgctttataac

SEQ ID NO: 233828 - DNA, 53 bp, Artificial
  Synthetic oligonucleotide
tagtgccagttccaaccacaactccggtaagcagcacccctcgtgcaaagctg

SEQ ID NO: 233829 - DNA, 53 bp, Artificial
  Synthetic oligonucleotide
aatcctaagcatcgtcaatctggcagttccgtgcggggtgctagtagaatctc

SEQ ID NO: 233830 - DNA, 52 bp, Artificial
  Synthetic oligonucleotide
tgcgtgctatgtacggtactaataatcacggacgtgtaaacaatatgacggg

SEQ ID NO: 233831 - DNA, 52 bp, Artificial
  Synthetic oligonucleotide
acttgcagccaaattctctgttattccgcctcatctcacttggaaactcccg

SEQ ID NO: 233832 - DNA, 52 bp, Artificial
  Synthetic oligonucleotide
tcggaacgtgactcggcagcactccaaacataccctcctcacccgacattgt

SEQ ID NO: 233833 - DNA, 52 bp, Artificial
  Synthetic oligonucleotide
cctcgctcaggtgagaacgcaaaagaatggatcgaagtaataaagccggatc

SEQ ID NO: 233834 - DNA, 54 bp, Artificial
  Synthetic oligonucleotide
gctagttggtggcggctgtagagggttaaaacctccaacactcgaaccgacgga

SEQ ID NO: 233835 - DNA, 52 bp, Artificial
  Synthetic oligonucleotide
gaatgtgagctagagggactcattaactccattctgtcgtgatcgtcagaat

SEQ ID NO: 233836 - DNA, 52 bp, Artificial
  Synthetic oligonucleotide
tgaggatgcgagtaccggattgacgtataaattacccctagaagtagagttc

SEQ ID NO: 233837 - DNA, 52 bp, Artificial
  Synthetic oligonucleotide
tctcttcttgatgttgccgcaaatcaagagacgataaacgactcttgatcat

SEQ ID NO: 233838 - DNA, 52 bp, Artificial
  Synthetic oligonucleotide
aagatcggagttaaagcatagaggagcgttaaagggacaggaagtactaatt

SEQ ID NO: 233839 - DNA, 52 bp, Artificial
  Synthetic oligonucleotide
tctgcgtagctattaattactctatcaggcgttttaagcagtccttctctgc

SEQ ID NO: 233840 - DNA, 52 bp, Artificial
  Synthetic oligonucleotide
gtactcggtcataatttatctgcagctagtagacagaaccctcgcatactcc

SEQ ID NO: 233841 - DNA, 52 bp, Artificial
  Synthetic oligonucleotide
aataggcaaagctaccgaaagctatgttacaaccagcagtaaaggtatgggg

SEQ ID NO: 233842 - DNA, 52 bp, Artificial
  Synthetic oligonucleotide
ttattacacgcattaatcgttcatcagcagctatataccgcttcgcagataa

SEQ ID NO: 233843 - DNA, 52 bp, Artificial
  Synthetic oligonucleotide
gtactcagcaacctgtacttgccccactcccaagtcaggaacaattgagtct

SEQ ID NO: 233844 - DNA, 52 bp, Artificial
  Synthetic oligonucleotide
aagctgctgcaaatgatctattatcatgcagtcgtaaattacgccgcaacca

SEQ ID NO: 233845 - DNA, 60 bp, Artificial
  Synthetic oligonucleotide
gctatatggagaaagtgcttgcgagcgaaaaacatcaaggaccacttgttaatcatacaa

SEQ ID NO: 233846 - DNA, 52 bp, Artificial
  Synthetic oligonucleotide
tacatactacattgcttaacgagaacaggacataggaaatgccctctcatag

SEQ ID NO: 233847 - DNA, 52 bp, Artificial
  Synthetic oligonucleotide
attccctggccatgttatgcaagcttgcaatttagctaaaaaaaccgataac

SEQ ID NO: 233848 - DNA, 52 bp, Artificial
  Synthetic oligonucleotide
ataattcgtgcgtcgatccgatactcgcatcctcacgtacgcttgtgtacgc

SEQ ID NO: 233849 - DNA, 52 bp, Artificial
  Synthetic oligonucleotide
attgttgcgtggatcggtaaaatccactgtgtcaccccgtggtcaagccacg

SEQ ID NO: 233850 - DNA, 52 bp, Artificial
  Synthetic oligonucleotide
atttacgcactatataatccatatttcccggcaactgtccccaatagctagg

SEQ ID NO: 233851 - DNA, 52 bp, Artificial
  Synthetic oligonucleotide
cacagctaacccaagtcaaagagctactttacgcccacttatttcagcctgg

SEQ ID NO: 233852 - DNA, 52 bp, Artificial
  Synthetic oligonucleotide
tcacgggggatgacaggggtaaatgatccacgcaagccagccttaagcagga

SEQ ID NO: 233853 - DNA, 52 bp, Artificial
  Synthetic oligonucleotide
tcatgtggaatgggcaagtgcttgagattagtacaggtaaaatagcaaggca

SEQ ID NO: 233854 - DNA, 52 bp, Artificial
  Synthetic oligonucleotide
actttccccattgaggatatgacttgtgccatacggtatgctatcataaccc

SEQ ID NO: 233855 - DNA, 52 bp, Artificial
  Synthetic oligonucleotide
tccgctttcgggccttgttgcgtggatcaatgtttccgatgtcatcccgcga

SEQ ID NO: 233856 - DNA, 55 bp, Artificial
  Synthetic oligonucleotide
tagaaacgatcgagcaaaacttacttaaatatgagaaatacctaaaccaaataga

SEQ ID NO: 233857 - DNA, 52 bp, Artificial
  Synthetic oligonucleotide
tcctgcttaaggctggcttgcgtggatcatttacccctgtcatcccccgtga

SEQ ID NO: 233858 - DNA, 51 bp, Artificial
  Synthetic oligonucleotide
acatatttatactacagcacctggtactccgtatgatgagcctatcccgca

SEQ ID NO: 233859 - DNA, 51 bp, Artificial
  Synthetic oligonucleotide
gtcgcttcacgtgccatttgtagacgttctaaacaccatgcttgatgagac

SEQ ID NO: 233860 - DNA, 51 bp, Artificial
  Synthetic oligonucleotide
acacctagcatcaacaagaccacgcacttaccaaggtccttccgacttgct

SEQ ID NO: 233861 - DNA, 51 bp, Artificial
  Synthetic oligonucleotide
ctaaggcattacagactctagaaacagctaatcttattaagaggggtcaga

SEQ ID NO: 233862 - DNA, 51 bp, Artificial
  Synthetic oligonucleotide
gttagctcttccttacctatcccatctatagtagataaaagacgagtctca

SEQ ID NO: 233863 - DNA, 51 bp, Artificial
  Synthetic oligonucleotide
tgtagctagtgttatagctttaagtgcggaggtattacgattacgtccctc

SEQ ID NO: 233864 - DNA, 51 bp, Artificial
  Synthetic oligonucleotide
aagtatgttgagcggcttaagattacaacagacatatctactgctagagag

SEQ ID NO: 233865 - DNA, 51 bp, Artificial
  Synthetic oligonucleotide
agtgtggaggcttgctccagtaagctcacatcttatatgttatataaatcc

SEQ ID NO: 233866 - DNA, 51 bp, Artificial
  Synthetic oligonucleotide
aagcttcatttatgcagataacacccttctacctttcatacggcgcctcat

SEQ ID NO: 233867 - DNA, 60 bp, Artificial
  Synthetic oligonucleotide
gtgaaggcgatatattcactgtcacaaaactagatagattagcacgctctactgcacatt

SEQ ID NO: 233868 - DNA, 51 bp, Artificial
  Synthetic oligonucleotide
tagaggtatggtgccggttaacctccggcagagtattattactttagggac

SEQ ID NO: 233869 - DNA, 51 bp, Artificial
  Synthetic oligonucleotide
acttagctcacaagaacctaatctgcaaaacatacctactcggtctagtga

SEQ ID NO: 233870 - DNA, 51 bp, Artificial
  Synthetic oligonucleotide
ccatttggatcatgtcgatttataatactaccttgtgggtcagcatcaatg

SEQ ID NO: 233871 - DNA, 51 bp, Artificial
  Synthetic oligonucleotide
aagatcgtgttgagtggacacaagtcgtcattgcatgctcactaacgttcg

SEQ ID NO: 233872 - DNA, 51 bp, Artificial
  Synthetic oligonucleotide
attcagcaagcctaattgctacctcaatctggtacgaataataaggacccc

SEQ ID NO: 233873 - DNA, 51 bp, Artificial
  Synthetic oligonucleotide
ccccatatattagtacaggacgtcgccccaccttatccaaaacatacgcag

SEQ ID NO: 233874 - DNA, 51 bp, Artificial
  Synthetic oligonucleotide
tacgaaaggcagatacttagatttaggatgaagagttaaatgccttgaggc

SEQ ID NO: 233875 - DNA, 51 bp, Artificial
  Synthetic oligonucleotide
tacctgcaacctctaaccatgtgatgtttctctcatctcttactaatccgt

SEQ ID NO: 233876 - DNA, 51 bp, Artificial
  Synthetic oligonucleotide
gtctactgccgattctgatttaaacgttacttctatagctctcgttaagga

SEQ ID NO: 233877 - DNA, 51 bp, Artificial
  Synthetic oligonucleotide
agcgtatgtaactgcttctccatcacagttagagatcagtacgcctttacg

SEQ ID NO: 233878 - DNA, 60 bp, Artificial
  Synthetic oligonucleotide
gtctatatcggaatatcaagaccaggaacgtactgcttgcgactactgccgcccctacat

SEQ ID NO: 233879 - DNA, 51 bp, Artificial
  Synthetic oligonucleotide
tgatcgcttctcttatcaattaccagttactacctaacaaaccgtctatcg

SEQ ID NO: 233880 - DNA, 51 bp, Artificial
  Synthetic oligonucleotide
tgatcgctaactaggccgtcaaaacctatagtaccgcccgttgtattagac

SEQ ID NO: 233881 - DNA, 51 bp, Artificial
  Synthetic oligonucleotide
gtaaccaagtaccggacttaatctaagacgcttaagtatagccacgataaa

SEQ ID NO: 233882 - DNA, 51 bp, Artificial
  Synthetic oligonucleotide
tcattccgcctgtataacccaacttagggattatgtaagaagtataaagcc

SEQ ID NO: 233883 - DNA, 51 bp, Artificial
  Synthetic oligonucleotide
tcaccgttagagataagcacgccgttacgtcttctctcgatatttccttta

SEQ ID NO: 233884 - DNA, 51 bp, Artificial
  Synthetic oligonucleotide
caccagcgttaagtagtttgccggtaccaactaaattacgctctagaaaag

SEQ ID NO: 233885 - DNA, 51 bp, Artificial
  Synthetic oligonucleotide
tatcttagcattacgtgaaggaggaattactggcgtaataccacgattact

SEQ ID NO: 233886 - DNA, 50 bp, Artificial
  Synthetic oligonucleotide
tccttcgttccgtttcaaactgtggaagtatcccgacacataccgtgagt

SEQ ID NO: 233887 - DNA, 50 bp, Artificial
  Synthetic oligonucleotide
actgatcccgtggtgcctttaaaaagctgaactcctcgcttgcatcctct

SEQ ID NO: 233888 - DNA, 50 bp, Artificial
  Synthetic oligonucleotide
tcacgtgatactagtaccacaaagctcccctcgaactaagccgaaagccc

SEQ ID NO: 233889 - DNA, 57 bp, Artificial
  Synthetic oligonucleotide
gtgttttagtaataggtaaggtttgagcaagtaaatgcaacccagcgcggcagtcta

SEQ ID NO: 233890 - DNA, 59 bp, Artificial
  Synthetic oligonucleotide
cactacaggagtggtaagagtcctatctgtcttatctttatccataaaacgtgctacaa

SEQ ID NO: 233891 - DNA, 50 bp, Artificial
  Synthetic oligonucleotide
aagagtcaacacgccataaaggacctgctcattatatgaaggcctacgaa

SEQ ID NO: 233892 - DNA, 50 bp, Artificial
  Synthetic oligonucleotide
aagagcagttctagctatcgttcctatgaacgcaattaatgctcctatcc

SEQ ID NO: 233893 - DNA, 50 bp, Artificial
  Synthetic oligonucleotide
cgattactctttcccaagtggatcttcgtataacagcgcttcgttttgta

SEQ ID NO: 233894 - DNA, 50 bp, Artificial
  Synthetic oligonucleotide
aaccatttgaccaggcttagtactaacccaatcaagcggattgtaacaat

SEQ ID NO: 233895 - DNA, 50 bp, Artificial
  Synthetic oligonucleotide
atgagcgaagcctggtgctttaatacgacatctataaggtttattacctc

SEQ ID NO: 233896 - DNA, 50 bp, Artificial
  Synthetic oligonucleotide
gacagctcagcatccagctaggcaacgctcatagacgggcatgacattta

SEQ ID NO: 233897 - DNA, 50 bp, Artificial
  Synthetic oligonucleotide
ttgtggctcagacatcgcatagtcgtttgctccaatatccgatagataag

SEQ ID NO: 233898 - DNA, 50 bp, Artificial
  Synthetic oligonucleotide
tctcatcgtactcacatagagttagaacagtgtcacgaccaattaagtcc

SEQ ID NO: 233899 - DNA, 50 bp, Artificial
  Synthetic oligonucleotide
tcgctactctaatcataggtaaaccgttctctacggctctacttctacta

SEQ ID NO: 233900 - DNA, 50 bp, Artificial
  Synthetic oligonucleotide
tctaatcccccacttttcgctaaaatacctgcatgtgtaccattagacac

SEQ ID NO: 233901 - DNA, 56 bp, Artificial
  Synthetic oligonucleotide
acaagttagtaaatatgtaattgatacggctgatgctaaaactaacccacctacga

SEQ ID NO: 233902 - DNA, 50 bp, Artificial
  Synthetic oligonucleotide
tatcgcatccggtttatcttgacgtcttgctataggaatatatttagcgc

SEQ ID NO: 233903 - DNA, 50 bp, Artificial
  Synthetic oligonucleotide
ggtgttgttgcatgaatactaagtcgtcattgcgagcagctgtaggatgc

SEQ ID NO: 233904 - DNA, 50 bp, Artificial
  Synthetic oligonucleotide
aggtagagcgcagtttagtatgatattctcccattatgatcaagtgccaa

SEQ ID NO: 233905 - DNA, 50 bp, Artificial
  Synthetic oligonucleotide
cgcctcccaaccttatccgaaacatacgtagatataggaaatactgtcat

SEQ ID NO: 233906 - DNA, 50 bp, Artificial
  Synthetic oligonucleotide
aatctattaatgtaggcgagtactcaaccagccaaagttatagtactcgc

SEQ ID NO: 233907 - DNA, 50 bp, Artificial
  Synthetic oligonucleotide
gtgatagacgggtagaacctaacgcgttcgtgtcataccgtggtcctttc

SEQ ID NO: 233908 - DNA, 50 bp, Artificial
  Synthetic oligonucleotide
gtgaatgtttctgtagccgactaactctatttgctccattgcggctttaa

SEQ ID NO: 233909 - DNA, 50 bp, Artificial
  Synthetic oligonucleotide
ggtaactaatacgcagaagcctttggcaatcgtgctttgaatttcgccca

SEQ ID NO: 233910 - DNA, 50 bp, Artificial
  Synthetic oligonucleotide
ctacgataggacatattagagcctgacgcaaaacagcgttattattacaa

SEQ ID NO: 233911 - DNA, 50 bp, Artificial
  Synthetic oligonucleotide
ggggagaatgatcaacgtaacaatgtcgccatggtatgacaccgaacgag

SEQ ID NO: 233912 - DNA, 60 bp, Artificial
  Synthetic oligonucleotide
tgcggcaactgctccgctaaaacgcaatactcttcagcaagacgtggcaggagctgctgt

SEQ ID NO: 233913 - DNA, 50 bp, Artificial
  Synthetic oligonucleotide
gccccacttttgtcttggcacttgcgatacatccactccccaacgtgcta

SEQ ID NO: 233914 - DNA, 50 bp, Artificial
  Synthetic oligonucleotide
ttaacgtcattgcgcacgactgcaaggagcgtggcaatctcaggagtcgt

SEQ ID NO: 233915 - DNA, 50 bp, Artificial
  Synthetic oligonucleotide
gccccttatgatactaaagacttactaaaagctatcgctggtccatgcac

SEQ ID NO: 233916 - DNA, 50 bp, Artificial
  Synthetic oligonucleotide
cgtgttgttctactaggtgcttcagggtaatatacaggtttacctttagc

SEQ ID NO: 233917 - DNA, 50 bp, Artificial
  Synthetic oligonucleotide
gatacaacttgagttagtctctccgtcaaaaccctacgagcccttatagg

SEQ ID NO: 233918 - DNA, 47 bp, Artificial
  Synthetic oligonucleotide
tcaatccggtactcgcatcctcacgtatgcttttgttacactgcggt

SEQ ID NO: 233919 - DNA, 44 bp, Artificial
  Synthetic oligonucleotide
tggaccgataaaacccaatgtgtcaccccgcggcttgtccacgg

SEQ ID NO: 233920 - DNA, 60 bp, Artificial
  Synthetic oligonucleotide
aatgctcccatacaatctatatcctctgttagtatctgtgcattatgtatgacttctata

SEQ ID NO: 233921 - DNA, 60 bp, Artificial
  Synthetic oligonucleotide
aatgatatgttgataagtcatgatgtttgatacaacttgagttagtctctccgtcaaaac

SEQ ID NO: 233922 - DNA, 60 bp, Artificial
  Synthetic oligonucleotide
cgggtagtcatcatgaagagatagcacgagacgtgtatagtactatatcggagtggagta

SEQ ID NO: 233923 - DNA, 60 bp, Artificial
  Synthetic oligonucleotide
gcatagtgacagccaaatcatgtctatcttaaagcaagcaagtagtggtgtacccgtagc

SEQ ID NO: 233924 - DNA, 59 bp, Artificial
  Synthetic oligonucleotide
agttgccgagcttgctggcattcgggcggaatcaagtagttatgattaccgtacttatg

SEQ ID NO: 233925 - DNA, 58 bp, Artificial
  Synthetic oligonucleotide
tagccataataatacaagaaatagccatcataaatgttgttatgataacggttaattt

SEQ ID NO: 233926 - DNA, 60 bp, Artificial
  Synthetic oligonucleotide
aatcacaaacaacgtatcccgagaatgcaccacgagaatgcaccagcaaattgttatgtt

SEQ ID NO: 233927 - DNA, 60 bp, Artificial
  Synthetic oligonucleotide
gcaagcagggtcatatttagtgcattcccttgctttagaggattctagtgtctgttctac

SEQ ID NO: 233928 - DNA, 60 bp, Artificial
  Synthetic oligonucleotide
ggtggattatatacaggatgataatactaaatatatcaagatcagtcccttacaaatgtc

SEQ ID NO: 233929 - DNA, 58 bp, Artificial
  Synthetic oligonucleotide
aatatggactatctagcccatgaagtgttaagagctaaggctaaattagtacttgtcg

SEQ ID NO: 233930 - DNA, 60 bp, Artificial
  Synthetic oligonucleotide
gcatatttgttagatctatattaagagtgccgctaagtgcatatgctacgactaaaatag

SEQ ID NO: 233931 - DNA, 60 bp, Artificial
  Synthetic oligonucleotide
tgtggtcaacccacggaacgacagcatactagaactcggtacaggtagcggctgcgttgc

SEQ ID NO: 233932 - DNA, 60 bp, Artificial
  Synthetic oligonucleotide
gcatccagttattgggatgtatgaatgattctttgtggtatcaaggtatttatgtatacc

SEQ ID NO: 233933 - DNA, 56 bp, Artificial
  Synthetic oligonucleotide
cgctagaaactctcatatatccgactaacatgtatgaaaaaccctttttagttgat

SEQ ID NO: 233934 - DNA, 54 bp, Artificial
  Synthetic oligonucleotide
ggtcaagccacggggtgacacagtgggttttaccggtccacgcaacaatacctc

SEQ ID NO: 233935 - DNA, 59 bp, Artificial
  Synthetic oligonucleotide
atagttagtaggagatacgaaatgctgacccagatggaagtaattaatgatacaacaaa

SEQ ID NO: 233936 - DNA, 59 bp, Artificial
  Synthetic oligonucleotide
gatgtaacgatatcttcttccattctctaaactattatgcatgatgaagtccatagacc

SEQ ID NO: 233937 - DNA, 59 bp, Artificial
  Synthetic oligonucleotide
taacttagcccaatagtaaagagctcttttatcatagtcagcttcatcagttatttgaa

SEQ ID NO: 233938 - DNA, 60 bp, Artificial
  Synthetic oligonucleotide
tcttagtgagtaaaggaaaaccatatatagcaacagatacaggcaagacatcacaactac

SEQ ID NO: 233939 - DNA, 56 bp, Artificial
  Synthetic oligonucleotide
gatttcagaaatagataagccggtaatacgcgaaacctcaggaatagagtaattat

SEQ ID NO: 233940 - DNA, 57 bp, Artificial
  Synthetic oligonucleotide
caagtcgcgcgggaatgacatcgggaaaactgatccacgcaacaaggcccaaaagcg

SEQ ID NO: 233941 - DNA, 58 bp, Artificial
  Synthetic oligonucleotide
caatagtaattgatttgcaaagttaacgctaaattctctgccagctctaaagttaagc

SEQ ID NO: 233942 - DNA, 59 bp, Artificial
  Synthetic oligonucleotide
cgcttgatctacaaaactcgtaacattagggtcataagatatgtgaactaatcttgcag

SEQ ID NO: 233943 - DNA, 56 bp, Artificial
  Synthetic oligonucleotide
ggtggcacttcttctttagttactaaacttgctgaagccccatcaagattaaatct

SEQ ID NO: 233944 - DNA, 59 bp, Artificial
  Synthetic oligonucleotide
gcggattgggtgcgtaataattactctcatgttatacagaggcttggctctagtgcagg

SEQ ID NO: 233945 - DNA, 54 bp, Artificial
  Synthetic oligonucleotide
ccgtaataggtttaatagccccattatatactatatcagaaaaccaagttgtac

SEQ ID NO: 233946 - DNA, 58 bp, Artificial
  Synthetic oligonucleotide
ccgtggtcaagccggcgttgttgtgtggatacccacccatcattgcgaacagtcgtag

SEQ ID NO: 233947 - DNA, 51 bp, Artificial
  Synthetic oligonucleotide
aaacattgcggtaacaccgccccacccgggtattaaaccaactccaagtgc

SEQ ID NO: 233948 - DNA, 59 bp, Artificial
  Synthetic oligonucleotide
tgcctgcgtagatcgattccaccattgtcaccccgtagcctgtacctgctgggtccagt

SEQ ID NO: 233949 - DNA, 55 bp, Artificial
  Synthetic oligonucleotide
acctcgtatctatttaggggtgactttaatcaccagtaaacactctccttgtcca

SEQ ID NO: 233950 - DNA, 57 bp, Artificial
  Synthetic oligonucleotide
gcttgtaaacccttaaaatctcatcgtcattgtatgttctaactctctttctaggcg

SEQ ID NO: 233951 - DNA, 58 bp, Artificial
  Synthetic oligonucleotide
ccacacagcctatggctctgctcgcaatgacgatttagctggctggtacaagccacgg

SEQ ID NO: 233952 - DNA, 58 bp, Artificial
  Synthetic oligonucleotide
cgcgtaggcattgttgtatggatcggtacaatcccctgtgtgtcaccccgtggcttga

SEQ ID NO: 233953 - DNA, 58 bp, Artificial
  Synthetic oligonucleotide
gcatggctacacctatattagcaaactgactaactaggttaatcatatcggtagtgtc

SEQ ID NO: 233954 - DNA, 56 bp, Artificial
  Synthetic oligonucleotide
cataaacaaagccggcacatactgcttgtaaatcaaaagacggtatattagttaaa

SEQ ID NO: 233955 - DNA, 58 bp, Artificial
  Synthetic oligonucleotide
cagatattactgaaaatgaatctgaatatcatctagaacttgagttgccaggtgtcac

SEQ ID NO: 233956 - DNA, 58 bp, Artificial
  Synthetic oligonucleotide
cgtaatacacaaaattcattatcagggttatgatcagtaatacgttctatgatgccgg

SEQ ID NO: 233957 - DNA, 58 bp, Artificial
  Synthetic oligonucleotide
gcaatctatatcctctgttagtatctgtgcattatgtatgacttctatatctggtgtc

SEQ ID NO: 233958 - DNA, 58 bp, Artificial
  Synthetic oligonucleotide
tcgatccggtactcgaatcctcacgttacttgcgtgtacgctgcggttctgcgttccg

SEQ ID NO: 233959 - DNA, 58 bp, Artificial
  Synthetic oligonucleotide
tcccgcacgcttgtagcggaatcttaggatgcggtttgtgatacaagaccccgtggtc

SEQ ID NO: 233960 - DNA, 55 bp, Artificial
  Synthetic oligonucleotide
atcgttcctacgccgatcggaaatttggacgacatcacgattcgggccgtcaggg

SEQ ID NO: 233961 - DNA, 55 bp, Artificial
  Synthetic oligonucleotide
ctgatacgccgaaacgtatctattccctgggacgagacgatagccggggagaggg

SEQ ID NO: 233962 - DNA, 55 bp, Artificial
  Synthetic oligonucleotide
gcataatcgcaagtcggtttacatgccgaccgacgtctatgtttcgcgtaaacag

SEQ ID NO: 233963 - DNA, 55 bp, Artificial
  Synthetic oligonucleotide
ggggacttcgatgatgaactccgtgtagaacggatggtgcgtgaaggaacctacg

SEQ ID NO: 233964 - DNA, 55 bp, Artificial
  Synthetic oligonucleotide
ggtctttgcattgctccgttgcgcatccggttcgaatcgggattcccggtctttg

SEQ ID NO: 233965 - DNA, 55 bp, Artificial
  Synthetic oligonucleotide
ggtggtcgtatcggatccggtttccaggctgtcggacagtatgtattcagcaacg

SEQ ID NO: 233966 - DNA, 54 bp, Artificial
  Synthetic oligonucleotide
gtcggttcataaatacggttggcgaccgggaggatcagttccgaatttggatcc

SEQ ID NO: 233967 - DNA, 55 bp, Artificial
  Synthetic oligonucleotide
gtctgttcccgaatcgtgaacgtaggaaattcattttggcggagaataggcagac

SEQ ID NO: 233968 - DNA, 55 bp, Artificial
  Synthetic oligonucleotide
gttggtgtgtcgtggacgtgttgatcagttctggtctgaaatctctttcggtccc

SEQ ID NO: 233969 - DNA, 55 bp, Artificial
  Synthetic oligonucleotide
taactgatgtcgtataaagcgtatttctctgttactccgagcgttcttgcgattc

SEQ ID NO: 233970 - DNA, 55 bp, Artificial
  Synthetic oligonucleotide
ttacgggcagcgtaaacggtatgttgctgtcgcagcgtgcgaatctggagagcgc

SEQ ID NO: 233971 - DNA, 55 bp, Artificial
  Synthetic oligonucleotide
cagccattgtgctacggacatgatccgtgtcgatacggtccctaacgagagcctt

SEQ ID NO: 233972 - DNA, 54 bp, Artificial
  Synthetic oligonucleotide
acgaaaatacgggaatacttactctcgacaaaacgcgccgtaagcgctttgatc

SEQ ID NO: 233973 - DNA, 55 bp, Artificial
  Synthetic oligonucleotide
aatagcggggcgaaatagagtttgtggtcgtccttggtcggatacgagagaccgc

SEQ ID NO: 233974 - DNA, 54 bp, Artificial
  Synthetic oligonucleotide
tcgagagttgtgggtcccgacggagtatgggtagaggtgcacagtcgcacgcat

SEQ ID NO: 233975 - DNA, 54 bp, Artificial
  Synthetic oligonucleotide
gagttgacaaacctcatagtgttaatttgggaccactcgtaagactcgtatcat

SEQ ID NO: 233976 - DNA, 54 bp, Artificial
  Synthetic oligonucleotide
aggctatctcctctgcggatttcgccgtgataatcttgtagagtgtgacggcaa

SEQ ID NO: 233977 - DNA, 53 bp, Artificial
  Synthetic oligonucleotide
tcctggtagaatatgcctgatataggaagtgtgcctgaatagaaggtggccgg

SEQ ID NO: 233978 - DNA, 52 bp, Artificial
  Synthetic oligonucleotide
acgtgcgaaacggacgtattcctccctgtgcgtgttcttccaccggagaatg

SEQ ID NO: 233979 - DNA, 52 bp, Artificial
  Synthetic oligonucleotide
tgcgtgcggcccagaccgatatggagggcgatgccgttacgccggccgtaac

SEQ ID NO: 233980 - DNA, 51 bp, Artificial
  Synthetic oligonucleotide
gacttcaacgatttgaaagggcctgtcggaaacatcacccacgacattctc

SEQ ID NO: 233981 - DNA, 51 bp, Artificial
  Synthetic oligonucleotide
acacggattcgggaatcatcttgcaccgttcattaagggcataagtaaccg

SEQ ID NO: 233982 - DNA, 53 bp, Artificial
  Synthetic oligonucleotide
cagggaacggtggaatgtactacatacaaagcttcgtcgaaagttcccggccg

SEQ ID NO: 233983 - DNA, 50 bp, Artificial
  Synthetic oligonucleotide
aactggatgtggactccccctatccgcagccttcgcgccaggaacttacc

SEQ ID NO: 233984 - DNA, 50 bp, Artificial
  Synthetic oligonucleotide
aaggcggcgaagagtaccagcacggtacgtacaaccgagcggaaggcacg

SEQ ID NO: 233985 - DNA, 50 bp, Artificial
  Synthetic oligonucleotide
aaggggagtgatcgtgcggtcgagcgacaaagagaacggtccgggcgtta

SEQ ID NO: 233986 - DNA, 50 bp, Artificial
  Synthetic oligonucleotide
aacgagtcgacggacgactcttggggctacggcaatcccgttcgttgcgt

SEQ ID NO: 233987 - DNA, 50 bp, Artificial
  Synthetic oligonucleotide
aaccggacgtccctattcggaacagcggacaaagccccgacgcgaacgga

SEQ ID NO: 233988 - DNA, 50 bp, Artificial
  Synthetic oligonucleotide
aatcacggttcgcggggtgtgtgggcgtggtatcgccgccgtaagcgatg

SEQ ID NO: 233989 - DNA, 50 bp, Artificial
  Synthetic oligonucleotide
aacccgggttgcagaatccgaacccacagaaccttccccgcatcgatcga

SEQ ID NO: 233990 - DNA, 50 bp, Artificial
  Synthetic oligonucleotide
gaaacacgagtgcgaatttgtttatccgcttcgggaaatgacttatagag

SEQ ID NO: 233991 - DNA, 50 bp, Artificial
  Synthetic oligonucleotide
acccagaagctttccgctcaaggagcgcaggaggcgacttacgaggccca

SEQ ID NO: 233992 - DNA, 50 bp, Artificial
  Synthetic oligonucleotide
aacacctggcttcgaccctgcttgcgccggagaagttcgcgttgatgcag

SEQ ID NO: 233993 - DNA, 55 bp, Artificial
  Synthetic oligonucleotide
ccgtccacagtcgtcttaacctcgaatgttatgttgagatcctggaactcttcag

SEQ ID NO: 233994 - DNA, 50 bp, Artificial
  Synthetic oligonucleotide
aggtcgattgtgagcgtgtcgctgcttgccaggcccgtcgcagtgaggac

SEQ ID NO: 233995 - DNA, 50 bp, Artificial
  Synthetic oligonucleotide
agttggtcggtgagcggaagcgcagggcttttctaccagttgccgcccta

SEQ ID NO: 233996 - DNA, 50 bp, Artificial
  Synthetic oligonucleotide
atagcccggttgcgtgccgttgccgtacaattcgggtttgaggtaggccg

SEQ ID NO: 233997 - DNA, 50 bp, Artificial
  Synthetic oligonucleotide
ataggccccgttcctgcggcaaacctccgccatggaataaccgcccgaaa

SEQ ID NO: 233998 - DNA, 50 bp, Artificial
  Synthetic oligonucleotide
ataggtcggggagctgaatccccgcaaacgacgggcataggcgctttcgt

SEQ ID NO: 233999 - DNA, 50 bp, Artificial
  Synthetic oligonucleotide
atccagatgcggactgcggccagcggttcaggttactggtacaacggcgc

SEQ ID NO: 234000 - DNA, 50 bp, Artificial
  Synthetic oligonucleotide
atccgcaactcggggttgaacaagcctcggaaggaggtcgtgtcctgcgt

SEQ ID NO: 234001 - DNA, 50 bp, Artificial
  Synthetic oligonucleotide
atcgacaacactccgttcgccgcccgcgtaccgtatcccttcagtgcctc

SEQ ID NO: 234002 - DNA, 50 bp, Artificial
  Synthetic oligonucleotide
atcgaccccttgccggacaacgggagcggcgtagagaaggacttgctgcg

SEQ ID NO: 234003 - DNA, 50 bp, Artificial
  Synthetic oligonucleotide
atcgagatgcgctgcctaacgccggtatttgagccgcaggctgttggcta

SEQ ID NO: 234004 - DNA, 55 bp, Artificial
  Synthetic oligonucleotide
ccgttccggctgatatacgaccggcagtcattcacacggtctgacagtcaccggt

SEQ ID NO: 234005 - DNA, 50 bp, Artificial
  Synthetic oligonucleotide
atgctggtttgttgcccaccgtacagacgcagggactgaaacgatgcgtg

SEQ ID NO: 234006 - DNA, 50 bp, Artificial
  Synthetic oligonucleotide
cacatcactccgtctgcgaacaggagcccctgcgtgtagctgtcggtcga

SEQ ID NO: 234007 - DNA, 50 bp, Artificial
  Synthetic oligonucleotide
cactcggcagggaacgaatactcccgcgtactgtcccgaacggaaggccg

SEQ ID NO: 234008 - DNA, 50 bp, Artificial
  Synthetic oligonucleotide
cagaggttcggggcgatgcgacggagttccggtagcagcttcggtatgtc

SEQ ID NO: 234009 - DNA, 50 bp, Artificial
  Synthetic oligonucleotide
aggcgcacttgcgaccgcctcccgaacagtagatacgtatgcctcgcaaa

SEQ ID NO: 234010 - DNA, 50 bp, Artificial
  Synthetic oligonucleotide
cagcctgccaacctgtcgccagactcgacgacacgtggggcacgaagctg

SEQ ID NO: 234011 - DNA, 50 bp, Artificial
  Synthetic oligonucleotide
aggattcgtctgtacgcacgcttcgattgcccggatcggttatgccgggg

SEQ ID NO: 234012 - DNA, 50 bp, Artificial
  Synthetic oligonucleotide
aggatcgaatccgacggtcgctaactcacggcctccggtcgtgtccgcaa

SEQ ID NO: 234013 - DNA, 50 bp, Artificial
  Synthetic oligonucleotide
agccatgccaatccagatgcggactgcggccagcggttcaggttactggt

SEQ ID NO: 234014 - DNA, 50 bp, Artificial
  Synthetic oligonucleotide
agagcggataacgtcgtacggggcgcagccagagccatacccgagccaat

SEQ ID NO: 234015 - DNA, 55 bp, Artificial
  Synthetic oligonucleotide
cgcggggatactccgcgtcgaattgttatggcggaggcgggaatctgttcttacg

SEQ ID NO: 234016 - DNA, 55 bp, Artificial
  Synthetic oligonucleotide
cggggcaaagtcatttccagcgaccaggccggtaacgtctataagtcgatgtacc

SEQ ID NO: 234017 - DNA, 55 bp, Artificial
  Synthetic oligonucleotide
cgtcggaatttacctcgacacagaatgtttcggcggatatggcccgccccatggt

SEQ ID NO: 234018 - DNA, 55 bp, Artificial
  Synthetic oligonucleotide
ctcgataggttcttgtcacggccacatatagtggatttcggtttgcatcgtcttc

SEQ ID NO: 234019 - DNA, 55 bp, Artificial
  Synthetic oligonucleotide
cacaagcgctctcaaacgcgcattatatgaaaagctcgcgacgggatcacacgac

SEQ ID NO: 234020 - DNA, 55 bp, Artificial
  Synthetic oligonucleotide
aggtagggcgatgggctacggagagatccccatacccgaagaactgagcgggagc

SEQ ID NO: 234021 - DNA, 55 bp, Artificial
  Synthetic oligonucleotide
ctcgttatcggctccataggatttcataaacaggtgcggccacatggtaaacccg

SEQ ID NO: 234022 - DNA, 55 bp, Artificial
  Synthetic oligonucleotide
cttagcacagaggcgcttttagccttgccgaaacgctccctcgcagcgtccggac

SEQ ID NO: 234023 - DNA, 55 bp, Artificial
  Synthetic oligonucleotide
gaatggtcgagtagccttctatcacccagcgcggtacactggtgtacccgggcca

SEQ ID NO: 234024 - DNA, 55 bp, Artificial
  Synthetic oligonucleotide
gatatgaggaagtccctcgtcgcaactcttcgtaaggcgcaccttatagccgact

SEQ ID NO: 234025 - DNA, 55 bp, Artificial
  Synthetic oligonucleotide
aagaggattacctcgtgtccccgttcagcggacacccgagcagcctccatacccg

SEQ ID NO: 234026 - DNA, 53 bp, Artificial
  Synthetic oligonucleotide
gcccacaggaaacctttcccgggcgggagcgtatattacccgtgatggactac

SEQ ID NO: 234027 - DNA, 55 bp, Artificial
  Synthetic oligonucleotide
gccgctactgacacgtccctcatctctggagggcactcacgcatctcacccgcaa

SEQ ID NO: 234028 - DNA, 55 bp, Artificial
  Synthetic oligonucleotide
gtgcggtgccctacgtaatcaccgagccgtgcatagggacgaaggaccagagctg

SEQ ID NO: 234029 - DNA, 55 bp, Artificial
  Synthetic oligonucleotide
tctcctcgtctcctccgcagagccagcttgaaaggtgatcgtagagcttctcgcg

SEQ ID NO: 234030 - DNA, 55 bp, Artificial
  Synthetic oligonucleotide
ccaagggccgtttggagaggacttctcgccccgtctttgtcaccaggcaggtgtg

SEQ ID NO: 234031 - DNA, 55 bp, Artificial
  Synthetic oligonucleotide
tgacccaaccgtccgagccctgggtagccggcgggaaggtgcagttcgtctggaa

SEQ ID NO: 234032 - DNA, 55 bp, Artificial
  Synthetic oligonucleotide
aaccccgcttgtgccttgacgcacaacatacgcgagatagtatgtggtctcggag

SEQ ID NO: 234033 - DNA, 55 bp, Artificial
  Synthetic oligonucleotide
tgcacatagcaaacgggaaggtgcgtcgtgcggtttcttagagagggccagaggc

SEQ ID NO: 234034 - DNA, 54 bp, Artificial
  Synthetic oligonucleotide
tgcacgtcccgacacgagagccgggaggggccttccggtagatggaccggggta

SEQ ID NO: 234035 - DNA, 55 bp, Artificial
  Synthetic oligonucleotide
tgttcacagaagggcgtgacccttttccggcccttagcggccccgcagaagagac

SEQ ID NO: 234036 - DNA, 53 bp, Artificial
  Synthetic oligonucleotide
gagatcccggtccacaaaacgaccactcgtcgaatcttgttcgataccagtgg

SEQ ID NO: 234037 - DNA, 53 bp, Artificial
  Synthetic oligonucleotide
gccataaagcacgcgaggcggcgttttgatgtaacatgggagcgggtgtacaa

SEQ ID NO: 234038 - DNA, 53 bp, Artificial
  Synthetic oligonucleotide
atctggcgcaagataagggagcgccgcaggagaaggtaggctccccgcctacc

SEQ ID NO: 234039 - DNA, 52 bp, Artificial
  Synthetic oligonucleotide
ccgtacttacgatcgtactctggatctgctaccccatcgtttggcttattgg

SEQ ID NO: 234040 - DNA, 52 bp, Artificial
  Synthetic oligonucleotide
actgagagtgagagactggacatgagtgcaacactacccaaggagcgtaggg

SEQ ID NO: 234041 - DNA, 55 bp, Artificial
  Synthetic oligonucleotide
agggcctcccgcgagatagggatagaccacctcacgatgctcgacgtctcacccc

SEQ ID NO: 234042 - DNA, 51 bp, Artificial
  Synthetic oligonucleotide
aggagaacgttggttgcgtcattagaaccggttgtgtactataagacggaa

SEQ ID NO: 234043 - DNA, 50 bp, Artificial
  Synthetic oligonucleotide
attgggcgtcgctcggctcaacacggtcgttatgcgcaatttccctcccc

SEQ ID NO: 234044 - DNA, 50 bp, Artificial
  Synthetic oligonucleotide
attccgggaggccggacgggaagcagcgaaggccatagacccaccctcgg

SEQ ID NO: 234045 - DNA, 50 bp, Artificial
  Synthetic oligonucleotide
atgctcgtaatgcggacagccgaagacccggcaaaccctctcggcgagtt

SEQ ID NO: 234046 - DNA, 50 bp, Artificial
  Synthetic oligonucleotide
atgcgcaatttccctccccggacccagacgtccgagtactcaaagggctc

SEQ ID NO: 234047 - DNA, 50 bp, Artificial
  Synthetic oligonucleotide
atctggagggggtgcacgtcccgacacgagagccgggaggggccttccgg

SEQ ID NO: 234048 - DNA, 50 bp, Artificial
  Synthetic oligonucleotide
atcgcgatcgccatagccctcccgactgcgtttgctgtgcgaaacacgca

SEQ ID NO: 234049 - DNA, 50 bp, Artificial
  Synthetic oligonucleotide
atcctcctttcgtgatccaggccgctaggacgccccaccgtccaagtcaa

SEQ ID NO: 234050 - DNA, 50 bp, Artificial
  Synthetic oligonucleotide
agtcacatcatctacggcgcgtaccacctcccgtctgccgagggtgctac

SEQ ID NO: 234051 - DNA, 50 bp, Artificial
  Synthetic oligonucleotide
aaaacagccccctcggggcgtggtatcatcgcgcaccctttcggacatac

SEQ ID NO: 234052 - DNA, 55 bp, Artificial
  Synthetic oligonucleotide
ccccgatgctaacatcaggcacgcgtcgatcctctctgcgggaaagggagatggc

SEQ ID NO: 234053 - DNA, 50 bp, Artificial
  Synthetic oligonucleotide
aaaggggtggctgctgagtaccgatgcaagagagaggcgggcgaggaacc

SEQ ID NO: 234054 - DNA, 50 bp, Artificial
  Synthetic oligonucleotide
aacatcaggcacgcgtcgatcctctctgcgggaaagggagatggccgaaa

SEQ ID NO: 234055 - DNA, 50 bp, Artificial
  Synthetic oligonucleotide
aacccgccaggcagcctccgctatctgcactctgcgccgctcgtgatcca

SEQ ID NO: 234056 - DNA, 50 bp, Artificial
  Synthetic oligonucleotide
aacctgacggtcgtatggcctcgtggatacgagcagggtccaagccgcac

SEQ ID NO: 234057 - DNA, 50 bp, Artificial
  Synthetic oligonucleotide
aacgtggagttcccccgctagcacggacacgtttaccttacgcgacgcta

SEQ ID NO: 234058 - DNA, 50 bp, Artificial
  Synthetic oligonucleotide
aactcgccgagagggtttgccgggtcttcggctgtccgcattacgagcat

SEQ ID NO: 234059 - DNA, 50 bp, Artificial
  Synthetic oligonucleotide
aagccacctccgtacctgctctggccaagttcatgccccaccccgcatat

SEQ ID NO: 234060 - DNA, 50 bp, Artificial
  Synthetic oligonucleotide
aaggggcggtgtggtctctctgccgtgctctctcgaggagaaaggagcgt

SEQ ID NO: 234061 - DNA, 50 bp, Artificial
  Synthetic oligonucleotide
accataggggtcccatctccggccacatagacgcggacaaggcgtttgct

SEQ ID NO: 234062 - DNA, 50 bp, Artificial
  Synthetic oligonucleotide
accggaagtattccgggaggccggacgggaagcagcgaaggccatagacc

SEQ ID NO: 234063 - DNA, 55 bp, Artificial
  Synthetic oligonucleotide
ccccgttaattcgcacatctgtactaaatactgcccggttatagcacgcttgtgt

SEQ ID NO: 234064 - DNA, 50 bp, Artificial
  Synthetic oligonucleotide
accgggccacgagtgcagacgagaaggcttggttcagagcccgccgtccc

SEQ ID NO: 234065 - DNA, 50 bp, Artificial
  Synthetic oligonucleotide
acgtgctcctttcccgaagagtgacccctcactacccaccggcgtacggc

SEQ ID NO: 234066 - DNA, 50 bp, Artificial
  Synthetic oligonucleotide
actgagctgcgcgctcctctgcccgatctctctgggagaggtaagccggt

SEQ ID NO: 234067 - DNA, 50 bp, Artificial
  Synthetic oligonucleotide
actttgcggcccgaagacccccaaaacggtagagcggcccgcggagggct

SEQ ID NO: 234068 - DNA, 50 bp, Artificial
  Synthetic oligonucleotide
agaaccgggggacgcgctaacattccatggtgacattccgcatggaccgg

SEQ ID NO: 234069 - DNA, 50 bp, Artificial
  Synthetic oligonucleotide
agccgtcggttgccacaaggaccctggcgatcaacatacccacctccgga

SEQ ID NO: 234070 - DNA, 50 bp, Artificial
  Synthetic oligonucleotide
aggaccgtccaattcttccaccctcttccggaaagctgttccccggggga

SEQ ID NO: 234071 - DNA, 50 bp, Artificial
  Synthetic oligonucleotide
aggccgctaggacgccccaccgtccaagtcaaacgcccgagagtagcaac

SEQ ID NO: 234072 - DNA, 50 bp, Artificial
  Synthetic oligonucleotide
aggccggacgggaagcagcgaaggccatagacccaccctcggatgtccac

SEQ ID NO: 234073 - DNA, 50 bp, Artificial
  Synthetic oligonucleotide
agggacggttgcttcaagagaagggagggccgcagagaaacatgcgcgct

SEQ ID NO: 234074 - DNA, 53 bp, Artificial
  Synthetic oligonucleotide
agaacggccgaacacgcaaacgggtatcttaccctctgtctcggggtacgtca

SEQ ID NO: 234075 - DNA, 50 bp, Artificial
  Synthetic oligonucleotide
agggaggacgtgcggtgccctacgtaatcaccgagccgtgcatagggacg

SEQ ID NO: 234076 - DNA, 50 bp, Artificial
  Synthetic oligonucleotide
agggcccacgcaaagggccttgagctcatctgcttcatagagcccggggt

SEQ ID NO: 234077 - DNA, 50 bp, Artificial
  Synthetic oligonucleotide
agggcctccgggccccatagagcactctttgggtacgaaagtgcggcggg

SEQ ID NO: 234078 - DNA, 50 bp, Artificial
  Synthetic oligonucleotide
aggggagcgcccgtttgtcacccttcgggagcactgtgagtacgtcgtag

SEQ ID NO: 234079 - DNA, 50 bp, Artificial
  Synthetic oligonucleotide
agggggatgcacagtagagcggcatcccgtagaagccatacgggctgtcc

SEQ ID NO: 234080 - DNA, 50 bp, Artificial
  Synthetic oligonucleotide
agggtttgccgggtcttcggctgtccgcattacgagcatctgtccgttcc

SEQ ID NO: 234081 - DNA, 50 bp, Artificial
  Synthetic oligonucleotide
aggtgtacctgtagccctgggccagtatggagtccgccgttgcaacgtcg

SEQ ID NO: 234082 - DNA, 50 bp, Artificial
  Synthetic oligonucleotide
agtagagcggcatcccgtagaagccatacgggctgtccatcccccttcga

SEQ ID NO: 234083 - DNA, 55 bp, Artificial
  Synthetic oligonucleotide
cccgtggaacggacagatgctcgtaatgcggacagccgaagacccggcaaaccct

SEQ ID NO: 234084 - DNA, 55 bp, Artificial
  Synthetic oligonucleotide
acttggacgctcaaccggccttggtcgagtacttggtgagccttatgcgggtcct

SEQ ID NO: 234085 - DNA, 55 bp, Artificial
  Synthetic oligonucleotide
ccttttcgctcagcttctatcattgtaagcagacgggaggggctcgtgcaagggc

SEQ ID NO: 234086 - DNA, 60 bp, Artificial
  Synthetic oligonucleotide
gaggtgtgctatcgcttttctgacggtctgaacagatattccgagctgttctgcaatagc

SEQ ID NO: 234087 - DNA, 60 bp, Artificial
  Synthetic oligonucleotide
agtggctgacctgttaagagtatcatcatggggcacagccagtcacagcaaatacggtga

SEQ ID NO: 234088 - DNA, 55 bp, Artificial
  Synthetic oligonucleotide
atcgcaactccaactatcagataagctgcaagagcaagaagtcccgccatccagt

SEQ ID NO: 234089 - DNA, 55 bp, Artificial
  Synthetic oligonucleotide
ggggaaggtgctttctgtatatctccgtttctcacggctttgcgccatgtgaaat

SEQ ID NO: 234090 - DNA, 55 bp, Artificial
  Synthetic oligonucleotide
atccgtagatatctcctgcgctgtccttccagagtcctaacattgcctctgatac

SEQ ID NO: 234091 - DNA, 55 bp, Artificial
  Synthetic oligonucleotide
ggggattatgcggttgaaagcgtaaagccagcctatatcggaggtactcatatca

SEQ ID NO: 234092 - DNA, 55 bp, Artificial
  Synthetic oligonucleotide
cgttattggtgttgcccttatcgtgtatagcttatttgctaccgtgttcaccgcc

SEQ ID NO: 234093 - DNA, 55 bp, Artificial
  Synthetic oligonucleotide
ggggtacgtgagtgcggatgttggataaagcttcgttacctgatatttctaccgc

SEQ ID NO: 234094 - DNA, 52 bp, Artificial
  Synthetic oligonucleotide
cacgacacccttacccttacgcccaacgaaggacaggggctgcgggtaaaga

SEQ ID NO: 234095 - DNA, 55 bp, Artificial
  Synthetic oligonucleotide
gccggggtaaaagcatcagataaaagctgcattctatgatgtaatacagagccgc

SEQ ID NO: 234096 - DNA, 55 bp, Artificial
  Synthetic oligonucleotide
cacccagtctttccagcagaccgatagatgtgatgataccacgtcctgcacatcc

SEQ ID NO: 234097 - DNA, 55 bp, Artificial
  Synthetic oligonucleotide
cacagttactgcaatcgaaatatggccgggcagcagtaaatgcttacgtgcaggg

SEQ ID NO: 234098 - DNA, 59 bp, Artificial
  Synthetic oligonucleotide
tcgtaattcaagcggacttacgcagaaacagctttcagatcgttcgggtatagcacagg

SEQ ID NO: 234099 - DNA, 55 bp, Artificial
  Synthetic oligonucleotide
caatctaaccgcttttaaccgagcattttaactggacgctctaaccgctgcacag

SEQ ID NO: 234100 - DNA, 55 bp, Artificial
  Synthetic oligonucleotide
caaggtcacagacgttcttatcagcgaaggaaagatcgcagaagtatccgtgggg

SEQ ID NO: 234101 - DNA, 55 bp, Artificial
  Synthetic oligonucleotide
cgtattatggcgtatcttaataccgtatcggttcagaagcattcccgtgagtttg

SEQ ID NO: 234102 - DNA, 55 bp, Artificial
  Synthetic oligonucleotide
caaatgatgtcaattagaatctgaatagaatctatcagcagtcacacaacacggc

SEQ ID NO: 234103 - DNA, 55 bp, Artificial
  Synthetic oligonucleotide
caaatcaccgaaagcgaaggtcatagatctgatgagcgcattctacgataacaga

SEQ ID NO: 234104 - DNA, 55 bp, Artificial
  Synthetic oligonucleotide
ggaaccggactttctgtgcaagaaccaaatcgacagaatctatccaatcggacgc

SEQ ID NO: 234105 - DNA, 55 bp, Artificial
  Synthetic oligonucleotide
ggaatgttcccgacatggctgtgtccggagcaggttcgtgtgatcccgatctccg

SEQ ID NO: 234106 - DNA, 55 bp, Artificial
  Synthetic oligonucleotide
cgtattgtcatgcagcgtggaaacgttcacgttatcgatcagattgaatgcatcc

SEQ ID NO: 234107 - DNA, 55 bp, Artificial
  Synthetic oligonucleotide
attgtggtacgtttctccagtgacgtaagctctcactcacctttcgagagcaggg

SEQ ID NO: 234108 - DNA, 55 bp, Artificial
  Synthetic oligonucleotide
attggtgtcggagtttcgtagcagtacaatagccgatcagagaaattctccgttc

SEQ ID NO: 234109 - DNA, 57 bp, Artificial
  Synthetic oligonucleotide
tggttcttttgagacggtccatactcaactcatggcggattatttcaaaaatccgtc

SEQ ID NO: 234110 - DNA, 55 bp, Artificial
  Synthetic oligonucleotide
ggagaccggaactgcagcatttgaccgggaattgaccggaacagtgtttaactat

SEQ ID NO: 234111 - DNA, 55 bp, Artificial
  Synthetic oligonucleotide
ggagagagagttatctgtttacaggcgcggacgcaacactaaagttaatgcaccg

SEQ ID NO: 234112 - DNA, 55 bp, Artificial
  Synthetic oligonucleotide
attcttcgggtcataatccgaagtgatgtaggcagactccatatagcgcacatct

SEQ ID NO: 234113 - DNA, 55 bp, Artificial
  Synthetic oligonucleotide
ggagatcagtatatccatagaaggcgagatagttgcatagaactgtctgtttctg

SEQ ID NO: 234114 - DNA, 55 bp, Artificial
  Synthetic oligonucleotide
ggagcgtacaacaggttcgggcgatgtttaccgcagtattcctaagccgactttc

SEQ ID NO: 234115 - DNA, 55 bp, Artificial
  Synthetic oligonucleotide
attcagcggcatagaatcactcttgaacgcagtctccggagtaacccctaacgcg

SEQ ID NO: 234116 - DNA, 55 bp, Artificial
  Synthetic oligonucleotide
cgtcatcacatactgctttaccgcattttcgtttgccagatctacttccgtaata

SEQ ID NO: 234117 - DNA, 55 bp, Artificial
  Synthetic oligonucleotide
atgtcggaactcagggccacggaaaggctgatgcaaagttttgtgatcccttcgg

SEQ ID NO: 234118 - DNA, 55 bp, Artificial
  Synthetic oligonucleotide
ggatatcgaccagtcgtagacatagtagagacgtacagcgaattggttggtacgt

SEQ ID NO: 234119 - DNA, 54 bp, Artificial
  Synthetic oligonucleotide
cctgggtacgccagcagtggaatttccggaattgccctccctttcggacggcgc

SEQ ID NO: 234120 - DNA, 59 bp, Artificial
  Synthetic oligonucleotide
agtccgtggacgaacgcgcatgcgaccccatgctacatgataccgtaccaaacctccca

SEQ ID NO: 234121 - DNA, 55 bp, Artificial
  Synthetic oligonucleotide
cctgatgccatcgggattgtgcgctccgtcaaatatgacgtacggctctctcctg

SEQ ID NO: 234122 - DNA, 55 bp, Artificial
  Synthetic oligonucleotide
cggacttggtcaaatggttctggaagtgactaaccgctgtaatttcagatgcgag

SEQ ID NO: 234123 - DNA, 55 bp, Artificial
  Synthetic oligonucleotide
cctctttcaccgtctgtccagttgctgttcacacatcactatccttagacattgt

SEQ ID NO: 234124 - DNA, 55 bp, Artificial
  Synthetic oligonucleotide
cctctgccgctccagtaattggtaccgttctcgaatgtagcggagtacagtgtac

SEQ ID NO: 234125 - DNA, 55 bp, Artificial
  Synthetic oligonucleotide
cctcgtaaagaagccgtacagacagcggtccgggttatgtcaccgcaggtaatag

SEQ ID NO: 234126 - DNA, 55 bp, Artificial
  Synthetic oligonucleotide
cctcctgcatggactgatgtggatattgctatggtaagctatgaagcacctgtcc

SEQ ID NO: 234127 - DNA, 55 bp, Artificial
  Synthetic oligonucleotide
cctcctctagccctcgcgcgggttcgcaacacgtcacttacatagtgatgtcggg

SEQ ID NO: 234128 - DNA, 55 bp, Artificial
  Synthetic oligonucleotide
cggagcaccgagatacgtgtcatcaagttcaacgatcccgtcaagcaaatagcgt

SEQ ID NO: 234129 - DNA, 55 bp, Artificial
  Synthetic oligonucleotide
cctaccagaagatcattgtgcacacgcttcgccccatttctacacattcatacag

SEQ ID NO: 234130 - DNA, 55 bp, Artificial
  Synthetic oligonucleotide
gcctccagcagtgtgctatactgaacaggttccgacttgttcggccatctgaacg

SEQ ID NO: 234131 - DNA, 60 bp, Artificial
  Synthetic oligonucleotide
tgggcagatcatagataccttggaaaattacacgggatacgattatactgagatatatcc

SEQ ID NO: 234132 - DNA, 55 bp, Artificial
  Synthetic oligonucleotide
gcctgacgcagaggaccgtgaggatggctcctccagctatttccatggaagcagt

SEQ ID NO: 234133 - DNA, 55 bp, Artificial
  Synthetic oligonucleotide
gcctgcaaggaattacagttctcccctgttcgcgcttaaagtcaggggcgagtcg

SEQ ID NO: 234134 - DNA, 55 bp, Artificial
  Synthetic oligonucleotide
ccgtcaccctttgcaccgaaatccctgacactaacagcgcaggattccttagctg

SEQ ID NO: 234135 - DNA, 55 bp, Artificial
  Synthetic oligonucleotide
gcctgtagcccatcgatttacatagttcaactgtctccctgagccggacccattg

SEQ ID NO: 234136 - DNA, 55 bp, Artificial
  Synthetic oligonucleotide
ccgtatgctcggctggtctcggggtgtgcttcggttccactttgatgtcgtaatg

SEQ ID NO: 234137 - DNA, 55 bp, Artificial
  Synthetic oligonucleotide
ccggtatctccagtgtctttgtgaggaactccccatgcccactcgatagcctcag

SEQ ID NO: 234138 - DNA, 55 bp, Artificial
  Synthetic oligonucleotide
ccggtaccactgagatcatccacaacccctcctacgagactctgtttgaggagga

SEQ ID NO: 234139 - DNA, 55 bp, Artificial
  Synthetic oligonucleotide
ccggggaacttatgatggcgaggcgacaatctacggacatgaagaggtgatcgca

SEQ ID NO: 234140 - DNA, 55 bp, Artificial
  Synthetic oligonucleotide
ccgggcgtacctgttgaccgctctgtataacgcctctctgacgatagacaattac

SEQ ID NO: 234141 - DNA, 55 bp, Artificial
  Synthetic oligonucleotide
ccgctgtctgatactacggcaaatgcattcatctgcaggcagttataatcgtgga

SEQ ID NO: 234142 - DNA, 60 bp, Artificial
  Synthetic oligonucleotide
ggcacttcgcaggtcgagagtattcagtatcagagcatcggtcaaggtttccgtatggtc

SEQ ID NO: 234143 - DNA, 54 bp, Artificial
  Synthetic oligonucleotide
ccgctatatgaacctgaaacgtgggttgaaacccaattcacttcggtcgtacaa

SEQ ID NO: 234144 - DNA, 55 bp, Artificial
  Synthetic oligonucleotide
gccttaaggctgtaaccatcgtcacggaaatcgtatccaccggaagcaacctcta

SEQ ID NO: 234145 - DNA, 55 bp, Artificial
  Synthetic oligonucleotide
gcgacggttggataccacggtgagaccacgacggtacagttgagtcatcacttcg

SEQ ID NO: 234146 - DNA, 55 bp, Artificial
  Synthetic oligonucleotide
cgcttcaacatacggagactcatctttcagagccgtgacgaggcagaatcctacc

SEQ ID NO: 234147 - DNA, 55 bp, Artificial
  Synthetic oligonucleotide
cgctgcattgttgggacgaggtaagtccattggttgccctggtctgccttgcagt

SEQ ID NO: 234148 - DNA, 55 bp, Artificial
  Synthetic oligonucleotide
gccgtgttgaactgagagagactgccgcacagctgatgaggcctaaatcgccgaa

SEQ ID NO: 234149 - DNA, 55 bp, Artificial
  Synthetic oligonucleotide
cggaaaactgcggctgtgcaaacagtccgccaaaccgcgtctccatagctgttcg

SEQ ID NO: 234150 - DNA, 55 bp, Artificial
  Synthetic oligonucleotide
cgccggtgtacacaaggcagataccgtagaccacctgctgcatacccaaggtagc

SEQ ID NO: 234151 - DNA, 55 bp, Artificial
  Synthetic oligonucleotide
cgcccgaaagagatagatacacgggaagagttcggaaactgggaaatggacagcg

SEQ ID NO: 234152 - DNA, 55 bp, Artificial
  Synthetic oligonucleotide
cgccagtaggcaacacagcaacacggagagttttatctaagtcgtgtgcaagagc

SEQ ID NO: 234153 - DNA, 60 bp, Artificial
  Synthetic oligonucleotide
ctgctgcaaggactatgcaccgtactactggcaggctattcggatccgttttgaattgaa

SEQ ID NO: 234154 - DNA, 55 bp, Artificial
  Synthetic oligonucleotide
gccgtttactcccttgatgtcatacacacggttcacagtgccgcttccgatccac

SEQ ID NO: 234155 - DNA, 55 bp, Artificial
  Synthetic oligonucleotide
cgcatctgttatcagatactctgaaagctgtgcaatcataccattctttctgcag

SEQ ID NO: 234156 - DNA, 55 bp, Artificial
  Synthetic oligonucleotide
cgcacacgcgtcataatatcgggatattccgttatgctccggaactaagctgtat

SEQ ID NO: 234157 - DNA, 55 bp, Artificial
  Synthetic oligonucleotide
cgcaagtacatggcagaacgtgctaatctgctgggtgccatccgtctacccaatg

SEQ ID NO: 234158 - DNA, 55 bp, Artificial
  Synthetic oligonucleotide
cgatggtaaaaccgaacggtacgctggaagatatgatcatggactgctaggatgc

SEQ ID NO: 234159 - DNA, 55 bp, Artificial
  Synthetic oligonucleotide
cgagatcctgccgttgacatcacaatggctggctaggtagatctctagtgttaag

SEQ ID NO: 234160 - DNA, 55 bp, Artificial
  Synthetic oligonucleotide
cgagaacattagtaaccgaatgtacaccttgtcccgataatgcgaactgtggttt

SEQ ID NO: 234161 - DNA, 55 bp, Artificial
  Synthetic oligonucleotide
cgactatcttctcggaaagacaaagaatccgaacgtcaatcgctgagatatacta

SEQ ID NO: 234162 - DNA, 55 bp, Artificial
  Synthetic oligonucleotide
cgaccacgcagtatacgtgaacgtaccgaagaaggggcatctggtacagctgacc

SEQ ID NO: 234163 - DNA, 55 bp, Artificial
  Synthetic oligonucleotide
cgacatacgaaaatgcagtacgcattattatcgagtcagaagaccataagacaac

SEQ ID NO: 234164 - DNA, 60 bp, Artificial
  Synthetic oligonucleotide
taacagtgtgtttgctccgatgtgggggcatggcttcacaaagattcagggtgttcctga

SEQ ID NO: 234165 - DNA, 55 bp, Artificial
  Synthetic oligonucleotide
cgaatactaacctttggtctttcggatttccagctggatcagctaactgtttggc

SEQ ID NO: 234166 - DNA, 55 bp, Artificial
  Synthetic oligonucleotide
cgaagcctgcacagaaaataccggcgaggagaaataaccagaaccctctcactcg

SEQ ID NO: 234167 - DNA, 55 bp, Artificial
  Synthetic oligonucleotide
cgaagccacggtaaacggcacttcgagggatacacctgtctcgacatttaccaga

SEQ ID NO: 234168 - DNA, 54 bp, Artificial
  Synthetic oligonucleotide
cgaaagggcggcgttgtgttttccgaaatctcgttgtgccaaaacgctcctgcc

SEQ ID NO: 234169 - DNA, 52 bp, Artificial
  Synthetic oligonucleotide
cgaaacaaactcccgacccaaaaggcgcggcaataaaagaactcggagcgcg

SEQ ID NO: 234170 - DNA, 55 bp, Artificial
  Synthetic oligonucleotide
ccttctgtgcggctatcggaggtataatcaccatattaggcactatcggtggagg

SEQ ID NO: 234171 - DNA, 55 bp, Artificial
  Synthetic oligonucleotide
cggacgatacgagagatgccatcaaaggttcggtctttgaggcagaagaaccggg

SEQ ID NO: 234172 - DNA, 55 bp, Artificial
  Synthetic oligonucleotide
cctgttgaagcgataccgagagcggagagatacttctcatcgcctgtagcacggt

SEQ ID NO: 234173 - DNA, 55 bp, Artificial
  Synthetic oligonucleotide
cccatagcgctgtaaaacaaaggaccgtagctgtagcccgtcgatgattcgggtc

SEQ ID NO: 234174 - DNA, 55 bp, Artificial
  Synthetic oligonucleotide
cccacgaagtgtcgtgcaacgacagaaaagtctcccttacacgactggagttcga

SEQ ID NO: 234175 - DNA, 60 bp, Artificial
  Synthetic oligonucleotide
aaggttatcatccgtacatggggagtgcatcttaaggaggggagtgccattgtaatgcca

SEQ ID NO: 234176 - DNA, 55 bp, Artificial
  Synthetic oligonucleotide
cccacccgtggacttagacctgatgtataccgaaatatgcagtctgatcgaaagc

SEQ ID NO: 234177 - DNA, 55 bp, Artificial
  Synthetic oligonucleotide
cccacagcgccgtggtcaagcgaatggaggctataccaaaagagggacgcctgcc

SEQ ID NO: 234178 - DNA, 55 bp, Artificial
  Synthetic oligonucleotide
gccgtccctgataccaaatgcaaggagttcggagtgcctcagccgtgatttcctg

SEQ ID NO: 234179 - DNA, 55 bp, Artificial
  Synthetic oligonucleotide
ccatctgttttacctcggatacacacggccacatatttcccgtcaactatgccgc

SEQ ID NO: 234180 - DNA, 55 bp, Artificial
  Synthetic oligonucleotide
ccataaaatcgcggtggattcagaataattccgttgcggatatctaccggcccga

SEQ ID NO: 234181 - DNA, 55 bp, Artificial
  Synthetic oligonucleotide
gcggcggtgctgtctgctgaacttgatatccccgtgataacggtgaacccgttcc

SEQ ID NO: 234182 - DNA, 55 bp, Artificial
  Synthetic oligonucleotide
ccagtgcgggaacactgactttctctggctcgtataccatcaccgatgatgaagg

SEQ ID NO: 234183 - DNA, 55 bp, Artificial
  Synthetic oligonucleotide
ccagtaccttgccgtcaactctcagttcatatctggtcatgttgacagacagctt

SEQ ID NO: 234184 - DNA, 55 bp, Artificial
  Synthetic oligonucleotide
ccagtaccggtctcaatcacagggatggtgctctgctccactacggctttgatca

SEQ ID NO: 234185 - DNA, 55 bp, Artificial
  Synthetic oligonucleotide
ccagcatgacttgtattcggaagcgcctgtcataacggagtatgagccgtccttg

SEQ ID NO: 234186 - DNA, 60 bp, Artificial
  Synthetic oligonucleotide
caaatgaaaaagccagtgcgggaacactgactttctctggctcgtataccatcaccgatg

SEQ ID NO: 234187 - DNA, 55 bp, Artificial
  Synthetic oligonucleotide
gcggtcagtctatgggaatatccaccccgcagactgtcacatagtccacctgggt

SEQ ID NO: 234188 - DNA, 55 bp, Artificial
  Synthetic oligonucleotide
ccacgtaggtgaaaacggagagagctgcgcaggatccagagtacggccagacacg

SEQ ID NO: 234189 - DNA, 55 bp, Artificial
  Synthetic oligonucleotide
gccgtcccactgtctaccgtctactgaagcagaacgaattccgctggttcaaggt

SEQ ID NO: 234190 - DNA, 55 bp, Artificial
  Synthetic oligonucleotide
cggggtaacagttcatgaatgagtcgcagcgctcgacggagtacatctttcaggg

SEQ ID NO: 234191 - DNA, 55 bp, Artificial
  Synthetic oligonucleotide
gcgttttctgcgaatatacccgcactgtgaacgttcctgctgacggcacacagac

SEQ ID NO: 234192 - DNA, 55 bp, Artificial
  Synthetic oligonucleotide
catggggagtgcatcttaaggaggggagtgccattgtaatgccacctatggatgc

SEQ ID NO: 234193 - DNA, 55 bp, Artificial
  Synthetic oligonucleotide
catggctccgaagtatgctggttcggtgtctgttccctcggttatgatgagatga

SEQ ID NO: 234194 - DNA, 55 bp, Artificial
  Synthetic oligonucleotide
gctattcaactacaggcggacacaatcccaacaatatacagcctcttgtcatccg

SEQ ID NO: 234195 - DNA, 55 bp, Artificial
  Synthetic oligonucleotide
catgaagcagcttccgctgtactttcagcagttccgaaatagttactaagagttg

SEQ ID NO: 234196 - DNA, 55 bp, Artificial
  Synthetic oligonucleotide
gctccaacgtgtgtatgatccgttgagcgggcactattttagcagacgacggccc

SEQ ID NO: 234197 - DNA, 57 bp, Artificial
  Synthetic oligonucleotide
tctttttttcaaacttcctccgcaaattaacagagcttttctggagcttagcaatga

SEQ ID NO: 234198 - DNA, 60 bp, Artificial
  Synthetic oligonucleotide
tggatgccgggcacttccgaaggaagccccagattacgcgatatgctgcactctgcatat

SEQ ID NO: 234199 - DNA, 55 bp, Artificial
  Synthetic oligonucleotide
catcagcatgcgtgcagggcgttattgcgacggagcttacacagaacaacaagta

SEQ ID NO: 234200 - DNA, 55 bp, Artificial
  Synthetic oligonucleotide
gctccataatgatagccagaaccgataaggtgatgtatactagcatcatcagaag

SEQ ID NO: 234201 - DNA, 55 bp, Artificial
  Synthetic oligonucleotide
gccgtgggtgtctgagctatctgcccgctggcagaacgaagttcatccgcgcgaa

SEQ ID NO: 234202 - DNA, 55 bp, Artificial
  Synthetic oligonucleotide
ccgatttcaaaagagcctccgatctcgattacataaggtcgggctatttaagcgc

SEQ ID NO: 234203 - DNA, 55 bp, Artificial
  Synthetic oligonucleotide
ccgatacgaccataaatgaaaagagcgttccgcagtcgggtcagaccaatgtcac

SEQ ID NO: 234204 - DNA, 55 bp, Artificial
  Synthetic oligonucleotide
cggcagatttaccttaagactccgaagcataagaatatccgatatacccgaaggt

SEQ ID NO: 234205 - DNA, 55 bp, Artificial
  Synthetic oligonucleotide
cggcatgattatgtcgcactggaacacgttacaacacgtttccgcacagagtttg

SEQ ID NO: 234206 - DNA, 55 bp, Artificial
  Synthetic oligonucleotide
ccgacctctgcgaggatcatagcgacagttgaatagctgagaccggggaacggtc

SEQ ID NO: 234207 - DNA, 51 bp, Artificial
  Synthetic oligonucleotide
ccgaaaatcgggttgatgttaaccgtccgtaccgcccgagcaaaattgacc

SEQ ID NO: 234208 - DNA, 55 bp, Artificial
  Synthetic oligonucleotide
gcgagagtgactgagatagttgactggactatcgaatcaggtatgtacgctattg

SEQ ID NO: 234209 - DNA, 60 bp, Artificial
  Synthetic oligonucleotide
aggaagccccagattacgcgatatgctgcactctgcatattatcgtgctgcgcctcagct

SEQ ID NO: 234210 - DNA, 55 bp, Artificial
  Synthetic oligonucleotide
ccctgtgggctacattccggcaggctccactaatgatttcgcacgttctctcggt

SEQ ID NO: 234211 - DNA, 55 bp, Artificial
  Synthetic oligonucleotide
ccctcgatgaagtatccggacaagcaccgcaaggcactaaagacacgaacgctct

SEQ ID NO: 234212 - DNA, 55 bp, Artificial
  Synthetic oligonucleotide
ccctcacgcaagagtgattggtactgcagttatacacgattatgagcttctcttt

SEQ ID NO: 234213 - DNA, 55 bp, Artificial
  Synthetic oligonucleotide
cccgttcattaatatataatcgcagctaagaccgtaattctccataattggtcgg

SEQ ID NO: 234214 - DNA, 55 bp, Artificial
  Synthetic oligonucleotide
cggcggaacagtaaaagtcctccgtgacttctgcgaaactcgcatagcaggtcat

SEQ ID NO: 234215 - DNA, 53 bp, Artificial
  Synthetic oligonucleotide
cccgcttacagaagtaaaagacccgacgttcgcaacaggaatcctcggagaag

SEQ ID NO: 234216 - DNA, 55 bp, Artificial
  Synthetic oligonucleotide
cccgcgcatggtctggcatgaccacagggcagtacaagcggctgaaaggtctgac

SEQ ID NO: 234217 - DNA, 55 bp, Artificial
  Synthetic oligonucleotide
cccgaccattcagaataactgcacttgacacttatctccgggtgcatatcctcga

SEQ ID NO: 234218 - DNA, 55 bp, Artificial
  Synthetic oligonucleotide
gcgatagctgttgtaacggaaagacccgtagacggtgccagatgccttatcgtgg

SEQ ID NO: 234219 - DNA, 52 bp, Artificial
  Synthetic oligonucleotide
ccccttaaggggtcgggaaaggtctgtcaaccgcatttcattcccgtgcaac

SEQ ID NO: 234220 - DNA, 59 bp, Artificial
  Synthetic oligonucleotide
ctcattgcttgccgtcctctttcggcggttattgcagggggcttgtacaaagtggctga

SEQ ID NO: 234221 - DNA, 55 bp, Artificial
  Synthetic oligonucleotide
gcgcggaaagctgatatgtgggagaaatgcgtatcacacattaaattccagaagg

SEQ ID NO: 234222 - DNA, 55 bp, Artificial
  Synthetic oligonucleotide
ccccggcataacaactcccgtgtcttcgtcaatatagaaccatgccctgaaatgt

SEQ ID NO: 234223 - DNA, 55 bp, Artificial
  Synthetic oligonucleotide
gcggacgagttgtgtataatagacggagcatggcgtgtgttcgcggcaatggagc

SEQ ID NO: 234224 - DNA, 55 bp, Artificial
  Synthetic oligonucleotide
ccccatcactgagagcgtgtttaccgtgtacgattctaatcgctatgtggtcgct

SEQ ID NO: 234225 - DNA, 55 bp, Artificial
  Synthetic oligonucleotide
gcggagagcacaggtcccttaagcttataaatggccgaagctacccacagggaga

SEQ ID NO: 234226 - DNA, 55 bp, Artificial
  Synthetic oligonucleotide
ccccacactccttgcgatctcgcgggagtattcagccacacgggtggaatgtccg

SEQ ID NO: 234227 - DNA, 52 bp, Artificial
  Synthetic oligonucleotide
ccccaaacgcttagaccgggtggcgtttccacccgaaatcatgtaaaataga

SEQ ID NO: 234228 - DNA, 55 bp, Artificial
  Synthetic oligonucleotide
gacggatataatgccgaattacattcactacggttatcagtaccaggtctcctcc

SEQ ID NO: 234229 - DNA, 55 bp, Artificial
  Synthetic oligonucleotide
acggagtggaagttcccgtgctgggcatcggtactttcatgataagtccggaaga

SEQ ID NO: 234230 - DNA, 55 bp, Artificial
  Synthetic oligonucleotide
gactgaaaccgctctgaaagccccatgaccggggttttcgttctatctgtgtacg

SEQ ID NO: 234231 - DNA, 59 bp, Artificial
  Synthetic oligonucleotide
acgagaaggaccggggtggactgccgcgagttatcgtttgtataccagtgcatagcaga

SEQ ID NO: 234232 - DNA, 55 bp, Artificial
  Synthetic oligonucleotide
tccgtaatagatcacaagctgagcatagatactgctccagtcctgacgacgcccc

SEQ ID NO: 234233 - DNA, 55 bp, Artificial
  Synthetic oligonucleotide
gagctgaggtacatattctcagcggcagttgtaagaaagacggtctctgcgcctg

SEQ ID NO: 234234 - DNA, 55 bp, Artificial
  Synthetic oligonucleotide
tcgccattacggacagaaaagtcatcaggatcaacatttactgtgtaatccgtca

SEQ ID NO: 234235 - DNA, 55 bp, Artificial
  Synthetic oligonucleotide
gaggaaatttactacagatgcttttacggtgaaatgttcatgtcatggacagaca

SEQ ID NO: 234236 - DNA, 55 bp, Artificial
  Synthetic oligonucleotide
acgaaccttatgattctgcgcggcgtatcaaaattctacgcagccccaggtatgc

SEQ ID NO: 234237 - DNA, 55 bp, Artificial
  Synthetic oligonucleotide
tcggtcagccttgctgtctcggctactgcatcatcgtaaccaacgagagccgcaa

SEQ ID NO: 234238 - DNA, 55 bp, Artificial
  Synthetic oligonucleotide
gaggaattcagtcagagagttctgtatattttcctgctgtcacaatggccgccgc

SEQ ID NO: 234239 - DNA, 55 bp, Artificial
  Synthetic oligonucleotide
tcgtcagagaggcgttatacagagcggtcaacaggtacgcccggatattacggat

SEQ ID NO: 234240 - DNA, 55 bp, Artificial
  Synthetic oligonucleotide
tctactctcaaagtacttaacgaggcattgagtaaagctatttactgcccatttg

SEQ ID NO: 234241 - DNA, 55 bp, Artificial
  Synthetic oligonucleotide
gagtggatttcatacgttagttaagatggattgcatccgttaattcgggtcttgc

SEQ ID NO: 234242 - DNA, 57 bp, Artificial
  Synthetic oligonucleotide
cccctcacgcattccaaatggattcgtttggtgcatcgaaagcgtgagggggtgttc

SEQ ID NO: 234243 - DNA, 55 bp, Artificial
  Synthetic oligonucleotide
tctctatcctgtttcaggattctctgtgagttcctcttaccacctggattcccct

SEQ ID NO: 234244 - DNA, 55 bp, Artificial
  Synthetic oligonucleotide
gatgcctttacaagtgcatcaacacgtgcaagtacattagcagtgattcctaccg

SEQ ID NO: 234245 - DNA, 55 bp, Artificial
  Synthetic oligonucleotide
gatgcggaatcctttcaacggataagttataccatatcattccctagtatgtcaa

SEQ ID NO: 234246 - DNA, 55 bp, Artificial
  Synthetic oligonucleotide
tctttcccattttcatttccggcagtcaaagcaactatacaagatactctgtgcc

SEQ ID NO: 234247 - DNA, 55 bp, Artificial
  Synthetic oligonucleotide
tctttgctgttctcggactgttggcccttgctttctggtacatgcaccgattgac

SEQ ID NO: 234248 - DNA, 55 bp, Artificial
  Synthetic oligonucleotide
accatattcagctctttcgtttccctgcaattcttcacttgcaattcggtatcct

SEQ ID NO: 234249 - DNA, 55 bp, Artificial
  Synthetic oligonucleotide
gatgtcatagcaaggctccgcgcactgaacgacaaagcacccatcgttactaccg

SEQ ID NO: 234250 - DNA, 55 bp, Artificial
  Synthetic oligonucleotide
gattagaggaagtttggcgattactcgtatccatacgatccacacgggaacatac

SEQ ID NO: 234251 - DNA, 55 bp, Artificial
  Synthetic oligonucleotide
tgagccatatagcggattatagtgacgtgggtactgcggtcacggataaatacac

SEQ ID NO: 234252 - DNA, 55 bp, Artificial
  Synthetic oligonucleotide
tataccgctttatcaagagcaaccgtttcagacgtattctgttccttgtggacag

SEQ ID NO: 234253 - DNA, 58 bp, Artificial
  Synthetic oligonucleotide
gagccgctcagaacgtgcgaggggcatttttacagcctttttctcgcggagatagaaa

SEQ ID NO: 234254 - DNA, 53 bp, Artificial
  Synthetic oligonucleotide
agaaacgggtaaactccgccccgataccccgatagtctgcctgccgaacagac

SEQ ID NO: 234255 - DNA, 55 bp, Artificial
  Synthetic oligonucleotide
tatatcatccagaagggcggatcggctgtattcactccggagggacagaagcaga

SEQ ID NO: 234256 - DNA, 55 bp, Artificial
  Synthetic oligonucleotide
gaagccttcttagcaaggttaggatagtaacccagctggttcagacgaacgttgc

SEQ ID NO: 234257 - DNA, 55 bp, Artificial
  Synthetic oligonucleotide
gaaggcatcgtacacgtctggcatttactgtgacctcagacagttgaacaggatc

SEQ ID NO: 234258 - DNA, 55 bp, Artificial
  Synthetic oligonucleotide
gaagtacgattgtcatgcctgcggacacagatcatgccgcgatatggctatagct

SEQ ID NO: 234259 - DNA, 55 bp, Artificial
  Synthetic oligonucleotide
tatggatgcttctcgtctctgcgtacacacttgaccacactgtagtagagggcgg

SEQ ID NO: 234260 - DNA, 55 bp, Artificial
  Synthetic oligonucleotide
actggacgacgtaattcattctggggaagcggagtcgggaaagttgagtctccta

SEQ ID NO: 234261 - DNA, 55 bp, Artificial
  Synthetic oligonucleotide
tattgcgaccatgtatccctatggaagtgaaacggaacgcaagattgagagacac

SEQ ID NO: 234262 - DNA, 55 bp, Artificial
  Synthetic oligonucleotide
gaatgacttgttagcgatccagtcgtacataagtgcgagacagtgcttgcacggt

SEQ ID NO: 234263 - DNA, 55 bp, Artificial
  Synthetic oligonucleotide
gacaacgaaagcgaggaaccctctatggcagaagtgaacgataacagctctatcc

SEQ ID NO: 234264 - DNA, 60 bp, Artificial
  Synthetic oligonucleotide
tcgaggcattaagcagcctacctctgagctgctcgatattgattccgtggcaaatgaaaa

SEQ ID NO: 234265 - DNA, 55 bp, Artificial
  Synthetic oligonucleotide
gacaagcatatcgaatattgcacgggttgtttcacctgtaagcggaacggcggaa

SEQ ID NO: 234266 - DNA, 52 bp, Artificial
  Synthetic oligonucleotide
actctcaaaccgttaagtaagtcctcaaaggtagtctggggatttggtgtaa

SEQ ID NO: 234267 - DNA, 55 bp, Artificial
  Synthetic oligonucleotide
tcacggcttcgtaaaacggaaagtgtcaccttatgaacagtcccttgccgagaga

SEQ ID NO: 234268 - DNA, 55 bp, Artificial
  Synthetic oligonucleotide
tcagtagagcttaccgtccctttaagagcgcaattggtggtaaacgttgtactat

SEQ ID NO: 234269 - DNA, 55 bp, Artificial
  Synthetic oligonucleotide
tcatacagttcgttctcatacggcagtttcaaagcacgcacctcccttacagcgc

SEQ ID NO: 234270 - DNA, 55 bp, Artificial
  Synthetic oligonucleotide
tcatgccgcggctgtcttgcccaccgttgcgaggatgtatgtcccagaggggcta

SEQ ID NO: 234271 - DNA, 55 bp, Artificial
  Synthetic oligonucleotide
gacaggagctgtgtgatagtgatagaggttaacactatgcagtgcggacttgcag

SEQ ID NO: 234272 - DNA, 55 bp, Artificial
  Synthetic oligonucleotide
tccagaatagactcccggattgtcttgacgccagacttatcctttccactgcgga

SEQ ID NO: 234273 - DNA, 55 bp, Artificial
  Synthetic oligonucleotide
gacggacaggaagtcccttgtaaacgttagaatgaccgcaagcgtagtcacggac

SEQ ID NO: 234274 - DNA, 55 bp, Artificial
  Synthetic oligonucleotide
tcccggcaacatcctacatcagtcgttacacatgggcgtctggccgcaaatgact

SEQ ID NO: 234275 - DNA, 57 bp, Artificial
  Synthetic oligonucleotide
ccctatggggcgcaaagttgattgtatcagagatactggtttgtcaaagcctaccgt

SEQ ID NO: 234276 - DNA, 55 bp, Artificial
  Synthetic oligonucleotide
tccctcttcattcatgtacgcccctccttgtttcgcttacagcagctgagggtag

SEQ ID NO: 234277 - DNA, 55 bp, Artificial
  Synthetic oligonucleotide
tgttatacgctgcttggtgcgtcgtgttgagtgggacggcgagaatatccacctg

SEQ ID NO: 234278 - DNA, 55 bp, Artificial
  Synthetic oligonucleotide
tgttccagacacattggttatctgtgttcctgttgcgctccaatagagatgagct

SEQ ID NO: 234279 - DNA, 55 bp, Artificial
  Synthetic oligonucleotide
aagaagtccaccacgctatggaagagggcgttgaattcctgactctgaacaatcc

SEQ ID NO: 234280 - DNA, 55 bp, Artificial
  Synthetic oligonucleotide
aacttcgcaccgctgccataatatcaatagagccaagtccccgatacgtgctctg

SEQ ID NO: 234281 - DNA, 55 bp, Artificial
  Synthetic oligonucleotide
gcagcagtaaccgccgttaccgagaccgtaacttaccaggcagccaagtgtgccc

SEQ ID NO: 234282 - DNA, 55 bp, Artificial
  Synthetic oligonucleotide
ttagctgccattgtgttttctatgttggttctcattgcttgccgtcctctttcgg

SEQ ID NO: 234283 - DNA, 55 bp, Artificial
  Synthetic oligonucleotide
gcagctctgaactgtcggctatgctttatgaacatagtcaaactataaatggaac

SEQ ID NO: 234284 - DNA, 55 bp, Artificial
  Synthetic oligonucleotide
aacgtatgcagtttatgttatcagtcactgcactgtgaaagcggattctgcaaaa

SEQ ID NO: 234285 - DNA, 55 bp, Artificial
  Synthetic oligonucleotide
ttcaagcaggttcttgcctatccaactgtcgggaacgcttatctcgtagatcgcg

SEQ ID NO: 234286 - DNA, 56 bp, Artificial
  Synthetic oligonucleotide
tttcttaactgctccgtaataatgacgtttagatccacagaagtttcctgcaccgg

SEQ ID NO: 234287 - DNA, 55 bp, Artificial
  Synthetic oligonucleotide
ttccgggtggtcagaaagattaagcgcagtataaacatgctgcccattaaaagcg

SEQ ID NO: 234288 - DNA, 55 bp, Artificial
  Synthetic oligonucleotide
ttcgcagcattcgctacagtagcagacgttgttcctttacgtttcaataatcgca

SEQ ID NO: 234289 - DNA, 55 bp, Artificial
  Synthetic oligonucleotide
gcagtcgcaagattacaaccgtctgcaacggagtaaaacgtgtatggtctgaccg

SEQ ID NO: 234290 - DNA, 55 bp, Artificial
  Synthetic oligonucleotide
gcatctgacagacagactgcagggacggagagggtcattttcgtttcaggtacgc

SEQ ID NO: 234291 - DNA, 55 bp, Artificial
  Synthetic oligonucleotide
gccactttgcacagttgtcaccgcaagtcgatacattgaacactttctccggctc

SEQ ID NO: 234292 - DNA, 55 bp, Artificial
  Synthetic oligonucleotide
aaatccctgcagaagcagaataatgtgcgatagtgtatctgcggatcatatggat

SEQ ID NO: 234293 - DNA, 55 bp, Artificial
  Synthetic oligonucleotide
aaatactgtcggagacgcttgtatatctgacgccctgtgtcagatgtgctaaagc

SEQ ID NO: 234294 - DNA, 55 bp, Artificial
  Synthetic oligonucleotide
aaagtgtctcccgcccatgaagccttggttttccacaccgttcaagcggacaggc

SEQ ID NO: 234295 - DNA, 55 bp, Artificial
  Synthetic oligonucleotide
ttgtagctgcttagtggcgatagtccttttacagagtaggttcgattgactgagt

SEQ ID NO: 234296 - DNA, 55 bp, Artificial
  Synthetic oligonucleotide
gccctcaggaatagtgatggggtatgagaatacaccaccgctgatagtaggctcc

SEQ ID NO: 234297 - DNA, 60 bp, Artificial
  Synthetic oligonucleotide
tataacatcaaacgcaaatgatgtcaattagaatctgaatagaatctatcagcagtcaca

SEQ ID NO: 234298 - DNA, 55 bp, Artificial
  Synthetic oligonucleotide
gccgaatggaagactctgcggtctatgaccggtaaacgcacaagtcttgccttga

SEQ ID NO: 234299 - DNA, 55 bp, Artificial
  Synthetic oligonucleotide
tttacaggacaaaacaggggtgttggatggcaaaatctgggatccgaattcattg

SEQ ID NO: 234300 - DNA, 55 bp, Artificial
  Synthetic oligonucleotide
gccgacacgcttcctgcatcaagaaagtcgagctcgcatcagcagatatacccag

SEQ ID NO: 234301 - DNA, 55 bp, Artificial
  Synthetic oligonucleotide
tgaggaaatgagctgcgaatattggtacagaagcgatgagtacagtgagttgtgt

SEQ ID NO: 234302 - DNA, 55 bp, Artificial
  Synthetic oligonucleotide
acagacttcgatgcatcgctttgacaggactgattatgatttgtaacggtatagg

SEQ ID NO: 234303 - DNA, 55 bp, Artificial
  Synthetic oligonucleotide
gccgcacggctatgtaaagggagagattacggaagccggggttcatacgcagtgg

SEQ ID NO: 234304 - DNA, 55 bp, Artificial
  Synthetic oligonucleotide
gattcgcctgaactctgaccgatgaagtttctccatgagatatccgtcctcagtg

SEQ ID NO: 234305 - DNA, 55 bp, Artificial
  Synthetic oligonucleotide
acacagctatggtaaaccacaatgggattggtcggaagacttcacttctgctagt

SEQ ID NO: 234306 - DNA, 55 bp, Artificial
  Synthetic oligonucleotide
tgatggttggacgcggagtgctggcagacccggcactgggaagagtcctgaaagg

SEQ ID NO: 234307 - DNA, 55 bp, Artificial
  Synthetic oligonucleotide
acaacagccgttcaaagtgtgtgtccctctcatgcttttctcagttttgtgacac

SEQ ID NO: 234308 - DNA, 59 bp, Artificial
  Synthetic oligonucleotide
ttacttgcagccggagcagtatattcactaatccttgcaaataaggaaaagataatact

SEQ ID NO: 234309 - DNA, 53 bp, Artificial
  Synthetic oligonucleotide
ttgttttaattggacaatctaaccgcttttaaccgagcattttaactggacgc

SEQ ID NO: 234310 - DNA, 55 bp, Artificial
  Synthetic oligonucleotide
tgcaaggagtgaacgcatatcttaaaaggctggctgtgcggcagatcgaacttgc

SEQ ID NO: 234311 - DNA, 55 bp, Artificial
  Synthetic oligonucleotide
tgcagccgatgcgagagatttacacagacaagttgatcggaacgattaacaaccg

SEQ ID NO: 234312 - DNA, 55 bp, Artificial
  Synthetic oligonucleotide
tgcccattccaggacttttacctgtatccagaaagcttcaccgtcgtgtatggta

SEQ ID NO: 234313 - DNA, 55 bp, Artificial
  Synthetic oligonucleotide
gcaaggatccccatattggacatataggtacaggctttctggtatccgtactgct

SEQ ID NO: 234314 - DNA, 55 bp, Artificial
  Synthetic oligonucleotide
aataagtagagggttccgctgctcgtgtatgttgatcgccgtttgctccgaacga

SEQ ID NO: 234315 - DNA, 55 bp, Artificial
  Synthetic oligonucleotide
gcacaggtgctttaatgggcggccacgcaaggtactcgccttcgtcaggcaagag

SEQ ID NO: 234316 - DNA, 55 bp, Artificial
  Synthetic oligonucleotide
tggatttgactttatcagttcttctgccgaattgcccagctttctccatgcgcgg

SEQ ID NO: 234317 - DNA, 55 bp, Artificial
  Synthetic oligonucleotide
tggcaagtcccgactgatgctcggagtgaccaggccttgcggagtatgtatcagc

SEQ ID NO: 234318 - DNA, 55 bp, Artificial
  Synthetic oligonucleotide
tggccagtgcatgtgccggggacaggaaaacaccatccgtgggagcttgactgtg

SEQ ID NO: 234319 - DNA, 55 bp, Artificial
  Synthetic oligonucleotide
gcactgccaaaatggtgatcgtaccatgcatcgatgatatacaccggaaccttgg

SEQ ID NO: 234320 - DNA, 55 bp, Artificial
  Synthetic oligonucleotide
ttgttctggtcgtgtcttatcttccgttctggtgcgacttccaacgttaccgccc

SEQ ID NO: 234321 - DNA, 55 bp, Artificial
  Synthetic oligonucleotide
tggtagccctcaaaacccaatgcccggcagaagcggaacaccgttgcctctgcta

SEQ ID NO: 234322 - DNA, 55 bp, Artificial
  Synthetic oligonucleotide
tggtcgatatacttacccgctatgcgcgaaaggtctgcgcgggataagtaccttg

SEQ ID NO: 234323 - DNA, 55 bp, Artificial
  Synthetic oligonucleotide
aagcgtgagaagtcgaaaactcggagttgctacggatatctagccgcttggggca

SEQ ID NO: 234324 - DNA, 55 bp, Artificial
  Synthetic oligonucleotide
aagccgttcatcgataactatgagaaacagcgcatgtttataacagatgcgggac

SEQ ID NO: 234325 - DNA, 55 bp, Artificial
  Synthetic oligonucleotide
aagcaggactacgaaaaggcggtctactggtacactcagtcctcagacagaggcg

SEQ ID NO: 234326 - DNA, 55 bp, Artificial
  Synthetic oligonucleotide
ctacttggaatgattctactctgtacccaacgcatactccaatctgaattcatgg

SEQ ID NO: 234327 - DNA, 55 bp, Artificial
  Synthetic oligonucleotide
ctatctacggacagacactggcagatgttacactccctacagccgatgacggtac

SEQ ID NO: 234328 - DNA, 55 bp, Artificial
  Synthetic oligonucleotide
ggttagcgtcagacggtcagagtacactatgtagtgcagaatcagcacactcccc

SEQ ID NO: 234329 - DNA, 55 bp, Artificial
  Synthetic oligonucleotide
ctcatccagcacaagatgcggcagttgggaacgcacaacttcggtgcgtatgccc

SEQ ID NO: 234330 - DNA, 55 bp, Artificial
  Synthetic oligonucleotide
gtaagtttgtctccgaaaatgactttacatccggcagttctctacgcagatcacg

SEQ ID NO: 234331 - DNA, 60 bp, Artificial
  Synthetic oligonucleotide
catgaacgaggagcttgcaagccgtatggatgaatatgcagcggataattatatgtctcg

SEQ ID NO: 234332 - DNA, 55 bp, Artificial
  Synthetic oligonucleotide
gtaataccaagttccgtgatcttgtactcagtgttggcataggcagtgacaccgc

SEQ ID NO: 234333 - DNA, 55 bp, Artificial
  Synthetic oligonucleotide
gtaatcttacggagatatctatgtgcgctcacaacggtactcatgtagatgcacc

SEQ ID NO: 234334 - DNA, 55 bp, Artificial
  Synthetic oligonucleotide
gtactctttctcgtcatagccgaatatttcactgccccggagtatactcccctgc

SEQ ID NO: 234335 - DNA, 55 bp, Artificial
  Synthetic oligonucleotide
aggctgccctcaattctgcgtcgctgtcatgcgaaggtgcagtaccctcacccac

SEQ ID NO: 234336 - DNA, 55 bp, Artificial
  Synthetic oligonucleotide
gtagccgttgagtagcccctctgtaaaataagcggtattgggatgcttcgcgtcc

SEQ ID NO: 234337 - DNA, 55 bp, Artificial
  Synthetic oligonucleotide
gtagcctgaaacctctgattgtctgacaacgtaggactctatctacatttccatc

SEQ ID NO: 234338 - DNA, 55 bp, Artificial
  Synthetic oligonucleotide
gtcactgctcagcaggattcccgttgccccggctgcctcagcggtacgaaagatc

SEQ ID NO: 234339 - DNA, 55 bp, Artificial
  Synthetic oligonucleotide
gtcatgcagggcgttggtatacactgcaaggcgcatggtataccggcagtggcaa

SEQ ID NO: 234340 - DNA, 55 bp, Artificial
  Synthetic oligonucleotide
ctccacaataagtacccttaatgctgtaatttgaaacggtactatcctgaatgag

SEQ ID NO: 234341 - DNA, 55 bp, Artificial
  Synthetic oligonucleotide
ctcctgctacatgatatgccactcccagatatcccggtctggataccaactgcac

SEQ ID NO: 234342 - DNA, 58 bp, Artificial
  Synthetic oligonucleotide
gatgaagtattcgacttcaaagaggactgtataaaacgtgaggggctgcacaaaggct

SEQ ID NO: 234343 - DNA, 55 bp, Artificial
  Synthetic oligonucleotide
gtccgataatgtattgaataacttccgtgagtgctatgagctgctttccaacgtg

SEQ ID NO: 234344 - DNA, 55 bp, Artificial
  Synthetic oligonucleotide
gtcggtctttgttcttgacgctctcgatatgtacgctggaacgctcttccggccg

SEQ ID NO: 234345 - DNA, 55 bp, Artificial
  Synthetic oligonucleotide
agcttacgacggttgaatttgtaacagtattcggcagcatataacgctgtgtgga

SEQ ID NO: 234346 - DNA, 55 bp, Artificial
  Synthetic oligonucleotide
ctctcatacctagtctgtgagctttattcgttacaatagactgaacttcctgact

SEQ ID NO: 234347 - DNA, 55 bp, Artificial
  Synthetic oligonucleotide
ctctcggaaatacggttcagcgagatctggaatccgtcgtagatccgcccgtagg

SEQ ID NO: 234348 - DNA, 55 bp, Artificial
  Synthetic oligonucleotide
gtgaaggacaatagcggcggatccttccgtttagcttacaataacggtgagatag

SEQ ID NO: 234349 - DNA, 55 bp, Artificial
  Synthetic oligonucleotide
atccaggtgcgggtgcgtttcatatcgttaaacctccatgggtggaaatagtcgg

SEQ ID NO: 234350 - DNA, 55 bp, Artificial
  Synthetic oligonucleotide
atcatgccgaccagttctccggtacacctggcacagattggaaactgtgtcccct

SEQ ID NO: 234351 - DNA, 55 bp, Artificial
  Synthetic oligonucleotide
atcaggaaactctcgcagcacagagttatgtcatcgcacaaagtctccaaaagtg

SEQ ID NO: 234352 - DNA, 55 bp, Artificial
  Synthetic oligonucleotide
atactttgcacctacgacatatggaaatgtccctcagaaccgtttgacattgcgg

SEQ ID NO: 234353 - DNA, 60 bp, Artificial
  Synthetic oligonucleotide
cgccctttcctgatgtgttgttagctgccattgtgttttctatgttggttctcattgctt

SEQ ID NO: 234354 - DNA, 55 bp, Artificial
  Synthetic oligonucleotide
atactggaacaaatcgtaggagttgagagcctttctacggtgcagctatttaagc

SEQ ID NO: 234355 - DNA, 55 bp, Artificial
  Synthetic oligonucleotide
gggtgacggaccgattcagggaattacagttactgcggactccaaaggccgtgta

SEQ ID NO: 234356 - DNA, 55 bp, Artificial
  Synthetic oligonucleotide
gggtgacgggttatttcacttatatatcgctaaagtgaacctgaccttcaagtcg

SEQ ID NO: 234357 - DNA, 55 bp, Artificial
  Synthetic oligonucleotide
gggttaacgtaagagtctgaggcgtatatcctctgtaaacgtcctccgcaggaag

SEQ ID NO: 234358 - DNA, 55 bp, Artificial
  Synthetic oligonucleotide
atacatccggtcctttcttgtaggcaaagcctaaatcgtggacttctagtaagtg

SEQ ID NO: 234359 - DNA, 55 bp, Artificial
  Synthetic oligonucleotide
ggtagaaaacctttcatacgccgaacgatatttcgtattcacgcaggagacatcc

SEQ ID NO: 234360 - DNA, 55 bp, Artificial
  Synthetic oligonucleotide
ataatctatgttaacgcttttaacatcgttcgcatgccaaatacgcatggaggtg

SEQ ID NO: 234361 - DNA, 55 bp, Artificial
  Synthetic oligonucleotide
ggtatttcatgactgcttttctgcctatgatctgaatcagggtaccaggacatac

SEQ ID NO: 234362 - DNA, 55 bp, Artificial
  Synthetic oligonucleotide
ggtcagcacctgcagactgaatacgctggtcagtccattgccgcaatcgtaggtg

SEQ ID NO: 234363 - DNA, 55 bp, Artificial
  Synthetic oligonucleotide
ggtcgagagtattcagtatcagagcatcggtcaaggtttccgtatggtcggcagc

SEQ ID NO: 234364 - DNA, 58 bp, Artificial
  Synthetic oligonucleotide
atatgtctcgttctggggtaatttcgttggcggtatcacagtttctgaatgcaaagga

SEQ ID NO: 234365 - DNA, 55 bp, Artificial
  Synthetic oligonucleotide
ctaccttatctacaatgacccgctgagctatgccgatttgattctgaacggtgac

SEQ ID NO: 234366 - DNA, 55 bp, Artificial
  Synthetic oligonucleotide
agttccgtcagatcagcagaatactcctcatatcgaaggatattactacacaggc

SEQ ID NO: 234367 - DNA, 55 bp, Artificial
  Synthetic oligonucleotide
ggtgagctgaagatagcatgcacatatagggcaaatgattataattcttctgccg

SEQ ID NO: 234368 - DNA, 55 bp, Artificial
  Synthetic oligonucleotide
ggtgcacagctcaatcagaccagaatttgtgataaatgtatggtgggctgacaga

SEQ ID NO: 234369 - DNA, 55 bp, Artificial
  Synthetic oligonucleotide
ggtggaggatacacaggtaacaggagtgatgacaccggagttcatacctctgtgt

SEQ ID NO: 234370 - DNA, 54 bp, Artificial
  Synthetic oligonucleotide
ggtgtcccggtggcgacttcgacttttcatggggcttcacaacctttccgcgcc

SEQ ID NO: 234371 - DNA, 55 bp, Artificial
  Synthetic oligonucleotide
gttataaaagacctgaaacgtattctgcccgagcagagagtaccgtacccttgcg

SEQ ID NO: 234372 - DNA, 55 bp, Artificial
  Synthetic oligonucleotide
agcgcggctatgtcattcagctcctgcaatgatacatttgacttcttcttgcggc

SEQ ID NO: 234373 - DNA, 55 bp, Artificial
  Synthetic oligonucleotide
ctgcgccgctatggactggagggcatccaaaacatctctggattcgtacagcttg

SEQ ID NO: 234374 - DNA, 55 bp, Artificial
  Synthetic oligonucleotide
gttggagaaggtattcttcgacataatcctcacgataactgcggttccgatcaca

SEQ ID NO: 234375 - DNA, 60 bp, Artificial
  Synthetic oligonucleotide
atagcgatgaccgaggacttgcagacggagaacgaacaacagagagccgaactgaacgaa

SEQ ID NO: 234376 - DNA, 55 bp, Artificial
  Synthetic oligonucleotide
gtttcgggttcaagtcgaacgtaacctcccaactctttcgcatgagagattcagc

SEQ ID NO: 234377 - DNA, 55 bp, Artificial
  Synthetic oligonucleotide
taaagatcgcaggaagcagcggttcggtaaccgggctggcaagcgcacttggggc

SEQ ID NO: 234378 - DNA, 55 bp, Artificial
  Synthetic oligonucleotide
agccgttccagacagcagtggatggctcagaacagtactgtctatgcattgcagg

SEQ ID NO: 234379 - DNA, 55 bp, Artificial
  Synthetic oligonucleotide
agccgtaccggagataccacggatgcagcgacatatgcgaactggtataagtccg

SEQ ID NO: 234380 - DNA, 55 bp, Artificial
  Synthetic oligonucleotide
ctgcggcgcaccaaagttcaatgacgaaagcgagaatgtcacctaccgtctcgac

SEQ ID NO: 234381 - DNA, 55 bp, Artificial
  Synthetic oligonucleotide
ctgggtacccggtatccacagatcctgcggtgcagtatcaccccatatatccgtg

SEQ ID NO: 234382 - DNA, 55 bp, Artificial
  Synthetic oligonucleotide
cttacggcaccgcacaggcggattatttctatagcaggatcaagaattatcccta

SEQ ID NO: 234383 - DNA, 55 bp, Artificial
  Synthetic oligonucleotide
cttcctgtccgttgacgataatagtgccgccgttgaattcagcatttccgtcata

SEQ ID NO: 234384 - DNA, 55 bp, Artificial
  Synthetic oligonucleotide
cttgtaccgcccatctctctcttctcgataacgatatccgaaggagcgtcatcga

SEQ ID NO: 234385 - DNA, 55 bp, Artificial
  Synthetic oligonucleotide
taccggactgcgattggaggctttggtatgaaaccatacgggcagatgcggagcc

SEQ ID NO: 234386 - DNA, 60 bp, Artificial
  Synthetic oligonucleotide
atagacacagttcgtggatttgtcaaaggcttgaccaagcaaggaatgtgtgtggattgg

SEQ ID NO: 234387 - DNA, 55 bp, Artificial
  Synthetic oligonucleotide
gaaacagcggatgggaaaactcttctcaaaagcgacccttatgccacgcacatgg

SEQ ID NO: 234388 - DNA, 55 bp, Artificial
  Synthetic oligonucleotide
taccggtgtgagaaagcgggttcggaactccgtcaggtcccggcaccgtggcagc

SEQ ID NO: 234389 - DNA, 55 bp, Artificial
  Synthetic oligonucleotide
gaaatagcgcatggcaaaccgtccgccaaacacaatctcgcgatgctccgacatc

SEQ ID NO: 234390 - DNA, 55 bp, Artificial
  Synthetic oligonucleotide
gaacgaggatgagacgctatgaatactacgatgactttagaacaactgcctccca

SEQ ID NO: 234391 - DNA, 55 bp, Artificial
  Synthetic oligonucleotide
tagtttccgtaggtccataaccattcataatgtaagcatccgggtttactctgcg

SEQ ID NO: 234392 - DNA, 55 bp, Artificial
  Synthetic oligonucleotide
agaatgttaccagtccgttcgcatctactgttgcgatactgtcatcggaggtact

SEQ ID NO: 234393 - DNA, 55 bp, Artificial
  Synthetic oligonucleotide
gtgtttcagctttcccgacaagctcaggagaattcttctgcacaacaagcgcccc

SEQ ID NO: 234394 - DNA, 55 bp, Artificial
  Synthetic oligonucleotide
gtgacttcgccgacgtttcgtccgtatgcgaacatgaaccatgcggtaccgaatg

SEQ ID NO: 234395 - DNA, 55 bp, Artificial
  Synthetic oligonucleotide
ctgacgagcactgggtatatctgctgatgcgagctcgactttcttgatgcaggaa

SEQ ID NO: 234396 - DNA, 55 bp, Artificial
  Synthetic oligonucleotide
gtgtttatcgtaacctgagtggcagtgtgtgcggttgacttcgatagcgtgttca

SEQ ID NO: 234397 - DNA, 60 bp, Artificial
  Synthetic oligonucleotide
cataatctgcaagcgaatttagattgggtgtttctgcgcacataatataagacacttctt

SEQ ID NO: 234398 - DNA, 55 bp, Artificial
  Synthetic oligonucleotide
ctgaggtacatagcctcatattttaacaatgccgtataactttcataaagcggca

SEQ ID NO: 234399 - DNA, 54 bp, Artificial
  Synthetic oligonucleotide
gtggggtattatagcaaagtataccgctttcccgcaaggcatattgtaaacggg

SEQ ID NO: 234400 - DNA, 54 bp, Artificial
  Synthetic oligonucleotide
cgtctgaaacggttgctcttgataaagcggtatatcattccgaggattgttctg

SEQ ID NO: 234401 - DNA, 54 bp, Artificial
  Synthetic oligonucleotide
taagtgccgcctgcggttagaacgccctcgatgatgtgtgcttcgttggtgctt

SEQ ID NO: 234402 - DNA, 53 bp, Artificial
  Synthetic oligonucleotide
gtggtggaaacgccgtgtgaccgagattgagggcggacaccgttatttttacc

SEQ ID NO: 234403 - DNA, 54 bp, Artificial
  Synthetic oligonucleotide
gcagcggataattatatgtctcgttctggggtaatttcgttggcggtatcacag

SEQ ID NO: 234404 - DNA, 54 bp, Artificial
  Synthetic oligonucleotide
cgactacaacgacaccggctaaagatagcagtaaggtagttccgaccggagaca

SEQ ID NO: 234405 - DNA, 54 bp, Artificial
  Synthetic oligonucleotide
tgacagcgtccattgaaggcagcagaggaatgccgcgtgtgaaacctcctcgta

SEQ ID NO: 234406 - DNA, 54 bp, Artificial
  Synthetic oligonucleotide
tatggcagtgcgtagaggacgctaatatagcgtggcattgcggagcgtcgagct

SEQ ID NO: 234407 - DNA, 54 bp, Artificial
  Synthetic oligonucleotide
gaataatctagtatcgaagttcatactgtccagtgatcaggaaaacgattggca

SEQ ID NO: 234408 - DNA, 60 bp, Artificial
  Synthetic oligonucleotide
gccagccaattcaaattatggtagacgttttgagcttatctctagcaatccagatgctgt

SEQ ID NO: 234409 - DNA, 54 bp, Artificial
  Synthetic oligonucleotide
cgaggacacggagcagatcaacgtggcatcgtgggcggcttggaacgagagaca

SEQ ID NO: 234410 - DNA, 54 bp, Artificial
  Synthetic oligonucleotide
atcggatctcttgatctgtgccatgctgtcgatcttatacattccatccagccg

SEQ ID NO: 234411 - DNA, 54 bp, Artificial
  Synthetic oligonucleotide
ttcgctacgctcacatggtgtatttaagtgcgctctccgagggcaagagcgttc

SEQ ID NO: 234412 - DNA, 54 bp, Artificial
  Synthetic oligonucleotide
cggacacacatggctaggtgcgtggtcagggttcgtgaatggttcgtgcggttg

SEQ ID NO: 234413 - DNA, 54 bp, Artificial
  Synthetic oligonucleotide
gcccggaagatttaactgtatcggataagctccaagtgcaaggatcagactgtc

SEQ ID NO: 234414 - DNA, 54 bp, Artificial
  Synthetic oligonucleotide
ctctcctgactgcggcagacttacagaacccggatattatctgcgcggacgaac

SEQ ID NO: 234415 - DNA, 54 bp, Artificial
  Synthetic oligonucleotide
gaagattctggccagtgcatgtgccggggacaggaaaacaccatccgtgggagc

SEQ ID NO: 234416 - DNA, 54 bp, Artificial
  Synthetic oligonucleotide
cgttatagaactgtcctacaactccgccaccgttaaaaccagaggtatctgtta

SEQ ID NO: 234417 - DNA, 54 bp, Artificial
  Synthetic oligonucleotide
gggtaggatgataggcataccaatcgatccggttaccatctacccaaatatgcg

SEQ ID NO: 234418 - DNA, 54 bp, Artificial
  Synthetic oligonucleotide
tttccgagaaatgtcatcgacagccgtgtcaacactgcggcacaattcctcgga

SEQ ID NO: 234419 - DNA, 60 bp, Artificial
  Synthetic oligonucleotide
cactaaccaagaagctgtcagagcagcaacggcagacacagacagtactatccgacaatc

SEQ ID NO: 234420 - DNA, 59 bp, Artificial
  Synthetic oligonucleotide
ttatcctgctgagatcgaaacgatatattgccgtcgtatccggagtaaacgtataatta

SEQ ID NO: 234421 - DNA, 54 bp, Artificial
  Synthetic oligonucleotide
ggaaatcattgtgaagcgctacggtgcgttctggatgcttacccgggtgtggta

SEQ ID NO: 234422 - DNA, 54 bp, Artificial
  Synthetic oligonucleotide
ccccaccgatacatatacgctgccaagcccaacttccgtcagctccgcacacaa

SEQ ID NO: 234423 - DNA, 54 bp, Artificial
  Synthetic oligonucleotide
gcaagactaagggcagggcggatactggctgaggaaagtcctgcggatgcggat

SEQ ID NO: 234424 - DNA, 54 bp, Artificial
  Synthetic oligonucleotide
tcctgcacaagtgccggcgtctttgtcagacatggatatcgctccgcatgggct

SEQ ID NO: 234425 - DNA, 54 bp, Artificial
  Synthetic oligonucleotide
ccgtgaattcagtcgggatgtaggtctttgtgaagccgagagcttttgcgtagc

SEQ ID NO: 234426 - DNA, 54 bp, Artificial
  Synthetic oligonucleotide
gttcgtaggaataggtctgcatatcggtgacaagtacagaatagcctgtgcagc

SEQ ID NO: 234427 - DNA, 54 bp, Artificial
  Synthetic oligonucleotide
ctgcggcaggaaagatgtgttatgctgccgttcctgtaccatccgtcccagatc

SEQ ID NO: 234428 - DNA, 54 bp, Artificial
  Synthetic oligonucleotide
gaccgtaatagcgtcctggagttcggcattttgggattatgatataaccgtttc

SEQ ID NO: 234429 - DNA, 54 bp, Artificial
  Synthetic oligonucleotide
gccgcgtggtgcgaggtcgaaagaatgtacccgcaagtgaccgtgtgggaaaca

SEQ ID NO: 234430 - DNA, 54 bp, Artificial
  Synthetic oligonucleotide
gacaggcactattgtaccataagtatttgttccgttatctgtcaactgtatcgc

SEQ ID NO: 234431 - DNA, 55 bp, Artificial
  Synthetic oligonucleotide
aacgtccagaatatcaaacaagatactgtaagaaaatagtatcaggaaacgttat

SEQ ID NO: 234432 - DNA, 54 bp, Artificial
  Synthetic oligonucleotide
gcacattggcatgatccacatgggcagtggaaccttctctggacgtatagtagt

SEQ ID NO: 234433 - DNA, 54 bp, Artificial
  Synthetic oligonucleotide
cggagacatcggcctgtcactgcaactgacaaccagttacatggcggcgatgct

SEQ ID NO: 234434 - DNA, 54 bp, Artificial
  Synthetic oligonucleotide
ggcagtcctgtccggatgaccgcaatgatctgtggtgccagggttgctaccaga

SEQ ID NO: 234435 - DNA, 54 bp, Artificial
  Synthetic oligonucleotide
gtcagcgccgaacagatcacgataccaaaccgccgtttccttcgcacacgcata

SEQ ID NO: 234436 - DNA, 54 bp, Artificial
  Synthetic oligonucleotide
gccgtctcaccagggatccggatgtgcggtacacggatggcgggacaagcattg

SEQ ID NO: 234437 - DNA, 54 bp, Artificial
  Synthetic oligonucleotide
tgtagatctgtgcaggacttatgcagaggcttccggtggaagtgtgactctgac

SEQ ID NO: 234438 - DNA, 54 bp, Artificial
  Synthetic oligonucleotide
tgtctacagcgagaccgaactgaggtcgcgtgttgatatcctgctggacgaata

SEQ ID NO: 234439 - DNA, 54 bp, Artificial
  Synthetic oligonucleotide
cgggattgcacacgcagggacctccgcccacaacaagcggcgtcagtgatttac

SEQ ID NO: 234440 - DNA, 54 bp, Artificial
  Synthetic oligonucleotide
aagcaatactgaaagcggagataccttcaacgcaaagataggcgattccaccgc

SEQ ID NO: 234441 - DNA, 54 bp, Artificial
  Synthetic oligonucleotide
ccgatagcttgacgcgcccattgccccgatttcgcaacacccagagccaatgac

SEQ ID NO: 234442 - DNA, 60 bp, Artificial
  Synthetic oligonucleotide
gaaaggcggagcgagggcaggagcaggcgcaaagccaaaatacggctgcaagaccgtgac

SEQ ID NO: 234443 - DNA, 54 bp, Artificial
  Synthetic oligonucleotide
taactttgaatgagccgtgcacgtatgaacggttatctggccttcttggatcag

SEQ ID NO: 234444 - DNA, 53 bp, Artificial
  Synthetic oligonucleotide
ctgactgtcatagccgcttcctttgattccttccagtatcgccaccggctgtc

SEQ ID NO: 234445 - DNA, 53 bp, Artificial
  Synthetic oligonucleotide
cgtactctgcccgctgtgatgtgcgcggctacagtcctgataagttcggggtg

SEQ ID NO: 234446 - DNA, 53 bp, Artificial
  Synthetic oligonucleotide
gcaataaagttcctgtataagccgacagtgcctgcgtcaggctttcccgcata

SEQ ID NO: 234447 - DNA, 53 bp, Artificial
  Synthetic oligonucleotide
cgtaacaaacgatgagacaggcgagtctgagaactacatgataccatacaacc

SEQ ID NO: 234448 - DNA, 53 bp, Artificial
  Synthetic oligonucleotide
ctcggagatagcgtcaaatctgcgtatgtatgcccataaccctcagtctcata

SEQ ID NO: 234449 - DNA, 53 bp, Artificial
  Synthetic oligonucleotide
cagcagtagcggggcttatccagctggacgacttaagcgtagcgtctacgggg

SEQ ID NO: 234450 - DNA, 53 bp, Artificial
  Synthetic oligonucleotide
gtccctcaatgataggtattcatcacagggaaaagcgtccattttgtatacgt

SEQ ID NO: 234451 - DNA, 53 bp, Artificial
  Synthetic oligonucleotide
tcgagatgtgatattaggaattgttccaccggcaatgtttcagagaccaattt

SEQ ID NO: 234452 - DNA, 53 bp, Artificial
  Synthetic oligonucleotide
cactcggactttgatgatgtgtgtctttcgttttcgcggcgtgtcattgcggt

SEQ ID NO: 234453 - DNA, 60 bp, Artificial
  Synthetic oligonucleotide
cgtgtctggccgtactctggatcctgcgcagctctctccgttttcacctacgtggttctc

SEQ ID NO: 234454 - DNA, 53 bp, Artificial
  Synthetic oligonucleotide
tccggatacctggacagtcaccgccgcctttggagagcgggtgggtacgccca

SEQ ID NO: 234455 - DNA, 53 bp, Artificial
  Synthetic oligonucleotide
taccacagctatactgtgcgtagtttcttgaacgcattgcttgctgtccataa

SEQ ID NO: 234456 - DNA, 53 bp, Artificial
  Synthetic oligonucleotide
caacgcatatcccgaaacacccatccgatccagaataccggaaagataatagt

SEQ ID NO: 234457 - DNA, 53 bp, Artificial
  Synthetic oligonucleotide
tcccaatatatgcctgcgcacgcgaaagcaccagcggtacctcgcctttgatc

SEQ ID NO: 234458 - DNA, 53 bp, Artificial
  Synthetic oligonucleotide
agataatcacaacgatactcgatacaggcatcgcagaccactttatcaacgaa

SEQ ID NO: 234459 - DNA, 53 bp, Artificial
  Synthetic oligonucleotide
ggtttgggcgcctgagtctgccaggatgcatttgcagcgaaaccgtatggaag

SEQ ID NO: 234460 - DNA, 53 bp, Artificial
  Synthetic oligonucleotide
tatgcatgggccggccgttttgggaggtcgatgccattgtttactgatatcac

SEQ ID NO: 234461 - DNA, 53 bp, Artificial
  Synthetic oligonucleotide
tagggttgcagaacttgaacgccaattagaatatgaaagggctaattccgaag

SEQ ID NO: 234462 - DNA, 53 bp, Artificial
  Synthetic oligonucleotide
atcggacgaaatgccgatttgccgcagggccgcttgtacctgttcggttgtag

SEQ ID NO: 234463 - DNA, 53 bp, Artificial
  Synthetic oligonucleotide
gggcatcagtactgccgtgctttcggttgtcagcgtcctgcggattttgagcg

SEQ ID NO: 234464 - DNA, 60 bp, Artificial
  Synthetic oligonucleotide
cgatgccacagaacttatctggtagggttccgccatatcgtttcgcacacatcgacagat

SEQ ID NO: 234465 - DNA, 53 bp, Artificial
  Synthetic oligonucleotide
ggggccccggcctttgtgacgcactatatgtactcactcgccctgccgaatac

SEQ ID NO: 234466 - DNA, 53 bp, Artificial
  Synthetic oligonucleotide
agaaaaacggggaaatattacctacataaatgctgatggtgaacggaatatct

SEQ ID NO: 234467 - DNA, 53 bp, Artificial
  Synthetic oligonucleotide
ataagattccgttcgtaccttcgcttctcgtggaattccgcaaaagactatcg

SEQ ID NO: 234468 - DNA, 53 bp, Artificial
  Synthetic oligonucleotide
ggtctcgataacgttgcctatctcagcaattataacgttttccttgggcattc

SEQ ID NO: 234469 - DNA, 53 bp, Artificial
  Synthetic oligonucleotide
tttgatgaagcgtagcacagcggaagagtgtacataatgctgtcagggaatga

SEQ ID NO: 234470 - DNA, 53 bp, Artificial
  Synthetic oligonucleotide
cgcatatagccgcattcgtccgataccgtgtcaccaaaggagcgccctttgct

SEQ ID NO: 234471 - DNA, 53 bp, Artificial
  Synthetic oligonucleotide
ttgtctgcagcgttgctggggtagatcgcagcactgcctgtggtgctctctcc

SEQ ID NO: 234472 - DNA, 53 bp, Artificial
  Synthetic oligonucleotide
cctgacgggcataacaaacggatacaacctgacttcaatgggatactcaataa

SEQ ID NO: 234473 - DNA, 53 bp, Artificial
  Synthetic oligonucleotide
gttgcagtctgaatttgcaggcggtcaaggttgtcgattatatcgaggacgta

SEQ ID NO: 234474 - DNA, 53 bp, Artificial
  Synthetic oligonucleotide
cctagcttggcagtcctgtccggatgaccgcaatgatctgtggtgccagggtt

SEQ ID NO: 234475 - DNA, 60 bp, Artificial
  Synthetic oligonucleotide
atcgcttttctgacggtctgaacagatattccgagctgttctgcaatagctttgtacgcc

SEQ ID NO: 234476 - DNA, 53 bp, Artificial
  Synthetic oligonucleotide
taaccacatccgatagcttgacgcgcccattgccccgatttcgcaacacccag

SEQ ID NO: 234477 - DNA, 53 bp, Artificial
  Synthetic oligonucleotide
ttcggcagcccagacatcatatgggacatggtcccttcggacacgcagcctca

SEQ ID NO: 234478 - DNA, 53 bp, Artificial
  Synthetic oligonucleotide
aactatccgttgcccagcccgccgcacggattccattcataaatcccctggcg

SEQ ID NO: 234479 - DNA, 53 bp, Artificial
  Synthetic oligonucleotide
aactccctgctcatactctgacaggtgtgtgaagctggtacccacatagccca

SEQ ID NO: 234480 - DNA, 53 bp, Artificial
  Synthetic oligonucleotide
tggctatcaggataacttcgtcgcagtttctagtttgctcgtcaaagtatgcc

SEQ ID NO: 234481 - DNA, 53 bp, Artificial
  Synthetic oligonucleotide
aatcagtatcacgttttgcaagaaacacctcaatcgttctggaagctacacga

SEQ ID NO: 234482 - DNA, 53 bp, Artificial
  Synthetic oligonucleotide
tgcatctctgccccgcttcagatcggtgcaaagtttaccattaccgccaccgt

SEQ ID NO: 234483 - DNA, 53 bp, Artificial
  Synthetic oligonucleotide
acagtcatcacagcggacggaggggagcttgaccccgatattaaagtaacata

SEQ ID NO: 234484 - DNA, 53 bp, Artificial
  Synthetic oligonucleotide
agctgtatttaccccgataatgcttactataggcggcatgatacatggtgatc

SEQ ID NO: 234485 - DNA, 53 bp, Artificial
  Synthetic oligonucleotide
tctctgagggtcagctgcccggctgtgccgatgtaacggtctaccatgccggt

SEQ ID NO: 234486 - DNA, 60 bp, Artificial
  Synthetic oligonucleotide
ttctgattatatggactatgttgaggggaacggcatgactttgtgcagcggtctgactta

SEQ ID NO: 234487 - DNA, 53 bp, Artificial
  Synthetic oligonucleotide
gctcgctgtagggcgtatcatcgaccctcctgtgcttatccttagtatatgca

SEQ ID NO: 234488 - DNA, 52 bp, Artificial
  Synthetic oligonucleotide
agatacagataggtgcatatgcagagtacaattaaggcagtcagacggctgt

SEQ ID NO: 234489 - DNA, 52 bp, Artificial
  Synthetic oligonucleotide
agagccactttcacactcacacccgcctccgtttccagccatgccggacact

SEQ ID NO: 234490 - DNA, 52 bp, Artificial
  Synthetic oligonucleotide
ctggaacgggtctttccgcagatcgggcttcggtttatcgccatcaaggaaa

SEQ ID NO: 234491 - DNA, 52 bp, Artificial
  Synthetic oligonucleotide
agaactcagctctgattccgtcacgcggactgcgctagttgctgccaccgag

SEQ ID NO: 234492 - DNA, 52 bp, Artificial
  Synthetic oligonucleotide
gtgctacgacgtatatggcaaaacaaaacggccgctcaatgatatcctttcg

SEQ ID NO: 234493 - DNA, 52 bp, Artificial
  Synthetic oligonucleotide
agaaacgatacaccggatgagtaatgtccatgatctgacgggctccgtaaat

SEQ ID NO: 234494 - DNA, 52 bp, Artificial
  Synthetic oligonucleotide
gaaggacgcaggtgtggtgttcaaggccccgtggcagtccatcgtgaagatg

SEQ ID NO: 234495 - DNA, 52 bp, Artificial
  Synthetic oligonucleotide
actgtaatgatacaatttgtatgaaggaatactatcaaactgtttagtagtg

SEQ ID NO: 234496 - DNA, 52 bp, Artificial
  Synthetic oligonucleotide
tcaagaggcgttagtatggaccaaggattgcattgcagcgttggaggagttg

SEQ ID NO: 234497 - DNA, 60 bp, Artificial
  Synthetic oligonucleotide
tagcgagctgatcgacatatatcgagactgtctgatacttacagtgccgctttctgatct

SEQ ID NO: 234498 - DNA, 52 bp, Artificial
  Synthetic oligonucleotide
tcacaggcgagcttctcgcaagagtacgtgccctcacaaggcgaaagggcga

SEQ ID NO: 234499 - DNA, 52 bp, Artificial
  Synthetic oligonucleotide
actctgaccgtcagcagtgcggacaacgaagatttggataccaagctgtcct

SEQ ID NO: 234500 - DNA, 52 bp, Artificial
  Synthetic oligonucleotide
tccacttcgtctaacggaattacttctccttcgacaggcgcatacacttcgt

SEQ ID NO: 234501 - DNA, 52 bp, Artificial
  Synthetic oligonucleotide
acgggctgaggtaaagcgggtcctgcactgcgatgcaacaaccaagtgtgga

SEQ ID NO: 234502 - DNA, 52 bp, Artificial
  Synthetic oligonucleotide
tctcgcatcggcattatctatcaatactctggtgatagctcccataaacata

SEQ ID NO: 234503 - DNA, 52 bp, Artificial
  Synthetic oligonucleotide
tctctggtcacgataacataatagttatccgtctgctgaatcgcacgcgcaa

SEQ ID NO: 234504 - DNA, 52 bp, Artificial
  Synthetic oligonucleotide
tgagatcttgaattgaggtacccacatggatggtaggctgcaaaaccaggga

SEQ ID NO: 234505 - DNA, 52 bp, Artificial
  Synthetic oligonucleotide
aaccactgagctctttccctgctctgcgctccggttccaagacccggtccta

SEQ ID NO: 234506 - DNA, 52 bp, Artificial
  Synthetic oligonucleotide
aaatggcacaacggccggacattagatgagcggtgtccccgggatcagggca

SEQ ID NO: 234507 - DNA, 52 bp, Artificial
  Synthetic oligonucleotide
gccgaataaacaagccgaacctcccgcaagggagtttgcaataacatccgct

SEQ ID NO: 234508 - DNA, 60 bp, Artificial
  Synthetic oligonucleotide
gctgtacgcacatatatttcgggcgtggtaaggtcaaagacgaataagagttcattatca

SEQ ID NO: 234509 - DNA, 52 bp, Artificial
  Synthetic oligonucleotide
cgtttatgagggcgtccacaatctcaaaggacatatcctgctgcccctcacg

SEQ ID NO: 234510 - DNA, 52 bp, Artificial
  Synthetic oligonucleotide
ctacggcctcggagagccaaatccctgccgtgcagtcattcgccgctatcgc

SEQ ID NO: 234511 - DNA, 52 bp, Artificial
  Synthetic oligonucleotide
caactgataaggacttaagacagataccggaagtttcccgaagaacgcaaag

SEQ ID NO: 234512 - DNA, 52 bp, Artificial
  Synthetic oligonucleotide
agtccgcagttatactcatagctgtcacggtaaacaagctcctcacggtagg

SEQ ID NO: 234513 - DNA, 52 bp, Artificial
  Synthetic oligonucleotide
atttgccggattcaagagcaaccagcattgccggtgcactttcctgtgccgg

SEQ ID NO: 234514 - DNA, 52 bp, Artificial
  Synthetic oligonucleotide
ccacgcaggtcaaagtccccagactgcactttcacgggtgacgagggtggga

SEQ ID NO: 234515 - DNA, 52 bp, Artificial
  Synthetic oligonucleotide
atggctggctgtcattgtacgcatccccaagatagttcctggatgcactgat

SEQ ID NO: 234516 - DNA, 52 bp, Artificial
  Synthetic oligonucleotide
ccgacgcactgaggtaagccgccccacacatgcccggacttccggcaacgac

SEQ ID NO: 234517 - DNA, 52 bp, Artificial
  Synthetic oligonucleotide
cataccccggttgccacatggggtcttacgcacattaccccaagtaaagcgg

SEQ ID NO: 234518 - DNA, 51 bp, Artificial
  Synthetic oligonucleotide
acacctgacctgcgatagcgatcttttcacccacaggcggaggcataacga

SEQ ID NO: 234519 - DNA, 56 bp, Artificial
  Synthetic oligonucleotide
cgttcaggtgctgtgtctaaaggacgccccgaccccacacgacacaagagtgggcg

SEQ ID NO: 234520 - DNA, 51 bp, Artificial
  Synthetic oligonucleotide
gcgtgaatacgaggatattaccatgccttcggggaattaccgtgctctgcg

SEQ ID NO: 234521 - DNA, 51 bp, Artificial
  Synthetic oligonucleotide
cagtacatctcccagtgcacccgggatcaggcccagaagcgcggaacttgc

SEQ ID NO: 234522 - DNA, 51 bp, Artificial
  Synthetic oligonucleotide
cggtgcaggggtaggagttgctttcgctgctttggttggctccggtgtagg

SEQ ID NO: 234523 - DNA, 51 bp, Artificial
  Synthetic oligonucleotide
tctacatagcattgagcagatatcggaaaggatgctctccaccccgacgga

SEQ ID NO: 234524 - DNA, 51 bp, Artificial
  Synthetic oligonucleotide
acctgctgcccggatcacagccgctgccaccggatcactcggcatcctgac

SEQ ID NO: 234525 - DNA, 51 bp, Artificial
  Synthetic oligonucleotide
tcggctgtaccagcggcagtcccgctctgcttgcacgacggttcatggtgt

SEQ ID NO: 234526 - DNA, 51 bp, Artificial
  Synthetic oligonucleotide
cagatactccggtatatctgcatcttccggcagtgacctatgacggagata

SEQ ID NO: 234527 - DNA, 51 bp, Artificial
  Synthetic oligonucleotide
tccgggatttgcgggacagccgatcgcacatacagacggactgtggaacgc

SEQ ID NO: 234528 - DNA, 51 bp, Artificial
  Synthetic oligonucleotide
tgaggggaacggcatgactttgtgcagcggtctgacttatcatagccgcag

SEQ ID NO: 234529 - DNA, 51 bp, Artificial
  Synthetic oligonucleotide
gattttgcaggcaaccccgtagccggacgaagcctccagtcccagacgatt

SEQ ID NO: 234530 - DNA, 60 bp, Artificial
  Synthetic oligonucleotide
ttacaacgattggaacaagaaagagcgtgtcgaggaatggagagctgcgtgggctgcttg

SEQ ID NO: 234531 - DNA, 56 bp, Artificial
  Synthetic oligonucleotide
aaagtgttcaaggttgcgggatgtgcaacggaacgtggacaggtgtagtgtcggaa

SEQ ID NO: 234532 - DNA, 51 bp, Artificial
  Synthetic oligonucleotide
tgcgatcgatgggtattcgcccctaccccgaaagcttttcccagcttatca

SEQ ID NO: 234533 - DNA, 51 bp, Artificial
  Synthetic oligonucleotide
ccccgttggatttggaatgcacctcggtaagtggggacttgcacccacact

SEQ ID NO: 234534 - DNA, 51 bp, Artificial
  Synthetic oligonucleotide
gccgcaagtaccgtcggactgtcaatgtcacccggacactgggcaatggca

SEQ ID NO: 234535 - DNA, 51 bp, Artificial
  Synthetic oligonucleotide
aactgtgattgtgtcgtccgctgctgctacacccactgccggaacaacgct

SEQ ID NO: 234536 - DNA, 51 bp, Artificial
  Synthetic oligonucleotide
cccgtcgctttcagacagggctgtgccgtatccatcgccctgccaagggga

SEQ ID NO: 234537 - DNA, 51 bp, Artificial
  Synthetic oligonucleotide
ccgacggctcgcatatacaaagaggcttacacaggaactaagacctcaggg

SEQ ID NO: 234538 - DNA, 51 bp, Artificial
  Synthetic oligonucleotide
gcatacttgcttacactccacaataccagattctgtccataatctgcgttt

SEQ ID NO: 234539 - DNA, 51 bp, Artificial
  Synthetic oligonucleotide
ccgcatgctcccatcgcagttccaatggtttacgcgaccacacagcgccac

SEQ ID NO: 234540 - DNA, 51 bp, Artificial
  Synthetic oligonucleotide
cctccttcggaccgctcacaacccgcccgtactccacaccccgggcagttt

SEQ ID NO: 234541 - DNA, 51 bp, Artificial
  Synthetic oligonucleotide
ccttatcaaactccacccagtctggattgcgccacatagctctagtcacga

SEQ ID NO: 234542 - DNA, 57 bp, Artificial
  Synthetic oligonucleotide
gctgatatcgagatcttgaccgatgttcgtatcgagcgtaataagcggaactatcaa

SEQ ID NO: 234543 - DNA, 51 bp, Artificial
  Synthetic oligonucleotide
cgcctgtccgtagcactgattcccgcaggtcccgccacaatcactctgaca

SEQ ID NO: 234544 - DNA, 51 bp, Artificial
  Synthetic oligonucleotide
ttgtgtcgtccgctgctgctacacccactgccggaacaacgctcataccgc

SEQ ID NO: 234545 - DNA, 51 bp, Artificial
  Synthetic oligonucleotide
cgctggagtaaagggacgaaagtgttcttgagaaacggccttcggctatct

SEQ ID NO: 234546 - DNA, 51 bp, Artificial
  Synthetic oligonucleotide
agcgtagcgtaagtatcgagagccacgcttctccatgtggggatagcaatt

SEQ ID NO: 234547 - DNA, 51 bp, Artificial
  Synthetic oligonucleotide
agcgtgatgttatacgctgcttcgtgcgtcgtgttgagtgggacggcgaga

SEQ ID NO: 234548 - DNA, 51 bp, Artificial
  Synthetic oligonucleotide
agctgccttcgccaggaaccactgagctctttccctgctctgcgctccggt

SEQ ID NO: 234549 - DNA, 51 bp, Artificial
  Synthetic oligonucleotide
gtccccggcgcggactcaccgtatctccctggtgtgggcgtaatacccttc

SEQ ID NO: 234550 - DNA, 51 bp, Artificial
  Synthetic oligonucleotide
aggatctgtctggcacaggcactgtctccgagatgacctcttgtcacgatc

SEQ ID NO: 234551 - DNA, 51 bp, Artificial
  Synthetic oligonucleotide
agtacgtccatgtgatgccgcaaatcttctggttacatgtttcgcttccag

SEQ ID NO: 234552 - DNA, 51 bp, Artificial
  Synthetic oligonucleotide
tacggcgagctgggaatcatgtccgtgagcagtgagtatctgtcagggcga

SEQ ID NO: 234553 - DNA, 57 bp, Artificial
  Synthetic oligonucleotide
agccacaccgaaagttaccttgtaacccagtgcggaaggagtgccgcttgcaggcca

SEQ ID NO: 234554 - DNA, 51 bp, Artificial
  Synthetic oligonucleotide
gaaatcgcaccatccgccaaatcggacgaaaccagcgaggttgtcggcata

SEQ ID NO: 234555 - DNA, 51 bp, Artificial
  Synthetic oligonucleotide
gaaccgtgtggttcgcgggtaccattcgccccgtaaatttgccgacgccaa

SEQ ID NO: 234556 - DNA, 51 bp, Artificial
  Synthetic oligonucleotide
atcattaagtccccggcgcggactcaccgtatctccctggtgtgggcgtaa

SEQ ID NO: 234557 - DNA, 51 bp, Artificial
  Synthetic oligonucleotide
ggggcatggcttcacaaagattcagggtgttcctgatgaatgtgataatct

SEQ ID NO: 234558 - DNA, 51 bp, Artificial
  Synthetic oligonucleotide
gagagcggctcaggcaggtacgcgtcaggagaaaactgaccgggcagagag

SEQ ID NO: 234559 - DNA, 51 bp, Artificial
  Synthetic oligonucleotide
caccctatacgctatcgaaccgtgtggttcgcgggtaccattcgccccgta

SEQ ID NO: 234560 - DNA, 51 bp, Artificial
  Synthetic oligonucleotide
tccgaattacacggtgttcactataagcctgacaacggacttcgcctctgg

SEQ ID NO: 234561 - DNA, 51 bp, Artificial
  Synthetic oligonucleotide
ggccattaacccgggaagtctgtcctatccacgccagcacggcagaaagcc

SEQ ID NO: 234562 - DNA, 51 bp, Artificial
  Synthetic oligonucleotide
atctaatgtcttcccggcatgctccataaccagttccttccgggttattca

SEQ ID NO: 234563 - DNA, 51 bp, Artificial
  Synthetic oligonucleotide
gaaggccgaaagtccccctcagacgccccctgcttggccacgctaagagca

SEQ ID NO: 234564 - DNA, 57 bp, Artificial
  Synthetic oligonucleotide
cgatagtctcatactaaaatttccttccggattcagatataaactcttcgtactgtc

SEQ ID NO: 234565 - DNA, 51 bp, Artificial
  Synthetic oligonucleotide
atctcacagttgcgaaggccgaaagtccccctcagacgccccctgcttggc

SEQ ID NO: 234566 - DNA, 50 bp, Artificial
  Synthetic oligonucleotide
gcggagctaatccctctttcattcgttgcaaattcgttcttccctttgag

SEQ ID NO: 234567 - DNA, 50 bp, Artificial
  Synthetic oligonucleotide
taaaggcagttcagtaccgttatgaaaagagattcggagtcagagtagag

SEQ ID NO: 234568 - DNA, 50 bp, Artificial
  Synthetic oligonucleotide
tcccctgcctgatatggcagtccgtcctgtaagcagatcgctggagccta

SEQ ID NO: 234569 - DNA, 50 bp, Artificial
  Synthetic oligonucleotide
ttgcctgtgcggcaaatcctgtagaacccgtaaacacagcctccccggga

SEQ ID NO: 234570 - DNA, 50 bp, Artificial
  Synthetic oligonucleotide
gtctggactgccacagcaaagagggcatcccagggaaacgtgggacgtcc

SEQ ID NO: 234571 - DNA, 50 bp, Artificial
  Synthetic oligonucleotide
ggagtctgatatcctcagcccatttggtccattctacaccttcgaaacgg

SEQ ID NO: 234572 - DNA, 50 bp, Artificial
  Synthetic oligonucleotide
gtactcttgttttgctattttcgcaccgtccaatgcttttcggaaaggca

SEQ ID NO: 234573 - DNA, 50 bp, Artificial
  Synthetic oligonucleotide
tacccggatgggctgactgtgcttgccccgattgagacatggtcggatga

SEQ ID NO: 234574 - DNA, 50 bp, Artificial
  Synthetic oligonucleotide
ggcttccgttccctgtccccgatccgattatcgagtataagtgttccgtt

SEQ ID NO: 234575 - DNA, 55 bp, Artificial
  Synthetic oligonucleotide
agtggggtcggcacccaccctgcccaccatatgttggcataaccctaactggtaa

SEQ ID NO: 234576 - DNA, 50 bp, Artificial
  Synthetic oligonucleotide
tctgtgtcgcacagcccggaaaaccagtagtctgtgtgaccggtgaggga

SEQ ID NO: 234577 - DNA, 50 bp, Artificial
  Synthetic oligonucleotide
tagccttgttaaagaagccgcccctctggttctgacctttgaggaacgca

SEQ ID NO: 234578 - DNA, 50 bp, Artificial
  Synthetic oligonucleotide
tggcgaggggaagcgggcttcagggaatgtgcgggattcgtccggtttac

SEQ ID NO: 234579 - DNA, 50 bp, Artificial
  Synthetic oligonucleotide
tggagtaaagatcgcaggaagcagcggttcggtaaccgggctggcaagcg

SEQ ID NO: 234580 - DNA, 50 bp, Artificial
  Synthetic oligonucleotide
tgcgggacagccgatcgcacatacagacggactgtggaacgcactgggaa

SEQ ID NO: 234581 - DNA, 50 bp, Artificial
  Synthetic oligonucleotide
actgcacgcatccctgtcggcccgtgctaaagcggaatcgatgcgcctgt

SEQ ID NO: 234582 - DNA, 50 bp, Artificial
  Synthetic oligonucleotide
actcctgggcggtgcccacggggtactcaggcaggtaggccttcaggtgg

SEQ ID NO: 234583 - DNA, 50 bp, Artificial
  Synthetic oligonucleotide
actcagcgcttcggggacagcctcaccgcagtcagcaggtatcaccctga

SEQ ID NO: 234584 - DNA, 50 bp, Artificial
  Synthetic oligonucleotide
actcactgccctgtgcgataggcgcgagaatggctgacgagagccgtccc

SEQ ID NO: 234585 - DNA, 50 bp, Artificial
  Synthetic oligonucleotide
acgtgtcactaacagtattcctatgataaatagtgtatatgactataata

SEQ ID NO: 234586 - DNA, 56 bp, Artificial
  Synthetic oligonucleotide
gaacggttcgatattccctgtgagcaatcgtggctctataataagccttatccaaa

SEQ ID NO: 234587 - DNA, 50 bp, Artificial
  Synthetic oligonucleotide
acgtgggatccccggcgagcttcatggacgtttcagtccgggcggaagct

SEQ ID NO: 234588 - DNA, 50 bp, Artificial
  Synthetic oligonucleotide
acgtggctgcggatgagtgttgcgatgccgtcaactgtctgttcgggctg

SEQ ID NO: 234589 - DNA, 50 bp, Artificial
  Synthetic oligonucleotide
acggtatgagtatgcagggcatcgcagatcaattgcagtcggagggtatc

SEQ ID NO: 234590 - DNA, 50 bp, Artificial
  Synthetic oligonucleotide
acggtagaaagggtgaaacccgcccttgcccagacagcccgacatcacga

SEQ ID NO: 234591 - DNA, 50 bp, Artificial
  Synthetic oligonucleotide
acgggatttggccgaaacggggaacggcttgcaaagacgcccatgcgcgt

SEQ ID NO: 234592 - DNA, 50 bp, Artificial
  Synthetic oligonucleotide
acggcccctgtgcctttgagcaggagtatgcgtccaatgctggcacggtc

SEQ ID NO: 234593 - DNA, 50 bp, Artificial
  Synthetic oligonucleotide
acggatcaagcgagttctgggggacctgcgtgctggtaagccggtgactc

SEQ ID NO: 234594 - DNA, 50 bp, Artificial
  Synthetic oligonucleotide
acgcttcccagtatgtagcccatgaccgacggtgaaagtcccgtagtata

SEQ ID NO: 234595 - DNA, 50 bp, Artificial
  Synthetic oligonucleotide
acgctgtcgccgtcaactatcttgccgacaggagcgccgttctcagcgat

SEQ ID NO: 234596 - DNA, 50 bp, Artificial
  Synthetic oligonucleotide
acgccgggtcacagtaccagacggatcgtggtgcgtcccagacgcagggt

SEQ ID NO: 234597 - DNA, 56 bp, Artificial
  Synthetic oligonucleotide
gtgattaatgtgttttctcattgcgtgagttcattttcgactatgagaaccttgtc

SEQ ID NO: 234598 - DNA, 50 bp, Artificial
  Synthetic oligonucleotide
acgccgacacagtcgcgaacgcccccgccctacactattgacaggcttat

SEQ ID NO: 234599 - DNA, 50 bp, Artificial
  Synthetic oligonucleotide
acgcacggcagatgggatgctgcaccgggagagagcgcgtcagggtgtca

SEQ ID NO: 234600 - DNA, 50 bp, Artificial
  Synthetic oligonucleotide
acgatgtggcacgtccgcaaggggagaatgcagcggacaaaccgcagggg

SEQ ID NO: 234601 - DNA, 50 bp, Artificial
  Synthetic oligonucleotide
acgatgagctgtccgctaatggcggcgagtggatgtcccgctacaaccgc

SEQ ID NO: 234602 - DNA, 50 bp, Artificial
  Synthetic oligonucleotide
acgaccagccgtggggatacgacccgaaacacgcaggcggtgcaagagta

SEQ ID NO: 234603 - DNA, 50 bp, Artificial
  Synthetic oligonucleotide
accttaccgagcctgtgaacactcccctcggtgcggcgcagtgtccctca

SEQ ID NO: 234604 - DNA, 50 bp, Artificial
  Synthetic oligonucleotide
accgtcacgatccatgaagcacaggcgcgcggacagaacttcgggcaggt

SEQ ID NO: 234605 - DNA, 50 bp, Artificial
  Synthetic oligonucleotide
accgggcgtcaggagggtgcgccttgtttaccgccgcacaaagcgttaca

SEQ ID NO: 234606 - DNA, 50 bp, Artificial
  Synthetic oligonucleotide
accgggccgcacagggggcaatggcgggggaatgcgctccacttcacaaa

SEQ ID NO: 234607 - DNA, 50 bp, Artificial
  Synthetic oligonucleotide
accggagtttgccggaccctcgcccctgaatccgcaccagtccccggtga

SEQ ID NO: 234608 - DNA, 56 bp, Artificial
  Synthetic oligonucleotide
caaaagagtcttgacattgtctaaacacagtgttataataaacgtgaggtgatgtt

SEQ ID NO: 234609 - DNA, 50 bp, Artificial
  Synthetic oligonucleotide
accgcattccgcaacggctactacacttggagcgcttgggacgcacaggg

SEQ ID NO: 234610 - DNA, 50 bp, Artificial
  Synthetic oligonucleotide
accgaggggtcgaaaacagtgcgggataaagcgcgggggtcgcagagcgc

SEQ ID NO: 234611 - DNA, 50 bp, Artificial
  Synthetic oligonucleotide
agcgagggtataccaagcttagcgccccaaagggtcatgccgccgtgacg

SEQ ID NO: 234612 - DNA, 50 bp, Artificial
  Synthetic oligonucleotide
agcgacggcattcttgtgcggaactgtcgctttgatggccccgcggacgg

SEQ ID NO: 234613 - DNA, 50 bp, Artificial
  Synthetic oligonucleotide
agcgacacatcctcctcgggaaccgtaacagcgtagtaccagcggtggcc

SEQ ID NO: 234614 - DNA, 50 bp, Artificial
  Synthetic oligonucleotide
agcgaaacgccagaccacgaaaacgcgacggcctgccaagggctccccta

SEQ ID NO: 234615 - DNA, 50 bp, Artificial
  Synthetic oligonucleotide
agcctttttcgtcccgcagacgctcccagtaagcgggcttctcgtcactg

SEQ ID NO: 234616 - DNA, 50 bp, Artificial
  Synthetic oligonucleotide
agccggtcacacaaaagcgcccgtcccccgattgccttttgagggtgcgc

SEQ ID NO: 234617 - DNA, 50 bp, Artificial
  Synthetic oligonucleotide
agccgccggacgcaagtgccaatcttccaggatggcgtcccccgtaaacg

SEQ ID NO: 234618 - DNA, 50 bp, Artificial
  Synthetic oligonucleotide
agccgcatcatagctccgcaataccgtgccgtgcctttgccaaaggtcgc

SEQ ID NO: 234619 - DNA, 55 bp, Artificial
  Synthetic oligonucleotide
cagaacatcgagcgacaggagcgcaatataatcaagtcatacccgacggctcgca

SEQ ID NO: 234620 - DNA, 50 bp, Artificial
  Synthetic oligonucleotide
agccagcatcataccggtgaaagccctgtctgcggtgcgaaggctcacaa

SEQ ID NO: 234621 - DNA, 50 bp, Artificial
  Synthetic oligonucleotide
agcaggaggtgcgaaaatgcgcagtgtcaggtctgccgcgccgttaagcg

SEQ ID NO: 234622 - DNA, 50 bp, Artificial
  Synthetic oligonucleotide
agatggcgtgcgggaaaacacgctcgggaacgactctgcgccaaattcct

SEQ ID NO: 234623 - DNA, 50 bp, Artificial
  Synthetic oligonucleotide
agagggaaccggaagctgtgcgccctcaccgtcaaaacaaagcgcccaaa

SEQ ID NO: 234624 - DNA, 50 bp, Artificial
  Synthetic oligonucleotide
agagcgtcccagcccacagctccgcccgtgtaaaagtccgtgaccttttg

SEQ ID NO: 234625 - DNA, 50 bp, Artificial
  Synthetic oligonucleotide
agagaggcgctatcatccgccgtcttaccgcagttgaagcactgggctgc

SEQ ID NO: 234626 - DNA, 50 bp, Artificial
  Synthetic oligonucleotide
agacggagcatggcgtgtgttcgcggcaatggagctgtaccgaatcggta

SEQ ID NO: 234627 - DNA, 50 bp, Artificial
  Synthetic oligonucleotide
agacgacctgaagcccaccatagacagctggaacgaggcaggcggcacag

SEQ ID NO: 234628 - DNA, 50 bp, Artificial
  Synthetic oligonucleotide
agacctgttccgtctgcggtagggcctttgtaccccaggggcagtagctc

SEQ ID NO: 234629 - DNA, 50 bp, Artificial
  Synthetic oligonucleotide
agaccgacggcactcccgatatgcagactgtgggcgatgctgtcaagggg

SEQ ID NO: 234630 - DNA, 55 bp, Artificial
  Synthetic oligonucleotide
cacgttccatagccatgagagtaacctccttttacgaccatatacggtctaagat

SEQ ID NO: 234631 - DNA, 50 bp, Artificial
  Synthetic oligonucleotide
agacacaggcgcgcaaaatctccattgcactggcgagaagcggcagactg

SEQ ID NO: 234632 - DNA, 50 bp, Artificial
  Synthetic oligonucleotide
agaagccgctatggacgctgtaagaagcggcagccagcctgagctcacaa

SEQ ID NO: 234633 - DNA, 50 bp, Artificial
  Synthetic oligonucleotide
agaacggcgtaaagtcccaggatgtaccgatgggccaactcgccttgccg

SEQ ID NO: 234634 - DNA, 50 bp, Artificial
  Synthetic oligonucleotide
agaaacgaacggagcgtaacccctgcgttccgtcgcactcgcaacgtgat

SEQ ID NO: 234635 - DNA, 50 bp, Artificial
  Synthetic oligonucleotide
actggccggcgggtacgctctcaggatcgccgatcgcgaccatatcagcg

SEQ ID NO: 234636 - DNA, 50 bp, Artificial
  Synthetic oligonucleotide
actggcccatggcactccatctctcggagggggctgtccatacggtgcag

SEQ ID NO: 234637 - DNA, 50 bp, Artificial
  Synthetic oligonucleotide
actgcgggctgggcttcggagtacagggctacgcttcacggggagtgcag

SEQ ID NO: 234638 - DNA, 50 bp, Artificial
  Synthetic oligonucleotide
actgcggcaggtctctgccacacggaacgctaccgctgtatgggtatcgc

SEQ ID NO: 234639 - DNA, 50 bp, Artificial
  Synthetic oligonucleotide
actgcggcaccaatggccgtccccagtcccgctccaaagacgcccagccg

SEQ ID NO: 234640 - DNA, 50 bp, Artificial
  Synthetic oligonucleotide
aaggcattttccgattctccgggggttgcagtttaatgcccgcagcgcgg

SEQ ID NO: 234641 - DNA, 58 bp, Artificial
  Synthetic oligonucleotide
aagaactgccggagacaagcagaccgttcctgcgacacataagacaacttcaaaagag

SEQ ID NO: 234642 - DNA, 55 bp, Artificial
  Synthetic oligonucleotide
gctgctaacacagacgatttcaaggctttcgctgcaagcgttgctaatactatcg

SEQ ID NO: 234643 - DNA, 50 bp, Artificial
  Synthetic oligonucleotide
aagcctgccgtcgcgccaactccggctctccactgcctctgcgcgcattt

SEQ ID NO: 234644 - DNA, 50 bp, Artificial
  Synthetic oligonucleotide
aagcctaagccttcggcgcagccactcacaagtgaacttcggcactccgc

SEQ ID NO: 234645 - DNA, 50 bp, Artificial
  Synthetic oligonucleotide
aagccgcagggcgcacattcacagtactgcgcggtagaccccgtgtttga

SEQ ID NO: 234646 - DNA, 50 bp, Artificial
  Synthetic oligonucleotide
aagagccgctggtacggtaggcgccggtctggtcccacacgtcggttttc

SEQ ID NO: 234647 - DNA, 50 bp, Artificial
  Synthetic oligonucleotide
aagacagaccaacgcctattgggtggacgtacgcggcgctttccttgcct

SEQ ID NO: 234648 - DNA, 50 bp, Artificial
  Synthetic oligonucleotide
aactttgaaggtagccgtcacgcccgcatacagacgcaccgtggcgtcat

SEQ ID NO: 234649 - DNA, 50 bp, Artificial
  Synthetic oligonucleotide
aactctcggcactggcaggcatagtcgaagaggcaggcgaccgtcaggat

SEQ ID NO: 234650 - DNA, 50 bp, Artificial
  Synthetic oligonucleotide
aactccttcgggatcttggcgtccgggaacccgttcagtcctgccgacgt

SEQ ID NO: 234651 - DNA, 50 bp, Artificial
  Synthetic oligonucleotide
aactcaggcagcggcttcgggtctggcaaaggcaggcgtagcaatggcgg

SEQ ID NO: 234652 - DNA, 50 bp, Artificial
  Synthetic oligonucleotide
aacggtataccacatccgggtgccgttgtcacgtctgtgacggaggggcg

SEQ ID NO: 234653 - DNA, 55 bp, Artificial
  Synthetic oligonucleotide
cagaagtgttccctcttgacagcgggcgctggatggtacatattataaggggcgc

SEQ ID NO: 234654 - DNA, 50 bp, Artificial
  Synthetic oligonucleotide
aacgcgctgtataaggttatccgtgccgccgacgccaaatcgctcggctc

SEQ ID NO: 234655 - DNA, 50 bp, Artificial
  Synthetic oligonucleotide
aacgcgcgtggcatccctggaaggtggtgggaaagcgaatggctaaagta

SEQ ID NO: 234656 - DNA, 50 bp, Artificial
  Synthetic oligonucleotide
aacctgcccctctgttcgcgtagcagcctgtattaacgcagcgcccgccc

SEQ ID NO: 234657 - DNA, 50 bp, Artificial
  Synthetic oligonucleotide
aacctcccgcatcaacgcatatcgcggcttgcgcagaacgcttgtgacat

SEQ ID NO: 234658 - DNA, 50 bp, Artificial
  Synthetic oligonucleotide
aaccggcctgtctgcgcaagcatcgagccgttttccgcgatcatgctgtg

SEQ ID NO: 234659 - DNA, 50 bp, Artificial
  Synthetic oligonucleotide
aaattccgcctgcctccggttgcggagaaacccggcgatgtggtaggata

SEQ ID NO: 234660 - DNA, 50 bp, Artificial
  Synthetic oligonucleotide
aaatcagcggggcgcacaaacctccgacaaacgcagtcctttcgtggcaa

SEQ ID NO: 234661 - DNA, 50 bp, Artificial
  Synthetic oligonucleotide
aaaggtcccgacctgaaacgcggcagggacaggagccgtgtgcgcgagct

SEQ ID NO: 234662 - DNA, 50 bp, Artificial
  Synthetic oligonucleotide
aaagctgaagtcccacgcacagagagccgcacaggttgcctggcgcacga

SEQ ID NO: 234663 - DNA, 50 bp, Artificial
  Synthetic oligonucleotide
aaagaaaagcaacggtcgtgccgtcgaatgcggcaggcagatcctgcgat

SEQ ID NO: 234664 - DNA, 55 bp, Artificial
  Synthetic oligonucleotide
cactaactcctctaagatgatatcctagttgaaagttcgaagctatttcatcggg

SEQ ID NO: 234665 - DNA, 50 bp, Artificial
  Synthetic oligonucleotide
aaactggcgctactgaagcccgccggttcaagactgccgccttttgtcac

SEQ ID NO: 234666 - DNA, 50 bp, Artificial
  Synthetic oligonucleotide
aaactccgccgctaagctgtgcagcgccgtttttgagttcggatgcaccg

SEQ ID NO: 234667 - DNA, 50 bp, Artificial
  Synthetic oligonucleotide
aaacggcgttggtatctccgccgccagtgtctgccgctatgccagagcgt

SEQ ID NO: 234668 - DNA, 50 bp, Artificial
  Synthetic oligonucleotide
aaaagatccgcgcattgcccaacatcattggctccacacgcctcgagcct

SEQ ID NO: 234669 - DNA, 50 bp, Artificial
  Synthetic oligonucleotide
aaaagagaatgcaccccggtagcgaacagcgctgcagcaatgtgcccctg

SEQ ID NO: 234670 - DNA, 50 bp, Artificial
  Synthetic oligonucleotide
aaaagaccccgttctgcgactggtggtaggcggcccccaaatgctccaca

SEQ ID NO: 234671 - DNA, 50 bp, Artificial
  Synthetic oligonucleotide
acccttctgccccgagagcaccctttcgggcatcggcgcccactatgggg

SEQ ID NO: 234672 - DNA, 50 bp, Artificial
  Synthetic oligonucleotide
acccgcgtggaagccattcaggacgcacgctgccaggcgcgctacgatga

SEQ ID NO: 234673 - DNA, 50 bp, Artificial
  Synthetic oligonucleotide
acccgcatttgagagggcggtcttcgagtttgccgcaccgcgaactgtca

SEQ ID NO: 234674 - DNA, 50 bp, Artificial
  Synthetic oligonucleotide
acccgaggacagataagcgaccctgggcggtggtacagctgagggctgag

SEQ ID NO: 234675 - DNA, 55 bp, Artificial
  Synthetic oligonucleotide
cataccggaaagcctcctttgtgatatgggaatgttgcagccgtttcaagactgc

SEQ ID NO: 234676 - DNA, 50 bp, Artificial
  Synthetic oligonucleotide
acccaagtgcgatgccgcttgtgaagccttcacgaccgtactccctcggg

SEQ ID NO: 234677 - DNA, 50 bp, Artificial
  Synthetic oligonucleotide
accatttgcaacaagctaatcagcgccgttgtgttatcgtaggcactata

SEQ ID NO: 234678 - DNA, 50 bp, Artificial
  Synthetic oligonucleotide
acatttcacgatcgaatacgatggtgttaccatgtccttggaaacatcgg

SEQ ID NO: 234679 - DNA, 50 bp, Artificial
  Synthetic oligonucleotide
acattcgggtggaagcgttgcagagggacgcacctgcgcccttatcacac

SEQ ID NO: 234680 - DNA, 50 bp, Artificial
  Synthetic oligonucleotide
acagtcgcgaacgcccccgccctacacgtagggagtgcagacccaaaagc

SEQ ID NO: 234681 - DNA, 50 bp, Artificial
  Synthetic oligonucleotide
acaggccgcatactccctgaagcctatggacggcttgctgacgccacggg

SEQ ID NO: 234682 - DNA, 50 bp, Artificial
  Synthetic oligonucleotide
acagccgcgccgtaattgtttcgcgttgcccgtgagggcagtgccaatat

SEQ ID NO: 234683 - DNA, 50 bp, Artificial
  Synthetic oligonucleotide
acaccctcgttaaaggtgggatgcgcacgcatggcataccggagctggcg

SEQ ID NO: 234684 - DNA, 50 bp, Artificial
  Synthetic oligonucleotide
acaaggcagcgctgtaacgcctcagagaccgctttccccgtcagctgcgg

SEQ ID NO: 234685 - DNA, 50 bp, Artificial
  Synthetic oligonucleotide
aattcccctgtatgcaacagccgaggtgcttgaaaggctgcggtgggacg

SEQ ID NO: 234686 - DNA, 55 bp, Artificial
  Synthetic oligonucleotide
cgggtacccggcatatataaactcctgggatgaatgctctgctcaggtcaatggt

SEQ ID NO: 234687 - DNA, 50 bp, Artificial
  Synthetic oligonucleotide
aatgtgcctgactcttgtttcctgcagtggaacaacaacgtccgagagtc

SEQ ID NO: 234688 - DNA, 50 bp, Artificial
  Synthetic oligonucleotide
aatgggcagccatcctcgcagtcatcacaggtgccacagactctggccag

SEQ ID NO: 234689 - DNA, 50 bp, Artificial
  Synthetic oligonucleotide
aatgcgttcaaggcgcacggatgaaaggccgacgggatttggccgaaacg

SEQ ID NO: 234690 - DNA, 50 bp, Artificial
  Synthetic oligonucleotide
aatcgttcgtccgtggggtcgtccatcgcataaaaaggccgtttggccgc

SEQ ID NO: 234691 - DNA, 50 bp, Artificial
  Synthetic oligonucleotide
aatcagagcgcccacaaccgaacctccgtccaaaaccccgacgctccgct

SEQ ID NO: 234692 - DNA, 50 bp, Artificial
  Synthetic oligonucleotide
aagtctgcgaggtctgtgccctcttcgggcaggagtgccataaagccgta

SEQ ID NO: 234693 - DNA, 50 bp, Artificial
  Synthetic oligonucleotide
aagtctaccgttctcccgttgtgcgcctggacggttattccggccgccac

SEQ ID NO: 234694 - DNA, 50 bp, Artificial
  Synthetic oligonucleotide
aagtcgggtgccgcatacggtgaagcgggcggtatctcagcacttgtgaa

SEQ ID NO: 234695 - DNA, 50 bp, Artificial
  Synthetic oligonucleotide
aaggtcgctttacgccaaaagcggctgggtgttttaccgaggcaccccaa

SEQ ID NO: 234696 - DNA, 50 bp, Artificial
  Synthetic oligonucleotide
aaggtccacccacaggaccttcccccacggcaggacaatggcgtactcac

SEQ ID NO: 234697 - DNA, 55 bp, Artificial
  Synthetic oligonucleotide
gctcccatgcttactaaggagctttcttcgatagatttcagtaagtcagccagag

SEQ ID NO: 234698 - DNA, 50 bp, Artificial
  Synthetic oligonucleotide
aaggtaccgtcggcacttcagcgaccgtctgttgggacgtagatgccgcg

SEQ ID NO: 234699 - DNA, 50 bp, Artificial
  Synthetic oligonucleotide
aagggtgaaacccgcccttgcccagacagcccgacatcacgatctcacgt

SEQ ID NO: 234700 - DNA, 50 bp, Artificial
  Synthetic oligonucleotide
aagggtagcggacaaaatgggaacacaggcggtaacggacgggctggtga

SEQ ID NO: 234701 - DNA, 50 bp, Artificial
  Synthetic oligonucleotide
aagggtacgggtcagacagtccaggcgcgaatgagcggggcccagaagga

SEQ ID NO: 234702 - DNA, 50 bp, Artificial
  Synthetic oligonucleotide
catccgaccccgaggttatctcctttgccgcaggcaaccctgcgcctgaa

SEQ ID NO: 234703 - DNA, 50 bp, Artificial
  Synthetic oligonucleotide
catacgtggcatcccgccccgttgatatcgtaccagctgctggcatggcc

SEQ ID NO: 234704 - DNA, 50 bp, Artificial
  Synthetic oligonucleotide
cataaggggccgtccggcgggatagcagcttacctgatatgcggtgcggt

SEQ ID NO: 234705 - DNA, 50 bp, Artificial
  Synthetic oligonucleotide
cagggtcaatgttccgccgtgagccgtcaagattgcacggcagaggggca

SEQ ID NO: 234706 - DNA, 50 bp, Artificial
  Synthetic oligonucleotide
cagctgcgaagctgttcgctctcgccgttttcgcctccatgccacacagg

SEQ ID NO: 234707 - DNA, 50 bp, Artificial
  Synthetic oligonucleotide
cagcggcaccctcagcgatcactacgacccgagggcaaatgtggtgcgtc

SEQ ID NO: 234708 - DNA, 55 bp, Artificial
  Synthetic oligonucleotide
cagtacccaatacgagcataacagcagtaaagcgtttcgggtcagctctatcgcg

SEQ ID NO: 234709 - DNA, 50 bp, Artificial
  Synthetic oligonucleotide
cagcggaaggctgaaaagcgatgccgcaaggactgtggacagcgtcaaga

SEQ ID NO: 234710 - DNA, 50 bp, Artificial
  Synthetic oligonucleotide
cagcagggatacagcgttcttttccgggaggccggacagccgtgacagta

SEQ ID NO: 234711 - DNA, 50 bp, Artificial
  Synthetic oligonucleotide
cagactccgtgcctgcgatatcagcgtcatgggcagatattcccgcggcg

SEQ ID NO: 234712 - DNA, 50 bp, Artificial
  Synthetic oligonucleotide
cactttcctcaccgtccgcggaagtcccctcgggaagaagcggagagctt

SEQ ID NO: 234713 - DNA, 50 bp, Artificial
  Synthetic oligonucleotide
cacgaagcggtaggagcgtatgtgccggggagtcggtactgtgcggcata

SEQ ID NO: 234714 - DNA, 50 bp, Artificial
  Synthetic oligonucleotide
caccacggttcctgtcccttgcagcgcagtggtctgtggggactctatcg

SEQ ID NO: 234715 - DNA, 50 bp, Artificial
  Synthetic oligonucleotide
caaaggcgtcaatcgcgctcattaacggcctccgtgcggccctgtccctt

SEQ ID NO: 234716 - DNA, 50 bp, Artificial
  Synthetic oligonucleotide
caaaggacgagcgacattccccgtgtaccgtgggaaccccgccgtattct

SEQ ID NO: 234717 - DNA, 50 bp, Artificial
  Synthetic oligonucleotide
attgcgcccgtattcgatagagggaaccggaagctgtgcgccctcaccgt

SEQ ID NO: 234718 - DNA, 50 bp, Artificial
  Synthetic oligonucleotide
attcttgtgcggaactgtcgctttgatggccccgcggacggagagagtgc

SEQ ID NO: 234719 - DNA, 53 bp, Artificial
  Synthetic oligonucleotide
cgggtgctcttaaagagagtcctccccgggcgcgtaaacgaacaaatagtctg

SEQ ID NO: 234720 - DNA, 50 bp, Artificial
  Synthetic oligonucleotide
attcgtcaccaaactgagaatttgctccgcttacaagtacgccgtcgggg

SEQ ID NO: 234721 - DNA, 50 bp, Artificial
  Synthetic oligonucleotide
attcgcacccgcttacggggaacatctctggctatgcacacccttgcggg

SEQ ID NO: 234722 - DNA, 50 bp, Artificial
  Synthetic oligonucleotide
atgtcgtggtctcgcttgcgaccgccagacgggttacggcagctgcttca

SEQ ID NO: 234723 - DNA, 50 bp, Artificial
  Synthetic oligonucleotide
atgtccgtcggatctccctgccgcattgtaccacgtaaccccaggtgcat

SEQ ID NO: 234724 - DNA, 50 bp, Artificial
  Synthetic oligonucleotide
atgggcgaactgagagcggcggcagacgagatagaaactctggtgggcga

SEQ ID NO: 234725 - DNA, 50 bp, Artificial
  Synthetic oligonucleotide
atgcgagtcggtaacggaagcctgcgagcaacgtggaatccggatcagcc

SEQ ID NO: 234726 - DNA, 50 bp, Artificial
  Synthetic oligonucleotide
atgccgggggaaaggcatgtaatgccggacgaacccgcatagaccgagtc

SEQ ID NO: 234727 - DNA, 50 bp, Artificial
  Synthetic oligonucleotide
atgcaggctgcagtactgttgatgcccggcgcattcctgctccgtccaat

SEQ ID NO: 234728 - DNA, 50 bp, Artificial
  Synthetic oligonucleotide
atgcaccgtagtggcccagccgccccggattttggaagggggagcgggat

SEQ ID NO: 234729 - DNA, 50 bp, Artificial
  Synthetic oligonucleotide
atgaggctgccgtgtaaatcgacaggccatccgtcccgtgaggtgccctg

SEQ ID NO: 234730 - DNA, 55 bp, Artificial
  Synthetic oligonucleotide
caggttgtgcagcaatctgtggagttgatggtcctatccctgtagcagatgcaag

SEQ ID NO: 234731 - DNA, 50 bp, Artificial
  Synthetic oligonucleotide
atgaggcgcaggtcctccatcccctcccggtagagcatggacttcacggt

SEQ ID NO: 234732 - DNA, 50 bp, Artificial
  Synthetic oligonucleotide
gcactgcaaagcgttgcaagaatcctcggaggctgtctgcgcagtcagga

SEQ ID NO: 234733 - DNA, 50 bp, Artificial
  Synthetic oligonucleotide
gattccacgctttacctgtgggtgagggtatgccctcatcggtcagagta

SEQ ID NO: 234734 - DNA, 50 bp, Artificial
  Synthetic oligonucleotide
cgtccacaccggaggactcccactgccatgcttcgtccgagccataagcc

SEQ ID NO: 234735 - DNA, 50 bp, Artificial
  Synthetic oligonucleotide
cgtacatatcgtggttgatcgttgcgatgcgaagccccggcgcagccata

SEQ ID NO: 234736 - DNA, 50 bp, Artificial
  Synthetic oligonucleotide
cgggcttccgggttgagcatatcggggaagtgtacccgtcccggccacac

SEQ ID NO: 234737 - DNA, 50 bp, Artificial
  Synthetic oligonucleotide
cgggcttcccacagcctgcgaaagggttctgcaccacagcatgaaacgct

SEQ ID NO: 234738 - DNA, 50 bp, Artificial
  Synthetic oligonucleotide
cgggctgaggtaaagcgggtcctgcactgcgatgcaacagcaagggcgct

SEQ ID NO: 234739 - DNA, 50 bp, Artificial
  Synthetic oligonucleotide
cggatgtcccaccggggctatcgagtacggcagaagtactgtgggcaggg

SEQ ID NO: 234740 - DNA, 50 bp, Artificial
  Synthetic oligonucleotide
cgcggcaaagttgctgaacgcaacacgcaagtcccgcggttagaacaggc

SEQ ID NO: 234741 - DNA, 55 bp, Artificial
  Synthetic oligonucleotide
cggtaatactatgatcatgctcatgtcaggtatccagggtatcaacccatcactg

SEQ ID NO: 234742 - DNA, 50 bp, Artificial
  Synthetic oligonucleotide
cgcattcttcagtcacgttcctgtgatgatgagccacgtccgtaacaaat

SEQ ID NO: 234743 - DNA, 50 bp, Artificial
  Synthetic oligonucleotide
ccgttcgtcctgaaatacgtggaatttgagcttgttttcggtatgtatgt

SEQ ID NO: 234744 - DNA, 50 bp, Artificial
  Synthetic oligonucleotide
ccgtgcctgctcctatgttacagccgctgtgcggtatcaccggtttgcgt

SEQ ID NO: 234745 - DNA, 50 bp, Artificial
  Synthetic oligonucleotide
ccgtgccagtacttcggtcttgcacacagcggcgcagtagccccgggcta

SEQ ID NO: 234746 - DNA, 50 bp, Artificial
  Synthetic oligonucleotide
ccgtattctacacgctcgtactgaaagtaaatcctttacatgtcggaacg

SEQ ID NO: 234747 - DNA, 50 bp, Artificial
  Synthetic oligonucleotide
ccgcggtacatggggcggtatggtacctgtaacacggacagttccgagcg

SEQ ID NO: 234748 - DNA, 50 bp, Artificial
  Synthetic oligonucleotide
ccgcgggaggtggagccttctgcaaggtgcaggtactttactgtgcccgt

SEQ ID NO: 234749 - DNA, 50 bp, Artificial
  Synthetic oligonucleotide
ccctgttgagggtgcggctctcgctgtggctataatccgccgtctgatga

SEQ ID NO: 234750 - DNA, 50 bp, Artificial
  Synthetic oligonucleotide
cccgaagcgcccacaaaccgctacgtgaatatgcccccggcgggactgct

SEQ ID NO: 234751 - DNA, 50 bp, Artificial
  Synthetic oligonucleotide
cccctactccgcataccccgcacaaggatatctggtacctgcggcgccgg

SEQ ID NO: 234752 - DNA, 60 bp, Artificial
  Synthetic oligonucleotide
agagggactgcaaatgaccctcgatgaagtatccggacaagcaccgcaaggcactaaaga

SEQ ID NO: 234753 - DNA, 55 bp, Artificial
  Synthetic oligonucleotide
cagggcagaactgtccttttccagacaatctgccgtctgagccatataattgcgg

SEQ ID NO: 234754 - DNA, 50 bp, Artificial
  Synthetic oligonucleotide
ccccggaacggaaccggtagctcagattgtagggctggcatgcgcgctca

SEQ ID NO: 234755 - DNA, 50 bp, Artificial
  Synthetic oligonucleotide
ccccaccaacaccgactggatattcgcctacacaggcgacgccacacagc

SEQ ID NO: 234756 - DNA, 50 bp, Artificial
  Synthetic oligonucleotide
ccatggcagcagacgtgatccctcctgcatacccggtgccttccccacac

SEQ ID NO: 234757 - DNA, 50 bp, Artificial
  Synthetic oligonucleotide
ccagttcagacggagcggcagttatctcgctgtccttgcgtccgccgtag

SEQ ID NO: 234758 - DNA, 50 bp, Artificial
  Synthetic oligonucleotide
ccagacttcgcggagagggcgctgaatggacaggtacatccgaagcgaga

SEQ ID NO: 234759 - DNA, 50 bp, Artificial
  Synthetic oligonucleotide
ccacactctgccctgccatatcgtatgcgttggtctcgcccctgcgtgcc

SEQ ID NO: 234760 - DNA, 50 bp, Artificial
  Synthetic oligonucleotide
ccaactgttgtaactcaggcagcggcttcgggtctggcaaaggcaggcgt

SEQ ID NO: 234761 - DNA, 50 bp, Artificial
  Synthetic oligonucleotide
catgattctgcgctatcgcctgcccggtaccattgcggcggtttccctgc

SEQ ID NO: 234762 - DNA, 50 bp, Artificial
  Synthetic oligonucleotide
aggtggcctatgcccgcatatgacgacggactggtgtccatcatcacgcc

SEQ ID NO: 234763 - DNA, 50 bp, Artificial
  Synthetic oligonucleotide
aggtaaggggaatgttcgcaggggacagggcgcgtaagcagactctggtg

SEQ ID NO: 234764 - DNA, 55 bp, Artificial
  Synthetic oligonucleotide
caggctcggaggtgcggtgcttcaatacgcctcatgataccattcagagctgcgg

SEQ ID NO: 234765 - DNA, 50 bp, Artificial
  Synthetic oligonucleotide
aggggcagtacgtggtgcttgggatggatcacggtacccaacatgccgtc

SEQ ID NO: 234766 - DNA, 50 bp, Artificial
  Synthetic oligonucleotide
agggcgcttctgtgacggtgcgcaaggtagcacctctgggtgatcccata

SEQ ID NO: 234767 - DNA, 50 bp, Artificial
  Synthetic oligonucleotide
agggacccggaaatccggtattcaaatggaccggagcagacagcggtggg

SEQ ID NO: 234768 - DNA, 50 bp, Artificial
  Synthetic oligonucleotide
aggctgcttgtaccggcaaaatagagacagagggaaagccgggcgcgtga

SEQ ID NO: 234769 - DNA, 50 bp, Artificial
  Synthetic oligonucleotide
aggcggcctcaactgcatgggattcgtatggcacgccattgcaaagggac

SEQ ID NO: 234770 - DNA, 50 bp, Artificial
  Synthetic oligonucleotide
aggccgcttgcaggacagttggaaagtcggccccattacgaggaaaggcg

SEQ ID NO: 234771 - DNA, 50 bp, Artificial
  Synthetic oligonucleotide
aggcagtctctccggtagctgcgtatgccgtaccggcttgtgtcgtctct

SEQ ID NO: 234772 - DNA, 50 bp, Artificial
  Synthetic oligonucleotide
aggattcaatgcccgcgctccgggtcacgctttccccgtccacgatccgc

SEQ ID NO: 234773 - DNA, 50 bp, Artificial
  Synthetic oligonucleotide
aggatgcgccagagagccgtcgtttgtatcgctgccgtcaggggaaacgt

SEQ ID NO: 234774 - DNA, 50 bp, Artificial
  Synthetic oligonucleotide
aggagagtccacgaagcggtaggagcgtatgtgccggggagtcggtactg

SEQ ID NO: 234775 - DNA, 55 bp, Artificial
  Synthetic oligonucleotide
caggcatcaacgcagttcgcttctacgatactgagggcgaacctctcgatactta

SEQ ID NO: 234776 - DNA, 50 bp, Artificial
  Synthetic oligonucleotide
aggacgcatcgcacagtttcggggcggtatcgtttatgtgccgaggacga

SEQ ID NO: 234777 - DNA, 50 bp, Artificial
  Synthetic oligonucleotide
aggacagacactgcggcaagtcctttgcggccatccggagtatcttggga

SEQ ID NO: 234778 - DNA, 50 bp, Artificial
  Synthetic oligonucleotide
aggaatccggtgcggggaaggaagccagcgtgtcggtgtaccaggtctcc

SEQ ID NO: 234779 - DNA, 50 bp, Artificial
  Synthetic oligonucleotide
aggaaaccagtgccaccatgtgccagctgatggagggggtcgttacggag

SEQ ID NO: 234780 - DNA, 50 bp, Artificial
  Synthetic oligonucleotide
agctgtaccacagcccacgggcgcttacctgttcgggggtcggtcagacc

SEQ ID NO: 234781 - DNA, 50 bp, Artificial
  Synthetic oligonucleotide
agctactccaccgtacaggcagccgttgacaaggcggcttccatcaaccc

SEQ ID NO: 234782 - DNA, 50 bp, Artificial
  Synthetic oligonucleotide
agcgttgctcatgattctgcgctatcgcctgcccggtaccattgcggcgg

SEQ ID NO: 234783 - DNA, 50 bp, Artificial
  Synthetic oligonucleotide
agcgtgcggctccgcccaactctgcacatatggccgtcccacggctgccc

SEQ ID NO: 234784 - DNA, 50 bp, Artificial
  Synthetic oligonucleotide
agcgtagcgccgacccatgtgtgacccaatgccttgcccttagtttcgcc

SEQ ID NO: 234785 - DNA, 50 bp, Artificial
  Synthetic oligonucleotide
agcgggccataagaccacgcgcgcccaacattgcatcatgccgtctgtct

SEQ ID NO: 234786 - DNA, 55 bp, Artificial
  Synthetic oligonucleotide
gctcggcatagctgtatatgcaaactatgcagttacttcatcgggcggtgagatc

SEQ ID NO: 234787 - DNA, 50 bp, Artificial
  Synthetic oligonucleotide
agcgggaaagccacgcctgttgcggcatttccaagcggtcccacgccctt

SEQ ID NO: 234788 - DNA, 50 bp, Artificial
  Synthetic oligonucleotide
agcggcagttatctcgctgtccttgcgtccgccgtagtcaacggctttga

SEQ ID NO: 234789 - DNA, 50 bp, Artificial
  Synthetic oligonucleotide
agcggcaactttgttcaacgcgggggtcctgcgtgcgcgcccaaatctgt

SEQ ID NO: 234790 - DNA, 50 bp, Artificial
  Synthetic oligonucleotide
agcggatgcggattgcagccgtagtcgttggaataagctggagtgccgcg

SEQ ID NO: 234791 - DNA, 50 bp, Artificial
  Synthetic oligonucleotide
agcgaggtgggcggatgcaccggatgacaaaggcgtgtgatatcgcgccg

SEQ ID NO: 234792 - DNA, 50 bp, Artificial
  Synthetic oligonucleotide
atgagcgctgtcaccgcccttactgcccagaataccacaggcgttacggg

SEQ ID NO: 234793 - DNA, 50 bp, Artificial
  Synthetic oligonucleotide
atgagaacgacgagcagccctatcttgcgctgcccctgggtacgatccta

SEQ ID NO: 234794 - DNA, 50 bp, Artificial
  Synthetic oligonucleotide
atgacagggctataatcggcggcgtggcatcttttcacggcacgcccgta

SEQ ID NO: 234795 - DNA, 50 bp, Artificial
  Synthetic oligonucleotide
atctggcacgcgagggttttgtcgtggcgagcgtacagtataccgcacga

SEQ ID NO: 234796 - DNA, 50 bp, Artificial
  Synthetic oligonucleotide
atctgcgcggctgtacggaagcggtcctgtttgcggccacactggggccg

SEQ ID NO: 234797 - DNA, 55 bp, Artificial
  Synthetic oligonucleotide
gctcttatcaccacggggcgtatttccacggggatggatttatctccaagctctg

SEQ ID NO: 234798 - DNA, 50 bp, Artificial
  Synthetic oligonucleotide
atctcgtcgatcacatctttgcggtgcgcggggcacaggctggtggacag

SEQ ID NO: 234799 - DNA, 50 bp, Artificial
  Synthetic oligonucleotide
atctcctcctcaggggcggtcataagtcccagagggtaagcgtcgcggag

SEQ ID NO: 234800 - DNA, 50 bp, Artificial
  Synthetic oligonucleotide
atcgcggcagaaaagccgccacagaggtgcttaccgccgcagttgaaagg

SEQ ID NO: 234801 - DNA, 50 bp, Artificial
  Synthetic oligonucleotide
atcgcagtggccgggcttacgaggagtaccgtcttccagccaagcttcgt

SEQ ID NO: 234802 - DNA, 50 bp, Artificial
  Synthetic oligonucleotide
atccttgcgttctgacccccgtacccatgaggggccactctcccagctgg

SEQ ID NO: 234803 - DNA, 50 bp, Artificial
  Synthetic oligonucleotide
atccggaaggtcacgcgccacagataaaaagcgcatggaaccgccgtgac

SEQ ID NO: 234804 - DNA, 50 bp, Artificial
  Synthetic oligonucleotide
atcccgtacaggtgctgtcctcccatttccgcggtacctttgtgccgccg

SEQ ID NO: 234805 - DNA, 50 bp, Artificial
  Synthetic oligonucleotide
atcccctgaatcatcgcgccgcgccgtttatccgacttttcaaagcgcgg

SEQ ID NO: 234806 - DNA, 50 bp, Artificial
  Synthetic oligonucleotide
atccccaatggcaagccagcatcataccggtgaaagccctgtctgcggtg

SEQ ID NO: 234807 - DNA, 50 bp, Artificial
  Synthetic oligonucleotide
atccaaaagccacctactgccccagcccggaagctatcggctcccctaaa

SEQ ID NO: 234808 - DNA, 55 bp, Artificial
  Synthetic oligonucleotide
cagcgagaacgatgtcagggtaatgtccagaacagcccacggcgtaagagcgata

SEQ ID NO: 234809 - DNA, 50 bp, Artificial
  Synthetic oligonucleotide
ataccgtcagcggcattttacgggacaacgccgtgcaccgggacagcaaa

SEQ ID NO: 234810 - DNA, 50 bp, Artificial
  Synthetic oligonucleotide
ataccgcacagggcacggtaagcggcaatacactcaggggaacggccacg

SEQ ID NO: 234811 - DNA, 50 bp, Artificial
  Synthetic oligonucleotide
atacccggaggcgcgtttgcgacagaatcacagatgtcggtaggcacgga

SEQ ID NO: 234812 - DNA, 50 bp, Artificial
  Synthetic oligonucleotide
atacagcggtactggtgtgtgccgggtggaggcagttggaccgcctccgt

SEQ ID NO: 234813 - DNA, 50 bp, Artificial
  Synthetic oligonucleotide
ataatcataccaccgccgcgggttgctgtcaagagcagagtcagccgcct

SEQ ID NO: 234814 - DNA, 50 bp, Artificial
  Synthetic oligonucleotide
ataagcgaccctgggcggtggtacagctgagggctgagaacactgctggg

SEQ ID NO: 234815 - DNA, 50 bp, Artificial
  Synthetic oligonucleotide
ataacagcggagagcctgccccctctccaaccggattcggggatgcttac

SEQ ID NO: 234816 - DNA, 50 bp, Artificial
  Synthetic oligonucleotide
agttttccctcccagccgccaagctacggtagtcaacagctgagtcggga

SEQ ID NO: 234817 - DNA, 50 bp, Artificial
  Synthetic oligonucleotide
agtggccgttgcaaaagaccccgttctgcgactggtggtaggcggccccc

SEQ ID NO: 234818 - DNA, 50 bp, Artificial
  Synthetic oligonucleotide
agtgcgccgcctgccttatccccgacttttccgcaagccgaaagaccgac

SEQ ID NO: 234819 - DNA, 55 bp, Artificial
  Synthetic oligonucleotide
cagccgagggtaagccctcggagcgtgttcgcataaatgaagaaatccgagagag

SEQ ID NO: 234820 - DNA, 50 bp, Artificial
  Synthetic oligonucleotide
agtgcgcaaaccgatgagaacgccatcagagccgctccccagcatagcat

SEQ ID NO: 234821 - DNA, 50 bp, Artificial
  Synthetic oligonucleotide
agtcgctgacggccatcgaatggacgactcccgcaatgggtctggatgtc

SEQ ID NO: 234822 - DNA, 50 bp, Artificial
  Synthetic oligonucleotide
agtaccgcatgcccctcaattacggcggtcagcgtcccccgactgcccag

SEQ ID NO: 234823 - DNA, 54 bp, Artificial
  Synthetic oligonucleotide
cggtacgcggtacgccttaaatctgcgctttctcacggttcgtcaccgtcctgg

SEQ ID NO: 234824 - DNA, 55 bp, Artificial
  Synthetic oligonucleotide
gctgcgcttccggtcagtttaaggcagcgggtgtattctggcatcgttccgaaaa

SEQ ID NO: 234825 - DNA, 55 bp, Artificial
  Synthetic oligonucleotide
cagcagctgcatttacgttcgattgagagtaaagataaaggtcttgctatcgagg

SEQ ID NO: 234826 - DNA, 60 bp, Artificial
  Synthetic oligonucleotide
tgaacgacaaaaaaatactgtcggagacgcttgtatatctgacgccctgtgtcagatgtg

SEQ ID NO: 234827 - DNA, 55 bp, Artificial
  Synthetic oligonucleotide
cagcaaattattccccaatttccttcggatgcttgtttggaattaggagttagca

SEQ ID NO: 234828 - DNA, 55 bp, Artificial
  Synthetic oligonucleotide
cggtgcgctgccatgaaatcatagccgtcatcacagctgccatggatatgaccgt

SEQ ID NO: 234829 - DNA, 55 bp, Artificial
  Synthetic oligonucleotide
gctgcgtgagtggcggaaatagagaatatcccaggggagcatatcccacaagggg

SEQ ID NO: 234830 - DNA, 55 bp, Artificial
  Synthetic oligonucleotide
cagacgtaggccatgcagcccagagtaaaaggcgcgtcgtagatccgggcacacc

SEQ ID NO: 234831 - DNA, 55 bp, Artificial
  Synthetic oligonucleotide
ggatcggatcatgtgagttagcgcagtataggagcaaacagtcgaatgggtgccg

SEQ ID NO: 234832 - DNA, 55 bp, Artificial
  Synthetic oligonucleotide
ggcatatgagtatcgatgcataatgctgttgtatcccacacagaagctcttgccg

SEQ ID NO: 234833 - DNA, 55 bp, Artificial
  Synthetic oligonucleotide
cgtccctgaacatgaatgctgcctcacaaattccaagcgctctgccgtactcccc

SEQ ID NO: 234834 - DNA, 55 bp, Artificial
  Synthetic oligonucleotide
ggccccgcgccacttacggatattgatacatatggccctatgactaatggcaccc

SEQ ID NO: 234835 - DNA, 55 bp, Artificial
  Synthetic oligonucleotide
ggcgaagtcatcgggtgtgagaatattctggcggattactactgtgtttccggca

SEQ ID NO: 234836 - DNA, 55 bp, Artificial
  Synthetic oligonucleotide
ggcgatggttcctgtctgtcggtatctcgctgtcggcagtgaacctgatggatat

SEQ ID NO: 234837 - DNA, 59 bp, Artificial
  Synthetic oligonucleotide
cctttgaagtaaatgcatacaggtttttagtaaagccgatagatgatgcaaggcttgag

SEQ ID NO: 234838 - DNA, 55 bp, Artificial
  Synthetic oligonucleotide
ggcggacagagtttcttcacgtccgggacattctgagcatcagtcaggcttgtgc

SEQ ID NO: 234839 - DNA, 55 bp, Artificial
  Synthetic oligonucleotide
atctgtcggcaatgctcaaaagctcgcaggaacaacaggcgactctggtaactgc

SEQ ID NO: 234840 - DNA, 55 bp, Artificial
  Synthetic oligonucleotide
gggagcgatgtcccgggtgacaagcgcataagcgaaccggggtaccgtatgtgga

SEQ ID NO: 234841 - DNA, 55 bp, Artificial
  Synthetic oligonucleotide
gggatcccaaccgcagactgaacgcgcggtagggacttttgttgtatcttgaaag

SEQ ID NO: 234842 - DNA, 55 bp, Artificial
  Synthetic oligonucleotide
gggcaagtgcggaaagagcattgctggttcgtgatgcctaccttcattatcgcac

SEQ ID NO: 234843 - DNA, 55 bp, Artificial
  Synthetic oligonucleotide
cgtgacaccttagcactgcgctctaatatgctctcgcagagcctttcgccctcta

SEQ ID NO: 234844 - DNA, 55 bp, Artificial
  Synthetic oligonucleotide
cgtgggtgccgcagttgattcagtcgcatgtgggacgtctcatcgtcgcgctcac

SEQ ID NO: 234845 - DNA, 55 bp, Artificial
  Synthetic oligonucleotide
atcgtcagtggacgcacagagggacgagagagtccttcttctggtaacggcaacg

SEQ ID NO: 234846 - DNA, 55 bp, Artificial
  Synthetic oligonucleotide
gggcagacccagccagatagccagacccacgagtgcaaagccggggataagtgtt

SEQ ID NO: 234847 - DNA, 55 bp, Artificial
  Synthetic oligonucleotide
cgttataataagccccttcgtagacatattcccatataggcgcatagacccgcgt

SEQ ID NO: 234848 - DNA, 55 bp, Artificial
  Synthetic oligonucleotide
cgggacatgattcaaaaccgtggatcggacagcggcgctagtttacgctttgcgg

SEQ ID NO: 234849 - DNA, 55 bp, Artificial
  Synthetic oligonucleotide
gcccggttcgagcaaagctcgcttcgcggttgcgtaattctcacggcactcgtac

SEQ ID NO: 234850 - DNA, 55 bp, Artificial
  Synthetic oligonucleotide
gctaggactattgtttgcccgcttgtcgataggcgacgccgataaaccggacgct

SEQ ID NO: 234851 - DNA, 55 bp, Artificial
  Synthetic oligonucleotide
ggactcctgtctttgtgccactctgccgctaccctgtaaagccgacgcacgcgac

SEQ ID NO: 234852 - DNA, 55 bp, Artificial
  Synthetic oligonucleotide
gggccacgagcgtatcgaagtcttgggagaacagttcgacccggcatgtcaccga

SEQ ID NO: 234853 - DNA, 55 bp, Artificial
  Synthetic oligonucleotide
ggggtgcgtacggatgcgagggttagatcttgcacggtgcatagcccggtcaaac

SEQ ID NO: 234854 - DNA, 55 bp, Artificial
  Synthetic oligonucleotide
gtcgacgcgcccatggatcatcccgattacgcgctatttccactcagtacggtcg

SEQ ID NO: 234855 - DNA, 55 bp, Artificial
  Synthetic oligonucleotide
ccagcgatgaacgatagtcgggtatctccgccatgaacagtacggattcatagcc

SEQ ID NO: 234856 - DNA, 55 bp, Artificial
  Synthetic oligonucleotide
tacaggctgccacggtacgctggcgcgcccatagcgggaatgaagcgccttacga

SEQ ID NO: 234857 - DNA, 55 bp, Artificial
  Synthetic oligonucleotide
caggggtcacgcctaattccttattaaatcgacgcgcatgatagcgcccgcatcc

SEQ ID NO: 234858 - DNA, 55 bp, Artificial
  Synthetic oligonucleotide
tcggttgacgcccttccaaactatcccgcggactgcgaagcccgacgcgcctaat

SEQ ID NO: 234859 - DNA, 55 bp, Artificial
  Synthetic oligonucleotide
cgtgggtactgctggattcgctcctgatccgctatcgccagattctgtcgcgggc

SEQ ID NO: 234860 - DNA, 55 bp, Artificial
  Synthetic oligonucleotide
tgtcgcgtagtcgctgtgccttatcgaatggaaggcgaggatttggtgctcaccg

SEQ ID NO: 234861 - DNA, 54 bp, Artificial
  Synthetic oligonucleotide
cgaccaatacggtgccaagccatgctgcggacaatacgtttgccagtcggaata

SEQ ID NO: 234862 - DNA, 54 bp, Artificial
  Synthetic oligonucleotide
acgtatctggtggctcaacaacgaacagttatctgcgatcaaaatccgctatag

SEQ ID NO: 234863 - DNA, 54 bp, Artificial
  Synthetic oligonucleotide
ctccccttaccgttgttgccatcgccagtaaccgggcaccacggattgtcaggc

SEQ ID NO: 234864 - DNA, 53 bp, Artificial
  Synthetic oligonucleotide
cggagtctgcagctctatcgtgatgcgttgggcagcgacgatctgatgctatt

SEQ ID NO: 234865 - DNA, 52 bp, Artificial
  Synthetic oligonucleotide
gaaggtacttaacacatggctattggattggtaggtcgcaagcgcggcatgt

SEQ ID NO: 234866 - DNA, 51 bp, Artificial
  Synthetic oligonucleotide
cgatatgagttcctatcagtccacgcccgttgaagggcccgcgtagtacgt

SEQ ID NO: 234867 - DNA, 51 bp, Artificial
  Synthetic oligonucleotide
tacagaacgaatggtgcactccctcgtccgggtcagctagaccgacgcaaa

SEQ ID NO: 234868 - DNA, 51 bp, Artificial
  Synthetic oligonucleotide
tagcgaccccaggatggatggctcggtgcggtcatgtcgctagcctataca

SEQ ID NO: 234869 - DNA, 50 bp, Artificial
  Synthetic oligonucleotide
ctaggggacatatcgaccacgactgttttgttcgagacaagcgattgcac

SEQ ID NO: 234870 - DNA, 55 bp, Artificial
  Synthetic oligonucleotide
cgtgtgccggcctattgattcgttcttgtaccgggacatcggcctaagatccgtc

SEQ ID NO: 234871 - DNA, 50 bp, Artificial
  Synthetic oligonucleotide
acgtcgctcgtacgaagcccacacagcgtgtcacgtgatagcactcggct

SEQ ID NO: 234872 - DNA, 50 bp, Artificial
  Synthetic oligonucleotide
acgtcaccggtttgggaacgcttgttcgccagttcggtgaatgggaccgc

SEQ ID NO: 234873 - DNA, 50 bp, Artificial
  Synthetic oligonucleotide
tcgctcatcgactgctgaatgctcacactatagcgtcggaaccgcttcga

SEQ ID NO: 234874 - DNA, 50 bp, Artificial
  Synthetic oligonucleotide
acgtacaacctggcgccgcaagtgtgcgctgctattcgagcgatgtgcat

SEQ ID NO: 234875 - DNA, 50 bp, Artificial
  Synthetic oligonucleotide
aaaccagctactgaccgcaggcggcttcgaacgacactagctatcgccgc

SEQ ID NO: 234876 - DNA, 50 bp, Artificial
  Synthetic oligonucleotide
aaacgagtcctccgaccctcagccggggcccaaaacggacatcgaatctt

SEQ ID NO: 234877 - DNA, 50 bp, Artificial
  Synthetic oligonucleotide
aaagcagcgtccgtccgaccgttcttcccattacgcgctcccgtcattcg

SEQ ID NO: 234878 - DNA, 50 bp, Artificial
  Synthetic oligonucleotide
aaagttcacggacctgcgacgtcggtacagccagagcggtcgctccatgt

SEQ ID NO: 234879 - DNA, 50 bp, Artificial
  Synthetic oligonucleotide
aaatgccgtgaaccgcgcccgtgcctaatacggccccgtcttagctcgac

SEQ ID NO: 234880 - DNA, 50 bp, Artificial
  Synthetic oligonucleotide
aaccgcattgcccaggcaccgcgagcgggctttctcgtatatcgccatgg

SEQ ID NO: 234881 - DNA, 55 bp, Artificial
  Synthetic oligonucleotide
cgttaacgtccagactagttcagcacgatgacagtctcataaccgagcgccgtga

SEQ ID NO: 234882 - DNA, 50 bp, Artificial
  Synthetic oligonucleotide
aaccggggaagctcgcatggacccgtccaagaacagcccgttgtcacgtc

SEQ ID NO: 234883 - DNA, 50 bp, Artificial
  Synthetic oligonucleotide
aacttgcagggaaagccgtggctctgggacggccaccttgtacggcacat

SEQ ID NO: 234884 - DNA, 50 bp, Artificial
  Synthetic oligonucleotide
aagatcacacctagcgccagcctgtcttggcaacggcaaggcatgaccgg

SEQ ID NO: 234885 - DNA, 50 bp, Artificial
  Synthetic oligonucleotide
aagctaccgattacccgcgccgcgtttaccagcggcagttcgccctatcg

SEQ ID NO: 234886 - DNA, 50 bp, Artificial
  Synthetic oligonucleotide
aaggtggctcggttggggagccctgtgagcgcgtcgtaacggctggtgta

SEQ ID NO: 234887 - DNA, 50 bp, Artificial
  Synthetic oligonucleotide
aatacgcgtgtgagccgcttgtaacgctgtcgactggcccctcatcccta

SEQ ID NO: 234888 - DNA, 50 bp, Artificial
  Synthetic oligonucleotide
aatcgcgttctcgcgcactaccacgcgcgcactggcctgtagggtttcgt

SEQ ID NO: 234889 - DNA, 50 bp, Artificial
  Synthetic oligonucleotide
acaagaatcgccacaggcgcctccgctagtcctcgcggttccttacccag

SEQ ID NO: 234890 - DNA, 50 bp, Artificial
  Synthetic oligonucleotide
acacgtgctcgatacaacgagcttggttgcagagcctatcggcgccgggg

SEQ ID NO: 234891 - DNA, 50 bp, Artificial
  Synthetic oligonucleotide
acactctgggaaggccgctacagggcgagtctggttgaagccgaacggta

SEQ ID NO: 234892 - DNA, 55 bp, Artificial
  Synthetic oligonucleotide
cgaagcgactaacgtcgaataacccgcggccctacgcgccagtatagtcggatcg

SEQ ID NO: 234893 - DNA, 50 bp, Artificial
  Synthetic oligonucleotide
acggcctctgtgaccggcgtcgcaatttcgtgtagccgtcgaccatagca

SEQ ID NO: 234894 - DNA, 50 bp, Artificial
  Synthetic oligonucleotide
acggcatcaccggtcacgaaacgagtcctccgaccctcagccggggccca

SEQ ID NO: 234895 - DNA, 50 bp, Artificial
  Synthetic oligonucleotide
acgcgttgcagtacgcatccgatctagcagcgggctcaatccgtggaccc

SEQ ID NO: 234896 - DNA, 50 bp, Artificial
  Synthetic oligonucleotide
acgcctggctagacccgcgtagcgacttgaggcagtcagcatacgtgcga

SEQ ID NO: 234897 - DNA, 50 bp, Artificial
  Synthetic oligonucleotide
acgcatagctcgtcgtgagcggcaacaagcatgagacaacgcagccgcgt

SEQ ID NO: 234898 - DNA, 50 bp, Artificial
  Synthetic oligonucleotide
acgcactgcaaacgccggcatagttgatagcgtagcccggaacgcagcgt

SEQ ID NO: 234899 - DNA, 50 bp, Artificial
  Synthetic oligonucleotide
acgatactgcgggtgccaagccgactagccgaagacttgcgtcccacgcg

SEQ ID NO: 234900 - DNA, 50 bp, Artificial
  Synthetic oligonucleotide
acgacgcccgattggcttaattcacgctactgggcgaatcccgagcgctg

SEQ ID NO: 234901 - DNA, 50 bp, Artificial
  Synthetic oligonucleotide
acgaaacctacaaattcgctggcagcctcgtgcgccgacttacctcgcgg

SEQ ID NO: 234902 - DNA, 50 bp, Artificial
  Synthetic oligonucleotide
accgttgggcaatcgagtctatgccggcactcccagagcgcctatccgta

SEQ ID NO: 234903 - DNA, 55 bp, Artificial
  Synthetic oligonucleotide
gaacgaatttctcggagaccttagcgcccgccgagaacaatgcaatccgaacctg

SEQ ID NO: 234904 - DNA, 50 bp, Artificial
  Synthetic oligonucleotide
accgggctcaatctagtcggcgtgtggctgacgggggcgcgtgactggtt

SEQ ID NO: 234905 - DNA, 50 bp, Artificial
  Synthetic oligonucleotide
accggagaacagaccatggcgatatacgagaaagcccgctcgcggtgcct

SEQ ID NO: 234906 - DNA, 50 bp, Artificial
  Synthetic oligonucleotide
accgcgcccgtgcctaatacggccccgtcttagctcgacttggtcattcc

SEQ ID NO: 234907 - DNA, 50 bp, Artificial
  Synthetic oligonucleotide
accgcccgcaataggcaggctccagggtacgattgtctgtactgggcagg

SEQ ID NO: 234908 - DNA, 50 bp, Artificial
  Synthetic oligonucleotide
acccggtccgcgccaagagtttgcccgataagccggagaactatcgctgg

SEQ ID NO: 234909 - DNA, 50 bp, Artificial
  Synthetic oligonucleotide
acagcaagcgagcttagcagccgtggaccagttgagcgcccaaccgttgt

SEQ ID NO: 234910 - DNA, 50 bp, Artificial
  Synthetic oligonucleotide
acagaccatggcgatatacgagaaagcccgctcgcggtgcctgggcaatg

SEQ ID NO: 234911 - DNA, 55 bp, Artificial
  Synthetic oligonucleotide
cctatgcgcagcggcctacaccgaaagtcttagccgtatggtgccgcagtatcgg

SEQ ID NO: 234912 - DNA, 55 bp, Artificial
  Synthetic oligonucleotide
gaatggtgcactccccgctagtgcttgagggctcgagcgccgacattcctgtcgt

SEQ ID NO: 234913 - DNA, 55 bp, Artificial
  Synthetic oligonucleotide
gcacttgttagtagtaacgttcgtcggatttaggcggcacccattgataaagcca

SEQ ID NO: 234914 - DNA, 55 bp, Artificial
  Synthetic oligonucleotide
cacccgtaccctttgggtaagctctggaattccggacacatgatcctcgtcaaag

SEQ ID NO: 234915 - DNA, 55 bp, Artificial
  Synthetic oligonucleotide
ctctgctctgagacgcgtgctgcggttcacctgtgaacgactggactgtaaccgg

SEQ ID NO: 234916 - DNA, 55 bp, Artificial
  Synthetic oligonucleotide
gacaggcagtccagactgccctctcaaagcgtaccggggagggttctgcaagtcc

SEQ ID NO: 234917 - DNA, 52 bp, Artificial
  Synthetic oligonucleotide
gacctacgaccccgtaacctacgcgtccgtaagttattctggtcaggtgacc

SEQ ID NO: 234918 - DNA, 55 bp, Artificial
  Synthetic oligonucleotide
ggcaccagatggatgcgtcggttttcaggaatcgtacggtactcacatgggctcc

SEQ ID NO: 234919 - DNA, 55 bp, Artificial
  Synthetic oligonucleotide
acgacagggacgacgggcacacgggcgtcgagaagtccttaggctggtcgtatga

SEQ ID NO: 234920 - DNA, 55 bp, Artificial
  Synthetic oligonucleotide
acctcccgggcgcctgagcccctctgtcctcacgctggtggcacactagggccat

SEQ ID NO: 234921 - DNA, 55 bp, Artificial
  Synthetic oligonucleotide
ggctgtggatgaagtttcgccgactgttacctaatcgagacgcaggacacacccc

SEQ ID NO: 234922 - DNA, 55 bp, Artificial
  Synthetic oligonucleotide
ggtcgcatggacgcaccatccaggtcccacgcgaagagaacggctcaccatgaga

SEQ ID NO: 234923 - DNA, 55 bp, Artificial
  Synthetic oligonucleotide
gtcgacgcacgacgacgcgaggctcgacgcaccacgacacacgtctcgacacaca

SEQ ID NO: 234924 - DNA, 51 bp, Artificial
  Synthetic oligonucleotide
tcaaacggtacgtggtcggggtaccacaggtcaaacccacccctgaggacc

SEQ ID NO: 234925 - DNA, 55 bp, Artificial
  Synthetic oligonucleotide
atccaccgaccgaccgcacaggtcctcgcagactccaggaggtcaaccgtgacga

SEQ ID NO: 234926 - DNA, 55 bp, Artificial
  Synthetic oligonucleotide
tgtctaggttcgtcctggcttaggcgcttttcggagagcgggaccggatagcggc

SEQ ID NO: 234927 - DNA, 55 bp, Artificial
  Synthetic oligonucleotide
aagtccgcctagcagacggttcgatgtgcgacgtgggccctatgtcctatagtgg

SEQ ID NO: 234928 - DNA, 55 bp, Artificial
  Synthetic oligonucleotide
tgcctgatcgtgactgtgctcgacatcagaatctccctcaagattggccctgcac

SEQ ID NO: 234929 - DNA, 55 bp, Artificial
  Synthetic oligonucleotide
tgagccaggagctcatgctcgcgtccctccgaccggaaaacctcagccaagtctg

SEQ ID NO: 234930 - DNA, 54 bp, Artificial
  Synthetic oligonucleotide
atcgtgaggggcgtcacgagcccatcgcgcgtaaactcgagaggtgaagactcc

SEQ ID NO: 234931 - DNA, 54 bp, Artificial
  Synthetic oligonucleotide
agatcactggaacgcgggacccgattggaacttggagccaacttcggtctaaga

SEQ ID NO: 234932 - DNA, 53 bp, Artificial
  Synthetic oligonucleotide
caacaagttgaggtttcaatcacgttaacccggtctgccgaggtccgcctgtt

SEQ ID NO: 234933 - DNA, 53 bp, Artificial
  Synthetic oligonucleotide
aagggtggggaactctccacgcaatgtactttacatagcaaggacacgatgta

SEQ ID NO: 234934 - DNA, 53 bp, Artificial
  Synthetic oligonucleotide
agaggagagcgtcaccgttctcgctccacccgaagacgcagaggtccgccacg

SEQ ID NO: 234935 - DNA, 53 bp, Artificial
  Synthetic oligonucleotide
ggcctagacgatctagggtctgacgagacgacagcatgacagcacgacgagag

SEQ ID NO: 234936 - DNA, 55 bp, Artificial
  Synthetic oligonucleotide
cccggaaagtatgggaacctcctgggtgcgcgtgacgttcagtcatcatgcactc

SEQ ID NO: 234937 - DNA, 52 bp, Artificial
  Synthetic oligonucleotide
ccttggtgacacgcacactagtggtccgtcggttaacagggtgttaccggag

SEQ ID NO: 234938 - DNA, 50 bp, Artificial
  Synthetic oligonucleotide
cagagcgtgatcttcaggggtctgcgcacagggggttcctcgtctcaggg

SEQ ID NO: 234939 - DNA, 50 bp, Artificial
  Synthetic oligonucleotide
cacgtcacacgtgccacgactgcatgatgagatcgcccgtccgtcaggtg

SEQ ID NO: 234940 - DNA, 50 bp, Artificial
  Synthetic oligonucleotide
cacggccgggaccaacccagcgccgtgctcagtgttctgcggctcgtcag

SEQ ID NO: 234941 - DNA, 50 bp, Artificial
  Synthetic oligonucleotide
cacggattctcaggtcagatgccgagacgggctcggagctctccccgagg

SEQ ID NO: 234942 - DNA, 50 bp, Artificial
  Synthetic oligonucleotide
cacgaccccgacgatagcagccgacagggttgacagtcgctgacacgggt

SEQ ID NO: 234943 - DNA, 50 bp, Artificial
  Synthetic oligonucleotide
caccagcgagagatcccggtctggtcgcatggacgcaccatccaggtccc

SEQ ID NO: 234944 - DNA, 50 bp, Artificial
  Synthetic oligonucleotide
cacaggggtgcgctgtccgcaggggtggtctgacccgcgtaccggtctcg

SEQ ID NO: 234945 - DNA, 50 bp, Artificial
  Synthetic oligonucleotide
aaacctcatggtcaccagcgagagatcccggtctggtcgcatggacgcac

SEQ ID NO: 234946 - DNA, 50 bp, Artificial
  Synthetic oligonucleotide
aagacccagaggtctcagccggcttggcgcctgaagttcacttgcgtcaa

SEQ ID NO: 234947 - DNA, 55 bp, Artificial
  Synthetic oligonucleotide
ccgatccgctcatctgggcgtcagaactgctcgattgccatcccactaagggcgc

SEQ ID NO: 234948 - DNA, 50 bp, Artificial
  Synthetic oligonucleotide
accaaagcgcacgttacccccgcaagttctaggccacgcgtatcgttcga

SEQ ID NO: 234949 - DNA, 50 bp, Artificial
  Synthetic oligonucleotide
accagccccgggtacggtcgggggacggatcgcggctctcagacgttgac

SEQ ID NO: 234950 - DNA, 50 bp, Artificial
  Synthetic oligonucleotide
acctctgaggcacgaactcgctccgtacgcacgatctcgctccggctcac

SEQ ID NO: 234951 - DNA, 50 bp, Artificial
  Synthetic oligonucleotide
acgccgtcacgtcggaagagcttgagtgctgatgagaggtgggtgcgagc

SEQ ID NO: 234952 - DNA, 50 bp, Artificial
  Synthetic oligonucleotide
acgggcacacgggcgtcgagaagtccttaggctggtcgtatgaccccctc

SEQ ID NO: 234953 - DNA, 50 bp, Artificial
  Synthetic oligonucleotide
agacgtcagtcacggggagccaatcgcgcagagggggccacctgagcagc

SEQ ID NO: 234954 - DNA, 50 bp, Artificial
  Synthetic oligonucleotide
agactgtccacagggtgacgagcaccctcgatcgctcttgccaggcacgg

SEQ ID NO: 234955 - DNA, 50 bp, Artificial
  Synthetic oligonucleotide
agagcacctcccgggcgcctgagcccctctgtcctcacgctggtggcaca

SEQ ID NO: 234956 - DNA, 50 bp, Artificial
  Synthetic oligonucleotide
agcaccaggagagcacctcccgggcgcctgagcccctctgtcctcacgct

SEQ ID NO: 234957 - DNA, 50 bp, Artificial
  Synthetic oligonucleotide
aggccgggtgaagactgtccacagggtgacgagcaccctcgatcgctctt

SEQ ID NO: 234958 - DNA, 55 bp, Artificial
  Synthetic oligonucleotide
ccttcgactcgtggactaccagtaccacaaacggaagtggcacacgtgacccagg

SEQ ID NO: 234959 - DNA, 50 bp, Artificial
  Synthetic oligonucleotide
aggcgccggagtgtacgagccctgctacgagtaccacttctccgagatcg

SEQ ID NO: 234960 - DNA, 50 bp, Artificial
  Synthetic oligonucleotide
agggacctggcggcttgcacctttcggaggaaggcacagggatgcagggc

SEQ ID NO: 234961 - DNA, 50 bp, Artificial
  Synthetic oligonucleotide
agggcatcctgtcgtgagagcacgacaccgcatgagagcacgactccgca

SEQ ID NO: 234962 - DNA, 50 bp, Artificial
  Synthetic oligonucleotide
aggttgcgccatcacggatgacgggagggttcggattgcttgcctgcatg

SEQ ID NO: 234963 - DNA, 50 bp, Artificial
  Synthetic oligonucleotide
agtgcccttgcctgtacatcgacgagggtcctcaggctgtcacgtcacga

SEQ ID NO: 234964 - DNA, 50 bp, Artificial
  Synthetic oligonucleotide
atcgagaacgttggtcactgctgctcctcgtctaggggttggcccgacca

SEQ ID NO: 234965 - DNA, 50 bp, Artificial
  Synthetic oligonucleotide
atcgtcatggttcaccgaccgctgtcctgccaacccgcactagaggcgca

SEQ ID NO: 234966 - DNA, 50 bp, Artificial
  Synthetic oligonucleotide
atgctctgacgtggtcggcacgggtaggctcgcctggtccttcccagcga

SEQ ID NO: 234967 - DNA, 50 bp, Artificial
  Synthetic oligonucleotide
caagacgaggagtgcagtcccgcaggccacagggtcccgtgcttgactcc

SEQ ID NO: 234968 - DNA, 55 bp, Artificial
  Synthetic oligonucleotide
agcggagccgtgcgtgggcgtcctgtgacgactctgaggcgtcctgcccacagga

SEQ ID NO: 234969 - DNA, 55 bp, Artificial
  Synthetic oligonucleotide
cgtagtagcgagccccgaacttgtagagattcgtgctgtcctcgagccctccgac

SEQ ID NO: 234970 - DNA, 55 bp, Artificial
  Synthetic oligonucleotide
agaggtgaggatggtcgcagagaaggaggtctcgagaggagggttcatgagccct

SEQ ID NO: 234971 - DNA, 55 bp, Artificial
  Synthetic oligonucleotide
cgtcacgcggcggttaggtaatgctcacctaacaccgatgatgctagacgccacc

SEQ ID NO: 234972 - DNA, 59 bp, Artificial
  Synthetic oligonucleotide
agccctggatcaaagtctggccctgagcctggagatgcccctacagcagggggaagacc

SEQ ID NO: 234973 - DNA, 60 bp, Artificial
  Synthetic oligonucleotide
tctgactgggcgtatgccactcagacaagtgtttggttgcggtacaatgcgaccggtatt

SEQ ID NO: 234974 - DNA, 51 bp, Artificial
  Synthetic oligonucleotide
tcatccccatcttgccctccgccaatgactttcgggcgatggagcaatttt

SEQ ID NO: 234975 - DNA, 50 bp, Artificial
  Synthetic oligonucleotide
aaactagcgtctacccgcgttacgacccccgcaaccggggaggtgatcag

SEQ ID NO: 234976 - DNA, 50 bp, Artificial
  Synthetic oligonucleotide
aagggatccgcagttgccagctggtgatgggcttgaccgtcctggcgcct

SEQ ID NO: 234977 - DNA, 50 bp, Artificial
  Synthetic oligonucleotide
aaggctacggcggcacctagtgcaggaactttgacggccaaagtgttggc

SEQ ID NO: 234978 - DNA, 50 bp, Artificial
  Synthetic oligonucleotide
aaggcgcggataccatccaatttggcacgggccgggtagaacacaaagcc

SEQ ID NO: 234979 - DNA, 50 bp, Artificial
  Synthetic oligonucleotide
aaagacggacaggaagtactgcgaacccaggttggcctcaaccgcctgga

SEQ ID NO: 234980 - DNA, 50 bp, Artificial
  Synthetic oligonucleotide
aagcggatcggtacgggctccagcccaaagcgaggttggaaggccagacc

SEQ ID NO: 234981 - DNA, 50 bp, Artificial
  Synthetic oligonucleotide
aagaggggttggtacccgcgttgttgaccgtttgagtccagcgagagccc

SEQ ID NO: 234982 - DNA, 50 bp, Artificial
  Synthetic oligonucleotide
aactgggctgatgcgctggagagatggcctcctggttaccgatccgccca

SEQ ID NO: 234983 - DNA, 50 bp, Artificial
  Synthetic oligonucleotide
tagctcgggtctgatcacattggtactgtccaacctgccgcctagtccta

SEQ ID NO: 234984 - DNA, 60 bp, Artificial
  Synthetic oligonucleotide
cgcattacggccaatcaaccaggattggtcaatggttttgcgcaacagttagtatctcgc

SEQ ID NO: 234985 - DNA, 50 bp, Artificial
  Synthetic oligonucleotide
tcaacagcacggagcaggtggttatgatcgtcgaagtcattgcaaggtag

SEQ ID NO: 234986 - DNA, 50 bp, Artificial
  Synthetic oligonucleotide
aacgtagtccatgcccgtgaggtcccgcacttgtggactgtgctgaacga

SEQ ID NO: 234987 - DNA, 50 bp, Artificial
  Synthetic oligonucleotide
aacggcaagccagggtgcgcttttatgccatttatcgggtgcaagccgcc

SEQ ID NO: 234988 - DNA, 50 bp, Artificial
  Synthetic oligonucleotide
aaagccgacaaaggggagccgctccgcctcaaaattcggggccgtaaaga

SEQ ID NO: 234989 - DNA, 50 bp, Artificial
  Synthetic oligonucleotide
aaccaggttccccgtgcgccaatagccgtttggatggtctcccaaaggga

SEQ ID NO: 234990 - DNA, 50 bp, Artificial
  Synthetic oligonucleotide
aaaggggtgatggctgcctgcgttgcgggagctccggtgccggaaatagg

SEQ ID NO: 234991 - DNA, 50 bp, Artificial
  Synthetic oligonucleotide
aaaggaggtgcgttggtggcgcacagtcgggcactttggctcacccagga

SEQ ID NO: 234992 - DNA, 50 bp, Artificial
  Synthetic oligonucleotide
tggttaactccaactggaccgatcaggtgaaatcagtgaccgtgggtgta

SEQ ID NO: 234993 - DNA, 50 bp, Artificial
  Synthetic oligonucleotide
aaaggcctgcgatccttcaccgtaggccgtatggccgcccagtgttcgat

SEQ ID NO: 234994 - DNA, 50 bp, Artificial
  Synthetic oligonucleotide
aaaggcctgcgacacaaactccagcacatcgggcaaagcttcgcgccaat

SEQ ID NO: 234995 - DNA, 57 bp, Artificial
  Synthetic oligonucleotide
acgatcaacttaaagcagggaatgacgaaagtttgcaagccctctatctcgataaaa

SEQ ID NO: 234996 - DNA, 50 bp, Artificial
  Synthetic oligonucleotide
cggacgcatgcttcgactcaacacctcgatcctacttttgaccatgttga

SEQ ID NO: 234997 - DNA, 50 bp, Artificial
  Synthetic oligonucleotide
cgggctttgggcaaagccggtacaatcctgaatatgggttccgtattggg

SEQ ID NO: 234998 - DNA, 50 bp, Artificial
  Synthetic oligonucleotide
cccatgcggtaaatgccatctccctgggggatcaggctataggactgatt

SEQ ID NO: 234999 - DNA, 50 bp, Artificial
  Synthetic oligonucleotide
acggcacccattgcagccaacgaccgtctggacaactttacggctagcgc

SEQ ID NO: 235000 - DNA, 50 bp, Artificial
  Synthetic oligonucleotide
acgctccaccatccccttggaagactaccctacccgcatgaccgcgcggc

SEQ ID NO: 235001 - DNA, 50 bp, Artificial
  Synthetic oligonucleotide
acgccgggcaatcacgtcgcggaaacccgaagggtacatgcgttcggagt

SEQ ID NO: 235002 - DNA, 50 bp, Artificial
  Synthetic oligonucleotide
acgccctggccaagtatgacgctgccgggcaattccagtgggcccgtacc

SEQ ID NO: 235003 - DNA, 50 bp, Artificial
  Synthetic oligonucleotide
acgcaaatagcggaactccgggctttcacttatcccgtgcaggccagcgg

SEQ ID NO: 235004 - DNA, 50 bp, Artificial
  Synthetic oligonucleotide
acctagacccccggggacctgatattggctcaaagcgcgtagtgcgcgga

SEQ ID NO: 235005 - DNA, 50 bp, Artificial
  Synthetic oligonucleotide
accgggtggggatactccgcaagttgggctccctgatcgaaaccccctcc

SEQ ID NO: 235006 - DNA, 56 bp, Artificial
  Synthetic oligonucleotide
ttgtattacaacgatgtacccgcccgcctaaccttaccctggtcagccagcctgtc

SEQ ID NO: 235007 - DNA, 50 bp, Artificial
  Synthetic oligonucleotide
gcgaacctcgtacttatcattggttttccagccctcgcggtatacccgat

SEQ ID NO: 235008 - DNA, 50 bp, Artificial
  Synthetic oligonucleotide
accgaggccaccttgtacaccttcgcgaaccctgcctgggatggggagta

SEQ ID NO: 235009 - DNA, 50 bp, Artificial
  Synthetic oligonucleotide
accgaggcagacgccaaccgcgagatgatgcgtgcaagggcgaataaccc

SEQ ID NO: 235010 - DNA, 50 bp, Artificial
  Synthetic oligonucleotide
accgacgggggctgtagtaccccagctgttcctcgtgaaggtggcacgat

SEQ ID NO: 235011 - DNA, 50 bp, Artificial
  Synthetic oligonucleotide
acccccatcgggtaacgctcgctcgccagtggagtattggttacgcgcac

SEQ ID NO: 235012 - DNA, 50 bp, Artificial
  Synthetic oligonucleotide
accccaggtcgtacgtgataccatgccgggtaaggggcaagggcaggagc

SEQ ID NO: 235013 - DNA, 50 bp, Artificial
  Synthetic oligonucleotide
accacttgccccaggtagcccgataactttagcgccgggatcaaacgggc

SEQ ID NO: 235014 - DNA, 50 bp, Artificial
  Synthetic oligonucleotide
accacacgcccggggcccactccggtagtatgctggcgaacgtaggtttg

SEQ ID NO: 235015 - DNA, 50 bp, Artificial
  Synthetic oligonucleotide
acatcccagtggagaggcccgcaaactgatgtatgaagctgcgccggctc

SEQ ID NO: 235016 - DNA, 50 bp, Artificial
  Synthetic oligonucleotide
ggctgttgccgatcaaagctgtacaatcttttcaggtacatcgcggtttt

SEQ ID NO: 235017 - DNA, 54 bp, Artificial
  Synthetic oligonucleotide
gagtttgtaaatcccgaaatcaacccggatacaagaattaacttgattcgtgtc

SEQ ID NO: 235018 - DNA, 50 bp, Artificial
  Synthetic oligonucleotide
acatacccggggtgcgttcctgccgttggtagtcgcccgcgaaagtacgc

SEQ ID NO: 235019 - DNA, 50 bp, Artificial
  Synthetic oligonucleotide
acagcggtcgttcgctgccctgacccaataagttcccgctgcagttgcac

SEQ ID NO: 235020 - DNA, 50 bp, Artificial
  Synthetic oligonucleotide
acactggcacgaagccggaggtagcgagtgtgccgatgtagcggttagcc

SEQ ID NO: 235021 - DNA, 50 bp, Artificial
  Synthetic oligonucleotide
aattccacggcgtagtgtccgggggcgagttgactcatcggcagggcaat

SEQ ID NO: 235022 - DNA, 50 bp, Artificial
  Synthetic oligonucleotide
aagtatgaccgggtgttccaaacgggaagcatgcagcgctcttggcccga

SEQ ID NO: 235023 - DNA, 50 bp, Artificial
  Synthetic oligonucleotide
aagtaccgtcgatgtacccttcttgcgcccaacggcgggaggccgatacc

SEQ ID NO: 235024 - DNA, 50 bp, Artificial
  Synthetic oligonucleotide
aaggttgggcagctggggcgaagtaatatgggctgttgggcccttgttcg

SEQ ID NO: 235025 - DNA, 56 bp, Artificial
  Synthetic oligonucleotide
ggaactaccaccgtagtcaagatgctgtcatgggcgggtataaacagaccgttctt

SEQ ID NO: 235026 - DNA, 56 bp, Artificial
  Synthetic oligonucleotide
ggttttggagcgaggtcgggatgtcaaacacatcgaggactatcctaccaccctaa

SEQ ID NO: 235027 - DNA, 58 bp, Artificial
  Synthetic oligonucleotide
acggaaagtaggatcgaactataccttatatggagacttcaagcgcacggtgatcaac

SEQ ID NO: 235028 - DNA, 58 bp, Artificial
  Synthetic oligonucleotide
cgctaaattaaggcgcattcaagtgcggccatgaaaagtaaaatggatcaagactcag

SEQ ID NO: 235029 - DNA, 57 bp, Artificial
  Synthetic oligonucleotide
tcaattcccaatgcagggtaggataaagcgcacaagccgcgatccacctttgtacaa

SEQ ID NO: 235030 - DNA, 56 bp, Artificial
  Synthetic oligonucleotide
cccactggcgtctctcggatcggagtaggcatccatcaggagtttacccccggcgg

SEQ ID NO: 235031 - DNA, 54 bp, Artificial
  Synthetic oligonucleotide
gcgggcaggtacaatttgtcggtccaggacttgcgccagggggccaccccttgt

SEQ ID NO: 235032 - DNA, 57 bp, Artificial
  Synthetic oligonucleotide
cgctcgtaacggccatgctcgctggggcaagtactccaaagtctaaacaattgcatt

SEQ ID NO: 235033 - DNA, 51 bp, Artificial
  Synthetic oligonucleotide
gtagttcgaaggccccccttacccgatacaggcgacccttgtaaaagacat

SEQ ID NO: 235034 - DNA, 55 bp, Artificial
  Synthetic oligonucleotide
aagctggttgaagcctcggtaaggcgtacgggtggcgtagttcatggcgggcagg

SEQ ID NO: 235035 - DNA, 55 bp, Artificial
  Synthetic oligonucleotide
gacaggtataggccaagtgggcgctttgaccccgctaagcttggattcgattccg

SEQ ID NO: 235036 - DNA, 55 bp, Artificial
  Synthetic oligonucleotide
gacaggtagtcaggccagtcttcgtcggaagtgcccgcgtcgacaggaacccagt

SEQ ID NO: 235037 - DNA, 55 bp, Artificial
  Synthetic oligonucleotide
agcctcggtaaggcgtacgggtggcgtagttcatggcgggcaggtacaatttgtc

SEQ ID NO: 235038 - DNA, 55 bp, Artificial
  Synthetic oligonucleotide
agaaccctgtaagcttctccggattcattacgattcatttcagcacttttcgacc

SEQ ID NO: 235039 - DNA, 55 bp, Artificial
  Synthetic oligonucleotide
gagcatcaattacagattaagccccgcatcctatagcacagacccctaccgagtc

SEQ ID NO: 235040 - DNA, 55 bp, Artificial
  Synthetic oligonucleotide
gaggtaaacaccctgggcggtatgctcaaacaatacgagatagccgtacaaccgg

SEQ ID NO: 235041 - DNA, 60 bp, Artificial
  Synthetic oligonucleotide
gacttgacgcccaccagcgctttgcgcatggattggtcgatcaaatagcccgaatccgta

SEQ ID NO: 235042 - DNA, 55 bp, Artificial
  Synthetic oligonucleotide
gcaatggattaagtgtcaacacccttgatcgagacgtgcccatcgttttccccgg

SEQ ID NO: 235043 - DNA, 54 bp, Artificial
  Synthetic oligonucleotide
cggcttgttgttttacgtctccacactcttccaccaaaccgagtaattcggtga

SEQ ID NO: 235044 - DNA, 55 bp, Artificial
  Synthetic oligonucleotide
cggaaaacaagtattttggcgtttcataagccgtgcccaggatgtaatgccaggc

SEQ ID NO: 235045 - DNA, 55 bp, Artificial
  Synthetic oligonucleotide
cgcctcgcctaatctcaaaactgctacgctttagtgtagttcaacttatgagtta

SEQ ID NO: 235046 - DNA, 55 bp, Artificial
  Synthetic oligonucleotide
cgttagttggtctatagtccgccagtagtcgtatgcttccctggaaatagagcgt

SEQ ID NO: 235047 - DNA, 53 bp, Artificial
  Synthetic oligonucleotide
cgcaaggcttcagcgaaaaggctttgatccgggacggtttccaaacggcccga

SEQ ID NO: 235048 - DNA, 55 bp, Artificial
  Synthetic oligonucleotide
cgttgggcttaaccagagtcggcgcgatagatgaacggaggaatgcggaccaggg

SEQ ID NO: 235049 - DNA, 54 bp, Artificial
  Synthetic oligonucleotide
cctgaccgttcaccagacaaggttcaccaacgacgaccagtttacctggcgtaa

SEQ ID NO: 235050 - DNA, 55 bp, Artificial
  Synthetic oligonucleotide
cccttagctcgtggcttgatgacgaatactttggatgtcagtaccttggccgaca

SEQ ID NO: 235051 - DNA, 55 bp, Artificial
  Synthetic oligonucleotide
ccctgaccattacaatcgtagatttctgaagccacaaagtcgttggcccataccg

SEQ ID NO: 235052 - DNA, 60 bp, Artificial
  Synthetic oligonucleotide
gtgatggaagaggcatttggattgccggaggagctattgggacaaagcagggaaattcaa

SEQ ID NO: 235053 - DNA, 49 bp, Artificial
  Synthetic oligonucleotide
cccggccctaagtaaaactaaaccccagttaataatcttattgcggtag

SEQ ID NO: 235054 - DNA, 55 bp, Artificial
  Synthetic oligonucleotide
ctatggccgaacaaactgaggactggcgaaagctgactgagcaggagcaaaatgc

SEQ ID NO: 235055 - DNA, 53 bp, Artificial
  Synthetic oligonucleotide
cagggcgtggggaatgtgtctttgtattatacccgctttcaaagaacctccgg

SEQ ID NO: 235056 - DNA, 55 bp, Artificial
  Synthetic oligonucleotide
cttgtagtgggaggtggtggcttgaacaacccactccgagtcaaaacttcagagg

SEQ ID NO: 235057 - DNA, 55 bp, Artificial
  Synthetic oligonucleotide
caagagggcactccccaaggcggcatcatatctcctgtattggcaaatatggccc

SEQ ID NO: 235058 - DNA, 53 bp, Artificial
  Synthetic oligonucleotide
atttggccgtaaggttacccgacggcacgatcaattacgtaccgagcaccacc

SEQ ID NO: 235059 - DNA, 55 bp, Artificial
  Synthetic oligonucleotide
tttgaaacgcccgactttcaggcgttcgaggtatgcttgggaaccctgccacatg

SEQ ID NO: 235060 - DNA, 55 bp, Artificial
  Synthetic oligonucleotide
aaagagatggccaagtagtaaattacaatggagttcccaggtttcaaggcataca

SEQ ID NO: 235061 - DNA, 54 bp, Artificial
  Synthetic oligonucleotide
ttgtggttgaacgacaacagcggggaaacctatgggaacataaggtggtctaac

SEQ ID NO: 235062 - DNA, 55 bp, Artificial
  Synthetic oligonucleotide
ttgcggggcattaaacattatctgcaacgcactgccatccagggccatccgacca

SEQ ID NO: 235063 - DNA, 58 bp, Artificial
  Synthetic oligonucleotide
accaggttcatcattgacgcagccaccaaaaaattcaacgtgccattaggggtgatcc

SEQ ID NO: 235064 - DNA, 54 bp, Artificial
  Synthetic oligonucleotide
ttccaaagtttgcgggtagagggcagcaggggataatccgccacgagggtgttt

SEQ ID NO: 235065 - DNA, 55 bp, Artificial
  Synthetic oligonucleotide
tgcattataccaaatttcacgtcgatttctaccaaacttcacgtgcatcagcccc

SEQ ID NO: 235066 - DNA, 55 bp, Artificial
  Synthetic oligonucleotide
tgaaacgccattgtaaactggccaaagcctcatggatgtggggttcacccgtacc

SEQ ID NO: 235067 - DNA, 55 bp, Artificial
  Synthetic oligonucleotide
aacgtcttacggtaaaggcggctccagctacatccagtagtctagcacaaatgta

SEQ ID NO: 235068 - DNA, 55 bp, Artificial
  Synthetic oligonucleotide
tacggatttcgacataacgcgaggtgatgaccatttgtatccccttcgcctcctg

SEQ ID NO: 235069 - DNA, 55 bp, Artificial
  Synthetic oligonucleotide
gttcgaggtagatttcggaatcggtagtcggctcagaaccgaggtataacaacca

SEQ ID NO: 235070 - DNA, 55 bp, Artificial
  Synthetic oligonucleotide
gttcctgatccgctggaattgagaatcggatgcgaatttgttcgagctgccgcaa

SEQ ID NO: 235071 - DNA, 52 bp, Artificial
  Synthetic oligonucleotide
gttcagttatgttggatacgaaacccgaaaagacactttcgattttccgctt

SEQ ID NO: 235072 - DNA, 55 bp, Artificial
  Synthetic oligonucleotide
gtggttccaaatcatttatacgcgtattcgagagcactagggtgcggaggagggt

SEQ ID NO: 235073 - DNA, 55 bp, Artificial
  Synthetic oligonucleotide
gtgatcgggcgtaggaatggccagtttagccgatttgtgcaggccttcgtattgg

SEQ ID NO: 235074 - DNA, 58 bp, Artificial
  Synthetic oligonucleotide
aagccgttcgaagatgcccaatctacccgaaggcctcagcaaagagcaattcagggaa

SEQ ID NO: 235075 - DNA, 55 bp, Artificial
  Synthetic oligonucleotide
gtccacctggcccaaagaatcgcctccgtgtaactggcattcagcaagtggccag

SEQ ID NO: 235076 - DNA, 53 bp, Artificial
  Synthetic oligonucleotide
aaggttggggccccggaaaatacgaagtgggcggctatgcccagaatcctgcg

SEQ ID NO: 235077 - DNA, 55 bp, Artificial
  Synthetic oligonucleotide
gtagtcattcagtggcggaaattaagctcggggtggctgccagatacaggagagg

SEQ ID NO: 235078 - DNA, 53 bp, Artificial
  Synthetic oligonucleotide
acacgttaaagtcaccgtacaaatgtagttggttaagttcagggcaccaatcg

SEQ ID NO: 235079 - DNA, 55 bp, Artificial
  Synthetic oligonucleotide
gggtatcttcgggaagggccacctgattctgtagaatttccagtcgactagcccc

SEQ ID NO: 235080 - DNA, 55 bp, Artificial
  Synthetic oligonucleotide
gcactagccaactgctgagcctctttgaagtgagggctatgcgggttgtcctcca

SEQ ID NO: 235081 - DNA, 54 bp, Artificial
  Synthetic oligonucleotide
gggcttcgagtggggagcttggttcggtaggttccagaagttggccaccagaaa

SEQ ID NO: 235082 - DNA, 55 bp, Artificial
  Synthetic oligonucleotide
ggcttggagtttctgtagacataatcacttcagggttgaaaaccagttggcaatg

SEQ ID NO: 235083 - DNA, 55 bp, Artificial
  Synthetic oligonucleotide
ggccacataaatcttgtcgccacgaacggctagtgcagaaaggttggtcgctccc

SEQ ID NO: 235084 - DNA, 55 bp, Artificial
  Synthetic oligonucleotide
ggcagccaagtgtataaaggcagtcttacaaaagttccatcacgtattggtagta

SEQ ID NO: 235085 - DNA, 60 bp, Artificial
  Synthetic oligonucleotide
aatcgggtccctcagcacatgatcgcttcttacctgggcatcacgccagttcacttgagt

SEQ ID NO: 235086 - DNA, 55 bp, Artificial
  Synthetic oligonucleotide
gcactcccactccagtaggatgtaactgcagcgtgagagagtctacactgaggac

SEQ ID NO: 235087 - DNA, 52 bp, Artificial
  Synthetic oligonucleotide
ggagctcgggttgtcggtcaatttggataagtcggtaaacgggcgtcccgag

SEQ ID NO: 235088 - DNA, 55 bp, Artificial
  Synthetic oligonucleotide
gctcgatcgtgacagttctgccagcgagctggatgtatccaagttacgcgacaac

SEQ ID NO: 235089 - DNA, 55 bp, Artificial
  Synthetic oligonucleotide
gcgccaacaccagtgcgtcaagcaaggttactgcgatacagacgggaataccctg

SEQ ID NO: 235090 - DNA, 55 bp, Artificial
  Synthetic oligonucleotide
gcccatctgggctgtaacttacactactgaccccatcgtcatacccctgcagcgt

SEQ ID NO: 235091 - DNA, 55 bp, Artificial
  Synthetic oligonucleotide
gcccctggccagcagtaataccaatgagttgattcattgggcgaggctgttggtg

SEQ ID NO: 235092 - DNA, 54 bp, Artificial
  Synthetic oligonucleotide
tttgcccgcgctgggttcgaggatcgagtgaacggagcgcaagttcaccaggga

SEQ ID NO: 235093 - DNA, 54 bp, Artificial
  Synthetic oligonucleotide
cgtacgggtggcgtagttcatggcgggcaggtacaatttgtcggtccaggactt

SEQ ID NO: 235094 - DNA, 54 bp, Artificial
  Synthetic oligonucleotide
tccgttagtgaaatgtagtcgtcctcctgtatcgataggaggcgtatttgtacg

SEQ ID NO: 235095 - DNA, 54 bp, Artificial
  Synthetic oligonucleotide
gaaccgtcgtgcttctgggagcgggtagagtcgatgcagaccgttaggttaggc

SEQ ID NO: 235096 - DNA, 56 bp, Artificial
  Synthetic oligonucleotide
gcgagaactcgctttcaactacaatgggttatctaacagaaccaaggaattaacca

SEQ ID NO: 235097 - DNA, 54 bp, Artificial
  Synthetic oligonucleotide
gtagggaaagcggcttacgccctggataaccaggctatctcctttggtcagtac

SEQ ID NO: 235098 - DNA, 52 bp, Artificial
  Synthetic oligonucleotide
aaggacggcccgtggcgtaaatccaggtggccgaaaggtcccagcgacccat

SEQ ID NO: 235099 - DNA, 54 bp, Artificial
  Synthetic oligonucleotide
cgcctcaattgccagtgcaggagggttaactatcctgaactttccggtattcgg

SEQ ID NO: 235100 - DNA, 54 bp, Artificial
  Synthetic oligonucleotide
cgccctggcgcaataatccattgacgtcaaatccggtggtgactcccaactgta

SEQ ID NO: 235101 - DNA, 54 bp, Artificial
  Synthetic oligonucleotide
cccctccttcgatcaaagttgcgatacctttgagcggaattttacataattcgt

SEQ ID NO: 235102 - DNA, 54 bp, Artificial
  Synthetic oligonucleotide
aaatagccgggagcatgcgcgaagcgtagctagcggcggtatcccatttgtcgg

SEQ ID NO: 235103 - DNA, 54 bp, Artificial
  Synthetic oligonucleotide
agtagatcaagttgctcagagggtaaaggtcgccaagacgggtaccatccaaaa

SEQ ID NO: 235104 - DNA, 54 bp, Artificial
  Synthetic oligonucleotide
agctcgttccgagtgaacttaatgccgaaattttattgcccaacaccattgccg

SEQ ID NO: 235105 - DNA, 53 bp, Artificial
  Synthetic oligonucleotide
tccatcaggagtttacccccggcggtggaggctagctctacagtgtagcctgc

SEQ ID NO: 235106 - DNA, 53 bp, Artificial
  Synthetic oligonucleotide
tcggatcggagtaggcatccatcaggagtttacccccggcggtggaggctagc

SEQ ID NO: 235107 - DNA, 56 bp, Artificial
  Synthetic oligonucleotide
cgagagaaaggttgtaggtgccccctccttcgatcaaagttgcgatacctttgagc

SEQ ID NO: 235108 - DNA, 53 bp, Artificial
  Synthetic oligonucleotide
tgaaaccgtcaactctacccacatgtaacgcaggacagcaatgggattgaaga

SEQ ID NO: 235109 - DNA, 51 bp, Artificial
  Synthetic oligonucleotide
agaaggtaaaggttggggccccggaaaatacgaagtgggcggctatgccca

SEQ ID NO: 235110 - DNA, 53 bp, Artificial
  Synthetic oligonucleotide
gagcaagtacgattttgaaggcccggctcgggataacttcgccgttgcctggc

SEQ ID NO: 235111 - DNA, 53 bp, Artificial
  Synthetic oligonucleotide
gcaaaggttccgccatagcgcccggttttggacactatccctaccgcttgcac

SEQ ID NO: 235112 - DNA, 52 bp, Artificial
  Synthetic oligonucleotide
gccatagcgcccggttttggacactatccctaccgcttgcacgcgctcaatc

SEQ ID NO: 235113 - DNA, 52 bp, Artificial
  Synthetic oligonucleotide
agtgccgaccaacatgtcggctatgcctgttctgatgaattctgggttgttg

SEQ ID NO: 235114 - DNA, 52 bp, Artificial
  Synthetic oligonucleotide
cacccgtggcagtaggcggttacgtagaaagcaaggtagaatacctacaaac

SEQ ID NO: 235115 - DNA, 51 bp, Artificial
  Synthetic oligonucleotide
ttctccgctagccaccaaccattctttcaccgtacagtcatgtgaccccga

SEQ ID NO: 235116 - DNA, 51 bp, Artificial
  Synthetic oligonucleotide
gggcagtggcaccatttccaccaaaacccgtatcccggtgcgtttggattg

SEQ ID NO: 235117 - DNA, 51 bp, Artificial
  Synthetic oligonucleotide
cgaagtgagcgcaggccctttgcacattcctgttcccgtttggaacacggt

SEQ ID NO: 235118 - DNA, 60 bp, Artificial
  Synthetic oligonucleotide
ggtatcccgccagctcaagagcaggacttgggtaagctgagccataatggtcaccgagcc

SEQ ID NO: 235119 - DNA, 55 bp, Artificial
  Synthetic oligonucleotide
cggttcgttgtgacttgccactcgaatctacctcacatgatcgcttgtctgtggg

SEQ ID NO: 235120 - DNA, 55 bp, Artificial
  Synthetic oligonucleotide
cgtgcgcctatccgctagagacggggtgagacattgagtatcgcggacaaatttt

SEQ ID NO: 235121 - DNA, 55 bp, Artificial
  Synthetic oligonucleotide
cgttccgcgttgcggatagtcctaacgctgatgcctgttctttccgcgagctggc

SEQ ID NO: 235122 - DNA, 55 bp, Artificial
  Synthetic oligonucleotide
gagcgaatcgataccgcttacggcactgcctacccaatgcataccggggcggcca

SEQ ID NO: 235123 - DNA, 55 bp, Artificial
  Synthetic oligonucleotide
gaggataaaggcatctcactcggaaactcgacagaattagtggcgcgttccacgc

SEQ ID NO: 235124 - DNA, 55 bp, Artificial
  Synthetic oligonucleotide
gcgaaagcatcatgtggatcgttgtggtcgcaactatgttcatcgtggctcagcc

SEQ ID NO: 235125 - DNA, 55 bp, Artificial
  Synthetic oligonucleotide
aaatcgtcgtccgccgtgtgtttgacgatcgcggggatcttcgcgagccccgccg

SEQ ID NO: 235126 - DNA, 55 bp, Artificial
  Synthetic oligonucleotide
tgttatagtaaatgaccggagatttctgcgacgggatcttcggagcagcggagca

SEQ ID NO: 235127 - DNA, 55 bp, Artificial
  Synthetic oligonucleotide
tgcgcatccggtctcctccaaagcgagcacgtattccaaggtcgtgcatccgtcc

SEQ ID NO: 235128 - DNA, 55 bp, Artificial
  Synthetic oligonucleotide
tcggaggggtacagaatgaacttgctcgccaaaacgtccatgcgccgatcctacg

SEQ ID NO: 235129 - DNA, 55 bp, Artificial
  Synthetic oligonucleotide
agggcctacaatgattcgccggtgtatttgctcgacgttcgaaagcgcgcggctg

SEQ ID NO: 235130 - DNA, 55 bp, Artificial
  Synthetic oligonucleotide
gggctgaatatcctacggaggatactacgctcctgcgttcggcgccacccaaaca

SEQ ID NO: 235131 - DNA, 55 bp, Artificial
  Synthetic oligonucleotide
aatagctgttctgaagcagaatcttcaaagtgtgatcgttcgcaaggtgtggtcg

SEQ ID NO: 235132 - DNA, 55 bp, Artificial
  Synthetic oligonucleotide
gggaggaaggattctgcaacgatagccactcgcacacttctgattgtgcccagcg

SEQ ID NO: 235133 - DNA, 55 bp, Artificial
  Synthetic oligonucleotide
acaaatgtcacacgttcgcggctgaagcggggtttcatcgcgtgacacgacttcc

SEQ ID NO: 235134 - DNA, 55 bp, Artificial
  Synthetic oligonucleotide
gggagaatgctccgcatgacccaagcaccgaagataacgagggaacaggtggccc

SEQ ID NO: 235135 - DNA, 55 bp, Artificial
  Synthetic oligonucleotide
ggctgcgtacgggaacgagcttcccggtcagcacaccttggggttccatgctctg

SEQ ID NO: 235136 - DNA, 55 bp, Artificial
  Synthetic oligonucleotide
ggagaacgctgctgcctgggcgtacaggatcatgaagacgacagatccgacgggg

SEQ ID NO: 235137 - DNA, 51 bp, Artificial
  Synthetic oligonucleotide
ggaaaacataccccgaatcaagccgcttttactttcctgttacgttggtaa

SEQ ID NO: 235138 - DNA, 54 bp, Artificial
  Synthetic oligonucleotide
ccgcagcgacatgctcatcgtaaagtcgatgtacacgtctttcggacggtcctc

SEQ ID NO: 235139 - DNA, 53 bp, Artificial
  Synthetic oligonucleotide
ttcactatgcggtagtcgccagctctgttccgctcaacgtcatggcacgatcc

SEQ ID NO: 235140 - DNA, 55 bp, Artificial
  Synthetic oligonucleotide
aggtcactgggccagtctatgcgcagctattgatcggacgaagggcgtggggcgt

SEQ ID NO: 235141 - DNA, 53 bp, Artificial
  Synthetic oligonucleotide
attgacggagaccgcatgaacgagacaaagactgtgttcccaccgggcacttt

SEQ ID NO: 235142 - DNA, 52 bp, Artificial
  Synthetic oligonucleotide
attccagccttacccgcgttgagggaagaacccctggtccgacgtccgaatg

SEQ ID NO: 235143 - DNA, 53 bp, Artificial
  Synthetic oligonucleotide
ttgtcatgacttcatgttagcacaacccagcctcgaaagttcggccgcccgaa

SEQ ID NO: 235144 - DNA, 53 bp, Artificial
  Synthetic oligonucleotide
gcgagttcggtaggatcgaattgttcccacaagccggtttgggcttctcggaa

SEQ ID NO: 235145 - DNA, 52 bp, Artificial
  Synthetic oligonucleotide
cgtccggaagagagagccatagcacatgatatggcaaaatcggagccacgtc

SEQ ID NO: 235146 - DNA, 52 bp, Artificial
  Synthetic oligonucleotide
tgactgacggcgcgagggtctgaaccccagatcgaacattcagtcgggctgt

SEQ ID NO: 235147 - DNA, 52 bp, Artificial
  Synthetic oligonucleotide
tctgcgcagtacgcccacaagactgggcgggccgactcccttccggctcccc

SEQ ID NO: 235148 - DNA, 52 bp, Artificial
  Synthetic oligonucleotide
tcacagcaactccccagttgcgtgagtgaaaggagatgcgtggtggctggac

SEQ ID NO: 235149 - DNA, 51 bp, Artificial
  Synthetic oligonucleotide
cttcactcgggaagggtagaatcaagtgatccaggcaactcgaatatctgg

SEQ ID NO: 235150 - DNA, 51 bp, Artificial
  Synthetic oligonucleotide
gttcggtctatgtcggccccggcaggcacttgtggccgttcgcgcgttcca

SEQ ID NO: 235151 - DNA, 55 bp, Artificial
  Synthetic oligonucleotide
catgcggccggttctttcgctactgcctattcaaccaggtttgaccttcgctggc

SEQ ID NO: 235152 - DNA, 51 bp, Artificial
  Synthetic oligonucleotide
gagcggccagcctaggcctgtcgttgtcggcccgattgggaatggcggtct

SEQ ID NO: 235153 - DNA, 50 bp, Artificial
  Synthetic oligonucleotide
accttacctgggcgagccgttgtgaactcgacctcatacctgcgggctcg

SEQ ID NO: 235154 - DNA, 50 bp, Artificial
  Synthetic oligonucleotide
accgctttcgccgcagtcctccacgagaccatacgcacgtcactcccttg

SEQ ID NO: 235155 - DNA, 50 bp, Artificial
  Synthetic oligonucleotide
acccgtagattgacgcgggtttgacccggaaaggcggctatgggctcgac

SEQ ID NO: 235156 - DNA, 50 bp, Artificial
  Synthetic oligonucleotide
acccctcaccttactgcgcccctcgtagagtagtgctgtgtcgagcgcgc

SEQ ID NO: 235157 - DNA, 50 bp, Artificial
  Synthetic oligonucleotide
accccgcttcaagctcatcgggccccgctgtcgcgagttacgcttcagtt

SEQ ID NO: 235158 - DNA, 50 bp, Artificial
  Synthetic oligonucleotide
accccgagagacccggacaccccgcctaattcagccataccgcagcctta

SEQ ID NO: 235159 - DNA, 50 bp, Artificial
  Synthetic oligonucleotide
accaaacgggccctcgagccgtccaatctagtgaacccgctgagaagcgc

SEQ ID NO: 235160 - DNA, 50 bp, Artificial
  Synthetic oligonucleotide
acaggagcaccatgagccgggtccgtttgcggttcacggtctcaaggagg

SEQ ID NO: 235161 - DNA, 50 bp, Artificial
  Synthetic oligonucleotide
acacgtccatgttagtccgacctatccaggtcactccgggcgggcaagcg

SEQ ID NO: 235162 - DNA, 55 bp, Artificial
  Synthetic oligonucleotide
ccgatccgccaatgtccacggtgaagaggttcgaccgatccaagccgtagaacac

SEQ ID NO: 235163 - DNA, 50 bp, Artificial
  Synthetic oligonucleotide
aatctccgaaacccacgtcaaagcgcgtgtccgggcctcttctgcccaag

SEQ ID NO: 235164 - DNA, 50 bp, Artificial
  Synthetic oligonucleotide
aaggcgagtcgtccacgcttttatgcgcgcctgttgcccattgccgcaat

SEQ ID NO: 235165 - DNA, 50 bp, Artificial
  Synthetic oligonucleotide
aacggttgtcagactccgtgtcggcctcaccgcgtctggcgtttcctctg

SEQ ID NO: 235166 - DNA, 50 bp, Artificial
  Synthetic oligonucleotide
aacgccatcacgctaaaagcccgatgttgcgccgccagtctcacggagtc

SEQ ID NO: 235167 - DNA, 50 bp, Artificial
  Synthetic oligonucleotide
aacgacctggaaagcgccgggagcaaagcttgggtggcgtacatcgacat

SEQ ID NO: 235168 - DNA, 50 bp, Artificial
  Synthetic oligonucleotide
aacctgtctctcctcacggtaccagtcagagcggcggacgcgctaggcct

SEQ ID NO: 235169 - DNA, 50 bp, Artificial
  Synthetic oligonucleotide
aaccccaccgcaggaggcttccgcgtgacagaaccagaaacaccgcagag

SEQ ID NO: 235170 - DNA, 50 bp, Artificial
  Synthetic oligonucleotide
aaccatgcgaccgagtgcgggtgtgcgcagagctccaagacaaccggttg

SEQ ID NO: 235171 - DNA, 50 bp, Artificial
  Synthetic oligonucleotide
agacgcttcgctgcggcggaggtatggccgacctgaaaggttatggtcgg

SEQ ID NO: 235172 - DNA, 50 bp, Artificial
  Synthetic oligonucleotide
agccgggaaattgcttcgacgtccgatgccctcctcatgaccgctgagct

SEQ ID NO: 235173 - DNA, 55 bp, Artificial
  Synthetic oligonucleotide
cgacagagaactcggcggaatagtcaataggtgtcgccactagggcaggctaccg

SEQ ID NO: 235174 - DNA, 50 bp, Artificial
  Synthetic oligonucleotide
agcggggcatccgacttgccaaatccgccgagaaactgccccaagggcaa

SEQ ID NO: 235175 - DNA, 50 bp, Artificial
  Synthetic oligonucleotide
agcggtcactcgcccagagctgcctttggctcgcagtgttgtgccccctg

SEQ ID NO: 235176 - DNA, 50 bp, Artificial
  Synthetic oligonucleotide
agcgtccgcttgctctttgggtgccgaggggccaactaccccctttaatg

SEQ ID NO: 235177 - DNA, 50 bp, Artificial
  Synthetic oligonucleotide
agcgtgcgttcttggcctaccccactggtcccgaagctcgagggcgtagg

SEQ ID NO: 235178 - DNA, 50 bp, Artificial
  Synthetic oligonucleotide
agcgtttgggccgcagcgtctctccaatcgttcggagactgaaccaacga

SEQ ID NO: 235179 - DNA, 50 bp, Artificial
  Synthetic oligonucleotide
agcttcgtggctcgtctagcacacagttgcgccggtcagtgggctaactg

SEQ ID NO: 235180 - DNA, 50 bp, Artificial
  Synthetic oligonucleotide
agcttgggggtggttattgggccgacccgagcaaaccggcatcggacacg

SEQ ID NO: 235181 - DNA, 50 bp, Artificial
  Synthetic oligonucleotide
aggatggtcatagccgacgagactacagtttgcccgccctgcttccgcag

SEQ ID NO: 235182 - DNA, 50 bp, Artificial
  Synthetic oligonucleotide
agacgcttcgccccctgtgcgctttttcacacgggctagatttgccgtgt

SEQ ID NO: 235183 - DNA, 50 bp, Artificial
  Synthetic oligonucleotide
agacgcgaaaagccgcctttgtcgcacgcctcgccacgacaactactccg

SEQ ID NO: 235184 - DNA, 55 bp, Artificial
  Synthetic oligonucleotide
acgtgaccttggacggacatcccgcgaggatcacgggctatagcttcccgttcgc

SEQ ID NO: 235185 - DNA, 50 bp, Artificial
  Synthetic oligonucleotide
aggtcgtcgcggttcttccggatttccaagtgggtccagcagctgggcgg

SEQ ID NO: 235186 - DNA, 50 bp, Artificial
  Synthetic oligonucleotide
agtcttgctgcgcaaactgtgactccaggcgaggcccctggtcaagcgag

SEQ ID NO: 235187 - DNA, 50 bp, Artificial
  Synthetic oligonucleotide
agtgcatatccttgcgcggccacaacagtagtccgcagtgagcagcccgt

SEQ ID NO: 235188 - DNA, 50 bp, Artificial
  Synthetic oligonucleotide
agacctctgggtcgtgtacgcgtcggtctatgtggagcgctcaagccaga

SEQ ID NO: 235189 - DNA, 50 bp, Artificial
  Synthetic oligonucleotide
agaacgggtcgcaacaatccggtccgagctggtcaaagcaggacgggacc

SEQ ID NO: 235190 - DNA, 50 bp, Artificial
  Synthetic oligonucleotide
actgcgggtccgtgtaacgggggtctgtgtcgtagctctctaggcgagga

SEQ ID NO: 235191 - DNA, 50 bp, Artificial
  Synthetic oligonucleotide
actcggccggggtgctgtgctcagtcaagtgggcgctccatcgtgtcatg

SEQ ID NO: 235192 - DNA, 50 bp, Artificial
  Synthetic oligonucleotide
actcctgtggcacaagtacgggcacgactccccatgggaccatggcggac

SEQ ID NO: 235193 - DNA, 50 bp, Artificial
  Synthetic oligonucleotide
actccctgtggaagggctccgacggtgagtgcctcgtgtaaagggtcccg

SEQ ID NO: 235194 - DNA, 50 bp, Artificial
  Synthetic oligonucleotide
actcaacatcgcaaccgccggacgtattcccgaaacctccgcgcgctttc

SEQ ID NO: 235195 - DNA, 55 bp, Artificial
  Synthetic oligonucleotide
cgcatgtggacaacaccacagtgttcctcgcgtcggtacccggtaggcttcccac

SEQ ID NO: 235196 - DNA, 50 bp, Artificial
  Synthetic oligonucleotide
acgggggtttaacggttgtcagactccgtgtcggcctcaccgcgtctggc

SEQ ID NO: 235197 - DNA, 50 bp, Artificial
  Synthetic oligonucleotide
acgcagggccgtggaaccggccgaggtctgttcaagacagctaggcaagg

SEQ ID NO: 235198 - DNA, 50 bp, Artificial
  Synthetic oligonucleotide
acgagtcgtttcttgcggacgccaatgcgtatgcggagcatgtgcgcccc

SEQ ID NO: 235199 - DNA, 55 bp, Artificial
  Synthetic oligonucleotide
cgcctctttgtcgtggggcatgtgtcccaggttactcctggcgggattcccttgt

SEQ ID NO: 235200 - DNA, 57 bp, Artificial
  Synthetic oligonucleotide
cgtagcggcgaagggttgtgagtcgctagaaagtcccaaatatccggcgtcactggc

SEQ ID NO: 235201 - DNA, 60 bp, Artificial
  Synthetic oligonucleotide
cgctgttgggtgaaggcgagatgagctatcaaggtcagattatttcggccgccgaaggct

SEQ ID NO: 235202 - DNA, 60 bp, Artificial
  Synthetic oligonucleotide
ttgctttgtgttactggagactgctctttgctgtttggctctggaatgtaagtaagccta

SEQ ID NO: 235203 - DNA, 50 bp, Artificial
  Synthetic oligonucleotide
cgcctcttcgcccctatgttcgacgcgaactgcgattggaccgacagcat

SEQ ID NO: 235204 - DNA, 50 bp, Artificial
  Synthetic oligonucleotide
acaaagtcgtaggcttccagcccacacccgggcaaggaggactgctcgtc

SEQ ID NO: 235205 - DNA, 50 bp, Artificial
  Synthetic oligonucleotide
cgcggcgtatactgcgcgcgagggtcatagctggctccatggataaagcg

SEQ ID NO: 235206 - DNA, 50 bp, Artificial
  Synthetic oligonucleotide
cgcggctatcgcctctgtctggtgaaacctcaaccgccagagttgtgcct

SEQ ID NO: 235207 - DNA, 50 bp, Artificial
  Synthetic oligonucleotide
ccacaagcaccaaccggagtgagttgctggcaaagcacagtttgcgctgc

SEQ ID NO: 235208 - DNA, 50 bp, Artificial
  Synthetic oligonucleotide
cgctcctcggcccaatgcagggtgtcaggatcacagcgctctcctgctag

SEQ ID NO: 235209 - DNA, 50 bp, Artificial
  Synthetic oligonucleotide
ccaaaccagggacactcgcggatttcccttaagcggcgccataggcaaga

SEQ ID NO: 235210 - DNA, 50 bp, Artificial
  Synthetic oligonucleotide
acgctgtggcgctcacccggtggcattcacccacccgagatgaaatccgt

SEQ ID NO: 235211 - DNA, 50 bp, Artificial
  Synthetic oligonucleotide
cgctcgtggcttgacgcccataacgttagctcggtgctagctctccccta

SEQ ID NO: 235212 - DNA, 50 bp, Artificial
  Synthetic oligonucleotide
aacagcgccgaaaggcacagcggggaaatcaccaaagggggttacgccag

SEQ ID NO: 235213 - DNA, 60 bp, Artificial
  Synthetic oligonucleotide
ttgctagcttgcaatcagggcacagtattcgcctatacgagctactaatgcgttttaacg

SEQ ID NO: 235214 - DNA, 50 bp, Artificial
  Synthetic oligonucleotide
cgctgcaagttcacccgctagcaaaggacccgcacaagcgataggagcgt

SEQ ID NO: 235215 - DNA, 50 bp, Artificial
  Synthetic oligonucleotide
aatgctctgcgcttcgtttaagctgccacccgcatctaactgcgcacggg

SEQ ID NO: 235216 - DNA, 50 bp, Artificial
  Synthetic oligonucleotide
acggctcacacaggccagtcacgccctcataagaggtcgcctcgctaacg

SEQ ID NO: 235217 - DNA, 50 bp, Artificial
  Synthetic oligonucleotide
aacaggcttccacgccattggaccacgcgctaacatggtctcacgacgcc

SEQ ID NO: 235218 - DNA, 50 bp, Artificial
  Synthetic oligonucleotide
tcggtgcaccagtgacaaccaccgcctaagccgattgtattaagggtggt

SEQ ID NO: 235219 - DNA, 50 bp, Artificial
  Synthetic oligonucleotide
acgggcaagatctgtcatgcctcggccaaaccctgtggtatcccccagta

SEQ ID NO: 235220 - DNA, 50 bp, Artificial
  Synthetic oligonucleotide
catggctacgcgcggtttggaccttatgccgtgaactacgaggcccctta

SEQ ID NO: 235221 - DNA, 50 bp, Artificial
  Synthetic oligonucleotide
acaacgcactgatcccgcagggtcttgcgaccaagggcccgctagcacct

SEQ ID NO: 235222 - DNA, 50 bp, Artificial
  Synthetic oligonucleotide
aacataccaagcccctgcgttatggcgcgttcgttcatactgtgcgccgg

SEQ ID NO: 235223 - DNA, 50 bp, Artificial
  Synthetic oligonucleotide
cgaggtggggacctcgctccacgataccatgcccccacacgagagcctcg

SEQ ID NO: 235224 - DNA, 57 bp, Artificial
  Synthetic oligonucleotide
ttgagcggtcgataaagacggtcgagtcaaagtccaccactaggcttgtgccttcgg

SEQ ID NO: 235225 - DNA, 50 bp, Artificial
  Synthetic oligonucleotide
accttgggcattggcggctcgggtggagcactggcccaatacctgatcgc

SEQ ID NO: 235226 - DNA, 50 bp, Artificial
  Synthetic oligonucleotide
tgcgtctaacaatcaacgtcgtggcgcttcgcccacacccgagccaaggg

SEQ ID NO: 235227 - DNA, 50 bp, Artificial
  Synthetic oligonucleotide
aaaggctcgccacgtaccaactgacttgcactcctcacgccactggccgg

SEQ ID NO: 235228 - DNA, 50 bp, Artificial
  Synthetic oligonucleotide
aattcggaacgcatgccagtgcgatcggccaccttcgcccacacattggg

SEQ ID NO: 235229 - DNA, 50 bp, Artificial
  Synthetic oligonucleotide
accttggtgcaccgcaagcgttttaccaagcgattgccaccgcttcgcaa

SEQ ID NO: 235230 - DNA, 50 bp, Artificial
  Synthetic oligonucleotide
aatgggctcaaagggccaagcaggggcggtgaggccttgattaaacgcct

SEQ ID NO: 235231 - DNA, 50 bp, Artificial
  Synthetic oligonucleotide
acgaccggtagagcccttgttcgcgccactgttccaagcagtaccggcca

SEQ ID NO: 235232 - DNA, 50 bp, Artificial
  Synthetic oligonucleotide
cgatactcactctgtcttgagcggcgaccacacgccacagcagtcccgcg

SEQ ID NO: 235233 - DNA, 50 bp, Artificial
  Synthetic oligonucleotide
aaagggctgccaccttaaccagcgagccagctgtaataccccggcactta

SEQ ID NO: 235234 - DNA, 50 bp, Artificial
  Synthetic oligonucleotide
aatggaagtgctctgcgcccatttagccgcataccttcgccagcgagtgc

SEQ ID NO: 235235 - DNA, 60 bp, Artificial
  Synthetic oligonucleotide
ttctgaagtggcgggtagtatcaagttcgtagacatgattgacggtgtcactatgacacg

SEQ ID NO: 235236 - DNA, 50 bp, Artificial
  Synthetic oligonucleotide
acgcagcgtcagggggaaaacctggtggctatcggtcaggataggacggg

SEQ ID NO: 235237 - DNA, 50 bp, Artificial
  Synthetic oligonucleotide
cgattgctgaggcaacgcaggtttcgcagcccaatccgttcgcgggtggt

SEQ ID NO: 235238 - DNA, 50 bp, Artificial
  Synthetic oligonucleotide
acgcagttccccgctcgggtcgtgcctaaatgagcgcagtggtgttcctc

SEQ ID NO: 235239 - DNA, 50 bp, Artificial
  Synthetic oligonucleotide
aaatcacacagtcacgcagcgggttttcagtggcatcggcgcgccatacg

SEQ ID NO: 235240 - DNA, 50 bp, Artificial
  Synthetic oligonucleotide
acgccacctgttgacccactaaaccgctaaaggcgctgctgcccttacga

SEQ ID NO: 235241 - DNA, 50 bp, Artificial
  Synthetic oligonucleotide
acgccagcggtttcccggtctaacctgtgggcaggggcgatagtgtcgat

SEQ ID NO: 235242 - DNA, 50 bp, Artificial
  Synthetic oligonucleotide
acgcccccggatggagcgacagccgtcctgctacaggcttactgcgagtt

SEQ ID NO: 235243 - DNA, 50 bp, Artificial
  Synthetic oligonucleotide
acgccctcatgcctggcacgttggccgccccctatagcatggtcgccacc

SEQ ID NO: 235244 - DNA, 50 bp, Artificial
  Synthetic oligonucleotide
acgccgatggacggtgattgtgtgatgcttgcgggcagtcgcagctactt

SEQ ID NO: 235245 - DNA, 50 bp, Artificial
  Synthetic oligonucleotide
acccgcatcgggtgcagcacagcgcccaaggctgatagttgccggtaggc

SEQ ID NO: 235246 - DNA, 60 bp, Artificial
  Synthetic oligonucleotide
ttcacctaagtagcgtgtgctttgcctaacgggataggcagatgcatcgatgccctctgt

SEQ ID NO: 235247 - DNA, 50 bp, Artificial
  Synthetic oligonucleotide
cgcaccaacttgtgccacctgccatatgtctgccacacgcgaacaagccg

SEQ ID NO: 235248 - DNA, 50 bp, Artificial
  Synthetic oligonucleotide
acgcctatccctggcgttgttccctttgagcgtgcccccaaagtgatgcg

SEQ ID NO: 235249 - DNA, 50 bp, Artificial
  Synthetic oligonucleotide
acgcgagtgggtaagggccgccgctgtagcaaatgacggctaacaagctg

SEQ ID NO: 235250 - DNA, 50 bp, Artificial
  Synthetic oligonucleotide
acccgaaaggttaagtgtcgctgcgagccccggcgccgcttttagcccac

SEQ ID NO: 235251 - DNA, 50 bp, Artificial
  Synthetic oligonucleotide
atgggggcggtagacacccacgctgggtcgaaacatgcccaaaattcgtg

SEQ ID NO: 235252 - DNA, 50 bp, Artificial
  Synthetic oligonucleotide
aggcaggggtaacacgataggaccggcatcccccatgatgggatttcccc

SEQ ID NO: 235253 - DNA, 50 bp, Artificial
  Synthetic oligonucleotide
aaggggcggacaccattgtaatcgccgcgagtttcctgggcgtaacccgc

SEQ ID NO: 235254 - DNA, 50 bp, Artificial
  Synthetic oligonucleotide
gagcccagtgccgagccaagccgtggctatccagaaaactgcgagctggg

SEQ ID NO: 235255 - DNA, 50 bp, Artificial
  Synthetic oligonucleotide
gcttacaacaccagcggtcaaaccgacctagccactggcacccgagtgca

SEQ ID NO: 235256 - DNA, 50 bp, Artificial
  Synthetic oligonucleotide
aggccatcggtacctgcaccgggtccatcgtatgccacattgggtgcacg

SEQ ID NO: 235257 - DNA, 60 bp, Artificial
  Synthetic oligonucleotide
ttatggatgaacgctgttgtattgcagactaggtgagaatggtagcaacatataggtgga

SEQ ID NO: 235258 - DNA, 50 bp, Artificial
  Synthetic oligonucleotide
gctggcaaagcacagtttgcgctgcggccttagcgagcttatcgccccct

SEQ ID NO: 235259 - DNA, 50 bp, Artificial
  Synthetic oligonucleotide
aggcccagctatggtgcgcacaaccgacgacaggtcaaagtgcagtgtgc

SEQ ID NO: 235260 - DNA, 50 bp, Artificial
  Synthetic oligonucleotide
atggcatcgtgactgccttcatggcggatgacagcatagcagcctccggc

SEQ ID NO: 235261 - DNA, 50 bp, Artificial
  Synthetic oligonucleotide
aggcccttgtccaccccttgttggctacgtagctgcacgatgtaacggcg

SEQ ID NO: 235262 - DNA, 50 bp, Artificial
  Synthetic oligonucleotide
aggccgaaaactcgccgacctgcctcgggttagtgaccttgcggtaaccg

SEQ ID NO: 235263 - DNA, 50 bp, Artificial
  Synthetic oligonucleotide
aggcctcgccagcgcttagggggtagcgagcaaccagctgacagtaactc

SEQ ID NO: 235264 - DNA, 50 bp, Artificial
  Synthetic oligonucleotide
atggcatcaaacccacgggacgggccgagcgtcagctattggttgagctg

SEQ ID NO: 235265 - DNA, 50 bp, Artificial
  Synthetic oligonucleotide
aggcgcccagccttacccaatggacgctccatggtcgacactagcttagg

SEQ ID NO: 235266 - DNA, 50 bp, Artificial
  Synthetic oligonucleotide
gagtcagcgcagttgccgagcgattgagtgtgcttgatttggcgccagct

SEQ ID NO: 235267 - DNA, 50 bp, Artificial
  Synthetic oligonucleotide
aggctatctgccgggcttaacggggcgtcctatggtggaagcgggtcaat

SEQ ID NO: 235268 - DNA, 56 bp, Artificial
  Synthetic oligonucleotide
ttaactcggtagacgcacacctcaactcggtagacgcacacctttaactcggtaga

SEQ ID NO: 235269 - DNA, 50 bp, Artificial
  Synthetic oligonucleotide
aaggagcagtggctaaaagcgcaagcggcttccaagcttgccagcaccac

SEQ ID NO: 235270 - DNA, 50 bp, Artificial
  Synthetic oligonucleotide
aggctcaggcctaacggctgtggcccgtcggtctgcttgtacttttccag

SEQ ID NO: 235271 - DNA, 50 bp, Artificial
  Synthetic oligonucleotide
aggctgcacagataggctcggtgcaaccaagtgcaggtttgacgacggcg

SEQ ID NO: 235272 - DNA, 50 bp, Artificial
  Synthetic oligonucleotide
aggcttggaggtcgcaggattggtgcgtgatggaaccccaggctggaaga

SEQ ID NO: 235273 - DNA, 50 bp, Artificial
  Synthetic oligonucleotide
agggagtgcgatttccaccagacgtgaaccatcagtgcccgctacggcca

SEQ ID NO: 235274 - DNA, 50 bp, Artificial
  Synthetic oligonucleotide
aagggcgaggcccggtcgctaaaaacgggatcgatcaaccaggtttggcc

SEQ ID NO: 235275 - DNA, 50 bp, Artificial
  Synthetic oligonucleotide
gctaagccaccgtatgatcgaagcctctctaccagagaagcaggtgattg

SEQ ID NO: 235276 - DNA, 50 bp, Artificial
  Synthetic oligonucleotide
agggcggagggaccagtatacctgcagcgcttgcagctaaagtgccacag

SEQ ID NO: 235277 - DNA, 50 bp, Artificial
  Synthetic oligonucleotide
accagccccctgagccgaacccaccgtcattcccagtgccagggccgata

SEQ ID NO: 235278 - DNA, 50 bp, Artificial
  Synthetic oligonucleotide
acacgggtcacgaccccattagcgataagagccaggaggtcgccgtctgc

SEQ ID NO: 235279 - DNA, 60 bp, Artificial
  Synthetic oligonucleotide
tgtcagtttgagttgcaaaggaaccatcacggttatgtttcagcacttgattacaaccat

SEQ ID NO: 235280 - DNA, 50 bp, Artificial
  Synthetic oligonucleotide
acactcgaatgcccctaaacgttgccagttcccccgcgagtgttgcccat

SEQ ID NO: 235281 - DNA, 50 bp, Artificial
  Synthetic oligonucleotide
aagctacctaggcctggattaccggcactgctgcccacactccagtcggc

SEQ ID NO: 235282 - DNA, 50 bp, Artificial
  Synthetic oligonucleotide
aagggtctaaacgcgctacgctaatcgccacgcctcaccctaagcccgcg

SEQ ID NO: 235283 - DNA, 50 bp, Artificial
  Synthetic oligonucleotide
agcgtaggtgagctgcttgcgtaccctggcgatttagcgcgtgagaccat

SEQ ID NO: 235284 - DNA, 50 bp, Artificial
  Synthetic oligonucleotide
aagctacgcccgcggaaagctaaccgacaagcgaacgggacaaagcacca

SEQ ID NO: 235285 - DNA, 50 bp, Artificial
  Synthetic oligonucleotide
acactgtacaatggggcgggcgataacttgacggcggccctttcgggtga

SEQ ID NO: 235286 - DNA, 50 bp, Artificial
  Synthetic oligonucleotide
aagctcgactcttcacgagcccgctcccaggtctcagacagactcgagcc

SEQ ID NO: 235287 - DNA, 50 bp, Artificial
  Synthetic oligonucleotide
agcgtgccattcccggcgagtttgtatagcgtctccctcgggcgattgag

SEQ ID NO: 235288 - DNA, 50 bp, Artificial
  Synthetic oligonucleotide
caaacgaggaccacttattgtagcggtagcaatcttcaaacgtgtgaacc

SEQ ID NO: 235289 - DNA, 50 bp, Artificial
  Synthetic oligonucleotide
ggataatggctatctaatgggcgctgttgccacgctttaagttcggggat

SEQ ID NO: 235290 - DNA, 60 bp, Artificial
  Synthetic oligonucleotide
tgggcgagcttgcgagaatcgctctagctggtttttgcccgtaacataatgtgcgttgtg

SEQ ID NO: 235291 - DNA, 50 bp, Artificial
  Synthetic oligonucleotide
agctcactaggagttggaacagcgccaaccaagggccgagcagcaatgct

SEQ ID NO: 235292 - DNA, 50 bp, Artificial
  Synthetic oligonucleotide
aagctcttggcgaggggataaattgccgagcggtgcccgatgccgatttt

SEQ ID NO: 235293 - DNA, 50 bp, Artificial
  Synthetic oligonucleotide
acacttggcttaaggtcgccgctttattcccccgccccgcacggacctta

SEQ ID NO: 235294 - DNA, 50 bp, Artificial
  Synthetic oligonucleotide
agctgccaagcctgccgataaaccgttgctgcgtgccttagtgatgacgc

SEQ ID NO: 235295 - DNA, 50 bp, Artificial
  Synthetic oligonucleotide
ggactttgtttgccgacccgaattaggaaaataagccgttaactgacgca

SEQ ID NO: 235296 - DNA, 50 bp, Artificial
  Synthetic oligonucleotide
aagcttgcgaacgagaggcagggactgccgaactggcttctgtacacgga

SEQ ID NO: 235297 - DNA, 50 bp, Artificial
  Synthetic oligonucleotide
ggacgtagtccgtcctctggcgaacctgcgagctgctaggacgttgcgcg

SEQ ID NO: 235298 - DNA, 50 bp, Artificial
  Synthetic oligonucleotide
ggacgacgagccattagccgctgcttgcctacgcgacatggtcactgcac

SEQ ID NO: 235299 - DNA, 50 bp, Artificial
  Synthetic oligonucleotide
attcgacggcgctttcccccacatcggcaagtcttgcacttgctgctgtc

SEQ ID NO: 235300 - DNA, 50 bp, Artificial
  Synthetic oligonucleotide
acagagctgtgtgcgctcggtggagtcttcccgcgccatttcggagagct

SEQ ID NO: 235301 - DNA, 60 bp, Artificial
  Synthetic oligonucleotide
tggatatcgtgaagtggggtttagtgattgtattgctagccgctgctgttattggcaatc

SEQ ID NO: 235302 - DNA, 50 bp, Artificial
  Synthetic oligonucleotide
gactcagtggcgcgcagcacctagatctcagccagatgactcagcccacg

SEQ ID NO: 235303 - DNA, 50 bp, Artificial
  Synthetic oligonucleotide
agtctctggcaggctatctgccgggcttaacggggcgtcctatggtggaa

SEQ ID NO: 235304 - DNA, 50 bp, Artificial
  Synthetic oligonucleotide
aagggcaatagcgacactcagttgcgccaagccgcgactcaacttgcggt

SEQ ID NO: 235305 - DNA, 50 bp, Artificial
  Synthetic oligonucleotide
agtgatatggcgcagggctggcaatcgaccattccaagccttcggcagct

SEQ ID NO: 235306 - DNA, 50 bp, Artificial
  Synthetic oligonucleotide
agtgcccaacctattgtgcctgcaccaggggtaaagcccacggcgacatt

SEQ ID NO: 235307 - DNA, 50 bp, Artificial
  Synthetic oligonucleotide
gccttttgccgcagtagcaatgccgccgactaagtcgccacgtcttcctt

SEQ ID NO: 235308 - DNA, 50 bp, Artificial
  Synthetic oligonucleotide
accacccagcgttctagcaggccgaaggccgctctgtttttacccgccct

SEQ ID NO: 235309 - DNA, 50 bp, Artificial
  Synthetic oligonucleotide
atctatggatcccgcttcgcttcccccggcaatcggtggggctttggcag

SEQ ID NO: 235310 - DNA, 50 bp, Artificial
  Synthetic oligonucleotide
atcgatcccgccgcagcgttagctggtcgttaacaggctagctgggcatt

SEQ ID NO: 235311 - DNA, 50 bp, Artificial
  Synthetic oligonucleotide
aaggcgtgtcaggcgtccaacatcgacaagtgttagggggacggccaact

SEQ ID NO: 235312 - DNA, 60 bp, Artificial
  Synthetic oligonucleotide
cgatgcttgccacatcgagagtggacaagtgccgcaaacggttatgcctggaggctggcg

SEQ ID NO: 235313 - DNA, 59 bp, Artificial
  Synthetic oligonucleotide
tgcgcgtagccatgccgtaatccgtgggccttgttcaatcccatccgaatacaggcggt

SEQ ID NO: 235314 - DNA, 50 bp, Artificial
  Synthetic oligonucleotide
agtgtcgtgccactgtctggttcgggcatccctggcgttgcagtgagtga

SEQ ID NO: 235315 - DNA, 50 bp, Artificial
  Synthetic oligonucleotide
gcacgccgtggcatgaagtactgccagcgatgaatgctgcagagcagtgg

SEQ ID NO: 235316 - DNA, 50 bp, Artificial
  Synthetic oligonucleotide
atccgtgccatacaagacctgaccatccgccgtccagccctgaactcgca

SEQ ID NO: 235317 - DNA, 50 bp, Artificial
  Synthetic oligonucleotide
gcatggcaggaatgtgagccaatggcggtgagtctggcttaggcgccaaa

SEQ ID NO: 235318 - DNA, 50 bp, Artificial
  Synthetic oligonucleotide
atccgagcaacctgctctgggatcgaagtgttctgcgtggggcgatctgc

SEQ ID NO: 235319 - DNA, 50 bp, Artificial
  Synthetic oligonucleotide
aagggaagcggggcaggctaagtctcacgccagagccaatgaggtaagct

SEQ ID NO: 235320 - DNA, 50 bp, Artificial
  Synthetic oligonucleotide
agtttacagcggtgacagtggcgtgaggcaagcggttgtggcatccggag

SEQ ID NO: 235321 - DNA, 50 bp, Artificial
  Synthetic oligonucleotide
atcaatcaccggatgctaatgcattagaggttggggcggcagttaaggcc

SEQ ID NO: 235322 - DNA, 50 bp, Artificial
  Synthetic oligonucleotide
accaaccgccaccgctcaggggagccatggaactcggcgcaacatcgata

SEQ ID NO: 235323 - DNA, 50 bp, Artificial
  Synthetic oligonucleotide
gccacgcttttagcggctcccgccagtgcaggctggttagataacctcgc

SEQ ID NO: 235324 - DNA, 58 bp, Artificial
  Synthetic oligonucleotide
tgcagatgatcctttctatgcaccggtttaccccgaagcgccgccaaccaaaattgcc

SEQ ID NO: 235325 - DNA, 50 bp, Artificial
  Synthetic oligonucleotide
ataggagtgcagcggcaaatgcccatgcgaccttgggggaaccaagcgtt

SEQ ID NO: 235326 - DNA, 50 bp, Artificial
  Synthetic oligonucleotide
gcccgacaccatttactgcgagcatctcgccagggcttgtgggcaacatc

SEQ ID NO: 235327 - DNA, 50 bp, Artificial
  Synthetic oligonucleotide
acatcagaggcagcggcccactcattcagtacggcggaaagtccgccccg

SEQ ID NO: 235328 - DNA, 50 bp, Artificial
  Synthetic oligonucleotide
gccattagccgctgcttgcctacgcgacatggtcactgcaccgactctta

SEQ ID NO: 235329 - DNA, 50 bp, Artificial
  Synthetic oligonucleotide
ataagcgccttagcagtaggggtcagcggcaacctatgcgcctgccgatt

SEQ ID NO: 235330 - DNA, 50 bp, Artificial
  Synthetic oligonucleotide
atgcgtgatgcggcagggcccagttggtatgcctgcctggttttaatccc

SEQ ID NO: 235331 - DNA, 50 bp, Artificial
  Synthetic oligonucleotide
agggctttgccctgctaggacgtttgcaagctcactgcgagggcgctgcg

SEQ ID NO: 235332 - DNA, 50 bp, Artificial
  Synthetic oligonucleotide
agggtctgataacaggttttgtaatcgggataatgggccagcaacgcatc

SEQ ID NO: 235333 - DNA, 50 bp, Artificial
  Synthetic oligonucleotide
aggtcaccacggtttggcctcccgccaaggcattgggctgtgatacctga

SEQ ID NO: 235334 - DNA, 50 bp, Artificial
  Synthetic oligonucleotide
aggtcaccttgccactcgcctctatgggggcattgcgcatcaagtcgacg

SEQ ID NO: 235335 - DNA, 59 bp, Artificial
  Synthetic oligonucleotide
tgagttaccgatagtcacaccgagtgcctggcgtgaaaacaacgtatccatagaacaaa

SEQ ID NO: 235336 - DNA, 50 bp, Artificial
  Synthetic oligonucleotide
aggtcgccagtgcccaacctattgtgcctgcaccaggggtaaagcccacg

SEQ ID NO: 235337 - DNA, 50 bp, Artificial
  Synthetic oligonucleotide
acagcagatcatagatggctgcgcctagacggcggaggaaccccgcacgg

SEQ ID NO: 235338 - DNA, 50 bp, Artificial
  Synthetic oligonucleotide
atgccttgccagtcggctgattgcgagactcagtggcgcgcagcacctag

SEQ ID NO: 235339 - DNA, 50 bp, Artificial
  Synthetic oligonucleotide
aggtgtgcatgcctgccatggttgcggcttcgacacagctggcgttgatg

SEQ ID NO: 235340 - DNA, 50 bp, Artificial
  Synthetic oligonucleotide
atgccgcgctagctggcatcaaccgttatccagagtgtcagccacccgag

SEQ ID NO: 235341 - DNA, 50 bp, Artificial
  Synthetic oligonucleotide
aaggcaccctctatgcggtgggccgactcgctatcgccgcacctaaatac

SEQ ID NO: 235342 - DNA, 50 bp, Artificial
  Synthetic oligonucleotide
aagggcagagtcaagggcgtaatcgccaagccccgggcaatcgtctatgg

SEQ ID NO: 235343 - DNA, 50 bp, Artificial
  Synthetic oligonucleotide
atgcccacgtgaccagtgtttcactcggtacggcaagcacgggtgccatt

SEQ ID NO: 235344 - DNA, 50 bp, Artificial
  Synthetic oligonucleotide
agtacaagcagaccgacgggccacagccgttaggcctgagcctgccaata

SEQ ID NO: 235345 - DNA, 50 bp, Artificial
  Synthetic oligonucleotide
aaggcacgcgatctgctggcgaggagcacagaccggcatttaagactggc

SEQ ID NO: 235346 - DNA, 60 bp, Artificial
  Synthetic oligonucleotide
gtacggtctgtgctgacatcatcggttgagcctttagtgccggtagagccggatacgtgc

SEQ ID NO: 235347 - DNA, 50 bp, Artificial
  Synthetic oligonucleotide
aaggcagcaatcgccttgctatccgttgcgggcacttgccggtattgcgc

SEQ ID NO: 235348 - DNA, 50 bp, Artificial
  Synthetic oligonucleotide
agtagtaccgtgcgagttcggccaatgtctgcgctcgcgttagcccccag

SEQ ID NO: 235349 - DNA, 50 bp, Artificial
  Synthetic oligonucleotide
aaggcgcagtattaagcgctggcttgagtgcgggggaaatgtgcccgctt

SEQ ID NO: 235350 - DNA, 50 bp, Artificial
  Synthetic oligonucleotide
agtcattccagccagggcctgcagtcttagcaccggcttctcccgccgat

SEQ ID NO: 235351 - DNA, 50 bp, Artificial
  Synthetic oligonucleotide
agtcgattcagagcctgggttggggagtcgctgtttactcgggttgggcg

SEQ ID NO: 235352 - DNA, 50 bp, Artificial
  Synthetic oligonucleotide
acaggagtggtatcggtctggtcagattcgggcccaacggtgcccccact

SEQ ID NO: 235353 - DNA, 50 bp, Artificial
  Synthetic oligonucleotide
aaggcgcgaggggagcaatgcgctgcatacgtattcacctgccaggctgt

SEQ ID NO: 235354 - DNA, 50 bp, Artificial
  Synthetic oligonucleotide
agtcgggtcagactctgccccaacttttagccgcgaagccccttcctgcg

SEQ ID NO: 235355 - DNA, 50 bp, Artificial
  Synthetic oligonucleotide
agtctagtgtgcagtgcttcgttgcccacatggtgctcgagccccacctt

SEQ ID NO: 235356 - DNA, 50 bp, Artificial
  Synthetic oligonucleotide
acaggctgctctactgactgagggggaggccgtctggagtccggtaccgc

SEQ ID NO: 235357 - DNA, 56 bp, Artificial
  Synthetic oligonucleotide
gtacccaatcgtgccatttacgaacgcacaacaggcttaggtcgaaccgtatttga

SEQ ID NO: 235358 - DNA, 50 bp, Artificial
  Synthetic oligonucleotide
agcaatgacttatcaggtggaatggacggaactcattacggaccgtaaag

SEQ ID NO: 235359 - DNA, 50 bp, Artificial
  Synthetic oligonucleotide
agcaccctcaagggatggggctcgccatcagtttaatgcaccagcatggc

SEQ ID NO: 235360 - DNA, 50 bp, Artificial
  Synthetic oligonucleotide
agcacgccagcgcgtgtcttagggaggctcgaagtactgtgttccccgtt

SEQ ID NO: 235361 - DNA, 50 bp, Artificial
  Synthetic oligonucleotide
aagtgcaccaatttgcccccgccgatgcgaccctacacaccttggcgtat

SEQ ID NO: 235362 - DNA, 50 bp, Artificial
  Synthetic oligonucleotide
aagccccctcccggaaccgcggtggccacccactcactagagtccacatc

SEQ ID NO: 235363 - DNA, 50 bp, Artificial
  Synthetic oligonucleotide
agcagctggctggtgtgttccgtcactaccgataacccctcctgctcggt

SEQ ID NO: 235364 - DNA, 50 bp, Artificial
  Synthetic oligonucleotide
agcaggctagaggcgggcttacccagtgcatcttgggggatagtgccgaa

SEQ ID NO: 235365 - DNA, 50 bp, Artificial
  Synthetic oligonucleotide
gtatgcagcctacgatggtcgcaatggtagcgtggtttactctggtaact

SEQ ID NO: 235366 - DNA, 50 bp, Artificial
  Synthetic oligonucleotide
agcagtagcactgctcccttggccgccggatgccttacccttgccagctg

SEQ ID NO: 235367 - DNA, 50 bp, Artificial
  Synthetic oligonucleotide
agcagtggcttagccttcgcgagtcttggtatggggtctgctagtgccgc

SEQ ID NO: 235368 - DNA, 60 bp, Artificial
  Synthetic oligonucleotide
gtaacgaaagcgacgattgagttactgatgccatatagggcgcatgtgctgacgataacg

SEQ ID NO: 235369 - DNA, 50 bp, Artificial
  Synthetic oligonucleotide
agcatcttcccgagggcgatcgtctggtagagcctttcgtaggcgcagga

SEQ ID NO: 235370 - DNA, 50 bp, Artificial
  Synthetic oligonucleotide
agcatggagatcccccgtggcggattggccttgacgcagatgccatagtt

SEQ ID NO: 235371 - DNA, 50 bp, Artificial
  Synthetic oligonucleotide
aagccgcgtactgatgctacgctccacgatccgtgtcgactcgccttgca

SEQ ID NO: 235372 - DNA, 50 bp, Artificial
  Synthetic oligonucleotide
aagcgacacctaaaccgctcacggctgctgacttaagcgccggggcattg

SEQ ID NO: 235373 - DNA, 50 bp, Artificial
  Synthetic oligonucleotide
agcatggatgtgggctgaggcttttagctacccgtgcttgggggttggcc

SEQ ID NO: 235374 - DNA, 50 bp, Artificial
  Synthetic oligonucleotide
agccacaggcggtctctccatgcctaagctaggtgccagcccactgggtt

SEQ ID NO: 235375 - DNA, 50 bp, Artificial
  Synthetic oligonucleotide
agccacctccgggcactaaggcgcacaccatatcgcctggctcccattga

SEQ ID NO: 235376 - DNA, 50 bp, Artificial
  Synthetic oligonucleotide
aagcgcgaggcggataagcgaggcaaggctgagcattaaccctcggctaa

SEQ ID NO: 235377 - DNA, 50 bp, Artificial
  Synthetic oligonucleotide
agccagcgcaatagggtgtaatgaacccgcctccaatgcagcggctatgg

SEQ ID NO: 235378 - DNA, 50 bp, Artificial
  Synthetic oligonucleotide
agccagtctcaggctgtgtttagtcttgcgctcggccccttgtcagtcgc

SEQ ID NO: 235379 - DNA, 52 bp, Artificial
  Synthetic oligonucleotide
ggtgggatttacggtgaaaatagctctaaaggtggtgggatttacggtgtaa

SEQ ID NO: 235380 - DNA, 50 bp, Artificial
  Synthetic oligonucleotide
agccatgtactcacactgccgacgggcaactatgccgcagctatcgccaa

SEQ ID NO: 235381 - DNA, 50 bp, Artificial
  Synthetic oligonucleotide
agccattttgctaaatcagggctgtagcgcgcaggctcacgggtcgccat

SEQ ID NO: 235382 - DNA, 50 bp, Artificial
  Synthetic oligonucleotide
agcccataatgtgcaccgcaccgccggttttaactgctgcgtctacggca

SEQ ID NO: 235383 - DNA, 50 bp, Artificial
  Synthetic oligonucleotide
aagcgcgccacaatatgcacaatcgctaaccactcggccgtgggcgtcac

SEQ ID NO: 235384 - DNA, 50 bp, Artificial
  Synthetic oligonucleotide
aacttggccgtgaacagttacgccgctttgtgacgagctgcctagtacga

SEQ ID NO: 235385 - DNA, 50 bp, Artificial
  Synthetic oligonucleotide
agactggcgctaccgaaacagggtctgccaaggattgctgcgccaacgaa

SEQ ID NO: 235386 - DNA, 50 bp, Artificial
  Synthetic oligonucleotide
aacttgtgccaaccgcgccaatacgcgactcgccgccacaaatccaaagg

SEQ ID NO: 235387 - DNA, 50 bp, Artificial
  Synthetic oligonucleotide
agagagtcagcaacgcccacctatcatacctgcgcctcagctcgccaaga

SEQ ID NO: 235388 - DNA, 50 bp, Artificial
  Synthetic oligonucleotide
agagccccgcactgcaggcagagtttgagctggcattagccgatcctcta

SEQ ID NO: 235389 - DNA, 50 bp, Artificial
  Synthetic oligonucleotide
gtgcgcaaggtattgtggttgagccacagccccgcagcataagcggtgaa

SEQ ID NO: 235390 - DNA, 59 bp, Artificial
  Synthetic oligonucleotide
ggtaatttatgtccagagttggttatgctcgagtgagttccacaggtcaaagcttagaa

SEQ ID NO: 235391 - DNA, 50 bp, Artificial
  Synthetic oligonucleotide
cactaccgcaccgtcaacaacccagcgatgcccttgctgtactgggggta

SEQ ID NO: 235392 - DNA, 50 bp, Artificial
  Synthetic oligonucleotide
cacggacaccggtaactttggcgcgagtcaccgaggggaggctggtgata

SEQ ID NO: 235393 - DNA, 50 bp, Artificial
  Synthetic oligonucleotide
agaggcgcatcccctctattgccacgggcgccagctcagaattatccccg

SEQ ID NO: 235394 - DNA, 50 bp, Artificial
  Synthetic oligonucleotide
cacgccggctcatctggcgtttcgttcggtcggctatgtggaagggggct

SEQ ID NO: 235395 - DNA, 50 bp, Artificial
  Synthetic oligonucleotide
agatacaaaacgctcgcgaccaacaggcttccacgccattggaccacgcg

SEQ ID NO: 235396 - DNA, 50 bp, Artificial
  Synthetic oligonucleotide
cacgccatcgagccaaacgcggccattctcggtcgtcttaccgtaggcac

SEQ ID NO: 235397 - DNA, 50 bp, Artificial
  Synthetic oligonucleotide
ctcgctaatcaccatgactcaccttttgggcattagtgtaaccggtagat

SEQ ID NO: 235398 - DNA, 50 bp, Artificial
  Synthetic oligonucleotide
accataggcgaccactaaggttggcgtgtaaccaacttgagtctggctcc

SEQ ID NO: 235399 - DNA, 50 bp, Artificial
  Synthetic oligonucleotide
agatgaggcggtacataagttcttcacggcgggacctgcgggcatcccaa

SEQ ID NO: 235400 - DNA, 50 bp, Artificial
  Synthetic oligonucleotide
aagatagcctgaacctcgctctcgccagcagtagcggcacggcaatacgc

SEQ ID NO: 235401 - DNA, 52 bp, Artificial
  Synthetic oligonucleotide
ggcgttaacggccaaggtaaacggacgtaatttcgtctcgtgtgtgccccaa

SEQ ID NO: 235402 - DNA, 50 bp, Artificial
  Synthetic oligonucleotide
acacgagttaccatcaggccaacgcggcaaccggacgcctgtcttccagt

SEQ ID NO: 235403 - DNA, 50 bp, Artificial
  Synthetic oligonucleotide
agatggccttgcgtcccggtatctacgtgcctatgccacttcgccccttg

SEQ ID NO: 235404 - DNA, 50 bp, Artificial
  Synthetic oligonucleotide
aagcactgcgtggtcgtaaacaggtagtgggggacgacttggctcaggcg

SEQ ID NO: 235405 - DNA, 50 bp, Artificial
  Synthetic oligonucleotide
agattcaggcccggcgcttgcgggtgaagctaatagcggcacatttggta

SEQ ID NO: 235406 - DNA, 50 bp, Artificial
  Synthetic oligonucleotide
agcaaaatacggctctgctctggcgccgtaccgcgaatggtgaccccgct

SEQ ID NO: 235407 - DNA, 50 bp, Artificial
  Synthetic oligonucleotide
agcaagatcctgtgagggcttgtgatcagagcaaaggcgccaggcggtgg

SEQ ID NO: 235408 - DNA, 50 bp, Artificial
  Synthetic oligonucleotide
aatacggcgaccgggcccagaggcaacacacttaagcgggtatcggcctt

SEQ ID NO: 235409 - DNA, 50 bp, Artificial
  Synthetic oligonucleotide
ctgagcccccttcatcgcaggagtactgttacgtccgccagcacaggctc

SEQ ID NO: 235410 - DNA, 50 bp, Artificial
  Synthetic oligonucleotide
aatacccccgaagcagtggcggaactccactggcgtatcgctatccccct

SEQ ID NO: 235411 - DNA, 50 bp, Artificial
  Synthetic oligonucleotide
agcgatcccttgccccacacctacgcacatggtgcataacgccagctttc

SEQ ID NO: 235412 - DNA, 60 bp, Artificial
  Synthetic oligonucleotide
ggcgggtagtatcaagttcgtagacatgattgacggtgtcactatgacacgtcaaacaga

SEQ ID NO: 235413 - DNA, 50 bp, Artificial
  Synthetic oligonucleotide
agcgcaaccgccgatttgcgtagccaaggttcccggccacaaaccttagc

SEQ ID NO: 235414 - DNA, 50 bp, Artificial
  Synthetic oligonucleotide
gggactgcatggaacgggttcgattgtaaccctattagagcgtaagactc

SEQ ID NO: 235415 - DNA, 50 bp, Artificial
  Synthetic oligonucleotide
agcgcatctgtgtggcccttgtcagaaccggcaacgaatccttcggcagg

SEQ ID NO: 235416 - DNA, 50 bp, Artificial
  Synthetic oligonucleotide
agcgccatcattacgcgcacctgttcccagcgtgagcccgagtcatgcaa

SEQ ID NO: 235417 - DNA, 50 bp, Artificial
  Synthetic oligonucleotide
accagccttgagtggcagttatcacccggcgaaaaactgtggcgagccct

SEQ ID NO: 235418 - DNA, 50 bp, Artificial
  Synthetic oligonucleotide
agcgcgttgtctagcgcctcactgcaagggaaccaagagcaggtatggcc

SEQ ID NO: 235419 - DNA, 50 bp, Artificial
  Synthetic oligonucleotide
agcgctaagcgctagcatgacccctaaggcaagtaggctcccggtaagcg

SEQ ID NO: 235420 - DNA, 50 bp, Artificial
  Synthetic oligonucleotide
acacgccggggcccgctatggtgtttttgttacgagcgacaccgcctaaa

SEQ ID NO: 235421 - DNA, 50 bp, Artificial
  Synthetic oligonucleotide
agcgctcggggacatatcgactcgggccttgggaaggagcctgcattcgg

SEQ ID NO: 235422 - DNA, 50 bp, Artificial
  Synthetic oligonucleotide
agcgcttttgaccatgcggtgagtgatgcctttccgggagccaaggttcg

SEQ ID NO: 235423 - DNA, 59 bp, Artificial
  Synthetic oligonucleotide
cgataactgcccgacccattttcgccagtgctgctcgtgtagctaccggtattaattga

SEQ ID NO: 235424 - DNA, 60 bp, Artificial
  Synthetic oligonucleotide
ggcagtgaggttattcgagaagtgtttagtcgcagcgccaatacctggcacgcgagagct

SEQ ID NO: 235425 - DNA, 50 bp, Artificial
  Synthetic oligonucleotide
agcggcaaatgcccatgcgaccttgggggaaccaagcgttaggaatgtgg

SEQ ID NO: 235426 - DNA, 50 bp, Artificial
  Synthetic oligonucleotide
agcggcactgtttgcctgcactcgtcggtcgaaatcctcctgcccaggcg

SEQ ID NO: 235427 - DNA, 50 bp, Artificial
  Synthetic oligonucleotide
agcggccagcacacacatgatgcccgtaagtaccgcaccgccgggaatcg

SEQ ID NO: 235428 - DNA, 50 bp, Artificial
  Synthetic oligonucleotide
agcggcccgccgttgtaatgcggctaacttctcatcatcggccatgggtt

SEQ ID NO: 235429 - DNA, 50 bp, Artificial
  Synthetic oligonucleotide
aagcggtgagtgggggagcgagtgctgctgatacacctgtggctcaaggt

SEQ ID NO: 235430 - DNA, 50 bp, Artificial
  Synthetic oligonucleotide
agcggccctgcggtgtacgttgatcgccctcggtcagtttatgtccggtt

SEQ ID NO: 235431 - DNA, 50 bp, Artificial
  Synthetic oligonucleotide
aagcgtcctacatcttcgggtaactgtagtccgcgcatagcggcccgccg

SEQ ID NO: 235432 - DNA, 50 bp, Artificial
  Synthetic oligonucleotide
gaagagtacttgtagcacatagcggcaatcgttggcattttggagactag

SEQ ID NO: 235433 - DNA, 50 bp, Artificial
  Synthetic oligonucleotide
gaagcccacacgcctactcctgttactggggccgagaagtctatggcgcc

SEQ ID NO: 235434 - DNA, 50 bp, Artificial
  Synthetic oligonucleotide
agcgggcacatttcccccgcactcaagccagcgcttaatactgcgcctta

SEQ ID NO: 235435 - DNA, 60 bp, Artificial
  Synthetic oligonucleotide
ggcacacctgggagtggatttcttggctctagtgcgcacgtatccggctctaccggcact

SEQ ID NO: 235436 - DNA, 50 bp, Artificial
  Synthetic oligonucleotide
agcggtacaggacgaccggtagagcccttgttcgcgccactgttccaagc

SEQ ID NO: 235437 - DNA, 50 bp, Artificial
  Synthetic oligonucleotide
agcggtacgtgaactcaccaactggggagtgccatggactcgggtgacta

SEQ ID NO: 235438 - DNA, 50 bp, Artificial
  Synthetic oligonucleotide
agcggttccaaacccgcgaggcgacaggcgacagggatctcgggtaatac

SEQ ID NO: 235439 - DNA, 50 bp, Artificial
  Synthetic oligonucleotide
agccccgacctcaaactgcagtggccctatagcgggaccaagataagcga

SEQ ID NO: 235440 - DNA, 50 bp, Artificial
  Synthetic oligonucleotide
ctgccaacgacgtcccatcttacgcatcaaggctttaaacgacgttatcg

SEQ ID NO: 235441 - DNA, 50 bp, Artificial
  Synthetic oligonucleotide
agccgacccaagatctgctgctcagctttaaccgagcgcccggcgttaca

SEQ ID NO: 235442 - DNA, 50 bp, Artificial
  Synthetic oligonucleotide
agccgattcgggtgacacgcgcctacaaagctatgccctcgttaacgccc

SEQ ID NO: 235443 - DNA, 50 bp, Artificial
  Synthetic oligonucleotide
agccgcactgctcacaggttgcgcctttatcgcctacttcgttccggcta

SEQ ID NO: 235444 - DNA, 50 bp, Artificial
  Synthetic oligonucleotide
agccgcatcacgaatgagtgccaagggccgccacattctacccgactcta

SEQ ID NO: 235445 - DNA, 50 bp, Artificial
  Synthetic oligonucleotide
agccgcattcccagtgccgtacgtcaaggcagtttagcgcttggggctac

SEQ ID NO: 235446 - DNA, 54 bp, Artificial
  Synthetic oligonucleotide
ggcaacggttaaccgcaaccagcaagaggccgagttaagccgcgagttgtttac

SEQ ID NO: 235447 - DNA, 50 bp, Artificial
  Synthetic oligonucleotide
aagtgatgcctttcccgcgcttaggcagcttgcagggctaaaagtcggcg

SEQ ID NO: 235448 - DNA, 50 bp, Artificial
  Synthetic oligonucleotide
agccgccctgaaggcatgccaacccaagccaactttggccttaagcaggt

SEQ ID NO: 235449 - DNA, 50 bp, Artificial
  Synthetic oligonucleotide
caccccgaaggcattgacagttgtgcggctggtaacccttgggatgcgtg

SEQ ID NO: 235450 - DNA, 50 bp, Artificial
  Synthetic oligonucleotide
aagcggcacacttggcgaccacattaggctggagtgcgattcagcacggg

SEQ ID NO: 235451 - DNA, 50 bp, Artificial
  Synthetic oligonucleotide
agccgccgtctaacacctcacgctgatctaagcctgcgcggccattgttg

SEQ ID NO: 235452 - DNA, 50 bp, Artificial
  Synthetic oligonucleotide
agccgtccacccctaaggttcctggcacaatgagggtgtctcgtgagcga

SEQ ID NO: 235453 - DNA, 50 bp, Artificial
  Synthetic oligonucleotide
agccgtgttgagtacgtatggcgcgggccttgttatggccgccgacttga

SEQ ID NO: 235454 - DNA, 50 bp, Artificial
  Synthetic oligonucleotide
aagtctcctcttaagggcagagtcaagggcgtaatcgccaagccccgggc

SEQ ID NO: 235455 - DNA, 50 bp, Artificial
  Synthetic oligonucleotide
cacagagacgactctggggttgagggacgcttggctggagagcccttggt

SEQ ID NO: 235456 - DNA, 50 bp, Artificial
  Synthetic oligonucleotide
agcctatgatgcacctggttctaggcggcgctcgcagtggcaagtctcgc

SEQ ID NO: 235457 - DNA, 60 bp, Artificial
  Synthetic oligonucleotide
ggatgagacttaacgctgtcggttcagacatgcacttaggtcctctaaataaatcgccta

SEQ ID NO: 235458 - DNA, 50 bp, Artificial
  Synthetic oligonucleotide
agcctgttggtcccactcatgtgccaaggccggatgtcccttcctgacga

SEQ ID NO: 235459 - DNA, 50 bp, Artificial
  Synthetic oligonucleotide
acacgccatgttctggccctactgccgctagagcgcccattgccaacaca

SEQ ID NO: 235460 - DNA, 50 bp, Artificial
  Synthetic oligonucleotide
agccttccatgtgagtccgctactgccacctagactgggcctagccgact

SEQ ID NO: 235461 - DNA, 50 bp, Artificial
  Synthetic oligonucleotide
accagggtcgcatccggaccaaggcccctgaggctgatagaggcagagcc

SEQ ID NO: 235462 - DNA, 50 bp, Artificial
  Synthetic oligonucleotide
caagcggttgtggcatccggagtgacagtcggcacaaacttgccgggtga

SEQ ID NO: 235463 - DNA, 50 bp, Artificial
  Synthetic oligonucleotide
gggcggacttacgtcctgctagggtcgcttcgcaactagagcggacttac

SEQ ID NO: 235464 - DNA, 50 bp, Artificial
  Synthetic oligonucleotide
agcgacggcgttgcatggcaggaatgtgagccaatggcggtgagtctggc

SEQ ID NO: 235465 - DNA, 50 bp, Artificial
  Synthetic oligonucleotide
agcgactacgcccgaaaatgcccatcgattagccggtgttccgctgcata

SEQ ID NO: 235466 - DNA, 54 bp, Artificial
  Synthetic oligonucleotide
ggagcgtagcgtgacgcttgaaagcggggcgcttttccccgtagtccttcgtcc

SEQ ID NO: 235467 - DNA, 56 bp, Artificial
  Synthetic oligonucleotide
ggacttcataccctctaaccggaaagtgactttatccgcagtattggcattaaggc

SEQ ID NO: 235468 - DNA, 60 bp, Artificial
  Synthetic oligonucleotide
gctattggcagcactacatcagcagttgtattcgcggagatatgctactcaatcataaat

SEQ ID NO: 235469 - DNA, 58 bp, Artificial
  Synthetic oligonucleotide
gcggcacttgtgcgagtcagtaagatacaacaagggatcttccgtcccagtaaacggc

SEQ ID NO: 235470 - DNA, 60 bp, Artificial
  Synthetic oligonucleotide
gcgcctaagcggcgaatgtgcatgcctgtttgcgccagttctgactcaacgccaagacgc

SEQ ID NO: 235471 - DNA, 57 bp, Artificial
  Synthetic oligonucleotide
gcgccaggtgtgtggggatcagcacttctcggcacaacccccctttgcccttgacgg

SEQ ID NO: 235472 - DNA, 59 bp, Artificial
  Synthetic oligonucleotide
cgacttagtcgtcgctaacattactagttttagcccatgagacctaatgtgtactgcaa

SEQ ID NO: 235473 - DNA, 60 bp, Artificial
  Synthetic oligonucleotide
taccgctatcgcagtacgtactacccctgaccgcatggtcaatgttcgcaatctcgttaa

SEQ ID NO: 235474 - DNA, 60 bp, Artificial
  Synthetic oligonucleotide
taatgatgagcgtaccgacattaattgtcccgctcattatgaaaggcggcgcgtcggtaa

SEQ ID NO: 235475 - DNA, 58 bp, Artificial
  Synthetic oligonucleotide
taagttactcgcgtttgtgtctcttagtcgtgcgctggagagtaaaacctgagtggta

SEQ ID NO: 235476 - DNA, 57 bp, Artificial
  Synthetic oligonucleotide
taagtaagctattatttagcttgctcacccaagccacttgggtggaggctggcggtt

SEQ ID NO: 235477 - DNA, 51 bp, Artificial
  Synthetic oligonucleotide
taagcccgtacattccttttaattcggggtcaaatacggttcgacctaagc

SEQ ID NO: 235478 - DNA, 60 bp, Artificial
  Synthetic oligonucleotide
taaccgttagcgcactaacaggcgcaagaatgcgtgtgcgtgtccgattatcaataaggc

SEQ ID NO: 235479 - DNA, 57 bp, Artificial
  Synthetic oligonucleotide
taaaacgtccaggtggctttgttcgcttatcttctcgctgaaactgtgctgttaagg

SEQ ID NO: 235480 - DNA, 60 bp, Artificial
  Synthetic oligonucleotide
gttttagtctctgccaacagtgaaattagcctagaagatctggctaaattatcattggcc

SEQ ID NO: 235481 - DNA, 56 bp, Artificial
  Synthetic oligonucleotide
gttggccgcaatcagtgtcgggttttctaattgagaccctaacgtactggtataga

SEQ ID NO: 235482 - DNA, 60 bp, Artificial
  Synthetic oligonucleotide
gttagcttttgcccgtgaagcgcatatcgaagtgcgcaaggttgtatggccgacgcgtca

SEQ ID NO: 235483 - DNA, 60 bp, Artificial
  Synthetic oligonucleotide
cgactctggcatgaacactcgcagtgcaccgcctatgacaatggagcatgagactagcga

SEQ ID NO: 235484 - DNA, 60 bp, Artificial
  Synthetic oligonucleotide
gttacgtgaacgcgtactgggtcgtgtggttgcgcttgatgtgttctatccaggcactga

SEQ ID NO: 235485 - DNA, 58 bp, Artificial
  Synthetic oligonucleotide
gttacctgacaatattaccccgctgatagtcactgacgcgggcttccgtaatccatgg

SEQ ID NO: 235486 - DNA, 57 bp, Artificial
  Synthetic oligonucleotide
gtggctaaggtttcatctatcacaggcaaaaccgcggtttcataagtggtgccgtcg

SEQ ID NO: 235487 - DNA, 59 bp, Artificial
  Synthetic oligonucleotide
gtgctttcctggtaattccaaggtattcagctgcgtcagtaacagagatacccctctct

SEQ ID NO: 235488 - DNA, 60 bp, Artificial
  Synthetic oligonucleotide
gtgctctgctgtcacttattctgccagcaggtttgtcatttgatctggttaaccagaaca

SEQ ID NO: 235489 - DNA, 60 bp, Artificial
  Synthetic oligonucleotide
gtgatgtggtgaggtatcagtagactggaatatcgaatgttttattatgaactccggaat

SEQ ID NO: 235490 - DNA, 58 bp, Artificial
  Synthetic oligonucleotide
gtcttggtcacatctcgtaagcagaggaaacccatggtttactcctattctgaaaaga

SEQ ID NO: 235491 - DNA, 57 bp, Artificial
  Synthetic oligonucleotide
gtcgttagagctcggtgttcgcagtgttttccaagccctcgttagtgccttgcccaa

SEQ ID NO: 235492 - DNA, 60 bp, Artificial
  Synthetic oligonucleotide
gtattgcctcttcacatacgtcacaatagattcctggctgaggaataagtagtgtatgac

SEQ ID NO: 235493 - DNA, 60 bp, Artificial
  Synthetic oligonucleotide
aaggcttagtgtggcttgctggggtagtgattgagtgtgtcatgggctgcttgctccgtt

SEQ ID NO: 235494 - DNA, 59 bp, Artificial
  Synthetic oligonucleotide
cgacgcgtcaagaagcgctaaacaccacttttattgtccttgcagcaacaggtatctta

SEQ ID NO: 235495 - DNA, 60 bp, Artificial
  Synthetic oligonucleotide
aagggggctgcattgagttggccactaacacgggggcgatatgatatgtgcaaaccctca

SEQ ID NO: 235496 - DNA, 60 bp, Artificial
  Synthetic oligonucleotide
accatcctgaatattggacgtcagggatagacattgcgctatggcaactcaatggcgctc

SEQ ID NO: 235497 - DNA, 60 bp, Artificial
  Synthetic oligonucleotide
aatgccgctctatcacttaacccaagaggctcaatcagatctcattgaaatccgtcgtta

SEQ ID NO: 235498 - DNA, 57 bp, Artificial
  Synthetic oligonucleotide
aatgtttgagtgagttttttgtaactctgacccttgtcaagaatccatgccttgccc

SEQ ID NO: 235499 - DNA, 55 bp, Artificial
  Synthetic oligonucleotide
aaaaaacaggtgcgcccaagagtcattatgttaaatcaatgactttaggtgtgtt

SEQ ID NO: 235500 - DNA, 59 bp, Artificial
  Synthetic oligonucleotide
ccccctgtattgccgcttatgttgccgttatggcgcgggtgtagtgtgcgtagcgcacg

SEQ ID NO: 235501 - DNA, 58 bp, Artificial
  Synthetic oligonucleotide
acgccatagcccattgacggccaacgatttacgccagtgtttacggattgcgactggc

SEQ ID NO: 235502 - DNA, 59 bp, Artificial
  Synthetic oligonucleotide
tgcacctgcgacggcttttgctttggctaatcgcagcactaaggcatgggccgattcat

SEQ ID NO: 235503 - DNA, 57 bp, Artificial
  Synthetic oligonucleotide
tcattgaatattgcttggctttctgacttacgcttccattgttaccttccggagggt

SEQ ID NO: 235504 - DNA, 56 bp, Artificial
  Synthetic oligonucleotide
taggacccattttgaatcgcccgtagcggcgaagggttgtgagtcgctagaaagtc

SEQ ID NO: 235505 - DNA, 59 bp, Artificial
  Synthetic oligonucleotide
ccatgagcgcttgccgctgtaactggtattgtgattgaagtggggttaacgcttctttc

SEQ ID NO: 235506 - DNA, 59 bp, Artificial
  Synthetic oligonucleotide
ccaattaagggcatcgatgagaacgaccaagaagtagagcgcccatcagatgacaatgc

SEQ ID NO: 235507 - DNA, 56 bp, Artificial
  Synthetic oligonucleotide
cccgtcaatttggcggcttgagataaatttacttttgccatgttgcacctagtgtt

SEQ ID NO: 235508 - DNA, 59 bp, Artificial
  Synthetic oligonucleotide
gtgctgacatcatcggttgagcctttagtgccggtagagccggatacgtgcgcactaga

SEQ ID NO: 235509 - DNA, 59 bp, Artificial
  Synthetic oligonucleotide
cagccgatgattggtctgcagaagctaagtttgcggtactcattgaaactgctccgcta

SEQ ID NO: 235510 - DNA, 59 bp, Artificial
  Synthetic oligonucleotide
caaatcgctctgttaatactttagataggattcttgactttcctagcttgcctgagaac

SEQ ID NO: 235511 - DNA, 56 bp, Artificial
  Synthetic oligonucleotide
atgccgtaatccgtgggccttgttcaatcccatccgaatacaggcggttttatagc

SEQ ID NO: 235512 - DNA, 59 bp, Artificial
  Synthetic oligonucleotide
ttcaggttttagtaattcccacacaattgagcacactgttgcggctgcagattggtatc

SEQ ID NO: 235513 - DNA, 54 bp, Artificial
  Synthetic oligonucleotide
cctagcgaagctaggaagtggcgaggcattttaggggaagggtggagcctttag

SEQ ID NO: 235514 - DNA, 56 bp, Artificial
  Synthetic oligonucleotide
gaatcgcccgtagcggcgaagggttgtgagtcgctagaaagtcccaaatatccggc

SEQ ID NO: 235515 - DNA, 58 bp, Artificial
  Synthetic oligonucleotide
actgcgggtaaagaaatgcgcccaatgatccgtctgcttggcgctaatggtgctgact

SEQ ID NO: 235516 - DNA, 55 bp, Artificial
  Synthetic oligonucleotide
ccacgacgaagcaaatgccttcggcgccccaagggctcgcaaaacttaaacacta

SEQ ID NO: 235517 - DNA, 58 bp, Artificial
  Synthetic oligonucleotide
aagctctgacactcgatagacgtttggctatttctctcgagggcttcggcttaccagc

SEQ ID NO: 235518 - DNA, 55 bp, Artificial
  Synthetic oligonucleotide
gatccgtggggcgcattaccgtagcaaggaactggaataaccccagtaacacggc

SEQ ID NO: 235519 - DNA, 58 bp, Artificial
  Synthetic oligonucleotide
taggtgcgctgcatagaatgcgccacgcagttgagacacagacgagcgaatgcttgta

SEQ ID NO: 235520 - DNA, 58 bp, Artificial
  Synthetic oligonucleotide
cccaagatccgccctaagcgagtgcgggccatcatactcacccccacacgtgagttag

SEQ ID NO: 235521 - DNA, 58 bp, Artificial
  Synthetic oligonucleotide
cccatcggggaattgttctgcacctgcgacggcttttgctttggctaatcgcagcact

SEQ ID NO: 235522 - DNA, 56 bp, Artificial
  Synthetic oligonucleotide
gcataagcactaaggtaatcgtcactatgtttaataatcactaaattaccgtaacc

SEQ ID NO: 235523 - DNA, 58 bp, Artificial
  Synthetic oligonucleotide
ttgtcgcgaccacagataatggtggctcgaccggtagactcagagccgagcaggactg

SEQ ID NO: 235524 - DNA, 54 bp, Artificial
  Synthetic oligonucleotide
cgaccaagagacccattcccccttttcactgatcccgacataaccctcacccgc

SEQ ID NO: 235525 - DNA, 58 bp, Artificial
  Synthetic oligonucleotide
tgcgcacaatgccgcgactcgatgagatttccccgtaagctgcaccgagaaccgtgca

SEQ ID NO: 235526 - DNA, 57 bp, Artificial
  Synthetic oligonucleotide
tcaggccccagctaaattttttactggataatctgcaccgtaagtcactaaatacat

SEQ ID NO: 235527 - DNA, 60 bp, Artificial
  Synthetic oligonucleotide
catcagcactggcgtgttattagggctctttgtggcatcgagtatcggtttcttactgtc

SEQ ID NO: 235528 - DNA, 57 bp, Artificial
  Synthetic oligonucleotide
cgattctcgtaagaacatacaactatcagtattgatagcagcgacaacttaatgcct

SEQ ID NO: 235529 - DNA, 57 bp, Artificial
  Synthetic oligonucleotide
tagaccccaaacggagcaagcagcccatgacacactcaatcactaccccagcaagcc

SEQ ID NO: 235530 - DNA, 57 bp, Artificial
  Synthetic oligonucleotide
gctcatctctaaaaaaacaccacatatagtgttatcgttataaaaatactacatgtt

SEQ ID NO: 235531 - DNA, 57 bp, Artificial
  Synthetic oligonucleotide
agtgaattcggtgcatttgcagccgtcaaagaggatggcagcgtggtcacttggggg

SEQ ID NO: 235532 - DNA, 57 bp, Artificial
  Synthetic oligonucleotide
gtgcatttgcagccgtcaaagaggatggcagcgtggtcacttggggggactcatcct

SEQ ID NO: 235533 - DNA, 57 bp, Artificial
  Synthetic oligonucleotide
gaatcttaaggcttgtatttaccttgtacacaatcaagccagtacgattactaagtc

SEQ ID NO: 235534 - DNA, 54 bp, Artificial
  Synthetic oligonucleotide
agtggcttcgtgcttattcgaaaataactaacgcttccgatggggcgtcccttc

SEQ ID NO: 235535 - DNA, 57 bp, Artificial
  Synthetic oligonucleotide
ggcttgctggggtagtgattgagtgtgtcatgggctgcttgctccgtttggggtcta

SEQ ID NO: 235536 - DNA, 57 bp, Artificial
  Synthetic oligonucleotide
caagtgggatacatgatgaaaaacatagtcggtgttgatgctcgataatgattttat

SEQ ID NO: 235537 - DNA, 55 bp, Artificial
  Synthetic oligonucleotide
ggggaagggacgccccatcggaagcgttagcgattttcgaataagcacgaagcca

SEQ ID NO: 235538 - DNA, 60 bp, Artificial
  Synthetic oligonucleotide
gcgatgatatacagcgccttgcaaatgagtcaggtaggtctctgaccgtcctgcggcgta

SEQ ID NO: 235539 - DNA, 56 bp, Artificial
  Synthetic oligonucleotide
gagcgctgtcgataatcagaatgcgtatcaacaaaccgacgccactctgtgcatga

SEQ ID NO: 235540 - DNA, 56 bp, Artificial
  Synthetic oligonucleotide
ggctcggataccatagctcaatagcagcctaccgaattgcttactggtatattgcg

SEQ ID NO: 235541 - DNA, 56 bp, Artificial
  Synthetic oligonucleotide
tggaagtgcgaacaaacatcaatcacagggcatcaaggtgcaagtgttaactatct

SEQ ID NO: 235542 - DNA, 56 bp, Artificial
  Synthetic oligonucleotide
gtaaggcaattaagcctgtaatggagttatgtaatataccctatgaacctctaacc

SEQ ID NO: 235543 - DNA, 56 bp, Artificial
  Synthetic oligonucleotide
tgccgtttatgctgccgcttatgttgccgttatggcgcgggtgtagtgtgcgtagc

SEQ ID NO: 235544 - DNA, 56 bp, Artificial
  Synthetic oligonucleotide
tgaaaaagtagactggctagaagtgcacatgcttcaatctgaagctaggcgcgtcg

SEQ ID NO: 235545 - DNA, 55 bp, Artificial
  Synthetic oligonucleotide
gccataggtttctcttccgcatccggggtatttattgcgctctttggtagtgtca

SEQ ID NO: 235546 - DNA, 55 bp, Artificial
  Synthetic oligonucleotide
gaagtcggttaatgatactgagctggcggtgttgactgacatcgtcacctttaac

SEQ ID NO: 235547 - DNA, 55 bp, Artificial
  Synthetic oligonucleotide
gaagtgctgcccatgtataaccgcgataagctagtgctggtgaatcaacccgact

SEQ ID NO: 235548 - DNA, 55 bp, Artificial
  Synthetic oligonucleotide
cgaacaatacatcatgcaatgggtaagtcactttggcagattgtcggctgtcagc

SEQ ID NO: 235549 - DNA, 59 bp, Artificial
  Synthetic oligonucleotide
ctcgctgattgttcatcgcgatagagaagtggaaaactttatacctatcccctttcaca

SEQ ID NO: 235550 - DNA, 56 bp, Artificial
  Synthetic oligonucleotide
gccgttgctgttatgggctttggtgcttatgcgttgttaaagtggttaggccgtta

SEQ ID NO: 235551 - DNA, 55 bp, Artificial
  Synthetic oligonucleotide
cgaaatagcgcgtaggctgtattggaatttaaattgcgcatgtaggacgaaacgg

SEQ ID NO: 235552 - DNA, 55 bp, Artificial
  Synthetic oligonucleotide
gccagttcacttctttgaaggaatggtagcgaaagttactcaccattagcagtcc

SEQ ID NO: 235553 - DNA, 55 bp, Artificial
  Synthetic oligonucleotide
gaatgcgtgtgcgtgtccgattatcaataaggcggctaataacgtactgcatcgg

SEQ ID NO: 235554 - DNA, 55 bp, Artificial
  Synthetic oligonucleotide
gacaaggcgaaggcttgaaggcatagtggtgctctgtcgaaagccttgaacgcag

SEQ ID NO: 235555 - DNA, 55 bp, Artificial
  Synthetic oligonucleotide
gacagtgctaacggatttgatatgaatcccttgtatcgttttcatgacgttagcc

SEQ ID NO: 235556 - DNA, 55 bp, Artificial
  Synthetic oligonucleotide
gaccgcagggattagtgatgattaacaaccaaagtcagccagtacgtctgtcagg

SEQ ID NO: 235557 - DNA, 55 bp, Artificial
  Synthetic oligonucleotide
gaccgccttcgttgtcgtggggtagtcgaaccagagccacactgttaatgagcat

SEQ ID NO: 235558 - DNA, 55 bp, Artificial
  Synthetic oligonucleotide
gaccgcgattatttgctgacgcatgtacgtaagcgatcaatataggacggtcttg

SEQ ID NO: 235559 - DNA, 55 bp, Artificial
  Synthetic oligonucleotide
gccagttacaggctgaatgtacaggctcaaaagttggtgctagcttgcctttcta

SEQ ID NO: 235560 - DNA, 55 bp, Artificial
  Synthetic oligonucleotide
gacgaaccttgtcgccaaattcgccctctggaatagcgcttaatggcgccggagt

SEQ ID NO: 235561 - DNA, 60 bp, Artificial
  Synthetic oligonucleotide
gccgtcggcttgtagaattcgaaggataggaatgtgtagcgatgccttatccaagaagcc

SEQ ID NO: 235562 - DNA, 55 bp, Artificial
  Synthetic oligonucleotide
gacgacattaacattcctcatcactacacctaatacatggaaattctcagatggc

SEQ ID NO: 235563 - DNA, 55 bp, Artificial
  Synthetic oligonucleotide
gacgagtccgtttcgtcctacatgcgcaatttaaattccaatacagcctacgcgc

SEQ ID NO: 235564 - DNA, 55 bp, Artificial
  Synthetic oligonucleotide
gacgatacacaactgagcaaagatccaacaccttataacagcgaaggtaaatcgg

SEQ ID NO: 235565 - DNA, 55 bp, Artificial
  Synthetic oligonucleotide
ccttattacggccagtattcacgaggagtcactaacacttatgatggcgcaggta

SEQ ID NO: 235566 - DNA, 55 bp, Artificial
  Synthetic oligonucleotide
ctggctgctgcgagagttgggtacttatcttctggcgcagtcgtgcctaagtagt

SEQ ID NO: 235567 - DNA, 55 bp, Artificial
  Synthetic oligonucleotide
ctggcttatttacacacaaaacgacaagcgtaatctactcgcaagtgaccgtttt

SEQ ID NO: 235568 - DNA, 55 bp, Artificial
  Synthetic oligonucleotide
ctggttggttgcaccttgtgtcgtcacaccgtcttggttaggcagaggccctgcg

SEQ ID NO: 235569 - DNA, 55 bp, Artificial
  Synthetic oligonucleotide
ctgttagaggttattctgacctatacagttaaggcgcaacacactagcagtctgg

SEQ ID NO: 235570 - DNA, 55 bp, Artificial
  Synthetic oligonucleotide
ctgtttaccccagagttatcggcggccagcacttatcaagcgccaagcactgtgg

SEQ ID NO: 235571 - DNA, 55 bp, Artificial
  Synthetic oligonucleotide
cttaaaagggaataaccatttctgcgtcaatgcgccttggattgagatgcctgtg

SEQ ID NO: 235572 - DNA, 55 bp, Artificial
  Synthetic oligonucleotide
gccgatttttgaccctgagcttatgctattttgcgtttctaagggtgttcggaaa

SEQ ID NO: 235573 - DNA, 55 bp, Artificial
  Synthetic oligonucleotide
gccctttccttgggcttgcgggataaacatgagatcaactaaatgagccacattc

SEQ ID NO: 235574 - DNA, 55 bp, Artificial
  Synthetic oligonucleotide
cttaaaggggtattcactcggtaatactctatgcactaactcgagtagccactcg

SEQ ID NO: 235575 - DNA, 55 bp, Artificial
  Synthetic oligonucleotide
cttatcggtatggcgtggcccgcaacctattacatgcatttgagtgtcgctgcat

SEQ ID NO: 235576 - DNA, 55 bp, Artificial
  Synthetic oligonucleotide
cttcggatcagcgaattgcttagcaagcgtaaccaactgctcttcattaagcccg

SEQ ID NO: 235577 - DNA, 55 bp, Artificial
  Synthetic oligonucleotide
cttcgtcggtcctagtgtgcattcaatgacgactatgggtaacaagtcgaacgcg

SEQ ID NO: 235578 - DNA, 54 bp, Artificial
  Synthetic oligonucleotide
aagggttacgtaaggtaatcgactccttgttccatggagtgtgggacatcaagg

SEQ ID NO: 235579 - DNA, 55 bp, Artificial
  Synthetic oligonucleotide
cttcttcatccgcagccatgaggtatgtagcatgtcctgaacgagactcgtgagc

SEQ ID NO: 235580 - DNA, 55 bp, Artificial
  Synthetic oligonucleotide
gccctcagggatgaagtagagctcttttacggcgcgcagtagtgaagacttactg

SEQ ID NO: 235581 - DNA, 55 bp, Artificial
  Synthetic oligonucleotide
cttgcaatggctcgacaagatatccatcaagcctggggacattctcgatcacggc

SEQ ID NO: 235582 - DNA, 55 bp, Artificial
  Synthetic oligonucleotide
ctttcgcagaggaacaggtcaaacggcatcaggaaacgccccaggttggtcgctt

SEQ ID NO: 235583 - DNA, 60 bp, Artificial
  Synthetic oligonucleotide
gccaccgttggcgcactcattaacgcatgtttcgtgataatcaaacgctgcgcccgtaag

SEQ ID NO: 235584 - DNA, 55 bp, Artificial
  Synthetic oligonucleotide
gccctactgcgtaccctgcactttgcgaaaagctaccgcgaactcttactcagcg

SEQ ID NO: 235585 - DNA, 55 bp, Artificial
  Synthetic oligonucleotide
gaaaacagagcacggctctctcgatcaagggctcggattatacaagatccacatc

SEQ ID NO: 235586 - DNA, 55 bp, Artificial
  Synthetic oligonucleotide
gaaactgaagtctggtcgcacccactcgagctgcaaagtttcagcaggcaacccg

SEQ ID NO: 235587 - DNA, 55 bp, Artificial
  Synthetic oligonucleotide
gaaagcaagctacattactttcgtacacagcatgcattacgtacatctatttcgg

SEQ ID NO: 235588 - DNA, 55 bp, Artificial
  Synthetic oligonucleotide
cctaggtcagcaaagtggcttaatcaaattggcatctacacgagagatgacttaa

SEQ ID NO: 235589 - DNA, 52 bp, Artificial
  Synthetic oligonucleotide
gatggttagcgaaagggtttgtgggtttattactaatggacacggcggtcgg

SEQ ID NO: 235590 - DNA, 55 bp, Artificial
  Synthetic oligonucleotide
gccagatcaaatctgtatcggtaccggctatttgcctaggtaaccattcggacac

SEQ ID NO: 235591 - DNA, 55 bp, Artificial
  Synthetic oligonucleotide
gccactaatcgccttaaccctaatgcgagaatctcaatgagtgagcaaggatctc

SEQ ID NO: 235592 - DNA, 55 bp, Artificial
  Synthetic oligonucleotide
gattacccttagatcctcgttacgagactcggtggcatatggacatattgcacaa

SEQ ID NO: 235593 - DNA, 55 bp, Artificial
  Synthetic oligonucleotide
gattgcctattgcggcctccccttacactggcccgatagcagcaccttcggcact

SEQ ID NO: 235594 - DNA, 60 bp, Artificial
  Synthetic oligonucleotide
gccaatgtacccgatcccgttagcattcaaatcagccatgtggctactgacaaccgatgt

SEQ ID NO: 235595 - DNA, 55 bp, Artificial
  Synthetic oligonucleotide
aaggctttcgacagagcaccactatgccttcaagccttcgccttgtctaaagccc

SEQ ID NO: 235596 - DNA, 55 bp, Artificial
  Synthetic oligonucleotide
gcaacaagaaccttatttgtcgcttgggcgctacattcactttgtaggccgatcg

SEQ ID NO: 235597 - DNA, 55 bp, Artificial
  Synthetic oligonucleotide
gcaatcagcggtcgccgtaagcgggttttattgagctagtgagttaagcctagtt

SEQ ID NO: 235598 - DNA, 55 bp, Artificial
  Synthetic oligonucleotide
gcaatgctcactatcaggtcaaccaaaggccgaggcttatgtgtcgatgtactac

SEQ ID NO: 235599 - DNA, 55 bp, Artificial
  Synthetic oligonucleotide
gcacacgtaaccggctttgtaactctttagcgtaacggttgagtatatctgggcg

SEQ ID NO: 235600 - DNA, 55 bp, Artificial
  Synthetic oligonucleotide
gcacatacgcccgctgcaggcgattgataaccatgaagcatcaaggcaggacaca

SEQ ID NO: 235601 - DNA, 55 bp, Artificial
  Synthetic oligonucleotide
gcacctcccattgttgagtatcaaaccagtgccgttgttgcttgcgctctgcgta

SEQ ID NO: 235602 - DNA, 55 bp, Artificial
  Synthetic oligonucleotide
gcagccgttcatcgcaaacgagttttaaccgctctaaatcgagctgagagctgag

SEQ ID NO: 235603 - DNA, 55 bp, Artificial
  Synthetic oligonucleotide
cctaaacggctccagttattctccagcacggtaccgctctttccattatgagtcg

SEQ ID NO: 235604 - DNA, 55 bp, Artificial
  Synthetic oligonucleotide
gcatcttataggcatagttgagtagcgtctttcctgcatctgtcattgtgacgcc

SEQ ID NO: 235605 - DNA, 59 bp, Artificial
  Synthetic oligonucleotide
gcaggaacgttgagccccgaagggagcgaataagtcaaagtgatgaagtctgcaatggt

SEQ ID NO: 235606 - DNA, 55 bp, Artificial
  Synthetic oligonucleotide
gccacacccagactaaagcccgcgttggcacggcatttaatatccaagccgagcc

SEQ ID NO: 235607 - DNA, 55 bp, Artificial
  Synthetic oligonucleotide
gccaacccagcttggagtgaaaagttatacataggtgaactgctaaagaggtatg

SEQ ID NO: 235608 - DNA, 55 bp, Artificial
  Synthetic oligonucleotide
gcattagttagtggcttcgtgcttattcgaaaatcgctaacgcttccgatggtac

SEQ ID NO: 235609 - DNA, 55 bp, Artificial
  Synthetic oligonucleotide
gcattaagcgtccttatgctatcgcgtcagacgctcgtccctgattcgactgacg

SEQ ID NO: 235610 - DNA, 55 bp, Artificial
  Synthetic oligonucleotide
gacgatttacccgcggtacgttacgtaatggccaatcgtttgcacttagcggcaa

SEQ ID NO: 235611 - DNA, 55 bp, Artificial
  Synthetic oligonucleotide
gacggcctaaacggtgaaggcgttaactccacattctggggtgttggtgccgatg

SEQ ID NO: 235612 - DNA, 55 bp, Artificial
  Synthetic oligonucleotide
gacgttaatcgctccccgtgaaggaatggtggtgtacggtaatgattctcaaggc

SEQ ID NO: 235613 - DNA, 55 bp, Artificial
  Synthetic oligonucleotide
gactggtcagcacactctgccctgcggtgacataattgcccgcggtgacattcgc

SEQ ID NO: 235614 - DNA, 53 bp, Artificial
  Synthetic oligonucleotide
gagaccttaaatcgtgtcacgggtaacaagtctcggtcgggccaagttcctaa

SEQ ID NO: 235615 - DNA, 55 bp, Artificial
  Synthetic oligonucleotide
ccgctgatagtcactgacgcgggcttccgtaatccatggtttcgaaaagtcgagc

SEQ ID NO: 235616 - DNA, 56 bp, Artificial
  Synthetic oligonucleotide
gcacacctcaactcggtagacgcacacctttaactcggtagacgcacacctttaac

SEQ ID NO: 235617 - DNA, 55 bp, Artificial
  Synthetic oligonucleotide
gccagtatttgaagcattcgatacttgtgtcatagaagctccttacagcacacct

SEQ ID NO: 235618 - DNA, 55 bp, Artificial
  Synthetic oligonucleotide
gagatggctggatcgcagttcattatcctaaccagagagtttaggttggggttct

SEQ ID NO: 235619 - DNA, 55 bp, Artificial
  Synthetic oligonucleotide
gagcaactaagtaaaatctagtatcccgagaaagtattccgacaaacgccagttc

SEQ ID NO: 235620 - DNA, 55 bp, Artificial
  Synthetic oligonucleotide
gagcatgttgcaatccccaatacgcttaatcgacagtttgcagtaactcaaccag

SEQ ID NO: 235621 - DNA, 55 bp, Artificial
  Synthetic oligonucleotide
gccaggctcgattggcccgctaatagctgagtgataacctcaccttggcccggtc

SEQ ID NO: 235622 - DNA, 55 bp, Artificial
  Synthetic oligonucleotide
gagctgagctatggccatgaataaaactcgcctagaagataatggcatctgtgac

SEQ ID NO: 235623 - DNA, 55 bp, Artificial
  Synthetic oligonucleotide
gagggtatccctctaaggtctgctcgagtgtagggaattgagcacgcagttgggg

SEQ ID NO: 235624 - DNA, 55 bp, Artificial
  Synthetic oligonucleotide
gagtggctagaaagtcccaaatgtccggcgtcactggctaaatctcgccatgtgt

SEQ ID NO: 235625 - DNA, 55 bp, Artificial
  Synthetic oligonucleotide
gatacagagttgtggtagattactacgcaacgagcaagactatggacgcatcacg

SEQ ID NO: 235626 - DNA, 55 bp, Artificial
  Synthetic oligonucleotide
gccagcaaacgcacactactcatagagtccatagatgtcatggggaatttcgagc

SEQ ID NO: 235627 - DNA, 57 bp, Artificial
  Synthetic oligonucleotide
gatgtcaattattacgatttccccgtgagcaagcctgaccaaatacgggtcgctaaa

SEQ ID NO: 235628 - DNA, 55 bp, Artificial
  Synthetic oligonucleotide
gatatgtgacgtgtaacccggtgcattcgcgccatagagtatggtgccggtggag

SEQ ID NO: 235629 - DNA, 55 bp, Artificial
  Synthetic oligonucleotide
gatcaacgactgattaaagcaacgaggattgatgtgtctagggtataaatgctgc

SEQ ID NO: 235630 - DNA, 55 bp, Artificial
  Synthetic oligonucleotide
cctggaggctggcgggactcctctaaggctgcgagggttggactttcgttgggat

SEQ ID NO: 235631 - DNA, 53 bp, Artificial
  Synthetic oligonucleotide
gatggccccttgggcgttagaaaacccttgggccgtaaatcccatagagtcga

SEQ ID NO: 235632 - DNA, 55 bp, Artificial
  Synthetic oligonucleotide
cgcgagcaggtaaccgtcaagcaccttagacaactcaactgaggcgagggcatga

SEQ ID NO: 235633 - DNA, 55 bp, Artificial
  Synthetic oligonucleotide
cgcgcacatatccttttaatgagtcgccccattctaatcaagtcaccgactaagc

SEQ ID NO: 235634 - DNA, 55 bp, Artificial
  Synthetic oligonucleotide
cgcggctctgccactggaacgacaagtgtttgctatcgggcaaccaatcgacacg

SEQ ID NO: 235635 - DNA, 55 bp, Artificial
  Synthetic oligonucleotide
cgcgggctcgtttatcaactcagtacatgagctatcggctaagtaccacaagtaa

SEQ ID NO: 235636 - DNA, 55 bp, Artificial
  Synthetic oligonucleotide
cgacatagaagatgttggcgttagcacttaagctgccctctaaccagaccgagcg

SEQ ID NO: 235637 - DNA, 55 bp, Artificial
  Synthetic oligonucleotide
cgcggggtaagtcctgtgattgtacttgcccatcatgcggtattgccttaatcgc

SEQ ID NO: 235638 - DNA, 57 bp, Artificial
  Synthetic oligonucleotide
gagtggtataattaccctcgatcatacaaatgtacggttccatttggcggctaaagc

SEQ ID NO: 235639 - DNA, 55 bp, Artificial
  Synthetic oligonucleotide
cgcgtcaaaagccaaagtcacatcgaccaagctgcggcattacgaaattttgcca

SEQ ID NO: 235640 - DNA, 55 bp, Artificial
  Synthetic oligonucleotide
cgacaggaaggataacggtggagcttagtcggtgacttgattagaatggggcgac

SEQ ID NO: 235641 - DNA, 55 bp, Artificial
  Synthetic oligonucleotide
cgctaagctgagggtacgttcttgttcggcaaatgacagctcacggatctcagcg

SEQ ID NO: 235642 - DNA, 55 bp, Artificial
  Synthetic oligonucleotide
cgctatcggttgtgagaaggttaacaataatcctgggaatatcgctagccgttgc

SEQ ID NO: 235643 - DNA, 55 bp, Artificial
  Synthetic oligonucleotide
cgctcccaatccttaccgcaattgaagttaaagtcaacccgagattagcaatgta

SEQ ID NO: 235644 - DNA, 55 bp, Artificial
  Synthetic oligonucleotide
cgctcgctgtttatggaagcgtcctattttaatctgaacattgctcactttacgg

SEQ ID NO: 235645 - DNA, 55 bp, Artificial
  Synthetic oligonucleotide
cgctgcgcttaatgacgacttacgggcgcagcgtttgattatcacgaaacatgcg

SEQ ID NO: 235646 - DNA, 55 bp, Artificial
  Synthetic oligonucleotide
cggaatacgacattgataggtcttaccgttggccagacgtgcgacgtactgcaac

SEQ ID NO: 235647 - DNA, 55 bp, Artificial
  Synthetic oligonucleotide
cggataggcgaccggccctatgatgagtcctagcatggcccagcgtttcacccct

SEQ ID NO: 235648 - DNA, 55 bp, Artificial
  Synthetic oligonucleotide
cggcaatatgggtgtgttggttggtgctttgtctaaggtgatggcaagtagctgg

SEQ ID NO: 235649 - DNA, 58 bp, Artificial
  Synthetic oligonucleotide
gagatttagccagtgcgccggatatttgggactttctagcgactcacaacccttcgcc

SEQ ID NO: 235650 - DNA, 55 bp, Artificial
  Synthetic oligonucleotide
cgacagagataagtacgcgccaacctcagatgccgctaaggctctatacgccgcc

SEQ ID NO: 235651 - DNA, 55 bp, Artificial
  Synthetic oligonucleotide
cggcaatcagctctagatcgccttcaactttacgtaagtcatatcgacgataccc

SEQ ID NO: 235652 - DNA, 55 bp, Artificial
  Synthetic oligonucleotide
cggcacccgaatatcacgacctagttgctgatgtctctgaattcctaaacgagcg

SEQ ID NO: 235653 - DNA, 55 bp, Artificial
  Synthetic oligonucleotide
cggcactgtgattgtaattggggatcactagggcgagcttgatgggcgcggactc

SEQ ID NO: 235654 - DNA, 55 bp, Artificial
  Synthetic oligonucleotide
cggcagtgataaagtgtcgaccggtgcatcacaagacatcaaatacgcgacgtct

SEQ ID NO: 235655 - DNA, 55 bp, Artificial
  Synthetic oligonucleotide
cggccagagttgtgagtttcagacttgagaatgaccatagggtctttgcctacca

SEQ ID NO: 235656 - DNA, 55 bp, Artificial
  Synthetic oligonucleotide
cggcgtattaattgcggctcagttaatctggcctcagctgaactttgacactcct

SEQ ID NO: 235657 - DNA, 55 bp, Artificial
  Synthetic oligonucleotide
cgacggtacacttgcggatcttctttacaggtaaactccatccacttgtagtaca

SEQ ID NO: 235658 - DNA, 55 bp, Artificial
  Synthetic oligonucleotide
cgaccataaataacatagtgcacctctcgtgtagcgcttgcagggattagatccc

SEQ ID NO: 235659 - DNA, 55 bp, Artificial
  Synthetic oligonucleotide
cgacgtaagaataaatcgtgctgttctaactgagtaagggtttgcttggtcatga

SEQ ID NO: 235660 - DNA, 60 bp, Artificial
  Synthetic oligonucleotide
ctcaatcatgtacagcacgaaccccgctttagtcgcttggcctgtaagtgccatgagttc

SEQ ID NO: 235661 - DNA, 60 bp, Artificial
  Synthetic oligonucleotide
gagatccacgaagccttaatcagtggcggtaaatttgccgaaggactcaagccatggata

SEQ ID NO: 235662 - DNA, 55 bp, Artificial
  Synthetic oligonucleotide
cgactctctatctcacagcagcttcggccatcatttgaccagttgtgtgccagtg

SEQ ID NO: 235663 - DNA, 55 bp, Artificial
  Synthetic oligonucleotide
ccgtccacgcttctgagcgtcatactcaatcttggcatgtgtaccggtggccatg

SEQ ID NO: 235664 - DNA, 55 bp, Artificial
  Synthetic oligonucleotide
aatgtggaggcactcactacgatatctgtgttgacgaaaatgtgacctttgcgcc

SEQ ID NO: 235665 - DNA, 55 bp, Artificial
  Synthetic oligonucleotide
cgagagcgtgcacactgtgtatgtgtcggcccatgcaattctggtcgactttatg

SEQ ID NO: 235666 - DNA, 55 bp, Artificial
  Synthetic oligonucleotide
cgagccgggtattttagcattgccagagacagagttgaacgatctgtttgcatgt

SEQ ID NO: 235667 - DNA, 55 bp, Artificial
  Synthetic oligonucleotide
cgagcgtctgacgcgatagcataaggacgtttaatgcccaaggggctttcaactc

SEQ ID NO: 235668 - DNA, 55 bp, Artificial
  Synthetic oligonucleotide
cgacatcggataatttggcgccagcacgtacaaattgatcgtaatagaactcaac

SEQ ID NO: 235669 - DNA, 55 bp, Artificial
  Synthetic oligonucleotide
cgagcgttagttacgcgttctaagccgaattgagttaatcagtacccatcactac

SEQ ID NO: 235670 - DNA, 55 bp, Artificial
  Synthetic oligonucleotide
cgagttcaacacccgctactgaaaattgtgtcgtcatgtgccacactgagccaat

SEQ ID NO: 235671 - DNA, 55 bp, Artificial
  Synthetic oligonucleotide
cgagttcccttaccttgcaaggagtcgatatgaatggttccgttcaattgagcaa

SEQ ID NO: 235672 - DNA, 60 bp, Artificial
  Synthetic oligonucleotide
gacagcgataaagttgcaggcgtgcttaaggatgcttttggctatgcaccctatgtgatc

SEQ ID NO: 235673 - DNA, 55 bp, Artificial
  Synthetic oligonucleotide
cgatagctcatacctatactgaacatcgacaacactttacgttcgatttcatcgg

SEQ ID NO: 235674 - DNA, 55 bp, Artificial
  Synthetic oligonucleotide
cgcaggcctttagccgcgtttggcaaacagaatggtgctccgtgcgagcggagca

SEQ ID NO: 235675 - DNA, 55 bp, Artificial
  Synthetic oligonucleotide
cgcatctggactaatgtggttcatacccgctgttgcaccaataaaccagttcagc

SEQ ID NO: 235676 - DNA, 55 bp, Artificial
  Synthetic oligonucleotide
cgcatgtgactgcggttggggtagcaagggctagagcacaagggcaagttgcgac

SEQ ID NO: 235677 - DNA, 55 bp, Artificial
  Synthetic oligonucleotide
cgccatgcttgggagctagggctaaaccctattcacgatatgatcgataccctcg

SEQ ID NO: 235678 - DNA, 55 bp, Artificial
  Synthetic oligonucleotide
cgccattactacgccaatttgcgccgagaagataaacagttgctcgtatagcgcc

SEQ ID NO: 235679 - DNA, 55 bp, Artificial
  Synthetic oligonucleotide
cgcccgagataatccctagatcgtctgcgaatgttgggagcactcaaacccttgg

SEQ ID NO: 235680 - DNA, 55 bp, Artificial
  Synthetic oligonucleotide
cgccctctatcggcagaccttagtggactatggcaagcgttgattatggtaagag

SEQ ID NO: 235681 - DNA, 55 bp, Artificial
  Synthetic oligonucleotide
cgcctacttttatgagttattgagcgagttgattgtgttactggcgtatcgcggt

SEQ ID NO: 235682 - DNA, 55 bp, Artificial
  Synthetic oligonucleotide
cgcgaagcatgtaggcattgctgacacatggactaagcacatcaaggttaacggc

SEQ ID NO: 235683 - DNA, 60 bp, Artificial
  Synthetic oligonucleotide
cttctcattgatgccagttacaggctgaatgtacaggctcaaaagttggtgctagcttgc

SEQ ID NO: 235684 - DNA, 55 bp, Artificial
  Synthetic oligonucleotide
ctaaatcctcttcactgcctagataaatatcgtgccaacgtttagcccaatattc

SEQ ID NO: 235685 - DNA, 55 bp, Artificial
  Synthetic oligonucleotide
ctaataccatacttagatgtgatgggccgtctctaaagtcttcacagtcgagcac

SEQ ID NO: 235686 - DNA, 55 bp, Artificial
  Synthetic oligonucleotide
ctacgaattaagtgtgactaacaagcccattaacccttgtgcaataccccttcgc

SEQ ID NO: 235687 - DNA, 55 bp, Artificial
  Synthetic oligonucleotide
ctactgagattgtatcgagcgatttagtgggttctcgctacgcgggcgtgattga

SEQ ID NO: 235688 - DNA, 55 bp, Artificial
  Synthetic oligonucleotide
ctagcggataaggtgcatcaccatttaggactgccagactcaacgtttctaggca

SEQ ID NO: 235689 - DNA, 55 bp, Artificial
  Synthetic oligonucleotide
ctatcgcagagtcttatgagcatgatgcgaaacggtatgatgctgatgctagcgc

SEQ ID NO: 235690 - DNA, 55 bp, Artificial
  Synthetic oligonucleotide
ctatcggtaagcttaacaaagctgatgagtaggcttccccaactaattatctcgc

SEQ ID NO: 235691 - DNA, 55 bp, Artificial
  Synthetic oligonucleotide
ctcaagtaacgctcatcggtcgcaatacgtgtcgcaggccaattgtcgataaagc

SEQ ID NO: 235692 - DNA, 55 bp, Artificial
  Synthetic oligonucleotide
ctcactatcggatagcgattagcactctctaagcatttagcgcgagccctttcga

SEQ ID NO: 235693 - DNA, 55 bp, Artificial
  Synthetic oligonucleotide
ctccgcagctacgctgtcgataattgtttgtcttaccgatgaccacagtaggcca

SEQ ID NO: 235694 - DNA, 60 bp, Artificial
  Synthetic oligonucleotide
cttatcacttctgccggtgacactgacttcctcgaaggggaacaagctgaagtgtcacgc

SEQ ID NO: 235695 - DNA, 55 bp, Artificial
  Synthetic oligonucleotide
ccgcttatgtcctttgataggggagggcttatctgacgcttcctggctcatatcc

SEQ ID NO: 235696 - DNA, 55 bp, Artificial
  Synthetic oligonucleotide
ctcgacttgtagcgtttgcagagggtctgccagtacgcatcgattacggcagcac

SEQ ID NO: 235697 - DNA, 55 bp, Artificial
  Synthetic oligonucleotide
ctcgccaccgattcgcacccagaaaccttaggctcagcgttaatgcattcgcgta

SEQ ID NO: 235698 - DNA, 55 bp, Artificial
  Synthetic oligonucleotide
ctcgccttgagctcactggtacgctggctgctgttattgtagataccacgactat

SEQ ID NO: 235699 - DNA, 55 bp, Artificial
  Synthetic oligonucleotide
ctcgcgatgttctgggtaacattcgcattatcgagtgatgacctgtcaattgacg

SEQ ID NO: 235700 - DNA, 55 bp, Artificial
  Synthetic oligonucleotide
ctcgctaacccttggtgtatttgagctgtagcgatcgtaggtggtgggatttacg

SEQ ID NO: 235701 - DNA, 55 bp, Artificial
  Synthetic oligonucleotide
aatatggtaagtcgttcccatagtgctgcccgctaacgaaatgacttcgttctgc

SEQ ID NO: 235702 - DNA, 55 bp, Artificial
  Synthetic oligonucleotide
ctctagacctaattcggggaagatactgattgcaccttggcctaagatcaagccg

SEQ ID NO: 235703 - DNA, 55 bp, Artificial
  Synthetic oligonucleotide
ctctcgctcacttgttccgggaattgcagttcgacactcgcgcccaccatacccg

SEQ ID NO: 235704 - DNA, 55 bp, Artificial
  Synthetic oligonucleotide
ctctgataacgaaactattatcagcgaacccttattggattgggagcgtttaggc

SEQ ID NO: 235705 - DNA, 60 bp, Artificial
  Synthetic oligonucleotide
ctggcatgttgtacggctatgtgtcgcgggcttggtgcaagaagcatcaccctaacatgc

SEQ ID NO: 235706 - DNA, 55 bp, Artificial
  Synthetic oligonucleotide
ctgatgtaaccgagtcaattcaatgagtgagcgtacaccagccgttggagagagt

SEQ ID NO: 235707 - DNA, 55 bp, Artificial
  Synthetic oligonucleotide
ctgccaacacgacagcgatggctgtaggtgaccgattcacacaaattggtcagtc

SEQ ID NO: 235708 - DNA, 55 bp, Artificial
  Synthetic oligonucleotide
ctgcgcttacgtaataggcttgaaagtagccggtaagttagcaacaacttagctg

SEQ ID NO: 235709 - DNA, 55 bp, Artificial
  Synthetic oligonucleotide
cggcttaatgctcacccctgcactcgaggctggtgatacagtcgcggcagaaacg

SEQ ID NO: 235710 - DNA, 55 bp, Artificial
  Synthetic oligonucleotide
ccgtcaaagaggatggcagcgtggtcacttgggggggctcatcctatggcggaga

SEQ ID NO: 235711 - DNA, 54 bp, Artificial
  Synthetic oligonucleotide
cgggtacaacataccacgtacggttaacgtgataaggataatcgcaagacccca

SEQ ID NO: 235712 - DNA, 55 bp, Artificial
  Synthetic oligonucleotide
cggtagacgcacacctttaactcggtagacgcacacctcaactcggtagacgcac

SEQ ID NO: 235713 - DNA, 55 bp, Artificial
  Synthetic oligonucleotide
cggtccactggcatcaatgggttatatggcggagcgtcttttactgcctgtcgtg

SEQ ID NO: 235714 - DNA, 55 bp, Artificial
  Synthetic oligonucleotide
cggtgccaacgctacgctaaacctaactcacctcaatcaagctaagaggcatgcg

SEQ ID NO: 235715 - DNA, 55 bp, Artificial
  Synthetic oligonucleotide
cgaattgtgcggcaacgcggcacgtgcattttacgttagatggcaatgggcctgc

SEQ ID NO: 235716 - DNA, 58 bp, Artificial
  Synthetic oligonucleotide
ctgcatttaacggtggttttacaatgcctcgctatttgcgaacatcaaaaccatgtcc

SEQ ID NO: 235717 - DNA, 55 bp, Artificial
  Synthetic oligonucleotide
cggtgcgctagccgatggacctaacttctatggtcgactagaccttgcagtgaca

SEQ ID NO: 235718 - DNA, 53 bp, Artificial
  Synthetic oligonucleotide
cggttaaccgatctgcggtaatcgacggcgccatagggtcaatgggtttacgg

SEQ ID NO: 235719 - DNA, 55 bp, Artificial
  Synthetic oligonucleotide
aatcgactcagtagagttatctgccaaaattatactgcgctacacctgagaagcg

SEQ ID NO: 235720 - DNA, 55 bp, Artificial
  Synthetic oligonucleotide
cgtatgatacgtgaatttgcactattacttagcgctggattagaaacggctctta

SEQ ID NO: 235721 - DNA, 55 bp, Artificial
  Synthetic oligonucleotide
cgtcagtaatggcatgcacggctgccaaacgcgttttaagactatgggccaaatc

SEQ ID NO: 235722 - DNA, 55 bp, Artificial
  Synthetic oligonucleotide
ccgtcaaacggttagttatttgattctggcgtcgagatgatgtttcgtccgaatc

SEQ ID NO: 235723 - DNA, 53 bp, Artificial
  Synthetic oligonucleotide
cgaagattcgaaaatttggataacggatgtaaaaggtgcggtttcaggttctg

SEQ ID NO: 235724 - DNA, 55 bp, Artificial
  Synthetic oligonucleotide
cgtcttgatagatatcaactatgagcgacctgtgcctaaagccagtagtggtggg

SEQ ID NO: 235725 - DNA, 55 bp, Artificial
  Synthetic oligonucleotide
cgtgagagcgataccttctgcgccggagataaaattagtgtaatcgacactccct

SEQ ID NO: 235726 - DNA, 55 bp, Artificial
  Synthetic oligonucleotide
cgtgatccgacgcgcgatagatgtctgctttatagaacttatgcgttccagtacc

SEQ ID NO: 235727 - DNA, 60 bp, Artificial
  Synthetic oligonucleotide
ctgaggcgagtggtgcgcacaatgccgcgactcgatgagatttccccgtaagctgcaccg

SEQ ID NO: 235728 - DNA, 55 bp, Artificial
  Synthetic oligonucleotide
cgtgccgttttagccacgacgcgataagccagtttatcgcttaaaccacccgtgc

SEQ ID NO: 235729 - DNA, 55 bp, Artificial
  Synthetic oligonucleotide
cgtgcgcaagagtaagaccacgtttgccgccctcgaaaacttgagtcacgacgcg

SEQ ID NO: 235730 - DNA, 55 bp, Artificial
  Synthetic oligonucleotide
cgtgtctatgcttacgttagcacttgcgccaacacgtagaggaaagtcagggtgc

SEQ ID NO: 235731 - DNA, 55 bp, Artificial
  Synthetic oligonucleotide
cgtttctataccgagactaagaccatcacttcccgttggttcgagtccgatattg

SEQ ID NO: 235732 - DNA, 55 bp, Artificial
  Synthetic oligonucleotide
gtgtcggtatgtctgtgctgctcagtgctgagtaacgattgtggccaagtcaccg

SEQ ID NO: 235733 - DNA, 55 bp, Artificial
  Synthetic oligonucleotide
gttaaacacgctgtccacaatcgccatgtccattgccgtaggctcgggttgtgtc

SEQ ID NO: 235734 - DNA, 55 bp, Artificial
  Synthetic oligonucleotide
gttcgttacggatctcattggtatgccaaatttgagcgattagctgacgtagtcg

SEQ ID NO: 235735 - DNA, 55 bp, Artificial
  Synthetic oligonucleotide
gttgaggtatgcaagttacgcgttacatggggtgatgaggctattttaaacgcca

SEQ ID NO: 235736 - DNA, 55 bp, Artificial
  Synthetic oligonucleotide
gttgatatcaccaacacctcaccacattacctagcgcttaggggtagagcggcag

SEQ ID NO: 235737 - DNA, 55 bp, Artificial
  Synthetic oligonucleotide
aactatccccatcacgcgagagtttcgcgcagaactccccaacggtaatggccgc

SEQ ID NO: 235738 - DNA, 59 bp, Artificial
  Synthetic oligonucleotide
ctcttcacggtgatacgctaaatccttgggaccttgctcgaactagcggcggctcaagc

SEQ ID NO: 235739 - DNA, 55 bp, Artificial
  Synthetic oligonucleotide
gttgtctatcgccacggaaaagacttactcgatggccgcaaacgcatgttagcgg

SEQ ID NO: 235740 - DNA, 55 bp, Artificial
  Synthetic oligonucleotide
aacgttaaagtactgacactttgcggcggcgtgcctatggggccacaggttggct

SEQ ID NO: 235741 - DNA, 55 bp, Artificial
  Synthetic oligonucleotide
taaaatagcggcatcacggtaatacagatcccgtccccagtggcggatatttagc

SEQ ID NO: 235742 - DNA, 55 bp, Artificial
  Synthetic oligonucleotide
taaacgccctgctacgcaaggcggctaagactcctgtactgtcttaacctagcga

SEQ ID NO: 235743 - DNA, 55 bp, Artificial
  Synthetic oligonucleotide
taactggggcttgatagtgccgtttgcggtttcgattttgccaacggtaagctgg

SEQ ID NO: 235744 - DNA, 55 bp, Artificial
  Synthetic oligonucleotide
taaggcgtgctgccgtgtgcttcacactataagtcagtgagcaactatggaacac

SEQ ID NO: 235745 - DNA, 55 bp, Artificial
  Synthetic oligonucleotide
aacggctcattaatcatggcccttagcccgctcatcacgtcactgattgcctgtg

SEQ ID NO: 235746 - DNA, 55 bp, Artificial
  Synthetic oligonucleotide
tacaaattagctgtgctctgggcgggtaaaacttggctgaaatgcgcgtaacttg

SEQ ID NO: 235747 - DNA, 55 bp, Artificial
  Synthetic oligonucleotide
tacatcttaacttggaccctatatgcagcccctgttgcctcaactcgctcctgct

SEQ ID NO: 235748 - DNA, 55 bp, Artificial
  Synthetic oligonucleotide
tacgtcagttgtcggaaccactttcaagtatggaacgcccgctaaacttgctagc

SEQ ID NO: 235749 - DNA, 59 bp, Artificial
  Synthetic oligonucleotide
atagcgagacgaaacaatgatgttcctaatgcgaggagtctcggcctttgctctttttg

SEQ ID NO: 235750 - DNA, 55 bp, Artificial
  Synthetic oligonucleotide
tactctacgctcctcgccaaaggaaacttagagttagaagtgcggaacagtttcc

SEQ ID NO: 235751 - DNA, 55 bp, Artificial
  Synthetic oligonucleotide
tactttctggctttgatggcgttaagtccaccgccactaagctggtataggcact

SEQ ID NO: 235752 - DNA, 55 bp, Artificial
  Synthetic oligonucleotide
tagcggcagttacaaggccgattggataacagagtgtactctaggcaataaatct

SEQ ID NO: 235753 - DNA, 55 bp, Artificial
  Synthetic oligonucleotide
tagctttcaggtctctcggatgatgactcgaatcgatagcgtctaatgcatcgcc

SEQ ID NO: 235754 - DNA, 55 bp, Artificial
  Synthetic oligonucleotide
taggtctctttgtggcatcgagtatcggtttcttactgtcacccgatacccaagc

SEQ ID NO: 235755 - DNA, 55 bp, Artificial
  Synthetic oligonucleotide
tagtcatctatcacctgccgtgggcatatgtgcagatacttctgtgagtcgccgc

SEQ ID NO: 235756 - DNA, 55 bp, Artificial
  Synthetic oligonucleotide
tagtgcagggctcagcgctgattgtcagcaaatcgtctaccgatatgcgtgtgca

SEQ ID NO: 235757 - DNA, 55 bp, Artificial
  Synthetic oligonucleotide
gtagcgggtgctttgcctaacgggataggcagatgcatcgatgccctgtgtcgaa

SEQ ID NO: 235758 - DNA, 53 bp, Artificial
  Synthetic oligonucleotide
gtatatggaggttaaccacgtgaagtttcccagtttagtatcctttatgcccg

SEQ ID NO: 235759 - DNA, 55 bp, Artificial
  Synthetic oligonucleotide
gtatcgatattgggcatatgttcgcgtagcgccgctagtgcattacccactaatg

SEQ ID NO: 235760 - DNA, 60 bp, Artificial
  Synthetic oligonucleotide
atagacgcagccttgagcggtaatagtgggcataacgccaacatcagaagcgcgaattta

SEQ ID NO: 235761 - DNA, 55 bp, Artificial
  Synthetic oligonucleotide
gtatgcattgtcagtcgttcgagctagaccataaagtggttagcggtaaggggag

SEQ ID NO: 235762 - DNA, 55 bp, Artificial
  Synthetic oligonucleotide
gtatgtttacgccagtcaaggagtgcatttccgtaagcctttaccggcgtgcaac

SEQ ID NO: 235763 - DNA, 55 bp, Artificial
  Synthetic oligonucleotide
gtcagaaaacgcaaatagactgccagcaagcgtgtcaaagctcacctgtgactcg

SEQ ID NO: 235764 - DNA, 55 bp, Artificial
  Synthetic oligonucleotide
gtcagcgaacagacagggcgactggcgctaatttagtgagttgtcgacgagtaga

SEQ ID NO: 235765 - DNA, 55 bp, Artificial
  Synthetic oligonucleotide
gtcatggctgagtactctagcatattgccaattcagcgcgtgggtaccattaaag

SEQ ID NO: 235766 - DNA, 55 bp, Artificial
  Synthetic oligonucleotide
gtcattcgggcctcgttagatgtcgagcgggttcgtgattatctggccggtaaaa

SEQ ID NO: 235767 - DNA, 55 bp, Artificial
  Synthetic oligonucleotide
gtccgattgactaacctatctaacccgttctcaaatagcaagggtacaaccataa

SEQ ID NO: 235768 - DNA, 55 bp, Artificial
  Synthetic oligonucleotide
gtcgaagatgctcgtttaacgggttttgaaattagtggccgttatcgcattggtc

SEQ ID NO: 235769 - DNA, 55 bp, Artificial
  Synthetic oligonucleotide
gtcgcaggcctttgttgtgccatggtgctagtgatggggtttgttggagcgggcg

SEQ ID NO: 235770 - DNA, 55 bp, Artificial
  Synthetic oligonucleotide
gtcgcagttttgcgctggcaattgatacggggtttgatagtgcgttttcgaccat

SEQ ID NO: 235771 - DNA, 58 bp, Artificial
  Synthetic oligonucleotide
ctcaaaacatctcgacgacttccaacgtaaactccgcgacattagcagccggcttcaa

SEQ ID NO: 235772 - DNA, 60 bp, Artificial
  Synthetic oligonucleotide
ataactgcacggttctcggtgcagcttacggggaaatctcatcgagtcgcggcattgtgc

SEQ ID NO: 235773 - DNA, 55 bp, Artificial
  Synthetic oligonucleotide
gtctattcgccaacgctgcaaggttctacttgataatccaatcacgtcacaggcc

SEQ ID NO: 235774 - DNA, 55 bp, Artificial
  Synthetic oligonucleotide
gtcttacgcaaacgctttattaacgtcgaaattatcgttactcgtgaggatccgc

SEQ ID NO: 235775 - DNA, 55 bp, Artificial
  Synthetic oligonucleotide
gtctttcggtagttgtttaactccgatagccgcacgagccgggtaaggctgagag

SEQ ID NO: 235776 - DNA, 55 bp, Artificial
  Synthetic oligonucleotide
gtgaactctactctagggatcagtttcctacacaataaagcgccgctatcgcaaa

SEQ ID NO: 235777 - DNA, 55 bp, Artificial
  Synthetic oligonucleotide
gtgataatcaaacgctgagcccgtaagtcgtcattaagcgcagcggaataaccgc

SEQ ID NO: 235778 - DNA, 55 bp, Artificial
  Synthetic oligonucleotide
gtgcccttgctatttgagaacgggttagataggttagtcaatcggactttagtgg

SEQ ID NO: 235779 - DNA, 55 bp, Artificial
  Synthetic oligonucleotide
gtgccgctttaaccgttagcgcactaacaggcgcaagaatgcgtgtacgtgtccg

SEQ ID NO: 235780 - DNA, 55 bp, Artificial
  Synthetic oligonucleotide
gtgcctcctagcagttgttttatcctgtacatagcggtttctgagattgagcggc

SEQ ID NO: 235781 - DNA, 55 bp, Artificial
  Synthetic oligonucleotide
gtgcggtcgaaataactatctgcgctagttaactacagtagggttgcaacaatac

SEQ ID NO: 235782 - DNA, 55 bp, Artificial
  Synthetic oligonucleotide
gtgctcgaacactatcacgcttttgccagtctaccgtagctgacttacgcagctg

SEQ ID NO: 235783 - DNA, 53 bp, Artificial
  Synthetic oligonucleotide
ataaacttccccgatggtactcggcttaatctggcgggaatggggggaactga

SEQ ID NO: 235784 - DNA, 55 bp, Artificial
  Synthetic oligonucleotide
gtggtcctctctaacaaggcatacctgatggtcggtaaatagggtttggtgagcg

SEQ ID NO: 235785 - DNA, 55 bp, Artificial
  Synthetic oligonucleotide
tgagatatcgagcacgagtccgggtctgtcataggccactaggttgtagcttaag

SEQ ID NO: 235786 - DNA, 55 bp, Artificial
  Synthetic oligonucleotide
aaatcccgagcatggtacgccgacacaagttcatcccgaaatctaacgtataggg

SEQ ID NO: 235787 - DNA, 55 bp, Artificial
  Synthetic oligonucleotide
tgagtagctcaacaatcgcaataaggtcttcataactatatgttgcttggtgtgg

SEQ ID NO: 235788 - DNA, 55 bp, Artificial
  Synthetic oligonucleotide
tgatcaagttatatggagtaccccgaagtcgttcactacgcgtgtcatggacctt

SEQ ID NO: 235789 - DNA, 55 bp, Artificial
  Synthetic oligonucleotide
tgatgattgtggccgcctatttagccggttctgtctcaagtgctgtgctagtgtg

SEQ ID NO: 235790 - DNA, 55 bp, Artificial
  Synthetic oligonucleotide
tgcagatgtttcgaaaccactaagctgtccataatatgacggacaagcatgatct

SEQ ID NO: 235791 - DNA, 55 bp, Artificial
  Synthetic oligonucleotide
tgcgactggcgttaattgtgtgccttattgtcagcattgggttttatctgtatcc

SEQ ID NO: 235792 - DNA, 55 bp, Artificial
  Synthetic oligonucleotide
tgctaccagcattaattgtataccatgattaaggatcgttgtttccactacgatc

SEQ ID NO: 235793 - DNA, 55 bp, Artificial
  Synthetic oligonucleotide
tgtcgctgtagtccttatcacacttgcagctacggcctgtagtagtaaacagggc

SEQ ID NO: 235794 - DNA, 60 bp, Artificial
  Synthetic oligonucleotide
agtgccggtagagccggatacgtgcgcactagagccaagaaatccactcccaggtgtgcc

SEQ ID NO: 235795 - DNA, 55 bp, Artificial
  Synthetic oligonucleotide
tgtgcatccgctgcacactatgacgacagccacgcccgtcggccactaacgcagt

SEQ ID NO: 235796 - DNA, 55 bp, Artificial
  Synthetic oligonucleotide
tgtgcgtcccttgggtcgcgaactgacgtcagaggggagggcgtgatacgtccaa

SEQ ID NO: 235797 - DNA, 55 bp, Artificial
  Synthetic oligonucleotide
tgtgtgccacagcttaatacctccaaatctgaatacggcgaccagtcttgacctg

SEQ ID NO: 235798 - DNA, 55 bp, Artificial
  Synthetic oligonucleotide
ttaccaacaagcggccatcgataggactaatacaatcgaaggtgttacccgaaac

SEQ ID NO: 235799 - DNA, 55 bp, Artificial
  Synthetic oligonucleotide
ttaccatcaaattcccctctaagggtattatgaaccatataggtgcgcatagagg

SEQ ID NO: 235800 - DNA, 55 bp, Artificial
  Synthetic oligonucleotide
ttagtagcgcagcctcagaatgacatcgcctggtagaacgagctctacattccac

SEQ ID NO: 235801 - DNA, 55 bp, Artificial
  Synthetic oligonucleotide
ttagtcgcgccaccgttgattttccgctagcagttgacgcagacagtcattagtt

SEQ ID NO: 235802 - DNA, 55 bp, Artificial
  Synthetic oligonucleotide
ttagtggcaaggtagcgagtaatactcttgagtacccgctctcccgctcgaatag

SEQ ID NO: 235803 - DNA, 55 bp, Artificial
  Synthetic oligonucleotide
ttcgctctagcacaaggcgcttgaagagtgagggaggacgtgtagttcactacac

SEQ ID NO: 235804 - DNA, 55 bp, Artificial
  Synthetic oligonucleotide
ttcgctgtaaggcactttgtctgtgtgcagaccgaatacttcacggtcagaggct

SEQ ID NO: 235805 - DNA, 57 bp, Artificial
  Synthetic oligonucleotide
aggatagtcattaggacccatttgaatcgcccgtagcggcgaagggttgtgagtcgc

SEQ ID NO: 235806 - DNA, 53 bp, Artificial
  Synthetic oligonucleotide
tttactggcgccaacttcccgaacgttttctctgtacccaccacaaaatttgc

SEQ ID NO: 235807 - DNA, 55 bp, Artificial
  Synthetic oligonucleotide
tttatagcgagcgctgataggatcgccctgagtgctaaaatgtaatagccccgca

SEQ ID NO: 235808 - DNA, 54 bp, Artificial
  Synthetic oligonucleotide
tttgacggagcacacttcgttacagcgacaacccgttaagattagtaaccgtaa

SEQ ID NO: 235809 - DNA, 55 bp, Artificial
  Synthetic oligonucleotide
tttgttagctctcgctaatgtaaggtttcgacttatccactcgctgctgatcccc

SEQ ID NO: 235810 - DNA, 55 bp, Artificial
  Synthetic oligonucleotide
ttttcgatggtggctagcgctgattttatggtgggtattcggtcattgatatcga

SEQ ID NO: 235811 - DNA, 55 bp, Artificial
  Synthetic oligonucleotide
tagtgttagatactctcaatggtcgtctgtaccagtcattcgaaatcgataacga

SEQ ID NO: 235812 - DNA, 55 bp, Artificial
  Synthetic oligonucleotide
tatggcgaaaatggttaaacctgctgcattgagggcactaatttcaagtctggtt

SEQ ID NO: 235813 - DNA, 55 bp, Artificial
  Synthetic oligonucleotide
tattagattacgaacatataggtcgctactggatccaggcaaaactccggggcgc

SEQ ID NO: 235814 - DNA, 55 bp, Artificial
  Synthetic oligonucleotide
tattttcgaataagcacgaagccactaatcaatgcatgtaacttcgctaggggcg

SEQ ID NO: 235815 - DNA, 55 bp, Artificial
  Synthetic oligonucleotide
tcaacatcgcacaataaaacgcaaatgcggctatggtcgatataaagagtcctgc

SEQ ID NO: 235816 - DNA, 59 bp, Artificial
  Synthetic oligonucleotide
agcgtaccgacattaattgtcccgctcattatgaaaggcggcgcgtcggtaatgagcag

SEQ ID NO: 235817 - DNA, 55 bp, Artificial
  Synthetic oligonucleotide
tcaatggcacgctaagtgtgtcttggccgtctgccaatttgtactcacgtgaagc

SEQ ID NO: 235818 - DNA, 55 bp, Artificial
  Synthetic oligonucleotide
tcatagagtattgtaatctggcacctgtcgtagcgcgtggcttagcactttggac

SEQ ID NO: 235819 - DNA, 55 bp, Artificial
  Synthetic oligonucleotide
tccactacgcgttaaattacgcatggtgttgtatgaccgtgaagcagcggcaggc

SEQ ID NO: 235820 - DNA, 55 bp, Artificial
  Synthetic oligonucleotide
tccagagttggttatgctcgagtgagttccacaggtcaaagcttagaagtacaac

SEQ ID NO: 235821 - DNA, 55 bp, Artificial
  Synthetic oligonucleotide
tccctttgacaaaatctacctttgccgcatcgggtaacgtcaacccagcctcgac

SEQ ID NO: 235822 - DNA, 55 bp, Artificial
  Synthetic oligonucleotide
tcgccagtccacaggacgtgtgacacgcctcgcacagtggggtcgttgggatgaa

SEQ ID NO: 235823 - DNA, 55 bp, Artificial
  Synthetic oligonucleotide
tcggtgacttgattagaatggggcgactcattaaaaggatatgtgcgcgtgtcag

SEQ ID NO: 235824 - DNA, 55 bp, Artificial
  Synthetic oligonucleotide
tcgtcaatttaagcgcgatcaaaacagtaagcgcgatgtgagccatcaggctagt

SEQ ID NO: 235825 - DNA, 55 bp, Artificial
  Synthetic oligonucleotide
tcgtccgccgacactactgttgttgtaggtagtgcacagtgcatttgcgctattc

SEQ ID NO: 235826 - DNA, 55 bp, Artificial
  Synthetic oligonucleotide
tcgtcggcatgcaaatttccctgcaaagggtcggcaattatcgtatgtacaccca

SEQ ID NO: 235827 - DNA, 53 bp, Artificial
  Synthetic oligonucleotide
agcggtttcatttcccccgtgccaggattaactaacacgagtgcgggactaaa

SEQ ID NO: 235828 - DNA, 55 bp, Artificial
  Synthetic oligonucleotide
tctacccaccacacttgcgcagagagccgaaagcgctgacgttcgcttccctccc

SEQ ID NO: 235829 - DNA, 55 bp, Artificial
  Synthetic oligonucleotide
tctggcgacatttccctacgctccaagccaccacaggccgcacattgacggcctg

SEQ ID NO: 235830 - DNA, 55 bp, Artificial
  Synthetic oligonucleotide
tcttagtagtgcgcttaaggtacttcccgtataaaggatgcttaaccttacgctc

SEQ ID NO: 235831 - DNA, 55 bp, Artificial
  Synthetic oligonucleotide
tcttgaggctgaccatccggtccccacatcatacctgaggtacgaatggcggctg

SEQ ID NO: 235832 - DNA, 55 bp, Artificial
  Synthetic oligonucleotide
aaatcgcaattgggccggatttgcgcgagggactttcactaggggcaagtgtcgc

SEQ ID NO: 235833 - DNA, 55 bp, Artificial
  Synthetic oligonucleotide
tgacccctcatatttcttcagcgcggcaagtggaacgcttggactgctacgtgaa

SEQ ID NO: 235834 - DNA, 55 bp, Artificial
  Synthetic oligonucleotide
tgacgcagaaatggttattcccttttaagtcaatgcaacaccggagtgggatgcc

SEQ ID NO: 235835 - DNA, 55 bp, Artificial
  Synthetic oligonucleotide
tgactggcggaaccgtatcatgtgtgttcgtggccactcagaatgagatttcgcg

SEQ ID NO: 235836 - DNA, 52 bp, Artificial
  Synthetic oligonucleotide
aaatccggaggccccttgaaccgggacactattaccctagtcgtgctgttac

SEQ ID NO: 235837 - DNA, 55 bp, Artificial
  Synthetic oligonucleotide
gcgtgaagacacgatcactatgcttaagcagggcaacgcggataaagttggcggc

SEQ ID NO: 235838 - DNA, 60 bp, Artificial
  Synthetic oligonucleotide
agcgccgttagcccatatgtgtttgccgctgttgggtgaaggcgagatgagctatcaagg

SEQ ID NO: 235839 - DNA, 55 bp, Artificial
  Synthetic oligonucleotide
gcgtgttagcggcaaatacgccccaaacactacggattcaatgacagtgaaacgg

SEQ ID NO: 235840 - DNA, 55 bp, Artificial
  Synthetic oligonucleotide
gctaaatatgccttagcacccgcactcgatttgtcgtaatacatggccggagcac

SEQ ID NO: 235841 - DNA, 55 bp, Artificial
  Synthetic oligonucleotide
gctacagtaagacccaaacgcggatgttgttccgaattaggaatagcaagcaggg

SEQ ID NO: 235842 - DNA, 55 bp, Artificial
  Synthetic oligonucleotide
gctagcctagaaagtaacggatttaatgccgcttacgatggtaatcgtttcccta

SEQ ID NO: 235843 - DNA, 55 bp, Artificial
  Synthetic oligonucleotide
gctagcgacgagtggcaaagagctagttatcttcggtgtggatgattcccggcag

SEQ ID NO: 235844 - DNA, 55 bp, Artificial
  Synthetic oligonucleotide
gctaggaatacgagtgaagtacagctgatagcaaccaacaagcagtagttggtgc

SEQ ID NO: 235845 - DNA, 55 bp, Artificial
  Synthetic oligonucleotide
gctatctaatgggcgctgttgccacgctttaagttcggggatgagtttgtcagtg

SEQ ID NO: 235846 - DNA, 55 bp, Artificial
  Synthetic oligonucleotide
gctatgaaactccacatagctgtcaattcgtgcaagttgtgattcaggtagcgtg

SEQ ID NO: 235847 - DNA, 55 bp, Artificial
  Synthetic oligonucleotide
gctcagctgcgaataccaaccctttgtcgatccccatacgttagccatcgacggc

SEQ ID NO: 235848 - DNA, 55 bp, Artificial
  Synthetic oligonucleotide
gctccaccaataactgcagactctggtgtgagctagcaaggtattcaagcttgac

SEQ ID NO: 235849 - DNA, 58 bp, Artificial
  Synthetic oligonucleotide
agcgaactgctgcaattaccgttcgcgcgttacaacgaatcggccaataccgtgtcat

SEQ ID NO: 235850 - DNA, 55 bp, Artificial
  Synthetic oligonucleotide
gctctattactggtcgcagtgagtttaactgcctgtagtggtaaaggcgccgaag

SEQ ID NO: 235851 - DNA, 55 bp, Artificial
  Synthetic oligonucleotide
gctctttcactaagcggcaacagggtaagcaattcatgcgatcttaaccctgctg

SEQ ID NO: 235852 - DNA, 55 bp, Artificial
  Synthetic oligonucleotide
gctgaatatggctacggcgttacttgccataggcgtgtgtttgctggtgggactc

SEQ ID NO: 235853 - DNA, 55 bp, Artificial
  Synthetic oligonucleotide
gctgccaattcttataggtagggttgcgcggtattctactcggaacgcgaccaca

SEQ ID NO: 235854 - DNA, 55 bp, Artificial
  Synthetic oligonucleotide
gctgcgtcgataatactaggtccaatcccatcaccagggatcacggttatcattc

SEQ ID NO: 235855 - DNA, 55 bp, Artificial
  Synthetic oligonucleotide
gcttaacggccccatacaacggggctcgcctgtttgattgctactccgtatagcc

SEQ ID NO: 235856 - DNA, 55 bp, Artificial
  Synthetic oligonucleotide
gcttcttgtcctacgtcatcagatacggacgctaagccgtggcaataacgccacc

SEQ ID NO: 235857 - DNA, 55 bp, Artificial
  Synthetic oligonucleotide
gcttggtgtaagtcattcgccaaggtcacactgcgtcttgccgtttgtttgatgg

SEQ ID NO: 235858 - DNA, 53 bp, Artificial
  Synthetic oligonucleotide
ggaaactcaaatttaacgacataccagggaacgttcaaacgcgaacttgctat

SEQ ID NO: 235859 - DNA, 55 bp, Artificial
  Synthetic oligonucleotide
ggaataaccatttctgcgtcaatgcgccttggattgagatgcctgtgaggctctg

SEQ ID NO: 235860 - DNA, 60 bp, Artificial
  Synthetic oligonucleotide
agatgaagacatgtgagtgcggtgataatgaccgcaaacctagtcctcaatattcccgca

SEQ ID NO: 235861 - DNA, 53 bp, Artificial
  Synthetic oligonucleotide
ggaatcgggtccagagctggtttaagggtgaattttaactaacgcaggcaaac

SEQ ID NO: 235862 - DNA, 55 bp, Artificial
  Synthetic oligonucleotide
ggagactatttagtagttacaacgtcagtgagcacttgcggagagctagtgctgc

SEQ ID NO: 235863 - DNA, 53 bp, Artificial
  Synthetic oligonucleotide
ggagtaaccacacctgtaacgttaactctcaactttagccataacgaaacacc

SEQ ID NO: 235864 - DNA, 55 bp, Artificial
  Synthetic oligonucleotide
gccgaaaccaaggaagctcgaatcaggagaggtacgggagtattgggcttgcgac

SEQ ID NO: 235865 - DNA, 55 bp, Artificial
  Synthetic oligonucleotide
gccggtattttgcctgaaatcgaaatgacttcaggttgcagatttattgtgcgtt

SEQ ID NO: 235866 - DNA, 55 bp, Artificial
  Synthetic oligonucleotide
gccgtccagcacgctagttaaaatcattagttatggtaagcgctctacattggtc

SEQ ID NO: 235867 - DNA, 55 bp, Artificial
  Synthetic oligonucleotide
gccgttgaagagcttaatcaacgtagtgacttggttatcacatacgagacgctca

SEQ ID NO: 235868 - DNA, 55 bp, Artificial
  Synthetic oligonucleotide
gcctacggtgatgatatttggcctttatgcgatacggccacgagtcaagaaactc

SEQ ID NO: 235869 - DNA, 55 bp, Artificial
  Synthetic oligonucleotide
gcctgagttatctgacacatcacccactaataagtctgcatcaggtagtagcgcg

SEQ ID NO: 235870 - DNA, 55 bp, Artificial
  Synthetic oligonucleotide
gccttggcccgtgttcatcacagtataagactcaccgtaaaccgtatagggtttg

SEQ ID NO: 235871 - DNA, 60 bp, Artificial
  Synthetic oligonucleotide
agatccttaattctcactatcggatagcgattagcactctctaagcatttagcgcgagcc

SEQ ID NO: 235872 - DNA, 55 bp, Artificial
  Synthetic oligonucleotide
gcgaaaattggcgaccgaaggggtgcagccgatagacacttaatcctctgacacg

SEQ ID NO: 235873 - DNA, 55 bp, Artificial
  Synthetic oligonucleotide
gcgaagacttggactcgcgaatgtattcaatgtcgctggtaaggctctgcattgg

SEQ ID NO: 235874 - DNA, 55 bp, Artificial
  Synthetic oligonucleotide
gcgaatacaaacgctagatgtctctctagaccttcgagtgcaagtaggtcctcac

SEQ ID NO: 235875 - DNA, 55 bp, Artificial
  Synthetic oligonucleotide
gcgaatagcatatatcggttgcttcgcgacttcggagaaatattagattgcttgc

SEQ ID NO: 235876 - DNA, 55 bp, Artificial
  Synthetic oligonucleotide
gcgagacaagttttggttatgctagagtcgctactggctataagtctggtggctt

SEQ ID NO: 235877 - DNA, 55 bp, Artificial
  Synthetic oligonucleotide
gcgagcaaggccaaatgctccattttaacggtcaaaggtgagccaggttcgggta

SEQ ID NO: 235878 - DNA, 55 bp, Artificial
  Synthetic oligonucleotide
gcgattcatgcttgaaagttggattgggcataggatccacagtccaaatgtagtc

SEQ ID NO: 235879 - DNA, 55 bp, Artificial
  Synthetic oligonucleotide
gcgcagggtaagccaaatcgggtagaaatattatatgtcgctaatcgttcggttg

SEQ ID NO: 235880 - DNA, 55 bp, Artificial
  Synthetic oligonucleotide
gcgccaacctgccactgaaaacgattcaaaactgggagtgttccatagtccccag

SEQ ID NO: 235881 - DNA, 55 bp, Artificial
  Synthetic oligonucleotide
gcgccggatatttgggactttctagcgactcacaacccttcgccgctacgggcga

SEQ ID NO: 235882 - DNA, 60 bp, Artificial
  Synthetic oligonucleotide
ctattctgaaagaggttgcggctgactcatcagatgtagacttagtagagctacttttac

SEQ ID NO: 235883 - DNA, 60 bp, Artificial
  Synthetic oligonucleotide
actgagatgttgtaatccagcagatacaacaaccaagtgctgccgaccaatgcgaagggg

SEQ ID NO: 235884 - DNA, 55 bp, Artificial
  Synthetic oligonucleotide
gcgctacccatgaagtacactgagtctgggccggattctttacgaatgttgagca

SEQ ID NO: 235885 - DNA, 55 bp, Artificial
  Synthetic oligonucleotide
gcgctaggtggtcgtgaattacctaaagcaatttcggtgtttacggttagcactc

SEQ ID NO: 235886 - DNA, 55 bp, Artificial
  Synthetic oligonucleotide
gcgggtgtgcggctgaagaatcgttccgtgcttgctccgctgactcataatatga

SEQ ID NO: 235887 - DNA, 53 bp, Artificial
  Synthetic oligonucleotide
gcgggttgaaacctatgtgacccgtaacaaacccaccgataagttattagcac

SEQ ID NO: 235888 - DNA, 55 bp, Artificial
  Synthetic oligonucleotide
gcgtataggatggcggatcctcacgagtaacgataatttcgacgttaataaagcg

SEQ ID NO: 235889 - DNA, 55 bp, Artificial
  Synthetic oligonucleotide
gcgtcctgatatttctctggaacccgcatgactactgtcttttcgtatttggttt

SEQ ID NO: 235890 - DNA, 55 bp, Artificial
  Synthetic oligonucleotide
gcgtctgacgcgatagcataagaacgctaaatgcccaaggggctttcaactccgt

SEQ ID NO: 235891 - DNA, 55 bp, Artificial
  Synthetic oligonucleotide
gggctcattctatggcggagatagcagcagcgtggcaggacagctaacgtccggc

SEQ ID NO: 235892 - DNA, 55 bp, Artificial
  Synthetic oligonucleotide
gggctgtcactctgatggaaagtagtcaagccttagcgggtaacagtgtcgagga

SEQ ID NO: 235893 - DNA, 55 bp, Artificial
  Synthetic oligonucleotide
gggcttcggcgctttgtctgtcattgagggcgcctgtgcattcgaacaccaagtc

SEQ ID NO: 235894 - DNA, 60 bp, Artificial
  Synthetic oligonucleotide
actatgcaacatcggttgtcagtagccacatggctgatttgaatgctaacgggatcgggt

SEQ ID NO: 235895 - DNA, 55 bp, Artificial
  Synthetic oligonucleotide
gggcttggtcgccatgttaggcccagcaatcgacaccttgctagtttgtactgcg

SEQ ID NO: 235896 - DNA, 55 bp, Artificial
  Synthetic oligonucleotide
gggtcgctttagtccagtggctgattattggctcgttatccatgactcacatccc

SEQ ID NO: 235897 - DNA, 55 bp, Artificial
  Synthetic oligonucleotide
gggtgcactaaacgtgcaaaactcaccacaccttggcgtgaccaagtgcggcgag

SEQ ID NO: 235898 - DNA, 55 bp, Artificial
  Synthetic oligonucleotide
gggtttatctgagcttccccaacgacgtccggataaacgtatatgaggtaactga

SEQ ID NO: 235899 - DNA, 55 bp, Artificial
  Synthetic oligonucleotide
ggtaaaggccgtgatatacagccacagtcatgtggaccacttcggtggggtgcgg

SEQ ID NO: 235900 - DNA, 55 bp, Artificial
  Synthetic oligonucleotide
ggtagtcctctatggctgggcgttttcaccactcaaggtaaacagaccttagtgg

SEQ ID NO: 235901 - DNA, 55 bp, Artificial
  Synthetic oligonucleotide
ggtcaaacggcatcaggaaacgccccaggttggtcgcttgctgtccctgtacgtg

SEQ ID NO: 235902 - DNA, 55 bp, Artificial
  Synthetic oligonucleotide
ggtcaaagtaaacgcgcgcatctaattggccatgcagtgtttcgggttcgccgcc

SEQ ID NO: 235903 - DNA, 55 bp, Artificial
  Synthetic oligonucleotide
ggtccaccgttgcaactgcatttaagttagcgttggcgcactatacgccgctgca

SEQ ID NO: 235904 - DNA, 55 bp, Artificial
  Synthetic oligonucleotide
ggtcgacattatttagtccctgaagatgtacaagcggtcttttgctgcgtggcgg

SEQ ID NO: 235905 - DNA, 58 bp, Artificial
  Synthetic oligonucleotide
acgtcttgcgactaacctgaaaggcggtatcccgattgcaactcctgcattcgacggc

SEQ ID NO: 235906 - DNA, 55 bp, Artificial
  Synthetic oligonucleotide
ggtgacaccgttgtctgctgtataagtaaatggcacggttaatgtgtctttacca

SEQ ID NO: 235907 - DNA, 55 bp, Artificial
  Synthetic oligonucleotide
ggtgacgtagaacgcgcgataaaaggctacagcgaggtgatagaagaggcaacac

SEQ ID NO: 235908 - DNA, 55 bp, Artificial
  Synthetic oligonucleotide
ggtgcatcgccactgaaaagtgcgcgttcgtgggcgggatgagttggaatgctca

SEQ ID NO: 235909 - DNA, 55 bp, Artificial
  Synthetic oligonucleotide
ggtgggtttatgctgtagtggcacatgaggtaagtgcttaatgcagccgagtccg

SEQ ID NO: 235910 - DNA, 55 bp, Artificial
  Synthetic oligonucleotide
ggttaactctcgcaaatgactaccaatgctttgctcacgcgttagcccagtgatc

SEQ ID NO: 235911 - DNA, 55 bp, Artificial
  Synthetic oligonucleotide
ggttactcgaggtgataaaggcactacctgagttggcttttgtgcgtcgtgaaaa

SEQ ID NO: 235912 - DNA, 55 bp, Artificial
  Synthetic oligonucleotide
ggttagcgcgcgctgctaagcttggcgatattcaagcccaactggaattaattaa

SEQ ID NO: 235913 - DNA, 55 bp, Artificial
  Synthetic oligonucleotide
ggttagcttcatatactaatctcgttctaatgcggaacaagatgaaaggcgcttc

SEQ ID NO: 235914 - DNA, 55 bp, Artificial
  Synthetic oligonucleotide
gtaacgggccttaaaacgcctgaggctattttagcattgctcagtaacacgcccg

SEQ ID NO: 235915 - DNA, 55 bp, Artificial
  Synthetic oligonucleotide
gtagaattcgaaggataggaatgtgtagcgatgccttatccaagaagccgacacg

SEQ ID NO: 235916 - DNA, 55 bp, Artificial
  Synthetic oligonucleotide
acgctgattccctacaaaacttcgtgttgggctaaaggtctttgctacgcgcaaa

SEQ ID NO: 235917 - DNA, 55 bp, Artificial
  Synthetic oligonucleotide
ggcaaaatcgaaacagctaacggtactattaagcctcagttactacgtgacgctg

SEQ ID NO: 235918 - DNA, 55 bp, Artificial
  Synthetic oligonucleotide
ggcaagtaccatagccctaatcgagcaagatcaaggcgtgatggttgcggcccgc

SEQ ID NO: 235919 - DNA, 55 bp, Artificial
  Synthetic oligonucleotide
ggcacattatcaatcaataacctgggccattggatttacacagcagataactcgc

SEQ ID NO: 235920 - DNA, 55 bp, Artificial
  Synthetic oligonucleotide
ggccaaggattccacctgtcggctggcattgagcaccgaccgactgtgggagatt

SEQ ID NO: 235921 - DNA, 55 bp, Artificial
  Synthetic oligonucleotide
ggccacgcttagctgcgatttgcgaaggtgacttcatgtgcaccaaagcatcgac

SEQ ID NO: 235922 - DNA, 55 bp, Artificial
  Synthetic oligonucleotide
ggccatgacttaagctgcccagccgcacttgtttaagcaagagttcatggcttgc

SEQ ID NO: 235923 - DNA, 52 bp, Artificial
  Synthetic oligonucleotide
ggcccaaggcgaaccacgtaggggtttactgccgtttgtagcagggtttggc

SEQ ID NO: 235924 - DNA, 55 bp, Artificial
  Synthetic oligonucleotide
ggcctcctaatttcgattatcgatagtgggtaactatttccctgatgtattcagg

SEQ ID NO: 235925 - DNA, 55 bp, Artificial
  Synthetic oligonucleotide
ggcgactgagaaccttagaactaactcgactgactctacctgtaatgcactcact

SEQ ID NO: 235926 - DNA, 55 bp, Artificial
  Synthetic oligonucleotide
ggcggtcgtttacgttatgttccctacgatgcaggtggtcaagctaaggctggct

SEQ ID NO: 235927 - DNA, 53 bp, Artificial
  Synthetic oligonucleotide
acgctattgattgcgcctttgtttaacgcgagttcaaaaggtttacccgcttc

SEQ ID NO: 235928 - DNA, 55 bp, Artificial
  Synthetic oligonucleotide
ggctaattgcccgctaagcgacactcgcattagcaacaggattgattcgataagc

SEQ ID NO: 235929 - DNA, 55 bp, Artificial
  Synthetic oligonucleotide
ggctacccgttaatgaaatggtcattctagtcaatgccgcccttatggtgtcagg

SEQ ID NO: 235930 - DNA, 55 bp, Artificial
  Synthetic oligonucleotide
ggctccatagcatagagtgggacgatagcgtatccaagcccatcgttgacggcac

SEQ ID NO: 235931 - DNA, 55 bp, Artificial
  Synthetic oligonucleotide
ggctcgagcggggagttttagctctgcggcgagaaagttaggcatatcaaagtct

SEQ ID NO: 235932 - DNA, 55 bp, Artificial
  Synthetic oligonucleotide
ggctcgcaggcttaccattgtcagtagcacgaatgatcatagtatcgaagccgcc

SEQ ID NO: 235933 - DNA, 55 bp, Artificial
  Synthetic oligonucleotide
ggctttaacagagcttgtgttgccgtagctaataagcttgcacgaatagcgtggg

SEQ ID NO: 235934 - DNA, 55 bp, Artificial
  Synthetic oligonucleotide
gggaactttggtaaggcacgtcaggcctatgccgctatcgcttcaccttacggac

SEQ ID NO: 235935 - DNA, 55 bp, Artificial
  Synthetic oligonucleotide
gggacgagcgtctgacgcgatagcataaggacgccaaatgcccaaggggctttca

SEQ ID NO: 235936 - DNA, 55 bp, Artificial
  Synthetic oligonucleotide
gggacgccaaacgctgctgctatgccaataagtgggttcgagtggataaggccag

SEQ ID NO: 235937 - DNA, 55 bp, Artificial
  Synthetic oligonucleotide
gggcacatcgacacgaataacctgatactggctttctaatacttgccctaggcct

SEQ ID NO: 235938 - DNA, 59 bp, Artificial
  Synthetic oligonucleotide
acgccgtcagccacttagcctccaaagacgctcaatctaacgctagcccacaggtggcc

SEQ ID NO: 235939 - DNA, 55 bp, Artificial
  Synthetic oligonucleotide
gggcatgctttagttaatacggaagccgtcgtttgctcataggtgctcacaacag

SEQ ID NO: 235940 - DNA, 55 bp, Artificial
  Synthetic oligonucleotide
gggcctattaccctgtgcttattggtgggaaccggtctttatctcactgttcgac

SEQ ID NO: 235941 - DNA, 55 bp, Artificial
  Synthetic oligonucleotide
gggcgatcatgaataggcgtttacggatagttggggcgccgaagtcacaggcacg

SEQ ID NO: 235942 - DNA, 55 bp, Artificial
  Synthetic oligonucleotide
acccattgtcaaagtagataccaagcctatcgagacttgtatgacgcggccccta

SEQ ID NO: 235943 - DNA, 55 bp, Artificial
  Synthetic oligonucleotide
cacggctggcgcgggtacagataatggcaaggtcgggctttatgggcagcgcttc

SEQ ID NO: 235944 - DNA, 55 bp, Artificial
  Synthetic oligonucleotide
agagttggcagtgaataccaatgttgtttcggcttttacgcaagccttagtacag

SEQ ID NO: 235945 - DNA, 55 bp, Artificial
  Synthetic oligonucleotide
agatcctccgtgataagagtatgttgtacttagtgttacgctaaccgatgctcgc

SEQ ID NO: 235946 - DNA, 55 bp, Artificial
  Synthetic oligonucleotide
cacgaaagaatacatatgctctggaggtggcgactatctgtcgcctaaagtcgtt

SEQ ID NO: 235947 - DNA, 55 bp, Artificial
  Synthetic oligonucleotide
caccttaatgcccgtcatccaacgtatgggcgtgcccgttatcgcggtaacaggt

SEQ ID NO: 235948 - DNA, 55 bp, Artificial
  Synthetic oligonucleotide
agatgcgctcgaatacagtgtgcctcgactaaaatccctcacccgcaacttaccc

SEQ ID NO: 235949 - DNA, 55 bp, Artificial
  Synthetic oligonucleotide
acccgtccactcaaaaccttagtcaaaatgctcgccgttgcctccgtgttcgcaa

SEQ ID NO: 235950 - DNA, 55 bp, Artificial
  Synthetic oligonucleotide
agcaagggctaataagctagcggcattgacgcataagtgtaactaaattcccctc

SEQ ID NO: 235951 - DNA, 55 bp, Artificial
  Synthetic oligonucleotide
cacctaccaaggtgaaaagtggactaagtattattatggcgctgaagggatgtta

SEQ ID NO: 235952 - DNA, 55 bp, Artificial
  Synthetic oligonucleotide
agcacttaaacgactcgcacttaaacgatagtgatgcccatcgaatcgcttattc

SEQ ID NO: 235953 - DNA, 55 bp, Artificial
  Synthetic oligonucleotide
agccccttgggcattaagcgtccttatgctatcgcgtcagacgctcgtccctgat

SEQ ID NO: 235954 - DNA, 55 bp, Artificial
  Synthetic oligonucleotide
agcccgctagctagatacccttgaaagaaatgactctctgagataaaacctttga

SEQ ID NO: 235955 - DNA, 55 bp, Artificial
  Synthetic oligonucleotide
caccctggcgtactccgagcgcttaaatttgccgtcgaacgctgtggcgagcatc

SEQ ID NO: 235956 - DNA, 53 bp, Artificial
  Synthetic oligonucleotide
caccccacggcaaacattacatggttcggtccgttaatggggtaggatttctc

SEQ ID NO: 235957 - DNA, 55 bp, Artificial
  Synthetic oligonucleotide
caccacgagttcgccacctaacaaattgtgtaaggcgttggtctaatggcgatct

SEQ ID NO: 235958 - DNA, 55 bp, Artificial
  Synthetic oligonucleotide
cacatgattccatctggctgcagtgttgttttccggcttcgcagtggaaattctc

SEQ ID NO: 235959 - DNA, 55 bp, Artificial
  Synthetic oligonucleotide
cacagttaatcggactaatccttccaatttagcaccacactcacaggttgcaccc

SEQ ID NO: 235960 - DNA, 60 bp, Artificial
  Synthetic oligonucleotide
catagatggagatcatcgagatttaatggctttgccgtgatagtcaacgtagtccaacaa

SEQ ID NO: 235961 - DNA, 55 bp, Artificial
  Synthetic oligonucleotide
cacaggcaaaaccgcggtttcataagtggtgccgtcggcttgtagaattcgaagg

SEQ ID NO: 235962 - DNA, 55 bp, Artificial
  Synthetic oligonucleotide
cacaagacgtttacgacagtgccacgggtaaacacttgctcattccgcaaggagc

SEQ ID NO: 235963 - DNA, 55 bp, Artificial
  Synthetic oligonucleotide
cacaacttaaacattatgcatgggatgactcttggttgttcagcataggtggtac

SEQ ID NO: 235964 - DNA, 55 bp, Artificial
  Synthetic oligonucleotide
ccaactgacggctaagtttcgtgggtgcccttgttcccatagcgcagcaccttcc

SEQ ID NO: 235965 - DNA, 55 bp, Artificial
  Synthetic oligonucleotide
acggcatcactaaactatgctcgctaatttatttgcgcggtaagtggctaactcg

SEQ ID NO: 235966 - DNA, 55 bp, Artificial
  Synthetic oligonucleotide
cattgctaagttaataggccaaaaccgcaactatcgctatcgcacaatgcataat

SEQ ID NO: 235967 - DNA, 53 bp, Artificial
  Synthetic oligonucleotide
acggccgttagccggtgtttggaattggaacttggtttaaaagcatgttgcta

SEQ ID NO: 235968 - DNA, 55 bp, Artificial
  Synthetic oligonucleotide
cattcgattcaatgtgggtctagagcctgaactctacgacagccacagctacgcc

SEQ ID NO: 235969 - DNA, 55 bp, Artificial
  Synthetic oligonucleotide
catggccgtcatcactccgaccggtaactcttgagacggtaatatctgccgagcc

SEQ ID NO: 235970 - DNA, 55 bp, Artificial
  Synthetic oligonucleotide
catgccacacacaggggctgtttgatggggcagtaagtttccgcagtggatacct

SEQ ID NO: 235971 - DNA, 60 bp, Artificial
  Synthetic oligonucleotide
cagtcgttgatctttcgatcttctttactgagctgtagcagtgcgggcgtgtgtcatgca

SEQ ID NO: 235972 - DNA, 55 bp, Artificial
  Synthetic oligonucleotide
catgacttctgtagtatcagtaaagtaggtttgcgcgactgttggctcgtaaaag

SEQ ID NO: 235973 - DNA, 55 bp, Artificial
  Synthetic oligonucleotide
cagtgctatcactgacaaactcatccccgaacttaaagcgtggcaacagcgccca

SEQ ID NO: 235974 - DNA, 55 bp, Artificial
  Synthetic oligonucleotide
cagtctaaaatcgctgaagatttcgcattgaagcagccgaacgtgtcacgctcac

SEQ ID NO: 235975 - DNA, 55 bp, Artificial
  Synthetic oligonucleotide
cagctagtgggcctaagtcctgtgactcggggacaacatgcaatacgactgtccc

SEQ ID NO: 235976 - DNA, 55 bp, Artificial
  Synthetic oligonucleotide
cagcgatgccgcgggattgataccagtttcgcgtccgaagttctgcccttagcgc

SEQ ID NO: 235977 - DNA, 55 bp, Artificial
  Synthetic oligonucleotide
cagccaagtgcagaagggacgtacagctatagcttcaccacagcggatttattga

SEQ ID NO: 235978 - DNA, 55 bp, Artificial
  Synthetic oligonucleotide
cagcactagataaacaacttgcggatgagaatagcgataccaaagcgctattagc

SEQ ID NO: 235979 - DNA, 55 bp, Artificial
  Synthetic oligonucleotide
cagatagggcgagttgtgccattctgagctcttccgctaatagctctcctgcgag

SEQ ID NO: 235980 - DNA, 55 bp, Artificial
  Synthetic oligonucleotide
actacacgtcctccctcactcttcaagcgtcttgtgctagagcgaattaacgtcg

SEQ ID NO: 235981 - DNA, 55 bp, Artificial
  Synthetic oligonucleotide
cagaaagtgtcgtaactcgaatctccgatcgcacaaatcgcatacttagtaccct

SEQ ID NO: 235982 - DNA, 60 bp, Artificial
  Synthetic oligonucleotide
caggcactgaagacgtactcgcaccacgtaacacgctactcgacgaagcctggtgtgaca

SEQ ID NO: 235983 - DNA, 55 bp, Artificial
  Synthetic oligonucleotide
cactttgatacaagacatcgccatcccaatgaagtccgtaagcctctaaggtgcg

SEQ ID NO: 235984 - DNA, 55 bp, Artificial
  Synthetic oligonucleotide
cacttcctgtttcgatgaccggactacatatatccgtataaacccgaggtacaaa

SEQ ID NO: 235985 - DNA, 55 bp, Artificial
  Synthetic oligonucleotide
cactgaagtagggccataccacttatagttgtttaggccttcgacactcatagtg

SEQ ID NO: 235986 - DNA, 55 bp, Artificial
  Synthetic oligonucleotide
aggattacgtggccagagcgcaggcgaaactgcattgagcacagtgggcgtatca

SEQ ID NO: 235987 - DNA, 55 bp, Artificial
  Synthetic oligonucleotide
atggctcaatagttggcggaataggtagaactagcttatctcggtaaggtgctca

SEQ ID NO: 235988 - DNA, 54 bp, Artificial
  Synthetic oligonucleotide
atggcgtcgataacctaagtttacgaaaagttgcgacaaccattggttacgtgc

SEQ ID NO: 235989 - DNA, 55 bp, Artificial
  Synthetic oligonucleotide
aggctggccgctctatatcgtgttttaatcttgacggtgtttaacttggagtgct

SEQ ID NO: 235990 - DNA, 55 bp, Artificial
  Synthetic oligonucleotide
atgcgtcactgggaggccaatttccggtaatgtgtgtcacgcttatgaacccgag

SEQ ID NO: 235991 - DNA, 55 bp, Artificial
  Synthetic oligonucleotide
aggtttcttaccctaccgaggcagcctacagattaacggccatgaattggcttca

SEQ ID NO: 235992 - DNA, 55 bp, Artificial
  Synthetic oligonucleotide
agtcagcattagtgaaagaggtgccatgttgctccatcagcttaaattgcggcag

SEQ ID NO: 235993 - DNA, 60 bp, Artificial
  Synthetic oligonucleotide
cgtcgcttacaagaaacgacagcgtcaccgactcatagaaccatatttgagccaggtgaa

SEQ ID NO: 235994 - DNA, 60 bp, Artificial
  Synthetic oligonucleotide
cagcccatgcggcgacgtaagctactccacaaaccgtctatggctcggacataaatccga

SEQ ID NO: 235995 - DNA, 55 bp, Artificial
  Synthetic oligonucleotide
atctgagccaccatagagctgatgggttcacctgtaatacctaaggctccacgta

SEQ ID NO: 235996 - DNA, 55 bp, Artificial
  Synthetic oligonucleotide
atcgacttcgcccgagagtaagcctgccttagcttgaccacctgcatcgtaggga

SEQ ID NO: 235997 - DNA, 55 bp, Artificial
  Synthetic oligonucleotide
agttgacacttttaggtgcgctgcatagaatgcgccacgcagttgagacacagac

SEQ ID NO: 235998 - DNA, 55 bp, Artificial
  Synthetic oligonucleotide
atccataatggacgattgcactaaactcggcagtttgagcatgtcatcacgcacg

SEQ ID NO: 235999 - DNA, 54 bp, Artificial
  Synthetic oligonucleotide
agttggcgctaaagttaaatgtagtggctggtaagttgtttggctgggttcgta

SEQ ID NO: 236000 - DNA, 55 bp, Artificial
  Synthetic oligonucleotide
atccacctaaccagctctaaacctgcgtgatcactctccatcactacatcaacga

SEQ ID NO: 236001 - DNA, 55 bp, Artificial
  Synthetic oligonucleotide
agtttcgccgctatcacggggctgtttgcttaagttcggtccaagggatgcggtc

SEQ ID NO: 236002 - DNA, 55 bp, Artificial
  Synthetic oligonucleotide
atatgcaggttaccgttaaggaacgcacgaactgagaacagtacctcgctagagc

SEQ ID NO: 236003 - DNA, 55 bp, Artificial
  Synthetic oligonucleotide
accaacagccggtagagaaccgttctcagattccgacgacgaaagaatgtttcga

SEQ ID NO: 236004 - DNA, 55 bp, Artificial
  Synthetic oligonucleotide
acattgacttaaaagggaataaccatttctgcgtcaatgcgccttggattgagat

SEQ ID NO: 236005 - DNA, 60 bp, Artificial
  Synthetic oligonucleotide
cagataatggtggctcgaccggtagactcagagccgagcaggactgtattgcttggggcg

SEQ ID NO: 236006 - DNA, 55 bp, Artificial
  Synthetic oligonucleotide
ataccgcgtcgatccccgctttggtagcaacgaggattatcaagccctcgtcgcg

SEQ ID NO: 236007 - DNA, 55 bp, Artificial
  Synthetic oligonucleotide
caattccagtccggcgatttaatgactcgcatcctatcatttcaatcggctaagg

SEQ ID NO: 236008 - DNA, 55 bp, Artificial
  Synthetic oligonucleotide
caatgccggtaaccagccctgtgataagcccctgtcagagcttaaatacggcgtc

SEQ ID NO: 236009 - DNA, 55 bp, Artificial
  Synthetic oligonucleotide
agccttaacctgaattttacgggattcagcgtcactagcaaccaaagacagtgct

SEQ ID NO: 236010 - DNA, 55 bp, Artificial
  Synthetic oligonucleotide
caaggtatggatgtttcgactcattatggattcgaactcgatggctatggtgacc

SEQ ID NO: 236011 - DNA, 55 bp, Artificial
  Synthetic oligonucleotide
caacttaattgacgcctataggccaagctagttgacgtctaacagtcctaggtgc

SEQ ID NO: 236012 - DNA, 55 bp, Artificial
  Synthetic oligonucleotide
caaccgatattcaaaggtgtgatgggtacccgagcgaatgcgttttacccgctgg

SEQ ID NO: 236013 - DNA, 55 bp, Artificial
  Synthetic oligonucleotide
accagacgttcgtagagatcgacaggaggaatagccgcatttgatatcgcgcgac

SEQ ID NO: 236014 - DNA, 55 bp, Artificial
  Synthetic oligonucleotide
caaagctgcgcacaatgtaccgaacgttatgttgagggtttgcgtttggtactat

SEQ ID NO: 236015 - DNA, 55 bp, Artificial
  Synthetic oligonucleotide
agcgtactcattagcgatttaaagggcgagttatatgcactcactgccggctggc

SEQ ID NO: 236016 - DNA, 55 bp, Artificial
  Synthetic oligonucleotide
cactgtactagacacgattcgcctaaaaagtttagtgacgactaacggtgtcact

SEQ ID NO: 236017 - DNA, 55 bp, Artificial
  Synthetic oligonucleotide
caaacttctgtcccaactcgtgtcaggccgatcagttctggcacgtttatgcccc

SEQ ID NO: 236018 - DNA, 55 bp, Artificial
  Synthetic oligonucleotide
caaactgtcgattaagcgtattggggattgcaacatgctcttgtgtcgctttccg

SEQ ID NO: 236019 - DNA, 55 bp, Artificial
  Synthetic oligonucleotide
caaacggttatgcctggaggctggcgggactcctctaaggctgcgagggttggac

SEQ ID NO: 236020 - DNA, 55 bp, Artificial
  Synthetic oligonucleotide
agctcaccatatacacggattaattccgaggtgtctacaaacggtaacccgtctc

SEQ ID NO: 236021 - DNA, 51 bp, Artificial
  Synthetic oligonucleotide
attttcgctcaaagtattgaccgcaccggctttacggtaggtaaccttacc

SEQ ID NO: 236022 - DNA, 55 bp, Artificial
  Synthetic oligonucleotide
attggcacaacacggcagcattcccgatgtggcagcgaagacattagcaaagggg

SEQ ID NO: 236023 - DNA, 55 bp, Artificial
  Synthetic oligonucleotide
attctctaaacggctatatagcttaactaagccgattgatgtgactccaccgccc

SEQ ID NO: 236024 - DNA, 54 bp, Artificial
  Synthetic oligonucleotide
aggagagcctggtaaagaagtacaagtgtggaatgggccgaataataacttccc

SEQ ID NO: 236025 - DNA, 55 bp, Artificial
  Synthetic oligonucleotide
aggagtcatacccattccaactgtaacagcaccacctactattccgcctagtact

SEQ ID NO: 236026 - DNA, 55 bp, Artificial
  Synthetic oligonucleotide
accaccgatagcggtgatgttattagtgcgagtcttttcagtcacgaagcgagtt

SEQ ID NO: 236027 - DNA, 60 bp, Artificial
  Synthetic oligonucleotide
cactcaatgaggacttacgggcgcagcgtttgattatcacgaaacatgcgttaatgagtg

SEQ ID NO: 236028 - DNA, 55 bp, Artificial
  Synthetic oligonucleotide
atgtcttaatggcgttcgacttgttacccatagtcgtcattgaatgcacgctagg

SEQ ID NO: 236029 - DNA, 55 bp, Artificial
  Synthetic oligonucleotide
atggtcttttacccgtgacaggtgccgctgtagatcttcgcatgattcgcagctt

SEQ ID NO: 236030 - DNA, 51 bp, Artificial
  Synthetic oligonucleotide
ccactggagttactaaccccaaaccggttaccactacacgacgtttagaca

SEQ ID NO: 236031 - DNA, 53 bp, Artificial
  Synthetic oligonucleotide
acgctgatttgcccgcttaacgaaacgtttagcgacagttaacccaagacgtg

SEQ ID NO: 236032 - DNA, 55 bp, Artificial
  Synthetic oligonucleotide
ccactgtgctcgtgcgccatagatgcttgacatgctgaacgccctttttggccgc

SEQ ID NO: 236033 - DNA, 55 bp, Artificial
  Synthetic oligonucleotide
ccacttaagtgctctgtcggcacaaactcgagtagccccaacgaaaggtttaaca

SEQ ID NO: 236034 - DNA, 55 bp, Artificial
  Synthetic oligonucleotide
ccagaatacgctgtaggcgttatgttactggtactttgccctggcggcacgactt

SEQ ID NO: 236035 - DNA, 55 bp, Artificial
  Synthetic oligonucleotide
ccagaatcgctacagcccaatgacaccaagggctacagcggaggacggtgtattc

SEQ ID NO: 236036 - DNA, 55 bp, Artificial
  Synthetic oligonucleotide
ccaggtcctattgctgggacagaggggttcgatcgattagcaccaacaccagagc

SEQ ID NO: 236037 - DNA, 55 bp, Artificial
  Synthetic oligonucleotide
ccagtaattcgtcggccgtttggcgtatatttcatcgacggccctgactaacacc

SEQ ID NO: 236038 - DNA, 54 bp, Artificial
  Synthetic oligonucleotide
cacctcggtaattcctgctctaaaatgccccaattctagagacacggtttttaa

SEQ ID NO: 236039 - DNA, 55 bp, Artificial
  Synthetic oligonucleotide
ccagtcactgctcaagttattggcatagtctgacttgtcagcgtaccaggtcgag

SEQ ID NO: 236040 - DNA, 55 bp, Artificial
  Synthetic oligonucleotide
ccataatgacctgcttaaggcgctgtggctggcttagttcaattaacgtctcggg

SEQ ID NO: 236041 - DNA, 55 bp, Artificial
  Synthetic oligonucleotide
ccatcggaagcgttagctattttcgaataagcacgaagccactaatcaatgcatg

SEQ ID NO: 236042 - DNA, 55 bp, Artificial
  Synthetic oligonucleotide
ccattagatcacgcttcttgattgaggcaaattttgagaattagcggttgggact

SEQ ID NO: 236043 - DNA, 55 bp, Artificial
  Synthetic oligonucleotide
cccaaaccagggttaaccacagccgccaatttagtgatggtatcgatcaaagcgg

SEQ ID NO: 236044 - DNA, 55 bp, Artificial
  Synthetic oligonucleotide
cccaagcttttacgcgttttatcgacagacttgcacgctccttagcccatgtcat

SEQ ID NO: 236045 - DNA, 55 bp, Artificial
  Synthetic oligonucleotide
cccagctgcatggggaaatacactggctaagcgaccaaataccagtgcgacgggg

SEQ ID NO: 236046 - DNA, 55 bp, Artificial
  Synthetic oligonucleotide
cccatacgcgactggctcaatcaggatgctcccgtacccgatgttctgccccacg

SEQ ID NO: 236047 - DNA, 55 bp, Artificial
  Synthetic oligonucleotide
ccgcgcaggtattgaaagtaacgtcgataccaatgactatttgagtaaagacagt

SEQ ID NO: 236048 - DNA, 55 bp, Artificial
  Synthetic oligonucleotide
ccgccgagctattaaatcgcttcgaagttgagcgtccgccactacccgctattgc

SEQ ID NO: 236049 - DNA, 60 bp, Artificial
  Synthetic oligonucleotide
caatcaaattcgaagcctagcgagcgagtctggtgtgatcttctctgtcggcaggttgca

SEQ ID NO: 236050 - DNA, 55 bp, Artificial
  Synthetic oligonucleotide
accgatagtgatctcaccacgtctaaagtgggcatcaattctaaaatcggcatcg

SEQ ID NO: 236051 - DNA, 55 bp, Artificial
  Synthetic oligonucleotide
ccgagcttattccgtccaaattctacggaactactcacttctacccgcctacagc

SEQ ID NO: 236052 - DNA, 55 bp, Artificial
  Synthetic oligonucleotide
ccgacaatctgccaaagtgacttacccgttgcatgatgtattgttcgtcactctg

SEQ ID NO: 236053 - DNA, 55 bp, Artificial
  Synthetic oligonucleotide
cccttagaataaacgccctgctacgcaaggcggctaagactcctgtactgtctta

SEQ ID NO: 236054 - DNA, 55 bp, Artificial
  Synthetic oligonucleotide
ccctgacaatgttaggcaatgcggctgcgaaaattcccgttggcgagactggtat

SEQ ID NO: 236055 - DNA, 55 bp, Artificial
  Synthetic oligonucleotide
ccctgaaaccttcgttgtcactaagaataccgctaatttgatgctggtaatgcac

SEQ ID NO: 236056 - DNA, 55 bp, Artificial
  Synthetic oligonucleotide
ccctcgagcggggcaactaactccaagtattaagctgtgcaataaccgactctct

SEQ ID NO: 236057 - DNA, 55 bp, Artificial
  Synthetic oligonucleotide
ccctcagatttccgcgctttggtggcaagacactcagttgcgctaccctgacgtt

SEQ ID NO: 236058 - DNA, 55 bp, Artificial
  Synthetic oligonucleotide
cccgtcgtcagtttatcgactggggcgcctttcataccgacaagagtttctatac

SEQ ID NO: 236059 - DNA, 55 bp, Artificial
  Synthetic oligonucleotide
accgggccagtcaattcacgcactccttaaggatcactgagggcaacatagcccc

SEQ ID NO: 236060 - DNA, 51 bp, Artificial
  Synthetic oligonucleotide
caacgggggcgaatttctatataattcgtccccgttgttttcgggggagca

SEQ ID NO: 236061 - DNA, 55 bp, Artificial
  Synthetic oligonucleotide
cccgcttccagcgagcctaaacctttcatatcagagactggtaaaggcgaagccg

SEQ ID NO: 236062 - DNA, 55 bp, Artificial
  Synthetic oligonucleotide
ccccttaacccaagagataggcgtcaggcagtacgctttcgctctacgagtgtca

SEQ ID NO: 236063 - DNA, 52 bp, Artificial
  Synthetic oligonucleotide
ccccgtgccaggattaactaacacgagtgcgggactaaacgggacgtttatg

SEQ ID NO: 236064 - DNA, 55 bp, Artificial
  Synthetic oligonucleotide
ccccacttgggttgactatcacgcataagccaaccagtccaaacaatgctgtcat

SEQ ID NO: 236065 - DNA, 55 bp, Artificial
  Synthetic oligonucleotide
ccccacgactgcatttctgagacaagtttatcgagcggaagatccctaatttcac

SEQ ID NO: 236066 - DNA, 55 bp, Artificial
  Synthetic oligonucleotide
ccaatcggtggcatgttcatataccacactggcatcttgtattccgcttaaagag

SEQ ID NO: 236067 - DNA, 55 bp, Artificial
  Synthetic oligonucleotide
ccacgaacagttagagtgattaggataatagcgataccccagttaccaacgattg

SEQ ID NO: 236068 - DNA, 55 bp, Artificial
  Synthetic oligonucleotide
ccaagacggtgatgacgtaaagaatatggactggcgcacgacaatgcgtacgggt

SEQ ID NO: 236069 - DNA, 55 bp, Artificial
  Synthetic oligonucleotide
ccactaagctgtccatgatatgacggacaagcatcgcctcaggatctcttaccga

SEQ ID NO: 236070 - DNA, 55 bp, Artificial
  Synthetic oligonucleotide
ccacactattgggcacactgtcggttatacctggcaacttagtcgcattacttcc

SEQ ID NO: 236071 - DNA, 60 bp, Artificial
  Synthetic oligonucleotide
caaattgggcataacaacgccacttgagtcactatattattcattcagcactccaaaagt

SEQ ID NO: 236072 - DNA, 54 bp, Artificial
  Synthetic oligonucleotide
ggggctgttatcgaattccccagctagagcgatgcggagtgtatagcagtcact

SEQ ID NO: 236073 - DNA, 54 bp, Artificial
  Synthetic oligonucleotide
taaccgcactggggcgaattccagaggaggcatcaaccttacacaggctgctcg

SEQ ID NO: 236074 - DNA, 54 bp, Artificial
  Synthetic oligonucleotide
agaacgtagcttttgttgtttgatgcgagctttgtcggctttagacttaatcac

SEQ ID NO: 236075 - DNA, 54 bp, Artificial
  Synthetic oligonucleotide
ccgaacgcatctcaatagaatctcgacctgctacatctacgactaacaccccgt

SEQ ID NO: 236076 - DNA, 54 bp, Artificial
  Synthetic oligonucleotide
gttagtgcctatatagtggcagcgggacaggaaacgttggagagtctcttcgca

SEQ ID NO: 236077 - DNA, 54 bp, Artificial
  Synthetic oligonucleotide
gcgttacttagctgggaagtcttgccgcttggcttattggttggggtgttatcg

SEQ ID NO: 236078 - DNA, 54 bp, Artificial
  Synthetic oligonucleotide
ctcgaagcaacctaagcctgcagccccgcgctatagcagctaagcaccctacat

SEQ ID NO: 236079 - DNA, 54 bp, Artificial
  Synthetic oligonucleotide
cgaggagctttaatgccaactcattagtgccatcgcggttgtaggcagaaatag

SEQ ID NO: 236080 - DNA, 54 bp, Artificial
  Synthetic oligonucleotide
gagttagaagtgcggaacagtttccgcataaactgctcgatcccagttttgggg

SEQ ID NO: 236081 - DNA, 54 bp, Artificial
  Synthetic oligonucleotide
agagcctctgagcaattaccgattagcgaagtctatcggcaattgagaagtggc

SEQ ID NO: 236082 - DNA, 60 bp, Artificial
  Synthetic oligonucleotide
caaagcgcgtgcattagtctataatgcgcgcactttgtgggttgaagcctgttttatcct

SEQ ID NO: 236083 - DNA, 54 bp, Artificial
  Synthetic oligonucleotide
gctcgacaaatcgctcaaacgccatcgactggtacattacgcccttgtaaagaa

SEQ ID NO: 236084 - DNA, 54 bp, Artificial
  Synthetic oligonucleotide
agcgtctgtacgcctagggtgagggtctgttgatctaggctgagcccctcggtt

SEQ ID NO: 236085 - DNA, 54 bp, Artificial
  Synthetic oligonucleotide
gctgcttatctaatgcgatttgctgtgcggtgagcgcagactgattgtctttct

SEQ ID NO: 236086 - DNA, 54 bp, Artificial
  Synthetic oligonucleotide
tgctgcatgctatcggtatcgtgcagtccttaagcgctcgtaatggtgtgccac

SEQ ID NO: 236087 - DNA, 54 bp, Artificial
  Synthetic oligonucleotide
cacgagcctgaaaaaccgaacgataaacttactcgatgcggggtttattcgtgc

SEQ ID NO: 236088 - DNA, 54 bp, Artificial
  Synthetic oligonucleotide
ctctgagtcagtccaaaaagtaaccatcttcccgtatctcaatgagcaaggtga

SEQ ID NO: 236089 - DNA, 54 bp, Artificial
  Synthetic oligonucleotide
ggagccagggacactttcgcagaggaacaggtcaaacggcatcaggaaacgccc

SEQ ID NO: 236090 - DNA, 54 bp, Artificial
  Synthetic oligonucleotide
acgcacttagccacaaccgttgaatgggccctttatagttaacgtattcaagca

SEQ ID NO: 236091 - DNA, 54 bp, Artificial
  Synthetic oligonucleotide
cgacaatggcactaacacgcacacaggcgcggcagtggaatccacaacataggc

SEQ ID NO: 236092 - DNA, 54 bp, Artificial
  Synthetic oligonucleotide
attatcgcgataaaaggcataagtgtcggtgcttgaggatatatgccgctgact

SEQ ID NO: 236093 - DNA, 60 bp, Artificial
  Synthetic oligonucleotide
caaacggttagcgtgtttagaccagaaagtcatgttatgcagactgaatggcaaggcact

SEQ ID NO: 236094 - DNA, 54 bp, Artificial
  Synthetic oligonucleotide
ttactcgcttacgctaaacgacagaacactcaccccgttaagccaagatcagtt

SEQ ID NO: 236095 - DNA, 54 bp, Artificial
  Synthetic oligonucleotide
cgaaggcagtggaacaggccgtttaataaaacatgctggattcatgtacacacc

SEQ ID NO: 236096 - DNA, 54 bp, Artificial
  Synthetic oligonucleotide
ctgccgacgctattatcccgggtataagtctacctacaatcgttgctgtgacga

SEQ ID NO: 236097 - DNA, 54 bp, Artificial
  Synthetic oligonucleotide
ctgcgacgatcccaactcgccacacagtcatgccagcatgctccacggggtgca

SEQ ID NO: 236098 - DNA, 54 bp, Artificial
  Synthetic oligonucleotide
attccctatcgaaaagccacaggccagcgaaaagtttggcgagagccaaagctt

SEQ ID NO: 236099 - DNA, 54 bp, Artificial
  Synthetic oligonucleotide
ataccaacaagaccacctagaccaccgatcatgccgttaagcatggcgataaga

SEQ ID NO: 236100 - DNA, 54 bp, Artificial
  Synthetic oligonucleotide
gaactaccccggatcaagaccagatcagcttagccgagaatttaaagggtaaac

SEQ ID NO: 236101 - DNA, 54 bp, Artificial
  Synthetic oligonucleotide
gcccacgcgatagtggttcgcggcaaattttaggacgaatgttatgaacgaaaa

SEQ ID NO: 236102 - DNA, 54 bp, Artificial
  Synthetic oligonucleotide
aaccgagcaggagccagggacactttcgcagaggaacaggtcaaacggcatcag

SEQ ID NO: 236103 - DNA, 54 bp, Artificial
  Synthetic oligonucleotide
ggcgggactcctctaaggctgcgagggttggactttcgttgggatcttggtcca

SEQ ID NO: 236104 - DNA, 60 bp, Artificial
  Synthetic oligonucleotide
cgtcagcctatatgaacatagcgagacgaaacaatgatgttcctaatgcgaggagtctcg

SEQ ID NO: 236105 - DNA, 58 bp, Artificial
  Synthetic oligonucleotide
caaaacgacggcgaaggtaagtgtttacgtgcacagggctcaggatagggcacatcaa

SEQ ID NO: 236106 - DNA, 54 bp, Artificial
  Synthetic oligonucleotide
gccctattaaagccgttgcaactcgttacaggcgcggtggagagacgacataac

SEQ ID NO: 236107 - DNA, 54 bp, Artificial
  Synthetic oligonucleotide
tttctcagacacccagcgaagatgagccatgcgatttttgattgtgccggcact

SEQ ID NO: 236108 - DNA, 54 bp, Artificial
  Synthetic oligonucleotide
cggtttgcgcactatgctggacgggcctttgttctggcgcctctgaccttgcac

SEQ ID NO: 236109 - DNA, 54 bp, Artificial
  Synthetic oligonucleotide
tttcattgcatcgcatggcaatagtagaggcgattaacgagtatatatcaggta

SEQ ID NO: 236110 - DNA, 54 bp, Artificial
  Synthetic oligonucleotide
tcgcgcgctgacatcgcaatactgaatgccggaaatgtgagctgaacccgtggc

SEQ ID NO: 236111 - DNA, 54 bp, Artificial
  Synthetic oligonucleotide
gccgcggtcggcacagaagctaaacaaatgctcggcagaacgcctggcaatatc

SEQ ID NO: 236112 - DNA, 54 bp, Artificial
  Synthetic oligonucleotide
gcatgtaatcacgggttaagtcgtcgcccttcctctaagcgcggtcgctattgg

SEQ ID NO: 236113 - DNA, 54 bp, Artificial
  Synthetic oligonucleotide
ggcgcaactaagtaatcttgatatgcagctaccgcatctaagataaatcccttc

SEQ ID NO: 236114 - DNA, 54 bp, Artificial
  Synthetic oligonucleotide
ggcctcttgaatggcaatgtggacttgctctggctcgagatctggcgtactacc

SEQ ID NO: 236115 - DNA, 54 bp, Artificial
  Synthetic oligonucleotide
cccctgggttgcgctcggttacgaattaacacctgattaccatgaacgtaccag

SEQ ID NO: 236116 - DNA, 56 bp, Artificial
  Synthetic oligonucleotide
attcaagcctgggcaacggttaaccgcaaccagcaagaggccgagttaagccgcga

SEQ ID NO: 236117 - DNA, 54 bp, Artificial
  Synthetic oligonucleotide
gaataattacgttttcggatggctttagtttgggctttcagtcgagagacttca

SEQ ID NO: 236118 - DNA, 54 bp, Artificial
  Synthetic oligonucleotide
tcttctgattgatagagcgtccgccataactgtcggtataggcatcaataagta

SEQ ID NO: 236119 - DNA, 54 bp, Artificial
  Synthetic oligonucleotide
ctatcactgccctcataacgcacatccatatagaagatcatacgtgcgacatcg

SEQ ID NO: 236120 - DNA, 54 bp, Artificial
  Synthetic oligonucleotide
ttctgaggctaccgaagcccacattcccctcgggcttgaattgctcagtacggc

SEQ ID NO: 236121 - DNA, 54 bp, Artificial
  Synthetic oligonucleotide
atcgatgtgagaaatgaggtagaaacgttaaccctgtgccacgactacacggga

SEQ ID NO: 236122 - DNA, 54 bp, Artificial
  Synthetic oligonucleotide
cacttaacgggtaaagctgataacacagacgtcgctaccgcacctttaataaaa

SEQ ID NO: 236123 - DNA, 54 bp, Artificial
  Synthetic oligonucleotide
actcctaagcaactttttaagccaagatgcgaaaccggaccaatacgccaacac

SEQ ID NO: 236124 - DNA, 54 bp, Artificial
  Synthetic oligonucleotide
agtggtcagtcccagtgtcatcggttctaacacggtaggggtgacacctaacac

SEQ ID NO: 236125 - DNA, 54 bp, Artificial
  Synthetic oligonucleotide
tctcaccccagagatattgatagagcggctgttttagcacttcggctcttgctt

SEQ ID NO: 236126 - DNA, 54 bp, Artificial
  Synthetic oligonucleotide
aagggaggcgaggaaaatggttgcagagtcggtggcgatatataatcgcaaacg

SEQ ID NO: 236127 - DNA, 55 bp, Artificial
  Synthetic oligonucleotide
atgcgcgcactttgtgggttgaagcctgttttatcctccgtttaagcggtgttta

SEQ ID NO: 236128 - DNA, 54 bp, Artificial
  Synthetic oligonucleotide
acataactaacgttaatgtggtgatagcaagctatgtgctgcactctcacatta

SEQ ID NO: 236129 - DNA, 53 bp, Artificial
  Synthetic oligonucleotide
tcgctcgtagagcgtgatagagcggcccttaatcgcaatagaggcgcgtagtg

SEQ ID NO: 236130 - DNA, 53 bp, Artificial
  Synthetic oligonucleotide
aattaccgggcagattcagctatcaatccttatattcagttgtccgcagcgta

SEQ ID NO: 236131 - DNA, 53 bp, Artificial
  Synthetic oligonucleotide
cgaagtaatgttgtagcatggcagcccaaccgcccaacgtagcttggttcagg

SEQ ID NO: 236132 - DNA, 53 bp, Artificial
  Synthetic oligonucleotide
ggcaccataggggcacaaataacggcagaatccctgacgacgccatgcggcta

SEQ ID NO: 236133 - DNA, 51 bp, Artificial
  Synthetic oligonucleotide
gggcgtacacgcctacagagcggaaacctttcttactcgttaagttaacgg

SEQ ID NO: 236134 - DNA, 53 bp, Artificial
  Synthetic oligonucleotide
gccatgagtccctcttggggtaggtcaaactcttggatcttggtggctaaacc

SEQ ID NO: 236135 - DNA, 53 bp, Artificial
  Synthetic oligonucleotide
ttttgctcctccctggttcagctcgacagacttcctagtcgaacctcaccagg

SEQ ID NO: 236136 - DNA, 53 bp, Artificial
  Synthetic oligonucleotide
atagttgtgactgccccttatcccgtatttgctgtctcggcatacaccgcagg

SEQ ID NO: 236137 - DNA, 53 bp, Artificial
  Synthetic oligonucleotide
ccgcattgaactaatcgattaacgtaaaagtaccatgttgattctggtatgta

SEQ ID NO: 236138 - DNA, 59 bp, Artificial
  Synthetic oligonucleotide
atgagtaattccccccaaattggcggccgcgtgaccagtcgcgataacgatgccagtga

SEQ ID NO: 236139 - DNA, 53 bp, Artificial
  Synthetic oligonucleotide
agttgaaatcgaagagatgcacattgcccaagctcgtaaagacttaggtgaag

SEQ ID NO: 236140 - DNA, 53 bp, Artificial
  Synthetic oligonucleotide
gcatcaccaacgtcagttgttacacagggaattccgcaagacattgcttcaca

SEQ ID NO: 236141 - DNA, 53 bp, Artificial
  Synthetic oligonucleotide
aaggctgcgagggttggactttcgttgggatcttggtccatcggctccatccc

SEQ ID NO: 236142 - DNA, 53 bp, Artificial
  Synthetic oligonucleotide
tctaagtaagtaccgtaatcgctgtaatctagtcggatataggtggtgtcatt

SEQ ID NO: 236143 - DNA, 53 bp, Artificial
  Synthetic oligonucleotide
ttcgcccaataaggccaaggattccacctgtcggctggcattgagcaccgacc

SEQ ID NO: 236144 - DNA, 53 bp, Artificial
  Synthetic oligonucleotide
gcgggattaccttcgcaatattatggcgcccacagtttgcgtagcggttgtgt

SEQ ID NO: 236145 - DNA, 53 bp, Artificial
  Synthetic oligonucleotide
aggtctccttctacccaccacacttgcgcagagagccgaaagcgctgacgttc

SEQ ID NO: 236146 - DNA, 53 bp, Artificial
  Synthetic oligonucleotide
gcggtctgacctttggctacattgactgtcgctggggttacttgaatagccgt

SEQ ID NO: 236147 - DNA, 53 bp, Artificial
  Synthetic oligonucleotide
atgctaatgcaccgccaagcgcgtagaggaaacgtaccgcagggtgagcttta

SEQ ID NO: 236148 - DNA, 53 bp, Artificial
  Synthetic oligonucleotide
gagttgagtacggtccatattttcagagctcaagttgacgtaaatcgacggtt

SEQ ID NO: 236149 - DNA, 60 bp, Artificial
  Synthetic oligonucleotide
atctcgccatgtgtatttatgattgagtagcatatctccgcgaatacaactgctgatgta

SEQ ID NO: 236150 - DNA, 53 bp, Artificial
  Synthetic oligonucleotide
aggcccagcttggacgtatcacgccctcccctctgacgtcagttcgcgaccca

SEQ ID NO: 236151 - DNA, 53 bp, Artificial
  Synthetic oligonucleotide
gcttacggcgaaatctcatcgagtcgcggcattgtgcgcaccactcgcctcag

SEQ ID NO: 236152 - DNA, 53 bp, Artificial
  Synthetic oligonucleotide
ttcaacgtttgagagtcgataatgaatccttaccaagctccgttagccgaaat

SEQ ID NO: 236153 - DNA, 53 bp, Artificial
  Synthetic oligonucleotide
aggccacaaacactaacacgtctatccaaatctcaggggcatttagcggtttt

SEQ ID NO: 236154 - DNA, 53 bp, Artificial
  Synthetic oligonucleotide
ttataaaggctagctggtatataatccgcccatttactctcatgtgtcgtgta

SEQ ID NO: 236155 - DNA, 53 bp, Artificial
  Synthetic oligonucleotide
cgcttcgtccaagttgagttactctggttccctaaggaccctgatatccatct

SEQ ID NO: 236156 - DNA, 53 bp, Artificial
  Synthetic oligonucleotide
gacttccgctctggctgtttggcagattcgctcaagcacgctgaacgctggca

SEQ ID NO: 236157 - DNA, 53 bp, Artificial
  Synthetic oligonucleotide
attcagcgtgagtttgatttaactcgcggtcaatcgatattttgttcgactct

SEQ ID NO: 236158 - DNA, 53 bp, Artificial
  Synthetic oligonucleotide
cgttcgattctgatgacgcatcgacctatcactcatcgagcacggtaacagcc

SEQ ID NO: 236159 - DNA, 53 bp, Artificial
  Synthetic oligonucleotide
ggtactgagcccaagataaaatgctactacgagctggtattacccatggcaga

SEQ ID NO: 236160 - DNA, 60 bp, Artificial
  Synthetic oligonucleotide
atcctgcgcatcttgattctgacgatagcggcccaataagccgtcccaaccgtctggcgc

SEQ ID NO: 236161 - DNA, 53 bp, Artificial
  Synthetic oligonucleotide
cgttttacgtcagcgtctaaaattcccataagttctgggtcatgagtggcgag

SEQ ID NO: 236162 - DNA, 53 bp, Artificial
  Synthetic oligonucleotide
ccactgcatgtcgaacatctacgaattaagtgtgactaacaagcccattaacc

SEQ ID NO: 236163 - DNA, 53 bp, Artificial
  Synthetic oligonucleotide
tgcgccccttaatctggcttaccgtataaccctatggtcgcgactcgccagcc

SEQ ID NO: 236164 - DNA, 53 bp, Artificial
  Synthetic oligonucleotide
tcatccacacttaaactcttatcgtcaactttgctacagaacccaccaggcta

SEQ ID NO: 236165 - DNA, 53 bp, Artificial
  Synthetic oligonucleotide
acgattgatactcgctatttgttagcagttagcactcgtatctgtgtcttgcc

SEQ ID NO: 236166 - DNA, 53 bp, Artificial
  Synthetic oligonucleotide
tcgatgttgcctgtgagccttggctcggcgtgacttatccgcaggacactgtc

SEQ ID NO: 236167 - DNA, 53 bp, Artificial
  Synthetic oligonucleotide
gtcatttcgccccctttgctaatgtctttgctgccacatcgggaatgctgccg

SEQ ID NO: 236168 - DNA, 53 bp, Artificial
  Synthetic oligonucleotide
taccgggtgttgacttccgctctggctgtttggcagattcgctcaagcacgct

SEQ ID NO: 236169 - DNA, 53 bp, Artificial
  Synthetic oligonucleotide
cgcaattctactgttcgccgttcaataggttaagggagtagattatgcgctta

SEQ ID NO: 236170 - DNA, 53 bp, Artificial
  Synthetic oligonucleotide
aagagttcgcggtagcttttcgcaaagtgcagggtacgcagtagggcggggat

SEQ ID NO: 236171 - DNA, 60 bp, Artificial
  Synthetic oligonucleotide
tgagggtttgcacatatcatatcgcccccgtgttagtggccaactcaatgcagccccctt

SEQ ID NO: 236172 - DNA, 53 bp, Artificial
  Synthetic oligonucleotide
cgcagacaattacttgcgtagcctcaacagcgtcttgcaacttgacataattc

SEQ ID NO: 236173 - DNA, 53 bp, Artificial
  Synthetic oligonucleotide
ctatgcaccggtttaccccgaagcgccgccaaccaaaattgccgcaacgggat

SEQ ID NO: 236174 - DNA, 53 bp, Artificial
  Synthetic oligonucleotide
cacgctcatcctcactgatctcaattaacttgccgagctcatctagggtctct

SEQ ID NO: 236175 - DNA, 53 bp, Artificial
  Synthetic oligonucleotide
tacacctcggaacatgcataaagttttggcttaagttagcgcaccataacgaa

SEQ ID NO: 236176 - DNA, 53 bp, Artificial
  Synthetic oligonucleotide
ctcgatacactctatgtgatgaagacggggtcgaatcaaggaacggccatagg

SEQ ID NO: 236177 - DNA, 53 bp, Artificial
  Synthetic oligonucleotide
gttcgcgtgttattggaggtcgccgcttgcagatagtggcgcagtgagtcgga

SEQ ID NO: 236178 - DNA, 53 bp, Artificial
  Synthetic oligonucleotide
gtgcgatcgttaacttggaagataacgcgcaaatcaacgtgggtgacgcttta

SEQ ID NO: 236179 - DNA, 53 bp, Artificial
  Synthetic oligonucleotide
cgagtcacacgaagcgattccagtagtctacccgtagcgttaaggatgcgata

SEQ ID NO: 236180 - DNA, 53 bp, Artificial
  Synthetic oligonucleotide
ctgtaccagataccaacgcaggatctaaattgtttaccgtcccaccatagctg

SEQ ID NO: 236181 - DNA, 53 bp, Artificial
  Synthetic oligonucleotide
tcagtgtaccgggcgctggaaaactatgagcagacggcgtagcgcgattccgc

SEQ ID NO: 236182 - DNA, 60 bp, Artificial
  Synthetic oligonucleotide
tgactgtaggtgctatgaccggtctgcgtaaaaaagctcgcgaagctggtgtatatgtac

SEQ ID NO: 236183 - DNA, 53 bp, Artificial
  Synthetic oligonucleotide
tcaagctcgcgccgataatcgggcaatttaagataatcgggccgaaaattatg

SEQ ID NO: 236184 - DNA, 53 bp, Artificial
  Synthetic oligonucleotide
tatagcgttaacggccattggctcgccaacactcctataccagcggataaatc

SEQ ID NO: 236185 - DNA, 53 bp, Artificial
  Synthetic oligonucleotide
tcgccacctccacgaataccgcactaagtcaaatgagcggggtcaatacctcg

SEQ ID NO: 236186 - DNA, 53 bp, Artificial
  Synthetic oligonucleotide
tatgttccctacgatgcgggtggtcaagctaaggctggcttactctcgggcga

SEQ ID NO: 236187 - DNA, 53 bp, Artificial
  Synthetic oligonucleotide
tgcttgggtaatacgacatttttctattcgtgtttcgttggagcacagcctac

SEQ ID NO: 236188 - DNA, 53 bp, Artificial
  Synthetic oligonucleotide
ggggccatctcaccgccactaaacttcccaccgtcatcactgcgcaactgacg

SEQ ID NO: 236189 - DNA, 53 bp, Artificial
  Synthetic oligonucleotide
tatgtacaggataaaacaactgctaggaggcacgttgagcatgcggaattata

SEQ ID NO: 236190 - DNA, 53 bp, Artificial
  Synthetic oligonucleotide
cccatactcataaaatcgtaggatgggcctgttttagggatcacggcaccacc

SEQ ID NO: 236191 - DNA, 53 bp, Artificial
  Synthetic oligonucleotide
ctttagagtctctggcgtggaggcaaattggactaattggacaaatggcacaa

SEQ ID NO: 236192 - DNA, 53 bp, Artificial
  Synthetic oligonucleotide
tatcgcccctgtgttgggtgatgttccgcttgcagcgttgacacgacaacaca

SEQ ID NO: 236193 - DNA, 60 bp, Artificial
  Synthetic oligonucleotide
tcttgtgcatagctatggcgtaagccatgcccgcctgacgaccagctcaagatgcgagtt

SEQ ID NO: 236194 - DNA, 52 bp, Artificial
  Synthetic oligonucleotide
acgtgcggccagtagtggcccaagcctattgattagcgctggtaccgtaata

SEQ ID NO: 236195 - DNA, 52 bp, Artificial
  Synthetic oligonucleotide
gattaaaaccgatgtaccgaccgctgtcgcgcagacaccgacgaatgcgggt

SEQ ID NO: 236196 - DNA, 52 bp, Artificial
  Synthetic oligonucleotide
gcgcttgggcatatattcccaaccacgacgaagcaaatgccttcggcgcccc

SEQ ID NO: 236197 - DNA, 52 bp, Artificial
  Synthetic oligonucleotide
cagtagcgtcttgtctatgactatggcgttatcactctgagcgaagtgcact

SEQ ID NO: 236198 - DNA, 52 bp, Artificial
  Synthetic oligonucleotide
gatgggccgatggttgcttatcgtcaacatcaggcagggatacgcagccgcc

SEQ ID NO: 236199 - DNA, 52 bp, Artificial
  Synthetic oligonucleotide
tctctcaattcataagtggcaggcgaggtaaatgacagctcgtaggcaccac

SEQ ID NO: 236200 - DNA, 52 bp, Artificial
  Synthetic oligonucleotide
gcaataaacgcctctgagttgccattagcctgacaggtgatacgccagtttt

SEQ ID NO: 236201 - DNA, 52 bp, Artificial
  Synthetic oligonucleotide
gcaatcaggacgctctgcgcttatcaacttaacggccacactgttatccttt

SEQ ID NO: 236202 - DNA, 52 bp, Artificial
  Synthetic oligonucleotide
gcgaatcacatctgactatccttgaagcagccctggacaacgttcgcccatc

SEQ ID NO: 236203 - DNA, 52 bp, Artificial
  Synthetic oligonucleotide
tacgcaccccacataagcacacgaggttaacacttaccgattgaccataaca

SEQ ID NO: 236204 - DNA, 59 bp, Artificial
  Synthetic oligonucleotide
tcttccaacgctactcactgtggcaaaagagatcaaacgcaggggcggacgagtacgga

SEQ ID NO: 236205 - DNA, 52 bp, Artificial
  Synthetic oligonucleotide
tctcatgcccgctgctataaaacggcttggcctttagaggaagtgttagctg

SEQ ID NO: 236206 - DNA, 52 bp, Artificial
  Synthetic oligonucleotide
tatcctgccacggggatatgtcggcccatagccaagcgcaaacaaccaagag

SEQ ID NO: 236207 - DNA, 52 bp, Artificial
  Synthetic oligonucleotide
tactgaggttcgatacgcacgataggtgtagcatcgccgtctcgagtcatca

SEQ ID NO: 236208 - DNA, 52 bp, Artificial
  Synthetic oligonucleotide
tcttagaccttggcttatgcaaggcaataccggcatgagcacgctactgctg

SEQ ID NO: 236209 - DNA, 52 bp, Artificial
  Synthetic oligonucleotide
gcactacacctttagggaagcgatccgataccatggcgcccgctaacagttg

SEQ ID NO: 236210 - DNA, 52 bp, Artificial
  Synthetic oligonucleotide
cgtgtataggcgaatgggtgttaacccaatttgtccctgcgcatagtgaatg

SEQ ID NO: 236211 - DNA, 52 bp, Artificial
  Synthetic oligonucleotide
atccgcgataacgcacccgacaatctgccgatatcatattcaccgcgaaaac

SEQ ID NO: 236212 - DNA, 52 bp, Artificial
  Synthetic oligonucleotide
cagacttaatttgccatacaagtccgataaacgaagatgtcgccatggccat

SEQ ID NO: 236213 - DNA, 52 bp, Artificial
  Synthetic oligonucleotide
cggagacatggtttaagtcgcgctaccctgattggcgtcaagtggcccagga

SEQ ID NO: 236214 - DNA, 52 bp, Artificial
  Synthetic oligonucleotide
gactgcaagacgagttatcagcacagcagttcagtatgtggatccgtccgtt

SEQ ID NO: 236215 - DNA, 59 bp, Artificial
  Synthetic oligonucleotide
cgtatagctctaggtccaactataccatctattcttgctctaaactcttgaaggtcaac

SEQ ID NO: 236216 - DNA, 56 bp, Artificial
  Synthetic oligonucleotide
tctcgcccctagcgaagctaggaagtggcgaggcattttaggggaagggtggagcc

SEQ ID NO: 236217 - DNA, 52 bp, Artificial
  Synthetic oligonucleotide
cacacctgggctacagtatgacggtgtttcgtacagttcaaggcattacggt

SEQ ID NO: 236218 - DNA, 52 bp, Artificial
  Synthetic oligonucleotide
gctttccatgacgatagccccgtggctagttcgccatagtgtggatattgct

SEQ ID NO: 236219 - DNA, 52 bp, Artificial
  Synthetic oligonucleotide
cattgcaccttctagatggaaaggcacattacgaagttgttggcctagatct

SEQ ID NO: 236220 - DNA, 52 bp, Artificial
  Synthetic oligonucleotide
tctcgaaatgtggtgacgataaggtctagataaaactcctcgccattgcccc

SEQ ID NO: 236221 - DNA, 52 bp, Artificial
  Synthetic oligonucleotide
tcgcacgccatttgtgcttaccgcttactgtatcttcaacgaatgagagatt

SEQ ID NO: 236222 - DNA, 52 bp, Artificial
  Synthetic oligonucleotide
tcctccggcatagagcgctgctcgccgaataatgcaaggcacgcatactccg

SEQ ID NO: 236223 - DNA, 52 bp, Artificial
  Synthetic oligonucleotide
tgatccaaggtcaatttaaacagctccaaagttcgctgtagccggatggatg

SEQ ID NO: 236224 - DNA, 52 bp, Artificial
  Synthetic oligonucleotide
ggtatgtatgtcacgtttactgacgggatacccgccgcttatctatccaata

SEQ ID NO: 236225 - DNA, 52 bp, Artificial
  Synthetic oligonucleotide
tctcgatagctttccgattctcacttgtaacgcctaatgcgcttcttgtttt

SEQ ID NO: 236226 - DNA, 52 bp, Artificial
  Synthetic oligonucleotide
gagcggataaccacgccttcaatactaaaatcatcgaattcttgtactgtga

SEQ ID NO: 236227 - DNA, 55 bp, Artificial
  Synthetic oligonucleotide
tcgtgccatttacgaacgcacaacaggcttaggtcgaaccgtatttgaccccgaa

SEQ ID NO: 236228 - DNA, 52 bp, Artificial
  Synthetic oligonucleotide
tgtcgggcgtagtgtatgccgtcgccggttacacttgggtcatggggatccg

SEQ ID NO: 236229 - DNA, 52 bp, Artificial
  Synthetic oligonucleotide
aggctaaaacattaccgctcagtagcaacaaggtatgataaattagcccgga

SEQ ID NO: 236230 - DNA, 52 bp, Artificial
  Synthetic oligonucleotide
tctccatcacaggggcattgcctaccatgggcggggtatcgttatttgcctc

SEQ ID NO: 236231 - DNA, 52 bp, Artificial
  Synthetic oligonucleotide
cttgaagcggccaacgtacttgaggacaaggttacccttaagcccggtgagt

SEQ ID NO: 236232 - DNA, 52 bp, Artificial
  Synthetic oligonucleotide
ggctctgaagtcaccatagctgctgtggtttccgatccagtcactcataaaa

SEQ ID NO: 236233 - DNA, 52 bp, Artificial
  Synthetic oligonucleotide
aacacgagtggttgccctgaagcggagacttgaaccactccgggcgtgactg

SEQ ID NO: 236234 - DNA, 52 bp, Artificial
  Synthetic oligonucleotide
tcgctccaatgcgggtaatcttcacggtgatacttcaggtcggccgcagcca

SEQ ID NO: 236235 - DNA, 51 bp, Artificial
  Synthetic oligonucleotide
gggtaacaccagcaggctgtctcgctctgcggcggataggattgagcggcg

SEQ ID NO: 236236 - DNA, 51 bp, Artificial
  Synthetic oligonucleotide
tgctgcgcggtcggttgaatctgtattgctcggtcactgccgcctacagcc

SEQ ID NO: 236237 - DNA, 51 bp, Artificial
  Synthetic oligonucleotide
acctgcgtcctagtcgcgatggtgactatgagacaacgatctatttcaaca

SEQ ID NO: 236238 - DNA, 60 bp, Artificial
  Synthetic oligonucleotide
tcggttgagcctttagtgccggtagagccggatacgtgcgcactagagccaagaaatcca

SEQ ID NO: 236239 - DNA, 51 bp, Artificial
  Synthetic oligonucleotide
acgttatctgtcaacgggcgcacaggtgttagtgaccgggagtgaggggca

SEQ ID NO: 236240 - DNA, 51 bp, Artificial
  Synthetic oligonucleotide
tttgatgttcgtgacccgccatcaacccaagaatacggtgcaatagcatct

SEQ ID NO: 236241 - DNA, 51 bp, Artificial
  Synthetic oligonucleotide
aaaacagttcaatcgaaaattggttgttggtaacagactgttgacgccagc

SEQ ID NO: 236242 - DNA, 51 bp, Artificial
  Synthetic oligonucleotide
tcaaggcatcgaatgatcaactccggaaagaattgactgaggcccgtaaca

SEQ ID NO: 236243 - DNA, 51 bp, Artificial
  Synthetic oligonucleotide
gtgcctcggcggtcaatctatttactctgagtgtctattggctgctgttgc

SEQ ID NO: 236244 - DNA, 51 bp, Artificial
  Synthetic oligonucleotide
taaaactctattctggcgataaacccatcggcttatttgtggataggcttg

SEQ ID NO: 236245 - DNA, 51 bp, Artificial
  Synthetic oligonucleotide
taagttgctgagtgcgggtttgatttatgaggcggtgggcttggactgttg

SEQ ID NO: 236246 - DNA, 51 bp, Artificial
  Synthetic oligonucleotide
agggccaatggttagtctgtcacagccggcaagttcaataatctcgcctgt

SEQ ID NO: 236247 - DNA, 51 bp, Artificial
  Synthetic oligonucleotide
ttcccgcttgagcccttcaagcacagcccgggtaatgagttgagactcccc

SEQ ID NO: 236248 - DNA, 51 bp, Artificial
  Synthetic oligonucleotide
agtcgcgggtaccggataagtcgagcccgccgtaacattcttcgccgtaga

SEQ ID NO: 236249 - DNA, 59 bp, Artificial
  Synthetic oligonucleotide
tcgcgtgtactcaggcgtactcgaatcaggttcgggcgtttacaactctgtgaaacaga

SEQ ID NO: 236250 - DNA, 51 bp, Artificial
  Synthetic oligonucleotide
gcgatatccaccacagctaaggcaggcttgggctcgacttgttcgcggcct

SEQ ID NO: 236251 - DNA, 51 bp, Artificial
  Synthetic oligonucleotide
tgacgataattaatttgatgaccgcgattatttgctgacgcatgtacgcga

SEQ ID NO: 236252 - DNA, 51 bp, Artificial
  Synthetic oligonucleotide
gtccctcagcagaaagcgttctcactcttcgcctgaacgtaaagcgtaatc

SEQ ID NO: 236253 - DNA, 51 bp, Artificial
  Synthetic oligonucleotide
agtgaactagtagccagcaaacgcacactactcatagagtccatagatgtc

SEQ ID NO: 236254 - DNA, 51 bp, Artificial
  Synthetic oligonucleotide
tccaaggtaagttatcccgatggcaccgagtttacctacattaaggccggt

SEQ ID NO: 236255 - DNA, 51 bp, Artificial
  Synthetic oligonucleotide
acgacaacagactgtcaccatacggcgcaatggacgtatgaactgaccgcc

SEQ ID NO: 236256 - DNA, 51 bp, Artificial
  Synthetic oligonucleotide
actatcattcctcaactcaggcgtgggtatccgcttagtcgacgagcgtga

SEQ ID NO: 236257 - DNA, 51 bp, Artificial
  Synthetic oligonucleotide
ggtatgtagtgcaggcattctcaggctatgaaggccgagtttgtaagtcac

SEQ ID NO: 236258 - DNA, 51 bp, Artificial
  Synthetic oligonucleotide
agccgctttaaggaaagtacccaaagggcgacttcgactatggtggcggga

SEQ ID NO: 236259 - DNA, 51 bp, Artificial
  Synthetic oligonucleotide
tttagagcaacgctacccaacgcacattactaaccgtatgctttaccaccc

SEQ ID NO: 236260 - DNA, 52 bp, Artificial
  Synthetic oligonucleotide
tcgcagattttcctaaacccgtttacccacttaggcaaagttttaagcgtgc

SEQ ID NO: 236261 - DNA, 51 bp, Artificial
  Synthetic oligonucleotide
cacccttttttgctcctccctggttcagctcgacagacttcctagtcgaac

SEQ ID NO: 236262 - DNA, 51 bp, Artificial
  Synthetic oligonucleotide
atgctcgattacgcggcttatcttaaggtggggcggttaatagtgaggcgg

SEQ ID NO: 236263 - DNA, 51 bp, Artificial
  Synthetic oligonucleotide
cccactcagtacatacctcggctcctagttttatcgggcatatgacctcag

SEQ ID NO: 236264 - DNA, 51 bp, Artificial
  Synthetic oligonucleotide
cccgctatgattgaactgagtatcgcgcttgccgatggtatgttgggaaaa

SEQ ID NO: 236265 - DNA, 49 bp, Artificial
  Synthetic oligonucleotide
cgtggtcaaatcggtttaactggcgaacggggtttaacgggtgaacgtg

SEQ ID NO: 236266 - DNA, 51 bp, Artificial
  Synthetic oligonucleotide
ctaaggctggcgtctacggtcaaattcaggtgttaagcggagcgcttaagt

SEQ ID NO: 236267 - DNA, 51 bp, Artificial
  Synthetic oligonucleotide
cacccgttttctctaaggtttgcagacggttttcaatccactgcagcatgt

SEQ ID NO: 236268 - DNA, 51 bp, Artificial
  Synthetic oligonucleotide
gagcgaactcgtggcatagatagatagagttgagcatcactttcatcgaac

SEQ ID NO: 236269 - DNA, 51 bp, Artificial
  Synthetic oligonucleotide
ctggtggggcgacacgcgggctaacctcgctgataaagctatttagtgagt

SEQ ID NO: 236270 - DNA, 51 bp, Artificial
  Synthetic oligonucleotide
cttgaaccggaaaagcattggggactgtttaacttagaccgaacaccaaaa

SEQ ID NO: 236271 - DNA, 60 bp, Artificial
  Synthetic oligonucleotide
tcgacatgagtaattccccccaaatcggcggtcgcgtcacaagtcgcgataacgatgcca

SEQ ID NO: 236272 - DNA, 51 bp, Artificial
  Synthetic oligonucleotide
gattcgattgattagtgtaattccgcacctgcgttttagacacaggtatcc

SEQ ID NO: 236273 - DNA, 51 bp, Artificial
  Synthetic oligonucleotide
cgtcgatgctcaaagtggcacgttcaaagtgaccctgtcggtaccaaacca

SEQ ID NO: 236274 - DNA, 51 bp, Artificial
  Synthetic oligonucleotide
atcttttcgtttaggtggccagatttacgatggttatccacaggcgaagcc

SEQ ID NO: 236275 - DNA, 51 bp, Artificial
  Synthetic oligonucleotide
cggcgtaacgaattgaatatggttattgacgtgatgacacacgattccgca

SEQ ID NO: 236276 - DNA, 51 bp, Artificial
  Synthetic oligonucleotide
gaaggaagaaacggggcgaaatgggtctgttttaaggtcagcgtgaatcag

SEQ ID NO: 236277 - DNA, 51 bp, Artificial
  Synthetic oligonucleotide
ctcatcgggtatcaatcagtccgcatggctgcaagccctcaactcaccgat

SEQ ID NO: 236278 - DNA, 51 bp, Artificial
  Synthetic oligonucleotide
ctccattcaccttaagcagcttagtccatgccatcacaatacggccagtta

SEQ ID NO: 236279 - DNA, 51 bp, Artificial
  Synthetic oligonucleotide
ccggattctggcgatacattcactggtataatctagagtcgcgtcatcgat

SEQ ID NO: 236280 - DNA, 51 bp, Artificial
  Synthetic oligonucleotide
cggtaggctgttcgcgtgttattggaggtcgccgcttgcagatagtggcgc

SEQ ID NO: 236281 - DNA, 50 bp, Artificial
  Synthetic oligonucleotide
acgttacgcacgatacgacccaggtatcttgggcaggcagcgggggctga

SEQ ID NO: 236282 - DNA, 60 bp, Artificial
  Synthetic oligonucleotide
tcaggcataagcgcaggcctttagccgcgtttggcaaacagaatggtgctccgtgcgagc

SEQ ID NO: 236283 - DNA, 50 bp, Artificial
  Synthetic oligonucleotide
aatccggaaggcccgaaaggggtgccagatccgctaggttcggccaagaa

SEQ ID NO: 236284 - DNA, 50 bp, Artificial
  Synthetic oligonucleotide
acaatcaacgtcgtggcgcttcgcccacacccgagccaagggggaaagcg

SEQ ID NO: 236285 - DNA, 50 bp, Artificial
  Synthetic oligonucleotide
acaccacggtttccagcgggcctgtttcccggttgagtagcatccacaga

SEQ ID NO: 236286 - DNA, 50 bp, Artificial
  Synthetic oligonucleotide
aaccggtagcgcctctgtggcgagtaacgtagtgaagcctaatggcgccc

SEQ ID NO: 236287 - DNA, 50 bp, Artificial
  Synthetic oligonucleotide
cagcacatcttctaagcgccagcttcacccttgcggctgccccaacacct

SEQ ID NO: 236288 - DNA, 50 bp, Artificial
  Synthetic oligonucleotide
cagcaacgcactcggctcagcggggatctggtgaaaacgggcaaccaatg

SEQ ID NO: 236289 - DNA, 50 bp, Artificial
  Synthetic oligonucleotide
catacaagacctgaccatccgccgtccagccctgaactcgcactcggcta

SEQ ID NO: 236290 - DNA, 50 bp, Artificial
  Synthetic oligonucleotide
aaccttaggcctgccttctgtggtgacggcgagtttggccgacggaccta

SEQ ID NO: 236291 - DNA, 50 bp, Artificial
  Synthetic oligonucleotide
aacccaggtgagactggtagcaacccacaccctgagggtcgcccgcaatc

SEQ ID NO: 236292 - DNA, 50 bp, Artificial
  Synthetic oligonucleotide
acacccccagtctcgcctatcgttccagtgagctgggtcgtccgggcact

SEQ ID NO: 236293 - DNA, 58 bp, Artificial
  Synthetic oligonucleotide
tcagccttggacgcattttctttacgcacgttcttctcagacaacaccaactggttaa

SEQ ID NO: 236294 - DNA, 50 bp, Artificial
  Synthetic oligonucleotide
acgtttaagggccaaggggcgctcagactctggcgtggcactgtgcagag

SEQ ID NO: 236295 - DNA, 50 bp, Artificial
  Synthetic oligonucleotide
acgggcggaacccatgcacttgaatatgtgctaacggcgttgccccgcac

SEQ ID NO: 236296 - DNA, 50 bp, Artificial
  Synthetic oligonucleotide
acgtttatgccccattattggtttcaggcgataagctgcacagaacagta

SEQ ID NO: 236297 - DNA, 50 bp, Artificial
  Synthetic oligonucleotide
cgttattaccccttagcccaaggcgagcagccacgctggcaagtgcactg

SEQ ID NO: 236298 - DNA, 50 bp, Artificial
  Synthetic oligonucleotide
actaccacccgtctcgcttccactgccccctgtggtacccgtgtttgtgg

SEQ ID NO: 236299 - DNA, 50 bp, Artificial
  Synthetic oligonucleotide
cagtatcaccttgctcccctcttaggcctgtcacccctttaggaccacta

SEQ ID NO: 236300 - DNA, 50 bp, Artificial
  Synthetic oligonucleotide
acgggcggcgggttaaacaagtagcattagcggcttggcctagctgggat

SEQ ID NO: 236301 - DNA, 50 bp, Artificial
  Synthetic oligonucleotide
acggggcggcgtttgtgacctgggtaggggtgagtgaaccggctgcgcgc

SEQ ID NO: 236302 - DNA, 50 bp, Artificial
  Synthetic oligonucleotide
acgggggaacctctggcctaccgtttaagccttggctggcgtccctcaaa

SEQ ID NO: 236303 - DNA, 50 bp, Artificial
  Synthetic oligonucleotide
caggtacgacaagcatcctagcgacaatcccggcgagtcagcaggggcct

SEQ ID NO: 236304 - DNA, 60 bp, Artificial
  Synthetic oligonucleotide
tcagcattgggttatgcgccgtgaatttctatcgccgcagtacactactcgctggtccga

SEQ ID NO: 236305 - DNA, 50 bp, Artificial
  Synthetic oligonucleotide
acgtagagtggcatgggcagggtagtacttggaccgggcggctccaatcg

SEQ ID NO: 236306 - DNA, 50 bp, Artificial
  Synthetic oligonucleotide
caggccagcctacaggctaccaagcgatcatctggactggcgaggcgact

SEQ ID NO: 236307 - DNA, 50 bp, Artificial
  Synthetic oligonucleotide
acgtcctgcggcccaggcaaagttcgctagcagtgaggaactgccatccc

SEQ ID NO: 236308 - DNA, 50 bp, Artificial
  Synthetic oligonucleotide
acacatcccgaacatattctagccgccctgcgtcaaggggtcgacgccct

SEQ ID NO: 236309 - DNA, 50 bp, Artificial
  Synthetic oligonucleotide
accccgccgagtagcgcccctagcaacctgagaacaacagccgtccccat

SEQ ID NO: 236310 - DNA, 50 bp, Artificial
  Synthetic oligonucleotide
aacccgcatcgataacgcctgctcttggccccatttactcatgcgcgctt

SEQ ID NO: 236311 - DNA, 50 bp, Artificial
  Synthetic oligonucleotide
acgtgcgcagggccaaacgctaaatttcgacccgaagccccagccagcac

SEQ ID NO: 236312 - DNA, 50 bp, Artificial
  Synthetic oligonucleotide
aaccctggtgatactcgttaccctctttgtggcccgcagcctgcttgccc

SEQ ID NO: 236313 - DNA, 50 bp, Artificial
  Synthetic oligonucleotide
aaccctgtcgagcgcaaccgccgatttgcgtagccaaggttcccggccac

SEQ ID NO: 236314 - DNA, 50 bp, Artificial
  Synthetic oligonucleotide
aatgccaatcgagcctactgacggccttatgcccggtgcgcgagtcatgc

SEQ ID NO: 236315 - DNA, 60 bp, Artificial
  Synthetic oligonucleotide
tcaatgctgagtgactacaaggatgcgtgccatacaataaccttcgacaatggtcgtgag

SEQ ID NO: 236316 - DNA, 50 bp, Artificial
  Synthetic oligonucleotide
caggcaaaatcagcagggggacgtaggcgccctccggctactagcgagaa

SEQ ID NO: 236317 - DNA, 50 bp, Artificial
  Synthetic oligonucleotide
aatccgtgagcagcaagcatggcaaacgttaaccgaactgaccaagcagg

SEQ ID NO: 236318 - DNA, 50 bp, Artificial
  Synthetic oligonucleotide
aaccccaagagcccgactaatgtgggtgggatcatgcgcgctgcgggttg

SEQ ID NO: 236319 - DNA, 50 bp, Artificial
  Synthetic oligonucleotide
acgtgcgtaacaccctgcgtaccggtgctccaacctcagccgaagatggc

SEQ ID NO: 236320 - DNA, 50 bp, Artificial
  Synthetic oligonucleotide
tcgatggatgtttggttcatcgtaaggcttaacatcccagtatttcggag

SEQ ID NO: 236321 - DNA, 50 bp, Artificial
  Synthetic oligonucleotide
acgtgtggcgcatggatttaccgggggccacgcccaaagatgccaacagg

SEQ ID NO: 236322 - DNA, 50 bp, Artificial
  Synthetic oligonucleotide
tattccatcggttagcgccgagataggcacccagtaaccgttttgttgga

SEQ ID NO: 236323 - DNA, 50 bp, Artificial
  Synthetic oligonucleotide
aacggctgttctccatgcggctctggcgtatctcatgaaggcgaaccgga

SEQ ID NO: 236324 - DNA, 50 bp, Artificial
  Synthetic oligonucleotide
actgcggcagccgtgtcattggcactgtgctctttcgtcgcaaacgctgc

SEQ ID NO: 236325 - DNA, 50 bp, Artificial
  Synthetic oligonucleotide
actgggcgcatctccccctctgtttttagggcgggtcgtatagcggcggt

SEQ ID NO: 236326 - DNA, 55 bp, Artificial
  Synthetic oligonucleotide
cggggtatgtcggctcagtatcccggctacggtatttactacgacaagccgccga

SEQ ID NO: 236327 - DNA, 57 bp, Artificial
  Synthetic oligonucleotide
tatgggaacaactggcaaatcatcgttttacaacgctgtaaacgatttattggcggc

SEQ ID NO: 236328 - DNA, 50 bp, Artificial
  Synthetic oligonucleotide
aacgggtgtgagctcggaacttctcagccacgcggtaatgggtcatcgct

SEQ ID NO: 236329 - DNA, 50 bp, Artificial
  Synthetic oligonucleotide
cactcactgccagaggtaagagtggcggcgatcctatccccatggcgggg

SEQ ID NO: 236330 - DNA, 50 bp, Artificial
  Synthetic oligonucleotide
actggtccgaaatacgtcgcacgccatcaaccatgacccctgcgccacca

SEQ ID NO: 236331 - DNA, 50 bp, Artificial
  Synthetic oligonucleotide
actgtagttgggatccccgggagagtcgtcgccacgcaaactgggcagtc

SEQ ID NO: 236332 - DNA, 50 bp, Artificial
  Synthetic oligonucleotide
aatccatccctctcaacgatggcacggcgagggccggtacttgcaaagcc

SEQ ID NO: 236333 - DNA, 50 bp, Artificial
  Synthetic oligonucleotide
aacggtggcctcagtaggcacggcaggtgtacccggtagtgctatggtca

SEQ ID NO: 236334 - DNA, 50 bp, Artificial
  Synthetic oligonucleotide
actgtgccagaccgactctcaggcgtgtcggcccagtatacttgtcgggc

SEQ ID NO: 236335 - DNA, 50 bp, Artificial
  Synthetic oligonucleotide
acttcagccatattcgccactcgcgcgctcacacaagcagctaccgtcgc

SEQ ID NO: 236336 - DNA, 50 bp, Artificial
  Synthetic oligonucleotide
acttggagggcgtgccggggagtagatgcaggcttagctcgtctgacagc

SEQ ID NO: 236337 - DNA, 50 bp, Artificial
  Synthetic oligonucleotide
ctcaccagctgtaatctcgttaataagtggcgcagcatttctagggtgta

SEQ ID NO: 236338 - DNA, 57 bp, Artificial
  Synthetic oligonucleotide
tatcgaggcgtaatggctccgatacgaagggggccatttttatgcgtgggtattggc

SEQ ID NO: 236339 - DNA, 50 bp, Artificial
  Synthetic oligonucleotide
agaactagacacaccgatacaggtgggcggtggcgtgaggaccgaagccc

SEQ ID NO: 236340 - DNA, 50 bp, Artificial
  Synthetic oligonucleotide
agaagccagctcaatcacgccctttaacggataagcgggccccaccgctt

SEQ ID NO: 236341 - DNA, 50 bp, Artificial
  Synthetic oligonucleotide
acaccttggcaggccgcgtcatcgcaaaaaccggtaacgaacccgcagtc

SEQ ID NO: 236342 - DNA, 50 bp, Artificial
  Synthetic oligonucleotide
aactcaccgtgggtgggatcaggttcccgaggatccgggtttgtgccaat

SEQ ID NO: 236343 - DNA, 50 bp, Artificial
  Synthetic oligonucleotide
aactcttctacgaggacggcaattcagcaatctggacgaggttgttggta

SEQ ID NO: 236344 - DNA, 50 bp, Artificial
  Synthetic oligonucleotide
aactgcggtaactcggctaaatccgcagacagcgcagagggctgacgcag

SEQ ID NO: 236345 - DNA, 50 bp, Artificial
  Synthetic oligonucleotide
agaatggggcgctatggtgtcccaggggctcgataatctgctgacagcgc

SEQ ID NO: 236346 - DNA, 50 bp, Artificial
  Synthetic oligonucleotide
agacgctgtgacgaaccatcggttgggaaggtgccgcggttaagcgtgct

SEQ ID NO: 236347 - DNA, 50 bp, Artificial
  Synthetic oligonucleotide
gtgtcctcactactgattaaaggtacacgcagcccaaaggcacttgtgta

SEQ ID NO: 236348 - DNA, 50 bp, Artificial
  Synthetic oligonucleotide
agacgggtcatctgacaggggagggtagtgacatcccggtagctgacgcc

SEQ ID NO: 236349 - DNA, 60 bp, Artificial
  Synthetic oligonucleotide
tagccggttctgtctcaagtgctgtgctagtgtgtaggatgagaggcctacccgacccca

SEQ ID NO: 236350 - DNA, 50 bp, Artificial
  Synthetic oligonucleotide
aacttagcgccagcgattcactacgcccgcgatgggttccctgtgtcaga

SEQ ID NO: 236351 - DNA, 50 bp, Artificial
  Synthetic oligonucleotide
actagcgcgactgagagcggcccaagcagttgccccacaacttggctact

SEQ ID NO: 236352 - DNA, 50 bp, Artificial
  Synthetic oligonucleotide
ctaaacgccaagccccctcccggaaccgcggtggccacccactcactaga

SEQ ID NO: 236353 - DNA, 50 bp, Artificial
  Synthetic oligonucleotide
acccccgtgactttcgcacgggtaacggcggggagctgggtcaaatcatc

SEQ ID NO: 236354 - DNA, 50 bp, Artificial
  Synthetic oligonucleotide
actcaccgcacggcgaacagtctttacaccggccttgtggcccacaacac

SEQ ID NO: 236355 - DNA, 50 bp, Artificial
  Synthetic oligonucleotide
aacgcagagcctaacgcttgtggatgacggtcggtcgcaagctctccaga

SEQ ID NO: 236356 - DNA, 50 bp, Artificial
  Synthetic oligonucleotide
actcatgtgccgcgttaagtgccgccgaatcgcctagccctcataccggg

SEQ ID NO: 236357 - DNA, 50 bp, Artificial
  Synthetic oligonucleotide
actccaccgcccctgcgcatctgcttaccgagtaggtgctgaccatagct

SEQ ID NO: 236358 - DNA, 50 bp, Artificial
  Synthetic oligonucleotide
ctactgacggccttatgcccggtgcgcgagtcatgccaatagaggggcgc

SEQ ID NO: 236359 - DNA, 50 bp, Artificial
  Synthetic oligonucleotide
acaccgaactgtaggctcaggcccgactcggtaccataacccacccccgc

SEQ ID NO: 236360 - DNA, 55 bp, Artificial
  Synthetic oligonucleotide
tacgccctactttcgttccgattctagtaccgatttggcagcgttggttagcaag

SEQ ID NO: 236361 - DNA, 50 bp, Artificial
  Synthetic oligonucleotide
actcgggcgttcatcgtcatggcaaggggcaactgctttatgcgccccag

SEQ ID NO: 236362 - DNA, 50 bp, Artificial
  Synthetic oligonucleotide
actcgttgaggggcctccgggacttgcgaaaacacgagccgtaaaagccc

SEQ ID NO: 236363 - DNA, 50 bp, Artificial
  Synthetic oligonucleotide
aacgcaggtttcgcagcccaatccgttcgcgggtggtcaaacagtcgtca

SEQ ID NO: 236364 - DNA, 50 bp, Artificial
  Synthetic oligonucleotide
ctaggggagactaggccgccattgggagcacacctgcactgtcgatgcgt

SEQ ID NO: 236365 - DNA, 50 bp, Artificial
  Synthetic oligonucleotide
cactcctgttcgtgggccaatagggccaaaagcgagatcccccacggcga

SEQ ID NO: 236366 - DNA, 50 bp, Artificial
  Synthetic oligonucleotide
aacgctaggcagagccaagacgcacctgcatgctaccggcgacatgctta

SEQ ID NO: 236367 - DNA, 50 bp, Artificial
  Synthetic oligonucleotide
taccacgacccgcatttgggcaacgaaaggaacccgaccacgagcggtaa

SEQ ID NO: 236368 - DNA, 50 bp, Artificial
  Synthetic oligonucleotide
actcttaatgcgaaacagccgagtgtcatccctgttggtcacggataatc

SEQ ID NO: 236369 - DNA, 50 bp, Artificial
  Synthetic oligonucleotide
aatcccggcagggccgcacataccttcgattgtgccctcactcggctaca

SEQ ID NO: 236370 - DNA, 50 bp, Artificial
  Synthetic oligonucleotide
aatcccgccgtggcctactcatttaccttagcgggtgagaaccgccgctc

SEQ ID NO: 236371 - DNA, 53 bp, Artificial
  Synthetic oligonucleotide
tttttttttgagcggtaactcggtagacgcacacctttaactcggtagacgca

SEQ ID NO: 236372 - DNA, 50 bp, Artificial
  Synthetic oligonucleotide
aacggcagcctcgtcgacttcaatcatcacatcagaggcagcggcccact

SEQ ID NO: 236373 - DNA, 50 bp, Artificial
  Synthetic oligonucleotide
ctcaacagcccaagtctcaccgggagcaaccttaggcgcctgccttagcg

SEQ ID NO: 236374 - DNA, 50 bp, Artificial
  Synthetic oligonucleotide
actgccggatttacgtggccgcgcgccagtgcatgtgggtgttagcgatc

SEQ ID NO: 236375 - DNA, 50 bp, Artificial
  Synthetic oligonucleotide
aacggctgtggcccgtcggtctgcttgtacttttccagcgctcctgagac

SEQ ID NO: 236376 - DNA, 50 bp, Artificial
  Synthetic oligonucleotide
actgccgggcgtacaagatccagccgaggctaagtcggtgatcggtgcta

SEQ ID NO: 236377 - DNA, 50 bp, Artificial
  Synthetic oligonucleotide
cctaacggagacacacttgcgtccaacgctgggacgccaaaatgcggcag

SEQ ID NO: 236378 - DNA, 50 bp, Artificial
  Synthetic oligonucleotide
cctggccttgagcagtgtgcacaaccggtgacgcaccatcgtccacttta

SEQ ID NO: 236379 - DNA, 50 bp, Artificial
  Synthetic oligonucleotide
accgcgcgtctgatggacaccctgagtcgaggcctagccggagaggctta

SEQ ID NO: 236380 - DNA, 50 bp, Artificial
  Synthetic oligonucleotide
aaactgcgcatagaatggccggatgtcgcctctgcaggcagccaaaccat

SEQ ID NO: 236381 - DNA, 50 bp, Artificial
  Synthetic oligonucleotide
ccttaataacacccctacgctattagggttcgctatggatgaaatagtcc

SEQ ID NO: 236382 - DNA, 60 bp, Artificial
  Synthetic oligonucleotide
ttttgaaaccaagacttctccagcgtcttacttactgaagactgctgcaggcctgaaatc

SEQ ID NO: 236383 - DNA, 50 bp, Artificial
  Synthetic oligonucleotide
ttattttccaccattgggcgtggtttgttgtttcgtctttatgcggcccc

SEQ ID NO: 236384 - DNA, 50 bp, Artificial
  Synthetic oligonucleotide
aaagagttcggtcattggagcacggtctttagacggtttcatttatggtc

SEQ ID NO: 236385 - DNA, 50 bp, Artificial
  Synthetic oligonucleotide
ccttgccagccgcgggttgcgtacactgggtattcgtttagcccagcacg

SEQ ID NO: 236386 - DNA, 50 bp, Artificial
  Synthetic oligonucleotide
accgctagcctcatctgcttgagcctacccgcccagctcgccttggctgc

SEQ ID NO: 236387 - DNA, 50 bp, Artificial
  Synthetic oligonucleotide
accggcgcctaaactgcgagagccggtaaagtgcttacgggcaaccaggt

SEQ ID NO: 236388 - DNA, 50 bp, Artificial
  Synthetic oligonucleotide
accgggatcttaggtgccggccaatggcgcagaaagggttattggcgaga

SEQ ID NO: 236389 - DNA, 50 bp, Artificial
  Synthetic oligonucleotide
cgaagctgtccctagcaggacgcagtccgtcctagaagcgaagcgcccta

SEQ ID NO: 236390 - DNA, 50 bp, Artificial
  Synthetic oligonucleotide
cccgtatcagccatgtttgtggtctcgcggcagaaagggcgtaacggcga

SEQ ID NO: 236391 - DNA, 50 bp, Artificial
  Synthetic oligonucleotide
accggggacggtttgctctgggcgttcctgcatcccagtaacaagcccct

SEQ ID NO: 236392 - DNA, 50 bp, Artificial
  Synthetic oligonucleotide
aaagatcaccaccgcagacgccagtctcgaaggctgacggcatttcccga

SEQ ID NO: 236393 - DNA, 56 bp, Artificial
  Synthetic oligonucleotide
tttaaatgaccttctccacaaaacggacaggttttaccatttagatctgacatata

SEQ ID NO: 236394 - DNA, 50 bp, Artificial
  Synthetic oligonucleotide
accggtaagacgccgatcccgggggtagtgcctttcgagagggctcctaa

SEQ ID NO: 236395 - DNA, 50 bp, Artificial
  Synthetic oligonucleotide
accgtaagcaccactggagcgcacgaccagtaaatcgcctggggcgatgg

SEQ ID NO: 236396 - DNA, 50 bp, Artificial
  Synthetic oligonucleotide
acctcggtgccggctggggaagtcagagtcaccagtagatcgccactcca

SEQ ID NO: 236397 - DNA, 50 bp, Artificial
  Synthetic oligonucleotide
cccggtgacagcgcaataacccacaacgggtggaaccgcacccgaaaagc

SEQ ID NO: 236398 - DNA, 50 bp, Artificial
  Synthetic oligonucleotide
acctgaatgggtaacccgccggcgcagcataaacagccaccagcgacttc

SEQ ID NO: 236399 - DNA, 50 bp, Artificial
  Synthetic oligonucleotide
aaagccccaaagcgaatatcggcttcccatcgggttggcactcgcaccgc

SEQ ID NO: 236400 - DNA, 50 bp, Artificial
  Synthetic oligonucleotide
aaagccctggcgcccctttcgcccgagtggcaaaccgaggatgccagagt

SEQ ID NO: 236401 - DNA, 50 bp, Artificial
  Synthetic oligonucleotide
aaaggcgtccacatggcttatgcccgaggcttggtctatggcccatggcc

SEQ ID NO: 236402 - DNA, 50 bp, Artificial
  Synthetic oligonucleotide
cgaggccacaatcagcgaatgccgccgacacacgaccaagcgttgacatg

SEQ ID NO: 236403 - DNA, 50 bp, Artificial
  Synthetic oligonucleotide
acccgcttgtccccagcaagcagcgtaggacaaaacaaggagtgccccta

SEQ ID NO: 236404 - DNA, 57 bp, Artificial
  Synthetic oligonucleotide
ttgtttcgccgtttgcgggaatattgaggactaggtttgcggtcattatcaccgcac

SEQ ID NO: 236405 - DNA, 50 bp, Artificial
  Synthetic oligonucleotide
ccgccggtcgtggggagcgactacgccccttaacggatagcttgcctaag

SEQ ID NO: 236406 - DNA, 50 bp, Artificial
  Synthetic oligonucleotide
ccggagtgagttgctggcaaagcacagtttgcgctgcggccttagcgagc

SEQ ID NO: 236407 - DNA, 50 bp, Artificial
  Synthetic oligonucleotide
acccgtatcgcaaaggtccactcggcgtgatccgagagggcgcttatgct

SEQ ID NO: 236408 - DNA, 50 bp, Artificial
  Synthetic oligonucleotide
acccgccatctcggcagactgatgtgagcgactgccaacaaccacgggaa

SEQ ID NO: 236409 - DNA, 50 bp, Artificial
  Synthetic oligonucleotide
acccgttgcagggttaagctcgcacccgcatagttaccgttgccgccatt

SEQ ID NO: 236410 - DNA, 50 bp, Artificial
  Synthetic oligonucleotide
ccggccccagtgccgctccgtttgggcctaatgcgctctcttggtgccca

SEQ ID NO: 236411 - DNA, 50 bp, Artificial
  Synthetic oligonucleotide
ccgccccctttagcctgctttctgggatctttggcgacagtgacgcgtta

SEQ ID NO: 236412 - DNA, 50 bp, Artificial
  Synthetic oligonucleotide
accctacgcaggatggccctgggaccgtgaggctagtatccagcggtgcc

SEQ ID NO: 236413 - DNA, 50 bp, Artificial
  Synthetic oligonucleotide
ccgtcctctggcgaacctgcgagctgctaggacgttgcgcggctagatgc

SEQ ID NO: 236414 - DNA, 50 bp, Artificial
  Synthetic oligonucleotide
accctgattgccagcccagatgggcgcgacgagagtttcactgtgcgcca

SEQ ID NO: 236415 - DNA, 60 bp, Artificial
  Synthetic oligonucleotide
ttgggttgtaacttcatgcactcttcacgccgcagcccgaaaagttgctgcaattggaaa

SEQ ID NO: 236416 - DNA, 50 bp, Artificial
  Synthetic oligonucleotide
aaaagctcgtcccttagcagtcgacgcagcctcctggctcgctagcgcag

SEQ ID NO: 236417 - DNA, 50 bp, Artificial
  Synthetic oligonucleotide
aaacaactgccactacccgtgaggcgatcggcaggacaatcggggtccgg

SEQ ID NO: 236418 - DNA, 50 bp, Artificial
  Synthetic oligonucleotide
ttgtgagccctgcgacgatcccaactcgccacacagtcatgccagcatgc

SEQ ID NO: 236419 - DNA, 50 bp, Artificial
  Synthetic oligonucleotide
ccgtgaatgccagctctaatgctgtgttaagctaattaggcagtgtaaaa

SEQ ID NO: 236420 - DNA, 50 bp, Artificial
  Synthetic oligonucleotide
aaaccgcccagggggaatggctcggggttacctacgcagatgatgtgccc

SEQ ID NO: 236421 - DNA, 50 bp, Artificial
  Synthetic oligonucleotide
aaaccggtcgcctgacaccaggttgagggcaggctcacgtcggtagctta

SEQ ID NO: 236422 - DNA, 50 bp, Artificial
  Synthetic oligonucleotide
aaacgagcccgcaatggcgaggttaatgcaccagcacgagtcgtggcgcc

SEQ ID NO: 236423 - DNA, 50 bp, Artificial
  Synthetic oligonucleotide
aaacgcgccaccagtcccaagccgaaaacgtggctcaacgcgataacact

SEQ ID NO: 236424 - DNA, 50 bp, Artificial
  Synthetic oligonucleotide
ttgccgtcagtagcttgcgataagcggcatccagcggcgctaagaccacg

SEQ ID NO: 236425 - DNA, 50 bp, Artificial
  Synthetic oligonucleotide
aaacggaattgaccgcgagttgcctgacccttccgcccacatccagtgcc

SEQ ID NO: 236426 - DNA, 56 bp, Artificial
  Synthetic oligonucleotide
ttgggactttctagccactcacaacccttcgccgctacgggcgattcaaatgggcc

SEQ ID NO: 236427 - DNA, 50 bp, Artificial
  Synthetic oligonucleotide
ccgtttgcggttatgttggcggttccgattgcgatactgggggcgttcct

SEQ ID NO: 236428 - DNA, 50 bp, Artificial
  Synthetic oligonucleotide
aaacggcacccctaccgagctcagcctacgtaaaccccagctggctcaag

SEQ ID NO: 236429 - DNA, 50 bp, Artificial
  Synthetic oligonucleotide
accgcagcggcgagcctatcagccgcatgttggtgagcctgccagagcat

SEQ ID NO: 236430 - DNA, 50 bp, Artificial
  Synthetic oligonucleotide
accgcgagtcattgagagggccaaagccgggcgactcaagttagtcggca

SEQ ID NO: 236431 - DNA, 50 bp, Artificial
  Synthetic oligonucleotide
acgctcttgtgttgccacaccgaccacagcaaaaggcgcacgttcgcgtt

SEQ ID NO: 236432 - DNA, 50 bp, Artificial
  Synthetic oligonucleotide
cgcatggggtccaccgtgtggtaacacgactaacgccggtttttccccct

SEQ ID NO: 236433 - DNA, 50 bp, Artificial
  Synthetic oligonucleotide
aacacagagtttgcactccgctacgcccccgactagactctcgcccgggg

SEQ ID NO: 236434 - DNA, 50 bp, Artificial
  Synthetic oligonucleotide
accccgggtgtggatggtattttcggccccagcccatttaccctgcgtgg

SEQ ID NO: 236435 - DNA, 50 bp, Artificial
  Synthetic oligonucleotide
cgccatcgggttcatcgccactaatgcggacacgcccattgcagcaagta

SEQ ID NO: 236436 - DNA, 50 bp, Artificial
  Synthetic oligonucleotide
cgccggctaccctaacattggtgcagcccatagtgcgcagttcgtgccac

SEQ ID NO: 236437 - DNA, 55 bp, Artificial
  Synthetic oligonucleotide
ttgagaagattggttgagaatggttccaacaaggcgttttagaacttttcttgtc

SEQ ID NO: 236438 - DNA, 58 bp, Artificial
  Synthetic oligonucleotide
gactcccctctttgttcagcaagagagagcgcttgtgagtacgcttgctgcgcttgtg

SEQ ID NO: 236439 - DNA, 58 bp, Artificial
  Synthetic oligonucleotide
aatctttaggggaggacttgtactaatatcttttactcatagcgatctgtaatagaca

SEQ ID NO: 236440 - DNA, 51 bp, Artificial
  Synthetic oligonucleotide
ccgtataaaacgtaattaaccccaagttgctacctagataagcacggggaa

SEQ ID NO: 236441 - DNA, 55 bp, Artificial
  Synthetic oligonucleotide
tctgtagccgtttgggtaggaatgatcgctttactaggcatagcagctcagacga

SEQ ID NO: 236442 - DNA, 55 bp, Artificial
  Synthetic oligonucleotide
gagaagctccctaaacccgttgagaccgtcatagcagatggaggatacgacacaa

SEQ ID NO: 236443 - DNA, 55 bp, Artificial
  Synthetic oligonucleotide
aatccttggacgggcctcagtcccatcgggtgcctccacaggggcaaacgaagct

SEQ ID NO: 236444 - DNA, 55 bp, Artificial
  Synthetic oligonucleotide
gaaaatcttcaaaggaacgctcatactgcctcatatcgaagtatgagacacttct

SEQ ID NO: 236445 - DNA, 55 bp, Artificial
  Synthetic oligonucleotide
cttctataatgcgctccaaagttttgggatctcccattgcccctgttaaacggtc

SEQ ID NO: 236446 - DNA, 55 bp, Artificial
  Synthetic oligonucleotide
ctgtgcgatggctgcacttgatgcaatgtgatcatctagcattccttcagatgaa

SEQ ID NO: 236447 - DNA, 55 bp, Artificial
  Synthetic oligonucleotide
ctgagcagatgtaacttcccctgccgctatcttattgcgtaccttccgaagtagc

SEQ ID NO: 236448 - DNA, 58 bp, Artificial
  Synthetic oligonucleotide
aaccgctttatacctaccatcacaattcgtagcctcaatcgcagacttcccctgcgcc

SEQ ID NO: 236449 - DNA, 55 bp, Artificial
  Synthetic oligonucleotide
ctccaacaagcatcgaaacaatccaactgaggccgcctaaggttccaatgatccc

SEQ ID NO: 236450 - DNA, 55 bp, Artificial
  Synthetic oligonucleotide
cgttttgtatcccaatatgggaattctcacaccaagcgactctgcaaacttgtta

SEQ ID NO: 236451 - DNA, 55 bp, Artificial
  Synthetic oligonucleotide
gagcgctctctctatgaacaatcaaaactcgaggtagcatcttgggaaatcgccg

SEQ ID NO: 236452 - DNA, 55 bp, Artificial
  Synthetic oligonucleotide
gaggcagcaagcgaggctcttatggttcaagctgtagtcaacttgctaagtccgg

SEQ ID NO: 236453 - DNA, 55 bp, Artificial
  Synthetic oligonucleotide
taatgcaaaatcgccttatccgacatgacgaggtaagaggttccgaactttgggg

SEQ ID NO: 236454 - DNA, 55 bp, Artificial
  Synthetic oligonucleotide
gaggctcaagaagacatctatccggctccttatgaagcgtatcccctcccgacaa

SEQ ID NO: 236455 - DNA, 55 bp, Artificial
  Synthetic oligonucleotide
gtgctactagtatgacgaaatactgacgcaacttgtaaggtcatctgctactttg

SEQ ID NO: 236456 - DNA, 51 bp, Artificial
  Synthetic oligonucleotide
cgaacgaatggggcccgaatggtgtccaataaaacctgtgagggggtaaag

SEQ ID NO: 236457 - DNA, 55 bp, Artificial
  Synthetic oligonucleotide
gatttccgcttgcatctgcaaaacgtactctttcgcatcagagaccagttgcgcg

SEQ ID NO: 236458 - DNA, 55 bp, Artificial
  Synthetic oligonucleotide
ccatccacaggttacaacgcccacgatccgagtatgtgggtaaccaactgaacgg

SEQ ID NO: 236459 - DNA, 58 bp, Artificial
  Synthetic oligonucleotide
tatcatcctattggaaatagacctgcgttcgttaaagtcacgggacatgcaagttcgg

SEQ ID NO: 236460 - DNA, 55 bp, Artificial
  Synthetic oligonucleotide
ggaggataacatctccgataactcctaggtcaaatccccttccgatagggaattg

SEQ ID NO: 236461 - DNA, 51 bp, Artificial
  Synthetic oligonucleotide
ccaaaactggtaacaccctttacggttgggtattgggatatcgaatctaac

SEQ ID NO: 236462 - DNA, 55 bp, Artificial
  Synthetic oligonucleotide
cagtgaagttcaaagtgtcggtgaccgcaagtaaaacgcctgctcgagaaaagta

SEQ ID NO: 236463 - DNA, 55 bp, Artificial
  Synthetic oligonucleotide
ggcataacgttgcaagtcaatgaccggcttggactcgctcataagctcaatcttg

SEQ ID NO: 236464 - DNA, 55 bp, Artificial
  Synthetic oligonucleotide
ggggaaggcgttgcatcagagaatcaatcagccccgttgcactcagagattttct

SEQ ID NO: 236465 - DNA, 55 bp, Artificial
  Synthetic oligonucleotide
cacaattcttactcgactcggaaagtcgaatttctggatttggcagcggagagac

SEQ ID NO: 236466 - DNA, 55 bp, Artificial
  Synthetic oligonucleotide
ggtgcgtgatttggtagttgaccgtagttcgatgtttgaaaatctcaaacgggtg

SEQ ID NO: 236467 - DNA, 55 bp, Artificial
  Synthetic oligonucleotide
ggttccaaactaagtgggagctagaaggtgcataagagtagggatcattcgcgcc

SEQ ID NO: 236468 - DNA, 55 bp, Artificial
  Synthetic oligonucleotide
ggttgttttgccgaggcttgaatccccgttgctgcacacatcccttggtagatgg

SEQ ID NO: 236469 - DNA, 55 bp, Artificial
  Synthetic oligonucleotide
gtcagaaaggacaagagccgctgagttagcgcaaattgcgagaggttcaggagcg

SEQ ID NO: 236470 - DNA, 58 bp, Artificial
  Synthetic oligonucleotide
gaagggatggggctaactggaatgatcctcgttcacaaacgagaacccgatgtgacaa

SEQ ID NO: 236471 - DNA, 55 bp, Artificial
  Synthetic oligonucleotide
aggaggagcattggcagccggcgtaagagctgtaaccaaggggaagggagcaggt

SEQ ID NO: 236472 - DNA, 55 bp, Artificial
  Synthetic oligonucleotide
gtccccgcattcccagctacaacaggatttgtcacggttaaggcaccagctgcag

SEQ ID NO: 236473 - DNA, 54 bp, Artificial
  Synthetic oligonucleotide
gcaacttgtcgtgagcattttagcaggggtaactctcgaaacacttcagatgta

SEQ ID NO: 236474 - DNA, 54 bp, Artificial
  Synthetic oligonucleotide
aaacttcaaaggagtccagaatgcgttcacaatgcccatcaaagcgcgcttaga

SEQ ID NO: 236475 - DNA, 53 bp, Artificial
  Synthetic oligonucleotide
gggagcgttcatccctactgaagagagcaaaggctacgaagtactcgtctcgt

SEQ ID NO: 236476 - DNA, 53 bp, Artificial
  Synthetic oligonucleotide
gcgcaatgtcgtgggacgaagcaacccgagcaatcaaacataactgtgaagtg

SEQ ID NO: 236477 - DNA, 53 bp, Artificial
  Synthetic oligonucleotide
gatagataagctaaagcaatatgtcaacgagcgagagaggagagtttttgtca

SEQ ID NO: 236478 - DNA, 52 bp, Artificial
  Synthetic oligonucleotide
aacgcctggcgtaatccctattctcatcggtttggtatacacaaactcacgc

SEQ ID NO: 236479 - DNA, 52 bp, Artificial
  Synthetic oligonucleotide
acgtgttttcggtcggttacctgttctagttctatgctttccatagaaactt

SEQ ID NO: 236480 - DNA, 52 bp, Artificial
  Synthetic oligonucleotide
gagagtcttagcgagttatgtagaccaagaaagagtcactgtactcgatgcc

SEQ ID NO: 236481 - DNA, 55 bp, Artificial
  Synthetic oligonucleotide
cttaaccctgtagtgccccagtctgttgaacagccgataacggtgtatagggctt

SEQ ID NO: 236482 - DNA, 51 bp, Artificial
  Synthetic oligonucleotide
tctacgattctccccattcggcttgtggcgctccgtttctgatcgggcctc

SEQ ID NO: 236483 - DNA, 51 bp, Artificial
  Synthetic oligonucleotide
tcggcttgtggcgctccgtttctgatcgggcctcccatcataaaggctcct

SEQ ID NO: 236484 - DNA, 51 bp, Artificial
  Synthetic oligonucleotide
tcgcgcgaatcacacgtgtagtttggggagcaccggacatcaggcacgggt

SEQ ID NO: 236485 - DNA, 51 bp, Artificial
  Synthetic oligonucleotide
tcaaccggctactcgactcctcgcgacctcagcggtctccgcttttcactc

SEQ ID NO: 236486 - DNA, 51 bp, Artificial
  Synthetic oligonucleotide
tgttaagtcgattattcatgctcttcaatgcgtacatttcgaagtgggggg

SEQ ID NO: 236487 - DNA, 51 bp, Artificial
  Synthetic oligonucleotide
tatttgccaatagagacttaccggcattaacatacgtaggggagtacacag

SEQ ID NO: 236488 - DNA, 51 bp, Artificial
  Synthetic oligonucleotide
acgcgctccaaagcgatccatgagcatgccaacgggaagttgcatcggggc

SEQ ID NO: 236489 - DNA, 51 bp, Artificial
  Synthetic oligonucleotide
agccctcgcgtacaaggcgcactccaagtcatcggtggcactgcagaaacc

SEQ ID NO: 236490 - DNA, 51 bp, Artificial
  Synthetic oligonucleotide
aggtggctaccgctcaacttgggcagccagtctggcaaaacgagcaggaca

SEQ ID NO: 236491 - DNA, 51 bp, Artificial
  Synthetic oligonucleotide
gtaatagttacaggcattacgttcatagcgtggaactacattgatcgttct

SEQ ID NO: 236492 - DNA, 55 bp, Artificial
  Synthetic oligonucleotide
gttgtcggaacagaccaaatgggtagccctgtaaccattaaagatctttcgcgtg

SEQ ID NO: 236493 - DNA, 51 bp, Artificial
  Synthetic oligonucleotide
atatgcccaagtggtcggaagggcgagtgacacttgctggagatgcggcct

SEQ ID NO: 236494 - DNA, 51 bp, Artificial
  Synthetic oligonucleotide
caaacggagagtggaactgtcctgtggtcctccggaccccaactgggggat

SEQ ID NO: 236495 - DNA, 51 bp, Artificial
  Synthetic oligonucleotide
cacggcgtgggcgactcccttcttggggaccaatgactcctcgagactcga

SEQ ID NO: 236496 - DNA, 51 bp, Artificial
  Synthetic oligonucleotide
ggcgctccgtttctgatcgggcctcccatcataaaggctcctgtccctcct

SEQ ID NO: 236497 - DNA, 51 bp, Artificial
  Synthetic oligonucleotide
cagataccgtcgcgtccaagtcaacgctccactgtgagcgaaggctggggg

SEQ ID NO: 236498 - DNA, 51 bp, Artificial
  Synthetic oligonucleotide
cggggtcaattagcttcgatgtgagcattttaacgatctttcactctctaa

SEQ ID NO: 236499 - DNA, 51 bp, Artificial
  Synthetic oligonucleotide
ggactgttattagccccgctgactcctggattcgacgtacctcgcgccgca

SEQ ID NO: 236500 - DNA, 51 bp, Artificial
  Synthetic oligonucleotide
ccaagattcctcttagagagcaagcttcggtagcggactacagtgataacc

SEQ ID NO: 236501 - DNA, 51 bp, Artificial
  Synthetic oligonucleotide
cgctaatgcctgcaacgtgcgtggtgcggtcaatagtcctccaagagcgct

SEQ ID NO: 236502 - DNA, 51 bp, Artificial
  Synthetic oligonucleotide
cgatgcaggaagccccaaagtgggcttgcgaagcagggcacggagcagtaa

SEQ ID NO: 236503 - DNA, 56 bp, Artificial
  Synthetic oligonucleotide
gagtgccaaattgagcagcggtgaattttacgtgggaaagatccttttaactagta

SEQ ID NO: 236504 - DNA, 50 bp, Artificial
  Synthetic oligonucleotide
gaccaccgtgaagggaatccctgcagcaaggagtgcaaggccggaaaccc

SEQ ID NO: 236505 - DNA, 50 bp, Artificial
  Synthetic oligonucleotide
ttcagcgaccatgcaacctcaatcgcagtttgaatcgcaaaaggatctta

SEQ ID NO: 236506 - DNA, 50 bp, Artificial
  Synthetic oligonucleotide
tgttaagggacctgcttctaaaagggcgatgttgagtcccgtgttctttt

SEQ ID NO: 236507 - DNA, 50 bp, Artificial
  Synthetic oligonucleotide
tgacgtggtggaggcactcgcgtgctagcatccgattttcccgcgcaatg

SEQ ID NO: 236508 - DNA, 50 bp, Artificial
  Synthetic oligonucleotide
cgagtcttgcgcgatacctgcccttgtccttacgctcaaaggggtggccc

SEQ ID NO: 236509 - DNA, 50 bp, Artificial
  Synthetic oligonucleotide
ccgaccgagtgaccggaaatgcgctttttgtccagacgggaaaacggggc

SEQ ID NO: 236510 - DNA, 50 bp, Artificial
  Synthetic oligonucleotide
tcagccgccgcttagcatttcgccctcacgttggtgccaaggcattgcgc

SEQ ID NO: 236511 - DNA, 50 bp, Artificial
  Synthetic oligonucleotide
accgtcgcccaaaccttgagcgcaaataatcgcaacggatttcatattta

SEQ ID NO: 236512 - DNA, 50 bp, Artificial
  Synthetic oligonucleotide
ccaaaagctaggcgctaagccattcgagccgatgggacgcaagatgcggg

SEQ ID NO: 236513 - DNA, 50 bp, Artificial
  Synthetic oligonucleotide
gtcgcaggctgggcgcttatcgagtacagtgatcgcttcgcaatgggcct

SEQ ID NO: 236514 - DNA, 59 bp, Artificial
  Synthetic oligonucleotide
acttgaactcataactgttcaggaggctgtagaggtttggctgtcaacgcttagttcga

SEQ ID NO: 236515 - DNA, 50 bp, Artificial
  Synthetic oligonucleotide
atccatttcgatgcgttaaatcaagtcacgatagacccagctagtagaat

SEQ ID NO: 236516 - DNA, 57 bp, Artificial
  Synthetic oligonucleotide
cgcgtaatgtcccaatctaaaaacgaaactttaggagtgcaaatagtcagcactaga

SEQ ID NO: 236517 - DNA, 55 bp, Artificial
  Synthetic oligonucleotide
accaaccgtaaggactacctgaagcgaattgtggacgtcaggatgcaacaatccc

SEQ ID NO: 236518 - DNA, 55 bp, Artificial
  Synthetic oligonucleotide
gagactaatggcatatgagtgtgctctcctttgaaaattgcgtggatggtgtccc

SEQ ID NO: 236519 - DNA, 55 bp, Artificial
  Synthetic oligonucleotide
gcacgggctgtaaacgtgagtcggaacccaattctccaaagagatatcgacacga

SEQ ID NO: 236520 - DNA, 55 bp, Artificial
  Synthetic oligonucleotide
gcgaccacaaattcccagggcggaaatgagcggcccgaagctcgcacggatggaa

SEQ ID NO: 236521 - DNA, 55 bp, Artificial
  Synthetic oligonucleotide
tttactcgccacatcctcaatagcaaacaaccgcagaggatgagaaccgacgaac

SEQ ID NO: 236522 - DNA, 55 bp, Artificial
  Synthetic oligonucleotide
tttacgatccggagtccaaatccaacgatcgggtgtactgcaagcggggcgggta

SEQ ID NO: 236523 - DNA, 55 bp, Artificial
  Synthetic oligonucleotide
ttgaatgcccaaattcccgtggactttacaagcgcttacacagagcggcgccttg

SEQ ID NO: 236524 - DNA, 55 bp, Artificial
  Synthetic oligonucleotide
tggtttaccaggttgcataccgggtcgtccgcccaagcgtagcgcacggctgccg

SEQ ID NO: 236525 - DNA, 55 bp, Artificial
  Synthetic oligonucleotide
tcggaatccaacagcaggccaggaacttcgcaatcgaagcatcctatgtgggcag

SEQ ID NO: 236526 - DNA, 54 bp, Artificial
  Synthetic oligonucleotide
tccaccccggaagtcgggcgggtgtatacttccaagcgaatgggtagactggcc

SEQ ID NO: 236527 - DNA, 55 bp, Artificial
  Synthetic oligonucleotide
gtttactattcggccttctcggatggcgcgaatcccgtggagttgtaccgcacca

SEQ ID NO: 236528 - DNA, 55 bp, Artificial
  Synthetic oligonucleotide
acgctcgtcgtagaaagcgaggtccgctgcagacacggtaaactcgaccgttcga

SEQ ID NO: 236529 - DNA, 55 bp, Artificial
  Synthetic oligonucleotide
gcgcaatcgtgcgccggctatcgatgccgctcaattccccggtgactgtgtagct

SEQ ID NO: 236530 - DNA, 54 bp, Artificial
  Synthetic oligonucleotide
gatgcactacccggattataacggaccgccgcccaactagtggagttggagtcc

SEQ ID NO: 236531 - DNA, 53 bp, Artificial
  Synthetic oligonucleotide
cggcaaacactccactaccagcggcggcccgcaattgacgctcgataccacgc

SEQ ID NO: 236532 - DNA, 53 bp, Artificial
  Synthetic oligonucleotide
cgctaggtctgccttgtgggccagtagccaaaacgagggccgccagggtatct

SEQ ID NO: 236533 - DNA, 53 bp, Artificial
  Synthetic oligonucleotide
ggcattcggaagtccactcgtgttcaattcgatgtgtacgtagcaaacagcaa

SEQ ID NO: 236534 - DNA, 51 bp, Artificial
  Synthetic oligonucleotide
tccggctgtcgctccctgagcgagcagttcgttccttaagatgcggcgcct

SEQ ID NO: 236535 - DNA, 51 bp, Artificial
  Synthetic oligonucleotide
ttcgtttctcgggtcgattgagggtcaaacgcagaacacgtccctcgcgaa

SEQ ID NO: 236536 - DNA, 51 bp, Artificial
  Synthetic oligonucleotide
aacattttaagaatcccaacgtgcaatcgtggaacgtgtcggttcagcgtt

SEQ ID NO: 236537 - DNA, 50 bp, Artificial
  Synthetic oligonucleotide
aagcacgtggaatgtctggggtgcggtcacagacaaggaagggcgctacc

SEQ ID NO: 236538 - DNA, 50 bp, Artificial
  Synthetic oligonucleotide
aagcacgttcacgtcgtgcgaactgacaccgagtcccgcgtaaaccggat

SEQ ID NO: 236539 - DNA, 55 bp, Artificial
  Synthetic oligonucleotide
agctgaaatcggtgtaatgcggagtctccagccgcactgtgccgccggcccttac

SEQ ID NO: 236540 - DNA, 50 bp, Artificial
  Synthetic oligonucleotide
attggtatagacggcgcgacctgaaatacagtcccatcgaattgcacggt

SEQ ID NO: 236541 - DNA, 50 bp, Artificial
  Synthetic oligonucleotide
cagagtacccgaactggttatggatcgctgcggtaattctgcaaaacgtg

SEQ ID NO: 236542 - DNA, 50 bp, Artificial
  Synthetic oligonucleotide
gctccgaaagacgaaaatttatagcgcggaggcccagtttacttgtaacc

SEQ ID NO: 236543 - DNA, 50 bp, Artificial
  Synthetic oligonucleotide
aaaacatcccgcgggggaccggccttctcataccatctctgatggggtcg

SEQ ID NO: 236544 - DNA, 50 bp, Artificial
  Synthetic oligonucleotide
aaaataccggagagccggcgcgatatctcggcagcgacctcccatagcgt

SEQ ID NO: 236545 - DNA, 50 bp, Artificial
  Synthetic oligonucleotide
aaaatggcccacaaagtcggagggcgcgttgcggtgacgtcgcgattcca

SEQ ID NO: 236546 - DNA, 50 bp, Artificial
  Synthetic oligonucleotide
aaaccctttggaatgggaccgccgacagtcgagactgccgcaggtaggac

SEQ ID NO: 236547 - DNA, 50 bp, Artificial
  Synthetic oligonucleotide
aaacctcgcccggggagtgcacccaggtcgcacgacaacagagaaggccc

SEQ ID NO: 236548 - DNA, 50 bp, Artificial
  Synthetic oligonucleotide
aaacgacggaagcccgtagccgtatgtactcgttgcggtgcgttcgccca

SEQ ID NO: 236549 - DNA, 50 bp, Artificial
  Synthetic oligonucleotide
aaacgcccatagctaccgcccgaatagcaaggcgccgaacacccccgtcc

SEQ ID NO: 236550 - DNA, 55 bp, Artificial
  Synthetic oligonucleotide
atctccggggattccccaacgagccgggagcgttacggcagatggtctgcggtta

SEQ ID NO: 236551 - DNA, 50 bp, Artificial
  Synthetic oligonucleotide
aaacgctcggttgcatcgcggcgtacgaccaacggaggacagtgcccggc

SEQ ID NO: 236552 - DNA, 50 bp, Artificial
  Synthetic oligonucleotide
aaacggactagcctcttggggctacgcccctcgcagattcaacgccgcag

SEQ ID NO: 236553 - DNA, 50 bp, Artificial
  Synthetic oligonucleotide
aaagagcgacttcccatcgatcgagaccgttgacttgggcggcacccgct

SEQ ID NO: 236554 - DNA, 50 bp, Artificial
  Synthetic oligonucleotide
aaaggcaggtcccggtgcaaagcggagtgacgccccaagtgccggtagca

SEQ ID NO: 236555 - DNA, 50 bp, Artificial
  Synthetic oligonucleotide
aaattcgtgatcacgccgatgttgggcgtcgctccctgcagtcccacgcc

SEQ ID NO: 236556 - DNA, 50 bp, Artificial
  Synthetic oligonucleotide
aacaggacccttgcccaagagacgaaccgcggccatgcaaattgcggaag

SEQ ID NO: 236557 - DNA, 50 bp, Artificial
  Synthetic oligonucleotide
aacagtccgacggacactggctcctcgcccgtgacgcccatacgctgtct

SEQ ID NO: 236558 - DNA, 50 bp, Artificial
  Synthetic oligonucleotide
aaccccaacattcctccggggcctcagaccatccaagtcacctcgggagg

SEQ ID NO: 236559 - DNA, 50 bp, Artificial
  Synthetic oligonucleotide
aacccgattagccgacgtccacccgactgagcggactctggcctaaacgg

SEQ ID NO: 236560 - DNA, 50 bp, Artificial
  Synthetic oligonucleotide
aagactcgcaacacgagttccacgagtggctccccaacaggcacgacgcc

SEQ ID NO: 236561 - DNA, 55 bp, Artificial
  Synthetic oligonucleotide
atgattgcggtcttcttggtagcgtcccaatggatgttgccgagtgtgcgcggct

SEQ ID NO: 236562 - DNA, 50 bp, Artificial
  Synthetic oligonucleotide
aagacccggtacagatgagacgagggcgctaacctggccccgcaactcga

SEQ ID NO: 236563 - DNA, 50 bp, Artificial
  Synthetic oligonucleotide
aagacataccggttggggaccacctgtcccgacaccgcaacggacagcag

SEQ ID NO: 236564 - DNA, 50 bp, Artificial
  Synthetic oligonucleotide
aagacacttaaagcgcacgtggggcgggcgggcgtaagcgtttacaggag

SEQ ID NO: 236565 - DNA, 50 bp, Artificial
  Synthetic oligonucleotide
aactggcaactctccgcgttgggatcgctccgctcgggctttccatacac

SEQ ID NO: 236566 - DNA, 50 bp, Artificial
  Synthetic oligonucleotide
aactgatcgctccccttgggctcacggctctgaccggagctgcgacccca

SEQ ID NO: 236567 - DNA, 50 bp, Artificial
  Synthetic oligonucleotide
aacggtcgggagctactatgcctccagggacacgcatgggaaccgcattc

SEQ ID NO: 236568 - DNA, 50 bp, Artificial
  Synthetic oligonucleotide
aacggtagcaacggcccagacgagcccatgcaggagcgtagttcgggtct

SEQ ID NO: 236569 - DNA, 50 bp, Artificial
  Synthetic oligonucleotide
aacgggtcacaacgtcgggaaacgcgactaaggcctgaacactcgggtcc

SEQ ID NO: 236570 - DNA, 50 bp, Artificial
  Synthetic oligonucleotide
aacgggtatagcagttccggccaacagccccatggacaggaccgcggcac

SEQ ID NO: 236571 - DNA, 50 bp, Artificial
  Synthetic oligonucleotide
aacgcgtaaatgcacgcgaggccaggttgaatggcagccgtcgcccgtgc

SEQ ID NO: 236572 - DNA, 55 bp, Artificial
  Synthetic oligonucleotide
caaagggacatccgtcagtgtaccagaagttgcgaacgcgtgtctaccgccgcaa

SEQ ID NO: 236573 - DNA, 50 bp, Artificial
  Synthetic oligonucleotide
aacgaggaggatccaccaggcgacatagacggggtatagcgcaccgccaa

SEQ ID NO: 236574 - DNA, 50 bp, Artificial
  Synthetic oligonucleotide
aacgagccgcgaccataacggagcccaacgtgcccttgattctcggcatc

SEQ ID NO: 236575 - DNA, 50 bp, Artificial
  Synthetic oligonucleotide
aacctgcggaagcgagccctacagaagcacgtatcatcggcctgatccga

SEQ ID NO: 236576 - DNA, 50 bp, Artificial
  Synthetic oligonucleotide
aaccgtgaacaggagcggctagacctgccggatgaagtcttgccagcggt

SEQ ID NO: 236577 - DNA, 50 bp, Artificial
  Synthetic oligonucleotide
aacccggcgttgtttttcggaacggaaagctgcgggtcgggaagcattct

SEQ ID NO: 236578 - DNA, 50 bp, Artificial
  Synthetic oligonucleotide
aacccgcaatccccgccgtccacggcagagatcttctgcaggccatagtg

SEQ ID NO: 236579 - DNA, 55 bp, Artificial
  Synthetic oligonucleotide
cagtagggatctcatgatagccaaactactgcggttcgcattagcgcaacgcttc

SEQ ID NO: 236580 - DNA, 55 bp, Artificial
  Synthetic oligonucleotide
cctccgtaggcagcttcgggtcactcaatacctcggtgagtacaaccggcaccat

SEQ ID NO: 236581 - DNA, 55 bp, Artificial
  Synthetic oligonucleotide
gaattgaacaggttactacacagcctaatggactcattacaatgaccttccaccg

SEQ ID NO: 236582 - DNA, 51 bp, Artificial
  Synthetic oligonucleotide
atactacgcccgataacgtcgaaatccaggggaaattggtaacggtcgtcc

SEQ ID NO: 236583 - DNA, 55 bp, Artificial
  Synthetic oligonucleotide
gcgacggacagggctcggctccacaacgaagctccgtctgctgaaagactgctgt

SEQ ID NO: 236584 - DNA, 55 bp, Artificial
  Synthetic oligonucleotide
gctagggatacgataaccgccgtaggatcacgtggtcgcaacagtcactgtcgca

SEQ ID NO: 236585 - DNA, 55 bp, Artificial
  Synthetic oligonucleotide
ggatccagatacccgtagcgcgggttgcagtcggtcttgatggccaacccaatcg

SEQ ID NO: 236586 - DNA, 55 bp, Artificial
  Synthetic oligonucleotide
ggggagacgataccataatcccacactggttgcgtactgtttcctatccctccac

SEQ ID NO: 236587 - DNA, 55 bp, Artificial
  Synthetic oligonucleotide
accgaggaggcacagcctaaccatcgggcatcgagctccgccctcgaggcttgac

SEQ ID NO: 236588 - DNA, 55 bp, Artificial
  Synthetic oligonucleotide
ggggattagtgcgtagtgcgtgttccgtgttgcgtgatccgtcatcagcacgcgg

SEQ ID NO: 236589 - DNA, 55 bp, Artificial
  Synthetic oligonucleotide
ttgttggacgccgctcacgcaagcgccccactctacgagtacgggaccgatccaa

SEQ ID NO: 236590 - DNA, 55 bp, Artificial
  Synthetic oligonucleotide
tccgtctcccacgaaaggagcacccgatggatgtggacaccttcctgattacagt

SEQ ID NO: 236591 - DNA, 55 bp, Artificial
  Synthetic oligonucleotide
tcaacccatgtctgttgaaacgtgggtgtcgtaccgtatcccacacgagttctcc

SEQ ID NO: 236592 - DNA, 55 bp, Artificial
  Synthetic oligonucleotide
tatctgcgactttgcgaccggggctccagatccgggaccgtcgcagagcttctca

SEQ ID NO: 236593 - DNA, 55 bp, Artificial
  Synthetic oligonucleotide
atgtgtgagagacacgaggagctaaggcctgaggcgttgccccagacttgaggtc

SEQ ID NO: 236594 - DNA, 55 bp, Artificial
  Synthetic oligonucleotide
gtgctcgtacagcactaactcactgttggcgctccgaagcgagtccacgagccgc

SEQ ID NO: 236595 - DNA, 55 bp, Artificial
  Synthetic oligonucleotide
gtgcccacctgcctgcgatcgcccacccgtcgtacctccgtgcgctctacggtgt

SEQ ID NO: 236596 - DNA, 55 bp, Artificial
  Synthetic oligonucleotide
ggggtagtggcactgcgagcattcttctaacaccgacaggacgatccgtcggacc

SEQ ID NO: 236597 - DNA, 55 bp, Artificial
  Synthetic oligonucleotide
gtcacgttccgagacaccaatacccgcgcatctgtgcacaattgacagagacgcg

SEQ ID NO: 236598 - DNA, 55 bp, Artificial
  Synthetic oligonucleotide
ggtaggatgaagggtcgcgccgattgtgtcaaggcgatcatccgcttcggacgcg

SEQ ID NO: 236599 - DNA, 54 bp, Artificial
  Synthetic oligonucleotide
gggtctttacataggggtagggaccctgtagacttcatcaattaacttgggcgc

SEQ ID NO: 236600 - DNA, 54 bp, Artificial
  Synthetic oligonucleotide
tgcgattgcgtccgtcaggttgataggtcgtcaatacttcagaccaccctctct

SEQ ID NO: 236601 - DNA, 54 bp, Artificial
  Synthetic oligonucleotide
tgccgagtgccaactcagcgtaggataccagttgatactacttgtgtcaaggtt

SEQ ID NO: 236602 - DNA, 54 bp, Artificial
  Synthetic oligonucleotide
cgaaacctcagtggtagagccggcagtgcaacgcggaacacctggcagtcgtcg

SEQ ID NO: 236603 - DNA, 53 bp, Artificial
  Synthetic oligonucleotide
acgcaatacgcatgacgcactacggatgacgaacggcctgctatgatcgtcgc

SEQ ID NO: 236604 - DNA, 55 bp, Artificial
  Synthetic oligonucleotide
agaccgtcttggggcgtgatctaggcccggaggaacgtgtgtcccgcgaggaagc

SEQ ID NO: 236605 - DNA, 53 bp, Artificial
  Synthetic oligonucleotide
tgaacaccgatcggtggtgcgtcgaagtgcagacggaatcatcagtgcagggg

SEQ ID NO: 236606 - DNA, 53 bp, Artificial
  Synthetic oligonucleotide
ttcgttgcgaatgtgtgccgaccctgttatcgtagaatgcaactagaacatcg

SEQ ID NO: 236607 - DNA, 53 bp, Artificial
  Synthetic oligonucleotide
gagagcggagggtgtgcgtggttcgtacggagcgctgggagatccagacgcgt

SEQ ID NO: 236608 - DNA, 52 bp, Artificial
  Synthetic oligonucleotide
ggtgccttgaccgtctcgggtagggaaggtctgattggggaggccgacggtg

SEQ ID NO: 236609 - DNA, 52 bp, Artificial
  Synthetic oligonucleotide
tcgtgagcgacggttgcttgatccggctcatccccggtgataaggagtcgga

SEQ ID NO: 236610 - DNA, 52 bp, Artificial
  Synthetic oligonucleotide
cccgcggagttgagcctgcctgagtttgcaccgggctagtcggggtgagtgg

SEQ ID NO: 236611 - DNA, 51 bp, Artificial
  Synthetic oligonucleotide
ccccgggcacctaccaccgccatagacccgtatacgccaaacgccaatacc

SEQ ID NO: 236612 - DNA, 50 bp, Artificial
  Synthetic oligonucleotide
ccccggtgattgacctggttcattccgagcactagactgcggcagggacc

SEQ ID NO: 236613 - DNA, 50 bp, Artificial
  Synthetic oligonucleotide
cccctcatcacggttccaggtggggccatcataggtcgaatggcacctcg

SEQ ID NO: 236614 - DNA, 50 bp, Artificial
  Synthetic oligonucleotide
ccagttcgggatgaacccctgatcatcggccgcaaagagcccgattgccg

SEQ ID NO: 236615 - DNA, 55 bp, Artificial
  Synthetic oligonucleotide
ccccaaccgtgactttgctcccaggttgaatatcgcatgctcctggtaggctgct

SEQ ID NO: 236616 - DNA, 50 bp, Artificial
  Synthetic oligonucleotide
ccaggttcggctgggaggttcgacgcattggaccgtttcgcgtcactcaa

SEQ ID NO: 236617 - DNA, 50 bp, Artificial
  Synthetic oligonucleotide
cagtctccgatccagtgcttctcggctcggtgtgccgtttcacgctggcg

SEQ ID NO: 236618 - DNA, 50 bp, Artificial
  Synthetic oligonucleotide
cagcggcatcgtctctcccctcacgtcggcactggtgtagcatggagtgg

SEQ ID NO: 236619 - DNA, 50 bp, Artificial
  Synthetic oligonucleotide
cacgccggaccgaggaggcacagcctaaccatcgggcatcgagctccgcc

SEQ ID NO: 236620 - DNA, 50 bp, Artificial
  Synthetic oligonucleotide
cacgcaacgtgtatggtccatgacgcatgacgtgccacgcactacccgct

SEQ ID NO: 236621 - DNA, 50 bp, Artificial
  Synthetic oligonucleotide
cacccttgagcgggggcagcttcgggactaccagatcttcagttcccacg

SEQ ID NO: 236622 - DNA, 50 bp, Artificial
  Synthetic oligonucleotide
caagtcggctcgcgcacctatgcgacgaacacgctcgagtcaggctggat

SEQ ID NO: 236623 - DNA, 50 bp, Artificial
  Synthetic oligonucleotide
caagacaatcgcgggcagttggctcgtgccggtcgggaggaaagccacgg

SEQ ID NO: 236624 - DNA, 50 bp, Artificial
  Synthetic oligonucleotide
caaccgttggtgttggtcccggggtcgagggagtctcgcgggagaaggac

SEQ ID NO: 236625 - DNA, 50 bp, Artificial
  Synthetic oligonucleotide
atgggacgtggaccggggatcctccgccctatcgcttcatgactaccgtg

SEQ ID NO: 236626 - DNA, 53 bp, Artificial
  Synthetic oligonucleotide
ccttagtccaagtgtggcgggtgatcgttactaacaattccggaacaaaccag

SEQ ID NO: 236627 - DNA, 50 bp, Artificial
  Synthetic oligonucleotide
atgctctacttccagcgggagggcatcacgcgtatcgggctcctctccgt

SEQ ID NO: 236628 - DNA, 50 bp, Artificial
  Synthetic oligonucleotide
acggctgcctccgacccttcggcccatacgatcgagtgcagcgctttctc

SEQ ID NO: 236629 - DNA, 50 bp, Artificial
  Synthetic oligonucleotide
acggctcccccttctgtgtcgttgcgtgccggaactctcatctgacgtga

SEQ ID NO: 236630 - DNA, 50 bp, Artificial
  Synthetic oligonucleotide
acgcgcggaccttcttagccacggtacgtcaatcctccctggtggtccga

SEQ ID NO: 236631 - DNA, 50 bp, Artificial
  Synthetic oligonucleotide
acgcgagccccggttggggtgggatccagcgcccacgacctatgaatagg

SEQ ID NO: 236632 - DNA, 50 bp, Artificial
  Synthetic oligonucleotide
accggcccccacgactcaccaggggcccatctccacagtactgttgtagg

SEQ ID NO: 236633 - DNA, 50 bp, Artificial
  Synthetic oligonucleotide
accgccagtgagacggaggaagtccctccggcgtatcaatcgctccatgc

SEQ ID NO: 236634 - DNA, 50 bp, Artificial
  Synthetic oligonucleotide
acccaactcatggtcccgcggtgttgtcggaaggagaaccgcgcaacacg

SEQ ID NO: 236635 - DNA, 50 bp, Artificial
  Synthetic oligonucleotide
accacaggatgagcgccaacccaaggctcgagaggagcgtcatcaggggg

SEQ ID NO: 236636 - DNA, 50 bp, Artificial
  Synthetic oligonucleotide
accaaccggatggtgggcaccgtatcaccgagggctgaaccctcttcccc

SEQ ID NO: 236637 - DNA, 55 bp, Artificial
  Synthetic oligonucleotide
cgacacgggtagccgtgcgcaccctgcagtataacagacggctcgcgaagcacta

SEQ ID NO: 236638 - DNA, 50 bp, Artificial
  Synthetic oligonucleotide
acacgggtattatgcggtagggccgagtctagcagtccggtggggagccg

SEQ ID NO: 236639 - DNA, 50 bp, Artificial
  Synthetic oligonucleotide
acaacaccacctgcccagttgtctgggccgtatcgtaccacgcccccgcc

SEQ ID NO: 236640 - DNA, 50 bp, Artificial
  Synthetic oligonucleotide
aattcccccggcggtgttcgtgagtccagagcgccaccaaccgtagagca

SEQ ID NO: 236641 - DNA, 50 bp, Artificial
  Synthetic oligonucleotide
aatggagtcaagacaatcgcgggcagttggctcgtgccggtcgggaggaa

SEQ ID NO: 236642 - DNA, 50 bp, Artificial
  Synthetic oligonucleotide
aatggacaccgtgtcacgccgagtatagcgcaggccagtccctggcgaaa

SEQ ID NO: 236643 - DNA, 50 bp, Artificial
  Synthetic oligonucleotide
aatgaaacgcctttaggcccgggcacattccgaccggtggacaccgtgtc

SEQ ID NO: 236644 - DNA, 50 bp, Artificial
  Synthetic oligonucleotide
aaggtgagccgtgcgattccacaggagcgtggcaactcgatccccgggtt

SEQ ID NO: 236645 - DNA, 50 bp, Artificial
  Synthetic oligonucleotide
aacggagatcgctgcgttacgcgggaggggcatgggaagctagaccaatc

SEQ ID NO: 236646 - DNA, 50 bp, Artificial
  Synthetic oligonucleotide
aacgcggttgccgtgggtaggatgaagggtcgcgccgattgtgtcaaggc

SEQ ID NO: 236647 - DNA, 50 bp, Artificial
  Synthetic oligonucleotide
aacgccccgaccgagggatctgaaggagaacaggcgagcgcgtcaccaga

SEQ ID NO: 236648 - DNA, 55 bp, Artificial
  Synthetic oligonucleotide
cggctcgttggtgtgtggtggacacacggtcactgtcacggggaatcctgcgaag

SEQ ID NO: 236649 - DNA, 50 bp, Artificial
  Synthetic oligonucleotide
aacccggtgttcgatggcaaatgtcgcacttcccggccaagtcggccccc

SEQ ID NO: 236650 - DNA, 50 bp, Artificial
  Synthetic oligonucleotide
aaaggcccatgcgatagagtgggtcgatgccaacgcgggaaggctgtccg

SEQ ID NO: 236651 - DNA, 50 bp, Artificial
  Synthetic oligonucleotide
atccagtgcttctcggctcggtgtgccgtttcacgctggcggagtcccaa

SEQ ID NO: 236652 - DNA, 50 bp, Artificial
  Synthetic oligonucleotide
aggtacgagcctcgccaggcacgtctacactgctggaacgaccgacgcga

SEQ ID NO: 236653 - DNA, 50 bp, Artificial
  Synthetic oligonucleotide
agggccaacgcgggacctgatgagagcatcgtaatgccctcgtcaacacc

SEQ ID NO: 236654 - DNA, 50 bp, Artificial
  Synthetic oligonucleotide
agggaccacaggctttcgatgatagtccgcccctccctcgtacgacgcaa

SEQ ID NO: 236655 - DNA, 50 bp, Artificial
  Synthetic oligonucleotide
agggaagaaacgaagggcagaagcgtggagtggggctacggagaagccac

SEQ ID NO: 236656 - DNA, 50 bp, Artificial
  Synthetic oligonucleotide
aggcgtcgtacgcaggctcgcccggcctcttgggaacggcccttaccctc

SEQ ID NO: 236657 - DNA, 50 bp, Artificial
  Synthetic oligonucleotide
aggccggatcgcgtcagtcgaggcgcgggtcagaggagcccctttagtgg

SEQ ID NO: 236658 - DNA, 50 bp, Artificial
  Synthetic oligonucleotide
aggagacgggaacgcatgccggttggtgaggggcggatcggtaagcaaat

SEQ ID NO: 236659 - DNA, 55 bp, Artificial
  Synthetic oligonucleotide
gagtgggcttatctgggagatgaatcccgcggcctaggagagtataccaacgccg

SEQ ID NO: 236660 - DNA, 50 bp, Artificial
  Synthetic oligonucleotide
agctttcgacccggagaggcacctccgcggtaaacatgcccccatcttcc

SEQ ID NO: 236661 - DNA, 50 bp, Artificial
  Synthetic oligonucleotide
agcggcgctcggtatgcccatcctcggaacgatcgtcggtactggcatgc

SEQ ID NO: 236662 - DNA, 50 bp, Artificial
  Synthetic oligonucleotide
agcggaggacgagtagccccgggaggcgcagaggagcatcgcccgtggat

SEQ ID NO: 236663 - DNA, 50 bp, Artificial
  Synthetic oligonucleotide
agcgagcgggcctcacaaccgttgagtagcaaaggggctcgtctcatgag

SEQ ID NO: 236664 - DNA, 50 bp, Artificial
  Synthetic oligonucleotide
agcctctgcgaacacgttggcgcaactaacagcgctcctgtgtggacctc

SEQ ID NO: 236665 - DNA, 50 bp, Artificial
  Synthetic oligonucleotide
agacaagtcaggcgttcaggggcaaccgcacctggcgcgttctctgggtg

SEQ ID NO: 236666 - DNA, 50 bp, Artificial
  Synthetic oligonucleotide
agaagtcccatctcgcgacgcggcatacccggctccaggtcagggcgtgg

SEQ ID NO: 236667 - DNA, 50 bp, Artificial
  Synthetic oligonucleotide
acttcaccgcccaaaccgagccctgacgccgttatgctgggcattacgta

SEQ ID NO: 236668 - DNA, 50 bp, Artificial
  Synthetic oligonucleotide
actctcccaagtccggggcagaagtcggttcttccaaccacaagcgcgcc

SEQ ID NO: 236669 - DNA, 50 bp, Artificial
  Synthetic oligonucleotide
actccggttgtcgtgcccctggacccgctggtagcatccggctgggaacg

SEQ ID NO: 236670 - DNA, 55 bp, Artificial
  Synthetic oligonucleotide
gatcgtgctgaattgggttccattgacagtgtaggaagtcgacacatgggcgtca

SEQ ID NO: 236671 - DNA, 50 bp, Artificial
  Synthetic oligonucleotide
actagggacacggtgtccggtgggaggccggatcgcgtcagtcgaggcgc

SEQ ID NO: 236672 - DNA, 50 bp, Artificial
  Synthetic oligonucleotide
actaccgggttccaacgttgaccctttcacgaggccgagtgcggcagtcg

SEQ ID NO: 236673 - DNA, 50 bp, Artificial
  Synthetic oligonucleotide
acgtggcgcctcactccaagcgcacctaccacgagatgggaatcgcctac

SEQ ID NO: 236674 - DNA, 50 bp, Artificial
  Synthetic oligonucleotide
acgtacgcgcgggttgctgtcaatccgtgccgctatgggcaggcccgaac

SEQ ID NO: 236675 - DNA, 50 bp, Artificial
  Synthetic oligonucleotide
acggtcgccgcatgttcccgctcatacggcggatccccatccacggtgcg

SEQ ID NO: 236676 - DNA, 56 bp, Artificial
  Synthetic oligonucleotide
atgaagatccgccccttaccattaatcttccgctttctccggccacctgtgcaccg

SEQ ID NO: 236677 - DNA, 55 bp, Artificial
  Synthetic oligonucleotide
cgggtgatatagacctcgtgatcaaaagatcgtcggacaggggcaaaacctggag

SEQ ID NO: 236678 - DNA, 55 bp, Artificial
  Synthetic oligonucleotide
gcctcacctaacgccgtatttctaatactgtttggctcaagcccttcgcatatcg

SEQ ID NO: 236679 - DNA, 55 bp, Artificial
  Synthetic oligonucleotide
gcctccgaagccattccccataatagcgatcttattacgatctgcaataccctca

SEQ ID NO: 236680 - DNA, 55 bp, Artificial
  Synthetic oligonucleotide
gcgtaactttcctttactatccagtcgggcctcagcggtgactaacatcgggaga

SEQ ID NO: 236681 - DNA, 55 bp, Artificial
  Synthetic oligonucleotide
gcgtatggttcggataggcatcaatgttcttgattacccaattgtcattcactcc

SEQ ID NO: 236682 - DNA, 55 bp, Artificial
  Synthetic oligonucleotide
gctcccgaatgccgtagcagtactggaccccaaacgtgaggattgcccttatcct

SEQ ID NO: 236683 - DNA, 55 bp, Artificial
  Synthetic oligonucleotide
gctcgctgtccacttctaagtggcctacatccggcgatactgttcggagcataac

SEQ ID NO: 236684 - DNA, 55 bp, Artificial
  Synthetic oligonucleotide
ggaacctcggctcctacgctatctatcgtattagacacacctccgccctgcatgc

SEQ ID NO: 236685 - DNA, 55 bp, Artificial
  Synthetic oligonucleotide
ggtagtcacgattgcgaggccataattggtcgctctgggagacaattgacgaagc

SEQ ID NO: 236686 - DNA, 54 bp, Artificial
  Synthetic oligonucleotide
ggtaagccgtaccccaactaccttatataatggcatgttgtaccccattatcgg

SEQ ID NO: 236687 - DNA, 55 bp, Artificial
  Synthetic oligonucleotide
ggtaacccgtcaaccggtacgtaatattgcgacgaccaacgatatgggatggatg

SEQ ID NO: 236688 - DNA, 55 bp, Artificial
  Synthetic oligonucleotide
cggcttgtgtagcgtcacatacgaacttaacttgatgtttccgtgcaatagcgcc

SEQ ID NO: 236689 - DNA, 55 bp, Artificial
  Synthetic oligonucleotide
gggtgcactccaagctgtttaacttccatacgcagccattacgctgatcatggtc

SEQ ID NO: 236690 - DNA, 55 bp, Artificial
  Synthetic oligonucleotide
gggcggggttagattcacgaaagaagacgcacaaagtgcttatcgtgtattgact

SEQ ID NO: 236691 - DNA, 55 bp, Artificial
  Synthetic oligonucleotide
gggcaccgcaaatcgcttaagtcaacgcttcagactgtgggtataaagattccgg

SEQ ID NO: 236692 - DNA, 55 bp, Artificial
  Synthetic oligonucleotide
acaggcccagaggctggcaggtaaatcctttccctgacgtttcggatagatacca

SEQ ID NO: 236693 - DNA, 55 bp, Artificial
  Synthetic oligonucleotide
ggctgatcaatatccgctagtggcgtcaggtggctatatctggtttccgcttaac

SEQ ID NO: 236694 - DNA, 55 bp, Artificial
  Synthetic oligonucleotide
ggctatccgatcctgatcctaagttaaacagggctgtgattgagggcctccggat

SEQ ID NO: 236695 - DNA, 55 bp, Artificial
  Synthetic oligonucleotide
ggcgaagctactgtagggatacaaggatataatccttccggcggtggcagtacta

SEQ ID NO: 236696 - DNA, 55 bp, Artificial
  Synthetic oligonucleotide
ggcatgagctgcgttttaaaggtattgaaccagcaatcgggcgtacaggttttag

SEQ ID NO: 236697 - DNA, 48 bp, Artificial
  Synthetic oligonucleotide
accaaaagggaaactaaaccctccgaaagttattaattgccatttacc

SEQ ID NO: 236698 - DNA, 55 bp, Artificial
  Synthetic oligonucleotide
ggcaccataatcggatcaacggtacgggcaattactaccgaaggttcgtcaagac

SEQ ID NO: 236699 - DNA, 54 bp, Artificial
  Synthetic oligonucleotide
cggcaactgattttccctggtcgggaagctgaggaaatacaaagggctgggccc

SEQ ID NO: 236700 - DNA, 55 bp, Artificial
  Synthetic oligonucleotide
ggatgccttatttgacaggcctaacaacggacatccgattctgataatgaggtag

SEQ ID NO: 236701 - DNA, 54 bp, Artificial
  Synthetic oligonucleotide
ggggacgatctgggcatcataggcagtgcgcctacctatccggatacttccagc

SEQ ID NO: 236702 - DNA, 54 bp, Artificial
  Synthetic oligonucleotide
tgaagcaagccctttatcgattagggacaaaataccaatcatccgttgccttac

SEQ ID NO: 236703 - DNA, 54 bp, Artificial
  Synthetic oligonucleotide
ccatagcttttgtgttgattaggaacgtgttaaatcctgaagtcgggtagtctg

SEQ ID NO: 236704 - DNA, 54 bp, Artificial
  Synthetic oligonucleotide
gccacggatttgtatcccatatccttcctttccaggttgcccgctacccctggt

SEQ ID NO: 236705 - DNA, 54 bp, Artificial
  Synthetic oligonucleotide
taatccgtacctacaacttaccggttggtgcccacattgctgtggataatgccg

SEQ ID NO: 236706 - DNA, 54 bp, Artificial
  Synthetic oligonucleotide
ttacagccgtggcaggttacgaaaccatcaaccggagcgaggcagtgctaccgg

SEQ ID NO: 236707 - DNA, 52 bp, Artificial
  Synthetic oligonucleotide
tttacggaatgaacgcccttaacggcttggctaacttaattactaaagatcc

SEQ ID NO: 236708 - DNA, 54 bp, Artificial
  Synthetic oligonucleotide
agtatcccagcggtcacagtactattacacggtcggcagcggtaatgttgacac

SEQ ID NO: 236709 - DNA, 54 bp, Artificial
  Synthetic oligonucleotide
accactattatcacgcacatcatttactgcagacccagacaattgctgagtcgc

SEQ ID NO: 236710 - DNA, 55 bp, Artificial
  Synthetic oligonucleotide
cggaggcagcagagattcgaactaaacttcgtaccaacctaagtgccgacaatat

SEQ ID NO: 236711 - DNA, 51 bp, Artificial
  Synthetic oligonucleotide
atatttactcccgacccggtttggccactggcttgtttaagatttaaacca

SEQ ID NO: 236712 - DNA, 53 bp, Artificial
  Synthetic oligonucleotide
ggtttaccgcccgggggcgatatgagcatagtacaggccaaacctgccagggt

SEQ ID NO: 236713 - DNA, 53 bp, Artificial
  Synthetic oligonucleotide
aacaaagagctgacatccgttgcacacacccacagaaagggtatcctcccgtt

SEQ ID NO: 236714 - DNA, 53 bp, Artificial
  Synthetic oligonucleotide
tcttacctgctgggtatgacaggccatacaaccttcagatacgaaaatggcct

SEQ ID NO: 236715 - DNA, 53 bp, Artificial
  Synthetic oligonucleotide
tgcatgtatagcacctggcgtaggcttgggataaggcgaatctacgtcaattt

SEQ ID NO: 236716 - DNA, 53 bp, Artificial
  Synthetic oligonucleotide
atctgaatccaatacctcagaccagatataagcataataccctgccgaatacc

SEQ ID NO: 236717 - DNA, 53 bp, Artificial
  Synthetic oligonucleotide
ctgtatagtctgaccgcaatctctggaagacccgatggataggcttactgcca

SEQ ID NO: 236718 - DNA, 53 bp, Artificial
  Synthetic oligonucleotide
taacccggtgtaccccctgttggcgatactgtggcagtcccgttagaggctcc

SEQ ID NO: 236719 - DNA, 53 bp, Artificial
  Synthetic oligonucleotide
gcggagccaccgcctgtgtttgcagggaagaaagatatccccagacctggata

SEQ ID NO: 236720 - DNA, 53 bp, Artificial
  Synthetic oligonucleotide
atacacatccggagcatggagaatcaatgtcgccttacggagaggcggcggct

SEQ ID NO: 236721 - DNA, 55 bp, Artificial
  Synthetic oligonucleotide
cggaatcttacccggtgacgatcatcccaccacatcacccggtatattcggagag

SEQ ID NO: 236722 - DNA, 52 bp, Artificial
  Synthetic oligonucleotide
gtaagcacggttgtactgtccctgcaagttggtccgaaacaggctgaactgg

SEQ ID NO: 236723 - DNA, 52 bp, Artificial
  Synthetic oligonucleotide
gttggaaacggggctcctcaaactccgtcgatgtacatgggtagccgcttaa

SEQ ID NO: 236724 - DNA, 52 bp, Artificial
  Synthetic oligonucleotide
ctacagccgatcggaatgtccctcgctttcatggttggcatcaagcgcaagt

SEQ ID NO: 236725 - DNA, 52 bp, Artificial
  Synthetic oligonucleotide
taggaggttttgctatgcaatggtccaagtctagccgacctgcctcgggggc

SEQ ID NO: 236726 - DNA, 52 bp, Artificial
  Synthetic oligonucleotide
tatccatagtcgctaatgtcatagccgtctaacgacctgattaaaacgacgg

SEQ ID NO: 236727 - DNA, 52 bp, Artificial
  Synthetic oligonucleotide
cactaaagcagctagagatttggcccctaaatttggtatcagcattttggcg

SEQ ID NO: 236728 - DNA, 52 bp, Artificial
  Synthetic oligonucleotide
agtatcttatgatctcgaaacgaaatgggaagctaacgacacatgccaaggc

SEQ ID NO: 236729 - DNA, 52 bp, Artificial
  Synthetic oligonucleotide
aggctggtcatatgtatcgatgtcttgcgcagcacaattagcgaatttccca

SEQ ID NO: 236730 - DNA, 51 bp, Artificial
  Synthetic oligonucleotide
tcacttggttaacctttaggaagcaatcagcgctttgcctacatactcgct

SEQ ID NO: 236731 - DNA, 51 bp, Artificial
  Synthetic oligonucleotide
tattcgcctataccaacgagtttgataagctgagcgtaattgttcggaaaa

SEQ ID NO: 236732 - DNA, 55 bp, Artificial
  Synthetic oligonucleotide
cggaagcggtgtcaggtaataatacacatctagcgtattcgtcgaatctttggag

SEQ ID NO: 236733 - DNA, 51 bp, Artificial
  Synthetic oligonucleotide
gcattggcctcatcgtagctggaaatgctgtcttcaccattcggcgcggac

SEQ ID NO: 236734 - DNA, 51 bp, Artificial
  Synthetic oligonucleotide
atacctatggaaagttaaatgcggatagagataatgtcgtctgggtatgcc

SEQ ID NO: 236735 - DNA, 51 bp, Artificial
  Synthetic oligonucleotide
aaattatacagcaacgtggccgagatcaaatttcctgctaagtggtttaac

SEQ ID NO: 236736 - DNA, 51 bp, Artificial
  Synthetic oligonucleotide
ccgatgatgacgcctttaaatgggtaatagatgcgacgggagaatgcctga

SEQ ID NO: 236737 - DNA, 51 bp, Artificial
  Synthetic oligonucleotide
ccgacttctataatccggagtataatactgaacttggcgtttatacccgca

SEQ ID NO: 236738 - DNA, 51 bp, Artificial
  Synthetic oligonucleotide
cgtatcgttcggtgaggcgacgtaactcctgacacctgaaatgatcggggc

SEQ ID NO: 236739 - DNA, 51 bp, Artificial
  Synthetic oligonucleotide
gtatttcgccatggtctgttgtgattgtgcctgccctcgctttcgaatgta

SEQ ID NO: 236740 - DNA, 51 bp, Artificial
  Synthetic oligonucleotide
aactgggcaatggcccgcaacaggtccctatcgtggttagttatcccccga

SEQ ID NO: 236741 - DNA, 50 bp, Artificial
  Synthetic oligonucleotide
acaacaccccgtaccgtttaagcctaccaacctggggcccgaaatcaaca

SEQ ID NO: 236742 - DNA, 50 bp, Artificial
  Synthetic oligonucleotide
acacgttccagctcacccattacgcaggtatggtggaaatcgggcgcccc

SEQ ID NO: 236743 - DNA, 55 bp, Artificial
  Synthetic oligonucleotide
cgcacatcctgataatcgcggaagctatttccctgatcatatccggctattgctc

SEQ ID NO: 236744 - DNA, 50 bp, Artificial
  Synthetic oligonucleotide
accagtgattatcagcgggtggatagtactggccgggtgcccctgcctgc

SEQ ID NO: 236745 - DNA, 50 bp, Artificial
  Synthetic oligonucleotide
accagtccattcagttcggtttctggtaccggcgggccgttcacttgccg

SEQ ID NO: 236746 - DNA, 50 bp, Artificial
  Synthetic oligonucleotide
acagcgtgcactggtacgcgggacgggtagtgtccggtcgactactgagc

SEQ ID NO: 236747 - DNA, 50 bp, Artificial
  Synthetic oligonucleotide
accactgaaggtgcccgctgccgggacacaaatttcaacggcgttcacgg

SEQ ID NO: 236748 - DNA, 50 bp, Artificial
  Synthetic oligonucleotide
acaggctcctgcacgcgtacggagatggccgctacaatagatccgcggat

SEQ ID NO: 236749 - DNA, 50 bp, Artificial
  Synthetic oligonucleotide
acatcggcacgctcaatcgcagcgtgaagcagcttacccaaccctccccg

SEQ ID NO: 236750 - DNA, 50 bp, Artificial
  Synthetic oligonucleotide
acatggcgtccccgctgaagggggcaaaacggctactccaaatacgcccc

SEQ ID NO: 236751 - DNA, 50 bp, Artificial
  Synthetic oligonucleotide
acattgccaaaggtcggcggcacattcccgcaggtttgcggcacgcggtc

SEQ ID NO: 236752 - DNA, 50 bp, Artificial
  Synthetic oligonucleotide
agaatgtgagcggcatcctgaactcatggaggggatcagcgaccgcaggg

SEQ ID NO: 236753 - DNA, 50 bp, Artificial
  Synthetic oligonucleotide
agaagcgtggcagccgtacccctggttatccttccaccgttgtctggcat

SEQ ID NO: 236754 - DNA, 55 bp, Artificial
  Synthetic oligonucleotide
cgatttaccataatctacaggtccggctacgaaggtaacggtctgcggactgcca

SEQ ID NO: 236755 - DNA, 50 bp, Artificial
  Synthetic oligonucleotide
gagcctccagatccggcagcgttgtaagccacagcagagggcctacccca

SEQ ID NO: 236756 - DNA, 50 bp, Artificial
  Synthetic oligonucleotide
acggttgctccgggtaacggcagctttgaggttgtcgggtacaatggccg

SEQ ID NO: 236757 - DNA, 50 bp, Artificial
  Synthetic oligonucleotide
acgggccgcttattatagacgcccgcatcaaacctcaccatgcaccgcct

SEQ ID NO: 236758 - DNA, 50 bp, Artificial
  Synthetic oligonucleotide
acgggcagtggagcctgttttgcccgcacgaagcaccgggattacatgag

SEQ ID NO: 236759 - DNA, 50 bp, Artificial
  Synthetic oligonucleotide
acgctcagggccagcgaccgacaaaactggtgcgtgttggccttaaagct

SEQ ID NO: 236760 - DNA, 50 bp, Artificial
  Synthetic oligonucleotide
acgcctgtgcggctccgtaccatattaagtgcctggcgggccgttagccc

SEQ ID NO: 236761 - DNA, 50 bp, Artificial
  Synthetic oligonucleotide
acgaggggcccgctatgcccacccggttttgaacgttaagcgccgcgatg

SEQ ID NO: 236762 - DNA, 50 bp, Artificial
  Synthetic oligonucleotide
accttttccccgcgtgcaccataacggctcccggcagcaatcagtgagtt

SEQ ID NO: 236763 - DNA, 50 bp, Artificial
  Synthetic oligonucleotide
acctgtggggaccgcccagggctgacctgtatccttggaacagggtcaaa

SEQ ID NO: 236764 - DNA, 50 bp, Artificial
  Synthetic oligonucleotide
acctggagggcctatgggtgccgggggaatgttaactgccggaggtactt

SEQ ID NO: 236765 - DNA, 55 bp, Artificial
  Synthetic oligonucleotide
cgttggcatacggtgcagccatagatcccggcgaataagcggtagtagtaccggt

SEQ ID NO: 236766 - DNA, 50 bp, Artificial
  Synthetic oligonucleotide
acctgccacacacacgttcagtccgccgaaacaggccgttcttgcttgcg

SEQ ID NO: 236767 - DNA, 50 bp, Artificial
  Synthetic oligonucleotide
accgtctggtttaaccaacgtgccctgcaataccgggctcggcggacttg

SEQ ID NO: 236768 - DNA, 50 bp, Artificial
  Synthetic oligonucleotide
accgtaccggaagtgcacagttgggaacgcaggcagcccattgctgtgac

SEQ ID NO: 236769 - DNA, 50 bp, Artificial
  Synthetic oligonucleotide
accgggtatccacccgaagcatccctgcctagcgcagtaacactctccgg

SEQ ID NO: 236770 - DNA, 50 bp, Artificial
  Synthetic oligonucleotide
accggctgattgtaacgcatcgagtccgccaagcctaccgagccgcctgg

SEQ ID NO: 236771 - DNA, 50 bp, Artificial
  Synthetic oligonucleotide
accggcgcgtgcaaaacgaccgacaacacattgcccagggtagcacccat

SEQ ID NO: 236772 - DNA, 50 bp, Artificial
  Synthetic oligonucleotide
accgcccacgggggagcttctaaccggcgaaactacagcccaagcgacta

SEQ ID NO: 236773 - DNA, 50 bp, Artificial
  Synthetic oligonucleotide
accgaagccggggacggttggcggtgggaaaaattcgatctccgcatcgg

SEQ ID NO: 236774 - DNA, 50 bp, Artificial
  Synthetic oligonucleotide
aacgcacgagcgtatgggctgggacctcctcatgaacgaacaccgacgtc

SEQ ID NO: 236775 - DNA, 50 bp, Artificial
  Synthetic oligonucleotide
aaccgtgttaggcgaagccagggctgcactaactgttttacgggcggcga

SEQ ID NO: 236776 - DNA, 55 bp, Artificial
  Synthetic oligonucleotide
ctacgctggatatggctaataccagtacagctgctcctgccagcccctactatgt

SEQ ID NO: 236777 - DNA, 50 bp, Artificial
  Synthetic oligonucleotide
tacgccagcgcatcttgtgagttgggtgtgcaataccgtgacggtcaggc

SEQ ID NO: 236778 - DNA, 50 bp, Artificial
  Synthetic oligonucleotide
tacggcaagcggtagcggtcttgacccccatatttccgttcaggcggcaa

SEQ ID NO: 236779 - DNA, 50 bp, Artificial
  Synthetic oligonucleotide
tagacaacagaaccctgattgccgtaaacgaagcattgcgtacacacgaa

SEQ ID NO: 236780 - DNA, 49 bp, Artificial
  Synthetic oligonucleotide
aaccggggcaggtacccagaccaaacccgacggcaccttttctatcccg

SEQ ID NO: 236781 - DNA, 50 bp, Artificial
  Synthetic oligonucleotide
aaccctgcagcgcaaagcgtacgtggcggaatactatcccacaatggccc

SEQ ID NO: 236782 - DNA, 50 bp, Artificial
  Synthetic oligonucleotide
aacacgcgtaggcctgtagacgaatgccccaataccgcctgcgagcgcac

SEQ ID NO: 236783 - DNA, 50 bp, Artificial
  Synthetic oligonucleotide
aacaccacgtattcccatcatccatcgcgggcatccccgggcaccaggta

SEQ ID NO: 236784 - DNA, 50 bp, Artificial
  Synthetic oligonucleotide
aaattccgagcccgtcaatctgggtgcgtcccccggccagaaacctgatc

SEQ ID NO: 236785 - DNA, 50 bp, Artificial
  Synthetic oligonucleotide
aaagggtgatggtttttcggtaaccggcacctgcacgttgggggctgcaa

SEQ ID NO: 236786 - DNA, 50 bp, Artificial
  Synthetic oligonucleotide
aaaggggctgtagcgcctagggaaggacggcattccagggtgagcgtaaa

SEQ ID NO: 236787 - DNA, 58 bp, Artificial
  Synthetic oligonucleotide
ctggtcgcacaggagtggagaagtctttaaacggccagtaagccgatccggtgagcca

SEQ ID NO: 236788 - DNA, 55 bp, Artificial
  Synthetic oligonucleotide
ctcaccccacggtacctcagtgatttgctacgtagcctcgtaggcttaaataccc

SEQ ID NO: 236789 - DNA, 50 bp, Artificial
  Synthetic oligonucleotide
aaaggcggccccatccgaagtttgcgaagaattacccgccgtaaccacgc

SEQ ID NO: 236790 - DNA, 50 bp, Artificial
  Synthetic oligonucleotide
aaagcgcggtcaagctactggcgggcactcccgttatgcttgtctcggag

SEQ ID NO: 236791 - DNA, 50 bp, Artificial
  Synthetic oligonucleotide
ttatatcctgccttacccggagattttatcggacagccgtaccacttcgt

SEQ ID NO: 236792 - DNA, 50 bp, Artificial
  Synthetic oligonucleotide
aaagccgatgtgcgccggtattccggtaacaaactgaccgctctcgggca

SEQ ID NO: 236793 - DNA, 50 bp, Artificial
  Synthetic oligonucleotide
aaacgcgcctcgctacccagctcgtaggtgacggttcggagcggctccaa

SEQ ID NO: 236794 - DNA, 50 bp, Artificial
  Synthetic oligonucleotide
acacgaatgtgccccgcctgtcttatcccgccaattcggcacgcgatgat

SEQ ID NO: 236795 - DNA, 50 bp, Artificial
  Synthetic oligonucleotide
aatggcggatacggcccgcgccacattgcgtttaacccgaaaggcacctt

SEQ ID NO: 236796 - DNA, 50 bp, Artificial
  Synthetic oligonucleotide
aatggcacgcggggttgtattgctggttccaggtccggtccaacgctcat

SEQ ID NO: 236797 - DNA, 50 bp, Artificial
  Synthetic oligonucleotide
aatcgaatgtgcggtgaccctccaggaatagttcgcggccccgctcatct

SEQ ID NO: 236798 - DNA, 50 bp, Artificial
  Synthetic oligonucleotide
aatccccggcctacccgaactcacagaagtcggcgcgttcagaggccaca

SEQ ID NO: 236799 - DNA, 55 bp, Artificial
  Synthetic oligonucleotide
ctccaggctccgtgtacagaacagtgggtttgggcttgccttgtacatcaatcac

SEQ ID NO: 236800 - DNA, 50 bp, Artificial
  Synthetic oligonucleotide
aagtatcgatacgtcgggagcggtggtagcctccggttccctggtaggcg

SEQ ID NO: 236801 - DNA, 50 bp, Artificial
  Synthetic oligonucleotide
aaggcgcccgcgaagcatccgaaaccggtcgtggccggattattttacgt

SEQ ID NO: 236802 - DNA, 50 bp, Artificial
  Synthetic oligonucleotide
aagcgttgcaatggcgcaagctggcaaactcgctccgtttgcgtatgctg

SEQ ID NO: 236803 - DNA, 50 bp, Artificial
  Synthetic oligonucleotide
aagcaccactccaacggtctttttgcaggttgggcgttcggccccaaagg

SEQ ID NO: 236804 - DNA, 50 bp, Artificial
  Synthetic oligonucleotide
aagataatcccggcgtctacacctaaagccttggccatagacgcgaccac

SEQ ID NO: 236805 - DNA, 50 bp, Artificial
  Synthetic oligonucleotide
aagacggacccggcggggcaaagaccacaaccacgcaagaactgcgcgtt

SEQ ID NO: 236806 - DNA, 50 bp, Artificial
  Synthetic oligonucleotide
aacttgcggtaagctcctatcggatcgatagcgccgcctgcgcgtaagct

SEQ ID NO: 236807 - DNA, 50 bp, Artificial
  Synthetic oligonucleotide
aacgtgaaccggcacctttgtgaccgcgtgttgatgtaccaccacggcct

SEQ ID NO: 236808 - DNA, 50 bp, Artificial
  Synthetic oligonucleotide
aacggtgctctgatttggggcacagagcctaccacggctaccccggttac

SEQ ID NO: 236809 - DNA, 50 bp, Artificial
  Synthetic oligonucleotide
aacgggtgtgagcgcgaccggtgtgtttgatccttcggtctcgggtgtgg

SEQ ID NO: 236810 - DNA, 55 bp, Artificial
  Synthetic oligonucleotide
ctccatactgaccgatccggaatgcgtcggccctatcgcttttgcccctgatcat

SEQ ID NO: 236811 - DNA, 50 bp, Artificial
  Synthetic oligonucleotide
aacgggtaaagccttcctgtgccggggataggaactgcccaacgaccaga

SEQ ID NO: 236812 - DNA, 50 bp, Artificial
  Synthetic oligonucleotide
aacggcctcctcacatgcggtacttactgccggatccgtggccacaaaga

SEQ ID NO: 236813 - DNA, 50 bp, Artificial
  Synthetic oligonucleotide
aacgccgaccgaaccgggtgtacccaaccaataccggagccgcagcgtag

SEQ ID NO: 236814 - DNA, 50 bp, Artificial
  Synthetic oligonucleotide
atccctcgtcgctgcgcttccctcgagatgacggggtgtgttaaggacga

SEQ ID NO: 236815 - DNA, 50 bp, Artificial
  Synthetic oligonucleotide
cagcgagcggaggttatacggatgacgcgggggtagccttagggaccggt

SEQ ID NO: 236816 - DNA, 50 bp, Artificial
  Synthetic oligonucleotide
atcatggctcaacgctcgtccgcacaagctgccggaaccgtgtgcaggat

SEQ ID NO: 236817 - DNA, 50 bp, Artificial
  Synthetic oligonucleotide
atcagtagcgctgtgataccctggggccagtccctgcaaatcggagagcg

SEQ ID NO: 236818 - DNA, 50 bp, Artificial
  Synthetic oligonucleotide
caggggtactgtgctgtcgggtgtggacatgaccctgggtgcaggttcta

SEQ ID NO: 236819 - DNA, 50 bp, Artificial
  Synthetic oligonucleotide
cagtcgccgtggcgtaggccccattgaaacctataccggctgggggatag

SEQ ID NO: 236820 - DNA, 50 bp, Artificial
  Synthetic oligonucleotide
atagtactggccgggtgcccctgcctgcaacagtgcaagccctggcgcac

SEQ ID NO: 236821 - DNA, 55 bp, Artificial
  Synthetic oligonucleotide
ctgcaggagatttagccttacctccaaaagtatagcttatctccaggtcctgatc

SEQ ID NO: 236822 - DNA, 50 bp, Artificial
  Synthetic oligonucleotide
cagttctcgggcctctccacacctgtactgggctggttcaacgcctgcta

SEQ ID NO: 236823 - DNA, 50 bp, Artificial
  Synthetic oligonucleotide
catacacaacctgtgccgcttcggtagcccggtgtgccacgtgtttaggc

SEQ ID NO: 236824 - DNA, 50 bp, Artificial
  Synthetic oligonucleotide
atacggtggctgctggcataagactgggctgctgtcaggcaggaatcggc

SEQ ID NO: 236825 - DNA, 50 bp, Artificial
  Synthetic oligonucleotide
catggttctttttacggactcccgcgaacggctggctgggggtatcccga

SEQ ID NO: 236826 - DNA, 50 bp, Artificial
  Synthetic oligonucleotide
atacggcctacattgcccgtatccgagcgctcaatcctgcgccgccacaa

SEQ ID NO: 236827 - DNA, 50 bp, Artificial
  Synthetic oligonucleotide
ccacgagcgggctggcttgactgggatgttggactgacgcatgcgataga

SEQ ID NO: 236828 - DNA, 50 bp, Artificial
  Synthetic oligonucleotide
ccagctgcgttaagtcgggtccgatagaaccaccctcaccccgtaccgta

SEQ ID NO: 236829 - DNA, 50 bp, Artificial
  Synthetic oligonucleotide
atacccgaagatccggcagaaaacagcgtttggccgactgtggccatgcc

SEQ ID NO: 236830 - DNA, 50 bp, Artificial
  Synthetic oligonucleotide
ccccaattccccggcagcccagaattcgcccgcaacttcgtccgactggc

SEQ ID NO: 236831 - DNA, 50 bp, Artificial
  Synthetic oligonucleotide
ataagtccgtggcaccgggtatccacccgaagcatccctgcctagcgcag

SEQ ID NO: 236832 - DNA, 55 bp, Artificial
  Synthetic oligonucleotide
cttagtgtccaaaatacacaccagttataaccgagcttaaaggcgcctcagagtg

SEQ ID NO: 236833 - DNA, 50 bp, Artificial
  Synthetic oligonucleotide
cccggccggttactcgctttggttaccgtagcgcccgcaactgttccctg

SEQ ID NO: 236834 - DNA, 50 bp, Artificial
  Synthetic oligonucleotide
cccgttctgcaatagcgggacagagaggcgcactgaaccctcaagcagcg

SEQ ID NO: 236835 - DNA, 50 bp, Artificial
  Synthetic oligonucleotide
agtgtgcgcatccgctgtccagttccggtcctttaaccaggccacaccgg

SEQ ID NO: 236836 - DNA, 50 bp, Artificial
  Synthetic oligonucleotide
atggggtctaaaccggaacgtacccagtggccaatatcggcacaggcgcc

SEQ ID NO: 236837 - DNA, 50 bp, Artificial
  Synthetic oligonucleotide
atgatcgatgcagacgcagctctcgccctccgcaggtctttgtgtggagc

SEQ ID NO: 236838 - DNA, 50 bp, Artificial
  Synthetic oligonucleotide
atgaaaggcacgatcctcgcagcccgtccacacacccgcaaccagttgtg

SEQ ID NO: 236839 - DNA, 50 bp, Artificial
  Synthetic oligonucleotide
attccacccgcaacaccgacaatcaagcccagcggacctgcaagcaggcc

SEQ ID NO: 236840 - DNA, 50 bp, Artificial
  Synthetic oligonucleotide
attgctcgagccacctccggtaagcccgttcaaggcttcatcggttgcca

SEQ ID NO: 236841 - DNA, 50 bp, Artificial
  Synthetic oligonucleotide
caaaatagtagcagataagcgtattgatttgattaaggcctatccgcagg

SEQ ID NO: 236842 - DNA, 50 bp, Artificial
  Synthetic oligonucleotide
caaaggaatcctggcgaatgcagggctgattgttgtggcgccatgctgcc

SEQ ID NO: 236843 - DNA, 55 bp, Artificial
  Synthetic oligonucleotide
gaacgcctgatcttatgctccagtgcaatggaaactgcatctcccttactggccg

SEQ ID NO: 236844 - DNA, 50 bp, Artificial
  Synthetic oligonucleotide
atcgtaggggctggataaccagtcggcccgtgcaaagccaaatgcgcttc

SEQ ID NO: 236845 - DNA, 50 bp, Artificial
  Synthetic oligonucleotide
caatccaaactggatgagggtacccagtgcagcccccgcaagagcaccga

SEQ ID NO: 236846 - DNA, 50 bp, Artificial
  Synthetic oligonucleotide
cacagacgcacttcggaacggccgtgcttacacggggctttcgagcggag

SEQ ID NO: 236847 - DNA, 50 bp, Artificial
  Synthetic oligonucleotide
cacccaacctacggccactgagccgaaattggcccgtggattgcgctgtc

SEQ ID NO: 236848 - DNA, 50 bp, Artificial
  Synthetic oligonucleotide
caccccggtggcacgcagtaaaggaccagtccagctgtagtccaaagcct

SEQ ID NO: 236849 - DNA, 50 bp, Artificial
  Synthetic oligonucleotide
cacccctgcgcgcaaaacgcatgtgctgagggcgtcactggtatcaggga

SEQ ID NO: 236850 - DNA, 50 bp, Artificial
  Synthetic oligonucleotide
caccggctacagaagctacgacggtggcggcaatttttcccggagcagta

SEQ ID NO: 236851 - DNA, 50 bp, Artificial
  Synthetic oligonucleotide
atcgggagggagcaagcgggacaagtgggtggaagcgcccgtattagcaa

SEQ ID NO: 236852 - DNA, 50 bp, Artificial
  Synthetic oligonucleotide
atccgcggcaagtgtgtgtccgaaggcggctctcagctccgatgtgacgg

SEQ ID NO: 236853 - DNA, 50 bp, Artificial
  Synthetic oligonucleotide
cactgccgtgctagaccgggttcggcgacaacaaattagggctgaagcgc

SEQ ID NO: 236854 - DNA, 55 bp, Artificial
  Synthetic oligonucleotide
gacatagccaacgtaagtccgttaagcaaactttcgagcaggttttgggtatgat

SEQ ID NO: 236855 - DNA, 50 bp, Artificial
  Synthetic oligonucleotide
atccgcgctgcaaccgtatcaaaattcctgggctgtccctgtgcgtccac

SEQ ID NO: 236856 - DNA, 50 bp, Artificial
  Synthetic oligonucleotide
atccgccatcaaccttttccccgcgtgcaccataacggctcccggcagca

SEQ ID NO: 236857 - DNA, 50 bp, Artificial
  Synthetic oligonucleotide
cagaacgtgttgctgcggtgcagcgactaacctgggcctacctgcgtacg

SEQ ID NO: 236858 - DNA, 50 bp, Artificial
  Synthetic oligonucleotide
atccctgcctagcgcagtaacactctccgggttgggtccgctgtacgggg

SEQ ID NO: 236859 - DNA, 50 bp, Artificial
  Synthetic oligonucleotide
cggtaaccaccttagccgaggcggcatcattggcacaggcatcgcttcca

SEQ ID NO: 236860 - DNA, 50 bp, Artificial
  Synthetic oligonucleotide
agccagcgttgctgggcagcgctccacacctccatatcgtaggtcatcgc

SEQ ID NO: 236861 - DNA, 50 bp, Artificial
  Synthetic oligonucleotide
agcatgatttgcttggatcggcttatgcgacctgtggggaccgcccaggg

SEQ ID NO: 236862 - DNA, 50 bp, Artificial
  Synthetic oligonucleotide
cgtaaataccccagcccgagccggcctgagaaccccacacgcctatgccc

SEQ ID NO: 236863 - DNA, 50 bp, Artificial
  Synthetic oligonucleotide
cgtaagacggattgggtacctggccgccttcgtatccggagcgtacgcta

SEQ ID NO: 236864 - DNA, 50 bp, Artificial
  Synthetic oligonucleotide
agcatacctaccaggcccggccattgtccgctccagttggctaccgttaa

SEQ ID NO: 236865 - DNA, 55 bp, Artificial
  Synthetic oligonucleotide
gacttttggatctgtaccacgggcccaagagatctgtatccggttaagacctggc

SEQ ID NO: 236866 - DNA, 50 bp, Artificial
  Synthetic oligonucleotide
agcagcccggcattaagggccctaaccacggcaagaaactttgcgcaggt

SEQ ID NO: 236867 - DNA, 50 bp, Artificial
  Synthetic oligonucleotide
agcacgcccgtactactcgtacctgccacacacacgttcagtccgccgaa

SEQ ID NO: 236868 - DNA, 50 bp, Artificial
  Synthetic oligonucleotide
agattcgcatcgtgcactactgtgtacaggccctgccaggttgggagccc

SEQ ID NO: 236869 - DNA, 50 bp, Artificial
  Synthetic oligonucleotide
agatcctgcgatccctcccgttggaaggcaaaagccaaccgtgccagcgg

SEQ ID NO: 236870 - DNA, 50 bp, Artificial
  Synthetic oligonucleotide
agaggtgacacaaaaggcgtgagcgttccacgtccaggcgtatggcccta

SEQ ID NO: 236871 - DNA, 50 bp, Artificial
  Synthetic oligonucleotide
agagctgggcctatgggcagattacatgttgatcgcgcctgccagtgcga

SEQ ID NO: 236872 - DNA, 50 bp, Artificial
  Synthetic oligonucleotide
agagcgcaataagctgccgcggatagacagacggtaactgcccggagagc

SEQ ID NO: 236873 - DNA, 50 bp, Artificial
  Synthetic oligonucleotide
ctgcataccccaaacgttcccaggcatatccgggcttcccatgtccgccc

SEQ ID NO: 236874 - DNA, 50 bp, Artificial
  Synthetic oligonucleotide
agagccggggctgcatccttaccagccaccatagccccagcgcgaggatt

SEQ ID NO: 236875 - DNA, 50 bp, Artificial
  Synthetic oligonucleotide
agactcgatagccgggccttcgccaaaaaccgtccacgggcgggtaccat

SEQ ID NO: 236876 - DNA, 55 bp, Artificial
  Synthetic oligonucleotide
gagctactccagtccagcgcaatatagctgaatcatcattgctcgtcataatcgg

SEQ ID NO: 236877 - DNA, 50 bp, Artificial
  Synthetic oligonucleotide
ctttctggtgcaacggccccagtccaaggctgcaagcgggctcgatttag

SEQ ID NO: 236878 - DNA, 50 bp, Artificial
  Synthetic oligonucleotide
agacatccgcgtacggttggttacctgcacgttcaggctgggtatggccg

SEQ ID NO: 236879 - DNA, 50 bp, Artificial
  Synthetic oligonucleotide
gaagcgtctctgcaaggagtgaaccgtcagtaaagtagtcgcgctgatat

SEQ ID NO: 236880 - DNA, 50 bp, Artificial
  Synthetic oligonucleotide
gacaaccgtgacagtgcctttggggcccggcaacccgtggaattgatccc

SEQ ID NO: 236881 - DNA, 50 bp, Artificial
  Synthetic oligonucleotide
agtccgctacgcgggcgaatctgtgcctcgaaacctacaggcagctcaat

SEQ ID NO: 236882 - DNA, 50 bp, Artificial
  Synthetic oligonucleotide
agtattggaaaccgcaaggggcggaatcctcagagccggcctgggcttta

SEQ ID NO: 236883 - DNA, 50 bp, Artificial
  Synthetic oligonucleotide
ccggcaggcacgggttcgtcaatacgggaagcattggggagccaatccat

SEQ ID NO: 236884 - DNA, 50 bp, Artificial
  Synthetic oligonucleotide
ccggtaaggaactggttaagggcagggcggctaaaaggacctgcgccact

SEQ ID NO: 236885 - DNA, 50 bp, Artificial
  Synthetic oligonucleotide
ccgttccactgtatcttcgaaccgctcccgcattccagcctggcggtctt

SEQ ID NO: 236886 - DNA, 50 bp, Artificial
  Synthetic oligonucleotide
aggtgatggtccgtgcccgtggatacgcgctccagtcaaaaccaggtgta

SEQ ID NO: 236887 - DNA, 55 bp, Artificial
  Synthetic oligonucleotide
gatgttagccagcaaatggtaatccaagccgcaatcgtcaactgtggtgagacca

SEQ ID NO: 236888 - DNA, 50 bp, Artificial
  Synthetic oligonucleotide
cctgcatgtcgggcgtaacccgccgtaatgcttaccgctatgcgggtgtg

SEQ ID NO: 236889 - DNA, 50 bp, Artificial
  Synthetic oligonucleotide
aggcaagcatcaccgctgttgcaaagttctccgcacgggcccagatggga

SEQ ID NO: 236890 - DNA, 50 bp, Artificial
  Synthetic oligonucleotide
aggacttggcccgtagccaccgtatcgagctccgcattcccgtaatcgga

SEQ ID NO: 236891 - DNA, 50 bp, Artificial
  Synthetic oligonucleotide
aggaccggatttcagccagttggcagcatccaggagtgatctggccggat

SEQ ID NO: 236892 - DNA, 50 bp, Artificial
  Synthetic oligonucleotide
aggaacatgactcccctggtagggttgtcgggccctgcactgttcaacgc

SEQ ID NO: 236893 - DNA, 50 bp, Artificial
  Synthetic oligonucleotide
agcggcaccattggttgcgcggcccaaatcggctgtagcataactggtag

SEQ ID NO: 236894 - DNA, 50 bp, Artificial
  Synthetic oligonucleotide
agcggatgcacatgcactaccaccgcgtcagacatcacgttagccctgct

SEQ ID NO: 236895 - DNA, 50 bp, Artificial
  Synthetic oligonucleotide
agcgacacgacgcaaagcgcggtcaagctactggcgggcactcccgttat

SEQ ID NO: 236896 - DNA, 50 bp, Artificial
  Synthetic oligonucleotide
agccgggcttcaaagccggagtcaacctttagcccccgggtagcgatggt

SEQ ID NO: 236897 - DNA, 50 bp, Artificial
  Synthetic oligonucleotide
agccggctccatattgtcgggccgtttcccaggtcagatcgcggttacca

SEQ ID NO: 236898 - DNA, 57 bp, Artificial
  Synthetic oligonucleotide
cggcaccggattatctggtcgcacaggagtggagaagtctttaaacggccagtaagc

SEQ ID NO: 236899 - DNA, 55 bp, Artificial
  Synthetic oligonucleotide
acggacgctaatcaccaagatcatgaatcgtcgtgcgttgcacctcagatcggct

SEQ ID NO: 236900 - DNA, 50 bp, Artificial
  Synthetic oligonucleotide
agccgccaggccaatagggccgacaatcccaggtaggccatgaaccataa

SEQ ID NO: 236901 - DNA, 50 bp, Artificial
  Synthetic oligonucleotide
agccgcaaaaaggcttaccggcgcgtgcaaaacgaccgacaacacattgc

SEQ ID NO: 236902 - DNA, 50 bp, Artificial
  Synthetic oligonucleotide
agccccgacgcgcatgcttataatgcggtggtaggcggtttagtacccgg

SEQ ID NO: 236903 - DNA, 50 bp, Artificial
  Synthetic oligonucleotide
agcccaggccgactcattgagaaggacccgggaggagactccagccaaac

SEQ ID NO: 236904 - DNA, 50 bp, Artificial
  Synthetic oligonucleotide
agccatgatatccgtgggccgttagcaggcataatggccgctgctcagct

SEQ ID NO: 236905 - DNA, 55 bp, Artificial
  Synthetic oligonucleotide
gattcatcatcctatcgcattgtggtttaccccaataccgtacaagccaacctgg

SEQ ID NO: 236906 - DNA, 55 bp, Artificial
  Synthetic oligonucleotide
gcaacgagcctacacatgcgcccgcccgtattacttatgtaatgataggtacggg

SEQ ID NO: 236907 - DNA, 55 bp, Artificial
  Synthetic oligonucleotide
atgtatgttcgtacaatagctcaggtgtccggtattaactttcatggcggatgct

SEQ ID NO: 236908 - DNA, 55 bp, Artificial
  Synthetic oligonucleotide
atgttgatatgcgaaacgggccgggagtaggtgccgcaattggaggaattccgga

SEQ ID NO: 236909 - DNA, 55 bp, Artificial
  Synthetic oligonucleotide
caaataagctgctacacatcattactgatcgaatgcgcataaaacaagtgcatag

SEQ ID NO: 236910 - DNA, 55 bp, Artificial
  Synthetic oligonucleotide
caaatccagggacacgataatggcttatagccctcagtataaaaggatgcagtcc

SEQ ID NO: 236911 - DNA, 55 bp, Artificial
  Synthetic oligonucleotide
cacggctgtcctgacggatatcgagggttgtaaagtagcatccgaaagtcacgac

SEQ ID NO: 236912 - DNA, 55 bp, Artificial
  Synthetic oligonucleotide
cactcgtgttgcaatcacctcactttagcggcattaccgagtaaccaatggagcg

SEQ ID NO: 236913 - DNA, 55 bp, Artificial
  Synthetic oligonucleotide
cagaaccgtaataaatgctccatatcgcctgtcgtaccataccacttttgcgctc

SEQ ID NO: 236914 - DNA, 51 bp, Artificial
  Synthetic oligonucleotide
gataacccttttatcgttcaaaggcaaggtttcgttcgcaaaattcaaact

SEQ ID NO: 236915 - DNA, 55 bp, Artificial
  Synthetic oligonucleotide
cagaacctgtccatgctgcctgaattgggccgttagcataattatgtccgcctac

SEQ ID NO: 236916 - DNA, 55 bp, Artificial
  Synthetic oligonucleotide
cagattagcttgaaaggcaaggctgggacccaatattttggtgatgagtcgcact

SEQ ID NO: 236917 - DNA, 55 bp, Artificial
  Synthetic oligonucleotide
cagcgactatgaacgtcaacttgtgaatgaccttgcccgcaactcaggacacccc

SEQ ID NO: 236918 - DNA, 55 bp, Artificial
  Synthetic oligonucleotide
caggacctacattgatcacatctagccgattatcgatgcggacactgatccgatg

SEQ ID NO: 236919 - DNA, 55 bp, Artificial
  Synthetic oligonucleotide
cagggagcttcagcaagcaggccaggtctcgcttatccttcgcgactaagtagga

SEQ ID NO: 236920 - DNA, 55 bp, Artificial
  Synthetic oligonucleotide
cagtacccggtaccacacgagttgtatggcgtttattgaaattaatgcgcctaag

SEQ ID NO: 236921 - DNA, 55 bp, Artificial
  Synthetic oligonucleotide
cagtcgtacgctgcatttctttcccggcgcagctgacgtctttctgccctggccg

SEQ ID NO: 236922 - DNA, 55 bp, Artificial
  Synthetic oligonucleotide
atagccaatgagcgcatcagcggttgcccgttttgggtagcttcgtaaaatgccg

SEQ ID NO: 236923 - DNA, 55 bp, Artificial
  Synthetic oligonucleotide
catgcggtaggtactgtcgccatcgttcttatagttcttggctgcgtttacccca

SEQ ID NO: 236924 - DNA, 55 bp, Artificial
  Synthetic oligonucleotide
ccaaagcaacgccatccactacgtacagtggttgcccggtacctgtaacagccga

SEQ ID NO: 236925 - DNA, 55 bp, Artificial
  Synthetic oligonucleotide
cgttgaccggaggtccggacatcacgcagacaggaaccgtgattgcggtgactcc

SEQ ID NO: 236926 - DNA, 55 bp, Artificial
  Synthetic oligonucleotide
ccatgagaaattcggtatcggggcaggttacagacaacgtggcgatctgatggga

SEQ ID NO: 236927 - DNA, 55 bp, Artificial
  Synthetic oligonucleotide
cccaatgggctataagtgatgatacccggcgaatagcgctggtaactgtaattag

SEQ ID NO: 236928 - DNA, 55 bp, Artificial
  Synthetic oligonucleotide
cccgaattagatgcgcctaaaggtctggctagctgtttacaccacgtgcagtcgc

SEQ ID NO: 236929 - DNA, 55 bp, Artificial
  Synthetic oligonucleotide
ccctgatcatacccatcgattgcttaatctctagtccaggcacccgccgataagc

SEQ ID NO: 236930 - DNA, 55 bp, Artificial
  Synthetic oligonucleotide
ccgctatcacgataagttggctgtgtcgggctggtataaacgccgcttacacgag

SEQ ID NO: 236931 - DNA, 55 bp, Artificial
  Synthetic oligonucleotide
ccggatgtagactggtacaatgccgtgtttagaaacaatgcttaccaggtccgca

SEQ ID NO: 236932 - DNA, 55 bp, Artificial
  Synthetic oligonucleotide
ccgggctacgcaattaccagacagatctcaagattacgatcgaaaatcctccgca

SEQ ID NO: 236933 - DNA, 55 bp, Artificial
  Synthetic oligonucleotide
ccgtaaaccacggtgcttgtcgtataattacagtttccgctgtcgtacagagctc

SEQ ID NO: 236934 - DNA, 55 bp, Artificial
  Synthetic oligonucleotide
ccgttggccaggtagggtgtgtaatgaggtattcgtgtgaattacgtgctattgt

SEQ ID NO: 236935 - DNA, 55 bp, Artificial
  Synthetic oligonucleotide
cctgcgaattcatatcggctaaatggttacgtagtatccagatgcgttgcagtgt

SEQ ID NO: 236936 - DNA, 55 bp, Artificial
  Synthetic oligonucleotide
cgtgtagtagaaagccggggatttccatttaatgtgctctgcaatatcggaatcc

SEQ ID NO: 236937 - DNA, 55 bp, Artificial
  Synthetic oligonucleotide
cgaatgataagacaccttacaagacctggttcagtgccggcatatctgttgacgg

SEQ ID NO: 236938 - DNA, 55 bp, Artificial
  Synthetic oligonucleotide
cgacagccaatcgtaaacttctaatttctggcatcctccagtaaggcatgagcca

SEQ ID NO: 236939 - DNA, 55 bp, Artificial
  Synthetic oligonucleotide
cgagctgtctatggttacattggcacccgaagccagggtaatagccgagttgccg

SEQ ID NO: 236940 - DNA, 55 bp, Artificial
  Synthetic oligonucleotide
cgaggtacggcatgatgccaggcgcccgttcattgtgagtactgatcaactgcat

SEQ ID NO: 236941 - DNA, 51 bp, Artificial
  Synthetic oligonucleotide
ggtcgttcctttgtttacgaggttctccacttcgttaaggctcaaccgtac

SEQ ID NO: 236942 - DNA, 55 bp, Artificial
  Synthetic oligonucleotide
aatacaatccccactacgttaaaagtagtcgcttccacgatatcttgagcgctcc

SEQ ID NO: 236943 - DNA, 55 bp, Artificial
  Synthetic oligonucleotide
ggttacgttactaaggtaaataccaatgtaggcagatttgtcgcacccaacgatg

SEQ ID NO: 236944 - DNA, 55 bp, Artificial
  Synthetic oligonucleotide
aagtacattgggaagccagcttactcaatggtgcaaattatgttcgccaggtttt

SEQ ID NO: 236945 - DNA, 55 bp, Artificial
  Synthetic oligonucleotide
gtaagtaggatacaatacagatgcgttgaccagtacagcaagaataaccgctgtt

SEQ ID NO: 236946 - DNA, 55 bp, Artificial
  Synthetic oligonucleotide
gtaatcgttgtttagttaactaatggggtcgcttatcagctttacaatcgctcgc

SEQ ID NO: 236947 - DNA, 50 bp, Artificial
  Synthetic oligonucleotide
cggtttcccgtcgctaaattaccgtaaaacgtacaattgacaataacagg

SEQ ID NO: 236948 - DNA, 55 bp, Artificial
  Synthetic oligonucleotide
gtactcggccataccctctatcatccataaggggatctggcttacattttccagg

SEQ ID NO: 236949 - DNA, 55 bp, Artificial
  Synthetic oligonucleotide
gtagcacaggcaactgcatggtatggccccggacaaaccaaaattcagtcgtaca

SEQ ID NO: 236950 - DNA, 55 bp, Artificial
  Synthetic oligonucleotide
gtcgattaccagccctgtcttagacctgatgaggtctgtatgcccatcatgttta

SEQ ID NO: 236951 - DNA, 55 bp, Artificial
  Synthetic oligonucleotide
gtcttgacaggcatgtaatagggataatgttcctgactactttgataaacccagt

SEQ ID NO: 236952 - DNA, 55 bp, Artificial
  Synthetic oligonucleotide
gtgaatctgattatacaggcctatgaaggaggtgtcaactactttgatacggcag

SEQ ID NO: 236953 - DNA, 55 bp, Artificial
  Synthetic oligonucleotide
gtgcaataaactcatcgattagtaaagcatgtcttgctatccgctgcgcgtcgga

SEQ ID NO: 236954 - DNA, 55 bp, Artificial
  Synthetic oligonucleotide
gtggctacaggttttaatggcaacggaatgacttttggaactctatcggccaaga

SEQ ID NO: 236955 - DNA, 55 bp, Artificial
  Synthetic oligonucleotide
gtgttgacttgttcacccaggaaatatacgtcagtttggctgtagccctcgtctt

SEQ ID NO: 236956 - DNA, 55 bp, Artificial
  Synthetic oligonucleotide
tacaaatgtggtgcgtatgttgccttacatccctctgcatgatccaaccacggcc

SEQ ID NO: 236957 - DNA, 55 bp, Artificial
  Synthetic oligonucleotide
tacaatcgattattggagtttaccggtatgacccctgtagaatttatacgtgccg

SEQ ID NO: 236958 - DNA, 55 bp, Artificial
  Synthetic oligonucleotide
cggtagtgccattgttagccgcggtggttaatgcttcgcgcaaagtgcccggccc

SEQ ID NO: 236959 - DNA, 55 bp, Artificial
  Synthetic oligonucleotide
taccacacagggactacgtccttccaccgctctaagtgcgccgatagccacgtcg

SEQ ID NO: 236960 - DNA, 55 bp, Artificial
  Synthetic oligonucleotide
tacctcgctgccaagcgcccttgggtcgcccgcatactgtccctgtatggcattg

SEQ ID NO: 236961 - DNA, 55 bp, Artificial
  Synthetic oligonucleotide
tattcaactgtaccacacattctttgttcagggacttttagggcgttatcccgtg

SEQ ID NO: 236962 - DNA, 55 bp, Artificial
  Synthetic oligonucleotide
tccaccaatcaataatagtgatccgttgaccggaggtccggacatcacgcagaca

SEQ ID NO: 236963 - DNA, 55 bp, Artificial
  Synthetic oligonucleotide
aaccattcgtaaatgaactggtgcgacaataatgcacctaccttacccagccagt

SEQ ID NO: 236964 - DNA, 55 bp, Artificial
  Synthetic oligonucleotide
tcccagcggctatgaacttcgcagcaacagttgcctgcatgaacgccagcccaga

SEQ ID NO: 236965 - DNA, 52 bp, Artificial
  Synthetic oligonucleotide
tccctacttcaatcttactaaacgtaaaacccttaggtgtcaaacagtccgc

SEQ ID NO: 236966 - DNA, 55 bp, Artificial
  Synthetic oligonucleotide
tccctgtcctgccgttgtcgtagcctctgtttgtaaaggaagatctccccatacc

SEQ ID NO: 236967 - DNA, 55 bp, Artificial
  Synthetic oligonucleotide
tcggacagagtgataatgccctgatcgtaacgtctaccaaactcacacatgctcc

SEQ ID NO: 236968 - DNA, 55 bp, Artificial
  Synthetic oligonucleotide
tgggatatgtattccggcgtgcttctaccagcgttaattatgcggatattatttc

SEQ ID NO: 236969 - DNA, 53 bp, Artificial
  Synthetic oligonucleotide
cgggtgtcggtactaattaccgggtgttgcaggtaagtttggtaaagctgctc

SEQ ID NO: 236970 - DNA, 55 bp, Artificial
  Synthetic oligonucleotide
tggtagtcaattacgggcatctgactggcatactgatggtacaataacaccgctg

SEQ ID NO: 236971 - DNA, 55 bp, Artificial
  Synthetic oligonucleotide
ttacagaacctcgatatagtctacaattacggaacgtttgacgatagtgatccgc

SEQ ID NO: 236972 - DNA, 55 bp, Artificial
  Synthetic oligonucleotide
ttctgataccgctagtcataaaagcgcagacatctcctactgaaggcatgcaata

SEQ ID NO: 236973 - DNA, 55 bp, Artificial
  Synthetic oligonucleotide
gcaggagcattataaccgatctcggtagattttaagcggacaaaggcaccgtttt

SEQ ID NO: 236974 - DNA, 55 bp, Artificial
  Synthetic oligonucleotide
gcagtattatcttcttatcacaaacggggcatgcctacaaatttgtctgacctgg

SEQ ID NO: 236975 - DNA, 55 bp, Artificial
  Synthetic oligonucleotide
gcccgggggcgatatgagcatagtacaggccaaacctgccagggtaaggcaaacg

SEQ ID NO: 236976 - DNA, 55 bp, Artificial
  Synthetic oligonucleotide
gcccgtagaagcacattcaccggcggatgcgagactgattttagtgggtgctcaa

SEQ ID NO: 236977 - DNA, 50 bp, Artificial
  Synthetic oligonucleotide
gccgacgcacaaccgttggttattgagggtaatttaaccgataaaaccgg

SEQ ID NO: 236978 - DNA, 55 bp, Artificial
  Synthetic oligonucleotide
gccgccctggtgttttcactttcccgtacggcctatgtcgctgcaatatcgggta

SEQ ID NO: 236979 - DNA, 55 bp, Artificial
  Synthetic oligonucleotide
accgggtgctcacctattcctcgcgtccattcaataccacttgtgcggacgaggc

SEQ ID NO: 236980 - DNA, 58 bp, Artificial
  Synthetic oligonucleotide
cgaatacggagcatgagacgcccttcggtggggaaggacggtggagcaaaggatgcat

SEQ ID NO: 236981 - DNA, 60 bp, Artificial
  Synthetic oligonucleotide
cgcccactggatcatgtgcgaggcgatccgggcttatgtggaccgcgaggaagctcgcga

SEQ ID NO: 236982 - DNA, 60 bp, Artificial
  Synthetic oligonucleotide
agcctatagccctcgccactggtctgccgattagtggcgacgagcatgtcataggcttgc

SEQ ID NO: 236983 - DNA, 53 bp, Artificial
  Synthetic oligonucleotide
tcgttcggctagaggtaaagtcttgttcatagagttggcctttgagacgaaat

SEQ ID NO: 236984 - DNA, 53 bp, Artificial
  Synthetic oligonucleotide
aagagcagcagactcttgtataagatcgttataatagcctgtctgcggacgaa

SEQ ID NO: 236985 - DNA, 53 bp, Artificial
  Synthetic oligonucleotide
tttcggacgcctgcgtttcggtaggggtagcgctctccagtgtcgctttaggt

SEQ ID NO: 236986 - DNA, 53 bp, Artificial
  Synthetic oligonucleotide
taacgctatagaaaacgtaattctgtctattttgggttccgcaggtagacaga

SEQ ID NO: 236987 - DNA, 53 bp, Artificial
  Synthetic oligonucleotide
tgttgacccgcagacgcattcttgaagggtatatagtccgcctctttggcgcg

SEQ ID NO: 236988 - DNA, 53 bp, Artificial
  Synthetic oligonucleotide
taggcagcgtggacaaattcgaaaatgtcgtgaaatggccatgagcggtcatt

SEQ ID NO: 236989 - DNA, 53 bp, Artificial
  Synthetic oligonucleotide
tcgttgatgataaactcgtcgattttcgtccgaagggccccttgcgcgtgaat

SEQ ID NO: 236990 - DNA, 53 bp, Artificial
  Synthetic oligonucleotide
ggtagtatggctgatataatagggagacatatcaaagtcataaggagaagatc

SEQ ID NO: 236991 - DNA, 53 bp, Artificial
  Synthetic oligonucleotide
acaggacgccactttgctgacggcgctacgtatgtcgcgtgccctgcgaaccg

SEQ ID NO: 236992 - DNA, 53 bp, Artificial
  Synthetic oligonucleotide
gtccagtccgatttgatcgtgacgtgggcggagataccgcgttcaccggggca

SEQ ID NO: 236993 - DNA, 52 bp, Artificial
  Synthetic oligonucleotide
agcctgtaaacggttggattagaactacagaagtaacgcgaggaaaagacgg

SEQ ID NO: 236994 - DNA, 53 bp, Artificial
  Synthetic oligonucleotide
gttcagcggtggtaacaccggcaaagcgctcgtgcgtctgggctcgtaatttg

SEQ ID NO: 236995 - DNA, 53 bp, Artificial
  Synthetic oligonucleotide
ttcaacattagtgagaagagtttttctgtcatgtatcaggccttggacggctc

SEQ ID NO: 236996 - DNA, 53 bp, Artificial
  Synthetic oligonucleotide
ttcccgccgtgcgtgtacctgtcgcctatgctacatggcgccgggaatcgggg

SEQ ID NO: 236997 - DNA, 53 bp, Artificial
  Synthetic oligonucleotide
gaggtcttatcatcgattcatacatcttagtcaggatctccacttctagatag

SEQ ID NO: 236998 - DNA, 53 bp, Artificial
  Synthetic oligonucleotide
tacttcaataacacgccagcccctgcattcgtgactgttcacgcagcagagac

SEQ ID NO: 236999 - DNA, 53 bp, Artificial
  Synthetic oligonucleotide
tcaccgctcgcttccaccagatgctctcgatctatgcagcgtttaacggcgat

SEQ ID NO: 237000 - DNA, 53 bp, Artificial
  Synthetic oligonucleotide
gcatcaggggatcaatcatgaccattacgcgcgaatcgcttgttcacgagatt

SEQ ID NO: 237001 - DNA, 53 bp, Artificial
  Synthetic oligonucleotide
aaagctccaactcttcattgcaccgcacaacgggatgtgctgatccttccatc

SEQ ID NO: 237002 - DNA, 53 bp, Artificial
  Synthetic oligonucleotide
ggggctgtcgagaaaatgggtatgccgctgggccgacgatagcacccctgccg

SEQ ID NO: 237003 - DNA, 53 bp, Artificial
  Synthetic oligonucleotide
gaatgccgctgcgctctaacggatcacgaaaacgcgcttctgctgtcttgcgc

SEQ ID NO: 237004 - DNA, 49 bp, Artificial
  Synthetic oligonucleotide
agcgtttaaaagatcgtaaagaatttaaatccgttttgggttggatacg

SEQ ID NO: 237005 - DNA, 53 bp, Artificial
  Synthetic oligonucleotide
gcaaacgctaaggtcgcgcttgaatatcttatgcctggcggagggtgcatctt

SEQ ID NO: 237006 - DNA, 53 bp, Artificial
  Synthetic oligonucleotide
tcaaggaggcttcgagatagtagctgatgttagatacagaccttctgcacttt

SEQ ID NO: 237007 - DNA, 53 bp, Artificial
  Synthetic oligonucleotide
ttcttaccggcgataaaggcgttggacgtgatggtaaaccacgtgatgatttt

SEQ ID NO: 237008 - DNA, 53 bp, Artificial
  Synthetic oligonucleotide
gtacgcacaaaggacttagcgtgctggtcgtaagccatgctgaaaggagcgaa

SEQ ID NO: 237009 - DNA, 53 bp, Artificial
  Synthetic oligonucleotide
gaagcctatgtctttgctaaaggggataaatcgactgcccatgtgggagatcg

SEQ ID NO: 237010 - DNA, 53 bp, Artificial
  Synthetic oligonucleotide
gtttgtcagcacgaaatgagcttcaattacataggctggagcgactaaaatag

SEQ ID NO: 237011 - DNA, 53 bp, Artificial
  Synthetic oligonucleotide
gctcgcaatcttgcacgtcatggctagtggggtggcctggaaatgcctaatat

SEQ ID NO: 237012 - DNA, 53 bp, Artificial
  Synthetic oligonucleotide
gtttgtcgagtgcgaaaaccgccaattgacgaagccattccatctgctcccga

SEQ ID NO: 237013 - DNA, 53 bp, Artificial
  Synthetic oligonucleotide
caatcttccatctggtcgattaaggaagccggatttaaagactgtgtgctaac

SEQ ID NO: 237014 - DNA, 53 bp, Artificial
  Synthetic oligonucleotide
attgggatgtcaattccacctatggcggcaattttattcggaatgacctcgat

SEQ ID NO: 237015 - DNA, 60 bp, Artificial
  Synthetic oligonucleotide
agctcttgcgccgatcgttgcgtcaagagttgtcgcacgcataggtataagtacaagatc

SEQ ID NO: 237016 - DNA, 53 bp, Artificial
  Synthetic oligonucleotide
attgcactggagcctctatcgccgccacatcagtttcgcagggcactgaaata

SEQ ID NO: 237017 - DNA, 53 bp, Artificial
  Synthetic oligonucleotide
caccttatgatggccaaaccgttattcttgatcgcggactatataaaagctgc

SEQ ID NO: 237018 - DNA, 51 bp, Artificial
  Synthetic oligonucleotide
acggcccgggtacttttcttttcagggtctgtcgatcatccgtcgggacgt

SEQ ID NO: 237019 - DNA, 53 bp, Artificial
  Synthetic oligonucleotide
ctcgtccgctggcggatcgagacagagggatgggtcgtgacgttggtgaacga

SEQ ID NO: 237020 - DNA, 53 bp, Artificial
  Synthetic oligonucleotide
atcggaacgtaaagcggaagcaagccagcgctgggataggcgtggttcgccca

SEQ ID NO: 237021 - DNA, 53 bp, Artificial
  Synthetic oligonucleotide
ctaaggcgtcaatgtctgccgtatcgacagtcgcaccacaccaaatgcgcaaa

SEQ ID NO: 237022 - DNA, 53 bp, Artificial
  Synthetic oligonucleotide
atcaggttgaatcggtgcaaaagcgacacctgtggcgggcgctaaactatcga

SEQ ID NO: 237023 - DNA, 53 bp, Artificial
  Synthetic oligonucleotide
ctgctatttcgccagaactgtcgaggcaccttgtaagcgaacggtaagccgaa

SEQ ID NO: 237024 - DNA, 51 bp, Artificial
  Synthetic oligonucleotide
ccaagacgctcattacgtgggggagggaagaccgtgtaaacccccttgaaa

SEQ ID NO: 237025 - DNA, 53 bp, Artificial
  Synthetic oligonucleotide
ccataatgctcgcggaccaacgataggatctgctcacgaaaggcatcactatg

SEQ ID NO: 237026 - DNA, 60 bp, Artificial
  Synthetic oligonucleotide
agctgcacttcaagagccgcgcgcaagacaggtatagtctcgcgagctgattgaagaagc

SEQ ID NO: 237027 - DNA, 53 bp, Artificial
  Synthetic oligonucleotide
cccaaggcaggggcgatccgactctgtccgcatggcggcagagccaaatattt

SEQ ID NO: 237028 - DNA, 53 bp, Artificial
  Synthetic oligonucleotide
agtccgcaagtgcaaaccgagctacttaatatggcgtggaatgatggcaatct

SEQ ID NO: 237029 - DNA, 53 bp, Artificial
  Synthetic oligonucleotide
agtagaatgtaaattccaatagagagggcgaaagaccccaggaaggaagccgc

SEQ ID NO: 237030 - DNA, 53 bp, Artificial
  Synthetic oligonucleotide
cccagggtattgtaccccggtcattcctttgcgtcccatgccgtatcactgca

SEQ ID NO: 237031 - DNA, 53 bp, Artificial
  Synthetic oligonucleotide
cgcggcccgatgggattgggaacgtccgcccatgggccgggcgcgtaatatga

SEQ ID NO: 237032 - DNA, 53 bp, Artificial
  Synthetic oligonucleotide
aggcacaatattctcacgttttcccaagactgcggtttctaaaagataacgcg

SEQ ID NO: 237033 - DNA, 53 bp, Artificial
  Synthetic oligonucleotide
cgcatcgcagcactggggtgatgtgttgcgaaatgctgcgcacaatgtctcgc

SEQ ID NO: 237034 - DNA, 53 bp, Artificial
  Synthetic oligonucleotide
cctgggagagctgttgccagcgttccacgaaccgatcggcgcgcaagttcgga

SEQ ID NO: 237035 - DNA, 52 bp, Artificial
  Synthetic oligonucleotide
aaggtcgacggggagtttacgcttccaaggccagcgcatcaaggaaagagcc

SEQ ID NO: 237036 - DNA, 52 bp, Artificial
  Synthetic oligonucleotide
cgcagtttaggagctatttgccgcacaaaagtactatgaacttcagacatca

SEQ ID NO: 237037 - DNA, 56 bp, Artificial
  Synthetic oligonucleotide
aggaaggcggcgcgtgggcttttcaactccggtttgcccatgtcgtgccaccacga

SEQ ID NO: 237038 - DNA, 52 bp, Artificial
  Synthetic oligonucleotide
gggaacccgctgatctctatcccgttcctatgctcgcgcttgcactatagcg

SEQ ID NO: 237039 - DNA, 52 bp, Artificial
  Synthetic oligonucleotide
aatggccgcgaacgtgctgattacgccatgcctcactggccggattgcatgg

SEQ ID NO: 237040 - DNA, 52 bp, Artificial
  Synthetic oligonucleotide
cacggcagcccttctggagagcgccgttggcttcatgctgattctgctgggg

SEQ ID NO: 237041 - DNA, 52 bp, Artificial
  Synthetic oligonucleotide
aatgataaacgtccgctagcgcgtcgtgtcctgacaggccgcatttgggcac

SEQ ID NO: 237042 - DNA, 52 bp, Artificial
  Synthetic oligonucleotide
ccttatggcgaagattggctagtcatgacggcctaaataggtctttggatga

SEQ ID NO: 237043 - DNA, 52 bp, Artificial
  Synthetic oligonucleotide
aagtggtcattgaggtgatcgcggaaccggttgagttgccggactatctctg

SEQ ID NO: 237044 - DNA, 52 bp, Artificial
  Synthetic oligonucleotide
ggaccttggtgaaaatgctgaccagacatgcaacgtggtcaaccgcctagaa

SEQ ID NO: 237045 - DNA, 52 bp, Artificial
  Synthetic oligonucleotide
cctggaaatctatgcccacctcgctcaggcacgtgcggttttctacacacct

SEQ ID NO: 237046 - DNA, 52 bp, Artificial
  Synthetic oligonucleotide
catcgaaaggctctactggcgccactctcgcctcagaaagcgttacagaacg

SEQ ID NO: 237047 - DNA, 52 bp, Artificial
  Synthetic oligonucleotide
acgagctatgatgaaaagccgaggaagtcgatacagtcattatgggctttct

SEQ ID NO: 237048 - DNA, 56 bp, Artificial
  Synthetic oligonucleotide
aggaccgcgcatccggacttggcccgggattaggccacgtctcccggccagcctca

SEQ ID NO: 237049 - DNA, 52 bp, Artificial
  Synthetic oligonucleotide
cattgagcgccgcatattgcgtttcagccgagggtaagtggcggtttgggtt

SEQ ID NO: 237050 - DNA, 51 bp, Artificial
  Synthetic oligonucleotide
ccaaaccggcccggcgctttacacctttccccgagcagcccacggacgaag

SEQ ID NO: 237051 - DNA, 52 bp, Artificial
  Synthetic oligonucleotide
gcgcacttcctctgtttcactcggtcgtgtcagctgctatcaaaacgcatag

SEQ ID NO: 237052 - DNA, 52 bp, Artificial
  Synthetic oligonucleotide
cccggcgctttacacctttccccgagcagcccacggacgaaggcgaaatgtc

SEQ ID NO: 237053 - DNA, 52 bp, Artificial
  Synthetic oligonucleotide
ccatacggggtggccaaagcatagcctctgatatgactgggtgatggccgtg

SEQ ID NO: 237054 - DNA, 52 bp, Artificial
  Synthetic oligonucleotide
cccctacggttggtcattatgccagggccaaattctcaacgtctcacaatat

SEQ ID NO: 237055 - DNA, 52 bp, Artificial
  Synthetic oligonucleotide
aatcggactatgggacggaagtatatagtgccttatggtctgtatgttgcgc

SEQ ID NO: 237056 - DNA, 52 bp, Artificial
  Synthetic oligonucleotide
ccccgtcttggcctgaccaatggggaacgcgtcccgttgcgcagcaagaaag

SEQ ID NO: 237057 - DNA, 52 bp, Artificial
  Synthetic oligonucleotide
tcgggaagctttcaaccagatccaccgctacagtaaggagagcttcaactcg

SEQ ID NO: 237058 - DNA, 52 bp, Artificial
  Synthetic oligonucleotide
aggcccctaaaggacttttcgttcaaggaagggaccgcgcgccctatgctcg

SEQ ID NO: 237059 - DNA, 60 bp, Artificial
  Synthetic oligonucleotide
aggacggcagtatacagggtcagcaggcatgtcagattggtgtatttgcagcctatgtct

SEQ ID NO: 237060 - DNA, 52 bp, Artificial
  Synthetic oligonucleotide
tgcttttaaaccgcttttcgcagcattgtcttcgagtaccttcgggtgcctt

SEQ ID NO: 237061 - DNA, 52 bp, Artificial
  Synthetic oligonucleotide
aaatggtcacataatcaccaatagcggcccctaacatcatcagccccataat

SEQ ID NO: 237062 - DNA, 52 bp, Artificial
  Synthetic oligonucleotide
tggtcccaggcacgtagcgaccgggcgtattgaactcagccaatccaagggg

SEQ ID NO: 237063 - DNA, 52 bp, Artificial
  Synthetic oligonucleotide
tggtggaaccaatcgcaagaccacaagagctttggctgcaccgactttgcac

SEQ ID NO: 237064 - DNA, 52 bp, Artificial
  Synthetic oligonucleotide
tgtggatcggagtctcatgaccatttggctccttcaaggcggagttgctgtc

SEQ ID NO: 237065 - DNA, 52 bp, Artificial
  Synthetic oligonucleotide
agccatgggcgaacgtctagcccatcgcatgaacgcccgtcaaatgcgaata

SEQ ID NO: 237066 - DNA, 52 bp, Artificial
  Synthetic oligonucleotide
ttatatcgctgaaagtgcgatagacgcgatttcagtagtcggctttttaagc

SEQ ID NO: 237067 - DNA, 52 bp, Artificial
  Synthetic oligonucleotide
agagcggctctccaaggaagtacccaatctatgagcgcggcgtttattgctg

SEQ ID NO: 237068 - DNA, 52 bp, Artificial
  Synthetic oligonucleotide
aaaatcatggtgctcggttcatcgtcttctggctgcgatggttcgatagggg

SEQ ID NO: 237069 - DNA, 50 bp, Artificial
  Synthetic oligonucleotide
agacggcacggtcgccctgtttttttccggtgacctggggttcaacaccg

SEQ ID NO: 237070 - DNA, 57 bp, Artificial
  Synthetic oligonucleotide
aggaggaatttccatcctaagctccggttcagtcgctcgatatcgttttctattgaa

SEQ ID NO: 237071 - DNA, 52 bp, Artificial
  Synthetic oligonucleotide
tttggggcgttttcgtcgtctcattggatggtttttgagacgatgctttatc

SEQ ID NO: 237072 - DNA, 52 bp, Artificial
  Synthetic oligonucleotide
aaaacatcggaggtattcgtgccaggaagaacctgaacagcataagttgctc

SEQ ID NO: 237073 - DNA, 52 bp, Artificial
  Synthetic oligonucleotide
agaagtcattaccgccagctataaagcgttgagtaacggtaggatcgacatc

SEQ ID NO: 237074 - DNA, 52 bp, Artificial
  Synthetic oligonucleotide
gggcgagcatgcttaccggcctatcgcttccgtcgctccaccgggcagtcag

SEQ ID NO: 237075 - DNA, 52 bp, Artificial
  Synthetic oligonucleotide
caacccggggctccaatgagtcgggaagggacggttcaatgagcggagacac

SEQ ID NO: 237076 - DNA, 52 bp, Artificial
  Synthetic oligonucleotide
atgttgaaggacttcttggatgaaagttctatccttggagtgatgaaatgaa

SEQ ID NO: 237077 - DNA, 52 bp, Artificial
  Synthetic oligonucleotide
atgccaggctgacctatcacctgccgggtgacaacatctatattgccgccta

SEQ ID NO: 237078 - DNA, 52 bp, Artificial
  Synthetic oligonucleotide
aagcgttcgcgcgacgtctacttgggtcgcaatttcactgagtggatgcgcc

SEQ ID NO: 237079 - DNA, 52 bp, Artificial
  Synthetic oligonucleotide
aagcgggagcctggtgcgtacaaggacgatctcactcgcgcgatccgtatca

SEQ ID NO: 237080 - DNA, 52 bp, Artificial
  Synthetic oligonucleotide
aagcggagtggcctcttgcggtggcgtccctccctaactgctgccatgtaga

SEQ ID NO: 237081 - DNA, 60 bp, Artificial
  Synthetic oligonucleotide
aggccaagactacaaaggcgcgctatcatggctggctgacaggtttggtgatgaaactgc

SEQ ID NO: 237082 - DNA, 52 bp, Artificial
  Synthetic oligonucleotide
atcacccctgatcttggctggttcgaatatcctccgctgtccggtcccgcct

SEQ ID NO: 237083 - DNA, 52 bp, Artificial
  Synthetic oligonucleotide
taaactatgcttccggtctccagaccaacgcccaatatgccaaggctctgga

SEQ ID NO: 237084 - DNA, 52 bp, Artificial
  Synthetic oligonucleotide
aagacaacgccgacacaggataatacaaccgacacaccttccgctgctacca

SEQ ID NO: 237085 - DNA, 52 bp, Artificial
  Synthetic oligonucleotide
aagaatgcgtggacgctggtgcctcatgcgggtgatccgcgagtggaggatg

SEQ ID NO: 237086 - DNA, 52 bp, Artificial
  Synthetic oligonucleotide
tagggcggtttcatcgggttactcagacgctacagtgcggatcggacagtcc

SEQ ID NO: 237087 - DNA, 52 bp, Artificial
  Synthetic oligonucleotide
acaggagctctgctttgcgttcagtccaggacacgaccacttccgggtagag

SEQ ID NO: 237088 - DNA, 52 bp, Artificial
  Synthetic oligonucleotide
gaatcgaactatgagaaagccccacgtcaaacatacctttcgtctcgatgcc

SEQ ID NO: 237089 - DNA, 52 bp, Artificial
  Synthetic oligonucleotide
ctggcctgttgaacggaccataggggagagggttcgatcgcgataacgtatt

SEQ ID NO: 237090 - DNA, 52 bp, Artificial
  Synthetic oligonucleotide
ctgactgtagcgattgacggctaacgcaaatcggagtcgcatgacgcgtcac

SEQ ID NO: 237091 - DNA, 52 bp, Artificial
  Synthetic oligonucleotide
ctcatgtggagaatgtaatctacttggattccggctgcaagcgggatcgcca

SEQ ID NO: 237092 - DNA, 60 bp, Artificial
  Synthetic oligonucleotide
cgccggacgtggtggcaaaagctgactggcagatagtgagggaggaacagcatatgatcg

SEQ ID NO: 237093 - DNA, 54 bp, Artificial
  Synthetic oligonucleotide
aggcccccgccgtaagcagaccagtaacgcctacggcttcttgtctcccaaggc

SEQ ID NO: 237094 - DNA, 52 bp, Artificial
  Synthetic oligonucleotide
aattcgggagaccctgtgatggcgacgctcatccgcgacgtgcgcattttcg

SEQ ID NO: 237095 - DNA, 52 bp, Artificial
  Synthetic oligonucleotide
cgggcattctactctcctagcgtgatgtaccgatatatggtactttatgtat

SEQ ID NO: 237096 - DNA, 52 bp, Artificial
  Synthetic oligonucleotide
cggatcgagacagagggatgggtcgtgacgttggtgaacgaggaagggccaa

SEQ ID NO: 237097 - DNA, 52 bp, Artificial
  Synthetic oligonucleotide
cgctgcgcgtagggaggattgagagcgtcccctatcggtccacgctgcctaa

SEQ ID NO: 237098 - DNA, 52 bp, Artificial
  Synthetic oligonucleotide
cgctcggcgtacttggctccgtcctctttacggtgatgaggggactgtccgc

SEQ ID NO: 237099 - DNA, 52 bp, Artificial
  Synthetic oligonucleotide
cgctatcgccattgtcccctcagaacgtcaacaacccgcgcctttcggcaaa

SEQ ID NO: 237100 - DNA, 51 bp, Artificial
  Synthetic oligonucleotide
agcgccgttaggaatggccgcgaacgtgctgattacgccatgcctcactgg

SEQ ID NO: 237101 - DNA, 51 bp, Artificial
  Synthetic oligonucleotide
aaccagcccagtttgggcgacataccatattcggtcaccatcgcccgagcc

SEQ ID NO: 237102 - DNA, 51 bp, Artificial
  Synthetic oligonucleotide
cagcgttcggcgggtagaggaacgagcgaccggcaggttccttagggtgga

SEQ ID NO: 237103 - DNA, 51 bp, Artificial
  Synthetic oligonucleotide
agcggcagggacacaagcagcgctagcgatagaccaccaatcccccacaga

SEQ ID NO: 237104 - DNA, 53 bp, Artificial
  Synthetic oligonucleotide
aggccgctgggcttccgaggggggaagtggggcgggtctaggggtcaatcgca

SEQ ID NO: 237105 - DNA, 51 bp, Artificial
  Synthetic oligonucleotide
tgatgctacgctataccctgaaacgggaagaggaagctgtgcggatcgaaa

SEQ ID NO: 237106 - DNA, 51 bp, Artificial
  Synthetic oligonucleotide
ggcatgataccatgatcgacccatttcacgtccaagcgtaaaggttagata

SEQ ID NO: 237107 - DNA, 51 bp, Artificial
  Synthetic oligonucleotide
acgcccagacatttataggtctgataggtgggaggcaatgccgcatttcgt

SEQ ID NO: 237108 - DNA, 51 bp, Artificial
  Synthetic oligonucleotide
cactaaatcgggattaggctcataaccggcagggcacgcggcaattaccga

SEQ ID NO: 237109 - DNA, 51 bp, Artificial
  Synthetic oligonucleotide
cacggttacgaacaatgcggccgacccgtcgactctgggcgttcagcgggt

SEQ ID NO: 237110 - DNA, 51 bp, Artificial
  Synthetic oligonucleotide
ctacgcggtttcaggagggatcggttacacgttgctcgatagcgattccgc

SEQ ID NO: 237111 - DNA, 51 bp, Artificial
  Synthetic oligonucleotide
ggcgggcagtcgcgatgtctgacgctaccaaccagagttcgtcgcatcgaa

SEQ ID NO: 237112 - DNA, 51 bp, Artificial
  Synthetic oligonucleotide
cacgaccgctacaggtcgaggtgctacgctatgttcaggatcgaactgata

SEQ ID NO: 237113 - DNA, 51 bp, Artificial
  Synthetic oligonucleotide
gacgccatgttcgctggctatccgcgacatagcggcattgtaaccttgcgc

SEQ ID NO: 237114 - DNA, 51 bp, Artificial
  Synthetic oligonucleotide
cacatagatatccgcgccggagctaacgagttgcccttcgagcatgggcgc

SEQ ID NO: 237115 - DNA, 60 bp, Artificial
  Synthetic oligonucleotide
aggcgtgcccccaattggcccttgcatttcgaggatatgtccaactctatgttatggtca

SEQ ID NO: 237116 - DNA, 51 bp, Artificial
  Synthetic oligonucleotide
accagtgggcgttacctagatagggcgcatgggtcgcctgaaacgatgccc

SEQ ID NO: 237117 - DNA, 51 bp, Artificial
  Synthetic oligonucleotide
tctctccccgtgcccgggtgcagtcaggtgcccctaggtgcttttaggtgt

SEQ ID NO: 237118 - DNA, 51 bp, Artificial
  Synthetic oligonucleotide
cgcgatggtgagtggcaatccgagagctatctggtatcgatgagttatcct

SEQ ID NO: 237119 - DNA, 51 bp, Artificial
  Synthetic oligonucleotide
aggaggcccaagtagctcccgtccgcaggagggagtgcgccctgctacagg

SEQ ID NO: 237120 - DNA, 51 bp, Artificial
  Synthetic oligonucleotide
ccccaatccgcataacgagcgctaccttgcgaccaaacgggaccggaccgg

SEQ ID NO: 237121 - DNA, 51 bp, Artificial
  Synthetic oligonucleotide
cccatttggggtgctcgaacgtaggcgggggcattggaacatcggctgaaa

SEQ ID NO: 237122 - DNA, 51 bp, Artificial
  Synthetic oligonucleotide
cccagtttctgcgctctgaacccgacattcgcctatcgacccattgcgggc

SEQ ID NO: 237123 - DNA, 51 bp, Artificial
  Synthetic oligonucleotide
gagcagaggaagccctgtcattagctagaagaaaagctgatagcatgcgtg

SEQ ID NO: 237124 - DNA, 51 bp, Artificial
  Synthetic oligonucleotide
tggcccgattctcttgcgacattcatgaggtacattcatgggcccatgcaa

SEQ ID NO: 237125 - DNA, 51 bp, Artificial
  Synthetic oligonucleotide
gctatgcttgcaccgatagctgacgggataagcgcagcaattgtagtccaa

SEQ ID NO: 237126 - DNA, 56 bp, Artificial
  Synthetic oligonucleotide
agggcttacagagggtttgaaggcagctgttgcagaaactttgaaatattcggtta

SEQ ID NO: 237127 - DNA, 51 bp, Artificial
  Synthetic oligonucleotide
gctattaaaactgtacggcgacaatcatccgtcattagcacagctccgccg

SEQ ID NO: 237128 - DNA, 51 bp, Artificial
  Synthetic oligonucleotide
ccagcccgacgatattctgctcttcggctctgaatccgctggcgcacccga

SEQ ID NO: 237129 - DNA, 51 bp, Artificial
  Synthetic oligonucleotide
ccagacggattatgcggcttctatggagcctctagggctggccagaggcgt

SEQ ID NO: 237130 - DNA, 51 bp, Artificial
  Synthetic oligonucleotide
tgctgggcggcaaatattcgcggctgttcgtgggcctgacgcggggctggt

SEQ ID NO: 237131 - DNA, 51 bp, Artificial
  Synthetic oligonucleotide
tgctgcaagctgcggttgactttctcctgacgcctgtcccaacggaaggaa

SEQ ID NO: 237132 - DNA, 51 bp, Artificial
  Synthetic oligonucleotide
tgccttcgataaggggatgtcaatgtatcccctcgcggcggcgatcaatgc

SEQ ID NO: 237133 - DNA, 51 bp, Artificial
  Synthetic oligonucleotide
tgccgctacgccgtgttccctcgctcagccatgacgacttcatggaccaat

SEQ ID NO: 237134 - DNA, 51 bp, Artificial
  Synthetic oligonucleotide
cgttcggcacaacaggcctgccaacttaacgccgcaagccttttctcctgc

SEQ ID NO: 237135 - DNA, 51 bp, Artificial
  Synthetic oligonucleotide
catccgacccaagggccaatggtagcgcatcgcgcccggctgtagacctgc

SEQ ID NO: 237136 - DNA, 51 bp, Artificial
  Synthetic oligonucleotide
ggaatgacgtcaagcgcccgatagacggtcatccttgagatcttgaggtcg

SEQ ID NO: 237137 - DNA, 59 bp, Artificial
  Synthetic oligonucleotide
cagagcttggcgcgaccgacgaagccggtccaagtctggagaatggttggcgcgtctag

SEQ ID NO: 237138 - DNA, 51 bp, Artificial
  Synthetic oligonucleotide
tgccgacatggattgcaaccgttggacacgttcgtgttcggcaggagttgt

SEQ ID NO: 237139 - DNA, 51 bp, Artificial
  Synthetic oligonucleotide
cagttcgctatagcaagaggatcgcaacaaggctaccttagcgaagataag

SEQ ID NO: 237140 - DNA, 51 bp, Artificial
  Synthetic oligonucleotide
actcagccgctcgaaaagtcgccgcttcacagctcaaaaaggcaggggtgc

SEQ ID NO: 237141 - DNA, 51 bp, Artificial
  Synthetic oligonucleotide
atccggccaagtacggacacagccagcccgtgctcttcatctactggaccg

SEQ ID NO: 237142 - DNA, 51 bp, Artificial
  Synthetic oligonucleotide
tatggtatcctgcatggtatcgaaggccccttatggacgggccgataccat

SEQ ID NO: 237143 - DNA, 51 bp, Artificial
  Synthetic oligonucleotide
agtcatagcacaggcgatagatgccttgcggcggggttggccgatttcgat

SEQ ID NO: 237144 - DNA, 51 bp, Artificial
  Synthetic oligonucleotide
ctgcggctcatgggcacgggcgcttggcgggagagtgaaacccaatatggt

SEQ ID NO: 237145 - DNA, 51 bp, Artificial
  Synthetic oligonucleotide
tatggcacgaaagtttgtgtaattgctgatggacacgggaaagctatagat

SEQ ID NO: 237146 - DNA, 51 bp, Artificial
  Synthetic oligonucleotide
gaattatccgccccgttctttgaagccatcctgcgaacagcggtcccgctt

SEQ ID NO: 237147 - DNA, 51 bp, Artificial
  Synthetic oligonucleotide
gaatgttcccgggttaggtacacagatacgaagcctggtcggacagtcgat

SEQ ID NO: 237148 - DNA, 60 bp, Artificial
  Synthetic oligonucleotide
cagatgcgcactggtcgtgctacaattttcggacgacatatttcgatgagagagcacgct

SEQ ID NO: 237149 - DNA, 51 bp, Artificial
  Synthetic oligonucleotide
atatttcagcccgcgccatactgacggcctgggctaaatccccacacgccc

SEQ ID NO: 237150 - DNA, 51 bp, Artificial
  Synthetic oligonucleotide
atatgagttggacgaccatacgcctcgaacttgcccggacgcccgcctttc

SEQ ID NO: 237151 - DNA, 51 bp, Artificial
  Synthetic oligonucleotide
atagcattgaggcctatgaaggctcgggtgcgcgatataaaatgacggcct

SEQ ID NO: 237152 - DNA, 51 bp, Artificial
  Synthetic oligonucleotide
taggttgctgccgcgggaaaatggattatccctgcgtccaacggtccggca

SEQ ID NO: 237153 - DNA, 51 bp, Artificial
  Synthetic oligonucleotide
taggtgaaacggtcgtgctttgcgcggtaacagcggccaaaacggttaaag

SEQ ID NO: 237154 - DNA, 51 bp, Artificial
  Synthetic oligonucleotide
cgcgtccttgctacgcggcacgaaccacctgccgaatccacggtggaactt

SEQ ID NO: 237155 - DNA, 51 bp, Artificial
  Synthetic oligonucleotide
cgcggcccgtccttgaggcgctacccgcttggactatcaaactttctcggc

SEQ ID NO: 237156 - DNA, 51 bp, Artificial
  Synthetic oligonucleotide
atacagacgagacctcattgattgggttgtctaggaaagatgcattaacat

SEQ ID NO: 237157 - DNA, 51 bp, Artificial
  Synthetic oligonucleotide
acgttctgcgagctcgatgtgtggcaccagtcgtatatccgttggaccttg

SEQ ID NO: 237158 - DNA, 51 bp, Artificial
  Synthetic oligonucleotide
ataatccatccgcgaacccacattggccagaataagcgccttgaggagagc

SEQ ID NO: 237159 - DNA, 60 bp, Artificial
  Synthetic oligonucleotide
cagcaaatatgatcatggttcatatcaacgccaattaaagggggctttgcgctaccacct

SEQ ID NO: 237160 - DNA, 51 bp, Artificial
  Synthetic oligonucleotide
agtggggtccacgacgacgagaatatcggaatagtcgccttggcgcagagt

SEQ ID NO: 237161 - DNA, 51 bp, Artificial
  Synthetic oligonucleotide
taagcgcacctttcccgacaaccaatcgcgttgcgaggaggataacacccc

SEQ ID NO: 237162 - DNA, 51 bp, Artificial
  Synthetic oligonucleotide
ctggcgaaagccgcgaccctagccgcctgtcccgcattgctcaacccctgg

SEQ ID NO: 237163 - DNA, 51 bp, Artificial
  Synthetic oligonucleotide
tcgttcgacacggttacgaacaatgcggccgacccgtcgactctgggcgtt

SEQ ID NO: 237164 - DNA, 51 bp, Artificial
  Synthetic oligonucleotide
attgtcgaaacggggtttgtcatcgcacgggtctcctcaggcgcagcgcac

SEQ ID NO: 237165 - DNA, 51 bp, Artificial
  Synthetic oligonucleotide
ctccgtatttagcgttataaagcggcatatggctaaagacaagctggatac

SEQ ID NO: 237166 - DNA, 51 bp, Artificial
  Synthetic oligonucleotide
atgtggacggtctagtgaggccccttcccgagtactaactccattcgatcc

SEQ ID NO: 237167 - DNA, 51 bp, Artificial
  Synthetic oligonucleotide
atggtgattgggcgaatgaccgaagatcgcagatcgcaggctagcgccagg

SEQ ID NO: 237168 - DNA, 51 bp, Artificial
  Synthetic oligonucleotide
ggtctctatatagaccagtttagggcaaatgagaagttcaaggctcgattg

SEQ ID NO: 237169 - DNA, 51 bp, Artificial
  Synthetic oligonucleotide
actctccgactcggcttgagccggagtacgatctcaaggtggcaacccttt

SEQ ID NO: 237170 - DNA, 56 bp, Artificial
  Synthetic oligonucleotide
cagcgattaaggctcgcgcaggcgttaatttttctacgcccgtcctcttagccacg

SEQ ID NO: 237171 - DNA, 51 bp, Artificial
  Synthetic oligonucleotide
tcgatcgcgacttgggctagcggaggctttattcggtttaccttcgcacgc

SEQ ID NO: 237172 - DNA, 51 bp, Artificial
  Synthetic oligonucleotide
gtatattcggggtgtcgcggaaatatgttttggccggatcggtccgaattt

SEQ ID NO: 237173 - DNA, 51 bp, Artificial
  Synthetic oligonucleotide
gtattcggtgctgggcggcaaatattcgcggctgttcgtgggcctgacgcg

SEQ ID NO: 237174 - DNA, 51 bp, Artificial
  Synthetic oligonucleotide
atctcggtatttttcgggctttagcgggcggacaggaaagacccgcgggcc

SEQ ID NO: 237175 - DNA, 51 bp, Artificial
  Synthetic oligonucleotide
atcgttgtctatacttcggggcaggatcgcccgatccagctgtcccgcatg

SEQ ID NO: 237176 - DNA, 51 bp, Artificial
  Synthetic oligonucleotide
gaccaatgggctccaatcgaggcccaaggtccagtctgcgactgtatcggc

SEQ ID NO: 237177 - DNA, 51 bp, Artificial
  Synthetic oligonucleotide
agggtcggtcagtccccatttggggtgctcgaacgtaggcgggggcattgg

SEQ ID NO: 237178 - DNA, 51 bp, Artificial
  Synthetic oligonucleotide
tccgaaaacgatatgaactggcgcgggacggtatggttggcggataccggc

SEQ ID NO: 237179 - DNA, 51 bp, Artificial
  Synthetic oligonucleotide
gtcctaaaatacggatgacccggcactgagtttgcctgctgtttacgatcg

SEQ ID NO: 237180 - DNA, 51 bp, Artificial
  Synthetic oligonucleotide
gtcgacaaatgggtgttaacgattggtctcgacagtcgggaatgtggcacg

SEQ ID NO: 237181 - DNA, 54 bp, Artificial
  Synthetic oligonucleotide
caggaaaccgcgaaaatccgactggaacggctgaataccgacgcgcaccgaccg

SEQ ID NO: 237182 - DNA, 51 bp, Artificial
  Synthetic oligonucleotide
tccatgacacctacagctatccttctcaatgcataccgaccgttaatctct

SEQ ID NO: 237183 - DNA, 51 bp, Artificial
  Synthetic oligonucleotide
aagcgttggaggcctgcgcctaacagcgaaaaaggcaaaatgctgtggccg

SEQ ID NO: 237184 - DNA, 51 bp, Artificial
  Synthetic oligonucleotide
cgctccggggccactccgcataaaggcttcactggcactaatcgaagccca

SEQ ID NO: 237185 - DNA, 51 bp, Artificial
  Synthetic oligonucleotide
ctgcctcggtaagctcacctcatgtccgaatcctcgacaccctatcgcgtc

SEQ ID NO: 237186 - DNA, 51 bp, Artificial
  Synthetic oligonucleotide
ttgggccgccggattgggcgctccacccatcgcatagacggtaagaccacg

SEQ ID NO: 237187 - DNA, 51 bp, Artificial
  Synthetic oligonucleotide
ttggattatgacgattgctggtccggctttaccaaggcgcgactgccgcga

SEQ ID NO: 237188 - DNA, 51 bp, Artificial
  Synthetic oligonucleotide
ccttgaggcgctacccgcttggactatcaaactttctcggccggtccgcag

SEQ ID NO: 237189 - DNA, 51 bp, Artificial
  Synthetic oligonucleotide
cggcgatcatggttcaaactggttggcaacgctccttgtctcgcggtgcct

SEQ ID NO: 237190 - DNA, 51 bp, Artificial
  Synthetic oligonucleotide
cctgcctcttgcggtcttcgacactccgggaacgcttggaaccggttcttc

SEQ ID NO: 237191 - DNA, 51 bp, Artificial
  Synthetic oligonucleotide
ttccttgtcaaatacgtcaaggaattcaaaccgactgcccgcaacatatcg

SEQ ID NO: 237192 - DNA, 60 bp, Artificial
  Synthetic oligonucleotide
caggcgagagatttcatgtcggaggcggaatccttggcacttgcgcgctcccccgcagtt

SEQ ID NO: 237193 - DNA, 51 bp, Artificial
  Synthetic oligonucleotide
ccgtgcttcggcaaaagcgggccctggcaagccataccggcaaatccggga

SEQ ID NO: 237194 - DNA, 51 bp, Artificial
  Synthetic oligonucleotide
accggtaccattggggccactgcctagacccccactaataacagatccacc

SEQ ID NO: 237195 - DNA, 51 bp, Artificial
  Synthetic oligonucleotide
ccgcccggctaagcactttgcgagccgcattgaccggcccgatacccatta

SEQ ID NO: 237196 - DNA, 51 bp, Artificial
  Synthetic oligonucleotide
agccactgctttattgctgcggcgggggggattgataggctctgagaaaaa

SEQ ID NO: 237197 - DNA, 51 bp, Artificial
  Synthetic oligonucleotide
agccatgacataagctgttcctaggcggggccgagcttccaacgaccagcg

SEQ ID NO: 237198 - DNA, 51 bp, Artificial
  Synthetic oligonucleotide
acaggcctgccaacttaacgccgcaagccttttctcctgccgtgtcttggc

SEQ ID NO: 237199 - DNA, 51 bp, Artificial
  Synthetic oligonucleotide
gagcgtctgatcttctccaaactcgtgcggggcataccgttttgcgacgcg

SEQ ID NO: 237200 - DNA, 51 bp, Artificial
  Synthetic oligonucleotide
ttttctattctcagcgttccccatgatgtaattcgcaaccaacaggcacgt

SEQ ID NO: 237201 - DNA, 51 bp, Artificial
  Synthetic oligonucleotide
ttttcgaaaagtcgtgtcgagccgtggcgtcgattcacgaacagggactcc

SEQ ID NO: 237202 - DNA, 51 bp, Artificial
  Synthetic oligonucleotide
aatgggcgccggagagatgagccgtgcagagtttacggacttccttgcaag

SEQ ID NO: 237203 - DNA, 60 bp, Artificial
  Synthetic oligonucleotide
cgctgtttcaggtcggtctgcgctttacgctctgatccgcgaccctctcaaatcgcgata

SEQ ID NO: 237204 - DNA, 60 bp, Artificial
  Synthetic oligonucleotide
catatggcagaggactcattcagagtggtgttctgtatgcaatttcatagttagataaac

SEQ ID NO: 237205 - DNA, 51 bp, Artificial
  Synthetic oligonucleotide
aaaagcgggccctggcaagccataccggcaaatccgggaagcagggaactt

SEQ ID NO: 237206 - DNA, 51 bp, Artificial
  Synthetic oligonucleotide
cgcctccctccccatccgacccaagggccaatggtagcgcatcgcgcccgg

SEQ ID NO: 237207 - DNA, 51 bp, Artificial
  Synthetic oligonucleotide
ctttaaggaggggcaactcagtcaggttcgaccgggactccccgtgacgct

SEQ ID NO: 237208 - DNA, 51 bp, Artificial
  Synthetic oligonucleotide
cgctgcttttcttgggctggcccccgcgccctacgcgagtggagacgtctc

SEQ ID NO: 237209 - DNA, 51 bp, Artificial
  Synthetic oligonucleotide
cgcagccctcgtaggactacgacggccttgttcccatccaagaagcgtccc

SEQ ID NO: 237210 - DNA, 51 bp, Artificial
  Synthetic oligonucleotide
tttgattttcgggtagcgcgtaggctgattcagcaccccatgcactggtga

SEQ ID NO: 237211 - DNA, 51 bp, Artificial
  Synthetic oligonucleotide
cgcaatcgcgggccaagtctgcgttcgggctgcggtcgttacatatcgata

SEQ ID NO: 237212 - DNA, 51 bp, Artificial
  Synthetic oligonucleotide
tttcgggcacgcgtcccgcagcctgagcggcattcagcatgtgggtctcta

SEQ ID NO: 237213 - DNA, 51 bp, Artificial
  Synthetic oligonucleotide
tttccaaattccgttcgctcggaacgaaaacttacaagctgacgtcgctcg

SEQ ID NO: 237214 - DNA, 51 bp, Artificial
  Synthetic oligonucleotide
aatgcaccggggcaggtcgttatttcgggaagcttggccgctatcgaacgc

SEQ ID NO: 237215 - DNA, 59 bp, Artificial
  Synthetic oligonucleotide
catcaaaagttagcggccatgagattgttgtaacggatgttaaggcaacatttgggtca

SEQ ID NO: 237216 - DNA, 51 bp, Artificial
  Synthetic oligonucleotide
cggagggccaggaagatgcacctcagctgcgggtcatgatcgacaggatac

SEQ ID NO: 237217 - DNA, 51 bp, Artificial
  Synthetic oligonucleotide
gccacaaggaaacagccgtgtacgcgtctgcgtcgaaacagcgcaagctcc

SEQ ID NO: 237218 - DNA, 51 bp, Artificial
  Synthetic oligonucleotide
cggggtcggacgccgtgaaaggcgggaccagatgcccgagcaatcgttcaa

SEQ ID NO: 237219 - DNA, 51 bp, Artificial
  Synthetic oligonucleotide
gcggatcatcgaactcggcgggatcgaagtcagtcatcggtcaggctccac

SEQ ID NO: 237220 - DNA, 51 bp, Artificial
  Synthetic oligonucleotide
ccctctgtctggccgggacaagatggcgaccgtgcaaggatcacatggccg

SEQ ID NO: 237221 - DNA, 50 bp, Artificial
  Synthetic oligonucleotide
tgtgtttacctcggttttcgaacccgacgggttggaagaccaggcgcggt

SEQ ID NO: 237222 - DNA, 51 bp, Artificial
  Synthetic oligonucleotide
ccccggcgtgcagctatcgtccacgtcgcagattttcagttcgccatcgat

SEQ ID NO: 237223 - DNA, 51 bp, Artificial
  Synthetic oligonucleotide
gcgcctgcattgagacgaaaggcccctactcgcctaagcccttcaactcaa

SEQ ID NO: 237224 - DNA, 50 bp, Artificial
  Synthetic oligonucleotide
ttggatgatggataacagtaaaagccatgtcgaaacgcttttagagaata

SEQ ID NO: 237225 - DNA, 50 bp, Artificial
  Synthetic oligonucleotide
agcctggcgacgccctactcttccaccgcttaagcgctagtaccatcggc

SEQ ID NO: 237226 - DNA, 52 bp, Artificial
  Synthetic oligonucleotide
catctccttcaagttttcgtagttccggcttacccaatggaaaacataacgg

SEQ ID NO: 237227 - DNA, 50 bp, Artificial
  Synthetic oligonucleotide
agggtcgggttcatttccgagcctgagccgggttcgattaccgtccgtcg

SEQ ID NO: 237228 - DNA, 50 bp, Artificial
  Synthetic oligonucleotide
aaaccggtccacgccatcgtctgcgaaggctcgggcctccagtccaatct

SEQ ID NO: 237229 - DNA, 50 bp, Artificial
  Synthetic oligonucleotide
aaatgcccggacaggcaagcgtatcggatgggtcagtcctgacgcggcac

SEQ ID NO: 237230 - DNA, 50 bp, Artificial
  Synthetic oligonucleotide
tccgctgggaacgattgagcggttcgtctccgcttatacgcaggttgccg

SEQ ID NO: 237231 - DNA, 50 bp, Artificial
  Synthetic oligonucleotide
aaagcggtgggcgaggggcacaacccctgatcggcactttattcctccct

SEQ ID NO: 237232 - DNA, 50 bp, Artificial
  Synthetic oligonucleotide
aaatgcacaacggttcgtcgcacaaatgcggccttaacttgacctagcgc

SEQ ID NO: 237233 - DNA, 50 bp, Artificial
  Synthetic oligonucleotide
agaggactacggcgggtatagctccgagcagaactacggcgcttcgctcg

SEQ ID NO: 237234 - DNA, 50 bp, Artificial
  Synthetic oligonucleotide
aggtattactcgccgcaacaagggcagccaagacgcagccgattcagcga

SEQ ID NO: 237235 - DNA, 50 bp, Artificial
  Synthetic oligonucleotide
acaggacggcgggcacaggacaaggttaagggcgcatgaaaagcgccggg

SEQ ID NO: 237236 - DNA, 50 bp, Artificial
  Synthetic oligonucleotide
aacggcagccatcaagctaggggtgacgaccgccactgcaaggaaagcgt

SEQ ID NO: 237237 - DNA, 58 bp, Artificial
  Synthetic oligonucleotide
catcttaccgatttgaacttccttagccttacacgcagcagaatacaggcgaaagttc

SEQ ID NO: 237238 - DNA, 50 bp, Artificial
  Synthetic oligonucleotide
aacggcttcctgaacacccatcctgcgatcccgcttgccgtaaggccaat

SEQ ID NO: 237239 - DNA, 50 bp, Artificial
  Synthetic oligonucleotide
agagcctgcgtgcagtgagtgccagacgccactctcgcaaggtacggcgg

SEQ ID NO: 237240 - DNA, 50 bp, Artificial
  Synthetic oligonucleotide
agcctggagtgaattggcagcgcccgccctgctgactatcgcaacgatcg

SEQ ID NO: 237241 - DNA, 50 bp, Artificial
  Synthetic oligonucleotide
aggtcgcatgcggctggcatctccaaaactctcagtcggtgcgccgcgct

SEQ ID NO: 237242 - DNA, 50 bp, Artificial
  Synthetic oligonucleotide
agcctgcctcaaatcgcctggaaagtcctgaccggaccgcaatggaccgc

SEQ ID NO: 237243 - DNA, 50 bp, Artificial
  Synthetic oligonucleotide
aacgggcaaggtcgtccgatcgaacatagtccggggcatccagggtcggg

SEQ ID NO: 237244 - DNA, 50 bp, Artificial
  Synthetic oligonucleotide
aacgggtgccaagccgcggacgatagatgttcccggctccgaacacctta

SEQ ID NO: 237245 - DNA, 50 bp, Artificial
  Synthetic oligonucleotide
cttgccccacaaggcaaccggcgatctttctcgtctgagccgctgtttgg

SEQ ID NO: 237246 - DNA, 50 bp, Artificial
  Synthetic oligonucleotide
aggtcggggcgaacggcagccttagccgtgcagatgcctacagcatggcg

SEQ ID NO: 237247 - DNA, 50 bp, Artificial
  Synthetic oligonucleotide
aggtgggatgacatcgagcaaaggcgacgggggtttatgatcgagcggga

SEQ ID NO: 237248 - DNA, 60 bp, Artificial
  Synthetic oligonucleotide
catgagcgtacgtccctggttgcacccccatgaggacatccagccggttaagctgcactt

SEQ ID NO: 237249 - DNA, 50 bp, Artificial
  Synthetic oligonucleotide
agaggcccgccgcttaacgctgtttgaatgcgactcaccgcaagcgttca

SEQ ID NO: 237250 - DNA, 50 bp, Artificial
  Synthetic oligonucleotide
aggcggcgatcctttcgcacactgcgcttatgacctcgtgcgtgcttgcc

SEQ ID NO: 237251 - DNA, 50 bp, Artificial
  Synthetic oligonucleotide
aaatgggcaggagtcatcatctccgcgctcttcaccactggggtcgcagg

SEQ ID NO: 237252 - DNA, 50 bp, Artificial
  Synthetic oligonucleotide
aggcgttggcccattatggccggcaaaacaacgggcgttcggaaagtggc

SEQ ID NO: 237253 - DNA, 50 bp, Artificial
  Synthetic oligonucleotide
aggctcacgtctggttcgtggcgggcctacgcggtaggtacaggtcacag

SEQ ID NO: 237254 - DNA, 50 bp, Artificial
  Synthetic oligonucleotide
aacgcccgtcaggcctgtcgcatccccgatatgctcctgcgtcactggca

SEQ ID NO: 237255 - DNA, 50 bp, Artificial
  Synthetic oligonucleotide
agccgcgaggaaccgattggggcgtcggctgtccgcgattttctgtccga

SEQ ID NO: 237256 - DNA, 50 bp, Artificial
  Synthetic oligonucleotide
aacgccgccttaaccaaattggcgcatcgtcacgtcctcagcagggggat

SEQ ID NO: 237257 - DNA, 50 bp, Artificial
  Synthetic oligonucleotide
aggcttgcgaattcggggcgtctgccattggtcgtctccggtgaatcggg

SEQ ID NO: 237258 - DNA, 50 bp, Artificial
  Synthetic oligonucleotide
acaccccgcttcattgcgatgctacccgtgcgtgcttttccatcgcgcgc

SEQ ID NO: 237259 - DNA, 56 bp, Artificial
  Synthetic oligonucleotide
catggcagtccttcgcttttggagggagcctagcgccaaacacgaccgaacgaaag

SEQ ID NO: 237260 - DNA, 50 bp, Artificial
  Synthetic oligonucleotide
agggcagcagggtttcagtatcgaatgccggagcgccgtttagcgatcct

SEQ ID NO: 237261 - DNA, 50 bp, Artificial
  Synthetic oligonucleotide
agggccgcttgccgcacgaggccgtatgccaccgcacgggtcctacgatt

SEQ ID NO: 237262 - DNA, 50 bp, Artificial
  Synthetic oligonucleotide
actcgtcgcaagtgtcctcatggggcagtcggccttttcgctgacgctcg

SEQ ID NO: 237263 - DNA, 50 bp, Artificial
  Synthetic oligonucleotide
aggggaactcggcactgacgcaaagtctccgcctccccttattccgcgcg

SEQ ID NO: 237264 - DNA, 50 bp, Artificial
  Synthetic oligonucleotide
aggggaatttacgaatcggacaacgccccctgtcgccctctttgcggggc

SEQ ID NO: 237265 - DNA, 50 bp, Artificial
  Synthetic oligonucleotide
aacgcgccctggggtgagtttcgaaccagactctcatgccggttccctta

SEQ ID NO: 237266 - DNA, 50 bp, Artificial
  Synthetic oligonucleotide
aggggcagacggggcgcatataggaatgtgatccgcgtttgtcgcctgtt

SEQ ID NO: 237267 - DNA, 50 bp, Artificial
  Synthetic oligonucleotide
aggggcgaaacggcgcttctattagcagccgcggtggatatggcaagcaa

SEQ ID NO: 237268 - DNA, 50 bp, Artificial
  Synthetic oligonucleotide
tccgtcggtcgtttaacccagtctgcccccgcggttgatatcggtttgga

SEQ ID NO: 237269 - DNA, 50 bp, Artificial
  Synthetic oligonucleotide
aacgctgccaacgtcttaggccccgctatgccgtctggtgggaataaccc

SEQ ID NO: 237270 - DNA, 59 bp, Artificial
  Synthetic oligonucleotide
ccaagccgcttacgcgtcgctacagccttgactctgctctgtcgttccttttctttgat

SEQ ID NO: 237271 - DNA, 50 bp, Artificial
  Synthetic oligonucleotide
agggggtaaggggcggcagggcaagtggggaaccggaaagctgtcgcacg

SEQ ID NO: 237272 - DNA, 50 bp, Artificial
  Synthetic oligonucleotide
acagggtccatcgcaatccttcgaccggcctgagctggagcgggacgcaa

SEQ ID NO: 237273 - DNA, 50 bp, Artificial
  Synthetic oligonucleotide
aggggtggcagtgtcgattatttcgttgccgatgcgaagctgggcgggcg

SEQ ID NO: 237274 - DNA, 50 bp, Artificial
  Synthetic oligonucleotide
acatggggccctacttaggcgcttcgggcagcaaacgctagccgaagggg

SEQ ID NO: 237275 - DNA, 50 bp, Artificial
  Synthetic oligonucleotide
agtcgccgggggacctcgcaggacgaggaacctcagaaaaagtagcgcag

SEQ ID NO: 237276 - DNA, 50 bp, Artificial
  Synthetic oligonucleotide
agtcggctgagggtggtgggatcgccgtccttgtatgcggtcatgcgggt

SEQ ID NO: 237277 - DNA, 50 bp, Artificial
  Synthetic oligonucleotide
agtcggggttccggccttagcaaaatgggttttgggcccgtcactgcgga

SEQ ID NO: 237278 - DNA, 50 bp, Artificial
  Synthetic oligonucleotide
agcctccattcgacgtggcgctagccttttcggccttgccgtgaacgagc

SEQ ID NO: 237279 - DNA, 50 bp, Artificial
  Synthetic oligonucleotide
aaaggcctaatctctgaccgtgatattgcaagccgcgacagtttctacgc

SEQ ID NO: 237280 - DNA, 50 bp, Artificial
  Synthetic oligonucleotide
agtctgacgcgcgaagcattgaggcagatcaagaggctgcctgcccctgc

SEQ ID NO: 237281 - DNA, 58 bp, Artificial
  Synthetic oligonucleotide
ccaatttcgctaaaaaccagcgtgttgcttagattggtagtgctgcgtcaaaatgcgt

SEQ ID NO: 237282 - DNA, 50 bp, Artificial
  Synthetic oligonucleotide
actaggcacctcgccccggaaaggggatcaggcgcaaagcccctgcagga

SEQ ID NO: 237283 - DNA, 50 bp, Artificial
  Synthetic oligonucleotide
agtgcgcccgaccacggagcggatcaccttctcccgacatcatcgatcag

SEQ ID NO: 237284 - DNA, 50 bp, Artificial
  Synthetic oligonucleotide
agtgcgcgactctcgtctgtggaggcgcagaccatttgacatgcgaaccg

SEQ ID NO: 237285 - DNA, 50 bp, Artificial
  Synthetic oligonucleotide
agtggcaggcctggaaatgcggaacgcctgtaccaccaataccgcatcga

SEQ ID NO: 237286 - DNA, 50 bp, Artificial
  Synthetic oligonucleotide
acaatggagggcccgaacgcacccctttgccgtacccgttcggattcgtc

SEQ ID NO: 237287 - DNA, 50 bp, Artificial
  Synthetic oligonucleotide
agtggcattcctccgagcgcgacactagatagcgggccaatcgcgactca

SEQ ID NO: 237288 - DNA, 50 bp, Artificial
  Synthetic oligonucleotide
agtgggctcaggcggacacgcaccgacggatatcctccacacggcgtcga

SEQ ID NO: 237289 - DNA, 50 bp, Artificial
  Synthetic oligonucleotide
agacaggccccgtcattcgcccgacgcgtcctttcggtgtttcaacccat

SEQ ID NO: 237290 - DNA, 50 bp, Artificial
  Synthetic oligonucleotide
tacctgttcgaaaacagggccgcgtatcggtttgagcccgcgcactcgtc

SEQ ID NO: 237291 - DNA, 50 bp, Artificial
  Synthetic oligonucleotide
agtggggcacgctggagtgcgatgaaaacatgatgacctcgctccccggc

SEQ ID NO: 237292 - DNA, 57 bp, Artificial
  Synthetic oligonucleotide
ccaccgatgaaacgctcgggtaaacgaagcctcggaactgtagcccatctcagtcgc

SEQ ID NO: 237293 - DNA, 50 bp, Artificial
  Synthetic oligonucleotide
agcctcacgttctttcggcaaaagccatgatgcgccaccctgcggctata

SEQ ID NO: 237294 - DNA, 50 bp, Artificial
  Synthetic oligonucleotide
aaaaccgcgcagccaactgggttggtagaccgcgcctacaccccacgaac

SEQ ID NO: 237295 - DNA, 50 bp, Artificial
  Synthetic oligonucleotide
acttggctcccgctccatgttcgatgctcgtgcgacgcccgatttcgggg

SEQ ID NO: 237296 - DNA, 50 bp, Artificial
  Synthetic oligonucleotide
gaaaaagcgggcagggcaccccgcataacggcgcgcgttacccaaaggct

SEQ ID NO: 237297 - DNA, 50 bp, Artificial
  Synthetic oligonucleotide
actaggacagcggacatgggattgtccccgagacatggctccgttcccga

SEQ ID NO: 237298 - DNA, 50 bp, Artificial
  Synthetic oligonucleotide
agtgtagtgtgtggtcccaggtaagcgctcccccgaaaagcacccggaca

SEQ ID NO: 237299 - DNA, 50 bp, Artificial
  Synthetic oligonucleotide
agcctccgagcgtcgttagcgcgccttcgttcatgttccaacacaaggcg

SEQ ID NO: 237300 - DNA, 50 bp, Artificial
  Synthetic oligonucleotide
agtactgctgagcgagagagctacgtcgcgagcccgaaaatgccaccggc

SEQ ID NO: 237301 - DNA, 50 bp, Artificial
  Synthetic oligonucleotide
acacatttcgtttcgcgttcgcaggaccgcccggcactcgcagtgtcagg

SEQ ID NO: 237302 - DNA, 50 bp, Artificial
  Synthetic oligonucleotide
agtcaaccctccgcatcttggtgtctcaactcgaaaacccagactggcct

SEQ ID NO: 237303 - DNA, 60 bp, Artificial
  Synthetic oligonucleotide
ccatatagaagatttgtcagatacgttgagaataatgaattctggttggcagcgtttaaa

SEQ ID NO: 237304 - DNA, 50 bp, Artificial
  Synthetic oligonucleotide
agagccaccgacagctgtgtccggcccaagattttgtgtgaagccacgcc

SEQ ID NO: 237305 - DNA, 50 bp, Artificial
  Synthetic oligonucleotide
agagcatcgcccaggtccggctatcaccgatgggtgcgccatcgtgtacc

SEQ ID NO: 237306 - DNA, 50 bp, Artificial
  Synthetic oligonucleotide
tcaatcgggttccggttcgtatagagggcgacaatgcaaacacccgtcaa

SEQ ID NO: 237307 - DNA, 50 bp, Artificial
  Synthetic oligonucleotide
agcctcccggtcatgtcttgttttggcaactctagggcccgggcgtgcag

SEQ ID NO: 237308 - DNA, 50 bp, Artificial
  Synthetic oligonucleotide
actcacgtagttgcctctccgcagtcgcgcaaaggtagacaggccgcgac

SEQ ID NO: 237309 - DNA, 50 bp, Artificial
  Synthetic oligonucleotide
agagcaccgacccgatagtaccggcgctgacggccatagggcttggagaa

SEQ ID NO: 237310 - DNA, 50 bp, Artificial
  Synthetic oligonucleotide
tatgttccgaacgatttgcaccgattataaaccccgtttaacgagacgct

SEQ ID NO: 237311 - DNA, 50 bp, Artificial
  Synthetic oligonucleotide
aactcatgccgtgccttctggttgaagggacaccacattccggagccccc

SEQ ID NO: 237312 - DNA, 50 bp, Artificial
  Synthetic oligonucleotide
tatgtccgccaatctgtagtcttggcaccgatcgcgtctatcacaactcg

SEQ ID NO: 237313 - DNA, 50 bp, Artificial
  Synthetic oligonucleotide
tgggcgccgttgaaagccaactgcccttatcccgtattgccgccaaagcg

SEQ ID NO: 237314 - DNA, 60 bp, Artificial
  Synthetic oligonucleotide
cggatgctctgcctggtctggagatggttctcgccaggcaaggggaggatcgcgcgtttc

SEQ ID NO: 237315 - DNA, 57 bp, Artificial
  Synthetic oligonucleotide
ccatggacgatttaggcgtaatatgccagatcctattcctgttgtcgttttagggcg

SEQ ID NO: 237316 - DNA, 50 bp, Artificial
  Synthetic oligonucleotide
aaagtcgatgtgcgccccttgtgggacgctcgcttcaacgccctgctttc

SEQ ID NO: 237317 - DNA, 50 bp, Artificial
  Synthetic oligonucleotide
acatgagattacggtacttgcgcagattgtagctttccctgcttcgagat

SEQ ID NO: 237318 - DNA, 50 bp, Artificial
  Synthetic oligonucleotide
agactcgcaacgccttacgcccgagtgcgaattgatgggacccagccgat

SEQ ID NO: 237319 - DNA, 50 bp, Artificial
  Synthetic oligonucleotide
tgggtcttagcggcaatattcggcatatgataagaggcaatcgtaggaat

SEQ ID NO: 237320 - DNA, 50 bp, Artificial
  Synthetic oligonucleotide
agccgctccccatatgaccgtcatctcgggccatgaaccgtcagtcctta

SEQ ID NO: 237321 - DNA, 50 bp, Artificial
  Synthetic oligonucleotide
agtccggaacgacttcattttatccaggccggccgagtgacacgctcggg

SEQ ID NO: 237322 - DNA, 50 bp, Artificial
  Synthetic oligonucleotide
acaggcaagccgcgttggcagtgcaacatacctatccgggttcgcgttgc

SEQ ID NO: 237323 - DNA, 50 bp, Artificial
  Synthetic oligonucleotide
agacctgtccgatttccccgtgcgttagatattccgcccggttcggcgta

SEQ ID NO: 237324 - DNA, 50 bp, Artificial
  Synthetic oligonucleotide
agtccggttccgatatcgtcacatgcgtcagccacgcgacttcaggggtg

SEQ ID NO: 237325 - DNA, 50 bp, Artificial
  Synthetic oligonucleotide
aacccatcccctaatggacggcccgcaccatttaggctgcgacgttctcc

SEQ ID NO: 237326 - DNA, 60 bp, Artificial
  Synthetic oligonucleotide
ccatggggtgagctattctatcggatggtgaagctctgtctgctgtatgttgctgcgacg

SEQ ID NO: 237327 - DNA, 50 bp, Artificial
  Synthetic oligonucleotide
agcggacgccgtgaacataccagccgccatgtctccagcgggaataggta

SEQ ID NO: 237328 - DNA, 50 bp, Artificial
  Synthetic oligonucleotide
agcggcacagaccattcgggagccgactaaaactgccccctcgagtgcca

SEQ ID NO: 237329 - DNA, 50 bp, Artificial
  Synthetic oligonucleotide
aaagcaggcggaccgagcctcatgccgtgcctaaatctgcagccgacgtg

SEQ ID NO: 237330 - DNA, 50 bp, Artificial
  Synthetic oligonucleotide
agcggcactggacattgctgaccggagatggagctctgaggcgccttgcg

SEQ ID NO: 237331 - DNA, 50 bp, Artificial
  Synthetic oligonucleotide
agcaccgggccgatggaacaagatacgcccgcggcgacttctacacgtcc

SEQ ID NO: 237332 - DNA, 50 bp, Artificial
  Synthetic oligonucleotide
aacccgacgcggcataccggccaagaatgtcctcgcttgtcgaaagcgat

SEQ ID NO: 237333 - DNA, 50 bp, Artificial
  Synthetic oligonucleotide
agcacatcgtgagaaaaaccgtgcgtggattgccactcgtttgcccgcga

SEQ ID NO: 237334 - DNA, 50 bp, Artificial
  Synthetic oligonucleotide
agcggccgcataccaggcgtttcgcaagaacgtcatatcgcctctccggt

SEQ ID NO: 237335 - DNA, 50 bp, Artificial
  Synthetic oligonucleotide
agcaatggagcccgaaggaagggagtttgggccgtattgtgcagcggttg

SEQ ID NO: 237336 - DNA, 50 bp, Artificial
  Synthetic oligonucleotide
agcaatcgcctcgttcgcaatccttcagcttgcctcgccggcatttgcac

SEQ ID NO: 237337 - DNA, 54 bp, Artificial
  Synthetic oligonucleotide
ccatgtggcgaacagctcccttcccgctggcgggaagggcggggggatgggtgg

SEQ ID NO: 237338 - DNA, 50 bp, Artificial
  Synthetic oligonucleotide
aaacggcacctcacgctttgtttacccggggcgagctaggagctagcctc

SEQ ID NO: 237339 - DNA, 50 bp, Artificial
  Synthetic oligonucleotide
tgatgcgagtcttcccggtggcattcttcggagcccccgttcccgggctg

SEQ ID NO: 237340 - DNA, 50 bp, Artificial
  Synthetic oligonucleotide
aaccctccgccccagcccgacggaagaatgactaaccccttgtcacgggc

SEQ ID NO: 237341 - DNA, 50 bp, Artificial
  Synthetic oligonucleotide
agcgggcggtgaaagcgttgaagtccatggccctacaatgccatgtgggt

SEQ ID NO: 237342 - DNA, 50 bp, Artificial
  Synthetic oligonucleotide
aaccgagcggggaagcgcccatctagtttgaccgccgaaacagtcaaccc

SEQ ID NO: 237343 - DNA, 50 bp, Artificial
  Synthetic oligonucleotide
aaccggcctcaaattctggtgcgcggacacttaaagcggtgggcgagggg

SEQ ID NO: 237344 - DNA, 50 bp, Artificial
  Synthetic oligonucleotide
agcgtaacctgacagacgcggttcggtcatgcgaccggcctaacgcccct

SEQ ID NO: 237345 - DNA, 50 bp, Artificial
  Synthetic oligonucleotide
agcgaaacaggtgtactcccaggcggtttacgggtgagaagacgcgcccc

SEQ ID NO: 237346 - DNA, 50 bp, Artificial
  Synthetic oligonucleotide
tgaccgctattattcctccgcaatcggcgagtgacacgctttttgcggat

SEQ ID NO: 237347 - DNA, 50 bp, Artificial
  Synthetic oligonucleotide
agctctcagggtccagcatcggggtcggttccgcagctgccgatctaaga

SEQ ID NO: 237348 - DNA, 60 bp, Artificial
  Synthetic oligonucleotide
atcgtggcatcgagtgagggcggggtaacagccatcgactacccaagcgcagcgagatgc

SEQ ID NO: 237349 - DNA, 50 bp, Artificial
  Synthetic oligonucleotide
agcaaggcgacagggtttggaactccaggcgagcagtgaggtggaagcaa

SEQ ID NO: 237350 - DNA, 50 bp, Artificial
  Synthetic oligonucleotide
agaaccttgggccggagtcactcccacctcagaagctctatccaccgcct

SEQ ID NO: 237351 - DNA, 50 bp, Artificial
  Synthetic oligonucleotide
aacaaatcccgggcgatggcggttaggactttatcgccggtcgaggggcc

SEQ ID NO: 237352 - DNA, 50 bp, Artificial
  Synthetic oligonucleotide
agccgatgccgcagtggcgaatgcgaaggtcgatacccccagaagcaagg

SEQ ID NO: 237353 - DNA, 50 bp, Artificial
  Synthetic oligonucleotide
agcgacattccgcacgatccggattggcactttggcgagctttcgaacgg

SEQ ID NO: 237354 - DNA, 50 bp, Artificial
  Synthetic oligonucleotide
actttccccgccagacgatgttcctcctgcgaacggactgaggccggaag

SEQ ID NO: 237355 - DNA, 50 bp, Artificial
  Synthetic oligonucleotide
tgctcgctcggattgccccagatgacagctgcggacccaggcgcaattcg

SEQ ID NO: 237356 - DNA, 50 bp, Artificial
  Synthetic oligonucleotide
aacacgcccaagcgccctaaactaggtttagaggtccccctgaagcccga

SEQ ID NO: 237357 - DNA, 50 bp, Artificial
  Synthetic oligonucleotide
agcgagagagctacgtcgcgagcccgaaaatgccaccggcgggcactggc

SEQ ID NO: 237358 - DNA, 50 bp, Artificial
  Synthetic oligonucleotide
acacggcaattaccttggcttcgaaccagggacggcgccatgcgggcatg

SEQ ID NO: 237359 - DNA, 60 bp, Artificial
  Synthetic oligonucleotide
atctagagaaaaagccgacatatggcttcaattgggacaacgtatacaagcgttatatca

SEQ ID NO: 237360 - DNA, 50 bp, Artificial
  Synthetic oligonucleotide
aacagcttggcctgtcggatgcgccaacactgcatcgggtggaccggatg

SEQ ID NO: 237361 - DNA, 50 bp, Artificial
  Synthetic oligonucleotide
agcgattgcgtgccgatccgctacccgcctctttccgtgaacctgcccga

SEQ ID NO: 237362 - DNA, 50 bp, Artificial
  Synthetic oligonucleotide
agcgcaccgttctgtcgaccaggccccagacgtagaagaagtgccatgtg

SEQ ID NO: 237363 - DNA, 50 bp, Artificial
  Synthetic oligonucleotide
agcgcagtgaagtggtcgcagcgtctgcgtgatacgggcaacgccggttc

SEQ ID NO: 237364 - DNA, 50 bp, Artificial
  Synthetic oligonucleotide
agcgccaagggacttcgcagcgggcaagccattgcaatagggcgtgttgc

SEQ ID NO: 237365 - DNA, 50 bp, Artificial
  Synthetic oligonucleotide
agcccattaaggcgcccagcggtttagcacccttagcggctagatccgaa

SEQ ID NO: 237366 - DNA, 50 bp, Artificial
  Synthetic oligonucleotide
aaagcggtcagctagcgcttcatgcaggtgcattcggtgggtaggacccg

SEQ ID NO: 237367 - DNA, 50 bp, Artificial
  Synthetic oligonucleotide
agcgaatgtagccgtgcatctgcgcacgatcaggccaaagcacgccggcg

SEQ ID NO: 237368 - DNA, 50 bp, Artificial
  Synthetic oligonucleotide
aaagcccctgaattgcgcgggattgccccacacaggctctgcacaggcgc

SEQ ID NO: 237369 - DNA, 50 bp, Artificial
  Synthetic oligonucleotide
agccacagccgagaccgtgctccaagcgaaagcgagagctggcaacatag

SEQ ID NO: 237370 - DNA, 57 bp, Artificial
  Synthetic oligonucleotide
atcttgggttagtgcggtgggaattgactcgcgggtgctacaaatgtcccgtcgatc

SEQ ID NO: 237371 - DNA, 50 bp, Artificial
  Synthetic oligonucleotide
agcgccacgcaggaactcggacattccgcttgtaacgtggttgcgagcgt

SEQ ID NO: 237372 - DNA, 50 bp, Artificial
  Synthetic oligonucleotide
aaagcccactcccctctcatgcgttcgcagcgaatatcccgacaggcacg

SEQ ID NO: 237373 - DNA, 50 bp, Artificial
  Synthetic oligonucleotide
tgcccgaagggaagatcaggccctatgtcggggcgggggtgaattacacg

SEQ ID NO: 237374 - DNA, 50 bp, Artificial
  Synthetic oligonucleotide
agcgccctccacgatgaagggccggtcttcgtccttcggaaggttcaccc

SEQ ID NO: 237375 - DNA, 50 bp, Artificial
  Synthetic oligonucleotide
acaggcccaaccgctcggaatacgcgtcgtcagccccatgttcgaccgga

SEQ ID NO: 237376 - DNA, 50 bp, Artificial
  Synthetic oligonucleotide
agcgcctgttacggaccgctatccatcctgccgattgccgcgtgaaatga

SEQ ID NO: 237377 - DNA, 50 bp, Artificial
  Synthetic oligonucleotide
agatgcgtcggtcgccatgtcaactctttgctcggggccgcaagcctatc

SEQ ID NO: 237378 - DNA, 50 bp, Artificial
  Synthetic oligonucleotide
aacgattgtccggcatagctgatcgtggaggcggaatagctgcccgccga

SEQ ID NO: 237379 - DNA, 50 bp, Artificial
  Synthetic oligonucleotide
agaacgggaacaggcgtgtccctgttgaccgcaccccgaacatcgttgga

SEQ ID NO: 237380 - DNA, 50 bp, Artificial
  Synthetic oligonucleotide
agatgcagcgtagctctcagggtccagcatcggggtcggttccgcagctg

SEQ ID NO: 237381 - DNA, 52 bp, Artificial
  Synthetic oligonucleotide
atctttaaaaatcttgagacataataaaaaaaagccccaaatatctggcttt

SEQ ID NO: 237382 - DNA, 50 bp, Artificial
  Synthetic oligonucleotide
aggatcgccgatcctgttaggcgcaagtccggccgacctgaatagccccc

SEQ ID NO: 237383 - DNA, 50 bp, Artificial
  Synthetic oligonucleotide
ctgtgcgcaacaggtgggctacgcctaaacccgttcccggcccaagaatg

SEQ ID NO: 237384 - DNA, 50 bp, Artificial
  Synthetic oligonucleotide
acaggacaggttcctcggctgccccaagggcgggataatgaagggatcgc

SEQ ID NO: 237385 - DNA, 50 bp, Artificial
  Synthetic oligonucleotide
aggcacgctctacacccccgcttgatgtgagtcgcaccgtcgtggccccc

SEQ ID NO: 237386 - DNA, 50 bp, Artificial
  Synthetic oligonucleotide
actgcggacggggtcgagtggcggcgtcagggtggacatgcacggctctc

SEQ ID NO: 237387 - DNA, 50 bp, Artificial
  Synthetic oligonucleotide
aggccccactctatcgacatgccctttgcctatgggttagggcggacgtg

SEQ ID NO: 237388 - DNA, 50 bp, Artificial
  Synthetic oligonucleotide
agatctatccgggcagccatggaccgctaggcatggcacgtgaggacatt

SEQ ID NO: 237389 - DNA, 50 bp, Artificial
  Synthetic oligonucleotide
tcgtctccccttgaccgagattcctcaggccgctacttctgccgtaggca

SEQ ID NO: 237390 - DNA, 50 bp, Artificial
  Synthetic oligonucleotide
acatcagtcgctagtcggggccgttaggtgtcgcgcccctcttcccagtt

SEQ ID NO: 237391 - DNA, 50 bp, Artificial
  Synthetic oligonucleotide
aggcccggtcgttcccaataggccgaatgtccgcattccggaatcacgac

SEQ ID NO: 237392 - DNA, 56 bp, Artificial
  Synthetic oligonucleotide
atgaaacaaccgggacggcatcgggcgtacaatcgacataggcgccccacgcggaa

SEQ ID NO: 237393 - DNA, 50 bp, Artificial
  Synthetic oligonucleotide
acacggcaagctcgcaaaacgtggctcgccataggtacgacgctgctcgt

SEQ ID NO: 237394 - DNA, 50 bp, Artificial
  Synthetic oligonucleotide
aacgcacgcccagatcctcacaaagcgccgcgagttcgtcattctccgaa

SEQ ID NO: 237395 - DNA, 50 bp, Artificial
  Synthetic oligonucleotide
aggccgccaatgagaccctcagggcaggctatattgttcgccgcctcagg

SEQ ID NO: 237396 - DNA, 50 bp, Artificial
  Synthetic oligonucleotide
aggccgcttgatacgacaacctctccgccccatatccggggcatattggg

SEQ ID NO: 237397 - DNA, 50 bp, Artificial
  Synthetic oligonucleotide
ttgcgcccttgtcagcctttatgtgagggctcgggggcacgtctatgtga

SEQ ID NO: 237398 - DNA, 50 bp, Artificial
  Synthetic oligonucleotide
agaagccaagcggtgcccaaggctcccgccagtcccctcatcctgatgca

SEQ ID NO: 237399 - DNA, 50 bp, Artificial
  Synthetic oligonucleotide
aggcgatacccgatccgtccgggtgatgattgtacgtgcagcggccatag

SEQ ID NO: 237400 - DNA, 50 bp, Artificial
  Synthetic oligonucleotide
aggcgcggcgaaatttgcatactcatggtaacctgccagcgagcggtgcg

SEQ ID NO: 237401 - DNA, 50 bp, Artificial
  Synthetic oligonucleotide
aggcggcgacagcccgttacgttacttacgctcgcgtaaaccattggggg

SEQ ID NO: 237402 - DNA, 50 bp, Artificial
  Synthetic oligonucleotide
actgtgaagctcggcgcgactttgctggtcctcgctggggtcacgtttgt

SEQ ID NO: 237403 - DNA, 56 bp, Artificial
  Synthetic oligonucleotide
atgatcttgacagacagtaatttcgcggcgccccttccgtagggaccgcgtgggtc

SEQ ID NO: 237404 - DNA, 50 bp, Artificial
  Synthetic oligonucleotide
aaccgtccagcgtcgctaaccttcggattggagagccgaattgcggccgg

SEQ ID NO: 237405 - DNA, 50 bp, Artificial
  Synthetic oligonucleotide
aggaaagacgccaaggtttggcgcggctcctatcggctggaacccctaca

SEQ ID NO: 237406 - DNA, 50 bp, Artificial
  Synthetic oligonucleotide
agcaacggacgctgactccattgctccggtgccaagcgctcgcctctcgc

SEQ ID NO: 237407 - DNA, 50 bp, Artificial
  Synthetic oligonucleotide
aaccgtccgtgatacagggaaatgccgcgtactcgcccctgagcgttcgc

SEQ ID NO: 237408 - DNA, 50 bp, Artificial
  Synthetic oligonucleotide
agcaaccaaccggagcaacacccactcgtcaccctgaactcgcttcaggg

SEQ ID NO: 237409 - DNA, 50 bp, Artificial
  Synthetic oligonucleotide
aacctggaaagtgccctgcctgccgttttgagggcgtaacacgcagccac

SEQ ID NO: 237410 - DNA, 50 bp, Artificial
  Synthetic oligonucleotide
aggaagcaagacgccggagggagccccaaacttcgactgcatcgcgcctc

SEQ ID NO: 237411 - DNA, 50 bp, Artificial
  Synthetic oligonucleotide
actgtagccgatagcccggttggaggggcacgagcggagttttccccgcc

SEQ ID NO: 237412 - DNA, 50 bp, Artificial
  Synthetic oligonucleotide
aggaatcccacgtagttgggcgacaggacataggcgttccattccgcccc

SEQ ID NO: 237413 - DNA, 50 bp, Artificial
  Synthetic oligonucleotide
tcttgcaacctttccggcgattggatacagcccgccaacgcaatacggct

SEQ ID NO: 237414 - DNA, 60 bp, Artificial
  Synthetic oligonucleotide
atggctctgttcgaggatttggtctcatcacgacgaagactattgcccaatcgagtaatc

SEQ ID NO: 237415 - DNA, 50 bp, Artificial
  Synthetic oligonucleotide
aggacgattctcaagccgcgtttctggggagaattttaggttgcaagatg

SEQ ID NO: 237416 - DNA, 50 bp, Artificial
  Synthetic oligonucleotide
tctgtgggggattggtggtctatcgctagcgctgcttgtgtccctgccgc

SEQ ID NO: 237417 - DNA, 50 bp, Artificial
  Synthetic oligonucleotide
actgggtttggccagcgcccttcgggtcgccagccgtgactaggagaaga

SEQ ID NO: 237418 - DNA, 50 bp, Artificial
  Synthetic oligonucleotide
aggacgtcgcgtctcagcatcacctttccccttcaccgcccatgctatcg

SEQ ID NO: 237419 - DNA, 50 bp, Artificial
  Synthetic oligonucleotide
aggagacatgcgtccctagccgacaccctttgacggagaccggccccgtg

SEQ ID NO: 237420 - DNA, 50 bp, Artificial
  Synthetic oligonucleotide
aggagatcgccgcaaatgaccgggccgggaatacgcaataaccgcaaaga

SEQ ID NO: 237421 - DNA, 50 bp, Artificial
  Synthetic oligonucleotide
agcctgtcgaacgggccttcgtgtccgttccggggtcagtccttaggaat

SEQ ID NO: 237422 - DNA, 50 bp, Artificial
  Synthetic oligonucleotide
ttcggggaagttgtcgttgcgtgcctggaacttggcgatccaaggctggt

SEQ ID NO: 237423 - DNA, 50 bp, Artificial
  Synthetic oligonucleotide
aggagcgaagggcggtgggacacgcacatggaccgacagcgacatcggta

SEQ ID NO: 237424 - DNA, 50 bp, Artificial
  Synthetic oligonucleotide
agcaaagcgactgggggcaacaccgggggaagtgctcgtgattgaagaca

SEQ ID NO: 237425 - DNA, 60 bp, Artificial
  Synthetic oligonucleotide
cggcgctggcagcctgtttgacgccctgccagccaacgtcctggcgttgacggttgaagc

SEQ ID NO: 237426 - DNA, 58 bp, Artificial
  Synthetic oligonucleotide
atgtccgatccccacccaaatcactcaatccggcaagtcttgaatttgtccacgctag

SEQ ID NO: 237427 - DNA, 50 bp, Artificial
  Synthetic oligonucleotide
agattttgcgatccagtctggcgctgccccctggtcaaggcgcccaatgc

SEQ ID NO: 237428 - DNA, 50 bp, Artificial
  Synthetic oligonucleotide
actgggggcaacaccgggggaagtgctcgtgattgaagacagcgtcgggg

SEQ ID NO: 237429 - DNA, 50 bp, Artificial
  Synthetic oligonucleotide
tctcctcacagagagcacgcgctgcgttgggacagcgtggcccgttcacc

SEQ ID NO: 237430 - DNA, 50 bp, Artificial
  Synthetic oligonucleotide
acgaagctgtgaggcgcggcagccaacctggaaagcaggcggaccgagcc

SEQ ID NO: 237431 - DNA, 50 bp, Artificial
  Synthetic oligonucleotide
acgaacccgaccgaccctccaatggtgcgacaccgggcgacctagcccct

SEQ ID NO: 237432 - DNA, 50 bp, Artificial
  Synthetic oligonucleotide
ccaccgcacacgggcgtcaccaacacgcgtgcgatcgtacatctgccact

SEQ ID NO: 237433 - DNA, 50 bp, Artificial
  Synthetic oligonucleotide
aatatccgctgattgtagcaggttttagtttcgttagatcggtctggcag

SEQ ID NO: 237434 - DNA, 50 bp, Artificial
  Synthetic oligonucleotide
ccaccggttaccgggataggacggctcagtagggagcccaatgctgcaat

SEQ ID NO: 237435 - DNA, 50 bp, Artificial
  Synthetic oligonucleotide
ccactcgcggcatgggccggtgatggagtgtccgacaggcacaaaggcat

SEQ ID NO: 237436 - DNA, 50 bp, Artificial
  Synthetic oligonucleotide
ccagccgccgtgctaacgccatggaaggatcggtgcgaatttgcccatta

SEQ ID NO: 237437 - DNA, 58 bp, Artificial
  Synthetic oligonucleotide
atgttcacaccgcagaaaggttgcgtaatatggtccagacccagtcttccccttggca

SEQ ID NO: 237438 - DNA, 50 bp, Artificial
  Synthetic oligonucleotide
ccagcgatagcactggcgcccccaggtgagcgagcgaccgccaagctgat

SEQ ID NO: 237439 - DNA, 50 bp, Artificial
  Synthetic oligonucleotide
gctcgatgactcgcaatgtcgtgtcgctttcgggaacctattcagcctac

SEQ ID NO: 237440 - DNA, 50 bp, Artificial
  Synthetic oligonucleotide
gctcatgcaacgtgcgccagtacaaagtcgtgatgaagctctagccactt

SEQ ID NO: 237441 - DNA, 50 bp, Artificial
  Synthetic oligonucleotide
accccgcctagccgccattccgcagagccatcctatgtggccacgcagcc

SEQ ID NO: 237442 - DNA, 50 bp, Artificial
  Synthetic oligonucleotide
aatcatcgttggcccgccctagcgggaatacgaagggccggagacagcat

SEQ ID NO: 237443 - DNA, 50 bp, Artificial
  Synthetic oligonucleotide
aatccgaacgggtcgaaccctgcgaaaaactactggacggggtcgggcta

SEQ ID NO: 237444 - DNA, 50 bp, Artificial
  Synthetic oligonucleotide
acctttgtcgcaagtgccccagccgccatgctcctttagcccttatccct

SEQ ID NO: 237445 - DNA, 50 bp, Artificial
  Synthetic oligonucleotide
accccggtcgttgaagaaatgatgcggtcgctccatgccacagccggccc

SEQ ID NO: 237446 - DNA, 50 bp, Artificial
  Synthetic oligonucleotide
acctttggccagactgagccatgtcaccggccctaacaggacaggacggg

SEQ ID NO: 237447 - DNA, 50 bp, Artificial
  Synthetic oligonucleotide
acctttgcgggggtgcggagcctgatcgttggacccatcttttcggctga

SEQ ID NO: 237448 - DNA, 56 bp, Artificial
  Synthetic oligonucleotide
attactatgcggtcgacgttaagacagtcgccggggcccgagcgagccagttatcc

SEQ ID NO: 237449 - DNA, 50 bp, Artificial
  Synthetic oligonucleotide
ccatgtcctcaccccggcgaaggaaatccatgtgcgaccttggaaccgcg

SEQ ID NO: 237450 - DNA, 50 bp, Artificial
  Synthetic oligonucleotide
accttgagattggcgagcccccaccacgcttcgccagcccccggatgcag

SEQ ID NO: 237451 - DNA, 50 bp, Artificial
  Synthetic oligonucleotide
gcgtcatgcaatctgtcgctcaggcatgatcgcgagtcgatggggtgcgt

SEQ ID NO: 237452 - DNA, 50 bp, Artificial
  Synthetic oligonucleotide
acccctgcttacgagccgtccatcgcaagcacggacccagtccggatgcg

SEQ ID NO: 237453 - DNA, 50 bp, Artificial
  Synthetic oligonucleotide
gcgtagcttcttttcccatgcagctacggccaataaatcatcggttttag

SEQ ID NO: 237454 - DNA, 50 bp, Artificial
  Synthetic oligonucleotide
cccaatgggggcactcccgcggcggtgacggaccgaagcacgaactttcg

SEQ ID NO: 237455 - DNA, 50 bp, Artificial
  Synthetic oligonucleotide
gcggtggttatttctgcggtgcatagttgtatggccgcgcgtggggtcga

SEQ ID NO: 237456 - DNA, 50 bp, Artificial
  Synthetic oligonucleotide
aatccgacgcgagaaagaagcgtccggtgtcattgactgcgagcgtgccc

SEQ ID NO: 237457 - DNA, 50 bp, Artificial
  Synthetic oligonucleotide
ccccaagtcgctctgggacagcgttgccttgcgggtgaaaccattctggg

SEQ ID NO: 237458 - DNA, 50 bp, Artificial
  Synthetic oligonucleotide
ccccaggcaccagttgtaatcgttattggactgcgggcggacctgcggtc

SEQ ID NO: 237459 - DNA, 60 bp, Artificial
  Synthetic oligonucleotide
attagtttcgacgtcagatgcttttcatgcgccggctcggtaggctgggtcggcgctgga

SEQ ID NO: 237460 - DNA, 50 bp, Artificial
  Synthetic oligonucleotide
aatcctgggcagaggtgctttcaacccacgcaatccgggcgcaacagaat

SEQ ID NO: 237461 - DNA, 50 bp, Artificial
  Synthetic oligonucleotide
cgccttctgcctaaagatccggtgcaaggtcatcgccccagcgctagctt

SEQ ID NO: 237462 - DNA, 50 bp, Artificial
  Synthetic oligonucleotide
acccctggaaggcgtcacatccttccgctgcaagcacctgtagctggctt

SEQ ID NO: 237463 - DNA, 50 bp, Artificial
  Synthetic oligonucleotide
cagaagccttaacggcggggcctcgcgtccagtcagcgacggaatccttc

SEQ ID NO: 237464 - DNA, 50 bp, Artificial
  Synthetic oligonucleotide
acgccggagagatccgcaccagtacatcctagcctgcgcgggtccccgcc

SEQ ID NO: 237465 - DNA, 50 bp, Artificial
  Synthetic oligonucleotide
cagagggggttgcccgcgaaccgtcccttgcgatccttcaccatgaggaa

SEQ ID NO: 237466 - DNA, 50 bp, Artificial
  Synthetic oligonucleotide
aagtccggccgacctgaatagcccccgtcgagtctgtccgcttatgccaa

SEQ ID NO: 237467 - DNA, 50 bp, Artificial
  Synthetic oligonucleotide
acgcagtagccggcacttggctcccgctccatgttcgatgctcgtgcgac

SEQ ID NO: 237468 - DNA, 50 bp, Artificial
  Synthetic oligonucleotide
aagtgcgcatgaccatcgagagtcacgatgcgtgtcccgaggtcggcagt

SEQ ID NO: 237469 - DNA, 50 bp, Artificial
  Synthetic oligonucleotide
aattgcgcgggattgccccacacaggctctgcacaggcgcaaccgagcca

SEQ ID NO: 237470 - DNA, 56 bp, Artificial
  Synthetic oligonucleotide
attggtccttgcttccctcttatatatcgcggcccgtccttgaggcgctacccgct

SEQ ID NO: 237471 - DNA, 50 bp, Artificial
  Synthetic oligonucleotide
cagcgcttggcacagacggtccggcgggaatgaagtcaagattcggcatc

SEQ ID NO: 237472 - DNA, 50 bp, Artificial
  Synthetic oligonucleotide
aagttcgactatgctgcggtccgtgcaggcacgatgatggatccggtgct

SEQ ID NO: 237473 - DNA, 50 bp, Artificial
  Synthetic oligonucleotide
ggagtaaaatgcgtcgctaagccattccggtcggctcgccatctgttaaa

SEQ ID NO: 237474 - DNA, 50 bp, Artificial
  Synthetic oligonucleotide
aagttcgtgttgtgcggccgaccaccctttttgaactgcgtcttgcggga

SEQ ID NO: 237475 - DNA, 50 bp, Artificial
  Synthetic oligonucleotide
acgcacggcttgcctcgctacaattcgacatgcgtcccgaccagcgttcg

SEQ ID NO: 237476 - DNA, 50 bp, Artificial
  Synthetic oligonucleotide
caggcgcataatcgtcggccccgcttgcttcgacagtcggcacatagtcg

SEQ ID NO: 237477 - DNA, 50 bp, Artificial
  Synthetic oligonucleotide
cagtctcgctaaaacgcatgtgcccggttgaaaggcaggcgtctaccgcc

SEQ ID NO: 237478 - DNA, 50 bp, Artificial
  Synthetic oligonucleotide
cagtggcatcctgctgcgggtaactgagtgcgcgcttggtaatcgcgtcg

SEQ ID NO: 237479 - DNA, 50 bp, Artificial
  Synthetic oligonucleotide
acgcaaccctgaagccgacgcgcaaaaagggtggacgcccccgatccacc

SEQ ID NO: 237480 - DNA, 50 bp, Artificial
  Synthetic oligonucleotide
accattccccaccctcgcatctgggcagtccactcggcagagaaacctgg

SEQ ID NO: 237481 - DNA, 60 bp, Artificial
  Synthetic oligonucleotide
caaccaccaggtcactgggttcagacagagcgagcagctcatgaagcatgggctagtttg

SEQ ID NO: 237482 - DNA, 50 bp, Artificial
  Synthetic oligonucleotide
acgattgagcccgatccccagttgtggcctgcgacgagactaccgcccca

SEQ ID NO: 237483 - DNA, 50 bp, Artificial
  Synthetic oligonucleotide
catcgtcctattcccccttttgcccgctcgcacgtttgcgcacacctgat

SEQ ID NO: 237484 - DNA, 50 bp, Artificial
  Synthetic oligonucleotide
acgatgggctcaagcctcatcgcgggtttccttccattcgctgatcgccc

SEQ ID NO: 237485 - DNA, 50 bp, Artificial
  Synthetic oligonucleotide
acgagcctcagccattgtggcttggtcaatgcagcgggtggcttgccata

SEQ ID NO: 237486 - DNA, 50 bp, Artificial
  Synthetic oligonucleotide
acgacatgaccgtgggggcgatccgaaaagtctagcttcactccggggcg

SEQ ID NO: 237487 - DNA, 50 bp, Artificial
  Synthetic oligonucleotide
aatacaccggccaagcctcccctgcctgttcagcgcaaaaggctaggact

SEQ ID NO: 237488 - DNA, 50 bp, Artificial
  Synthetic oligonucleotide
aattgccttggttgtccacctgattgcgaaggcacgcggcaccgcacact

SEQ ID NO: 237489 - DNA, 50 bp, Artificial
  Synthetic oligonucleotide
cattggccccgcttcccatcttcgattaatagagagggccttttgagcgg

SEQ ID NO: 237490 - DNA, 50 bp, Artificial
  Synthetic oligonucleotide
accccatttcgccggtaggctgacccatttctcagctgacgtgcacacgg

SEQ ID NO: 237491 - DNA, 50 bp, Artificial
  Synthetic oligonucleotide
gacttcccctgttatacccccaaaaacagacagctccgcaccccgcccga

SEQ ID NO: 237492 - DNA, 59 bp, Artificial
  Synthetic oligonucleotide
caagaaattcgcccagacggttgatgccaagcccttccagcaattcgaggcttggataa

SEQ ID NO: 237493 - DNA, 50 bp, Artificial
  Synthetic oligonucleotide
cctgcatcgaagcccgcactgaacgcggtgcgcctaaggttccagtaccg

SEQ ID NO: 237494 - DNA, 50 bp, Artificial
  Synthetic oligonucleotide
accggacagagtcaaatcattcgcaagatacgtccgataatgcagcctct

SEQ ID NO: 237495 - DNA, 50 bp, Artificial
  Synthetic oligonucleotide
gcccgtcgggggttggcaggagtagaatgacggaccagatttcatcgcgg

SEQ ID NO: 237496 - DNA, 50 bp, Artificial
  Synthetic oligonucleotide
gatcgctctccactattttctgcgattgcggatcgtctcttcaaacctgc

SEQ ID NO: 237497 - DNA, 50 bp, Artificial
  Synthetic oligonucleotide
accggacaagcgtcccggcgacaggcagtgccaggcgtgacactttgccc

SEQ ID NO: 237498 - DNA, 50 bp, Artificial
  Synthetic oligonucleotide
cgaaagcgagacccagaccgatcggcagagcataggcgaacaggaccaga

SEQ ID NO: 237499 - DNA, 50 bp, Artificial
  Synthetic oligonucleotide
accgctagaacgacacggttgcagtcaggcccacggtgcgtggaagcgag

SEQ ID NO: 237500 - DNA, 50 bp, Artificial
  Synthetic oligonucleotide
accgcctcgacccccggtgccaaaccatcattcacatcggcactcatcga

SEQ ID NO: 237501 - DNA, 50 bp, Artificial
  Synthetic oligonucleotide
accgcaccctgacgatttcccagattggggtgccgcacaaccgggcatcc

SEQ ID NO: 237502 - DNA, 50 bp, Artificial
  Synthetic oligonucleotide
cgacccccgccaggcagaacagcgattttcggcgggtctgcgttcaggtt

SEQ ID NO: 237503 - DNA, 58 bp, Artificial
  Synthetic oligonucleotide
caatagcaagccgccctaaaacgacaacaggaataggatctggcatattacgcctaaa

SEQ ID NO: 237504 - DNA, 50 bp, Artificial
  Synthetic oligonucleotide
cgaccgctttcctcgaatgtccgagattgaggcggatccagacgggcagc

SEQ ID NO: 237505 - DNA, 50 bp, Artificial
  Synthetic oligonucleotide
accgcaagcgttcagacaggccccgtcattcgcccgacgcgtcctttcgg

SEQ ID NO: 237506 - DNA, 50 bp, Artificial
  Synthetic oligonucleotide
gcatgtttgccgttcctacgacagctgcctggtttgcacggtccacgcac

SEQ ID NO: 237507 - DNA, 50 bp, Artificial
  Synthetic oligonucleotide
cgactgccccctctgtctggccgggacaagatggcgaccgtgcaaggatc

SEQ ID NO: 237508 - DNA, 50 bp, Artificial
  Synthetic oligonucleotide
cggacggagtggaaaccatttaagcaagccgcgtgccagaagatggaaag

SEQ ID NO: 237509 - DNA, 50 bp, Artificial
  Synthetic oligonucleotide
gcataggaattggacaggatgttttgataacggaacccgccggtgagaga

SEQ ID NO: 237510 - DNA, 50 bp, Artificial
  Synthetic oligonucleotide
aatgcagaccgcatgaggcaccccggcgttctcgttgggccttgccttgg

SEQ ID NO: 237511 - DNA, 50 bp, Artificial
  Synthetic oligonucleotide
accgatgcgaccgtcctgttgatgggcgaacccggctcgggcaagaaaag

SEQ ID NO: 237512 - DNA, 50 bp, Artificial
  Synthetic oligonucleotide
cgagcgggataagcgccaagggacttcgcagcgggcaagccattgcaata

SEQ ID NO: 237513 - DNA, 50 bp, Artificial
  Synthetic oligonucleotide
cgatccgtaaggcctgcgccattggcatgcgaactccaaggatcggcttc

SEQ ID NO: 237514 - DNA, 60 bp, Artificial
  Synthetic oligonucleotide
cacgcttccccagcgtcgatgcgcttatgacggatttgcatgatggcgattgatcggccg

SEQ ID NO: 237515 - DNA, 50 bp, Artificial
  Synthetic oligonucleotide
aatgccagctggacgacaaccggcacctcgggttcccttctctatcgtga

SEQ ID NO: 237516 - DNA, 50 bp, Artificial
  Synthetic oligonucleotide
accgaggaaccaatttcctgccaggtggagccaacggataggcgaccccc

SEQ ID NO: 237517 - DNA, 50 bp, Artificial
  Synthetic oligonucleotide
aatgccgcgtactcgcccctgagcgttcgcgcgtgattgattcccgcaga

SEQ ID NO: 237518 - DNA, 50 bp, Artificial
  Synthetic oligonucleotide
cgcctgtcgacattggcggtatagtcctgatcgctcaggtaaagtttcga

SEQ ID NO: 237519 - DNA, 50 bp, Artificial
  Synthetic oligonucleotide
accgaacttgctcggcagccagtagccttcgtagaaacgcgtgaagcgcg

SEQ ID NO: 237520 - DNA, 50 bp, Artificial
  Synthetic oligonucleotide
aatggcgctgacacggcgcggcaggggaacgggcatggcaaatggctccg

SEQ ID NO: 237521 - DNA, 50 bp, Artificial
  Synthetic oligonucleotide
accctcggctcaactccacgaccgttcccgaaaccactgcgtgacgacgt

SEQ ID NO: 237522 - DNA, 50 bp, Artificial
  Synthetic oligonucleotide
aatgggtcgaaaggtcgtatgcacggcacgggtagcctgagccgactcgg

SEQ ID NO: 237523 - DNA, 50 bp, Artificial
  Synthetic oligonucleotide
aatgtctttccgagcgggggcatctttcggggcggaaaatcgggagtgga

SEQ ID NO: 237524 - DNA, 50 bp, Artificial
  Synthetic oligonucleotide
cgcctaaaagcccaaaaatcggcactttccgtaatacagccgctggctga

SEQ ID NO: 237525 - DNA, 60 bp, Artificial
  Synthetic oligonucleotide
cacgtaagttggcatgatcagtcgaatctggataagcattgcataacctcgccgattcca

SEQ ID NO: 237526 - DNA, 50 bp, Artificial
  Synthetic oligonucleotide
cccctgttatggcagggcgttacacccatactgaaacccttgcgcccggt

SEQ ID NO: 237527 - DNA, 50 bp, Artificial
  Synthetic oligonucleotide
accttcgccgattcacgacccgttcaataggccgcgcgcatgagtgacgg

SEQ ID NO: 237528 - DNA, 50 bp, Artificial
  Synthetic oligonucleotide
cggcggcatgtcggtccatgagcaattcgcgcaaggacgcataatcgctt

SEQ ID NO: 237529 - DNA, 50 bp, Artificial
  Synthetic oligonucleotide
ccctggcaagccataccggcaaatccgggaagcagggaacttactgggcc

SEQ ID NO: 237530 - DNA, 50 bp, Artificial
  Synthetic oligonucleotide
acctaacggcggaaaaacgagcgcccaaatgacgcttgcgcgcacgaggg

SEQ ID NO: 237531 - DNA, 50 bp, Artificial
  Synthetic oligonucleotide
ccgaacacaagcagaagtcttttcttgcgatgaacccgattggcaaaata

SEQ ID NO: 237532 - DNA, 50 bp, Artificial
  Synthetic oligonucleotide
ccgacacgccctaacaccaagggtcggatgcccaaaggatcacgacaggc

SEQ ID NO: 237533 - DNA, 50 bp, Artificial
  Synthetic oligonucleotide
ccgaccgctcgggtgtcaaatatgtccgcgcacaaggtgatgagcgctcc

SEQ ID NO: 237534 - DNA, 50 bp, Artificial
  Synthetic oligonucleotide
ccgaggcagcggcacctgataacgcggaggcaccggcgactgtctcttcc

SEQ ID NO: 237535 - DNA, 50 bp, Artificial
  Synthetic oligonucleotide
accgtgccttacccagcgcgactcggcacacttcggatcgagtgagcggg

SEQ ID NO: 237536 - DNA, 60 bp, Artificial
  Synthetic oligonucleotide
cggctgtcacctcgaagccgatatggttgcccgcgctgttgaagaactcgcaccgaaatc

SEQ ID NO: 237537 - DNA, 56 bp, Artificial
  Synthetic oligonucleotide
cactccccgcgctcgtctcggcatgatccgttgccgggagtttttggaggggagga

SEQ ID NO: 237538 - DNA, 50 bp, Artificial
  Synthetic oligonucleotide
accgtgaacgatgtcgcagcctacgcacgcgcttgctggaccgaatttga

SEQ ID NO: 237539 - DNA, 50 bp, Artificial
  Synthetic oligonucleotide
ccgattccgggaaagcttgcacgcgccggggtaaaggacatggtccgtat

SEQ ID NO: 237540 - DNA, 50 bp, Artificial
  Synthetic oligonucleotide
aatcgtgcgatggtcaggcccgattccggggcaatccacagcgtctgccc

SEQ ID NO: 237541 - DNA, 50 bp, Artificial
  Synthetic oligonucleotide
ccggtgatcggtagctccacgcactgtctccagaaggatgatccggcccg

SEQ ID NO: 237542 - DNA, 50 bp, Artificial
  Synthetic oligonucleotide
ccggttcaatcgcgggtaaaccgggcctctcgcttttgggtataggcggc

SEQ ID NO: 237543 - DNA, 50 bp, Artificial
  Synthetic oligonucleotide
ccgtcaaacatgcggccgatggaccgaaactctcgaaaacaggcggggga

SEQ ID NO: 237544 - DNA, 50 bp, Artificial
  Synthetic oligonucleotide
ccgtgagcctccgagggagcatgtccaggttcattggggcgggcatcaat

SEQ ID NO: 237545 - DNA, 50 bp, Artificial
  Synthetic oligonucleotide
accgggctcataccattgccgtagcggtggacccctccaagcaggcgcat

SEQ ID NO: 237546 - DNA, 50 bp, Artificial
  Synthetic oligonucleotide
ccgttcccactccttcgtgctcccgctccgcgcaaccgcacctttcgggc

SEQ ID NO: 237547 - DNA, 50 bp, Artificial
  Synthetic oligonucleotide
accgggcgaacgccgagtctcgtccccacgaaatcgtcgtcggctatccg

SEQ ID NO: 237548 - DNA, 59 bp, Artificial
  Synthetic oligonucleotide
cactgacagactggacaatgacgcactcgacaaaaatgggcttcttgtaatcgtaactt

SEQ ID NO: 237549 - DNA, 50 bp, Artificial
  Synthetic oligonucleotide
cctagcatgtccccgaggctgatcataccgacctgtccgcccataccggg

SEQ ID NO: 237550 - DNA, 50 bp, Artificial
  Synthetic oligonucleotide
cctcgacctcttggcgccaacccacgcttcccaatgcggaaagccaatct

SEQ ID NO: 237551 - DNA, 50 bp, Artificial
  Synthetic oligonucleotide
accgggcaggcttggctccctgagcttggcatggcgtattataaggcccg
